United States Patent Application Publication US 2018/0305689 A1 - sequence listing, part 142

SEQ ID NO: 1968871 - RNA, 19 nt, Artificial Sequence
  Description of Artificial Sequence: Synthetic oligonucleotide
  Antisense strand to SEQ ID NO: 1968870
uugaucacuguguaccuuc

SEQ ID NO: 1968872 - RNA, 19 nt, Artificial Sequence
  Description of Artificial Sequence: Synthetic oligonucleotide
  Sense strand starting at position 685 of SEQ ID NO: 1880461
gguacacagugaucaauac

SEQ ID NO: 1968873 - RNA, 19 nt, Artificial Sequence
  Description of Artificial Sequence: Synthetic oligonucleotide
  Antisense strand to SEQ ID NO: 1968872
guauugaucacuguguacc

SEQ ID NO: 1968874 - RNA, 19 nt, Artificial Sequence
  Description of Artificial Sequence: Synthetic oligonucleotide
  Sense strand starting at position 982 of SEQ ID NO: 1880461
cggugucaccucaguguga

SEQ ID NO: 1968875 - RNA, 19 nt, Artificial Sequence
  Description of Artificial Sequence: Synthetic oligonucleotide
  Antisense strand to SEQ ID NO: 1968874
ucacacugaggugacaccg

SEQ ID NO: 1968876 - RNA, 19 nt, Artificial Sequence
  Description of Artificial Sequence: Synthetic oligonucleotide
  Sense strand starting at position 987 of SEQ ID NO: 1880461
ucaccucagugugaggaau

SEQ ID NO: 1968877 - RNA, 19 nt, Artificial Sequence
  Description of Artificial Sequence: Synthetic oligonucleotide
  Antisense strand to SEQ ID NO: 1968876
auuccucacacugagguga

SEQ ID NO: 1968878 - RNA, 19 nt, Artificial Sequence
  Description of Artificial Sequence: Synthetic oligonucleotide
  Sense strand starting at position 1278 of SEQ ID NO: 1880461
aggccucagcuguguugaa

SEQ ID NO: 1968879 - RNA, 19 nt, Artificial Sequence
  Description of Artificial Sequence: Synthetic oligonucleotide
  Antisense strand to SEQ ID NO: 1968878
uucaacacagcugaggccu

SEQ ID NO: 1968880 - RNA, 19 nt, Artificial Sequence
  Description of Artificial Sequence: Synthetic oligonucleotide
  Sense strand starting at position 1279 of SEQ ID NO: 1880461
ggccucagcuguguugaaa

SEQ ID NO: 1968881 - RNA, 19 nt, Artificial Sequence
  Description of Artificial Sequence: Synthetic oligonucleotide
  Antisense strand to SEQ ID NO: 1968880
uuucaacacagcugaggcc

SEQ ID NO: 1968882 - RNA, 19 nt, Artificial Sequence
  Description of Artificial Sequence: Synthetic oligonucleotide
  Sense strand starting at position 2108 of SEQ ID NO: 1880461
uggagugugugacuuucau

SEQ ID NO: 1968883 - RNA, 19 nt, Artificial Sequence
  Description of Artificial Sequence: Synthetic oligonucleotide
  Antisense strand to SEQ ID NO: 1968882
augaaagucacacacucca

SEQ ID NO: 1968884 - RNA, 19 nt, Artificial Sequence
  Description of Artificial Sequence: Synthetic oligonucleotide
  Sense strand starting at position 2258 of SEQ ID NO: 1880461
aguguuagccacugcugaa

SEQ ID NO: 1968885 - RNA, 19 nt, Artificial Sequence
  Description of Artificial Sequence: Synthetic oligonucleotide
  Antisense strand to SEQ ID NO: 1968884
uucagcaguggcuaacacu

SEQ ID NO: 1968886 - RNA, 19 nt, Artificial Sequence
  Description of Artificial Sequence: Synthetic oligonucleotide
  Sense strand starting at position 2278 of SEQ ID NO: 1880461
gacuccuguugugugcaaa

SEQ ID NO: 1968887 - RNA, 19 nt, Artificial Sequence
  Description of Artificial Sequence: Synthetic oligonucleotide
  Antisense strand to SEQ ID NO: 1968886
uuugcacacaacaggaguc

SEQ ID NO: 1968888 - RNA, 19 nt, Artificial Sequence
  Description of Artificial Sequence: Synthetic oligonucleotide
  Sense strand starting at position 2334 of SEQ ID NO: 1880461
ugccauuauuuagggugaa

SEQ ID NO: 1968889 - RNA, 19 nt, Artificial Sequence
  Description of Artificial Sequence: Synthetic oligonucleotide
  Antisense strand to SEQ ID NO: 1968888
uucacccuaaauaauggca

SEQ ID NO: 1968890 - RNA, 19 nt, Artificial Sequence
  Description of Artificial Sequence: Synthetic oligonucleotide
  Sense strand starting at position 2377 of SEQ ID NO: 1880461
agacguggcuccucuugau

SEQ ID NO: 1968891 - RNA, 19 nt, Artificial Sequence
  Description of Artificial Sequence: Synthetic oligonucleotide
  Antisense strand to SEQ ID NO: 1968890
aucaagaggagccacgucu

SEQ ID NO: 1968892 - RNA, 19 nt, Artificial Sequence
  Description of Artificial Sequence: Synthetic oligonucleotide
  Sense strand starting at position 2412 of SEQ ID NO: 1880461
aagucauugcugggagcuu

SEQ ID NO: 1968893 - RNA, 19 nt, Artificial Sequence
  Description of Artificial Sequence: Synthetic oligonucleotide
  Antisense strand to SEQ ID NO: 1968892
aagcucccagcaaugacuu

SEQ ID NO: 1968894 - RNA, 19 nt, Artificial Sequence
  Description of Artificial Sequence: Synthetic oligonucleotide
  Sense strand starting at position 2580 of SEQ ID NO: 1880461
uuccauuugcauuggcaau

SEQ ID NO: 1968895 - RNA, 19 nt, Artificial Sequence
  Description of Artificial Sequence: Synthetic oligonucleotide
  Antisense strand to SEQ ID NO: 1968894
auugccaaugcaaauggaa

SEQ ID NO: 1968896 - RNA, 19 nt, Artificial Sequence
  Description of Artificial Sequence: Synthetic oligonucleotide
  Sense strand starting at position 2587 of SEQ ID NO: 1880461
ugcauuggcaauggucauu

SEQ ID NO: 1968897 - RNA, 19 nt, Artificial Sequence
  Description of Artificial Sequence: Synthetic oligonucleotide
  Antisense strand to SEQ ID NO: 1968896
aaugaccauugccaaugca

SEQ ID NO: 1968898 - RNA, 19 nt, Artificial Sequence
  Description of Artificial Sequence: Synthetic oligonucleotide
  Sense strand starting at position 2622 of SEQ ID NO: 1880461
ggaagcgagguauauguuu

SEQ ID NO: 1968899 - RNA, 19 nt, Artificial Sequence
  Description of Artificial Sequence: Synthetic oligonucleotide
  Antisense strand to SEQ ID NO: 1968898
aaacauauaccucgcuucc

SEQ ID NO: 1968900 - RNA, 19 nt, Artificial Sequence
  Description of Artificial Sequence: Synthetic oligonucleotide
  Sense strand starting at position 2628 of SEQ ID NO: 1880461
gagguauauguuuggaggu

SEQ ID NO: 1968901 - RNA, 19 nt, Artificial Sequence
  Description of Artificial Sequence: Synthetic oligonucleotide
  Antisense strand to SEQ ID NO: 1968900
accuccaaacauauaccuc

SEQ ID NO: 1968902 - RNA, 19 nt, Artificial Sequence
  Description of Artificial Sequence: Synthetic oligonucleotide
  Sense strand starting at position 2630 of SEQ ID NO: 1880461
gguauauguuuggagguga

SEQ ID NO: 1968903 - RNA, 19 nt, Artificial Sequence
  Description of Artificial Sequence: Synthetic oligonucleotide
  Antisense strand to SEQ ID NO: 1968902
ucaccuccaaacauauacc

SEQ ID NO: 1968904 - RNA, 19 nt, Artificial Sequence
  Description of Artificial Sequence: Synthetic oligonucleotide
  Sense strand starting at position 2819 of SEQ ID NO: 1880461
gccuucagucugcugcgaa

SEQ ID NO: 1968905 - RNA, 19 nt, Artificial Sequence
  Description of Artificial Sequence: Synthetic oligonucleotide
  Antisense strand to SEQ ID NO: 1968904
uucgcagcagacugaaggc

SEQ ID NO: 1968906 - RNA, 19 nt, Artificial Sequence
  Description of Artificial Sequence: Synthetic oligonucleotide
  Sense strand starting at position 3200 of SEQ ID NO: 1880461
gcggaaguccugugccaau

SEQ ID NO: 1968907 - RNA, 19 nt, Artificial Sequence
  Description of Artificial Sequence: Synthetic oligonucleotide
  Antisense strand to SEQ ID NO: 1968906
auuggcacaggacuuccgc

SEQ ID NO: 1968908 - RNA, 19 nt, Artificial Sequence
  Description of Artificial Sequence: Synthetic oligonucleotide
  Sense strand starting at position 3268 of SEQ ID NO: 1880461
cagaacuaguccugggagu

SEQ ID NO: 1968909 - RNA, 19 nt, Artificial Sequence
  Description of Artificial Sequence: Synthetic oligonucleotide
  Antisense strand to SEQ ID NO: 1968908
acucccaggacuaguucug

SEQ ID NO: 1968910 - RNA, 19 nt, Artificial Sequence
  Description of Artificial Sequence: Synthetic oligonucleotide
  Sense strand starting at position 3270 of SEQ ID NO: 1880461
gaacuaguccugggaguga

SEQ ID NO: 1968911 - RNA, 19 nt, Artificial Sequence
  Description of Artificial Sequence: Synthetic oligonucleotide
  Antisense strand to SEQ ID NO: 1968910
ucacucccaggacuaguuc

SEQ ID NO: 1968912 - RNA, 19 nt, Artificial Sequence
  Description of Artificial Sequence: Synthetic oligonucleotide
  Sense strand starting at position 3294 of SEQ ID NO: 1880461
gggccaggacccuaguaau

SEQ ID NO: 1968913 - RNA, 19 nt, Artificial Sequence
  Description of Artificial Sequence: Synthetic oligonucleotide
  Antisense strand to SEQ ID NO: 1968912
auuacuaggguccuggccc

SEQ ID NO: 1968914 - RNA, 19 nt, Artificial Sequence
  Description of Artificial Sequence: Synthetic oligonucleotide
  Sense strand starting at position 3300 of SEQ ID NO: 1880461
ggacccuaguaaugaguua

SEQ ID NO: 1968915 - RNA, 19 nt, Artificial Sequence
  Description of Artificial Sequence: Synthetic oligonucleotide
  Antisense strand to SEQ ID NO: 1968914
uaacucauuacuagggucc

SEQ ID NO: 1968916 - RNA, 19 nt, Artificial Sequence
  Description of Artificial Sequence: Synthetic oligonucleotide
  Sense strand starting at position 3319 of SEQ ID NO: 1880461
ucuaaaugucucugggugu

SEQ ID NO: 1968917 - RNA, 19 nt, Artificial Sequence
  Description of Artificial Sequence: Synthetic oligonucleotide
  Antisense strand to SEQ ID NO: 1968916
acacccagagacauuuaga

SEQ ID NO: 1968918 - RNA, 19 nt, Artificial Sequence
  Description of Artificial Sequence: Synthetic oligonucleotide
  Sense strand starting at position 3330 of SEQ ID NO: 1880461
cugggugucuggaauuggu

SEQ ID NO: 1968919 - RNA, 19 nt, Artificial Sequence
  Description of Artificial Sequence: Synthetic oligonucleotide
  Antisense strand to SEQ ID NO: 1968918
accaauuccagacacccag

SEQ ID NO: 1968920 - RNA, 19 nt, Artificial Sequence
  Description of Artificial Sequence: Synthetic oligonucleotide
  Sense strand starting at position 3451 of SEQ ID NO: 1880461
ugcagacaucuguaaucaa

SEQ ID NO: 1968921 - RNA, 19 nt, Artificial Sequence
  Description of Artificial Sequence: Synthetic oligonucleotide
  Antisense strand to SEQ ID NO: 1968920
uugauuacagaugucugca

SEQ ID NO: 1968922 - RNA, 19 nt, Artificial Sequence
  Description of Artificial Sequence: Synthetic oligonucleotide
  Sense strand starting at position 3541 of SEQ ID NO: 1880461
cuaagugugcuggagaacu

SEQ ID NO: 1968923 - RNA, 19 nt, Artificial Sequence
  Description of Artificial Sequence: Synthetic oligonucleotide
  Antisense strand to SEQ ID NO: 1968922
aguucuccagcacacuuag

SEQ ID NO: 1968924 - RNA, 19 nt, Artificial Sequence
  Description of Artificial Sequence: Synthetic oligonucleotide
  Sense strand starting at position 3919 of SEQ ID NO: 1880461
cuagcuagccauuguccaa

SEQ ID NO: 1968925 - RNA, 19 nt, Artificial Sequence
  Description of Artificial Sequence: Synthetic oligonucleotide
  Antisense strand to SEQ ID NO: 1968924
uuggacaauggcuagcuag

SEQ ID NO: 1968926 - RNA, 19 nt, Artificial Sequence
  Description of Artificial Sequence: Synthetic oligonucleotide
  Sense strand starting at position 7 of SEQ ID NO: 1880463
aggugaauucuccaaaugu

SEQ ID NO: 1968927 - RNA, 19 nt, Artificial Sequence
  Description of Artificial Sequence: Synthetic oligonucleotide
  Antisense strand to SEQ ID NO: 1968926
acauuuggagaauucaccu

SEQ ID NO: 1968928 - RNA, 19 nt, Artificial Sequence
  Description of Artificial Sequence: Synthetic oligonucleotide
  Sense strand starting at position 16 of SEQ ID NO: 1880463
cuccaaaugugucuaggau

SEQ ID NO: 1968929 - RNA, 19 nt, Artificial Sequence
  Description of Artificial Sequence: Synthetic oligonucleotide
  Antisense strand to SEQ ID NO: 1968928
auccuagacacauuuggag

SEQ ID NO: 1968930 - RNA, 19 nt, Artificial Sequence
  Description of Artificial Sequence: Synthetic oligonucleotide
  Sense strand starting at position 17 of SEQ ID NO: 1880463
uccaaaugugucuaggaua

SEQ ID NO: 1968931 - RNA, 19 nt, Artificial Sequence
  Description of Artificial Sequence: Synthetic oligonucleotide
  Antisense strand to SEQ ID NO: 1968930
uauccuagacacauuugga

SEQ ID NO: 1968932 - RNA, 19 nt, Artificial Sequence
  Description of Artificial Sequence: Synthetic oligonucleotide
  Sense strand starting at position 228 of SEQ ID NO: 1880463
ucucauguugcagaagaug

SEQ ID NO: 1968933 - RNA, 19 nt, Artificial Sequence
  Description of Artificial Sequence: Synthetic oligonucleotide
  Antisense strand to SEQ ID NO: 1968932
caucuucugcaacaugaga

SEQ ID NO: 1968934 - RNA, 19 nt, Artificial Sequence
  Description of Artificial Sequence: Synthetic oligonucleotide
  Sense strand starting at position 298 of SEQ ID NO: 1880463
ugguuauaaccagaagcca

SEQ ID NO: 1968935 - RNA, 19 nt, Artificial Sequence
  Description of Artificial Sequence: Synthetic oligonucleotide
  Antisense strand to SEQ ID NO: 1968934
uggcuucugguuauaacca

SEQ ID NO: 1968936 - RNA, 19 nt, Artificial Sequence
  Description of Artificial Sequence: Synthetic oligonucleotide
  Sense strand starting at position 332 of SEQ ID NO: 1880463
gguggugaauacucaucaa

SEQ ID NO: 1968937 - RNA, 19 nt, Artificial Sequence
  Description of Artificial Sequence: Synthetic oligonucleotide
  Antisense strand to SEQ ID NO: 1968936
uugaugaguauucaccacc

SEQ ID NO: 1968938 - RNA, 19 nt, Artificial Sequence
  Description of Artificial Sequence: Synthetic oligonucleotide
  Sense strand starting at position 380 of SEQ ID NO: 1880463
gagccucugaguggaagaa

SEQ ID NO: 1968939 - RNA, 19 nt, Artificial Sequence
  Description of Artificial Sequence: Synthetic oligonucleotide
  Antisense strand to SEQ ID NO: 1968938
uucuuccacucagaggcuc

SEQ ID NO: 1968940 - RNA, 19 nt, Artificial Sequence
  Description of Artificial Sequence: Synthetic oligonucleotide
  Sense strand starting at position 769 of SEQ ID NO: 1880463
gcuuacuuugcgccagacu

SEQ ID NO: 1968941 - RNA, 19 nt, Artificial Sequence
  Description of Artificial Sequence: Synthetic oligonucleotide
  Antisense strand to SEQ ID NO: 1968940
agucuggcgcaaaguaagc

SEQ ID NO: 1968942 - RNA, 19 nt, Artificial Sequence
  Description of Artificial Sequence: Synthetic oligonucleotide
  Sense strand starting at position 803 of SEQ ID NO: 1880463
cgaguauauugguccauuu

SEQ ID NO: 1968943 - RNA, 19 nt, Artificial Sequence
  Description of Artificial Sequence: Synthetic oligonucleotide
  Antisense strand to SEQ ID NO: 1968942
aaauggaccaauauacucg

SEQ ID NO: 1968944 - RNA, 19 nt, Artificial Sequence
  Description of Artificial Sequence: Synthetic oligonucleotide
  Sense strand starting at position 961 of SEQ ID NO: 1880463
accuuagagcuugaucuca

SEQ ID NO: 1968945 - RNA, 19 nt, Artificial Sequence
  Description of Artificial Sequence: Synthetic oligonucleotide
  Antisense strand to SEQ ID NO: 1968944
ugagaucaagcucuaaggu

SEQ ID NO: 1968946 - RNA, 19 nt, Artificial Sequence
  Description of Artificial Sequence: Synthetic oligonucleotide
  Sense strand starting at position 963 of SEQ ID NO: 1880463
cuuagagcuugaucucaua

SEQ ID NO: 1968947 - RNA, 19 nt, Artificial Sequence
  Description of Artificial Sequence: Synthetic oligonucleotide
  Antisense strand to SEQ ID NO: 1968946
uaugagaucaagcucuaag

SEQ ID NO: 1968948 - RNA, 19 nt, Artificial Sequence
  Description of Artificial Sequence: Synthetic oligonucleotide
  Sense strand starting at position 1021 of SEQ ID NO: 1880463
ggccaauuucgucacacgu

SEQ ID NO: 1968949 - RNA, 19 nt, Artificial Sequence
  Description of Artificial Sequence: Synthetic oligonucleotide
  Antisense strand to SEQ ID NO: 1968948
acgugugacgaaauuggcc

SEQ ID NO: 1968950 - RNA, 19 nt, Artificial Sequence
  Description of Artificial Sequence: Synthetic oligonucleotide
  Sense strand starting at position 1152 of SEQ ID NO: 1880463
ccaggaauggcauguauga

SEQ ID NO: 1968951 - RNA, 19 nt, Artificial Sequence
  Description of Artificial Sequence: Synthetic oligonucleotide
  Antisense strand to SEQ ID NO: 1968950
ucauacaugccauuccugg

SEQ ID NO: 1968952 - RNA, 19 nt, Artificial Sequence
  Description of Artificial Sequence: Synthetic oligonucleotide
  Sense strand starting at position 1257 of SEQ ID NO: 1880463
uugugaacuguccauaaua

SEQ ID NO: 1968953 - RNA, 19 nt, Artificial Sequence
  Description of Artificial Sequence: Synthetic oligonucleotide
  Antisense strand to SEQ ID NO: 1968952
uauuauggacaguucacaa

SEQ ID NO: 1968954 - RNA, 19 nt, Artificial Sequence
  Description of Artificial Sequence: Synthetic oligonucleotide
  Sense strand starting at position 1623 of SEQ ID NO: 1880463
ggcucaugaaugugaggaa

SEQ ID NO: 1968955 - RNA, 19 nt, Artificial Sequence
  Description of Artificial Sequence: Synthetic oligonucleotide
  Antisense strand to SEQ ID NO: 1968954
uuccucacauucaugagcc

SEQ ID NO: 1968956 - RNA, 19 nt, Artificial Sequence
  Description of Artificial Sequence: Synthetic oligonucleotide
  Sense strand starting at position 1736 of SEQ ID NO: 1880463
cccuuaaugcuggagaggu

SEQ ID NO: 1968957 - RNA, 19 nt, Artificial Sequence
  Description of Artificial Sequence: Synthetic oligonucleotide
  Antisense strand to SEQ ID NO: 1968956
accucuccagcauuaaggg

SEQ ID NO: 1968958 - RNA, 19 nt, Artificial Sequence
  Description of Artificial Sequence: Synthetic oligonucleotide
  Sense strand starting at position 1783 of SEQ ID NO: 1880463
ccucuuacucaguaugaua

SEQ ID NO: 1968959 - RNA, 19 nt, Artificial Sequence
  Description of Artificial Sequence: Synthetic oligonucleotide
  Antisense strand to SEQ ID NO: 1968958
uaucauacugaguaagagg

SEQ ID NO: 1968960 - RNA, 19 nt, Artificial Sequence
  Description of Artificial Sequence: Synthetic oligonucleotide
  Sense strand starting at position 1849 of SEQ ID NO: 1880463
aaacaauagcagugagaug

SEQ ID NO: 1968961 - RNA, 19 nt, Artificial Sequence
  Description of Artificial Sequence: Synthetic oligonucleotide
  Antisense strand to SEQ ID NO: 1968960
caucucacugcuauuguuu

SEQ ID NO: 1968962 - RNA, 19 nt, Artificial Sequence
  Description of Artificial Sequence: Synthetic oligonucleotide
  Sense strand starting at position 1858 of SEQ ID NO: 1880463
cagugagauguuuacuaac

SEQ ID NO: 1968963 - RNA, 19 nt, Artificial Sequence
  Description of Artificial Sequence: Synthetic oligonucleotide
  Antisense strand to SEQ ID NO: 1968962
guuaguaaacaucucacug

SEQ ID NO: 1968964 - RNA, 19 nt, Artificial Sequence
  Description of Artificial Sequence: Synthetic oligonucleotide
  Sense strand starting at position 1860 of SEQ ID NO: 1880463
gugagauguuuacuaacuc

SEQ ID NO: 1968965 - RNA, 19 nt, Artificial Sequence
  Description of Artificial Sequence: Synthetic oligonucleotide
  Antisense strand to SEQ ID NO: 1968964
gaguuaguaaacaucucac

SEQ ID NO: 1968966 - RNA, 19 nt, Artificial Sequence
  Description of Artificial Sequence: Synthetic oligonucleotide
  Sense strand starting at position 1949 of SEQ ID NO: 1880463
gugauauguagaugagauc

SEQ ID NO: 1968967 - RNA, 19 nt, Artificial Sequence
  Description of Artificial Sequence: Synthetic oligonucleotide
  Antisense strand to SEQ ID NO: 1968966
gaucucaucuacauaucac

SEQ ID NO: 1968968 - RNA, 19 nt, Artificial Sequence
  Description of Artificial Sequence: Synthetic oligonucleotide
  Sense strand starting at position 1992 of SEQ ID NO: 1880463
uugugauaauggguacauc

SEQ ID NO: 1968969 - RNA, 19 nt, Artificial Sequence
  Description of Artificial Sequence: Synthetic oligonucleotide
  Antisense strand to SEQ ID NO: 1968968
gauguacccauuaucacaa

SEQ ID NO: 1968970 - RNA, 19 nt, Artificial Sequence
  Description of Artificial Sequence: Synthetic oligonucleotide
  Sense strand starting at position 2098 of SEQ ID NO: 1880463
gcugcuaugcugucaucuu

SEQ ID NO: 1968971 - RNA, 19 nt, Artificial Sequence
  Description of Artificial Sequence: Synthetic oligonucleotide
  Antisense strand to SEQ ID NO: 1968970
aagaugacagcauagcagc

SEQ ID NO: 1968972 - RNA, 19 nt, Artificial Sequence
  Description of Artificial Sequence: Synthetic oligonucleotide
  Sense strand starting at position 2269 of SEQ ID NO: 1880463
gaaguuaccugucucaaga

SEQ ID NO: 1968973 - RNA, 19 nt, Artificial Sequence
  Description of Artificial Sequence: Synthetic oligonucleotide
  Antisense strand to SEQ ID NO: 1968972
ucuugagacagguaacuuc

SEQ ID NO: 1968974 - RNA, 19 nt, Artificial Sequence
  Description of Artificial Sequence: Synthetic oligonucleotide
  Sense strand starting at position 2305 of SEQ ID NO: 1880463
acucuagcucuggacacau

SEQ ID NO: 1968975 - RNA, 19 nt, Artificial Sequence
  Description of Artificial Sequence: Synthetic oligonucleotide
  Antisense strand to SEQ ID NO: 1968974
auguguccagagcuagagu

SEQ ID NO: 1968976 - RNA, 19 nt, Artificial Sequence
  Description of Artificial Sequence: Synthetic oligonucleotide
  Sense strand starting at position 2315 of SEQ ID NO: 1880463
uggacacauagcuaugagu

SEQ ID NO: 1968977 - RNA, 19 nt, Artificial Sequence
  Description of Artificial Sequence: Synthetic oligonucleotide
  Antisense strand to SEQ ID NO: 1968976
acucauagcuaugugucca

SEQ ID NO: 1968978 - RNA, 19 nt, Artificial Sequence
  Description of Artificial Sequence: Synthetic oligonucleotide
  Sense strand starting at position 2317 of SEQ ID NO: 1880463
gacacauagcuaugaguaa

SEQ ID NO: 1968979 - RNA, 19 nt, Artificial Sequence
  Description of Artificial Sequence: Synthetic oligonucleotide
  Antisense strand to SEQ ID NO: 1968978
uuacucauagcuauguguc

SEQ ID NO: 1968980 - RNA, 19 nt, Artificial Sequence
  Description of Artificial Sequence: Synthetic oligonucleotide
  Sense strand starting at position 2321 of SEQ ID NO: 1880463
cauagcuaugaguaagucu

SEQ ID NO: 1968981 - RNA, 19 nt, Artificial Sequence
  Description of Artificial Sequence: Synthetic oligonucleotide
  Antisense strand to SEQ ID NO: 1968980
agacuuacucauagcuaug

SEQ ID NO: 1968982 - RNA, 19 nt, Artificial Sequence
  Description of Artificial Sequence: Synthetic oligonucleotide
  Sense strand starting at position 2342 of SEQ ID NO: 1880463
uguauuucuugucuuugua

SEQ ID NO: 1968983 - RNA, 19 nt, Artificial Sequence
  Description of Artificial Sequence: Synthetic oligonucleotide
  Antisense strand to SEQ ID NO: 1968982
uacaaagacaagaaauaca

SEQ ID NO: 1968984 - RNA, 19 nt, Artificial Sequence
  Description of Artificial Sequence: Synthetic oligonucleotide
  Sense strand starting at position 2401 of SEQ ID NO: 1880463
gcaagagacuuacccauaa

SEQ ID NO: 1968985 - RNA, 19 nt, Artificial Sequence
  Description of Artificial Sequence: Synthetic oligonucleotide
  Antisense strand to SEQ ID NO: 1968984
uuauggguaagucucuugc

SEQ ID NO: 1968986 - RNA, 19 nt, Artificial Sequence
  Description of Artificial Sequence: Synthetic oligonucleotide
  Sense strand starting at position 2445 of SEQ ID NO: 1880463
gaagacaguuauguuaaau

SEQ ID NO: 1968987 - RNA, 19 nt, Artificial Sequence
  Description of Artificial Sequence: Synthetic oligonucleotide
  Antisense strand to SEQ ID NO: 1968986
auuuaacauaacugucuuc

SEQ ID NO: 1968988 - RNA, 19 nt, Artificial Sequence
  Description of Artificial Sequence: Synthetic oligonucleotide
  Sense strand starting at position 2665 of SEQ ID NO: 1880463
augggcuuagcccauaaua

SEQ ID NO: 1968989 - RNA, 19 nt, Artificial Sequence
  Description of Artificial Sequence: Synthetic oligonucleotide
  Antisense strand to SEQ ID NO: 1968988
uauuaugggcuaagcccau

SEQ ID NO: 1968990 - RNA, 19 nt, Artificial Sequence
  Description of Artificial Sequence: Synthetic oligonucleotide
  Sense strand starting at position 2923 of SEQ ID NO: 1880463
gaugucuucucccuagaag

SEQ ID NO: 1968991 - RNA, 19 nt, Artificial Sequence
  Description of Artificial Sequence: Synthetic oligonucleotide
  Antisense strand to SEQ ID NO: 1968990
cuucuagggagaagacauc

SEQ ID NO: 1968992 - RNA, 19 nt, Artificial Sequence
  Description of Artificial Sequence: Synthetic oligonucleotide
  Sense strand starting at position 2924 of SEQ ID NO: 1880463
augucuucucccuagaaga

SEQ ID NO: 1968993 - RNA, 19 nt, Artificial Sequence
  Description of Artificial Sequence: Synthetic oligonucleotide
  Antisense strand to SEQ ID NO: 1968992
ucuucuagggagaagacau

SEQ ID NO: 1968994 - RNA, 19 nt, Artificial Sequence
  Description of Artificial Sequence: Synthetic oligonucleotide
  Sense strand starting at position 3005 of SEQ ID NO: 1880463
uggauucucaauggguaau

SEQ ID NO: 1968995 - RNA, 19 nt, Artificial Sequence
  Description of Artificial Sequence: Synthetic oligonucleotide
  Antisense strand to SEQ ID NO: 1968994
auuacccauugagaaucca

SEQ ID NO: 1968996 - RNA, 19 nt, Artificial Sequence
  Description of Artificial Sequence: Synthetic oligonucleotide
  Sense strand starting at position 3006 of SEQ ID NO: 1880463
ggauucucaauggguaaua

SEQ ID NO: 1968997 - RNA, 19 nt, Artificial Sequence
  Description of Artificial Sequence: Synthetic oligonucleotide
  Antisense strand to SEQ ID NO: 1968996
uauuacccauugagaaucc

SEQ ID NO: 1968998 - RNA, 19 nt, Artificial Sequence
  Description of Artificial Sequence: Synthetic oligonucleotide
  Sense strand starting at position 3702 of SEQ ID NO: 1880463
gguaucacauccuuuagaa

SEQ ID NO: 1968999 - RNA, 19 nt, Artificial Sequence
  Description of Artificial Sequence: Synthetic oligonucleotide
  Antisense strand to SEQ ID NO: 1968998
uucuaaaggaugugauacc

SEQ ID NO: 1969000 - RNA, 19 nt, Artificial Sequence
  Description of Artificial Sequence: Synthetic oligonucleotide
  Sense strand starting at position 3770 of SEQ ID NO: 1880463
gugugaaucagguacuccu

SEQ ID NO: 1969001 - RNA, 19 nt, Artificial Sequence
  Description of Artificial Sequence: Synthetic oligonucleotide
  Antisense strand to SEQ ID NO: 1969000
aggaguaccugauucacac

SEQ ID NO: 1969002 - RNA, 19 nt, Artificial Sequence
  Description of Artificial Sequence: Synthetic oligonucleotide
  Sense strand starting at position 3917 of SEQ ID NO: 1880463
gacaaaucaugggucaucu

SEQ ID NO: 1969003 - RNA, 19 nt, Artificial Sequence
  Description of Artificial Sequence: Synthetic oligonucleotide
  Antisense strand to SEQ ID NO: 1969002
agaugacccaugauuuguc

SEQ ID NO: 1969004 - RNA, 19 nt, Artificial Sequence
  Description of Artificial Sequence: Synthetic oligonucleotide
  Sense strand starting at position 3930 of SEQ ID NO: 1880463
ucaucuauuucugugucuu

SEQ ID NO: 1969005 - RNA, 19 nt, Artificial Sequence
  Description of Artificial Sequence: Synthetic oligonucleotide
  Antisense strand to SEQ ID NO: 1969004
aagacacagaaauagauga

SEQ ID NO: 1969006 - RNA, 19 nt, Artificial Sequence
  Description of Artificial Sequence: Synthetic oligonucleotide
  Sense strand starting at position 83 of SEQ ID NO: 1880462
ucaggcauggagcauaaua

SEQ ID NO: 1969007 - RNA, 19 nt, Artificial Sequence
  Description of Artificial Sequence: Synthetic oligonucleotide
  Antisense strand to SEQ ID NO: 1969006
uauuaugcuccaugccuga

SEQ ID NO: 1969008 - RNA, 19 nt, Artificial Sequence
  Description of Artificial Sequence: Synthetic oligonucleotide
  Sense strand starting at position 94 of SEQ ID NO: 1880462
gcauaauaucauggaugga

SEQ ID NO: 1969009 - RNA, 19 nt, Artificial Sequence
  Description of Artificial Sequence: Synthetic oligonucleotide
  Antisense strand to SEQ ID NO: 1969008
uccauccaugauauuaugc

SEQ ID NO: 1969010 - RNA, 19 nt, Artificial Sequence
  Description of Artificial Sequence: Synthetic oligonucleotide
  Sense strand starting at position 172 of SEQ ID NO: 1880462
aggcuucuucuagaacauc

SEQ ID NO: 1969011 - RNA, 19 nt, Artificial Sequence
  Description of Artificial Sequence: Synthetic oligonucleotide
  Antisense strand to SEQ ID NO: 1969010
gauguucuagaagaagccu

SEQ ID NO: 1969012 - RNA, 19 nt, Artificial Sequence
  Description of Artificial Sequence: Synthetic oligonucleotide
  Sense strand starting at position 180 of SEQ ID NO: 1880462
ucuagaacaucuguugaca

SEQ ID NO: 1969013 - RNA, 19 nt, Artificial Sequence
  Description of Artificial Sequence: Synthetic oligonucleotide
  Antisense strand to SEQ ID NO: 1969012
ugucaacagauguucuaga

SEQ ID NO: 1969014 - RNA, 19 nt, Artificial Sequence
  Description of Artificial Sequence: Synthetic oligonucleotide
  Sense strand starting at position 314 of SEQ ID NO: 1880462
ugaagacgaugguugagua

SEQ ID NO: 1969015 - RNA, 19 nt, Artificial Sequence
  Description of Artificial Sequence: Synthetic oligonucleotide
  Antisense strand to SEQ ID NO: 1969014
uacucaaccaucgucuuca

SEQ ID NO: 1969016 - RNA, 19 nt, Artificial Sequence
  Description of Artificial Sequence: Synthetic oligonucleotide
  Sense strand starting at position 315 of SEQ ID NO: 1880462
gaagacgaugguugaguau

SEQ ID NO: 1969017 - RNA, 19 nt, Artificial Sequence
  Description of Artificial Sequence: Synthetic oligonucleotide
  Antisense strand to SEQ ID NO: 1969016
auacucaaccaucgucuuc

SEQ ID NO: 1969018 - RNA, 19 nt, Artificial Sequence
  Description of Artificial Sequence: Synthetic oligonucleotide
  Sense strand starting at position 466 of SEQ ID NO: 1880462
ugacauuugguuugcuuua

SEQ ID NO: 1969019 - RNA, 19 nt, Artificial Sequence
  Description of Artificial Sequence: Synthetic oligonucleotide
  Antisense strand to SEQ ID NO: 1969018
uaaagcaaaccaaauguca

SEQ ID NO: 1969020 - RNA, 19 nt, Artificial Sequence
  Description of Artificial Sequence: Synthetic oligonucleotide
  Sense strand starting at position 467 of SEQ ID NO: 1880462
gacauuugguuugcuuuau

SEQ ID NO: 1969021 - RNA, 19 nt, Artificial Sequence
  Description of Artificial Sequence: Synthetic oligonucleotide
  Antisense strand to SEQ ID NO: 1969020
auaaagcaaaccaaauguc

SEQ ID NO: 1969022 - RNA, 19 nt, Artificial Sequence
  Description of Artificial Sequence: Synthetic oligonucleotide
  Sense strand starting at position 468 of SEQ ID NO: 1880462
acauuugguuugcuuuauu

SEQ ID NO: 1969023 - RNA, 19 nt, Artificial Sequence
  Description of Artificial Sequence: Synthetic oligonucleotide
  Antisense strand to SEQ ID NO: 1969022
aauaaagcaaaccaaaugu

SEQ ID NO: 1969024 - RNA, 19 nt, Artificial Sequence
  Description of Artificial Sequence: Synthetic oligonucleotide
  Sense strand starting at position 846 of SEQ ID NO: 1880462
ggaaguucugugcaugaau

SEQ ID NO: 1969025 - RNA, 19 nt, Artificial Sequence
  Description of Artificial Sequence: Synthetic oligonucleotide
  Antisense strand to SEQ ID NO: 1969024
auucaugcacagaacuucc

SEQ ID NO: 1969026 - RNA, 19 nt, Artificial Sequence
  Description of Artificial Sequence: Synthetic oligonucleotide
  Sense strand starting at position 926 of SEQ ID NO: 1880462
aggugaauucuccaaaugu

SEQ ID NO: 1969027 - RNA, 19 nt, Artificial Sequence
  Description of Artificial Sequence: Synthetic oligonucleotide
  Antisense strand to SEQ ID NO: 1969026
acauuuggagaauucaccu

SEQ ID NO: 1969028 - RNA, 19 nt, Artificial Sequence
  Description of Artificial Sequence: Synthetic oligonucleotide
  Sense strand starting at position 936 of SEQ ID NO: 1880462
uccaaaugugucuaggaua

SEQ ID NO: 1969029 - RNA, 19 nt, Artificial Sequence
  Description of Artificial Sequence: Synthetic oligonucleotide
  Antisense strand to SEQ ID NO: 1969028
uauccuagacacauuugga

SEQ ID NO: 1969030 - RNA, 19 nt, Artificial Sequence
  Description of Artificial Sequence: Synthetic oligonucleotide
  Sense strand starting at position 1147 of SEQ ID NO: 1880462
ucucauguugcagaagaug

SEQ ID NO: 1969031 - RNA, 19 nt, Artificial Sequence
  Description of Artificial Sequence: Synthetic oligonucleotide
  Antisense strand to SEQ ID NO: 1969030
caucuucugcaacaugaga

SEQ ID NO: 1969032 - RNA, 19 nt, Artificial Sequence
  Description of Artificial Sequence: Synthetic oligonucleotide
  Sense strand starting at position 1217 of SEQ ID NO: 1880462
ugguuauaaccagaagcca

SEQ ID NO: 1969033 - RNA, 19 nt, Artificial Sequence
  Description of Artificial Sequence: Synthetic oligonucleotide
  Antisense strand to SEQ ID NO: 1969032
uggcuucugguuauaacca

SEQ ID NO: 1969034 - RNA, 19 nt, Artificial Sequence
  Description of Artificial Sequence: Synthetic oligonucleotide
  Sense strand starting at position 1251 of SEQ ID NO: 1880462
gguggugaauacucaucaa

SEQ ID NO: 1969035 - RNA, 19 nt, Artificial Sequence
  Description of Artificial Sequence: Synthetic oligonucleotide
  Antisense strand to SEQ ID NO: 1969034
uugaugaguauucaccacc

SEQ ID NO: 1969036 - RNA, 19 nt, Artificial Sequence
  Description of Artificial Sequence: Synthetic oligonucleotide
  Sense strand starting at position 1299 of SEQ ID NO: 1880462
gagccucugaguggaagaa

SEQ ID NO: 1969037 - RNA, 19 nt, Artificial Sequence
  Description of Artificial Sequence: Synthetic oligonucleotide
  Antisense strand to SEQ ID NO: 1969036
uucuuccacucagaggcuc

SEQ ID NO: 1969038 - RNA, 19 nt, Artificial Sequence
  Description of Artificial Sequence: Synthetic oligonucleotide
  Sense strand starting at position 1688 of SEQ ID NO: 1880462
gcuuacuuugcgccagacu

SEQ ID NO: 1969039 - RNA, 19 nt, Artificial Sequence
  Description of Artificial Sequence: Synthetic oligonucleotide
  Antisense strand to SEQ ID NO: 1969038
agucuggcgcaaaguaagc

SEQ ID NO: 1969040 - RNA, 19 nt, Artificial Sequence
  Description of Artificial Sequence: Synthetic oligonucleotide
  Sense strand starting at position 1722 of SEQ ID NO: 1880462
cgaguauauugguccauuu

SEQ ID NO: 1969041 - RNA, 19 nt, Artificial Sequence
  Description of Artificial Sequence: Synthetic oligonucleotide
  Antisense strand to SEQ ID NO: 1969040
aaauggaccaauauacucg

SEQ ID NO: 1969042 - RNA, 19 nt, Artificial Sequence
  Description of Artificial Sequence: Synthetic oligonucleotide
  Sense strand starting at position 1880 of SEQ ID NO: 1880462
accuuagagcuugaucuca

SEQ ID NO: 1969043 - RNA, 19 nt, Artificial Sequence
  Description of Artificial Sequence: Synthetic oligonucleotide
  Antisense strand to SEQ ID NO: 1969042
ugagaucaagcucuaaggu

SEQ ID NO: 1969044 - RNA, 19 nt, Artificial Sequence
  Description of Artificial Sequence: Synthetic oligonucleotide
  Sense strand starting at position 1940 of SEQ ID NO: 1880462
ggccaauuucgucacacgu

SEQ ID NO: 1969045 - RNA, 19 nt, Artificial Sequence
  Description of Artificial Sequence: Synthetic oligonucleotide
  Antisense strand to SEQ ID NO: 1969044
acgugugacgaaauuggcc

SEQ ID NO: 1969046 - RNA, 19 nt, Artificial Sequence
  Description of Artificial Sequence: Synthetic oligonucleotide
  Sense strand starting at position 2071 of SEQ ID NO: 1880462
ccaggaauggcauguauga

SEQ ID NO: 1969047 - RNA, 19 nt, Artificial Sequence
  Description of Artificial Sequence: Synthetic oligonucleotide
  Antisense strand to SEQ ID NO: 1969046
ucauacaugccauuccugg

SEQ ID NO: 1969048 - RNA, 19 nt, Artificial Sequence
  Description of Artificial Sequence: Synthetic oligonucleotide
  Sense strand starting at position 2176 of SEQ ID NO: 1880462
uugugaacuguccauaaua

SEQ ID NO: 1969049 - RNA, 19 nt, Artificial Sequence
  Description of Artificial Sequence: Synthetic oligonucleotide
  Antisense strand to SEQ ID NO: 1969048
uauuauggacaguucacaa

SEQ ID NO: 1969050 - RNA, 19 nt, Artificial Sequence
  Description of Artificial Sequence: Synthetic oligonucleotide
  Sense strand starting at position 2542 of SEQ ID NO: 1880462
ggcucaugaaugugaggaa

SEQ ID NO: 1969051 - RNA, 19 nt, Artificial Sequence
  Description of Artificial Sequence: Synthetic oligonucleotide
  Antisense strand to SEQ ID NO: 1969050
uuccucacauucaugagcc

SEQ ID NO: 1969052 - RNA, 19 nt, Artificial Sequence
  Description of Artificial Sequence: Synthetic oligonucleotide
  Sense strand starting at position 2655 of SEQ ID NO: 1880462
cccuuaaugcuggagaggu

SEQ ID NO: 1969053 - RNA, 19 nt, Artificial Sequence
  Description of Artificial Sequence: Synthetic oligonucleotide
  Antisense strand to SEQ ID NO: 1969052
accucuccagcauuaaggg

SEQ ID NO: 1969054 - RNA, 19 nt, Artificial Sequence
  Description of Artificial Sequence: Synthetic oligonucleotide
  Sense strand starting at position 2702 of SEQ ID NO: 1880462
ccucuuacucaguaugaua

SEQ ID NO: 1969055 - RNA, 19 nt, Artificial Sequence
  Description of Artificial Sequence: Synthetic oligonucleotide
  Antisense strand to SEQ ID NO: 1969054
uaucauacugaguaagagg

SEQ ID NO: 1969056 - RNA, 19 nt, Artificial Sequence
  Description of Artificial Sequence: Synthetic oligonucleotide
  Sense strand starting at position 2768 of SEQ ID NO: 1880462
aaacaauagcagugagaug

SEQ ID NO: 1969057 - RNA, 19 nt, Artificial Sequence
  Description of Artificial Sequence: Synthetic oligonucleotide
  Antisense strand to SEQ ID NO: 1969056
caucucacugcuauuguuu

SEQ ID NO: 1969058 - RNA, 19 nt, Artificial Sequence
  Description of Artificial Sequence: Synthetic oligonucleotide
  Sense strand starting at position 2777 of SEQ ID NO: 1880462
cagugagauguuuacuaac

SEQ ID NO: 1969059 - RNA, 19 nt, Artificial Sequence
  Description of Artificial Sequence: Synthetic oligonucleotide
  Antisense strand to SEQ ID NO: 1969058
guuaguaaacaucucacug

SEQ ID NO: 1969060 - RNA, 19 nt, Artificial Sequence
  Description of Artificial Sequence: Synthetic oligonucleotide
  Sense strand starting at position 2868 of SEQ ID NO: 1880462
gugauauguagaugagauc

SEQ ID NO: 1969061 - RNA, 19 nt, Artificial Sequence
  Description of Artificial Sequence: Synthetic oligonucleotide
  Antisense strand to SEQ ID NO: 1969060
gaucucaucuacauaucac

SEQ ID NO: 1969062 - RNA, 19 nt, Artificial Sequence
  Description of Artificial Sequence: Synthetic oligonucleotide
  Sense strand starting at position 3017 of SEQ ID NO: 1880462
gcugcuaugcugucaucuu

SEQ ID NO: 1969063 - RNA, 19 nt, Artificial Sequence
  Description of Artificial Sequence: Synthetic oligonucleotide
  Antisense strand to SEQ ID NO: 1969062
aagaugacagcauagcagc

SEQ ID NO: 1969064 - RNA, 19 nt, Artificial Sequence
  Description of Artificial Sequence: Synthetic oligonucleotide
  Sense strand starting at position 3188 of SEQ ID NO: 1880462
gaaguuaccugucucaaga

SEQ ID NO: 1969065 - RNA, 19 nt, Artificial Sequence
  Description of Artificial Sequence: Synthetic oligonucleotide
  Antisense strand to SEQ ID NO: 1969064
ucuugagacagguaacuuc

SEQ ID NO: 1969066 - RNA, 19 nt, Artificial Sequence
  Description of Artificial Sequence: Synthetic oligonucleotide
  Sense strand starting at position 3224 of SEQ ID NO: 1880462
acucuagcucuggacacau

SEQ ID NO: 1969067 - RNA, 19 nt, Artificial Sequence
  Description of Artificial Sequence: Synthetic oligonucleotide
  Antisense strand to SEQ ID NO: 1969066
auguguccagagcuagagu

SEQ ID NO: 1969068 - RNA, 19 nt, Artificial Sequence
  Description of Artificial Sequence: Synthetic oligonucleotide
  Sense strand starting at position 3234 of SEQ ID NO: 1880462
uggacacauagcuaugagu

SEQ ID NO: 1969069 - RNA, 19 nt, Artificial Sequence
  Description of Artificial Sequence: Synthetic oligonucleotide
  Antisense strand to SEQ ID NO: 1969068
acucauagcuaugugucca

SEQ ID NO: 1969070 - RNA, 19 nt, Artificial Sequence
  Description of Artificial Sequence: Synthetic oligonucleotide
  Sense strand starting at position 3236 of SEQ ID NO: 1880462
gacacauagcuaugaguaa

SEQ ID NO: 1969071 - RNA, 19 nt, Artificial Sequence
  Description of Artificial Sequence: Synthetic oligonucleotide
  Antisense strand to SEQ ID NO: 1969070
uuacucauagcuauguguc

SEQ ID NO: 1969072 - RNA, 19 nt, Artificial Sequence
  Description of Artificial Sequence: Synthetic oligonucleotide
  Sense strand starting at position 3320 of SEQ ID NO: 1880462
gcaagagacuuacccauaa

SEQ ID NO: 1969073 - RNA, 19 nt, Artificial Sequence
  Description of Artificial Sequence: Synthetic oligonucleotide
  Antisense strand to SEQ ID NO: 1969072
uuauggguaagucucuugc

SEQ ID NO: 1969074 - RNA, 19 nt, Artificial Sequence
  Description of Artificial Sequence: Synthetic oligonucleotide
  Sense strand starting at position 3364 of SEQ ID NO: 1880462
gaagacaguuauguuaaau

SEQ ID NO: 1969075 - RNA, 19 nt, Artificial Sequence
  Description of Artificial Sequence: Synthetic oligonucleotide
  Antisense strand to SEQ ID NO: 1969074
auuuaacauaacugucuuc

SEQ ID NO: 1969076 - RNA, 19 nt, Artificial Sequence
  Description of Artificial Sequence: Synthetic oligonucleotide
  Sense strand starting at position 3584 of SEQ ID NO: 1880462
augggcuuagcccauaaua

SEQ ID NO: 1969077 - RNA, 19 nt, Artificial Sequence
  Description of Artificial Sequence: Synthetic oligonucleotide
  Antisense strand to SEQ ID NO: 1969076
uauuaugggcuaagcccau

SEQ ID NO: 1969078 - RNA, 19 nt, Artificial Sequence
  Description of Artificial Sequence: Synthetic oligonucleotide
  Sense strand starting at position 3842 of SEQ ID NO: 1880462
gaugucuucucccuagaag

SEQ ID NO: 1969079 - RNA, 19 nt, Artificial Sequence
  Description of Artificial Sequence: Synthetic oligonucleotide
  Antisense strand to SEQ ID NO: 1969078
cuucuagggagaagacauc

SEQ ID NO: 1969080 - RNA, 19 nt, Artificial Sequence
  Description of Artificial Sequence: Synthetic oligonucleotide
  Sense strand starting at position 3843 of SEQ ID NO: 1880462
augucuucucccuagaaga

SEQ ID NO: 1969081 - RNA, 19 nt, Artificial Sequence
  Description of Artificial Sequence: Synthetic oligonucleotide
  Antisense strand to SEQ ID NO: 1969080
ucuucuagggagaagacau

SEQ ID NO: 1969082 - RNA, 19 nt, Artificial Sequence
  Description of Artificial Sequence: Synthetic oligonucleotide
  Sense strand starting at position 3924 of SEQ ID NO: 1880462
uggauucucaauggguaau

SEQ ID NO: 1969083 - RNA, 19 nt, Artificial Sequence
  Description of Artificial Sequence: Synthetic oligonucleotide
  Antisense strand to SEQ ID NO: 1969082
auuacccauugagaaucca

SEQ ID NO: 1969084 - RNA, 19 nt, Artificial Sequence
  Description of Artificial Sequence: Synthetic oligonucleotide
  Sense strand starting at position 3925 of SEQ ID NO: 1880462
ggauucucaauggguaaua

SEQ ID NO: 1969085 - RNA, 19 nt, Artificial Sequence
  Description of Artificial Sequence: Synthetic oligonucleotide
  Antisense strand to SEQ ID NO: 1969084
uauuacccauugagaaucc

SEQ ID NO: 1969086 - RNA, 19 nt, Artificial Sequence
  Description of Artificial Sequence: Synthetic oligonucleotide
  Sense strand starting at position 6 of SEQ ID NO: 1880464
ucauaugagauguggucau

SEQ ID NO: 1969087 - RNA, 19 nt, Artificial Sequence
  Description of Artificial Sequence: Synthetic oligonucleotide
  Antisense strand to SEQ ID NO: 1969086
augaccacaucucauauga

SEQ ID NO: 1969088 - RNA, 19 nt, Artificial Sequence
  Description of Artificial Sequence: Synthetic oligonucleotide
  Sense strand starting at position 259 of SEQ ID NO: 1880464
gcaagaacugccuaaugca

SEQ ID NO: 1969089 - RNA, 19 nt, Artificial Sequence
  Description of Artificial Sequence: Synthetic oligonucleotide
  Antisense strand to SEQ ID NO: 1969088
ugcauuaggcaguucuugc

SEQ ID NO: 1969090 - RNA, 19 nt, Artificial Sequence
  Description of Artificial Sequence: Synthetic oligonucleotide
  Sense strand starting at position 346 of SEQ ID NO: 1880464
gauguuaugagcugaaugu

SEQ ID NO: 1969091 - RNA, 19 nt, Artificial Sequence
  Description of Artificial Sequence: Synthetic oligonucleotide
  Antisense strand to SEQ ID NO: 1969090
acauucagcucauaacauc

SEQ ID NO: 1969092 - RNA, 19 nt, Artificial Sequence
  Description of Artificial Sequence: Synthetic oligonucleotide
  Sense strand starting at position 347 of SEQ ID NO: 1880464
auguuaugagcugaauguu

SEQ ID NO: 1969093 - RNA, 19 nt, Artificial Sequence
  Description of Artificial Sequence: Synthetic oligonucleotide
  Antisense strand to SEQ ID NO: 1969092
aacauucagcucauaacau

SEQ ID NO: 1969094 - RNA, 19 nt, Artificial Sequence
  Description of Artificial Sequence: Synthetic oligonucleotide
  Sense strand starting at position 440 of SEQ ID NO: 1880464
ggcugugauuaggucauga

SEQ ID NO: 1969095 - RNA, 19 nt, Artificial Sequence
  Description of Artificial Sequence: Synthetic oligonucleotide
  Antisense strand to SEQ ID NO: 1969094
ucaugaccuaaucacagcc

SEQ ID NO: 1969096 - RNA, 19 nt, Artificial Sequence
  Description of Artificial Sequence: Synthetic oligonucleotide
  Sense strand starting at position 592 of SEQ ID NO: 1880464
cagaucugccaguagcuua

SEQ ID NO: 1969097 - RNA, 19 nt, Artificial Sequence
  Description of Artificial Sequence: Synthetic oligonucleotide
  Antisense strand to SEQ ID NO: 1969096
uaagcuacuggcagaucug

SEQ ID NO: 1969098 - RNA, 19 nt, Artificial Sequence
  Description of Artificial Sequence: Synthetic oligonucleotide
  Sense strand starting at position 597 of SEQ ID NO: 1880464
cugccaguagcuuaaucua

SEQ ID NO: 1969099 - RNA, 19 nt, Artificial Sequence
  Description of Artificial Sequence: Synthetic oligonucleotide
  Antisense strand to SEQ ID NO: 1969098
uagauuaagcuacuggcag

SEQ ID NO: 1969100 - RNA, 19 nt, Artificial Sequence
  Description of Artificial Sequence: Synthetic oligonucleotide
  Sense strand starting at position 600 of SEQ ID NO: 1880464
ccaguagcuuaaucuagga

SEQ ID NO: 1969101 - RNA, 19 nt, Artificial Sequence
  Description of Artificial Sequence: Synthetic oligonucleotide
  Antisense strand to SEQ ID NO: 1969100
uccuagauuaagcuacugg

SEQ ID NO: 1969102 - RNA, 19 nt, Artificial Sequence
  Description of Artificial Sequence: Synthetic oligonucleotide
  Sense strand starting at position 631 of SEQ ID NO: 1880464
uacugcuugguuggaagua

SEQ ID NO: 1969103 - RNA, 19 nt, Artificial Sequence
  Description of Artificial Sequence: Synthetic oligonucleotide
  Antisense strand to SEQ ID NO: 1969102
uacuuccaaccaagcagua

SEQ ID NO: 1969104 - RNA, 19 nt, Artificial Sequence
  Description of Artificial Sequence: Synthetic oligonucleotide
  Sense strand starting at position 636 of SEQ ID NO: 1880464
cuugguuggaaguagugau

SEQ ID NO: 1969105 - RNA, 19 nt, Artificial Sequence
  Description of Artificial Sequence: Synthetic oligonucleotide
  Antisense strand to SEQ ID NO: 1969104
aucacuacuuccaaccaag

SEQ ID NO: 1969106 - RNA, 19 nt, Artificial Sequence
  Description of Artificial Sequence: Synthetic oligonucleotide
  Sense strand starting at position 643 of SEQ ID NO: 1880464
ggaaguagugaugaagugu

SEQ ID NO: 1969107 - RNA, 19 nt, Artificial Sequence
  Description of Artificial Sequence: Synthetic oligonucleotide
  Antisense strand to SEQ ID NO: 1969106
acacuucaucacuacuucc

SEQ ID NO: 1969108 - RNA, 19 nt, Artificial Sequence
  Description of Artificial Sequence: Synthetic oligonucleotide
  Sense strand starting at position 767 of SEQ ID NO: 1880464
gguugaugccuguaaucac

SEQ ID NO: 1969109 - RNA, 19 nt, Artificial Sequence
  Description of Artificial Sequence: Synthetic oligonucleotide
  Antisense strand to SEQ ID NO: 1969108
gugauuacaggcaucaacc

SEQ ID NO: 1969110 - RNA, 19 nt, Artificial Sequence
  Description of Artificial Sequence: Synthetic oligonucleotide
  Sense strand starting at position 1107 of SEQ ID NO: 1880464
aggagacacucuuucuuag

SEQ ID NO: 1969111 - RNA, 19 nt, Artificial Sequence
  Description of Artificial Sequence: Synthetic oligonucleotide
  Antisense strand to SEQ ID NO: 1969110
cuaagaaagagugucuccu

SEQ ID NO: 1969112 - RNA, 19 nt, Artificial Sequence
  Description of Artificial Sequence: Synthetic oligonucleotide
  Sense strand starting at position 1110 of SEQ ID NO: 1880464
agacacucuuucuuaguuu

SEQ ID NO: 1969113 - RNA, 19 nt, Artificial Sequence
  Description of Artificial Sequence: Synthetic oligonucleotide
  Antisense strand to SEQ ID NO: 1969112
aaacuaagaaagagugucu

SEQ ID NO: 1969114 - RNA, 19 nt, Artificial Sequence
  Description of Artificial Sequence: Synthetic oligonucleotide
  Sense strand starting at position 1153 of SEQ ID NO: 1880464
guaguaccuccuuaaacga

SEQ ID NO: 1969115 - RNA, 19 nt, Artificial Sequence
  Description of Artificial Sequence: Synthetic oligonucleotide
  Antisense strand to SEQ ID NO: 1969114
ucguuuaaggagguacuac

SEQ ID NO: 1969116 - RNA, 19 nt, Artificial Sequence
  Description of Artificial Sequence: Synthetic oligonucleotide
  Sense strand starting at position 1316 of SEQ ID NO: 1880464
ggacuaaauguaugcaucu

SEQ ID NO: 1969117 - RNA, 19 nt, Artificial Sequence
  Description of Artificial Sequence: Synthetic oligonucleotide
  Antisense strand to SEQ ID NO: 1969116
agaugcauacauuuagucc

SEQ ID NO: 1969118 - RNA, 19 nt, Artificial Sequence
  Description of Artificial Sequence: Synthetic oligonucleotide
  Sense strand starting at position 1373 of SEQ ID NO: 1880464
auaguuagguugcuuauga

SEQ ID NO: 1969119 - RNA, 19 nt, Artificial Sequence
  Description of Artificial Sequence: Synthetic oligonucleotide
  Antisense strand to SEQ ID NO: 1969118
ucauaagcaaccuaacuau

SEQ ID NO: 1969120 - RNA, 19 nt, Artificial Sequence
  Description of Artificial Sequence: Synthetic oligonucleotide
  Sense strand starting at position 1442 of SEQ ID NO: 1880464
cugccaucagcugaugauu

SEQ ID NO: 1969121 - RNA, 19 nt, Artificial Sequence
  Description of Artificial Sequence: Synthetic oligonucleotide
  Antisense strand to SEQ ID NO: 1969120
aaucaucagcugauggcag

SEQ ID NO: 1969122 - RNA, 19 nt, Artificial Sequence
  Description of Artificial Sequence: Synthetic oligonucleotide
  Sense strand starting at position 1472 of SEQ ID NO: 1880464
ucuugaugagaaugcauua

SEQ ID NO: 1969123 - RNA, 19 nt, Artificial Sequence
  Description of Artificial Sequence: Synthetic oligonucleotide
  Antisense strand to SEQ ID NO: 1969122
uaaugcauucucaucaaga

SEQ ID NO: 1969124 - RNA, 19 nt, Artificial Sequence
  Description of Artificial Sequence: Synthetic oligonucleotide
  Sense strand starting at position 1828 of SEQ ID NO: 1880464
ugaagcuagcauuaaacua

SEQ ID NO: 1969125 - RNA, 19 nt, Artificial Sequence
  Description of Artificial Sequence: Synthetic oligonucleotide
  Antisense strand to SEQ ID NO: 1969124
uaguuuaaugcuagcuuca

SEQ ID NO: 1969126 - RNA, 19 nt, Artificial Sequence
  Description of Artificial Sequence: Synthetic oligonucleotide
  Sense strand starting at position 1903 of SEQ ID NO: 1880464
uuacauauaugugugagau

SEQ ID NO: 1969127 - RNA, 19 nt, Artificial Sequence
  Description of Artificial Sequence: Synthetic oligonucleotide
  Antisense strand to SEQ ID NO: 1969126
aucucacacauauauguaa

SEQ ID NO: 1969128 - RNA, 19 nt, Artificial Sequence
  Description of Artificial Sequence: Synthetic oligonucleotide
  Sense strand starting at position 1904 of SEQ ID NO: 1880464
uacauauaugugugagaua

SEQ ID NO: 1969129 - RNA, 19 nt, Artificial Sequence
  Description of Artificial Sequence: Synthetic oligonucleotide
  Antisense strand to SEQ ID NO: 1969128
uaucucacacauauaugua

SEQ ID NO: 1969130 - RNA, 19 nt, Artificial Sequence
  Description of Artificial Sequence: Synthetic oligonucleotide
  Sense strand starting at position 2040 of SEQ ID NO: 1880464
aguagagauuagucugaga

SEQ ID NO: 1969131 - RNA, 19 nt, Artificial Sequence
  Description of Artificial Sequence: Synthetic oligonucleotide
  Antisense strand to SEQ ID NO: 1969130
ucucagacuaaucucuacu

SEQ ID NO: 1969132 - RNA, 19 nt, Artificial Sequence
  Description of Artificial Sequence: Synthetic oligonucleotide
  Sense strand starting at position 2706 of SEQ ID NO: 1880464
ugacaugaauugguuacaa

SEQ ID NO: 1969133 - RNA, 19 nt, Artificial Sequence
  Description of Artificial Sequence: Synthetic oligonucleotide
  Antisense strand to SEQ ID NO: 1969132
uuguaaccaauucauguca

SEQ ID NO: 1969134 - RNA, 19 nt, Artificial Sequence
  Description of Artificial Sequence: Synthetic oligonucleotide
  Sense strand starting at position 2765 of SEQ ID NO: 1880464
uuuggaaaggcaugagagu

SEQ ID NO: 1969135 - RNA, 19 nt, Artificial Sequence
  Description of Artificial Sequence: Synthetic oligonucleotide
  Antisense strand to SEQ ID NO: 1969134
acucucaugccuuuccaaa

SEQ ID NO: 1969136 - RNA, 19 nt, Artificial Sequence
  Description of Artificial Sequence: Synthetic oligonucleotide
  Sense strand starting at position 2782 of SEQ ID NO: 1880464
guacaaugccaguauagaa

SEQ ID NO: 1969137 - RNA, 19 nt, Artificial Sequence
  Description of Artificial Sequence: Synthetic oligonucleotide
  Antisense strand to SEQ ID NO: 1969136
uucuauacuggcauuguac

SEQ ID NO: 1969138 - RNA, 19 nt, Artificial Sequence
  Description of Artificial Sequence: Synthetic oligonucleotide
  Sense strand starting at position 2856 of SEQ ID NO: 1880464
ugguaucauuuacaauagu

SEQ ID NO: 1969139 - RNA, 19 nt, Artificial Sequence
  Description of Artificial Sequence: Synthetic oligonucleotide
  Antisense strand to SEQ ID NO: 1969138
acuauuguaaaugauacca

SEQ ID NO: 1969140 - RNA, 19 nt, Artificial Sequence
  Description of Artificial Sequence: Synthetic oligonucleotide
  Sense strand starting at position 2873 of SEQ ID NO: 1880464
guacaauaagcuugaggua

SEQ ID NO: 1969141 - RNA, 19 nt, Artificial Sequence
  Description of Artificial Sequence: Synthetic oligonucleotide
  Antisense strand to SEQ ID NO: 1969140
uaccucaagcuuauuguac

SEQ ID NO: 1969142 - RNA, 19 nt, Artificial Sequence
  Description of Artificial Sequence: Synthetic oligonucleotide
  Sense strand starting at position 3020 of SEQ ID NO: 1880464
guugucaacucucucaauu

SEQ ID NO: 1969143 - RNA, 19 nt, Artificial Sequence
  Description of Artificial Sequence: Synthetic oligonucleotide
  Antisense strand to SEQ ID NO: 1969142
aauugagagaguugacaac

SEQ ID NO: 1969144 - RNA, 19 nt, Artificial Sequence
  Description of Artificial Sequence: Synthetic oligonucleotide
  Sense strand starting at position 3140 of SEQ ID NO: 1880464
ucacauugaugcccagauu

SEQ ID NO: 1969145 - RNA, 19 nt, Artificial Sequence
  Description of Artificial Sequence: Synthetic oligonucleotide
  Antisense strand to SEQ ID NO: 1969144
aaucugggcaucaauguga

SEQ ID NO: 1969146 - RNA, 19 nt, Artificial Sequence
  Description of Artificial Sequence: Synthetic oligonucleotide
  Sense strand starting at position 3148 of SEQ ID NO: 1880464
augcccagauuugauguaa

SEQ ID NO: 1969147 - RNA, 19 nt, Artificial Sequence
  Description of Artificial Sequence: Synthetic oligonucleotide
  Antisense strand to SEQ ID NO: 1969146
uuacaucaaaucugggcau

SEQ ID NO: 1969148 - RNA, 19 nt, Artificial Sequence
  Description of Artificial Sequence: Synthetic oligonucleotide
  Sense strand starting at position 3240 of SEQ ID NO: 1880464
auauaaucaugcguauaug

SEQ ID NO: 1969149 - RNA, 19 nt, Artificial Sequence
  Description of Artificial Sequence: Synthetic oligonucleotide
  Antisense strand to SEQ ID NO: 1969148
cauauacgcaugauuauau

SEQ ID NO: 1969150 - RNA, 19 nt, Artificial Sequence
  Description of Artificial Sequence: Synthetic oligonucleotide
  Sense strand starting at position 3302 of SEQ ID NO: 1880464
augggauagucuuuacaaa

SEQ ID NO: 1969151 - RNA, 19 nt, Artificial Sequence
  Description of Artificial Sequence: Synthetic oligonucleotide
  Antisense strand to SEQ ID NO: 1969150
uuuguaaagacuaucccau

SEQ ID NO: 1969152 - RNA, 19 nt, Artificial Sequence
  Description of Artificial Sequence: Synthetic oligonucleotide
  Sense strand starting at position 3326 of SEQ ID NO: 1880464
cuggaacaaucagauuucu

SEQ ID NO: 1969153 - RNA, 19 nt, Artificial Sequence
  Description of Artificial Sequence: Synthetic oligonucleotide
  Antisense strand to SEQ ID NO: 1969152
agaaaucugauuguuccag

SEQ ID NO: 1969154 - RNA, 19 nt, Artificial Sequence
  Description of Artificial Sequence: Synthetic oligonucleotide
  Sense strand starting at position 3443 of SEQ ID NO: 1880464
auuucuaguugagaacaua

SEQ ID NO: 1969155 - RNA, 19 nt, Artificial Sequence
  Description of Artificial Sequence: Synthetic oligonucleotide
  Antisense strand to SEQ ID NO: 1969154
uauguucucaacuagaaau

SEQ ID NO: 1969156 - RNA, 19 nt, Artificial Sequence
  Description of Artificial Sequence: Synthetic oligonucleotide
  Sense strand starting at position 3463 of SEQ ID NO: 1880464
gaggaaaucuuaugauuug

SEQ ID NO: 1969157 - RNA, 19 nt, Artificial Sequence
  Description of Artificial Sequence: Synthetic oligonucleotide
  Antisense strand to SEQ ID NO: 1969156
caaaucauaagauuuccuc

SEQ ID NO: 1969158 - RNA, 19 nt, Artificial Sequence
  Description of Artificial Sequence: Synthetic oligonucleotide
  Sense strand starting at position 3464 of SEQ ID NO: 1880464
aggaaaucuuaugauuuga

SEQ ID NO: 1969159 - RNA, 19 nt, Artificial Sequence
  Description of Artificial Sequence: Synthetic oligonucleotide
  Antisense strand to SEQ ID NO: 1969158
ucaaaucauaagauuuccu

SEQ ID NO: 1969160 - RNA, 19 nt, Artificial Sequence
  Description of Artificial Sequence: Synthetic oligonucleotide
  Sense strand starting at position 3678 of SEQ ID NO: 1880464
gguuuaacauccgcaaauc

SEQ ID NO: 1969161 - RNA, 19 nt, Artificial Sequence
  Description of Artificial Sequence: Synthetic oligonucleotide
  Antisense strand to SEQ ID NO: 1969160
gauuugcggauguuaaacc

SEQ ID NO: 1969162 - RNA, 19 nt, Artificial Sequence
  Description of Artificial Sequence: Synthetic oligonucleotide
  Sense strand starting at position 3679 of SEQ ID NO: 1880464
guuuaacauccgcaaauca

SEQ ID NO: 1969163 - RNA, 19 nt, Artificial Sequence
  Description of Artificial Sequence: Synthetic oligonucleotide
  Antisense strand to SEQ ID NO: 1969162
ugauuugcggauguuaaac

SEQ ID NO: 1969164 - RNA, 19 nt, Artificial Sequence
  Description of Artificial Sequence: Synthetic oligonucleotide
  Sense strand starting at position 3703 of SEQ ID NO: 1880464
ugugauacaccauguaaau

SEQ ID NO: 1969165 - RNA, 19 nt, Artificial Sequence
  Description of Artificial Sequence: Synthetic oligonucleotide
  Antisense strand to SEQ ID NO: 1969164
auuuacaugguguaucaca

SEQ ID NO: 1969166 - RNA, 19 nt, Artificial Sequence
  Description of Artificial Sequence: Synthetic oligonucleotide
  Sense strand starting at position 198 of SEQ ID NO: 1880465
cuuuguaaagauggaauua

SEQ ID NO: 1969167 - RNA, 19 nt, Artificial Sequence
  Description of Artificial Sequence: Synthetic oligonucleotide
  Antisense strand to SEQ ID NO: 1969166
uaauuccaucuuuacaaag

SEQ ID NO: 1969168 - RNA, 19 nt, Artificial Sequence
  Description of Artificial Sequence: Synthetic oligonucleotide
  Sense strand starting at position 242 of SEQ ID NO: 1880465
auagucauuugugccucua

SEQ ID NO: 1969169 - RNA, 19 nt, Artificial Sequence
  Description of Artificial Sequence: Synthetic oligonucleotide
  Antisense strand to SEQ ID NO: 1969168
uagaggcacaaaugacuau

SEQ ID NO: 1969170 - RNA, 19 nt, Artificial Sequence
  Description of Artificial Sequence: Synthetic oligonucleotide
  Sense strand starting at position 244 of SEQ ID NO: 1880465
agucauuugugccucuaau

SEQ ID NO: 1969171 - RNA, 19 nt, Artificial Sequence
  Description of Artificial Sequence: Synthetic oligonucleotide
  Antisense strand to SEQ ID NO: 1969170
auuagaggcacaaaugacu

SEQ ID NO: 1969172 - RNA, 19 nt, Artificial Sequence
  Description of Artificial Sequence: Synthetic oligonucleotide
  Sense strand starting at position 290 of SEQ ID NO: 1880465
uuauguauccaacaauguu

SEQ ID NO: 1969173 - RNA, 19 nt, Artificial Sequence
  Description of Artificial Sequence: Synthetic oligonucleotide
  Antisense strand to SEQ ID NO: 1969172
aacauuguuggauacauaa

SEQ ID NO: 1969174 - RNA, 19 nt, Artificial Sequence
  Description of Artificial Sequence: Synthetic oligonucleotide
  Sense strand starting at position 375 of SEQ ID NO: 1880465
gagugaauauuggcucuaa

SEQ ID NO: 1969175 - RNA, 19 nt, Artificial Sequence
  Description of Artificial Sequence: Synthetic oligonucleotide
  Antisense strand to SEQ ID NO: 1969174
uuagagccaauauucacuc

SEQ ID NO: 1969176 - RNA, 19 nt, Artificial Sequence
  Description of Artificial Sequence: Synthetic oligonucleotide
  Sense strand starting at position 376 of SEQ ID NO: 1880465
agugaauauuggcucuaaa

SEQ ID NO: 1969177 - RNA, 19 nt, Artificial Sequence
  Description of Artificial Sequence: Synthetic oligonucleotide
  Antisense strand to SEQ ID NO: 1969176
uuuagagccaauauucacu

SEQ ID NO: 1969178 - RNA, 19 nt, Artificial Sequence
  Description of Artificial Sequence: Synthetic oligonucleotide
  Sense strand starting at position 529 of SEQ ID NO: 1880465
uucucuaaauaguugguua

SEQ ID NO: 1969179 - RNA, 19 nt, Artificial Sequence
  Description of Artificial Sequence: Synthetic oligonucleotide
  Antisense strand to SEQ ID NO: 1969178
uaaccaacuauuuagagaa

SEQ ID NO: 1969180 - RNA, 19 nt, Artificial Sequence
  Description of Artificial Sequence: Synthetic oligonucleotide
  Sense strand starting at position 531 of SEQ ID NO: 1880465
cucuaaauaguugguuacu

SEQ ID NO: 1969181 - RNA, 19 nt, Artificial Sequence
  Description of Artificial Sequence: Synthetic oligonucleotide
  Antisense strand to SEQ ID NO: 1969180
aguaaccaacuauuuagag

SEQ ID NO: 1969182 - RNA, 19 nt, Artificial Sequence
  Description of Artificial Sequence: Synthetic oligonucleotide
  Sense strand starting at position 534 of SEQ ID NO: 1880465
uaaauaguugguuacuguu

SEQ ID NO: 1969183 - RNA, 19 nt, Artificial Sequence
  Description of Artificial Sequence: Synthetic oligonucleotide
  Antisense strand to SEQ ID NO: 1969182
aacaguaaccaacuauuua

SEQ ID NO: 1969184 - RNA, 19 nt, Artificial Sequence
  Description of Artificial Sequence: Synthetic oligonucleotide
  Sense strand starting at position 536 of SEQ ID NO: 1880465
aauaguugguuacuguuaa

SEQ ID NO: 1969185 - RNA, 19 nt, Artificial Sequence
  Description of Artificial Sequence: Synthetic oligonucleotide
  Antisense strand to SEQ ID NO: 1969184
uuaacaguaaccaacuauu

SEQ ID NO: 1969186 - RNA, 19 nt, Artificial Sequence
  Description of Artificial Sequence: Synthetic oligonucleotide
  Sense strand starting at position 548 of SEQ ID NO: 1880465
cuguuaauggcgcaaacau

SEQ ID NO: 1969187 - RNA, 19 nt, Artificial Sequence
  Description of Artificial Sequence: Synthetic oligonucleotide
  Antisense strand to SEQ ID NO: 1969186
auguuugcgccauuaacag

SEQ ID NO: 1969188 - RNA, 19 nt, Artificial Sequence
  Description of Artificial Sequence: Synthetic oligonucleotide
  Sense strand starting at position 578 of SEQ ID NO: 1880465
aguaacuauuauuccugua

SEQ ID NO: 1969189 - RNA, 19 nt, Artificial Sequence
  Description of Artificial Sequence: Synthetic oligonucleotide
  Antisense strand to SEQ ID NO: 1969188
uacaggaauaauaguuacu

SEQ ID NO: 1969190 - RNA, 19 nt, Artificial Sequence
  Description of Artificial Sequence: Synthetic oligonucleotide
  Sense strand starting at position 775 of SEQ ID NO: 1880465
ucuaguuaaucucuuguga

SEQ ID NO: 1969191 - RNA, 19 nt, Artificial Sequence
  Description of Artificial Sequence: Synthetic oligonucleotide
  Antisense strand to SEQ ID NO: 1969190
ucacaagagauuaacuaga

SEQ ID NO: 1969192 - RNA, 19 nt, Artificial Sequence
  Description of Artificial Sequence: Synthetic oligonucleotide
  Sense strand starting at position 911 of SEQ ID NO: 1880465
ucauguugccuugaacaga

SEQ ID NO: 1969193 - RNA, 19 nt, Artificial Sequence
  Description of Artificial Sequence: Synthetic oligonucleotide
  Antisense strand to SEQ ID NO: 1969192
ucuguucaaggcaacauga

SEQ ID NO: 1969194 - RNA, 19 nt, Artificial Sequence
  Description of Artificial Sequence: Synthetic oligonucleotide
  Sense strand starting at position 914 of SEQ ID NO: 1880465
uguugccuugaacagaaau

SEQ ID NO: 1969195 - RNA, 19 nt, Artificial Sequence
  Description of Artificial Sequence: Synthetic oligonucleotide
  Antisense strand to SEQ ID NO: 1969194
auuucuguucaaggcaaca

SEQ ID NO: 1969196 - RNA, 19 nt, Artificial Sequence
  Description of Artificial Sequence: Synthetic oligonucleotide
  Sense strand starting at position 935 of SEQ ID NO: 1880465
uauuucuuguucgaaagag

SEQ ID NO: 1969197 - RNA, 19 nt, Artificial Sequence
  Description of Artificial Sequence: Synthetic oligonucleotide
  Antisense strand to SEQ ID NO: 1969196
cucuuucgaacaagaaaua

SEQ ID NO: 1969198 - RNA, 19 nt, Artificial Sequence
  Description of Artificial Sequence: Synthetic oligonucleotide
  Sense strand starting at position 939 of SEQ ID NO: 1880465
ucuuguucgaaagagcaga

SEQ ID NO: 1969199 - RNA, 19 nt, Artificial Sequence
  Description of Artificial Sequence: Synthetic oligonucleotide
  Antisense strand to SEQ ID NO: 1969198
ucugcucuuucgaacaaga

SEQ ID NO: 1969200 - RNA, 19 nt, Artificial Sequence
  Description of Artificial Sequence: Synthetic oligonucleotide
  Sense strand starting at position 1067 of SEQ ID NO: 1880465
uuugcuauagcguaaagau

SEQ ID NO: 1969201 - RNA, 19 nt, Artificial Sequence
  Description of Artificial Sequence: Synthetic oligonucleotide
  Antisense strand to SEQ ID NO: 1969200
aucuuuacgcuauagcaaa

SEQ ID NO: 1969202 - RNA, 19 nt, Artificial Sequence
  Description of Artificial Sequence: Synthetic oligonucleotide
  Sense strand starting at position 1087 of SEQ ID NO: 1880465
gcaaaucaauauggaauuu

SEQ ID NO: 1969203 - RNA, 19 nt, Artificial Sequence
  Description of Artificial Sequence: Synthetic oligonucleotide
  Antisense strand to SEQ ID NO: 1969202
aaauuccauauugauuugc

SEQ ID NO: 1969204 - RNA, 19 nt, Artificial Sequence
  Description of Artificial Sequence: Synthetic oligonucleotide
  Sense strand starting at position 1176 of SEQ ID NO: 1880465
uaaugaagcugagcugaaa

SEQ ID NO: 1969205 - RNA, 19 nt, Artificial Sequence
  Description of Artificial Sequence: Synthetic oligonucleotide
  Antisense strand to SEQ ID NO: 1969204
uuucagcucagcuucauua

SEQ ID NO: 1969206 - RNA, 19 nt, Artificial Sequence
  Description of Artificial Sequence: Synthetic oligonucleotide
  Sense strand starting at position 1179 of SEQ ID NO: 1880465
ugaagcugagcugaaauau

SEQ ID NO: 1969207 - RNA, 19 nt, Artificial Sequence
  Description of Artificial Sequence: Synthetic oligonucleotide
  Antisense strand to SEQ ID NO: 1969206
auauuucagcucagcuuca

SEQ ID NO: 1969208 - RNA, 19 nt, Artificial Sequence
  Description of Artificial Sequence: Synthetic oligonucleotide
  Sense strand starting at position 1221 of SEQ ID NO: 1880465
ggauuuguccugcaguugu

SEQ ID NO: 1969209 - RNA, 19 nt, Artificial Sequence
  Description of Artificial Sequence: Synthetic oligonucleotide
  Antisense strand to SEQ ID NO: 1969208
acaacugcaggacaaaucc

SEQ ID NO: 1969210 - RNA, 19 nt, Artificial Sequence
  Description of Artificial Sequence: Synthetic oligonucleotide
  Sense strand starting at position 1290 of SEQ ID NO: 1880465
ugguguucccaauagcuga

SEQ ID NO: 1969211 - RNA, 19 nt, Artificial Sequence
  Description of Artificial Sequence: Synthetic oligonucleotide
  Antisense strand to SEQ ID NO: 1969210
ucagcuauugggaacacca

SEQ ID NO: 1969212 - RNA, 19 nt, Artificial Sequence
  Description of Artificial Sequence: Synthetic oligonucleotide
  Sense strand starting at position 1312 of SEQ ID NO: 1880465
acgugugagcuguaagaga

SEQ ID NO: 1969213 - RNA, 19 nt, Artificial Sequence
  Description of Artificial Sequence: Synthetic oligonucleotide
  Antisense strand to SEQ ID NO: 1969212
ucucuuacagcucacacgu

SEQ ID NO: 1969214 - RNA, 19 nt, Artificial Sequence
  Description of Artificial Sequence: Synthetic oligonucleotide
  Sense strand starting at position 1421 of SEQ ID NO: 1880465
caguaugaaugacuguaaa

SEQ ID NO: 1969215 - RNA, 19 nt, Artificial Sequence
  Description of Artificial Sequence: Synthetic oligonucleotide
  Antisense strand to SEQ ID NO: 1969214
uuuacagucauucauacug

SEQ ID NO: 1969216 - RNA, 19 nt, Artificial Sequence
  Description of Artificial Sequence: Synthetic oligonucleotide
  Sense strand starting at position 1449 of SEQ ID NO: 1880465
uuccuauggcccuggaaag

SEQ ID NO: 1969217 - RNA, 19 nt, Artificial Sequence
  Description of Artificial Sequence: Synthetic oligonucleotide
  Antisense strand to SEQ ID NO: 1969216
cuuuccagggccauaggaa

SEQ ID NO: 1969218 - RNA, 19 nt, Artificial Sequence
  Description of Artificial Sequence: Synthetic oligonucleotide
  Sense strand starting at position 1450 of SEQ ID NO: 1880465
uccuauggcccuggaaaga

SEQ ID NO: 1969219 - RNA, 19 nt, Artificial Sequence
  Description of Artificial Sequence: Synthetic oligonucleotide
  Antisense strand to SEQ ID NO: 1969218
ucuuuccagggccauagga

SEQ ID NO: 1969220 - RNA, 19 nt, Artificial Sequence
  Description of Artificial Sequence: Synthetic oligonucleotide
  Sense strand starting at position 1474 of SEQ ID NO: 1880465
uugccagcauuaucaagau

SEQ ID NO: 1969221 - RNA, 19 nt, Artificial Sequence
  Description of Artificial Sequence: Synthetic oligonucleotide
  Antisense strand to SEQ ID NO: 1969220
aucuugauaaugcuggcaa

SEQ ID NO: 1969222 - RNA, 19 nt, Artificial Sequence
  Description of Artificial Sequence: Synthetic oligonucleotide
  Sense strand starting at position 1514 of SEQ ID NO: 1880465
aaguauucgaugcaguguu

SEQ ID NO: 1969223 - RNA, 19 nt, Artificial Sequence
  Description of Artificial Sequence: Synthetic oligonucleotide
  Antisense strand to SEQ ID NO: 1969222
aacacugcaucgaauacuu

SEQ ID NO: 1969224 - RNA, 19 nt, Artificial Sequence
  Description of Artificial Sequence: Synthetic oligonucleotide
  Sense strand starting at position 1571 of SEQ ID NO: 1880465
gggaauggcuuaucgcaau

SEQ ID NO: 1969225 - RNA, 19 nt, Artificial Sequence
  Description of Artificial Sequence: Synthetic oligonucleotide
  Antisense strand to SEQ ID NO: 1969224
auugcgauaagccauuccc

SEQ ID NO: 1969226 - RNA, 19 nt, Artificial Sequence
  Description of Artificial Sequence: Synthetic oligonucleotide
  Sense strand starting at position 1680 of SEQ ID NO: 1880465
uguaguauuaauugcagga

SEQ ID NO: 1969227 - RNA, 19 nt, Artificial Sequence
  Description of Artificial Sequence: Synthetic oligonucleotide
  Antisense strand to SEQ ID NO: 1969226
uccugcaauuaauacuaca

SEQ ID NO: 1969228 - RNA, 19 nt, Artificial Sequence
  Description of Artificial Sequence: Synthetic oligonucleotide
  Sense strand starting at position 1749 of SEQ ID NO: 1880465
ugauuucucuggugaaggg

SEQ ID NO: 1969229 - RNA, 19 nt, Artificial Sequence
  Description of Artificial Sequence: Synthetic oligonucleotide
  Antisense strand to SEQ ID NO: 1969228
cccuucaccagagaaauca

SEQ ID NO: 1969230 - RNA, 19 nt, Artificial Sequence
  Description of Artificial Sequence: Synthetic oligonucleotide
  Sense strand starting at position 1782 of SEQ ID NO: 1880465
uuaggaacugcucaaaguu

SEQ ID NO: 1969231 - RNA, 19 nt, Artificial Sequence
  Description of Artificial Sequence: Synthetic oligonucleotide
  Antisense strand to SEQ ID NO: 1969230
aacuuugagcaguuccuaa

SEQ ID NO: 1969232 - RNA, 19 nt, Artificial Sequence
  Description of Artificial Sequence: Synthetic oligonucleotide
  Sense strand starting at position 1790 of SEQ ID NO: 1880465
ugcucaaaguucccagaua

SEQ ID NO: 1969233 - RNA, 19 nt, Artificial Sequence
  Description of Artificial Sequence: Synthetic oligonucleotide
  Antisense strand to SEQ ID NO: 1969232
uaucugggaacuuugagca

SEQ ID NO: 1969234 - RNA, 19 nt, Artificial Sequence
  Description of Artificial Sequence: Synthetic oligonucleotide
  Sense strand starting at position 1887 of SEQ ID NO: 1880465
ccagaauauccguagaggu

SEQ ID NO: 1969235 - RNA, 19 nt, Artificial Sequence
  Description of Artificial Sequence: Synthetic oligonucleotide
  Antisense strand to SEQ ID NO: 1969234
accucuacggauauucugg

SEQ ID NO: 1969236 - RNA, 19 nt, Artificial Sequence
  Description of Artificial Sequence: Synthetic oligonucleotide
  Sense strand starting at position 1889 of SEQ ID NO: 1880465
agaauauccguagagguag

SEQ ID NO: 1969237 - RNA, 19 nt, Artificial Sequence
  Description of Artificial Sequence: Synthetic oligonucleotide
  Antisense strand to SEQ ID NO: 1969236
cuaccucuacggauauucu

SEQ ID NO: 1969238 - RNA, 19 nt, Artificial Sequence
  Description of Artificial Sequence: Synthetic oligonucleotide
  Sense strand starting at position 2081 of SEQ ID NO: 1880465
uugguuuaugagugaccca

SEQ ID NO: 1969239 - RNA, 19 nt, Artificial Sequence
  Description of Artificial Sequence: Synthetic oligonucleotide
  Antisense strand to SEQ ID NO: 1969238
ugggucacucauaaaccaa

SEQ ID NO: 1969240 - RNA, 19 nt, Artificial Sequence
  Description of Artificial Sequence: Synthetic oligonucleotide
  Sense strand starting at position 2084 of SEQ ID NO: 1880465
guuuaugagugacccagaa

SEQ ID NO: 1969241 - RNA, 19 nt, Artificial Sequence
  Description of Artificial Sequence: Synthetic oligonucleotide
  Antisense strand to SEQ ID NO: 1969240
uucugggucacucauaaac

SEQ ID NO: 1969242 - RNA, 19 nt, Artificial Sequence
  Description of Artificial Sequence: Synthetic oligonucleotide
  Sense strand starting at position 3145 of SEQ ID NO: 1880465
gggccuccgaguuaauaaa

SEQ ID NO: 1969243 - RNA, 19 nt, Artificial Sequence
  Description of Artificial Sequence: Synthetic oligonucleotide
  Antisense strand to SEQ ID NO: 1969242
uuuauuaacucggaggccc

SEQ ID NO: 1969244 - RNA, 19 nt, Artificial Sequence
  Description of Artificial Sequence: Synthetic oligonucleotide
  Sense strand starting at position 3230 of SEQ ID NO: 1880465
ccugauaacuaguugagag

SEQ ID NO: 1969245 - RNA, 19 nt, Artificial Sequence
  Description of Artificial Sequence: Synthetic oligonucleotide
  Antisense strand to SEQ ID NO: 1969244
cucucaacuaguuaucagg

SEQ ID NO: 1969246 - RNA, 19 nt, Artificial Sequence
  Description of Artificial Sequence: Synthetic oligonucleotide
  Sense strand starting at position 6 of SEQ ID NO: 1880466
gcagaaaucugagcaacac

SEQ ID NO: 1969247 - RNA, 19 nt, Artificial Sequence
  Description of Artificial Sequence: Synthetic oligonucleotide
  Antisense strand to SEQ ID NO: 1969246
guguugcucagauuucugc

SEQ ID NO: 1969248 - RNA, 19 nt, Artificial Sequence
  Description of Artificial Sequence: Synthetic oligonucleotide
  Sense strand starting at position 35 of SEQ ID NO: 1880466
ucugacuucugcccagaga

SEQ ID NO: 1969249 - RNA, 19 nt, Artificial Sequence
  Description of Artificial Sequence: Synthetic oligonucleotide
  Antisense strand to SEQ ID NO: 1969248
ucucugggcagaagucaga

SEQ ID NO: 1969250 - RNA, 19 nt, Artificial Sequence
  Description of Artificial Sequence: Synthetic oligonucleotide
  Sense strand starting at position 36 of SEQ ID NO: 1880466
cugacuucugcccagagaa

SEQ ID NO: 1969251 - RNA, 19 nt, Artificial Sequence
  Description of Artificial Sequence: Synthetic oligonucleotide
  Antisense strand to SEQ ID NO: 1969250
uucucugggcagaagucag

SEQ ID NO: 1969252 - RNA, 19 nt, Artificial Sequence
  Description of Artificial Sequence: Synthetic oligonucleotide
  Sense strand starting at position 69 of SEQ ID NO: 1880466
ugucuuuauuuggcuguau

SEQ ID NO: 1969253 - RNA, 19 nt, Artificial Sequence
  Description of Artificial Sequence: Synthetic oligonucleotide
  Antisense strand to SEQ ID NO: 1969252
auacagccaaauaaagaca

SEQ ID NO: 1969254 - RNA, 19 nt, Artificial Sequence
  Description of Artificial Sequence: Synthetic oligonucleotide
  Sense strand starting at position 71 of SEQ ID NO: 1880466
ucuuuauuuggcuguaugu

SEQ ID NO: 1969255 - RNA, 19 nt, Artificial Sequence
  Description of Artificial Sequence: Synthetic oligonucleotide
  Antisense strand to SEQ ID NO: 1969254
acauacagccaaauaaaga

SEQ ID NO: 1969256 - RNA, 19 nt, Artificial Sequence
  Description of Artificial Sequence: Synthetic oligonucleotide
  Sense strand starting at position 96 of SEQ ID NO: 1880466
ugaacccaucauugagagu

SEQ ID NO: 1969257 - RNA, 19 nt, Artificial Sequence
  Description of Artificial Sequence: Synthetic oligonucleotide
  Antisense strand to SEQ ID NO: 1969256
acucucaaugauggguuca

SEQ ID NO: 1969258 - RNA, 19 nt, Artificial Sequence
  Description of Artificial Sequence: Synthetic oligonucleotide
  Sense strand starting at position 281 of SEQ ID NO: 1880466
cggacauuuguauguacuc

SEQ ID NO: 1969259 - RNA, 19 nt, Artificial Sequence
  Description of Artificial Sequence: Synthetic oligonucleotide
  Antisense strand to SEQ ID NO: 1969258
gaguacauacaaauguccg

SEQ ID NO: 1969260 - RNA, 19 nt, Artificial Sequence
  Description of Artificial Sequence: Synthetic oligonucleotide
  Sense strand starting at position 290 of SEQ ID NO: 1880466
guauguacucaugaugaac

SEQ ID NO: 1969261 - RNA, 19 nt, Artificial Sequence
  Description of Artificial Sequence: Synthetic oligonucleotide
  Antisense strand to SEQ ID NO: 1969260
guucaucaugaguacauac

SEQ ID NO: 1969262 - RNA, 19 nt, Artificial Sequence
  Description of Artificial Sequence: Synthetic oligonucleotide
  Sense strand starting at position 405 of SEQ ID NO: 1880466
cccgacaauugucuaaaug

SEQ ID NO: 1969263 - RNA, 19 nt, Artificial Sequence
  Description of Artificial Sequence: Synthetic oligonucleotide
  Antisense strand to SEQ ID NO: 1969262
cauuuagacaauugucggg

SEQ ID NO: 1969264 - RNA, 19 nt, Artificial Sequence
  Description of Artificial Sequence: Synthetic oligonucleotide
  Sense strand starting at position 414 of SEQ ID NO: 1880466
ugucuaaauggugaaagcu

SEQ ID NO: 1969265 - RNA, 19 nt, Artificial Sequence
  Description of Artificial Sequence: Synthetic oligonucleotide
  Antisense strand to SEQ ID NO: 1969264
agcuuucaccauuuagaca

SEQ ID NO: 1969266 - RNA, 19 nt, Artificial Sequence
  Description of Artificial Sequence: Synthetic oligonucleotide
  Sense strand starting at position 698 of SEQ ID NO: 1880466
cguuuauauggauauacca

SEQ ID NO: 1969267 - RNA, 19 nt, Artificial Sequence
  Description of Artificial Sequence: Synthetic oligonucleotide
  Antisense strand to SEQ ID NO: 1969266
ugguauauccauauaaacg

SEQ ID NO: 1969268 - RNA, 19 nt, Artificial Sequence
  Description of Artificial Sequence: Synthetic oligonucleotide
  Sense strand starting at position 706 of SEQ ID NO: 1880466
uggauauaccauuguuacu

SEQ ID NO: 1969269 - RNA, 19 nt, Artificial Sequence
  Description of Artificial Sequence: Synthetic oligonucleotide
  Antisense strand to SEQ ID NO: 1969268
aguaacaaugguauaucca

SEQ ID NO: 1969270 - RNA, 19 nt, Artificial Sequence
  Description of Artificial Sequence: Synthetic oligonucleotide
  Sense strand starting at position 716 of SEQ ID NO: 1880466
auuguuacuuuaucgagac

SEQ ID NO: 1969271 - RNA, 19 nt, Artificial Sequence
  Description of Artificial Sequence: Synthetic oligonucleotide
  Antisense strand to SEQ ID NO: 1969270
gucucgauaaaguaacaau

SEQ ID NO: 1969272 - RNA, 19 nt, Artificial Sequence
  Description of Artificial Sequence: Synthetic oligonucleotide
  Sense strand starting at position 728 of SEQ ID NO: 1880466
ucgagacauaugggucaca

SEQ ID NO: 1969273 - RNA, 19 nt, Artificial Sequence
  Description of Artificial Sequence: Synthetic oligonucleotide
  Antisense strand to SEQ ID NO: 1969272
ugugacccauaugucucga

SEQ ID NO: 1969274 - RNA, 19 nt, Artificial Sequence
  Description of Artificial Sequence: Synthetic oligonucleotide
  Sense strand starting at position 793 of SEQ ID NO: 1880466
guacuugcacaagaaucau

SEQ ID NO: 1969275 - RNA, 19 nt, Artificial Sequence
  Description of Artificial Sequence: Synthetic oligonucleotide
  Antisense strand to SEQ ID NO: 1969274
augauucuugugcaaguac

SEQ ID NO: 1969276 - RNA, 19 nt, Artificial Sequence
  Description of Artificial Sequence: Synthetic oligonucleotide
  Sense strand starting at position 1007 of SEQ ID NO: 1880466
ucaguuaguacugauguaa

SEQ ID NO: 1969277 - RNA, 19 nt, Artificial Sequence
  Description of Artificial Sequence: Synthetic oligonucleotide
  Antisense strand to SEQ ID NO: 1969276
uuacaucaguacuaacuga

SEQ ID NO: 1969278 - RNA, 19 nt, Artificial Sequence
  Description of Artificial Sequence: Synthetic oligonucleotide
  Sense strand starting at position 1065 of SEQ ID NO: 1880466
cuaugaacuugcuuauuag

SEQ ID NO: 1969279 - RNA, 19 nt, Artificial Sequence
  Description of Artificial Sequence: Synthetic oligonucleotide
  Antisense strand to SEQ ID NO: 1969278
cuaauaagcaaguucauag

SEQ ID NO: 1969280 - RNA, 19 nt, Artificial Sequence
  Description of Artificial Sequence: Synthetic oligonucleotide
  Sense strand starting at position 1407 of SEQ ID NO: 1880466
ggaaucauauuaguaguau

SEQ ID NO: 1969281 - RNA, 19 nt, Artificial Sequence
  Description of Artificial Sequence: Synthetic oligonucleotide
  Antisense strand to SEQ ID NO: 1969280
auacuacuaauaugauucc

SEQ ID NO: 1969282 - RNA, 19 nt, Artificial Sequence
  Description of Artificial Sequence: Synthetic oligonucleotide
  Sense strand starting at position 1482 of SEQ ID NO: 1880466
ugcuuaggauucucuuaau

SEQ ID NO: 1969283 - RNA, 19 nt, Artificial Sequence
  Description of Artificial Sequence: Synthetic oligonucleotide
  Antisense strand to SEQ ID NO: 1969282
auuaagagaauccuaagca

SEQ ID NO: 1969284 - RNA, 19 nt, Artificial Sequence
  Description of Artificial Sequence: Synthetic oligonucleotide
  Sense strand starting at position 1537 of SEQ ID NO: 1880466
agacaauauguugguuuau

SEQ ID NO: 1969285 - RNA, 19 nt, Artificial Sequence
  Description of Artificial Sequence: Synthetic oligonucleotide
  Antisense strand to SEQ ID NO: 1969284
auaaaccaacauauugucu

SEQ ID NO: 1969286 - RNA, 19 nt, Artificial Sequence
  Description of Artificial Sequence: Synthetic oligonucleotide
  Sense strand starting at position 1538 of SEQ ID NO: 1880466
gacaauauguugguuuauu

SEQ ID NO: 1969287 - RNA, 19 nt, Artificial Sequence
  Description of Artificial Sequence: Synthetic oligonucleotide
  Antisense strand to SEQ ID NO: 1969286
aauaaaccaacauauuguc

SEQ ID NO: 1969288 - RNA, 19 nt, Artificial Sequence
  Description of Artificial Sequence: Synthetic oligonucleotide
  Sense strand starting at position 1679 of SEQ ID NO: 1880466
auugcuauauacgucauuu

SEQ ID NO: 1969289 - RNA, 19 nt, Artificial Sequence
  Description of Artificial Sequence: Synthetic oligonucleotide
  Antisense strand to SEQ ID NO: 1969288
aaaugacguauauagcaau

SEQ ID NO: 1969290 - RNA, 19 nt, Artificial Sequence
  Description of Artificial Sequence: Synthetic oligonucleotide
  Sense strand starting at position 1704 of SEQ ID NO: 1880466
uguauagcgcaguuuaauu

SEQ ID NO: 1969291 - RNA, 19 nt, Artificial Sequence
  Description of Artificial Sequence: Synthetic oligonucleotide
  Antisense strand to SEQ ID NO: 1969290
aauuaaacugcgcuauaca

SEQ ID NO: 1969292 - RNA, 19 nt, Artificial Sequence
  Description of Artificial Sequence: Synthetic oligonucleotide
  Sense strand starting at position 1841 of SEQ ID NO: 1880466
ugugaagaauuguuaacua

SEQ ID NO: 1969293 - RNA, 19 nt, Artificial Sequence
  Description of Artificial Sequence: Synthetic oligonucleotide
  Antisense strand to SEQ ID NO: 1969292
uaguuaacaauucuucaca

SEQ ID NO: 1969294 - RNA, 19 nt, Artificial Sequence
  Description of Artificial Sequence: Synthetic oligonucleotide
  Sense strand starting at position 2438 of SEQ ID NO: 1880466
ggacacaugccugggagaa

SEQ ID NO: 1969295 - RNA, 19 nt, Artificial Sequence
  Description of Artificial Sequence: Synthetic oligonucleotide
  Antisense strand to SEQ ID NO: 1969294
uucucccaggcaugugucc

SEQ ID NO: 1969296 - RNA, 19 nt, Artificial Sequence
  Description of Artificial Sequence: Synthetic oligonucleotide
  Sense strand starting at position 2439 of SEQ ID NO: 1880466
gacacaugccugggagaag

SEQ ID NO: 1969297 - RNA, 19 nt, Artificial Sequence
  Description of Artificial Sequence: Synthetic oligonucleotide
  Antisense strand to SEQ ID NO: 1969296
cuucucccaggcauguguc

SEQ ID NO: 1969298 - RNA, 19 nt, Artificial Sequence
  Description of Artificial Sequence: Synthetic oligonucleotide
  Sense strand starting at position 2453 of SEQ ID NO: 1880466
agaagagguacuuggucaa

SEQ ID NO: 1969299 - RNA, 19 nt, Artificial Sequence
  Description of Artificial Sequence: Synthetic oligonucleotide
  Antisense strand to SEQ ID NO: 1969298
uugaccaaguaccucuucu

SEQ ID NO: 1969300 - RNA, 19 nt, Artificial Sequence
  Description of Artificial Sequence: Synthetic oligonucleotide
  Sense strand starting at position 2457 of SEQ ID NO: 1880466
gagguacuuggucaaagca

SEQ ID NO: 1969301 - RNA, 19 nt, Artificial Sequence
  Description of Artificial Sequence: Synthetic oligonucleotide
  Antisense strand to SEQ ID NO: 1969300
ugcuuugaccaaguaccuc

SEQ ID NO: 1969302 - RNA, 19 nt, Artificial Sequence
  Description of Artificial Sequence: Synthetic oligonucleotide
  Sense strand starting at position 2473 of SEQ ID NO: 1880466
gcaugugugcaugucauca

SEQ ID NO: 1969303 - RNA, 19 nt, Artificial Sequence
  Description of Artificial Sequence: Synthetic oligonucleotide
  Antisense strand to SEQ ID NO: 1969302
ugaugacaugcacacaugc

SEQ ID NO: 1969304 - RNA, 19 nt, Artificial Sequence
  Description of Artificial Sequence: Synthetic oligonucleotide
  Sense strand starting at position 2584 of SEQ ID NO: 1880466
uguuuaugaugacuaaggu

SEQ ID NO: 1969305 - RNA, 19 nt, Artificial Sequence
  Description of Artificial Sequence: Synthetic oligonucleotide
  Antisense strand to SEQ ID NO: 1969304
accuuagucaucauaaaca

SEQ ID NO: 1969306 - RNA, 19 nt, Artificial Sequence
  Description of Artificial Sequence: Synthetic oligonucleotide
  Sense strand starting at position 2814 of SEQ ID NO: 1880466
gguuaaugucuucauggug

SEQ ID NO: 1969307 - RNA, 19 nt, Artificial Sequence
  Description of Artificial Sequence: Synthetic oligonucleotide
  Antisense strand to SEQ ID NO: 1969306
caccaugaagacauuaacc

SEQ ID NO: 1969308 - RNA, 19 nt, Artificial Sequence
  Description of Artificial Sequence: Synthetic oligonucleotide
  Sense strand starting at position 2906 of SEQ ID NO: 1880466
aucacagacuuguuuauga

SEQ ID NO: 1969309 - RNA, 19 nt, Artificial Sequence
  Description of Artificial Sequence: Synthetic oligonucleotide
  Antisense strand to SEQ ID NO: 1969308
ucauaaacaagucugugau

SEQ ID NO: 1969310 - RNA, 19 nt, Artificial Sequence
  Description of Artificial Sequence: Synthetic oligonucleotide
  Sense strand starting at position 2927 of SEQ ID NO: 1880466
uccuuuauuugggaaacua

SEQ ID NO: 1969311 - RNA, 19 nt, Artificial Sequence
  Description of Artificial Sequence: Synthetic oligonucleotide
  Antisense strand to SEQ ID NO: 1969310
uaguuucccaaauaaagga

SEQ ID NO: 1969312 - RNA, 19 nt, Artificial Sequence
  Description of Artificial Sequence: Synthetic oligonucleotide
  Sense strand starting at position 3004 of SEQ ID NO: 1880466
uaauccauguggguuuaau

SEQ ID NO: 1969313 - RNA, 19 nt, Artificial Sequence
  Description of Artificial Sequence: Synthetic oligonucleotide
  Antisense strand to SEQ ID NO: 1969312
auuaaacccacauggauua

SEQ ID NO: 1969314 - RNA, 19 nt, Artificial Sequence
  Description of Artificial Sequence: Synthetic oligonucleotide
  Sense strand starting at position 3122 of SEQ ID NO: 1880466
cuggcuuauguacaauaaa

SEQ ID NO: 1969315 - RNA, 19 nt, Artificial Sequence
  Description of Artificial Sequence: Synthetic oligonucleotide
  Antisense strand to SEQ ID NO: 1969314
uuuauuguacauaagccag

SEQ ID NO: 1969316 - RNA, 19 nt, Artificial Sequence
  Description of Artificial Sequence: Synthetic oligonucleotide
  Sense strand starting at position 3180 of SEQ ID NO: 1880466
gccauuuauucuguuucuu

SEQ ID NO: 1969317 - RNA, 19 nt, Artificial Sequence
  Description of Artificial Sequence: Synthetic oligonucleotide
  Antisense strand to SEQ ID NO: 1969316
aagaaacagaauaaauggc

SEQ ID NO: 1969318 - RNA, 19 nt, Artificial Sequence
  Description of Artificial Sequence: Synthetic oligonucleotide
  Sense strand starting at position 3349 of SEQ ID NO: 1880466
uugagaauguacuugucaa

SEQ ID NO: 1969319 - RNA, 19 nt, Artificial Sequence
  Description of Artificial Sequence: Synthetic oligonucleotide
  Antisense strand to SEQ ID NO: 1969318
uugacaaguacauucucaa

SEQ ID NO: 1969320 - RNA, 19 nt, Artificial Sequence
  Description of Artificial Sequence: Synthetic oligonucleotide
  Sense strand starting at position 3464 of SEQ ID NO: 1880466
ugauuugagucuuacuuaa

SEQ ID NO: 1969321 - RNA, 19 nt, Artificial Sequence
  Description of Artificial Sequence: Synthetic oligonucleotide
  Antisense strand to SEQ ID NO: 1969320
uuaaguaagacucaaauca

SEQ ID NO: 1969322 - RNA, 19 nt, Artificial Sequence
  Description of Artificial Sequence: Synthetic oligonucleotide
  Sense strand starting at position 3547 of SEQ ID NO: 1880466
uugugcaugcuuucguauu

SEQ ID NO: 1969323 - RNA, 19 nt, Artificial Sequence
  Description of Artificial Sequence: Synthetic oligonucleotide
  Antisense strand to SEQ ID NO: 1969322
aauacgaaagcaugcacaa

SEQ ID NO: 1969324 - RNA, 19 nt, Artificial Sequence
  Description of Artificial Sequence: Synthetic oligonucleotide
  Sense strand starting at position 3633 of SEQ ID NO: 1880466
ucauaacuagucugauugu

SEQ ID NO: 1969325 - RNA, 19 nt, Artificial Sequence
  Description of Artificial Sequence: Synthetic oligonucleotide
  Antisense strand to SEQ ID NO: 1969324
acaaucagacuaguuauga

SEQ ID NO: 1969326 - RNA, 19 nt, Artificial Sequence
  Description of Artificial Sequence: Synthetic oligonucleotide
  Sense strand starting at position 25 of SEQ ID NO: 1880467
caucuauggugauugaauu

SEQ ID NO: 1969327 - RNA, 19 nt, Artificial Sequence
  Description of Artificial Sequence: Synthetic oligonucleotide
  Antisense strand to SEQ ID NO: 1969326
aauucaaucaccauagaug

SEQ ID NO: 1969328 - RNA, 19 nt, Artificial Sequence
  Description of Artificial Sequence: Synthetic oligonucleotide
  Sense strand starting at position 37 of SEQ ID NO: 1880467
uugaauugcagguguggaa

SEQ ID NO: 1969329 - RNA, 19 nt, Artificial Sequence
  Description of Artificial Sequence: Synthetic oligonucleotide
  Antisense strand to SEQ ID NO: 1969328
uuccacaccugcaauucaa

SEQ ID NO: 1969330 - RNA, 19 nt, Artificial Sequence
  Description of Artificial Sequence: Synthetic oligonucleotide
  Sense strand starting at position 196 of SEQ ID NO: 1880467
gagcaaguuccuuaacuug

SEQ ID NO: 1969331 - RNA, 19 nt, Artificial Sequence
  Description of Artificial Sequence: Synthetic oligonucleotide
  Antisense strand to SEQ ID NO: 1969330
caaguuaaggaacuugcuc

SEQ ID NO: 1969332 - RNA, 19 nt, Artificial Sequence
  Description of Artificial Sequence: Synthetic oligonucleotide
  Sense strand starting at position 222 of SEQ ID NO: 1880467
uuuacauuucuucgccagu

SEQ ID NO: 1969333 - RNA, 19 nt, Artificial Sequence
  Description of Artificial Sequence: Synthetic oligonucleotide
  Antisense strand to SEQ ID NO: 1969332
acuggcgaagaaauguaaa

SEQ ID NO: 1969334 - RNA, 19 nt, Artificial Sequence
  Description of Artificial Sequence: Synthetic oligonucleotide
  Sense strand starting at position 271 of SEQ ID NO: 1880467
ggugguugugaggauuaua

SEQ ID NO: 1969335 - RNA, 19 nt, Artificial Sequence
  Description of Artificial Sequence: Synthetic oligonucleotide
  Antisense strand to SEQ ID NO: 1969334
uauaauccucacaaccacc

SEQ ID NO: 1969336 - RNA, 19 nt, Artificial Sequence
  Description of Artificial Sequence: Synthetic oligonucleotide
  Sense strand starting at position 365 of SEQ ID NO: 1880467
caacuaaguuggguuagaa

SEQ ID NO: 1969337 - RNA, 19 nt, Artificial Sequence
  Description of Artificial Sequence: Synthetic oligonucleotide
  Antisense strand to SEQ ID NO: 1969336
uucuaacccaacuuaguug

SEQ ID NO: 1969338 - RNA, 19 nt, Artificial Sequence
  Description of Artificial Sequence: Synthetic oligonucleotide
  Sense strand starting at position 600 of SEQ ID NO: 1880467
cagcaauuccuagagucag

SEQ ID NO: 1969339 - RNA, 19 nt, Artificial Sequence
  Description of Artificial Sequence: Synthetic oligonucleotide
  Antisense strand to SEQ ID NO: 1969338
cugacucuaggaauugcug

SEQ ID NO: 1969340 - RNA, 19 nt, Artificial Sequence
  Description of Artificial Sequence: Synthetic oligonucleotide
  Sense strand starting at position 640 of SEQ ID NO: 1880467
gagagcucagucuauguuu

SEQ ID NO: 1969341 - RNA, 19 nt, Artificial Sequence
  Description of Artificial Sequence: Synthetic oligonucleotide
  Antisense strand to SEQ ID NO: 1969340
aaacauagacugagcucuc

SEQ ID NO: 1969342 - RNA, 19 nt, Artificial Sequence
  Description of Artificial Sequence: Synthetic oligonucleotide
  Sense strand starting at position 646 of SEQ ID NO: 1880467
ucagucuauguuuaagcua

SEQ ID NO: 1969343 - RNA, 19 nt, Artificial Sequence
  Description of Artificial Sequence: Synthetic oligonucleotide
  Antisense strand to SEQ ID NO: 1969342
uagcuuaaacauagacuga

SEQ ID NO: 1969344 - RNA, 19 nt, Artificial Sequence
  Description of Artificial Sequence: Synthetic oligonucleotide
  Sense strand starting at position 758 of SEQ ID NO: 1880467
auucucagucuuuagucua

SEQ ID NO: 1969345 - RNA, 19 nt, Artificial Sequence
  Description of Artificial Sequence: Synthetic oligonucleotide
  Antisense strand to SEQ ID NO: 1969344
uagacuaaagacugagaau

SEQ ID NO: 1969346 - RNA, 19 nt, Artificial Sequence
  Description of Artificial Sequence: Synthetic oligonucleotide
  Sense strand starting at position 866 of SEQ ID NO: 1880467
ggaauagaguuuccucauu

SEQ ID NO: 1969347 - RNA, 19 nt, Artificial Sequence
  Description of Artificial Sequence: Synthetic oligonucleotide
  Antisense strand to SEQ ID NO: 1969346
aaugaggaaacucuauucc

SEQ ID NO: 1969348 - RNA, 19 nt, Artificial Sequence
  Description of Artificial Sequence: Synthetic oligonucleotide
  Sense strand starting at position 1033 of SEQ ID NO: 1880467
cugggaaucucagcaaauc

SEQ ID NO: 1969349 - RNA, 19 nt, Artificial Sequence
  Description of Artificial Sequence: Synthetic oligonucleotide
  Antisense strand to SEQ ID NO: 1969348
gauuugcugagauucccag

SEQ ID NO: 1969350 - RNA, 19 nt, Artificial Sequence
  Description of Artificial Sequence: Synthetic oligonucleotide
  Sense strand starting at position 1101 of SEQ ID NO: 1880467
uaucauuugugggaaauac

SEQ ID NO: 1969351 - RNA, 19 nt, Artificial Sequence
  Description of Artificial Sequence: Synthetic oligonucleotide
  Antisense strand to SEQ ID NO: 1969350
guauuucccacaaaugaua

SEQ ID NO: 1969352 - RNA, 19 nt, Artificial Sequence
  Description of Artificial Sequence: Synthetic oligonucleotide
  Sense strand starting at position 1201 of SEQ ID NO: 1880467
ucaaaugagucggccaaac

SEQ ID NO: 1969353 - RNA, 19 nt, Artificial Sequence
  Description of Artificial Sequence: Synthetic oligonucleotide
  Antisense strand to SEQ ID NO: 1969352
guuuggccgacucauuuga

SEQ ID NO: 1969354 - RNA, 19 nt, Artificial Sequence
  Description of Artificial Sequence: Synthetic oligonucleotide
  Sense strand starting at position 1203 of SEQ ID NO: 1880467
aaaugagucggccaaaccu

SEQ ID NO: 1969355 - RNA, 19 nt, Artificial Sequence
  Description of Artificial Sequence: Synthetic oligonucleotide
  Antisense strand to SEQ ID NO: 1969354
agguuuggccgacucauuu

SEQ ID NO: 1969356 - RNA, 19 nt, Artificial Sequence
  Description of Artificial Sequence: Synthetic oligonucleotide
  Sense strand starting at position 1210 of SEQ ID NO: 1880467
ucggccaaaccuugacaau

SEQ ID NO: 1969357 - RNA, 19 nt, Artificial Sequence
  Description of Artificial Sequence: Synthetic oligonucleotide
  Antisense strand to SEQ ID NO: 1969356
auugucaagguuuggccga

SEQ ID NO: 1969358 - RNA, 19 nt, Artificial Sequence
  Description of Artificial Sequence: Synthetic oligonucleotide
  Sense strand starting at position 1211 of SEQ ID NO: 1880467
cggccaaaccuugacaauu

SEQ ID NO: 1969359 - RNA, 19 nt, Artificial Sequence
  Description of Artificial Sequence: Synthetic oligonucleotide
  Antisense strand to SEQ ID NO: 1969358
aauugucaagguuuggccg

SEQ ID NO: 1969360 - RNA, 19 nt, Artificial Sequence
  Description of Artificial Sequence: Synthetic oligonucleotide
  Sense strand starting at position 1408 of SEQ ID NO: 1880467
uguuccuaggcauaacaga

SEQ ID NO: 1969361 - RNA, 19 nt, Artificial Sequence
  Description of Artificial Sequence: Synthetic oligonucleotide
  Antisense strand to SEQ ID NO: 1969360
ucuguuaugccuaggaaca

SEQ ID NO: 1969362 - RNA, 19 nt, Artificial Sequence
  Description of Artificial Sequence: Synthetic oligonucleotide
  Sense strand starting at position 1560 of SEQ ID NO: 1880467
aagacuugccgccaggaga

SEQ ID NO: 1969363 - RNA, 19 nt, Artificial Sequence
  Description of Artificial Sequence: Synthetic oligonucleotide
  Antisense strand to SEQ ID NO: 1969362
ucuccuggcggcaagucuu

SEQ ID NO: 1969364 - RNA, 19 nt, Artificial Sequence
  Description of Artificial Sequence: Synthetic oligonucleotide
  Sense strand starting at position 1675 of SEQ ID NO: 1880467
augaaaccucuaugaguga

SEQ ID NO: 1969365 - RNA, 19 nt, Artificial Sequence
  Description of Artificial Sequence: Synthetic oligonucleotide
  Antisense strand to SEQ ID NO: 1969364
ucacucauagagguuucau

SEQ ID NO: 1969366 - RNA, 19 nt, Artificial Sequence
  Description of Artificial Sequence: Synthetic oligonucleotide
  Sense strand starting at position 1735 of SEQ ID NO: 1880467
ugccauacuccaggagaga

SEQ ID NO: 1969367 - RNA, 19 nt, Artificial Sequence
  Description of Artificial Sequence: Synthetic oligonucleotide
  Antisense strand to SEQ ID NO: 1969366
ucucuccuggaguauggca

SEQ ID NO: 1969368 - RNA, 19 nt, Artificial Sequence
  Description of Artificial Sequence: Synthetic oligonucleotide
  Sense strand starting at position 2071 of SEQ ID NO: 1880467
gagacaaggucuccaccaa

SEQ ID NO: 1969369 - RNA, 19 nt, Artificial Sequence
  Description of Artificial Sequence: Synthetic oligonucleotide
  Antisense strand to SEQ ID NO: 1969368
uugguggagaccuugucuc

SEQ ID NO: 1969370 - RNA, 19 nt, Artificial Sequence
  Description of Artificial Sequence: Synthetic oligonucleotide
  Sense strand starting at position 2193 of SEQ ID NO: 1880467
ccacccucuuauguauaga

SEQ ID NO: 1969371 - RNA, 19 nt, Artificial Sequence
  Description of Artificial Sequence: Synthetic oligonucleotide
  Antisense strand to SEQ ID NO: 1969370
ucuauacauaagagggugg

SEQ ID NO: 1969372 - RNA, 19 nt, Artificial Sequence
  Description of Artificial Sequence: Synthetic oligonucleotide
  Sense strand starting at position 2335 of SEQ ID NO: 1880467
acaggaagguuguugagau

SEQ ID NO: 1969373 - RNA, 19 nt, Artificial Sequence
  Description of Artificial Sequence: Synthetic oligonucleotide
  Antisense strand to SEQ ID NO: 1969372
aucucaacaaccuuccugu

SEQ ID NO: 1969374 - RNA, 19 nt, Artificial Sequence
  Description of Artificial Sequence: Synthetic oligonucleotide
  Sense strand starting at position 2455 of SEQ ID NO: 1880467
ugacaaagaucucugaguu

SEQ ID NO: 1969375 - RNA, 19 nt, Artificial Sequence
  Description of Artificial Sequence: Synthetic oligonucleotide
  Antisense strand to SEQ ID NO: 1969374
aacucagagaucuuuguca

SEQ ID NO: 1969376 - RNA, 19 nt, Artificial Sequence
  Description of Artificial Sequence: Synthetic oligonucleotide
  Sense strand starting at position 2456 of SEQ ID NO: 1880467
gacaaagaucucugaguua

SEQ ID NO: 1969377 - RNA, 19 nt, Artificial Sequence
  Description of Artificial Sequence: Synthetic oligonucleotide
  Antisense strand to SEQ ID NO: 1969376
uaacucagagaucuuuguc

SEQ ID NO: 1969378 - RNA, 19 nt, Artificial Sequence
  Description of Artificial Sequence: Synthetic oligonucleotide
  Sense strand starting at position 2600 of SEQ ID NO: 1880467
ucacuuaaugucuggcaaa

SEQ ID NO: 1969379 - RNA, 19 nt, Artificial Sequence
  Description of Artificial Sequence: Synthetic oligonucleotide
  Antisense strand to SEQ ID NO: 1969378
uuugccagacauuaaguga

SEQ ID NO: 1969380 - RNA, 19 nt, Artificial Sequence
  Description of Artificial Sequence: Synthetic oligonucleotide
  Sense strand starting at position 2840 of SEQ ID NO: 1880467
cuucuuauuucgcuggagu

SEQ ID NO: 1969381 - RNA, 19 nt, Artificial Sequence
  Description of Artificial Sequence: Synthetic oligonucleotide
  Antisense strand to SEQ ID NO: 1969380
acuccagcgaaauaagaag

SEQ ID NO: 1969382 - RNA, 19 nt, Artificial Sequence
  Description of Artificial Sequence: Synthetic oligonucleotide
  Sense strand starting at position 2841 of SEQ ID NO: 1880467
uucuuauuucgcuggagua

SEQ ID NO: 1969383 - RNA, 19 nt, Artificial Sequence
  Description of Artificial Sequence: Synthetic oligonucleotide
  Antisense strand to SEQ ID NO: 1969382
uacuccagcgaaauaagaa

SEQ ID NO: 1969384 - RNA, 19 nt, Artificial Sequence
  Description of Artificial Sequence: Synthetic oligonucleotide
  Sense strand starting at position 2842 of SEQ ID NO: 1880467
ucuuauuucgcuggaguac

SEQ ID NO: 1969385 - RNA, 19 nt, Artificial Sequence
  Description of Artificial Sequence: Synthetic oligonucleotide
  Antisense strand to SEQ ID NO: 1969384
guacuccagcgaaauaaga

SEQ ID NO: 1969386 - RNA, 19 nt, Artificial Sequence
  Description of Artificial Sequence: Synthetic oligonucleotide
  Sense strand starting at position 2890 of SEQ ID NO: 1880467
uuguuaucagccugggaga

SEQ ID NO: 1969387 - RNA, 19 nt, Artificial Sequence
  Description of Artificial Sequence: Synthetic oligonucleotide
  Antisense strand to SEQ ID NO: 1969386
ucucccaggcugauaacaa

SEQ ID NO: 1969388 - RNA, 19 nt, Artificial Sequence
  Description of Artificial Sequence: Synthetic oligonucleotide
  Sense strand starting at position 2949 of SEQ ID NO: 1880467
ugugauuuauuggaaacac

SEQ ID NO: 1969389 - RNA, 19 nt, Artificial Sequence
  Description of Artificial Sequence: Synthetic oligonucleotide
  Antisense strand to SEQ ID NO: 1969388
guguuuccaauaaaucaca

SEQ ID NO: 1969390 - RNA, 19 nt, Artificial Sequence
  Description of Artificial Sequence: Synthetic oligonucleotide
  Sense strand starting at position 3215 of SEQ ID NO: 1880467
gcauucuguccagaaucag

SEQ ID NO: 1969391 - RNA, 19 nt, Artificial Sequence
  Description of Artificial Sequence: Synthetic oligonucleotide
  Antisense strand to SEQ ID NO: 1969390
cugauucuggacagaaugc

SEQ ID NO: 1969392 - RNA, 19 nt, Artificial Sequence
  Description of Artificial Sequence: Synthetic oligonucleotide
  Sense strand starting at position 3369 of SEQ ID NO: 1880467
gcugcugugccuguaauga

SEQ ID NO: 1969393 - RNA, 19 nt, Artificial Sequence
  Description of Artificial Sequence: Synthetic oligonucleotide
  Antisense strand to SEQ ID NO: 1969392
ucauuacaggcacagcagc

SEQ ID NO: 1969394 - RNA, 19 nt, Artificial Sequence
  Description of Artificial Sequence: Synthetic oligonucleotide
  Sense strand starting at position 3481 of SEQ ID NO: 1880467
cgucucugagcuuucguga

SEQ ID NO: 1969395 - RNA, 19 nt, Artificial Sequence
  Description of Artificial Sequence: Synthetic oligonucleotide
  Antisense strand to SEQ ID NO: 1969394
ucacgaaagcucagagacg

SEQ ID NO: 1969396 - RNA, 19 nt, Artificial Sequence
  Description of Artificial Sequence: Synthetic oligonucleotide
  Sense strand starting at position 3484 of SEQ ID NO: 1880467
cucugagcuuucgugauuu

SEQ ID NO: 1969397 - RNA, 19 nt, Artificial Sequence
  Description of Artificial Sequence: Synthetic oligonucleotide
  Antisense strand to SEQ ID NO: 1969396
aaaucacgaaagcucagag

SEQ ID NO: 1969398 - RNA, 19 nt, Artificial Sequence
  Description of Artificial Sequence: Synthetic oligonucleotide
  Sense strand starting at position 3555 of SEQ ID NO: 1880467
ugguguucaccugacagga

SEQ ID NO: 1969399 - RNA, 19 nt, Artificial Sequence
  Description of Artificial Sequence: Synthetic oligonucleotide
  Antisense strand to SEQ ID NO: 1969398
uccugucaggugaacacca

SEQ ID NO: 1969400 - RNA, 19 nt, Artificial Sequence
  Description of Artificial Sequence: Synthetic oligonucleotide
  Sense strand starting at position 3698 of SEQ ID NO: 1880467
uggaauuauucccugggca

SEQ ID NO: 1969401 - RNA, 19 nt, Artificial Sequence
  Description of Artificial Sequence: Synthetic oligonucleotide
  Antisense strand to SEQ ID NO: 1969400
ugcccagggaauaauucca

SEQ ID NO: 1969402 - RNA, 19 nt, Artificial Sequence
  Description of Artificial Sequence: Synthetic oligonucleotide
  Sense strand starting at position 3699 of SEQ ID NO: 1880467
ggaauuauucccugggcag

SEQ ID NO: 1969403 - RNA, 19 nt, Artificial Sequence
  Description of Artificial Sequence: Synthetic oligonucleotide
  Antisense strand to SEQ ID NO: 1969402
cugcccagggaauaauucc

SEQ ID NO: 1969404 - RNA, 19 nt, Artificial Sequence
  Description of Artificial Sequence: Synthetic oligonucleotide
  Sense strand starting at position 3806 of SEQ ID NO: 1880467
gagcauuuccuguggugga

SEQ ID NO: 1969405 - RNA, 19 nt, Artificial Sequence
  Description of Artificial Sequence: Synthetic oligonucleotide
  Antisense strand to SEQ ID NO: 1969404
uccaccacaggaaaugcuc

SEQ ID NO: 1969406 - RNA, 19 nt, Artificial Sequence
  Description of Artificial Sequence: Synthetic oligonucleotide
  Sense strand starting at position 95 of SEQ ID NO: 1880468
uucugugagcaucacuuau

SEQ ID NO: 1969407 - RNA, 19 nt, Artificial Sequence
  Description of Artificial Sequence: Synthetic oligonucleotide
  Antisense strand to SEQ ID NO: 1969406
auaagugaugcucacagaa

SEQ ID NO: 1969408 - RNA, 19 nt, Artificial Sequence
  Description of Artificial Sequence: Synthetic oligonucleotide
  Sense strand starting at position 97 of SEQ ID NO: 1880468
cugugagcaucacuuauac

SEQ ID NO: 1969409 - RNA, 19 nt, Artificial Sequence
  Description of Artificial Sequence: Synthetic oligonucleotide
  Antisense strand to SEQ ID NO: 1969408
guauaagugaugcucacag

SEQ ID NO: 1969410 - RNA, 19 nt, Artificial Sequence
  Description of Artificial Sequence: Synthetic oligonucleotide
  Sense strand starting at position 145 of SEQ ID NO: 1880468
ucaucacugcucugcuaga

SEQ ID NO: 1969411 - RNA, 19 nt, Artificial Sequence
  Description of Artificial Sequence: Synthetic oligonucleotide
  Antisense strand to SEQ ID NO: 1969410
ucuagcagagcagugauga

SEQ ID NO: 1969412 - RNA, 19 nt, Artificial Sequence
  Description of Artificial Sequence: Synthetic oligonucleotide
  Sense strand starting at position 239 of SEQ ID NO: 1880468
auccauaaguacguuaaga

SEQ ID NO: 1969413 - RNA, 19 nt, Artificial Sequence
  Description of Artificial Sequence: Synthetic oligonucleotide
  Antisense strand to SEQ ID NO: 1969412
ucuuaacguacuuauggau

SEQ ID NO: 1969414 - RNA, 19 nt, Artificial Sequence
  Description of Artificial Sequence: Synthetic oligonucleotide
  Sense strand starting at position 241 of SEQ ID NO: 1880468
ccauaaguacguuaagaau

SEQ ID NO: 1969415 - RNA, 19 nt, Artificial Sequence
  Description of Artificial Sequence: Synthetic oligonucleotide
  Antisense strand to SEQ ID NO: 1969414
auucuuaacguacuuaugg

SEQ ID NO: 1969416 - RNA, 19 nt, Artificial Sequence
  Description of Artificial Sequence: Synthetic oligonucleotide
  Sense strand starting at position 247 of SEQ ID NO: 1880468
guacguuaagaauguggaa

SEQ ID NO: 1969417 - RNA, 19 nt, Artificial Sequence
  Description of Artificial Sequence: Synthetic oligonucleotide
  Antisense strand to SEQ ID NO: 1969416
uuccacauucuuaacguac

SEQ ID NO: 1969418 - RNA, 19 nt, Artificial Sequence
  Description of Artificial Sequence: Synthetic oligonucleotide
  Sense strand starting at position 249 of SEQ ID NO: 1880468
acguuaagaauguggaaug

SEQ ID NO: 1969419 - RNA, 19 nt, Artificial Sequence
  Description of Artificial Sequence: Synthetic oligonucleotide
  Antisense strand to SEQ ID NO: 1969418
cauuccacauucuuaacgu

SEQ ID NO: 1969420 - RNA, 19 nt, Artificial Sequence
  Description of Artificial Sequence: Synthetic oligonucleotide
  Sense strand starting at position 415 of SEQ ID NO: 1880468
ggcagcuuuguacauagaa

SEQ ID NO: 1969421 - RNA, 19 nt, Artificial Sequence
  Description of Artificial Sequence: Synthetic oligonucleotide
  Antisense strand to SEQ ID NO: 1969420
uucuauguacaaagcugcc

SEQ ID NO: 1969422 - RNA, 19 nt, Artificial Sequence
  Description of Artificial Sequence: Synthetic oligonucleotide
  Sense strand starting at position 431 of SEQ ID NO: 1880468
gaaguugcuccacacauga

SEQ ID NO: 1969423 - RNA, 19 nt, Artificial Sequence
  Description of Artificial Sequence: Synthetic oligonucleotide
  Antisense strand to SEQ ID NO: 1969422
ucauguguggagcaacuuc

SEQ ID NO: 1969424 - RNA, 19 nt, Artificial Sequence
  Description of Artificial Sequence: Synthetic oligonucleotide
  Sense strand starting at position 480 of SEQ ID NO: 1880468
guaacuacuuauccaugga

SEQ ID NO: 1969425 - RNA, 19 nt, Artificial Sequence
  Description of Artificial Sequence: Synthetic oligonucleotide
  Antisense strand to SEQ ID NO: 1969424
uccauggauaaguaguuac

SEQ ID NO: 1969426 - RNA, 19 nt, Artificial Sequence
  Description of Artificial Sequence: Synthetic oligonucleotide
  Sense strand starting at position 484 of SEQ ID NO: 1880468
cuacuuauccauggaucag

SEQ ID NO: 1969427 - RNA, 19 nt, Artificial Sequence
  Description of Artificial Sequence: Synthetic oligonucleotide
  Antisense strand to SEQ ID NO: 1969426
cugauccauggauaaguag

SEQ ID NO: 1969428 - RNA, 19 nt, Artificial Sequence
  Description of Artificial Sequence: Synthetic oligonucleotide
  Sense strand starting at position 605 of SEQ ID NO: 1880468
gccuuccugggucaucuaa

SEQ ID NO: 1969429 - RNA, 19 nt, Artificial Sequence
  Description of Artificial Sequence: Synthetic oligonucleotide
  Antisense strand to SEQ ID NO: 1969428
uuagaugacccaggaaggc

SEQ ID NO: 1969430 - RNA, 19 nt, Artificial Sequence
  Description of Artificial Sequence: Synthetic oligonucleotide
  Sense strand starting at position 664 of SEQ ID NO: 1880468
gcauuucugaggugccuuu

SEQ ID NO: 1969431 - RNA, 19 nt, Artificial Sequence
  Description of Artificial Sequence: Synthetic oligonucleotide
  Antisense strand to SEQ ID NO: 1969430
aaaggcaccucagaaaugc

SEQ ID NO: 1969432 - RNA, 19 nt, Artificial Sequence
  Description of Artificial Sequence: Synthetic oligonucleotide
  Sense strand starting at position 1445 of SEQ ID NO: 1880468
acaauuguaguagggaauu

SEQ ID NO: 1969433 - RNA, 19 nt, Artificial Sequence
  Description of Artificial Sequence: Synthetic oligonucleotide
  Antisense strand to SEQ ID NO: 1969432
aauucccuacuacaauugu

SEQ ID NO: 1969434 - RNA, 19 nt, Artificial Sequence
  Description of Artificial Sequence: Synthetic oligonucleotide
  Sense strand starting at position 1451 of SEQ ID NO: 1880468
guaguagggaauuguauug

SEQ ID NO: 1969435 - RNA, 19 nt, Artificial Sequence
  Description of Artificial Sequence: Synthetic oligonucleotide
  Antisense strand to SEQ ID NO: 1969434
caauacaauucccuacuac

SEQ ID NO: 1969436 - RNA, 19 nt, Artificial Sequence
  Description of Artificial Sequence: Synthetic oligonucleotide
  Sense strand starting at position 1589 of SEQ ID NO: 1880468
gaauaagacuuagcgaacu

SEQ ID NO: 1969437 - RNA, 19 nt, Artificial Sequence
  Description of Artificial Sequence: Synthetic oligonucleotide
  Antisense strand to SEQ ID NO: 1969436
aguucgcuaagucuuauuc

SEQ ID NO: 1969438 - RNA, 19 nt, Artificial Sequence
  Description of Artificial Sequence: Synthetic oligonucleotide
  Sense strand starting at position 1694 of SEQ ID NO: 1880468
caauaaggucccggaguga

SEQ ID NO: 1969439 - RNA, 19 nt, Artificial Sequence
  Description of Artificial Sequence: Synthetic oligonucleotide
  Antisense strand to SEQ ID NO: 1969438
ucacuccgggaccuuauug

SEQ ID NO: 1969440 - RNA, 19 nt, Artificial Sequence
  Description of Artificial Sequence: Synthetic oligonucleotide
  Sense strand starting at position 2356 of SEQ ID NO: 1880468
uguguagugagauggauug

SEQ ID NO: 1969441 - RNA, 19 nt, Artificial Sequence
  Description of Artificial Sequence: Synthetic oligonucleotide
  Antisense strand to SEQ ID NO: 1969440
caauccaucucacuacaca

SEQ ID NO: 1969442 - RNA, 19 nt, Artificial Sequence
  Description of Artificial Sequence: Synthetic oligonucleotide
  Sense strand starting at position 2439 of SEQ ID NO: 1880468
acgugauagcgauagagac

SEQ ID NO: 1969443 - RNA, 19 nt, Artificial Sequence
  Description of Artificial Sequence: Synthetic oligonucleotide
  Antisense strand to SEQ ID NO: 1969442
gucucuaucgcuaucacgu

SEQ ID NO: 1969444 - RNA, 19 nt, Artificial Sequence
  Description of Artificial Sequence: Synthetic oligonucleotide
  Sense strand starting at position 2479 of SEQ ID NO: 1880468
ggaacuauuugacaucucu

SEQ ID NO: 1969445 - RNA, 19 nt, Artificial Sequence
  Description of Artificial Sequence: Synthetic oligonucleotide
  Antisense strand to SEQ ID NO: 1969444
agagaugucaaauaguucc

SEQ ID NO: 1969446 - RNA, 19 nt, Artificial Sequence
  Description of Artificial Sequence: Synthetic oligonucleotide
  Sense strand starting at position 2550 of SEQ ID NO: 1880468
aagugucagucugugauga

SEQ ID NO: 1969447 - RNA, 19 nt, Artificial Sequence
  Description of Artificial Sequence: Synthetic oligonucleotide
  Antisense strand to SEQ ID NO: 1969446
ucaucacagacugacacuu

SEQ ID NO: 1969448 - RNA, 19 nt, Artificial Sequence
  Description of Artificial Sequence: Synthetic oligonucleotide
  Sense strand starting at position 2551 of SEQ ID NO: 1880468
agugucagucugugaugaa

SEQ ID NO: 1969449 - RNA, 19 nt, Artificial Sequence
  Description of Artificial Sequence: Synthetic oligonucleotide
  Antisense strand to SEQ ID NO: 1969448
uucaucacagacugacacu

SEQ ID NO: 1969450 - RNA, 19 nt, Artificial Sequence
  Description of Artificial Sequence: Synthetic oligonucleotide
  Sense strand starting at position 2555 of SEQ ID NO: 1880468
ucagucugugaugaacuaa

SEQ ID NO: 1969451 - RNA, 19 nt, Artificial Sequence
  Description of Artificial Sequence: Synthetic oligonucleotide
  Antisense strand to SEQ ID NO: 1969450
uuaguucaucacagacuga

SEQ ID NO: 1969452 - RNA, 19 nt, Artificial Sequence
  Description of Artificial Sequence: Synthetic oligonucleotide
  Sense strand starting at position 2586 of SEQ ID NO: 1880468
ggugcuuugccagagguga

SEQ ID NO: 1969453 - RNA, 19 nt, Artificial Sequence
  Description of Artificial Sequence: Synthetic oligonucleotide
  Antisense strand to SEQ ID NO: 1969452
ucaccucuggcaaagcacc

SEQ ID NO: 1969454 - RNA, 19 nt, Artificial Sequence
  Description of Artificial Sequence: Synthetic oligonucleotide
  Sense strand starting at position 2705 of SEQ ID NO: 1880468
guuucuccucuguaauaug

SEQ ID NO: 1969455 - RNA, 19 nt, Artificial Sequence
  Description of Artificial Sequence: Synthetic oligonucleotide
  Antisense strand to SEQ ID NO: 1969454
cauauuacagaggagaaac

SEQ ID NO: 1969456 - RNA, 19 nt, Artificial Sequence
  Description of Artificial Sequence: Synthetic oligonucleotide
  Sense strand starting at position 2758 of SEQ ID NO: 1880468
gcaagaauucuacaaguac

SEQ ID NO: 1969457 - RNA, 19 nt, Artificial Sequence
  Description of Artificial Sequence: Synthetic oligonucleotide
  Antisense strand to SEQ ID NO: 1969456
guacuuguagaauucuugc

SEQ ID NO: 1969458 - RNA, 19 nt, Artificial Sequence
  Description of Artificial Sequence: Synthetic oligonucleotide
  Sense strand starting at position 2819 of SEQ ID NO: 1880468
gugugugauuauuuguaga

SEQ ID NO: 1969459 - RNA, 19 nt, Artificial Sequence
  Description of Artificial Sequence: Synthetic oligonucleotide
  Antisense strand to SEQ ID NO: 1969458
ucuacaaauaaucacacac

SEQ ID NO: 1969460 - RNA, 19 nt, Artificial Sequence
  Description of Artificial Sequence: Synthetic oligonucleotide
  Sense strand starting at position 2821 of SEQ ID NO: 1880468
gugugauuauuuguagacg

SEQ ID NO: 1969461 - RNA, 19 nt, Artificial Sequence
  Description of Artificial Sequence: Synthetic oligonucleotide
  Antisense strand to SEQ ID NO: 1969460
cgucuacaaauaaucacac

SEQ ID NO: 1969462 - RNA, 19 nt, Artificial Sequence
  Description of Artificial Sequence: Synthetic oligonucleotide
  Sense strand starting at position 2839 of SEQ ID NO: 1880468
gcuucuugacuugaguuga

SEQ ID NO: 1969463 - RNA, 19 nt, Artificial Sequence
  Description of Artificial Sequence: Synthetic oligonucleotide
  Antisense strand to SEQ ID NO: 1969462
ucaacucaagucaagaagc

SEQ ID NO: 1969464 - RNA, 19 nt, Artificial Sequence
  Description of Artificial Sequence: Synthetic oligonucleotide
  Sense strand starting at position 2885 of SEQ ID NO: 1880468
acucucuuucugggaaucu

SEQ ID NO: 1969465 - RNA, 19 nt, Artificial Sequence
  Description of Artificial Sequence: Synthetic oligonucleotide
  Antisense strand to SEQ ID NO: 1969464
agauucccagaaagagagu

SEQ ID NO: 1969466 - RNA, 19 nt, Artificial Sequence
  Description of Artificial Sequence: Synthetic oligonucleotide
  Sense strand starting at position 2927 of SEQ ID NO: 1880468
acucuuugauggcuguuau

SEQ ID NO: 1969467 - RNA, 19 nt, Artificial Sequence
  Description of Artificial Sequence: Synthetic oligonucleotide
  Antisense strand to SEQ ID NO: 1969466
auaacagccaucaaagagu

SEQ ID NO: 1969468 - RNA, 19 nt, Artificial Sequence
  Description of Artificial Sequence: Synthetic oligonucleotide
  Sense strand starting at position 2928 of SEQ ID NO: 1880468
cucuuugauggcuguuaua

SEQ ID NO: 1969469 - RNA, 19 nt, Artificial Sequence
  Description of Artificial Sequence: Synthetic oligonucleotide
  Antisense strand to SEQ ID NO: 1969468
uauaacagccaucaaagag

SEQ ID NO: 1969470 - RNA, 19 nt, Artificial Sequence
  Description of Artificial Sequence: Synthetic oligonucleotide
  Sense strand starting at position 2969 of SEQ ID NO: 1880468
gcuucuuuccauggugaca

SEQ ID NO: 1969471 - RNA, 19 nt, Artificial Sequence
  Description of Artificial Sequence: Synthetic oligonucleotide
  Antisense strand to SEQ ID NO: 1969470
ugucaccauggaaagaagc

SEQ ID NO: 1969472 - RNA, 19 nt, Artificial Sequence
  Description of Artificial Sequence: Synthetic oligonucleotide
  Sense strand starting at position 2980 of SEQ ID NO: 1880468
uggugacauuuccauccca

SEQ ID NO: 1969473 - RNA, 19 nt, Artificial Sequence
  Description of Artificial Sequence: Synthetic oligonucleotide
  Antisense strand to SEQ ID NO: 1969472
ugggauggaaaugucacca

SEQ ID NO: 1969474 - RNA, 19 nt, Artificial Sequence
  Description of Artificial Sequence: Synthetic oligonucleotide
  Sense strand starting at position 3122 of SEQ ID NO: 1880468
gucugaagagaagguguua

SEQ ID NO: 1969475 - RNA, 19 nt, Artificial Sequence
  Description of Artificial Sequence: Synthetic oligonucleotide
  Antisense strand to SEQ ID NO: 1969474
uaacaccuucucuucagac

SEQ ID NO: 1969476 - RNA, 19 nt, Artificial Sequence
  Description of Artificial Sequence: Synthetic oligonucleotide
  Sense strand starting at position 3134 of SEQ ID NO: 1880468
gguguuaagccaugagagg

SEQ ID NO: 1969477 - RNA, 19 nt, Artificial Sequence
  Description of Artificial Sequence: Synthetic oligonucleotide
  Antisense strand to SEQ ID NO: 1969476
ccucucauggcuuaacacc

SEQ ID NO: 1969478 - RNA, 19 nt, Artificial Sequence
  Description of Artificial Sequence: Synthetic oligonucleotide
  Sense strand starting at position 3251 of SEQ ID NO: 1880468
ggcgucauuguguuacugu

SEQ ID NO: 1969479 - RNA, 19 nt, Artificial Sequence
  Description of Artificial Sequence: Synthetic oligonucleotide
  Antisense strand to SEQ ID NO: 1969478
acaguaacacaaugacgcc

SEQ ID NO: 1969480 - RNA, 19 nt, Artificial Sequence
  Description of Artificial Sequence: Synthetic oligonucleotide
  Sense strand starting at position 3663 of SEQ ID NO: 1880468
gggucuuuauaaccuguau

SEQ ID NO: 1969481 - RNA, 19 nt, Artificial Sequence
  Description of Artificial Sequence: Synthetic oligonucleotide
  Antisense strand to SEQ ID NO: 1969480
auacagguuauaaagaccc

SEQ ID NO: 1969482 - RNA, 19 nt, Artificial Sequence
  Description of Artificial Sequence: Synthetic oligonucleotide
  Sense strand starting at position 3796 of SEQ ID NO: 1880468
gagucacucuuguucgaau

SEQ ID NO: 1969483 - RNA, 19 nt, Artificial Sequence
  Description of Artificial Sequence: Synthetic oligonucleotide
  Antisense strand to SEQ ID NO: 1969482
auucgaacaagagugacuc

SEQ ID NO: 1969484 - RNA, 19 nt, Artificial Sequence
  Description of Artificial Sequence: Synthetic oligonucleotide
  Sense strand starting at position 3820 of SEQ ID NO: 1880468
ugacaauugcagcaagcuu

SEQ ID NO: 1969485 - RNA, 19 nt, Artificial Sequence
  Description of Artificial Sequence: Synthetic oligonucleotide
  Antisense strand to SEQ ID NO: 1969484
aagcuugcugcaauuguca

SEQ ID NO: 1969486 - RNA, 19 nt, Artificial Sequence
  Description of Artificial Sequence: Synthetic oligonucleotide
  Sense strand starting at position 375 of SEQ ID NO: 1880469
ggcaaauguucccucuugu

SEQ ID NO: 1969487 - RNA, 19 nt, Artificial Sequence
  Description of Artificial Sequence: Synthetic oligonucleotide
  Antisense strand to SEQ ID NO: 1969486
acaagagggaacauuugcc

SEQ ID NO: 1969488 - RNA, 19 nt, Artificial Sequence
  Description of Artificial Sequence: Synthetic oligonucleotide
  Sense strand starting at position 424 of SEQ ID NO: 1880469
gugggaggccuaugagauc

SEQ ID NO: 1969489 - RNA, 19 nt, Artificial Sequence
  Description of Artificial Sequence: Synthetic oligonucleotide
  Antisense strand to SEQ ID NO: 1969488
gaucucauaggccucccac

SEQ ID NO: 1969490 - RNA, 19 nt, Artificial Sequence
  Description of Artificial Sequence: Synthetic oligonucleotide
  Sense strand starting at position 433 of SEQ ID NO: 1880469
cuaugagaucucugacauu

SEQ ID NO: 1969491 - RNA, 19 nt, Artificial Sequence
  Description of Artificial Sequence: Synthetic oligonucleotide
  Antisense strand to SEQ ID NO: 1969490
aaugucagagaucucauag

SEQ ID NO: 1969492 - RNA, 19 nt, Artificial Sequence
  Description of Artificial Sequence: Synthetic oligonucleotide
  Sense strand starting at position 487 of SEQ ID NO: 1880469
gacuacugcuguccaagaa

SEQ ID NO: 1969493 - RNA, 19 nt, Artificial Sequence
  Description of Artificial Sequence: Synthetic oligonucleotide
  Antisense strand to SEQ ID NO: 1969492
uucuuggacagcaguaguc

SEQ ID NO: 1969494 - RNA, 19 nt, Artificial Sequence
  Description of Artificial Sequence: Synthetic oligonucleotide
  Sense strand starting at position 550 of SEQ ID NO: 1880469
cugugaaugcuguggaaua

SEQ ID NO: 1969495 - RNA, 19 nt, Artificial Sequence
  Description of Artificial Sequence: Synthetic oligonucleotide
  Antisense strand to SEQ ID NO: 1969494
uauuccacagcauucacag

SEQ ID NO: 1969496 - RNA, 19 nt, Artificial Sequence
  Description of Artificial Sequence: Synthetic oligonucleotide
  Sense strand starting at position 552 of SEQ ID NO: 1880469
gugaaugcuguggaauaua

SEQ ID NO: 1969497 - RNA, 19 nt, Artificial Sequence
  Description of Artificial Sequence: Synthetic oligonucleotide
  Antisense strand to SEQ ID NO: 1969496
uauauuccacagcauucac

SEQ ID NO: 1969498 - RNA, 19 nt, Artificial Sequence
  Description of Artificial Sequence: Synthetic oligonucleotide
  Sense strand starting at position 653 of SEQ ID NO: 1880469
ggguuaugacauuguccgu

SEQ ID NO: 1969499 - RNA, 19 nt, Artificial Sequence
  Description of Artificial Sequence: Synthetic oligonucleotide
  Antisense strand to SEQ ID NO: 1969498
acggacaaugucauaaccc

SEQ ID NO: 1969500 - RNA, 19 nt, Artificial Sequence
  Description of Artificial Sequence: Synthetic oligonucleotide
  Sense strand starting at position 656 of SEQ ID NO: 1880469
uuaugacauuguccguaua

SEQ ID NO: 1969501 - RNA, 19 nt, Artificial Sequence
  Description of Artificial Sequence: Synthetic oligonucleotide
  Antisense strand to SEQ ID NO: 1969500
uauacggacaaugucauaa

SEQ ID NO: 1969502 - RNA, 19 nt, Artificial Sequence
  Description of Artificial Sequence: Synthetic oligonucleotide
  Sense strand starting at position 659 of SEQ ID NO: 1880469
ugacauuguccguauacca

SEQ ID NO: 1969503 - RNA, 19 nt, Artificial Sequence
  Description of Artificial Sequence: Synthetic oligonucleotide
  Antisense strand to SEQ ID NO: 1969502
ugguauacggacaauguca

SEQ ID NO: 1969504 - RNA, 19 nt, Artificial Sequence
  Description of Artificial Sequence: Synthetic oligonucleotide
  Sense strand starting at position 724 of SEQ ID NO: 1880469
agaucauguucucagacca

SEQ ID NO: 1969505 - RNA, 19 nt, Artificial Sequence
  Description of Artificial Sequence: Synthetic oligonucleotide
  Antisense strand to SEQ ID NO: 1969504
uggucugagaacaugaucu

SEQ ID NO: 1969506 - RNA, 19 nt, Artificial Sequence
  Description of Artificial Sequence: Synthetic oligonucleotide
  Sense strand starting at position 773 of SEQ ID NO: 1880469
agggauaguuuauacaaac

SEQ ID NO: 1969507 - RNA, 19 nt, Artificial Sequence
  Description of Artificial Sequence: Synthetic oligonucleotide
  Antisense strand to SEQ ID NO: 1969506
guuuguauaaacuaucccu

SEQ ID NO: 1969508 - RNA, 19 nt, Artificial Sequence
  Description of Artificial Sequence: Synthetic oligonucleotide
  Sense strand starting at position 848 of SEQ ID NO: 1880469
gcaaauugcuaguugcuua

SEQ ID NO: 1969509 - RNA, 19 nt, Artificial Sequence
  Description of Artificial Sequence: Synthetic oligonucleotide
  Antisense strand to SEQ ID NO: 1969508
uaagcaacuagcaauuugc

SEQ ID NO: 1969510 - RNA, 19 nt, Artificial Sequence
  Description of Artificial Sequence: Synthetic oligonucleotide
  Sense strand starting at position 852 of SEQ ID NO: 1880469
auugcuaguugcuuagagu

SEQ ID NO: 1969511 - RNA, 19 nt, Artificial Sequence
  Description of Artificial Sequence: Synthetic oligonucleotide
  Antisense strand to SEQ ID NO: 1969510
acucuaagcaacuagcaau

SEQ ID NO: 1969512 - RNA, 19 nt, Artificial Sequence
  Description of Artificial Sequence: Synthetic oligonucleotide
  Sense strand starting at position 853 of SEQ ID NO: 1880469
uugcuaguugcuuagagua

SEQ ID NO: 1969513 - RNA, 19 nt, Artificial Sequence
  Description of Artificial Sequence: Synthetic oligonucleotide
  Antisense strand to SEQ ID NO: 1969512
uacucuaagcaacuagcaa

SEQ ID NO: 1969514 - RNA, 19 nt, Artificial Sequence
  Description of Artificial Sequence: Synthetic oligonucleotide
  Sense strand starting at position 858 of SEQ ID NO: 1880469
aguugcuuagaguaucaau

SEQ ID NO: 1969515 - RNA, 19 nt, Artificial Sequence
  Description of Artificial Sequence: Synthetic oligonucleotide
  Antisense strand to SEQ ID NO: 1969514
auugauacucuaagcaacu

SEQ ID NO: 1969516 - RNA, 19 nt, Artificial Sequence
  Description of Artificial Sequence: Synthetic oligonucleotide
  Sense strand starting at position 1110 of SEQ ID NO: 1880469
uggcaagacugaucgagaa

SEQ ID NO: 1969517 - RNA, 19 nt, Artificial Sequence
  Description of Artificial Sequence: Synthetic oligonucleotide
  Antisense strand to SEQ ID NO: 1969516
uucucgaucagucuugcca

SEQ ID NO: 1969518 - RNA, 19 nt, Artificial Sequence
  Description of Artificial Sequence: Synthetic oligonucleotide
  Sense strand starting at position 1538 of SEQ ID NO: 1880469
agaauaauguaauugcagu

SEQ ID NO: 1969519 - RNA, 19 nt, Artificial Sequence
  Description of Artificial Sequence: Synthetic oligonucleotide
  Antisense strand to SEQ ID NO: 1969518
acugcaauuacauuauucu

SEQ ID NO: 1969520 - RNA, 19 nt, Artificial Sequence
  Description of Artificial Sequence: Synthetic oligonucleotide
  Sense strand starting at position 1775 of SEQ ID NO: 1880469
gggagcaggcucuaugcau

SEQ ID NO: 1969521 - RNA, 19 nt, Artificial Sequence
  Description of Artificial Sequence: Synthetic oligonucleotide
  Antisense strand to SEQ ID NO: 1969520
augcauagagccugcuccc

SEQ ID NO: 1969522 - RNA, 19 nt, Artificial Sequence
  Description of Artificial Sequence: Synthetic oligonucleotide
  Sense strand starting at position 1781 of SEQ ID NO: 1880469
aggcucuaugcaugcuaca

SEQ ID NO: 1969523 - RNA, 19 nt, Artificial Sequence
  Description of Artificial Sequence: Synthetic oligonucleotide
  Antisense strand to SEQ ID NO: 1969522
uguagcaugcauagagccu

SEQ ID NO: 1969524 - RNA, 19 nt, Artificial Sequence
  Description of Artificial Sequence: Synthetic oligonucleotide
  Sense strand starting at position 1801 of SEQ ID NO: 1880469
agcaguguccaugcauguu

SEQ ID NO: 1969525 - RNA, 19 nt, Artificial Sequence
  Description of Artificial Sequence: Synthetic oligonucleotide
  Antisense strand to SEQ ID NO: 1969524
aacaugcauggacacugcu

SEQ ID NO: 1969526 - RNA, 19 nt, Artificial Sequence
  Description of Artificial Sequence: Synthetic oligonucleotide
  Sense strand starting at position 1915 of SEQ ID NO: 1880469
cugaguucucguuuggcgu

SEQ ID NO: 1969527 - RNA, 19 nt, Artificial Sequence
  Description of Artificial Sequence: Synthetic oligonucleotide
  Antisense strand to SEQ ID NO: 1969526
acgccaaacgagaacucag

SEQ ID NO: 1969528 - RNA, 19 nt, Artificial Sequence
  Description of Artificial Sequence: Synthetic oligonucleotide
  Sense strand starting at position 2042 of SEQ ID NO: 1880469
acgugagcuuucucugaag

SEQ ID NO: 1969529 - RNA, 19 nt, Artificial Sequence
  Description of Artificial Sequence: Synthetic oligonucleotide
  Antisense strand to SEQ ID NO: 1969528
cuucagagaaagcucacgu

SEQ ID NO: 1969530 - RNA, 19 nt, Artificial Sequence
  Description of Artificial Sequence: Synthetic oligonucleotide
  Sense strand starting at position 2115 of SEQ ID NO: 1880469
gcaucuauccauugucucu

SEQ ID NO: 1969531 - RNA, 19 nt, Artificial Sequence
  Description of Artificial Sequence: Synthetic oligonucleotide
  Antisense strand to SEQ ID NO: 1969530
agagacaauggauagaugc

SEQ ID NO: 1969532 - RNA, 19 nt, Artificial Sequence
  Description of Artificial Sequence: Synthetic oligonucleotide
  Sense strand starting at position 2121 of SEQ ID NO: 1880469
auccauugucucugacacu

SEQ ID NO: 1969533 - RNA, 19 nt, Artificial Sequence
  Description of Artificial Sequence: Synthetic oligonucleotide
  Antisense strand to SEQ ID NO: 1969532
agugucagagacaauggau

SEQ ID NO: 1969534 - RNA, 19 nt, Artificial Sequence
  Description of Artificial Sequence: Synthetic oligonucleotide
  Sense strand starting at position 2326 of SEQ ID NO: 1880469
ucuguaucagauugagauu

SEQ ID NO: 1969535 - RNA, 19 nt, Artificial Sequence
  Description of Artificial Sequence: Synthetic oligonucleotide
  Antisense strand to SEQ ID NO: 1969534
aaucucaaucugauacaga

SEQ ID NO: 1969536 - RNA, 19 nt, Artificial Sequence
  Description of Artificial Sequence: Synthetic oligonucleotide
  Sense strand starting at position 2375 of SEQ ID NO: 1880469
aagggaacgugucaaacua

SEQ ID NO: 1969537 - RNA, 19 nt, Artificial Sequence
  Description of Artificial Sequence: Synthetic oligonucleotide
  Antisense strand to SEQ ID NO: 1969536
uaguuugacacguucccuu

SEQ ID NO: 1969538 - RNA, 19 nt, Artificial Sequence
  Description of Artificial Sequence: Synthetic oligonucleotide
  Sense strand starting at position 2443 of SEQ ID NO: 1880469
aacagagguuaugagaaau

SEQ ID NO: 1969539 - RNA, 19 nt, Artificial Sequence
  Description of Artificial Sequence: Synthetic oligonucleotide
  Antisense strand to SEQ ID NO: 1969538
auuucucauaaccucuguu

SEQ ID NO: 1969540 - RNA, 19 nt, Artificial Sequence
  Description of Artificial Sequence: Synthetic oligonucleotide
  Sense strand starting at position 2475 of SEQ ID NO: 1880469
ugccaagugcaauguguaa

SEQ ID NO: 1969541 - RNA, 19 nt, Artificial Sequence
  Description of Artificial Sequence: Synthetic oligonucleotide
  Antisense strand to SEQ ID NO: 1969540
uuacacauugcacuuggca

SEQ ID NO: 1969542 - RNA, 19 nt, Artificial Sequence
  Description of Artificial Sequence: Synthetic oligonucleotide
  Sense strand starting at position 2479 of SEQ ID NO: 1880469
aagugcaauguguaaacuu

SEQ ID NO: 1969543 - RNA, 19 nt, Artificial Sequence
  Description of Artificial Sequence: Synthetic oligonucleotide
  Antisense strand to SEQ ID NO: 1969542
aaguuuacacauugcacuu

SEQ ID NO: 1969544 - RNA, 19 nt, Artificial Sequence
  Description of Artificial Sequence: Synthetic oligonucleotide
  Sense strand starting at position 2627 of SEQ ID NO: 1880469
agguaaugacacugugaac

SEQ ID NO: 1969545 - RNA, 19 nt, Artificial Sequence
  Description of Artificial Sequence: Synthetic oligonucleotide
  Antisense strand to SEQ ID NO: 1969544
guucacagugucauuaccu

SEQ ID NO: 1969546 - RNA, 19 nt, Artificial Sequence
  Description of Artificial Sequence: Synthetic oligonucleotide
  Sense strand starting at position 2685 of SEQ ID NO: 1880469
ggagcauuugcagguguca

SEQ ID NO: 1969547 - RNA, 19 nt, Artificial Sequence
  Description of Artificial Sequence: Synthetic oligonucleotide
  Antisense strand to SEQ ID NO: 1969546
ugacaccugcaaaugcucc

SEQ ID NO: 1969548 - RNA, 19 nt, Artificial Sequence
  Description of Artificial Sequence: Synthetic oligonucleotide
  Sense strand starting at position 2687 of SEQ ID NO: 1880469
agcauuugcaggugucauu

SEQ ID NO: 1969549 - RNA, 19 nt, Artificial Sequence
  Description of Artificial Sequence: Synthetic oligonucleotide
  Antisense strand to SEQ ID NO: 1969548
aaugacaccugcaaaugcu

SEQ ID NO: 1969550 - RNA, 19 nt, Artificial Sequence
  Description of Artificial Sequence: Synthetic oligonucleotide
  Sense strand starting at position 2690 of SEQ ID NO: 1880469
auuugcaggugucauuaua

SEQ ID NO: 1969551 - RNA, 19 nt, Artificial Sequence
  Description of Artificial Sequence: Synthetic oligonucleotide
  Antisense strand to SEQ ID NO: 1969550
uauaaugacaccugcaaau

SEQ ID NO: 1969552 - RNA, 19 nt, Artificial Sequence
  Description of Artificial Sequence: Synthetic oligonucleotide
  Sense strand starting at position 2700 of SEQ ID NO: 1880469
gucauuauacaaugucaga

SEQ ID NO: 1969553 - RNA, 19 nt, Artificial Sequence
  Description of Artificial Sequence: Synthetic oligonucleotide
  Antisense strand to SEQ ID NO: 1969552
ucugacauuguauaaugac

SEQ ID NO: 1969554 - RNA, 19 nt, Artificial Sequence
  Description of Artificial Sequence: Synthetic oligonucleotide
  Sense strand starting at position 2796 of SEQ ID NO: 1880469
ugaagcaccagagguuuau

SEQ ID NO: 1969555 - RNA, 19 nt, Artificial Sequence
  Description of Artificial Sequence: Synthetic oligonucleotide
  Antisense strand to SEQ ID NO: 1969554
auaaaccucuggugcuuca

SEQ ID NO: 1969556 - RNA, 19 nt, Artificial Sequence
  Description of Artificial Sequence: Synthetic oligonucleotide
  Sense strand starting at position 2800 of SEQ ID NO: 1880469
gcaccagagguuuaucaau

SEQ ID NO: 1969557 - RNA, 19 nt, Artificial Sequence
  Description of Artificial Sequence: Synthetic oligonucleotide
  Antisense strand to SEQ ID NO: 1969556
auugauaaaccucuggugc

SEQ ID NO: 1969558 - RNA, 19 nt, Artificial Sequence
  Description of Artificial Sequence: Synthetic oligonucleotide
  Sense strand starting at position 2961 of SEQ ID NO: 1880469
ugaauagacuaacaagcau

SEQ ID NO: 1969559 - RNA, 19 nt, Artificial Sequence
  Description of Artificial Sequence: Synthetic oligonucleotide
  Antisense strand to SEQ ID NO: 1969558
augcuuguuagucuauuca

SEQ ID NO: 1969560 - RNA, 19 nt, Artificial Sequence
  Description of Artificial Sequence: Synthetic oligonucleotide
  Sense strand starting at position 3186 of SEQ ID NO: 1880469
auuacaugcucauuguauu

SEQ ID NO: 1969561 - RNA, 19 nt, Artificial Sequence
  Description of Artificial Sequence: Synthetic oligonucleotide
  Antisense strand to SEQ ID NO: 1969560
aauacaaugagcauguaau

SEQ ID NO: 1969562 - RNA, 19 nt, Artificial Sequence
  Description of Artificial Sequence: Synthetic oligonucleotide
  Sense strand starting at position 3187 of SEQ ID NO: 1880469
uuacaugcucauuguauuu

SEQ ID NO: 1969563 - RNA, 19 nt, Artificial Sequence
  Description of Artificial Sequence: Synthetic oligonucleotide
  Antisense strand to SEQ ID NO: 1969562
aaauacaaugagcauguaa

SEQ ID NO: 1969564 - RNA, 19 nt, Artificial Sequence
  Description of Artificial Sequence: Synthetic oligonucleotide
  Sense strand starting at position 3377 of SEQ ID NO: 1880469
gggcuuaucagagguuucu

SEQ ID NO: 1969565 - RNA, 19 nt, Artificial Sequence
  Description of Artificial Sequence: Synthetic oligonucleotide
  Antisense strand to SEQ ID NO: 1969564
agaaaccucugauaagccc

SEQ ID NO: 1969566 - RNA, 19 nt, Artificial Sequence
  Description of Artificial Sequence: Synthetic oligonucleotide
  Sense strand starting at position 418 of SEQ ID NO: 1880470
gccagagcuguguagacaa

SEQ ID NO: 1969567 - RNA, 19 nt, Artificial Sequence
  Description of Artificial Sequence: Synthetic oligonucleotide
  Antisense strand to SEQ ID NO: 1969566
uugucuacacagcucuggc

SEQ ID NO: 1969568 - RNA, 19 nt, Artificial Sequence
  Description of Artificial Sequence: Synthetic oligonucleotide
  Sense strand starting at position 716 of SEQ ID NO: 1880470
uacccuuugccaugugaug

SEQ ID NO: 1969569 - RNA, 19 nt, Artificial Sequence
  Description of Artificial Sequence: Synthetic oligonucleotide
  Antisense strand to SEQ ID NO: 1969568
caucacauggcaaagggua

SEQ ID NO: 1969570 - RNA, 19 nt, Artificial Sequence
  Description of Artificial Sequence: Synthetic oligonucleotide
  Sense strand starting at position 802 of SEQ ID NO: 1880470
ccuccagaauugucagaua

SEQ ID NO: 1969571 - RNA, 19 nt, Artificial Sequence
  Description of Artificial Sequence: Synthetic oligonucleotide
  Antisense strand to SEQ ID NO: 1969570
uaucugacaauucuggagg

SEQ ID NO: 1969572 - RNA, 19 nt, Artificial Sequence
  Description of Artificial Sequence: Synthetic oligonucleotide
  Sense strand starting at position 1146 of SEQ ID NO: 1880470
uggccacugucacuuacau

SEQ ID NO: 1969573 - RNA, 19 nt, Artificial Sequence
  Description of Artificial Sequence: Synthetic oligonucleotide
  Antisense strand to SEQ ID NO: 1969572
auguaagugacaguggcca

SEQ ID NO: 1969574 - RNA, 19 nt, Artificial Sequence
  Description of Artificial Sequence: Synthetic oligonucleotide
  Sense strand starting at position 1399 of SEQ ID NO: 1880470
gcagcugugaguuauuaac

SEQ ID NO: 1969575 - RNA, 19 nt, Artificial Sequence
  Description of Artificial Sequence: Synthetic oligonucleotide
  Antisense strand to SEQ ID NO: 1969574
guuaauaacucacagcugc

SEQ ID NO: 1969576 - RNA, 19 nt, Artificial Sequence
  Description of Artificial Sequence: Synthetic oligonucleotide
  Sense strand starting at position 1401 of SEQ ID NO: 1880470
agcugugaguuauuaacca

SEQ ID NO: 1969577 - RNA, 19 nt, Artificial Sequence
  Description of Artificial Sequence: Synthetic oligonucleotide
  Antisense strand to SEQ ID NO: 1969576
ugguuaauaacucacagcu

SEQ ID NO: 1969578 - RNA, 19 nt, Artificial Sequence
  Description of Artificial Sequence: Synthetic oligonucleotide
  Sense strand starting at position 1441 of SEQ ID NO: 1880470
acucuuauggguugcuuga

SEQ ID NO: 1969579 - RNA, 19 nt, Artificial Sequence
  Description of Artificial Sequence: Synthetic oligonucleotide
  Antisense strand to SEQ ID NO: 1969578
ucaagcaacccauaagagu

SEQ ID NO: 1969580 - RNA, 19 nt, Artificial Sequence
  Description of Artificial Sequence: Synthetic oligonucleotide
  Sense strand starting at position 1443 of SEQ ID NO: 1880470
ucuuauggguugcuugauu

SEQ ID NO: 1969581 - RNA, 19 nt, Artificial Sequence
  Description of Artificial Sequence: Synthetic oligonucleotide
  Antisense strand to SEQ ID NO: 1969580
aaucaagcaacccauaaga

SEQ ID NO: 1969582 - RNA, 19 nt, Artificial Sequence
  Description of Artificial Sequence: Synthetic oligonucleotide
  Sense strand starting at position 1451 of SEQ ID NO: 1880470
guugcuugauuccuagauu

SEQ ID NO: 1969583 - RNA, 19 nt, Artificial Sequence
  Description of Artificial Sequence: Synthetic oligonucleotide
  Antisense strand to SEQ ID NO: 1969582
aaucuaggaaucaagcaac

SEQ ID NO: 1969584 - RNA, 19 nt, Artificial Sequence
  Description of Artificial Sequence: Synthetic oligonucleotide
  Sense strand starting at position 1902 of SEQ ID NO: 1880470
agggcuucuucuccaaaca

SEQ ID NO: 1969585 - RNA, 19 nt, Artificial Sequence
  Description of Artificial Sequence: Synthetic oligonucleotide
  Antisense strand to SEQ ID NO: 1969584
uguuuggagaagaagcccu

SEQ ID NO: 1969586 - RNA, 19 nt, Artificial Sequence
  Description of Artificial Sequence: Synthetic oligonucleotide
  Sense strand starting at position 2085 of SEQ ID NO: 1880470
uuagaaucuuaggucagua

SEQ ID NO: 1969587 - RNA, 19 nt, Artificial Sequence
  Description of Artificial Sequence: Synthetic oligonucleotide
  Antisense strand to SEQ ID NO: 1969586
uacugaccuaagauucuaa

SEQ ID NO: 1969588 - RNA, 19 nt, Artificial Sequence
  Description of Artificial Sequence: Synthetic oligonucleotide
  Sense strand starting at position 2113 of SEQ ID NO: 1880470
cucgguaaccuccaucaga

SEQ ID NO: 1969589 - RNA, 19 nt, Artificial Sequence
  Description of Artificial Sequence: Synthetic oligonucleotide
  Antisense strand to SEQ ID NO: 1969588
ucugauggagguuaccgag

SEQ ID NO: 1969590 - RNA, 19 nt, Artificial Sequence
  Description of Artificial Sequence: Synthetic oligonucleotide
  Sense strand starting at position 2328 of SEQ ID NO: 1880470
ccagauagcuuugcgaaug

SEQ ID NO: 1969591 - RNA, 19 nt, Artificial Sequence
  Description of Artificial Sequence: Synthetic oligonucleotide
  Antisense strand to SEQ ID NO: 1969590
cauucgcaaagcuaucugg

SEQ ID NO: 1969592 - RNA, 19 nt, Artificial Sequence
  Description of Artificial Sequence: Synthetic oligonucleotide
  Sense strand starting at position 2414 of SEQ ID NO: 1880470
uauaaagaaguuugcuaga

SEQ ID NO: 1969593 - RNA, 19 nt, Artificial Sequence
  Description of Artificial Sequence: Synthetic oligonucleotide
  Antisense strand to SEQ ID NO: 1969592
ucuagcaaacuucuuuaua

SEQ ID NO: 1969594 - RNA, 19 nt, Artificial Sequence
  Description of Artificial Sequence: Synthetic oligonucleotide
  Sense strand starting at position 2416 of SEQ ID NO: 1880470
uaaagaaguuugcuagaua

SEQ ID NO: 1969595 - RNA, 19 nt, Artificial Sequence
  Description of Artificial Sequence: Synthetic oligonucleotide
  Antisense strand to SEQ ID NO: 1969594
uaucuagcaaacuucuuua

SEQ ID NO: 1969596 - RNA, 19 nt, Artificial Sequence
  Description of Artificial Sequence: Synthetic oligonucleotide
  Sense strand starting at position 2419 of SEQ ID NO: 1880470
agaaguuugcuagauaucu

SEQ ID NO: 1969597 - RNA, 19 nt, Artificial Sequence
  Description of Artificial Sequence: Synthetic oligonucleotide
  Antisense strand to SEQ ID NO: 1969596
agauaucuagcaaacuucu

SEQ ID NO: 1969598 - RNA, 19 nt, Artificial Sequence
  Description of Artificial Sequence: Synthetic oligonucleotide
  Sense strand starting at position 2525 of SEQ ID NO: 1880470
gugggcagcccgagaucua

SEQ ID NO: 1969599 - RNA, 19 nt, Artificial Sequence
  Description of Artificial Sequence: Synthetic oligonucleotide
  Antisense strand to SEQ ID NO: 1969598
uagaucucgggcugcccac

SEQ ID NO: 1969600 - RNA, 19 nt, Artificial Sequence
  Description of Artificial Sequence: Synthetic oligonucleotide
  Sense strand starting at position 2526 of SEQ ID NO: 1880470
ugggcagcccgagaucuaa

SEQ ID NO: 1969601 - RNA, 19 nt, Artificial Sequence
  Description of Artificial Sequence: Synthetic oligonucleotide
  Antisense strand to SEQ ID NO: 1969600
uuagaucucgggcugccca

SEQ ID NO: 1969602 - RNA, 19 nt, Artificial Sequence
  Description of Artificial Sequence: Synthetic oligonucleotide
  Sense strand starting at position 2688 of SEQ ID NO: 1880470
aagagcugcuugucuuaaa

SEQ ID NO: 1969603 - RNA, 19 nt, Artificial Sequence
  Description of Artificial Sequence: Synthetic oligonucleotide
  Antisense strand to SEQ ID NO: 1969602
uuuaagacaagcagcucuu

SEQ ID NO: 1969604 - RNA, 19 nt, Artificial Sequence
  Description of Artificial Sequence: Synthetic oligonucleotide
  Sense strand starting at position 2813 of SEQ ID NO: 1880470
gacauauggucucugcaaa

SEQ ID NO: 1969605 - RNA, 19 nt, Artificial Sequence
  Description of Artificial Sequence: Synthetic oligonucleotide
  Antisense strand to SEQ ID NO: 1969604
uuugcagagaccauauguc

SEQ ID NO: 1969606 - RNA, 19 nt, Artificial Sequence
  Description of Artificial Sequence: Synthetic oligonucleotide
  Sense strand starting at position 2814 of SEQ ID NO: 1880470
acauauggucucugcaaau

SEQ ID NO: 1969607 - RNA, 19 nt, Artificial Sequence
  Description of Artificial Sequence: Synthetic oligonucleotide
  Antisense strand to SEQ ID NO: 1969606
auuugcagagaccauaugu

SEQ ID NO: 1969608 - RNA, 19 nt, Artificial Sequence
  Description of Artificial Sequence: Synthetic oligonucleotide
  Sense strand starting at position 2820 of SEQ ID NO: 1880470
ggucucugcaaaugaugaa

SEQ ID NO: 1969609 - RNA, 19 nt, Artificial Sequence
  Description of Artificial Sequence: Synthetic oligonucleotide
  Antisense strand to SEQ ID NO: 1969608
uucaucauuugcagagacc

SEQ ID NO: 1969610 - RNA, 19 nt, Artificial Sequence
  Description of Artificial Sequence: Synthetic oligonucleotide
  Sense strand starting at position 2967 of SEQ ID NO: 1880470
ugccauaguuuguuaaaua

SEQ ID NO: 1969611 - RNA, 19 nt, Artificial Sequence
  Description of Artificial Sequence: Synthetic oligonucleotide
  Antisense strand to SEQ ID NO: 1969610
uauuuaacaaacuauggca

SEQ ID NO: 1969612 - RNA, 19 nt, Artificial Sequence
  Description of Artificial Sequence: Synthetic oligonucleotide
  Sense strand starting at position 3035 of SEQ ID NO: 1880470
ugcugagcuccagagguua

SEQ ID NO: 1969613 - RNA, 19 nt, Artificial Sequence
  Description of Artificial Sequence: Synthetic oligonucleotide
  Antisense strand to SEQ ID NO: 1969612
uaaccucuggagcucagca

SEQ ID NO: 1969614 - RNA, 19 nt, Artificial Sequence
  Description of Artificial Sequence: Synthetic oligonucleotide
  Sense strand starting at position 3037 of SEQ ID NO: 1880470
cugagcuccagagguuaaa

SEQ ID NO: 1969615 - RNA, 19 nt, Artificial Sequence
  Description of Artificial Sequence: Synthetic oligonucleotide
  Antisense strand to SEQ ID NO: 1969614
uuuaaccucuggagcucag

SEQ ID NO: 1969616 - RNA, 19 nt, Artificial Sequence
  Description of Artificial Sequence: Synthetic oligonucleotide
  Sense strand starting at position 3070 of SEQ ID NO: 1880470
ucacauucuggagguuaua

SEQ ID NO: 1969617 - RNA, 19 nt, Artificial Sequence
  Description of Artificial Sequence: Synthetic oligonucleotide
  Antisense strand to SEQ ID NO: 1969616
uauaaccuccagaauguga

SEQ ID NO: 1969618 - RNA, 19 nt, Artificial Sequence
  Description of Artificial Sequence: Synthetic oligonucleotide
  Sense strand starting at position 3083 of SEQ ID NO: 1880470
guuauagcaugcucacaau

SEQ ID NO: 1969619 - RNA, 19 nt, Artificial Sequence
  Description of Artificial Sequence: Synthetic oligonucleotide
  Antisense strand to SEQ ID NO: 1969618
auugugagcaugcuauaac

SEQ ID NO: 1969620 - RNA, 19 nt, Artificial Sequence
  Description of Artificial Sequence: Synthetic oligonucleotide
  Sense strand starting at position 3120 of SEQ ID NO: 1880470
gaauauuacuugucccgga

SEQ ID NO: 1969621 - RNA, 19 nt, Artificial Sequence
  Description of Artificial Sequence: Synthetic oligonucleotide
  Antisense strand to SEQ ID NO: 1969620
uccgggacaaguaauauuc

SEQ ID NO: 1969622 - RNA, 19 nt, Artificial Sequence
  Description of Artificial Sequence: Synthetic oligonucleotide
  Sense strand starting at position 3121 of SEQ ID NO: 1880470
aauauuacuugucccggau

SEQ ID NO: 1969623 - RNA, 19 nt, Artificial Sequence
  Description of Artificial Sequence: Synthetic oligonucleotide
  Antisense strand to SEQ ID NO: 1969622
auccgggacaaguaauauu

SEQ ID NO: 1969624 - RNA, 19 nt, Artificial Sequence
  Description of Artificial Sequence: Synthetic oligonucleotide
  Sense strand starting at position 3125 of SEQ ID NO: 1880470
uuacuugucccggauugca

SEQ ID NO: 1969625 - RNA, 19 nt, Artificial Sequence
  Description of Artificial Sequence: Synthetic oligonucleotide
  Antisense strand to SEQ ID NO: 1969624
ugcaauccgggacaaguaa

SEQ ID NO: 1969626 - RNA, 19 nt, Artificial Sequence
  Description of Artificial Sequence: Synthetic oligonucleotide
  Sense strand starting at position 3154 of SEQ ID NO: 1880470
guguauuacguagauggau

SEQ ID NO: 1969627 - RNA, 19 nt, Artificial Sequence
  Description of Artificial Sequence: Synthetic oligonucleotide
  Antisense strand to SEQ ID NO: 1969626
auccaucuacguaauacac

SEQ ID NO: 1969628 - RNA, 19 nt, Artificial Sequence
  Description of Artificial Sequence: Synthetic oligonucleotide
  Sense strand starting at position 3156 of SEQ ID NO: 1880470
guauuacguagauggauag

SEQ ID NO: 1969629 - RNA, 19 nt, Artificial Sequence
  Description of Artificial Sequence: Synthetic oligonucleotide
  Antisense strand to SEQ ID NO: 1969628
cuauccaucuacguaauac

SEQ ID NO: 1969630 - RNA, 19 nt, Artificial Sequence
  Description of Artificial Sequence: Synthetic oligonucleotide
  Sense strand starting at position 3203 of SEQ ID NO: 1880470
uugucugcauuaucagauu

SEQ ID NO: 1969631 - RNA, 19 nt, Artificial Sequence
  Description of Artificial Sequence: Synthetic oligonucleotide
  Antisense strand to SEQ ID NO: 1969630
aaucugauaaugcagacaa

SEQ ID NO: 1969632 - RNA, 19 nt, Artificial Sequence
  Description of Artificial Sequence: Synthetic oligonucleotide
  Sense strand starting at position 3209 of SEQ ID NO: 1880470
gcauuaucagauuguagua

SEQ ID NO: 1969633 - RNA, 19 nt, Artificial Sequence
  Description of Artificial Sequence: Synthetic oligonucleotide
  Antisense strand to SEQ ID NO: 1969632
uacuacaaucugauaaugc

SEQ ID NO: 1969634 - RNA, 19 nt, Artificial Sequence
  Description of Artificial Sequence: Synthetic oligonucleotide
  Sense strand starting at position 3275 of SEQ ID NO: 1880470
uuaacuuucgcagaccaga

SEQ ID NO: 1969635 - RNA, 19 nt, Artificial Sequence
  Description of Artificial Sequence: Synthetic oligonucleotide
  Antisense strand to SEQ ID NO: 1969634
ucuggucugcgaaaguuaa

SEQ ID NO: 1969636 - RNA, 19 nt, Artificial Sequence
  Description of Artificial Sequence: Synthetic oligonucleotide
  Sense strand starting at position 3316 of SEQ ID NO: 1880470
cacaguuucuaguuguaca

SEQ ID NO: 1969637 - RNA, 19 nt, Artificial Sequence
  Description of Artificial Sequence: Synthetic oligonucleotide
  Antisense strand to SEQ ID NO: 1969636
uguacaacuagaaacugug

SEQ ID NO: 1969638 - RNA, 19 nt, Artificial Sequence
  Description of Artificial Sequence: Synthetic oligonucleotide
  Sense strand starting at position 3753 of SEQ ID NO: 1880470
gccuuugcccaagaacuua

SEQ ID NO: 1969639 - RNA, 19 nt, Artificial Sequence
  Description of Artificial Sequence: Synthetic oligonucleotide
  Antisense strand to SEQ ID NO: 1969638
uaaguucuugggcaaaggc

SEQ ID NO: 1969640 - RNA, 19 nt, Artificial Sequence
  Description of Artificial Sequence: Synthetic oligonucleotide
  Sense strand starting at position 3963 of SEQ ID NO: 1880470
aguaguaaaucuuugagcu

SEQ ID NO: 1969641 - RNA, 19 nt, Artificial Sequence
  Description of Artificial Sequence: Synthetic oligonucleotide
  Antisense strand to SEQ ID NO: 1969640
agcucaaagauuuacuacu

SEQ ID NO: 1969642 - RNA, 19 nt, Artificial Sequence
  Description of Artificial Sequence: Synthetic oligonucleotide
  Sense strand starting at position 3964 of SEQ ID NO: 1880470
guaguaaaucuuugagcua

SEQ ID NO: 1969643 - RNA, 19 nt, Artificial Sequence
  Description of Artificial Sequence: Synthetic oligonucleotide
  Antisense strand to SEQ ID NO: 1969642
uagcucaaagauuuacuac

SEQ ID NO: 1969644 - RNA, 19 nt, Artificial Sequence
  Description of Artificial Sequence: Synthetic oligonucleotide
  Sense strand starting at position 3967 of SEQ ID NO: 1880470
guaaaucuuugagcuaguu

SEQ ID NO: 1969645 - RNA, 19 nt, Artificial Sequence
  Description of Artificial Sequence: Synthetic oligonucleotide
  Antisense strand to SEQ ID NO: 1969644
aacuagcucaaagauuuac

SEQ ID NO: 1969646 - RNA, 19 nt, Artificial Sequence
  Description of Artificial Sequence: Synthetic oligonucleotide
  Sense strand starting at position 2 of SEQ ID NO: 1880471
agaagccuuccagguugau

SEQ ID NO: 1969647 - RNA, 19 nt, Artificial Sequence
  Description of Artificial Sequence: Synthetic oligonucleotide
  Antisense strand to SEQ ID NO: 1969646
aucaaccuggaaggcuucu

SEQ ID NO: 1969648 - RNA, 19 nt, Artificial Sequence
  Description of Artificial Sequence: Synthetic oligonucleotide
  Sense strand starting at position 5 of SEQ ID NO: 1880471
agccuuccagguugauaau

SEQ ID NO: 1969649 - RNA, 19 nt, Artificial Sequence
  Description of Artificial Sequence: Synthetic oligonucleotide
  Antisense strand to SEQ ID NO: 1969648
auuaucaaccuggaaggcu

SEQ ID NO: 1969650 - RNA, 19 nt, Artificial Sequence
  Description of Artificial Sequence: Synthetic oligonucleotide
  Sense strand starting at position 80 of SEQ ID NO: 1880471
gccaguaugcgauguuagu

SEQ ID NO: 1969651 - RNA, 19 nt, Artificial Sequence
  Description of Artificial Sequence: Synthetic oligonucleotide
  Antisense strand to SEQ ID NO: 1969650
acuaacaucgcauacuggc

SEQ ID NO: 1969652 - RNA, 19 nt, Artificial Sequence
  Description of Artificial Sequence: Synthetic oligonucleotide
  Sense strand starting at position 318 of SEQ ID NO: 1880471
ccgugacauauccggaaac

SEQ ID NO: 1969653 - RNA, 19 nt, Artificial Sequence
  Description of Artificial Sequence: Synthetic oligonucleotide
  Antisense strand to SEQ ID NO: 1969652
guuuccggauaugucacgg

SEQ ID NO: 1969654 - RNA, 19 nt, Artificial Sequence
  Description of Artificial Sequence: Synthetic oligonucleotide
  Sense strand starting at position 357 of SEQ ID NO: 1880471
cguccauccuuucuugauu

SEQ ID NO: 1969655 - RNA, 19 nt, Artificial Sequence
  Description of Artificial Sequence: Synthetic oligonucleotide
  Antisense strand to SEQ ID NO: 1969654
aaucaagaaaggauggacg

SEQ ID NO: 1969656 - RNA, 19 nt, Artificial Sequence
  Description of Artificial Sequence: Synthetic oligonucleotide
  Sense strand starting at position 2001 of SEQ ID NO: 1880471
gcuccauucccggacaagu

SEQ ID NO: 1969657 - RNA, 19 nt, Artificial Sequence
  Description of Artificial Sequence: Synthetic oligonucleotide
  Antisense strand to SEQ ID NO: 1969656
acuuguccgggaauggagc

SEQ ID NO: 1969658 - RNA, 19 nt, Artificial Sequence
  Description of Artificial Sequence: Synthetic oligonucleotide
  Sense strand starting at position 2012 of SEQ ID NO: 1880471
ggacaagucggacguaaac

SEQ ID NO: 1969659 - RNA, 19 nt, Artificial Sequence
  Description of Artificial Sequence: Synthetic oligonucleotide
  Antisense strand to SEQ ID NO: 1969658
guuuacguccgacuugucc

SEQ ID NO: 1969660 - RNA, 19 nt, Artificial Sequence
  Description of Artificial Sequence: Synthetic oligonucleotide
  Sense strand starting at position 2014 of SEQ ID NO: 1880471
acaagucggacguaaacaa

SEQ ID NO: 1969661 - RNA, 19 nt, Artificial Sequence
  Description of Artificial Sequence: Synthetic oligonucleotide
  Antisense strand to SEQ ID NO: 1969660
uuguuuacguccgacuugu

SEQ ID NO: 1969662 - RNA, 19 nt, Artificial Sequence
  Description of Artificial Sequence: Synthetic oligonucleotide
  Sense strand starting at position 2068 of SEQ ID NO: 1880471
cauggaauuguccggcuuu

SEQ ID NO: 1969663 - RNA, 19 nt, Artificial Sequence
  Description of Artificial Sequence: Synthetic oligonucleotide
  Antisense strand to SEQ ID NO: 1969662
aaagccggacaauuccaug

SEQ ID NO: 1969664 - RNA, 19 nt, Artificial Sequence
  Description of Artificial Sequence: Synthetic oligonucleotide
  Sense strand starting at position 2074 of SEQ ID NO: 1880471
auuguccggcuuuauguaa

SEQ ID NO: 1969665 - RNA, 19 nt, Artificial Sequence
  Description of Artificial Sequence: Synthetic oligonucleotide
  Antisense strand to SEQ ID NO: 1969664
uuacauaaagccggacaau

SEQ ID NO: 1969666 - RNA, 19 nt, Artificial Sequence
  Description of Artificial Sequence: Synthetic oligonucleotide
  Sense strand starting at position 2081 of SEQ ID NO: 1880471
ggcuuuauguaagcaggau

SEQ ID NO: 1969667 - RNA, 19 nt, Artificial Sequence
  Description of Artificial Sequence: Synthetic oligonucleotide
  Antisense strand to SEQ ID NO: 1969666
auccugcuuacauaaagcc

SEQ ID NO: 1969668 - RNA, 19 nt, Artificial Sequence
  Description of Artificial Sequence: Synthetic oligonucleotide
  Sense strand starting at position 2082 of SEQ ID NO: 1880471
gcuuuauguaagcaggauu

SEQ ID NO: 1969669 - RNA, 19 nt, Artificial Sequence
  Description of Artificial Sequence: Synthetic oligonucleotide
  Antisense strand to SEQ ID NO: 1969668
aauccugcuuacauaaagc

SEQ ID NO: 1969670 - RNA, 19 nt, Artificial Sequence
  Description of Artificial Sequence: Synthetic oligonucleotide
  Sense strand starting at position 2085 of SEQ ID NO: 1880471
uuauguaagcaggauucua

SEQ ID NO: 1969671 - RNA, 19 nt, Artificial Sequence
  Description of Artificial Sequence: Synthetic oligonucleotide
  Antisense strand to SEQ ID NO: 1969670
uagaauccugcuuacauaa

SEQ ID NO: 1969672 - RNA, 19 nt, Artificial Sequence
  Description of Artificial Sequence: Synthetic oligonucleotide
  Sense strand starting at position 2106 of SEQ ID NO: 1880471
gucaaaucauuugacaguu

SEQ ID NO: 1969673 - RNA, 19 nt, Artificial Sequence
  Description of Artificial Sequence: Synthetic oligonucleotide
  Antisense strand to SEQ ID NO: 1969672
aacugucaaaugauuugac

SEQ ID NO: 1969674 - RNA, 19 nt, Artificial Sequence
  Description of Artificial Sequence: Synthetic oligonucleotide
  Sense strand starting at position 2118 of SEQ ID NO: 1880471
gacaguuuagggugccauu

SEQ ID NO: 1969675 - RNA, 19 nt, Artificial Sequence
  Description of Artificial Sequence: Synthetic oligonucleotide
  Antisense strand to SEQ ID NO: 1969674
aauggcacccuaaacuguc

SEQ ID NO: 1969676 - RNA, 19 nt, Artificial Sequence
  Description of Artificial Sequence: Synthetic oligonucleotide
  Sense strand starting at position 2156 of SEQ ID NO: 1880471
acagcugaaguuugaauau

SEQ ID NO: 1969677 - RNA, 19 nt, Artificial Sequence
  Description of Artificial Sequence: Synthetic oligonucleotide
  Antisense strand to SEQ ID NO: 1969676
auauucaaacuucagcugu

SEQ ID NO: 1969678 - RNA, 19 nt, Artificial Sequence
  Description of Artificial Sequence: Synthetic oligonucleotide
  Sense strand starting at position 2306 of SEQ ID NO: 1880471
acacaaauaucggugcaau

SEQ ID NO: 1969679 - RNA, 19 nt, Artificial Sequence
  Description of Artificial Sequence: Synthetic oligonucleotide
  Antisense strand to SEQ ID NO: 1969678
auugcaccgauauuugugu

SEQ ID NO: 1969680 - RNA, 19 nt, Artificial Sequence
  Description of Artificial Sequence: Synthetic oligonucleotide
  Sense strand starting at position 2307 of SEQ ID NO: 1880471
cacaaauaucggugcaauc

SEQ ID NO: 1969681 - RNA, 19 nt, Artificial Sequence
  Description of Artificial Sequence: Synthetic oligonucleotide
  Antisense strand to SEQ ID NO: 1969680
gauugcaccgauauuugug

SEQ ID NO: 1969682 - RNA, 19 nt, Artificial Sequence
  Description of Artificial Sequence: Synthetic oligonucleotide
  Sense strand starting at position 2309 of SEQ ID NO: 1880471
caaauaucggugcaauccu

SEQ ID NO: 1969683 - RNA, 19 nt, Artificial Sequence
  Description of Artificial Sequence: Synthetic oligonucleotide
  Antisense strand to SEQ ID NO: 1969682
aggauugcaccgauauuug

SEQ ID NO: 1969684 - RNA, 19 nt, Artificial Sequence
  Description of Artificial Sequence: Synthetic oligonucleotide
  Sense strand starting at position 2397 of SEQ ID NO: 1880471
uguaacucuccucaucagu

SEQ ID NO: 1969685 - RNA, 19 nt, Artificial Sequence
  Description of Artificial Sequence: Synthetic oligonucleotide
  Antisense strand to SEQ ID NO: 1969684
acugaugaggagaguuaca

SEQ ID NO: 1969686 - RNA, 19 nt, Artificial Sequence
  Description of Artificial Sequence: Synthetic oligonucleotide
  Sense strand starting at position 2473 of SEQ ID NO: 1880471
agauaaauacggcgucaga

SEQ ID NO: 1969687 - RNA, 19 nt, Artificial Sequence
  Description of Artificial Sequence: Synthetic oligonucleotide
  Antisense strand to SEQ ID NO: 1969686
ucugacgccguauuuaucu

SEQ ID NO: 1969688 - RNA, 19 nt, Artificial Sequence
  Description of Artificial Sequence: Synthetic oligonucleotide
  Sense strand starting at position 2799 of SEQ ID NO: 1880471
uuugauuaggaaugucaac

SEQ ID NO: 1969689 - RNA, 19 nt, Artificial Sequence
  Description of Artificial Sequence: Synthetic oligonucleotide
  Antisense strand to SEQ ID NO: 1969688
guugacauuccuaaucaaa

SEQ ID NO: 1969690 - RNA, 19 nt, Artificial Sequence
  Description of Artificial Sequence: Synthetic oligonucleotide
  Sense strand starting at position 2923 of SEQ ID NO: 1880471
ucaggaggugggugugaau

SEQ ID NO: 1969691 - RNA, 19 nt, Artificial Sequence
  Description of Artificial Sequence: Synthetic oligonucleotide
  Antisense strand to SEQ ID NO: 1969690
auucacacccaccuccuga

SEQ ID NO: 1969692 - RNA, 19 nt, Artificial Sequence
  Description of Artificial Sequence: Synthetic oligonucleotide
  Sense strand starting at position 2925 of SEQ ID NO: 1880471
aggaggugggugugaauua

SEQ ID NO: 1969693 - RNA, 19 nt, Artificial Sequence
  Description of Artificial Sequence: Synthetic oligonucleotide
  Antisense strand to SEQ ID NO: 1969692
uaauucacacccaccuccu

SEQ ID NO: 1969694 - RNA, 19 nt, Artificial Sequence
  Description of Artificial Sequence: Synthetic oligonucleotide
  Sense strand starting at position 2926 of SEQ ID NO: 1880471
ggaggugggugugaauuaa

SEQ ID NO: 1969695 - RNA, 19 nt, Artificial Sequence
  Description of Artificial Sequence: Synthetic oligonucleotide
  Antisense strand to SEQ ID NO: 1969694
uuaauucacacccaccucc

SEQ ID NO: 1969696 - RNA, 19 nt, Artificial Sequence
  Description of Artificial Sequence: Synthetic oligonucleotide
  Sense strand starting at position 2992 of SEQ ID NO: 1880471
ggccuugaaacuuguguuu

SEQ ID NO: 1969697 - RNA, 19 nt, Artificial Sequence
  Description of Artificial Sequence: Synthetic oligonucleotide
  Antisense strand to SEQ ID NO: 1969696
aaacacaaguuucaaggcc

SEQ ID NO: 1969698 - RNA, 19 nt, Artificial Sequence
  Description of Artificial Sequence: Synthetic oligonucleotide
  Sense strand starting at position 3004 of SEQ ID NO: 1880471
uguguuuccuucucucuaa

SEQ ID NO: 1969699 - RNA, 19 nt, Artificial Sequence
  Description of Artificial Sequence: Synthetic oligonucleotide
  Antisense strand to SEQ ID NO: 1969698
uuagagagaaggaaacaca

SEQ ID NO: 1969700 - RNA, 19 nt, Artificial Sequence
  Description of Artificial Sequence: Synthetic oligonucleotide
  Sense strand starting at position 3005 of SEQ ID NO: 1880471
guguuuccuucucucuaaa

SEQ ID NO: 1969701 - RNA, 19 nt, Artificial Sequence
  Description of Artificial Sequence: Synthetic oligonucleotide
  Antisense strand to SEQ ID NO: 1969700
uuuagagagaaggaaacac

SEQ ID NO: 1969702 - RNA, 19 nt, Artificial Sequence
  Description of Artificial Sequence: Synthetic oligonucleotide
  Sense strand starting at position 3028 of SEQ ID NO: 1880471
agcuaauaauuucgacuuu

SEQ ID NO: 1969703 - RNA, 19 nt, Artificial Sequence
  Description of Artificial Sequence: Synthetic oligonucleotide
  Antisense strand to SEQ ID NO: 1969702
aaagucgaaauuauuagcu

SEQ ID NO: 1969704 - RNA, 19 nt, Artificial Sequence
  Description of Artificial Sequence: Synthetic oligonucleotide
  Sense strand starting at position 3035 of SEQ ID NO: 1880471
aauuucgacuuugaaggau

SEQ ID NO: 1969705 - RNA, 19 nt, Artificial Sequence
  Description of Artificial Sequence: Synthetic oligonucleotide
  Antisense strand to SEQ ID NO: 1969704
auccuucaaagucgaaauu

SEQ ID NO: 1969706 - RNA, 19 nt, Artificial Sequence
  Description of Artificial Sequence: Synthetic oligonucleotide
  Sense strand starting at position 3039 of SEQ ID NO: 1880471
ucgacuuugaaggauuguu

SEQ ID NO: 1969707 - RNA, 19 nt, Artificial Sequence
  Description of Artificial Sequence: Synthetic oligonucleotide
  Antisense strand to SEQ ID NO: 1969706
aacaauccuucaaagucga

SEQ ID NO: 1969708 - RNA, 19 nt, Artificial Sequence
  Description of Artificial Sequence: Synthetic oligonucleotide
  Sense strand starting at position 3044 of SEQ ID NO: 1880471
uuugaaggauuguuaugaa

SEQ ID NO: 1969709 - RNA, 19 nt, Artificial Sequence
  Description of Artificial Sequence: Synthetic oligonucleotide
  Antisense strand to SEQ ID NO: 1969708
uucauaacaauccuucaaa

SEQ ID NO: 1969710 - RNA, 19 nt, Artificial Sequence
  Description of Artificial Sequence: Synthetic oligonucleotide
  Sense strand starting at position 3047 of SEQ ID NO: 1880471
gaaggauuguuaugaaggu

SEQ ID NO: 1969711 - RNA, 19 nt, Artificial Sequence
  Description of Artificial Sequence: Synthetic oligonucleotide
  Antisense strand to SEQ ID NO: 1969710
accuucauaacaauccuuc

SEQ ID NO: 1969712 - RNA, 19 nt, Artificial Sequence
  Description of Artificial Sequence: Synthetic oligonucleotide
  Sense strand starting at position 3048 of SEQ ID NO: 1880471
aaggauuguuaugaagguu

SEQ ID NO: 1969713 - RNA, 19 nt, Artificial Sequence
  Description of Artificial Sequence: Synthetic oligonucleotide
  Antisense strand to SEQ ID NO: 1969712
aaccuucauaacaauccuu

SEQ ID NO: 1969714 - RNA, 19 nt, Artificial Sequence
  Description of Artificial Sequence: Synthetic oligonucleotide
  Sense strand starting at position 3300 of SEQ ID NO: 1880471
gcagcugccugauuuggaa

SEQ ID NO: 1969715 - RNA, 19 nt, Artificial Sequence
  Description of Artificial Sequence: Synthetic oligonucleotide
  Antisense strand to SEQ ID NO: 1969714
uuccaaaucaggcagcugc

SEQ ID NO: 1969716 - RNA, 19 nt, Artificial Sequence
  Description of Artificial Sequence: Synthetic oligonucleotide
  Sense strand starting at position 3421 of SEQ ID NO: 1880471
auauuuauugagcgguuau

SEQ ID NO: 1969717 - RNA, 19 nt, Artificial Sequence
  Description of Artificial Sequence: Synthetic oligonucleotide
  Antisense strand to SEQ ID NO: 1969716
auaaccgcucaauaaauau

SEQ ID NO: 1969718 - RNA, 19 nt, Artificial Sequence
  Description of Artificial Sequence: Synthetic oligonucleotide
  Sense strand starting at position 3450 of SEQ ID NO: 1880471
gcauucugccaagugcuuu

SEQ ID NO: 1969719 - RNA, 19 nt, Artificial Sequence
  Description of Artificial Sequence: Synthetic oligonucleotide
  Antisense strand to SEQ ID NO: 1969718
aaagcacuuggcagaaugc

SEQ ID NO: 1969720 - RNA, 19 nt, Artificial Sequence
  Description of Artificial Sequence: Synthetic oligonucleotide
  Sense strand starting at position 3497 of SEQ ID NO: 1880471
auaaucuuaccaggugagu

SEQ ID NO: 1969721 - RNA, 19 nt, Artificial Sequence
  Description of Artificial Sequence: Synthetic oligonucleotide
  Antisense strand to SEQ ID NO: 1969720
acucaccugguaagauuau

SEQ ID NO: 1969722 - RNA, 19 nt, Artificial Sequence
  Description of Artificial Sequence: Synthetic oligonucleotide
  Sense strand starting at position 3506 of SEQ ID NO: 1880471
ccaggugagucuuacugau

SEQ ID NO: 1969723 - RNA, 19 nt, Artificial Sequence
  Description of Artificial Sequence: Synthetic oligonucleotide
  Antisense strand to SEQ ID NO: 1969722
aucaguaagacucaccugg

SEQ ID NO: 1969724 - RNA, 19 nt, Artificial Sequence
  Description of Artificial Sequence: Synthetic oligonucleotide
  Sense strand starting at position 3508 of SEQ ID NO: 1880471
aggugagucuuacugauau

SEQ ID NO: 1969725 - RNA, 19 nt, Artificial Sequence
  Description of Artificial Sequence: Synthetic oligonucleotide
  Antisense strand to SEQ ID NO: 1969724
auaucaguaagacucaccu

SEQ ID NO: 1969726 - RNA, 19 nt, Artificial Sequence
  Description of Artificial Sequence: Synthetic oligonucleotide
  Sense strand starting at position 32 of SEQ ID NO: 1880472
agugcaaaggccuaagaga

SEQ ID NO: 1969727 - RNA, 19 nt, Artificial Sequence
  Description of Artificial Sequence: Synthetic oligonucleotide
  Antisense strand to SEQ ID NO: 1969726
ucucuuaggccuuugcacu

SEQ ID NO: 1969728 - RNA, 19 nt, Artificial Sequence
  Description of Artificial Sequence: Synthetic oligonucleotide
  Sense strand starting at position 43 of SEQ ID NO: 1880472
cuaagagagucuguacaug

SEQ ID NO: 1969729 - RNA, 19 nt, Artificial Sequence
  Description of Artificial Sequence: Synthetic oligonucleotide
  Antisense strand to SEQ ID NO: 1969728
cauguacagacucucuuag

SEQ ID NO: 1969730 - RNA, 19 nt, Artificial Sequence
  Description of Artificial Sequence: Synthetic oligonucleotide
  Sense strand starting at position 54 of SEQ ID NO: 1880472
uguacaugaacgugauuac

SEQ ID NO: 1969731 - RNA, 19 nt, Artificial Sequence
  Description of Artificial Sequence: Synthetic oligonucleotide
  Antisense strand to SEQ ID NO: 1969730
guaaucacguucauguaca

SEQ ID NO: 1969732 - RNA, 19 nt, Artificial Sequence
  Description of Artificial Sequence: Synthetic oligonucleotide
  Sense strand starting at position 63 of SEQ ID NO: 1880472
acgugauuacgcuacaaga

SEQ ID NO: 1969733 - RNA, 19 nt, Artificial Sequence
  Description of Artificial Sequence: Synthetic oligonucleotide
  Antisense strand to SEQ ID NO: 1969732
ucuuguagcguaaucacgu

SEQ ID NO: 1969734 - RNA, 19 nt, Artificial Sequence
  Description of Artificial Sequence: Synthetic oligonucleotide
  Sense strand starting at position 65 of SEQ ID NO: 1880472
gugauuacgcuacaagagu

SEQ ID NO: 1969735 - RNA, 19 nt, Artificial Sequence
  Description of Artificial Sequence: Synthetic oligonucleotide
  Antisense strand to SEQ ID NO: 1969734
acucuuguagcguaaucac

SEQ ID NO: 1969736 - RNA, 19 nt, Artificial Sequence
  Description of Artificial Sequence: Synthetic oligonucleotide
  Sense strand starting at position 151 of SEQ ID NO: 1880472
guucucauagaauaaagca

SEQ ID NO: 1969737 - RNA, 19 nt, Artificial Sequence
  Description of Artificial Sequence: Synthetic oligonucleotide
  Antisense strand to SEQ ID NO: 1969736
ugcuuuauucuaugagaac

SEQ ID NO: 1969738 - RNA, 19 nt, Artificial Sequence
  Description of Artificial Sequence: Synthetic oligonucleotide
  Sense strand starting at position 228 of SEQ ID NO: 1880472
aggaauugcccagagccua

SEQ ID NO: 1969739 - RNA, 19 nt, Artificial Sequence
  Description of Artificial Sequence: Synthetic oligonucleotide
  Antisense strand to SEQ ID NO: 1969738
uaggcucugggcaauuccu

SEQ ID NO: 1969740 - RNA, 19 nt, Artificial Sequence
  Description of Artificial Sequence: Synthetic oligonucleotide
  Sense strand starting at position 448 of SEQ ID NO: 1880472
gagagcgauucuccacaga

SEQ ID NO: 1969741 - RNA, 19 nt, Artificial Sequence
  Description of Artificial Sequence: Synthetic oligonucleotide
  Antisense strand to SEQ ID NO: 1969740
ucuguggagaaucgcucuc

SEQ ID NO: 1969742 - RNA, 19 nt, Artificial Sequence
  Description of Artificial Sequence: Synthetic oligonucleotide
  Sense strand starting at position 1253 of SEQ ID NO: 1880472
uggcaauccuuugcuaaag

SEQ ID NO: 1969743 - RNA, 19 nt, Artificial Sequence
  Description of Artificial Sequence: Synthetic oligonucleotide
  Antisense strand to SEQ ID NO: 1969742
cuuuagcaaaggauugcca

SEQ ID NO: 1969744 - RNA, 19 nt, Artificial Sequence
  Description of Artificial Sequence: Synthetic oligonucleotide
  Sense strand starting at position 1285 of SEQ ID NO: 1880472
cucaguggccuugaagaca

SEQ ID NO: 1969745 - RNA, 19 nt, Artificial Sequence
  Description of Artificial Sequence: Synthetic oligonucleotide
  Antisense strand to SEQ ID NO: 1969744
ugucuucaaggccacugag

SEQ ID NO: 1969746 - RNA, 19 nt, Artificial Sequence
  Description of Artificial Sequence: Synthetic oligonucleotide
  Sense strand starting at position 1547 of SEQ ID NO: 1880472
gccucuacucuauacugua

SEQ ID NO: 1969747 - RNA, 19 nt, Artificial Sequence
  Description of Artificial Sequence: Synthetic oligonucleotide
  Antisense strand to SEQ ID NO: 1969746
uacaguauagaguagaggc

SEQ ID NO: 1969748 - RNA, 19 nt, Artificial Sequence
  Description of Artificial Sequence: Synthetic oligonucleotide
  Sense strand starting at position 1579 of SEQ ID NO: 1880472
uguacauaucauuguaaac

SEQ ID NO: 1969749 - RNA, 19 nt, Artificial Sequence
  Description of Artificial Sequence: Synthetic oligonucleotide
  Antisense strand to SEQ ID NO: 1969748
guuuacaaugauauguaca

SEQ ID NO: 1969750 - RNA, 19 nt, Artificial Sequence
  Description of Artificial Sequence: Synthetic oligonucleotide
  Sense strand starting at position 1627 of SEQ ID NO: 1880472
uaucguuuccuugaaguca

SEQ ID NO: 1969751 - RNA, 19 nt, Artificial Sequence
  Description of Artificial Sequence: Synthetic oligonucleotide
  Antisense strand to SEQ ID NO: 1969750
ugacuucaaggaaacgaua

SEQ ID NO: 1969752 - RNA, 19 nt, Artificial Sequence
  Description of Artificial Sequence: Synthetic oligonucleotide
  Sense strand starting at position 1646 of SEQ ID NO: 1880472
gggacuauguccuauuuaa

SEQ ID NO: 1969753 - RNA, 19 nt, Artificial Sequence
  Description of Artificial Sequence: Synthetic oligonucleotide
  Antisense strand to SEQ ID NO: 1969752
uuaaauaggacauaguccc

SEQ ID NO: 1969754 - RNA, 19 nt, Artificial Sequence
  Description of Artificial Sequence: Synthetic oligonucleotide
  Sense strand starting at position 1853 of SEQ ID NO: 1880472
gagggucuauuaguccauu

SEQ ID NO: 1969755 - RNA, 19 nt, Artificial Sequence
  Description of Artificial Sequence: Synthetic oligonucleotide
  Antisense strand to SEQ ID NO: 1969754
aauggacuaauagacccuc

SEQ ID NO: 1969756 - RNA, 19 nt, Artificial Sequence
  Description of Artificial Sequence: Synthetic oligonucleotide
  Sense strand starting at position 2048 of SEQ ID NO: 1880472
cacaucagagcucgugaga

SEQ ID NO: 1969757 - RNA, 19 nt, Artificial Sequence
  Description of Artificial Sequence: Synthetic oligonucleotide
  Antisense strand to SEQ ID NO: 1969756
ucucacgagcucugaugug

SEQ ID NO: 1969758 - RNA, 19 nt, Artificial Sequence
  Description of Artificial Sequence: Synthetic oligonucleotide
  Sense strand starting at position 2274 of SEQ ID NO: 1880472
gucucagaggucuacaauc

SEQ ID NO: 1969759 - RNA, 19 nt, Artificial Sequence
  Description of Artificial Sequence: Synthetic oligonucleotide
  Antisense strand to SEQ ID NO: 1969758
gauuguagaccucugagac

SEQ ID NO: 1969760 - RNA, 19 nt, Artificial Sequence
  Description of Artificial Sequence: Synthetic oligonucleotide
  Sense strand starting at position 2337 of SEQ ID NO: 1880472
cguuaaacccucuaauuag

SEQ ID NO: 1969761 - RNA, 19 nt, Artificial Sequence
  Description of Artificial Sequence: Synthetic oligonucleotide
  Antisense strand to SEQ ID NO: 1969760
cuaauuagaggguuuaacg

SEQ ID NO: 1969762 - RNA, 19 nt, Artificial Sequence
  Description of Artificial Sequence: Synthetic oligonucleotide
  Sense strand starting at position 2357 of SEQ ID NO: 1880472
aguuuccacucuguuaaca

SEQ ID NO: 1969763 - RNA, 19 nt, Artificial Sequence
  Description of Artificial Sequence: Synthetic oligonucleotide
  Antisense strand to SEQ ID NO: 1969762
uguuaacagaguggaaacu

SEQ ID NO: 1969764 - RNA, 19 nt, Artificial Sequence
  Description of Artificial Sequence: Synthetic oligonucleotide
  Sense strand starting at position 2373 of SEQ ID NO: 1880472
acaacuugucaugaguauu

SEQ ID NO: 1969765 - RNA, 19 nt, Artificial Sequence
  Description of Artificial Sequence: Synthetic oligonucleotide
  Antisense strand to SEQ ID NO: 1969764
aauacucaugacaaguugu

SEQ ID NO: 1969766 - RNA, 19 nt, Artificial Sequence
  Description of Artificial Sequence: Synthetic oligonucleotide
  Sense strand starting at position 2396 of SEQ ID NO: 1880472
ugucuuccgguugacuuaa

SEQ ID NO: 1969767 - RNA, 19 nt, Artificial Sequence
  Description of Artificial Sequence: Synthetic oligonucleotide
  Antisense strand to SEQ ID NO: 1969766
uuaagucaaccggaagaca

SEQ ID NO: 1969768 - RNA, 19 nt, Artificial Sequence
  Description of Artificial Sequence: Synthetic oligonucleotide
  Sense strand starting at position 2454 of SEQ ID NO: 1880472
gagugaacuguuuauguuc

SEQ ID NO: 1969769 - RNA, 19 nt, Artificial Sequence
  Description of Artificial Sequence: Synthetic oligonucleotide
  Antisense strand to SEQ ID NO: 1969768
gaacauaaacaguucacuc

SEQ ID NO: 1969770 - RNA, 19 nt, Artificial Sequence
  Description of Artificial Sequence: Synthetic oligonucleotide
  Sense strand starting at position 2514 of SEQ ID NO: 1880472
gaacucuugguuugccaau

SEQ ID NO: 1969771 - RNA, 19 nt, Artificial Sequence
  Description of Artificial Sequence: Synthetic oligonucleotide
  Antisense strand to SEQ ID NO: 1969770
auuggcaaaccaagaguuc

SEQ ID NO: 1969772 - RNA, 19 nt, Artificial Sequence
  Description of Artificial Sequence: Synthetic oligonucleotide
  Sense strand starting at position 2542 of SEQ ID NO: 1880472
acaagaguaugcuuccaga

SEQ ID NO: 1969773 - RNA, 19 nt, Artificial Sequence
  Description of Artificial Sequence: Synthetic oligonucleotide
  Antisense strand to SEQ ID NO: 1969772
ucuggaagcauacucuugu

SEQ ID NO: 1969774 - RNA, 19 nt, Artificial Sequence
  Description of Artificial Sequence: Synthetic oligonucleotide
  Sense strand starting at position 2700 of SEQ ID NO: 1880472
aaguuagaauacuuguguu

SEQ ID NO: 1969775 - RNA, 19 nt, Artificial Sequence
  Description of Artificial Sequence: Synthetic oligonucleotide
  Antisense strand to SEQ ID NO: 1969774
aacacaaguauucuaacuu

SEQ ID NO: 1969776 - RNA, 19 nt, Artificial Sequence
  Description of Artificial Sequence: Synthetic oligonucleotide
  Sense strand starting at position 2737 of SEQ ID NO: 1880472
uguggccuucaggaagaua

SEQ ID NO: 1969777 - RNA, 19 nt, Artificial Sequence
  Description of Artificial Sequence: Synthetic oligonucleotide
  Antisense strand to SEQ ID NO: 1969776
uaucuuccugaaggccaca

SEQ ID NO: 1969778 - RNA, 19 nt, Artificial Sequence
  Description of Artificial Sequence: Synthetic oligonucleotide
  Sense strand starting at position 2851 of SEQ ID NO: 1880472
ugagaaagugccuagucua

SEQ ID NO: 1969779 - RNA, 19 nt, Artificial Sequence
  Description of Artificial Sequence: Synthetic oligonucleotide
  Antisense strand to SEQ ID NO: 1969778
uagacuaggcacuuucuca

SEQ ID NO: 1969780 - RNA, 19 nt, Artificial Sequence
  Description of Artificial Sequence: Synthetic oligonucleotide
  Sense strand starting at position 2869 of SEQ ID NO: 1880472
aggcucuugcuugauuaag

SEQ ID NO: 1969781 - RNA, 19 nt, Artificial Sequence
  Description of Artificial Sequence: Synthetic oligonucleotide
  Antisense strand to SEQ ID NO: 1969780
cuuaaucaagcaagagccu

SEQ ID NO: 1969782 - RNA, 19 nt, Artificial Sequence
  Description of Artificial Sequence: Synthetic oligonucleotide
  Sense strand starting at position 3016 of SEQ ID NO: 1880472
ccggcaugaguuuaagaua

SEQ ID NO: 1969783 - RNA, 19 nt, Artificial Sequence
  Description of Artificial Sequence: Synthetic oligonucleotide
  Antisense strand to SEQ ID NO: 1969782
uaucuuaaacucaugccgg

SEQ ID NO: 1969784 - RNA, 19 nt, Artificial Sequence
  Description of Artificial Sequence: Synthetic oligonucleotide
  Sense strand starting at position 3111 of SEQ ID NO: 1880472
ccauauauacgaggcugaa

SEQ ID NO: 1969785 - RNA, 19 nt, Artificial Sequence
  Description of Artificial Sequence: Synthetic oligonucleotide
  Antisense strand to SEQ ID NO: 1969784
uucagccucguauauaugg

SEQ ID NO: 1969786 - RNA, 19 nt, Artificial Sequence
  Description of Artificial Sequence: Synthetic oligonucleotide
  Sense strand starting at position 3114 of SEQ ID NO: 1880472
uauauacgaggcugaaaua

SEQ ID NO: 1969787 - RNA, 19 nt, Artificial Sequence
  Description of Artificial Sequence: Synthetic oligonucleotide
  Antisense strand to SEQ ID NO: 1969786
uauuucagccucguauaua

SEQ ID NO: 1969788 - RNA, 19 nt, Artificial Sequence
  Description of Artificial Sequence: Synthetic oligonucleotide
  Sense strand starting at position 3477 of SEQ ID NO: 1880472
guuacucauugauuguaag

SEQ ID NO: 1969789 - RNA, 19 nt, Artificial Sequence
  Description of Artificial Sequence: Synthetic oligonucleotide
  Antisense strand to SEQ ID NO: 1969788
cuuacaaucaaugaguaac

SEQ ID NO: 1969790 - RNA, 19 nt, Artificial Sequence
  Description of Artificial Sequence: Synthetic oligonucleotide
  Sense strand starting at position 3487 of SEQ ID NO: 1880472
gauuguaagguugguaaua

SEQ ID NO: 1969791 - RNA, 19 nt, Artificial Sequence
  Description of Artificial Sequence: Synthetic oligonucleotide
  Antisense strand to SEQ ID NO: 1969790
uauuaccaaccuuacaauc

SEQ ID NO: 1969792 - RNA, 19 nt, Artificial Sequence
  Description of Artificial Sequence: Synthetic oligonucleotide
  Sense strand starting at position 3578 of SEQ ID NO: 1880472
aguccugucaaguagacua

SEQ ID NO: 1969793 - RNA, 19 nt, Artificial Sequence
  Description of Artificial Sequence: Synthetic oligonucleotide
  Antisense strand to SEQ ID NO: 1969792
uagucuacuugacaggacu

SEQ ID NO: 1969794 - RNA, 19 nt, Artificial Sequence
  Description of Artificial Sequence: Synthetic oligonucleotide
  Sense strand starting at position 3648 of SEQ ID NO: 1880472
ugcuguagcccugcuugau

SEQ ID NO: 1969795 - RNA, 19 nt, Artificial Sequence
  Description of Artificial Sequence: Synthetic oligonucleotide
  Antisense strand to SEQ ID NO: 1969794
aucaagcagggcuacagca

SEQ ID NO: 1969796 - RNA, 19 nt, Artificial Sequence
  Description of Artificial Sequence: Synthetic oligonucleotide
  Sense strand starting at position 3755 of SEQ ID NO: 1880472
gccaaacugugaccugaaa

SEQ ID NO: 1969797 - RNA, 19 nt, Artificial Sequence
  Description of Artificial Sequence: Synthetic oligonucleotide
  Antisense strand to SEQ ID NO: 1969796
uuucaggucacaguuuggc

SEQ ID NO: 1969798 - RNA, 19 nt, Artificial Sequence
  Description of Artificial Sequence: Synthetic oligonucleotide
  Sense strand starting at position 3813 of SEQ ID NO: 1880472
auuuaaugcugacaguaau

SEQ ID NO: 1969799 - RNA, 19 nt, Artificial Sequence
  Description of Artificial Sequence: Synthetic oligonucleotide
  Antisense strand to SEQ ID NO: 1969798
auuacugucagcauuaaau

SEQ ID NO: 1969800 - RNA, 19 nt, Artificial Sequence
  Description of Artificial Sequence: Synthetic oligonucleotide
  Sense strand starting at position 3865 of SEQ ID NO: 1880472
gggcaugguguuuauguga

SEQ ID NO: 1969801 - RNA, 19 nt, Artificial Sequence
  Description of Artificial Sequence: Synthetic oligonucleotide
  Antisense strand to SEQ ID NO: 1969800
ucacauaaacaccaugccc

SEQ ID NO: 1969802 - RNA, 19 nt, Artificial Sequence
  Description of Artificial Sequence: Synthetic oligonucleotide
  Sense strand starting at position 3868 of SEQ ID NO: 1880472
caugguguuuaugugauuu

SEQ ID NO: 1969803 - RNA, 19 nt, Artificial Sequence
  Description of Artificial Sequence: Synthetic oligonucleotide
  Antisense strand to SEQ ID NO: 1969802
aaaucacauaaacaccaug

SEQ ID NO: 1969804 - RNA, 19 nt, Artificial Sequence
  Description of Artificial Sequence: Synthetic oligonucleotide
  Sense strand starting at position 3980 of SEQ ID NO: 1880472
cugcuugacucucugauaa

SEQ ID NO: 1969805 - RNA, 19 nt, Artificial Sequence
  Description of Artificial Sequence: Synthetic oligonucleotide
  Antisense strand to SEQ ID NO: 1969804
uuaucagagagucaagcag

SEQ ID NO: 1969806 - RNA, 19 nt, Artificial Sequence
  Description of Artificial Sequence: Synthetic oligonucleotide
  Sense strand starting at position 142 of SEQ ID NO: 1880473
aguauuuguuuccucuuua

SEQ ID NO: 1969807 - RNA, 19 nt, Artificial Sequence
  Description of Artificial Sequence: Synthetic oligonucleotide
  Antisense strand to SEQ ID NO: 1969806
uaaagaggaaacaaauacu

SEQ ID NO: 1969808 - RNA, 19 nt, Artificial Sequence
  Description of Artificial Sequence: Synthetic oligonucleotide
  Sense strand starting at position 143 of SEQ ID NO: 1880473
guauuuguuuccucuuuag

SEQ ID NO: 1969809 - RNA, 19 nt, Artificial Sequence
  Description of Artificial Sequence: Synthetic oligonucleotide
  Antisense strand to SEQ ID NO: 1969808
cuaaagaggaaacaaauac

SEQ ID NO: 1969810 - RNA, 19 nt, Artificial Sequence
  Description of Artificial Sequence: Synthetic oligonucleotide
  Sense strand starting at position 147 of SEQ ID NO: 1880473
uuguuuccucuuuaguacu

SEQ ID NO: 1969811 - RNA, 19 nt, Artificial Sequence
  Description of Artificial Sequence: Synthetic oligonucleotide
  Antisense strand to SEQ ID NO: 1969810
aguacuaaagaggaaacaa

SEQ ID NO: 1969812 - RNA, 19 nt, Artificial Sequence
  Description of Artificial Sequence: Synthetic oligonucleotide
  Sense strand starting at position 149 of SEQ ID NO: 1880473
guuuccucuuuaguacuau

SEQ ID NO: 1969813 - RNA, 19 nt, Artificial Sequence
  Description of Artificial Sequence: Synthetic oligonucleotide
  Antisense strand to SEQ ID NO: 1969812
auaguacuaaagaggaaac

SEQ ID NO: 1969814 - RNA, 19 nt, Artificial Sequence
  Description of Artificial Sequence: Synthetic oligonucleotide
  Sense strand starting at position 160 of SEQ ID NO: 1880473
aguacuauucuagguaaac

SEQ ID NO: 1969815 - RNA, 19 nt, Artificial Sequence
  Description of Artificial Sequence: Synthetic oligonucleotide
  Antisense strand to SEQ ID NO: 1969814
guuuaccuagaauaguacu

SEQ ID NO: 1969816 - RNA, 19 nt, Artificial Sequence
  Description of Artificial Sequence: Synthetic oligonucleotide
  Sense strand starting at position 161 of SEQ ID NO: 1880473
guacuauucuagguaaacg

SEQ ID NO: 1969817 - RNA, 19 nt, Artificial Sequence
  Description of Artificial Sequence: Synthetic oligonucleotide
  Antisense strand to SEQ ID NO: 1969816
cguuuaccuagaauaguac

SEQ ID NO: 1969818 - RNA, 19 nt, Artificial Sequence
  Description of Artificial Sequence: Synthetic oligonucleotide
  Sense strand starting at position 329 of SEQ ID NO: 1880473
cgaaguaaauaucuaugua

SEQ ID NO: 1969819 - RNA, 19 nt, Artificial Sequence
  Description of Artificial Sequence: Synthetic oligonucleotide
  Antisense strand to SEQ ID NO: 1969818
uacauagauauuuacuucg

SEQ ID NO: 1969820 - RNA, 19 nt, Artificial Sequence
  Description of Artificial Sequence: Synthetic oligonucleotide
  Sense strand starting at position 429 of SEQ ID NO: 1880473
cuaccuaccuguucucaga

SEQ ID NO: 1969821 - RNA, 19 nt, Artificial Sequence
  Description of Artificial Sequence: Synthetic oligonucleotide
  Antisense strand to SEQ ID NO: 1969820
ucugagaacagguagguag

SEQ ID NO: 1969822 - RNA, 19 nt, Artificial Sequence
  Description of Artificial Sequence: Synthetic oligonucleotide
  Sense strand starting at position 461 of SEQ ID NO: 1880473
uugauuugcuucuuaguag

SEQ ID NO: 1969823 - RNA, 19 nt, Artificial Sequence
  Description of Artificial Sequence: Synthetic oligonucleotide
  Antisense strand to SEQ ID NO: 1969822
cuacuaagaagcaaaucaa

SEQ ID NO: 1969824 - RNA, 19 nt, Artificial Sequence
  Description of Artificial Sequence: Synthetic oligonucleotide
  Sense strand starting at position 464 of SEQ ID NO: 1880473
auuugcuucuuaguaguuu

SEQ ID NO: 1969825 - RNA, 19 nt, Artificial Sequence
  Description of Artificial Sequence: Synthetic oligonucleotide
  Antisense strand to SEQ ID NO: 1969824
aaacuacuaagaagcaaau

SEQ ID NO: 1969826 - RNA, 19 nt, Artificial Sequence
  Description of Artificial Sequence: Synthetic oligonucleotide
  Sense strand starting at position 612 of SEQ ID NO: 1880473
aaaguaugucugcaagauu

SEQ ID NO: 1969827 - RNA, 19 nt, Artificial Sequence
  Description of Artificial Sequence: Synthetic oligonucleotide
  Antisense strand to SEQ ID NO: 1969826
aaucuugcagacauacuuu

SEQ ID NO: 1969828 - RNA, 19 nt, Artificial Sequence
  Description of Artificial Sequence: Synthetic oligonucleotide
  Sense strand starting at position 661 of SEQ ID NO: 1880473
uucuauuuguugcuguaua

SEQ ID NO: 1969829 - RNA, 19 nt, Artificial Sequence
  Description of Artificial Sequence: Synthetic oligonucleotide
  Antisense strand to SEQ ID NO: 1969828
uauacagcaacaaauagaa

SEQ ID NO: 1969830 - RNA, 19 nt, Artificial Sequence
  Description of Artificial Sequence: Synthetic oligonucleotide
  Sense strand starting at position 764 of SEQ ID NO: 1880473
agacuuuacuacucugagu

SEQ ID NO: 1969831 - RNA, 19 nt, Artificial Sequence
  Description of Artificial Sequence: Synthetic oligonucleotide
  Antisense strand to SEQ ID NO: 1969830
acucagaguaguaaagucu

SEQ ID NO: 1969832 - RNA, 19 nt, Artificial Sequence
  Description of Artificial Sequence: Synthetic oligonucleotide
  Sense strand starting at position 766 of SEQ ID NO: 1880473
acuuuacuacucugaguuc

SEQ ID NO: 1969833 - RNA, 19 nt, Artificial Sequence
  Description of Artificial Sequence: Synthetic oligonucleotide
  Antisense strand to SEQ ID NO: 1969832
gaacucagaguaguaaagu

SEQ ID NO: 1969834 - RNA, 19 nt, Artificial Sequence
  Description of Artificial Sequence: Synthetic oligonucleotide
  Sense strand starting at position 830 of SEQ ID NO: 1880473
uuguauguaguuuagagga

SEQ ID NO: 1969835 - RNA, 19 nt, Artificial Sequence
  Description of Artificial Sequence: Synthetic oligonucleotide
  Antisense strand to SEQ ID NO: 1969834
uccucuaaacuacauacaa

SEQ ID NO: 1969836 - RNA, 19 nt, Artificial Sequence
  Description of Artificial Sequence: Synthetic oligonucleotide
  Sense strand starting at position 914 of SEQ ID NO: 1880473
ugcucauugaugugugaua

SEQ ID NO: 1969837 - RNA, 19 nt, Artificial Sequence
  Description of Artificial Sequence: Synthetic oligonucleotide
  Antisense strand to SEQ ID NO: 1969836
uaucacacaucaaugagca

SEQ ID NO: 1969838 - RNA, 19 nt, Artificial Sequence
  Description of Artificial Sequence: Synthetic oligonucleotide
  Sense strand starting at position 915 of SEQ ID NO: 1880473
gcucauugaugugugauac

SEQ ID NO: 1969839 - RNA, 19 nt, Artificial Sequence
  Description of Artificial Sequence: Synthetic oligonucleotide
  Antisense strand to SEQ ID NO: 1969838
guaucacacaucaaugagc

SEQ ID NO: 1969840 - RNA, 19 nt, Artificial Sequence
  Description of Artificial Sequence: Synthetic oligonucleotide
  Sense strand starting at position 925 of SEQ ID NO: 1880473
gugugauaccagcacuuau

SEQ ID NO: 1969841 - RNA, 19 nt, Artificial Sequence
  Description of Artificial Sequence: Synthetic oligonucleotide
  Antisense strand to SEQ ID NO: 1969840
auaagugcugguaucacac

SEQ ID NO: 1969842 - RNA, 19 nt, Artificial Sequence
  Description of Artificial Sequence: Synthetic oligonucleotide
  Sense strand starting at position 969 of SEQ ID NO: 1880473
uugccuaugccugugucaa

SEQ ID NO: 1969843 - RNA, 19 nt, Artificial Sequence
  Description of Artificial Sequence: Synthetic oligonucleotide
  Antisense strand to SEQ ID NO: 1969842
uugacacaggcauaggcaa

SEQ ID NO: 1969844 - RNA, 19 nt, Artificial Sequence
  Description of Artificial Sequence: Synthetic oligonucleotide
  Sense strand starting at position 1757 of SEQ ID NO: 1880473
aggagugcucuuuggauca

SEQ ID NO: 1969845 - RNA, 19 nt, Artificial Sequence
  Description of Artificial Sequence: Synthetic oligonucleotide
  Antisense strand to SEQ ID NO: 1969844
ugauccaaagagcacuccu

SEQ ID NO: 1969846 - RNA, 19 nt, Artificial Sequence
  Description of Artificial Sequence: Synthetic oligonucleotide
  Sense strand starting at position 2186 of SEQ ID NO: 1880473
cgaauaacauugguuucua

SEQ ID NO: 1969847 - RNA, 19 nt, Artificial Sequence
  Description of Artificial Sequence: Synthetic oligonucleotide
  Antisense strand to SEQ ID NO: 1969846
uagaaaccaauguuauucg

SEQ ID NO: 1969848 - RNA, 19 nt, Artificial Sequence
  Description of Artificial Sequence: Synthetic oligonucleotide
  Sense strand starting at position 2187 of SEQ ID NO: 1880473
gaauaacauugguuucuag

SEQ ID NO: 1969849 - RNA, 19 nt, Artificial Sequence
  Description of Artificial Sequence: Synthetic oligonucleotide
  Antisense strand to SEQ ID NO: 1969848
cuagaaaccaauguuauuc

SEQ ID NO: 1969850 - RNA, 19 nt, Artificial Sequence
  Description of Artificial Sequence: Synthetic oligonucleotide
  Sense strand starting at position 2190 of SEQ ID NO: 1880473
uaacauugguuucuagguu

SEQ ID NO: 1969851 - RNA, 19 nt, Artificial Sequence
  Description of Artificial Sequence: Synthetic oligonucleotide
  Antisense strand to SEQ ID NO: 1969850
aaccuagaaaccaauguua

SEQ ID NO: 1969852 - RNA, 19 nt, Artificial Sequence
  Description of Artificial Sequence: Synthetic oligonucleotide
  Sense strand starting at position 2194 of SEQ ID NO: 1880473
auugguuucuagguuauga

SEQ ID NO: 1969853 - RNA, 19 nt, Artificial Sequence
  Description of Artificial Sequence: Synthetic oligonucleotide
  Antisense strand to SEQ ID NO: 1969852
ucauaaccuagaaaccaau

SEQ ID NO: 1969854 - RNA, 19 nt, Artificial Sequence
  Description of Artificial Sequence: Synthetic oligonucleotide
  Sense strand starting at position 2196 of SEQ ID NO: 1880473
ugguuucuagguuaugagu

SEQ ID NO: 1969855 - RNA, 19 nt, Artificial Sequence
  Description of Artificial Sequence: Synthetic oligonucleotide
  Antisense strand to SEQ ID NO: 1969854
acucauaaccuagaaacca

SEQ ID NO: 1969856 - RNA, 19 nt, Artificial Sequence
  Description of Artificial Sequence: Synthetic oligonucleotide
  Sense strand starting at position 2355 of SEQ ID NO: 1880473
cucuucucucacuauggua

SEQ ID NO: 1969857 - RNA, 19 nt, Artificial Sequence
  Description of Artificial Sequence: Synthetic oligonucleotide
  Antisense strand to SEQ ID NO: 1969856
uaccauagugagagaagag

SEQ ID NO: 1969858 - RNA, 19 nt, Artificial Sequence
  Description of Artificial Sequence: Synthetic oligonucleotide
  Sense strand starting at position 2357 of SEQ ID NO: 1880473
cuucucucacuaugguauu

SEQ ID NO: 1969859 - RNA, 19 nt, Artificial Sequence
  Description of Artificial Sequence: Synthetic oligonucleotide
  Antisense strand to SEQ ID NO: 1969858
aauaccauagugagagaag

SEQ ID NO: 1969860 - RNA, 19 nt, Artificial Sequence
  Description of Artificial Sequence: Synthetic oligonucleotide
  Sense strand starting at position 2418 of SEQ ID NO: 1880473
auauaugugcauuaaagca

SEQ ID NO: 1969861 - RNA, 19 nt, Artificial Sequence
  Description of Artificial Sequence: Synthetic oligonucleotide
  Antisense strand to SEQ ID NO: 1969860
ugcuuuaaugcacauauau

SEQ ID NO: 1969862 - RNA, 19 nt, Artificial Sequence
  Description of Artificial Sequence: Synthetic oligonucleotide
  Sense strand starting at position 2680 of SEQ ID NO: 1880473
gcauacagcgaguaauaau

SEQ ID NO: 1969863 - RNA, 19 nt, Artificial Sequence
  Description of Artificial Sequence: Synthetic oligonucleotide
  Antisense strand to SEQ ID NO: 1969862
auuauuacucgcuguaugc

SEQ ID NO: 1969864 - RNA, 19 nt, Artificial Sequence
  Description of Artificial Sequence: Synthetic oligonucleotide
  Sense strand starting at position 2916 of SEQ ID NO: 1880473
cuuccuagccucugagaaa

SEQ ID NO: 1969865 - RNA, 19 nt, Artificial Sequence
  Description of Artificial Sequence: Synthetic oligonucleotide
  Antisense strand to SEQ ID NO: 1969864
uuucucagaggcuaggaag

SEQ ID NO: 1969866 - RNA, 19 nt, Artificial Sequence
  Description of Artificial Sequence: Synthetic oligonucleotide
  Sense strand starting at position 2988 of SEQ ID NO: 1880473
gauugagaauaugcaaugu

SEQ ID NO: 1969867 - RNA, 19 nt, Artificial Sequence
  Description of Artificial Sequence: Synthetic oligonucleotide
  Antisense strand to SEQ ID NO: 1969866
acauugcauauucucaauc

SEQ ID NO: 1969868 - RNA, 19 nt, Artificial Sequence
  Description of Artificial Sequence: Synthetic oligonucleotide
  Sense strand starting at position 3344 of SEQ ID NO: 1880473
aaguguucucaauaguggu

SEQ ID NO: 1969869 - RNA, 19 nt, Artificial Sequence
  Description of Artificial Sequence: Synthetic oligonucleotide
  Antisense strand to SEQ ID NO: 1969868
accacuauugagaacacuu

SEQ ID NO: 1969870 - RNA, 19 nt, Artificial Sequence
  Description of Artificial Sequence: Synthetic oligonucleotide
  Sense strand starting at position 3471 of SEQ ID NO: 1880473
guaagauaauaucucucgu

SEQ ID NO: 1969871 - RNA, 19 nt, Artificial Sequence
  Description of Artificial Sequence: Synthetic oligonucleotide
  Antisense strand to SEQ ID NO: 1969870
acgagagauauuaucuuac

SEQ ID NO: 1969872 - RNA, 19 nt, Artificial Sequence
  Description of Artificial Sequence: Synthetic oligonucleotide
  Sense strand starting at position 3496 of SEQ ID NO: 1880473
gaguuacauuuguaugaug

SEQ ID NO: 1969873 - RNA, 19 nt, Artificial Sequence
  Description of Artificial Sequence: Synthetic oligonucleotide
  Antisense strand to SEQ ID NO: 1969872
caucauacaaauguaacuc

SEQ ID NO: 1969874 - RNA, 19 nt, Artificial Sequence
  Description of Artificial Sequence: Synthetic oligonucleotide
  Sense strand starting at position 3504 of SEQ ID NO: 1880473
uuuguaugaugaccaguaa

SEQ ID NO: 1969875 - RNA, 19 nt, Artificial Sequence
  Description of Artificial Sequence: Synthetic oligonucleotide
  Antisense strand to SEQ ID NO: 1969874
uuacuggucaucauacaaa

SEQ ID NO: 1969876 - RNA, 19 nt, Artificial Sequence
  Description of Artificial Sequence: Synthetic oligonucleotide
  Sense strand starting at position 3505 of SEQ ID NO: 1880473
uuguaugaugaccaguaau

SEQ ID NO: 1969877 - RNA, 19 nt, Artificial Sequence
  Description of Artificial Sequence: Synthetic oligonucleotide
  Antisense strand to SEQ ID NO: 1969876
auuacuggucaucauacaa

SEQ ID NO: 1969878 - RNA, 19 nt, Artificial Sequence
  Description of Artificial Sequence: Synthetic oligonucleotide
  Sense strand starting at position 3508 of SEQ ID NO: 1880473
uaugaugaccaguaauguu

SEQ ID NO: 1969879 - RNA, 19 nt, Artificial Sequence
  Description of Artificial Sequence: Synthetic oligonucleotide
  Antisense strand to SEQ ID NO: 1969878
aacauuacuggucaucaua

SEQ ID NO: 1969880 - RNA, 19 nt, Artificial Sequence
  Description of Artificial Sequence: Synthetic oligonucleotide
  Sense strand starting at position 3537 of SEQ ID NO: 1880473
ucagauaccuguuugcuau

SEQ ID NO: 1969881 - RNA, 19 nt, Artificial Sequence
  Description of Artificial Sequence: Synthetic oligonucleotide
  Antisense strand to SEQ ID NO: 1969880
auagcaaacagguaucuga

SEQ ID NO: 1969882 - RNA, 19 nt, Artificial Sequence
  Description of Artificial Sequence: Synthetic oligonucleotide
  Sense strand starting at position 3544 of SEQ ID NO: 1880473
ccuguuugcuauuuguaua

SEQ ID NO: 1969883 - RNA, 19 nt, Artificial Sequence
  Description of Artificial Sequence: Synthetic oligonucleotide
  Antisense strand to SEQ ID NO: 1969882
uauacaaauagcaaacagg

SEQ ID NO: 1969884 - RNA, 19 nt, Artificial Sequence
  Description of Artificial Sequence: Synthetic oligonucleotide
  Sense strand starting at position 3745 of SEQ ID NO: 1880473
cuuuguugugcagaaaggu

SEQ ID NO: 1969885 - RNA, 19 nt, Artificial Sequence
  Description of Artificial Sequence: Synthetic oligonucleotide
  Antisense strand to SEQ ID NO: 1969884
accuuucugcacaacaaag

SEQ ID NO: 1969886 - RNA, 19 nt, Artificial Sequence
  Description of Artificial Sequence: Synthetic oligonucleotide
  Sense strand starting at position 216 of SEQ ID NO: 1880474
ucgaauaauuccucuagau

SEQ ID NO: 1969887 - RNA, 19 nt, Artificial Sequence
  Description of Artificial Sequence: Synthetic oligonucleotide
  Antisense strand to SEQ ID NO: 1969886
aucuagaggaauuauucga

SEQ ID NO: 1969888 - RNA, 19 nt, Artificial Sequence
  Description of Artificial Sequence: Synthetic oligonucleotide
  Sense strand starting at position 439 of SEQ ID NO: 1880474
ggcugugaaaguugaggaa

SEQ ID NO: 1969889 - RNA, 19 nt, Artificial Sequence
  Description of Artificial Sequence: Synthetic oligonucleotide
  Antisense strand to SEQ ID NO: 1969888
uuccucaacuuucacagcc

SEQ ID NO: 1969890 - RNA, 19 nt, Artificial Sequence
  Description of Artificial Sequence: Synthetic oligonucleotide
  Sense strand starting at position 643 of SEQ ID NO: 1880474
cacauuuccguguaucugu

SEQ ID NO: 1969891 - RNA, 19 nt, Artificial Sequence
  Description of Artificial Sequence: Synthetic oligonucleotide
  Antisense strand to SEQ ID NO: 1969890
acagauacacggaaaugug

SEQ ID NO: 1969892 - RNA, 19 nt, Artificial Sequence
  Description of Artificial Sequence: Synthetic oligonucleotide
  Sense strand starting at position 685 of SEQ ID NO: 1880474
cuaaucucgaaguggauua

SEQ ID NO: 1969893 - RNA, 19 nt, Artificial Sequence
  Description of Artificial Sequence: Synthetic oligonucleotide
  Antisense strand to SEQ ID NO: 1969892
uaauccacuucgagauuag

SEQ ID NO: 1969894 - RNA, 19 nt, Artificial Sequence
  Description of Artificial Sequence: Synthetic oligonucleotide
  Sense strand starting at position 690 of SEQ ID NO: 1880474
cucgaaguggauuauuaau

SEQ ID NO: 1969895 - RNA, 19 nt, Artificial Sequence
  Description of Artificial Sequence: Synthetic oligonucleotide
  Antisense strand to SEQ ID NO: 1969894
auuaauaauccacuucgag

SEQ ID NO: 1969896 - RNA, 19 nt, Artificial Sequence
  Description of Artificial Sequence: Synthetic oligonucleotide
  Sense strand starting at position 871 of SEQ ID NO: 1880474
ugagggaguguucggaaca

SEQ ID NO: 1969897 - RNA, 19 nt, Artificial Sequence
  Description of Artificial Sequence: Synthetic oligonucleotide
  Antisense strand to SEQ ID NO: 1969896
uguuccgaacacucccuca

SEQ ID NO: 1969898 - RNA, 19 nt, Artificial Sequence
  Description of Artificial Sequence: Synthetic oligonucleotide
  Sense strand starting at position 1113 of SEQ ID NO: 1880474
cggaacucccagugauaaa

SEQ ID NO: 1969899 - RNA, 19 nt, Artificial Sequence
  Description of Artificial Sequence: Synthetic oligonucleotide
  Antisense strand to SEQ ID NO: 1969898
uuuaucacugggaguuccg

SEQ ID NO: 1969900 - RNA, 19 nt, Artificial Sequence
  Description of Artificial Sequence: Synthetic oligonucleotide
  Sense strand starting at position 1156 of SEQ ID NO: 1880474
ugagcaauuccugagucca

SEQ ID NO: 1969901 - RNA, 19 nt, Artificial Sequence
  Description of Artificial Sequence: Synthetic oligonucleotide
  Antisense strand to SEQ ID NO: 1969900
uggacucaggaauugcuca

SEQ ID NO: 1969902 - RNA, 19 nt, Artificial Sequence
  Description of Artificial Sequence: Synthetic oligonucleotide
  Sense strand starting at position 1237 of SEQ ID NO: 1880474
gucagauccuaaguaaccu

SEQ ID NO: 1969903 - RNA, 19 nt, Artificial Sequence
  Description of Artificial Sequence: Synthetic oligonucleotide
  Antisense strand to SEQ ID NO: 1969902
agguuacuuaggaucugac

SEQ ID NO: 1969904 - RNA, 19 nt, Artificial Sequence
  Description of Artificial Sequence: Synthetic oligonucleotide
  Sense strand starting at position 1307 of SEQ ID NO: 1880474
auccuuugaccugagguua

SEQ ID NO: 1969905 - RNA, 19 nt, Artificial Sequence
  Description of Artificial Sequence: Synthetic oligonucleotide
  Antisense strand to SEQ ID NO: 1969904
uaaccucaggucaaaggau

SEQ ID NO: 1969906 - RNA, 19 nt, Artificial Sequence
  Description of Artificial Sequence: Synthetic oligonucleotide
  Sense strand starting at position 1394 of SEQ ID NO: 1880474
guaauaacucuaugcaaag

SEQ ID NO: 1969907 - RNA, 19 nt, Artificial Sequence
  Description of Artificial Sequence: Synthetic oligonucleotide
  Antisense strand to SEQ ID NO: 1969906
cuuugcauagaguuauuac

SEQ ID NO: 1969908 - RNA, 19 nt, Artificial Sequence
  Description of Artificial Sequence: Synthetic oligonucleotide
  Sense strand starting at position 1415 of SEQ ID NO: 1880474
cuccuucuuccuuaggagu

SEQ ID NO: 1969909 - RNA, 19 nt, Artificial Sequence
  Description of Artificial Sequence: Synthetic oligonucleotide
  Antisense strand to SEQ ID NO: 1969908
acuccuaaggaagaaggag

SEQ ID NO: 1969910 - RNA, 19 nt, Artificial Sequence
  Description of Artificial Sequence: Synthetic oligonucleotide
  Sense strand starting at position 1422 of SEQ ID NO: 1880474
uuccuuaggagugguggaa

SEQ ID NO: 1969911 - RNA, 19 nt, Artificial Sequence
  Description of Artificial Sequence: Synthetic oligonucleotide
  Antisense strand to SEQ ID NO: 1969910
uuccaccacuccuaaggaa

SEQ ID NO: 1969912 - RNA, 19 nt, Artificial Sequence
  Description of Artificial Sequence: Synthetic oligonucleotide
  Sense strand starting at position 1630 of SEQ ID NO: 1880474
aagaaugugccugacccau

SEQ ID NO: 1969913 - RNA, 19 nt, Artificial Sequence
  Description of Artificial Sequence: Synthetic oligonucleotide
  Antisense strand to SEQ ID NO: 1969912
augggucaggcacauucuu

SEQ ID NO: 1969914 - RNA, 19 nt, Artificial Sequence
  Description of Artificial Sequence: Synthetic oligonucleotide
  Sense strand starting at position 1864 of SEQ ID NO: 1880474
ucgugcuagguagcuauua

SEQ ID NO: 1969915 - RNA, 19 nt, Artificial Sequence
  Description of Artificial Sequence: Synthetic oligonucleotide
  Antisense strand to SEQ ID NO: 1969914
uaauagcuaccuagcacga

SEQ ID NO: 1969916 - RNA, 19 nt, Artificial Sequence
  Description of Artificial Sequence: Synthetic oligonucleotide
  Sense strand starting at position 2081 of SEQ ID NO: 1880474
guuggaucaggguauuauu

SEQ ID NO: 1969917 - RNA, 19 nt, Artificial Sequence
  Description of Artificial Sequence: Synthetic oligonucleotide
  Antisense strand to SEQ ID NO: 1969916
aauaauacccugauccaac

SEQ ID NO: 1969918 - RNA, 19 nt, Artificial Sequence
  Description of Artificial Sequence: Synthetic oligonucleotide
  Sense strand starting at position 2205 of SEQ ID NO: 1880474
accuuuaccuuuccgaaga

SEQ ID NO: 1969919 - RNA, 19 nt, Artificial Sequence
  Description of Artificial Sequence: Synthetic oligonucleotide
  Antisense strand to SEQ ID NO: 1969918
ucuucggaaagguaaaggu

SEQ ID NO: 1969920 - RNA, 19 nt, Artificial Sequence
  Description of Artificial Sequence: Synthetic oligonucleotide
  Sense strand starting at position 2246 of SEQ ID NO: 1880474
aaguuuauuugugcucuga

SEQ ID NO: 1969921 - RNA, 19 nt, Artificial Sequence
  Description of Artificial Sequence: Synthetic oligonucleotide
  Antisense strand to SEQ ID NO: 1969920
ucagagcacaaauaaacuu

SEQ ID NO: 1969922 - RNA, 19 nt, Artificial Sequence
  Description of Artificial Sequence: Synthetic oligonucleotide
  Sense strand starting at position 2248 of SEQ ID NO: 1880474
guuuauuugugcucugagg

SEQ ID NO: 1969923 - RNA, 19 nt, Artificial Sequence
  Description of Artificial Sequence: Synthetic oligonucleotide
  Antisense strand to SEQ ID NO: 1969922
ccucagagcacaaauaaac

SEQ ID NO: 1969924 - RNA, 19 nt, Artificial Sequence
  Description of Artificial Sequence: Synthetic oligonucleotide
  Sense strand starting at position 2250 of SEQ ID NO: 1880474
uuauuugugcucugagguu

SEQ ID NO: 1969925 - RNA, 19 nt, Artificial Sequence
  Description of Artificial Sequence: Synthetic oligonucleotide
  Antisense strand to SEQ ID NO: 1969924
aaccucagagcacaaauaa

SEQ ID NO: 1969926 - RNA, 19 nt, Artificial Sequence
  Description of Artificial Sequence: Synthetic oligonucleotide
  Sense strand starting at position 2320 of SEQ ID NO: 1880474
agaaauugagccugaacca

SEQ ID NO: 1969927 - RNA, 19 nt, Artificial Sequence
  Description of Artificial Sequence: Synthetic oligonucleotide
  Antisense strand to SEQ ID NO: 1969926
ugguucaggcucaauuucu

SEQ ID NO: 1969928 - RNA, 19 nt, Artificial Sequence
  Description of Artificial Sequence: Synthetic oligonucleotide
  Sense strand starting at position 2391 of SEQ ID NO: 1880474
cucaaauuuggcugucuuu

SEQ ID NO: 1969929 - RNA, 19 nt, Artificial Sequence
  Description of Artificial Sequence: Synthetic oligonucleotide
  Antisense strand to SEQ ID NO: 1969928
aaagacagccaaauuugag

SEQ ID NO: 1969930 - RNA, 19 nt, Artificial Sequence
  Description of Artificial Sequence: Synthetic oligonucleotide
  Sense strand starting at position 2518 of SEQ ID NO: 1880474
ggaagugggcucugaauug

SEQ ID NO: 1969931 - RNA, 19 nt, Artificial Sequence
  Description of Artificial Sequence: Synthetic oligonucleotide
  Antisense strand to SEQ ID NO: 1969930
caauucagagcccacuucc

SEQ ID NO: 1969932 - RNA, 19 nt, Artificial Sequence
  Description of Artificial Sequence: Synthetic oligonucleotide
  Sense strand starting at position 2566 of SEQ ID NO: 1880474
cugacuuccagauguggaa

SEQ ID NO: 1969933 - RNA, 19 nt, Artificial Sequence
  Description of Artificial Sequence: Synthetic oligonucleotide
  Antisense strand to SEQ ID NO: 1969932
uuccacaucuggaagucag

SEQ ID NO: 1969934 - RNA, 19 nt, Artificial Sequence
  Description of Artificial Sequence: Synthetic oligonucleotide
  Sense strand starting at position 2602 of SEQ ID NO: 1880474
ggaccuauguaaccugauu

SEQ ID NO: 1969935 - RNA, 19 nt, Artificial Sequence
  Description of Artificial Sequence: Synthetic oligonucleotide
  Antisense strand to SEQ ID NO: 1969934
aaucagguuacauaggucc

SEQ ID NO: 1969936 - RNA, 19 nt, Artificial Sequence
  Description of Artificial Sequence: Synthetic oligonucleotide
  Sense strand starting at position 2607 of SEQ ID NO: 1880474
uauguaaccugauuggauu

SEQ ID NO: 1969937 - RNA, 19 nt, Artificial Sequence
  Description of Artificial Sequence: Synthetic oligonucleotide
  Antisense strand to SEQ ID NO: 1969936
aauccaaucagguuacaua

SEQ ID NO: 1969938 - RNA, 19 nt, Artificial Sequence
  Description of Artificial Sequence: Synthetic oligonucleotide
  Sense strand starting at position 2608 of SEQ ID NO: 1880474
auguaaccugauuggauua

SEQ ID NO: 1969939 - RNA, 19 nt, Artificial Sequence
  Description of Artificial Sequence: Synthetic oligonucleotide
  Antisense strand to SEQ ID NO: 1969938
uaauccaaucagguuacau

SEQ ID NO: 1969940 - RNA, 19 nt, Artificial Sequence
  Description of Artificial Sequence: Synthetic oligonucleotide
  Sense strand starting at position 2679 of SEQ ID NO: 1880474
aguagaaagcuguauucuc

SEQ ID NO: 1969941 - RNA, 19 nt, Artificial Sequence
  Description of Artificial Sequence: Synthetic oligonucleotide
  Antisense strand to SEQ ID NO: 1969940
gagaauacagcuuucuacu

SEQ ID NO: 1969942 - RNA, 19 nt, Artificial Sequence
  Description of Artificial Sequence: Synthetic oligonucleotide
  Sense strand starting at position 2686 of SEQ ID NO: 1880474
agcuguauucuccaggaaa

SEQ ID NO: 1969943 - RNA, 19 nt, Artificial Sequence
  Description of Artificial Sequence: Synthetic oligonucleotide
  Antisense strand to SEQ ID NO: 1969942
uuuccuggagaauacagcu

SEQ ID NO: 1969944 - RNA, 19 nt, Artificial Sequence
  Description of Artificial Sequence: Synthetic oligonucleotide
  Sense strand starting at position 2688 of SEQ ID NO: 1880474
cuguauucuccaggaaauc

SEQ ID NO: 1969945 - RNA, 19 nt, Artificial Sequence
  Description of Artificial Sequence: Synthetic oligonucleotide
  Antisense strand to SEQ ID NO: 1969944
gauuuccuggagaauacag

SEQ ID NO: 1969946 - RNA, 19 nt, Artificial Sequence
  Description of Artificial Sequence: Synthetic oligonucleotide
  Sense strand starting at position 2953 of SEQ ID NO: 1880474
ccaaccgaguguucuauuu

SEQ ID NO: 1969947 - RNA, 19 nt, Artificial Sequence
  Description of Artificial Sequence: Synthetic oligonucleotide
  Antisense strand to SEQ ID NO: 1969946
aaauagaacacucgguugg

SEQ ID NO: 1969948 - RNA, 19 nt, Artificial Sequence
  Description of Artificial Sequence: Synthetic oligonucleotide
  Sense strand starting at position 3149 of SEQ ID NO: 1880474
cagagaacuuuguuccaga

SEQ ID NO: 1969949 - RNA, 19 nt, Artificial Sequence
  Description of Artificial Sequence: Synthetic oligonucleotide
  Antisense strand to SEQ ID NO: 1969948
ucuggaacaaaguucucug

SEQ ID NO: 1969950 - RNA, 19 nt, Artificial Sequence
  Description of Artificial Sequence: Synthetic oligonucleotide
  Sense strand starting at position 3150 of SEQ ID NO: 1880474
agagaacuuuguuccagaa

SEQ ID NO: 1969951 - RNA, 19 nt, Artificial Sequence
  Description of Artificial Sequence: Synthetic oligonucleotide
  Antisense strand to SEQ ID NO: 1969950
uucuggaacaaaguucucu

SEQ ID NO: 1969952 - RNA, 19 nt, Artificial Sequence
  Description of Artificial Sequence: Synthetic oligonucleotide
  Sense strand starting at position 3203 of SEQ ID NO: 1880474
ucucaaaucuggucauuag

SEQ ID NO: 1969953 - RNA, 19 nt, Artificial Sequence
  Description of Artificial Sequence: Synthetic oligonucleotide
  Antisense strand to SEQ ID NO: 1969952
cuaaugaccagauuugaga

SEQ ID NO: 1969954 - RNA, 19 nt, Artificial Sequence
  Description of Artificial Sequence: Synthetic oligonucleotide
  Sense strand starting at position 3206 of SEQ ID NO: 1880474
caaaucuggucauuagaga

SEQ ID NO: 1969955 - RNA, 19 nt, Artificial Sequence
  Description of Artificial Sequence: Synthetic oligonucleotide
  Antisense strand to SEQ ID NO: 1969954
ucucuaaugaccagauuug

SEQ ID NO: 1969956 - RNA, 19 nt, Artificial Sequence
  Description of Artificial Sequence: Synthetic oligonucleotide
  Sense strand starting at position 3213 of SEQ ID NO: 1880474
ggucauuagagauaucugu

SEQ ID NO: 1969957 - RNA, 19 nt, Artificial Sequence
  Description of Artificial Sequence: Synthetic oligonucleotide
  Antisense strand to SEQ ID NO: 1969956
acagauaucucuaaugacc

SEQ ID NO: 1969958 - RNA, 19 nt, Artificial Sequence
  Description of Artificial Sequence: Synthetic oligonucleotide
  Sense strand starting at position 3331 of SEQ ID NO: 1880474
cccuguacucuguaggauu

SEQ ID NO: 1969959 - RNA, 19 nt, Artificial Sequence
  Description of Artificial Sequence: Synthetic oligonucleotide
  Antisense strand to SEQ ID NO: 1969958
aauccuacagaguacaggg

SEQ ID NO: 1969960 - RNA, 19 nt, Artificial Sequence
  Description of Artificial Sequence: Synthetic oligonucleotide
  Sense strand starting at position 3517 of SEQ ID NO: 1880474
gguauaaucuaucccagau

SEQ ID NO: 1969961 - RNA, 19 nt, Artificial Sequence
  Description of Artificial Sequence: Synthetic oligonucleotide
  Antisense strand to SEQ ID NO: 1969960
aucugggauagauuauacc

SEQ ID NO: 1969962 - RNA, 19 nt, Artificial Sequence
  Description of Artificial Sequence: Synthetic oligonucleotide
  Sense strand starting at position 3543 of SEQ ID NO: 1880474
cagagagaaacuuggcgau

SEQ ID NO: 1969963 - RNA, 19 nt, Artificial Sequence
  Description of Artificial Sequence: Synthetic oligonucleotide
  Antisense strand to SEQ ID NO: 1969962
aucgccaaguuucucucug

SEQ ID NO: 1969964 - RNA, 19 nt, Artificial Sequence
  Description of Artificial Sequence: Synthetic oligonucleotide
  Sense strand starting at position 3545 of SEQ ID NO: 1880474
gagagaaacuuggcgauca

SEQ ID NO: 1969965 - RNA, 19 nt, Artificial Sequence
  Description of Artificial Sequence: Synthetic oligonucleotide
  Antisense strand to SEQ ID NO: 1969964
ugaucgccaaguuucucuc

SEQ ID NO: 1969966 - RNA, 19 nt, Artificial Sequence
  Description of Artificial Sequence: Synthetic oligonucleotide
  Sense strand starting at position 252 of SEQ ID NO: 1880475
gggaaaggguuauaaacuc

SEQ ID NO: 1969967 - RNA, 19 nt, Artificial Sequence
  Description of Artificial Sequence: Synthetic oligonucleotide
  Antisense strand to SEQ ID NO: 1969966
gaguuuauaacccuuuccc

SEQ ID NO: 1969968 - RNA, 19 nt, Artificial Sequence
  Description of Artificial Sequence: Synthetic oligonucleotide
  Sense strand starting at position 309 of SEQ ID NO: 1880475
gucccuaucuuucuuagau

SEQ ID NO: 1969969 - RNA, 19 nt, Artificial Sequence
  Description of Artificial Sequence: Synthetic oligonucleotide
  Antisense strand to SEQ ID NO: 1969968
aucuaagaaagauagggac

SEQ ID NO: 1969970 - RNA, 19 nt, Artificial Sequence
  Description of Artificial Sequence: Synthetic oligonucleotide
  Sense strand starting at position 382 of SEQ ID NO: 1880475
ugguaaugacaucgugauu

SEQ ID NO: 1969971 - RNA, 19 nt, Artificial Sequence
  Description of Artificial Sequence: Synthetic oligonucleotide
  Antisense strand to SEQ ID NO: 1969970
aaucacgaugucauuacca

SEQ ID NO: 1969972 - RNA, 19 nt, Artificial Sequence
  Description of Artificial Sequence: Synthetic oligonucleotide
  Sense strand starting at position 554 of SEQ ID NO: 1880475
gaacauaauugagacaugu

SEQ ID NO: 1969973 - RNA, 19 nt, Artificial Sequence
  Description of Artificial Sequence: Synthetic oligonucleotide
  Antisense strand to SEQ ID NO: 1969972
acaugucucaauuauguuc

SEQ ID NO: 1969974 - RNA, 19 nt, Artificial Sequence
  Description of Artificial Sequence: Synthetic oligonucleotide
  Sense strand starting at position 796 of SEQ ID NO: 1880475
gaggaauauuuaggcgauc

SEQ ID NO: 1969975 - RNA, 19 nt, Artificial Sequence
  Description of Artificial Sequence: Synthetic oligonucleotide
  Antisense strand to SEQ ID NO: 1969974
gaucgccuaaauauuccuc

SEQ ID NO: 1969976 - RNA, 19 nt, Artificial Sequence
  Description of Artificial Sequence: Synthetic oligonucleotide
  Sense strand starting at position 1036 of SEQ ID NO: 1880475
uuaucaaguggcuaaacuu

SEQ ID NO: 1969977 - RNA, 19 nt, Artificial Sequence
  Description of Artificial Sequence: Synthetic oligonucleotide
  Antisense strand to SEQ ID NO: 1969976
aaguuuagccacuugauaa

SEQ ID NO: 1969978 - RNA, 19 nt, Artificial Sequence
  Description of Artificial Sequence: Synthetic oligonucleotide
  Sense strand starting at position 1104 of SEQ ID NO: 1880475
cagugacuuuguuugacau

SEQ ID NO: 1969979 - RNA, 19 nt, Artificial Sequence
  Description of Artificial Sequence: Synthetic oligonucleotide
  Antisense strand to SEQ ID NO: 1969978
augucaaacaaagucacug

SEQ ID NO: 1969980 - RNA, 19 nt, Artificial Sequence
  Description of Artificial Sequence: Synthetic oligonucleotide
  Sense strand starting at position 1105 of SEQ ID NO: 1880475
agugacuuuguuugacauc

SEQ ID NO: 1969981 - RNA, 19 nt, Artificial Sequence
  Description of Artificial Sequence: Synthetic oligonucleotide
  Antisense strand to SEQ ID NO: 1969980
gaugucaaacaaagucacu

SEQ ID NO: 1969982 - RNA, 19 nt, Artificial Sequence
  Description of Artificial Sequence: Synthetic oligonucleotide
  Sense strand starting at position 1233 of SEQ ID NO: 1880475
gggaacugcugcccaauua

SEQ ID NO: 1969983 - RNA, 19 nt, Artificial Sequence
  Description of Artificial Sequence: Synthetic oligonucleotide
  Antisense strand to SEQ ID NO: 1969982
uaauugggcagcaguuccc

SEQ ID NO: 1969984 - RNA, 19 nt, Artificial Sequence
  Description of Artificial Sequence: Synthetic oligonucleotide
  Sense strand starting at position 1234 of SEQ ID NO: 1880475
ggaacugcugcccaauuau

SEQ ID NO: 1969985 - RNA, 19 nt, Artificial Sequence
  Description of Artificial Sequence: Synthetic oligonucleotide
  Antisense strand to SEQ ID NO: 1969984
auaauugggcagcaguucc

SEQ ID NO: 1969986 - RNA, 19 nt, Artificial Sequence
  Description of Artificial Sequence: Synthetic oligonucleotide
  Sense strand starting at position 1244 of SEQ ID NO: 1880475
cccaauuaucuagggcaca

SEQ ID NO: 1969987 - RNA, 19 nt, Artificial Sequence
  Description of Artificial Sequence: Synthetic oligonucleotide
  Antisense strand to SEQ ID NO: 1969986
ugugcccuagauaauuggg

SEQ ID NO: 1969988 - RNA, 19 nt, Artificial Sequence
  Description of Artificial Sequence: Synthetic oligonucleotide
  Sense strand starting at position 1257 of SEQ ID NO: 1880475
ggcacagcucucuaugcau

SEQ ID NO: 1969989 - RNA, 19 nt, Artificial Sequence
  Description of Artificial Sequence: Synthetic oligonucleotide
  Antisense strand to SEQ ID NO: 1969988
augcauagagagcugugcc

SEQ ID NO: 1969990 - RNA, 19 nt, Artificial Sequence
  Description of Artificial Sequence: Synthetic oligonucleotide
  Sense strand starting at position 1271 of SEQ ID NO: 1880475
ugcauaaaucucuaguaag

SEQ ID NO: 1969991 - RNA, 19 nt, Artificial Sequence
  Description of Artificial Sequence: Synthetic oligonucleotide
  Antisense strand to SEQ ID NO: 1969990
cuuacuagagauuuaugca

SEQ ID NO: 1969992 - RNA, 19 nt, Artificial Sequence
  Description of Artificial Sequence: Synthetic oligonucleotide
  Sense strand starting at position 1491 of SEQ ID NO: 1880475
uuggcauugugagccauau

SEQ ID NO: 1969993 - RNA, 19 nt, Artificial Sequence
  Description of Artificial Sequence: Synthetic oligonucleotide
  Antisense strand to SEQ ID NO: 1969992
auauggcucacaaugccaa

SEQ ID NO: 1969994 - RNA, 19 nt, Artificial Sequence
  Description of Artificial Sequence: Synthetic oligonucleotide
  Sense strand starting at position 1493 of SEQ ID NO: 1880475
ggcauugugagccauauga

SEQ ID NO: 1969995 - RNA, 19 nt, Artificial Sequence
  Description of Artificial Sequence: Synthetic oligonucleotide
  Antisense strand to SEQ ID NO: 1969994
ucauauggcucacaaugcc

SEQ ID NO: 1969996 - RNA, 19 nt, Artificial Sequence
  Description of Artificial Sequence: Synthetic oligonucleotide
  Sense strand starting at position 1495 of SEQ ID NO: 1880475
cauugugagccauaugauc

SEQ ID NO: 1969997 - RNA, 19 nt, Artificial Sequence
  Description of Artificial Sequence: Synthetic oligonucleotide
  Antisense strand to SEQ ID NO: 1969996
gaucauauggcucacaaug

SEQ ID NO: 1969998 - RNA, 19 nt, Artificial Sequence
  Description of Artificial Sequence: Synthetic oligonucleotide
  Sense strand starting at position 1573 of SEQ ID NO: 1880475
aaaggaugagugugacugu

SEQ ID NO: 1969999 - RNA, 19 nt, Artificial Sequence
  Description of Artificial Sequence: Synthetic oligonucleotide
  Antisense strand to SEQ ID NO: 1969998
acagucacacucauccuuu

SEQ ID NO: 1970000 - RNA, 19 nt, Artificial Sequence
  Description of Artificial Sequence: Synthetic oligonucleotide
  Sense strand starting at position 1576 of SEQ ID NO: 1880475
ggaugagugugacugugua

SEQ ID NO: 1970001 - RNA, 19 nt, Artificial Sequence
  Description of Artificial Sequence: Synthetic oligonucleotide
  Antisense strand to SEQ ID NO: 1970000
uacacagucacacucaucc

SEQ ID NO: 1970002 - RNA, 19 nt, Artificial Sequence
  Description of Artificial Sequence: Synthetic oligonucleotide
  Sense strand starting at position 1580 of SEQ ID NO: 1880475
gagugugacuguguaacaa

SEQ ID NO: 1970003 - RNA, 19 nt, Artificial Sequence
  Description of Artificial Sequence: Synthetic oligonucleotide
  Antisense strand to SEQ ID NO: 1970002
uuguuacacagucacacuc

SEQ ID NO: 1970004 - RNA, 19 nt, Artificial Sequence
  Description of Artificial Sequence: Synthetic oligonucleotide
  Sense strand starting at position 1619 of SEQ ID NO: 1880475
aauggugugccagguuuga

SEQ ID NO: 1970005 - RNA, 19 nt, Artificial Sequence
  Description of Artificial Sequence: Synthetic oligonucleotide
  Antisense strand to SEQ ID NO: 1970004
ucaaaccuggcacaccauu

SEQ ID NO: 1970006 - RNA, 19 nt, Artificial Sequence
  Description of Artificial Sequence: Synthetic oligonucleotide
  Sense strand starting at position 1693 of SEQ ID NO: 1880475
agcauacuggcauaaauga

SEQ ID NO: 1970007 - RNA, 19 nt, Artificial Sequence
  Description of Artificial Sequence: Synthetic oligonucleotide
  Antisense strand to SEQ ID NO: 1970006
ucauuuaugccaguaugcu

SEQ ID NO: 1970008 - RNA, 19 nt, Artificial Sequence
  Description of Artificial Sequence: Synthetic oligonucleotide
  Sense strand starting at position 1720 of SEQ ID NO: 1880475
gguuauugaagucaagcca

SEQ ID NO: 1970009 - RNA, 19 nt, Artificial Sequence
  Description of Artificial Sequence: Synthetic oligonucleotide
  Antisense strand to SEQ ID NO: 1970008
uggcuugacuucaauaacc

SEQ ID NO: 1970010 - RNA, 19 nt, Artificial Sequence
  Description of Artificial Sequence: Synthetic oligonucleotide
  Sense strand starting at position 1805 of SEQ ID NO: 1880475
ucuucuuugucaucuguua

SEQ ID NO: 1970011 - RNA, 19 nt, Artificial Sequence
  Description of Artificial Sequence: Synthetic oligonucleotide
  Antisense strand to SEQ ID NO: 1970010
uaacagaugacaaagaaga

SEQ ID NO: 1970012 - RNA, 19 nt, Artificial Sequence
  Description of Artificial Sequence: Synthetic oligonucleotide
  Sense strand starting at position 1825 of SEQ ID NO: 1880475
aggaaauuguaucucccau

SEQ ID NO: 1970013 - RNA, 19 nt, Artificial Sequence
  Description of Artificial Sequence: Synthetic oligonucleotide
  Antisense strand to SEQ ID NO: 1970012
augggagauacaauuuccu

SEQ ID NO: 1970014 - RNA, 19 nt, Artificial Sequence
  Description of Artificial Sequence: Synthetic oligonucleotide
  Sense strand starting at position 1847 of SEQ ID NO: 1880475
acacacguucuaugaauau

SEQ ID NO: 1970015 - RNA, 19 nt, Artificial Sequence
  Description of Artificial Sequence: Synthetic oligonucleotide
  Antisense strand to SEQ ID NO: 1970014
auauucauagaacgugugu

SEQ ID NO: 1970016 - RNA, 19 nt, Artificial Sequence
  Description of Artificial Sequence: Synthetic oligonucleotide
  Sense strand starting at position 1851 of SEQ ID NO: 1880475
acguucuaugaauauuaga

SEQ ID NO: 1970017 - RNA, 19 nt, Artificial Sequence
  Description of Artificial Sequence: Synthetic oligonucleotide
  Antisense strand to SEQ ID NO: 1970016
ucuaauauucauagaacgu

SEQ ID NO: 1970018 - RNA, 19 nt, Artificial Sequence
  Description of Artificial Sequence: Synthetic oligonucleotide
  Sense strand starting at position 1856 of SEQ ID NO: 1880475
cuaugaauauuagaugaga

SEQ ID NO: 1970019 - RNA, 19 nt, Artificial Sequence
  Description of Artificial Sequence: Synthetic oligonucleotide
  Antisense strand to SEQ ID NO: 1970018
ucucaucuaauauucauag

SEQ ID NO: 1970020 - RNA, 19 nt, Artificial Sequence
  Description of Artificial Sequence: Synthetic oligonucleotide
  Sense strand starting at position 2007 of SEQ ID NO: 1880475
cugagaauggcuuguccuu

SEQ ID NO: 1970021 - RNA, 19 nt, Artificial Sequence
  Description of Artificial Sequence: Synthetic oligonucleotide
  Antisense strand to SEQ ID NO: 1970020
aaggacaagccauucucag

SEQ ID NO: 1970022 - RNA, 19 nt, Artificial Sequence
  Description of Artificial Sequence: Synthetic oligonucleotide
  Sense strand starting at position 2009 of SEQ ID NO: 1880475
gagaauggcuuguccuuau

SEQ ID NO: 1970023 - RNA, 19 nt, Artificial Sequence
  Description of Artificial Sequence: Synthetic oligonucleotide
  Antisense strand to SEQ ID NO: 1970022
auaaggacaagccauucuc

SEQ ID NO: 1970024 - RNA, 19 nt, Artificial Sequence
  Description of Artificial Sequence: Synthetic oligonucleotide
  Sense strand starting at position 2013 of SEQ ID NO: 1880475
auggcuuguccuuauauac

SEQ ID NO: 1970025 - RNA, 19 nt, Artificial Sequence
  Description of Artificial Sequence: Synthetic oligonucleotide
  Antisense strand to SEQ ID NO: 1970024
guauauaaggacaagccau

SEQ ID NO: 1970026 - RNA, 19 nt, Artificial Sequence
  Description of Artificial Sequence: Synthetic oligonucleotide
  Sense strand starting at position 2049 of SEQ ID NO: 1880475
cugugcuaguaagugaaau

SEQ ID NO: 1970027 - RNA, 19 nt, Artificial Sequence
  Description of Artificial Sequence: Synthetic oligonucleotide
  Antisense strand to SEQ ID NO: 1970026
auuucacuuacuagcacag

SEQ ID NO: 1970028 - RNA, 19 nt, Artificial Sequence
  Description of Artificial Sequence: Synthetic oligonucleotide
  Sense strand starting at position 2050 of SEQ ID NO: 1880475
ugugcuaguaagugaaaug

SEQ ID NO: 1970029 - RNA, 19 nt, Artificial Sequence
  Description of Artificial Sequence: Synthetic oligonucleotide
  Antisense strand to SEQ ID NO: 1970028
cauuucacuuacuagcaca

SEQ ID NO: 1970030 - RNA, 19 nt, Artificial Sequence
  Description of Artificial Sequence: Synthetic oligonucleotide
  Sense strand starting at position 2118 of SEQ ID NO: 1880475
guaacuugggcaugacaaa

SEQ ID NO: 1970031 - RNA, 19 nt, Artificial Sequence
  Description of Artificial Sequence: Synthetic oligonucleotide
  Antisense strand to SEQ ID NO: 1970030
uuugucaugcccaaguuac

SEQ ID NO: 1970032 - RNA, 19 nt, Artificial Sequence
  Description of Artificial Sequence: Synthetic oligonucleotide
  Sense strand starting at position 2369 of SEQ ID NO: 1880475
gcauuugguuauucugacu

SEQ ID NO: 1970033 - RNA, 19 nt, Artificial Sequence
  Description of Artificial Sequence: Synthetic oligonucleotide
  Antisense strand to SEQ ID NO: 1970032
agucagaauaaccaaaugc

SEQ ID NO: 1970034 - RNA, 19 nt, Artificial Sequence
  Description of Artificial Sequence: Synthetic oligonucleotide
  Sense strand starting at position 2374 of SEQ ID NO: 1880475
ugguuauucugacuacaua

SEQ ID NO: 1970035 - RNA, 19 nt, Artificial Sequence
  Description of Artificial Sequence: Synthetic oligonucleotide
  Antisense strand to SEQ ID NO: 1970034
uauguagucagaauaacca

SEQ ID NO: 1970036 - RNA, 19 nt, Artificial Sequence
  Description of Artificial Sequence: Synthetic oligonucleotide
  Sense strand starting at position 2375 of SEQ ID NO: 1880475
gguuauucugacuacauac

SEQ ID NO: 1970037 - RNA, 19 nt, Artificial Sequence
  Description of Artificial Sequence: Synthetic oligonucleotide
  Antisense strand to SEQ ID NO: 1970036
guauguagucagaauaacc

SEQ ID NO: 1970038 - RNA, 19 nt, Artificial Sequence
  Description of Artificial Sequence: Synthetic oligonucleotide
  Sense strand starting at position 3831 of SEQ ID NO: 1880475
augucuaaugcagaugaca

SEQ ID NO: 1970039 - RNA, 19 nt, Artificial Sequence
  Description of Artificial Sequence: Synthetic oligonucleotide
  Antisense strand to SEQ ID NO: 1970038
ugucaucugcauuagacau

SEQ ID NO: 1970040 - RNA, 19 nt, Artificial Sequence
  Description of Artificial Sequence: Synthetic oligonucleotide
  Sense strand starting at position 3893 of SEQ ID NO: 1880475
cugcaaguucuacauaugu

SEQ ID NO: 1970041 - RNA, 19 nt, Artificial Sequence
  Description of Artificial Sequence: Synthetic oligonucleotide
  Antisense strand to SEQ ID NO: 1970040
acauauguagaacuugcag

SEQ ID NO: 1970042 - RNA, 19 nt, Artificial Sequence
  Description of Artificial Sequence: Synthetic oligonucleotide
  Sense strand starting at position 3918 of SEQ ID NO: 1880475
gaacuuaacguguaauaaa

SEQ ID NO: 1970043 - RNA, 19 nt, Artificial Sequence
  Description of Artificial Sequence: Synthetic oligonucleotide
  Antisense strand to SEQ ID NO: 1970042
uuuauuacacguuaaguuc

SEQ ID NO: 1970044 - RNA, 19 nt, Artificial Sequence
  Description of Artificial Sequence: Synthetic oligonucleotide
  Sense strand starting at position 3981 of SEQ ID NO: 1880475
aucuauuuagccuguaucu

SEQ ID NO: 1970045 - RNA, 19 nt, Artificial Sequence
  Description of Artificial Sequence: Synthetic oligonucleotide
  Antisense strand to SEQ ID NO: 1970044
agauacaggcuaaauagau

SEQ ID NO: 1970046 - RNA, 19 nt, Artificial Sequence
  Description of Artificial Sequence: Synthetic oligonucleotide
  Sense strand starting at position 27 of SEQ ID NO: 1880476
gugacaaacugauacacuu

SEQ ID NO: 1970047 - RNA, 19 nt, Artificial Sequence
  Description of Artificial Sequence: Synthetic oligonucleotide
  Antisense strand to SEQ ID NO: 1970046
aaguguaucaguuugucac

SEQ ID NO: 1970048 - RNA, 19 nt, Artificial Sequence
  Description of Artificial Sequence: Synthetic oligonucleotide
  Sense strand starting at position 75 of SEQ ID NO: 1880476
aggcucaaucuggagcuau

SEQ ID NO: 1970049 - RNA, 19 nt, Artificial Sequence
  Description of Artificial Sequence: Synthetic oligonucleotide
  Antisense strand to SEQ ID NO: 1970048
auagcuccagauugagccu

SEQ ID NO: 1970050 - RNA, 19 nt, Artificial Sequence
  Description of Artificial Sequence: Synthetic oligonucleotide
  Sense strand starting at position 110 of SEQ ID NO: 1880476
ggaggauggugccuugaac

SEQ ID NO: 1970051 - RNA, 19 nt, Artificial Sequence
  Description of Artificial Sequence: Synthetic oligonucleotide
  Antisense strand to SEQ ID NO: 1970050
guucaaggcaccauccucc

SEQ ID NO: 1970052 - RNA, 19 nt, Artificial Sequence
  Description of Artificial Sequence: Synthetic oligonucleotide
  Sense strand starting at position 181 of SEQ ID NO: 1880476
ugccucauauaguggaaau

SEQ ID NO: 1970053 - RNA, 19 nt, Artificial Sequence
  Description of Artificial Sequence: Synthetic oligonucleotide
  Antisense strand to SEQ ID NO: 1970052
auuuccacuauaugaggca

SEQ ID NO: 1970054 - RNA, 19 nt, Artificial Sequence
  Description of Artificial Sequence: Synthetic oligonucleotide
  Sense strand starting at position 270 of SEQ ID NO: 1880476
ugaacaaguuacuaagcau

SEQ ID NO: 1970055 - RNA, 19 nt, Artificial Sequence
  Description of Artificial Sequence: Synthetic oligonucleotide
  Antisense strand to SEQ ID NO: 1970054
augcuuaguaacuuguuca

SEQ ID NO: 1970056 - RNA, 19 nt, Artificial Sequence
  Description of Artificial Sequence: Synthetic oligonucleotide
  Sense strand starting at position 404 of SEQ ID NO: 1880476
gauggucugcucuggagau

SEQ ID NO: 1970057 - RNA, 19 nt, Artificial Sequence
  Description of Artificial Sequence: Synthetic oligonucleotide
  Antisense strand to SEQ ID NO: 1970056
aucuccagagcagaccauc

SEQ ID NO: 1970058 - RNA, 19 nt, Artificial Sequence
  Description of Artificial Sequence: Synthetic oligonucleotide
  Sense strand starting at position 405 of SEQ ID NO: 1880476
auggucugcucuggagauu

SEQ ID NO: 1970059 - RNA, 19 nt, Artificial Sequence
  Description of Artificial Sequence: Synthetic oligonucleotide
  Antisense strand to SEQ ID NO: 1970058
aaucuccagagcagaccau

SEQ ID NO: 1970060 - RNA, 19 nt, Artificial Sequence
  Description of Artificial Sequence: Synthetic oligonucleotide
  Sense strand starting at position 519 of SEQ ID NO: 1880476
uucuguguuucuggagaau

SEQ ID NO: 1970061 - RNA, 19 nt, Artificial Sequence
  Description of Artificial Sequence: Synthetic oligonucleotide
  Antisense strand to SEQ ID NO: 1970060
auucuccagaaacacagaa

SEQ ID NO: 1970062 - RNA, 19 nt, Artificial Sequence
  Description of Artificial Sequence: Synthetic oligonucleotide
  Sense strand starting at position 522 of SEQ ID NO: 1880476
uguguuucuggagaaucuu

SEQ ID NO: 1970063 - RNA, 19 nt, Artificial Sequence
  Description of Artificial Sequence: Synthetic oligonucleotide
  Antisense strand to SEQ ID NO: 1970062
aagauucuccagaaacaca

SEQ ID NO: 1970064 - RNA, 19 nt, Artificial Sequence
  Description of Artificial Sequence: Synthetic oligonucleotide
  Sense strand starting at position 552 of SEQ ID NO: 1880476
ggguuaacuuccuauuaau

SEQ ID NO: 1970065 - RNA, 19 nt, Artificial Sequence
  Description of Artificial Sequence: Synthetic oligonucleotide
  Antisense strand to SEQ ID NO: 1970064
auuaauaggaaguuaaccc

SEQ ID NO: 1970066 - RNA, 19 nt, Artificial Sequence
  Description of Artificial Sequence: Synthetic oligonucleotide
  Sense strand starting at position 650 of SEQ ID NO: 1880476
acaagaauaucuggaauau

SEQ ID NO: 1970067 - RNA, 19 nt, Artificial Sequence
  Description of Artificial Sequence: Synthetic oligonucleotide
  Antisense strand to SEQ ID NO: 1970066
auauuccagauauucuugu

SEQ ID NO: 1970068 - RNA, 19 nt, Artificial Sequence
  Description of Artificial Sequence: Synthetic oligonucleotide
  Sense strand starting at position 659 of SEQ ID NO: 1880476
ucuggaauauuagaauucu

SEQ ID NO: 1970069 - RNA, 19 nt, Artificial Sequence
  Description of Artificial Sequence: Synthetic oligonucleotide
  Antisense strand to SEQ ID NO: 1970068
agaauucuaauauuccaga

SEQ ID NO: 1970070 - RNA, 19 nt, Artificial Sequence
  Description of Artificial Sequence: Synthetic oligonucleotide
  Sense strand starting at position 665 of SEQ ID NO: 1880476
auauuagaauucugugaag

SEQ ID NO: 1970071 - RNA, 19 nt, Artificial Sequence
  Description of Artificial Sequence: Synthetic oligonucleotide
  Antisense strand to SEQ ID NO: 1970070
cuucacagaauucuaauau

SEQ ID NO: 1970072 - RNA, 19 nt, Artificial Sequence
  Description of Artificial Sequence: Synthetic oligonucleotide
  Sense strand starting at position 677 of SEQ ID NO: 1880476
ugugaagaaaguuauagca

SEQ ID NO: 1970073 - RNA, 19 nt, Artificial Sequence
  Description of Artificial Sequence: Synthetic oligonucleotide
  Antisense strand to SEQ ID NO: 1970072
ugcuauaacuuucuucaca

SEQ ID NO: 1970074 - RNA, 19 nt, Artificial Sequence
  Description of Artificial Sequence: Synthetic oligonucleotide
  Sense strand starting at position 679 of SEQ ID NO: 1880476
ugaagaaaguuauagcagu

SEQ ID NO: 1970075 - RNA, 19 nt, Artificial Sequence
  Description of Artificial Sequence: Synthetic oligonucleotide
  Antisense strand to SEQ ID NO: 1970074
acugcuauaacuuucuuca

SEQ ID NO: 1970076 - RNA, 19 nt, Artificial Sequence
  Description of Artificial Sequence: Synthetic oligonucleotide
  Sense strand starting at position 685 of SEQ ID NO: 1880476
aaguuauagcaguggugua

SEQ ID NO: 1970077 - RNA, 19 nt, Artificial Sequence
  Description of Artificial Sequence: Synthetic oligonucleotide
  Antisense strand to SEQ ID NO: 1970076
uacaccacugcuauaacuu

SEQ ID NO: 1970078 - RNA, 19 nt, Artificial Sequence
  Description of Artificial Sequence: Synthetic oligonucleotide
  Sense strand starting at position 686 of SEQ ID NO: 1880476
aguuauagcagugguguaa

SEQ ID NO: 1970079 - RNA, 19 nt, Artificial Sequence
  Description of Artificial Sequence: Synthetic oligonucleotide
  Antisense strand to SEQ ID NO: 1970078
uuacaccacugcuauaacu

SEQ ID NO: 1970080 - RNA, 19 nt, Artificial Sequence
  Description of Artificial Sequence: Synthetic oligonucleotide
  Sense strand starting at position 695 of SEQ ID NO: 1880476
agugguguaauguguuacu

SEQ ID NO: 1970081 - RNA, 19 nt, Artificial Sequence
  Description of Artificial Sequence: Synthetic oligonucleotide
  Antisense strand to SEQ ID NO: 1970080
aguaacacauuacaccacu

SEQ ID NO: 1970082 - RNA, 19 nt, Artificial Sequence
  Description of Artificial Sequence: Synthetic oligonucleotide
  Sense strand starting at position 698 of SEQ ID NO: 1880476
gguguaauguguuacucua

SEQ ID NO: 1970083 - RNA, 19 nt, Artificial Sequence
  Description of Artificial Sequence: Synthetic oligonucleotide
  Antisense strand to SEQ ID NO: 1970082
uagaguaacacauuacacc

SEQ ID NO: 1970084 - RNA, 19 nt, Artificial Sequence
  Description of Artificial Sequence: Synthetic oligonucleotide
  Sense strand starting at position 700 of SEQ ID NO: 1880476
uguaauguguuacucuaaa

SEQ ID NO: 1970085 - RNA, 19 nt, Artificial Sequence
  Description of Artificial Sequence: Synthetic oligonucleotide
  Antisense strand to SEQ ID NO: 1970084
uuuagaguaacacauuaca

SEQ ID NO: 1970086 - RNA, 19 nt, Artificial Sequence
  Description of Artificial Sequence: Synthetic oligonucleotide
  Sense strand starting at position 1627 of SEQ ID NO: 1880476
gaagauaggcaauguauua

SEQ ID NO: 1970087 - RNA, 19 nt, Artificial Sequence
  Description of Artificial Sequence: Synthetic oligonucleotide
  Antisense strand to SEQ ID NO: 1970086
uaauacauugccuaucuuc

SEQ ID NO: 1970088 - RNA, 19 nt, Artificial Sequence
  Description of Artificial Sequence: Synthetic oligonucleotide
  Sense strand starting at position 1644 of SEQ ID NO: 1880476
uaggguucuccagaggguu

SEQ ID NO: 1970089 - RNA, 19 nt, Artificial Sequence
  Description of Artificial Sequence: Synthetic oligonucleotide
  Antisense strand to SEQ ID NO: 1970088
aacccucuggagaacccua

SEQ ID NO: 1970090 - RNA, 19 nt, Artificial Sequence
  Description of Artificial Sequence: Synthetic oligonucleotide
  Sense strand starting at position 1664 of SEQ ID NO: 1880476
uccagagggacguauguau

SEQ ID NO: 1970091 - RNA, 19 nt, Artificial Sequence
  Description of Artificial Sequence: Synthetic oligonucleotide
  Antisense strand to SEQ ID NO: 1970090
auacauacgucccucugga

SEQ ID NO: 1970092 - RNA, 19 nt, Artificial Sequence
  Description of Artificial Sequence: Synthetic oligonucleotide
  Sense strand starting at position 1668 of SEQ ID NO: 1880476
gagggacguauguauauau

SEQ ID NO: 1970093 - RNA, 19 nt, Artificial Sequence
  Description of Artificial Sequence: Synthetic oligonucleotide
  Antisense strand to SEQ ID NO: 1970092
auauauacauacgucccuc

SEQ ID NO: 1970094 - RNA, 19 nt, Artificial Sequence
  Description of Artificial Sequence: Synthetic oligonucleotide
  Sense strand starting at position 1729 of SEQ ID NO: 1880476
ggcgaagucucaugauagg

SEQ ID NO: 1970095 - RNA, 19 nt, Artificial Sequence
  Description of Artificial Sequence: Synthetic oligonucleotide
  Antisense strand to SEQ ID NO: 1970094
ccuaucaugagacuucgcc

SEQ ID NO: 1970096 - RNA, 19 nt, Artificial Sequence
  Description of Artificial Sequence: Synthetic oligonucleotide
  Sense strand starting at position 1865 of SEQ ID NO: 1880476
ccagcaaaccauuggugua

SEQ ID NO: 1970097 - RNA, 19 nt, Artificial Sequence
  Description of Artificial Sequence: Synthetic oligonucleotide
  Antisense strand to SEQ ID NO: 1970096
uacaccaaugguuugcugg

SEQ ID NO: 1970098 - RNA, 19 nt, Artificial Sequence
  Description of Artificial Sequence: Synthetic oligonucleotide
  Sense strand starting at position 1867 of SEQ ID NO: 1880476
agcaaaccauugguguaaa

SEQ ID NO: 1970099 - RNA, 19 nt, Artificial Sequence
  Description of Artificial Sequence: Synthetic oligonucleotide
  Antisense strand to SEQ ID NO: 1970098
uuuacaccaaugguuugcu

SEQ ID NO: 1970100 - RNA, 19 nt, Artificial Sequence
  Description of Artificial Sequence: Synthetic oligonucleotide
  Sense strand starting at position 1868 of SEQ ID NO: 1880476
gcaaaccauugguguaaau

SEQ ID NO: 1970101 - RNA, 19 nt, Artificial Sequence
  Description of Artificial Sequence: Synthetic oligonucleotide
  Antisense strand to SEQ ID NO: 1970100
auuuacaccaaugguuugc

SEQ ID NO: 1970102 - RNA, 19 nt, Artificial Sequence
  Description of Artificial Sequence: Synthetic oligonucleotide
  Sense strand starting at position 1879 of SEQ ID NO: 1880476
guguaaauccaagaguuua

SEQ ID NO: 1970103 - RNA, 19 nt, Artificial Sequence
  Description of Artificial Sequence: Synthetic oligonucleotide
  Antisense strand to SEQ ID NO: 1970102
uaaacucuuggauuuacac

SEQ ID NO: 1970104 - RNA, 19 nt, Artificial Sequence
  Description of Artificial Sequence: Synthetic oligonucleotide
  Sense strand starting at position 1910 of SEQ ID NO: 1880476
ccuggaguccgaugucuaa

SEQ ID NO: 1970105 - RNA, 19 nt, Artificial Sequence
  Description of Artificial Sequence: Synthetic oligonucleotide
  Antisense strand to SEQ ID NO: 1970104
uuagacaucggacuccagg

SEQ ID NO: 1970106 - RNA, 19 nt, Artificial Sequence
  Description of Artificial Sequence: Synthetic oligonucleotide
  Sense strand starting at position 50 of SEQ ID NO: 1880478
auguguuaauaugcauaag

SEQ ID NO: 1970107 - RNA, 19 nt, Artificial Sequence
  Description of Artificial Sequence: Synthetic oligonucleotide
  Antisense strand to SEQ ID NO: 1970106
cuuaugcauauuaacacau

SEQ ID NO: 1970108 - RNA, 19 nt, Artificial Sequence
  Description of Artificial Sequence: Synthetic oligonucleotide
  Sense strand starting at position 53 of SEQ ID NO: 1880478
uguuaauaugcauaagcca

SEQ ID NO: 1970109 - RNA, 19 nt, Artificial Sequence
  Description of Artificial Sequence: Synthetic oligonucleotide
  Antisense strand to SEQ ID NO: 1970108
uggcuuaugcauauuaaca

SEQ ID NO: 1970110 - RNA, 19 nt, Artificial Sequence
  Description of Artificial Sequence: Synthetic oligonucleotide
  Sense strand starting at position 364 of SEQ ID NO: 1880478
guauauacagugugaauaa

SEQ ID NO: 1970111 - RNA, 19 nt, Artificial Sequence
  Description of Artificial Sequence: Synthetic oligonucleotide
  Antisense strand to SEQ ID NO: 1970110
uuauucacacuguauauac

SEQ ID NO: 1970112 - RNA, 19 nt, Artificial Sequence
  Description of Artificial Sequence: Synthetic oligonucleotide
  Sense strand starting at position 445 of SEQ ID NO: 1880478
gcacuugggaaucaucagu

SEQ ID NO: 1970113 - RNA, 19 nt, Artificial Sequence
  Description of Artificial Sequence: Synthetic oligonucleotide
  Antisense strand to SEQ ID NO: 1970112
acugaugauucccaagugc

SEQ ID NO: 1970114 - RNA, 19 nt, Artificial Sequence
  Description of Artificial Sequence: Synthetic oligonucleotide
  Sense strand starting at position 450 of SEQ ID NO: 1880478
ugggaaucaucagugaguc

SEQ ID NO: 1970115 - RNA, 19 nt, Artificial Sequence
  Description of Artificial Sequence: Synthetic oligonucleotide
  Antisense strand to SEQ ID NO: 1970114
gacucacugaugauuccca

SEQ ID NO: 1970116 - RNA, 19 nt, Artificial Sequence
  Description of Artificial Sequence: Synthetic oligonucleotide
  Sense strand starting at position 451 of SEQ ID NO: 1880478
gggaaucaucagugaguca

SEQ ID NO: 1970117 - RNA, 19 nt, Artificial Sequence
  Description of Artificial Sequence: Synthetic oligonucleotide
  Antisense strand to SEQ ID NO: 1970116
ugacucacugaugauuccc

SEQ ID NO: 1970118 - RNA, 19 nt, Artificial Sequence
  Description of Artificial Sequence: Synthetic oligonucleotide
  Sense strand starting at position 480 of SEQ ID NO: 1880478
ggugauaaggagggcuauu

SEQ ID NO: 1970119 - RNA, 19 nt, Artificial Sequence
  Description of Artificial Sequence: Synthetic oligonucleotide
  Antisense strand to SEQ ID NO: 1970118
aauagcccuccuuaucacc

SEQ ID NO: 1970120 - RNA, 19 nt, Artificial Sequence
  Description of Artificial Sequence: Synthetic oligonucleotide
  Sense strand starting at position 805 of SEQ ID NO: 1880478
ggaggauuguaacugugua

SEQ ID NO: 1970121 - RNA, 19 nt, Artificial Sequence
  Description of Artificial Sequence: Synthetic oligonucleotide
  Antisense strand to SEQ ID NO: 1970120
uacacaguuacaauccucc

SEQ ID NO: 1970122 - RNA, 19 nt, Artificial Sequence
  Description of Artificial Sequence: Synthetic oligonucleotide
  Sense strand starting at position 806 of SEQ ID NO: 1880478
gaggauuguaacuguguau

SEQ ID NO: 1970123 - RNA, 19 nt, Artificial Sequence
  Description of Artificial Sequence: Synthetic oligonucleotide
  Antisense strand to SEQ ID NO: 1970122
auacacaguuacaauccuc

SEQ ID NO: 1970124 - RNA, 19 nt, Artificial Sequence
  Description of Artificial Sequence: Synthetic oligonucleotide
  Sense strand starting at position 810 of SEQ ID NO: 1880478
auuguaacuguguauguga

SEQ ID NO: 1970125 - RNA, 19 nt, Artificial Sequence
  Description of Artificial Sequence: Synthetic oligonucleotide
  Antisense strand to SEQ ID NO: 1970124
ucacauacacaguuacaau

SEQ ID NO: 1970126 - RNA, 19 nt, Artificial Sequence
  Description of Artificial Sequence: Synthetic oligonucleotide
  Sense strand starting at position 1057 of SEQ ID NO: 1880478
cuuauugauuuacaaagag

SEQ ID NO: 1970127 - RNA, 19 nt, Artificial Sequence
  Description of Artificial Sequence: Synthetic oligonucleotide
  Antisense strand to SEQ ID NO: 1970126
cucuuuguaaaucaauaag

SEQ ID NO: 1970128 - RNA, 19 nt, Artificial Sequence
  Description of Artificial Sequence: Synthetic oligonucleotide
  Sense strand starting at position 1157 of SEQ ID NO: 1880478
uugcuuggugaauacauaa

SEQ ID NO: 1970129 - RNA, 19 nt, Artificial Sequence
  Description of Artificial Sequence: Synthetic oligonucleotide
  Antisense strand to SEQ ID NO: 1970128
uuauguauucaccaagcaa

SEQ ID NO: 1970130 - RNA, 19 nt, Artificial Sequence
  Description of Artificial Sequence: Synthetic oligonucleotide
  Sense strand starting at position 1194 of SEQ ID NO: 1880478
acaugauaugaacgucuga

SEQ ID NO: 1970131 - RNA, 19 nt, Artificial Sequence
  Description of Artificial Sequence: Synthetic oligonucleotide
  Antisense strand to SEQ ID NO: 1970130
ucagacguucauaucaugu

SEQ ID NO: 1970132 - RNA, 19 nt, Artificial Sequence
  Description of Artificial Sequence: Synthetic oligonucleotide
  Sense strand starting at position 1289 of SEQ ID NO: 1880478
uagagaaggcguggauuca

SEQ ID NO: 1970133 - RNA, 19 nt, Artificial Sequence
  Description of Artificial Sequence: Synthetic oligonucleotide
  Antisense strand to SEQ ID NO: 1970132
ugaauccacgccuucucua

SEQ ID NO: 1970134 - RNA, 19 nt, Artificial Sequence
  Description of Artificial Sequence: Synthetic oligonucleotide
  Sense strand starting at position 1290 of SEQ ID NO: 1880478
agagaaggcguggauucau

SEQ ID NO: 1970135 - RNA, 19 nt, Artificial Sequence
  Description of Artificial Sequence: Synthetic oligonucleotide
  Antisense strand to SEQ ID NO: 1970134
augaauccacgccuucucu

SEQ ID NO: 1970136 - RNA, 19 nt, Artificial Sequence
  Description of Artificial Sequence: Synthetic oligonucleotide
  Sense strand starting at position 1366 of SEQ ID NO: 1880478
gacugaguaaugcacggua

SEQ ID NO: 1970137 - RNA, 19 nt, Artificial Sequence
  Description of Artificial Sequence: Synthetic oligonucleotide
  Antisense strand to SEQ ID NO: 1970136
uaccgugcauuacucaguc

SEQ ID NO: 1970138 - RNA, 19 nt, Artificial Sequence
  Description of Artificial Sequence: Synthetic oligonucleotide
  Sense strand starting at position 1369 of SEQ ID NO: 1880478
ugaguaaugcacgguauuu

SEQ ID NO: 1970139 - RNA, 19 nt, Artificial Sequence
  Description of Artificial Sequence: Synthetic oligonucleotide
  Antisense strand to SEQ ID NO: 1970138
aaauaccgugcauuacuca

SEQ ID NO: 1970140 - RNA, 19 nt, Artificial Sequence
  Description of Artificial Sequence: Synthetic oligonucleotide
  Sense strand starting at position 1401 of SEQ ID NO: 1880478
agucguugggauaguguca

SEQ ID NO: 1970141 - RNA, 19 nt, Artificial Sequence
  Description of Artificial Sequence: Synthetic oligonucleotide
  Antisense strand to SEQ ID NO: 1970140
ugacacuaucccaacgacu

SEQ ID NO: 1970142 - RNA, 19 nt, Artificial Sequence
  Description of Artificial Sequence: Synthetic oligonucleotide
  Sense strand starting at position 1658 of SEQ ID NO: 1880478
ucgccaagacccuauuauu

SEQ ID NO: 1970143 - RNA, 19 nt, Artificial Sequence
  Description of Artificial Sequence: Synthetic oligonucleotide
  Antisense strand to SEQ ID NO: 1970142
aauaauagggucuuggcga

SEQ ID NO: 1970144 - RNA, 19 nt, Artificial Sequence
  Description of Artificial Sequence: Synthetic oligonucleotide
  Sense strand starting at position 1998 of SEQ ID NO: 1880478
guuugaagcguuuccgcuu

SEQ ID NO: 1970145 - RNA, 19 nt, Artificial Sequence
  Description of Artificial Sequence: Synthetic oligonucleotide
  Antisense strand to SEQ ID NO: 1970144
aagcggaaacgcuucaaac

SEQ ID NO: 1970146 - RNA, 19 nt, Artificial Sequence
  Description of Artificial Sequence: Synthetic oligonucleotide
  Sense strand starting at position 2411 of SEQ ID NO: 1880478
gggucauuucguggagcga

SEQ ID NO: 1970147 - RNA, 19 nt, Artificial Sequence
  Description of Artificial Sequence: Synthetic oligonucleotide
  Antisense strand to SEQ ID NO: 1970146
ucgcuccacgaaaugaccc

SEQ ID NO: 1970148 - RNA, 19 nt, Artificial Sequence
  Description of Artificial Sequence: Synthetic oligonucleotide
  Sense strand starting at position 2412 of SEQ ID NO: 1880478
ggucauuucguggagcgag

SEQ ID NO: 1970149 - RNA, 19 nt, Artificial Sequence
  Description of Artificial Sequence: Synthetic oligonucleotide
  Antisense strand to SEQ ID NO: 1970148
cucgcuccacgaaaugacc

SEQ ID NO: 1970150 - RNA, 19 nt, Artificial Sequence
  Description of Artificial Sequence: Synthetic oligonucleotide
  Sense strand starting at position 2549 of SEQ ID NO: 1880478
ccaaauaagugaguccaaa

SEQ ID NO: 1970151 - RNA, 19 nt, Artificial Sequence
  Description of Artificial Sequence: Synthetic oligonucleotide
  Antisense strand to SEQ ID NO: 1970150
uuuggacucacuuauuugg

SEQ ID NO: 1970152 - RNA, 19 nt, Artificial Sequence
  Description of Artificial Sequence: Synthetic oligonucleotide
  Sense strand starting at position 2573 of SEQ ID NO: 1880478
gguaacucgaaaggugaga

SEQ ID NO: 1970153 - RNA, 19 nt, Artificial Sequence
  Description of Artificial Sequence: Synthetic oligonucleotide
  Antisense strand to SEQ ID NO: 1970152
ucucaccuuucgaguuacc

SEQ ID NO: 1970154 - RNA, 19 nt, Artificial Sequence
  Description of Artificial Sequence: Synthetic oligonucleotide
  Sense strand starting at position 2595 of SEQ ID NO: 1880478
ucaagucagcuuugaaaga

SEQ ID NO: 1970155 - RNA, 19 nt, Artificial Sequence
  Description of Artificial Sequence: Synthetic oligonucleotide
  Antisense strand to SEQ ID NO: 1970154
ucuuucaaagcugacuuga

SEQ ID NO: 1970156 - RNA, 19 nt, Artificial Sequence
  Description of Artificial Sequence: Synthetic oligonucleotide
  Sense strand starting at position 2635 of SEQ ID NO: 1880478
acgguauucgcagaugaua

SEQ ID NO: 1970157 - RNA, 19 nt, Artificial Sequence
  Description of Artificial Sequence: Synthetic oligonucleotide
  Antisense strand to SEQ ID NO: 1970156
uaucaucugcgaauaccgu

SEQ ID NO: 1970158 - RNA, 19 nt, Artificial Sequence
  Description of Artificial Sequence: Synthetic oligonucleotide
  Sense strand starting at position 2638 of SEQ ID NO: 1880478
guauucgcagaugauaaua

SEQ ID NO: 1970159 - RNA, 19 nt, Artificial Sequence
  Description of Artificial Sequence: Synthetic oligonucleotide
  Antisense strand to SEQ ID NO: 1970158
uauuaucaucugcgaauac

SEQ ID NO: 1970160 - RNA, 19 nt, Artificial Sequence
  Description of Artificial Sequence: Synthetic oligonucleotide
  Sense strand starting at position 2824 of SEQ ID NO: 1880478
cucaaauagugguuuauau

SEQ ID NO: 1970161 - RNA, 19 nt, Artificial Sequence
  Description of Artificial Sequence: Synthetic oligonucleotide
  Antisense strand to SEQ ID NO: 1970160
auauaaaccacuauuugag

SEQ ID NO: 1970162 - RNA, 19 nt, Artificial Sequence
  Description of Artificial Sequence: Synthetic oligonucleotide
  Sense strand starting at position 2831 of SEQ ID NO: 1880478
agugguuuauaucucuaac

SEQ ID NO: 1970163 - RNA, 19 nt, Artificial Sequence
  Description of Artificial Sequence: Synthetic oligonucleotide
  Antisense strand to SEQ ID NO: 1970162
guuagagauauaaaccacu

SEQ ID NO: 1970164 - RNA, 19 nt, Artificial Sequence
  Description of Artificial Sequence: Synthetic oligonucleotide
  Sense strand starting at position 2834 of SEQ ID NO: 1880478
gguuuauaucucuaacgug

SEQ ID NO: 1970165 - RNA, 19 nt, Artificial Sequence
  Description of Artificial Sequence: Synthetic oligonucleotide
  Antisense strand to SEQ ID NO: 1970164
cacguuagagauauaaacc

SEQ ID NO: 1970166 - RNA, 19 nt, Artificial Sequence
  Description of Artificial Sequence: Synthetic oligonucleotide
  Sense strand starting at position 2934 of SEQ ID NO: 1880478
gguccaagauagccuuauu

SEQ ID NO: 1970167 - RNA, 19 nt, Artificial Sequence
  Description of Artificial Sequence: Synthetic oligonucleotide
  Antisense strand to SEQ ID NO: 1970166
aauaaggcuaucuuggacc

SEQ ID NO: 1970168 - RNA, 19 nt, Artificial Sequence
  Description of Artificial Sequence: Synthetic oligonucleotide
  Sense strand starting at position 2997 of SEQ ID NO: 1880478
aggccuaaucuuggaagca

SEQ ID NO: 1970169 - RNA, 19 nt, Artificial Sequence
  Description of Artificial Sequence: Synthetic oligonucleotide
  Antisense strand to SEQ ID NO: 1970168
ugcuuccaagauuaggccu

SEQ ID NO: 1970170 - RNA, 19 nt, Artificial Sequence
  Description of Artificial Sequence: Synthetic oligonucleotide
  Sense strand starting at position 3190 of SEQ ID NO: 1880478
ugccucuuggaguaagaau

SEQ ID NO: 1970171 - RNA, 19 nt, Artificial Sequence
  Description of Artificial Sequence: Synthetic oligonucleotide
  Antisense strand to SEQ ID NO: 1970170
auucuuacuccaagaggca

SEQ ID NO: 1970172 - RNA, 19 nt, Artificial Sequence
  Description of Artificial Sequence: Synthetic oligonucleotide
  Sense strand starting at position 3321 of SEQ ID NO: 1880478
ggucacucugaguaagucu

SEQ ID NO: 1970173 - RNA, 19 nt, Artificial Sequence
  Description of Artificial Sequence: Synthetic oligonucleotide
  Antisense strand to SEQ ID NO: 1970172
agacuuacucagagugacc

SEQ ID NO: 1970174 - RNA, 19 nt, Artificial Sequence
  Description of Artificial Sequence: Synthetic oligonucleotide
  Sense strand starting at position 3377 of SEQ ID NO: 1880478
aguuaacugcacuaggaau

SEQ ID NO: 1970175 - RNA, 19 nt, Artificial Sequence
  Description of Artificial Sequence: Synthetic oligonucleotide
  Antisense strand to SEQ ID NO: 1970174
auuccuagugcaguuaacu

SEQ ID NO: 1970176 - RNA, 19 nt, Artificial Sequence
  Description of Artificial Sequence: Synthetic oligonucleotide
  Sense strand starting at position 3506 of SEQ ID NO: 1880478
uuuccuaguuucuugauga

SEQ ID NO: 1970177 - RNA, 19 nt, Artificial Sequence
  Description of Artificial Sequence: Synthetic oligonucleotide
  Antisense strand to SEQ ID NO: 1970176
ucaucaagaaacuaggaaa

SEQ ID NO: 1970178 - RNA, 19 nt, Artificial Sequence
  Description of Artificial Sequence: Synthetic oligonucleotide
  Sense strand starting at position 3717 of SEQ ID NO: 1880478
gagccaagcuucuuggaaa

SEQ ID NO: 1970179 - RNA, 19 nt, Artificial Sequence
  Description of Artificial Sequence: Synthetic oligonucleotide
  Antisense strand to SEQ ID NO: 1970178
uuuccaagaagcuuggcuc

SEQ ID NO: 1970180 - RNA, 19 nt, Artificial Sequence
  Description of Artificial Sequence: Synthetic oligonucleotide
  Sense strand starting at position 3907 of SEQ ID NO: 1880478
cuaccucaaccuggagauu

SEQ ID NO: 1970181 - RNA, 19 nt, Artificial Sequence
  Description of Artificial Sequence: Synthetic oligonucleotide
  Antisense strand to SEQ ID NO: 1970180
aaucuccagguugagguag

SEQ ID NO: 1970182 - RNA, 19 nt, Artificial Sequence
  Description of Artificial Sequence: Synthetic oligonucleotide
  Sense strand starting at position 3918 of SEQ ID NO: 1880478
uggagauuccuguggacaa

SEQ ID NO: 1970183 - RNA, 19 nt, Artificial Sequence
  Description of Artificial Sequence: Synthetic oligonucleotide
  Antisense strand to SEQ ID NO: 1970182
uuguccacaggaaucucca

SEQ ID NO: 1970184 - RNA, 19 nt, Artificial Sequence
  Description of Artificial Sequence: Synthetic oligonucleotide
  Sense strand starting at position 3928 of SEQ ID NO: 1880478
uguggacaacuuugacauu

SEQ ID NO: 1970185 - RNA, 19 nt, Artificial Sequence
  Description of Artificial Sequence: Synthetic oligonucleotide
  Antisense strand to SEQ ID NO: 1970184
aaugucaaaguuguccaca

SEQ ID NO: 1970186 - RNA, 19 nt, Artificial Sequence
  Description of Artificial Sequence: Synthetic oligonucleotide
  Sense strand starting at position 245 of SEQ ID NO: 1880477
guauauacagugugaauaa

SEQ ID NO: 1970187 - RNA, 19 nt, Artificial Sequence
  Description of Artificial Sequence: Synthetic oligonucleotide
  Antisense strand to SEQ ID NO: 1970186
uuauucacacuguauauac

SEQ ID NO: 1970188 - RNA, 19 nt, Artificial Sequence
  Description of Artificial Sequence: Synthetic oligonucleotide
  Sense strand starting at position 326 of SEQ ID NO: 1880477
gcacuugggaaucaucagu

SEQ ID NO: 1970189 - RNA, 19 nt, Artificial Sequence
  Description of Artificial Sequence: Synthetic oligonucleotide
  Antisense strand to SEQ ID NO: 1970188
acugaugauucccaagugc

SEQ ID NO: 1970190 - RNA, 19 nt, Artificial Sequence
  Description of Artificial Sequence: Synthetic oligonucleotide
  Sense strand starting at position 331 of SEQ ID NO: 1880477
ugggaaucaucagugaguc

SEQ ID NO: 1970191 - RNA, 19 nt, Artificial Sequence
  Description of Artificial Sequence: Synthetic oligonucleotide
  Antisense strand to SEQ ID NO: 1970190
gacucacugaugauuccca

SEQ ID NO: 1970192 - RNA, 19 nt, Artificial Sequence
  Description of Artificial Sequence: Synthetic oligonucleotide
  Sense strand starting at position 332 of SEQ ID NO: 1880477
gggaaucaucagugaguca

SEQ ID NO: 1970193 - RNA, 19 nt, Artificial Sequence
  Description of Artificial Sequence: Synthetic oligonucleotide
  Antisense strand to SEQ ID NO: 1970192
ugacucacugaugauuccc

SEQ ID NO: 1970194 - RNA, 19 nt, Artificial Sequence
  Description of Artificial Sequence: Synthetic oligonucleotide
  Sense strand starting at position 361 of SEQ ID NO: 1880477
ggugauaaggagggcuauu

SEQ ID NO: 1970195 - RNA, 19 nt, Artificial Sequence
  Description of Artificial Sequence: Synthetic oligonucleotide
  Antisense strand to SEQ ID NO: 1970194
aauagcccuccuuaucacc

SEQ ID NO: 1970196 - RNA, 19 nt, Artificial Sequence
  Description of Artificial Sequence: Synthetic oligonucleotide
  Sense strand starting at position 686 of SEQ ID NO: 1880477
ggaggauuguaacugugua

SEQ ID NO: 1970197 - RNA, 19 nt, Artificial Sequence
  Description of Artificial Sequence: Synthetic oligonucleotide
  Antisense strand to SEQ ID NO: 1970196
uacacaguuacaauccucc

SEQ ID NO: 1970198 - RNA, 19 nt, Artificial Sequence
  Description of Artificial Sequence: Synthetic oligonucleotide
  Sense strand starting at position 687 of SEQ ID NO: 1880477
gaggauuguaacuguguau

SEQ ID NO: 1970199 - RNA, 19 nt, Artificial Sequence
  Description of Artificial Sequence: Synthetic oligonucleotide
  Antisense strand to SEQ ID NO: 1970198
auacacaguuacaauccuc

SEQ ID NO: 1970200 - RNA, 19 nt, Artificial Sequence
  Description of Artificial Sequence: Synthetic oligonucleotide
  Sense strand starting at position 691 of SEQ ID NO: 1880477
auuguaacuguguauguga

SEQ ID NO: 1970201 - RNA, 19 nt, Artificial Sequence
  Description of Artificial Sequence: Synthetic oligonucleotide
  Antisense strand to SEQ ID NO: 1970200
ucacauacacaguuacaau

SEQ ID NO: 1970202 - RNA, 19 nt, Artificial Sequence
  Description of Artificial Sequence: Synthetic oligonucleotide
  Sense strand starting at position 938 of SEQ ID NO: 1880477
cuuauugauuuacaaagag

SEQ ID NO: 1970203 - RNA, 19 nt, Artificial Sequence
  Description of Artificial Sequence: Synthetic oligonucleotide
  Antisense strand to SEQ ID NO: 1970202
cucuuuguaaaucaauaag

SEQ ID NO: 1970204 - RNA, 19 nt, Artificial Sequence
  Description of Artificial Sequence: Synthetic oligonucleotide
  Sense strand starting at position 1038 of SEQ ID NO: 1880477
uugcuuggugaauacauaa

SEQ ID NO: 1970205 - RNA, 19 nt, Artificial Sequence
  Description of Artificial Sequence: Synthetic oligonucleotide
  Antisense strand to SEQ ID NO: 1970204
uuauguauucaccaagcaa

SEQ ID NO: 1970206 - RNA, 19 nt, Artificial Sequence
  Description of Artificial Sequence: Synthetic oligonucleotide
  Sense strand starting at position 1075 of SEQ ID NO: 1880477
acaugauaugaacgucuga

SEQ ID NO: 1970207 - RNA, 19 nt, Artificial Sequence
  Description of Artificial Sequence: Synthetic oligonucleotide
  Antisense strand to SEQ ID NO: 1970206
ucagacguucauaucaugu

SEQ ID NO: 1970208 - RNA, 19 nt, Artificial Sequence
  Description of Artificial Sequence: Synthetic oligonucleotide
  Sense strand starting at position 1170 of SEQ ID NO: 1880477
uagagaaggcguggauuca

SEQ ID NO: 1970209 - RNA, 19 nt, Artificial Sequence
  Description of Artificial Sequence: Synthetic oligonucleotide
  Antisense strand to SEQ ID NO: 1970208
ugaauccacgccuucucua

SEQ ID NO: 1970210 - RNA, 19 nt, Artificial Sequence
  Description of Artificial Sequence: Synthetic oligonucleotide
  Sense strand starting at position 1171 of SEQ ID NO: 1880477
agagaaggcguggauucau

SEQ ID NO: 1970211 - RNA, 19 nt, Artificial Sequence
  Description of Artificial Sequence: Synthetic oligonucleotide
  Antisense strand to SEQ ID NO: 1970210
augaauccacgccuucucu

SEQ ID NO: 1970212 - RNA, 19 nt, Artificial Sequence
  Description of Artificial Sequence: Synthetic oligonucleotide
  Sense strand starting at position 1247 of SEQ ID NO: 1880477
gacugaguaaugcacggua

SEQ ID NO: 1970213 - RNA, 19 nt, Artificial Sequence
  Description of Artificial Sequence: Synthetic oligonucleotide
  Antisense strand to SEQ ID NO: 1970212
uaccgugcauuacucaguc

SEQ ID NO: 1970214 - RNA, 19 nt, Artificial Sequence
  Description of Artificial Sequence: Synthetic oligonucleotide
  Sense strand starting at position 1250 of SEQ ID NO: 1880477
ugaguaaugcacgguauuu

SEQ ID NO: 1970215 - RNA, 19 nt, Artificial Sequence
  Description of Artificial Sequence: Synthetic oligonucleotide
  Antisense strand to SEQ ID NO: 1970214
aaauaccgugcauuacuca

SEQ ID NO: 1970216 - RNA, 19 nt, Artificial Sequence
  Description of Artificial Sequence: Synthetic oligonucleotide
  Sense strand starting at position 1282 of SEQ ID NO: 1880477
agucguugggauaguguca

SEQ ID NO: 1970217 - RNA, 19 nt, Artificial Sequence
  Description of Artificial Sequence: Synthetic oligonucleotide
  Antisense strand to SEQ ID NO: 1970216
ugacacuaucccaacgacu

SEQ ID NO: 1970218 - RNA, 19 nt, Artificial Sequence
  Description of Artificial Sequence: Synthetic oligonucleotide
  Sense strand starting at position 1539 of SEQ ID NO: 1880477
ucgccaagacccuauuauu

SEQ ID NO: 1970219 - RNA, 19 nt, Artificial Sequence
  Description of Artificial Sequence: Synthetic oligonucleotide
  Antisense strand to SEQ ID NO: 1970218
aauaauagggucuuggcga

SEQ ID NO: 1970220 - RNA, 19 nt, Artificial Sequence
  Description of Artificial Sequence: Synthetic oligonucleotide
  Sense strand starting at position 1879 of SEQ ID NO: 1880477
guuugaagcguuuccgcuu

SEQ ID NO: 1970221 - RNA, 19 nt, Artificial Sequence
  Description of Artificial Sequence: Synthetic oligonucleotide
  Antisense strand to SEQ ID NO: 1970220
aagcggaaacgcuucaaac

SEQ ID NO: 1970222 - RNA, 19 nt, Artificial Sequence
  Description of Artificial Sequence: Synthetic oligonucleotide
  Sense strand starting at position 2292 of SEQ ID NO: 1880477
gggucauuucguggagcga

SEQ ID NO: 1970223 - RNA, 19 nt, Artificial Sequence
  Description of Artificial Sequence: Synthetic oligonucleotide
  Antisense strand to SEQ ID NO: 1970222
ucgcuccacgaaaugaccc

SEQ ID NO: 1970224 - RNA, 19 nt, Artificial Sequence
  Description of Artificial Sequence: Synthetic oligonucleotide
  Sense strand starting at position 2293 of SEQ ID NO: 1880477
ggucauuucguggagcgag

SEQ ID NO: 1970225 - RNA, 19 nt, Artificial Sequence
  Description of Artificial Sequence: Synthetic oligonucleotide
  Antisense strand to SEQ ID NO: 1970224
cucgcuccacgaaaugacc

SEQ ID NO: 1970226 - RNA, 19 nt, Artificial Sequence
  Description of Artificial Sequence: Synthetic oligonucleotide
  Sense strand starting at position 2430 of SEQ ID NO: 1880477
ccaaauaagugaguccaaa

SEQ ID NO: 1970227 - RNA, 19 nt, Artificial Sequence
  Description of Artificial Sequence: Synthetic oligonucleotide
  Antisense strand to SEQ ID NO: 1970226
uuuggacucacuuauuugg

SEQ ID NO: 1970228 - RNA, 19 nt, Artificial Sequence
  Description of Artificial Sequence: Synthetic oligonucleotide
  Sense strand starting at position 2454 of SEQ ID NO: 1880477
gguaacucgaaaggugaga

SEQ ID NO: 1970229 - RNA, 19 nt, Artificial Sequence
  Description of Artificial Sequence: Synthetic oligonucleotide
  Antisense strand to SEQ ID NO: 1970228
ucucaccuuucgaguuacc

SEQ ID NO: 1970230 - RNA, 19 nt, Artificial Sequence
  Description of Artificial Sequence: Synthetic oligonucleotide
  Sense strand starting at position 2476 of SEQ ID NO: 1880477
ucaagucagcuuugaaaga

SEQ ID NO: 1970231 - RNA, 19 nt, Artificial Sequence
  Description of Artificial Sequence: Synthetic oligonucleotide
  Antisense strand to SEQ ID NO: 1970230
ucuuucaaagcugacuuga

SEQ ID NO: 1970232 - RNA, 19 nt, Artificial Sequence
  Description of Artificial Sequence: Synthetic oligonucleotide
  Sense strand starting at position 2516 of SEQ ID NO: 1880477
acgguauucgcagaugaua

SEQ ID NO: 1970233 - RNA, 19 nt, Artificial Sequence
  Description of Artificial Sequence: Synthetic oligonucleotide
  Antisense strand to SEQ ID NO: 1970232
uaucaucugcgaauaccgu

SEQ ID NO: 1970234 - RNA, 19 nt, Artificial Sequence
  Description of Artificial Sequence: Synthetic oligonucleotide
  Sense strand starting at position 2519 of SEQ ID NO: 1880477
guauucgcagaugauaaua

SEQ ID NO: 1970235 - RNA, 19 nt, Artificial Sequence
  Description of Artificial Sequence: Synthetic oligonucleotide
  Antisense strand to SEQ ID NO: 1970234
uauuaucaucugcgaauac

SEQ ID NO: 1970236 - RNA, 19 nt, Artificial Sequence
  Description of Artificial Sequence: Synthetic oligonucleotide
  Sense strand starting at position 2705 of SEQ ID NO: 1880477
cucaaauagugguuuauau

SEQ ID NO: 1970237 - RNA, 19 nt, Artificial Sequence
  Description of Artificial Sequence: Synthetic oligonucleotide
  Antisense strand to SEQ ID NO: 1970236
auauaaaccacuauuugag

SEQ ID NO: 1970238 - RNA, 19 nt, Artificial Sequence
  Description of Artificial Sequence: Synthetic oligonucleotide
  Sense strand starting at position 2712 of SEQ ID NO: 1880477
agugguuuauaucucuaac

SEQ ID NO: 1970239 - RNA, 19 nt, Artificial Sequence
  Description of Artificial Sequence: Synthetic oligonucleotide
  Antisense strand to SEQ ID NO: 1970238
guuagagauauaaaccacu

SEQ ID NO: 1970240 - RNA, 19 nt, Artificial Sequence
  Description of Artificial Sequence: Synthetic oligonucleotide
  Sense strand starting at position 2715 of SEQ ID NO: 1880477
gguuuauaucucuaacgug

SEQ ID NO: 1970241 - RNA, 19 nt, Artificial Sequence
  Description of Artificial Sequence: Synthetic oligonucleotide
  Antisense strand to SEQ ID NO: 1970240
cacguuagagauauaaacc

SEQ ID NO: 1970242 - RNA, 19 nt, Artificial Sequence
  Description of Artificial Sequence: Synthetic oligonucleotide
  Sense strand starting at position 2815 of SEQ ID NO: 1880477
gguccaagauagccuuauu

SEQ ID NO: 1970243 - RNA, 19 nt, Artificial Sequence
  Description of Artificial Sequence: Synthetic oligonucleotide
  Antisense strand to SEQ ID NO: 1970242
aauaaggcuaucuuggacc

SEQ ID NO: 1970244 - RNA, 19 nt, Artificial Sequence
  Description of Artificial Sequence: Synthetic oligonucleotide
  Sense strand starting at position 2878 of SEQ ID NO: 1880477
aggccuaaucuuggaagca

SEQ ID NO: 1970245 - RNA, 19 nt, Artificial Sequence
  Description of Artificial Sequence: Synthetic oligonucleotide
  Antisense strand to SEQ ID NO: 1970244
ugcuuccaagauuaggccu

SEQ ID NO: 1970246 - RNA, 19 nt, Artificial Sequence
  Description of Artificial Sequence: Synthetic oligonucleotide
  Sense strand starting at position 3071 of SEQ ID NO: 1880477
ugccucuuggaguaagaau

SEQ ID NO: 1970247 - RNA, 19 nt, Artificial Sequence
  Description of Artificial Sequence: Synthetic oligonucleotide
  Antisense strand to SEQ ID NO: 1970246
auucuuacuccaagaggca

SEQ ID NO: 1970248 - RNA, 19 nt, Artificial Sequence
  Description of Artificial Sequence: Synthetic oligonucleotide
  Sense strand starting at position 3202 of SEQ ID NO: 1880477
ggucacucugaguaagucu

SEQ ID NO: 1970249 - RNA, 19 nt, Artificial Sequence
  Description of Artificial Sequence: Synthetic oligonucleotide
  Antisense strand to SEQ ID NO: 1970248
agacuuacucagagugacc

SEQ ID NO: 1970250 - RNA, 19 nt, Artificial Sequence
  Description of Artificial Sequence: Synthetic oligonucleotide
  Sense strand starting at position 3258 of SEQ ID NO: 1880477
aguuaacugcacuaggaau

SEQ ID NO: 1970251 - RNA, 19 nt, Artificial Sequence
  Description of Artificial Sequence: Synthetic oligonucleotide
  Antisense strand to SEQ ID NO: 1970250
auuccuagugcaguuaacu

SEQ ID NO: 1970252 - RNA, 19 nt, Artificial Sequence
  Description of Artificial Sequence: Synthetic oligonucleotide
  Sense strand starting at position 3387 of SEQ ID NO: 1880477
uuuccuaguuucuugauga

SEQ ID NO: 1970253 - RNA, 19 nt, Artificial Sequence
  Description of Artificial Sequence: Synthetic oligonucleotide
  Antisense strand to SEQ ID NO: 1970252
ucaucaagaaacuaggaaa

SEQ ID NO: 1970254 - RNA, 19 nt, Artificial Sequence
  Description of Artificial Sequence: Synthetic oligonucleotide
  Sense strand starting at position 3598 of SEQ ID NO: 1880477
gagccaagcuucuuggaaa

SEQ ID NO: 1970255 - RNA, 19 nt, Artificial Sequence
  Description of Artificial Sequence: Synthetic oligonucleotide
  Antisense strand to SEQ ID NO: 1970254
uuuccaagaagcuuggcuc

SEQ ID NO: 1970256 - RNA, 19 nt, Artificial Sequence
  Description of Artificial Sequence: Synthetic oligonucleotide
  Sense strand starting at position 3717 of SEQ ID NO: 1880477
uaaggucacgggugacauu

SEQ ID NO: 1970257 - RNA, 19 nt, Artificial Sequence
  Description of Artificial Sequence: Synthetic oligonucleotide
  Antisense strand to SEQ ID NO: 1970256
aaugucacccgugaccuua

SEQ ID NO: 1970258 - RNA, 19 nt, Artificial Sequence
  Description of Artificial Sequence: Synthetic oligonucleotide
  Sense strand starting at position 3788 of SEQ ID NO: 1880477
cuaccucaaccuggagauu

SEQ ID NO: 1970259 - RNA, 19 nt, Artificial Sequence
  Description of Artificial Sequence: Synthetic oligonucleotide
  Antisense strand to SEQ ID NO: 1970258
aaucuccagguugagguag

SEQ ID NO: 1970260 - RNA, 19 nt, Artificial Sequence
  Description of Artificial Sequence: Synthetic oligonucleotide
  Sense strand starting at position 3799 of SEQ ID NO: 1880477
uggagauuccuguggacaa

SEQ ID NO: 1970261 - RNA, 19 nt, Artificial Sequence
  Description of Artificial Sequence: Synthetic oligonucleotide
  Antisense strand to SEQ ID NO: 1970260
uuguccacaggaaucucca

SEQ ID NO: 1970262 - RNA, 19 nt, Artificial Sequence
  Description of Artificial Sequence: Synthetic oligonucleotide
  Sense strand starting at position 3809 of SEQ ID NO: 1880477
uguggacaacuuugacauu

SEQ ID NO: 1970263 - RNA, 19 nt, Artificial Sequence
  Description of Artificial Sequence: Synthetic oligonucleotide
  Antisense strand to SEQ ID NO: 1970262
aaugucaaaguuguccaca

SEQ ID NO: 1970264 - RNA, 19 nt, Artificial Sequence
  Description of Artificial Sequence: Synthetic oligonucleotide
  Sense strand starting at position 3930 of SEQ ID NO: 1880477
guuggaguuccucagaucu

SEQ ID NO: 1970265 - RNA, 19 nt, Artificial Sequence
  Description of Artificial Sequence: Synthetic oligonucleotide
  Antisense strand to SEQ ID NO: 1970264
agaucugaggaacuccaac

SEQ ID NO: 1970266 - RNA, 19 nt, Artificial Sequence
  Description of Artificial Sequence: Synthetic oligonucleotide
  Sense strand starting at position 161 of SEQ ID NO: 1880479
gccuuuaucagguaaggac

SEQ ID NO: 1970267 - RNA, 19 nt, Artificial Sequence
  Description of Artificial Sequence: Synthetic oligonucleotide
  Antisense strand to SEQ ID NO: 1970266
guccuuaccugauaaaggc

SEQ ID NO: 1970268 - RNA, 19 nt, Artificial Sequence
  Description of Artificial Sequence: Synthetic oligonucleotide
  Sense strand starting at position 200 of SEQ ID NO: 1880479
ucacuuuaugcauguuaca

SEQ ID NO: 1970269 - RNA, 19 nt, Artificial Sequence
  Description of Artificial Sequence: Synthetic oligonucleotide
  Antisense strand to SEQ ID NO: 1970268
uguaacaugcauaaaguga

SEQ ID NO: 1970270 - RNA, 19 nt, Artificial Sequence
  Description of Artificial Sequence: Synthetic oligonucleotide
  Sense strand starting at position 380 of SEQ ID NO: 1880479
gcaucuugaggucagcaau

SEQ ID NO: 1970271 - RNA, 19 nt, Artificial Sequence
  Description of Artificial Sequence: Synthetic oligonucleotide
  Antisense strand to SEQ ID NO: 1970270
auugcugaccucaagaugc

SEQ ID NO: 1970272 - RNA, 19 nt, Artificial Sequence
  Description of Artificial Sequence: Synthetic oligonucleotide
  Sense strand starting at position 1062 of SEQ ID NO: 1880479
ccauaagcauuagcaaaga

SEQ ID NO: 1970273 - RNA, 19 nt, Artificial Sequence
  Description of Artificial Sequence: Synthetic oligonucleotide
  Antisense strand to SEQ ID NO: 1970272
ucuuugcuaaugcuuaugg

SEQ ID NO: 1970274 - RNA, 19 nt, Artificial Sequence
  Description of Artificial Sequence: Synthetic oligonucleotide
  Sense strand starting at position 1098 of SEQ ID NO: 1880479
ccaggcauguaagugaaua

SEQ ID NO: 1970275 - RNA, 19 nt, Artificial Sequence
  Description of Artificial Sequence: Synthetic oligonucleotide
  Antisense strand to SEQ ID NO: 1970274
uauucacuuacaugccugg

SEQ ID NO: 1970276 - RNA, 19 nt, Artificial Sequence
  Description of Artificial Sequence: Synthetic oligonucleotide
  Sense strand starting at position 1125 of SEQ ID NO: 1880479
cccuuaguaguagaguaua

SEQ ID NO: 1970277 - RNA, 19 nt, Artificial Sequence
  Description of Artificial Sequence: Synthetic oligonucleotide
  Antisense strand to SEQ ID NO: 1970276
uauacucuacuacuaaggg

SEQ ID NO: 1970278 - RNA, 19 nt, Artificial Sequence
  Description of Artificial Sequence: Synthetic oligonucleotide
  Sense strand starting at position 1133 of SEQ ID NO: 1880479
aguagaguauacucuugca

SEQ ID NO: 1970279 - RNA, 19 nt, Artificial Sequence
  Description of Artificial Sequence: Synthetic oligonucleotide
  Antisense strand to SEQ ID NO: 1970278
ugcaagaguauacucuacu

SEQ ID NO: 1970280 - RNA, 19 nt, Artificial Sequence
  Description of Artificial Sequence: Synthetic oligonucleotide
  Sense strand starting at position 1198 of SEQ ID NO: 1880479
acuuguguuaguuaagcca

SEQ ID NO: 1970281 - RNA, 19 nt, Artificial Sequence
  Description of Artificial Sequence: Synthetic oligonucleotide
  Antisense strand to SEQ ID NO: 1970280
uggcuuaacuaacacaagu

SEQ ID NO: 1970282 - RNA, 19 nt, Artificial Sequence
  Description of Artificial Sequence: Synthetic oligonucleotide
  Sense strand starting at position 1240 of SEQ ID NO: 1880479
uguggcuaacugcauuaau

SEQ ID NO: 1970283 - RNA, 19 nt, Artificial Sequence
  Description of Artificial Sequence: Synthetic oligonucleotide
  Antisense strand to SEQ ID NO: 1970282
auuaaugcaguuagccaca

SEQ ID NO: 1970284 - RNA, 19 nt, Artificial Sequence
  Description of Artificial Sequence: Synthetic oligonucleotide
  Sense strand starting at position 1266 of SEQ ID NO: 1880479
cugauaagcugugcuuaga

SEQ ID NO: 1970285 - RNA, 19 nt, Artificial Sequence
  Description of Artificial Sequence: Synthetic oligonucleotide
  Antisense strand to SEQ ID NO: 1970284
ucuaagcacagcuuaucag

SEQ ID NO: 1970286 - RNA, 19 nt, Artificial Sequence
  Description of Artificial Sequence: Synthetic oligonucleotide
  Sense strand starting at position 1269 of SEQ ID NO: 1880479
auaagcugugcuuagaguu

SEQ ID NO: 1970287 - RNA, 19 nt, Artificial Sequence
  Description of Artificial Sequence: Synthetic oligonucleotide
  Antisense strand to SEQ ID NO: 1970286
aacucuaagcacagcuuau

SEQ ID NO: 1970288 - RNA, 19 nt, Artificial Sequence
  Description of Artificial Sequence: Synthetic oligonucleotide
  Sense strand starting at position 1343 of SEQ ID NO: 1880479
gguucuacccagcaacaua

SEQ ID NO: 1970289 - RNA, 19 nt, Artificial Sequence
  Description of Artificial Sequence: Synthetic oligonucleotide
  Antisense strand to SEQ ID NO: 1970288
uauguugcuggguagaacc

SEQ ID NO: 1970290 - RNA, 19 nt, Artificial Sequence
  Description of Artificial Sequence: Synthetic oligonucleotide
  Sense strand starting at position 1796 of SEQ ID NO: 1880479
gcgagugcucccguuucaa

SEQ ID NO: 1970291 - RNA, 19 nt, Artificial Sequence
  Description of Artificial Sequence: Synthetic oligonucleotide
  Antisense strand to SEQ ID NO: 1970290
uugaaacgggagcacucgc

SEQ ID NO: 1970292 - RNA, 19 nt, Artificial Sequence
  Description of Artificial Sequence: Synthetic oligonucleotide
  Sense strand starting at position 1881 of SEQ ID NO: 1880479
gaguaacauccuggaccca

SEQ ID NO: 1970293 - RNA, 19 nt, Artificial Sequence
  Description of Artificial Sequence: Synthetic oligonucleotide
  Antisense strand to SEQ ID NO: 1970292
uggguccaggauguuacuc

SEQ ID NO: 1970294 - RNA, 19 nt, Artificial Sequence
  Description of Artificial Sequence: Synthetic oligonucleotide
  Sense strand starting at position 2041 of SEQ ID NO: 1880479
guccuauuggcuuucguca

SEQ ID NO: 1970295 - RNA, 19 nt, Artificial Sequence
  Description of Artificial Sequence: Synthetic oligonucleotide
  Antisense strand to SEQ ID NO: 1970294
ugacgaaagccaauaggac

SEQ ID NO: 1970296 - RNA, 19 nt, Artificial Sequence
  Description of Artificial Sequence: Synthetic oligonucleotide
  Sense strand starting at position 2168 of SEQ ID NO: 1880479
uugcauuugcccugaguuc

SEQ ID NO: 1970297 - RNA, 19 nt, Artificial Sequence
  Description of Artificial Sequence: Synthetic oligonucleotide
  Antisense strand to SEQ ID NO: 1970296
gaacucagggcaaaugcaa

SEQ ID NO: 1970298 - RNA, 19 nt, Artificial Sequence
  Description of Artificial Sequence: Synthetic oligonucleotide
  Sense strand starting at position 2228 of SEQ ID NO: 1880479
uucugcguacgagaguaaa

SEQ ID NO: 1970299 - RNA, 19 nt, Artificial Sequence
  Description of Artificial Sequence: Synthetic oligonucleotide
  Antisense strand to SEQ ID NO: 1970298
uuuacucucguacgcagaa

SEQ ID NO: 1970300 - RNA, 19 nt, Artificial Sequence
  Description of Artificial Sequence: Synthetic oligonucleotide
  Sense strand starting at position 2231 of SEQ ID NO: 1880479
ugcguacgagaguaaauuu

SEQ ID NO: 1970301 - RNA, 19 nt, Artificial Sequence
  Description of Artificial Sequence: Synthetic oligonucleotide
  Antisense strand to SEQ ID NO: 1970300
aaauuuacucucguacgca

SEQ ID NO: 1970302 - RNA, 19 nt, Artificial Sequence
  Description of Artificial Sequence: Synthetic oligonucleotide
  Sense strand starting at position 2313 of SEQ ID NO: 1880479
acugcagcucucugaauca

SEQ ID NO: 1970303 - RNA, 19 nt, Artificial Sequence
  Description of Artificial Sequence: Synthetic oligonucleotide
  Antisense strand to SEQ ID NO: 1970302
ugauucagagagcugcagu

SEQ ID NO: 1970304 - RNA, 19 nt, Artificial Sequence
  Description of Artificial Sequence: Synthetic oligonucleotide
  Sense strand starting at position 2324 of SEQ ID NO: 1880479
cugaaucaauuuggaagau

SEQ ID NO: 1970305 - RNA, 19 nt, Artificial Sequence
  Description of Artificial Sequence: Synthetic oligonucleotide
  Antisense strand to SEQ ID NO: 1970304
aucuuccaaauugauucag

SEQ ID NO: 1970306 - RNA, 19 nt, Artificial Sequence
  Description of Artificial Sequence: Synthetic oligonucleotide
  Sense strand starting at position 2431 of SEQ ID NO: 1880479
uugaccugaugauauuuau

SEQ ID NO: 1970307 - RNA, 19 nt, Artificial Sequence
  Description of Artificial Sequence: Synthetic oligonucleotide
  Antisense strand to SEQ ID NO: 1970306
auaaauaucaucaggucaa

SEQ ID NO: 1970308 - RNA, 19 nt, Artificial Sequence
  Description of Artificial Sequence: Synthetic oligonucleotide
  Sense strand starting at position 2512 of SEQ ID NO: 1880479
gugauagucugggccauca

SEQ ID NO: 1970309 - RNA, 19 nt, Artificial Sequence
  Description of Artificial Sequence: Synthetic oligonucleotide
  Antisense strand to SEQ ID NO: 1970308
ugauggcccagacuaucac

SEQ ID NO: 1970310 - RNA, 19 nt, Artificial Sequence
  Description of Artificial Sequence: Synthetic oligonucleotide
  Sense strand starting at position 3083 of SEQ ID NO: 1880479
gucuuuauccggcaccaca

SEQ ID NO: 1970311 - RNA, 19 nt, Artificial Sequence
  Description of Artificial Sequence: Synthetic oligonucleotide
  Antisense strand to SEQ ID NO: 1970310
uguggugccggauaaagac

SEQ ID NO: 1970312 - RNA, 19 nt, Artificial Sequence
  Description of Artificial Sequence: Synthetic oligonucleotide
  Sense strand starting at position 3148 of SEQ ID NO: 1880479
cuaucuaaccaugguaagu

SEQ ID NO: 1970313 - RNA, 19 nt, Artificial Sequence
  Description of Artificial Sequence: Synthetic oligonucleotide
  Antisense strand to SEQ ID NO: 1970312
acuuaccaugguuagauag

SEQ ID NO: 1970314 - RNA, 19 nt, Artificial Sequence
  Description of Artificial Sequence: Synthetic oligonucleotide
  Sense strand starting at position 3163 of SEQ ID NO: 1880479
aagugucaggguuaaauga

SEQ ID NO: 1970315 - RNA, 19 nt, Artificial Sequence
  Description of Artificial Sequence: Synthetic oligonucleotide
  Antisense strand to SEQ ID NO: 1970314
ucauuuaacccugacacuu

SEQ ID NO: 1970316 - RNA, 19 nt, Artificial Sequence
  Description of Artificial Sequence: Synthetic oligonucleotide
  Sense strand starting at position 3165 of SEQ ID NO: 1880479
gugucaggguuaaaugagu

SEQ ID NO: 1970317 - RNA, 19 nt, Artificial Sequence
  Description of Artificial Sequence: Synthetic oligonucleotide
  Antisense strand to SEQ ID NO: 1970316
acucauuuaacccugacac

SEQ ID NO: 1970318 - RNA, 19 nt, Artificial Sequence
  Description of Artificial Sequence: Synthetic oligonucleotide
  Sense strand starting at position 3170 of SEQ ID NO: 1880479
aggguuaaaugagucaaua

SEQ ID NO: 1970319 - RNA, 19 nt, Artificial Sequence
  Description of Artificial Sequence: Synthetic oligonucleotide
  Antisense strand to SEQ ID NO: 1970318
uauugacucauuuaacccu

SEQ ID NO: 1970320 - RNA, 19 nt, Artificial Sequence
  Description of Artificial Sequence: Synthetic oligonucleotide
  Sense strand starting at position 3208 of SEQ ID NO: 1880479
agugccuugcguguaguaa

SEQ ID NO: 1970321 - RNA, 19 nt, Artificial Sequence
  Description of Artificial Sequence: Synthetic oligonucleotide
  Antisense strand to SEQ ID NO: 1970320
uuacuacacgcaaggcacu

SEQ ID NO: 1970322 - RNA, 19 nt, Artificial Sequence
  Description of Artificial Sequence: Synthetic oligonucleotide
  Sense strand starting at position 3465 of SEQ ID NO: 1880479
ucacuaaguugcccagauu

SEQ ID NO: 1970323 - RNA, 19 nt, Artificial Sequence
  Description of Artificial Sequence: Synthetic oligonucleotide
  Antisense strand to SEQ ID NO: 1970322
aaucugggcaacuuaguga

SEQ ID NO: 1970324 - RNA, 19 nt, Artificial Sequence
  Description of Artificial Sequence: Synthetic oligonucleotide
  Sense strand starting at position 3474 of SEQ ID NO: 1880479
ugcccagauuugucucaua

SEQ ID NO: 1970325 - RNA, 19 nt, Artificial Sequence
  Description of Artificial Sequence: Synthetic oligonucleotide
  Antisense strand to SEQ ID NO: 1970324
uaugagacaaaucugggca

SEQ ID NO: 1970326 - RNA, 19 nt, Artificial Sequence
  Description of Artificial Sequence: Synthetic oligonucleotide
  Sense strand starting at position 3477 of SEQ ID NO: 1880479
ccagauuugucucauacuu

SEQ ID NO: 1970327 - RNA, 19 nt, Artificial Sequence
  Description of Artificial Sequence: Synthetic oligonucleotide
  Antisense strand to SEQ ID NO: 1970326
aaguaugagacaaaucugg

SEQ ID NO: 1970328 - RNA, 19 nt, Artificial Sequence
  Description of Artificial Sequence: Synthetic oligonucleotide
  Sense strand starting at position 3479 of SEQ ID NO: 1880479
agauuugucucauacuucu

SEQ ID NO: 1970329 - RNA, 19 nt, Artificial Sequence
  Description of Artificial Sequence: Synthetic oligonucleotide
  Antisense strand to SEQ ID NO: 1970328
agaaguaugagacaaaucu

SEQ ID NO: 1970330 - RNA, 19 nt, Artificial Sequence
  Description of Artificial Sequence: Synthetic oligonucleotide
  Sense strand starting at position 3482 of SEQ ID NO: 1880479
uuugucucauacuucuaga

SEQ ID NO: 1970331 - RNA, 19 nt, Artificial Sequence
  Description of Artificial Sequence: Synthetic oligonucleotide
  Antisense strand to SEQ ID NO: 1970330
ucuagaaguaugagacaaa

SEQ ID NO: 1970332 - RNA, 19 nt, Artificial Sequence
  Description of Artificial Sequence: Synthetic oligonucleotide
  Sense strand starting at position 3861 of SEQ ID NO: 1880479
auugacagaucuguguuua

SEQ ID NO: 1970333 - RNA, 19 nt, Artificial Sequence
  Description of Artificial Sequence: Synthetic oligonucleotide
  Antisense strand to SEQ ID NO: 1970332
uaaacacagaucugucaau

SEQ ID NO: 1970334 - RNA, 19 nt, Artificial Sequence
  Description of Artificial Sequence: Synthetic oligonucleotide
  Sense strand starting at position 3862 of SEQ ID NO: 1880479
uugacagaucuguguuuau

SEQ ID NO: 1970335 - RNA, 19 nt, Artificial Sequence
  Description of Artificial Sequence: Synthetic oligonucleotide
  Antisense strand to SEQ ID NO: 1970334
auaaacacagaucugucaa

SEQ ID NO: 1970336 - RNA, 19 nt, Artificial Sequence
  Description of Artificial Sequence: Synthetic oligonucleotide
  Sense strand starting at position 3865 of SEQ ID NO: 1880479
acagaucuguguuuauguc

SEQ ID NO: 1970337 - RNA, 19 nt, Artificial Sequence
  Description of Artificial Sequence: Synthetic oligonucleotide
  Antisense strand to SEQ ID NO: 1970336
gacauaaacacagaucugu

SEQ ID NO: 1970338 - RNA, 19 nt, Artificial Sequence
  Description of Artificial Sequence: Synthetic oligonucleotide
  Sense strand starting at position 3875 of SEQ ID NO: 1880479
guuuaugucuucccaauag

SEQ ID NO: 1970339 - RNA, 19 nt, Artificial Sequence
  Description of Artificial Sequence: Synthetic oligonucleotide
  Antisense strand to SEQ ID NO: 1970338
cuauugggaagacauaaac

SEQ ID NO: 1970340 - RNA, 19 nt, Artificial Sequence
  Description of Artificial Sequence: Synthetic oligonucleotide
  Sense strand starting at position 3917 of SEQ ID NO: 1880479
uugcuuuccugagcaugaa

SEQ ID NO: 1970341 - RNA, 19 nt, Artificial Sequence
  Description of Artificial Sequence: Synthetic oligonucleotide
  Antisense strand to SEQ ID NO: 1970340
uucaugcucaggaaagcaa

SEQ ID NO: 1970342 - RNA, 19 nt, Artificial Sequence
  Description of Artificial Sequence: Synthetic oligonucleotide
  Sense strand starting at position 3920 of SEQ ID NO: 1880479
cuuuccugagcaugaauau

SEQ ID NO: 1970343 - RNA, 19 nt, Artificial Sequence
  Description of Artificial Sequence: Synthetic oligonucleotide
  Antisense strand to SEQ ID NO: 1970342
auauucaugcucaggaaag

SEQ ID NO: 1970344 - RNA, 19 nt, Artificial Sequence
  Description of Artificial Sequence: Synthetic oligonucleotide
  Sense strand starting at position 3921 of SEQ ID NO: 1880479
uuuccugagcaugaauaua

SEQ ID NO: 1970345 - RNA, 19 nt, Artificial Sequence
  Description of Artificial Sequence: Synthetic oligonucleotide
  Antisense strand to SEQ ID NO: 1970344
uauauucaugcucaggaaa

SEQ ID NO: 1970346 - RNA, 19 nt, Artificial Sequence
  Description of Artificial Sequence: Synthetic oligonucleotide
  Sense strand starting at position 208 of SEQ ID NO: 1880480
gcugaaugucauggugaag

SEQ ID NO: 1970347 - RNA, 19 nt, Artificial Sequence
  Description of Artificial Sequence: Synthetic oligonucleotide
  Antisense strand to SEQ ID NO: 1970346
cuucaccaugacauucagc

SEQ ID NO: 1970348 - RNA, 19 nt, Artificial Sequence
  Description of Artificial Sequence: Synthetic oligonucleotide
  Sense strand starting at position 403 of SEQ ID NO: 1880480
gcuuaaggccucuguggga

SEQ ID NO: 1970349 - RNA, 19 nt, Artificial Sequence
  Description of Artificial Sequence: Synthetic oligonucleotide
  Antisense strand to SEQ ID NO: 1970348
ucccacagaggccuuaagc

SEQ ID NO: 1970350 - RNA, 19 nt, Artificial Sequence
  Description of Artificial Sequence: Synthetic oligonucleotide
  Sense strand starting at position 465 of SEQ ID NO: 1880480
aagaacuaguuguugacau

SEQ ID NO: 1970351 - RNA, 19 nt, Artificial Sequence
  Description of Artificial Sequence: Synthetic oligonucleotide
  Antisense strand to SEQ ID NO: 1970350
augucaacaacuaguucuu

SEQ ID NO: 1970352 - RNA, 19 nt, Artificial Sequence
  Description of Artificial Sequence: Synthetic oligonucleotide
  Sense strand starting at position 466 of SEQ ID NO: 1880480
agaacuaguuguugacauu

SEQ ID NO: 1970353 - RNA, 19 nt, Artificial Sequence
  Description of Artificial Sequence: Synthetic oligonucleotide
  Antisense strand to SEQ ID NO: 1970352
aaugucaacaacuaguucu

SEQ ID NO: 1970354 - RNA, 19 nt, Artificial Sequence
  Description of Artificial Sequence: Synthetic oligonucleotide
  Sense strand starting at position 495 of SEQ ID NO: 1880480
ccaggagaauuguuauagu

SEQ ID NO: 1970355 - RNA, 19 nt, Artificial Sequence
  Description of Artificial Sequence: Synthetic oligonucleotide
  Antisense strand to SEQ ID NO: 1970354
acuauaacaauucuccugg

SEQ ID NO: 1970356 - RNA, 19 nt, Artificial Sequence
  Description of Artificial Sequence: Synthetic oligonucleotide
  Sense strand starting at position 498 of SEQ ID NO: 1880480
ggagaauuguuauagucug

SEQ ID NO: 1970357 - RNA, 19 nt, Artificial Sequence
  Description of Artificial Sequence: Synthetic oligonucleotide
  Antisense strand to SEQ ID NO: 1970356
cagacuauaacaauucucc

SEQ ID NO: 1970358 - RNA, 19 nt, Artificial Sequence
  Description of Artificial Sequence: Synthetic oligonucleotide
  Sense strand starting at position 503 of SEQ ID NO: 1880480
auuguuauagucugcaaag

SEQ ID NO: 1970359 - RNA, 19 nt, Artificial Sequence
  Description of Artificial Sequence: Synthetic oligonucleotide
  Antisense strand to SEQ ID NO: 1970358
cuuugcagacuauaacaau

SEQ ID NO: 1970360 - RNA, 19 nt, Artificial Sequence
  Description of Artificial Sequence: Synthetic oligonucleotide
  Sense strand starting at position 505 of SEQ ID NO: 1880480
uguuauagucugcaaaguc

SEQ ID NO: 1970361 - RNA, 19 nt, Artificial Sequence
  Description of Artificial Sequence: Synthetic oligonucleotide
  Antisense strand to SEQ ID NO: 1970360
gacuuugcagacuauaaca

SEQ ID NO: 1970362 - RNA, 19 nt, Artificial Sequence
  Description of Artificial Sequence: Synthetic oligonucleotide
  Sense strand starting at position 587 of SEQ ID NO: 1880480
ggcugcccuacagaugauu

SEQ ID NO: 1970363 - RNA, 19 nt, Artificial Sequence
  Description of Artificial Sequence: Synthetic oligonucleotide
  Antisense strand to SEQ ID NO: 1970362
aaucaucuguagggcagcc

SEQ ID NO: 1970364 - RNA, 19 nt, Artificial Sequence
  Description of Artificial Sequence: Synthetic oligonucleotide
  Sense strand starting at position 596 of SEQ ID NO: 1880480
acagaugauuuaugucauu

SEQ ID NO: 1970365 - RNA, 19 nt, Artificial Sequence
  Description of Artificial Sequence: Synthetic oligonucleotide
  Antisense strand to SEQ ID NO: 1970364
aaugacauaaaucaucugu

SEQ ID NO: 1970366 - RNA, 19 nt, Artificial Sequence
  Description of Artificial Sequence: Synthetic oligonucleotide
  Sense strand starting at position 599 of SEQ ID NO: 1880480
gaugauuuaugucauugua

SEQ ID NO: 1970367 - RNA, 19 nt, Artificial Sequence
  Description of Artificial Sequence: Synthetic oligonucleotide
  Antisense strand to SEQ ID NO: 1970366
uacaaugacauaaaucauc

SEQ ID NO: 1970368 - RNA, 19 nt, Artificial Sequence
  Description of Artificial Sequence: Synthetic oligonucleotide
  Sense strand starting at position 679 of SEQ ID NO: 1880480
uaaacuuggcccugagaug

SEQ ID NO: 1970369 - RNA, 19 nt, Artificial Sequence
  Description of Artificial Sequence: Synthetic oligonucleotide
  Antisense strand to SEQ ID NO: 1970368
caucucagggccaaguuua

SEQ ID NO: 1970370 - RNA, 19 nt, Artificial Sequence
  Description of Artificial Sequence: Synthetic oligonucleotide
  Sense strand starting at position 688 of SEQ ID NO: 1880480
cccugagaugccuacuaca

SEQ ID NO: 1970371 - RNA, 19 nt, Artificial Sequence
  Description of Artificial Sequence: Synthetic oligonucleotide
  Antisense strand to SEQ ID NO: 1970370
uguaguaggcaucucaggg

SEQ ID NO: 1970372 - RNA, 19 nt, Artificial Sequence
  Description of Artificial Sequence: Synthetic oligonucleotide
  Sense strand starting at position 739 of SEQ ID NO: 1880480
gcagcauauuuggcaacuu

SEQ ID NO: 1970373 - RNA, 19 nt, Artificial Sequence
  Description of Artificial Sequence: Synthetic oligonucleotide
  Antisense strand to SEQ ID NO: 1970372
aaguugccaaauaugcugc

SEQ ID NO: 1970374 - RNA, 19 nt, Artificial Sequence
  Description of Artificial Sequence: Synthetic oligonucleotide
  Sense strand starting at position 775 of SEQ ID NO: 1880480
cuuggaacguccguaacau

SEQ ID NO: 1970375 - RNA, 19 nt, Artificial Sequence
  Description of Artificial Sequence: Synthetic oligonucleotide
  Antisense strand to SEQ ID NO: 1970374
auguuacggacguuccaag

SEQ ID NO: 1970376 - RNA, 19 nt, Artificial Sequence
  Description of Artificial Sequence: Synthetic oligonucleotide
  Sense strand starting at position 776 of SEQ ID NO: 1880480
uuggaacguccguaacauu

SEQ ID NO: 1970377 - RNA, 19 nt, Artificial Sequence
  Description of Artificial Sequence: Synthetic oligonucleotide
  Antisense strand to SEQ ID NO: 1970376
aauguuacggacguuccaa

SEQ ID NO: 1970378 - RNA, 19 nt, Artificial Sequence
  Description of Artificial Sequence: Synthetic oligonucleotide
  Sense strand starting at position 779 of SEQ ID NO: 1880480
gaacguccguaacauugaa

SEQ ID NO: 1970379 - RNA, 19 nt, Artificial Sequence
  Description of Artificial Sequence: Synthetic oligonucleotide
  Antisense strand to SEQ ID NO: 1970378
uucaauguuacggacguuc

SEQ ID NO: 1970380 - RNA, 19 nt, Artificial Sequence
  Description of Artificial Sequence: Synthetic oligonucleotide
  Sense strand starting at position 838 of SEQ ID NO: 1880480
ugggaaucuccguagagcu

SEQ ID NO: 1970381 - RNA, 19 nt, Artificial Sequence
  Description of Artificial Sequence: Synthetic oligonucleotide
  Antisense strand to SEQ ID NO: 1970380
agcucuacggagauuccca

SEQ ID NO: 1970382 - RNA, 19 nt, Artificial Sequence
  Description of Artificial Sequence: Synthetic oligonucleotide
  Sense strand starting at position 1366 of SEQ ID NO: 1880480
cuguaucuaccuugacuuu

SEQ ID NO: 1970383 - RNA, 19 nt, Artificial Sequence
  Description of Artificial Sequence: Synthetic oligonucleotide
  Antisense strand to SEQ ID NO: 1970382
aaagucaagguagauacag

SEQ ID NO: 1970384 - RNA, 19 nt, Artificial Sequence
  Description of Artificial Sequence: Synthetic oligonucleotide
  Sense strand starting at position 1367 of SEQ ID NO: 1880480
uguaucuaccuugacuuua

SEQ ID NO: 1970385 - RNA, 19 nt, Artificial Sequence
  Description of Artificial Sequence: Synthetic oligonucleotide
  Antisense strand to SEQ ID NO: 1970384
uaaagucaagguagauaca

SEQ ID NO: 1970386 - RNA, 19 nt, Artificial Sequence
  Description of Artificial Sequence: Synthetic oligonucleotide
  Sense strand starting at position 1869 of SEQ ID NO: 1880480
agcgacucccacugugaau

SEQ ID NO: 1970387 - RNA, 19 nt, Artificial Sequence
  Description of Artificial Sequence: Synthetic oligonucleotide
  Antisense strand to SEQ ID NO: 1970386
auucacagugggagucgcu

SEQ ID NO: 1970388 - RNA, 19 nt, Artificial Sequence
  Description of Artificial Sequence: Synthetic oligonucleotide
  Sense strand starting at position 1883 of SEQ ID NO: 1880480
ugaaucaguccucagacga

SEQ ID NO: 1970389 - RNA, 19 nt, Artificial Sequence
  Description of Artificial Sequence: Synthetic oligonucleotide
  Antisense strand to SEQ ID NO: 1970388
ucgucugaggacugauuca

SEQ ID NO: 1970390 - RNA, 19 nt, Artificial Sequence
  Description of Artificial Sequence: Synthetic oligonucleotide
  Sense strand starting at position 2120 of SEQ ID NO: 1880480
ccgccuccaugagucaaua

SEQ ID NO: 1970391 - RNA, 19 nt, Artificial Sequence
  Description of Artificial Sequence: Synthetic oligonucleotide
  Antisense strand to SEQ ID NO: 1970390
uauugacucauggaggcgg

SEQ ID NO: 1970392 - RNA, 19 nt, Artificial Sequence
  Description of Artificial Sequence: Synthetic oligonucleotide
  Sense strand starting at position 2376 of SEQ ID NO: 1880480
cgacgugucagccgcagau

SEQ ID NO: 1970393 - RNA, 19 nt, Artificial Sequence
  Description of Artificial Sequence: Synthetic oligonucleotide
  Antisense strand to SEQ ID NO: 1970392
aucugcggcugacacgucg

SEQ ID NO: 1970394 - RNA, 19 nt, Artificial Sequence
  Description of Artificial Sequence: Synthetic oligonucleotide
  Sense strand starting at position 2388 of SEQ ID NO: 1880480
cgcagaugcguucagguga

SEQ ID NO: 1970395 - RNA, 19 nt, Artificial Sequence
  Description of Artificial Sequence: Synthetic oligonucleotide
  Antisense strand to SEQ ID NO: 1970394
ucaccugaacgcaucugcg

SEQ ID NO: 1970396 - RNA, 19 nt, Artificial Sequence
  Description of Artificial Sequence: Synthetic oligonucleotide
  Sense strand starting at position 2758 of SEQ ID NO: 1880480
gcuccauucugcgucguaa

SEQ ID NO: 1970397 - RNA, 19 nt, Artificial Sequence
  Description of Artificial Sequence: Synthetic oligonucleotide
  Antisense strand to SEQ ID NO: 1970396
uuacgacgcagaauggagc

SEQ ID NO: 1970398 - RNA, 19 nt, Artificial Sequence
  Description of Artificial Sequence: Synthetic oligonucleotide
  Sense strand starting at position 2759 of SEQ ID NO: 1880480
cuccauucugcgucguaau

SEQ ID NO: 1970399 - RNA, 19 nt, Artificial Sequence
  Description of Artificial Sequence: Synthetic oligonucleotide
  Antisense strand to SEQ ID NO: 1970398
auuacgacgcagaauggag

SEQ ID NO: 1970400 - RNA, 19 nt, Artificial Sequence
  Description of Artificial Sequence: Synthetic oligonucleotide
  Sense strand starting at position 2760 of SEQ ID NO: 1880480
uccauucugcgucguaaua

SEQ ID NO: 1970401 - RNA, 19 nt, Artificial Sequence
  Description of Artificial Sequence: Synthetic oligonucleotide
  Antisense strand to SEQ ID NO: 1970400
uauuacgacgcagaaugga

SEQ ID NO: 1970402 - RNA, 19 nt, Artificial Sequence
  Description of Artificial Sequence: Synthetic oligonucleotide
  Sense strand starting at position 2843 of SEQ ID NO: 1880480
gguggaaacccggauucua

SEQ ID NO: 1970403 - RNA, 19 nt, Artificial Sequence
  Description of Artificial Sequence: Synthetic oligonucleotide
  Antisense strand to SEQ ID NO: 1970402
uagaauccggguuuccacc

SEQ ID NO: 1970404 - RNA, 19 nt, Artificial Sequence
  Description of Artificial Sequence: Synthetic oligonucleotide
  Sense strand starting at position 2876 of SEQ ID NO: 1880480
ccgcgacuucuauggccuu

SEQ ID NO: 1970405 - RNA, 19 nt, Artificial Sequence
  Description of Artificial Sequence: Synthetic oligonucleotide
  Antisense strand to SEQ ID NO: 1970404
aaggccauagaagucgcgg

SEQ ID NO: 1970406 - RNA, 19 nt, Artificial Sequence
  Description of Artificial Sequence: Synthetic oligonucleotide
  Sense strand starting at position 2922 of SEQ ID NO: 1880480
uuucccauuugcucaguga

SEQ ID NO: 1970407 - RNA, 19 nt, Artificial Sequence
  Description of Artificial Sequence: Synthetic oligonucleotide
  Antisense strand to SEQ ID NO: 1970406
ucacugagcaaaugggaaa

SEQ ID NO: 1970408 - RNA, 19 nt, Artificial Sequence
  Description of Artificial Sequence: Synthetic oligonucleotide
  Sense strand starting at position 3134 of SEQ ID NO: 1880480
ugcugacauccugagaugu

SEQ ID NO: 1970409 - RNA, 19 nt, Artificial Sequence
  Description of Artificial Sequence: Synthetic oligonucleotide
  Antisense strand to SEQ ID NO: 1970408
acaucucaggaugucagca

SEQ ID NO: 1970410 - RNA, 19 nt, Artificial Sequence
  Description of Artificial Sequence: Synthetic oligonucleotide
  Sense strand starting at position 3685 of SEQ ID NO: 1880480
cugccuggcacugaaagau

SEQ ID NO: 1970411 - RNA, 19 nt, Artificial Sequence
  Description of Artificial Sequence: Synthetic oligonucleotide
  Antisense strand to SEQ ID NO: 1970410
aucuuucagugccaggcag

SEQ ID NO: 1970412 - RNA, 19 nt, Artificial Sequence
  Description of Artificial Sequence: Synthetic oligonucleotide
  Sense strand starting at position 3822 of SEQ ID NO: 1880480
agagaucucugcuuggaau

SEQ ID NO: 1970413 - RNA, 19 nt, Artificial Sequence
  Description of Artificial Sequence: Synthetic oligonucleotide
  Antisense strand to SEQ ID NO: 1970412
auuccaagcagagaucucu

SEQ ID NO: 1970414 - RNA, 19 nt, Artificial Sequence
  Description of Artificial Sequence: Synthetic oligonucleotide
  Sense strand starting at position 3823 of SEQ ID NO: 1880480
gagaucucugcuuggaaug

SEQ ID NO: 1970415 - RNA, 19 nt, Artificial Sequence
  Description of Artificial Sequence: Synthetic oligonucleotide
  Antisense strand to SEQ ID NO: 1970414
cauuccaagcagagaucuc

SEQ ID NO: 1970416 - RNA, 19 nt, Artificial Sequence
  Description of Artificial Sequence: Synthetic oligonucleotide
  Sense strand starting at position 3824 of SEQ ID NO: 1880480
agaucucugcuuggaauga

SEQ ID NO: 1970417 - RNA, 19 nt, Artificial Sequence
  Description of Artificial Sequence: Synthetic oligonucleotide
  Antisense strand to SEQ ID NO: 1970416
ucauuccaagcagagaucu

SEQ ID NO: 1970418 - RNA, 19 nt, Artificial Sequence
  Description of Artificial Sequence: Synthetic oligonucleotide
  Sense strand starting at position 3935 of SEQ ID NO: 1880480
gggaucuuuccuggugacu

SEQ ID NO: 1970419 - RNA, 19 nt, Artificial Sequence
  Description of Artificial Sequence: Synthetic oligonucleotide
  Antisense strand to SEQ ID NO: 1970418
agucaccaggaaagauccc

SEQ ID NO: 1970420 - RNA, 19 nt, Artificial Sequence
  Description of Artificial Sequence: Synthetic oligonucleotide
  Sense strand starting at position 3937 of SEQ ID NO: 1880480
gaucuuuccuggugacuga

SEQ ID NO: 1970421 - RNA, 19 nt, Artificial Sequence
  Description of Artificial Sequence: Synthetic oligonucleotide
  Antisense strand to SEQ ID NO: 1970420
ucagucaccaggaaagauc

SEQ ID NO: 1970422 - RNA, 19 nt, Artificial Sequence
  Description of Artificial Sequence: Synthetic oligonucleotide
  Sense strand starting at position 3941 of SEQ ID NO: 1880480
uuuccuggugacugagaau

SEQ ID NO: 1970423 - RNA, 19 nt, Artificial Sequence
  Description of Artificial Sequence: Synthetic oligonucleotide
  Antisense strand to SEQ ID NO: 1970422
auucucagucaccaggaaa

SEQ ID NO: 1970424 - RNA, 19 nt, Artificial Sequence
  Description of Artificial Sequence: Synthetic oligonucleotide
  Sense strand starting at position 3944 of SEQ ID NO: 1880480
ccuggugacugagaauuac

SEQ ID NO: 1970425 - RNA, 19 nt, Artificial Sequence
  Description of Artificial Sequence: Synthetic oligonucleotide
  Antisense strand to SEQ ID NO: 1970424
guaauucucagucaccagg

SEQ ID NO: 1970426 - RNA, 19 nt, Artificial Sequence
  Description of Artificial Sequence: Synthetic oligonucleotide
  Sense strand starting at position 1850 of SEQ ID NO: 1880481
ccaaguguuggucagugau

SEQ ID NO: 1970427 - RNA, 19 nt, Artificial Sequence
  Description of Artificial Sequence: Synthetic oligonucleotide
  Antisense strand to SEQ ID NO: 1970426
aucacugaccaacacuugg

SEQ ID NO: 1970428 - RNA, 19 nt, Artificial Sequence
  Description of Artificial Sequence: Synthetic oligonucleotide
  Sense strand starting at position 1863 of SEQ ID NO: 1880481
agugaugguuucuuucuga

SEQ ID NO: 1970429 - RNA, 19 nt, Artificial Sequence
  Description of Artificial Sequence: Synthetic oligonucleotide
  Antisense strand to SEQ ID NO: 1970428
ucagaaagaaaccaucacu

SEQ ID NO: 1970430 - RNA, 19 nt, Artificial Sequence
  Description of Artificial Sequence: Synthetic oligonucleotide
  Sense strand starting at position 2153 of SEQ ID NO: 1880481
gagcaaauucccgaaggca

SEQ ID NO: 1970431 - RNA, 19 nt, Artificial Sequence
  Description of Artificial Sequence: Synthetic oligonucleotide
  Antisense strand to SEQ ID NO: 1970430
ugccuucgggaauuugcuc

SEQ ID NO: 1970432 - RNA, 19 nt, Artificial Sequence
  Description of Artificial Sequence: Synthetic oligonucleotide
  Sense strand starting at position 2282 of SEQ ID NO: 1880481
ggaagaguggaaugcucaa

SEQ ID NO: 1970433 - RNA, 19 nt, Artificial Sequence
  Description of Artificial Sequence: Synthetic oligonucleotide
  Antisense strand to SEQ ID NO: 1970432
uugagcauuccacucuucc

SEQ ID NO: 1970434 - RNA, 19 nt, Artificial Sequence
  Description of Artificial Sequence: Synthetic oligonucleotide
  Sense strand starting at position 2366 of SEQ ID NO: 1880481
ucauauagucccuagagug

SEQ ID NO: 1970435 - RNA, 19 nt, Artificial Sequence
  Description of Artificial Sequence: Synthetic oligonucleotide
  Antisense strand to SEQ ID NO: 1970434
cacucuagggacuauauga

SEQ ID NO: 1970436 - RNA, 19 nt, Artificial Sequence
  Description of Artificial Sequence: Synthetic oligonucleotide
  Sense strand starting at position 2392 of SEQ ID NO: 1880481
guaggaagauuccuccagu

SEQ ID NO: 1970437 - RNA, 19 nt, Artificial Sequence
  Description of Artificial Sequence: Synthetic oligonucleotide
  Antisense strand to SEQ ID NO: 1970436
acuggaggaaucuuccuac

SEQ ID NO: 1970438 - RNA, 19 nt, Artificial Sequence
  Description of Artificial Sequence: Synthetic oligonucleotide
  Sense strand starting at position 2393 of SEQ ID NO: 1880481
uaggaagauuccuccaguc

SEQ ID NO: 1970439 - RNA, 19 nt, Artificial Sequence
  Description of Artificial Sequence: Synthetic oligonucleotide
  Antisense strand to SEQ ID NO: 1970438
gacuggaggaaucuuccua

SEQ ID NO: 1970440 - RNA, 19 nt, Artificial Sequence
  Description of Artificial Sequence: Synthetic oligonucleotide
  Sense strand starting at position 2453 of SEQ ID NO: 1880481
uuacuaacagaguguuuau

SEQ ID NO: 1970441 - RNA, 19 nt, Artificial Sequence
  Description of Artificial Sequence: Synthetic oligonucleotide
  Antisense strand to SEQ ID NO: 1970440
auaaacacucuguuaguaa

SEQ ID NO: 1970442 - RNA, 19 nt, Artificial Sequence
  Description of Artificial Sequence: Synthetic oligonucleotide
  Sense strand starting at position 2456 of SEQ ID NO: 1880481
cuaacagaguguuuauuaa

SEQ ID NO: 1970443 - RNA, 19 nt, Artificial Sequence
  Description of Artificial Sequence: Synthetic oligonucleotide
  Antisense strand to SEQ ID NO: 1970442
uuaauaaacacucuguuag

SEQ ID NO: 1970444 - RNA, 19 nt, Artificial Sequence
  Description of Artificial Sequence: Synthetic oligonucleotide
  Sense strand starting at position 2565 of SEQ ID NO: 1880481
ggagggugagcuuggguaa

SEQ ID NO: 1970445 - RNA, 19 nt, Artificial Sequence
  Description of Artificial Sequence: Synthetic oligonucleotide
  Antisense strand to SEQ ID NO: 1970444
uuacccaagcucacccucc

SEQ ID NO: 1970446 - RNA, 19 nt, Artificial Sequence
  Description of Artificial Sequence: Synthetic oligonucleotide
  Sense strand starting at position 2566 of SEQ ID NO: 1880481
gagggugagcuuggguaau

SEQ ID NO: 1970447 - RNA, 19 nt, Artificial Sequence
  Description of Artificial Sequence: Synthetic oligonucleotide
  Antisense strand to SEQ ID NO: 1970446
auuacccaagcucacccuc

SEQ ID NO: 1970448 - RNA, 19 nt, Artificial Sequence
  Description of Artificial Sequence: Synthetic oligonucleotide
  Sense strand starting at position 2568 of SEQ ID NO: 1880481
gggugagcuuggguaauua

SEQ ID NO: 1970449 - RNA, 19 nt, Artificial Sequence
  Description of Artificial Sequence: Synthetic oligonucleotide
  Antisense strand to SEQ ID NO: 1970448
uaauuacccaagcucaccc

SEQ ID NO: 1970450 - RNA, 19 nt, Artificial Sequence
  Description of Artificial Sequence: Synthetic oligonucleotide
  Sense strand starting at position 2572 of SEQ ID NO: 1880481
gagcuuggguaauuacuuu

SEQ ID NO: 1970451 - RNA, 19 nt, Artificial Sequence
  Description of Artificial Sequence: Synthetic oligonucleotide
  Antisense strand to SEQ ID NO: 1970450
aaaguaauuacccaagcuc

SEQ ID NO: 1970452 - RNA, 19 nt, Artificial Sequence
  Description of Artificial Sequence: Synthetic oligonucleotide
  Sense strand starting at position 2579 of SEQ ID NO: 1880481
gguaauuacuuucucagau

SEQ ID NO: 1970453 - RNA, 19 nt, Artificial Sequence
  Description of Artificial Sequence: Synthetic oligonucleotide
  Antisense strand to SEQ ID NO: 1970452
aucugagaaaguaauuacc

SEQ ID NO: 1970454 - RNA, 19 nt, Artificial Sequence
  Description of Artificial Sequence: Synthetic oligonucleotide
  Sense strand starting at position 2632 of SEQ ID NO: 1880481
uaacuuucugaggguguua

SEQ ID NO: 1970455 - RNA, 19 nt, Artificial Sequence
  Description of Artificial Sequence: Synthetic oligonucleotide
  Antisense strand to SEQ ID NO: 1970454
uaacacccucagaaaguua

SEQ ID NO: 1970456 - RNA, 19 nt, Artificial Sequence
  Description of Artificial Sequence: Synthetic oligonucleotide
  Sense strand starting at position 2645 of SEQ ID NO: 1880481
guguuauggcaauaaguua

SEQ ID NO: 1970457 - RNA, 19 nt, Artificial Sequence
  Description of Artificial Sequence: Synthetic oligonucleotide
  Antisense strand to SEQ ID NO: 1970456
uaacuuauugccauaacac

SEQ ID NO: 1970458 - RNA, 19 nt, Artificial Sequence
  Description of Artificial Sequence: Synthetic oligonucleotide
  Sense strand starting at position 2705 of SEQ ID NO: 1880481
uaguuacugucaucaggaa

SEQ ID NO: 1970459 - RNA, 19 nt, Artificial Sequence
  Description of Artificial Sequence: Synthetic oligonucleotide
  Antisense strand to SEQ ID NO: 1970458
uuccugaugacaguaacua

SEQ ID NO: 1970460 - RNA, 19 nt, Artificial Sequence
  Description of Artificial Sequence: Synthetic oligonucleotide
  Sense strand starting at position 2821 of SEQ ID NO: 1880481
ucuuccauggucugaacaa

SEQ ID NO: 1970461 - RNA, 19 nt, Artificial Sequence
  Description of Artificial Sequence: Synthetic oligonucleotide
  Antisense strand to SEQ ID NO: 1970460
uuguucagaccauggaaga

SEQ ID NO: 1970462 - RNA, 19 nt, Artificial Sequence
  Description of Artificial Sequence: Synthetic oligonucleotide
  Sense strand starting at position 2834 of SEQ ID NO: 1880481
gaacaauagugugauuuag

SEQ ID NO: 1970463 - RNA, 19 nt, Artificial Sequence
  Description of Artificial Sequence: Synthetic oligonucleotide
  Antisense strand to SEQ ID NO: 1970462
cuaaaucacacuauuguuc

SEQ ID NO: 1970464 - RNA, 19 nt, Artificial Sequence
  Description of Artificial Sequence: Synthetic oligonucleotide
  Sense strand starting at position 2920 of SEQ ID NO: 1880481
cuugaaaguuccuuuaggu

SEQ ID NO: 1970465 - RNA, 19 nt, Artificial Sequence
  Description of Artificial Sequence: Synthetic oligonucleotide
  Antisense strand to SEQ ID NO: 1970464
accuaaaggaacuuucaag

SEQ ID NO: 1970466 - RNA, 19 nt, Artificial Sequence
  Description of Artificial Sequence: Synthetic oligonucleotide
  Sense strand starting at position 2930 of SEQ ID NO: 1880481
ccuuuagguuauguggauu

SEQ ID NO: 1970467 - RNA, 19 nt, Artificial Sequence
  Description of Artificial Sequence: Synthetic oligonucleotide
  Antisense strand to SEQ ID NO: 1970466
aauccacauaaccuaaagg

SEQ ID NO: 1970468 - RNA, 19 nt, Artificial Sequence
  Description of Artificial Sequence: Synthetic oligonucleotide
  Sense strand starting at position 3046 of SEQ ID NO: 1880481
uagcuauuaggucagcuaa

SEQ ID NO: 1970469 - RNA, 19 nt, Artificial Sequence
  Description of Artificial Sequence: Synthetic oligonucleotide
  Antisense strand to SEQ ID NO: 1970468
uuagcugaccuaauagcua

SEQ ID NO: 1970470 - RNA, 19 nt, Artificial Sequence
  Description of Artificial Sequence: Synthetic oligonucleotide
  Sense strand starting at position 3081 of SEQ ID NO: 1880481
guaagaaagucuccuugug

SEQ ID NO: 1970471 - RNA, 19 nt, Artificial Sequence
  Description of Artificial Sequence: Synthetic oligonucleotide
  Antisense strand to SEQ ID NO: 1970470
cacaaggagacuuucuuac

SEQ ID NO: 1970472 - RNA, 19 nt, Artificial Sequence
  Description of Artificial Sequence: Synthetic oligonucleotide
  Sense strand starting at position 3083 of SEQ ID NO: 1880481
aagaaagucuccuugugau

SEQ ID NO: 1970473 - RNA, 19 nt, Artificial Sequence
  Description of Artificial Sequence: Synthetic oligonucleotide
  Antisense strand to SEQ ID NO: 1970472
aucacaaggagacuuucuu

SEQ ID NO: 1970474 - RNA, 19 nt, Artificial Sequence
  Description of Artificial Sequence: Synthetic oligonucleotide
  Sense strand starting at position 3321 of SEQ ID NO: 1880481
cucagagcuuccuuggaca

SEQ ID NO: 1970475 - RNA, 19 nt, Artificial Sequence
  Description of Artificial Sequence: Synthetic oligonucleotide
  Antisense strand to SEQ ID NO: 1970474
uguccaaggaagcucugag

SEQ ID NO: 1970476 - RNA, 19 nt, Artificial Sequence
  Description of Artificial Sequence: Synthetic oligonucleotide
  Sense strand starting at position 3350 of SEQ ID NO: 1880481
ccauaaaugugguugauug

SEQ ID NO: 1970477 - RNA, 19 nt, Artificial Sequence
  Description of Artificial Sequence: Synthetic oligonucleotide
  Antisense strand to SEQ ID NO: 1970476
caaucaaccacauuuaugg

SEQ ID NO: 1970478 - RNA, 19 nt, Artificial Sequence
  Description of Artificial Sequence: Synthetic oligonucleotide
  Sense strand starting at position 3351 of SEQ ID NO: 1880481
cauaaaugugguugauuga

SEQ ID NO: 1970479 - RNA, 19 nt, Artificial Sequence
  Description of Artificial Sequence: Synthetic oligonucleotide
  Antisense strand to SEQ ID NO: 1970478
ucaaucaaccacauuuaug

SEQ ID NO: 1970480 - RNA, 19 nt, Artificial Sequence
  Description of Artificial Sequence: Synthetic oligonucleotide
  Sense strand starting at position 3354 of SEQ ID NO: 1880481
aaaugugguugauugaaua

SEQ ID NO: 1970481 - RNA, 19 nt, Artificial Sequence
  Description of Artificial Sequence: Synthetic oligonucleotide
  Antisense strand to SEQ ID NO: 1970480
uauucaaucaaccacauuu

SEQ ID NO: 1970482 - RNA, 19 nt, Artificial Sequence
  Description of Artificial Sequence: Synthetic oligonucleotide
  Sense strand starting at position 3460 of SEQ ID NO: 1880481
uuggcauucucaguugaga

SEQ ID NO: 1970483 - RNA, 19 nt, Artificial Sequence
  Description of Artificial Sequence: Synthetic oligonucleotide
  Antisense strand to SEQ ID NO: 1970482
ucucaacugagaaugccaa

SEQ ID NO: 1970484 - RNA, 19 nt, Artificial Sequence
  Description of Artificial Sequence: Synthetic oligonucleotide
  Sense strand starting at position 3462 of SEQ ID NO: 1880481
ggcauucucaguugagaac

SEQ ID NO: 1970485 - RNA, 19 nt, Artificial Sequence
  Description of Artificial Sequence: Synthetic oligonucleotide
  Antisense strand to SEQ ID NO: 1970484
guucucaacugagaaugcc

SEQ ID NO: 1970486 - RNA, 19 nt, Artificial Sequence
  Description of Artificial Sequence: Synthetic oligonucleotide
  Sense strand starting at position 3463 of SEQ ID NO: 1880481
gcauucucaguugagaacu

SEQ ID NO: 1970487 - RNA, 19 nt, Artificial Sequence
  Description of Artificial Sequence: Synthetic oligonucleotide
  Antisense strand to SEQ ID NO: 1970486
aguucucaacugagaaugc

SEQ ID NO: 1970488 - RNA, 19 nt, Artificial Sequence
  Description of Artificial Sequence: Synthetic oligonucleotide
  Sense strand starting at position 3536 of SEQ ID NO: 1880481
augagcugacuuugaaauu

SEQ ID NO: 1970489 - RNA, 19 nt, Artificial Sequence
  Description of Artificial Sequence: Synthetic oligonucleotide
  Antisense strand to SEQ ID NO: 1970488
aauuucaaagucagcucau

SEQ ID NO: 1970490 - RNA, 19 nt, Artificial Sequence
  Description of Artificial Sequence: Synthetic oligonucleotide
  Sense strand starting at position 3649 of SEQ ID NO: 1880481
ggguccuagcacugauuga

SEQ ID NO: 1970491 - RNA, 19 nt, Artificial Sequence
  Description of Artificial Sequence: Synthetic oligonucleotide
  Antisense strand to SEQ ID NO: 1970490
ucaaucagugcuaggaccc

SEQ ID NO: 1970492 - RNA, 19 nt, Artificial Sequence
  Description of Artificial Sequence: Synthetic oligonucleotide
  Sense strand starting at position 3668 of SEQ ID NO: 1880481
cuuguuuguguuuagauau

SEQ ID NO: 1970493 - RNA, 19 nt, Artificial Sequence
  Description of Artificial Sequence: Synthetic oligonucleotide
  Antisense strand to SEQ ID NO: 1970492
auaucuaaacacaaacaag

SEQ ID NO: 1970494 - RNA, 19 nt, Artificial Sequence
  Description of Artificial Sequence: Synthetic oligonucleotide
  Sense strand starting at position 3736 of SEQ ID NO: 1880481
uuuggauucugauaauuug

SEQ ID NO: 1970495 - RNA, 19 nt, Artificial Sequence
  Description of Artificial Sequence: Synthetic oligonucleotide
  Antisense strand to SEQ ID NO: 1970494
caaauuaucagaauccaaa

SEQ ID NO: 1970496 - RNA, 19 nt, Artificial Sequence
  Description of Artificial Sequence: Synthetic oligonucleotide
  Sense strand starting at position 3817 of SEQ ID NO: 1880481
uuaauuccacaugagguuu

SEQ ID NO: 1970497 - RNA, 19 nt, Artificial Sequence
  Description of Artificial Sequence: Synthetic oligonucleotide
  Antisense strand to SEQ ID NO: 1970496
aaaccucauguggaauuaa

SEQ ID NO: 1970498 - RNA, 19 nt, Artificial Sequence
  Description of Artificial Sequence: Synthetic oligonucleotide
  Sense strand starting at position 3952 of SEQ ID NO: 1880481
uugacauucuuugcuuaga

SEQ ID NO: 1970499 - RNA, 19 nt, Artificial Sequence
  Description of Artificial Sequence: Synthetic oligonucleotide
  Antisense strand to SEQ ID NO: 1970498
ucuaagcaaagaaugucaa

SEQ ID NO: 1970500 - RNA, 19 nt, Artificial Sequence
  Description of Artificial Sequence: Synthetic oligonucleotide
  Sense strand starting at position 3953 of SEQ ID NO: 1880481
ugacauucuuugcuuagaa

SEQ ID NO: 1970501 - RNA, 19 nt, Artificial Sequence
  Description of Artificial Sequence: Synthetic oligonucleotide
  Antisense strand to SEQ ID NO: 1970500
uucuaagcaaagaauguca

SEQ ID NO: 1970502 - RNA, 19 nt, Artificial Sequence
  Description of Artificial Sequence: Synthetic oligonucleotide
  Sense strand starting at position 3955 of SEQ ID NO: 1880481
acauucuuugcuuagaaug

SEQ ID NO: 1970503 - RNA, 19 nt, Artificial Sequence
  Description of Artificial Sequence: Synthetic oligonucleotide
  Antisense strand to SEQ ID NO: 1970502
cauucuaagcaaagaaugu

SEQ ID NO: 1970504 - RNA, 19 nt, Artificial Sequence
  Description of Artificial Sequence: Synthetic oligonucleotide
  Sense strand starting at position 3967 of SEQ ID NO: 1880481
uagaaugugugguccugga

SEQ ID NO: 1970505 - RNA, 19 nt, Artificial Sequence
  Description of Artificial Sequence: Synthetic oligonucleotide
  Antisense strand to SEQ ID NO: 1970504
uccaggaccacacauucua

SEQ ID NO: 1970506 - RNA, 19 nt, Artificial Sequence
  Description of Artificial Sequence: Synthetic oligonucleotide
  Sense strand starting at position 48 of SEQ ID NO: 1880482
cugcauuugugaccuuaau

SEQ ID NO: 1970507 - RNA, 19 nt, Artificial Sequence
  Description of Artificial Sequence: Synthetic oligonucleotide
  Antisense strand to SEQ ID NO: 1970506
auuaaggucacaaaugcag

SEQ ID NO: 1970508 - RNA, 19 nt, Artificial Sequence
  Description of Artificial Sequence: Synthetic oligonucleotide
  Sense strand starting at position 116 of SEQ ID NO: 1880482
cuuguugaacuauagcaua

SEQ ID NO: 1970509 - RNA, 19 nt, Artificial Sequence
  Description of Artificial Sequence: Synthetic oligonucleotide
  Antisense strand to SEQ ID NO: 1970508
uaugcuauaguucaacaag

SEQ ID NO: 1970510 - RNA, 19 nt, Artificial Sequence
  Description of Artificial Sequence: Synthetic oligonucleotide
  Sense strand starting at position 336 of SEQ ID NO: 1880482
gcuagugaaagagauguuu

SEQ ID NO: 1970511 - RNA, 19 nt, Artificial Sequence
  Description of Artificial Sequence: Synthetic oligonucleotide
  Antisense strand to SEQ ID NO: 1970510
aaacaucucuuucacuagc

SEQ ID NO: 1970512 - RNA, 19 nt, Artificial Sequence
  Description of Artificial Sequence: Synthetic oligonucleotide
  Sense strand starting at position 342 of SEQ ID NO: 1880482
gaaagagauguuugcacuc

SEQ ID NO: 1970513 - RNA, 19 nt, Artificial Sequence
  Description of Artificial Sequence: Synthetic oligonucleotide
  Antisense strand to SEQ ID NO: 1970512
gagugcaaacaucucuuuc

SEQ ID NO: 1970514 - RNA, 19 nt, Artificial Sequence
  Description of Artificial Sequence: Synthetic oligonucleotide
  Sense strand starting at position 349 of SEQ ID NO: 1880482
auguuugcacucuacagau

SEQ ID NO: 1970515 - RNA, 19 nt, Artificial Sequence
  Description of Artificial Sequence: Synthetic oligonucleotide
  Antisense strand to SEQ ID NO: 1970514
aucuguagagugcaaacau

SEQ ID NO: 1970516 - RNA, 19 nt, Artificial Sequence
  Description of Artificial Sequence: Synthetic oligonucleotide
  Sense strand starting at position 574 of SEQ ID NO: 1880482
ugaagagagacuugugagu

SEQ ID NO: 1970517 - RNA, 19 nt, Artificial Sequence
  Description of Artificial Sequence: Synthetic oligonucleotide
  Antisense strand to SEQ ID NO: 1970516
acucacaagucucucuuca

SEQ ID NO: 1970518 - RNA, 19 nt, Artificial Sequence
  Description of Artificial Sequence: Synthetic oligonucleotide
  Sense strand starting at position 579 of SEQ ID NO: 1880482
agagacuugugaguaucau

SEQ ID NO: 1970519 - RNA, 19 nt, Artificial Sequence
  Description of Artificial Sequence: Synthetic oligonucleotide
  Antisense strand to SEQ ID NO: 1970518
augauacucacaagucucu

SEQ ID NO: 1970520 - RNA, 19 nt, Artificial Sequence
  Description of Artificial Sequence: Synthetic oligonucleotide
  Sense strand starting at position 580 of SEQ ID NO: 1880482
gagacuugugaguaucauc

SEQ ID NO: 1970521 - RNA, 19 nt, Artificial Sequence
  Description of Artificial Sequence: Synthetic oligonucleotide
  Antisense strand to SEQ ID NO: 1970520
gaugauacucacaagucuc

SEQ ID NO: 1970522 - RNA, 19 nt, Artificial Sequence
  Description of Artificial Sequence: Synthetic oligonucleotide
  Sense strand starting at position 588 of SEQ ID NO: 1880482
ugaguaucaucuuuaugaa

SEQ ID NO: 1970523 - RNA, 19 nt, Artificial Sequence
  Description of Artificial Sequence: Synthetic oligonucleotide
  Antisense strand to SEQ ID NO: 1970522
uucauaaagaugauacuca

SEQ ID NO: 1970524 - RNA, 19 nt, Artificial Sequence
  Description of Artificial Sequence: Synthetic oligonucleotide
  Sense strand starting at position 660 of SEQ ID NO: 1880482
aauauugugucagugaaac

SEQ ID NO: 1970525 - RNA, 19 nt, Artificial Sequence
  Description of Artificial Sequence: Synthetic oligonucleotide
  Antisense strand to SEQ ID NO: 1970524
guuucacugacacaauauu

SEQ ID NO: 1970526 - RNA, 19 nt, Artificial Sequence
  Description of Artificial Sequence: Synthetic oligonucleotide
  Sense strand starting at position 710 of SEQ ID NO: 1880482
auucuucuggucugauaug

SEQ ID NO: 1970527 - RNA, 19 nt, Artificial Sequence
  Description of Artificial Sequence: Synthetic oligonucleotide
  Antisense strand to SEQ ID NO: 1970526
cauaucagaccagaagaau

SEQ ID NO: 1970528 - RNA, 19 nt, Artificial Sequence
  Description of Artificial Sequence: Synthetic oligonucleotide
  Sense strand starting at position 881 of SEQ ID NO: 1880482
gccuauaagcacuagaaac

SEQ ID NO: 1970529 - RNA, 19 nt, Artificial Sequence
  Description of Artificial Sequence: Synthetic oligonucleotide
  Antisense strand to SEQ ID NO: 1970528
guuucuagugcuuauaggc

SEQ ID NO: 1970530 - RNA, 19 nt, Artificial Sequence
  Description of Artificial Sequence: Synthetic oligonucleotide
  Sense strand starting at position 899 of SEQ ID NO: 1880482
ccaaaugaguuaucucagu

SEQ ID NO: 1970531 - RNA, 19 nt, Artificial Sequence
  Description of Artificial Sequence: Synthetic oligonucleotide
  Antisense strand to SEQ ID NO: 1970530
acugagauaacucauuugg

SEQ ID NO: 1970532 - RNA, 19 nt, Artificial Sequence
  Description of Artificial Sequence: Synthetic oligonucleotide
  Sense strand starting at position 904 of SEQ ID NO: 1880482
ugaguuaucucaguacauu

SEQ ID NO: 1970533 - RNA, 19 nt, Artificial Sequence
  Description of Artificial Sequence: Synthetic oligonucleotide
  Antisense strand to SEQ ID NO: 1970532
aauguacugagauaacuca

SEQ ID NO: 1970534 - RNA, 19 nt, Artificial Sequence
  Description of Artificial Sequence: Synthetic oligonucleotide
  Sense strand starting at position 1051 of SEQ ID NO: 1880482
ggaguauauaaauaugugu

SEQ ID NO: 1970535 - RNA, 19 nt, Artificial Sequence
  Description of Artificial Sequence: Synthetic oligonucleotide
  Antisense strand to SEQ ID NO: 1970534
acacauauuuauauacucc

SEQ ID NO: 1970536 - RNA, 19 nt, Artificial Sequence
  Description of Artificial Sequence: Synthetic oligonucleotide
  Sense strand starting at position 1226 of SEQ ID NO: 1880482
acuaaauaugcucaggugu

SEQ ID NO: 1970537 - RNA, 19 nt, Artificial Sequence
  Description of Artificial Sequence: Synthetic oligonucleotide
  Antisense strand to SEQ ID NO: 1970536
acaccugagcauauuuagu

SEQ ID NO: 1970538 - RNA, 19 nt, Artificial Sequence
  Description of Artificial Sequence: Synthetic oligonucleotide
  Sense strand starting at position 1287 of SEQ ID NO: 1880482
uaagaaauuguuugauguc

SEQ ID NO: 1970539 - RNA, 19 nt, Artificial Sequence
  Description of Artificial Sequence: Synthetic oligonucleotide
  Antisense strand to SEQ ID NO: 1970538
gacaucaaacaauuucuua

SEQ ID NO: 1970540 - RNA, 19 nt, Artificial Sequence
  Description of Artificial Sequence: Synthetic oligonucleotide
  Sense strand starting at position 1395 of SEQ ID NO: 1880482
auacaagguucugcuaaag

SEQ ID NO: 1970541 - RNA, 19 nt, Artificial Sequence
  Description of Artificial Sequence: Synthetic oligonucleotide
  Antisense strand to SEQ ID NO: 1970540
cuuuagcagaaccuuguau

SEQ ID NO: 1970542 - RNA, 19 nt, Artificial Sequence
  Description of Artificial Sequence: Synthetic oligonucleotide
  Sense strand starting at position 1405 of SEQ ID NO: 1880482
cugcuaaagccucagaaau

SEQ ID NO: 1970543 - RNA, 19 nt, Artificial Sequence
  Description of Artificial Sequence: Synthetic oligonucleotide
  Antisense strand to SEQ ID NO: 1970542
auuucugaggcuuuagcag

SEQ ID NO: 1970544 - RNA, 19 nt, Artificial Sequence
  Description of Artificial Sequence: Synthetic oligonucleotide
  Sense strand starting at position 1461 of SEQ ID NO: 1880482
ugcuuauuauaguuaggaa

SEQ ID NO: 1970545 - RNA, 19 nt, Artificial Sequence
  Description of Artificial Sequence: Synthetic oligonucleotide
  Antisense strand to SEQ ID NO: 1970544
uuccuaacuauaauaagca

SEQ ID NO: 1970546 - RNA, 19 nt, Artificial Sequence
  Description of Artificial Sequence: Synthetic oligonucleotide
  Sense strand starting at position 1561 of SEQ ID NO: 1880482
gcauuauuaugaguagaag

SEQ ID NO: 1970547 - RNA, 19 nt, Artificial Sequence
  Description of Artificial Sequence: Synthetic oligonucleotide
  Antisense strand to SEQ ID NO: 1970546
cuucuacucauaauaaugc

SEQ ID NO: 1970548 - RNA, 19 nt, Artificial Sequence
  Description of Artificial Sequence: Synthetic oligonucleotide
  Sense strand starting at position 1626 of SEQ ID NO: 1880482
aguugugaggaacaaguau

SEQ ID NO: 1970549 - RNA, 19 nt, Artificial Sequence
  Description of Artificial Sequence: Synthetic oligonucleotide
  Antisense strand to SEQ ID NO: 1970548
auacuuguuccucacaacu

SEQ ID NO: 1970550 - RNA, 19 nt, Artificial Sequence
  Description of Artificial Sequence: Synthetic oligonucleotide
  Sense strand starting at position 1735 of SEQ ID NO: 1880482
uaaugaaagugcuuacuug

SEQ ID NO: 1970551 - RNA, 19 nt, Artificial Sequence
  Description of Artificial Sequence: Synthetic oligonucleotide
  Antisense strand to SEQ ID NO: 1970550
caaguaagcacuuucauua

SEQ ID NO: 1970552 - RNA, 19 nt, Artificial Sequence
  Description of Artificial Sequence: Synthetic oligonucleotide
  Sense strand starting at position 1736 of SEQ ID NO: 1880482
aaugaaagugcuuacuugu

SEQ ID NO: 1970553 - RNA, 19 nt, Artificial Sequence
  Description of Artificial Sequence: Synthetic oligonucleotide
  Antisense strand to SEQ ID NO: 1970552
acaaguaagcacuuucauu

SEQ ID NO: 1970554 - RNA, 19 nt, Artificial Sequence
  Description of Artificial Sequence: Synthetic oligonucleotide
  Sense strand starting at position 1982 of SEQ ID NO: 1880482
ugucuaugauauuugugua

SEQ ID NO: 1970555 - RNA, 19 nt, Artificial Sequence
  Description of Artificial Sequence: Synthetic oligonucleotide
  Antisense strand to SEQ ID NO: 1970554
uacacaaauaucauagaca

SEQ ID NO: 1970556 - RNA, 19 nt, Artificial Sequence
  Description of Artificial Sequence: Synthetic oligonucleotide
  Sense strand starting at position 1983 of SEQ ID NO: 1880482
gucuaugauauuuguguau

SEQ ID NO: 1970557 - RNA, 19 nt, Artificial Sequence
  Description of Artificial Sequence: Synthetic oligonucleotide
  Antisense strand to SEQ ID NO: 1970556
auacacaaauaucauagac

SEQ ID NO: 1970558 - RNA, 19 nt, Artificial Sequence
  Description of Artificial Sequence: Synthetic oligonucleotide
  Sense strand starting at position 2068 of SEQ ID NO: 1880482
cuugacucugcugaugagu

SEQ ID NO: 1970559 - RNA, 19 nt, Artificial Sequence
  Description of Artificial Sequence: Synthetic oligonucleotide
  Antisense strand to SEQ ID NO: 1970558
acucaucagcagagucaag

SEQ ID NO: 1970560 - RNA, 19 nt, Artificial Sequence
  Description of Artificial Sequence: Synthetic oligonucleotide
  Sense strand starting at position 2071 of SEQ ID NO: 1880482
gacucugcugaugagugau

SEQ ID NO: 1970561 - RNA, 19 nt, Artificial Sequence
  Description of Artificial Sequence: Synthetic oligonucleotide
  Antisense strand to SEQ ID NO: 1970560
aucacucaucagcagaguc

SEQ ID NO: 1970562 - RNA, 19 nt, Artificial Sequence
  Description of Artificial Sequence: Synthetic oligonucleotide
  Sense strand starting at position 2091 of SEQ ID NO: 1880482
aggucacagaguuguuaaa

SEQ ID NO: 1970563 - RNA, 19 nt, Artificial Sequence
  Description of Artificial Sequence: Synthetic oligonucleotide
  Antisense strand to SEQ ID NO: 1970562
uuuaacaacucugugaccu

SEQ ID NO: 1970564 - RNA, 19 nt, Artificial Sequence
  Description of Artificial Sequence: Synthetic oligonucleotide
  Sense strand starting at position 2128 of SEQ ID NO: 1880482
gcucucugacagggaaguu

SEQ ID NO: 1970565 - RNA, 19 nt, Artificial Sequence
  Description of Artificial Sequence: Synthetic oligonucleotide
  Antisense strand to SEQ ID NO: 1970564
aacuucccugucagagagc

SEQ ID NO: 1970566 - RNA, 19 nt, Artificial Sequence
  Description of Artificial Sequence: Synthetic oligonucleotide
  Sense strand starting at position 2340 of SEQ ID NO: 1880482
ugacgaugccucuaagaaa

SEQ ID NO: 1970567 - RNA, 19 nt, Artificial Sequence
  Description of Artificial Sequence: Synthetic oligonucleotide
  Antisense strand to SEQ ID NO: 1970566
uuucuuagaggcaucguca

SEQ ID NO: 1970568 - RNA, 19 nt, Artificial Sequence
  Description of Artificial Sequence: Synthetic oligonucleotide
  Sense strand starting at position 2397 of SEQ ID NO: 1880482
ccgaaaucucuagguccca

SEQ ID NO: 1970569 - RNA, 19 nt, Artificial Sequence
  Description of Artificial Sequence: Synthetic oligonucleotide
  Antisense strand to SEQ ID NO: 1970568
ugggaccuagagauuucgg

SEQ ID NO: 1970570 - RNA, 19 nt, Artificial Sequence
  Description of Artificial Sequence: Synthetic oligonucleotide
  Sense strand starting at position 2398 of SEQ ID NO: 1880482
cgaaaucucuaggucccau

SEQ ID NO: 1970571 - RNA, 19 nt, Artificial Sequence
  Description of Artificial Sequence: Synthetic oligonucleotide
  Antisense strand to SEQ ID NO: 1970570
augggaccuagagauuucg

SEQ ID NO: 1970572 - RNA, 19 nt, Artificial Sequence
  Description of Artificial Sequence: Synthetic oligonucleotide
  Sense strand starting at position 2432 of SEQ ID NO: 1880482
gaaagaacgucaucaguug

SEQ ID NO: 1970573 - RNA, 19 nt, Artificial Sequence
  Description of Artificial Sequence: Synthetic oligonucleotide
  Antisense strand to SEQ ID NO: 1970572
caacugaugacguucuuuc

SEQ ID NO: 1970574 - RNA, 19 nt, Artificial Sequence
  Description of Artificial Sequence: Synthetic oligonucleotide
  Sense strand starting at position 2756 of SEQ ID NO: 1880482
agauaugacuaacaaggaa

SEQ ID NO: 1970575 - RNA, 19 nt, Artificial Sequence
  Description of Artificial Sequence: Synthetic oligonucleotide
  Antisense strand to SEQ ID NO: 1970574
uuccuuguuagucauaucu

SEQ ID NO: 1970576 - RNA, 19 nt, Artificial Sequence
  Description of Artificial Sequence: Synthetic oligonucleotide
  Sense strand starting at position 3100 of SEQ ID NO: 1880482
ucuagagugggcuacuauu

SEQ ID NO: 1970577 - RNA, 19 nt, Artificial Sequence
  Description of Artificial Sequence: Synthetic oligonucleotide
  Antisense strand to SEQ ID NO: 1970576
aauaguagcccacucuaga

SEQ ID NO: 1970578 - RNA, 19 nt, Artificial Sequence
  Description of Artificial Sequence: Synthetic oligonucleotide
  Sense strand starting at position 3110 of SEQ ID NO: 1880482
gcuacuauuaccggaagga

SEQ ID NO: 1970579 - RNA, 19 nt, Artificial Sequence
  Description of Artificial Sequence: Synthetic oligonucleotide
  Antisense strand to SEQ ID NO: 1970578
uccuuccgguaauaguagc

SEQ ID NO: 1970580 - RNA, 19 nt, Artificial Sequence
  Description of Artificial Sequence: Synthetic oligonucleotide
  Sense strand starting at position 3188 of SEQ ID NO: 1880482
gcgcaaaguaaugaaggaa

SEQ ID NO: 1970581 - RNA, 19 nt, Artificial Sequence
  Description of Artificial Sequence: Synthetic oligonucleotide
  Antisense strand to SEQ ID NO: 1970580
uuccuucauuacuuugcgc

SEQ ID NO: 1970582 - RNA, 19 nt, Artificial Sequence
  Description of Artificial Sequence: Synthetic oligonucleotide
  Sense strand starting at position 3733 of SEQ ID NO: 1880482
cuauuuagaugucuucugu

SEQ ID NO: 1970583 - RNA, 19 nt, Artificial Sequence
  Description of Artificial Sequence: Synthetic oligonucleotide
  Antisense strand to SEQ ID NO: 1970582
acagaagacaucuaaauag

SEQ ID NO: 1970584 - RNA, 19 nt, Artificial Sequence
  Description of Artificial Sequence: Synthetic oligonucleotide
  Sense strand starting at position 3875 of SEQ ID NO: 1880482
guagauuaucaggaccugu

SEQ ID NO: 1970585 - RNA, 19 nt, Artificial Sequence
  Description of Artificial Sequence: Synthetic oligonucleotide
  Antisense strand to SEQ ID NO: 1970584
acagguccugauaaucuac

SEQ ID NO: 1970586 - RNA, 19 nt, Artificial Sequence
  Description of Artificial Sequence: Synthetic oligonucleotide
  Sense strand starting at position 111 of SEQ ID NO: 1880483
uggucaucaguugaauacu

SEQ ID NO: 1970587 - RNA, 19 nt, Artificial Sequence
  Description of Artificial Sequence: Synthetic oligonucleotide
  Antisense strand to SEQ ID NO: 1970586
aguauucaacugaugacca

SEQ ID NO: 1970588 - RNA, 19 nt, Artificial Sequence
  Description of Artificial Sequence: Synthetic oligonucleotide
  Sense strand starting at position 367 of SEQ ID NO: 1880483
ccuuaagaaccaggaguau

SEQ ID NO: 1970589 - RNA, 19 nt, Artificial Sequence
  Description of Artificial Sequence: Synthetic oligonucleotide
  Antisense strand to SEQ ID NO: 1970588
auacuccugguucuuaagg

SEQ ID NO: 1970590 - RNA, 19 nt, Artificial Sequence
  Description of Artificial Sequence: Synthetic oligonucleotide
  Sense strand starting at position 376 of SEQ ID NO: 1880483
ccaggaguauaguuuauaa

SEQ ID NO: 1970591 - RNA, 19 nt, Artificial Sequence
  Description of Artificial Sequence: Synthetic oligonucleotide
  Antisense strand to SEQ ID NO: 1970590
uuauaaacuauacuccugg

SEQ ID NO: 1970592 - RNA, 19 nt, Artificial Sequence
  Description of Artificial Sequence: Synthetic oligonucleotide
  Sense strand starting at position 460 of SEQ ID NO: 1880483
aagccuacguaaguaauuu

SEQ ID NO: 1970593 - RNA, 19 nt, Artificial Sequence
  Description of Artificial Sequence: Synthetic oligonucleotide
  Antisense strand to SEQ ID NO: 1970592
aaauuacuuacguaggcuu

SEQ ID NO: 1970594 - RNA, 19 nt, Artificial Sequence
  Description of Artificial Sequence: Synthetic oligonucleotide
  Sense strand starting at position 666 of SEQ ID NO: 1880483
guauaagaugccuagguua

SEQ ID NO: 1970595 - RNA, 19 nt, Artificial Sequence
  Description of Artificial Sequence: Synthetic oligonucleotide
  Antisense strand to SEQ ID NO: 1970594
uaaccuaggcaucuuauac

SEQ ID NO: 1970596 - RNA, 19 nt, Artificial Sequence
  Description of Artificial Sequence: Synthetic oligonucleotide
  Sense strand starting at position 788 of SEQ ID NO: 1880483
auuucucuguugcuagaca

SEQ ID NO: 1970597 - RNA, 19 nt, Artificial Sequence
  Description of Artificial Sequence: Synthetic oligonucleotide
  Antisense strand to SEQ ID NO: 1970596
ugucuagcaacagagaaau

SEQ ID NO: 1970598 - RNA, 19 nt, Artificial Sequence
  Description of Artificial Sequence: Synthetic oligonucleotide
  Sense strand starting at position 1228 of SEQ ID NO: 1880483
ugaugugaaaguggugaca

SEQ ID NO: 1970599 - RNA, 19 nt, Artificial Sequence
  Description of Artificial Sequence: Synthetic oligonucleotide
  Antisense strand to SEQ ID NO: 1970598
ugucaccacuuucacauca

SEQ ID NO: 1970600 - RNA, 19 nt, Artificial Sequence
  Description of Artificial Sequence: Synthetic oligonucleotide
  Sense strand starting at position 1343 of SEQ ID NO: 1880483
ugcuaucuuccagaaauga

SEQ ID NO: 1970601 - RNA, 19 nt, Artificial Sequence
  Description of Artificial Sequence: Synthetic oligonucleotide
  Antisense strand to SEQ ID NO: 1970600
ucauuucuggaagauagca

SEQ ID NO: 1970602 - RNA, 19 nt, Artificial Sequence
  Description of Artificial Sequence: Synthetic oligonucleotide
  Sense strand starting at position 1480 of SEQ ID NO: 1880483
augagaacuuaaguugcaa

SEQ ID NO: 1970603 - RNA, 19 nt, Artificial Sequence
  Description of Artificial Sequence: Synthetic oligonucleotide
  Antisense strand to SEQ ID NO: 1970602
uugcaacuuaaguucucau

SEQ ID NO: 1970604 - RNA, 19 nt, Artificial Sequence
  Description of Artificial Sequence: Synthetic oligonucleotide
  Sense strand starting at position 1519 of SEQ ID NO: 1880483
gugaucuagcauuaaacac

SEQ ID NO: 1970605 - RNA, 19 nt, Artificial Sequence
  Description of Artificial Sequence: Synthetic oligonucleotide
  Antisense strand to SEQ ID NO: 1970604
guguuuaaugcuagaucac

SEQ ID NO: 1970606 - RNA, 19 nt, Artificial Sequence
  Description of Artificial Sequence: Synthetic oligonucleotide
  Sense strand starting at position 1862 of SEQ ID NO: 1880483
gggagucagcucgaacuca

SEQ ID NO: 1970607 - RNA, 19 nt, Artificial Sequence
  Description of Artificial Sequence: Synthetic oligonucleotide
  Antisense strand to SEQ ID NO: 1970606
ugaguucgagcugacuccc

SEQ ID NO: 1970608 - RNA, 19 nt, Artificial Sequence
  Description of Artificial Sequence: Synthetic oligonucleotide
  Sense strand starting at position 2366 of SEQ ID NO: 1880483
gcgguauguggaaggaguu

SEQ ID NO: 1970609 - RNA, 19 nt, Artificial Sequence
  Description of Artificial Sequence: Synthetic oligonucleotide
  Antisense strand to SEQ ID NO: 1970608
aacuccuuccacauaccgc

SEQ ID NO: 1970610 - RNA, 19 nt, Artificial Sequence
  Description of Artificial Sequence: Synthetic oligonucleotide
  Sense strand starting at position 2497 of SEQ ID NO: 1880483
ucucuuucgagagagugga

SEQ ID NO: 1970611 - RNA, 19 nt, Artificial Sequence
  Description of Artificial Sequence: Synthetic oligonucleotide
  Antisense strand to SEQ ID NO: 1970610
uccacucucucgaaagaga

SEQ ID NO: 1970612 - RNA, 19 nt, Artificial Sequence
  Description of Artificial Sequence: Synthetic oligonucleotide
  Sense strand starting at position 2513 of SEQ ID NO: 1880483
ggacuagacccuggauucu

SEQ ID NO: 1970613 - RNA, 19 nt, Artificial Sequence
  Description of Artificial Sequence: Synthetic oligonucleotide
  Antisense strand to SEQ ID NO: 1970612
agaauccagggucuagucc

SEQ ID NO: 1970614 - RNA, 19 nt, Artificial Sequence
  Description of Artificial Sequence: Synthetic oligonucleotide
  Sense strand starting at position 2568 of SEQ ID NO: 1880483
ucacuaugugaggguaaca

SEQ ID NO: 1970615 - RNA, 19 nt, Artificial Sequence
  Description of Artificial Sequence: Synthetic oligonucleotide
  Antisense strand to SEQ ID NO: 1970614
uguuacccucacauaguga

SEQ ID NO: 1970616 - RNA, 19 nt, Artificial Sequence
  Description of Artificial Sequence: Synthetic oligonucleotide
  Sense strand starting at position 2579 of SEQ ID NO: 1880483
ggguaacaggcuugaagaa

SEQ ID NO: 1970617 - RNA, 19 nt, Artificial Sequence
  Description of Artificial Sequence: Synthetic oligonucleotide
  Antisense strand to SEQ ID NO: 1970616
uucuucaagccuguuaccc

SEQ ID NO: 1970618 - RNA, 19 nt, Artificial Sequence
  Description of Artificial Sequence: Synthetic oligonucleotide
  Sense strand starting at position 2592 of SEQ ID NO: 1880483
gaagaacucucguuggaga

SEQ ID NO: 1970619 - RNA, 19 nt, Artificial Sequence
  Description of Artificial Sequence: Synthetic oligonucleotide
  Antisense strand to SEQ ID NO: 1970618
ucuccaacgagaguucuuc

SEQ ID NO: 1970620 - RNA, 19 nt, Artificial Sequence
  Description of Artificial Sequence: Synthetic oligonucleotide
  Sense strand starting at position 2593 of SEQ ID NO: 1880483
aagaacucucguuggagaa

SEQ ID NO: 1970621 - RNA, 19 nt, Artificial Sequence
  Description of Artificial Sequence: Synthetic oligonucleotide
  Antisense strand to SEQ ID NO: 1970620
uucuccaacgagaguucuu

SEQ ID NO: 1970622 - RNA, 19 nt, Artificial Sequence
  Description of Artificial Sequence: Synthetic oligonucleotide
  Sense strand starting at position 2594 of SEQ ID NO: 1880483
agaacucucguuggagaag

SEQ ID NO: 1970623 - RNA, 19 nt, Artificial Sequence
  Description of Artificial Sequence: Synthetic oligonucleotide
  Antisense strand to SEQ ID NO: 1970622
cuucuccaacgagaguucu

SEQ ID NO: 1970624 - RNA, 19 nt, Artificial Sequence
  Description of Artificial Sequence: Synthetic oligonucleotide
  Sense strand starting at position 2861 of SEQ ID NO: 1880483
uuaggaucaagauguauug

SEQ ID NO: 1970625 - RNA, 19 nt, Artificial Sequence
  Description of Artificial Sequence: Synthetic oligonucleotide
  Antisense strand to SEQ ID NO: 1970624
caauacaucuugauccuaa

SEQ ID NO: 1970626 - RNA, 19 nt, Artificial Sequence
  Description of Artificial Sequence: Synthetic oligonucleotide
  Sense strand starting at position 2872 of SEQ ID NO: 1880483
auguauugacuuugaggga

SEQ ID NO: 1970627 - RNA, 19 nt, Artificial Sequence
  Description of Artificial Sequence: Synthetic oligonucleotide
  Antisense strand to SEQ ID NO: 1970626
ucccucaaagucaauacau

SEQ ID NO: 1970628 - RNA, 19 nt, Artificial Sequence
  Description of Artificial Sequence: Synthetic oligonucleotide
  Sense strand starting at position 2993 of SEQ ID NO: 1880483
acaagagucuaaccgauga

SEQ ID NO: 1970629 - RNA, 19 nt, Artificial Sequence
  Description of Artificial Sequence: Synthetic oligonucleotide
  Antisense strand to SEQ ID NO: 1970628
ucaucgguuagacucuugu

SEQ ID NO: 1970630 - RNA, 19 nt, Artificial Sequence
  Description of Artificial Sequence: Synthetic oligonucleotide
  Sense strand starting at position 2997 of SEQ ID NO: 1880483
gagucuaaccgaugaggga

SEQ ID NO: 1970631 - RNA, 19 nt, Artificial Sequence
  Description of Artificial Sequence: Synthetic oligonucleotide
  Antisense strand to SEQ ID NO: 1970630
ucccucaucgguuagacuc

SEQ ID NO: 1970632 - RNA, 19 nt, Artificial Sequence
  Description of Artificial Sequence: Synthetic oligonucleotide
  Sense strand starting at position 3023 of SEQ ID NO: 1880483
aagagaucuugacuuucga

SEQ ID NO: 1970633 - RNA, 19 nt, Artificial Sequence
  Description of Artificial Sequence: Synthetic oligonucleotide
  Antisense strand to SEQ ID NO: 1970632
ucgaaagucaagaucucuu

SEQ ID NO: 1970634 - RNA, 19 nt, Artificial Sequence
  Description of Artificial Sequence: Synthetic oligonucleotide
  Sense strand starting at position 3150 of SEQ ID NO: 1880483
aggagaagcuacuuucuga

SEQ ID NO: 1970635 - RNA, 19 nt, Artificial Sequence
  Description of Artificial Sequence: Synthetic oligonucleotide
  Antisense strand to SEQ ID NO: 1970634
ucagaaaguagcuucuccu

SEQ ID NO: 1970636 - RNA, 19 nt, Artificial Sequence
  Description of Artificial Sequence: Synthetic oligonucleotide
  Sense strand starting at position 3328 of SEQ ID NO: 1880483
auaaauuaagucugcugga

SEQ ID NO: 1970637 - RNA, 19 nt, Artificial Sequence
  Description of Artificial Sequence: Synthetic oligonucleotide
  Antisense strand to SEQ ID NO: 1970636
uccagcagacuuaauuuau

SEQ ID NO: 1970638 - RNA, 19 nt, Artificial Sequence
  Description of Artificial Sequence: Synthetic oligonucleotide
  Sense strand starting at position 3427 of SEQ ID NO: 1880483
cuugcuucugaugaauuaa

SEQ ID NO: 1970639 - RNA, 19 nt, Artificial Sequence
  Description of Artificial Sequence: Synthetic oligonucleotide
  Antisense strand to SEQ ID NO: 1970638
uuaauucaucagaagcaag

SEQ ID NO: 1970640 - RNA, 19 nt, Artificial Sequence
  Description of Artificial Sequence: Synthetic oligonucleotide
  Sense strand starting at position 3527 of SEQ ID NO: 1880483
aggaauagcuuaguaggua

SEQ ID NO: 1970641 - RNA, 19 nt, Artificial Sequence
  Description of Artificial Sequence: Synthetic oligonucleotide
  Antisense strand to SEQ ID NO: 1970640
uaccuacuaagcuauuccu

SEQ ID NO: 1970642 - RNA, 19 nt, Artificial Sequence
  Description of Artificial Sequence: Synthetic oligonucleotide
  Sense strand starting at position 3551 of SEQ ID NO: 1880483
auaauacagcguuauaaga

SEQ ID NO: 1970643 - RNA, 19 nt, Artificial Sequence
  Description of Artificial Sequence: Synthetic oligonucleotide
  Antisense strand to SEQ ID NO: 1970642
ucuuauaacgcuguauuau

SEQ ID NO: 1970644 - RNA, 19 nt, Artificial Sequence
  Description of Artificial Sequence: Synthetic oligonucleotide
  Sense strand starting at position 3644 of SEQ ID NO: 1880483
caaaguaaagauugucuga

SEQ ID NO: 1970645 - RNA, 19 nt, Artificial Sequence
  Description of Artificial Sequence: Synthetic oligonucleotide
  Antisense strand to SEQ ID NO: 1970644
ucagacaaucuuuacuuug

SEQ ID NO: 1970646 - RNA, 19 nt, Artificial Sequence
  Description of Artificial Sequence: Synthetic oligonucleotide
  Sense strand starting at position 3646 of SEQ ID NO: 1880483
aaguaaagauugucugagu

SEQ ID NO: 1970647 - RNA, 19 nt, Artificial Sequence
  Description of Artificial Sequence: Synthetic oligonucleotide
  Antisense strand to SEQ ID NO: 1970646
acucagacaaucuuuacuu

SEQ ID NO: 1970648 - RNA, 19 nt, Artificial Sequence
  Description of Artificial Sequence: Synthetic oligonucleotide
  Sense strand starting at position 3647 of SEQ ID NO: 1880483
aguaaagauugucugagua

SEQ ID NO: 1970649 - RNA, 19 nt, Artificial Sequence
  Description of Artificial Sequence: Synthetic oligonucleotide
  Antisense strand to SEQ ID NO: 1970648
uacucagacaaucuuuacu

SEQ ID NO: 1970650 - RNA, 19 nt, Artificial Sequence
  Description of Artificial Sequence: Synthetic oligonucleotide
  Sense strand starting at position 3651 of SEQ ID NO: 1880483
aagauugucugaguaaauu

SEQ ID NO: 1970651 - RNA, 19 nt, Artificial Sequence
  Description of Artificial Sequence: Synthetic oligonucleotide
  Antisense strand to SEQ ID NO: 1970650
aauuuacucagacaaucuu

SEQ ID NO: 1970652 - RNA, 19 nt, Artificial Sequence
  Description of Artificial Sequence: Synthetic oligonucleotide
  Sense strand starting at position 3672 of SEQ ID NO: 1880483
ggauguuugcauuacuaau

SEQ ID NO: 1970653 - RNA, 19 nt, Artificial Sequence
  Description of Artificial Sequence: Synthetic oligonucleotide
  Antisense strand to SEQ ID NO: 1970652
auuaguaaugcaaacaucc

SEQ ID NO: 1970654 - RNA, 19 nt, Artificial Sequence
  Description of Artificial Sequence: Synthetic oligonucleotide
  Sense strand starting at position 3828 of SEQ ID NO: 1880483
aggugaaucuuguuuacag

SEQ ID NO: 1970655 - RNA, 19 nt, Artificial Sequence
  Description of Artificial Sequence: Synthetic oligonucleotide
  Antisense strand to SEQ ID NO: 1970654
cuguaaacaagauucaccu

SEQ ID NO: 1970656 - RNA, 19 nt, Artificial Sequence
  Description of Artificial Sequence: Synthetic oligonucleotide
  Sense strand starting at position 3830 of SEQ ID NO: 1880483
gugaaucuuguuuacagga

SEQ ID NO: 1970657 - RNA, 19 nt, Artificial Sequence
  Description of Artificial Sequence: Synthetic oligonucleotide
  Antisense strand to SEQ ID NO: 1970656
uccuguaaacaagauucac

SEQ ID NO: 1970658 - RNA, 19 nt, Artificial Sequence
  Description of Artificial Sequence: Synthetic oligonucleotide
  Sense strand starting at position 3859 of SEQ ID NO: 1880483
ggcaauacaugauuagauu

SEQ ID NO: 1970659 - RNA, 19 nt, Artificial Sequence
  Description of Artificial Sequence: Synthetic oligonucleotide
  Antisense strand to SEQ ID NO: 1970658
aaucuaaucauguauugcc

SEQ ID NO: 1970660 - RNA, 19 nt, Artificial Sequence
  Description of Artificial Sequence: Synthetic oligonucleotide
  Sense strand starting at position 3873 of SEQ ID NO: 1880483
agauuuaccuuugauaaag

SEQ ID NO: 1970661 - RNA, 19 nt, Artificial Sequence
  Description of Artificial Sequence: Synthetic oligonucleotide
  Antisense strand to SEQ ID NO: 1970660
cuuuaucaaagguaaaucu

SEQ ID NO: 1970662 - RNA, 19 nt, Artificial Sequence
  Description of Artificial Sequence: Synthetic oligonucleotide
  Sense strand starting at position 3933 of SEQ ID NO: 1880483
aguauaauggcugggaaca

SEQ ID NO: 1970663 - RNA, 19 nt, Artificial Sequence
  Description of Artificial Sequence: Synthetic oligonucleotide
  Antisense strand to SEQ ID NO: 1970662
uguucccagccauuauacu

SEQ ID NO: 1970664 - RNA, 19 nt, Artificial Sequence
  Description of Artificial Sequence: Synthetic oligonucleotide
  Sense strand starting at position 3934 of SEQ ID NO: 1880483
guauaauggcugggaacau

SEQ ID NO: 1970665 - RNA, 19 nt, Artificial Sequence
  Description of Artificial Sequence: Synthetic oligonucleotide
  Antisense strand to SEQ ID NO: 1970664
auguucccagccauuauac

SEQ ID NO: 1970666 - RNA, 19 nt, Artificial Sequence
  Description of Artificial Sequence: Synthetic oligonucleotide
  Sense strand starting at position 804 of SEQ ID NO: 1880484
acuugacauuggcuugaau

SEQ ID NO: 1970667 - RNA, 19 nt, Artificial Sequence
  Description of Artificial Sequence: Synthetic oligonucleotide
  Antisense strand to SEQ ID NO: 1970666
auucaagccaaugucaagu

SEQ ID NO: 1970668 - RNA, 19 nt, Artificial Sequence
  Description of Artificial Sequence: Synthetic oligonucleotide
  Sense strand starting at position 828 of SEQ ID NO: 1880484
uuugucuauccguaagacu

SEQ ID NO: 1970669 - RNA, 19 nt, Artificial Sequence
  Description of Artificial Sequence: Synthetic oligonucleotide
  Antisense strand to SEQ ID NO: 1970668
agucuuacggauagacaaa

SEQ ID NO: 1970670 - RNA, 19 nt, Artificial Sequence
  Description of Artificial Sequence: Synthetic oligonucleotide
  Sense strand starting at position 904 of SEQ ID NO: 1880484
gcugaauaaguuuacacca

SEQ ID NO: 1970671 - RNA, 19 nt, Artificial Sequence
  Description of Artificial Sequence: Synthetic oligonucleotide
  Antisense strand to SEQ ID NO: 1970670
ugguguaaacuuauucagc

SEQ ID NO: 1970672 - RNA, 19 nt, Artificial Sequence
  Description of Artificial Sequence: Synthetic oligonucleotide
  Sense strand starting at position 1012 of SEQ ID NO: 1880484
aagggucaucucugcuaaa

SEQ ID NO: 1970673 - RNA, 19 nt, Artificial Sequence
  Description of Artificial Sequence: Synthetic oligonucleotide
  Antisense strand to SEQ ID NO: 1970672
uuuagcagagaugacccuu

SEQ ID NO: 1970674 - RNA, 19 nt, Artificial Sequence
  Description of Artificial Sequence: Synthetic oligonucleotide
  Sense strand starting at position 1013 of SEQ ID NO: 1880484
agggucaucucugcuaaag

SEQ ID NO: 1970675 - RNA, 19 nt, Artificial Sequence
  Description of Artificial Sequence: Synthetic oligonucleotide
  Antisense strand to SEQ ID NO: 1970674
cuuuagcagagaugacccu

SEQ ID NO: 1970676 - RNA, 19 nt, Artificial Sequence
  Description of Artificial Sequence: Synthetic oligonucleotide
  Sense strand starting at position 1024 of SEQ ID NO: 1880484
ugcuaaagauuugaggaaa

SEQ ID NO: 1970677 - RNA, 19 nt, Artificial Sequence
  Description of Artificial Sequence: Synthetic oligonucleotide
  Antisense strand to SEQ ID NO: 1970676
uuuccucaaaucuuuagca

SEQ ID NO: 1970678 - RNA, 19 nt, Artificial Sequence
  Description of Artificial Sequence: Synthetic oligonucleotide
  Sense strand starting at position 1036 of SEQ ID NO: 1880484
gaggaaauuugugauucca

SEQ ID NO: 1970679 - RNA, 19 nt, Artificial Sequence
  Description of Artificial Sequence: Synthetic oligonucleotide
  Antisense strand to SEQ ID NO: 1970678
uggaaucacaaauuuccuc

SEQ ID NO: 1970680 - RNA, 19 nt, Artificial Sequence
  Description of Artificial Sequence: Synthetic oligonucleotide
  Sense strand starting at position 1091 of SEQ ID NO: 1880484
ccacgucauuacuuugaau

SEQ ID NO: 1970681 - RNA, 19 nt, Artificial Sequence
  Description of Artificial Sequence: Synthetic oligonucleotide
  Antisense strand to SEQ ID NO: 1970680
auucaaaguaaugacgugg

SEQ ID NO: 1970682 - RNA, 19 nt, Artificial Sequence
  Description of Artificial Sequence: Synthetic oligonucleotide
  Sense strand starting at position 1093 of SEQ ID NO: 1880484
acgucauuacuuugaauug

SEQ ID NO: 1970683 - RNA, 19 nt, Artificial Sequence
  Description of Artificial Sequence: Synthetic oligonucleotide
  Antisense strand to SEQ ID NO: 1970682
caauucaaaguaaugacgu

SEQ ID NO: 1970684 - RNA, 19 nt, Artificial Sequence
  Description of Artificial Sequence: Synthetic oligonucleotide
  Sense strand starting at position 1100 of SEQ ID NO: 1880484
uacuuugaauuguuagagu

SEQ ID NO: 1970685 - RNA, 19 nt, Artificial Sequence
  Description of Artificial Sequence: Synthetic oligonucleotide
  Antisense strand to SEQ ID NO: 1970684
acucuaacaauucaaagua

SEQ ID NO: 1970686 - RNA, 19 nt, Artificial Sequence
  Description of Artificial Sequence: Synthetic oligonucleotide
  Sense strand starting at position 1211 of SEQ ID NO: 1880484
gggagaauguaugcaggua

SEQ ID NO: 1970687 - RNA, 19 nt, Artificial Sequence
  Description of Artificial Sequence: Synthetic oligonucleotide
  Antisense strand to SEQ ID NO: 1970686
uaccugcauacauucuccc

SEQ ID NO: 1970688 - RNA, 19 nt, Artificial Sequence
  Description of Artificial Sequence: Synthetic oligonucleotide
  Sense strand starting at position 1212 of SEQ ID NO: 1880484
ggagaauguaugcagguau

SEQ ID NO: 1970689 - RNA, 19 nt, Artificial Sequence
  Description of Artificial Sequence: Synthetic oligonucleotide
  Antisense strand to SEQ ID NO: 1970688
auaccugcauacauucucc

SEQ ID NO: 1970690 - RNA, 19 nt, Artificial Sequence
  Description of Artificial Sequence: Synthetic oligonucleotide
  Sense strand starting at position 1224 of SEQ ID NO: 1880484
cagguauguguguaugaaa

SEQ ID NO: 1970691 - RNA, 19 nt, Artificial Sequence
  Description of Artificial Sequence: Synthetic oligonucleotide
  Antisense strand to SEQ ID NO: 1970690
uuucauacacacauaccug

SEQ ID NO: 1970692 - RNA, 19 nt, Artificial Sequence
  Description of Artificial Sequence: Synthetic oligonucleotide
  Sense strand starting at position 1231 of SEQ ID NO: 1880484
guguguaugaaaugaggga

SEQ ID NO: 1970693 - RNA, 19 nt, Artificial Sequence
  Description of Artificial Sequence: Synthetic oligonucleotide
  Antisense strand to SEQ ID NO: 1970692
ucccucauuucauacacac

SEQ ID NO: 1970694 - RNA, 19 nt, Artificial Sequence
  Description of Artificial Sequence: Synthetic oligonucleotide
  Sense strand starting at position 1264 of SEQ ID NO: 1880484
caagaaguucuaggcuaca

SEQ ID NO: 1970695 - RNA, 19 nt, Artificial Sequence
  Description of Artificial Sequence: Synthetic oligonucleotide
  Antisense strand to SEQ ID NO: 1970694
uguagccuagaacuucuug

SEQ ID NO: 1970696 - RNA, 19 nt, Artificial Sequence
  Description of Artificial Sequence: Synthetic oligonucleotide
  Sense strand starting at position 1557 of SEQ ID NO: 1880484
aguaaaugaagucgguauu

SEQ ID NO: 1970697 - RNA, 19 nt, Artificial Sequence
  Description of Artificial Sequence: Synthetic oligonucleotide
  Antisense strand to SEQ ID NO: 1970696
aauaccgacuucauuuacu

SEQ ID NO: 1970698 - RNA, 19 nt, Artificial Sequence
  Description of Artificial Sequence: Synthetic oligonucleotide
  Sense strand starting at position 1581 of SEQ ID NO: 1880484
ucuuuauucgagcacgaga

SEQ ID NO: 1970699 - RNA, 19 nt, Artificial Sequence
  Description of Artificial Sequence: Synthetic oligonucleotide
  Antisense strand to SEQ ID NO: 1970698
ucucgugcucgaauaaaga

SEQ ID NO: 1970700 - RNA, 19 nt, Artificial Sequence
  Description of Artificial Sequence: Synthetic oligonucleotide
  Sense strand starting at position 1726 of SEQ ID NO: 1880484
caguuuacgcuugauucga

SEQ ID NO: 1970701 - RNA, 19 nt, Artificial Sequence
  Description of Artificial Sequence: Synthetic oligonucleotide
  Antisense strand to SEQ ID NO: 1970700
ucgaaucaagcguaaacug

SEQ ID NO: 1970702 - RNA, 19 nt, Artificial Sequence
  Description of Artificial Sequence: Synthetic oligonucleotide
  Sense strand starting at position 1730 of SEQ ID NO: 1880484
uuacgcuugauucgaggaa

SEQ ID NO: 1970703 - RNA, 19 nt, Artificial Sequence
  Description of Artificial Sequence: Synthetic oligonucleotide
  Antisense strand to SEQ ID NO: 1970702
uuccucgaaucaagcguaa

SEQ ID NO: 1970704 - RNA, 19 nt, Artificial Sequence
  Description of Artificial Sequence: Synthetic oligonucleotide
  Sense strand starting at position 1734 of SEQ ID NO: 1880484
gcuugauucgaggaaccuu

SEQ ID NO: 1970705 - RNA, 19 nt, Artificial Sequence
  Description of Artificial Sequence: Synthetic oligonucleotide
  Antisense strand to SEQ ID NO: 1970704
aagguuccucgaaucaagc

SEQ ID NO: 1970706 - RNA, 19 nt, Artificial Sequence
  Description of Artificial Sequence: Synthetic oligonucleotide
  Sense strand starting at position 2591 of SEQ ID NO: 1880484
ugggcugagcguuaagaaa

SEQ ID NO: 1970707 - RNA, 19 nt, Artificial Sequence
  Description of Artificial Sequence: Synthetic oligonucleotide
  Antisense strand to SEQ ID NO: 1970706
uuucuuaacgcucagccca

SEQ ID NO: 1970708 - RNA, 19 nt, Artificial Sequence
  Description of Artificial Sequence: Synthetic oligonucleotide
  Sense strand starting at position 2615 of SEQ ID NO: 1880484
ccugcaauuugggauuaga

SEQ ID NO: 1970709 - RNA, 19 nt, Artificial Sequence
  Description of Artificial Sequence: Synthetic oligonucleotide
  Antisense strand to SEQ ID NO: 1970708
ucuaaucccaaauugcagg

SEQ ID NO: 1970710 - RNA, 19 nt, Artificial Sequence
  Description of Artificial Sequence: Synthetic oligonucleotide
  Sense strand starting at position 3059 of SEQ ID NO: 1880484
ggguauauuucguugcuuu

SEQ ID NO: 1970711 - RNA, 19 nt, Artificial Sequence
  Description of Artificial Sequence: Synthetic oligonucleotide
  Antisense strand to SEQ ID NO: 1970710
aaagcaacgaaauauaccc

SEQ ID NO: 1970712 - RNA, 19 nt, Artificial Sequence
  Description of Artificial Sequence: Synthetic oligonucleotide
  Sense strand starting at position 3060 of SEQ ID NO: 1880484
gguauauuucguugcuuuc

SEQ ID NO: 1970713 - RNA, 19 nt, Artificial Sequence
  Description of Artificial Sequence: Synthetic oligonucleotide
  Antisense strand to SEQ ID NO: 1970712
gaaagcaacgaaauauacc

SEQ ID NO: 1970714 - RNA, 19 nt, Artificial Sequence
  Description of Artificial Sequence: Synthetic oligonucleotide
  Sense strand starting at position 3078 of SEQ ID NO: 1880484
cuuuaaaccucagcacgau

SEQ ID NO: 1970715 - RNA, 19 nt, Artificial Sequence
  Description of Artificial Sequence: Synthetic oligonucleotide
  Antisense strand to SEQ ID NO: 1970714
aucgugcugagguuuaaag

SEQ ID NO: 1970716 - RNA, 19 nt, Artificial Sequence
  Description of Artificial Sequence: Synthetic oligonucleotide
  Sense strand starting at position 3340 of SEQ ID NO: 1880484
ugucuuuguucuguagaga

SEQ ID NO: 1970717 - RNA, 19 nt, Artificial Sequence
  Description of Artificial Sequence: Synthetic oligonucleotide
  Antisense strand to SEQ ID NO: 1970716
ucucuacagaacaaagaca

SEQ ID NO: 1970718 - RNA, 19 nt, Artificial Sequence
  Description of Artificial Sequence: Synthetic oligonucleotide
  Sense strand starting at position 3341 of SEQ ID NO: 1880484
gucuuuguucuguagagaa

SEQ ID NO: 1970719 - RNA, 19 nt, Artificial Sequence
  Description of Artificial Sequence: Synthetic oligonucleotide
  Antisense strand to SEQ ID NO: 1970718
uucucuacagaacaaagac

SEQ ID NO: 1970720 - RNA, 19 nt, Artificial Sequence
  Description of Artificial Sequence: Synthetic oligonucleotide
  Sense strand starting at position 3451 of SEQ ID NO: 1880484
cugccucuuugauuagaug

SEQ ID NO: 1970721 - RNA, 19 nt, Artificial Sequence
  Description of Artificial Sequence: Synthetic oligonucleotide
  Antisense strand to SEQ ID NO: 1970720
caucuaaucaaagaggcag

SEQ ID NO: 1970722 - RNA, 19 nt, Artificial Sequence
  Description of Artificial Sequence: Synthetic oligonucleotide
  Sense strand starting at position 3452 of SEQ ID NO: 1880484
ugccucuuugauuagaugu

SEQ ID NO: 1970723 - RNA, 19 nt, Artificial Sequence
  Description of Artificial Sequence: Synthetic oligonucleotide
  Antisense strand to SEQ ID NO: 1970722
acaucuaaucaaagaggca

SEQ ID NO: 1970724 - RNA, 19 nt, Artificial Sequence
  Description of Artificial Sequence: Synthetic oligonucleotide
  Sense strand starting at position 3459 of SEQ ID NO: 1880484
uugauuagauguucccuca

SEQ ID NO: 1970725 - RNA, 19 nt, Artificial Sequence
  Description of Artificial Sequence: Synthetic oligonucleotide
  Antisense strand to SEQ ID NO: 1970724
ugagggaacaucuaaucaa

SEQ ID NO: 1970726 - RNA, 19 nt, Artificial Sequence
  Description of Artificial Sequence: Synthetic oligonucleotide
  Sense strand starting at position 3467 of SEQ ID NO: 1880484
auguucccucaucgucaaa

SEQ ID NO: 1970727 - RNA, 19 nt, Artificial Sequence
  Description of Artificial Sequence: Synthetic oligonucleotide
  Antisense strand to SEQ ID NO: 1970726
uuugacgaugagggaacau

SEQ ID NO: 1970728 - RNA, 19 nt, Artificial Sequence
  Description of Artificial Sequence: Synthetic oligonucleotide
  Sense strand starting at position 3491 of SEQ ID NO: 1880484
aauguaauuucguuggucu

SEQ ID NO: 1970729 - RNA, 19 nt, Artificial Sequence
  Description of Artificial Sequence: Synthetic oligonucleotide
  Antisense strand to SEQ ID NO: 1970728
agaccaacgaaauuacauu

SEQ ID NO: 1970730 - RNA, 19 nt, Artificial Sequence
  Description of Artificial Sequence: Synthetic oligonucleotide
  Sense strand starting at position 3492 of SEQ ID NO: 1880484
auguaauuucguuggucug

SEQ ID NO: 1970731 - RNA, 19 nt, Artificial Sequence
  Description of Artificial Sequence: Synthetic oligonucleotide
  Antisense strand to SEQ ID NO: 1970730
cagaccaacgaaauuacau

SEQ ID NO: 1970732 - RNA, 19 nt, Artificial Sequence
  Description of Artificial Sequence: Synthetic oligonucleotide
  Sense strand starting at position 3512 of SEQ ID NO: 1880484
cggccacuuucuuugaaca

SEQ ID NO: 1970733 - RNA, 19 nt, Artificial Sequence
  Description of Artificial Sequence: Synthetic oligonucleotide
  Antisense strand to SEQ ID NO: 1970732
uguucaaagaaaguggccg

SEQ ID NO: 1970734 - RNA, 19 nt, Artificial Sequence
  Description of Artificial Sequence: Synthetic oligonucleotide
  Sense strand starting at position 3513 of SEQ ID NO: 1880484
ggccacuuucuuugaacau

SEQ ID NO: 1970735 - RNA, 19 nt, Artificial Sequence
  Description of Artificial Sequence: Synthetic oligonucleotide
  Antisense strand to SEQ ID NO: 1970734
auguucaaagaaaguggcc

SEQ ID NO: 1970736 - RNA, 19 nt, Artificial Sequence
  Description of Artificial Sequence: Synthetic oligonucleotide
  Sense strand starting at position 3595 of SEQ ID NO: 1880484
cgaccaaagccuuauuaaa

SEQ ID NO: 1970737 - RNA, 19 nt, Artificial Sequence
  Description of Artificial Sequence: Synthetic oligonucleotide
  Antisense strand to SEQ ID NO: 1970736
uuuaauaaggcuuuggucg

SEQ ID NO: 1970738 - RNA, 19 nt, Artificial Sequence
  Description of Artificial Sequence: Synthetic oligonucleotide
  Sense strand starting at position 3622 of SEQ ID NO: 1880484
gaagaucucccggguccuu

SEQ ID NO: 1970739 - RNA, 19 nt, Artificial Sequence
  Description of Artificial Sequence: Synthetic oligonucleotide
  Antisense strand to SEQ ID NO: 1970738
aaggacccgggagaucuuc

SEQ ID NO: 1970740 - RNA, 19 nt, Artificial Sequence
  Description of Artificial Sequence: Synthetic oligonucleotide
  Sense strand starting at position 3656 of SEQ ID NO: 1880484
gaaacagugugcccuccau

SEQ ID NO: 1970741 - RNA, 19 nt, Artificial Sequence
  Description of Artificial Sequence: Synthetic oligonucleotide
  Antisense strand to SEQ ID NO: 1970740
auggagggcacacuguuuc

SEQ ID NO: 1970742 - RNA, 19 nt, Artificial Sequence
  Description of Artificial Sequence: Synthetic oligonucleotide
  Sense strand starting at position 3974 of SEQ ID NO: 1880484
gguagaaauuccucgaaag

SEQ ID NO: 1970743 - RNA, 19 nt, Artificial Sequence
  Description of Artificial Sequence: Synthetic oligonucleotide
  Antisense strand to SEQ ID NO: 1970742
cuuucgaggaauuucuacc

SEQ ID NO: 1970744 - RNA, 19 nt, Artificial Sequence
  Description of Artificial Sequence: Synthetic oligonucleotide
  Sense strand starting at position 3975 of SEQ ID NO: 1880484
guagaaauuccucgaaagg

SEQ ID NO: 1970745 - RNA, 19 nt, Artificial Sequence
  Description of Artificial Sequence: Synthetic oligonucleotide
  Antisense strand to SEQ ID NO: 1970744
ccuuucgaggaauuucuac

SEQ ID NO: 1970746 - RNA, 19 nt, Artificial Sequence
  Description of Artificial Sequence: Synthetic oligonucleotide
  Sense strand starting at position 18 of SEQ ID NO: 1880485
uuugucuauccguaagacu

SEQ ID NO: 1970747 - RNA, 19 nt, Artificial Sequence
  Description of Artificial Sequence: Synthetic oligonucleotide
  Antisense strand to SEQ ID NO: 1970746
agucuuacggauagacaaa

SEQ ID NO: 1970748 - RNA, 19 nt, Artificial Sequence
  Description of Artificial Sequence: Synthetic oligonucleotide
  Sense strand starting at position 94 of SEQ ID NO: 1880485
gcugaauaaguuuacacca

SEQ ID NO: 1970749 - RNA, 19 nt, Artificial Sequence
  Description of Artificial Sequence: Synthetic oligonucleotide
  Antisense strand to SEQ ID NO: 1970748
ugguguaaacuuauucagc

SEQ ID NO: 1970750 - RNA, 19 nt, Artificial Sequence
  Description of Artificial Sequence: Synthetic oligonucleotide
  Sense strand starting at position 202 of SEQ ID NO: 1880485
aagggucaucucugcuaaa

SEQ ID NO: 1970751 - RNA, 19 nt, Artificial Sequence
  Description of Artificial Sequence: Synthetic oligonucleotide
  Antisense strand to SEQ ID NO: 1970750
uuuagcagagaugacccuu

SEQ ID NO: 1970752 - RNA, 19 nt, Artificial Sequence
  Description of Artificial Sequence: Synthetic oligonucleotide
  Sense strand starting at position 203 of SEQ ID NO: 1880485
agggucaucucugcuaaag

SEQ ID NO: 1970753 - RNA, 19 nt, Artificial Sequence
  Description of Artificial Sequence: Synthetic oligonucleotide
  Antisense strand to SEQ ID NO: 1970752
cuuuagcagagaugacccu

SEQ ID NO: 1970754 - RNA, 19 nt, Artificial Sequence
  Description of Artificial Sequence: Synthetic oligonucleotide
  Sense strand starting at position 214 of SEQ ID NO: 1880485
ugcuaaagauuugaggaaa

SEQ ID NO: 1970755 - RNA, 19 nt, Artificial Sequence
  Description of Artificial Sequence: Synthetic oligonucleotide
  Antisense strand to SEQ ID NO: 1970754
uuuccucaaaucuuuagca

SEQ ID NO: 1970756 - RNA, 19 nt, Artificial Sequence
  Description of Artificial Sequence: Synthetic oligonucleotide
  Sense strand starting at position 226 of SEQ ID NO: 1880485
gaggaaauuugugauucca

SEQ ID NO: 1970757 - RNA, 19 nt, Artificial Sequence
  Description of Artificial Sequence: Synthetic oligonucleotide
  Antisense strand to SEQ ID NO: 1970756
uggaaucacaaauuuccuc

SEQ ID NO: 1970758 - RNA, 19 nt, Artificial Sequence
  Description of Artificial Sequence: Synthetic oligonucleotide
  Sense strand starting at position 281 of SEQ ID NO: 1880485
ccacgucauuacuuugaau

SEQ ID NO: 1970759 - RNA, 19 nt, Artificial Sequence
  Description of Artificial Sequence: Synthetic oligonucleotide
  Antisense strand to SEQ ID NO: 1970758
auucaaaguaaugacgugg

SEQ ID NO: 1970760 - RNA, 19 nt, Artificial Sequence
  Description of Artificial Sequence: Synthetic oligonucleotide
  Sense strand starting at position 283 of SEQ ID NO: 1880485
acgucauuacuuugaauug

SEQ ID NO: 1970761 - RNA, 19 nt, Artificial Sequence
  Description of Artificial Sequence: Synthetic oligonucleotide
  Antisense strand to SEQ ID NO: 1970760
caauucaaaguaaugacgu

SEQ ID NO: 1970762 - RNA, 19 nt, Artificial Sequence
  Description of Artificial Sequence: Synthetic oligonucleotide
  Sense strand starting at position 290 of SEQ ID NO: 1880485
uacuuugaauuguuagagu

SEQ ID NO: 1970763 - RNA, 19 nt, Artificial Sequence
  Description of Artificial Sequence: Synthetic oligonucleotide
  Antisense strand to SEQ ID NO: 1970762
acucuaacaauucaaagua

SEQ ID NO: 1970764 - RNA, 19 nt, Artificial Sequence
  Description of Artificial Sequence: Synthetic oligonucleotide
  Sense strand starting at position 401 of SEQ ID NO: 1880485
gggagaauguaugcaggua

SEQ ID NO: 1970765 - RNA, 19 nt, Artificial Sequence
  Description of Artificial Sequence: Synthetic oligonucleotide
  Antisense strand to SEQ ID NO: 1970764
uaccugcauacauucuccc

SEQ ID NO: 1970766 - RNA, 19 nt, Artificial Sequence
  Description of Artificial Sequence: Synthetic oligonucleotide
  Sense strand starting at position 402 of SEQ ID NO: 1880485
ggagaauguaugcagguau

SEQ ID NO: 1970767 - RNA, 19 nt, Artificial Sequence
  Description of Artificial Sequence: Synthetic oligonucleotide
  Antisense strand to SEQ ID NO: 1970766
auaccugcauacauucucc

SEQ ID NO: 1970768 - RNA, 19 nt, Artificial Sequence
  Description of Artificial Sequence: Synthetic oligonucleotide
  Sense strand starting at position 414 of SEQ ID NO: 1880485
cagguauguguguaugaaa

SEQ ID NO: 1970769 - RNA, 19 nt, Artificial Sequence
  Description of Artificial Sequence: Synthetic oligonucleotide
  Antisense strand to SEQ ID NO: 1970768
uuucauacacacauaccug

SEQ ID NO: 1970770 - RNA, 19 nt, Artificial Sequence
  Description of Artificial Sequence: Synthetic oligonucleotide
  Sense strand starting at position 421 of SEQ ID NO: 1880485
guguguaugaaaugaggga

SEQ ID NO: 1970771 - RNA, 19 nt, Artificial Sequence
  Description of Artificial Sequence: Synthetic oligonucleotide
  Antisense strand to SEQ ID NO: 1970770
ucccucauuucauacacac

SEQ ID NO: 1970772 - RNA, 19 nt, Artificial Sequence
  Description of Artificial Sequence: Synthetic oligonucleotide
  Sense strand starting at position 454 of SEQ ID NO: 1880485
caagaaguucuaggcuaca

SEQ ID NO: 1970773 - RNA, 19 nt, Artificial Sequence
  Description of Artificial Sequence: Synthetic oligonucleotide
  Antisense strand to SEQ ID NO: 1970772
uguagccuagaacuucuug

SEQ ID NO: 1970774 - RNA, 19 nt, Artificial Sequence
  Description of Artificial Sequence: Synthetic oligonucleotide
  Sense strand starting at position 747 of SEQ ID NO: 1880485
aguaaaugaagucgguauu

SEQ ID NO: 1970775 - RNA, 19 nt, Artificial Sequence
  Description of Artificial Sequence: Synthetic oligonucleotide
  Antisense strand to SEQ ID NO: 1970774
aauaccgacuucauuuacu

SEQ ID NO: 1970776 - RNA, 19 nt, Artificial Sequence
  Description of Artificial Sequence: Synthetic oligonucleotide
  Sense strand starting at position 771 of SEQ ID NO: 1880485
ucuuuauucgagcacgaga

SEQ ID NO: 1970777 - RNA, 19 nt, Artificial Sequence
  Description of Artificial Sequence: Synthetic oligonucleotide
  Antisense strand to SEQ ID NO: 1970776
ucucgugcucgaauaaaga

SEQ ID NO: 1970778 - RNA, 19 nt, Artificial Sequence
  Description of Artificial Sequence: Synthetic oligonucleotide
  Sense strand starting at position 920 of SEQ ID NO: 1880485
uuacgcuugauucgaggaa

SEQ ID NO: 1970779 - RNA, 19 nt, Artificial Sequence
  Description of Artificial Sequence: Synthetic oligonucleotide
  Antisense strand to SEQ ID NO: 1970778
uuccucgaaucaagcguaa

SEQ ID NO: 1970780 - RNA, 19 nt, Artificial Sequence
  Description of Artificial Sequence: Synthetic oligonucleotide
  Sense strand starting at position 924 of SEQ ID NO: 1880485
gcuugauucgaggaaccuu

SEQ ID NO: 1970781 - RNA, 19 nt, Artificial Sequence
  Description of Artificial Sequence: Synthetic oligonucleotide
  Antisense strand to SEQ ID NO: 1970780
aagguuccucgaaucaagc

SEQ ID NO: 1970782 - RNA, 19 nt, Artificial Sequence
  Description of Artificial Sequence: Synthetic oligonucleotide
  Sense strand starting at position 1781 of SEQ ID NO: 1880485
ugggcugagcguuaagaaa

SEQ ID NO: 1970783 - RNA, 19 nt, Artificial Sequence
  Description of Artificial Sequence: Synthetic oligonucleotide
  Antisense strand to SEQ ID NO: 1970782
uuucuuaacgcucagccca

SEQ ID NO: 1970784 - RNA, 19 nt, Artificial Sequence
  Description of Artificial Sequence: Synthetic oligonucleotide
  Sense strand starting at position 1805 of SEQ ID NO: 1880485
ccugcaauuugggauuaga

SEQ ID NO: 1970785 - RNA, 19 nt, Artificial Sequence
  Description of Artificial Sequence: Synthetic oligonucleotide
  Antisense strand to SEQ ID NO: 1970784
ucuaaucccaaauugcagg

SEQ ID NO: 1970786 - RNA, 19 nt, Artificial Sequence
  Description of Artificial Sequence: Synthetic oligonucleotide
  Sense strand starting at position 2249 of SEQ ID NO: 1880485
ggguauauuucguugcuuu

SEQ ID NO: 1970787 - RNA, 19 nt, Artificial Sequence
  Description of Artificial Sequence: Synthetic oligonucleotide
  Antisense strand to SEQ ID NO: 1970786
aaagcaacgaaauauaccc

SEQ ID NO: 1970788 - RNA, 19 nt, Artificial Sequence
  Description of Artificial Sequence: Synthetic oligonucleotide
  Sense strand starting at position 2250 of SEQ ID NO: 1880485
gguauauuucguugcuuuc

SEQ ID NO: 1970789 - RNA, 19 nt, Artificial Sequence
  Description of Artificial Sequence: Synthetic oligonucleotide
  Antisense strand to SEQ ID NO: 1970788
gaaagcaacgaaauauacc

SEQ ID NO: 1970790 - RNA, 19 nt, Artificial Sequence
  Description of Artificial Sequence: Synthetic oligonucleotide
  Sense strand starting at position 2268 of SEQ ID NO: 1880485
cuuuaaaccucagcacgau

SEQ ID NO: 1970791 - RNA, 19 nt, Artificial Sequence
  Description of Artificial Sequence: Synthetic oligonucleotide
  Antisense strand to SEQ ID NO: 1970790
aucgugcugagguuuaaag

SEQ ID NO: 1970792 - RNA, 19 nt, Artificial Sequence
  Description of Artificial Sequence: Synthetic oligonucleotide
  Sense strand starting at position 2530 of SEQ ID NO: 1880485
ugucuuuguucuguagaga

SEQ ID NO: 1970793 - RNA, 19 nt, Artificial Sequence
  Description of Artificial Sequence: Synthetic oligonucleotide
  Antisense strand to SEQ ID NO: 1970792
ucucuacagaacaaagaca

SEQ ID NO: 1970794 - RNA, 19 nt, Artificial Sequence
  Description of Artificial Sequence: Synthetic oligonucleotide
  Sense strand starting at position 2531 of SEQ ID NO: 1880485
gucuuuguucuguagagaa

SEQ ID NO: 1970795 - RNA, 19 nt, Artificial Sequence
  Description of Artificial Sequence: Synthetic oligonucleotide
  Antisense strand to SEQ ID NO: 1970794
uucucuacagaacaaagac

SEQ ID NO: 1970796 - RNA, 19 nt, Artificial Sequence
  Description of Artificial Sequence: Synthetic oligonucleotide
  Sense strand starting at position 2641 of SEQ ID NO: 1880485
cugccucuuugauuagaug

SEQ ID NO: 1970797 - RNA, 19 nt, Artificial Sequence
  Description of Artificial Sequence: Synthetic oligonucleotide
  Antisense strand to SEQ ID NO: 1970796
caucuaaucaaagaggcag

SEQ ID NO: 1970798 - RNA, 19 nt, Artificial Sequence
  Description of Artificial Sequence: Synthetic oligonucleotide
  Sense strand starting at position 2642 of SEQ ID NO: 1880485
ugccucuuugauuagaugu

SEQ ID NO: 1970799 - RNA, 19 nt, Artificial Sequence
  Description of Artificial Sequence: Synthetic oligonucleotide
  Antisense strand to SEQ ID NO: 1970798
acaucuaaucaaagaggca

SEQ ID NO: 1970800 - RNA, 19 nt, Artificial Sequence
  Description of Artificial Sequence: Synthetic oligonucleotide
  Sense strand starting at position 2649 of SEQ ID NO: 1880485
uugauuagauguucccuca

SEQ ID NO: 1970801 - RNA, 19 nt, Artificial Sequence
  Description of Artificial Sequence: Synthetic oligonucleotide
  Antisense strand to SEQ ID NO: 1970800
ugagggaacaucuaaucaa

SEQ ID NO: 1970802 - RNA, 19 nt, Artificial Sequence
  Description of Artificial Sequence: Synthetic oligonucleotide
  Sense strand starting at position 2681 of SEQ ID NO: 1880485
aauguaauuucguuggucu

SEQ ID NO: 1970803 - RNA, 19 nt, Artificial Sequence
  Description of Artificial Sequence: Synthetic oligonucleotide
  Antisense strand to SEQ ID NO: 1970802
agaccaacgaaauuacauu

SEQ ID NO: 1970804 - RNA, 19 nt, Artificial Sequence
  Description of Artificial Sequence: Synthetic oligonucleotide
  Sense strand starting at position 2682 of SEQ ID NO: 1880485
auguaauuucguuggucug

SEQ ID NO: 1970805 - RNA, 19 nt, Artificial Sequence
  Description of Artificial Sequence: Synthetic oligonucleotide
  Antisense strand to SEQ ID NO: 1970804
cagaccaacgaaauuacau

SEQ ID NO: 1970806 - RNA, 19 nt, Artificial Sequence
  Description of Artificial Sequence: Synthetic oligonucleotide
  Sense strand starting at position 2702 of SEQ ID NO: 1880485
cggccacuuucuuugaaca

SEQ ID NO: 1970807 - RNA, 19 nt, Artificial Sequence
  Description of Artificial Sequence: Synthetic oligonucleotide
  Antisense strand to SEQ ID NO: 1970806
uguucaaagaaaguggccg

SEQ ID NO: 1970808 - RNA, 19 nt, Artificial Sequence
  Description of Artificial Sequence: Synthetic oligonucleotide
  Sense strand starting at position 2703 of SEQ ID NO: 1880485
ggccacuuucuuugaacau

SEQ ID NO: 1970809 - RNA, 19 nt, Artificial Sequence
  Description of Artificial Sequence: Synthetic oligonucleotide
  Antisense strand to SEQ ID NO: 1970808
auguucaaagaaaguggcc

SEQ ID NO: 1970810 - RNA, 19 nt, Artificial Sequence
  Description of Artificial Sequence: Synthetic oligonucleotide
  Sense strand starting at position 2785 of SEQ ID NO: 1880485
cgaccaaagccuuauuaaa

SEQ ID NO: 1970811 - RNA, 19 nt, Artificial Sequence
  Description of Artificial Sequence: Synthetic oligonucleotide
  Antisense strand to SEQ ID NO: 1970810
uuuaauaaggcuuuggucg

SEQ ID NO: 1970812 - RNA, 19 nt, Artificial Sequence
  Description of Artificial Sequence: Synthetic oligonucleotide
  Sense strand starting at position 2812 of SEQ ID NO: 1880485
gaagaucucccggguccuu

SEQ ID NO: 1970813 - RNA, 19 nt, Artificial Sequence
  Description of Artificial Sequence: Synthetic oligonucleotide
  Antisense strand to SEQ ID NO: 1970812
aaggacccgggagaucuuc

SEQ ID NO: 1970814 - RNA, 19 nt, Artificial Sequence
  Description of Artificial Sequence: Synthetic oligonucleotide
  Sense strand starting at position 2846 of SEQ ID NO: 1880485
gaaacagugugcccuccau

SEQ ID NO: 1970815 - RNA, 19 nt, Artificial Sequence
  Description of Artificial Sequence: Synthetic oligonucleotide
  Antisense strand to SEQ ID NO: 1970814
auggagggcacacuguuuc

SEQ ID NO: 1970816 - RNA, 19 nt, Artificial Sequence
  Description of Artificial Sequence: Synthetic oligonucleotide
  Sense strand starting at position 3164 of SEQ ID NO: 1880485
gguagaaauuccucgaaag

SEQ ID NO: 1970817 - RNA, 19 nt, Artificial Sequence
  Description of Artificial Sequence: Synthetic oligonucleotide
  Antisense strand to SEQ ID NO: 1970816
cuuucgaggaauuucuacc

SEQ ID NO: 1970818 - RNA, 19 nt, Artificial Sequence
  Description of Artificial Sequence: Synthetic oligonucleotide
  Sense strand starting at position 3165 of SEQ ID NO: 1880485
guagaaauuccucgaaagg

SEQ ID NO: 1970819 - RNA, 19 nt, Artificial Sequence
  Description of Artificial Sequence: Synthetic oligonucleotide
  Antisense strand to SEQ ID NO: 1970818
ccuuucgaggaauuucuac

SEQ ID NO: 1970820 - RNA, 19 nt, Artificial Sequence
  Description of Artificial Sequence: Synthetic oligonucleotide
  Sense strand starting at position 3284 of SEQ ID NO: 1880485
agguagacguguuugggaa

SEQ ID NO: 1970821 - RNA, 19 nt, Artificial Sequence
  Description of Artificial Sequence: Synthetic oligonucleotide
  Antisense strand to SEQ ID NO: 1970820
uucccaaacacgucuaccu

SEQ ID NO: 1970822 - RNA, 19 nt, Artificial Sequence
  Description of Artificial Sequence: Synthetic oligonucleotide
  Sense strand starting at position 3285 of SEQ ID NO: 1880485
gguagacguguuugggaag

SEQ ID NO: 1970823 - RNA, 19 nt, Artificial Sequence
  Description of Artificial Sequence: Synthetic oligonucleotide
  Antisense strand to SEQ ID NO: 1970822
cuucccaaacacgucuacc

SEQ ID NO: 1970824 - RNA, 19 nt, Artificial Sequence
  Description of Artificial Sequence: Synthetic oligonucleotide
  Sense strand starting at position 3434 of SEQ ID NO: 1880485
cccuguuagaggcagucua

SEQ ID NO: 1970825 - RNA, 19 nt, Artificial Sequence
  Description of Artificial Sequence: Synthetic oligonucleotide
  Antisense strand to SEQ ID NO: 1970824
uagacugccucuaacaggg

SEQ ID NO: 1970826 - RNA, 19 nt, Artificial Sequence
  Description of Artificial Sequence: Synthetic oligonucleotide
  Sense strand starting at position 26 of SEQ ID NO: 1880486
ugcacucuacccgaggaua

SEQ ID NO: 1970827 - RNA, 19 nt, Artificial Sequence
  Description of Artificial Sequence: Synthetic oligonucleotide
  Antisense strand to SEQ ID NO: 1970826
uauccucggguagagugca

SEQ ID NO: 1970828 - RNA, 19 nt, Artificial Sequence
  Description of Artificial Sequence: Synthetic oligonucleotide
  Sense strand starting at position 479 of SEQ ID NO: 1880486
cagaauagaucagauguca

SEQ ID NO: 1970829 - RNA, 19 nt, Artificial Sequence
  Description of Artificial Sequence: Synthetic oligonucleotide
  Antisense strand to SEQ ID NO: 1970828
ugacaucugaucuauucug

SEQ ID NO: 1970830 - RNA, 19 nt, Artificial Sequence
  Description of Artificial Sequence: Synthetic oligonucleotide
  Sense strand starting at position 2620 of SEQ ID NO: 1880486
uggagucauuccucccaug

SEQ ID NO: 1970831 - RNA, 19 nt, Artificial Sequence
  Description of Artificial Sequence: Synthetic oligonucleotide
  Antisense strand to SEQ ID NO: 1970830
caugggaggaaugacucca

SEQ ID NO: 1970832 - RNA, 19 nt, Artificial Sequence
  Description of Artificial Sequence: Synthetic oligonucleotide
  Sense strand starting at position 2976 of SEQ ID NO: 1880486
aaagguguagcacgcaaau

SEQ ID NO: 1970833 - RNA, 19 nt, Artificial Sequence
  Description of Artificial Sequence: Synthetic oligonucleotide
  Antisense strand to SEQ ID NO: 1970832
auuugcgugcuacaccuuu

SEQ ID NO: 1970834 - RNA, 19 nt, Artificial Sequence
  Description of Artificial Sequence: Synthetic oligonucleotide
  Sense strand starting at position 2978 of SEQ ID NO: 1880486
agguguagcacgcaaauau

SEQ ID NO: 1970835 - RNA, 19 nt, Artificial Sequence
  Description of Artificial Sequence: Synthetic oligonucleotide
  Antisense strand to SEQ ID NO: 1970834
auauuugcgugcuacaccu

SEQ ID NO: 1970836 - RNA, 19 nt, Artificial Sequence
  Description of Artificial Sequence: Synthetic oligonucleotide
  Sense strand starting at position 3239 of SEQ ID NO: 1880486
ggaccaaggucugauggaa

SEQ ID NO: 1970837 - RNA, 19 nt, Artificial Sequence
  Description of Artificial Sequence: Synthetic oligonucleotide
  Antisense strand to SEQ ID NO: 1970836
uuccaucagaccuuggucc

SEQ ID NO: 1970838 - RNA, 19 nt, Artificial Sequence
  Description of Artificial Sequence: Synthetic oligonucleotide
  Sense strand starting at position 54 of SEQ ID NO: 1880487
aggcucagugaaugggaaa

SEQ ID NO: 1970839 - RNA, 19 nt, Artificial Sequence
  Description of Artificial Sequence: Synthetic oligonucleotide
  Antisense strand to SEQ ID NO: 1970838
uuucccauucacugagccu

SEQ ID NO: 1970840 - RNA, 19 nt, Artificial Sequence
  Description of Artificial Sequence: Synthetic oligonucleotide
  Sense strand starting at position 207 of SEQ ID NO: 1880487
accagagauguguggaaca

SEQ ID NO: 1970841 - RNA, 19 nt, Artificial Sequence
  Description of Artificial Sequence: Synthetic oligonucleotide
  Antisense strand to SEQ ID NO: 1970840
uguuccacacaucucuggu

SEQ ID NO: 1970842 - RNA, 19 nt, Artificial Sequence
  Description of Artificial Sequence: Synthetic oligonucleotide
  Sense strand starting at position 302 of SEQ ID NO: 1880487
gcuccuucccugcaguaaa

SEQ ID NO: 1970843 - RNA, 19 nt, Artificial Sequence
  Description of Artificial Sequence: Synthetic oligonucleotide
  Antisense strand to SEQ ID NO: 1970842
uuuacugcagggaaggagc

SEQ ID NO: 1970844 - RNA, 19 nt, Artificial Sequence
  Description of Artificial Sequence: Synthetic oligonucleotide
  Sense strand starting at position 312 of SEQ ID NO: 1880487
ugcaguaaacccgauuaau

SEQ ID NO: 1970845 - RNA, 19 nt, Artificial Sequence
  Description of Artificial Sequence: Synthetic oligonucleotide
  Antisense strand to SEQ ID NO: 1970844
auuaaucggguuuacugca

SEQ ID NO: 1970846 - RNA, 19 nt, Artificial Sequence
  Description of Artificial Sequence: Synthetic oligonucleotide
  Sense strand starting at position 347 of SEQ ID NO: 1880487
gccauuuccuuggaauagu

SEQ ID NO: 1970847 - RNA, 19 nt, Artificial Sequence
  Description of Artificial Sequence: Synthetic oligonucleotide
  Antisense strand to SEQ ID NO: 1970846
acuauuccaaggaaauggc

SEQ ID NO: 1970848 - RNA, 19 nt, Artificial Sequence
  Description of Artificial Sequence: Synthetic oligonucleotide
  Sense strand starting at position 629 of SEQ ID NO: 1880487
ggcgacaguucgagaccuu

SEQ ID NO: 1970849 - RNA, 19 nt, Artificial Sequence
  Description of Artificial Sequence: Synthetic oligonucleotide
  Antisense strand to SEQ ID NO: 1970848
aaggucucgaacugucgcc

SEQ ID NO: 1970850 - RNA, 19 nt, Artificial Sequence
  Description of Artificial Sequence: Synthetic oligonucleotide
  Sense strand starting at position 630 of SEQ ID NO: 1880487
gcgacaguucgagaccuuu

SEQ ID NO: 1970851 - RNA, 19 nt, Artificial Sequence
  Description of Artificial Sequence: Synthetic oligonucleotide
  Antisense strand to SEQ ID NO: 1970850
aaaggucucgaacugucgc

SEQ ID NO: 1970852 - RNA, 19 nt, Artificial Sequence
  Description of Artificial Sequence: Synthetic oligonucleotide
  Sense strand starting at position 674 of SEQ ID NO: 1880487
guucaaguuguguagugca

SEQ ID NO: 1970853 - RNA, 19 nt, Artificial Sequence
  Description of Artificial Sequence: Synthetic oligonucleotide
  Antisense strand to SEQ ID NO: 1970852
ugcacuacacaacuugaac

SEQ ID NO: 1970854 - RNA, 19 nt, Artificial Sequence
  Description of Artificial Sequence: Synthetic oligonucleotide
  Sense strand starting at position 1031 of SEQ ID NO: 1880487
gggacagaguucucagauc

SEQ ID NO: 1970855 - RNA, 19 nt, Artificial Sequence
  Description of Artificial Sequence: Synthetic oligonucleotide
  Antisense strand to SEQ ID NO: 1970854
gaucugagaacucuguccc

SEQ ID NO: 1970856 - RNA, 19 nt, Artificial Sequence
  Description of Artificial Sequence: Synthetic oligonucleotide
  Sense strand starting at position 1091 of SEQ ID NO: 1880487
acauucaucgcggcaguuu

SEQ ID NO: 1970857 - RNA, 19 nt, Artificial Sequence
  Description of Artificial Sequence: Synthetic oligonucleotide
  Antisense strand to SEQ ID NO: 1970856
aaacugccgcgaugaaugu

SEQ ID NO: 1970858 - RNA, 19 nt, Artificial Sequence
  Description of Artificial Sequence: Synthetic oligonucleotide
  Sense strand starting at position 1198 of SEQ ID NO: 1880487
gugaaucccagcugggauu

SEQ ID NO: 1970859 - RNA, 19 nt, Artificial Sequence
  Description of Artificial Sequence: Synthetic oligonucleotide
  Antisense strand to SEQ ID NO: 1970858
aaucccagcugggauucac

SEQ ID NO: 1970860 - RNA, 19 nt, Artificial Sequence
  Description of Artificial Sequence: Synthetic oligonucleotide
  Sense strand starting at position 1250 of SEQ ID NO: 1880487
aagagaagcgccuacuaga

SEQ ID NO: 1970861 - RNA, 19 nt, Artificial Sequence
  Description of Artificial Sequence: Synthetic oligonucleotide
  Antisense strand to SEQ ID NO: 1970860
ucuaguaggcgcuucucuu

SEQ ID NO: 1970862 - RNA, 19 nt, Artificial Sequence
  Description of Artificial Sequence: Synthetic oligonucleotide
  Sense strand starting at position 1322 of SEQ ID NO: 1880487
ugugauguuacaugggcau

SEQ ID NO: 1970863 - RNA, 19 nt, Artificial Sequence
  Description of Artificial Sequence: Synthetic oligonucleotide
  Antisense strand to SEQ ID NO: 1970862
augcccauguaacaucaca

SEQ ID NO: 1970864 - RNA, 19 nt, Artificial Sequence
  Description of Artificial Sequence: Synthetic oligonucleotide
  Sense strand starting at position 1660 of SEQ ID NO: 1880487
acuaaugcuuguguaaauu

SEQ ID NO: 1970865 - RNA, 19 nt, Artificial Sequence
  Description of Artificial Sequence: Synthetic oligonucleotide
  Antisense strand to SEQ ID NO: 1970864
aauuuacacaagcauuagu

SEQ ID NO: 1970866 - RNA, 19 nt, Artificial Sequence
  Description of Artificial Sequence: Synthetic oligonucleotide
  Sense strand starting at position 1672 of SEQ ID NO: 1880487
guaaauugggaugguggaa

SEQ ID NO: 1970867 - RNA, 19 nt, Artificial Sequence
  Description of Artificial Sequence: Synthetic oligonucleotide
  Antisense strand to SEQ ID NO: 1970866
uuccaccaucccaauuuac

SEQ ID NO: 1970868 - RNA, 19 nt, Artificial Sequence
  Description of Artificial Sequence: Synthetic oligonucleotide
  Sense strand starting at position 1863 of SEQ ID NO: 1880487
gucucuccguucuuuguua

SEQ ID NO: 1970869 - RNA, 19 nt, Artificial Sequence
  Description of Artificial Sequence: Synthetic oligonucleotide
  Antisense strand to SEQ ID NO: 1970868
uaacaaagaacggagagac

SEQ ID NO: 1970870 - RNA, 19 nt, Artificial Sequence
  Description of Artificial Sequence: Synthetic oligonucleotide
  Sense strand starting at position 1864 of SEQ ID NO: 1880487
ucucuccguucuuuguuaa

SEQ ID NO: 1970871 - RNA, 19 nt, Artificial Sequence
  Description of Artificial Sequence: Synthetic oligonucleotide
  Antisense strand to SEQ ID NO: 1970870
uuaacaaagaacggagaga

SEQ ID NO: 1970872 - RNA, 19 nt, Artificial Sequence
  Description of Artificial Sequence: Synthetic oligonucleotide
  Sense strand starting at position 1865 of SEQ ID NO: 1880487
cucuccguucuuuguuaaa

SEQ ID NO: 1970873 - RNA, 19 nt, Artificial Sequence
  Description of Artificial Sequence: Synthetic oligonucleotide
  Antisense strand to SEQ ID NO: 1970872
uuuaacaaagaacggagag

SEQ ID NO: 1970874 - RNA, 19 nt, Artificial Sequence
  Description of Artificial Sequence: Synthetic oligonucleotide
  Sense strand starting at position 1867 of SEQ ID NO: 1880487
cuccguucuuuguuaaaua

SEQ ID NO: 1970875 - RNA, 19 nt, Artificial Sequence
  Description of Artificial Sequence: Synthetic oligonucleotide
  Antisense strand to SEQ ID NO: 1970874
uauuuaacaaagaacggag

SEQ ID NO: 1970876 - RNA, 19 nt, Artificial Sequence
  Description of Artificial Sequence: Synthetic oligonucleotide
  Sense strand starting at position 2178 of SEQ ID NO: 1880487
ucugauacacuuuggcuaa

SEQ ID NO: 1970877 - RNA, 19 nt, Artificial Sequence
  Description of Artificial Sequence: Synthetic oligonucleotide
  Antisense strand to SEQ ID NO: 1970876
uuagccaaaguguaucaga

SEQ ID NO: 1970878 - RNA, 19 nt, Artificial Sequence
  Description of Artificial Sequence: Synthetic oligonucleotide
  Sense strand starting at position 2180 of SEQ ID NO: 1880487
ugauacacuuuggcuaauu

SEQ ID NO: 1970879 - RNA, 19 nt, Artificial Sequence
  Description of Artificial Sequence: Synthetic oligonucleotide
  Antisense strand to SEQ ID NO: 1970878
aauuagccaaaguguauca

SEQ ID NO: 1970880 - RNA, 19 nt, Artificial Sequence
  Description of Artificial Sequence: Synthetic oligonucleotide
  Sense strand starting at position 2189 of SEQ ID NO: 1880487
uuggcuaauugucuaauga

SEQ ID NO: 1970881 - RNA, 19 nt, Artificial Sequence
  Description of Artificial Sequence: Synthetic oligonucleotide
  Antisense strand to SEQ ID NO: 1970880
ucauuagacaauuagccaa

SEQ ID NO: 1970882 - RNA, 19 nt, Artificial Sequence
  Description of Artificial Sequence: Synthetic oligonucleotide
  Sense strand starting at position 2190 of SEQ ID NO: 1880487
uggcuaauugucuaaugaa

SEQ ID NO: 1970883 - RNA, 19 nt, Artificial Sequence
  Description of Artificial Sequence: Synthetic oligonucleotide
  Antisense strand to SEQ ID NO: 1970882
uucauuagacaauuagcca

SEQ ID NO: 1970884 - RNA, 19 nt, Artificial Sequence
  Description of Artificial Sequence: Synthetic oligonucleotide
  Sense strand starting at position 2219 of SEQ ID NO: 1880487
cuagguauuucguauaagu

SEQ ID NO: 1970885 - RNA, 19 nt, Artificial Sequence
  Description of Artificial Sequence: Synthetic oligonucleotide
  Antisense strand to SEQ ID NO: 1970884
acuuauacgaaauaccuag

SEQ ID NO: 1970886 - RNA, 19 nt, Artificial Sequence
  Description of Artificial Sequence: Synthetic oligonucleotide
  Sense strand starting at position 2257 of SEQ ID NO: 1880487
ccuucugugucggcuuauu

SEQ ID NO: 1970887 - RNA, 19 nt, Artificial Sequence
  Description of Artificial Sequence: Synthetic oligonucleotide
  Antisense strand to SEQ ID NO: 1970886
aauaagccgacacagaagg

SEQ ID NO: 1970888 - RNA, 19 nt, Artificial Sequence
  Description of Artificial Sequence: Synthetic oligonucleotide
  Sense strand starting at position 2563 of SEQ ID NO: 1880487
gcuguaauuacaggcgugu

SEQ ID NO: 1970889 - RNA, 19 nt, Artificial Sequence
  Description of Artificial Sequence: Synthetic oligonucleotide
  Antisense strand to SEQ ID NO: 1970888
acacgccuguaauuacagc

SEQ ID NO: 1970890 - RNA, 19 nt, Artificial Sequence
  Description of Artificial Sequence: Synthetic oligonucleotide
  Sense strand starting at position 2565 of SEQ ID NO: 1880487
uguaauuacaggcguguga

SEQ ID NO: 1970891 - RNA, 19 nt, Artificial Sequence
  Description of Artificial Sequence: Synthetic oligonucleotide
  Antisense strand to SEQ ID NO: 1970890
ucacacgccuguaauuaca

SEQ ID NO: 1970892 - RNA, 19 nt, Artificial Sequence
  Description of Artificial Sequence: Synthetic oligonucleotide
  Sense strand starting at position 2596 of SEQ ID NO: 1880487
ggccacuuagcauaaucuu

SEQ ID NO: 1970893 - RNA, 19 nt, Artificial Sequence
  Description of Artificial Sequence: Synthetic oligonucleotide
  Antisense strand to SEQ ID NO: 1970892
aagauuaugcuaaguggcc

SEQ ID NO: 1970894 - RNA, 19 nt, Artificial Sequence
  Description of Artificial Sequence: Synthetic oligonucleotide
  Sense strand starting at position 2722 of SEQ ID NO: 1880487
acaguuuaguggcacuaaa

SEQ ID NO: 1970895 - RNA, 19 nt, Artificial Sequence
  Description of Artificial Sequence: Synthetic oligonucleotide
  Antisense strand to SEQ ID NO: 1970894
uuuagugccacuaaacugu

SEQ ID NO: 1970896 - RNA, 19 nt, Artificial Sequence
  Description of Artificial Sequence: Synthetic oligonucleotide
  Sense strand starting at position 2737 of SEQ ID NO: 1880487
uaaauagucacgugguugu

SEQ ID NO: 1970897 - RNA, 19 nt, Artificial Sequence
  Description of Artificial Sequence: Synthetic oligonucleotide
  Antisense strand to SEQ ID NO: 1970896
acaaccacgugacuauuua

SEQ ID NO: 1970898 - RNA, 19 nt, Artificial Sequence
  Description of Artificial Sequence: Synthetic oligonucleotide
  Sense strand starting at position 2805 of SEQ ID NO: 1880487
gaaacucuguacccgugaa

SEQ ID NO: 1970899 - RNA, 19 nt, Artificial Sequence
  Description of Artificial Sequence: Synthetic oligonucleotide
  Antisense strand to SEQ ID NO: 1970898
uucacggguacagaguuuc

SEQ ID NO: 1970900 - RNA, 19 nt, Artificial Sequence
  Description of Artificial Sequence: Synthetic oligonucleotide
  Sense strand starting at position 2809 of SEQ ID NO: 1880487
cucuguacccgugaaacaa

SEQ ID NO: 1970901 - RNA, 19 nt, Artificial Sequence
  Description of Artificial Sequence: Synthetic oligonucleotide
  Antisense strand to SEQ ID NO: 1970900
uuguuucacggguacagag

SEQ ID NO: 1970902 - RNA, 19 nt, Artificial Sequence
  Description of Artificial Sequence: Synthetic oligonucleotide
  Sense strand starting at position 2921 of SEQ ID NO: 1880487
acgguucucuggaggauug

SEQ ID NO: 1970903 - RNA, 19 nt, Artificial Sequence
  Description of Artificial Sequence: Synthetic oligonucleotide
  Antisense strand to SEQ ID NO: 1970902
caauccuccagagaaccgu

SEQ ID NO: 1970904 - RNA, 19 nt, Artificial Sequence
  Description of Artificial Sequence: Synthetic oligonucleotide
  Sense strand starting at position 2922 of SEQ ID NO: 1880487
cgguucucuggaggauugu

SEQ ID NO: 1970905 - RNA, 19 nt, Artificial Sequence
  Description of Artificial Sequence: Synthetic oligonucleotide
  Antisense strand to SEQ ID NO: 1970904
acaauccuccagagaaccg

SEQ ID NO: 1970906 - RNA, 19 nt, Artificial Sequence
  Description of Artificial Sequence: Synthetic oligonucleotide
  Sense strand starting at position 3197 of SEQ ID NO: 1880487
uugguccuaugagaaauca

SEQ ID NO: 1970907 - RNA, 19 nt, Artificial Sequence
  Description of Artificial Sequence: Synthetic oligonucleotide
  Antisense strand to SEQ ID NO: 1970906
ugauuucucauaggaccaa

SEQ ID NO: 1970908 - RNA, 19 nt, Artificial Sequence
  Description of Artificial Sequence: Synthetic oligonucleotide
  Sense strand starting at position 3209 of SEQ ID NO: 1880487
gaaaucaucugugaggaag

SEQ ID NO: 1970909 - RNA, 19 nt, Artificial Sequence
  Description of Artificial Sequence: Synthetic oligonucleotide
  Antisense strand to SEQ ID NO: 1970908
cuuccucacagaugauuuc

SEQ ID NO: 1970910 - RNA, 19 nt, Artificial Sequence
  Description of Artificial Sequence: Synthetic oligonucleotide
  Sense strand starting at position 3255 of SEQ ID NO: 1880487
cagugagguccugggauga

SEQ ID NO: 1970911 - RNA, 19 nt, Artificial Sequence
  Description of Artificial Sequence: Synthetic oligonucleotide
  Antisense strand to SEQ ID NO: 1970910
ucaucccaggaccucacug

SEQ ID NO: 1970912 - RNA, 19 nt, Artificial Sequence
  Description of Artificial Sequence: Synthetic oligonucleotide
  Sense strand starting at position 3363 of SEQ ID NO: 1880487
agagaagacucaggugauc

SEQ ID NO: 1970913 - RNA, 19 nt, Artificial Sequence
  Description of Artificial Sequence: Synthetic oligonucleotide
  Antisense strand to SEQ ID NO: 1970912
gaucaccugagucuucucu

SEQ ID NO: 1970914 - RNA, 19 nt, Artificial Sequence
  Description of Artificial Sequence: Synthetic oligonucleotide
  Sense strand starting at position 3402 of SEQ ID NO: 1880487
agugaaggaugauuaugua

SEQ ID NO: 1970915 - RNA, 19 nt, Artificial Sequence
  Description of Artificial Sequence: Synthetic oligonucleotide
  Antisense strand to SEQ ID NO: 1970914
uacauaaucauccuucacu

SEQ ID NO: 1970916 - RNA, 19 nt, Artificial Sequence
  Description of Artificial Sequence: Synthetic oligonucleotide
  Sense strand starting at position 3970 of SEQ ID NO: 1880487
ugagauaucugacauucuu

SEQ ID NO: 1970917 - RNA, 19 nt, Artificial Sequence
  Description of Artificial Sequence: Synthetic oligonucleotide
  Antisense strand to SEQ ID NO: 1970916
aagaaugucagauaucuca

SEQ ID NO: 1970918 - RNA, 19 nt, Artificial Sequence
  Description of Artificial Sequence: Synthetic oligonucleotide
  Sense strand starting at position 229 of SEQ ID NO: 1880488
agguaaaccugauuagguc

SEQ ID NO: 1970919 - RNA, 19 nt, Artificial Sequence
  Description of Artificial Sequence: Synthetic oligonucleotide
  Antisense strand to SEQ ID NO: 1970918
gaccuaaucagguuuaccu

SEQ ID NO: 1970920 - RNA, 19 nt, Artificial Sequence
  Description of Artificial Sequence: Synthetic oligonucleotide
  Sense strand starting at position 235 of SEQ ID NO: 1880488
accugauuaggucggcauu

SEQ ID NO: 1970921 - RNA, 19 nt, Artificial Sequence
  Description of Artificial Sequence: Synthetic oligonucleotide
  Antisense strand to SEQ ID NO: 1970920
aaugccgaccuaaucaggu

SEQ ID NO: 1970922 - RNA, 19 nt, Artificial Sequence
  Description of Artificial Sequence: Synthetic oligonucleotide
  Sense strand starting at position 237 of SEQ ID NO: 1880488
cugauuaggucggcauuca

SEQ ID NO: 1970923 - RNA, 19 nt, Artificial Sequence
  Description of Artificial Sequence: Synthetic oligonucleotide
  Antisense strand to SEQ ID NO: 1970922
ugaaugccgaccuaaucag

SEQ ID NO: 1970924 - RNA, 19 nt, Artificial Sequence
  Description of Artificial Sequence: Synthetic oligonucleotide
  Sense strand starting at position 594 of SEQ ID NO: 1880488
cgccuaggauucuugaauc

SEQ ID NO: 1970925 - RNA, 19 nt, Artificial Sequence
  Description of Artificial Sequence: Synthetic oligonucleotide
  Antisense strand to SEQ ID NO: 1970924
gauucaagaauccuaggcg

SEQ ID NO: 1970926 - RNA, 19 nt, Artificial Sequence
  Description of Artificial Sequence: Synthetic oligonucleotide
  Sense strand starting at position 1087 of SEQ ID NO: 1880488
uucccuuugccuuagguaa

SEQ ID NO: 1970927 - RNA, 19 nt, Artificial Sequence
  Description of Artificial Sequence: Synthetic oligonucleotide
  Antisense strand to SEQ ID NO: 1970926
uuaccuaaggcaaagggaa

SEQ ID NO: 1970928 - RNA, 19 nt, Artificial Sequence
  Description of Artificial Sequence: Synthetic oligonucleotide
  Sense strand starting at position 1089 of SEQ ID NO: 1880488
cccuuugccuuagguaaca

SEQ ID NO: 1970929 - RNA, 19 nt, Artificial Sequence
  Description of Artificial Sequence: Synthetic oligonucleotide
  Antisense strand to SEQ ID NO: 1970928
uguuaccuaaggcaaaggg

SEQ ID NO: 1970930 - RNA, 19 nt, Artificial Sequence
  Description of Artificial Sequence: Synthetic oligonucleotide
  Sense strand starting at position 1342 of SEQ ID NO: 1880488
ccugauuccugucuacuga

SEQ ID NO: 1970931 - RNA, 19 nt, Artificial Sequence
  Description of Artificial Sequence: Synthetic oligonucleotide
  Antisense strand to SEQ ID NO: 1970930
ucaguagacaggaaucagg

SEQ ID NO: 1970932 - RNA, 19 nt, Artificial Sequence
  Description of Artificial Sequence: Synthetic oligonucleotide
  Sense strand starting at position 1364 of SEQ ID NO: 1880488
cagccauacucuggaaguu

SEQ ID NO: 1970933 - RNA, 19 nt, Artificial Sequence
  Description of Artificial Sequence: Synthetic oligonucleotide
  Antisense strand to SEQ ID NO: 1970932
aacuuccagaguauggcug

SEQ ID NO: 1970934 - RNA, 19 nt, Artificial Sequence
  Description of Artificial Sequence: Synthetic oligonucleotide
  Sense strand starting at position 1593 of SEQ ID NO: 1880488
cgcagucucguucgaucua

SEQ ID NO: 1970935 - RNA, 19 nt, Artificial Sequence
  Description of Artificial Sequence: Synthetic oligonucleotide
  Antisense strand to SEQ ID NO: 1970934
uagaucgaacgagacugcg

SEQ ID NO: 1970936 - RNA, 19 nt, Artificial Sequence
  Description of Artificial Sequence: Synthetic oligonucleotide
  Sense strand starting at position 1594 of SEQ ID NO: 1880488
gcagucucguucgaucuau

SEQ ID NO: 1970937 - RNA, 19 nt, Artificial Sequence
  Description of Artificial Sequence: Synthetic oligonucleotide
  Antisense strand to SEQ ID NO: 1970936
auagaucgaacgagacugc

SEQ ID NO: 1970938 - RNA, 19 nt, Artificial Sequence
  Description of Artificial Sequence: Synthetic oligonucleotide
  Sense strand starting at position 1605 of SEQ ID NO: 1880488
cgaucuaucuuuccugcuu

SEQ ID NO: 1970939 - RNA, 19 nt, Artificial Sequence
  Description of Artificial Sequence: Synthetic oligonucleotide
  Antisense strand to SEQ ID NO: 1970938
aagcaggaaagauagaucg

SEQ ID NO: 1970940 - RNA, 19 nt, Artificial Sequence
  Description of Artificial Sequence: Synthetic oligonucleotide
  Sense strand starting at position 1734 of SEQ ID NO: 1880488
gguuucugcagccaacagu

SEQ ID NO: 1970941 - RNA, 19 nt, Artificial Sequence
  Description of Artificial Sequence: Synthetic oligonucleotide
  Antisense strand to SEQ ID NO: 1970940
acuguuggcugcagaaacc

SEQ ID NO: 1970942 - RNA, 19 nt, Artificial Sequence
  Description of Artificial Sequence: Synthetic oligonucleotide
  Sense strand starting at position 2004 of SEQ ID NO: 1880488
ugaggugcuccugaagaac

SEQ ID NO: 1970943 - RNA, 19 nt, Artificial Sequence
  Description of Artificial Sequence: Synthetic oligonucleotide
  Antisense strand to SEQ ID NO: 1970942
guucuucaggagcaccuca

SEQ ID NO: 1970944 - RNA, 19 nt, Artificial Sequence
  Description of Artificial Sequence: Synthetic oligonucleotide
  Sense strand starting at position 2032 of SEQ ID NO: 1880488
gggauagaauguuucuccu

SEQ ID NO: 1970945 - RNA, 19 nt, Artificial Sequence
  Description of Artificial Sequence: Synthetic oligonucleotide
  Antisense strand to SEQ ID NO: 1970944
aggagaaacauucuauccc

SEQ ID NO: 1970946 - RNA, 19 nt, Artificial Sequence
  Description of Artificial Sequence: Synthetic oligonucleotide
  Sense strand starting at position 2038 of SEQ ID NO: 1880488
gaauguuucuccucuagag

SEQ ID NO: 1970947 - RNA, 19 nt, Artificial Sequence
  Description of Artificial Sequence: Synthetic oligonucleotide
  Antisense strand to SEQ ID NO: 1970946
cucuagaggagaaacauuc

SEQ ID NO: 1970948 - RNA, 19 nt, Artificial Sequence
  Description of Artificial Sequence: Synthetic oligonucleotide
  Sense strand starting at position 2040 of SEQ ID NO: 1880488
auguuucuccucuagagug

SEQ ID NO: 1970949 - RNA, 19 nt, Artificial Sequence
  Description of Artificial Sequence: Synthetic oligonucleotide
  Antisense strand to SEQ ID NO: 1970948
cacucuagaggagaaacau

SEQ ID NO: 1970950 - RNA, 19 nt, Artificial Sequence
  Description of Artificial Sequence: Synthetic oligonucleotide
  Sense strand starting at position 2048 of SEQ ID NO: 1880488
ccucuagagugagcucaua

SEQ ID NO: 1970951 - RNA, 19 nt, Artificial Sequence
  Description of Artificial Sequence: Synthetic oligonucleotide
  Antisense strand to SEQ ID NO: 1970950
uaugagcucacucuagagg

SEQ ID NO: 1970952 - RNA, 19 nt, Artificial Sequence
  Description of Artificial Sequence: Synthetic oligonucleotide
  Sense strand starting at position 2068 of SEQ ID NO: 1880488
aacaaugugucaugggaga

SEQ ID NO: 1970953 - RNA, 19 nt, Artificial Sequence
  Description of Artificial Sequence: Synthetic oligonucleotide
  Antisense strand to SEQ ID NO: 1970952
ucucccaugacacauuguu

SEQ ID NO: 1970954 - RNA, 19 nt, Artificial Sequence
  Description of Artificial Sequence: Synthetic oligonucleotide
  Sense strand starting at position 2328 of SEQ ID NO: 1880488
gggcuaguuucuccucuca

SEQ ID NO: 1970955 - RNA, 19 nt, Artificial Sequence
  Description of Artificial Sequence: Synthetic oligonucleotide
  Antisense strand to SEQ ID NO: 1970954
ugagaggagaaacuagccc

SEQ ID NO: 1970956 - RNA, 19 nt, Artificial Sequence
  Description of Artificial Sequence: Synthetic oligonucleotide
  Sense strand starting at position 2330 of SEQ ID NO: 1880488
gcuaguuucuccucucauc

SEQ ID NO: 1970957 - RNA, 19 nt, Artificial Sequence
  Description of Artificial Sequence: Synthetic oligonucleotide
  Antisense strand to SEQ ID NO: 1970956
gaugagaggagaaacuagc

SEQ ID NO: 1970958 - RNA, 19 nt, Artificial Sequence
  Description of Artificial Sequence: Synthetic oligonucleotide
  Sense strand starting at position 2386 of SEQ ID NO: 1880488
gcugucuagucgugcucau

SEQ ID NO: 1970959 - RNA, 19 nt, Artificial Sequence
  Description of Artificial Sequence: Synthetic oligonucleotide
  Antisense strand to SEQ ID NO: 1970958
augagcacgacuagacagc

SEQ ID NO: 1970960 - RNA, 19 nt, Artificial Sequence
  Description of Artificial Sequence: Synthetic oligonucleotide
  Sense strand starting at position 2388 of SEQ ID NO: 1880488
ugucuagucgugcucauca

SEQ ID NO: 1970961 - RNA, 19 nt, Artificial Sequence
  Description of Artificial Sequence: Synthetic oligonucleotide
  Antisense strand to SEQ ID NO: 1970960
ugaugagcacgacuagaca

SEQ ID NO: 1970962 - RNA, 19 nt, Artificial Sequence
  Description of Artificial Sequence: Synthetic oligonucleotide
  Sense strand starting at position 2390 of SEQ ID NO: 1880488
ucuagucgugcucaucaga

SEQ ID NO: 1970963 - RNA, 19 nt, Artificial Sequence
  Description of Artificial Sequence: Synthetic oligonucleotide
  Antisense strand to SEQ ID NO: 1970962
ucugaugagcacgacuaga

SEQ ID NO: 1970964 - RNA, 19 nt, Artificial Sequence
  Description of Artificial Sequence: Synthetic oligonucleotide
  Sense strand starting at position 2393 of SEQ ID NO: 1880488
agucgugcucaucagaaag

SEQ ID NO: 1970965 - RNA, 19 nt, Artificial Sequence
  Description of Artificial Sequence: Synthetic oligonucleotide
  Antisense strand to SEQ ID NO: 1970964
cuuucugaugagcacgacu

SEQ ID NO: 1970966 - RNA, 19 nt, Artificial Sequence
  Description of Artificial Sequence: Synthetic oligonucleotide
  Sense strand starting at position 2403 of SEQ ID NO: 1880488
aucagaaagucucagugua

SEQ ID NO: 1970967 - RNA, 19 nt, Artificial Sequence
  Description of Artificial Sequence: Synthetic oligonucleotide
  Antisense strand to SEQ ID NO: 1970966
uacacugagacuuucugau

SEQ ID NO: 1970968 - RNA, 19 nt, Artificial Sequence
  Description of Artificial Sequence: Synthetic oligonucleotide
  Sense strand starting at position 2405 of SEQ ID NO: 1880488
cagaaagucucaguguaag

SEQ ID NO: 1970969 - RNA, 19 nt, Artificial Sequence
  Description of Artificial Sequence: Synthetic oligonucleotide
  Antisense strand to SEQ ID NO: 1970968
cuuacacugagacuuucug

SEQ ID NO: 1970970 - RNA, 19 nt, Artificial Sequence
  Description of Artificial Sequence: Synthetic oligonucleotide
  Sense strand starting at position 2431 of SEQ ID NO: 1880488
acuugaaugugcgccguau

SEQ ID NO: 1970971 - RNA, 19 nt, Artificial Sequence
  Description of Artificial Sequence: Synthetic oligonucleotide
  Antisense strand to SEQ ID NO: 1970970
auacggcgcacauucaagu

SEQ ID NO: 1970972 - RNA, 19 nt, Artificial Sequence
  Description of Artificial Sequence: Synthetic oligonucleotide
  Sense strand starting at position 3806 of SEQ ID NO: 1880488
guauuugaauccuaagcag

SEQ ID NO: 1970973 - RNA, 19 nt, Artificial Sequence
  Description of Artificial Sequence: Synthetic oligonucleotide
  Antisense strand to SEQ ID NO: 1970972
cugcuuaggauucaaauac

SEQ ID NO: 1970974 - RNA, 19 nt, Artificial Sequence
  Description of Artificial Sequence: Synthetic oligonucleotide
  Sense strand starting at position 3809 of SEQ ID NO: 1880488
uuugaauccuaagcagaug

SEQ ID NO: 1970975 - RNA, 19 nt, Artificial Sequence
  Description of Artificial Sequence: Synthetic oligonucleotide
  Antisense strand to SEQ ID NO: 1970974
caucugcuuaggauucaaa

SEQ ID NO: 1970976 - RNA, 19 nt, Artificial Sequence
  Description of Artificial Sequence: Synthetic oligonucleotide
  Sense strand starting at position 3868 of SEQ ID NO: 1880488
cauguauugccgcaaggag

SEQ ID NO: 1970977 - RNA, 19 nt, Artificial Sequence
  Description of Artificial Sequence: Synthetic oligonucleotide
  Antisense strand to SEQ ID NO: 1970976
cuccuugcggcaauacaug

SEQ ID NO: 1970978 - RNA, 19 nt, Artificial Sequence
  Description of Artificial Sequence: Synthetic oligonucleotide
  Sense strand starting at position 484 of SEQ ID NO: 1880489
acaguccuaguauaucauu

SEQ ID NO: 1970979 - RNA, 19 nt, Artificial Sequence
  Description of Artificial Sequence: Synthetic oligonucleotide
  Antisense strand to SEQ ID NO: 1970978
aaugauauacuaggacugu

SEQ ID NO: 1970980 - RNA, 19 nt, Artificial Sequence
  Description of Artificial Sequence: Synthetic oligonucleotide
  Sense strand starting at position 489 of SEQ ID NO: 1880489
ccuaguauaucauugacca

SEQ ID NO: 1970981 - RNA, 19 nt, Artificial Sequence
  Description of Artificial Sequence: Synthetic oligonucleotide
  Antisense strand to SEQ ID NO: 1970980
uggucaaugauauacuagg

SEQ ID NO: 1970982 - RNA, 19 nt, Artificial Sequence
  Description of Artificial Sequence: Synthetic oligonucleotide
  Sense strand starting at position 613 of SEQ ID NO: 1880489
aagagaauaacguguguug

SEQ ID NO: 1970983 - RNA, 19 nt, Artificial Sequence
  Description of Artificial Sequence: Synthetic oligonucleotide
  Antisense strand to SEQ ID NO: 1970982
caacacacguuauucucuu

SEQ ID NO: 1970984 - RNA, 19 nt, Artificial Sequence
  Description of Artificial Sequence: Synthetic oligonucleotide
  Sense strand starting at position 711 of SEQ ID NO: 1880489
uuuauaaagccuggguuua

SEQ ID NO: 1970985 - RNA, 19 nt, Artificial Sequence
  Description of Artificial Sequence: Synthetic oligonucleotide
  Antisense strand to SEQ ID NO: 1970984
uaaacccaggcuuuauaaa

SEQ ID NO: 1970986 - RNA, 19 nt, Artificial Sequence
  Description of Artificial Sequence: Synthetic oligonucleotide
  Sense strand starting at position 712 of SEQ ID NO: 1880489
uuauaaagccuggguuuaa

SEQ ID NO: 1970987 - RNA, 19 nt, Artificial Sequence
  Description of Artificial Sequence: Synthetic oligonucleotide
  Antisense strand to SEQ ID NO: 1970986
uuaaacccaggcuuuauaa

SEQ ID NO: 1970988 - RNA, 19 nt, Artificial Sequence
  Description of Artificial Sequence: Synthetic oligonucleotide
  Sense strand starting at position 757 of SEQ ID NO: 1880489
uuccuacaucacgagcauu

SEQ ID NO: 1970989 - RNA, 19 nt, Artificial Sequence
  Description of Artificial Sequence: Synthetic oligonucleotide
  Antisense strand to SEQ ID NO: 1970988
aaugcucgugauguaggaa

SEQ ID NO: 1970990 - RNA, 19 nt, Artificial Sequence
  Description of Artificial Sequence: Synthetic oligonucleotide
  Sense strand starting at position 767 of SEQ ID NO: 1880489
acgagcauuuaugugcaau

SEQ ID NO: 1970991 - RNA, 19 nt, Artificial Sequence
  Description of Artificial Sequence: Synthetic oligonucleotide
  Antisense strand to SEQ ID NO: 1970990
auugcacauaaaugcucgu

SEQ ID NO: 1970992 - RNA, 19 nt, Artificial Sequence
  Description of Artificial Sequence: Synthetic oligonucleotide
  Sense strand starting at position 768 of SEQ ID NO: 1880489
cgagcauuuaugugcaauu

SEQ ID NO: 1970993 - RNA, 19 nt, Artificial Sequence
  Description of Artificial Sequence: Synthetic oligonucleotide
  Antisense strand to SEQ ID NO: 1970992
aauugcacauaaaugcucg

SEQ ID NO: 1970994 - RNA, 19 nt, Artificial Sequence
  Description of Artificial Sequence: Synthetic oligonucleotide
  Sense strand starting at position 769 of SEQ ID NO: 1880489
gagcauuuaugugcaauua

SEQ ID NO: 1970995 - RNA, 19 nt, Artificial Sequence
  Description of Artificial Sequence: Synthetic oligonucleotide
  Antisense strand to SEQ ID NO: 1970994
uaauugcacauaaaugcuc

SEQ ID NO: 1970996 - RNA, 19 nt, Artificial Sequence
  Description of Artificial Sequence: Synthetic oligonucleotide
  Sense strand starting at position 917 of SEQ ID NO: 1880489
gcucaaagugcugagauga

SEQ ID NO: 1970997 - RNA, 19 nt, Artificial Sequence
  Description of Artificial Sequence: Synthetic oligonucleotide
  Antisense strand to SEQ ID NO: 1970996
ucaucucagcacuuugagc

SEQ ID NO: 1970998 - RNA, 19 nt, Artificial Sequence
  Description of Artificial Sequence: Synthetic oligonucleotide
  Sense strand starting at position 933 of SEQ ID NO: 1880489
ugaacauucuguccuagca

SEQ ID NO: 1970999 - RNA, 19 nt, Artificial Sequence
  Description of Artificial Sequence: Synthetic oligonucleotide
  Antisense strand to SEQ ID NO: 1970998
ugcuaggacagaauguuca

SEQ ID NO: 1971000 - RNA, 19 nt, Artificial Sequence
  Description of Artificial Sequence: Synthetic oligonucleotide
  Sense strand starting at position 941 of SEQ ID NO: 1880489
cuguccuagcacuaggaaa

SEQ ID NO: 1971001 - RNA, 19 nt, Artificial Sequence
  Description of Artificial Sequence: Synthetic oligonucleotide
  Antisense strand to SEQ ID NO: 1971000
uuuccuagugcuaggacag

SEQ ID NO: 1971002 - RNA, 19 nt, Artificial Sequence
  Description of Artificial Sequence: Synthetic oligonucleotide
  Sense strand starting at position 943 of SEQ ID NO: 1880489
guccuagcacuaggaaaua

SEQ ID NO: 1971003 - RNA, 19 nt, Artificial Sequence
  Description of Artificial Sequence: Synthetic oligonucleotide
  Antisense strand to SEQ ID NO: 1971002
uauuuccuagugcuaggac

SEQ ID NO: 1971004 - RNA, 19 nt, Artificial Sequence
  Description of Artificial Sequence: Synthetic oligonucleotide
  Sense strand starting at position 954 of SEQ ID NO: 1880489
aggaaauaaucauugucug

SEQ ID NO: 1971005 - RNA, 19 nt, Artificial Sequence
  Description of Artificial Sequence: Synthetic oligonucleotide
  Antisense strand to SEQ ID NO: 1971004
cagacaaugauuauuuccu

SEQ ID NO: 1971006 - RNA, 19 nt, Artificial Sequence
  Description of Artificial Sequence: Synthetic oligonucleotide
  Sense strand starting at position 1080 of SEQ ID NO: 1880489
ggcauaaaguguuuauaaa

SEQ ID NO: 1971007 - RNA, 19 nt, Artificial Sequence
  Description of Artificial Sequence: Synthetic oligonucleotide
  Antisense strand to SEQ ID NO: 1971006
uuuauaaacacuuuaugcc

SEQ ID NO: 1971008 - RNA, 19 nt, Artificial Sequence
  Description of Artificial Sequence: Synthetic oligonucleotide
  Sense strand starting at position 1180 of SEQ ID NO: 1880489
gcaaauguggacuggaauu

SEQ ID NO: 1971009 - RNA, 19 nt, Artificial Sequence
  Description of Artificial Sequence: Synthetic oligonucleotide
  Antisense strand to SEQ ID NO: 1971008
aauuccaguccacauuugc

SEQ ID NO: 1971010 - RNA, 19 nt, Artificial Sequence
  Description of Artificial Sequence: Synthetic oligonucleotide
  Sense strand starting at position 1221 of SEQ ID NO: 1880489
cugcucuaugccguuuauu

SEQ ID NO: 1971011 - RNA, 19 nt, Artificial Sequence
  Description of Artificial Sequence: Synthetic oligonucleotide
  Antisense strand to SEQ ID NO: 1971010
aauaaacggcauagagcag

SEQ ID NO: 1971012 - RNA, 19 nt, Artificial Sequence
  Description of Artificial Sequence: Synthetic oligonucleotide
  Sense strand starting at position 1222 of SEQ ID NO: 1880489
ugcucuaugccguuuauua

SEQ ID NO: 1971013 - RNA, 19 nt, Artificial Sequence
  Description of Artificial Sequence: Synthetic oligonucleotide
  Antisense strand to SEQ ID NO: 1971012
uaauaaacggcauagagca

SEQ ID NO: 1971014 - RNA, 19 nt, Artificial Sequence
  Description of Artificial Sequence: Synthetic oligonucleotide
  Sense strand starting at position 1223 of SEQ ID NO: 1880489
gcucuaugccguuuauuau

SEQ ID NO: 1971015 - RNA, 19 nt, Artificial Sequence
  Description of Artificial Sequence: Synthetic oligonucleotide
  Antisense strand to SEQ ID NO: 1971014
auaauaaacggcauagagc

SEQ ID NO: 1971016 - RNA, 19 nt, Artificial Sequence
  Description of Artificial Sequence: Synthetic oligonucleotide
  Sense strand starting at position 1233 of SEQ ID NO: 1880489
guuuauuaugaaggacuuu

SEQ ID NO: 1971017 - RNA, 19 nt, Artificial Sequence
  Description of Artificial Sequence: Synthetic oligonucleotide
  Antisense strand to SEQ ID NO: 1971016
aaaguccuucauaauaaac

SEQ ID NO: 1971018 - RNA, 19 nt, Artificial Sequence
  Description of Artificial Sequence: Synthetic oligonucleotide
  Sense strand starting at position 1741 of SEQ ID NO: 1880489
guuucuacgcguccgacaa

SEQ ID NO: 1971019 - RNA, 19 nt, Artificial Sequence
  Description of Artificial Sequence: Synthetic oligonucleotide
  Antisense strand to SEQ ID NO: 1971018
uugucggacgcguagaaac

SEQ ID NO: 1971020 - RNA, 19 nt, Artificial Sequence
  Description of Artificial Sequence: Synthetic oligonucleotide
  Sense strand starting at position 1853 of SEQ ID NO: 1880489
gcgguacgccuucuugaua

SEQ ID NO: 1971021 - RNA, 19 nt, Artificial Sequence
  Description of Artificial Sequence: Synthetic oligonucleotide
  Antisense strand to SEQ ID NO: 1971020
uaucaagaaggcguaccgc

SEQ ID NO: 1971022 - RNA, 19 nt, Artificial Sequence
  Description of Artificial Sequence: Synthetic oligonucleotide
  Sense strand starting at position 1864 of SEQ ID NO: 1880489
ucuugauacccucggacga

SEQ ID NO: 1971023 - RNA, 19 nt, Artificial Sequence
  Description of Artificial Sequence: Synthetic oligonucleotide
  Antisense strand to SEQ ID NO: 1971022
ucguccgaggguaucaaga

SEQ ID NO: 1971024 - RNA, 19 nt, Artificial Sequence
  Description of Artificial Sequence: Synthetic oligonucleotide
  Sense strand starting at position 2422 of SEQ ID NO: 1880489
ucuggauuaugccuaucau

SEQ ID NO: 1971025 - RNA, 19 nt, Artificial Sequence
  Description of Artificial Sequence: Synthetic oligonucleotide
  Antisense strand to SEQ ID NO: 1971024
augauaggcauaauccaga

SEQ ID NO: 1971026 - RNA, 19 nt, Artificial Sequence
  Description of Artificial Sequence: Synthetic oligonucleotide
  Sense strand starting at position 2423 of SEQ ID NO: 1880489
cuggauuaugccuaucaua

SEQ ID NO: 1971027 - RNA, 19 nt, Artificial Sequence
  Description of Artificial Sequence: Synthetic oligonucleotide
  Antisense strand to SEQ ID NO: 1971026
uaugauaggcauaauccag

SEQ ID NO: 1971028 - RNA, 19 nt, Artificial Sequence
  Description of Artificial Sequence: Synthetic oligonucleotide
  Sense strand starting at position 2437 of SEQ ID NO: 1880489
ucauauguacugcauuaga

SEQ ID NO: 1971029 - RNA, 19 nt, Artificial Sequence
  Description of Artificial Sequence: Synthetic oligonucleotide
  Antisense strand to SEQ ID NO: 1971028
ucuaaugcaguacauauga

SEQ ID NO: 1971030 - RNA, 19 nt, Artificial Sequence
  Description of Artificial Sequence: Synthetic oligonucleotide
  Sense strand starting at position 2440 of SEQ ID NO: 1880489
uauguacugcauuagagau

SEQ ID NO: 1971031 - RNA, 19 nt, Artificial Sequence
  Description of Artificial Sequence: Synthetic oligonucleotide
  Antisense strand to SEQ ID NO: 1971030
aucucuaaugcaguacaua

SEQ ID NO: 1971032 - RNA, 19 nt, Artificial Sequence
  Description of Artificial Sequence: Synthetic oligonucleotide
  Sense strand starting at position 2487 of SEQ ID NO: 1880489
ugggcaauuuaagaagaau

SEQ ID NO: 1971033 - RNA, 19 nt, Artificial Sequence
  Description of Artificial Sequence: Synthetic oligonucleotide
  Antisense strand to SEQ ID NO: 1971032
auucuucuuaaauugccca

SEQ ID NO: 1971034 - RNA, 19 nt, Artificial Sequence
  Description of Artificial Sequence: Synthetic oligonucleotide
  Sense strand starting at position 3302 of SEQ ID NO: 1880489
augggaugcagugauuauu

SEQ ID NO: 1971035 - RNA, 19 nt, Artificial Sequence
  Description of Artificial Sequence: Synthetic oligonucleotide
  Antisense strand to SEQ ID NO: 1971034
aauaaucacugcaucccau

SEQ ID NO: 1971036 - RNA, 19 nt, Artificial Sequence
  Description of Artificial Sequence: Synthetic oligonucleotide
  Sense strand starting at position 3310 of SEQ ID NO: 1880489
cagugauuauuuccgcuag

SEQ ID NO: 1971037 - RNA, 19 nt, Artificial Sequence
  Description of Artificial Sequence: Synthetic oligonucleotide
  Antisense strand to SEQ ID NO: 1971036
cuagcggaaauaaucacug

SEQ ID NO: 1971038 - RNA, 19 nt, Artificial Sequence
  Description of Artificial Sequence: Synthetic oligonucleotide
  Sense strand starting at position 3312 of SEQ ID NO: 1880489
gugauuauuuccgcuagaa

SEQ ID NO: 1971039 - RNA, 19 nt, Artificial Sequence
  Description of Artificial Sequence: Synthetic oligonucleotide
  Antisense strand to SEQ ID NO: 1971038
uucuagcggaaauaaucac

SEQ ID NO: 1971040 - RNA, 19 nt, Artificial Sequence
  Description of Artificial Sequence: Synthetic oligonucleotide
  Sense strand starting at position 3414 of SEQ ID NO: 1880489
acuggauucuuugcuuuga

SEQ ID NO: 1971041 - RNA, 19 nt, Artificial Sequence
  Description of Artificial Sequence: Synthetic oligonucleotide
  Antisense strand to SEQ ID NO: 1971040
ucaaagcaaagaauccagu

SEQ ID NO: 1971042 - RNA, 19 nt, Artificial Sequence
  Description of Artificial Sequence: Synthetic oligonucleotide
  Sense strand starting at position 3416 of SEQ ID NO: 1880489
uggauucuuugcuuugaua

SEQ ID NO: 1971043 - RNA, 19 nt, Artificial Sequence
  Description of Artificial Sequence: Synthetic oligonucleotide
  Antisense strand to SEQ ID NO: 1971042
uaucaaagcaaagaaucca

SEQ ID NO: 1971044 - RNA, 19 nt, Artificial Sequence
  Description of Artificial Sequence: Synthetic oligonucleotide
  Sense strand starting at position 3516 of SEQ ID NO: 1880489
aaggguauuagguguaaug

SEQ ID NO: 1971045 - RNA, 19 nt, Artificial Sequence
  Description of Artificial Sequence: Synthetic oligonucleotide
  Antisense strand to SEQ ID NO: 1971044
cauuacaccuaauacccuu

SEQ ID NO: 1971046 - RNA, 19 nt, Artificial Sequence
  Description of Artificial Sequence: Synthetic oligonucleotide
  Sense strand starting at position 3518 of SEQ ID NO: 1880489
ggguauuagguguaaugag

SEQ ID NO: 1971047 - RNA, 19 nt, Artificial Sequence
  Description of Artificial Sequence: Synthetic oligonucleotide
  Antisense strand to SEQ ID NO: 1971046
cucauuacaccuaauaccc

SEQ ID NO: 1971048 - RNA, 19 nt, Artificial Sequence
  Description of Artificial Sequence: Synthetic oligonucleotide
  Sense strand starting at position 3525 of SEQ ID NO: 1880489
agguguaaugaggaugugu

SEQ ID NO: 1971049 - RNA, 19 nt, Artificial Sequence
  Description of Artificial Sequence: Synthetic oligonucleotide
  Antisense strand to SEQ ID NO: 1971048
acacauccucauuacaccu

SEQ ID NO: 1971050 - RNA, 19 nt, Artificial Sequence
  Description of Artificial Sequence: Synthetic oligonucleotide
  Sense strand starting at position 3530 of SEQ ID NO: 1880489
uaaugaggauguguuaucu

SEQ ID NO: 1971051 - RNA, 19 nt, Artificial Sequence
  Description of Artificial Sequence: Synthetic oligonucleotide
  Antisense strand to SEQ ID NO: 1971050
agauaacacauccucauua

SEQ ID NO: 1971052 - RNA, 19 nt, Artificial Sequence
  Description of Artificial Sequence: Synthetic oligonucleotide
  Sense strand starting at position 3539 of SEQ ID NO: 1880489
uguguuaucucaccagaac

SEQ ID NO: 1971053 - RNA, 19 nt, Artificial Sequence
  Description of Artificial Sequence: Synthetic oligonucleotide
  Antisense strand to SEQ ID NO: 1971052
guucuggugagauaacaca

SEQ ID NO: 1971054 - RNA, 19 nt, Artificial Sequence
  Description of Artificial Sequence: Synthetic oligonucleotide
  Sense strand starting at position 3540 of SEQ ID NO: 1880489
guguuaucucaccagaaca

SEQ ID NO: 1971055 - RNA, 19 nt, Artificial Sequence
  Description of Artificial Sequence: Synthetic oligonucleotide
  Antisense strand to SEQ ID NO: 1971054
uguucuggugagauaacac

SEQ ID NO: 1971056 - RNA, 19 nt, Artificial Sequence
  Description of Artificial Sequence: Synthetic oligonucleotide
  Sense strand starting at position 3614 of SEQ ID NO: 1880489
uugguaagcacgcaaugaa

SEQ ID NO: 1971057 - RNA, 19 nt, Artificial Sequence
  Description of Artificial Sequence: Synthetic oligonucleotide
  Antisense strand to SEQ ID NO: 1971056
uucauugcgugcuuaccaa

SEQ ID NO: 1971058 - RNA, 19 nt, Artificial Sequence
  Description of Artificial Sequence: Synthetic oligonucleotide
  Sense strand starting at position 7 of SEQ ID NO: 1880490
uguuaaauagcucaauuag

SEQ ID NO: 1971059 - RNA, 19 nt, Artificial Sequence
  Description of Artificial Sequence: Synthetic oligonucleotide
  Antisense strand to SEQ ID NO: 1971058
cuaauugagcuauuuaaca

SEQ ID NO: 1971060 - RNA, 19 nt, Artificial Sequence
  Description of Artificial Sequence: Synthetic oligonucleotide
  Sense strand starting at position 255 of SEQ ID NO: 1880490
ucugaagggugguuaauga

SEQ ID NO: 1971061 - RNA, 19 nt, Artificial Sequence
  Description of Artificial Sequence: Synthetic oligonucleotide
  Antisense strand to SEQ ID NO: 1971060
ucauuaaccacccuucaga

SEQ ID NO: 1971062 - RNA, 19 nt, Artificial Sequence
  Description of Artificial Sequence: Synthetic oligonucleotide
  Sense strand starting at position 271 of SEQ ID NO: 1880490
ugagcaauguaggugaaga

SEQ ID NO: 1971063 - RNA, 19 nt, Artificial Sequence
  Description of Artificial Sequence: Synthetic oligonucleotide
  Antisense strand to SEQ ID NO: 1971062
ucuucaccuacauugcuca

SEQ ID NO: 1971064 - RNA, 19 nt, Artificial Sequence
  Description of Artificial Sequence: Synthetic oligonucleotide
  Sense strand starting at position 272 of SEQ ID NO: 1880490
gagcaauguaggugaagac

SEQ ID NO: 1971065 - RNA, 19 nt, Artificial Sequence
  Description of Artificial Sequence: Synthetic oligonucleotide
  Antisense strand to SEQ ID NO: 1971064
gucuucaccuacauugcuc

SEQ ID NO: 1971066 - RNA, 19 nt, Artificial Sequence
  Description of Artificial Sequence: Synthetic oligonucleotide
  Sense strand starting at position 293 of SEQ ID NO: 1880490
cugagagauaccugggcau

SEQ ID NO: 1971067 - RNA, 19 nt, Artificial Sequence
  Description of Artificial Sequence: Synthetic oligonucleotide
  Antisense strand to SEQ ID NO: 1971066
augcccagguaucucucag

SEQ ID NO: 1971068 - RNA, 19 nt, Artificial Sequence
  Description of Artificial Sequence: Synthetic oligonucleotide
  Sense strand starting at position 714 of SEQ ID NO: 1880490
agacauaaacagugucaga

SEQ ID NO: 1971069 - RNA, 19 nt, Artificial Sequence
  Description of Artificial Sequence: Synthetic oligonucleotide
  Antisense strand to SEQ ID NO: 1971068
ucugacacuguuuaugucu

SEQ ID NO: 1971070 - RNA, 19 nt, Artificial Sequence
  Description of Artificial Sequence: Synthetic oligonucleotide
  Sense strand starting at position 742 of SEQ ID NO: 1880490
augagaaagcugcauucua

SEQ ID NO: 1971071 - RNA, 19 nt, Artificial Sequence
  Description of Artificial Sequence: Synthetic oligonucleotide
  Antisense strand to SEQ ID NO: 1971070
uagaaugcagcuuucucau

SEQ ID NO: 1971072 - RNA, 19 nt, Artificial Sequence
  Description of Artificial Sequence: Synthetic oligonucleotide
  Sense strand starting at position 874 of SEQ ID NO: 1880490
gucuguugucuguuucagu

SEQ ID NO: 1971073 - RNA, 19 nt, Artificial Sequence
  Description of Artificial Sequence: Synthetic oligonucleotide
  Antisense strand to SEQ ID NO: 1971072
acugaaacagacaacagac

SEQ ID NO: 1971074 - RNA, 19 nt, Artificial Sequence
  Description of Artificial Sequence: Synthetic oligonucleotide
  Sense strand starting at position 1154 of SEQ ID NO: 1880490
cuaucuauuggguauaugu

SEQ ID NO: 1971075 - RNA, 19 nt, Artificial Sequence
  Description of Artificial Sequence: Synthetic oligonucleotide
  Antisense strand to SEQ ID NO: 1971074
acauauacccaauagauag

SEQ ID NO: 1971076 - RNA, 19 nt, Artificial Sequence
  Description of Artificial Sequence: Synthetic oligonucleotide
  Sense strand starting at position 1167 of SEQ ID NO: 1880490
auauguuucccuuggaagg

SEQ ID NO: 1971077 - RNA, 19 nt, Artificial Sequence
  Description of Artificial Sequence: Synthetic oligonucleotide
  Antisense strand to SEQ ID NO: 1971076
ccuuccaagggaaacauau

SEQ ID NO: 1971078 - RNA, 19 nt, Artificial Sequence
  Description of Artificial Sequence: Synthetic oligonucleotide
  Sense strand starting at position 1168 of SEQ ID NO: 1880490
uauguuucccuuggaagga

SEQ ID NO: 1971079 - RNA, 19 nt, Artificial Sequence
  Description of Artificial Sequence: Synthetic oligonucleotide
  Antisense strand to SEQ ID NO: 1971078
uccuuccaagggaaacaua

SEQ ID NO: 1971080 - RNA, 19 nt, Artificial Sequence
  Description of Artificial Sequence: Synthetic oligonucleotide
  Sense strand starting at position 1295 of SEQ ID NO: 1880490
ugauucgggugguuuauuu

SEQ ID NO: 1971081 - RNA, 19 nt, Artificial Sequence
  Description of Artificial Sequence: Synthetic oligonucleotide
  Antisense strand to SEQ ID NO: 1971080
aaauaaaccacccgaauca

SEQ ID NO: 1971082 - RNA, 19 nt, Artificial Sequence
  Description of Artificial Sequence: Synthetic oligonucleotide
  Sense strand starting at position 1408 of SEQ ID NO: 1880490
cugaaauuagaccgguaga

SEQ ID NO: 1971083 - RNA, 19 nt, Artificial Sequence
  Description of Artificial Sequence: Synthetic oligonucleotide
  Antisense strand to SEQ ID NO: 1971082
ucuaccggucuaauuucag

SEQ ID NO: 1971084 - RNA, 19 nt, Artificial Sequence
  Description of Artificial Sequence: Synthetic oligonucleotide
  Sense strand starting at position 1409 of SEQ ID NO: 1880490
ugaaauuagaccgguagau

SEQ ID NO: 1971085 - RNA, 19 nt, Artificial Sequence
  Description of Artificial Sequence: Synthetic oligonucleotide
  Antisense strand to SEQ ID NO: 1971084
aucuaccggucuaauuuca

SEQ ID NO: 1971086 - RNA, 19 nt, Artificial Sequence
  Description of Artificial Sequence: Synthetic oligonucleotide
  Sense strand starting at position 1453 of SEQ ID NO: 1880490
uuuguaauuuccgugggua

SEQ ID NO: 1971087 - RNA, 19 nt, Artificial Sequence
  Description of Artificial Sequence: Synthetic oligonucleotide
  Antisense strand to SEQ ID NO: 1971086
uacccacggaaauuacaaa

SEQ ID NO: 1971088 - RNA, 19 nt, Artificial Sequence
  Description of Artificial Sequence: Synthetic oligonucleotide
  Sense strand starting at position 1494 of SEQ ID NO: 1880490
ugcuaaugugcuuuguguu

SEQ ID NO: 1971089 - RNA, 19 nt, Artificial Sequence
  Description of Artificial Sequence: Synthetic oligonucleotide
  Antisense strand to SEQ ID NO: 1971088
aacacaaagcacauuagca

SEQ ID NO: 1971090 - RNA, 19 nt, Artificial Sequence
  Description of Artificial Sequence: Synthetic oligonucleotide
  Sense strand starting at position 1809 of SEQ ID NO: 1880490
uguauaagucacuaguaaa

SEQ ID NO: 1971091 - RNA, 19 nt, Artificial Sequence
  Description of Artificial Sequence: Synthetic oligonucleotide
  Antisense strand to SEQ ID NO: 1971090
uuuacuagugacuuauaca

SEQ ID NO: 1971092 - RNA, 19 nt, Artificial Sequence
  Description of Artificial Sequence: Synthetic oligonucleotide
  Sense strand starting at position 1838 of SEQ ID NO: 1880490
aggauaaucccucaucugu

SEQ ID NO: 1971093 - RNA, 19 nt, Artificial Sequence
  Description of Artificial Sequence: Synthetic oligonucleotide
  Antisense strand to SEQ ID NO: 1971092
acagaugagggauuauccu

SEQ ID NO: 1971094 - RNA, 19 nt, Artificial Sequence
  Description of Artificial Sequence: Synthetic oligonucleotide
  Sense strand starting at position 1934 of SEQ ID NO: 1880490
augacaaagaguugacagu

SEQ ID NO: 1971095 - RNA, 19 nt, Artificial Sequence
  Description of Artificial Sequence: Synthetic oligonucleotide
  Antisense strand to SEQ ID NO: 1971094
acugucaacucuuugucau

SEQ ID NO: 1971096 - RNA, 19 nt, Artificial Sequence
  Description of Artificial Sequence: Synthetic oligonucleotide
  Sense strand starting at position 1960 of SEQ ID NO: 1880490
ugugguaaaugauuccaga

SEQ ID NO: 1971097 - RNA, 19 nt, Artificial Sequence
  Description of Artificial Sequence: Synthetic oligonucleotide
  Antisense strand to SEQ ID NO: 1971096
ucuggaaucauuuaccaca

SEQ ID NO: 1971098 - RNA, 19 nt, Artificial Sequence
  Description of Artificial Sequence: Synthetic oligonucleotide
  Sense strand starting at position 2010 of SEQ ID NO: 1880490
cccagcagaccugauuaau

SEQ ID NO: 1971099 - RNA, 19 nt, Artificial Sequence
  Description of Artificial Sequence: Synthetic oligonucleotide
  Antisense strand to SEQ ID NO: 1971098
auuaaucaggucugcuggg

SEQ ID NO: 1971100 - RNA, 19 nt, Artificial Sequence
  Description of Artificial Sequence: Synthetic oligonucleotide
  Sense strand starting at position 2091 of SEQ ID NO: 1880490
ccacuacuaggcugaaaua

SEQ ID NO: 1971101 - RNA, 19 nt, Artificial Sequence
  Description of Artificial Sequence: Synthetic oligonucleotide
  Antisense strand to SEQ ID NO: 1971100
uauuucagccuaguagugg

SEQ ID NO: 1971102 - RNA, 19 nt, Artificial Sequence
  Description of Artificial Sequence: Synthetic oligonucleotide
  Sense strand starting at position 2147 of SEQ ID NO: 1880490
acagguuuagcucacuaag

SEQ ID NO: 1971103 - RNA, 19 nt, Artificial Sequence
  Description of Artificial Sequence: Synthetic oligonucleotide
  Antisense strand to SEQ ID NO: 1971102
cuuagugagcuaaaccugu

SEQ ID NO: 1971104 - RNA, 19 nt, Artificial Sequence
  Description of Artificial Sequence: Synthetic oligonucleotide
  Sense strand starting at position 2212 of SEQ ID NO: 1880490
gcauuuagucuuuauugca

SEQ ID NO: 1971105 - RNA, 19 nt, Artificial Sequence
  Description of Artificial Sequence: Synthetic oligonucleotide
  Antisense strand to SEQ ID NO: 1971104
ugcaauaaagacuaaaugc

SEQ ID NO: 1971106 - RNA, 19 nt, Artificial Sequence
  Description of Artificial Sequence: Synthetic oligonucleotide
  Sense strand starting at position 2222 of SEQ ID NO: 1880490
uuuauugcagcucaaggaa

SEQ ID NO: 1971107 - RNA, 19 nt, Artificial Sequence
  Description of Artificial Sequence: Synthetic oligonucleotide
  Antisense strand to SEQ ID NO: 1971106
uuccuugagcugcaauaaa

SEQ ID NO: 1971108 - RNA, 19 nt, Artificial Sequence
  Description of Artificial Sequence: Synthetic oligonucleotide
  Sense strand starting at position 2391 of SEQ ID NO: 1880490
auuucaucgguuugggcua

SEQ ID NO: 1971109 - RNA, 19 nt, Artificial Sequence
  Description of Artificial Sequence: Synthetic oligonucleotide
  Antisense strand to SEQ ID NO: 1971108
uagcccaaaccgaugaaau

SEQ ID NO: 1971110 - RNA, 19 nt, Artificial Sequence
  Description of Artificial Sequence: Synthetic oligonucleotide
  Sense strand starting at position 2473 of SEQ ID NO: 1880490
cucuguaauuugucauggu

SEQ ID NO: 1971111 - RNA, 19 nt, Artificial Sequence
  Description of Artificial Sequence: Synthetic oligonucleotide
  Antisense strand to SEQ ID NO: 1971110
accaugacaaauuacagag

SEQ ID NO: 1971112 - RNA, 19 nt, Artificial Sequence
  Description of Artificial Sequence: Synthetic oligonucleotide
  Sense strand starting at position 2497 of SEQ ID NO: 1880490
caaagugaugaguauugca

SEQ ID NO: 1971113 - RNA, 19 nt, Artificial Sequence
  Description of Artificial Sequence: Synthetic oligonucleotide
  Antisense strand to SEQ ID NO: 1971112
ugcaauacucaucacuuug

SEQ ID NO: 1971114 - RNA, 19 nt, Artificial Sequence
  Description of Artificial Sequence: Synthetic oligonucleotide
  Sense strand starting at position 2588 of SEQ ID NO: 1880490
gggaaucugauacaguguu

SEQ ID NO: 1971115 - RNA, 19 nt, Artificial Sequence
  Description of Artificial Sequence: Synthetic oligonucleotide
  Antisense strand to SEQ ID NO: 1971114
aacacuguaucagauuccc

SEQ ID NO: 1971116 - RNA, 19 nt, Artificial Sequence
  Description of Artificial Sequence: Synthetic oligonucleotide
  Sense strand starting at position 2934 of SEQ ID NO: 1880490
ugauauguuguuuagaaug

SEQ ID NO: 1971117 - RNA, 19 nt, Artificial Sequence
  Description of Artificial Sequence: Synthetic oligonucleotide
  Antisense strand to SEQ ID NO: 1971116
cauucuaaacaacauauca

SEQ ID NO: 1971118 - RNA, 19 nt, Artificial Sequence
  Description of Artificial Sequence: Synthetic oligonucleotide
  Sense strand starting at position 3080 of SEQ ID NO: 1880490
agaugauaaucugcaaacu

SEQ ID NO: 1971119 - RNA, 19 nt, Artificial Sequence
  Description of Artificial Sequence: Synthetic oligonucleotide
  Antisense strand to SEQ ID NO: 1971118
aguuugcagauuaucaucu

SEQ ID NO: 1971120 - RNA, 19 nt, Artificial Sequence
  Description of Artificial Sequence: Synthetic oligonucleotide
  Sense strand starting at position 3281 of SEQ ID NO: 1880490
cuguuuagacauuauguca

SEQ ID NO: 1971121 - RNA, 19 nt, Artificial Sequence
  Description of Artificial Sequence: Synthetic oligonucleotide
  Antisense strand to SEQ ID NO: 1971120
ugacauaaugucuaaacag

SEQ ID NO: 1971122 - RNA, 19 nt, Artificial Sequence
  Description of Artificial Sequence: Synthetic oligonucleotide
  Sense strand starting at position 3554 of SEQ ID NO: 1880490
cucagagcucuugaucauc

SEQ ID NO: 1971123 - RNA, 19 nt, Artificial Sequence
  Description of Artificial Sequence: Synthetic oligonucleotide
  Antisense strand to SEQ ID NO: 1971122
gaugaucaagagcucugag

SEQ ID NO: 1971124 - RNA, 19 nt, Artificial Sequence
  Description of Artificial Sequence: Synthetic oligonucleotide
  Sense strand starting at position 3557 of SEQ ID NO: 1880490
agagcucuugaucaucagu

SEQ ID NO: 1971125 - RNA, 19 nt, Artificial Sequence
  Description of Artificial Sequence: Synthetic oligonucleotide
  Antisense strand to SEQ ID NO: 1971124
acugaugaucaagagcucu

SEQ ID NO: 1971126 - RNA, 19 nt, Artificial Sequence
  Description of Artificial Sequence: Synthetic oligonucleotide
  Sense strand starting at position 3644 of SEQ ID NO: 1880490
uggacuuuccuacauguca

SEQ ID NO: 1971127 - RNA, 19 nt, Artificial Sequence
  Description of Artificial Sequence: Synthetic oligonucleotide
  Antisense strand to SEQ ID NO: 1971126
ugacauguaggaaagucca

SEQ ID NO: 1971128 - RNA, 19 nt, Artificial Sequence
  Description of Artificial Sequence: Synthetic oligonucleotide
  Sense strand starting at position 3697 of SEQ ID NO: 1880490
gaauauggauuuggaaaug

SEQ ID NO: 1971129 - RNA, 19 nt, Artificial Sequence
  Description of Artificial Sequence: Synthetic oligonucleotide
  Antisense strand to SEQ ID NO: 1971128
cauuuccaaauccauauuc

SEQ ID NO: 1971130 - RNA, 19 nt, Artificial Sequence
  Description of Artificial Sequence: Synthetic oligonucleotide
  Sense strand starting at position 3760 of SEQ ID NO: 1880490
gaacuacaucacuggaguu

SEQ ID NO: 1971131 - RNA, 19 nt, Artificial Sequence
  Description of Artificial Sequence: Synthetic oligonucleotide
  Antisense strand to SEQ ID NO: 1971130
aacuccagugauguaguuc

SEQ ID NO: 1971132 - RNA, 19 nt, Artificial Sequence
  Description of Artificial Sequence: Synthetic oligonucleotide
  Sense strand starting at position 3778 of SEQ ID NO: 1880490
ucaagcaggauuuguguuu

SEQ ID NO: 1971133 - RNA, 19 nt, Artificial Sequence
  Description of Artificial Sequence: Synthetic oligonucleotide
  Antisense strand to SEQ ID NO: 1971132
aaacacaaauccugcuuga

SEQ ID NO: 1971134 - RNA, 19 nt, Artificial Sequence
  Description of Artificial Sequence: Synthetic oligonucleotide
  Sense strand starting at position 3840 of SEQ ID NO: 1880490
gucucauucgaauaauauu

SEQ ID NO: 1971135 - RNA, 19 nt, Artificial Sequence
  Description of Artificial Sequence: Synthetic oligonucleotide
  Antisense strand to SEQ ID NO: 1971134
aauauuauucgaaugagac

SEQ ID NO: 1971136 - RNA, 19 nt, Artificial Sequence
  Description of Artificial Sequence: Synthetic oligonucleotide
  Sense strand starting at position 3894 of SEQ ID NO: 1880490
guaccuguagacuagauau

SEQ ID NO: 1971137 - RNA, 19 nt, Artificial Sequence
  Description of Artificial Sequence: Synthetic oligonucleotide
  Antisense strand to SEQ ID NO: 1971136
auaucuagucuacagguac

SEQ ID NO: 1971138 - RNA, 19 nt, Artificial Sequence
  Description of Artificial Sequence: Synthetic oligonucleotide
  Sense strand starting at position 1108 of SEQ ID NO: 1880491
cguugucacccaugaucuu

SEQ ID NO: 1971139 - RNA, 19 nt, Artificial Sequence
  Description of Artificial Sequence: Synthetic oligonucleotide
  Antisense strand to SEQ ID NO: 1971138
aagaucaugggugacaacg

SEQ ID NO: 1971140 - RNA, 19 nt, Artificial Sequence
  Description of Artificial Sequence: Synthetic oligonucleotide
  Sense strand starting at position 1140 of SEQ ID NO: 1880491
ggcccaucauacuguaauu

SEQ ID NO: 1971141 - RNA, 19 nt, Artificial Sequence
  Description of Artificial Sequence: Synthetic oligonucleotide
  Antisense strand to SEQ ID NO: 1971140
aauuacaguaugaugggcc

SEQ ID NO: 1971142 - RNA, 19 nt, Artificial Sequence
  Description of Artificial Sequence: Synthetic oligonucleotide
  Sense strand starting at position 1223 of SEQ ID NO: 1880491
cugucuuaguucuugucca

SEQ ID NO: 1971143 - RNA, 19 nt, Artificial Sequence
  Description of Artificial Sequence: Synthetic oligonucleotide
  Antisense strand to SEQ ID NO: 1971142
uggacaagaacuaagacag

SEQ ID NO: 1971144 - RNA, 19 nt, Artificial Sequence
  Description of Artificial Sequence: Synthetic oligonucleotide
  Sense strand starting at position 1231 of SEQ ID NO: 1880491
guucuuguccagugcaaga

SEQ ID NO: 1971145 - RNA, 19 nt, Artificial Sequence
  Description of Artificial Sequence: Synthetic oligonucleotide
  Antisense strand to SEQ ID NO: 1971144
ucuugcacuggacaagaac

SEQ ID NO: 1971146 - RNA, 19 nt, Artificial Sequence
  Description of Artificial Sequence: Synthetic oligonucleotide
  Sense strand starting at position 3368 of SEQ ID NO: 1880491
agaguuugauaccugccua

SEQ ID NO: 1971147 - RNA, 19 nt, Artificial Sequence
  Description of Artificial Sequence: Synthetic oligonucleotide
  Antisense strand to SEQ ID NO: 1971146
uaggcagguaucaaacucu

SEQ ID NO: 1971148 - RNA, 19 nt, Artificial Sequence
  Description of Artificial Sequence: Synthetic oligonucleotide
  Sense strand starting at position 159 of SEQ ID NO: 1880492
agcauuggguucuuucuau

SEQ ID NO: 1971149 - RNA, 19 nt, Artificial Sequence
  Description of Artificial Sequence: Synthetic oligonucleotide
  Antisense strand to SEQ ID NO: 1971148
auagaaagaacccaaugcu

SEQ ID NO: 1971150 - RNA, 19 nt, Artificial Sequence
  Description of Artificial Sequence: Synthetic oligonucleotide
  Sense strand starting at position 184 of SEQ ID NO: 1880492
guucaaaguguugguaaau

SEQ ID NO: 1971151 - RNA, 19 nt, Artificial Sequence
  Description of Artificial Sequence: Synthetic oligonucleotide
  Antisense strand to SEQ ID NO: 1971150
auuuaccaacacuuugaac

SEQ ID NO: 1971152 - RNA, 19 nt, Artificial Sequence
  Description of Artificial Sequence: Synthetic oligonucleotide
  Sense strand starting at position 211 of SEQ ID NO: 1880492
agaaguagauugccaucuu

SEQ ID NO: 1971153 - RNA, 19 nt, Artificial Sequence
  Description of Artificial Sequence: Synthetic oligonucleotide
  Antisense strand to SEQ ID NO: 1971152
aagauggcaaucuacuucu

SEQ ID NO: 1971154 - RNA, 19 nt, Artificial Sequence
  Description of Artificial Sequence: Synthetic oligonucleotide
  Sense strand starting at position 322 of SEQ ID NO: 1880492
gcagguucuaguuacauga

SEQ ID NO: 1971155 - RNA, 19 nt, Artificial Sequence
  Description of Artificial Sequence: Synthetic oligonucleotide
  Antisense strand to SEQ ID NO: 1971154
ucauguaacuagaaccugc

SEQ ID NO: 1971156 - RNA, 19 nt, Artificial Sequence
  Description of Artificial Sequence: Synthetic oligonucleotide
  Sense strand starting at position 371 of SEQ ID NO: 1880492
caguuauauuggccauuga

SEQ ID NO: 1971157 - RNA, 19 nt, Artificial Sequence
  Description of Artificial Sequence: Synthetic oligonucleotide
  Antisense strand to SEQ ID NO: 1971156
ucaauggccaauauaacug

SEQ ID NO: 1971158 - RNA, 19 nt, Artificial Sequence
  Description of Artificial Sequence: Synthetic oligonucleotide
  Sense strand starting at position 425 of SEQ ID NO: 1880492
cuagaugccuucucugauu

SEQ ID NO: 1971159 - RNA, 19 nt, Artificial Sequence
  Description of Artificial Sequence: Synthetic oligonucleotide
  Antisense strand to SEQ ID NO: 1971158
aaucagagaaggcaucuag

SEQ ID NO: 1971160 - RNA, 19 nt, Artificial Sequence
  Description of Artificial Sequence: Synthetic oligonucleotide
  Sense strand starting at position 447 of SEQ ID NO: 1880492
ugacucaaucaaugauguu

SEQ ID NO: 1971161 - RNA, 19 nt, Artificial Sequence
  Description of Artificial Sequence: Synthetic oligonucleotide
  Antisense strand to SEQ ID NO: 1971160
aacaucauugauugaguca

SEQ ID NO: 1971162 - RNA, 19 nt, Artificial Sequence
  Description of Artificial Sequence: Synthetic oligonucleotide
  Sense strand starting at position 462 of SEQ ID NO: 1880492
uguuaucucagauggcaga

SEQ ID NO: 1971163 - RNA, 19 nt, Artificial Sequence
  Description of Artificial Sequence: Synthetic oligonucleotide
  Antisense strand to SEQ ID NO: 1971162
ucugccaucugagauaaca

SEQ ID NO: 1971164 - RNA, 19 nt, Artificial Sequence
  Description of Artificial Sequence: Synthetic oligonucleotide
  Sense strand starting at position 463 of SEQ ID NO: 1880492
guuaucucagauggcagaa

SEQ ID NO: 1971165 - RNA, 19 nt, Artificial Sequence
  Description of Artificial Sequence: Synthetic oligonucleotide
  Antisense strand to SEQ ID NO: 1971164
uucugccaucugagauaac

SEQ ID NO: 1971166 - RNA, 19 nt, Artificial Sequence
  Description of Artificial Sequence: Synthetic oligonucleotide
  Sense strand starting at position 528 of SEQ ID NO: 1880492
accugcucucucgagggau

SEQ ID NO: 1971167 - RNA, 19 nt, Artificial Sequence
  Description of Artificial Sequence: Synthetic oligonucleotide
  Antisense strand to SEQ ID NO: 1971166
aucccucgagagagcaggu

SEQ ID NO: 1971168 - RNA, 19 nt, Artificial Sequence
  Description of Artificial Sequence: Synthetic oligonucleotide
  Sense strand starting at position 532 of SEQ ID NO: 1880492
gcucucucgagggauagga

SEQ ID NO: 1971169 - RNA, 19 nt, Artificial Sequence
  Description of Artificial Sequence: Synthetic oligonucleotide
  Antisense strand to SEQ ID NO: 1971168
uccuaucccucgagagagc

SEQ ID NO: 1971170 - RNA, 19 nt, Artificial Sequence
  Description of Artificial Sequence: Synthetic oligonucleotide
  Sense strand starting at position 557 of SEQ ID NO: 1880492
guagaaugcaucuguugga

SEQ ID NO: 1971171 - RNA, 19 nt, Artificial Sequence
  Description of Artificial Sequence: Synthetic oligonucleotide
  Antisense strand to SEQ ID NO: 1971170
uccaacagaugcauucuac

SEQ ID NO: 1971172 - RNA, 19 nt, Artificial Sequence
  Description of Artificial Sequence: Synthetic oligonucleotide
  Sense strand starting at position 558 of SEQ ID NO: 1880492
uagaaugcaucuguuggau

SEQ ID NO: 1971173 - RNA, 19 nt, Artificial Sequence
  Description of Artificial Sequence: Synthetic oligonucleotide
  Antisense strand to SEQ ID NO: 1971172
auccaacagaugcauucua

SEQ ID NO: 1971174 - RNA, 19 nt, Artificial Sequence
  Description of Artificial Sequence: Synthetic oligonucleotide
  Sense strand starting at position 566 of SEQ ID NO: 1880492
aucuguuggauguggucaa

SEQ ID NO: 1971175 - RNA, 19 nt, Artificial Sequence
  Description of Artificial Sequence: Synthetic oligonucleotide
  Antisense strand to SEQ ID NO: 1971174
uugaccacauccaacagau

SEQ ID NO: 1971176 - RNA, 19 nt, Artificial Sequence
  Description of Artificial Sequence: Synthetic oligonucleotide
  Sense strand starting at position 1041 of SEQ ID NO: 1880492
gucuaaagauuggcuguca

SEQ ID NO: 1971177 - RNA, 19 nt, Artificial Sequence
  Description of Artificial Sequence: Synthetic oligonucleotide
  Antisense strand to SEQ ID NO: 1971176
ugacagccaaucuuuagac

SEQ ID NO: 1971178 - RNA, 19 nt, Artificial Sequence
  Description of Artificial Sequence: Synthetic oligonucleotide
  Sense strand starting at position 1042 of SEQ ID NO: 1880492
ucuaaagauuggcugucau

SEQ ID NO: 1971179 - RNA, 19 nt, Artificial Sequence
  Description of Artificial Sequence: Synthetic oligonucleotide
  Antisense strand to SEQ ID NO: 1971178
augacagccaaucuuuaga

SEQ ID NO: 1971180 - RNA, 19 nt, Artificial Sequence
  Description of Artificial Sequence: Synthetic oligonucleotide
  Sense strand starting at position 1232 of SEQ ID NO: 1880492
ucuuguccagugcaagaaa

SEQ ID NO: 1971181 - RNA, 19 nt, Artificial Sequence
  Description of Artificial Sequence: Synthetic oligonucleotide
  Antisense strand to SEQ ID NO: 1971180
uuucuugcacuggacaaga

SEQ ID NO: 1971182 - RNA, 19 nt, Artificial Sequence
  Description of Artificial Sequence: Synthetic oligonucleotide
  Sense strand starting at position 1257 of SEQ ID NO: 1880492
caagaagggucgcuuggaa

SEQ ID NO: 1971183 - RNA, 19 nt, Artificial Sequence
  Description of Artificial Sequence: Synthetic oligonucleotide
  Antisense strand to SEQ ID NO: 1971182
uuccaagcgacccuucuug

SEQ ID NO: 1971184 - RNA, 19 nt, Artificial Sequence
  Description of Artificial Sequence: Synthetic oligonucleotide
  Sense strand starting at position 1275 of SEQ ID NO: 1880492
agcucaaacucuuucgaag

SEQ ID NO: 1971185 - RNA, 19 nt, Artificial Sequence
  Description of Artificial Sequence: Synthetic oligonucleotide
  Antisense strand to SEQ ID NO: 1971184
cuucgaaagaguuugagcu

SEQ ID NO: 1971186 - RNA, 19 nt, Artificial Sequence
  Description of Artificial Sequence: Synthetic oligonucleotide
  Sense strand starting at position 1456 of SEQ ID NO: 1880492
acgcgcauuggucaccaaa

SEQ ID NO: 1971187 - RNA, 19 nt, Artificial Sequence
  Description of Artificial Sequence: Synthetic oligonucleotide
  Antisense strand to SEQ ID NO: 1971186
uuuggugaccaaugcgcgu

SEQ ID NO: 1971188 - RNA, 19 nt, Artificial Sequence
  Description of Artificial Sequence: Synthetic oligonucleotide
  Sense strand starting at position 1459 of SEQ ID NO: 1880492
cgcauuggucaccaaacaa

SEQ ID NO: 1971189 - RNA, 19 nt, Artificial Sequence
  Description of Artificial Sequence: Synthetic oligonucleotide
  Antisense strand to SEQ ID NO: 1971188
uuguuuggugaccaaugcg

SEQ ID NO: 1971190 - RNA, 19 nt, Artificial Sequence
  Description of Artificial Sequence: Synthetic oligonucleotide
  Sense strand starting at position 1485 of SEQ ID NO: 1880492
cgccucacugagugagaau

SEQ ID NO: 1971191 - RNA, 19 nt, Artificial Sequence
  Description of Artificial Sequence: Synthetic oligonucleotide
  Antisense strand to SEQ ID NO: 1971190
auucucacucagugaggcg

SEQ ID NO: 1971192 - RNA, 19 nt, Artificial Sequence
  Description of Artificial Sequence: Synthetic oligonucleotide
  Sense strand starting at position 1830 of SEQ ID NO: 1880492
ggaaguccuccuuaccuca

SEQ ID NO: 1971193 - RNA, 19 nt, Artificial Sequence
  Description of Artificial Sequence: Synthetic oligonucleotide
  Antisense strand to SEQ ID NO: 1971192
ugagguaaggaggacuucc

SEQ ID NO: 1971194 - RNA, 19 nt, Artificial Sequence
  Description of Artificial Sequence: Synthetic oligonucleotide
  Sense strand starting at position 2228 of SEQ ID NO: 1880492
aaaggucaccuccgcaaau

SEQ ID NO: 1971195 - RNA, 19 nt, Artificial Sequence
  Description of Artificial Sequence: Synthetic oligonucleotide
  Antisense strand to SEQ ID NO: 1971194
auuugcggaggugaccuuu

SEQ ID NO: 1971196 - RNA, 19 nt, Artificial Sequence
  Description of Artificial Sequence: Synthetic oligonucleotide
  Sense strand starting at position 2282 of SEQ ID NO: 1880492
ccagcuuucugaucaguag

SEQ ID NO: 1971197 - RNA, 19 nt, Artificial Sequence
  Description of Artificial Sequence: Synthetic oligonucleotide
  Antisense strand to SEQ ID NO: 1971196
cuacugaucagaaagcugg

SEQ ID NO: 1971198 - RNA, 19 nt, Artificial Sequence
  Description of Artificial Sequence: Synthetic oligonucleotide
  Sense strand starting at position 2283 of SEQ ID NO: 1880492
cagcuuucugaucaguaga

SEQ ID NO: 1971199 - RNA, 19 nt, Artificial Sequence
  Description of Artificial Sequence: Synthetic oligonucleotide
  Antisense strand to SEQ ID NO: 1971198
ucuacugaucagaaagcug

SEQ ID NO: 1971200 - RNA, 19 nt, Artificial Sequence
  Description of Artificial Sequence: Synthetic oligonucleotide
  Sense strand starting at position 2285 of SEQ ID NO: 1880492
gcuuucugaucaguagaau

SEQ ID NO: 1971201 - RNA, 19 nt, Artificial Sequence
  Description of Artificial Sequence: Synthetic oligonucleotide
  Antisense strand to SEQ ID NO: 1971200
auucuacugaucagaaagc

SEQ ID NO: 1971202 - RNA, 19 nt, Artificial Sequence
  Description of Artificial Sequence: Synthetic oligonucleotide
  Sense strand starting at position 2618 of SEQ ID NO: 1880492
aacguugaucaugaaguua

SEQ ID NO: 1971203 - RNA, 19 nt, Artificial Sequence
  Description of Artificial Sequence: Synthetic oligonucleotide
  Antisense strand to SEQ ID NO: 1971202
uaacuucaugaucaacguu

SEQ ID NO: 1971204 - RNA, 19 nt, Artificial Sequence
  Description of Artificial Sequence: Synthetic oligonucleotide
  Sense strand starting at position 2819 of SEQ ID NO: 1880492
ucaucaagacuuggugcua

SEQ ID NO: 1971205 - RNA, 19 nt, Artificial Sequence
  Description of Artificial Sequence: Synthetic oligonucleotide
  Antisense strand to SEQ ID NO: 1971204
uagcaccaagucuugauga

SEQ ID NO: 1971206 - RNA, 19 nt, Artificial Sequence
  Description of Artificial Sequence: Synthetic oligonucleotide
  Sense strand starting at position 3041 of SEQ ID NO: 1880492
accaaucagcgguauucua

SEQ ID NO: 1971207 - RNA, 19 nt, Artificial Sequence
  Description of Artificial Sequence: Synthetic oligonucleotide
  Antisense strand to SEQ ID NO: 1971206
uagaauaccgcugauuggu

SEQ ID NO: 1971208 - RNA, 19 nt, Artificial Sequence
  Description of Artificial Sequence: Synthetic oligonucleotide
  Sense strand starting at position 3367 of SEQ ID NO: 1880492
agaguuugauaccugccua

SEQ ID NO: 1971209 - RNA, 19 nt, Artificial Sequence
  Description of Artificial Sequence: Synthetic oligonucleotide
  Antisense strand to SEQ ID NO: 1971208
uaggcagguaucaaacucu

SEQ ID NO: 1971210 - RNA, 19 nt, Artificial Sequence
  Description of Artificial Sequence: Synthetic oligonucleotide
  Sense strand starting at position 3451 of SEQ ID NO: 1880492
gggcuagucuaggcagaga

SEQ ID NO: 1971211 - RNA, 19 nt, Artificial Sequence
  Description of Artificial Sequence: Synthetic oligonucleotide
  Antisense strand to SEQ ID NO: 1971210
ucucugccuagacuagccc

SEQ ID NO: 1971212 - RNA, 19 nt, Artificial Sequence
  Description of Artificial Sequence: Synthetic oligonucleotide
  Sense strand starting at position 3511 of SEQ ID NO: 1880492
uggugauugcaccacugua

SEQ ID NO: 1971213 - RNA, 19 nt, Artificial Sequence
  Description of Artificial Sequence: Synthetic oligonucleotide
  Antisense strand to SEQ ID NO: 1971212
uacaguggugcaaucacca

SEQ ID NO: 1971214 - RNA, 19 nt, Artificial Sequence
  Description of Artificial Sequence: Synthetic oligonucleotide
  Sense strand starting at position 3609 of SEQ ID NO: 1880492
gcaaguuccaggugggaga

SEQ ID NO: 1971215 - RNA, 19 nt, Artificial Sequence
  Description of Artificial Sequence: Synthetic oligonucleotide
  Antisense strand to SEQ ID NO: 1971214
ucucccaccuggaacuugc

SEQ ID NO: 1971216 - RNA, 19 nt, Artificial Sequence
  Description of Artificial Sequence: Synthetic oligonucleotide
  Sense strand starting at position 3638 of SEQ ID NO: 1880492
gcauuauaguccucuaaga

SEQ ID NO: 1971217 - RNA, 19 nt, Artificial Sequence
  Description of Artificial Sequence: Synthetic oligonucleotide
  Antisense strand to SEQ ID NO: 1971216
ucuuagaggacuauaaugc

SEQ ID NO: 1971218 - RNA, 19 nt, Artificial Sequence
  Description of Artificial Sequence: Synthetic oligonucleotide
  Sense strand starting at position 3665 of SEQ ID NO: 1880492
acccuaauuucugggacua

SEQ ID NO: 1971219 - RNA, 19 nt, Artificial Sequence
  Description of Artificial Sequence: Synthetic oligonucleotide
  Antisense strand to SEQ ID NO: 1971218
uagucccagaaauuagggu

SEQ ID NO: 1971220 - RNA, 19 nt, Artificial Sequence
  Description of Artificial Sequence: Synthetic oligonucleotide
  Sense strand starting at position 3667 of SEQ ID NO: 1880492
ccuaauuucugggacuaug

SEQ ID NO: 1971221 - RNA, 19 nt, Artificial Sequence
  Description of Artificial Sequence: Synthetic oligonucleotide
  Antisense strand to SEQ ID NO: 1971220
cauagucccagaaauuagg

SEQ ID NO: 1971222 - RNA, 19 nt, Artificial Sequence
  Description of Artificial Sequence: Synthetic oligonucleotide
  Sense strand starting at position 3717 of SEQ ID NO: 1880492
guggacagguuucuaauca

SEQ ID NO: 1971223 - RNA, 19 nt, Artificial Sequence
  Description of Artificial Sequence: Synthetic oligonucleotide
  Antisense strand to SEQ ID NO: 1971222
ugauuagaaaccuguccac

SEQ ID NO: 1971224 - RNA, 19 nt, Artificial Sequence
  Description of Artificial Sequence: Synthetic oligonucleotide
  Sense strand starting at position 3721 of SEQ ID NO: 1880492
acagguuucuaaucaguug

SEQ ID NO: 1971225 - RNA, 19 nt, Artificial Sequence
  Description of Artificial Sequence: Synthetic oligonucleotide
  Antisense strand to SEQ ID NO: 1971224
caacugauuagaaaccugu

SEQ ID NO: 1971226 - RNA, 19 nt, Artificial Sequence
  Description of Artificial Sequence: Synthetic oligonucleotide
  Sense strand starting at position 3925 of SEQ ID NO: 1880492
uuugaaugagcucgaaagu

SEQ ID NO: 1971227 - RNA, 19 nt, Artificial Sequence
  Description of Artificial Sequence: Synthetic oligonucleotide
  Antisense strand to SEQ ID NO: 1971226
acuuucgagcucauucaaa

SEQ ID NO: 1971228 - RNA, 19 nt, Artificial Sequence
  Description of Artificial Sequence: Synthetic oligonucleotide
  Sense strand starting at position 448 of SEQ ID NO: 1880493
gccuuuggagaucaucuaa

SEQ ID NO: 1971229 - RNA, 19 nt, Artificial Sequence
  Description of Artificial Sequence: Synthetic oligonucleotide
  Antisense strand to SEQ ID NO: 1971228
uuagaugaucuccaaaggc

SEQ ID NO: 1971230 - RNA, 19 nt, Artificial Sequence
  Description of Artificial Sequence: Synthetic oligonucleotide
  Sense strand starting at position 455 of SEQ ID NO: 1880493
gagaucaucuaaucggacu

SEQ ID NO: 1971231 - RNA, 19 nt, Artificial Sequence
  Description of Artificial Sequence: Synthetic oligonucleotide
  Antisense strand to SEQ ID NO: 1971230
aguccgauuagaugaucuc

SEQ ID NO: 1971232 - RNA, 19 nt, Artificial Sequence
  Description of Artificial Sequence: Synthetic oligonucleotide
  Sense strand starting at position 557 of SEQ ID NO: 1880493
gguugaacaucuuccucau

SEQ ID NO: 1971233 - RNA, 19 nt, Artificial Sequence
  Description of Artificial Sequence: Synthetic oligonucleotide
  Antisense strand to SEQ ID NO: 1971232
augaggaagauguucaacc

SEQ ID NO: 1971234 - RNA, 19 nt, Artificial Sequence
  Description of Artificial Sequence: Synthetic oligonucleotide
  Sense strand starting at position 626 of SEQ ID NO: 1880493
aaagaaauaugauaggaga

SEQ ID NO: 1971235 - RNA, 19 nt, Artificial Sequence
  Description of Artificial Sequence: Synthetic oligonucleotide
  Antisense strand to SEQ ID NO: 1971234
ucuccuaucauauuucuuu

SEQ ID NO: 1971236 - RNA, 19 nt, Artificial Sequence
  Description of Artificial Sequence: Synthetic oligonucleotide
  Sense strand starting at position 629 of SEQ ID NO: 1880493
gaaauaugauaggagaaau

SEQ ID NO: 1971237 - RNA, 19 nt, Artificial Sequence
  Description of Artificial Sequence: Synthetic oligonucleotide
  Antisense strand to SEQ ID NO: 1971236
auuucuccuaucauauuuc

SEQ ID NO: 1971238 - RNA, 19 nt, Artificial Sequence
  Description of Artificial Sequence: Synthetic oligonucleotide
  Sense strand starting at position 644 of SEQ ID NO: 1880493
aaauguuuaguuugcugau

SEQ ID NO: 1971239 - RNA, 19 nt, Artificial Sequence
  Description of Artificial Sequence: Synthetic oligonucleotide
  Antisense strand to SEQ ID NO: 1971238
aucagcaaacuaaacauuu

SEQ ID NO: 1971240 - RNA, 19 nt, Artificial Sequence
  Description of Artificial Sequence: Synthetic oligonucleotide
  Sense strand starting at position 675 of SEQ ID NO: 1880493
ggaauaguccacugguaac

SEQ ID NO: 1971241 - RNA, 19 nt, Artificial Sequence
  Description of Artificial Sequence: Synthetic oligonucleotide
  Antisense strand to SEQ ID NO: 1971240
guuaccaguggacuauucc

SEQ ID NO: 1971242 - RNA, 19 nt, Artificial Sequence
  Description of Artificial Sequence: Synthetic oligonucleotide
  Sense strand starting at position 713 of SEQ ID NO: 1880493
auuagacagagugguuaaa

SEQ ID NO: 1971243 - RNA, 19 nt, Artificial Sequence
  Description of Artificial Sequence: Synthetic oligonucleotide
  Antisense strand to SEQ ID NO: 1971242
uuuaaccacucugucuaau

SEQ ID NO: 1971244 - RNA, 19 nt, Artificial Sequence
  Description of Artificial Sequence: Synthetic oligonucleotide
  Sense strand starting at position 715 of SEQ ID NO: 1880493
uagacagagugguuaaacu

SEQ ID NO: 1971245 - RNA, 19 nt, Artificial Sequence
  Description of Artificial Sequence: Synthetic oligonucleotide
  Antisense strand to SEQ ID NO: 1971244
aguuuaaccacucugucua

SEQ ID NO: 1971246 - RNA, 19 nt, Artificial Sequence
  Description of Artificial Sequence: Synthetic oligonucleotide
  Sense strand starting at position 882 of SEQ ID NO: 1880493
cagaccaucuuggaucaga

SEQ ID NO: 1971247 - RNA, 19 nt, Artificial Sequence
  Description of Artificial Sequence: Synthetic oligonucleotide
  Antisense strand to SEQ ID NO: 1971246
ucugauccaagauggucug

SEQ ID NO: 1971248 - RNA, 19 nt, Artificial Sequence
  Description of Artificial Sequence: Synthetic oligonucleotide
  Sense strand starting at position 1011 of SEQ ID NO: 1880493
ugugaaugguaggucacua

SEQ ID NO: 1971249 - RNA, 19 nt, Artificial Sequence
  Description of Artificial Sequence: Synthetic oligonucleotide
  Antisense strand to SEQ ID NO: 1971248
uagugaccuaccauucaca

SEQ ID NO: 1971250 - RNA, 19 nt, Artificial Sequence
  Description of Artificial Sequence: Synthetic oligonucleotide
  Sense strand starting at position 1144 of SEQ ID NO: 1880493
guugcuucuuuaccugauu

SEQ ID NO: 1971251 - RNA, 19 nt, Artificial Sequence
  Description of Artificial Sequence: Synthetic oligonucleotide
  Antisense strand to SEQ ID NO: 1971250
aaucagguaaagaagcaac

SEQ ID NO: 1971252 - RNA, 19 nt, Artificial Sequence
  Description of Artificial Sequence: Synthetic oligonucleotide
  Sense strand starting at position 1241 of SEQ ID NO: 1880493
uuguccgugaacugagaaa

SEQ ID NO: 1971253 - RNA, 19 nt, Artificial Sequence
  Description of Artificial Sequence: Synthetic oligonucleotide
  Antisense strand to SEQ ID NO: 1971252
uuucucaguucacggacaa

SEQ ID NO: 1971254 - RNA, 19 nt, Artificial Sequence
  Description of Artificial Sequence: Synthetic oligonucleotide
  Sense strand starting at position 1266 of SEQ ID NO: 1880493
ggcaaugucauauggcauu

SEQ ID NO: 1971255 - RNA, 19 nt, Artificial Sequence
  Description of Artificial Sequence: Synthetic oligonucleotide
  Antisense strand to SEQ ID NO: 1971254
aaugccauaugacauugcc

SEQ ID NO: 1971256 - RNA, 19 nt, Artificial Sequence
  Description of Artificial Sequence: Synthetic oligonucleotide
  Sense strand starting at position 1272 of SEQ ID NO: 1880493
gucauauggcauuaaugau

SEQ ID NO: 1971257 - RNA, 19 nt, Artificial Sequence
  Description of Artificial Sequence: Synthetic oligonucleotide
  Antisense strand to SEQ ID NO: 1971256
aucauuaaugccauaugac

SEQ ID NO: 1971258 - RNA, 19 nt, Artificial Sequence
  Description of Artificial Sequence: Synthetic oligonucleotide
  Sense strand starting at position 1280 of SEQ ID NO: 1880493
gcauuaaugaugcaugaga

SEQ ID NO: 1971259 - RNA, 19 nt, Artificial Sequence
  Description of Artificial Sequence: Synthetic oligonucleotide
  Antisense strand to SEQ ID NO: 1971258
ucucaugcaucauuaaugc

SEQ ID NO: 1971260 - RNA, 19 nt, Artificial Sequence
  Description of Artificial Sequence: Synthetic oligonucleotide
  Sense strand starting at position 1282 of SEQ ID NO: 1880493
auuaaugaugcaugagauc

SEQ ID NO: 1971261 - RNA, 19 nt, Artificial Sequence
  Description of Artificial Sequence: Synthetic oligonucleotide
  Antisense strand to SEQ ID NO: 1971260
gaucucaugcaucauuaau

SEQ ID NO: 1971262 - RNA, 19 nt, Artificial Sequence
  Description of Artificial Sequence: Synthetic oligonucleotide
  Sense strand starting at position 1289 of SEQ ID NO: 1880493
augcaugagaucuaugggu

SEQ ID NO: 1971263 - RNA, 19 nt, Artificial Sequence
  Description of Artificial Sequence: Synthetic oligonucleotide
  Antisense strand to SEQ ID NO: 1971262
acccauagaucucaugcau

SEQ ID NO: 1971264 - RNA, 19 nt, Artificial Sequence
  Description of Artificial Sequence: Synthetic oligonucleotide
  Sense strand starting at position 1291 of SEQ ID NO: 1880493
gcaugagaucuaugggugu

SEQ ID NO: 1971265 - RNA, 19 nt, Artificial Sequence
  Description of Artificial Sequence: Synthetic oligonucleotide
  Antisense strand to SEQ ID NO: 1971264
acacccauagaucucaugc

SEQ ID NO: 1971266 - RNA, 19 nt, Artificial Sequence
  Description of Artificial Sequence: Synthetic oligonucleotide
  Sense strand starting at position 1293 of SEQ ID NO: 1880493
augagaucuauggguguag

SEQ ID NO: 1971267 - RNA, 19 nt, Artificial Sequence
  Description of Artificial Sequence: Synthetic oligonucleotide
  Antisense strand to SEQ ID NO: 1971266
cuacacccauagaucucau

SEQ ID NO: 1971268 - RNA, 19 nt, Artificial Sequence
  Description of Artificial Sequence: Synthetic oligonucleotide
  Sense strand starting at position 1294 of SEQ ID NO: 1880493
ugagaucuauggguguagu

SEQ ID NO: 1971269 - RNA, 19 nt, Artificial Sequence
  Description of Artificial Sequence: Synthetic oligonucleotide
  Antisense strand to SEQ ID NO: 1971268
acuacacccauagaucuca

SEQ ID NO: 1971270 - RNA, 19 nt, Artificial Sequence
  Description of Artificial Sequence: Synthetic oligonucleotide
  Sense strand starting at position 1316 of SEQ ID NO: 1880493
acgucuaggcguguaguaa

SEQ ID NO: 1971271 - RNA, 19 nt, Artificial Sequence
  Description of Artificial Sequence: Synthetic oligonucleotide
  Antisense strand to SEQ ID NO: 1971270
uuacuacacgccuagacgu

SEQ ID NO: 1971272 - RNA, 19 nt, Artificial Sequence
  Description of Artificial Sequence: Synthetic oligonucleotide
  Sense strand starting at position 1324 of SEQ ID NO: 1880493
gcguguaguaauccagucu

SEQ ID NO: 1971273 - RNA, 19 nt, Artificial Sequence
  Description of Artificial Sequence: Synthetic oligonucleotide
  Antisense strand to SEQ ID NO: 1971272
agacuggauuacuacacgc

SEQ ID NO: 1971274 - RNA, 19 nt, Artificial Sequence
  Description of Artificial Sequence: Synthetic oligonucleotide
  Sense strand starting at position 1325 of SEQ ID NO: 1880493
cguguaguaauccagucuu

SEQ ID NO: 1971275 - RNA, 19 nt, Artificial Sequence
  Description of Artificial Sequence: Synthetic oligonucleotide
  Antisense strand to SEQ ID NO: 1971274
aagacuggauuacuacacg

SEQ ID NO: 1971276 - RNA, 19 nt, Artificial Sequence
  Description of Artificial Sequence: Synthetic oligonucleotide
  Sense strand starting at position 1345 of SEQ ID NO: 1880493
ggccuuacuccagggagaa

SEQ ID NO: 1971277 - RNA, 19 nt, Artificial Sequence
  Description of Artificial Sequence: Synthetic oligonucleotide
  Antisense strand to SEQ ID NO: 1971276
uucucccuggaguaaggcc

SEQ ID NO: 1971278 - RNA, 19 nt, Artificial Sequence
  Description of Artificial Sequence: Synthetic oligonucleotide
  Sense strand starting at position 1346 of SEQ ID NO: 1880493
gccuuacuccagggagaaa

SEQ ID NO: 1971279 - RNA, 19 nt, Artificial Sequence
  Description of Artificial Sequence: Synthetic oligonucleotide
  Antisense strand to SEQ ID NO: 1971278
uuucucccuggaguaaggc

SEQ ID NO: 1971280 - RNA, 19 nt, Artificial Sequence
  Description of Artificial Sequence: Synthetic oligonucleotide
  Sense strand starting at position 1372 of SEQ ID NO: 1880493
cuuuguuacuuuccaguca

SEQ ID NO: 1971281 - RNA, 19 nt, Artificial Sequence
  Description of Artificial Sequence: Synthetic oligonucleotide
  Antisense strand to SEQ ID NO: 1971280
ugacuggaaaguaacaaag

SEQ ID NO: 1971282 - RNA, 19 nt, Artificial Sequence
  Description of Artificial Sequence: Synthetic oligonucleotide
  Sense strand starting at position 1496 of SEQ ID NO: 1880493
ccagcucccgcggaauauu

SEQ ID NO: 1971283 - RNA, 19 nt, Artificial Sequence
  Description of Artificial Sequence: Synthetic oligonucleotide
  Antisense strand to SEQ ID NO: 1971282
aauauuccgcgggagcugg

SEQ ID NO: 1971284 - RNA, 19 nt, Artificial Sequence
  Description of Artificial Sequence: Synthetic oligonucleotide
  Sense strand starting at position 1634 of SEQ ID NO: 1880493
gauggauucucauccagug

SEQ ID NO: 1971285 - RNA, 19 nt, Artificial Sequence
  Description of Artificial Sequence: Synthetic oligonucleotide
  Antisense strand to SEQ ID NO: 1971284
cacuggaugagaauccauc

SEQ ID NO: 1971286 - RNA, 19 nt, Artificial Sequence
  Description of Artificial Sequence: Synthetic oligonucleotide
  Sense strand starting at position 2406 of SEQ ID NO: 1880493
ccagaaguuuggguugaac

SEQ ID NO: 1971287 - RNA, 19 nt, Artificial Sequence
  Description of Artificial Sequence: Synthetic oligonucleotide
  Antisense strand to SEQ ID NO: 1971286
guucaacccaaacuucugg

SEQ ID NO: 1971288 - RNA, 19 nt, Artificial Sequence
  Description of Artificial Sequence: Synthetic oligonucleotide
  Sense strand starting at position 3108 of SEQ ID NO: 1880493
gcugguugugccgaacaaa

SEQ ID NO: 1971289 - RNA, 19 nt, Artificial Sequence
  Description of Artificial Sequence: Synthetic oligonucleotide
  Antisense strand to SEQ ID NO: 1971288
uuuguucggcacaaccagc

SEQ ID NO: 1971290 - RNA, 19 nt, Artificial Sequence
  Description of Artificial Sequence: Synthetic oligonucleotide
  Sense strand starting at position 3111 of SEQ ID NO: 1880493
gguugugccgaacaaaguu

SEQ ID NO: 1971291 - RNA, 19 nt, Artificial Sequence
  Description of Artificial Sequence: Synthetic oligonucleotide
  Antisense strand to SEQ ID NO: 1971290
aacuuuguucggcacaacc

SEQ ID NO: 1971292 - RNA, 19 nt, Artificial Sequence
  Description of Artificial Sequence: Synthetic oligonucleotide
  Sense strand starting at position 3123 of SEQ ID NO: 1880493
caaaguuugggcgagacuu

SEQ ID NO: 1971293 - RNA, 19 nt, Artificial Sequence
  Description of Artificial Sequence: Synthetic oligonucleotide
  Antisense strand to SEQ ID NO: 1971292
aagucucgcccaaacuuug

SEQ ID NO: 1971294 - RNA, 19 nt, Artificial Sequence
  Description of Artificial Sequence: Synthetic oligonucleotide
  Sense strand starting at position 3594 of SEQ ID NO: 1880493
uccuccuccgcagauaaau

SEQ ID NO: 1971295 - RNA, 19 nt, Artificial Sequence
  Description of Artificial Sequence: Synthetic oligonucleotide
  Antisense strand to SEQ ID NO: 1971294
auuuaucugcggaggagga

SEQ ID NO: 1971296 - RNA, 19 nt, Artificial Sequence
  Description of Artificial Sequence: Synthetic oligonucleotide
  Sense strand starting at position 3612 of SEQ ID NO: 1880493
ucaguuucagccgcggaau

SEQ ID NO: 1971297 - RNA, 19 nt, Artificial Sequence
  Description of Artificial Sequence: Synthetic oligonucleotide
  Antisense strand to SEQ ID NO: 1971296
auuccgcggcugaaacuga

SEQ ID NO: 1971298 - RNA, 19 nt, Artificial Sequence
  Description of Artificial Sequence: Synthetic oligonucleotide
  Sense strand starting at position 3654 of SEQ ID NO: 1880493
cacggugguuacucauuua

SEQ ID NO: 1971299 - RNA, 19 nt, Artificial Sequence
  Description of Artificial Sequence: Synthetic oligonucleotide
  Antisense strand to SEQ ID NO: 1971298
uaaaugaguaaccaccgug

SEQ ID NO: 1971300 - RNA, 19 nt, Artificial Sequence
  Description of Artificial Sequence: Synthetic oligonucleotide
  Sense strand starting at position 3789 of SEQ ID NO: 1880493
gcguguuuccugucguguu

SEQ ID NO: 1971301 - RNA, 19 nt, Artificial Sequence
  Description of Artificial Sequence: Synthetic oligonucleotide
  Antisense strand to SEQ ID NO: 1971300
aacacgacaggaaacacgc

SEQ ID NO: 1971302 - RNA, 19 nt, Artificial Sequence
  Description of Artificial Sequence: Synthetic oligonucleotide
  Sense strand starting at position 3887 of SEQ ID NO: 1880493
cgagauugacggugggaga

SEQ ID NO: 1971303 - RNA, 19 nt, Artificial Sequence
  Description of Artificial Sequence: Synthetic oligonucleotide
  Antisense strand to SEQ ID NO: 1971302
ucucccaccgucaaucucg

SEQ ID NO: 1971304 - RNA, 19 nt, Artificial Sequence
  Description of Artificial Sequence: Synthetic oligonucleotide
  Sense strand starting at position 3911 of SEQ ID NO: 1880493
auuagauuaguggagucuu

SEQ ID NO: 1971305 - RNA, 19 nt, Artificial Sequence
  Description of Artificial Sequence: Synthetic oligonucleotide
  Antisense strand to SEQ ID NO: 1971304
aagacuccacuaaucuaau

SEQ ID NO: 1971306 - RNA, 19 nt, Artificial Sequence
  Description of Artificial Sequence: Synthetic oligonucleotide
  Sense strand starting at position 3952 of SEQ ID NO: 1880493
gugcguguuggcuuuaauc

SEQ ID NO: 1971307 - RNA, 19 nt, Artificial Sequence
  Description of Artificial Sequence: Synthetic oligonucleotide
  Antisense strand to SEQ ID NO: 1971306
gauuaaagccaacacgcac

SEQ ID NO: 1971308 - RNA, 19 nt, Artificial Sequence
  Description of Artificial Sequence: Synthetic oligonucleotide
  Sense strand starting at position 172 of SEQ ID NO: 1880494
ugagguuaucuccggagag

SEQ ID NO: 1971309 - RNA, 19 nt, Artificial Sequence
  Description of Artificial Sequence: Synthetic oligonucleotide
  Antisense strand to SEQ ID NO: 1971308
cucuccggagauaaccuca

SEQ ID NO: 1971310 - RNA, 19 nt, Artificial Sequence
  Description of Artificial Sequence: Synthetic oligonucleotide
  Sense strand starting at position 241 of SEQ ID NO: 1880494
gccaaauaccugugauucu

SEQ ID NO: 1971311 - RNA, 19 nt, Artificial Sequence
  Description of Artificial Sequence: Synthetic oligonucleotide
  Antisense strand to SEQ ID NO: 1971310
agaaucacagguauuuggc

SEQ ID NO: 1971312 - RNA, 19 nt, Artificial Sequence
  Description of Artificial Sequence: Synthetic oligonucleotide
  Sense strand starting at position 281 of SEQ ID NO: 1880494
cagaaauuaugacugguua

SEQ ID NO: 1971313 - RNA, 19 nt, Artificial Sequence
  Description of Artificial Sequence: Synthetic oligonucleotide
  Antisense strand to SEQ ID NO: 1971312
uaaccagucauaauuucug

SEQ ID NO: 1971314 - RNA, 19 nt, Artificial Sequence
  Description of Artificial Sequence: Synthetic oligonucleotide
  Sense strand starting at position 282 of SEQ ID NO: 1880494
agaaauuaugacugguuac

SEQ ID NO: 1971315 - RNA, 19 nt, Artificial Sequence
  Description of Artificial Sequence: Synthetic oligonucleotide
  Antisense strand to SEQ ID NO: 1971314
guaaccagucauaauuucu

SEQ ID NO: 1971316 - RNA, 19 nt, Artificial Sequence
  Description of Artificial Sequence: Synthetic oligonucleotide
  Sense strand starting at position 292 of SEQ ID NO: 1880494
acugguuacucugucaaag

SEQ ID NO: 1971317 - RNA, 19 nt, Artificial Sequence
  Description of Artificial Sequence: Synthetic oligonucleotide
  Antisense strand to SEQ ID NO: 1971316
cuuugacagaguaaccagu

SEQ ID NO: 1971318 - RNA, 19 nt, Artificial Sequence
  Description of Artificial Sequence: Synthetic oligonucleotide
  Sense strand starting at position 306 of SEQ ID NO: 1880494
caaagaaagucuuuguugu

SEQ ID NO: 1971319 - RNA, 19 nt, Artificial Sequence
  Description of Artificial Sequence: Synthetic oligonucleotide
  Antisense strand to SEQ ID NO: 1971318
acaacaaagacuuucuuug

SEQ ID NO: 1971320 - RNA, 19 nt, Artificial Sequence
  Description of Artificial Sequence: Synthetic oligonucleotide
  Sense strand starting at position 307 of SEQ ID NO: 1880494
aaagaaagucuuuguugua

SEQ ID NO: 1971321 - RNA, 19 nt, Artificial Sequence
  Description of Artificial Sequence: Synthetic oligonucleotide
  Antisense strand to SEQ ID NO: 1971320
uacaacaaagacuuucuuu

SEQ ID NO: 1971322 - RNA, 19 nt, Artificial Sequence
  Description of Artificial Sequence: Synthetic oligonucleotide
  Sense strand starting at position 308 of SEQ ID NO: 1880494
aagaaagucuuuguuguag

SEQ ID NO: 1971323 - RNA, 19 nt, Artificial Sequence
  Description of Artificial Sequence: Synthetic oligonucleotide
  Antisense strand to SEQ ID NO: 1971322
cuacaacaaagacuuucuu

SEQ ID NO: 1971324 - RNA, 19 nt, Artificial Sequence
  Description of Artificial Sequence: Synthetic oligonucleotide
  Sense strand starting at position 314 of SEQ ID NO: 1880494
gucuuuguuguagaaacuu

SEQ ID NO: 1971325 - RNA, 19 nt, Artificial Sequence
  Description of Artificial Sequence: Synthetic oligonucleotide
  Antisense strand to SEQ ID NO: 1971324
aaguuucuacaacaaagac

SEQ ID NO: 1971326 - RNA, 19 nt, Artificial Sequence
  Description of Artificial Sequence: Synthetic oligonucleotide
  Sense strand starting at position 355 of SEQ ID NO: 1880494
guucuaagcccugagccau

SEQ ID NO: 1971327 - RNA, 19 nt, Artificial Sequence
  Description of Artificial Sequence: Synthetic oligonucleotide
  Antisense strand to SEQ ID NO: 1971326
auggcucagggcuuagaac

SEQ ID NO: 1971328 - RNA, 19 nt, Artificial Sequence
  Description of Artificial Sequence: Synthetic oligonucleotide
  Sense strand starting at position 469 of SEQ ID NO: 1880494
gccuuuagcagugacagua

SEQ ID NO: 1971329 - RNA, 19 nt, Artificial Sequence
  Description of Artificial Sequence: Synthetic oligonucleotide
  Antisense strand to SEQ ID NO: 1971328
uacugucacugcuaaaggc

SEQ ID NO: 1971330 - RNA, 19 nt, Artificial Sequence
  Description of Artificial Sequence: Synthetic oligonucleotide
  Sense strand starting at position 576 of SEQ ID NO: 1880494
ggcgauuugaggugguaga

SEQ ID NO: 1971331 - RNA, 19 nt, Artificial Sequence
  Description of Artificial Sequence: Synthetic oligonucleotide
  Antisense strand to SEQ ID NO: 1971330
ucuaccaccucaaaucgcc

SEQ ID NO: 1971332 - RNA, 19 nt, Artificial Sequence
  Description of Artificial Sequence: Synthetic oligonucleotide
  Sense strand starting at position 577 of SEQ ID NO: 1880494
gcgauuugaggugguagau

SEQ ID NO: 1971333 - RNA, 19 nt, Artificial Sequence
  Description of Artificial Sequence: Synthetic oligonucleotide
  Antisense strand to SEQ ID NO: 1971332
aucuaccaccucaaaucgc

SEQ ID NO: 1971334 - RNA, 19 nt, Artificial Sequence
  Description of Artificial Sequence: Synthetic oligonucleotide
  Sense strand starting at position 766 of SEQ ID NO: 1880494
gauacaacuuucccgggau

SEQ ID NO: 1971335 - RNA, 19 nt, Artificial Sequence
  Description of Artificial Sequence: Synthetic oligonucleotide
  Antisense strand to SEQ ID NO: 1971334
aucccgggaaaguuguauc

SEQ ID NO: 1971336 - RNA, 19 nt, Artificial Sequence
  Description of Artificial Sequence: Synthetic oligonucleotide
  Sense strand starting at position 1058 of SEQ ID NO: 1880494
ccugcugaugcuugaaauu

SEQ ID NO: 1971337 - RNA, 19 nt, Artificial Sequence
  Description of Artificial Sequence: Synthetic oligonucleotide
  Antisense strand to SEQ ID NO: 1971336
aauuucaagcaucagcagg

SEQ ID NO: 1971338 - RNA, 19 nt, Artificial Sequence
  Description of Artificial Sequence: Synthetic oligonucleotide
  Sense strand starting at position 1067 of SEQ ID NO: 1880494
gcuugaaauuccuugaacc

SEQ ID NO: 1971339 - RNA, 19 nt, Artificial Sequence
  Description of Artificial Sequence: Synthetic oligonucleotide
  Antisense strand to SEQ ID NO: 1971338
gguucaaggaauuucaagc

SEQ ID NO: 1971340 - RNA, 19 nt, Artificial Sequence
  Description of Artificial Sequence: Synthetic oligonucleotide
  Sense strand starting at position 1437 of SEQ ID NO: 1880494
guaggauaauccgucacac

SEQ ID NO: 1971341 - RNA, 19 nt, Artificial Sequence
  Description of Artificial Sequence: Synthetic oligonucleotide
  Antisense strand to SEQ ID NO: 1971340
gugugacggauuauccuac

SEQ ID NO: 1971342 - RNA, 19 nt, Artificial Sequence
  Description of Artificial Sequence: Synthetic oligonucleotide
  Sense strand starting at position 1439 of SEQ ID NO: 1880494
aggauaauccgucacacua

SEQ ID NO: 1971343 - RNA, 19 nt, Artificial Sequence
  Description of Artificial Sequence: Synthetic oligonucleotide
  Antisense strand to SEQ ID NO: 1971342
uagugugacggauuauccu

SEQ ID NO: 1971344 - RNA, 19 nt, Artificial Sequence
  Description of Artificial Sequence: Synthetic oligonucleotide
  Sense strand starting at position 2290 of SEQ ID NO: 1880494
gugagaggcugucuagaga

SEQ ID NO: 1971345 - RNA, 19 nt, Artificial Sequence
  Description of Artificial Sequence: Synthetic oligonucleotide
  Antisense strand to SEQ ID NO: 1971344
ucucuagacagccucucac

SEQ ID NO: 1971346 - RNA, 19 nt, Artificial Sequence
  Description of Artificial Sequence: Synthetic oligonucleotide
  Sense strand starting at position 2305 of SEQ ID NO: 1880494
gagaaaggcguuuguucag

SEQ ID NO: 1971347 - RNA, 19 nt, Artificial Sequence
  Description of Artificial Sequence: Synthetic oligonucleotide
  Antisense strand to SEQ ID NO: 1971346
cugaacaaacgccuuucuc

SEQ ID NO: 1971348 - RNA, 19 nt, Artificial Sequence
  Description of Artificial Sequence: Synthetic oligonucleotide
  Sense strand starting at position 2359 of SEQ ID NO: 1880494
guaaacugugcauauucga

SEQ ID NO: 1971349 - RNA, 19 nt, Artificial Sequence
  Description of Artificial Sequence: Synthetic oligonucleotide
  Antisense strand to SEQ ID NO: 1971348
ucgaauaugcacaguuuac

SEQ ID NO: 1971350 - RNA, 19 nt, Artificial Sequence
  Description of Artificial Sequence: Synthetic oligonucleotide
  Sense strand starting at position 2366 of SEQ ID NO: 1880494
gugcauauucgaggaggca

SEQ ID NO: 1971351 - RNA, 19 nt, Artificial Sequence
  Description of Artificial Sequence: Synthetic oligonucleotide
  Antisense strand to SEQ ID NO: 1971350
ugccuccucgaauaugcac

SEQ ID NO: 1971352 - RNA, 19 nt, Artificial Sequence
  Description of Artificial Sequence: Synthetic oligonucleotide
  Sense strand starting at position 2448 of SEQ ID NO: 1880494
aaugguuauccuuggcuac

SEQ ID NO: 1971353 - RNA, 19 nt, Artificial Sequence
  Description of Artificial Sequence: Synthetic oligonucleotide
  Antisense strand to SEQ ID NO: 1971352
guagccaaggauaaccauu

SEQ ID NO: 1971354 - RNA, 19 nt, Artificial Sequence
  Description of Artificial Sequence: Synthetic oligonucleotide
  Sense strand starting at position 2449 of SEQ ID NO: 1880494
augguuauccuuggcuaca

SEQ ID NO: 1971355 - RNA, 19 nt, Artificial Sequence
  Description of Artificial Sequence: Synthetic oligonucleotide
  Antisense strand to SEQ ID NO: 1971354
uguagccaaggauaaccau

SEQ ID NO: 1971356 - RNA, 19 nt, Artificial Sequence
  Description of Artificial Sequence: Synthetic oligonucleotide
  Sense strand starting at position 2451 of SEQ ID NO: 1880494
gguuauccuuggcuacaga

SEQ ID NO: 1971357 - RNA, 19 nt, Artificial Sequence
  Description of Artificial Sequence: Synthetic oligonucleotide
  Antisense strand to SEQ ID NO: 1971356
ucuguagccaaggauaacc

SEQ ID NO: 1971358 - RNA, 19 nt, Artificial Sequence
  Description of Artificial Sequence: Synthetic oligonucleotide
  Sense strand starting at position 2486 of SEQ ID NO: 1880494
uugccaguccaagguuaga

SEQ ID NO: 1971359 - RNA, 19 nt, Artificial Sequence
  Description of Artificial Sequence: Synthetic oligonucleotide
  Antisense strand to SEQ ID NO: 1971358
ucuaaccuuggacuggcaa

SEQ ID NO: 1971360 - RNA, 19 nt, Artificial Sequence
  Description of Artificial Sequence: Synthetic oligonucleotide
  Sense strand starting at position 2653 of SEQ ID NO: 1880494
gggagugcuuucuucuuag

SEQ ID NO: 1971361 - RNA, 19 nt, Artificial Sequence
  Description of Artificial Sequence: Synthetic oligonucleotide
  Antisense strand to SEQ ID NO: 1971360
cuaagaagaaagcacuccc

SEQ ID NO: 1971362 - RNA, 19 nt, Artificial Sequence
  Description of Artificial Sequence: Synthetic oligonucleotide
  Sense strand starting at position 3109 of SEQ ID NO: 1880494
ucuuguagacucuggcaau

SEQ ID NO: 1971363 - RNA, 19 nt, Artificial Sequence
  Description of Artificial Sequence: Synthetic oligonucleotide
  Antisense strand to SEQ ID NO: 1971362
auugccagagucuacaaga

SEQ ID NO: 1971364 - RNA, 19 nt, Artificial Sequence
  Description of Artificial Sequence: Synthetic oligonucleotide
  Sense strand starting at position 3207 of SEQ ID NO: 1880494
aguccuacuuauuugcuua

SEQ ID NO: 1971365 - RNA, 19 nt, Artificial Sequence
  Description of Artificial Sequence: Synthetic oligonucleotide
  Antisense strand to SEQ ID NO: 1971364
uaagcaaauaaguaggacu

SEQ ID NO: 1971366 - RNA, 19 nt, Artificial Sequence
  Description of Artificial Sequence: Synthetic oligonucleotide
  Sense strand starting at position 3555 of SEQ ID NO: 1880494
augggaaguaguuaaguca

SEQ ID NO: 1971367 - RNA, 19 nt, Artificial Sequence
  Description of Artificial Sequence: Synthetic oligonucleotide
  Antisense strand to SEQ ID NO: 1971366
ugacuuaacuacuucccau

SEQ ID NO: 1971368 - RNA, 19 nt, Artificial Sequence
  Description of Artificial Sequence: Synthetic oligonucleotide
  Sense strand starting at position 3558 of SEQ ID NO: 1880494
ggaaguaguuaagucagga

SEQ ID NO: 1971369 - RNA, 19 nt, Artificial Sequence
  Description of Artificial Sequence: Synthetic oligonucleotide
  Antisense strand to SEQ ID NO: 1971368
uccugacuuaacuacuucc

SEQ ID NO: 1971370 - RNA, 19 nt, Artificial Sequence
  Description of Artificial Sequence: Synthetic oligonucleotide
  Sense strand starting at position 3584 of SEQ ID NO: 1880494
aguuauuggcaguaacaau

SEQ ID NO: 1971371 - RNA, 19 nt, Artificial Sequence
  Description of Artificial Sequence: Synthetic oligonucleotide
  Antisense strand to SEQ ID NO: 1971370
auuguuacugccaauaacu

SEQ ID NO: 1971372 - RNA, 19 nt, Artificial Sequence
  Description of Artificial Sequence: Synthetic oligonucleotide
  Sense strand starting at position 3603 of SEQ ID NO: 1880494
ccucaaucucuguggguua

SEQ ID NO: 1971373 - RNA, 19 nt, Artificial Sequence
  Description of Artificial Sequence: Synthetic oligonucleotide
  Antisense strand to SEQ ID NO: 1971372
uaacccacagagauugagg

SEQ ID NO: 1971374 - RNA, 19 nt, Artificial Sequence
  Description of Artificial Sequence: Synthetic oligonucleotide
  Sense strand starting at position 3605 of SEQ ID NO: 1880494
ucaaucucuguggguuaaa

SEQ ID NO: 1971375 - RNA, 19 nt, Artificial Sequence
  Description of Artificial Sequence: Synthetic oligonucleotide
  Antisense strand to SEQ ID NO: 1971374
uuuaacccacagagauuga

SEQ ID NO: 1971376 - RNA, 19 nt, Artificial Sequence
  Description of Artificial Sequence: Synthetic oligonucleotide
  Sense strand starting at position 3632 of SEQ ID NO: 1880494
guuuauuucuuccugaugu

SEQ ID NO: 1971377 - RNA, 19 nt, Artificial Sequence
  Description of Artificial Sequence: Synthetic oligonucleotide
  Antisense strand to SEQ ID NO: 1971376
acaucaggaagaaauaaac

SEQ ID NO: 1971378 - RNA, 19 nt, Artificial Sequence
  Description of Artificial Sequence: Synthetic oligonucleotide
  Sense strand starting at position 3652 of SEQ ID NO: 1880494
ucacaacuaccgugaauca

SEQ ID NO: 1971379 - RNA, 19 nt, Artificial Sequence
  Description of Artificial Sequence: Synthetic oligonucleotide
  Antisense strand to SEQ ID NO: 1971378
ugauucacgguaguuguga

SEQ ID NO: 1971380 - RNA, 19 nt, Artificial Sequence
  Description of Artificial Sequence: Synthetic oligonucleotide
  Sense strand starting at position 3661 of SEQ ID NO: 1880494
ccgugaaucacuuaaggau

SEQ ID NO: 1971381 - RNA, 19 nt, Artificial Sequence
  Description of Artificial Sequence: Synthetic oligonucleotide
  Antisense strand to SEQ ID NO: 1971380
auccuuaagugauucacgg

SEQ ID NO: 1971382 - RNA, 19 nt, Artificial Sequence
  Description of Artificial Sequence: Synthetic oligonucleotide
  Sense strand starting at position 3673 of SEQ ID NO: 1880494
uaaggauaggguugccaga

SEQ ID NO: 1971383 - RNA, 19 nt, Artificial Sequence
  Description of Artificial Sequence: Synthetic oligonucleotide
  Antisense strand to SEQ ID NO: 1971382
ucuggcaacccuauccuua

SEQ ID NO: 1971384 - RNA, 19 nt, Artificial Sequence
  Description of Artificial Sequence: Synthetic oligonucleotide
  Sense strand starting at position 3675 of SEQ ID NO: 1880494
aggauaggguugccagauu

SEQ ID NO: 1971385 - RNA, 19 nt, Artificial Sequence
  Description of Artificial Sequence: Synthetic oligonucleotide
  Antisense strand to SEQ ID NO: 1971384
aaucuggcaacccuauccu

SEQ ID NO: 1971386 - RNA, 19 nt, Artificial Sequence
  Description of Artificial Sequence: Synthetic oligonucleotide
  Sense strand starting at position 3903 of SEQ ID NO: 1880494
ucgucaauagcccagaaga

SEQ ID NO: 1971387 - RNA, 19 nt, Artificial Sequence
  Description of Artificial Sequence: Synthetic oligonucleotide
  Antisense strand to SEQ ID NO: 1971386
ucuucugggcuauugacga

SEQ ID NO: 1971388 - RNA, 19 nt, Artificial Sequence
  Description of Artificial Sequence: Synthetic oligonucleotide
  Sense strand starting at position 39 of SEQ ID NO: 1880495
gaagaagcucagugacacu

SEQ ID NO: 1971389 - RNA, 19 nt, Artificial Sequence
  Description of Artificial Sequence: Synthetic oligonucleotide
  Antisense strand to SEQ ID NO: 1971388
agugucacugagcuucuuc

SEQ ID NO: 1971390 - RNA, 19 nt, Artificial Sequence
  Description of Artificial Sequence: Synthetic oligonucleotide
  Sense strand starting at position 138 of SEQ ID NO: 1880495
aguugauucuauguauaug

SEQ ID NO: 1971391 - RNA, 19 nt, Artificial Sequence
  Description of Artificial Sequence: Synthetic oligonucleotide
  Antisense strand to SEQ ID NO: 1971390
cauauacauagaaucaacu

SEQ ID NO: 1971392 - RNA, 19 nt, Artificial Sequence
  Description of Artificial Sequence: Synthetic oligonucleotide
  Sense strand starting at position 284 of SEQ ID NO: 1880495
agaggaaaugcaugaggca

SEQ ID NO: 1971393 - RNA, 19 nt, Artificial Sequence
  Description of Artificial Sequence: Synthetic oligonucleotide
  Antisense strand to SEQ ID NO: 1971392
ugccucaugcauuuccucu

SEQ ID NO: 1971394 - RNA, 19 nt, Artificial Sequence
  Description of Artificial Sequence: Synthetic oligonucleotide
  Sense strand starting at position 327 of SEQ ID NO: 1880495
aagacauagcuggguuuaa

SEQ ID NO: 1971395 - RNA, 19 nt, Artificial Sequence
  Description of Artificial Sequence: Synthetic oligonucleotide
  Antisense strand to SEQ ID NO: 1971394
uuaaacccagcuaugucuu

SEQ ID NO: 1971396 - RNA, 19 nt, Artificial Sequence
  Description of Artificial Sequence: Synthetic oligonucleotide
  Sense strand starting at position 328 of SEQ ID NO: 1880495
agacauagcuggguuuaaa

SEQ ID NO: 1971397 - RNA, 19 nt, Artificial Sequence
  Description of Artificial Sequence: Synthetic oligonucleotide
  Antisense strand to SEQ ID NO: 1971396
uuuaaacccagcuaugucu

SEQ ID NO: 1971398 - RNA, 19 nt, Artificial Sequence
  Description of Artificial Sequence: Synthetic oligonucleotide
  Sense strand starting at position 428 of SEQ ID NO: 1880495
ggugaagccuacuugagag

SEQ ID NO: 1971399 - RNA, 19 nt, Artificial Sequence
  Description of Artificial Sequence: Synthetic oligonucleotide
  Antisense strand to SEQ ID NO: 1971398
cucucaaguaggcuucacc

SEQ ID NO: 1971400 - RNA, 19 nt, Artificial Sequence
  Description of Artificial Sequence: Synthetic oligonucleotide
  Sense strand starting at position 444 of SEQ ID NO: 1880495
gaggguuaugauggguauc

SEQ ID NO: 1971401 - RNA, 19 nt, Artificial Sequence
  Description of Artificial Sequence: Synthetic oligonucleotide
  Antisense strand to SEQ ID NO: 1971400
gauacccaucauaacccuc

SEQ ID NO: 1971402 - RNA, 19 nt, Artificial Sequence
  Description of Artificial Sequence: Synthetic oligonucleotide
  Sense strand starting at position 445 of SEQ ID NO: 1880495
aggguuaugauggguauca

SEQ ID NO: 1971403 - RNA, 19 nt, Artificial Sequence
  Description of Artificial Sequence: Synthetic oligonucleotide
  Antisense strand to SEQ ID NO: 1971402
ugauacccaucauaacccu

SEQ ID NO: 1971404 - RNA, 19 nt, Artificial Sequence
  Description of Artificial Sequence: Synthetic oligonucleotide
  Sense strand starting at position 446 of SEQ ID NO: 1880495
ggguuaugauggguaucac

SEQ ID NO: 1971405 - RNA, 19 nt, Artificial Sequence
  Description of Artificial Sequence: Synthetic oligonucleotide
  Antisense strand to SEQ ID NO: 1971404
gugauacccaucauaaccc

SEQ ID NO: 1971406 - RNA, 19 nt, Artificial Sequence
  Description of Artificial Sequence: Synthetic oligonucleotide
  Sense strand starting at position 447 of SEQ ID NO: 1880495
gguuaugauggguaucaca

SEQ ID NO: 1971407 - RNA, 19 nt, Artificial Sequence
  Description of Artificial Sequence: Synthetic oligonucleotide
  Antisense strand to SEQ ID NO: 1971406
ugugauacccaucauaacc

SEQ ID NO: 1971408 - RNA, 19 nt, Artificial Sequence
  Description of Artificial Sequence: Synthetic oligonucleotide
  Sense strand starting at position 820 of SEQ ID NO: 1880495
aguaguggugcgucagauc

SEQ ID NO: 1971409 - RNA, 19 nt, Artificial Sequence
  Description of Artificial Sequence: Synthetic oligonucleotide
  Antisense strand to SEQ ID NO: 1971408
gaucugacgcaccacuacu

SEQ ID NO: 1971410 - RNA, 19 nt, Artificial Sequence
  Description of Artificial Sequence: Synthetic oligonucleotide
  Sense strand starting at position 937 of SEQ ID NO: 1880495
uguuuaccagaaugaaauc

SEQ ID NO: 1971411 - RNA, 19 nt, Artificial Sequence
  Description of Artificial Sequence: Synthetic oligonucleotide
  Antisense strand to SEQ ID NO: 1971410
gauuucauucugguaaaca

SEQ ID NO: 1971412 - RNA, 19 nt, Artificial Sequence
  Description of Artificial Sequence: Synthetic oligonucleotide
  Sense strand starting at position 1033 of SEQ ID NO: 1880495
gggauaaugucagugaauu

SEQ ID NO: 1971413 - RNA, 19 nt, Artificial Sequence
  Description of Artificial Sequence: Synthetic oligonucleotide
  Antisense strand to SEQ ID NO: 1971412
aauucacugacauuauccc

SEQ ID NO: 1971414 - RNA, 19 nt, Artificial Sequence
  Description of Artificial Sequence: Synthetic oligonucleotide
  Sense strand starting at position 1034 of SEQ ID NO: 1880495
ggauaaugucagugaauug

SEQ ID NO: 1971415 - RNA, 19 nt, Artificial Sequence
  Description of Artificial Sequence: Synthetic oligonucleotide
  Antisense strand to SEQ ID NO: 1971414
caauucacugacauuaucc

SEQ ID NO: 1971416 - RNA, 19 nt, Artificial Sequence
  Description of Artificial Sequence: Synthetic oligonucleotide
  Sense strand starting at position 1043 of SEQ ID NO: 1880495
cagugaauuguccagcaua

SEQ ID NO: 1971417 - RNA, 19 nt, Artificial Sequence
  Description of Artificial Sequence: Synthetic oligonucleotide
  Antisense strand to SEQ ID NO: 1971416
uaugcuggacaauucacug

SEQ ID NO: 1971418 - RNA, 19 nt, Artificial Sequence
  Description of Artificial Sequence: Synthetic oligonucleotide
  Sense strand starting at position 1046 of SEQ ID NO: 1880495
ugaauuguccagcauaagg

SEQ ID NO: 1971419 - RNA, 19 nt, Artificial Sequence
  Description of Artificial Sequence: Synthetic oligonucleotide
  Antisense strand to SEQ ID NO: 1971418
ccuuaugcuggacaauuca

SEQ ID NO: 1971420 - RNA, 19 nt, Artificial Sequence
  Description of Artificial Sequence: Synthetic oligonucleotide
  Sense strand starting at position 1060 of SEQ ID NO: 1880495
uaaggucuggcauauggua

SEQ ID NO: 1971421 - RNA, 19 nt, Artificial Sequence
  Description of Artificial Sequence: Synthetic oligonucleotide
  Antisense strand to SEQ ID NO: 1971420
uaccauaugccagaccuua

SEQ ID NO: 1971422 - RNA, 19 nt, Artificial Sequence
  Description of Artificial Sequence: Synthetic oligonucleotide
  Sense strand starting at position 1074 of SEQ ID NO: 1880495
ugguaagaauuugaucauu

SEQ ID NO: 1971423 - RNA, 19 nt, Artificial Sequence
  Description of Artificial Sequence: Synthetic oligonucleotide
  Antisense strand to SEQ ID NO: 1971422
aaugaucaaauucuuacca

SEQ ID NO: 1971424 - RNA, 19 nt, Artificial Sequence
  Description of Artificial Sequence: Synthetic oligonucleotide
  Sense strand starting at position 1104 of SEQ ID NO: 1880495
gcagcaacaucccuagaga

SEQ ID NO: 1971425 - RNA, 19 nt, Artificial Sequence
  Description of Artificial Sequence: Synthetic oligonucleotide
  Antisense strand to SEQ ID NO: 1971424
ucucuagggauguugcugc

SEQ ID NO: 1971426 - RNA, 19 nt, Artificial Sequence
  Description of Artificial Sequence: Synthetic oligonucleotide
  Sense strand starting at position 1240 of SEQ ID NO: 1880495
ccauuaauggacugucauc

SEQ ID NO: 1971427 - RNA, 19 nt, Artificial Sequence
  Description of Artificial Sequence: Synthetic oligonucleotide
  Antisense strand to SEQ ID NO: 1971426
gaugacaguccauuaaugg

SEQ ID NO: 1971428 - RNA, 19 nt, Artificial Sequence
  Description of Artificial Sequence: Synthetic oligonucleotide
  Sense strand starting at position 1364 of SEQ ID NO: 1880495
cauagcucgggugaucaga

SEQ ID NO: 1971429 - RNA, 19 nt, Artificial Sequence
  Description of Artificial Sequence: Synthetic oligonucleotide
  Antisense strand to SEQ ID NO: 1971428
ucugaucacccgagcuaug

SEQ ID NO: 1971430 - RNA, 19 nt, Artificial Sequence
  Description of Artificial Sequence: Synthetic oligonucleotide
  Sense strand starting at position 1512 of SEQ ID NO: 1880495
gaaguagagcugugaagag

SEQ ID NO: 1971431 - RNA, 19 nt, Artificial Sequence
  Description of Artificial Sequence: Synthetic oligonucleotide
  Antisense strand to SEQ ID NO: 1971430
cucuucacagcucuacuuc

SEQ ID NO: 1971432 - RNA, 19 nt, Artificial Sequence
  Description of Artificial Sequence: Synthetic oligonucleotide
  Sense strand starting at position 1680 of SEQ ID NO: 1880495
cuccaaauugcauagguca

SEQ ID NO: 1971433 - RNA, 19 nt, Artificial Sequence
  Description of Artificial Sequence: Synthetic oligonucleotide
  Antisense strand to SEQ ID NO: 1971432
ugaccuaugcaauuuggag

SEQ ID NO: 1971434 - RNA, 19 nt, Artificial Sequence
  Description of Artificial Sequence: Synthetic oligonucleotide
  Sense strand starting at position 1729 of SEQ ID NO: 1880495
aucuguugcagugaaauga

SEQ ID NO: 1971435 - RNA, 19 nt, Artificial Sequence
  Description of Artificial Sequence: Synthetic oligonucleotide
  Antisense strand to SEQ ID NO: 1971434
ucauuucacugcaacagau

SEQ ID NO: 1971436 - RNA, 19 nt, Artificial Sequence
  Description of Artificial Sequence: Synthetic oligonucleotide
  Sense strand starting at position 1733 of SEQ ID NO: 1880495
guugcagugaaaugauaag

SEQ ID NO: 1971437 - RNA, 19 nt, Artificial Sequence
  Description of Artificial Sequence: Synthetic oligonucleotide
  Antisense strand to SEQ ID NO: 1971436
cuuaucauuucacugcaac

SEQ ID NO: 1971438 - RNA, 19 nt, Artificial Sequence
  Description of Artificial Sequence: Synthetic oligonucleotide
  Sense strand starting at position 1739 of SEQ ID NO: 1880495
gugaaaugauaagcuccau

SEQ ID NO: 1971439 - RNA, 19 nt, Artificial Sequence
  Description of Artificial Sequence: Synthetic oligonucleotide
  Antisense strand to SEQ ID NO: 1971438
auggagcuuaucauuucac

SEQ ID NO: 1971440 - RNA, 19 nt, Artificial Sequence
  Description of Artificial Sequence: Synthetic oligonucleotide
  Sense strand starting at position 1980 of SEQ ID NO: 1880495
acuggaagcuucucugaga

SEQ ID NO: 1971441 - RNA, 19 nt, Artificial Sequence
  Description of Artificial Sequence: Synthetic oligonucleotide
  Antisense strand to SEQ ID NO: 1971440
ucucagagaagcuuccagu

SEQ ID NO: 1971442 - RNA, 19 nt, Artificial Sequence
  Description of Artificial Sequence: Synthetic oligonucleotide
  Sense strand starting at position 2464 of SEQ ID NO: 1880495
agcacaucuuugucaggaa

SEQ ID NO: 1971443 - RNA, 19 nt, Artificial Sequence
  Description of Artificial Sequence: Synthetic oligonucleotide
  Antisense strand to SEQ ID NO: 1971442
uuccugacaaagaugugcu

SEQ ID NO: 1971444 - RNA, 19 nt, Artificial Sequence
  Description of Artificial Sequence: Synthetic oligonucleotide
  Sense strand starting at position 2951 of SEQ ID NO: 1880495
acagguguccuauagaguu

SEQ ID NO: 1971445 - RNA, 19 nt, Artificial Sequence
  Description of Artificial Sequence: Synthetic oligonucleotide
  Antisense strand to SEQ ID NO: 1971444
aacucuauaggacaccugu

SEQ ID NO: 1971446 - RNA, 19 nt, Artificial Sequence
  Description of Artificial Sequence: Synthetic oligonucleotide
  Sense strand starting at position 3020 of SEQ ID NO: 1880495
guaggaacauaugcuauua

SEQ ID NO: 1971447 - RNA, 19 nt, Artificial Sequence
  Description of Artificial Sequence: Synthetic oligonucleotide
  Antisense strand to SEQ ID NO: 1971446
uaauagcauauguuccuac

SEQ ID NO: 1971448 - RNA, 19 nt, Artificial Sequence
  Description of Artificial Sequence: Synthetic oligonucleotide
  Sense strand starting at position 3078 of SEQ ID NO: 1880495
cguacaguaagucaagaaa

SEQ ID NO: 1971449 - RNA, 19 nt, Artificial Sequence
  Description of Artificial Sequence: Synthetic oligonucleotide
  Antisense strand to SEQ ID NO: 1971448
uuucuugacuuacuguacg

SEQ ID NO: 1971450 - RNA, 19 nt, Artificial Sequence
  Description of Artificial Sequence: Synthetic oligonucleotide
  Sense strand starting at position 3153 of SEQ ID NO: 1880495
auuaauuuccuucgugauc

SEQ ID NO: 1971451 - RNA, 19 nt, Artificial Sequence
  Description of Artificial Sequence: Synthetic oligonucleotide
  Antisense strand to SEQ ID NO: 1971450
gaucacgaaggaaauuaau

SEQ ID NO: 1971452 - RNA, 19 nt, Artificial Sequence
  Description of Artificial Sequence: Synthetic oligonucleotide
  Sense strand starting at position 3159 of SEQ ID NO: 1880495
uuccuucgugaucauggaa

SEQ ID NO: 1971453 - RNA, 19 nt, Artificial Sequence
  Description of Artificial Sequence: Synthetic oligonucleotide
  Antisense strand to SEQ ID NO: 1971452
uuccaugaucacgaaggaa

SEQ ID NO: 1971454 - RNA, 19 nt, Artificial Sequence
  Description of Artificial Sequence: Synthetic oligonucleotide
  Sense strand starting at position 3241 of SEQ ID NO: 1880495
gguaaucacuaagcucuaa

SEQ ID NO: 1971455 - RNA, 19 nt, Artificial Sequence
  Description of Artificial Sequence: Synthetic oligonucleotide
  Antisense strand to SEQ ID NO: 1971454
uuagagcuuagugauuacc

SEQ ID NO: 1971456 - RNA, 19 nt, Artificial Sequence
  Description of Artificial Sequence: Synthetic oligonucleotide
  Sense strand starting at position 3545 of SEQ ID NO: 1880495
aggaauuaggcuugacugu

SEQ ID NO: 1971457 - RNA, 19 nt, Artificial Sequence
  Description of Artificial Sequence: Synthetic oligonucleotide
  Antisense strand to SEQ ID NO: 1971456
acagucaagccuaauuccu

SEQ ID NO: 1971458 - RNA, 19 nt, Artificial Sequence
  Description of Artificial Sequence: Synthetic oligonucleotide
  Sense strand starting at position 3546 of SEQ ID NO: 1880495
ggaauuaggcuugacuguu

SEQ ID NO: 1971459 - RNA, 19 nt, Artificial Sequence
  Description of Artificial Sequence: Synthetic oligonucleotide
  Antisense strand to SEQ ID NO: 1971458
aacagucaagccuaauucc

SEQ ID NO: 1971460 - RNA, 19 nt, Artificial Sequence
  Description of Artificial Sequence: Synthetic oligonucleotide
  Sense strand starting at position 3608 of SEQ ID NO: 1880495
cagggcugucaugagugau

SEQ ID NO: 1971461 - RNA, 19 nt, Artificial Sequence
  Description of Artificial Sequence: Synthetic oligonucleotide
  Antisense strand to SEQ ID NO: 1971460
aucacucaugacagcccug

SEQ ID NO: 1971462 - RNA, 19 nt, Artificial Sequence
  Description of Artificial Sequence: Synthetic oligonucleotide
  Sense strand starting at position 3676 of SEQ ID NO: 1880495
cucauuaaggcaugaauuc

SEQ ID NO: 1971463 - RNA, 19 nt, Artificial Sequence
  Description of Artificial Sequence: Synthetic oligonucleotide
  Antisense strand to SEQ ID NO: 1971462
gaauucaugccuuaaugag

SEQ ID NO: 1971464 - RNA, 19 nt, Artificial Sequence
  Description of Artificial Sequence: Synthetic oligonucleotide
  Sense strand starting at position 3677 of SEQ ID NO: 1880495
ucauuaaggcaugaauucu

SEQ ID NO: 1971465 - RNA, 19 nt, Artificial Sequence
  Description of Artificial Sequence: Synthetic oligonucleotide
  Antisense strand to SEQ ID NO: 1971464
agaauucaugccuuaauga

SEQ ID NO: 1971466 - RNA, 19 nt, Artificial Sequence
  Description of Artificial Sequence: Synthetic oligonucleotide
  Sense strand starting at position 3767 of SEQ ID NO: 1880495
cuugcuucugcagaaacaa

SEQ ID NO: 1971467 - RNA, 19 nt, Artificial Sequence
  Description of Artificial Sequence: Synthetic oligonucleotide
  Antisense strand to SEQ ID NO: 1971466
uuguuucugcagaagcaag

SEQ ID NO: 1971468 - RNA, 19 nt, Artificial Sequence
  Description of Artificial Sequence: Synthetic oligonucleotide
  Sense strand starting at position 138 of SEQ ID NO: 1880496
guagcugacuuuccaugau

SEQ ID NO: 1971469 - RNA, 19 nt, Artificial Sequence
  Description of Artificial Sequence: Synthetic oligonucleotide
  Antisense strand to SEQ ID NO: 1971468
aucauggaaagucagcuac

SEQ ID NO: 1971470 - RNA, 19 nt, Artificial Sequence
  Description of Artificial Sequence: Synthetic oligonucleotide
  Sense strand starting at position 614 of SEQ ID NO: 1880496
gagauuaacuugcccaagu

SEQ ID NO: 1971471 - RNA, 19 nt, Artificial Sequence
  Description of Artificial Sequence: Synthetic oligonucleotide
  Antisense strand to SEQ ID NO: 1971470
acuugggcaaguuaaucuc

SEQ ID NO: 1971472 - RNA, 19 nt, Artificial Sequence
  Description of Artificial Sequence: Synthetic oligonucleotide
  Sense strand starting at position 625 of SEQ ID NO: 1880496
gcccaaguuccuuacaaug

SEQ ID NO: 1971473 - RNA, 19 nt, Artificial Sequence
  Description of Artificial Sequence: Synthetic oligonucleotide
  Antisense strand to SEQ ID NO: 1971472
cauuguaaggaacuugggc

SEQ ID NO: 1971474 - RNA, 19 nt, Artificial Sequence
  Description of Artificial Sequence: Synthetic oligonucleotide
  Sense strand starting at position 677 of SEQ ID NO: 1880496
cagugaagcucuuccuaug

SEQ ID NO: 1971475 - RNA, 19 nt, Artificial Sequence
  Description of Artificial Sequence: Synthetic oligonucleotide
  Antisense strand to SEQ ID NO: 1971474
cauaggaagagcuucacug

SEQ ID NO: 1971476 - RNA, 19 nt, Artificial Sequence
  Description of Artificial Sequence: Synthetic oligonucleotide
  Sense strand starting at position 732 of SEQ ID NO: 1880496
cccaaaccuucuguagagu

SEQ ID NO: 1971477 - RNA, 19 nt, Artificial Sequence
  Description of Artificial Sequence: Synthetic oligonucleotide
  Antisense strand to SEQ ID NO: 1971476
acucuacagaagguuuggg

SEQ ID NO: 1971478 - RNA, 19 nt, Artificial Sequence
  Description of Artificial Sequence: Synthetic oligonucleotide
  Sense strand starting at position 733 of SEQ ID NO: 1880496
ccaaaccuucuguagagua

SEQ ID NO: 1971479 - RNA, 19 nt, Artificial Sequence
  Description of Artificial Sequence: Synthetic oligonucleotide
  Antisense strand to SEQ ID NO: 1971478
uacucuacagaagguuugg

SEQ ID NO: 1971480 - RNA, 19 nt, Artificial Sequence
  Description of Artificial Sequence: Synthetic oligonucleotide
  Sense strand starting at position 754 of SEQ ID NO: 1880496
gagugaagcuaaguaacuu

SEQ ID NO: 1971481 - RNA, 19 nt, Artificial Sequence
  Description of Artificial Sequence: Synthetic oligonucleotide
  Antisense strand to SEQ ID NO: 1971480
aaguuacuuagcuucacuc

SEQ ID NO: 1971482 - RNA, 19 nt, Artificial Sequence
  Description of Artificial Sequence: Synthetic oligonucleotide
  Sense strand starting at position 885 of SEQ ID NO: 1880496
uggcuaguucuagaggagu

SEQ ID NO: 1971483 - RNA, 19 nt, Artificial Sequence
  Description of Artificial Sequence: Synthetic oligonucleotide
  Antisense strand to SEQ ID NO: 1971482
acuccucuagaacuagcca

SEQ ID NO: 1971484 - RNA, 19 nt, Artificial Sequence
  Description of Artificial Sequence: Synthetic oligonucleotide
  Sense strand starting at position 887 of SEQ ID NO: 1880496
gcuaguucuagaggaguaa

SEQ ID NO: 1971485 - RNA, 19 nt, Artificial Sequence
  Description of Artificial Sequence: Synthetic oligonucleotide
  Antisense strand to SEQ ID NO: 1971484
uuacuccucuagaacuagc

SEQ ID NO: 1971486 - RNA, 19 nt, Artificial Sequence
  Description of Artificial Sequence: Synthetic oligonucleotide
  Sense strand starting at position 1035 of SEQ ID NO: 1880496
aaggcuuucguguaggacu

SEQ ID NO: 1971487 - RNA, 19 nt, Artificial Sequence
  Description of Artificial Sequence: Synthetic oligonucleotide
  Antisense strand to SEQ ID NO: 1971486
aguccuacacgaaagccuu

SEQ ID NO: 1971488 - RNA, 19 nt, Artificial Sequence
  Description of Artificial Sequence: Synthetic oligonucleotide
  Sense strand starting at position 1047 of SEQ ID NO: 1880496
uaggacugacguugaaaga

SEQ ID NO: 1971489 - RNA, 19 nt, Artificial Sequence
  Description of Artificial Sequence: Synthetic oligonucleotide
  Antisense strand to SEQ ID NO: 1971488
ucuuucaacgucaguccua

SEQ ID NO: 1971490 - RNA, 19 nt, Artificial Sequence
  Description of Artificial Sequence: Synthetic oligonucleotide
  Sense strand starting at position 1178 of SEQ ID NO: 1880496
gggugcuuggaauauguau

SEQ ID NO: 1971491 - RNA, 19 nt, Artificial Sequence
  Description of Artificial Sequence: Synthetic oligonucleotide
  Antisense strand to SEQ ID NO: 1971490
auacauauuccaagcaccc

SEQ ID NO: 1971492 - RNA, 19 nt, Artificial Sequence
  Description of Artificial Sequence: Synthetic oligonucleotide
  Sense strand starting at position 1180 of SEQ ID NO: 1880496
gugcuuggaauauguauuu

SEQ ID NO: 1971493 - RNA, 19 nt, Artificial Sequence
  Description of Artificial Sequence: Synthetic oligonucleotide
  Antisense strand to SEQ ID NO: 1971492
aaauacauauuccaagcac

SEQ ID NO: 1971494 - RNA, 19 nt, Artificial Sequence
  Description of Artificial Sequence: Synthetic oligonucleotide
  Sense strand starting at position 1341 of SEQ ID NO: 1880496
gaaugccagccugaggaau

SEQ ID NO: 1971495 - RNA, 19 nt, Artificial Sequence
  Description of Artificial Sequence: Synthetic oligonucleotide
  Antisense strand to SEQ ID NO: 1971494
auuccucaggcuggcauuc

SEQ ID NO: 1971496 - RNA, 19 nt, Artificial Sequence
  Description of Artificial Sequence: Synthetic oligonucleotide
  Sense strand starting at position 1349 of SEQ ID NO: 1880496
gccugaggaauuugugugu

SEQ ID NO: 1971497 - RNA, 19 nt, Artificial Sequence
  Description of Artificial Sequence: Synthetic oligonucleotide
  Antisense strand to SEQ ID NO: 1971496
acacacaaauuccucaggc

SEQ ID NO: 1971498 - RNA, 19 nt, Artificial Sequence
  Description of Artificial Sequence: Synthetic oligonucleotide
  Sense strand starting at position 1426 of SEQ ID NO: 1880496
cgagcuguggccuaagacu

SEQ ID NO: 1971499 - RNA, 19 nt, Artificial Sequence
  Description of Artificial Sequence: Synthetic oligonucleotide
  Antisense strand to SEQ ID NO: 1971498
agucuuaggccacagcucg

SEQ ID NO: 1971500 - RNA, 19 nt, Artificial Sequence
  Description of Artificial Sequence: Synthetic oligonucleotide
  Sense strand starting at position 1435 of SEQ ID NO: 1880496
gccuaagacucuccauuag

SEQ ID NO: 1971501 - RNA, 19 nt, Artificial Sequence
  Description of Artificial Sequence: Synthetic oligonucleotide
  Antisense strand to SEQ ID NO: 1971500
cuaauggagagucuuaggc

SEQ ID NO: 1971502 - RNA, 19 nt, Artificial Sequence
  Description of Artificial Sequence: Synthetic oligonucleotide
  Sense strand starting at position 1557 of SEQ ID NO: 1880496
gaugguggugaugauguua

SEQ ID NO: 1971503 - RNA, 19 nt, Artificial Sequence
  Description of Artificial Sequence: Synthetic oligonucleotide
  Antisense strand to SEQ ID NO: 1971502
uaacaucaucaccaccauc

SEQ ID NO: 1971504 - RNA, 19 nt, Artificial Sequence
  Description of Artificial Sequence: Synthetic oligonucleotide
  Sense strand starting at position 1569 of SEQ ID NO: 1880496
gauguuacugacugaugag

SEQ ID NO: 1971505 - RNA, 19 nt, Artificial Sequence
  Description of Artificial Sequence: Synthetic oligonucleotide
  Antisense strand to SEQ ID NO: 1971504
cucaucagucaguaacauc

SEQ ID NO: 1971506 - RNA, 19 nt, Artificial Sequence
  Description of Artificial Sequence: Synthetic oligonucleotide
  Sense strand starting at position 1763 of SEQ ID NO: 1880496
ugcagcagccuugauuaaa

SEQ ID NO: 1971507 - RNA, 19 nt, Artificial Sequence
  Description of Artificial Sequence: Synthetic oligonucleotide
  Antisense strand to SEQ ID NO: 1971506
uuuaaucaaggcugcugca

SEQ ID NO: 1971508 - RNA, 19 nt, Artificial Sequence
  Description of Artificial Sequence: Synthetic oligonucleotide
  Sense strand starting at position 1818 of SEQ ID NO: 1880496
uacgaacgcugugugauuu

SEQ ID NO: 1971509 - RNA, 19 nt, Artificial Sequence
  Description of Artificial Sequence: Synthetic oligonucleotide
  Antisense strand to SEQ ID NO: 1971508
aaaucacacagcguucgua

SEQ ID NO: 1971510 - RNA, 19 nt, Artificial Sequence
  Description of Artificial Sequence: Synthetic oligonucleotide
  Sense strand starting at position 1841 of SEQ ID NO: 1880496
aguguuuacuacucuuaca

SEQ ID NO: 1971511 - RNA, 19 nt, Artificial Sequence
  Description of Artificial Sequence: Synthetic oligonucleotide
  Antisense strand to SEQ ID NO: 1971510
uguaagaguaguaaacacu

SEQ ID NO: 1971512 - RNA, 19 nt, Artificial Sequence
  Description of Artificial Sequence: Synthetic oligonucleotide
  Sense strand starting at position 1885 of SEQ ID NO: 1880496
guccuugccaguguuuagu

SEQ ID NO: 1971513 - RNA, 19 nt, Artificial Sequence
  Description of Artificial Sequence: Synthetic oligonucleotide
  Antisense strand to SEQ ID NO: 1971512
acuaaacacuggcaaggac

SEQ ID NO: 1971514 - RNA, 19 nt, Artificial Sequence
  Description of Artificial Sequence: Synthetic oligonucleotide
  Sense strand starting at position 2150 of SEQ ID NO: 1880496
acacuaguaucuucccuga

SEQ ID NO: 1971515 - RNA, 19 nt, Artificial Sequence
  Description of Artificial Sequence: Synthetic oligonucleotide
  Antisense strand to SEQ ID NO: 1971514
ucagggaagauacuagugu

SEQ ID NO: 1971516 - RNA, 19 nt, Artificial Sequence
  Description of Artificial Sequence: Synthetic oligonucleotide
  Sense strand starting at position 2365 of SEQ ID NO: 1880496
agaccucgucucuaguuua

SEQ ID NO: 1971517 - RNA, 19 nt, Artificial Sequence
  Description of Artificial Sequence: Synthetic oligonucleotide
  Antisense strand to SEQ ID NO: 1971516
uaaacuagagacgaggucu

SEQ ID NO: 1971518 - RNA, 19 nt, Artificial Sequence
  Description of Artificial Sequence: Synthetic oligonucleotide
  Sense strand starting at position 2446 of SEQ ID NO: 1880496
caacauuagcuaggaguga

SEQ ID NO: 1971519 - RNA, 19 nt, Artificial Sequence
  Description of Artificial Sequence: Synthetic oligonucleotide
  Antisense strand to SEQ ID NO: 1971518
ucacuccuagcuaauguug

SEQ ID NO: 1971520 - RNA, 19 nt, Artificial Sequence
  Description of Artificial Sequence: Synthetic oligonucleotide
  Sense strand starting at position 2526 of SEQ ID NO: 1880496
gggauucuugauugcacca

SEQ ID NO: 1971521 - RNA, 19 nt, Artificial Sequence
  Description of Artificial Sequence: Synthetic oligonucleotide
  Antisense strand to SEQ ID NO: 1971520
uggugcaaucaagaauccc

SEQ ID NO: 1971522 - RNA, 19 nt, Artificial Sequence
  Description of Artificial Sequence: Synthetic oligonucleotide
  Sense strand starting at position 3206 of SEQ ID NO: 1880496
uacugcuuucuaggguuaa

SEQ ID NO: 1971523 - RNA, 19 nt, Artificial Sequence
  Description of Artificial Sequence: Synthetic oligonucleotide
  Antisense strand to SEQ ID NO: 1971522
uuaacccuagaaagcagua

SEQ ID NO: 1971524 - RNA, 19 nt, Artificial Sequence
  Description of Artificial Sequence: Synthetic oligonucleotide
  Sense strand starting at position 3210 of SEQ ID NO: 1880496
gcuuucuaggguuaaugca

SEQ ID NO: 1971525 - RNA, 19 nt, Artificial Sequence
  Description of Artificial Sequence: Synthetic oligonucleotide
  Antisense strand to SEQ ID NO: 1971524
ugcauuaacccuagaaagc

SEQ ID NO: 1971526 - RNA, 19 nt, Artificial Sequence
  Description of Artificial Sequence: Synthetic oligonucleotide
  Sense strand starting at position 3324 of SEQ ID NO: 1880496
augaaauguuuccuaacug

SEQ ID NO: 1971527 - RNA, 19 nt, Artificial Sequence
  Description of Artificial Sequence: Synthetic oligonucleotide
  Antisense strand to SEQ ID NO: 1971526
caguuaggaaacauuucau

SEQ ID NO: 1971528 - RNA, 19 nt, Artificial Sequence
  Description of Artificial Sequence: Synthetic oligonucleotide
  Sense strand starting at position 3366 of SEQ ID NO: 1880496
aaagcuagauuauugaguu

SEQ ID NO: 1971529 - RNA, 19 nt, Artificial Sequence
  Description of Artificial Sequence: Synthetic oligonucleotide
  Antisense strand to SEQ ID NO: 1971528
aacucaauaaucuagcuuu

SEQ ID NO: 1971530 - RNA, 19 nt, Artificial Sequence
  Description of Artificial Sequence: Synthetic oligonucleotide
  Sense strand starting at position 3389 of SEQ ID NO: 1880496
uuguaagcucuguaggaca

SEQ ID NO: 1971531 - RNA, 19 nt, Artificial Sequence
  Description of Artificial Sequence: Synthetic oligonucleotide
  Antisense strand to SEQ ID NO: 1971530
uguccuacagagcuuacaa

SEQ ID NO: 1971532 - RNA, 19 nt, Artificial Sequence
  Description of Artificial Sequence: Synthetic oligonucleotide
  Sense strand starting at position 3434 of SEQ ID NO: 1880496
auuguuguuuauuugcaga

SEQ ID NO: 1971533 - RNA, 19 nt, Artificial Sequence
  Description of Artificial Sequence: Synthetic oligonucleotide
  Antisense strand to SEQ ID NO: 1971532
ucugcaaauaaacaacaau

SEQ ID NO: 1971534 - RNA, 19 nt, Artificial Sequence
  Description of Artificial Sequence: Synthetic oligonucleotide
  Sense strand starting at position 3714 of SEQ ID NO: 1880496
gcaugagugcucgcccuuu

SEQ ID NO: 1971535 - RNA, 19 nt, Artificial Sequence
  Description of Artificial Sequence: Synthetic oligonucleotide
  Antisense strand to SEQ ID NO: 1971534
aaagggcgagcacucaugc

SEQ ID NO: 1971536 - RNA, 19 nt, Artificial Sequence
  Description of Artificial Sequence: Synthetic oligonucleotide
  Sense strand starting at position 3752 of SEQ ID NO: 1880496
ucauguaaguuccugaaca

SEQ ID NO: 1971537 - RNA, 19 nt, Artificial Sequence
  Description of Artificial Sequence: Synthetic oligonucleotide
  Antisense strand to SEQ ID NO: 1971536
uguucaggaacuuacauga

SEQ ID NO: 1971538 - RNA, 19 nt, Artificial Sequence
  Description of Artificial Sequence: Synthetic oligonucleotide
  Sense strand starting at position 3754 of SEQ ID NO: 1880496
auguaaguuccugaacagu

SEQ ID NO: 1971539 - RNA, 19 nt, Artificial Sequence
  Description of Artificial Sequence: Synthetic oligonucleotide
  Antisense strand to SEQ ID NO: 1971538
acuguucaggaacuuacau

SEQ ID NO: 1971540 - RNA, 19 nt, Artificial Sequence
  Description of Artificial Sequence: Synthetic oligonucleotide
  Sense strand starting at position 3822 of SEQ ID NO: 1880496
aaaucuuccuaggugagca

SEQ ID NO: 1971541 - RNA, 19 nt, Artificial Sequence
  Description of Artificial Sequence: Synthetic oligonucleotide
  Antisense strand to SEQ ID NO: 1971540
ugcucaccuaggaagauuu

SEQ ID NO: 1971542 - RNA, 19 nt, Artificial Sequence
  Description of Artificial Sequence: Synthetic oligonucleotide
  Sense strand starting at position 3872 of SEQ ID NO: 1880496
aaugguaaccuaugacaug

SEQ ID NO: 1971543 - RNA, 19 nt, Artificial Sequence
  Description of Artificial Sequence: Synthetic oligonucleotide
  Antisense strand to SEQ ID NO: 1971542
caugucauagguuaccauu

SEQ ID NO: 1971544 - RNA, 19 nt, Artificial Sequence
  Description of Artificial Sequence: Synthetic oligonucleotide
  Sense strand starting at position 3958 of SEQ ID NO: 1880496
ugcccuuucuccuuggaaa

SEQ ID NO: 1971545 - RNA, 19 nt, Artificial Sequence
  Description of Artificial Sequence: Synthetic oligonucleotide
  Antisense strand to SEQ ID NO: 1971544
uuuccaaggagaaagggca

SEQ ID NO: 1971546 - RNA, 19 nt, Artificial Sequence
  Description of Artificial Sequence: Synthetic oligonucleotide
  Sense strand starting at position 3959 of SEQ ID NO: 1880496
gcccuuucuccuuggaaau

SEQ ID NO: 1971547 - RNA, 19 nt, Artificial Sequence
  Description of Artificial Sequence: Synthetic oligonucleotide
  Antisense strand to SEQ ID NO: 1971546
auuuccaaggagaaagggc

SEQ ID NO: 1971548 - RNA, 19 nt, Artificial Sequence
  Description of Artificial Sequence: Synthetic oligonucleotide
  Sense strand starting at position 491 of SEQ ID NO: 1880497
gagcucaucgcguugcuau

SEQ ID NO: 1971549 - RNA, 19 nt, Artificial Sequence
  Description of Artificial Sequence: Synthetic oligonucleotide
  Antisense strand to SEQ ID NO: 1971548
auagcaacgcgaugagcuc

SEQ ID NO: 1971550 - RNA, 19 nt, Artificial Sequence
  Description of Artificial Sequence: Synthetic oligonucleotide
  Sense strand starting at position 616 of SEQ ID NO: 1880497
uugagaggucggugaccuu

SEQ ID NO: 1971551 - RNA, 19 nt, Artificial Sequence
  Description of Artificial Sequence: Synthetic oligonucleotide
  Antisense strand to SEQ ID NO: 1971550
aaggucaccgaccucucaa

SEQ ID NO: 1971552 - RNA, 19 nt, Artificial Sequence
  Description of Artificial Sequence: Synthetic oligonucleotide
  Sense strand starting at position 766 of SEQ ID NO: 1880497
aucaguauuugugggauuu

SEQ ID NO: 1971553 - RNA, 19 nt, Artificial Sequence
  Description of Artificial Sequence: Synthetic oligonucleotide
  Antisense strand to SEQ ID NO: 1971552
aaaucccacaaauacugau

SEQ ID NO: 1971554 - RNA, 19 nt, Artificial Sequence
  Description of Artificial Sequence: Synthetic oligonucleotide
  Sense strand starting at position 1025 of SEQ ID NO: 1880497
guuauaugggagcgguaac

SEQ ID NO: 1971555 - RNA, 19 nt, Artificial Sequence
  Description of Artificial Sequence: Synthetic oligonucleotide
  Antisense strand to SEQ ID NO: 1971554
guuaccgcucccauauaac

SEQ ID NO: 1971556 - RNA, 19 nt, Artificial Sequence
  Description of Artificial Sequence: Synthetic oligonucleotide
  Sense strand starting at position 1085 of SEQ ID NO: 1880497
auuggugcuccugaguaug

SEQ ID NO: 1971557 - RNA, 19 nt, Artificial Sequence
  Description of Artificial Sequence: Synthetic oligonucleotide
  Antisense strand to SEQ ID NO: 1971556
cauacucaggagcaccaau

SEQ ID NO: 1971558 - RNA, 19 nt, Artificial Sequence
  Description of Artificial Sequence: Synthetic oligonucleotide
  Sense strand starting at position 1222 of SEQ ID NO: 1880497
cuuucuuaccuuuggucau

SEQ ID NO: 1971559 - RNA, 19 nt, Artificial Sequence
  Description of Artificial Sequence: Synthetic oligonucleotide
  Antisense strand to SEQ ID NO: 1971558
augaccaaagguaagaaag

SEQ ID NO: 1971560 - RNA, 19 nt, Artificial Sequence
  Description of Artificial Sequence: Synthetic oligonucleotide
  Sense strand starting at position 1225 of SEQ ID NO: 1880497
ucuuaccuuuggucauaga

SEQ ID NO: 1971561 - RNA, 19 nt, Artificial Sequence
  Description of Artificial Sequence: Synthetic oligonucleotide
  Antisense strand to SEQ ID NO: 1971560
ucuaugaccaaagguaaga

SEQ ID NO: 1971562 - RNA, 19 nt, Artificial Sequence
  Description of Artificial Sequence: Synthetic oligonucleotide
  Sense strand starting at position 1226 of SEQ ID NO: 1880497
cuuaccuuuggucauagaa

SEQ ID NO: 1971563 - RNA, 19 nt, Artificial Sequence
  Description of Artificial Sequence: Synthetic oligonucleotide
  Antisense strand to SEQ ID NO: 1971562
uucuaugaccaaagguaag

SEQ ID NO: 1971564 - RNA, 19 nt, Artificial Sequence
  Description of Artificial Sequence: Synthetic oligonucleotide
  Sense strand starting at position 1368 of SEQ ID NO: 1880497
guuagcaucagaggaaugu

SEQ ID NO: 1971565 - RNA, 19 nt, Artificial Sequence
  Description of Artificial Sequence: Synthetic oligonucleotide
  Antisense strand to SEQ ID NO: 1971564
acauuccucugaugcuaac

SEQ ID NO: 1971566 - RNA, 19 nt, Artificial Sequence
  Description of Artificial Sequence: Synthetic oligonucleotide
  Sense strand starting at position 1369 of SEQ ID NO: 1880497
uuagcaucagaggaauguu

SEQ ID NO: 1971567 - RNA, 19 nt, Artificial Sequence
  Description of Artificial Sequence: Synthetic oligonucleotide
  Antisense strand to SEQ ID NO: 1971566
aacauuccucugaugcuaa

SEQ ID NO: 1971568 - RNA, 19 nt, Artificial Sequence
  Description of Artificial Sequence: Synthetic oligonucleotide
  Sense strand starting at position 1372 of SEQ ID NO: 1880497
gcaucagaggaauguuguu

SEQ ID NO: 1971569 - RNA, 19 nt, Artificial Sequence
  Description of Artificial Sequence: Synthetic oligonucleotide
  Antisense strand to SEQ ID NO: 1971568
aacaacauuccucugaugc

SEQ ID NO: 1971570 - RNA, 19 nt, Artificial Sequence
  Description of Artificial Sequence: Synthetic oligonucleotide
  Sense strand starting at position 1377 of SEQ ID NO: 1880497
agaggaauguuguuuccuu

SEQ ID NO: 1971571 - RNA, 19 nt, Artificial Sequence
  Description of Artificial Sequence: Synthetic oligonucleotide
  Antisense strand to SEQ ID NO: 1971570
aaggaaacaacauuccucu

SEQ ID NO: 1971572 - RNA, 19 nt, Artificial Sequence
  Description of Artificial Sequence: Synthetic oligonucleotide
  Sense strand starting at position 1378 of SEQ ID NO: 1880497
gaggaauguuguuuccuuc

SEQ ID NO: 1971573 - RNA, 19 nt, Artificial Sequence
  Description of Artificial Sequence: Synthetic oligonucleotide
  Antisense strand to SEQ ID NO: 1971572
gaaggaaacaacauuccuc

SEQ ID NO: 1971574 - RNA, 19 nt, Artificial Sequence
  Description of Artificial Sequence: Synthetic oligonucleotide
  Sense strand starting at position 1385 of SEQ ID NO: 1880497
guuguuuccuucucugaaa

SEQ ID NO: 1971575 - RNA, 19 nt, Artificial Sequence
  Description of Artificial Sequence: Synthetic oligonucleotide
  Antisense strand to SEQ ID NO: 1971574
uuucagagaaggaaacaac

SEQ ID NO: 1971576 - RNA, 19 nt, Artificial Sequence
  Description of Artificial Sequence: Synthetic oligonucleotide
  Sense strand starting at position 1768 of SEQ ID NO: 1880497
uggucauaaacgcauagau

SEQ ID NO: 1971577 - RNA, 19 nt, Artificial Sequence
  Description of Artificial Sequence: Synthetic oligonucleotide
  Antisense strand to SEQ ID NO: 1971576
aucuaugcguuuaugacca

SEQ ID NO: 1971578 - RNA, 19 nt, Artificial Sequence
  Description of Artificial Sequence: Synthetic oligonucleotide
  Sense strand starting at position 1770 of SEQ ID NO: 1880497
gucauaaacgcauagauaa

SEQ ID NO: 1971579 - RNA, 19 nt, Artificial Sequence
  Description of Artificial Sequence: Synthetic oligonucleotide
  Antisense strand to SEQ ID NO: 1971578
uuaucuaugcguuuaugac

SEQ ID NO: 1971580 - RNA, 19 nt, Artificial Sequence
  Description of Artificial Sequence: Synthetic oligonucleotide
  Sense strand starting at position 1786 of SEQ ID NO: 1880497
uaagauuaucccgagguuc

SEQ ID NO: 1971581 - RNA, 19 nt, Artificial Sequence
  Description of Artificial Sequence: Synthetic oligonucleotide
  Antisense strand to SEQ ID NO: 1971580
gaaccucgggauaaucuua

SEQ ID NO: 1971582 - RNA, 19 nt, Artificial Sequence
  Description of Artificial Sequence: Synthetic oligonucleotide
  Sense strand starting at position 1788 of SEQ ID NO: 1880497
agauuaucccgagguucuc

SEQ ID NO: 1971583 - RNA, 19 nt, Artificial Sequence
  Description of Artificial Sequence: Synthetic oligonucleotide
  Antisense strand to SEQ ID NO: 1971582
gagaaccucgggauaaucu

SEQ ID NO: 1971584 - RNA, 19 nt, Artificial Sequence
  Description of Artificial Sequence: Synthetic oligonucleotide
  Sense strand starting at position 2038 of SEQ ID NO: 1880497
gacgucucuggucauuaca

SEQ ID NO: 1971585 - RNA, 19 nt, Artificial Sequence
  Description of Artificial Sequence: Synthetic oligonucleotide
  Antisense strand to SEQ ID NO: 1971584
uguaaugaccagagacguc

SEQ ID NO: 1971586 - RNA, 19 nt, Artificial Sequence
  Description of Artificial Sequence: Synthetic oligonucleotide
  Sense strand starting at position 2381 of SEQ ID NO: 1880497
acuacagaguuaucuugaa

SEQ ID NO: 1971587 - RNA, 19 nt, Artificial Sequence
  Description of Artificial Sequence: Synthetic oligonucleotide
  Antisense strand to SEQ ID NO: 1971586
uucaagauaacucuguagu

SEQ ID NO: 1971588 - RNA, 19 nt, Artificial Sequence
  Description of Artificial Sequence: Synthetic oligonucleotide
  Sense strand starting at position 2389 of SEQ ID NO: 1880497
guuaucuugaaccggacaa

SEQ ID NO: 1971589 - RNA, 19 nt, Artificial Sequence
  Description of Artificial Sequence: Synthetic oligonucleotide
  Antisense strand to SEQ ID NO: 1971588
uuguccgguucaagauaac

SEQ ID NO: 1971590 - RNA, 19 nt, Artificial Sequence
  Description of Artificial Sequence: Synthetic oligonucleotide
  Sense strand starting at position 2550 of SEQ ID NO: 1880497
uuuaauggcugucuacuau

SEQ ID NO: 1971591 - RNA, 19 nt, Artificial Sequence
  Description of Artificial Sequence: Synthetic oligonucleotide
  Antisense strand to SEQ ID NO: 1971590
auaguagacagccauuaaa

SEQ ID NO: 1971592 - RNA, 19 nt, Artificial Sequence
  Description of Artificial Sequence: Synthetic oligonucleotide
  Sense strand starting at position 2565 of SEQ ID NO: 1880497
cuaugugauguuuaacuga

SEQ ID NO: 1971593 - RNA, 19 nt, Artificial Sequence
  Description of Artificial Sequence: Synthetic oligonucleotide
  Antisense strand to SEQ ID NO: 1971592
ucaguuaaacaucacauag

SEQ ID NO: 1971594 - RNA, 19 nt, Artificial Sequence
  Description of Artificial Sequence: Synthetic oligonucleotide
  Sense strand starting at position 2604 of SEQ ID NO: 1880497
gagguuauguuucccaaau

SEQ ID NO: 1971595 - RNA, 19 nt, Artificial Sequence
  Description of Artificial Sequence: Synthetic oligonucleotide
  Antisense strand to SEQ ID NO: 1971594
auuugggaaacauaaccuc

SEQ ID NO: 1971596 - RNA, 19 nt, Artificial Sequence
  Description of Artificial Sequence: Synthetic oligonucleotide
  Sense strand starting at position 2619 of SEQ ID NO: 1880497
aaaucuuacccagacgagu

SEQ ID NO: 1971597 - RNA, 19 nt, Artificial Sequence
  Description of Artificial Sequence: Synthetic oligonucleotide
  Antisense strand to SEQ ID NO: 1971596
acucgucuggguaagauuu

SEQ ID NO: 1971598 - RNA, 19 nt, Artificial Sequence
  Description of Artificial Sequence: Synthetic oligonucleotide
  Sense strand starting at position 2732 of SEQ ID NO: 1880497
uagugagagacccagguuu

SEQ ID NO: 1971599 - RNA, 19 nt, Artificial Sequence
  Description of Artificial Sequence: Synthetic oligonucleotide
  Antisense strand to SEQ ID NO: 1971598
aaaccugggucucucacua

SEQ ID NO: 1971600 - RNA, 19 nt, Artificial Sequence
  Description of Artificial Sequence: Synthetic oligonucleotide
  Sense strand starting at position 2734 of SEQ ID NO: 1880497
gugagagacccagguuuau

SEQ ID NO: 1971601 - RNA, 19 nt, Artificial Sequence
  Description of Artificial Sequence: Synthetic oligonucleotide
  Antisense strand to SEQ ID NO: 1971600
auaaaccugggucucucac

SEQ ID NO: 1971602 - RNA, 19 nt, Artificial Sequence
  Description of Artificial Sequence: Synthetic oligonucleotide
  Sense strand starting at position 2743 of SEQ ID NO: 1880497
ccagguuuauaacuguacu

SEQ ID NO: 1971603 - RNA, 19 nt, Artificial Sequence
  Description of Artificial Sequence: Synthetic oligonucleotide
  Antisense strand to SEQ ID NO: 1971602
aguacaguuauaaaccugg

SEQ ID NO: 1971604 - RNA, 19 nt, Artificial Sequence
  Description of Artificial Sequence: Synthetic oligonucleotide
  Sense strand starting at position 2806 of SEQ ID NO: 1880497
aguaauauuccagggagca

SEQ ID NO: 1971605 - RNA, 19 nt, Artificial Sequence
  Description of Artificial Sequence: Synthetic oligonucleotide
  Antisense strand to SEQ ID NO: 1971604
ugcucccuggaauauuacu

SEQ ID NO: 1971606 - RNA, 19 nt, Artificial Sequence
  Description of Artificial Sequence: Synthetic oligonucleotide
  Sense strand starting at position 2807 of SEQ ID NO: 1880497
guaauauuccagggagcau

SEQ ID NO: 1971607 - RNA, 19 nt, Artificial Sequence
  Description of Artificial Sequence: Synthetic oligonucleotide
  Antisense strand to SEQ ID NO: 1971606
augcucccuggaauauuac

SEQ ID NO: 1971608 - RNA, 19 nt, Artificial Sequence
  Description of Artificial Sequence: Synthetic oligonucleotide
  Sense strand starting at position 2883 of SEQ ID NO: 1880497
uuucucuuaugacuaugua

SEQ ID NO: 1971609 - RNA, 19 nt, Artificial Sequence
  Description of Artificial Sequence: Synthetic oligonucleotide
  Antisense strand to SEQ ID NO: 1971608
uacauagucauaagagaaa

SEQ ID NO: 1971610 - RNA, 19 nt, Artificial Sequence
  Description of Artificial Sequence: Synthetic oligonucleotide
  Sense strand starting at position 2951 of SEQ ID NO: 1880497
augaaaugucacugacauc

SEQ ID NO: 1971611 - RNA, 19 nt, Artificial Sequence
  Description of Artificial Sequence: Synthetic oligonucleotide
  Antisense strand to SEQ ID NO: 1971610
gaugucagugacauuucau

SEQ ID NO: 1971612 - RNA, 19 nt, Artificial Sequence
  Description of Artificial Sequence: Synthetic oligonucleotide
  Sense strand starting at position 3330 of SEQ ID NO: 1880497
acuuguagugaugauguaa

SEQ ID NO: 1971613 - RNA, 19 nt, Artificial Sequence
  Description of Artificial Sequence: Synthetic oligonucleotide
  Antisense strand to SEQ ID NO: 1971612
uuacaucaucacuacaagu

SEQ ID NO: 1971614 - RNA, 19 nt, Artificial Sequence
  Description of Artificial Sequence: Synthetic oligonucleotide
  Sense strand starting at position 3400 of SEQ ID NO: 1880497
guguccauacaucaauuaa

SEQ ID NO: 1971615 - RNA, 19 nt, Artificial Sequence
  Description of Artificial Sequence: Synthetic oligonucleotide
  Antisense strand to SEQ ID NO: 1971614
uuaauugauguauggacac

SEQ ID NO: 1971616 - RNA, 19 nt, Artificial Sequence
  Description of Artificial Sequence: Synthetic oligonucleotide
  Sense strand starting at position 3546 of SEQ ID NO: 1880497
ucggucuuuggugaaguua

SEQ ID NO: 1971617 - RNA, 19 nt, Artificial Sequence
  Description of Artificial Sequence: Synthetic oligonucleotide
  Antisense strand to SEQ ID NO: 1971616
uaacuucaccaaagaccga

SEQ ID NO: 1971618 - RNA, 19 nt, Artificial Sequence
  Description of Artificial Sequence: Synthetic oligonucleotide
  Sense strand starting at position 3554 of SEQ ID NO: 1880497
uggugaaguuaccuuuaaa

SEQ ID NO: 1971619 - RNA, 19 nt, Artificial Sequence
  Description of Artificial Sequence: Synthetic oligonucleotide
  Antisense strand to SEQ ID NO: 1971618
uuuaaagguaacuucacca

SEQ ID NO: 1971620 - RNA, 19 nt, Artificial Sequence
  Description of Artificial Sequence: Synthetic oligonucleotide
  Sense strand starting at position 3659 of SEQ ID NO: 1880497
aucucagcuuauguuugaa

SEQ ID NO: 1971621 - RNA, 19 nt, Artificial Sequence
  Description of Artificial Sequence: Synthetic oligonucleotide
  Antisense strand to SEQ ID NO: 1971620
uucaaacauaagcugagau

SEQ ID NO: 1971622 - RNA, 19 nt, Artificial Sequence
  Description of Artificial Sequence: Synthetic oligonucleotide
  Sense strand starting at position 3661 of SEQ ID NO: 1880497
cucagcuuauguuugaaga

SEQ ID NO: 1971623 - RNA, 19 nt, Artificial Sequence
  Description of Artificial Sequence: Synthetic oligonucleotide
  Antisense strand to SEQ ID NO: 1971622
ucuucaaacauaagcugag

SEQ ID NO: 1971624 - RNA, 19 nt, Artificial Sequence
  Description of Artificial Sequence: Synthetic oligonucleotide
  Sense strand starting at position 3662 of SEQ ID NO: 1880497
ucagcuuauguuugaagau

SEQ ID NO: 1971625 - RNA, 19 nt, Artificial Sequence
  Description of Artificial Sequence: Synthetic oligonucleotide
  Antisense strand to SEQ ID NO: 1971624
aucuucaaacauaagcuga

SEQ ID NO: 1971626 - RNA, 19 nt, Artificial Sequence
  Description of Artificial Sequence: Synthetic oligonucleotide
  Sense strand starting at position 3915 of SEQ ID NO: 1880497
ugcaucauacagcagauau

SEQ ID NO: 1971627 - RNA, 19 nt, Artificial Sequence
  Description of Artificial Sequence: Synthetic oligonucleotide
  Antisense strand to SEQ ID NO: 1971626
auaucugcuguaugaugca

SEQ ID NO: 1971628 - RNA, 19 nt, Artificial Sequence
  Description of Artificial Sequence: Synthetic oligonucleotide
  Sense strand starting at position 211 of SEQ ID NO: 1880498
auguuugucggacgcauaa

SEQ ID NO: 1971629 - RNA, 19 nt, Artificial Sequence
  Description of Artificial Sequence: Synthetic oligonucleotide
  Antisense strand to SEQ ID NO: 1971628
uuaugcguccgacaaacau

SEQ ID NO: 1971630 - RNA, 19 nt, Artificial Sequence
  Description of Artificial Sequence: Synthetic oligonucleotide
  Sense strand starting at position 213 of SEQ ID NO: 1880498
guuugucggacgcauaaau

SEQ ID NO: 1971631 - RNA, 19 nt, Artificial Sequence
  Description of Artificial Sequence: Synthetic oligonucleotide
  Antisense strand to SEQ ID NO: 1971630
auuuaugcguccgacaaac

SEQ ID NO: 1971632 - RNA, 19 nt, Artificial Sequence
  Description of Artificial Sequence: Synthetic oligonucleotide
  Sense strand starting at position 406 of SEQ ID NO: 1880498
uuucuuucccugugcagaa

SEQ ID NO: 1971633 - RNA, 19 nt, Artificial Sequence
  Description of Artificial Sequence: Synthetic oligonucleotide
  Antisense strand to SEQ ID NO: 1971632
uucugcacagggaaagaaa

SEQ ID NO: 1971634 - RNA, 19 nt, Artificial Sequence
  Description of Artificial Sequence: Synthetic oligonucleotide
  Sense strand starting at position 418 of SEQ ID NO: 1880498
ugcagaagugcuuacguuu

SEQ ID NO: 1971635 - RNA, 19 nt, Artificial Sequence
  Description of Artificial Sequence: Synthetic oligonucleotide
  Antisense strand to SEQ ID NO: 1971634
aaacguaagcacuucugca

SEQ ID NO: 1971636 - RNA, 19 nt, Artificial Sequence
  Description of Artificial Sequence: Synthetic oligonucleotide
  Sense strand starting at position 421 of SEQ ID NO: 1880498
agaagugcuuacguuuaau

SEQ ID NO: 1971637 - RNA, 19 nt, Artificial Sequence
  Description of Artificial Sequence: Synthetic oligonucleotide
  Antisense strand to SEQ ID NO: 1971636
auuaaacguaagcacuucu

SEQ ID NO: 1971638 - RNA, 19 nt, Artificial Sequence
  Description of Artificial Sequence: Synthetic oligonucleotide
  Sense strand starting at position 424 of SEQ ID NO: 1880498
agugcuuacguuuaauuag

SEQ ID NO: 1971639 - RNA, 19 nt, Artificial Sequence
  Description of Artificial Sequence: Synthetic oligonucleotide
  Antisense strand to SEQ ID NO: 1971638
cuaauuaaacguaagcacu

SEQ ID NO: 1971640 - RNA, 19 nt, Artificial Sequence
  Description of Artificial Sequence: Synthetic oligonucleotide
  Sense strand starting at position 427 of SEQ ID NO: 1880498
gcuuacguuuaauuagauc

SEQ ID NO: 1971641 - RNA, 19 nt, Artificial Sequence
  Description of Artificial Sequence: Synthetic oligonucleotide
  Antisense strand to SEQ ID NO: 1971640
gaucuaauuaaacguaagc

SEQ ID NO: 1971642 - RNA, 19 nt, Artificial Sequence
  Description of Artificial Sequence: Synthetic oligonucleotide
  Sense strand starting at position 470 of SEQ ID NO: 1880498
ugcaauugcuauugaugau

SEQ ID NO: 1971643 - RNA, 19 nt, Artificial Sequence
  Description of Artificial Sequence: Synthetic oligonucleotide
  Antisense strand to SEQ ID NO: 1971642
aucaucaauagcaauugca

SEQ ID NO: 1971644 - RNA, 19 nt, Artificial Sequence
  Description of Artificial Sequence: Synthetic oligonucleotide
  Sense strand starting at position 1138 of SEQ ID NO: 1880498
ugauuaguguggccuugua

SEQ ID NO: 1971645 - RNA, 19 nt, Artificial Sequence
  Description of Artificial Sequence: Synthetic oligonucleotide
  Antisense strand to SEQ ID NO: 1971644
uacaaggccacacuaauca

SEQ ID NO: 1971646 - RNA, 19 nt, Artificial Sequence
  Description of Artificial Sequence: Synthetic oligonucleotide
  Sense strand starting at position 1208 of SEQ ID NO: 1880498
uaggauugucucgacuauu

SEQ ID NO: 1971647 - RNA, 19 nt, Artificial Sequence
  Description of Artificial Sequence: Synthetic oligonucleotide
  Antisense strand to SEQ ID NO: 1971646
aauagucgagacaauccua

SEQ ID NO: 1971648 - RNA, 19 nt, Artificial Sequence
  Description of Artificial Sequence: Synthetic oligonucleotide
  Sense strand starting at position 1538 of SEQ ID NO: 1880498
ggcucucuugccuauuguu

SEQ ID NO: 1971649 - RNA, 19 nt, Artificial Sequence
  Description of Artificial Sequence: Synthetic oligonucleotide
  Antisense strand to SEQ ID NO: 1971648
aacaauaggcaagagagcc

SEQ ID NO: 1971650 - RNA, 19 nt, Artificial Sequence
  Description of Artificial Sequence: Synthetic oligonucleotide
  Sense strand starting at position 1554 of SEQ ID NO: 1880498
guugguguauaggaauuga

SEQ ID NO: 1971651 - RNA, 19 nt, Artificial Sequence
  Description of Artificial Sequence: Synthetic oligonucleotide
  Antisense strand to SEQ ID NO: 1971650
ucaauuccuauacaccaac

SEQ ID NO: 1971652 - RNA, 19 nt, Artificial Sequence
  Description of Artificial Sequence: Synthetic oligonucleotide
  Sense strand starting at position 1570 of SEQ ID NO: 1880498
ugaagaauauugucuauug

SEQ ID NO: 1971653 - RNA, 19 nt, Artificial Sequence
  Description of Artificial Sequence: Synthetic oligonucleotide
  Antisense strand to SEQ ID NO: 1971652
caauagacaauauucuuca

SEQ ID NO: 1971654 - RNA, 19 nt, Artificial Sequence
  Description of Artificial Sequence: Synthetic oligonucleotide
  Sense strand starting at position 1822 of SEQ ID NO: 1880498
ccacuuugaucuuagucau

SEQ ID NO: 1971655 - RNA, 19 nt, Artificial Sequence
  Description of Artificial Sequence: Synthetic oligonucleotide
  Antisense strand to SEQ ID NO: 1971654
augacuaagaucaaagugg

SEQ ID NO: 1971656 - RNA, 19 nt, Artificial Sequence
  Description of Artificial Sequence: Synthetic oligonucleotide
  Sense strand starting at position 1916 of SEQ ID NO: 1880498
gugucaauuugagauaugu

SEQ ID NO: 1971657 - RNA, 19 nt, Artificial Sequence
  Description of Artificial Sequence: Synthetic oligonucleotide
  Antisense strand to SEQ ID NO: 1971656
acauaucucaaauugacac

SEQ ID NO: 1971658 - RNA, 19 nt, Artificial Sequence
  Description of Artificial Sequence: Synthetic oligonucleotide
  Sense strand starting at position 1924 of SEQ ID NO: 1880498
uugagauaugucuagcuuu

SEQ ID NO: 1971659 - RNA, 19 nt, Artificial Sequence
  Description of Artificial Sequence: Synthetic oligonucleotide
  Antisense strand to SEQ ID NO: 1971658
aaagcuagacauaucucaa

SEQ ID NO: 1971660 - RNA, 19 nt, Artificial Sequence
  Description of Artificial Sequence: Synthetic oligonucleotide
  Sense strand starting at position 1927 of SEQ ID NO: 1880498
agauaugucuagcuuuaug

SEQ ID NO: 1971661 - RNA, 19 nt, Artificial Sequence
  Description of Artificial Sequence: Synthetic oligonucleotide
  Antisense strand to SEQ ID NO: 1971660
cauaaagcuagacauaucu

SEQ ID NO: 1971662 - RNA, 19 nt, Artificial Sequence
  Description of Artificial Sequence: Synthetic oligonucleotide
  Sense strand starting at position 1988 of SEQ ID NO: 1880498
uuaguugccucccagagau

SEQ ID NO: 1971663 - RNA, 19 nt, Artificial Sequence
  Description of Artificial Sequence: Synthetic oligonucleotide
  Antisense strand to SEQ ID NO: 1971662
aucucugggaggcaacuaa

SEQ ID NO: 1971664 - RNA, 19 nt, Artificial Sequence
  Description of Artificial Sequence: Synthetic oligonucleotide
  Sense strand starting at position 2093 of SEQ ID NO: 1880498
aggagcacguuguucaaua

SEQ ID NO: 1971665 - RNA, 19 nt, Artificial Sequence
  Description of Artificial Sequence: Synthetic oligonucleotide
  Antisense strand to SEQ ID NO: 1971664
uauugaacaacgugcuccu

SEQ ID NO: 1971666 - RNA, 19 nt, Artificial Sequence
  Description of Artificial Sequence: Synthetic oligonucleotide
  Sense strand starting at position 2094 of SEQ ID NO: 1880498
ggagcacguuguucaauau

SEQ ID NO: 1971667 - RNA, 19 nt, Artificial Sequence
  Description of Artificial Sequence: Synthetic oligonucleotide
  Antisense strand to SEQ ID NO: 1971666
auauugaacaacgugcucc

SEQ ID NO: 1971668 - RNA, 19 nt, Artificial Sequence
  Description of Artificial Sequence: Synthetic oligonucleotide
  Sense strand starting at position 2250 of SEQ ID NO: 1880498
uuuagagugucauaugcca

SEQ ID NO: 1971669 - RNA, 19 nt, Artificial Sequence
  Description of Artificial Sequence: Synthetic oligonucleotide
  Antisense strand to SEQ ID NO: 1971668
uggcauaugacacucuaaa

SEQ ID NO: 1971670 - RNA, 19 nt, Artificial Sequence
  Description of Artificial Sequence: Synthetic oligonucleotide
  Sense strand starting at position 2258 of SEQ ID NO: 1880498
gucauaugccacuaagaau

SEQ ID NO: 1971671 - RNA, 19 nt, Artificial Sequence
  Description of Artificial Sequence: Synthetic oligonucleotide
  Antisense strand to SEQ ID NO: 1971670
auucuuaguggcauaugac

SEQ ID NO: 1971672 - RNA, 19 nt, Artificial Sequence
  Description of Artificial Sequence: Synthetic oligonucleotide
  Sense strand starting at position 2290 of SEQ ID NO: 1880498
uuguuucguguuggagagu

SEQ ID NO: 1971673 - RNA, 19 nt, Artificial Sequence
  Description of Artificial Sequence: Synthetic oligonucleotide
  Antisense strand to SEQ ID NO: 1971672
acucuccaacacgaaacaa

SEQ ID NO: 1971674 - RNA, 19 nt, Artificial Sequence
  Description of Artificial Sequence: Synthetic oligonucleotide
  Sense strand starting at position 2311 of SEQ ID NO: 1880498
uguagauaucuaugagauu

SEQ ID NO: 1971675 - RNA, 19 nt, Artificial Sequence
  Description of Artificial Sequence: Synthetic oligonucleotide
  Antisense strand to SEQ ID NO: 1971674
aaucucauagauaucuaca

SEQ ID NO: 1971676 - RNA, 19 nt, Artificial Sequence
  Description of Artificial Sequence: Synthetic oligonucleotide
  Sense strand starting at position 2312 of SEQ ID NO: 1880498
guagauaucuaugagauuc

SEQ ID NO: 1971677 - RNA, 19 nt, Artificial Sequence
  Description of Artificial Sequence: Synthetic oligonucleotide
  Antisense strand to SEQ ID NO: 1971676
gaaucucauagauaucuac

SEQ ID NO: 1971678 - RNA, 19 nt, Artificial Sequence
  Description of Artificial Sequence: Synthetic oligonucleotide
  Sense strand starting at position 2329 of SEQ ID NO: 1880498
ucacuugauccagagcugu

SEQ ID NO: 1971679 - RNA, 19 nt, Artificial Sequence
  Description of Artificial Sequence: Synthetic oligonucleotide
  Antisense strand to SEQ ID NO: 1971678
acagcucuggaucaaguga

SEQ ID NO: 1971680 - RNA, 19 nt, Artificial Sequence
  Description of Artificial Sequence: Synthetic oligonucleotide
  Sense strand starting at position 2350 of SEQ ID NO: 1880498
ucaaguccuuucuugucaa

SEQ ID NO: 1971681 - RNA, 19 nt, Artificial Sequence
  Description of Artificial Sequence: Synthetic oligonucleotide
  Antisense strand to SEQ ID NO: 1971680
uugacaagaaaggacuuga

SEQ ID NO: 1971682 - RNA, 19 nt, Artificial Sequence
  Description of Artificial Sequence: Synthetic oligonucleotide
  Sense strand starting at position 2353 of SEQ ID NO: 1880498
aguccuuucuugucaauuu

SEQ ID NO: 1971683 - RNA, 19 nt, Artificial Sequence
  Description of Artificial Sequence: Synthetic oligonucleotide
  Antisense strand to SEQ ID NO: 1971682
aaauugacaagaaaggacu

SEQ ID NO: 1971684 - RNA, 19 nt, Artificial Sequence
  Description of Artificial Sequence: Synthetic oligonucleotide
  Sense strand starting at position 2373 of SEQ ID NO: 1880498
cugccuagaugauccaaua

SEQ ID NO: 1971685 - RNA, 19 nt, Artificial Sequence
  Description of Artificial Sequence: Synthetic oligonucleotide
  Antisense strand to SEQ ID NO: 1971684
uauuggaucaucuaggcag

SEQ ID NO: 1971686 - RNA, 19 nt, Artificial Sequence
  Description of Artificial Sequence: Synthetic oligonucleotide
  Sense strand starting at position 2433 of SEQ ID NO: 1880498
uagccugagucucuuugua

SEQ ID NO: 1971687 - RNA, 19 nt, Artificial Sequence
  Description of Artificial Sequence: Synthetic oligonucleotide
  Antisense strand to SEQ ID NO: 1971686
uacaaagagacucaggcua

SEQ ID NO: 1971688 - RNA, 19 nt, Artificial Sequence
  Description of Artificial Sequence: Synthetic oligonucleotide
  Sense strand starting at position 2539 of SEQ ID NO: 1880498
auuccuuuaucauugugau

SEQ ID NO: 1971689 - RNA, 19 nt, Artificial Sequence
  Description of Artificial Sequence: Synthetic oligonucleotide
  Antisense strand to SEQ ID NO: 1971688
aucacaaugauaaaggaau

SEQ ID NO: 1971690 - RNA, 19 nt, Artificial Sequence
  Description of Artificial Sequence: Synthetic oligonucleotide
  Sense strand starting at position 2540 of SEQ ID NO: 1880498
uuccuuuaucauugugaug

SEQ ID NO: 1971691 - RNA, 19 nt, Artificial Sequence
  Description of Artificial Sequence: Synthetic oligonucleotide
  Antisense strand to SEQ ID NO: 1971690
caucacaaugauaaaggaa

SEQ ID NO: 1971692 - RNA, 19 nt, Artificial Sequence
  Description of Artificial Sequence: Synthetic oligonucleotide
  Sense strand starting at position 2542 of SEQ ID NO: 1880498
ccuuuaucauugugauguu

SEQ ID NO: 1971693 - RNA, 19 nt, Artificial Sequence
  Description of Artificial Sequence: Synthetic oligonucleotide
  Antisense strand to SEQ ID NO: 1971692
aacaucacaaugauaaagg

SEQ ID NO: 1971694 - RNA, 19 nt, Artificial Sequence
  Description of Artificial Sequence: Synthetic oligonucleotide
  Sense strand starting at position 2545 of SEQ ID NO: 1880498
uuaucauugugauguucuu

SEQ ID NO: 1971695 - RNA, 19 nt, Artificial Sequence
  Description of Artificial Sequence: Synthetic oligonucleotide
  Antisense strand to SEQ ID NO: 1971694
aagaacaucacaaugauaa

SEQ ID NO: 1971696 - RNA, 19 nt, Artificial Sequence
  Description of Artificial Sequence: Synthetic oligonucleotide
  Sense strand starting at position 2838 of SEQ ID NO: 1880498
ccaugaugcuugcugguua

SEQ ID NO: 1971697 - RNA, 19 nt, Artificial Sequence
  Description of Artificial Sequence: Synthetic oligonucleotide
  Antisense strand to SEQ ID NO: 1971696
uaaccagcaagcaucaugg

SEQ ID NO: 1971698 - RNA, 19 nt, Artificial Sequence
  Description of Artificial Sequence: Synthetic oligonucleotide
  Sense strand starting at position 3157 of SEQ ID NO: 1880498
ggcccacucuuagucagau

SEQ ID NO: 1971699 - RNA, 19 nt, Artificial Sequence
  Description of Artificial Sequence: Synthetic oligonucleotide
  Antisense strand to SEQ ID NO: 1971698
aucugacuaagagugggcc

SEQ ID NO: 1971700 - RNA, 19 nt, Artificial Sequence
  Description of Artificial Sequence: Synthetic oligonucleotide
  Sense strand starting at position 3163 of SEQ ID NO: 1880498
cucuuagucagaugggcuu

SEQ ID NO: 1971701 - RNA, 19 nt, Artificial Sequence
  Description of Artificial Sequence: Synthetic oligonucleotide
  Antisense strand to SEQ ID NO: 1971700
aagcccaucugacuaagag

SEQ ID NO: 1971702 - RNA, 19 nt, Artificial Sequence
  Description of Artificial Sequence: Synthetic oligonucleotide
  Sense strand starting at position 3638 of SEQ ID NO: 1880498
gcuggcucuggucauuuau

SEQ ID NO: 1971703 - RNA, 19 nt, Artificial Sequence
  Description of Artificial Sequence: Synthetic oligonucleotide
  Antisense strand to SEQ ID NO: 1971702
auaaaugaccagagccagc

SEQ ID NO: 1971704 - RNA, 19 nt, Artificial Sequence
  Description of Artificial Sequence: Synthetic oligonucleotide
  Sense strand starting at position 3963 of SEQ ID NO: 1880498
ccaauauguuggguuagag

SEQ ID NO: 1971705 - RNA, 19 nt, Artificial Sequence
  Description of Artificial Sequence: Synthetic oligonucleotide
  Antisense strand to SEQ ID NO: 1971704
cucuaacccaacauauugg

SEQ ID NO: 1971706 - RNA, 19 nt, Artificial Sequence
  Description of Artificial Sequence: Synthetic oligonucleotide
  Sense strand starting at position 3975 of SEQ ID NO: 1880498
guuagagcguacuccuuua

SEQ ID NO: 1971707 - RNA, 19 nt, Artificial Sequence
  Description of Artificial Sequence: Synthetic oligonucleotide
  Antisense strand to SEQ ID NO: 1971706
uaaaggaguacgcucuaac

SEQ ID NO: 1971708 - RNA, 19 nt, Artificial Sequence
  Description of Artificial Sequence: Synthetic oligonucleotide
  Sense strand starting at position 209 of SEQ ID NO: 1880501
auauguuugucggacgcau

SEQ ID NO: 1971709 - RNA, 19 nt, Artificial Sequence
  Description of Artificial Sequence: Synthetic oligonucleotide
  Antisense strand to SEQ ID NO: 1971708
augcguccgacaaacauau

SEQ ID NO: 1971710 - RNA, 19 nt, Artificial Sequence
  Description of Artificial Sequence: Synthetic oligonucleotide
  Sense strand starting at position 211 of SEQ ID NO: 1880501
auguuugucggacgcauaa

SEQ ID NO: 1971711 - RNA, 19 nt, Artificial Sequence
  Description of Artificial Sequence: Synthetic oligonucleotide
  Antisense strand to SEQ ID NO: 1971710
uuaugcguccgacaaacau

SEQ ID NO: 1971712 - RNA, 19 nt, Artificial Sequence
  Description of Artificial Sequence: Synthetic oligonucleotide
  Sense strand starting at position 213 of SEQ ID NO: 1880501
guuugucggacgcauaaau

SEQ ID NO: 1971713 - RNA, 19 nt, Artificial Sequence
  Description of Artificial Sequence: Synthetic oligonucleotide
  Antisense strand to SEQ ID NO: 1971712
auuuaugcguccgacaaac

SEQ ID NO: 1971714 - RNA, 19 nt, Artificial Sequence
  Description of Artificial Sequence: Synthetic oligonucleotide
  Sense strand starting at position 242 of SEQ ID NO: 1880501
cagaaugucuguucgugac

SEQ ID NO: 1971715 - RNA, 19 nt, Artificial Sequence
  Description of Artificial Sequence: Synthetic oligonucleotide
  Antisense strand to SEQ ID NO: 1971714
gucacgaacagacauucug

SEQ ID NO: 1971716 - RNA, 19 nt, Artificial Sequence
  Description of Artificial Sequence: Synthetic oligonucleotide
  Sense strand starting at position 246 of SEQ ID NO: 1880501
augucuguucgugaccuuu

SEQ ID NO: 1971717 - RNA, 19 nt, Artificial Sequence
  Description of Artificial Sequence: Synthetic oligonucleotide
  Antisense strand to SEQ ID NO: 1971716
aaaggucacgaacagacau

SEQ ID NO: 1971718 - RNA, 19 nt, Artificial Sequence
  Description of Artificial Sequence: Synthetic oligonucleotide
  Sense strand starting at position 252 of SEQ ID NO: 1880501
guucgugaccuuugcccau

SEQ ID NO: 1971719 - RNA, 19 nt, Artificial Sequence
  Description of Artificial Sequence: Synthetic oligonucleotide
  Antisense strand to SEQ ID NO: 1971718
augggcaaaggucacgaac

SEQ ID NO: 1971720 - RNA, 19 nt, Artificial Sequence
  Description of Artificial Sequence: Synthetic oligonucleotide
  Sense strand starting at position 1138 of SEQ ID NO: 1880501
ugauuaguguggccuugua

SEQ ID NO: 1971721 - RNA, 19 nt, Artificial Sequence
  Description of Artificial Sequence: Synthetic oligonucleotide
  Antisense strand to SEQ ID NO: 1971720
uacaaggccacacuaauca

SEQ ID NO: 1971722 - RNA, 19 nt, Artificial Sequence
  Description of Artificial Sequence: Synthetic oligonucleotide
  Sense strand starting at position 1207 of SEQ ID NO: 1880501
uuaggauugucucgacuau

SEQ ID NO: 1971723 - RNA, 19 nt, Artificial Sequence
  Description of Artificial Sequence: Synthetic oligonucleotide
  Antisense strand to SEQ ID NO: 1971722
auagucgagacaauccuaa

SEQ ID NO: 1971724 - RNA, 19 nt, Artificial Sequence
  Description of Artificial Sequence: Synthetic oligonucleotide
  Sense strand starting at position 1208 of SEQ ID NO: 1880501
uaggauugucucgacuauu

SEQ ID NO: 1971725 - RNA, 19 nt, Artificial Sequence
  Description of Artificial Sequence: Synthetic oligonucleotide
  Antisense strand to SEQ ID NO: 1971724
aauagucgagacaauccua

SEQ ID NO: 1971726 - RNA, 19 nt, Artificial Sequence
  Description of Artificial Sequence: Synthetic oligonucleotide
  Sense strand starting at position 1539 of SEQ ID NO: 1880501
ggcucucuugccuauuguu

SEQ ID NO: 1971727 - RNA, 19 nt, Artificial Sequence
  Description of Artificial Sequence: Synthetic oligonucleotide
  Antisense strand to SEQ ID NO: 1971726
aacaauaggcaagagagcc

SEQ ID NO: 1971728 - RNA, 19 nt, Artificial Sequence
  Description of Artificial Sequence: Synthetic oligonucleotide
  Sense strand starting at position 1555 of SEQ ID NO: 1880501
guugguguauaggaauuga

SEQ ID NO: 1971729 - RNA, 19 nt, Artificial Sequence
  Description of Artificial Sequence: Synthetic oligonucleotide
  Antisense strand to SEQ ID NO: 1971728
ucaauuccuauacaccaac

SEQ ID NO: 1971730 - RNA, 19 nt, Artificial Sequence
  Description of Artificial Sequence: Synthetic oligonucleotide
  Sense strand starting at position 1915 of SEQ ID NO: 1880501
gugucaauuugagauaugu

SEQ ID NO: 1971731 - RNA, 19 nt, Artificial Sequence
  Description of Artificial Sequence: Synthetic oligonucleotide
  Antisense strand to SEQ ID NO: 1971730
acauaucucaaauugacac

SEQ ID NO: 1971732 - RNA, 19 nt, Artificial Sequence
  Description of Artificial Sequence: Synthetic oligonucleotide
  Sense strand starting at position 1923 of SEQ ID NO: 1880501
uugagauaugucuagcuuu

SEQ ID NO: 1971733 - RNA, 19 nt, Artificial Sequence
  Description of Artificial Sequence: Synthetic oligonucleotide
  Antisense strand to SEQ ID NO: 1971732
aaagcuagacauaucucaa

SEQ ID NO: 1971734 - RNA, 19 nt, Artificial Sequence
  Description of Artificial Sequence: Synthetic oligonucleotide
  Sense strand starting at position 1926 of SEQ ID NO: 1880501
agauaugucuagcuuuaug

SEQ ID NO: 1971735 - RNA, 19 nt, Artificial Sequence
  Description of Artificial Sequence: Synthetic oligonucleotide
  Antisense strand to SEQ ID NO: 1971734
cauaaagcuagacauaucu

SEQ ID NO: 1971736 - RNA, 19 nt, Artificial Sequence
  Description of Artificial Sequence: Synthetic oligonucleotide
  Sense strand starting at position 2092 of SEQ ID NO: 1880501
aggagcacguuguucaaua

SEQ ID NO: 1971737 - RNA, 19 nt, Artificial Sequence
  Description of Artificial Sequence: Synthetic oligonucleotide
  Antisense strand to SEQ ID NO: 1971736
uauugaacaacgugcuccu

SEQ ID NO: 1971738 - RNA, 19 nt, Artificial Sequence
  Description of Artificial Sequence: Synthetic oligonucleotide
  Sense strand starting at position 2093 of SEQ ID NO: 1880501
ggagcacguuguucaauau

SEQ ID NO: 1971739 - RNA, 19 nt, Artificial Sequence
  Description of Artificial Sequence: Synthetic oligonucleotide
  Antisense strand to SEQ ID NO: 1971738
auauugaacaacgugcucc

SEQ ID NO: 1971740 - RNA, 19 nt, Artificial Sequence
  Description of Artificial Sequence: Synthetic oligonucleotide
  Sense strand starting at position 2257 of SEQ ID NO: 1880501
gucauaugccacuaagaau

SEQ ID NO: 1971741 - RNA, 19 nt, Artificial Sequence
  Description of Artificial Sequence: Synthetic oligonucleotide
  Antisense strand to SEQ ID NO: 1971740
auucuuaguggcauaugac

SEQ ID NO: 1971742 - RNA, 19 nt, Artificial Sequence
  Description of Artificial Sequence: Synthetic oligonucleotide
  Sense strand starting at position 2289 of SEQ ID NO: 1880501
uuguuucguguuggagagu

SEQ ID NO: 1971743 - RNA, 19 nt, Artificial Sequence
  Description of Artificial Sequence: Synthetic oligonucleotide
  Antisense strand to SEQ ID NO: 1971742
acucuccaacacgaaacaa

SEQ ID NO: 1971744 - RNA, 19 nt, Artificial Sequence
  Description of Artificial Sequence: Synthetic oligonucleotide
  Sense strand starting at position 2290 of SEQ ID NO: 1880501
uguuucguguuggagaguu

SEQ ID NO: 1971745 - RNA, 19 nt, Artificial Sequence
  Description of Artificial Sequence: Synthetic oligonucleotide
  Antisense strand to SEQ ID NO: 1971744
aacucuccaacacgaaaca

SEQ ID NO: 1971746 - RNA, 19 nt, Artificial Sequence
  Description of Artificial Sequence: Synthetic oligonucleotide
  Sense strand starting at position 2349 of SEQ ID NO: 1880501
ucaaguccuuucuggucaa

SEQ ID NO: 1971747 - RNA, 19 nt, Artificial Sequence
  Description of Artificial Sequence: Synthetic oligonucleotide
  Antisense strand to SEQ ID NO: 1971746
uugaccagaaaggacuuga

SEQ ID NO: 1971748 - RNA, 19 nt, Artificial Sequence
  Description of Artificial Sequence: Synthetic oligonucleotide
  Sense strand starting at position 2352 of SEQ ID NO: 1880501
aguccuuucuggucaauuu

SEQ ID NO: 1971749 - RNA, 19 nt, Artificial Sequence
  Description of Artificial Sequence: Synthetic oligonucleotide
  Antisense strand to SEQ ID NO: 1971748
aaauugaccagaaaggacu

SEQ ID NO: 1971750 - RNA, 19 nt, Artificial Sequence
  Description of Artificial Sequence: Synthetic oligonucleotide
  Sense strand starting at position 2372 of SEQ ID NO: 1880501
cugccuagaugauccaaua

SEQ ID NO: 1971751 - RNA, 19 nt, Artificial Sequence
  Description of Artificial Sequence: Synthetic oligonucleotide
  Antisense strand to SEQ ID NO: 1971750
uauuggaucaucuaggcag

SEQ ID NO: 1971752 - RNA, 19 nt, Artificial Sequence
  Description of Artificial Sequence: Synthetic oligonucleotide
  Sense strand starting at position 2432 of SEQ ID NO: 1880501
uagccugagucucuuugua

SEQ ID NO: 1971753 - RNA, 19 nt, Artificial Sequence
  Description of Artificial Sequence: Synthetic oligonucleotide
  Antisense strand to SEQ ID NO: 1971752
uacaaagagacucaggcua

SEQ ID NO: 1971754 - RNA, 19 nt, Artificial Sequence
  Description of Artificial Sequence: Synthetic oligonucleotide
  Sense strand starting at position 2538 of SEQ ID NO: 1880501
auuccuuuaucauugugau

SEQ ID NO: 1971755 - RNA, 19 nt, Artificial Sequence
  Description of Artificial Sequence: Synthetic oligonucleotide
  Antisense strand to SEQ ID NO: 1971754
aucacaaugauaaaggaau

SEQ ID NO: 1971756 - RNA, 19 nt, Artificial Sequence
  Description of Artificial Sequence: Synthetic oligonucleotide
  Sense strand starting at position 2539 of SEQ ID NO: 1880501
uuccuuuaucauugugaug

SEQ ID NO: 1971757 - RNA, 19 nt, Artificial Sequence
  Description of Artificial Sequence: Synthetic oligonucleotide
  Antisense strand to SEQ ID NO: 1971756
caucacaaugauaaaggaa

SEQ ID NO: 1971758 - RNA, 19 nt, Artificial Sequence
  Description of Artificial Sequence: Synthetic oligonucleotide
  Sense strand starting at position 2544 of SEQ ID NO: 1880501
uuaucauugugauguucuu

SEQ ID NO: 1971759 - RNA, 19 nt, Artificial Sequence
  Description of Artificial Sequence: Synthetic oligonucleotide
  Antisense strand to SEQ ID NO: 1971758
aagaacaucacaaugauaa

SEQ ID NO: 1971760 - RNA, 19 nt, Artificial Sequence
  Description of Artificial Sequence: Synthetic oligonucleotide
  Sense strand starting at position 2550 of SEQ ID NO: 1880501
uugugauguucuucuuugu

SEQ ID NO: 1971761 - RNA, 19 nt, Artificial Sequence
  Description of Artificial Sequence: Synthetic oligonucleotide
  Antisense strand to SEQ ID NO: 1971760
acaaagaagaacaucacaa

SEQ ID NO: 1971762 - RNA, 19 nt, Artificial Sequence
  Description of Artificial Sequence: Synthetic oligonucleotide
  Sense strand starting at position 2837 of SEQ ID NO: 1880501
ccaugaugcuugcugguua

SEQ ID NO: 1971763 - RNA, 19 nt, Artificial Sequence
  Description of Artificial Sequence: Synthetic oligonucleotide
  Antisense strand to SEQ ID NO: 1971762
uaaccagcaagcaucaugg

SEQ ID NO: 1971764 - RNA, 19 nt, Artificial Sequence
  Description of Artificial Sequence: Synthetic oligonucleotide
  Sense strand starting at position 3156 of SEQ ID NO: 1880501
ggcccacucuuagucagau

SEQ ID NO: 1971765 - RNA, 19 nt, Artificial Sequence
  Description of Artificial Sequence: Synthetic oligonucleotide
  Antisense strand to SEQ ID NO: 1971764
aucugacuaagagugggcc

SEQ ID NO: 1971766 - RNA, 19 nt, Artificial Sequence
  Description of Artificial Sequence: Synthetic oligonucleotide
  Sense strand starting at position 3162 of SEQ ID NO: 1880501
cucuuagucagaugggcuu

SEQ ID NO: 1971767 - RNA, 19 nt, Artificial Sequence
  Description of Artificial Sequence: Synthetic oligonucleotide
  Antisense strand to SEQ ID NO: 1971766
aagcccaucugacuaagag

SEQ ID NO: 1971768 - RNA, 19 nt, Artificial Sequence
  Description of Artificial Sequence: Synthetic oligonucleotide
  Sense strand starting at position 3266 of SEQ ID NO: 1880501
ugucuugaggguugaucuu

SEQ ID NO: 1971769 - RNA, 19 nt, Artificial Sequence
  Description of Artificial Sequence: Synthetic oligonucleotide
  Antisense strand to SEQ ID NO: 1971768
aagaucaacccucaagaca

SEQ ID NO: 1971770 - RNA, 19 nt, Artificial Sequence
  Description of Artificial Sequence: Synthetic oligonucleotide
  Sense strand starting at position 3427 of SEQ ID NO: 1880501
aguccaaucagucauaggu

SEQ ID NO: 1971771 - RNA, 19 nt, Artificial Sequence
  Description of Artificial Sequence: Synthetic oligonucleotide
  Antisense strand to SEQ ID NO: 1971770
accuaugacugauuggacu

SEQ ID NO: 1971772 - RNA, 19 nt, Artificial Sequence
  Description of Artificial Sequence: Synthetic oligonucleotide
  Sense strand starting at position 3637 of SEQ ID NO: 1880501
gcuggcucuggucauuuau

SEQ ID NO: 1971773 - RNA, 19 nt, Artificial Sequence
  Description of Artificial Sequence: Synthetic oligonucleotide
  Antisense strand to SEQ ID NO: 1971772
auaaaugaccagagccagc

SEQ ID NO: 1971774 - RNA, 19 nt, Artificial Sequence
  Description of Artificial Sequence: Synthetic oligonucleotide
  Sense strand starting at position 3639 of SEQ ID NO: 1880501
uggcucuggucauuuaugu

SEQ ID NO: 1971775 - RNA, 19 nt, Artificial Sequence
  Description of Artificial Sequence: Synthetic oligonucleotide
  Antisense strand to SEQ ID NO: 1971774
acauaaaugaccagagcca

SEQ ID NO: 1971776 - RNA, 19 nt, Artificial Sequence
  Description of Artificial Sequence: Synthetic oligonucleotide
  Sense strand starting at position 3843 of SEQ ID NO: 1880501
agaauuggccucuauauau

SEQ ID NO: 1971777 - RNA, 19 nt, Artificial Sequence
  Description of Artificial Sequence: Synthetic oligonucleotide
  Antisense strand to SEQ ID NO: 1971776
auauauagaggccaauucu

SEQ ID NO: 1971778 - RNA, 19 nt, Artificial Sequence
  Description of Artificial Sequence: Synthetic oligonucleotide
  Sense strand starting at position 3951 of SEQ ID NO: 1880501
ugggauucguuccaauaug

SEQ ID NO: 1971779 - RNA, 19 nt, Artificial Sequence
  Description of Artificial Sequence: Synthetic oligonucleotide
  Antisense strand to SEQ ID NO: 1971778
cauauuggaacgaauccca

SEQ ID NO: 1971780 - RNA, 19 nt, Artificial Sequence
  Description of Artificial Sequence: Synthetic oligonucleotide
  Sense strand starting at position 3959 of SEQ ID NO: 1880501
guuccaauauguuggguua

SEQ ID NO: 1971781 - RNA, 19 nt, Artificial Sequence
  Description of Artificial Sequence: Synthetic oligonucleotide
  Antisense strand to SEQ ID NO: 1971780
uaacccaacauauuggaac

SEQ ID NO: 1971782 - RNA, 19 nt, Artificial Sequence
  Description of Artificial Sequence: Synthetic oligonucleotide
  Sense strand starting at position 3961 of SEQ ID NO: 1880501
uccaauauguuggguuaga

SEQ ID NO: 1971783 - RNA, 19 nt, Artificial Sequence
  Description of Artificial Sequence: Synthetic oligonucleotide
  Antisense strand to SEQ ID NO: 1971782
ucuaacccaacauauugga

SEQ ID NO: 1971784 - RNA, 19 nt, Artificial Sequence
  Description of Artificial Sequence: Synthetic oligonucleotide
  Sense strand starting at position 3962 of SEQ ID NO: 1880501
ccaauauguuggguuagag

SEQ ID NO: 1971785 - RNA, 19 nt, Artificial Sequence
  Description of Artificial Sequence: Synthetic oligonucleotide
  Antisense strand to SEQ ID NO: 1971784
cucuaacccaacauauugg

SEQ ID NO: 1971786 - RNA, 19 nt, Artificial Sequence
  Description of Artificial Sequence: Synthetic oligonucleotide
  Sense strand starting at position 3974 of SEQ ID NO: 1880501
guuagagcguacuccuuua

SEQ ID NO: 1971787 - RNA, 19 nt, Artificial Sequence
  Description of Artificial Sequence: Synthetic oligonucleotide
  Antisense strand to SEQ ID NO: 1971786
uaaaggaguacgcucuaac

SEQ ID NO: 1971788 - RNA, 19 nt, Artificial Sequence
  Description of Artificial Sequence: Synthetic oligonucleotide
  Sense strand starting at position 27 of SEQ ID NO: 1880499
acugaaagcugccuauucu

SEQ ID NO: 1971789 - RNA, 19 nt, Artificial Sequence
  Description of Artificial Sequence: Synthetic oligonucleotide
  Antisense strand to SEQ ID NO: 1971788
agaauaggcagcuuucagu

SEQ ID NO: 1971790 - RNA, 19 nt, Artificial Sequence
  Description of Artificial Sequence: Synthetic oligonucleotide
  Sense strand starting at position 37 of SEQ ID NO: 1880499
gccuauucucauuaagaag

SEQ ID NO: 1971791 - RNA, 19 nt, Artificial Sequence
  Description of Artificial Sequence: Synthetic oligonucleotide
  Antisense strand to SEQ ID NO: 1971790
cuucuuaaugagaauaggc

SEQ ID NO: 1971792 - RNA, 19 nt, Artificial Sequence
  Description of Artificial Sequence: Synthetic oligonucleotide
  Sense strand starting at position 136 of SEQ ID NO: 1880499
caggaauucucagggauua

SEQ ID NO: 1971793 - RNA, 19 nt, Artificial Sequence
  Description of Artificial Sequence: Synthetic oligonucleotide
  Antisense strand to SEQ ID NO: 1971792
uaaucccugagaauuccug

SEQ ID NO: 1971794 - RNA, 19 nt, Artificial Sequence
  Description of Artificial Sequence: Synthetic oligonucleotide
  Sense strand starting at position 269 of SEQ ID NO: 1880499
gaucgaccgucucacuuua

SEQ ID NO: 1971795 - RNA, 19 nt, Artificial Sequence
  Description of Artificial Sequence: Synthetic oligonucleotide
  Antisense strand to SEQ ID NO: 1971794
uaaagugagacggucgauc

SEQ ID NO: 1971796 - RNA, 19 nt, Artificial Sequence
  Description of Artificial Sequence: Synthetic oligonucleotide
  Sense strand starting at position 274 of SEQ ID NO: 1880499
accgucucacuuuacagaa

SEQ ID NO: 1971797 - RNA, 19 nt, Artificial Sequence
  Description of Artificial Sequence: Synthetic oligonucleotide
  Antisense strand to SEQ ID NO: 1971796
uucuguaaagugagacggu

SEQ ID NO: 1971798 - RNA, 19 nt, Artificial Sequence
  Description of Artificial Sequence: Synthetic oligonucleotide
  Sense strand starting at position 296 of SEQ ID NO: 1880499
caaagaguagcuggccuaa

SEQ ID NO: 1971799 - RNA, 19 nt, Artificial Sequence
  Description of Artificial Sequence: Synthetic oligonucleotide
  Antisense strand to SEQ ID NO: 1971798
uuaggccagcuacucuuug

SEQ ID NO: 1971800 - RNA, 19 nt, Artificial Sequence
  Description of Artificial Sequence: Synthetic oligonucleotide
  Sense strand starting at position 386 of SEQ ID NO: 1880499
cucugaccuccuuauguca

SEQ ID NO: 1971801 - RNA, 19 nt, Artificial Sequence
  Description of Artificial Sequence: Synthetic oligonucleotide
  Antisense strand to SEQ ID NO: 1971800
ugacauaaggaggucagag

SEQ ID NO: 1971802 - RNA, 19 nt, Artificial Sequence
  Description of Artificial Sequence: Synthetic oligonucleotide
  Sense strand starting at position 393 of SEQ ID NO: 1880499
cuccuuaugucaccacuga

SEQ ID NO: 1971803 - RNA, 19 nt, Artificial Sequence
  Description of Artificial Sequence: Synthetic oligonucleotide
  Antisense strand to SEQ ID NO: 1971802
ucaguggugacauaaggag

SEQ ID NO: 1971804 - RNA, 19 nt, Artificial Sequence
  Description of Artificial Sequence: Synthetic oligonucleotide
  Sense strand starting at position 623 of SEQ ID NO: 1880499
cuuuguuccugcugaaaua

SEQ ID NO: 1971805 - RNA, 19 nt, Artificial Sequence
  Description of Artificial Sequence: Synthetic oligonucleotide
  Antisense strand to SEQ ID NO: 1971804
uauuucagcaggaacaaag

SEQ ID NO: 1971806 - RNA, 19 nt, Artificial Sequence
  Description of Artificial Sequence: Synthetic oligonucleotide
  Sense strand starting at position 624 of SEQ ID NO: 1880499
uuuguuccugcugaaauau

SEQ ID NO: 1971807 - RNA, 19 nt, Artificial Sequence
  Description of Artificial Sequence: Synthetic oligonucleotide
  Antisense strand to SEQ ID NO: 1971806
auauuucagcaggaacaaa

SEQ ID NO: 1971808 - RNA, 19 nt, Artificial Sequence
  Description of Artificial Sequence: Synthetic oligonucleotide
  Sense strand starting at position 736 of SEQ ID NO: 1880499
gcuuaggguuggugugaga

SEQ ID NO: 1971809 - RNA, 19 nt, Artificial Sequence
  Description of Artificial Sequence: Synthetic oligonucleotide
  Antisense strand to SEQ ID NO: 1971808
ucucacaccaacccuaagc

SEQ ID NO: 1971810 - RNA, 19 nt, Artificial Sequence
  Description of Artificial Sequence: Synthetic oligonucleotide
  Sense strand starting at position 819 of SEQ ID NO: 1880499
cuauauaugugguguggaa

SEQ ID NO: 1971811 - RNA, 19 nt, Artificial Sequence
  Description of Artificial Sequence: Synthetic oligonucleotide
  Antisense strand to SEQ ID NO: 1971810
uuccacaccacauauauag

SEQ ID NO: 1971812 - RNA, 19 nt, Artificial Sequence
  Description of Artificial Sequence: Synthetic oligonucleotide
  Sense strand starting at position 881 of SEQ ID NO: 1880499
ucaacauuguuaggaaaca

SEQ ID NO: 1971813 - RNA, 19 nt, Artificial Sequence
  Description of Artificial Sequence: Synthetic oligonucleotide
  Antisense strand to SEQ ID NO: 1971812
uguuuccuaacaauguuga

SEQ ID NO: 1971814 - RNA, 19 nt, Artificial Sequence
  Description of Artificial Sequence: Synthetic oligonucleotide
  Sense strand starting at position 927 of SEQ ID NO: 1880499
acccuaguccaaugugaau

SEQ ID NO: 1971815 - RNA, 19 nt, Artificial Sequence
  Description of Artificial Sequence: Synthetic oligonucleotide
  Antisense strand to SEQ ID NO: 1971814
auucacauuggacuagggu

SEQ ID NO: 1971816 - RNA, 19 nt, Artificial Sequence
  Description of Artificial Sequence: Synthetic oligonucleotide
  Sense strand starting at position 1046 of SEQ ID NO: 1880499
acugguuggugaccugaca

SEQ ID NO: 1971817 - RNA, 19 nt, Artificial Sequence
  Description of Artificial Sequence: Synthetic oligonucleotide
  Antisense strand to SEQ ID NO: 1971816
ugucaggucaccaaccagu

SEQ ID NO: 1971818 - RNA, 19 nt, Artificial Sequence
  Description of Artificial Sequence: Synthetic oligonucleotide
  Sense strand starting at position 1094 of SEQ ID NO: 1880499
uggccucaugaauaaucuu

SEQ ID NO: 1971819 - RNA, 19 nt, Artificial Sequence
  Description of Artificial Sequence: Synthetic oligonucleotide
  Antisense strand to SEQ ID NO: 1971818
aagauuauucaugaggcca

SEQ ID NO: 1971820 - RNA, 19 nt, Artificial Sequence
  Description of Artificial Sequence: Synthetic oligonucleotide
  Sense strand starting at position 1131 of SEQ ID NO: 1880499
gcaagccuucuagaaauua

SEQ ID NO: 1971821 - RNA, 19 nt, Artificial Sequence
  Description of Artificial Sequence: Synthetic oligonucleotide
  Antisense strand to SEQ ID NO: 1971820
uaauuucuagaaggcuugc

SEQ ID NO: 1971822 - RNA, 19 nt, Artificial Sequence
  Description of Artificial Sequence: Synthetic oligonucleotide
  Sense strand starting at position 3514 of SEQ ID NO: 1880499
gaauaugacugggaaucca

SEQ ID NO: 1971823 - RNA, 19 nt, Artificial Sequence
  Description of Artificial Sequence: Synthetic oligonucleotide
  Antisense strand to SEQ ID NO: 1971822
uggauucccagucauauuc

SEQ ID NO: 1971824 - RNA, 19 nt, Artificial Sequence
  Description of Artificial Sequence: Synthetic oligonucleotide
  Sense strand starting at position 3522 of SEQ ID NO: 1880499
cugggaauccaucauguuc

SEQ ID NO: 1971825 - RNA, 19 nt, Artificial Sequence
  Description of Artificial Sequence: Synthetic oligonucleotide
  Antisense strand to SEQ ID NO: 1971824
gaacaugauggauucccag

SEQ ID NO: 1971826 - RNA, 19 nt, Artificial Sequence
  Description of Artificial Sequence: Synthetic oligonucleotide
  Sense strand starting at position 3600 of SEQ ID NO: 1880499
gucuguuuacagcaaauca

SEQ ID NO: 1971827 - RNA, 19 nt, Artificial Sequence
  Description of Artificial Sequence: Synthetic oligonucleotide
  Antisense strand to SEQ ID NO: 1971826
ugauuugcuguaaacagac

SEQ ID NO: 1971828 - RNA, 19 nt, Artificial Sequence
  Description of Artificial Sequence: Synthetic oligonucleotide
  Sense strand starting at position 3698 of SEQ ID NO: 1880499
cauagaaguguuugcagua

SEQ ID NO: 1971829 - RNA, 19 nt, Artificial Sequence
  Description of Artificial Sequence: Synthetic oligonucleotide
  Antisense strand to SEQ ID NO: 1971828
uacugcaaacacuucuaug

SEQ ID NO: 1971830 - RNA, 19 nt, Artificial Sequence
  Description of Artificial Sequence: Synthetic oligonucleotide
  Sense strand starting at position 3711 of SEQ ID NO: 1880499
gcaguaguuucugauggcu

SEQ ID NO: 1971831 - RNA, 19 nt, Artificial Sequence
  Description of Artificial Sequence: Synthetic oligonucleotide
  Antisense strand to SEQ ID NO: 1971830
agccaucagaaacuacugc

SEQ ID NO: 1971832 - RNA, 19 nt, Artificial Sequence
  Description of Artificial Sequence: Synthetic oligonucleotide
  Sense strand starting at position 3803 of SEQ ID NO: 1880499
guauuagucugcuagcaga

SEQ ID NO: 1971833 - RNA, 19 nt, Artificial Sequence
  Description of Artificial Sequence: Synthetic oligonucleotide
  Antisense strand to SEQ ID NO: 1971832
ucugcuagcagacuaauac

SEQ ID NO: 1971834 - RNA, 19 nt, Artificial Sequence
  Description of Artificial Sequence: Synthetic oligonucleotide
  Sense strand starting at position 385 of SEQ ID NO: 1880500
cucugaccuccuuauguca

SEQ ID NO: 1971835 - RNA, 19 nt, Artificial Sequence
  Description of Artificial Sequence: Synthetic oligonucleotide
  Antisense strand to SEQ ID NO: 1971834
ugacauaaggaggucagag

SEQ ID NO: 1971836 - RNA, 19 nt, Artificial Sequence
  Description of Artificial Sequence: Synthetic oligonucleotide
  Sense strand starting at position 392 of SEQ ID NO: 1880500
cuccuuaugucaccacuga

SEQ ID NO: 1971837 - RNA, 19 nt, Artificial Sequence
  Description of Artificial Sequence: Synthetic oligonucleotide
  Antisense strand to SEQ ID NO: 1971836
ucaguggugacauaaggag

SEQ ID NO: 1971838 - RNA, 19 nt, Artificial Sequence
  Description of Artificial Sequence: Synthetic oligonucleotide
  Sense strand starting at position 451 of SEQ ID NO: 1880500
ugugucaggcaagagaaau

SEQ ID NO: 1971839 - RNA, 19 nt, Artificial Sequence
  Description of Artificial Sequence: Synthetic oligonucleotide
  Antisense strand to SEQ ID NO: 1971838
auuucucuugccugacaca

SEQ ID NO: 1971840 - RNA, 19 nt, Artificial Sequence
  Description of Artificial Sequence: Synthetic oligonucleotide
  Sense strand starting at position 544 of SEQ ID NO: 1880500
ggucuuaacugauguguuu

SEQ ID NO: 1971841 - RNA, 19 nt, Artificial Sequence
  Description of Artificial Sequence: Synthetic oligonucleotide
  Antisense strand to SEQ ID NO: 1971840
aaacacaucaguuaagacc

SEQ ID NO: 1971842 - RNA, 19 nt, Artificial Sequence
  Description of Artificial Sequence: Synthetic oligonucleotide
  Sense strand starting at position 622 of SEQ ID NO: 1880500
cuuuguuccugcugaaaua

SEQ ID NO: 1971843 - RNA, 19 nt, Artificial Sequence
  Description of Artificial Sequence: Synthetic oligonucleotide
  Antisense strand to SEQ ID NO: 1971842
uauuucagcaggaacaaag

SEQ ID NO: 1971844 - RNA, 19 nt, Artificial Sequence
  Description of Artificial Sequence: Synthetic oligonucleotide
  Sense strand starting at position 623 of SEQ ID NO: 1880500
uuuguuccugcugaaauau

SEQ ID NO: 1971845 - RNA, 19 nt, Artificial Sequence
  Description of Artificial Sequence: Synthetic oligonucleotide
  Antisense strand to SEQ ID NO: 1971844
auauuucagcaggaacaaa

SEQ ID NO: 1971846 - RNA, 19 nt, Artificial Sequence
  Description of Artificial Sequence: Synthetic oligonucleotide
  Sense strand starting at position 880 of SEQ ID NO: 1880500
ucaacauuguuaggaaaca

SEQ ID NO: 1971847 - RNA, 19 nt, Artificial Sequence
  Description of Artificial Sequence: Synthetic oligonucleotide
  Antisense strand to SEQ ID NO: 1971846
uguuuccuaacaauguuga

SEQ ID NO: 1971848 - RNA, 19 nt, Artificial Sequence
  Description of Artificial Sequence: Synthetic oligonucleotide
  Sense strand starting at position 926 of SEQ ID NO: 1880500
acccuaguccaaugugaau

SEQ ID NO: 1971849 - RNA, 19 nt, Artificial Sequence
  Description of Artificial Sequence: Synthetic oligonucleotide
  Antisense strand to SEQ ID NO: 1971848
auucacauuggacuagggu

SEQ ID NO: 1971850 - RNA, 19 nt, Artificial Sequence
  Description of Artificial Sequence: Synthetic oligonucleotide
  Sense strand starting at position 961 of SEQ ID NO: 1880500
ucaggaugauucgagacca

SEQ ID NO: 1971851 - RNA, 19 nt, Artificial Sequence
  Description of Artificial Sequence: Synthetic oligonucleotide
  Antisense strand to SEQ ID NO: 1971850
uggucucgaaucauccuga

SEQ ID NO: 1971852 - RNA, 19 nt, Artificial Sequence
  Description of Artificial Sequence: Synthetic oligonucleotide
  Sense strand starting at position 1045 of SEQ ID NO: 1880500
acugguuggugaccugaca

SEQ ID NO: 1971853 - RNA, 19 nt, Artificial Sequence
  Description of Artificial Sequence: Synthetic oligonucleotide
  Antisense strand to SEQ ID NO: 1971852
ugucaggucaccaaccagu

SEQ ID NO: 1971854 - RNA, 19 nt, Artificial Sequence
  Description of Artificial Sequence: Synthetic oligonucleotide
  Sense strand starting at position 1262 of SEQ ID NO: 1880500
guugaaauauugugcuaca

SEQ ID NO: 1971855 - RNA, 19 nt, Artificial Sequence
  Description of Artificial Sequence: Synthetic oligonucleotide
  Antisense strand to SEQ ID NO: 1971854
uguagcacaauauuucaac

SEQ ID NO: 1971856 - RNA, 19 nt, Artificial Sequence
  Description of Artificial Sequence: Synthetic oligonucleotide
  Sense strand starting at position 1263 of SEQ ID NO: 1880500
uugaaauauugugcuacaa

SEQ ID NO: 1971857 - RNA, 19 nt, Artificial Sequence
  Description of Artificial Sequence: Synthetic oligonucleotide
  Antisense strand to SEQ ID NO: 1971856
uuguagcacaauauuucaa

SEQ ID NO: 1971858 - RNA, 19 nt, Artificial Sequence
  Description of Artificial Sequence: Synthetic oligonucleotide
  Sense strand starting at position 1314 of SEQ ID NO: 1880500
ccucucugugaccgugaaa

SEQ ID NO: 1971859 - RNA, 19 nt, Artificial Sequence
  Description of Artificial Sequence: Synthetic oligonucleotide
  Antisense strand to SEQ ID NO: 1971858
uuucacggucacagagagg

SEQ ID NO: 1971860 - RNA, 19 nt, Artificial Sequence
  Description of Artificial Sequence: Synthetic oligonucleotide
  Sense strand starting at position 1364 of SEQ ID NO: 1880500
cugucaugagucuggaucu

SEQ ID NO: 1971861 - RNA, 19 nt, Artificial Sequence
  Description of Artificial Sequence: Synthetic oligonucleotide
  Antisense strand to SEQ ID NO: 1971860
agauccagacucaugacag

SEQ ID NO: 1971862 - RNA, 19 nt, Artificial Sequence
  Description of Artificial Sequence: Synthetic oligonucleotide
  Sense strand starting at position 1447 of SEQ ID NO: 1880500
gcuucucuauucuaagaga

SEQ ID NO: 1971863 - RNA, 19 nt, Artificial Sequence
  Description of Artificial Sequence: Synthetic oligonucleotide
  Antisense strand to SEQ ID NO: 1971862
ucucuuagaauagagaagc

SEQ ID NO: 1971864 - RNA, 19 nt, Artificial Sequence
  Description of Artificial Sequence: Synthetic oligonucleotide
  Sense strand starting at position 1458 of SEQ ID NO: 1880500
cuaagagacucuucucgca

SEQ ID NO: 1971865 - RNA, 19 nt, Artificial Sequence
  Description of Artificial Sequence: Synthetic oligonucleotide
  Antisense strand to SEQ ID NO: 1971864
ugcgagaagagucucuuag

SEQ ID NO: 1971866 - RNA, 19 nt, Artificial Sequence
  Description of Artificial Sequence: Synthetic oligonucleotide
  Sense strand starting at position 1747 of SEQ ID NO: 1880500
guuccuauguguuaccaca

SEQ ID NO: 1971867 - RNA, 19 nt, Artificial Sequence
  Description of Artificial Sequence: Synthetic oligonucleotide
  Antisense strand to SEQ ID NO: 1971866
ugugguaacacauaggaac

SEQ ID NO: 1971868 - RNA, 19 nt, Artificial Sequence
  Description of Artificial Sequence: Synthetic oligonucleotide
  Sense strand starting at position 1749 of SEQ ID NO: 1880500
uccuauguguuaccacaca

SEQ ID NO: 1971869 - RNA, 19 nt, Artificial Sequence
  Description of Artificial Sequence: Synthetic oligonucleotide
  Antisense strand to SEQ ID NO: 1971868
ugugugguaacacauagga

SEQ ID NO: 1971870 - RNA, 19 nt, Artificial Sequence
  Description of Artificial Sequence: Synthetic oligonucleotide
  Sense strand starting at position 2326 of SEQ ID NO: 1880500
augagagcuagccaugaca

SEQ ID NO: 1971871 - RNA, 19 nt, Artificial Sequence
  Description of Artificial Sequence: Synthetic oligonucleotide
  Antisense strand to SEQ ID NO: 1971870
ugucauggcuagcucucau

SEQ ID NO: 1971872 - RNA, 19 nt, Artificial Sequence
  Description of Artificial Sequence: Synthetic oligonucleotide
  Sense strand starting at position 2328 of SEQ ID NO: 1880500
gagagcuagccaugacaaa

SEQ ID NO: 1971873 - RNA, 19 nt, Artificial Sequence
  Description of Artificial Sequence: Synthetic oligonucleotide
  Antisense strand to SEQ ID NO: 1971872
uuugucauggcuagcucuc

SEQ ID NO: 1971874 - RNA, 19 nt, Artificial Sequence
  Description of Artificial Sequence: Synthetic oligonucleotide
  Sense strand starting at position 2555 of SEQ ID NO: 1880500
cuagcaguccuauacauca

SEQ ID NO: 1971875 - RNA, 19 nt, Artificial Sequence
  Description of Artificial Sequence: Synthetic oligonucleotide
  Antisense strand to SEQ ID NO: 1971874
ugauguauaggacugcuag

SEQ ID NO: 1971876 - RNA, 19 nt, Artificial Sequence
  Description of Artificial Sequence: Synthetic oligonucleotide
  Sense strand starting at position 2560 of SEQ ID NO: 1880500
aguccuauacaucaaguca

SEQ ID NO: 1971877 - RNA, 19 nt, Artificial Sequence
  Description of Artificial Sequence: Synthetic oligonucleotide
  Antisense strand to SEQ ID NO: 1971876
ugacuugauguauaggacu

SEQ ID NO: 1971878 - RNA, 19 nt, Artificial Sequence
  Description of Artificial Sequence: Synthetic oligonucleotide
  Sense strand starting at position 2835 of SEQ ID NO: 1880500
uuaaauuaccaacggcauu

SEQ ID NO: 1971879 - RNA, 19 nt, Artificial Sequence
  Description of Artificial Sequence: Synthetic oligonucleotide
  Antisense strand to SEQ ID NO: 1971878
aaugccguugguaauuuaa

SEQ ID NO: 1971880 - RNA, 19 nt, Artificial Sequence
  Description of Artificial Sequence: Synthetic oligonucleotide
  Sense strand starting at position 2847 of SEQ ID NO: 1880500
cggcauuccucacagaacu

SEQ ID NO: 1971881 - RNA, 19 nt, Artificial Sequence
  Description of Artificial Sequence: Synthetic oligonucleotide
  Antisense strand to SEQ ID NO: 1971880
aguucugugaggaaugccg

SEQ ID NO: 1971882 - RNA, 19 nt, Artificial Sequence
  Description of Artificial Sequence: Synthetic oligonucleotide
  Sense strand starting at position 3118 of SEQ ID NO: 1880500
ugcuuauauugagauaacc

SEQ ID NO: 1971883 - RNA, 19 nt, Artificial Sequence
  Description of Artificial Sequence: Synthetic oligonucleotide
  Antisense strand to SEQ ID NO: 1971882
gguuaucucaauauaagca

SEQ ID NO: 1971884 - RNA, 19 nt, Artificial Sequence
  Description of Artificial Sequence: Synthetic oligonucleotide
  Sense strand starting at position 3165 of SEQ ID NO: 1880500
ugugaugaaucagauuaau

SEQ ID NO: 1971885 - RNA, 19 nt, Artificial Sequence
  Description of Artificial Sequence: Synthetic oligonucleotide
  Antisense strand to SEQ ID NO: 1971884
auuaaucugauucaucaca

SEQ ID NO: 1971886 - RNA, 19 nt, Artificial Sequence
  Description of Artificial Sequence: Synthetic oligonucleotide
  Sense strand starting at position 3175 of SEQ ID NO: 1880500
cagauuaauugauaugugu

SEQ ID NO: 1971887 - RNA, 19 nt, Artificial Sequence
  Description of Artificial Sequence: Synthetic oligonucleotide
  Antisense strand to SEQ ID NO: 1971886
acacauaucaauuaaucug

SEQ ID NO: 1971888 - RNA, 19 nt, Artificial Sequence
  Description of Artificial Sequence: Synthetic oligonucleotide
  Sense strand starting at position 3181 of SEQ ID NO: 1880500
aauugauauguguauguug

SEQ ID NO: 1971889 - RNA, 19 nt, Artificial Sequence
  Description of Artificial Sequence: Synthetic oligonucleotide
  Antisense strand to SEQ ID NO: 1971888
caacauacacauaucaauu

SEQ ID NO: 1971890 - RNA, 19 nt, Artificial Sequence
  Description of Artificial Sequence: Synthetic oligonucleotide
  Sense strand starting at position 3183 of SEQ ID NO: 1880500
uugauauguguauguugag

SEQ ID NO: 1971891 - RNA, 19 nt, Artificial Sequence
  Description of Artificial Sequence: Synthetic oligonucleotide
  Antisense strand to SEQ ID NO: 1971890
cucaacauacacauaucaa

SEQ ID NO: 1971892 - RNA, 19 nt, Artificial Sequence
  Description of Artificial Sequence: Synthetic oligonucleotide
  Sense strand starting at position 3307 of SEQ ID NO: 1880500
gauguucaucgaggguauu

SEQ ID NO: 1971893 - RNA, 19 nt, Artificial Sequence
  Description of Artificial Sequence: Synthetic oligonucleotide
  Antisense strand to SEQ ID NO: 1971892
aauacccucgaugaacauc

SEQ ID NO: 1971894 - RNA, 19 nt, Artificial Sequence
  Description of Artificial Sequence: Synthetic oligonucleotide
  Sense strand starting at position 3318 of SEQ ID NO: 1880500
aggguauuggccugaagag

SEQ ID NO: 1971895 - RNA, 19 nt, Artificial Sequence
  Description of Artificial Sequence: Synthetic oligonucleotide
  Antisense strand to SEQ ID NO: 1971894
cucuucaggccaauacccu

SEQ ID NO: 1971896 - RNA, 19 nt, Artificial Sequence
  Description of Artificial Sequence: Synthetic oligonucleotide
  Sense strand starting at position 3319 of SEQ ID NO: 1880500
ggguauuggccugaagagu

SEQ ID NO: 1971897 - RNA, 19 nt, Artificial Sequence
  Description of Artificial Sequence: Synthetic oligonucleotide
  Antisense strand to SEQ ID NO: 1971896
acucuucaggccaauaccc

SEQ ID NO: 1971898 - RNA, 19 nt, Artificial Sequence
  Description of Artificial Sequence: Synthetic oligonucleotide
  Sense strand starting at position 3513 of SEQ ID NO: 1880500
gaauaugacugggaaucca

SEQ ID NO: 1971899 - RNA, 19 nt, Artificial Sequence
  Description of Artificial Sequence: Synthetic oligonucleotide
  Antisense strand to SEQ ID NO: 1971898
uggauucccagucauauuc

SEQ ID NO: 1971900 - RNA, 19 nt, Artificial Sequence
  Description of Artificial Sequence: Synthetic oligonucleotide
  Sense strand starting at position 3590 of SEQ ID NO: 1880500
uuguuauuggucuguuuac

SEQ ID NO: 1971901 - RNA, 19 nt, Artificial Sequence
  Description of Artificial Sequence: Synthetic oligonucleotide
  Antisense strand to SEQ ID NO: 1971900
guaaacagaccaauaacaa

SEQ ID NO: 1971902 - RNA, 19 nt, Artificial Sequence
  Description of Artificial Sequence: Synthetic oligonucleotide
  Sense strand starting at position 3591 of SEQ ID NO: 1880500
uguuauuggucuguuuaca

SEQ ID NO: 1971903 - RNA, 19 nt, Artificial Sequence
  Description of Artificial Sequence: Synthetic oligonucleotide
  Antisense strand to SEQ ID NO: 1971902
uguaaacagaccaauaaca

SEQ ID NO: 1971904 - RNA, 19 nt, Artificial Sequence
  Description of Artificial Sequence: Synthetic oligonucleotide
  Sense strand starting at position 3599 of SEQ ID NO: 1880500
gucuguuuacagcaaauca

SEQ ID NO: 1971905 - RNA, 19 nt, Artificial Sequence
  Description of Artificial Sequence: Synthetic oligonucleotide
  Antisense strand to SEQ ID NO: 1971904
ugauuugcuguaaacagac

SEQ ID NO: 1971906 - RNA, 19 nt, Artificial Sequence
  Description of Artificial Sequence: Synthetic oligonucleotide
  Sense strand starting at position 3697 of SEQ ID NO: 1880500
cauagaaguguuugcagua

SEQ ID NO: 1971907 - RNA, 19 nt, Artificial Sequence
  Description of Artificial Sequence: Synthetic oligonucleotide
  Antisense strand to SEQ ID NO: 1971906
uacugcaaacacuucuaug

SEQ ID NO: 1971908 - RNA, 19 nt, Artificial Sequence
  Description of Artificial Sequence: Synthetic oligonucleotide
  Sense strand starting at position 3712 of SEQ ID NO: 1880500
aguaguuucugauggcugu

SEQ ID NO: 1971909 - RNA, 19 nt, Artificial Sequence
  Description of Artificial Sequence: Synthetic oligonucleotide
  Antisense strand to SEQ ID NO: 1971908
acagccaucagaaacuacu

SEQ ID NO: 1971910 - RNA, 19 nt, Artificial Sequence
  Description of Artificial Sequence: Synthetic oligonucleotide
  Sense strand starting at position 3719 of SEQ ID NO: 1880500
ucugauggcuguuucuauu

SEQ ID NO: 1971911 - RNA, 19 nt, Artificial Sequence
  Description of Artificial Sequence: Synthetic oligonucleotide
  Antisense strand to SEQ ID NO: 1971910
aauagaaacagccaucaga

SEQ ID NO: 1971912 - RNA, 19 nt, Artificial Sequence
  Description of Artificial Sequence: Synthetic oligonucleotide
  Sense strand starting at position 2071 of SEQ ID NO: 1880502
gaauaugacugggaaucca

SEQ ID NO: 1971913 - RNA, 19 nt, Artificial Sequence
  Description of Artificial Sequence: Synthetic oligonucleotide
  Antisense strand to SEQ ID NO: 1971912
uggauucccagucauauuc

SEQ ID NO: 1971914 - RNA, 19 nt, Artificial Sequence
  Description of Artificial Sequence: Synthetic oligonucleotide
  Sense strand starting at position 2079 of SEQ ID NO: 1880502
cugggaauccaucauguuc

SEQ ID NO: 1971915 - RNA, 19 nt, Artificial Sequence
  Description of Artificial Sequence: Synthetic oligonucleotide
  Antisense strand to SEQ ID NO: 1971914
gaacaugauggauucccag

SEQ ID NO: 1971916 - RNA, 19 nt, Artificial Sequence
  Description of Artificial Sequence: Synthetic oligonucleotide
  Sense strand starting at position 2157 of SEQ ID NO: 1880502
gucuguuuacagcaaauca

SEQ ID NO: 1971917 - RNA, 19 nt, Artificial Sequence
  Description of Artificial Sequence: Synthetic oligonucleotide
  Antisense strand to SEQ ID NO: 1971916
ugauuugcuguaaacagac

SEQ ID NO: 1971918 - RNA, 19 nt, Artificial Sequence
  Description of Artificial Sequence: Synthetic oligonucleotide
  Sense strand starting at position 2255 of SEQ ID NO: 1880502
cauagaaguguuugcagua

SEQ ID NO: 1971919 - RNA, 19 nt, Artificial Sequence
  Description of Artificial Sequence: Synthetic oligonucleotide
  Antisense strand to SEQ ID NO: 1971918
uacugcaaacacuucuaug

SEQ ID NO: 1971920 - RNA, 19 nt, Artificial Sequence
  Description of Artificial Sequence: Synthetic oligonucleotide
  Sense strand starting at position 2360 of SEQ ID NO: 1880502
guauuagucugcuagcaga

SEQ ID NO: 1971921 - RNA, 19 nt, Artificial Sequence
  Description of Artificial Sequence: Synthetic oligonucleotide
  Antisense strand to SEQ ID NO: 1971920
ucugcuagcagacuaauac

SEQ ID NO: 1971922 - RNA, 19 nt, Artificial Sequence
  Description of Artificial Sequence: Synthetic oligonucleotide
  Sense strand starting at position 2549 of SEQ ID NO: 1880502
gguuauuaauuugaguucu

SEQ ID NO: 1971923 - RNA, 19 nt, Artificial Sequence
  Description of Artificial Sequence: Synthetic oligonucleotide
  Antisense strand to SEQ ID NO: 1971922
agaacucaaauuaauaacc

SEQ ID NO: 1971924 - RNA, 19 nt, Artificial Sequence
  Description of Artificial Sequence: Synthetic oligonucleotide
  Sense strand starting at position 2611 of SEQ ID NO: 1880502
cuaacauugucuuagcugu

SEQ ID NO: 1971925 - RNA, 19 nt, Artificial Sequence
  Description of Artificial Sequence: Synthetic oligonucleotide
  Antisense strand to SEQ ID NO: 1971924
acagcuaagacaauguuag

SEQ ID NO: 1971926 - RNA, 19 nt, Artificial Sequence
  Description of Artificial Sequence: Synthetic oligonucleotide
  Sense strand starting at position 2618 of SEQ ID NO: 1880502
ugucuuagcuguguccaga

SEQ ID NO: 1971927 - RNA, 19 nt, Artificial Sequence
  Description of Artificial Sequence: Synthetic oligonucleotide
  Antisense strand to SEQ ID NO: 1971926
ucuggacacagcuaagaca

SEQ ID NO: 1971928 - RNA, 19 nt, Artificial Sequence
  Description of Artificial Sequence: Synthetic oligonucleotide
  Sense strand starting at position 2635 of SEQ ID NO: 1880502
gaggcucuaguauguugua

SEQ ID NO: 1971929 - RNA, 19 nt, Artificial Sequence
  Description of Artificial Sequence: Synthetic oligonucleotide
  Antisense strand to SEQ ID NO: 1971928
uacaacauacuagagccuc

SEQ ID NO: 1971930 - RNA, 19 nt, Artificial Sequence
  Description of Artificial Sequence: Synthetic oligonucleotide
  Sense strand starting at position 2636 of SEQ ID NO: 1880502
aggcucuaguauguuguaa

SEQ ID NO: 1971931 - RNA, 19 nt, Artificial Sequence
  Description of Artificial Sequence: Synthetic oligonucleotide
  Antisense strand to SEQ ID NO: 1971930
uuacaacauacuagagccu

SEQ ID NO: 1971932 - RNA, 19 nt, Artificial Sequence
  Description of Artificial Sequence: Synthetic oligonucleotide
  Sense strand starting at position 2640 of SEQ ID NO: 1880502
ucuaguauguuguaacuuu

SEQ ID NO: 1971933 - RNA, 19 nt, Artificial Sequence
  Description of Artificial Sequence: Synthetic oligonucleotide
  Antisense strand to SEQ ID NO: 1971932
aaaguuacaacauacuaga

SEQ ID NO: 1971934 - RNA, 19 nt, Artificial Sequence
  Description of Artificial Sequence: Synthetic oligonucleotide
  Sense strand starting at position 2735 of SEQ ID NO: 1880502
uugauugauuuccauguaa

SEQ ID NO: 1971935 - RNA, 19 nt, Artificial Sequence
  Description of Artificial Sequence: Synthetic oligonucleotide
  Antisense strand to SEQ ID NO: 1971934
uuacauggaaaucaaucaa

SEQ ID NO: 1971936 - RNA, 19 nt, Artificial Sequence
  Description of Artificial Sequence: Synthetic oligonucleotide
  Sense strand starting at position 2799 of SEQ ID NO: 1880502
cugugaucucaguauguau

SEQ ID NO: 1971937 - RNA, 19 nt, Artificial Sequence
  Description of Artificial Sequence: Synthetic oligonucleotide
  Antisense strand to SEQ ID NO: 1971936
auacauacugagaucacag

SEQ ID NO: 1971938 - RNA, 19 nt, Artificial Sequence
  Description of Artificial Sequence: Synthetic oligonucleotide
  Sense strand starting at position 2801 of SEQ ID NO: 1880502
gugaucucaguauguauuu

SEQ ID NO: 1971939 - RNA, 19 nt, Artificial Sequence
  Description of Artificial Sequence: Synthetic oligonucleotide
  Antisense strand to SEQ ID NO: 1971938
aaauacauacugagaucac

SEQ ID NO: 1971940 - RNA, 19 nt, Artificial Sequence
  Description of Artificial Sequence: Synthetic oligonucleotide
  Sense strand starting at position 2806 of SEQ ID NO: 1880502
cucaguauguauuugguau

SEQ ID NO: 1971941 - RNA, 19 nt, Artificial Sequence
  Description of Artificial Sequence: Synthetic oligonucleotide
  Antisense strand to SEQ ID NO: 1971940
auaccaaauacauacugag

SEQ ID NO: 1971942 - RNA, 19 nt, Artificial Sequence
  Description of Artificial Sequence: Synthetic oligonucleotide
  Sense strand starting at position 2807 of SEQ ID NO: 1880502
ucaguauguauuugguaug

SEQ ID NO: 1971943 - RNA, 19 nt, Artificial Sequence
  Description of Artificial Sequence: Synthetic oligonucleotide
  Antisense strand to SEQ ID NO: 1971942
cauaccaaauacauacuga

SEQ ID NO: 1971944 - RNA, 19 nt, Artificial Sequence
  Description of Artificial Sequence: Synthetic oligonucleotide
  Sense strand starting at position 2808 of SEQ ID NO: 1880502
caguauguauuugguauga

SEQ ID NO: 1971945 - RNA, 19 nt, Artificial Sequence
  Description of Artificial Sequence: Synthetic oligonucleotide
  Antisense strand to SEQ ID NO: 1971944
ucauaccaaauacauacug

SEQ ID NO: 1971946 - RNA, 19 nt, Artificial Sequence
  Description of Artificial Sequence: Synthetic oligonucleotide
  Sense strand starting at position 2810 of SEQ ID NO: 1880502
guauguauuugguaugauu

SEQ ID NO: 1971947 - RNA, 19 nt, Artificial Sequence
  Description of Artificial Sequence: Synthetic oligonucleotide
  Antisense strand to SEQ ID NO: 1971946
aaucauaccaaauacauac

SEQ ID NO: 1971948 - RNA, 19 nt, Artificial Sequence
  Description of Artificial Sequence: Synthetic oligonucleotide
  Sense strand starting at position 2882 of SEQ ID NO: 1880502
uuuagaguauguggcauau

SEQ ID NO: 1971949 - RNA, 19 nt, Artificial Sequence
  Description of Artificial Sequence: Synthetic oligonucleotide
  Antisense strand to SEQ ID NO: 1971948
auaugccacauacucuaaa

SEQ ID NO: 1971950 - RNA, 19 nt, Artificial Sequence
  Description of Artificial Sequence: Synthetic oligonucleotide
  Sense strand starting at position 2884 of SEQ ID NO: 1880502
uagaguauguggcauauga

SEQ ID NO: 1971951 - RNA, 19 nt, Artificial Sequence
  Description of Artificial Sequence: Synthetic oligonucleotide
  Antisense strand to SEQ ID NO: 1971950
ucauaugccacauacucua

SEQ ID NO: 1971952 - RNA, 19 nt, Artificial Sequence
  Description of Artificial Sequence: Synthetic oligonucleotide
  Sense strand starting at position 2886 of SEQ ID NO: 1880502
gaguauguggcauaugaug

SEQ ID NO: 1971953 - RNA, 19 nt, Artificial Sequence
  Description of Artificial Sequence: Synthetic oligonucleotide
  Antisense strand to SEQ ID NO: 1971952
caucauaugccacauacuc

SEQ ID NO: 1971954 - RNA, 19 nt, Artificial Sequence
  Description of Artificial Sequence: Synthetic oligonucleotide
  Sense strand starting at position 2888 of SEQ ID NO: 1880502
guauguggcauaugaugau

SEQ ID NO: 1971955 - RNA, 19 nt, Artificial Sequence
  Description of Artificial Sequence: Synthetic oligonucleotide
  Antisense strand to SEQ ID NO: 1971954
aucaucauaugccacauac

SEQ ID NO: 1971956 - RNA, 19 nt, Artificial Sequence
  Description of Artificial Sequence: Synthetic oligonucleotide
  Sense strand starting at position 2892 of SEQ ID NO: 1880502
guggcauaugaugauguga

SEQ ID NO: 1971957 - RNA, 19 nt, Artificial Sequence
  Description of Artificial Sequence: Synthetic oligonucleotide
  Antisense strand to SEQ ID NO: 1971956
ucacaucaucauaugccac

SEQ ID NO: 1971958 - RNA, 19 nt, Artificial Sequence
  Description of Artificial Sequence: Synthetic oligonucleotide
  Sense strand starting at position 2897 of SEQ ID NO: 1880502
auaugaugaugugaggaau

SEQ ID NO: 1971959 - RNA, 19 nt, Artificial Sequence
  Description of Artificial Sequence: Synthetic oligonucleotide
  Antisense strand to SEQ ID NO: 1971958
auuccucacaucaucauau

SEQ ID NO: 1971960 - RNA, 19 nt, Artificial Sequence
  Description of Artificial Sequence: Synthetic oligonucleotide
  Sense strand starting at position 2903 of SEQ ID NO: 1880502
ugaugugaggaaugcauau

SEQ ID NO: 1971961 - RNA, 19 nt, Artificial Sequence
  Description of Artificial Sequence: Synthetic oligonucleotide
  Antisense strand to SEQ ID NO: 1971960
auaugcauuccucacauca

SEQ ID NO: 1971962 - RNA, 19 nt, Artificial Sequence
  Description of Artificial Sequence: Synthetic oligonucleotide
  Sense strand starting at position 2935 of SEQ ID NO: 1880502
agugcagaguucuguaaag

SEQ ID NO: 1971963 - RNA, 19 nt, Artificial Sequence
  Description of Artificial Sequence: Synthetic oligonucleotide
  Antisense strand to SEQ ID NO: 1971962
cuuuacagaacucugcacu

SEQ ID NO: 1971964 - RNA, 19 nt, Artificial Sequence
  Description of Artificial Sequence: Synthetic oligonucleotide
  Sense strand starting at position 3038 of SEQ ID NO: 1880502
cugucauuggaguguggaa

SEQ ID NO: 1971965 - RNA, 19 nt, Artificial Sequence
  Description of Artificial Sequence: Synthetic oligonucleotide
  Antisense strand to SEQ ID NO: 1971964
uuccacacuccaaugacag

SEQ ID NO: 1971966 - RNA, 19 nt, Artificial Sequence
  Description of Artificial Sequence: Synthetic oligonucleotide
  Sense strand starting at position 3040 of SEQ ID NO: 1880502
gucauuggaguguggaaau

SEQ ID NO: 1971967 - RNA, 19 nt, Artificial Sequence
  Description of Artificial Sequence: Synthetic oligonucleotide
  Antisense strand to SEQ ID NO: 1971966
auuuccacacuccaaugac

SEQ ID NO: 1971968 - RNA, 19 nt, Artificial Sequence
  Description of Artificial Sequence: Synthetic oligonucleotide
  Sense strand starting at position 3072 of SEQ ID NO: 1880502
ugugaaacauacuuuguag

SEQ ID NO: 1971969 - RNA, 19 nt, Artificial Sequence
  Description of Artificial Sequence: Synthetic oligonucleotide
  Antisense strand to SEQ ID NO: 1971968
cuacaaaguauguuucaca

SEQ ID NO: 1971970 - RNA, 19 nt, Artificial Sequence
  Description of Artificial Sequence: Synthetic oligonucleotide
  Sense strand starting at position 3074 of SEQ ID NO: 1880502
ugaaacauacuuuguaggu

SEQ ID NO: 1971971 - RNA, 19 nt, Artificial Sequence
  Description of Artificial Sequence: Synthetic oligonucleotide
  Antisense strand to SEQ ID NO: 1971970
accuacaaaguauguuuca

SEQ ID NO: 1971972 - RNA, 19 nt, Artificial Sequence
  Description of Artificial Sequence: Synthetic oligonucleotide
  Sense strand starting at position 3122 of SEQ ID NO: 1880502
gcuccugcauuggaugaau

SEQ ID NO: 1971973 - RNA, 19 nt, Artificial Sequence
  Description of Artificial Sequence: Synthetic oligonucleotide
  Antisense strand to SEQ ID NO: 1971972
auucauccaaugcaggagc

SEQ ID NO: 1971974 - RNA, 19 nt, Artificial Sequence
  Description of Artificial Sequence: Synthetic oligonucleotide
  Sense strand starting at position 3124 of SEQ ID NO: 1880502
uccugcauuggaugaauau

SEQ ID NO: 1971975 - RNA, 19 nt, Artificial Sequence
  Description of Artificial Sequence: Synthetic oligonucleotide
  Antisense strand to SEQ ID NO: 1971974
auauucauccaaugcagga

SEQ ID NO: 1971976 - RNA, 19 nt, Artificial Sequence
  Description of Artificial Sequence: Synthetic oligonucleotide
  Sense strand starting at position 3173 of SEQ ID NO: 1880502
auugaagccuuugccauua

SEQ ID NO: 1971977 - RNA, 19 nt, Artificial Sequence
  Description of Artificial Sequence: Synthetic oligonucleotide
  Antisense strand to SEQ ID NO: 1971976
uaauggcaaaggcuucaau

SEQ ID NO: 1971978 - RNA, 19 nt, Artificial Sequence
  Description of Artificial Sequence: Synthetic oligonucleotide
  Sense strand starting at position 3178 of SEQ ID NO: 1880502
agccuuugccauuauguaa

SEQ ID NO: 1971979 - RNA, 19 nt, Artificial Sequence
  Description of Artificial Sequence: Synthetic oligonucleotide
  Antisense strand to SEQ ID NO: 1971978
uuacauaauggcaaaggcu

SEQ ID NO: 1971980 - RNA, 19 nt, Artificial Sequence
  Description of Artificial Sequence: Synthetic oligonucleotide
  Sense strand starting at position 3433 of SEQ ID NO: 1880502
ucgguucccacuuaugaga

SEQ ID NO: 1971981 - RNA, 19 nt, Artificial Sequence
  Description of Artificial Sequence: Synthetic oligonucleotide
  Antisense strand to SEQ ID NO: 1971980
ucucauaagugggaaccga

SEQ ID NO: 1971982 - RNA, 19 nt, Artificial Sequence
  Description of Artificial Sequence: Synthetic oligonucleotide
  Sense strand starting at position 3435 of SEQ ID NO: 1880502
gguucccacuuaugagaac

SEQ ID NO: 1971983 - RNA, 19 nt, Artificial Sequence
  Description of Artificial Sequence: Synthetic oligonucleotide
  Antisense strand to SEQ ID NO: 1971982
guucucauaagugggaacc

SEQ ID NO: 1971984 - RNA, 19 nt, Artificial Sequence
  Description of Artificial Sequence: Synthetic oligonucleotide
  Sense strand starting at position 3478 of SEQ ID NO: 1880502
uguguuaauuagcugaagu

SEQ ID NO: 1971985 - RNA, 19 nt, Artificial Sequence
  Description of Artificial Sequence: Synthetic oligonucleotide
  Antisense strand to SEQ ID NO: 1971984
acuucagcuaauuaacaca

SEQ ID NO: 1971986 - RNA, 19 nt, Artificial Sequence
  Description of Artificial Sequence: Synthetic oligonucleotide
  Sense strand starting at position 3479 of SEQ ID NO: 1880502
guguuaauuagcugaaguu

SEQ ID NO: 1971987 - RNA, 19 nt, Artificial Sequence
  Description of Artificial Sequence: Synthetic oligonucleotide
  Antisense strand to SEQ ID NO: 1971986
aacuucagcuaauuaacac

SEQ ID NO: 1971988 - RNA, 19 nt, Artificial Sequence
  Description of Artificial Sequence: Synthetic oligonucleotide
  Sense strand starting at position 3480 of SEQ ID NO: 1880502
uguuaauuagcugaaguuu

SEQ ID NO: 1971989 - RNA, 19 nt, Artificial Sequence
  Description of Artificial Sequence: Synthetic oligonucleotide
  Antisense strand to SEQ ID NO: 1971988
aaacuucagcuaauuaaca

SEQ ID NO: 1971990 - RNA, 19 nt, Artificial Sequence
  Description of Artificial Sequence: Synthetic oligonucleotide
  Sense strand starting at position 3764 of SEQ ID NO: 1880502
cuagauccuccaggaauug

SEQ ID NO: 1971991 - RNA, 19 nt, Artificial Sequence
  Description of Artificial Sequence: Synthetic oligonucleotide
  Antisense strand to SEQ ID NO: 1971990
caauuccuggaggaucuag

SEQ ID NO: 1971992 - RNA, 19 nt, Artificial Sequence
  Description of Artificial Sequence: Synthetic oligonucleotide
  Sense strand starting at position 4 of SEQ ID NO: 1880503
gcuucucuauucuaagaga

SEQ ID NO: 1971993 - RNA, 19 nt, Artificial Sequence
  Description of Artificial Sequence: Synthetic oligonucleotide
  Antisense strand to SEQ ID NO: 1971992
ucucuuagaauagagaagc

SEQ ID NO: 1971994 - RNA, 19 nt, Artificial Sequence
  Description of Artificial Sequence: Synthetic oligonucleotide
  Sense strand starting at position 15 of SEQ ID NO: 1880503
cuaagagacucuucucgca

SEQ ID NO: 1971995 - RNA, 19 nt, Artificial Sequence
  Description of Artificial Sequence: Synthetic oligonucleotide
  Antisense strand to SEQ ID NO: 1971994
ugcgagaagagucucuuag

SEQ ID NO: 1971996 - RNA, 19 nt, Artificial Sequence
  Description of Artificial Sequence: Synthetic oligonucleotide
  Sense strand starting at position 306 of SEQ ID NO: 1880503
uccuauguguuaccacaca

SEQ ID NO: 1971997 - RNA, 19 nt, Artificial Sequence
  Description of Artificial Sequence: Synthetic oligonucleotide
  Antisense strand to SEQ ID NO: 1971996
ugugugguaacacauagga

SEQ ID NO: 1971998 - RNA, 19 nt, Artificial Sequence
  Description of Artificial Sequence: Synthetic oligonucleotide
  Sense strand starting at position 883 of SEQ ID NO: 1880503
augagagcuagccaugaca

SEQ ID NO: 1971999 - RNA, 19 nt, Artificial Sequence
  Description of Artificial Sequence: Synthetic oligonucleotide
  Antisense strand to SEQ ID NO: 1971998
ugucauggcuagcucucau

SEQ ID NO: 1972000 - RNA, 19 nt, Artificial Sequence
  Description of Artificial Sequence: Synthetic oligonucleotide
  Sense strand starting at position 885 of SEQ ID NO: 1880503
gagagcuagccaugacaaa

SEQ ID NO: 1972001 - RNA, 19 nt, Artificial Sequence
  Description of Artificial Sequence: Synthetic oligonucleotide
  Antisense strand to SEQ ID NO: 1972000
uuugucauggcuagcucuc

SEQ ID NO: 1972002 - RNA, 19 nt, Artificial Sequence
  Description of Artificial Sequence: Synthetic oligonucleotide
  Sense strand starting at position 1112 of SEQ ID NO: 1880503
cuagcaguccuauacauca

SEQ ID NO: 1972003 - RNA, 19 nt, Artificial Sequence
  Description of Artificial Sequence: Synthetic oligonucleotide
  Antisense strand to SEQ ID NO: 1972002
ugauguauaggacugcuag

SEQ ID NO: 1972004 - RNA, 19 nt, Artificial Sequence
  Description of Artificial Sequence: Synthetic oligonucleotide
  Sense strand starting at position 1117 of SEQ ID NO: 1880503
aguccuauacaucaaguca

SEQ ID NO: 1972005 - RNA, 19 nt, Artificial Sequence
  Description of Artificial Sequence: Synthetic oligonucleotide
  Antisense strand to SEQ ID NO: 1972004
ugacuugauguauaggacu

SEQ ID NO: 1972006 - RNA, 19 nt, Artificial Sequence
  Description of Artificial Sequence: Synthetic oligonucleotide
  Sense strand starting at position 1392 of SEQ ID NO: 1880503
uuaaauuaccaacggcauu

SEQ ID NO: 1972007 - RNA, 19 nt, Artificial Sequence
  Description of Artificial Sequence: Synthetic oligonucleotide
  Antisense strand to SEQ ID NO: 1972006
aaugccguugguaauuuaa

SEQ ID NO: 1972008 - RNA, 19 nt, Artificial Sequence
  Description of Artificial Sequence: Synthetic oligonucleotide
  Sense strand starting at position 1675 of SEQ ID NO: 1880503
ugcuuauauugagauaacc

SEQ ID NO: 1972009 - RNA, 19 nt, Artificial Sequence
  Description of Artificial Sequence: Synthetic oligonucleotide
  Antisense strand to SEQ ID NO: 1972008
gguuaucucaauauaagca

SEQ ID NO: 1972010 - RNA, 19 nt, Artificial Sequence
  Description of Artificial Sequence: Synthetic oligonucleotide
  Sense strand starting at position 1722 of SEQ ID NO: 1880503
ugugaugaaucagauuaau

SEQ ID NO: 1972011 - RNA, 19 nt, Artificial Sequence
  Description of Artificial Sequence: Synthetic oligonucleotide
  Antisense strand to SEQ ID NO: 1972010
auuaaucugauucaucaca

SEQ ID NO: 1972012 - RNA, 19 nt, Artificial Sequence
  Description of Artificial Sequence: Synthetic oligonucleotide
  Sense strand starting at position 1732 of SEQ ID NO: 1880503
cagauuaauugauaugugu

SEQ ID NO: 1972013 - RNA, 19 nt, Artificial Sequence
  Description of Artificial Sequence: Synthetic oligonucleotide
  Antisense strand to SEQ ID NO: 1972012
acacauaucaauuaaucug

SEQ ID NO: 1972014 - RNA, 19 nt, Artificial Sequence
  Description of Artificial Sequence: Synthetic oligonucleotide
  Sense strand starting at position 1738 of SEQ ID NO: 1880503
aauugauauguguauguug

SEQ ID NO: 1972015 - RNA, 19 nt, Artificial Sequence
  Description of Artificial Sequence: Synthetic oligonucleotide
  Antisense strand to SEQ ID NO: 1972014
caacauacacauaucaauu

SEQ ID NO: 1972016 - RNA, 19 nt, Artificial Sequence
  Description of Artificial Sequence: Synthetic oligonucleotide
  Sense strand starting at position 1740 of SEQ ID NO: 1880503
uugauauguguauguugag

SEQ ID NO: 1972017 - RNA, 19 nt, Artificial Sequence
  Description of Artificial Sequence: Synthetic oligonucleotide
  Antisense strand to SEQ ID NO: 1972016
cucaacauacacauaucaa

SEQ ID NO: 1972018 - RNA, 19 nt, Artificial Sequence
  Description of Artificial Sequence: Synthetic oligonucleotide
  Sense strand starting at position 1864 of SEQ ID NO: 1880503
gauguucaucgaggguauu

SEQ ID NO: 1972019 - RNA, 19 nt, Artificial Sequence
  Description of Artificial Sequence: Synthetic oligonucleotide
  Antisense strand to SEQ ID NO: 1972018
aauacccucgaugaacauc

SEQ ID NO: 1972020 - RNA, 19 nt, Artificial Sequence
  Description of Artificial Sequence: Synthetic oligonucleotide
  Sense strand starting at position 1875 of SEQ ID NO: 1880503
aggguauuggccugaagag

SEQ ID NO: 1972021 - RNA, 19 nt, Artificial Sequence
  Description of Artificial Sequence: Synthetic oligonucleotide
  Antisense strand to SEQ ID NO: 1972020
cucuucaggccaauacccu

SEQ ID NO: 1972022 - RNA, 19 nt, Artificial Sequence
  Description of Artificial Sequence: Synthetic oligonucleotide
  Sense strand starting at position 1876 of SEQ ID NO: 1880503
ggguauuggccugaagagu

SEQ ID NO: 1972023 - RNA, 19 nt, Artificial Sequence
  Description of Artificial Sequence: Synthetic oligonucleotide
  Antisense strand to SEQ ID NO: 1972022
acucuucaggccaauaccc

SEQ ID NO: 1972024 - RNA, 19 nt, Artificial Sequence
  Description of Artificial Sequence: Synthetic oligonucleotide
  Sense strand starting at position 2070 of SEQ ID NO: 1880503
gaauaugacugggaaucca

SEQ ID NO: 1972025 - RNA, 19 nt, Artificial Sequence
  Description of Artificial Sequence: Synthetic oligonucleotide
  Antisense strand to SEQ ID NO: 1972024
uggauucccagucauauuc

SEQ ID NO: 1972026 - RNA, 19 nt, Artificial Sequence
  Description of Artificial Sequence: Synthetic oligonucleotide
  Sense strand starting at position 2147 of SEQ ID NO: 1880503
uuguuauuggucuguuuac

SEQ ID NO: 1972027 - RNA, 19 nt, Artificial Sequence
  Description of Artificial Sequence: Synthetic oligonucleotide
  Antisense strand to SEQ ID NO: 1972026
guaaacagaccaauaacaa

SEQ ID NO: 1972028 - RNA, 19 nt, Artificial Sequence
  Description of Artificial Sequence: Synthetic oligonucleotide
  Sense strand starting at position 2148 of SEQ ID NO: 1880503
uguuauuggucuguuuaca

SEQ ID NO: 1972029 - RNA, 19 nt, Artificial Sequence
  Description of Artificial Sequence: Synthetic oligonucleotide
  Antisense strand to SEQ ID NO: 1972028
uguaaacagaccaauaaca

SEQ ID NO: 1972030 - RNA, 19 nt, Artificial Sequence
  Description of Artificial Sequence: Synthetic oligonucleotide
  Sense strand starting at position 2156 of SEQ ID NO: 1880503
gucuguuuacagcaaauca

SEQ ID NO: 1972031 - RNA, 19 nt, Artificial Sequence
  Description of Artificial Sequence: Synthetic oligonucleotide
  Antisense strand to SEQ ID NO: 1972030
ugauuugcuguaaacagac

SEQ ID NO: 1972032 - RNA, 19 nt, Artificial Sequence
  Description of Artificial Sequence: Synthetic oligonucleotide
  Sense strand starting at position 2254 of SEQ ID NO: 1880503
cauagaaguguuugcagua

SEQ ID NO: 1972033 - RNA, 19 nt, Artificial Sequence
  Description of Artificial Sequence: Synthetic oligonucleotide
  Antisense strand to SEQ ID NO: 1972032
uacugcaaacacuucuaug

SEQ ID NO: 1972034 - RNA, 19 nt, Artificial Sequence
  Description of Artificial Sequence: Synthetic oligonucleotide
  Sense strand starting at position 2276 of SEQ ID NO: 1880503
ucugauggcuguuucuauu

SEQ ID NO: 1972035 - RNA, 19 nt, Artificial Sequence
  Description of Artificial Sequence: Synthetic oligonucleotide
  Antisense strand to SEQ ID NO: 1972034
aauagaaacagccaucaga

SEQ ID NO: 1972036 - RNA, 19 nt, Artificial Sequence
  Description of Artificial Sequence: Synthetic oligonucleotide
  Sense strand starting at position 2617 of SEQ ID NO: 1880503
ugucuuagcuguguccaga

SEQ ID NO: 1972037 - RNA, 19 nt, Artificial Sequence
  Description of Artificial Sequence: Synthetic oligonucleotide
  Antisense strand to SEQ ID NO: 1972036
ucuggacacagcuaagaca

SEQ ID NO: 1972038 - RNA, 19 nt, Artificial Sequence
  Description of Artificial Sequence: Synthetic oligonucleotide
  Sense strand starting at position 2634 of SEQ ID NO: 1880503
gaggcucuaguauguugua

SEQ ID NO: 1972039 - RNA, 19 nt, Artificial Sequence
  Description of Artificial Sequence: Synthetic oligonucleotide
  Antisense strand to SEQ ID NO: 1972038
uacaacauacuagagccuc

SEQ ID NO: 1972040 - RNA, 19 nt, Artificial Sequence
  Description of Artificial Sequence: Synthetic oligonucleotide
  Sense strand starting at position 2635 of SEQ ID NO: 1880503
aggcucuaguauguuguaa

SEQ ID NO: 1972041 - RNA, 19 nt, Artificial Sequence
  Description of Artificial Sequence: Synthetic oligonucleotide
  Antisense strand to SEQ ID NO: 1972040
uuacaacauacuagagccu

SEQ ID NO: 1972042 - RNA, 19 nt, Artificial Sequence
  Description of Artificial Sequence: Synthetic oligonucleotide
  Sense strand starting at position 2798 of SEQ ID NO: 1880503
cugugaucucaguauguau

SEQ ID NO: 1972043 - RNA, 19 nt, Artificial Sequence
  Description of Artificial Sequence: Synthetic oligonucleotide
  Antisense strand to SEQ ID NO: 1972042
auacauacugagaucacag

SEQ ID NO: 1972044 - RNA, 19 nt, Artificial Sequence
  Description of Artificial Sequence: Synthetic oligonucleotide
  Sense strand starting at position 2800 of SEQ ID NO: 1880503
gugaucucaguauguauuu

SEQ ID NO: 1972045 - RNA, 19 nt, Artificial Sequence
  Description of Artificial Sequence: Synthetic oligonucleotide
  Antisense strand to SEQ ID NO: 1972044
aaauacauacugagaucac

SEQ ID NO: 1972046 - RNA, 19 nt, Artificial Sequence
  Description of Artificial Sequence: Synthetic oligonucleotide
  Sense strand starting at position 2805 of SEQ ID NO: 1880503
cucaguauguauuugguau

SEQ ID NO: 1972047 - RNA, 19 nt, Artificial Sequence
  Description of Artificial Sequence: Synthetic oligonucleotide
  Antisense strand to SEQ ID NO: 1972046
auaccaaauacauacugag

SEQ ID NO: 1972048 - RNA, 19 nt, Artificial Sequence
  Description of Artificial Sequence: Synthetic oligonucleotide
  Sense strand starting at position 2806 of SEQ ID NO: 1880503
ucaguauguauuugguaug

SEQ ID NO: 1972049 - RNA, 19 nt, Artificial Sequence
  Description of Artificial Sequence: Synthetic oligonucleotide
  Antisense strand to SEQ ID NO: 1972048
cauaccaaauacauacuga

SEQ ID NO: 1972050 - RNA, 19 nt, Artificial Sequence
  Description of Artificial Sequence: Synthetic oligonucleotide
  Sense strand starting at position 2807 of SEQ ID NO: 1880503
caguauguauuugguauga

SEQ ID NO: 1972051 - RNA, 19 nt, Artificial Sequence
  Description of Artificial Sequence: Synthetic oligonucleotide
  Antisense strand to SEQ ID NO: 1972050
ucauaccaaauacauacug

SEQ ID NO: 1972052 - RNA, 19 nt, Artificial Sequence
  Description of Artificial Sequence: Synthetic oligonucleotide
  Sense strand starting at position 2809 of SEQ ID NO: 1880503
guauguauuugguaugauu

SEQ ID NO: 1972053 - RNA, 19 nt, Artificial Sequence
  Description of Artificial Sequence: Synthetic oligonucleotide
  Antisense strand to SEQ ID NO: 1972052
aaucauaccaaauacauac

SEQ ID NO: 1972054 - RNA, 19 nt, Artificial Sequence
  Description of Artificial Sequence: Synthetic oligonucleotide
  Sense strand starting at position 3037 of SEQ ID NO: 1880503
cugucauuggaguguggaa

SEQ ID NO: 1972055 - RNA, 19 nt, Artificial Sequence
  Description of Artificial Sequence: Synthetic oligonucleotide
  Antisense strand to SEQ ID NO: 1972054
uuccacacuccaaugacag

SEQ ID NO: 1972056 - RNA, 19 nt, Artificial Sequence
  Description of Artificial Sequence: Synthetic oligonucleotide
  Sense strand starting at position 3039 of SEQ ID NO: 1880503
gucauuggaguguggaaau

SEQ ID NO: 1972057 - RNA, 19 nt, Artificial Sequence
  Description of Artificial Sequence: Synthetic oligonucleotide
  Antisense strand to SEQ ID NO: 1972056
auuuccacacuccaaugac

SEQ ID NO: 1972058 - RNA, 19 nt, Artificial Sequence
  Description of Artificial Sequence: Synthetic oligonucleotide
  Sense strand starting at position 3050 of SEQ ID NO: 1880503
guggaaaucucccacuauu

SEQ ID NO: 1972059 - RNA, 19 nt, Artificial Sequence
  Description of Artificial Sequence: Synthetic oligonucleotide
  Antisense strand to SEQ ID NO: 1972058
aauagugggagauuuccac

SEQ ID NO: 1972060 - RNA, 19 nt, Artificial Sequence
  Description of Artificial Sequence: Synthetic oligonucleotide
  Sense strand starting at position 3123 of SEQ ID NO: 1880503
uccugcauuggaugaauau

SEQ ID NO: 1972061 - RNA, 19 nt, Artificial Sequence
  Description of Artificial Sequence: Synthetic oligonucleotide
  Antisense strand to SEQ ID NO: 1972060
auauucauccaaugcagga

SEQ ID NO: 1972062 - RNA, 19 nt, Artificial Sequence
  Description of Artificial Sequence: Synthetic oligonucleotide
  Sense strand starting at position 3432 of SEQ ID NO: 1880503
ucgguucccacuuaugaga

SEQ ID NO: 1972063 - RNA, 19 nt, Artificial Sequence
  Description of Artificial Sequence: Synthetic oligonucleotide
  Antisense strand to SEQ ID NO: 1972062
ucucauaagugggaaccga

SEQ ID NO: 1972064 - RNA, 19 nt, Artificial Sequence
  Description of Artificial Sequence: Synthetic oligonucleotide
  Sense strand starting at position 3477 of SEQ ID NO: 1880503
uguguuaauuagcugaagu

SEQ ID NO: 1972065 - RNA, 19 nt, Artificial Sequence
  Description of Artificial Sequence: Synthetic oligonucleotide
  Antisense strand to SEQ ID NO: 1972064
acuucagcuaauuaacaca

SEQ ID NO: 1972066 - RNA, 19 nt, Artificial Sequence
  Description of Artificial Sequence: Synthetic oligonucleotide
  Sense strand starting at position 3478 of SEQ ID NO: 1880503
guguuaauuagcugaaguu

SEQ ID NO: 1972067 - RNA, 19 nt, Artificial Sequence
  Description of Artificial Sequence: Synthetic oligonucleotide
  Antisense strand to SEQ ID NO: 1972066
aacuucagcuaauuaacac

SEQ ID NO: 1972068 - RNA, 19 nt, Artificial Sequence
  Description of Artificial Sequence: Synthetic oligonucleotide
  Sense strand starting at position 3479 of SEQ ID NO: 1880503
uguuaauuagcugaaguuu

SEQ ID NO: 1972069 - RNA, 19 nt, Artificial Sequence
  Description of Artificial Sequence: Synthetic oligonucleotide
  Antisense strand to SEQ ID NO: 1972068
aaacuucagcuaauuaaca

SEQ ID NO: 1972070 - RNA, 19 nt, Artificial Sequence
  Description of Artificial Sequence: Synthetic oligonucleotide
  Sense strand starting at position 3763 of SEQ ID NO: 1880503
cuagauccuccaggaauug

SEQ ID NO: 1972071 - RNA, 19 nt, Artificial Sequence
  Description of Artificial Sequence: Synthetic oligonucleotide
  Antisense strand to SEQ ID NO: 1972070
caauuccuggaggaucuag

SEQ ID NO: 1972072 - RNA, 19 nt, Artificial Sequence
  Description of Artificial Sequence: Synthetic oligonucleotide
  Sense strand starting at position 317 of SEQ ID NO: 1880504
ggaaaccuuugagaaauuu

SEQ ID NO: 1972073 - RNA, 19 nt, Artificial Sequence
  Description of Artificial Sequence: Synthetic oligonucleotide
  Antisense strand to SEQ ID NO: 1972072
aaauuucucaaagguuucc

SEQ ID NO: 1972074 - RNA, 19 nt, Artificial Sequence
  Description of Artificial Sequence: Synthetic oligonucleotide
  Sense strand starting at position 325 of SEQ ID NO: 1880504
uugagaaauuucggaauau

SEQ ID NO: 1972075 - RNA, 19 nt, Artificial Sequence
  Description of Artificial Sequence: Synthetic oligonucleotide
  Antisense strand to SEQ ID NO: 1972074
auauuccgaaauuucucaa

SEQ ID NO: 1972076 - RNA, 19 nt, Artificial Sequence
  Description of Artificial Sequence: Synthetic oligonucleotide
  Sense strand starting at position 349 of SEQ ID NO: 1880504
gugauaaauuucucuacgu

SEQ ID NO: 1972077 - RNA, 19 nt, Artificial Sequence
  Description of Artificial Sequence: Synthetic oligonucleotide
  Antisense strand to SEQ ID NO: 1972076
acguagagaaauuuaucac

SEQ ID NO: 1972078 - RNA, 19 nt, Artificial Sequence
  Description of Artificial Sequence: Synthetic oligonucleotide
  Sense strand starting at position 366 of SEQ ID NO: 1880504
gugggaucacuugguuaaa

SEQ ID NO: 1972079 - RNA, 19 nt, Artificial Sequence
  Description of Artificial Sequence: Synthetic oligonucleotide
  Antisense strand to SEQ ID NO: 1972078
uuuaaccaagugaucccac

SEQ ID NO: 1972080 - RNA, 19 nt, Artificial Sequence
  Description of Artificial Sequence: Synthetic oligonucleotide
  Sense strand starting at position 367 of SEQ ID NO: 1880504
ugggaucacuugguuaaac

SEQ ID NO: 1972081 - RNA, 19 nt, Artificial Sequence
  Description of Artificial Sequence: Synthetic oligonucleotide
  Antisense strand to SEQ ID NO: 1972080
guuuaaccaagugauccca

SEQ ID NO: 1972082 - RNA, 19 nt, Artificial Sequence
  Description of Artificial Sequence: Synthetic oligonucleotide
  Sense strand starting at position 415 of SEQ ID NO: 1880504
agaacagccuucucgaacu

SEQ ID NO: 1972083 - RNA, 19 nt, Artificial Sequence
  Description of Artificial Sequence: Synthetic oligonucleotide
  Antisense strand to SEQ ID NO: 1972082
aguucgagaaggcuguucu

SEQ ID NO: 1972084 - RNA, 19 nt, Artificial Sequence
  Description of Artificial Sequence: Synthetic oligonucleotide
  Sense strand starting at position 628 of SEQ ID NO: 1880504
ccugucagauucuuaauug

SEQ ID NO: 1972085 - RNA, 19 nt, Artificial Sequence
  Description of Artificial Sequence: Synthetic oligonucleotide
  Antisense strand to SEQ ID NO: 1972084
caauuaagaaucugacagg

SEQ ID NO: 1972086 - RNA, 19 nt, Artificial Sequence
  Description of Artificial Sequence: Synthetic oligonucleotide
  Sense strand starting at position 664 of SEQ ID NO: 1880504
gugauuccauuaucuacuu

SEQ ID NO: 1972087 - RNA, 19 nt, Artificial Sequence
  Description of Artificial Sequence: Synthetic oligonucleotide
  Antisense strand to SEQ ID NO: 1972086
aaguagauaauggaaucac

SEQ ID NO: 1972088 - RNA, 19 nt, Artificial Sequence
  Description of Artificial Sequence: Synthetic oligonucleotide
  Sense strand starting at position 740 of SEQ ID NO: 1880504
agauuugcucuagguucuu

SEQ ID NO: 1972089 - RNA, 19 nt, Artificial Sequence
  Description of Artificial Sequence: Synthetic oligonucleotide
  Antisense strand to SEQ ID NO: 1972088
aagaaccuagagcaaaucu

SEQ ID NO: 1972090 - RNA, 19 nt, Artificial Sequence
  Description of Artificial Sequence: Synthetic oligonucleotide
  Sense strand starting at position 1002 of SEQ ID NO: 1880504
gcagucuggaaucaagacu

SEQ ID NO: 1972091 - RNA, 19 nt, Artificial Sequence
  Description of Artificial Sequence: Synthetic oligonucleotide
  Antisense strand to SEQ ID NO: 1972090
agucuugauuccagacugc

SEQ ID NO: 1972092 - RNA, 19 nt, Artificial Sequence
  Description of Artificial Sequence: Synthetic oligonucleotide
  Sense strand starting at position 1053 of SEQ ID NO: 1880504
gggcuugucacauaaggca

SEQ ID NO: 1972093 - RNA, 19 nt, Artificial Sequence
  Description of Artificial Sequence: Synthetic oligonucleotide
  Antisense strand to SEQ ID NO: 1972092
ugccuuaugugacaagccc

SEQ ID NO: 1972094 - RNA, 19 nt, Artificial Sequence
  Description of Artificial Sequence: Synthetic oligonucleotide
  Sense strand starting at position 1131 of SEQ ID NO: 1880504
aggauaauaugauacagaa

SEQ ID NO: 1972095 - RNA, 19 nt, Artificial Sequence
  Description of Artificial Sequence: Synthetic oligonucleotide
  Antisense strand to SEQ ID NO: 1972094
uucuguaucauauuauccu

SEQ ID NO: 1972096 - RNA, 19 nt, Artificial Sequence
  Description of Artificial Sequence: Synthetic oligonucleotide
  Sense strand starting at position 1153 of SEQ ID NO: 1880504
caggauggcuacuugagau

SEQ ID NO: 1972097 - RNA, 19 nt, Artificial Sequence
  Description of Artificial Sequence: Synthetic oligonucleotide
  Antisense strand to SEQ ID NO: 1972096
aucucaaguagccauccug

SEQ ID NO: 1972098 - RNA, 19 nt, Artificial Sequence
  Description of Artificial Sequence: Synthetic oligonucleotide
  Sense strand starting at position 1380 of SEQ ID NO: 1880504
aaugguugguggguagaga

SEQ ID NO: 1972099 - RNA, 19 nt, Artificial Sequence
  Description of Artificial Sequence: Synthetic oligonucleotide
  Antisense strand to SEQ ID NO: 1972098
ucucuacccaccaaccauu

SEQ ID NO: 1972100 - RNA, 19 nt, Artificial Sequence
  Description of Artificial Sequence: Synthetic oligonucleotide
  Sense strand starting at position 1572 of SEQ ID NO: 1880504
cccuguucugcuuauaaga

SEQ ID NO: 1972101 - RNA, 19 nt, Artificial Sequence
  Description of Artificial Sequence: Synthetic oligonucleotide
  Antisense strand to SEQ ID NO: 1972100
ucuuauaagcagaacaggg

SEQ ID NO: 1972102 - RNA, 19 nt, Artificial Sequence
  Description of Artificial Sequence: Synthetic oligonucleotide
  Sense strand starting at position 1579 of SEQ ID NO: 1880504
cugcuuauaagaggagcua

SEQ ID NO: 1972103 - RNA, 19 nt, Artificial Sequence
  Description of Artificial Sequence: Synthetic oligonucleotide
  Antisense strand to SEQ ID NO: 1972102
uagcuccucuuauaagcag

SEQ ID NO: 1972104 - RNA, 19 nt, Artificial Sequence
  Description of Artificial Sequence: Synthetic oligonucleotide
  Sense strand starting at position 1671 of SEQ ID NO: 1880504
agguuauuauccuuauaug

SEQ ID NO: 1972105 - RNA, 19 nt, Artificial Sequence
  Description of Artificial Sequence: Synthetic oligonucleotide
  Antisense strand to SEQ ID NO: 1972104
cauauaaggauaauaaccu

SEQ ID NO: 1972106 - RNA, 19 nt, Artificial Sequence
  Description of Artificial Sequence: Synthetic oligonucleotide
  Sense strand starting at position 1672 of SEQ ID NO: 1880504
gguuauuauccuuauaugc

SEQ ID NO: 1972107 - RNA, 19 nt, Artificial Sequence
  Description of Artificial Sequence: Synthetic oligonucleotide
  Antisense strand to SEQ ID NO: 1972106
gcauauaaggauaauaacc

SEQ ID NO: 1972108 - RNA, 19 nt, Artificial Sequence
  Description of Artificial Sequence: Synthetic oligonucleotide
  Sense strand starting at position 1690 of SEQ ID NO: 1880504
cuuguuuaugggugagaaa

SEQ ID NO: 1972109 - RNA, 19 nt, Artificial Sequence
  Description of Artificial Sequence: Synthetic oligonucleotide
  Antisense strand to SEQ ID NO: 1972108
uuucucacccauaaacaag

SEQ ID NO: 1972110 - RNA, 19 nt, Artificial Sequence
  Description of Artificial Sequence: Synthetic oligonucleotide
  Sense strand starting at position 1720 of SEQ ID NO: 1880504
gaguguguaacuuggagaa

SEQ ID NO: 1972111 - RNA, 19 nt, Artificial Sequence
  Description of Artificial Sequence: Synthetic oligonucleotide
  Antisense strand to SEQ ID NO: 1972110
uucuccaaguuacacacuc

SEQ ID NO: 1972112 - RNA, 19 nt, Artificial Sequence
  Description of Artificial Sequence: Synthetic oligonucleotide
  Sense strand starting at position 1776 of SEQ ID NO: 1880504
aauccaggcuggucugauu

SEQ ID NO: 1972113 - RNA, 19 nt, Artificial Sequence
  Description of Artificial Sequence: Synthetic oligonucleotide
  Antisense strand to SEQ ID NO: 1972112
aaucagaccagccuggauu

SEQ ID NO: 1972114 - RNA, 19 nt, Artificial Sequence
  Description of Artificial Sequence: Synthetic oligonucleotide
  Sense strand starting at position 1837 of SEQ ID NO: 1880504
uuagacugcucuuuaauag

SEQ ID NO: 1972115 - RNA, 19 nt, Artificial Sequence
  Description of Artificial Sequence: Synthetic oligonucleotide
  Antisense strand to SEQ ID NO: 1972114
cuauuaaagagcagucuaa

SEQ ID NO: 1972116 - RNA, 19 nt, Artificial Sequence
  Description of Artificial Sequence: Synthetic oligonucleotide
  Sense strand starting at position 2151 of SEQ ID NO: 1880504
cucuuaauagcugacugaa

SEQ ID NO: 1972117 - RNA, 19 nt, Artificial Sequence
  Description of Artificial Sequence: Synthetic oligonucleotide
  Antisense strand to SEQ ID NO: 1972116
uucagucagcuauuaagag

SEQ ID NO: 1972118 - RNA, 19 nt, Artificial Sequence
  Description of Artificial Sequence: Synthetic oligonucleotide
  Sense strand starting at position 2232 of SEQ ID NO: 1880504
auaaauggcugcuuaagaa

SEQ ID NO: 1972119 - RNA, 19 nt, Artificial Sequence
  Description of Artificial Sequence: Synthetic oligonucleotide
  Antisense strand to SEQ ID NO: 1972118
uucuuaagcagccauuuau

SEQ ID NO: 1972120 - RNA, 19 nt, Artificial Sequence
  Description of Artificial Sequence: Synthetic oligonucleotide
  Sense strand starting at position 2405 of SEQ ID NO: 1880504
ugugauuucugccugaguc

SEQ ID NO: 1972121 - RNA, 19 nt, Artificial Sequence
  Description of Artificial Sequence: Synthetic oligonucleotide
  Antisense strand to SEQ ID NO: 1972120
gacucaggcagaaaucaca

SEQ ID NO: 1972122 - RNA, 19 nt, Artificial Sequence
  Description of Artificial Sequence: Synthetic oligonucleotide
  Sense strand starting at position 2406 of SEQ ID NO: 1880504
gugauuucugccugaguca

SEQ ID NO: 1972123 - RNA, 19 nt, Artificial Sequence
  Description of Artificial Sequence: Synthetic oligonucleotide
  Antisense strand to SEQ ID NO: 1972122
ugacucaggcagaaaucac

SEQ ID NO: 1972124 - RNA, 19 nt, Artificial Sequence
  Description of Artificial Sequence: Synthetic oligonucleotide
  Sense strand starting at position 2565 of SEQ ID NO: 1880504
gcaaauaguugacuucuua

SEQ ID NO: 1972125 - RNA, 19 nt, Artificial Sequence
  Description of Artificial Sequence: Synthetic oligonucleotide
  Antisense strand to SEQ ID NO: 1972124
uaagaagucaacuauuugc

SEQ ID NO: 1972126 - RNA, 19 nt, Artificial Sequence
  Description of Artificial Sequence: Synthetic oligonucleotide
  Sense strand starting at position 2643 of SEQ ID NO: 1880504
gcacuaaucgcacucgcaa

SEQ ID NO: 1972127 - RNA, 19 nt, Artificial Sequence
  Description of Artificial Sequence: Synthetic oligonucleotide
  Antisense strand to SEQ ID NO: 1972126
uugcgagugcgauuagugc

SEQ ID NO: 1972128 - RNA, 19 nt, Artificial Sequence
  Description of Artificial Sequence: Synthetic oligonucleotide
  Sense strand starting at position 2793 of SEQ ID NO: 1880504
guccacucaggcugaaaga

SEQ ID NO: 1972129 - RNA, 19 nt, Artificial Sequence
  Description of Artificial Sequence: Synthetic oligonucleotide
  Antisense strand to SEQ ID NO: 1972128
ucuuucagccugaguggac

SEQ ID NO: 1972130 - RNA, 19 nt, Artificial Sequence
  Description of Artificial Sequence: Synthetic oligonucleotide
  Sense strand starting at position 2876 of SEQ ID NO: 1880504
gauaauaaugccggcauuu

SEQ ID NO: 1972131 - RNA, 19 nt, Artificial Sequence
  Description of Artificial Sequence: Synthetic oligonucleotide
  Antisense strand to SEQ ID NO: 1972130
aaaugccggcauuauuauc

SEQ ID NO: 1972132 - RNA, 19 nt, Artificial Sequence
  Description of Artificial Sequence: Synthetic oligonucleotide
  Sense strand starting at position 2898 of SEQ ID NO: 1880504
guuugugaagaucaaaugu

SEQ ID NO: 1972133 - RNA, 19 nt, Artificial Sequence
  Description of Artificial Sequence: Synthetic oligonucleotide
  Antisense strand to SEQ ID NO: 1972132
acauuugaucuucacaaac

SEQ ID NO: 1972134 - RNA, 19 nt, Artificial Sequence
  Description of Artificial Sequence: Synthetic oligonucleotide
  Sense strand starting at position 3016 of SEQ ID NO: 1880504
gccagauuacuugaggcca

SEQ ID NO: 1972135 - RNA, 19 nt, Artificial Sequence
  Description of Artificial Sequence: Synthetic oligonucleotide
  Antisense strand to SEQ ID NO: 1972134
uggccucaaguaaucuggc

SEQ ID NO: 1972136 - RNA, 19 nt, Artificial Sequence
  Description of Artificial Sequence: Synthetic oligonucleotide
  Sense strand starting at position 3412 of SEQ ID NO: 1880504
agcagcaaaugacuuauaa

SEQ ID NO: 1972137 - RNA, 19 nt, Artificial Sequence
  Description of Artificial Sequence: Synthetic oligonucleotide
  Antisense strand to SEQ ID NO: 1972136
uuauaagucauuugcugcu

SEQ ID NO: 1972138 - RNA, 19 nt, Artificial Sequence
  Description of Artificial Sequence: Synthetic oligonucleotide
  Sense strand starting at position 3457 of SEQ ID NO: 1880504
aauugaggacuguguuuac

SEQ ID NO: 1972139 - RNA, 19 nt, Artificial Sequence
  Description of Artificial Sequence: Synthetic oligonucleotide
  Antisense strand to SEQ ID NO: 1972138
guaaacacaguccucaauu

SEQ ID NO: 1972140 - RNA, 19 nt, Artificial Sequence
  Description of Artificial Sequence: Synthetic oligonucleotide
  Sense strand starting at position 3460 of SEQ ID NO: 1880504
ugaggacuguguuuacuac

SEQ ID NO: 1972141 - RNA, 19 nt, Artificial Sequence
  Description of Artificial Sequence: Synthetic oligonucleotide
  Antisense strand to SEQ ID NO: 1972140
guaguaaacacaguccuca

SEQ ID NO: 1972142 - RNA, 19 nt, Artificial Sequence
  Description of Artificial Sequence: Synthetic oligonucleotide
  Sense strand starting at position 3461 of SEQ ID NO: 1880504
gaggacuguguuuacuaca

SEQ ID NO: 1972143 - RNA, 19 nt, Artificial Sequence
  Description of Artificial Sequence: Synthetic oligonucleotide
  Antisense strand to SEQ ID NO: 1972142
uguaguaaacacaguccuc

SEQ ID NO: 1972144 - RNA, 19 nt, Artificial Sequence
  Description of Artificial Sequence: Synthetic oligonucleotide
  Sense strand starting at position 3556 of SEQ ID NO: 1880504
uuuaguguaagagagugaa

SEQ ID NO: 1972145 - RNA, 19 nt, Artificial Sequence
  Description of Artificial Sequence: Synthetic oligonucleotide
  Antisense strand to SEQ ID NO: 1972144
uucacucucuuacacuaaa

SEQ ID NO: 1972146 - RNA, 19 nt, Artificial Sequence
  Description of Artificial Sequence: Synthetic oligonucleotide
  Sense strand starting at position 3686 of SEQ ID NO: 1880504
auguuacagugucugaaau

SEQ ID NO: 1972147 - RNA, 19 nt, Artificial Sequence
  Description of Artificial Sequence: Synthetic oligonucleotide
  Antisense strand to SEQ ID NO: 1972146
auuucagacacuguaacau

SEQ ID NO: 1972148 - RNA, 19 nt, Artificial Sequence
  Description of Artificial Sequence: Synthetic oligonucleotide
  Sense strand starting at position 3720 of SEQ ID NO: 1880504
agucuucuaggcuaagguu

SEQ ID NO: 1972149 - RNA, 19 nt, Artificial Sequence
  Description of Artificial Sequence: Synthetic oligonucleotide
  Antisense strand to SEQ ID NO: 1972148
aaccuuagccuagaagacu

SEQ ID NO: 1972150 - RNA, 19 nt, Artificial Sequence
  Description of Artificial Sequence: Synthetic oligonucleotide
  Sense strand starting at position 3726 of SEQ ID NO: 1880504
cuaggcuaagguuaaauau

SEQ ID NO: 1972151 - RNA, 19 nt, Artificial Sequence
  Description of Artificial Sequence: Synthetic oligonucleotide
  Antisense strand to SEQ ID NO: 1972150
auauuuaaccuuagccuag

SEQ ID NO: 1972152 - RNA, 19 nt, Artificial Sequence
  Description of Artificial Sequence: Synthetic oligonucleotide
  Sense strand starting at position 8 of SEQ ID NO: 1880505
uuguacuauuggucauuga

SEQ ID NO: 1972153 - RNA, 19 nt, Artificial Sequence
  Description of Artificial Sequence: Synthetic oligonucleotide
  Antisense strand to SEQ ID NO: 1972152
ucaaugaccaauaguacaa

SEQ ID NO: 1972154 - RNA, 19 nt, Artificial Sequence
  Description of Artificial Sequence: Synthetic oligonucleotide
  Sense strand starting at position 9 of SEQ ID NO: 1880505
uguacuauuggucauugaa

SEQ ID NO: 1972155 - RNA, 19 nt, Artificial Sequence
  Description of Artificial Sequence: Synthetic oligonucleotide
  Antisense strand to SEQ ID NO: 1972154
uucaaugaccaauaguaca

SEQ ID NO: 1972156 - RNA, 19 nt, Artificial Sequence
  Description of Artificial Sequence: Synthetic oligonucleotide
  Sense strand starting at position 12 of SEQ ID NO: 1880505
acuauuggucauugaauca

SEQ ID NO: 1972157 - RNA, 19 nt, Artificial Sequence
  Description of Artificial Sequence: Synthetic oligonucleotide
  Antisense strand to SEQ ID NO: 1972156
ugauucaaugaccaauagu

SEQ ID NO: 1972158 - RNA, 19 nt, Artificial Sequence
  Description of Artificial Sequence: Synthetic oligonucleotide
  Sense strand starting at position 29 of SEQ ID NO: 1880505
caaagcagucuugacagua

SEQ ID NO: 1972159 - RNA, 19 nt, Artificial Sequence
  Description of Artificial Sequence: Synthetic oligonucleotide
  Antisense strand to SEQ ID NO: 1972158
uacugucaagacugcuuug

SEQ ID NO: 1972160 - RNA, 19 nt, Artificial Sequence
  Description of Artificial Sequence: Synthetic oligonucleotide
  Sense strand starting at position 34 of SEQ ID NO: 1880505
cagucuugacaguaugcaa

SEQ ID NO: 1972161 - RNA, 19 nt, Artificial Sequence
  Description of Artificial Sequence: Synthetic oligonucleotide
  Antisense strand to SEQ ID NO: 1972160
uugcauacugucaagacug

SEQ ID NO: 1972162 - RNA, 19 nt, Artificial Sequence
  Description of Artificial Sequence: Synthetic oligonucleotide
  Sense strand starting at position 84 of SEQ ID NO: 1880505
gcaauuccauauguaagag

SEQ ID NO: 1972163 - RNA, 19 nt, Artificial Sequence
  Description of Artificial Sequence: Synthetic oligonucleotide
  Antisense strand to SEQ ID NO: 1972162
cucuuacauauggaauugc

SEQ ID NO: 1972164 - RNA, 19 nt, Artificial Sequence
  Description of Artificial Sequence: Synthetic oligonucleotide
  Sense strand starting at position 96 of SEQ ID NO: 1880505
guaagaguuuauccuaagc

SEQ ID NO: 1972165 - RNA, 19 nt, Artificial Sequence
  Description of Artificial Sequence: Synthetic oligonucleotide
  Antisense strand to SEQ ID NO: 1972164
gcuuaggauaaacucuuac

SEQ ID NO: 1972166 - RNA, 19 nt, Artificial Sequence
  Description of Artificial Sequence: Synthetic oligonucleotide
  Sense strand starting at position 109 of SEQ ID NO: 1880505
cuaagcaaaucauuaggau

SEQ ID NO: 1972167 - RNA, 19 nt, Artificial Sequence
  Description of Artificial Sequence: Synthetic oligonucleotide
  Antisense strand to SEQ ID NO: 1972166
auccuaaugauuugcuuag

SEQ ID NO: 1972168 - RNA, 19 nt, Artificial Sequence
  Description of Artificial Sequence: Synthetic oligonucleotide
  Sense strand starting at position 121 of SEQ ID NO: 1880505
uuaggauguuggucaaagu

SEQ ID NO: 1972169 - RNA, 19 nt, Artificial Sequence
  Description of Artificial Sequence: Synthetic oligonucleotide
  Antisense strand to SEQ ID NO: 1972168
acuuugaccaacauccuaa

SEQ ID NO: 1972170 - RNA, 19 nt, Artificial Sequence
  Description of Artificial Sequence: Synthetic oligonucleotide
  Sense strand starting at position 166 of SEQ ID NO: 1880505
uugagauaacacugcacaa

SEQ ID NO: 1972171 - RNA, 19 nt, Artificial Sequence
  Description of Artificial Sequence: Synthetic oligonucleotide
  Antisense strand to SEQ ID NO: 1972170
uugugcaguguuaucucaa

SEQ ID NO: 1972172 - RNA, 19 nt, Artificial Sequence
  Description of Artificial Sequence: Synthetic oligonucleotide
  Sense strand starting at position 544 of SEQ ID NO: 1880505
uggacugcguauuuccaaa

SEQ ID NO: 1972173 - RNA, 19 nt, Artificial Sequence
  Description of Artificial Sequence: Synthetic oligonucleotide
  Antisense strand to SEQ ID NO: 1972172
uuuggaaauacgcagucca

SEQ ID NO: 1972174 - RNA, 19 nt, Artificial Sequence
  Description of Artificial Sequence: Synthetic oligonucleotide
  Sense strand starting at position 546 of SEQ ID NO: 1880505
gacugcguauuuccaaauu

SEQ ID NO: 1972175 - RNA, 19 nt, Artificial Sequence
  Description of Artificial Sequence: Synthetic oligonucleotide
  Antisense strand to SEQ ID NO: 1972174
aauuuggaaauacgcaguc

SEQ ID NO: 1972176 - RNA, 19 nt, Artificial Sequence
  Description of Artificial Sequence: Synthetic oligonucleotide
  Sense strand starting at position 611 of SEQ ID NO: 1880505
uauuuaaggugauagaugu

SEQ ID NO: 1972177 - RNA, 19 nt, Artificial Sequence
  Description of Artificial Sequence: Synthetic oligonucleotide
  Antisense strand to SEQ ID NO: 1972176
acaucuaucaccuuaaaua

SEQ ID NO: 1972178 - RNA, 19 nt, Artificial Sequence
  Description of Artificial Sequence: Synthetic oligonucleotide
  Sense strand starting at position 695 of SEQ ID NO: 1880505
auugcuuuguaccuuauau

SEQ ID NO: 1972179 - RNA, 19 nt, Artificial Sequence
  Description of Artificial Sequence: Synthetic oligonucleotide
  Antisense strand to SEQ ID NO: 1972178
auauaagguacaaagcaau

SEQ ID NO: 1972180 - RNA, 19 nt, Artificial Sequence
  Description of Artificial Sequence: Synthetic oligonucleotide
  Sense strand starting at position 757 of SEQ ID NO: 1880505
aauuauuagggacguacuu

SEQ ID NO: 1972181 - RNA, 19 nt, Artificial Sequence
  Description of Artificial Sequence: Synthetic oligonucleotide
  Antisense strand to SEQ ID NO: 1972180
aaguacgucccuaauaauu

SEQ ID NO: 1972182 - RNA, 19 nt, Artificial Sequence
  Description of Artificial Sequence: Synthetic oligonucleotide
  Sense strand starting at position 769 of SEQ ID NO: 1880505
cguacuuagagcuacaaag

SEQ ID NO: 1972183 - RNA, 19 nt, Artificial Sequence
  Description of Artificial Sequence: Synthetic oligonucleotide
  Antisense strand to SEQ ID NO: 1972182
cuuuguagcucuaaguacg

SEQ ID NO: 1972184 - RNA, 19 nt, Artificial Sequence
  Description of Artificial Sequence: Synthetic oligonucleotide
  Sense strand starting at position 787 of SEQ ID NO: 1880505
gaugcugaauuguuuauaa

SEQ ID NO: 1972185 - RNA, 19 nt, Artificial Sequence
  Description of Artificial Sequence: Synthetic oligonucleotide
  Antisense strand to SEQ ID NO: 1972184
uuauaaacaauucagcauc

SEQ ID NO: 1972186 - RNA, 19 nt, Artificial Sequence
  Description of Artificial Sequence: Synthetic oligonucleotide
  Sense strand starting at position 898 of SEQ ID NO: 1880505
acaguaugaucucauuucu

SEQ ID NO: 1972187 - RNA, 19 nt, Artificial Sequence
  Description of Artificial Sequence: Synthetic oligonucleotide
  Antisense strand to SEQ ID NO: 1972186
agaaaugagaucauacugu

SEQ ID NO: 1972188 - RNA, 19 nt, Artificial Sequence
  Description of Artificial Sequence: Synthetic oligonucleotide
  Sense strand starting at position 941 of SEQ ID NO: 1880505
ugcguccuuccugaaacuu

SEQ ID NO: 1972189 - RNA, 19 nt, Artificial Sequence
  Description of Artificial Sequence: Synthetic oligonucleotide
  Antisense strand to SEQ ID NO: 1972188
aaguuucaggaaggacgca

SEQ ID NO: 1972190 - RNA, 19 nt, Artificial Sequence
  Description of Artificial Sequence: Synthetic oligonucleotide
  Sense strand starting at position 1068 of SEQ ID NO: 1880505
guggaugucuucuucuaua

SEQ ID NO: 1972191 - RNA, 19 nt, Artificial Sequence
  Description of Artificial Sequence: Synthetic oligonucleotide
  Antisense strand to SEQ ID NO: 1972190
uauagaagaagacauccac

SEQ ID NO: 1972192 - RNA, 19 nt, Artificial Sequence
  Description of Artificial Sequence: Synthetic oligonucleotide
  Sense strand starting at position 1145 of SEQ ID NO: 1880505
accaaagauuccuggauuu

SEQ ID NO: 1972193 - RNA, 19 nt, Artificial Sequence
  Description of Artificial Sequence: Synthetic oligonucleotide
  Antisense strand to SEQ ID NO: 1972192
aaauccaggaaucuuuggu

SEQ ID NO: 1972194 - RNA, 19 nt, Artificial Sequence
  Description of Artificial Sequence: Synthetic oligonucleotide
  Sense strand starting at position 1231 of SEQ ID NO: 1880505
caucuacauggcugaguau

SEQ ID NO: 1972195 - RNA, 19 nt, Artificial Sequence
  Description of Artificial Sequence: Synthetic oligonucleotide
  Antisense strand to SEQ ID NO: 1972194
auacucagccauguagaug

SEQ ID NO: 1972196 - RNA, 19 nt, Artificial Sequence
  Description of Artificial Sequence: Synthetic oligonucleotide
  Sense strand starting at position 1385 of SEQ ID NO: 1880505
ggcagaauuaccugagguu

SEQ ID NO: 1972197 - RNA, 19 nt, Artificial Sequence
  Description of Artificial Sequence: Synthetic oligonucleotide
  Antisense strand to SEQ ID NO: 1972196
aaccucagguaauucugcc

SEQ ID NO: 1972198 - RNA, 19 nt, Artificial Sequence
  Description of Artificial Sequence: Synthetic oligonucleotide
  Sense strand starting at position 1386 of SEQ ID NO: 1880505
gcagaauuaccugagguug

SEQ ID NO: 1972199 - RNA, 19 nt, Artificial Sequence
  Description of Artificial Sequence: Synthetic oligonucleotide
  Antisense strand to SEQ ID NO: 1972198
caaccucagguaauucugc

SEQ ID NO: 1972200 - RNA, 19 nt, Artificial Sequence
  Description of Artificial Sequence: Synthetic oligonucleotide
  Sense strand starting at position 1624 of SEQ ID NO: 1880505
ugaagucguacuugaccuu

SEQ ID NO: 1972201 - RNA, 19 nt, Artificial Sequence
  Description of Artificial Sequence: Synthetic oligonucleotide
  Antisense strand to SEQ ID NO: 1972200
aaggucaaguacgacuuca

SEQ ID NO: 1972202 - RNA, 19 nt, Artificial Sequence
  Description of Artificial Sequence: Synthetic oligonucleotide
  Sense strand starting at position 1822 of SEQ ID NO: 1880505
ggucaucuguucucaacac

SEQ ID NO: 1972203 - RNA, 19 nt, Artificial Sequence
  Description of Artificial Sequence: Synthetic oligonucleotide
  Antisense strand to SEQ ID NO: 1972202
guguugagaacagaugacc

SEQ ID NO: 1972204 - RNA, 19 nt, Artificial Sequence
  Description of Artificial Sequence: Synthetic oligonucleotide
  Sense strand starting at position 1843 of SEQ ID NO: 1880505
cagccagaguaagucuuaa

SEQ ID NO: 1972205 - RNA, 19 nt, Artificial Sequence
  Description of Artificial Sequence: Synthetic oligonucleotide
  Antisense strand to SEQ ID NO: 1972204
uuaagacuuacucuggcug

SEQ ID NO: 1972206 - RNA, 19 nt, Artificial Sequence
  Description of Artificial Sequence: Synthetic oligonucleotide
  Sense strand starting at position 2066 of SEQ ID NO: 1880505
cuggaauguucuucccuau

SEQ ID NO: 1972207 - RNA, 19 nt, Artificial Sequence
  Description of Artificial Sequence: Synthetic oligonucleotide
  Antisense strand to SEQ ID NO: 1972206
auagggaagaacauuccag

SEQ ID NO: 1972208 - RNA, 19 nt, Artificial Sequence
  Description of Artificial Sequence: Synthetic oligonucleotide
  Sense strand starting at position 2069 of SEQ ID NO: 1880505
gaauguucuucccuaugga

SEQ ID NO: 1972209 - RNA, 19 nt, Artificial Sequence
  Description of Artificial Sequence: Synthetic oligonucleotide
  Antisense strand to SEQ ID NO: 1972208
uccauagggaagaacauuc

SEQ ID NO: 1972210 - RNA, 19 nt, Artificial Sequence
  Description of Artificial Sequence: Synthetic oligonucleotide
  Sense strand starting at position 2072 of SEQ ID NO: 1880505
uguucuucccuauggacau

SEQ ID NO: 1972211 - RNA, 19 nt, Artificial Sequence
  Description of Artificial Sequence: Synthetic oligonucleotide
  Antisense strand to SEQ ID NO: 1972210
auguccauagggaagaaca

SEQ ID NO: 1972212 - RNA, 19 nt, Artificial Sequence
  Description of Artificial Sequence: Synthetic oligonucleotide
  Sense strand starting at position 2129 of SEQ ID NO: 1880505
accacauccucagugugau

SEQ ID NO: 1972213 - RNA, 19 nt, Artificial Sequence
  Description of Artificial Sequence: Synthetic oligonucleotide
  Antisense strand to SEQ ID NO: 1972212
aucacacugaggauguggu

SEQ ID NO: 1972214 - RNA, 19 nt, Artificial Sequence
  Description of Artificial Sequence: Synthetic oligonucleotide
  Sense strand starting at position 2130 of SEQ ID NO: 1880505
ccacauccucagugugauc

SEQ ID NO: 1972215 - RNA, 19 nt, Artificial Sequence
  Description of Artificial Sequence: Synthetic oligonucleotide
  Antisense strand to SEQ ID NO: 1972214
gaucacacugaggaugugg

SEQ ID NO: 1972216 - RNA, 19 nt, Artificial Sequence
  Description of Artificial Sequence: Synthetic oligonucleotide
  Sense strand starting at position 2132 of SEQ ID NO: 1880505
acauccucagugugaucuu

SEQ ID NO: 1972217 - RNA, 19 nt, Artificial Sequence
  Description of Artificial Sequence: Synthetic oligonucleotide
  Antisense strand to SEQ ID NO: 1972216
aagaucacacugaggaugu

SEQ ID NO: 1972218 - RNA, 19 nt, Artificial Sequence
  Description of Artificial Sequence: Synthetic oligonucleotide
  Sense strand starting at position 2143 of SEQ ID NO: 1880505
gugaucuuguuccuugacu

SEQ ID NO: 1972219 - RNA, 19 nt, Artificial Sequence
  Description of Artificial Sequence: Synthetic oligonucleotide
  Antisense strand to SEQ ID NO: 1972218
agucaaggaacaagaucac

SEQ ID NO: 1972220 - RNA, 19 nt, Artificial Sequence
  Description of Artificial Sequence: Synthetic oligonucleotide
  Sense strand starting at position 2154 of SEQ ID NO: 1880505
ccuugacugcuccaggcau

SEQ ID NO: 1972221 - RNA, 19 nt, Artificial Sequence
  Description of Artificial Sequence: Synthetic oligonucleotide
  Antisense strand to SEQ ID NO: 1972220
augccuggagcagucaagg

SEQ ID NO: 1972222 - RNA, 19 nt, Artificial Sequence
  Description of Artificial Sequence: Synthetic oligonucleotide
  Sense strand starting at position 2366 of SEQ ID NO: 1880505
agcagaugucagcacaugu

SEQ ID NO: 1972223 - RNA, 19 nt, Artificial Sequence
  Description of Artificial Sequence: Synthetic oligonucleotide
  Antisense strand to SEQ ID NO: 1972222
acaugugcugacaucugcu

SEQ ID NO: 1972224 - RNA, 19 nt, Artificial Sequence
  Description of Artificial Sequence: Synthetic oligonucleotide
  Sense strand starting at position 2440 of SEQ ID NO: 1880505
ggaccuaaacagugcuuga

SEQ ID NO: 1972225 - RNA, 19 nt, Artificial Sequence
  Description of Artificial Sequence: Synthetic oligonucleotide
  Antisense strand to SEQ ID NO: 1972224
ucaagcacuguuuaggucc

SEQ ID NO: 1972226 - RNA, 19 nt, Artificial Sequence
  Description of Artificial Sequence: Synthetic oligonucleotide
  Sense strand starting at position 2444 of SEQ ID NO: 1880505
cuaaacagugcuugacaua

SEQ ID NO: 1972227 - RNA, 19 nt, Artificial Sequence
  Description of Artificial Sequence: Synthetic oligonucleotide
  Antisense strand to SEQ ID NO: 1972226
uaugucaagcacuguuuag

SEQ ID NO: 1972228 - RNA, 19 nt, Artificial Sequence
  Description of Artificial Sequence: Synthetic oligonucleotide
  Sense strand starting at position 2480 of SEQ ID NO: 1880505
auauguggugagugaaaua

SEQ ID NO: 1972229 - RNA, 19 nt, Artificial Sequence
  Description of Artificial Sequence: Synthetic oligonucleotide
  Antisense strand to SEQ ID NO: 1972228
uauuucacucaccacauau

SEQ ID NO: 1972230 - RNA, 19 nt, Artificial Sequence
  Description of Artificial Sequence: Synthetic oligonucleotide
  Sense strand starting at position 2616 of SEQ ID NO: 1880505
uaaugauguguuuauguca

SEQ ID NO: 1972231 - RNA, 19 nt, Artificial Sequence
  Description of Artificial Sequence: Synthetic oligonucleotide
  Antisense strand to SEQ ID NO: 1972230
ugacauaaacacaucauua

SEQ ID NO: 1972232 - RNA, 19 nt, Artificial Sequence
  Description of Artificial Sequence: Synthetic oligonucleotide
  Sense strand starting at position 85 of SEQ ID NO: 1880506
aagggauuacuaugcacag

SEQ ID NO: 1972233 - RNA, 19 nt, Artificial Sequence
  Description of Artificial Sequence: Synthetic oligonucleotide
  Antisense strand to SEQ ID NO: 1972232
cugugcauaguaaucccuu

SEQ ID NO: 1972234 - RNA, 19 nt, Artificial Sequence
  Description of Artificial Sequence: Synthetic oligonucleotide
  Sense strand starting at position 87 of SEQ ID NO: 1880506
gggauuacuaugcacaggu

SEQ ID NO: 1972235 - RNA, 19 nt, Artificial Sequence
  Description of Artificial Sequence: Synthetic oligonucleotide
  Antisense strand to SEQ ID NO: 1972234
accugugcauaguaauccc

SEQ ID NO: 1972236 - RNA, 19 nt, Artificial Sequence
  Description of Artificial Sequence: Synthetic oligonucleotide
  Sense strand starting at position 127 of SEQ ID NO: 1880506
ugagguguugaccauauga

SEQ ID NO: 1972237 - RNA, 19 nt, Artificial Sequence
  Description of Artificial Sequence: Synthetic oligonucleotide
  Antisense strand to SEQ ID NO: 1972236
ucauauggucaacaccuca

SEQ ID NO: 1972238 - RNA, 19 nt, Artificial Sequence
  Description of Artificial Sequence: Synthetic oligonucleotide
  Sense strand starting at position 535 of SEQ ID NO: 1880506
auccaaacucaguagugua

SEQ ID NO: 1972239 - RNA, 19 nt, Artificial Sequence
  Description of Artificial Sequence: Synthetic oligonucleotide
  Antisense strand to SEQ ID NO: 1972238
uacacuacugaguuuggau

SEQ ID NO: 1972240 - RNA, 19 nt, Artificial Sequence
  Description of Artificial Sequence: Synthetic oligonucleotide
  Sense strand starting at position 558 of SEQ ID NO: 1880506
gcagaauaauguuucuaaa

SEQ ID NO: 1972241 - RNA, 19 nt, Artificial Sequence
  Description of Artificial Sequence: Synthetic oligonucleotide
  Antisense strand to SEQ ID NO: 1972240
uuuagaaacauuauucugc

SEQ ID NO: 1972242 - RNA, 19 nt, Artificial Sequence
  Description of Artificial Sequence: Synthetic oligonucleotide
  Sense strand starting at position 731 of SEQ ID NO: 1880506
gccauaaucagucagguag

SEQ ID NO: 1972243 - RNA, 19 nt, Artificial Sequence
  Description of Artificial Sequence: Synthetic oligonucleotide
  Antisense strand to SEQ ID NO: 1972242
cuaccugacugauuauggc

SEQ ID NO: 1972244 - RNA, 19 nt, Artificial Sequence
  Description of Artificial Sequence: Synthetic oligonucleotide
  Sense strand starting at position 823 of SEQ ID NO: 1880506
uaaaccuggucugcagaaa

SEQ ID NO: 1972245 - RNA, 19 nt, Artificial Sequence
  Description of Artificial Sequence: Synthetic oligonucleotide
  Antisense strand to SEQ ID NO: 1972244
uuucugcagaccagguuua

SEQ ID NO: 1972246 - RNA, 19 nt, Artificial Sequence
  Description of Artificial Sequence: Synthetic oligonucleotide
  Sense strand starting at position 876 of SEQ ID NO: 1880506
cuacauggguuccuaucua

SEQ ID NO: 1972247 - RNA, 19 nt, Artificial Sequence
  Description of Artificial Sequence: Synthetic oligonucleotide
  Antisense strand to SEQ ID NO: 1972246
uagauaggaacccauguag

SEQ ID NO: 1972248 - RNA, 19 nt, Artificial Sequence
  Description of Artificial Sequence: Synthetic oligonucleotide
  Sense strand starting at position 880 of SEQ ID NO: 1880506
auggguuccuaucuaauug

SEQ ID NO: 1972249 - RNA, 19 nt, Artificial Sequence
  Description of Artificial Sequence: Synthetic oligonucleotide
  Antisense strand to SEQ ID NO: 1972248
caauuagauaggaacccau

SEQ ID NO: 1972250 - RNA, 19 nt, Artificial Sequence
  Description of Artificial Sequence: Synthetic oligonucleotide
  Sense strand starting at position 1271 of SEQ ID NO: 1880506
cagacugugggaugacauu

SEQ ID NO: 1972251 - RNA, 19 nt, Artificial Sequence
  Description of Artificial Sequence: Synthetic oligonucleotide
  Antisense strand to SEQ ID NO: 1972250
aaugucaucccacagucug

SEQ ID NO: 1972252 - RNA, 19 nt, Artificial Sequence
  Description of Artificial Sequence: Synthetic oligonucleotide
  Sense strand starting at position 1376 of SEQ ID NO: 1880506
gaagaagucagaugugaug

SEQ ID NO: 1972253 - RNA, 19 nt, Artificial Sequence
  Description of Artificial Sequence: Synthetic oligonucleotide
  Antisense strand to SEQ ID NO: 1972252
caucacaucugacuucuuc

SEQ ID NO: 1972254 - RNA, 19 nt, Artificial Sequence
  Description of Artificial Sequence: Synthetic oligonucleotide
  Sense strand starting at position 1378 of SEQ ID NO: 1880506
agaagucagaugugaugga

SEQ ID NO: 1972255 - RNA, 19 nt, Artificial Sequence
  Description of Artificial Sequence: Synthetic oligonucleotide
  Antisense strand to SEQ ID NO: 1972254
uccaucacaucugacuucu

SEQ ID NO: 1972256 - RNA, 19 nt, Artificial Sequence
  Description of Artificial Sequence: Synthetic oligonucleotide
  Sense strand starting at position 1409 of SEQ ID NO: 1880506
gcuuccauaccugaggaau

SEQ ID NO: 1972257 - RNA, 19 nt, Artificial Sequence
  Description of Artificial Sequence: Synthetic oligonucleotide
  Antisense strand to SEQ ID NO: 1972256
auuccucagguauggaagc

SEQ ID NO: 1972258 - RNA, 19 nt, Artificial Sequence
  Description of Artificial Sequence: Synthetic oligonucleotide
  Sense strand starting at position 1476 of SEQ ID NO: 1880506
auggccaggcauugauaaa

SEQ ID NO: 1972259 - RNA, 19 nt, Artificial Sequence
  Description of Artificial Sequence: Synthetic oligonucleotide
  Antisense strand to SEQ ID NO: 1972258
uuuaucaaugccuggccau

SEQ ID NO: 1972260 - RNA, 19 nt, Artificial Sequence
  Description of Artificial Sequence: Synthetic oligonucleotide
  Sense strand starting at position 1488 of SEQ ID NO: 1880506
ugauaaaccugauauuuag

SEQ ID NO: 1972261 - RNA, 19 nt, Artificial Sequence
  Description of Artificial Sequence: Synthetic oligonucleotide
  Antisense strand to SEQ ID NO: 1972260
cuaaauaucagguuuauca

SEQ ID NO: 1972262 - RNA, 19 nt, Artificial Sequence
  Description of Artificial Sequence: Synthetic oligonucleotide
  Sense strand starting at position 1495 of SEQ ID NO: 1880506
ccugauauuuagggacaga

SEQ ID NO: 1972263 - RNA, 19 nt, Artificial Sequence
  Description of Artificial Sequence: Synthetic oligonucleotide
  Antisense strand to SEQ ID NO: 1972262
ucugucccuaaauaucagg

SEQ ID NO: 1972264 - RNA, 19 nt, Artificial Sequence
  Description of Artificial Sequence: Synthetic oligonucleotide
  Sense strand starting at position 1517 of SEQ ID NO: 1880506
uggcucugggcagaaagau

SEQ ID NO: 1972265 - RNA, 19 nt, Artificial Sequence
  Description of Artificial Sequence: Synthetic oligonucleotide
  Antisense strand to SEQ ID NO: 1972264
aucuuucugcccagagcca

SEQ ID NO: 1972266 - RNA, 19 nt, Artificial Sequence
  Description of Artificial Sequence: Synthetic oligonucleotide
  Sense strand starting at position 1643 of SEQ ID NO: 1880506
gguuuaaguaaaugacuga

SEQ ID NO: 1972267 - RNA, 19 nt, Artificial Sequence
  Description of Artificial Sequence: Synthetic oligonucleotide
  Antisense strand to SEQ ID NO: 1972266
ucagucauuuacuuaaacc

SEQ ID NO: 1972268 - RNA, 19 nt, Artificial Sequence
  Description of Artificial Sequence: Synthetic oligonucleotide
  Sense strand starting at position 1707 of SEQ ID NO: 1880506
gcugcaugccaauagaaau

SEQ ID NO: 1972269 - RNA, 19 nt, Artificial Sequence
  Description of Artificial Sequence: Synthetic oligonucleotide
  Antisense strand to SEQ ID NO: 1972268
auuucuauuggcaugcagc

SEQ ID NO: 1972270 - RNA, 19 nt, Artificial Sequence
  Description of Artificial Sequence: Synthetic oligonucleotide
  Sense strand starting at position 2024 of SEQ ID NO: 1880506
cuaaguucugcccauaaug

SEQ ID NO: 1972271 - RNA, 19 nt, Artificial Sequence
  Description of Artificial Sequence: Synthetic oligonucleotide
  Antisense strand to SEQ ID NO: 1972270
cauuaugggcagaacuuag

SEQ ID NO: 1972272 - RNA, 19 nt, Artificial Sequence
  Description of Artificial Sequence: Synthetic oligonucleotide
  Sense strand starting at position 2183 of SEQ ID NO: 1880506
uccguucucccagaagaag

SEQ ID NO: 1972273 - RNA, 19 nt, Artificial Sequence
  Description of Artificial Sequence: Synthetic oligonucleotide
  Antisense strand to SEQ ID NO: 1972272
cuucuucugggagaacgga

SEQ ID NO: 1972274 - RNA, 19 nt, Artificial Sequence
  Description of Artificial Sequence: Synthetic oligonucleotide
  Sense strand starting at position 2195 of SEQ ID NO: 1880506
gaagaagauucucuguggu

SEQ ID NO: 1972275 - RNA, 19 nt, Artificial Sequence
  Description of Artificial Sequence: Synthetic oligonucleotide
  Antisense strand to SEQ ID NO: 1972274
accacagagaaucuucuuc

SEQ ID NO: 1972276 - RNA, 19 nt, Artificial Sequence
  Description of Artificial Sequence: Synthetic oligonucleotide
  Sense strand starting at position 2281 of SEQ ID NO: 1880506
ugaauauuauugguccaug

SEQ ID NO: 1972277 - RNA, 19 nt, Artificial Sequence
  Description of Artificial Sequence: Synthetic oligonucleotide
  Antisense strand to SEQ ID NO: 1972276
cauggaccaauaauauuca

SEQ ID NO: 1972278 - RNA, 19 nt, Artificial Sequence
  Description of Artificial Sequence: Synthetic oligonucleotide
  Sense strand starting at position 2286 of SEQ ID NO: 1880506
auuauugguccaugggaaa

SEQ ID NO: 1972279 - RNA, 19 nt, Artificial Sequence
  Description of Artificial Sequence: Synthetic oligonucleotide
  Antisense strand to SEQ ID NO: 1972278
uuucccauggaccaauaau

SEQ ID NO: 1972280 - RNA, 19 nt, Artificial Sequence
  Description of Artificial Sequence: Synthetic oligonucleotide
  Sense strand starting at position 2473 of SEQ ID NO: 1880506
auucucuugcauugaaaug

SEQ ID NO: 1972281 - RNA, 19 nt, Artificial Sequence
  Description of Artificial Sequence: Synthetic oligonucleotide
  Antisense strand to SEQ ID NO: 1972280
cauuucaaugcaagagaau

SEQ ID NO: 1972282 - RNA, 19 nt, Artificial Sequence
  Description of Artificial Sequence: Synthetic oligonucleotide
  Sense strand starting at position 2532 of SEQ ID NO: 1880506
aaugacagguuccucagaa

SEQ ID NO: 1972283 - RNA, 19 nt, Artificial Sequence
  Description of Artificial Sequence: Synthetic oligonucleotide
  Antisense strand to SEQ ID NO: 1972282
uucugaggaaccugucauu

SEQ ID NO: 1972284 - RNA, 19 nt, Artificial Sequence
  Description of Artificial Sequence: Synthetic oligonucleotide
  Sense strand starting at position 2533 of SEQ ID NO: 1880506
augacagguuccucagaac

SEQ ID NO: 1972285 - RNA, 19 nt, Artificial Sequence
  Description of Artificial Sequence: Synthetic oligonucleotide
  Antisense strand to SEQ ID NO: 1972284
guucugaggaaccugucau

SEQ ID NO: 1972286 - RNA, 19 nt, Artificial Sequence
  Description of Artificial Sequence: Synthetic oligonucleotide
  Sense strand starting at position 2694 of SEQ ID NO: 1880506
ugcuauggaacguagacau

SEQ ID NO: 1972287 - RNA, 19 nt, Artificial Sequence
  Description of Artificial Sequence: Synthetic oligonucleotide
  Antisense strand to SEQ ID NO: 1972286
augucuacguuccauagca

SEQ ID NO: 1972288 - RNA, 19 nt, Artificial Sequence
  Description of Artificial Sequence: Synthetic oligonucleotide
  Sense strand starting at position 2735 of SEQ ID NO: 1880506
gagggauuguagcuaauuc

SEQ ID NO: 1972289 - RNA, 19 nt, Artificial Sequence
  Description of Artificial Sequence: Synthetic oligonucleotide
  Antisense strand to SEQ ID NO: 1972288
gaauuagcuacaaucccuc

SEQ ID NO: 1972290 - RNA, 19 nt, Artificial Sequence
  Description of Artificial Sequence: Synthetic oligonucleotide
  Sense strand starting at position 2849 of SEQ ID NO: 1880506
cuguucugucacuaaauua

SEQ ID NO: 1972291 - RNA, 19 nt, Artificial Sequence
  Description of Artificial Sequence: Synthetic oligonucleotide
  Antisense strand to SEQ ID NO: 1972290
uaauuuagugacagaacag

SEQ ID NO: 1972292 - RNA, 19 nt, Artificial Sequence
  Description of Artificial Sequence: Synthetic oligonucleotide
  Sense strand starting at position 2951 of SEQ ID NO: 1880506
ccagaauagcagggaaguu

SEQ ID NO: 1972293 - RNA, 19 nt, Artificial Sequence
  Description of Artificial Sequence: Synthetic oligonucleotide
  Antisense strand to SEQ ID NO: 1972292
aacuucccugcuauucugg

SEQ ID NO: 1972294 - RNA, 19 nt, Artificial Sequence
  Description of Artificial Sequence: Synthetic oligonucleotide
  Sense strand starting at position 3074 of SEQ ID NO: 1880506
agguuaccuguuuauauau

SEQ ID NO: 1972295 - RNA, 19 nt, Artificial Sequence
  Description of Artificial Sequence: Synthetic oligonucleotide
  Antisense strand to SEQ ID NO: 1972294
auauauaaacagguaaccu

SEQ ID NO: 1972296 - RNA, 19 nt, Artificial Sequence
  Description of Artificial Sequence: Synthetic oligonucleotide
  Sense strand starting at position 3259 of SEQ ID NO: 1880506
gauuaaaugguuuaagugu

SEQ ID NO: 1972297 - RNA, 19 nt, Artificial Sequence
  Description of Artificial Sequence: Synthetic oligonucleotide
  Antisense strand to SEQ ID NO: 1972296
acacuuaaaccauuuaauc

SEQ ID NO: 1972298 - RNA, 19 nt, Artificial Sequence
  Description of Artificial Sequence: Synthetic oligonucleotide
  Sense strand starting at position 3270 of SEQ ID NO: 1880506
uuaagugugucacuuauuu

SEQ ID NO: 1972299 - RNA, 19 nt, Artificial Sequence
  Description of Artificial Sequence: Synthetic oligonucleotide
  Antisense strand to SEQ ID NO: 1972298
aaauaagugacacacuuaa

SEQ ID NO: 1972300 - RNA, 19 nt, Artificial Sequence
  Description of Artificial Sequence: Synthetic oligonucleotide
  Sense strand starting at position 3274 of SEQ ID NO: 1880506
gugugucacuuauuuacuu

SEQ ID NO: 1972301 - RNA, 19 nt, Artificial Sequence
  Description of Artificial Sequence: Synthetic oligonucleotide
  Antisense strand to SEQ ID NO: 1972300
aaguaaauaagugacacac

SEQ ID NO: 1972302 - RNA, 19 nt, Artificial Sequence
  Description of Artificial Sequence: Synthetic oligonucleotide
  Sense strand starting at position 3508 of SEQ ID NO: 1880506
cugugugcagauuauagaa

SEQ ID NO: 1972303 - RNA, 19 nt, Artificial Sequence
  Description of Artificial Sequence: Synthetic oligonucleotide
  Antisense strand to SEQ ID NO: 1972302
uucuauaaucugcacacag

SEQ ID NO: 1972304 - RNA, 19 nt, Artificial Sequence
  Description of Artificial Sequence: Synthetic oligonucleotide
  Sense strand starting at position 3635 of SEQ ID NO: 1880506
gcagcaagucuguugcuca

SEQ ID NO: 1972305 - RNA, 19 nt, Artificial Sequence
  Description of Artificial Sequence: Synthetic oligonucleotide
  Antisense strand to SEQ ID NO: 1972304
ugagcaacagacuugcugc

SEQ ID NO: 1972306 - RNA, 19 nt, Artificial Sequence
  Description of Artificial Sequence: Synthetic oligonucleotide
  Sense strand starting at position 3703 of SEQ ID NO: 1880506
cucugugaccugcacaaau

SEQ ID NO: 1972307 - RNA, 19 nt, Artificial Sequence
  Description of Artificial Sequence: Synthetic oligonucleotide
  Antisense strand to SEQ ID NO: 1972306
auuugugcaggucacagag

SEQ ID NO: 1972308 - RNA, 19 nt, Artificial Sequence
  Description of Artificial Sequence: Synthetic oligonucleotide
  Sense strand starting at position 3939 of SEQ ID NO: 1880506
uuuaaaugaguugaccagu

SEQ ID NO: 1972309 - RNA, 19 nt, Artificial Sequence
  Description of Artificial Sequence: Synthetic oligonucleotide
  Antisense strand to SEQ ID NO: 1972308
acuggucaacucauuuaaa

SEQ ID NO: 1972310 - RNA, 19 nt, Artificial Sequence
  Description of Artificial Sequence: Synthetic oligonucleotide
  Sense strand starting at position 3973 of SEQ ID NO: 1880506
gcaauuaugcaauaucaug

SEQ ID NO: 1972311 - RNA, 19 nt, Artificial Sequence
  Description of Artificial Sequence: Synthetic oligonucleotide
  Antisense strand to SEQ ID NO: 1972310
caugauauugcauaauugc

SEQ ID NO: 1972312 - RNA, 19 nt, Artificial Sequence
  Description of Artificial Sequence: Synthetic oligonucleotide
  Sense strand starting at position 35 of SEQ ID NO: 1880507
aguguuuauuauccagaua

SEQ ID NO: 1972313 - RNA, 19 nt, Artificial Sequence
  Description of Artificial Sequence: Synthetic oligonucleotide
  Antisense strand to SEQ ID NO: 1972312
uaucuggauaauaaacacu

SEQ ID NO: 1972314 - RNA, 19 nt, Artificial Sequence
  Description of Artificial Sequence: Synthetic oligonucleotide
  Sense strand starting at position 89 of SEQ ID NO: 1880507
accauagacugguuggauu

SEQ ID NO: 1972315 - RNA, 19 nt, Artificial Sequence
  Description of Artificial Sequence: Synthetic oligonucleotide
  Antisense strand to SEQ ID NO: 1972314
aauccaaccagucuauggu

SEQ ID NO: 1972316 - RNA, 19 nt, Artificial Sequence
  Description of Artificial Sequence: Synthetic oligonucleotide
  Sense strand starting at position 91 of SEQ ID NO: 1880507
cauagacugguuggauuaa

SEQ ID NO: 1972317 - RNA, 19 nt, Artificial Sequence
  Description of Artificial Sequence: Synthetic oligonucleotide
  Antisense strand to SEQ ID NO: 1972316
uuaauccaaccagucuaug

SEQ ID NO: 1972318 - RNA, 19 nt, Artificial Sequence
  Description of Artificial Sequence: Synthetic oligonucleotide
  Sense strand starting at position 232 of SEQ ID NO: 1880507
uucucugaaugagucaaca

SEQ ID NO: 1972319 - RNA, 19 nt, Artificial Sequence
  Description of Artificial Sequence: Synthetic oligonucleotide
  Antisense strand to SEQ ID NO: 1972318
uguugacucauucagagaa

SEQ ID NO: 1972320 - RNA, 19 nt, Artificial Sequence
  Description of Artificial Sequence: Synthetic oligonucleotide
  Sense strand starting at position 366 of SEQ ID NO: 1880507
agaguuaaugaagguuauu

SEQ ID NO: 1972321 - RNA, 19 nt, Artificial Sequence
  Description of Artificial Sequence: Synthetic oligonucleotide
  Antisense strand to SEQ ID NO: 1972320
aauaaccuucauuaacucu

SEQ ID NO: 1972322 - RNA, 19 nt, Artificial Sequence
  Description of Artificial Sequence: Synthetic oligonucleotide
  Sense strand starting at position 369 of SEQ ID NO: 1880507
guuaaugaagguuauuagu

SEQ ID NO: 1972323 - RNA, 19 nt, Artificial Sequence
  Description of Artificial Sequence: Synthetic oligonucleotide
  Antisense strand to SEQ ID NO: 1972322
acuaauaaccuucauuaac

SEQ ID NO: 1972324 - RNA, 19 nt, Artificial Sequence
  Description of Artificial Sequence: Synthetic oligonucleotide
  Sense strand starting at position 371 of SEQ ID NO: 1880507
uaaugaagguuauuagugu

SEQ ID NO: 1972325 - RNA, 19 nt, Artificial Sequence
  Description of Artificial Sequence: Synthetic oligonucleotide
  Antisense strand to SEQ ID NO: 1972324
acacuaauaaccuucauua

SEQ ID NO: 1972326 - RNA, 19 nt, Artificial Sequence
  Description of Artificial Sequence: Synthetic oligonucleotide
  Sense strand starting at position 441 of SEQ ID NO: 1880507
agacaugcaugcccacaaa

SEQ ID NO: 1972327 - RNA, 19 nt, Artificial Sequence
  Description of Artificial Sequence: Synthetic oligonucleotide
  Antisense strand to SEQ ID NO: 1972326
uuugugggcaugcaugucu

SEQ ID NO: 1972328 - RNA, 19 nt, Artificial Sequence
  Description of Artificial Sequence: Synthetic oligonucleotide
  Sense strand starting at position 486 of SEQ ID NO: 1880507
uaagauggcugucuacaaa

SEQ ID NO: 1972329 - RNA, 19 nt, Artificial Sequence
  Description of Artificial Sequence: Synthetic oligonucleotide
  Antisense strand to SEQ ID NO: 1972328
uuuguagacagccaucuua

SEQ ID NO: 1972330 - RNA, 19 nt, Artificial Sequence
  Description of Artificial Sequence: Synthetic oligonucleotide
  Sense strand starting at position 539 of SEQ ID NO: 1880507
gaugcaauccucgaucuug

SEQ ID NO: 1972331 - RNA, 19 nt, Artificial Sequence
  Description of Artificial Sequence: Synthetic oligonucleotide
  Antisense strand to SEQ ID NO: 1972330
caagaucgaggauugcauc

SEQ ID NO: 1972332 - RNA, 19 nt, Artificial Sequence
  Description of Artificial Sequence: Synthetic oligonucleotide
  Sense strand starting at position 725 of SEQ ID NO: 1880507
gguuguguucucuaccaua

SEQ ID NO: 1972333 - RNA, 19 nt, Artificial Sequence
  Description of Artificial Sequence: Synthetic oligonucleotide
  Antisense strand to SEQ ID NO: 1972332
uaugguagagaacacaacc

SEQ ID NO: 1972334 - RNA, 19 nt, Artificial Sequence
  Description of Artificial Sequence: Synthetic oligonucleotide
  Sense strand starting at position 730 of SEQ ID NO: 1880507
uguucucuaccauauguca

SEQ ID NO: 1972335 - RNA, 19 nt, Artificial Sequence
  Description of Artificial Sequence: Synthetic oligonucleotide
  Antisense strand to SEQ ID NO: 1972334
ugacauaugguagagaaca

SEQ ID NO: 1972336 - RNA, 19 nt, Artificial Sequence
  Description of Artificial Sequence: Synthetic oligonucleotide
  Sense strand starting at position 746 of SEQ ID NO: 1880507
ucaagaaguuaagaaggaa

SEQ ID NO: 1972337 - RNA, 19 nt, Artificial Sequence
  Description of Artificial Sequence: Synthetic oligonucleotide
  Antisense strand to SEQ ID NO: 1972336
uuccuucuuaacuucuuga

SEQ ID NO: 1972338 - RNA, 19 nt, Artificial Sequence
  Description of Artificial Sequence: Synthetic oligonucleotide
  Sense strand starting at position 931 of SEQ ID NO: 1880507
auguuugugccauugcauu

SEQ ID NO: 1972339 - RNA, 19 nt, Artificial Sequence
  Description of Artificial Sequence: Synthetic oligonucleotide
  Antisense strand to SEQ ID NO: 1972338
aaugcaauggcacaaacau

SEQ ID NO: 1972340 - RNA, 19 nt, Artificial Sequence
  Description of Artificial Sequence: Synthetic oligonucleotide
  Sense strand starting at position 997 of SEQ ID NO: 1880507
aaaggaguccaauguguag

SEQ ID NO: 1972341 - RNA, 19 nt, Artificial Sequence
  Description of Artificial Sequence: Synthetic oligonucleotide
  Antisense strand to SEQ ID NO: 1972340
cuacacauuggacuccuuu

SEQ ID NO: 1972342 - RNA, 19 nt, Artificial Sequence
  Description of Artificial Sequence: Synthetic oligonucleotide
  Sense strand starting at position 1050 of SEQ ID NO: 1880507
ugugcuuaaagcuaaagga

SEQ ID NO: 1972343 - RNA, 19 nt, Artificial Sequence
  Description of Artificial Sequence: Synthetic oligonucleotide
  Antisense strand to SEQ ID NO: 1972342
uccuuuagcuuuaagcaca

SEQ ID NO: 1972344 - RNA, 19 nt, Artificial Sequence
  Description of Artificial Sequence: Synthetic oligonucleotide
  Sense strand starting at position 1070 of SEQ ID NO: 1880507
uuacuaagauauccgauau

SEQ ID NO: 1972345 - RNA, 19 nt, Artificial Sequence
  Description of Artificial Sequence: Synthetic oligonucleotide
  Antisense strand to SEQ ID NO: 1972344
auaucggauaucuuaguaa

SEQ ID NO: 1972346 - RNA, 19 nt, Artificial Sequence
  Description of Artificial Sequence: Synthetic oligonucleotide
  Sense strand starting at position 1406 of SEQ ID NO: 1880507
acaguauacccagaucugu

SEQ ID NO: 1972347 - RNA, 19 nt, Artificial Sequence
  Description of Artificial Sequence: Synthetic oligonucleotide
  Antisense strand to SEQ ID NO: 1972346
acagaucuggguauacugu

SEQ ID NO: 1972348 - RNA, 19 nt, Artificial Sequence
  Description of Artificial Sequence: Synthetic oligonucleotide
  Sense strand starting at position 1857 of SEQ ID NO: 1880507
uacggagaccauugucaua

SEQ ID NO: 1972349 - RNA, 19 nt, Artificial Sequence
  Description of Artificial Sequence: Synthetic oligonucleotide
  Antisense strand to SEQ ID NO: 1972348
uaugacaauggucuccgua

SEQ ID NO: 1972350 - RNA, 19 nt, Artificial Sequence
  Description of Artificial Sequence: Synthetic oligonucleotide
  Sense strand starting at position 1867 of SEQ ID NO: 1880507
auugucauagcugagaaac

SEQ ID NO: 1972351 - RNA, 19 nt, Artificial Sequence
  Description of Artificial Sequence: Synthetic oligonucleotide
  Antisense strand to SEQ ID NO: 1972350
guuucucagcuaugacaau

SEQ ID NO: 1972352 - RNA, 19 nt, Artificial Sequence
  Description of Artificial Sequence: Synthetic oligonucleotide
  Sense strand starting at position 2039 of SEQ ID NO: 1880507
uuacgucauccugauggaa

SEQ ID NO: 1972353 - RNA, 19 nt, Artificial Sequence
  Description of Artificial Sequence: Synthetic oligonucleotide
  Antisense strand to SEQ ID NO: 1972352
uuccaucaggaugacguaa

SEQ ID NO: 1972354 - RNA, 19 nt, Artificial Sequence
  Description of Artificial Sequence: Synthetic oligonucleotide
  Sense strand starting at position 2075 of SEQ ID NO: 1880507
ggacuuucugcuuaagccu

SEQ ID NO: 1972355 - RNA, 19 nt, Artificial Sequence
  Description of Artificial Sequence: Synthetic oligonucleotide
  Antisense strand to SEQ ID NO: 1972354
aggcuuaagcagaaagucc

SEQ ID NO: 1972356 - RNA, 19 nt, Artificial Sequence
  Description of Artificial Sequence: Synthetic oligonucleotide
  Sense strand starting at position 2107 of SEQ ID NO: 1880507
uuucuaacauucuuggaga

SEQ ID NO: 1972357 - RNA, 19 nt, Artificial Sequence
  Description of Artificial Sequence: Synthetic oligonucleotide
  Antisense strand to SEQ ID NO: 1972356
ucuccaagaauguuagaaa

SEQ ID NO: 1972358 - RNA, 19 nt, Artificial Sequence
  Description of Artificial Sequence: Synthetic oligonucleotide
  Sense strand starting at position 2109 of SEQ ID NO: 1880507
ucuaacauucuuggagacu

SEQ ID NO: 1972359 - RNA, 19 nt, Artificial Sequence
  Description of Artificial Sequence: Synthetic oligonucleotide
  Antisense strand to SEQ ID NO: 1972358
agucuccaagaauguuaga

SEQ ID NO: 1972360 - RNA, 19 nt, Artificial Sequence
  Description of Artificial Sequence: Synthetic oligonucleotide
  Sense strand starting at position 2168 of SEQ ID NO: 1880507
ggauuauugaagggaugca

SEQ ID NO: 1972361 - RNA, 19 nt, Artificial Sequence
  Description of Artificial Sequence: Synthetic oligonucleotide
  Antisense strand to SEQ ID NO: 1972360
ugcaucccuucaauaaucc

SEQ ID NO: 1972362 - RNA, 19 nt, Artificial Sequence
  Description of Artificial Sequence: Synthetic oligonucleotide
  Sense strand starting at position 2311 of SEQ ID NO: 1880507
agauuuauguaacacuaag

SEQ ID NO: 1972363 - RNA, 19 nt, Artificial Sequence
  Description of Artificial Sequence: Synthetic oligonucleotide
  Antisense strand to SEQ ID NO: 1972362
cuuaguguuacauaaaucu

SEQ ID NO: 1972364 - RNA, 19 nt, Artificial Sequence
  Description of Artificial Sequence: Synthetic oligonucleotide
  Sense strand starting at position 2394 of SEQ ID NO: 1880507
agguaaaucagaugcagaa

SEQ ID NO: 1972365 - RNA, 19 nt, Artificial Sequence
  Description of Artificial Sequence: Synthetic oligonucleotide
  Antisense strand to SEQ ID NO: 1972364
uucugcaucugauuuaccu

SEQ ID NO: 1972366 - RNA, 19 nt, Artificial Sequence
  Description of Artificial Sequence: Synthetic oligonucleotide
  Sense strand starting at position 2594 of SEQ ID NO: 1880507
guaauugguaugugacacu

SEQ ID NO: 1972367 - RNA, 19 nt, Artificial Sequence
  Description of Artificial Sequence: Synthetic oligonucleotide
  Antisense strand to SEQ ID NO: 1972366
agugucacauaccaauuac

SEQ ID NO: 1972368 - RNA, 19 nt, Artificial Sequence
  Description of Artificial Sequence: Synthetic oligonucleotide
  Sense strand starting at position 2823 of SEQ ID NO: 1880507
ccguuuaccagguaaggaa

SEQ ID NO: 1972369 - RNA, 19 nt, Artificial Sequence
  Description of Artificial Sequence: Synthetic oligonucleotide
  Antisense strand to SEQ ID NO: 1972368
uuccuuaccugguaaacgg

SEQ ID NO: 1972370 - RNA, 19 nt, Artificial Sequence
  Description of Artificial Sequence: Synthetic oligonucleotide
  Sense strand starting at position 2903 of SEQ ID NO: 1880507
ucauuagaggcauaucuca

SEQ ID NO: 1972371 - RNA, 19 nt, Artificial Sequence
  Description of Artificial Sequence: Synthetic oligonucleotide
  Antisense strand to SEQ ID NO: 1972370
ugagauaugccucuaauga

SEQ ID NO: 1972372 - RNA, 19 nt, Artificial Sequence
  Description of Artificial Sequence: Synthetic oligonucleotide
  Sense strand starting at position 3074 of SEQ ID NO: 1880507
ugaaucaugugguuuaaga

SEQ ID NO: 1972373 - RNA, 19 nt, Artificial Sequence
  Description of Artificial Sequence: Synthetic oligonucleotide
  Antisense strand to SEQ ID NO: 1972372
ucuuaaaccacaugauuca

SEQ ID NO: 1972374 - RNA, 19 nt, Artificial Sequence
  Description of Artificial Sequence: Synthetic oligonucleotide
  Sense strand starting at position 3244 of SEQ ID NO: 1880507
uuaagaagcugucugaucu

SEQ ID NO: 1972375 - RNA, 19 nt, Artificial Sequence
  Description of Artificial Sequence: Synthetic oligonucleotide
  Antisense strand to SEQ ID NO: 1972374
agaucagacagcuucuuaa

SEQ ID NO: 1972376 - RNA, 19 nt, Artificial Sequence
  Description of Artificial Sequence: Synthetic oligonucleotide
  Sense strand starting at position 3245 of SEQ ID NO: 1880507
uaagaagcugucugaucuu

SEQ ID NO: 1972377 - RNA, 19 nt, Artificial Sequence
  Description of Artificial Sequence: Synthetic oligonucleotide
  Antisense strand to SEQ ID NO: 1972376
aagaucagacagcuucuua

SEQ ID NO: 1972378 - RNA, 19 nt, Artificial Sequence
  Description of Artificial Sequence: Synthetic oligonucleotide
  Sense strand starting at position 3361 of SEQ ID NO: 1880507
auugcacuucucuguauuu

SEQ ID NO: 1972379 - RNA, 19 nt, Artificial Sequence
  Description of Artificial Sequence: Synthetic oligonucleotide
  Antisense strand to SEQ ID NO: 1972378
aaauacagagaagugcaau

SEQ ID NO: 1972380 - RNA, 19 nt, Artificial Sequence
  Description of Artificial Sequence: Synthetic oligonucleotide
  Sense strand starting at position 3362 of SEQ ID NO: 1880507
uugcacuucucuguauuua

SEQ ID NO: 1972381 - RNA, 19 nt, Artificial Sequence
  Description of Artificial Sequence: Synthetic oligonucleotide
  Antisense strand to SEQ ID NO: 1972380
uaaauacagagaagugcaa

SEQ ID NO: 1972382 - RNA, 19 nt, Artificial Sequence
  Description of Artificial Sequence: Synthetic oligonucleotide
  Sense strand starting at position 3370 of SEQ ID NO: 1880507
cucuguauuuaugauauga

SEQ ID NO: 1972383 - RNA, 19 nt, Artificial Sequence
  Description of Artificial Sequence: Synthetic oligonucleotide
  Antisense strand to SEQ ID NO: 1972382
ucauaucauaaauacagag

SEQ ID NO: 1972384 - RNA, 19 nt, Artificial Sequence
  Description of Artificial Sequence: Synthetic oligonucleotide
  Sense strand starting at position 3441 of SEQ ID NO: 1880507
ccuuuacaggcuuaguuaa

SEQ ID NO: 1972385 - RNA, 19 nt, Artificial Sequence
  Description of Artificial Sequence: Synthetic oligonucleotide
  Antisense strand to SEQ ID NO: 1972384
uuaacuaagccuguaaagg

SEQ ID NO: 1972386 - RNA, 19 nt, Artificial Sequence
  Description of Artificial Sequence: Synthetic oligonucleotide
  Sense strand starting at position 3451 of SEQ ID NO: 1880507
cuuaguuaagguuauaagu

SEQ ID NO: 1972387 - RNA, 19 nt, Artificial Sequence
  Description of Artificial Sequence: Synthetic oligonucleotide
  Antisense strand to SEQ ID NO: 1972386
acuuauaaccuuaacuaag

SEQ ID NO: 1972388 - RNA, 19 nt, Artificial Sequence
  Description of Artificial Sequence: Synthetic oligonucleotide
  Sense strand starting at position 3566 of SEQ ID NO: 1880507
gcaauaagauggccaucua

SEQ ID NO: 1972389 - RNA, 19 nt, Artificial Sequence
  Description of Artificial Sequence: Synthetic oligonucleotide
  Antisense strand to SEQ ID NO: 1972388
uagauggccaucuuauugc

SEQ ID NO: 1972390 - RNA, 19 nt, Artificial Sequence
  Description of Artificial Sequence: Synthetic oligonucleotide
  Sense strand starting at position 3922 of SEQ ID NO: 1880507
ugucaauaucguuaccacu

SEQ ID NO: 1972391 - RNA, 19 nt, Artificial Sequence
  Description of Artificial Sequence: Synthetic oligonucleotide
  Antisense strand to SEQ ID NO: 1972390
agugguaacgauauugaca

SEQ ID NO: 1972392 - RNA, 19 nt, Artificial Sequence
  Description of Artificial Sequence: Synthetic oligonucleotide
  Sense strand starting at position 350 of SEQ ID NO: 1880508
ugauuaacuuaguuuaggu

SEQ ID NO: 1972393 - RNA, 19 nt, Artificial Sequence
  Description of Artificial Sequence: Synthetic oligonucleotide
  Antisense strand to SEQ ID NO: 1972392
accuaaacuaaguuaauca

SEQ ID NO: 1972394 - RNA, 19 nt, Artificial Sequence
  Description of Artificial Sequence: Synthetic oligonucleotide
  Sense strand starting at position 355 of SEQ ID NO: 1880508
aacuuaguuuaggugauca

SEQ ID NO: 1972395 - RNA, 19 nt, Artificial Sequence
  Description of Artificial Sequence: Synthetic oligonucleotide
  Antisense strand to SEQ ID NO: 1972394
ugaucaccuaaacuaaguu

SEQ ID NO: 1972396 - RNA, 19 nt, Artificial Sequence
  Description of Artificial Sequence: Synthetic oligonucleotide
  Sense strand starting at position 357 of SEQ ID NO: 1880508
cuuaguuuaggugaucaau

SEQ ID NO: 1972397 - RNA, 19 nt, Artificial Sequence
  Description of Artificial Sequence: Synthetic oligonucleotide
  Antisense strand to SEQ ID NO: 1972396
auugaucaccuaaacuaag

SEQ ID NO: 1972398 - RNA, 19 nt, Artificial Sequence
  Description of Artificial Sequence: Synthetic oligonucleotide
  Sense strand starting at position 359 of SEQ ID NO: 1880508
uaguuuaggugaucaaucu

SEQ ID NO: 1972399 - RNA, 19 nt, Artificial Sequence
  Description of Artificial Sequence: Synthetic oligonucleotide
  Antisense strand to SEQ ID NO: 1972398
agauugaucaccuaaacua

SEQ ID NO: 1972400 - RNA, 19 nt, Artificial Sequence
  Description of Artificial Sequence: Synthetic oligonucleotide
  Sense strand starting at position 360 of SEQ ID NO: 1880508
aguuuaggugaucaaucuu

SEQ ID NO: 1972401 - RNA, 19 nt, Artificial Sequence
  Description of Artificial Sequence: Synthetic oligonucleotide
  Antisense strand to SEQ ID NO: 1972400
aagauugaucaccuaaacu

SEQ ID NO: 1972402 - RNA, 19 nt, Artificial Sequence
  Description of Artificial Sequence: Synthetic oligonucleotide
  Sense strand starting at position 409 of SEQ ID NO: 1880508
uccagucugagauggaaau

SEQ ID NO: 1972403 - RNA, 19 nt, Artificial Sequence
  Description of Artificial Sequence: Synthetic oligonucleotide
  Antisense strand to SEQ ID NO: 1972402
auuuccaucucagacugga

SEQ ID NO: 1972404 - RNA, 19 nt, Artificial Sequence
  Description of Artificial Sequence: Synthetic oligonucleotide
  Sense strand starting at position 410 of SEQ ID NO: 1880508
ccagucugagauggaaauu

SEQ ID NO: 1972405 - RNA, 19 nt, Artificial Sequence
  Description of Artificial Sequence: Synthetic oligonucleotide
  Antisense strand to SEQ ID NO: 1972404
aauuuccaucucagacugg

SEQ ID NO: 1972406 - RNA, 19 nt, Artificial Sequence
  Description of Artificial Sequence: Synthetic oligonucleotide
  Sense strand starting at position 445 of SEQ ID NO: 1880508
aucuuuacuuguucugaga

SEQ ID NO: 1972407 - RNA, 19 nt, Artificial Sequence
  Description of Artificial Sequence: Synthetic oligonucleotide
  Antisense strand to SEQ ID NO: 1972406
ucucagaacaaguaaagau

SEQ ID NO: 1972408 - RNA, 19 nt, Artificial Sequence
  Description of Artificial Sequence: Synthetic oligonucleotide
  Sense strand starting at position 572 of SEQ ID NO: 1880508
gaaccuguugcagagacua

SEQ ID NO: 1972409 - RNA, 19 nt, Artificial Sequence
  Description of Artificial Sequence: Synthetic oligonucleotide
  Antisense strand to SEQ ID NO: 1972408
uagucucugcaacagguuc

SEQ ID NO: 1972410 - RNA, 19 nt, Artificial Sequence
  Description of Artificial Sequence: Synthetic oligonucleotide
  Sense strand starting at position 1244 of SEQ ID NO: 1880508
acccaugacuugcuaaaga

SEQ ID NO: 1972411 - RNA, 19 nt, Artificial Sequence
  Description of Artificial Sequence: Synthetic oligonucleotide
  Antisense strand to SEQ ID NO: 1972410
ucuuuagcaagucaugggu

SEQ ID NO: 1972412 - RNA, 19 nt, Artificial Sequence
  Description of Artificial Sequence: Synthetic oligonucleotide
  Sense strand starting at position 1286 of SEQ ID NO: 1880508
cuuccaagagauuguuauu

SEQ ID NO: 1972413 - RNA, 19 nt, Artificial Sequence
  Description of Artificial Sequence: Synthetic oligonucleotide
  Antisense strand to SEQ ID NO: 1972412
aauaacaaucucuuggaag

SEQ ID NO: 1972414 - RNA, 19 nt, Artificial Sequence
  Description of Artificial Sequence: Synthetic oligonucleotide
  Sense strand starting at position 1501 of SEQ ID NO: 1880508
uugcuaugucaagacuuga

SEQ ID NO: 1972415 - RNA, 19 nt, Artificial Sequence
  Description of Artificial Sequence: Synthetic oligonucleotide
  Antisense strand to SEQ ID NO: 1972414
ucaagucuugacauagcaa

SEQ ID NO: 1972416 - RNA, 19 nt, Artificial Sequence
  Description of Artificial Sequence: Synthetic oligonucleotide
  Sense strand starting at position 1606 of SEQ ID NO: 1880508
ugggaagucuggucuuaaa

SEQ ID NO: 1972417 - RNA, 19 nt, Artificial Sequence
  Description of Artificial Sequence: Synthetic oligonucleotide
  Antisense strand to SEQ ID NO: 1972416
uuuaagaccagacuuccca

SEQ ID NO: 1972418 - RNA, 19 nt, Artificial Sequence
  Description of Artificial Sequence: Synthetic oligonucleotide
  Sense strand starting at position 1636 of SEQ ID NO: 1880508
cuacaaacucggugaauag

SEQ ID NO: 1972419 - RNA, 19 nt, Artificial Sequence
  Description of Artificial Sequence: Synthetic oligonucleotide
  Antisense strand to SEQ ID NO: 1972418
cuauucaccgaguuuguag

SEQ ID NO: 1972420 - RNA, 19 nt, Artificial Sequence
  Description of Artificial Sequence: Synthetic oligonucleotide
  Sense strand starting at position 1637 of SEQ ID NO: 1880508
uacaaacucggugaauagu

SEQ ID NO: 1972421 - RNA, 19 nt, Artificial Sequence
  Description of Artificial Sequence: Synthetic oligonucleotide
  Antisense strand to SEQ ID NO: 1972420
acuauucaccgaguuugua

SEQ ID NO: 1972422 - RNA, 19 nt, Artificial Sequence
  Description of Artificial Sequence: Synthetic oligonucleotide
  Sense strand starting at position 1640 of SEQ ID NO: 1880508
aaacucggugaauaguauu

SEQ ID NO: 1972423 - RNA, 19 nt, Artificial Sequence
  Description of Artificial Sequence: Synthetic oligonucleotide
  Antisense strand to SEQ ID NO: 1972422
aauacuauucaccgaguuu

SEQ ID NO: 1972424 - RNA, 19 nt, Artificial Sequence
  Description of Artificial Sequence: Synthetic oligonucleotide
  Sense strand starting at position 2008 of SEQ ID NO: 1880508
ccuagugcuagaggacaaa

SEQ ID NO: 1972425 - RNA, 19 nt, Artificial Sequence
  Description of Artificial Sequence: Synthetic oligonucleotide
  Antisense strand to SEQ ID NO: 1972424
uuuguccucuagcacuagg

SEQ ID NO: 1972426 - RNA, 19 nt, Artificial Sequence
  Description of Artificial Sequence: Synthetic oligonucleotide
  Sense strand starting at position 2085 of SEQ ID NO: 1880508
ccuggugauuauuccuaga

SEQ ID NO: 1972427 - RNA, 19 nt, Artificial Sequence
  Description of Artificial Sequence: Synthetic oligonucleotide
  Antisense strand to SEQ ID NO: 1972426
ucuaggaauaaucaccagg

SEQ ID NO: 1972428 - RNA, 19 nt, Artificial Sequence
  Description of Artificial Sequence: Synthetic oligonucleotide
  Sense strand starting at position 2087 of SEQ ID NO: 1880508
uggugauuauuccuagaau

SEQ ID NO: 1972429 - RNA, 19 nt, Artificial Sequence
  Description of Artificial Sequence: Synthetic oligonucleotide
  Antisense strand to SEQ ID NO: 1972428
auucuaggaauaaucacca

SEQ ID NO: 1972430 - RNA, 19 nt, Artificial Sequence
  Description of Artificial Sequence: Synthetic oligonucleotide
  Sense strand starting at position 2176 of SEQ ID NO: 1880508
cuguauguaguucagggaa

SEQ ID NO: 1972431 - RNA, 19 nt, Artificial Sequence
  Description of Artificial Sequence: Synthetic oligonucleotide
  Antisense strand to SEQ ID NO: 1972430
uucccugaacuacauacag

SEQ ID NO: 1972432 - RNA, 19 nt, Artificial Sequence
  Description of Artificial Sequence: Synthetic oligonucleotide
  Sense strand starting at position 2209 of SEQ ID NO: 1880508
agagacuauucugucauaa

SEQ ID NO: 1972433 - RNA, 19 nt, Artificial Sequence
  Description of Artificial Sequence: Synthetic oligonucleotide
  Antisense strand to SEQ ID NO: 1972432
uuaugacagaauagucucu

SEQ ID NO: 1972434 - RNA, 19 nt, Artificial Sequence
  Description of Artificial Sequence: Synthetic oligonucleotide
  Sense strand starting at position 2301 of SEQ ID NO: 1880508
acuaauucuggccaaugua

SEQ ID NO: 1972435 - RNA, 19 nt, Artificial Sequence
  Description of Artificial Sequence: Synthetic oligonucleotide
  Antisense strand to SEQ ID NO: 1972434
uacauuggccagaauuagu

SEQ ID NO: 1972436 - RNA, 19 nt, Artificial Sequence
  Description of Artificial Sequence: Synthetic oligonucleotide
  Sense strand starting at position 2337 of SEQ ID NO: 1880508
cuguucucugacuaguuga

SEQ ID NO: 1972437 - RNA, 19 nt, Artificial Sequence
  Description of Artificial Sequence: Synthetic oligonucleotide
  Antisense strand to SEQ ID NO: 1972436
ucaacuagucagagaacag

SEQ ID NO: 1972438 - RNA, 19 nt, Artificial Sequence
  Description of Artificial Sequence: Synthetic oligonucleotide
  Sense strand starting at position 2340 of SEQ ID NO: 1880508
uucucugacuaguugaaca

SEQ ID NO: 1972439 - RNA, 19 nt, Artificial Sequence
  Description of Artificial Sequence: Synthetic oligonucleotide
  Antisense strand to SEQ ID NO: 1972438
uguucaacuagucagagaa

SEQ ID NO: 1972440 - RNA, 19 nt, Artificial Sequence
  Description of Artificial Sequence: Synthetic oligonucleotide
  Sense strand starting at position 2351 of SEQ ID NO: 1880508
guugaacaagcucaaucau

SEQ ID NO: 1972441 - RNA, 19 nt, Artificial Sequence
  Description of Artificial Sequence: Synthetic oligonucleotide
  Antisense strand to SEQ ID NO: 1972440
augauugagcuuguucaac

SEQ ID NO: 1972442 - RNA, 19 nt, Artificial Sequence
  Description of Artificial Sequence: Synthetic oligonucleotide
  Sense strand starting at position 2557 of SEQ ID NO: 1880508
gaaguacagcgggaauguu

SEQ ID NO: 1972443 - RNA, 19 nt, Artificial Sequence
  Description of Artificial Sequence: Synthetic oligonucleotide
  Antisense strand to SEQ ID NO: 1972442
aacauucccgcuguacuuc

SEQ ID NO: 1972444 - RNA, 19 nt, Artificial Sequence
  Description of Artificial Sequence: Synthetic oligonucleotide
  Sense strand starting at position 2567 of SEQ ID NO: 1880508
gggaauguuacagaaacgu

SEQ ID NO: 1972445 - RNA, 19 nt, Artificial Sequence
  Description of Artificial Sequence: Synthetic oligonucleotide
  Antisense strand to SEQ ID NO: 1972444
acguuucuguaacauuccc

SEQ ID NO: 1972446 - RNA, 19 nt, Artificial Sequence
  Description of Artificial Sequence: Synthetic oligonucleotide
  Sense strand starting at position 2919 of SEQ ID NO: 1880508
gugaauuuauuggaaggaa

SEQ ID NO: 1972447 - RNA, 19 nt, Artificial Sequence
  Description of Artificial Sequence: Synthetic oligonucleotide
  Antisense strand to SEQ ID NO: 1972446
uuccuuccaauaaauucac

SEQ ID NO: 1972448 - RNA, 19 nt, Artificial Sequence
  Description of Artificial Sequence: Synthetic oligonucleotide
  Sense strand starting at position 2986 of SEQ ID NO: 1880508
aguuaaacucugggaaucu

SEQ ID NO: 1972449 - RNA, 19 nt, Artificial Sequence
  Description of Artificial Sequence: Synthetic oligonucleotide
  Antisense strand to SEQ ID NO: 1972448
agauucccagaguuuaacu

SEQ ID NO: 1972450 - RNA, 19 nt, Artificial Sequence
  Description of Artificial Sequence: Synthetic oligonucleotide
  Sense strand starting at position 2998 of SEQ ID NO: 1880508
ggaaucucuaguugggaag

SEQ ID NO: 1972451 - RNA, 19 nt, Artificial Sequence
  Description of Artificial Sequence: Synthetic oligonucleotide
  Antisense strand to SEQ ID NO: 1972450
cuucccaacuagagauucc

SEQ ID NO: 1972452 - RNA, 19 nt, Artificial Sequence
  Description of Artificial Sequence: Synthetic oligonucleotide
  Sense strand starting at position 3098 of SEQ ID NO: 1880508
aucaguccuccuugggaga

SEQ ID NO: 1972453 - RNA, 19 nt, Artificial Sequence
  Description of Artificial Sequence: Synthetic oligonucleotide
  Antisense strand to SEQ ID NO: 1972452
ucucccaaggaggacugau

SEQ ID NO: 1972454 - RNA, 19 nt, Artificial Sequence
  Description of Artificial Sequence: Synthetic oligonucleotide
  Sense strand starting at position 3099 of SEQ ID NO: 1880508
ucaguccuccuugggagau

SEQ ID NO: 1972455 - RNA, 19 nt, Artificial Sequence
  Description of Artificial Sequence: Synthetic oligonucleotide
  Antisense strand to SEQ ID NO: 1972454
aucucccaaggaggacuga

SEQ ID NO: 1972456 - RNA, 19 nt, Artificial Sequence
  Description of Artificial Sequence: Synthetic oligonucleotide
  Sense strand starting at position 3111 of SEQ ID NO: 1880508
gggagauauuuggacauca

SEQ ID NO: 1972457 - RNA, 19 nt, Artificial Sequence
  Description of Artificial Sequence: Synthetic oligonucleotide
  Antisense strand to SEQ ID NO: 1972456
ugauguccaaauaucuccc

SEQ ID NO: 1972458 - RNA, 19 nt, Artificial Sequence
  Description of Artificial Sequence: Synthetic oligonucleotide
  Sense strand starting at position 3143 of SEQ ID NO: 1880508
uauauaugcuuaguuagga

SEQ ID NO: 1972459 - RNA, 19 nt, Artificial Sequence
  Description of Artificial Sequence: Synthetic oligonucleotide
  Antisense strand to SEQ ID NO: 1972458
uccuaacuaagcauauaua

SEQ ID NO: 1972460 - RNA, 19 nt, Artificial Sequence
  Description of Artificial Sequence: Synthetic oligonucleotide
  Sense strand starting at position 3151 of SEQ ID NO: 1880508
cuuaguuaggaguaaguca

SEQ ID NO: 1972461 - RNA, 19 nt, Artificial Sequence
  Description of Artificial Sequence: Synthetic oligonucleotide
  Antisense strand to SEQ ID NO: 1972460
ugacuuacuccuaacuaag

SEQ ID NO: 1972462 - RNA, 19 nt, Artificial Sequence
  Description of Artificial Sequence: Synthetic oligonucleotide
  Sense strand starting at position 3274 of SEQ ID NO: 1880508
gcuuguacugaguaggauu

SEQ ID NO: 1972463 - RNA, 19 nt, Artificial Sequence
  Description of Artificial Sequence: Synthetic oligonucleotide
  Antisense strand to SEQ ID NO: 1972462
aauccuacucaguacaagc

SEQ ID NO: 1972464 - RNA, 19 nt, Artificial Sequence
  Description of Artificial Sequence: Synthetic oligonucleotide
  Sense strand starting at position 3626 of SEQ ID NO: 1880508
acagacuuugcaggugaau

SEQ ID NO: 1972465 - RNA, 19 nt, Artificial Sequence
  Description of Artificial Sequence: Synthetic oligonucleotide
  Antisense strand to SEQ ID NO: 1972464
auucaccugcaaagucugu

SEQ ID NO: 1972466 - RNA, 19 nt, Artificial Sequence
  Description of Artificial Sequence: Synthetic oligonucleotide
  Sense strand starting at position 3730 of SEQ ID NO: 1880508
aguaaaugaugguucagag

SEQ ID NO: 1972467 - RNA, 19 nt, Artificial Sequence
  Description of Artificial Sequence: Synthetic oligonucleotide
  Antisense strand to SEQ ID NO: 1972466
cucugaaccaucauuuacu

SEQ ID NO: 1972468 - RNA, 19 nt, Artificial Sequence
  Description of Artificial Sequence: Synthetic oligonucleotide
  Sense strand starting at position 3778 of SEQ ID NO: 1880508
gguacuaaccauugggauu

SEQ ID NO: 1972469 - RNA, 19 nt, Artificial Sequence
  Description of Artificial Sequence: Synthetic oligonucleotide
  Antisense strand to SEQ ID NO: 1972468
aaucccaaugguuaguacc

SEQ ID NO: 1972470 - RNA, 19 nt, Artificial Sequence
  Description of Artificial Sequence: Synthetic oligonucleotide
  Sense strand starting at position 3808 of SEQ ID NO: 1880508
cuaucugggugauuccaaa

SEQ ID NO: 1972471 - RNA, 19 nt, Artificial Sequence
  Description of Artificial Sequence: Synthetic oligonucleotide
  Antisense strand to SEQ ID NO: 1972470
uuuggaaucacccagauag

SEQ ID NO: 1972472 - RNA, 19 nt, Artificial Sequence
  Description of Artificial Sequence: Synthetic oligonucleotide
  Sense strand starting at position 88 of SEQ ID NO: 1880509
ggagaugucuucucaucug

SEQ ID NO: 1972473 - RNA, 19 nt, Artificial Sequence
  Description of Artificial Sequence: Synthetic oligonucleotide
  Antisense strand to SEQ ID NO: 1972472
cagaugagaagacaucucc

SEQ ID NO: 1972474 - RNA, 19 nt, Artificial Sequence
  Description of Artificial Sequence: Synthetic oligonucleotide
  Sense strand starting at position 96 of SEQ ID NO: 1880509
cuucucaucugccuaggaa

SEQ ID NO: 1972475 - RNA, 19 nt, Artificial Sequence
  Description of Artificial Sequence: Synthetic oligonucleotide
  Antisense strand to SEQ ID NO: 1972474
uuccuaggcagaugagaag

SEQ ID NO: 1972476 - RNA, 19 nt, Artificial Sequence
  Description of Artificial Sequence: Synthetic oligonucleotide
  Sense strand starting at position 160 of SEQ ID NO: 1880509
uguuuaggaaaccguaaga

SEQ ID NO: 1972477 - RNA, 19 nt, Artificial Sequence
  Description of Artificial Sequence: Synthetic oligonucleotide
  Antisense strand to SEQ ID NO: 1972476
ucuuacgguuuccuaaaca

SEQ ID NO: 1972478 - RNA, 19 nt, Artificial Sequence
  Description of Artificial Sequence: Synthetic oligonucleotide
  Sense strand starting at position 171 of SEQ ID NO: 1880509
ccguaagaagacuggcaua

SEQ ID NO: 1972479 - RNA, 19 nt, Artificial Sequence
  Description of Artificial Sequence: Synthetic oligonucleotide
  Antisense strand to SEQ ID NO: 1972478
uaugccagucuucuuacgg

SEQ ID NO: 1972480 - RNA, 19 nt, Artificial Sequence
  Description of Artificial Sequence: Synthetic oligonucleotide
  Sense strand starting at position 202 of SEQ ID NO: 1880509
ugggaauuauggguuggau

SEQ ID NO: 1972481 - RNA, 19 nt, Artificial Sequence
  Description of Artificial Sequence: Synthetic oligonucleotide
  Antisense strand to SEQ ID NO: 1972480
auccaacccauaauuccca

SEQ ID NO: 1972482 - RNA, 19 nt, Artificial Sequence
  Description of Artificial Sequence: Synthetic oligonucleotide
  Sense strand starting at position 204 of SEQ ID NO: 1880509
ggaauuauggguuggauug

SEQ ID NO: 1972483 - RNA, 19 nt, Artificial Sequence
  Description of Artificial Sequence: Synthetic oligonucleotide
  Antisense strand to SEQ ID NO: 1972482
caauccaacccauaauucc

SEQ ID NO: 1972484 - RNA, 19 nt, Artificial Sequence
  Description of Artificial Sequence: Synthetic oligonucleotide
  Sense strand starting at position 343 of SEQ ID NO: 1880509
cuaagaauagcaugccagu

SEQ ID NO: 1972485 - RNA, 19 nt, Artificial Sequence
  Description of Artificial Sequence: Synthetic oligonucleotide
  Antisense strand to SEQ ID NO: 1972484
acuggcaugcuauucuuag

SEQ ID NO: 1972486 - RNA, 19 nt, Artificial Sequence
  Description of Artificial Sequence: Synthetic oligonucleotide
  Sense strand starting at position 354 of SEQ ID NO: 1880509
augccaguucaaugggagu

SEQ ID NO: 1972487 - RNA, 19 nt, Artificial Sequence
  Description of Artificial Sequence: Synthetic oligonucleotide
  Antisense strand to SEQ ID NO: 1972486
acucccauugaacuggcau

SEQ ID NO: 1972488 - RNA, 19 nt, Artificial Sequence
  Description of Artificial Sequence: Synthetic oligonucleotide
  Sense strand starting at position 369 of SEQ ID NO: 1880509
gaguuuaaagaugggaagu

SEQ ID NO: 1972489 - RNA, 19 nt, Artificial Sequence
  Description of Artificial Sequence: Synthetic oligonucleotide
  Antisense strand to SEQ ID NO: 1972488
acuucccaucuuuaaacuc

SEQ ID NO: 1972490 - RNA, 19 nt, Artificial Sequence
  Description of Artificial Sequence: Synthetic oligonucleotide
  Sense strand starting at position 402 of SEQ ID NO: 1880509
agagguggucaguggagaa

SEQ ID NO: 1972491 - RNA, 19 nt, Artificial Sequence
  Description of Artificial Sequence: Synthetic oligonucleotide
  Antisense strand to SEQ ID NO: 1972490
uucuccacugaccaccucu

SEQ ID NO: 1972492 - RNA, 19 nt, Artificial Sequence
  Description of Artificial Sequence: Synthetic oligonucleotide
  Sense strand starting at position 492 of SEQ ID NO: 1880509
gguuccaauugcuuuaaga

SEQ ID NO: 1972493 - RNA, 19 nt, Artificial Sequence
  Description of Artificial Sequence: Synthetic oligonucleotide
  Antisense strand to SEQ ID NO: 1972492
ucuuaaagcaauuggaacc

SEQ ID NO: 1972494 - RNA, 19 nt, Artificial Sequence
  Description of Artificial Sequence: Synthetic oligonucleotide
  Sense strand starting at position 593 of SEQ ID NO: 1880509
ugugauccuuccucuaaug

SEQ ID NO: 1972495 - RNA, 19 nt, Artificial Sequence
  Description of Artificial Sequence: Synthetic oligonucleotide
  Antisense strand to SEQ ID NO: 1972494
cauuagaggaaggaucaca

SEQ ID NO: 1972496 - RNA, 19 nt, Artificial Sequence
  Description of Artificial Sequence: Synthetic oligonucleotide
  Sense strand starting at position 991 of SEQ ID NO: 1880509
ggucaugugcuguauaaca

SEQ ID NO: 1972497 - RNA, 19 nt, Artificial Sequence
  Description of Artificial Sequence: Synthetic oligonucleotide
  Antisense strand to SEQ ID NO: 1972496
uguuauacagcacaugacc

SEQ ID NO: 1972498 - RNA, 19 nt, Artificial Sequence
  Description of Artificial Sequence: Synthetic oligonucleotide
  Sense strand starting at position 1024 of SEQ ID NO: 1880509
auacuauuguggucccaua

SEQ ID NO: 1972499 - RNA, 19 nt, Artificial Sequence
  Description of Artificial Sequence: Synthetic oligonucleotide
  Antisense strand to SEQ ID NO: 1972498
uaugggaccacaauaguau

SEQ ID NO: 1972500 - RNA, 19 nt, Artificial Sequence
  Description of Artificial Sequence: Synthetic oligonucleotide
  Sense strand starting at position 1176 of SEQ ID NO: 1880509
gcaggaauaggcuauacca

SEQ ID NO: 1972501 - RNA, 19 nt, Artificial Sequence
  Description of Artificial Sequence: Synthetic oligonucleotide
  Antisense strand to SEQ ID NO: 1972500
ugguauagccuauuccugc

SEQ ID NO: 1972502 - RNA, 19 nt, Artificial Sequence
  Description of Artificial Sequence: Synthetic oligonucleotide
  Sense strand starting at position 1196 of SEQ ID NO: 1880509
auauccaagguguguagaa

SEQ ID NO: 1972503 - RNA, 19 nt, Artificial Sequence
  Description of Artificial Sequence: Synthetic oligonucleotide
  Antisense strand to SEQ ID NO: 1972502
uucuacacaccuuggauau

SEQ ID NO: 1972504 - RNA, 19 nt, Artificial Sequence
  Description of Artificial Sequence: Synthetic oligonucleotide
  Sense strand starting at position 1345 of SEQ ID NO: 1880509
ccaugagguaggugguauu

SEQ ID NO: 1972505 - RNA, 19 nt, Artificial Sequence
  Description of Artificial Sequence: Synthetic oligonucleotide
  Antisense strand to SEQ ID NO: 1972504
aauaccaccuaccucaugg

SEQ ID NO: 1972506 - RNA, 19 nt, Artificial Sequence
  Description of Artificial Sequence: Synthetic oligonucleotide
  Sense strand starting at position 1368 of SEQ ID NO: 1880509
uugcuuuaugcagauaaag

SEQ ID NO: 1972507 - RNA, 19 nt, Artificial Sequence
  Description of Artificial Sequence: Synthetic oligonucleotide
  Antisense strand to SEQ ID NO: 1972506
cuuuaucugcauaaagcaa

SEQ ID NO: 1972508 - RNA, 19 nt, Artificial Sequence
  Description of Artificial Sequence: Synthetic oligonucleotide
  Sense strand starting at position 1427 of SEQ ID NO: 1880509
cuuauaaguggucaagcua

SEQ ID NO: 1972509 - RNA, 19 nt, Artificial Sequence
  Description of Artificial Sequence: Synthetic oligonucleotide
  Antisense strand to SEQ ID NO: 1972508
uagcuugaccacuuauaag

SEQ ID NO: 1972510 - RNA, 19 nt, Artificial Sequence
  Description of Artificial Sequence: Synthetic oligonucleotide
  Sense strand starting at position 1612 of SEQ ID NO: 1880509
agaaacagucuccauugua

SEQ ID NO: 1972511 - RNA, 19 nt, Artificial Sequence
  Description of Artificial Sequence: Synthetic oligonucleotide
  Antisense strand to SEQ ID NO: 1972510
uacaauggagacuguuucu

SEQ ID NO: 1972512 - RNA, 19 nt, Artificial Sequence
  Description of Artificial Sequence: Synthetic oligonucleotide
  Sense strand starting at position 1619 of SEQ ID NO: 1880509
gucuccauuguagauaauu

SEQ ID NO: 1972513 - RNA, 19 nt, Artificial Sequence
  Description of Artificial Sequence: Synthetic oligonucleotide
  Antisense strand to SEQ ID NO: 1972512
aauuaucuacaauggagac

SEQ ID NO: 1972514 - RNA, 19 nt, Artificial Sequence
  Description of Artificial Sequence: Synthetic oligonucleotide
  Sense strand starting at position 1729 of SEQ ID NO: 1880509
gagaauagauacgccugau

SEQ ID NO: 1972515 - RNA, 19 nt, Artificial Sequence
  Description of Artificial Sequence: Synthetic oligonucleotide
  Antisense strand to SEQ ID NO: 1972514
aucaggcguaucuauucuc

SEQ ID NO: 1972516 - RNA, 19 nt, Artificial Sequence
  Description of Artificial Sequence: Synthetic oligonucleotide
  Sense strand starting at position 2257 of SEQ ID NO: 1880509
ccuuguaauuuaucgaguc

SEQ ID NO: 1972517 - RNA, 19 nt, Artificial Sequence
  Description of Artificial Sequence: Synthetic oligonucleotide
  Antisense strand to SEQ ID NO: 1972516
gacucgauaaauuacaagg

SEQ ID NO: 1972518 - RNA, 19 nt, Artificial Sequence
  Description of Artificial Sequence: Synthetic oligonucleotide
  Sense strand starting at position 2455 of SEQ ID NO: 1880509
uagguuucugugcauggau

SEQ ID NO: 1972519 - RNA, 19 nt, Artificial Sequence
  Description of Artificial Sequence: Synthetic oligonucleotide
  Antisense strand to SEQ ID NO: 1972518
auccaugcacagaaaccua

SEQ ID NO: 1972520 - RNA, 19 nt, Artificial Sequence
  Description of Artificial Sequence: Synthetic oligonucleotide
  Sense strand starting at position 2457 of SEQ ID NO: 1880509
gguuucugugcauggauuu

SEQ ID NO: 1972521 - RNA, 19 nt, Artificial Sequence
  Description of Artificial Sequence: Synthetic oligonucleotide
  Antisense strand to SEQ ID NO: 1972520
aaauccaugcacagaaacc

SEQ ID NO: 1972522 - RNA, 19 nt, Artificial Sequence
  Description of Artificial Sequence: Synthetic oligonucleotide
  Sense strand starting at position 2524 of SEQ ID NO: 1880509
ucugucaugggcuagaaac

SEQ ID NO: 1972523 - RNA, 19 nt, Artificial Sequence
  Description of Artificial Sequence: Synthetic oligonucleotide
  Antisense strand to SEQ ID NO: 1972522
guuucuagcccaugacaga

SEQ ID NO: 1972524 - RNA, 19 nt, Artificial Sequence
  Description of Artificial Sequence: Synthetic oligonucleotide
  Sense strand starting at position 2526 of SEQ ID NO: 1880509
ugucaugggcuagaaacuu

SEQ ID NO: 1972525 - RNA, 19 nt, Artificial Sequence
  Description of Artificial Sequence: Synthetic oligonucleotide
  Antisense strand to SEQ ID NO: 1972524
aaguuucuagcccaugaca

SEQ ID NO: 1972526 - RNA, 19 nt, Artificial Sequence
  Description of Artificial Sequence: Synthetic oligonucleotide
  Sense strand starting at position 2578 of SEQ ID NO: 1880509
uacucuuaggucuaguuga

SEQ ID NO: 1972527 - RNA, 19 nt, Artificial Sequence
  Description of Artificial Sequence: Synthetic oligonucleotide
  Antisense strand to SEQ ID NO: 1972526
ucaacuagaccuaagagua

SEQ ID NO: 1972528 - RNA, 19 nt, Artificial Sequence
  Description of Artificial Sequence: Synthetic oligonucleotide
  Sense strand starting at position 2626 of SEQ ID NO: 1880509
acucaaguuuggcuauuau

SEQ ID NO: 1972529 - RNA, 19 nt, Artificial Sequence
  Description of Artificial Sequence: Synthetic oligonucleotide
  Antisense strand to SEQ ID NO: 1972528
auaauagccaaacuugagu

SEQ ID NO: 1972530 - RNA, 19 nt, Artificial Sequence
  Description of Artificial Sequence: Synthetic oligonucleotide
  Sense strand starting at position 2684 of SEQ ID NO: 1880509
aagaguagauaguucccaa

SEQ ID NO: 1972531 - RNA, 19 nt, Artificial Sequence
  Description of Artificial Sequence: Synthetic oligonucleotide
  Antisense strand to SEQ ID NO: 1972530
uugggaacuaucuacucuu

SEQ ID NO: 1972532 - RNA, 19 nt, Artificial Sequence
  Description of Artificial Sequence: Synthetic oligonucleotide
  Sense strand starting at position 2687 of SEQ ID NO: 1880509
aguagauaguucccaaaug

SEQ ID NO: 1972533 - RNA, 19 nt, Artificial Sequence
  Description of Artificial Sequence: Synthetic oligonucleotide
  Antisense strand to SEQ ID NO: 1972532
cauuugggaacuaucuacu

SEQ ID NO: 1972534 - RNA, 19 nt, Artificial Sequence
  Description of Artificial Sequence: Synthetic oligonucleotide
  Sense strand starting at position 2910 of SEQ ID NO: 1880509
aaauaacauugggaggaaa

SEQ ID NO: 1972535 - RNA, 19 nt, Artificial Sequence
  Description of Artificial Sequence: Synthetic oligonucleotide
  Antisense strand to SEQ ID NO: 1972534
uuuccucccaauguuauuu

SEQ ID NO: 1972536 - RNA, 19 nt, Artificial Sequence
  Description of Artificial Sequence: Synthetic oligonucleotide
  Sense strand starting at position 3031 of SEQ ID NO: 1880509
ugcagauaugaggguagaa

SEQ ID NO: 1972537 - RNA, 19 nt, Artificial Sequence
  Description of Artificial Sequence: Synthetic oligonucleotide
  Antisense strand to SEQ ID NO: 1972536
uucuacccucauaucugca

SEQ ID NO: 1972538 - RNA, 19 nt, Artificial Sequence
  Description of Artificial Sequence: Synthetic oligonucleotide
  Sense strand starting at position 3185 of SEQ ID NO: 1880509
uagauugaauaguuaagca

SEQ ID NO: 1972539 - RNA, 19 nt, Artificial Sequence
  Description of Artificial Sequence: Synthetic oligonucleotide
  Antisense strand to SEQ ID NO: 1972538
ugcuuaacuauucaaucua

SEQ ID NO: 1972540 - RNA, 19 nt, Artificial Sequence
  Description of Artificial Sequence: Synthetic oligonucleotide
  Sense strand starting at position 3216 of SEQ ID NO: 1880509
gcacuuuagaaaggugacu

SEQ ID NO: 1972541 - RNA, 19 nt, Artificial Sequence
  Description of Artificial Sequence: Synthetic oligonucleotide
  Antisense strand to SEQ ID NO: 1972540
agucaccuuucuaaagugc

SEQ ID NO: 1972542 - RNA, 19 nt, Artificial Sequence
  Description of Artificial Sequence: Synthetic oligonucleotide
  Sense strand starting at position 3221 of SEQ ID NO: 1880509
uuagaaaggugacuccuaa

SEQ ID NO: 1972543 - RNA, 19 nt, Artificial Sequence
  Description of Artificial Sequence: Synthetic oligonucleotide
  Antisense strand to SEQ ID NO: 1972542
uuaggagucaccuuucuaa

SEQ ID NO: 1972544 - RNA, 19 nt, Artificial Sequence
  Description of Artificial Sequence: Synthetic oligonucleotide
  Sense strand starting at position 3558 of SEQ ID NO: 1880509
ugaggaggccuuggaaagu

SEQ ID NO: 1972545 - RNA, 19 nt, Artificial Sequence
  Description of Artificial Sequence: Synthetic oligonucleotide
  Antisense strand to SEQ ID NO: 1972544
acuuuccaaggccuccuca

SEQ ID NO: 1972546 - RNA, 19 nt, Artificial Sequence
  Description of Artificial Sequence: Synthetic oligonucleotide
  Sense strand starting at position 3907 of SEQ ID NO: 1880509
uacuauuuaugugaguaga

SEQ ID NO: 1972547 - RNA, 19 nt, Artificial Sequence
  Description of Artificial Sequence: Synthetic oligonucleotide
  Antisense strand to SEQ ID NO: 1972546
ucuacucacauaaauagua

SEQ ID NO: 1972548 - RNA, 19 nt, Artificial Sequence
  Description of Artificial Sequence: Synthetic oligonucleotide
  Sense strand starting at position 3915 of SEQ ID NO: 1880509
augugaguagauuggacau

SEQ ID NO: 1972549 - RNA, 19 nt, Artificial Sequence
  Description of Artificial Sequence: Synthetic oligonucleotide
  Antisense strand to SEQ ID NO: 1972548
auguccaaucuacucacau

SEQ ID NO: 1972550 - RNA, 19 nt, Artificial Sequence
  Description of Artificial Sequence: Synthetic oligonucleotide
  Sense strand starting at position 3925 of SEQ ID NO: 1880509
auuggacaucucugaaucu

SEQ ID NO: 1972551 - RNA, 19 nt, Artificial Sequence
  Description of Artificial Sequence: Synthetic oligonucleotide
  Antisense strand to SEQ ID NO: 1972550
agauucagagauguccaau

SEQ ID NO: 1972552 - RNA, 19 nt, Artificial Sequence
  Description of Artificial Sequence: Synthetic oligonucleotide
  Sense strand starting at position 419 of SEQ ID NO: 1880510
auuuaagcaucagauuaag

SEQ ID NO: 1972553 - RNA, 19 nt, Artificial Sequence
  Description of Artificial Sequence: Synthetic oligonucleotide
  Antisense strand to SEQ ID NO: 1972552
cuuaaucugaugcuuaaau

SEQ ID NO: 1972554 - RNA, 19 nt, Artificial Sequence
  Description of Artificial Sequence: Synthetic oligonucleotide
  Sense strand starting at position 501 of SEQ ID NO: 1880510
cguuuccuaccgagucguu

SEQ ID NO: 1972555 - RNA, 19 nt, Artificial Sequence
  Description of Artificial Sequence: Synthetic oligonucleotide
  Antisense strand to SEQ ID NO: 1972554
aacgacucgguaggaaacg

SEQ ID NO: 1972556 - RNA, 19 nt, Artificial Sequence
  Description of Artificial Sequence: Synthetic oligonucleotide
  Sense strand starting at position 502 of SEQ ID NO: 1880510
guuuccuaccgagucguuu

SEQ ID NO: 1972557 - RNA, 19 nt, Artificial Sequence
  Description of Artificial Sequence: Synthetic oligonucleotide
  Antisense strand to SEQ ID NO: 1972556
aaacgacucgguaggaaac

SEQ ID NO: 1972558 - RNA, 19 nt, Artificial Sequence
  Description of Artificial Sequence: Synthetic oligonucleotide
  Sense strand starting at position 839 of SEQ ID NO: 1880510
gugagaaacucagcacauu

SEQ ID NO: 1972559 - RNA, 19 nt, Artificial Sequence
  Description of Artificial Sequence: Synthetic oligonucleotide
  Antisense strand to SEQ ID NO: 1972558
aaugugcugaguuucucac

SEQ ID NO: 1972560 - RNA, 19 nt, Artificial Sequence
  Description of Artificial Sequence: Synthetic oligonucleotide
  Sense strand starting at position 928 of SEQ ID NO: 1880510
uagggucuuucuuuguauu

SEQ ID NO: 1972561 - RNA, 19 nt, Artificial Sequence
  Description of Artificial Sequence: Synthetic oligonucleotide
  Antisense strand to SEQ ID NO: 1972560
aauacaaagaaagacccua

SEQ ID NO: 1972562 - RNA, 19 nt, Artificial Sequence
  Description of Artificial Sequence: Synthetic oligonucleotide
  Sense strand starting at position 929 of SEQ ID NO: 1880510
agggucuuucuuuguauuu

SEQ ID NO: 1972563 - RNA, 19 nt, Artificial Sequence
  Description of Artificial Sequence: Synthetic oligonucleotide
  Antisense strand to SEQ ID NO: 1972562
aaauacaaagaaagacccu

SEQ ID NO: 1972564 - RNA, 19 nt, Artificial Sequence
  Description of Artificial Sequence: Synthetic oligonucleotide
  Sense strand starting at position 981 of SEQ ID NO: 1880510
acguguuuccucgaggacu

SEQ ID NO: 1972565 - RNA, 19 nt, Artificial Sequence
  Description of Artificial Sequence: Synthetic oligonucleotide
  Antisense strand to SEQ ID NO: 1972564
aguccucgaggaaacacgu

SEQ ID NO: 1972566 - RNA, 19 nt, Artificial Sequence
  Description of Artificial Sequence: Synthetic oligonucleotide
  Sense strand starting at position 994 of SEQ ID NO: 1880510
aggacuggacucugcgaau

SEQ ID NO: 1972567 - RNA, 19 nt, Artificial Sequence
  Description of Artificial Sequence: Synthetic oligonucleotide
  Antisense strand to SEQ ID NO: 1972566
auucgcagaguccaguccu

SEQ ID NO: 1972568 - RNA, 19 nt, Artificial Sequence
  Description of Artificial Sequence: Synthetic oligonucleotide
  Sense strand starting at position 1179 of SEQ ID NO: 1880510
uugcuuugaauguggguaa

SEQ ID NO: 1972569 - RNA, 19 nt, Artificial Sequence
  Description of Artificial Sequence: Synthetic oligonucleotide
  Antisense strand to SEQ ID NO: 1972568
uuacccacauucaaagcaa

SEQ ID NO: 1972570 - RNA, 19 nt, Artificial Sequence
  Description of Artificial Sequence: Synthetic oligonucleotide
  Sense strand starting at position 1182 of SEQ ID NO: 1880510
cuuugaauguggguaacua

SEQ ID NO: 1972571 - RNA, 19 nt, Artificial Sequence
  Description of Artificial Sequence: Synthetic oligonucleotide
  Antisense strand to SEQ ID NO: 1972570
uaguuacccacauucaaag

SEQ ID NO: 1972572 - RNA, 19 nt, Artificial Sequence
  Description of Artificial Sequence: Synthetic oligonucleotide
  Sense strand starting at position 1226 of SEQ ID NO: 1880510
cggaauuuccaacguguaa

SEQ ID NO: 1972573 - RNA, 19 nt, Artificial Sequence
  Description of Artificial Sequence: Synthetic oligonucleotide
  Antisense strand to SEQ ID NO: 1972572
uuacacguuggaaauuccg

SEQ ID NO: 1972574 - RNA, 19 nt, Artificial Sequence
  Description of Artificial Sequence: Synthetic oligonucleotide
  Sense strand starting at position 1290 of SEQ ID NO: 1880510
gggaacuaaucuucccauu

SEQ ID NO: 1972575 - RNA, 19 nt, Artificial Sequence
  Description of Artificial Sequence: Synthetic oligonucleotide
  Antisense strand to SEQ ID NO: 1972574
aaugggaagauuaguuccc

SEQ ID NO: 1972576 - RNA, 19 nt, Artificial Sequence
  Description of Artificial Sequence: Synthetic oligonucleotide
  Sense strand starting at position 1305 of SEQ ID NO: 1880510
cauuuaaauguuuguggca

SEQ ID NO: 1972577 - RNA, 19 nt, Artificial Sequence
  Description of Artificial Sequence: Synthetic oligonucleotide
  Antisense strand to SEQ ID NO: 1972576
ugccacaaacauuuaaaug

SEQ ID NO: 1972578 - RNA, 19 nt, Artificial Sequence
  Description of Artificial Sequence: Synthetic oligonucleotide
  Sense strand starting at position 1344 of SEQ ID NO: 1880510
aaugcuaaacgaggguaau

SEQ ID NO: 1972579 - RNA, 19 nt, Artificial Sequence
  Description of Artificial Sequence: Synthetic oligonucleotide
  Antisense strand to SEQ ID NO: 1972578
auuacccucguuuagcauu

SEQ ID NO: 1972580 - RNA, 19 nt, Artificial Sequence
  Description of Artificial Sequence: Synthetic oligonucleotide
  Sense strand starting at position 1345 of SEQ ID NO: 1880510
augcuaaacgaggguaauu

SEQ ID NO: 1972581 - RNA, 19 nt, Artificial Sequence
  Description of Artificial Sequence: Synthetic oligonucleotide
  Antisense strand to SEQ ID NO: 1972580
aauuacccucguuuagcau

SEQ ID NO: 1972582 - RNA, 19 nt, Artificial Sequence
  Description of Artificial Sequence: Synthetic oligonucleotide
  Sense strand starting at position 1446 of SEQ ID NO: 1880510
acugucaaggcauauuauu

SEQ ID NO: 1972583 - RNA, 19 nt, Artificial Sequence
  Description of Artificial Sequence: Synthetic oligonucleotide
  Antisense strand to SEQ ID NO: 1972582
aauaauaugccuugacagu

SEQ ID NO: 1972584 - RNA, 19 nt, Artificial Sequence
  Description of Artificial Sequence: Synthetic oligonucleotide
  Sense strand starting at position 1725 of SEQ ID NO: 1880510
uuauuugccucuuucggau

SEQ ID NO: 1972585 - RNA, 19 nt, Artificial Sequence
  Description of Artificial Sequence: Synthetic oligonucleotide
  Antisense strand to SEQ ID NO: 1972584
auccgaaagaggcaaauaa

SEQ ID NO: 1972586 - RNA, 19 nt, Artificial Sequence
  Description of Artificial Sequence: Synthetic oligonucleotide
  Sense strand starting at position 1738 of SEQ ID NO: 1880510
ucggauaaguguccucaau

SEQ ID NO: 1972587 - RNA, 19 nt, Artificial Sequence
  Description of Artificial Sequence: Synthetic oligonucleotide
  Antisense strand to SEQ ID NO: 1972586
auugaggacacuuauccga

SEQ ID NO: 1972588 - RNA, 19 nt, Artificial Sequence
  Description of Artificial Sequence: Synthetic oligonucleotide
  Sense strand starting at position 1740 of SEQ ID NO: 1880510
ggauaaguguccucaauaa

SEQ ID NO: 1972589 - RNA, 19 nt, Artificial Sequence
  Description of Artificial Sequence: Synthetic oligonucleotide
  Antisense strand to SEQ ID NO: 1972588
uuauugaggacacuuaucc

SEQ ID NO: 1972590 - RNA, 19 nt, Artificial Sequence
  Description of Artificial Sequence: Synthetic oligonucleotide
  Sense strand starting at position 2275 of SEQ ID NO: 1880510
aagaauugccacuagguca

SEQ ID NO: 1972591 - RNA, 19 nt, Artificial Sequence
  Description of Artificial Sequence: Synthetic oligonucleotide
  Antisense strand to SEQ ID NO: 1972590
ugaccuaguggcaauucuu

SEQ ID NO: 1972592 - RNA, 19 nt, Artificial Sequence
  Description of Artificial Sequence: Synthetic oligonucleotide
  Sense strand starting at position 2382 of SEQ ID NO: 1880510
cugcgcauccacguguuua

SEQ ID NO: 1972593 - RNA, 19 nt, Artificial Sequence
  Description of Artificial Sequence: Synthetic oligonucleotide
  Antisense strand to SEQ ID NO: 1972592
uaaacacguggaugcgcag

SEQ ID NO: 1972594 - RNA, 19 nt, Artificial Sequence
  Description of Artificial Sequence: Synthetic oligonucleotide
  Sense strand starting at position 2384 of SEQ ID NO: 1880510
gcgcauccacguguuuaga

SEQ ID NO: 1972595 - RNA, 19 nt, Artificial Sequence
  Description of Artificial Sequence: Synthetic oligonucleotide
  Antisense strand to SEQ ID NO: 1972594
ucuaaacacguggaugcgc

SEQ ID NO: 1972596 - RNA, 19 nt, Artificial Sequence
  Description of Artificial Sequence: Synthetic oligonucleotide
  Sense strand starting at position 2547 of SEQ ID NO: 1880510
gugacuugggccugaaugu

SEQ ID NO: 1972597 - RNA, 19 nt, Artificial Sequence
  Description of Artificial Sequence: Synthetic oligonucleotide
  Antisense strand to SEQ ID NO: 1972596
acauucaggcccaagucac

SEQ ID NO: 1972598 - RNA, 19 nt, Artificial Sequence
  Description of Artificial Sequence: Synthetic oligonucleotide
  Sense strand starting at position 2680 of SEQ ID NO: 1880510
uuuccuuagcuuugggaag

SEQ ID NO: 1972599 - RNA, 19 nt, Artificial Sequence
  Description of Artificial Sequence: Synthetic oligonucleotide
  Antisense strand to SEQ ID NO: 1972598
cuucccaaagcuaaggaaa

SEQ ID NO: 1972600 - RNA, 19 nt, Artificial Sequence
  Description of Artificial Sequence: Synthetic oligonucleotide
  Sense strand starting at position 2928 of SEQ ID NO: 1880510
cugcucauccuagguaaca

SEQ ID NO: 1972601 - RNA, 19 nt, Artificial Sequence
  Description of Artificial Sequence: Synthetic oligonucleotide
  Antisense strand to SEQ ID NO: 1972600
uguuaccuaggaugagcag

SEQ ID NO: 1972602 - RNA, 19 nt, Artificial Sequence
  Description of Artificial Sequence: Synthetic oligonucleotide
  Sense strand starting at position 2929 of SEQ ID NO: 1880510
ugcucauccuagguaacau

SEQ ID NO: 1972603 - RNA, 19 nt, Artificial Sequence
  Description of Artificial Sequence: Synthetic oligonucleotide
  Antisense strand to SEQ ID NO: 1972602
auguuaccuaggaugagca

SEQ ID NO: 1972604 - RNA, 19 nt, Artificial Sequence
  Description of Artificial Sequence: Synthetic oligonucleotide
  Sense strand starting at position 2940 of SEQ ID NO: 1880510
gguaacauccuuuaguaaa

SEQ ID NO: 1972605 - RNA, 19 nt, Artificial Sequence
  Description of Artificial Sequence: Synthetic oligonucleotide
  Antisense strand to SEQ ID NO: 1972604
uuuacuaaaggauguuacc

SEQ ID NO: 1972606 - RNA, 19 nt, Artificial Sequence
  Description of Artificial Sequence: Synthetic oligonucleotide
  Sense strand starting at position 2982 of SEQ ID NO: 1880510
ugccuuuaugugcaagaau

SEQ ID NO: 1972607 - RNA, 19 nt, Artificial Sequence
  Description of Artificial Sequence: Synthetic oligonucleotide
  Antisense strand to SEQ ID NO: 1972606
auucuugcacauaaaggca

SEQ ID NO: 1972608 - RNA, 19 nt, Artificial Sequence
  Description of Artificial Sequence: Synthetic oligonucleotide
  Sense strand starting at position 2985 of SEQ ID NO: 1880510
cuuuaugugcaagaauaau

SEQ ID NO: 1972609 - RNA, 19 nt, Artificial Sequence
  Description of Artificial Sequence: Synthetic oligonucleotide
  Antisense strand to SEQ ID NO: 1972608
auuauucuugcacauaaag

SEQ ID NO: 1972610 - RNA, 19 nt, Artificial Sequence
  Description of Artificial Sequence: Synthetic oligonucleotide
  Sense strand starting at position 3010 of SEQ ID NO: 1880510
gauauuagaugaguaauuc

SEQ ID NO: 1972611 - RNA, 19 nt, Artificial Sequence
  Description of Artificial Sequence: Synthetic oligonucleotide
  Antisense strand to SEQ ID NO: 1972610
gaauuacucaucuaauauc

SEQ ID NO: 1972612 - RNA, 19 nt, Artificial Sequence
  Description of Artificial Sequence: Synthetic oligonucleotide
  Sense strand starting at position 3014 of SEQ ID NO: 1880510
uuagaugaguaauucuguu

SEQ ID NO: 1972613 - RNA, 19 nt, Artificial Sequence
  Description of Artificial Sequence: Synthetic oligonucleotide
  Antisense strand to SEQ ID NO: 1972612
aacagaauuacucaucuaa

SEQ ID NO: 1972614 - RNA, 19 nt, Artificial Sequence
  Description of Artificial Sequence: Synthetic oligonucleotide
  Sense strand starting at position 3018 of SEQ ID NO: 1880510
augaguaauucuguuggau

SEQ ID NO: 1972615 - RNA, 19 nt, Artificial Sequence
  Description of Artificial Sequence: Synthetic oligonucleotide
  Antisense strand to SEQ ID NO: 1972614
auccaacagaauuacucau

SEQ ID NO: 1972616 - RNA, 19 nt, Artificial Sequence
  Description of Artificial Sequence: Synthetic oligonucleotide
  Sense strand starting at position 3021 of SEQ ID NO: 1880510
aguaauucuguuggaugua

SEQ ID NO: 1972617 - RNA, 19 nt, Artificial Sequence
  Description of Artificial Sequence: Synthetic oligonucleotide
  Antisense strand to SEQ ID NO: 1972616
uacauccaacagaauuacu

SEQ ID NO: 1972618 - RNA, 19 nt, Artificial Sequence
  Description of Artificial Sequence: Synthetic oligonucleotide
  Sense strand starting at position 3024 of SEQ ID NO: 1880510
aauucuguuggauguaauu

SEQ ID NO: 1972619 - RNA, 19 nt, Artificial Sequence
  Description of Artificial Sequence: Synthetic oligonucleotide
  Antisense strand to SEQ ID NO: 1972618
aauuacauccaacagaauu

SEQ ID NO: 1972620 - RNA, 19 nt, Artificial Sequence
  Description of Artificial Sequence: Synthetic oligonucleotide
  Sense strand starting at position 3035 of SEQ ID NO: 1880510
auguaauucugagucuaga

SEQ ID NO: 1972621 - RNA, 19 nt, Artificial Sequence
  Description of Artificial Sequence: Synthetic oligonucleotide
  Antisense strand to SEQ ID NO: 1972620
ucuagacucagaauuacau

SEQ ID NO: 1972622 - RNA, 19 nt, Artificial Sequence
  Description of Artificial Sequence: Synthetic oligonucleotide
  Sense strand starting at position 3038 of SEQ ID NO: 1880510
uaauucugagucuagaguu

SEQ ID NO: 1972623 - RNA, 19 nt, Artificial Sequence
  Description of Artificial Sequence: Synthetic oligonucleotide
  Antisense strand to SEQ ID NO: 1972622
aacucuagacucagaauua

SEQ ID NO: 1972624 - RNA, 19 nt, Artificial Sequence
  Description of Artificial Sequence: Synthetic oligonucleotide
  Sense strand starting at position 3044 of SEQ ID NO: 1880510
ugagucuagaguuaguuua

SEQ ID NO: 1972625 - RNA, 19 nt, Artificial Sequence
  Description of Artificial Sequence: Synthetic oligonucleotide
  Antisense strand to SEQ ID NO: 1972624
uaaacuaacucuagacuca

SEQ ID NO: 1972626 - RNA, 19 nt, Artificial Sequence
  Description of Artificial Sequence: Synthetic oligonucleotide
  Sense strand starting at position 3113 of SEQ ID NO: 1880510
uaaagaaaucagugguuau

SEQ ID NO: 1972627 - RNA, 19 nt, Artificial Sequence
  Description of Artificial Sequence: Synthetic oligonucleotide
  Antisense strand to SEQ ID NO: 1972626
auaaccacugauuucuuua

SEQ ID NO: 1972628 - RNA, 19 nt, Artificial Sequence
  Description of Artificial Sequence: Synthetic oligonucleotide
  Sense strand starting at position 3116 of SEQ ID NO: 1880510
agaaaucagugguuauuau

SEQ ID NO: 1972629 - RNA, 19 nt, Artificial Sequence
  Description of Artificial Sequence: Synthetic oligonucleotide
  Antisense strand to SEQ ID NO: 1972628
auaauaaccacugauuucu

SEQ ID NO: 1972630 - RNA, 19 nt, Artificial Sequence
  Description of Artificial Sequence: Synthetic oligonucleotide
  Sense strand starting at position 3117 of SEQ ID NO: 1880510
gaaaucagugguuauuauu

SEQ ID NO: 1972631 - RNA, 19 nt, Artificial Sequence
  Description of Artificial Sequence: Synthetic oligonucleotide
  Antisense strand to SEQ ID NO: 1972630
aauaauaaccacugauuuc

SEQ ID NO: 1972632 - RNA, 19 nt, Artificial Sequence
  Description of Artificial Sequence: Synthetic oligonucleotide
  Sense strand starting at position 87 of SEQ ID NO: 1880511
uagguuggaucuucuugaa

SEQ ID NO: 1972633 - RNA, 19 nt, Artificial Sequence
  Description of Artificial Sequence: Synthetic oligonucleotide
  Antisense strand to SEQ ID NO: 1972632
uucaagaagauccaaccua

SEQ ID NO: 1972634 - RNA, 19 nt, Artificial Sequence
  Description of Artificial Sequence: Synthetic oligonucleotide
  Sense strand starting at position 145 of SEQ ID NO: 1880511
acgugaauuuaggaaacua

SEQ ID NO: 1972635 - RNA, 19 nt, Artificial Sequence
  Description of Artificial Sequence: Synthetic oligonucleotide
  Antisense strand to SEQ ID NO: 1972634
uaguuuccuaaauucacgu

SEQ ID NO: 1972636 - RNA, 19 nt, Artificial Sequence
  Description of Artificial Sequence: Synthetic oligonucleotide
  Sense strand starting at position 225 of SEQ ID NO: 1880511
cuggccaguggguauaaau

SEQ ID NO: 1972637 - RNA, 19 nt, Artificial Sequence
  Description of Artificial Sequence: Synthetic oligonucleotide
  Antisense strand to SEQ ID NO: 1972636
auuuauacccacuggccag

SEQ ID NO: 1972638 - RNA, 19 nt, Artificial Sequence
  Description of Artificial Sequence: Synthetic oligonucleotide
  Sense strand starting at position 448 of SEQ ID NO: 1880511
uccuccguccaguauaaga

SEQ ID NO: 1972639 - RNA, 19 nt, Artificial Sequence
  Description of Artificial Sequence: Synthetic oligonucleotide
  Antisense strand to SEQ ID NO: 1972638
ucuuauacuggacggagga

SEQ ID NO: 1972640 - RNA, 19 nt, Artificial Sequence
  Description of Artificial Sequence: Synthetic oligonucleotide
  Sense strand starting at position 450 of SEQ ID NO: 1880511
cuccguccaguauaagaaa

SEQ ID NO: 1972641 - RNA, 19 nt, Artificial Sequence
  Description of Artificial Sequence: Synthetic oligonucleotide
  Antisense strand to SEQ ID NO: 1972640
uuucuuauacuggacggag

SEQ ID NO: 1972642 - RNA, 19 nt, Artificial Sequence
  Description of Artificial Sequence: Synthetic oligonucleotide
  Sense strand starting at position 497 of SEQ ID NO: 1880511
caaugugucaaugguagga

SEQ ID NO: 1972643 - RNA, 19 nt, Artificial Sequence
  Description of Artificial Sequence: Synthetic oligonucleotide
  Antisense strand to SEQ ID NO: 1972642
uccuaccauugacacauug

SEQ ID NO: 1972644 - RNA, 19 nt, Artificial Sequence
  Description of Artificial Sequence: Synthetic oligonucleotide
  Sense strand starting at position 1459 of SEQ ID NO: 1880511
uuaaguuucucagcagaug

SEQ ID NO: 1972645 - RNA, 19 nt, Artificial Sequence
  Description of Artificial Sequence: Synthetic oligonucleotide
  Antisense strand to SEQ ID NO: 1972644
caucugcugagaaacuuaa

SEQ ID NO: 1972646 - RNA, 19 nt, Artificial Sequence
  Description of Artificial Sequence: Synthetic oligonucleotide
  Sense strand starting at position 1460 of SEQ ID NO: 1880511
uaaguuucucagcagauga

SEQ ID NO: 1972647 - RNA, 19 nt, Artificial Sequence
  Description of Artificial Sequence: Synthetic oligonucleotide
  Antisense strand to SEQ ID NO: 1972646
ucaucugcugagaaacuua

SEQ ID NO: 1972648 - RNA, 19 nt, Artificial Sequence
  Description of Artificial Sequence: Synthetic oligonucleotide
  Sense strand starting at position 1462 of SEQ ID NO: 1880511
aguuucucagcagaugaaa

SEQ ID NO: 1972649 - RNA, 19 nt, Artificial Sequence
  Description of Artificial Sequence: Synthetic oligonucleotide
  Antisense strand to SEQ ID NO: 1972648
uuucaucugcugagaaacu

SEQ ID NO: 1972650 - RNA, 19 nt, Artificial Sequence
  Description of Artificial Sequence: Synthetic oligonucleotide
  Sense strand starting at position 1666 of SEQ ID NO: 1880511
guaaauugcugaccuaaug

SEQ ID NO: 1972651 - RNA, 19 nt, Artificial Sequence
  Description of Artificial Sequence: Synthetic oligonucleotide
  Antisense strand to SEQ ID NO: 1972650
cauuaggucagcaauuuac

SEQ ID NO: 1972652 - RNA, 19 nt, Artificial Sequence
  Description of Artificial Sequence: Synthetic oligonucleotide
  Sense strand starting at position 1703 of SEQ ID NO: 1880511
uuaagaguuuaguccuaca

SEQ ID NO: 1972653 - RNA, 19 nt, Artificial Sequence
  Description of Artificial Sequence: Synthetic oligonucleotide
  Antisense strand to SEQ ID NO: 1972652
uguaggacuaaacucuuaa

SEQ ID NO: 1972654 - RNA, 19 nt, Artificial Sequence
  Description of Artificial Sequence: Synthetic oligonucleotide
  Sense strand starting at position 1708 of SEQ ID NO: 1880511
aguuuaguccuacacacua

SEQ ID NO: 1972655 - RNA, 19 nt, Artificial Sequence
  Description of Artificial Sequence: Synthetic oligonucleotide
  Antisense strand to SEQ ID NO: 1972654
uaguguguaggacuaaacu

SEQ ID NO: 1972656 - RNA, 19 nt, Artificial Sequence
  Description of Artificial Sequence: Synthetic oligonucleotide
  Sense strand starting at position 1947 of SEQ ID NO: 1880511
ggaagaguuuggccaguua

SEQ ID NO: 1972657 - RNA, 19 nt, Artificial Sequence
  Description of Artificial Sequence: Synthetic oligonucleotide
  Antisense strand to SEQ ID NO: 1972656
uaacuggccaaacucuucc

SEQ ID NO: 1972658 - RNA, 19 nt, Artificial Sequence
  Description of Artificial Sequence: Synthetic oligonucleotide
  Sense strand starting at position 1969 of SEQ ID NO: 1880511
uguccaaugucucccauuu

SEQ ID NO: 1972659 - RNA, 19 nt, Artificial Sequence
  Description of Artificial Sequence: Synthetic oligonucleotide
  Antisense strand to SEQ ID NO: 1972658
aaaugggagacauuggaca

SEQ ID NO: 1972660 - RNA, 19 nt, Artificial Sequence
  Description of Artificial Sequence: Synthetic oligonucleotide
  Sense strand starting at position 2025 of SEQ ID NO: 1880511
uuaugagucuuugucagaa

SEQ ID NO: 1972661 - RNA, 19 nt, Artificial Sequence
  Description of Artificial Sequence: Synthetic oligonucleotide
  Antisense strand to SEQ ID NO: 1972660
uucugacaaagacucauaa

SEQ ID NO: 1972662 - RNA, 19 nt, Artificial Sequence
  Description of Artificial Sequence: Synthetic oligonucleotide
  Sense strand starting at position 2108 of SEQ ID NO: 1880511
gucccacuugguuaagaug

SEQ ID NO: 1972663 - RNA, 19 nt, Artificial Sequence
  Description of Artificial Sequence: Synthetic oligonucleotide
  Antisense strand to SEQ ID NO: 1972662
caucuuaaccaagugggac

SEQ ID NO: 1972664 - RNA, 19 nt, Artificial Sequence
  Description of Artificial Sequence: Synthetic oligonucleotide
  Sense strand starting at position 2618 of SEQ ID NO: 1880511
gaguuaacugcucaguuug

SEQ ID NO: 1972665 - RNA, 19 nt, Artificial Sequence
  Description of Artificial Sequence: Synthetic oligonucleotide
  Antisense strand to SEQ ID NO: 1972664
caaacugagcaguuaacuc

SEQ ID NO: 1972666 - RNA, 19 nt, Artificial Sequence
  Description of Artificial Sequence: Synthetic oligonucleotide
  Sense strand starting at position 2725 of SEQ ID NO: 1880511
gaaaguuuccacgauucuc

SEQ ID NO: 1972667 - RNA, 19 nt, Artificial Sequence
  Description of Artificial Sequence: Synthetic oligonucleotide
  Antisense strand to SEQ ID NO: 1972666
gagaaucguggaaacuuuc

SEQ ID NO: 1972668 - RNA, 19 nt, Artificial Sequence
  Description of Artificial Sequence: Synthetic oligonucleotide
  Sense strand starting at position 2751 of SEQ ID NO: 1880511
uccuaagucccagaugagu

SEQ ID NO: 1972669 - RNA, 19 nt, Artificial Sequence
  Description of Artificial Sequence: Synthetic oligonucleotide
  Antisense strand to SEQ ID NO: 1972668
acucaucugggacuuagga

SEQ ID NO: 1972670 - RNA, 19 nt, Artificial Sequence
  Description of Artificial Sequence: Synthetic oligonucleotide
  Sense strand starting at position 2753 of SEQ ID NO: 1880511
cuaagucccagaugaguga

SEQ ID NO: 1972671 - RNA, 19 nt, Artificial Sequence
  Description of Artificial Sequence: Synthetic oligonucleotide
  Antisense strand to SEQ ID NO: 1972670
ucacucaucugggacuuag

SEQ ID NO: 1972672 - RNA, 19 nt, Artificial Sequence
  Description of Artificial Sequence: Synthetic oligonucleotide
  Sense strand starting at position 2895 of SEQ ID NO: 1880511
ucauaugaccuacauguuu

SEQ ID NO: 1972673 - RNA, 19 nt, Artificial Sequence
  Description of Artificial Sequence: Synthetic oligonucleotide
  Antisense strand to SEQ ID NO: 1972672
aaacauguaggucauauga

SEQ ID NO: 1972674 - RNA, 19 nt, Artificial Sequence
  Description of Artificial Sequence: Synthetic oligonucleotide
  Sense strand starting at position 2906 of SEQ ID NO: 1880511
acauguuuggcucaguaua

SEQ ID NO: 1972675 - RNA, 19 nt, Artificial Sequence
  Description of Artificial Sequence: Synthetic oligonucleotide
  Antisense strand to SEQ ID NO: 1972674
uauacugagccaaacaugu

SEQ ID NO: 1972676 - RNA, 19 nt, Artificial Sequence
  Description of Artificial Sequence: Synthetic oligonucleotide
  Sense strand starting at position 2951 of SEQ ID NO: 1880511
uagugagugcuccagaaag

SEQ ID NO: 1972677 - RNA, 19 nt, Artificial Sequence
  Description of Artificial Sequence: Synthetic oligonucleotide
  Antisense strand to SEQ ID NO: 1972676
cuuucuggagcacucacua

SEQ ID NO: 1972678 - RNA, 19 nt, Artificial Sequence
  Description of Artificial Sequence: Synthetic oligonucleotide
  Sense strand starting at position 2953 of SEQ ID NO: 1880511
gugagugcuccagaaaguc

SEQ ID NO: 1972679 - RNA, 19 nt, Artificial Sequence
  Description of Artificial Sequence: Synthetic oligonucleotide
  Antisense strand to SEQ ID NO: 1972678
gacuuucuggagcacucac

SEQ ID NO: 1972680 - RNA, 19 nt, Artificial Sequence
  Description of Artificial Sequence: Synthetic oligonucleotide
  Sense strand starting at position 2961 of SEQ ID NO: 1880511
uccagaaagucauugcaug

SEQ ID NO: 1972681 - RNA, 19 nt, Artificial Sequence
  Description of Artificial Sequence: Synthetic oligonucleotide
  Antisense strand to SEQ ID NO: 1972680
caugcaaugacuuucugga

SEQ ID NO: 1972682 - RNA, 19 nt, Artificial Sequence
  Description of Artificial Sequence: Synthetic oligonucleotide
  Sense strand starting at position 2975 of SEQ ID NO: 1880511
gcauguuuaccucauagac

SEQ ID NO: 1972683 - RNA, 19 nt, Artificial Sequence
  Description of Artificial Sequence: Synthetic oligonucleotide
  Antisense strand to SEQ ID NO: 1972682
gucuaugagguaaacaugc

SEQ ID NO: 1972684 - RNA, 19 nt, Artificial Sequence
  Description of Artificial Sequence: Synthetic oligonucleotide
  Sense strand starting at position 3123 of SEQ ID NO: 1880511
ccacauuaaguagaauguu

SEQ ID NO: 1972685 - RNA, 19 nt, Artificial Sequence
  Description of Artificial Sequence: Synthetic oligonucleotide
  Antisense strand to SEQ ID NO: 1972684
aacauucuacuuaaugugg

SEQ ID NO: 1972686 - RNA, 19 nt, Artificial Sequence
  Description of Artificial Sequence: Synthetic oligonucleotide
  Sense strand starting at position 3129 of SEQ ID NO: 1880511
uaaguagaauguucucagu

SEQ ID NO: 1972687 - RNA, 19 nt, Artificial Sequence
  Description of Artificial Sequence: Synthetic oligonucleotide
  Antisense strand to SEQ ID NO: 1972686
acugagaacauucuacuua

SEQ ID NO: 1972688 - RNA, 19 nt, Artificial Sequence
  Description of Artificial Sequence: Synthetic oligonucleotide
  Sense strand starting at position 3131 of SEQ ID NO: 1880511
aguagaauguucucaguau

SEQ ID NO: 1972689 - RNA, 19 nt, Artificial Sequence
  Description of Artificial Sequence: Synthetic oligonucleotide
  Antisense strand to SEQ ID NO: 1972688
auacugagaacauucuacu

SEQ ID NO: 1972690 - RNA, 19 nt, Artificial Sequence
  Description of Artificial Sequence: Synthetic oligonucleotide
  Sense strand starting at position 3190 of SEQ ID NO: 1880511
uggugaugugugcaaugga

SEQ ID NO: 1972691 - RNA, 19 nt, Artificial Sequence
  Description of Artificial Sequence: Synthetic oligonucleotide
  Antisense strand to SEQ ID NO: 1972690
uccauugcacacaucacca

SEQ ID NO: 1972692 - RNA, 19 nt, Artificial Sequence
  Description of Artificial Sequence: Synthetic oligonucleotide
  Sense strand starting at position 3193 of SEQ ID NO: 1880511
ugaugugugcaauggaaau

SEQ ID NO: 1972693 - RNA, 19 nt, Artificial Sequence
  Description of Artificial Sequence: Synthetic oligonucleotide
  Antisense strand to SEQ ID NO: 1972692
auuuccauugcacacauca

SEQ ID NO: 1972694 - RNA, 19 nt, Artificial Sequence
  Description of Artificial Sequence: Synthetic oligonucleotide
  Sense strand starting at position 3199 of SEQ ID NO: 1880511
gugcaauggaaauggaguu

SEQ ID NO: 1972695 - RNA, 19 nt, Artificial Sequence
  Description of Artificial Sequence: Synthetic oligonucleotide
  Antisense strand to SEQ ID NO: 1972694
aacuccauuuccauugcac

SEQ ID NO: 1972696 - RNA, 19 nt, Artificial Sequence
  Description of Artificial Sequence: Synthetic oligonucleotide
  Sense strand starting at position 3322 of SEQ ID NO: 1880511
ucaaauaagagguggugau

SEQ ID NO: 1972697 - RNA, 19 nt, Artificial Sequence
  Description of Artificial Sequence: Synthetic oligonucleotide
  Antisense strand to SEQ ID NO: 1972696
aucaccaccucuuauuuga

SEQ ID NO: 1972698 - RNA, 19 nt, Artificial Sequence
  Description of Artificial Sequence: Synthetic oligonucleotide
  Sense strand starting at position 3419 of SEQ ID NO: 1880511
ugggucuucuccuuaggga

SEQ ID NO: 1972699 - RNA, 19 nt, Artificial Sequence
  Description of Artificial Sequence: Synthetic oligonucleotide
  Antisense strand to SEQ ID NO: 1972698
ucccuaaggagaagaccca

SEQ ID NO: 1972700 - RNA, 19 nt, Artificial Sequence
  Description of Artificial Sequence: Synthetic oligonucleotide
  Sense strand starting at position 3420 of SEQ ID NO: 1880511
gggucuucuccuuagggag

SEQ ID NO: 1972701 - RNA, 19 nt, Artificial Sequence
  Description of Artificial Sequence: Synthetic oligonucleotide
  Antisense strand to SEQ ID NO: 1972700
cucccuaaggagaagaccc

SEQ ID NO: 1972702 - RNA, 19 nt, Artificial Sequence
  Description of Artificial Sequence: Synthetic oligonucleotide
  Sense strand starting at position 3550 of SEQ ID NO: 1880511
cacugaaaccugugauaag

SEQ ID NO: 1972703 - RNA, 19 nt, Artificial Sequence
  Description of Artificial Sequence: Synthetic oligonucleotide
  Antisense strand to SEQ ID NO: 1972702
cuuaucacagguuucagug

SEQ ID NO: 1972704 - RNA, 19 nt, Artificial Sequence
  Description of Artificial Sequence: Synthetic oligonucleotide
  Sense strand starting at position 3584 of SEQ ID NO: 1880511
cacugaugggucugggaug

SEQ ID NO: 1972705 - RNA, 19 nt, Artificial Sequence
  Description of Artificial Sequence: Synthetic oligonucleotide
  Antisense strand to SEQ ID NO: 1972704
caucccagacccaucagug

SEQ ID NO: 1972706 - RNA, 19 nt, Artificial Sequence
  Description of Artificial Sequence: Synthetic oligonucleotide
  Sense strand starting at position 3589 of SEQ ID NO: 1880511
augggucugggaugaaauu

SEQ ID NO: 1972707 - RNA, 19 nt, Artificial Sequence
  Description of Artificial Sequence: Synthetic oligonucleotide
  Antisense strand to SEQ ID NO: 1972706
aauuucaucccagacccau

SEQ ID NO: 1972708 - RNA, 19 nt, Artificial Sequence
  Description of Artificial Sequence: Synthetic oligonucleotide
  Sense strand starting at position 3697 of SEQ ID NO: 1880511
aguuuagauuuguuuagca

SEQ ID NO: 1972709 - RNA, 19 nt, Artificial Sequence
  Description of Artificial Sequence: Synthetic oligonucleotide
  Antisense strand to SEQ ID NO: 1972708
ugcuaaacaaaucuaaacu

SEQ ID NO: 1972710 - RNA, 19 nt, Artificial Sequence
  Description of Artificial Sequence: Synthetic oligonucleotide
  Sense strand starting at position 3859 of SEQ ID NO: 1880511
uauguaggagggugaaaua

SEQ ID NO: 1972711 - RNA, 19 nt, Artificial Sequence
  Description of Artificial Sequence: Synthetic oligonucleotide
  Antisense strand to SEQ ID NO: 1972710
uauuucacccuccuacaua

SEQ ID NO: 1972712 - RNA, 19 nt, Artificial Sequence
  Description of Artificial Sequence: Synthetic oligonucleotide
  Sense strand starting at position 21 of SEQ ID NO: 1880512
ugcugaaaucuguaggcau

SEQ ID NO: 1972713 - RNA, 19 nt, Artificial Sequence
  Description of Artificial Sequence: Synthetic oligonucleotide
  Antisense strand to SEQ ID NO: 1972712
augccuacagauuucagca

SEQ ID NO: 1972714 - RNA, 19 nt, Artificial Sequence
  Description of Artificial Sequence: Synthetic oligonucleotide
  Sense strand starting at position 23 of SEQ ID NO: 1880512
cugaaaucuguaggcauuc

SEQ ID NO: 1972715 - RNA, 19 nt, Artificial Sequence
  Description of Artificial Sequence: Synthetic oligonucleotide
  Antisense strand to SEQ ID NO: 1972714
gaaugccuacagauuucag

SEQ ID NO: 1972716 - RNA, 19 nt, Artificial Sequence
  Description of Artificial Sequence: Synthetic oligonucleotide
  Sense strand starting at position 59 of SEQ ID NO: 1880512
uaugcucagugauugacaa

SEQ ID NO: 1972717 - RNA, 19 nt, Artificial Sequence
  Description of Artificial Sequence: Synthetic oligonucleotide
  Antisense strand to SEQ ID NO: 1972716
uugucaaucacugagcaua

SEQ ID NO: 1972718 - RNA, 19 nt, Artificial Sequence
  Description of Artificial Sequence: Synthetic oligonucleotide
  Sense strand starting at position 66 of SEQ ID NO: 1880512
agugauugacaacgucauc

SEQ ID NO: 1972719 - RNA, 19 nt, Artificial Sequence
  Description of Artificial Sequence: Synthetic oligonucleotide
  Antisense strand to SEQ ID NO: 1972718
gaugacguugucaaucacu

SEQ ID NO: 1972720 - RNA, 19 nt, Artificial Sequence
  Description of Artificial Sequence: Synthetic oligonucleotide
  Sense strand starting at position 71 of SEQ ID NO: 1880512
uugacaacgucaucuccaa

SEQ ID NO: 1972721 - RNA, 19 nt, Artificial Sequence
  Description of Artificial Sequence: Synthetic oligonucleotide
  Antisense strand to SEQ ID NO: 1972720
uuggagaugacguugucaa

SEQ ID NO: 1972722 - RNA, 19 nt, Artificial Sequence
  Description of Artificial Sequence: Synthetic oligonucleotide
  Sense strand starting at position 161 of SEQ ID NO: 1880512
gcagauugccaacaucaua

SEQ ID NO: 1972723 - RNA, 19 nt, Artificial Sequence
  Description of Artificial Sequence: Synthetic oligonucleotide
  Antisense strand to SEQ ID NO: 1972722
uaugauguuggcaaucugc

SEQ ID NO: 1972724 - RNA, 19 nt, Artificial Sequence
  Description of Artificial Sequence: Synthetic oligonucleotide
  Sense strand starting at position 243 of SEQ ID NO: 1880512
cuuuguggcagagaaagua

SEQ ID NO: 1972725 - RNA, 19 nt, Artificial Sequence
  Description of Artificial Sequence: Synthetic oligonucleotide
  Antisense strand to SEQ ID NO: 1972724
uacuuucucugccacaaag

SEQ ID NO: 1972726 - RNA, 19 nt, Artificial Sequence
  Description of Artificial Sequence: Synthetic oligonucleotide
  Sense strand starting at position 335 of SEQ ID NO: 1880512
ggcuaauucuaguuaaagu

SEQ ID NO: 1972727 - RNA, 19 nt, Artificial Sequence
  Description of Artificial Sequence: Synthetic oligonucleotide
  Antisense strand to SEQ ID NO: 1972726
acuuuaacuagaauuagcc

SEQ ID NO: 1972728 - RNA, 19 nt, Artificial Sequence
  Description of Artificial Sequence: Synthetic oligonucleotide
  Sense strand starting at position 413 of SEQ ID NO: 1880512
uugggagucaugcauuaaa

SEQ ID NO: 1972729 - RNA, 19 nt, Artificial Sequence
  Description of Artificial Sequence: Synthetic oligonucleotide
  Antisense strand to SEQ ID NO: 1972728
uuuaaugcaugacucccaa

SEQ ID NO: 1972730 - RNA, 19 nt, Artificial Sequence
  Description of Artificial Sequence: Synthetic oligonucleotide
  Sense strand starting at position 512 of SEQ ID NO: 1880512
gauggucuugccuaagaaa

SEQ ID NO: 1972731 - RNA, 19 nt, Artificial Sequence
  Description of Artificial Sequence: Synthetic oligonucleotide
  Antisense strand to SEQ ID NO: 1972730
uuucuuaggcaagaccauc

SEQ ID NO: 1972732 - RNA, 19 nt, Artificial Sequence
  Description of Artificial Sequence: Synthetic oligonucleotide
  Sense strand starting at position 538 of SEQ ID NO: 1880512
uuguuauacuagccaauga

SEQ ID NO: 1972733 - RNA, 19 nt, Artificial Sequence
  Description of Artificial Sequence: Synthetic oligonucleotide
  Antisense strand to SEQ ID NO: 1972732
ucauuggcuaguauaacaa

SEQ ID NO: 1972734 - RNA, 19 nt, Artificial Sequence
  Description of Artificial Sequence: Synthetic oligonucleotide
  Sense strand starting at position 586 of SEQ ID NO: 1880512
aguguuaauuaucccaaag

SEQ ID NO: 1972735 - RNA, 19 nt, Artificial Sequence
  Description of Artificial Sequence: Synthetic oligonucleotide
  Antisense strand to SEQ ID NO: 1972734
cuuugggauaauuaacacu

SEQ ID NO: 1972736 - RNA, 19 nt, Artificial Sequence
  Description of Artificial Sequence: Synthetic oligonucleotide
  Sense strand starting at position 727 of SEQ ID NO: 1880512
guuaauuaagucuaucacu

SEQ ID NO: 1972737 - RNA, 19 nt, Artificial Sequence
  Description of Artificial Sequence: Synthetic oligonucleotide
  Antisense strand to SEQ ID NO: 1972736
agugauagacuuaauuaac

SEQ ID NO: 1972738 - RNA, 19 nt, Artificial Sequence
  Description of Artificial Sequence: Synthetic oligonucleotide
  Sense strand starting at position 844 of SEQ ID NO: 1880512
ugucaugauuaccucuuua

SEQ ID NO: 1972739 - RNA, 19 nt, Artificial Sequence
  Description of Artificial Sequence: Synthetic oligonucleotide
  Antisense strand to SEQ ID NO: 1972738
uaaagagguaaucaugaca

SEQ ID NO: 1972740 - RNA, 19 nt, Artificial Sequence
  Description of Artificial Sequence: Synthetic oligonucleotide
  Sense strand starting at position 868 of SEQ ID NO: 1880512
guacucuacaugggaagau

SEQ ID NO: 1972741 - RNA, 19 nt, Artificial Sequence
  Description of Artificial Sequence: Synthetic oligonucleotide
  Antisense strand to SEQ ID NO: 1972740
aucuucccauguagaguac

SEQ ID NO: 1972742 - RNA, 19 nt, Artificial Sequence
  Description of Artificial Sequence: Synthetic oligonucleotide
  Sense strand starting at position 903 of SEQ ID NO: 1880512
uuaguauguuuacuccaca

SEQ ID NO: 1972743 - RNA, 19 nt, Artificial Sequence
  Description of Artificial Sequence: Synthetic oligonucleotide
  Antisense strand to SEQ ID NO: 1972742
uguggaguaaacauacuaa

SEQ ID NO: 1972744 - RNA, 19 nt, Artificial Sequence
  Description of Artificial Sequence: Synthetic oligonucleotide
  Sense strand starting at position 1212 of SEQ ID NO: 1880512
aguauucuccuccacaugu

SEQ ID NO: 1972745 - RNA, 19 nt, Artificial Sequence
  Description of Artificial Sequence: Synthetic oligonucleotide
  Antisense strand to SEQ ID NO: 1972744
acauguggaggagaauacu

SEQ ID NO: 1972746 - RNA, 19 nt, Artificial Sequence
  Description of Artificial Sequence: Synthetic oligonucleotide
  Sense strand starting at position 1406 of SEQ ID NO: 1880512
ggcaaagacuguucuaugu

SEQ ID NO: 1972747 - RNA, 19 nt, Artificial Sequence
  Description of Artificial Sequence: Synthetic oligonucleotide
  Antisense strand to SEQ ID NO: 1972746
acauagaacagucuuugcc

SEQ ID NO: 1972748 - RNA, 19 nt, Artificial Sequence
  Description of Artificial Sequence: Synthetic oligonucleotide
  Sense strand starting at position 1414 of SEQ ID NO: 1880512
cuguucuauguauauacau

SEQ ID NO: 1972749 - RNA, 19 nt, Artificial Sequence
  Description of Artificial Sequence: Synthetic oligonucleotide
  Antisense strand to SEQ ID NO: 1972748
auguauauacauagaacag

SEQ ID NO: 1972750 - RNA, 19 nt, Artificial Sequence
  Description of Artificial Sequence: Synthetic oligonucleotide
  Sense strand starting at position 1605 of SEQ ID NO: 1880512
auaugacuagucuagcaca

SEQ ID NO: 1972751 - RNA, 19 nt, Artificial Sequence
  Description of Artificial Sequence: Synthetic oligonucleotide
  Antisense strand to SEQ ID NO: 1972750
ugugcuagacuagucauau

SEQ ID NO: 1972752 - RNA, 19 nt, Artificial Sequence
  Description of Artificial Sequence: Synthetic oligonucleotide
  Sense strand starting at position 1703 of SEQ ID NO: 1880512
guggucuaauaacuccauu

SEQ ID NO: 1972753 - RNA, 19 nt, Artificial Sequence
  Description of Artificial Sequence: Synthetic oligonucleotide
  Antisense strand to SEQ ID NO: 1972752
aauggaguuauuagaccac

SEQ ID NO: 1972754 - RNA, 19 nt, Artificial Sequence
  Description of Artificial Sequence: Synthetic oligonucleotide
  Sense strand starting at position 1773 of SEQ ID NO: 1880512
gagaauuugcaaggugugu

SEQ ID NO: 1972755 - RNA, 19 nt, Artificial Sequence
  Description of Artificial Sequence: Synthetic oligonucleotide
  Antisense strand to SEQ ID NO: 1972754
acacaccuugcaaauucuc

SEQ ID NO: 1972756 - RNA, 19 nt, Artificial Sequence
  Description of Artificial Sequence: Synthetic oligonucleotide
  Sense strand starting at position 1775 of SEQ ID NO: 1880512
gaauuugcaagguguguga

SEQ ID NO: 1972757 - RNA, 19 nt, Artificial Sequence
  Description of Artificial Sequence: Synthetic oligonucleotide
  Antisense strand to SEQ ID NO: 1972756
ucacacaccuugcaaauuc

SEQ ID NO: 1972758 - RNA, 19 nt, Artificial Sequence
  Description of Artificial Sequence: Synthetic oligonucleotide
  Sense strand starting at position 1777 of SEQ ID NO: 1880512
auuugcaaggugugugauu

SEQ ID NO: 1972759 - RNA, 19 nt, Artificial Sequence
  Description of Artificial Sequence: Synthetic oligonucleotide
  Antisense strand to SEQ ID NO: 1972758
aaucacacaccuugcaaau

SEQ ID NO: 1972760 - RNA, 19 nt, Artificial Sequence
  Description of Artificial Sequence: Synthetic oligonucleotide
  Sense strand starting at position 1778 of SEQ ID NO: 1880512
uuugcaaggugugugauuu

SEQ ID NO: 1972761 - RNA, 19 nt, Artificial Sequence
  Description of Artificial Sequence: Synthetic oligonucleotide
  Antisense strand to SEQ ID NO: 1972760
aaaucacacaccuugcaaa

SEQ ID NO: 1972762 - RNA, 19 nt, Artificial Sequence
  Description of Artificial Sequence: Synthetic oligonucleotide
  Sense strand starting at position 1984 of SEQ ID NO: 1880512
ggaugucauucugccauuu

SEQ ID NO: 1972763 - RNA, 19 nt, Artificial Sequence
  Description of Artificial Sequence: Synthetic oligonucleotide
  Antisense strand to SEQ ID NO: 1972762
aaauggcagaaugacaucc

SEQ ID NO: 1972764 - RNA, 19 nt, Artificial Sequence
  Description of Artificial Sequence: Synthetic oligonucleotide
  Sense strand starting at position 1995 of SEQ ID NO: 1880512
ugccauuucucucuuccga

SEQ ID NO: 1972765 - RNA, 19 nt, Artificial Sequence
  Description of Artificial Sequence: Synthetic oligonucleotide
  Antisense strand to SEQ ID NO: 1972764
ucggaagagagaaauggca

SEQ ID NO: 1972766 - RNA, 19 nt, Artificial Sequence
  Description of Artificial Sequence: Synthetic oligonucleotide
  Sense strand starting at position 2014 of SEQ ID NO: 1880512
cagcaaggucgauagaaca

SEQ ID NO: 1972767 - RNA, 19 nt, Artificial Sequence
  Description of Artificial Sequence: Synthetic oligonucleotide
  Antisense strand to SEQ ID NO: 1972766
uguucuaucgaccuugcug

SEQ ID NO: 1972768 - RNA, 19 nt, Artificial Sequence
  Description of Artificial Sequence: Synthetic oligonucleotide
  Sense strand starting at position 2180 of SEQ ID NO: 1880512
ggcucugugaccugagaag

SEQ ID NO: 1972769 - RNA, 19 nt, Artificial Sequence
  Description of Artificial Sequence: Synthetic oligonucleotide
  Antisense strand to SEQ ID NO: 1972768
cuucucaggucacagagcc

SEQ ID NO: 1972770 - RNA, 19 nt, Artificial Sequence
  Description of Artificial Sequence: Synthetic oligonucleotide
  Sense strand starting at position 2283 of SEQ ID NO: 1880512
ccauuauuauggcccgaca

SEQ ID NO: 1972771 - RNA, 19 nt, Artificial Sequence
  Description of Artificial Sequence: Synthetic oligonucleotide
  Antisense strand to SEQ ID NO: 1972770
ugucgggccauaauaaugg

SEQ ID NO: 1972772 - RNA, 19 nt, Artificial Sequence
  Description of Artificial Sequence: Synthetic oligonucleotide
  Sense strand starting at position 2285 of SEQ ID NO: 1880512
auuauuauggcccgacaca

SEQ ID NO: 1972773 - RNA, 19 nt, Artificial Sequence
  Description of Artificial Sequence: Synthetic oligonucleotide
  Antisense strand to SEQ ID NO: 1972772
ugugucgggccauaauaau

SEQ ID NO: 1972774 - RNA, 19 nt, Artificial Sequence
  Description of Artificial Sequence: Synthetic oligonucleotide
  Sense strand starting at position 2395 of SEQ ID NO: 1880512
cggguucagggcugggaaa

SEQ ID NO: 1972775 - RNA, 19 nt, Artificial Sequence
  Description of Artificial Sequence: Synthetic oligonucleotide
  Antisense strand to SEQ ID NO: 1972774
uuucccagcccugaacccg

SEQ ID NO: 1972776 - RNA, 19 nt, Artificial Sequence
  Description of Artificial Sequence: Synthetic oligonucleotide
  Sense strand starting at position 2429 of SEQ ID NO: 1880512
caggucuccaggcggaaua

SEQ ID NO: 1972777 - RNA, 19 nt, Artificial Sequence
  Description of Artificial Sequence: Synthetic oligonucleotide
  Antisense strand to SEQ ID NO: 1972776
uauuccgccuggagaccug

SEQ ID NO: 1972778 - RNA, 19 nt, Artificial Sequence
  Description of Artificial Sequence: Synthetic oligonucleotide
  Sense strand starting at position 2670 of SEQ ID NO: 1880512
acugucuuccugcauagaa

SEQ ID NO: 1972779 - RNA, 19 nt, Artificial Sequence
  Description of Artificial Sequence: Synthetic oligonucleotide
  Antisense strand to SEQ ID NO: 1972778
uucuaugcaggaagacagu

SEQ ID NO: 1972780 - RNA, 19 nt, Artificial Sequence
  Description of Artificial Sequence: Synthetic oligonucleotide
  Sense strand starting at position 2672 of SEQ ID NO: 1880512
ugucuuccugcauagaaga

SEQ ID NO: 1972781 - RNA, 19 nt, Artificial Sequence
  Description of Artificial Sequence: Synthetic oligonucleotide
  Antisense strand to SEQ ID NO: 1972780
ucuucuaugcaggaagaca

SEQ ID NO: 1972782 - RNA, 19 nt, Artificial Sequence
  Description of Artificial Sequence: Synthetic oligonucleotide
  Sense strand starting at position 3261 of SEQ ID NO: 1880512
ucaauuagugcuugauauc

SEQ ID NO: 1972783 - RNA, 19 nt, Artificial Sequence
  Description of Artificial Sequence: Synthetic oligonucleotide
  Antisense strand to SEQ ID NO: 1972782
gauaucaagcacuaauuga

SEQ ID NO: 1972784 - RNA, 19 nt, Artificial Sequence
  Description of Artificial Sequence: Synthetic oligonucleotide
  Sense strand starting at position 3377 of SEQ ID NO: 1880512
uguaaaugugcugcugcua

SEQ ID NO: 1972785 - RNA, 19 nt, Artificial Sequence
  Description of Artificial Sequence: Synthetic oligonucleotide
  Antisense strand to SEQ ID NO: 1972784
uagcagcagcacauuuaca

SEQ ID NO: 1972786 - RNA, 19 nt, Artificial Sequence
  Description of Artificial Sequence: Synthetic oligonucleotide
  Sense strand starting at position 3378 of SEQ ID NO: 1880512
guaaaugugcugcugcuaa

SEQ ID NO: 1972787 - RNA, 19 nt, Artificial Sequence
  Description of Artificial Sequence: Synthetic oligonucleotide
  Antisense strand to SEQ ID NO: 1972786
uuagcagcagcacauuuac

SEQ ID NO: 1972788 - RNA, 19 nt, Artificial Sequence
  Description of Artificial Sequence: Synthetic oligonucleotide
  Sense strand starting at position 3403 of SEQ ID NO: 1880512
ggaaaucugucauuauuaa

SEQ ID NO: 1972789 - RNA, 19 nt, Artificial Sequence
  Description of Artificial Sequence: Synthetic oligonucleotide
  Antisense strand to SEQ ID NO: 1972788
uuaauaaugacagauuucc

SEQ ID NO: 1972790 - RNA, 19 nt, Artificial Sequence
  Description of Artificial Sequence: Synthetic oligonucleotide
  Sense strand starting at position 3767 of SEQ ID NO: 1880512
gugagcugaucccuaccua

SEQ ID NO: 1972791 - RNA, 19 nt, Artificial Sequence
  Description of Artificial Sequence: Synthetic oligonucleotide
  Antisense strand to SEQ ID NO: 1972790
uagguagggaucagcucac

SEQ ID NO: 1972792 - RNA, 19 nt, Artificial Sequence
  Description of Artificial Sequence: Synthetic oligonucleotide
  Sense strand starting at position 1108 of SEQ ID NO: 1880513
cguugucacccauggucuu

SEQ ID NO: 1972793 - RNA, 19 nt, Artificial Sequence
  Description of Artificial Sequence: Synthetic oligonucleotide
  Antisense strand to SEQ ID NO: 1972792
aagaccaugggugacaacg

SEQ ID NO: 1972794 - RNA, 19 nt, Artificial Sequence
  Description of Artificial Sequence: Synthetic oligonucleotide
  Sense strand starting at position 1140 of SEQ ID NO: 1880513
ggcccaucauauuguaauu

SEQ ID NO: 1972795 - RNA, 19 nt, Artificial Sequence
  Description of Artificial Sequence: Synthetic oligonucleotide
  Antisense strand to SEQ ID NO: 1972794
aauuacaauaugaugggcc

SEQ ID NO: 1972796 - RNA, 19 nt, Artificial Sequence
  Description of Artificial Sequence: Synthetic oligonucleotide
  Sense strand starting at position 1231 of SEQ ID NO: 1880513
cuucuuguccagugcaaga

SEQ ID NO: 1972797 - RNA, 19 nt, Artificial Sequence
  Description of Artificial Sequence: Synthetic oligonucleotide
  Antisense strand to SEQ ID NO: 1972796
ucuugcacuggacaagaag

SEQ ID NO: 1972798 - RNA, 19 nt, Artificial Sequence
  Description of Artificial Sequence: Synthetic oligonucleotide
  Sense strand starting at position 1485 of SEQ ID NO: 1880513
gcgccucacugagugagaa

SEQ ID NO: 1972799 - RNA, 19 nt, Artificial Sequence
  Description of Artificial Sequence: Synthetic oligonucleotide
  Antisense strand to SEQ ID NO: 1972798
uucucacucagugaggcgc

SEQ ID NO: 1972800 - RNA, 19 nt, Artificial Sequence
  Description of Artificial Sequence: Synthetic oligonucleotide
  Sense strand starting at position 1486 of SEQ ID NO: 1880513
cgccucacugagugagaau

SEQ ID NO: 1972801 - RNA, 19 nt, Artificial Sequence
  Description of Artificial Sequence: Synthetic oligonucleotide
  Antisense strand to SEQ ID NO: 1972800
auucucacucagugaggcg

SEQ ID NO: 1972802 - RNA, 19 nt, Artificial Sequence
  Description of Artificial Sequence: Synthetic oligonucleotide
  Sense strand starting at position 3368 of SEQ ID NO: 1880513
agaguuugauaccugcgua

SEQ ID NO: 1972803 - RNA, 19 nt, Artificial Sequence
  Description of Artificial Sequence: Synthetic oligonucleotide
  Antisense strand to SEQ ID NO: 1972802
uacgcagguaucaaacucu

SEQ ID NO: 1972804 - RNA, 19 nt, Artificial Sequence
  Description of Artificial Sequence: Synthetic oligonucleotide
  Sense strand starting at position 3369 of SEQ ID NO: 1880513
gaguuugauaccugcguag

SEQ ID NO: 1972805 - RNA, 19 nt, Artificial Sequence
  Description of Artificial Sequence: Synthetic oligonucleotide
  Antisense strand to SEQ ID NO: 1972804
cuacgcagguaucaaacuc

SEQ ID NO: 1972806 - RNA, 19 nt, Artificial Sequence
  Description of Artificial Sequence: Synthetic oligonucleotide
  Sense strand starting at position 3927 of SEQ ID NO: 1880513
uuugaaugagcucgaaagu

SEQ ID NO: 1972807 - RNA, 19 nt, Artificial Sequence
  Description of Artificial Sequence: Synthetic oligonucleotide
  Antisense strand to SEQ ID NO: 1972806
acuuucgagcucauucaaa

SEQ ID NO: 1972808 - RNA, 19 nt, Artificial Sequence
  Description of Artificial Sequence: Synthetic oligonucleotide
  Sense strand starting at position 28 of SEQ ID NO: 1880514
acuugugccuuucuaauga

SEQ ID NO: 1972809 - RNA, 19 nt, Artificial Sequence
  Description of Artificial Sequence: Synthetic oligonucleotide
  Antisense strand to SEQ ID NO: 1972808
ucauuagaaaggcacaagu

SEQ ID NO: 1972810 - RNA, 19 nt, Artificial Sequence
  Description of Artificial Sequence: Synthetic oligonucleotide
  Sense strand starting at position 98 of SEQ ID NO: 1880514
agaaaugacagcugugaga

SEQ ID NO: 1972811 - RNA, 19 nt, Artificial Sequence
  Description of Artificial Sequence: Synthetic oligonucleotide
  Antisense strand to SEQ ID NO: 1972810
ucucacagcugucauuucu

SEQ ID NO: 1972812 - RNA, 19 nt, Artificial Sequence
  Description of Artificial Sequence: Synthetic oligonucleotide
  Sense strand starting at position 100 of SEQ ID NO: 1880514
aaaugacagcugugagaga

SEQ ID NO: 1972813 - RNA, 19 nt, Artificial Sequence
  Description of Artificial Sequence: Synthetic oligonucleotide
  Antisense strand to SEQ ID NO: 1972812
ucucucacagcugucauuu

SEQ ID NO: 1972814 - RNA, 19 nt, Artificial Sequence
  Description of Artificial Sequence: Synthetic oligonucleotide
  Sense strand starting at position 134 of SEQ ID NO: 1880514
ucagaaauguuggccuaga

SEQ ID NO: 1972815 - RNA, 19 nt, Artificial Sequence
  Description of Artificial Sequence: Synthetic oligonucleotide
  Antisense strand to SEQ ID NO: 1972814
ucuaggccaacauuucuga

SEQ ID NO: 1972816 - RNA, 19 nt, Artificial Sequence
  Description of Artificial Sequence: Synthetic oligonucleotide
  Sense strand starting at position 135 of SEQ ID NO: 1880514
cagaaauguuggccuagau

SEQ ID NO: 1972817 - RNA, 19 nt, Artificial Sequence
  Description of Artificial Sequence: Synthetic oligonucleotide
  Antisense strand to SEQ ID NO: 1972816
aucuaggccaacauuucug

SEQ ID NO: 1972818 - RNA, 19 nt, Artificial Sequence
  Description of Artificial Sequence: Synthetic oligonucleotide
  Sense strand starting at position 284 of SEQ ID NO: 1880514
cuagcugauguagaguaua

SEQ ID NO: 1972819 - RNA, 19 nt, Artificial Sequence
  Description of Artificial Sequence: Synthetic oligonucleotide
  Antisense strand to SEQ ID NO: 1972818
uauacucuacaucagcuag

SEQ ID NO: 1972820 - RNA, 19 nt, Artificial Sequence
  Description of Artificial Sequence: Synthetic oligonucleotide
  Sense strand starting at position 287 of SEQ ID NO: 1880514
gcugauguagaguauaugu

SEQ ID NO: 1972821 - RNA, 19 nt, Artificial Sequence
  Description of Artificial Sequence: Synthetic oligonucleotide
  Antisense strand to SEQ ID NO: 1972820
acauauacucuacaucagc

SEQ ID NO: 1972822 - RNA, 19 nt, Artificial Sequence
  Description of Artificial Sequence: Synthetic oligonucleotide
  Sense strand starting at position 289 of SEQ ID NO: 1880514
ugauguagaguauauguga

SEQ ID NO: 1972823 - RNA, 19 nt, Artificial Sequence
  Description of Artificial Sequence: Synthetic oligonucleotide
  Antisense strand to SEQ ID NO: 1972822
ucacauauacucuacauca

SEQ ID NO: 1972824 - RNA, 19 nt, Artificial Sequence
  Description of Artificial Sequence: Synthetic oligonucleotide
  Sense strand starting at position 292 of SEQ ID NO: 1880514
uguagaguauaugugaauu

SEQ ID NO: 1972825 - RNA, 19 nt, Artificial Sequence
  Description of Artificial Sequence: Synthetic oligonucleotide
  Antisense strand to SEQ ID NO: 1972824
aauucacauauacucuaca

SEQ ID NO: 1972826 - RNA, 19 nt, Artificial Sequence
  Description of Artificial Sequence: Synthetic oligonucleotide
  Sense strand starting at position 311 of SEQ ID NO: 1880514
uuccuuagguaacuguaua

SEQ ID NO: 1972827 - RNA, 19 nt, Artificial Sequence
  Description of Artificial Sequence: Synthetic oligonucleotide
  Antisense strand to SEQ ID NO: 1972826
uauacaguuaccuaaggaa

SEQ ID NO: 1972828 - RNA, 19 nt, Artificial Sequence
  Description of Artificial Sequence: Synthetic oligonucleotide
  Sense strand starting at position 464 of SEQ ID NO: 1880514
gggagagaaucagaagaaa

SEQ ID NO: 1972829 - RNA, 19 nt, Artificial Sequence
  Description of Artificial Sequence: Synthetic oligonucleotide
  Antisense strand to SEQ ID NO: 1972828
uuucuucugauucucuccc

SEQ ID NO: 1972830 - RNA, 19 nt, Artificial Sequence
  Description of Artificial Sequence: Synthetic oligonucleotide
  Sense strand starting at position 674 of SEQ ID NO: 1880514
gccauuacagaacauugua

SEQ ID NO: 1972831 - RNA, 19 nt, Artificial Sequence
  Description of Artificial Sequence: Synthetic oligonucleotide
  Antisense strand to SEQ ID NO: 1972830
uacaauguucuguaauggc

SEQ ID NO: 1972832 - RNA, 19 nt, Artificial Sequence
  Description of Artificial Sequence: Synthetic oligonucleotide
  Sense strand starting at position 682 of SEQ ID NO: 1880514
agaacauuguaguuauaag

SEQ ID NO: 1972833 - RNA, 19 nt, Artificial Sequence
  Description of Artificial Sequence: Synthetic oligonucleotide
  Antisense strand to SEQ ID NO: 1972832
cuuauaacuacaauguucu

SEQ ID NO: 1972834 - RNA, 19 nt, Artificial Sequence
  Description of Artificial Sequence: Synthetic oligonucleotide
  Sense strand starting at position 719 of SEQ ID NO: 1880514
uuuaaauccguagaucauc

SEQ ID NO: 1972835 - RNA, 19 nt, Artificial Sequence
  Description of Artificial Sequence: Synthetic oligonucleotide
  Antisense strand to SEQ ID NO: 1972834
gaugaucuacggauuuaaa

SEQ ID NO: 1972836 - RNA, 19 nt, Artificial Sequence
  Description of Artificial Sequence: Synthetic oligonucleotide
  Sense strand starting at position 775 of SEQ ID NO: 1880514
gucuaauuccaaggucaca

SEQ ID NO: 1972837 - RNA, 19 nt, Artificial Sequence
  Description of Artificial Sequence: Synthetic oligonucleotide
  Antisense strand to SEQ ID NO: 1972836
ugugaccuuggaauuagac

SEQ ID NO: 1972838 - RNA, 19 nt, Artificial Sequence
  Description of Artificial Sequence: Synthetic oligonucleotide
  Sense strand starting at position 1234 of SEQ ID NO: 1880514
agauucuuaccaugagguc

SEQ ID NO: 1972839 - RNA, 19 nt, Artificial Sequence
  Description of Artificial Sequence: Synthetic oligonucleotide
  Antisense strand to SEQ ID NO: 1972838
gaccucaugguaagaaucu

SEQ ID NO: 1972840 - RNA, 19 nt, Artificial Sequence
  Description of Artificial Sequence: Synthetic oligonucleotide
  Sense strand starting at position 1302 of SEQ ID NO: 1880514
agcugcauucucugaauac

SEQ ID NO: 1972841 - RNA, 19 nt, Artificial Sequence
  Description of Artificial Sequence: Synthetic oligonucleotide
  Antisense strand to SEQ ID NO: 1972840
guauucagagaaugcagcu

SEQ ID NO: 1972842 - RNA, 19 nt, Artificial Sequence
  Description of Artificial Sequence: Synthetic oligonucleotide
  Sense strand starting at position 1397 of SEQ ID NO: 1880514
guauaaggcuguccuacaa

SEQ ID NO: 1972843 - RNA, 19 nt, Artificial Sequence
  Description of Artificial Sequence: Synthetic oligonucleotide
  Antisense strand to SEQ ID NO: 1972842
uuguaggacagccuuauac

SEQ ID NO: 1972844 - RNA, 19 nt, Artificial Sequence
  Description of Artificial Sequence: Synthetic oligonucleotide
  Sense strand starting at position 1465 of SEQ ID NO: 1880514
guacucucauugcuagaau

SEQ ID NO: 1972845 - RNA, 19 nt, Artificial Sequence
  Description of Artificial Sequence: Synthetic oligonucleotide
  Antisense strand to SEQ ID NO: 1972844
auucuagcaaugagaguac

SEQ ID NO: 1972846 - RNA, 19 nt, Artificial Sequence
  Description of Artificial Sequence: Synthetic oligonucleotide
  Sense strand starting at position 1518 of SEQ ID NO: 1880514
aggcuaaucugaucauguc

SEQ ID NO: 1972847 - RNA, 19 nt, Artificial Sequence
  Description of Artificial Sequence: Synthetic oligonucleotide
  Antisense strand to SEQ ID NO: 1972846
gacaugaucagauuagccu

SEQ ID NO: 1972848 - RNA, 19 nt, Artificial Sequence
  Description of Artificial Sequence: Synthetic oligonucleotide
  Sense strand starting at position 1764 of SEQ ID NO: 1880514
uggugaguuacucagccuu

SEQ ID NO: 1972849 - RNA, 19 nt, Artificial Sequence
  Description of Artificial Sequence: Synthetic oligonucleotide
  Antisense strand to SEQ ID NO: 1972848
aaggcugaguaacucacca

SEQ ID NO: 1972850 - RNA, 19 nt, Artificial Sequence
  Description of Artificial Sequence: Synthetic oligonucleotide
  Sense strand starting at position 1817 of SEQ ID NO: 1880514
agaaauggaucugacuuaa

SEQ ID NO: 1972851 - RNA, 19 nt, Artificial Sequence
  Description of Artificial Sequence: Synthetic oligonucleotide
  Antisense strand to SEQ ID NO: 1972850
uuaagucagauccauuucu

SEQ ID NO: 1972852 - RNA, 19 nt, Artificial Sequence
  Description of Artificial Sequence: Synthetic oligonucleotide
  Sense strand starting at position 1827 of SEQ ID NO: 1880514
cugacuuaaugcuuuagac

SEQ ID NO: 1972853 - RNA, 19 nt, Artificial Sequence
  Description of Artificial Sequence: Synthetic oligonucleotide
  Antisense strand to SEQ ID NO: 1972852
gucuaaagcauuaagucag

SEQ ID NO: 1972854 - RNA, 19 nt, Artificial Sequence
  Description of Artificial Sequence: Synthetic oligonucleotide
  Sense strand starting at position 1834 of SEQ ID NO: 1880514
aaugcuuuagacugaaagu

SEQ ID NO: 1972855 - RNA, 19 nt, Artificial Sequence
  Description of Artificial Sequence: Synthetic oligonucleotide
  Antisense strand to SEQ ID NO: 1972854
acuuucagucuaaagcauu

SEQ ID NO: 1972856 - RNA, 19 nt, Artificial Sequence
  Description of Artificial Sequence: Synthetic oligonucleotide
  Sense strand starting at position 2000 of SEQ ID NO: 1880514
cauuuagcaucugcgucau

SEQ ID NO: 1972857 - RNA, 19 nt, Artificial Sequence
  Description of Artificial Sequence: Synthetic oligonucleotide
  Antisense strand to SEQ ID NO: 1972856
augacgcagaugcuaaaug

SEQ ID NO: 1972858 - RNA, 19 nt, Artificial Sequence
  Description of Artificial Sequence: Synthetic oligonucleotide
  Sense strand starting at position 2106 of SEQ ID NO: 1880514
gcagucuuagccuauaaca

SEQ ID NO: 1972859 - RNA, 19 nt, Artificial Sequence
  Description of Artificial Sequence: Synthetic oligonucleotide
  Antisense strand to SEQ ID NO: 1972858
uguuauaggcuaagacugc

SEQ ID NO: 1972860 - RNA, 19 nt, Artificial Sequence
  Description of Artificial Sequence: Synthetic oligonucleotide
  Sense strand starting at position 2123 of SEQ ID NO: 1880514
cacaauuguguccagagca

SEQ ID NO: 1972861 - RNA, 19 nt, Artificial Sequence
  Description of Artificial Sequence: Synthetic oligonucleotide
  Antisense strand to SEQ ID NO: 1972860
ugcucuggacacaauugug

SEQ ID NO: 1972862 - RNA, 19 nt, Artificial Sequence
  Description of Artificial Sequence: Synthetic oligonucleotide
  Sense strand starting at position 2181 of SEQ ID NO: 1880514
cauucuugagugugaccuu

SEQ ID NO: 1972863 - RNA, 19 nt, Artificial Sequence
  Description of Artificial Sequence: Synthetic oligonucleotide
  Antisense strand to SEQ ID NO: 1972862
aaggucacacucaagaaug

SEQ ID NO: 1972864 - RNA, 19 nt, Artificial Sequence
  Description of Artificial Sequence: Synthetic oligonucleotide
  Sense strand starting at position 2198 of SEQ ID NO: 1880514
uuugguguuauagggaaau

SEQ ID NO: 1972865 - RNA, 19 nt, Artificial Sequence
  Description of Artificial Sequence: Synthetic oligonucleotide
  Antisense strand to SEQ ID NO: 1972864
auuucccuauaacaccaaa

SEQ ID NO: 1972866 - RNA, 19 nt, Artificial Sequence
  Description of Artificial Sequence: Synthetic oligonucleotide
  Sense strand starting at position 2338 of SEQ ID NO: 1880514
guaagagaacuguaagguu

SEQ ID NO: 1972867 - RNA, 19 nt, Artificial Sequence
  Description of Artificial Sequence: Synthetic oligonucleotide
  Antisense strand to SEQ ID NO: 1972866
aaccuuacaguucucuuac

SEQ ID NO: 1972868 - RNA, 19 nt, Artificial Sequence
  Description of Artificial Sequence: Synthetic oligonucleotide
  Sense strand starting at position 2576 of SEQ ID NO: 1880514
cagguuugucuugaucucu

SEQ ID NO: 1972869 - RNA, 19 nt, Artificial Sequence
  Description of Artificial Sequence: Synthetic oligonucleotide
  Antisense strand to SEQ ID NO: 1972868
agagaucaagacaaaccug

SEQ ID NO: 1972870 - RNA, 19 nt, Artificial Sequence
  Description of Artificial Sequence: Synthetic oligonucleotide
  Sense strand starting at position 2961 of SEQ ID NO: 1880514
cccggcugacuauaagaaa

SEQ ID NO: 1972871 - RNA, 19 nt, Artificial Sequence
  Description of Artificial Sequence: Synthetic oligonucleotide
  Antisense strand to SEQ ID NO: 1972870
uuucuuauagucagccggg

SEQ ID NO: 1972872 - RNA, 19 nt, Artificial Sequence
  Description of Artificial Sequence: Synthetic oligonucleotide
  Sense strand starting at position 2964 of SEQ ID NO: 1880514
ggcugacuauaagaaauuu

SEQ ID NO: 1972873 - RNA, 19 nt, Artificial Sequence
  Description of Artificial Sequence: Synthetic oligonucleotide
  Antisense strand to SEQ ID NO: 1972872
aaauuucuuauagucagcc

SEQ ID NO: 1972874 - RNA, 19 nt, Artificial Sequence
  Description of Artificial Sequence: Synthetic oligonucleotide
  Sense strand starting at position 3016 of SEQ ID NO: 1880514
guuuauaauccauggaauu

SEQ ID NO: 1972875 - RNA, 19 nt, Artificial Sequence
  Description of Artificial Sequence: Synthetic oligonucleotide
  Antisense strand to SEQ ID NO: 1972874
aauuccauggauuauaaac

SEQ ID NO: 1972876 - RNA, 19 nt, Artificial Sequence
  Description of Artificial Sequence: Synthetic oligonucleotide
  Sense strand starting at position 3038 of SEQ ID NO: 1880514
ccugucuugggaggcaauu

SEQ ID NO: 1972877 - RNA, 19 nt, Artificial Sequence
  Description of Artificial Sequence: Synthetic oligonucleotide
  Antisense strand to SEQ ID NO: 1972876
aauugccucccaagacagg

SEQ ID NO: 1972878 - RNA, 19 nt, Artificial Sequence
  Description of Artificial Sequence: Synthetic oligonucleotide
  Sense strand starting at position 3100 of SEQ ID NO: 1880514
cuuugugauaaugaggagu

SEQ ID NO: 1972879 - RNA, 19 nt, Artificial Sequence
  Description of Artificial Sequence: Synthetic oligonucleotide
  Antisense strand to SEQ ID NO: 1972878
acuccucauuaucacaaag

SEQ ID NO: 1972880 - RNA, 19 nt, Artificial Sequence
  Description of Artificial Sequence: Synthetic oligonucleotide
  Sense strand starting at position 3111 of SEQ ID NO: 1880514
ugaggaguugaaugucaca

SEQ ID NO: 1972881 - RNA, 19 nt, Artificial Sequence
  Description of Artificial Sequence: Synthetic oligonucleotide
  Antisense strand to SEQ ID NO: 1972880
ugugacauucaacuccuca

SEQ ID NO: 1972882 - RNA, 19 nt, Artificial Sequence
  Description of Artificial Sequence: Synthetic oligonucleotide
  Sense strand starting at position 3165 of SEQ ID NO: 1880514
agcauacuucuaggaaucu

SEQ ID NO: 1972883 - RNA, 19 nt, Artificial Sequence
  Description of Artificial Sequence: Synthetic oligonucleotide
  Antisense strand to SEQ ID NO: 1972882
agauuccuagaaguaugcu

SEQ ID NO: 1972884 - RNA, 19 nt, Artificial Sequence
  Description of Artificial Sequence: Synthetic oligonucleotide
  Sense strand starting at position 3704 of SEQ ID NO: 1880514
guggucucgucccuuauuu

SEQ ID NO: 1972885 - RNA, 19 nt, Artificial Sequence
  Description of Artificial Sequence: Synthetic oligonucleotide
  Antisense strand to SEQ ID NO: 1972884
aaauaagggacgagaccac

SEQ ID NO: 1972886 - RNA, 19 nt, Artificial Sequence
  Description of Artificial Sequence: Synthetic oligonucleotide
  Sense strand starting at position 3903 of SEQ ID NO: 1880514
gcaguaagcacguuccuau

SEQ ID NO: 1972887 - RNA, 19 nt, Artificial Sequence
  Description of Artificial Sequence: Synthetic oligonucleotide
  Antisense strand to SEQ ID NO: 1972886
auaggaacgugcuuacugc

SEQ ID NO: 1972888 - RNA, 19 nt, Artificial Sequence
  Description of Artificial Sequence: Synthetic oligonucleotide
  Sense strand starting at position 680 of SEQ ID NO: 1880515
ugccuucuaguuuaagauc

SEQ ID NO: 1972889 - RNA, 19 nt, Artificial Sequence
  Description of Artificial Sequence: Synthetic oligonucleotide
  Antisense strand to SEQ ID NO: 1972888
gaucuuaaacuagaaggca

SEQ ID NO: 1972890 - RNA, 19 nt, Artificial Sequence
  Description of Artificial Sequence: Synthetic oligonucleotide
  Sense strand starting at position 692 of SEQ ID NO: 1880515
uaagaucuugcuggagaca

SEQ ID NO: 1972891 - RNA, 19 nt, Artificial Sequence
  Description of Artificial Sequence: Synthetic oligonucleotide
  Antisense strand to SEQ ID NO: 1972890
ugucuccagcaagaucuua

SEQ ID NO: 1972892 - RNA, 19 nt, Artificial Sequence
  Description of Artificial Sequence: Synthetic oligonucleotide
  Sense strand starting at position 751 of SEQ ID NO: 1880515
ugaccaucccacugaaguu

SEQ ID NO: 1972893 - RNA, 19 nt, Artificial Sequence
  Description of Artificial Sequence: Synthetic oligonucleotide
  Antisense strand to SEQ ID NO: 1972892
aacuucagugggaugguca

SEQ ID NO: 1972894 - RNA, 19 nt, Artificial Sequence
  Description of Artificial Sequence: Synthetic oligonucleotide
  Sense strand starting at position 767 of SEQ ID NO: 1880515
guuacaugaugaguaagag

SEQ ID NO: 1972895 - RNA, 19 nt, Artificial Sequence
  Description of Artificial Sequence: Synthetic oligonucleotide
  Antisense strand to SEQ ID NO: 1972894
cucuuacucaucauguaac

SEQ ID NO: 1972896 - RNA, 19 nt, Artificial Sequence
  Description of Artificial Sequence: Synthetic oligonucleotide
  Sense strand starting at position 771 of SEQ ID NO: 1880515
caugaugaguaagagaaau

SEQ ID NO: 1972897 - RNA, 19 nt, Artificial Sequence
  Description of Artificial Sequence: Synthetic oligonucleotide
  Antisense strand to SEQ ID NO: 1972896
auuucucuuacucaucaug

SEQ ID NO: 1972898 - RNA, 19 nt, Artificial Sequence
  Description of Artificial Sequence: Synthetic oligonucleotide
  Sense strand starting at position 898 of SEQ ID NO: 1880515
acaacauucuagggacaga

SEQ ID NO: 1972899 - RNA, 19 nt, Artificial Sequence
  Description of Artificial Sequence: Synthetic oligonucleotide
  Antisense strand to SEQ ID NO: 1972898
ucugucccuagaauguugu

SEQ ID NO: 1972900 - RNA, 19 nt, Artificial Sequence
  Description of Artificial Sequence: Synthetic oligonucleotide
  Sense strand starting at position 909 of SEQ ID NO: 1880515
gggacagagguuugaaucu

SEQ ID NO: 1972901 - RNA, 19 nt, Artificial Sequence
  Description of Artificial Sequence: Synthetic oligonucleotide
  Antisense strand to SEQ ID NO: 1972900
agauucaaaccucuguccc

SEQ ID NO: 1972902 - RNA, 19 nt, Artificial Sequence
  Description of Artificial Sequence: Synthetic oligonucleotide
  Sense strand starting at position 1322 of SEQ ID NO: 1880515
ugagguugugcccauaauu

SEQ ID NO: 1972903 - RNA, 19 nt, Artificial Sequence
  Description of Artificial Sequence: Synthetic oligonucleotide
  Antisense strand to SEQ ID NO: 1972902
aauuaugggcacaaccuca

SEQ ID NO: 1972904 - RNA, 19 nt, Artificial Sequence
  Description of Artificial Sequence: Synthetic oligonucleotide
  Sense strand starting at position 1366 of SEQ ID NO: 1880515
caauacgcucuugagugaa

SEQ ID NO: 1972905 - RNA, 19 nt, Artificial Sequence
  Description of Artificial Sequence: Synthetic oligonucleotide
  Antisense strand to SEQ ID NO: 1972904
uucacucaagagcguauug

SEQ ID NO: 1972906 - RNA, 19 nt, Artificial Sequence
  Description of Artificial Sequence: Synthetic oligonucleotide
  Sense strand starting at position 1369 of SEQ ID NO: 1880515
uacgcucuugagugaauga

SEQ ID NO: 1972907 - RNA, 19 nt, Artificial Sequence
  Description of Artificial Sequence: Synthetic oligonucleotide
  Antisense strand to SEQ ID NO: 1972906
ucauucacucaagagcgua

SEQ ID NO: 1972908 - RNA, 19 nt, Artificial Sequence
  Description of Artificial Sequence: Synthetic oligonucleotide
  Sense strand starting at position 1445 of SEQ ID NO: 1880515
agggauguuacaugcauga

SEQ ID NO: 1972909 - RNA, 19 nt, Artificial Sequence
  Description of Artificial Sequence: Synthetic oligonucleotide
  Antisense strand to SEQ ID NO: 1972908
ucaugcauguaacaucccu

SEQ ID NO: 1972910 - RNA, 19 nt, Artificial Sequence
  Description of Artificial Sequence: Synthetic oligonucleotide
  Sense strand starting at position 1449 of SEQ ID NO: 1880515
auguuacaugcaugaaguu

SEQ ID NO: 1972911 - RNA, 19 nt, Artificial Sequence
  Description of Artificial Sequence: Synthetic oligonucleotide
  Antisense strand to SEQ ID NO: 1972910
aacuucaugcauguaacau

SEQ ID NO: 1972912 - RNA, 19 nt, Artificial Sequence
  Description of Artificial Sequence: Synthetic oligonucleotide
  Sense strand starting at position 1544 of SEQ ID NO: 1880515
gucacucaccucugauauu

SEQ ID NO: 1972913 - RNA, 19 nt, Artificial Sequence
  Description of Artificial Sequence: Synthetic oligonucleotide
  Antisense strand to SEQ ID NO: 1972912
aauaucagaggugagugac

SEQ ID NO: 1972914 - RNA, 19 nt, Artificial Sequence
  Description of Artificial Sequence: Synthetic oligonucleotide
  Sense strand starting at position 1993 of SEQ ID NO: 1880515
ggaggaugugguuggagaa

SEQ ID NO: 1972915 - RNA, 19 nt, Artificial Sequence
  Description of Artificial Sequence: Synthetic oligonucleotide
  Antisense strand to SEQ ID NO: 1972914
uucuccaaccacauccucc

SEQ ID NO: 1972916 - RNA, 19 nt, Artificial Sequence
  Description of Artificial Sequence: Synthetic oligonucleotide
  Sense strand starting at position 2038 of SEQ ID NO: 1880515
gggagugauucagaaauga

SEQ ID NO: 1972917 - RNA, 19 nt, Artificial Sequence
  Description of Artificial Sequence: Synthetic oligonucleotide
  Antisense strand to SEQ ID NO: 1972916
ucauuucugaaucacuccc

SEQ ID NO: 1972918 - RNA, 19 nt, Artificial Sequence
  Description of Artificial Sequence: Synthetic oligonucleotide
  Sense strand starting at position 2207 of SEQ ID NO: 1880515
ugccgucaugugcuaaauc

SEQ ID NO: 1972919 - RNA, 19 nt, Artificial Sequence
  Description of Artificial Sequence: Synthetic oligonucleotide
  Antisense strand to SEQ ID NO: 1972918
gauuuagcacaugacggca

SEQ ID NO: 1972920 - RNA, 19 nt, Artificial Sequence
  Description of Artificial Sequence: Synthetic oligonucleotide
  Sense strand starting at position 2481 of SEQ ID NO: 1880515
gggaucaucuacgaaggaa

SEQ ID NO: 1972921 - RNA, 19 nt, Artificial Sequence
  Description of Artificial Sequence: Synthetic oligonucleotide
  Antisense strand to SEQ ID NO: 1972920
uuccuucguagaugauccc

SEQ ID NO: 1972922 - RNA, 19 nt, Artificial Sequence
  Description of Artificial Sequence: Synthetic oligonucleotide
  Sense strand starting at position 2527 of SEQ ID NO: 1880515
agcaaaugucagggaguug

SEQ ID NO: 1972923 - RNA, 19 nt, Artificial Sequence
  Description of Artificial Sequence: Synthetic oligonucleotide
  Antisense strand to SEQ ID NO: 1972922
caacucccugacauuugcu

SEQ ID NO: 1972924 - RNA, 19 nt, Artificial Sequence
  Description of Artificial Sequence: Synthetic oligonucleotide
  Sense strand starting at position 2528 of SEQ ID NO: 1880515
gcaaaugucagggaguuga

SEQ ID NO: 1972925 - RNA, 19 nt, Artificial Sequence
  Description of Artificial Sequence: Synthetic oligonucleotide
  Antisense strand to SEQ ID NO: 1972924
ucaacucccugacauuugc

SEQ ID NO: 1972926 - RNA, 19 nt, Artificial Sequence
  Description of Artificial Sequence: Synthetic oligonucleotide
  Sense strand starting at position 2539 of SEQ ID NO: 1880515
ggaguugaugcugagugaa

SEQ ID NO: 1972927 - RNA, 19 nt, Artificial Sequence
  Description of Artificial Sequence: Synthetic oligonucleotide
  Antisense strand to SEQ ID NO: 1972926
uucacucagcaucaacucc

SEQ ID NO: 1972928 - RNA, 19 nt, Artificial Sequence
  Description of Artificial Sequence: Synthetic oligonucleotide
  Sense strand starting at position 2564 of SEQ ID NO: 1880515
ggcucuuagguucggaaga

SEQ ID NO: 1972929 - RNA, 19 nt, Artificial Sequence
  Description of Artificial Sequence: Synthetic oligonucleotide
  Antisense strand to SEQ ID NO: 1972928
ucuuccgaaccuaagagcc

SEQ ID NO: 1972930 - RNA, 19 nt, Artificial Sequence
  Description of Artificial Sequence: Synthetic oligonucleotide
  Sense strand starting at position 2627 of SEQ ID NO: 1880515
ggaagaucccugugcagug

SEQ ID NO: 1972931 - RNA, 19 nt, Artificial Sequence
  Description of Artificial Sequence: Synthetic oligonucleotide
  Antisense strand to SEQ ID NO: 1972930
cacugcacagggaucuucc

SEQ ID NO: 1972932 - RNA, 19 nt, Artificial Sequence
  Description of Artificial Sequence: Synthetic oligonucleotide
  Sense strand starting at position 2639 of SEQ ID NO: 1880515
ugcaguguuccugucacuu

SEQ ID NO: 1972933 - RNA, 19 nt, Artificial Sequence
  Description of Artificial Sequence: Synthetic oligonucleotide
  Antisense strand to SEQ ID NO: 1972932
aagugacaggaacacugca

SEQ ID NO: 1972934 - RNA, 19 nt, Artificial Sequence
  Description of Artificial Sequence: Synthetic oligonucleotide
  Sense strand starting at position 2709 of SEQ ID NO: 1880515
acacgauggcugugugaca

SEQ ID NO: 1972935 - RNA, 19 nt, Artificial Sequence
  Description of Artificial Sequence: Synthetic oligonucleotide
  Antisense strand to SEQ ID NO: 1972934
ugucacacagccaucgugu

SEQ ID NO: 1972936 - RNA, 19 nt, Artificial Sequence
  Description of Artificial Sequence: Synthetic oligonucleotide
  Sense strand starting at position 2716 of SEQ ID NO: 1880515
ggcugugugacagggagau

SEQ ID NO: 1972937 - RNA, 19 nt, Artificial Sequence
  Description of Artificial Sequence: Synthetic oligonucleotide
  Antisense strand to SEQ ID NO: 1972936
aucucccugucacacagcc

SEQ ID NO: 1972938 - RNA, 19 nt, Artificial Sequence
  Description of Artificial Sequence: Synthetic oligonucleotide
  Sense strand starting at position 2788 of SEQ ID NO: 1880515
gaccucugcuggcuguaau

SEQ ID NO: 1972939 - RNA, 19 nt, Artificial Sequence
  Description of Artificial Sequence: Synthetic oligonucleotide
  Antisense strand to SEQ ID NO: 1972938
auuacagccagcagagguc

SEQ ID NO: 1972940 - RNA, 19 nt, Artificial Sequence
  Description of Artificial Sequence: Synthetic oligonucleotide
  Sense strand starting at position 2801 of SEQ ID NO: 1880515
uguaauuugcagcaugcau

SEQ ID NO: 1972941 - RNA, 19 nt, Artificial Sequence
  Description of Artificial Sequence: Synthetic oligonucleotide
  Antisense strand to SEQ ID NO: 1972940
augcaugcugcaaauuaca

SEQ ID NO: 1972942 - RNA, 19 nt, Artificial Sequence
  Description of Artificial Sequence: Synthetic oligonucleotide
  Sense strand starting at position 3037 of SEQ ID NO: 1880515
cauguauguguaugagguu

SEQ ID NO: 1972943 - RNA, 19 nt, Artificial Sequence
  Description of Artificial Sequence: Synthetic oligonucleotide
  Antisense strand to SEQ ID NO: 1972942
aaccucauacacauacaug

SEQ ID NO: 1972944 - RNA, 19 nt, Artificial Sequence
  Description of Artificial Sequence: Synthetic oligonucleotide
  Sense strand starting at position 3141 of SEQ ID NO: 1880515
guugcuuugucaccuuuaa

SEQ ID NO: 1972945 - RNA, 19 nt, Artificial Sequence
  Description of Artificial Sequence: Synthetic oligonucleotide
  Antisense strand to SEQ ID NO: 1972944
uuaaaggugacaaagcaac

SEQ ID NO: 1972946 - RNA, 19 nt, Artificial Sequence
  Description of Artificial Sequence: Synthetic oligonucleotide
  Sense strand starting at position 3244 of SEQ ID NO: 1880515
aguagccaggacugauauu

SEQ ID NO: 1972947 - RNA, 19 nt, Artificial Sequence
  Description of Artificial Sequence: Synthetic oligonucleotide
  Antisense strand to SEQ ID NO: 1972946
aauaucaguccuggcuacu

SEQ ID NO: 1972948 - RNA, 19 nt, Artificial Sequence
  Description of Artificial Sequence: Synthetic oligonucleotide
  Sense strand starting at position 3268 of SEQ ID NO: 1880515
gguccacaucaguguacuu

SEQ ID NO: 1972949 - RNA, 19 nt, Artificial Sequence
  Description of Artificial Sequence: Synthetic oligonucleotide
  Antisense strand to SEQ ID NO: 1972948
aaguacacugauguggacc

SEQ ID NO: 1972950 - RNA, 19 nt, Artificial Sequence
  Description of Artificial Sequence: Synthetic oligonucleotide
  Sense strand starting at position 3273 of SEQ ID NO: 1880515
acaucaguguacuucugua

SEQ ID NO: 1972951 - RNA, 19 nt, Artificial Sequence
  Description of Artificial Sequence: Synthetic oligonucleotide
  Antisense strand to SEQ ID NO: 1972950
uacagaaguacacugaugu

SEQ ID NO: 1972952 - RNA, 19 nt, Artificial Sequence
  Description of Artificial Sequence: Synthetic oligonucleotide
  Sense strand starting at position 3286 of SEQ ID NO: 1880515
ucuguaccagcugauaaau

SEQ ID NO: 1972953 - RNA, 19 nt, Artificial Sequence
  Description of Artificial Sequence: Synthetic oligonucleotide
  Antisense strand to SEQ ID NO: 1972952
auuuaucagcugguacaga

SEQ ID NO: 1972954 - RNA, 19 nt, Artificial Sequence
  Description of Artificial Sequence: Synthetic oligonucleotide
  Sense strand starting at position 3306 of SEQ ID NO: 1880515
gcugcuggcucccugaaau

SEQ ID NO: 1972955 - RNA, 19 nt, Artificial Sequence
  Description of Artificial Sequence: Synthetic oligonucleotide
  Antisense strand to SEQ ID NO: 1972954
auuucagggagccagcagc

SEQ ID NO: 1972956 - RNA, 19 nt, Artificial Sequence
  Description of Artificial Sequence: Synthetic oligonucleotide
  Sense strand starting at position 3653 of SEQ ID NO: 1880515
aguuuccuccuguguagga

SEQ ID NO: 1972957 - RNA, 19 nt, Artificial Sequence
  Description of Artificial Sequence: Synthetic oligonucleotide
  Antisense strand to SEQ ID NO: 1972956
uccuacacaggaggaaacu

SEQ ID NO: 1972958 - RNA, 19 nt, Artificial Sequence
  Description of Artificial Sequence: Synthetic oligonucleotide
  Sense strand starting at position 3654 of SEQ ID NO: 1880515
guuuccuccuguguaggau

SEQ ID NO: 1972959 - RNA, 19 nt, Artificial Sequence
  Description of Artificial Sequence: Synthetic oligonucleotide
  Antisense strand to SEQ ID NO: 1972958
auccuacacaggaggaaac

SEQ ID NO: 1972960 - RNA, 19 nt, Artificial Sequence
  Description of Artificial Sequence: Synthetic oligonucleotide
  Sense strand starting at position 3673 of SEQ ID NO: 1880515
gaggauaaaucauuguagu

SEQ ID NO: 1972961 - RNA, 19 nt, Artificial Sequence
  Description of Artificial Sequence: Synthetic oligonucleotide
  Antisense strand to SEQ ID NO: 1972960
acuacaaugauuuauccuc

SEQ ID NO: 1972962 - RNA, 19 nt, Artificial Sequence
  Description of Artificial Sequence: Synthetic oligonucleotide
  Sense strand starting at position 3674 of SEQ ID NO: 1880515
aggauaaaucauuguagua

SEQ ID NO: 1972963 - RNA, 19 nt, Artificial Sequence
  Description of Artificial Sequence: Synthetic oligonucleotide
  Antisense strand to SEQ ID NO: 1972962
uacuacaaugauuuauccu

SEQ ID NO: 1972964 - RNA, 19 nt, Artificial Sequence
  Description of Artificial Sequence: Synthetic oligonucleotide
  Sense strand starting at position 3699 of SEQ ID NO: 1880515
ucauaaauuuguugggaaa

SEQ ID NO: 1972965 - RNA, 19 nt, Artificial Sequence
  Description of Artificial Sequence: Synthetic oligonucleotide
  Antisense strand to SEQ ID NO: 1972964
uuucccaacaaauuuauga

SEQ ID NO: 1972966 - RNA, 19 nt, Artificial Sequence
  Description of Artificial Sequence: Synthetic oligonucleotide
  Sense strand starting at position 3786 of SEQ ID NO: 1880515
gagucauuguuauuauuag

SEQ ID NO: 1972967 - RNA, 19 nt, Artificial Sequence
  Description of Artificial Sequence: Synthetic oligonucleotide
  Antisense strand to SEQ ID NO: 1972966
cuaauaauaacaaugacuc

SEQ ID NO: 1972968 - RNA, 19 nt, Artificial Sequence
  Description of Artificial Sequence: Synthetic oligonucleotide
  Sense strand starting at position 16 of SEQ ID NO: 1880516
gagaguguggcacaaggua

SEQ ID NO: 1972969 - RNA, 19 nt, Artificial Sequence
  Description of Artificial Sequence: Synthetic oligonucleotide
  Antisense strand to SEQ ID NO: 1972968
uaccuugugccacacucuc

SEQ ID NO: 1972970 - RNA, 19 nt, Artificial Sequence
  Description of Artificial Sequence: Synthetic oligonucleotide
  Sense strand starting at position 67 of SEQ ID NO: 1880516
ggccuugaguauguagaga

SEQ ID NO: 1972971 - RNA, 19 nt, Artificial Sequence
  Description of Artificial Sequence: Synthetic oligonucleotide
  Antisense strand to SEQ ID NO: 1972970
ucucuacauacucaaggcc

SEQ ID NO: 1972972 - RNA, 19 nt, Artificial Sequence
  Description of Artificial Sequence: Synthetic oligonucleotide
  Sense strand starting at position 92 of SEQ ID NO: 1880516
uccguaucccgacagcaau

SEQ ID NO: 1972973 - RNA, 19 nt, Artificial Sequence
  Description of Artificial Sequence: Synthetic oligonucleotide
  Antisense strand to SEQ ID NO: 1972972
auugcugucgggauacgga

SEQ ID NO: 1972974 - RNA, 19 nt, Artificial Sequence
  Description of Artificial Sequence: Synthetic oligonucleotide
  Sense strand starting at position 184 of SEQ ID NO: 1880516
acuagauacugugcuaaag

SEQ ID NO: 1972975 - RNA, 19 nt, Artificial Sequence
  Description of Artificial Sequence: Synthetic oligonucleotide
  Antisense strand to SEQ ID NO: 1972974
cuuuagcacaguaucuagu

SEQ ID NO: 1972976 - RNA, 19 nt, Artificial Sequence
  Description of Artificial Sequence: Synthetic oligonucleotide
  Sense strand starting at position 450 of SEQ ID NO: 1880516
ugagccaaucauugacuuu

SEQ ID NO: 1972977 - RNA, 19 nt, Artificial Sequence
  Description of Artificial Sequence: Synthetic oligonucleotide
  Antisense strand to SEQ ID NO: 1972976
aaagucaaugauuggcuca

SEQ ID NO: 1972978 - RNA, 19 nt, Artificial Sequence
  Description of Artificial Sequence: Synthetic oligonucleotide
  Sense strand starting at position 515 of SEQ ID NO: 1880516
ucuggcuucccauauagau

SEQ ID NO: 1972979 - RNA, 19 nt, Artificial Sequence
  Description of Artificial Sequence: Synthetic oligonucleotide
  Antisense strand to SEQ ID NO: 1972978
aucuauaugggaagccaga

SEQ ID NO: 1972980 - RNA, 19 nt, Artificial Sequence
  Description of Artificial Sequence: Synthetic oligonucleotide
  Sense strand starting at position 577 of SEQ ID NO: 1880516
uuuguuccaguugacaauu

SEQ ID NO: 1972981 - RNA, 19 nt, Artificial Sequence
  Description of Artificial Sequence: Synthetic oligonucleotide
  Antisense strand to SEQ ID NO: 1972980
aauugucaacuggaacaaa

SEQ ID NO: 1972982 - RNA, 19 nt, Artificial Sequence
  Description of Artificial Sequence: Synthetic oligonucleotide
  Sense strand starting at position 671 of SEQ ID NO: 1880516
uuacuuucccaugaagggu

SEQ ID NO: 1972983 - RNA, 19 nt, Artificial Sequence
  Description of Artificial Sequence: Synthetic oligonucleotide
  Antisense strand to SEQ ID NO: 1972982
acccuucaugggaaaguaa

SEQ ID NO: 1972984 - RNA, 19 nt, Artificial Sequence
  Description of Artificial Sequence: Synthetic oligonucleotide
  Sense strand starting at position 785 of SEQ ID NO: 1880516
ggauguggucacugagucu

SEQ ID NO: 1972985 - RNA, 19 nt, Artificial Sequence
  Description of Artificial Sequence: Synthetic oligonucleotide
  Antisense strand to SEQ ID NO: 1972984
agacucagugaccacaucc

SEQ ID NO: 1972986 - RNA, 19 nt, Artificial Sequence
  Description of Artificial Sequence: Synthetic oligonucleotide
  Sense strand starting at position 815 of SEQ ID NO: 1880516
cuuuaucuucuuuguggau

SEQ ID NO: 1972987 - RNA, 19 nt, Artificial Sequence
  Description of Artificial Sequence: Synthetic oligonucleotide
  Antisense strand to SEQ ID NO: 1972986
auccacaaagaagauaaag

SEQ ID NO: 1972988 - RNA, 19 nt, Artificial Sequence
  Description of Artificial Sequence: Synthetic oligonucleotide
  Sense strand starting at position 908 of SEQ ID NO: 1880516
gacggagaggauuguucuu

SEQ ID NO: 1972989 - RNA, 19 nt, Artificial Sequence
  Description of Artificial Sequence: Synthetic oligonucleotide
  Antisense strand to SEQ ID NO: 1972988
aagaacaauccucuccguc

SEQ ID NO: 1972990 - RNA, 19 nt, Artificial Sequence
  Description of Artificial Sequence: Synthetic oligonucleotide
  Sense strand starting at position 915 of SEQ ID NO: 1880516
aggauuguucuugggaaug

SEQ ID NO: 1972991 - RNA, 19 nt, Artificial Sequence
  Description of Artificial Sequence: Synthetic oligonucleotide
  Antisense strand to SEQ ID NO: 1972990
cauucccaagaacaauccu

SEQ ID NO: 1972992 - RNA, 19 nt, Artificial Sequence
  Description of Artificial Sequence: Synthetic oligonucleotide
  Sense strand starting at position 927 of SEQ ID NO: 1880516
gggaaugcaccuuguucua

SEQ ID NO: 1972993 - RNA, 19 nt, Artificial Sequence
  Description of Artificial Sequence: Synthetic oligonucleotide
  Antisense strand to SEQ ID NO: 1972992
uagaacaaggugcauuccc

SEQ ID NO: 1972994 - RNA, 19 nt, Artificial Sequence
  Description of Artificial Sequence: Synthetic oligonucleotide
  Sense strand starting at position 1316 of SEQ ID NO: 1880516
cgucaagagaucugcuuaa

SEQ ID NO: 1972995 - RNA, 19 nt, Artificial Sequence
  Description of Artificial Sequence: Synthetic oligonucleotide
  Antisense strand to SEQ ID NO: 1972994
uuaagcagaucucuugacg

SEQ ID NO: 1972996 - RNA, 19 nt, Artificial Sequence
  Description of Artificial Sequence: Synthetic oligonucleotide
  Sense strand starting at position 1372 of SEQ ID NO: 1880516
aaagaaauguucguuccau

SEQ ID NO: 1972997 - RNA, 19 nt, Artificial Sequence
  Description of Artificial Sequence: Synthetic oligonucleotide
  Antisense strand to SEQ ID NO: 1972996
auggaacgaacauuucuuu

SEQ ID NO: 1972998 - RNA, 19 nt, Artificial Sequence
  Description of Artificial Sequence: Synthetic oligonucleotide
  Sense strand starting at position 1373 of SEQ ID NO: 1880516
aagaaauguucguuccaua

SEQ ID NO: 1972999 - RNA, 19 nt, Artificial Sequence
  Description of Artificial Sequence: Synthetic oligonucleotide
  Antisense strand to SEQ ID NO: 1972998
uauggaacgaacauuucuu

SEQ ID NO: 1973000 - RNA, 19 nt, Artificial Sequence
  Description of Artificial Sequence: Synthetic oligonucleotide
  Sense strand starting at position 1383 of SEQ ID NO: 1880516
cguuccauauucuccugaa

SEQ ID NO: 1973001 - RNA, 19 nt, Artificial Sequence
  Description of Artificial Sequence: Synthetic oligonucleotide
  Antisense strand to SEQ ID NO: 1973000
uucaggagaauauggaacg

SEQ ID NO: 1973002 - RNA, 19 nt, Artificial Sequence
  Description of Artificial Sequence: Synthetic oligonucleotide
  Sense strand starting at position 1587 of SEQ ID NO: 1880516
gagggcgauuguuuaaauc

SEQ ID NO: 1973003 - RNA, 19 nt, Artificial Sequence
  Description of Artificial Sequence: Synthetic oligonucleotide
  Antisense strand to SEQ ID NO: 1973002
gauuuaaacaaucgcccuc

SEQ ID NO: 1973004 - RNA, 19 nt, Artificial Sequence
  Description of Artificial Sequence: Synthetic oligonucleotide
  Sense strand starting at position 2786 of SEQ ID NO: 1880516
agugaguucuggccgggaa

SEQ ID NO: 1973005 - RNA, 19 nt, Artificial Sequence
  Description of Artificial Sequence: Synthetic oligonucleotide
  Antisense strand to SEQ ID NO: 1973004
uucccggccagaacucacu

SEQ ID NO: 1973006 - RNA, 19 nt, Artificial Sequence
  Description of Artificial Sequence: Synthetic oligonucleotide
  Sense strand starting at position 3046 of SEQ ID NO: 1880516
ugguuaggucuugacuaca

SEQ ID NO: 1973007 - RNA, 19 nt, Artificial Sequence
  Description of Artificial Sequence: Synthetic oligonucleotide
  Antisense strand to SEQ ID NO: 1973006
uguagucaagaccuaacca

SEQ ID NO: 1973008 - RNA, 19 nt, Artificial Sequence
  Description of Artificial Sequence: Synthetic oligonucleotide
  Sense strand starting at position 3117 of SEQ ID NO: 1880516
gacggccucugacuaaaua

SEQ ID NO: 1973009 - RNA, 19 nt, Artificial Sequence
  Description of Artificial Sequence: Synthetic oligonucleotide
  Antisense strand to SEQ ID NO: 1973008
uauuuagucagaggccguc

SEQ ID NO: 1973010 - RNA, 19 nt, Artificial Sequence
  Description of Artificial Sequence: Synthetic oligonucleotide
  Sense strand starting at position 3118 of SEQ ID NO: 1880516
acggccucugacuaaauau

SEQ ID NO: 1973011 - RNA, 19 nt, Artificial Sequence
  Description of Artificial Sequence: Synthetic oligonucleotide
  Antisense strand to SEQ ID NO: 1973010
auauuuagucagaggccgu

SEQ ID NO: 1973012 - RNA, 19 nt, Artificial Sequence
  Description of Artificial Sequence: Synthetic oligonucleotide
  Sense strand starting at position 3195 of SEQ ID NO: 1880516
ugaauuaggagcugccauu

SEQ ID NO: 1973013 - RNA, 19 nt, Artificial Sequence
  Description of Artificial Sequence: Synthetic oligonucleotide
  Antisense strand to SEQ ID NO: 1973012
aauggcagcuccuaauuca

SEQ ID NO: 1973014 - RNA, 19 nt, Artificial Sequence
  Description of Artificial Sequence: Synthetic oligonucleotide
  Sense strand starting at position 3213 of SEQ ID NO: 1880516
ugcuuuggguucgcauuua

SEQ ID NO: 1973015 - RNA, 19 nt, Artificial Sequence
  Description of Artificial Sequence: Synthetic oligonucleotide
  Antisense strand to SEQ ID NO: 1973014
uaaaugcgaacccaaagca

SEQ ID NO: 1973016 - RNA, 19 nt, Artificial Sequence
  Description of Artificial Sequence: Synthetic oligonucleotide
  Sense strand starting at position 3288 of SEQ ID NO: 1880516
gaucaauuggcacgugaag

SEQ ID NO: 1973017 - RNA, 19 nt, Artificial Sequence
  Description of Artificial Sequence: Synthetic oligonucleotide
  Antisense strand to SEQ ID NO: 1973016
cuucacgugccaauugauc

SEQ ID NO: 1973018 - RNA, 19 nt, Artificial Sequence
  Description of Artificial Sequence: Synthetic oligonucleotide
  Sense strand starting at position 3290 of SEQ ID NO: 1880516
ucaauuggcacgugaagga

SEQ ID NO: 1973019 - RNA, 19 nt, Artificial Sequence
  Description of Artificial Sequence: Synthetic oligonucleotide
  Antisense strand to SEQ ID NO: 1973018
uccuucacgugccaauuga

SEQ ID NO: 1973020 - RNA, 19 nt, Artificial Sequence
  Description of Artificial Sequence: Synthetic oligonucleotide
  Sense strand starting at position 3349 of SEQ ID NO: 1880516
gagcauaucggcuaguaaa

SEQ ID NO: 1973021 - RNA, 19 nt, Artificial Sequence
  Description of Artificial Sequence: Synthetic oligonucleotide
  Antisense strand to SEQ ID NO: 1973020
uuuacuagccgauaugcuc

SEQ ID NO: 1973022 - RNA, 19 nt, Artificial Sequence
  Description of Artificial Sequence: Synthetic oligonucleotide
  Sense strand starting at position 3356 of SEQ ID NO: 1880516
ucggcuaguaaagaugauu

SEQ ID NO: 1973023 - RNA, 19 nt, Artificial Sequence
  Description of Artificial Sequence: Synthetic oligonucleotide
  Antisense strand to SEQ ID NO: 1973022
aaucaucuuuacuagccga

SEQ ID NO: 1973024 - RNA, 19 nt, Artificial Sequence
  Description of Artificial Sequence: Synthetic oligonucleotide
  Sense strand starting at position 3359 of SEQ ID NO: 1880516
gcuaguaaagaugauuauu

SEQ ID NO: 1973025 - RNA, 19 nt, Artificial Sequence
  Description of Artificial Sequence: Synthetic oligonucleotide
  Antisense strand to SEQ ID NO: 1973024
aauaaucaucuuuacuagc

SEQ ID NO: 1973026 - RNA, 19 nt, Artificial Sequence
  Description of Artificial Sequence: Synthetic oligonucleotide
  Sense strand starting at position 3405 of SEQ ID NO: 1880516
ggaugaccgcaguaguuau

SEQ ID NO: 1973027 - RNA, 19 nt, Artificial Sequence
  Description of Artificial Sequence: Synthetic oligonucleotide
  Antisense strand to SEQ ID NO: 1973026
auaacuacugcggucaucc

SEQ ID NO: 1973028 - RNA, 19 nt, Artificial Sequence
  Description of Artificial Sequence: Synthetic oligonucleotide
  Sense strand starting at position 3477 of SEQ ID NO: 1880516
acaaguaacuuagugguau

SEQ ID NO: 1973029 - RNA, 19 nt, Artificial Sequence
  Description of Artificial Sequence: Synthetic oligonucleotide
  Antisense strand to SEQ ID NO: 1973028
auaccacuaaguuacuugu

SEQ ID NO: 1973030 - RNA, 19 nt, Artificial Sequence
  Description of Artificial Sequence: Synthetic oligonucleotide
  Sense strand starting at position 3511 of SEQ ID NO: 1880516
ggaucuugaugagugcuga

SEQ ID NO: 1973031 - RNA, 19 nt, Artificial Sequence
  Description of Artificial Sequence: Synthetic oligonucleotide
  Antisense strand to SEQ ID NO: 1973030
ucagcacucaucaagaucc

SEQ ID NO: 1973032 - RNA, 19 nt, Artificial Sequence
  Description of Artificial Sequence: Synthetic oligonucleotide
  Sense strand starting at position 3512 of SEQ ID NO: 1880516
gaucuugaugagugcugaa

SEQ ID NO: 1973033 - RNA, 19 nt, Artificial Sequence
  Description of Artificial Sequence: Synthetic oligonucleotide
  Antisense strand to SEQ ID NO: 1973032
uucagcacucaucaagauc

SEQ ID NO: 1973034 - RNA, 19 nt, Artificial Sequence
  Description of Artificial Sequence: Synthetic oligonucleotide
  Sense strand starting at position 3549 of SEQ ID NO: 1880516
uuaguaguagaccgaaguu

SEQ ID NO: 1973035 - RNA, 19 nt, Artificial Sequence
  Description of Artificial Sequence: Synthetic oligonucleotide
  Antisense strand to SEQ ID NO: 1973034
aacuucggucuacuacuaa

SEQ ID NO: 1973036 - RNA, 19 nt, Artificial Sequence
  Description of Artificial Sequence: Synthetic oligonucleotide
  Sense strand starting at position 3587 of SEQ ID NO: 1880516
uccacauuauguuuggauu

SEQ ID NO: 1973037 - RNA, 19 nt, Artificial Sequence
  Description of Artificial Sequence: Synthetic oligonucleotide
  Antisense strand to SEQ ID NO: 1973036
aauccaaacauaaugugga

SEQ ID NO: 1973038 - RNA, 19 nt, Artificial Sequence
  Description of Artificial Sequence: Synthetic oligonucleotide
  Sense strand starting at position 3710 of SEQ ID NO: 1880516
gaauacguuugagcaucuu

SEQ ID NO: 1973039 - RNA, 19 nt, Artificial Sequence
  Description of Artificial Sequence: Synthetic oligonucleotide
  Antisense strand to SEQ ID NO: 1973038
aagaugcucaaacguauuc

SEQ ID NO: 1973040 - RNA, 19 nt, Artificial Sequence
  Description of Artificial Sequence: Synthetic oligonucleotide
  Sense strand starting at position 3850 of SEQ ID NO: 1880516
auugguguuccuuaagauu

SEQ ID NO: 1973041 - RNA, 19 nt, Artificial Sequence
  Description of Artificial Sequence: Synthetic oligonucleotide
  Antisense strand to SEQ ID NO: 1973040
aaucuuaaggaacaccaau

SEQ ID NO: 1973042 - RNA, 19 nt, Artificial Sequence
  Description of Artificial Sequence: Synthetic oligonucleotide
  Sense strand starting at position 3928 of SEQ ID NO: 1880516
gguacaguuguggaaguga

SEQ ID NO: 1973043 - RNA, 19 nt, Artificial Sequence
  Description of Artificial Sequence: Synthetic oligonucleotide
  Antisense strand to SEQ ID NO: 1973042
ucacuuccacaacuguacc

SEQ ID NO: 1973044 - RNA, 19 nt, Artificial Sequence
  Description of Artificial Sequence: Synthetic oligonucleotide
  Sense strand starting at position 3956 of SEQ ID NO: 1880516
agggcaaauucuguucuuu

SEQ ID NO: 1973045 - RNA, 19 nt, Artificial Sequence
  Description of Artificial Sequence: Synthetic oligonucleotide
  Antisense strand to SEQ ID NO: 1973044
aaagaacagaauuugcccu

SEQ ID NO: 1973046 - RNA, 19 nt, Artificial Sequence
  Description of Artificial Sequence: Synthetic oligonucleotide
  Sense strand starting at position 3958 of SEQ ID NO: 1880516
ggcaaauucuguucuuuaa

SEQ ID NO: 1973047 - RNA, 19 nt, Artificial Sequence
  Description of Artificial Sequence: Synthetic oligonucleotide
  Antisense strand to SEQ ID NO: 1973046
uuaaagaacagaauuugcc

SEQ ID NO: 1973048 - RNA, 19 nt, Artificial Sequence
  Description of Artificial Sequence: Synthetic oligonucleotide
  Sense strand starting at position 6 of SEQ ID NO: 1880517
gaggguaauuaauccuuag

SEQ ID NO: 1973049 - RNA, 19 nt, Artificial Sequence
  Description of Artificial Sequence: Synthetic oligonucleotide
  Antisense strand to SEQ ID NO: 1973048
cuaaggauuaauuacccuc

SEQ ID NO: 1973050 - RNA, 19 nt, Artificial Sequence
  Description of Artificial Sequence: Synthetic oligonucleotide
  Sense strand starting at position 9 of SEQ ID NO: 1880517
gguaauuaauccuuaguca

SEQ ID NO: 1973051 - RNA, 19 nt, Artificial Sequence
  Description of Artificial Sequence: Synthetic oligonucleotide
  Antisense strand to SEQ ID NO: 1973050
ugacuaaggauuaauuacc

SEQ ID NO: 1973052 - RNA, 19 nt, Artificial Sequence
  Description of Artificial Sequence: Synthetic oligonucleotide
  Sense strand starting at position 10 of SEQ ID NO: 1880517
guaauuaauccuuagucau

SEQ ID NO: 1973053 - RNA, 19 nt, Artificial Sequence
  Description of Artificial Sequence: Synthetic oligonucleotide
  Antisense strand to SEQ ID NO: 1973052
augacuaaggauuaauuac

SEQ ID NO: 1973054 - RNA, 19 nt, Artificial Sequence
  Description of Artificial Sequence: Synthetic oligonucleotide
  Sense strand starting at position 36 of SEQ ID NO: 1880517
agaagucccaguuacaguu

SEQ ID NO: 1973055 - RNA, 19 nt, Artificial Sequence
  Description of Artificial Sequence: Synthetic oligonucleotide
  Antisense strand to SEQ ID NO: 1973054
aacuguaacugggacuucu

SEQ ID NO: 1973056 - RNA, 19 nt, Artificial Sequence
  Description of Artificial Sequence: Synthetic oligonucleotide
  Sense strand starting at position 42 of SEQ ID NO: 1880517
cccaguuacaguuaagguu

SEQ ID NO: 1973057 - RNA, 19 nt, Artificial Sequence
  Description of Artificial Sequence: Synthetic oligonucleotide
  Antisense strand to SEQ ID NO: 1973056
aaccuuaacuguaacuggg

SEQ ID NO: 1973058 - RNA, 19 nt, Artificial Sequence
  Description of Artificial Sequence: Synthetic oligonucleotide
  Sense strand starting at position 143 of SEQ ID NO: 1880517
ugccaauuugcauaugugu

SEQ ID NO: 1973059 - RNA, 19 nt, Artificial Sequence
  Description of Artificial Sequence: Synthetic oligonucleotide
  Antisense strand to SEQ ID NO: 1973058
acacauaugcaaauuggca

SEQ ID NO: 1973060 - RNA, 19 nt, Artificial Sequence
  Description of Artificial Sequence: Synthetic oligonucleotide
  Sense strand starting at position 194 of SEQ ID NO: 1880517
auaagcuugcuggagguau

SEQ ID NO: 1973061 - RNA, 19 nt, Artificial Sequence
  Description of Artificial Sequence: Synthetic oligonucleotide
  Antisense strand to SEQ ID NO: 1973060
auaccuccagcaagcuuau

SEQ ID NO: 1973062 - RNA, 19 nt, Artificial Sequence
  Description of Artificial Sequence: Synthetic oligonucleotide
  Sense strand starting at position 294 of SEQ ID NO: 1880517
cccugauggcgugaauuac

SEQ ID NO: 1973063 - RNA, 19 nt, Artificial Sequence
  Description of Artificial Sequence: Synthetic oligonucleotide
  Antisense strand to SEQ ID NO: 1973062
guaauucacgccaucaggg

SEQ ID NO: 1973064 - RNA, 19 nt, Artificial Sequence
  Description of Artificial Sequence: Synthetic oligonucleotide
  Sense strand starting at position 329 of SEQ ID NO: 1880517
acacuaaaucugggugaua

SEQ ID NO: 1973065 - RNA, 19 nt, Artificial Sequence
  Description of Artificial Sequence: Synthetic oligonucleotide
  Antisense strand to SEQ ID NO: 1973064
uaucacccagauuuagugu

SEQ ID NO: 1973066 - RNA, 19 nt, Artificial Sequence
  Description of Artificial Sequence: Synthetic oligonucleotide
  Sense strand starting at position 330 of SEQ ID NO: 1880517
cacuaaaucugggugauag

SEQ ID NO: 1973067 - RNA, 19 nt, Artificial Sequence
  Description of Artificial Sequence: Synthetic oligonucleotide
  Antisense strand to SEQ ID NO: 1973066
cuaucacccagauuuagug

SEQ ID NO: 1973068 - RNA, 19 nt, Artificial Sequence
  Description of Artificial Sequence: Synthetic oligonucleotide
  Sense strand starting at position 331 of SEQ ID NO: 1880517
acuaaaucugggugauagc

SEQ ID NO: 1973069 - RNA, 19 nt, Artificial Sequence
  Description of Artificial Sequence: Synthetic oligonucleotide
  Antisense strand to SEQ ID NO: 1973068
gcuaucacccagauuuagu

SEQ ID NO: 1973070 - RNA, 19 nt, Artificial Sequence
  Description of Artificial Sequence: Synthetic oligonucleotide
  Sense strand starting at position 341 of SEQ ID NO: 1880517
ggugauagcuacuuggaaa

SEQ ID NO: 1973071 - RNA, 19 nt, Artificial Sequence
  Description of Artificial Sequence: Synthetic oligonucleotide
  Antisense strand to SEQ ID NO: 1973070
uuuccaaguagcuaucacc

SEQ ID NO: 1973072 - RNA, 19 nt, Artificial Sequence
  Description of Artificial Sequence: Synthetic oligonucleotide
  Sense strand starting at position 342 of SEQ ID NO: 1880517
gugauagcuacuuggaaag

SEQ ID NO: 1973073 - RNA, 19 nt, Artificial Sequence
  Description of Artificial Sequence: Synthetic oligonucleotide
  Antisense strand to SEQ ID NO: 1973072
cuuuccaaguagcuaucac

SEQ ID NO: 1973074 - RNA, 19 nt, Artificial Sequence
  Description of Artificial Sequence: Synthetic oligonucleotide
  Sense strand starting at position 348 of SEQ ID NO: 1880517
gcuacuuggaaagaaguuu

SEQ ID NO: 1973075 - RNA, 19 nt, Artificial Sequence
  Description of Artificial Sequence: Synthetic oligonucleotide
  Antisense strand to SEQ ID NO: 1973074
aaacuucuuuccaaguagc

SEQ ID NO: 1973076 - RNA, 19 nt, Artificial Sequence
  Description of Artificial Sequence: Synthetic oligonucleotide
  Sense strand starting at position 394 of SEQ ID NO: 1880517
agaauuacauggucaugcu

SEQ ID NO: 1973077 - RNA, 19 nt, Artificial Sequence
  Description of Artificial Sequence: Synthetic oligonucleotide
  Antisense strand to SEQ ID NO: 1973076
agcaugaccauguaauucu

SEQ ID NO: 1973078 - RNA, 19 nt, Artificial Sequence
  Description of Artificial Sequence: Synthetic oligonucleotide
  Sense strand starting at position 462 of SEQ ID NO: 1880517
ccaagaaguccauaggcau

SEQ ID NO: 1973079 - RNA, 19 nt, Artificial Sequence
  Description of Artificial Sequence: Synthetic oligonucleotide
  Antisense strand to SEQ ID NO: 1973078
augccuauggacuucuugg

SEQ ID NO: 1973080 - RNA, 19 nt, Artificial Sequence
  Description of Artificial Sequence: Synthetic oligonucleotide
  Sense strand starting at position 510 of SEQ ID NO: 1880517
cacuguuuagauugaagau

SEQ ID NO: 1973081 - RNA, 19 nt, Artificial Sequence
  Description of Artificial Sequence: Synthetic oligonucleotide
  Antisense strand to SEQ ID NO: 1973080
aucuucaaucuaaacagug

SEQ ID NO: 1973082 - RNA, 19 nt, Artificial Sequence
  Description of Artificial Sequence: Synthetic oligonucleotide
  Sense strand starting at position 627 of SEQ ID NO: 1880517
aguugucauaucuagaguc

SEQ ID NO: 1973083 - RNA, 19 nt, Artificial Sequence
  Description of Artificial Sequence: Synthetic oligonucleotide
  Antisense strand to SEQ ID NO: 1973082
gacucuagauaugacaacu

SEQ ID NO: 1973084 - RNA, 19 nt, Artificial Sequence
  Description of Artificial Sequence: Synthetic oligonucleotide
  Sense strand starting at position 629 of SEQ ID NO: 1880517
uugucauaucuagagucau

SEQ ID NO: 1973085 - RNA, 19 nt, Artificial Sequence
  Description of Artificial Sequence: Synthetic oligonucleotide
  Antisense strand to SEQ ID NO: 1973084
augacucuagauaugacaa

SEQ ID NO: 1973086 - RNA, 19 nt, Artificial Sequence
  Description of Artificial Sequence: Synthetic oligonucleotide
  Sense strand starting at position 829 of SEQ ID NO: 1880517
ggcagaugaucuuucucuu

SEQ ID NO: 1973087 - RNA, 19 nt, Artificial Sequence
  Description of Artificial Sequence: Synthetic oligonucleotide
  Antisense strand to SEQ ID NO: 1973086
aagagaaagaucaucugcc

SEQ ID NO: 1973088 - RNA, 19 nt, Artificial Sequence
  Description of Artificial Sequence: Synthetic oligonucleotide
  Sense strand starting at position 899 of SEQ ID NO: 1880517
aggaguuaaguuuagcauc

SEQ ID NO: 1973089 - RNA, 19 nt, Artificial Sequence
  Description of Artificial Sequence: Synthetic oligonucleotide
  Antisense strand to SEQ ID NO: 1973088
gaugcuaaacuuaacuccu

SEQ ID NO: 1973090 - RNA, 19 nt, Artificial Sequence
  Description of Artificial Sequence: Synthetic oligonucleotide
  Sense strand starting at position 1304 of SEQ ID NO: 1880517
ugacguaguuaaccuaaga

SEQ ID NO: 1973091 - RNA, 19 nt, Artificial Sequence
  Description of Artificial Sequence: Synthetic oligonucleotide
  Antisense strand to SEQ ID NO: 1973090
ucuuagguuaacuacguca

SEQ ID NO: 1973092 - RNA, 19 nt, Artificial Sequence
  Description of Artificial Sequence: Synthetic oligonucleotide
  Sense strand starting at position 1378 of SEQ ID NO: 1880517
cucacagauuauccgaaga

SEQ ID NO: 1973093 - RNA, 19 nt, Artificial Sequence
  Description of Artificial Sequence: Synthetic oligonucleotide
  Antisense strand to SEQ ID NO: 1973092
ucuucggauaaucugugag

SEQ ID NO: 1973094 - RNA, 19 nt, Artificial Sequence
  Description of Artificial Sequence: Synthetic oligonucleotide
  Sense strand starting at position 2036 of SEQ ID NO: 1880517
ucuuaaacgcucgcguuau

SEQ ID NO: 1973095 - RNA, 19 nt, Artificial Sequence
  Description of Artificial Sequence: Synthetic oligonucleotide
  Antisense strand to SEQ ID NO: 1973094
auaacgcgagcguuuaaga

SEQ ID NO: 1973096 - RNA, 19 nt, Artificial Sequence
  Description of Artificial Sequence: Synthetic oligonucleotide
  Sense strand starting at position 2140 of SEQ ID NO: 1880517
cugagagauguucgagaag

SEQ ID NO: 1973097 - RNA, 19 nt, Artificial Sequence
  Description of Artificial Sequence: Synthetic oligonucleotide
  Antisense strand to SEQ ID NO: 1973096
cuucucgaacaucucucag

SEQ ID NO: 1973098 - RNA, 19 nt, Artificial Sequence
  Description of Artificial Sequence: Synthetic oligonucleotide
  Sense strand starting at position 2294 of SEQ ID NO: 1880517
uuauauagucuaugugaug

SEQ ID NO: 1973099 - RNA, 19 nt, Artificial Sequence
  Description of Artificial Sequence: Synthetic oligonucleotide
  Antisense strand to SEQ ID NO: 1973098
caucacauagacuauauaa

SEQ ID NO: 1973100 - RNA, 19 nt, Artificial Sequence
  Description of Artificial Sequence: Synthetic oligonucleotide
  Sense strand starting at position 2484 of SEQ ID NO: 1880517
gucugauguaaucagguua

SEQ ID NO: 1973101 - RNA, 19 nt, Artificial Sequence
  Description of Artificial Sequence: Synthetic oligonucleotide
  Antisense strand to SEQ ID NO: 1973100
uaaccugauuacaucagac

SEQ ID NO: 1973102 - RNA, 19 nt, Artificial Sequence
  Description of Artificial Sequence: Synthetic oligonucleotide
  Sense strand starting at position 2603 of SEQ ID NO: 1880517
acugaagcgacuuggaaau

SEQ ID NO: 1973103 - RNA, 19 nt, Artificial Sequence
  Description of Artificial Sequence: Synthetic oligonucleotide
  Antisense strand to SEQ ID NO: 1973102
auuuccaagucgcuucagu

SEQ ID NO: 1973104 - RNA, 19 nt, Artificial Sequence
  Description of Artificial Sequence: Synthetic oligonucleotide
  Sense strand starting at position 2614 of SEQ ID NO: 1880517
uuggaaauguccuuacauu

SEQ ID NO: 1973105 - RNA, 19 nt, Artificial Sequence
  Description of Artificial Sequence: Synthetic oligonucleotide
  Antisense strand to SEQ ID NO: 1973104
aauguaaggacauuuccaa

SEQ ID NO: 1973106 - RNA, 19 nt, Artificial Sequence
  Description of Artificial Sequence: Synthetic oligonucleotide
  Sense strand starting at position 2629 of SEQ ID NO: 1880517
cauuauauuugaggaggaa

SEQ ID NO: 1973107 - RNA, 19 nt, Artificial Sequence
  Description of Artificial Sequence: Synthetic oligonucleotide
  Antisense strand to SEQ ID NO: 1973106
uuccuccucaaauauaaug

SEQ ID NO: 1973108 - RNA, 19 nt, Artificial Sequence
  Description of Artificial Sequence: Synthetic oligonucleotide
  Sense strand starting at position 2775 of SEQ ID NO: 1880517
aguggaaugucaguuacag

SEQ ID NO: 1973109 - RNA, 19 nt, Artificial Sequence
  Description of Artificial Sequence: Synthetic oligonucleotide
  Antisense strand to SEQ ID NO: 1973108
cuguaacugacauuccacu

SEQ ID NO: 1973110 - RNA, 19 nt, Artificial Sequence
  Description of Artificial Sequence: Synthetic oligonucleotide
  Sense strand starting at position 2837 of SEQ ID NO: 1880517
ugacuauagagccacguua

SEQ ID NO: 1973111 - RNA, 19 nt, Artificial Sequence
  Description of Artificial Sequence: Synthetic oligonucleotide
  Antisense strand to SEQ ID NO: 1973110
uaacguggcucuauaguca

SEQ ID NO: 1973112 - RNA, 19 nt, Artificial Sequence
  Description of Artificial Sequence: Synthetic oligonucleotide
  Sense strand starting at position 2916 of SEQ ID NO: 1880517
caaagucugcuuugaaaug

SEQ ID NO: 1973113 - RNA, 19 nt, Artificial Sequence
  Description of Artificial Sequence: Synthetic oligonucleotide
  Antisense strand to SEQ ID NO: 1973112
cauuucaaagcagacuuug

SEQ ID NO: 1973114 - RNA, 19 nt, Artificial Sequence
  Description of Artificial Sequence: Synthetic oligonucleotide
  Sense strand starting at position 3096 of SEQ ID NO: 1880517
agcugcuuucuggagaaag

SEQ ID NO: 1973115 - RNA, 19 nt, Artificial Sequence
  Description of Artificial Sequence: Synthetic oligonucleotide
  Antisense strand to SEQ ID NO: 1973114
cuuucuccagaaagcagcu

SEQ ID NO: 1973116 - RNA, 19 nt, Artificial Sequence
  Description of Artificial Sequence: Synthetic oligonucleotide
  Sense strand starting at position 3232 of SEQ ID NO: 1880517
cuugaagaggucugaguac

SEQ ID NO: 1973117 - RNA, 19 nt, Artificial Sequence
  Description of Artificial Sequence: Synthetic oligonucleotide
  Antisense strand to SEQ ID NO: 1973116
guacucagaccucuucaag

SEQ ID NO: 1973118 - RNA, 19 nt, Artificial Sequence
  Description of Artificial Sequence: Synthetic oligonucleotide
  Sense strand starting at position 3372 of SEQ ID NO: 1880517
auaauauaaggccgagacu

SEQ ID NO: 1973119 - RNA, 19 nt, Artificial Sequence
  Description of Artificial Sequence: Synthetic oligonucleotide
  Antisense strand to SEQ ID NO: 1973118
agucucggccuuauauuau

SEQ ID NO: 1973120 - RNA, 19 nt, Artificial Sequence
  Description of Artificial Sequence: Synthetic oligonucleotide
  Sense strand starting at position 3373 of SEQ ID NO: 1880517
uaauauaaggccgagacuu

SEQ ID NO: 1973121 - RNA, 19 nt, Artificial Sequence
  Description of Artificial Sequence: Synthetic oligonucleotide
  Antisense strand to SEQ ID NO: 1973120
aagucucggccuuauauua

SEQ ID NO: 1973122 - RNA, 19 nt, Artificial Sequence
  Description of Artificial Sequence: Synthetic oligonucleotide
  Sense strand starting at position 3446 of SEQ ID NO: 1880517
ugaaguauuugguugguuu

SEQ ID NO: 1973123 - RNA, 19 nt, Artificial Sequence
  Description of Artificial Sequence: Synthetic oligonucleotide
  Antisense strand to SEQ ID NO: 1973122
aaaccaaccaaauacuuca

SEQ ID NO: 1973124 - RNA, 19 nt, Artificial Sequence
  Description of Artificial Sequence: Synthetic oligonucleotide
  Sense strand starting at position 3450 of SEQ ID NO: 1880517
guauuugguugguuuagau

SEQ ID NO: 1973125 - RNA, 19 nt, Artificial Sequence
  Description of Artificial Sequence: Synthetic oligonucleotide
  Antisense strand to SEQ ID NO: 1973124
aucuaaaccaaccaaauac

SEQ ID NO: 1973126 - RNA, 19 nt, Artificial Sequence
  Description of Artificial Sequence: Synthetic oligonucleotide
  Sense strand starting at position 3475 of SEQ ID NO: 1880517
uuaguuccagaucaauagu

SEQ ID NO: 1973127 - RNA, 19 nt, Artificial Sequence
  Description of Artificial Sequence: Synthetic oligonucleotide
  Antisense strand to SEQ ID NO: 1973126
acuauugaucuggaacuaa

SEQ ID NO: 1973128 - RNA, 19 nt, Artificial Sequence
  Description of Artificial Sequence: Synthetic oligonucleotide
  Sense strand starting at position 70 of SEQ ID NO: 1880518
acaagaauuggugguugau

SEQ ID NO: 1973129 - RNA, 19 nt, Artificial Sequence
  Description of Artificial Sequence: Synthetic oligonucleotide
  Antisense strand to SEQ ID NO: 1973128
aucaaccaccaauucuugu

SEQ ID NO: 1973130 - RNA, 19 nt, Artificial Sequence
  Description of Artificial Sequence: Synthetic oligonucleotide
  Sense strand starting at position 72 of SEQ ID NO: 1880518
aagaauuggugguugauua

SEQ ID NO: 1973131 - RNA, 19 nt, Artificial Sequence
  Description of Artificial Sequence: Synthetic oligonucleotide
  Antisense strand to SEQ ID NO: 1973130
uaaucaaccaccaauucuu

SEQ ID NO: 1973132 - RNA, 19 nt, Artificial Sequence
  Description of Artificial Sequence: Synthetic oligonucleotide
  Sense strand starting at position 112 of SEQ ID NO: 1880518
gcaaguguccacgauaaau

SEQ ID NO: 1973133 - RNA, 19 nt, Artificial Sequence
  Description of Artificial Sequence: Synthetic oligonucleotide
  Antisense strand to SEQ ID NO: 1973132
auuuaucguggacacuugc

SEQ ID NO: 1973134 - RNA, 19 nt, Artificial Sequence
  Description of Artificial Sequence: Synthetic oligonucleotide
  Sense strand starting at position 114 of SEQ ID NO: 1880518
aaguguccacgauaaauag

SEQ ID NO: 1973135 - RNA, 19 nt, Artificial Sequence
  Description of Artificial Sequence: Synthetic oligonucleotide
  Antisense strand to SEQ ID NO: 1973134
cuauuuaucguggacacuu

SEQ ID NO: 1973136 - RNA, 19 nt, Artificial Sequence
  Description of Artificial Sequence: Synthetic oligonucleotide
  Sense strand starting at position 199 of SEQ ID NO: 1880518
ugacgacuaguauaguaua

SEQ ID NO: 1973137 - RNA, 19 nt, Artificial Sequence
  Description of Artificial Sequence: Synthetic oligonucleotide
  Antisense strand to SEQ ID NO: 1973136
uauacuauacuagucguca

SEQ ID NO: 1973138 - RNA, 19 nt, Artificial Sequence
  Description of Artificial Sequence: Synthetic oligonucleotide
  Sense strand starting at position 223 of SEQ ID NO: 1880518
gcauuacaaccauguggau

SEQ ID NO: 1973139 - RNA, 19 nt, Artificial Sequence
  Description of Artificial Sequence: Synthetic oligonucleotide
  Antisense strand to SEQ ID NO: 1973138
auccacaugguuguaaugc

SEQ ID NO: 1973140 - RNA, 19 nt, Artificial Sequence
  Description of Artificial Sequence: Synthetic oligonucleotide
  Sense strand starting at position 237 of SEQ ID NO: 1880518
uggauagguccugacagug

SEQ ID NO: 1973141 - RNA, 19 nt, Artificial Sequence
  Description of Artificial Sequence: Synthetic oligonucleotide
  Antisense strand to SEQ ID NO: 1973140
cacugucaggaccuaucca

SEQ ID NO: 1973142 - RNA, 19 nt, Artificial Sequence
  Description of Artificial Sequence: Synthetic oligonucleotide
  Sense strand starting at position 1218 of SEQ ID NO: 1880518
gagacaugguuagaaagaa

SEQ ID NO: 1973143 - RNA, 19 nt, Artificial Sequence
  Description of Artificial Sequence: Synthetic oligonucleotide
  Antisense strand to SEQ ID NO: 1973142
uucuuucuaaccaugucuc

SEQ ID NO: 1973144 - RNA, 19 nt, Artificial Sequence
  Description of Artificial Sequence: Synthetic oligonucleotide
  Sense strand starting at position 1341 of SEQ ID NO: 1880518
gucacuggauuugacaauu

SEQ ID NO: 1973145 - RNA, 19 nt, Artificial Sequence
  Description of Artificial Sequence: Synthetic oligonucleotide
  Antisense strand to SEQ ID NO: 1973144
aauugucaaauccagugac

SEQ ID NO: 1973146 - RNA, 19 nt, Artificial Sequence
  Description of Artificial Sequence: Synthetic oligonucleotide
  Sense strand starting at position 1386 of SEQ ID NO: 1880518
aggguuaauuucucugugu

SEQ ID NO: 1973147 - RNA, 19 nt, Artificial Sequence
  Description of Artificial Sequence: Synthetic oligonucleotide
  Antisense strand to SEQ ID NO: 1973146
acacagagaaauuaacccu

SEQ ID NO: 1973148 - RNA, 19 nt, Artificial Sequence
  Description of Artificial Sequence: Synthetic oligonucleotide
  Sense strand starting at position 1387 of SEQ ID NO: 1880518
ggguuaauuucucuguguu

SEQ ID NO: 1973149 - RNA, 19 nt, Artificial Sequence
  Description of Artificial Sequence: Synthetic oligonucleotide
  Antisense strand to SEQ ID NO: 1973148
aacacagagaaauuaaccc

SEQ ID NO: 1973150 - RNA, 19 nt, Artificial Sequence
  Description of Artificial Sequence: Synthetic oligonucleotide
  Sense strand starting at position 1389 of SEQ ID NO: 1880518
guuaauuucucuguguuug

SEQ ID NO: 1973151 - RNA, 19 nt, Artificial Sequence
  Description of Artificial Sequence: Synthetic oligonucleotide
  Antisense strand to SEQ ID NO: 1973150
caaacacagagaaauuaac

SEQ ID NO: 1973152 - RNA, 19 nt, Artificial Sequence
  Description of Artificial Sequence: Synthetic oligonucleotide
  Sense strand starting at position 1482 of SEQ ID NO: 1880518
uuuggcaagacgugagaaa

SEQ ID NO: 1973153 - RNA, 19 nt, Artificial Sequence
  Description of Artificial Sequence: Synthetic oligonucleotide
  Antisense strand to SEQ ID NO: 1973152
uuucucacgucuugccaaa

SEQ ID NO: 1973154 - RNA, 19 nt, Artificial Sequence
  Description of Artificial Sequence: Synthetic oligonucleotide
  Sense strand starting at position 1483 of SEQ ID NO: 1880518
uuggcaagacgugagaaau

SEQ ID NO: 1973155 - RNA, 19 nt, Artificial Sequence
  Description of Artificial Sequence: Synthetic oligonucleotide
  Antisense strand to SEQ ID NO: 1973154
auuucucacgucuugccaa

SEQ ID NO: 1973156 - RNA, 19 nt, Artificial Sequence
  Description of Artificial Sequence: Synthetic oligonucleotide
  Sense strand starting at position 1508 of SEQ ID NO: 1880518
acaugucacgccuauaauc

SEQ ID NO: 1973157 - RNA, 19 nt, Artificial Sequence
  Description of Artificial Sequence: Synthetic oligonucleotide
  Antisense strand to SEQ ID NO: 1973156
gauuauaggcgugacaugu

SEQ ID NO: 1973158 - RNA, 19 nt, Artificial Sequence
  Description of Artificial Sequence: Synthetic oligonucleotide
  Sense strand starting at position 1742 of SEQ ID NO: 1880518
acagaaugagacugcuuaa

SEQ ID NO: 1973159 - RNA, 19 nt, Artificial Sequence
  Description of Artificial Sequence: Synthetic oligonucleotide
  Antisense strand to SEQ ID NO: 1973158
uuaagcagucucauucugu

SEQ ID NO: 1973160 - RNA, 19 nt, Artificial Sequence
  Description of Artificial Sequence: Synthetic oligonucleotide
  Sense strand starting at position 1804 of SEQ ID NO: 1880518
uuugcaggacuuugacaau

SEQ ID NO: 1973161 - RNA, 19 nt, Artificial Sequence
  Description of Artificial Sequence: Synthetic oligonucleotide
  Antisense strand to SEQ ID NO: 1973160
auugucaaaguccugcaaa

SEQ ID NO: 1973162 - RNA, 19 nt, Artificial Sequence
  Description of Artificial Sequence: Synthetic oligonucleotide
  Sense strand starting at position 1879 of SEQ ID NO: 1880518
aguuuaucacuguaacccu

SEQ ID NO: 1973163 - RNA, 19 nt, Artificial Sequence
  Description of Artificial Sequence: Synthetic oligonucleotide
  Antisense strand to SEQ ID NO: 1973162
aggguuacagugauaaacu

SEQ ID NO: 1973164 - RNA, 19 nt, Artificial Sequence
  Description of Artificial Sequence: Synthetic oligonucleotide
  Sense strand starting at position 1898 of SEQ ID NO: 1880518
gugugucuuagagaauguu

SEQ ID NO: 1973165 - RNA, 19 nt, Artificial Sequence
  Description of Artificial Sequence: Synthetic oligonucleotide
  Antisense strand to SEQ ID NO: 1973164
aacauucucuaagacacac

SEQ ID NO: 1973166 - RNA, 19 nt, Artificial Sequence
  Description of Artificial Sequence: Synthetic oligonucleotide
  Sense strand starting at position 2116 of SEQ ID NO: 1880518
agaguagcauucuccuacu

SEQ ID NO: 1973167 - RNA, 19 nt, Artificial Sequence
  Description of Artificial Sequence: Synthetic oligonucleotide
  Antisense strand to SEQ ID NO: 1973166
aguaggagaaugcuacucu

SEQ ID NO: 1973168 - RNA, 19 nt, Artificial Sequence
  Description of Artificial Sequence: Synthetic oligonucleotide
  Sense strand starting at position 2217 of SEQ ID NO: 1880518
cuuggagauuuccauugua

SEQ ID NO: 1973169 - RNA, 19 nt, Artificial Sequence
  Description of Artificial Sequence: Synthetic oligonucleotide
  Antisense strand to SEQ ID NO: 1973168
uacaauggaaaucuccaag

SEQ ID NO: 1973170 - RNA, 19 nt, Artificial Sequence
  Description of Artificial Sequence: Synthetic oligonucleotide
  Sense strand starting at position 2276 of SEQ ID NO: 1880518
ugggucuaauugcuagaaa

SEQ ID NO: 1973171 - RNA, 19 nt, Artificial Sequence
  Description of Artificial Sequence: Synthetic oligonucleotide
  Antisense strand to SEQ ID NO: 1973170
uuucuagcaauuagaccca

SEQ ID NO: 1973172 - RNA, 19 nt, Artificial Sequence
  Description of Artificial Sequence: Synthetic oligonucleotide
  Sense strand starting at position 2279 of SEQ ID NO: 1880518
gucuaauugcuagaaaggu

SEQ ID NO: 1973173 - RNA, 19 nt, Artificial Sequence
  Description of Artificial Sequence: Synthetic oligonucleotide
  Antisense strand to SEQ ID NO: 1973172
accuuucuagcaauuagac

SEQ ID NO: 1973174 - RNA, 19 nt, Artificial Sequence
  Description of Artificial Sequence: Synthetic oligonucleotide
  Sense strand starting at position 2417 of SEQ ID NO: 1880518
uacucaggagacugguaau

SEQ ID NO: 1973175 - RNA, 19 nt, Artificial Sequence
  Description of Artificial Sequence: Synthetic oligonucleotide
  Antisense strand to SEQ ID NO: 1973174
auuaccagucuccugagua

SEQ ID NO: 1973176 - RNA, 19 nt, Artificial Sequence
  Description of Artificial Sequence: Synthetic oligonucleotide
  Sense strand starting at position 2483 of SEQ ID NO: 1880518
agggcaguucuagaccaua

SEQ ID NO: 1973177 - RNA, 19 nt, Artificial Sequence
  Description of Artificial Sequence: Synthetic oligonucleotide
  Antisense strand to SEQ ID NO: 1973176
uauggucuagaacugcccu

SEQ ID NO: 1973178 - RNA, 19 nt, Artificial Sequence
  Description of Artificial Sequence: Synthetic oligonucleotide
  Sense strand starting at position 2486 of SEQ ID NO: 1880518
gcaguucuagaccauaguu

SEQ ID NO: 1973179 - RNA, 19 nt, Artificial Sequence
  Description of Artificial Sequence: Synthetic oligonucleotide
  Antisense strand to SEQ ID NO: 1973178
aacuauggucuagaacugc

SEQ ID NO: 1973180 - RNA, 19 nt, Artificial Sequence
  Description of Artificial Sequence: Synthetic oligonucleotide
  Sense strand starting at position 2598 of SEQ ID NO: 1880518
uggugcauugaagauguaa

SEQ ID NO: 1973181 - RNA, 19 nt, Artificial Sequence
  Description of Artificial Sequence: Synthetic oligonucleotide
  Antisense strand to SEQ ID NO: 1973180
uuacaucuucaaugcacca

SEQ ID NO: 1973182 - RNA, 19 nt, Artificial Sequence
  Description of Artificial Sequence: Synthetic oligonucleotide
  Sense strand starting at position 2881 of SEQ ID NO: 1880518
gaaggagauuugcauuaga

SEQ ID NO: 1973183 - RNA, 19 nt, Artificial Sequence
  Description of Artificial Sequence: Synthetic oligonucleotide
  Antisense strand to SEQ ID NO: 1973182
ucuaaugcaaaucuccuuc

SEQ ID NO: 1973184 - RNA, 19 nt, Artificial Sequence
  Description of Artificial Sequence: Synthetic oligonucleotide
  Sense strand starting at position 2886 of SEQ ID NO: 1880518
agauuugcauuagaaguca

SEQ ID NO: 1973185 - RNA, 19 nt, Artificial Sequence
  Description of Artificial Sequence: Synthetic oligonucleotide
  Antisense strand to SEQ ID NO: 1973184
ugacuucuaaugcaaaucu

SEQ ID NO: 1973186 - RNA, 19 nt, Artificial Sequence
  Description of Artificial Sequence: Synthetic oligonucleotide
  Sense strand starting at position 2902 of SEQ ID NO: 1880518
ucaaauaguccauguugag

SEQ ID NO: 1973187 - RNA, 19 nt, Artificial Sequence
  Description of Artificial Sequence: Synthetic oligonucleotide
  Antisense strand to SEQ ID NO: 1973186
cucaacauggacuauuuga

SEQ ID NO: 1973188 - RNA, 19 nt, Artificial Sequence
  Description of Artificial Sequence: Synthetic oligonucleotide
  Sense strand starting at position 2970 of SEQ ID NO: 1880518
gggcuuaucuuauuccaca

SEQ ID NO: 1973189 - RNA, 19 nt, Artificial Sequence
  Description of Artificial Sequence: Synthetic oligonucleotide
  Antisense strand to SEQ ID NO: 1973188
uguggaauaagauaagccc

SEQ ID NO: 1973190 - RNA, 19 nt, Artificial Sequence
  Description of Artificial Sequence: Synthetic oligonucleotide
  Sense strand starting at position 3103 of SEQ ID NO: 1880518
ugcccuuuacaauggagau

SEQ ID NO: 1973191 - RNA, 19 nt, Artificial Sequence
  Description of Artificial Sequence: Synthetic oligonucleotide
  Antisense strand to SEQ ID NO: 1973190
aucuccauuguaaagggca

SEQ ID NO: 1973192 - RNA, 19 nt, Artificial Sequence
  Description of Artificial Sequence: Synthetic oligonucleotide
  Sense strand starting at position 3162 of SEQ ID NO: 1880518
cugaaagagucccugagau

SEQ ID NO: 1973193 - RNA, 19 nt, Artificial Sequence
  Description of Artificial Sequence: Synthetic oligonucleotide
  Antisense strand to SEQ ID NO: 1973192
aucucagggacucuuucag

SEQ ID NO: 1973194 - RNA, 19 nt, Artificial Sequence
  Description of Artificial Sequence: Synthetic oligonucleotide
  Sense strand starting at position 3209 of SEQ ID NO: 1880518
cauaguuaccucuggauug

SEQ ID NO: 1973195 - RNA, 19 nt, Artificial Sequence
  Description of Artificial Sequence: Synthetic oligonucleotide
  Antisense strand to SEQ ID NO: 1973194
caauccagagguaacuaug

SEQ ID NO: 1973196 - RNA, 19 nt, Artificial Sequence
  Description of Artificial Sequence: Synthetic oligonucleotide
  Sense strand starting at position 3567 of SEQ ID NO: 1880518
ucacaagauugcuccagaa

SEQ ID NO: 1973197 - RNA, 19 nt, Artificial Sequence
  Description of Artificial Sequence: Synthetic oligonucleotide
  Antisense strand to SEQ ID NO: 1973196
uucuggagcaaucuuguga

SEQ ID NO: 1973198 - RNA, 19 nt, Artificial Sequence
  Description of Artificial Sequence: Synthetic oligonucleotide
  Sense strand starting at position 3644 of SEQ ID NO: 1880518
cucauugagucucucauca

SEQ ID NO: 1973199 - RNA, 19 nt, Artificial Sequence
  Description of Artificial Sequence: Synthetic oligonucleotide
  Antisense strand to SEQ ID NO: 1973198
ugaugagagacucaaugag

SEQ ID NO: 1973200 - RNA, 19 nt, Artificial Sequence
  Description of Artificial Sequence: Synthetic oligonucleotide
  Sense strand starting at position 3649 of SEQ ID NO: 1880518
ugagucucucaucaaagca

SEQ ID NO: 1973201 - RNA, 19 nt, Artificial Sequence
  Description of Artificial Sequence: Synthetic oligonucleotide
  Antisense strand to SEQ ID NO: 1973200
ugcuuugaugagagacuca

SEQ ID NO: 1973202 - RNA, 19 nt, Artificial Sequence
  Description of Artificial Sequence: Synthetic oligonucleotide
  Sense strand starting at position 3823 of SEQ ID NO: 1880518
cagaaacaugggcauguuu

SEQ ID NO: 1973203 - RNA, 19 nt, Artificial Sequence
  Description of Artificial Sequence: Synthetic oligonucleotide
  Antisense strand to SEQ ID NO: 1973202
aaacaugcccauguuucug

SEQ ID NO: 1973204 - RNA, 19 nt, Artificial Sequence
  Description of Artificial Sequence: Synthetic oligonucleotide
  Sense strand starting at position 3894 of SEQ ID NO: 1880518
cuagaauucuggcaauuug

SEQ ID NO: 1973205 - RNA, 19 nt, Artificial Sequence
  Description of Artificial Sequence: Synthetic oligonucleotide
  Antisense strand to SEQ ID NO: 1973204
caaauugccagaauucuag

SEQ ID NO: 1973206 - RNA, 19 nt, Artificial Sequence
  Description of Artificial Sequence: Synthetic oligonucleotide
  Sense strand starting at position 3902 of SEQ ID NO: 1880518
cuggcaauuugaugaagaa

SEQ ID NO: 1973207 - RNA, 19 nt, Artificial Sequence
  Description of Artificial Sequence: Synthetic oligonucleotide
  Antisense strand to SEQ ID NO: 1973206
uucuucaucaaauugccag

SEQ ID NO: 1973208 - RNA, 19 nt, Artificial Sequence
  Description of Artificial Sequence: Synthetic oligonucleotide
  Sense strand starting at position 52 of SEQ ID NO: 1880519
uuugaaagguuucuuuaag

SEQ ID NO: 1973209 - RNA, 19 nt, Artificial Sequence
  Description of Artificial Sequence: Synthetic oligonucleotide
  Antisense strand to SEQ ID NO: 1973208
cuuaaagaaaccuuucaaa

SEQ ID NO: 1973210 - RNA, 19 nt, Artificial Sequence
  Description of Artificial Sequence: Synthetic oligonucleotide
  Sense strand starting at position 53 of SEQ ID NO: 1880519
uugaaagguuucuuuaagg

SEQ ID NO: 1973211 - RNA, 19 nt, Artificial Sequence
  Description of Artificial Sequence: Synthetic oligonucleotide
  Antisense strand to SEQ ID NO: 1973210
ccuuaaagaaaccuuucaa

SEQ ID NO: 1973212 - RNA, 19 nt, Artificial Sequence
  Description of Artificial Sequence: Synthetic oligonucleotide
  Sense strand starting at position 296 of SEQ ID NO: 1880519
cuuacuacuccugagggua

SEQ ID NO: 1973213 - RNA, 19 nt, Artificial Sequence
  Description of Artificial Sequence: Synthetic oligonucleotide
  Antisense strand to SEQ ID NO: 1973212
uacccucaggaguaguaag

SEQ ID NO: 1973214 - RNA, 19 nt, Artificial Sequence
  Description of Artificial Sequence: Synthetic oligonucleotide
  Sense strand starting at position 308 of SEQ ID NO: 1880519
gaggguaaucuuugucaua

SEQ ID NO: 1973215 - RNA, 19 nt, Artificial Sequence
  Description of Artificial Sequence: Synthetic oligonucleotide
  Antisense strand to SEQ ID NO: 1973214
uaugacaaagauuacccuc

SEQ ID NO: 1973216 - RNA, 19 nt, Artificial Sequence
  Description of Artificial Sequence: Synthetic oligonucleotide
  Sense strand starting at position 309 of SEQ ID NO: 1880519
aggguaaucuuugucauaa

SEQ ID NO: 1973217 - RNA, 19 nt, Artificial Sequence
  Description of Artificial Sequence: Synthetic oligonucleotide
  Antisense strand to SEQ ID NO: 1973216
uuaugacaaagauuacccu

SEQ ID NO: 1973218 - RNA, 19 nt, Artificial Sequence
  Description of Artificial Sequence: Synthetic oligonucleotide
  Sense strand starting at position 310 of SEQ ID NO: 1880519
ggguaaucuuugucauaau

SEQ ID NO: 1973219 - RNA, 19 nt, Artificial Sequence
  Description of Artificial Sequence: Synthetic oligonucleotide
  Antisense strand to SEQ ID NO: 1973218
auuaugacaaagauuaccc

SEQ ID NO: 1973220 - RNA, 19 nt, Artificial Sequence
  Description of Artificial Sequence: Synthetic oligonucleotide
  Sense strand starting at position 350 of SEQ ID NO: 1880519
cuauuuguauaguuaugca

SEQ ID NO: 1973221 - RNA, 19 nt, Artificial Sequence
  Description of Artificial Sequence: Synthetic oligonucleotide
  Antisense strand to SEQ ID NO: 1973220
ugcauaacuauacaaauag

SEQ ID NO: 1973222 - RNA, 19 nt, Artificial Sequence
  Description of Artificial Sequence: Synthetic oligonucleotide
  Sense strand starting at position 369 of SEQ ID NO: 1880519
gaauauauuccugggaggu

SEQ ID NO: 1973223 - RNA, 19 nt, Artificial Sequence
  Description of Artificial Sequence: Synthetic oligonucleotide
  Antisense strand to SEQ ID NO: 1973222
accucccaggaauauauuc

SEQ ID NO: 1973224 - RNA, 19 nt, Artificial Sequence
  Description of Artificial Sequence: Synthetic oligonucleotide
  Sense strand starting at position 370 of SEQ ID NO: 1880519
aauauauuccugggagguu

SEQ ID NO: 1973225 - RNA, 19 nt, Artificial Sequence
  Description of Artificial Sequence: Synthetic oligonucleotide
  Antisense strand to SEQ ID NO: 1973224
aaccucccaggaauauauu

SEQ ID NO: 1973226 - RNA, 19 nt, Artificial Sequence
  Description of Artificial Sequence: Synthetic oligonucleotide
  Sense strand starting at position 1434 of SEQ ID NO: 1880519
gccggcugucaguccuaga

SEQ ID NO: 1973227 - RNA, 19 nt, Artificial Sequence
  Description of Artificial Sequence: Synthetic oligonucleotide
  Antisense strand to SEQ ID NO: 1973226
ucuaggacugacagccggc

SEQ ID NO: 1973228 - RNA, 19 nt, Artificial Sequence
  Description of Artificial Sequence: Synthetic oligonucleotide
  Sense strand starting at position 2173 of SEQ ID NO: 1880519
ggugcuugguguccauuua

SEQ ID NO: 1973229 - RNA, 19 nt, Artificial Sequence
  Description of Artificial Sequence: Synthetic oligonucleotide
  Antisense strand to SEQ ID NO: 1973228
uaaauggacaccaagcacc

SEQ ID NO: 1973230 - RNA, 19 nt, Artificial Sequence
  Description of Artificial Sequence: Synthetic oligonucleotide
  Sense strand starting at position 2174 of SEQ ID NO: 1880519
gugcuugguguccauuuau

SEQ ID NO: 1973231 - RNA, 19 nt, Artificial Sequence
  Description of Artificial Sequence: Synthetic oligonucleotide
  Antisense strand to SEQ ID NO: 1973230
auaaauggacaccaagcac

SEQ ID NO: 1973232 - RNA, 19 nt, Artificial Sequence
  Description of Artificial Sequence: Synthetic oligonucleotide
  Sense strand starting at position 2282 of SEQ ID NO: 1880519
cugugaugguaucuugaag

SEQ ID NO: 1973233 - RNA, 19 nt, Artificial Sequence
  Description of Artificial Sequence: Synthetic oligonucleotide
  Antisense strand to SEQ ID NO: 1973232
cuucaagauaccaucacag

SEQ ID NO: 1973234 - RNA, 19 nt, Artificial Sequence
  Description of Artificial Sequence: Synthetic oligonucleotide
  Sense strand starting at position 2288 of SEQ ID NO: 1880519
ugguaucuugaaggaagca

SEQ ID NO: 1973235 - RNA, 19 nt, Artificial Sequence
  Description of Artificial Sequence: Synthetic oligonucleotide
  Antisense strand to SEQ ID NO: 1973234
ugcuuccuucaagauacca

SEQ ID NO: 1973236 - RNA, 19 nt, Artificial Sequence
  Description of Artificial Sequence: Synthetic oligonucleotide
  Sense strand starting at position 2321 of SEQ ID NO: 1880519
uauauaggaggguguuuaa

SEQ ID NO: 1973237 - RNA, 19 nt, Artificial Sequence
  Description of Artificial Sequence: Synthetic oligonucleotide
  Antisense strand to SEQ ID NO: 1973236
uuaaacacccuccuauaua

SEQ ID NO: 1973238 - RNA, 19 nt, Artificial Sequence
  Description of Artificial Sequence: Synthetic oligonucleotide
  Sense strand starting at position 2324 of SEQ ID NO: 1880519
auaggaggguguuuaaguu

SEQ ID NO: 1973239 - RNA, 19 nt, Artificial Sequence
  Description of Artificial Sequence: Synthetic oligonucleotide
  Antisense strand to SEQ ID NO: 1973238
aacuuaaacacccuccuau

SEQ ID NO: 1973240 - RNA, 19 nt, Artificial Sequence
  Description of Artificial Sequence: Synthetic oligonucleotide
  Sense strand starting at position 2354 of SEQ ID NO: 1880519
cucguagauauguagggua

SEQ ID NO: 1973241 - RNA, 19 nt, Artificial Sequence
  Description of Artificial Sequence: Synthetic oligonucleotide
  Antisense strand to SEQ ID NO: 1973240
uacccuacauaucuacgag

SEQ ID NO: 1973242 - RNA, 19 nt, Artificial Sequence
  Description of Artificial Sequence: Synthetic oligonucleotide
  Sense strand starting at position 2382 of SEQ ID NO: 1880519
aauguagaguggcuuuaaa

SEQ ID NO: 1973243 - RNA, 19 nt, Artificial Sequence
  Description of Artificial Sequence: Synthetic oligonucleotide
  Antisense strand to SEQ ID NO: 1973242
uuuaaagccacucuacauu

SEQ ID NO: 1973244 - RNA, 19 nt, Artificial Sequence
  Description of Artificial Sequence: Synthetic oligonucleotide
  Sense strand starting at position 2437 of SEQ ID NO: 1880519
agaguuguaccacacucau

SEQ ID NO: 1973245 - RNA, 19 nt, Artificial Sequence
  Description of Artificial Sequence: Synthetic oligonucleotide
  Antisense strand to SEQ ID NO: 1973244
augagugugguacaacucu

SEQ ID NO: 1973246 - RNA, 19 nt, Artificial Sequence
  Description of Artificial Sequence: Synthetic oligonucleotide
  Sense strand starting at position 2733 of SEQ ID NO: 1880519
gcuaguguggcaguuucua

SEQ ID NO: 1973247 - RNA, 19 nt, Artificial Sequence
  Description of Artificial Sequence: Synthetic oligonucleotide
  Antisense strand to SEQ ID NO: 1973246
uagaaacugccacacuagc

SEQ ID NO: 1973248 - RNA, 19 nt, Artificial Sequence
  Description of Artificial Sequence: Synthetic oligonucleotide
  Sense strand starting at position 2919 of SEQ ID NO: 1880519
agucuaauuggugaguauu

SEQ ID NO: 1973249 - RNA, 19 nt, Artificial Sequence
  Description of Artificial Sequence: Synthetic oligonucleotide
  Antisense strand to SEQ ID NO: 1973248
aauacucaccaauuagacu

SEQ ID NO: 1973250 - RNA, 19 nt, Artificial Sequence
  Description of Artificial Sequence: Synthetic oligonucleotide
  Sense strand starting at position 3009 of SEQ ID NO: 1880519
uguuaaagugacgaauauu

SEQ ID NO: 1973251 - RNA, 19 nt, Artificial Sequence
  Description of Artificial Sequence: Synthetic oligonucleotide
  Antisense strand to SEQ ID NO: 1973250
aauauucgucacuuuaaca

SEQ ID NO: 1973252 - RNA, 19 nt, Artificial Sequence
  Description of Artificial Sequence: Synthetic oligonucleotide
  Sense strand starting at position 3017 of SEQ ID NO: 1880519
ugacgaauauugcuacaua

SEQ ID NO: 1973253 - RNA, 19 nt, Artificial Sequence
  Description of Artificial Sequence: Synthetic oligonucleotide
  Antisense strand to SEQ ID NO: 1973252
uauguagcaauauucguca

SEQ ID NO: 1973254 - RNA, 19 nt, Artificial Sequence
  Description of Artificial Sequence: Synthetic oligonucleotide
  Sense strand starting at position 3020 of SEQ ID NO: 1880519
cgaauauugcuacauaauu

SEQ ID NO: 1973255 - RNA, 19 nt, Artificial Sequence
  Description of Artificial Sequence: Synthetic oligonucleotide
  Antisense strand to SEQ ID NO: 1973254
aauuauguagcaauauucg

SEQ ID NO: 1973256 - RNA, 19 nt, Artificial Sequence
  Description of Artificial Sequence: Synthetic oligonucleotide
  Sense strand starting at position 3082 of SEQ ID NO: 1880519
aauuguggcccugagaaau

SEQ ID NO: 1973257 - RNA, 19 nt, Artificial Sequence
  Description of Artificial Sequence: Synthetic oligonucleotide
  Antisense strand to SEQ ID NO: 1973256
auuucucagggccacaauu

SEQ ID NO: 1973258 - RNA, 19 nt, Artificial Sequence
  Description of Artificial Sequence: Synthetic oligonucleotide
  Sense strand starting at position 3194 of SEQ ID NO: 1880519
gagauaaacuguccuuaag

SEQ ID NO: 1973259 - RNA, 19 nt, Artificial Sequence
  Description of Artificial Sequence: Synthetic oligonucleotide
  Antisense strand to SEQ ID NO: 1973258
cuuaaggacaguuuaucuc

SEQ ID NO: 1973260 - RNA, 19 nt, Artificial Sequence
  Description of Artificial Sequence: Synthetic oligonucleotide
  Sense strand starting at position 3196 of SEQ ID NO: 1880519
gauaaacuguccuuaagug

SEQ ID NO: 1973261 - RNA, 19 nt, Artificial Sequence
  Description of Artificial Sequence: Synthetic oligonucleotide
  Antisense strand to SEQ ID NO: 1973260
cacuuaaggacaguuuauc

SEQ ID NO: 1973262 - RNA, 19 nt, Artificial Sequence
  Description of Artificial Sequence: Synthetic oligonucleotide
  Sense strand starting at position 3197 of SEQ ID NO: 1880519
auaaacuguccuuaaguga

SEQ ID NO: 1973263 - RNA, 19 nt, Artificial Sequence
  Description of Artificial Sequence: Synthetic oligonucleotide
  Antisense strand to SEQ ID NO: 1973262
ucacuuaaggacaguuuau

SEQ ID NO: 1973264 - RNA, 19 nt, Artificial Sequence
  Description of Artificial Sequence: Synthetic oligonucleotide
  Sense strand starting at position 3261 of SEQ ID NO: 1880519
accaguaggaucgggaaga

SEQ ID NO: 1973265 - RNA, 19 nt, Artificial Sequence
  Description of Artificial Sequence: Synthetic oligonucleotide
  Antisense strand to SEQ ID NO: 1973264
ucuucccgauccuacuggu

SEQ ID NO: 1973266 - RNA, 19 nt, Artificial Sequence
  Description of Artificial Sequence: Synthetic oligonucleotide
  Sense strand starting at position 3320 of SEQ ID NO: 1880519
cgauuaucacaauagugua

SEQ ID NO: 1973267 - RNA, 19 nt, Artificial Sequence
  Description of Artificial Sequence: Synthetic oligonucleotide
  Antisense strand to SEQ ID NO: 1973266
uacacuauugugauaaucg

SEQ ID NO: 1973268 - RNA, 19 nt, Artificial Sequence
  Description of Artificial Sequence: Synthetic oligonucleotide
  Sense strand starting at position 3373 of SEQ ID NO: 1880519
agagguuauuaacugcaca

SEQ ID NO: 1973269 - RNA, 19 nt, Artificial Sequence
  Description of Artificial Sequence: Synthetic oligonucleotide
  Antisense strand to SEQ ID NO: 1973268
ugugcaguuaauaaccucu

SEQ ID NO: 1973270 - RNA, 19 nt, Artificial Sequence
  Description of Artificial Sequence: Synthetic oligonucleotide
  Sense strand starting at position 3381 of SEQ ID NO: 1880519
uuaacugcacauugaugau

SEQ ID NO: 1973271 - RNA, 19 nt, Artificial Sequence
  Description of Artificial Sequence: Synthetic oligonucleotide
  Antisense strand to SEQ ID NO: 1973270
aucaucaaugugcaguuaa

SEQ ID NO: 1973272 - RNA, 19 nt, Artificial Sequence
  Description of Artificial Sequence: Synthetic oligonucleotide
  Sense strand starting at position 3390 of SEQ ID NO: 1880519
cauugaugauuugaaugga

SEQ ID NO: 1973273 - RNA, 19 nt, Artificial Sequence
  Description of Artificial Sequence: Synthetic oligonucleotide
  Antisense strand to SEQ ID NO: 1973272
uccauucaaaucaucaaug

SEQ ID NO: 1973274 - RNA, 19 nt, Artificial Sequence
  Description of Artificial Sequence: Synthetic oligonucleotide
  Sense strand starting at position 3575 of SEQ ID NO: 1880519
gaggauaaguccuugaggu

SEQ ID NO: 1973275 - RNA, 19 nt, Artificial Sequence
  Description of Artificial Sequence: Synthetic oligonucleotide
  Antisense strand to SEQ ID NO: 1973274
accucaaggacuuauccuc

SEQ ID NO: 1973276 - RNA, 19 nt, Artificial Sequence
  Description of Artificial Sequence: Synthetic oligonucleotide
  Sense strand starting at position 3576 of SEQ ID NO: 1880519
aggauaaguccuugagguu

SEQ ID NO: 1973277 - RNA, 19 nt, Artificial Sequence
  Description of Artificial Sequence: Synthetic oligonucleotide
  Antisense strand to SEQ ID NO: 1973276
aaccucaaggacuuauccu

SEQ ID NO: 1973278 - RNA, 19 nt, Artificial Sequence
  Description of Artificial Sequence: Synthetic oligonucleotide
  Sense strand starting at position 3577 of SEQ ID NO: 1880519
ggauaaguccuugagguug

SEQ ID NO: 1973279 - RNA, 19 nt, Artificial Sequence
  Description of Artificial Sequence: Synthetic oligonucleotide
  Antisense strand to SEQ ID NO: 1973278
caaccucaaggacuuaucc

SEQ ID NO: 1973280 - RNA, 19 nt, Artificial Sequence
  Description of Artificial Sequence: Synthetic oligonucleotide
  Sense strand starting at position 3591 of SEQ ID NO: 1880519
gguugaggacccugagaua

SEQ ID NO: 1973281 - RNA, 19 nt, Artificial Sequence
  Description of Artificial Sequence: Synthetic oligonucleotide
  Antisense strand to SEQ ID NO: 1973280
uaucucaggguccucaacc

SEQ ID NO: 1973282 - RNA, 19 nt, Artificial Sequence
  Description of Artificial Sequence: Synthetic oligonucleotide
  Sense strand starting at position 3731 of SEQ ID NO: 1880519
cucugaggucucuaaauua

SEQ ID NO: 1973283 - RNA, 19 nt, Artificial Sequence
  Description of Artificial Sequence: Synthetic oligonucleotide
  Antisense strand to SEQ ID NO: 1973282
uaauuuagagaccucagag

SEQ ID NO: 1973284 - RNA, 19 nt, Artificial Sequence
  Description of Artificial Sequence: Synthetic oligonucleotide
  Sense strand starting at position 3755 of SEQ ID NO: 1880519
acucacuuaguuuaaguaa

SEQ ID NO: 1973285 - RNA, 19 nt, Artificial Sequence
  Description of Artificial Sequence: Synthetic oligonucleotide
  Antisense strand to SEQ ID NO: 1973284
uuacuuaaacuaagugagu

SEQ ID NO: 1973286 - RNA, 19 nt, Artificial Sequence
  Description of Artificial Sequence: Synthetic oligonucleotide
  Sense strand starting at position 3883 of SEQ ID NO: 1880519
gcuguuaagaguuaggaaa

SEQ ID NO: 1973287 - RNA, 19 nt, Artificial Sequence
  Description of Artificial Sequence: Synthetic oligonucleotide
  Antisense strand to SEQ ID NO: 1973286
uuuccuaacucuuaacagc

SEQ ID NO: 1973288 - RNA, 19 nt, Artificial Sequence
  Description of Artificial Sequence: Synthetic oligonucleotide
  Sense strand starting at position 361 of SEQ ID NO: 1880520
gaucaaagguagucgaucu

SEQ ID NO: 1973289 - RNA, 19 nt, Artificial Sequence
  Description of Artificial Sequence: Synthetic oligonucleotide
  Antisense strand to SEQ ID NO: 1973288
agaucgacuaccuuugauc

SEQ ID NO: 1973290 - RNA, 19 nt, Artificial Sequence
  Description of Artificial Sequence: Synthetic oligonucleotide
  Sense strand starting at position 371 of SEQ ID NO: 1880520
agucgaucugcuguuguau

SEQ ID NO: 1973291 - RNA, 19 nt, Artificial Sequence
  Description of Artificial Sequence: Synthetic oligonucleotide
  Antisense strand to SEQ ID NO: 1973290
auacaacagcagaucgacu

SEQ ID NO: 1973292 - RNA, 19 nt, Artificial Sequence
  Description of Artificial Sequence: Synthetic oligonucleotide
  Sense strand starting at position 383 of SEQ ID NO: 1880520
guuguauguugauuauuuc

SEQ ID NO: 1973293 - RNA, 19 nt, Artificial Sequence
  Description of Artificial Sequence: Synthetic oligonucleotide
  Antisense strand to SEQ ID NO: 1973292
gaaauaaucaacauacaac

SEQ ID NO: 1973294 - RNA, 19 nt, Artificial Sequence
  Description of Artificial Sequence: Synthetic oligonucleotide
  Sense strand starting at position 403 of SEQ ID NO: 1880520
ccugcaggugauugaaaca

SEQ ID NO: 1973295 - RNA, 19 nt, Artificial Sequence
  Description of Artificial Sequence: Synthetic oligonucleotide
  Antisense strand to SEQ ID NO: 1973294
uguuucaaucaccugcagg

SEQ ID NO: 1973296 - RNA, 19 nt, Artificial Sequence
  Description of Artificial Sequence: Synthetic oligonucleotide
  Sense strand starting at position 451 of SEQ ID NO: 1880520
ggaagaguucuacguaaag

SEQ ID NO: 1973297 - RNA, 19 nt, Artificial Sequence
  Description of Artificial Sequence: Synthetic oligonucleotide
  Antisense strand to SEQ ID NO: 1973296
cuuuacguagaacucuucc

SEQ ID NO: 1973298 - RNA, 19 nt, Artificial Sequence
  Description of Artificial Sequence: Synthetic oligonucleotide
  Sense strand starting at position 490 of SEQ ID NO: 1880520
cauaguuaucuuggagaug

SEQ ID NO: 1973299 - RNA, 19 nt, Artificial Sequence
  Description of Artificial Sequence: Synthetic oligonucleotide
  Antisense strand to SEQ ID NO: 1973298
caucuccaagauaacuaug

SEQ ID NO: 1973300 - RNA, 19 nt, Artificial Sequence
  Description of Artificial Sequence: Synthetic oligonucleotide
  Sense strand starting at position 493 of SEQ ID NO: 1880520
aguuaucuuggagauguuu

SEQ ID NO: 1973301 - RNA, 19 nt, Artificial Sequence
  Description of Artificial Sequence: Synthetic oligonucleotide
  Antisense strand to SEQ ID NO: 1973300
aaacaucuccaagauaacu

SEQ ID NO: 1973302 - RNA, 19 nt, Artificial Sequence
  Description of Artificial Sequence: Synthetic oligonucleotide
  Sense strand starting at position 495 of SEQ ID NO: 1880520
uuaucuuggagauguuuga

SEQ ID NO: 1973303 - RNA, 19 nt, Artificial Sequence
  Description of Artificial Sequence: Synthetic oligonucleotide
  Antisense strand to SEQ ID NO: 1973302
ucaaacaucuccaagauaa

SEQ ID NO: 1973304 - RNA, 19 nt, Artificial Sequence
  Description of Artificial Sequence: Synthetic oligonucleotide
  Sense strand starting at position 677 of SEQ ID NO: 1880520
cugcauuuauagugauuug

SEQ ID NO: 1973305 - RNA, 19 nt, Artificial Sequence
  Description of Artificial Sequence: Synthetic oligonucleotide
  Antisense strand to SEQ ID NO: 1973304
caaaucacuauaaaugcag

SEQ ID NO: 1973306 - RNA, 19 nt, Artificial Sequence
  Description of Artificial Sequence: Synthetic oligonucleotide
  Sense strand starting at position 758 of SEQ ID NO: 1880520
ccucauguacgcuaauaua

SEQ ID NO: 1973307 - RNA, 19 nt, Artificial Sequence
  Description of Artificial Sequence: Synthetic oligonucleotide
  Antisense strand to SEQ ID NO: 1973306
uauauuagcguacaugagg

SEQ ID NO: 1973308 - RNA, 19 nt, Artificial Sequence
  Description of Artificial Sequence: Synthetic oligonucleotide
  Sense strand starting at position 961 of SEQ ID NO: 1880520
acacaugucagguguaaac

SEQ ID NO: 1973309 - RNA, 19 nt, Artificial Sequence
  Description of Artificial Sequence: Synthetic oligonucleotide
  Antisense strand to SEQ ID NO: 1973308
guuuacaccugacaugugu

SEQ ID NO: 1973310 - RNA, 19 nt, Artificial Sequence
  Description of Artificial Sequence: Synthetic oligonucleotide
  Sense strand starting at position 963 of SEQ ID NO: 1880520
acaugucagguguaaacau

SEQ ID NO: 1973311 - RNA, 19 nt, Artificial Sequence
  Description of Artificial Sequence: Synthetic oligonucleotide
  Antisense strand to SEQ ID NO: 1973310
auguuuacaccugacaugu

SEQ ID NO: 1973312 - RNA, 19 nt, Artificial Sequence
  Description of Artificial Sequence: Synthetic oligonucleotide
  Sense strand starting at position 1095 of SEQ ID NO: 1880520
guauuucgcugcuuacuaa

SEQ ID NO: 1973313 - RNA, 19 nt, Artificial Sequence
  Description of Artificial Sequence: Synthetic oligonucleotide
  Antisense strand to SEQ ID NO: 1973312
uuaguaagcagcgaaauac

SEQ ID NO: 1973314 - RNA, 19 nt, Artificial Sequence
  Description of Artificial Sequence: Synthetic oligonucleotide
  Sense strand starting at position 1782 of SEQ ID NO: 1880520
uguggucaaguccagaaga

SEQ ID NO: 1973315 - RNA, 19 nt, Artificial Sequence
  Description of Artificial Sequence: Synthetic oligonucleotide
  Antisense strand to SEQ ID NO: 1973314
ucuucuggacuugaccaca

SEQ ID NO: 1973316 - RNA, 19 nt, Artificial Sequence
  Description of Artificial Sequence: Synthetic oligonucleotide
  Sense strand starting at position 1893 of SEQ ID NO: 1880520
gcuucugagcuccagggau

SEQ ID NO: 1973317 - RNA, 19 nt, Artificial Sequence
  Description of Artificial Sequence: Synthetic oligonucleotide
  Antisense strand to SEQ ID NO: 1973316
aucccuggagcucagaagc

SEQ ID NO: 1973318 - RNA, 19 nt, Artificial Sequence
  Description of Artificial Sequence: Synthetic oligonucleotide
  Sense strand starting at position 2026 of SEQ ID NO: 1880520
gggauuaugaccuguccuu

SEQ ID NO: 1973319 - RNA, 19 nt, Artificial Sequence
  Description of Artificial Sequence: Synthetic oligonucleotide
  Antisense strand to SEQ ID NO: 1973318
aaggacaggucauaauccc

SEQ ID NO: 1973320 - RNA, 19 nt, Artificial Sequence
  Description of Artificial Sequence: Synthetic oligonucleotide
  Sense strand starting at position 2098 of SEQ ID NO: 1880520
gggauuaugaccugucccu

SEQ ID NO: 1973321 - RNA, 19 nt, Artificial Sequence
  Description of Artificial Sequence: Synthetic oligonucleotide
  Antisense strand to SEQ ID NO: 1973320
agggacaggucauaauccc

SEQ ID NO: 1973322 - RNA, 19 nt, Artificial Sequence
  Description of Artificial Sequence: Synthetic oligonucleotide
  Sense strand starting at position 2249 of SEQ ID NO: 1880520
gucuguccaguccacauau

SEQ ID NO: 1973323 - RNA, 19 nt, Artificial Sequence
  Description of Artificial Sequence: Synthetic oligonucleotide
  Antisense strand to SEQ ID NO: 1973322
auauguggacuggacagac

SEQ ID NO: 1973324 - RNA, 19 nt, Artificial Sequence
  Description of Artificial Sequence: Synthetic oligonucleotide
  Sense strand starting at position 2357 of SEQ ID NO: 1880520
gguauaaugccacagacuc

SEQ ID NO: 1973325 - RNA, 19 nt, Artificial Sequence
  Description of Artificial Sequence: Synthetic oligonucleotide
  Antisense strand to SEQ ID NO: 1973324
gagucuguggcauuauacc

SEQ ID NO: 1973326 - RNA, 19 nt, Artificial Sequence
  Description of Artificial Sequence: Synthetic oligonucleotide
  Sense strand starting at position 2728 of SEQ ID NO: 1880520
gcucuaagagcaggagaua

SEQ ID NO: 1973327 - RNA, 19 nt, Artificial Sequence
  Description of Artificial Sequence: Synthetic oligonucleotide
  Antisense strand to SEQ ID NO: 1973326
uaucuccugcucuuagagc

SEQ ID NO: 1973328 - RNA, 19 nt, Artificial Sequence
  Description of Artificial Sequence: Synthetic oligonucleotide
  Sense strand starting at position 2744 of SEQ ID NO: 1880520
auaagaauugcaggaaggu

SEQ ID NO: 1973329 - RNA, 19 nt, Artificial Sequence
  Description of Artificial Sequence: Synthetic oligonucleotide
  Antisense strand to SEQ ID NO: 1973328
accuuccugcaauucuuau

SEQ ID NO: 1973330 - RNA, 19 nt, Artificial Sequence
  Description of Artificial Sequence: Synthetic oligonucleotide
  Sense strand starting at position 2757 of SEQ ID NO: 1880520
gaagguucccgggagcaga

SEQ ID NO: 1973331 - RNA, 19 nt, Artificial Sequence
  Description of Artificial Sequence: Synthetic oligonucleotide
  Antisense strand to SEQ ID NO: 1973330
ucugcucccgggaaccuuc

SEQ ID NO: 1973332 - RNA, 19 nt, Artificial Sequence
  Description of Artificial Sequence: Synthetic oligonucleotide
  Sense strand starting at position 2947 of SEQ ID NO: 1880520
uguggaccugcuuaagaau

SEQ ID NO: 1973333 - RNA, 19 nt, Artificial Sequence
  Description of Artificial Sequence: Synthetic oligonucleotide
  Antisense strand to SEQ ID NO: 1973332
auucuuaagcagguccaca

SEQ ID NO: 1973334 - RNA, 19 nt, Artificial Sequence
  Description of Artificial Sequence: Synthetic oligonucleotide
  Sense strand starting at position 2998 of SEQ ID NO: 1880520
uuaucuagucuauauucga

SEQ ID NO: 1973335 - RNA, 19 nt, Artificial Sequence
  Description of Artificial Sequence: Synthetic oligonucleotide
  Antisense strand to SEQ ID NO: 1973334
ucgaauauagacuagauaa

SEQ ID NO: 1973336 - RNA, 19 nt, Artificial Sequence
  Description of Artificial Sequence: Synthetic oligonucleotide
  Sense strand starting at position 3001 of SEQ ID NO: 1880520
ucuagucuauauucgagau

SEQ ID NO: 1973337 - RNA, 19 nt, Artificial Sequence
  Description of Artificial Sequence: Synthetic oligonucleotide
  Antisense strand to SEQ ID NO: 1973336
aucucgaauauagacuaga

SEQ ID NO: 1973338 - RNA, 19 nt, Artificial Sequence
  Description of Artificial Sequence: Synthetic oligonucleotide
  Sense strand starting at position 3005 of SEQ ID NO: 1880520
gucuauauucgagauuauc

SEQ ID NO: 1973339 - RNA, 19 nt, Artificial Sequence
  Description of Artificial Sequence: Synthetic oligonucleotide
  Antisense strand to SEQ ID NO: 1973338
gauaaucucgaauauagac

SEQ ID NO: 1973340 - RNA, 19 nt, Artificial Sequence
  Description of Artificial Sequence: Synthetic oligonucleotide
  Sense strand starting at position 3037 of SEQ ID NO: 1880520
aguacuuuaugagcuaaag

SEQ ID NO: 1973341 - RNA, 19 nt, Artificial Sequence
  Description of Artificial Sequence: Synthetic oligonucleotide
  Antisense strand to SEQ ID NO: 1973340
cuuuagcucauaaaguacu

SEQ ID NO: 1973342 - RNA, 19 nt, Artificial Sequence
  Description of Artificial Sequence: Synthetic oligonucleotide
  Sense strand starting at position 3196 of SEQ ID NO: 1880520
agcacagacuuaucaaagu

SEQ ID NO: 1973343 - RNA, 19 nt, Artificial Sequence
  Description of Artificial Sequence: Synthetic oligonucleotide
  Antisense strand to SEQ ID NO: 1973342
acuuugauaagucugugcu

SEQ ID NO: 1973344 - RNA, 19 nt, Artificial Sequence
  Description of Artificial Sequence: Synthetic oligonucleotide
  Sense strand starting at position 3228 of SEQ ID NO: 1880520
gugggucaaguuuaauacu

SEQ ID NO: 1973345 - RNA, 19 nt, Artificial Sequence
  Description of Artificial Sequence: Synthetic oligonucleotide
  Antisense strand to SEQ ID NO: 1973344
aguauuaaacuugacccac

SEQ ID NO: 1973346 - RNA, 19 nt, Artificial Sequence
  Description of Artificial Sequence: Synthetic oligonucleotide
  Sense strand starting at position 3448 of SEQ ID NO: 1880520
agagcugacuaccucauaa

SEQ ID NO: 1973347 - RNA, 19 nt, Artificial Sequence
  Description of Artificial Sequence: Synthetic oligonucleotide
  Antisense strand to SEQ ID NO: 1973346
uuaugagguagucagcucu

SEQ ID NO: 1973348 - RNA, 19 nt, Artificial Sequence
  Description of Artificial Sequence: Synthetic oligonucleotide
  Sense strand starting at position 3532 of SEQ ID NO: 1880520
acggcaauuugccuacauu

SEQ ID NO: 1973349 - RNA, 19 nt, Artificial Sequence
  Description of Artificial Sequence: Synthetic oligonucleotide
  Antisense strand to SEQ ID NO: 1973348
aauguaggcaaauugccgu

SEQ ID NO: 1973350 - RNA, 19 nt, Artificial Sequence
  Description of Artificial Sequence: Synthetic oligonucleotide
  Sense strand starting at position 3594 of SEQ ID NO: 1880520
agauacaguuaugugauca

SEQ ID NO: 1973351 - RNA, 19 nt, Artificial Sequence
  Description of Artificial Sequence: Synthetic oligonucleotide
  Antisense strand to SEQ ID NO: 1973350
ugaucacauaacuguaucu

SEQ ID NO: 1973352 - RNA, 19 nt, Artificial Sequence
  Description of Artificial Sequence: Synthetic oligonucleotide
  Sense strand starting at position 3598 of SEQ ID NO: 1880520
acaguuaugugaucagaaa

SEQ ID NO: 1973353 - RNA, 19 nt, Artificial Sequence
  Description of Artificial Sequence: Synthetic oligonucleotide
  Antisense strand to SEQ ID NO: 1973352
uuucugaucacauaacugu

SEQ ID NO: 1973354 - RNA, 19 nt, Artificial Sequence
  Description of Artificial Sequence: Synthetic oligonucleotide
  Sense strand starting at position 3881 of SEQ ID NO: 1880520
ugcucuagagccuaugauu

SEQ ID NO: 1973355 - RNA, 19 nt, Artificial Sequence
  Description of Artificial Sequence: Synthetic oligonucleotide
  Antisense strand to SEQ ID NO: 1973354
aaucauaggcucuagagca

SEQ ID NO: 1973356 - RNA, 19 nt, Artificial Sequence
  Description of Artificial Sequence: Synthetic oligonucleotide
  Sense strand starting at position 3894 of SEQ ID NO: 1880520
augauugauucuucuuggu

SEQ ID NO: 1973357 - RNA, 19 nt, Artificial Sequence
  Description of Artificial Sequence: Synthetic oligonucleotide
  Antisense strand to SEQ ID NO: 1973356
accaagaagaaucaaucau

SEQ ID NO: 1973358 - RNA, 19 nt, Artificial Sequence
  Description of Artificial Sequence: Synthetic oligonucleotide
  Sense strand starting at position 3896 of SEQ ID NO: 1880520
gauugauucuucuugguca

SEQ ID NO: 1973359 - RNA, 19 nt, Artificial Sequence
  Description of Artificial Sequence: Synthetic oligonucleotide
  Antisense strand to SEQ ID NO: 1973358
ugaccaagaagaaucaauc

SEQ ID NO: 1973360 - RNA, 19 nt, Artificial Sequence
  Description of Artificial Sequence: Synthetic oligonucleotide
  Sense strand starting at position 3898 of SEQ ID NO: 1880520
uugauucuucuuggucaaa

SEQ ID NO: 1973361 - RNA, 19 nt, Artificial Sequence
  Description of Artificial Sequence: Synthetic oligonucleotide
  Antisense strand to SEQ ID NO: 1973360
uuugaccaagaagaaucaa

SEQ ID NO: 1973362 - RNA, 19 nt, Artificial Sequence
  Description of Artificial Sequence: Synthetic oligonucleotide
  Sense strand starting at position 3945 of SEQ ID NO: 1880520
gccacugucuaauuaagag

SEQ ID NO: 1973363 - RNA, 19 nt, Artificial Sequence
  Description of Artificial Sequence: Synthetic oligonucleotide
  Antisense strand to SEQ ID NO: 1973362
cucuuaauuagacaguggc

SEQ ID NO: 1973364 - RNA, 19 nt, Artificial Sequence
  Description of Artificial Sequence: Synthetic oligonucleotide
  Sense strand starting at position 3970 of SEQ ID NO: 1880520
uuucucuuuguuggauaaa

SEQ ID NO: 1973365 - RNA, 19 nt, Artificial Sequence
  Description of Artificial Sequence: Synthetic oligonucleotide
  Antisense strand to SEQ ID NO: 1973364
uuuauccaacaaagagaaa

SEQ ID NO: 1973366 - RNA, 19 nt, Artificial Sequence
  Description of Artificial Sequence: Synthetic oligonucleotide
  Sense strand starting at position 3973 of SEQ ID NO: 1880520
cucuuuguuggauaaaugu

SEQ ID NO: 1973367 - RNA, 19 nt, Artificial Sequence
  Description of Artificial Sequence: Synthetic oligonucleotide
  Antisense strand to SEQ ID NO: 1973366
acauuuauccaacaaagag

SEQ ID NO: 1973368 - RNA, 19 nt, Artificial Sequence
  Description of Artificial Sequence: Synthetic oligonucleotide
  Sense strand starting at position 3 of SEQ ID NO: 1880521
uaaugugugcauuacagga

SEQ ID NO: 1973369 - RNA, 19 nt, Artificial Sequence
  Description of Artificial Sequence: Synthetic oligonucleotide
  Antisense strand to SEQ ID NO: 1973368
uccuguaaugcacacauua

SEQ ID NO: 1973370 - RNA, 19 nt, Artificial Sequence
  Description of Artificial Sequence: Synthetic oligonucleotide
  Sense strand starting at position 7 of SEQ ID NO: 1880521
gugugcauuacaggaaacu

SEQ ID NO: 1973371 - RNA, 19 nt, Artificial Sequence
  Description of Artificial Sequence: Synthetic oligonucleotide
  Antisense strand to SEQ ID NO: 1973370
aguuuccuguaaugcacac

SEQ ID NO: 1973372 - RNA, 19 nt, Artificial Sequence
  Description of Artificial Sequence: Synthetic oligonucleotide
  Sense strand starting at position 98 of SEQ ID NO: 1880521
ccuguuuguguagauacaa

SEQ ID NO: 1973373 - RNA, 19 nt, Artificial Sequence
  Description of Artificial Sequence: Synthetic oligonucleotide
  Antisense strand to SEQ ID NO: 1973372
uuguaucuacacaaacagg

SEQ ID NO: 1973374 - RNA, 19 nt, Artificial Sequence
  Description of Artificial Sequence: Synthetic oligonucleotide
  Sense strand starting at position 134 of SEQ ID NO: 1880521
uugagaucauauguuaugu

SEQ ID NO: 1973375 - RNA, 19 nt, Artificial Sequence
  Description of Artificial Sequence: Synthetic oligonucleotide
  Antisense strand to SEQ ID NO: 1973374
acauaacauaugaucucaa

SEQ ID NO: 1973376 - RNA, 19 nt, Artificial Sequence
  Description of Artificial Sequence: Synthetic oligonucleotide
  Sense strand starting at position 194 of SEQ ID NO: 1880521
aucuuaaagcuaugugagu

SEQ ID NO: 1973377 - RNA, 19 nt, Artificial Sequence
  Description of Artificial Sequence: Synthetic oligonucleotide
  Antisense strand to SEQ ID NO: 1973376
acucacauagcuuuaagau

SEQ ID NO: 1973378 - RNA, 19 nt, Artificial Sequence
  Description of Artificial Sequence: Synthetic oligonucleotide
  Sense strand starting at position 195 of SEQ ID NO: 1880521
ucuuaaagcuaugugagua

SEQ ID NO: 1973379 - RNA, 19 nt, Artificial Sequence
  Description of Artificial Sequence: Synthetic oligonucleotide
  Antisense strand to SEQ ID NO: 1973378
uacucacauagcuuuaaga

SEQ ID NO: 1973380 - RNA, 19 nt, Artificial Sequence
  Description of Artificial Sequence: Synthetic oligonucleotide
  Sense strand starting at position 211 of SEQ ID NO: 1880521
guauucugauacucagcaa

SEQ ID NO: 1973381 - RNA, 19 nt, Artificial Sequence
  Description of Artificial Sequence: Synthetic oligonucleotide
  Antisense strand to SEQ ID NO: 1973380
uugcugaguaucagaauac

SEQ ID NO: 1973382 - RNA, 19 nt, Artificial Sequence
  Description of Artificial Sequence: Synthetic oligonucleotide
  Sense strand starting at position 398 of SEQ ID NO: 1880521
agcagaauacacuauguau

SEQ ID NO: 1973383 - RNA, 19 nt, Artificial Sequence
  Description of Artificial Sequence: Synthetic oligonucleotide
  Antisense strand to SEQ ID NO: 1973382
auacauaguguauucugcu

SEQ ID NO: 1973384 - RNA, 19 nt, Artificial Sequence
  Description of Artificial Sequence: Synthetic oligonucleotide
  Sense strand starting at position 462 of SEQ ID NO: 1880521
gcaagaagguauguuuccu

SEQ ID NO: 1973385 - RNA, 19 nt, Artificial Sequence
  Description of Artificial Sequence: Synthetic oligonucleotide
  Antisense strand to SEQ ID NO: 1973384
aggaaacauaccuucuugc

SEQ ID NO: 1973386 - RNA, 19 nt, Artificial Sequence
  Description of Artificial Sequence: Synthetic oligonucleotide
  Sense strand starting at position 840 of SEQ ID NO: 1880521
cauauagagcuauggguau

SEQ ID NO: 1973387 - RNA, 19 nt, Artificial Sequence
  Description of Artificial Sequence: Synthetic oligonucleotide
  Antisense strand to SEQ ID NO: 1973386
auacccauagcucuauaug

SEQ ID NO: 1973388 - RNA, 19 nt, Artificial Sequence
  Description of Artificial Sequence: Synthetic oligonucleotide
  Sense strand starting at position 844 of SEQ ID NO: 1880521
uagagcuauggguaugagu

SEQ ID NO: 1973389 - RNA, 19 nt, Artificial Sequence
  Description of Artificial Sequence: Synthetic oligonucleotide
  Antisense strand to SEQ ID NO: 1973388
acucauacccauagcucua

SEQ ID NO: 1973390 - RNA, 19 nt, Artificial Sequence
  Description of Artificial Sequence: Synthetic oligonucleotide
  Sense strand starting at position 846 of SEQ ID NO: 1880521
gagcuauggguaugaguuu

SEQ ID NO: 1973391 - RNA, 19 nt, Artificial Sequence
  Description of Artificial Sequence: Synthetic oligonucleotide
  Antisense strand to SEQ ID NO: 1973390
aaacucauacccauagcuc

SEQ ID NO: 1973392 - RNA, 19 nt, Artificial Sequence
  Description of Artificial Sequence: Synthetic oligonucleotide
  Sense strand starting at position 951 of SEQ ID NO: 1880521
aggauacuacuguguuuag

SEQ ID NO: 1973393 - RNA, 19 nt, Artificial Sequence
  Description of Artificial Sequence: Synthetic oligonucleotide
  Antisense strand to SEQ ID NO: 1973392
cuaaacacaguaguauccu

SEQ ID NO: 1973394 - RNA, 19 nt, Artificial Sequence
  Description of Artificial Sequence: Synthetic oligonucleotide
  Sense strand starting at position 1058 of SEQ ID NO: 1880521
guuagucaacucuauguac

SEQ ID NO: 1973395 - RNA, 19 nt, Artificial Sequence
  Description of Artificial Sequence: Synthetic oligonucleotide
  Antisense strand to SEQ ID NO: 1973394
guacauagaguugacuaac

SEQ ID NO: 1973396 - RNA, 19 nt, Artificial Sequence
  Description of Artificial Sequence: Synthetic oligonucleotide
  Sense strand starting at position 1061 of SEQ ID NO: 1880521
agucaacucuauguacagu

SEQ ID NO: 1973397 - RNA, 19 nt, Artificial Sequence
  Description of Artificial Sequence: Synthetic oligonucleotide
  Antisense strand to SEQ ID NO: 1973396
acuguacauagaguugacu

SEQ ID NO: 1973398 - RNA, 19 nt, Artificial Sequence
  Description of Artificial Sequence: Synthetic oligonucleotide
  Sense strand starting at position 1077 of SEQ ID NO: 1880521
aguggugagcauuaauaaa

SEQ ID NO: 1973399 - RNA, 19 nt, Artificial Sequence
  Description of Artificial Sequence: Synthetic oligonucleotide
  Antisense strand to SEQ ID NO: 1973398
uuuauuaaugcucaccacu

SEQ ID NO: 1973400 - RNA, 19 nt, Artificial Sequence
  Description of Artificial Sequence: Synthetic oligonucleotide
  Sense strand starting at position 1105 of SEQ ID NO: 1880521
aaacaaagguuagauuaga

SEQ ID NO: 1973401 - RNA, 19 nt, Artificial Sequence
  Description of Artificial Sequence: Synthetic oligonucleotide
  Antisense strand to SEQ ID NO: 1973400
ucuaaucuaaccuuuguuu

SEQ ID NO: 1973402 - RNA, 19 nt, Artificial Sequence
  Description of Artificial Sequence: Synthetic oligonucleotide
  Sense strand starting at position 1830 of SEQ ID NO: 1880521
gacauagaggucugguaga

SEQ ID NO: 1973403 - RNA, 19 nt, Artificial Sequence
  Description of Artificial Sequence: Synthetic oligonucleotide
  Antisense strand to SEQ ID NO: 1973402
ucuaccagaccucuauguc

SEQ ID NO: 1973404 - RNA, 19 nt, Artificial Sequence
  Description of Artificial Sequence: Synthetic oligonucleotide
  Sense strand starting at position 1896 of SEQ ID NO: 1880521
ccaggacuuugcucaccuu

SEQ ID NO: 1973405 - RNA, 19 nt, Artificial Sequence
  Description of Artificial Sequence: Synthetic oligonucleotide
  Antisense strand to SEQ ID NO: 1973404
aaggugagcaaaguccugg

SEQ ID NO: 1973406 - RNA, 19 nt, Artificial Sequence
  Description of Artificial Sequence: Synthetic oligonucleotide
  Sense strand starting at position 2217 of SEQ ID NO: 1880521
gaggaauauggucgaugcu

SEQ ID NO: 1973407 - RNA, 19 nt, Artificial Sequence
  Description of Artificial Sequence: Synthetic oligonucleotide
  Antisense strand to SEQ ID NO: 1973406
agcaucgaccauauuccuc

SEQ ID NO: 1973408 - RNA, 19 nt, Artificial Sequence
  Description of Artificial Sequence: Synthetic oligonucleotide
  Sense strand starting at position 2269 of SEQ ID NO: 1880521
uagcaagggcucugggaua

SEQ ID NO: 1973409 - RNA, 19 nt, Artificial Sequence
  Description of Artificial Sequence: Synthetic oligonucleotide
  Antisense strand to SEQ ID NO: 1973408
uaucccagagcccuugcua

SEQ ID NO: 1973410 - RNA, 19 nt, Artificial Sequence
  Description of Artificial Sequence: Synthetic oligonucleotide
  Sense strand starting at position 2475 of SEQ ID NO: 1880521
uugguuuguccagacuuug

SEQ ID NO: 1973411 - RNA, 19 nt, Artificial Sequence
  Description of Artificial Sequence: Synthetic oligonucleotide
  Antisense strand to SEQ ID NO: 1973410
caaagucuggacaaaccaa

SEQ ID NO: 1973412 - RNA, 19 nt, Artificial Sequence
  Description of Artificial Sequence: Synthetic oligonucleotide
  Sense strand starting at position 2651 of SEQ ID NO: 1880521
cguuccuuuguauaggaaa

SEQ ID NO: 1973413 - RNA, 19 nt, Artificial Sequence
  Description of Artificial Sequence: Synthetic oligonucleotide
  Antisense strand to SEQ ID NO: 1973412
uuuccuauacaaaggaacg

SEQ ID NO: 1973414 - RNA, 19 nt, Artificial Sequence
  Description of Artificial Sequence: Synthetic oligonucleotide
  Sense strand starting at position 2677 of SEQ ID NO: 1880521
uuauguucuugaguaagau

SEQ ID NO: 1973415 - RNA, 19 nt, Artificial Sequence
  Description of Artificial Sequence: Synthetic oligonucleotide
  Antisense strand to SEQ ID NO: 1973414
aucuuacucaagaacauaa

SEQ ID NO: 1973416 - RNA, 19 nt, Artificial Sequence
  Description of Artificial Sequence: Synthetic oligonucleotide
  Sense strand starting at position 2678 of SEQ ID NO: 1880521
uauguucuugaguaagauu

SEQ ID NO: 1973417 - RNA, 19 nt, Artificial Sequence
  Description of Artificial Sequence: Synthetic oligonucleotide
  Antisense strand to SEQ ID NO: 1973416
aaucuuacucaagaacaua

SEQ ID NO: 1973418 - RNA, 19 nt, Artificial Sequence
  Description of Artificial Sequence: Synthetic oligonucleotide
  Sense strand starting at position 2685 of SEQ ID NO: 1880521
uugaguaagauuggucugu

SEQ ID NO: 1973419 - RNA, 19 nt, Artificial Sequence
  Description of Artificial Sequence: Synthetic oligonucleotide
  Antisense strand to SEQ ID NO: 1973418
acagaccaaucuuacucaa

SEQ ID NO: 1973420 - RNA, 19 nt, Artificial Sequence
  Description of Artificial Sequence: Synthetic oligonucleotide
  Sense strand starting at position 2686 of SEQ ID NO: 1880521
ugaguaagauuggucugua

SEQ ID NO: 1973421 - RNA, 19 nt, Artificial Sequence
  Description of Artificial Sequence: Synthetic oligonucleotide
  Antisense strand to SEQ ID NO: 1973420
uacagaccaaucuuacuca

SEQ ID NO: 1973422 - RNA, 19 nt, Artificial Sequence
  Description of Artificial Sequence: Synthetic oligonucleotide
  Sense strand starting at position 2687 of SEQ ID NO: 1880521
gaguaagauuggucuguaa

SEQ ID NO: 1973423 - RNA, 19 nt, Artificial Sequence
  Description of Artificial Sequence: Synthetic oligonucleotide
  Antisense strand to SEQ ID NO: 1973422
uuacagaccaaucuuacuc

SEQ ID NO: 1973424 - RNA, 19 nt, Artificial Sequence
  Description of Artificial Sequence: Synthetic oligonucleotide
  Sense strand starting at position 2689 of SEQ ID NO: 1880521
guaagauuggucuguaauu

SEQ ID NO: 1973425 - RNA, 19 nt, Artificial Sequence
  Description of Artificial Sequence: Synthetic oligonucleotide
  Antisense strand to SEQ ID NO: 1973424
aauuacagaccaaucuuac

SEQ ID NO: 1973426 - RNA, 19 nt, Artificial Sequence
  Description of Artificial Sequence: Synthetic oligonucleotide
  Sense strand starting at position 2802 of SEQ ID NO: 1880521
uggaaaguuuauguaagac

SEQ ID NO: 1973427 - RNA, 19 nt, Artificial Sequence
  Description of Artificial Sequence: Synthetic oligonucleotide
  Antisense strand to SEQ ID NO: 1973426
gucuuacauaaacuuucca

SEQ ID NO: 1973428 - RNA, 19 nt, Artificial Sequence
  Description of Artificial Sequence: Synthetic oligonucleotide
  Sense strand starting at position 2873 of SEQ ID NO: 1880521
ucaugaaaucuuggguaaa

SEQ ID NO: 1973429 - RNA, 19 nt, Artificial Sequence
  Description of Artificial Sequence: Synthetic oligonucleotide
  Antisense strand to SEQ ID NO: 1973428
uuuacccaagauuucauga

SEQ ID NO: 1973430 - RNA, 19 nt, Artificial Sequence
  Description of Artificial Sequence: Synthetic oligonucleotide
  Sense strand starting at position 2875 of SEQ ID NO: 1880521
augaaaucuuggguaaagu

SEQ ID NO: 1973431 - RNA, 19 nt, Artificial Sequence
  Description of Artificial Sequence: Synthetic oligonucleotide
  Antisense strand to SEQ ID NO: 1973430
acuuuacccaagauuucau

SEQ ID NO: 1973432 - RNA, 19 nt, Artificial Sequence
  Description of Artificial Sequence: Synthetic oligonucleotide
  Sense strand starting at position 2883 of SEQ ID NO: 1880521
uuggguaaaguuuacuuau

SEQ ID NO: 1973433 - RNA, 19 nt, Artificial Sequence
  Description of Artificial Sequence: Synthetic oligonucleotide
  Antisense strand to SEQ ID NO: 1973432
auaaguaaacuuuacccaa

SEQ ID NO: 1973434 - RNA, 19 nt, Artificial Sequence
  Description of Artificial Sequence: Synthetic oligonucleotide
  Sense strand starting at position 2886 of SEQ ID NO: 1880521
gguaaaguuuacuuauaag

SEQ ID NO: 1973435 - RNA, 19 nt, Artificial Sequence
  Description of Artificial Sequence: Synthetic oligonucleotide
  Antisense strand to SEQ ID NO: 1973434
cuuauaaguaaacuuuacc

SEQ ID NO: 1973436 - RNA, 19 nt, Artificial Sequence
  Description of Artificial Sequence: Synthetic oligonucleotide
  Sense strand starting at position 2916 of SEQ ID NO: 1880521
agaauuucuuugugggaag

SEQ ID NO: 1973437 - RNA, 19 nt, Artificial Sequence
  Description of Artificial Sequence: Synthetic oligonucleotide
  Antisense strand to SEQ ID NO: 1973436
cuucccacaaagaaauucu

SEQ ID NO: 1973438 - RNA, 19 nt, Artificial Sequence
  Description of Artificial Sequence: Synthetic oligonucleotide
  Sense strand starting at position 3063 of SEQ ID NO: 1880521
aguuauucggaauaucucu

SEQ ID NO: 1973439 - RNA, 19 nt, Artificial Sequence
  Description of Artificial Sequence: Synthetic oligonucleotide
  Antisense strand to SEQ ID NO: 1973438
agagauauuccgaauaacu

SEQ ID NO: 1973440 - RNA, 19 nt, Artificial Sequence
  Description of Artificial Sequence: Synthetic oligonucleotide
  Sense strand starting at position 3068 of SEQ ID NO: 1880521
uucggaauaucucuuauga

SEQ ID NO: 1973441 - RNA, 19 nt, Artificial Sequence
  Description of Artificial Sequence: Synthetic oligonucleotide
  Antisense strand to SEQ ID NO: 1973440
ucauaagagauauuccgaa

SEQ ID NO: 1973442 - RNA, 19 nt, Artificial Sequence
  Description of Artificial Sequence: Synthetic oligonucleotide
  Sense strand starting at position 3106 of SEQ ID NO: 1880521
augagauaucaaugucugu

SEQ ID NO: 1973443 - RNA, 19 nt, Artificial Sequence
  Description of Artificial Sequence: Synthetic oligonucleotide
  Antisense strand to SEQ ID NO: 1973442
acagacauugauaucucau

SEQ ID NO: 1973444 - RNA, 19 nt, Artificial Sequence
  Description of Artificial Sequence: Synthetic oligonucleotide
  Sense strand starting at position 3293 of SEQ ID NO: 1880521
agucuagggcaagaguauu

SEQ ID NO: 1973445 - RNA, 19 nt, Artificial Sequence
  Description of Artificial Sequence: Synthetic oligonucleotide
  Antisense strand to SEQ ID NO: 1973444
aauacucuugcccuagacu

SEQ ID NO: 1973446 - RNA, 19 nt, Artificial Sequence
  Description of Artificial Sequence: Synthetic oligonucleotide
  Sense strand starting at position 3303 of SEQ ID NO: 1880521
aagaguauugauggaguac

SEQ ID NO: 1973447 - RNA, 19 nt, Artificial Sequence
  Description of Artificial Sequence: Synthetic oligonucleotide
  Antisense strand to SEQ ID NO: 1973446
guacuccaucaauacucuu

SEQ ID NO: 1973448 - RNA, 19 nt, Artificial Sequence
  Description of Artificial Sequence: Synthetic oligonucleotide
  Sense strand starting at position 85 of SEQ ID NO: 1880522
cuccaaggucaugaaucuu

SEQ ID NO: 1973449 - RNA, 19 nt, Artificial Sequence
  Description of Artificial Sequence: Synthetic oligonucleotide
  Antisense strand to SEQ ID NO: 1973448
aagauucaugaccuuggag

SEQ ID NO: 1973450 - RNA, 19 nt, Artificial Sequence
  Description of Artificial Sequence: Synthetic oligonucleotide
  Sense strand starting at position 801 of SEQ ID NO: 1880522
uuccuuguaguggaucaau

SEQ ID NO: 1973451 - RNA, 19 nt, Artificial Sequence
  Description of Artificial Sequence: Synthetic oligonucleotide
  Antisense strand to SEQ ID NO: 1973450
auugauccacuacaaggaa

SEQ ID NO: 1973452 - RNA, 19 nt, Artificial Sequence
  Description of Artificial Sequence: Synthetic oligonucleotide
  Sense strand starting at position 828 of SEQ ID NO: 1880522
ccagucagccauuauccau

SEQ ID NO: 1973453 - RNA, 19 nt, Artificial Sequence
  Description of Artificial Sequence: Synthetic oligonucleotide
  Antisense strand to SEQ ID NO: 1973452
auggauaauggcugacugg

SEQ ID NO: 1973454 - RNA, 19 nt, Artificial Sequence
  Description of Artificial Sequence: Synthetic oligonucleotide
  Sense strand starting at position 889 of SEQ ID NO: 1880522
uguguugaucaagacauac

SEQ ID NO: 1973455 - RNA, 19 nt, Artificial Sequence
  Description of Artificial Sequence: Synthetic oligonucleotide
  Antisense strand to SEQ ID NO: 1973454
guaugucuugaucaacaca

SEQ ID NO: 1973456 - RNA, 19 nt, Artificial Sequence
  Description of Artificial Sequence: Synthetic oligonucleotide
  Sense strand starting at position 909 of SEQ ID NO: 1880522
cuuggccuuguuuaaauga

SEQ ID NO: 1973457 - RNA, 19 nt, Artificial Sequence
  Description of Artificial Sequence: Synthetic oligonucleotide
  Antisense strand to SEQ ID NO: 1973456
ucauuuaaacaaggccaag

SEQ ID NO: 1973458 - RNA, 19 nt, Artificial Sequence
  Description of Artificial Sequence: Synthetic oligonucleotide
  Sense strand starting at position 1016 of SEQ ID NO: 1880522
ggauguauuugucaaugac

SEQ ID NO: 1973459 - RNA, 19 nt, Artificial Sequence
  Description of Artificial Sequence: Synthetic oligonucleotide
  Antisense strand to SEQ ID NO: 1973458
gucauugacaaauacaucc

SEQ ID NO: 1973460 - RNA, 19 nt, Artificial Sequence
  Description of Artificial Sequence: Synthetic oligonucleotide
  Sense strand starting at position 1118 of SEQ ID NO: 1880522
aagaaugaaugugaacaga

SEQ ID NO: 1973461 - RNA, 19 nt, Artificial Sequence
  Description of Artificial Sequence: Synthetic oligonucleotide
  Antisense strand to SEQ ID NO: 1973460
ucuguucacauucauucuu

SEQ ID NO: 1973462 - RNA, 19 nt, Artificial Sequence
  Description of Artificial Sequence: Synthetic oligonucleotide
  Sense strand starting at position 1132 of SEQ ID NO: 1880522
acagaugacuaagagaauu

SEQ ID NO: 1973463 - RNA, 19 nt, Artificial Sequence
  Description of Artificial Sequence: Synthetic oligonucleotide
  Antisense strand to SEQ ID NO: 1973462
aauucucuuagucaucugu

SEQ ID NO: 1973464 - RNA, 19 nt, Artificial Sequence
  Description of Artificial Sequence: Synthetic oligonucleotide
  Sense strand starting at position 1257 of SEQ ID NO: 1880522
augucagagcuuuauacau

SEQ ID NO: 1973465 - RNA, 19 nt, Artificial Sequence
  Description of Artificial Sequence: Synthetic oligonucleotide
  Antisense strand to SEQ ID NO: 1973464
auguauaaagcucugacau

SEQ ID NO: 1973466 - RNA, 19 nt, Artificial Sequence
  Description of Artificial Sequence: Synthetic oligonucleotide
  Sense strand starting at position 1313 of SEQ ID NO: 1880522
uacauauccucagcgggua

SEQ ID NO: 1973467 - RNA, 19 nt, Artificial Sequence
  Description of Artificial Sequence: Synthetic oligonucleotide
  Antisense strand to SEQ ID NO: 1973466
uacccgcugaggauaugua

SEQ ID NO: 1973468 - RNA, 19 nt, Artificial Sequence
  Description of Artificial Sequence: Synthetic oligonucleotide
  Sense strand starting at position 1329 of SEQ ID NO: 1880522
guagcaacuccagagauua

SEQ ID NO: 1973469 - RNA, 19 nt, Artificial Sequence
  Description of Artificial Sequence: Synthetic oligonucleotide
  Antisense strand to SEQ ID NO: 1973468
uaaucucuggaguugcuac

SEQ ID NO: 1973470 - RNA, 19 nt, Artificial Sequence
  Description of Artificial Sequence: Synthetic oligonucleotide
  Sense strand starting at position 1360 of SEQ ID NO: 1880522
accugauauuaugugucua

SEQ ID NO: 1973471 - RNA, 19 nt, Artificial Sequence
  Description of Artificial Sequence: Synthetic oligonucleotide
  Antisense strand to SEQ ID NO: 1973470
uagacacauaauaucaggu

SEQ ID NO: 1973472 - RNA, 19 nt, Artificial Sequence
  Description of Artificial Sequence: Synthetic oligonucleotide
  Sense strand starting at position 1365 of SEQ ID NO: 1880522
auauuaugugucuaccaug

SEQ ID NO: 1973473 - RNA, 19 nt, Artificial Sequence
  Description of Artificial Sequence: Synthetic oligonucleotide
  Antisense strand to SEQ ID NO: 1973472
caugguagacacauaauau

SEQ ID NO: 1973474 - RNA, 19 nt, Artificial Sequence
  Description of Artificial Sequence: Synthetic oligonucleotide
  Sense strand starting at position 1370 of SEQ ID NO: 1880522
augugucuaccaugugaaa

SEQ ID NO: 1973475 - RNA, 19 nt, Artificial Sequence
  Description of Artificial Sequence: Synthetic oligonucleotide
  Antisense strand to SEQ ID NO: 1973474
uuucacaugguagacacau

SEQ ID NO: 1973476 - RNA, 19 nt, Artificial Sequence
  Description of Artificial Sequence: Synthetic oligonucleotide
  Sense strand starting at position 1372 of SEQ ID NO: 1880522
gugucuaccaugugaaagu

SEQ ID NO: 1973477 - RNA, 19 nt, Artificial Sequence
  Description of Artificial Sequence: Synthetic oligonucleotide
  Antisense strand to SEQ ID NO: 1973476
acuuucacaugguagacac

SEQ ID NO: 1973478 - RNA, 19 nt, Artificial Sequence
  Description of Artificial Sequence: Synthetic oligonucleotide
  Sense strand starting at position 1443 of SEQ ID NO: 1880522
gcaacaaauugauucuagu

SEQ ID NO: 1973479 - RNA, 19 nt, Artificial Sequence
  Description of Artificial Sequence: Synthetic oligonucleotide
  Antisense strand to SEQ ID NO: 1973478
acuagaaucaauuuguugc

SEQ ID NO: 1973480 - RNA, 19 nt, Artificial Sequence
  Description of Artificial Sequence: Synthetic oligonucleotide
  Sense strand starting at position 1680 of SEQ ID NO: 1880522
ugguucuaaucacuugaau

SEQ ID NO: 1973481 - RNA, 19 nt, Artificial Sequence
  Description of Artificial Sequence: Synthetic oligonucleotide
  Antisense strand to SEQ ID NO: 1973480
auucaagugauuagaacca

SEQ ID NO: 1973482 - RNA, 19 nt, Artificial Sequence
  Description of Artificial Sequence: Synthetic oligonucleotide
  Sense strand starting at position 1734 of SEQ ID NO: 1880522
cccggagacccauaaucuu

SEQ ID NO: 1973483 - RNA, 19 nt, Artificial Sequence
  Description of Artificial Sequence: Synthetic oligonucleotide
  Antisense strand to SEQ ID NO: 1973482
aagauuaugggucuccggg

SEQ ID NO: 1973484 - RNA, 19 nt, Artificial Sequence
  Description of Artificial Sequence: Synthetic oligonucleotide
  Sense strand starting at position 1899 of SEQ ID NO: 1880522
cucgcuuagaaucagguau

SEQ ID NO: 1973485 - RNA, 19 nt, Artificial Sequence
  Description of Artificial Sequence: Synthetic oligonucleotide
  Antisense strand to SEQ ID NO: 1973484
auaccugauucuaagcgag

SEQ ID NO: 1973486 - RNA, 19 nt, Artificial Sequence
  Description of Artificial Sequence: Synthetic oligonucleotide
  Sense strand starting at position 2694 of SEQ ID NO: 1880522
uggagauaacugggcgauu

SEQ ID NO: 1973487 - RNA, 19 nt, Artificial Sequence
  Description of Artificial Sequence: Synthetic oligonucleotide
  Antisense strand to SEQ ID NO: 1973486
aaucgcccaguuaucucca

SEQ ID NO: 1973488 - RNA, 19 nt, Artificial Sequence
  Description of Artificial Sequence: Synthetic oligonucleotide
  Sense strand starting at position 2695 of SEQ ID NO: 1880522
ggagauaacugggcgauuc

SEQ ID NO: 1973489 - RNA, 19 nt, Artificial Sequence
  Description of Artificial Sequence: Synthetic oligonucleotide
  Antisense strand to SEQ ID NO: 1973488
gaaucgcccaguuaucucc

SEQ ID NO: 1973490 - RNA, 19 nt, Artificial Sequence
  Description of Artificial Sequence: Synthetic oligonucleotide
  Sense strand starting at position 2696 of SEQ ID NO: 1880522
gagauaacugggcgauucu

SEQ ID NO: 1973491 - RNA, 19 nt, Artificial Sequence
  Description of Artificial Sequence: Synthetic oligonucleotide
  Antisense strand to SEQ ID NO: 1973490
agaaucgcccaguuaucuc

SEQ ID NO: 1973492 - RNA, 19 nt, Artificial Sequence
  Description of Artificial Sequence: Synthetic oligonucleotide
  Sense strand starting at position 2720 of SEQ ID NO: 1880522
gcuugucuacacuaccauu

SEQ ID NO: 1973493 - RNA, 19 nt, Artificial Sequence
  Description of Artificial Sequence: Synthetic oligonucleotide
  Antisense strand to SEQ ID NO: 1973492
aaugguaguguagacaagc

SEQ ID NO: 1973494 - RNA, 19 nt, Artificial Sequence
  Description of Artificial Sequence: Synthetic oligonucleotide
  Sense strand starting at position 2899 of SEQ ID NO: 1880522
agauauaacuugcuagcca

SEQ ID NO: 1973495 - RNA, 19 nt, Artificial Sequence
  Description of Artificial Sequence: Synthetic oligonucleotide
  Antisense strand to SEQ ID NO: 1973494
uggcuagcaaguuauaucu

SEQ ID NO: 1973496 - RNA, 19 nt, Artificial Sequence
  Description of Artificial Sequence: Synthetic oligonucleotide
  Sense strand starting at position 3091 of SEQ ID NO: 1880522
ucaauuuauuguuuggcau

SEQ ID NO: 1973497 - RNA, 19 nt, Artificial Sequence
  Description of Artificial Sequence: Synthetic oligonucleotide
  Antisense strand to SEQ ID NO: 1973496
augccaaacaauaaauuga

SEQ ID NO: 1973498 - RNA, 19 nt, Artificial Sequence
  Description of Artificial Sequence: Synthetic oligonucleotide
  Sense strand starting at position 3097 of SEQ ID NO: 1880522
uauuguuuggcauaggugu

SEQ ID NO: 1973499 - RNA, 19 nt, Artificial Sequence
  Description of Artificial Sequence: Synthetic oligonucleotide
  Antisense strand to SEQ ID NO: 1973498
acaccuaugccaaacaaua

SEQ ID NO: 1973500 - RNA, 19 nt, Artificial Sequence
  Description of Artificial Sequence: Synthetic oligonucleotide
  Sense strand starting at position 3108 of SEQ ID NO: 1880522
auaggugucuuggcugaau

SEQ ID NO: 1973501 - RNA, 19 nt, Artificial Sequence
  Description of Artificial Sequence: Synthetic oligonucleotide
  Antisense strand to SEQ ID NO: 1973500
auucagccaagacaccuau

SEQ ID NO: 1973502 - RNA, 19 nt, Artificial Sequence
  Description of Artificial Sequence: Synthetic oligonucleotide
  Sense strand starting at position 3111 of SEQ ID NO: 1880522
ggugucuuggcugaaucuu

SEQ ID NO: 1973503 - RNA, 19 nt, Artificial Sequence
  Description of Artificial Sequence: Synthetic oligonucleotide
  Antisense strand to SEQ ID NO: 1973502
aagauucagccaagacacc

SEQ ID NO: 1973504 - RNA, 19 nt, Artificial Sequence
  Description of Artificial Sequence: Synthetic oligonucleotide
  Sense strand starting at position 3374 of SEQ ID NO: 1880522
ccagcaucucuagguauuu

SEQ ID NO: 1973505 - RNA, 19 nt, Artificial Sequence
  Description of Artificial Sequence: Synthetic oligonucleotide
  Antisense strand to SEQ ID NO: 1973504
aaauaccuagagaugcugg

SEQ ID NO: 1973506 - RNA, 19 nt, Artificial Sequence
  Description of Artificial Sequence: Synthetic oligonucleotide
  Sense strand starting at position 3405 of SEQ ID NO: 1880522
uccagaauuccagagcuuu

SEQ ID NO: 1973507 - RNA, 19 nt, Artificial Sequence
  Description of Artificial Sequence: Synthetic oligonucleotide
  Antisense strand to SEQ ID NO: 1973506
aaagcucuggaauucugga

SEQ ID NO: 1973508 - RNA, 19 nt, Artificial Sequence
  Description of Artificial Sequence: Synthetic oligonucleotide
  Sense strand starting at position 3443 of SEQ ID NO: 1880522
gagccacauccucaguguu

SEQ ID NO: 1973509 - RNA, 19 nt, Artificial Sequence
  Description of Artificial Sequence: Synthetic oligonucleotide
  Antisense strand to SEQ ID NO: 1973508
aacacugaggauguggcuc

SEQ ID NO: 1973510 - RNA, 19 nt, Artificial Sequence
  Description of Artificial Sequence: Synthetic oligonucleotide
  Sense strand starting at position 3481 of SEQ ID NO: 1880522
uccaguuucggcguuuaga

SEQ ID NO: 1973511 - RNA, 19 nt, Artificial Sequence
  Description of Artificial Sequence: Synthetic oligonucleotide
  Antisense strand to SEQ ID NO: 1973510
ucuaaacgccgaaacugga

SEQ ID NO: 1973512 - RNA, 19 nt, Artificial Sequence
  Description of Artificial Sequence: Synthetic oligonucleotide
  Sense strand starting at position 3538 of SEQ ID NO: 1880522
cucccugagcuguaaauau

SEQ ID NO: 1973513 - RNA, 19 nt, Artificial Sequence
  Description of Artificial Sequence: Synthetic oligonucleotide
  Antisense strand to SEQ ID NO: 1973512
auauuuacagcucagggag

SEQ ID NO: 1973514 - RNA, 19 nt, Artificial Sequence
  Description of Artificial Sequence: Synthetic oligonucleotide
  Sense strand starting at position 3577 of SEQ ID NO: 1880522
gaguuauaguaacugcagu

SEQ ID NO: 1973515 - RNA, 19 nt, Artificial Sequence
  Description of Artificial Sequence: Synthetic oligonucleotide
  Antisense strand to SEQ ID NO: 1973514
acugcaguuacuauaacuc

SEQ ID NO: 1973516 - RNA, 19 nt, Artificial Sequence
  Description of Artificial Sequence: Synthetic oligonucleotide
  Sense strand starting at position 3600 of SEQ ID NO: 1880522
gcaggagaugagugcuacu

SEQ ID NO: 1973517 - RNA, 19 nt, Artificial Sequence
  Description of Artificial Sequence: Synthetic oligonucleotide
  Antisense strand to SEQ ID NO: 1973516
aguagcacucaucuccugc

SEQ ID NO: 1973518 - RNA, 19 nt, Artificial Sequence
  Description of Artificial Sequence: Synthetic oligonucleotide
  Sense strand starting at position 3864 of SEQ ID NO: 1880522
aauguaagugauggaugau

SEQ ID NO: 1973519 - RNA, 19 nt, Artificial Sequence
  Description of Artificial Sequence: Synthetic oligonucleotide
  Antisense strand to SEQ ID NO: 1973518
aucauccaucacuuacauu

SEQ ID NO: 1973520 - RNA, 19 nt, Artificial Sequence
  Description of Artificial Sequence: Synthetic oligonucleotide
  Sense strand starting at position 3867 of SEQ ID NO: 1880522
guaagugauggaugauccu

SEQ ID NO: 1973521 - RNA, 19 nt, Artificial Sequence
  Description of Artificial Sequence: Synthetic oligonucleotide
  Antisense strand to SEQ ID NO: 1973520
aggaucauccaucacuuac

SEQ ID NO: 1973522 - RNA, 19 nt, Artificial Sequence
  Description of Artificial Sequence: Synthetic oligonucleotide
  Sense strand starting at position 3920 of SEQ ID NO: 1880522
augaaauauuguuccugca

SEQ ID NO: 1973523 - RNA, 19 nt, Artificial Sequence
  Description of Artificial Sequence: Synthetic oligonucleotide
  Antisense strand to SEQ ID NO: 1973522
ugcaggaacaauauuucau

SEQ ID NO: 1973524 - RNA, 19 nt, Artificial Sequence
  Description of Artificial Sequence: Synthetic oligonucleotide
  Sense strand starting at position 3928 of SEQ ID NO: 1880522
uuguuccugcaucauguaa

SEQ ID NO: 1973525 - RNA, 19 nt, Artificial Sequence
  Description of Artificial Sequence: Synthetic oligonucleotide
  Antisense strand to SEQ ID NO: 1973524
uuacaugaugcaggaacaa

SEQ ID NO: 1973526 - RNA, 19 nt, Artificial Sequence
  Description of Artificial Sequence: Synthetic oligonucleotide
  Sense strand starting at position 3975 of SEQ ID NO: 1880522
agaggauagugcuuaauca

SEQ ID NO: 1973527 - RNA, 19 nt, Artificial Sequence
  Description of Artificial Sequence: Synthetic oligonucleotide
  Antisense strand to SEQ ID NO: 1973526
ugauuaagcacuauccucu

SEQ ID NO: 1973528 - RNA, 19 nt, Artificial Sequence
  Description of Artificial Sequence: Synthetic oligonucleotide
  Sense strand starting at position 52 of SEQ ID NO: 1880523
cccugucuucugcaaagca

SEQ ID NO: 1973529 - RNA, 19 nt, Artificial Sequence
  Description of Artificial Sequence: Synthetic oligonucleotide
  Antisense strand to SEQ ID NO: 1973528
ugcuuugcagaagacaggg

SEQ ID NO: 1973530 - RNA, 19 nt, Artificial Sequence
  Description of Artificial Sequence: Synthetic oligonucleotide
  Sense strand starting at position 123 of SEQ ID NO: 1880523
cuugguggccuucagugaa

SEQ ID NO: 1973531 - RNA, 19 nt, Artificial Sequence
  Description of Artificial Sequence: Synthetic oligonucleotide
  Antisense strand to SEQ ID NO: 1973530
uucacugaaggccaccaag

SEQ ID NO: 1973532 - RNA, 19 nt, Artificial Sequence
  Description of Artificial Sequence: Synthetic oligonucleotide
  Sense strand starting at position 182 of SEQ ID NO: 1880523
cguugcguuauugucuaau

SEQ ID NO: 1973533 - RNA, 19 nt, Artificial Sequence
  Description of Artificial Sequence: Synthetic oligonucleotide
  Antisense strand to SEQ ID NO: 1973532
auuagacaauaacgcaacg

SEQ ID NO: 1973534 - RNA, 19 nt, Artificial Sequence
  Description of Artificial Sequence: Synthetic oligonucleotide
  Sense strand starting at position 405 of SEQ ID NO: 1880523
auguaaaccgacugagaau

SEQ ID NO: 1973535 - RNA, 19 nt, Artificial Sequence
  Description of Artificial Sequence: Synthetic oligonucleotide
  Antisense strand to SEQ ID NO: 1973534
auucucagucgguuuacau

SEQ ID NO: 1973536 - RNA, 19 nt, Artificial Sequence
  Description of Artificial Sequence: Synthetic oligonucleotide
  Sense strand starting at position 448 of SEQ ID NO: 1880523
cucuccugggcuugaauaa

SEQ ID NO: 1973537 - RNA, 19 nt, Artificial Sequence
  Description of Artificial Sequence: Synthetic oligonucleotide
  Antisense strand to SEQ ID NO: 1973536
uuauucaagcccaggagag

SEQ ID NO: 1973538 - RNA, 19 nt, Artificial Sequence
  Description of Artificial Sequence: Synthetic oligonucleotide
  Sense strand starting at position 449 of SEQ ID NO: 1880523
ucuccugggcuugaauaaa

SEQ ID NO: 1973539 - RNA, 19 nt, Artificial Sequence
  Description of Artificial Sequence: Synthetic oligonucleotide
  Antisense strand to SEQ ID NO: 1973538
uuuauucaagcccaggaga

SEQ ID NO: 1973540 - RNA, 19 nt, Artificial Sequence
  Description of Artificial Sequence: Synthetic oligonucleotide
  Sense strand starting at position 745 of SEQ ID NO: 1880523
cuuggagcuuccuuuggaa

SEQ ID NO: 1973541 - RNA, 19 nt, Artificial Sequence
  Description of Artificial Sequence: Synthetic oligonucleotide
  Antisense strand to SEQ ID NO: 1973540
uuccaaaggaagcuccaag

SEQ ID NO: 1973542 - RNA, 19 nt, Artificial Sequence
  Description of Artificial Sequence: Synthetic oligonucleotide
  Sense strand starting at position 747 of SEQ ID NO: 1880523
uggagcuuccuuuggaaua

SEQ ID NO: 1973543 - RNA, 19 nt, Artificial Sequence
  Description of Artificial Sequence: Synthetic oligonucleotide
  Antisense strand to SEQ ID NO: 1973542
uauuccaaaggaagcucca

SEQ ID NO: 1973544 - RNA, 19 nt, Artificial Sequence
  Description of Artificial Sequence: Synthetic oligonucleotide
  Sense strand starting at position 815 of SEQ ID NO: 1880523
gggcauagcuuuccaacau

SEQ ID NO: 1973545 - RNA, 19 nt, Artificial Sequence
  Description of Artificial Sequence: Synthetic oligonucleotide
  Antisense strand to SEQ ID NO: 1973544
auguuggaaagcuaugccc

SEQ ID NO: 1973546 - RNA, 19 nt, Artificial Sequence
  Description of Artificial Sequence: Synthetic oligonucleotide
  Sense strand starting at position 947 of SEQ ID NO: 1880523
gcacacuaagcaugaagau

SEQ ID NO: 1973547 - RNA, 19 nt, Artificial Sequence
  Description of Artificial Sequence: Synthetic oligonucleotide
  Antisense strand to SEQ ID NO: 1973546
aucuucaugcuuagugugc

SEQ ID NO: 1973548 - RNA, 19 nt, Artificial Sequence
  Description of Artificial Sequence: Synthetic oligonucleotide
  Sense strand starting at position 960 of SEQ ID NO: 1880523
gaagaugugagucacaagu

SEQ ID NO: 1973549 - RNA, 19 nt, Artificial Sequence
  Description of Artificial Sequence: Synthetic oligonucleotide
  Antisense strand to SEQ ID NO: 1973548
acuugugacucacaucuuc

SEQ ID NO: 1973550 - RNA, 19 nt, Artificial Sequence
  Description of Artificial Sequence: Synthetic oligonucleotide
  Sense strand starting at position 1394 of SEQ ID NO: 1880523
gugucauaagauugagagu

SEQ ID NO: 1973551 - RNA, 19 nt, Artificial Sequence
  Description of Artificial Sequence: Synthetic oligonucleotide
  Antisense strand to SEQ ID NO: 1973550
acucucaaucuuaugacac

SEQ ID NO: 1973552 - RNA, 19 nt, Artificial Sequence
  Description of Artificial Sequence: Synthetic oligonucleotide
  Sense strand starting at position 1405 of SEQ ID NO: 1880523
uugagagucccacauucca

SEQ ID NO: 1973553 - RNA, 19 nt, Artificial Sequence
  Description of Artificial Sequence: Synthetic oligonucleotide
  Antisense strand to SEQ ID NO: 1973552
uggaaugugggacucucaa

SEQ ID NO: 1973554 - RNA, 19 nt, Artificial Sequence
  Description of Artificial Sequence: Synthetic oligonucleotide
  Sense strand starting at position 1631 of SEQ ID NO: 1880523
ccuggaucgugcuccauaa

SEQ ID NO: 1973555 - RNA, 19 nt, Artificial Sequence
  Description of Artificial Sequence: Synthetic oligonucleotide
  Antisense strand to SEQ ID NO: 1973554
uuauggagcacgauccagg

SEQ ID NO: 1973556 - RNA, 19 nt, Artificial Sequence
  Description of Artificial Sequence: Synthetic oligonucleotide
  Sense strand starting at position 2125 of SEQ ID NO: 1880523
gccaacagcccuugucaga

SEQ ID NO: 1973557 - RNA, 19 nt, Artificial Sequence
  Description of Artificial Sequence: Synthetic oligonucleotide
  Antisense strand to SEQ ID NO: 1973556
ucugacaagggcuguuggc

SEQ ID NO: 1973558 - RNA, 19 nt, Artificial Sequence
  Description of Artificial Sequence: Synthetic oligonucleotide
  Sense strand starting at position 2412 of SEQ ID NO: 1880523
ccgcaacgcccgguuaauu

SEQ ID NO: 1973559 - RNA, 19 nt, Artificial Sequence
  Description of Artificial Sequence: Synthetic oligonucleotide
  Antisense strand to SEQ ID NO: 1973558
aauuaaccgggcguugcgg

SEQ ID NO: 1973560 - RNA, 19 nt, Artificial Sequence
  Description of Artificial Sequence: Synthetic oligonucleotide
  Sense strand starting at position 2584 of SEQ ID NO: 1880523
ccuugucaaccuugcaaga

SEQ ID NO: 1973561 - RNA, 19 nt, Artificial Sequence
  Description of Artificial Sequence: Synthetic oligonucleotide
  Antisense strand to SEQ ID NO: 1973560
ucuugcaagguugacaagg

SEQ ID NO: 1973562 - RNA, 19 nt, Artificial Sequence
  Description of Artificial Sequence: Synthetic oligonucleotide
  Sense strand starting at position 2854 of SEQ ID NO: 1880523
gcuagaaugggccaucucu

SEQ ID NO: 1973563 - RNA, 19 nt, Artificial Sequence
  Description of Artificial Sequence: Synthetic oligonucleotide
  Antisense strand to SEQ ID NO: 1973562
agagauggcccauucuagc

SEQ ID NO: 1973564 - RNA, 19 nt, Artificial Sequence
  Description of Artificial Sequence: Synthetic oligonucleotide
  Sense strand starting at position 2884 of SEQ ID NO: 1880523
ccgcauguucuuguggcaa

SEQ ID NO: 1973565 - RNA, 19 nt, Artificial Sequence
  Description of Artificial Sequence: Synthetic oligonucleotide
  Antisense strand to SEQ ID NO: 1973564
uugccacaagaacaugcgg

SEQ ID NO: 1973566 - RNA, 19 nt, Artificial Sequence
  Description of Artificial Sequence: Synthetic oligonucleotide
  Sense strand starting at position 3141 of SEQ ID NO: 1880523
aaggauuggccuugagaga

SEQ ID NO: 1973567 - RNA, 19 nt, Artificial Sequence
  Description of Artificial Sequence: Synthetic oligonucleotide
  Antisense strand to SEQ ID NO: 1973566
ucucucaaggccaauccuu

SEQ ID NO: 1973568 - RNA, 19 nt, Artificial Sequence
  Description of Artificial Sequence: Synthetic oligonucleotide
  Sense strand starting at position 3239 of SEQ ID NO: 1880523
ggaagcagaaaguguuuga

SEQ ID NO: 1973569 - RNA, 19 nt, Artificial Sequence
  Description of Artificial Sequence: Synthetic oligonucleotide
  Antisense strand to SEQ ID NO: 1973568
ucaaacacuuucugcuucc

SEQ ID NO: 1973570 - RNA, 19 nt, Artificial Sequence
  Description of Artificial Sequence: Synthetic oligonucleotide
  Sense strand starting at position 3242 of SEQ ID NO: 1880523
agcagaaaguguuugagga

SEQ ID NO: 1973571 - RNA, 19 nt, Artificial Sequence
  Description of Artificial Sequence: Synthetic oligonucleotide
  Antisense strand to SEQ ID NO: 1973570
uccucaaacacuuucugcu

SEQ ID NO: 1973572 - RNA, 19 nt, Artificial Sequence
  Description of Artificial Sequence: Synthetic oligonucleotide
  Sense strand starting at position 3243 of SEQ ID NO: 1880523
gcagaaaguguuugaggaa

SEQ ID NO: 1973573 - RNA, 19 nt, Artificial Sequence
  Description of Artificial Sequence: Synthetic oligonucleotide
  Antisense strand to SEQ ID NO: 1973572
uuccucaaacacuuucugc

SEQ ID NO: 1973574 - RNA, 19 nt, Artificial Sequence
  Description of Artificial Sequence: Synthetic oligonucleotide
  Sense strand starting at position 3479 of SEQ ID NO: 1880523
gcaauuguggacugcgaga

SEQ ID NO: 1973575 - RNA, 19 nt, Artificial Sequence
  Description of Artificial Sequence: Synthetic oligonucleotide
  Antisense strand to SEQ ID NO: 1973574
ucucgcaguccacaauugc

SEQ ID NO: 1973576 - RNA, 19 nt, Artificial Sequence
  Description of Artificial Sequence: Synthetic oligonucleotide
  Sense strand starting at position 3481 of SEQ ID NO: 1880523
aauuguggacugcgagaau

SEQ ID NO: 1973577 - RNA, 19 nt, Artificial Sequence
  Description of Artificial Sequence: Synthetic oligonucleotide
  Antisense strand to SEQ ID NO: 1973576
auucucgcaguccacaauu

SEQ ID NO: 1973578 - RNA, 19 nt, Artificial Sequence
  Description of Artificial Sequence: Synthetic oligonucleotide
  Sense strand starting at position 3492 of SEQ ID NO: 1880523
gcgagaaucagaggagcaa

SEQ ID NO: 1973579 - RNA, 19 nt, Artificial Sequence
  Description of Artificial Sequence: Synthetic oligonucleotide
  Antisense strand to SEQ ID NO: 1973578
uugcuccucugauucucgc

SEQ ID NO: 1973580 - RNA, 19 nt, Artificial Sequence
  Description of Artificial Sequence: Synthetic oligonucleotide
  Sense strand starting at position 3519 of SEQ ID NO: 1880523
gugacacagagcuguaauc

SEQ ID NO: 1973581 - RNA, 19 nt, Artificial Sequence
  Description of Artificial Sequence: Synthetic oligonucleotide
  Antisense strand to SEQ ID NO: 1973580
gauuacagcucugugucac

SEQ ID NO: 1973582 - RNA, 19 nt, Artificial Sequence
  Description of Artificial Sequence: Synthetic oligonucleotide
  Sense strand starting at position 3530 of SEQ ID NO: 1880523
cuguaaucuggugaguuug

SEQ ID NO: 1973583 - RNA, 19 nt, Artificial Sequence
  Description of Artificial Sequence: Synthetic oligonucleotide
  Antisense strand to SEQ ID NO: 1973582
caaacucaccagauuacag

SEQ ID NO: 1973584 - RNA, 19 nt, Artificial Sequence
  Description of Artificial Sequence: Synthetic oligonucleotide
  Sense strand starting at position 3562 of SEQ ID NO: 1880523
auuagaaggugugcucuga

SEQ ID NO: 1973585 - RNA, 19 nt, Artificial Sequence
  Description of Artificial Sequence: Synthetic oligonucleotide
  Antisense strand to SEQ ID NO: 1973584
ucagagcacaccuucuaau

SEQ ID NO: 1973586 - RNA, 19 nt, Artificial Sequence
  Description of Artificial Sequence: Synthetic oligonucleotide
  Sense strand starting at position 3566 of SEQ ID NO: 1880523
gaaggugugcucugagagg

SEQ ID NO: 1973587 - RNA, 19 nt, Artificial Sequence
  Description of Artificial Sequence: Synthetic oligonucleotide
  Antisense strand to SEQ ID NO: 1973586
ccucucagagcacaccuuc

SEQ ID NO: 1973588 - RNA, 19 nt, Artificial Sequence
  Description of Artificial Sequence: Synthetic oligonucleotide
  Sense strand starting at position 3614 of SEQ ID NO: 1880523
gugucugaugcugagaaga

SEQ ID NO: 1973589 - RNA, 19 nt, Artificial Sequence
  Description of Artificial Sequence: Synthetic oligonucleotide
  Antisense strand to SEQ ID NO: 1973588
ucuucucagcaucagacac

SEQ ID NO: 1973590 - RNA, 19 nt, Artificial Sequence
  Description of Artificial Sequence: Synthetic oligonucleotide
  Sense strand starting at position 3644 of SEQ ID NO: 1880523
uggguuacagcagauaagu

SEQ ID NO: 1973591 - RNA, 19 nt, Artificial Sequence
  Description of Artificial Sequence: Synthetic oligonucleotide
  Antisense strand to SEQ ID NO: 1973590
acuuaucugcuguaaccca

SEQ ID NO: 1973592 - RNA, 19 nt, Artificial Sequence
  Description of Artificial Sequence: Synthetic oligonucleotide
  Sense strand starting at position 3653 of SEQ ID NO: 1880523
gcagauaagucucugcgga

SEQ ID NO: 1973593 - RNA, 19 nt, Artificial Sequence
  Description of Artificial Sequence: Synthetic oligonucleotide
  Antisense strand to SEQ ID NO: 1973592
uccgcagagacuuaucugc

SEQ ID NO: 1973594 - RNA, 19 nt, Artificial Sequence
  Description of Artificial Sequence: Synthetic oligonucleotide
  Sense strand starting at position 3654 of SEQ ID NO: 1880523
cagauaagucucugcggaa

SEQ ID NO: 1973595 - RNA, 19 nt, Artificial Sequence
  Description of Artificial Sequence: Synthetic oligonucleotide
  Antisense strand to SEQ ID NO: 1973594
uuccgcagagacuuaucug

SEQ ID NO: 1973596 - RNA, 19 nt, Artificial Sequence
  Description of Artificial Sequence: Synthetic oligonucleotide
  Sense strand starting at position 3655 of SEQ ID NO: 1880523
agauaagucucugcggaag

SEQ ID NO: 1973597 - RNA, 19 nt, Artificial Sequence
  Description of Artificial Sequence: Synthetic oligonucleotide
  Antisense strand to SEQ ID NO: 1973596
cuuccgcagagacuuaucu

SEQ ID NO: 1973598 - RNA, 19 nt, Artificial Sequence
  Description of Artificial Sequence: Synthetic oligonucleotide
  Sense strand starting at position 3658 of SEQ ID NO: 1880523
uaagucucugcggaaggaa

SEQ ID NO: 1973599 - RNA, 19 nt, Artificial Sequence
  Description of Artificial Sequence: Synthetic oligonucleotide
  Antisense strand to SEQ ID NO: 1973598
uuccuuccgcagagacuua

SEQ ID NO: 1973600 - RNA, 19 nt, Artificial Sequence
  Description of Artificial Sequence: Synthetic oligonucleotide
  Sense strand starting at position 3704 of SEQ ID NO: 1880523
gaaugcaagcucuggcuua

SEQ ID NO: 1973601 - RNA, 19 nt, Artificial Sequence
  Description of Artificial Sequence: Synthetic oligonucleotide
  Antisense strand to SEQ ID NO: 1973600
uaagccagagcuugcauuc

SEQ ID NO: 1973602 - RNA, 19 nt, Artificial Sequence
  Description of Artificial Sequence: Synthetic oligonucleotide
  Sense strand starting at position 3744 of SEQ ID NO: 1880523
aaagcaaaguuccucguua

SEQ ID NO: 1973603 - RNA, 19 nt, Artificial Sequence
  Description of Artificial Sequence: Synthetic oligonucleotide
  Antisense strand to SEQ ID NO: 1973602
uaacgaggaacuuugcuuu

SEQ ID NO: 1973604 - RNA, 19 nt, Artificial Sequence
  Description of Artificial Sequence: Synthetic oligonucleotide
  Sense strand starting at position 3745 of SEQ ID NO: 1880523
aagcaaaguuccucguuau

SEQ ID NO: 1973605 - RNA, 19 nt, Artificial Sequence
  Description of Artificial Sequence: Synthetic oligonucleotide
  Antisense strand to SEQ ID NO: 1973604
auaacgaggaacuuugcuu

SEQ ID NO: 1973606 - RNA, 19 nt, Artificial Sequence
  Description of Artificial Sequence: Synthetic oligonucleotide
  Sense strand starting at position 3748 of SEQ ID NO: 1880523
caaaguuccucguuaugag

SEQ ID NO: 1973607 - RNA, 19 nt, Artificial Sequence
  Description of Artificial Sequence: Synthetic oligonucleotide
  Antisense strand to SEQ ID NO: 1973606
cucauaacgaggaacuuug

SEQ ID NO: 1973608 - RNA, 19 nt, Artificial Sequence
  Description of Artificial Sequence: Synthetic oligonucleotide
  Sense strand starting at position 312 of SEQ ID NO: 1880524
gucacugacuuuguaagga

SEQ ID NO: 1973609 - RNA, 19 nt, Artificial Sequence
  Description of Artificial Sequence: Synthetic oligonucleotide
  Antisense strand to SEQ ID NO: 1973608
uccuuacaaagucagugac

SEQ ID NO: 1973610 - RNA, 19 nt, Artificial Sequence
  Description of Artificial Sequence: Synthetic oligonucleotide
  Sense strand starting at position 325 of SEQ ID NO: 1880524
uaaggaguuucugcaaaug

SEQ ID NO: 1973611 - RNA, 19 nt, Artificial Sequence
  Description of Artificial Sequence: Synthetic oligonucleotide
  Antisense strand to SEQ ID NO: 1973610
cauuugcagaaacuccuua

SEQ ID NO: 1973612 - RNA, 19 nt, Artificial Sequence
  Description of Artificial Sequence: Synthetic oligonucleotide
  Sense strand starting at position 540 of SEQ ID NO: 1880524
ucagaaugaggucguuaaa

SEQ ID NO: 1973613 - RNA, 19 nt, Artificial Sequence
  Description of Artificial Sequence: Synthetic oligonucleotide
  Antisense strand to SEQ ID NO: 1973612
uuuaacgaccucauucuga

SEQ ID NO: 1973614 - RNA, 19 nt, Artificial Sequence
  Description of Artificial Sequence: Synthetic oligonucleotide
  Sense strand starting at position 543 of SEQ ID NO: 1880524
gaaugaggucguuaaagca

SEQ ID NO: 1973615 - RNA, 19 nt, Artificial Sequence
  Description of Artificial Sequence: Synthetic oligonucleotide
  Antisense strand to SEQ ID NO: 1973614
ugcuuuaacgaccucauuc

SEQ ID NO: 1973616 - RNA, 19 nt, Artificial Sequence
  Description of Artificial Sequence: Synthetic oligonucleotide
  Sense strand starting at position 651 of SEQ ID NO: 1880524
augccuucuggguacauau

SEQ ID NO: 1973617 - RNA, 19 nt, Artificial Sequence
  Description of Artificial Sequence: Synthetic oligonucleotide
  Antisense strand to SEQ ID NO: 1973616
auauguacccagaaggcau

SEQ ID NO: 1973618 - RNA, 19 nt, Artificial Sequence
  Description of Artificial Sequence: Synthetic oligonucleotide
  Sense strand starting at position 868 of SEQ ID NO: 1880524
guagucugcccagagaaac

SEQ ID NO: 1973619 - RNA, 19 nt, Artificial Sequence
  Description of Artificial Sequence: Synthetic oligonucleotide
  Antisense strand to SEQ ID NO: 1973618
guuucucugggcagacuac

SEQ ID NO: 1973620 - RNA, 19 nt, Artificial Sequence
  Description of Artificial Sequence: Synthetic oligonucleotide
  Sense strand starting at position 997 of SEQ ID NO: 1880524
ccgagaucuagcugaucaa

SEQ ID NO: 1973621 - RNA, 19 nt, Artificial Sequence
  Description of Artificial Sequence: Synthetic oligonucleotide
  Antisense strand to SEQ ID NO: 1973620
uugaucagcuagaucucgg

SEQ ID NO: 1973622 - RNA, 19 nt, Artificial Sequence
  Description of Artificial Sequence: Synthetic oligonucleotide
  Sense strand starting at position 998 of SEQ ID NO: 1880524
cgagaucuagcugaucaac

SEQ ID NO: 1973623 - RNA, 19 nt, Artificial Sequence
  Description of Artificial Sequence: Synthetic oligonucleotide
  Antisense strand to SEQ ID NO: 1973622
guugaucagcuagaucucg

SEQ ID NO: 1973624 - RNA, 19 nt, Artificial Sequence
  Description of Artificial Sequence: Synthetic oligonucleotide
  Sense strand starting at position 1000 of SEQ ID NO: 1880524
agaucuagcugaucaacga

SEQ ID NO: 1973625 - RNA, 19 nt, Artificial Sequence
  Description of Artificial Sequence: Synthetic oligonucleotide
  Antisense strand to SEQ ID NO: 1973624
ucguugaucagcuagaucu

SEQ ID NO: 1973626 - RNA, 19 nt, Artificial Sequence
  Description of Artificial Sequence: Synthetic oligonucleotide
  Sense strand starting at position 1001 of SEQ ID NO: 1880524
gaucuagcugaucaacgau

SEQ ID NO: 1973627 - RNA, 19 nt, Artificial Sequence
  Description of Artificial Sequence: Synthetic oligonucleotide
  Antisense strand to SEQ ID NO: 1973626
aucguugaucagcuagauc

SEQ ID NO: 1973628 - RNA, 19 nt, Artificial Sequence
  Description of Artificial Sequence: Synthetic oligonucleotide
  Sense strand starting at position 1004 of SEQ ID NO: 1880524
cuagcugaucaacgauuga

SEQ ID NO: 1973629 - RNA, 19 nt, Artificial Sequence
  Description of Artificial Sequence: Synthetic oligonucleotide
  Antisense strand to SEQ ID NO: 1973628
ucaaucguugaucagcuag

SEQ ID NO: 1973630 - RNA, 19 nt, Artificial Sequence
  Description of Artificial Sequence: Synthetic oligonucleotide
  Sense strand starting at position 1071 of SEQ ID NO: 1880524
cuaccuggguuugcagaaa

SEQ ID NO: 1973631 - RNA, 19 nt, Artificial Sequence
  Description of Artificial Sequence: Synthetic oligonucleotide
  Antisense strand to SEQ ID NO: 1973630
uuucugcaaacccagguag

SEQ ID NO: 1973632 - RNA, 19 nt, Artificial Sequence
  Description of Artificial Sequence: Synthetic oligonucleotide
  Sense strand starting at position 1456 of SEQ ID NO: 1880524
ggcccuucugaacaguauu

SEQ ID NO: 1973633 - RNA, 19 nt, Artificial Sequence
  Description of Artificial Sequence: Synthetic oligonucleotide
  Antisense strand to SEQ ID NO: 1973632
aauacuguucagaagggcc

SEQ ID NO: 1973634 - RNA, 19 nt, Artificial Sequence
  Description of Artificial Sequence: Synthetic oligonucleotide
  Sense strand starting at position 1520 of SEQ ID NO: 1880524
augcuauaggacgauauca

SEQ ID NO: 1973635 - RNA, 19 nt, Artificial Sequence
  Description of Artificial Sequence: Synthetic oligonucleotide
  Antisense strand to SEQ ID NO: 1973634
ugauaucguccuauagcau

SEQ ID NO: 1973636 - RNA, 19 nt, Artificial Sequence
  Description of Artificial Sequence: Synthetic oligonucleotide
  Sense strand starting at position 1522 of SEQ ID NO: 1880524
gcuauaggacgauaucaau

SEQ ID NO: 1973637 - RNA, 19 nt, Artificial Sequence
  Description of Artificial Sequence: Synthetic oligonucleotide
  Antisense strand to SEQ ID NO: 1973636
auugauaucguccuauagc

SEQ ID NO: 1973638 - RNA, 19 nt, Artificial Sequence
  Description of Artificial Sequence: Synthetic oligonucleotide
  Sense strand starting at position 2405 of SEQ ID NO: 1880524
agaucaugucacuggaugu

SEQ ID NO: 1973639 - RNA, 19 nt, Artificial Sequence
  Description of Artificial Sequence: Synthetic oligonucleotide
  Antisense strand to SEQ ID NO: 1973638
acauccagugacaugaucu

SEQ ID NO: 1973640 - RNA, 19 nt, Artificial Sequence
  Description of Artificial Sequence: Synthetic oligonucleotide
  Sense strand starting at position 2437 of SEQ ID NO: 1880524
uuugauguacacugcaaga

SEQ ID NO: 1973641 - RNA, 19 nt, Artificial Sequence
  Description of Artificial Sequence: Synthetic oligonucleotide
  Antisense strand to SEQ ID NO: 1973640
ucuugcaguguacaucaaa

SEQ ID NO: 1973642 - RNA, 19 nt, Artificial Sequence
  Description of Artificial Sequence: Synthetic oligonucleotide
  Sense strand starting at position 2471 of SEQ ID NO: 1880524
agcuauuaagcccagguau

SEQ ID NO: 1973643 - RNA, 19 nt, Artificial Sequence
  Description of Artificial Sequence: Synthetic oligonucleotide
  Antisense strand to SEQ ID NO: 1973642
auaccugggcuuaauagcu

SEQ ID NO: 1973644 - RNA, 19 nt, Artificial Sequence
  Description of Artificial Sequence: Synthetic oligonucleotide
  Sense strand starting at position 2512 of SEQ ID NO: 1880524
uuucauggugaauggguaa

SEQ ID NO: 1973645 - RNA, 19 nt, Artificial Sequence
  Description of Artificial Sequence: Synthetic oligonucleotide
  Antisense strand to SEQ ID NO: 1973644
uuacccauucaccaugaaa

SEQ ID NO: 1973646 - RNA, 19 nt, Artificial Sequence
  Description of Artificial Sequence: Synthetic oligonucleotide
  Sense strand starting at position 2515 of SEQ ID NO: 1880524
cauggugaauggguaaaua

SEQ ID NO: 1973647 - RNA, 19 nt, Artificial Sequence
  Description of Artificial Sequence: Synthetic oligonucleotide
  Antisense strand to SEQ ID NO: 1973646
uauuuacccauucaccaug

SEQ ID NO: 1973648 - RNA, 19 nt, Artificial Sequence
  Description of Artificial Sequence: Synthetic oligonucleotide
  Sense strand starting at position 2523 of SEQ ID NO: 1880524
auggguaaauaugucucua

SEQ ID NO: 1973649 - RNA, 19 nt, Artificial Sequence
  Description of Artificial Sequence: Synthetic oligonucleotide
  Antisense strand to SEQ ID NO: 1973648
uagagacauauuuacccau

SEQ ID NO: 1973650 - RNA, 19 nt, Artificial Sequence
  Description of Artificial Sequence: Synthetic oligonucleotide
  Sense strand starting at position 2525 of SEQ ID NO: 1880524
ggguaaauaugucucuacu

SEQ ID NO: 1973651 - RNA, 19 nt, Artificial Sequence
  Description of Artificial Sequence: Synthetic oligonucleotide
  Antisense strand to SEQ ID NO: 1973650
aguagagacauauuuaccc

SEQ ID NO: 1973652 - RNA, 19 nt, Artificial Sequence
  Description of Artificial Sequence: Synthetic oligonucleotide
  Sense strand starting at position 2565 of SEQ ID NO: 1880524
cugacuauguggucuugaa

SEQ ID NO: 1973653 - RNA, 19 nt, Artificial Sequence
  Description of Artificial Sequence: Synthetic oligonucleotide
  Antisense strand to SEQ ID NO: 1973652
uucaagaccacauagucag

SEQ ID NO: 1973654 - RNA, 19 nt, Artificial Sequence
  Description of Artificial Sequence: Synthetic oligonucleotide
  Sense strand starting at position 2569 of SEQ ID NO: 1880524
cuauguggucuugaaagga

SEQ ID NO: 1973655 - RNA, 19 nt, Artificial Sequence
  Description of Artificial Sequence: Synthetic oligonucleotide
  Antisense strand to SEQ ID NO: 1973654
uccuuucaagaccacauag

SEQ ID NO: 1973656 - RNA, 19 nt, Artificial Sequence
  Description of Artificial Sequence: Synthetic oligonucleotide
  Sense strand starting at position 2573 of SEQ ID NO: 1880524
guggucuugaaaggagaga

SEQ ID NO: 1973657 - RNA, 19 nt, Artificial Sequence
  Description of Artificial Sequence: Synthetic oligonucleotide
  Antisense strand to SEQ ID NO: 1973656
ucucuccuuucaagaccac

SEQ ID NO: 1973658 - RNA, 19 nt, Artificial Sequence
  Description of Artificial Sequence: Synthetic oligonucleotide
  Sense strand starting at position 2610 of SEQ ID NO: 1880524
ucucauuagccuuauguga

SEQ ID NO: 1973659 - RNA, 19 nt, Artificial Sequence
  Description of Artificial Sequence: Synthetic oligonucleotide
  Antisense strand to SEQ ID NO: 1973658
ucacauaaggcuaaugaga

SEQ ID NO: 1973660 - RNA, 19 nt, Artificial Sequence
  Description of Artificial Sequence: Synthetic oligonucleotide
  Sense strand starting at position 2677 of SEQ ID NO: 1880524
gucauugcaguggagaauu

SEQ ID NO: 1973661 - RNA, 19 nt, Artificial Sequence
  Description of Artificial Sequence: Synthetic oligonucleotide
  Antisense strand to SEQ ID NO: 1973660
aauucuccacugcaaugac

SEQ ID NO: 1973662 - RNA, 19 nt, Artificial Sequence
  Description of Artificial Sequence: Synthetic oligonucleotide
  Sense strand starting at position 3102 of SEQ ID NO: 1880524
uuaagagaauugguaguua

SEQ ID NO: 1973663 - RNA, 19 nt, Artificial Sequence
  Description of Artificial Sequence: Synthetic oligonucleotide
  Antisense strand to SEQ ID NO: 1973662
uaacuaccaauucucuuaa

SEQ ID NO: 1973664 - RNA, 19 nt, Artificial Sequence
  Description of Artificial Sequence: Synthetic oligonucleotide
  Sense strand starting at position 3106 of SEQ ID NO: 1880524
gagaauugguaguuaagac

SEQ ID NO: 1973665 - RNA, 19 nt, Artificial Sequence
  Description of Artificial Sequence: Synthetic oligonucleotide
  Antisense strand to SEQ ID NO: 1973664
gucuuaacuaccaauucuc

SEQ ID NO: 1973666 - RNA, 19 nt, Artificial Sequence
  Description of Artificial Sequence: Synthetic oligonucleotide
  Sense strand starting at position 3275 of SEQ ID NO: 1880524
gaggcaauauuaucaguua

SEQ ID NO: 1973667 - RNA, 19 nt, Artificial Sequence
  Description of Artificial Sequence: Synthetic oligonucleotide
  Antisense strand to SEQ ID NO: 1973666
uaacugauaauauugccuc

SEQ ID NO: 1973668 - RNA, 19 nt, Artificial Sequence
  Description of Artificial Sequence: Synthetic oligonucleotide
  Sense strand starting at position 3304 of SEQ ID NO: 1880524
cggugugauauugagugau

SEQ ID NO: 1973669 - RNA, 19 nt, Artificial Sequence
  Description of Artificial Sequence: Synthetic oligonucleotide
  Antisense strand to SEQ ID NO: 1973668
aucacucaauaucacaccg

SEQ ID NO: 1973670 - RNA, 19 nt, Artificial Sequence
  Description of Artificial Sequence: Synthetic oligonucleotide
  Sense strand starting at position 3307 of SEQ ID NO: 1880524
ugugauauugagugauaua

SEQ ID NO: 1973671 - RNA, 19 nt, Artificial Sequence
  Description of Artificial Sequence: Synthetic oligonucleotide
  Antisense strand to SEQ ID NO: 1973670
uauaucacucaauaucaca

SEQ ID NO: 1973672 - RNA, 19 nt, Artificial Sequence
  Description of Artificial Sequence: Synthetic oligonucleotide
  Sense strand starting at position 3371 of SEQ ID NO: 1880524
aaaugaggccuuugacaug

SEQ ID NO: 1973673 - RNA, 19 nt, Artificial Sequence
  Description of Artificial Sequence: Synthetic oligonucleotide
  Antisense strand to SEQ ID NO: 1973672
caugucaaaggccucauuu

SEQ ID NO: 1973674 - RNA, 19 nt, Artificial Sequence
  Description of Artificial Sequence: Synthetic oligonucleotide
  Sense strand starting at position 3383 of SEQ ID NO: 1880524
ugacaugcaggguaauuau

SEQ ID NO: 1973675 - RNA, 19 nt, Artificial Sequence
  Description of Artificial Sequence: Synthetic oligonucleotide
  Antisense strand to SEQ ID NO: 1973674
auaauuacccugcauguca

SEQ ID NO: 1973676 - RNA, 19 nt, Artificial Sequence
  Description of Artificial Sequence: Synthetic oligonucleotide
  Sense strand starting at position 3484 of SEQ ID NO: 1880524
gcugauaacguguaauaau

SEQ ID NO: 1973677 - RNA, 19 nt, Artificial Sequence
  Description of Artificial Sequence: Synthetic oligonucleotide
  Antisense strand to SEQ ID NO: 1973676
auuauuacacguuaucagc

SEQ ID NO: 1973678 - RNA, 19 nt, Artificial Sequence
  Description of Artificial Sequence: Synthetic oligonucleotide
  Sense strand starting at position 3539 of SEQ ID NO: 1880524
uugugagauucuuucugau

SEQ ID NO: 1973679 - RNA, 19 nt, Artificial Sequence
  Description of Artificial Sequence: Synthetic oligonucleotide
  Antisense strand to SEQ ID NO: 1973678
aucagaaagaaucucacaa

SEQ ID NO: 1973680 - RNA, 19 nt, Artificial Sequence
  Description of Artificial Sequence: Synthetic oligonucleotide
  Sense strand starting at position 3541 of SEQ ID NO: 1880524
gugagauucuuucugauca

SEQ ID NO: 1973681 - RNA, 19 nt, Artificial Sequence
  Description of Artificial Sequence: Synthetic oligonucleotide
  Antisense strand to SEQ ID NO: 1973680
ugaucagaaagaaucucac

SEQ ID NO: 1973682 - RNA, 19 nt, Artificial Sequence
  Description of Artificial Sequence: Synthetic oligonucleotide
  Sense strand starting at position 3574 of SEQ ID NO: 1880524
ggcaaacugugguuaaaua

SEQ ID NO: 1973683 - RNA, 19 nt, Artificial Sequence
  Description of Artificial Sequence: Synthetic oligonucleotide
  Antisense strand to SEQ ID NO: 1973682
uauuuaaccacaguuugcc

SEQ ID NO: 1973684 - RNA, 19 nt, Artificial Sequence
  Description of Artificial Sequence: Synthetic oligonucleotide
  Sense strand starting at position 3575 of SEQ ID NO: 1880524
gcaaacugugguuaaauag

SEQ ID NO: 1973685 - RNA, 19 nt, Artificial Sequence
  Description of Artificial Sequence: Synthetic oligonucleotide
  Antisense strand to SEQ ID NO: 1973684
cuauuuaaccacaguuugc

SEQ ID NO: 1973686 - RNA, 19 nt, Artificial Sequence
  Description of Artificial Sequence: Synthetic oligonucleotide
  Sense strand starting at position 3620 of SEQ ID NO: 1880524
cuauuauccugguccaaga

SEQ ID NO: 1973687 - RNA, 19 nt, Artificial Sequence
  Description of Artificial Sequence: Synthetic oligonucleotide
  Antisense strand to SEQ ID NO: 1973686
ucuuggaccaggauaauag

SEQ ID NO: 1973688 - RNA, 19 nt, Artificial Sequence
  Description of Artificial Sequence: Synthetic oligonucleotide
  Sense strand starting at position 128 of SEQ ID NO: 1880525
ggacuuagguccgugugaa

SEQ ID NO: 1973689 - RNA, 19 nt, Artificial Sequence
  Description of Artificial Sequence: Synthetic oligonucleotide
  Antisense strand to SEQ ID NO: 1973688
uucacacggaccuaagucc

SEQ ID NO: 1973690 - RNA, 19 nt, Artificial Sequence
  Description of Artificial Sequence: Synthetic oligonucleotide
  Sense strand starting at position 199 of SEQ ID NO: 1880525
ggauucugggagugcuacu

SEQ ID NO: 1973691 - RNA, 19 nt, Artificial Sequence
  Description of Artificial Sequence: Synthetic oligonucleotide
  Antisense strand to SEQ ID NO: 1973690
aguagcacucccagaaucc

SEQ ID NO: 1973692 - RNA, 19 nt, Artificial Sequence
  Description of Artificial Sequence: Synthetic oligonucleotide
  Sense strand starting at position 208 of SEQ ID NO: 1880525
gagugcuacuuuguacaac

SEQ ID NO: 1973693 - RNA, 19 nt, Artificial Sequence
  Description of Artificial Sequence: Synthetic oligonucleotide
  Antisense strand to SEQ ID NO: 1973692
guuguacaaaguagcacuc

SEQ ID NO: 1973694 - RNA, 19 nt, Artificial Sequence
  Description of Artificial Sequence: Synthetic oligonucleotide
  Sense strand starting at position 275 of SEQ ID NO: 1880525
ugguuaggauguucuaaau

SEQ ID NO: 1973695 - RNA, 19 nt, Artificial Sequence
  Description of Artificial Sequence: Synthetic oligonucleotide
  Antisense strand to SEQ ID NO: 1973694
auuuagaacauccuaacca

SEQ ID NO: 1973696 - RNA, 19 nt, Artificial Sequence
  Description of Artificial Sequence: Synthetic oligonucleotide
  Sense strand starting at position 435 of SEQ ID NO: 1880525
agcaucucuucuuuggaau

SEQ ID NO: 1973697 - RNA, 19 nt, Artificial Sequence
  Description of Artificial Sequence: Synthetic oligonucleotide
  Antisense strand to SEQ ID NO: 1973696
auuccaaagaagagaugcu

SEQ ID NO: 1973698 - RNA, 19 nt, Artificial Sequence
  Description of Artificial Sequence: Synthetic oligonucleotide
  Sense strand starting at position 436 of SEQ ID NO: 1880525
gcaucucuucuuuggaauc

SEQ ID NO: 1973699 - RNA, 19 nt, Artificial Sequence
  Description of Artificial Sequence: Synthetic oligonucleotide
  Antisense strand to SEQ ID NO: 1973698
gauuccaaagaagagaugc

SEQ ID NO: 1973700 - RNA, 19 nt, Artificial Sequence
  Description of Artificial Sequence: Synthetic oligonucleotide
  Sense strand starting at position 547 of SEQ ID NO: 1880525
auacuuagcuaagcaaaga

SEQ ID NO: 1973701 - RNA, 19 nt, Artificial Sequence
  Description of Artificial Sequence: Synthetic oligonucleotide
  Antisense strand to SEQ ID NO: 1973700
ucuuugcuuagcuaaguau

SEQ ID NO: 1973702 - RNA, 19 nt, Artificial Sequence
  Description of Artificial Sequence: Synthetic oligonucleotide
  Sense strand starting at position 590 of SEQ ID NO: 1880525
cagucaguucuggauaauu

SEQ ID NO: 1973703 - RNA, 19 nt, Artificial Sequence
  Description of Artificial Sequence: Synthetic oligonucleotide
  Antisense strand to SEQ ID NO: 1973702
aauuauccagaacugacug

SEQ ID NO: 1973704 - RNA, 19 nt, Artificial Sequence
  Description of Artificial Sequence: Synthetic oligonucleotide
  Sense strand starting at position 592 of SEQ ID NO: 1880525
gucaguucuggauaauucu

SEQ ID NO: 1973705 - RNA, 19 nt, Artificial Sequence
  Description of Artificial Sequence: Synthetic oligonucleotide
  Antisense strand to SEQ ID NO: 1973704
agaauuauccagaacugac

SEQ ID NO: 1973706 - RNA, 19 nt, Artificial Sequence
  Description of Artificial Sequence: Synthetic oligonucleotide
  Sense strand starting at position 684 of SEQ ID NO: 1880525
uaaauauuugucuguggca

SEQ ID NO: 1973707 - RNA, 19 nt, Artificial Sequence
  Description of Artificial Sequence: Synthetic oligonucleotide
  Antisense strand to SEQ ID NO: 1973706
ugccacagacaaauauuua

SEQ ID NO: 1973708 - RNA, 19 nt, Artificial Sequence
  Description of Artificial Sequence: Synthetic oligonucleotide
  Sense strand starting at position 1096 of SEQ ID NO: 1880525
acagguguacagugaugaa

SEQ ID NO: 1973709 - RNA, 19 nt, Artificial Sequence
  Description of Artificial Sequence: Synthetic oligonucleotide
  Antisense strand to SEQ ID NO: 1973708
uucaucacuguacaccugu

SEQ ID NO: 1973710 - RNA, 19 nt, Artificial Sequence
  Description of Artificial Sequence: Synthetic oligonucleotide
  Sense strand starting at position 1196 of SEQ ID NO: 1880525
aauguuugccguugaauuu

SEQ ID NO: 1973711 - RNA, 19 nt, Artificial Sequence
  Description of Artificial Sequence: Synthetic oligonucleotide
  Antisense strand to SEQ ID NO: 1973710
aaauucaacggcaaacauu

SEQ ID NO: 1973712 - RNA, 19 nt, Artificial Sequence
  Description of Artificial Sequence: Synthetic oligonucleotide
  Sense strand starting at position 1205 of SEQ ID NO: 1880525
cguugaauuucaccagcgu

SEQ ID NO: 1973713 - RNA, 19 nt, Artificial Sequence
  Description of Artificial Sequence: Synthetic oligonucleotide
  Antisense strand to SEQ ID NO: 1973712
acgcuggugaaauucaacg

SEQ ID NO: 1973714 - RNA, 19 nt, Artificial Sequence
  Description of Artificial Sequence: Synthetic oligonucleotide
  Sense strand starting at position 1228 of SEQ ID NO: 1880525
acaacauucugggaaauaa

SEQ ID NO: 1973715 - RNA, 19 nt, Artificial Sequence
  Description of Artificial Sequence: Synthetic oligonucleotide
  Antisense strand to SEQ ID NO: 1973714
uuauuucccagaauguugu

SEQ ID NO: 1973716 - RNA, 19 nt, Artificial Sequence
  Description of Artificial Sequence: Synthetic oligonucleotide
  Sense strand starting at position 1238 of SEQ ID NO: 1880525
gggaaauaauuaucugcac

SEQ ID NO: 1973717 - RNA, 19 nt, Artificial Sequence
  Description of Artificial Sequence: Synthetic oligonucleotide
  Antisense strand to SEQ ID NO: 1973716
gugcagauaauuauuuccc

SEQ ID NO: 1973718 - RNA, 19 nt, Artificial Sequence
  Description of Artificial Sequence: Synthetic oligonucleotide
  Sense strand starting at position 1239 of SEQ ID NO: 1880525
ggaaauaauuaucugcacu

SEQ ID NO: 1973719 - RNA, 19 nt, Artificial Sequence
  Description of Artificial Sequence: Synthetic oligonucleotide
  Antisense strand to SEQ ID NO: 1973718
agugcagauaauuauuucc

SEQ ID NO: 1973720 - RNA, 19 nt, Artificial Sequence
  Description of Artificial Sequence: Synthetic oligonucleotide
  Sense strand starting at position 1874 of SEQ ID NO: 1880525
gagggaaucccaggguugu

SEQ ID NO: 1973721 - RNA, 19 nt, Artificial Sequence
  Description of Artificial Sequence: Synthetic oligonucleotide
  Antisense strand to SEQ ID NO: 1973720
acaacccugggauucccuc

SEQ ID NO: 1973722 - RNA, 19 nt, Artificial Sequence
  Description of Artificial Sequence: Synthetic oligonucleotide
  Sense strand starting at position 1945 of SEQ ID NO: 1880525
gggacagcagccugaaaua

SEQ ID NO: 1973723 - RNA, 19 nt, Artificial Sequence
  Description of Artificial Sequence: Synthetic oligonucleotide
  Antisense strand to SEQ ID NO: 1973722
uauuucaggcugcuguccc

SEQ ID NO: 1973724 - RNA, 19 nt, Artificial Sequence
  Description of Artificial Sequence: Synthetic oligonucleotide
  Sense strand starting at position 2029 of SEQ ID NO: 1880525
gugaucauucucuagccuu

SEQ ID NO: 1973725 - RNA, 19 nt, Artificial Sequence
  Description of Artificial Sequence: Synthetic oligonucleotide
  Antisense strand to SEQ ID NO: 1973724
aaggcuagagaaugaucac

SEQ ID NO: 1973726 - RNA, 19 nt, Artificial Sequence
  Description of Artificial Sequence: Synthetic oligonucleotide
  Sense strand starting at position 2098 of SEQ ID NO: 1880525
gcaagagcuguagagucua

SEQ ID NO: 1973727 - RNA, 19 nt, Artificial Sequence
  Description of Artificial Sequence: Synthetic oligonucleotide
  Antisense strand to SEQ ID NO: 1973726
uagacucuacagcucuugc

SEQ ID NO: 1973728 - RNA, 19 nt, Artificial Sequence
  Description of Artificial Sequence: Synthetic oligonucleotide
  Sense strand starting at position 2226 of SEQ ID NO: 1880525
agcaaaggugccugugaga

SEQ ID NO: 1973729 - RNA, 19 nt, Artificial Sequence
  Description of Artificial Sequence: Synthetic oligonucleotide
  Antisense strand to SEQ ID NO: 1973728
ucucacaggcaccuuugcu

SEQ ID NO: 1973730 - RNA, 19 nt, Artificial Sequence
  Description of Artificial Sequence: Synthetic oligonucleotide
  Sense strand starting at position 2454 of SEQ ID NO: 1880525
ugucccuaugcugaaauaa

SEQ ID NO: 1973731 - RNA, 19 nt, Artificial Sequence
  Description of Artificial Sequence: Synthetic oligonucleotide
  Antisense strand to SEQ ID NO: 1973730
uuauuucagcauagggaca

SEQ ID NO: 1973732 - RNA, 19 nt, Artificial Sequence
  Description of Artificial Sequence: Synthetic oligonucleotide
  Sense strand starting at position 2693 of SEQ ID NO: 1880525
gcuuccauuuaugaugauu

SEQ ID NO: 1973733 - RNA, 19 nt, Artificial Sequence
  Description of Artificial Sequence: Synthetic oligonucleotide
  Antisense strand to SEQ ID NO: 1973732
aaucaucauaaauggaagc

SEQ ID NO: 1973734 - RNA, 19 nt, Artificial Sequence
  Description of Artificial Sequence: Synthetic oligonucleotide
  Sense strand starting at position 2771 of SEQ ID NO: 1880525
gugagagcuagaugcaguu

SEQ ID NO: 1973735 - RNA, 19 nt, Artificial Sequence
  Description of Artificial Sequence: Synthetic oligonucleotide
  Antisense strand to SEQ ID NO: 1973734
aacugcaucuagcucucac

SEQ ID NO: 1973736 - RNA, 19 nt, Artificial Sequence
  Description of Artificial Sequence: Synthetic oligonucleotide
  Sense strand starting at position 2805 of SEQ ID NO: 1880525
uguugaacagacuguuaau

SEQ ID NO: 1973737 - RNA, 19 nt, Artificial Sequence
  Description of Artificial Sequence: Synthetic oligonucleotide
  Antisense strand to SEQ ID NO: 1973736
auuaacagucuguucaaca

SEQ ID NO: 1973738 - RNA, 19 nt, Artificial Sequence
  Description of Artificial Sequence: Synthetic oligonucleotide
  Sense strand starting at position 2891 of SEQ ID NO: 1880525
uuccuugucuuguuauuag

SEQ ID NO: 1973739 - RNA, 19 nt, Artificial Sequence
  Description of Artificial Sequence: Synthetic oligonucleotide
  Antisense strand to SEQ ID NO: 1973738
cuaauaacaagacaaggaa

SEQ ID NO: 1973740 - RNA, 19 nt, Artificial Sequence
  Description of Artificial Sequence: Synthetic oligonucleotide
  Sense strand starting at position 2936 of SEQ ID NO: 1880525
uucuguuccucucugauuu

SEQ ID NO: 1973741 - RNA, 19 nt, Artificial Sequence
  Description of Artificial Sequence: Synthetic oligonucleotide
  Antisense strand to SEQ ID NO: 1973740
aaaucagagaggaacagaa

SEQ ID NO: 1973742 - RNA, 19 nt, Artificial Sequence
  Description of Artificial Sequence: Synthetic oligonucleotide
  Sense strand starting at position 2985 of SEQ ID NO: 1880525
auugcauguucuucugaga

SEQ ID NO: 1973743 - RNA, 19 nt, Artificial Sequence
  Description of Artificial Sequence: Synthetic oligonucleotide
  Antisense strand to SEQ ID NO: 1973742
ucucagaagaacaugcaau

SEQ ID NO: 1973744 - RNA, 19 nt, Artificial Sequence
  Description of Artificial Sequence: Synthetic oligonucleotide
  Sense strand starting at position 3068 of SEQ ID NO: 1880525
gccagcuaggcagauauaa

SEQ ID NO: 1973745 - RNA, 19 nt, Artificial Sequence
  Description of Artificial Sequence: Synthetic oligonucleotide
  Antisense strand to SEQ ID NO: 1973744
uuauaucugccuagcuggc

SEQ ID NO: 1973746 - RNA, 19 nt, Artificial Sequence
  Description of Artificial Sequence: Synthetic oligonucleotide
  Sense strand starting at position 3254 of SEQ ID NO: 1880525
gcuggagaauaguuugaag

SEQ ID NO: 1973747 - RNA, 19 nt, Artificial Sequence
  Description of Artificial Sequence: Synthetic oligonucleotide
  Antisense strand to SEQ ID NO: 1973746
cuucaaacuauucuccagc

SEQ ID NO: 1973748 - RNA, 19 nt, Artificial Sequence
  Description of Artificial Sequence: Synthetic oligonucleotide
  Sense strand starting at position 3508 of SEQ ID NO: 1880525
caggcaacuuuguucugau

SEQ ID NO: 1973749 - RNA, 19 nt, Artificial Sequence
  Description of Artificial Sequence: Synthetic oligonucleotide
  Antisense strand to SEQ ID NO: 1973748
aucagaacaaaguugccug

SEQ ID NO: 1973750 - RNA, 19 nt, Artificial Sequence
  Description of Artificial Sequence: Synthetic oligonucleotide
  Sense strand starting at position 3509 of SEQ ID NO: 1880525
aggcaacuuuguucugauu

SEQ ID NO: 1973751 - RNA, 19 nt, Artificial Sequence
  Description of Artificial Sequence: Synthetic oligonucleotide
  Antisense strand to SEQ ID NO: 1973750
aaucagaacaaaguugccu

SEQ ID NO: 1973752 - RNA, 19 nt, Artificial Sequence
  Description of Artificial Sequence: Synthetic oligonucleotide
  Sense strand starting at position 3575 of SEQ ID NO: 1880525
ggacuaauacaguguguac

SEQ ID NO: 1973753 - RNA, 19 nt, Artificial Sequence
  Description of Artificial Sequence: Synthetic oligonucleotide
  Antisense strand to SEQ ID NO: 1973752
guacacacuguauuagucc

SEQ ID NO: 1973754 - RNA, 19 nt, Artificial Sequence
  Description of Artificial Sequence: Synthetic oligonucleotide
  Sense strand starting at position 3620 of SEQ ID NO: 1880525
agcauaaugcucugagguu

SEQ ID NO: 1973755 - RNA, 19 nt, Artificial Sequence
  Description of Artificial Sequence: Synthetic oligonucleotide
  Antisense strand to SEQ ID NO: 1973754
aaccucagagcauuaugcu

SEQ ID NO: 1973756 - RNA, 19 nt, Artificial Sequence
  Description of Artificial Sequence: Synthetic oligonucleotide
  Sense strand starting at position 3640 of SEQ ID NO: 1880525
cuccguguuguugcagaua

SEQ ID NO: 1973757 - RNA, 19 nt, Artificial Sequence
  Description of Artificial Sequence: Synthetic oligonucleotide
  Antisense strand to SEQ ID NO: 1973756
uaucugcaacaacacggag

SEQ ID NO: 1973758 - RNA, 19 nt, Artificial Sequence
  Description of Artificial Sequence: Synthetic oligonucleotide
  Sense strand starting at position 3720 of SEQ ID NO: 1880525
uuaagugcccuauguauag

SEQ ID NO: 1973759 - RNA, 19 nt, Artificial Sequence
  Description of Artificial Sequence: Synthetic oligonucleotide
  Antisense strand to SEQ ID NO: 1973758
cuauacauagggcacuuaa

SEQ ID NO: 1973760 - RNA, 19 nt, Artificial Sequence
  Description of Artificial Sequence: Synthetic oligonucleotide
  Sense strand starting at position 3769 of SEQ ID NO: 1880525
gaagaagugcaguggcuuu

SEQ ID NO: 1973761 - RNA, 19 nt, Artificial Sequence
  Description of Artificial Sequence: Synthetic oligonucleotide
  Antisense strand to SEQ ID NO: 1973760
aaagccacugcacuucuuc

SEQ ID NO: 1973762 - RNA, 19 nt, Artificial Sequence
  Description of Artificial Sequence: Synthetic oligonucleotide
  Sense strand starting at position 3801 of SEQ ID NO: 1880525
uuagcugagcuggaacauu

SEQ ID NO: 1973763 - RNA, 19 nt, Artificial Sequence
  Description of Artificial Sequence: Synthetic oligonucleotide
  Antisense strand to SEQ ID NO: 1973762
aauguuccagcucagcuaa

SEQ ID NO: 1973764 - RNA, 19 nt, Artificial Sequence
  Description of Artificial Sequence: Synthetic oligonucleotide
  Sense strand starting at position 3865 of SEQ ID NO: 1880525
cagagaaauuugcaguguu

SEQ ID NO: 1973765 - RNA, 19 nt, Artificial Sequence
  Description of Artificial Sequence: Synthetic oligonucleotide
  Antisense strand to SEQ ID NO: 1973764
aacacugcaaauuucucug

SEQ ID NO: 1973766 - RNA, 19 nt, Artificial Sequence
  Description of Artificial Sequence: Synthetic oligonucleotide
  Sense strand starting at position 3975 of SEQ ID NO: 1880525
guuccagugacgcuuaguu

SEQ ID NO: 1973767 - RNA, 19 nt, Artificial Sequence
  Description of Artificial Sequence: Synthetic oligonucleotide
  Antisense strand to SEQ ID NO: 1973766
aacuaagcgucacuggaac

SEQ ID NO: 1973768 - RNA, 19 nt, Artificial Sequence
  Description of Artificial Sequence: Synthetic oligonucleotide
  Sense strand starting at position 340 of SEQ ID NO: 1880526
gccagaaauuauguuacuc

SEQ ID NO: 1973769 - RNA, 19 nt, Artificial Sequence
  Description of Artificial Sequence: Synthetic oligonucleotide
  Antisense strand to SEQ ID NO: 1973768
gaguaacauaauuucuggc

SEQ ID NO: 1973770 - RNA, 19 nt, Artificial Sequence
  Description of Artificial Sequence: Synthetic oligonucleotide
  Sense strand starting at position 391 of SEQ ID NO: 1880526
cgaaguuaccucuaccaga

SEQ ID NO: 1973771 - RNA, 19 nt, Artificial Sequence
  Description of Artificial Sequence: Synthetic oligonucleotide
  Antisense strand to SEQ ID NO: 1973770
ucugguagagguaacuucg

SEQ ID NO: 1973772 - RNA, 19 nt, Artificial Sequence
  Description of Artificial Sequence: Synthetic oligonucleotide
  Sense strand starting at position 441 of SEQ ID NO: 1880526
gucccagaucuagaacagu

SEQ ID NO: 1973773 - RNA, 19 nt, Artificial Sequence
  Description of Artificial Sequence: Synthetic oligonucleotide
  Antisense strand to SEQ ID NO: 1973772
acuguucuagaucugggac

SEQ ID NO: 1973774 - RNA, 19 nt, Artificial Sequence
  Description of Artificial Sequence: Synthetic oligonucleotide
  Sense strand starting at position 469 of SEQ ID NO: 1880526
gcuguucggcgcucuguaa

SEQ ID NO: 1973775 - RNA, 19 nt, Artificial Sequence
  Description of Artificial Sequence: Synthetic oligonucleotide
  Antisense strand to SEQ ID NO: 1973774
uuacagagcgccgaacagc

SEQ ID NO: 1973776 - RNA, 19 nt, Artificial Sequence
  Description of Artificial Sequence: Synthetic oligonucleotide
  Sense strand starting at position 470 of SEQ ID NO: 1880526
cuguucggcgcucuguaaa

SEQ ID NO: 1973777 - RNA, 19 nt, Artificial Sequence
  Description of Artificial Sequence: Synthetic oligonucleotide
  Antisense strand to SEQ ID NO: 1973776
uuuacagagcgccgaacag

SEQ ID NO: 1973778 - RNA, 19 nt, Artificial Sequence
  Description of Artificial Sequence: Synthetic oligonucleotide
  Sense strand starting at position 473 of SEQ ID NO: 1880526
uucggcgcucuguaaauuu

SEQ ID NO: 1973779 - RNA, 19 nt, Artificial Sequence
  Description of Artificial Sequence: Synthetic oligonucleotide
  Antisense strand to SEQ ID NO: 1973778
aaauuuacagagcgccgaa

SEQ ID NO: 1973780 - RNA, 19 nt, Artificial Sequence
  Description of Artificial Sequence: Synthetic oligonucleotide
  Sense strand starting at position 1012 of SEQ ID NO: 1880526
agcuccuccugccuagaau

SEQ ID NO: 1973781 - RNA, 19 nt, Artificial Sequence
  Description of Artificial Sequence: Synthetic oligonucleotide
  Antisense strand to SEQ ID NO: 1973780
auucuaggcaggaggagcu

SEQ ID NO: 1973782 - RNA, 19 nt, Artificial Sequence
  Description of Artificial Sequence: Synthetic oligonucleotide
  Sense strand starting at position 1056 of SEQ ID NO: 1880526
ggcagacaccucuguguua

SEQ ID NO: 1973783 - RNA, 19 nt, Artificial Sequence
  Description of Artificial Sequence: Synthetic oligonucleotide
  Antisense strand to SEQ ID NO: 1973782
uaacacagaggugucugcc

SEQ ID NO: 1973784 - RNA, 19 nt, Artificial Sequence
  Description of Artificial Sequence: Synthetic oligonucleotide
  Sense strand starting at position 1138 of SEQ ID NO: 1880526
uggaguuugaaucgccuca

SEQ ID NO: 1973785 - RNA, 19 nt, Artificial Sequence
  Description of Artificial Sequence: Synthetic oligonucleotide
  Antisense strand to SEQ ID NO: 1973784
ugaggcgauucaaacucca

SEQ ID NO: 1973786 - RNA, 19 nt, Artificial Sequence
  Description of Artificial Sequence: Synthetic oligonucleotide
  Sense strand starting at position 1140 of SEQ ID NO: 1880526
gaguuugaaucgccucaca

SEQ ID NO: 1973787 - RNA, 19 nt, Artificial Sequence
  Description of Artificial Sequence: Synthetic oligonucleotide
  Antisense strand to SEQ ID NO: 1973786
ugugaggcgauucaaacuc

SEQ ID NO: 1973788 - RNA, 19 nt, Artificial Sequence
  Description of Artificial Sequence: Synthetic oligonucleotide
  Sense strand starting at position 1185 of SEQ ID NO: 1880526
cugcuuguugacuaaguua

SEQ ID NO: 1973789 - RNA, 19 nt, Artificial Sequence
  Description of Artificial Sequence: Synthetic oligonucleotide
  Antisense strand to SEQ ID NO: 1973788
uaacuuagucaacaagcag

SEQ ID NO: 1973790 - RNA, 19 nt, Artificial Sequence
  Description of Artificial Sequence: Synthetic oligonucleotide
  Sense strand starting at position 1491 of SEQ ID NO: 1880526
cuuugccagcuggaaauua

SEQ ID NO: 1973791 - RNA, 19 nt, Artificial Sequence
  Description of Artificial Sequence: Synthetic oligonucleotide
  Antisense strand to SEQ ID NO: 1973790
uaauuuccagcuggcaaag

SEQ ID NO: 1973792 - RNA, 19 nt, Artificial Sequence
  Description of Artificial Sequence: Synthetic oligonucleotide
  Sense strand starting at position 1506 of SEQ ID NO: 1880526
auuacaguccuagagguuu

SEQ ID NO: 1973793 - RNA, 19 nt, Artificial Sequence
  Description of Artificial Sequence: Synthetic oligonucleotide
  Antisense strand to SEQ ID NO: 1973792
aaaccucuaggacuguaau

SEQ ID NO: 1973794 - RNA, 19 nt, Artificial Sequence
  Description of Artificial Sequence: Synthetic oligonucleotide
  Sense strand starting at position 1613 of SEQ ID NO: 1880526
ccaugucuggcucacguaa

SEQ ID NO: 1973795 - RNA, 19 nt, Artificial Sequence
  Description of Artificial Sequence: Synthetic oligonucleotide
  Antisense strand to SEQ ID NO: 1973794
uuacgugagccagacaugg

SEQ ID NO: 1973796 - RNA, 19 nt, Artificial Sequence
  Description of Artificial Sequence: Synthetic oligonucleotide
  Sense strand starting at position 2070 of SEQ ID NO: 1880526
agcugcuugagucagcaau

SEQ ID NO: 1973797 - RNA, 19 nt, Artificial Sequence
  Description of Artificial Sequence: Synthetic oligonucleotide
  Antisense strand to SEQ ID NO: 1973796
auugcugacucaagcagcu

SEQ ID NO: 1973798 - RNA, 19 nt, Artificial Sequence
  Description of Artificial Sequence: Synthetic oligonucleotide
  Sense strand starting at position 2081 of SEQ ID NO: 1880526
ucagcaauuccugucgcuu

SEQ ID NO: 1973799 - RNA, 19 nt, Artificial Sequence
  Description of Artificial Sequence: Synthetic oligonucleotide
  Antisense strand to SEQ ID NO: 1973798
aagcgacaggaauugcuga

SEQ ID NO: 1973800 - RNA, 19 nt, Artificial Sequence
  Description of Artificial Sequence: Synthetic oligonucleotide
  Sense strand starting at position 2082 of SEQ ID NO: 1880526
cagcaauuccugucgcuuu

SEQ ID NO: 1973801 - RNA, 19 nt, Artificial Sequence
  Description of Artificial Sequence: Synthetic oligonucleotide
  Antisense strand to SEQ ID NO: 1973800
aaagcgacaggaauugcug

SEQ ID NO: 1973802 - RNA, 19 nt, Artificial Sequence
  Description of Artificial Sequence: Synthetic oligonucleotide
  Sense strand starting at position 2228 of SEQ ID NO: 1880526
cagugcugucccguguaau

SEQ ID NO: 1973803 - RNA, 19 nt, Artificial Sequence
  Description of Artificial Sequence: Synthetic oligonucleotide
  Antisense strand to SEQ ID NO: 1973802
auuacacgggacagcacug

SEQ ID NO: 1973804 - RNA, 19 nt, Artificial Sequence
  Description of Artificial Sequence: Synthetic oligonucleotide
  Sense strand starting at position 2240 of SEQ ID NO: 1880526
guguaaugucuggaaucua

SEQ ID NO: 1973805 - RNA, 19 nt, Artificial Sequence
  Description of Artificial Sequence: Synthetic oligonucleotide
  Antisense strand to SEQ ID NO: 1973804
uagauuccagacauuacac

SEQ ID NO: 1973806 - RNA, 19 nt, Artificial Sequence
  Description of Artificial Sequence: Synthetic oligonucleotide
  Sense strand starting at position 2265 of SEQ ID NO: 1880526
acauaaaccgguuaaguca

SEQ ID NO: 1973807 - RNA, 19 nt, Artificial Sequence
  Description of Artificial Sequence: Synthetic oligonucleotide
  Antisense strand to SEQ ID NO: 1973806
ugacuuaaccgguuuaugu

SEQ ID NO: 1973808 - RNA, 19 nt, Artificial Sequence
  Description of Artificial Sequence: Synthetic oligonucleotide
  Sense strand starting at position 2415 of SEQ ID NO: 1880526
gguguccucccuuacuaau

SEQ ID NO: 1973809 - RNA, 19 nt, Artificial Sequence
  Description of Artificial Sequence: Synthetic oligonucleotide
  Antisense strand to SEQ ID NO: 1973808
auuaguaagggaggacacc

SEQ ID NO: 1973810 - RNA, 19 nt, Artificial Sequence
  Description of Artificial Sequence: Synthetic oligonucleotide
  Sense strand starting at position 2439 of SEQ ID NO: 1880526
acauucuuccagugacugu

SEQ ID NO: 1973811 - RNA, 19 nt, Artificial Sequence
  Description of Artificial Sequence: Synthetic oligonucleotide
  Antisense strand to SEQ ID NO: 1973810
acagucacuggaagaaugu

SEQ ID NO: 1973812 - RNA, 19 nt, Artificial Sequence
  Description of Artificial Sequence: Synthetic oligonucleotide
  Sense strand starting at position 2460 of SEQ ID NO: 1880526
agugucugugcagauauuu

SEQ ID NO: 1973813 - RNA, 19 nt, Artificial Sequence
  Description of Artificial Sequence: Synthetic oligonucleotide
  Antisense strand to SEQ ID NO: 1973812
aaauaucugcacagacacu

SEQ ID NO: 1973814 - RNA, 19 nt, Artificial Sequence
  Description of Artificial Sequence: Synthetic oligonucleotide
  Sense strand starting at position 2468 of SEQ ID NO: 1880526
ugcagauauuucuaugaga

SEQ ID NO: 1973815 - RNA, 19 nt, Artificial Sequence
  Description of Artificial Sequence: Synthetic oligonucleotide
  Antisense strand to SEQ ID NO: 1973814
ucucauagaaauaucugca

SEQ ID NO: 1973816 - RNA, 19 nt, Artificial Sequence
  Description of Artificial Sequence: Synthetic oligonucleotide
  Sense strand starting at position 2519 of SEQ ID NO: 1880526
guauguaaagcuggaccua

SEQ ID NO: 1973817 - RNA, 19 nt, Artificial Sequence
  Description of Artificial Sequence: Synthetic oligonucleotide
  Antisense strand to SEQ ID NO: 1973816
uagguccagcuuuacauac

SEQ ID NO: 1973818 - RNA, 19 nt, Artificial Sequence
  Description of Artificial Sequence: Synthetic oligonucleotide
  Sense strand starting at position 2520 of SEQ ID NO: 1880526
uauguaaagcuggaccuau

SEQ ID NO: 1973819 - RNA, 19 nt, Artificial Sequence
  Description of Artificial Sequence: Synthetic oligonucleotide
  Antisense strand to SEQ ID NO: 1973818
auagguccagcuuuacaua

SEQ ID NO: 1973820 - RNA, 19 nt, Artificial Sequence
  Description of Artificial Sequence: Synthetic oligonucleotide
  Sense strand starting at position 2549 of SEQ ID NO: 1880526
accaaauagguaugaaagu

SEQ ID NO: 1973821 - RNA, 19 nt, Artificial Sequence
  Description of Artificial Sequence: Synthetic oligonucleotide
  Antisense strand to SEQ ID NO: 1973820
acuuucauaccuauuuggu

SEQ ID NO: 1973822 - RNA, 19 nt, Artificial Sequence
  Description of Artificial Sequence: Synthetic oligonucleotide
  Sense strand starting at position 2628 of SEQ ID NO: 1880526
ucaaucuggugaguggaaa

SEQ ID NO: 1973823 - RNA, 19 nt, Artificial Sequence
  Description of Artificial Sequence: Synthetic oligonucleotide
  Antisense strand to SEQ ID NO: 1973822
uuuccacucaccagauuga

SEQ ID NO: 1973824 - RNA, 19 nt, Artificial Sequence
  Description of Artificial Sequence: Synthetic oligonucleotide
  Sense strand starting at position 2649 of SEQ ID NO: 1880526
aucauccugugguucuaau

SEQ ID NO: 1973825 - RNA, 19 nt, Artificial Sequence
  Description of Artificial Sequence: Synthetic oligonucleotide
  Antisense strand to SEQ ID NO: 1973824
auuagaaccacaggaugau

SEQ ID NO: 1973826 - RNA, 19 nt, Artificial Sequence
  Description of Artificial Sequence: Synthetic oligonucleotide
  Sense strand starting at position 2677 of SEQ ID NO: 1880526
ccugauugccagugaaacu

SEQ ID NO: 1973827 - RNA, 19 nt, Artificial Sequence
  Description of Artificial Sequence: Synthetic oligonucleotide
  Antisense strand to SEQ ID NO: 1973826
aguuucacuggcaaucagg

SEQ ID NO: 1973828 - RNA, 19 nt, Artificial Sequence
  Description of Artificial Sequence: Synthetic oligonucleotide
  Sense strand starting at position 2686 of SEQ ID NO: 1880526
cagugaaacugaguaucuu

SEQ ID NO: 1973829 - RNA, 19 nt, Artificial Sequence
  Description of Artificial Sequence: Synthetic oligonucleotide
  Antisense strand to SEQ ID NO: 1973828
aagauacucaguuucacug

SEQ ID NO: 1973830 - RNA, 19 nt, Artificial Sequence
  Description of Artificial Sequence: Synthetic oligonucleotide
  Sense strand starting at position 2687 of SEQ ID NO: 1880526
agugaaacugaguaucuuu

SEQ ID NO: 1973831 - RNA, 19 nt, Artificial Sequence
  Description of Artificial Sequence: Synthetic oligonucleotide
  Antisense strand to SEQ ID NO: 1973830
aaagauacucaguuucacu

SEQ ID NO: 1973832 - RNA, 19 nt, Artificial Sequence
  Description of Artificial Sequence: Synthetic oligonucleotide
  Sense strand starting at position 2852 of SEQ ID NO: 1880526
gguuauauagauuguccuu

SEQ ID NO: 1973833 - RNA, 19 nt, Artificial Sequence
  Description of Artificial Sequence: Synthetic oligonucleotide
  Antisense strand to SEQ ID NO: 1973832
aaggacaaucuauauaacc

SEQ ID NO: 1973834 - RNA, 19 nt, Artificial Sequence
  Description of Artificial Sequence: Synthetic oligonucleotide
  Sense strand starting at position 3028 of SEQ ID NO: 1880526
guaaucuuuccauguggaa

SEQ ID NO: 1973835 - RNA, 19 nt, Artificial Sequence
  Description of Artificial Sequence: Synthetic oligonucleotide
  Antisense strand to SEQ ID NO: 1973834
uuccacauggaaagauuac

SEQ ID NO: 1973836 - RNA, 19 nt, Artificial Sequence
  Description of Artificial Sequence: Synthetic oligonucleotide
  Sense strand starting at position 3073 of SEQ ID NO: 1880526
uaaagauagugugcuuucu

SEQ ID NO: 1973837 - RNA, 19 nt, Artificial Sequence
  Description of Artificial Sequence: Synthetic oligonucleotide
  Antisense strand to SEQ ID NO: 1973836
agaaagcacacuaucuuua

SEQ ID NO: 1973838 - RNA, 19 nt, Artificial Sequence
  Description of Artificial Sequence: Synthetic oligonucleotide
  Sense strand starting at position 3152 of SEQ ID NO: 1880526
uuguccuugguaugagaga

SEQ ID NO: 1973839 - RNA, 19 nt, Artificial Sequence
  Description of Artificial Sequence: Synthetic oligonucleotide
  Antisense strand to SEQ ID NO: 1973838
ucucucauaccaaggacaa

SEQ ID NO: 1973840 - RNA, 19 nt, Artificial Sequence
  Description of Artificial Sequence: Synthetic oligonucleotide
  Sense strand starting at position 3702 of SEQ ID NO: 1880526
cuuuaaaugccaggaaaug

SEQ ID NO: 1973841 - RNA, 19 nt, Artificial Sequence
  Description of Artificial Sequence: Synthetic oligonucleotide
  Antisense strand to SEQ ID NO: 1973840
cauuuccuggcauuuaaag

SEQ ID NO: 1973842 - RNA, 19 nt, Artificial Sequence
  Description of Artificial Sequence: Synthetic oligonucleotide
  Sense strand starting at position 3784 of SEQ ID NO: 1880526
ccaagagcuuuacuaggaa

SEQ ID NO: 1973843 - RNA, 19 nt, Artificial Sequence
  Description of Artificial Sequence: Synthetic oligonucleotide
  Antisense strand to SEQ ID NO: 1973842
uuccuaguaaagcucuugg

SEQ ID NO: 1973844 - RNA, 19 nt, Artificial Sequence
  Description of Artificial Sequence: Synthetic oligonucleotide
  Sense strand starting at position 3804 of SEQ ID NO: 1880526
gagggugccuuaucgggau

SEQ ID NO: 1973845 - RNA, 19 nt, Artificial Sequence
  Description of Artificial Sequence: Synthetic oligonucleotide
  Antisense strand to SEQ ID NO: 1973844
aucccgauaaggcacccuc

SEQ ID NO: 1973846 - RNA, 19 nt, Artificial Sequence
  Description of Artificial Sequence: Synthetic oligonucleotide
  Sense strand starting at position 3808 of SEQ ID NO: 1880526
gugccuuaucgggaucagu

SEQ ID NO: 1973847 - RNA, 19 nt, Artificial Sequence
  Description of Artificial Sequence: Synthetic oligonucleotide
  Antisense strand to SEQ ID NO: 1973846
acugaucccgauaaggcac

SEQ ID NO: 1973848 - RNA, 19 nt, Artificial Sequence
  Description of Artificial Sequence: Synthetic oligonucleotide
  Sense strand starting at position 119 of SEQ ID NO: 1880527
aauugcuauuguguaagaa

SEQ ID NO: 1973849 - RNA, 19 nt, Artificial Sequence
  Description of Artificial Sequence: Synthetic oligonucleotide
  Antisense strand to SEQ ID NO: 1973848
uucuuacacaauagcaauu

SEQ ID NO: 1973850 - RNA, 19 nt, Artificial Sequence
  Description of Artificial Sequence: Synthetic oligonucleotide
  Sense strand starting at position 120 of SEQ ID NO: 1880527
auugcuauuguguaagaag

SEQ ID NO: 1973851 - RNA, 19 nt, Artificial Sequence
  Description of Artificial Sequence: Synthetic oligonucleotide
  Antisense strand to SEQ ID NO: 1973850
cuucuuacacaauagcaau

SEQ ID NO: 1973852 - RNA, 19 nt, Artificial Sequence
  Description of Artificial Sequence: Synthetic oligonucleotide
  Sense strand starting at position 2110 of SEQ ID NO: 1880527
cgauauggccaagagcaau

SEQ ID NO: 1973853 - RNA, 19 nt, Artificial Sequence
  Description of Artificial Sequence: Synthetic oligonucleotide
  Antisense strand to SEQ ID NO: 1973852
auugcucuuggccauaucg

SEQ ID NO: 1973854 - RNA, 19 nt, Artificial Sequence
  Description of Artificial Sequence: Synthetic oligonucleotide
  Sense strand starting at position 2136 of SEQ ID NO: 1880527
aggugaucucuaugacaaa

SEQ ID NO: 1973855 - RNA, 19 nt, Artificial Sequence
  Description of Artificial Sequence: Synthetic oligonucleotide
  Antisense strand to SEQ ID NO: 1973854
uuugucauagagaucaccu

SEQ ID NO: 1973856 - RNA, 19 nt, Artificial Sequence
  Description of Artificial Sequence: Synthetic oligonucleotide
  Sense strand starting at position 2362 of SEQ ID NO: 1880527
gcauauucuagagacagug

SEQ ID NO: 1973857 - RNA, 19 nt, Artificial Sequence
  Description of Artificial Sequence: Synthetic oligonucleotide
  Antisense strand to SEQ ID NO: 1973856
cacugucucuagaauaugc

SEQ ID NO: 1973858 - RNA, 19 nt, Artificial Sequence
  Description of Artificial Sequence: Synthetic oligonucleotide
  Sense strand starting at position 2368 of SEQ ID NO: 1880527
ucuagagacagugguauca

SEQ ID NO: 1973859 - RNA, 19 nt, Artificial Sequence
  Description of Artificial Sequence: Synthetic oligonucleotide
  Antisense strand to SEQ ID NO: 1973858
ugauaccacugucucuaga

SEQ ID NO: 1973860 - RNA, 19 nt, Artificial Sequence
  Description of Artificial Sequence: Synthetic oligonucleotide
  Sense strand starting at position 2379 of SEQ ID NO: 1880527
ugguaucauuacuugcaga

SEQ ID NO: 1973861 - RNA, 19 nt, Artificial Sequence
  Description of Artificial Sequence: Synthetic oligonucleotide
  Antisense strand to SEQ ID NO: 1973860
ucugcaaguaaugauacca

SEQ ID NO: 1973862 - RNA, 19 nt, Artificial Sequence
  Description of Artificial Sequence: Synthetic oligonucleotide
  Sense strand starting at position 2380 of SEQ ID NO: 1880527
gguaucauuacuugcagag

SEQ ID NO: 1973863 - RNA, 19 nt, Artificial Sequence
  Description of Artificial Sequence: Synthetic oligonucleotide
  Antisense strand to SEQ ID NO: 1973862
cucugcaaguaaugauacc

SEQ ID NO: 1973864 - RNA, 19 nt, Artificial Sequence
  Description of Artificial Sequence: Synthetic oligonucleotide
  Sense strand starting at position 2509 of SEQ ID NO: 1880527
auugaagaauuagagagaa

SEQ ID NO: 1973865 - RNA, 19 nt, Artificial Sequence
  Description of Artificial Sequence: Synthetic oligonucleotide
  Antisense strand to SEQ ID NO: 1973864
uucucucuaauucuucaau

SEQ ID NO: 1973866 - RNA, 19 nt, Artificial Sequence
  Description of Artificial Sequence: Synthetic oligonucleotide
  Sense strand starting at position 2601 of SEQ ID NO: 1880527
cccagagccaguuagagua

SEQ ID NO: 1973867 - RNA, 19 nt, Artificial Sequence
  Description of Artificial Sequence: Synthetic oligonucleotide
  Antisense strand to SEQ ID NO: 1973866
uacucuaacuggcucuggg

SEQ ID NO: 1973868 - RNA, 19 nt, Artificial Sequence
  Description of Artificial Sequence: Synthetic oligonucleotide
  Sense strand starting at position 2722 of SEQ ID NO: 1880527
uucagaguucgcuaugaug

SEQ ID NO: 1973869 - RNA, 19 nt, Artificial Sequence
  Description of Artificial Sequence: Synthetic oligonucleotide
  Antisense strand to SEQ ID NO: 1973868
caucauagcgaacucugaa

SEQ ID NO: 1973870 - RNA, 19 nt, Artificial Sequence
  Description of Artificial Sequence: Synthetic oligonucleotide
  Sense strand starting at position 2733 of SEQ ID NO: 1880527
cuaugaugguauccauuac

SEQ ID NO: 1973871 - RNA, 19 nt, Artificial Sequence
  Description of Artificial Sequence: Synthetic oligonucleotide
  Antisense strand to SEQ ID NO: 1973870
guaauggauaccaucauag

SEQ ID NO: 1973872 - RNA, 19 nt, Artificial Sequence
  Description of Artificial Sequence: Synthetic oligonucleotide
  Sense strand starting at position 2755 of SEQ ID NO: 1880527
gacaucguggacugcaaau

SEQ ID NO: 1973873 - RNA, 19 nt, Artificial Sequence
  Description of Artificial Sequence: Synthetic oligonucleotide
  Antisense strand to SEQ ID NO: 1973872
auuugcaguccacgauguc

SEQ ID NO: 1973874 - RNA, 19 nt, Artificial Sequence
  Description of Artificial Sequence: Synthetic oligonucleotide
  Sense strand starting at position 2815 of SEQ ID NO: 1880527
gaaggugugauagagcaua

SEQ ID NO: 1973875 - RNA, 19 nt, Artificial Sequence
  Description of Artificial Sequence: Synthetic oligonucleotide
  Antisense strand to SEQ ID NO: 1973874
uaugcucuaucacaccuuc

SEQ ID NO: 1973876 - RNA, 19 nt, Artificial Sequence
  Description of Artificial Sequence: Synthetic oligonucleotide
  Sense strand starting at position 2832 of SEQ ID NO: 1880527
uaaagugaagcuugagauu

SEQ ID NO: 1973877 - RNA, 19 nt, Artificial Sequence
  Description of Artificial Sequence: Synthetic oligonucleotide
  Antisense strand to SEQ ID NO: 1973876
aaucucaagcuucacuuua

SEQ ID NO: 1973878 - RNA, 19 nt, Artificial Sequence
  Description of Artificial Sequence: Synthetic oligonucleotide
  Sense strand starting at position 2868 of SEQ ID NO: 1880527
uaggucuguccuuaggaga

SEQ ID NO: 1973879 - RNA, 19 nt, Artificial Sequence
  Description of Artificial Sequence: Synthetic oligonucleotide
  Antisense strand to SEQ ID NO: 1973878
ucuccuaaggacagaccua

SEQ ID NO: 1973880 - RNA, 19 nt, Artificial Sequence
  Description of Artificial Sequence: Synthetic oligonucleotide
  Sense strand starting at position 2952 of SEQ ID NO: 1880527
aguggauagaccuguugac

SEQ ID NO: 1973881 - RNA, 19 nt, Artificial Sequence
  Description of Artificial Sequence: Synthetic oligonucleotide
  Antisense strand to SEQ ID NO: 1973880
gucaacaggucuauccacu

SEQ ID NO: 1973882 - RNA, 19 nt, Artificial Sequence
  Description of Artificial Sequence: Synthetic oligonucleotide
  Sense strand starting at position 3113 of SEQ ID NO: 1880527
agcucaagucucgaaagaa

SEQ ID NO: 1973883 - RNA, 19 nt, Artificial Sequence
  Description of Artificial Sequence: Synthetic oligonucleotide
  Antisense strand to SEQ ID NO: 1973882
uucuuucgagacuugagcu

SEQ ID NO: 1973884 - RNA, 19 nt, Artificial Sequence
  Description of Artificial Sequence: Synthetic oligonucleotide
  Sense strand starting at position 3382 of SEQ ID NO: 1880527
cccgaaugugaaugguaca

SEQ ID NO: 1973885 - RNA, 19 nt, Artificial Sequence
  Description of Artificial Sequence: Synthetic oligonucleotide
  Antisense strand to SEQ ID NO: 1973884
uguaccauucacauucggg

SEQ ID NO: 1973886 - RNA, 19 nt, Artificial Sequence
  Description of Artificial Sequence: Synthetic oligonucleotide
  Sense strand starting at position 3383 of SEQ ID NO: 1880527
ccgaaugugaaugguacaa

SEQ ID NO: 1973887 - RNA, 19 nt, Artificial Sequence
  Description of Artificial Sequence: Synthetic oligonucleotide
  Antisense strand to SEQ ID NO: 1973886
uuguaccauucacauucgg

SEQ ID NO: 1973888 - RNA, 19 nt, Artificial Sequence
  Description of Artificial Sequence: Synthetic oligonucleotide
  Sense strand starting at position 3450 of SEQ ID NO: 1880527
cgaagacaauguuugugaa

SEQ ID NO: 1973889 - RNA, 19 nt, Artificial Sequence
  Description of Artificial Sequence: Synthetic oligonucleotide
  Antisense strand to SEQ ID NO: 1973888
uucacaaacauugucuucg

SEQ ID NO: 1973890 - RNA, 19 nt, Artificial Sequence
  Description of Artificial Sequence: Synthetic oligonucleotide
  Sense strand starting at position 3451 of SEQ ID NO: 1880527
gaagacaauguuugugaau

SEQ ID NO: 1973891 - RNA, 19 nt, Artificial Sequence
  Description of Artificial Sequence: Synthetic oligonucleotide
  Antisense strand to SEQ ID NO: 1973890
auucacaaacauugucuuc

SEQ ID NO: 1973892 - RNA, 19 nt, Artificial Sequence
  Description of Artificial Sequence: Synthetic oligonucleotide
  Sense strand starting at position 3452 of SEQ ID NO: 1880527
aagacaauguuugugaauu

SEQ ID NO: 1973893 - RNA, 19 nt, Artificial Sequence
  Description of Artificial Sequence: Synthetic oligonucleotide
  Antisense strand to SEQ ID NO: 1973892
aauucacaaacauugucuu

SEQ ID NO: 1973894 - RNA, 19 nt, Artificial Sequence
  Description of Artificial Sequence: Synthetic oligonucleotide
  Sense strand starting at position 3460 of SEQ ID NO: 1880527
guuugugaauuggucauaa

SEQ ID NO: 1973895 - RNA, 19 nt, Artificial Sequence
  Description of Artificial Sequence: Synthetic oligonucleotide
  Antisense strand to SEQ ID NO: 1973894
uuaugaccaauucacaaac

SEQ ID NO: 1973896 - RNA, 19 nt, Artificial Sequence
  Description of Artificial Sequence: Synthetic oligonucleotide
  Sense strand starting at position 3471 of SEQ ID NO: 1880527
ggucauaagagaugugacu

SEQ ID NO: 1973897 - RNA, 19 nt, Artificial Sequence
  Description of Artificial Sequence: Synthetic oligonucleotide
  Antisense strand to SEQ ID NO: 1973896
agucacaucucuuaugacc

SEQ ID NO: 1973898 - RNA, 19 nt, Artificial Sequence
  Description of Artificial Sequence: Synthetic oligonucleotide
  Sense strand starting at position 3556 of SEQ ID NO: 1880527
uucuuacuuguccaaggua

SEQ ID NO: 1973899 - RNA, 19 nt, Artificial Sequence
  Description of Artificial Sequence: Synthetic oligonucleotide
  Antisense strand to SEQ ID NO: 1973898
uaccuuggacaaguaagaa

SEQ ID NO: 1973900 - RNA, 19 nt, Artificial Sequence
  Description of Artificial Sequence: Synthetic oligonucleotide
  Sense strand starting at position 3570 of SEQ ID NO: 1880527
agguaauuugcaugucuuu

SEQ ID NO: 1973901 - RNA, 19 nt, Artificial Sequence
  Description of Artificial Sequence: Synthetic oligonucleotide
  Antisense strand to SEQ ID NO: 1973900
aaagacaugcaaauuaccu

SEQ ID NO: 1973902 - RNA, 19 nt, Artificial Sequence
  Description of Artificial Sequence: Synthetic oligonucleotide
  Sense strand starting at position 3581 of SEQ ID NO: 1880527
augucuuuccuuugaugga

SEQ ID NO: 1973903 - RNA, 19 nt, Artificial Sequence
  Description of Artificial Sequence: Synthetic oligonucleotide
  Antisense strand to SEQ ID NO: 1973902
uccaucaaaggaaagacau

SEQ ID NO: 1973904 - RNA, 19 nt, Artificial Sequence
  Description of Artificial Sequence: Synthetic oligonucleotide
  Sense strand starting at position 3614 of SEQ ID NO: 1880527
caagaauauccaugagugu

SEQ ID NO: 1973905 - RNA, 19 nt, Artificial Sequence
  Description of Artificial Sequence: Synthetic oligonucleotide
  Antisense strand to SEQ ID NO: 1973904
acacucauggauauucuug

SEQ ID NO: 1973906 - RNA, 19 nt, Artificial Sequence
  Description of Artificial Sequence: Synthetic oligonucleotide
  Sense strand starting at position 3617 of SEQ ID NO: 1880527
gaauauccaugaguguguu

SEQ ID NO: 1973907 - RNA, 19 nt, Artificial Sequence
  Description of Artificial Sequence: Synthetic oligonucleotide
  Antisense strand to SEQ ID NO: 1973906
aacacacucauggauauuc

SEQ ID NO: 1973908 - RNA, 19 nt, Artificial Sequence
  Description of Artificial Sequence: Synthetic oligonucleotide
  Sense strand starting at position 3655 of SEQ ID NO: 1880527
cauuccucagguugagaau

SEQ ID NO: 1973909 - RNA, 19 nt, Artificial Sequence
  Description of Artificial Sequence: Synthetic oligonucleotide
  Antisense strand to SEQ ID NO: 1973908
auucucaaccugaggaaug

SEQ ID NO: 1973910 - RNA, 19 nt, Artificial Sequence
  Description of Artificial Sequence: Synthetic oligonucleotide
  Sense strand starting at position 3658 of SEQ ID NO: 1880527
uccucagguugagaauuua

SEQ ID NO: 1973911 - RNA, 19 nt, Artificial Sequence
  Description of Artificial Sequence: Synthetic oligonucleotide
  Antisense strand to SEQ ID NO: 1973910
uaaauucucaaccugagga

SEQ ID NO: 1973912 - RNA, 19 nt, Artificial Sequence
  Description of Artificial Sequence: Synthetic oligonucleotide
  Sense strand starting at position 3750 of SEQ ID NO: 1880527
ggaauuacaagauguuguu

SEQ ID NO: 1973913 - RNA, 19 nt, Artificial Sequence
  Description of Artificial Sequence: Synthetic oligonucleotide
  Antisense strand to SEQ ID NO: 1973912
aacaacaucuuguaauucc

SEQ ID NO: 1973914 - RNA, 19 nt, Artificial Sequence
  Description of Artificial Sequence: Synthetic oligonucleotide
  Sense strand starting at position 3790 of SEQ ID NO: 1880527
gcaaccuuugaaugugaaa

SEQ ID NO: 1973915 - RNA, 19 nt, Artificial Sequence
  Description of Artificial Sequence: Synthetic oligonucleotide
  Antisense strand to SEQ ID NO: 1973914
uuucacauucaaagguugc

SEQ ID NO: 1973916 - RNA, 19 nt, Artificial Sequence
  Description of Artificial Sequence: Synthetic oligonucleotide
  Sense strand starting at position 3823 of SEQ ID NO: 1880527
gucaaagugaaaugguaua

SEQ ID NO: 1973917 - RNA, 19 nt, Artificial Sequence
  Description of Artificial Sequence: Synthetic oligonucleotide
  Antisense strand to SEQ ID NO: 1973916
uauaccauuucacuuugac

SEQ ID NO: 1973918 - RNA, 19 nt, Artificial Sequence
  Description of Artificial Sequence: Synthetic oligonucleotide
  Sense strand starting at position 3876 of SEQ ID NO: 1880527
caggaugcacucugacaga

SEQ ID NO: 1973919 - RNA, 19 nt, Artificial Sequence
  Description of Artificial Sequence: Synthetic oligonucleotide
  Antisense strand to SEQ ID NO: 1973918
ucugucagagugcauccug

SEQ ID NO: 1973920 - RNA, 19 nt, Artificial Sequence
  Description of Artificial Sequence: Synthetic oligonucleotide
  Sense strand starting at position 3917 of SEQ ID NO: 1880527
ugaccauugauacgucuga

SEQ ID NO: 1973921 - RNA, 19 nt, Artificial Sequence
  Description of Artificial Sequence: Synthetic oligonucleotide
  Antisense strand to SEQ ID NO: 1973920
ucagacguaucaaugguca

SEQ ID NO: 1973922 - RNA, 19 nt, Artificial Sequence
  Description of Artificial Sequence: Synthetic oligonucleotide
  Sense strand starting at position 3918 of SEQ ID NO: 1880527
gaccauugauacgucugau

SEQ ID NO: 1973923 - RNA, 19 nt, Artificial Sequence
  Description of Artificial Sequence: Synthetic oligonucleotide
  Antisense strand to SEQ ID NO: 1973922
aucagacguaucaaugguc

SEQ ID NO: 1973924 - RNA, 19 nt, Artificial Sequence
  Description of Artificial Sequence: Synthetic oligonucleotide
  Sense strand starting at position 3928 of SEQ ID NO: 1880527
acgucugaugcugaagauu

SEQ ID NO: 1973925 - RNA, 19 nt, Artificial Sequence
  Description of Artificial Sequence: Synthetic oligonucleotide
  Antisense strand to SEQ ID NO: 1973924
aaucuucagcaucagacgu

SEQ ID NO: 1973926 - RNA, 19 nt, Artificial Sequence
  Description of Artificial Sequence: Synthetic oligonucleotide
  Sense strand starting at position 3952 of SEQ ID NO: 1880527
uguguacuuguggaagaug

SEQ ID NO: 1973927 - RNA, 19 nt, Artificial Sequence
  Description of Artificial Sequence: Synthetic oligonucleotide
  Antisense strand to SEQ ID NO: 1973926
caucuuccacaaguacaca

SEQ ID NO: 1973928 - RNA, 19 nt, Artificial Sequence
  Description of Artificial Sequence: Synthetic oligonucleotide
  Sense strand starting at position 24 of SEQ ID NO: 1880528
agguguuauuaagcaggga

SEQ ID NO: 1973929 - RNA, 19 nt, Artificial Sequence
  Description of Artificial Sequence: Synthetic oligonucleotide
  Antisense strand to SEQ ID NO: 1973928
ucccugcuuaauaacaccu

SEQ ID NO: 1973930 - RNA, 19 nt, Artificial Sequence
  Description of Artificial Sequence: Synthetic oligonucleotide
  Sense strand starting at position 25 of SEQ ID NO: 1880528
gguguuauuaagcagggau

SEQ ID NO: 1973931 - RNA, 19 nt, Artificial Sequence
  Description of Artificial Sequence: Synthetic oligonucleotide
  Antisense strand to SEQ ID NO: 1973930
aucccugcuuaauaacacc

SEQ ID NO: 1973932 - RNA, 19 nt, Artificial Sequence
  Description of Artificial Sequence: Synthetic oligonucleotide
  Sense strand starting at position 176 of SEQ ID NO: 1880528
augcaaacccuuugaguua

SEQ ID NO: 1973933 - RNA, 19 nt, Artificial Sequence
  Description of Artificial Sequence: Synthetic oligonucleotide
  Antisense strand to SEQ ID NO: 1973932
uaacucaaaggguuugcau

SEQ ID NO: 1973934 - RNA, 19 nt, Artificial Sequence
  Description of Artificial Sequence: Synthetic oligonucleotide
  Sense strand starting at position 187 of SEQ ID NO: 1880528
uugaguuagcccugauaaa

SEQ ID NO: 1973935 - RNA, 19 nt, Artificial Sequence
  Description of Artificial Sequence: Synthetic oligonucleotide
  Antisense strand to SEQ ID NO: 1973934
uuuaucagggcuaacucaa

SEQ ID NO: 1973936 - RNA, 19 nt, Artificial Sequence
  Description of Artificial Sequence: Synthetic oligonucleotide
  Sense strand starting at position 477 of SEQ ID NO: 1880528
cgaggucuucuugacaucu

SEQ ID NO: 1973937 - RNA, 19 nt, Artificial Sequence
  Description of Artificial Sequence: Synthetic oligonucleotide
  Antisense strand to SEQ ID NO: 1973936
agaugucaagaagaccucg

SEQ ID NO: 1973938 - RNA, 19 nt, Artificial Sequence
  Description of Artificial Sequence: Synthetic oligonucleotide
  Sense strand starting at position 488 of SEQ ID NO: 1880528
ugacaucucugcuugguga

SEQ ID NO: 1973939 - RNA, 19 nt, Artificial Sequence
  Description of Artificial Sequence: Synthetic oligonucleotide
  Antisense strand to SEQ ID NO: 1973938
ucaccaagcagagauguca

SEQ ID NO: 1973940 - RNA, 19 nt, Artificial Sequence
  Description of Artificial Sequence: Synthetic oligonucleotide
  Sense strand starting at position 569 of SEQ ID NO: 1880528
ucgcuugcucaagacacaa

SEQ ID NO: 1973941 - RNA, 19 nt, Artificial Sequence
  Description of Artificial Sequence: Synthetic oligonucleotide
  Antisense strand to SEQ ID NO: 1973940
uugugucuugagcaagcga

SEQ ID NO: 1973942 - RNA, 19 nt, Artificial Sequence
  Description of Artificial Sequence: Synthetic oligonucleotide
  Sense strand starting at position 1081 of SEQ ID NO: 1880528
gucaccucuggcugagauu

SEQ ID NO: 1973943 - RNA, 19 nt, Artificial Sequence
  Description of Artificial Sequence: Synthetic oligonucleotide
  Antisense strand to SEQ ID NO: 1973942
aaucucagccagaggugac

SEQ ID NO: 1973944 - RNA, 19 nt, Artificial Sequence
  Description of Artificial Sequence: Synthetic oligonucleotide
  Sense strand starting at position 1354 of SEQ ID NO: 1880528
cuggauugaucucuaacga

SEQ ID NO: 1973945 - RNA, 19 nt, Artificial Sequence
  Description of Artificial Sequence: Synthetic oligonucleotide
  Antisense strand to SEQ ID NO: 1973944
ucguuagagaucaauccag

SEQ ID NO: 1973946 - RNA, 19 nt, Artificial Sequence
  Description of Artificial Sequence: Synthetic oligonucleotide
  Sense strand starting at position 1389 of SEQ ID NO: 1880528
uuaauacucuaagugagau

SEQ ID NO: 1973947 - RNA, 19 nt, Artificial Sequence
  Description of Artificial Sequence: Synthetic oligonucleotide
  Antisense strand to SEQ ID NO: 1973946
aucucacuuagaguauuaa

SEQ ID NO: 1973948 - RNA, 19 nt, Artificial Sequence
  Description of Artificial Sequence: Synthetic oligonucleotide
  Sense strand starting at position 1397 of SEQ ID NO: 1880528
cuaagugagaucuggauca

SEQ ID NO: 1973949 - RNA, 19 nt, Artificial Sequence
  Description of Artificial Sequence: Synthetic oligonucleotide
  Antisense strand to SEQ ID NO: 1973948
ugauccagaucucacuuag

SEQ ID NO: 1973950 - RNA, 19 nt, Artificial Sequence
  Description of Artificial Sequence: Synthetic oligonucleotide
  Sense strand starting at position 1422 of SEQ ID NO: 1880528
ucagcauuaccuggagcuu

SEQ ID NO: 1973951 - RNA, 19 nt, Artificial Sequence
  Description of Artificial Sequence: Synthetic oligonucleotide
  Antisense strand to SEQ ID NO: 1973950
aagcuccagguaaugcuga

SEQ ID NO: 1973952 - RNA, 19 nt, Artificial Sequence
  Description of Artificial Sequence: Synthetic oligonucleotide
  Sense strand starting at position 1428 of SEQ ID NO: 1880528
uuaccuggagcuuguuaga

SEQ ID NO: 1973953 - RNA, 19 nt, Artificial Sequence
  Description of Artificial Sequence: Synthetic oligonucleotide
  Antisense strand to SEQ ID NO: 1973952
ucuaacaagcuccagguaa

SEQ ID NO: 1973954 - RNA, 19 nt, Artificial Sequence
  Description of Artificial Sequence: Synthetic oligonucleotide
  Sense strand starting at position 1641 of SEQ ID NO: 1880528
ggaaauggaugugaugaac

SEQ ID NO: 1973955 - RNA, 19 nt, Artificial Sequence
  Description of Artificial Sequence: Synthetic oligonucleotide
  Antisense strand to SEQ ID NO: 1973954
guucaucacauccauuucc

SEQ ID NO: 1973956 - RNA, 19 nt, Artificial Sequence
  Description of Artificial Sequence: Synthetic oligonucleotide
  Sense strand starting at position 1723 of SEQ ID NO: 1880528
uuuauuguguacucucauu

SEQ ID NO: 1973957 - RNA, 19 nt, Artificial Sequence
  Description of Artificial Sequence: Synthetic oligonucleotide
  Antisense strand to SEQ ID NO: 1973956
aaugagaguacacaauaaa

SEQ ID NO: 1973958 - RNA, 19 nt, Artificial Sequence
  Description of Artificial Sequence: Synthetic oligonucleotide
  Sense strand starting at position 1873 of SEQ ID NO: 1880528
guaauuuggugaucgugau

SEQ ID NO: 1973959 - RNA, 19 nt, Artificial Sequence
  Description of Artificial Sequence: Synthetic oligonucleotide
  Antisense strand to SEQ ID NO: 1973958
aucacgaucaccaaauuac

SEQ ID NO: 1973960 - RNA, 19 nt, Artificial Sequence
  Description of Artificial Sequence: Synthetic oligonucleotide
  Sense strand starting at position 1877 of SEQ ID NO: 1880528
uuuggugaucgugauguuu

SEQ ID NO: 1973961 - RNA, 19 nt, Artificial Sequence
  Description of Artificial Sequence: Synthetic oligonucleotide
  Antisense strand to SEQ ID NO: 1973960
aaacaucacgaucaccaaa

SEQ ID NO: 1973962 - RNA, 19 nt, Artificial Sequence
  Description of Artificial Sequence: Synthetic oligonucleotide
  Sense strand starting at position 1888 of SEQ ID NO: 1880528
ugauguuucuucgcugaug

SEQ ID NO: 1973963 - RNA, 19 nt, Artificial Sequence
  Description of Artificial Sequence: Synthetic oligonucleotide
  Antisense strand to SEQ ID NO: 1973962
caucagcgaagaaacauca

SEQ ID NO: 1973964 - RNA, 19 nt, Artificial Sequence
  Description of Artificial Sequence: Synthetic oligonucleotide
  Sense strand starting at position 1936 of SEQ ID NO: 1880528
ugaagauguugucuuguuc

SEQ ID NO: 1973965 - RNA, 19 nt, Artificial Sequence
  Description of Artificial Sequence: Synthetic oligonucleotide
  Antisense strand to SEQ ID NO: 1973964
gaacaagacaacaucuuca

SEQ ID NO: 1973966 - RNA, 19 nt, Artificial Sequence
  Description of Artificial Sequence: Synthetic oligonucleotide
  Sense strand starting at position 2138 of SEQ ID NO: 1880528
ccugauggcucugcucuua

SEQ ID NO: 1973967 - RNA, 19 nt, Artificial Sequence
  Description of Artificial Sequence: Synthetic oligonucleotide
  Antisense strand to SEQ ID NO: 1973966
uaagagcagagccaucagg

SEQ ID NO: 1973968 - RNA, 19 nt, Artificial Sequence
  Description of Artificial Sequence: Synthetic oligonucleotide
  Sense strand starting at position 2228 of SEQ ID NO: 1880528
gccucaccucaguguaacu

SEQ ID NO: 1973969 - RNA, 19 nt, Artificial Sequence
  Description of Artificial Sequence: Synthetic oligonucleotide
  Antisense strand to SEQ ID NO: 1973968
aguuacacugaggugaggc

SEQ ID NO: 1973970 - RNA, 19 nt, Artificial Sequence
  Description of Artificial Sequence: Synthetic oligonucleotide
  Sense strand starting at position 2367 of SEQ ID NO: 1880528
uacugaaagugcucugauc

SEQ ID NO: 1973971 - RNA, 19 nt, Artificial Sequence
  Description of Artificial Sequence: Synthetic oligonucleotide
  Antisense strand to SEQ ID NO: 1973970
gaucagagcacuuucagua

SEQ ID NO: 1973972 - RNA, 19 nt, Artificial Sequence
  Description of Artificial Sequence: Synthetic oligonucleotide
  Sense strand starting at position 2369 of SEQ ID NO: 1880528
cugaaagugcucugaucuc

SEQ ID NO: 1973973 - RNA, 19 nt, Artificial Sequence
  Description of Artificial Sequence: Synthetic oligonucleotide
  Antisense strand to SEQ ID NO: 1973972
gagaucagagcacuuucag

SEQ ID NO: 1973974 - RNA, 19 nt, Artificial Sequence
  Description of Artificial Sequence: Synthetic oligonucleotide
  Sense strand starting at position 2421 of SEQ ID NO: 1880528
cugacucucugggaauaaa

SEQ ID NO: 1973975 - RNA, 19 nt, Artificial Sequence
  Description of Artificial Sequence: Synthetic oligonucleotide
  Antisense strand to SEQ ID NO: 1973974
uuuauucccagagagucag

SEQ ID NO: 1973976 - RNA, 19 nt, Artificial Sequence
  Description of Artificial Sequence: Synthetic oligonucleotide
  Sense strand starting at position 2440 of SEQ ID NO: 1880528
aaggucugauuugaggaau

SEQ ID NO: 1973977 - RNA, 19 nt, Artificial Sequence
  Description of Artificial Sequence: Synthetic oligonucleotide
  Antisense strand to SEQ ID NO: 1973976
auuccucaaaucagaccuu

SEQ ID NO: 1973978 - RNA, 19 nt, Artificial Sequence
  Description of Artificial Sequence: Synthetic oligonucleotide
  Sense strand starting at position 2454 of SEQ ID NO: 1880528
ggaauuugcugguuucugu

SEQ ID NO: 1973979 - RNA, 19 nt, Artificial Sequence
  Description of Artificial Sequence: Synthetic oligonucleotide
  Antisense strand to SEQ ID NO: 1973978
acagaaaccagcaaauucc

SEQ ID NO: 1973980 - RNA, 19 nt, Artificial Sequence
  Description of Artificial Sequence: Synthetic oligonucleotide
  Sense strand starting at position 2537 of SEQ ID NO: 1880528
ggaagagaugcauagacgu

SEQ ID NO: 1973981 - RNA, 19 nt, Artificial Sequence
  Description of Artificial Sequence: Synthetic oligonucleotide
  Antisense strand to SEQ ID NO: 1973980
acgucuaugcaucucuucc

SEQ ID NO: 1973982 - RNA, 19 nt, Artificial Sequence
  Description of Artificial Sequence: Synthetic oligonucleotide
  Sense strand starting at position 2543 of SEQ ID NO: 1880528
gaugcauagacgugaguaa

SEQ ID NO: 1973983 - RNA, 19 nt, Artificial Sequence
  Description of Artificial Sequence: Synthetic oligonucleotide
  Antisense strand to SEQ ID NO: 1973982
uuacucacgucuaugcauc

SEQ ID NO: 1973984 - RNA, 19 nt, Artificial Sequence
  Description of Artificial Sequence: Synthetic oligonucleotide
  Sense strand starting at position 2544 of SEQ ID NO: 1880528
augcauagacgugaguaau

SEQ ID NO: 1973985 - RNA, 19 nt, Artificial Sequence
  Description of Artificial Sequence: Synthetic oligonucleotide
  Antisense strand to SEQ ID NO: 1973984
auuacucacgucuaugcau

SEQ ID NO: 1973986 - RNA, 19 nt, Artificial Sequence
  Description of Artificial Sequence: Synthetic oligonucleotide
  Sense strand starting at position 2550 of SEQ ID NO: 1880528
agacgugaguaaucacuca

SEQ ID NO: 1973987 - RNA, 19 nt, Artificial Sequence
  Description of Artificial Sequence: Synthetic oligonucleotide
  Antisense strand to SEQ ID NO: 1973986
ugagugauuacucacgucu

SEQ ID NO: 1973988 - RNA, 19 nt, Artificial Sequence
  Description of Artificial Sequence: Synthetic oligonucleotide
  Sense strand starting at position 2618 of SEQ ID NO: 1880528
ggaauagcuauugguagaa

SEQ ID NO: 1973989 - RNA, 19 nt, Artificial Sequence
  Description of Artificial Sequence: Synthetic oligonucleotide
  Antisense strand to SEQ ID NO: 1973988
uucuaccaauagcuauucc

SEQ ID NO: 1973990 - RNA, 19 nt, Artificial Sequence
  Description of Artificial Sequence: Synthetic oligonucleotide
  Sense strand starting at position 2622 of SEQ ID NO: 1880528
uagcuauugguagaaggua

SEQ ID NO: 1973991 - RNA, 19 nt, Artificial Sequence
  Description of Artificial Sequence: Synthetic oligonucleotide
  Antisense strand to SEQ ID NO: 1973990
uaccuucuaccaauagcua

SEQ ID NO: 1973992 - RNA, 19 nt, Artificial Sequence
  Description of Artificial Sequence: Synthetic oligonucleotide
  Sense strand starting at position 2674 of SEQ ID NO: 1880528
uugcuuugucucuauguaa

SEQ ID NO: 1973993 - RNA, 19 nt, Artificial Sequence
  Description of Artificial Sequence: Synthetic oligonucleotide
  Antisense strand to SEQ ID NO: 1973992
uuacauagagacaaagcaa

SEQ ID NO: 1973994 - RNA, 19 nt, Artificial Sequence
  Description of Artificial Sequence: Synthetic oligonucleotide
  Sense strand starting at position 3047 of SEQ ID NO: 1880528
ugauccaucccuuaggguu

SEQ ID NO: 1973995 - RNA, 19 nt, Artificial Sequence
  Description of Artificial Sequence: Synthetic oligonucleotide
  Antisense strand to SEQ ID NO: 1973994
aacccuaagggauggauca

SEQ ID NO: 1973996 - RNA, 19 nt, Artificial Sequence
  Description of Artificial Sequence: Synthetic oligonucleotide
  Sense strand starting at position 3511 of SEQ ID NO: 1880528
uggugauucccaggugccu

SEQ ID NO: 1973997 - RNA, 19 nt, Artificial Sequence
  Description of Artificial Sequence: Synthetic oligonucleotide
  Antisense strand to SEQ ID NO: 1973996
aggcaccugggaaucacca

SEQ ID NO: 1973998 - RNA, 19 nt, Artificial Sequence
  Description of Artificial Sequence: Synthetic oligonucleotide
  Sense strand starting at position 3721 of SEQ ID NO: 1880528
gguuaagagcucuguccug

SEQ ID NO: 1973999 - RNA, 19 nt, Artificial Sequence
  Description of Artificial Sequence: Synthetic oligonucleotide
  Antisense strand to SEQ ID NO: 1973998
caggacagagcucuuaacc

SEQ ID NO: 1974000 - RNA, 19 nt, Artificial Sequence
  Description of Artificial Sequence: Synthetic oligonucleotide
  Sense strand starting at position 3789 of SEQ ID NO: 1880528
acgucugaccaauggacua

SEQ ID NO: 1974001 - RNA, 19 nt, Artificial Sequence
  Description of Artificial Sequence: Synthetic oligonucleotide
  Antisense strand to SEQ ID NO: 1974000
uaguccauuggucagacgu

SEQ ID NO: 1974002 - RNA, 19 nt, Artificial Sequence
  Description of Artificial Sequence: Synthetic oligonucleotide
  Sense strand starting at position 3831 of SEQ ID NO: 1880528
gcuccucagguuuagaaca

SEQ ID NO: 1974003 - RNA, 19 nt, Artificial Sequence
  Description of Artificial Sequence: Synthetic oligonucleotide
  Antisense strand to SEQ ID NO: 1974002
uguucuaaaccugaggagc

SEQ ID NO: 1974004 - RNA, 19 nt, Artificial Sequence
  Description of Artificial Sequence: Synthetic oligonucleotide
  Sense strand starting at position 3886 of SEQ ID NO: 1880528
acugguuuaugauuaggau

SEQ ID NO: 1974005 - RNA, 19 nt, Artificial Sequence
  Description of Artificial Sequence: Synthetic oligonucleotide
  Antisense strand to SEQ ID NO: 1974004
auccuaaucauaaaccagu

SEQ ID NO: 1974006 - RNA, 19 nt, Artificial Sequence
  Description of Artificial Sequence: Synthetic oligonucleotide
  Sense strand starting at position 3892 of SEQ ID NO: 1880528
uuaugauuaggauguaacu

SEQ ID NO: 1974007 - RNA, 19 nt, Artificial Sequence
  Description of Artificial Sequence: Synthetic oligonucleotide
  Antisense strand to SEQ ID NO: 1974006
aguuacauccuaaucauaa

SEQ ID NO: 1974008 - RNA, 19 nt, Artificial Sequence
  Description of Artificial Sequence: Synthetic oligonucleotide
  Sense strand starting at position 104 of SEQ ID NO: 1880529
guguuuguggugucuccua

SEQ ID NO: 1974009 - RNA, 19 nt, Artificial Sequence
  Description of Artificial Sequence: Synthetic oligonucleotide
  Antisense strand to SEQ ID NO: 1974008
uaggagacaccacaaacac

SEQ ID NO: 1974010 - RNA, 19 nt, Artificial Sequence
  Description of Artificial Sequence: Synthetic oligonucleotide
  Sense strand starting at position 168 of SEQ ID NO: 1880529
guggacuuccuuuaucaga

SEQ ID NO: 1974011 - RNA, 19 nt, Artificial Sequence
  Description of Artificial Sequence: Synthetic oligonucleotide
  Antisense strand to SEQ ID NO: 1974010
ucugauaaaggaaguccac

SEQ ID NO: 1974012 - RNA, 19 nt, Artificial Sequence
  Description of Artificial Sequence: Synthetic oligonucleotide
  Sense strand starting at position 170 of SEQ ID NO: 1880529
ggacuuccuuuaucagaga

SEQ ID NO: 1974013 - RNA, 19 nt, Artificial Sequence
  Description of Artificial Sequence: Synthetic oligonucleotide
  Antisense strand to SEQ ID NO: 1974012
ucucugauaaaggaagucc

SEQ ID NO: 1974014 - RNA, 19 nt, Artificial Sequence
  Description of Artificial Sequence: Synthetic oligonucleotide
  Sense strand starting at position 232 of SEQ ID NO: 1880529
cccucuucggaugaguaca

SEQ ID NO: 1974015 - RNA, 19 nt, Artificial Sequence
  Description of Artificial Sequence: Synthetic oligonucleotide
  Antisense strand to SEQ ID NO: 1974014
uguacucauccgaagaggg

SEQ ID NO: 1974016 - RNA, 19 nt, Artificial Sequence
  Description of Artificial Sequence: Synthetic oligonucleotide
  Sense strand starting at position 505 of SEQ ID NO: 1880529
uuacuuagggauugagagu

SEQ ID NO: 1974017 - RNA, 19 nt, Artificial Sequence
  Description of Artificial Sequence: Synthetic oligonucleotide
  Antisense strand to SEQ ID NO: 1974016
acucucaaucccuaaguaa

SEQ ID NO: 1974018 - RNA, 19 nt, Artificial Sequence
  Description of Artificial Sequence: Synthetic oligonucleotide
  Sense strand starting at position 852 of SEQ ID NO: 1880529
uggcccuggcuauauguaa

SEQ ID NO: 1974019 - RNA, 19 nt, Artificial Sequence
  Description of Artificial Sequence: Synthetic oligonucleotide
  Antisense strand to SEQ ID NO: 1974018
uuacauauagccagggcca

SEQ ID NO: 1974020 - RNA, 19 nt, Artificial Sequence
  Description of Artificial Sequence: Synthetic oligonucleotide
  Sense strand starting at position 864 of SEQ ID NO: 1880529
uauguaaagucacuggcau

SEQ ID NO: 1974021 - RNA, 19 nt, Artificial Sequence
  Description of Artificial Sequence: Synthetic oligonucleotide
  Antisense strand to SEQ ID NO: 1974020
augccagugacuuuacaua

SEQ ID NO: 1974022 - RNA, 19 nt, Artificial Sequence
  Description of Artificial Sequence: Synthetic oligonucleotide
  Sense strand starting at position 1261 of SEQ ID NO: 1880529
acggaagucauauaguauc

SEQ ID NO: 1974023 - RNA, 19 nt, Artificial Sequence
  Description of Artificial Sequence: Synthetic oligonucleotide
  Antisense strand to SEQ ID NO: 1974022
gauacuauaugacuuccgu

SEQ ID NO: 1974024 - RNA, 19 nt, Artificial Sequence
  Description of Artificial Sequence: Synthetic oligonucleotide
  Sense strand starting at position 1286 of SEQ ID NO: 1880529
gccauaccucuuggucaaa

SEQ ID NO: 1974025 - RNA, 19 nt, Artificial Sequence
  Description of Artificial Sequence: Synthetic oligonucleotide
  Antisense strand to SEQ ID NO: 1974024
uuugaccaagagguauggc

SEQ ID NO: 1974026 - RNA, 19 nt, Artificial Sequence
  Description of Artificial Sequence: Synthetic oligonucleotide
  Sense strand starting at position 1342 of SEQ ID NO: 1880529
uccacuucuagacgggaga

SEQ ID NO: 1974027 - RNA, 19 nt, Artificial Sequence
  Description of Artificial Sequence: Synthetic oligonucleotide
  Antisense strand to SEQ ID NO: 1974026
ucucccgucuagaagugga

SEQ ID NO: 1974028 - RNA, 19 nt, Artificial Sequence
  Description of Artificial Sequence: Synthetic oligonucleotide
  Sense strand starting at position 1343 of SEQ ID NO: 1880529
ccacuucuagacgggagaa

SEQ ID NO: 1974029 - RNA, 19 nt, Artificial Sequence
  Description of Artificial Sequence: Synthetic oligonucleotide
  Antisense strand to SEQ ID NO: 1974028
uucucccgucuagaagugg

SEQ ID NO: 1974030 - RNA, 19 nt, Artificial Sequence
  Description of Artificial Sequence: Synthetic oligonucleotide
  Sense strand starting at position 1379 of SEQ ID NO: 1880529
gggccaccuccagauaguu

SEQ ID NO: 1974031 - RNA, 19 nt, Artificial Sequence
  Description of Artificial Sequence: Synthetic oligonucleotide
  Antisense strand to SEQ ID NO: 1974030
aacuaucuggagguggccc

SEQ ID NO: 1974032 - RNA, 19 nt, Artificial Sequence
  Description of Artificial Sequence: Synthetic oligonucleotide
  Sense strand starting at position 1526 of SEQ ID NO: 1880529
ucaaguagaauguggcaaa

SEQ ID NO: 1974033 - RNA, 19 nt, Artificial Sequence
  Description of Artificial Sequence: Synthetic oligonucleotide
  Antisense strand to SEQ ID NO: 1974032
uuugccacauucuacuuga

SEQ ID NO: 1974034 - RNA, 19 nt, Artificial Sequence
  Description of Artificial Sequence: Synthetic oligonucleotide
  Sense strand starting at position 1754 of SEQ ID NO: 1880529
uggugucauuuccucccaa

SEQ ID NO: 1974035 - RNA, 19 nt, Artificial Sequence
  Description of Artificial Sequence: Synthetic oligonucleotide
  Antisense strand to SEQ ID NO: 1974034
uugggaggaaaugacacca

SEQ ID NO: 1974036 - RNA, 19 nt, Artificial Sequence
  Description of Artificial Sequence: Synthetic oligonucleotide
  Sense strand starting at position 1755 of SEQ ID NO: 1880529
ggugucauuuccucccaau

SEQ ID NO: 1974037 - RNA, 19 nt, Artificial Sequence
  Description of Artificial Sequence: Synthetic oligonucleotide
  Antisense strand to SEQ ID NO: 1974036
auugggaggaaaugacacc

SEQ ID NO: 1974038 - RNA, 19 nt, Artificial Sequence
  Description of Artificial Sequence: Synthetic oligonucleotide
  Sense strand starting at position 1783 of SEQ ID NO: 1880529
ggugacacuuuccauuuga

SEQ ID NO: 1974039 - RNA, 19 nt, Artificial Sequence
  Description of Artificial Sequence: Synthetic oligonucleotide
  Antisense strand to SEQ ID NO: 1974038
ucaaauggaaagugucacc

SEQ ID NO: 1974040 - RNA, 19 nt, Artificial Sequence
  Description of Artificial Sequence: Synthetic oligonucleotide
  Sense strand starting at position 1982 of SEQ ID NO: 1880529
gcagaugugacucagcuca

SEQ ID NO: 1974041 - RNA, 19 nt, Artificial Sequence
  Description of Artificial Sequence: Synthetic oligonucleotide
  Antisense strand to SEQ ID NO: 1974040
ugagcugagucacaucugc

SEQ ID NO: 1974042 - RNA, 19 nt, Artificial Sequence
  Description of Artificial Sequence: Synthetic oligonucleotide
  Sense strand starting at position 1984 of SEQ ID NO: 1880529
agaugugacucagcucacu

SEQ ID NO: 1974043 - RNA, 19 nt, Artificial Sequence
  Description of Artificial Sequence: Synthetic oligonucleotide
  Antisense strand to SEQ ID NO: 1974042
agugagcugagucacaucu

SEQ ID NO: 1974044 - RNA, 19 nt, Artificial Sequence
  Description of Artificial Sequence: Synthetic oligonucleotide
  Sense strand starting at position 2182 of SEQ ID NO: 1880529
ugaugacaccgcuaagaau

SEQ ID NO: 1974045 - RNA, 19 nt, Artificial Sequence
  Description of Artificial Sequence: Synthetic oligonucleotide
  Antisense strand to SEQ ID NO: 1974044
auucuuagcggugucauca

SEQ ID NO: 1974046 - RNA, 19 nt, Artificial Sequence
  Description of Artificial Sequence: Synthetic oligonucleotide
  Sense strand starting at position 2509 of SEQ ID NO: 1880529
ggcagaagcagugguaaca

SEQ ID NO: 1974047 - RNA, 19 nt, Artificial Sequence
  Description of Artificial Sequence: Synthetic oligonucleotide
  Antisense strand to SEQ ID NO: 1974046
uguuaccacugcuucugcc

SEQ ID NO: 1974048 - RNA, 19 nt, Artificial Sequence
  Description of Artificial Sequence: Synthetic oligonucleotide
  Sense strand starting at position 2889 of SEQ ID NO: 1880529
uuugauuguauggauaagu

SEQ ID NO: 1974049 - RNA, 19 nt, Artificial Sequence
  Description of Artificial Sequence: Synthetic oligonucleotide
  Antisense strand to SEQ ID NO: 1974048
acuuauccauacaaucaaa

SEQ ID NO: 1974050 - RNA, 19 nt, Artificial Sequence
  Description of Artificial Sequence: Synthetic oligonucleotide
  Sense strand starting at position 2916 of SEQ ID NO: 1880529
ggugauuucugagauuugu

SEQ ID NO: 1974051 - RNA, 19 nt, Artificial Sequence
  Description of Artificial Sequence: Synthetic oligonucleotide
  Antisense strand to SEQ ID NO: 1974050
acaaaucucagaaaucacc

SEQ ID NO: 1974052 - RNA, 19 nt, Artificial Sequence
  Description of Artificial Sequence: Synthetic oligonucleotide
  Sense strand starting at position 3248 of SEQ ID NO: 1880529
cuccaaauuggccauggua

SEQ ID NO: 1974053 - RNA, 19 nt, Artificial Sequence
  Description of Artificial Sequence: Synthetic oligonucleotide
  Antisense strand to SEQ ID NO: 1974052
uaccauggccaauuuggag

SEQ ID NO: 1974054 - RNA, 19 nt, Artificial Sequence
  Description of Artificial Sequence: Synthetic oligonucleotide
  Sense strand starting at position 3250 of SEQ ID NO: 1880529
ccaaauuggccaugguauu

SEQ ID NO: 1974055 - RNA, 19 nt, Artificial Sequence
  Description of Artificial Sequence: Synthetic oligonucleotide
  Antisense strand to SEQ ID NO: 1974054
aauaccauggccaauuugg

SEQ ID NO: 1974056 - RNA, 19 nt, Artificial Sequence
  Description of Artificial Sequence: Synthetic oligonucleotide
  Sense strand starting at position 3328 of SEQ ID NO: 1880529
ugaguccagcacuauaaau

SEQ ID NO: 1974057 - RNA, 19 nt, Artificial Sequence
  Description of Artificial Sequence: Synthetic oligonucleotide
  Antisense strand to SEQ ID NO: 1974056
auuuauagugcuggacuca

SEQ ID NO: 1974058 - RNA, 19 nt, Artificial Sequence
  Description of Artificial Sequence: Synthetic oligonucleotide
  Sense strand starting at position 3435 of SEQ ID NO: 1880529
caacaacauucggugaguu

SEQ ID NO: 1974059 - RNA, 19 nt, Artificial Sequence
  Description of Artificial Sequence: Synthetic oligonucleotide
  Antisense strand to SEQ ID NO: 1974058
aacucaccgaauguuguug

SEQ ID NO: 1974060 - RNA, 19 nt, Artificial Sequence
  Description of Artificial Sequence: Synthetic oligonucleotide
  Sense strand starting at position 3436 of SEQ ID NO: 1880529
aacaacauucggugaguua

SEQ ID NO: 1974061 - RNA, 19 nt, Artificial Sequence
  Description of Artificial Sequence: Synthetic oligonucleotide
  Antisense strand to SEQ ID NO: 1974060
uaacucaccgaauguuguu

SEQ ID NO: 1974062 - RNA, 19 nt, Artificial Sequence
  Description of Artificial Sequence: Synthetic oligonucleotide
  Sense strand starting at position 3437 of SEQ ID NO: 1880529
acaacauucggugaguuac

SEQ ID NO: 1974063 - RNA, 19 nt, Artificial Sequence
  Description of Artificial Sequence: Synthetic oligonucleotide
  Antisense strand to SEQ ID NO: 1974062
guaacucaccgaauguugu

SEQ ID NO: 1974064 - RNA, 19 nt, Artificial Sequence
  Description of Artificial Sequence: Synthetic oligonucleotide
  Sense strand starting at position 3439 of SEQ ID NO: 1880529
aacauucggugaguuacua

SEQ ID NO: 1974065 - RNA, 19 nt, Artificial Sequence
  Description of Artificial Sequence: Synthetic oligonucleotide
  Antisense strand to SEQ ID NO: 1974064
uaguaacucaccgaauguu

SEQ ID NO: 1974066 - RNA, 19 nt, Artificial Sequence
  Description of Artificial Sequence: Synthetic oligonucleotide
  Sense strand starting at position 3476 of SEQ ID NO: 1880529
cgagguguuagggauguaa

SEQ ID NO: 1974067 - RNA, 19 nt, Artificial Sequence
  Description of Artificial Sequence: Synthetic oligonucleotide
  Antisense strand to SEQ ID NO: 1974066
uuacaucccuaacaccucg

SEQ ID NO: 1974068 - RNA, 19 nt, Artificial Sequence
  Description of Artificial Sequence: Synthetic oligonucleotide
  Sense strand starting at position 3478 of SEQ ID NO: 1880529
agguguuagggauguaaag

SEQ ID NO: 1974069 - RNA, 19 nt, Artificial Sequence
  Description of Artificial Sequence: Synthetic oligonucleotide
  Antisense strand to SEQ ID NO: 1974068
cuuuacaucccuaacaccu

SEQ ID NO: 1974070 - RNA, 19 nt, Artificial Sequence
  Description of Artificial Sequence: Synthetic oligonucleotide
  Sense strand starting at position 3480 of SEQ ID NO: 1880529
guguuagggauguaaagau

SEQ ID NO: 1974071 - RNA, 19 nt, Artificial Sequence
  Description of Artificial Sequence: Synthetic oligonucleotide
  Antisense strand to SEQ ID NO: 1974070
aucuuuacaucccuaacac

SEQ ID NO: 1974072 - RNA, 19 nt, Artificial Sequence
  Description of Artificial Sequence: Synthetic oligonucleotide
  Sense strand starting at position 3499 of SEQ ID NO: 1880529
guaagucagcccuugcuuu

SEQ ID NO: 1974073 - RNA, 19 nt, Artificial Sequence
  Description of Artificial Sequence: Synthetic oligonucleotide
  Antisense strand to SEQ ID NO: 1974072
aaagcaagggcugacuuac

SEQ ID NO: 1974074 - RNA, 19 nt, Artificial Sequence
  Description of Artificial Sequence: Synthetic oligonucleotide
  Sense strand starting at position 3585 of SEQ ID NO: 1880529
uuuauagaaccgugaagga

SEQ ID NO: 1974075 - RNA, 19 nt, Artificial Sequence
  Description of Artificial Sequence: Synthetic oligonucleotide
  Antisense strand to SEQ ID NO: 1974074
uccuucacgguucuauaaa

SEQ ID NO: 1974076 - RNA, 19 nt, Artificial Sequence
  Description of Artificial Sequence: Synthetic oligonucleotide
  Sense strand starting at position 3605 of SEQ ID NO: 1880529
auauucuacccagggaagu

SEQ ID NO: 1974077 - RNA, 19 nt, Artificial Sequence
  Description of Artificial Sequence: Synthetic oligonucleotide
  Antisense strand to SEQ ID NO: 1974076
acuucccuggguagaauau

SEQ ID NO: 1974078 - RNA, 19 nt, Artificial Sequence
  Description of Artificial Sequence: Synthetic oligonucleotide
  Sense strand starting at position 3798 of SEQ ID NO: 1880529
agacuuagcucugcccaga

SEQ ID NO: 1974079 - RNA, 19 nt, Artificial Sequence
  Description of Artificial Sequence: Synthetic oligonucleotide
  Antisense strand to SEQ ID NO: 1974078
ucugggcagagcuaagucu

SEQ ID NO: 1974080 - RNA, 19 nt, Artificial Sequence
  Description of Artificial Sequence: Synthetic oligonucleotide
  Sense strand starting at position 3916 of SEQ ID NO: 1880529
cggaacauaugcccucuua

SEQ ID NO: 1974081 - RNA, 19 nt, Artificial Sequence
  Description of Artificial Sequence: Synthetic oligonucleotide
  Antisense strand to SEQ ID NO: 1974080
uaagagggcauauguuccg

SEQ ID NO: 1974082 - RNA, 19 nt, Artificial Sequence
  Description of Artificial Sequence: Synthetic oligonucleotide
  Sense strand starting at position 3946 of SEQ ID NO: 1880529
ucaugcauuccuggaguaa

SEQ ID NO: 1974083 - RNA, 19 nt, Artificial Sequence
  Description of Artificial Sequence: Synthetic oligonucleotide
  Antisense strand to SEQ ID NO: 1974082
uuacuccaggaaugcauga

SEQ ID NO: 1974084 - RNA, 19 nt, Artificial Sequence
  Description of Artificial Sequence: Synthetic oligonucleotide
  Sense strand starting at position 3947 of SEQ ID NO: 1880529
caugcauuccuggaguaag

SEQ ID NO: 1974085 - RNA, 19 nt, Artificial Sequence
  Description of Artificial Sequence: Synthetic oligonucleotide
  Antisense strand to SEQ ID NO: 1974084
cuuacuccaggaaugcaug

SEQ ID NO: 1974086 - RNA, 19 nt, Artificial Sequence
  Description of Artificial Sequence: Synthetic oligonucleotide
  Sense strand starting at position 3950 of SEQ ID NO: 1880529
gcauuccuggaguaagaca

SEQ ID NO: 1974087 - RNA, 19 nt, Artificial Sequence
  Description of Artificial Sequence: Synthetic oligonucleotide
  Antisense strand to SEQ ID NO: 1974086
ugucuuacuccaggaaugc

SEQ ID NO: 1974088 - RNA, 19 nt, Artificial Sequence
  Description of Artificial Sequence: Synthetic oligonucleotide
  Sense strand starting at position 19 of SEQ ID NO: 1880531
gcaagaacauagguuguga

SEQ ID NO: 1974089 - RNA, 19 nt, Artificial Sequence
  Description of Artificial Sequence: Synthetic oligonucleotide
  Antisense strand to SEQ ID NO: 1974088
ucacaaccuauguucuugc

SEQ ID NO: 1974090 - RNA, 19 nt, Artificial Sequence
  Description of Artificial Sequence: Synthetic oligonucleotide
  Sense strand starting at position 28 of SEQ ID NO: 1880531
uagguugugaucuagagcu

SEQ ID NO: 1974091 - RNA, 19 nt, Artificial Sequence
  Description of Artificial Sequence: Synthetic oligonucleotide
  Antisense strand to SEQ ID NO: 1974090
agcucuagaucacaaccua

SEQ ID NO: 1974092 - RNA, 19 nt, Artificial Sequence
  Description of Artificial Sequence: Synthetic oligonucleotide
  Sense strand starting at position 91 of SEQ ID NO: 1880531
ugagauucucuuuggauua

SEQ ID NO: 1974093 - RNA, 19 nt, Artificial Sequence
  Description of Artificial Sequence: Synthetic oligonucleotide
  Antisense strand to SEQ ID NO: 1974092
uaauccaaagagaaucuca

SEQ ID NO: 1974094 - RNA, 19 nt, Artificial Sequence
  Description of Artificial Sequence: Synthetic oligonucleotide
  Sense strand starting at position 114 of SEQ ID NO: 1880531
ccuccaucacuguaaggua

SEQ ID NO: 1974095 - RNA, 19 nt, Artificial Sequence
  Description of Artificial Sequence: Synthetic oligonucleotide
  Antisense strand to SEQ ID NO: 1974094
uaccuuacagugauggagg

SEQ ID NO: 1974096 - RNA, 19 nt, Artificial Sequence
  Description of Artificial Sequence: Synthetic oligonucleotide
  Sense strand starting at position 164 of SEQ ID NO: 1880531
uguggugauuugcuggcaa

SEQ ID NO: 1974097 - RNA, 19 nt, Artificial Sequence
  Description of Artificial Sequence: Synthetic oligonucleotide
  Antisense strand to SEQ ID NO: 1974096
uugccagcaaaucaccaca

SEQ ID NO: 1974098 - RNA, 19 nt, Artificial Sequence
  Description of Artificial Sequence: Synthetic oligonucleotide
  Sense strand starting at position 273 of SEQ ID NO: 1880531
ucaguuugccaucaaagau

SEQ ID NO: 1974099 - RNA, 19 nt, Artificial Sequence
  Description of Artificial Sequence: Synthetic oligonucleotide
  Antisense strand to SEQ ID NO: 1974098
aucuuugauggcaaacuga

SEQ ID NO: 1974100 - RNA, 19 nt, Artificial Sequence
  Description of Artificial Sequence: Synthetic oligonucleotide
  Sense strand starting at position 394 of SEQ ID NO: 1880531
gcuuaaccgggagaguaaa

SEQ ID NO: 1974101 - RNA, 19 nt, Artificial Sequence
  Description of Artificial Sequence: Synthetic oligonucleotide
  Antisense strand to SEQ ID NO: 1974100
uuuacucucccgguuaagc

SEQ ID NO: 1974102 - RNA, 19 nt, Artificial Sequence
  Description of Artificial Sequence: Synthetic oligonucleotide
  Sense strand starting at position 419 of SEQ ID NO: 1880531
guagauagaaucgggcaaa

SEQ ID NO: 1974103 - RNA, 19 nt, Artificial Sequence
  Description of Artificial Sequence: Synthetic oligonucleotide
  Antisense strand to SEQ ID NO: 1974102
uuugcccgauucuaucuac

SEQ ID NO: 1974104 - RNA, 19 nt, Artificial Sequence
  Description of Artificial Sequence: Synthetic oligonucleotide
  Sense strand starting at position 548 of SEQ ID NO: 1880531
gguauugucacugagauag

SEQ ID NO: 1974105 - RNA, 19 nt, Artificial Sequence
  Description of Artificial Sequence: Synthetic oligonucleotide
  Antisense strand to SEQ ID NO: 1974104
cuaucucagugacaauacc

SEQ ID NO: 1974106 - RNA, 19 nt, Artificial Sequence
  Description of Artificial Sequence: Synthetic oligonucleotide
  Sense strand starting at position 656 of SEQ ID NO: 1880531
gggauauccauauggaagc

SEQ ID NO: 1974107 - RNA, 19 nt, Artificial Sequence
  Description of Artificial Sequence: Synthetic oligonucleotide
  Antisense strand to SEQ ID NO: 1974106
gcuuccauauggauauccc

SEQ ID NO: 1974108 - RNA, 19 nt, Artificial Sequence
  Description of Artificial Sequence: Synthetic oligonucleotide
  Sense strand starting at position 894 of SEQ ID NO: 1880531
guauauggaaguuaguaga

SEQ ID NO: 1974109 - RNA, 19 nt, Artificial Sequence
  Description of Artificial Sequence: Synthetic oligonucleotide
  Antisense strand to SEQ ID NO: 1974108
ucuacuaacuuccauauac

SEQ ID NO: 1974110 - RNA, 19 nt, Artificial Sequence
  Description of Artificial Sequence: Synthetic oligonucleotide
  Sense strand starting at position 918 of SEQ ID NO: 1880531
aagaaaugguaacuguuau

SEQ ID NO: 1974111 - RNA, 19 nt, Artificial Sequence
  Description of Artificial Sequence: Synthetic oligonucleotide
  Antisense strand to SEQ ID NO: 1974110
auaacaguuaccauuucuu

SEQ ID NO: 1974112 - RNA, 19 nt, Artificial Sequence
  Description of Artificial Sequence: Synthetic oligonucleotide
  Sense strand starting at position 939 of SEQ ID NO: 1880531
cuagucgggccagaaauaa

SEQ ID NO: 1974113 - RNA, 19 nt, Artificial Sequence
  Description of Artificial Sequence: Synthetic oligonucleotide
  Antisense strand to SEQ ID NO: 1974112
uuauuucuggcccgacuag

SEQ ID NO: 1974114 - RNA, 19 nt, Artificial Sequence
  Description of Artificial Sequence: Synthetic oligonucleotide
  Sense strand starting at position 984 of SEQ ID NO: 1880531
guaugaaguuaagucuaaa

SEQ ID NO: 1974115 - RNA, 19 nt, Artificial Sequence
  Description of Artificial Sequence: Synthetic oligonucleotide
  Antisense strand to SEQ ID NO: 1974114
uuuagacuuaacuucauac

SEQ ID NO: 1974116 - RNA, 19 nt, Artificial Sequence
  Description of Artificial Sequence: Synthetic oligonucleotide
  Sense strand starting at position 1137 of SEQ ID NO: 1880531
cgucaagcacuuuauaaau

SEQ ID NO: 1974117 - RNA, 19 nt, Artificial Sequence
  Description of Artificial Sequence: Synthetic oligonucleotide
  Antisense strand to SEQ ID NO: 1974116
auuuauaaagugcuugacg

SEQ ID NO: 1974118 - RNA, 19 nt, Artificial Sequence
  Description of Artificial Sequence: Synthetic oligonucleotide
  Sense strand starting at position 2178 of SEQ ID NO: 1880531
auggaaguagauuggucua

SEQ ID NO: 1974119 - RNA, 19 nt, Artificial Sequence
  Description of Artificial Sequence: Synthetic oligonucleotide
  Antisense strand to SEQ ID NO: 1974118
uagaccaaucuacuuccau

SEQ ID NO: 1974120 - RNA, 19 nt, Artificial Sequence
  Description of Artificial Sequence: Synthetic oligonucleotide
  Sense strand starting at position 2180 of SEQ ID NO: 1880531
ggaaguagauuggucuaaa

SEQ ID NO: 1974121 - RNA, 19 nt, Artificial Sequence
  Description of Artificial Sequence: Synthetic oligonucleotide
  Antisense strand to SEQ ID NO: 1974120
uuuagaccaaucuacuucc

SEQ ID NO: 1974122 - RNA, 19 nt, Artificial Sequence
  Description of Artificial Sequence: Synthetic oligonucleotide
  Sense strand starting at position 2181 of SEQ ID NO: 1880531
gaaguagauuggucuaaac

SEQ ID NO: 1974123 - RNA, 19 nt, Artificial Sequence
  Description of Artificial Sequence: Synthetic oligonucleotide
  Antisense strand to SEQ ID NO: 1974122
guuuagaccaaucuacuuc

SEQ ID NO: 1974124 - RNA, 19 nt, Artificial Sequence
  Description of Artificial Sequence: Synthetic oligonucleotide
  Sense strand starting at position 2433 of SEQ ID NO: 1880531
acucaaaggcugcaucaua

SEQ ID NO: 1974125 - RNA, 19 nt, Artificial Sequence
  Description of Artificial Sequence: Synthetic oligonucleotide
  Antisense strand to SEQ ID NO: 1974124
uaugaugcagccuuugagu

SEQ ID NO: 1974126 - RNA, 19 nt, Artificial Sequence
  Description of Artificial Sequence: Synthetic oligonucleotide
  Sense strand starting at position 2502 of SEQ ID NO: 1880531
ccacaucugaccgaaggua

SEQ ID NO: 1974127 - RNA, 19 nt, Artificial Sequence
  Description of Artificial Sequence: Synthetic oligonucleotide
  Antisense strand to SEQ ID NO: 1974126
uaccuucggucagaugugg

SEQ ID NO: 1974128 - RNA, 19 nt, Artificial Sequence
  Description of Artificial Sequence: Synthetic oligonucleotide
  Sense strand starting at position 2549 of SEQ ID NO: 1880531
aucuuaaugguuuggacau

SEQ ID NO: 1974129 - RNA, 19 nt, Artificial Sequence
  Description of Artificial Sequence: Synthetic oligonucleotide
  Antisense strand to SEQ ID NO: 1974128
auguccaaaccauuaagau

SEQ ID NO: 1974130 - RNA, 19 nt, Artificial Sequence
  Description of Artificial Sequence: Synthetic oligonucleotide
  Sense strand starting at position 2691 of SEQ ID NO: 1880531
uguuuagaagcugaaaggu

SEQ ID NO: 1974131 - RNA, 19 nt, Artificial Sequence
  Description of Artificial Sequence: Synthetic oligonucleotide
  Antisense strand to SEQ ID NO: 1974130
accuuucagcuucuaaaca

SEQ ID NO: 1974132 - RNA, 19 nt, Artificial Sequence
  Description of Artificial Sequence: Synthetic oligonucleotide
  Sense strand starting at position 2874 of SEQ ID NO: 1880531
uguuuaguacuuuaaccuu

SEQ ID NO: 1974133 - RNA, 19 nt, Artificial Sequence
  Description of Artificial Sequence: Synthetic oligonucleotide
  Antisense strand to SEQ ID NO: 1974132
aagguuaaaguacuaaaca

SEQ ID NO: 1974134 - RNA, 19 nt, Artificial Sequence
  Description of Artificial Sequence: Synthetic oligonucleotide
  Sense strand starting at position 3098 of SEQ ID NO: 1880531
cuaugaaucugagcuauca

SEQ ID NO: 1974135 - RNA, 19 nt, Artificial Sequence
  Description of Artificial Sequence: Synthetic oligonucleotide
  Antisense strand to SEQ ID NO: 1974134
ugauagcucagauucauag

SEQ ID NO: 1974136 - RNA, 19 nt, Artificial Sequence
  Description of Artificial Sequence: Synthetic oligonucleotide
  Sense strand starting at position 3173 of SEQ ID NO: 1880531
uugcccuugauuuguguga

SEQ ID NO: 1974137 - RNA, 19 nt, Artificial Sequence
  Description of Artificial Sequence: Synthetic oligonucleotide
  Antisense strand to SEQ ID NO: 1974136
ucacacaaaucaagggcaa

SEQ ID NO: 1974138 - RNA, 19 nt, Artificial Sequence
  Description of Artificial Sequence: Synthetic oligonucleotide
  Sense strand starting at position 3174 of SEQ ID NO: 1880531
ugcccuugauuugugugau

SEQ ID NO: 1974139 - RNA, 19 nt, Artificial Sequence
  Description of Artificial Sequence: Synthetic oligonucleotide
  Antisense strand to SEQ ID NO: 1974138
aucacacaaaucaagggca

SEQ ID NO: 1974140 - RNA, 19 nt, Artificial Sequence
  Description of Artificial Sequence: Synthetic oligonucleotide
  Sense strand starting at position 3177 of SEQ ID NO: 1880531
ccuugauuugugugaucuc

SEQ ID NO: 1974141 - RNA, 19 nt, Artificial Sequence
  Description of Artificial Sequence: Synthetic oligonucleotide
  Antisense strand to SEQ ID NO: 1974140
gagaucacacaaaucaagg

SEQ ID NO: 1974142 - RNA, 19 nt, Artificial Sequence
  Description of Artificial Sequence: Synthetic oligonucleotide
  Sense strand starting at position 3325 of SEQ ID NO: 1880531
gaaggagguuuaguacauu

SEQ ID NO: 1974143 - RNA, 19 nt, Artificial Sequence
  Description of Artificial Sequence: Synthetic oligonucleotide
  Antisense strand to SEQ ID NO: 1974142
aauguacuaaaccuccuuc

SEQ ID NO: 1974144 - RNA, 19 nt, Artificial Sequence
  Description of Artificial Sequence: Synthetic oligonucleotide
  Sense strand starting at position 3328 of SEQ ID NO: 1880531
ggagguuuaguacauucuu

SEQ ID NO: 1974145 - RNA, 19 nt, Artificial Sequence
  Description of Artificial Sequence: Synthetic oligonucleotide
  Antisense strand to SEQ ID NO: 1974144
aagaauguacuaaaccucc

SEQ ID NO: 1974146 - RNA, 19 nt, Artificial Sequence
  Description of Artificial Sequence: Synthetic oligonucleotide
  Sense strand starting at position 3415 of SEQ ID NO: 1880531
ccuucuaaugucuaugaug

SEQ ID NO: 1974147 - RNA, 19 nt, Artificial Sequence
  Description of Artificial Sequence: Synthetic oligonucleotide
  Antisense strand to SEQ ID NO: 1974146
caucauagacauuagaagg

SEQ ID NO: 1974148 - RNA, 19 nt, Artificial Sequence
  Description of Artificial Sequence: Synthetic oligonucleotide
  Sense strand starting at position 3497 of SEQ ID NO: 1880531
cuguuauaacaauguacca

SEQ ID NO: 1974149 - RNA, 19 nt, Artificial Sequence
  Description of Artificial Sequence: Synthetic oligonucleotide
  Antisense strand to SEQ ID NO: 1974148
ugguacauuguuauaacag

SEQ ID NO: 1974150 - RNA, 19 nt, Artificial Sequence
  Description of Artificial Sequence: Synthetic oligonucleotide
  Sense strand starting at position 3524 of SEQ ID NO: 1880531
guggcuuagaaauaacgua

SEQ ID NO: 1974151 - RNA, 19 nt, Artificial Sequence
  Description of Artificial Sequence: Synthetic oligonucleotide
  Antisense strand to SEQ ID NO: 1974150
uacguuauuucuaagccac

SEQ ID NO: 1974152 - RNA, 19 nt, Artificial Sequence
  Description of Artificial Sequence: Synthetic oligonucleotide
  Sense strand starting at position 3586 of SEQ ID NO: 1880531
acaccagcauggucagauu

SEQ ID NO: 1974153 - RNA, 19 nt, Artificial Sequence
  Description of Artificial Sequence: Synthetic oligonucleotide
  Antisense strand to SEQ ID NO: 1974152
aaucugaccaugcuggugu

SEQ ID NO: 1974154 - RNA, 19 nt, Artificial Sequence
  Description of Artificial Sequence: Synthetic oligonucleotide
  Sense strand starting at position 3673 of SEQ ID NO: 1880531
cccuguggucucuauagga

SEQ ID NO: 1974155 - RNA, 19 nt, Artificial Sequence
  Description of Artificial Sequence: Synthetic oligonucleotide
  Antisense strand to SEQ ID NO: 1974154
uccuauagagaccacaggg

SEQ ID NO: 1974156 - RNA, 19 nt, Artificial Sequence
  Description of Artificial Sequence: Synthetic oligonucleotide
  Sense strand starting at position 3677 of SEQ ID NO: 1880531
guggucucuauaggaacau

SEQ ID NO: 1974157 - RNA, 19 nt, Artificial Sequence
  Description of Artificial Sequence: Synthetic oligonucleotide
  Antisense strand to SEQ ID NO: 1974156
auguuccuauagagaccac

SEQ ID NO: 1974158 - RNA, 19 nt, Artificial Sequence
  Description of Artificial Sequence: Synthetic oligonucleotide
  Sense strand starting at position 3689 of SEQ ID NO: 1880531
ggaacauuaucucccuuga

SEQ ID NO: 1974159 - RNA, 19 nt, Artificial Sequence
  Description of Artificial Sequence: Synthetic oligonucleotide
  Antisense strand to SEQ ID NO: 1974158
ucaagggagauaauguucc

SEQ ID NO: 1974160 - RNA, 19 nt, Artificial Sequence
  Description of Artificial Sequence: Synthetic oligonucleotide
  Sense strand starting at position 3758 of SEQ ID NO: 1880531
augccaucacacugaagau

SEQ ID NO: 1974161 - RNA, 19 nt, Artificial Sequence
  Description of Artificial Sequence: Synthetic oligonucleotide
  Antisense strand to SEQ ID NO: 1974160
aucuucagugugauggcau

SEQ ID NO: 1974162 - RNA, 19 nt, Artificial Sequence
  Description of Artificial Sequence: Synthetic oligonucleotide
  Sense strand starting at position 3771 of SEQ ID NO: 1880531
gaagauuaggauugcauau

SEQ ID NO: 1974163 - RNA, 19 nt, Artificial Sequence
  Description of Artificial Sequence: Synthetic oligonucleotide
  Antisense strand to SEQ ID NO: 1974162
auaugcaauccuaaucuuc

SEQ ID NO: 1974164 - RNA, 19 nt, Artificial Sequence
  Description of Artificial Sequence: Synthetic oligonucleotide
  Sense strand starting at position 3895 of SEQ ID NO: 1880531
ucuguucuacuagauuaga

SEQ ID NO: 1974165 - RNA, 19 nt, Artificial Sequence
  Description of Artificial Sequence: Synthetic oligonucleotide
  Antisense strand to SEQ ID NO: 1974164
ucuaaucuaguagaacaga

SEQ ID NO: 1974166 - RNA, 19 nt, Artificial Sequence
  Description of Artificial Sequence: Synthetic oligonucleotide
  Sense strand starting at position 3898 of SEQ ID NO: 1880531
guucuacuagauuagagca

SEQ ID NO: 1974167 - RNA, 19 nt, Artificial Sequence
  Description of Artificial Sequence: Synthetic oligonucleotide
  Antisense strand to SEQ ID NO: 1974166
ugcucuaaucuaguagaac

SEQ ID NO: 1974168 - RNA, 19 nt, Artificial Sequence
  Description of Artificial Sequence: Synthetic oligonucleotide
  Sense strand starting at position 21 of SEQ ID NO: 1880530
uuuggugucauuugagguu

SEQ ID NO: 1974169 - RNA, 19 nt, Artificial Sequence
  Description of Artificial Sequence: Synthetic oligonucleotide
  Antisense strand to SEQ ID NO: 1974168
aaccucaaaugacaccaaa

SEQ ID NO: 1974170 - RNA, 19 nt, Artificial Sequence
  Description of Artificial Sequence: Synthetic oligonucleotide
  Sense strand starting at position 39 of SEQ ID NO: 1880530
ucaauucugagagguggua

SEQ ID NO: 1974171 - RNA, 19 nt, Artificial Sequence
  Description of Artificial Sequence: Synthetic oligonucleotide
  Antisense strand to SEQ ID NO: 1974170
uaccaccucucagaauuga

SEQ ID NO: 1974172 - RNA, 19 nt, Artificial Sequence
  Description of Artificial Sequence: Synthetic oligonucleotide
  Sense strand starting at position 145 of SEQ ID NO: 1880530
caagacugaguaugugaau

SEQ ID NO: 1974173 - RNA, 19 nt, Artificial Sequence
  Description of Artificial Sequence: Synthetic oligonucleotide
  Antisense strand to SEQ ID NO: 1974172
auucacauacucagucuug

SEQ ID NO: 1974174 - RNA, 19 nt, Artificial Sequence
  Description of Artificial Sequence: Synthetic oligonucleotide
  Sense strand starting at position 146 of SEQ ID NO: 1880530
aagacugaguaugugaaua

SEQ ID NO: 1974175 - RNA, 19 nt, Artificial Sequence
  Description of Artificial Sequence: Synthetic oligonucleotide
  Antisense strand to SEQ ID NO: 1974174
uauucacauacucagucuu

SEQ ID NO: 1974176 - RNA, 19 nt, Artificial Sequence
  Description of Artificial Sequence: Synthetic oligonucleotide
  Sense strand starting at position 178 of SEQ ID NO: 1880530
aggaauuaagauugcuaau

SEQ ID NO: 1974177 - RNA, 19 nt, Artificial Sequence
  Description of Artificial Sequence: Synthetic oligonucleotide
  Antisense strand to SEQ ID NO: 1974176
auuagcaaucuuaauuccu

SEQ ID NO: 1974178 - RNA, 19 nt, Artificial Sequence
  Description of Artificial Sequence: Synthetic oligonucleotide
  Sense strand starting at position 190 of SEQ ID NO: 1880530
ugcuaauggaauuaagguu

SEQ ID NO: 1974179 - RNA, 19 nt, Artificial Sequence
  Description of Artificial Sequence: Synthetic oligonucleotide
  Antisense strand to SEQ ID NO: 1974178
aaccuuaauuccauuagca

SEQ ID NO: 1974180 - RNA, 19 nt, Artificial Sequence
  Description of Artificial Sequence: Synthetic oligonucleotide
  Sense strand starting at position 251 of SEQ ID NO: 1880530
ccuagaugggcccaaugua

SEQ ID NO: 1974181 - RNA, 19 nt, Artificial Sequence
  Description of Artificial Sequence: Synthetic oligonucleotide
  Antisense strand to SEQ ID NO: 1974180
uacauugggcccaucuagg

SEQ ID NO: 1974182 - RNA, 19 nt, Artificial Sequence
  Description of Artificial Sequence: Synthetic oligonucleotide
  Sense strand starting at position 324 of SEQ ID NO: 1880530
gagguuugaagauguuaca

SEQ ID NO: 1974183 - RNA, 19 nt, Artificial Sequence
  Description of Artificial Sequence: Synthetic oligonucleotide
  Antisense strand to SEQ ID NO: 1974182
uguaacaucuucaaaccuc

SEQ ID NO: 1974184 - RNA, 19 nt, Artificial Sequence
  Description of Artificial Sequence: Synthetic oligonucleotide
  Sense strand starting at position 393 of SEQ ID NO: 1880530
gcaagaacauagguuguga

SEQ ID NO: 1974185 - RNA, 19 nt, Artificial Sequence
  Description of Artificial Sequence: Synthetic oligonucleotide
  Antisense strand to SEQ ID NO: 1974184
ucacaaccuauguucuugc

SEQ ID NO: 1974186 - RNA, 19 nt, Artificial Sequence
  Description of Artificial Sequence: Synthetic oligonucleotide
  Sense strand starting at position 465 of SEQ ID NO: 1880530
ugagauucucuuuggauua

SEQ ID NO: 1974187 - RNA, 19 nt, Artificial Sequence
  Description of Artificial Sequence: Synthetic oligonucleotide
  Antisense strand to SEQ ID NO: 1974186
uaauccaaagagaaucuca

SEQ ID NO: 1974188 - RNA, 19 nt, Artificial Sequence
  Description of Artificial Sequence: Synthetic oligonucleotide
  Sense strand starting at position 488 of SEQ ID NO: 1880530
ccuccaucacuguaaggua

SEQ ID NO: 1974189 - RNA, 19 nt, Artificial Sequence
  Description of Artificial Sequence: Synthetic oligonucleotide
  Antisense strand to SEQ ID NO: 1974188
uaccuuacagugauggagg

SEQ ID NO: 1974190 - RNA, 19 nt, Artificial Sequence
  Description of Artificial Sequence: Synthetic oligonucleotide
  Sense strand starting at position 538 of SEQ ID NO: 1880530
uguggugauuugcuggcaa

SEQ ID NO: 1974191 - RNA, 19 nt, Artificial Sequence
  Description of Artificial Sequence: Synthetic oligonucleotide
  Antisense strand to SEQ ID NO: 1974190
uugccagcaaaucaccaca

SEQ ID NO: 1974192 - RNA, 19 nt, Artificial Sequence
  Description of Artificial Sequence: Synthetic oligonucleotide
  Sense strand starting at position 647 of SEQ ID NO: 1880530
ucaguuugccaucaaagau

SEQ ID NO: 1974193 - RNA, 19 nt, Artificial Sequence
  Description of Artificial Sequence: Synthetic oligonucleotide
  Antisense strand to SEQ ID NO: 1974192
aucuuugauggcaaacuga

SEQ ID NO: 1974194 - RNA, 19 nt, Artificial Sequence
  Description of Artificial Sequence: Synthetic oligonucleotide
  Sense strand starting at position 768 of SEQ ID NO: 1880530
gcuuaaccgggagaguaaa

SEQ ID NO: 1974195 - RNA, 19 nt, Artificial Sequence
  Description of Artificial Sequence: Synthetic oligonucleotide
  Antisense strand to SEQ ID NO: 1974194
uuuacucucccgguuaagc

SEQ ID NO: 1974196 - RNA, 19 nt, Artificial Sequence
  Description of Artificial Sequence: Synthetic oligonucleotide
  Sense strand starting at position 793 of SEQ ID NO: 1880530
guagauagaaucgggcaaa

SEQ ID NO: 1974197 - RNA, 19 nt, Artificial Sequence
  Description of Artificial Sequence: Synthetic oligonucleotide
  Antisense strand to SEQ ID NO: 1974196
uuugcccgauucuaucuac

SEQ ID NO: 1974198 - RNA, 19 nt, Artificial Sequence
  Description of Artificial Sequence: Synthetic oligonucleotide
  Sense strand starting at position 922 of SEQ ID NO: 1880530
gguauugucacugagauag

SEQ ID NO: 1974199 - RNA, 19 nt, Artificial Sequence
  Description of Artificial Sequence: Synthetic oligonucleotide
  Antisense strand to SEQ ID NO: 1974198
cuaucucagugacaauacc

SEQ ID NO: 1974200 - RNA, 19 nt, Artificial Sequence
  Description of Artificial Sequence: Synthetic oligonucleotide
  Sense strand starting at position 1030 of SEQ ID NO: 1880530
gggauauccauauggaagc

SEQ ID NO: 1974201 - RNA, 19 nt, Artificial Sequence
  Description of Artificial Sequence: Synthetic oligonucleotide
  Antisense strand to SEQ ID NO: 1974200
gcuuccauauggauauccc

SEQ ID NO: 1974202 - RNA, 19 nt, Artificial Sequence
  Description of Artificial Sequence: Synthetic oligonucleotide
  Sense strand starting at position 1268 of SEQ ID NO: 1880530
guauauggaaguuaguaga

SEQ ID NO: 1974203 - RNA, 19 nt, Artificial Sequence
  Description of Artificial Sequence: Synthetic oligonucleotide
  Antisense strand to SEQ ID NO: 1974202
ucuacuaacuuccauauac

SEQ ID NO: 1974204 - RNA, 19 nt, Artificial Sequence
  Description of Artificial Sequence: Synthetic oligonucleotide
  Sense strand starting at position 1292 of SEQ ID NO: 1880530
aagaaaugguaacuguuau

SEQ ID NO: 1974205 - RNA, 19 nt, Artificial Sequence
  Description of Artificial Sequence: Synthetic oligonucleotide
  Antisense strand to SEQ ID NO: 1974204
auaacaguuaccauuucuu

SEQ ID NO: 1974206 - RNA, 19 nt, Artificial Sequence
  Description of Artificial Sequence: Synthetic oligonucleotide
  Sense strand starting at position 1313 of SEQ ID NO: 1880530
cuagucgggccagaaauaa

SEQ ID NO: 1974207 - RNA, 19 nt, Artificial Sequence
  Description of Artificial Sequence: Synthetic oligonucleotide
  Antisense strand to SEQ ID NO: 1974206
uuauuucuggcccgacuag

SEQ ID NO: 1974208 - RNA, 19 nt, Artificial Sequence
  Description of Artificial Sequence: Synthetic oligonucleotide
  Sense strand starting at position 1358 of SEQ ID NO: 1880530
guaugaaguuaagucuaaa

SEQ ID NO: 1974209 - RNA, 19 nt, Artificial Sequence
  Description of Artificial Sequence: Synthetic oligonucleotide
  Antisense strand to SEQ ID NO: 1974208
uuuagacuuaacuucauac

SEQ ID NO: 1974210 - RNA, 19 nt, Artificial Sequence
  Description of Artificial Sequence: Synthetic oligonucleotide
  Sense strand starting at position 1511 of SEQ ID NO: 1880530
cgucaagcacuuuauaaau

SEQ ID NO: 1974211 - RNA, 19 nt, Artificial Sequence
  Description of Artificial Sequence: Synthetic oligonucleotide
  Antisense strand to SEQ ID NO: 1974210
auuuauaaagugcuugacg

SEQ ID NO: 1974212 - RNA, 19 nt, Artificial Sequence
  Description of Artificial Sequence: Synthetic oligonucleotide
  Sense strand starting at position 2552 of SEQ ID NO: 1880530
auggaaguagauuggucua

SEQ ID NO: 1974213 - RNA, 19 nt, Artificial Sequence
  Description of Artificial Sequence: Synthetic oligonucleotide
  Antisense strand to SEQ ID NO: 1974212
uagaccaaucuacuuccau

SEQ ID NO: 1974214 - RNA, 19 nt, Artificial Sequence
  Description of Artificial Sequence: Synthetic oligonucleotide
  Sense strand starting at position 2554 of SEQ ID NO: 1880530
ggaaguagauuggucuaaa

SEQ ID NO: 1974215 - RNA, 19 nt, Artificial Sequence
  Description of Artificial Sequence: Synthetic oligonucleotide
  Antisense strand to SEQ ID NO: 1974214
uuuagaccaaucuacuucc

SEQ ID NO: 1974216 - RNA, 19 nt, Artificial Sequence
  Description of Artificial Sequence: Synthetic oligonucleotide
  Sense strand starting at position 2555 of SEQ ID NO: 1880530
gaaguagauuggucuaaac

SEQ ID NO: 1974217 - RNA, 19 nt, Artificial Sequence
  Description of Artificial Sequence: Synthetic oligonucleotide
  Antisense strand to SEQ ID NO: 1974216
guuuagaccaaucuacuuc

SEQ ID NO: 1974218 - RNA, 19 nt, Artificial Sequence
  Description of Artificial Sequence: Synthetic oligonucleotide
  Sense strand starting at position 2807 of SEQ ID NO: 1880530
acucaaaggcugcaucaua

SEQ ID NO: 1974219 - RNA, 19 nt, Artificial Sequence
  Description of Artificial Sequence: Synthetic oligonucleotide
  Antisense strand to SEQ ID NO: 1974218
uaugaugcagccuuugagu

SEQ ID NO: 1974220 - RNA, 19 nt, Artificial Sequence
  Description of Artificial Sequence: Synthetic oligonucleotide
  Sense strand starting at position 2876 of SEQ ID NO: 1880530
ccacaucugaccgaaggua

SEQ ID NO: 1974221 - RNA, 19 nt, Artificial Sequence
  Description of Artificial Sequence: Synthetic oligonucleotide
  Antisense strand to SEQ ID NO: 1974220
uaccuucggucagaugugg

SEQ ID NO: 1974222 - RNA, 19 nt, Artificial Sequence
  Description of Artificial Sequence: Synthetic oligonucleotide
  Sense strand starting at position 2923 of SEQ ID NO: 1880530
aucuuaaugguuuggacau

SEQ ID NO: 1974223 - RNA, 19 nt, Artificial Sequence
  Description of Artificial Sequence: Synthetic oligonucleotide
  Antisense strand to SEQ ID NO: 1974222
auguccaaaccauuaagau

SEQ ID NO: 1974224 - RNA, 19 nt, Artificial Sequence
  Description of Artificial Sequence: Synthetic oligonucleotide
  Sense strand starting at position 3065 of SEQ ID NO: 1880530
uguuuagaagcugaaaggu

SEQ ID NO: 1974225 - RNA, 19 nt, Artificial Sequence
  Description of Artificial Sequence: Synthetic oligonucleotide
  Antisense strand to SEQ ID NO: 1974224
accuuucagcuucuaaaca

SEQ ID NO: 1974226 - RNA, 19 nt, Artificial Sequence
  Description of Artificial Sequence: Synthetic oligonucleotide
  Sense strand starting at position 3248 of SEQ ID NO: 1880530
uguuuaguacuuuaaccuu

SEQ ID NO: 1974227 - RNA, 19 nt, Artificial Sequence
  Description of Artificial Sequence: Synthetic oligonucleotide
  Antisense strand to SEQ ID NO: 1974226
aagguuaaaguacuaaaca

SEQ ID NO: 1974228 - RNA, 19 nt, Artificial Sequence
  Description of Artificial Sequence: Synthetic oligonucleotide
  Sense strand starting at position 3472 of SEQ ID NO: 1880530
cuaugaaucugagcuauca

SEQ ID NO: 1974229 - RNA, 19 nt, Artificial Sequence
  Description of Artificial Sequence: Synthetic oligonucleotide
  Antisense strand to SEQ ID NO: 1974228
ugauagcucagauucauag

SEQ ID NO: 1974230 - RNA, 19 nt, Artificial Sequence
  Description of Artificial Sequence: Synthetic oligonucleotide
  Sense strand starting at position 3547 of SEQ ID NO: 1880530
uugcccuugauuuguguga

SEQ ID NO: 1974231 - RNA, 19 nt, Artificial Sequence
  Description of Artificial Sequence: Synthetic oligonucleotide
  Antisense strand to SEQ ID NO: 1974230
ucacacaaaucaagggcaa

SEQ ID NO: 1974232 - RNA, 19 nt, Artificial Sequence
  Description of Artificial Sequence: Synthetic oligonucleotide
  Sense strand starting at position 3548 of SEQ ID NO: 1880530
ugcccuugauuugugugau

SEQ ID NO: 1974233 - RNA, 19 nt, Artificial Sequence
  Description of Artificial Sequence: Synthetic oligonucleotide
  Antisense strand to SEQ ID NO: 1974232
aucacacaaaucaagggca

SEQ ID NO: 1974234 - RNA, 19 nt, Artificial Sequence
  Description of Artificial Sequence: Synthetic oligonucleotide
  Sense strand starting at position 3551 of SEQ ID NO: 1880530
ccuugauuugugugaucuc

SEQ ID NO: 1974235 - RNA, 19 nt, Artificial Sequence
  Description of Artificial Sequence: Synthetic oligonucleotide
  Antisense strand to SEQ ID NO: 1974234
gagaucacacaaaucaagg

SEQ ID NO: 1974236 - RNA, 19 nt, Artificial Sequence
  Description of Artificial Sequence: Synthetic oligonucleotide
  Sense strand starting at position 3699 of SEQ ID NO: 1880530
gaaggagguuuaguacauu

SEQ ID NO: 1974237 - RNA, 19 nt, Artificial Sequence
  Description of Artificial Sequence: Synthetic oligonucleotide
  Antisense strand to SEQ ID NO: 1974236
aauguacuaaaccuccuuc

SEQ ID NO: 1974238 - RNA, 19 nt, Artificial Sequence
  Description of Artificial Sequence: Synthetic oligonucleotide
  Sense strand starting at position 3702 of SEQ ID NO: 1880530
ggagguuuaguacauucuu

SEQ ID NO: 1974239 - RNA, 19 nt, Artificial Sequence
  Description of Artificial Sequence: Synthetic oligonucleotide
  Antisense strand to SEQ ID NO: 1974238
aagaauguacuaaaccucc

SEQ ID NO: 1974240 - RNA, 19 nt, Artificial Sequence
  Description of Artificial Sequence: Synthetic oligonucleotide
  Sense strand starting at position 3789 of SEQ ID NO: 1880530
ccuucuaaugucuaugaug

SEQ ID NO: 1974241 - RNA, 19 nt, Artificial Sequence
  Description of Artificial Sequence: Synthetic oligonucleotide
  Antisense strand to SEQ ID NO: 1974240
caucauagacauuagaagg

SEQ ID NO: 1974242 - RNA, 19 nt, Artificial Sequence
  Description of Artificial Sequence: Synthetic oligonucleotide
  Sense strand starting at position 3871 of SEQ ID NO: 1880530
cuguuauaacaauguacca

SEQ ID NO: 1974243 - RNA, 19 nt, Artificial Sequence
  Description of Artificial Sequence: Synthetic oligonucleotide
  Antisense strand to SEQ ID NO: 1974242
ugguacauuguuauaacag

SEQ ID NO: 1974244 - RNA, 19 nt, Artificial Sequence
  Description of Artificial Sequence: Synthetic oligonucleotide
  Sense strand starting at position 3898 of SEQ ID NO: 1880530
guggcuuagaaauaacgua

SEQ ID NO: 1974245 - RNA, 19 nt, Artificial Sequence
  Description of Artificial Sequence: Synthetic oligonucleotide
  Antisense strand to SEQ ID NO: 1974244
uacguuauuucuaagccac

SEQ ID NO: 1974246 - RNA, 19 nt, Artificial Sequence
  Description of Artificial Sequence: Synthetic oligonucleotide
  Sense strand starting at position 3960 of SEQ ID NO: 1880530
acaccagcauggucagauu

SEQ ID NO: 1974247 - RNA, 19 nt, Artificial Sequence
  Description of Artificial Sequence: Synthetic oligonucleotide
  Antisense strand to SEQ ID NO: 1974246
aaucugaccaugcuggugu

SEQ ID NO: 1974248 - RNA, 19 nt, Artificial Sequence
  Description of Artificial Sequence: Synthetic oligonucleotide
  Sense strand starting at position 794 of SEQ ID NO: 1880532
auggaaguagauuggucua

SEQ ID NO: 1974249 - RNA, 19 nt, Artificial Sequence
  Description of Artificial Sequence: Synthetic oligonucleotide
  Antisense strand to SEQ ID NO: 1974248
uagaccaaucuacuuccau

SEQ ID NO: 1974250 - RNA, 19 nt, Artificial Sequence
  Description of Artificial Sequence: Synthetic oligonucleotide
  Sense strand starting at position 796 of SEQ ID NO: 1880532
ggaaguagauuggucuaaa

SEQ ID NO: 1974251 - RNA, 19 nt, Artificial Sequence
  Description of Artificial Sequence: Synthetic oligonucleotide
  Antisense strand to SEQ ID NO: 1974250
uuuagaccaaucuacuucc

SEQ ID NO: 1974252 - RNA, 19 nt, Artificial Sequence
  Description of Artificial Sequence: Synthetic oligonucleotide
  Sense strand starting at position 797 of SEQ ID NO: 1880532
gaaguagauuggucuaaac

SEQ ID NO: 1974253 - RNA, 19 nt, Artificial Sequence
  Description of Artificial Sequence: Synthetic oligonucleotide
  Antisense strand to SEQ ID NO: 1974252
guuuagaccaaucuacuuc

SEQ ID NO: 1974254 - RNA, 19 nt, Artificial Sequence
  Description of Artificial Sequence: Synthetic oligonucleotide
  Sense strand starting at position 1049 of SEQ ID NO: 1880532
acucaaaggcugcaucaua

SEQ ID NO: 1974255 - RNA, 19 nt, Artificial Sequence
  Description of Artificial Sequence: Synthetic oligonucleotide
  Antisense strand to SEQ ID NO: 1974254
uaugaugcagccuuugagu

SEQ ID NO: 1974256 - RNA, 19 nt, Artificial Sequence
  Description of Artificial Sequence: Synthetic oligonucleotide
  Sense strand starting at position 1118 of SEQ ID NO: 1880532
ccacaucugaccgaaggua

SEQ ID NO: 1974257 - RNA, 19 nt, Artificial Sequence
  Description of Artificial Sequence: Synthetic oligonucleotide
  Antisense strand to SEQ ID NO: 1974256
uaccuucggucagaugugg

SEQ ID NO: 1974258 - RNA, 19 nt, Artificial Sequence
  Description of Artificial Sequence: Synthetic oligonucleotide
  Sense strand starting at position 1165 of SEQ ID NO: 1880532
aucuuaaugguuuggacau

SEQ ID NO: 1974259 - RNA, 19 nt, Artificial Sequence
  Description of Artificial Sequence: Synthetic oligonucleotide
  Antisense strand to SEQ ID NO: 1974258
auguccaaaccauuaagau

SEQ ID NO: 1974260 - RNA, 19 nt, Artificial Sequence
  Description of Artificial Sequence: Synthetic oligonucleotide
  Sense strand starting at position 1307 of SEQ ID NO: 1880532
uguuuagaagcugaaaggu

SEQ ID NO: 1974261 - RNA, 19 nt, Artificial Sequence
  Description of Artificial Sequence: Synthetic oligonucleotide
  Antisense strand to SEQ ID NO: 1974260
accuuucagcuucuaaaca

SEQ ID NO: 1974262 - RNA, 19 nt, Artificial Sequence
  Description of Artificial Sequence: Synthetic oligonucleotide
  Sense strand starting at position 1714 of SEQ ID NO: 1880532
cuaugaaucugagcuauca

SEQ ID NO: 1974263 - RNA, 19 nt, Artificial Sequence
  Description of Artificial Sequence: Synthetic oligonucleotide
  Antisense strand to SEQ ID NO: 1974262
ugauagcucagauucauag

SEQ ID NO: 1974264 - RNA, 19 nt, Artificial Sequence
  Description of Artificial Sequence: Synthetic oligonucleotide
  Sense strand starting at position 1789 of SEQ ID NO: 1880532
uugcccuugauuuguguga

SEQ ID NO: 1974265 - RNA, 19 nt, Artificial Sequence
  Description of Artificial Sequence: Synthetic oligonucleotide
  Antisense strand to SEQ ID NO: 1974264
ucacacaaaucaagggcaa

SEQ ID NO: 1974266 - RNA, 19 nt, Artificial Sequence
  Description of Artificial Sequence: Synthetic oligonucleotide
  Sense strand starting at position 1790 of SEQ ID NO: 1880532
ugcccuugauuugugugau

SEQ ID NO: 1974267 - RNA, 19 nt, Artificial Sequence
  Description of Artificial Sequence: Synthetic oligonucleotide
  Antisense strand to SEQ ID NO: 1974266
aucacacaaaucaagggca

SEQ ID NO: 1974268 - RNA, 19 nt, Artificial Sequence
  Description of Artificial Sequence: Synthetic oligonucleotide
  Sense strand starting at position 1793 of SEQ ID NO: 1880532
ccuugauuugugugaucuc

SEQ ID NO: 1974269 - RNA, 19 nt, Artificial Sequence
  Description of Artificial Sequence: Synthetic oligonucleotide
  Antisense strand to SEQ ID NO: 1974268
gagaucacacaaaucaagg

SEQ ID NO: 1974270 - RNA, 19 nt, Artificial Sequence
  Description of Artificial Sequence: Synthetic oligonucleotide
  Sense strand starting at position 1941 of SEQ ID NO: 1880532
gaaggagguuuaguacauu

SEQ ID NO: 1974271 - RNA, 19 nt, Artificial Sequence
  Description of Artificial Sequence: Synthetic oligonucleotide
  Antisense strand to SEQ ID NO: 1974270
aauguacuaaaccuccuuc

SEQ ID NO: 1974272 - RNA, 19 nt, Artificial Sequence
  Description of Artificial Sequence: Synthetic oligonucleotide
  Sense strand starting at position 1944 of SEQ ID NO: 1880532
ggagguuuaguacauucuu

SEQ ID NO: 1974273 - RNA, 19 nt, Artificial Sequence
  Description of Artificial Sequence: Synthetic oligonucleotide
  Antisense strand to SEQ ID NO: 1974272
aagaauguacuaaaccucc

SEQ ID NO: 1974274 - RNA, 19 nt, Artificial Sequence
  Description of Artificial Sequence: Synthetic oligonucleotide
  Sense strand starting at position 2031 of SEQ ID NO: 1880532
ccuucuaaugucuaugaug

SEQ ID NO: 1974275 - RNA, 19 nt, Artificial Sequence
  Description of Artificial Sequence: Synthetic oligonucleotide
  Antisense strand to SEQ ID NO: 1974274
caucauagacauuagaagg

SEQ ID NO: 1974276 - RNA, 19 nt, Artificial Sequence
  Description of Artificial Sequence: Synthetic oligonucleotide
  Sense strand starting at position 2140 of SEQ ID NO: 1880532
guggcuuagaaauaacgua

SEQ ID NO: 1974277 - RNA, 19 nt, Artificial Sequence
  Description of Artificial Sequence: Synthetic oligonucleotide
  Antisense strand to SEQ ID NO: 1974276
uacguuauuucuaagccac

SEQ ID NO: 1974278 - RNA, 19 nt, Artificial Sequence
  Description of Artificial Sequence: Synthetic oligonucleotide
  Sense strand starting at position 2289 of SEQ ID NO: 1880532
cccuguggucucuauagga

SEQ ID NO: 1974279 - RNA, 19 nt, Artificial Sequence
  Description of Artificial Sequence: Synthetic oligonucleotide
  Antisense strand to SEQ ID NO: 1974278
uccuauagagaccacaggg

SEQ ID NO: 1974280 - RNA, 19 nt, Artificial Sequence
  Description of Artificial Sequence: Synthetic oligonucleotide
  Sense strand starting at position 2293 of SEQ ID NO: 1880532
guggucucuauaggaacau

SEQ ID NO: 1974281 - RNA, 19 nt, Artificial Sequence
  Description of Artificial Sequence: Synthetic oligonucleotide
  Antisense strand to SEQ ID NO: 1974280
auguuccuauagagaccac

SEQ ID NO: 1974282 - RNA, 19 nt, Artificial Sequence
  Description of Artificial Sequence: Synthetic oligonucleotide
  Sense strand starting at position 2305 of SEQ ID NO: 1880532
ggaacauuaucucccuuga

SEQ ID NO: 1974283 - RNA, 19 nt, Artificial Sequence
  Description of Artificial Sequence: Synthetic oligonucleotide
  Antisense strand to SEQ ID NO: 1974282
ucaagggagauaauguucc

SEQ ID NO: 1974284 - RNA, 19 nt, Artificial Sequence
  Description of Artificial Sequence: Synthetic oligonucleotide
  Sense strand starting at position 2374 of SEQ ID NO: 1880532
augccaucacacugaagau

SEQ ID NO: 1974285 - RNA, 19 nt, Artificial Sequence
  Description of Artificial Sequence: Synthetic oligonucleotide
  Antisense strand to SEQ ID NO: 1974284
aucuucagugugauggcau

SEQ ID NO: 1974286 - RNA, 19 nt, Artificial Sequence
  Description of Artificial Sequence: Synthetic oligonucleotide
  Sense strand starting at position 2387 of SEQ ID NO: 1880532
gaagauuaggauugcauau

SEQ ID NO: 1974287 - RNA, 19 nt, Artificial Sequence
  Description of Artificial Sequence: Synthetic oligonucleotide
  Antisense strand to SEQ ID NO: 1974286
auaugcaauccuaaucuuc

SEQ ID NO: 1974288 - RNA, 19 nt, Artificial Sequence
  Description of Artificial Sequence: Synthetic oligonucleotide
  Sense strand starting at position 2511 of SEQ ID NO: 1880532
ucuguucuacuagauuaga

SEQ ID NO: 1974289 - RNA, 19 nt, Artificial Sequence
  Description of Artificial Sequence: Synthetic oligonucleotide
  Antisense strand to SEQ ID NO: 1974288
ucuaaucuaguagaacaga

SEQ ID NO: 1974290 - RNA, 19 nt, Artificial Sequence
  Description of Artificial Sequence: Synthetic oligonucleotide
  Sense strand starting at position 2514 of SEQ ID NO: 1880532
guucuacuagauuagagca

SEQ ID NO: 1974291 - RNA, 19 nt, Artificial Sequence
  Description of Artificial Sequence: Synthetic oligonucleotide
  Antisense strand to SEQ ID NO: 1974290
ugcucuaaucuaguagaac

SEQ ID NO: 1974292 - RNA, 19 nt, Artificial Sequence
  Description of Artificial Sequence: Synthetic oligonucleotide
  Sense strand starting at position 2862 of SEQ ID NO: 1880532
ucaugagguaaugguuaau

SEQ ID NO: 1974293 - RNA, 19 nt, Artificial Sequence
  Description of Artificial Sequence: Synthetic oligonucleotide
  Antisense strand to SEQ ID NO: 1974292
auuaaccauuaccucauga

SEQ ID NO: 1974294 - RNA, 19 nt, Artificial Sequence
  Description of Artificial Sequence: Synthetic oligonucleotide
  Sense strand starting at position 2865 of SEQ ID NO: 1880532
ugagguaaugguuaauagu

SEQ ID NO: 1974295 - RNA, 19 nt, Artificial Sequence
  Description of Artificial Sequence: Synthetic oligonucleotide
  Antisense strand to SEQ ID NO: 1974294
acuauuaaccauuaccuca

SEQ ID NO: 1974296 - RNA, 19 nt, Artificial Sequence
  Description of Artificial Sequence: Synthetic oligonucleotide
  Sense strand starting at position 2990 of SEQ ID NO: 1880532
agguuuggucuugagaaac

SEQ ID NO: 1974297 - RNA, 19 nt, Artificial Sequence
  Description of Artificial Sequence: Synthetic oligonucleotide
  Antisense strand to SEQ ID NO: 1974296
guuucucaagaccaaaccu

SEQ ID NO: 1974298 - RNA, 19 nt, Artificial Sequence
  Description of Artificial Sequence: Synthetic oligonucleotide
  Sense strand starting at position 3054 of SEQ ID NO: 1880532
gcuaaaugucaacaucuga

SEQ ID NO: 1974299 - RNA, 19 nt, Artificial Sequence
  Description of Artificial Sequence: Synthetic oligonucleotide
  Antisense strand to SEQ ID NO: 1974298
ucagauguugacauuuagc

SEQ ID NO: 1974300 - RNA, 19 nt, Artificial Sequence
  Description of Artificial Sequence: Synthetic oligonucleotide
  Sense strand starting at position 3114 of SEQ ID NO: 1880532
guuucccuuccaggaaaga

SEQ ID NO: 1974301 - RNA, 19 nt, Artificial Sequence
  Description of Artificial Sequence: Synthetic oligonucleotide
  Antisense strand to SEQ ID NO: 1974300
ucuuuccuggaagggaaac

SEQ ID NO: 1974302 - RNA, 19 nt, Artificial Sequence
  Description of Artificial Sequence: Synthetic oligonucleotide
  Sense strand starting at position 3192 of SEQ ID NO: 1880532
uugccuucucaggaaagca

SEQ ID NO: 1974303 - RNA, 19 nt, Artificial Sequence
  Description of Artificial Sequence: Synthetic oligonucleotide
  Antisense strand to SEQ ID NO: 1974302
ugcuuuccugagaaggcaa

SEQ ID NO: 1974304 - RNA, 19 nt, Artificial Sequence
  Description of Artificial Sequence: Synthetic oligonucleotide
  Sense strand starting at position 3200 of SEQ ID NO: 1880532
ucaggaaagcauugguaac

SEQ ID NO: 1974305 - RNA, 19 nt, Artificial Sequence
  Description of Artificial Sequence: Synthetic oligonucleotide
  Antisense strand to SEQ ID NO: 1974304
guuaccaaugcuuuccuga

SEQ ID NO: 1974306 - RNA, 19 nt, Artificial Sequence
  Description of Artificial Sequence: Synthetic oligonucleotide
  Sense strand starting at position 3210 of SEQ ID NO: 1880532
auugguaaccagggaaucu

SEQ ID NO: 1974307 - RNA, 19 nt, Artificial Sequence
  Description of Artificial Sequence: Synthetic oligonucleotide
  Antisense strand to SEQ ID NO: 1974306
agauucccugguuaccaau

SEQ ID NO: 1974308 - RNA, 19 nt, Artificial Sequence
  Description of Artificial Sequence: Synthetic oligonucleotide
  Sense strand starting at position 3236 of SEQ ID NO: 1880532
ugauuaggcuccuuggaag

SEQ ID NO: 1974309 - RNA, 19 nt, Artificial Sequence
  Description of Artificial Sequence: Synthetic oligonucleotide
  Antisense strand to SEQ ID NO: 1974308
cuuccaaggagccuaauca

SEQ ID NO: 1974310 - RNA, 19 nt, Artificial Sequence
  Description of Artificial Sequence: Synthetic oligonucleotide
  Sense strand starting at position 3242 of SEQ ID NO: 1880532
ggcuccuuggaaggaauua

SEQ ID NO: 1974311 - RNA, 19 nt, Artificial Sequence
  Description of Artificial Sequence: Synthetic oligonucleotide
  Antisense strand to SEQ ID NO: 1974310
uaauuccuuccaaggagcc

SEQ ID NO: 1974312 - RNA, 19 nt, Artificial Sequence
  Description of Artificial Sequence: Synthetic oligonucleotide
  Sense strand starting at position 3434 of SEQ ID NO: 1880532
caggaauuggacugcaacu

SEQ ID NO: 1974313 - RNA, 19 nt, Artificial Sequence
  Description of Artificial Sequence: Synthetic oligonucleotide
  Antisense strand to SEQ ID NO: 1974312
aguugcaguccaauuccug

SEQ ID NO: 1974314 - RNA, 19 nt, Artificial Sequence
  Description of Artificial Sequence: Synthetic oligonucleotide
  Sense strand starting at position 3498 of SEQ ID NO: 1880532
uagacaugucgggauuggu

SEQ ID NO: 1974315 - RNA, 19 nt, Artificial Sequence
  Description of Artificial Sequence: Synthetic oligonucleotide
  Antisense strand to SEQ ID NO: 1974314
accaaucccgacaugucua

SEQ ID NO: 1974316 - RNA, 19 nt, Artificial Sequence
  Description of Artificial Sequence: Synthetic oligonucleotide
  Sense strand starting at position 3521 of SEQ ID NO: 1880532
aguguuguugugguaguau

SEQ ID NO: 1974317 - RNA, 19 nt, Artificial Sequence
  Description of Artificial Sequence: Synthetic oligonucleotide
  Antisense strand to SEQ ID NO: 1974316
auacuaccacaacaacacu

SEQ ID NO: 1974318 - RNA, 19 nt, Artificial Sequence
  Description of Artificial Sequence: Synthetic oligonucleotide
  Sense strand starting at position 3620 of SEQ ID NO: 1880532
ugagccagugccugauuua

SEQ ID NO: 1974319 - RNA, 19 nt, Artificial Sequence
  Description of Artificial Sequence: Synthetic oligonucleotide
  Antisense strand to SEQ ID NO: 1974318
uaaaucaggcacuggcuca

SEQ ID NO: 1974320 - RNA, 19 nt, Artificial Sequence
  Description of Artificial Sequence: Synthetic oligonucleotide
  Sense strand starting at position 3623 of SEQ ID NO: 1880532
gccagugccugauuuaaca

SEQ ID NO: 1974321 - RNA, 19 nt, Artificial Sequence
  Description of Artificial Sequence: Synthetic oligonucleotide
  Antisense strand to SEQ ID NO: 1974320
uguuaaaucaggcacuggc

SEQ ID NO: 1974322 - RNA, 19 nt, Artificial Sequence
  Description of Artificial Sequence: Synthetic oligonucleotide
  Sense strand starting at position 3878 of SEQ ID NO: 1880532
ucucuaaugcagcagauau

SEQ ID NO: 1974323 - RNA, 19 nt, Artificial Sequence
  Description of Artificial Sequence: Synthetic oligonucleotide
  Antisense strand to SEQ ID NO: 1974322
auaucugcugcauuagaga

SEQ ID NO: 1974324 - RNA, 19 nt, Artificial Sequence
  Description of Artificial Sequence: Synthetic oligonucleotide
  Sense strand starting at position 3880 of SEQ ID NO: 1880532
ucuaaugcagcagauauaa

SEQ ID NO: 1974325 - RNA, 19 nt, Artificial Sequence
  Description of Artificial Sequence: Synthetic oligonucleotide
  Antisense strand to SEQ ID NO: 1974324
uuauaucugcugcauuaga

SEQ ID NO: 1974326 - RNA, 19 nt, Artificial Sequence
  Description of Artificial Sequence: Synthetic oligonucleotide
  Sense strand starting at position 3951 of SEQ ID NO: 1880532
guugccuaaagguguauuu

SEQ ID NO: 1974327 - RNA, 19 nt, Artificial Sequence
  Description of Artificial Sequence: Synthetic oligonucleotide
  Antisense strand to SEQ ID NO: 1974326
aaauacaccuuuaggcaac

SEQ ID NO: 1974328 - RNA, 19 nt, Artificial Sequence
  Description of Artificial Sequence: Synthetic oligonucleotide
  Sense strand starting at position 54 of SEQ ID NO: 1880533
uugugugaauucuuaggaa

SEQ ID NO: 1974329 - RNA, 19 nt, Artificial Sequence
  Description of Artificial Sequence: Synthetic oligonucleotide
  Antisense strand to SEQ ID NO: 1974328
uuccuaagaauucacacaa

SEQ ID NO: 1974330 - RNA, 19 nt, Artificial Sequence
  Description of Artificial Sequence: Synthetic oligonucleotide
  Sense strand starting at position 58 of SEQ ID NO: 1880533
gugaauucuuaggaauuua

SEQ ID NO: 1974331 - RNA, 19 nt, Artificial Sequence
  Description of Artificial Sequence: Synthetic oligonucleotide
  Antisense strand to SEQ ID NO: 1974330
uaaauuccuaagaauucac

SEQ ID NO: 1974332 - RNA, 19 nt, Artificial Sequence
  Description of Artificial Sequence: Synthetic oligonucleotide
  Sense strand starting at position 127 of SEQ ID NO: 1880533
ugaugagcaguggauugau

SEQ ID NO: 1974333 - RNA, 19 nt, Artificial Sequence
  Description of Artificial Sequence: Synthetic oligonucleotide
  Antisense strand to SEQ ID NO: 1974332
aucaauccacugcucauca

SEQ ID NO: 1974334 - RNA, 19 nt, Artificial Sequence
  Description of Artificial Sequence: Synthetic oligonucleotide
  Sense strand starting at position 231 of SEQ ID NO: 1880533
cugguuagucgguuguuca

SEQ ID NO: 1974335 - RNA, 19 nt, Artificial Sequence
  Description of Artificial Sequence: Synthetic oligonucleotide
  Antisense strand to SEQ ID NO: 1974334
ugaacaaccgacuaaccag

SEQ ID NO: 1974336 - RNA, 19 nt, Artificial Sequence
  Description of Artificial Sequence: Synthetic oligonucleotide
  Sense strand starting at position 397 of SEQ ID NO: 1880533
uaaguagguguuuaaucuu

SEQ ID NO: 1974337 - RNA, 19 nt, Artificial Sequence
  Description of Artificial Sequence: Synthetic oligonucleotide
  Antisense strand to SEQ ID NO: 1974336
aagauuaaacaccuacuua

SEQ ID NO: 1974338 - RNA, 19 nt, Artificial Sequence
  Description of Artificial Sequence: Synthetic oligonucleotide
  Sense strand starting at position 413 of SEQ ID NO: 1880533
cuugucuuccaacaaugga

SEQ ID NO: 1974339 - RNA, 19 nt, Artificial Sequence
  Description of Artificial Sequence: Synthetic oligonucleotide
  Antisense strand to SEQ ID NO: 1974338
uccauuguuggaagacaag

SEQ ID NO: 1974340 - RNA, 19 nt, Artificial Sequence
  Description of Artificial Sequence: Synthetic oligonucleotide
  Sense strand starting at position 416 of SEQ ID NO: 1880533
gucuuccaacaauggaaau

SEQ ID NO: 1974341 - RNA, 19 nt, Artificial Sequence
  Description of Artificial Sequence: Synthetic oligonucleotide
  Antisense strand to SEQ ID NO: 1974340
auuuccauuguuggaagac

SEQ ID NO: 1974342 - RNA, 19 nt, Artificial Sequence
  Description of Artificial Sequence: Synthetic oligonucleotide
  Sense strand starting at position 477 of SEQ ID NO: 1880533
ucagaugaaugcuccaaac

SEQ ID NO: 1974343 - RNA, 19 nt, Artificial Sequence
  Description of Artificial Sequence: Synthetic oligonucleotide
  Antisense strand to SEQ ID NO: 1974342
guuuggagcauucaucuga

SEQ ID NO: 1974344 - RNA, 19 nt, Artificial Sequence
  Description of Artificial Sequence: Synthetic oligonucleotide
  Sense strand starting at position 749 of SEQ ID NO: 1880533
guacgucugagaugagaau

SEQ ID NO: 1974345 - RNA, 19 nt, Artificial Sequence
  Description of Artificial Sequence: Synthetic oligonucleotide
  Antisense strand to SEQ ID NO: 1974344
auucucaucucagacguac

SEQ ID NO: 1974346 - RNA, 19 nt, Artificial Sequence
  Description of Artificial Sequence: Synthetic oligonucleotide
  Sense strand starting at position 763 of SEQ ID NO: 1880533
agaauagggucagggauuu

SEQ ID NO: 1974347 - RNA, 19 nt, Artificial Sequence
  Description of Artificial Sequence: Synthetic oligonucleotide
  Antisense strand to SEQ ID NO: 1974346
aaaucccugacccuauucu

SEQ ID NO: 1974348 - RNA, 19 nt, Artificial Sequence
  Description of Artificial Sequence: Synthetic oligonucleotide
  Sense strand starting at position 893 of SEQ ID NO: 1880533
guugauccaguuuaauacu

SEQ ID NO: 1974349 - RNA, 19 nt, Artificial Sequence
  Description of Artificial Sequence: Synthetic oligonucleotide
  Antisense strand to SEQ ID NO: 1974348
aguauuaaacuggaucaac

SEQ ID NO: 1974350 - RNA, 19 nt, Artificial Sequence
  Description of Artificial Sequence: Synthetic oligonucleotide
  Sense strand starting at position 988 of SEQ ID NO: 1880533
aagucuucugggcaucaga

SEQ ID NO: 1974351 - RNA, 19 nt, Artificial Sequence
  Description of Artificial Sequence: Synthetic oligonucleotide
  Antisense strand to SEQ ID NO: 1974350
ucugaugcccagaagacuu

SEQ ID NO: 1974352 - RNA, 19 nt, Artificial Sequence
  Description of Artificial Sequence: Synthetic oligonucleotide
  Sense strand starting at position 1019 of SEQ ID NO: 1880533
cacugugugagguaaguau

SEQ ID NO: 1974353 - RNA, 19 nt, Artificial Sequence
  Description of Artificial Sequence: Synthetic oligonucleotide
  Antisense strand to SEQ ID NO: 1974352
auacuuaccucacacagug

SEQ ID NO: 1974354 - RNA, 19 nt, Artificial Sequence
  Description of Artificial Sequence: Synthetic oligonucleotide
  Sense strand starting at position 1105 of SEQ ID NO: 1880533
auggcuagugaguagugaa

SEQ ID NO: 1974355 - RNA, 19 nt, Artificial Sequence
  Description of Artificial Sequence: Synthetic oligonucleotide
  Antisense strand to SEQ ID NO: 1974354
uucacuacucacuagccau

SEQ ID NO: 1974356 - RNA, 19 nt, Artificial Sequence
  Description of Artificial Sequence: Synthetic oligonucleotide
  Sense strand starting at position 1125 of SEQ ID NO: 1880533
ccaaauguuuaaucaguuu

SEQ ID NO: 1974357 - RNA, 19 nt, Artificial Sequence
  Description of Artificial Sequence: Synthetic oligonucleotide
  Antisense strand to SEQ ID NO: 1974356
aaacugauuaaacauuugg

SEQ ID NO: 1974358 - RNA, 19 nt, Artificial Sequence
  Description of Artificial Sequence: Synthetic oligonucleotide
  Sense strand starting at position 1137 of SEQ ID NO: 1880533
ucaguuucugugggacuaa

SEQ ID NO: 1974359 - RNA, 19 nt, Artificial Sequence
  Description of Artificial Sequence: Synthetic oligonucleotide
  Antisense strand to SEQ ID NO: 1974358
uuagucccacagaaacuga

SEQ ID NO: 1974360 - RNA, 19 nt, Artificial Sequence
  Description of Artificial Sequence: Synthetic oligonucleotide
  Sense strand starting at position 1316 of SEQ ID NO: 1880533
ggguguucagaagguaaga

SEQ ID NO: 1974361 - RNA, 19 nt, Artificial Sequence
  Description of Artificial Sequence: Synthetic oligonucleotide
  Antisense strand to SEQ ID NO: 1974360
ucuuaccuucugaacaccc

SEQ ID NO: 1974362 - RNA, 19 nt, Artificial Sequence
  Description of Artificial Sequence: Synthetic oligonucleotide
  Sense strand starting at position 1329 of SEQ ID NO: 1880533
guaagaacaauugguuaga

SEQ ID NO: 1974363 - RNA, 19 nt, Artificial Sequence
  Description of Artificial Sequence: Synthetic oligonucleotide
  Antisense strand to SEQ ID NO: 1974362
ucuaaccaauuguucuuac

SEQ ID NO: 1974364 - RNA, 19 nt, Artificial Sequence
  Description of Artificial Sequence: Synthetic oligonucleotide
  Sense strand starting at position 1524 of SEQ ID NO: 1880533
ucacuuggccauuauagga

SEQ ID NO: 1974365 - RNA, 19 nt, Artificial Sequence
  Description of Artificial Sequence: Synthetic oligonucleotide
  Antisense strand to SEQ ID NO: 1974364
uccuauaauggccaaguga

SEQ ID NO: 1974366 - RNA, 19 nt, Artificial Sequence
  Description of Artificial Sequence: Synthetic oligonucleotide
  Sense strand starting at position 1537 of SEQ ID NO: 1880533
auaggaagagucuguauuc

SEQ ID NO: 1974367 - RNA, 19 nt, Artificial Sequence
  Description of Artificial Sequence: Synthetic oligonucleotide
  Antisense strand to SEQ ID NO: 1974366
gaauacagacucuuccuau

SEQ ID NO: 1974368 - RNA, 19 nt, Artificial Sequence
  Description of Artificial Sequence: Synthetic oligonucleotide
  Sense strand starting at position 1704 of SEQ ID NO: 1880533
gccauaagauauguuaccu

SEQ ID NO: 1974369 - RNA, 19 nt, Artificial Sequence
  Description of Artificial Sequence: Synthetic oligonucleotide
  Antisense strand to SEQ ID NO: 1974368
agguaacauaucuuauggc

SEQ ID NO: 1974370 - RNA, 19 nt, Artificial Sequence
  Description of Artificial Sequence: Synthetic oligonucleotide
  Sense strand starting at position 1736 of SEQ ID NO: 1880533
ucuggagcccugcaagaua

SEQ ID NO: 1974371 - RNA, 19 nt, Artificial Sequence
  Description of Artificial Sequence: Synthetic oligonucleotide
  Antisense strand to SEQ ID NO: 1974370
uaucuugcagggcuccaga

SEQ ID NO: 1974372 - RNA, 19 nt, Artificial Sequence
  Description of Artificial Sequence: Synthetic oligonucleotide
  Sense strand starting at position 1878 of SEQ ID NO: 1880533
uauuguguucgagauauaa

SEQ ID NO: 1974373 - RNA, 19 nt, Artificial Sequence
  Description of Artificial Sequence: Synthetic oligonucleotide
  Antisense strand to SEQ ID NO: 1974372
uuauaucucgaacacaaua

SEQ ID NO: 1974374 - RNA, 19 nt, Artificial Sequence
  Description of Artificial Sequence: Synthetic oligonucleotide
  Sense strand starting at position 1880 of SEQ ID NO: 1880533
uuguguucgagauauaaag

SEQ ID NO: 1974375 - RNA, 19 nt, Artificial Sequence
  Description of Artificial Sequence: Synthetic oligonucleotide
  Antisense strand to SEQ ID NO: 1974374
cuuuauaucucgaacacaa

SEQ ID NO: 1974376 - RNA, 19 nt, Artificial Sequence
  Description of Artificial Sequence: Synthetic oligonucleotide
  Sense strand starting at position 1882 of SEQ ID NO: 1880533
guguucgagauauaaagcu

SEQ ID NO: 1974377 - RNA, 19 nt, Artificial Sequence
  Description of Artificial Sequence: Synthetic oligonucleotide
  Antisense strand to SEQ ID NO: 1974376
agcuuuauaucucgaacac

SEQ ID NO: 1974378 - RNA, 19 nt, Artificial Sequence
  Description of Artificial Sequence: Synthetic oligonucleotide
  Sense strand starting at position 2267 of SEQ ID NO: 1880533
ugagcauuaucugugaauu

SEQ ID NO: 1974379 - RNA, 19 nt, Artificial Sequence
  Description of Artificial Sequence: Synthetic oligonucleotide
  Antisense strand to SEQ ID NO: 1974378
aauucacagauaaugcuca

SEQ ID NO: 1974380 - RNA, 19 nt, Artificial Sequence
  Description of Artificial Sequence: Synthetic oligonucleotide
  Sense strand starting at position 2480 of SEQ ID NO: 1880533
ugucauugucugcuugcua

SEQ ID NO: 1974381 - RNA, 19 nt, Artificial Sequence
  Description of Artificial Sequence: Synthetic oligonucleotide
  Antisense strand to SEQ ID NO: 1974380
uagcaagcagacaaugaca

SEQ ID NO: 1974382 - RNA, 19 nt, Artificial Sequence
  Description of Artificial Sequence: Synthetic oligonucleotide
  Sense strand starting at position 2506 of SEQ ID NO: 1880533
cuuguuuccagaugggaug

SEQ ID NO: 1974383 - RNA, 19 nt, Artificial Sequence
  Description of Artificial Sequence: Synthetic oligonucleotide
  Antisense strand to SEQ ID NO: 1974382
caucccaucuggaaacaag

SEQ ID NO: 1974384 - RNA, 19 nt, Artificial Sequence
  Description of Artificial Sequence: Synthetic oligonucleotide
  Sense strand starting at position 2591 of SEQ ID NO: 1880533
ucuauaccuguggaaucuu

SEQ ID NO: 1974385 - RNA, 19 nt, Artificial Sequence
  Description of Artificial Sequence: Synthetic oligonucleotide
  Antisense strand to SEQ ID NO: 1974384
aagauuccacagguauaga

SEQ ID NO: 1974386 - RNA, 19 nt, Artificial Sequence
  Description of Artificial Sequence: Synthetic oligonucleotide
  Sense strand starting at position 2719 of SEQ ID NO: 1880533
gauugcuaagcucaaguga

SEQ ID NO: 1974387 - RNA, 19 nt, Artificial Sequence
  Description of Artificial Sequence: Synthetic oligonucleotide
  Antisense strand to SEQ ID NO: 1974386
ucacuugagcuuagcaauc

SEQ ID NO: 1974388 - RNA, 19 nt, Artificial Sequence
  Description of Artificial Sequence: Synthetic oligonucleotide
  Sense strand starting at position 2821 of SEQ ID NO: 1880533
ucaguuaguaaccagguua

SEQ ID NO: 1974389 - RNA, 19 nt, Artificial Sequence
  Description of Artificial Sequence: Synthetic oligonucleotide
  Antisense strand to SEQ ID NO: 1974388
uaaccugguuacuaacuga

SEQ ID NO: 1974390 - RNA, 19 nt, Artificial Sequence
  Description of Artificial Sequence: Synthetic oligonucleotide
  Sense strand starting at position 2915 of SEQ ID NO: 1880533
gucacaucugcuuaaagca

SEQ ID NO: 1974391 - RNA, 19 nt, Artificial Sequence
  Description of Artificial Sequence: Synthetic oligonucleotide
  Antisense strand to SEQ ID NO: 1974390
ugcuuuaagcagaugugac

SEQ ID NO: 1974392 - RNA, 19 nt, Artificial Sequence
  Description of Artificial Sequence: Synthetic oligonucleotide
  Sense strand starting at position 3045 of SEQ ID NO: 1880533
uuacaauauguuuggaugu

SEQ ID NO: 1974393 - RNA, 19 nt, Artificial Sequence
  Description of Artificial Sequence: Synthetic oligonucleotide
  Antisense strand to SEQ ID NO: 1974392
acauccaaacauauuguaa

SEQ ID NO: 1974394 - RNA, 19 nt, Artificial Sequence
  Description of Artificial Sequence: Synthetic oligonucleotide
  Sense strand starting at position 3494 of SEQ ID NO: 1880533
gucagcuuagcagauaacu

SEQ ID NO: 1974395 - RNA, 19 nt, Artificial Sequence
  Description of Artificial Sequence: Synthetic oligonucleotide
  Antisense strand to SEQ ID NO: 1974394
aguuaucugcuaagcugac

SEQ ID NO: 1974396 - RNA, 19 nt, Artificial Sequence
  Description of Artificial Sequence: Synthetic oligonucleotide
  Sense strand starting at position 3520 of SEQ ID NO: 1880533
auaucauugugucuuuaag

SEQ ID NO: 1974397 - RNA, 19 nt, Artificial Sequence
  Description of Artificial Sequence: Synthetic oligonucleotide
  Antisense strand to SEQ ID NO: 1974396
cuuaaagacacaaugauau

SEQ ID NO: 1974398 - RNA, 19 nt, Artificial Sequence
  Description of Artificial Sequence: Synthetic oligonucleotide
  Sense strand starting at position 3591 of SEQ ID NO: 1880533
ggcugagaguuuguuaaga

SEQ ID NO: 1974399 - RNA, 19 nt, Artificial Sequence
  Description of Artificial Sequence: Synthetic oligonucleotide
  Antisense strand to SEQ ID NO: 1974398
ucuuaacaaacucucagcc

SEQ ID NO: 1974400 - RNA, 19 nt, Artificial Sequence
  Description of Artificial Sequence: Synthetic oligonucleotide
  Sense strand starting at position 3835 of SEQ ID NO: 1880533
ucuugugauggugauuaga

SEQ ID NO: 1974401 - RNA, 19 nt, Artificial Sequence
  Description of Artificial Sequence: Synthetic oligonucleotide
  Antisense strand to SEQ ID NO: 1974400
ucuaaucaccaucacaaga

SEQ ID NO: 1974402 - RNA, 19 nt, Artificial Sequence
  Description of Artificial Sequence: Synthetic oligonucleotide
  Sense strand starting at position 3837 of SEQ ID NO: 1880533
uugugauggugauuagauc

SEQ ID NO: 1974403 - RNA, 19 nt, Artificial Sequence
  Description of Artificial Sequence: Synthetic oligonucleotide
  Antisense strand to SEQ ID NO: 1974402
gaucuaaucaccaucacaa

SEQ ID NO: 1974404 - RNA, 19 nt, Artificial Sequence
  Description of Artificial Sequence: Synthetic oligonucleotide
  Sense strand starting at position 3838 of SEQ ID NO: 1880533
ugugauggugauuagaucu

SEQ ID NO: 1974405 - RNA, 19 nt, Artificial Sequence
  Description of Artificial Sequence: Synthetic oligonucleotide
  Antisense strand to SEQ ID NO: 1974404
agaucuaaucaccaucaca

SEQ ID NO: 1974406 - RNA, 19 nt, Artificial Sequence
  Description of Artificial Sequence: Synthetic oligonucleotide
  Sense strand starting at position 3848 of SEQ ID NO: 1880533
auuagaucucaugaguucu

SEQ ID NO: 1974407 - RNA, 19 nt, Artificial Sequence
  Description of Artificial Sequence: Synthetic oligonucleotide
  Antisense strand to SEQ ID NO: 1974406
agaacucaugagaucuaau

SEQ ID NO: 1974408 - RNA, 19 nt, Artificial Sequence
  Description of Artificial Sequence: Synthetic oligonucleotide
  Sense strand starting at position 105 of SEQ ID NO: 1880534
augagauaguaugcauucu

SEQ ID NO: 1974409 - RNA, 19 nt, Artificial Sequence
  Description of Artificial Sequence: Synthetic oligonucleotide
  Antisense strand to SEQ ID NO: 1974408
agaaugcauacuaucucau

SEQ ID NO: 1974410 - RNA, 19 nt, Artificial Sequence
  Description of Artificial Sequence: Synthetic oligonucleotide
  Sense strand starting at position 542 of SEQ ID NO: 1880534
guucuuauacggcacagaa

SEQ ID NO: 1974411 - RNA, 19 nt, Artificial Sequence
  Description of Artificial Sequence: Synthetic oligonucleotide
  Antisense strand to SEQ ID NO: 1974410
uucugugccguauaagaac

SEQ ID NO: 1974412 - RNA, 19 nt, Artificial Sequence
  Description of Artificial Sequence: Synthetic oligonucleotide
  Sense strand starting at position 768 of SEQ ID NO: 1880534
aaaugagaagccugaguau

SEQ ID NO: 1974413 - RNA, 19 nt, Artificial Sequence
  Description of Artificial Sequence: Synthetic oligonucleotide
  Antisense strand to SEQ ID NO: 1974412
auacucaggcuucucauuu

SEQ ID NO: 1974414 - RNA, 19 nt, Artificial Sequence
  Description of Artificial Sequence: Synthetic oligonucleotide
  Sense strand starting at position 771 of SEQ ID NO: 1880534
ugagaagccugaguauaua

SEQ ID NO: 1974415 - RNA, 19 nt, Artificial Sequence
  Description of Artificial Sequence: Synthetic oligonucleotide
  Antisense strand to SEQ ID NO: 1974414
uauauacucaggcuucuca

SEQ ID NO: 1974416 - RNA, 19 nt, Artificial Sequence
  Description of Artificial Sequence: Synthetic oligonucleotide
  Sense strand starting at position 867 of SEQ ID NO: 1880534
ugucuauaauugucccaag

SEQ ID NO: 1974417 - RNA, 19 nt, Artificial Sequence
  Description of Artificial Sequence: Synthetic oligonucleotide
  Antisense strand to SEQ ID NO: 1974416
cuugggacaauuauagaca

SEQ ID NO: 1974418 - RNA, 19 nt, Artificial Sequence
  Description of Artificial Sequence: Synthetic oligonucleotide
  Sense strand starting at position 1012 of SEQ ID NO: 1880534
aagcgaagugauugggaaa

SEQ ID NO: 1974419 - RNA, 19 nt, Artificial Sequence
  Description of Artificial Sequence: Synthetic oligonucleotide
  Antisense strand to SEQ ID NO: 1974418
uuucccaaucacuucgcuu

SEQ ID NO: 1974420 - RNA, 19 nt, Artificial Sequence
  Description of Artificial Sequence: Synthetic oligonucleotide
  Sense strand starting at position 1124 of SEQ ID NO: 1880534
uucuguauugcagaucuca

SEQ ID NO: 1974421 - RNA, 19 nt, Artificial Sequence
  Description of Artificial Sequence: Synthetic oligonucleotide
  Antisense strand to SEQ ID NO: 1974420
ugagaucugcaauacagaa

SEQ ID NO: 1974422 - RNA, 19 nt, Artificial Sequence
  Description of Artificial Sequence: Synthetic oligonucleotide
  Sense strand starting at position 1132 of SEQ ID NO: 1880534
ugcagaucucaguauuagg

SEQ ID NO: 1974423 - RNA, 19 nt, Artificial Sequence
  Description of Artificial Sequence: Synthetic oligonucleotide
  Antisense strand to SEQ ID NO: 1974422
ccuaauacugagaucugca

SEQ ID NO: 1974424 - RNA, 19 nt, Artificial Sequence
  Description of Artificial Sequence: Synthetic oligonucleotide
  Sense strand starting at position 1140 of SEQ ID NO: 1880534
ucaguauuagguuaaugua

SEQ ID NO: 1974425 - RNA, 19 nt, Artificial Sequence
  Description of Artificial Sequence: Synthetic oligonucleotide
  Antisense strand to SEQ ID NO: 1974424
uacauuaaccuaauacuga

SEQ ID NO: 1974426 - RNA, 19 nt, Artificial Sequence
  Description of Artificial Sequence: Synthetic oligonucleotide
  Sense strand starting at position 1147 of SEQ ID NO: 1880534
uagguuaauguaugaauug

SEQ ID NO: 1974427 - RNA, 19 nt, Artificial Sequence
  Description of Artificial Sequence: Synthetic oligonucleotide
  Antisense strand to SEQ ID NO: 1974426
caauucauacauuaaccua

SEQ ID NO: 1974428 - RNA, 19 nt, Artificial Sequence
  Description of Artificial Sequence: Synthetic oligonucleotide
  Sense strand starting at position 1159 of SEQ ID NO: 1880534
ugaauuguacugcacuaca

SEQ ID NO: 1974429 - RNA, 19 nt, Artificial Sequence
  Description of Artificial Sequence: Synthetic oligonucleotide
  Antisense strand to SEQ ID NO: 1974428
uguagugcaguacaauuca

SEQ ID NO: 1974430 - RNA, 19 nt, Artificial Sequence
  Description of Artificial Sequence: Synthetic oligonucleotide
  Sense strand starting at position 1202 of SEQ ID NO: 1880534
guauaagaauagccugaca

SEQ ID NO: 1974431 - RNA, 19 nt, Artificial Sequence
  Description of Artificial Sequence: Synthetic oligonucleotide
  Antisense strand to SEQ ID NO: 1974430
ugucaggcuauucuuauac

SEQ ID NO: 1974432 - RNA, 19 nt, Artificial Sequence
  Description of Artificial Sequence: Synthetic oligonucleotide
  Sense strand starting at position 1207 of SEQ ID NO: 1880534
agaauagccugacaauuug

SEQ ID NO: 1974433 - RNA, 19 nt, Artificial Sequence
  Description of Artificial Sequence: Synthetic oligonucleotide
  Antisense strand to SEQ ID NO: 1974432
caaauugucaggcuauucu

SEQ ID NO: 1974434 - RNA, 19 nt, Artificial Sequence
  Description of Artificial Sequence: Synthetic oligonucleotide
  Sense strand starting at position 1334 of SEQ ID NO: 1880534
ccuuaacaccauugaggau

SEQ ID NO: 1974435 - RNA, 19 nt, Artificial Sequence
  Description of Artificial Sequence: Synthetic oligonucleotide
  Antisense strand to SEQ ID NO: 1974434
auccucaaugguguuaagg

SEQ ID NO: 1974436 - RNA, 19 nt, Artificial Sequence
  Description of Artificial Sequence: Synthetic oligonucleotide
  Sense strand starting at position 1350 of SEQ ID NO: 1880534
gauauuuauguaugucugu

SEQ ID NO: 1974437 - RNA, 19 nt, Artificial Sequence
  Description of Artificial Sequence: Synthetic oligonucleotide
  Antisense strand to SEQ ID NO: 1974436
acagacauacauaaauauc

SEQ ID NO: 1974438 - RNA, 19 nt, Artificial Sequence
  Description of Artificial Sequence: Synthetic oligonucleotide
  Sense strand starting at position 1526 of SEQ ID NO: 1880534
agucauaaagaaugauagu

SEQ ID NO: 1974439 - RNA, 19 nt, Artificial Sequence
  Description of Artificial Sequence: Synthetic oligonucleotide
  Antisense strand to SEQ ID NO: 1974438
acuaucauucuuuaugacu

SEQ ID NO: 1974440 - RNA, 19 nt, Artificial Sequence
  Description of Artificial Sequence: Synthetic oligonucleotide
  Sense strand starting at position 1794 of SEQ ID NO: 1880534
uugauuugguuucuugcau

SEQ ID NO: 1974441 - RNA, 19 nt, Artificial Sequence
  Description of Artificial Sequence: Synthetic oligonucleotide
  Antisense strand to SEQ ID NO: 1974440
augcaagaaaccaaaucaa

SEQ ID NO: 1974442 - RNA, 19 nt, Artificial Sequence
  Description of Artificial Sequence: Synthetic oligonucleotide
  Sense strand starting at position 1802 of SEQ ID NO: 1880534
guuucuugcaucuauggga

SEQ ID NO: 1974443 - RNA, 19 nt, Artificial Sequence
  Description of Artificial Sequence: Synthetic oligonucleotide
  Antisense strand to SEQ ID NO: 1974442
ucccauagaugcaagaaac

SEQ ID NO: 1974444 - RNA, 19 nt, Artificial Sequence
  Description of Artificial Sequence: Synthetic oligonucleotide
  Sense strand starting at position 1907 of SEQ ID NO: 1880534
ugggauauauaaucuguua

SEQ ID NO: 1974445 - RNA, 19 nt, Artificial Sequence
  Description of Artificial Sequence: Synthetic oligonucleotide
  Antisense strand to SEQ ID NO: 1974444
uaacagauuauauauccca

SEQ ID NO: 1974446 - RNA, 19 nt, Artificial Sequence
  Description of Artificial Sequence: Synthetic oligonucleotide
  Sense strand starting at position 1921 of SEQ ID NO: 1880534
uguuacaaagcagaauauu

SEQ ID NO: 1974447 - RNA, 19 nt, Artificial Sequence
  Description of Artificial Sequence: Synthetic oligonucleotide
  Antisense strand to SEQ ID NO: 1974446
aauauucugcuuuguaaca

SEQ ID NO: 1974448 - RNA, 19 nt, Artificial Sequence
  Description of Artificial Sequence: Synthetic oligonucleotide
  Sense strand starting at position 1930 of SEQ ID NO: 1880534
gcagaauauuaauuggcuu

SEQ ID NO: 1974449 - RNA, 19 nt, Artificial Sequence
  Description of Artificial Sequence: Synthetic oligonucleotide
  Antisense strand to SEQ ID NO: 1974448
aagccaauuaauauucugc

SEQ ID NO: 1974450 - RNA, 19 nt, Artificial Sequence
  Description of Artificial Sequence: Synthetic oligonucleotide
  Sense strand starting at position 2023 of SEQ ID NO: 1880534
acacuaggaugagaaagau

SEQ ID NO: 1974451 - RNA, 19 nt, Artificial Sequence
  Description of Artificial Sequence: Synthetic oligonucleotide
  Antisense strand to SEQ ID NO: 1974450
aucuuucucauccuagugu

SEQ ID NO: 1974452 - RNA, 19 nt, Artificial Sequence
  Description of Artificial Sequence: Synthetic oligonucleotide
  Sense strand starting at position 2074 of SEQ ID NO: 1880534
ugucucugagacuaucuuu

SEQ ID NO: 1974453 - RNA, 19 nt, Artificial Sequence
  Description of Artificial Sequence: Synthetic oligonucleotide
  Antisense strand to SEQ ID NO: 1974452
aaagauagucucagagaca

SEQ ID NO: 1974454 - RNA, 19 nt, Artificial Sequence
  Description of Artificial Sequence: Synthetic oligonucleotide
  Sense strand starting at position 2297 of SEQ ID NO: 1880534
gguauagaguacuucuuau

SEQ ID NO: 1974455 - RNA, 19 nt, Artificial Sequence
  Description of Artificial Sequence: Synthetic oligonucleotide
  Antisense strand to SEQ ID NO: 1974454
auaagaaguacucuauacc

SEQ ID NO: 1974456 - RNA, 19 nt, Artificial Sequence
  Description of Artificial Sequence: Synthetic oligonucleotide
  Sense strand starting at position 2543 of SEQ ID NO: 1880534
guauaccuauuguuuaaga

SEQ ID NO: 1974457 - RNA, 19 nt, Artificial Sequence
  Description of Artificial Sequence: Synthetic oligonucleotide
  Antisense strand to SEQ ID NO: 1974456
ucuuaaacaauagguauac

SEQ ID NO: 1974458 - RNA, 19 nt, Artificial Sequence
  Description of Artificial Sequence: Synthetic oligonucleotide
  Sense strand starting at position 2681 of SEQ ID NO: 1880534
ugaucuuaaugauucuguu

SEQ ID NO: 1974459 - RNA, 19 nt, Artificial Sequence
  Description of Artificial Sequence: Synthetic oligonucleotide
  Antisense strand to SEQ ID NO: 1974458
aacagaaucauuaagauca

SEQ ID NO: 1974460 - RNA, 19 nt, Artificial Sequence
  Description of Artificial Sequence: Synthetic oligonucleotide
  Sense strand starting at position 2685 of SEQ ID NO: 1880534
cuuaaugauucuguugaca

SEQ ID NO: 1974461 - RNA, 19 nt, Artificial Sequence
  Description of Artificial Sequence: Synthetic oligonucleotide
  Antisense strand to SEQ ID NO: 1974460
ugucaacagaaucauuaag

SEQ ID NO: 1974462 - RNA, 19 nt, Artificial Sequence
  Description of Artificial Sequence: Synthetic oligonucleotide
  Sense strand starting at position 2702 of SEQ ID NO: 1880534
cacgguaaagccuaucuga

SEQ ID NO: 1974463 - RNA, 19 nt, Artificial Sequence
  Description of Artificial Sequence: Synthetic oligonucleotide
  Antisense strand to SEQ ID NO: 1974462
ucagauaggcuuuaccgug

SEQ ID NO: 1974464 - RNA, 19 nt, Artificial Sequence
  Description of Artificial Sequence: Synthetic oligonucleotide
  Sense strand starting at position 2705 of SEQ ID NO: 1880534
gguaaagccuaucugaaug

SEQ ID NO: 1974465 - RNA, 19 nt, Artificial Sequence
  Description of Artificial Sequence: Synthetic oligonucleotide
  Antisense strand to SEQ ID NO: 1974464
cauucagauaggcuuuacc

SEQ ID NO: 1974466 - RNA, 19 nt, Artificial Sequence
  Description of Artificial Sequence: Synthetic oligonucleotide
  Sense strand starting at position 2763 of SEQ ID NO: 1880534
cuaggugauuuggauaauu

SEQ ID NO: 1974467 - RNA, 19 nt, Artificial Sequence
  Description of Artificial Sequence: Synthetic oligonucleotide
  Antisense strand to SEQ ID NO: 1974466
aauuauccaaaucaccuag

SEQ ID NO: 1974468 - RNA, 19 nt, Artificial Sequence
  Description of Artificial Sequence: Synthetic oligonucleotide
  Sense strand starting at position 2920 of SEQ ID NO: 1880534
augaaauaugacuggccua

SEQ ID NO: 1974469 - RNA, 19 nt, Artificial Sequence
  Description of Artificial Sequence: Synthetic oligonucleotide
  Antisense strand to SEQ ID NO: 1974468
uaggccagucauauuucau

SEQ ID NO: 1974470 - RNA, 19 nt, Artificial Sequence
  Description of Artificial Sequence: Synthetic oligonucleotide
  Sense strand starting at position 3137 of SEQ ID NO: 1880534
aguauauguaaagacugua

SEQ ID NO: 1974471 - RNA, 19 nt, Artificial Sequence
  Description of Artificial Sequence: Synthetic oligonucleotide
  Antisense strand to SEQ ID NO: 1974470
uacagucuuuacauauacu

SEQ ID NO: 1974472 - RNA, 19 nt, Artificial Sequence
  Description of Artificial Sequence: Synthetic oligonucleotide
  Sense strand starting at position 3222 of SEQ ID NO: 1880534
uggaaaugcaaauguugau

SEQ ID NO: 1974473 - RNA, 19 nt, Artificial Sequence
  Description of Artificial Sequence: Synthetic oligonucleotide
  Antisense strand to SEQ ID NO: 1974472
aucaacauuugcauuucca

SEQ ID NO: 1974474 - RNA, 19 nt, Artificial Sequence
  Description of Artificial Sequence: Synthetic oligonucleotide
  Sense strand starting at position 3258 of SEQ ID NO: 1880534
aucucauuauaguuggaca

SEQ ID NO: 1974475 - RNA, 19 nt, Artificial Sequence
  Description of Artificial Sequence: Synthetic oligonucleotide
  Antisense strand to SEQ ID NO: 1974474
uguccaacuauaaugagau

SEQ ID NO: 1974476 - RNA, 19 nt, Artificial Sequence
  Description of Artificial Sequence: Synthetic oligonucleotide
  Sense strand starting at position 3528 of SEQ ID NO: 1880534
gccacaccuuguucuauuu

SEQ ID NO: 1974477 - RNA, 19 nt, Artificial Sequence
  Description of Artificial Sequence: Synthetic oligonucleotide
  Antisense strand to SEQ ID NO: 1974476
aaauagaacaagguguggc

SEQ ID NO: 1974478 - RNA, 19 nt, Artificial Sequence
  Description of Artificial Sequence: Synthetic oligonucleotide
  Sense strand starting at position 3675 of SEQ ID NO: 1880534
uguuaacuggucugauaaa

SEQ ID NO: 1974479 - RNA, 19 nt, Artificial Sequence
  Description of Artificial Sequence: Synthetic oligonucleotide
  Antisense strand to SEQ ID NO: 1974478
uuuaucagaccaguuaaca

SEQ ID NO: 1974480 - RNA, 19 nt, Artificial Sequence
  Description of Artificial Sequence: Synthetic oligonucleotide
  Sense strand starting at position 3832 of SEQ ID NO: 1880534
ccaagaauuuggcaaacuu

SEQ ID NO: 1974481 - RNA, 19 nt, Artificial Sequence
  Description of Artificial Sequence: Synthetic oligonucleotide
  Antisense strand to SEQ ID NO: 1974480
aaguuugccaaauucuugg

SEQ ID NO: 1974482 - RNA, 19 nt, Artificial Sequence
  Description of Artificial Sequence: Synthetic oligonucleotide
  Sense strand starting at position 3941 of SEQ ID NO: 1880534
uuauuaaugugggcgggaa

SEQ ID NO: 1974483 - RNA, 19 nt, Artificial Sequence
  Description of Artificial Sequence: Synthetic oligonucleotide
  Antisense strand to SEQ ID NO: 1974482
uucccgcccacauuaauaa

SEQ ID NO: 1974484 - RNA, 19 nt, Artificial Sequence
  Description of Artificial Sequence: Synthetic oligonucleotide
  Sense strand starting at position 3942 of SEQ ID NO: 1880534
uauuaaugugggcgggaaa

SEQ ID NO: 1974485 - RNA, 19 nt, Artificial Sequence
  Description of Artificial Sequence: Synthetic oligonucleotide
  Antisense strand to SEQ ID NO: 1974484
uuucccgcccacauuaaua

SEQ ID NO: 1974486 - RNA, 19 nt, Artificial Sequence
  Description of Artificial Sequence: Synthetic oligonucleotide
  Sense strand starting at position 3945 of SEQ ID NO: 1880534
uaaugugggcgggaaacuu

SEQ ID NO: 1974487 - RNA, 19 nt, Artificial Sequence
  Description of Artificial Sequence: Synthetic oligonucleotide
  Antisense strand to SEQ ID NO: 1974486
aaguuucccgcccacauua

SEQ ID NO: 1974488 - RNA, 19 nt, Artificial Sequence
  Description of Artificial Sequence: Synthetic oligonucleotide
  Sense strand starting at position 131 of SEQ ID NO: 1880535
gagggauauuaggagaaau

SEQ ID NO: 1974489 - RNA, 19 nt, Artificial Sequence
  Description of Artificial Sequence: Synthetic oligonucleotide
  Antisense strand to SEQ ID NO: 1974488
auuucuccuaauaucccuc

SEQ ID NO: 1974490 - RNA, 19 nt, Artificial Sequence
  Description of Artificial Sequence: Synthetic oligonucleotide
  Sense strand starting at position 345 of SEQ ID NO: 1880535
ucuauuauggaucgugaau

SEQ ID NO: 1974491 - RNA, 19 nt, Artificial Sequence
  Description of Artificial Sequence: Synthetic oligonucleotide
  Antisense strand to SEQ ID NO: 1974490
auucacgauccauaauaga

SEQ ID NO: 1974492 - RNA, 19 nt, Artificial Sequence
  Description of Artificial Sequence: Synthetic oligonucleotide
  Sense strand starting at position 352 of SEQ ID NO: 1880535
uggaucgugaaugguauua

SEQ ID NO: 1974493 - RNA, 19 nt, Artificial Sequence
  Description of Artificial Sequence: Synthetic oligonucleotide
  Antisense strand to SEQ ID NO: 1974492
uaauaccauucacgaucca

SEQ ID NO: 1974494 - RNA, 19 nt, Artificial Sequence
  Description of Artificial Sequence: Synthetic oligonucleotide
  Sense strand starting at position 365 of SEQ ID NO: 1880535
guauuauaucaugagcuaa

SEQ ID NO: 1974495 - RNA, 19 nt, Artificial Sequence
  Description of Artificial Sequence: Synthetic oligonucleotide
  Antisense strand to SEQ ID NO: 1974494
uuagcucaugauauaauac

SEQ ID NO: 1974496 - RNA, 19 nt, Artificial Sequence
  Description of Artificial Sequence: Synthetic oligonucleotide
  Sense strand starting at position 424 of SEQ ID NO: 1880535
agugauguauggccagaac

SEQ ID NO: 1974497 - RNA, 19 nt, Artificial Sequence
  Description of Artificial Sequence: Synthetic oligonucleotide
  Antisense strand to SEQ ID NO: 1974496
guucuggccauacaucacu

SEQ ID NO: 1974498 - RNA, 19 nt, Artificial Sequence
  Description of Artificial Sequence: Synthetic oligonucleotide
  Sense strand starting at position 456 of SEQ ID NO: 1880535
uuagcuugaaauugaguga

SEQ ID NO: 1974499 - RNA, 19 nt, Artificial Sequence
  Description of Artificial Sequence: Synthetic oligonucleotide
  Antisense strand to SEQ ID NO: 1974498
ucacucaauuucaagcuaa

SEQ ID NO: 1974500 - RNA, 19 nt, Artificial Sequence
  Description of Artificial Sequence: Synthetic oligonucleotide
  Sense strand starting at position 463 of SEQ ID NO: 1880535
gaaauugagugacucccua

SEQ ID NO: 1974501 - RNA, 19 nt, Artificial Sequence
  Description of Artificial Sequence: Synthetic oligonucleotide
  Antisense strand to SEQ ID NO: 1974500
uagggagucacucaauuuc

SEQ ID NO: 1974502 - RNA, 19 nt, Artificial Sequence
  Description of Artificial Sequence: Synthetic oligonucleotide
  Sense strand starting at position 467 of SEQ ID NO: 1880535
uugagugacucccuauuaa

SEQ ID NO: 1974503 - RNA, 19 nt, Artificial Sequence
  Description of Artificial Sequence: Synthetic oligonucleotide
  Antisense strand to SEQ ID NO: 1974502
uuaauagggagucacucaa

SEQ ID NO: 1974504 - RNA, 19 nt, Artificial Sequence
  Description of Artificial Sequence: Synthetic oligonucleotide
  Sense strand starting at position 589 of SEQ ID NO: 1880535
auugucuaaucugugaaac

SEQ ID NO: 1974505 - RNA, 19 nt, Artificial Sequence
  Description of Artificial Sequence: Synthetic oligonucleotide
  Antisense strand to SEQ ID NO: 1974504
guuucacagauuagacaau

SEQ ID NO: 1974506 - RNA, 19 nt, Artificial Sequence
  Description of Artificial Sequence: Synthetic oligonucleotide
  Sense strand starting at position 590 of SEQ ID NO: 1880535
uugucuaaucugugaaaca

SEQ ID NO: 1974507 - RNA, 19 nt, Artificial Sequence
  Description of Artificial Sequence: Synthetic oligonucleotide
  Antisense strand to SEQ ID NO: 1974506
uguuucacagauuagacaa

SEQ ID NO: 1974508 - RNA, 19 nt, Artificial Sequence
  Description of Artificial Sequence: Synthetic oligonucleotide
  Sense strand starting at position 672 of SEQ ID NO: 1880535
cuagucaucugauuaauug

SEQ ID NO: 1974509 - RNA, 19 nt, Artificial Sequence
  Description of Artificial Sequence: Synthetic oligonucleotide
  Antisense strand to SEQ ID NO: 1974508
caauuaaucagaugacuag

SEQ ID NO: 1974510 - RNA, 19 nt, Artificial Sequence
  Description of Artificial Sequence: Synthetic oligonucleotide
  Sense strand starting at position 790 of SEQ ID NO: 1880535
ugagaaaccuaaucucugu

SEQ ID NO: 1974511 - RNA, 19 nt, Artificial Sequence
  Description of Artificial Sequence: Synthetic oligonucleotide
  Antisense strand to SEQ ID NO: 1974510
acagagauuagguuucuca

SEQ ID NO: 1974512 - RNA, 19 nt, Artificial Sequence
  Description of Artificial Sequence: Synthetic oligonucleotide
  Sense strand starting at position 1024 of SEQ ID NO: 1880535
ccugaugacgucuauuaaa

SEQ ID NO: 1974513 - RNA, 19 nt, Artificial Sequence
  Description of Artificial Sequence: Synthetic oligonucleotide
  Antisense strand to SEQ ID NO: 1974512
uuuaauagacgucaucagg

SEQ ID NO: 1974514 - RNA, 19 nt, Artificial Sequence
  Description of Artificial Sequence: Synthetic oligonucleotide
  Sense strand starting at position 1425 of SEQ ID NO: 1880535
cccauaauguauguugaca

SEQ ID NO: 1974515 - RNA, 19 nt, Artificial Sequence
  Description of Artificial Sequence: Synthetic oligonucleotide
  Antisense strand to SEQ ID NO: 1974514
ugucaacauacauuauggg

SEQ ID NO: 1974516 - RNA, 19 nt, Artificial Sequence
  Description of Artificial Sequence: Synthetic oligonucleotide
  Sense strand starting at position 1447 of SEQ ID NO: 1880535
cuauaaggagccuauacuu

SEQ ID NO: 1974517 - RNA, 19 nt, Artificial Sequence
  Description of Artificial Sequence: Synthetic oligonucleotide
  Antisense strand to SEQ ID NO: 1974516
aaguauaggcuccuuauag

SEQ ID NO: 1974518 - RNA, 19 nt, Artificial Sequence
  Description of Artificial Sequence: Synthetic oligonucleotide
  Sense strand starting at position 1710 of SEQ ID NO: 1880535
guaaauucucauggauuaa

SEQ ID NO: 1974519 - RNA, 19 nt, Artificial Sequence
  Description of Artificial Sequence: Synthetic oligonucleotide
  Antisense strand to SEQ ID NO: 1974518
uuaauccaugagaauuuac

SEQ ID NO: 1974520 - RNA, 19 nt, Artificial Sequence
  Description of Artificial Sequence: Synthetic oligonucleotide
  Sense strand starting at position 2080 of SEQ ID NO: 1880535
gagucauaauuacugagac

SEQ ID NO: 1974521 - RNA, 19 nt, Artificial Sequence
  Description of Artificial Sequence: Synthetic oligonucleotide
  Antisense strand to SEQ ID NO: 1974520
gucucaguaauuaugacuc

SEQ ID NO: 1974522 - RNA, 19 nt, Artificial Sequence
  Description of Artificial Sequence: Synthetic oligonucleotide
  Sense strand starting at position 2113 of SEQ ID NO: 1880535
cugacuaaugcugaacuca

SEQ ID NO: 1974523 - RNA, 19 nt, Artificial Sequence
  Description of Artificial Sequence: Synthetic oligonucleotide
  Antisense strand to SEQ ID NO: 1974522
ugaguucagcauuagucag

SEQ ID NO: 1974524 - RNA, 19 nt, Artificial Sequence
  Description of Artificial Sequence: Synthetic oligonucleotide
  Sense strand starting at position 2192 of SEQ ID NO: 1880535
uuaagaaucuugccuuuag

SEQ ID NO: 1974525 - RNA, 19 nt, Artificial Sequence
  Description of Artificial Sequence: Synthetic oligonucleotide
  Antisense strand to SEQ ID NO: 1974524
cuaaaggcaagauucuuaa

SEQ ID NO: 1974526 - RNA, 19 nt, Artificial Sequence
  Description of Artificial Sequence: Synthetic oligonucleotide
  Sense strand starting at position 2196 of SEQ ID NO: 1880535
gaaucuugccuuuagggag

SEQ ID NO: 1974527 - RNA, 19 nt, Artificial Sequence
  Description of Artificial Sequence: Synthetic oligonucleotide
  Antisense strand to SEQ ID NO: 1974526
cucccuaaaggcaagauuc

SEQ ID NO: 1974528 - RNA, 19 nt, Artificial Sequence
  Description of Artificial Sequence: Synthetic oligonucleotide
  Sense strand starting at position 2347 of SEQ ID NO: 1880535
uuauaucaucaccgaggua

SEQ ID NO: 1974529 - RNA, 19 nt, Artificial Sequence
  Description of Artificial Sequence: Synthetic oligonucleotide
  Antisense strand to SEQ ID NO: 1974528
uaccucggugaugauauaa

SEQ ID NO: 1974530 - RNA, 19 nt, Artificial Sequence
  Description of Artificial Sequence: Synthetic oligonucleotide
  Sense strand starting at position 2350 of SEQ ID NO: 1880535
uaucaucaccgagguauua

SEQ ID NO: 1974531 - RNA, 19 nt, Artificial Sequence
  Description of Artificial Sequence: Synthetic oligonucleotide
  Antisense strand to SEQ ID NO: 1974530
uaauaccucggugaugaua

SEQ ID NO: 1974532 - RNA, 19 nt, Artificial Sequence
  Description of Artificial Sequence: Synthetic oligonucleotide
  Sense strand starting at position 2359 of SEQ ID NO: 1880535
cgagguauuaaacacagua

SEQ ID NO: 1974533 - RNA, 19 nt, Artificial Sequence
  Description of Artificial Sequence: Synthetic oligonucleotide
  Antisense strand to SEQ ID NO: 1974532
uacuguguuuaauaccucg

SEQ ID NO: 1974534 - RNA, 19 nt, Artificial Sequence
  Description of Artificial Sequence: Synthetic oligonucleotide
  Sense strand starting at position 2547 of SEQ ID NO: 1880535
agauaauagucucccugca

SEQ ID NO: 1974535 - RNA, 19 nt, Artificial Sequence
  Description of Artificial Sequence: Synthetic oligonucleotide
  Antisense strand to SEQ ID NO: 1974534
ugcagggagacuauuaucu

SEQ ID NO: 1974536 - RNA, 19 nt, Artificial Sequence
  Description of Artificial Sequence: Synthetic oligonucleotide
  Sense strand starting at position 2650 of SEQ ID NO: 1880535
ucaggauucugcccuuaaa

SEQ ID NO: 1974537 - RNA, 19 nt, Artificial Sequence
  Description of Artificial Sequence: Synthetic oligonucleotide
  Antisense strand to SEQ ID NO: 1974536
uuuaagggcagaauccuga

SEQ ID NO: 1974538 - RNA, 19 nt, Artificial Sequence
  Description of Artificial Sequence: Synthetic oligonucleotide
  Sense strand starting at position 2716 of SEQ ID NO: 1880535
cuuauuuguuugucugauu

SEQ ID NO: 1974539 - RNA, 19 nt, Artificial Sequence
  Description of Artificial Sequence: Synthetic oligonucleotide
  Antisense strand to SEQ ID NO: 1974538
aaucagacaaacaaauaag

SEQ ID NO: 1974540 - RNA, 19 nt, Artificial Sequence
  Description of Artificial Sequence: Synthetic oligonucleotide
  Sense strand starting at position 2775 of SEQ ID NO: 1880535
aagagaugguuugcacaag

SEQ ID NO: 1974541 - RNA, 19 nt, Artificial Sequence
  Description of Artificial Sequence: Synthetic oligonucleotide
  Antisense strand to SEQ ID NO: 1974540
cuugugcaaaccaucucuu

SEQ ID NO: 1974542 - RNA, 19 nt, Artificial Sequence
  Description of Artificial Sequence: Synthetic oligonucleotide
  Sense strand starting at position 2860 of SEQ ID NO: 1880535
ucagaugagauugggcaua

SEQ ID NO: 1974543 - RNA, 19 nt, Artificial Sequence
  Description of Artificial Sequence: Synthetic oligonucleotide
  Antisense strand to SEQ ID NO: 1974542
uaugcccaaucucaucuga

SEQ ID NO: 1974544 - RNA, 19 nt, Artificial Sequence
  Description of Artificial Sequence: Synthetic oligonucleotide
  Sense strand starting at position 2862 of SEQ ID NO: 1880535
agaugagauugggcauauu

SEQ ID NO: 1974545 - RNA, 19 nt, Artificial Sequence
  Description of Artificial Sequence: Synthetic oligonucleotide
  Antisense strand to SEQ ID NO: 1974544
aauaugcccaaucucaucu

SEQ ID NO: 1974546 - RNA, 19 nt, Artificial Sequence
  Description of Artificial Sequence: Synthetic oligonucleotide
  Sense strand starting at position 3077 of SEQ ID NO: 1880535
cugcaaucucaaugacaga

SEQ ID NO: 1974547 - RNA, 19 nt, Artificial Sequence
  Description of Artificial Sequence: Synthetic oligonucleotide
  Antisense strand to SEQ ID NO: 1974546
ucugucauugagauugcag

SEQ ID NO: 1974548 - RNA, 19 nt, Artificial Sequence
  Description of Artificial Sequence: Synthetic oligonucleotide
  Sense strand starting at position 3091 of SEQ ID NO: 1880535
acagauuaagaguagugca

SEQ ID NO: 1974549 - RNA, 19 nt, Artificial Sequence
  Description of Artificial Sequence: Synthetic oligonucleotide
  Antisense strand to SEQ ID NO: 1974548
ugcacuacucuuaaucugu

SEQ ID NO: 1974550 - RNA, 19 nt, Artificial Sequence
  Description of Artificial Sequence: Synthetic oligonucleotide
  Sense strand starting at position 3096 of SEQ ID NO: 1880535
uuaagaguagugcauggua

SEQ ID NO: 1974551 - RNA, 19 nt, Artificial Sequence
  Description of Artificial Sequence: Synthetic oligonucleotide
  Antisense strand to SEQ ID NO: 1974550
uaccaugcacuacucuuaa

SEQ ID NO: 1974552 - RNA, 19 nt, Artificial Sequence
  Description of Artificial Sequence: Synthetic oligonucleotide
  Sense strand starting at position 3111 of SEQ ID NO: 1880535
gguagaaucaguuguacac

SEQ ID NO: 1974553 - RNA, 19 nt, Artificial Sequence
  Description of Artificial Sequence: Synthetic oligonucleotide
  Antisense strand to SEQ ID NO: 1974552
guguacaacugauucuacc

SEQ ID NO: 1974554 - RNA, 19 nt, Artificial Sequence
  Description of Artificial Sequence: Synthetic oligonucleotide
  Sense strand starting at position 3437 of SEQ ID NO: 1880535
ugucuuuaaguccaagauu

SEQ ID NO: 1974555 - RNA, 19 nt, Artificial Sequence
  Description of Artificial Sequence: Synthetic oligonucleotide
  Antisense strand to SEQ ID NO: 1974554
aaucuuggacuuaaagaca

SEQ ID NO: 1974556 - RNA, 19 nt, Artificial Sequence
  Description of Artificial Sequence: Synthetic oligonucleotide
  Sense strand starting at position 3590 of SEQ ID NO: 1880535
cugcaucuucuaggaauuc

SEQ ID NO: 1974557 - RNA, 19 nt, Artificial Sequence
  Description of Artificial Sequence: Synthetic oligonucleotide
  Antisense strand to SEQ ID NO: 1974556
gaauuccuagaagaugcag

SEQ ID NO: 1974558 - RNA, 19 nt, Artificial Sequence
  Description of Artificial Sequence: Synthetic oligonucleotide
  Sense strand starting at position 3601 of SEQ ID NO: 1880535
aggaauucuugaccaaggu

SEQ ID NO: 1974559 - RNA, 19 nt, Artificial Sequence
  Description of Artificial Sequence: Synthetic oligonucleotide
  Antisense strand to SEQ ID NO: 1974558
accuuggucaagaauuccu

SEQ ID NO: 1974560 - RNA, 19 nt, Artificial Sequence
  Description of Artificial Sequence: Synthetic oligonucleotide
  Sense strand starting at position 3605 of SEQ ID NO: 1880535
auucuugaccaaggugaau

SEQ ID NO: 1974561 - RNA, 19 nt, Artificial Sequence
  Description of Artificial Sequence: Synthetic oligonucleotide
  Antisense strand to SEQ ID NO: 1974560
auucaccuuggucaagaau

SEQ ID NO: 1974562 - RNA, 19 nt, Artificial Sequence
  Description of Artificial Sequence: Synthetic oligonucleotide
  Sense strand starting at position 3649 of SEQ ID NO: 1880535
guggcuguuccacauauaa

SEQ ID NO: 1974563 - RNA, 19 nt, Artificial Sequence
  Description of Artificial Sequence: Synthetic oligonucleotide
  Antisense strand to SEQ ID NO: 1974562
uuauauguggaacagccac

SEQ ID NO: 1974564 - RNA, 19 nt, Artificial Sequence
  Description of Artificial Sequence: Synthetic oligonucleotide
  Sense strand starting at position 3683 of SEQ ID NO: 1880535
gcauuaccagaauguauua

SEQ ID NO: 1974565 - RNA, 19 nt, Artificial Sequence
  Description of Artificial Sequence: Synthetic oligonucleotide
  Antisense strand to SEQ ID NO: 1974564
uaauacauucugguaaugc

SEQ ID NO: 1974566 - RNA, 19 nt, Artificial Sequence
  Description of Artificial Sequence: Synthetic oligonucleotide
  Sense strand starting at position 3771 of SEQ ID NO: 1880535
gugguuuauuuacugucua

SEQ ID NO: 1974567 - RNA, 19 nt, Artificial Sequence
  Description of Artificial Sequence: Synthetic oligonucleotide
  Antisense strand to SEQ ID NO: 1974566
uagacaguaaauaaaccac

SEQ ID NO: 1974568 - RNA, 19 nt, Artificial Sequence
  Description of Artificial Sequence: Synthetic oligonucleotide
  Sense strand starting at position 263 of SEQ ID NO: 1880536
ccagaaugccuauagcucu

SEQ ID NO: 1974569 - RNA, 19 nt, Artificial Sequence
  Description of Artificial Sequence: Synthetic oligonucleotide
  Antisense strand to SEQ ID NO: 1974568
agagcuauaggcauucugg

SEQ ID NO: 1974570 - RNA, 19 nt, Artificial Sequence
  Description of Artificial Sequence: Synthetic oligonucleotide
  Sense strand starting at position 400 of SEQ ID NO: 1880536
agagccuuuccauggaagu

SEQ ID NO: 1974571 - RNA, 19 nt, Artificial Sequence
  Description of Artificial Sequence: Synthetic oligonucleotide
  Antisense strand to SEQ ID NO: 1974570
acuuccauggaaaggcucu

SEQ ID NO: 1974572 - RNA, 19 nt, Artificial Sequence
  Description of Artificial Sequence: Synthetic oligonucleotide
  Sense strand starting at position 496 of SEQ ID NO: 1880536
uagagugacuguuccugaa

SEQ ID NO: 1974573 - RNA, 19 nt, Artificial Sequence
  Description of Artificial Sequence: Synthetic oligonucleotide
  Antisense strand to SEQ ID NO: 1974572
uucaggaacagucacucua

SEQ ID NO: 1974574 - RNA, 19 nt, Artificial Sequence
  Description of Artificial Sequence: Synthetic oligonucleotide
  Sense strand starting at position 498 of SEQ ID NO: 1880536
gagugacuguuccugaaag

SEQ ID NO: 1974575 - RNA, 19 nt, Artificial Sequence
  Description of Artificial Sequence: Synthetic oligonucleotide
  Antisense strand to SEQ ID NO: 1974574
cuuucaggaacagucacuc

SEQ ID NO: 1974576 - RNA, 19 nt, Artificial Sequence
  Description of Artificial Sequence: Synthetic oligonucleotide
  Sense strand starting at position 510 of SEQ ID NO: 1880536
cugaaagaguugucuacac

SEQ ID NO: 1974577 - RNA, 19 nt, Artificial Sequence
  Description of Artificial Sequence: Synthetic oligonucleotide
  Antisense strand to SEQ ID NO: 1974576
guguagacaacucuuucag

SEQ ID NO: 1974578 - RNA, 19 nt, Artificial Sequence
  Description of Artificial Sequence: Synthetic oligonucleotide
  Sense strand starting at position 514 of SEQ ID NO: 1880536
aagaguugucuacacacug

SEQ ID NO: 1974579 - RNA, 19 nt, Artificial Sequence
  Description of Artificial Sequence: Synthetic oligonucleotide
  Antisense strand to SEQ ID NO: 1974578
caguguguagacaacucuu

SEQ ID NO: 1974580 - RNA, 19 nt, Artificial Sequence
  Description of Artificial Sequence: Synthetic oligonucleotide
  Sense strand starting at position 620 of SEQ ID NO: 1880536
caaggaugccaaugacuga

SEQ ID NO: 1974581 - RNA, 19 nt, Artificial Sequence
  Description of Artificial Sequence: Synthetic oligonucleotide
  Antisense strand to SEQ ID NO: 1974580
ucagucauuggcauccuug

SEQ ID NO: 1974582 - RNA, 19 nt, Artificial Sequence
  Description of Artificial Sequence: Synthetic oligonucleotide
  Sense strand starting at position 733 of SEQ ID NO: 1880536
acugaauuauggguccuau

SEQ ID NO: 1974583 - RNA, 19 nt, Artificial Sequence
  Description of Artificial Sequence: Synthetic oligonucleotide
  Antisense strand to SEQ ID NO: 1974582
auaggacccauaauucagu

SEQ ID NO: 1974584 - RNA, 19 nt, Artificial Sequence
  Description of Artificial Sequence: Synthetic oligonucleotide
  Sense strand starting at position 808 of SEQ ID NO: 1880536
ccgcuagauguagacuaua

SEQ ID NO: 1974585 - RNA, 19 nt, Artificial Sequence
  Description of Artificial Sequence: Synthetic oligonucleotide
  Antisense strand to SEQ ID NO: 1974584
uauagucuacaucuagcgg

SEQ ID NO: 1974586 - RNA, 19 nt, Artificial Sequence
  Description of Artificial Sequence: Synthetic oligonucleotide
  Sense strand starting at position 964 of SEQ ID NO: 1880536
gccuauuaucaccauggga

SEQ ID NO: 1974587 - RNA, 19 nt, Artificial Sequence
  Description of Artificial Sequence: Synthetic oligonucleotide
  Antisense strand to SEQ ID NO: 1974586
ucccauggugauaauaggc

SEQ ID NO: 1974588 - RNA, 19 nt, Artificial Sequence
  Description of Artificial Sequence: Synthetic oligonucleotide
  Sense strand starting at position 1110 of SEQ ID NO: 1880536
gacucacagcuuugugaau

SEQ ID NO: 1974589 - RNA, 19 nt, Artificial Sequence
  Description of Artificial Sequence: Synthetic oligonucleotide
  Antisense strand to SEQ ID NO: 1974588
auucacaaagcugugaguc

SEQ ID NO: 1974590 - RNA, 19 nt, Artificial Sequence
  Description of Artificial Sequence: Synthetic oligonucleotide
  Sense strand starting at position 1180 of SEQ ID NO: 1880536
cuagcaauagcagacugau

SEQ ID NO: 1974591 - RNA, 19 nt, Artificial Sequence
  Description of Artificial Sequence: Synthetic oligonucleotide
  Antisense strand to SEQ ID NO: 1974590
aucagucugcuauugcuag

SEQ ID NO: 1974592 - RNA, 19 nt, Artificial Sequence
  Description of Artificial Sequence: Synthetic oligonucleotide
  Sense strand starting at position 1183 of SEQ ID NO: 1880536
gcaauagcagacugauaca

SEQ ID NO: 1974593 - RNA, 19 nt, Artificial Sequence
  Description of Artificial Sequence: Synthetic oligonucleotide
  Antisense strand to SEQ ID NO: 1974592
uguaucagucugcuauugc

SEQ ID NO: 1974594 - RNA, 19 nt, Artificial Sequence
  Description of Artificial Sequence: Synthetic oligonucleotide
  Sense strand starting at position 1567 of SEQ ID NO: 1880536
ugggucagaucaucaguaa

SEQ ID NO: 1974595 - RNA, 19 nt, Artificial Sequence
  Description of Artificial Sequence: Synthetic oligonucleotide
  Antisense strand to SEQ ID NO: 1974594
uuacugaugaucugaccca

SEQ ID NO: 1974596 - RNA, 19 nt, Artificial Sequence
  Description of Artificial Sequence: Synthetic oligonucleotide
  Sense strand starting at position 1780 of SEQ ID NO: 1880536
uaccuugauccaugaggac

SEQ ID NO: 1974597 - RNA, 19 nt, Artificial Sequence
  Description of Artificial Sequence: Synthetic oligonucleotide
  Antisense strand to SEQ ID NO: 1974596
guccucauggaucaaggua

SEQ ID NO: 1974598 - RNA, 19 nt, Artificial Sequence
  Description of Artificial Sequence: Synthetic oligonucleotide
  Sense strand starting at position 2009 of SEQ ID NO: 1880536
agagaccuucccuggcuaa

SEQ ID NO: 1974599 - RNA, 19 nt, Artificial Sequence
  Description of Artificial Sequence: Synthetic oligonucleotide
  Antisense strand to SEQ ID NO: 1974598
uuagccagggaaggucucu

SEQ ID NO: 1974600 - RNA, 19 nt, Artificial Sequence
  Description of Artificial Sequence: Synthetic oligonucleotide
  Sense strand starting at position 2321 of SEQ ID NO: 1880536
gauguauuaccagggccua

SEQ ID NO: 1974601 - RNA, 19 nt, Artificial Sequence
  Description of Artificial Sequence: Synthetic oligonucleotide
  Antisense strand to SEQ ID NO: 1974600
uaggcccugguaauacauc

SEQ ID NO: 1974602 - RNA, 19 nt, Artificial Sequence
  Description of Artificial Sequence: Synthetic oligonucleotide
  Sense strand starting at position 2416 of SEQ ID NO: 1880536
gggauacaauuggcuagau

SEQ ID NO: 1974603 - RNA, 19 nt, Artificial Sequence
  Description of Artificial Sequence: Synthetic oligonucleotide
  Antisense strand to SEQ ID NO: 1974602
aucuagccaauuguauccc

SEQ ID NO: 1974604 - RNA, 19 nt, Artificial Sequence
  Description of Artificial Sequence: Synthetic oligonucleotide
  Sense strand starting at position 2417 of SEQ ID NO: 1880536
ggauacaauuggcuagauu

SEQ ID NO: 1974605 - RNA, 19 nt, Artificial Sequence
  Description of Artificial Sequence: Synthetic oligonucleotide
  Antisense strand to SEQ ID NO: 1974604
aaucuagccaauuguaucc

SEQ ID NO: 1974606 - RNA, 19 nt, Artificial Sequence
  Description of Artificial Sequence: Synthetic oligonucleotide
  Sense strand starting at position 2470 of SEQ ID NO: 1880536
ugcagaaaggcuggagaau

SEQ ID NO: 1974607 - RNA, 19 nt, Artificial Sequence
  Description of Artificial Sequence: Synthetic oligonucleotide
  Antisense strand to SEQ ID NO: 1974606
auucuccagccuuucugca

SEQ ID NO: 1974608 - RNA, 19 nt, Artificial Sequence
  Description of Artificial Sequence: Synthetic oligonucleotide
  Sense strand starting at position 2561 of SEQ ID NO: 1880536
gaagaaacuucugcauggu

SEQ ID NO: 1974609 - RNA, 19 nt, Artificial Sequence
  Description of Artificial Sequence: Synthetic oligonucleotide
  Antisense strand to SEQ ID NO: 1974608
accaugcagaaguuucuuc

SEQ ID NO: 1974610 - RNA, 19 nt, Artificial Sequence
  Description of Artificial Sequence: Synthetic oligonucleotide
  Sense strand starting at position 2600 of SEQ ID NO: 1880536
acucccagucauuggagau

SEQ ID NO: 1974611 - RNA, 19 nt, Artificial Sequence
  Description of Artificial Sequence: Synthetic oligonucleotide
  Antisense strand to SEQ ID NO: 1974610
aucuccaaugacugggagu

SEQ ID NO: 1974612 - RNA, 19 nt, Artificial Sequence
  Description of Artificial Sequence: Synthetic oligonucleotide
  Sense strand starting at position 2639 of SEQ ID NO: 1880536
acagaucaaggacgugaua

SEQ ID NO: 1974613 - RNA, 19 nt, Artificial Sequence
  Description of Artificial Sequence: Synthetic oligonucleotide
  Antisense strand to SEQ ID NO: 1974612
uaucacguccuugaucugu

SEQ ID NO: 1974614 - RNA, 19 nt, Artificial Sequence
  Description of Artificial Sequence: Synthetic oligonucleotide
  Sense strand starting at position 2641 of SEQ ID NO: 1880536
agaucaaggacgugauaug

SEQ ID NO: 1974615 - RNA, 19 nt, Artificial Sequence
  Description of Artificial Sequence: Synthetic oligonucleotide
  Antisense strand to SEQ ID NO: 1974614
cauaucacguccuugaucu

SEQ ID NO: 1974616 - RNA, 19 nt, Artificial Sequence
  Description of Artificial Sequence: Synthetic oligonucleotide
  Sense strand starting at position 2642 of SEQ ID NO: 1880536
gaucaaggacgugauaugu

SEQ ID NO: 1974617 - RNA, 19 nt, Artificial Sequence
  Description of Artificial Sequence: Synthetic oligonucleotide
  Antisense strand to SEQ ID NO: 1974616
acauaucacguccuugauc

SEQ ID NO: 1974618 - RNA, 19 nt, Artificial Sequence
  Description of Artificial Sequence: Synthetic oligonucleotide
  Sense strand starting at position 2646 of SEQ ID NO: 1880536
aaggacgugauauguugaa

SEQ ID NO: 1974619 - RNA, 19 nt, Artificial Sequence
  Description of Artificial Sequence: Synthetic oligonucleotide
  Antisense strand to SEQ ID NO: 1974618
uucaacauaucacguccuu

SEQ ID NO: 1974620 - RNA, 19 nt, Artificial Sequence
  Description of Artificial Sequence: Synthetic oligonucleotide
  Sense strand starting at position 2650 of SEQ ID NO: 1880536
acgugauauguugaaagca

SEQ ID NO: 1974621 - RNA, 19 nt, Artificial Sequence
  Description of Artificial Sequence: Synthetic oligonucleotide
  Antisense strand to SEQ ID NO: 1974620
ugcuuucaacauaucacgu

SEQ ID NO: 1974622 - RNA, 19 nt, Artificial Sequence
  Description of Artificial Sequence: Synthetic oligonucleotide
  Sense strand starting at position 2678 of SEQ ID NO: 1880536
ggaugauuaguaggguuga

SEQ ID NO: 1974623 - RNA, 19 nt, Artificial Sequence
  Description of Artificial Sequence: Synthetic oligonucleotide
  Antisense strand to SEQ ID NO: 1974622
ucaacccuacuaaucaucc

SEQ ID NO: 1974624 - RNA, 19 nt, Artificial Sequence
  Description of Artificial Sequence: Synthetic oligonucleotide
  Sense strand starting at position 2689 of SEQ ID NO: 1880536
aggguugaaagguaugcau

SEQ ID NO: 1974625 - RNA, 19 nt, Artificial Sequence
  Description of Artificial Sequence: Synthetic oligonucleotide
  Antisense strand to SEQ ID NO: 1974624
augcauaccuuucaacccu

SEQ ID NO: 1974626 - RNA, 19 nt, Artificial Sequence
  Description of Artificial Sequence: Synthetic oligonucleotide
  Sense strand starting at position 2703 of SEQ ID NO: 1880536
ugcauuucugaguguccuu

SEQ ID NO: 1974627 - RNA, 19 nt, Artificial Sequence
  Description of Artificial Sequence: Synthetic oligonucleotide
  Antisense strand to SEQ ID NO: 1974626
aaggacacucagaaaugca

SEQ ID NO: 1974628 - RNA, 19 nt, Artificial Sequence
  Description of Artificial Sequence: Synthetic oligonucleotide
  Sense strand starting at position 2816 of SEQ ID NO: 1880536
uuggauuccagaugcaaga

SEQ ID NO: 1974629 - RNA, 19 nt, Artificial Sequence
  Description of Artificial Sequence: Synthetic oligonucleotide
  Antisense strand to SEQ ID NO: 1974628
ucuugcaucuggaauccaa

SEQ ID NO: 1974630 - RNA, 19 nt, Artificial Sequence
  Description of Artificial Sequence: Synthetic oligonucleotide
  Sense strand starting at position 2888 of SEQ ID NO: 1880536
guucucccuguguaauuaa

SEQ ID NO: 1974631 - RNA, 19 nt, Artificial Sequence
  Description of Artificial Sequence: Synthetic oligonucleotide
  Antisense strand to SEQ ID NO: 1974630
uuaauuacacagggagaac

SEQ ID NO: 1974632 - RNA, 19 nt, Artificial Sequence
  Description of Artificial Sequence: Synthetic oligonucleotide
  Sense strand starting at position 3156 of SEQ ID NO: 1880536
uauugucagggcugaacaa

SEQ ID NO: 1974633 - RNA, 19 nt, Artificial Sequence
  Description of Artificial Sequence: Synthetic oligonucleotide
  Antisense strand to SEQ ID NO: 1974632
uuguucagcccugacaaua

SEQ ID NO: 1974634 - RNA, 19 nt, Artificial Sequence
  Description of Artificial Sequence: Synthetic oligonucleotide
  Sense strand starting at position 3181 of SEQ ID NO: 1880536
caaggcauccuggguuaaa

SEQ ID NO: 1974635 - RNA, 19 nt, Artificial Sequence
  Description of Artificial Sequence: Synthetic oligonucleotide
  Antisense strand to SEQ ID NO: 1974634
uuuaacccaggaugccuug

SEQ ID NO: 1974636 - RNA, 19 nt, Artificial Sequence
  Description of Artificial Sequence: Synthetic oligonucleotide
  Sense strand starting at position 3182 of SEQ ID NO: 1880536
aaggcauccuggguuaaag

SEQ ID NO: 1974637 - RNA, 19 nt, Artificial Sequence
  Description of Artificial Sequence: Synthetic oligonucleotide
  Antisense strand to SEQ ID NO: 1974636
cuuuaacccaggaugccuu

SEQ ID NO: 1974638 - RNA, 19 nt, Artificial Sequence
  Description of Artificial Sequence: Synthetic oligonucleotide
  Sense strand starting at position 3242 of SEQ ID NO: 1880536
cagcuuccugcuggagaaa

SEQ ID NO: 1974639 - RNA, 19 nt, Artificial Sequence
  Description of Artificial Sequence: Synthetic oligonucleotide
  Antisense strand to SEQ ID NO: 1974638
uuucuccagcaggaagcug

SEQ ID NO: 1974640 - RNA, 19 nt, Artificial Sequence
  Description of Artificial Sequence: Synthetic oligonucleotide
  Sense strand starting at position 3401 of SEQ ID NO: 1880536
ugaggucucuuuccugaug

SEQ ID NO: 1974641 - RNA, 19 nt, Artificial Sequence
  Description of Artificial Sequence: Synthetic oligonucleotide
  Antisense strand to SEQ ID NO: 1974640
caucaggaaagagaccuca

SEQ ID NO: 1974642 - RNA, 19 nt, Artificial Sequence
  Description of Artificial Sequence: Synthetic oligonucleotide
  Sense strand starting at position 3402 of SEQ ID NO: 1880536
gaggucucuuuccugauga

SEQ ID NO: 1974643 - RNA, 19 nt, Artificial Sequence
  Description of Artificial Sequence: Synthetic oligonucleotide
  Antisense strand to SEQ ID NO: 1974642
ucaucaggaaagagaccuc

SEQ ID NO: 1974644 - RNA, 19 nt, Artificial Sequence
  Description of Artificial Sequence: Synthetic oligonucleotide
  Sense strand starting at position 3404 of SEQ ID NO: 1880536
ggucucuuuccugaugacu

SEQ ID NO: 1974645 - RNA, 19 nt, Artificial Sequence
  Description of Artificial Sequence: Synthetic oligonucleotide
  Antisense strand to SEQ ID NO: 1974644
agucaucaggaaagagacc

SEQ ID NO: 1974646 - RNA, 19 nt, Artificial Sequence
  Description of Artificial Sequence: Synthetic oligonucleotide
  Sense strand starting at position 3865 of SEQ ID NO: 1880536
cggaggguucgggaacuaa

SEQ ID NO: 1974647 - RNA, 19 nt, Artificial Sequence
  Description of Artificial Sequence: Synthetic oligonucleotide
  Antisense strand to SEQ ID NO: 1974646
uuaguucccgaacccuccg

SEQ ID NO: 1974648 - RNA, 19 nt, Artificial Sequence
  Description of Artificial Sequence: Synthetic oligonucleotide
  Sense strand starting at position 44 of SEQ ID NO: 1880537
cucuaaucaugaucaguug

SEQ ID NO: 1974649 - RNA, 19 nt, Artificial Sequence
  Description of Artificial Sequence: Synthetic oligonucleotide
  Antisense strand to SEQ ID NO: 1974648
caacugaucaugauuagag

SEQ ID NO: 1974650 - RNA, 19 nt, Artificial Sequence
  Description of Artificial Sequence: Synthetic oligonucleotide
  Sense strand starting at position 52 of SEQ ID NO: 1880537
augaucaguugucuuuaac

SEQ ID NO: 1974651 - RNA, 19 nt, Artificial Sequence
  Description of Artificial Sequence: Synthetic oligonucleotide
  Antisense strand to SEQ ID NO: 1974650
guuaaagacaacugaucau

SEQ ID NO: 1974652 - RNA, 19 nt, Artificial Sequence
  Description of Artificial Sequence: Synthetic oligonucleotide
  Sense strand starting at position 55 of SEQ ID NO: 1880537
aucaguugucuuuaacaac

SEQ ID NO: 1974653 - RNA, 19 nt, Artificial Sequence
  Description of Artificial Sequence: Synthetic oligonucleotide
  Antisense strand to SEQ ID NO: 1974652
guuguuaaagacaacugau

SEQ ID NO: 1974654 - RNA, 19 nt, Artificial Sequence
  Description of Artificial Sequence: Synthetic oligonucleotide
  Sense strand starting at position 168 of SEQ ID NO: 1880537
agaaauauugcggaccuau

SEQ ID NO: 1974655 - RNA, 19 nt, Artificial Sequence
  Description of Artificial Sequence: Synthetic oligonucleotide
  Antisense strand to SEQ ID NO: 1974654
auagguccgcaauauuucu

SEQ ID NO: 1974656 - RNA, 19 nt, Artificial Sequence
  Description of Artificial Sequence: Synthetic oligonucleotide
  Sense strand starting at position 181 of SEQ ID NO: 1880537
accuauaauguugacguua

SEQ ID NO: 1974657 - RNA, 19 nt, Artificial Sequence
  Description of Artificial Sequence: Synthetic oligonucleotide
  Antisense strand to SEQ ID NO: 1974656
uaacgucaacauuauaggu

SEQ ID NO: 1974658 - RNA, 19 nt, Artificial Sequence
  Description of Artificial Sequence: Synthetic oligonucleotide
  Sense strand starting at position 349 of SEQ ID NO: 1880537
auaugaggauacuuuguuu

SEQ ID NO: 1974659 - RNA, 19 nt, Artificial Sequence
  Description of Artificial Sequence: Synthetic oligonucleotide
  Antisense strand to SEQ ID NO: 1974658
aaacaaaguauccucauau

SEQ ID NO: 1974660 - RNA, 19 nt, Artificial Sequence
  Description of Artificial Sequence: Synthetic oligonucleotide
  Sense strand starting at position 436 of SEQ ID NO: 1880537
uguguuugacuugauucuu

SEQ ID NO: 1974661 - RNA, 19 nt, Artificial Sequence
  Description of Artificial Sequence: Synthetic oligonucleotide
  Antisense strand to SEQ ID NO: 1974660
aagaaucaagucaaacaca

SEQ ID NO: 1974662 - RNA, 19 nt, Artificial Sequence
  Description of Artificial Sequence: Synthetic oligonucleotide
  Sense strand starting at position 491 of SEQ ID NO: 1880537
uuggaauuaucagucauca

SEQ ID NO: 1974663 - RNA, 19 nt, Artificial Sequence
  Description of Artificial Sequence: Synthetic oligonucleotide
  Antisense strand to SEQ ID NO: 1974662
ugaugacugauaauuccaa

SEQ ID NO: 1974664 - RNA, 19 nt, Artificial Sequence
  Description of Artificial Sequence: Synthetic oligonucleotide
  Sense strand starting at position 575 of SEQ ID NO: 1880537
uuaauaguguaaccugaaa

SEQ ID NO: 1974665 - RNA, 19 nt, Artificial Sequence
  Description of Artificial Sequence: Synthetic oligonucleotide
  Antisense strand to SEQ ID NO: 1974664
uuucagguuacacuauuaa

SEQ ID NO: 1974666 - RNA, 19 nt, Artificial Sequence
  Description of Artificial Sequence: Synthetic oligonucleotide
  Sense strand starting at position 1103 of SEQ ID NO: 1880537
augugcuuugaucaucgaa

SEQ ID NO: 1974667 - RNA, 19 nt, Artificial Sequence
  Description of Artificial Sequence: Synthetic oligonucleotide
  Antisense strand to SEQ ID NO: 1974666
uucgaugaucaaagcacau

SEQ ID NO: 1974668 - RNA, 19 nt, Artificial Sequence
  Description of Artificial Sequence: Synthetic oligonucleotide
  Sense strand starting at position 1151 of SEQ ID NO: 1880537
agagcuugagcuuauguau

SEQ ID NO: 1974669 - RNA, 19 nt, Artificial Sequence
  Description of Artificial Sequence: Synthetic oligonucleotide
  Antisense strand to SEQ ID NO: 1974668
auacauaagcucaagcucu

SEQ ID NO: 1974670 - RNA, 19 nt, Artificial Sequence
  Description of Artificial Sequence: Synthetic oligonucleotide
  Sense strand starting at position 1202 of SEQ ID NO: 1880537
gagaaucacuggucuauag

SEQ ID NO: 1974671 - RNA, 19 nt, Artificial Sequence
  Description of Artificial Sequence: Synthetic oligonucleotide
  Antisense strand to SEQ ID NO: 1974670
cuauagaccagugauucuc

SEQ ID NO: 1974672 - RNA, 19 nt, Artificial Sequence
  Description of Artificial Sequence: Synthetic oligonucleotide
  Sense strand starting at position 1204 of SEQ ID NO: 1880537
gaaucacuggucuauagca

SEQ ID NO: 1974673 - RNA, 19 nt, Artificial Sequence
  Description of Artificial Sequence: Synthetic oligonucleotide
  Antisense strand to SEQ ID NO: 1974672
ugcuauagaccagugauuc

SEQ ID NO: 1974674 - RNA, 19 nt, Artificial Sequence
  Description of Artificial Sequence: Synthetic oligonucleotide
  Sense strand starting at position 1206 of SEQ ID NO: 1880537
aucacuggucuauagcaua

SEQ ID NO: 1974675 - RNA, 19 nt, Artificial Sequence
  Description of Artificial Sequence: Synthetic oligonucleotide
  Antisense strand to SEQ ID NO: 1974674
uaugcuauagaccagugau

SEQ ID NO: 1974676 - RNA, 19 nt, Artificial Sequence
  Description of Artificial Sequence: Synthetic oligonucleotide
  Sense strand starting at position 1217 of SEQ ID NO: 1880537
auagcauauugggcaaaua

SEQ ID NO: 1974677 - RNA, 19 nt, Artificial Sequence
  Description of Artificial Sequence: Synthetic oligonucleotide
  Antisense strand to SEQ ID NO: 1974676
uauuugcccaauaugcuau

SEQ ID NO: 1974678 - RNA, 19 nt, Artificial Sequence
  Description of Artificial Sequence: Synthetic oligonucleotide
  Sense strand starting at position 1282 of SEQ ID NO: 1880537
gugacauuuccaggacguc

SEQ ID NO: 1974679 - RNA, 19 nt, Artificial Sequence
  Description of Artificial Sequence: Synthetic oligonucleotide
  Antisense strand to SEQ ID NO: 1974678
gacguccuggaaaugucac

SEQ ID NO: 1974680 - RNA, 19 nt, Artificial Sequence
  Description of Artificial Sequence: Synthetic oligonucleotide
  Sense strand starting at position 1367 of SEQ ID NO: 1880537
uuguuucuacgugaaagga

SEQ ID NO: 1974681 - RNA, 19 nt, Artificial Sequence
  Description of Artificial Sequence: Synthetic oligonucleotide
  Antisense strand to SEQ ID NO: 1974680
uccuuucacguagaaacaa

SEQ ID NO: 1974682 - RNA, 19 nt, Artificial Sequence
  Description of Artificial Sequence: Synthetic oligonucleotide
  Sense strand starting at position 1396 of SEQ ID NO: 1880537
aacuguuuagaccgggaga

SEQ ID NO: 1974683 - RNA, 19 nt, Artificial Sequence
  Description of Artificial Sequence: Synthetic oligonucleotide
  Antisense strand to SEQ ID NO: 1974682
ucucccggucuaaacaguu

SEQ ID NO: 1974684 - RNA, 19 nt, Artificial Sequence
  Description of Artificial Sequence: Synthetic oligonucleotide
  Sense strand starting at position 1397 of SEQ ID NO: 1880537
acuguuuagaccgggagaa

SEQ ID NO: 1974685 - RNA, 19 nt, Artificial Sequence
  Description of Artificial Sequence: Synthetic oligonucleotide
  Antisense strand to SEQ ID NO: 1974684
uucucccggucuaaacagu

SEQ ID NO: 1974686 - RNA, 19 nt, Artificial Sequence
  Description of Artificial Sequence: Synthetic oligonucleotide
  Sense strand starting at position 1398 of SEQ ID NO: 1880537
cuguuuagaccgggagaag

SEQ ID NO: 1974687 - RNA, 19 nt, Artificial Sequence
  Description of Artificial Sequence: Synthetic oligonucleotide
  Antisense strand to SEQ ID NO: 1974686
cuucucccggucuaaacag

SEQ ID NO: 1974688 - RNA, 19 nt, Artificial Sequence
  Description of Artificial Sequence: Synthetic oligonucleotide
  Sense strand starting at position 1651 of SEQ ID NO: 1880537
acuggugugauguacauca

SEQ ID NO: 1974689 - RNA, 19 nt, Artificial Sequence
  Description of Artificial Sequence: Synthetic oligonucleotide
  Antisense strand to SEQ ID NO: 1974688
ugauguacaucacaccagu

SEQ ID NO: 1974690 - RNA, 19 nt, Artificial Sequence
  Description of Artificial Sequence: Synthetic oligonucleotide
  Sense strand starting at position 2003 of SEQ ID NO: 1880537
uguagcuccaguuaaggaa

SEQ ID NO: 1974691 - RNA, 19 nt, Artificial Sequence
  Description of Artificial Sequence: Synthetic oligonucleotide
  Antisense strand to SEQ ID NO: 1974690
uuccuuaacuggagcuaca

SEQ ID NO: 1974692 - RNA, 19 nt, Artificial Sequence
  Description of Artificial Sequence: Synthetic oligonucleotide
  Sense strand starting at position 2026 of SEQ ID NO: 1880537
gggagagugcucagccugu

SEQ ID NO: 1974693 - RNA, 19 nt, Artificial Sequence
  Description of Artificial Sequence: Synthetic oligonucleotide
  Antisense strand to SEQ ID NO: 1974692
acaggcugagcacucuccc

SEQ ID NO: 1974694 - RNA, 19 nt, Artificial Sequence
  Description of Artificial Sequence: Synthetic oligonucleotide
  Sense strand starting at position 2140 of SEQ ID NO: 1880537
agaucaaagcaugguguua

SEQ ID NO: 1974695 - RNA, 19 nt, Artificial Sequence
  Description of Artificial Sequence: Synthetic oligonucleotide
  Antisense strand to SEQ ID NO: 1974694
uaacaccaugcuuugaucu

SEQ ID NO: 1974696 - RNA, 19 nt, Artificial Sequence
  Description of Artificial Sequence: Synthetic oligonucleotide
  Sense strand starting at position 2163 of SEQ ID NO: 1880537
cccuuauaagaguaguucu

SEQ ID NO: 1974697 - RNA, 19 nt, Artificial Sequence
  Description of Artificial Sequence: Synthetic oligonucleotide
  Antisense strand to SEQ ID NO: 1974696
agaacuacucuuauaaggg

SEQ ID NO: 1974698 - RNA, 19 nt, Artificial Sequence
  Description of Artificial Sequence: Synthetic oligonucleotide
  Sense strand starting at position 2175 of SEQ ID NO: 1880537
uaguucuuugguuaaguua

SEQ ID NO: 1974699 - RNA, 19 nt, Artificial Sequence
  Description of Artificial Sequence: Synthetic oligonucleotide
  Antisense strand to SEQ ID NO: 1974698
uaacuuaaccaaagaacua

SEQ ID NO: 1974700 - RNA, 19 nt, Artificial Sequence
  Description of Artificial Sequence: Synthetic oligonucleotide
  Sense strand starting at position 2280 of SEQ ID NO: 1880537
agauaaugggccuggguuu

SEQ ID NO: 1974701 - RNA, 19 nt, Artificial Sequence
  Description of Artificial Sequence: Synthetic oligonucleotide
  Antisense strand to SEQ ID NO: 1974700
aaacccaggcccauuaucu

SEQ ID NO: 1974702 - RNA, 19 nt, Artificial Sequence
  Description of Artificial Sequence: Synthetic oligonucleotide
  Sense strand starting at position 2311 of SEQ ID NO: 1880537
ucagauguaugauuccaaa

SEQ ID NO: 1974703 - RNA, 19 nt, Artificial Sequence
  Description of Artificial Sequence: Synthetic oligonucleotide
  Antisense strand to SEQ ID NO: 1974702
uuuggaaucauacaucuga

SEQ ID NO: 1974704 - RNA, 19 nt, Artificial Sequence
  Description of Artificial Sequence: Synthetic oligonucleotide
  Sense strand starting at position 2610 of SEQ ID NO: 1880537
gggcaaauccauugacuuu

SEQ ID NO: 1974705 - RNA, 19 nt, Artificial Sequence
  Description of Artificial Sequence: Synthetic oligonucleotide
  Antisense strand to SEQ ID NO: 1974704
aaagucaauggauuugccc

SEQ ID NO: 1974706 - RNA, 19 nt, Artificial Sequence
  Description of Artificial Sequence: Synthetic oligonucleotide
  Sense strand starting at position 3092 of SEQ ID NO: 1880537
guugcuuguagauaagaac

SEQ ID NO: 1974707 - RNA, 19 nt, Artificial Sequence
  Description of Artificial Sequence: Synthetic oligonucleotide
  Antisense strand to SEQ ID NO: 1974706
guucuuaucuacaagcaac

SEQ ID NO: 1974708 - RNA, 19 nt, Artificial Sequence
  Description of Artificial Sequence: Synthetic oligonucleotide
  Sense strand starting at position 3124 of SEQ ID NO: 1880537
auacuuguaucagugauug

SEQ ID NO: 1974709 - RNA, 19 nt, Artificial Sequence
  Description of Artificial Sequence: Synthetic oligonucleotide
  Antisense strand to SEQ ID NO: 1974708
caaucacugauacaaguau

SEQ ID NO: 1974710 - RNA, 19 nt, Artificial Sequence
  Description of Artificial Sequence: Synthetic oligonucleotide
  Sense strand starting at position 3130 of SEQ ID NO: 1880537
guaucagugauugguauuu

SEQ ID NO: 1974711 - RNA, 19 nt, Artificial Sequence
  Description of Artificial Sequence: Synthetic oligonucleotide
  Antisense strand to SEQ ID NO: 1974710
aaauaccaaucacugauac

SEQ ID NO: 1974712 - RNA, 19 nt, Artificial Sequence
  Description of Artificial Sequence: Synthetic oligonucleotide
  Sense strand starting at position 3172 of SEQ ID NO: 1880537
auauauuguccauagcacu

SEQ ID NO: 1974713 - RNA, 19 nt, Artificial Sequence
  Description of Artificial Sequence: Synthetic oligonucleotide
  Antisense strand to SEQ ID NO: 1974712
agugcuauggacaauauau

SEQ ID NO: 1974714 - RNA, 19 nt, Artificial Sequence
  Description of Artificial Sequence: Synthetic oligonucleotide
  Sense strand starting at position 3308 of SEQ ID NO: 1880537
uuugaaauagcaugaugua

SEQ ID NO: 1974715 - RNA, 19 nt, Artificial Sequence
  Description of Artificial Sequence: Synthetic oligonucleotide
  Antisense strand to SEQ ID NO: 1974714
uacaucaugcuauuucaaa

SEQ ID NO: 1974716 - RNA, 19 nt, Artificial Sequence
  Description of Artificial Sequence: Synthetic oligonucleotide
  Sense strand starting at position 3750 of SEQ ID NO: 1880537
agggcaucagcguaagacu

SEQ ID NO: 1974717 - RNA, 19 nt, Artificial Sequence
  Description of Artificial Sequence: Synthetic oligonucleotide
  Antisense strand to SEQ ID NO: 1974716
agucuuacgcugaugcccu

SEQ ID NO: 1974718 - RNA, 19 nt, Artificial Sequence
  Description of Artificial Sequence: Synthetic oligonucleotide
  Sense strand starting at position 3828 of SEQ ID NO: 1880537
gguugaauaguauacuauu

SEQ ID NO: 1974719 - RNA, 19 nt, Artificial Sequence
  Description of Artificial Sequence: Synthetic oligonucleotide
  Antisense strand to SEQ ID NO: 1974718
aauaguauacuauucaacc

SEQ ID NO: 1974720 - RNA, 19 nt, Artificial Sequence
  Description of Artificial Sequence: Synthetic oligonucleotide
  Sense strand starting at position 3848 of SEQ ID NO: 1880537
auaguacuugggcagcaaa

SEQ ID NO: 1974721 - RNA, 19 nt, Artificial Sequence
  Description of Artificial Sequence: Synthetic oligonucleotide
  Antisense strand to SEQ ID NO: 1974720
uuugcugcccaaguacuau

SEQ ID NO: 1974722 - RNA, 19 nt, Artificial Sequence
  Description of Artificial Sequence: Synthetic oligonucleotide
  Sense strand starting at position 3917 of SEQ ID NO: 1880537
gguguugaugcuuacaaga

SEQ ID NO: 1974723 - RNA, 19 nt, Artificial Sequence
  Description of Artificial Sequence: Synthetic oligonucleotide
  Antisense strand to SEQ ID NO: 1974722
ucuuguaagcaucaacacc

SEQ ID NO: 1974724 - RNA, 19 nt, Artificial Sequence
  Description of Artificial Sequence: Synthetic oligonucleotide
  Sense strand starting at position 3956 of SEQ ID NO: 1880537
gaccaugucucucuuggau

SEQ ID NO: 1974725 - RNA, 19 nt, Artificial Sequence
  Description of Artificial Sequence: Synthetic oligonucleotide
  Antisense strand to SEQ ID NO: 1974724
auccaagagagacaugguc

SEQ ID NO: 1974726 - RNA, 19 nt, Artificial Sequence
  Description of Artificial Sequence: Synthetic oligonucleotide
  Sense strand starting at position 3977 of SEQ ID NO: 1880537
guauuccuaggguauuaca

SEQ ID NO: 1974727 - RNA, 19 nt, Artificial Sequence
  Description of Artificial Sequence: Synthetic oligonucleotide
  Antisense strand to SEQ ID NO: 1974726
uguaauacccuaggaauac

SEQ ID NO: 1974728 - RNA, 19 nt, Artificial Sequence
  Description of Artificial Sequence: Synthetic oligonucleotide
  Sense strand starting at position 77 of SEQ ID NO: 1880538
ggaagucucagcugaggag

SEQ ID NO: 1974729 - RNA, 19 nt, Artificial Sequence
  Description of Artificial Sequence: Synthetic oligonucleotide
  Antisense strand to SEQ ID NO: 1974728
cuccucagcugagacuucc

SEQ ID NO: 1974730 - RNA, 19 nt, Artificial Sequence
  Description of Artificial Sequence: Synthetic oligonucleotide
  Sense strand starting at position 289 of SEQ ID NO: 1880538
ccaggcagucuuuaugauu

SEQ ID NO: 1974731 - RNA, 19 nt, Artificial Sequence
  Description of Artificial Sequence: Synthetic oligonucleotide
  Antisense strand to SEQ ID NO: 1974730
aaucauaaagacugccugg

SEQ ID NO: 1974732 - RNA, 19 nt, Artificial Sequence
  Description of Artificial Sequence: Synthetic oligonucleotide
  Sense strand starting at position 295 of SEQ ID NO: 1880538
agucuuuaugauugaccau

SEQ ID NO: 1974733 - RNA, 19 nt, Artificial Sequence
  Description of Artificial Sequence: Synthetic oligonucleotide
  Antisense strand to SEQ ID NO: 1974732
auggucaaucauaaagacu

SEQ ID NO: 1974734 - RNA, 19 nt, Artificial Sequence
  Description of Artificial Sequence: Synthetic oligonucleotide
  Sense strand starting at position 308 of SEQ ID NO: 1880538
gaccaugguuuggcaugaa

SEQ ID NO: 1974735 - RNA, 19 nt, Artificial Sequence
  Description of Artificial Sequence: Synthetic oligonucleotide
  Antisense strand to SEQ ID NO: 1974734
uucaugccaaaccaugguc

SEQ ID NO: 1974736 - RNA, 19 nt, Artificial Sequence
  Description of Artificial Sequence: Synthetic oligonucleotide
  Sense strand starting at position 311 of SEQ ID NO: 1880538
caugguuuggcaugaaaga

SEQ ID NO: 1974737 - RNA, 19 nt, Artificial Sequence
  Description of Artificial Sequence: Synthetic oligonucleotide
  Antisense strand to SEQ ID NO: 1974736
ucuuucaugccaaaccaug

SEQ ID NO: 1974738 - RNA, 19 nt, Artificial Sequence
  Description of Artificial Sequence: Synthetic oligonucleotide
  Sense strand starting at position 904 of SEQ ID NO: 1880538
guuguaugccacugauuuc

SEQ ID NO: 1974739 - RNA, 19 nt, Artificial Sequence
  Description of Artificial Sequence: Synthetic oligonucleotide
  Antisense strand to SEQ ID NO: 1974738
gaaaucaguggcauacaac

SEQ ID NO: 1974740 - RNA, 19 nt, Artificial Sequence
  Description of Artificial Sequence: Synthetic oligonucleotide
  Sense strand starting at position 1163 of SEQ ID NO: 1880538
gguguugauuuagccugua

SEQ ID NO: 1974741 - RNA, 19 nt, Artificial Sequence
  Description of Artificial Sequence: Synthetic oligonucleotide
  Antisense strand to SEQ ID NO: 1974740
uacaggcuaaaucaacacc

SEQ ID NO: 1974742 - RNA, 19 nt, Artificial Sequence
  Description of Artificial Sequence: Synthetic oligonucleotide
  Sense strand starting at position 1166 of SEQ ID NO: 1880538
guugauuuagccuguaucu

SEQ ID NO: 1974743 - RNA, 19 nt, Artificial Sequence
  Description of Artificial Sequence: Synthetic oligonucleotide
  Antisense strand to SEQ ID NO: 1974742
agauacaggcuaaaucaac

SEQ ID NO: 1974744 - RNA, 19 nt, Artificial Sequence
  Description of Artificial Sequence: Synthetic oligonucleotide
  Sense strand starting at position 1384 of SEQ ID NO: 1880538
guugguaucguggaggaga

SEQ ID NO: 1974745 - RNA, 19 nt, Artificial Sequence
  Description of Artificial Sequence: Synthetic oligonucleotide
  Antisense strand to SEQ ID NO: 1974744
ucuccuccacgauaccaac

SEQ ID NO: 1974746 - RNA, 19 nt, Artificial Sequence
  Description of Artificial Sequence: Synthetic oligonucleotide
  Sense strand starting at position 1399 of SEQ ID NO: 1880538
gagacaaaguccucaaguc

SEQ ID NO: 1974747 - RNA, 19 nt, Artificial Sequence
  Description of Artificial Sequence: Synthetic oligonucleotide
  Antisense strand to SEQ ID NO: 1974746
gacuugaggacuuugucuc

SEQ ID NO: 1974748 - RNA, 19 nt, Artificial Sequence
  Description of Artificial Sequence: Synthetic oligonucleotide
  Sense strand starting at position 1400 of SEQ ID NO: 1880538
agacaaaguccucaagucu

SEQ ID NO: 1974749 - RNA, 19 nt, Artificial Sequence
  Description of Artificial Sequence: Synthetic oligonucleotide
  Antisense strand to SEQ ID NO: 1974748
agacuugaggacuuugucu

SEQ ID NO: 1974750 - RNA, 19 nt, Artificial Sequence
  Description of Artificial Sequence: Synthetic oligonucleotide
  Sense strand starting at position 1679 of SEQ ID NO: 1880538
guggauuuguggagggucu

SEQ ID NO: 1974751 - RNA, 19 nt, Artificial Sequence
  Description of Artificial Sequence: Synthetic oligonucleotide
  Antisense strand to SEQ ID NO: 1974750
agacccuccacaaauccac

SEQ ID NO: 1974752 - RNA, 19 nt, Artificial Sequence
  Description of Artificial Sequence: Synthetic oligonucleotide
  Sense strand starting at position 1843 of SEQ ID NO: 1880538
agagucauagugcauaaua

SEQ ID NO: 1974753 - RNA, 19 nt, Artificial Sequence
  Description of Artificial Sequence: Synthetic oligonucleotide
  Antisense strand to SEQ ID NO: 1974752
uauuaugcacuaugacucu

SEQ ID NO: 1974754 - RNA, 19 nt, Artificial Sequence
  Description of Artificial Sequence: Synthetic oligonucleotide
  Sense strand starting at position 1845 of SEQ ID NO: 1880538
agucauagugcauaauaua

SEQ ID NO: 1974755 - RNA, 19 nt, Artificial Sequence
  Description of Artificial Sequence: Synthetic oligonucleotide
  Antisense strand to SEQ ID NO: 1974754
uauauuaugcacuaugacu

SEQ ID NO: 1974756 - RNA, 19 nt, Artificial Sequence
  Description of Artificial Sequence: Synthetic oligonucleotide
  Sense strand starting at position 1980 of SEQ ID NO: 1880538
gggaguugcuagaaggaag

SEQ ID NO: 1974757 - RNA, 19 nt, Artificial Sequence
  Description of Artificial Sequence: Synthetic oligonucleotide
  Antisense strand to SEQ ID NO: 1974756
cuuccuucuagcaacuccc

SEQ ID NO: 1974758 - RNA, 19 nt, Artificial Sequence
  Description of Artificial Sequence: Synthetic oligonucleotide
  Sense strand starting at position 2055 of SEQ ID NO: 1880538
aaaggaaguaggugugaga

SEQ ID NO: 1974759 - RNA, 19 nt, Artificial Sequence
  Description of Artificial Sequence: Synthetic oligonucleotide
  Antisense strand to SEQ ID NO: 1974758
ucucacaccuacuuccuuu

SEQ ID NO: 1974760 - RNA, 19 nt, Artificial Sequence
  Description of Artificial Sequence: Synthetic oligonucleotide
  Sense strand starting at position 2265 of SEQ ID NO: 1880538
auaugagaugcuugaaaua

SEQ ID NO: 1974761 - RNA, 19 nt, Artificial Sequence
  Description of Artificial Sequence: Synthetic oligonucleotide
  Antisense strand to SEQ ID NO: 1974760
uauuucaagcaucucauau

SEQ ID NO: 1974762 - RNA, 19 nt, Artificial Sequence
  Description of Artificial Sequence: Synthetic oligonucleotide
  Sense strand starting at position 2279 of SEQ ID NO: 1880538
aaauaauuggacugugacu

SEQ ID NO: 1974763 - RNA, 19 nt, Artificial Sequence
  Description of Artificial Sequence: Synthetic oligonucleotide
  Antisense strand to SEQ ID NO: 1974762
agucacaguccaauuauuu

SEQ ID NO: 1974764 - RNA, 19 nt, Artificial Sequence
  Description of Artificial Sequence: Synthetic oligonucleotide
  Sense strand starting at position 2281 of SEQ ID NO: 1880538
auaauuggacugugacuca

SEQ ID NO: 1974765 - RNA, 19 nt, Artificial Sequence
  Description of Artificial Sequence: Synthetic oligonucleotide
  Antisense strand to SEQ ID NO: 1974764
ugagucacaguccaauuau

SEQ ID NO: 1974766 - RNA, 19 nt, Artificial Sequence
  Description of Artificial Sequence: Synthetic oligonucleotide
  Sense strand starting at position 2415 of SEQ ID NO: 1880538
agaaacagccaucaaguuu

SEQ ID NO: 1974767 - RNA, 19 nt, Artificial Sequence
  Description of Artificial Sequence: Synthetic oligonucleotide
  Antisense strand to SEQ ID NO: 1974766
aaacuugauggcuguuucu

SEQ ID NO: 1974768 - RNA, 19 nt, Artificial Sequence
  Description of Artificial Sequence: Synthetic oligonucleotide
  Sense strand starting at position 2421 of SEQ ID NO: 1880538
agccaucaaguuuaaagua

SEQ ID NO: 1974769 - RNA, 19 nt, Artificial Sequence
  Description of Artificial Sequence: Synthetic oligonucleotide
  Antisense strand to SEQ ID NO: 1974768
uacuuuaaacuugauggcu

SEQ ID NO: 1974770 - RNA, 19 nt, Artificial Sequence
  Description of Artificial Sequence: Synthetic oligonucleotide
  Sense strand starting at position 2544 of SEQ ID NO: 1880538
aggagaggcgaauguuaca

SEQ ID NO: 1974771 - RNA, 19 nt, Artificial Sequence
  Description of Artificial Sequence: Synthetic oligonucleotide
  Antisense strand to SEQ ID NO: 1974770
uguaacauucgccucuccu

SEQ ID NO: 1974772 - RNA, 19 nt, Artificial Sequence
  Description of Artificial Sequence: Synthetic oligonucleotide
  Sense strand starting at position 2574 of SEQ ID NO: 1880538
ccgugaggucuggaagaaa

SEQ ID NO: 1974773 - RNA, 19 nt, Artificial Sequence
  Description of Artificial Sequence: Synthetic oligonucleotide
  Antisense strand to SEQ ID NO: 1974772
uuucuuccagaccucacgg

SEQ ID NO: 1974774 - RNA, 19 nt, Artificial Sequence
  Description of Artificial Sequence: Synthetic oligonucleotide
  Sense strand starting at position 2585 of SEQ ID NO: 1880538
ggaagaaauacuggcuugu

SEQ ID NO: 1974775 - RNA, 19 nt, Artificial Sequence
  Description of Artificial Sequence: Synthetic oligonucleotide
  Antisense strand to SEQ ID NO: 1974774
acaagccaguauuucuucc

SEQ ID NO: 1974776 - RNA, 19 nt, Artificial Sequence
  Description of Artificial Sequence: Synthetic oligonucleotide
  Sense strand starting at position 2631 of SEQ ID NO: 1880538
gucucaauuucuuugaguc

SEQ ID NO: 1974777 - RNA, 19 nt, Artificial Sequence
  Description of Artificial Sequence: Synthetic oligonucleotide
  Antisense strand to SEQ ID NO: 1974776
gacucaaagaaauugagac

SEQ ID NO: 1974778 - RNA, 19 nt, Artificial Sequence
  Description of Artificial Sequence: Synthetic oligonucleotide
  Sense strand starting at position 2690 of SEQ ID NO: 1880538
uugugugacgaucaaguaa

SEQ ID NO: 1974779 - RNA, 19 nt, Artificial Sequence
  Description of Artificial Sequence: Synthetic oligonucleotide
  Antisense strand to SEQ ID NO: 1974778
uuacuugaucgucacacaa

SEQ ID NO: 1974780 - RNA, 19 nt, Artificial Sequence
  Description of Artificial Sequence: Synthetic oligonucleotide
  Sense strand starting at position 2702 of SEQ ID NO: 1880538
caaguaagauaaguguaaa

SEQ ID NO: 1974781 - RNA, 19 nt, Artificial Sequence
  Description of Artificial Sequence: Synthetic oligonucleotide
  Antisense strand to SEQ ID NO: 1974780
uuuacacuuaucuuacuug

SEQ ID NO: 1974782 - RNA, 19 nt, Artificial Sequence
  Description of Artificial Sequence: Synthetic oligonucleotide
  Sense strand starting at position 2904 of SEQ ID NO: 1880538
cacaccuuugugggaaaua

SEQ ID NO: 1974783 - RNA, 19 nt, Artificial Sequence
  Description of Artificial Sequence: Synthetic oligonucleotide
  Antisense strand to SEQ ID NO: 1974782
uauuucccacaaaggugug

SEQ ID NO: 1974784 - RNA, 19 nt, Artificial Sequence
  Description of Artificial Sequence: Synthetic oligonucleotide
  Sense strand starting at position 2917 of SEQ ID NO: 1880538
gaaauaccuguugggaagu

SEQ ID NO: 1974785 - RNA, 19 nt, Artificial Sequence
  Description of Artificial Sequence: Synthetic oligonucleotide
  Antisense strand to SEQ ID NO: 1974784
acuucccaacagguauuuc

SEQ ID NO: 1974786 - RNA, 19 nt, Artificial Sequence
  Description of Artificial Sequence: Synthetic oligonucleotide
  Sense strand starting at position 2953 of SEQ ID NO: 1880538
ugugcauacauugggaaga

SEQ ID NO: 1974787 - RNA, 19 nt, Artificial Sequence
  Description of Artificial Sequence: Synthetic oligonucleotide
  Antisense strand to SEQ ID NO: 1974786
ucuucccaauguaugcaca

SEQ ID NO: 1974788 - RNA, 19 nt, Artificial Sequence
  Description of Artificial Sequence: Synthetic oligonucleotide
  Sense strand starting at position 2997 of SEQ ID NO: 1880538
auaggcauuugacaagauu

SEQ ID NO: 1974789 - RNA, 19 nt, Artificial Sequence
  Description of Artificial Sequence: Synthetic oligonucleotide
  Antisense strand to SEQ ID NO: 1974788
aaucuugucaaaugccuau

SEQ ID NO: 1974790 - RNA, 19 nt, Artificial Sequence
  Description of Artificial Sequence: Synthetic oligonucleotide
  Sense strand starting at position 3008 of SEQ ID NO: 1880538
acaagauuauugccuuaag

SEQ ID NO: 1974791 - RNA, 19 nt, Artificial Sequence
  Description of Artificial Sequence: Synthetic oligonucleotide
  Antisense strand to SEQ ID NO: 1974790
cuuaaggcaauaaucuugu

SEQ ID NO: 1974792 - RNA, 19 nt, Artificial Sequence
  Description of Artificial Sequence: Synthetic oligonucleotide
  Sense strand starting at position 3327 of SEQ ID NO: 1880538
agaagacugcauugguaca

SEQ ID NO: 1974793 - RNA, 19 nt, Artificial Sequence
  Description of Artificial Sequence: Synthetic oligonucleotide
  Antisense strand to SEQ ID NO: 1974792
uguaccaaugcagucuucu

SEQ ID NO: 1974794 - RNA, 19 nt, Artificial Sequence
  Description of Artificial Sequence: Synthetic oligonucleotide
  Sense strand starting at position 3370 of SEQ ID NO: 1880538
ggaugucagccagauccua

SEQ ID NO: 1974795 - RNA, 19 nt, Artificial Sequence
  Description of Artificial Sequence: Synthetic oligonucleotide
  Antisense strand to SEQ ID NO: 1974794
uaggaucuggcugacaucc

SEQ ID NO: 1974796 - RNA, 19 nt, Artificial Sequence
  Description of Artificial Sequence: Synthetic oligonucleotide
  Sense strand starting at position 3393 of SEQ ID NO: 1880538
auggguguugauuaguaag

SEQ ID NO: 1974797 - RNA, 19 nt, Artificial Sequence
  Description of Artificial Sequence: Synthetic oligonucleotide
  Antisense strand to SEQ ID NO: 1974796
cuuacuaaucaacacccau

SEQ ID NO: 1974798 - RNA, 19 nt, Artificial Sequence
  Description of Artificial Sequence: Synthetic oligonucleotide
  Sense strand starting at position 3542 of SEQ ID NO: 1880538
gggcaaugugaugggaaga

SEQ ID NO: 1974799 - RNA, 19 nt, Artificial Sequence
  Description of Artificial Sequence: Synthetic oligonucleotide
  Antisense strand to SEQ ID NO: 1974798
ucuucccaucacauugccc

SEQ ID NO: 1974800 - RNA, 19 nt, Artificial Sequence
  Description of Artificial Sequence: Synthetic oligonucleotide
  Sense strand starting at position 3576 of SEQ ID NO: 1880538
ggaugaagucaaggugacu

SEQ ID NO: 1974801 - RNA, 19 nt, Artificial Sequence
  Description of Artificial Sequence: Synthetic oligonucleotide
  Antisense strand to SEQ ID NO: 1974800
agucaccuugacuucaucc

SEQ ID NO: 1974802 - RNA, 19 nt, Artificial Sequence
  Description of Artificial Sequence: Synthetic oligonucleotide
  Sense strand starting at position 3640 of SEQ ID NO: 1880538
gugugacuacuagauaguu

SEQ ID NO: 1974803 - RNA, 19 nt, Artificial Sequence
  Description of Artificial Sequence: Synthetic oligonucleotide
  Antisense strand to SEQ ID NO: 1974802
aacuaucuaguagucacac

SEQ ID NO: 1974804 - RNA, 19 nt, Artificial Sequence
  Description of Artificial Sequence: Synthetic oligonucleotide
  Sense strand starting at position 3732 of SEQ ID NO: 1880538
ucauuugcagagugucaca

SEQ ID NO: 1974805 - RNA, 19 nt, Artificial Sequence
  Description of Artificial Sequence: Synthetic oligonucleotide
  Antisense strand to SEQ ID NO: 1974804
ugugacacucugcaaauga

SEQ ID NO: 1974806 - RNA, 19 nt, Artificial Sequence
  Description of Artificial Sequence: Synthetic oligonucleotide
  Sense strand starting at position 3930 of SEQ ID NO: 1880538
ggagauaaggccuguacca

SEQ ID NO: 1974807 - RNA, 19 nt, Artificial Sequence
  Description of Artificial Sequence: Synthetic oligonucleotide
  Antisense strand to SEQ ID NO: 1974806
ugguacaggccuuaucucc

SEQ ID NO: 1974808 - RNA, 19 nt, Artificial Sequence
  Description of Artificial Sequence: Synthetic oligonucleotide
  Sense strand starting at position 76 of SEQ ID NO: 1880539
caaugugaagcacauguau

SEQ ID NO: 1974809 - RNA, 19 nt, Artificial Sequence
  Description of Artificial Sequence: Synthetic oligonucleotide
  Antisense strand to SEQ ID NO: 1974808
auacaugugcuucacauug

SEQ ID NO: 1974810 - RNA, 19 nt, Artificial Sequence
  Description of Artificial Sequence: Synthetic oligonucleotide
  Sense strand starting at position 138 of SEQ ID NO: 1880539
cuuagaauggacuguaaua

SEQ ID NO: 1974811 - RNA, 19 nt, Artificial Sequence
  Description of Artificial Sequence: Synthetic oligonucleotide
  Antisense strand to SEQ ID NO: 1974810
uauuacaguccauucuaag

SEQ ID NO: 1974812 - RNA, 19 nt, Artificial Sequence
  Description of Artificial Sequence: Synthetic oligonucleotide
  Sense strand starting at position 213 of SEQ ID NO: 1880539
auaucaucaccguaguaga

SEQ ID NO: 1974813 - RNA, 19 nt, Artificial Sequence
  Description of Artificial Sequence: Synthetic oligonucleotide
  Antisense strand to SEQ ID NO: 1974812
ucuacuacggugaugauau

SEQ ID NO: 1974814 - RNA, 19 nt, Artificial Sequence
  Description of Artificial Sequence: Synthetic oligonucleotide
  Sense strand starting at position 221 of SEQ ID NO: 1880539
accguaguagaucauuaua

SEQ ID NO: 1974815 - RNA, 19 nt, Artificial Sequence
  Description of Artificial Sequence: Synthetic oligonucleotide
  Antisense strand to SEQ ID NO: 1974814
uauaaugaucuacuacggu

SEQ ID NO: 1974816 - RNA, 19 nt, Artificial Sequence
  Description of Artificial Sequence: Synthetic oligonucleotide
  Sense strand starting at position 224 of SEQ ID NO: 1880539
guaguagaucauuauagcu

SEQ ID NO: 1974817 - RNA, 19 nt, Artificial Sequence
  Description of Artificial Sequence: Synthetic oligonucleotide
  Antisense strand to SEQ ID NO: 1974816
agcuauaaugaucuacuac

SEQ ID NO: 1974818 - RNA, 19 nt, Artificial Sequence
  Description of Artificial Sequence: Synthetic oligonucleotide
  Sense strand starting at position 261 of SEQ ID NO: 1880539
ggaacacaguugcuuuaua

SEQ ID NO: 1974819 - RNA, 19 nt, Artificial Sequence
  Description of Artificial Sequence: Synthetic oligonucleotide
  Antisense strand to SEQ ID NO: 1974818
uauaaagcaacuguguucc

SEQ ID NO: 1974820 - RNA, 19 nt, Artificial Sequence
  Description of Artificial Sequence: Synthetic oligonucleotide
  Sense strand starting at position 538 of SEQ ID NO: 1880539
aguagaucauuugagaaug

SEQ ID NO: 1974821 - RNA, 19 nt, Artificial Sequence
  Description of Artificial Sequence: Synthetic oligonucleotide
  Antisense strand to SEQ ID NO: 1974820
cauucucaaaugaucuacu

SEQ ID NO: 1974822 - RNA, 19 nt, Artificial Sequence
  Description of Artificial Sequence: Synthetic oligonucleotide
  Sense strand starting at position 599 of SEQ ID NO: 1880539
aacauauggcccugaggaa

SEQ ID NO: 1974823 - RNA, 19 nt, Artificial Sequence
  Description of Artificial Sequence: Synthetic oligonucleotide
  Antisense strand to SEQ ID NO: 1974822
uuccucagggccauauguu

SEQ ID NO: 1974824 - RNA, 19 nt, Artificial Sequence
  Description of Artificial Sequence: Synthetic oligonucleotide
  Sense strand starting at position 641 of SEQ ID NO: 1880539
agcacugcucaagauguaa

SEQ ID NO: 1974825 - RNA, 19 nt, Artificial Sequence
  Description of Artificial Sequence: Synthetic oligonucleotide
  Antisense strand to SEQ ID NO: 1974824
uuacaucuugagcagugcu

SEQ ID NO: 1974826 - RNA, 19 nt, Artificial Sequence
  Description of Artificial Sequence: Synthetic oligonucleotide
  Sense strand starting at position 777 of SEQ ID NO: 1880539
gucaccaggcucuaagaaa

SEQ ID NO: 1974827 - RNA, 19 nt, Artificial Sequence
  Description of Artificial Sequence: Synthetic oligonucleotide
  Antisense strand to SEQ ID NO: 1974826
uuucuuagagccuggugac

SEQ ID NO: 1974828 - RNA, 19 nt, Artificial Sequence
  Description of Artificial Sequence: Synthetic oligonucleotide
  Sense strand starting at position 835 of SEQ ID NO: 1880539
ggcaauguguucucauuua

SEQ ID NO: 1974829 - RNA, 19 nt, Artificial Sequence
  Description of Artificial Sequence: Synthetic oligonucleotide
  Antisense strand to SEQ ID NO: 1974828
uaaaugagaacacauugcc

SEQ ID NO: 1974830 - RNA, 19 nt, Artificial Sequence
  Description of Artificial Sequence: Synthetic oligonucleotide
  Sense strand starting at position 933 of SEQ ID NO: 1880539
uaacuugugguuggagaaa

SEQ ID NO: 1974831 - RNA, 19 nt, Artificial Sequence
  Description of Artificial Sequence: Synthetic oligonucleotide
  Antisense strand to SEQ ID NO: 1974830
uuucuccaaccacaaguua

SEQ ID NO: 1974832 - RNA, 19 nt, Artificial Sequence
  Description of Artificial Sequence: Synthetic oligonucleotide
  Sense strand starting at position 1173 of SEQ ID NO: 1880539
acucuaaucuaaucgguaa

SEQ ID NO: 1974833 - RNA, 19 nt, Artificial Sequence
  Description of Artificial Sequence: Synthetic oligonucleotide
  Antisense strand to SEQ ID NO: 1974832
uuaccgauuagauuagagu

SEQ ID NO: 1974834 - RNA, 19 nt, Artificial Sequence
  Description of Artificial Sequence: Synthetic oligonucleotide
  Sense strand starting at position 1195 of SEQ ID NO: 1880539
guaagcuuuggccaaauag

SEQ ID NO: 1974835 - RNA, 19 nt, Artificial Sequence
  Description of Artificial Sequence: Synthetic oligonucleotide
  Antisense strand to SEQ ID NO: 1974834
cuauuuggccaaagcuuac

SEQ ID NO: 1974836 - RNA, 19 nt, Artificial Sequence
  Description of Artificial Sequence: Synthetic oligonucleotide
  Sense strand starting at position 1313 of SEQ ID NO: 1880539
gggucuucaggucagaaca

SEQ ID NO: 1974837 - RNA, 19 nt, Artificial Sequence
  Description of Artificial Sequence: Synthetic oligonucleotide
  Antisense strand to SEQ ID NO: 1974836
uguucugaccugaagaccc

SEQ ID NO: 1974838 - RNA, 19 nt, Artificial Sequence
  Description of Artificial Sequence: Synthetic oligonucleotide
  Sense strand starting at position 1490 of SEQ ID NO: 1880539
caagaauccuuagugcaga

SEQ ID NO: 1974839 - RNA, 19 nt, Artificial Sequence
  Description of Artificial Sequence: Synthetic oligonucleotide
  Antisense strand to SEQ ID NO: 1974838
ucugcacuaaggauucuug

SEQ ID NO: 1974840 - RNA, 19 nt, Artificial Sequence
  Description of Artificial Sequence: Synthetic oligonucleotide
  Sense strand starting at position 1685 of SEQ ID NO: 1880539
uucuuaaguguguuugugu

SEQ ID NO: 1974841 - RNA, 19 nt, Artificial Sequence
  Description of Artificial Sequence: Synthetic oligonucleotide
  Antisense strand to SEQ ID NO: 1974840
acacaaacacacuuaagaa

SEQ ID NO: 1974842 - RNA, 19 nt, Artificial Sequence
  Description of Artificial Sequence: Synthetic oligonucleotide
  Sense strand starting at position 1722 of SEQ ID NO: 1880539
guguauaucagugauauga

SEQ ID NO: 1974843 - RNA, 19 nt, Artificial Sequence
  Description of Artificial Sequence: Synthetic oligonucleotide
  Antisense strand to SEQ ID NO: 1974842
ucauaucacugauauacac

SEQ ID NO: 1974844 - RNA, 19 nt, Artificial Sequence
  Description of Artificial Sequence: Synthetic oligonucleotide
  Sense strand starting at position 1731 of SEQ ID NO: 1880539
agugauaugaacugaaguc

SEQ ID NO: 1974845 - RNA, 19 nt, Artificial Sequence
  Description of Artificial Sequence: Synthetic oligonucleotide
  Antisense strand to SEQ ID NO: 1974844
gacuucaguucauaucacu

SEQ ID NO: 1974846 - RNA, 19 nt, Artificial Sequence
  Description of Artificial Sequence: Synthetic oligonucleotide
  Sense strand starting at position 1809 of SEQ ID NO: 1880539
acuguauucuuacugacca

SEQ ID NO: 1974847 - RNA, 19 nt, Artificial Sequence
  Description of Artificial Sequence: Synthetic oligonucleotide
  Antisense strand to SEQ ID NO: 1974846
uggucaguaagaauacagu

SEQ ID NO: 1974848 - RNA, 19 nt, Artificial Sequence
  Description of Artificial Sequence: Synthetic oligonucleotide
  Sense strand starting at position 2021 of SEQ ID NO: 1880539
cagauaaugucaccaugga

SEQ ID NO: 1974849 - RNA, 19 nt, Artificial Sequence
  Description of Artificial Sequence: Synthetic oligonucleotide
  Antisense strand to SEQ ID NO: 1974848
uccauggugacauuaucug

SEQ ID NO: 1974850 - RNA, 19 nt, Artificial Sequence
  Description of Artificial Sequence: Synthetic oligonucleotide
  Sense strand starting at position 2049 of SEQ ID NO: 1880539
gcaagaugaccauggcuga

SEQ ID NO: 1974851 - RNA, 19 nt, Artificial Sequence
  Description of Artificial Sequence: Synthetic oligonucleotide
  Antisense strand to SEQ ID NO: 1974850
ucagccauggucaucuugc

SEQ ID NO: 1974852 - RNA, 19 nt, Artificial Sequence
  Description of Artificial Sequence: Synthetic oligonucleotide
  Sense strand starting at position 2064 of SEQ ID NO: 1880539
cugagaagguccuuucuau

SEQ ID NO: 1974853 - RNA, 19 nt, Artificial Sequence
  Description of Artificial Sequence: Synthetic oligonucleotide
  Antisense strand to SEQ ID NO: 1974852
auagaaaggaccuucucag

SEQ ID NO: 1974854 - RNA, 19 nt, Artificial Sequence
  Description of Artificial Sequence: Synthetic oligonucleotide
  Sense strand starting at position 2093 of SEQ ID NO: 1880539
agaaucacugccugauucu

SEQ ID NO: 1974855 - RNA, 19 nt, Artificial Sequence
  Description of Artificial Sequence: Synthetic oligonucleotide
  Antisense strand to SEQ ID NO: 1974854
agaaucaggcagugauucu

SEQ ID NO: 1974856 - RNA, 19 nt, Artificial Sequence
  Description of Artificial Sequence: Synthetic oligonucleotide
  Sense strand starting at position 2103 of SEQ ID NO: 1880539
ccugauucuucuuuagaug

SEQ ID NO: 1974857 - RNA, 19 nt, Artificial Sequence
  Description of Artificial Sequence: Synthetic oligonucleotide
  Antisense strand to SEQ ID NO: 1974856
caucuaaagaagaaucagg

SEQ ID NO: 1974858 - RNA, 19 nt, Artificial Sequence
  Description of Artificial Sequence: Synthetic oligonucleotide
  Sense strand starting at position 2138 of SEQ ID NO: 1880539
agauucgucugggucauuu

SEQ ID NO: 1974859 - RNA, 19 nt, Artificial Sequence
  Description of Artificial Sequence: Synthetic oligonucleotide
  Antisense strand to SEQ ID NO: 1974858
aaaugacccagacgaaucu

SEQ ID NO: 1974860 - RNA, 19 nt, Artificial Sequence
  Description of Artificial Sequence: Synthetic oligonucleotide
  Sense strand starting at position 2142 of SEQ ID NO: 1880539
ucgucugggucauuucaga

SEQ ID NO: 1974861 - RNA, 19 nt, Artificial Sequence
  Description of Artificial Sequence: Synthetic oligonucleotide
  Antisense strand to SEQ ID NO: 1974860
ucugaaaugacccagacga

SEQ ID NO: 1974862 - RNA, 19 nt, Artificial Sequence
  Description of Artificial Sequence: Synthetic oligonucleotide
  Sense strand starting at position 2352 of SEQ ID NO: 1880539
gugauaauuccagguaauu

SEQ ID NO: 1974863 - RNA, 19 nt, Artificial Sequence
  Description of Artificial Sequence: Synthetic oligonucleotide
  Antisense strand to SEQ ID NO: 1974862
aauuaccuggaauuaucac

SEQ ID NO: 1974864 - RNA, 19 nt, Artificial Sequence
  Description of Artificial Sequence: Synthetic oligonucleotide
  Sense strand starting at position 2400 of SEQ ID NO: 1880539
gaaaguaauugggcuggga

SEQ ID NO: 1974865 - RNA, 19 nt, Artificial Sequence
  Description of Artificial Sequence: Synthetic oligonucleotide
  Antisense strand to SEQ ID NO: 1974864
ucccagcccaauuacuuuc

SEQ ID NO: 1974866 - RNA, 19 nt, Artificial Sequence
  Description of Artificial Sequence: Synthetic oligonucleotide
  Sense strand starting at position 2426 of SEQ ID NO: 1880539
guguuacaccuacacuaga

SEQ ID NO: 1974867 - RNA, 19 nt, Artificial Sequence
  Description of Artificial Sequence: Synthetic oligonucleotide
  Antisense strand to SEQ ID NO: 1974866
ucuaguguagguguaacac

SEQ ID NO: 1974868 - RNA, 19 nt, Artificial Sequence
  Description of Artificial Sequence: Synthetic oligonucleotide
  Sense strand starting at position 2495 of SEQ ID NO: 1880539
uuauguaucguuuaucaag

SEQ ID NO: 1974869 - RNA, 19 nt, Artificial Sequence
  Description of Artificial Sequence: Synthetic oligonucleotide
  Antisense strand to SEQ ID NO: 1974868
cuugauaaacgauacauaa

SEQ ID NO: 1974870 - RNA, 19 nt, Artificial Sequence
  Description of Artificial Sequence: Synthetic oligonucleotide
  Sense strand starting at position 2578 of SEQ ID NO: 1880539
ugguaagugauguacuacu

SEQ ID NO: 1974871 - RNA, 19 nt, Artificial Sequence
  Description of Artificial Sequence: Synthetic oligonucleotide
  Antisense strand to SEQ ID NO: 1974870
aguaguacaucacuuacca

SEQ ID NO: 1974872 - RNA, 19 nt, Artificial Sequence
  Description of Artificial Sequence: Synthetic oligonucleotide
  Sense strand starting at position 2970 of SEQ ID NO: 1880539
uguuuaaugggagggagua

SEQ ID NO: 1974873 - RNA, 19 nt, Artificial Sequence
  Description of Artificial Sequence: Synthetic oligonucleotide
  Antisense strand to SEQ ID NO: 1974872
uacucccucccauuaaaca

SEQ ID NO: 1974874 - RNA, 19 nt, Artificial Sequence
  Description of Artificial Sequence: Synthetic oligonucleotide
  Sense strand starting at position 3041 of SEQ ID NO: 1880539
accugucaugauuauuauc

SEQ ID NO: 1974875 - RNA, 19 nt, Artificial Sequence
  Description of Artificial Sequence: Synthetic oligonucleotide
  Antisense strand to SEQ ID NO: 1974874
gauaauaaucaugacaggu

SEQ ID NO: 1974876 - RNA, 19 nt, Artificial Sequence
  Description of Artificial Sequence: Synthetic oligonucleotide
  Sense strand starting at position 3043 of SEQ ID NO: 1880539
cugucaugauuauuaucca

SEQ ID NO: 1974877 - RNA, 19 nt, Artificial Sequence
  Description of Artificial Sequence: Synthetic oligonucleotide
  Antisense strand to SEQ ID NO: 1974876
uggauaauaaucaugacag

SEQ ID NO: 1974878 - RNA, 19 nt, Artificial Sequence
  Description of Artificial Sequence: Synthetic oligonucleotide
  Sense strand starting at position 3069 of SEQ ID NO: 1880539
agagaagugaccugugcag

SEQ ID NO: 1974879 - RNA, 19 nt, Artificial Sequence
  Description of Artificial Sequence: Synthetic oligonucleotide
  Antisense strand to SEQ ID NO: 1974878
cugcacaggucacuucucu

SEQ ID NO: 1974880 - RNA, 19 nt, Artificial Sequence
  Description of Artificial Sequence: Synthetic oligonucleotide
  Sense strand starting at position 3071 of SEQ ID NO: 1880539
agaagugaccugugcagga

SEQ ID NO: 1974881 - RNA, 19 nt, Artificial Sequence
  Description of Artificial Sequence: Synthetic oligonucleotide
  Antisense strand to SEQ ID NO: 1974880
uccugcacaggucacuucu

SEQ ID NO: 1974882 - RNA, 19 nt, Artificial Sequence
  Description of Artificial Sequence: Synthetic oligonucleotide
  Sense strand starting at position 3668 of SEQ ID NO: 1880539
ggcagcauaaauugagaca

SEQ ID NO: 1974883 - RNA, 19 nt, Artificial Sequence
  Description of Artificial Sequence: Synthetic oligonucleotide
  Antisense strand to SEQ ID NO: 1974882
ugucucaauuuaugcugcc

SEQ ID NO: 1974884 - RNA, 19 nt, Artificial Sequence
  Description of Artificial Sequence: Synthetic oligonucleotide
  Sense strand starting at position 3716 of SEQ ID NO: 1880539
agaaccuaguauguugaua

SEQ ID NO: 1974885 - RNA, 19 nt, Artificial Sequence
  Description of Artificial Sequence: Synthetic oligonucleotide
  Antisense strand to SEQ ID NO: 1974884
uaucaacauacuagguucu

SEQ ID NO: 1974886 - RNA, 19 nt, Artificial Sequence
  Description of Artificial Sequence: Synthetic oligonucleotide
  Sense strand starting at position 3920 of SEQ ID NO: 1880539
aucaaaugacuguaauguu

SEQ ID NO: 1974887 - RNA, 19 nt, Artificial Sequence
  Description of Artificial Sequence: Synthetic oligonucleotide
  Antisense strand to SEQ ID NO: 1974886
aacauuacagucauuugau

SEQ ID NO: 1974888 - RNA, 19 nt, Artificial Sequence
  Description of Artificial Sequence: Synthetic oligonucleotide
  Sense strand starting at position 73 of SEQ ID NO: 1880540
aucugaaugcaucauguau

SEQ ID NO: 1974889 - RNA, 19 nt, Artificial Sequence
  Description of Artificial Sequence: Synthetic oligonucleotide
  Antisense strand to SEQ ID NO: 1974888
auacaugaugcauucagau

SEQ ID NO: 1974890 - RNA, 19 nt, Artificial Sequence
  Description of Artificial Sequence: Synthetic oligonucleotide
  Sense strand starting at position 116 of SEQ ID NO: 1880540
agacaauugugauuauuag

SEQ ID NO: 1974891 - RNA, 19 nt, Artificial Sequence
  Description of Artificial Sequence: Synthetic oligonucleotide
  Antisense strand to SEQ ID NO: 1974890
cuaauaaucacaauugucu

SEQ ID NO: 1974892 - RNA, 19 nt, Artificial Sequence
  Description of Artificial Sequence: Synthetic oligonucleotide
  Sense strand starting at position 123 of SEQ ID NO: 1880540
ugugauuauuaggucaaua

SEQ ID NO: 1974893 - RNA, 19 nt, Artificial Sequence
  Description of Artificial Sequence: Synthetic oligonucleotide
  Antisense strand to SEQ ID NO: 1974892
uauugaccuaauaaucaca

SEQ ID NO: 1974894 - RNA, 19 nt, Artificial Sequence
  Description of Artificial Sequence: Synthetic oligonucleotide
  Sense strand starting at position 335 of SEQ ID NO: 1880540
cuaauugucucuuucugag

SEQ ID NO: 1974895 - RNA, 19 nt, Artificial Sequence
  Description of Artificial Sequence: Synthetic oligonucleotide
  Antisense strand to SEQ ID NO: 1974894
cucagaaagagacaauuag

SEQ ID NO: 1974896 - RNA, 19 nt, Artificial Sequence
  Description of Artificial Sequence: Synthetic oligonucleotide
  Sense strand starting at position 342 of SEQ ID NO: 1880540
ucucuuucugagugugaaa

SEQ ID NO: 1974897 - RNA, 19 nt, Artificial Sequence
  Description of Artificial Sequence: Synthetic oligonucleotide
  Antisense strand to SEQ ID NO: 1974896
uuucacacucagaaagaga

SEQ ID NO: 1974898 - RNA, 19 nt, Artificial Sequence
  Description of Artificial Sequence: Synthetic oligonucleotide
  Sense strand starting at position 416 of SEQ ID NO: 1880540
uuauguauaucuccugagu

SEQ ID NO: 1974899 - RNA, 19 nt, Artificial Sequence
  Description of Artificial Sequence: Synthetic oligonucleotide
  Antisense strand to SEQ ID NO: 1974898
acucaggagauauacauaa

SEQ ID NO: 1974900 - RNA, 19 nt, Artificial Sequence
  Description of Artificial Sequence: Synthetic oligonucleotide
  Sense strand starting at position 419 of SEQ ID NO: 1880540
uguauaucuccugagugua

SEQ ID NO: 1974901 - RNA, 19 nt, Artificial Sequence
  Description of Artificial Sequence: Synthetic oligonucleotide
  Antisense strand to SEQ ID NO: 1974900
uacacucaggagauauaca

SEQ ID NO: 1974902 - RNA, 19 nt, Artificial Sequence
  Description of Artificial Sequence: Synthetic oligonucleotide
  Sense strand starting at position 427 of SEQ ID NO: 1880540
uccugaguguaugugaaau

SEQ ID NO: 1974903 - RNA, 19 nt, Artificial Sequence
  Description of Artificial Sequence: Synthetic oligonucleotide
  Antisense strand to SEQ ID NO: 1974902
auuucacauacacucagga

SEQ ID NO: 1974904 - RNA, 19 nt, Artificial Sequence
  Description of Artificial Sequence: Synthetic oligonucleotide
  Sense strand starting at position 435 of SEQ ID NO: 1880540
guaugugaaauugagucua

SEQ ID NO: 1974905 - RNA, 19 nt, Artificial Sequence
  Description of Artificial Sequence: Synthetic oligonucleotide
  Antisense strand to SEQ ID NO: 1974904
uagacucaauuucacauac

SEQ ID NO: 1974906 - RNA, 19 nt, Artificial Sequence
  Description of Artificial Sequence: Synthetic oligonucleotide
  Sense strand starting at position 437 of SEQ ID NO: 1880540
augugaaauugagucuaaa

SEQ ID NO: 1974907 - RNA, 19 nt, Artificial Sequence
  Description of Artificial Sequence: Synthetic oligonucleotide
  Antisense strand to SEQ ID NO: 1974906
uuuagacucaauuucacau

SEQ ID NO: 1974908 - RNA, 19 nt, Artificial Sequence
  Description of Artificial Sequence: Synthetic oligonucleotide
  Sense strand starting at position 549 of SEQ ID NO: 1880540
guccauugcuaaguauuua

SEQ ID NO: 1974909 - RNA, 19 nt, Artificial Sequence
  Description of Artificial Sequence: Synthetic oligonucleotide
  Antisense strand to SEQ ID NO: 1974908
uaaauacuuagcaauggac

SEQ ID NO: 1974910 - RNA, 19 nt, Artificial Sequence
  Description of Artificial Sequence: Synthetic oligonucleotide
  Sense strand starting at position 573 of SEQ ID NO: 1880540
uucugaguuuaacuuaaag

SEQ ID NO: 1974911 - RNA, 19 nt, Artificial Sequence
  Description of Artificial Sequence: Synthetic oligonucleotide
  Antisense strand to SEQ ID NO: 1974910
cuuuaaguuaaacucagaa

SEQ ID NO: 1974912 - RNA, 19 nt, Artificial Sequence
  Description of Artificial Sequence: Synthetic oligonucleotide
  Sense strand starting at position 819 of SEQ ID NO: 1880540
uauugaaucuuaguguagu

SEQ ID NO: 1974913 - RNA, 19 nt, Artificial Sequence
  Description of Artificial Sequence: Synthetic oligonucleotide
  Antisense strand to SEQ ID NO: 1974912
acuacacuaagauucaaua

SEQ ID NO: 1974914 - RNA, 19 nt, Artificial Sequence
  Description of Artificial Sequence: Synthetic oligonucleotide
  Sense strand starting at position 822 of SEQ ID NO: 1880540
ugaaucuuaguguaguaau

SEQ ID NO: 1974915 - RNA, 19 nt, Artificial Sequence
  Description of Artificial Sequence: Synthetic oligonucleotide
  Antisense strand to SEQ ID NO: 1974914
auuacuacacuaagauuca

SEQ ID NO: 1974916 - RNA, 19 nt, Artificial Sequence
  Description of Artificial Sequence: Synthetic oligonucleotide
  Sense strand starting at position 968 of SEQ ID NO: 1880540
gcaaauacuucucugugga

SEQ ID NO: 1974917 - RNA, 19 nt, Artificial Sequence
  Description of Artificial Sequence: Synthetic oligonucleotide
  Antisense strand to SEQ ID NO: 1974916
uccacagagaaguauuugc

SEQ ID NO: 1974918 - RNA, 19 nt, Artificial Sequence
  Description of Artificial Sequence: Synthetic oligonucleotide
  Sense strand starting at position 969 of SEQ ID NO: 1880540
caaauacuucucuguggag

SEQ ID NO: 1974919 - RNA, 19 nt, Artificial Sequence
  Description of Artificial Sequence: Synthetic oligonucleotide
  Antisense strand to SEQ ID NO: 1974918
cuccacagagaaguauuug

SEQ ID NO: 1974920 - RNA, 19 nt, Artificial Sequence
  Description of Artificial Sequence: Synthetic oligonucleotide
  Sense strand starting at position 970 of SEQ ID NO: 1880540
aaauacuucucuguggagu

SEQ ID NO: 1974921 - RNA, 19 nt, Artificial Sequence
  Description of Artificial Sequence: Synthetic oligonucleotide
  Antisense strand to SEQ ID NO: 1974920
acuccacagagaaguauuu

SEQ ID NO: 1974922 - RNA, 19 nt, Artificial Sequence
  Description of Artificial Sequence: Synthetic oligonucleotide
  Sense strand starting at position 1091 of SEQ ID NO: 1880540
ucugaauccagguaguugu

SEQ ID NO: 1974923 - RNA, 19 nt, Artificial Sequence
  Description of Artificial Sequence: Synthetic oligonucleotide
  Antisense strand to SEQ ID NO: 1974922
acaacuaccuggauucaga

SEQ ID NO: 1974924 - RNA, 19 nt, Artificial Sequence
  Description of Artificial Sequence: Synthetic oligonucleotide
  Sense strand starting at position 1363 of SEQ ID NO: 1880540
agcaaagguuucuuaccuu

SEQ ID NO: 1974925 - RNA, 19 nt, Artificial Sequence
  Description of Artificial Sequence: Synthetic oligonucleotide
  Antisense strand to SEQ ID NO: 1974924
aagguaagaaaccuuugcu

SEQ ID NO: 1974926 - RNA, 19 nt, Artificial Sequence
  Description of Artificial Sequence: Synthetic oligonucleotide
  Sense strand starting at position 1387 of SEQ ID NO: 1880540
auugaugccuuauugagaa

SEQ ID NO: 1974927 - RNA, 19 nt, Artificial Sequence
  Description of Artificial Sequence: Synthetic oligonucleotide
  Antisense strand to SEQ ID NO: 1974926
uucucaauaaggcaucaau

SEQ ID NO: 1974928 - RNA, 19 nt, Artificial Sequence
  Description of Artificial Sequence: Synthetic oligonucleotide
  Sense strand starting at position 1510 of SEQ ID NO: 1880540
cuuucuguggucugaaaug

SEQ ID NO: 1974929 - RNA, 19 nt, Artificial Sequence
  Description of Artificial Sequence: Synthetic oligonucleotide
  Antisense strand to SEQ ID NO: 1974928
cauuucagaccacagaaag

SEQ ID NO: 1974930 - RNA, 19 nt, Artificial Sequence
  Description of Artificial Sequence: Synthetic oligonucleotide
  Sense strand starting at position 1515 of SEQ ID NO: 1880540
uguggucugaaauguauuu

SEQ ID NO: 1974931 - RNA, 19 nt, Artificial Sequence
  Description of Artificial Sequence: Synthetic oligonucleotide
  Antisense strand to SEQ ID NO: 1974930
aaauacauuucagaccaca

SEQ ID NO: 1974932 - RNA, 19 nt, Artificial Sequence
  Description of Artificial Sequence: Synthetic oligonucleotide
  Sense strand starting at position 1681 of SEQ ID NO: 1880540
ugcauugaacuuugguaaa

SEQ ID NO: 1974933 - RNA, 19 nt, Artificial Sequence
  Description of Artificial Sequence: Synthetic oligonucleotide
  Antisense strand to SEQ ID NO: 1974932
uuuaccaaaguucaaugca

SEQ ID NO: 1974934 - RNA, 19 nt, Artificial Sequence
  Description of Artificial Sequence: Synthetic oligonucleotide
  Sense strand starting at position 1776 of SEQ ID NO: 1880540
auuacuauaccucgagucu

SEQ ID NO: 1974935 - RNA, 19 nt, Artificial Sequence
  Description of Artificial Sequence: Synthetic oligonucleotide
  Antisense strand to SEQ ID NO: 1974934
agacucgagguauaguaau

SEQ ID NO: 1974936 - RNA, 19 nt, Artificial Sequence
  Description of Artificial Sequence: Synthetic oligonucleotide
  Sense strand starting at position 1777 of SEQ ID NO: 1880540
uuacuauaccucgagucuu

SEQ ID NO: 1974937 - RNA, 19 nt, Artificial Sequence
  Description of Artificial Sequence: Synthetic oligonucleotide
  Antisense strand to SEQ ID NO: 1974936
aagacucgagguauaguaa

SEQ ID NO: 1974938 - RNA, 19 nt, Artificial Sequence
  Description of Artificial Sequence: Synthetic oligonucleotide
  Sense strand starting at position 1828 of SEQ ID NO: 1880540
cagaauguagagugaucau

SEQ ID NO: 1974939 - RNA, 19 nt, Artificial Sequence
  Description of Artificial Sequence: Synthetic oligonucleotide
  Antisense strand to SEQ ID NO: 1974938
augaucacucuacauucug

SEQ ID NO: 1974940 - RNA, 19 nt, Artificial Sequence
  Description of Artificial Sequence: Synthetic oligonucleotide
  Sense strand starting at position 1831 of SEQ ID NO: 1880540
aauguagagugaucaugau

SEQ ID NO: 1974941 - RNA, 19 nt, Artificial Sequence
  Description of Artificial Sequence: Synthetic oligonucleotide
  Antisense strand to SEQ ID NO: 1974940
aucaugaucacucuacauu

SEQ ID NO: 1974942 - RNA, 19 nt, Artificial Sequence
  Description of Artificial Sequence: Synthetic oligonucleotide
  Sense strand starting at position 1846 of SEQ ID NO: 1880540
ugauuuacaugugggaaga

SEQ ID NO: 1974943 - RNA, 19 nt, Artificial Sequence
  Description of Artificial Sequence: Synthetic oligonucleotide
  Antisense strand to SEQ ID NO: 1974942
ucuucccacauguaaauca

SEQ ID NO: 1974944 - RNA, 19 nt, Artificial Sequence
  Description of Artificial Sequence: Synthetic oligonucleotide
  Sense strand starting at position 1922 of SEQ ID NO: 1880540
uuaucuuuaacgggaguga

SEQ ID NO: 1974945 - RNA, 19 nt, Artificial Sequence
  Description of Artificial Sequence: Synthetic oligonucleotide
  Antisense strand to SEQ ID NO: 1974944
ucacucccguuaaagauaa

SEQ ID NO: 1974946 - RNA, 19 nt, Artificial Sequence
  Description of Artificial Sequence: Synthetic oligonucleotide
  Sense strand starting at position 1926 of SEQ ID NO: 1880540
cuuuaacgggagugaaaua

SEQ ID NO: 1974947 - RNA, 19 nt, Artificial Sequence
  Description of Artificial Sequence: Synthetic oligonucleotide
  Antisense strand to SEQ ID NO: 1974946
uauuucacucccguuaaag

SEQ ID NO: 1974948 - RNA, 19 nt, Artificial Sequence
  Description of Artificial Sequence: Synthetic oligonucleotide
  Sense strand starting at position 2148 of SEQ ID NO: 1880540
cagagagaccagcagcauu

SEQ ID NO: 1974949 - RNA, 19 nt, Artificial Sequence
  Description of Artificial Sequence: Synthetic oligonucleotide
  Antisense strand to SEQ ID NO: 1974948
aaugcugcuggucucucug

SEQ ID NO: 1974950 - RNA, 19 nt, Artificial Sequence
  Description of Artificial Sequence: Synthetic oligonucleotide
  Sense strand starting at position 2161 of SEQ ID NO: 1880540
agcauuaacugguccaaca

SEQ ID NO: 1974951 - RNA, 19 nt, Artificial Sequence
  Description of Artificial Sequence: Synthetic oligonucleotide
  Antisense strand to SEQ ID NO: 1974950
uguuggaccaguuaaugcu

SEQ ID NO: 1974952 - RNA, 19 nt, Artificial Sequence
  Description of Artificial Sequence: Synthetic oligonucleotide
  Sense strand starting at position 2288 of SEQ ID NO: 1880540
cccuccucuugaucagaga

SEQ ID NO: 1974953 - RNA, 19 nt, Artificial Sequence
  Description of Artificial Sequence: Synthetic oligonucleotide
  Antisense strand to SEQ ID NO: 1974952
ucucugaucaagaggaggg

SEQ ID NO: 1974954 - RNA, 19 nt, Artificial Sequence
  Description of Artificial Sequence: Synthetic oligonucleotide
  Sense strand starting at position 2636 of SEQ ID NO: 1880540
aagggcugucuguaucuga

SEQ ID NO: 1974955 - RNA, 19 nt, Artificial Sequence
  Description of Artificial Sequence: Synthetic oligonucleotide
  Antisense strand to SEQ ID NO: 1974954
ucagauacagacagcccuu

SEQ ID NO: 1974956 - RNA, 19 nt, Artificial Sequence
  Description of Artificial Sequence: Synthetic oligonucleotide
  Sense strand starting at position 2947 of SEQ ID NO: 1880540
gcuagcugugucucaucuu

SEQ ID NO: 1974957 - RNA, 19 nt, Artificial Sequence
  Description of Artificial Sequence: Synthetic oligonucleotide
  Antisense strand to SEQ ID NO: 1974956
aagaugagacacagcuagc

SEQ ID NO: 1974958 - RNA, 19 nt, Artificial Sequence
  Description of Artificial Sequence: Synthetic oligonucleotide
  Sense strand starting at position 3271 of SEQ ID NO: 1880540
uggcauguguauuuaacuu

SEQ ID NO: 1974959 - RNA, 19 nt, Artificial Sequence
  Description of Artificial Sequence: Synthetic oligonucleotide
  Antisense strand to SEQ ID NO: 1974958
aaguuaaauacacaugcca

SEQ ID NO: 1974960 - RNA, 19 nt, Artificial Sequence
  Description of Artificial Sequence: Synthetic oligonucleotide
  Sense strand starting at position 3300 of SEQ ID NO: 1880540
ggacauugcuguuuggaug

SEQ ID NO: 1974961 - RNA, 19 nt, Artificial Sequence
  Description of Artificial Sequence: Synthetic oligonucleotide
  Antisense strand to SEQ ID NO: 1974960
cauccaaacagcaaugucc

SEQ ID NO: 1974962 - RNA, 19 nt, Artificial Sequence
  Description of Artificial Sequence: Synthetic oligonucleotide
  Sense strand starting at position 3379 of SEQ ID NO: 1880540
aguccuuccugucuuagaa

SEQ ID NO: 1974963 - RNA, 19 nt, Artificial Sequence
  Description of Artificial Sequence: Synthetic oligonucleotide
  Antisense strand to SEQ ID NO: 1974962
uucuaagacaggaaggacu

SEQ ID NO: 1974964 - RNA, 19 nt, Artificial Sequence
  Description of Artificial Sequence: Synthetic oligonucleotide
  Sense strand starting at position 3455 of SEQ ID NO: 1880540
aucauuuccuguguccauu

SEQ ID NO: 1974965 - RNA, 19 nt, Artificial Sequence
  Description of Artificial Sequence: Synthetic oligonucleotide
  Antisense strand to SEQ ID NO: 1974964
aauggacacaggaaaugau

SEQ ID NO: 1974966 - RNA, 19 nt, Artificial Sequence
  Description of Artificial Sequence: Synthetic oligonucleotide
  Sense strand starting at position 3696 of SEQ ID NO: 1880540
uugcacuugcuugauaauc

SEQ ID NO: 1974967 - RNA, 19 nt, Artificial Sequence
  Description of Artificial Sequence: Synthetic oligonucleotide
  Antisense strand to SEQ ID NO: 1974966
gauuaucaagcaagugcaa

SEQ ID NO: 1974968 - RNA, 19 nt, Artificial Sequence
  Description of Artificial Sequence: Synthetic oligonucleotide
  Sense strand starting at position 6 of SEQ ID NO: 1880541
agagcaaccuugguuaaga

SEQ ID NO: 1974969 - RNA, 19 nt, Artificial Sequence
  Description of Artificial Sequence: Synthetic oligonucleotide
  Antisense strand to SEQ ID NO: 1974968
ucuuaaccaagguugcucu

SEQ ID NO: 1974970 - RNA, 19 nt, Artificial Sequence
  Description of Artificial Sequence: Synthetic oligonucleotide
  Sense strand starting at position 7 of SEQ ID NO: 1880541
gagcaaccuugguuaagaa

SEQ ID NO: 1974971 - RNA, 19 nt, Artificial Sequence
  Description of Artificial Sequence: Synthetic oligonucleotide
  Antisense strand to SEQ ID NO: 1974970
uucuuaaccaagguugcuc

SEQ ID NO: 1974972 - RNA, 19 nt, Artificial Sequence
  Description of Artificial Sequence: Synthetic oligonucleotide
  Sense strand starting at position 87 of SEQ ID NO: 1880541
aggcauaacccggaacuuu

SEQ ID NO: 1974973 - RNA, 19 nt, Artificial Sequence
  Description of Artificial Sequence: Synthetic oligonucleotide
  Antisense strand to SEQ ID NO: 1974972
aaaguuccggguuaugccu

SEQ ID NO: 1974974 - RNA, 19 nt, Artificial Sequence
  Description of Artificial Sequence: Synthetic oligonucleotide
  Sense strand starting at position 96 of SEQ ID NO: 1880541
ccggaacuuuaaguaacau

SEQ ID NO: 1974975 - RNA, 19 nt, Artificial Sequence
  Description of Artificial Sequence: Synthetic oligonucleotide
  Antisense strand to SEQ ID NO: 1974974
auguuacuuaaaguuccgg

SEQ ID NO: 1974976 - RNA, 19 nt, Artificial Sequence
  Description of Artificial Sequence: Synthetic oligonucleotide
  Sense strand starting at position 169 of SEQ ID NO: 1880541
gggaaauugcuuggguaau

SEQ ID NO: 1974977 - RNA, 19 nt, Artificial Sequence
  Description of Artificial Sequence: Synthetic oligonucleotide
  Antisense strand to SEQ ID NO: 1974976
auuacccaagcaauuuccc

SEQ ID NO: 1974978 - RNA, 19 nt, Artificial Sequence
  Description of Artificial Sequence: Synthetic oligonucleotide
  Sense strand starting at position 452 of SEQ ID NO: 1880541
ucgugaugguguaccugua

SEQ ID NO: 1974979 - RNA, 19 nt, Artificial Sequence
  Description of Artificial Sequence: Synthetic oligonucleotide
  Antisense strand to SEQ ID NO: 1974978
uacagguacaccaucacga

SEQ ID NO: 1974980 - RNA, 19 nt, Artificial Sequence
  Description of Artificial Sequence: Synthetic oligonucleotide
  Sense strand starting at position 673 of SEQ ID NO: 1880541
aguaauuacuagguacuaa

SEQ ID NO: 1974981 - RNA, 19 nt, Artificial Sequence
  Description of Artificial Sequence: Synthetic oligonucleotide
  Antisense strand to SEQ ID NO: 1974980
uuaguaccuaguaauuacu

SEQ ID NO: 1974982 - RNA, 19 nt, Artificial Sequence
  Description of Artificial Sequence: Synthetic oligonucleotide
  Sense strand starting at position 926 of SEQ ID NO: 1880541
uaaaucagguuauugagua

SEQ ID NO: 1974983 - RNA, 19 nt, Artificial Sequence
  Description of Artificial Sequence: Synthetic oligonucleotide
  Antisense strand to SEQ ID NO: 1974982
uacucaauaaccugauuua

SEQ ID NO: 1974984 - RNA, 19 nt, Artificial Sequence
  Description of Artificial Sequence: Synthetic oligonucleotide
  Sense strand starting at position 930 of SEQ ID NO: 1880541
ucagguuauugaguagaau

SEQ ID NO: 1974985 - RNA, 19 nt, Artificial Sequence
  Description of Artificial Sequence: Synthetic oligonucleotide
  Antisense strand to SEQ ID NO: 1974984
auucuacucaauaaccuga

SEQ ID NO: 1974986 - RNA, 19 nt, Artificial Sequence
  Description of Artificial Sequence: Synthetic oligonucleotide
  Sense strand starting at position 939 of SEQ ID NO: 1880541
ugaguagaauauucuugac

SEQ ID NO: 1974987 - RNA, 19 nt, Artificial Sequence
  Description of Artificial Sequence: Synthetic oligonucleotide
  Antisense strand to SEQ ID NO: 1974986
gucaagaauauucuacuca

SEQ ID NO: 1974988 - RNA, 19 nt, Artificial Sequence
  Description of Artificial Sequence: Synthetic oligonucleotide
  Sense strand starting at position 941 of SEQ ID NO: 1880541
aguagaauauucuugacau

SEQ ID NO: 1974989 - RNA, 19 nt, Artificial Sequence
  Description of Artificial Sequence: Synthetic oligonucleotide
  Antisense strand to SEQ ID NO: 1974988
augucaagaauauucuacu

SEQ ID NO: 1974990 - RNA, 19 nt, Artificial Sequence
  Description of Artificial Sequence: Synthetic oligonucleotide
  Sense strand starting at position 953 of SEQ ID NO: 1880541
uugacauaaugaguaguua

SEQ ID NO: 1974991 - RNA, 19 nt, Artificial Sequence
  Description of Artificial Sequence: Synthetic oligonucleotide
  Antisense strand to SEQ ID NO: 1974990
uaacuacucauuaugucaa

SEQ ID NO: 1974992 - RNA, 19 nt, Artificial Sequence
  Description of Artificial Sequence: Synthetic oligonucleotide
  Sense strand starting at position 964 of SEQ ID NO: 1880541
aguaguuaugaguaaggug

SEQ ID NO: 1974993 - RNA, 19 nt, Artificial Sequence
  Description of Artificial Sequence: Synthetic oligonucleotide
  Antisense strand to SEQ ID NO: 1974992
caccuuacucauaacuacu

SEQ ID NO: 1974994 - RNA, 19 nt, Artificial Sequence
  Description of Artificial Sequence: Synthetic oligonucleotide
  Sense strand starting at position 973 of SEQ ID NO: 1880541
gaguaagguguuugauaaa

SEQ ID NO: 1974995 - RNA, 19 nt, Artificial Sequence
  Description of Artificial Sequence: Synthetic oligonucleotide
  Antisense strand to SEQ ID NO: 1974994
uuuaucaaacaccuuacuc

SEQ ID NO: 1974996 - RNA, 19 nt, Artificial Sequence
  Description of Artificial Sequence: Synthetic oligonucleotide
  Sense strand starting at position 1005 of SEQ ID NO: 1880541
gguuaucuuguggacaaga

SEQ ID NO: 1974997 - RNA, 19 nt, Artificial Sequence
  Description of Artificial Sequence: Synthetic oligonucleotide
  Antisense strand to SEQ ID NO: 1974996
ucuuguccacaagauaacc

SEQ ID NO: 1974998 - RNA, 19 nt, Artificial Sequence
  Description of Artificial Sequence: Synthetic oligonucleotide
  Sense strand starting at position 1025 of SEQ ID NO: 1880541
gaggaaauguuacccugau

SEQ ID NO: 1974999 - RNA, 19 nt, Artificial Sequence
  Description of Artificial Sequence: Synthetic oligonucleotide
  Antisense strand to SEQ ID NO: 1974998
aucaggguaacauuuccuc

SEQ ID NO: 1975000 - RNA, 19 nt, Artificial Sequence
  Description of Artificial Sequence: Synthetic oligonucleotide
  Sense strand starting at position 1026 of SEQ ID NO: 1880541
aggaaauguuacccugaug

SEQ ID NO: 1975001 - RNA, 19 nt, Artificial Sequence
  Description of Artificial Sequence: Synthetic oligonucleotide
  Antisense strand to SEQ ID NO: 1975000
caucaggguaacauuuccu

SEQ ID NO: 1975002 - RNA, 19 nt, Artificial Sequence
  Description of Artificial Sequence: Synthetic oligonucleotide
  Sense strand starting at position 1034 of SEQ ID NO: 1880541
uuacccugaugauugugaa

SEQ ID NO: 1975003 - RNA, 19 nt, Artificial Sequence
  Description of Artificial Sequence: Synthetic oligonucleotide
  Antisense strand to SEQ ID NO: 1975002
uucacaaucaucaggguaa

SEQ ID NO: 1975004 - RNA, 19 nt, Artificial Sequence
  Description of Artificial Sequence: Synthetic oligonucleotide
  Sense strand starting at position 1044 of SEQ ID NO: 1880541
gauugugaaguguaaucag

SEQ ID NO: 1975005 - RNA, 19 nt, Artificial Sequence
  Description of Artificial Sequence: Synthetic oligonucleotide
  Antisense strand to SEQ ID NO: 1975004
cugauuacacuucacaauc

SEQ ID NO: 1975006 - RNA, 19 nt, Artificial Sequence
  Description of Artificial Sequence: Synthetic oligonucleotide
  Sense strand starting at position 1047 of SEQ ID NO: 1880541
ugugaaguguaaucagaac

SEQ ID NO: 1975007 - RNA, 19 nt, Artificial Sequence
  Description of Artificial Sequence: Synthetic oligonucleotide
  Antisense strand to SEQ ID NO: 1975006
guucugauuacacuucaca

SEQ ID NO: 1975008 - RNA, 19 nt, Artificial Sequence
  Description of Artificial Sequence: Synthetic oligonucleotide
  Sense strand starting at position 1455 of SEQ ID NO: 1880541
gauguccuuccuuagagua

SEQ ID NO: 1975009 - RNA, 19 nt, Artificial Sequence
  Description of Artificial Sequence: Synthetic oligonucleotide
  Antisense strand to SEQ ID NO: 1975008
uacucuaaggaaggacauc

SEQ ID NO: 1975010 - RNA, 19 nt, Artificial Sequence
  Description of Artificial Sequence: Synthetic oligonucleotide
  Sense strand starting at position 1885 of SEQ ID NO: 1880541
aguuuaaucuccuuaaugg

SEQ ID NO: 1975011 - RNA, 19 nt, Artificial Sequence
  Description of Artificial Sequence: Synthetic oligonucleotide
  Antisense strand to SEQ ID NO: 1975010
ccauuaaggagauuaaacu

SEQ ID NO: 1975012 - RNA, 19 nt, Artificial Sequence
  Description of Artificial Sequence: Synthetic oligonucleotide
  Sense strand starting at position 2439 of SEQ ID NO: 1880541
aguccugagguguaucaca

SEQ ID NO: 1975013 - RNA, 19 nt, Artificial Sequence
  Description of Artificial Sequence: Synthetic oligonucleotide
  Antisense strand to SEQ ID NO: 1975012
ugugauacaccucaggacu

SEQ ID NO: 1975014 - RNA, 19 nt, Artificial Sequence
  Description of Artificial Sequence: Synthetic oligonucleotide
  Sense strand starting at position 2763 of SEQ ID NO: 1880541
cugaauaguggccagaagu

SEQ ID NO: 1975015 - RNA, 19 nt, Artificial Sequence
  Description of Artificial Sequence: Synthetic oligonucleotide
  Antisense strand to SEQ ID NO: 1975014
acuucuggccacuauucag

SEQ ID NO: 1975016 - RNA, 19 nt, Artificial Sequence
  Description of Artificial Sequence: Synthetic oligonucleotide
  Sense strand starting at position 2845 of SEQ ID NO: 1880541
uggagaauaugguuccaca

SEQ ID NO: 1975017 - RNA, 19 nt, Artificial Sequence
  Description of Artificial Sequence: Synthetic oligonucleotide
  Antisense strand to SEQ ID NO: 1975016
uguggaaccauauucucca

SEQ ID NO: 1975018 - RNA, 19 nt, Artificial Sequence
  Description of Artificial Sequence: Synthetic oligonucleotide
  Sense strand starting at position 2864 of SEQ ID NO: 1880541
aucauuugugcuggccaga

SEQ ID NO: 1975019 - RNA, 19 nt, Artificial Sequence
  Description of Artificial Sequence: Synthetic oligonucleotide
  Antisense strand to SEQ ID NO: 1975018
ucuggccagcacaaaugau

SEQ ID NO: 1975020 - RNA, 19 nt, Artificial Sequence
  Description of Artificial Sequence: Synthetic oligonucleotide
  Sense strand starting at position 2924 of SEQ ID NO: 1880541
cagagaauggcauguagga

SEQ ID NO: 1975021 - RNA, 19 nt, Artificial Sequence
  Description of Artificial Sequence: Synthetic oligonucleotide
  Antisense strand to SEQ ID NO: 1975020
uccuacaugccauucucug

SEQ ID NO: 1975022 - RNA, 19 nt, Artificial Sequence
  Description of Artificial Sequence: Synthetic oligonucleotide
  Sense strand starting at position 2993 of SEQ ID NO: 1880541
guauuuaccuuagagaaga

SEQ ID NO: 1975023 - RNA, 19 nt, Artificial Sequence
  Description of Artificial Sequence: Synthetic oligonucleotide
  Antisense strand to SEQ ID NO: 1975022
ucuucucuaagguaaauac

SEQ ID NO: 1975024 - RNA, 19 nt, Artificial Sequence
  Description of Artificial Sequence: Synthetic oligonucleotide
  Sense strand starting at position 3022 of SEQ ID NO: 1880541
agggaauauuaguuuccuu

SEQ ID NO: 1975025 - RNA, 19 nt, Artificial Sequence
  Description of Artificial Sequence: Synthetic oligonucleotide
  Antisense strand to SEQ ID NO: 1975024
aaggaaacuaauauucccu

SEQ ID NO: 1975026 - RNA, 19 nt, Artificial Sequence
  Description of Artificial Sequence: Synthetic oligonucleotide
  Sense strand starting at position 3096 of SEQ ID NO: 1880541
gcagaacuagcaugaauga

SEQ ID NO: 1975027 - RNA, 19 nt, Artificial Sequence
  Description of Artificial Sequence: Synthetic oligonucleotide
  Antisense strand to SEQ ID NO: 1975026
ucauucaugcuaguucugc

SEQ ID NO: 1975028 - RNA, 19 nt, Artificial Sequence
  Description of Artificial Sequence: Synthetic oligonucleotide
  Sense strand starting at position 3157 of SEQ ID NO: 1880541
agacauuucuaucaaugag

SEQ ID NO: 1975029 - RNA, 19 nt, Artificial Sequence
  Description of Artificial Sequence: Synthetic oligonucleotide
  Antisense strand to SEQ ID NO: 1975028
cucauugauagaaaugucu

SEQ ID NO: 1975030 - RNA, 19 nt, Artificial Sequence
  Description of Artificial Sequence: Synthetic oligonucleotide
  Sense strand starting at position 3280 of SEQ ID NO: 1880541
cuagacggccuccaagauu

SEQ ID NO: 1975031 - RNA, 19 nt, Artificial Sequence
  Description of Artificial Sequence: Synthetic oligonucleotide
  Antisense strand to SEQ ID NO: 1975030
aaucuuggaggccgucuag

SEQ ID NO: 1975032 - RNA, 19 nt, Artificial Sequence
  Description of Artificial Sequence: Synthetic oligonucleotide
  Sense strand starting at position 3385 of SEQ ID NO: 1880541
ucaauaacaguguaaggua

SEQ ID NO: 1975033 - RNA, 19 nt, Artificial Sequence
  Description of Artificial Sequence: Synthetic oligonucleotide
  Antisense strand to SEQ ID NO: 1975032
uaccuuacacuguuauuga

SEQ ID NO: 1975034 - RNA, 19 nt, Artificial Sequence
  Description of Artificial Sequence: Synthetic oligonucleotide
  Sense strand starting at position 3557 of SEQ ID NO: 1880541
ggcuaagcucaggauuaga

SEQ ID NO: 1975035 - RNA, 19 nt, Artificial Sequence
  Description of Artificial Sequence: Synthetic oligonucleotide
  Antisense strand to SEQ ID NO: 1975034
ucuaauccugagcuuagcc

SEQ ID NO: 1975036 - RNA, 19 nt, Artificial Sequence
  Description of Artificial Sequence: Synthetic oligonucleotide
  Sense strand starting at position 3568 of SEQ ID NO: 1880541
ggauuagaauuaguaguua

SEQ ID NO: 1975037 - RNA, 19 nt, Artificial Sequence
  Description of Artificial Sequence: Synthetic oligonucleotide
  Antisense strand to SEQ ID NO: 1975036
uaacuacuaauucuaaucc

SEQ ID NO: 1975038 - RNA, 19 nt, Artificial Sequence
  Description of Artificial Sequence: Synthetic oligonucleotide
  Sense strand starting at position 3684 of SEQ ID NO: 1880541
uuuguuuaaguccagagga

SEQ ID NO: 1975039 - RNA, 19 nt, Artificial Sequence
  Description of Artificial Sequence: Synthetic oligonucleotide
  Antisense strand to SEQ ID NO: 1975038
uccucuggacuuaaacaaa

SEQ ID NO: 1975040 - RNA, 19 nt, Artificial Sequence
  Description of Artificial Sequence: Synthetic oligonucleotide
  Sense strand starting at position 3759 of SEQ ID NO: 1880541
agcugaacuccucaacaug

SEQ ID NO: 1975041 - RNA, 19 nt, Artificial Sequence
  Description of Artificial Sequence: Synthetic oligonucleotide
  Antisense strand to SEQ ID NO: 1975040
cauguugaggaguucagcu

SEQ ID NO: 1975042 - RNA, 19 nt, Artificial Sequence
  Description of Artificial Sequence: Synthetic oligonucleotide
  Sense strand starting at position 3876 of SEQ ID NO: 1880541
cgggauucaugaguuaaug

SEQ ID NO: 1975043 - RNA, 19 nt, Artificial Sequence
  Description of Artificial Sequence: Synthetic oligonucleotide
  Antisense strand to SEQ ID NO: 1975042
cauuaacucaugaaucccg

SEQ ID NO: 1975044 - RNA, 19 nt, Artificial Sequence
  Description of Artificial Sequence: Synthetic oligonucleotide
  Sense strand starting at position 3951 of SEQ ID NO: 1880541
guuguuauuauagggaaga

SEQ ID NO: 1975045 - RNA, 19 nt, Artificial Sequence
  Description of Artificial Sequence: Synthetic oligonucleotide
  Antisense strand to SEQ ID NO: 1975044
ucuucccuauaauaacaac

SEQ ID NO: 1975046 - RNA, 19 nt, Artificial Sequence
  Description of Artificial Sequence: Synthetic oligonucleotide
  Sense strand starting at position 3982 of SEQ ID NO: 1880541
uagcucagggucuauaauu

SEQ ID NO: 1975047 - RNA, 19 nt, Artificial Sequence
  Description of Artificial Sequence: Synthetic oligonucleotide
  Antisense strand to SEQ ID NO: 1975046
aauuauagacccugagcua

SEQ ID NO: 1975048 - RNA, 19 nt, Artificial Sequence
  Description of Artificial Sequence: Synthetic oligonucleotide
  Sense strand starting at position 79 of SEQ ID NO: 1880542
aggcuuggauucuuaaauc

SEQ ID NO: 1975049 - RNA, 19 nt, Artificial Sequence
  Description of Artificial Sequence: Synthetic oligonucleotide
  Antisense strand to SEQ ID NO: 1975048
gauuuaagaauccaagccu

SEQ ID NO: 1975050 - RNA, 19 nt, Artificial Sequence
  Description of Artificial Sequence: Synthetic oligonucleotide
  Sense strand starting at position 138 of SEQ ID NO: 1880542
gagccugugcgauggauua

SEQ ID NO: 1975051 - RNA, 19 nt, Artificial Sequence
  Description of Artificial Sequence: Synthetic oligonucleotide
  Antisense strand to SEQ ID NO: 1975050
uaauccaucgcacaggcuc

SEQ ID NO: 1975052 - RNA, 19 nt, Artificial Sequence
  Description of Artificial Sequence: Synthetic oligonucleotide
  Sense strand starting at position 140 of SEQ ID NO: 1880542
gccugugcgauggauuauc

SEQ ID NO: 1975053 - RNA, 19 nt, Artificial Sequence
  Description of Artificial Sequence: Synthetic oligonucleotide
  Antisense strand to SEQ ID NO: 1975052
gauaauccaucgcacaggc

SEQ ID NO: 1975054 - RNA, 19 nt, Artificial Sequence
  Description of Artificial Sequence: Synthetic oligonucleotide
  Sense strand starting at position 201 of SEQ ID NO: 1880542
ugccuaaggcuuggaauga

SEQ ID NO: 1975055 - RNA, 19 nt, Artificial Sequence
  Description of Artificial Sequence: Synthetic oligonucleotide
  Antisense strand to SEQ ID NO: 1975054
ucauuccaagccuuaggca

SEQ ID NO: 1975056 - RNA, 19 nt, Artificial Sequence
  Description of Artificial Sequence: Synthetic oligonucleotide
  Sense strand starting at position 375 of SEQ ID NO: 1880542
gagggauaugggugugagu

SEQ ID NO: 1975057 - RNA, 19 nt, Artificial Sequence
  Description of Artificial Sequence: Synthetic oligonucleotide
  Antisense strand to SEQ ID NO: 1975056
acucacacccauaucccuc

SEQ ID NO: 1975058 - RNA, 19 nt, Artificial Sequence
  Description of Artificial Sequence: Synthetic oligonucleotide
  Sense strand starting at position 377 of SEQ ID NO: 1880542
gggauaugggugugagugu

SEQ ID NO: 1975059 - RNA, 19 nt, Artificial Sequence
  Description of Artificial Sequence: Synthetic oligonucleotide
  Antisense strand to SEQ ID NO: 1975058
acacucacacccauauccc

SEQ ID NO: 1975060 - RNA, 19 nt, Artificial Sequence
  Description of Artificial Sequence: Synthetic oligonucleotide
  Sense strand starting at position 385 of SEQ ID NO: 1880542
ggugugagugugcugugua

SEQ ID NO: 1975061 - RNA, 19 nt, Artificial Sequence
  Description of Artificial Sequence: Synthetic oligonucleotide
  Antisense strand to SEQ ID NO: 1975060
uacacagcacacucacacc

SEQ ID NO: 1975062 - RNA, 19 nt, Artificial Sequence
  Description of Artificial Sequence: Synthetic oligonucleotide
  Sense strand starting at position 397 of SEQ ID NO: 1880542
cuguguauauguguggaaa

SEQ ID NO: 1975063 - RNA, 19 nt, Artificial Sequence
  Description of Artificial Sequence: Synthetic oligonucleotide
  Antisense strand to SEQ ID NO: 1975062
uuuccacacauauacacag

SEQ ID NO: 1975064 - RNA, 19 nt, Artificial Sequence
  Description of Artificial Sequence: Synthetic oligonucleotide
  Sense strand starting at position 639 of SEQ ID NO: 1880542
auguguuuacggugaauau

SEQ ID NO: 1975065 - RNA, 19 nt, Artificial Sequence
  Description of Artificial Sequence: Synthetic oligonucleotide
  Antisense strand to SEQ ID NO: 1975064
auauucaccguaaacacau

SEQ ID NO: 1975066 - RNA, 19 nt, Artificial Sequence
  Description of Artificial Sequence: Synthetic oligonucleotide
  Sense strand starting at position 640 of SEQ ID NO: 1880542
uguguuuacggugaauaug

SEQ ID NO: 1975067 - RNA, 19 nt, Artificial Sequence
  Description of Artificial Sequence: Synthetic oligonucleotide
  Antisense strand to SEQ ID NO: 1975066
cauauucaccguaaacaca

SEQ ID NO: 1975068 - RNA, 19 nt, Artificial Sequence
  Description of Artificial Sequence: Synthetic oligonucleotide
  Sense strand starting at position 668 of SEQ ID NO: 1880542
agaguaagugcauguauga

SEQ ID NO: 1975069 - RNA, 19 nt, Artificial Sequence
  Description of Artificial Sequence: Synthetic oligonucleotide
  Antisense strand to SEQ ID NO: 1975068
ucauacaugcacuuacucu

SEQ ID NO: 1975070 - RNA, 19 nt, Artificial Sequence
  Description of Artificial Sequence: Synthetic oligonucleotide
  Sense strand starting at position 969 of SEQ ID NO: 1880542
gguguauuuggauguguau

SEQ ID NO: 1975071 - RNA, 19 nt, Artificial Sequence
  Description of Artificial Sequence: Synthetic oligonucleotide
  Antisense strand to SEQ ID NO: 1975070
auacacauccaaauacacc

SEQ ID NO: 1975072 - RNA, 19 nt, Artificial Sequence
  Description of Artificial Sequence: Synthetic oligonucleotide
  Sense strand starting at position 971 of SEQ ID NO: 1880542
uguauuuggauguguaugu

SEQ ID NO: 1975073 - RNA, 19 nt, Artificial Sequence
  Description of Artificial Sequence: Synthetic oligonucleotide
  Antisense strand to SEQ ID NO: 1975072
acauacacauccaaauaca

SEQ ID NO: 1975074 - RNA, 19 nt, Artificial Sequence
  Description of Artificial Sequence: Synthetic oligonucleotide
  Sense strand starting at position 1022 of SEQ ID NO: 1880542
ggaguaugugcauguggag

SEQ ID NO: 1975075 - RNA, 19 nt, Artificial Sequence
  Description of Artificial Sequence: Synthetic oligonucleotide
  Antisense strand to SEQ ID NO: 1975074
cuccacaugcacauacucc

SEQ ID NO: 1975076 - RNA, 19 nt, Artificial Sequence
  Description of Artificial Sequence: Synthetic oligonucleotide
  Sense strand starting at position 1161 of SEQ ID NO: 1880542
guguguaugggagaaguau

SEQ ID NO: 1975077 - RNA, 19 nt, Artificial Sequence
  Description of Artificial Sequence: Synthetic oligonucleotide
  Antisense strand to SEQ ID NO: 1975076
auacuucucccauacacac

SEQ ID NO: 1975078 - RNA, 19 nt, Artificial Sequence
  Description of Artificial Sequence: Synthetic oligonucleotide
  Sense strand starting at position 1169 of SEQ ID NO: 1880542
gggagaaguauaugugggu

SEQ ID NO: 1975079 - RNA, 19 nt, Artificial Sequence
  Description of Artificial Sequence: Synthetic oligonucleotide
  Antisense strand to SEQ ID NO: 1975078
acccacauauacuucuccc

SEQ ID NO: 1975080 - RNA, 19 nt, Artificial Sequence
  Description of Artificial Sequence: Synthetic oligonucleotide
  Sense strand starting at position 1173 of SEQ ID NO: 1880542
gaaguauaugugggugugu

SEQ ID NO: 1975081 - RNA, 19 nt, Artificial Sequence
  Description of Artificial Sequence: Synthetic oligonucleotide
  Antisense strand to SEQ ID NO: 1975080
acacacccacauauacuuc

SEQ ID NO: 1975082 - RNA, 19 nt, Artificial Sequence
  Description of Artificial Sequence: Synthetic oligonucleotide
  Sense strand starting at position 1174 of SEQ ID NO: 1880542
aaguauaugugggugugua

SEQ ID NO: 1975083 - RNA, 19 nt, Artificial Sequence
  Description of Artificial Sequence: Synthetic oligonucleotide
  Antisense strand to SEQ ID NO: 1975082
uacacacccacauauacuu

SEQ ID NO: 1975084 - RNA, 19 nt, Artificial Sequence
  Description of Artificial Sequence: Synthetic oligonucleotide
  Sense strand starting at position 1271 of SEQ ID NO: 1880542
guguguauguguauggagu

SEQ ID NO: 1975085 - RNA, 19 nt, Artificial Sequence
  Description of Artificial Sequence: Synthetic oligonucleotide
  Antisense strand to SEQ ID NO: 1975084
acuccauacacauacacac

SEQ ID NO: 1975086 - RNA, 19 nt, Artificial Sequence
  Description of Artificial Sequence: Synthetic oligonucleotide
  Sense strand starting at position 1277 of SEQ ID NO: 1880542
auguguauggaguguauau

SEQ ID NO: 1975087 - RNA, 19 nt, Artificial Sequence
  Description of Artificial Sequence: Synthetic oligonucleotide
  Antisense strand to SEQ ID NO: 1975086
auauacacuccauacacau

SEQ ID NO: 1975088 - RNA, 19 nt, Artificial Sequence
  Description of Artificial Sequence: Synthetic oligonucleotide
  Sense strand starting at position 1421 of SEQ ID NO: 1880542
ggaaguauguguuuaugug

SEQ ID NO: 1975089 - RNA, 19 nt, Artificial Sequence
  Description of Artificial Sequence: Synthetic oligonucleotide
  Antisense strand to SEQ ID NO: 1975088
cacauaaacacauacuucc

SEQ ID NO: 1975090 - RNA, 19 nt, Artificial Sequence
  Description of Artificial Sequence: Synthetic oligonucleotide
  Sense strand starting at position 1794 of SEQ ID NO: 1880542
agugacaggucacuaaaga

SEQ ID NO: 1975091 - RNA, 19 nt, Artificial Sequence
  Description of Artificial Sequence: Synthetic oligonucleotide
  Antisense strand to SEQ ID NO: 1975090
ucuuuagugaccugucacu

SEQ ID NO: 1975092 - RNA, 19 nt, Artificial Sequence
  Description of Artificial Sequence: Synthetic oligonucleotide
  Sense strand starting at position 2295 of SEQ ID NO: 1880542
aaagaucugucaguugguu

SEQ ID NO: 1975093 - RNA, 19 nt, Artificial Sequence
  Description of Artificial Sequence: Synthetic oligonucleotide
  Antisense strand to SEQ ID NO: 1975092
aaccaacugacagaucuuu

SEQ ID NO: 1975094 - RNA, 19 nt, Artificial Sequence
  Description of Artificial Sequence: Synthetic oligonucleotide
  Sense strand starting at position 2546 of SEQ ID NO: 1880542
ccucgugaguuucuugaau

SEQ ID NO: 1975095 - RNA, 19 nt, Artificial Sequence
  Description of Artificial Sequence: Synthetic oligonucleotide
  Antisense strand to SEQ ID NO: 1975094
auucaagaaacucacgagg

SEQ ID NO: 1975096 - RNA, 19 nt, Artificial Sequence
  Description of Artificial Sequence: Synthetic oligonucleotide
  Sense strand starting at position 2574 of SEQ ID NO: 1880542
ggcagugacuauucuuaaa

SEQ ID NO: 1975097 - RNA, 19 nt, Artificial Sequence
  Description of Artificial Sequence: Synthetic oligonucleotide
  Antisense strand to SEQ ID NO: 1975096
uuuaagaauagucacugcc

SEQ ID NO: 1975098 - RNA, 19 nt, Artificial Sequence
  Description of Artificial Sequence: Synthetic oligonucleotide
  Sense strand starting at position 2823 of SEQ ID NO: 1880542
cauguaauugaauggugau

SEQ ID NO: 1975099 - RNA, 19 nt, Artificial Sequence
  Description of Artificial Sequence: Synthetic oligonucleotide
  Antisense strand to SEQ ID NO: 1975098
aucaccauucaauuacaug

SEQ ID NO: 1975100 - RNA, 19 nt, Artificial Sequence
  Description of Artificial Sequence: Synthetic oligonucleotide
  Sense strand starting at position 2824 of SEQ ID NO: 1880542
auguaauugaauggugauu

SEQ ID NO: 1975101 - RNA, 19 nt, Artificial Sequence
  Description of Artificial Sequence: Synthetic oligonucleotide
  Antisense strand to SEQ ID NO: 1975100
aaucaccauucaauuacau

SEQ ID NO: 1975102 - RNA, 19 nt, Artificial Sequence
  Description of Artificial Sequence: Synthetic oligonucleotide
  Sense strand starting at position 2829 of SEQ ID NO: 1880542
auugaauggugauugcuuu

SEQ ID NO: 1975103 - RNA, 19 nt, Artificial Sequence
  Description of Artificial Sequence: Synthetic oligonucleotide
  Antisense strand to SEQ ID NO: 1975102
aaagcaaucaccauucaau

SEQ ID NO: 1975104 - RNA, 19 nt, Artificial Sequence
  Description of Artificial Sequence: Synthetic oligonucleotide
  Sense strand starting at position 2902 of SEQ ID NO: 1880542
gcaucugauuaugcaguaa

SEQ ID NO: 1975105 - RNA, 19 nt, Artificial Sequence
  Description of Artificial Sequence: Synthetic oligonucleotide
  Antisense strand to SEQ ID NO: 1975104
uuacugcauaaucagaugc

SEQ ID NO: 1975106 - RNA, 19 nt, Artificial Sequence
  Description of Artificial Sequence: Synthetic oligonucleotide
  Sense strand starting at position 2906 of SEQ ID NO: 1880542
cugauuaugcaguaacaaa

SEQ ID NO: 1975107 - RNA, 19 nt, Artificial Sequence
  Description of Artificial Sequence: Synthetic oligonucleotide
  Antisense strand to SEQ ID NO: 1975106
uuuguuacugcauaaucag

SEQ ID NO: 1975108 - RNA, 19 nt, Artificial Sequence
  Description of Artificial Sequence: Synthetic oligonucleotide
  Sense strand starting at position 2923 of SEQ ID NO: 1880542
aaauaugcuugcucuguga

SEQ ID NO: 1975109 - RNA, 19 nt, Artificial Sequence
  Description of Artificial Sequence: Synthetic oligonucleotide
  Antisense strand to SEQ ID NO: 1975108
ucacagagcaagcauauuu

SEQ ID NO: 1975110 - RNA, 19 nt, Artificial Sequence
  Description of Artificial Sequence: Synthetic oligonucleotide
  Sense strand starting at position 2930 of SEQ ID NO: 1880542
cuugcucugugauuaguaa

SEQ ID NO: 1975111 - RNA, 19 nt, Artificial Sequence
  Description of Artificial Sequence: Synthetic oligonucleotide
  Antisense strand to SEQ ID NO: 1975110
uuacuaaucacagagcaag

SEQ ID NO: 1975112 - RNA, 19 nt, Artificial Sequence
  Description of Artificial Sequence: Synthetic oligonucleotide
  Sense strand starting at position 2931 of SEQ ID NO: 1880542
uugcucugugauuaguaaa

SEQ ID NO: 1975113 - RNA, 19 nt, Artificial Sequence
  Description of Artificial Sequence: Synthetic oligonucleotide
  Antisense strand to SEQ ID NO: 1975112
uuuacuaaucacagagcaa

SEQ ID NO: 1975114 - RNA, 19 nt, Artificial Sequence
  Description of Artificial Sequence: Synthetic oligonucleotide
  Sense strand starting at position 2951 of SEQ ID NO: 1880542
auauguguauggcuaauca

SEQ ID NO: 1975115 - RNA, 19 nt, Artificial Sequence
  Description of Artificial Sequence: Synthetic oligonucleotide
  Antisense strand to SEQ ID NO: 1975114
ugauuagccauacacauau

SEQ ID NO: 1975116 - RNA, 19 nt, Artificial Sequence
  Description of Artificial Sequence: Synthetic oligonucleotide
  Sense strand starting at position 3068 of SEQ ID NO: 1880542
uuagcugcuuagguuaaau

SEQ ID NO: 1975117 - RNA, 19 nt, Artificial Sequence
  Description of Artificial Sequence: Synthetic oligonucleotide
  Antisense strand to SEQ ID NO: 1975116
auuuaaccuaagcagcuaa

SEQ ID NO: 1975118 - RNA, 19 nt, Artificial Sequence
  Description of Artificial Sequence: Synthetic oligonucleotide
  Sense strand starting at position 3070 of SEQ ID NO: 1880542
agcugcuuagguuaaauau

SEQ ID NO: 1975119 - RNA, 19 nt, Artificial Sequence
  Description of Artificial Sequence: Synthetic oligonucleotide
  Antisense strand to SEQ ID NO: 1975118
auauuuaaccuaagcagcu

SEQ ID NO: 1975120 - RNA, 19 nt, Artificial Sequence
  Description of Artificial Sequence: Synthetic oligonucleotide
  Sense strand starting at position 3238 of SEQ ID NO: 1880542
gaggccaguuguuucuuua

SEQ ID NO: 1975121 - RNA, 19 nt, Artificial Sequence
  Description of Artificial Sequence: Synthetic oligonucleotide
  Antisense strand to SEQ ID NO: 1975120
uaaagaaacaacuggccuc

SEQ ID NO: 1975122 - RNA, 19 nt, Artificial Sequence
  Description of Artificial Sequence: Synthetic oligonucleotide
  Sense strand starting at position 3241 of SEQ ID NO: 1880542
gccaguuguuucuuuaaua

SEQ ID NO: 1975123 - RNA, 19 nt, Artificial Sequence
  Description of Artificial Sequence: Synthetic oligonucleotide
  Antisense strand to SEQ ID NO: 1975122
uauuaaagaaacaacuggc

SEQ ID NO: 1975124 - RNA, 19 nt, Artificial Sequence
  Description of Artificial Sequence: Synthetic oligonucleotide
  Sense strand starting at position 3242 of SEQ ID NO: 1880542
ccaguuguuucuuuaauaa

SEQ ID NO: 1975125 - RNA, 19 nt, Artificial Sequence
  Description of Artificial Sequence: Synthetic oligonucleotide
  Antisense strand to SEQ ID NO: 1975124
uuauuaaagaaacaacugg

SEQ ID NO: 1975126 - RNA, 19 nt, Artificial Sequence
  Description of Artificial Sequence: Synthetic oligonucleotide
  Sense strand starting at position 3421 of SEQ ID NO: 1880542
ugauuaucaugagcaacaa

SEQ ID NO: 1975127 - RNA, 19 nt, Artificial Sequence
  Description of Artificial Sequence: Synthetic oligonucleotide
  Antisense strand to SEQ ID NO: 1975126
uuguugcucaugauaauca

SEQ ID NO: 1975128 - RNA, 19 nt, Artificial Sequence
  Description of Artificial Sequence: Synthetic oligonucleotide
  Sense strand starting at position 221 of SEQ ID NO: 1880543
aaagcacaucagugagaaa

SEQ ID NO: 1975129 - RNA, 19 nt, Artificial Sequence
  Description of Artificial Sequence: Synthetic oligonucleotide
  Antisense strand to SEQ ID NO: 1975128
uuucucacugaugugcuuu

SEQ ID NO: 1975130 - RNA, 19 nt, Artificial Sequence
  Description of Artificial Sequence: Synthetic oligonucleotide
  Sense strand starting at position 582 of SEQ ID NO: 1880543
uugaaaugccuccaggagu

SEQ ID NO: 1975131 - RNA, 19 nt, Artificial Sequence
  Description of Artificial Sequence: Synthetic oligonucleotide
  Antisense strand to SEQ ID NO: 1975130
acuccuggaggcauuucaa

SEQ ID NO: 1975132 - RNA, 19 nt, Artificial Sequence
  Description of Artificial Sequence: Synthetic oligonucleotide
  Sense strand starting at position 721 of SEQ ID NO: 1880543
cuauuaaaucucuggaagc

SEQ ID NO: 1975133 - RNA, 19 nt, Artificial Sequence
  Description of Artificial Sequence: Synthetic oligonucleotide
  Antisense strand to SEQ ID NO: 1975132
gcuuccagagauuuaauag

SEQ ID NO: 1975134 - RNA, 19 nt, Artificial Sequence
  Description of Artificial Sequence: Synthetic oligonucleotide
  Sense strand starting at position 723 of SEQ ID NO: 1880543
auuaaaucucuggaagccu

SEQ ID NO: 1975135 - RNA, 19 nt, Artificial Sequence
  Description of Artificial Sequence: Synthetic oligonucleotide
  Antisense strand to SEQ ID NO: 1975134
aggcuuccagagauuuaau

SEQ ID NO: 1975136 - RNA, 19 nt, Artificial Sequence
  Description of Artificial Sequence: Synthetic oligonucleotide
  Sense strand starting at position 734 of SEQ ID NO: 1880543
ggaagccuuccacacaguu

SEQ ID NO: 1975137 - RNA, 19 nt, Artificial Sequence
  Description of Artificial Sequence: Synthetic oligonucleotide
  Antisense strand to SEQ ID NO: 1975136
aacuguguggaaggcuucc

SEQ ID NO: 1975138 - RNA, 19 nt, Artificial Sequence
  Description of Artificial Sequence: Synthetic oligonucleotide
  Sense strand starting at position 751 of SEQ ID NO: 1880543
uuuaguaacggagauccau

SEQ ID NO: 1975139 - RNA, 19 nt, Artificial Sequence
  Description of Artificial Sequence: Synthetic oligonucleotide
  Antisense strand to SEQ ID NO: 1975138
auggaucuccguuacuaaa

SEQ ID NO: 1975140 - RNA, 19 nt, Artificial Sequence
  Description of Artificial Sequence: Synthetic oligonucleotide
  Sense strand starting at position 808 of SEQ ID NO: 1880543
aacauauggugaguaaguu

SEQ ID NO: 1975141 - RNA, 19 nt, Artificial Sequence
  Description of Artificial Sequence: Synthetic oligonucleotide
  Antisense strand to SEQ ID NO: 1975140
aacuuacucaccauauguu

SEQ ID NO: 1975142 - RNA, 19 nt, Artificial Sequence
  Description of Artificial Sequence: Synthetic oligonucleotide
  Sense strand starting at position 921 of SEQ ID NO: 1880543
ugguuucugcaacaggauu

SEQ ID NO: 1975143 - RNA, 19 nt, Artificial Sequence
  Description of Artificial Sequence: Synthetic oligonucleotide
  Antisense strand to SEQ ID NO: 1975142
aauccuguugcagaaacca

SEQ ID NO: 1975144 - RNA, 19 nt, Artificial Sequence
  Description of Artificial Sequence: Synthetic oligonucleotide
  Sense strand starting at position 960 of SEQ ID NO: 1880543
ggauaugaggcguggagaa

SEQ ID NO: 1975145 - RNA, 19 nt, Artificial Sequence
  Description of Artificial Sequence: Synthetic oligonucleotide
  Antisense strand to SEQ ID NO: 1975144
uucuccacgccucauaucc

SEQ ID NO: 1975146 - RNA, 19 nt, Artificial Sequence
  Description of Artificial Sequence: Synthetic oligonucleotide
  Sense strand starting at position 962 of SEQ ID NO: 1880543
auaugaggcguggagaauu

SEQ ID NO: 1975147 - RNA, 19 nt, Artificial Sequence
  Description of Artificial Sequence: Synthetic oligonucleotide
  Antisense strand to SEQ ID NO: 1975146
aauucuccacgccucauau

SEQ ID NO: 1975148 - RNA, 19 nt, Artificial Sequence
  Description of Artificial Sequence: Synthetic oligonucleotide
  Sense strand starting at position 1017 of SEQ ID NO: 1880543
guggacaucuucuuauauc

SEQ ID NO: 1975149 - RNA, 19 nt, Artificial Sequence
  Description of Artificial Sequence: Synthetic oligonucleotide
  Antisense strand to SEQ ID NO: 1975148
gauauaagaagauguccac

SEQ ID NO: 1975150 - RNA, 19 nt, Artificial Sequence
  Description of Artificial Sequence: Synthetic oligonucleotide
  Sense strand starting at position 1127 of SEQ ID NO: 1880543
ugauaccuguugucuauuu

SEQ ID NO: 1975151 - RNA, 19 nt, Artificial Sequence
  Description of Artificial Sequence: Synthetic oligonucleotide
  Antisense strand to SEQ ID NO: 1975150
aaauagacaacagguauca

SEQ ID NO: 1975152 - RNA, 19 nt, Artificial Sequence
  Description of Artificial Sequence: Synthetic oligonucleotide
  Sense strand starting at position 1287 of SEQ ID NO: 1880543
acugcauuauccuuaggag

SEQ ID NO: 1975153 - RNA, 19 nt, Artificial Sequence
  Description of Artificial Sequence: Synthetic oligonucleotide
  Antisense strand to SEQ ID NO: 1975152
cuccuaaggauaaugcagu

SEQ ID NO: 1975154 - RNA, 19 nt, Artificial Sequence
  Description of Artificial Sequence: Synthetic oligonucleotide
  Sense strand starting at position 1288 of SEQ ID NO: 1880543
cugcauuauccuuaggaga

SEQ ID NO: 1975155 - RNA, 19 nt, Artificial Sequence
  Description of Artificial Sequence: Synthetic oligonucleotide
  Antisense strand to SEQ ID NO: 1975154
ucuccuaaggauaaugcag

SEQ ID NO: 1975156 - RNA, 19 nt, Artificial Sequence
  Description of Artificial Sequence: Synthetic oligonucleotide
  Sense strand starting at position 1763 of SEQ ID NO: 1880543
ggaucaguucucuaucaca

SEQ ID NO: 1975157 - RNA, 19 nt, Artificial Sequence
  Description of Artificial Sequence: Synthetic oligonucleotide
  Antisense strand to SEQ ID NO: 1975156
ugugauagagaacugaucc

SEQ ID NO: 1975158 - RNA, 19 nt, Artificial Sequence
  Description of Artificial Sequence: Synthetic oligonucleotide
  Sense strand starting at position 1979 of SEQ ID NO: 1880543
ucccaaacucaacgagauu

SEQ ID NO: 1975159 - RNA, 19 nt, Artificial Sequence
  Description of Artificial Sequence: Synthetic oligonucleotide
  Antisense strand to SEQ ID NO: 1975158
aaucucguugaguuuggga

SEQ ID NO: 1975160 - RNA, 19 nt, Artificial Sequence
  Description of Artificial Sequence: Synthetic oligonucleotide
  Sense strand starting at position 2036 of SEQ ID NO: 1880543
acaugacuugacugugaau

SEQ ID NO: 1975161 - RNA, 19 nt, Artificial Sequence
  Description of Artificial Sequence: Synthetic oligonucleotide
  Antisense strand to SEQ ID NO: 1975160
auucacagucaagucaugu

SEQ ID NO: 1975162 - RNA, 19 nt, Artificial Sequence
  Description of Artificial Sequence: Synthetic oligonucleotide
  Sense strand starting at position 2038 of SEQ ID NO: 1880543
augacuugacugugaauga

SEQ ID NO: 1975163 - RNA, 19 nt, Artificial Sequence
  Description of Artificial Sequence: Synthetic oligonucleotide
  Antisense strand to SEQ ID NO: 1975162
ucauucacagucaagucau

SEQ ID NO: 1975164 - RNA, 19 nt, Artificial Sequence
  Description of Artificial Sequence: Synthetic oligonucleotide
  Sense strand starting at position 2049 of SEQ ID NO: 1880543
gugaaugagagcugugaag

SEQ ID NO: 1975165 - RNA, 19 nt, Artificial Sequence
  Description of Artificial Sequence: Synthetic oligonucleotide
  Antisense strand to SEQ ID NO: 1975164
cuucacagcucucauucac

SEQ ID NO: 1975166 - RNA, 19 nt, Artificial Sequence
  Description of Artificial Sequence: Synthetic oligonucleotide
  Sense strand starting at position 2051 of SEQ ID NO: 1880543
gaaugagagcugugaagug

SEQ ID NO: 1975167 - RNA, 19 nt, Artificial Sequence
  Description of Artificial Sequence: Synthetic oligonucleotide
  Antisense strand to SEQ ID NO: 1975166
cacuucacagcucucauuc

SEQ ID NO: 1975168 - RNA, 19 nt, Artificial Sequence
  Description of Artificial Sequence: Synthetic oligonucleotide
  Sense strand starting at position 2056 of SEQ ID NO: 1880543
agagcugugaagugauaaa

SEQ ID NO: 1975169 - RNA, 19 nt, Artificial Sequence
  Description of Artificial Sequence: Synthetic oligonucleotide
  Antisense strand to SEQ ID NO: 1975168
uuuaucacuucacagcucu

SEQ ID NO: 1975170 - RNA, 19 nt, Artificial Sequence
  Description of Artificial Sequence: Synthetic oligonucleotide
  Sense strand starting at position 2210 of SEQ ID NO: 1880543
auguucuaagaguaauauc

SEQ ID NO: 1975171 - RNA, 19 nt, Artificial Sequence
  Description of Artificial Sequence: Synthetic oligonucleotide
  Antisense strand to SEQ ID NO: 1975170
gauauuacucuuagaacau

SEQ ID NO: 1975172 - RNA, 19 nt, Artificial Sequence
  Description of Artificial Sequence: Synthetic oligonucleotide
  Sense strand starting at position 2291 of SEQ ID NO: 1880543
auuguuucucuuggaagag

SEQ ID NO: 1975173 - RNA, 19 nt, Artificial Sequence
  Description of Artificial Sequence: Synthetic oligonucleotide
  Antisense strand to SEQ ID NO: 1975172
cucuuccaagagaaacaau

SEQ ID NO: 1975174 - RNA, 19 nt, Artificial Sequence
  Description of Artificial Sequence: Synthetic oligonucleotide
  Sense strand starting at position 2365 of SEQ ID NO: 1880543
cgucaagaauaauuaaaug

SEQ ID NO: 1975175 - RNA, 19 nt, Artificial Sequence
  Description of Artificial Sequence: Synthetic oligonucleotide
  Antisense strand to SEQ ID NO: 1975174
cauuuaauuauucuugacg

SEQ ID NO: 1975176 - RNA, 19 nt, Artificial Sequence
  Description of Artificial Sequence: Synthetic oligonucleotide
  Sense strand starting at position 2401 of SEQ ID NO: 1880543
acaauugaacgcugacauc

SEQ ID NO: 1975177 - RNA, 19 nt, Artificial Sequence
  Description of Artificial Sequence: Synthetic oligonucleotide
  Antisense strand to SEQ ID NO: 1975176
gaugucagcguucaauugu

SEQ ID NO: 1975178 - RNA, 19 nt, Artificial Sequence
  Description of Artificial Sequence: Synthetic oligonucleotide
  Sense strand starting at position 2557 of SEQ ID NO: 1880543
auuauucuaugcuuggaau

SEQ ID NO: 1975179 - RNA, 19 nt, Artificial Sequence
  Description of Artificial Sequence: Synthetic oligonucleotide
  Antisense strand to SEQ ID NO: 1975178
auuccaagcauagaauaau

SEQ ID NO: 1975180 - RNA, 19 nt, Artificial Sequence
  Description of Artificial Sequence: Synthetic oligonucleotide
  Sense strand starting at position 2563 of SEQ ID NO: 1880543
cuaugcuuggaaugagagu

SEQ ID NO: 1975181 - RNA, 19 nt, Artificial Sequence
  Description of Artificial Sequence: Synthetic oligonucleotide
  Antisense strand to SEQ ID NO: 1975180
acucucauuccaagcauag

SEQ ID NO: 1975182 - RNA, 19 nt, Artificial Sequence
  Description of Artificial Sequence: Synthetic oligonucleotide
  Sense strand starting at position 2677 of SEQ ID NO: 1880543
gaauguggaucaucccaga

SEQ ID NO: 1975183 - RNA, 19 nt, Artificial Sequence
  Description of Artificial Sequence: Synthetic oligonucleotide
  Antisense strand to SEQ ID NO: 1975182
ucugggaugauccacauuc

SEQ ID NO: 1975184 - RNA, 19 nt, Artificial Sequence
  Description of Artificial Sequence: Synthetic oligonucleotide
  Sense strand starting at position 2762 of SEQ ID NO: 1880543
aaggaaauguuauugguua

SEQ ID NO: 1975185 - RNA, 19 nt, Artificial Sequence
  Description of Artificial Sequence: Synthetic oligonucleotide
  Antisense strand to SEQ ID NO: 1975184
uaaccaauaacauuuccuu

SEQ ID NO: 1975186 - RNA, 19 nt, Artificial Sequence
  Description of Artificial Sequence: Synthetic oligonucleotide
  Sense strand starting at position 2764 of SEQ ID NO: 1880543
ggaaauguuauugguuaau

SEQ ID NO: 1975187 - RNA, 19 nt, Artificial Sequence
  Description of Artificial Sequence: Synthetic oligonucleotide
  Antisense strand to SEQ ID NO: 1975186
auuaaccaauaacauuucc

SEQ ID NO: 1975188 - RNA, 19 nt, Artificial Sequence
  Description of Artificial Sequence: Synthetic oligonucleotide
  Sense strand starting at position 2883 of SEQ ID NO: 1880543
ggaagaaacugagaaauau

SEQ ID NO: 1975189 - RNA, 19 nt, Artificial Sequence
  Description of Artificial Sequence: Synthetic oligonucleotide
  Antisense strand to SEQ ID NO: 1975188
auauuucucaguuucuucc

SEQ ID NO: 1975190 - RNA, 19 nt, Artificial Sequence
  Description of Artificial Sequence: Synthetic oligonucleotide
  Sense strand starting at position 2954 of SEQ ID NO: 1880543
uaugaaggacccugagguu

SEQ ID NO: 1975191 - RNA, 19 nt, Artificial Sequence
  Description of Artificial Sequence: Synthetic oligonucleotide
  Antisense strand to SEQ ID NO: 1975190
aaccucaggguccuucaua

SEQ ID NO: 1975192 - RNA, 19 nt, Artificial Sequence
  Description of Artificial Sequence: Synthetic oligonucleotide
  Sense strand starting at position 2981 of SEQ ID NO: 1880543
cuuugaaaugcugaagcca

SEQ ID NO: 1975193 - RNA, 19 nt, Artificial Sequence
  Description of Artificial Sequence: Synthetic oligonucleotide
  Antisense strand to SEQ ID NO: 1975192
uggcuucagcauuucaaag

SEQ ID NO: 1975194 - RNA, 19 nt, Artificial Sequence
  Description of Artificial Sequence: Synthetic oligonucleotide
  Sense strand starting at position 3184 of SEQ ID NO: 1880543
guguguuuaccacaagacu

SEQ ID NO: 1975195 - RNA, 19 nt, Artificial Sequence
  Description of Artificial Sequence: Synthetic oligonucleotide
  Antisense strand to SEQ ID NO: 1975194
agucuugugguaaacacac

SEQ ID NO: 1975196 - RNA, 19 nt, Artificial Sequence
  Description of Artificial Sequence: Synthetic oligonucleotide
  Sense strand starting at position 3323 of SEQ ID NO: 1880543
auaugaagagguuggucuu

SEQ ID NO: 1975197 - RNA, 19 nt, Artificial Sequence
  Description of Artificial Sequence: Synthetic oligonucleotide
  Antisense strand to SEQ ID NO: 1975196
aagaccaaccucuucauau

SEQ ID NO: 1975198 - RNA, 19 nt, Artificial Sequence
  Description of Artificial Sequence: Synthetic oligonucleotide
  Sense strand starting at position 3326 of SEQ ID NO: 1880543
ugaagagguuggucuugaa

SEQ ID NO: 1975199 - RNA, 19 nt, Artificial Sequence
  Description of Artificial Sequence: Synthetic oligonucleotide
  Antisense strand to SEQ ID NO: 1975198
uucaagaccaaccucuuca

SEQ ID NO: 1975200 - RNA, 19 nt, Artificial Sequence
  Description of Artificial Sequence: Synthetic oligonucleotide
  Sense strand starting at position 3505 of SEQ ID NO: 1880543
cgcagugcccugagugaug

SEQ ID NO: 1975201 - RNA, 19 nt, Artificial Sequence
  Description of Artificial Sequence: Synthetic oligonucleotide
  Antisense strand to SEQ ID NO: 1975200
caucacucagggcacugcg

SEQ ID NO: 1975202 - RNA, 19 nt, Artificial Sequence
  Description of Artificial Sequence: Synthetic oligonucleotide
  Sense strand starting at position 3624 of SEQ ID NO: 1880543
aagagucacugguuuaaac

SEQ ID NO: 1975203 - RNA, 19 nt, Artificial Sequence
  Description of Artificial Sequence: Synthetic oligonucleotide
  Antisense strand to SEQ ID NO: 1975202
guuuaaaccagugacucuu

SEQ ID NO: 1975204 - RNA, 19 nt, Artificial Sequence
  Description of Artificial Sequence: Synthetic oligonucleotide
  Sense strand starting at position 3626 of SEQ ID NO: 1880543
gagucacugguuuaaacac

SEQ ID NO: 1975205 - RNA, 19 nt, Artificial Sequence
  Description of Artificial Sequence: Synthetic oligonucleotide
  Antisense strand to SEQ ID NO: 1975204
guguuuaaaccagugacuc

SEQ ID NO: 1975206 - RNA, 19 nt, Artificial Sequence
  Description of Artificial Sequence: Synthetic oligonucleotide
  Sense strand starting at position 3812 of SEQ ID NO: 1880543
agccuagagcucuacaaca

SEQ ID NO: 1975207 - RNA, 19 nt, Artificial Sequence
  Description of Artificial Sequence: Synthetic oligonucleotide
  Antisense strand to SEQ ID NO: 1975206
uguuguagagcucuaggcu

SEQ ID NO: 1975208 - RNA, 19 nt, Artificial Sequence
  Description of Artificial Sequence: Synthetic oligonucleotide
  Sense strand starting at position 141 of SEQ ID NO: 1880544
guuuaauagggugaguuua

SEQ ID NO: 1975209 - RNA, 19 nt, Artificial Sequence
  Description of Artificial Sequence: Synthetic oligonucleotide
  Antisense strand to SEQ ID NO: 1975208
uaaacucacccuauuaaac

SEQ ID NO: 1975210 - RNA, 19 nt, Artificial Sequence
  Description of Artificial Sequence: Synthetic oligonucleotide
  Sense strand starting at position 143 of SEQ ID NO: 1880544
uuaauagggugaguuuaca

SEQ ID NO: 1975211 - RNA, 19 nt, Artificial Sequence
  Description of Artificial Sequence: Synthetic oligonucleotide
  Antisense strand to SEQ ID NO: 1975210
uguaaacucacccuauuaa

SEQ ID NO: 1975212 - RNA, 19 nt, Artificial Sequence
  Description of Artificial Sequence: Synthetic oligonucleotide
  Sense strand starting at position 186 of SEQ ID NO: 1880544
uugaccgcuagguaauaau

SEQ ID NO: 1975213 - RNA, 19 nt, Artificial Sequence
  Description of Artificial Sequence: Synthetic oligonucleotide
  Antisense strand to SEQ ID NO: 1975212
auuauuaccuagcggucaa

SEQ ID NO: 1975214 - RNA, 19 nt, Artificial Sequence
  Description of Artificial Sequence: Synthetic oligonucleotide
  Sense strand starting at position 382 of SEQ ID NO: 1880544
gguagaaagaaguguuaaa

SEQ ID NO: 1975215 - RNA, 19 nt, Artificial Sequence
  Description of Artificial Sequence: Synthetic oligonucleotide
  Antisense strand to SEQ ID NO: 1975214
uuuaacacuucuuucuacc

SEQ ID NO: 1975216 - RNA, 19 nt, Artificial Sequence
  Description of Artificial Sequence: Synthetic oligonucleotide
  Sense strand starting at position 395 of SEQ ID NO: 1880544
guuaaagucaugcagggaa

SEQ ID NO: 1975217 - RNA, 19 nt, Artificial Sequence
  Description of Artificial Sequence: Synthetic oligonucleotide
  Antisense strand to SEQ ID NO: 1975216
uucccugcaugacuuuaac

SEQ ID NO: 1975218 - RNA, 19 nt, Artificial Sequence
  Description of Artificial Sequence: Synthetic oligonucleotide
  Sense strand starting at position 416 of SEQ ID NO: 1880544
gaaaguugcagugauguga

SEQ ID NO: 1975219 - RNA, 19 nt, Artificial Sequence
  Description of Artificial Sequence: Synthetic oligonucleotide
  Antisense strand to SEQ ID NO: 1975218
ucacaucacugcaacuuuc

SEQ ID NO: 1975220 - RNA, 19 nt, Artificial Sequence
  Description of Artificial Sequence: Synthetic oligonucleotide
  Sense strand starting at position 435 of SEQ ID NO: 1880544
agaagaauuguauggucau

SEQ ID NO: 1975221 - RNA, 19 nt, Artificial Sequence
  Description of Artificial Sequence: Synthetic oligonucleotide
  Antisense strand to SEQ ID NO: 1975220
augaccauacaauucuucu

SEQ ID NO: 1975222 - RNA, 19 nt, Artificial Sequence
  Description of Artificial Sequence: Synthetic oligonucleotide
  Sense strand starting at position 438 of SEQ ID NO: 1880544
agaauuguauggucauauu

SEQ ID NO: 1975223 - RNA, 19 nt, Artificial Sequence
  Description of Artificial Sequence: Synthetic oligonucleotide
  Antisense strand to SEQ ID NO: 1975222
aauaugaccauacaauucu

SEQ ID NO: 1975224 - RNA, 19 nt, Artificial Sequence
  Description of Artificial Sequence: Synthetic oligonucleotide
  Sense strand starting at position 573 of SEQ ID NO: 1880544
gaggucuuagcugaugaua

SEQ ID NO: 1975225 - RNA, 19 nt, Artificial Sequence
  Description of Artificial Sequence: Synthetic oligonucleotide
  Antisense strand to SEQ ID NO: 1975224
uaucaucagcuaagaccuc

SEQ ID NO: 1975226 - RNA, 19 nt, Artificial Sequence
  Description of Artificial Sequence: Synthetic oligonucleotide
  Sense strand starting at position 601 of SEQ ID NO: 1880544
caccauuugccaggagugu

SEQ ID NO: 1975227 - RNA, 19 nt, Artificial Sequence
  Description of Artificial Sequence: Synthetic oligonucleotide
  Antisense strand to SEQ ID NO: 1975226
acacuccuggcaaauggug

SEQ ID NO: 1975228 - RNA, 19 nt, Artificial Sequence
  Description of Artificial Sequence: Synthetic oligonucleotide
  Sense strand starting at position 633 of SEQ ID NO: 1880544
agauguuggccucaacauu

SEQ ID NO: 1975229 - RNA, 19 nt, Artificial Sequence
  Description of Artificial Sequence: Synthetic oligonucleotide
  Antisense strand to SEQ ID NO: 1975228
aauguugaggccaacaucu

SEQ ID NO: 1975230 - RNA, 19 nt, Artificial Sequence
  Description of Artificial Sequence: Synthetic oligonucleotide
  Sense strand starting at position 661 of SEQ ID NO: 1880544
auaguuaucccauaaggca

SEQ ID NO: 1975231 - RNA, 19 nt, Artificial Sequence
  Description of Artificial Sequence: Synthetic oligonucleotide
  Antisense strand to SEQ ID NO: 1975230
ugccuuaugggauaacuau

SEQ ID NO: 1975232 - RNA, 19 nt, Artificial Sequence
  Description of Artificial Sequence: Synthetic oligonucleotide
  Sense strand starting at position 754 of SEQ ID NO: 1880544
agaagcaauuccuuaggga

SEQ ID NO: 1975233 - RNA, 19 nt, Artificial Sequence
  Description of Artificial Sequence: Synthetic oligonucleotide
  Antisense strand to SEQ ID NO: 1975232
ucccuaaggaauugcuucu

SEQ ID NO: 1975234 - RNA, 19 nt, Artificial Sequence
  Description of Artificial Sequence: Synthetic oligonucleotide
  Sense strand starting at position 827 of SEQ ID NO: 1880544
guggucuaacuagagaguu

SEQ ID NO: 1975235 - RNA, 19 nt, Artificial Sequence
  Description of Artificial Sequence: Synthetic oligonucleotide
  Antisense strand to SEQ ID NO: 1975234
aacucucuaguuagaccac

SEQ ID NO: 1975236 - RNA, 19 nt, Artificial Sequence
  Description of Artificial Sequence: Synthetic oligonucleotide
  Sense strand starting at position 1204 of SEQ ID NO: 1880544
ggaaacugguucucccuua

SEQ ID NO: 1975237 - RNA, 19 nt, Artificial Sequence
  Description of Artificial Sequence: Synthetic oligonucleotide
  Antisense strand to SEQ ID NO: 1975236
uaagggagaaccaguuucc

SEQ ID NO: 1975238 - RNA, 19 nt, Artificial Sequence
  Description of Artificial Sequence: Synthetic oligonucleotide
  Sense strand starting at position 1209 of SEQ ID NO: 1880544
cugguucucccuuagagac

SEQ ID NO: 1975239 - RNA, 19 nt, Artificial Sequence
  Description of Artificial Sequence: Synthetic oligonucleotide
  Antisense strand to SEQ ID NO: 1975238
gucucuaagggagaaccag

SEQ ID NO: 1975240 - RNA, 19 nt, Artificial Sequence
  Description of Artificial Sequence: Synthetic oligonucleotide
  Sense strand starting at position 1431 of SEQ ID NO: 1880544
cccacagggucuguaaaua

SEQ ID NO: 1975241 - RNA, 19 nt, Artificial Sequence
  Description of Artificial Sequence: Synthetic oligonucleotide
  Antisense strand to SEQ ID NO: 1975240
uauuuacagacccuguggg

SEQ ID NO: 1975242 - RNA, 19 nt, Artificial Sequence
  Description of Artificial Sequence: Synthetic oligonucleotide
  Sense strand starting at position 1474 of SEQ ID NO: 1880544
cugcuuaaccuggaaucca

SEQ ID NO: 1975243 - RNA, 19 nt, Artificial Sequence
  Description of Artificial Sequence: Synthetic oligonucleotide
  Antisense strand to SEQ ID NO: 1975242
uggauuccagguuaagcag

SEQ ID NO: 1975244 - RNA, 19 nt, Artificial Sequence
  Description of Artificial Sequence: Synthetic oligonucleotide
  Sense strand starting at position 1819 of SEQ ID NO: 1880544
ggauaugauccugguuuaa

SEQ ID NO: 1975245 - RNA, 19 nt, Artificial Sequence
  Description of Artificial Sequence: Synthetic oligonucleotide
  Antisense strand to SEQ ID NO: 1975244
uuaaaccaggaucauaucc

SEQ ID NO: 1975246 - RNA, 19 nt, Artificial Sequence
  Description of Artificial Sequence: Synthetic oligonucleotide
  Sense strand starting at position 1830 of SEQ ID NO: 1880544
ugguuuaacggagaugcau

SEQ ID NO: 1975247 - RNA, 19 nt, Artificial Sequence
  Description of Artificial Sequence: Synthetic oligonucleotide
  Antisense strand to SEQ ID NO: 1975246
augcaucuccguuaaacca

SEQ ID NO: 1975248 - RNA, 19 nt, Artificial Sequence
  Description of Artificial Sequence: Synthetic oligonucleotide
  Sense strand starting at position 1957 of SEQ ID NO: 1880544
agagaagugguuuaugguc

SEQ ID NO: 1975249 - RNA, 19 nt, Artificial Sequence
  Description of Artificial Sequence: Synthetic oligonucleotide
  Antisense strand to SEQ ID NO: 1975248
gaccauaaaccacuucucu

SEQ ID NO: 1975250 - RNA, 19 nt, Artificial Sequence
  Description of Artificial Sequence: Synthetic oligonucleotide
  Sense strand starting at position 2184 of SEQ ID NO: 1880544
aaaguuccuggccaugaaa

SEQ ID NO: 1975251 - RNA, 19 nt, Artificial Sequence
  Description of Artificial Sequence: Synthetic oligonucleotide
  Antisense strand to SEQ ID NO: 1975250
uuucauggccaggaacuuu

SEQ ID NO: 1975252 - RNA, 19 nt, Artificial Sequence
  Description of Artificial Sequence: Synthetic oligonucleotide
  Sense strand starting at position 2297 of SEQ ID NO: 1880544
ugaauagaguauuccagau

SEQ ID NO: 1975253 - RNA, 19 nt, Artificial Sequence
  Description of Artificial Sequence: Synthetic oligonucleotide
  Antisense strand to SEQ ID NO: 1975252
aucuggaauacucuauuca

SEQ ID NO: 1975254 - RNA, 19 nt, Artificial Sequence
  Description of Artificial Sequence: Synthetic oligonucleotide
  Sense strand starting at position 2571 of SEQ ID NO: 1880544
acuggcauuguuuaaccua

SEQ ID NO: 1975255 - RNA, 19 nt, Artificial Sequence
  Description of Artificial Sequence: Synthetic oligonucleotide
  Antisense strand to SEQ ID NO: 1975254
uagguuaaacaaugccagu

SEQ ID NO: 1975256 - RNA, 19 nt, Artificial Sequence
  Description of Artificial Sequence: Synthetic oligonucleotide
  Sense strand starting at position 2656 of SEQ ID NO: 1880544
guuacucagcaugauucua

SEQ ID NO: 1975257 - RNA, 19 nt, Artificial Sequence
  Description of Artificial Sequence: Synthetic oligonucleotide
  Antisense strand to SEQ ID NO: 1975256
uagaaucaugcugaguaac

SEQ ID NO: 1975258 - RNA, 19 nt, Artificial Sequence
  Description of Artificial Sequence: Synthetic oligonucleotide
  Sense strand starting at position 2692 of SEQ ID NO: 1880544
guaugugugagugaaggga

SEQ ID NO: 1975259 - RNA, 19 nt, Artificial Sequence
  Description of Artificial Sequence: Synthetic oligonucleotide
  Antisense strand to SEQ ID NO: 1975258
ucccuucacucacacauac

SEQ ID NO: 1975260 - RNA, 19 nt, Artificial Sequence
  Description of Artificial Sequence: Synthetic oligonucleotide
  Sense strand starting at position 2723 of SEQ ID NO: 1880544
ugacgucaaauaugugaga

SEQ ID NO: 1975261 - RNA, 19 nt, Artificial Sequence
  Description of Artificial Sequence: Synthetic oligonucleotide
  Antisense strand to SEQ ID NO: 1975260
ucucacauauuugacguca

SEQ ID NO: 1975262 - RNA, 19 nt, Artificial Sequence
  Description of Artificial Sequence: Synthetic oligonucleotide
  Sense strand starting at position 2828 of SEQ ID NO: 1880544
uuggaaaucuugucugaug

SEQ ID NO: 1975263 - RNA, 19 nt, Artificial Sequence
  Description of Artificial Sequence: Synthetic oligonucleotide
  Antisense strand to SEQ ID NO: 1975262
caucagacaagauuuccaa

SEQ ID NO: 1975264 - RNA, 19 nt, Artificial Sequence
  Description of Artificial Sequence: Synthetic oligonucleotide
  Sense strand starting at position 2830 of SEQ ID NO: 1880544
ggaaaucuugucugaugga

SEQ ID NO: 1975265 - RNA, 19 nt, Artificial Sequence
  Description of Artificial Sequence: Synthetic oligonucleotide
  Antisense strand to SEQ ID NO: 1975264
uccaucagacaagauuucc

SEQ ID NO: 1975266 - RNA, 19 nt, Artificial Sequence
  Description of Artificial Sequence: Synthetic oligonucleotide
  Sense strand starting at position 2867 of SEQ ID NO: 1880544
gaggacuccuaagugcaaa

SEQ ID NO: 1975267 - RNA, 19 nt, Artificial Sequence
  Description of Artificial Sequence: Synthetic oligonucleotide
  Antisense strand to SEQ ID NO: 1975266
uuugcacuuaggaguccuc

SEQ ID NO: 1975268 - RNA, 19 nt, Artificial Sequence
  Description of Artificial Sequence: Synthetic oligonucleotide
  Sense strand starting at position 3152 of SEQ ID NO: 1880544
gaaaguuauugacugacca

SEQ ID NO: 1975269 - RNA, 19 nt, Artificial Sequence
  Description of Artificial Sequence: Synthetic oligonucleotide
  Antisense strand to SEQ ID NO: 1975268
uggucagucaauaacuuuc

SEQ ID NO: 1975270 - RNA, 19 nt, Artificial Sequence
  Description of Artificial Sequence: Synthetic oligonucleotide
  Sense strand starting at position 3193 of SEQ ID NO: 1880544
gccuuuccaggauacauga

SEQ ID NO: 1975271 - RNA, 19 nt, Artificial Sequence
  Description of Artificial Sequence: Synthetic oligonucleotide
  Antisense strand to SEQ ID NO: 1975270
ucauguauccuggaaaggc

SEQ ID NO: 1975272 - RNA, 19 nt, Artificial Sequence
  Description of Artificial Sequence: Synthetic oligonucleotide
  Sense strand starting at position 3237 of SEQ ID NO: 1880544
uugacaucaccaugugaca

SEQ ID NO: 1975273 - RNA, 19 nt, Artificial Sequence
  Description of Artificial Sequence: Synthetic oligonucleotide
  Antisense strand to SEQ ID NO: 1975272
ugucacauggugaugucaa

SEQ ID NO: 1975274 - RNA, 19 nt, Artificial Sequence
  Description of Artificial Sequence: Synthetic oligonucleotide
  Sense strand starting at position 3250 of SEQ ID NO: 1880544
gugacaauaucugcaagac

SEQ ID NO: 1975275 - RNA, 19 nt, Artificial Sequence
  Description of Artificial Sequence: Synthetic oligonucleotide
  Antisense strand to SEQ ID NO: 1975274
gucuugcagauauugucac

SEQ ID NO: 1975276 - RNA, 19 nt, Artificial Sequence
  Description of Artificial Sequence: Synthetic oligonucleotide
  Sense strand starting at position 3278 of SEQ ID NO: 1880544
ggaagacacuggccuauau

SEQ ID NO: 1975277 - RNA, 19 nt, Artificial Sequence
  Description of Artificial Sequence: Synthetic oligonucleotide
  Antisense strand to SEQ ID NO: 1975276
auauaggccagugucuucc

SEQ ID NO: 1975278 - RNA, 19 nt, Artificial Sequence
  Description of Artificial Sequence: Synthetic oligonucleotide
  Sense strand starting at position 3309 of SEQ ID NO: 1880544
uaucuaguuggugauacaa

SEQ ID NO: 1975279 - RNA, 19 nt, Artificial Sequence
  Description of Artificial Sequence: Synthetic oligonucleotide
  Antisense strand to SEQ ID NO: 1975278
uuguaucaccaacuagaua

SEQ ID NO: 1975280 - RNA, 19 nt, Artificial Sequence
  Description of Artificial Sequence: Synthetic oligonucleotide
  Sense strand starting at position 3317 of SEQ ID NO: 1880544
uggugauacaagcauugca

SEQ ID NO: 1975281 - RNA, 19 nt, Artificial Sequence
  Description of Artificial Sequence: Synthetic oligonucleotide
  Antisense strand to SEQ ID NO: 1975280
ugcaaugcuuguaucacca

SEQ ID NO: 1975282 - RNA, 19 nt, Artificial Sequence
  Description of Artificial Sequence: Synthetic oligonucleotide
  Sense strand starting at position 3562 of SEQ ID NO: 1880544
cucagcuaaucaguaauga

SEQ ID NO: 1975283 - RNA, 19 nt, Artificial Sequence
  Description of Artificial Sequence: Synthetic oligonucleotide
  Antisense strand to SEQ ID NO: 1975282
ucauuacugauuagcugag

SEQ ID NO: 1975284 - RNA, 19 nt, Artificial Sequence
  Description of Artificial Sequence: Synthetic oligonucleotide
  Sense strand starting at position 3563 of SEQ ID NO: 1880544
ucagcuaaucaguaaugag

SEQ ID NO: 1975285 - RNA, 19 nt, Artificial Sequence
  Description of Artificial Sequence: Synthetic oligonucleotide
  Antisense strand to SEQ ID NO: 1975284
cucauuacugauuagcuga

SEQ ID NO: 1975286 - RNA, 19 nt, Artificial Sequence
  Description of Artificial Sequence: Synthetic oligonucleotide
  Sense strand starting at position 3623 of SEQ ID NO: 1880544
gcuagagacuucccuggaa

SEQ ID NO: 1975287 - RNA, 19 nt, Artificial Sequence
  Description of Artificial Sequence: Synthetic oligonucleotide
  Antisense strand to SEQ ID NO: 1975286
uuccagggaagucucuagc

SEQ ID NO: 1975288 - RNA, 19 nt, Artificial Sequence
  Description of Artificial Sequence: Synthetic oligonucleotide
  Sense strand starting at position 19 of SEQ ID NO: 1880545
aacguuguccuuuaacaga

SEQ ID NO: 1975289 - RNA, 19 nt, Artificial Sequence
  Description of Artificial Sequence: Synthetic oligonucleotide
  Antisense strand to SEQ ID NO: 1975288
ucuguuaaaggacaacguu

SEQ ID NO: 1975290 - RNA, 19 nt, Artificial Sequence
  Description of Artificial Sequence: Synthetic oligonucleotide
  Sense strand starting at position 81 of SEQ ID NO: 1880545
cagcacugacaguguuaaa

SEQ ID NO: 1975291 - RNA, 19 nt, Artificial Sequence
  Description of Artificial Sequence: Synthetic oligonucleotide
  Antisense strand to SEQ ID NO: 1975290
uuuaacacugucagugcug

SEQ ID NO: 1975292 - RNA, 19 nt, Artificial Sequence
  Description of Artificial Sequence: Synthetic oligonucleotide
  Sense strand starting at position 91 of SEQ ID NO: 1880545
aguguuaaauuagccauga

SEQ ID NO: 1975293 - RNA, 19 nt, Artificial Sequence
  Description of Artificial Sequence: Synthetic oligonucleotide
  Antisense strand to SEQ ID NO: 1975292
ucauggcuaauuuaacacu

SEQ ID NO: 1975294 - RNA, 19 nt, Artificial Sequence
  Description of Artificial Sequence: Synthetic oligonucleotide
  Sense strand starting at position 92 of SEQ ID NO: 1880545
guguuaaauuagccaugaa

SEQ ID NO: 1975295 - RNA, 19 nt, Artificial Sequence
  Description of Artificial Sequence: Synthetic oligonucleotide
  Antisense strand to SEQ ID NO: 1975294
uucauggcuaauuuaacac

SEQ ID NO: 1975296 - RNA, 19 nt, Artificial Sequence
  Description of Artificial Sequence: Synthetic oligonucleotide
  Sense strand starting at position 95 of SEQ ID NO: 1880545
uuaaauuagccaugaagug

SEQ ID NO: 1975297 - RNA, 19 nt, Artificial Sequence
  Description of Artificial Sequence: Synthetic oligonucleotide
  Antisense strand to SEQ ID NO: 1975296
cacuucauggcuaauuuaa

SEQ ID NO: 1975298 - RNA, 19 nt, Artificial Sequence
  Description of Artificial Sequence: Synthetic oligonucleotide
  Sense strand starting at position 100 of SEQ ID NO: 1880545
uuagccaugaagugaagau

SEQ ID NO: 1975299 - RNA, 19 nt, Artificial Sequence
  Description of Artificial Sequence: Synthetic oligonucleotide
  Antisense strand to SEQ ID NO: 1975298
aucuucacuucauggcuaa

SEQ ID NO: 1975300 - RNA, 19 nt, Artificial Sequence
  Description of Artificial Sequence: Synthetic oligonucleotide
  Sense strand starting at position 376 of SEQ ID NO: 1880545
auguuaaauccuugagaau

SEQ ID NO: 1975301 - RNA, 19 nt, Artificial Sequence
  Description of Artificial Sequence: Synthetic oligonucleotide
  Antisense strand to SEQ ID NO: 1975300
auucucaaggauuuaacau

SEQ ID NO: 1975302 - RNA, 19 nt, Artificial Sequence
  Description of Artificial Sequence: Synthetic oligonucleotide
  Sense strand starting at position 382 of SEQ ID NO: 1880545
aauccuugagaauguauga

SEQ ID NO: 1975303 - RNA, 19 nt, Artificial Sequence
  Description of Artificial Sequence: Synthetic oligonucleotide
  Antisense strand to SEQ ID NO: 1975302
ucauacauucucaaggauu

SEQ ID NO: 1975304 - RNA, 19 nt, Artificial Sequence
  Description of Artificial Sequence: Synthetic oligonucleotide
  Sense strand starting at position 392 of SEQ ID NO: 1880545
aauguaugagacugccaua

SEQ ID NO: 1975305 - RNA, 19 nt, Artificial Sequence
  Description of Artificial Sequence: Synthetic oligonucleotide
  Antisense strand to SEQ ID NO: 1975304
uauggcagucucauacauu

SEQ ID NO: 1975306 - RNA, 19 nt, Artificial Sequence
  Description of Artificial Sequence: Synthetic oligonucleotide
  Sense strand starting at position 486 of SEQ ID NO: 1880545
gaacguaaccaggauagcu

SEQ ID NO: 1975307 - RNA, 19 nt, Artificial Sequence
  Description of Artificial Sequence: Synthetic oligonucleotide
  Antisense strand to SEQ ID NO: 1975306
agcuauccugguuacguuc

SEQ ID NO: 1975308 - RNA, 19 nt, Artificial Sequence
  Description of Artificial Sequence: Synthetic oligonucleotide
  Sense strand starting at position 653 of SEQ ID NO: 1880545
gaggucagauaguuaauua

SEQ ID NO: 1975309 - RNA, 19 nt, Artificial Sequence
  Description of Artificial Sequence: Synthetic oligonucleotide
  Antisense strand to SEQ ID NO: 1975308
uaauuaacuaucugaccuc

SEQ ID NO: 1975310 - RNA, 19 nt, Artificial Sequence
  Description of Artificial Sequence: Synthetic oligonucleotide
  Sense strand starting at position 809 of SEQ ID NO: 1880545
aggcgcugugcaucuuuau

SEQ ID NO: 1975311 - RNA, 19 nt, Artificial Sequence
  Description of Artificial Sequence: Synthetic oligonucleotide
  Antisense strand to SEQ ID NO: 1975310
auaaagaugcacagcgccu

SEQ ID NO: 1975312 - RNA, 19 nt, Artificial Sequence
  Description of Artificial Sequence: Synthetic oligonucleotide
  Sense strand starting at position 821 of SEQ ID NO: 1880545
ucuuuaucugcacagaguu

SEQ ID NO: 1975313 - RNA, 19 nt, Artificial Sequence
  Description of Artificial Sequence: Synthetic oligonucleotide
  Antisense strand to SEQ ID NO: 1975312
aacucugugcagauaaaga

SEQ ID NO: 1975314 - RNA, 19 nt, Artificial Sequence
  Description of Artificial Sequence: Synthetic oligonucleotide
  Sense strand starting at position 902 of SEQ ID NO: 1880545
ugauauagccucuaacuga

SEQ ID NO: 1975315 - RNA, 19 nt, Artificial Sequence
  Description of Artificial Sequence: Synthetic oligonucleotide
  Antisense strand to SEQ ID NO: 1975314
ucaguuagaggcuauauca

SEQ ID NO: 1975316 - RNA, 19 nt, Artificial Sequence
  Description of Artificial Sequence: Synthetic oligonucleotide
  Sense strand starting at position 1058 of SEQ ID NO: 1880545
ggauucugaugcucuccaa

SEQ ID NO: 1975317 - RNA, 19 nt, Artificial Sequence
  Description of Artificial Sequence: Synthetic oligonucleotide
  Antisense strand to SEQ ID NO: 1975316
uuggagagcaucagaaucc

SEQ ID NO: 1975318 - RNA, 19 nt, Artificial Sequence
  Description of Artificial Sequence: Synthetic oligonucleotide
  Sense strand starting at position 1128 of SEQ ID NO: 1880545
gcgguuggaggacagaauu

SEQ ID NO: 1975319 - RNA, 19 nt, Artificial Sequence
  Description of Artificial Sequence: Synthetic oligonucleotide
  Antisense strand to SEQ ID NO: 1975318
aauucuguccuccaaccgc

SEQ ID NO: 1975320 - RNA, 19 nt, Artificial Sequence
  Description of Artificial Sequence: Synthetic oligonucleotide
  Sense strand starting at position 1810 of SEQ ID NO: 1880545
ccuuaaauucggugagacg

SEQ ID NO: 1975321 - RNA, 19 nt, Artificial Sequence
  Description of Artificial Sequence: Synthetic oligonucleotide
  Antisense strand to SEQ ID NO: 1975320
cgucucaccgaauuuaagg

SEQ ID NO: 1975322 - RNA, 19 nt, Artificial Sequence
  Description of Artificial Sequence: Synthetic oligonucleotide
  Sense strand starting at position 2460 of SEQ ID NO: 1880545
aggcuaggacugugggaua

SEQ ID NO: 1975323 - RNA, 19 nt, Artificial Sequence
  Description of Artificial Sequence: Synthetic oligonucleotide
  Antisense strand to SEQ ID NO: 1975322
uaucccacaguccuagccu

SEQ ID NO: 1975324 - RNA, 19 nt, Artificial Sequence
  Description of Artificial Sequence: Synthetic oligonucleotide
  Sense strand starting at position 2584 of SEQ ID NO: 1880545
uaaccaggcuugucagaag

SEQ ID NO: 1975325 - RNA, 19 nt, Artificial Sequence
  Description of Artificial Sequence: Synthetic oligonucleotide
  Antisense strand to SEQ ID NO: 1975324
cuucugacaagccugguua

SEQ ID NO: 1975326 - RNA, 19 nt, Artificial Sequence
  Description of Artificial Sequence: Synthetic oligonucleotide
  Sense strand starting at position 2666 of SEQ ID NO: 1880545
uggugauaaucucucuuug

SEQ ID NO: 1975327 - RNA, 19 nt, Artificial Sequence
  Description of Artificial Sequence: Synthetic oligonucleotide
  Antisense strand to SEQ ID NO: 1975326
caaagagagauuaucacca

SEQ ID NO: 1975328 - RNA, 19 nt, Artificial Sequence
  Description of Artificial Sequence: Synthetic oligonucleotide
  Sense strand starting at position 2698 of SEQ ID NO: 1880545
uuaguggucguggaagaug

SEQ ID NO: 1975329 - RNA, 19 nt, Artificial Sequence
  Description of Artificial Sequence: Synthetic oligonucleotide
  Antisense strand to SEQ ID NO: 1975328
caucuuccacgaccacuaa

SEQ ID NO: 1975330 - RNA, 19 nt, Artificial Sequence
  Description of Artificial Sequence: Synthetic oligonucleotide
  Sense strand starting at position 2706 of SEQ ID NO: 1880545
cguggaagauguaagugaa

SEQ ID NO: 1975331 - RNA, 19 nt, Artificial Sequence
  Description of Artificial Sequence: Synthetic oligonucleotide
  Antisense strand to SEQ ID NO: 1975330
uucacuuacaucuuccacg

SEQ ID NO: 1975332 - RNA, 19 nt, Artificial Sequence
  Description of Artificial Sequence: Synthetic oligonucleotide
  Sense strand starting at position 2709 of SEQ ID NO: 1880545
ggaagauguaagugaaugu

SEQ ID NO: 1975333 - RNA, 19 nt, Artificial Sequence
  Description of Artificial Sequence: Synthetic oligonucleotide
  Antisense strand to SEQ ID NO: 1975332
acauucacuuacaucuucc

SEQ ID NO: 1975334 - RNA, 19 nt, Artificial Sequence
  Description of Artificial Sequence: Synthetic oligonucleotide
  Sense strand starting at position 2713 of SEQ ID NO: 1880545
gauguaagugaauguaaag

SEQ ID NO: 1975335 - RNA, 19 nt, Artificial Sequence
  Description of Artificial Sequence: Synthetic oligonucleotide
  Antisense strand to SEQ ID NO: 1975334
cuuuacauucacuuacauc

SEQ ID NO: 1975336 - RNA, 19 nt, Artificial Sequence
  Description of Artificial Sequence: Synthetic oligonucleotide
  Sense strand starting at position 2757 of SEQ ID NO: 1880545
uagguuuaugacgggugau

SEQ ID NO: 1975337 - RNA, 19 nt, Artificial Sequence
  Description of Artificial Sequence: Synthetic oligonucleotide
  Antisense strand to SEQ ID NO: 1975336
aucacccgucauaaaccua

SEQ ID NO: 1975338 - RNA, 19 nt, Artificial Sequence
  Description of Artificial Sequence: Synthetic oligonucleotide
  Sense strand starting at position 2758 of SEQ ID NO: 1880545
agguuuaugacgggugauc

SEQ ID NO: 1975339 - RNA, 19 nt, Artificial Sequence
  Description of Artificial Sequence: Synthetic oligonucleotide
  Antisense strand to SEQ ID NO: 1975338
gaucacccgucauaaaccu

SEQ ID NO: 1975340 - RNA, 19 nt, Artificial Sequence
  Description of Artificial Sequence: Synthetic oligonucleotide
  Sense strand starting at position 2769 of SEQ ID NO: 1880545
gggugaucacuguagcacu

SEQ ID NO: 1975341 - RNA, 19 nt, Artificial Sequence
  Description of Artificial Sequence: Synthetic oligonucleotide
  Antisense strand to SEQ ID NO: 1975340
agugcuacagugaucaccc

SEQ ID NO: 1975342 - RNA, 19 nt, Artificial Sequence
  Description of Artificial Sequence: Synthetic oligonucleotide
  Sense strand starting at position 2913 of SEQ ID NO: 1880545
ccagcuuuauauccugaga

SEQ ID NO: 1975343 - RNA, 19 nt, Artificial Sequence
  Description of Artificial Sequence: Synthetic oligonucleotide
  Antisense strand to SEQ ID NO: 1975342
ucucaggauauaaagcugg

SEQ ID NO: 1975344 - RNA, 19 nt, Artificial Sequence
  Description of Artificial Sequence: Synthetic oligonucleotide
  Sense strand starting at position 2916 of SEQ ID NO: 1880545
gcuuuauauccugagagug

SEQ ID NO: 1975345 - RNA, 19 nt, Artificial Sequence
  Description of Artificial Sequence: Synthetic oligonucleotide
  Antisense strand to SEQ ID NO: 1975344
cacucucaggauauaaagc

SEQ ID NO: 1975346 - RNA, 19 nt, Artificial Sequence
  Description of Artificial Sequence: Synthetic oligonucleotide
  Sense strand starting at position 2961 of SEQ ID NO: 1880545
uagacuaagguuugauguu

SEQ ID NO: 1975347 - RNA, 19 nt, Artificial Sequence
  Description of Artificial Sequence: Synthetic oligonucleotide
  Antisense strand to SEQ ID NO: 1975346
aacaucaaaccuuagucua

SEQ ID NO: 1975348 - RNA, 19 nt, Artificial Sequence
  Description of Artificial Sequence: Synthetic oligonucleotide
  Sense strand starting at position 2995 of SEQ ID NO: 1880545
guauuauggcacugauauu

SEQ ID NO: 1975349 - RNA, 19 nt, Artificial Sequence
  Description of Artificial Sequence: Synthetic oligonucleotide
  Antisense strand to SEQ ID NO: 1975348
aauaucagugccauaauac

SEQ ID NO: 1975350 - RNA, 19 nt, Artificial Sequence
  Description of Artificial Sequence: Synthetic oligonucleotide
  Sense strand starting at position 3175 of SEQ ID NO: 1880545
ucugacagguacuugcaua

SEQ ID NO: 1975351 - RNA, 19 nt, Artificial Sequence
  Description of Artificial Sequence: Synthetic oligonucleotide
  Antisense strand to SEQ ID NO: 1975350
uaugcaaguaccugucaga

SEQ ID NO: 1975352 - RNA, 19 nt, Artificial Sequence
  Description of Artificial Sequence: Synthetic oligonucleotide
  Sense strand starting at position 3319 of SEQ ID NO: 1880545
cucuaagccgguuagugaa

SEQ ID NO: 1975353 - RNA, 19 nt, Artificial Sequence
  Description of Artificial Sequence: Synthetic oligonucleotide
  Antisense strand to SEQ ID NO: 1975352
uucacuaaccggcuuagag

SEQ ID NO: 1975354 - RNA, 19 nt, Artificial Sequence
  Description of Artificial Sequence: Synthetic oligonucleotide
  Sense strand starting at position 3521 of SEQ ID NO: 1880545
auggaaguuaauuguggaa

SEQ ID NO: 1975355 - RNA, 19 nt, Artificial Sequence
  Description of Artificial Sequence: Synthetic oligonucleotide
  Antisense strand to SEQ ID NO: 1975354
uuccacaauuaacuuccau

SEQ ID NO: 1975356 - RNA, 19 nt, Artificial Sequence
  Description of Artificial Sequence: Synthetic oligonucleotide
  Sense strand starting at position 3626 of SEQ ID NO: 1880545
guguacuuaggugaguauu

SEQ ID NO: 1975357 - RNA, 19 nt, Artificial Sequence
  Description of Artificial Sequence: Synthetic oligonucleotide
  Antisense strand to SEQ ID NO: 1975356
aauacucaccuaaguacac

SEQ ID NO: 1975358 - RNA, 19 nt, Artificial Sequence
  Description of Artificial Sequence: Synthetic oligonucleotide
  Sense strand starting at position 3628 of SEQ ID NO: 1880545
guacuuaggugaguauuga

SEQ ID NO: 1975359 - RNA, 19 nt, Artificial Sequence
  Description of Artificial Sequence: Synthetic oligonucleotide
  Antisense strand to SEQ ID NO: 1975358
ucaauacucaccuaaguac

SEQ ID NO: 1975360 - RNA, 19 nt, Artificial Sequence
  Description of Artificial Sequence: Synthetic oligonucleotide
  Sense strand starting at position 3665 of SEQ ID NO: 1880545
gugcuagugauauaaagcu

SEQ ID NO: 1975361 - RNA, 19 nt, Artificial Sequence
  Description of Artificial Sequence: Synthetic oligonucleotide
  Antisense strand to SEQ ID NO: 1975360
agcuuuauaucacuagcac

SEQ ID NO: 1975362 - RNA, 19 nt, Artificial Sequence
  Description of Artificial Sequence: Synthetic oligonucleotide
  Sense strand starting at position 3779 of SEQ ID NO: 1880545
ucagcuacugguuauaagu

SEQ ID NO: 1975363 - RNA, 19 nt, Artificial Sequence
  Description of Artificial Sequence: Synthetic oligonucleotide
  Antisense strand to SEQ ID NO: 1975362
acuuauaaccaguagcuga

SEQ ID NO: 1975364 - RNA, 19 nt, Artificial Sequence
  Description of Artificial Sequence: Synthetic oligonucleotide
  Sense strand starting at position 3902 of SEQ ID NO: 1880545
gggagaccaaagugugauu

SEQ ID NO: 1975365 - RNA, 19 nt, Artificial Sequence
  Description of Artificial Sequence: Synthetic oligonucleotide
  Antisense strand to SEQ ID NO: 1975364
aaucacacuuuggucuccc

SEQ ID NO: 1975366 - RNA, 19 nt, Artificial Sequence
  Description of Artificial Sequence: Synthetic oligonucleotide
  Sense strand starting at position 3980 of SEQ ID NO: 1880545
aguuguaaacuagaacagu

SEQ ID NO: 1975367 - RNA, 19 nt, Artificial Sequence
  Description of Artificial Sequence: Synthetic oligonucleotide
  Antisense strand to SEQ ID NO: 1975366
acuguucuaguuuacaacu

SEQ ID NO: 1975368 - RNA, 19 nt, Artificial Sequence
  Description of Artificial Sequence: Synthetic oligonucleotide
  Sense strand starting at position 17 of SEQ ID NO: 1880546
agagaauccugaucucucu

SEQ ID NO: 1975369 - RNA, 19 nt, Artificial Sequence
  Description of Artificial Sequence: Synthetic oligonucleotide
  Antisense strand to SEQ ID NO: 1975368
agagagaucaggauucucu

SEQ ID NO: 1975370 - RNA, 19 nt, Artificial Sequence
  Description of Artificial Sequence: Synthetic oligonucleotide
  Sense strand starting at position 46 of SEQ ID NO: 1880546
gagagauguugagcuacaa

SEQ ID NO: 1975371 - RNA, 19 nt, Artificial Sequence
  Description of Artificial Sequence: Synthetic oligonucleotide
  Antisense strand to SEQ ID NO: 1975370
uuguagcucaacaucucuc

SEQ ID NO: 1975372 - RNA, 19 nt, Artificial Sequence
  Description of Artificial Sequence: Synthetic oligonucleotide
  Sense strand starting at position 112 of SEQ ID NO: 1880546
auggaaugucucuguuaca

SEQ ID NO: 1975373 - RNA, 19 nt, Artificial Sequence
  Description of Artificial Sequence: Synthetic oligonucleotide
  Antisense strand to SEQ ID NO: 1975372
uguaacagagacauuccau

SEQ ID NO: 1975374 - RNA, 19 nt, Artificial Sequence
  Description of Artificial Sequence: Synthetic oligonucleotide
  Sense strand starting at position 330 of SEQ ID NO: 1880546
gucauaguccuagacaggu

SEQ ID NO: 1975375 - RNA, 19 nt, Artificial Sequence
  Description of Artificial Sequence: Synthetic oligonucleotide
  Antisense strand to SEQ ID NO: 1975374
accugucuaggacuaugac

SEQ ID NO: 1975376 - RNA, 19 nt, Artificial Sequence
  Description of Artificial Sequence: Synthetic oligonucleotide
  Sense strand starting at position 519 of SEQ ID NO: 1880546
cagagauaguuagacauuu

SEQ ID NO: 1975377 - RNA, 19 nt, Artificial Sequence
  Description of Artificial Sequence: Synthetic oligonucleotide
  Antisense strand to SEQ ID NO: 1975376
aaaugucuaacuaucucug

SEQ ID NO: 1975378 - RNA, 19 nt, Artificial Sequence
  Description of Artificial Sequence: Synthetic oligonucleotide
  Sense strand starting at position 648 of SEQ ID NO: 1880546
ucauguggugaugauuaac

SEQ ID NO: 1975379 - RNA, 19 nt, Artificial Sequence
  Description of Artificial Sequence: Synthetic oligonucleotide
  Antisense strand to SEQ ID NO: 1975378
guuaaucaucaccacauga

SEQ ID NO: 1975380 - RNA, 19 nt, Artificial Sequence
  Description of Artificial Sequence: Synthetic oligonucleotide
  Sense strand starting at position 736 of SEQ ID NO: 1880546
gcagcaaguccagaaugaa

SEQ ID NO: 1975381 - RNA, 19 nt, Artificial Sequence
  Description of Artificial Sequence: Synthetic oligonucleotide
  Antisense strand to SEQ ID NO: 1975380
uucauucuggacuugcugc

SEQ ID NO: 1975382 - RNA, 19 nt, Artificial Sequence
  Description of Artificial Sequence: Synthetic oligonucleotide
  Sense strand starting at position 739 of SEQ ID NO: 1880546
gcaaguccagaaugaaagu

SEQ ID NO: 1975383 - RNA, 19 nt, Artificial Sequence
  Description of Artificial Sequence: Synthetic oligonucleotide
  Antisense strand to SEQ ID NO: 1975382
acuuucauucuggacuugc

SEQ ID NO: 1975384 - RNA, 19 nt, Artificial Sequence
  Description of Artificial Sequence: Synthetic oligonucleotide
  Sense strand starting at position 813 of SEQ ID NO: 1880546
ggugcaucucuacacucaa

SEQ ID NO: 1975385 - RNA, 19 nt, Artificial Sequence
  Description of Artificial Sequence: Synthetic oligonucleotide
  Antisense strand to SEQ ID NO: 1975384
uugaguguagagaugcacc

SEQ ID NO: 1975386 - RNA, 19 nt, Artificial Sequence
  Description of Artificial Sequence: Synthetic oligonucleotide
  Sense strand starting at position 831 of SEQ ID NO: 1880546
aggccauagcugcaagaaa

SEQ ID NO: 1975387 - RNA, 19 nt, Artificial Sequence
  Description of Artificial Sequence: Synthetic oligonucleotide
  Antisense strand to SEQ ID NO: 1975386
uuucuugcagcuauggccu

SEQ ID NO: 1975388 - RNA, 19 nt, Artificial Sequence
  Description of Artificial Sequence: Synthetic oligonucleotide
  Sense strand starting at position 954 of SEQ ID NO: 1880546
ugcauaaaucuggaucauu

SEQ ID NO: 1975389 - RNA, 19 nt, Artificial Sequence
  Description of Artificial Sequence: Synthetic oligonucleotide
  Antisense strand to SEQ ID NO: 1975388
aaugauccagauuuaugca

SEQ ID NO: 1975390 - RNA, 19 nt, Artificial Sequence
  Description of Artificial Sequence: Synthetic oligonucleotide
  Sense strand starting at position 1096 of SEQ ID NO: 1880546
cauggaagcuguuuaagaa

SEQ ID NO: 1975391 - RNA, 19 nt, Artificial Sequence
  Description of Artificial Sequence: Synthetic oligonucleotide
  Antisense strand to SEQ ID NO: 1975390
uucuuaaacagcuuccaug

SEQ ID NO: 1975392 - RNA, 19 nt, Artificial Sequence
  Description of Artificial Sequence: Synthetic oligonucleotide
  Sense strand starting at position 1151 of SEQ ID NO: 1880546
ccagguauugcucaagauc

SEQ ID NO: 1975393 - RNA, 19 nt, Artificial Sequence
  Description of Artificial Sequence: Synthetic oligonucleotide
  Antisense strand to SEQ ID NO: 1975392
gaucuugagcaauaccugg

SEQ ID NO: 1975394 - RNA, 19 nt, Artificial Sequence
  Description of Artificial Sequence: Synthetic oligonucleotide
  Sense strand starting at position 1154 of SEQ ID NO: 1880546
gguauugcucaagauccag

SEQ ID NO: 1975395 - RNA, 19 nt, Artificial Sequence
  Description of Artificial Sequence: Synthetic oligonucleotide
  Antisense strand to SEQ ID NO: 1975394
cuggaucuugagcaauacc

SEQ ID NO: 1975396 - RNA, 19 nt, Artificial Sequence
  Description of Artificial Sequence: Synthetic oligonucleotide
  Sense strand starting at position 1212 of SEQ ID NO: 1880546
gguggacaagcauguauaa

SEQ ID NO: 1975397 - RNA, 19 nt, Artificial Sequence
  Description of Artificial Sequence: Synthetic oligonucleotide
  Antisense strand to SEQ ID NO: 1975396
uuauacaugcuuguccacc

SEQ ID NO: 1975398 - RNA, 19 nt, Artificial Sequence
  Description of Artificial Sequence: Synthetic oligonucleotide
  Sense strand starting at position 1262 of SEQ ID NO: 1880546
gauagacuugcccagggua

SEQ ID NO: 1975399 - RNA, 19 nt, Artificial Sequence
  Description of Artificial Sequence: Synthetic oligonucleotide
  Antisense strand to SEQ ID NO: 1975398
uacccugggcaagucuauc

SEQ ID NO: 1975400 - RNA, 19 nt, Artificial Sequence
  Description of Artificial Sequence: Synthetic oligonucleotide
  Sense strand starting at position 1504 of SEQ ID NO: 1880546
ugcaguuugcuuguguuga

SEQ ID NO: 1975401 - RNA, 19 nt, Artificial Sequence
  Description of Artificial Sequence: Synthetic oligonucleotide
  Antisense strand to SEQ ID NO: 1975400
ucaacacaagcaaacugca

SEQ ID NO: 1975402 - RNA, 19 nt, Artificial Sequence
  Description of Artificial Sequence: Synthetic oligonucleotide
  Sense strand starting at position 1610 of SEQ ID NO: 1880546
ucuggagagcuuggacuau

SEQ ID NO: 1975403 - RNA, 19 nt, Artificial Sequence
  Description of Artificial Sequence: Synthetic oligonucleotide
  Antisense strand to SEQ ID NO: 1975402
auaguccaagcucuccaga

SEQ ID NO: 1975404 - RNA, 19 nt, Artificial Sequence
  Description of Artificial Sequence: Synthetic oligonucleotide
  Sense strand starting at position 1769 of SEQ ID NO: 1880546
acaauaagagccugacuua

SEQ ID NO: 1975405 - RNA, 19 nt, Artificial Sequence
  Description of Artificial Sequence: Synthetic oligonucleotide
  Antisense strand to SEQ ID NO: 1975404
uaagucaggcucuuauugu

SEQ ID NO: 1975406 - RNA, 19 nt, Artificial Sequence
  Description of Artificial Sequence: Synthetic oligonucleotide
  Sense strand starting at position 1772 of SEQ ID NO: 1880546
auaagagccugacuuagau

SEQ ID NO: 1975407 - RNA, 19 nt, Artificial Sequence
  Description of Artificial Sequence: Synthetic oligonucleotide
  Antisense strand to SEQ ID NO: 1975406
aucuaagucaggcucuuau

SEQ ID NO: 1975408 - RNA, 19 nt, Artificial Sequence
  Description of Artificial Sequence: Synthetic oligonucleotide
  Sense strand starting at position 1778 of SEQ ID NO: 1880546
gccugacuuagauggagga

SEQ ID NO: 1975409 - RNA, 19 nt, Artificial Sequence
  Description of Artificial Sequence: Synthetic oligonucleotide
  Antisense strand to SEQ ID NO: 1975408
uccuccaucuaagucaggc

SEQ ID NO: 1975410 - RNA, 19 nt, Artificial Sequence
  Description of Artificial Sequence: Synthetic oligonucleotide
  Sense strand starting at position 1851 of SEQ ID NO: 1880546
auagcuucucagcaugacu

SEQ ID NO: 1975411 - RNA, 19 nt, Artificial Sequence
  Description of Artificial Sequence: Synthetic oligonucleotide
  Antisense strand to SEQ ID NO: 1975410
agucaugcugagaagcuau

SEQ ID NO: 1975412 - RNA, 19 nt, Artificial Sequence
  Description of Artificial Sequence: Synthetic oligonucleotide
  Sense strand starting at position 1956 of SEQ ID NO: 1880546
uaagauuugcagcggcuaa

SEQ ID NO: 1975413 - RNA, 19 nt, Artificial Sequence
  Description of Artificial Sequence: Synthetic oligonucleotide
  Antisense strand to SEQ ID NO: 1975412
uuagccgcugcaaaucuua

SEQ ID NO: 1975414 - RNA, 19 nt, Artificial Sequence
  Description of Artificial Sequence: Synthetic oligonucleotide
  Sense strand starting at position 2028 of SEQ ID NO: 1880546
ugaucagagucacuuuaaa

SEQ ID NO: 1975415 - RNA, 19 nt, Artificial Sequence
  Description of Artificial Sequence: Synthetic oligonucleotide
  Antisense strand to SEQ ID NO: 1975414
uuuaaagugacucugauca

SEQ ID NO: 1975416 - RNA, 19 nt, Artificial Sequence
  Description of Artificial Sequence: Synthetic oligonucleotide
  Sense strand starting at position 2086 of SEQ ID NO: 1880546
ucuugaauaguccaguaca

SEQ ID NO: 1975417 - RNA, 19 nt, Artificial Sequence
  Description of Artificial Sequence: Synthetic oligonucleotide
  Antisense strand to SEQ ID NO: 1975416
uguacuggacuauucaaga

SEQ ID NO: 1975418 - RNA, 19 nt, Artificial Sequence
  Description of Artificial Sequence: Synthetic oligonucleotide
  Sense strand starting at position 2089 of SEQ ID NO: 1880546
ugaauaguccaguacauug

SEQ ID NO: 1975419 - RNA, 19 nt, Artificial Sequence
  Description of Artificial Sequence: Synthetic oligonucleotide
  Antisense strand to SEQ ID NO: 1975418
caauguacuggacuauuca

SEQ ID NO: 1975420 - RNA, 19 nt, Artificial Sequence
  Description of Artificial Sequence: Synthetic oligonucleotide
  Sense strand starting at position 2230 of SEQ ID NO: 1880546
gagauaggaucauuccucu

SEQ ID NO: 1975421 - RNA, 19 nt, Artificial Sequence
  Description of Artificial Sequence: Synthetic oligonucleotide
  Antisense strand to SEQ ID NO: 1975420
agaggaaugauccuaucuc

SEQ ID NO: 1975422 - RNA, 19 nt, Artificial Sequence
  Description of Artificial Sequence: Synthetic oligonucleotide
  Sense strand starting at position 2282 of SEQ ID NO: 1880546
uuuagagcauuccuaugaa

SEQ ID NO: 1975423 - RNA, 19 nt, Artificial Sequence
  Description of Artificial Sequence: Synthetic oligonucleotide
  Antisense strand to SEQ ID NO: 1975422
uucauaggaaugcucuaaa

SEQ ID NO: 1975424 - RNA, 19 nt, Artificial Sequence
  Description of Artificial Sequence: Synthetic oligonucleotide
  Sense strand starting at position 2285 of SEQ ID NO: 1880546
agagcauuccuaugaagua

SEQ ID NO: 1975425 - RNA, 19 nt, Artificial Sequence
  Description of Artificial Sequence: Synthetic oligonucleotide
  Antisense strand to SEQ ID NO: 1975424
uacuucauaggaaugcucu

SEQ ID NO: 1975426 - RNA, 19 nt, Artificial Sequence
  Description of Artificial Sequence: Synthetic oligonucleotide
  Sense strand starting at position 2477 of SEQ ID NO: 1880546
gguuacugucuuuaacuca

SEQ ID NO: 1975427 - RNA, 19 nt, Artificial Sequence
  Description of Artificial Sequence: Synthetic oligonucleotide
  Antisense strand to SEQ ID NO: 1975426
ugaguuaaagacaguaacc

SEQ ID NO: 1975428 - RNA, 19 nt, Artificial Sequence
  Description of Artificial Sequence: Synthetic oligonucleotide
  Sense strand starting at position 2695 of SEQ ID NO: 1880546
cgaaauaucucaguaauuc

SEQ ID NO: 1975429 - RNA, 19 nt, Artificial Sequence
  Description of Artificial Sequence: Synthetic oligonucleotide
  Antisense strand to SEQ ID NO: 1975428
gaauuacugagauauuucg

SEQ ID NO: 1975430 - RNA, 19 nt, Artificial Sequence
  Description of Artificial Sequence: Synthetic oligonucleotide
  Sense strand starting at position 2800 of SEQ ID NO: 1880546
guaucugagcuguaggaau

SEQ ID NO: 1975431 - RNA, 19 nt, Artificial Sequence
  Description of Artificial Sequence: Synthetic oligonucleotide
  Antisense strand to SEQ ID NO: 1975430
auuccuacagcucagauac

SEQ ID NO: 1975432 - RNA, 19 nt, Artificial Sequence
  Description of Artificial Sequence: Synthetic oligonucleotide
  Sense strand starting at position 2906 of SEQ ID NO: 1880546
uuccgucgucaaucuguaa

SEQ ID NO: 1975433 - RNA, 19 nt, Artificial Sequence
  Description of Artificial Sequence: Synthetic oligonucleotide
  Antisense strand to SEQ ID NO: 1975432
uuacagauugacgacggaa

SEQ ID NO: 1975434 - RNA, 19 nt, Artificial Sequence
  Description of Artificial Sequence: Synthetic oligonucleotide
  Sense strand starting at position 3063 of SEQ ID NO: 1880546
gucagucuuggacacaguu

SEQ ID NO: 1975435 - RNA, 19 nt, Artificial Sequence
  Description of Artificial Sequence: Synthetic oligonucleotide
  Antisense strand to SEQ ID NO: 1975434
aacuguguccaagacugac

SEQ ID NO: 1975436 - RNA, 19 nt, Artificial Sequence
  Description of Artificial Sequence: Synthetic oligonucleotide
  Sense strand starting at position 3266 of SEQ ID NO: 1880546
uguaucucucgggauagag

SEQ ID NO: 1975437 - RNA, 19 nt, Artificial Sequence
  Description of Artificial Sequence: Synthetic oligonucleotide
  Antisense strand to SEQ ID NO: 1975436
cucuaucccgagagauaca

SEQ ID NO: 1975438 - RNA, 19 nt, Artificial Sequence
  Description of Artificial Sequence: Synthetic oligonucleotide
  Sense strand starting at position 3397 of SEQ ID NO: 1880546
agacuaugagucgauagca

SEQ ID NO: 1975439 - RNA, 19 nt, Artificial Sequence
  Description of Artificial Sequence: Synthetic oligonucleotide
  Antisense strand to SEQ ID NO: 1975438
ugcuaucgacucauagucu

SEQ ID NO: 1975440 - RNA, 19 nt, Artificial Sequence
  Description of Artificial Sequence: Synthetic oligonucleotide
  Sense strand starting at position 3459 of SEQ ID NO: 1880546
gccucagaucuugaugaug

SEQ ID NO: 1975441 - RNA, 19 nt, Artificial Sequence
  Description of Artificial Sequence: Synthetic oligonucleotide
  Antisense strand to SEQ ID NO: 1975440
caucaucaagaucugaggc

SEQ ID NO: 1975442 - RNA, 19 nt, Artificial Sequence
  Description of Artificial Sequence: Synthetic oligonucleotide
  Sense strand starting at position 3630 of SEQ ID NO: 1880546
cucccugaggcauggagau

SEQ ID NO: 1975443 - RNA, 19 nt, Artificial Sequence
  Description of Artificial Sequence: Synthetic oligonucleotide
  Antisense strand to SEQ ID NO: 1975442
aucuccaugccucagggag

SEQ ID NO: 1975444 - RNA, 19 nt, Artificial Sequence
  Description of Artificial Sequence: Synthetic oligonucleotide
  Sense strand starting at position 3769 of SEQ ID NO: 1880546
guuaguagacuccauccaa

SEQ ID NO: 1975445 - RNA, 19 nt, Artificial Sequence
  Description of Artificial Sequence: Synthetic oligonucleotide
  Antisense strand to SEQ ID NO: 1975444
uuggauggagucuacuaac

SEQ ID NO: 1975446 - RNA, 19 nt, Artificial Sequence
  Description of Artificial Sequence: Synthetic oligonucleotide
  Sense strand starting at position 3913 of SEQ ID NO: 1880546
cuauccuuuguccacugau

SEQ ID NO: 1975447 - RNA, 19 nt, Artificial Sequence
  Description of Artificial Sequence: Synthetic oligonucleotide
  Antisense strand to SEQ ID NO: 1975446
aucaguggacaaaggauag

SEQ ID NO: 1975448 - RNA, 19 nt, Artificial Sequence
  Description of Artificial Sequence: Synthetic oligonucleotide
  Sense strand starting at position 19 of SEQ ID NO: 1880547
auuaucagaccuugucacu

SEQ ID NO: 1975449 - RNA, 19 nt, Artificial Sequence
  Description of Artificial Sequence: Synthetic oligonucleotide
  Antisense strand to SEQ ID NO: 1975448
agugacaaggucugauaau

SEQ ID NO: 1975450 - RNA, 19 nt, Artificial Sequence
  Description of Artificial Sequence: Synthetic oligonucleotide
  Sense strand starting at position 101 of SEQ ID NO: 1880547
ggacuuuaagaauggccaa

SEQ ID NO: 1975451 - RNA, 19 nt, Artificial Sequence
  Description of Artificial Sequence: Synthetic oligonucleotide
  Antisense strand to SEQ ID NO: 1975450
uuggccauucuuaaagucc

SEQ ID NO: 1975452 - RNA, 19 nt, Artificial Sequence
  Description of Artificial Sequence: Synthetic oligonucleotide
  Sense strand starting at position 124 of SEQ ID NO: 1880547
acaggauguuaagauuaaa

SEQ ID NO: 1975453 - RNA, 19 nt, Artificial Sequence
  Description of Artificial Sequence: Synthetic oligonucleotide
  Antisense strand to SEQ ID NO: 1975452
uuuaaucuuaacauccugu

SEQ ID NO: 1975454 - RNA, 19 nt, Artificial Sequence
  Description of Artificial Sequence: Synthetic oligonucleotide
  Sense strand starting at position 166 of SEQ ID NO: 1880547
acagauuuguuagaaucuu

SEQ ID NO: 1975455 - RNA, 19 nt, Artificial Sequence
  Description of Artificial Sequence: Synthetic oligonucleotide
  Antisense strand to SEQ ID NO: 1975454
aagauucuaacaaaucugu

SEQ ID NO: 1975456 - RNA, 19 nt, Artificial Sequence
  Description of Artificial Sequence: Synthetic oligonucleotide
  Sense strand starting at position 172 of SEQ ID NO: 1880547
uuguuagaaucuuugcucu

SEQ ID NO: 1975457 - RNA, 19 nt, Artificial Sequence
  Description of Artificial Sequence: Synthetic oligonucleotide
  Antisense strand to SEQ ID NO: 1975456
agagcaaagauucuaacaa

SEQ ID NO: 1975458 - RNA, 19 nt, Artificial Sequence
  Description of Artificial Sequence: Synthetic oligonucleotide
  Sense strand starting at position 202 of SEQ ID NO: 1880547
uaugaagccucauugugaa

SEQ ID NO: 1975459 - RNA, 19 nt, Artificial Sequence
  Description of Artificial Sequence: Synthetic oligonucleotide
  Antisense strand to SEQ ID NO: 1975458
uucacaaugaggcuucaua

SEQ ID NO: 1975460 - RNA, 19 nt, Artificial Sequence
  Description of Artificial Sequence: Synthetic oligonucleotide
  Sense strand starting at position 279 of SEQ ID NO: 1880547
acuaguguuccggaggaua

SEQ ID NO: 1975461 - RNA, 19 nt, Artificial Sequence
  Description of Artificial Sequence: Synthetic oligonucleotide
  Antisense strand to SEQ ID NO: 1975460
uauccuccggaacacuagu

SEQ ID NO: 1975462 - RNA, 19 nt, Artificial Sequence
  Description of Artificial Sequence: Synthetic oligonucleotide
  Sense strand starting at position 281 of SEQ ID NO: 1880547
uaguguuccggaggauaca

SEQ ID NO: 1975463 - RNA, 19 nt, Artificial Sequence
  Description of Artificial Sequence: Synthetic oligonucleotide
  Antisense strand to SEQ ID NO: 1975462
uguauccuccggaacacua

SEQ ID NO: 1975464 - RNA, 19 nt, Artificial Sequence
  Description of Artificial Sequence: Synthetic oligonucleotide
  Sense strand starting at position 282 of SEQ ID NO: 1880547
aguguuccggaggauacau

SEQ ID NO: 1975465 - RNA, 19 nt, Artificial Sequence
  Description of Artificial Sequence: Synthetic oligonucleotide
  Antisense strand to SEQ ID NO: 1975464
auguauccuccggaacacu

SEQ ID NO: 1975466 - RNA, 19 nt, Artificial Sequence
  Description of Artificial Sequence: Synthetic oligonucleotide
  Sense strand starting at position 305 of SEQ ID NO: 1880547
ggagguguuucuccagcuu

SEQ ID NO: 1975467 - RNA, 19 nt, Artificial Sequence
  Description of Artificial Sequence: Synthetic oligonucleotide
  Antisense strand to SEQ ID NO: 1975466
aagcuggagaaacaccucc

SEQ ID NO: 1975468 - RNA, 19 nt, Artificial Sequence
  Description of Artificial Sequence: Synthetic oligonucleotide
  Sense strand starting at position 433 of SEQ ID NO: 1880547
auccauuauucccuggaga

SEQ ID NO: 1975469 - RNA, 19 nt, Artificial Sequence
  Description of Artificial Sequence: Synthetic oligonucleotide
  Antisense strand to SEQ ID NO: 1975468
ucuccagggaauaauggau

SEQ ID NO: 1975470 - RNA, 19 nt, Artificial Sequence
  Description of Artificial Sequence: Synthetic oligonucleotide
  Sense strand starting at position 434 of SEQ ID NO: 1880547
uccauuauucccuggagag

SEQ ID NO: 1975471 - RNA, 19 nt, Artificial Sequence
  Description of Artificial Sequence: Synthetic oligonucleotide
  Antisense strand to SEQ ID NO: 1975470
cucuccagggaauaaugga

SEQ ID NO: 1975472 - RNA, 19 nt, Artificial Sequence
  Description of Artificial Sequence: Synthetic oligonucleotide
  Sense strand starting at position 435 of SEQ ID NO: 1880547
ccauuauucccuggagaga

SEQ ID NO: 1975473 - RNA, 19 nt, Artificial Sequence
  Description of Artificial Sequence: Synthetic oligonucleotide
  Antisense strand to SEQ ID NO: 1975472
ucucuccagggaauaaugg

SEQ ID NO: 1975474 - RNA, 19 nt, Artificial Sequence
  Description of Artificial Sequence: Synthetic oligonucleotide
  Sense strand starting at position 550 of SEQ ID NO: 1880547
gcuugacuuccucauauug

SEQ ID NO: 1975475 - RNA, 19 nt, Artificial Sequence
  Description of Artificial Sequence: Synthetic oligonucleotide
  Antisense strand to SEQ ID NO: 1975474
caauaugaggaagucaagc

SEQ ID NO: 1975476 - RNA, 19 nt, Artificial Sequence
  Description of Artificial Sequence: Synthetic oligonucleotide
  Sense strand starting at position 640 of SEQ ID NO: 1880547
uggaaauuguuacuuauca

SEQ ID NO: 1975477 - RNA, 19 nt, Artificial Sequence
  Description of Artificial Sequence: Synthetic oligonucleotide
  Antisense strand to SEQ ID NO: 1975476
ugauaaguaacaauuucca

SEQ ID NO: 1975478 - RNA, 19 nt, Artificial Sequence
  Description of Artificial Sequence: Synthetic oligonucleotide
  Sense strand starting at position 641 of SEQ ID NO: 1880547
ggaaauuguuacuuaucau

SEQ ID NO: 1975479 - RNA, 19 nt, Artificial Sequence
  Description of Artificial Sequence: Synthetic oligonucleotide
  Antisense strand to SEQ ID NO: 1975478
augauaaguaacaauuucc

SEQ ID NO: 1975480 - RNA, 19 nt, Artificial Sequence
  Description of Artificial Sequence: Synthetic oligonucleotide
  Sense strand starting at position 725 of SEQ ID NO: 1880547
gggcguuagagccagcuaa

SEQ ID NO: 1975481 - RNA, 19 nt, Artificial Sequence
  Description of Artificial Sequence: Synthetic oligonucleotide
  Antisense strand to SEQ ID NO: 1975480
uuagcuggcucuaacgccc

SEQ ID NO: 1975482 - RNA, 19 nt, Artificial Sequence
  Description of Artificial Sequence: Synthetic oligonucleotide
  Sense strand starting at position 743 of SEQ ID NO: 1880547
augcuugcccugcagaguu

SEQ ID NO: 1975483 - RNA, 19 nt, Artificial Sequence
  Description of Artificial Sequence: Synthetic oligonucleotide
  Antisense strand to SEQ ID NO: 1975482
aacucugcagggcaagcau

SEQ ID NO: 1975484 - RNA, 19 nt, Artificial Sequence
  Description of Artificial Sequence: Synthetic oligonucleotide
  Sense strand starting at position 751 of SEQ ID NO: 1880547
ccugcagaguuaucaugga

SEQ ID NO: 1975485 - RNA, 19 nt, Artificial Sequence
  Description of Artificial Sequence: Synthetic oligonucleotide
  Antisense strand to SEQ ID NO: 1975484
uccaugauaacucugcagg

SEQ ID NO: 1975486 - RNA, 19 nt, Artificial Sequence
  Description of Artificial Sequence: Synthetic oligonucleotide
  Sense strand starting at position 755 of SEQ ID NO: 1880547
cagaguuaucauggagauc

SEQ ID NO: 1975487 - RNA, 19 nt, Artificial Sequence
  Description of Artificial Sequence: Synthetic oligonucleotide
  Antisense strand to SEQ ID NO: 1975486
gaucuccaugauaacucug

SEQ ID NO: 1975488 - RNA, 19 nt, Artificial Sequence
  Description of Artificial Sequence: Synthetic oligonucleotide
  Sense strand starting at position 767 of SEQ ID NO: 1880547
ggagaucaaugacuugcua

SEQ ID NO: 1975489 - RNA, 19 nt, Artificial Sequence
  Description of Artificial Sequence: Synthetic oligonucleotide
  Antisense strand to SEQ ID NO: 1975488
uagcaagucauugaucucc

SEQ ID NO: 1975490 - RNA, 19 nt, Artificial Sequence
  Description of Artificial Sequence: Synthetic oligonucleotide
  Sense strand starting at position 846 of SEQ ID NO: 1880547
uaagaauguuauuagggau

SEQ ID NO: 1975491 - RNA, 19 nt, Artificial Sequence
  Description of Artificial Sequence: Synthetic oligonucleotide
  Antisense strand to SEQ ID NO: 1975490
aucccuaauaacauucuua

SEQ ID NO: 1975492 - RNA, 19 nt, Artificial Sequence
  Description of Artificial Sequence: Synthetic oligonucleotide
  Sense strand starting at position 977 of SEQ ID NO: 1880547
cacugaguaucagacaaug

SEQ ID NO: 1975493 - RNA, 19 nt, Artificial Sequence
  Description of Artificial Sequence: Synthetic oligonucleotide
  Antisense strand to SEQ ID NO: 1975492
cauugucugauacucagug

SEQ ID NO: 1975494 - RNA, 19 nt, Artificial Sequence
  Description of Artificial Sequence: Synthetic oligonucleotide
  Sense strand starting at position 995 of SEQ ID NO: 1880547
gaaggacagucaucucuca

SEQ ID NO: 1975495 - RNA, 19 nt, Artificial Sequence
  Description of Artificial Sequence: Synthetic oligonucleotide
  Antisense strand to SEQ ID NO: 1975494
ugagagaugacuguccuuc

SEQ ID NO: 1975496 - RNA, 19 nt, Artificial Sequence
  Description of Artificial Sequence: Synthetic oligonucleotide
  Sense strand starting at position 1028 of SEQ ID NO: 1880547
cuaggugagcccuaugaau

SEQ ID NO: 1975497 - RNA, 19 nt, Artificial Sequence
  Description of Artificial Sequence: Synthetic oligonucleotide
  Antisense strand to SEQ ID NO: 1975496
auucauagggcucaccuag

SEQ ID NO: 1975498 - RNA, 19 nt, Artificial Sequence
  Description of Artificial Sequence: Synthetic oligonucleotide
  Sense strand starting at position 1118 of SEQ ID NO: 1880547
ucccuaaguugacaagaua

SEQ ID NO: 1975499 - RNA, 19 nt, Artificial Sequence
  Description of Artificial Sequence: Synthetic oligonucleotide
  Antisense strand to SEQ ID NO: 1975498
uaucuugucaacuuaggga

SEQ ID NO: 1975500 - RNA, 19 nt, Artificial Sequence
  Description of Artificial Sequence: Synthetic oligonucleotide
  Sense strand starting at position 1129 of SEQ ID NO: 1880547
acaagauagagcugagagu

SEQ ID NO: 1975501 - RNA, 19 nt, Artificial Sequence
  Description of Artificial Sequence: Synthetic oligonucleotide
  Antisense strand to SEQ ID NO: 1975500
acucucagcucuaucuugu

SEQ ID NO: 1975502 - RNA, 19 nt, Artificial Sequence
  Description of Artificial Sequence: Synthetic oligonucleotide
  Sense strand starting at position 1190 of SEQ ID NO: 1880547
ggagcauccauaggcagaa

SEQ ID NO: 1975503 - RNA, 19 nt, Artificial Sequence
  Description of Artificial Sequence: Synthetic oligonucleotide
  Antisense strand to SEQ ID NO: 1975502
uucugccuauggaugcucc

SEQ ID NO: 1975504 - RNA, 19 nt, Artificial Sequence
  Description of Artificial Sequence: Synthetic oligonucleotide
  Sense strand starting at position 1208 of SEQ ID NO: 1880547
agcuuagagaucugcagag

SEQ ID NO: 1975505 - RNA, 19 nt, Artificial Sequence
  Description of Artificial Sequence: Synthetic oligonucleotide
  Antisense strand to SEQ ID NO: 1975504
cucugcagaucucuaagcu

SEQ ID NO: 1975506 - RNA, 19 nt, Artificial Sequence
  Description of Artificial Sequence: Synthetic oligonucleotide
  Sense strand starting at position 1262 of SEQ ID NO: 1880547
cagcacuucguguauagaa

SEQ ID NO: 1975507 - RNA, 19 nt, Artificial Sequence
  Description of Artificial Sequence: Synthetic oligonucleotide
  Antisense strand to SEQ ID NO: 1975506
uucuauacacgaagugcug

SEQ ID NO: 1975508 - RNA, 19 nt, Artificial Sequence
  Description of Artificial Sequence: Synthetic oligonucleotide
  Sense strand starting at position 1264 of SEQ ID NO: 1880547
gcacuucguguauagaaac

SEQ ID NO: 1975509 - RNA, 19 nt, Artificial Sequence
  Description of Artificial Sequence: Synthetic oligonucleotide
  Antisense strand to SEQ ID NO: 1975508
guuucuauacacgaagugc

SEQ ID NO: 1975510 - RNA, 19 nt, Artificial Sequence
  Description of Artificial Sequence: Synthetic oligonucleotide
  Sense strand starting at position 1400 of SEQ ID NO: 1880547
uggcucauuggguagucua

SEQ ID NO: 1975511 - RNA, 19 nt, Artificial Sequence
  Description of Artificial Sequence: Synthetic oligonucleotide
  Antisense strand to SEQ ID NO: 1975510
uagacuacccaaugagcca

SEQ ID NO: 1975512 - RNA, 19 nt, Artificial Sequence
  Description of Artificial Sequence: Synthetic oligonucleotide
  Sense strand starting at position 1408 of SEQ ID NO: 1880547
uggguagucuacuugagaa

SEQ ID NO: 1975513 - RNA, 19 nt, Artificial Sequence
  Description of Artificial Sequence: Synthetic oligonucleotide
  Antisense strand to SEQ ID NO: 1975512
uucucaaguagacuaccca

SEQ ID NO: 1975514 - RNA, 19 nt, Artificial Sequence
  Description of Artificial Sequence: Synthetic oligonucleotide
  Sense strand starting at position 1420 of SEQ ID NO: 1880547
uugagaaaggcuugccuua

SEQ ID NO: 1975515 - RNA, 19 nt, Artificial Sequence
  Description of Artificial Sequence: Synthetic oligonucleotide
  Antisense strand to SEQ ID NO: 1975514
uaaggcaagccuuucucaa

SEQ ID NO: 1975516 - RNA, 19 nt, Artificial Sequence
  Description of Artificial Sequence: Synthetic oligonucleotide
  Sense strand starting at position 1422 of SEQ ID NO: 1880547
gagaaaggcuugccuuagu

SEQ ID NO: 1975517 - RNA, 19 nt, Artificial Sequence
  Description of Artificial Sequence: Synthetic oligonucleotide
  Antisense strand to SEQ ID NO: 1975516
acuaaggcaagccuuucuc

SEQ ID NO: 1975518 - RNA, 19 nt, Artificial Sequence
  Description of Artificial Sequence: Synthetic oligonucleotide
  Sense strand starting at position 1425 of SEQ ID NO: 1880547
aaaggcuugccuuaguagu

SEQ ID NO: 1975519 - RNA, 19 nt, Artificial Sequence
  Description of Artificial Sequence: Synthetic oligonucleotide
  Antisense strand to SEQ ID NO: 1975518
acuacuaaggcaagccuuu

SEQ ID NO: 1975520 - RNA, 19 nt, Artificial Sequence
  Description of Artificial Sequence: Synthetic oligonucleotide
  Sense strand starting at position 1427 of SEQ ID NO: 1880547
aggcuugccuuaguaguaa

SEQ ID NO: 1975521 - RNA, 19 nt, Artificial Sequence
  Description of Artificial Sequence: Synthetic oligonucleotide
  Antisense strand to SEQ ID NO: 1975520
uuacuacuaaggcaagccu

SEQ ID NO: 1975522 - RNA, 19 nt, Artificial Sequence
  Description of Artificial Sequence: Synthetic oligonucleotide
  Sense strand starting at position 1515 of SEQ ID NO: 1880547
caggcaaacuguuucuaag

SEQ ID NO: 1975523 - RNA, 19 nt, Artificial Sequence
  Description of Artificial Sequence: Synthetic oligonucleotide
  Antisense strand to SEQ ID NO: 1975522
cuuagaaacaguuugccug

SEQ ID NO: 1975524 - RNA, 19 nt, Artificial Sequence
  Description of Artificial Sequence: Synthetic oligonucleotide
  Sense strand starting at position 1517 of SEQ ID NO: 1880547
ggcaaacuguuucuaagua

SEQ ID NO: 1975525 - RNA, 19 nt, Artificial Sequence
  Description of Artificial Sequence: Synthetic oligonucleotide
  Antisense strand to SEQ ID NO: 1975524
uacuuagaaacaguuugcc

SEQ ID NO: 1975526 - RNA, 19 nt, Artificial Sequence
  Description of Artificial Sequence: Synthetic oligonucleotide
  Sense strand starting at position 1532 of SEQ ID NO: 1880547
aguaauugcuucccagaau

SEQ ID NO: 1975527 - RNA, 19 nt, Artificial Sequence
  Description of Artificial Sequence: Synthetic oligonucleotide
  Antisense strand to SEQ ID NO: 1975526
auucugggaagcaauuacu

SEQ ID NO: 1975528 - RNA, 19 nt, Artificial Sequence
  Description of Artificial Sequence: Synthetic oligonucleotide
  Sense strand starting at position 129 of SEQ ID NO: 1880548
guguguuaaaguuagaaac

SEQ ID NO: 1975529 - RNA, 19 nt, Artificial Sequence
  Description of Artificial Sequence: Synthetic oligonucleotide
  Antisense strand to SEQ ID NO: 1975528
guuucuaacuuuaacacac

SEQ ID NO: 1975530 - RNA, 19 nt, Artificial Sequence
  Description of Artificial Sequence: Synthetic oligonucleotide
  Sense strand starting at position 356 of SEQ ID NO: 1880548
auaucagugucauugagga

SEQ ID NO: 1975531 - RNA, 19 nt, Artificial Sequence
  Description of Artificial Sequence: Synthetic oligonucleotide
  Antisense strand to SEQ ID NO: 1975530
uccucaaugacacugauau

SEQ ID NO: 1975532 - RNA, 19 nt, Artificial Sequence
  Description of Artificial Sequence: Synthetic oligonucleotide
  Sense strand starting at position 609 of SEQ ID NO: 1880548
ccaacaaugcuuugguaga

SEQ ID NO: 1975533 - RNA, 19 nt, Artificial Sequence
  Description of Artificial Sequence: Synthetic oligonucleotide
  Antisense strand to SEQ ID NO: 1975532
ucuaccaaagcauuguugg

SEQ ID NO: 1975534 - RNA, 19 nt, Artificial Sequence
  Description of Artificial Sequence: Synthetic oligonucleotide
  Sense strand starting at position 611 of SEQ ID NO: 1880548
aacaaugcuuugguagaca

SEQ ID NO: 1975535 - RNA, 19 nt, Artificial Sequence
  Description of Artificial Sequence: Synthetic oligonucleotide
  Antisense strand to SEQ ID NO: 1975534
ugucuaccaaagcauuguu

SEQ ID NO: 1975536 - RNA, 19 nt, Artificial Sequence
  Description of Artificial Sequence: Synthetic oligonucleotide
  Sense strand starting at position 699 of SEQ ID NO: 1880548
aguuccuaugaagauguau

SEQ ID NO: 1975537 - RNA, 19 nt, Artificial Sequence
  Description of Artificial Sequence: Synthetic oligonucleotide
  Antisense strand to SEQ ID NO: 1975536
auacaucuucauaggaacu

SEQ ID NO: 1975538 - RNA, 19 nt, Artificial Sequence
  Description of Artificial Sequence: Synthetic oligonucleotide
  Sense strand starting at position 863 of SEQ ID NO: 1880548
gauagugauuuggaaagaa

SEQ ID NO: 1975539 - RNA, 19 nt, Artificial Sequence
  Description of Artificial Sequence: Synthetic oligonucleotide
  Antisense strand to SEQ ID NO: 1975538
uucuuuccaaaucacuauc

SEQ ID NO: 1975540 - RNA, 19 nt, Artificial Sequence
  Description of Artificial Sequence: Synthetic oligonucleotide
  Sense strand starting at position 885 of SEQ ID NO: 1880548
gcaaauauuugagaaagaa

SEQ ID NO: 1975541 - RNA, 19 nt, Artificial Sequence
  Description of Artificial Sequence: Synthetic oligonucleotide
  Antisense strand to SEQ ID NO: 1975540
uucuuucucaaauauuugc

SEQ ID NO: 1975542 - RNA, 19 nt, Artificial Sequence
  Description of Artificial Sequence: Synthetic oligonucleotide
  Sense strand starting at position 1245 of SEQ ID NO: 1880548
ccauguccuguaggaagaa

SEQ ID NO: 1975543 - RNA, 19 nt, Artificial Sequence
  Description of Artificial Sequence: Synthetic oligonucleotide
  Antisense strand to SEQ ID NO: 1975542
uucuuccuacaggacaugg

SEQ ID NO: 1975544 - RNA, 19 nt, Artificial Sequence
  Description of Artificial Sequence: Synthetic oligonucleotide
  Sense strand starting at position 1275 of SEQ ID NO: 1880548
uuugaaagcacaggugaaa

SEQ ID NO: 1975545 - RNA, 19 nt, Artificial Sequence
  Description of Artificial Sequence: Synthetic oligonucleotide
  Antisense strand to SEQ ID NO: 1975544
uuucaccugugcuuucaaa

SEQ ID NO: 1975546 - RNA, 19 nt, Artificial Sequence
  Description of Artificial Sequence: Synthetic oligonucleotide
  Sense strand starting at position 1431 of SEQ ID NO: 1880548
guaagaugucagggacaua

SEQ ID NO: 1975547 - RNA, 19 nt, Artificial Sequence
  Description of Artificial Sequence: Synthetic oligonucleotide
  Antisense strand to SEQ ID NO: 1975546
uaugucccugacaucuuac

SEQ ID NO: 1975548 - RNA, 19 nt, Artificial Sequence
  Description of Artificial Sequence: Synthetic oligonucleotide
  Sense strand starting at position 1442 of SEQ ID NO: 1880548
gggacauacauguaagcuu

SEQ ID NO: 1975549 - RNA, 19 nt, Artificial Sequence
  Description of Artificial Sequence: Synthetic oligonucleotide
  Antisense strand to SEQ ID NO: 1975548
aagcuuacauguauguccc

SEQ ID NO: 1975550 - RNA, 19 nt, Artificial Sequence
  Description of Artificial Sequence: Synthetic oligonucleotide
  Sense strand starting at position 1597 of SEQ ID NO: 1880548
gaguuaggcgugagguuga

SEQ ID NO: 1975551 - RNA, 19 nt, Artificial Sequence
  Description of Artificial Sequence: Synthetic oligonucleotide
  Antisense strand to SEQ ID NO: 1975550
ucaaccucacgccuaacuc

SEQ ID NO: 1975552 - RNA, 19 nt, Artificial Sequence
  Description of Artificial Sequence: Synthetic oligonucleotide
  Sense strand starting at position 1708 of SEQ ID NO: 1880548
gugauaaacugagugagca

SEQ ID NO: 1975553 - RNA, 19 nt, Artificial Sequence
  Description of Artificial Sequence: Synthetic oligonucleotide
  Antisense strand to SEQ ID NO: 1975552
ugcucacucaguuuaucac

SEQ ID NO: 1975554 - RNA, 19 nt, Artificial Sequence
  Description of Artificial Sequence: Synthetic oligonucleotide
  Sense strand starting at position 1835 of SEQ ID NO: 1880548
gcuaauaaagcagauucua

SEQ ID NO: 1975555 - RNA, 19 nt, Artificial Sequence
  Description of Artificial Sequence: Synthetic oligonucleotide
  Antisense strand to SEQ ID NO: 1975554
uagaaucugcuuuauuagc

SEQ ID NO: 1975556 - RNA, 19 nt, Artificial Sequence
  Description of Artificial Sequence: Synthetic oligonucleotide
  Sense strand starting at position 2221 of SEQ ID NO: 1880548
ccgauuggagagugagauu

SEQ ID NO: 1975557 - RNA, 19 nt, Artificial Sequence
  Description of Artificial Sequence: Synthetic oligonucleotide
  Antisense strand to SEQ ID NO: 1975556
aaucucacucuccaaucgg

SEQ ID NO: 1975558 - RNA, 19 nt, Artificial Sequence
  Description of Artificial Sequence: Synthetic oligonucleotide
  Sense strand starting at position 2236 of SEQ ID NO: 1880548
gauuucucagugugaguca

SEQ ID NO: 1975559 - RNA, 19 nt, Artificial Sequence
  Description of Artificial Sequence: Synthetic oligonucleotide
  Antisense strand to SEQ ID NO: 1975558
ugacucacacugagaaauc

SEQ ID NO: 1975560 - RNA, 19 nt, Artificial Sequence
  Description of Artificial Sequence: Synthetic oligonucleotide
  Sense strand starting at position 2291 of SEQ ID NO: 1880548
gcacuuauugugggaaacu

SEQ ID NO: 1975561 - RNA, 19 nt, Artificial Sequence
  Description of Artificial Sequence: Synthetic oligonucleotide
  Antisense strand to SEQ ID NO: 1975560
aguuucccacaauaagugc

SEQ ID NO: 1975562 - RNA, 19 nt, Artificial Sequence
  Description of Artificial Sequence: Synthetic oligonucleotide
  Sense strand starting at position 2302 of SEQ ID NO: 1880548
gggaaacucugagaacaaa

SEQ ID NO: 1975563 - RNA, 19 nt, Artificial Sequence
  Description of Artificial Sequence: Synthetic oligonucleotide
  Antisense strand to SEQ ID NO: 1975562
uuuguucucagaguuuccc

SEQ ID NO: 1975564 - RNA, 19 nt, Artificial Sequence
  Description of Artificial Sequence: Synthetic oligonucleotide
  Sense strand starting at position 2521 of SEQ ID NO: 1880548
uuaucagugcuacaaagaa

SEQ ID NO: 1975565 - RNA, 19 nt, Artificial Sequence
  Description of Artificial Sequence: Synthetic oligonucleotide
  Antisense strand to SEQ ID NO: 1975564
uucuuuguagcacugauaa

SEQ ID NO: 1975566 - RNA, 19 nt, Artificial Sequence
  Description of Artificial Sequence: Synthetic oligonucleotide
  Sense strand starting at position 2550 of SEQ ID NO: 1880548
ucucucagcucaguuauuu

SEQ ID NO: 1975567 - RNA, 19 nt, Artificial Sequence
  Description of Artificial Sequence: Synthetic oligonucleotide
  Antisense strand to SEQ ID NO: 1975566
aaauaacugagcugagaga

SEQ ID NO: 1975568 - RNA, 19 nt, Artificial Sequence
  Description of Artificial Sequence: Synthetic oligonucleotide
  Sense strand starting at position 2599 of SEQ ID NO: 1880548
cggugauauaaggacuguu

SEQ ID NO: 1975569 - RNA, 19 nt, Artificial Sequence
  Description of Artificial Sequence: Synthetic oligonucleotide
  Antisense strand to SEQ ID NO: 1975568
aacaguccuuauaucaccg

SEQ ID NO: 1975570 - RNA, 19 nt, Artificial Sequence
  Description of Artificial Sequence: Synthetic oligonucleotide
  Sense strand starting at position 2738 of SEQ ID NO: 1880548
guacaugagucuguagaca

SEQ ID NO: 1975571 - RNA, 19 nt, Artificial Sequence
  Description of Artificial Sequence: Synthetic oligonucleotide
  Antisense strand to SEQ ID NO: 1975570
ugucuacagacucauguac

SEQ ID NO: 1975572 - RNA, 19 nt, Artificial Sequence
  Description of Artificial Sequence: Synthetic oligonucleotide
  Sense strand starting at position 2865 of SEQ ID NO: 1880548
ugagaugugucucuauaaa

SEQ ID NO: 1975573 - RNA, 19 nt, Artificial Sequence
  Description of Artificial Sequence: Synthetic oligonucleotide
  Antisense strand to SEQ ID NO: 1975572
uuuauagagacacaucuca

SEQ ID NO: 1975574 - RNA, 19 nt, Artificial Sequence
  Description of Artificial Sequence: Synthetic oligonucleotide
  Sense strand starting at position 2917 of SEQ ID NO: 1880548
guuggaagggugugaugau

SEQ ID NO: 1975575 - RNA, 19 nt, Artificial Sequence
  Description of Artificial Sequence: Synthetic oligonucleotide
  Antisense strand to SEQ ID NO: 1975574
aucaucacacccuuccaac

SEQ ID NO: 1975576 - RNA, 19 nt, Artificial Sequence
  Description of Artificial Sequence: Synthetic oligonucleotide
  Sense strand starting at position 2924 of SEQ ID NO: 1880548
gggugugaugaugacgaau

SEQ ID NO: 1975577 - RNA, 19 nt, Artificial Sequence
  Description of Artificial Sequence: Synthetic oligonucleotide
  Antisense strand to SEQ ID NO: 1975576
auucgucaucaucacaccc

SEQ ID NO: 1975578 - RNA, 19 nt, Artificial Sequence
  Description of Artificial Sequence: Synthetic oligonucleotide
  Sense strand starting at position 2979 of SEQ ID NO: 1880548
ugcucagagcuccaugacu

SEQ ID NO: 1975579 - RNA, 19 nt, Artificial Sequence
  Description of Artificial Sequence: Synthetic oligonucleotide
  Antisense strand to SEQ ID NO: 1975578
agucauggagcucugagca

SEQ ID NO: 1975580 - RNA, 19 nt, Artificial Sequence
  Description of Artificial Sequence: Synthetic oligonucleotide
  Sense strand starting at position 2981 of SEQ ID NO: 1880548
cucagagcuccaugacuga

SEQ ID NO: 1975581 - RNA, 19 nt, Artificial Sequence
  Description of Artificial Sequence: Synthetic oligonucleotide
  Antisense strand to SEQ ID NO: 1975580
ucagucauggagcucugag

SEQ ID NO: 1975582 - RNA, 19 nt, Artificial Sequence
  Description of Artificial Sequence: Synthetic oligonucleotide
  Sense strand starting at position 3101 of SEQ ID NO: 1880548
ggugucggaaucuacauau

SEQ ID NO: 1975583 - RNA, 19 nt, Artificial Sequence
  Description of Artificial Sequence: Synthetic oligonucleotide
  Antisense strand to SEQ ID NO: 1975582
auauguagauuccgacacc

SEQ ID NO: 1975584 - RNA, 19 nt, Artificial Sequence
  Description of Artificial Sequence: Synthetic oligonucleotide
  Sense strand starting at position 3128 of SEQ ID NO: 1880548
ccaggauucuaguuccuac

SEQ ID NO: 1975585 - RNA, 19 nt, Artificial Sequence
  Description of Artificial Sequence: Synthetic oligonucleotide
  Antisense strand to SEQ ID NO: 1975584
guaggaacuagaauccugg

SEQ ID NO: 1975586 - RNA, 19 nt, Artificial Sequence
  Description of Artificial Sequence: Synthetic oligonucleotide
  Sense strand starting at position 3131 of SEQ ID NO: 1880548
ggauucuaguuccuacaga

SEQ ID NO: 1975587 - RNA, 19 nt, Artificial Sequence
  Description of Artificial Sequence: Synthetic oligonucleotide
  Antisense strand to SEQ ID NO: 1975586
ucuguaggaacuagaaucc

SEQ ID NO: 1975588 - RNA, 19 nt, Artificial Sequence
  Description of Artificial Sequence: Synthetic oligonucleotide
  Sense strand starting at position 3180 of SEQ ID NO: 1880548
ugggcauugcuagaaggaa

SEQ ID NO: 1975589 - RNA, 19 nt, Artificial Sequence
  Description of Artificial Sequence: Synthetic oligonucleotide
  Antisense strand to SEQ ID NO: 1975588
uuccuucuagcaaugccca

SEQ ID NO: 1975590 - RNA, 19 nt, Artificial Sequence
  Description of Artificial Sequence: Synthetic oligonucleotide
  Sense strand starting at position 3357 of SEQ ID NO: 1880548
cugguaugacccugggaga

SEQ ID NO: 1975591 - RNA, 19 nt, Artificial Sequence
  Description of Artificial Sequence: Synthetic oligonucleotide
  Antisense strand to SEQ ID NO: 1975590
ucucccagggucauaccag

SEQ ID NO: 1975592 - RNA, 19 nt, Artificial Sequence
  Description of Artificial Sequence: Synthetic oligonucleotide
  Sense strand starting at position 3368 of SEQ ID NO: 1880548
cugggagacugguuuaucu

SEQ ID NO: 1975593 - RNA, 19 nt, Artificial Sequence
  Description of Artificial Sequence: Synthetic oligonucleotide
  Antisense strand to SEQ ID NO: 1975592
agauaaaccagucucccag

SEQ ID NO: 1975594 - RNA, 19 nt, Artificial Sequence
  Description of Artificial Sequence: Synthetic oligonucleotide
  Sense strand starting at position 3407 of SEQ ID NO: 1880548
agauuacacucugucaaug

SEQ ID NO: 1975595 - RNA, 19 nt, Artificial Sequence
  Description of Artificial Sequence: Synthetic oligonucleotide
  Antisense strand to SEQ ID NO: 1975594
cauugacagaguguaaucu

SEQ ID NO: 1975596 - RNA, 19 nt, Artificial Sequence
  Description of Artificial Sequence: Synthetic oligonucleotide
  Sense strand starting at position 3529 of SEQ ID NO: 1880548
augugaucuccuggguaua

SEQ ID NO: 1975597 - RNA, 19 nt, Artificial Sequence
  Description of Artificial Sequence: Synthetic oligonucleotide
  Antisense strand to SEQ ID NO: 1975596
uauacccaggagaucacau

SEQ ID NO: 1975598 - RNA, 19 nt, Artificial Sequence
  Description of Artificial Sequence: Synthetic oligonucleotide
  Sense strand starting at position 3633 of SEQ ID NO: 1880548
augccaacaucaucagaga

SEQ ID NO: 1975599 - RNA, 19 nt, Artificial Sequence
  Description of Artificial Sequence: Synthetic oligonucleotide
  Antisense strand to SEQ ID NO: 1975598
ucucugaugauguuggcau

SEQ ID NO: 1975600 - RNA, 19 nt, Artificial Sequence
  Description of Artificial Sequence: Synthetic oligonucleotide
  Sense strand starting at position 3650 of SEQ ID NO: 1880548
gaugaacuguucuuaccag

SEQ ID NO: 1975601 - RNA, 19 nt, Artificial Sequence
  Description of Artificial Sequence: Synthetic oligonucleotide
  Antisense strand to SEQ ID NO: 1975600
cugguaagaacaguucauc

SEQ ID NO: 1975602 - RNA, 19 nt, Artificial Sequence
  Description of Artificial Sequence: Synthetic oligonucleotide
  Sense strand starting at position 3786 of SEQ ID NO: 1880548
gcaauaucauaggcacaau

SEQ ID NO: 1975603 - RNA, 19 nt, Artificial Sequence
  Description of Artificial Sequence: Synthetic oligonucleotide
  Antisense strand to SEQ ID NO: 1975602
auugugccuaugauauugc

SEQ ID NO: 1975604 - RNA, 19 nt, Artificial Sequence
  Description of Artificial Sequence: Synthetic oligonucleotide
  Sense strand starting at position 3808 of SEQ ID NO: 1880548
agaagaauauuuggacacu

SEQ ID NO: 1975605 - RNA, 19 nt, Artificial Sequence
  Description of Artificial Sequence: Synthetic oligonucleotide
  Antisense strand to SEQ ID NO: 1975604
aguguccaaauauucuucu

SEQ ID NO: 1975606 - RNA, 19 nt, Artificial Sequence
  Description of Artificial Sequence: Synthetic oligonucleotide
  Sense strand starting at position 3822 of SEQ ID NO: 1880548
acacuuugauagccaaaga

SEQ ID NO: 1975607 - RNA, 19 nt, Artificial Sequence
  Description of Artificial Sequence: Synthetic oligonucleotide
  Antisense strand to SEQ ID NO: 1975606
ucuuuggcuaucaaagugu

SEQ ID NO: 1975608 - RNA, 19 nt, Artificial Sequence
  Description of Artificial Sequence: Synthetic oligonucleotide
  Sense strand starting at position 81 of SEQ ID NO: 1880549
gggcauaugggugacuaua

SEQ ID NO: 1975609 - RNA, 19 nt, Artificial Sequence
  Description of Artificial Sequence: Synthetic oligonucleotide
  Antisense strand to SEQ ID NO: 1975608
uauagucacccauaugccc

SEQ ID NO: 1975610 - RNA, 19 nt, Artificial Sequence
  Description of Artificial Sequence: Synthetic oligonucleotide
  Sense strand starting at position 114 of SEQ ID NO: 1880549
uagucaguggaguagugaa

SEQ ID NO: 1975611 - RNA, 19 nt, Artificial Sequence
  Description of Artificial Sequence: Synthetic oligonucleotide
  Antisense strand to SEQ ID NO: 1975610
uucacuacuccacugacua

SEQ ID NO: 1975612 - RNA, 19 nt, Artificial Sequence
  Description of Artificial Sequence: Synthetic oligonucleotide
  Sense strand starting at position 129 of SEQ ID NO: 1880549
ugaaauguccugcagaauu

SEQ ID NO: 1975613 - RNA, 19 nt, Artificial Sequence
  Description of Artificial Sequence: Synthetic oligonucleotide
  Antisense strand to SEQ ID NO: 1975612
aauucugcaggacauuuca

SEQ ID NO: 1975614 - RNA, 19 nt, Artificial Sequence
  Description of Artificial Sequence: Synthetic oligonucleotide
  Sense strand starting at position 186 of SEQ ID NO: 1880549
acaccaugagcucauguua

SEQ ID NO: 1975615 - RNA, 19 nt, Artificial Sequence
  Description of Artificial Sequence: Synthetic oligonucleotide
  Antisense strand to SEQ ID NO: 1975614
uaacaugagcucauggugu

SEQ ID NO: 1975616 - RNA, 19 nt, Artificial Sequence
  Description of Artificial Sequence: Synthetic oligonucleotide
  Sense strand starting at position 238 of SEQ ID NO: 1880549
cugguuguucgagaaacug

SEQ ID NO: 1975617 - RNA, 19 nt, Artificial Sequence
  Description of Artificial Sequence: Synthetic oligonucleotide
  Antisense strand to SEQ ID NO: 1975616
caguuucucgaacaaccag

SEQ ID NO: 1975618 - RNA, 19 nt, Artificial Sequence
  Description of Artificial Sequence: Synthetic oligonucleotide
  Sense strand starting at position 398 of SEQ ID NO: 1880549
agauuauuguaagcaacau

SEQ ID NO: 1975619 - RNA, 19 nt, Artificial Sequence
  Description of Artificial Sequence: Synthetic oligonucleotide
  Antisense strand to SEQ ID NO: 1975618
auguugcuuacaauaaucu

SEQ ID NO: 1975620 - RNA, 19 nt, Artificial Sequence
  Description of Artificial Sequence: Synthetic oligonucleotide
  Sense strand starting at position 1004 of SEQ ID NO: 1880549
gucagaauaguuuaugcua

SEQ ID NO: 1975621 - RNA, 19 nt, Artificial Sequence
  Description of Artificial Sequence: Synthetic oligonucleotide
  Antisense strand to SEQ ID NO: 1975620
uagcauaaacuauucugac

SEQ ID NO: 1975622 - RNA, 19 nt, Artificial Sequence
  Description of Artificial Sequence: Synthetic oligonucleotide
  Sense strand starting at position 1058 of SEQ ID NO: 1880549
gcaaauugaagaugaggua

SEQ ID NO: 1975623 - RNA, 19 nt, Artificial Sequence
  Description of Artificial Sequence: Synthetic oligonucleotide
  Antisense strand to SEQ ID NO: 1975622
uaccucaucuucaauuugc

SEQ ID NO: 1975624 - RNA, 19 nt, Artificial Sequence
  Description of Artificial Sequence: Synthetic oligonucleotide
  Sense strand starting at position 1077 of SEQ ID NO: 1880549
auguauuugccauguuuau

SEQ ID NO: 1975625 - RNA, 19 nt, Artificial Sequence
  Description of Artificial Sequence: Synthetic oligonucleotide
  Antisense strand to SEQ ID NO: 1975624
auaaacauggcaaauacau

SEQ ID NO: 1975626 - RNA, 19 nt, Artificial Sequence
  Description of Artificial Sequence: Synthetic oligonucleotide
  Sense strand starting at position 1145 of SEQ ID NO: 1880549
agaaauguauuggccuaua

SEQ ID NO: 1975627 - RNA, 19 nt, Artificial Sequence
  Description of Artificial Sequence: Synthetic oligonucleotide
  Antisense strand to SEQ ID NO: 1975626
uauaggccaauacauuucu

SEQ ID NO: 1975628 - RNA, 19 nt, Artificial Sequence
  Description of Artificial Sequence: Synthetic oligonucleotide
  Sense strand starting at position 1148 of SEQ ID NO: 1880549
aauguauuggccuauauag

SEQ ID NO: 1975629 - RNA, 19 nt, Artificial Sequence
  Description of Artificial Sequence: Synthetic oligonucleotide
  Antisense strand to SEQ ID NO: 1975628
cuauauaggccaauacauu

SEQ ID NO: 1975630 - RNA, 19 nt, Artificial Sequence
  Description of Artificial Sequence: Synthetic oligonucleotide
  Sense strand starting at position 1168 of SEQ ID NO: 1880549
ugcaaaguccaaggaguaa

SEQ ID NO: 1975631 - RNA, 19 nt, Artificial Sequence
  Description of Artificial Sequence: Synthetic oligonucleotide
  Antisense strand to SEQ ID NO: 1975630
uuacuccuuggacuuugca

SEQ ID NO: 1975632 - RNA, 19 nt, Artificial Sequence
  Description of Artificial Sequence: Synthetic oligonucleotide
  Sense strand starting at position 1180 of SEQ ID NO: 1880549
ggaguaaacuugcuuuagg

SEQ ID NO: 1975633 - RNA, 19 nt, Artificial Sequence
  Description of Artificial Sequence: Synthetic oligonucleotide
  Antisense strand to SEQ ID NO: 1975632
ccuaaagcaaguuuacucc

SEQ ID NO: 1975634 - RNA, 19 nt, Artificial Sequence
  Description of Artificial Sequence: Synthetic oligonucleotide
  Sense strand starting at position 1318 of SEQ ID NO: 1880549
auagcugugccaguuaguu

SEQ ID NO: 1975635 - RNA, 19 nt, Artificial Sequence
  Description of Artificial Sequence: Synthetic oligonucleotide
  Antisense strand to SEQ ID NO: 1975634
aacuaacuggcacagcuau

SEQ ID NO: 1975636 - RNA, 19 nt, Artificial Sequence
  Description of Artificial Sequence: Synthetic oligonucleotide
  Sense strand starting at position 1414 of SEQ ID NO: 1880549
ucagauuagccacauuagu

SEQ ID NO: 1975637 - RNA, 19 nt, Artificial Sequence
  Description of Artificial Sequence: Synthetic oligonucleotide
  Antisense strand to SEQ ID NO: 1975636
acuaauguggcuaaucuga

SEQ ID NO: 1975638 - RNA, 19 nt, Artificial Sequence
  Description of Artificial Sequence: Synthetic oligonucleotide
  Sense strand starting at position 1471 of SEQ ID NO: 1880549
gguuucuuugcagaagaga

SEQ ID NO: 1975639 - RNA, 19 nt, Artificial Sequence
  Description of Artificial Sequence: Synthetic oligonucleotide
  Antisense strand to SEQ ID NO: 1975638
ucucuucugcaaagaaacc

SEQ ID NO: 1975640 - RNA, 19 nt, Artificial Sequence
  Description of Artificial Sequence: Synthetic oligonucleotide
  Sense strand starting at position 1675 of SEQ ID NO: 1880549
uuuaguaaucaauagcaga

SEQ ID NO: 1975641 - RNA, 19 nt, Artificial Sequence
  Description of Artificial Sequence: Synthetic oligonucleotide
  Antisense strand to SEQ ID NO: 1975640
ucugcuauugauuacuaaa

SEQ ID NO: 1975642 - RNA, 19 nt, Artificial Sequence
  Description of Artificial Sequence: Synthetic oligonucleotide
  Sense strand starting at position 1699 of SEQ ID NO: 1880549
ggauaauaaugcuuuccuu

SEQ ID NO: 1975643 - RNA, 19 nt, Artificial Sequence
  Description of Artificial Sequence: Synthetic oligonucleotide
  Antisense strand to SEQ ID NO: 1975642
aaggaaagcauuauuaucc

SEQ ID NO: 1975644 - RNA, 19 nt, Artificial Sequence
  Description of Artificial Sequence: Synthetic oligonucleotide
  Sense strand starting at position 1892 of SEQ ID NO: 1880549
cucauaucucuagauggca

SEQ ID NO: 1975645 - RNA, 19 nt, Artificial Sequence
  Description of Artificial Sequence: Synthetic oligonucleotide
  Antisense strand to SEQ ID NO: 1975644
ugccaucuagagauaugag

SEQ ID NO: 1975646 - RNA, 19 nt, Artificial Sequence
  Description of Artificial Sequence: Synthetic oligonucleotide
  Sense strand starting at position 1950 of SEQ ID NO: 1880549
ggucgagaacucuacccuu

SEQ ID NO: 1975647 - RNA, 19 nt, Artificial Sequence
  Description of Artificial Sequence: Synthetic oligonucleotide
  Antisense strand to SEQ ID NO: 1975646
aaggguagaguucucgacc

SEQ ID NO: 1975648 - RNA, 19 nt, Artificial Sequence
  Description of Artificial Sequence: Synthetic oligonucleotide
  Sense strand starting at position 2012 of SEQ ID NO: 1880549
ugguucagaggguggauua

SEQ ID NO: 1975649 - RNA, 19 nt, Artificial Sequence
  Description of Artificial Sequence: Synthetic oligonucleotide
  Antisense strand to SEQ ID NO: 1975648
uaauccacccucugaacca

SEQ ID NO: 1975650 - RNA, 19 nt, Artificial Sequence
  Description of Artificial Sequence: Synthetic oligonucleotide
  Sense strand starting at position 2282 of SEQ ID NO: 1880549
cucucacauuagucagaag

SEQ ID NO: 1975651 - RNA, 19 nt, Artificial Sequence
  Description of Artificial Sequence: Synthetic oligonucleotide
  Antisense strand to SEQ ID NO: 1975650
cuucugacuaaugugagag

SEQ ID NO: 1975652 - RNA, 19 nt, Artificial Sequence
  Description of Artificial Sequence: Synthetic oligonucleotide
  Sense strand starting at position 2293 of SEQ ID NO: 1880549
gucagaagccucuaacuuc

SEQ ID NO: 1975653 - RNA, 19 nt, Artificial Sequence
  Description of Artificial Sequence: Synthetic oligonucleotide
  Antisense strand to SEQ ID NO: 1975652
gaaguuagaggcuucugac

SEQ ID NO: 1975654 - RNA, 19 nt, Artificial Sequence
  Description of Artificial Sequence: Synthetic oligonucleotide
  Sense strand starting at position 2334 of SEQ ID NO: 1880549
caaaucaugcggcaagaca

SEQ ID NO: 1975655 - RNA, 19 nt, Artificial Sequence
  Description of Artificial Sequence: Synthetic oligonucleotide
  Antisense strand to SEQ ID NO: 1975654
ugucuugccgcaugauuug

SEQ ID NO: 1975656 - RNA, 19 nt, Artificial Sequence
  Description of Artificial Sequence: Synthetic oligonucleotide
  Sense strand starting at position 2806 of SEQ ID NO: 1880549
ucuucuaaaguguaccaaa

SEQ ID NO: 1975657 - RNA, 19 nt, Artificial Sequence
  Description of Artificial Sequence: Synthetic oligonucleotide
  Antisense strand to SEQ ID NO: 1975656
uuugguacacuuuagaaga

SEQ ID NO: 1975658 - RNA, 19 nt, Artificial Sequence
  Description of Artificial Sequence: Synthetic oligonucleotide
  Sense strand starting at position 2868 of SEQ ID NO: 1880549
agagaaacugcuugaaugu

SEQ ID NO: 1975659 - RNA, 19 nt, Artificial Sequence
  Description of Artificial Sequence: Synthetic oligonucleotide
  Antisense strand to SEQ ID NO: 1975658
acauucaagcaguuucucu

SEQ ID NO: 1975660 - RNA, 19 nt, Artificial Sequence
  Description of Artificial Sequence: Synthetic oligonucleotide
  Sense strand starting at position 2945 of SEQ ID NO: 1880549
uuugaaugucuagaaugcu

SEQ ID NO: 1975661 - RNA, 19 nt, Artificial Sequence
  Description of Artificial Sequence: Synthetic oligonucleotide
  Antisense strand to SEQ ID NO: 1975660
agcauucuagacauucaaa

SEQ ID NO: 1975662 - RNA, 19 nt, Artificial Sequence
  Description of Artificial Sequence: Synthetic oligonucleotide
  Sense strand starting at position 3021 of SEQ ID NO: 1880549
uugcucugaaacgaguuaa

SEQ ID NO: 1975663 - RNA, 19 nt, Artificial Sequence
  Description of Artificial Sequence: Synthetic oligonucleotide
  Antisense strand to SEQ ID NO: 1975662
uuaacucguuucagagcaa

SEQ ID NO: 1975664 - RNA, 19 nt, Artificial Sequence
  Description of Artificial Sequence: Synthetic oligonucleotide
  Sense strand starting at position 3089 of SEQ ID NO: 1880549
auguuaugucuacaucaau

SEQ ID NO: 1975665 - RNA, 19 nt, Artificial Sequence
  Description of Artificial Sequence: Synthetic oligonucleotide
  Antisense strand to SEQ ID NO: 1975664
auugauguagacauaacau

SEQ ID NO: 1975666 - RNA, 19 nt, Artificial Sequence
  Description of Artificial Sequence: Synthetic oligonucleotide
  Sense strand starting at position 3127 of SEQ ID NO: 1880549
gagugugagcagcaauaua

SEQ ID NO: 1975667 - RNA, 19 nt, Artificial Sequence
  Description of Artificial Sequence: Synthetic oligonucleotide
  Antisense strand to SEQ ID NO: 1975666
uauauugcugcucacacuc

SEQ ID NO: 1975668 - RNA, 19 nt, Artificial Sequence
  Description of Artificial Sequence: Synthetic oligonucleotide
  Sense strand starting at position 3147 of SEQ ID NO: 1880549
uuaggaaugcuuugaacug

SEQ ID NO: 1975669 - RNA, 19 nt, Artificial Sequence
  Description of Artificial Sequence: Synthetic oligonucleotide
  Antisense strand to SEQ ID NO: 1975668
caguucaaagcauuccuaa

SEQ ID NO: 1975670 - RNA, 19 nt, Artificial Sequence
  Description of Artificial Sequence: Synthetic oligonucleotide
  Sense strand starting at position 3199 of SEQ ID NO: 1880549
aggaguuuauucuccuaga

SEQ ID NO: 1975671 - RNA, 19 nt, Artificial Sequence
  Description of Artificial Sequence: Synthetic oligonucleotide
  Antisense strand to SEQ ID NO: 1975670
ucuaggagaauaaacuccu

SEQ ID NO: 1975672 - RNA, 19 nt, Artificial Sequence
  Description of Artificial Sequence: Synthetic oligonucleotide
  Sense strand starting at position 3200 of SEQ ID NO: 1880549
ggaguuuauucuccuagau

SEQ ID NO: 1975673 - RNA, 19 nt, Artificial Sequence
  Description of Artificial Sequence: Synthetic oligonucleotide
  Antisense strand to SEQ ID NO: 1975672
aucuaggagaauaaacucc

SEQ ID NO: 1975674 - RNA, 19 nt, Artificial Sequence
  Description of Artificial Sequence: Synthetic oligonucleotide
  Sense strand starting at position 3483 of SEQ ID NO: 1880549
cauacauaucgguaagcua

SEQ ID NO: 1975675 - RNA, 19 nt, Artificial Sequence
  Description of Artificial Sequence: Synthetic oligonucleotide
  Antisense strand to SEQ ID NO: 1975674
uagcuuaccgauauguaug

SEQ ID NO: 1975676 - RNA, 19 nt, Artificial Sequence
  Description of Artificial Sequence: Synthetic oligonucleotide
  Sense strand starting at position 3486 of SEQ ID NO: 1880549
acauaucgguaagcuaaga

SEQ ID NO: 1975677 - RNA, 19 nt, Artificial Sequence
  Description of Artificial Sequence: Synthetic oligonucleotide
  Antisense strand to SEQ ID NO: 1975676
ucuuagcuuaccgauaugu

SEQ ID NO: 1975678 - RNA, 19 nt, Artificial Sequence
  Description of Artificial Sequence: Synthetic oligonucleotide
  Sense strand starting at position 3652 of SEQ ID NO: 1880549
uucuaaauuugaggacaaa

SEQ ID NO: 1975679 - RNA, 19 nt, Artificial Sequence
  Description of Artificial Sequence: Synthetic oligonucleotide
  Antisense strand to SEQ ID NO: 1975678
uuuguccucaaauuuagaa

SEQ ID NO: 1975680 - RNA, 19 nt, Artificial Sequence
  Description of Artificial Sequence: Synthetic oligonucleotide
  Sense strand starting at position 3898 of SEQ ID NO: 1880549
uagguaaccauguggugaa

SEQ ID NO: 1975681 - RNA, 19 nt, Artificial Sequence
  Description of Artificial Sequence: Synthetic oligonucleotide
  Antisense strand to SEQ ID NO: 1975680
uucaccacaugguuaccua

SEQ ID NO: 1975682 - RNA, 19 nt, Artificial Sequence
  Description of Artificial Sequence: Synthetic oligonucleotide
  Sense strand starting at position 3902 of SEQ ID NO: 1880549
uaaccauguggugaaucuu

SEQ ID NO: 1975683 - RNA, 19 nt, Artificial Sequence
  Description of Artificial Sequence: Synthetic oligonucleotide
  Antisense strand to SEQ ID NO: 1975682
aagauucaccacaugguua

SEQ ID NO: 1975684 - RNA, 19 nt, Artificial Sequence
  Description of Artificial Sequence: Synthetic oligonucleotide
  Sense strand starting at position 3955 of SEQ ID NO: 1880549
gguagucacacuggaaauu

SEQ ID NO: 1975685 - RNA, 19 nt, Artificial Sequence
  Description of Artificial Sequence: Synthetic oligonucleotide
  Antisense strand to SEQ ID NO: 1975684
aauuuccagugugacuacc

SEQ ID NO: 1975686 - RNA, 19 nt, Artificial Sequence
  Description of Artificial Sequence: Synthetic oligonucleotide
  Sense strand starting at position 3972 of SEQ ID NO: 1880549
uugcucugccuguuuguaa

SEQ ID NO: 1975687 - RNA, 19 nt, Artificial Sequence
  Description of Artificial Sequence: Synthetic oligonucleotide
  Antisense strand to SEQ ID NO: 1975686
uuacaaacaggcagagcaa

SEQ ID NO: 1975688 - RNA, 19 nt, Artificial Sequence
  Description of Artificial Sequence: Synthetic oligonucleotide
  Sense strand starting at position 2 of SEQ ID NO: 1880550
ucaugugaguuagugaguu

SEQ ID NO: 1975689 - RNA, 19 nt, Artificial Sequence
  Description of Artificial Sequence: Synthetic oligonucleotide
  Antisense strand to SEQ ID NO: 1975688
aacucacuaacucacauga

SEQ ID NO: 1975690 - RNA, 19 nt, Artificial Sequence
  Description of Artificial Sequence: Synthetic oligonucleotide
  Sense strand starting at position 4 of SEQ ID NO: 1880550
augugaguuagugaguuaa

SEQ ID NO: 1975691 - RNA, 19 nt, Artificial Sequence
  Description of Artificial Sequence: Synthetic oligonucleotide
  Antisense strand to SEQ ID NO: 1975690
uuaacucacuaacucacau

SEQ ID NO: 1975692 - RNA, 19 nt, Artificial Sequence
  Description of Artificial Sequence: Synthetic oligonucleotide
  Sense strand starting at position 6 of SEQ ID NO: 1880550
gugaguuagugaguuaaua

SEQ ID NO: 1975693 - RNA, 19 nt, Artificial Sequence
  Description of Artificial Sequence: Synthetic oligonucleotide
  Antisense strand to SEQ ID NO: 1975692
uauuaacucacuaacucac

SEQ ID NO: 1975694 - RNA, 19 nt, Artificial Sequence
  Description of Artificial Sequence: Synthetic oligonucleotide
  Sense strand starting at position 387 of SEQ ID NO: 1880550
ggcuaaagugcaugguaca

SEQ ID NO: 1975695 - RNA, 19 nt, Artificial Sequence
  Description of Artificial Sequence: Synthetic oligonucleotide
  Antisense strand to SEQ ID NO: 1975694
uguaccaugcacuuuagcc

SEQ ID NO: 1975696 - RNA, 19 nt, Artificial Sequence
  Description of Artificial Sequence: Synthetic oligonucleotide
  Sense strand starting at position 964 of SEQ ID NO: 1880550
cuggccuaauacuugaaua

SEQ ID NO: 1975697 - RNA, 19 nt, Artificial Sequence
  Description of Artificial Sequence: Synthetic oligonucleotide
  Antisense strand to SEQ ID NO: 1975696
uauucaaguauuaggccag

SEQ ID NO: 1975698 - RNA, 19 nt, Artificial Sequence
  Description of Artificial Sequence: Synthetic oligonucleotide
  Sense strand starting at position 996 of SEQ ID NO: 1880550
auuggugcucuugguaauu

SEQ ID NO: 1975699 - RNA, 19 nt, Artificial Sequence
  Description of Artificial Sequence: Synthetic oligonucleotide
  Antisense strand to SEQ ID NO: 1975698
aauuaccaagagcaccaau

SEQ ID NO: 1975700 - RNA, 19 nt, Artificial Sequence
  Description of Artificial Sequence: Synthetic oligonucleotide
  Sense strand starting at position 1001 of SEQ ID NO: 1880550
ugcucuugguaauucuaua

SEQ ID NO: 1975701 - RNA, 19 nt, Artificial Sequence
  Description of Artificial Sequence: Synthetic oligonucleotide
  Antisense strand to SEQ ID NO: 1975700
uauagaauuaccaagagca

SEQ ID NO: 1975702 - RNA, 19 nt, Artificial Sequence
  Description of Artificial Sequence: Synthetic oligonucleotide
  Sense strand starting at position 1040 of SEQ ID NO: 1880550
aggcauuauucugagaaga

SEQ ID NO: 1975703 - RNA, 19 nt, Artificial Sequence
  Description of Artificial Sequence: Synthetic oligonucleotide
  Antisense strand to SEQ ID NO: 1975702
ucuucucagaauaaugccu

SEQ ID NO: 1975704 - RNA, 19 nt, Artificial Sequence
  Description of Artificial Sequence: Synthetic oligonucleotide
  Sense strand starting at position 1042 of SEQ ID NO: 1880550
gcauuauucugagaagagg

SEQ ID NO: 1975705 - RNA, 19 nt, Artificial Sequence
  Description of Artificial Sequence: Synthetic oligonucleotide
  Antisense strand to SEQ ID NO: 1975704
ccucuucucagaauaaugc

SEQ ID NO: 1975706 - RNA, 19 nt, Artificial Sequence
  Description of Artificial Sequence: Synthetic oligonucleotide
  Sense strand starting at position 1053 of SEQ ID NO: 1880550
agaagaggucuguaggcuu

SEQ ID NO: 1975707 - RNA, 19 nt, Artificial Sequence
  Description of Artificial Sequence: Synthetic oligonucleotide
  Antisense strand to SEQ ID NO: 1975706
aagccuacagaccucuucu

SEQ ID NO: 1975708 - RNA, 19 nt, Artificial Sequence
  Description of Artificial Sequence: Synthetic oligonucleotide
  Sense strand starting at position 1234 of SEQ ID NO: 1880550
guaaucuacacgcgcuuua

SEQ ID NO: 1975709 - RNA, 19 nt, Artificial Sequence
  Description of Artificial Sequence: Synthetic oligonucleotide
  Antisense strand to SEQ ID NO: 1975708
uaaagcgcguguagauuac

SEQ ID NO: 1975710 - RNA, 19 nt, Artificial Sequence
  Description of Artificial Sequence: Synthetic oligonucleotide
  Sense strand starting at position 1423 of SEQ ID NO: 1880550
uucuuaggaccuggcuaau

SEQ ID NO: 1975711 - RNA, 19 nt, Artificial Sequence
  Description of Artificial Sequence: Synthetic oligonucleotide
  Antisense strand to SEQ ID NO: 1975710
auuagccagguccuaagaa

SEQ ID NO: 1975712 - RNA, 19 nt, Artificial Sequence
  Description of Artificial Sequence: Synthetic oligonucleotide
  Sense strand starting at position 1484 of SEQ ID NO: 1880550
cuucucacucuagauggua

SEQ ID NO: 1975713 - RNA, 19 nt, Artificial Sequence
  Description of Artificial Sequence: Synthetic oligonucleotide
  Antisense strand to SEQ ID NO: 1975712
uaccaucuagagugagaag

SEQ ID NO: 1975714 - RNA, 19 nt, Artificial Sequence
  Description of Artificial Sequence: Synthetic oligonucleotide
  Sense strand starting at position 1489 of SEQ ID NO: 1880550
cacucuagaugguagagaa

SEQ ID NO: 1975715 - RNA, 19 nt, Artificial Sequence
  Description of Artificial Sequence: Synthetic oligonucleotide
  Antisense strand to SEQ ID NO: 1975714
uucucuaccaucuagagug

SEQ ID NO: 1975716 - RNA, 19 nt, Artificial Sequence
  Description of Artificial Sequence: Synthetic oligonucleotide
  Sense strand starting at position 1501 of SEQ ID NO: 1880550
uagagaagaccguggauca

SEQ ID NO: 1975717 - RNA, 19 nt, Artificial Sequence
  Description of Artificial Sequence: Synthetic oligonucleotide
  Antisense strand to SEQ ID NO: 1975716
ugauccacggucuucucua

SEQ ID NO: 1975718 - RNA, 19 nt, Artificial Sequence
  Description of Artificial Sequence: Synthetic oligonucleotide
  Sense strand starting at position 2278 of SEQ ID NO: 1880550
cucagcuucgugugaaaua

SEQ ID NO: 1975719 - RNA, 19 nt, Artificial Sequence
  Description of Artificial Sequence: Synthetic oligonucleotide
  Antisense strand to SEQ ID NO: 1975718
uauuucacacgaagcugag

SEQ ID NO: 1975720 - RNA, 19 nt, Artificial Sequence
  Description of Artificial Sequence: Synthetic oligonucleotide
  Sense strand starting at position 2430 of SEQ ID NO: 1880550
cgccaucugugcuuuagca

SEQ ID NO: 1975721 - RNA, 19 nt, Artificial Sequence
  Description of Artificial Sequence: Synthetic oligonucleotide
  Antisense strand to SEQ ID NO: 1975720
ugcuaaagcacagauggcg

SEQ ID NO: 1975722 - RNA, 19 nt, Artificial Sequence
  Description of Artificial Sequence: Synthetic oligonucleotide
  Sense strand starting at position 2431 of SEQ ID NO: 1880550
gccaucugugcuuuagcau

SEQ ID NO: 1975723 - RNA, 19 nt, Artificial Sequence
  Description of Artificial Sequence: Synthetic oligonucleotide
  Antisense strand to SEQ ID NO: 1975722
augcuaaagcacagauggc

SEQ ID NO: 1975724 - RNA, 19 nt, Artificial Sequence
  Description of Artificial Sequence: Synthetic oligonucleotide
  Sense strand starting at position 2432 of SEQ ID NO: 1880550
ccaucugugcuuuagcauu

SEQ ID NO: 1975725 - RNA, 19 nt, Artificial Sequence
  Description of Artificial Sequence: Synthetic oligonucleotide
  Antisense strand to SEQ ID NO: 1975724
aaugcuaaagcacagaugg

SEQ ID NO: 1975726 - RNA, 19 nt, Artificial Sequence
  Description of Artificial Sequence: Synthetic oligonucleotide
  Sense strand starting at position 2509 of SEQ ID NO: 1880550
aguggccuugcgucucaaa

SEQ ID NO: 1975727 - RNA, 19 nt, Artificial Sequence
  Description of Artificial Sequence: Synthetic oligonucleotide
  Antisense strand to SEQ ID NO: 1975726
uuugagacgcaaggccacu

SEQ ID NO: 1975728 - RNA, 19 nt, Artificial Sequence
  Description of Artificial Sequence: Synthetic oligonucleotide
  Sense strand starting at position 2576 of SEQ ID NO: 1880550
cggacuccuuaauccaaau

SEQ ID NO: 1975729 - RNA, 19 nt, Artificial Sequence
  Description of Artificial Sequence: Synthetic oligonucleotide
  Antisense strand to SEQ ID NO: 1975728
auuuggauuaaggaguccg

SEQ ID NO: 1975730 - RNA, 19 nt, Artificial Sequence
  Description of Artificial Sequence: Synthetic oligonucleotide
  Sense strand starting at position 2623 of SEQ ID NO: 1880550
uuauguguccauuaaagag

SEQ ID NO: 1975731 - RNA, 19 nt, Artificial Sequence
  Description of Artificial Sequence: Synthetic oligonucleotide
  Antisense strand to SEQ ID NO: 1975730
cucuuuaauggacacauaa

SEQ ID NO: 1975732 - RNA, 19 nt, Artificial Sequence
  Description of Artificial Sequence: Synthetic oligonucleotide
  Sense strand starting at position 2633 of SEQ ID NO: 1880550
auuaaagagguuuguuguu

SEQ ID NO: 1975733 - RNA, 19 nt, Artificial Sequence
  Description of Artificial Sequence: Synthetic oligonucleotide
  Antisense strand to SEQ ID NO: 1975732
aacaacaaaccucuuuaau

SEQ ID NO: 1975734 - RNA, 19 nt, Artificial Sequence
  Description of Artificial Sequence: Synthetic oligonucleotide
  Sense strand starting at position 3073 of SEQ ID NO: 1880550
ucagaaguugugcagucau

SEQ ID NO: 1975735 - RNA, 19 nt, Artificial Sequence
  Description of Artificial Sequence: Synthetic oligonucleotide
  Antisense strand to SEQ ID NO: 1975734
augacugcacaacuucuga

SEQ ID NO: 1975736 - RNA, 19 nt, Artificial Sequence
  Description of Artificial Sequence: Synthetic oligonucleotide
  Sense strand starting at position 3084 of SEQ ID NO: 1880550
gcagucaucaccgccaguu

SEQ ID NO: 1975737 - RNA, 19 nt, Artificial Sequence
  Description of Artificial Sequence: Synthetic oligonucleotide
  Antisense strand to SEQ ID NO: 1975736
aacuggcggugaugacugc

SEQ ID NO: 1975738 - RNA, 19 nt, Artificial Sequence
  Description of Artificial Sequence: Synthetic oligonucleotide
  Sense strand starting at position 3094 of SEQ ID NO: 1880550
ccgccaguuccagaacauu

SEQ ID NO: 1975739 - RNA, 19 nt, Artificial Sequence
  Description of Artificial Sequence: Synthetic oligonucleotide
  Antisense strand to SEQ ID NO: 1975738
aauguucuggaacuggcgg

SEQ ID NO: 1975740 - RNA, 19 nt, Artificial Sequence
  Description of Artificial Sequence: Synthetic oligonucleotide
  Sense strand starting at position 3111 of SEQ ID NO: 1880550
uuguucucacucuagaaag

SEQ ID NO: 1975741 - RNA, 19 nt, Artificial Sequence
  Description of Artificial Sequence: Synthetic oligonucleotide
  Antisense strand to SEQ ID NO: 1975740
cuuucuagagugagaacaa

SEQ ID NO: 1975742 - RNA, 19 nt, Artificial Sequence
  Description of Artificial Sequence: Synthetic oligonucleotide
  Sense strand starting at position 3360 of SEQ ID NO: 1880550
uucuaaguggcgugaugaa

SEQ ID NO: 1975743 - RNA, 19 nt, Artificial Sequence
  Description of Artificial Sequence: Synthetic oligonucleotide
  Antisense strand to SEQ ID NO: 1975742
uucaucacgccacuuagaa

SEQ ID NO: 1975744 - RNA, 19 nt, Artificial Sequence
  Description of Artificial Sequence: Synthetic oligonucleotide
  Sense strand starting at position 3460 of SEQ ID NO: 1880550
gccuguuagucacuuagga

SEQ ID NO: 1975745 - RNA, 19 nt, Artificial Sequence
  Description of Artificial Sequence: Synthetic oligonucleotide
  Antisense strand to SEQ ID NO: 1975744
uccuaagugacuaacaggc

SEQ ID NO: 1975746 - RNA, 19 nt, Artificial Sequence
  Description of Artificial Sequence: Synthetic oligonucleotide
  Sense strand starting at position 3473 of SEQ ID NO: 1880550
uuaggagccuucuccguua

SEQ ID NO: 1975747 - RNA, 19 nt, Artificial Sequence
  Description of Artificial Sequence: Synthetic oligonucleotide
  Antisense strand to SEQ ID NO: 1975746
uaacggagaaggcuccuaa

SEQ ID NO: 1975748 - RNA, 19 nt, Artificial Sequence
  Description of Artificial Sequence: Synthetic oligonucleotide
  Sense strand starting at position 3476 of SEQ ID NO: 1880550
ggagccuucuccguuacca

SEQ ID NO: 1975749 - RNA, 19 nt, Artificial Sequence
  Description of Artificial Sequence: Synthetic oligonucleotide
  Antisense strand to SEQ ID NO: 1975748
ugguaacggagaaggcucc

SEQ ID NO: 1975750 - RNA, 19 nt, Artificial Sequence
  Description of Artificial Sequence: Synthetic oligonucleotide
  Sense strand starting at position 3516 of SEQ ID NO: 1880550
agugcuuguguuccagcaa

SEQ ID NO: 1975751 - RNA, 19 nt, Artificial Sequence
  Description of Artificial Sequence: Synthetic oligonucleotide
  Antisense strand to SEQ ID NO: 1975750
uugcuggaacacaagcacu

SEQ ID NO: 1975752 - RNA, 19 nt, Artificial Sequence
  Description of Artificial Sequence: Synthetic oligonucleotide
  Sense strand starting at position 3668 of SEQ ID NO: 1880550
uuacuaaucucuuauggug

SEQ ID NO: 1975753 - RNA, 19 nt, Artificial Sequence
  Description of Artificial Sequence: Synthetic oligonucleotide
  Antisense strand to SEQ ID NO: 1975752
caccauaagagauuaguaa

SEQ ID NO: 1975754 - RNA, 19 nt, Artificial Sequence
  Description of Artificial Sequence: Synthetic oligonucleotide
  Sense strand starting at position 3674 of SEQ ID NO: 1880550
aucucuuauggugacuaau

SEQ ID NO: 1975755 - RNA, 19 nt, Artificial Sequence
  Description of Artificial Sequence: Synthetic oligonucleotide
  Antisense strand to SEQ ID NO: 1975754
auuagucaccauaagagau

SEQ ID NO: 1975756 - RNA, 19 nt, Artificial Sequence
  Description of Artificial Sequence: Synthetic oligonucleotide
  Sense strand starting at position 3745 of SEQ ID NO: 1880550
agaaguagauacuauugua

SEQ ID NO: 1975757 - RNA, 19 nt, Artificial Sequence
  Description of Artificial Sequence: Synthetic oligonucleotide
  Antisense strand to SEQ ID NO: 1975756
uacaauaguaucuacuucu

SEQ ID NO: 1975758 - RNA, 19 nt, Artificial Sequence
  Description of Artificial Sequence: Synthetic oligonucleotide
  Sense strand starting at position 3748 of SEQ ID NO: 1880550
aguagauacuauuguaguu

SEQ ID NO: 1975759 - RNA, 19 nt, Artificial Sequence
  Description of Artificial Sequence: Synthetic oligonucleotide
  Antisense strand to SEQ ID NO: 1975758
aacuacaauaguaucuacu

SEQ ID NO: 1975760 - RNA, 19 nt, Artificial Sequence
  Description of Artificial Sequence: Synthetic oligonucleotide
  Sense strand starting at position 3786 of SEQ ID NO: 1880550
guugaaaucuaucuccuga

SEQ ID NO: 1975761 - RNA, 19 nt, Artificial Sequence
  Description of Artificial Sequence: Synthetic oligonucleotide
  Antisense strand to SEQ ID NO: 1975760
ucaggagauagauuucaac

SEQ ID NO: 1975762 - RNA, 19 nt, Artificial Sequence
  Description of Artificial Sequence: Synthetic oligonucleotide
  Sense strand starting at position 3889 of SEQ ID NO: 1880550
aagggccaucuguauucua

SEQ ID NO: 1975763 - RNA, 19 nt, Artificial Sequence
  Description of Artificial Sequence: Synthetic oligonucleotide
  Antisense strand to SEQ ID NO: 1975762
uagaauacagauggcccuu

SEQ ID NO: 1975764 - RNA, 19 nt, Artificial Sequence
  Description of Artificial Sequence: Synthetic oligonucleotide
  Sense strand starting at position 3892 of SEQ ID NO: 1880550
ggccaucuguauucuagca

SEQ ID NO: 1975765 - RNA, 19 nt, Artificial Sequence
  Description of Artificial Sequence: Synthetic oligonucleotide
  Antisense strand to SEQ ID NO: 1975764
ugcuagaauacagauggcc

SEQ ID NO: 1975766 - RNA, 19 nt, Artificial Sequence
  Description of Artificial Sequence: Synthetic oligonucleotide
  Sense strand starting at position 3899 of SEQ ID NO: 1880550
uguauucuagcauguauca

SEQ ID NO: 1975767 - RNA, 19 nt, Artificial Sequence
  Description of Artificial Sequence: Synthetic oligonucleotide
  Antisense strand to SEQ ID NO: 1975766
ugauacaugcuagaauaca

SEQ ID NO: 1975768 - RNA, 19 nt, Artificial Sequence
  Description of Artificial Sequence: Synthetic oligonucleotide
  Sense strand starting at position 344 of SEQ ID NO: 1880551
uuguuaaauguggaaagca

SEQ ID NO: 1975769 - RNA, 19 nt, Artificial Sequence
  Description of Artificial Sequence: Synthetic oligonucleotide
  Antisense strand to SEQ ID NO: 1975768
ugcuuuccacauuuaacaa

SEQ ID NO: 1975770 - RNA, 19 nt, Artificial Sequence
  Description of Artificial Sequence: Synthetic oligonucleotide
  Sense strand starting at position 378 of SEQ ID NO: 1880551
uuaguauacuaccuggaau

SEQ ID NO: 1975771 - RNA, 19 nt, Artificial Sequence
  Description of Artificial Sequence: Synthetic oligonucleotide
  Antisense strand to SEQ ID NO: 1975770
auuccagguaguauacuaa

SEQ ID NO: 1975772 - RNA, 19 nt, Artificial Sequence
  Description of Artificial Sequence: Synthetic oligonucleotide
  Sense strand starting at position 380 of SEQ ID NO: 1880551
aguauacuaccuggaauug

SEQ ID NO: 1975773 - RNA, 19 nt, Artificial Sequence
  Description of Artificial Sequence: Synthetic oligonucleotide
  Antisense strand to SEQ ID NO: 1975772
caauuccagguaguauacu

SEQ ID NO: 1975774 - RNA, 19 nt, Artificial Sequence
  Description of Artificial Sequence: Synthetic oligonucleotide
  Sense strand starting at position 450 of SEQ ID NO: 1880551
uuuguugugguacagacau

SEQ ID NO: 1975775 - RNA, 19 nt, Artificial Sequence
  Description of Artificial Sequence: Synthetic oligonucleotide
  Antisense strand to SEQ ID NO: 1975774
augucuguaccacaacaaa

SEQ ID NO: 1975776 - RNA, 19 nt, Artificial Sequence
  Description of Artificial Sequence: Synthetic oligonucleotide
  Sense strand starting at position 1187 of SEQ ID NO: 1880551
ugaucaaucugguccauca

SEQ ID NO: 1975777 - RNA, 19 nt, Artificial Sequence
  Description of Artificial Sequence: Synthetic oligonucleotide
  Antisense strand to SEQ ID NO: 1975776
ugauggaccagauugauca

SEQ ID NO: 1975778 - RNA, 19 nt, Artificial Sequence
  Description of Artificial Sequence: Synthetic oligonucleotide
  Sense strand starting at position 1287 of SEQ ID NO: 1880551
uuaguccuaccaugacuua

SEQ ID NO: 1975779 - RNA, 19 nt, Artificial Sequence
  Description of Artificial Sequence: Synthetic oligonucleotide
  Antisense strand to SEQ ID NO: 1975778
uaagucaugguaggacuaa

SEQ ID NO: 1975780 - RNA, 19 nt, Artificial Sequence
  Description of Artificial Sequence: Synthetic oligonucleotide
  Sense strand starting at position 1357 of SEQ ID NO: 1880551
guauauuaaugagccuuaa

SEQ ID NO: 1975781 - RNA, 19 nt, Artificial Sequence
  Description of Artificial Sequence: Synthetic oligonucleotide
  Antisense strand to SEQ ID NO: 1975780
uuaaggcucauuaauauac

SEQ ID NO: 1975782 - RNA, 19 nt, Artificial Sequence
  Description of Artificial Sequence: Synthetic oligonucleotide
  Sense strand starting at position 1457 of SEQ ID NO: 1880551
aaaucauaguagcuugaga

SEQ ID NO: 1975783 - RNA, 19 nt, Artificial Sequence
  Description of Artificial Sequence: Synthetic oligonucleotide
  Antisense strand to SEQ ID NO: 1975782
ucucaagcuacuaugauuu

SEQ ID NO: 1975784 - RNA, 19 nt, Artificial Sequence
  Description of Artificial Sequence: Synthetic oligonucleotide
  Sense strand starting at position 1459 of SEQ ID NO: 1880551
aucauaguagcuugagauc

SEQ ID NO: 1975785 - RNA, 19 nt, Artificial Sequence
  Description of Artificial Sequence: Synthetic oligonucleotide
  Antisense strand to SEQ ID NO: 1975784
gaucucaagcuacuaugau

SEQ ID NO: 1975786 - RNA, 19 nt, Artificial Sequence
  Description of Artificial Sequence: Synthetic oligonucleotide
  Sense strand starting at position 1465 of SEQ ID NO: 1880551
guagcuugagaucaaaucu

SEQ ID NO: 1975787 - RNA, 19 nt, Artificial Sequence
  Description of Artificial Sequence: Synthetic oligonucleotide
  Antisense strand to SEQ ID NO: 1975786
agauuugaucucaagcuac

SEQ ID NO: 1975788 - RNA, 19 nt, Artificial Sequence
  Description of Artificial Sequence: Synthetic oligonucleotide
  Sense strand starting at position 1817 of SEQ ID NO: 1880551
ucaguagaagcuuaucaac

SEQ ID NO: 1975789 - RNA, 19 nt, Artificial Sequence
  Description of Artificial Sequence: Synthetic oligonucleotide
  Antisense strand to SEQ ID NO: 1975788
guugauaagcuucuacuga

SEQ ID NO: 1975790 - RNA, 19 nt, Artificial Sequence
  Description of Artificial Sequence: Synthetic oligonucleotide
  Sense strand starting at position 1819 of SEQ ID NO: 1880551
aguagaagcuuaucaacac

SEQ ID NO: 1975791 - RNA, 19 nt, Artificial Sequence
  Description of Artificial Sequence: Synthetic oligonucleotide
  Antisense strand to SEQ ID NO: 1975790
guguugauaagcuucuacu

SEQ ID NO: 1975792 - RNA, 19 nt, Artificial Sequence
  Description of Artificial Sequence: Synthetic oligonucleotide
  Sense strand starting at position 2003 of SEQ ID NO: 1880551
gguaauaaacuugggcuga

SEQ ID NO: 1975793 - RNA, 19 nt, Artificial Sequence
  Description of Artificial Sequence: Synthetic oligonucleotide
  Antisense strand to SEQ ID NO: 1975792
ucagcccaaguuuauuacc

SEQ ID NO: 1975794 - RNA, 19 nt, Artificial Sequence
  Description of Artificial Sequence: Synthetic oligonucleotide
  Sense strand starting at position 2408 of SEQ ID NO: 1880551
uggaaauaugcuuaguugu

SEQ ID NO: 1975795 - RNA, 19 nt, Artificial Sequence
  Description of Artificial Sequence: Synthetic oligonucleotide
  Antisense strand to SEQ ID NO: 1975794
acaacuaagcauauuucca

SEQ ID NO: 1975796 - RNA, 19 nt, Artificial Sequence
  Description of Artificial Sequence: Synthetic oligonucleotide
  Sense strand starting at position 2421 of SEQ ID NO: 1880551
aguuguguccauuauugag

SEQ ID NO: 1975797 - RNA, 19 nt, Artificial Sequence
  Description of Artificial Sequence: Synthetic oligonucleotide
  Antisense strand to SEQ ID NO: 1975796
cucaauaauggacacaacu

SEQ ID NO: 1975798 - RNA, 19 nt, Artificial Sequence
  Description of Artificial Sequence: Synthetic oligonucleotide
  Sense strand starting at position 2423 of SEQ ID NO: 1880551
uuguguccauuauugagau

SEQ ID NO: 1975799 - RNA, 19 nt, Artificial Sequence
  Description of Artificial Sequence: Synthetic oligonucleotide
  Antisense strand to SEQ ID NO: 1975798
aucucaauaauggacacaa

SEQ ID NO: 1975800 - RNA, 19 nt, Artificial Sequence
  Description of Artificial Sequence: Synthetic oligonucleotide
  Sense strand starting at position 2452 of SEQ ID NO: 1880551
ugagaauuagucugacaua

SEQ ID NO: 1975801 - RNA, 19 nt, Artificial Sequence
  Description of Artificial Sequence: Synthetic oligonucleotide
  Antisense strand to SEQ ID NO: 1975800
uaugucagacuaauucuca

SEQ ID NO: 1975802 - RNA, 19 nt, Artificial Sequence
  Description of Artificial Sequence: Synthetic oligonucleotide
  Sense strand starting at position 2616 of SEQ ID NO: 1880551
acaaauucguuugcagaga

SEQ ID NO: 1975803 - RNA, 19 nt, Artificial Sequence
  Description of Artificial Sequence: Synthetic oligonucleotide
  Antisense strand to SEQ ID NO: 1975802
ucucugcaaacgaauuugu

SEQ ID NO: 1975804 - RNA, 19 nt, Artificial Sequence
  Description of Artificial Sequence: Synthetic oligonucleotide
  Sense strand starting at position 2692 of SEQ ID NO: 1880551
ggcacaugauaaucucauu

SEQ ID NO: 1975805 - RNA, 19 nt, Artificial Sequence
  Description of Artificial Sequence: Synthetic oligonucleotide
  Antisense strand to SEQ ID NO: 1975804
aaugagauuaucaugugcc

SEQ ID NO: 1975806 - RNA, 19 nt, Artificial Sequence
  Description of Artificial Sequence: Synthetic oligonucleotide
  Sense strand starting at position 2698 of SEQ ID NO: 1880551
ugauaaucucauugccaug

SEQ ID NO: 1975807 - RNA, 19 nt, Artificial Sequence
  Description of Artificial Sequence: Synthetic oligonucleotide
  Antisense strand to SEQ ID NO: 1975806
cauggcaaugagauuauca

SEQ ID NO: 1975808 - RNA, 19 nt, Artificial Sequence
  Description of Artificial Sequence: Synthetic oligonucleotide
  Sense strand starting at position 2710 of SEQ ID NO: 1880551
ugccaugaccuccagucau

SEQ ID NO: 1975809 - RNA, 19 nt, Artificial Sequence
  Description of Artificial Sequence: Synthetic oligonucleotide
  Antisense strand to SEQ ID NO: 1975808
augacuggaggucauggca

SEQ ID NO: 1975810 - RNA, 19 nt, Artificial Sequence
  Description of Artificial Sequence: Synthetic oligonucleotide
  Sense strand starting at position 2771 of SEQ ID NO: 1880551
uguguugguauguacauuu

SEQ ID NO: 1975811 - RNA, 19 nt, Artificial Sequence
  Description of Artificial Sequence: Synthetic oligonucleotide
  Antisense strand to SEQ ID NO: 1975810
aaauguacauaccaacaca

SEQ ID NO: 1975812 - RNA, 19 nt, Artificial Sequence
  Description of Artificial Sequence: Synthetic oligonucleotide
  Sense strand starting at position 2836 of SEQ ID NO: 1880551
gguauuguucuccagacau

SEQ ID NO: 1975813 - RNA, 19 nt, Artificial Sequence
  Description of Artificial Sequence: Synthetic oligonucleotide
  Antisense strand to SEQ ID NO: 1975812
augucuggagaacaauacc

SEQ ID NO: 1975814 - RNA, 19 nt, Artificial Sequence
  Description of Artificial Sequence: Synthetic oligonucleotide
  Sense strand starting at position 3013 of SEQ ID NO: 1880551
cuauauuaucugcaggcuu

SEQ ID NO: 1975815 - RNA, 19 nt, Artificial Sequence
  Description of Artificial Sequence: Synthetic oligonucleotide
  Antisense strand to SEQ ID NO: 1975814
aagccugcagauaauauag

SEQ ID NO: 1975816 - RNA, 19 nt, Artificial Sequence
  Description of Artificial Sequence: Synthetic oligonucleotide
  Sense strand starting at position 3174 of SEQ ID NO: 1880551
ugggcuuuacuguaauauu

SEQ ID NO: 1975817 - RNA, 19 nt, Artificial Sequence
  Description of Artificial Sequence: Synthetic oligonucleotide
  Antisense strand to SEQ ID NO: 1975816
aauauuacaguaaagccca

SEQ ID NO: 1975818 - RNA, 19 nt, Artificial Sequence
  Description of Artificial Sequence: Synthetic oligonucleotide
  Sense strand starting at position 3222 of SEQ ID NO: 1880551
ugagccuucuauucugaga

SEQ ID NO: 1975819 - RNA, 19 nt, Artificial Sequence
  Description of Artificial Sequence: Synthetic oligonucleotide
  Antisense strand to SEQ ID NO: 1975818
ucucagaauagaaggcuca

SEQ ID NO: 1975820 - RNA, 19 nt, Artificial Sequence
  Description of Artificial Sequence: Synthetic oligonucleotide
  Sense strand starting at position 3275 of SEQ ID NO: 1880551
auuccugcaucucugaaga

SEQ ID NO: 1975821 - RNA, 19 nt, Artificial Sequence
  Description of Artificial Sequence: Synthetic oligonucleotide
  Antisense strand to SEQ ID NO: 1975820
ucuucagagaugcaggaau

SEQ ID NO: 1975822 - RNA, 19 nt, Artificial Sequence
  Description of Artificial Sequence: Synthetic oligonucleotide
  Sense strand starting at position 3331 of SEQ ID NO: 1880551
gguugugaaagucauaaau

SEQ ID NO: 1975823 - RNA, 19 nt, Artificial Sequence
  Description of Artificial Sequence: Synthetic oligonucleotide
  Antisense strand to SEQ ID NO: 1975822
auuuaugacuuucacaacc

SEQ ID NO: 1975824 - RNA, 19 nt, Artificial Sequence
  Description of Artificial Sequence: Synthetic oligonucleotide
  Sense strand starting at position 3340 of SEQ ID NO: 1880551
agucauaaaucugugucaa

SEQ ID NO: 1975825 - RNA, 19 nt, Artificial Sequence
  Description of Artificial Sequence: Synthetic oligonucleotide
  Antisense strand to SEQ ID NO: 1975824
uugacacagauuuaugacu

SEQ ID NO: 1975826 - RNA, 19 nt, Artificial Sequence
  Description of Artificial Sequence: Synthetic oligonucleotide
  Sense strand starting at position 3341 of SEQ ID NO: 1880551
gucauaaaucugugucaaa

SEQ ID NO: 1975827 - RNA, 19 nt, Artificial Sequence
  Description of Artificial Sequence: Synthetic oligonucleotide
  Antisense strand to SEQ ID NO: 1975826
uuugacacagauuuaugac

SEQ ID NO: 1975828 - RNA, 19 nt, Artificial Sequence
  Description of Artificial Sequence: Synthetic oligonucleotide
  Sense strand starting at position 3342 of SEQ ID NO: 1880551
ucauaaaucugugucaaau

SEQ ID NO: 1975829 - RNA, 19 nt, Artificial Sequence
  Description of Artificial Sequence: Synthetic oligonucleotide
  Antisense strand to SEQ ID NO: 1975828
auuugacacagauuuauga

SEQ ID NO: 1975830 - RNA, 19 nt, Artificial Sequence
  Description of Artificial Sequence: Synthetic oligonucleotide
  Sense strand starting at position 3455 of SEQ ID NO: 1880551
augcucauuuaggauaaca

SEQ ID NO: 1975831 - RNA, 19 nt, Artificial Sequence
  Description of Artificial Sequence: Synthetic oligonucleotide
  Antisense strand to SEQ ID NO: 1975830
uguuauccuaaaugagcau

SEQ ID NO: 1975832 - RNA, 19 nt, Artificial Sequence
  Description of Artificial Sequence: Synthetic oligonucleotide
  Sense strand starting at position 3584 of SEQ ID NO: 1880551
caucuuacacgugauaggu

SEQ ID NO: 1975833 - RNA, 19 nt, Artificial Sequence
  Description of Artificial Sequence: Synthetic oligonucleotide
  Antisense strand to SEQ ID NO: 1975832
accuaucacguguaagaug

SEQ ID NO: 1975834 - RNA, 19 nt, Artificial Sequence
  Description of Artificial Sequence: Synthetic oligonucleotide
  Sense strand starting at position 3664 of SEQ ID NO: 1880551
ugccgauggaccuauaacu

SEQ ID NO: 1975835 - RNA, 19 nt, Artificial Sequence
  Description of Artificial Sequence: Synthetic oligonucleotide
  Antisense strand to SEQ ID NO: 1975834
aguuauagguccaucggca

SEQ ID NO: 1975836 - RNA, 19 nt, Artificial Sequence
  Description of Artificial Sequence: Synthetic oligonucleotide
  Sense strand starting at position 3802 of SEQ ID NO: 1880551
gcauauuaaggauguggaa

SEQ ID NO: 1975837 - RNA, 19 nt, Artificial Sequence
  Description of Artificial Sequence: Synthetic oligonucleotide
  Antisense strand to SEQ ID NO: 1975836
uuccacauccuuaauaugc

SEQ ID NO: 1975838 - RNA, 19 nt, Artificial Sequence
  Description of Artificial Sequence: Synthetic oligonucleotide
  Sense strand starting at position 3837 of SEQ ID NO: 1880551
aagaaaugagaucgguuua

SEQ ID NO: 1975839 - RNA, 19 nt, Artificial Sequence
  Description of Artificial Sequence: Synthetic oligonucleotide
  Antisense strand to SEQ ID NO: 1975838
uaaaccgaucucauuucuu

SEQ ID NO: 1975840 - RNA, 19 nt, Artificial Sequence
  Description of Artificial Sequence: Synthetic oligonucleotide
  Sense strand starting at position 3838 of SEQ ID NO: 1880551
agaaaugagaucgguuuag

SEQ ID NO: 1975841 - RNA, 19 nt, Artificial Sequence
  Description of Artificial Sequence: Synthetic oligonucleotide
  Antisense strand to SEQ ID NO: 1975840
cuaaaccgaucucauuucu

SEQ ID NO: 1975842 - RNA, 19 nt, Artificial Sequence
  Description of Artificial Sequence: Synthetic oligonucleotide
  Sense strand starting at position 3869 of SEQ ID NO: 1880551
gggcccauuaaguagacau

SEQ ID NO: 1975843 - RNA, 19 nt, Artificial Sequence
  Description of Artificial Sequence: Synthetic oligonucleotide
  Antisense strand to SEQ ID NO: 1975842
augucuacuuaaugggccc

SEQ ID NO: 1975844 - RNA, 19 nt, Artificial Sequence
  Description of Artificial Sequence: Synthetic oligonucleotide
  Sense strand starting at position 3928 of SEQ ID NO: 1880551
auacuaaauucuguguuga

SEQ ID NO: 1975845 - RNA, 19 nt, Artificial Sequence
  Description of Artificial Sequence: Synthetic oligonucleotide
  Antisense strand to SEQ ID NO: 1975844
ucaacacagaauuuaguau

SEQ ID NO: 1975846 - RNA, 19 nt, Artificial Sequence
  Description of Artificial Sequence: Synthetic oligonucleotide
  Sense strand starting at position 3930 of SEQ ID NO: 1880551
acuaaauucuguguugaua

SEQ ID NO: 1975847 - RNA, 19 nt, Artificial Sequence
  Description of Artificial Sequence: Synthetic oligonucleotide
  Antisense strand to SEQ ID NO: 1975846
uaucaacacagaauuuagu

SEQ ID NO: 1975848 - RNA, 19 nt, Artificial Sequence
  Description of Artificial Sequence: Synthetic oligonucleotide
  Sense strand starting at position 54 of SEQ ID NO: 1880552
ggacuuuaacacugugaaa

SEQ ID NO: 1975849 - RNA, 19 nt, Artificial Sequence
  Description of Artificial Sequence: Synthetic oligonucleotide
  Antisense strand to SEQ ID NO: 1975848
uuucacaguguuaaagucc

SEQ ID NO: 1975850 - RNA, 19 nt, Artificial Sequence
  Description of Artificial Sequence: Synthetic oligonucleotide
  Sense strand starting at position 112 of SEQ ID NO: 1880552
agggcucugagugauaguu

SEQ ID NO: 1975851 - RNA, 19 nt, Artificial Sequence
  Description of Artificial Sequence: Synthetic oligonucleotide
  Antisense strand to SEQ ID NO: 1975850
aacuaucacucagagcccu

SEQ ID NO: 1975852 - RNA, 19 nt, Artificial Sequence
  Description of Artificial Sequence: Synthetic oligonucleotide
  Sense strand starting at position 147 of SEQ ID NO: 1880552
acugaaacaugggaagaaa

SEQ ID NO: 1975853 - RNA, 19 nt, Artificial Sequence
  Description of Artificial Sequence: Synthetic oligonucleotide
  Antisense strand to SEQ ID NO: 1975852
uuucuucccauguuucagu

SEQ ID NO: 1975854 - RNA, 19 nt, Artificial Sequence
  Description of Artificial Sequence: Synthetic oligonucleotide
  Sense strand starting at position 284 of SEQ ID NO: 1880552
auguaaucucaccaguuaa

SEQ ID NO: 1975855 - RNA, 19 nt, Artificial Sequence
  Description of Artificial Sequence: Synthetic oligonucleotide
  Antisense strand to SEQ ID NO: 1975854
uuaacuggugagauuacau

SEQ ID NO: 1975856 - RNA, 19 nt, Artificial Sequence
  Description of Artificial Sequence: Synthetic oligonucleotide
  Sense strand starting at position 295 of SEQ ID NO: 1880552
ccaguuaagagauggugau

SEQ ID NO: 1975857 - RNA, 19 nt, Artificial Sequence
  Description of Artificial Sequence: Synthetic oligonucleotide
  Antisense strand to SEQ ID NO: 1975856
aucaccaucucuuaacugg

SEQ ID NO: 1975858 - RNA, 19 nt, Artificial Sequence
  Description of Artificial Sequence: Synthetic oligonucleotide
  Sense strand starting at position 296 of SEQ ID NO: 1880552
caguuaagagauggugauu

SEQ ID NO: 1975859 - RNA, 19 nt, Artificial Sequence
  Description of Artificial Sequence: Synthetic oligonucleotide
  Antisense strand to SEQ ID NO: 1975858
aaucaccaucucuuaacug

SEQ ID NO: 1975860 - RNA, 19 nt, Artificial Sequence
  Description of Artificial Sequence: Synthetic oligonucleotide
  Sense strand starting at position 302 of SEQ ID NO: 1880552
agagauggugauuguaaau

SEQ ID NO: 1975861 - RNA, 19 nt, Artificial Sequence
  Description of Artificial Sequence: Synthetic oligonucleotide
  Antisense strand to SEQ ID NO: 1975860
auuuacaaucaccaucucu

SEQ ID NO: 1975862 - RNA, 19 nt, Artificial Sequence
  Description of Artificial Sequence: Synthetic oligonucleotide
  Sense strand starting at position 542 of SEQ ID NO: 1880552
aacauucuugcaggugaaa

SEQ ID NO: 1975863 - RNA, 19 nt, Artificial Sequence
  Description of Artificial Sequence: Synthetic oligonucleotide
  Antisense strand to SEQ ID NO: 1975862
uuucaccugcaagaauguu

SEQ ID NO: 1975864 - RNA, 19 nt, Artificial Sequence
  Description of Artificial Sequence: Synthetic oligonucleotide
  Sense strand starting at position 587 of SEQ ID NO: 1880552
uacgauaaguuccuaaaug

SEQ ID NO: 1975865 - RNA, 19 nt, Artificial Sequence
  Description of Artificial Sequence: Synthetic oligonucleotide
  Antisense strand to SEQ ID NO: 1975864
cauuuaggaacuuaucgua

SEQ ID NO: 1975866 - RNA, 19 nt, Artificial Sequence
  Description of Artificial Sequence: Synthetic oligonucleotide
  Sense strand starting at position 603 of SEQ ID NO: 1880552
augugaaguuacuuuacca

SEQ ID NO: 1975867 - RNA, 19 nt, Artificial Sequence
  Description of Artificial Sequence: Synthetic oligonucleotide
  Antisense strand to SEQ ID NO: 1975866
ugguaaaguaacuucacau

SEQ ID NO: 1975868 - RNA, 19 nt, Artificial Sequence
  Description of Artificial Sequence: Synthetic oligonucleotide
  Sense strand starting at position 728 of SEQ ID NO: 1880552
cccauaugaauguggguga

SEQ ID NO: 1975869 - RNA, 19 nt, Artificial Sequence
  Description of Artificial Sequence: Synthetic oligonucleotide
  Antisense strand to SEQ ID NO: 1975868
ucacccacauucauauggg

SEQ ID NO: 1975870 - RNA, 19 nt, Artificial Sequence
  Description of Artificial Sequence: Synthetic oligonucleotide
  Sense strand starting at position 964 of SEQ ID NO: 1880552
uuuaaaguugaaggguaaa

SEQ ID NO: 1975871 - RNA, 19 nt, Artificial Sequence
  Description of Artificial Sequence: Synthetic oligonucleotide
  Antisense strand to SEQ ID NO: 1975870
uuuacccuucaacuuuaaa

SEQ ID NO: 1975872 - RNA, 19 nt, Artificial Sequence
  Description of Artificial Sequence: Synthetic oligonucleotide
  Sense strand starting at position 1009 of SEQ ID NO: 1880552
acaggaugguuugcaauca

SEQ ID NO: 1975873 - RNA, 19 nt, Artificial Sequence
  Description of Artificial Sequence: Synthetic oligonucleotide
  Antisense strand to SEQ ID NO: 1975872
ugauugcaaaccauccugu

SEQ ID NO: 1975874 - RNA, 19 nt, Artificial Sequence
  Description of Artificial Sequence: Synthetic oligonucleotide
  Sense strand starting at position 1329 of SEQ ID NO: 1880552
gcuaaucuacagugaagaa

SEQ ID NO: 1975875 - RNA, 19 nt, Artificial Sequence
  Description of Artificial Sequence: Synthetic oligonucleotide
  Antisense strand to SEQ ID NO: 1975874
uucuucacuguagauuagc

SEQ ID NO: 1975876 - RNA, 19 nt, Artificial Sequence
  Description of Artificial Sequence: Synthetic oligonucleotide
  Sense strand starting at position 1373 of SEQ ID NO: 1880552
uugggagagguuuggucua

SEQ ID NO: 1975877 - RNA, 19 nt, Artificial Sequence
  Description of Artificial Sequence: Synthetic oligonucleotide
  Antisense strand to SEQ ID NO: 1975876
uagaccaaaccucucccaa

SEQ ID NO: 1975878 - RNA, 19 nt, Artificial Sequence
  Description of Artificial Sequence: Synthetic oligonucleotide
  Sense strand starting at position 1375 of SEQ ID NO: 1880552
gggagagguuuggucuaua

SEQ ID NO: 1975879 - RNA, 19 nt, Artificial Sequence
  Description of Artificial Sequence: Synthetic oligonucleotide
  Antisense strand to SEQ ID NO: 1975878
uauagaccaaaccucuccc

SEQ ID NO: 1975880 - RNA, 19 nt, Artificial Sequence
  Description of Artificial Sequence: Synthetic oligonucleotide
  Sense strand starting at position 1504 of SEQ ID NO: 1880552
ggagcaaagcuauauaccu

SEQ ID NO: 1975881 - RNA, 19 nt, Artificial Sequence
  Description of Artificial Sequence: Synthetic oligonucleotide
  Antisense strand to SEQ ID NO: 1975880
agguauauagcuuugcucc

SEQ ID NO: 1975882 - RNA, 19 nt, Artificial Sequence
  Description of Artificial Sequence: Synthetic oligonucleotide
  Sense strand starting at position 1730 of SEQ ID NO: 1880552
cugacuuaguacuccacau

SEQ ID NO: 1975883 - RNA, 19 nt, Artificial Sequence
  Description of Artificial Sequence: Synthetic oligonucleotide
  Antisense strand to SEQ ID NO: 1975882
auguggaguacuaagucag

SEQ ID NO: 1975884 - RNA, 19 nt, Artificial Sequence
  Description of Artificial Sequence: Synthetic oligonucleotide
  Sense strand starting at position 1830 of SEQ ID NO: 1880552
caacuaaugcgauggaaau

SEQ ID NO: 1975885 - RNA, 19 nt, Artificial Sequence
  Description of Artificial Sequence: Synthetic oligonucleotide
  Antisense strand to SEQ ID NO: 1975884
auuuccaucgcauuaguug

SEQ ID NO: 1975886 - RNA, 19 nt, Artificial Sequence
  Description of Artificial Sequence: Synthetic oligonucleotide
  Sense strand starting at position 1831 of SEQ ID NO: 1880552
aacuaaugcgauggaaaua

SEQ ID NO: 1975887 - RNA, 19 nt, Artificial Sequence
  Description of Artificial Sequence: Synthetic oligonucleotide
  Antisense strand to SEQ ID NO: 1975886
uauuuccaucgcauuaguu

SEQ ID NO: 1975888 - RNA, 19 nt, Artificial Sequence
  Description of Artificial Sequence: Synthetic oligonucleotide
  Sense strand starting at position 1990 of SEQ ID NO: 1880552
cugguaucucuuggaagaa

SEQ ID NO: 1975889 - RNA, 19 nt, Artificial Sequence
  Description of Artificial Sequence: Synthetic oligonucleotide
  Antisense strand to SEQ ID NO: 1975888
uucuuccaagagauaccag

SEQ ID NO: 1975890 - RNA, 19 nt, Artificial Sequence
  Description of Artificial Sequence: Synthetic oligonucleotide
  Sense strand starting at position 2026 of SEQ ID NO: 1880552
guugaagugugauuugcaa

SEQ ID NO: 1975891 - RNA, 19 nt, Artificial Sequence
  Description of Artificial Sequence: Synthetic oligonucleotide
  Antisense strand to SEQ ID NO: 1975890
uugcaaaucacacuucaac

SEQ ID NO: 1975892 - RNA, 19 nt, Artificial Sequence
  Description of Artificial Sequence: Synthetic oligonucleotide
  Sense strand starting at position 2072 of SEQ ID NO: 1880552
aguggaaaguagagggauu

SEQ ID NO: 1975893 - RNA, 19 nt, Artificial Sequence
  Description of Artificial Sequence: Synthetic oligonucleotide
  Antisense strand to SEQ ID NO: 1975892
aaucccucuacuuuccacu

SEQ ID NO: 1975894 - RNA, 19 nt, Artificial Sequence
  Description of Artificial Sequence: Synthetic oligonucleotide
  Sense strand starting at position 2244 of SEQ ID NO: 1880552
uuuauauguguccaaauac

SEQ ID NO: 1975895 - RNA, 19 nt, Artificial Sequence
  Description of Artificial Sequence: Synthetic oligonucleotide
  Antisense strand to SEQ ID NO: 1975894
guauuuggacacauauaaa

SEQ ID NO: 1975896 - RNA, 19 nt, Artificial Sequence
  Description of Artificial Sequence: Synthetic oligonucleotide
  Sense strand starting at position 2279 of SEQ ID NO: 1880552
acauguaugcccuauauca

SEQ ID NO: 1975897 - RNA, 19 nt, Artificial Sequence
  Description of Artificial Sequence: Synthetic oligonucleotide
  Antisense strand to SEQ ID NO: 1975896
ugauauagggcauacaugu

SEQ ID NO: 1975898 - RNA, 19 nt, Artificial Sequence
  Description of Artificial Sequence: Synthetic oligonucleotide
  Sense strand starting at position 2358 of SEQ ID NO: 1880552
agagaagaaugugauuucu

SEQ ID NO: 1975899 - RNA, 19 nt, Artificial Sequence
  Description of Artificial Sequence: Synthetic oligonucleotide
  Antisense strand to SEQ ID NO: 1975898
agaaaucacauucuucucu

SEQ ID NO: 1975900 - RNA, 19 nt, Artificial Sequence
  Description of Artificial Sequence: Synthetic oligonucleotide
  Sense strand starting at position 2483 of SEQ ID NO: 1880552
uuuguauugcguuuguacu

SEQ ID NO: 1975901 - RNA, 19 nt, Artificial Sequence
  Description of Artificial Sequence: Synthetic oligonucleotide
  Antisense strand to SEQ ID NO: 1975900
aguacaaacgcaauacaaa

SEQ ID NO: 1975902 - RNA, 19 nt, Artificial Sequence
  Description of Artificial Sequence: Synthetic oligonucleotide
  Sense strand starting at position 2543 of SEQ ID NO: 1880552
caugaauuauggucugauc

SEQ ID NO: 1975903 - RNA, 19 nt, Artificial Sequence
  Description of Artificial Sequence: Synthetic oligonucleotide
  Antisense strand to SEQ ID NO: 1975902
gaucagaccauaauucaug

SEQ ID NO: 1975904 - RNA, 19 nt, Artificial Sequence
  Description of Artificial Sequence: Synthetic oligonucleotide
  Sense strand starting at position 2545 of SEQ ID NO: 1880552
ugaauuauggucugaucac

SEQ ID NO: 1975905 - RNA, 19 nt, Artificial Sequence
  Description of Artificial Sequence: Synthetic oligonucleotide
  Antisense strand to SEQ ID NO: 1975904
gugaucagaccauaauuca

SEQ ID NO: 1975906 - RNA, 19 nt, Artificial Sequence
  Description of Artificial Sequence: Synthetic oligonucleotide
  Sense strand starting at position 2716 of SEQ ID NO: 1880552
ugcccagaaugauucugaa

SEQ ID NO: 1975907 - RNA, 19 nt, Artificial Sequence
  Description of Artificial Sequence: Synthetic oligonucleotide
  Antisense strand to SEQ ID NO: 1975906
uucagaaucauucugggca

SEQ ID NO: 1975908 - RNA, 19 nt, Artificial Sequence
  Description of Artificial Sequence: Synthetic oligonucleotide
  Sense strand starting at position 2789 of SEQ ID NO: 1880552
cuauaacaguaucuggaau

SEQ ID NO: 1975909 - RNA, 19 nt, Artificial Sequence
  Description of Artificial Sequence: Synthetic oligonucleotide
  Antisense strand to SEQ ID NO: 1975908
auuccagauacuguuauag

SEQ ID NO: 1975910 - RNA, 19 nt, Artificial Sequence
  Description of Artificial Sequence: Synthetic oligonucleotide
  Sense strand starting at position 2833 of SEQ ID NO: 1880552
aaaugcauacgugagaaau

SEQ ID NO: 1975911 - RNA, 19 nt, Artificial Sequence
  Description of Artificial Sequence: Synthetic oligonucleotide
  Antisense strand to SEQ ID NO: 1975910
auuucucacguaugcauuu

SEQ ID NO: 1975912 - RNA, 19 nt, Artificial Sequence
  Description of Artificial Sequence: Synthetic oligonucleotide
  Sense strand starting at position 2839 of SEQ ID NO: 1880552
auacgugagaaauauugua

SEQ ID NO: 1975913 - RNA, 19 nt, Artificial Sequence
  Description of Artificial Sequence: Synthetic oligonucleotide
  Antisense strand to SEQ ID NO: 1975912
uacaauauuucucacguau

SEQ ID NO: 1975914 - RNA, 19 nt, Artificial Sequence
  Description of Artificial Sequence: Synthetic oligonucleotide
  Sense strand starting at position 2962 of SEQ ID NO: 1880552
ggacccuuugguggacuua

SEQ ID NO: 1975915 - RNA, 19 nt, Artificial Sequence
  Description of Artificial Sequence: Synthetic oligonucleotide
  Antisense strand to SEQ ID NO: 1975914
uaaguccaccaaagggucc

SEQ ID NO: 1975916 - RNA, 19 nt, Artificial Sequence
  Description of Artificial Sequence: Synthetic oligonucleotide
  Sense strand starting at position 2974 of SEQ ID NO: 1880552
ggacuuaaucucgagccuu

SEQ ID NO: 1975917 - RNA, 19 nt, Artificial Sequence
  Description of Artificial Sequence: Synthetic oligonucleotide
  Antisense strand to SEQ ID NO: 1975916
aaggcucgagauuaagucc

SEQ ID NO: 1975918 - RNA, 19 nt, Artificial Sequence
  Description of Artificial Sequence: Synthetic oligonucleotide
  Sense strand starting at position 3248 of SEQ ID NO: 1880552
gcaagugugauagaaauua

SEQ ID NO: 1975919 - RNA, 19 nt, Artificial Sequence
  Description of Artificial Sequence: Synthetic oligonucleotide
  Antisense strand to SEQ ID NO: 1975918
uaauuucuaucacacuugc

SEQ ID NO: 1975920 - RNA, 19 nt, Artificial Sequence
  Description of Artificial Sequence: Synthetic oligonucleotide
  Sense strand starting at position 3301 of SEQ ID NO: 1880552
agcuuaacuguguauagaa

SEQ ID NO: 1975921 - RNA, 19 nt, Artificial Sequence
  Description of Artificial Sequence: Synthetic oligonucleotide
  Antisense strand to SEQ ID NO: 1975920
uucuauacacaguuaagcu

SEQ ID NO: 1975922 - RNA, 19 nt, Artificial Sequence
  Description of Artificial Sequence: Synthetic oligonucleotide
  Sense strand starting at position 3303 of SEQ ID NO: 1880552
cuuaacuguguauagaagu

SEQ ID NO: 1975923 - RNA, 19 nt, Artificial Sequence
  Description of Artificial Sequence: Synthetic oligonucleotide
  Antisense strand to SEQ ID NO: 1975922
acuucuauacacaguuaag

SEQ ID NO: 1975924 - RNA, 19 nt, Artificial Sequence
  Description of Artificial Sequence: Synthetic oligonucleotide
  Sense strand starting at position 3310 of SEQ ID NO: 1880552
guguauagaaguuaggacu

SEQ ID NO: 1975925 - RNA, 19 nt, Artificial Sequence
  Description of Artificial Sequence: Synthetic oligonucleotide
  Antisense strand to SEQ ID NO: 1975924
aguccuaacuucuauacac

SEQ ID NO: 1975926 - RNA, 19 nt, Artificial Sequence
  Description of Artificial Sequence: Synthetic oligonucleotide
  Sense strand starting at position 3323 of SEQ ID NO: 1880552
aggacuagccauuauucca

SEQ ID NO: 1975927 - RNA, 19 nt, Artificial Sequence
  Description of Artificial Sequence: Synthetic oligonucleotide
  Antisense strand to SEQ ID NO: 1975926
uggaauaauggcuaguccu

SEQ ID NO: 1975928 - RNA, 19 nt, Artificial Sequence
  Description of Artificial Sequence: Synthetic oligonucleotide
  Sense strand starting at position 439 of SEQ ID NO: 1880553
auuagaauacgcuauuaug

SEQ ID NO: 1975929 - RNA, 19 nt, Artificial Sequence
  Description of Artificial Sequence: Synthetic oligonucleotide
  Antisense strand to SEQ ID NO: 1975928
cauaauagcguauucuaau

SEQ ID NO: 1975930 - RNA, 19 nt, Artificial Sequence
  Description of Artificial Sequence: Synthetic oligonucleotide
  Sense strand starting at position 632 of SEQ ID NO: 1880553
acaaucucugccgaucaga

SEQ ID NO: 1975931 - RNA, 19 nt, Artificial Sequence
  Description of Artificial Sequence: Synthetic oligonucleotide
  Antisense strand to SEQ ID NO: 1975930
ucugaucggcagagauugu

SEQ ID NO: 1975932 - RNA, 19 nt, Artificial Sequence
  Description of Artificial Sequence: Synthetic oligonucleotide
  Sense strand starting at position 635 of SEQ ID NO: 1880553
aucucugccgaucagauaa

SEQ ID NO: 1975933 - RNA, 19 nt, Artificial Sequence
  Description of Artificial Sequence: Synthetic oligonucleotide
  Antisense strand to SEQ ID NO: 1975932
uuaucugaucggcagagau

SEQ ID NO: 1975934 - RNA, 19 nt, Artificial Sequence
  Description of Artificial Sequence: Synthetic oligonucleotide
  Sense strand starting at position 783 of SEQ ID NO: 1880553
aauaacuggcacugaugua

SEQ ID NO: 1975935 - RNA, 19 nt, Artificial Sequence
  Description of Artificial Sequence: Synthetic oligonucleotide
  Antisense strand to SEQ ID NO: 1975934
uacaucagugccaguuauu

SEQ ID NO: 1975936 - RNA, 19 nt, Artificial Sequence
  Description of Artificial Sequence: Synthetic oligonucleotide
  Sense strand starting at position 1377 of SEQ ID NO: 1880553
uugcaaagauauguaucua

SEQ ID NO: 1975937 - RNA, 19 nt, Artificial Sequence
  Description of Artificial Sequence: Synthetic oligonucleotide
  Antisense strand to SEQ ID NO: 1975936
uagauacauaucuuugcaa

SEQ ID NO: 1975938 - RNA, 19 nt, Artificial Sequence
  Description of Artificial Sequence: Synthetic oligonucleotide
  Sense strand starting at position 1442 of SEQ ID NO: 1880553
uugauaauugauugaugug

SEQ ID NO: 1975939 - RNA, 19 nt, Artificial Sequence
  Description of Artificial Sequence: Synthetic oligonucleotide
  Antisense strand to SEQ ID NO: 1975938
cacaucaaucaauuaucaa

SEQ ID NO: 1975940 - RNA, 19 nt, Artificial Sequence
  Description of Artificial Sequence: Synthetic oligonucleotide
  Sense strand starting at position 1518 of SEQ ID NO: 1880553
gaugcucuauaucuugaga

SEQ ID NO: 1975941 - RNA, 19 nt, Artificial Sequence
  Description of Artificial Sequence: Synthetic oligonucleotide
  Antisense strand to SEQ ID NO: 1975940
ucucaagauauagagcauc

SEQ ID NO: 1975942 - RNA, 19 nt, Artificial Sequence
  Description of Artificial Sequence: Synthetic oligonucleotide
  Sense strand starting at position 1543 of SEQ ID NO: 1880553
acucauagauaucuaguca

SEQ ID NO: 1975943 - RNA, 19 nt, Artificial Sequence
  Description of Artificial Sequence: Synthetic oligonucleotide
  Antisense strand to SEQ ID NO: 1975942
ugacuagauaucuaugagu

SEQ ID NO: 1975944 - RNA, 19 nt, Artificial Sequence
  Description of Artificial Sequence: Synthetic oligonucleotide
  Sense strand starting at position 1592 of SEQ ID NO: 1880553
cuccuaggauagguuauua

SEQ ID NO: 1975945 - RNA, 19 nt, Artificial Sequence
  Description of Artificial Sequence: Synthetic oligonucleotide
  Antisense strand to SEQ ID NO: 1975944
uaauaaccuauccuaggag

SEQ ID NO: 1975946 - RNA, 19 nt, Artificial Sequence
  Description of Artificial Sequence: Synthetic oligonucleotide
  Sense strand starting at position 1596 of SEQ ID NO: 1880553
uaggauagguuauuaugca

SEQ ID NO: 1975947 - RNA, 19 nt, Artificial Sequence
  Description of Artificial Sequence: Synthetic oligonucleotide
  Antisense strand to SEQ ID NO: 1975946
ugcauaauaaccuauccua

SEQ ID NO: 1975948 - RNA, 19 nt, Artificial Sequence
  Description of Artificial Sequence: Synthetic oligonucleotide
  Sense strand starting at position 1630 of SEQ ID NO: 1880553
aauagaaauuguguguaac

SEQ ID NO: 1975949 - RNA, 19 nt, Artificial Sequence
  Description of Artificial Sequence: Synthetic oligonucleotide
  Antisense strand to SEQ ID NO: 1975948
guuacacacaauuucuauu

SEQ ID NO: 1975950 - RNA, 19 nt, Artificial Sequence
  Description of Artificial Sequence: Synthetic oligonucleotide
  Sense strand starting at position 1633 of SEQ ID NO: 1880553
agaaauuguguguaaccaa

SEQ ID NO: 1975951 - RNA, 19 nt, Artificial Sequence
  Description of Artificial Sequence: Synthetic oligonucleotide
  Antisense strand to SEQ ID NO: 1975950
uugguuacacacaauuucu

SEQ ID NO: 1975952 - RNA, 19 nt, Artificial Sequence
  Description of Artificial Sequence: Synthetic oligonucleotide
  Sense strand starting at position 1713 of SEQ ID NO: 1880553
ucagguaaugcucacagaa

SEQ ID NO: 1975953 - RNA, 19 nt, Artificial Sequence
  Description of Artificial Sequence: Synthetic oligonucleotide
  Antisense strand to SEQ ID NO: 1975952
uucugugagcauuaccuga

SEQ ID NO: 1975954 - RNA, 19 nt, Artificial Sequence
  Description of Artificial Sequence: Synthetic oligonucleotide
  Sense strand starting at position 1760 of SEQ ID NO: 1880553
aacacuaauucguuuggga

SEQ ID NO: 1975955 - RNA, 19 nt, Artificial Sequence
  Description of Artificial Sequence: Synthetic oligonucleotide
  Antisense strand to SEQ ID NO: 1975954
ucccaaacgaauuaguguu

SEQ ID NO: 1975956 - RNA, 19 nt, Artificial Sequence
  Description of Artificial Sequence: Synthetic oligonucleotide
  Sense strand starting at position 1762 of SEQ ID NO: 1880553
cacuaauucguuugggaaa

SEQ ID NO: 1975957 - RNA, 19 nt, Artificial Sequence
  Description of Artificial Sequence: Synthetic oligonucleotide
  Antisense strand to SEQ ID NO: 1975956
uuucccaaacgaauuagug

SEQ ID NO: 1975958 - RNA, 19 nt, Artificial Sequence
  Description of Artificial Sequence: Synthetic oligonucleotide
  Sense strand starting at position 1931 of SEQ ID NO: 1880553
ugauauaaaugugucucua

SEQ ID NO: 1975959 - RNA, 19 nt, Artificial Sequence
  Description of Artificial Sequence: Synthetic oligonucleotide
  Antisense strand to SEQ ID NO: 1975958
uagagacacauuuauauca

SEQ ID NO: 1975960 - RNA, 19 nt, Artificial Sequence
  Description of Artificial Sequence: Synthetic oligonucleotide
  Sense strand starting at position 1935 of SEQ ID NO: 1880553
auaaaugugucucuaaaga

SEQ ID NO: 1975961 - RNA, 19 nt, Artificial Sequence
  Description of Artificial Sequence: Synthetic oligonucleotide
  Antisense strand to SEQ ID NO: 1975960
ucuuuagagacacauuuau

SEQ ID NO: 1975962 - RNA, 19 nt, Artificial Sequence
  Description of Artificial Sequence: Synthetic oligonucleotide
  Sense strand starting at position 2051 of SEQ ID NO: 1880553
uugaauaauguaggcagaa

SEQ ID NO: 1975963 - RNA, 19 nt, Artificial Sequence
  Description of Artificial Sequence: Synthetic oligonucleotide
  Antisense strand to SEQ ID NO: 1975962
uucugccuacauuauucaa

SEQ ID NO: 1975964 - RNA, 19 nt, Artificial Sequence
  Description of Artificial Sequence: Synthetic oligonucleotide
  Sense strand starting at position 2052 of SEQ ID NO: 1880553
ugaauaauguaggcagaau

SEQ ID NO: 1975965 - RNA, 19 nt, Artificial Sequence
  Description of Artificial Sequence: Synthetic oligonucleotide
  Antisense strand to SEQ ID NO: 1975964
auucugccuacauuauuca

SEQ ID NO: 1975966 - RNA, 19 nt, Artificial Sequence
  Description of Artificial Sequence: Synthetic oligonucleotide
  Sense strand starting at position 2065 of SEQ ID NO: 1880553
cagaauauguuaguguaga

SEQ ID NO: 1975967 - RNA, 19 nt, Artificial Sequence
  Description of Artificial Sequence: Synthetic oligonucleotide
  Antisense strand to SEQ ID NO: 1975966
ucuacacuaacauauucug

SEQ ID NO: 1975968 - RNA, 19 nt, Artificial Sequence
  Description of Artificial Sequence: Synthetic oligonucleotide
  Sense strand starting at position 2246 of SEQ ID NO: 1880553
gugggcuuucaugugugua

SEQ ID NO: 1975969 - RNA, 19 nt, Artificial Sequence
  Description of Artificial Sequence: Synthetic oligonucleotide
  Antisense strand to SEQ ID NO: 1975968
uacacacaugaaagcccac

SEQ ID NO: 1975970 - RNA, 19 nt, Artificial Sequence
  Description of Artificial Sequence: Synthetic oligonucleotide
  Sense strand starting at position 2260 of SEQ ID NO: 1880553
guguauauuugaguccauu

SEQ ID NO: 1975971 - RNA, 19 nt, Artificial Sequence
  Description of Artificial Sequence: Synthetic oligonucleotide
  Antisense strand to SEQ ID NO: 1975970
aauggacucaaauauacac

SEQ ID NO: 1975972 - RNA, 19 nt, Artificial Sequence
  Description of Artificial Sequence: Synthetic oligonucleotide
  Sense strand starting at position 2420 of SEQ ID NO: 1880553
auaaguaaguuggcaauca

SEQ ID NO: 1975973 - RNA, 19 nt, Artificial Sequence
  Description of Artificial Sequence: Synthetic oligonucleotide
  Antisense strand to SEQ ID NO: 1975972
ugauugccaacuuacuuau

SEQ ID NO: 1975974 - RNA, 19 nt, Artificial Sequence
  Description of Artificial Sequence: Synthetic oligonucleotide
  Sense strand starting at position 2458 of SEQ ID NO: 1880553
caguuauagguaugggaca

SEQ ID NO: 1975975 - RNA, 19 nt, Artificial Sequence
  Description of Artificial Sequence: Synthetic oligonucleotide
  Antisense strand to SEQ ID NO: 1975974
ugucccauaccuauaacug

SEQ ID NO: 1975976 - RNA, 19 nt, Artificial Sequence
  Description of Artificial Sequence: Synthetic oligonucleotide
  Sense strand starting at position 2460 of SEQ ID NO: 1880553
guuauagguaugggacaaa

SEQ ID NO: 1975977 - RNA, 19 nt, Artificial Sequence
  Description of Artificial Sequence: Synthetic oligonucleotide
  Antisense strand to SEQ ID NO: 1975976
uuugucccauaccuauaac

SEQ ID NO: 1975978 - RNA, 19 nt, Artificial Sequence
  Description of Artificial Sequence: Synthetic oligonucleotide
  Sense strand starting at position 2471 of SEQ ID NO: 1880553
gggacaaauuuacagacuu

SEQ ID NO: 1975979 - RNA, 19 nt, Artificial Sequence
  Description of Artificial Sequence: Synthetic oligonucleotide
  Antisense strand to SEQ ID NO: 1975978
aagucuguaaauuuguccc

SEQ ID NO: 1975980 - RNA, 19 nt, Artificial Sequence
  Description of Artificial Sequence: Synthetic oligonucleotide
  Sense strand starting at position 2602 of SEQ ID NO: 1880553
uguuacuagguguaaucau

SEQ ID NO: 1975981 - RNA, 19 nt, Artificial Sequence
  Description of Artificial Sequence: Synthetic oligonucleotide
  Antisense strand to SEQ ID NO: 1975980
augauuacaccuaguaaca

SEQ ID NO: 1975982 - RNA, 19 nt, Artificial Sequence
  Description of Artificial Sequence: Synthetic oligonucleotide
  Sense strand starting at position 2609 of SEQ ID NO: 1880553
agguguaaucauugauaag

SEQ ID NO: 1975983 - RNA, 19 nt, Artificial Sequence
  Description of Artificial Sequence: Synthetic oligonucleotide
  Antisense strand to SEQ ID NO: 1975982
cuuaucaaugauuacaccu

SEQ ID NO: 1975984 - RNA, 19 nt, Artificial Sequence
  Description of Artificial Sequence: Synthetic oligonucleotide
  Sense strand starting at position 2630 of SEQ ID NO: 1880553
uccagucaugucuauaauu

SEQ ID NO: 1975985 - RNA, 19 nt, Artificial Sequence
  Description of Artificial Sequence: Synthetic oligonucleotide
  Antisense strand to SEQ ID NO: 1975984
aauuauagacaugacugga

SEQ ID NO: 1975986 - RNA, 19 nt, Artificial Sequence
  Description of Artificial Sequence: Synthetic oligonucleotide
  Sense strand starting at position 2702 of SEQ ID NO: 1880553
cugauuauauguuuaccau

SEQ ID NO: 1975987 - RNA, 19 nt, Artificial Sequence
  Description of Artificial Sequence: Synthetic oligonucleotide
  Antisense strand to SEQ ID NO: 1975986
augguaaacauauaaucag

SEQ ID NO: 1975988 - RNA, 19 nt, Artificial Sequence
  Description of Artificial Sequence: Synthetic oligonucleotide
  Sense strand starting at position 2835 of SEQ ID NO: 1880553
guguguuaugaggauauau

SEQ ID NO: 1975989 - RNA, 19 nt, Artificial Sequence
  Description of Artificial Sequence: Synthetic oligonucleotide
  Antisense strand to SEQ ID NO: 1975988
auauauccucauaacacac

SEQ ID NO: 1975990 - RNA, 19 nt, Artificial Sequence
  Description of Artificial Sequence: Synthetic oligonucleotide
  Sense strand starting at position 2837 of SEQ ID NO: 1880553
guguuaugaggauauauug

SEQ ID NO: 1975991 - RNA, 19 nt, Artificial Sequence
  Description of Artificial Sequence: Synthetic oligonucleotide
  Antisense strand to SEQ ID NO: 1975990
caauauauccucauaacac

SEQ ID NO: 1975992 - RNA, 19 nt, Artificial Sequence
  Description of Artificial Sequence: Synthetic oligonucleotide
  Sense strand starting at position 2846 of SEQ ID NO: 1880553
ggauauauugcauaauagu

SEQ ID NO: 1975993 - RNA, 19 nt, Artificial Sequence
  Description of Artificial Sequence: Synthetic oligonucleotide
  Antisense strand to SEQ ID NO: 1975992
acuauuaugcaauauaucc

SEQ ID NO: 1975994 - RNA, 19 nt, Artificial Sequence
  Description of Artificial Sequence: Synthetic oligonucleotide
  Sense strand starting at position 2930 of SEQ ID NO: 1880553
auguuaguccuuuauagga

SEQ ID NO: 1975995 - RNA, 19 nt, Artificial Sequence
  Description of Artificial Sequence: Synthetic oligonucleotide
  Antisense strand to SEQ ID NO: 1975994
uccuauaaaggacuaacau

SEQ ID NO: 1975996 - RNA, 19 nt, Artificial Sequence
  Description of Artificial Sequence: Synthetic oligonucleotide
  Sense strand starting at position 3006 of SEQ ID NO: 1880553
ucuuuaacugugcagaaga

SEQ ID NO: 1975997 - RNA, 19 nt, Artificial Sequence
  Description of Artificial Sequence: Synthetic oligonucleotide
  Antisense strand to SEQ ID NO: 1975996
ucuucugcacaguuaaaga

SEQ ID NO: 1975998 - RNA, 19 nt, Artificial Sequence
  Description of Artificial Sequence: Synthetic oligonucleotide
  Sense strand starting at position 3008 of SEQ ID NO: 1880553
uuuaacugugcagaagauu

SEQ ID NO: 1975999 - RNA, 19 nt, Artificial Sequence
  Description of Artificial Sequence: Synthetic oligonucleotide
  Antisense strand to SEQ ID NO: 1975998
aaucuucugcacaguuaaa

SEQ ID NO: 1976000 - RNA, 19 nt, Artificial Sequence
  Description of Artificial Sequence: Synthetic oligonucleotide
  Sense strand starting at position 3209 of SEQ ID NO: 1880553
uacagugaaagguaugagu

SEQ ID NO: 1976001 - RNA, 19 nt, Artificial Sequence
  Description of Artificial Sequence: Synthetic oligonucleotide
  Antisense strand to SEQ ID NO: 1976000
acucauaccuuucacugua

SEQ ID NO: 1976002 - RNA, 19 nt, Artificial Sequence
  Description of Artificial Sequence: Synthetic oligonucleotide
  Sense strand starting at position 3677 of SEQ ID NO: 1880553
ucauuugugucaucuacga

SEQ ID NO: 1976003 - RNA, 19 nt, Artificial Sequence
  Description of Artificial Sequence: Synthetic oligonucleotide
  Antisense strand to SEQ ID NO: 1976002
ucguagaugacacaaauga

SEQ ID NO: 1976004 - RNA, 19 nt, Artificial Sequence
  Description of Artificial Sequence: Synthetic oligonucleotide
  Sense strand starting at position 3681 of SEQ ID NO: 1880553
uugugucaucuacgauuua

SEQ ID NO: 1976005 - RNA, 19 nt, Artificial Sequence
  Description of Artificial Sequence: Synthetic oligonucleotide
  Antisense strand to SEQ ID NO: 1976004
uaaaucguagaugacacaa

SEQ ID NO: 1976006 - RNA, 19 nt, Artificial Sequence
  Description of Artificial Sequence: Synthetic oligonucleotide
  Sense strand starting at position 3791 of SEQ ID NO: 1880553
gugaaugcgauugaauucu

SEQ ID NO: 1976007 - RNA, 19 nt, Artificial Sequence
  Description of Artificial Sequence: Synthetic oligonucleotide
  Antisense strand to SEQ ID NO: 1976006
agaauucaaucgcauucac

SEQ ID NO: 1976008 - RNA, 19 nt, Artificial Sequence
  Description of Artificial Sequence: Synthetic oligonucleotide
  Sense strand starting at position 127 of SEQ ID NO: 1880554
uacuguagaccucagugaa

SEQ ID NO: 1976009 - RNA, 19 nt, Artificial Sequence
  Description of Artificial Sequence: Synthetic oligonucleotide
  Antisense strand to SEQ ID NO: 1976008
uucacugaggucuacagua

SEQ ID NO: 1976010 - RNA, 19 nt, Artificial Sequence
  Description of Artificial Sequence: Synthetic oligonucleotide
  Sense strand starting at position 208 of SEQ ID NO: 1880554
acccucugugaguacauaa

SEQ ID NO: 1976011 - RNA, 19 nt, Artificial Sequence
  Description of Artificial Sequence: Synthetic oligonucleotide
  Antisense strand to SEQ ID NO: 1976010
uuauguacucacagagggu

SEQ ID NO: 1976012 - RNA, 19 nt, Artificial Sequence
  Description of Artificial Sequence: Synthetic oligonucleotide
  Sense strand starting at position 242 of SEQ ID NO: 1880554
gaagaaguguuguuauaaa

SEQ ID NO: 1976013 - RNA, 19 nt, Artificial Sequence
  Description of Artificial Sequence: Synthetic oligonucleotide
  Antisense strand to SEQ ID NO: 1976012
uuuauaacaacacuucuuc

SEQ ID NO: 1976014 - RNA, 19 nt, Artificial Sequence
  Description of Artificial Sequence: Synthetic oligonucleotide
  Sense strand starting at position 299 of SEQ ID NO: 1880554
ccuaguuuaagaggaaggu

SEQ ID NO: 1976015 - RNA, 19 nt, Artificial Sequence
  Description of Artificial Sequence: Synthetic oligonucleotide
  Antisense strand to SEQ ID NO: 1976014
accuuccucuuaaacuagg

SEQ ID NO: 1976016 - RNA, 19 nt, Artificial Sequence
  Description of Artificial Sequence: Synthetic oligonucleotide
  Sense strand starting at position 390 of SEQ ID NO: 1880554
gcacaauagcugcaaguaa

SEQ ID NO: 1976017 - RNA, 19 nt, Artificial Sequence
  Description of Artificial Sequence: Synthetic oligonucleotide
  Antisense strand to SEQ ID NO: 1976016
uuacuugcagcuauugugc

SEQ ID NO: 1976018 - RNA, 19 nt, Artificial Sequence
  Description of Artificial Sequence: Synthetic oligonucleotide
  Sense strand starting at position 418 of SEQ ID NO: 1880554
aggucagaguaucuuaaac

SEQ ID NO: 1976019 - RNA, 19 nt, Artificial Sequence
  Description of Artificial Sequence: Synthetic oligonucleotide
  Antisense strand to SEQ ID NO: 1976018
guuuaagauacucugaccu

SEQ ID NO: 1976020 - RNA, 19 nt, Artificial Sequence
  Description of Artificial Sequence: Synthetic oligonucleotide
  Sense strand starting at position 619 of SEQ ID NO: 1880554
agauuauguucuucccuga

SEQ ID NO: 1976021 - RNA, 19 nt, Artificial Sequence
  Description of Artificial Sequence: Synthetic oligonucleotide
  Antisense strand to SEQ ID NO: 1976020
ucagggaagaacauaaucu

SEQ ID NO: 1976022 - RNA, 19 nt, Artificial Sequence
  Description of Artificial Sequence: Synthetic oligonucleotide
  Sense strand starting at position 822 of SEQ ID NO: 1880554
uggcuauaguaucccauuu

SEQ ID NO: 1976023 - RNA, 19 nt, Artificial Sequence
  Description of Artificial Sequence: Synthetic oligonucleotide
  Antisense strand to SEQ ID NO: 1976022
aaaugggauacuauagcca

SEQ ID NO: 1976024 - RNA, 19 nt, Artificial Sequence
  Description of Artificial Sequence: Synthetic oligonucleotide
  Sense strand starting at position 942 of SEQ ID NO: 1880554
cuuacuguauuaucagagu

SEQ ID NO: 1976025 - RNA, 19 nt, Artificial Sequence
  Description of Artificial Sequence: Synthetic oligonucleotide
  Antisense strand to SEQ ID NO: 1976024
acucugauaauacaguaag

SEQ ID NO: 1976026 - RNA, 19 nt, Artificial Sequence
  Description of Artificial Sequence: Synthetic oligonucleotide
  Sense strand starting at position 1024 of SEQ ID NO: 1880554
auugacucgugauuaugga

SEQ ID NO: 1976027 - RNA, 19 nt, Artificial Sequence
  Description of Artificial Sequence: Synthetic oligonucleotide
  Antisense strand to SEQ ID NO: 1976026
uccauaaucacgagucaau

SEQ ID NO: 1976028 - RNA, 19 nt, Artificial Sequence
  Description of Artificial Sequence: Synthetic oligonucleotide
  Sense strand starting at position 1366 of SEQ ID NO: 1880554
ccacuaauuucugugucuu

SEQ ID NO: 1976029 - RNA, 19 nt, Artificial Sequence
  Description of Artificial Sequence: Synthetic oligonucleotide
  Antisense strand to SEQ ID NO: 1976028
aagacacagaaauuagugg

SEQ ID NO: 1976030 - RNA, 19 nt, Artificial Sequence
  Description of Artificial Sequence: Synthetic oligonucleotide
  Sense strand starting at position 1372 of SEQ ID NO: 1880554
auuucugugucuucuauac

SEQ ID NO: 1976031 - RNA, 19 nt, Artificial Sequence
  Description of Artificial Sequence: Synthetic oligonucleotide
  Antisense strand to SEQ ID NO: 1976030
guauagaagacacagaaau

SEQ ID NO: 1976032 - RNA, 19 nt, Artificial Sequence
  Description of Artificial Sequence: Synthetic oligonucleotide
  Sense strand starting at position 1515 of SEQ ID NO: 1880554
ccauuucuaugggauacaa

SEQ ID NO: 1976033 - RNA, 19 nt, Artificial Sequence
  Description of Artificial Sequence: Synthetic oligonucleotide
  Antisense strand to SEQ ID NO: 1976032
uuguaucccauagaaaugg

SEQ ID NO: 1976034 - RNA, 19 nt, Artificial Sequence
  Description of Artificial Sequence: Synthetic oligonucleotide
  Sense strand starting at position 1606 of SEQ ID NO: 1880554
ccuucuuauccaggagaug

SEQ ID NO: 1976035 - RNA, 19 nt, Artificial Sequence
  Description of Artificial Sequence: Synthetic oligonucleotide
  Antisense strand to SEQ ID NO: 1976034
caucuccuggauaagaagg

SEQ ID NO: 1976036 - RNA, 19 nt, Artificial Sequence
  Description of Artificial Sequence: Synthetic oligonucleotide
  Sense strand starting at position 1843 of SEQ ID NO: 1880554
gagggaugagauugucuca

SEQ ID NO: 1976037 - RNA, 19 nt, Artificial Sequence
  Description of Artificial Sequence: Synthetic oligonucleotide
  Antisense strand to SEQ ID NO: 1976036
ugagacaaucucaucccuc

SEQ ID NO: 1976038 - RNA, 19 nt, Artificial Sequence
  Description of Artificial Sequence: Synthetic oligonucleotide
  Sense strand starting at position 1852 of SEQ ID NO: 1880554
gauugucucacgggagaag

SEQ ID NO: 1976039 - RNA, 19 nt, Artificial Sequence
  Description of Artificial Sequence: Synthetic oligonucleotide
  Antisense strand to SEQ ID NO: 1976038
cuucucccgugagacaauc

SEQ ID NO: 1976040 - RNA, 19 nt, Artificial Sequence
  Description of Artificial Sequence: Synthetic oligonucleotide
  Sense strand starting at position 2041 of SEQ ID NO: 1880554
cagggaagcacugaguguu

SEQ ID NO: 1976041 - RNA, 19 nt, Artificial Sequence
  Description of Artificial Sequence: Synthetic oligonucleotide
  Antisense strand to SEQ ID NO: 1976040
aacacucagugcuucccug

SEQ ID NO: 1976042 - RNA, 19 nt, Artificial Sequence
  Description of Artificial Sequence: Synthetic oligonucleotide
  Sense strand starting at position 2353 of SEQ ID NO: 1880554
gguuacugcuaauccauga

SEQ ID NO: 1976043 - RNA, 19 nt, Artificial Sequence
  Description of Artificial Sequence: Synthetic oligonucleotide
  Antisense strand to SEQ ID NO: 1976042
ucauggauuagcaguaacc

SEQ ID NO: 1976044 - RNA, 19 nt, Artificial Sequence
  Description of Artificial Sequence: Synthetic oligonucleotide
  Sense strand starting at position 2357 of SEQ ID NO: 1880554
acugcuaauccaugacaug

SEQ ID NO: 1976045 - RNA, 19 nt, Artificial Sequence
  Description of Artificial Sequence: Synthetic oligonucleotide
  Antisense strand to SEQ ID NO: 1976044
caugucauggauuagcagu

SEQ ID NO: 1976046 - RNA, 19 nt, Artificial Sequence
  Description of Artificial Sequence: Synthetic oligonucleotide
  Sense strand starting at position 2448 of SEQ ID NO: 1880554
uuguuagauauggagucuu

SEQ ID NO: 1976047 - RNA, 19 nt, Artificial Sequence
  Description of Artificial Sequence: Synthetic oligonucleotide
  Antisense strand to SEQ ID NO: 1976046
aagacuccauaucuaacaa

SEQ ID NO: 1976048 - RNA, 19 nt, Artificial Sequence
  Description of Artificial Sequence: Synthetic oligonucleotide
  Sense strand starting at position 2459 of SEQ ID NO: 1880554
ggagucuugcccuaucacu

SEQ ID NO: 1976049 - RNA, 19 nt, Artificial Sequence
  Description of Artificial Sequence: Synthetic oligonucleotide
  Antisense strand to SEQ ID NO: 1976048
agugauagggcaagacucc

SEQ ID NO: 1976050 - RNA, 19 nt, Artificial Sequence
  Description of Artificial Sequence: Synthetic oligonucleotide
  Sense strand starting at position 2551 of SEQ ID NO: 1880554
gcuggaucuauaggaguga

SEQ ID NO: 1976051 - RNA, 19 nt, Artificial Sequence
  Description of Artificial Sequence: Synthetic oligonucleotide
  Antisense strand to SEQ ID NO: 1976050
ucacuccuauagauccagc

SEQ ID NO: 1976052 - RNA, 19 nt, Artificial Sequence
  Description of Artificial Sequence: Synthetic oligonucleotide
  Sense strand starting at position 2555 of SEQ ID NO: 1880554
gaucuauaggagugagcca

SEQ ID NO: 1976053 - RNA, 19 nt, Artificial Sequence
  Description of Artificial Sequence: Synthetic oligonucleotide
  Antisense strand to SEQ ID NO: 1976052
uggcucacuccuauagauc

SEQ ID NO: 1976054 - RNA, 19 nt, Artificial Sequence
  Description of Artificial Sequence: Synthetic oligonucleotide
  Sense strand starting at position 2635 of SEQ ID NO: 1880554
aaauaaaguggucaaugca

SEQ ID NO: 1976055 - RNA, 19 nt, Artificial Sequence
  Description of Artificial Sequence: Synthetic oligonucleotide
  Antisense strand to SEQ ID NO: 1976054
ugcauugaccacuuuauuu

SEQ ID NO: 1976056 - RNA, 19 nt, Artificial Sequence
  Description of Artificial Sequence: Synthetic oligonucleotide
  Sense strand starting at position 2663 of SEQ ID NO: 1880554
cguaauagugaugaugacu

SEQ ID NO: 1976057 - RNA, 19 nt, Artificial Sequence
  Description of Artificial Sequence: Synthetic oligonucleotide
  Antisense strand to SEQ ID NO: 1976056
agucaucaucacuauuacg

SEQ ID NO: 1976058 - RNA, 19 nt, Artificial Sequence
  Description of Artificial Sequence: Synthetic oligonucleotide
  Sense strand starting at position 2668 of SEQ ID NO: 1880554
uagugaugaugacuacuaa

SEQ ID NO: 1976059 - RNA, 19 nt, Artificial Sequence
  Description of Artificial Sequence: Synthetic oligonucleotide
  Antisense strand to SEQ ID NO: 1976058
uuaguagucaucaucacua

SEQ ID NO: 1976060 - RNA, 19 nt, Artificial Sequence
  Description of Artificial Sequence: Synthetic oligonucleotide
  Sense strand starting at position 2721 of SEQ ID NO: 1880554
gcacuagauugcuuauaga

SEQ ID NO: 1976061 - RNA, 19 nt, Artificial Sequence
  Description of Artificial Sequence: Synthetic oligonucleotide
  Antisense strand to SEQ ID NO: 1976060
ucuauaagcaaucuagugc

SEQ ID NO: 1976062 - RNA, 19 nt, Artificial Sequence
  Description of Artificial Sequence: Synthetic oligonucleotide
  Sense strand starting at position 2889 of SEQ ID NO: 1880554
ccagaauuacaauguaagu

SEQ ID NO: 1976063 - RNA, 19 nt, Artificial Sequence
  Description of Artificial Sequence: Synthetic oligonucleotide
  Antisense strand to SEQ ID NO: 1976062
acuuacauuguaauucugg

SEQ ID NO: 1976064 - RNA, 19 nt, Artificial Sequence
  Description of Artificial Sequence: Synthetic oligonucleotide
  Sense strand starting at position 2951 of SEQ ID NO: 1880554
acaugaucuuguguauauu

SEQ ID NO: 1976065 - RNA, 19 nt, Artificial Sequence
  Description of Artificial Sequence: Synthetic oligonucleotide
  Antisense strand to SEQ ID NO: 1976064
aauauacacaagaucaugu

SEQ ID NO: 1976066 - RNA, 19 nt, Artificial Sequence
  Description of Artificial Sequence: Synthetic oligonucleotide
  Sense strand starting at position 3013 of SEQ ID NO: 1880554
uagggauauuuggguagau

SEQ ID NO: 1976067 - RNA, 19 nt, Artificial Sequence
  Description of Artificial Sequence: Synthetic oligonucleotide
  Antisense strand to SEQ ID NO: 1976066
aucuacccaaauaucccua

SEQ ID NO: 1976068 - RNA, 19 nt, Artificial Sequence
  Description of Artificial Sequence: Synthetic oligonucleotide
  Sense strand starting at position 3442 of SEQ ID NO: 1880554
uaucuugaguagcuaggaa

SEQ ID NO: 1976069 - RNA, 19 nt, Artificial Sequence
  Description of Artificial Sequence: Synthetic oligonucleotide
  Antisense strand to SEQ ID NO: 1976068
uuccuagcuacucaagaua

SEQ ID NO: 1976070 - RNA, 19 nt, Artificial Sequence
  Description of Artificial Sequence: Synthetic oligonucleotide
  Sense strand starting at position 3454 of SEQ ID NO: 1880554
cuaggaauggcucaacugu

SEQ ID NO: 1976071 - RNA, 19 nt, Artificial Sequence
  Description of Artificial Sequence: Synthetic oligonucleotide
  Antisense strand to SEQ ID NO: 1976070
acaguugagccauuccuag

SEQ ID NO: 1976072 - RNA, 19 nt, Artificial Sequence
  Description of Artificial Sequence: Synthetic oligonucleotide
  Sense strand starting at position 3510 of SEQ ID NO: 1880554
uaauguugagaauguacaa

SEQ ID NO: 1976073 - RNA, 19 nt, Artificial Sequence
  Description of Artificial Sequence: Synthetic oligonucleotide
  Antisense strand to SEQ ID NO: 1976072
uuguacauucucaacauua

SEQ ID NO: 1976074 - RNA, 19 nt, Artificial Sequence
  Description of Artificial Sequence: Synthetic oligonucleotide
  Sense strand starting at position 3554 of SEQ ID NO: 1880554
auucuacagcuuugggaua

SEQ ID NO: 1976075 - RNA, 19 nt, Artificial Sequence
  Description of Artificial Sequence: Synthetic oligonucleotide
  Antisense strand to SEQ ID NO: 1976074
uaucccaaagcuguagaau

SEQ ID NO: 1976076 - RNA, 19 nt, Artificial Sequence
  Description of Artificial Sequence: Synthetic oligonucleotide
  Sense strand starting at position 3595 of SEQ ID NO: 1880554
ugauuugcgacuuggucau

SEQ ID NO: 1976077 - RNA, 19 nt, Artificial Sequence
  Description of Artificial Sequence: Synthetic oligonucleotide
  Antisense strand to SEQ ID NO: 1976076
augaccaagucgcaaauca

SEQ ID NO: 1976078 - RNA, 19 nt, Artificial Sequence
  Description of Artificial Sequence: Synthetic oligonucleotide
  Sense strand starting at position 3658 of SEQ ID NO: 1880554
gcauuagugagagaaguac

SEQ ID NO: 1976079 - RNA, 19 nt, Artificial Sequence
  Description of Artificial Sequence: Synthetic oligonucleotide
  Antisense strand to SEQ ID NO: 1976078
guacuucucucacuaaugc

SEQ ID NO: 1976080 - RNA, 19 nt, Artificial Sequence
  Description of Artificial Sequence: Synthetic oligonucleotide
  Sense strand starting at position 3691 of SEQ ID NO: 1880554
cugugauugagguggugaa

SEQ ID NO: 1976081 - RNA, 19 nt, Artificial Sequence
  Description of Artificial Sequence: Synthetic oligonucleotide
  Antisense strand to SEQ ID NO: 1976080
uucaccaccucaaucacag

SEQ ID NO: 1976082 - RNA, 19 nt, Artificial Sequence
  Description of Artificial Sequence: Synthetic oligonucleotide
  Sense strand starting at position 3692 of SEQ ID NO: 1880554
ugugauugagguggugaau

SEQ ID NO: 1976083 - RNA, 19 nt, Artificial Sequence
  Description of Artificial Sequence: Synthetic oligonucleotide
  Antisense strand to SEQ ID NO: 1976082
auucaccaccucaaucaca

SEQ ID NO: 1976084 - RNA, 19 nt, Artificial Sequence
  Description of Artificial Sequence: Synthetic oligonucleotide
  Sense strand starting at position 3739 of SEQ ID NO: 1880554
ugaacugauaaucguugaa

SEQ ID NO: 1976085 - RNA, 19 nt, Artificial Sequence
  Description of Artificial Sequence: Synthetic oligonucleotide
  Antisense strand to SEQ ID NO: 1976084
uucaacgauuaucaguuca

SEQ ID NO: 1976086 - RNA, 19 nt, Artificial Sequence
  Description of Artificial Sequence: Synthetic oligonucleotide
  Sense strand starting at position 3914 of SEQ ID NO: 1880554
ucccuagcuuuaguggaaa

SEQ ID NO: 1976087 - RNA, 19 nt, Artificial Sequence
  Description of Artificial Sequence: Synthetic oligonucleotide
  Antisense strand to SEQ ID NO: 1976086
uuuccacuaaagcuaggga

SEQ ID NO: 1976088 - RNA, 19 nt, Artificial Sequence
  Description of Artificial Sequence: Synthetic oligonucleotide
  Sense strand starting at position 2 of SEQ ID NO: 1880555
cuagucugaccauguugaa

SEQ ID NO: 1976089 - RNA, 19 nt, Artificial Sequence
  Description of Artificial Sequence: Synthetic oligonucleotide
  Antisense strand to SEQ ID NO: 1976088
uucaacauggucagacuag

SEQ ID NO: 1976090 - RNA, 19 nt, Artificial Sequence
  Description of Artificial Sequence: Synthetic oligonucleotide
  Sense strand starting at position 72 of SEQ ID NO: 1880555
agauucugaucgccaagau

SEQ ID NO: 1976091 - RNA, 19 nt, Artificial Sequence
  Description of Artificial Sequence: Synthetic oligonucleotide
  Antisense strand to SEQ ID NO: 1976090
aucuuggcgaucagaaucu

SEQ ID NO: 1976092 - RNA, 19 nt, Artificial Sequence
  Description of Artificial Sequence: Synthetic oligonucleotide
  Sense strand starting at position 73 of SEQ ID NO: 1880555
gauucugaucgccaagauu

SEQ ID NO: 1976093 - RNA, 19 nt, Artificial Sequence
  Description of Artificial Sequence: Synthetic oligonucleotide
  Antisense strand to SEQ ID NO: 1976092
aaucuuggcgaucagaauc

SEQ ID NO: 1976094 - RNA, 19 nt, Artificial Sequence
  Description of Artificial Sequence: Synthetic oligonucleotide
  Sense strand starting at position 115 of SEQ ID NO: 1880555
ucuaucaaguuucuguaau

SEQ ID NO: 1976095 - RNA, 19 nt, Artificial Sequence
  Description of Artificial Sequence: Synthetic oligonucleotide
  Antisense strand to SEQ ID NO: 1976094
auuacagaaacuugauaga

SEQ ID NO: 1976096 - RNA, 19 nt, Artificial Sequence
  Description of Artificial Sequence: Synthetic oligonucleotide
  Sense strand starting at position 125 of SEQ ID NO: 1880555
uucuguaauuuggaagacu

SEQ ID NO: 1976097 - RNA, 19 nt, Artificial Sequence
  Description of Artificial Sequence: Synthetic oligonucleotide
  Antisense strand to SEQ ID NO: 1976096
agucuuccaaauuacagaa

SEQ ID NO: 1976098 - RNA, 19 nt, Artificial Sequence
  Description of Artificial Sequence: Synthetic oligonucleotide
  Sense strand starting at position 136 of SEQ ID NO: 1880555
ggaagacuuugagaacaga

SEQ ID NO: 1976099 - RNA, 19 nt, Artificial Sequence
  Description of Artificial Sequence: Synthetic oligonucleotide
  Antisense strand to SEQ ID NO: 1976098
ucuguucucaaagucuucc

SEQ ID NO: 1976100 - RNA, 19 nt, Artificial Sequence
  Description of Artificial Sequence: Synthetic oligonucleotide
  Sense strand starting at position 236 of SEQ ID NO: 1880555
uugugugucuugguauuua

SEQ ID NO: 1976101 - RNA, 19 nt, Artificial Sequence
  Description of Artificial Sequence: Synthetic oligonucleotide
  Antisense strand to SEQ ID NO: 1976100
uaaauaccaagacacacaa

SEQ ID NO: 1976102 - RNA, 19 nt, Artificial Sequence
  Description of Artificial Sequence: Synthetic oligonucleotide
  Sense strand starting at position 240 of SEQ ID NO: 1880555
gugucuugguauuuauguu

SEQ ID NO: 1976103 - RNA, 19 nt, Artificial Sequence
  Description of Artificial Sequence: Synthetic oligonucleotide
  Antisense strand to SEQ ID NO: 1976102
aacauaaauaccaagacac

SEQ ID NO: 1976104 - RNA, 19 nt, Artificial Sequence
  Description of Artificial Sequence: Synthetic oligonucleotide
  Sense strand starting at position 328 of SEQ ID NO: 1880555
gucuguguuaaggaacuaa

SEQ ID NO: 1976105 - RNA, 19 nt, Artificial Sequence
  Description of Artificial Sequence: Synthetic oligonucleotide
  Antisense strand to SEQ ID NO: 1976104
uuaguuccuuaacacagac

SEQ ID NO: 1976106 - RNA, 19 nt, Artificial Sequence
  Description of Artificial Sequence: Synthetic oligonucleotide
  Sense strand starting at position 375 of SEQ ID NO: 1880555
aguacauaguacucugaau

SEQ ID NO: 1976107 - RNA, 19 nt, Artificial Sequence
  Description of Artificial Sequence: Synthetic oligonucleotide
  Antisense strand to SEQ ID NO: 1976106
auucagaguacuauguacu

SEQ ID NO: 1976108 - RNA, 19 nt, Artificial Sequence
  Description of Artificial Sequence: Synthetic oligonucleotide
  Sense strand starting at position 494 of SEQ ID NO: 1880555
cagcauuagguagguuaaa

SEQ ID NO: 1976109 - RNA, 19 nt, Artificial Sequence
  Description of Artificial Sequence: Synthetic oligonucleotide
  Antisense strand to SEQ ID NO: 1976108
uuuaaccuaccuaaugcug

SEQ ID NO: 1976110 - RNA, 19 nt, Artificial Sequence
  Description of Artificial Sequence: Synthetic oligonucleotide
  Sense strand starting at position 514 of SEQ ID NO: 1880555
ugaggauauaagcaguagu

SEQ ID NO: 1976111 - RNA, 19 nt, Artificial Sequence
  Description of Artificial Sequence: Synthetic oligonucleotide
  Antisense strand to SEQ ID NO: 1976110
acuacugcuuauauccuca

SEQ ID NO: 1976112 - RNA, 19 nt, Artificial Sequence
  Description of Artificial Sequence: Synthetic oligonucleotide
  Sense strand starting at position 646 of SEQ ID NO: 1880555
gcauauucguaguuaauuu

SEQ ID NO: 1976113 - RNA, 19 nt, Artificial Sequence
  Description of Artificial Sequence: Synthetic oligonucleotide
  Antisense strand to SEQ ID NO: 1976112
aaauuaacuacgaauaugc

SEQ ID NO: 1976114 - RNA, 19 nt, Artificial Sequence
  Description of Artificial Sequence: Synthetic oligonucleotide
  Sense strand starting at position 679 of SEQ ID NO: 1880555
acugguaucuacccacuuu

SEQ ID NO: 1976115 - RNA, 19 nt, Artificial Sequence
  Description of Artificial Sequence: Synthetic oligonucleotide
  Antisense strand to SEQ ID NO: 1976114
aaaguggguagauaccagu

SEQ ID NO: 1976116 - RNA, 19 nt, Artificial Sequence
  Description of Artificial Sequence: Synthetic oligonucleotide
  Sense strand starting at position 717 of SEQ ID NO: 1880555
cuccuauguucccugacua

SEQ ID NO: 1976117 - RNA, 19 nt, Artificial Sequence
  Description of Artificial Sequence: Synthetic oligonucleotide
  Antisense strand to SEQ ID NO: 1976116
uagucagggaacauaggag

SEQ ID NO: 1976118 - RNA, 19 nt, Artificial Sequence
  Description of Artificial Sequence: Synthetic oligonucleotide
  Sense strand starting at position 718 of SEQ ID NO: 1880555
uccuauguucccugacuag

SEQ ID NO: 1976119 - RNA, 19 nt, Artificial Sequence
  Description of Artificial Sequence: Synthetic oligonucleotide
  Antisense strand to SEQ ID NO: 1976118
cuagucagggaacauagga

SEQ ID NO: 1976120 - RNA, 19 nt, Artificial Sequence
  Description of Artificial Sequence: Synthetic oligonucleotide
  Sense strand starting at position 754 of SEQ ID NO: 1880555
gucccuggaugggauuuaa

SEQ ID NO: 1976121 - RNA, 19 nt, Artificial Sequence
  Description of Artificial Sequence: Synthetic oligonucleotide
  Antisense strand to SEQ ID NO: 1976120
uuaaaucccauccagggac

SEQ ID NO: 1976122 - RNA, 19 nt, Artificial Sequence
  Description of Artificial Sequence: Synthetic oligonucleotide
  Sense strand starting at position 871 of SEQ ID NO: 1880555
acugcagauuccucaggau

SEQ ID NO: 1976123 - RNA, 19 nt, Artificial Sequence
  Description of Artificial Sequence: Synthetic oligonucleotide
  Antisense strand to SEQ ID NO: 1976122
auccugaggaaucugcagu

SEQ ID NO: 1976124 - RNA, 19 nt, Artificial Sequence
  Description of Artificial Sequence: Synthetic oligonucleotide
  Sense strand starting at position 1265 of SEQ ID NO: 1880555
uggacuggguauuagauuu

SEQ ID NO: 1976125 - RNA, 19 nt, Artificial Sequence
  Description of Artificial Sequence: Synthetic oligonucleotide
  Antisense strand to SEQ ID NO: 1976124
aaaucuaauacccagucca

SEQ ID NO: 1976126 - RNA, 19 nt, Artificial Sequence
  Description of Artificial Sequence: Synthetic oligonucleotide
  Sense strand starting at position 1544 of SEQ ID NO: 1880555
gagaacaaguacuuucgga

SEQ ID NO: 1976127 - RNA, 19 nt, Artificial Sequence
  Description of Artificial Sequence: Synthetic oligonucleotide
  Antisense strand to SEQ ID NO: 1976126
uccgaaaguacuuguucuc

SEQ ID NO: 1976128 - RNA, 19 nt, Artificial Sequence
  Description of Artificial Sequence: Synthetic oligonucleotide
  Sense strand starting at position 1813 of SEQ ID NO: 1880555
auggaaauaacuuguggca

SEQ ID NO: 1976129 - RNA, 19 nt, Artificial Sequence
  Description of Artificial Sequence: Synthetic oligonucleotide
  Antisense strand to SEQ ID NO: 1976128
ugccacaaguuauuuccau

SEQ ID NO: 1976130 - RNA, 19 nt, Artificial Sequence
  Description of Artificial Sequence: Synthetic oligonucleotide
  Sense strand starting at position 1826 of SEQ ID NO: 1880555
guggcaugacugcaaguaa

SEQ ID NO: 1976131 - RNA, 19 nt, Artificial Sequence
  Description of Artificial Sequence: Synthetic oligonucleotide
  Antisense strand to SEQ ID NO: 1976130
uuacuugcagucaugccac

SEQ ID NO: 1976132 - RNA, 19 nt, Artificial Sequence
  Description of Artificial Sequence: Synthetic oligonucleotide
  Sense strand starting at position 2467 of SEQ ID NO: 1880555
uuuguuaucuggccaggga

SEQ ID NO: 1976133 - RNA, 19 nt, Artificial Sequence
  Description of Artificial Sequence: Synthetic oligonucleotide
  Antisense strand to SEQ ID NO: 1976132
ucccuggccagauaacaaa

SEQ ID NO: 1976134 - RNA, 19 nt, Artificial Sequence
  Description of Artificial Sequence: Synthetic oligonucleotide
  Sense strand starting at position 2468 of SEQ ID NO: 1880555
uuguuaucuggccagggaa

SEQ ID NO: 1976135 - RNA, 19 nt, Artificial Sequence
  Description of Artificial Sequence: Synthetic oligonucleotide
  Antisense strand to SEQ ID NO: 1976134
uucccuggccagauaacaa

SEQ ID NO: 1976136 - RNA, 19 nt, Artificial Sequence
  Description of Artificial Sequence: Synthetic oligonucleotide
  Sense strand starting at position 2470 of SEQ ID NO: 1880555
guuaucuggccagggaaua

SEQ ID NO: 1976137 - RNA, 19 nt, Artificial Sequence
  Description of Artificial Sequence: Synthetic oligonucleotide
  Antisense strand to SEQ ID NO: 1976136
uauucccuggccagauaac

SEQ ID NO: 1976138 - RNA, 19 nt, Artificial Sequence
  Description of Artificial Sequence: Synthetic oligonucleotide
  Sense strand starting at position 2502 of SEQ ID NO: 1880555
gugggaggguuuagaaaug

SEQ ID NO: 1976139 - RNA, 19 nt, Artificial Sequence
  Description of Artificial Sequence: Synthetic oligonucleotide
  Antisense strand to SEQ ID NO: 1976138
cauuucuaaacccucccac

SEQ ID NO: 1976140 - RNA, 19 nt, Artificial Sequence
  Description of Artificial Sequence: Synthetic oligonucleotide
  Sense strand starting at position 2753 of SEQ ID NO: 1880555
ccaagagauuguucugauu

SEQ ID NO: 1976141 - RNA, 19 nt, Artificial Sequence
  Description of Artificial Sequence: Synthetic oligonucleotide
  Antisense strand to SEQ ID NO: 1976140
aaucagaacaaucucuugg

SEQ ID NO: 1976142 - RNA, 19 nt, Artificial Sequence
  Description of Artificial Sequence: Synthetic oligonucleotide
  Sense strand starting at position 2756 of SEQ ID NO: 1880555
agagauuguucugauuuac

SEQ ID NO: 1976143 - RNA, 19 nt, Artificial Sequence
  Description of Artificial Sequence: Synthetic oligonucleotide
  Antisense strand to SEQ ID NO: 1976142
guaaaucagaacaaucucu

SEQ ID NO: 1976144 - RNA, 19 nt, Artificial Sequence
  Description of Artificial Sequence: Synthetic oligonucleotide
  Sense strand starting at position 2861 of SEQ ID NO: 1880555
cguguacugccauauuuac

SEQ ID NO: 1976145 - RNA, 19 nt, Artificial Sequence
  Description of Artificial Sequence: Synthetic oligonucleotide
  Antisense strand to SEQ ID NO: 1976144
guaaauauggcaguacacg

SEQ ID NO: 1976146 - RNA, 19 nt, Artificial Sequence
  Description of Artificial Sequence: Synthetic oligonucleotide
  Sense strand starting at position 2910 of SEQ ID NO: 1880555
guaacuagacaguacugua

SEQ ID NO: 1976147 - RNA, 19 nt, Artificial Sequence
  Description of Artificial Sequence: Synthetic oligonucleotide
  Antisense strand to SEQ ID NO: 1976146
uacaguacugucuaguuac

SEQ ID NO: 1976148 - RNA, 19 nt, Artificial Sequence
  Description of Artificial Sequence: Synthetic oligonucleotide
  Sense strand starting at position 2926 of SEQ ID NO: 1880555
guaaaucuacuguaauccu

SEQ ID NO: 1976149 - RNA, 19 nt, Artificial Sequence
  Description of Artificial Sequence: Synthetic oligonucleotide
  Antisense strand to SEQ ID NO: 1976148
aggauuacaguagauuuac

SEQ ID NO: 1976150 - RNA, 19 nt, Artificial Sequence
  Description of Artificial Sequence: Synthetic oligonucleotide
  Sense strand starting at position 3227 of SEQ ID NO: 1880555
cgugccuuaaguguuauau

SEQ ID NO: 1976151 - RNA, 19 nt, Artificial Sequence
  Description of Artificial Sequence: Synthetic oligonucleotide
  Antisense strand to SEQ ID NO: 1976150
auauaacacuuaaggcacg

SEQ ID NO: 1976152 - RNA, 19 nt, Artificial Sequence
  Description of Artificial Sequence: Synthetic oligonucleotide
  Sense strand starting at position 3339 of SEQ ID NO: 1880555
guuaucuacuauguauaug

SEQ ID NO: 1976153 - RNA, 19 nt, Artificial Sequence
  Description of Artificial Sequence: Synthetic oligonucleotide
  Antisense strand to SEQ ID NO: 1976152
cauauacauaguagauaac

SEQ ID NO: 1976154 - RNA, 19 nt, Artificial Sequence
  Description of Artificial Sequence: Synthetic oligonucleotide
  Sense strand starting at position 3364 of SEQ ID NO: 1880555
aaagguacuuuagugacau

SEQ ID NO: 1976155 - RNA, 19 nt, Artificial Sequence
  Description of Artificial Sequence: Synthetic oligonucleotide
  Antisense strand to SEQ ID NO: 1976154
augucacuaaaguaccuuu

SEQ ID NO: 1976156 - RNA, 19 nt, Artificial Sequence
  Description of Artificial Sequence: Synthetic oligonucleotide
  Sense strand starting at position 3414 of SEQ ID NO: 1880555
ugaagauacaggugugaca

SEQ ID NO: 1976157 - RNA, 19 nt, Artificial Sequence
  Description of Artificial Sequence: Synthetic oligonucleotide
  Antisense strand to SEQ ID NO: 1976156
ugucacaccuguaucuuca

SEQ ID NO: 1976158 - RNA, 19 nt, Artificial Sequence
  Description of Artificial Sequence: Synthetic oligonucleotide
  Sense strand starting at position 3416 of SEQ ID NO: 1880555
aagauacaggugugacaua

SEQ ID NO: 1976159 - RNA, 19 nt, Artificial Sequence
  Description of Artificial Sequence: Synthetic oligonucleotide
  Antisense strand to SEQ ID NO: 1976158
uaugucacaccuguaucuu

SEQ ID NO: 1976160 - RNA, 19 nt, Artificial Sequence
  Description of Artificial Sequence: Synthetic oligonucleotide
  Sense strand starting at position 3532 of SEQ ID NO: 1880555
uugccaagucagcaauaaa

SEQ ID NO: 1976161 - RNA, 19 nt, Artificial Sequence
  Description of Artificial Sequence: Synthetic oligonucleotide
  Antisense strand to SEQ ID NO: 1976160
uuuauugcugacuuggcaa

SEQ ID NO: 1976162 - RNA, 19 nt, Artificial Sequence
  Description of Artificial Sequence: Synthetic oligonucleotide
  Sense strand starting at position 3663 of SEQ ID NO: 1880555
ggcuuagccagauacuguu

SEQ ID NO: 1976163 - RNA, 19 nt, Artificial Sequence
  Description of Artificial Sequence: Synthetic oligonucleotide
  Antisense strand to SEQ ID NO: 1976162
aacaguaucuggcuaagcc

SEQ ID NO: 1976164 - RNA, 19 nt, Artificial Sequence
  Description of Artificial Sequence: Synthetic oligonucleotide
  Sense strand starting at position 3717 of SEQ ID NO: 1880555
uuagguccagauugauaau

SEQ ID NO: 1976165 - RNA, 19 nt, Artificial Sequence
  Description of Artificial Sequence: Synthetic oligonucleotide
  Antisense strand to SEQ ID NO: 1976164
auuaucaaucuggaccuaa

SEQ ID NO: 1976166 - RNA, 19 nt, Artificial Sequence
  Description of Artificial Sequence: Synthetic oligonucleotide
  Sense strand starting at position 3974 of SEQ ID NO: 1880555
ucauaauuacuuugaggua

SEQ ID NO: 1976167 - RNA, 19 nt, Artificial Sequence
  Description of Artificial Sequence: Synthetic oligonucleotide
  Antisense strand to SEQ ID NO: 1976166
uaccucaaaguaauuauga

SEQ ID NO: 1976168 - RNA, 19 nt, Artificial Sequence
  Description of Artificial Sequence: Synthetic oligonucleotide
  Sense strand starting at position 165 of SEQ ID NO: 1880556
gguuaauauucugccacug

SEQ ID NO: 1976169 - RNA, 19 nt, Artificial Sequence
  Description of Artificial Sequence: Synthetic oligonucleotide
  Antisense strand to SEQ ID NO: 1976168
caguggcagaauauuaacc

SEQ ID NO: 1976170 - RNA, 19 nt, Artificial Sequence
  Description of Artificial Sequence: Synthetic oligonucleotide
  Sense strand starting at position 197 of SEQ ID NO: 1880556
cuccauccuggacaaguau

SEQ ID NO: 1976171 - RNA, 19 nt, Artificial Sequence
  Description of Artificial Sequence: Synthetic oligonucleotide
  Antisense strand to SEQ ID NO: 1976170
auacuuguccaggauggag

SEQ ID NO: 1976172 - RNA, 19 nt, Artificial Sequence
  Description of Artificial Sequence: Synthetic oligonucleotide
  Sense strand starting at position 404 of SEQ ID NO: 1880556
auuaaagagcacugucuua

SEQ ID NO: 1976173 - RNA, 19 nt, Artificial Sequence
  Description of Artificial Sequence: Synthetic oligonucleotide
  Antisense strand to SEQ ID NO: 1976172
uaagacagugcucuuuaau

SEQ ID NO: 1976174 - RNA, 19 nt, Artificial Sequence
  Description of Artificial Sequence: Synthetic oligonucleotide
  Sense strand starting at position 486 of SEQ ID NO: 1880556
agucuagaagucugagauu

SEQ ID NO: 1976175 - RNA, 19 nt, Artificial Sequence
  Description of Artificial Sequence: Synthetic oligonucleotide
  Antisense strand to SEQ ID NO: 1976174
aaucucagacuucuagacu

SEQ ID NO: 1976176 - RNA, 19 nt, Artificial Sequence
  Description of Artificial Sequence: Synthetic oligonucleotide
  Sense strand starting at position 763 of SEQ ID NO: 1880556
cccuauaaggcuuaaggca

SEQ ID NO: 1976177 - RNA, 19 nt, Artificial Sequence
  Description of Artificial Sequence: Synthetic oligonucleotide
  Antisense strand to SEQ ID NO: 1976176
ugccuuaagccuuauaggg

SEQ ID NO: 1976178 - RNA, 19 nt, Artificial Sequence
  Description of Artificial Sequence: Synthetic oligonucleotide
  Sense strand starting at position 770 of SEQ ID NO: 1880556
aggcuuaaggcagguauua

SEQ ID NO: 1976179 - RNA, 19 nt, Artificial Sequence
  Description of Artificial Sequence: Synthetic oligonucleotide
  Antisense strand to SEQ ID NO: 1976178
uaauaccugccuuaagccu

SEQ ID NO: 1976180 - RNA, 19 nt, Artificial Sequence
  Description of Artificial Sequence: Synthetic oligonucleotide
  Sense strand starting at position 772 of SEQ ID NO: 1880556
gcuuaaggcagguauuaac

SEQ ID NO: 1976181 - RNA, 19 nt, Artificial Sequence
  Description of Artificial Sequence: Synthetic oligonucleotide
  Antisense strand to SEQ ID NO: 1976180
guuaauaccugccuuaagc

SEQ ID NO: 1976182 - RNA, 19 nt, Artificial Sequence
  Description of Artificial Sequence: Synthetic oligonucleotide
  Sense strand starting at position 883 of SEQ ID NO: 1880556
ugccacaugaagcgauauu

SEQ ID NO: 1976183 - RNA, 19 nt, Artificial Sequence
  Description of Artificial Sequence: Synthetic oligonucleotide
  Antisense strand to SEQ ID NO: 1976182
aauaucgcuucauguggca

SEQ ID NO: 1976184 - RNA, 19 nt, Artificial Sequence
  Description of Artificial Sequence: Synthetic oligonucleotide
  Sense strand starting at position 890 of SEQ ID NO: 1880556
ugaagcgauauugggaaau

SEQ ID NO: 1976185 - RNA, 19 nt, Artificial Sequence
  Description of Artificial Sequence: Synthetic oligonucleotide
  Antisense strand to SEQ ID NO: 1976184
auuucccaauaucgcuuca

SEQ ID NO: 1976186 - RNA, 19 nt, Artificial Sequence
  Description of Artificial Sequence: Synthetic oligonucleotide
  Sense strand starting at position 1000 of SEQ ID NO: 1880556
ggugauaugaugcaccuga

SEQ ID NO: 1976187 - RNA, 19 nt, Artificial Sequence
  Description of Artificial Sequence: Synthetic oligonucleotide
  Antisense strand to SEQ ID NO: 1976186
ucaggugcaucauaucacc

SEQ ID NO: 1976188 - RNA, 19 nt, Artificial Sequence
  Description of Artificial Sequence: Synthetic oligonucleotide
  Sense strand starting at position 1004 of SEQ ID NO: 1880556
auaugaugcaccugagaga

SEQ ID NO: 1976189 - RNA, 19 nt, Artificial Sequence
  Description of Artificial Sequence: Synthetic oligonucleotide
  Antisense strand to SEQ ID NO: 1976188
ucucucaggugcaucauau

SEQ ID NO: 1976190 - RNA, 19 nt, Artificial Sequence
  Description of Artificial Sequence: Synthetic oligonucleotide
  Sense strand starting at position 1021 of SEQ ID NO: 1880556
gaauccagucuaggaacua

SEQ ID NO: 1976191 - RNA, 19 nt, Artificial Sequence
  Description of Artificial Sequence: Synthetic oligonucleotide
  Antisense strand to SEQ ID NO: 1976190
uaguuccuagacuggauuc

SEQ ID NO: 1976192 - RNA, 19 nt, Artificial Sequence
  Description of Artificial Sequence: Synthetic oligonucleotide
  Sense strand starting at position 1045 of SEQ ID NO: 1880556
accuuuaaggagugauacu

SEQ ID NO: 1976193 - RNA, 19 nt, Artificial Sequence
  Description of Artificial Sequence: Synthetic oligonucleotide
  Antisense strand to SEQ ID NO: 1976192
aguaucacuccuuaaaggu

SEQ ID NO: 1976194 - RNA, 19 nt, Artificial Sequence
  Description of Artificial Sequence: Synthetic oligonucleotide
  Sense strand starting at position 1068 of SEQ ID NO: 1880556
cuguauucugaaggaugag

SEQ ID NO: 1976195 - RNA, 19 nt, Artificial Sequence
  Description of Artificial Sequence: Synthetic oligonucleotide
  Antisense strand to SEQ ID NO: 1976194
cucauccuucagaauacag

SEQ ID NO: 1976196 - RNA, 19 nt, Artificial Sequence
  Description of Artificial Sequence: Synthetic oligonucleotide
  Sense strand starting at position 1224 of SEQ ID NO: 1880556
acaagaggcuagucaaaga

SEQ ID NO: 1976197 - RNA, 19 nt, Artificial Sequence
  Description of Artificial Sequence: Synthetic oligonucleotide
  Antisense strand to SEQ ID NO: 1976196
ucuuugacuagccucuugu

SEQ ID NO: 1976198 - RNA, 19 nt, Artificial Sequence
  Description of Artificial Sequence: Synthetic oligonucleotide
  Sense strand starting at position 1274 of SEQ ID NO: 1880556
gggaagugccacgaugagu

SEQ ID NO: 1976199 - RNA, 19 nt, Artificial Sequence
  Description of Artificial Sequence: Synthetic oligonucleotide
  Antisense strand to SEQ ID NO: 1976198
acucaucguggcacuuccc

SEQ ID NO: 1976200 - RNA, 19 nt, Artificial Sequence
  Description of Artificial Sequence: Synthetic oligonucleotide
  Sense strand starting at position 1352 of SEQ ID NO: 1880556
gauagacacuuggauauca

SEQ ID NO: 1976201 - RNA, 19 nt, Artificial Sequence
  Description of Artificial Sequence: Synthetic oligonucleotide
  Antisense strand to SEQ ID NO: 1976200
ugauauccaagugucuauc

SEQ ID NO: 1976202 - RNA, 19 nt, Artificial Sequence
  Description of Artificial Sequence: Synthetic oligonucleotide
  Sense strand starting at position 1363 of SEQ ID NO: 1880556
ggauaucagcuagaaagcu

SEQ ID NO: 1976203 - RNA, 19 nt, Artificial Sequence
  Description of Artificial Sequence: Synthetic oligonucleotide
  Antisense strand to SEQ ID NO: 1976202
agcuuucuagcugauaucc

SEQ ID NO: 1976204 - RNA, 19 nt, Artificial Sequence
  Description of Artificial Sequence: Synthetic oligonucleotide
  Sense strand starting at position 1447 of SEQ ID NO: 1880556
gggugcauucgagacaagu

SEQ ID NO: 1976205 - RNA, 19 nt, Artificial Sequence
  Description of Artificial Sequence: Synthetic oligonucleotide
  Antisense strand to SEQ ID NO: 1976204
acuugucucgaaugcaccc

SEQ ID NO: 1976206 - RNA, 19 nt, Artificial Sequence
  Description of Artificial Sequence: Synthetic oligonucleotide
  Sense strand starting at position 1449 of SEQ ID NO: 1880556
gugcauucgagacaaguua

SEQ ID NO: 1976207 - RNA, 19 nt, Artificial Sequence
  Description of Artificial Sequence: Synthetic oligonucleotide
  Antisense strand to SEQ ID NO: 1976206
uaacuugucucgaaugcac

SEQ ID NO: 1976208 - RNA, 19 nt, Artificial Sequence
  Description of Artificial Sequence: Synthetic oligonucleotide
  Sense strand starting at position 1535 of SEQ ID NO: 1880556
guaggucuuaucuguaaau

SEQ ID NO: 1976209 - RNA, 19 nt, Artificial Sequence
  Description of Artificial Sequence: Synthetic oligonucleotide
  Antisense strand to SEQ ID NO: 1976208
auuuacagauaagaccuac

SEQ ID NO: 1976210 - RNA, 19 nt, Artificial Sequence
  Description of Artificial Sequence: Synthetic oligonucleotide
  Sense strand starting at position 1537 of SEQ ID NO: 1880556
aggucuuaucuguaaauua

SEQ ID NO: 1976211 - RNA, 19 nt, Artificial Sequence
  Description of Artificial Sequence: Synthetic oligonucleotide
  Antisense strand to SEQ ID NO: 1976210
uaauuuacagauaagaccu

SEQ ID NO: 1976212 - RNA, 19 nt, Artificial Sequence
  Description of Artificial Sequence: Synthetic oligonucleotide
  Sense strand starting at position 1548 of SEQ ID NO: 1880556
guaaauuacggcgaucagu

SEQ ID NO: 1976213 - RNA, 19 nt, Artificial Sequence
  Description of Artificial Sequence: Synthetic oligonucleotide
  Antisense strand to SEQ ID NO: 1976212
acugaucgccguaauuuac

SEQ ID NO: 1976214 - RNA, 19 nt, Artificial Sequence
  Description of Artificial Sequence: Synthetic oligonucleotide
  Sense strand starting at position 1554 of SEQ ID NO: 1880556
uacggcgaucagugaaaga

SEQ ID NO: 1976215 - RNA, 19 nt, Artificial Sequence
  Description of Artificial Sequence: Synthetic oligonucleotide
  Antisense strand to SEQ ID NO: 1976214
ucuuucacugaucgccgua

SEQ ID NO: 1976216 - RNA, 19 nt, Artificial Sequence
  Description of Artificial Sequence: Synthetic oligonucleotide
  Sense strand starting at position 1665 of SEQ ID NO: 1880556
acaugccuuugagcugaua

SEQ ID NO: 1976217 - RNA, 19 nt, Artificial Sequence
  Description of Artificial Sequence: Synthetic oligonucleotide
  Antisense strand to SEQ ID NO: 1976216
uaucagcucaaaggcaugu

SEQ ID NO: 1976218 - RNA, 19 nt, Artificial Sequence
  Description of Artificial Sequence: Synthetic oligonucleotide
  Sense strand starting at position 1677 of SEQ ID NO: 1880556
gcugauauuuguuaacuag

SEQ ID NO: 1976219 - RNA, 19 nt, Artificial Sequence
  Description of Artificial Sequence: Synthetic oligonucleotide
  Antisense strand to SEQ ID NO: 1976218
cuaguuaacaaauaucagc

SEQ ID NO: 1976220 - RNA, 19 nt, Artificial Sequence
  Description of Artificial Sequence: Synthetic oligonucleotide
  Sense strand starting at position 1765 of SEQ ID NO: 1880556
aaagguugcuuucuuagga

SEQ ID NO: 1976221 - RNA, 19 nt, Artificial Sequence
  Description of Artificial Sequence: Synthetic oligonucleotide
  Antisense strand to SEQ ID NO: 1976220
uccuaagaaagcaaccuuu

SEQ ID NO: 1976222 - RNA, 19 nt, Artificial Sequence
  Description of Artificial Sequence: Synthetic oligonucleotide
  Sense strand starting at position 1766 of SEQ ID NO: 1880556
aagguugcuuucuuaggaa

SEQ ID NO: 1976223 - RNA, 19 nt, Artificial Sequence
  Description of Artificial Sequence: Synthetic oligonucleotide
  Antisense strand to SEQ ID NO: 1976222
uuccuaagaaagcaaccuu

SEQ ID NO: 1976224 - RNA, 19 nt, Artificial Sequence
  Description of Artificial Sequence: Synthetic oligonucleotide
  Sense strand starting at position 2654 of SEQ ID NO: 1880556
cgggacgaugccggauaau

SEQ ID NO: 1976225 - RNA, 19 nt, Artificial Sequence
  Description of Artificial Sequence: Synthetic oligonucleotide
  Antisense strand to SEQ ID NO: 1976224
auuauccggcaucgucccg

SEQ ID NO: 1976226 - RNA, 19 nt, Artificial Sequence
  Description of Artificial Sequence: Synthetic oligonucleotide
  Sense strand starting at position 3338 of SEQ ID NO: 1880556
ggauaucuaccauaguugu

SEQ ID NO: 1976227 - RNA, 19 nt, Artificial Sequence
  Description of Artificial Sequence: Synthetic oligonucleotide
  Antisense strand to SEQ ID NO: 1976226
acaacuaugguagauaucc

SEQ ID NO: 1976228 - RNA, 19 nt, Artificial Sequence
  Description of Artificial Sequence: Synthetic oligonucleotide
  Sense strand starting at position 3349 of SEQ ID NO: 1880556
auaguuguagauugaagau

SEQ ID NO: 1976229 - RNA, 19 nt, Artificial Sequence
  Description of Artificial Sequence: Synthetic oligonucleotide
  Antisense strand to SEQ ID NO: 1976228
aucuucaaucuacaacuau

SEQ ID NO: 1976230 - RNA, 19 nt, Artificial Sequence
  Description of Artificial Sequence: Synthetic oligonucleotide
  Sense strand starting at position 3425 of SEQ ID NO: 1880556
gcucuuagugaugcuguuu

SEQ ID NO: 1976231 - RNA, 19 nt, Artificial Sequence
  Description of Artificial Sequence: Synthetic oligonucleotide
  Antisense strand to SEQ ID NO: 1976230
aaacagcaucacuaagagc

SEQ ID NO: 1976232 - RNA, 19 nt, Artificial Sequence
  Description of Artificial Sequence: Synthetic oligonucleotide
  Sense strand starting at position 3536 of SEQ ID NO: 1880556
uuucguguagcucuuucua

SEQ ID NO: 1976233 - RNA, 19 nt, Artificial Sequence
  Description of Artificial Sequence: Synthetic oligonucleotide
  Antisense strand to SEQ ID NO: 1976232
uagaaagagcuacacgaaa

SEQ ID NO: 1976234 - RNA, 19 nt, Artificial Sequence
  Description of Artificial Sequence: Synthetic oligonucleotide
  Sense strand starting at position 3539 of SEQ ID NO: 1880556
cguguagcucuuucuagua

SEQ ID NO: 1976235 - RNA, 19 nt, Artificial Sequence
  Description of Artificial Sequence: Synthetic oligonucleotide
  Antisense strand to SEQ ID NO: 1976234
uacuagaaagagcuacacg

SEQ ID NO: 1976236 - RNA, 19 nt, Artificial Sequence
  Description of Artificial Sequence: Synthetic oligonucleotide
  Sense strand starting at position 3583 of SEQ ID NO: 1880556
ccaagaaagguuugucuca

SEQ ID NO: 1976237 - RNA, 19 nt, Artificial Sequence
  Description of Artificial Sequence: Synthetic oligonucleotide
  Antisense strand to SEQ ID NO: 1976236
ugagacaaaccuuucuugg

SEQ ID NO: 1976238 - RNA, 19 nt, Artificial Sequence
  Description of Artificial Sequence: Synthetic oligonucleotide
  Sense strand starting at position 3584 of SEQ ID NO: 1880556
caagaaagguuugucucau

SEQ ID NO: 1976239 - RNA, 19 nt, Artificial Sequence
  Description of Artificial Sequence: Synthetic oligonucleotide
  Antisense strand to SEQ ID NO: 1976238
augagacaaaccuuucuug

SEQ ID NO: 1976240 - RNA, 19 nt, Artificial Sequence
  Description of Artificial Sequence: Synthetic oligonucleotide
  Sense strand starting at position 3631 of SEQ ID NO: 1880556
ugagcacuugcugugugua

SEQ ID NO: 1976241 - RNA, 19 nt, Artificial Sequence
  Description of Artificial Sequence: Synthetic oligonucleotide
  Antisense strand to SEQ ID NO: 1976240
uacacacagcaagugcuca

SEQ ID NO: 1976242 - RNA, 19 nt, Artificial Sequence
  Description of Artificial Sequence: Synthetic oligonucleotide
  Sense strand starting at position 3657 of SEQ ID NO: 1880556
guauuucuguaugaagauc

SEQ ID NO: 1976243 - RNA, 19 nt, Artificial Sequence
  Description of Artificial Sequence: Synthetic oligonucleotide
  Antisense strand to SEQ ID NO: 1976242
gaucuucauacagaaauac

SEQ ID NO: 1976244 - RNA, 19 nt, Artificial Sequence
  Description of Artificial Sequence: Synthetic oligonucleotide
  Sense strand starting at position 3666 of SEQ ID NO: 1880556
uaugaagaucacuggcagu

SEQ ID NO: 1976245 - RNA, 19 nt, Artificial Sequence
  Description of Artificial Sequence: Synthetic oligonucleotide
  Antisense strand to SEQ ID NO: 1976244
acugccagugaucuucaua

SEQ ID NO: 1976246 - RNA, 19 nt, Artificial Sequence
  Description of Artificial Sequence: Synthetic oligonucleotide
  Sense strand starting at position 3690 of SEQ ID NO: 1880556
uguuauuuguagcugucaa

SEQ ID NO: 1976247 - RNA, 19 nt, Artificial Sequence
  Description of Artificial Sequence: Synthetic oligonucleotide
  Antisense strand to SEQ ID NO: 1976246
uugacagcuacaaauaaca

SEQ ID NO: 1976248 - RNA, 19 nt, Artificial Sequence
  Description of Artificial Sequence: Synthetic oligonucleotide
  Sense strand starting at position 227 of SEQ ID NO: 1880557
acauaaucccauugguugu

SEQ ID NO: 1976249 - RNA, 19 nt, Artificial Sequence
  Description of Artificial Sequence: Synthetic oligonucleotide
  Antisense strand to SEQ ID NO: 1976248
acaaccaaugggauuaugu

SEQ ID NO: 1976250 - RNA, 19 nt, Artificial Sequence
  Description of Artificial Sequence: Synthetic oligonucleotide
  Sense strand starting at position 240 of SEQ ID NO: 1880557
gguuguguucuuccaugcu

SEQ ID NO: 1976251 - RNA, 19 nt, Artificial Sequence
  Description of Artificial Sequence: Synthetic oligonucleotide
  Antisense strand to SEQ ID NO: 1976250
agcauggaagaacacaacc

SEQ ID NO: 1976252 - RNA, 19 nt, Artificial Sequence
  Description of Artificial Sequence: Synthetic oligonucleotide
  Sense strand starting at position 246 of SEQ ID NO: 1880557
guucuuccaugcuuuaaga

SEQ ID NO: 1976253 - RNA, 19 nt, Artificial Sequence
  Description of Artificial Sequence: Synthetic oligonucleotide
  Antisense strand to SEQ ID NO: 1976252
ucuuaaagcauggaagaac

SEQ ID NO: 1976254 - RNA, 19 nt, Artificial Sequence
  Description of Artificial Sequence: Synthetic oligonucleotide
  Sense strand starting at position 257 of SEQ ID NO: 1880557
cuuuaagacuuguuuguau

SEQ ID NO: 1976255 - RNA, 19 nt, Artificial Sequence
  Description of Artificial Sequence: Synthetic oligonucleotide
  Antisense strand to SEQ ID NO: 1976254
auacaaacaagucuuaaag

SEQ ID NO: 1976256 - RNA, 19 nt, Artificial Sequence
  Description of Artificial Sequence: Synthetic oligonucleotide
  Sense strand starting at position 259 of SEQ ID NO: 1880557
uuaagacuuguuuguaugu

SEQ ID NO: 1976257 - RNA, 19 nt, Artificial Sequence
  Description of Artificial Sequence: Synthetic oligonucleotide
  Antisense strand to SEQ ID NO: 1976256
acauacaaacaagucuuaa

SEQ ID NO: 1976258 - RNA, 19 nt, Artificial Sequence
  Description of Artificial Sequence: Synthetic oligonucleotide
  Sense strand starting at position 264 of SEQ ID NO: 1880557
acuuguuuguaugucucua

SEQ ID NO: 1976259 - RNA, 19 nt, Artificial Sequence
  Description of Artificial Sequence: Synthetic oligonucleotide
  Antisense strand to SEQ ID NO: 1976258
uagagacauacaaacaagu

SEQ ID NO: 1976260 - RNA, 19 nt, Artificial Sequence
  Description of Artificial Sequence: Synthetic oligonucleotide
  Sense strand starting at position 268 of SEQ ID NO: 1880557
guuuguaugucucuaggac

SEQ ID NO: 1976261 - RNA, 19 nt, Artificial Sequence
  Description of Artificial Sequence: Synthetic oligonucleotide
  Antisense strand to SEQ ID NO: 1976260
guccuagagacauacaaac

SEQ ID NO: 1976262 - RNA, 19 nt, Artificial Sequence
  Description of Artificial Sequence: Synthetic oligonucleotide
  Sense strand starting at position 269 of SEQ ID NO: 1880557
uuuguaugucucuaggacu

SEQ ID NO: 1976263 - RNA, 19 nt, Artificial Sequence
  Description of Artificial Sequence: Synthetic oligonucleotide
  Antisense strand to SEQ ID NO: 1976262
aguccuagagacauacaaa

SEQ ID NO: 1976264 - RNA, 19 nt, Artificial Sequence
  Description of Artificial Sequence: Synthetic oligonucleotide
  Sense strand starting at position 321 of SEQ ID NO: 1880557
uugagauaauccuugugaa

SEQ ID NO: 1976265 - RNA, 19 nt, Artificial Sequence
  Description of Artificial Sequence: Synthetic oligonucleotide
  Antisense strand to SEQ ID NO: 1976264
uucacaaggauuaucucaa

SEQ ID NO: 1976266 - RNA, 19 nt, Artificial Sequence
  Description of Artificial Sequence: Synthetic oligonucleotide
  Sense strand starting at position 322 of SEQ ID NO: 1880557
ugagauaauccuugugaau

SEQ ID NO: 1976267 - RNA, 19 nt, Artificial Sequence
  Description of Artificial Sequence: Synthetic oligonucleotide
  Antisense strand to SEQ ID NO: 1976266
auucacaaggauuaucuca

SEQ ID NO: 1976268 - RNA, 19 nt, Artificial Sequence
  Description of Artificial Sequence: Synthetic oligonucleotide
  Sense strand starting at position 335 of SEQ ID NO: 1880557
gugaaucuaucaccaguac

SEQ ID NO: 1976269 - RNA, 19 nt, Artificial Sequence
  Description of Artificial Sequence: Synthetic oligonucleotide
  Antisense strand to SEQ ID NO: 1976268
guacuggugauagauucac

SEQ ID NO: 1976270 - RNA, 19 nt, Artificial Sequence
  Description of Artificial Sequence: Synthetic oligonucleotide
  Sense strand starting at position 741 of SEQ ID NO: 1880557
cagacaaauggcuguuagu

SEQ ID NO: 1976271 - RNA, 19 nt, Artificial Sequence
  Description of Artificial Sequence: Synthetic oligonucleotide
  Antisense strand to SEQ ID NO: 1976270
acuaacagccauuugucug

SEQ ID NO: 1976272 - RNA, 19 nt, Artificial Sequence
  Description of Artificial Sequence: Synthetic oligonucleotide
  Sense strand starting at position 1133 of SEQ ID NO: 1880557
ggagauuugucagaaccgu

SEQ ID NO: 1976273 - RNA, 19 nt, Artificial Sequence
  Description of Artificial Sequence: Synthetic oligonucleotide
  Antisense strand to SEQ ID NO: 1976272
acgguucugacaaaucucc

SEQ ID NO: 1976274 - RNA, 19 nt, Artificial Sequence
  Description of Artificial Sequence: Synthetic oligonucleotide
  Sense strand starting at position 1143 of SEQ ID NO: 1880557
cagaaccguucgguugaga

SEQ ID NO: 1976275 - RNA, 19 nt, Artificial Sequence
  Description of Artificial Sequence: Synthetic oligonucleotide
  Antisense strand to SEQ ID NO: 1976274
ucucaaccgaacgguucug

SEQ ID NO: 1976276 - RNA, 19 nt, Artificial Sequence
  Description of Artificial Sequence: Synthetic oligonucleotide
  Sense strand starting at position 1151 of SEQ ID NO: 1880557
uucgguugagacugauuau

SEQ ID NO: 1976277 - RNA, 19 nt, Artificial Sequence
  Description of Artificial Sequence: Synthetic oligonucleotide
  Antisense strand to SEQ ID NO: 1976276
auaaucagucucaaccgaa

SEQ ID NO: 1976278 - RNA, 19 nt, Artificial Sequence
  Description of Artificial Sequence: Synthetic oligonucleotide
  Sense strand starting at position 1152 of SEQ ID NO: 1880557
ucgguugagacugauuaug

SEQ ID NO: 1976279 - RNA, 19 nt, Artificial Sequence
  Description of Artificial Sequence: Synthetic oligonucleotide
  Antisense strand to SEQ ID NO: 1976278
cauaaucagucucaaccga

SEQ ID NO: 1976280 - RNA, 19 nt, Artificial Sequence
  Description of Artificial Sequence: Synthetic oligonucleotide
  Sense strand starting at position 1154 of SEQ ID NO: 1880557
gguugagacugauuaugau

SEQ ID NO: 1976281 - RNA, 19 nt, Artificial Sequence
  Description of Artificial Sequence: Synthetic oligonucleotide
  Antisense strand to SEQ ID NO: 1976280
aucauaaucagucucaacc

SEQ ID NO: 1976282 - RNA, 19 nt, Artificial Sequence
  Description of Artificial Sequence: Synthetic oligonucleotide
  Sense strand starting at position 2163 of SEQ ID NO: 1880557
uggcaucuuccagagacuc

SEQ ID NO: 1976283 - RNA, 19 nt, Artificial Sequence
  Description of Artificial Sequence: Synthetic oligonucleotide
  Antisense strand to SEQ ID NO: 1976282
gagucucuggaagaugcca

SEQ ID NO: 1976284 - RNA, 19 nt, Artificial Sequence
  Description of Artificial Sequence: Synthetic oligonucleotide
  Sense strand starting at position 2218 of SEQ ID NO: 1880557
ggcagaucuugaguucugu

SEQ ID NO: 1976285 - RNA, 19 nt, Artificial Sequence
  Description of Artificial Sequence: Synthetic oligonucleotide
  Antisense strand to SEQ ID NO: 1976284
acagaacucaagaucugcc

SEQ ID NO: 1976286 - RNA, 19 nt, Artificial Sequence
  Description of Artificial Sequence: Synthetic oligonucleotide
  Sense strand starting at position 2654 of SEQ ID NO: 1880557
uggcuuaaugcugauugau

SEQ ID NO: 1976287 - RNA, 19 nt, Artificial Sequence
  Description of Artificial Sequence: Synthetic oligonucleotide
  Antisense strand to SEQ ID NO: 1976286
aucaaucagcauuaagcca

SEQ ID NO: 1976288 - RNA, 19 nt, Artificial Sequence
  Description of Artificial Sequence: Synthetic oligonucleotide
  Sense strand starting at position 2663 of SEQ ID NO: 1880557
gcugauugauggucagaaa

SEQ ID NO: 1976289 - RNA, 19 nt, Artificial Sequence
  Description of Artificial Sequence: Synthetic oligonucleotide
  Antisense strand to SEQ ID NO: 1976288
uuucugaccaucaaucagc

SEQ ID NO: 1976290 - RNA, 19 nt, Artificial Sequence
  Description of Artificial Sequence: Synthetic oligonucleotide
  Sense strand starting at position 2868 of SEQ ID NO: 1880557
gccaguguucgcuuucuug

SEQ ID NO: 1976291 - RNA, 19 nt, Artificial Sequence
  Description of Artificial Sequence: Synthetic oligonucleotide
  Antisense strand to SEQ ID NO: 1976290
caagaaagcgaacacuggc

SEQ ID NO: 1976292 - RNA, 19 nt, Artificial Sequence
  Description of Artificial Sequence: Synthetic oligonucleotide
  Sense strand starting at position 2874 of SEQ ID NO: 1880557
guucgcuuucuugcugagu

SEQ ID NO: 1976293 - RNA, 19 nt, Artificial Sequence
  Description of Artificial Sequence: Synthetic oligonucleotide
  Antisense strand to SEQ ID NO: 1976292
acucagcaagaaagcgaac

SEQ ID NO: 1976294 - RNA, 19 nt, Artificial Sequence
  Description of Artificial Sequence: Synthetic oligonucleotide
  Sense strand starting at position 2877 of SEQ ID NO: 1880557
cgcuuucuugcugaguaac

SEQ ID NO: 1976295 - RNA, 19 nt, Artificial Sequence
  Description of Artificial Sequence: Synthetic oligonucleotide
  Antisense strand to SEQ ID NO: 1976294
guuacucagcaagaaagcg

SEQ ID NO: 1976296 - RNA, 19 nt, Artificial Sequence
  Description of Artificial Sequence: Synthetic oligonucleotide
  Sense strand starting at position 2917 of SEQ ID NO: 1880557
ucuucuuauccuugaggcu

SEQ ID NO: 1976297 - RNA, 19 nt, Artificial Sequence
  Description of Artificial Sequence: Synthetic oligonucleotide
  Antisense strand to SEQ ID NO: 1976296
agccucaaggauaagaaga

SEQ ID NO: 1976298 - RNA, 19 nt, Artificial Sequence
  Description of Artificial Sequence: Synthetic oligonucleotide
  Sense strand starting at position 2918 of SEQ ID NO: 1880557
cuucuuauccuugaggcuu

SEQ ID NO: 1976299 - RNA, 19 nt, Artificial Sequence
  Description of Artificial Sequence: Synthetic oligonucleotide
  Antisense strand to SEQ ID NO: 1976298
aagccucaaggauaagaag

SEQ ID NO: 1976300 - RNA, 19 nt, Artificial Sequence
  Description of Artificial Sequence: Synthetic oligonucleotide
  Sense strand starting at position 3079 of SEQ ID NO: 1880557
ccugcaaacgcuuacaaga

SEQ ID NO: 1976301 - RNA, 19 nt, Artificial Sequence
  Description of Artificial Sequence: Synthetic oligonucleotide
  Antisense strand to SEQ ID NO: 1976300
ucuuguaagcguuugcagg

SEQ ID NO: 1976302 - RNA, 19 nt, Artificial Sequence
  Description of Artificial Sequence: Synthetic oligonucleotide
  Sense strand starting at position 3129 of SEQ ID NO: 1880557
guaucccuuccucagucau

SEQ ID NO: 1976303 - RNA, 19 nt, Artificial Sequence
  Description of Artificial Sequence: Synthetic oligonucleotide
  Antisense strand to SEQ ID NO: 1976302
augacugaggaagggauac

SEQ ID NO: 1976304 - RNA, 19 nt, Artificial Sequence
  Description of Artificial Sequence: Synthetic oligonucleotide
  Sense strand starting at position 3365 of SEQ ID NO: 1880557
cugagccauccuggacuaa

SEQ ID NO: 1976305 - RNA, 19 nt, Artificial Sequence
  Description of Artificial Sequence: Synthetic oligonucleotide
  Antisense strand to SEQ ID NO: 1976304
uuaguccaggauggcucag

SEQ ID NO: 1976306 - RNA, 19 nt, Artificial Sequence
  Description of Artificial Sequence: Synthetic oligonucleotide
  Sense strand starting at position 3369 of SEQ ID NO: 1880557
gccauccuggacuaacauu

SEQ ID NO: 1976307 - RNA, 19 nt, Artificial Sequence
  Description of Artificial Sequence: Synthetic oligonucleotide
  Antisense strand to SEQ ID NO: 1976306
aauguuaguccaggauggc

SEQ ID NO: 1976308 - RNA, 19 nt, Artificial Sequence
  Description of Artificial Sequence: Synthetic oligonucleotide
  Sense strand starting at position 3431 of SEQ ID NO: 1880557
uucccagucugacuguaaa

SEQ ID NO: 1976309 - RNA, 19 nt, Artificial Sequence
  Description of Artificial Sequence: Synthetic oligonucleotide
  Antisense strand to SEQ ID NO: 1976308
uuuacagucagacugggaa

SEQ ID NO: 1976310 - RNA, 19 nt, Artificial Sequence
  Description of Artificial Sequence: Synthetic oligonucleotide
  Sense strand starting at position 3483 of SEQ ID NO: 1880557
agaagaacuuuguucugua

SEQ ID NO: 1976311 - RNA, 19 nt, Artificial Sequence
  Description of Artificial Sequence: Synthetic oligonucleotide
  Antisense strand to SEQ ID NO: 1976310
uacagaacaaaguucuucu

SEQ ID NO: 1976312 - RNA, 19 nt, Artificial Sequence
  Description of Artificial Sequence: Synthetic oligonucleotide
  Sense strand starting at position 3487 of SEQ ID NO: 1880557
gaacuuuguucuguagcau

SEQ ID NO: 1976313 - RNA, 19 nt, Artificial Sequence
  Description of Artificial Sequence: Synthetic oligonucleotide
  Antisense strand to SEQ ID NO: 1976312
augcuacagaacaaaguuc

SEQ ID NO: 1976314 - RNA, 19 nt, Artificial Sequence
  Description of Artificial Sequence: Synthetic oligonucleotide
  Sense strand starting at position 3745 of SEQ ID NO: 1880557
cccauuacagcugguuuau

SEQ ID NO: 1976315 - RNA, 19 nt, Artificial Sequence
  Description of Artificial Sequence: Synthetic oligonucleotide
  Antisense strand to SEQ ID NO: 1976314
auaaaccagcuguaauggg

SEQ ID NO: 1976316 - RNA, 19 nt, Artificial Sequence
  Description of Artificial Sequence: Synthetic oligonucleotide
  Sense strand starting at position 3757 of SEQ ID NO: 1880557
gguuuaugguuauugcuau

SEQ ID NO: 1976317 - RNA, 19 nt, Artificial Sequence
  Description of Artificial Sequence: Synthetic oligonucleotide
  Antisense strand to SEQ ID NO: 1976316
auagcaauaaccauaaacc

SEQ ID NO: 1976318 - RNA, 19 nt, Artificial Sequence
  Description of Artificial Sequence: Synthetic oligonucleotide
  Sense strand starting at position 3763 of SEQ ID NO: 1880557
ugguuauugcuaugauggu

SEQ ID NO: 1976319 - RNA, 19 nt, Artificial Sequence
  Description of Artificial Sequence: Synthetic oligonucleotide
  Antisense strand to SEQ ID NO: 1976318
accaucauagcaauaacca

SEQ ID NO: 1976320 - RNA, 19 nt, Artificial Sequence
  Description of Artificial Sequence: Synthetic oligonucleotide
  Sense strand starting at position 3767 of SEQ ID NO: 1880557
uauugcuaugaugguuaau

SEQ ID NO: 1976321 - RNA, 19 nt, Artificial Sequence
  Description of Artificial Sequence: Synthetic oligonucleotide
  Antisense strand to SEQ ID NO: 1976320
auuaaccaucauagcaaua

SEQ ID NO: 1976322 - RNA, 19 nt, Artificial Sequence
  Description of Artificial Sequence: Synthetic oligonucleotide
  Sense strand starting at position 3769 of SEQ ID NO: 1880557
uugcuaugaugguuaaugu

SEQ ID NO: 1976323 - RNA, 19 nt, Artificial Sequence
  Description of Artificial Sequence: Synthetic oligonucleotide
  Antisense strand to SEQ ID NO: 1976322
acauuaaccaucauagcaa

SEQ ID NO: 1976324 - RNA, 19 nt, Artificial Sequence
  Description of Artificial Sequence: Synthetic oligonucleotide
  Sense strand starting at position 3784 of SEQ ID NO: 1880557
augugauaacagcacacua

SEQ ID NO: 1976325 - RNA, 19 nt, Artificial Sequence
  Description of Artificial Sequence: Synthetic oligonucleotide
  Antisense strand to SEQ ID NO: 1976324
uagugugcuguuaucacau

SEQ ID NO: 1976326 - RNA, 19 nt, Artificial Sequence
  Description of Artificial Sequence: Synthetic oligonucleotide
  Sense strand starting at position 3802 of SEQ ID NO: 1880557
acauuugacuaggacuuua

SEQ ID NO: 1976327 - RNA, 19 nt, Artificial Sequence
  Description of Artificial Sequence: Synthetic oligonucleotide
  Antisense strand to SEQ ID NO: 1976326
uaaaguccuagucaaaugu

SEQ ID NO: 1976328 - RNA, 19 nt, Artificial Sequence
  Description of Artificial Sequence: Synthetic oligonucleotide
  Sense strand starting at position 538 of SEQ ID NO: 1880558
cagagaaauggugguauag

SEQ ID NO: 1976329 - RNA, 19 nt, Artificial Sequence
  Description of Artificial Sequence: Synthetic oligonucleotide
  Antisense strand to SEQ ID NO: 1976328
cuauaccaccauuucucug

SEQ ID NO: 1976330 - RNA, 19 nt, Artificial Sequence
  Description of Artificial Sequence: Synthetic oligonucleotide
  Sense strand starting at position 569 of SEQ ID NO: 1880558
agaguucaugugcaagaag

SEQ ID NO: 1976331 - RNA, 19 nt, Artificial Sequence
  Description of Artificial Sequence: Synthetic oligonucleotide
  Antisense strand to SEQ ID NO: 1976330
cuucuugcacaugaacucu

SEQ ID NO: 1976332 - RNA, 19 nt, Artificial Sequence
  Description of Artificial Sequence: Synthetic oligonucleotide
  Sense strand starting at position 593 of SEQ ID NO: 1880558
gauaaagagaggugaguuu

SEQ ID NO: 1976333 - RNA, 19 nt, Artificial Sequence
  Description of Artificial Sequence: Synthetic oligonucleotide
  Antisense strand to SEQ ID NO: 1976332
aaacucaccucucuuuauc

SEQ ID NO: 1976334 - RNA, 19 nt, Artificial Sequence
  Description of Artificial Sequence: Synthetic oligonucleotide
  Sense strand starting at position 646 of SEQ ID NO: 1880558
uuaugucuugaccaguuua

SEQ ID NO: 1976335 - RNA, 19 nt, Artificial Sequence
  Description of Artificial Sequence: Synthetic oligonucleotide
  Antisense strand to SEQ ID NO: 1976334
uaaacuggucaagacauaa

SEQ ID NO: 1976336 - RNA, 19 nt, Artificial Sequence
  Description of Artificial Sequence: Synthetic oligonucleotide
  Sense strand starting at position 653 of SEQ ID NO: 1880558
uugaccaguuuauuggaaa

SEQ ID NO: 1976337 - RNA, 19 nt, Artificial Sequence
  Description of Artificial Sequence: Synthetic oligonucleotide
  Antisense strand to SEQ ID NO: 1976336
uuuccaauaaacuggucaa

SEQ ID NO: 1976338 - RNA, 19 nt, Artificial Sequence
  Description of Artificial Sequence: Synthetic oligonucleotide
  Sense strand starting at position 666 of SEQ ID NO: 1880558
uggaaacuccuggguuaga

SEQ ID NO: 1976339 - RNA, 19 nt, Artificial Sequence
  Description of Artificial Sequence: Synthetic oligonucleotide
  Antisense strand to SEQ ID NO: 1976338
ucuaacccaggaguuucca

SEQ ID NO: 1976340 - RNA, 19 nt, Artificial Sequence
  Description of Artificial Sequence: Synthetic oligonucleotide
  Sense strand starting at position 667 of SEQ ID NO: 1880558
ggaaacuccuggguuagau

SEQ ID NO: 1976341 - RNA, 19 nt, Artificial Sequence
  Description of Artificial Sequence: Synthetic oligonucleotide
  Antisense strand to SEQ ID NO: 1976340
aucuaacccaggaguuucc

SEQ ID NO: 1976342 - RNA, 19 nt, Artificial Sequence
  Description of Artificial Sequence: Synthetic oligonucleotide
  Sense strand starting at position 695 of SEQ ID NO: 1880558
uugucucaugcguccagua

SEQ ID NO: 1976343 - RNA, 19 nt, Artificial Sequence
  Description of Artificial Sequence: Synthetic oligonucleotide
  Antisense strand to SEQ ID NO: 1976342
uacuggacgcaugagacaa

SEQ ID NO: 1976344 - RNA, 19 nt, Artificial Sequence
  Description of Artificial Sequence: Synthetic oligonucleotide
  Sense strand starting at position 696 of SEQ ID NO: 1880558
ugucucaugcguccaguau

SEQ ID NO: 1976345 - RNA, 19 nt, Artificial Sequence
  Description of Artificial Sequence: Synthetic oligonucleotide
  Antisense strand to SEQ ID NO: 1976344
auacuggacgcaugagaca

SEQ ID NO: 1976346 - RNA, 19 nt, Artificial Sequence
  Description of Artificial Sequence: Synthetic oligonucleotide
  Sense strand starting at position 732 of SEQ ID NO: 1880558
gggccaauguaucuuaaac

SEQ ID NO: 1976347 - RNA, 19 nt, Artificial Sequence
  Description of Artificial Sequence: Synthetic oligonucleotide
  Antisense strand to SEQ ID NO: 1976346
guuuaagauacauuggccc

SEQ ID NO: 1976348 - RNA, 19 nt, Artificial Sequence
  Description of Artificial Sequence: Synthetic oligonucleotide
  Sense strand starting at position 781 of SEQ ID NO: 1880558
ucugaaugggauuggguua

SEQ ID NO: 1976349 - RNA, 19 nt, Artificial Sequence
  Description of Artificial Sequence: Synthetic oligonucleotide
  Antisense strand to SEQ ID NO: 1976348
uaacccaaucccauucaga

SEQ ID NO: 1976350 - RNA, 19 nt, Artificial Sequence
  Description of Artificial Sequence: Synthetic oligonucleotide
  Sense strand starting at position 786 of SEQ ID NO: 1880558
augggauuggguuaaguuu

SEQ ID NO: 1976351 - RNA, 19 nt, Artificial Sequence
  Description of Artificial Sequence: Synthetic oligonucleotide
  Antisense strand to SEQ ID NO: 1976350
aaacuuaacccaaucccau

SEQ ID NO: 1976352 - RNA, 19 nt, Artificial Sequence
  Description of Artificial Sequence: Synthetic oligonucleotide
  Sense strand starting at position 792 of SEQ ID NO: 1880558
uuggguuaaguuuggaaag

SEQ ID NO: 1976353 - RNA, 19 nt, Artificial Sequence
  Description of Artificial Sequence: Synthetic oligonucleotide
  Antisense strand to SEQ ID NO: 1976352
cuuuccaaacuuaacccaa

SEQ ID NO: 1976354 - RNA, 19 nt, Artificial Sequence
  Description of Artificial Sequence: Synthetic oligonucleotide
  Sense strand starting at position 931 of SEQ ID NO: 1880558
agcauauuggcuuacuuga

SEQ ID NO: 1976355 - RNA, 19 nt, Artificial Sequence
  Description of Artificial Sequence: Synthetic oligonucleotide
  Antisense strand to SEQ ID NO: 1976354
ucaaguaagccaauaugcu

SEQ ID NO: 1976356 - RNA, 19 nt, Artificial Sequence
  Description of Artificial Sequence: Synthetic oligonucleotide
  Sense strand starting at position 1032 of SEQ ID NO: 1880558
uagggacuauugucaauuc

SEQ ID NO: 1976357 - RNA, 19 nt, Artificial Sequence
  Description of Artificial Sequence: Synthetic oligonucleotide
  Antisense strand to SEQ ID NO: 1976356
gaauugacaauagucccua

SEQ ID NO: 1976358 - RNA, 19 nt, Artificial Sequence
  Description of Artificial Sequence: Synthetic oligonucleotide
  Sense strand starting at position 1363 of SEQ ID NO: 1880558
gucgacucuagacgagaaa

SEQ ID NO: 1976359 - RNA, 19 nt, Artificial Sequence
  Description of Artificial Sequence: Synthetic oligonucleotide
  Antisense strand to SEQ ID NO: 1976358
uuucucgucuagagucgac

SEQ ID NO: 1976360 - RNA, 19 nt, Artificial Sequence
  Description of Artificial Sequence: Synthetic oligonucleotide
  Sense strand starting at position 1550 of SEQ ID NO: 1880558
uuccuaaauugcucuagag

SEQ ID NO: 1976361 - RNA, 19 nt, Artificial Sequence
  Description of Artificial Sequence: Synthetic oligonucleotide
  Antisense strand to SEQ ID NO: 1976360
cucuagagcaauuuaggaa

SEQ ID NO: 1976362 - RNA, 19 nt, Artificial Sequence
  Description of Artificial Sequence: Synthetic oligonucleotide
  Sense strand starting at position 1552 of SEQ ID NO: 1880558
ccuaaauugcucuagaggu

SEQ ID NO: 1976363 - RNA, 19 nt, Artificial Sequence
  Description of Artificial Sequence: Synthetic oligonucleotide
  Antisense strand to SEQ ID NO: 1976362
accucuagagcaauuuagg

SEQ ID NO: 1976364 - RNA, 19 nt, Artificial Sequence
  Description of Artificial Sequence: Synthetic oligonucleotide
  Sense strand starting at position 2117 of SEQ ID NO: 1880558
cccgauuggagacguagaa

SEQ ID NO: 1976365 - RNA, 19 nt, Artificial Sequence
  Description of Artificial Sequence: Synthetic oligonucleotide
  Antisense strand to SEQ ID NO: 1976364
uucuacgucuccaaucggg

SEQ ID NO: 1976366 - RNA, 19 nt, Artificial Sequence
  Description of Artificial Sequence: Synthetic oligonucleotide
  Sense strand starting at position 2194 of SEQ ID NO: 1880558
ucuucuaccugagcaagaa

SEQ ID NO: 1976367 - RNA, 19 nt, Artificial Sequence
  Description of Artificial Sequence: Synthetic oligonucleotide
  Antisense strand to SEQ ID NO: 1976366
uucuugcucagguagaaga

SEQ ID NO: 1976368 - RNA, 19 nt, Artificial Sequence
  Description of Artificial Sequence: Synthetic oligonucleotide
  Sense strand starting at position 2203 of SEQ ID NO: 1880558
ugagcaagaaagugaguuu

SEQ ID NO: 1976369 - RNA, 19 nt, Artificial Sequence
  Description of Artificial Sequence: Synthetic oligonucleotide
  Antisense strand to SEQ ID NO: 1976368
aaacucacuuucuugcuca

SEQ ID NO: 1976370 - RNA, 19 nt, Artificial Sequence
  Description of Artificial Sequence: Synthetic oligonucleotide
  Sense strand starting at position 2459 of SEQ ID NO: 1880558
ggguggcuugaggauaagu

SEQ ID NO: 1976371 - RNA, 19 nt, Artificial Sequence
  Description of Artificial Sequence: Synthetic oligonucleotide
  Antisense strand to SEQ ID NO: 1976370
acuuauccucaagccaccc

SEQ ID NO: 1976372 - RNA, 19 nt, Artificial Sequence
  Description of Artificial Sequence: Synthetic oligonucleotide
  Sense strand starting at position 2514 of SEQ ID NO: 1880558
ugcugauccacgugauuua

SEQ ID NO: 1976373 - RNA, 19 nt, Artificial Sequence
  Description of Artificial Sequence: Synthetic oligonucleotide
  Antisense strand to SEQ ID NO: 1976372
uaaaucacguggaucagca

SEQ ID NO: 1976374 - RNA, 19 nt, Artificial Sequence
  Description of Artificial Sequence: Synthetic oligonucleotide
  Sense strand starting at position 2662 of SEQ ID NO: 1880558
aaauccauccggugagacu

SEQ ID NO: 1976375 - RNA, 19 nt, Artificial Sequence
  Description of Artificial Sequence: Synthetic oligonucleotide
  Antisense strand to SEQ ID NO: 1976374
agucucaccggauggauuu

SEQ ID NO: 1976376 - RNA, 19 nt, Artificial Sequence
  Description of Artificial Sequence: Synthetic oligonucleotide
  Sense strand starting at position 2952 of SEQ ID NO: 1880558
guguguauccuggaacaag

SEQ ID NO: 1976377 - RNA, 19 nt, Artificial Sequence
  Description of Artificial Sequence: Synthetic oligonucleotide
  Antisense strand to SEQ ID NO: 1976376
cuuguuccaggauacacac

SEQ ID NO: 1976378 - RNA, 19 nt, Artificial Sequence
  Description of Artificial Sequence: Synthetic oligonucleotide
  Sense strand starting at position 3069 of SEQ ID NO: 1880558
uaguaaauuggcuaauguu

SEQ ID NO: 1976379 - RNA, 19 nt, Artificial Sequence
  Description of Artificial Sequence: Synthetic oligonucleotide
  Antisense strand to SEQ ID NO: 1976378
aacauuagccaauuuacua

SEQ ID NO: 1976380 - RNA, 19 nt, Artificial Sequence
  Description of Artificial Sequence: Synthetic oligonucleotide
  Sense strand starting at position 3182 of SEQ ID NO: 1880558
ggaguauauuugcaauaaa

SEQ ID NO: 1976381 - RNA, 19 nt, Artificial Sequence
  Description of Artificial Sequence: Synthetic oligonucleotide
  Antisense strand to SEQ ID NO: 1976380
uuuauugcaaauauacucc

SEQ ID NO: 1976382 - RNA, 19 nt, Artificial Sequence
  Description of Artificial Sequence: Synthetic oligonucleotide
  Sense strand starting at position 3206 of SEQ ID NO: 1880558
gagaauguugaauguaaac

SEQ ID NO: 1976383 - RNA, 19 nt, Artificial Sequence
  Description of Artificial Sequence: Synthetic oligonucleotide
  Antisense strand to SEQ ID NO: 1976382
guuuacauucaacauucuc

SEQ ID NO: 1976384 - RNA, 19 nt, Artificial Sequence
  Description of Artificial Sequence: Synthetic oligonucleotide
  Sense strand starting at position 3336 of SEQ ID NO: 1880558
aaagaaauccugugaguca

SEQ ID NO: 1976385 - RNA, 19 nt, Artificial Sequence
  Description of Artificial Sequence: Synthetic oligonucleotide
  Antisense strand to SEQ ID NO: 1976384
ugacucacaggauuucuuu

SEQ ID NO: 1976386 - RNA, 19 nt, Artificial Sequence
  Description of Artificial Sequence: Synthetic oligonucleotide
  Sense strand starting at position 3339 of SEQ ID NO: 1880558
gaaauccugugagucaaca

SEQ ID NO: 1976387 - RNA, 19 nt, Artificial Sequence
  Description of Artificial Sequence: Synthetic oligonucleotide
  Antisense strand to SEQ ID NO: 1976386
uguugacucacaggauuuc

SEQ ID NO: 1976388 - RNA, 19 nt, Artificial Sequence
  Description of Artificial Sequence: Synthetic oligonucleotide
  Sense strand starting at position 3394 of SEQ ID NO: 1880558
ugugucauccuuucugcuu

SEQ ID NO: 1976389 - RNA, 19 nt, Artificial Sequence
  Description of Artificial Sequence: Synthetic oligonucleotide
  Antisense strand to SEQ ID NO: 1976388
aagcagaaaggaugacaca

SEQ ID NO: 1976390 - RNA, 19 nt, Artificial Sequence
  Description of Artificial Sequence: Synthetic oligonucleotide
  Sense strand starting at position 3493 of SEQ ID NO: 1880558
uugucuuugcugcuugauu

SEQ ID NO: 1976391 - RNA, 19 nt, Artificial Sequence
  Description of Artificial Sequence: Synthetic oligonucleotide
  Antisense strand to SEQ ID NO: 1976390
aaucaagcagcaaagacaa

SEQ ID NO: 1976392 - RNA, 19 nt, Artificial Sequence
  Description of Artificial Sequence: Synthetic oligonucleotide
  Sense strand starting at position 3518 of SEQ ID NO: 1880558
uuuaucuaguucucuggaa

SEQ ID NO: 1976393 - RNA, 19 nt, Artificial Sequence
  Description of Artificial Sequence: Synthetic oligonucleotide
  Antisense strand to SEQ ID NO: 1976392
uuccagagaacuagauaaa

SEQ ID NO: 1976394 - RNA, 19 nt, Artificial Sequence
  Description of Artificial Sequence: Synthetic oligonucleotide
  Sense strand starting at position 3519 of SEQ ID NO: 1880558
uuaucuaguucucuggaau

SEQ ID NO: 1976395 - RNA, 19 nt, Artificial Sequence
  Description of Artificial Sequence: Synthetic oligonucleotide
  Antisense strand to SEQ ID NO: 1976394
auuccagagaacuagauaa

SEQ ID NO: 1976396 - RNA, 19 nt, Artificial Sequence
  Description of Artificial Sequence: Synthetic oligonucleotide
  Sense strand starting at position 3522 of SEQ ID NO: 1880558
ucuaguucucuggaaucac

SEQ ID NO: 1976397 - RNA, 19 nt, Artificial Sequence
  Description of Artificial Sequence: Synthetic oligonucleotide
  Antisense strand to SEQ ID NO: 1976396
gugauuccagagaacuaga

SEQ ID NO: 1976398 - RNA, 19 nt, Artificial Sequence
  Description of Artificial Sequence: Synthetic oligonucleotide
  Sense strand starting at position 3585 of SEQ ID NO: 1880558
agauaagguaauuggaguu

SEQ ID NO: 1976399 - RNA, 19 nt, Artificial Sequence
  Description of Artificial Sequence: Synthetic oligonucleotide
  Antisense strand to SEQ ID NO: 1976398
aacuccaauuaccuuaucu

SEQ ID NO: 1976400 - RNA, 19 nt, Artificial Sequence
  Description of Artificial Sequence: Synthetic oligonucleotide
  Sense strand starting at position 3645 of SEQ ID NO: 1880558
aaguuagcugaggaucuua

SEQ ID NO: 1976401 - RNA, 19 nt, Artificial Sequence
  Description of Artificial Sequence: Synthetic oligonucleotide
  Antisense strand to SEQ ID NO: 1976400
uaagauccucagcuaacuu

SEQ ID NO: 1976402 - RNA, 19 nt, Artificial Sequence
  Description of Artificial Sequence: Synthetic oligonucleotide
  Sense strand starting at position 3656 of SEQ ID NO: 1880558
ggaucuuacuacuuuaguu

SEQ ID NO: 1976403 - RNA, 19 nt, Artificial Sequence
  Description of Artificial Sequence: Synthetic oligonucleotide
  Antisense strand to SEQ ID NO: 1976402
aacuaaaguaguaagaucc

SEQ ID NO: 1976404 - RNA, 19 nt, Artificial Sequence
  Description of Artificial Sequence: Synthetic oligonucleotide
  Sense strand starting at position 3909 of SEQ ID NO: 1880558
cuuugaaugcgguaugaau

SEQ ID NO: 1976405 - RNA, 19 nt, Artificial Sequence
  Description of Artificial Sequence: Synthetic oligonucleotide
  Antisense strand to SEQ ID NO: 1976404
auucauaccgcauucaaag

SEQ ID NO: 1976406 - RNA, 19 nt, Artificial Sequence
  Description of Artificial Sequence: Synthetic oligonucleotide
  Sense strand starting at position 3911 of SEQ ID NO: 1880558
uugaaugcgguaugaauaa

SEQ ID NO: 1976407 - RNA, 19 nt, Artificial Sequence
  Description of Artificial Sequence: Synthetic oligonucleotide
  Antisense strand to SEQ ID NO: 1976406
uuauucauaccgcauucaa

SEQ ID NO: 1976408 - RNA, 19 nt, Artificial Sequence
  Description of Artificial Sequence: Synthetic oligonucleotide
  Sense strand starting at position 175 of SEQ ID NO: 1880559
aaauaauagcagcgguaaa

SEQ ID NO: 1976409 - RNA, 19 nt, Artificial Sequence
  Description of Artificial Sequence: Synthetic oligonucleotide
  Antisense strand to SEQ ID NO: 1976408
uuuaccgcugcuauuauuu

SEQ ID NO: 1976410 - RNA, 19 nt, Artificial Sequence
  Description of Artificial Sequence: Synthetic oligonucleotide
  Sense strand starting at position 185 of SEQ ID NO: 1880559
agcgguaaagugcaauuaa

SEQ ID NO: 1976411 - RNA, 19 nt, Artificial Sequence
  Description of Artificial Sequence: Synthetic oligonucleotide
  Antisense strand to SEQ ID NO: 1976410
uuaauugcacuuuaccgcu

SEQ ID NO: 1976412 - RNA, 19 nt, Artificial Sequence
  Description of Artificial Sequence: Synthetic oligonucleotide
  Sense strand starting at position 246 of SEQ ID NO: 1880559
uugacacaacuuuggaauu

SEQ ID NO: 1976413 - RNA, 19 nt, Artificial Sequence
  Description of Artificial Sequence: Synthetic oligonucleotide
  Antisense strand to SEQ ID NO: 1976412
aauuccaaaguugugucaa

SEQ ID NO: 1976414 - RNA, 19 nt, Artificial Sequence
  Description of Artificial Sequence: Synthetic oligonucleotide
  Sense strand starting at position 332 of SEQ ID NO: 1880559
uucugaagcgacuauauau

SEQ ID NO: 1976415 - RNA, 19 nt, Artificial Sequence
  Description of Artificial Sequence: Synthetic oligonucleotide
  Antisense strand to SEQ ID NO: 1976414
auauauagucgcuucagaa

SEQ ID NO: 1976416 - RNA, 19 nt, Artificial Sequence
  Description of Artificial Sequence: Synthetic oligonucleotide
  Sense strand starting at position 341 of SEQ ID NO: 1880559
gacuauauaugugcaguca

SEQ ID NO: 1976417 - RNA, 19 nt, Artificial Sequence
  Description of Artificial Sequence: Synthetic oligonucleotide
  Antisense strand to SEQ ID NO: 1976416
ugacugcacauauauaguc

SEQ ID NO: 1976418 - RNA, 19 nt, Artificial Sequence
  Description of Artificial Sequence: Synthetic oligonucleotide
  Sense strand starting at position 342 of SEQ ID NO: 1880559
acuauauaugugcagucau

SEQ ID NO: 1976419 - RNA, 19 nt, Artificial Sequence
  Description of Artificial Sequence: Synthetic oligonucleotide
  Antisense strand to SEQ ID NO: 1976418
augacugcacauauauagu

SEQ ID NO: 1976420 - RNA, 19 nt, Artificial Sequence
  Description of Artificial Sequence: Synthetic oligonucleotide
  Sense strand starting at position 365 of SEQ ID NO: 1880559
ggcccaauccacgggagaa

SEQ ID NO: 1976421 - RNA, 19 nt, Artificial Sequence
  Description of Artificial Sequence: Synthetic oligonucleotide
  Antisense strand to SEQ ID NO: 1976420
uucucccguggauugggcc

SEQ ID NO: 1976422 - RNA, 19 nt, Artificial Sequence
  Description of Artificial Sequence: Synthetic oligonucleotide
  Sense strand starting at position 366 of SEQ ID NO: 1880559
gcccaauccacgggagaaa

SEQ ID NO: 1976423 - RNA, 19 nt, Artificial Sequence
  Description of Artificial Sequence: Synthetic oligonucleotide
  Antisense strand to SEQ ID NO: 1976422
uuucucccguggauugggc

SEQ ID NO: 1976424 - RNA, 19 nt, Artificial Sequence
  Description of Artificial Sequence: Synthetic oligonucleotide
  Sense strand starting at position 542 of SEQ ID NO: 1880559
ugugaugcauacuuaaugu

SEQ ID NO: 1976425 - RNA, 19 nt, Artificial Sequence
  Description of Artificial Sequence: Synthetic oligonucleotide
  Antisense strand to SEQ ID NO: 1976424
acauuaaguaugcaucaca

SEQ ID NO: 1976426 - RNA, 19 nt, Artificial Sequence
  Description of Artificial Sequence: Synthetic oligonucleotide
  Sense strand starting at position 553 of SEQ ID NO: 1880559
cuuaaugucccauaguugu

SEQ ID NO: 1976427 - RNA, 19 nt, Artificial Sequence
  Description of Artificial Sequence: Synthetic oligonucleotide
  Antisense strand to SEQ ID NO: 1976426
acaacuaugggacauuaag

SEQ ID NO: 1976428 - RNA, 19 nt, Artificial Sequence
  Description of Artificial Sequence: Synthetic oligonucleotide
  Sense strand starting at position 1115 of SEQ ID NO: 1880559
gaaugaaccucugugagug

SEQ ID NO: 1976429 - RNA, 19 nt, Artificial Sequence
  Description of Artificial Sequence: Synthetic oligonucleotide
  Antisense strand to SEQ ID NO: 1976428
cacucacagagguucauuc

SEQ ID NO: 1976430 - RNA, 19 nt, Artificial Sequence
  Description of Artificial Sequence: Synthetic oligonucleotide
  Sense strand starting at position 1144 of SEQ ID NO: 1880559
caugguuuguguuuauuua

SEQ ID NO: 1976431 - RNA, 19 nt, Artificial Sequence
  Description of Artificial Sequence: Synthetic oligonucleotide
  Antisense strand to SEQ ID NO: 1976430
uaaauaaacacaaaccaug

SEQ ID NO: 1976432 - RNA, 19 nt, Artificial Sequence
  Description of Artificial Sequence: Synthetic oligonucleotide
  Sense strand starting at position 1219 of SEQ ID NO: 1880559
cagggauggucuuuacuca

SEQ ID NO: 1976433 - RNA, 19 nt, Artificial Sequence
  Description of Artificial Sequence: Synthetic oligonucleotide
  Antisense strand to SEQ ID NO: 1976432
ugaguaaagaccaucccug

SEQ ID NO: 1976434 - RNA, 19 nt, Artificial Sequence
  Description of Artificial Sequence: Synthetic oligonucleotide
  Sense strand starting at position 1226 of SEQ ID NO: 1880559
ggucuuuacucaucauugu

SEQ ID NO: 1976435 - RNA, 19 nt, Artificial Sequence
  Description of Artificial Sequence: Synthetic oligonucleotide
  Antisense strand to SEQ ID NO: 1976434
acaaugaugaguaaagacc

SEQ ID NO: 1976436 - RNA, 19 nt, Artificial Sequence
  Description of Artificial Sequence: Synthetic oligonucleotide
  Sense strand starting at position 1227 of SEQ ID NO: 1880559
gucuuuacucaucauuguu

SEQ ID NO: 1976437 - RNA, 19 nt, Artificial Sequence
  Description of Artificial Sequence: Synthetic oligonucleotide
  Antisense strand to SEQ ID NO: 1976436
aacaaugaugaguaaagac

SEQ ID NO: 1976438 - RNA, 19 nt, Artificial Sequence
  Description of Artificial Sequence: Synthetic oligonucleotide
  Sense strand starting at position 1243 of SEQ ID NO: 1880559
guucuuauuccucagcuca

SEQ ID NO: 1976439 - RNA, 19 nt, Artificial Sequence
  Description of Artificial Sequence: Synthetic oligonucleotide
  Antisense strand to SEQ ID NO: 1976438
ugagcugaggaauaagaac

SEQ ID NO: 1976440 - RNA, 19 nt, Artificial Sequence
  Description of Artificial Sequence: Synthetic oligonucleotide
  Sense strand starting at position 1717 of SEQ ID NO: 1880559
uguuguugucacuaaauaa

SEQ ID NO: 1976441 - RNA, 19 nt, Artificial Sequence
  Description of Artificial Sequence: Synthetic oligonucleotide
  Antisense strand to SEQ ID NO: 1976440
uuauuuagugacaacaaca

SEQ ID NO: 1976442 - RNA, 19 nt, Artificial Sequence
  Description of Artificial Sequence: Synthetic oligonucleotide
  Sense strand starting at position 1996 of SEQ ID NO: 1880559
guguccucacacggaagaa

SEQ ID NO: 1976443 - RNA, 19 nt, Artificial Sequence
  Description of Artificial Sequence: Synthetic oligonucleotide
  Antisense strand to SEQ ID NO: 1976442
uucuuccgugugaggacac

SEQ ID NO: 1976444 - RNA, 19 nt, Artificial Sequence
  Description of Artificial Sequence: Synthetic oligonucleotide
  Sense strand starting at position 2038 of SEQ ID NO: 1880559
cucuuuauagggcaguaau

SEQ ID NO: 1976445 - RNA, 19 nt, Artificial Sequence
  Description of Artificial Sequence: Synthetic oligonucleotide
  Antisense strand to SEQ ID NO: 1976444
auuacugcccuauaaagag

SEQ ID NO: 1976446 - RNA, 19 nt, Artificial Sequence
  Description of Artificial Sequence: Synthetic oligonucleotide
  Sense strand starting at position 2071 of SEQ ID NO: 1880559
aucuguccucauggcuuaa

SEQ ID NO: 1976447 - RNA, 19 nt, Artificial Sequence
  Description of Artificial Sequence: Synthetic oligonucleotide
  Antisense strand to SEQ ID NO: 1976446
uuaagccaugaggacagau

SEQ ID NO: 1976448 - RNA, 19 nt, Artificial Sequence
  Description of Artificial Sequence: Synthetic oligonucleotide
  Sense strand starting at position 2467 of SEQ ID NO: 1880559
acaguuugagcauaugaau

SEQ ID NO: 1976449 - RNA, 19 nt, Artificial Sequence
  Description of Artificial Sequence: Synthetic oligonucleotide
  Antisense strand to SEQ ID NO: 1976448
auucauaugcucaaacugu

SEQ ID NO: 1976450 - RNA, 19 nt, Artificial Sequence
  Description of Artificial Sequence: Synthetic oligonucleotide
  Sense strand starting at position 2778 of SEQ ID NO: 1880559
gauugcagcuuuccaagga

SEQ ID NO: 1976451 - RNA, 19 nt, Artificial Sequence
  Description of Artificial Sequence: Synthetic oligonucleotide
  Antisense strand to SEQ ID NO: 1976450
uccuuggaaagcugcaauc

SEQ ID NO: 1976452 - RNA, 19 nt, Artificial Sequence
  Description of Artificial Sequence: Synthetic oligonucleotide
  Sense strand starting at position 2948 of SEQ ID NO: 1880559
auaggauauugacuugagu

SEQ ID NO: 1976453 - RNA, 19 nt, Artificial Sequence
  Description of Artificial Sequence: Synthetic oligonucleotide
  Antisense strand to SEQ ID NO: 1976452
acucaagucaauauccuau

SEQ ID NO: 1976454 - RNA, 19 nt, Artificial Sequence
  Description of Artificial Sequence: Synthetic oligonucleotide
  Sense strand starting at position 3098 of SEQ ID NO: 1880559
uguugagucagggagauuc

SEQ ID NO: 1976455 - RNA, 19 nt, Artificial Sequence
  Description of Artificial Sequence: Synthetic oligonucleotide
  Antisense strand to SEQ ID NO: 1976454
gaaucucccugacucaaca

SEQ ID NO: 1976456 - RNA, 19 nt, Artificial Sequence
  Description of Artificial Sequence: Synthetic oligonucleotide
  Sense strand starting at position 3139 of SEQ ID NO: 1880559
aacugucuggcugagagua

SEQ ID NO: 1976457 - RNA, 19 nt, Artificial Sequence
  Description of Artificial Sequence: Synthetic oligonucleotide
  Antisense strand to SEQ ID NO: 1976456
uacucucagccagacaguu

SEQ ID NO: 1976458 - RNA, 19 nt, Artificial Sequence
  Description of Artificial Sequence: Synthetic oligonucleotide
  Sense strand starting at position 3432 of SEQ ID NO: 1880559
ucaggauuccugugucuag

SEQ ID NO: 1976459 - RNA, 19 nt, Artificial Sequence
  Description of Artificial Sequence: Synthetic oligonucleotide
  Antisense strand to SEQ ID NO: 1976458
cuagacacaggaauccuga

SEQ ID NO: 1976460 - RNA, 19 nt, Artificial Sequence
  Description of Artificial Sequence: Synthetic oligonucleotide
  Sense strand starting at position 3433 of SEQ ID NO: 1880559
caggauuccugugucuaga

SEQ ID NO: 1976461 - RNA, 19 nt, Artificial Sequence
  Description of Artificial Sequence: Synthetic oligonucleotide
  Antisense strand to SEQ ID NO: 1976460
ucuagacacaggaauccug

SEQ ID NO: 1976462 - RNA, 19 nt, Artificial Sequence
  Description of Artificial Sequence: Synthetic oligonucleotide
  Sense strand starting at position 3435 of SEQ ID NO: 1880559
ggauuccugugucuagauu

SEQ ID NO: 1976463 - RNA, 19 nt, Artificial Sequence
  Description of Artificial Sequence: Synthetic oligonucleotide
  Antisense strand to SEQ ID NO: 1976462
aaucuagacacaggaaucc

SEQ ID NO: 1976464 - RNA, 19 nt, Artificial Sequence
  Description of Artificial Sequence: Synthetic oligonucleotide
  Sense strand starting at position 3587 of SEQ ID NO: 1880559
gccuuuacauuucuuguua

SEQ ID NO: 1976465 - RNA, 19 nt, Artificial Sequence
  Description of Artificial Sequence: Synthetic oligonucleotide
  Antisense strand to SEQ ID NO: 1976464
uaacaagaaauguaaaggc

SEQ ID NO: 1976466 - RNA, 19 nt, Artificial Sequence
  Description of Artificial Sequence: Synthetic oligonucleotide
  Sense strand starting at position 3661 of SEQ ID NO: 1880559
uuaagugaauugcucaaga

SEQ ID NO: 1976467 - RNA, 19 nt, Artificial Sequence
  Description of Artificial Sequence: Synthetic oligonucleotide
  Antisense strand to SEQ ID NO: 1976466
ucuugagcaauucacuuaa

SEQ ID NO: 1976468 - RNA, 19 nt, Artificial Sequence
  Description of Artificial Sequence: Synthetic oligonucleotide
  Sense strand starting at position 3706 of SEQ ID NO: 1880559
aaguccugagcccgacaua

SEQ ID NO: 1976469 - RNA, 19 nt, Artificial Sequence
  Description of Artificial Sequence: Synthetic oligonucleotide
  Antisense strand to SEQ ID NO: 1976468
uaugucgggcucaggacuu

SEQ ID NO: 1976470 - RNA, 19 nt, Artificial Sequence
  Description of Artificial Sequence: Synthetic oligonucleotide
  Sense strand starting at position 3774 of SEQ ID NO: 1880559
agccuauuugcuugaucac

SEQ ID NO: 1976471 - RNA, 19 nt, Artificial Sequence
  Description of Artificial Sequence: Synthetic oligonucleotide
  Antisense strand to SEQ ID NO: 1976470
gugaucaagcaaauaggcu

SEQ ID NO: 1976472 - RNA, 19 nt, Artificial Sequence
  Description of Artificial Sequence: Synthetic oligonucleotide
  Sense strand starting at position 3820 of SEQ ID NO: 1880559
acaccaucugucuguugaa

SEQ ID NO: 1976473 - RNA, 19 nt, Artificial Sequence
  Description of Artificial Sequence: Synthetic oligonucleotide
  Antisense strand to SEQ ID NO: 1976472
uucaacagacagauggugu

SEQ ID NO: 1976474 - RNA, 19 nt, Artificial Sequence
  Description of Artificial Sequence: Synthetic oligonucleotide
  Sense strand starting at position 3876 of SEQ ID NO: 1880559
gagaguaaacagugguuua

SEQ ID NO: 1976475 - RNA, 19 nt, Artificial Sequence
  Description of Artificial Sequence: Synthetic oligonucleotide
  Antisense strand to SEQ ID NO: 1976474
uaaaccacuguuuacucuc

SEQ ID NO: 1976476 - RNA, 19 nt, Artificial Sequence
  Description of Artificial Sequence: Synthetic oligonucleotide
  Sense strand starting at position 3877 of SEQ ID NO: 1880559
agaguaaacagugguuuau

SEQ ID NO: 1976477 - RNA, 19 nt, Artificial Sequence
  Description of Artificial Sequence: Synthetic oligonucleotide
  Antisense strand to SEQ ID NO: 1976476
auaaaccacuguuuacucu

SEQ ID NO: 1976478 - RNA, 19 nt, Artificial Sequence
  Description of Artificial Sequence: Synthetic oligonucleotide
  Sense strand starting at position 3879 of SEQ ID NO: 1880559
aguaaacagugguuuauaa

SEQ ID NO: 1976479 - RNA, 19 nt, Artificial Sequence
  Description of Artificial Sequence: Synthetic oligonucleotide
  Antisense strand to SEQ ID NO: 1976478
uuauaaaccacuguuuacu

SEQ ID NO: 1976480 - RNA, 19 nt, Artificial Sequence
  Description of Artificial Sequence: Synthetic oligonucleotide
  Sense strand starting at position 3911 of SEQ ID NO: 1880559
aguguauuggcugaguaaa

SEQ ID NO: 1976481 - RNA, 19 nt, Artificial Sequence
  Description of Artificial Sequence: Synthetic oligonucleotide
  Antisense strand to SEQ ID NO: 1976480
uuuacucagccaauacacu

SEQ ID NO: 1976482 - RNA, 19 nt, Artificial Sequence
  Description of Artificial Sequence: Synthetic oligonucleotide
  Sense strand starting at position 3954 of SEQ ID NO: 1880559
uagauagucugguuggaug

SEQ ID NO: 1976483 - RNA, 19 nt, Artificial Sequence
  Description of Artificial Sequence: Synthetic oligonucleotide
  Antisense strand to SEQ ID NO: 1976482
cauccaaccagacuaucua

SEQ ID NO: 1976484 - RNA, 19 nt, Artificial Sequence
  Description of Artificial Sequence: Synthetic oligonucleotide
  Sense strand starting at position 3956 of SEQ ID NO: 1880559
gauagucugguuggaugau

SEQ ID NO: 1976485 - RNA, 19 nt, Artificial Sequence
  Description of Artificial Sequence: Synthetic oligonucleotide
  Antisense strand to SEQ ID NO: 1976484
aucauccaaccagacuauc

SEQ ID NO: 1976486 - RNA, 19 nt, Artificial Sequence
  Description of Artificial Sequence: Synthetic oligonucleotide
  Sense strand starting at position 3965 of SEQ ID NO: 1880559
guuggaugauuggcaguaa

SEQ ID NO: 1976487 - RNA, 19 nt, Artificial Sequence
  Description of Artificial Sequence: Synthetic oligonucleotide
  Antisense strand to SEQ ID NO: 1976486
uuacugccaaucauccaac

SEQ ID NO: 1976488 - RNA, 19 nt, Artificial Sequence
  Description of Artificial Sequence: Synthetic oligonucleotide
  Sense strand starting at position 52 of SEQ ID NO: 1880560
acccuagcucccuaguuau

SEQ ID NO: 1976489 - RNA, 19 nt, Artificial Sequence
  Description of Artificial Sequence: Synthetic oligonucleotide
  Antisense strand to SEQ ID NO: 1976488
auaacuagggagcuagggu

SEQ ID NO: 1976490 - RNA, 19 nt, Artificial Sequence
  Description of Artificial Sequence: Synthetic oligonucleotide
  Sense strand starting at position 69 of SEQ ID NO: 1880560
auaguuuauguccagcaaa

SEQ ID NO: 1976491 - RNA, 19 nt, Artificial Sequence
  Description of Artificial Sequence: Synthetic oligonucleotide
  Antisense strand to SEQ ID NO: 1976490
uuugcuggacauaaacuau

SEQ ID NO: 1976492 - RNA, 19 nt, Artificial Sequence
  Description of Artificial Sequence: Synthetic oligonucleotide
  Sense strand starting at position 72 of SEQ ID NO: 1880560
guuuauguccagcaaagac

SEQ ID NO: 1976493 - RNA, 19 nt, Artificial Sequence
  Description of Artificial Sequence: Synthetic oligonucleotide
  Antisense strand to SEQ ID NO: 1976492
gucuuugcuggacauaaac

SEQ ID NO: 1976494 - RNA, 19 nt, Artificial Sequence
  Description of Artificial Sequence: Synthetic oligonucleotide
  Sense strand starting at position 82 of SEQ ID NO: 1880560
agcaaagacuugucacucu

SEQ ID NO: 1976495 - RNA, 19 nt, Artificial Sequence
  Description of Artificial Sequence: Synthetic oligonucleotide
  Antisense strand to SEQ ID NO: 1976494
agagugacaagucuuugcu

SEQ ID NO: 1976496 - RNA, 19 nt, Artificial Sequence
  Description of Artificial Sequence: Synthetic oligonucleotide
  Sense strand starting at position 137 of SEQ ID NO: 1880560
gcuauuucucaauguguga

SEQ ID NO: 1976497 - RNA, 19 nt, Artificial Sequence
  Description of Artificial Sequence: Synthetic oligonucleotide
  Antisense strand to SEQ ID NO: 1976496
ucacacauugagaaauagc

SEQ ID NO: 1976498 - RNA, 19 nt, Artificial Sequence
  Description of Artificial Sequence: Synthetic oligonucleotide
  Sense strand starting at position 321 of SEQ ID NO: 1880560
aaagaucaacugugaguga

SEQ ID NO: 1976499 - RNA, 19 nt, Artificial Sequence
  Description of Artificial Sequence: Synthetic oligonucleotide
  Antisense strand to SEQ ID NO: 1976498
ucacucacaguugaucuuu

SEQ ID NO: 1976500 - RNA, 19 nt, Artificial Sequence
  Description of Artificial Sequence: Synthetic oligonucleotide
  Sense strand starting at position 336 of SEQ ID NO: 1880560
gugaccacuugaucuggaa

SEQ ID NO: 1976501 - RNA, 19 nt, Artificial Sequence
  Description of Artificial Sequence: Synthetic oligonucleotide
  Antisense strand to SEQ ID NO: 1976500
uuccagaucaaguggucac

SEQ ID NO: 1976502 - RNA, 19 nt, Artificial Sequence
  Description of Artificial Sequence: Synthetic oligonucleotide
  Sense strand starting at position 416 of SEQ ID NO: 1880560
cugugaaaugaguguaaga

SEQ ID NO: 1976503 - RNA, 19 nt, Artificial Sequence
  Description of Artificial Sequence: Synthetic oligonucleotide
  Antisense strand to SEQ ID NO: 1976502
ucuuacacucauuucacag

SEQ ID NO: 1976504 - RNA, 19 nt, Artificial Sequence
  Description of Artificial Sequence: Synthetic oligonucleotide
  Sense strand starting at position 431 of SEQ ID NO: 1880560
aagaauuccugugucacag

SEQ ID NO: 1976505 - RNA, 19 nt, Artificial Sequence
  Description of Artificial Sequence: Synthetic oligonucleotide
  Antisense strand to SEQ ID NO: 1976504
cugugacacaggaauucuu

SEQ ID NO: 1976506 - RNA, 19 nt, Artificial Sequence
  Description of Artificial Sequence: Synthetic oligonucleotide
  Sense strand starting at position 776 of SEQ ID NO: 1880560
ucuuguaagauggguauaa

SEQ ID NO: 1976507 - RNA, 19 nt, Artificial Sequence
  Description of Artificial Sequence: Synthetic oligonucleotide
  Antisense strand to SEQ ID NO: 1976506
uuauacccaucuuacaaga

SEQ ID NO: 1976508 - RNA, 19 nt, Artificial Sequence
  Description of Artificial Sequence: Synthetic oligonucleotide
  Sense strand starting at position 777 of SEQ ID NO: 1880560
cuuguaagauggguauaau

SEQ ID NO: 1976509 - RNA, 19 nt, Artificial Sequence
  Description of Artificial Sequence: Synthetic oligonucleotide
  Antisense strand to SEQ ID NO: 1976508
auuauacccaucuuacaag

SEQ ID NO: 1976510 - RNA, 19 nt, Artificial Sequence
  Description of Artificial Sequence: Synthetic oligonucleotide
  Sense strand starting at position 896 of SEQ ID NO: 1880560
ccgugugacauuuggccaa

SEQ ID NO: 1976511 - RNA, 19 nt, Artificial Sequence
  Description of Artificial Sequence: Synthetic oligonucleotide
  Antisense strand to SEQ ID NO: 1976510
uuggccaaaugucacacgg

SEQ ID NO: 1976512 - RNA, 19 nt, Artificial Sequence
  Description of Artificial Sequence: Synthetic oligonucleotide
  Sense strand starting at position 898 of SEQ ID NO: 1880560
gugugacauuuggccaagu

SEQ ID NO: 1976513 - RNA, 19 nt, Artificial Sequence
  Description of Artificial Sequence: Synthetic oligonucleotide
  Antisense strand to SEQ ID NO: 1976512
acuuggccaaaugucacac

SEQ ID NO: 1976514 - RNA, 19 nt, Artificial Sequence
  Description of Artificial Sequence: Synthetic oligonucleotide
  Sense strand starting at position 983 of SEQ ID NO: 1880560
gcagguauugaguaagaua

SEQ ID NO: 1976515 - RNA, 19 nt, Artificial Sequence
  Description of Artificial Sequence: Synthetic oligonucleotide
  Antisense strand to SEQ ID NO: 1976514
uaucuuacucaauaccugc

SEQ ID NO: 1976516 - RNA, 19 nt, Artificial Sequence
  Description of Artificial Sequence: Synthetic oligonucleotide
  Sense strand starting at position 1176 of SEQ ID NO: 1880560
ugcucugcccagcaauaaa

SEQ ID NO: 1976517 - RNA, 19 nt, Artificial Sequence
  Description of Artificial Sequence: Synthetic oligonucleotide
  Antisense strand to SEQ ID NO: 1976516
uuuauugcugggcagagca

SEQ ID NO: 1976518 - RNA, 19 nt, Artificial Sequence
  Description of Artificial Sequence: Synthetic oligonucleotide
  Sense strand starting at position 1187 of SEQ ID NO: 1880560
gcaauaaacuaggugaaga

SEQ ID NO: 1976519 - RNA, 19 nt, Artificial Sequence
  Description of Artificial Sequence: Synthetic oligonucleotide
  Antisense strand to SEQ ID NO: 1976518
ucuucaccuaguuuauugc

SEQ ID NO: 1976520 - RNA, 19 nt, Artificial Sequence
  Description of Artificial Sequence: Synthetic oligonucleotide
  Sense strand starting at position 1227 of SEQ ID NO: 1880560
cuauuaagaugucuguuga

SEQ ID NO: 1976521 - RNA, 19 nt, Artificial Sequence
  Description of Artificial Sequence: Synthetic oligonucleotide
  Antisense strand to SEQ ID NO: 1976520
ucaacagacaucuuaauag

SEQ ID NO: 1976522 - RNA, 19 nt, Artificial Sequence
  Description of Artificial Sequence: Synthetic oligonucleotide
  Sense strand starting at position 1387 of SEQ ID NO: 1880560
gcaacuucaguuggagaga

SEQ ID NO: 1976523 - RNA, 19 nt, Artificial Sequence
  Description of Artificial Sequence: Synthetic oligonucleotide
  Antisense strand to SEQ ID NO: 1976522
ucucuccaacugaaguugc

SEQ ID NO: 1976524 - RNA, 19 nt, Artificial Sequence
  Description of Artificial Sequence: Synthetic oligonucleotide
  Sense strand starting at position 1405 of SEQ ID NO: 1880560
aguagaauucagugggcaa

SEQ ID NO: 1976525 - RNA, 19 nt, Artificial Sequence
  Description of Artificial Sequence: Synthetic oligonucleotide
  Antisense strand to SEQ ID NO: 1976524
uugcccacugaauucuacu

SEQ ID NO: 1976526 - RNA, 19 nt, Artificial Sequence
  Description of Artificial Sequence: Synthetic oligonucleotide
  Sense strand starting at position 1408 of SEQ ID NO: 1880560
agaauucagugggcaaagu

SEQ ID NO: 1976527 - RNA, 19 nt, Artificial Sequence
  Description of Artificial Sequence: Synthetic oligonucleotide
  Antisense strand to SEQ ID NO: 1976526
acuuugcccacugaauucu

SEQ ID NO: 1976528 - RNA, 19 nt, Artificial Sequence
  Description of Artificial Sequence: Synthetic oligonucleotide
  Sense strand starting at position 1428 of SEQ ID NO: 1880560
gugagccauccucaggaau

SEQ ID NO: 1976529 - RNA, 19 nt, Artificial Sequence
  Description of Artificial Sequence: Synthetic oligonucleotide
  Antisense strand to SEQ ID NO: 1976528
auuccugaggauggcucac

SEQ ID NO: 1976530 - RNA, 19 nt, Artificial Sequence
  Description of Artificial Sequence: Synthetic oligonucleotide
  Sense strand starting at position 1454 of SEQ ID NO: 1880560
ugggucacuuuaccugaua

SEQ ID NO: 1976531 - RNA, 19 nt, Artificial Sequence
  Description of Artificial Sequence: Synthetic oligonucleotide
  Antisense strand to SEQ ID NO: 1976530
uaucagguaaagugaccca

SEQ ID NO: 1976532 - RNA, 19 nt, Artificial Sequence
  Description of Artificial Sequence: Synthetic oligonucleotide
  Sense strand starting at position 1455 of SEQ ID NO: 1880560
gggucacuuuaccugauau

SEQ ID NO: 1976533 - RNA, 19 nt, Artificial Sequence
  Description of Artificial Sequence: Synthetic oligonucleotide
  Antisense strand to SEQ ID NO: 1976532
auaucagguaaagugaccc

SEQ ID NO: 1976534 - RNA, 19 nt, Artificial Sequence
  Description of Artificial Sequence: Synthetic oligonucleotide
  Sense strand starting at position 1457 of SEQ ID NO: 1880560
gucacuuuaccugauauug

SEQ ID NO: 1976535 - RNA, 19 nt, Artificial Sequence
  Description of Artificial Sequence: Synthetic oligonucleotide
  Antisense strand to SEQ ID NO: 1976534
caauaucagguaaagugac

SEQ ID NO: 1976536 - RNA, 19 nt, Artificial Sequence
  Description of Artificial Sequence: Synthetic oligonucleotide
  Sense strand starting at position 2185 of SEQ ID NO: 1880560
gagagaccgucuguuacua

SEQ ID NO: 1976537 - RNA, 19 nt, Artificial Sequence
  Description of Artificial Sequence: Synthetic oligonucleotide
  Antisense strand to SEQ ID NO: 1976536
uaguaacagacggucucuc

SEQ ID NO: 1976538 - RNA, 19 nt, Artificial Sequence
  Description of Artificial Sequence: Synthetic oligonucleotide
  Sense strand starting at position 2228 of SEQ ID NO: 1880560
uaggcaugccuggauaugu

SEQ ID NO: 1976539 - RNA, 19 nt, Artificial Sequence
  Description of Artificial Sequence: Synthetic oligonucleotide
  Antisense strand to SEQ ID NO: 1976538
acauauccaggcaugccua

SEQ ID NO: 1976540 - RNA, 19 nt, Artificial Sequence
  Description of Artificial Sequence: Synthetic oligonucleotide
  Sense strand starting at position 2413 of SEQ ID NO: 1880560
gaggaacuuaguugugcua

SEQ ID NO: 1976541 - RNA, 19 nt, Artificial Sequence
  Description of Artificial Sequence: Synthetic oligonucleotide
  Antisense strand to SEQ ID NO: 1976540
uagcacaacuaaguuccuc

SEQ ID NO: 1976542 - RNA, 19 nt, Artificial Sequence
  Description of Artificial Sequence: Synthetic oligonucleotide
  Sense strand starting at position 2416 of SEQ ID NO: 1880560
gaacuuaguugugcuaaca

SEQ ID NO: 1976543 - RNA, 19 nt, Artificial Sequence
  Description of Artificial Sequence: Synthetic oligonucleotide
  Antisense strand to SEQ ID NO: 1976542
uguuagcacaacuaaguuc

SEQ ID NO: 1976544 - RNA, 19 nt, Artificial Sequence
  Description of Artificial Sequence: Synthetic oligonucleotide
  Sense strand starting at position 2937 of SEQ ID NO: 1880560
ggugguuauacagggagau

SEQ ID NO: 1976545 - RNA, 19 nt, Artificial Sequence
  Description of Artificial Sequence: Synthetic oligonucleotide
  Antisense strand to SEQ ID NO: 1976544
aucucccuguauaaccacc

SEQ ID NO: 1976546 - RNA, 19 nt, Artificial Sequence
  Description of Artificial Sequence: Synthetic oligonucleotide
  Sense strand starting at position 2938 of SEQ ID NO: 1880560
gugguuauacagggagauc

SEQ ID NO: 1976547 - RNA, 19 nt, Artificial Sequence
  Description of Artificial Sequence: Synthetic oligonucleotide
  Antisense strand to SEQ ID NO: 1976546
gaucucccuguauaaccac

SEQ ID NO: 1976548 - RNA, 19 nt, Artificial Sequence
  Description of Artificial Sequence: Synthetic oligonucleotide
  Sense strand starting at position 2982 of SEQ ID NO: 1880560
uuaugauuccucuagaguu

SEQ ID NO: 1976549 - RNA, 19 nt, Artificial Sequence
  Description of Artificial Sequence: Synthetic oligonucleotide
  Antisense strand to SEQ ID NO: 1976548
aacucuagaggaaucauaa

SEQ ID NO: 1976550 - RNA, 19 nt, Artificial Sequence
  Description of Artificial Sequence: Synthetic oligonucleotide
  Sense strand starting at position 3062 of SEQ ID NO: 1880560
gucugaauggagggucaaa

SEQ ID NO: 1976551 - RNA, 19 nt, Artificial Sequence
  Description of Artificial Sequence: Synthetic oligonucleotide
  Antisense strand to SEQ ID NO: 1976550
uuugacccuccauucagac

SEQ ID NO: 1976552 - RNA, 19 nt, Artificial Sequence
  Description of Artificial Sequence: Synthetic oligonucleotide
  Sense strand starting at position 3075 of SEQ ID NO: 1880560
gucaaauucgaaggagauu

SEQ ID NO: 1976553 - RNA, 19 nt, Artificial Sequence
  Description of Artificial Sequence: Synthetic oligonucleotide
  Antisense strand to SEQ ID NO: 1976552
aaucuccuucgaauuugac

SEQ ID NO: 1976554 - RNA, 19 nt, Artificial Sequence
  Description of Artificial Sequence: Synthetic oligonucleotide
  Sense strand starting at position 3084 of SEQ ID NO: 1880560
gaaggagauuucugaggca

SEQ ID NO: 1976555 - RNA, 19 nt, Artificial Sequence
  Description of Artificial Sequence: Synthetic oligonucleotide
  Antisense strand to SEQ ID NO: 1976554
ugccucagaaaucuccuuc

SEQ ID NO: 1976556 - RNA, 19 nt, Artificial Sequence
  Description of Artificial Sequence: Synthetic oligonucleotide
  Sense strand starting at position 3318 of SEQ ID NO: 1880560
cagugauggucucuccaga

SEQ ID NO: 1976557 - RNA, 19 nt, Artificial Sequence
  Description of Artificial Sequence: Synthetic oligonucleotide
  Antisense strand to SEQ ID NO: 1976556
ucuggagagaccaucacug

SEQ ID NO: 1976558 - RNA, 19 nt, Artificial Sequence
  Description of Artificial Sequence: Synthetic oligonucleotide
  Sense strand starting at position 3345 of SEQ ID NO: 1880560
uuuccaagguuucugaaca

SEQ ID NO: 1976559 - RNA, 19 nt, Artificial Sequence
  Description of Artificial Sequence: Synthetic oligonucleotide
  Antisense strand to SEQ ID NO: 1976558
uguucagaaaccuuggaaa

SEQ ID NO: 1976560 - RNA, 19 nt, Artificial Sequence
  Description of Artificial Sequence: Synthetic oligonucleotide
  Sense strand starting at position 3383 of SEQ ID NO: 1880560
gaaggauaucuccgaaucc

SEQ ID NO: 1976561 - RNA, 19 nt, Artificial Sequence
  Description of Artificial Sequence: Synthetic oligonucleotide
  Antisense strand to SEQ ID NO: 1976560
ggauucggagauauccuuc

SEQ ID NO: 1976562 - RNA, 19 nt, Artificial Sequence
  Description of Artificial Sequence: Synthetic oligonucleotide
  Sense strand starting at position 3430 of SEQ ID NO: 1880560
ucacacugauggcuauuaa

SEQ ID NO: 1976563 - RNA, 19 nt, Artificial Sequence
  Description of Artificial Sequence: Synthetic oligonucleotide
  Antisense strand to SEQ ID NO: 1976562
uuaauagccaucaguguga

SEQ ID NO: 1976564 - RNA, 19 nt, Artificial Sequence
  Description of Artificial Sequence: Synthetic oligonucleotide
  Sense strand starting at position 3881 of SEQ ID NO: 1880560
ggaaucaaaucugggauuu

SEQ ID NO: 1976565 - RNA, 19 nt, Artificial Sequence
  Description of Artificial Sequence: Synthetic oligonucleotide
  Antisense strand to SEQ ID NO: 1976564
aaaucccagauuugauucc

SEQ ID NO: 1976566 - RNA, 19 nt, Artificial Sequence
  Description of Artificial Sequence: Synthetic oligonucleotide
  Sense strand starting at position 3922 of SEQ ID NO: 1880560
ggacuugagccagguacuu

SEQ ID NO: 1976567 - RNA, 19 nt, Artificial Sequence
  Description of Artificial Sequence: Synthetic oligonucleotide
  Antisense strand to SEQ ID NO: 1976566
aaguaccuggcucaagucc

SEQ ID NO: 1976568 - RNA, 19 nt, Artificial Sequence
  Description of Artificial Sequence: Synthetic oligonucleotide
  Sense strand starting at position 19 of SEQ ID NO: 1880561
ggauguaaagcuuauguga

SEQ ID NO: 1976569 - RNA, 19 nt, Artificial Sequence
  Description of Artificial Sequence: Synthetic oligonucleotide
  Antisense strand to SEQ ID NO: 1976568
ucacauaagcuuuacaucc

SEQ ID NO: 1976570 - RNA, 19 nt, Artificial Sequence
  Description of Artificial Sequence: Synthetic oligonucleotide
  Sense strand starting at position 22 of SEQ ID NO: 1880561
uguaaagcuuaugugauuu

SEQ ID NO: 1976571 - RNA, 19 nt, Artificial Sequence
  Description of Artificial Sequence: Synthetic oligonucleotide
  Antisense strand to SEQ ID NO: 1976570
aaaucacauaagcuuuaca

SEQ ID NO: 1976572 - RNA, 19 nt, Artificial Sequence
  Description of Artificial Sequence: Synthetic oligonucleotide
  Sense strand starting at position 124 of SEQ ID NO: 1880561
gcagaaacuuaauuauguu

SEQ ID NO: 1976573 - RNA, 19 nt, Artificial Sequence
  Description of Artificial Sequence: Synthetic oligonucleotide
  Antisense strand to SEQ ID NO: 1976572
aacauaauuaaguuucugc

SEQ ID NO: 1976574 - RNA, 19 nt, Artificial Sequence
  Description of Artificial Sequence: Synthetic oligonucleotide
  Sense strand starting at position 202 of SEQ ID NO: 1880561
caggcauuugccuggcaau

SEQ ID NO: 1976575 - RNA, 19 nt, Artificial Sequence
  Description of Artificial Sequence: Synthetic oligonucleotide
  Antisense strand to SEQ ID NO: 1976574
auugccaggcaaaugccug

SEQ ID NO: 1976576 - RNA, 19 nt, Artificial Sequence
  Description of Artificial Sequence: Synthetic oligonucleotide
  Sense strand starting at position 203 of SEQ ID NO: 1880561
aggcauuugccuggcaaua

SEQ ID NO: 1976577 - RNA, 19 nt, Artificial Sequence
  Description of Artificial Sequence: Synthetic oligonucleotide
  Antisense strand to SEQ ID NO: 1976576
uauugccaggcaaaugccu

SEQ ID NO: 1976578 - RNA, 19 nt, Artificial Sequence
  Description of Artificial Sequence: Synthetic oligonucleotide
  Sense strand starting at position 326 of SEQ ID NO: 1880561
gguaaaucauuugacugga

SEQ ID NO: 1976579 - RNA, 19 nt, Artificial Sequence
  Description of Artificial Sequence: Synthetic oligonucleotide
  Antisense strand to SEQ ID NO: 1976578
uccagucaaaugauuuacc

SEQ ID NO: 1976580 - RNA, 19 nt, Artificial Sequence
  Description of Artificial Sequence: Synthetic oligonucleotide
  Sense strand starting at position 523 of SEQ ID NO: 1880561
guaaacagauugcuaacaa

SEQ ID NO: 1976581 - RNA, 19 nt, Artificial Sequence
  Description of Artificial Sequence: Synthetic oligonucleotide
  Antisense strand to SEQ ID NO: 1976580
uuguuagcaaucuguuuac

SEQ ID NO: 1976582 - RNA, 19 nt, Artificial Sequence
  Description of Artificial Sequence: Synthetic oligonucleotide
  Sense strand starting at position 657 of SEQ ID NO: 1880561
ggcacagaccuagagguuu

SEQ ID NO: 1976583 - RNA, 19 nt, Artificial Sequence
  Description of Artificial Sequence: Synthetic oligonucleotide
  Antisense strand to SEQ ID NO: 1976582
aaaccucuaggucugugcc

SEQ ID NO: 1976584 - RNA, 19 nt, Artificial Sequence
  Description of Artificial Sequence: Synthetic oligonucleotide
  Sense strand starting at position 716 of SEQ ID NO: 1880561
ccaccuucuguggagaauu

SEQ ID NO: 1976585 - RNA, 19 nt, Artificial Sequence
  Description of Artificial Sequence: Synthetic oligonucleotide
  Antisense strand to SEQ ID NO: 1976584
aauucuccacagaaggugg

SEQ ID NO: 1976586 - RNA, 19 nt, Artificial Sequence
  Description of Artificial Sequence: Synthetic oligonucleotide
  Sense strand starting at position 791 of SEQ ID NO: 1880561
cuuugugauccugauuaau

SEQ ID NO: 1976587 - RNA, 19 nt, Artificial Sequence
  Description of Artificial Sequence: Synthetic oligonucleotide
  Antisense strand to SEQ ID NO: 1976586
auuaaucaggaucacaaag

SEQ ID NO: 1976588 - RNA, 19 nt, Artificial Sequence
  Description of Artificial Sequence: Synthetic oligonucleotide
  Sense strand starting at position 793 of SEQ ID NO: 1880561
uugugauccugauuaauua

SEQ ID NO: 1976589 - RNA, 19 nt, Artificial Sequence
  Description of Artificial Sequence: Synthetic oligonucleotide
  Antisense strand to SEQ ID NO: 1976588
uaauuaaucaggaucacaa

SEQ ID NO: 1976590 - RNA, 19 nt, Artificial Sequence
  Description of Artificial Sequence: Synthetic oligonucleotide
  Sense strand starting at position 1122 of SEQ ID NO: 1880561
gaguauuuguagucccuuu

SEQ ID NO: 1976591 - RNA, 19 nt, Artificial Sequence
  Description of Artificial Sequence: Synthetic oligonucleotide
  Antisense strand to SEQ ID NO: 1976590
aaagggacuacaaauacuc

SEQ ID NO: 1976592 - RNA, 19 nt, Artificial Sequence
  Description of Artificial Sequence: Synthetic oligonucleotide
  Sense strand starting at position 2275 of SEQ ID NO: 1880561
aguccucagcgagggaaua

SEQ ID NO: 1976593 - RNA, 19 nt, Artificial Sequence
  Description of Artificial Sequence: Synthetic oligonucleotide
  Antisense strand to SEQ ID NO: 1976592
uauucccucgcugaggacu

SEQ ID NO: 1976594 - RNA, 19 nt, Artificial Sequence
  Description of Artificial Sequence: Synthetic oligonucleotide
  Sense strand starting at position 2558 of SEQ ID NO: 1880561
cugguuauuuaggaggagu

SEQ ID NO: 1976595 - RNA, 19 nt, Artificial Sequence
  Description of Artificial Sequence: Synthetic oligonucleotide
  Antisense strand to SEQ ID NO: 1976594
acuccuccuaaauaaccag

SEQ ID NO: 1976596 - RNA, 19 nt, Artificial Sequence
  Description of Artificial Sequence: Synthetic oligonucleotide
  Sense strand starting at position 2607 of SEQ ID NO: 1880561
ggagaauauuuagaagcau

SEQ ID NO: 1976597 - RNA, 19 nt, Artificial Sequence
  Description of Artificial Sequence: Synthetic oligonucleotide
  Antisense strand to SEQ ID NO: 1976596
augcuucuaaauauucucc

SEQ ID NO: 1976598 - RNA, 19 nt, Artificial Sequence
  Description of Artificial Sequence: Synthetic oligonucleotide
  Sense strand starting at position 2671 of SEQ ID NO: 1880561
uugugaagauauuccuauu

SEQ ID NO: 1976599 - RNA, 19 nt, Artificial Sequence
  Description of Artificial Sequence: Synthetic oligonucleotide
  Antisense strand to SEQ ID NO: 1976598
aauaggaauaucuucacaa

SEQ ID NO: 1976600 - RNA, 19 nt, Artificial Sequence
  Description of Artificial Sequence: Synthetic oligonucleotide
  Sense strand starting at position 2719 of SEQ ID NO: 1880561
cucacacugccgugauuua

SEQ ID NO: 1976601 - RNA, 19 nt, Artificial Sequence
  Description of Artificial Sequence: Synthetic oligonucleotide
  Antisense strand to SEQ ID NO: 1976600
uaaaucacggcagugugag

SEQ ID NO: 1976602 - RNA, 19 nt, Artificial Sequence
  Description of Artificial Sequence: Synthetic oligonucleotide
  Sense strand starting at position 2726 of SEQ ID NO: 1880561
ugccgugauuuaucauuau

SEQ ID NO: 1976603 - RNA, 19 nt, Artificial Sequence
  Description of Artificial Sequence: Synthetic oligonucleotide
  Antisense strand to SEQ ID NO: 1976602
auaaugauaaaucacggca

SEQ ID NO: 1976604 - RNA, 19 nt, Artificial Sequence
  Description of Artificial Sequence: Synthetic oligonucleotide
  Sense strand starting at position 2752 of SEQ ID NO: 1880561
aguauacacacguauguau

SEQ ID NO: 1976605 - RNA, 19 nt, Artificial Sequence
  Description of Artificial Sequence: Synthetic oligonucleotide
  Antisense strand to SEQ ID NO: 1976604
auacauacguguguauacu

SEQ ID NO: 1976606 - RNA, 19 nt, Artificial Sequence
  Description of Artificial Sequence: Synthetic oligonucleotide
  Sense strand starting at position 2760 of SEQ ID NO: 1880561
cacguauguauaggagaaa

SEQ ID NO: 1976607 - RNA, 19 nt, Artificial Sequence
  Description of Artificial Sequence: Synthetic oligonucleotide
  Antisense strand to SEQ ID NO: 1976606
uuucuccuauacauacgug

SEQ ID NO: 1976608 - RNA, 19 nt, Artificial Sequence
  Description of Artificial Sequence: Synthetic oligonucleotide
  Sense strand starting at position 2784 of SEQ ID NO: 1880561
ugcugauccuuccugauuu

SEQ ID NO: 1976609 - RNA, 19 nt, Artificial Sequence
  Description of Artificial Sequence: Synthetic oligonucleotide
  Antisense strand to SEQ ID NO: 1976608
aaaucaggaaggaucagca

SEQ ID NO: 1976610 - RNA, 19 nt, Artificial Sequence
  Description of Artificial Sequence: Synthetic oligonucleotide
  Sense strand starting at position 2896 of SEQ ID NO: 1880561
gcacaccugugaccaaaua

SEQ ID NO: 1976611 - RNA, 19 nt, Artificial Sequence
  Description of Artificial Sequence: Synthetic oligonucleotide
  Antisense strand to SEQ ID NO: 1976610
uauuuggucacaggugugc

SEQ ID NO: 1976612 - RNA, 19 nt, Artificial Sequence
  Description of Artificial Sequence: Synthetic oligonucleotide
  Sense strand starting at position 2949 of SEQ ID NO: 1880561
ccuugucaucugucgcuca

SEQ ID NO: 1976613 - RNA, 19 nt, Artificial Sequence
  Description of Artificial Sequence: Synthetic oligonucleotide
  Antisense strand to SEQ ID NO: 1976612
ugagcgacagaugacaagg

SEQ ID NO: 1976614 - RNA, 19 nt, Artificial Sequence
  Description of Artificial Sequence: Synthetic oligonucleotide
  Sense strand starting at position 3026 of SEQ ID NO: 1880561
ggguuaacacgugagagca

SEQ ID NO: 1976615 - RNA, 19 nt, Artificial Sequence
  Description of Artificial Sequence: Synthetic oligonucleotide
  Antisense strand to SEQ ID NO: 1976614
ugcucucacguguuaaccc

SEQ ID NO: 1976616 - RNA, 19 nt, Artificial Sequence
  Description of Artificial Sequence: Synthetic oligonucleotide
  Sense strand starting at position 3228 of SEQ ID NO: 1880561
cgaaucugagaauaguguu

SEQ ID NO: 1976617 - RNA, 19 nt, Artificial Sequence
  Description of Artificial Sequence: Synthetic oligonucleotide
  Antisense strand to SEQ ID NO: 1976616
aacacuauucucagauucg

SEQ ID NO: 1976618 - RNA, 19 nt, Artificial Sequence
  Description of Artificial Sequence: Synthetic oligonucleotide
  Sense strand starting at position 3234 of SEQ ID NO: 1880561
ugagaauaguguuuggaaa

SEQ ID NO: 1976619 - RNA, 19 nt, Artificial Sequence
  Description of Artificial Sequence: Synthetic oligonucleotide
  Antisense strand to SEQ ID NO: 1976618
uuuccaaacacuauucuca

SEQ ID NO: 1976620 - RNA, 19 nt, Artificial Sequence
  Description of Artificial Sequence: Synthetic oligonucleotide
  Sense strand starting at position 3235 of SEQ ID NO: 1880561
gagaauaguguuuggaaac

SEQ ID NO: 1976621 - RNA, 19 nt, Artificial Sequence
  Description of Artificial Sequence: Synthetic oligonucleotide
  Antisense strand to SEQ ID NO: 1976620
guuuccaaacacuauucuc

SEQ ID NO: 1976622 - RNA, 19 nt, Artificial Sequence
  Description of Artificial Sequence: Synthetic oligonucleotide
  Sense strand starting at position 3444 of SEQ ID NO: 1880561
uucucauucugaguacaag

SEQ ID NO: 1976623 - RNA, 19 nt, Artificial Sequence
  Description of Artificial Sequence: Synthetic oligonucleotide
  Antisense strand to SEQ ID NO: 1976622
cuuguacucagaaugagaa

SEQ ID NO: 1976624 - RNA, 19 nt, Artificial Sequence
  Description of Artificial Sequence: Synthetic oligonucleotide
  Sense strand starting at position 3445 of SEQ ID NO: 1880561
ucucauucugaguacaagu

SEQ ID NO: 1976625 - RNA, 19 nt, Artificial Sequence
  Description of Artificial Sequence: Synthetic oligonucleotide
  Antisense strand to SEQ ID NO: 1976624
acuuguacucagaaugaga

SEQ ID NO: 1976626 - RNA, 19 nt, Artificial Sequence
  Description of Artificial Sequence: Synthetic oligonucleotide
  Sense strand starting at position 3563 of SEQ ID NO: 1880561
uccauaauagcagguuaca

SEQ ID NO: 1976627 - RNA, 19 nt, Artificial Sequence
  Description of Artificial Sequence: Synthetic oligonucleotide
  Antisense strand to SEQ ID NO: 1976626
uguaaccugcuauuaugga

SEQ ID NO: 1976628 - RNA, 19 nt, Artificial Sequence
  Description of Artificial Sequence: Synthetic oligonucleotide
  Sense strand starting at position 3631 of SEQ ID NO: 1880561
guuguuuacagagaggugu

SEQ ID NO: 1976629 - RNA, 19 nt, Artificial Sequence
  Description of Artificial Sequence: Synthetic oligonucleotide
  Antisense strand to SEQ ID NO: 1976628
acaccucucuguaaacaac

SEQ ID NO: 1976630 - RNA, 19 nt, Artificial Sequence
  Description of Artificial Sequence: Synthetic oligonucleotide
  Sense strand starting at position 3633 of SEQ ID NO: 1880561
uguuuacagagagguguua

SEQ ID NO: 1976631 - RNA, 19 nt, Artificial Sequence
  Description of Artificial Sequence: Synthetic oligonucleotide
  Antisense strand to SEQ ID NO: 1976630
uaacaccucucuguaaaca

SEQ ID NO: 1976632 - RNA, 19 nt, Artificial Sequence
  Description of Artificial Sequence: Synthetic oligonucleotide
  Sense strand starting at position 3649 of SEQ ID NO: 1880561
uuaaaugagccuuggagua

SEQ ID NO: 1976633 - RNA, 19 nt, Artificial Sequence
  Description of Artificial Sequence: Synthetic oligonucleotide
  Antisense strand to SEQ ID NO: 1976632
uacuccaaggcucauuuaa

SEQ ID NO: 1976634 - RNA, 19 nt, Artificial Sequence
  Description of Artificial Sequence: Synthetic oligonucleotide
  Sense strand starting at position 3669 of SEQ ID NO: 1880561
aagggauuaggccgaucua

SEQ ID NO: 1976635 - RNA, 19 nt, Artificial Sequence
  Description of Artificial Sequence: Synthetic oligonucleotide
  Antisense strand to SEQ ID NO: 1976634
uagaucggccuaaucccuu

SEQ ID NO: 1976636 - RNA, 19 nt, Artificial Sequence
  Description of Artificial Sequence: Synthetic oligonucleotide
  Sense strand starting at position 3670 of SEQ ID NO: 1880561
agggauuaggccgaucuau

SEQ ID NO: 1976637 - RNA, 19 nt, Artificial Sequence
  Description of Artificial Sequence: Synthetic oligonucleotide
  Antisense strand to SEQ ID NO: 1976636
auagaucggccuaaucccu

SEQ ID NO: 1976638 - RNA, 19 nt, Artificial Sequence
  Description of Artificial Sequence: Synthetic oligonucleotide
  Sense strand starting at position 3766 of SEQ ID NO: 1880561
auacuucucuauguugauu

SEQ ID NO: 1976639 - RNA, 19 nt, Artificial Sequence
  Description of Artificial Sequence: Synthetic oligonucleotide
  Antisense strand to SEQ ID NO: 1976638
aaucaacauagagaaguau

SEQ ID NO: 1976640 - RNA, 19 nt, Artificial Sequence
  Description of Artificial Sequence: Synthetic oligonucleotide
  Sense strand starting at position 3786 of SEQ ID NO: 1880561
uaguuugcuuuauuucgau

SEQ ID NO: 1976641 - RNA, 19 nt, Artificial Sequence
  Description of Artificial Sequence: Synthetic oligonucleotide
  Antisense strand to SEQ ID NO: 1976640
aucgaaauaaagcaaacua

SEQ ID NO: 1976642 - RNA, 19 nt, Artificial Sequence
  Description of Artificial Sequence: Synthetic oligonucleotide
  Sense strand starting at position 3792 of SEQ ID NO: 1880561
gcuuuauuucgaugcacac

SEQ ID NO: 1976643 - RNA, 19 nt, Artificial Sequence
  Description of Artificial Sequence: Synthetic oligonucleotide
  Antisense strand to SEQ ID NO: 1976642
gugugcaucgaaauaaagc

SEQ ID NO: 1976644 - RNA, 19 nt, Artificial Sequence
  Description of Artificial Sequence: Synthetic oligonucleotide
  Sense strand starting at position 3885 of SEQ ID NO: 1880561
ucccuuguauguuuauaaa

SEQ ID NO: 1976645 - RNA, 19 nt, Artificial Sequence
  Description of Artificial Sequence: Synthetic oligonucleotide
  Antisense strand to SEQ ID NO: 1976644
uuuauaaacauacaaggga

SEQ ID NO: 1976646 - RNA, 19 nt, Artificial Sequence
  Description of Artificial Sequence: Synthetic oligonucleotide
  Sense strand starting at position 3974 of SEQ ID NO: 1880561
uguuuauaacuaugaugca

SEQ ID NO: 1976647 - RNA, 19 nt, Artificial Sequence
  Description of Artificial Sequence: Synthetic oligonucleotide
  Antisense strand to SEQ ID NO: 1976646
ugcaucauaguuauaaaca

SEQ ID NO: 1976648 - RNA, 19 nt, Artificial Sequence
  Description of Artificial Sequence: Synthetic oligonucleotide
  Sense strand starting at position 22 of SEQ ID NO: 1880562
agauaacagcucuaguauu

SEQ ID NO: 1976649 - RNA, 19 nt, Artificial Sequence
  Description of Artificial Sequence: Synthetic oligonucleotide
  Antisense strand to SEQ ID NO: 1976648
aauacuagagcuguuaucu

SEQ ID NO: 1976650 - RNA, 19 nt, Artificial Sequence
  Description of Artificial Sequence: Synthetic oligonucleotide
  Sense strand starting at position 59 of SEQ ID NO: 1880562
guagcugucaaagauacag

SEQ ID NO: 1976651 - RNA, 19 nt, Artificial Sequence
  Description of Artificial Sequence: Synthetic oligonucleotide
  Antisense strand to SEQ ID NO: 1976650
cuguaucuuugacagcuac

SEQ ID NO: 1976652 - RNA, 19 nt, Artificial Sequence
  Description of Artificial Sequence: Synthetic oligonucleotide
  Sense strand starting at position 102 of SEQ ID NO: 1880562
agauaugcguauuuaguca

SEQ ID NO: 1976653 - RNA, 19 nt, Artificial Sequence
  Description of Artificial Sequence: Synthetic oligonucleotide
  Antisense strand to SEQ ID NO: 1976652
ugacuaaauacgcauaucu

SEQ ID NO: 1976654 - RNA, 19 nt, Artificial Sequence
  Description of Artificial Sequence: Synthetic oligonucleotide
  Sense strand starting at position 107 of SEQ ID NO: 1880562
ugcguauuuagucagguua

SEQ ID NO: 1976655 - RNA, 19 nt, Artificial Sequence
  Description of Artificial Sequence: Synthetic oligonucleotide
  Antisense strand to SEQ ID NO: 1976654
uaaccugacuaaauacgca

SEQ ID NO: 1976656 - RNA, 19 nt, Artificial Sequence
  Description of Artificial Sequence: Synthetic oligonucleotide
  Sense strand starting at position 120 of SEQ ID NO: 1880562
agguuagcauauccacaaa

SEQ ID NO: 1976657 - RNA, 19 nt, Artificial Sequence
  Description of Artificial Sequence: Synthetic oligonucleotide
  Antisense strand to SEQ ID NO: 1976656
uuuguggauaugcuaaccu

SEQ ID NO: 1976658 - RNA, 19 nt, Artificial Sequence
  Description of Artificial Sequence: Synthetic oligonucleotide
  Sense strand starting at position 567 of SEQ ID NO: 1880562
ugaagauauucuguccuca

SEQ ID NO: 1976659 - RNA, 19 nt, Artificial Sequence
  Description of Artificial Sequence: Synthetic oligonucleotide
  Antisense strand to SEQ ID NO: 1976658
ugaggacagaauaucuuca

SEQ ID NO: 1976660 - RNA, 19 nt, Artificial Sequence
  Description of Artificial Sequence: Synthetic oligonucleotide
  Sense strand starting at position 580 of SEQ ID NO: 1880562
uccucauaaagguggagua

SEQ ID NO: 1976661 - RNA, 19 nt, Artificial Sequence
  Description of Artificial Sequence: Synthetic oligonucleotide
  Antisense strand to SEQ ID NO: 1976660
uacuccaccuuuaugagga

SEQ ID NO: 1976662 - RNA, 19 nt, Artificial Sequence
  Description of Artificial Sequence: Synthetic oligonucleotide
  Sense strand starting at position 581 of SEQ ID NO: 1880562
ccucauaaagguggaguau

SEQ ID NO: 1976663 - RNA, 19 nt, Artificial Sequence
  Description of Artificial Sequence: Synthetic oligonucleotide
  Antisense strand to SEQ ID NO: 1976662
auacuccaccuuuaugagg

SEQ ID NO: 1976664 - RNA, 19 nt, Artificial Sequence
  Description of Artificial Sequence: Synthetic oligonucleotide
  Sense strand starting at position 731 of SEQ ID NO: 1880562
gggcuuacuagaugaaaca

SEQ ID NO: 1976665 - RNA, 19 nt, Artificial Sequence
  Description of Artificial Sequence: Synthetic oligonucleotide
  Antisense strand to SEQ ID NO: 1976664
uguuucaucuaguaagccc

SEQ ID NO: 1976666 - RNA, 19 nt, Artificial Sequence
  Description of Artificial Sequence: Synthetic oligonucleotide
  Sense strand starting at position 803 of SEQ ID NO: 1880562
ugauaaagguuagcaucaa

SEQ ID NO: 1976667 - RNA, 19 nt, Artificial Sequence
  Description of Artificial Sequence: Synthetic oligonucleotide
  Antisense strand to SEQ ID NO: 1976666
uugaugcuaaccuuuauca

SEQ ID NO: 1976668 - RNA, 19 nt, Artificial Sequence
  Description of Artificial Sequence: Synthetic oligonucleotide
  Sense strand starting at position 916 of SEQ ID NO: 1880562
ucaguuaaugcaugagaaa

SEQ ID NO: 1976669 - RNA, 19 nt, Artificial Sequence
  Description of Artificial Sequence: Synthetic oligonucleotide
  Antisense strand to SEQ ID NO: 1976668
uuucucaugcauuaacuga

SEQ ID NO: 1976670 - RNA, 19 nt, Artificial Sequence
  Description of Artificial Sequence: Synthetic oligonucleotide
  Sense strand starting at position 1065 of SEQ ID NO: 1880562
ugauguacuccggacagga

SEQ ID NO: 1976671 - RNA, 19 nt, Artificial Sequence
  Description of Artificial Sequence: Synthetic oligonucleotide
  Antisense strand to SEQ ID NO: 1976670
uccuguccggaguacauca

SEQ ID NO: 1976672 - RNA, 19 nt, Artificial Sequence
  Description of Artificial Sequence: Synthetic oligonucleotide
  Sense strand starting at position 1142 of SEQ ID NO: 1880562
gcuuaugggcuuuaaucaa

SEQ ID NO: 1976673 - RNA, 19 nt, Artificial Sequence
  Description of Artificial Sequence: Synthetic oligonucleotide
  Antisense strand to SEQ ID NO: 1976672
uugauuaaagcccauaagc

SEQ ID NO: 1976674 - RNA, 19 nt, Artificial Sequence
  Description of Artificial Sequence: Synthetic oligonucleotide
  Sense strand starting at position 1214 of SEQ ID NO: 1880562
gccuaauauuuaucgagca

SEQ ID NO: 1976675 - RNA, 19 nt, Artificial Sequence
  Description of Artificial Sequence: Synthetic oligonucleotide
  Antisense strand to SEQ ID NO: 1976674
ugcucgauaaauauuaggc

SEQ ID NO: 1976676 - RNA, 19 nt, Artificial Sequence
  Description of Artificial Sequence: Synthetic oligonucleotide
  Sense strand starting at position 2060 of SEQ ID NO: 1880562
gcgaguucuggccuccuua

SEQ ID NO: 1976677 - RNA, 19 nt, Artificial Sequence
  Description of Artificial Sequence: Synthetic oligonucleotide
  Antisense strand to SEQ ID NO: 1976676
uaaggaggccagaacucgc

SEQ ID NO: 1976678 - RNA, 19 nt, Artificial Sequence
  Description of Artificial Sequence: Synthetic oligonucleotide
  Sense strand starting at position 2264 of SEQ ID NO: 1880562
ggccaaugugaguaaauua

SEQ ID NO: 1976679 - RNA, 19 nt, Artificial Sequence
  Description of Artificial Sequence: Synthetic oligonucleotide
  Antisense strand to SEQ ID NO: 1976678
uaauuuacucacauuggcc

SEQ ID NO: 1976680 - RNA, 19 nt, Artificial Sequence
  Description of Artificial Sequence: Synthetic oligonucleotide
  Sense strand starting at position 2271 of SEQ ID NO: 1880562
gugaguaaauuaucucuua

SEQ ID NO: 1976681 - RNA, 19 nt, Artificial Sequence
  Description of Artificial Sequence: Synthetic oligonucleotide
  Antisense strand to SEQ ID NO: 1976680
uaagagauaauuuacucac

SEQ ID NO: 1976682 - RNA, 19 nt, Artificial Sequence
  Description of Artificial Sequence: Synthetic oligonucleotide
  Sense strand starting at position 2285 of SEQ ID NO: 1880562
ucuuaagaaucagcauagu

SEQ ID NO: 1976683 - RNA, 19 nt, Artificial Sequence
  Description of Artificial Sequence: Synthetic oligonucleotide
  Antisense strand to SEQ ID NO: 1976682
acuaugcugauucuuaaga

SEQ ID NO: 1976684 - RNA, 19 nt, Artificial Sequence
  Description of Artificial Sequence: Synthetic oligonucleotide
  Sense strand starting at position 2423 of SEQ ID NO: 1880562
uuaugcuuugaagauggua

SEQ ID NO: 1976685 - RNA, 19 nt, Artificial Sequence
  Description of Artificial Sequence: Synthetic oligonucleotide
  Antisense strand to SEQ ID NO: 1976684
uaccaucuucaaagcauaa

SEQ ID NO: 1976686 - RNA, 19 nt, Artificial Sequence
  Description of Artificial Sequence: Synthetic oligonucleotide
  Sense strand starting at position 2483 of SEQ ID NO: 1880562
uuuguacagauguggaaau

SEQ ID NO: 1976687 - RNA, 19 nt, Artificial Sequence
  Description of Artificial Sequence: Synthetic oligonucleotide
  Antisense strand to SEQ ID NO: 1976686
auuuccacaucuguacaaa

SEQ ID NO: 1976688 - RNA, 19 nt, Artificial Sequence
  Description of Artificial Sequence: Synthetic oligonucleotide
  Sense strand starting at position 2758 of SEQ ID NO: 1880562
auauguagcggucauaaga

SEQ ID NO: 1976689 - RNA, 19 nt, Artificial Sequence
  Description of Artificial Sequence: Synthetic oligonucleotide
  Antisense strand to SEQ ID NO: 1976688
ucuuaugaccgcuacauau

SEQ ID NO: 1976690 - RNA, 19 nt, Artificial Sequence
  Description of Artificial Sequence: Synthetic oligonucleotide
  Sense strand starting at position 2765 of SEQ ID NO: 1880562
gcggucauaagacauauau

SEQ ID NO: 1976691 - RNA, 19 nt, Artificial Sequence
  Description of Artificial Sequence: Synthetic oligonucleotide
  Antisense strand to SEQ ID NO: 1976690
auauaugucuuaugaccgc

SEQ ID NO: 1976692 - RNA, 19 nt, Artificial Sequence
  Description of Artificial Sequence: Synthetic oligonucleotide
  Sense strand starting at position 2856 of SEQ ID NO: 1880562
agucuuuguggagaggagu

SEQ ID NO: 1976693 - RNA, 19 nt, Artificial Sequence
  Description of Artificial Sequence: Synthetic oligonucleotide
  Antisense strand to SEQ ID NO: 1976692
acuccucuccacaaagacu

SEQ ID NO: 1976694 - RNA, 19 nt, Artificial Sequence
  Description of Artificial Sequence: Synthetic oligonucleotide
  Sense strand starting at position 2911 of SEQ ID NO: 1880562
guuugaaagauagguggga

SEQ ID NO: 1976695 - RNA, 19 nt, Artificial Sequence
  Description of Artificial Sequence: Synthetic oligonucleotide
  Antisense strand to SEQ ID NO: 1976694
ucccaccuaucuuucaaac

SEQ ID NO: 1976696 - RNA, 19 nt, Artificial Sequence
  Description of Artificial Sequence: Synthetic oligonucleotide
  Sense strand starting at position 3090 of SEQ ID NO: 1880562
guugguaccaaguaaauga

SEQ ID NO: 1976697 - RNA, 19 nt, Artificial Sequence
  Description of Artificial Sequence: Synthetic oligonucleotide
  Antisense strand to SEQ ID NO: 1976696
ucauuuacuugguaccaac

SEQ ID NO: 1976698 - RNA, 19 nt, Artificial Sequence
  Description of Artificial Sequence: Synthetic oligonucleotide
  Sense strand starting at position 3182 of SEQ ID NO: 1880562
uaggaagauuuauauggca

SEQ ID NO: 1976699 - RNA, 19 nt, Artificial Sequence
  Description of Artificial Sequence: Synthetic oligonucleotide
  Antisense strand to SEQ ID NO: 1976698
ugccauauaaaucuuccua

SEQ ID NO: 1976700 - RNA, 19 nt, Artificial Sequence
  Description of Artificial Sequence: Synthetic oligonucleotide
  Sense strand starting at position 3197 of SEQ ID NO: 1880562
ggcagcauuuagccaggau

SEQ ID NO: 1976701 - RNA, 19 nt, Artificial Sequence
  Description of Artificial Sequence: Synthetic oligonucleotide
  Antisense strand to SEQ ID NO: 1976700
auccuggcuaaaugcugcc

SEQ ID NO: 1976702 - RNA, 19 nt, Artificial Sequence
  Description of Artificial Sequence: Synthetic oligonucleotide
  Sense strand starting at position 3222 of SEQ ID NO: 1880562
ucuguaauugaacauggua

SEQ ID NO: 1976703 - RNA, 19 nt, Artificial Sequence
  Description of Artificial Sequence: Synthetic oligonucleotide
  Antisense strand to SEQ ID NO: 1976702
uaccauguucaauuacaga

SEQ ID NO: 1976704 - RNA, 19 nt, Artificial Sequence
  Description of Artificial Sequence: Synthetic oligonucleotide
  Sense strand starting at position 3225 of SEQ ID NO: 1880562
guaauugaacaugguauau

SEQ ID NO: 1976705 - RNA, 19 nt, Artificial Sequence
  Description of Artificial Sequence: Synthetic oligonucleotide
  Antisense strand to SEQ ID NO: 1976704
auauaccauguucaauuac

SEQ ID NO: 1976706 - RNA, 19 nt, Artificial Sequence
  Description of Artificial Sequence: Synthetic oligonucleotide
  Sense strand starting at position 3238 of SEQ ID NO: 1880562
guauauuaagucuaaagug

SEQ ID NO: 1976707 - RNA, 19 nt, Artificial Sequence
  Description of Artificial Sequence: Synthetic oligonucleotide
  Antisense strand to SEQ ID NO: 1976706
cacuuuagacuuaauauac

SEQ ID NO: 1976708 - RNA, 19 nt, Artificial Sequence
  Description of Artificial Sequence: Synthetic oligonucleotide
  Sense strand starting at position 3248 of SEQ ID NO: 1880562
ucuaaagugugacuauaga

SEQ ID NO: 1976709 - RNA, 19 nt, Artificial Sequence
  Description of Artificial Sequence: Synthetic oligonucleotide
  Antisense strand to SEQ ID NO: 1976708
ucuauagucacacuuuaga

SEQ ID NO: 1976710 - RNA, 19 nt, Artificial Sequence
  Description of Artificial Sequence: Synthetic oligonucleotide
  Sense strand starting at position 3398 of SEQ ID NO: 1880562
aguagaauagaaugcuauu

SEQ ID NO: 1976711 - RNA, 19 nt, Artificial Sequence
  Description of Artificial Sequence: Synthetic oligonucleotide
  Antisense strand to SEQ ID NO: 1976710
aauagcauucuauucuacu

SEQ ID NO: 1976712 - RNA, 19 nt, Artificial Sequence
  Description of Artificial Sequence: Synthetic oligonucleotide
  Sense strand starting at position 3411 of SEQ ID NO: 1880562
gcuauuauuugaccugguu

SEQ ID NO: 1976713 - RNA, 19 nt, Artificial Sequence
  Description of Artificial Sequence: Synthetic oligonucleotide
  Antisense strand to SEQ ID NO: 1976712
aaccaggucaaauaauagc

SEQ ID NO: 1976714 - RNA, 19 nt, Artificial Sequence
  Description of Artificial Sequence: Synthetic oligonucleotide
  Sense strand starting at position 3573 of SEQ ID NO: 1880562
uggauuguaaauuguggau

SEQ ID NO: 1976715 - RNA, 19 nt, Artificial Sequence
  Description of Artificial Sequence: Synthetic oligonucleotide
  Antisense strand to SEQ ID NO: 1976714
auccacaauuuacaaucca

SEQ ID NO: 1976716 - RNA, 19 nt, Artificial Sequence
  Description of Artificial Sequence: Synthetic oligonucleotide
  Sense strand starting at position 3577 of SEQ ID NO: 1880562
uuguaaauuguggauggau

SEQ ID NO: 1976717 - RNA, 19 nt, Artificial Sequence
  Description of Artificial Sequence: Synthetic oligonucleotide
  Antisense strand to SEQ ID NO: 1976716
auccauccacaauuuacaa

SEQ ID NO: 1976718 - RNA, 19 nt, Artificial Sequence
  Description of Artificial Sequence: Synthetic oligonucleotide
  Sense strand starting at position 3655 of SEQ ID NO: 1880562
agagucuagacagguacau

SEQ ID NO: 1976719 - RNA, 19 nt, Artificial Sequence
  Description of Artificial Sequence: Synthetic oligonucleotide
  Antisense strand to SEQ ID NO: 1976718
auguaccugucuagacucu

SEQ ID NO: 1976720 - RNA, 19 nt, Artificial Sequence
  Description of Artificial Sequence: Synthetic oligonucleotide
  Sense strand starting at position 3739 of SEQ ID NO: 1880562
uacagugauuuguugcuaa

SEQ ID NO: 1976721 - RNA, 19 nt, Artificial Sequence
  Description of Artificial Sequence: Synthetic oligonucleotide
  Antisense strand to SEQ ID NO: 1976720
uuagcaacaaaucacugua

SEQ ID NO: 1976722 - RNA, 19 nt, Artificial Sequence
  Description of Artificial Sequence: Synthetic oligonucleotide
  Sense strand starting at position 3742 of SEQ ID NO: 1880562
agugauuuguugcuaacua

SEQ ID NO: 1976723 - RNA, 19 nt, Artificial Sequence
  Description of Artificial Sequence: Synthetic oligonucleotide
  Antisense strand to SEQ ID NO: 1976722
uaguuagcaacaaaucacu

SEQ ID NO: 1976724 - RNA, 19 nt, Artificial Sequence
  Description of Artificial Sequence: Synthetic oligonucleotide
  Sense strand starting at position 3844 of SEQ ID NO: 1880562
uauugcgauuucucaaugu

SEQ ID NO: 1976725 - RNA, 19 nt, Artificial Sequence
  Description of Artificial Sequence: Synthetic oligonucleotide
  Antisense strand to SEQ ID NO: 1976724
acauugagaaaucgcaaua

SEQ ID NO: 1976726 - RNA, 19 nt, Artificial Sequence
  Description of Artificial Sequence: Synthetic oligonucleotide
  Sense strand starting at position 3915 of SEQ ID NO: 1880562
gauagauguggaugcacua

SEQ ID NO: 1976727 - RNA, 19 nt, Artificial Sequence
  Description of Artificial Sequence: Synthetic oligonucleotide
  Antisense strand to SEQ ID NO: 1976726
uagugcauccacaucuauc

SEQ ID NO: 1976728 - RNA, 19 nt, Artificial Sequence
  Description of Artificial Sequence: Synthetic oligonucleotide
  Sense strand starting at position 30 of SEQ ID NO: 1880563
ggacacaccuggcuuaauu

SEQ ID NO: 1976729 - RNA, 19 nt, Artificial Sequence
  Description of Artificial Sequence: Synthetic oligonucleotide
  Antisense strand to SEQ ID NO: 1976728
aauuaagccaggugugucc

SEQ ID NO: 1976730 - RNA, 19 nt, Artificial Sequence
  Description of Artificial Sequence: Synthetic oligonucleotide
  Sense strand starting at position 77 of SEQ ID NO: 1880563
aguagaugacuuugcaaau

SEQ ID NO: 1976731 - RNA, 19 nt, Artificial Sequence
  Description of Artificial Sequence: Synthetic oligonucleotide
  Antisense strand to SEQ ID NO: 1976730
auuugcaaagucaucuacu

SEQ ID NO: 1976732 - RNA, 19 nt, Artificial Sequence
  Description of Artificial Sequence: Synthetic oligonucleotide
  Sense strand starting at position 78 of SEQ ID NO: 1880563
guagaugacuuugcaaaua

SEQ ID NO: 1976733 - RNA, 19 nt, Artificial Sequence
  Description of Artificial Sequence: Synthetic oligonucleotide
  Antisense strand to SEQ ID NO: 1976732
uauuugcaaagucaucuac

SEQ ID NO: 1976734 - RNA, 19 nt, Artificial Sequence
  Description of Artificial Sequence: Synthetic oligonucleotide
  Sense strand starting at position 141 of SEQ ID NO: 1880563
aaguaauacugaguuagga

SEQ ID NO: 1976735 - RNA, 19 nt, Artificial Sequence
  Description of Artificial Sequence: Synthetic oligonucleotide
  Antisense strand to SEQ ID NO: 1976734
uccuaacucaguauuacuu

SEQ ID NO: 1976736 - RNA, 19 nt, Artificial Sequence
  Description of Artificial Sequence: Synthetic oligonucleotide
  Sense strand starting at position 143 of SEQ ID NO: 1880563
guaauacugaguuaggagu

SEQ ID NO: 1976737 - RNA, 19 nt, Artificial Sequence
  Description of Artificial Sequence: Synthetic oligonucleotide
  Antisense strand to SEQ ID NO: 1976736
acuccuaacucaguauuac

SEQ ID NO: 1976738 - RNA, 19 nt, Artificial Sequence
  Description of Artificial Sequence: Synthetic oligonucleotide
  Sense strand starting at position 194 of SEQ ID NO: 1880563
uuuccuaugcauuaaggua

SEQ ID NO: 1976739 - RNA, 19 nt, Artificial Sequence
  Description of Artificial Sequence: Synthetic oligonucleotide
  Antisense strand to SEQ ID NO: 1976738
uaccuuaaugcauaggaaa

SEQ ID NO: 1976740 - RNA, 19 nt, Artificial Sequence
  Description of Artificial Sequence: Synthetic oligonucleotide
  Sense strand starting at position 438 of SEQ ID NO: 1880563
ggaaauaaauuguccuuag

SEQ ID NO: 1976741 - RNA, 19 nt, Artificial Sequence
  Description of Artificial Sequence: Synthetic oligonucleotide
  Antisense strand to SEQ ID NO: 1976740
cuaaggacaauuuauuucc

SEQ ID NO: 1976742 - RNA, 19 nt, Artificial Sequence
  Description of Artificial Sequence: Synthetic oligonucleotide
  Sense strand starting at position 511 of SEQ ID NO: 1880563
gcugauaacuaagccagaa

SEQ ID NO: 1976743 - RNA, 19 nt, Artificial Sequence
  Description of Artificial Sequence: Synthetic oligonucleotide
  Antisense strand to SEQ ID NO: 1976742
uucuggcuuaguuaucagc

SEQ ID NO: 1976744 - RNA, 19 nt, Artificial Sequence
  Description of Artificial Sequence: Synthetic oligonucleotide
  Sense strand starting at position 555 of SEQ ID NO: 1880563
ucaugacugagauguguaa

SEQ ID NO: 1976745 - RNA, 19 nt, Artificial Sequence
  Description of Artificial Sequence: Synthetic oligonucleotide
  Antisense strand to SEQ ID NO: 1976744
uuacacaucucagucauga

SEQ ID NO: 1976746 - RNA, 19 nt, Artificial Sequence
  Description of Artificial Sequence: Synthetic oligonucleotide
  Sense strand starting at position 601 of SEQ ID NO: 1880563
ugguuuaauuccucaagga

SEQ ID NO: 1976747 - RNA, 19 nt, Artificial Sequence
  Description of Artificial Sequence: Synthetic oligonucleotide
  Antisense strand to SEQ ID NO: 1976746
uccuugaggaauuaaacca

SEQ ID NO: 1976748 - RNA, 19 nt, Artificial Sequence
  Description of Artificial Sequence: Synthetic oligonucleotide
  Sense strand starting at position 605 of SEQ ID NO: 1880563
uuaauuccucaaggaaagu

SEQ ID NO: 1976749 - RNA, 19 nt, Artificial Sequence
  Description of Artificial Sequence: Synthetic oligonucleotide
  Antisense strand to SEQ ID NO: 1976748
acuuuccuugaggaauuaa

SEQ ID NO: 1976750 - RNA, 19 nt, Artificial Sequence
  Description of Artificial Sequence: Synthetic oligonucleotide
  Sense strand starting at position 839 of SEQ ID NO: 1880563
uuaccuuaauagguaauga

SEQ ID NO: 1976751 - RNA, 19 nt, Artificial Sequence
  Description of Artificial Sequence: Synthetic oligonucleotide
  Antisense strand to SEQ ID NO: 1976750
ucauuaccuauuaagguaa

SEQ ID NO: 1976752 - RNA, 19 nt, Artificial Sequence
  Description of Artificial Sequence: Synthetic oligonucleotide
  Sense strand starting at position 864 of SEQ ID NO: 1880563
aaguguaugcuacaaagga

SEQ ID NO: 1976753 - RNA, 19 nt, Artificial Sequence
  Description of Artificial Sequence: Synthetic oligonucleotide
  Antisense strand to SEQ ID NO: 1976752
uccuuuguagcauacacuu

SEQ ID NO: 1976754 - RNA, 19 nt, Artificial Sequence
  Description of Artificial Sequence: Synthetic oligonucleotide
  Sense strand starting at position 891 of SEQ ID NO: 1880563
gaaauagaacaauguuguu

SEQ ID NO: 1976755 - RNA, 19 nt, Artificial Sequence
  Description of Artificial Sequence: Synthetic oligonucleotide
  Antisense strand to SEQ ID NO: 1976754
aacaacauuguucuauuuc

SEQ ID NO: 1976756 - RNA, 19 nt, Artificial Sequence
  Description of Artificial Sequence: Synthetic oligonucleotide
  Sense strand starting at position 1063 of SEQ ID NO: 1880563
uaguuacauuuggcuagua

SEQ ID NO: 1976757 - RNA, 19 nt, Artificial Sequence
  Description of Artificial Sequence: Synthetic oligonucleotide
  Antisense strand to SEQ ID NO: 1976756
uacuagccaaauguaacua

SEQ ID NO: 1976758 - RNA, 19 nt, Artificial Sequence
  Description of Artificial Sequence: Synthetic oligonucleotide
  Sense strand starting at position 1161 of SEQ ID NO: 1880563
uuggcugaucuccaccaaa

SEQ ID NO: 1976759 - RNA, 19 nt, Artificial Sequence
  Description of Artificial Sequence: Synthetic oligonucleotide
  Antisense strand to SEQ ID NO: 1976758
uuugguggagaucagccaa

SEQ ID NO: 1976760 - RNA, 19 nt, Artificial Sequence
  Description of Artificial Sequence: Synthetic oligonucleotide
  Sense strand starting at position 1324 of SEQ ID NO: 1880563
guaagauauuuggaaguua

SEQ ID NO: 1976761 - RNA, 19 nt, Artificial Sequence
  Description of Artificial Sequence: Synthetic oligonucleotide
  Antisense strand to SEQ ID NO: 1976760
uaacuuccaaauaucuuac

SEQ ID NO: 1976762 - RNA, 19 nt, Artificial Sequence
  Description of Artificial Sequence: Synthetic oligonucleotide
  Sense strand starting at position 1357 of SEQ ID NO: 1880563
ugaauuacuaaggguagca

SEQ ID NO: 1976763 - RNA, 19 nt, Artificial Sequence
  Description of Artificial Sequence: Synthetic oligonucleotide
  Antisense strand to SEQ ID NO: 1976762
ugcuacccuuaguaauuca

SEQ ID NO: 1976764 - RNA, 19 nt, Artificial Sequence
  Description of Artificial Sequence: Synthetic oligonucleotide
  Sense strand starting at position 1834 of SEQ ID NO: 1880563
ggcaauaaacucugacuug

SEQ ID NO: 1976765 - RNA, 19 nt, Artificial Sequence
  Description of Artificial Sequence: Synthetic oligonucleotide
  Antisense strand to SEQ ID NO: 1976764
caagucagaguuuauugcc

SEQ ID NO: 1976766 - RNA, 19 nt, Artificial Sequence
  Description of Artificial Sequence: Synthetic oligonucleotide
  Sense strand starting at position 1846 of SEQ ID NO: 1880563
ugacuuggagaauguauua

SEQ ID NO: 1976767 - RNA, 19 nt, Artificial Sequence
  Description of Artificial Sequence: Synthetic oligonucleotide
  Antisense strand to SEQ ID NO: 1976766
uaauacauucuccaaguca

SEQ ID NO: 1976768 - RNA, 19 nt, Artificial Sequence
  Description of Artificial Sequence: Synthetic oligonucleotide
  Sense strand starting at position 1853 of SEQ ID NO: 1880563
gagaauguauuagucuauc

SEQ ID NO: 1976769 - RNA, 19 nt, Artificial Sequence
  Description of Artificial Sequence: Synthetic oligonucleotide
  Antisense strand to SEQ ID NO: 1976768
gauagacuaauacauucuc

SEQ ID NO: 1976770 - RNA, 19 nt, Artificial Sequence
  Description of Artificial Sequence: Synthetic oligonucleotide
  Sense strand starting at position 2180 of SEQ ID NO: 1880563
ugaugagauuuguaugagg

SEQ ID NO: 1976771 - RNA, 19 nt, Artificial Sequence
  Description of Artificial Sequence: Synthetic oligonucleotide
  Antisense strand to SEQ ID NO: 1976770
ccucauacaaaucucauca

SEQ ID NO: 1976772 - RNA, 19 nt, Artificial Sequence
  Description of Artificial Sequence: Synthetic oligonucleotide
  Sense strand starting at position 2248 of SEQ ID NO: 1880563
uugaauuugggcugagugu

SEQ ID NO: 1976773 - RNA, 19 nt, Artificial Sequence
  Description of Artificial Sequence: Synthetic oligonucleotide
  Antisense strand to SEQ ID NO: 1976772
acacucagcccaaauucaa

SEQ ID NO: 1976774 - RNA, 19 nt, Artificial Sequence
  Description of Artificial Sequence: Synthetic oligonucleotide
  Sense strand starting at position 2352 of SEQ ID NO: 1880563
gaugaauuagucuggucug

SEQ ID NO: 1976775 - RNA, 19 nt, Artificial Sequence
  Description of Artificial Sequence: Synthetic oligonucleotide
  Antisense strand to SEQ ID NO: 1976774
cagaccagacuaauucauc

SEQ ID NO: 1976776 - RNA, 19 nt, Artificial Sequence
  Description of Artificial Sequence: Synthetic oligonucleotide
  Sense strand starting at position 2465 of SEQ ID NO: 1880563
ugauauucuggaggcaaug

SEQ ID NO: 1976777 - RNA, 19 nt, Artificial Sequence
  Description of Artificial Sequence: Synthetic oligonucleotide
  Antisense strand to SEQ ID NO: 1976776
cauugccuccagaauauca

SEQ ID NO: 1976778 - RNA, 19 nt, Artificial Sequence
  Description of Artificial Sequence: Synthetic oligonucleotide
  Sense strand starting at position 2502 of SEQ ID NO: 1880563
uuggauaaaugagaaacaa

SEQ ID NO: 1976779 - RNA, 19 nt, Artificial Sequence
  Description of Artificial Sequence: Synthetic oligonucleotide
  Antisense strand to SEQ ID NO: 1976778
uuguuucucauuuauccaa

SEQ ID NO: 1976780 - RNA, 19 nt, Artificial Sequence
  Description of Artificial Sequence: Synthetic oligonucleotide
  Sense strand starting at position 2682 of SEQ ID NO: 1880563
ccuuauaaggauugaguaa

SEQ ID NO: 1976781 - RNA, 19 nt, Artificial Sequence
  Description of Artificial Sequence: Synthetic oligonucleotide
  Antisense strand to SEQ ID NO: 1976780
uuacucaauccuuauaagg

SEQ ID NO: 1976782 - RNA, 19 nt, Artificial Sequence
  Description of Artificial Sequence: Synthetic oligonucleotide
  Sense strand starting at position 2816 of SEQ ID NO: 1880563
caaggagaagucugggcuu

SEQ ID NO: 1976783 - RNA, 19 nt, Artificial Sequence
  Description of Artificial Sequence: Synthetic oligonucleotide
  Antisense strand to SEQ ID NO: 1976782
aagcccagacuucuccuug

SEQ ID NO: 1976784 - RNA, 19 nt, Artificial Sequence
  Description of Artificial Sequence: Synthetic oligonucleotide
  Sense strand starting at position 2914 of SEQ ID NO: 1880563
acauuaggccugcaucaga

SEQ ID NO: 1976785 - RNA, 19 nt, Artificial Sequence
  Description of Artificial Sequence: Synthetic oligonucleotide
  Antisense strand to SEQ ID NO: 1976784
ucugaugcaggccuaaugu

SEQ ID NO: 1976786 - RNA, 19 nt, Artificial Sequence
  Description of Artificial Sequence: Synthetic oligonucleotide
  Sense strand starting at position 2957 of SEQ ID NO: 1880563
acaucuauuggauguccaa

SEQ ID NO: 1976787 - RNA, 19 nt, Artificial Sequence
  Description of Artificial Sequence: Synthetic oligonucleotide
  Antisense strand to SEQ ID NO: 1976786
uuggacauccaauagaugu

SEQ ID NO: 1976788 - RNA, 19 nt, Artificial Sequence
  Description of Artificial Sequence: Synthetic oligonucleotide
  Sense strand starting at position 2978 of SEQ ID NO: 1880563
ggguguuggaaaugcaaau

SEQ ID NO: 1976789 - RNA, 19 nt, Artificial Sequence
  Description of Artificial Sequence: Synthetic oligonucleotide
  Antisense strand to SEQ ID NO: 1976788
auuugcauuuccaacaccc

SEQ ID NO: 1976790 - RNA, 19 nt, Artificial Sequence
  Description of Artificial Sequence: Synthetic oligonucleotide
  Sense strand starting at position 3018 of SEQ ID NO: 1880563
agaaauagcuaucugauuc

SEQ ID NO: 1976791 - RNA, 19 nt, Artificial Sequence
  Description of Artificial Sequence: Synthetic oligonucleotide
  Antisense strand to SEQ ID NO: 1976790
gaaucagauagcuauuucu

SEQ ID NO: 1976792 - RNA, 19 nt, Artificial Sequence
  Description of Artificial Sequence: Synthetic oligonucleotide
  Sense strand starting at position 3089 of SEQ ID NO: 1880563
gagaacauuguguagcuca

SEQ ID NO: 1976793 - RNA, 19 nt, Artificial Sequence
  Description of Artificial Sequence: Synthetic oligonucleotide
  Antisense strand to SEQ ID NO: 1976792
ugagcuacacaauguucuc

SEQ ID NO: 1976794 - RNA, 19 nt, Artificial Sequence
  Description of Artificial Sequence: Synthetic oligonucleotide
  Sense strand starting at position 3386 of SEQ ID NO: 1880563
guggguaggguuuaagaag

SEQ ID NO: 1976795 - RNA, 19 nt, Artificial Sequence
  Description of Artificial Sequence: Synthetic oligonucleotide
  Antisense strand to SEQ ID NO: 1976794
cuucuuaaacccuacccac

SEQ ID NO: 1976796 - RNA, 19 nt, Artificial Sequence
  Description of Artificial Sequence: Synthetic oligonucleotide
  Sense strand starting at position 3550 of SEQ ID NO: 1880563
guuaguuaucagcaaugac

SEQ ID NO: 1976797 - RNA, 19 nt, Artificial Sequence
  Description of Artificial Sequence: Synthetic oligonucleotide
  Antisense strand to SEQ ID NO: 1976796
gucauugcugauaacuaac

SEQ ID NO: 1976798 - RNA, 19 nt, Artificial Sequence
  Description of Artificial Sequence: Synthetic oligonucleotide
  Sense strand starting at position 3553 of SEQ ID NO: 1880563
aguuaucagcaaugacaaa

SEQ ID NO: 1976799 - RNA, 19 nt, Artificial Sequence
  Description of Artificial Sequence: Synthetic oligonucleotide
  Antisense strand to SEQ ID NO: 1976798
uuugucauugcugauaacu

SEQ ID NO: 1976800 - RNA, 19 nt, Artificial Sequence
  Description of Artificial Sequence: Synthetic oligonucleotide
  Sense strand starting at position 3682 of SEQ ID NO: 1880563
auucauagcggugaggauu

SEQ ID NO: 1976801 - RNA, 19 nt, Artificial Sequence
  Description of Artificial Sequence: Synthetic oligonucleotide
  Antisense strand to SEQ ID NO: 1976800
aauccucaccgcuaugaau

SEQ ID NO: 1976802 - RNA, 19 nt, Artificial Sequence
  Description of Artificial Sequence: Synthetic oligonucleotide
  Sense strand starting at position 3685 of SEQ ID NO: 1880563
cauagcggugaggauuaaa

SEQ ID NO: 1976803 - RNA, 19 nt, Artificial Sequence
  Description of Artificial Sequence: Synthetic oligonucleotide
  Antisense strand to SEQ ID NO: 1976802
uuuaauccucaccgcuaug

SEQ ID NO: 1976804 - RNA, 19 nt, Artificial Sequence
  Description of Artificial Sequence: Synthetic oligonucleotide
  Sense strand starting at position 3906 of SEQ ID NO: 1880563
uacuuuguugcauaaacga

SEQ ID NO: 1976805 - RNA, 19 nt, Artificial Sequence
  Description of Artificial Sequence: Synthetic oligonucleotide
  Antisense strand to SEQ ID NO: 1976804
ucguuuaugcaacaaagua

SEQ ID NO: 1976806 - RNA, 19 nt, Artificial Sequence
  Description of Artificial Sequence: Synthetic oligonucleotide
  Sense strand starting at position 3914 of SEQ ID NO: 1880563
ugcauaaacgaaugaauaa

SEQ ID NO: 1976807 - RNA, 19 nt, Artificial Sequence
  Description of Artificial Sequence: Synthetic oligonucleotide
  Antisense strand to SEQ ID NO: 1976806
uuauucauucguuuaugca

SEQ ID NO: 1976808 - RNA, 19 nt, Artificial Sequence
  Description of Artificial Sequence: Synthetic oligonucleotide
  Sense strand starting at position 24 of SEQ ID NO: 1880564
aacccagaggagugugaau

SEQ ID NO: 1976809 - RNA, 19 nt, Artificial Sequence
  Description of Artificial Sequence: Synthetic oligonucleotide
  Antisense strand to SEQ ID NO: 1976808
auucacacuccucuggguu

SEQ ID NO: 1976810 - RNA, 19 nt, Artificial Sequence
  Description of Artificial Sequence: Synthetic oligonucleotide
  Sense strand starting at position 35 of SEQ ID NO: 1880564
gugugaauugcacacagac

SEQ ID NO: 1976811 - RNA, 19 nt, Artificial Sequence
  Description of Artificial Sequence: Synthetic oligonucleotide
  Antisense strand to SEQ ID NO: 1976810
gucugugugcaauucacac

SEQ ID NO: 1976812 - RNA, 19 nt, Artificial Sequence
  Description of Artificial Sequence: Synthetic oligonucleotide
  Sense strand starting at position 61 of SEQ ID NO: 1880564
caugcugaccuuugagaca

SEQ ID NO: 1976813 - RNA, 19 nt, Artificial Sequence
  Description of Artificial Sequence: Synthetic oligonucleotide
  Antisense strand to SEQ ID NO: 1976812
ugucucaaaggucagcaug

SEQ ID NO: 1976814 - RNA, 19 nt, Artificial Sequence
  Description of Artificial Sequence: Synthetic oligonucleotide
  Sense strand starting at position 110 of SEQ ID NO: 1880564
gcucaugugagauggaaag

SEQ ID NO: 1976815 - RNA, 19 nt, Artificial Sequence
  Description of Artificial Sequence: Synthetic oligonucleotide
  Antisense strand to SEQ ID NO: 1976814
cuuuccaucucacaugagc

SEQ ID NO: 1976816 - RNA, 19 nt, Artificial Sequence
  Description of Artificial Sequence: Synthetic oligonucleotide
  Sense strand starting at position 161 of SEQ ID NO: 1880564
aggcauuguguugaagaaa

SEQ ID NO: 1976817 - RNA, 19 nt, Artificial Sequence
  Description of Artificial Sequence: Synthetic oligonucleotide
  Antisense strand to SEQ ID NO: 1976816
uuucuucaacacaaugccu

SEQ ID NO: 1976818 - RNA, 19 nt, Artificial Sequence
  Description of Artificial Sequence: Synthetic oligonucleotide
  Sense strand starting at position 307 of SEQ ID NO: 1880564
ccaggaccgcuguaacaaa

SEQ ID NO: 1976819 - RNA, 19 nt, Artificial Sequence
  Description of Artificial Sequence: Synthetic oligonucleotide
  Antisense strand to SEQ ID NO: 1976818
uuuguuacagcgguccugg

SEQ ID NO: 1976820 - RNA, 19 nt, Artificial Sequence
  Description of Artificial Sequence: Synthetic oligonucleotide
  Sense strand starting at position 601 of SEQ ID NO: 1880564
cugaauccaguaugacuau

SEQ ID NO: 1976821 - RNA, 19 nt, Artificial Sequence
  Description of Artificial Sequence: Synthetic oligonucleotide
  Antisense strand to SEQ ID NO: 1976820
auagucauacuggauucag

SEQ ID NO: 1976822 - RNA, 19 nt, Artificial Sequence
  Description of Artificial Sequence: Synthetic oligonucleotide
  Sense strand starting at position 751 of SEQ ID NO: 1880564
ugcuaaucucuagaaguau

SEQ ID NO: 1976823 - RNA, 19 nt, Artificial Sequence
  Description of Artificial Sequence: Synthetic oligonucleotide
  Antisense strand to SEQ ID NO: 1976822
auacuucuagagauuagca

SEQ ID NO: 1976824 - RNA, 19 nt, Artificial Sequence
  Description of Artificial Sequence: Synthetic oligonucleotide
  Sense strand starting at position 809 of SEQ ID NO: 1880564
ggauaaagaugcuucuaag

SEQ ID NO: 1976825 - RNA, 19 nt, Artificial Sequence
  Description of Artificial Sequence: Synthetic oligonucleotide
  Antisense strand to SEQ ID NO: 1976824
cuuagaagcaucuuuaucc

SEQ ID NO: 1976826 - RNA, 19 nt, Artificial Sequence
  Description of Artificial Sequence: Synthetic oligonucleotide
  Sense strand starting at position 979 of SEQ ID NO: 1880564
uccagaggacguuauuagu

SEQ ID NO: 1976827 - RNA, 19 nt, Artificial Sequence
  Description of Artificial Sequence: Synthetic oligonucleotide
  Antisense strand to SEQ ID NO: 1976826
acuaauaacguccucugga

SEQ ID NO: 1976828 - RNA, 19 nt, Artificial Sequence
  Description of Artificial Sequence: Synthetic oligonucleotide
  Sense strand starting at position 1008 of SEQ ID NO: 1880564
ucccauaaauuugaguaga

SEQ ID NO: 1976829 - RNA, 19 nt, Artificial Sequence
  Description of Artificial Sequence: Synthetic oligonucleotide
  Antisense strand to SEQ ID NO: 1976828
ucuacucaaauuuauggga

SEQ ID NO: 1976830 - RNA, 19 nt, Artificial Sequence
  Description of Artificial Sequence: Synthetic oligonucleotide
  Sense strand starting at position 1172 of SEQ ID NO: 1880564
guaagauaguaccuuaaau

SEQ ID NO: 1976831 - RNA, 19 nt, Artificial Sequence
  Description of Artificial Sequence: Synthetic oligonucleotide
  Antisense strand to SEQ ID NO: 1976830
auuuaagguacuaucuuac

SEQ ID NO: 1976832 - RNA, 19 nt, Artificial Sequence
  Description of Artificial Sequence: Synthetic oligonucleotide
  Sense strand starting at position 1410 of SEQ ID NO: 1880564
uuguguuuagccucugugu

SEQ ID NO: 1976833 - RNA, 19 nt, Artificial Sequence
  Description of Artificial Sequence: Synthetic oligonucleotide
  Antisense strand to SEQ ID NO: 1976832
acacagaggcuaaacacaa

SEQ ID NO: 1976834 - RNA, 19 nt, Artificial Sequence
  Description of Artificial Sequence: Synthetic oligonucleotide
  Sense strand starting at position 1411 of SEQ ID NO: 1880564
uguguuuagccucuguguu

SEQ ID NO: 1976835 - RNA, 19 nt, Artificial Sequence
  Description of Artificial Sequence: Synthetic oligonucleotide
  Antisense strand to SEQ ID NO: 1976834
aacacagaggcuaaacaca

SEQ ID NO: 1976836 - RNA, 19 nt, Artificial Sequence
  Description of Artificial Sequence: Synthetic oligonucleotide
  Sense strand starting at position 1426 of SEQ ID NO: 1880564
uguuguauuuggccaauau

SEQ ID NO: 1976837 - RNA, 19 nt, Artificial Sequence
  Description of Artificial Sequence: Synthetic oligonucleotide
  Antisense strand to SEQ ID NO: 1976836
auauuggccaaauacaaca

SEQ ID NO: 1976838 - RNA, 19 nt, Artificial Sequence
  Description of Artificial Sequence: Synthetic oligonucleotide
  Sense strand starting at position 1494 of SEQ ID NO: 1880564
aguagaguauaagugaaga

SEQ ID NO: 1976839 - RNA, 19 nt, Artificial Sequence
  Description of Artificial Sequence: Synthetic oligonucleotide
  Antisense strand to SEQ ID NO: 1976838
ucuucacuuauacucuacu

SEQ ID NO: 1976840 - RNA, 19 nt, Artificial Sequence
  Description of Artificial Sequence: Synthetic oligonucleotide
  Sense strand starting at position 1607 of SEQ ID NO: 1880564
ugacauggauuugaacauu

SEQ ID NO: 1976841 - RNA, 19 nt, Artificial Sequence
  Description of Artificial Sequence: Synthetic oligonucleotide
  Antisense strand to SEQ ID NO: 1976840
aauguucaaauccauguca

SEQ ID NO: 1976842 - RNA, 19 nt, Artificial Sequence
  Description of Artificial Sequence: Synthetic oligonucleotide
  Sense strand starting at position 1615 of SEQ ID NO: 1880564
auuugaacauuagagcaaa

SEQ ID NO: 1976843 - RNA, 19 nt, Artificial Sequence
  Description of Artificial Sequence: Synthetic oligonucleotide
  Antisense strand to SEQ ID NO: 1976842
uuugcucuaauguucaaau

SEQ ID NO: 1976844 - RNA, 19 nt, Artificial Sequence
  Description of Artificial Sequence: Synthetic oligonucleotide
  Sense strand starting at position 2051 of SEQ ID NO: 1880564
uauuuagaaugugugcuuu

SEQ ID NO: 1976845 - RNA, 19 nt, Artificial Sequence
  Description of Artificial Sequence: Synthetic oligonucleotide
  Antisense strand to SEQ ID NO: 1976844
aaagcacacauucuaaaua

SEQ ID NO: 1976846 - RNA, 19 nt, Artificial Sequence
  Description of Artificial Sequence: Synthetic oligonucleotide
  Sense strand starting at position 2068 of SEQ ID NO: 1880564
uuguaagugaaguaugaug

SEQ ID NO: 1976847 - RNA, 19 nt, Artificial Sequence
  Description of Artificial Sequence: Synthetic oligonucleotide
  Antisense strand to SEQ ID NO: 1976846
caucauacuucacuuacaa

SEQ ID NO: 1976848 - RNA, 19 nt, Artificial Sequence
  Description of Artificial Sequence: Synthetic oligonucleotide
  Sense strand starting at position 2070 of SEQ ID NO: 1880564
guaagugaaguaugaugga

SEQ ID NO: 1976849 - RNA, 19 nt, Artificial Sequence
  Description of Artificial Sequence: Synthetic oligonucleotide
  Antisense strand to SEQ ID NO: 1976848
uccaucauacuucacuuac

SEQ ID NO: 1976850 - RNA, 19 nt, Artificial Sequence
  Description of Artificial Sequence: Synthetic oligonucleotide
  Sense strand starting at position 2397 of SEQ ID NO: 1880564
cugcuucuugaauaaggau

SEQ ID NO: 1976851 - RNA, 19 nt, Artificial Sequence
  Description of Artificial Sequence: Synthetic oligonucleotide
  Antisense strand to SEQ ID NO: 1976850
auccuuauucaagaagcag

SEQ ID NO: 1976852 - RNA, 19 nt, Artificial Sequence
  Description of Artificial Sequence: Synthetic oligonucleotide
  Sense strand starting at position 2537 of SEQ ID NO: 1880564
agaugcuucgaggagaucu

SEQ ID NO: 1976853 - RNA, 19 nt, Artificial Sequence
  Description of Artificial Sequence: Synthetic oligonucleotide
  Antisense strand to SEQ ID NO: 1976852
agaucuccucgaagcaucu

SEQ ID NO: 1976854 - RNA, 19 nt, Artificial Sequence
  Description of Artificial Sequence: Synthetic oligonucleotide
  Sense strand starting at position 2539 of SEQ ID NO: 1880564
augcuucgaggagaucuua

SEQ ID NO: 1976855 - RNA, 19 nt, Artificial Sequence
  Description of Artificial Sequence: Synthetic oligonucleotide
  Antisense strand to SEQ ID NO: 1976854
uaagaucuccucgaagcau

SEQ ID NO: 1976856 - RNA, 19 nt, Artificial Sequence
  Description of Artificial Sequence: Synthetic oligonucleotide
  Sense strand starting at position 2547 of SEQ ID NO: 1880564
aggagaucuuaguuccaca

SEQ ID NO: 1976857 - RNA, 19 nt, Artificial Sequence
  Description of Artificial Sequence: Synthetic oligonucleotide
  Antisense strand to SEQ ID NO: 1976856
uguggaacuaagaucuccu

SEQ ID NO: 1976858 - RNA, 19 nt, Artificial Sequence
  Description of Artificial Sequence: Synthetic oligonucleotide
  Sense strand starting at position 2585 of SEQ ID NO: 1880564
acguccaugccugagacaa

SEQ ID NO: 1976859 - RNA, 19 nt, Artificial Sequence
  Description of Artificial Sequence: Synthetic oligonucleotide
  Antisense strand to SEQ ID NO: 1976858
uugucucaggcauggacgu

SEQ ID NO: 1976860 - RNA, 19 nt, Artificial Sequence
  Description of Artificial Sequence: Synthetic oligonucleotide
  Sense strand starting at position 2603 of SEQ ID NO: 1880564
augacuggccagcaauuaa

SEQ ID NO: 1976861 - RNA, 19 nt, Artificial Sequence
  Description of Artificial Sequence: Synthetic oligonucleotide
  Antisense strand to SEQ ID NO: 1976860
uuaauugcuggccagucau

SEQ ID NO: 1976862 - RNA, 19 nt, Artificial Sequence
  Description of Artificial Sequence: Synthetic oligonucleotide
  Sense strand starting at position 2618 of SEQ ID NO: 1880564
uuaagacuacucugauuga

SEQ ID NO: 1976863 - RNA, 19 nt, Artificial Sequence
  Description of Artificial Sequence: Synthetic oligonucleotide
  Antisense strand to SEQ ID NO: 1976862
ucaaucagaguagucuuaa

SEQ ID NO: 1976864 - RNA, 19 nt, Artificial Sequence
  Description of Artificial Sequence: Synthetic oligonucleotide
  Sense strand starting at position 2663 of SEQ ID NO: 1880564
ggucaaagauggucuccau

SEQ ID NO: 1976865 - RNA, 19 nt, Artificial Sequence
  Description of Artificial Sequence: Synthetic oligonucleotide
  Antisense strand to SEQ ID NO: 1976864
auggagaccaucuuugacc

SEQ ID NO: 1976866 - RNA, 19 nt, Artificial Sequence
  Description of Artificial Sequence: Synthetic oligonucleotide
  Sense strand starting at position 2694 of SEQ ID NO: 1880564
gguagcucccaguauuaga

SEQ ID NO: 1976867 - RNA, 19 nt, Artificial Sequence
  Description of Artificial Sequence: Synthetic oligonucleotide
  Antisense strand to SEQ ID NO: 1976866
ucuaauacugggagcuacc

SEQ ID NO: 1976868 - RNA, 19 nt, Artificial Sequence
  Description of Artificial Sequence: Synthetic oligonucleotide
  Sense strand starting at position 2835 of SEQ ID NO: 1880564
uccauuauaucagcuagag

SEQ ID NO: 1976869 - RNA, 19 nt, Artificial Sequence
  Description of Artificial Sequence: Synthetic oligonucleotide
  Antisense strand to SEQ ID NO: 1976868
cucuagcugauauaaugga

SEQ ID NO: 1976870 - RNA, 19 nt, Artificial Sequence
  Description of Artificial Sequence: Synthetic oligonucleotide
  Sense strand starting at position 2990 of SEQ ID NO: 1880564
gguugaaacagaugagugu

SEQ ID NO: 1976871 - RNA, 19 nt, Artificial Sequence
  Description of Artificial Sequence: Synthetic oligonucleotide
  Antisense strand to SEQ ID NO: 1976870
acacucaucuguuucaacc

SEQ ID NO: 1976872 - RNA, 19 nt, Artificial Sequence
  Description of Artificial Sequence: Synthetic oligonucleotide
  Sense strand starting at position 2991 of SEQ ID NO: 1880564
guugaaacagaugaguguu

SEQ ID NO: 1976873 - RNA, 19 nt, Artificial Sequence
  Description of Artificial Sequence: Synthetic oligonucleotide
  Antisense strand to SEQ ID NO: 1976872
aacacucaucuguuucaac

SEQ ID NO: 1976874 - RNA, 19 nt, Artificial Sequence
  Description of Artificial Sequence: Synthetic oligonucleotide
  Sense strand starting at position 3154 of SEQ ID NO: 1880564
aauagauguuugucagaca

SEQ ID NO: 1976875 - RNA, 19 nt, Artificial Sequence
  Description of Artificial Sequence: Synthetic oligonucleotide
  Antisense strand to SEQ ID NO: 1976874
ugucugacaaacaucuauu

SEQ ID NO: 1976876 - RNA, 19 nt, Artificial Sequence
  Description of Artificial Sequence: Synthetic oligonucleotide
  Sense strand starting at position 3340 of SEQ ID NO: 1880564
uggccuguguacuuaauuu

SEQ ID NO: 1976877 - RNA, 19 nt, Artificial Sequence
  Description of Artificial Sequence: Synthetic oligonucleotide
  Antisense strand to SEQ ID NO: 1976876
aaauuaaguacacaggcca

SEQ ID NO: 1976878 - RNA, 19 nt, Artificial Sequence
  Description of Artificial Sequence: Synthetic oligonucleotide
  Sense strand starting at position 3397 of SEQ ID NO: 1880564
gugauuggaugacuugauu

SEQ ID NO: 1976879 - RNA, 19 nt, Artificial Sequence
  Description of Artificial Sequence: Synthetic oligonucleotide
  Antisense strand to SEQ ID NO: 1976878
aaucaagucauccaaucac

SEQ ID NO: 1976880 - RNA, 19 nt, Artificial Sequence
  Description of Artificial Sequence: Synthetic oligonucleotide
  Sense strand starting at position 3424 of SEQ ID NO: 1880564
gaauguaacugggcaagaa

SEQ ID NO: 1976881 - RNA, 19 nt, Artificial Sequence
  Description of Artificial Sequence: Synthetic oligonucleotide
  Antisense strand to SEQ ID NO: 1976880
uucuugcccaguuacauuc

SEQ ID NO: 1976882 - RNA, 19 nt, Artificial Sequence
  Description of Artificial Sequence: Synthetic oligonucleotide
  Sense strand starting at position 3523 of SEQ ID NO: 1880564
cccauugucccagaaguuu

SEQ ID NO: 1976883 - RNA, 19 nt, Artificial Sequence
  Description of Artificial Sequence: Synthetic oligonucleotide
  Antisense strand to SEQ ID NO: 1976882
aaacuucugggacaauggg

SEQ ID NO: 1976884 - RNA, 19 nt, Artificial Sequence
  Description of Artificial Sequence: Synthetic oligonucleotide
  Sense strand starting at position 3641 of SEQ ID NO: 1880564
acucuugagcuuuacagaa

SEQ ID NO: 1976885 - RNA, 19 nt, Artificial Sequence
  Description of Artificial Sequence: Synthetic oligonucleotide
  Antisense strand to SEQ ID NO: 1976884
uucuguaaagcucaagagu

SEQ ID NO: 1976886 - RNA, 19 nt, Artificial Sequence
  Description of Artificial Sequence: Synthetic oligonucleotide
  Sense strand starting at position 3903 of SEQ ID NO: 1880564
agcacagaugccugggaaa

SEQ ID NO: 1976887 - RNA, 19 nt, Artificial Sequence
  Description of Artificial Sequence: Synthetic oligonucleotide
  Antisense strand to SEQ ID NO: 1976886
uuucccaggcaucugugcu

SEQ ID NO: 1976888 - RNA, 19 nt, Artificial Sequence
  Description of Artificial Sequence: Synthetic oligonucleotide
  Sense strand starting at position 181 of SEQ ID NO: 1880565
agcugaauauucucugaau

SEQ ID NO: 1976889 - RNA, 19 nt, Artificial Sequence
  Description of Artificial Sequence: Synthetic oligonucleotide
  Antisense strand to SEQ ID NO: 1976888
auucagagaauauucagcu

SEQ ID NO: 1976890 - RNA, 19 nt, Artificial Sequence
  Description of Artificial Sequence: Synthetic oligonucleotide
  Sense strand starting at position 294 of SEQ ID NO: 1880565
uuugaacaccuaugaauug

SEQ ID NO: 1976891 - RNA, 19 nt, Artificial Sequence
  Description of Artificial Sequence: Synthetic oligonucleotide
  Antisense strand to SEQ ID NO: 1976890
caauucauagguguucaaa

SEQ ID NO: 1976892 - RNA, 19 nt, Artificial Sequence
  Description of Artificial Sequence: Synthetic oligonucleotide
  Sense strand starting at position 303 of SEQ ID NO: 1880565
cuaugaauugccuaugaau

SEQ ID NO: 1976893 - RNA, 19 nt, Artificial Sequence
  Description of Artificial Sequence: Synthetic oligonucleotide
  Antisense strand to SEQ ID NO: 1976892
auucauaggcaauucauag

SEQ ID NO: 1976894 - RNA, 19 nt, Artificial Sequence
  Description of Artificial Sequence: Synthetic oligonucleotide
  Sense strand starting at position 306 of SEQ ID NO: 1880565
ugaauugccuaugaauuua

SEQ ID NO: 1976895 - RNA, 19 nt, Artificial Sequence
  Description of Artificial Sequence: Synthetic oligonucleotide
  Antisense strand to SEQ ID NO: 1976894
uaaauucauaggcaauuca

SEQ ID NO: 1976896 - RNA, 19 nt, Artificial Sequence
  Description of Artificial Sequence: Synthetic oligonucleotide
  Sense strand starting at position 406 of SEQ ID NO: 1880565
ucagucugucucgugcaaa

SEQ ID NO: 1976897 - RNA, 19 nt, Artificial Sequence
  Description of Artificial Sequence: Synthetic oligonucleotide
  Antisense strand to SEQ ID NO: 1976896
uuugcacgagacagacuga

SEQ ID NO: 1976898 - RNA, 19 nt, Artificial Sequence
  Description of Artificial Sequence: Synthetic oligonucleotide
  Sense strand starting at position 533 of SEQ ID NO: 1880565
ccauuuaguucuguggcuu

SEQ ID NO: 1976899 - RNA, 19 nt, Artificial Sequence
  Description of Artificial Sequence: Synthetic oligonucleotide
  Antisense strand to SEQ ID NO: 1976898
aagccacagaacuaaaugg

SEQ ID NO: 1976900 - RNA, 19 nt, Artificial Sequence
  Description of Artificial Sequence: Synthetic oligonucleotide
  Sense strand starting at position 534 of SEQ ID NO: 1880565
cauuuaguucuguggcuuu

SEQ ID NO: 1976901 - RNA, 19 nt, Artificial Sequence
  Description of Artificial Sequence: Synthetic oligonucleotide
  Antisense strand to SEQ ID NO: 1976900
aaagccacagaacuaaaug

SEQ ID NO: 1976902 - RNA, 19 nt, Artificial Sequence
  Description of Artificial Sequence: Synthetic oligonucleotide
  Sense strand starting at position 553 of SEQ ID NO: 1880565
gggcaagcuacuuaguagu

SEQ ID NO: 1976903 - RNA, 19 nt, Artificial Sequence
  Description of Artificial Sequence: Synthetic oligonucleotide
  Antisense strand to SEQ ID NO: 1976902
acuacuaaguagcuugccc

SEQ ID NO: 1976904 - RNA, 19 nt, Artificial Sequence
  Description of Artificial Sequence: Synthetic oligonucleotide
  Sense strand starting at position 675 of SEQ ID NO: 1880565
aagcauuaggaauguauau

SEQ ID NO: 1976905 - RNA, 19 nt, Artificial Sequence
  Description of Artificial Sequence: Synthetic oligonucleotide
  Antisense strand to SEQ ID NO: 1976904
auauacauuccuaaugcuu

SEQ ID NO: 1976906 - RNA, 19 nt, Artificial Sequence
  Description of Artificial Sequence: Synthetic oligonucleotide
  Sense strand starting at position 957 of SEQ ID NO: 1880565
uuagguacucuguguaaag

SEQ ID NO: 1976907 - RNA, 19 nt, Artificial Sequence
  Description of Artificial Sequence: Synthetic oligonucleotide
  Antisense strand to SEQ ID NO: 1976906
cuuuacacagaguaccuaa

SEQ ID NO: 1976908 - RNA, 19 nt, Artificial Sequence
  Description of Artificial Sequence: Synthetic oligonucleotide
  Sense strand starting at position 958 of SEQ ID NO: 1880565
uagguacucuguguaaagu

SEQ ID NO: 1976909 - RNA, 19 nt, Artificial Sequence
  Description of Artificial Sequence: Synthetic oligonucleotide
  Antisense strand to SEQ ID NO: 1976908
acuuuacacagaguaccua

SEQ ID NO: 1976910 - RNA, 19 nt, Artificial Sequence
  Description of Artificial Sequence: Synthetic oligonucleotide
  Sense strand starting at position 959 of SEQ ID NO: 1880565
agguacucuguguaaagua

SEQ ID NO: 1976911 - RNA, 19 nt, Artificial Sequence
  Description of Artificial Sequence: Synthetic oligonucleotide
  Antisense strand to SEQ ID NO: 1976910
uacuuuacacagaguaccu

SEQ ID NO: 1976912 - RNA, 19 nt, Artificial Sequence
  Description of Artificial Sequence: Synthetic oligonucleotide
  Sense strand starting at position 964 of SEQ ID NO: 1880565
cucuguguaaaguaggaau

SEQ ID NO: 1976913 - RNA, 19 nt, Artificial Sequence
  Description of Artificial Sequence: Synthetic oligonucleotide
  Antisense strand to SEQ ID NO: 1976912
auuccuacuuuacacagag

SEQ ID NO: 1976914 - RNA, 19 nt, Artificial Sequence
  Description of Artificial Sequence: Synthetic oligonucleotide
  Sense strand starting at position 1002 of SEQ ID NO: 1880565
augugaaacuuguugcucu

SEQ ID NO: 1976915 - RNA, 19 nt, Artificial Sequence
  Description of Artificial Sequence: Synthetic oligonucleotide
  Antisense strand to SEQ ID NO: 1976914
agagcaacaaguuucacau

SEQ ID NO: 1976916 - RNA, 19 nt, Artificial Sequence
  Description of Artificial Sequence: Synthetic oligonucleotide
  Sense strand starting at position 1006 of SEQ ID NO: 1880565
gaaacuuguugcucugaca

SEQ ID NO: 1976917 - RNA, 19 nt, Artificial Sequence
  Description of Artificial Sequence: Synthetic oligonucleotide
  Antisense strand to SEQ ID NO: 1976916
ugucagagcaacaaguuuc

SEQ ID NO: 1976918 - RNA, 19 nt, Artificial Sequence
  Description of Artificial Sequence: Synthetic oligonucleotide
  Sense strand starting at position 1080 of SEQ ID NO: 1880565
ccuguaauucuguggaugu

SEQ ID NO: 1976919 - RNA, 19 nt, Artificial Sequence
  Description of Artificial Sequence: Synthetic oligonucleotide
  Antisense strand to SEQ ID NO: 1976918
acauccacagaauuacagg

SEQ ID NO: 1976920 - RNA, 19 nt, Artificial Sequence
  Description of Artificial Sequence: Synthetic oligonucleotide
  Sense strand starting at position 1762 of SEQ ID NO: 1880565
aauuuccuguaggauagau

SEQ ID NO: 1976921 - RNA, 19 nt, Artificial Sequence
  Description of Artificial Sequence: Synthetic oligonucleotide
  Antisense strand to SEQ ID NO: 1976920
aucuauccuacaggaaauu

SEQ ID NO: 1976922 - RNA, 19 nt, Artificial Sequence
  Description of Artificial Sequence: Synthetic oligonucleotide
  Sense strand starting at position 1858 of SEQ ID NO: 1880565
agaaucgaccucugaauuc

SEQ ID NO: 1976923 - RNA, 19 nt, Artificial Sequence
  Description of Artificial Sequence: Synthetic oligonucleotide
  Antisense strand to SEQ ID NO: 1976922
gaauucagaggucgauucu

SEQ ID NO: 1976924 - RNA, 19 nt, Artificial Sequence
  Description of Artificial Sequence: Synthetic oligonucleotide
  Sense strand starting at position 1867 of SEQ ID NO: 1880565
cucugaauucugggaaucu

SEQ ID NO: 1976925 - RNA, 19 nt, Artificial Sequence
  Description of Artificial Sequence: Synthetic oligonucleotide
  Antisense strand to SEQ ID NO: 1976924
agauucccagaauucagag

SEQ ID NO: 1976926 - RNA, 19 nt, Artificial Sequence
  Description of Artificial Sequence: Synthetic oligonucleotide
  Sense strand starting at position 1903 of SEQ ID NO: 1880565
auucuccuaugagaaugaa

SEQ ID NO: 1976927 - RNA, 19 nt, Artificial Sequence
  Description of Artificial Sequence: Synthetic oligonucleotide
  Antisense strand to SEQ ID NO: 1976926
uucauucucauaggagaau

SEQ ID NO: 1976928 - RNA, 19 nt, Artificial Sequence
  Description of Artificial Sequence: Synthetic oligonucleotide
  Sense strand starting at position 1924 of SEQ ID NO: 1880565
gucuuugaauugucagcca

SEQ ID NO: 1976929 - RNA, 19 nt, Artificial Sequence
  Description of Artificial Sequence: Synthetic oligonucleotide
  Antisense strand to SEQ ID NO: 1976928
uggcugacaauucaaagac

SEQ ID NO: 1976930 - RNA, 19 nt, Artificial Sequence
  Description of Artificial Sequence: Synthetic oligonucleotide
  Sense strand starting at position 1927 of SEQ ID NO: 1880565
uuugaauugucagccaaau

SEQ ID NO: 1976931 - RNA, 19 nt, Artificial Sequence
  Description of Artificial Sequence: Synthetic oligonucleotide
  Antisense strand to SEQ ID NO: 1976930
auuuggcugacaauucaaa

SEQ ID NO: 1976932 - RNA, 19 nt, Artificial Sequence
  Description of Artificial Sequence: Synthetic oligonucleotide
  Sense strand starting at position 1952 of SEQ ID NO: 1880565
agaguaacaucuuuguucu

SEQ ID NO: 1976933 - RNA, 19 nt, Artificial Sequence
  Description of Artificial Sequence: Synthetic oligonucleotide
  Antisense strand to SEQ ID NO: 1976932
agaacaaagauguuacucu

SEQ ID NO: 1976934 - RNA, 19 nt, Artificial Sequence
  Description of Artificial Sequence: Synthetic oligonucleotide
  Sense strand starting at position 2783 of SEQ ID NO: 1880565
gccucacuguaguuugaau

SEQ ID NO: 1976935 - RNA, 19 nt, Artificial Sequence
  Description of Artificial Sequence: Synthetic oligonucleotide
  Antisense strand to SEQ ID NO: 1976934
auucaaacuacagugaggc

SEQ ID NO: 1976936 - RNA, 19 nt, Artificial Sequence
  Description of Artificial Sequence: Synthetic oligonucleotide
  Sense strand starting at position 2819 of SEQ ID NO: 1880565
ugagauugaugguuauaua

SEQ ID NO: 1976937 - RNA, 19 nt, Artificial Sequence
  Description of Artificial Sequence: Synthetic oligonucleotide
  Antisense strand to SEQ ID NO: 1976936
uauauaaccaucaaucuca

SEQ ID NO: 1976938 - RNA, 19 nt, Artificial Sequence
  Description of Artificial Sequence: Synthetic oligonucleotide
  Sense strand starting at position 2942 of SEQ ID NO: 1880565
auguccauguuugucauau

SEQ ID NO: 1976939 - RNA, 19 nt, Artificial Sequence
  Description of Artificial Sequence: Synthetic oligonucleotide
  Antisense strand to SEQ ID NO: 1976938
auaugacaaacauggacau

SEQ ID NO: 1976940 - RNA, 19 nt, Artificial Sequence
  Description of Artificial Sequence: Synthetic oligonucleotide
  Sense strand starting at position 2943 of SEQ ID NO: 1880565
uguccauguuugucauaua

SEQ ID NO: 1976941 - RNA, 19 nt, Artificial Sequence
  Description of Artificial Sequence: Synthetic oligonucleotide
  Antisense strand to SEQ ID NO: 1976940
uauaugacaaacauggaca

SEQ ID NO: 1976942 - RNA, 19 nt, Artificial Sequence
  Description of Artificial Sequence: Synthetic oligonucleotide
  Sense strand starting at position 2951 of SEQ ID NO: 1880565
uuugucauauaugcuguaa

SEQ ID NO: 1976943 - RNA, 19 nt, Artificial Sequence
  Description of Artificial Sequence: Synthetic oligonucleotide
  Antisense strand to SEQ ID NO: 1976942
uuacagcauauaugacaaa

SEQ ID NO: 1976944 - RNA, 19 nt, Artificial Sequence
  Description of Artificial Sequence: Synthetic oligonucleotide
  Sense strand starting at position 3084 of SEQ ID NO: 1880565
uauguuuaggacugucaaa

SEQ ID NO: 1976945 - RNA, 19 nt, Artificial Sequence
  Description of Artificial Sequence: Synthetic oligonucleotide
  Antisense strand to SEQ ID NO: 1976944
uuugacaguccuaaacaua

SEQ ID NO: 1976946 - RNA, 19 nt, Artificial Sequence
  Description of Artificial Sequence: Synthetic oligonucleotide
  Sense strand starting at position 3320 of SEQ ID NO: 1880565
aggcaacuuccuuaucaug

SEQ ID NO: 1976947 - RNA, 19 nt, Artificial Sequence
  Description of Artificial Sequence: Synthetic oligonucleotide
  Antisense strand to SEQ ID NO: 1976946
caugauaaggaaguugccu

SEQ ID NO: 1976948 - RNA, 19 nt, Artificial Sequence
  Description of Artificial Sequence: Synthetic oligonucleotide
  Sense strand starting at position 3385 of SEQ ID NO: 1880565
ggcucuugguuucuuggaa

SEQ ID NO: 1976949 - RNA, 19 nt, Artificial Sequence
  Description of Artificial Sequence: Synthetic oligonucleotide
  Antisense strand to SEQ ID NO: 1976948
uuccaagaaaccaagagcc

SEQ ID NO: 1976950 - RNA, 19 nt, Artificial Sequence
  Description of Artificial Sequence: Synthetic oligonucleotide
  Sense strand starting at position 3426 of SEQ ID NO: 1880565
ggguugguggugugaaacu

SEQ ID NO: 1976951 - RNA, 19 nt, Artificial Sequence
  Description of Artificial Sequence: Synthetic oligonucleotide
  Antisense strand to SEQ ID NO: 1976950
aguuucacaccaccaaccc

SEQ ID NO: 1976952 - RNA, 19 nt, Artificial Sequence
  Description of Artificial Sequence: Synthetic oligonucleotide
  Sense strand starting at position 3625 of SEQ ID NO: 1880565
cacaguuguuacucgguaa

SEQ ID NO: 1976953 - RNA, 19 nt, Artificial Sequence
  Description of Artificial Sequence: Synthetic oligonucleotide
  Antisense strand to SEQ ID NO: 1976952
uuaccgaguaacaacugug

SEQ ID NO: 1976954 - RNA, 19 nt, Artificial Sequence
  Description of Artificial Sequence: Synthetic oligonucleotide
  Sense strand starting at position 3628 of SEQ ID NO: 1880565
aguuguuacucgguaauga

SEQ ID NO: 1976955 - RNA, 19 nt, Artificial Sequence
  Description of Artificial Sequence: Synthetic oligonucleotide
  Antisense strand to SEQ ID NO: 1976954
ucauuaccgaguaacaacu

SEQ ID NO: 1976956 - RNA, 19 nt, Artificial Sequence
  Description of Artificial Sequence: Synthetic oligonucleotide
  Sense strand starting at position 3629 of SEQ ID NO: 1880565
guuguuacucgguaaugag

SEQ ID NO: 1976957 - RNA, 19 nt, Artificial Sequence
  Description of Artificial Sequence: Synthetic oligonucleotide
  Antisense strand to SEQ ID NO: 1976956
cucauuaccgaguaacaac

SEQ ID NO: 1976958 - RNA, 19 nt, Artificial Sequence
  Description of Artificial Sequence: Synthetic oligonucleotide
  Sense strand starting at position 3636 of SEQ ID NO: 1880565
cucgguaaugagggauguu

SEQ ID NO: 1976959 - RNA, 19 nt, Artificial Sequence
  Description of Artificial Sequence: Synthetic oligonucleotide
  Antisense strand to SEQ ID NO: 1976958
aacaucccucauuaccgag

SEQ ID NO: 1976960 - RNA, 19 nt, Artificial Sequence
  Description of Artificial Sequence: Synthetic oligonucleotide
  Sense strand starting at position 3687 of SEQ ID NO: 1880565
uugggauacugaguacuuu

SEQ ID NO: 1976961 - RNA, 19 nt, Artificial Sequence
  Description of Artificial Sequence: Synthetic oligonucleotide
  Antisense strand to SEQ ID NO: 1976960
aaaguacucaguaucccaa

SEQ ID NO: 1976962 - RNA, 19 nt, Artificial Sequence
  Description of Artificial Sequence: Synthetic oligonucleotide
  Sense strand starting at position 3693 of SEQ ID NO: 1880565
uacugaguacuuugagcua

SEQ ID NO: 1976963 - RNA, 19 nt, Artificial Sequence
  Description of Artificial Sequence: Synthetic oligonucleotide
  Antisense strand to SEQ ID NO: 1976962
uagcucaaaguacucagua

SEQ ID NO: 1976964 - RNA, 19 nt, Artificial Sequence
  Description of Artificial Sequence: Synthetic oligonucleotide
  Sense strand starting at position 3732 of SEQ ID NO: 1880565
gaagcaagaucucugugac

SEQ ID NO: 1976965 - RNA, 19 nt, Artificial Sequence
  Description of Artificial Sequence: Synthetic oligonucleotide
  Antisense strand to SEQ ID NO: 1976964
gucacagagaucuugcuuc

SEQ ID NO: 1976966 - RNA, 19 nt, Artificial Sequence
  Description of Artificial Sequence: Synthetic oligonucleotide
  Sense strand starting at position 3735 of SEQ ID NO: 1880565
gcaagaucucugugaccuu

SEQ ID NO: 1976967 - RNA, 19 nt, Artificial Sequence
  Description of Artificial Sequence: Synthetic oligonucleotide
  Antisense strand to SEQ ID NO: 1976966
aaggucacagagaucuugc

SEQ ID NO: 1976968 - RNA, 19 nt, Artificial Sequence
  Description of Artificial Sequence: Synthetic oligonucleotide
  Sense strand starting at position 125 of SEQ ID NO: 1880566
ucaccaaauguuugugaga

SEQ ID NO: 1976969 - RNA, 19 nt, Artificial Sequence
  Description of Artificial Sequence: Synthetic oligonucleotide
  Antisense strand to SEQ ID NO: 1976968
ucucacaaacauuugguga

SEQ ID NO: 1976970 - RNA, 19 nt, Artificial Sequence
  Description of Artificial Sequence: Synthetic oligonucleotide
  Sense strand starting at position 126 of SEQ ID NO: 1880566
caccaaauguuugugagau

SEQ ID NO: 1976971 - RNA, 19 nt, Artificial Sequence
  Description of Artificial Sequence: Synthetic oligonucleotide
  Antisense strand to SEQ ID NO: 1976970
aucucacaaacauuuggug

SEQ ID NO: 1976972 - RNA, 19 nt, Artificial Sequence
  Description of Artificial Sequence: Synthetic oligonucleotide
  Sense strand starting at position 127 of SEQ ID NO: 1880566
accaaauguuugugagauu

SEQ ID NO: 1976973 - RNA, 19 nt, Artificial Sequence
  Description of Artificial Sequence: Synthetic oligonucleotide
  Antisense strand to SEQ ID NO: 1976972
aaucucacaaacauuuggu

SEQ ID NO: 1976974 - RNA, 19 nt, Artificial Sequence
  Description of Artificial Sequence: Synthetic oligonucleotide
  Sense strand starting at position 128 of SEQ ID NO: 1880566
ccaaauguuugugagauua

SEQ ID NO: 1976975 - RNA, 19 nt, Artificial Sequence
  Description of Artificial Sequence: Synthetic oligonucleotide
  Antisense strand to SEQ ID NO: 1976974
uaaucucacaaacauuugg

SEQ ID NO: 1976976 - RNA, 19 nt, Artificial Sequence
  Description of Artificial Sequence: Synthetic oligonucleotide
  Sense strand starting at position 130 of SEQ ID NO: 1880566
aaauguuugugagauuaug

SEQ ID NO: 1976977 - RNA, 19 nt, Artificial Sequence
  Description of Artificial Sequence: Synthetic oligonucleotide
  Antisense strand to SEQ ID NO: 1976976
cauaaucucacaaacauuu

SEQ ID NO: 1976978 - RNA, 19 nt, Artificial Sequence
  Description of Artificial Sequence: Synthetic oligonucleotide
  Sense strand starting at position 136 of SEQ ID NO: 1880566
uugugagauuauggagaaa

SEQ ID NO: 1976979 - RNA, 19 nt, Artificial Sequence
  Description of Artificial Sequence: Synthetic oligonucleotide
  Antisense strand to SEQ ID NO: 1976978
uuucuccauaaucucacaa

SEQ ID NO: 1976980 - RNA, 19 nt, Artificial Sequence
  Description of Artificial Sequence: Synthetic oligonucleotide
  Sense strand starting at position 209 of SEQ ID NO: 1880566
ggcagugugaacuguggua

SEQ ID NO: 1976981 - RNA, 19 nt, Artificial Sequence
  Description of Artificial Sequence: Synthetic oligonucleotide
  Antisense strand to SEQ ID NO: 1976980
uaccacaguucacacugcc

SEQ ID NO: 1976982 - RNA, 19 nt, Artificial Sequence
  Description of Artificial Sequence: Synthetic oligonucleotide
  Sense strand starting at position 211 of SEQ ID NO: 1880566
cagugugaacugugguaug

SEQ ID NO: 1976983 - RNA, 19 nt, Artificial Sequence
  Description of Artificial Sequence: Synthetic oligonucleotide
  Antisense strand to SEQ ID NO: 1976982
cauaccacaguucacacug

SEQ ID NO: 1976984 - RNA, 19 nt, Artificial Sequence
  Description of Artificial Sequence: Synthetic oligonucleotide
  Sense strand starting at position 214 of SEQ ID NO: 1880566
ugugaacugugguauggaa

SEQ ID NO: 1976985 - RNA, 19 nt, Artificial Sequence
  Description of Artificial Sequence: Synthetic oligonucleotide
  Antisense strand to SEQ ID NO: 1976984
uuccauaccacaguucaca

SEQ ID NO: 1976986 - RNA, 19 nt, Artificial Sequence
  Description of Artificial Sequence: Synthetic oligonucleotide
  Sense strand starting at position 228 of SEQ ID NO: 1880566
uggaaugugcaucgccuaa

SEQ ID NO: 1976987 - RNA, 19 nt, Artificial Sequence
  Description of Artificial Sequence: Synthetic oligonucleotide
  Antisense strand to SEQ ID NO: 1976986
uuaggcgaugcacauucca

SEQ ID NO: 1976988 - RNA, 19 nt, Artificial Sequence
  Description of Artificial Sequence: Synthetic oligonucleotide
  Sense strand starting at position 230 of SEQ ID NO: 1880566
gaaugugcaucgccuaaga

SEQ ID NO: 1976989 - RNA, 19 nt, Artificial Sequence
  Description of Artificial Sequence: Synthetic oligonucleotide
  Antisense strand to SEQ ID NO: 1976988
ucuuaggcgaugcacauuc

SEQ ID NO: 1976990 - RNA, 19 nt, Artificial Sequence
  Description of Artificial Sequence: Synthetic oligonucleotide
  Sense strand starting at position 232 of SEQ ID NO: 1880566
augugcaucgccuaagaca

SEQ ID NO: 1976991 - RNA, 19 nt, Artificial Sequence
  Description of Artificial Sequence: Synthetic oligonucleotide
  Antisense strand to SEQ ID NO: 1976990
ugucuuaggcgaugcacau

SEQ ID NO: 1976992 - RNA, 19 nt, Artificial Sequence
  Description of Artificial Sequence: Synthetic oligonucleotide
  Sense strand starting at position 258 of SEQ ID NO: 1880566
cuuucuccucaguauaugu

SEQ ID NO: 1976993 - RNA, 19 nt, Artificial Sequence
  Description of Artificial Sequence: Synthetic oligonucleotide
  Antisense strand to SEQ ID NO: 1976992
acauauacugaggagaaag

SEQ ID NO: 1976994 - RNA, 19 nt, Artificial Sequence
  Description of Artificial Sequence: Synthetic oligonucleotide
  Sense strand starting at position 265 of SEQ ID NO: 1880566
cucaguauauguccagaga

SEQ ID NO: 1976995 - RNA, 19 nt, Artificial Sequence
  Description of Artificial Sequence: Synthetic oligonucleotide
  Antisense strand to SEQ ID NO: 1976994
ucucuggacauauacugag

SEQ ID NO: 1976996 - RNA, 19 nt, Artificial Sequence
  Description of Artificial Sequence: Synthetic oligonucleotide
  Sense strand starting at position 298 of SEQ ID NO: 1880566
uaccaaaggaguugugugu

SEQ ID NO: 1976997 - RNA, 19 nt, Artificial Sequence
  Description of Artificial Sequence: Synthetic oligonucleotide
  Antisense strand to SEQ ID NO: 1976996
acacacaacuccuuuggua

SEQ ID NO: 1976998 - RNA, 19 nt, Artificial Sequence
  Description of Artificial Sequence: Synthetic oligonucleotide
  Sense strand starting at position 302 of SEQ ID NO: 1880566
aaaggaguugugugucauu

SEQ ID NO: 1976999 - RNA, 19 nt, Artificial Sequence
  Description of Artificial Sequence: Synthetic oligonucleotide
  Antisense strand to SEQ ID NO: 1976998
aaugacacacaacuccuuu

SEQ ID NO: 1977000 - RNA, 19 nt, Artificial Sequence
  Description of Artificial Sequence: Synthetic oligonucleotide
  Sense strand starting at position 305 of SEQ ID NO: 1880566
ggaguugugugucauuaug

SEQ ID NO: 1977001 - RNA, 19 nt, Artificial Sequence
  Description of Artificial Sequence: Synthetic oligonucleotide
  Antisense strand to SEQ ID NO: 1977000
cauaaugacacacaacucc

SEQ ID NO: 1977002 - RNA, 19 nt, Artificial Sequence
  Description of Artificial Sequence: Synthetic oligonucleotide
  Sense strand starting at position 307 of SEQ ID NO: 1880566
aguugugugucauuauguu

SEQ ID NO: 1977003 - RNA, 19 nt, Artificial Sequence
  Description of Artificial Sequence: Synthetic oligonucleotide
  Antisense strand to SEQ ID NO: 1977002
aacauaaugacacacaacu

SEQ ID NO: 1977004 - RNA, 19 nt, Artificial Sequence
  Description of Artificial Sequence: Synthetic oligonucleotide
  Sense strand starting at position 311 of SEQ ID NO: 1880566
gugugucauuauguuuauc

SEQ ID NO: 1977005 - RNA, 19 nt, Artificial Sequence
  Description of Artificial Sequence: Synthetic oligonucleotide
  Antisense strand to SEQ ID NO: 1977004
gauaaacauaaugacacac

SEQ ID NO: 1977006 - RNA, 19 nt, Artificial Sequence
  Description of Artificial Sequence: Synthetic oligonucleotide
  Sense strand starting at position 313 of SEQ ID NO: 1880566
gugucauuauguuuaucac

SEQ ID NO: 1977007 - RNA, 19 nt, Artificial Sequence
  Description of Artificial Sequence: Synthetic oligonucleotide
  Antisense strand to SEQ ID NO: 1977006
gugauaaacauaaugacac

SEQ ID NO: 1977008 - RNA, 19 nt, Artificial Sequence
  Description of Artificial Sequence: Synthetic oligonucleotide
  Sense strand starting at position 314 of SEQ ID NO: 1880566
ugucauuauguuuaucaca

SEQ ID NO: 1977009 - RNA, 19 nt, Artificial Sequence
  Description of Artificial Sequence: Synthetic oligonucleotide
  Antisense strand to SEQ ID NO: 1977008
ugugauaaacauaaugaca

SEQ ID NO: 1977010 - RNA, 19 nt, Artificial Sequence
  Description of Artificial Sequence: Synthetic oligonucleotide
  Sense strand starting at position 334 of SEQ ID NO: 1880566
cauuauuugugauagaagg

SEQ ID NO: 1977011 - RNA, 19 nt, Artificial Sequence
  Description of Artificial Sequence: Synthetic oligonucleotide
  Antisense strand to SEQ ID NO: 1977010
ccuucuaucacaaauaaug

SEQ ID NO: 1977012 - RNA, 19 nt, Artificial Sequence
  Description of Artificial Sequence: Synthetic oligonucleotide
  Sense strand starting at position 370 of SEQ ID NO: 1880566
ggugcacuuugcuagggaa

SEQ ID NO: 1977013 - RNA, 19 nt, Artificial Sequence
  Description of Artificial Sequence: Synthetic oligonucleotide
  Antisense strand to SEQ ID NO: 1977012
uucccuagcaaagugcacc

SEQ ID NO: 1977014 - RNA, 19 nt, Artificial Sequence
  Description of Artificial Sequence: Synthetic oligonucleotide
  Sense strand starting at position 372 of SEQ ID NO: 1880566
ugcacuuugcuagggaaau

SEQ ID NO: 1977015 - RNA, 19 nt, Artificial Sequence
  Description of Artificial Sequence: Synthetic oligonucleotide
  Antisense strand to SEQ ID NO: 1977014
auuucccuagcaaagugca

SEQ ID NO: 1977016 - RNA, 19 nt, Artificial Sequence
  Description of Artificial Sequence: Synthetic oligonucleotide
  Sense strand starting at position 373 of SEQ ID NO: 1880566
gcacuuugcuagggaaaua

SEQ ID NO: 1977017 - RNA, 19 nt, Artificial Sequence
  Description of Artificial Sequence: Synthetic oligonucleotide
  Antisense strand to SEQ ID NO: 1977016
uauuucccuagcaaagugc

SEQ ID NO: 1977018 - RNA, 19 nt, Artificial Sequence
  Description of Artificial Sequence: Synthetic oligonucleotide
  Sense strand starting at position 399 of SEQ ID NO: 1880566
auaaauguguacuauggaa

SEQ ID NO: 1977019 - RNA, 19 nt, Artificial Sequence
  Description of Artificial Sequence: Synthetic oligonucleotide
  Antisense strand to SEQ ID NO: 1977018
uuccauaguacacauuuau

SEQ ID NO: 1977020 - RNA, 19 nt, Artificial Sequence
  Description of Artificial Sequence: Synthetic oligonucleotide
  Sense strand starting at position 401 of SEQ ID NO: 1880566
aaauguguacuauggaaua

SEQ ID NO: 1977021 - RNA, 19 nt, Artificial Sequence
  Description of Artificial Sequence: Synthetic oligonucleotide
  Antisense strand to SEQ ID NO: 1977020
uauuccauaguacacauuu

SEQ ID NO: 1977022 - RNA, 19 nt, Artificial Sequence
  Description of Artificial Sequence: Synthetic oligonucleotide
  Sense strand starting at position 412 of SEQ ID NO: 1880566
auggaauacuaugaucaga

SEQ ID NO: 1977023 - RNA, 19 nt, Artificial Sequence
  Description of Artificial Sequence: Synthetic oligonucleotide
  Antisense strand to SEQ ID NO: 1977022
ucugaucauaguauuccau

SEQ ID NO: 1977024 - RNA, 19 nt, Artificial Sequence
  Description of Artificial Sequence: Synthetic oligonucleotide
  Sense strand starting at position 414 of SEQ ID NO: 1880566
ggaauacuaugaucagagc

SEQ ID NO: 1977025 - RNA, 19 nt, Artificial Sequence
  Description of Artificial Sequence: Synthetic oligonucleotide
  Antisense strand to SEQ ID NO: 1977024
gcucugaucauaguauucc

SEQ ID NO: 1977026 - RNA, 19 nt, Artificial Sequence
  Description of Artificial Sequence: Synthetic oligonucleotide
  Sense strand starting at position 417 of SEQ ID NO: 1880566
auacuaugaucagagcaaa

SEQ ID NO: 1977027 - RNA, 19 nt, Artificial Sequence
  Description of Artificial Sequence: Synthetic oligonucleotide
  Antisense strand to SEQ ID NO: 1977026
uuugcucugaucauaguau

SEQ ID NO: 1977028 - RNA, 19 nt, Artificial Sequence
  Description of Artificial Sequence: Synthetic oligonucleotide
  Sense strand starting at position 807 of SEQ ID NO: 1880566
gcaaauuucugccugucau

SEQ ID NO: 1977029 - RNA, 19 nt, Artificial Sequence
  Description of Artificial Sequence: Synthetic oligonucleotide
  Antisense strand to SEQ ID NO: 1977028
augacaggcagaaauuugc

SEQ ID NO: 1977030 - RNA, 19 nt, Artificial Sequence
  Description of Artificial Sequence: Synthetic oligonucleotide
  Sense strand starting at position 847 of SEQ ID NO: 1880566
ugcauaauuuccuaauggu

SEQ ID NO: 1977031 - RNA, 19 nt, Artificial Sequence
  Description of Artificial Sequence: Synthetic oligonucleotide
  Antisense strand to SEQ ID NO: 1977030
accauuaggaaauuaugca

SEQ ID NO: 1977032 - RNA, 19 nt, Artificial Sequence
  Description of Artificial Sequence: Synthetic oligonucleotide
  Sense strand starting at position 850 of SEQ ID NO: 1880566
auaauuuccuaaugguuga

SEQ ID NO: 1977033 - RNA, 19 nt, Artificial Sequence
  Description of Artificial Sequence: Synthetic oligonucleotide
  Antisense strand to SEQ ID NO: 1977032
ucaaccauuaggaaauuau

SEQ ID NO: 1977034 - RNA, 19 nt, Artificial Sequence
  Description of Artificial Sequence: Synthetic oligonucleotide
  Sense strand starting at position 854 of SEQ ID NO: 1880566
uuuccuaaugguugaucau

SEQ ID NO: 1977035 - RNA, 19 nt, Artificial Sequence
  Description of Artificial Sequence: Synthetic oligonucleotide
  Antisense strand to SEQ ID NO: 1977034
augaucaaccauuaggaaa

SEQ ID NO: 1977036 - RNA, 19 nt, Artificial Sequence
  Description of Artificial Sequence: Synthetic oligonucleotide
  Sense strand starting at position 855 of SEQ ID NO: 1880566
uuccuaaugguugaucauu

SEQ ID NO: 1977037 - RNA, 19 nt, Artificial Sequence
  Description of Artificial Sequence: Synthetic oligonucleotide
  Antisense strand to SEQ ID NO: 1977036
aaugaucaaccauuaggaa

SEQ ID NO: 1977038 - RNA, 19 nt, Artificial Sequence
  Description of Artificial Sequence: Synthetic oligonucleotide
  Sense strand starting at position 864 of SEQ ID NO: 1880566
guugaucauuucuguauau

SEQ ID NO: 1977039 - RNA, 19 nt, Artificial Sequence
  Description of Artificial Sequence: Synthetic oligonucleotide
  Antisense strand to SEQ ID NO: 1977038
auauacagaaaugaucaac

SEQ ID NO: 1977040 - RNA, 19 nt, Artificial Sequence
  Description of Artificial Sequence: Synthetic oligonucleotide
  Sense strand starting at position 1199 of SEQ ID NO: 1880566
cggcuagccauaugccaaa

SEQ ID NO: 1977041 - RNA, 19 nt, Artificial Sequence
  Description of Artificial Sequence: Synthetic oligonucleotide
  Antisense strand to SEQ ID NO: 1977040
uuuggcauauggcuagccg

SEQ ID NO: 1977042 - RNA, 19 nt, Artificial Sequence
  Description of Artificial Sequence: Synthetic oligonucleotide
  Sense strand starting at position 3229 of SEQ ID NO: 1880566
ucagacuaacagugaaugu

SEQ ID NO: 1977043 - RNA, 19 nt, Artificial Sequence
  Description of Artificial Sequence: Synthetic oligonucleotide
  Antisense strand to SEQ ID NO: 1977042
acauucacuguuagucuga

SEQ ID NO: 1977044 - RNA, 19 nt, Artificial Sequence
  Description of Artificial Sequence: Synthetic oligonucleotide
  Sense strand starting at position 3239 of SEQ ID NO: 1880566
agugaaugucucggcagaa

SEQ ID NO: 1977045 - RNA, 19 nt, Artificial Sequence
  Description of Artificial Sequence: Synthetic oligonucleotide
  Antisense strand to SEQ ID NO: 1977044
uucugccgagacauucacu

SEQ ID NO: 1977046 - RNA, 19 nt, Artificial Sequence
  Description of Artificial Sequence: Synthetic oligonucleotide
  Sense strand starting at position 3240 of SEQ ID NO: 1880566
gugaaugucucggcagaaa

SEQ ID NO: 1977047 - RNA, 19 nt, Artificial Sequence
  Description of Artificial Sequence: Synthetic oligonucleotide
  Antisense strand to SEQ ID NO: 1977046
uuucugccgagacauucac

SEQ ID NO: 1977048 - RNA, 19 nt, Artificial Sequence
  Description of Artificial Sequence: Synthetic oligonucleotide
  Sense strand starting at position 108 of SEQ ID NO: 1880567
guauguugugaauaacuau

SEQ ID NO: 1977049 - RNA, 19 nt, Artificial Sequence
  Description of Artificial Sequence: Synthetic oligonucleotide
  Antisense strand to SEQ ID NO: 1977048
auaguuauucacaacauac

SEQ ID NO: 1977050 - RNA, 19 nt, Artificial Sequence
  Description of Artificial Sequence: Synthetic oligonucleotide
  Sense strand starting at position 334 of SEQ ID NO: 1880567
uguguuacuguauaagaaa

SEQ ID NO: 1977051 - RNA, 19 nt, Artificial Sequence
  Description of Artificial Sequence: Synthetic oligonucleotide
  Antisense strand to SEQ ID NO: 1977050
uuucuuauacaguaacaca

SEQ ID NO: 1977052 - RNA, 19 nt, Artificial Sequence
  Description of Artificial Sequence: Synthetic oligonucleotide
  Sense strand starting at position 501 of SEQ ID NO: 1880567
ccugauugcuaccuuagga

SEQ ID NO: 1977053 - RNA, 19 nt, Artificial Sequence
  Description of Artificial Sequence: Synthetic oligonucleotide
  Antisense strand to SEQ ID NO: 1977052
uccuaagguagcaaucagg

SEQ ID NO: 1977054 - RNA, 19 nt, Artificial Sequence
  Description of Artificial Sequence: Synthetic oligonucleotide
  Sense strand starting at position 532 of SEQ ID NO: 1880567
gcgaauagaugguucaaag

SEQ ID NO: 1977055 - RNA, 19 nt, Artificial Sequence
  Description of Artificial Sequence: Synthetic oligonucleotide
  Antisense strand to SEQ ID NO: 1977054
cuuugaaccaucuauucgc

SEQ ID NO: 1977056 - RNA, 19 nt, Artificial Sequence
  Description of Artificial Sequence: Synthetic oligonucleotide
  Sense strand starting at position 898 of SEQ ID NO: 1880567
auggauguccugugggaca

SEQ ID NO: 1977057 - RNA, 19 nt, Artificial Sequence
  Description of Artificial Sequence: Synthetic oligonucleotide
  Antisense strand to SEQ ID NO: 1977056
ugucccacaggacauccau

SEQ ID NO: 1977058 - RNA, 19 nt, Artificial Sequence
  Description of Artificial Sequence: Synthetic oligonucleotide
  Sense strand starting at position 960 of SEQ ID NO: 1880567
ccagucaugguuuaugaca

SEQ ID NO: 1977059 - RNA, 19 nt, Artificial Sequence
  Description of Artificial Sequence: Synthetic oligonucleotide
  Antisense strand to SEQ ID NO: 1977058
ugucauaaaccaugacugg

SEQ ID NO: 1977060 - RNA, 19 nt, Artificial Sequence
  Description of Artificial Sequence: Synthetic oligonucleotide
  Sense strand starting at position 1110 of SEQ ID NO: 1880567
cugugcuggaaauauaguu

SEQ ID NO: 1977061 - RNA, 19 nt, Artificial Sequence
  Description of Artificial Sequence: Synthetic oligonucleotide
  Antisense strand to SEQ ID NO: 1977060
aacuauauuuccagcacag

SEQ ID NO: 1977062 - RNA, 19 nt, Artificial Sequence
  Description of Artificial Sequence: Synthetic oligonucleotide
  Sense strand starting at position 1115 of SEQ ID NO: 1880567
cuggaaauauaguuguaga

SEQ ID NO: 1977063 - RNA, 19 nt, Artificial Sequence
  Description of Artificial Sequence: Synthetic oligonucleotide
  Antisense strand to SEQ ID NO: 1977062
ucuacaacuauauuuccag

SEQ ID NO: 1977064 - RNA, 19 nt, Artificial Sequence
  Description of Artificial Sequence: Synthetic oligonucleotide
  Sense strand starting at position 1116 of SEQ ID NO: 1880567
uggaaauauaguuguagac

SEQ ID NO: 1977065 - RNA, 19 nt, Artificial Sequence
  Description of Artificial Sequence: Synthetic oligonucleotide
  Antisense strand to SEQ ID NO: 1977064
gucuacaacuauauuucca

SEQ ID NO: 1977066 - RNA, 19 nt, Artificial Sequence
  Description of Artificial Sequence: Synthetic oligonucleotide
  Sense strand starting at position 1204 of SEQ ID NO: 1880567
aacgcaauaggauaguaau

SEQ ID NO: 1977067 - RNA, 19 nt, Artificial Sequence
  Description of Artificial Sequence: Synthetic oligonucleotide
  Antisense strand to SEQ ID NO: 1977066
auuacuauccuauugcguu

SEQ ID NO: 1977068 - RNA, 19 nt, Artificial Sequence
  Description of Artificial Sequence: Synthetic oligonucleotide
  Sense strand starting at position 1286 of SEQ ID NO: 1880567
agaauaagcuucuuauggu

SEQ ID NO: 1977069 - RNA, 19 nt, Artificial Sequence
  Description of Artificial Sequence: Synthetic oligonucleotide
  Antisense strand to SEQ ID NO: 1977068
accauaagaagcuuauucu

SEQ ID NO: 1977070 - RNA, 19 nt, Artificial Sequence
  Description of Artificial Sequence: Synthetic oligonucleotide
  Sense strand starting at position 1457 of SEQ ID NO: 1880567
gggaaaugaccuggcacuu

SEQ ID NO: 1977071 - RNA, 19 nt, Artificial Sequence
  Description of Artificial Sequence: Synthetic oligonucleotide
  Antisense strand to SEQ ID NO: 1977070
aagugccaggucauuuccc

SEQ ID NO: 1977072 - RNA, 19 nt, Artificial Sequence
  Description of Artificial Sequence: Synthetic oligonucleotide
  Sense strand starting at position 1487 of SEQ ID NO: 1880567
ccaccuguuccuuggagaa

SEQ ID NO: 1977073 - RNA, 19 nt, Artificial Sequence
  Description of Artificial Sequence: Synthetic oligonucleotide
  Antisense strand to SEQ ID NO: 1977072
uucuccaaggaacaggugg

SEQ ID NO: 1977074 - RNA, 19 nt, Artificial Sequence
  Description of Artificial Sequence: Synthetic oligonucleotide
  Sense strand starting at position 1565 of SEQ ID NO: 1880567
acgaguaagugaccacaga

SEQ ID NO: 1977075 - RNA, 19 nt, Artificial Sequence
  Description of Artificial Sequence: Synthetic oligonucleotide
  Antisense strand to SEQ ID NO: 1977074
ucuguggucacuuacucgu

SEQ ID NO: 1977076 - RNA, 19 nt, Artificial Sequence
  Description of Artificial Sequence: Synthetic oligonucleotide
  Sense strand starting at position 1581 of SEQ ID NO: 1880567
agaguaaacuaucuagagu

SEQ ID NO: 1977077 - RNA, 19 nt, Artificial Sequence
  Description of Artificial Sequence: Synthetic oligonucleotide
  Antisense strand to SEQ ID NO: 1977076
acucuagauaguuuacucu

SEQ ID NO: 1977078 - RNA, 19 nt, Artificial Sequence
  Description of Artificial Sequence: Synthetic oligonucleotide
  Sense strand starting at position 1584 of SEQ ID NO: 1880567
guaaacuaucuagaguucu

SEQ ID NO: 1977079 - RNA, 19 nt, Artificial Sequence
  Description of Artificial Sequence: Synthetic oligonucleotide
  Antisense strand to SEQ ID NO: 1977078
agaacucuagauaguuuac

SEQ ID NO: 1977080 - RNA, 19 nt, Artificial Sequence
  Description of Artificial Sequence: Synthetic oligonucleotide
  Sense strand starting at position 1655 of SEQ ID NO: 1880567
ugaaguucuuccuccaaga

SEQ ID NO: 1977081 - RNA, 19 nt, Artificial Sequence
  Description of Artificial Sequence: Synthetic oligonucleotide
  Antisense strand to SEQ ID NO: 1977080
ucuuggaggaagaacuuca

SEQ ID NO: 1977082 - RNA, 19 nt, Artificial Sequence
  Description of Artificial Sequence: Synthetic oligonucleotide
  Sense strand starting at position 1682 of SEQ ID NO: 1880567
guuagaucucuugacugau

SEQ ID NO: 1977083 - RNA, 19 nt, Artificial Sequence
  Description of Artificial Sequence: Synthetic oligonucleotide
  Antisense strand to SEQ ID NO: 1977082
aucagucaagagaucuaac

SEQ ID NO: 1977084 - RNA, 19 nt, Artificial Sequence
  Description of Artificial Sequence: Synthetic oligonucleotide
  Sense strand starting at position 1685 of SEQ ID NO: 1880567
agaucucuugacugauucu

SEQ ID NO: 1977085 - RNA, 19 nt, Artificial Sequence
  Description of Artificial Sequence: Synthetic oligonucleotide
  Antisense strand to SEQ ID NO: 1977084
agaaucagucaagagaucu

SEQ ID NO: 1977086 - RNA, 19 nt, Artificial Sequence
  Description of Artificial Sequence: Synthetic oligonucleotide
  Sense strand starting at position 2139 of SEQ ID NO: 1880567
auuguaucccuacggaaac

SEQ ID NO: 1977087 - RNA, 19 nt, Artificial Sequence
  Description of Artificial Sequence: Synthetic oligonucleotide
  Antisense strand to SEQ ID NO: 1977086
guuuccguagggauacaau

SEQ ID NO: 1977088 - RNA, 19 nt, Artificial Sequence
  Description of Artificial Sequence: Synthetic oligonucleotide
  Sense strand starting at position 2222 of SEQ ID NO: 1880567
cccaaugacucuccuguga

SEQ ID NO: 1977089 - RNA, 19 nt, Artificial Sequence
  Description of Artificial Sequence: Synthetic oligonucleotide
  Antisense strand to SEQ ID NO: 1977088
ucacaggagagucauuggg

SEQ ID NO: 1977090 - RNA, 19 nt, Artificial Sequence
  Description of Artificial Sequence: Synthetic oligonucleotide
  Sense strand starting at position 2340 of SEQ ID NO: 1880567
aggagcaacucucuacuga

SEQ ID NO: 1977091 - RNA, 19 nt, Artificial Sequence
  Description of Artificial Sequence: Synthetic oligonucleotide
  Antisense strand to SEQ ID NO: 1977090
ucaguagagaguugcuccu

SEQ ID NO: 1977092 - RNA, 19 nt, Artificial Sequence
  Description of Artificial Sequence: Synthetic oligonucleotide
  Sense strand starting at position 2557 of SEQ ID NO: 1880567
ggacuugauaccugcagga

SEQ ID NO: 1977093 - RNA, 19 nt, Artificial Sequence
  Description of Artificial Sequence: Synthetic oligonucleotide
  Antisense strand to SEQ ID NO: 1977092
uccugcagguaucaagucc

SEQ ID NO: 1977094 - RNA, 19 nt, Artificial Sequence
  Description of Artificial Sequence: Synthetic oligonucleotide
  Sense strand starting at position 2601 of SEQ ID NO: 1880567
cugagaguagguggagaau

SEQ ID NO: 1977095 - RNA, 19 nt, Artificial Sequence
  Description of Artificial Sequence: Synthetic oligonucleotide
  Antisense strand to SEQ ID NO: 1977094
auucuccaccuacucucag

SEQ ID NO: 1977096 - RNA, 19 nt, Artificial Sequence
  Description of Artificial Sequence: Synthetic oligonucleotide
  Sense strand starting at position 2614 of SEQ ID NO: 1880567
gagaauauggaguguaucu

SEQ ID NO: 1977097 - RNA, 19 nt, Artificial Sequence
  Description of Artificial Sequence: Synthetic oligonucleotide
  Antisense strand to SEQ ID NO: 1977096
agauacacuccauauucuc

SEQ ID NO: 1977098 - RNA, 19 nt, Artificial Sequence
  Description of Artificial Sequence: Synthetic oligonucleotide
  Sense strand starting at position 2841 of SEQ ID NO: 1880567
agugaugacacugguucua

SEQ ID NO: 1977099 - RNA, 19 nt, Artificial Sequence
  Description of Artificial Sequence: Synthetic oligonucleotide
  Antisense strand to SEQ ID NO: 1977098
uagaaccagugucaucacu

SEQ ID NO: 1977100 - RNA, 19 nt, Artificial Sequence
  Description of Artificial Sequence: Synthetic oligonucleotide
  Sense strand starting at position 2884 of SEQ ID NO: 1880567
ugguaagcagccuaggaua

SEQ ID NO: 1977101 - RNA, 19 nt, Artificial Sequence
  Description of Artificial Sequence: Synthetic oligonucleotide
  Antisense strand to SEQ ID NO: 1977100
uauccuaggcugcuuacca

SEQ ID NO: 1977102 - RNA, 19 nt, Artificial Sequence
  Description of Artificial Sequence: Synthetic oligonucleotide
  Sense strand starting at position 2889 of SEQ ID NO: 1880567
agcagccuaggauaaauua

SEQ ID NO: 1977103 - RNA, 19 nt, Artificial Sequence
  Description of Artificial Sequence: Synthetic oligonucleotide
  Antisense strand to SEQ ID NO: 1977102
uaauuuauccuaggcugcu

SEQ ID NO: 1977104 - RNA, 19 nt, Artificial Sequence
  Description of Artificial Sequence: Synthetic oligonucleotide
  Sense strand starting at position 3054 of SEQ ID NO: 1880567
cuuaaacaugguugucaac

SEQ ID NO: 1977105 - RNA, 19 nt, Artificial Sequence
  Description of Artificial Sequence: Synthetic oligonucleotide
  Antisense strand to SEQ ID NO: 1977104
guugacaaccauguuuaag

SEQ ID NO: 1977106 - RNA, 19 nt, Artificial Sequence
  Description of Artificial Sequence: Synthetic oligonucleotide
  Sense strand starting at position 3148 of SEQ ID NO: 1880567
accuaaauguaggcaaaga

SEQ ID NO: 1977107 - RNA, 19 nt, Artificial Sequence
  Description of Artificial Sequence: Synthetic oligonucleotide
  Antisense strand to SEQ ID NO: 1977106
ucuuugccuacauuuaggu

SEQ ID NO: 1977108 - RNA, 19 nt, Artificial Sequence
  Description of Artificial Sequence: Synthetic oligonucleotide
  Sense strand starting at position 3200 of SEQ ID NO: 1880567
ucccgauggcuugaucaua

SEQ ID NO: 1977109 - RNA, 19 nt, Artificial Sequence
  Description of Artificial Sequence: Synthetic oligonucleotide
  Antisense strand to SEQ ID NO: 1977108
uaugaucaagccaucggga

SEQ ID NO: 1977110 - RNA, 19 nt, Artificial Sequence
  Description of Artificial Sequence: Synthetic oligonucleotide
  Sense strand starting at position 3312 of SEQ ID NO: 1880567
agcauuguucuggaacuac

SEQ ID NO: 1977111 - RNA, 19 nt, Artificial Sequence
  Description of Artificial Sequence: Synthetic oligonucleotide
  Antisense strand to SEQ ID NO: 1977110
guaguuccagaacaaugcu

SEQ ID NO: 1977112 - RNA, 19 nt, Artificial Sequence
  Description of Artificial Sequence: Synthetic oligonucleotide
  Sense strand starting at position 3379 of SEQ ID NO: 1880567
gucuuauauagagggcaau

SEQ ID NO: 1977113 - RNA, 19 nt, Artificial Sequence
  Description of Artificial Sequence: Synthetic oligonucleotide
  Antisense strand to SEQ ID NO: 1977112
auugcccucuauauaagac

SEQ ID NO: 1977114 - RNA, 19 nt, Artificial Sequence
  Description of Artificial Sequence: Synthetic oligonucleotide
  Sense strand starting at position 3513 of SEQ ID NO: 1880567
uacaguuagcaagaaaguu

SEQ ID NO: 1977115 - RNA, 19 nt, Artificial Sequence
  Description of Artificial Sequence: Synthetic oligonucleotide
  Antisense strand to SEQ ID NO: 1977114
aacuuucuugcuaacugua

SEQ ID NO: 1977116 - RNA, 19 nt, Artificial Sequence
  Description of Artificial Sequence: Synthetic oligonucleotide
  Sense strand starting at position 3578 of SEQ ID NO: 1880567
caugguaggaacugucaga

SEQ ID NO: 1977117 - RNA, 19 nt, Artificial Sequence
  Description of Artificial Sequence: Synthetic oligonucleotide
  Antisense strand to SEQ ID NO: 1977116
ucugacaguuccuaccaug

SEQ ID NO: 1977118 - RNA, 19 nt, Artificial Sequence
  Description of Artificial Sequence: Synthetic oligonucleotide
  Sense strand starting at position 3636 of SEQ ID NO: 1880567
ucccuuccugaauagaugu

SEQ ID NO: 1977119 - RNA, 19 nt, Artificial Sequence
  Description of Artificial Sequence: Synthetic oligonucleotide
  Antisense strand to SEQ ID NO: 1977118
acaucuauucaggaaggga

SEQ ID NO: 1977120 - RNA, 19 nt, Artificial Sequence
  Description of Artificial Sequence: Synthetic oligonucleotide
  Sense strand starting at position 3659 of SEQ ID NO: 1880567
cagggaacgugacuuuaaa

SEQ ID NO: 1977121 - RNA, 19 nt, Artificial Sequence
  Description of Artificial Sequence: Synthetic oligonucleotide
  Antisense strand to SEQ ID NO: 1977120
uuuaaagucacguucccug

SEQ ID NO: 1977122 - RNA, 19 nt, Artificial Sequence
  Description of Artificial Sequence: Synthetic oligonucleotide
  Sense strand starting at position 3666 of SEQ ID NO: 1880567
cgugacuuuaaaggaggua

SEQ ID NO: 1977123 - RNA, 19 nt, Artificial Sequence
  Description of Artificial Sequence: Synthetic oligonucleotide
  Antisense strand to SEQ ID NO: 1977122
uaccuccuuuaaagucacg

SEQ ID NO: 1977124 - RNA, 19 nt, Artificial Sequence
  Description of Artificial Sequence: Synthetic oligonucleotide
  Sense strand starting at position 3787 of SEQ ID NO: 1880567
uggccuuuccaauaucaag

SEQ ID NO: 1977125 - RNA, 19 nt, Artificial Sequence
  Description of Artificial Sequence: Synthetic oligonucleotide
  Antisense strand to SEQ ID NO: 1977124
cuugauauuggaaaggcca

SEQ ID NO: 1977126 - RNA, 19 nt, Artificial Sequence
  Description of Artificial Sequence: Synthetic oligonucleotide
  Sense strand starting at position 3859 of SEQ ID NO: 1880567
gaagaauuaugagugcauu

SEQ ID NO: 1977127 - RNA, 19 nt, Artificial Sequence
  Description of Artificial Sequence: Synthetic oligonucleotide
  Antisense strand to SEQ ID NO: 1977126
aaugcacucauaauucuuc

SEQ ID NO: 1977128 - RNA, 19 nt, Artificial Sequence
  Description of Artificial Sequence: Synthetic oligonucleotide
  Sense strand starting at position 100 of SEQ ID NO: 1880568
auguuaugugaacaucucu

SEQ ID NO: 1977129 - RNA, 19 nt, Artificial Sequence
  Description of Artificial Sequence: Synthetic oligonucleotide
  Antisense strand to SEQ ID NO: 1977128
agagauguucacauaacau

SEQ ID NO: 1977130 - RNA, 19 nt, Artificial Sequence
  Description of Artificial Sequence: Synthetic oligonucleotide
  Sense strand starting at position 105 of SEQ ID NO: 1880568
augugaacaucucugugga

SEQ ID NO: 1977131 - RNA, 19 nt, Artificial Sequence
  Description of Artificial Sequence: Synthetic oligonucleotide
  Antisense strand to SEQ ID NO: 1977130
uccacagagauguucacau

SEQ ID NO: 1977132 - RNA, 19 nt, Artificial Sequence
  Description of Artificial Sequence: Synthetic oligonucleotide
  Sense strand starting at position 107 of SEQ ID NO: 1880568
gugaacaucucuguggaca

SEQ ID NO: 1977133 - RNA, 19 nt, Artificial Sequence
  Description of Artificial Sequence: Synthetic oligonucleotide
  Antisense strand to SEQ ID NO: 1977132
uguccacagagauguucac

SEQ ID NO: 1977134 - RNA, 19 nt, Artificial Sequence
  Description of Artificial Sequence: Synthetic oligonucleotide
  Sense strand starting at position 249 of SEQ ID NO: 1880568
acaugagaaugucuguuua

SEQ ID NO: 1977135 - RNA, 19 nt, Artificial Sequence
  Description of Artificial Sequence: Synthetic oligonucleotide
  Antisense strand to SEQ ID NO: 1977134
uaaacagacauucucaugu

SEQ ID NO: 1977136 - RNA, 19 nt, Artificial Sequence
  Description of Artificial Sequence: Synthetic oligonucleotide
  Sense strand starting at position 251 of SEQ ID NO: 1880568
augagaaugucuguuuauc

SEQ ID NO: 1977137 - RNA, 19 nt, Artificial Sequence
  Description of Artificial Sequence: Synthetic oligonucleotide
  Antisense strand to SEQ ID NO: 1977136
gauaaacagacauucucau

SEQ ID NO: 1977138 - RNA, 19 nt, Artificial Sequence
  Description of Artificial Sequence: Synthetic oligonucleotide
  Sense strand starting at position 253 of SEQ ID NO: 1880568
gagaaugucuguuuauccu

SEQ ID NO: 1977139 - RNA, 19 nt, Artificial Sequence
  Description of Artificial Sequence: Synthetic oligonucleotide
  Antisense strand to SEQ ID NO: 1977138
aggauaaacagacauucuc

SEQ ID NO: 1977140 - RNA, 19 nt, Artificial Sequence
  Description of Artificial Sequence: Synthetic oligonucleotide
  Sense strand starting at position 411 of SEQ ID NO: 1880568
ugcuuuauaguguacuuau

SEQ ID NO: 1977141 - RNA, 19 nt, Artificial Sequence
  Description of Artificial Sequence: Synthetic oligonucleotide
  Antisense strand to SEQ ID NO: 1977140
auaaguacacuauaaagca

SEQ ID NO: 1977142 - RNA, 19 nt, Artificial Sequence
  Description of Artificial Sequence: Synthetic oligonucleotide
  Sense strand starting at position 420 of SEQ ID NO: 1880568
guguacuuauuccuauaca

SEQ ID NO: 1977143 - RNA, 19 nt, Artificial Sequence
  Description of Artificial Sequence: Synthetic oligonucleotide
  Antisense strand to SEQ ID NO: 1977142
uguauaggaauaaguacac

SEQ ID NO: 1977144 - RNA, 19 nt, Artificial Sequence
  Description of Artificial Sequence: Synthetic oligonucleotide
  Sense strand starting at position 486 of SEQ ID NO: 1880568
aaagaaagguguuuaugua

SEQ ID NO: 1977145 - RNA, 19 nt, Artificial Sequence
  Description of Artificial Sequence: Synthetic oligonucleotide
  Antisense strand to SEQ ID NO: 1977144
uacauaaacaccuuucuuu

SEQ ID NO: 1977146 - RNA, 19 nt, Artificial Sequence
  Description of Artificial Sequence: Synthetic oligonucleotide
  Sense strand starting at position 542 of SEQ ID NO: 1880568
ggaucuuucuaagcuaaac

SEQ ID NO: 1977147 - RNA, 19 nt, Artificial Sequence
  Description of Artificial Sequence: Synthetic oligonucleotide
  Antisense strand to SEQ ID NO: 1977146
guuuagcuuagaaagaucc

SEQ ID NO: 1977148 - RNA, 19 nt, Artificial Sequence
  Description of Artificial Sequence: Synthetic oligonucleotide
  Sense strand starting at position 1197 of SEQ ID NO: 1880568
ugcauuuagugcuuuaaua

SEQ ID NO: 1977149 - RNA, 19 nt, Artificial Sequence
  Description of Artificial Sequence: Synthetic oligonucleotide
  Antisense strand to SEQ ID NO: 1977148
uauuaaagcacuaaaugca

SEQ ID NO: 1977150 - RNA, 19 nt, Artificial Sequence
  Description of Artificial Sequence: Synthetic oligonucleotide
  Sense strand starting at position 1271 of SEQ ID NO: 1880568
cagcuugucccugcaaguu

SEQ ID NO: 1977151 - RNA, 19 nt, Artificial Sequence
  Description of Artificial Sequence: Synthetic oligonucleotide
  Antisense strand to SEQ ID NO: 1977150
aacuugcagggacaagcug

SEQ ID NO: 1977152 - RNA, 19 nt, Artificial Sequence
  Description of Artificial Sequence: Synthetic oligonucleotide
  Sense strand starting at position 1280 of SEQ ID NO: 1880568
ccugcaaguuuauugaaua

SEQ ID NO: 1977153 - RNA, 19 nt, Artificial Sequence
  Description of Artificial Sequence: Synthetic oligonucleotide
  Antisense strand to SEQ ID NO: 1977152
uauucaauaaacuugcagg

SEQ ID NO: 1977154 - RNA, 19 nt, Artificial Sequence
  Description of Artificial Sequence: Synthetic oligonucleotide
  Sense strand starting at position 1435 of SEQ ID NO: 1880568
acagucuuauaucuaguau

SEQ ID NO: 1977155 - RNA, 19 nt, Artificial Sequence
  Description of Artificial Sequence: Synthetic oligonucleotide
  Antisense strand to SEQ ID NO: 1977154
auacuagauauaagacugu

SEQ ID NO: 1977156 - RNA, 19 nt, Artificial Sequence
  Description of Artificial Sequence: Synthetic oligonucleotide
  Sense strand starting at position 1702 of SEQ ID NO: 1880568
ugaggcuguuccuuauuga

SEQ ID NO: 1977157 - RNA, 19 nt, Artificial Sequence
  Description of Artificial Sequence: Synthetic oligonucleotide
  Antisense strand to SEQ ID NO: 1977156
ucaauaaggaacagccuca

SEQ ID NO: 1977158 - RNA, 19 nt, Artificial Sequence
  Description of Artificial Sequence: Synthetic oligonucleotide
  Sense strand starting at position 1703 of SEQ ID NO: 1880568
gaggcuguuccuuauugau

SEQ ID NO: 1977159 - RNA, 19 nt, Artificial Sequence
  Description of Artificial Sequence: Synthetic oligonucleotide
  Antisense strand to SEQ ID NO: 1977158
aucaauaaggaacagccuc

SEQ ID NO: 1977160 - RNA, 19 nt, Artificial Sequence
  Description of Artificial Sequence: Synthetic oligonucleotide
  Sense strand starting at position 1705 of SEQ ID NO: 1880568
ggcuguuccuuauugauac

SEQ ID NO: 1977161 - RNA, 19 nt, Artificial Sequence
  Description of Artificial Sequence: Synthetic oligonucleotide
  Antisense strand to SEQ ID NO: 1977160
guaucaauaaggaacagcc

SEQ ID NO: 1977162 - RNA, 19 nt, Artificial Sequence
  Description of Artificial Sequence: Synthetic oligonucleotide
  Sense strand starting at position 1764 of SEQ ID NO: 1880568
aaugguuagcuuugguuaa

SEQ ID NO: 1977163 - RNA, 19 nt, Artificial Sequence
  Description of Artificial Sequence: Synthetic oligonucleotide
  Antisense strand to SEQ ID NO: 1977162
uuaaccaaagcuaaccauu

SEQ ID NO: 1977164 - RNA, 19 nt, Artificial Sequence
  Description of Artificial Sequence: Synthetic oligonucleotide
  Sense strand starting at position 1831 of SEQ ID NO: 1880568
gaaacuucuuagguaguuu

SEQ ID NO: 1977165 - RNA, 19 nt, Artificial Sequence
  Description of Artificial Sequence: Synthetic oligonucleotide
  Antisense strand to SEQ ID NO: 1977164
aaacuaccuaagaaguuuc

SEQ ID NO: 1977166 - RNA, 19 nt, Artificial Sequence
  Description of Artificial Sequence: Synthetic oligonucleotide
  Sense strand starting at position 1886 of SEQ ID NO: 1880568
uuugguaaaugucuuugaa

SEQ ID NO: 1977167 - RNA, 19 nt, Artificial Sequence
  Description of Artificial Sequence: Synthetic oligonucleotide
  Antisense strand to SEQ ID NO: 1977166
uucaaagacauuuaccaaa

SEQ ID NO: 1977168 - RNA, 19 nt, Artificial Sequence
  Description of Artificial Sequence: Synthetic oligonucleotide
  Sense strand starting at position 2101 of SEQ ID NO: 1880568
augcaaacagucuggagau

SEQ ID NO: 1977169 - RNA, 19 nt, Artificial Sequence
  Description of Artificial Sequence: Synthetic oligonucleotide
  Antisense strand to SEQ ID NO: 1977168
aucuccagacuguuugcau

SEQ ID NO: 1977170 - RNA, 19 nt, Artificial Sequence
  Description of Artificial Sequence: Synthetic oligonucleotide
  Sense strand starting at position 2552 of SEQ ID NO: 1880568
ggaguuggauugaggaguu

SEQ ID NO: 1977171 - RNA, 19 nt, Artificial Sequence
  Description of Artificial Sequence: Synthetic oligonucleotide
  Antisense strand to SEQ ID NO: 1977170
aacuccucaauccaacucc

SEQ ID NO: 1977172 - RNA, 19 nt, Artificial Sequence
  Description of Artificial Sequence: Synthetic oligonucleotide
  Sense strand starting at position 2750 of SEQ ID NO: 1880568
uuggaaauccuacgcugaa

SEQ ID NO: 1977173 - RNA, 19 nt, Artificial Sequence
  Description of Artificial Sequence: Synthetic oligonucleotide
  Antisense strand to SEQ ID NO: 1977172
uucagcguaggauuuccaa

SEQ ID NO: 1977174 - RNA, 19 nt, Artificial Sequence
  Description of Artificial Sequence: Synthetic oligonucleotide
  Sense strand starting at position 2751 of SEQ ID NO: 1880568
uggaaauccuacgcugaau

SEQ ID NO: 1977175 - RNA, 19 nt, Artificial Sequence
  Description of Artificial Sequence: Synthetic oligonucleotide
  Antisense strand to SEQ ID NO: 1977174
auucagcguaggauuucca

SEQ ID NO: 1977176 - RNA, 19 nt, Artificial Sequence
  Description of Artificial Sequence: Synthetic oligonucleotide
  Sense strand starting at position 2778 of SEQ ID NO: 1880568
auuuauaaaugaugggaca

SEQ ID NO: 1977177 - RNA, 19 nt, Artificial Sequence
  Description of Artificial Sequence: Synthetic oligonucleotide
  Antisense strand to SEQ ID NO: 1977176
ugucccaucauuuauaaau

SEQ ID NO: 1977178 - RNA, 19 nt, Artificial Sequence
  Description of Artificial Sequence: Synthetic oligonucleotide
  Sense strand starting at position 2881 of SEQ ID NO: 1880568
acacaaguucuguaguuua

SEQ ID NO: 1977179 - RNA, 19 nt, Artificial Sequence
  Description of Artificial Sequence: Synthetic oligonucleotide
  Antisense strand to SEQ ID NO: 1977178
uaaacuacagaacuugugu

SEQ ID NO: 1977180 - RNA, 19 nt, Artificial Sequence
  Description of Artificial Sequence: Synthetic oligonucleotide
  Sense strand starting at position 2886 of SEQ ID NO: 1880568
aguucuguaguuuauuagu

SEQ ID NO: 1977181 - RNA, 19 nt, Artificial Sequence
  Description of Artificial Sequence: Synthetic oligonucleotide
  Antisense strand to SEQ ID NO: 1977180
acuaauaaacuacagaacu

SEQ ID NO: 1977182 - RNA, 19 nt, Artificial Sequence
  Description of Artificial Sequence: Synthetic oligonucleotide
  Sense strand starting at position 2926 of SEQ ID NO: 1880568
cuguaucucuaucuacaga

SEQ ID NO: 1977183 - RNA, 19 nt, Artificial Sequence
  Description of Artificial Sequence: Synthetic oligonucleotide
  Antisense strand to SEQ ID NO: 1977182
ucuguagauagagauacag

SEQ ID NO: 1977184 - RNA, 19 nt, Artificial Sequence
  Description of Artificial Sequence: Synthetic oligonucleotide
  Sense strand starting at position 3152 of SEQ ID NO: 1880568
aauuauugguuuguguaga

SEQ ID NO: 1977185 - RNA, 19 nt, Artificial Sequence
  Description of Artificial Sequence: Synthetic oligonucleotide
  Antisense strand to SEQ ID NO: 1977184
ucuacacaaaccaauaauu

SEQ ID NO: 1977186 - RNA, 19 nt, Artificial Sequence
  Description of Artificial Sequence: Synthetic oligonucleotide
  Sense strand starting at position 3157 of SEQ ID NO: 1880568
uugguuuguguagaaauac

SEQ ID NO: 1977187 - RNA, 19 nt, Artificial Sequence
  Description of Artificial Sequence: Synthetic oligonucleotide
  Antisense strand to SEQ ID NO: 1977186
guauuucuacacaaaccaa

SEQ ID NO: 1977188 - RNA, 19 nt, Artificial Sequence
  Description of Artificial Sequence: Synthetic oligonucleotide
  Sense strand starting at position 3225 of SEQ ID NO: 1880568
ucauguaaacauggcuuaa

SEQ ID NO: 1977189 - RNA, 19 nt, Artificial Sequence
  Description of Artificial Sequence: Synthetic oligonucleotide
  Antisense strand to SEQ ID NO: 1977188
uuaagccauguuuacauga

SEQ ID NO: 1977190 - RNA, 19 nt, Artificial Sequence
  Description of Artificial Sequence: Synthetic oligonucleotide
  Sense strand starting at position 3227 of SEQ ID NO: 1880568
auguaaacauggcuuaaga

SEQ ID NO: 1977191 - RNA, 19 nt, Artificial Sequence
  Description of Artificial Sequence: Synthetic oligonucleotide
  Antisense strand to SEQ ID NO: 1977190
ucuuaagccauguuuacau

SEQ ID NO: 1977192 - RNA, 19 nt, Artificial Sequence
  Description of Artificial Sequence: Synthetic oligonucleotide
  Sense strand starting at position 3275 of SEQ ID NO: 1880568
uauaaaugccugcagagua

SEQ ID NO: 1977193 - RNA, 19 nt, Artificial Sequence
  Description of Artificial Sequence: Synthetic oligonucleotide
  Antisense strand to SEQ ID NO: 1977192
uacucugcaggcauuuaua

SEQ ID NO: 1977194 - RNA, 19 nt, Artificial Sequence
  Description of Artificial Sequence: Synthetic oligonucleotide
  Sense strand starting at position 3348 of SEQ ID NO: 1880568
uuauuaguacgauaggauu

SEQ ID NO: 1977195 - RNA, 19 nt, Artificial Sequence
  Description of Artificial Sequence: Synthetic oligonucleotide
  Antisense strand to SEQ ID NO: 1977194
aauccuaucguacuaauaa

SEQ ID NO: 1977196 - RNA, 19 nt, Artificial Sequence
  Description of Artificial Sequence: Synthetic oligonucleotide
  Sense strand starting at position 3440 of SEQ ID NO: 1880568
uuuccauauuugcagaaga

SEQ ID NO: 1977197 - RNA, 19 nt, Artificial Sequence
  Description of Artificial Sequence: Synthetic oligonucleotide
  Antisense strand to SEQ ID NO: 1977196
ucuucugcaaauauggaaa

SEQ ID NO: 1977198 - RNA, 19 nt, Artificial Sequence
  Description of Artificial Sequence: Synthetic oligonucleotide
  Sense strand starting at position 3453 of SEQ ID NO: 1880568
agaagauauugcuuguauu

SEQ ID NO: 1977199 - RNA, 19 nt, Artificial Sequence
  Description of Artificial Sequence: Synthetic oligonucleotide
  Antisense strand to SEQ ID NO: 1977198
aauacaagcaauaucuucu

SEQ ID NO: 1977200 - RNA, 19 nt, Artificial Sequence
  Description of Artificial Sequence: Synthetic oligonucleotide
  Sense strand starting at position 3520 of SEQ ID NO: 1880568
auuaucauuguagaaagca

SEQ ID NO: 1977201 - RNA, 19 nt, Artificial Sequence
  Description of Artificial Sequence: Synthetic oligonucleotide
  Antisense strand to SEQ ID NO: 1977200
ugcuuucuacaaugauaau

SEQ ID NO: 1977202 - RNA, 19 nt, Artificial Sequence
  Description of Artificial Sequence: Synthetic oligonucleotide
  Sense strand starting at position 3933 of SEQ ID NO: 1880568
guaaaugcucaaugagucu

SEQ ID NO: 1977203 - RNA, 19 nt, Artificial Sequence
  Description of Artificial Sequence: Synthetic oligonucleotide
  Antisense strand to SEQ ID NO: 1977202
agacucauugagcauuuac

SEQ ID NO: 1977204 - RNA, 19 nt, Artificial Sequence
  Description of Artificial Sequence: Synthetic oligonucleotide
  Sense strand starting at position 3939 of SEQ ID NO: 1880568
gcucaaugagucugcauaa

SEQ ID NO: 1977205 - RNA, 19 nt, Artificial Sequence
  Description of Artificial Sequence: Synthetic oligonucleotide
  Antisense strand to SEQ ID NO: 1977204
uuaugcagacucauugagc

SEQ ID NO: 1977206 - RNA, 19 nt, Artificial Sequence
  Description of Artificial Sequence: Synthetic oligonucleotide
  Sense strand starting at position 3940 of SEQ ID NO: 1880568
cucaaugagucugcauaau

SEQ ID NO: 1977207 - RNA, 19 nt, Artificial Sequence
  Description of Artificial Sequence: Synthetic oligonucleotide
  Antisense strand to SEQ ID NO: 1977206
auuaugcagacucauugag

SEQ ID NO: 1977208 - RNA, 19 nt, Artificial Sequence
  Description of Artificial Sequence: Synthetic oligonucleotide
  Sense strand starting at position 96 of SEQ ID NO: 1880569
agggaucucuuacugguuu

SEQ ID NO: 1977209 - RNA, 19 nt, Artificial Sequence
  Description of Artificial Sequence: Synthetic oligonucleotide
  Antisense strand to SEQ ID NO: 1977208
aaaccaguaagagaucccu

SEQ ID NO: 1977210 - RNA, 19 nt, Artificial Sequence
  Description of Artificial Sequence: Synthetic oligonucleotide
  Sense strand starting at position 272 of SEQ ID NO: 1880569
uggauuagauuugaacaua

SEQ ID NO: 1977211 - RNA, 19 nt, Artificial Sequence
  Description of Artificial Sequence: Synthetic oligonucleotide
  Antisense strand to SEQ ID NO: 1977210
uauguucaaaucuaaucca

SEQ ID NO: 1977212 - RNA, 19 nt, Artificial Sequence
  Description of Artificial Sequence: Synthetic oligonucleotide
  Sense strand starting at position 325 of SEQ ID NO: 1880569
gcaauaguccuagaaauac

SEQ ID NO: 1977213 - RNA, 19 nt, Artificial Sequence
  Description of Artificial Sequence: Synthetic oligonucleotide
  Antisense strand to SEQ ID NO: 1977212
guauuucuaggacuauugc

SEQ ID NO: 1977214 - RNA, 19 nt, Artificial Sequence
  Description of Artificial Sequence: Synthetic oligonucleotide
  Sense strand starting at position 528 of SEQ ID NO: 1880569
gucauuuguuacucagcca

SEQ ID NO: 1977215 - RNA, 19 nt, Artificial Sequence
  Description of Artificial Sequence: Synthetic oligonucleotide
  Antisense strand to SEQ ID NO: 1977214
uggcugaguaacaaaugac

SEQ ID NO: 1977216 - RNA, 19 nt, Artificial Sequence
  Description of Artificial Sequence: Synthetic oligonucleotide
  Sense strand starting at position 531 of SEQ ID NO: 1880569
auuuguuacucagccaagu

SEQ ID NO: 1977217 - RNA, 19 nt, Artificial Sequence
  Description of Artificial Sequence: Synthetic oligonucleotide
  Antisense strand to SEQ ID NO: 1977216
acuuggcugaguaacaaau

SEQ ID NO: 1977218 - RNA, 19 nt, Artificial Sequence
  Description of Artificial Sequence: Synthetic oligonucleotide
  Sense strand starting at position 551 of SEQ ID NO: 1880569
acuagaaaugcaugacuua

SEQ ID NO: 1977219 - RNA, 19 nt, Artificial Sequence
  Description of Artificial Sequence: Synthetic oligonucleotide
  Antisense strand to SEQ ID NO: 1977218
uaagucaugcauuucuagu

SEQ ID NO: 1977220 - RNA, 19 nt, Artificial Sequence
  Description of Artificial Sequence: Synthetic oligonucleotide
  Sense strand starting at position 765 of SEQ ID NO: 1880569
gcagcugcugccuuagaca

SEQ ID NO: 1977221 - RNA, 19 nt, Artificial Sequence
  Description of Artificial Sequence: Synthetic oligonucleotide
  Antisense strand to SEQ ID NO: 1977220
ugucuaaggcagcagcugc

SEQ ID NO: 1977222 - RNA, 19 nt, Artificial Sequence
  Description of Artificial Sequence: Synthetic oligonucleotide
  Sense strand starting at position 888 of SEQ ID NO: 1880569
agucaucaccaaugagacu

SEQ ID NO: 1977223 - RNA, 19 nt, Artificial Sequence
  Description of Artificial Sequence: Synthetic oligonucleotide
  Antisense strand to SEQ ID NO: 1977222
agucucauuggugaugacu

SEQ ID NO: 1977224 - RNA, 19 nt, Artificial Sequence
  Description of Artificial Sequence: Synthetic oligonucleotide
  Sense strand starting at position 951 of SEQ ID NO: 1880569
ccauuaaauugggaauuua

SEQ ID NO: 1977225 - RNA, 19 nt, Artificial Sequence
  Description of Artificial Sequence: Synthetic oligonucleotide
  Antisense strand to SEQ ID NO: 1977224
uaaauucccaauuuaaugg

SEQ ID NO: 1977226 - RNA, 19 nt, Artificial Sequence
  Description of Artificial Sequence: Synthetic oligonucleotide
  Sense strand starting at position 980 of SEQ ID NO: 1880569
acaucaggguuucuaugaa

SEQ ID NO: 1977227 - RNA, 19 nt, Artificial Sequence
  Description of Artificial Sequence: Synthetic oligonucleotide
  Antisense strand to SEQ ID NO: 1977226
uucauagaaacccugaugu

SEQ ID NO: 1977228 - RNA, 19 nt, Artificial Sequence
  Description of Artificial Sequence: Synthetic oligonucleotide
  Sense strand starting at position 1002 of SEQ ID NO: 1880569
gagucugaggcucaaacuu

SEQ ID NO: 1977229 - RNA, 19 nt, Artificial Sequence
  Description of Artificial Sequence: Synthetic oligonucleotide
  Antisense strand to SEQ ID NO: 1977228
aaguuugagccucagacuc

SEQ ID NO: 1977230 - RNA, 19 nt, Artificial Sequence
  Description of Artificial Sequence: Synthetic oligonucleotide
  Sense strand starting at position 1196 of SEQ ID NO: 1880569
gcaaauuaauaugucauag

SEQ ID NO: 1977231 - RNA, 19 nt, Artificial Sequence
  Description of Artificial Sequence: Synthetic oligonucleotide
  Antisense strand to SEQ ID NO: 1977230
cuaugacauauuaauuugc

SEQ ID NO: 1977232 - RNA, 19 nt, Artificial Sequence
  Description of Artificial Sequence: Synthetic oligonucleotide
  Sense strand starting at position 1259 of SEQ ID NO: 1880569
acuagaagguuagacauuu

SEQ ID NO: 1977233 - RNA, 19 nt, Artificial Sequence
  Description of Artificial Sequence: Synthetic oligonucleotide
  Antisense strand to SEQ ID NO: 1977232
aaaugucuaaccuucuagu

SEQ ID NO: 1977234 - RNA, 19 nt, Artificial Sequence
  Description of Artificial Sequence: Synthetic oligonucleotide
  Sense strand starting at position 1439 of SEQ ID NO: 1880569
ugcuuugcucuuguuaguu

SEQ ID NO: 1977235 - RNA, 19 nt, Artificial Sequence
  Description of Artificial Sequence: Synthetic oligonucleotide
  Antisense strand to SEQ ID NO: 1977234
aacuaacaagagcaaagca

SEQ ID NO: 1977236 - RNA, 19 nt, Artificial Sequence
  Description of Artificial Sequence: Synthetic oligonucleotide
  Sense strand starting at position 2121 of SEQ ID NO: 1880569
uuuaaagcacuuuggaaua

SEQ ID NO: 1977237 - RNA, 19 nt, Artificial Sequence
  Description of Artificial Sequence: Synthetic oligonucleotide
  Antisense strand to SEQ ID NO: 1977236
uauuccaaagugcuuuaaa

SEQ ID NO: 1977238 - RNA, 19 nt, Artificial Sequence
  Description of Artificial Sequence: Synthetic oligonucleotide
  Sense strand starting at position 2266 of SEQ ID NO: 1880569
ggagaaguucuggaguucu

SEQ ID NO: 1977239 - RNA, 19 nt, Artificial Sequence
  Description of Artificial Sequence: Synthetic oligonucleotide
  Antisense strand to SEQ ID NO: 1977238
agaacuccagaacuucucc

SEQ ID NO: 1977240 - RNA, 19 nt, Artificial Sequence
  Description of Artificial Sequence: Synthetic oligonucleotide
  Sense strand starting at position 2416 of SEQ ID NO: 1880569
caaacuugugauuagugua

SEQ ID NO: 1977241 - RNA, 19 nt, Artificial Sequence
  Description of Artificial Sequence: Synthetic oligonucleotide
  Antisense strand to SEQ ID NO: 1977240
uacacuaaucacaaguuug

SEQ ID NO: 1977242 - RNA, 19 nt, Artificial Sequence
  Description of Artificial Sequence: Synthetic oligonucleotide
  Sense strand starting at position 2507 of SEQ ID NO: 1880569
aguggugucauagagauaa

SEQ ID NO: 1977243 - RNA, 19 nt, Artificial Sequence
  Description of Artificial Sequence: Synthetic oligonucleotide
  Antisense strand to SEQ ID NO: 1977242
uuaucucuaugacaccacu

SEQ ID NO: 1977244 - RNA, 19 nt, Artificial Sequence
  Description of Artificial Sequence: Synthetic oligonucleotide
  Sense strand starting at position 2587 of SEQ ID NO: 1880569
ggagacuaacaauguuguu

SEQ ID NO: 1977245 - RNA, 19 nt, Artificial Sequence
  Description of Artificial Sequence: Synthetic oligonucleotide
  Antisense strand to SEQ ID NO: 1977244
aacaacauuguuagucucc

SEQ ID NO: 1977246 - RNA, 19 nt, Artificial Sequence
  Description of Artificial Sequence: Synthetic oligonucleotide
  Sense strand starting at position 2678 of SEQ ID NO: 1880569
auaaauauucuguggauga

SEQ ID NO: 1977247 - RNA, 19 nt, Artificial Sequence
  Description of Artificial Sequence: Synthetic oligonucleotide
  Antisense strand to SEQ ID NO: 1977246
ucauccacagaauauuuau

SEQ ID NO: 1977248 - RNA, 19 nt, Artificial Sequence
  Description of Artificial Sequence: Synthetic oligonucleotide
  Sense strand starting at position 2682 of SEQ ID NO: 1880569
auauucuguggaugacaga

SEQ ID NO: 1977249 - RNA, 19 nt, Artificial Sequence
  Description of Artificial Sequence: Synthetic oligonucleotide
  Antisense strand to SEQ ID NO: 1977248
ucugucauccacagaauau

SEQ ID NO: 1977250 - RNA, 19 nt, Artificial Sequence
  Description of Artificial Sequence: Synthetic oligonucleotide
  Sense strand starting at position 2693 of SEQ ID NO: 1880569
augacagaguaucccuauu

SEQ ID NO: 1977251 - RNA, 19 nt, Artificial Sequence
  Description of Artificial Sequence: Synthetic oligonucleotide
  Antisense strand to SEQ ID NO: 1977250
aauagggauacucugucau

SEQ ID NO: 1977252 - RNA, 19 nt, Artificial Sequence
  Description of Artificial Sequence: Synthetic oligonucleotide
  Sense strand starting at position 2695 of SEQ ID NO: 1880569
gacagaguaucccuauuag

SEQ ID NO: 1977253 - RNA, 19 nt, Artificial Sequence
  Description of Artificial Sequence: Synthetic oligonucleotide
  Antisense strand to SEQ ID NO: 1977252
cuaauagggauacucuguc

SEQ ID NO: 1977254 - RNA, 19 nt, Artificial Sequence
  Description of Artificial Sequence: Synthetic oligonucleotide
  Sense strand starting at position 2726 of SEQ ID NO: 1880569
uggaguuugaucuaguucu

SEQ ID NO: 1977255 - RNA, 19 nt, Artificial Sequence
  Description of Artificial Sequence: Synthetic oligonucleotide
  Antisense strand to SEQ ID NO: 1977254
agaacuagaucaaacucca

SEQ ID NO: 1977256 - RNA, 19 nt, Artificial Sequence
  Description of Artificial Sequence: Synthetic oligonucleotide
  Sense strand starting at position 2854 of SEQ ID NO: 1880569
cccauagguggccagauaa

SEQ ID NO: 1977257 - RNA, 19 nt, Artificial Sequence
  Description of Artificial Sequence: Synthetic oligonucleotide
  Antisense strand to SEQ ID NO: 1977256
uuaucuggccaccuauggg

SEQ ID NO: 1977258 - RNA, 19 nt, Artificial Sequence
  Description of Artificial Sequence: Synthetic oligonucleotide
  Sense strand starting at position 2861 of SEQ ID NO: 1880569
guggccagauaacugaaua

SEQ ID NO: 1977259 - RNA, 19 nt, Artificial Sequence
  Description of Artificial Sequence: Synthetic oligonucleotide
  Antisense strand to SEQ ID NO: 1977258
uauucaguuaucuggccac

SEQ ID NO: 1977260 - RNA, 19 nt, Artificial Sequence
  Description of Artificial Sequence: Synthetic oligonucleotide
  Sense strand starting at position 3079 of SEQ ID NO: 1880569
gugauaauaagcuggauug

SEQ ID NO: 1977261 - RNA, 19 nt, Artificial Sequence
  Description of Artificial Sequence: Synthetic oligonucleotide
  Antisense strand to SEQ ID NO: 1977260
caauccagcuuauuaucac

SEQ ID NO: 1977262 - RNA, 19 nt, Artificial Sequence
  Description of Artificial Sequence: Synthetic oligonucleotide
  Sense strand starting at position 3287 of SEQ ID NO: 1880569
uacugaaauguugaaagcu

SEQ ID NO: 1977263 - RNA, 19 nt, Artificial Sequence
  Description of Artificial Sequence: Synthetic oligonucleotide
  Antisense strand to SEQ ID NO: 1977262
agcuuucaacauuucagua

SEQ ID NO: 1977264 - RNA, 19 nt, Artificial Sequence
  Description of Artificial Sequence: Synthetic oligonucleotide
  Sense strand starting at position 3346 of SEQ ID NO: 1880569
gaaagagccucuccaggaa

SEQ ID NO: 1977265 - RNA, 19 nt, Artificial Sequence
  Description of Artificial Sequence: Synthetic oligonucleotide
  Antisense strand to SEQ ID NO: 1977264
uuccuggagaggcucuuuc

SEQ ID NO: 1977266 - RNA, 19 nt, Artificial Sequence
  Description of Artificial Sequence: Synthetic oligonucleotide
  Sense strand starting at position 3535 of SEQ ID NO: 1880569
uuucccucggaaugagauu

SEQ ID NO: 1977267 - RNA, 19 nt, Artificial Sequence
  Description of Artificial Sequence: Synthetic oligonucleotide
  Antisense strand to SEQ ID NO: 1977266
aaucucauuccgagggaaa

SEQ ID NO: 1977268 - RNA, 19 nt, Artificial Sequence
  Description of Artificial Sequence: Synthetic oligonucleotide
  Sense strand starting at position 3561 of SEQ ID NO: 1880569
augggaauuguuuguggga

SEQ ID NO: 1977269 - RNA, 19 nt, Artificial Sequence
  Description of Artificial Sequence: Synthetic oligonucleotide
  Antisense strand to SEQ ID NO: 1977268
ucccacaaacaauucccau

SEQ ID NO: 1977270 - RNA, 19 nt, Artificial Sequence
  Description of Artificial Sequence: Synthetic oligonucleotide
  Sense strand starting at position 3719 of SEQ ID NO: 1880569
uugaguggcauagaauguu

SEQ ID NO: 1977271 - RNA, 19 nt, Artificial Sequence
  Description of Artificial Sequence: Synthetic oligonucleotide
  Antisense strand to SEQ ID NO: 1977270
aacauucuaugccacucaa

SEQ ID NO: 1977272 - RNA, 19 nt, Artificial Sequence
  Description of Artificial Sequence: Synthetic oligonucleotide
  Sense strand starting at position 3747 of SEQ ID NO: 1880569
aggugaugcgucagaugug

SEQ ID NO: 1977273 - RNA, 19 nt, Artificial Sequence
  Description of Artificial Sequence: Synthetic oligonucleotide
  Antisense strand to SEQ ID NO: 1977272
cacaucugacgcaucaccu

SEQ ID NO: 1977274 - RNA, 19 nt, Artificial Sequence
  Description of Artificial Sequence: Synthetic oligonucleotide
  Sense strand starting at position 3756 of SEQ ID NO: 1880569
gucagaugugcagaaaucu

SEQ ID NO: 1977275 - RNA, 19 nt, Artificial Sequence
  Description of Artificial Sequence: Synthetic oligonucleotide
  Antisense strand to SEQ ID NO: 1977274
agauuucugcacaucugac

SEQ ID NO: 1977276 - RNA, 19 nt, Artificial Sequence
  Description of Artificial Sequence: Synthetic oligonucleotide
  Sense strand starting at position 3765 of SEQ ID NO: 1880569
gcagaaaucucccuggaag

SEQ ID NO: 1977277 - RNA, 19 nt, Artificial Sequence
  Description of Artificial Sequence: Synthetic oligonucleotide
  Antisense strand to SEQ ID NO: 1977276
cuuccagggagauuucugc

SEQ ID NO: 1977278 - RNA, 19 nt, Artificial Sequence
  Description of Artificial Sequence: Synthetic oligonucleotide
  Sense strand starting at position 3766 of SEQ ID NO: 1880569
cagaaaucucccuggaagu

SEQ ID NO: 1977279 - RNA, 19 nt, Artificial Sequence
  Description of Artificial Sequence: Synthetic oligonucleotide
  Antisense strand to SEQ ID NO: 1977278
acuuccagggagauuucug

SEQ ID NO: 1977280 - RNA, 19 nt, Artificial Sequence
  Description of Artificial Sequence: Synthetic oligonucleotide
  Sense strand starting at position 3767 of SEQ ID NO: 1880569
agaaaucucccuggaaguu

SEQ ID NO: 1977281 - RNA, 19 nt, Artificial Sequence
  Description of Artificial Sequence: Synthetic oligonucleotide
  Antisense strand to SEQ ID NO: 1977280
aacuuccagggagauuucu

SEQ ID NO: 1977282 - RNA, 19 nt, Artificial Sequence
  Description of Artificial Sequence: Synthetic oligonucleotide
  Sense strand starting at position 3848 of SEQ ID NO: 1880569
guaauaauugcugagacuu

SEQ ID NO: 1977283 - RNA, 19 nt, Artificial Sequence
  Description of Artificial Sequence: Synthetic oligonucleotide
  Antisense strand to SEQ ID NO: 1977282
aagucucagcaauuauuac

SEQ ID NO: 1977284 - RNA, 19 nt, Artificial Sequence
  Description of Artificial Sequence: Synthetic oligonucleotide
  Sense strand starting at position 3877 of SEQ ID NO: 1880569
uggaccuuccuguaacaca

SEQ ID NO: 1977285 - RNA, 19 nt, Artificial Sequence
  Description of Artificial Sequence: Synthetic oligonucleotide
  Antisense strand to SEQ ID NO: 1977284
uguguuacaggaaggucca

SEQ ID NO: 1977286 - RNA, 19 nt, Artificial Sequence
  Description of Artificial Sequence: Synthetic oligonucleotide
  Sense strand starting at position 3896 of SEQ ID NO: 1880569
uugccuagaucaucaaaga

SEQ ID NO: 1977287 - RNA, 19 nt, Artificial Sequence
  Description of Artificial Sequence: Synthetic oligonucleotide
  Antisense strand to SEQ ID NO: 1977286
ucuuugaugaucuaggcaa

SEQ ID NO: 1977288 - RNA, 19 nt, Artificial Sequence
  Description of Artificial Sequence: Synthetic oligonucleotide
  Sense strand starting at position 108 of SEQ ID NO: 1880570
gcuucugauccagguugaa

SEQ ID NO: 1977289 - RNA, 19 nt, Artificial Sequence
  Description of Artificial Sequence: Synthetic oligonucleotide
  Antisense strand to SEQ ID NO: 1977288
uucaaccuggaucagaagc

SEQ ID NO: 1977290 - RNA, 19 nt, Artificial Sequence
  Description of Artificial Sequence: Synthetic oligonucleotide
  Sense strand starting at position 149 of SEQ ID NO: 1880570
accauauugguuuguuaau

SEQ ID NO: 1977291 - RNA, 19 nt, Artificial Sequence
  Description of Artificial Sequence: Synthetic oligonucleotide
  Antisense strand to SEQ ID NO: 1977290
auuaacaaaccaauauggu

SEQ ID NO: 1977292 - RNA, 19 nt, Artificial Sequence
  Description of Artificial Sequence: Synthetic oligonucleotide
  Sense strand starting at position 150 of SEQ ID NO: 1880570
ccauauugguuuguuaauu

SEQ ID NO: 1977293 - RNA, 19 nt, Artificial Sequence
  Description of Artificial Sequence: Synthetic oligonucleotide
  Antisense strand to SEQ ID NO: 1977292
aauuaacaaaccaauaugg

SEQ ID NO: 1977294 - RNA, 19 nt, Artificial Sequence
  Description of Artificial Sequence: Synthetic oligonucleotide
  Sense strand starting at position 155 of SEQ ID NO: 1880570
uugguuuguuaauuaggaa

SEQ ID NO: 1977295 - RNA, 19 nt, Artificial Sequence
  Description of Artificial Sequence: Synthetic oligonucleotide
  Antisense strand to SEQ ID NO: 1977294
uuccuaauuaacaaaccaa

SEQ ID NO: 1977296 - RNA, 19 nt, Artificial Sequence
  Description of Artificial Sequence: Synthetic oligonucleotide
  Sense strand starting at position 156 of SEQ ID NO: 1880570
ugguuuguuaauuaggaau

SEQ ID NO: 1977297 - RNA, 19 nt, Artificial Sequence
  Description of Artificial Sequence: Synthetic oligonucleotide
  Antisense strand to SEQ ID NO: 1977296
auuccuaauuaacaaacca

SEQ ID NO: 1977298 - RNA, 19 nt, Artificial Sequence
  Description of Artificial Sequence: Synthetic oligonucleotide
  Sense strand starting at position 590 of SEQ ID NO: 1880570
ucccuuuauacacgggaga

SEQ ID NO: 1977299 - RNA, 19 nt, Artificial Sequence
  Description of Artificial Sequence: Synthetic oligonucleotide
  Antisense strand to SEQ ID NO: 1977298
ucucccguguauaaaggga

SEQ ID NO: 1977300 - RNA, 19 nt, Artificial Sequence
  Description of Artificial Sequence: Synthetic oligonucleotide
  Sense strand starting at position 591 of SEQ ID NO: 1880570
cccuuuauacacgggagaa

SEQ ID NO: 1977301 - RNA, 19 nt, Artificial Sequence
  Description of Artificial Sequence: Synthetic oligonucleotide
  Antisense strand to SEQ ID NO: 1977300
uucucccguguauaaaggg

SEQ ID NO: 1977302 - RNA, 19 nt, Artificial Sequence
  Description of Artificial Sequence: Synthetic oligonucleotide
  Sense strand starting at position 592 of SEQ ID NO: 1880570
ccuuuauacacgggagaaa

SEQ ID NO: 1977303 - RNA, 19 nt, Artificial Sequence
  Description of Artificial Sequence: Synthetic oligonucleotide
  Antisense strand to SEQ ID NO: 1977302
uuucucccguguauaaagg

SEQ ID NO: 1977304 - RNA, 19 nt, Artificial Sequence
  Description of Artificial Sequence: Synthetic oligonucleotide
  Sense strand starting at position 680 of SEQ ID NO: 1880570
uugugauacuaggcauaga

SEQ ID NO: 1977305 - RNA, 19 nt, Artificial Sequence
  Description of Artificial Sequence: Synthetic oligonucleotide
  Antisense strand to SEQ ID NO: 1977304
ucuaugccuaguaucacaa

SEQ ID NO: 1977306 - RNA, 19 nt, Artificial Sequence
  Description of Artificial Sequence: Synthetic oligonucleotide
  Sense strand starting at position 681 of SEQ ID NO: 1880570
ugugauacuaggcauagau

SEQ ID NO: 1977307 - RNA, 19 nt, Artificial Sequence
  Description of Artificial Sequence: Synthetic oligonucleotide
  Antisense strand to SEQ ID NO: 1977306
aucuaugccuaguaucaca

SEQ ID NO: 1977308 - RNA, 19 nt, Artificial Sequence
  Description of Artificial Sequence: Synthetic oligonucleotide
  Sense strand starting at position 718 of SEQ ID NO: 1880570
acguguaugugcacgugaa

SEQ ID NO: 1977309 - RNA, 19 nt, Artificial Sequence
  Description of Artificial Sequence: Synthetic oligonucleotide
  Antisense strand to SEQ ID NO: 1977308
uucacgugcacauacacgu

SEQ ID NO: 1977310 - RNA, 19 nt, Artificial Sequence
  Description of Artificial Sequence: Synthetic oligonucleotide
  Sense strand starting at position 764 of SEQ ID NO: 1880570
uggugagacugggcugaau

SEQ ID NO: 1977311 - RNA, 19 nt, Artificial Sequence
  Description of Artificial Sequence: Synthetic oligonucleotide
  Antisense strand to SEQ ID NO: 1977310
auucagcccagucucacca

SEQ ID NO: 1977312 - RNA, 19 nt, Artificial Sequence
  Description of Artificial Sequence: Synthetic oligonucleotide
  Sense strand starting at position 836 of SEQ ID NO: 1880570
accagagccuucuuugauu

SEQ ID NO: 1977313 - RNA, 19 nt, Artificial Sequence
  Description of Artificial Sequence: Synthetic oligonucleotide
  Antisense strand to SEQ ID NO: 1977312
aaucaaagaaggcucuggu

SEQ ID NO: 1977314 - RNA, 19 nt, Artificial Sequence
  Description of Artificial Sequence: Synthetic oligonucleotide
  Sense strand starting at position 988 of SEQ ID NO: 1880570
gguuaauuacuguauguaa

SEQ ID NO: 1977315 - RNA, 19 nt, Artificial Sequence
  Description of Artificial Sequence: Synthetic oligonucleotide
  Antisense strand to SEQ ID NO: 1977314
uuacauacaguaauuaacc

SEQ ID NO: 1977316 - RNA, 19 nt, Artificial Sequence
  Description of Artificial Sequence: Synthetic oligonucleotide
  Sense strand starting at position 1442 of SEQ ID NO: 1880570
uuaugaaauugccuagcua

SEQ ID NO: 1977317 - RNA, 19 nt, Artificial Sequence
  Description of Artificial Sequence: Synthetic oligonucleotide
  Antisense strand to SEQ ID NO: 1977316
uagcuaggcaauuucauaa

SEQ ID NO: 1977318 - RNA, 19 nt, Artificial Sequence
  Description of Artificial Sequence: Synthetic oligonucleotide
  Sense strand starting at position 1517 of SEQ ID NO: 1880570
uagaacaugccuugagguu

SEQ ID NO: 1977319 - RNA, 19 nt, Artificial Sequence
  Description of Artificial Sequence: Synthetic oligonucleotide
  Antisense strand to SEQ ID NO: 1977318
aaccucaaggcauguucua

SEQ ID NO: 1977320 - RNA, 19 nt, Artificial Sequence
  Description of Artificial Sequence: Synthetic oligonucleotide
  Sense strand starting at position 1518 of SEQ ID NO: 1880570
agaacaugccuugagguua

SEQ ID NO: 1977321 - RNA, 19 nt, Artificial Sequence
  Description of Artificial Sequence: Synthetic oligonucleotide
  Antisense strand to SEQ ID NO: 1977320
uaaccucaaggcauguucu

SEQ ID NO: 1977322 - RNA, 19 nt, Artificial Sequence
  Description of Artificial Sequence: Synthetic oligonucleotide
  Sense strand starting at position 1727 of SEQ ID NO: 1880570
gaaagcacgcaugaauaau

SEQ ID NO: 1977323 - RNA, 19 nt, Artificial Sequence
  Description of Artificial Sequence: Synthetic oligonucleotide
  Antisense strand to SEQ ID NO: 1977322
auuauucaugcgugcuuuc

SEQ ID NO: 1977324 - RNA, 19 nt, Artificial Sequence
  Description of Artificial Sequence: Synthetic oligonucleotide
  Sense strand starting at position 1751 of SEQ ID NO: 1880570
cgcacugcugcuguuaauu

SEQ ID NO: 1977325 - RNA, 19 nt, Artificial Sequence
  Description of Artificial Sequence: Synthetic oligonucleotide
  Antisense strand to SEQ ID NO: 1977324
aauuaacagcagcagugcg

SEQ ID NO: 1977326 - RNA, 19 nt, Artificial Sequence
  Description of Artificial Sequence: Synthetic oligonucleotide
  Sense strand starting at position 1791 of SEQ ID NO: 1880570
ccaggugcuguuuacuaua

SEQ ID NO: 1977327 - RNA, 19 nt, Artificial Sequence
  Description of Artificial Sequence: Synthetic oligonucleotide
  Antisense strand to SEQ ID NO: 1977326
uauaguaaacagcaccugg

SEQ ID NO: 1977328 - RNA, 19 nt, Artificial Sequence
  Description of Artificial Sequence: Synthetic oligonucleotide
  Sense strand starting at position 1916 of SEQ ID NO: 1880570
cccauuuacugggacugaa

SEQ ID NO: 1977329 - RNA, 19 nt, Artificial Sequence
  Description of Artificial Sequence: Synthetic oligonucleotide
  Antisense strand to SEQ ID NO: 1977328
uucagucccaguaaauggg

SEQ ID NO: 1977330 - RNA, 19 nt, Artificial Sequence
  Description of Artificial Sequence: Synthetic oligonucleotide
  Sense strand starting at position 1963 of SEQ ID NO: 1880570
aggcaauaauuccugauau

SEQ ID NO: 1977331 - RNA, 19 nt, Artificial Sequence
  Description of Artificial Sequence: Synthetic oligonucleotide
  Antisense strand to SEQ ID NO: 1977330
auaucaggaauuauugccu

SEQ ID NO: 1977332 - RNA, 19 nt, Artificial Sequence
  Description of Artificial Sequence: Synthetic oligonucleotide
  Sense strand starting at position 2036 of SEQ ID NO: 1880570
cucuccaauccauguggaa

SEQ ID NO: 1977333 - RNA, 19 nt, Artificial Sequence
  Description of Artificial Sequence: Synthetic oligonucleotide
  Antisense strand to SEQ ID NO: 1977332
uuccacauggauuggagag

SEQ ID NO: 1977334 - RNA, 19 nt, Artificial Sequence
  Description of Artificial Sequence: Synthetic oligonucleotide
  Sense strand starting at position 2299 of SEQ ID NO: 1880570
ccuggagauucuuccugga

SEQ ID NO: 1977335 - RNA, 19 nt, Artificial Sequence
  Description of Artificial Sequence: Synthetic oligonucleotide
  Antisense strand to SEQ ID NO: 1977334
uccaggaagaaucuccagg

SEQ ID NO: 1977336 - RNA, 19 nt, Artificial Sequence
  Description of Artificial Sequence: Synthetic oligonucleotide
  Sense strand starting at position 2303 of SEQ ID NO: 1880570
gagauucuuccuggagauu

SEQ ID NO: 1977337 - RNA, 19 nt, Artificial Sequence
  Description of Artificial Sequence: Synthetic oligonucleotide
  Antisense strand to SEQ ID NO: 1977336
aaucuccaggaagaaucuc

SEQ ID NO: 1977338 - RNA, 19 nt, Artificial Sequence
  Description of Artificial Sequence: Synthetic oligonucleotide
  Sense strand starting at position 2351 of SEQ ID NO: 1880570
ggaaguaacuugcccaaug

SEQ ID NO: 1977339 - RNA, 19 nt, Artificial Sequence
  Description of Artificial Sequence: Synthetic oligonucleotide
  Antisense strand to SEQ ID NO: 1977338
cauugggcaaguuacuucc

SEQ ID NO: 1977340 - RNA, 19 nt, Artificial Sequence
  Description of Artificial Sequence: Synthetic oligonucleotide
  Sense strand starting at position 2381 of SEQ ID NO: 1880570
cugccuaacgcuuugguua

SEQ ID NO: 1977341 - RNA, 19 nt, Artificial Sequence
  Description of Artificial Sequence: Synthetic oligonucleotide
  Antisense strand to SEQ ID NO: 1977340
uaaccaaagcguuaggcag

SEQ ID NO: 1977342 - RNA, 19 nt, Artificial Sequence
  Description of Artificial Sequence: Synthetic oligonucleotide
  Sense strand starting at position 2386 of SEQ ID NO: 1880570
uaacgcuuugguuacacaa

SEQ ID NO: 1977343 - RNA, 19 nt, Artificial Sequence
  Description of Artificial Sequence: Synthetic oligonucleotide
  Antisense strand to SEQ ID NO: 1977342
uuguguaaccaaagcguua

SEQ ID NO: 1977344 - RNA, 19 nt, Artificial Sequence
  Description of Artificial Sequence: Synthetic oligonucleotide
  Sense strand starting at position 2422 of SEQ ID NO: 1880570
aucuguuuccuugaaggca

SEQ ID NO: 1977345 - RNA, 19 nt, Artificial Sequence
  Description of Artificial Sequence: Synthetic oligonucleotide
  Antisense strand to SEQ ID NO: 1977344
ugccuucaaggaaacagau

SEQ ID NO: 1977346 - RNA, 19 nt, Artificial Sequence
  Description of Artificial Sequence: Synthetic oligonucleotide
  Sense strand starting at position 2635 of SEQ ID NO: 1880570
gguacaccuuugccuauaa

SEQ ID NO: 1977347 - RNA, 19 nt, Artificial Sequence
  Description of Artificial Sequence: Synthetic oligonucleotide
  Antisense strand to SEQ ID NO: 1977346
uuauaggcaaagguguacc

SEQ ID NO: 1977348 - RNA, 19 nt, Artificial Sequence
  Description of Artificial Sequence: Synthetic oligonucleotide
  Sense strand starting at position 2799 of SEQ ID NO: 1880570
ucaauaccucggugaauga

SEQ ID NO: 1977349 - RNA, 19 nt, Artificial Sequence
  Description of Artificial Sequence: Synthetic oligonucleotide
  Antisense strand to SEQ ID NO: 1977348
ucauucaccgagguauuga

SEQ ID NO: 1977350 - RNA, 19 nt, Artificial Sequence
  Description of Artificial Sequence: Synthetic oligonucleotide
  Sense strand starting at position 2803 of SEQ ID NO: 1880570
uaccucggugaaugaauaa

SEQ ID NO: 1977351 - RNA, 19 nt, Artificial Sequence
  Description of Artificial Sequence: Synthetic oligonucleotide
  Antisense strand to SEQ ID NO: 1977350
uuauucauucaccgaggua

SEQ ID NO: 1977352 - RNA, 19 nt, Artificial Sequence
  Description of Artificial Sequence: Synthetic oligonucleotide
  Sense strand starting at position 2921 of SEQ ID NO: 1880570
gcaucacaggugcaagaau

SEQ ID NO: 1977353 - RNA, 19 nt, Artificial Sequence
  Description of Artificial Sequence: Synthetic oligonucleotide
  Antisense strand to SEQ ID NO: 1977352
auucuugcaccugugaugc

SEQ ID NO: 1977354 - RNA, 19 nt, Artificial Sequence
  Description of Artificial Sequence: Synthetic oligonucleotide
  Sense strand starting at position 2989 of SEQ ID NO: 1880570
ccuggagucuucucuacca

SEQ ID NO: 1977355 - RNA, 19 nt, Artificial Sequence
  Description of Artificial Sequence: Synthetic oligonucleotide
  Antisense strand to SEQ ID NO: 1977354
ugguagagaagacuccagg

SEQ ID NO: 1977356 - RNA, 19 nt, Artificial Sequence
  Description of Artificial Sequence: Synthetic oligonucleotide
  Sense strand starting at position 2991 of SEQ ID NO: 1880570
uggagucuucucuaccacu

SEQ ID NO: 1977357 - RNA, 19 nt, Artificial Sequence
  Description of Artificial Sequence: Synthetic oligonucleotide
  Antisense strand to SEQ ID NO: 1977356
agugguagagaagacucca

SEQ ID NO: 1977358 - RNA, 19 nt, Artificial Sequence
  Description of Artificial Sequence: Synthetic oligonucleotide
  Sense strand starting at position 3321 of SEQ ID NO: 1880570
ugacgaaagagucaucuuu

SEQ ID NO: 1977359 - RNA, 19 nt, Artificial Sequence
  Description of Artificial Sequence: Synthetic oligonucleotide
  Antisense strand to SEQ ID NO: 1977358
aaagaugacucuuucguca

SEQ ID NO: 1977360 - RNA, 19 nt, Artificial Sequence
  Description of Artificial Sequence: Synthetic oligonucleotide
  Sense strand starting at position 3348 of SEQ ID NO: 1880570
uggugcugggucaguuaga

SEQ ID NO: 1977361 - RNA, 19 nt, Artificial Sequence
  Description of Artificial Sequence: Synthetic oligonucleotide
  Antisense strand to SEQ ID NO: 1977360
ucuaacugacccagcacca

SEQ ID NO: 1977362 - RNA, 19 nt, Artificial Sequence
  Description of Artificial Sequence: Synthetic oligonucleotide
  Sense strand starting at position 3504 of SEQ ID NO: 1880570
guaggcagaccuuauacaa

SEQ ID NO: 1977363 - RNA, 19 nt, Artificial Sequence
  Description of Artificial Sequence: Synthetic oligonucleotide
  Antisense strand to SEQ ID NO: 1977362
uuguauaaggucugccuac

SEQ ID NO: 1977364 - RNA, 19 nt, Artificial Sequence
  Description of Artificial Sequence: Synthetic oligonucleotide
  Sense strand starting at position 3758 of SEQ ID NO: 1880570
aguggaugaaagcauguua

SEQ ID NO: 1977365 - RNA, 19 nt, Artificial Sequence
  Description of Artificial Sequence: Synthetic oligonucleotide
  Antisense strand to SEQ ID NO: 1977364
uaacaugcuuucauccacu

SEQ ID NO: 1977366 - RNA, 19 nt, Artificial Sequence
  Description of Artificial Sequence: Synthetic oligonucleotide
  Sense strand starting at position 3907 of SEQ ID NO: 1880570
uuaagaguaaguugguaca

SEQ ID NO: 1977367 - RNA, 19 nt, Artificial Sequence
  Description of Artificial Sequence: Synthetic oligonucleotide
  Antisense strand to SEQ ID NO: 1977366
uguaccaacuuacucuuaa

SEQ ID NO: 1977368 - RNA, 19 nt, Artificial Sequence
  Description of Artificial Sequence: Synthetic oligonucleotide
  Sense strand starting at position 36 of SEQ ID NO: 1880571
agcacugguccugagaacu

SEQ ID NO: 1977369 - RNA, 19 nt, Artificial Sequence
  Description of Artificial Sequence: Synthetic oligonucleotide
  Antisense strand to SEQ ID NO: 1977368
aguucucaggaccagugcu

SEQ ID NO: 1977370 - RNA, 19 nt, Artificial Sequence
  Description of Artificial Sequence: Synthetic oligonucleotide
  Sense strand starting at position 89 of SEQ ID NO: 1880571
ggucuacucauacgcuaag

SEQ ID NO: 1977371 - RNA, 19 nt, Artificial Sequence
  Description of Artificial Sequence: Synthetic oligonucleotide
  Antisense strand to SEQ ID NO: 1977370
cuuagcguaugaguagacc

SEQ ID NO: 1977372 - RNA, 19 nt, Artificial Sequence
  Description of Artificial Sequence: Synthetic oligonucleotide
  Sense strand starting at position 98 of SEQ ID NO: 1880571
auacgcuaagcucaagauu

SEQ ID NO: 1977373 - RNA, 19 nt, Artificial Sequence
  Description of Artificial Sequence: Synthetic oligonucleotide
  Antisense strand to SEQ ID NO: 1977372
aaucuugagcuuagcguau

SEQ ID NO: 1977374 - RNA, 19 nt, Artificial Sequence
  Description of Artificial Sequence: Synthetic oligonucleotide
  Sense strand starting at position 109 of SEQ ID NO: 1880571
ucaagauugcuggagcucu

SEQ ID NO: 1977375 - RNA, 19 nt, Artificial Sequence
  Description of Artificial Sequence: Synthetic oligonucleotide
  Antisense strand to SEQ ID NO: 1977374
agagcuccagcaaucuuga

SEQ ID NO: 1977376 - RNA, 19 nt, Artificial Sequence
  Description of Artificial Sequence: Synthetic oligonucleotide
  Sense strand starting at position 161 of SEQ ID NO: 1880571
cacuguuucgggcauagca

SEQ ID NO: 1977377 - RNA, 19 nt, Artificial Sequence
  Description of Artificial Sequence: Synthetic oligonucleotide
  Antisense strand to SEQ ID NO: 1977376
ugcuaugcccgaaacagug

SEQ ID NO: 1977378 - RNA, 19 nt, Artificial Sequence
  Description of Artificial Sequence: Synthetic oligonucleotide
  Sense strand starting at position 229 of SEQ ID NO: 1880571
cccugaauuucucagagcu

SEQ ID NO: 1977379 - RNA, 19 nt, Artificial Sequence
  Description of Artificial Sequence: Synthetic oligonucleotide
  Antisense strand to SEQ ID NO: 1977378
agcucugagaaauucaggg

SEQ ID NO: 1977380 - RNA, 19 nt, Artificial Sequence
  Description of Artificial Sequence: Synthetic oligonucleotide
  Sense strand starting at position 231 of SEQ ID NO: 1880571
cugaauuucucagagcuuc

SEQ ID NO: 1977381 - RNA, 19 nt, Artificial Sequence
  Description of Artificial Sequence: Synthetic oligonucleotide
  Antisense strand to SEQ ID NO: 1977380
gaagcucugagaaauucag

SEQ ID NO: 1977382 - RNA, 19 nt, Artificial Sequence
  Description of Artificial Sequence: Synthetic oligonucleotide
  Sense strand starting at position 279 of SEQ ID NO: 1880571
ggagucaccucgucaccaa

SEQ ID NO: 1977383 - RNA, 19 nt, Artificial Sequence
  Description of Artificial Sequence: Synthetic oligonucleotide
  Antisense strand to SEQ ID NO: 1977382
uuggugacgaggugacucc

SEQ ID NO: 1977384 - RNA, 19 nt, Artificial Sequence
  Description of Artificial Sequence: Synthetic oligonucleotide
  Sense strand starting at position 320 of SEQ ID NO: 1880571
ccaugacugugauuccauu

SEQ ID NO: 1977385 - RNA, 19 nt, Artificial Sequence
  Description of Artificial Sequence: Synthetic oligonucleotide
  Antisense strand to SEQ ID NO: 1977384
aauggaaucacagucaugg

SEQ ID NO: 1977386 - RNA, 19 nt, Artificial Sequence
  Description of Artificial Sequence: Synthetic oligonucleotide
  Sense strand starting at position 367 of SEQ ID NO: 1880571
uugcuuuagcacuaaagca

SEQ ID NO: 1977387 - RNA, 19 nt, Artificial Sequence
  Description of Artificial Sequence: Synthetic oligonucleotide
  Antisense strand to SEQ ID NO: 1977386
ugcuuuagugcuaaagcaa

SEQ ID NO: 1977388 - RNA, 19 nt, Artificial Sequence
  Description of Artificial Sequence: Synthetic oligonucleotide
  Sense strand starting at position 463 of SEQ ID NO: 1880571
gcagucuguuccuucugau

SEQ ID NO: 1977389 - RNA, 19 nt, Artificial Sequence
  Description of Artificial Sequence: Synthetic oligonucleotide
  Antisense strand to SEQ ID NO: 1977388
aucagaaggaacagacugc

SEQ ID NO: 1977390 - RNA, 19 nt, Artificial Sequence
  Description of Artificial Sequence: Synthetic oligonucleotide
  Sense strand starting at position 1485 of SEQ ID NO: 1880571
acugaucucucaguaaguc

SEQ ID NO: 1977391 - RNA, 19 nt, Artificial Sequence
  Description of Artificial Sequence: Synthetic oligonucleotide
  Antisense strand to SEQ ID NO: 1977390
gacuuacugagagaucagu

SEQ ID NO: 1977392 - RNA, 19 nt, Artificial Sequence
  Description of Artificial Sequence: Synthetic oligonucleotide
  Sense strand starting at position 1555 of SEQ ID NO: 1880571
cgcagagaaaguuguaauu

SEQ ID NO: 1977393 - RNA, 19 nt, Artificial Sequence
  Description of Artificial Sequence: Synthetic oligonucleotide
  Antisense strand to SEQ ID NO: 1977392
aauuacaacuuucucugcg

SEQ ID NO: 1977394 - RNA, 19 nt, Artificial Sequence
  Description of Artificial Sequence: Synthetic oligonucleotide
  Sense strand starting at position 1557 of SEQ ID NO: 1880571
cagagaaaguuguaauuaa

SEQ ID NO: 1977395 - RNA, 19 nt, Artificial Sequence
  Description of Artificial Sequence: Synthetic oligonucleotide
  Antisense strand to SEQ ID NO: 1977394
uuaauuacaacuuucucug

SEQ ID NO: 1977396 - RNA, 19 nt, Artificial Sequence
  Description of Artificial Sequence: Synthetic oligonucleotide
  Sense strand starting at position 1858 of SEQ ID NO: 1880571
gagucccucuugcugaauu

SEQ ID NO: 1977397 - RNA, 19 nt, Artificial Sequence
  Description of Artificial Sequence: Synthetic oligonucleotide
  Antisense strand to SEQ ID NO: 1977396
aauucagcaagagggacuc

SEQ ID NO: 1977398 - RNA, 19 nt, Artificial Sequence
  Description of Artificial Sequence: Synthetic oligonucleotide
  Sense strand starting at position 1992 of SEQ ID NO: 1880571
gcagguuccucuucuggga

SEQ ID NO: 1977399 - RNA, 19 nt, Artificial Sequence
  Description of Artificial Sequence: Synthetic oligonucleotide
  Antisense strand to SEQ ID NO: 1977398
ucccagaagaggaaccugc

SEQ ID NO: 1977400 - RNA, 19 nt, Artificial Sequence
  Description of Artificial Sequence: Synthetic oligonucleotide
  Sense strand starting at position 2366 of SEQ ID NO: 1880571
cauuccuaggccuguguau

SEQ ID NO: 1977401 - RNA, 19 nt, Artificial Sequence
  Description of Artificial Sequence: Synthetic oligonucleotide
  Antisense strand to SEQ ID NO: 1977400
auacacaggccuaggaaug

SEQ ID NO: 1977402 - RNA, 19 nt, Artificial Sequence
  Description of Artificial Sequence: Synthetic oligonucleotide
  Sense strand starting at position 2368 of SEQ ID NO: 1880571
uuccuaggccuguguauaa

SEQ ID NO: 1977403 - RNA, 19 nt, Artificial Sequence
  Description of Artificial Sequence: Synthetic oligonucleotide
  Antisense strand to SEQ ID NO: 1977402
uuauacacaggccuaggaa

SEQ ID NO: 1977404 - RNA, 19 nt, Artificial Sequence
  Description of Artificial Sequence: Synthetic oligonucleotide
  Sense strand starting at position 2588 of SEQ ID NO: 1880571
ugcagaauuccauggaccu

SEQ ID NO: 1977405 - RNA, 19 nt, Artificial Sequence
  Description of Artificial Sequence: Synthetic oligonucleotide
  Antisense strand to SEQ ID NO: 1977404
agguccauggaauucugca

SEQ ID NO: 1977406 - RNA, 19 nt, Artificial Sequence
  Description of Artificial Sequence: Synthetic oligonucleotide
  Sense strand starting at position 2589 of SEQ ID NO: 1880571
gcagaauuccauggaccuc

SEQ ID NO: 1977407 - RNA, 19 nt, Artificial Sequence
  Description of Artificial Sequence: Synthetic oligonucleotide
  Antisense strand to SEQ ID NO: 1977406
gagguccauggaauucugc

SEQ ID NO: 1977408 - RNA, 19 nt, Artificial Sequence
  Description of Artificial Sequence: Synthetic oligonucleotide
  Sense strand starting at position 2706 of SEQ ID NO: 1880571
ggagaacuuuccuuuaucu

SEQ ID NO: 1977409 - RNA, 19 nt, Artificial Sequence
  Description of Artificial Sequence: Synthetic oligonucleotide
  Antisense strand to SEQ ID NO: 1977408
agauaaaggaaaguucucc

SEQ ID NO: 1977410 - RNA, 19 nt, Artificial Sequence
  Description of Artificial Sequence: Synthetic oligonucleotide
  Sense strand starting at position 2806 of SEQ ID NO: 1880571
ccuacugugugcucucuaa

SEQ ID NO: 1977411 - RNA, 19 nt, Artificial Sequence
  Description of Artificial Sequence: Synthetic oligonucleotide
  Antisense strand to SEQ ID NO: 1977410
uuagagagcacacaguagg

SEQ ID NO: 1977412 - RNA, 19 nt, Artificial Sequence
  Description of Artificial Sequence: Synthetic oligonucleotide
  Sense strand starting at position 2833 of SEQ ID NO: 1880571
ccaggaaagcucugcgacu

SEQ ID NO: 1977413 - RNA, 19 nt, Artificial Sequence
  Description of Artificial Sequence: Synthetic oligonucleotide
  Antisense strand to SEQ ID NO: 1977412
agucgcagagcuuuccugg

SEQ ID NO: 1977414 - RNA, 19 nt, Artificial Sequence
  Description of Artificial Sequence: Synthetic oligonucleotide
  Sense strand starting at position 2924 of SEQ ID NO: 1880571
cugagaaaguugucuaacu

SEQ ID NO: 1977415 - RNA, 19 nt, Artificial Sequence
  Description of Artificial Sequence: Synthetic oligonucleotide
  Antisense strand to SEQ ID NO: 1977414
aguuagacaacuuucucag

SEQ ID NO: 1977416 - RNA, 19 nt, Artificial Sequence
  Description of Artificial Sequence: Synthetic oligonucleotide
  Sense strand starting at position 2925 of SEQ ID NO: 1880571
ugagaaaguugucuaacuu

SEQ ID NO: 1977417 - RNA, 19 nt, Artificial Sequence
  Description of Artificial Sequence: Synthetic oligonucleotide
  Antisense strand to SEQ ID NO: 1977416
aaguuagacaacuuucuca

SEQ ID NO: 1977418 - RNA, 19 nt, Artificial Sequence
  Description of Artificial Sequence: Synthetic oligonucleotide
  Sense strand starting at position 2926 of SEQ ID NO: 1880571
gagaaaguugucuaacuuc

SEQ ID NO: 1977419 - RNA, 19 nt, Artificial Sequence
  Description of Artificial Sequence: Synthetic oligonucleotide
  Antisense strand to SEQ ID NO: 1977418
gaaguuagacaacuuucuc

SEQ ID NO: 1977420 - RNA, 19 nt, Artificial Sequence
  Description of Artificial Sequence: Synthetic oligonucleotide
  Sense strand starting at position 2935 of SEQ ID NO: 1880571
gucuaacuucccugagcuu

SEQ ID NO: 1977421 - RNA, 19 nt, Artificial Sequence
  Description of Artificial Sequence: Synthetic oligonucleotide
  Antisense strand to SEQ ID NO: 1977420
aagcucagggaaguuagac

SEQ ID NO: 1977422 - RNA, 19 nt, Artificial Sequence
  Description of Artificial Sequence: Synthetic oligonucleotide
  Sense strand starting at position 2984 of SEQ ID NO: 1880571
aaucguugucugucuugca

SEQ ID NO: 1977423 - RNA, 19 nt, Artificial Sequence
  Description of Artificial Sequence: Synthetic oligonucleotide
  Antisense strand to SEQ ID NO: 1977422
ugcaagacagacaacgauu

SEQ ID NO: 1977424 - RNA, 19 nt, Artificial Sequence
  Description of Artificial Sequence: Synthetic oligonucleotide
  Sense strand starting at position 2997 of SEQ ID NO: 1880571
cuugcagccuuguuacaau

SEQ ID NO: 1977425 - RNA, 19 nt, Artificial Sequence
  Description of Artificial Sequence: Synthetic oligonucleotide
  Antisense strand to SEQ ID NO: 1977424
auuguaacaaggcugcaag

SEQ ID NO: 1977426 - RNA, 19 nt, Artificial Sequence
  Description of Artificial Sequence: Synthetic oligonucleotide
  Sense strand starting at position 3008 of SEQ ID NO: 1880571
guuacaauggccgaaggaa

SEQ ID NO: 1977427 - RNA, 19 nt, Artificial Sequence
  Description of Artificial Sequence: Synthetic oligonucleotide
  Antisense strand to SEQ ID NO: 1977426
uuccuucggccauuguaac

SEQ ID NO: 1977428 - RNA, 19 nt, Artificial Sequence
  Description of Artificial Sequence: Synthetic oligonucleotide
  Sense strand starting at position 3038 of SEQ ID NO: 1880571
cggaauggguucucaguua

SEQ ID NO: 1977429 - RNA, 19 nt, Artificial Sequence
  Description of Artificial Sequence: Synthetic oligonucleotide
  Antisense strand to SEQ ID NO: 1977428
uaacugagaacccauuccg

SEQ ID NO: 1977430 - RNA, 19 nt, Artificial Sequence
  Description of Artificial Sequence: Synthetic oligonucleotide
  Sense strand starting at position 3139 of SEQ ID NO: 1880571
gccagacacugguugcaua

SEQ ID NO: 1977431 - RNA, 19 nt, Artificial Sequence
  Description of Artificial Sequence: Synthetic oligonucleotide
  Antisense strand to SEQ ID NO: 1977430
uaugcaaccagugucuggc

SEQ ID NO: 1977432 - RNA, 19 nt, Artificial Sequence
  Description of Artificial Sequence: Synthetic oligonucleotide
  Sense strand starting at position 3140 of SEQ ID NO: 1880571
ccagacacugguugcauaa

SEQ ID NO: 1977433 - RNA, 19 nt, Artificial Sequence
  Description of Artificial Sequence: Synthetic oligonucleotide
  Antisense strand to SEQ ID NO: 1977432
uuaugcaaccagugucugg

SEQ ID NO: 1977434 - RNA, 19 nt, Artificial Sequence
  Description of Artificial Sequence: Synthetic oligonucleotide
  Sense strand starting at position 3281 of SEQ ID NO: 1880571
gcugcacaacccuaugaau

SEQ ID NO: 1977435 - RNA, 19 nt, Artificial Sequence
  Description of Artificial Sequence: Synthetic oligonucleotide
  Antisense strand to SEQ ID NO: 1977434
auucauaggguugugcagc

SEQ ID NO: 1977436 - RNA, 19 nt, Artificial Sequence
  Description of Artificial Sequence: Synthetic oligonucleotide
  Sense strand starting at position 3315 of SEQ ID NO: 1880571
agguucugauaugaauuau

SEQ ID NO: 1977437 - RNA, 19 nt, Artificial Sequence
  Description of Artificial Sequence: Synthetic oligonucleotide
  Antisense strand to SEQ ID NO: 1977436
auaauucauaucagaaccu

SEQ ID NO: 1977438 - RNA, 19 nt, Artificial Sequence
  Description of Artificial Sequence: Synthetic oligonucleotide
  Sense strand starting at position 3394 of SEQ ID NO: 1880571
ccaagaagcaauggauugu

SEQ ID NO: 1977439 - RNA, 19 nt, Artificial Sequence
  Description of Artificial Sequence: Synthetic oligonucleotide
  Antisense strand to SEQ ID NO: 1977438
acaauccauugcuucuugg

SEQ ID NO: 1977440 - RNA, 19 nt, Artificial Sequence
  Description of Artificial Sequence: Synthetic oligonucleotide
  Sense strand starting at position 3542 of SEQ ID NO: 1880571
ucacacagugcuuagaaga

SEQ ID NO: 1977441 - RNA, 19 nt, Artificial Sequence
  Description of Artificial Sequence: Synthetic oligonucleotide
  Antisense strand to SEQ ID NO: 1977440
ucuucuaagcacuguguga

SEQ ID NO: 1977442 - RNA, 19 nt, Artificial Sequence
  Description of Artificial Sequence: Synthetic oligonucleotide
  Sense strand starting at position 3596 of SEQ ID NO: 1880571
acugguguugacugucaua

SEQ ID NO: 1977443 - RNA, 19 nt, Artificial Sequence
  Description of Artificial Sequence: Synthetic oligonucleotide
  Antisense strand to SEQ ID NO: 1977442
uaugacagucaacaccagu

SEQ ID NO: 1977444 - RNA, 19 nt, Artificial Sequence
  Description of Artificial Sequence: Synthetic oligonucleotide
  Sense strand starting at position 3624 of SEQ ID NO: 1880571
ccucauaugucacuucguu

SEQ ID NO: 1977445 - RNA, 19 nt, Artificial Sequence
  Description of Artificial Sequence: Synthetic oligonucleotide
  Antisense strand to SEQ ID NO: 1977444
aacgaagugacauaugagg

SEQ ID NO: 1977446 - RNA, 19 nt, Artificial Sequence
  Description of Artificial Sequence: Synthetic oligonucleotide
  Sense strand starting at position 3651 of SEQ ID NO: 1880571
gaaacaacucuacggguua

SEQ ID NO: 1977447 - RNA, 19 nt, Artificial Sequence
  Description of Artificial Sequence: Synthetic oligonucleotide
  Antisense strand to SEQ ID NO: 1977446
uaacccguagaguuguuuc

SEQ ID NO: 1977448 - RNA, 19 nt, Artificial Sequence
  Description of Artificial Sequence: Synthetic oligonucleotide
  Sense strand starting at position 8 of SEQ ID NO: 1880572
agguaaugccuuuaccaaa

SEQ ID NO: 1977449 - RNA, 19 nt, Artificial Sequence
  Description of Artificial Sequence: Synthetic oligonucleotide
  Antisense strand to SEQ ID NO: 1977448
uuugguaaaggcauuaccu

SEQ ID NO: 1977450 - RNA, 19 nt, Artificial Sequence
  Description of Artificial Sequence: Synthetic oligonucleotide
  Sense strand starting at position 309 of SEQ ID NO: 1880572
aucauauaauagucacagu

SEQ ID NO: 1977451 - RNA, 19 nt, Artificial Sequence
  Description of Artificial Sequence: Synthetic oligonucleotide
  Antisense strand to SEQ ID NO: 1977450
acugugacuauuauaugau

SEQ ID NO: 1977452 - RNA, 19 nt, Artificial Sequence
  Description of Artificial Sequence: Synthetic oligonucleotide
  Sense strand starting at position 374 of SEQ ID NO: 1880572
ucucaaagacguuaguauc

SEQ ID NO: 1977453 - RNA, 19 nt, Artificial Sequence
  Description of Artificial Sequence: Synthetic oligonucleotide
  Antisense strand to SEQ ID NO: 1977452
gauacuaacgucuuugaga

SEQ ID NO: 1977454 - RNA, 19 nt, Artificial Sequence
  Description of Artificial Sequence: Synthetic oligonucleotide
  Sense strand starting at position 406 of SEQ ID NO: 1880572
uuaugaaacggaugcucaa

SEQ ID NO: 1977455 - RNA, 19 nt, Artificial Sequence
  Description of Artificial Sequence: Synthetic oligonucleotide
  Antisense strand to SEQ ID NO: 1977454
uugagcauccguuucauaa

SEQ ID NO: 1977456 - RNA, 19 nt, Artificial Sequence
  Description of Artificial Sequence: Synthetic oligonucleotide
  Sense strand starting at position 489 of SEQ ID NO: 1880572
ggcuuuagacuguaaaucu

SEQ ID NO: 1977457 - RNA, 19 nt, Artificial Sequence
  Description of Artificial Sequence: Synthetic oligonucleotide
  Antisense strand to SEQ ID NO: 1977456
agauuuacagucuaaagcc

SEQ ID NO: 1977458 - RNA, 19 nt, Artificial Sequence
  Description of Artificial Sequence: Synthetic oligonucleotide
  Sense strand starting at position 757 of SEQ ID NO: 1880572
ggaugaguggauugaugug

SEQ ID NO: 1977459 - RNA, 19 nt, Artificial Sequence
  Description of Artificial Sequence: Synthetic oligonucleotide
  Antisense strand to SEQ ID NO: 1977458
cacaucaauccacucaucc

SEQ ID NO: 1977460 - RNA, 19 nt, Artificial Sequence
  Description of Artificial Sequence: Synthetic oligonucleotide
  Sense strand starting at position 762 of SEQ ID NO: 1880572
aguggauugaugugagaau

SEQ ID NO: 1977461 - RNA, 19 nt, Artificial Sequence
  Description of Artificial Sequence: Synthetic oligonucleotide
  Antisense strand to SEQ ID NO: 1977460
auucucacaucaauccacu

SEQ ID NO: 1977462 - RNA, 19 nt, Artificial Sequence
  Description of Artificial Sequence: Synthetic oligonucleotide
  Sense strand starting at position 795 of SEQ ID NO: 1880572
guaaucaaauucccaugua

SEQ ID NO: 1977463 - RNA, 19 nt, Artificial Sequence
  Description of Artificial Sequence: Synthetic oligonucleotide
  Antisense strand to SEQ ID NO: 1977462
uacaugggaauuugauuac

SEQ ID NO: 1977464 - RNA, 19 nt, Artificial Sequence
  Description of Artificial Sequence: Synthetic oligonucleotide
  Sense strand starting at position 1060 of SEQ ID NO: 1880572
gccuucugauuugcuuauu

SEQ ID NO: 1977465 - RNA, 19 nt, Artificial Sequence
  Description of Artificial Sequence: Synthetic oligonucleotide
  Antisense strand to SEQ ID NO: 1977464
aauaagcaaaucagaaggc

SEQ ID NO: 1977466 - RNA, 19 nt, Artificial Sequence
  Description of Artificial Sequence: Synthetic oligonucleotide
  Sense strand starting at position 1218 of SEQ ID NO: 1880572
ugcacauaugcauguauuu

SEQ ID NO: 1977467 - RNA, 19 nt, Artificial Sequence
  Description of Artificial Sequence: Synthetic oligonucleotide
  Antisense strand to SEQ ID NO: 1977466
aaauacaugcauaugugca

SEQ ID NO: 1977468 - RNA, 19 nt, Artificial Sequence
  Description of Artificial Sequence: Synthetic oligonucleotide
  Sense strand starting at position 1393 of SEQ ID NO: 1880572
cuuaguauagucuauagaa

SEQ ID NO: 1977469 - RNA, 19 nt, Artificial Sequence
  Description of Artificial Sequence: Synthetic oligonucleotide
  Antisense strand to SEQ ID NO: 1977468
uucuauagacuauacuaag

SEQ ID NO: 1977470 - RNA, 19 nt, Artificial Sequence
  Description of Artificial Sequence: Synthetic oligonucleotide
  Sense strand starting at position 1445 of SEQ ID NO: 1880572
gggcaagaggacuguaaau

SEQ ID NO: 1977471 - RNA, 19 nt, Artificial Sequence
  Description of Artificial Sequence: Synthetic oligonucleotide
  Antisense strand to SEQ ID NO: 1977470
auuuacaguccucuugccc

SEQ ID NO: 1977472 - RNA, 19 nt, Artificial Sequence
  Description of Artificial Sequence: Synthetic oligonucleotide
  Sense strand starting at position 1499 of SEQ ID NO: 1880572
auuuguuuguaugcagcaa

SEQ ID NO: 1977473 - RNA, 19 nt, Artificial Sequence
  Description of Artificial Sequence: Synthetic oligonucleotide
  Antisense strand to SEQ ID NO: 1977472
uugcugcauacaaacaaau

SEQ ID NO: 1977474 - RNA, 19 nt, Artificial Sequence
  Description of Artificial Sequence: Synthetic oligonucleotide
  Sense strand starting at position 1651 of SEQ ID NO: 1880572
gggagcuugcaauacaauu

SEQ ID NO: 1977475 - RNA, 19 nt, Artificial Sequence
  Description of Artificial Sequence: Synthetic oligonucleotide
  Antisense strand to SEQ ID NO: 1977474
aauuguauugcaagcuccc

SEQ ID NO: 1977476 - RNA, 19 nt, Artificial Sequence
  Description of Artificial Sequence: Synthetic oligonucleotide
  Sense strand starting at position 1662 of SEQ ID NO: 1880572
auacaauuugugugcauau

SEQ ID NO: 1977477 - RNA, 19 nt, Artificial Sequence
  Description of Artificial Sequence: Synthetic oligonucleotide
  Antisense strand to SEQ ID NO: 1977476
auaugcacacaaauuguau

SEQ ID NO: 1977478 - RNA, 19 nt, Artificial Sequence
  Description of Artificial Sequence: Synthetic oligonucleotide
  Sense strand starting at position 1673 of SEQ ID NO: 1880572
gugcauaucagguagaaau

SEQ ID NO: 1977479 - RNA, 19 nt, Artificial Sequence
  Description of Artificial Sequence: Synthetic oligonucleotide
  Antisense strand to SEQ ID NO: 1977478
auuucuaccugauaugcac

SEQ ID NO: 1977480 - RNA, 19 nt, Artificial Sequence
  Description of Artificial Sequence: Synthetic oligonucleotide
  Sense strand starting at position 1753 of SEQ ID NO: 1880572
acaagauacuuuguagauc

SEQ ID NO: 1977481 - RNA, 19 nt, Artificial Sequence
  Description of Artificial Sequence: Synthetic oligonucleotide
  Antisense strand to SEQ ID NO: 1977480
gaucuacaaaguaucuugu

SEQ ID NO: 1977482 - RNA, 19 nt, Artificial Sequence
  Description of Artificial Sequence: Synthetic oligonucleotide
  Sense strand starting at position 1772 of SEQ ID NO: 1880572
acagaauaccuuggucuuu

SEQ ID NO: 1977483 - RNA, 19 nt, Artificial Sequence
  Description of Artificial Sequence: Synthetic oligonucleotide
  Antisense strand to SEQ ID NO: 1977482
aaagaccaagguauucugu

SEQ ID NO: 1977484 - RNA, 19 nt, Artificial Sequence
  Description of Artificial Sequence: Synthetic oligonucleotide
  Sense strand starting at position 1929 of SEQ ID NO: 1880572
ugcuucuuugccucuguua

SEQ ID NO: 1977485 - RNA, 19 nt, Artificial Sequence
  Description of Artificial Sequence: Synthetic oligonucleotide
  Antisense strand to SEQ ID NO: 1977484
uaacagaggcaaagaagca

SEQ ID NO: 1977486 - RNA, 19 nt, Artificial Sequence
  Description of Artificial Sequence: Synthetic oligonucleotide
  Sense strand starting at position 1990 of SEQ ID NO: 1880572
uguucugaauauguacaaa

SEQ ID NO: 1977487 - RNA, 19 nt, Artificial Sequence
  Description of Artificial Sequence: Synthetic oligonucleotide
  Antisense strand to SEQ ID NO: 1977486
uuuguacauauucagaaca

SEQ ID NO: 1977488 - RNA, 19 nt, Artificial Sequence
  Description of Artificial Sequence: Synthetic oligonucleotide
  Sense strand starting at position 2032 of SEQ ID NO: 1880572
accauagaacccuguggaa

SEQ ID NO: 1977489 - RNA, 19 nt, Artificial Sequence
  Description of Artificial Sequence: Synthetic oligonucleotide
  Antisense strand to SEQ ID NO: 1977488
uuccacaggguucuauggu

SEQ ID NO: 1977490 - RNA, 19 nt, Artificial Sequence
  Description of Artificial Sequence: Synthetic oligonucleotide
  Sense strand starting at position 2136 of SEQ ID NO: 1880572
agaaaugauacuuggcgau

SEQ ID NO: 1977491 - RNA, 19 nt, Artificial Sequence
  Description of Artificial Sequence: Synthetic oligonucleotide
  Antisense strand to SEQ ID NO: 1977490
aucgccaaguaucauuucu

SEQ ID NO: 1977492 - RNA, 19 nt, Artificial Sequence
  Description of Artificial Sequence: Synthetic oligonucleotide
  Sense strand starting at position 2471 of SEQ ID NO: 1880572
ugguguugaauuggaugga

SEQ ID NO: 1977493 - RNA, 19 nt, Artificial Sequence
  Description of Artificial Sequence: Synthetic oligonucleotide
  Antisense strand to SEQ ID NO: 1977492
uccauccaauucaacacca

SEQ ID NO: 1977494 - RNA, 19 nt, Artificial Sequence
  Description of Artificial Sequence: Synthetic oligonucleotide
  Sense strand starting at position 2522 of SEQ ID NO: 1880572
gaugaugcuagaugaucga

SEQ ID NO: 1977495 - RNA, 19 nt, Artificial Sequence
  Description of Artificial Sequence: Synthetic oligonucleotide
  Antisense strand to SEQ ID NO: 1977494
ucgaucaucuagcaucauc

SEQ ID NO: 1977496 - RNA, 19 nt, Artificial Sequence
  Description of Artificial Sequence: Synthetic oligonucleotide
  Sense strand starting at position 2639 of SEQ ID NO: 1880572
gaggccuuucuccaaaguu

SEQ ID NO: 1977497 - RNA, 19 nt, Artificial Sequence
  Description of Artificial Sequence: Synthetic oligonucleotide
  Antisense strand to SEQ ID NO: 1977496
aacuuuggagaaaggccuc

SEQ ID NO: 1977498 - RNA, 19 nt, Artificial Sequence
  Description of Artificial Sequence: Synthetic oligonucleotide
  Sense strand starting at position 2953 of SEQ ID NO: 1880572
gcaucacaggcagauuaaa

SEQ ID NO: 1977499 - RNA, 19 nt, Artificial Sequence
  Description of Artificial Sequence: Synthetic oligonucleotide
  Antisense strand to SEQ ID NO: 1977498
uuuaaucugccugugaugc

SEQ ID NO: 1977500 - RNA, 19 nt, Artificial Sequence
  Description of Artificial Sequence: Synthetic oligonucleotide
  Sense strand starting at position 2971 of SEQ ID NO: 1880572
aauguuguaggauacuauu

SEQ ID NO: 1977501 - RNA, 19 nt, Artificial Sequence
  Description of Artificial Sequence: Synthetic oligonucleotide
  Antisense strand to SEQ ID NO: 1977500
aauaguauccuacaacauu

SEQ ID NO: 1977502 - RNA, 19 nt, Artificial Sequence
  Description of Artificial Sequence: Synthetic oligonucleotide
  Sense strand starting at position 3047 of SEQ ID NO: 1880572
cuugaaugaugcuuucuaa

SEQ ID NO: 1977503 - RNA, 19 nt, Artificial Sequence
  Description of Artificial Sequence: Synthetic oligonucleotide
  Antisense strand to SEQ ID NO: 1977502
uuagaaagcaucauucaag

SEQ ID NO: 1977504 - RNA, 19 nt, Artificial Sequence
  Description of Artificial Sequence: Synthetic oligonucleotide
  Sense strand starting at position 3138 of SEQ ID NO: 1880572
uguccuauugguuauuaaa

SEQ ID NO: 1977505 - RNA, 19 nt, Artificial Sequence
  Description of Artificial Sequence: Synthetic oligonucleotide
  Antisense strand to SEQ ID NO: 1977504
uuuaauaaccaauaggaca

SEQ ID NO: 1977506 - RNA, 19 nt, Artificial Sequence
  Description of Artificial Sequence: Synthetic oligonucleotide
  Sense strand starting at position 3206 of SEQ ID NO: 1880572
uauacaggucagugggaua

SEQ ID NO: 1977507 - RNA, 19 nt, Artificial Sequence
  Description of Artificial Sequence: Synthetic oligonucleotide
  Antisense strand to SEQ ID NO: 1977506
uaucccacugaccuguaua

SEQ ID NO: 1977508 - RNA, 19 nt, Artificial Sequence
  Description of Artificial Sequence: Synthetic oligonucleotide
  Sense strand starting at position 3213 of SEQ ID NO: 1880572
gucagugggauaugauaaa

SEQ ID NO: 1977509 - RNA, 19 nt, Artificial Sequence
  Description of Artificial Sequence: Synthetic oligonucleotide
  Antisense strand to SEQ ID NO: 1977508
uuuaucauaucccacugac

SEQ ID NO: 1977510 - RNA, 19 nt, Artificial Sequence
  Description of Artificial Sequence: Synthetic oligonucleotide
  Sense strand starting at position 3320 of SEQ ID NO: 1880572
uaaugauguggguaccauu

SEQ ID NO: 1977511 - RNA, 19 nt, Artificial Sequence
  Description of Artificial Sequence: Synthetic oligonucleotide
  Antisense strand to SEQ ID NO: 1977510
aaugguacccacaucauua

SEQ ID NO: 1977512 - RNA, 19 nt, Artificial Sequence
  Description of Artificial Sequence: Synthetic oligonucleotide
  Sense strand starting at position 3513 of SEQ ID NO: 1880572
gugugauuauauuuggugu

SEQ ID NO: 1977513 - RNA, 19 nt, Artificial Sequence
  Description of Artificial Sequence: Synthetic oligonucleotide
  Antisense strand to SEQ ID NO: 1977512
acaccaaauauaaucacac

SEQ ID NO: 1977514 - RNA, 19 nt, Artificial Sequence
  Description of Artificial Sequence: Synthetic oligonucleotide
  Sense strand starting at position 3514 of SEQ ID NO: 1880572
ugugauuauauuugguguu

SEQ ID NO: 1977515 - RNA, 19 nt, Artificial Sequence
  Description of Artificial Sequence: Synthetic oligonucleotide
  Antisense strand to SEQ ID NO: 1977514
aacaccaaauauaaucaca

SEQ ID NO: 1977516 - RNA, 19 nt, Artificial Sequence
  Description of Artificial Sequence: Synthetic oligonucleotide
  Sense strand starting at position 3527 of SEQ ID NO: 1880572
gguguugauaaggauguga

SEQ ID NO: 1977517 - RNA, 19 nt, Artificial Sequence
  Description of Artificial Sequence: Synthetic oligonucleotide
  Antisense strand to SEQ ID NO: 1977516
ucacauccuuaucaacacc

SEQ ID NO: 1977518 - RNA, 19 nt, Artificial Sequence
  Description of Artificial Sequence: Synthetic oligonucleotide
  Sense strand starting at position 3538 of SEQ ID NO: 1880572
ggaugugaggaccaagcuu

SEQ ID NO: 1977519 - RNA, 19 nt, Artificial Sequence
  Description of Artificial Sequence: Synthetic oligonucleotide
  Antisense strand to SEQ ID NO: 1977518
aagcuugguccucacaucc

SEQ ID NO: 1977520 - RNA, 19 nt, Artificial Sequence
  Description of Artificial Sequence: Synthetic oligonucleotide
  Sense strand starting at position 3701 of SEQ ID NO: 1880572
cuagaaagguguccuacau

SEQ ID NO: 1977521 - RNA, 19 nt, Artificial Sequence
  Description of Artificial Sequence: Synthetic oligonucleotide
  Antisense strand to SEQ ID NO: 1977520
auguaggacaccuuucuag

SEQ ID NO: 1977522 - RNA, 19 nt, Artificial Sequence
  Description of Artificial Sequence: Synthetic oligonucleotide
  Sense strand starting at position 3711 of SEQ ID NO: 1880572
guccuacauguacaauuaa

SEQ ID NO: 1977523 - RNA, 19 nt, Artificial Sequence
  Description of Artificial Sequence: Synthetic oligonucleotide
  Antisense strand to SEQ ID NO: 1977522
uuaauuguacauguaggac

SEQ ID NO: 1977524 - RNA, 19 nt, Artificial Sequence
  Description of Artificial Sequence: Synthetic oligonucleotide
  Sense strand starting at position 3741 of SEQ ID NO: 1880572
augacaagaguauguacau

SEQ ID NO: 1977525 - RNA, 19 nt, Artificial Sequence
  Description of Artificial Sequence: Synthetic oligonucleotide
  Antisense strand to SEQ ID NO: 1977524
auguacauacucuugucau

SEQ ID NO: 1977526 - RNA, 19 nt, Artificial Sequence
  Description of Artificial Sequence: Synthetic oligonucleotide
  Sense strand starting at position 3860 of SEQ ID NO: 1880572
ugccauuaugagugagaga

SEQ ID NO: 1977527 - RNA, 19 nt, Artificial Sequence
  Description of Artificial Sequence: Synthetic oligonucleotide
  Antisense strand to SEQ ID NO: 1977526
ucucucacucauaauggca

SEQ ID NO: 1977528 - RNA, 19 nt, Artificial Sequence
  Description of Artificial Sequence: Synthetic oligonucleotide
  Sense strand starting at position 13 of SEQ ID NO: 1880573
gcuaauauuuguuucuuga

SEQ ID NO: 1977529 - RNA, 19 nt, Artificial Sequence
  Description of Artificial Sequence: Synthetic oligonucleotide
  Antisense strand to SEQ ID NO: 1977528
ucaagaaacaaauauuagc

SEQ ID NO: 1977530 - RNA, 19 nt, Artificial Sequence
  Description of Artificial Sequence: Synthetic oligonucleotide
  Sense strand starting at position 24 of SEQ ID NO: 1880573
uuucuugagcuuuagacuu

SEQ ID NO: 1977531 - RNA, 19 nt, Artificial Sequence
  Description of Artificial Sequence: Synthetic oligonucleotide
  Antisense strand to SEQ ID NO: 1977530
aagucuaaagcucaagaaa

SEQ ID NO: 1977532 - RNA, 19 nt, Artificial Sequence
  Description of Artificial Sequence: Synthetic oligonucleotide
  Sense strand starting at position 43 of SEQ ID NO: 1880573
uuucuaguguguuuggauu

SEQ ID NO: 1977533 - RNA, 19 nt, Artificial Sequence
  Description of Artificial Sequence: Synthetic oligonucleotide
  Antisense strand to SEQ ID NO: 1977532
aauccaaacacacuagaaa

SEQ ID NO: 1977534 - RNA, 19 nt, Artificial Sequence
  Description of Artificial Sequence: Synthetic oligonucleotide
  Sense strand starting at position 80 of SEQ ID NO: 1880573
uauaaauauccugacguag

SEQ ID NO: 1977535 - RNA, 19 nt, Artificial Sequence
  Description of Artificial Sequence: Synthetic oligonucleotide
  Antisense strand to SEQ ID NO: 1977534
cuacgucaggauauuuaua

SEQ ID NO: 1977536 - RNA, 19 nt, Artificial Sequence
  Description of Artificial Sequence: Synthetic oligonucleotide
  Sense strand starting at position 91 of SEQ ID NO: 1880573
ugacguagauucuuuccuu

SEQ ID NO: 1977537 - RNA, 19 nt, Artificial Sequence
  Description of Artificial Sequence: Synthetic oligonucleotide
  Antisense strand to SEQ ID NO: 1977536
aaggaaagaaucuacguca

SEQ ID NO: 1977538 - RNA, 19 nt, Artificial Sequence
  Description of Artificial Sequence: Synthetic oligonucleotide
  Sense strand starting at position 130 of SEQ ID NO: 1880573
aagaucacccagugaguaa

SEQ ID NO: 1977539 - RNA, 19 nt, Artificial Sequence
  Description of Artificial Sequence: Synthetic oligonucleotide
  Antisense strand to SEQ ID NO: 1977538
uuacucacugggugaucuu

SEQ ID NO: 1977540 - RNA, 19 nt, Artificial Sequence
  Description of Artificial Sequence: Synthetic oligonucleotide
  Sense strand starting at position 732 of SEQ ID NO: 1880573
gucaauugauguuugacca

SEQ ID NO: 1977541 - RNA, 19 nt, Artificial Sequence
  Description of Artificial Sequence: Synthetic oligonucleotide
  Antisense strand to SEQ ID NO: 1977540
uggucaaacaucaauugac

SEQ ID NO: 1977542 - RNA, 19 nt, Artificial Sequence
  Description of Artificial Sequence: Synthetic oligonucleotide
  Sense strand starting at position 733 of SEQ ID NO: 1880573
ucaauugauguuugaccaa

SEQ ID NO: 1977543 - RNA, 19 nt, Artificial Sequence
  Description of Artificial Sequence: Synthetic oligonucleotide
  Antisense strand to SEQ ID NO: 1977542
uuggucaaacaucaauuga

SEQ ID NO: 1977544 - RNA, 19 nt, Artificial Sequence
  Description of Artificial Sequence: Synthetic oligonucleotide
  Sense strand starting at position 947 of SEQ ID NO: 1880573
ucuagauaaccuuggcuuu

SEQ ID NO: 1977545 - RNA, 19 nt, Artificial Sequence
  Description of Artificial Sequence: Synthetic oligonucleotide
  Antisense strand to SEQ ID NO: 1977544
aaagccaagguuaucuaga

SEQ ID NO: 1977546 - RNA, 19 nt, Artificial Sequence
  Description of Artificial Sequence: Synthetic oligonucleotide
  Sense strand starting at position 1163 of SEQ ID NO: 1880573
uucugaaauuaucuguaga

SEQ ID NO: 1977547 - RNA, 19 nt, Artificial Sequence
  Description of Artificial Sequence: Synthetic oligonucleotide
  Antisense strand to SEQ ID NO: 1977546
ucuacagauaauuucagaa

SEQ ID NO: 1977548 - RNA, 19 nt, Artificial Sequence
  Description of Artificial Sequence: Synthetic oligonucleotide
  Sense strand starting at position 1165 of SEQ ID NO: 1880573
cugaaauuaucuguagaga

SEQ ID NO: 1977549 - RNA, 19 nt, Artificial Sequence
  Description of Artificial Sequence: Synthetic oligonucleotide
  Antisense strand to SEQ ID NO: 1977548
ucucuacagauaauuucag

SEQ ID NO: 1977550 - RNA, 19 nt, Artificial Sequence
  Description of Artificial Sequence: Synthetic oligonucleotide
  Sense strand starting at position 1608 of SEQ ID NO: 1880573
cgacguaugucaucaggaa

SEQ ID NO: 1977551 - RNA, 19 nt, Artificial Sequence
  Description of Artificial Sequence: Synthetic oligonucleotide
  Antisense strand to SEQ ID NO: 1977550
uuccugaugacauacgucg

SEQ ID NO: 1977552 - RNA, 19 nt, Artificial Sequence
  Description of Artificial Sequence: Synthetic oligonucleotide
  Sense strand starting at position 1609 of SEQ ID NO: 1880573
gacguaugucaucaggaaa

SEQ ID NO: 1977553 - RNA, 19 nt, Artificial Sequence
  Description of Artificial Sequence: Synthetic oligonucleotide
  Antisense strand to SEQ ID NO: 1977552
uuuccugaugacauacguc

SEQ ID NO: 1977554 - RNA, 19 nt, Artificial Sequence
  Description of Artificial Sequence: Synthetic oligonucleotide
  Sense strand starting at position 1696 of SEQ ID NO: 1880573
auguaagguaccuggaagu

SEQ ID NO: 1977555 - RNA, 19 nt, Artificial Sequence
  Description of Artificial Sequence: Synthetic oligonucleotide
  Antisense strand to SEQ ID NO: 1977554
acuuccagguaccuuacau

SEQ ID NO: 1977556 - RNA, 19 nt, Artificial Sequence
  Description of Artificial Sequence: Synthetic oligonucleotide
  Sense strand starting at position 1711 of SEQ ID NO: 1880573
aagugcuucggucaaggaa

SEQ ID NO: 1977557 - RNA, 19 nt, Artificial Sequence
  Description of Artificial Sequence: Synthetic oligonucleotide
  Antisense strand to SEQ ID NO: 1977556
uuccuugaccgaagcacuu

SEQ ID NO: 1977558 - RNA, 19 nt, Artificial Sequence
  Description of Artificial Sequence: Synthetic oligonucleotide
  Sense strand starting at position 1856 of SEQ ID NO: 1880573
agguauaacugcccuguua

SEQ ID NO: 1977559 - RNA, 19 nt, Artificial Sequence
  Description of Artificial Sequence: Synthetic oligonucleotide
  Antisense strand to SEQ ID NO: 1977558
uaacagggcaguuauaccu

SEQ ID NO: 1977560 - RNA, 19 nt, Artificial Sequence
  Description of Artificial Sequence: Synthetic oligonucleotide
  Sense strand starting at position 1858 of SEQ ID NO: 1880573
guauaacugcccuguuaac

SEQ ID NO: 1977561 - RNA, 19 nt, Artificial Sequence
  Description of Artificial Sequence: Synthetic oligonucleotide
  Antisense strand to SEQ ID NO: 1977560
guuaacagggcaguuauac

SEQ ID NO: 1977562 - RNA, 19 nt, Artificial Sequence
  Description of Artificial Sequence: Synthetic oligonucleotide
  Sense strand starting at position 1914 of SEQ ID NO: 1880573
ccugaaauggcuugucaug

SEQ ID NO: 1977563 - RNA, 19 nt, Artificial Sequence
  Description of Artificial Sequence: Synthetic oligonucleotide
  Antisense strand to SEQ ID NO: 1977562
caugacaagccauuucagg

SEQ ID NO: 1977564 - RNA, 19 nt, Artificial Sequence
  Description of Artificial Sequence: Synthetic oligonucleotide
  Sense strand starting at position 1916 of SEQ ID NO: 1880573
ugaaauggcuugucauggu

SEQ ID NO: 1977565 - RNA, 19 nt, Artificial Sequence
  Description of Artificial Sequence: Synthetic oligonucleotide
  Antisense strand to SEQ ID NO: 1977564
accaugacaagccauuuca

SEQ ID NO: 1977566 - RNA, 19 nt, Artificial Sequence
  Description of Artificial Sequence: Synthetic oligonucleotide
  Sense strand starting at position 2233 of SEQ ID NO: 1880573
uaacaugugguguagucau

SEQ ID NO: 1977567 - RNA, 19 nt, Artificial Sequence
  Description of Artificial Sequence: Synthetic oligonucleotide
  Antisense strand to SEQ ID NO: 1977566
augacuacaccacauguua

SEQ ID NO: 1977568 - RNA, 19 nt, Artificial Sequence
  Description of Artificial Sequence: Synthetic oligonucleotide
  Sense strand starting at position 2248 of SEQ ID NO: 1880573
ucaugaaccugacaacuga

SEQ ID NO: 1977569 - RNA, 19 nt, Artificial Sequence
  Description of Artificial Sequence: Synthetic oligonucleotide
  Antisense strand to SEQ ID NO: 1977568
ucaguugucagguucauga

SEQ ID NO: 1977570 - RNA, 19 nt, Artificial Sequence
  Description of Artificial Sequence: Synthetic oligonucleotide
  Sense strand starting at position 2351 of SEQ ID NO: 1880573
aggauagauuggcaauuuc

SEQ ID NO: 1977571 - RNA, 19 nt, Artificial Sequence
  Description of Artificial Sequence: Synthetic oligonucleotide
  Antisense strand to SEQ ID NO: 1977570
gaaauugccaaucuauccu

SEQ ID NO: 1977572 - RNA, 19 nt, Artificial Sequence
  Description of Artificial Sequence: Synthetic oligonucleotide
  Sense strand starting at position 2389 of SEQ ID NO: 1880573
guuaccauacgauguagua

SEQ ID NO: 1977573 - RNA, 19 nt, Artificial Sequence
  Description of Artificial Sequence: Synthetic oligonucleotide
  Antisense strand to SEQ ID NO: 1977572
uacuacaucguaugguaac

SEQ ID NO: 1977574 - RNA, 19 nt, Artificial Sequence
  Description of Artificial Sequence: Synthetic oligonucleotide
  Sense strand starting at position 2739 of SEQ ID NO: 1880573
guagaaagaucaguaguug

SEQ ID NO: 1977575 - RNA, 19 nt, Artificial Sequence
  Description of Artificial Sequence: Synthetic oligonucleotide
  Antisense strand to SEQ ID NO: 1977574
caacuacugaucuuucuac

SEQ ID NO: 1977576 - RNA, 19 nt, Artificial Sequence
  Description of Artificial Sequence: Synthetic oligonucleotide
  Sense strand starting at position 2802 of SEQ ID NO: 1880573
agauucuuaggccagugaa

SEQ ID NO: 1977577 - RNA, 19 nt, Artificial Sequence
  Description of Artificial Sequence: Synthetic oligonucleotide
  Antisense strand to SEQ ID NO: 1977576
uucacuggccuaagaaucu

SEQ ID NO: 1977578 - RNA, 19 nt, Artificial Sequence
  Description of Artificial Sequence: Synthetic oligonucleotide
  Sense strand starting at position 2826 of SEQ ID NO: 1880573
ucuguaugaugguuuaaug

SEQ ID NO: 1977579 - RNA, 19 nt, Artificial Sequence
  Description of Artificial Sequence: Synthetic oligonucleotide
  Antisense strand to SEQ ID NO: 1977578
cauuaaaccaucauacaga

SEQ ID NO: 1977580 - RNA, 19 nt, Artificial Sequence
  Description of Artificial Sequence: Synthetic oligonucleotide
  Sense strand starting at position 2941 of SEQ ID NO: 1880573
gugucaauguggguuauca

SEQ ID NO: 1977581 - RNA, 19 nt, Artificial Sequence
  Description of Artificial Sequence: Synthetic oligonucleotide
  Antisense strand to SEQ ID NO: 1977580
ugauaacccacauugacac

SEQ ID NO: 1977582 - RNA, 19 nt, Artificial Sequence
  Description of Artificial Sequence: Synthetic oligonucleotide
  Sense strand starting at position 2943 of SEQ ID NO: 1880573
gucaauguggguuaucaau

SEQ ID NO: 1977583 - RNA, 19 nt, Artificial Sequence
  Description of Artificial Sequence: Synthetic oligonucleotide
  Antisense strand to SEQ ID NO: 1977582
auugauaacccacauugac

SEQ ID NO: 1977584 - RNA, 19 nt, Artificial Sequence
  Description of Artificial Sequence: Synthetic oligonucleotide
  Sense strand starting at position 2945 of SEQ ID NO: 1880573
caauguggguuaucaauug

SEQ ID NO: 1977585 - RNA, 19 nt, Artificial Sequence
  Description of Artificial Sequence: Synthetic oligonucleotide
  Antisense strand to SEQ ID NO: 1977584
caauugauaacccacauug

SEQ ID NO: 1977586 - RNA, 19 nt, Artificial Sequence
  Description of Artificial Sequence: Synthetic oligonucleotide
  Sense strand starting at position 2950 of SEQ ID NO: 1880573
uggguuaucaauugugaca

SEQ ID NO: 1977587 - RNA, 19 nt, Artificial Sequence
  Description of Artificial Sequence: Synthetic oligonucleotide
  Antisense strand to SEQ ID NO: 1977586
ugucacaauugauaaccca

SEQ ID NO: 1977588 - RNA, 19 nt, Artificial Sequence
  Description of Artificial Sequence: Synthetic oligonucleotide
  Sense strand starting at position 3026 of SEQ ID NO: 1880573
cagggaggaugugagauau

SEQ ID NO: 1977589 - RNA, 19 nt, Artificial Sequence
  Description of Artificial Sequence: Synthetic oligonucleotide
  Antisense strand to SEQ ID NO: 1977588
auaucucacauccucccug

SEQ ID NO: 1977590 - RNA, 19 nt, Artificial Sequence
  Description of Artificial Sequence: Synthetic oligonucleotide
  Sense strand starting at position 3048 of SEQ ID NO: 1880573
uguaucuucugguuaauuu

SEQ ID NO: 1977591 - RNA, 19 nt, Artificial Sequence
  Description of Artificial Sequence: Synthetic oligonucleotide
  Antisense strand to SEQ ID NO: 1977590
aaauuaaccagaagauaca

SEQ ID NO: 1977592 - RNA, 19 nt, Artificial Sequence
  Description of Artificial Sequence: Synthetic oligonucleotide
  Sense strand starting at position 3469 of SEQ ID NO: 1880573
agcaguggucuccaaacua

SEQ ID NO: 1977593 - RNA, 19 nt, Artificial Sequence
  Description of Artificial Sequence: Synthetic oligonucleotide
  Antisense strand to SEQ ID NO: 1977592
uaguuuggagaccacugcu

SEQ ID NO: 1977594 - RNA, 19 nt, Artificial Sequence
  Description of Artificial Sequence: Synthetic oligonucleotide
  Sense strand starting at position 3611 of SEQ ID NO: 1880573
agaguacaguugcuagaca

SEQ ID NO: 1977595 - RNA, 19 nt, Artificial Sequence
  Description of Artificial Sequence: Synthetic oligonucleotide
  Antisense strand to SEQ ID NO: 1977594
ugucuagcaacuguacucu

SEQ ID NO: 1977596 - RNA, 19 nt, Artificial Sequence
  Description of Artificial Sequence: Synthetic oligonucleotide
  Sense strand starting at position 3627 of SEQ ID NO: 1880573
acagauaaggacugcuaua

SEQ ID NO: 1977597 - RNA, 19 nt, Artificial Sequence
  Description of Artificial Sequence: Synthetic oligonucleotide
  Antisense strand to SEQ ID NO: 1977596
uauagcaguccuuaucugu

SEQ ID NO: 1977598 - RNA, 19 nt, Artificial Sequence
  Description of Artificial Sequence: Synthetic oligonucleotide
  Sense strand starting at position 3701 of SEQ ID NO: 1880573
cgggcuaguuaagcaauuu

SEQ ID NO: 1977599 - RNA, 19 nt, Artificial Sequence
  Description of Artificial Sequence: Synthetic oligonucleotide
  Antisense strand to SEQ ID NO: 1977598
aaauugcuuaacuagcccg

SEQ ID NO: 1977600 - RNA, 19 nt, Artificial Sequence
  Description of Artificial Sequence: Synthetic oligonucleotide
  Sense strand starting at position 3760 of SEQ ID NO: 1880573
gugaucaccucuucucuga

SEQ ID NO: 1977601 - RNA, 19 nt, Artificial Sequence
  Description of Artificial Sequence: Synthetic oligonucleotide
  Antisense strand to SEQ ID NO: 1977600
ucagagaagaggugaucac

SEQ ID NO: 1977602 - RNA, 19 nt, Artificial Sequence
  Description of Artificial Sequence: Synthetic oligonucleotide
  Sense strand starting at position 3913 of SEQ ID NO: 1880573
ccaagcauccuagauguuu

SEQ ID NO: 1977603 - RNA, 19 nt, Artificial Sequence
  Description of Artificial Sequence: Synthetic oligonucleotide
  Antisense strand to SEQ ID NO: 1977602
aaacaucuaggaugcuugg

SEQ ID NO: 1977604 - RNA, 19 nt, Artificial Sequence
  Description of Artificial Sequence: Synthetic oligonucleotide
  Sense strand starting at position 3960 of SEQ ID NO: 1880573
agauuacaaucugaagagu

SEQ ID NO: 1977605 - RNA, 19 nt, Artificial Sequence
  Description of Artificial Sequence: Synthetic oligonucleotide
  Antisense strand to SEQ ID NO: 1977604
acucuucagauuguaaucu

SEQ ID NO: 1977606 - RNA, 19 nt, Artificial Sequence
  Description of Artificial Sequence: Synthetic oligonucleotide
  Sense strand starting at position 3980 of SEQ ID NO: 1880573
gaaacagaucucuguauga

SEQ ID NO: 1977607 - RNA, 19 nt, Artificial Sequence
  Description of Artificial Sequence: Synthetic oligonucleotide
  Antisense strand to SEQ ID NO: 1977606
ucauacagagaucuguuuc

SEQ ID NO: 1977608 - RNA, 19 nt, Artificial Sequence
  Description of Artificial Sequence: Synthetic oligonucleotide
  Sense strand starting at position 39 of SEQ ID NO: 1880574
gucugucagguguaaagaa

SEQ ID NO: 1977609 - RNA, 19 nt, Artificial Sequence
  Description of Artificial Sequence: Synthetic oligonucleotide
  Antisense strand to SEQ ID NO: 1977608
uucuuuacaccugacagac

SEQ ID NO: 1977610 - RNA, 19 nt, Artificial Sequence
  Description of Artificial Sequence: Synthetic oligonucleotide
  Sense strand starting at position 113 of SEQ ID NO: 1880574
gucugauuccuuuacccuu

SEQ ID NO: 1977611 - RNA, 19 nt, Artificial Sequence
  Description of Artificial Sequence: Synthetic oligonucleotide
  Antisense strand to SEQ ID NO: 1977610
aaggguaaaggaaucagac

SEQ ID NO: 1977612 - RNA, 19 nt, Artificial Sequence
  Description of Artificial Sequence: Synthetic oligonucleotide
  Sense strand starting at position 286 of SEQ ID NO: 1880574
uuagaaagaucugugucac

SEQ ID NO: 1977613 - RNA, 19 nt, Artificial Sequence
  Description of Artificial Sequence: Synthetic oligonucleotide
  Antisense strand to SEQ ID NO: 1977612
gugacacagaucuuucuaa

SEQ ID NO: 1977614 - RNA, 19 nt, Artificial Sequence
  Description of Artificial Sequence: Synthetic oligonucleotide
  Sense strand starting at position 287 of SEQ ID NO: 1880574
uagaaagaucugugucaca

SEQ ID NO: 1977615 - RNA, 19 nt, Artificial Sequence
  Description of Artificial Sequence: Synthetic oligonucleotide
  Antisense strand to SEQ ID NO: 1977614
ugugacacagaucuuucua

SEQ ID NO: 1977616 - RNA, 19 nt, Artificial Sequence
  Description of Artificial Sequence: Synthetic oligonucleotide
  Sense strand starting at position 1077 of SEQ ID NO: 1880574
cccaacuucucuucgggaa

SEQ ID NO: 1977617 - RNA, 19 nt, Artificial Sequence
  Description of Artificial Sequence: Synthetic oligonucleotide
  Antisense strand to SEQ ID NO: 1977616
uucccgaagagaaguuggg

SEQ ID NO: 1977618 - RNA, 19 nt, Artificial Sequence
  Description of Artificial Sequence: Synthetic oligonucleotide
  Sense strand starting at position 1078 of SEQ ID NO: 1880574
ccaacuucucuucgggaaa

SEQ ID NO: 1977619 - RNA, 19 nt, Artificial Sequence
  Description of Artificial Sequence: Synthetic oligonucleotide
  Antisense strand to SEQ ID NO: 1977618
uuucccgaagagaaguugg

SEQ ID NO: 1977620 - RNA, 19 nt, Artificial Sequence
  Description of Artificial Sequence: Synthetic oligonucleotide
  Sense strand starting at position 1836 of SEQ ID NO: 1880574
agcugaaugccaggaauug

SEQ ID NO: 1977621 - RNA, 19 nt, Artificial Sequence
  Description of Artificial Sequence: Synthetic oligonucleotide
  Antisense strand to SEQ ID NO: 1977620
caauuccuggcauucagcu

SEQ ID NO: 1977622 - RNA, 19 nt, Artificial Sequence
  Description of Artificial Sequence: Synthetic oligonucleotide
  Sense strand starting at position 1856 of SEQ ID NO: 1880574
gugaggaguccgggagcaa

SEQ ID NO: 1977623 - RNA, 19 nt, Artificial Sequence
  Description of Artificial Sequence: Synthetic oligonucleotide
  Antisense strand to SEQ ID NO: 1977622
uugcucccggacuccucac

SEQ ID NO: 1977624 - RNA, 19 nt, Artificial Sequence
  Description of Artificial Sequence: Synthetic oligonucleotide
  Sense strand starting at position 1857 of SEQ ID NO: 1880574
ugaggaguccgggagcaaa

SEQ ID NO: 1977625 - RNA, 19 nt, Artificial Sequence
  Description of Artificial Sequence: Synthetic oligonucleotide
  Antisense strand to SEQ ID NO: 1977624
uuugcucccggacuccuca

SEQ ID NO: 1977626 - RNA, 19 nt, Artificial Sequence
  Description of Artificial Sequence: Synthetic oligonucleotide
  Sense strand starting at position 1919 of SEQ ID NO: 1880574
ggacgauaccuguaaguga

SEQ ID NO: 1977627 - RNA, 19 nt, Artificial Sequence
  Description of Artificial Sequence: Synthetic oligonucleotide
  Antisense strand to SEQ ID NO: 1977626
ucacuuacagguaucgucc

SEQ ID NO: 1977628 - RNA, 19 nt, Artificial Sequence
  Description of Artificial Sequence: Synthetic oligonucleotide
  Sense strand starting at position 1995 of SEQ ID NO: 1880574
gagcaaugucaaggugacu

SEQ ID NO: 1977629 - RNA, 19 nt, Artificial Sequence
  Description of Artificial Sequence: Synthetic oligonucleotide
  Antisense strand to SEQ ID NO: 1977628
agucaccuugacauugcuc

SEQ ID NO: 1977630 - RNA, 19 nt, Artificial Sequence
  Description of Artificial Sequence: Synthetic oligonucleotide
  Sense strand starting at position 2200 of SEQ ID NO: 1880574
auccucacauguuugagaa

SEQ ID NO: 1977631 - RNA, 19 nt, Artificial Sequence
  Description of Artificial Sequence: Synthetic oligonucleotide
  Antisense strand to SEQ ID NO: 1977630
uucucaaacaugugaggau

SEQ ID NO: 1977632 - RNA, 19 nt, Artificial Sequence
  Description of Artificial Sequence: Synthetic oligonucleotide
  Sense strand starting at position 2201 of SEQ ID NO: 1880574
uccucacauguuugagaag

SEQ ID NO: 1977633 - RNA, 19 nt, Artificial Sequence
  Description of Artificial Sequence: Synthetic oligonucleotide
  Antisense strand to SEQ ID NO: 1977632
cuucucaaacaugugagga

SEQ ID NO: 1977634 - RNA, 19 nt, Artificial Sequence
  Description of Artificial Sequence: Synthetic oligonucleotide
  Sense strand starting at position 2232 of SEQ ID NO: 1880574
cugucacauggugaguuaa

SEQ ID NO: 1977635 - RNA, 19 nt, Artificial Sequence
  Description of Artificial Sequence: Synthetic oligonucleotide
  Antisense strand to SEQ ID NO: 1977634
uuaacucaccaugugacag

SEQ ID NO: 1977636 - RNA, 19 nt, Artificial Sequence
  Description of Artificial Sequence: Synthetic oligonucleotide
  Sense strand starting at position 2234 of SEQ ID NO: 1880574
gucacauggugaguuaaua

SEQ ID NO: 1977637 - RNA, 19 nt, Artificial Sequence
  Description of Artificial Sequence: Synthetic oligonucleotide
  Antisense strand to SEQ ID NO: 1977636
uauuaacucaccaugugac

SEQ ID NO: 1977638 - RNA, 19 nt, Artificial Sequence
  Description of Artificial Sequence: Synthetic oligonucleotide
  Sense strand starting at position 2271 of SEQ ID NO: 1880574
ccugccagauaugcuaaua

SEQ ID NO: 1977639 - RNA, 19 nt, Artificial Sequence
  Description of Artificial Sequence: Synthetic oligonucleotide
  Antisense strand to SEQ ID NO: 1977638
uauuagcauaucuggcagg

SEQ ID NO: 1977640 - RNA, 19 nt, Artificial Sequence
  Description of Artificial Sequence: Synthetic oligonucleotide
  Sense strand starting at position 2294 of SEQ ID NO: 1880574
ccuuguuaagcguuugagu

SEQ ID NO: 1977641 - RNA, 19 nt, Artificial Sequence
  Description of Artificial Sequence: Synthetic oligonucleotide
  Antisense strand to SEQ ID NO: 1977640
acucaaacgcuuaacaagg

SEQ ID NO: 1977642 - RNA, 19 nt, Artificial Sequence
  Description of Artificial Sequence: Synthetic oligonucleotide
  Sense strand starting at position 2328 of SEQ ID NO: 1880574
cagguaguucugcaagaga

SEQ ID NO: 1977643 - RNA, 19 nt, Artificial Sequence
  Description of Artificial Sequence: Synthetic oligonucleotide
  Antisense strand to SEQ ID NO: 1977642
ucucuugcagaacuaccug

SEQ ID NO: 1977644 - RNA, 19 nt, Artificial Sequence
  Description of Artificial Sequence: Synthetic oligonucleotide
  Sense strand starting at position 2331 of SEQ ID NO: 1880574
guaguucugcaagagauga

SEQ ID NO: 1977645 - RNA, 19 nt, Artificial Sequence
  Description of Artificial Sequence: Synthetic oligonucleotide
  Antisense strand to SEQ ID NO: 1977644
ucaucucuugcagaacuac

SEQ ID NO: 1977646 - RNA, 19 nt, Artificial Sequence
  Description of Artificial Sequence: Synthetic oligonucleotide
  Sense strand starting at position 2391 of SEQ ID NO: 1880574
gaguaaccuggaugcuagu

SEQ ID NO: 1977647 - RNA, 19 nt, Artificial Sequence
  Description of Artificial Sequence: Synthetic oligonucleotide
  Antisense strand to SEQ ID NO: 1977646
acuagcauccagguuacuc

SEQ ID NO: 1977648 - RNA, 19 nt, Artificial Sequence
  Description of Artificial Sequence: Synthetic oligonucleotide
  Sense strand starting at position 2422 of SEQ ID NO: 1880574
guaggaaacucguuugaug

SEQ ID NO: 1977649 - RNA, 19 nt, Artificial Sequence
  Description of Artificial Sequence: Synthetic oligonucleotide
  Antisense strand to SEQ ID NO: 1977648
caucaaacgaguuuccuac

SEQ ID NO: 1977650 - RNA, 19 nt, Artificial Sequence
  Description of Artificial Sequence: Synthetic oligonucleotide
  Sense strand starting at position 2424 of SEQ ID NO: 1880574
aggaaacucguuugaugua

SEQ ID NO: 1977651 - RNA, 19 nt, Artificial Sequence
  Description of Artificial Sequence: Synthetic oligonucleotide
  Antisense strand to SEQ ID NO: 1977650
uacaucaaacgaguuuccu

SEQ ID NO: 1977652 - RNA, 19 nt, Artificial Sequence
  Description of Artificial Sequence: Synthetic oligonucleotide
  Sense strand starting at position 2429 of SEQ ID NO: 1880574
acucguuugauguaguaca

SEQ ID NO: 1977653 - RNA, 19 nt, Artificial Sequence
  Description of Artificial Sequence: Synthetic oligonucleotide
  Antisense strand to SEQ ID NO: 1977652
uguacuacaucaaacgagu

SEQ ID NO: 1977654 - RNA, 19 nt, Artificial Sequence
  Description of Artificial Sequence: Synthetic oligonucleotide
  Sense strand starting at position 2434 of SEQ ID NO: 1880574
uuugauguaguacaagauu

SEQ ID NO: 1977655 - RNA, 19 nt, Artificial Sequence
  Description of Artificial Sequence: Synthetic oligonucleotide
  Antisense strand to SEQ ID NO: 1977654
aaucuuguacuacaucaaa

SEQ ID NO: 1977656 - RNA, 19 nt, Artificial Sequence
  Description of Artificial Sequence: Synthetic oligonucleotide
  Sense strand starting at position 2469 of SEQ ID NO: 1880574
guguuccuccaacauaguu

SEQ ID NO: 1977657 - RNA, 19 nt, Artificial Sequence
  Description of Artificial Sequence: Synthetic oligonucleotide
  Antisense strand to SEQ ID NO: 1977656
aacuauguuggaggaacac

SEQ ID NO: 1977658 - RNA, 19 nt, Artificial Sequence
  Description of Artificial Sequence: Synthetic oligonucleotide
  Sense strand starting at position 2497 of SEQ ID NO: 1880574
aguuaaucugaaugcagaa

SEQ ID NO: 1977659 - RNA, 19 nt, Artificial Sequence
  Description of Artificial Sequence: Synthetic oligonucleotide
  Antisense strand to SEQ ID NO: 1977658
uucugcauucagauuaacu

SEQ ID NO: 1977660 - RNA, 19 nt, Artificial Sequence
  Description of Artificial Sequence: Synthetic oligonucleotide
  Sense strand starting at position 2525 of SEQ ID NO: 1880574
ugagaauacgagcauucca

SEQ ID NO: 1977661 - RNA, 19 nt, Artificial Sequence
  Description of Artificial Sequence: Synthetic oligonucleotide
  Antisense strand to SEQ ID NO: 1977660
uggaaugcucguauucuca

SEQ ID NO: 1977662 - RNA, 19 nt, Artificial Sequence
  Description of Artificial Sequence: Synthetic oligonucleotide
  Sense strand starting at position 2568 of SEQ ID NO: 1880574
cgacguugucacuaaugaa

SEQ ID NO: 1977663 - RNA, 19 nt, Artificial Sequence
  Description of Artificial Sequence: Synthetic oligonucleotide
  Antisense strand to SEQ ID NO: 1977662
uucauuagugacaacgucg

SEQ ID NO: 1977664 - RNA, 19 nt, Artificial Sequence
  Description of Artificial Sequence: Synthetic oligonucleotide
  Sense strand starting at position 2575 of SEQ ID NO: 1880574
gucacuaaugaaugagacu

SEQ ID NO: 1977665 - RNA, 19 nt, Artificial Sequence
  Description of Artificial Sequence: Synthetic oligonucleotide
  Antisense strand to SEQ ID NO: 1977664
agucucauucauuagugac

SEQ ID NO: 1977666 - RNA, 19 nt, Artificial Sequence
  Description of Artificial Sequence: Synthetic oligonucleotide
  Sense strand starting at position 2707 of SEQ ID NO: 1880574
ggcagcugucuagaggaaa

SEQ ID NO: 1977667 - RNA, 19 nt, Artificial Sequence
  Description of Artificial Sequence: Synthetic oligonucleotide
  Antisense strand to SEQ ID NO: 1977666
uuuccucuagacagcugcc

SEQ ID NO: 1977668 - RNA, 19 nt, Artificial Sequence
  Description of Artificial Sequence: Synthetic oligonucleotide
  Sense strand starting at position 2935 of SEQ ID NO: 1880574
cucacauuaggaugaguaa

SEQ ID NO: 1977669 - RNA, 19 nt, Artificial Sequence
  Description of Artificial Sequence: Synthetic oligonucleotide
  Antisense strand to SEQ ID NO: 1977668
uuacucauccuaaugugag

SEQ ID NO: 1977670 - RNA, 19 nt, Artificial Sequence
  Description of Artificial Sequence: Synthetic oligonucleotide
  Sense strand starting at position 3020 of SEQ ID NO: 1880574
gugaauugacgaugagaca

SEQ ID NO: 1977671 - RNA, 19 nt, Artificial Sequence
  Description of Artificial Sequence: Synthetic oligonucleotide
  Antisense strand to SEQ ID NO: 1977670
ugucucaucgucaauucac

SEQ ID NO: 1977672 - RNA, 19 nt, Artificial Sequence
  Description of Artificial Sequence: Synthetic oligonucleotide
  Sense strand starting at position 3050 of SEQ ID NO: 1880574
accgaaauguauucaggga

SEQ ID NO: 1977673 - RNA, 19 nt, Artificial Sequence
  Description of Artificial Sequence: Synthetic oligonucleotide
  Antisense strand to SEQ ID NO: 1977672
ucccugaauacauuucggu

SEQ ID NO: 1977674 - RNA, 19 nt, Artificial Sequence
  Description of Artificial Sequence: Synthetic oligonucleotide
  Sense strand starting at position 3267 of SEQ ID NO: 1880574
caagcauaacuguaguaag

SEQ ID NO: 1977675 - RNA, 19 nt, Artificial Sequence
  Description of Artificial Sequence: Synthetic oligonucleotide
  Antisense strand to SEQ ID NO: 1977674
cuuacuacaguuaugcuug

SEQ ID NO: 1977676 - RNA, 19 nt, Artificial Sequence
  Description of Artificial Sequence: Synthetic oligonucleotide
  Sense strand starting at position 3401 of SEQ ID NO: 1880574
aaguguuggguuuaccagu

SEQ ID NO: 1977677 - RNA, 19 nt, Artificial Sequence
  Description of Artificial Sequence: Synthetic oligonucleotide
  Antisense strand to SEQ ID NO: 1977676
acugguaaacccaacacuu

SEQ ID NO: 1977678 - RNA, 19 nt, Artificial Sequence
  Description of Artificial Sequence: Synthetic oligonucleotide
  Sense strand starting at position 3465 of SEQ ID NO: 1880574
ugauaaguucuuugcuuaa

SEQ ID NO: 1977679 - RNA, 19 nt, Artificial Sequence
  Description of Artificial Sequence: Synthetic oligonucleotide
  Antisense strand to SEQ ID NO: 1977678
uuaagcaaagaacuuauca

SEQ ID NO: 1977680 - RNA, 19 nt, Artificial Sequence
  Description of Artificial Sequence: Synthetic oligonucleotide
  Sense strand starting at position 3856 of SEQ ID NO: 1880574
ggaaguggcaggcagaaau

SEQ ID NO: 1977681 - RNA, 19 nt, Artificial Sequence
  Description of Artificial Sequence: Synthetic oligonucleotide
  Antisense strand to SEQ ID NO: 1977680
auuucugccugccacuucc

SEQ ID NO: 1977682 - RNA, 19 nt, Artificial Sequence
  Description of Artificial Sequence: Synthetic oligonucleotide
  Sense strand starting at position 3960 of SEQ ID NO: 1880574
gacaaugaagccuaguuua

SEQ ID NO: 1977683 - RNA, 19 nt, Artificial Sequence
  Description of Artificial Sequence: Synthetic oligonucleotide
  Antisense strand to SEQ ID NO: 1977682
uaaacuaggcuucauuguc

SEQ ID NO: 1977684 - RNA, 19 nt, Artificial Sequence
  Description of Artificial Sequence: Synthetic oligonucleotide
  Sense strand starting at position 3978 of SEQ ID NO: 1880574
agucuuuauccuuggauau

SEQ ID NO: 1977685 - RNA, 19 nt, Artificial Sequence
  Description of Artificial Sequence: Synthetic oligonucleotide
  Antisense strand to SEQ ID NO: 1977684
auauccaaggauaaagacu

SEQ ID NO: 1977686 - RNA, 19 nt, Artificial Sequence
  Description of Artificial Sequence: Synthetic oligonucleotide
  Sense strand starting at position 3979 of SEQ ID NO: 1880574
gucuuuauccuuggauauu

SEQ ID NO: 1977687 - RNA, 19 nt, Artificial Sequence
  Description of Artificial Sequence: Synthetic oligonucleotide
  Antisense strand to SEQ ID NO: 1977686
aauauccaaggauaaagac

SEQ ID NO: 1977688 - RNA, 19 nt, Artificial Sequence
  Description of Artificial Sequence: Synthetic oligonucleotide
  Sense strand starting at position 56 of SEQ ID NO: 1880575
uuguauguagauugaauga

SEQ ID NO: 1977689 - RNA, 19 nt, Artificial Sequence
  Description of Artificial Sequence: Synthetic oligonucleotide
  Antisense strand to SEQ ID NO: 1977688
ucauucaaucuacauacaa

SEQ ID NO: 1977690 - RNA, 19 nt, Artificial Sequence
  Description of Artificial Sequence: Synthetic oligonucleotide
  Sense strand starting at position 123 of SEQ ID NO: 1880575
ggaguauacaaauguagau

SEQ ID NO: 1977691 - RNA, 19 nt, Artificial Sequence
  Description of Artificial Sequence: Synthetic oligonucleotide
  Antisense strand to SEQ ID NO: 1977690
aucuacauuuguauacucc

SEQ ID NO: 1977692 - RNA, 19 nt, Artificial Sequence
  Description of Artificial Sequence: Synthetic oligonucleotide
  Sense strand starting at position 181 of SEQ ID NO: 1880575
guuugcauaaggcaugaaa

SEQ ID NO: 1977693 - RNA, 19 nt, Artificial Sequence
  Description of Artificial Sequence: Synthetic oligonucleotide
  Antisense strand to SEQ ID NO: 1977692
uuucaugccuuaugcaaac

SEQ ID NO: 1977694 - RNA, 19 nt, Artificial Sequence
  Description of Artificial Sequence: Synthetic oligonucleotide
  Sense strand starting at position 242 of SEQ ID NO: 1880575
uuaaacauauggcugaaau

SEQ ID NO: 1977695 - RNA, 19 nt, Artificial Sequence
  Description of Artificial Sequence: Synthetic oligonucleotide
  Antisense strand to SEQ ID NO: 1977694
auuucagccauauguuuaa

SEQ ID NO: 1977696 - RNA, 19 nt, Artificial Sequence
  Description of Artificial Sequence: Synthetic oligonucleotide
  Sense strand starting at position 602 of SEQ ID NO: 1880575
guaauagcucuuuacaagg

SEQ ID NO: 1977697 - RNA, 19 nt, Artificial Sequence
  Description of Artificial Sequence: Synthetic oligonucleotide
  Antisense strand to SEQ ID NO: 1977696
ccuuguaaagagcuauuac

SEQ ID NO: 1977698 - RNA, 19 nt, Artificial Sequence
  Description of Artificial Sequence: Synthetic oligonucleotide
  Sense strand starting at position 607 of SEQ ID NO: 1880575
agcucuuuacaaggagaug

SEQ ID NO: 1977699 - RNA, 19 nt, Artificial Sequence
  Description of Artificial Sequence: Synthetic oligonucleotide
  Antisense strand to SEQ ID NO: 1977698
caucuccuuguaaagagcu

SEQ ID NO: 1977700 - RNA, 19 nt, Artificial Sequence
  Description of Artificial Sequence: Synthetic oligonucleotide
  Sense strand starting at position 730 of SEQ ID NO: 1880575
auauuauaagguggugaag

SEQ ID NO: 1977701 - RNA, 19 nt, Artificial Sequence
  Description of Artificial Sequence: Synthetic oligonucleotide
  Antisense strand to SEQ ID NO: 1977700
cuucaccaccuuauaauau

SEQ ID NO: 1977702 - RNA, 19 nt, Artificial Sequence
  Description of Artificial Sequence: Synthetic oligonucleotide
  Sense strand starting at position 759 of SEQ ID NO: 1880575
guugcacaacuauauugaa

SEQ ID NO: 1977703 - RNA, 19 nt, Artificial Sequence
  Description of Artificial Sequence: Synthetic oligonucleotide
  Antisense strand to SEQ ID NO: 1977702
uucaauauaguugugcaac

SEQ ID NO: 1977704 - RNA, 19 nt, Artificial Sequence
  Description of Artificial Sequence: Synthetic oligonucleotide
  Sense strand starting at position 769 of SEQ ID NO: 1880575
uauauugaacuuuggaguu

SEQ ID NO: 1977705 - RNA, 19 nt, Artificial Sequence
  Description of Artificial Sequence: Synthetic oligonucleotide
  Antisense strand to SEQ ID NO: 1977704
aacuccaaaguucaauaua

SEQ ID NO: 1977706 - RNA, 19 nt, Artificial Sequence
  Description of Artificial Sequence: Synthetic oligonucleotide
  Sense strand starting at position 814 of SEQ ID NO: 1880575
cucaguuaguaacuagaaa

SEQ ID NO: 1977707 - RNA, 19 nt, Artificial Sequence
  Description of Artificial Sequence: Synthetic oligonucleotide
  Antisense strand to SEQ ID NO: 1977706
uuucuaguuacuaacugag

SEQ ID NO: 1977708 - RNA, 19 nt, Artificial Sequence
  Description of Artificial Sequence: Synthetic oligonucleotide
  Sense strand starting at position 891 of SEQ ID NO: 1880575
gguauaguucagcaggauu

SEQ ID NO: 1977709 - RNA, 19 nt, Artificial Sequence
  Description of Artificial Sequence: Synthetic oligonucleotide
  Antisense strand to SEQ ID NO: 1977708
aauccugcugaacuauacc

SEQ ID NO: 1977710 - RNA, 19 nt, Artificial Sequence
  Description of Artificial Sequence: Synthetic oligonucleotide
  Sense strand starting at position 1004 of SEQ ID NO: 1880575
uugccagaaugcuuuauuu

SEQ ID NO: 1977711 - RNA, 19 nt, Artificial Sequence
  Description of Artificial Sequence: Synthetic oligonucleotide
  Antisense strand to SEQ ID NO: 1977710
aaauaaagcauucuggcaa

SEQ ID NO: 1977712 - RNA, 19 nt, Artificial Sequence
  Description of Artificial Sequence: Synthetic oligonucleotide
  Sense strand starting at position 1161 of SEQ ID NO: 1880575
acuauuaggaccuggcaga

SEQ ID NO: 1977713 - RNA, 19 nt, Artificial Sequence
  Description of Artificial Sequence: Synthetic oligonucleotide
  Antisense strand to SEQ ID NO: 1977712
ucugccagguccuaauagu

SEQ ID NO: 1977714 - RNA, 19 nt, Artificial Sequence
  Description of Artificial Sequence: Synthetic oligonucleotide
  Sense strand starting at position 1349 of SEQ ID NO: 1880575
ggaauagacuaaucucugu

SEQ ID NO: 1977715 - RNA, 19 nt, Artificial Sequence
  Description of Artificial Sequence: Synthetic oligonucleotide
  Antisense strand to SEQ ID NO: 1977714
acagagauuagucuauucc

SEQ ID NO: 1977716 - RNA, 19 nt, Artificial Sequence
  Description of Artificial Sequence: Synthetic oligonucleotide
  Sense strand starting at position 1484 of SEQ ID NO: 1880575
ccugaaagccuguauuaua

SEQ ID NO: 1977717 - RNA, 19 nt, Artificial Sequence
  Description of Artificial Sequence: Synthetic oligonucleotide
  Antisense strand to SEQ ID NO: 1977716
uauaauacaggcuuucagg

SEQ ID NO: 1977718 - RNA, 19 nt, Artificial Sequence
  Description of Artificial Sequence: Synthetic oligonucleotide
  Sense strand starting at position 1561 of SEQ ID NO: 1880575
cuugucugugaauaaacca

SEQ ID NO: 1977719 - RNA, 19 nt, Artificial Sequence
  Description of Artificial Sequence: Synthetic oligonucleotide
  Antisense strand to SEQ ID NO: 1977718
ugguuuauucacagacaag

SEQ ID NO: 1977720 - RNA, 19 nt, Artificial Sequence
  Description of Artificial Sequence: Synthetic oligonucleotide
  Sense strand starting at position 1577 of SEQ ID NO: 1880575
ccauaagagcugcacuuua

SEQ ID NO: 1977721 - RNA, 19 nt, Artificial Sequence
  Description of Artificial Sequence: Synthetic oligonucleotide
  Antisense strand to SEQ ID NO: 1977720
uaaagugcagcucuuaugg

SEQ ID NO: 1977722 - RNA, 19 nt, Artificial Sequence
  Description of Artificial Sequence: Synthetic oligonucleotide
  Sense strand starting at position 1606 of SEQ ID NO: 1880575
acuaaucaauugguuagua

SEQ ID NO: 1977723 - RNA, 19 nt, Artificial Sequence
  Description of Artificial Sequence: Synthetic oligonucleotide
  Antisense strand to SEQ ID NO: 1977722
uacuaaccaauugauuagu

SEQ ID NO: 1977724 - RNA, 19 nt, Artificial Sequence
  Description of Artificial Sequence: Synthetic oligonucleotide
  Sense strand starting at position 1607 of SEQ ID NO: 1880575
cuaaucaauugguuaguaa

SEQ ID NO: 1977725 - RNA, 19 nt, Artificial Sequence
  Description of Artificial Sequence: Synthetic oligonucleotide
  Antisense strand to SEQ ID NO: 1977724
uuacuaaccaauugauuag

SEQ ID NO: 1977726 - RNA, 19 nt, Artificial Sequence
  Description of Artificial Sequence: Synthetic oligonucleotide
  Sense strand starting at position 2025 of SEQ ID NO: 1880575
gaaguuuguggagaguaua

SEQ ID NO: 1977727 - RNA, 19 nt, Artificial Sequence
  Description of Artificial Sequence: Synthetic oligonucleotide
  Antisense strand to SEQ ID NO: 1977726
uauacucuccacaaacuuc

SEQ ID NO: 1977728 - RNA, 19 nt, Artificial Sequence
  Description of Artificial Sequence: Synthetic oligonucleotide
  Sense strand starting at position 2164 of SEQ ID NO: 1880575
aguuucuucggguacaaag

SEQ ID NO: 1977729 - RNA, 19 nt, Artificial Sequence
  Description of Artificial Sequence: Synthetic oligonucleotide
  Antisense strand to SEQ ID NO: 1977728
cuuuguacccgaagaaacu

SEQ ID NO: 1977730 - RNA, 19 nt, Artificial Sequence
  Description of Artificial Sequence: Synthetic oligonucleotide
  Sense strand starting at position 2262 of SEQ ID NO: 1880575
cguacauauuuguuugacu

SEQ ID NO: 1977731 - RNA, 19 nt, Artificial Sequence
  Description of Artificial Sequence: Synthetic oligonucleotide
  Antisense strand to SEQ ID NO: 1977730
agucaaacaaauauguacg

SEQ ID NO: 1977732 - RNA, 19 nt, Artificial Sequence
  Description of Artificial Sequence: Synthetic oligonucleotide
  Sense strand starting at position 2302 of SEQ ID NO: 1880575
ggaguuuaacuguaaggcu

SEQ ID NO: 1977733 - RNA, 19 nt, Artificial Sequence
  Description of Artificial Sequence: Synthetic oligonucleotide
  Antisense strand to SEQ ID NO: 1977732
agccuuacaguuaaacucc

SEQ ID NO: 1977734 - RNA, 19 nt, Artificial Sequence
  Description of Artificial Sequence: Synthetic oligonucleotide
  Sense strand starting at position 2317 of SEQ ID NO: 1880575
ggcuucauggguuaggauu

SEQ ID NO: 1977735 - RNA, 19 nt, Artificial Sequence
  Description of Artificial Sequence: Synthetic oligonucleotide
  Antisense strand to SEQ ID NO: 1977734
aauccuaacccaugaagcc

SEQ ID NO: 1977736 - RNA, 19 nt, Artificial Sequence
  Description of Artificial Sequence: Synthetic oligonucleotide
  Sense strand starting at position 2325 of SEQ ID NO: 1880575
ggguuaggauuacuuuaaa

SEQ ID NO: 1977737 - RNA, 19 nt, Artificial Sequence
  Description of Artificial Sequence: Synthetic oligonucleotide
  Antisense strand to SEQ ID NO: 1977736
uuuaaaguaauccuaaccc

SEQ ID NO: 1977738 - RNA, 19 nt, Artificial Sequence
  Description of Artificial Sequence: Synthetic oligonucleotide
  Sense strand starting at position 2372 of SEQ ID NO: 1880575
ucaccaaagccauaugguu

SEQ ID NO: 1977739 - RNA, 19 nt, Artificial Sequence
  Description of Artificial Sequence: Synthetic oligonucleotide
  Antisense strand to SEQ ID NO: 1977738
aaccauauggcuuugguga

SEQ ID NO: 1977740 - RNA, 19 nt, Artificial Sequence
  Description of Artificial Sequence: Synthetic oligonucleotide
  Sense strand starting at position 2529 of SEQ ID NO: 1880575
cuagaacauuuaugauaag

SEQ ID NO: 1977741 - RNA, 19 nt, Artificial Sequence
  Description of Artificial Sequence: Synthetic oligonucleotide
  Antisense strand to SEQ ID NO: 1977740
cuuaucauaaauguucuag

SEQ ID NO: 1977742 - RNA, 19 nt, Artificial Sequence
  Description of Artificial Sequence: Synthetic oligonucleotide
  Sense strand starting at position 2612 of SEQ ID NO: 1880575
aaagucucccgagaaggua

SEQ ID NO: 1977743 - RNA, 19 nt, Artificial Sequence
  Description of Artificial Sequence: Synthetic oligonucleotide
  Antisense strand to SEQ ID NO: 1977742
uaccuucucgggagacuuu

SEQ ID NO: 1977744 - RNA, 19 nt, Artificial Sequence
  Description of Artificial Sequence: Synthetic oligonucleotide
  Sense strand starting at position 2753 of SEQ ID NO: 1880575
uuguccacguuauuugaua

SEQ ID NO: 1977745 - RNA, 19 nt, Artificial Sequence
  Description of Artificial Sequence: Synthetic oligonucleotide
  Antisense strand to SEQ ID NO: 1977744
uaucaaauaacguggacaa

SEQ ID NO: 1977746 - RNA, 19 nt, Artificial Sequence
  Description of Artificial Sequence: Synthetic oligonucleotide
  Sense strand starting at position 2754 of SEQ ID NO: 1880575
uguccacguuauuugauau

SEQ ID NO: 1977747 - RNA, 19 nt, Artificial Sequence
  Description of Artificial Sequence: Synthetic oligonucleotide
  Antisense strand to SEQ ID NO: 1977746
auaucaaauaacguggaca

SEQ ID NO: 1977748 - RNA, 19 nt, Artificial Sequence
  Description of Artificial Sequence: Synthetic oligonucleotide
  Sense strand starting at position 2765 of SEQ ID NO: 1880575
uuugauauuggucauguua

SEQ ID NO: 1977749 - RNA, 19 nt, Artificial Sequence
  Description of Artificial Sequence: Synthetic oligonucleotide
  Antisense strand to SEQ ID NO: 1977748
uaacaugaccaauaucaaa

SEQ ID NO: 1977750 - RNA, 19 nt, Artificial Sequence
  Description of Artificial Sequence: Synthetic oligonucleotide
  Sense strand starting at position 2911 of SEQ ID NO: 1880575
aggauugcuuaucuaauug

SEQ ID NO: 1977751 - RNA, 19 nt, Artificial Sequence
  Description of Artificial Sequence: Synthetic oligonucleotide
  Antisense strand to SEQ ID NO: 1977750
caauuagauaagcaauccu

SEQ ID NO: 1977752 - RNA, 19 nt, Artificial Sequence
  Description of Artificial Sequence: Synthetic oligonucleotide
  Sense strand starting at position 3262 of SEQ ID NO: 1880575
aagagaaagcuguaagcca

SEQ ID NO: 1977753 - RNA, 19 nt, Artificial Sequence
  Description of Artificial Sequence: Synthetic oligonucleotide
  Antisense strand to SEQ ID NO: 1977752
uggcuuacagcuuucucuu

SEQ ID NO: 1977754 - RNA, 19 nt, Artificial Sequence
  Description of Artificial Sequence: Synthetic oligonucleotide
  Sense strand starting at position 3737 of SEQ ID NO: 1880575
auauaauacguuugaacug

SEQ ID NO: 1977755 - RNA, 19 nt, Artificial Sequence
  Description of Artificial Sequence: Synthetic oligonucleotide
  Antisense strand to SEQ ID NO: 1977754
caguucaaacguauuauau

SEQ ID NO: 1977756 - RNA, 19 nt, Artificial Sequence
  Description of Artificial Sequence: Synthetic oligonucleotide
  Sense strand starting at position 3754 of SEQ ID NO: 1880575
ugaucauauuugucagugu

SEQ ID NO: 1977757 - RNA, 19 nt, Artificial Sequence
  Description of Artificial Sequence: Synthetic oligonucleotide
  Antisense strand to SEQ ID NO: 1977756
acacugacaaauaugauca

SEQ ID NO: 1977758 - RNA, 19 nt, Artificial Sequence
  Description of Artificial Sequence: Synthetic oligonucleotide
  Sense strand starting at position 3797 of SEQ ID NO: 1880575
gguuguuuauuucuccagu

SEQ ID NO: 1977759 - RNA, 19 nt, Artificial Sequence
  Description of Artificial Sequence: Synthetic oligonucleotide
  Antisense strand to SEQ ID NO: 1977758
acuggagaaauaaacaacc

SEQ ID NO: 1977760 - RNA, 19 nt, Artificial Sequence
  Description of Artificial Sequence: Synthetic oligonucleotide
  Sense strand starting at position 3798 of SEQ ID NO: 1880575
guuguuuauuucuccagua

SEQ ID NO: 1977761 - RNA, 19 nt, Artificial Sequence
  Description of Artificial Sequence: Synthetic oligonucleotide
  Antisense strand to SEQ ID NO: 1977760
uacuggagaaauaaacaac

SEQ ID NO: 1977762 - RNA, 19 nt, Artificial Sequence
  Description of Artificial Sequence: Synthetic oligonucleotide
  Sense strand starting at position 3813 of SEQ ID NO: 1880575
aguaaaugauagcuaguga

SEQ ID NO: 1977763 - RNA, 19 nt, Artificial Sequence
  Description of Artificial Sequence: Synthetic oligonucleotide
  Antisense strand to SEQ ID NO: 1977762
ucacuagcuaucauuuacu

SEQ ID NO: 1977764 - RNA, 19 nt, Artificial Sequence
  Description of Artificial Sequence: Synthetic oligonucleotide
  Sense strand starting at position 3814 of SEQ ID NO: 1880575
guaaaugauagcuagugac

SEQ ID NO: 1977765 - RNA, 19 nt, Artificial Sequence
  Description of Artificial Sequence: Synthetic oligonucleotide
  Antisense strand to SEQ ID NO: 1977764
gucacuagcuaucauuuac

SEQ ID NO: 1977766 - RNA, 19 nt, Artificial Sequence
  Description of Artificial Sequence: Synthetic oligonucleotide
  Sense strand starting at position 3824 of SEQ ID NO: 1880575
gcuagugaccagggagauu

SEQ ID NO: 1977767 - RNA, 19 nt, Artificial Sequence
  Description of Artificial Sequence: Synthetic oligonucleotide
  Antisense strand to SEQ ID NO: 1977766
aaucucccuggucacuagc

SEQ ID NO: 1977768 - RNA, 19 nt, Artificial Sequence
  Description of Artificial Sequence: Synthetic oligonucleotide
  Sense strand starting at position 142 of SEQ ID NO: 1880576
ugauaagggugacugcuua

SEQ ID NO: 1977769 - RNA, 19 nt, Artificial Sequence
  Description of Artificial Sequence: Synthetic oligonucleotide
  Antisense strand to SEQ ID NO: 1977768
uaagcagucacccuuauca

SEQ ID NO: 1977770 - RNA, 19 nt, Artificial Sequence
  Description of Artificial Sequence: Synthetic oligonucleotide
  Sense strand starting at position 154 of SEQ ID NO: 1880576
cugcuuaagucugcaauca

SEQ ID NO: 1977771 - RNA, 19 nt, Artificial Sequence
  Description of Artificial Sequence: Synthetic oligonucleotide
  Antisense strand to SEQ ID NO: 1977770
ugauugcagacuuaagcag

SEQ ID NO: 1977772 - RNA, 19 nt, Artificial Sequence
  Description of Artificial Sequence: Synthetic oligonucleotide
  Sense strand starting at position 155 of SEQ ID NO: 1880576
ugcuuaagucugcaaucac

SEQ ID NO: 1977773 - RNA, 19 nt, Artificial Sequence
  Description of Artificial Sequence: Synthetic oligonucleotide
  Antisense strand to SEQ ID NO: 1977772
gugauugcagacuuaagca

SEQ ID NO: 1977774 - RNA, 19 nt, Artificial Sequence
  Description of Artificial Sequence: Synthetic oligonucleotide
  Sense strand starting at position 195 of SEQ ID NO: 1880576
ucauguaaguuagcaaaga

SEQ ID NO: 1977775 - RNA, 19 nt, Artificial Sequence
  Description of Artificial Sequence: Synthetic oligonucleotide
  Antisense strand to SEQ ID NO: 1977774
ucuuugcuaacuuacauga

SEQ ID NO: 1977776 - RNA, 19 nt, Artificial Sequence
  Description of Artificial Sequence: Synthetic oligonucleotide
  Sense strand starting at position 302 of SEQ ID NO: 1880576
aguagauucuuagaacauu

SEQ ID NO: 1977777 - RNA, 19 nt, Artificial Sequence
  Description of Artificial Sequence: Synthetic oligonucleotide
  Antisense strand to SEQ ID NO: 1977776
aauguucuaagaaucuacu

SEQ ID NO: 1977778 - RNA, 19 nt, Artificial Sequence
  Description of Artificial Sequence: Synthetic oligonucleotide
  Sense strand starting at position 369 of SEQ ID NO: 1880576
ucagaaagguagucuggaa

SEQ ID NO: 1977779 - RNA, 19 nt, Artificial Sequence
  Description of Artificial Sequence: Synthetic oligonucleotide
  Antisense strand to SEQ ID NO: 1977778
uuccagacuaccuuucuga

SEQ ID NO: 1977780 - RNA, 19 nt, Artificial Sequence
  Description of Artificial Sequence: Synthetic oligonucleotide
  Sense strand starting at position 398 of SEQ ID NO: 1880576
cagagugauguccaaacuu

SEQ ID NO: 1977781 - RNA, 19 nt, Artificial Sequence
  Description of Artificial Sequence: Synthetic oligonucleotide
  Antisense strand to SEQ ID NO: 1977780
aaguuuggacaucacucug

SEQ ID NO: 1977782 - RNA, 19 nt, Artificial Sequence
  Description of Artificial Sequence: Synthetic oligonucleotide
  Sense strand starting at position 490 of SEQ ID NO: 1880576
cccagaacuuaggugagau

SEQ ID NO: 1977783 - RNA, 19 nt, Artificial Sequence
  Description of Artificial Sequence: Synthetic oligonucleotide
  Antisense strand to SEQ ID NO: 1977782
aucucaccuaaguucuggg

SEQ ID NO: 1977784 - RNA, 19 nt, Artificial Sequence
  Description of Artificial Sequence: Synthetic oligonucleotide
  Sense strand starting at position 494 of SEQ ID NO: 1880576
gaacuuaggugagaugacu

SEQ ID NO: 1977785 - RNA, 19 nt, Artificial Sequence
  Description of Artificial Sequence: Synthetic oligonucleotide
  Antisense strand to SEQ ID NO: 1977784
agucaucucaccuaaguuc

SEQ ID NO: 1977786 - RNA, 19 nt, Artificial Sequence
  Description of Artificial Sequence: Synthetic oligonucleotide
  Sense strand starting at position 503 of SEQ ID NO: 1880576
ugagaugacuaagcucuua

SEQ ID NO: 1977787 - RNA, 19 nt, Artificial Sequence
  Description of Artificial Sequence: Synthetic oligonucleotide
  Antisense strand to SEQ ID NO: 1977786
uaagagcuuagucaucuca

SEQ ID NO: 1977788 - RNA, 19 nt, Artificial Sequence
  Description of Artificial Sequence: Synthetic oligonucleotide
  Sense strand starting at position 523 of SEQ ID NO: 1880576
aagcauguccaguguagua

SEQ ID NO: 1977789 - RNA, 19 nt, Artificial Sequence
  Description of Artificial Sequence: Synthetic oligonucleotide
  Antisense strand to SEQ ID NO: 1977788
uacuacacuggacaugcuu

SEQ ID NO: 1977790 - RNA, 19 nt, Artificial Sequence
  Description of Artificial Sequence: Synthetic oligonucleotide
  Sense strand starting at position 904 of SEQ ID NO: 1880576
acaugagggugauuccuaa

SEQ ID NO: 1977791 - RNA, 19 nt, Artificial Sequence
  Description of Artificial Sequence: Synthetic oligonucleotide
  Antisense strand to SEQ ID NO: 1977790
uuaggaaucacccucaugu

SEQ ID NO: 1977792 - RNA, 19 nt, Artificial Sequence
  Description of Artificial Sequence: Synthetic oligonucleotide
  Sense strand starting at position 910 of SEQ ID NO: 1880576
gggugauuccuaagugcgu

SEQ ID NO: 1977793 - RNA, 19 nt, Artificial Sequence
  Description of Artificial Sequence: Synthetic oligonucleotide
  Antisense strand to SEQ ID NO: 1977792
acgcacuuaggaaucaccc

SEQ ID NO: 1977794 - RNA, 19 nt, Artificial Sequence
  Description of Artificial Sequence: Synthetic oligonucleotide
  Sense strand starting at position 946 of SEQ ID NO: 1880576
uuacaaagaucuguugcuu

SEQ ID NO: 1977795 - RNA, 19 nt, Artificial Sequence
  Description of Artificial Sequence: Synthetic oligonucleotide
  Antisense strand to SEQ ID NO: 1977794
aagcaacagaucuuuguaa

SEQ ID NO: 1977796 - RNA, 19 nt, Artificial Sequence
  Description of Artificial Sequence: Synthetic oligonucleotide
  Sense strand starting at position 950 of SEQ ID NO: 1880576
aaagaucuguugcuuguuu

SEQ ID NO: 1977797 - RNA, 19 nt, Artificial Sequence
  Description of Artificial Sequence: Synthetic oligonucleotide
  Antisense strand to SEQ ID NO: 1977796
aaacaagcaacagaucuuu

SEQ ID NO: 1977798 - RNA, 19 nt, Artificial Sequence
  Description of Artificial Sequence: Synthetic oligonucleotide
  Sense strand starting at position 957 of SEQ ID NO: 1880576
uguugcuuguuuccgaaga

SEQ ID NO: 1977799 - RNA, 19 nt, Artificial Sequence
  Description of Artificial Sequence: Synthetic oligonucleotide
  Antisense strand to SEQ ID NO: 1977798
ucuucggaaacaagcaaca

SEQ ID NO: 1977800 - RNA, 19 nt, Artificial Sequence
  Description of Artificial Sequence: Synthetic oligonucleotide
  Sense strand starting at position 1305 of SEQ ID NO: 1880576
ggaagguaugugggcgaua

SEQ ID NO: 1977801 - RNA, 19 nt, Artificial Sequence
  Description of Artificial Sequence: Synthetic oligonucleotide
  Antisense strand to SEQ ID NO: 1977800
uaucgcccacauaccuucc

SEQ ID NO: 1977802 - RNA, 19 nt, Artificial Sequence
  Description of Artificial Sequence: Synthetic oligonucleotide
  Sense strand starting at position 1310 of SEQ ID NO: 1880576
guaugugggcgauagcagu

SEQ ID NO: 1977803 - RNA, 19 nt, Artificial Sequence
  Description of Artificial Sequence: Synthetic oligonucleotide
  Antisense strand to SEQ ID NO: 1977802
acugcuaucgcccacauac

SEQ ID NO: 1977804 - RNA, 19 nt, Artificial Sequence
  Description of Artificial Sequence: Synthetic oligonucleotide
  Sense strand starting at position 1325 of SEQ ID NO: 1880576
cagugugaguggcuuguau

SEQ ID NO: 1977805 - RNA, 19 nt, Artificial Sequence
  Description of Artificial Sequence: Synthetic oligonucleotide
  Antisense strand to SEQ ID NO: 1977804
auacaagccacucacacug

SEQ ID NO: 1977806 - RNA, 19 nt, Artificial Sequence
  Description of Artificial Sequence: Synthetic oligonucleotide
  Sense strand starting at position 1391 of SEQ ID NO: 1880576
cuacguuccaguuaauguu

SEQ ID NO: 1977807 - RNA, 19 nt, Artificial Sequence
  Description of Artificial Sequence: Synthetic oligonucleotide
  Antisense strand to SEQ ID NO: 1977806
aacauuaacuggaacguag

SEQ ID NO: 1977808 - RNA, 19 nt, Artificial Sequence
  Description of Artificial Sequence: Synthetic oligonucleotide
  Sense strand starting at position 1664 of SEQ ID NO: 1880576
gcuauaacguucucugaug

SEQ ID NO: 1977809 - RNA, 19 nt, Artificial Sequence
  Description of Artificial Sequence: Synthetic oligonucleotide
  Antisense strand to SEQ ID NO: 1977808
caucagagaacguuauagc

SEQ ID NO: 1977810 - RNA, 19 nt, Artificial Sequence
  Description of Artificial Sequence: Synthetic oligonucleotide
  Sense strand starting at position 1689 of SEQ ID NO: 1880576
gaugguuaaucucaucaag

SEQ ID NO: 1977811 - RNA, 19 nt, Artificial Sequence
  Description of Artificial Sequence: Synthetic oligonucleotide
  Antisense strand to SEQ ID NO: 1977810
cuugaugagauuaaccauc

SEQ ID NO: 1977812 - RNA, 19 nt, Artificial Sequence
  Description of Artificial Sequence: Synthetic oligonucleotide
  Sense strand starting at position 1691 of SEQ ID NO: 1880576
ugguuaaucucaucaagaa

SEQ ID NO: 1977813 - RNA, 19 nt, Artificial Sequence
  Description of Artificial Sequence: Synthetic oligonucleotide
  Antisense strand to SEQ ID NO: 1977812
uucuugaugagauuaacca

SEQ ID NO: 1977814 - RNA, 19 nt, Artificial Sequence
  Description of Artificial Sequence: Synthetic oligonucleotide
  Sense strand starting at position 1707 of SEQ ID NO: 1880576
gaauuaagcuuguuaaggg

SEQ ID NO: 1977815 - RNA, 19 nt, Artificial Sequence
  Description of Artificial Sequence: Synthetic oligonucleotide
  Antisense strand to SEQ ID NO: 1977814
cccuuaacaagcuuaauuc

SEQ ID NO: 1977816 - RNA, 19 nt, Artificial Sequence
  Description of Artificial Sequence: Synthetic oligonucleotide
  Sense strand starting at position 1780 of SEQ ID NO: 1880576
gcgcucaaggacuauguaa

SEQ ID NO: 1977817 - RNA, 19 nt, Artificial Sequence
  Description of Artificial Sequence: Synthetic oligonucleotide
  Antisense strand to SEQ ID NO: 1977816
uuacauaguccuugagcgc

SEQ ID NO: 1977818 - RNA, 19 nt, Artificial Sequence
  Description of Artificial Sequence: Synthetic oligonucleotide
  Sense strand starting at position 1782 of SEQ ID NO: 1880576
gcucaaggacuauguaaag

SEQ ID NO: 1977819 - RNA, 19 nt, Artificial Sequence
  Description of Artificial Sequence: Synthetic oligonucleotide
  Antisense strand to SEQ ID NO: 1977818
cuuuacauaguccuugagc

SEQ ID NO: 1977820 - RNA, 19 nt, Artificial Sequence
  Description of Artificial Sequence: Synthetic oligonucleotide
  Sense strand starting at position 2024 of SEQ ID NO: 1880576
agggcuuuguagcuauaaa

SEQ ID NO: 1977821 - RNA, 19 nt, Artificial Sequence
  Description of Artificial Sequence: Synthetic oligonucleotide
  Antisense strand to SEQ ID NO: 1977820
uuuauagcuacaaagcccu

SEQ ID NO: 1977822 - RNA, 19 nt, Artificial Sequence
  Description of Artificial Sequence: Synthetic oligonucleotide
  Sense strand starting at position 2025 of SEQ ID NO: 1880576
gggcuuuguagcuauaaag

SEQ ID NO: 1977823 - RNA, 19 nt, Artificial Sequence
  Description of Artificial Sequence: Synthetic oligonucleotide
  Antisense strand to SEQ ID NO: 1977822
cuuuauagcuacaaagccc

SEQ ID NO: 1977824 - RNA, 19 nt, Artificial Sequence
  Description of Artificial Sequence: Synthetic oligonucleotide
  Sense strand starting at position 2046 of SEQ ID NO: 1880576
auguaaggauccuuggguu

SEQ ID NO: 1977825 - RNA, 19 nt, Artificial Sequence
  Description of Artificial Sequence: Synthetic oligonucleotide
  Antisense strand to SEQ ID NO: 1977824
aacccaaggauccuuacau

SEQ ID NO: 1977826 - RNA, 19 nt, Artificial Sequence
  Description of Artificial Sequence: Synthetic oligonucleotide
  Sense strand starting at position 2052 of SEQ ID NO: 1880576
ggauccuuggguuaucuga

SEQ ID NO: 1977827 - RNA, 19 nt, Artificial Sequence
  Description of Artificial Sequence: Synthetic oligonucleotide
  Antisense strand to SEQ ID NO: 1977826
ucagauaacccaaggaucc

SEQ ID NO: 1977828 - RNA, 19 nt, Artificial Sequence
  Description of Artificial Sequence: Synthetic oligonucleotide
  Sense strand starting at position 2228 of SEQ ID NO: 1880576
acccuaaggagucgaaauc

SEQ ID NO: 1977829 - RNA, 19 nt, Artificial Sequence
  Description of Artificial Sequence: Synthetic oligonucleotide
  Antisense strand to SEQ ID NO: 1977828
gauuucgacuccuuagggu

SEQ ID NO: 1977830 - RNA, 19 nt, Artificial Sequence
  Description of Artificial Sequence: Synthetic oligonucleotide
  Sense strand starting at position 2262 of SEQ ID NO: 1880576
gacauauccugucuggauu

SEQ ID NO: 1977831 - RNA, 19 nt, Artificial Sequence
  Description of Artificial Sequence: Synthetic oligonucleotide
  Antisense strand to SEQ ID NO: 1977830
aauccagacaggauauguc

SEQ ID NO: 1977832 - RNA, 19 nt, Artificial Sequence
  Description of Artificial Sequence: Synthetic oligonucleotide
  Sense strand starting at position 2268 of SEQ ID NO: 1880576
uccugucuggauuguccaa

SEQ ID NO: 1977833 - RNA, 19 nt, Artificial Sequence
  Description of Artificial Sequence: Synthetic oligonucleotide
  Antisense strand to SEQ ID NO: 1977832
uuggacaauccagacagga

SEQ ID NO: 1977834 - RNA, 19 nt, Artificial Sequence
  Description of Artificial Sequence: Synthetic oligonucleotide
  Sense strand starting at position 2496 of SEQ ID NO: 1880576
uugggacuuccguaacucu

SEQ ID NO: 1977835 - RNA, 19 nt, Artificial Sequence
  Description of Artificial Sequence: Synthetic oligonucleotide
  Antisense strand to SEQ ID NO: 1977834
agaguuacggaagucccaa

SEQ ID NO: 1977836 - RNA, 19 nt, Artificial Sequence
  Description of Artificial Sequence: Synthetic oligonucleotide
  Sense strand starting at position 2527 of SEQ ID NO: 1880576
gggagccgcccuuaaagau

SEQ ID NO: 1977837 - RNA, 19 nt, Artificial Sequence
  Description of Artificial Sequence: Synthetic oligonucleotide
  Antisense strand to SEQ ID NO: 1977836
aucuuuaagggcggcuccc

SEQ ID NO: 1977838 - RNA, 19 nt, Artificial Sequence
  Description of Artificial Sequence: Synthetic oligonucleotide
  Sense strand starting at position 2558 of SEQ ID NO: 1880576
augaguuccauccgguaaa

SEQ ID NO: 1977839 - RNA, 19 nt, Artificial Sequence
  Description of Artificial Sequence: Synthetic oligonucleotide
  Antisense strand to SEQ ID NO: 1977838
uuuaccggauggaacucau

SEQ ID NO: 1977840 - RNA, 19 nt, Artificial Sequence
  Description of Artificial Sequence: Synthetic oligonucleotide
  Sense strand starting at position 2561 of SEQ ID NO: 1880576
aguuccauccgguaaagca

SEQ ID NO: 1977841 - RNA, 19 nt, Artificial Sequence
  Description of Artificial Sequence: Synthetic oligonucleotide
  Antisense strand to SEQ ID NO: 1977840
ugcuuuaccggauggaacu

SEQ ID NO: 1977842 - RNA, 19 nt, Artificial Sequence
  Description of Artificial Sequence: Synthetic oligonucleotide
  Sense strand starting at position 2689 of SEQ ID NO: 1880576
acaggauaccucgauguua

SEQ ID NO: 1977843 - RNA, 19 nt, Artificial Sequence
  Description of Artificial Sequence: Synthetic oligonucleotide
  Antisense strand to SEQ ID NO: 1977842
uaacaucgagguauccugu

SEQ ID NO: 1977844 - RNA, 19 nt, Artificial Sequence
  Description of Artificial Sequence: Synthetic oligonucleotide
  Sense strand starting at position 2691 of SEQ ID NO: 1880576
aggauaccucgauguuaca

SEQ ID NO: 1977845 - RNA, 19 nt, Artificial Sequence
  Description of Artificial Sequence: Synthetic oligonucleotide
  Antisense strand to SEQ ID NO: 1977844
uguaacaucgagguauccu

SEQ ID NO: 1977846 - RNA, 19 nt, Artificial Sequence
  Description of Artificial Sequence: Synthetic oligonucleotide
  Sense strand starting at position 2853 of SEQ ID NO: 1880576
ucccuugcaccggaggaau

SEQ ID NO: 1977847 - RNA, 19 nt, Artificial Sequence
  Description of Artificial Sequence: Synthetic oligonucleotide
  Antisense strand to SEQ ID NO: 1977846
auuccuccggugcaaggga

SEQ ID NO: 1977848 - RNA, 19 nt, Artificial Sequence
  Description of Artificial Sequence: Synthetic oligonucleotide
  Sense strand starting at position 26 of SEQ ID NO: 1880577
uuggauguuguugguagaa

SEQ ID NO: 1977849 - RNA, 19 nt, Artificial Sequence
  Description of Artificial Sequence: Synthetic oligonucleotide
  Antisense strand to SEQ ID NO: 1977848
uucuaccaacaacauccaa

SEQ ID NO: 1977850 - RNA, 19 nt, Artificial Sequence
  Description of Artificial Sequence: Synthetic oligonucleotide
  Sense strand starting at position 45 of SEQ ID NO: 1880577
auguuaaguccacaucuua

SEQ ID NO: 1977851 - RNA, 19 nt, Artificial Sequence
  Description of Artificial Sequence: Synthetic oligonucleotide
  Antisense strand to SEQ ID NO: 1977850
uaagauguggacuuaacau

SEQ ID NO: 1977852 - RNA, 19 nt, Artificial Sequence
  Description of Artificial Sequence: Synthetic oligonucleotide
  Sense strand starting at position 89 of SEQ ID NO: 1880577
gaacucuaauguguagaau

SEQ ID NO: 1977853 - RNA, 19 nt, Artificial Sequence
  Description of Artificial Sequence: Synthetic oligonucleotide
  Antisense strand to SEQ ID NO: 1977852
auucuacacauuagaguuc

SEQ ID NO: 1977854 - RNA, 19 nt, Artificial Sequence
  Description of Artificial Sequence: Synthetic oligonucleotide
  Sense strand starting at position 101 of SEQ ID NO: 1880577
guagaauuugcaggucgcu

SEQ ID NO: 1977855 - RNA, 19 nt, Artificial Sequence
  Description of Artificial Sequence: Synthetic oligonucleotide
  Antisense strand to SEQ ID NO: 1977854
agcgaccugcaaauucuac

SEQ ID NO: 1977856 - RNA, 19 nt, Artificial Sequence
  Description of Artificial Sequence: Synthetic oligonucleotide
  Sense strand starting at position 136 of SEQ ID NO: 1880577
cugaaaugggucuggaauc

SEQ ID NO: 1977857 - RNA, 19 nt, Artificial Sequence
  Description of Artificial Sequence: Synthetic oligonucleotide
  Antisense strand to SEQ ID NO: 1977856
gauuccagacccauuucag

SEQ ID NO: 1977858 - RNA, 19 nt, Artificial Sequence
  Description of Artificial Sequence: Synthetic oligonucleotide
  Sense strand starting at position 221 of SEQ ID NO: 1880577
gcccuacaagcaugaaauu

SEQ ID NO: 1977859 - RNA, 19 nt, Artificial Sequence
  Description of Artificial Sequence: Synthetic oligonucleotide
  Antisense strand to SEQ ID NO: 1977858
aauuucaugcuuguagggc

SEQ ID NO: 1977860 - RNA, 19 nt, Artificial Sequence
  Description of Artificial Sequence: Synthetic oligonucleotide
  Sense strand starting at position 250 of SEQ ID NO: 1880577
gcccaucugaaguguagaa

SEQ ID NO: 1977861 - RNA, 19 nt, Artificial Sequence
  Description of Artificial Sequence: Synthetic oligonucleotide
  Antisense strand to SEQ ID NO: 1977860
uucuacacuucagaugggc

SEQ ID NO: 1977862 - RNA, 19 nt, Artificial Sequence
  Description of Artificial Sequence: Synthetic oligonucleotide
  Sense strand starting at position 338 of SEQ ID NO: 1880577
uuucucuuuccauagugga

SEQ ID NO: 1977863 - RNA, 19 nt, Artificial Sequence
  Description of Artificial Sequence: Synthetic oligonucleotide
  Antisense strand to SEQ ID NO: 1977862
uccacuauggaaagagaaa

SEQ ID NO: 1977864 - RNA, 19 nt, Artificial Sequence
  Description of Artificial Sequence: Synthetic oligonucleotide
  Sense strand starting at position 601 of SEQ ID NO: 1880577
uuccuuggccagugagaua

SEQ ID NO: 1977865 - RNA, 19 nt, Artificial Sequence
  Description of Artificial Sequence: Synthetic oligonucleotide
  Antisense strand to SEQ ID NO: 1977864
uaucucacuggccaaggaa

SEQ ID NO: 1977866 - RNA, 19 nt, Artificial Sequence
  Description of Artificial Sequence: Synthetic oligonucleotide
  Sense strand starting at position 777 of SEQ ID NO: 1880577
uguguuagucgagucagca

SEQ ID NO: 1977867 - RNA, 19 nt, Artificial Sequence
  Description of Artificial Sequence: Synthetic oligonucleotide
  Antisense strand to SEQ ID NO: 1977866
ugcugacucgacuaacaca

SEQ ID NO: 1977868 - RNA, 19 nt, Artificial Sequence
  Description of Artificial Sequence: Synthetic oligonucleotide
  Sense strand starting at position 778 of SEQ ID NO: 1880577
guguuagucgagucagcau

SEQ ID NO: 1977869 - RNA, 19 nt, Artificial Sequence
  Description of Artificial Sequence: Synthetic oligonucleotide
  Antisense strand to SEQ ID NO: 1977868
augcugacucgacuaacac

SEQ ID NO: 1977870 - RNA, 19 nt, Artificial Sequence
  Description of Artificial Sequence: Synthetic oligonucleotide
  Sense strand starting at position 1426 of SEQ ID NO: 1880577
gugucuuggccagcucuca

SEQ ID NO: 1977871 - RNA, 19 nt, Artificial Sequence
  Description of Artificial Sequence: Synthetic oligonucleotide
  Antisense strand to SEQ ID NO: 1977870
ugagagcuggccaagacac

SEQ ID NO: 1977872 - RNA, 19 nt, Artificial Sequence
  Description of Artificial Sequence: Synthetic oligonucleotide
  Sense strand starting at position 1531 of SEQ ID NO: 1880577
aagggauuaugucuccacu

SEQ ID NO: 1977873 - RNA, 19 nt, Artificial Sequence
  Description of Artificial Sequence: Synthetic oligonucleotide
  Antisense strand to SEQ ID NO: 1977872
aguggagacauaaucccuu

SEQ ID NO: 1977874 - RNA, 19 nt, Artificial Sequence
  Description of Artificial Sequence: Synthetic oligonucleotide
  Sense strand starting at position 1533 of SEQ ID NO: 1880577
gggauuaugucuccacuca

SEQ ID NO: 1977875 - RNA, 19 nt, Artificial Sequence
  Description of Artificial Sequence: Synthetic oligonucleotide
  Antisense strand to SEQ ID NO: 1977874
ugaguggagacauaauccc

SEQ ID NO: 1977876 - RNA, 19 nt, Artificial Sequence
  Description of Artificial Sequence: Synthetic oligonucleotide
  Sense strand starting at position 1534 of SEQ ID NO: 1880577
ggauuaugucuccacucac

SEQ ID NO: 1977877 - RNA, 19 nt, Artificial Sequence
  Description of Artificial Sequence: Synthetic oligonucleotide
  Antisense strand to SEQ ID NO: 1977876
gugaguggagacauaaucc

SEQ ID NO: 1977878 - RNA, 19 nt, Artificial Sequence
  Description of Artificial Sequence: Synthetic oligonucleotide
  Sense strand starting at position 1580 of SEQ ID NO: 1880577
gaaggaaguucuuuccaug

SEQ ID NO: 1977879 - RNA, 19 nt, Artificial Sequence
  Description of Artificial Sequence: Synthetic oligonucleotide
  Antisense strand to SEQ ID NO: 1977878
cauggaaagaacuuccuuc

SEQ ID NO: 1977880 - RNA, 19 nt, Artificial Sequence
  Description of Artificial Sequence: Synthetic oligonucleotide
  Sense strand starting at position 1694 of SEQ ID NO: 1880577
ucaggaaucucauccagcu

SEQ ID NO: 1977881 - RNA, 19 nt, Artificial Sequence
  Description of Artificial Sequence: Synthetic oligonucleotide
  Antisense strand to SEQ ID NO: 1977880
agcuggaugagauuccuga

SEQ ID NO: 1977882 - RNA, 19 nt, Artificial Sequence
  Description of Artificial Sequence: Synthetic oligonucleotide
  Sense strand starting at position 1756 of SEQ ID NO: 1880577
auuguaacugcagagaucu

SEQ ID NO: 1977883 - RNA, 19 nt, Artificial Sequence
  Description of Artificial Sequence: Synthetic oligonucleotide
  Antisense strand to SEQ ID NO: 1977882
agaucucugcaguuacaau

SEQ ID NO: 1977884 - RNA, 19 nt, Artificial Sequence
  Description of Artificial Sequence: Synthetic oligonucleotide
  Sense strand starting at position 1978 of SEQ ID NO: 1880577
cuggaagaaucagaaagaa

SEQ ID NO: 1977885 - RNA, 19 nt, Artificial Sequence
  Description of Artificial Sequence: Synthetic oligonucleotide
  Antisense strand to SEQ ID NO: 1977884
uucuuucugauucuuccag

SEQ ID NO: 1977886 - RNA, 19 nt, Artificial Sequence
  Description of Artificial Sequence: Synthetic oligonucleotide
  Sense strand starting at position 2063 of SEQ ID NO: 1880577
ugugguccucucuaagaaa

SEQ ID NO: 1977887 - RNA, 19 nt, Artificial Sequence
  Description of Artificial Sequence: Synthetic oligonucleotide
  Antisense strand to SEQ ID NO: 1977886
uuucuuagagaggaccaca

SEQ ID NO: 1977888 - RNA, 19 nt, Artificial Sequence
  Description of Artificial Sequence: Synthetic oligonucleotide
  Sense strand starting at position 2143 of SEQ ID NO: 1880577
ccuugcuuuagggaaguua

SEQ ID NO: 1977889 - RNA, 19 nt, Artificial Sequence
  Description of Artificial Sequence: Synthetic oligonucleotide
  Antisense strand to SEQ ID NO: 1977888
uaacuucccuaaagcaagg

SEQ ID NO: 1977890 - RNA, 19 nt, Artificial Sequence
  Description of Artificial Sequence: Synthetic oligonucleotide
  Sense strand starting at position 2181 of SEQ ID NO: 1880577
gaagcucugugaucucuga

SEQ ID NO: 1977891 - RNA, 19 nt, Artificial Sequence
  Description of Artificial Sequence: Synthetic oligonucleotide
  Antisense strand to SEQ ID NO: 1977890
ucagagaucacagagcuuc

SEQ ID NO: 1977892 - RNA, 19 nt, Artificial Sequence
  Description of Artificial Sequence: Synthetic oligonucleotide
  Sense strand starting at position 2185 of SEQ ID NO: 1880577
cucugugaucucugagaag

SEQ ID NO: 1977893 - RNA, 19 nt, Artificial Sequence
  Description of Artificial Sequence: Synthetic oligonucleotide
  Antisense strand to SEQ ID NO: 1977892
cuucucagagaucacagag

SEQ ID NO: 1977894 - RNA, 19 nt, Artificial Sequence
  Description of Artificial Sequence: Synthetic oligonucleotide
  Sense strand starting at position 2273 of SEQ ID NO: 1880577
caccaaugaguugguacaa

SEQ ID NO: 1977895 - RNA, 19 nt, Artificial Sequence
  Description of Artificial Sequence: Synthetic oligonucleotide
  Antisense strand to SEQ ID NO: 1977894
uuguaccaacucauuggug

SEQ ID NO: 1977896 - RNA, 19 nt, Artificial Sequence
  Description of Artificial Sequence: Synthetic oligonucleotide
  Sense strand starting at position 2274 of SEQ ID NO: 1880577
accaaugaguugguacaaa

SEQ ID NO: 1977897 - RNA, 19 nt, Artificial Sequence
  Description of Artificial Sequence: Synthetic oligonucleotide
  Antisense strand to SEQ ID NO: 1977896
uuuguaccaacucauuggu

SEQ ID NO: 1977898 - RNA, 19 nt, Artificial Sequence
  Description of Artificial Sequence: Synthetic oligonucleotide
  Sense strand starting at position 2318 of SEQ ID NO: 1880577
aguaauucgcaauacucau

SEQ ID NO: 1977899 - RNA, 19 nt, Artificial Sequence
  Description of Artificial Sequence: Synthetic oligonucleotide
  Antisense strand to SEQ ID NO: 1977898
augaguauugcgaauuacu

SEQ ID NO: 1977900 - RNA, 19 nt, Artificial Sequence
  Description of Artificial Sequence: Synthetic oligonucleotide
  Sense strand starting at position 2463 of SEQ ID NO: 1880577
gccaauucccucugaagag

SEQ ID NO: 1977901 - RNA, 19 nt, Artificial Sequence
  Description of Artificial Sequence: Synthetic oligonucleotide
  Antisense strand to SEQ ID NO: 1977900
cucuucagagggaauuggc

SEQ ID NO: 1977902 - RNA, 19 nt, Artificial Sequence
  Description of Artificial Sequence: Synthetic oligonucleotide
  Sense strand starting at position 2664 of SEQ ID NO: 1880577
caggguguccugcagaaac

SEQ ID NO: 1977903 - RNA, 19 nt, Artificial Sequence
  Description of Artificial Sequence: Synthetic oligonucleotide
  Antisense strand to SEQ ID NO: 1977902
guuucugcaggacacccug

SEQ ID NO: 1977904 - RNA, 19 nt, Artificial Sequence
  Description of Artificial Sequence: Synthetic oligonucleotide
  Sense strand starting at position 2666 of SEQ ID NO: 1880577
ggguguccugcagaaacca

SEQ ID NO: 1977905 - RNA, 19 nt, Artificial Sequence
  Description of Artificial Sequence: Synthetic oligonucleotide
  Antisense strand to SEQ ID NO: 1977904
ugguuucugcaggacaccc

SEQ ID NO: 1977906 - RNA, 19 nt, Artificial Sequence
  Description of Artificial Sequence: Synthetic oligonucleotide
  Sense strand starting at position 2925 of SEQ ID NO: 1880577
gagggaguuaaaugcuguu

SEQ ID NO: 1977907 - RNA, 19 nt, Artificial Sequence
  Description of Artificial Sequence: Synthetic oligonucleotide
  Antisense strand to SEQ ID NO: 1977906
aacagcauuuaacucccuc

SEQ ID NO: 1977908 - RNA, 19 nt, Artificial Sequence
  Description of Artificial Sequence: Synthetic oligonucleotide
  Sense strand starting at position 2976 of SEQ ID NO: 1880577
auaacaacuugucugaaug

SEQ ID NO: 1977909 - RNA, 19 nt, Artificial Sequence
  Description of Artificial Sequence: Synthetic oligonucleotide
  Antisense strand to SEQ ID NO: 1977908
cauucagacaaguuguuau

SEQ ID NO: 1977910 - RNA, 19 nt, Artificial Sequence
  Description of Artificial Sequence: Synthetic oligonucleotide
  Sense strand starting at position 3033 of SEQ ID NO: 1880577
cgaggucauccaugauaag

SEQ ID NO: 1977911 - RNA, 19 nt, Artificial Sequence
  Description of Artificial Sequence: Synthetic oligonucleotide
  Antisense strand to SEQ ID NO: 1977910
cuuaucauggaugaccucg

SEQ ID NO: 1977912 - RNA, 19 nt, Artificial Sequence
  Description of Artificial Sequence: Synthetic oligonucleotide
  Sense strand starting at position 3104 of SEQ ID NO: 1880577
gagauaugcuaacuggacu

SEQ ID NO: 1977913 - RNA, 19 nt, Artificial Sequence
  Description of Artificial Sequence: Synthetic oligonucleotide
  Antisense strand to SEQ ID NO: 1977912
aguccaguuagcauaucuc

SEQ ID NO: 1977914 - RNA, 19 nt, Artificial Sequence
  Description of Artificial Sequence: Synthetic oligonucleotide
  Sense strand starting at position 3217 of SEQ ID NO: 1880577
gggugaggguaaucugaug

SEQ ID NO: 1977915 - RNA, 19 nt, Artificial Sequence
  Description of Artificial Sequence: Synthetic oligonucleotide
  Antisense strand to SEQ ID NO: 1977914
caucagauuacccucaccc

SEQ ID NO: 1977916 - RNA, 19 nt, Artificial Sequence
  Description of Artificial Sequence: Synthetic oligonucleotide
  Sense strand starting at position 3296 of SEQ ID NO: 1880577
uaaguugugcagcagagau

SEQ ID NO: 1977917 - RNA, 19 nt, Artificial Sequence
  Description of Artificial Sequence: Synthetic oligonucleotide
  Antisense strand to SEQ ID NO: 1977916
aucucugcugcacaacuua

SEQ ID NO: 1977918 - RNA, 19 nt, Artificial Sequence
  Description of Artificial Sequence: Synthetic oligonucleotide
  Sense strand starting at position 3540 of SEQ ID NO: 1880577
agcuaagaauagcuaguaa

SEQ ID NO: 1977919 - RNA, 19 nt, Artificial Sequence
  Description of Artificial Sequence: Synthetic oligonucleotide
  Antisense strand to SEQ ID NO: 1977918
uuacuagcuauucuuagcu

SEQ ID NO: 1977920 - RNA, 19 nt, Artificial Sequence
  Description of Artificial Sequence: Synthetic oligonucleotide
  Sense strand starting at position 3676 of SEQ ID NO: 1880577
gaagguaugguuuguuaca

SEQ ID NO: 1977921 - RNA, 19 nt, Artificial Sequence
  Description of Artificial Sequence: Synthetic oligonucleotide
  Antisense strand to SEQ ID NO: 1977920
uguaacaaaccauaccuuc

SEQ ID NO: 1977922 - RNA, 19 nt, Artificial Sequence
  Description of Artificial Sequence: Synthetic oligonucleotide
  Sense strand starting at position 3677 of SEQ ID NO: 1880577
aagguaugguuuguuacau

SEQ ID NO: 1977923 - RNA, 19 nt, Artificial Sequence
  Description of Artificial Sequence: Synthetic oligonucleotide
  Antisense strand to SEQ ID NO: 1977922
auguaacaaaccauaccuu

SEQ ID NO: 1977924 - RNA, 19 nt, Artificial Sequence
  Description of Artificial Sequence: Synthetic oligonucleotide
  Sense strand starting at position 3678 of SEQ ID NO: 1880577
agguaugguuuguuacaua

SEQ ID NO: 1977925 - RNA, 19 nt, Artificial Sequence
  Description of Artificial Sequence: Synthetic oligonucleotide
  Antisense strand to SEQ ID NO: 1977924
uauguaacaaaccauaccu

SEQ ID NO: 1977926 - RNA, 19 nt, Artificial Sequence
  Description of Artificial Sequence: Synthetic oligonucleotide
  Sense strand starting at position 3700 of SEQ ID NO: 1880577
auaugugugccauagugga

SEQ ID NO: 1977927 - RNA, 19 nt, Artificial Sequence
  Description of Artificial Sequence: Synthetic oligonucleotide
  Antisense strand to SEQ ID NO: 1977926
uccacuauggcacacauau

SEQ ID NO: 1977928 - RNA, 19 nt, Artificial Sequence
  Description of Artificial Sequence: Synthetic oligonucleotide
  Sense strand starting at position 23 of SEQ ID NO: 1880578
augacuucugugggaaauu

SEQ ID NO: 1977929 - RNA, 19 nt, Artificial Sequence
  Description of Artificial Sequence: Synthetic oligonucleotide
  Antisense strand to SEQ ID NO: 1977928
aauuucccacagaagucau

SEQ ID NO: 1977930 - RNA, 19 nt, Artificial Sequence
  Description of Artificial Sequence: Synthetic oligonucleotide
  Sense strand starting at position 80 of SEQ ID NO: 1880578
gaaagcuuuguugagauuc

SEQ ID NO: 1977931 - RNA, 19 nt, Artificial Sequence
  Description of Artificial Sequence: Synthetic oligonucleotide
  Antisense strand to SEQ ID NO: 1977930
gaaucucaacaaagcuuuc

SEQ ID NO: 1977932 - RNA, 19 nt, Artificial Sequence
  Description of Artificial Sequence: Synthetic oligonucleotide
  Sense strand starting at position 289 of SEQ ID NO: 1880578
agcccagaucuggaaucuu

SEQ ID NO: 1977933 - RNA, 19 nt, Artificial Sequence
  Description of Artificial Sequence: Synthetic oligonucleotide
  Antisense strand to SEQ ID NO: 1977932
aagauuccagaucugggcu

SEQ ID NO: 1977934 - RNA, 19 nt, Artificial Sequence
  Description of Artificial Sequence: Synthetic oligonucleotide
  Sense strand starting at position 341 of SEQ ID NO: 1880578
uggccacuuggugaucaua

SEQ ID NO: 1977935 - RNA, 19 nt, Artificial Sequence
  Description of Artificial Sequence: Synthetic oligonucleotide
  Antisense strand to SEQ ID NO: 1977934
uaugaucaccaaguggcca

SEQ ID NO: 1977936 - RNA, 19 nt, Artificial Sequence
  Description of Artificial Sequence: Synthetic oligonucleotide
  Sense strand starting at position 344 of SEQ ID NO: 1880578
ccacuuggugaucauauua

SEQ ID NO: 1977937 - RNA, 19 nt, Artificial Sequence
  Description of Artificial Sequence: Synthetic oligonucleotide
  Antisense strand to SEQ ID NO: 1977936
uaauaugaucaccaagugg

SEQ ID NO: 1977938 - RNA, 19 nt, Artificial Sequence
  Description of Artificial Sequence: Synthetic oligonucleotide
  Sense strand starting at position 505 of SEQ ID NO: 1880578
guugcauuucuaugcaaag

SEQ ID NO: 1977939 - RNA, 19 nt, Artificial Sequence
  Description of Artificial Sequence: Synthetic oligonucleotide
  Antisense strand to SEQ ID NO: 1977938
cuuugcauagaaaugcaac

SEQ ID NO: 1977940 - RNA, 19 nt, Artificial Sequence
  Description of Artificial Sequence: Synthetic oligonucleotide
  Sense strand starting at position 635 of SEQ ID NO: 1880578
uuacuuaguccuggaaagu

SEQ ID NO: 1977941 - RNA, 19 nt, Artificial Sequence
  Description of Artificial Sequence: Synthetic oligonucleotide
  Antisense strand to SEQ ID NO: 1977940
acuuuccaggacuaaguaa

SEQ ID NO: 1977942 - RNA, 19 nt, Artificial Sequence
  Description of Artificial Sequence: Synthetic oligonucleotide
  Sense strand starting at position 636 of SEQ ID NO: 1880578
uacuuaguccuggaaaguu

SEQ ID NO: 1977943 - RNA, 19 nt, Artificial Sequence
  Description of Artificial Sequence: Synthetic oligonucleotide
  Antisense strand to SEQ ID NO: 1977942
aacuuuccaggacuaagua

SEQ ID NO: 1977944 - RNA, 19 nt, Artificial Sequence
  Description of Artificial Sequence: Synthetic oligonucleotide
  Sense strand starting at position 773 of SEQ ID NO: 1880578
agguuugcugaagauguga

SEQ ID NO: 1977945 - RNA, 19 nt, Artificial Sequence
  Description of Artificial Sequence: Synthetic oligonucleotide
  Antisense strand to SEQ ID NO: 1977944
ucacaucuucagcaaaccu

SEQ ID NO: 1977946 - RNA, 19 nt, Artificial Sequence
  Description of Artificial Sequence: Synthetic oligonucleotide
  Sense strand starting at position 1006 of SEQ ID NO: 1880578
ugccgauuccuggaucuca

SEQ ID NO: 1977947 - RNA, 19 nt, Artificial Sequence
  Description of Artificial Sequence: Synthetic oligonucleotide
  Antisense strand to SEQ ID NO: 1977946
ugagauccaggaaucggca

SEQ ID NO: 1977948 - RNA, 19 nt, Artificial Sequence
  Description of Artificial Sequence: Synthetic oligonucleotide
  Sense strand starting at position 1273 of SEQ ID NO: 1880578
caugaaacguacuuugaga

SEQ ID NO: 1977949 - RNA, 19 nt, Artificial Sequence
  Description of Artificial Sequence: Synthetic oligonucleotide
  Antisense strand to SEQ ID NO: 1977948
ucucaaaguacguuucaug

SEQ ID NO: 1977950 - RNA, 19 nt, Artificial Sequence
  Description of Artificial Sequence: Synthetic oligonucleotide
  Sense strand starting at position 1275 of SEQ ID NO: 1880578
ugaaacguacuuugagaag

SEQ ID NO: 1977951 - RNA, 19 nt, Artificial Sequence
  Description of Artificial Sequence: Synthetic oligonucleotide
  Antisense strand to SEQ ID NO: 1977950
cuucucaaaguacguuuca

SEQ ID NO: 1977952 - RNA, 19 nt, Artificial Sequence
  Description of Artificial Sequence: Synthetic oligonucleotide
  Sense strand starting at position 1680 of SEQ ID NO: 1880578
guuccugcugucuagaaug

SEQ ID NO: 1977953 - RNA, 19 nt, Artificial Sequence
  Description of Artificial Sequence: Synthetic oligonucleotide
  Antisense strand to SEQ ID NO: 1977952
cauucuagacagcaggaac

SEQ ID NO: 1977954 - RNA, 19 nt, Artificial Sequence
  Description of Artificial Sequence: Synthetic oligonucleotide
  Sense strand starting at position 1762 of SEQ ID NO: 1880578
ggccaaguucagggacuau

SEQ ID NO: 1977955 - RNA, 19 nt, Artificial Sequence
  Description of Artificial Sequence: Synthetic oligonucleotide
  Antisense strand to SEQ ID NO: 1977954
auagucccugaacuuggcc

SEQ ID NO: 1977956 - RNA, 19 nt, Artificial Sequence
  Description of Artificial Sequence: Synthetic oligonucleotide
  Sense strand starting at position 1985 of SEQ ID NO: 1880578
cgauaaacauuaucuauga

SEQ ID NO: 1977957 - RNA, 19 nt, Artificial Sequence
  Description of Artificial Sequence: Synthetic oligonucleotide
  Antisense strand to SEQ ID NO: 1977956
ucauagauaauguuuaucg

SEQ ID NO: 1977958 - RNA, 19 nt, Artificial Sequence
  Description of Artificial Sequence: Synthetic oligonucleotide
  Sense strand starting at position 1996 of SEQ ID NO: 1880578
aucuaugagccagauguuu

SEQ ID NO: 1977959 - RNA, 19 nt, Artificial Sequence
  Description of Artificial Sequence: Synthetic oligonucleotide
  Antisense strand to SEQ ID NO: 1977958
aaacaucuggcucauagau

SEQ ID NO: 1977960 - RNA, 19 nt, Artificial Sequence
  Description of Artificial Sequence: Synthetic oligonucleotide
  Sense strand starting at position 2001 of SEQ ID NO: 1880578
ugagccagauguuugugaa

SEQ ID NO: 1977961 - RNA, 19 nt, Artificial Sequence
  Description of Artificial Sequence: Synthetic oligonucleotide
  Antisense strand to SEQ ID NO: 1977960
uucacaaacaucuggcuca

SEQ ID NO: 1977962 - RNA, 19 nt, Artificial Sequence
  Description of Artificial Sequence: Synthetic oligonucleotide
  Sense strand starting at position 2002 of SEQ ID NO: 1880578
gagccagauguuugugaaa

SEQ ID NO: 1977963 - RNA, 19 nt, Artificial Sequence
  Description of Artificial Sequence: Synthetic oligonucleotide
  Antisense strand to SEQ ID NO: 1977962
uuucacaaacaucuggcuc

SEQ ID NO: 1977964 - RNA, 19 nt, Artificial Sequence
  Description of Artificial Sequence: Synthetic oligonucleotide
  Sense strand starting at position 2027 of SEQ ID NO: 1880578
uagcguauuacugauaggu

SEQ ID NO: 1977965 - RNA, 19 nt, Artificial Sequence
  Description of Artificial Sequence: Synthetic oligonucleotide
  Antisense strand to SEQ ID NO: 1977964
accuaucaguaauacgcua

SEQ ID NO: 1977966 - RNA, 19 nt, Artificial Sequence
  Description of Artificial Sequence: Synthetic oligonucleotide
  Sense strand starting at position 2183 of SEQ ID NO: 1880578
ccaguccucccagagugaa

SEQ ID NO: 1977967 - RNA, 19 nt, Artificial Sequence
  Description of Artificial Sequence: Synthetic oligonucleotide
  Antisense strand to SEQ ID NO: 1977966
uucacucugggaggacugg

SEQ ID NO: 1977968 - RNA, 19 nt, Artificial Sequence
  Description of Artificial Sequence: Synthetic oligonucleotide
  Sense strand starting at position 2401 of SEQ ID NO: 1880578
caccuagagcacugugauu

SEQ ID NO: 1977969 - RNA, 19 nt, Artificial Sequence
  Description of Artificial Sequence: Synthetic oligonucleotide
  Antisense strand to SEQ ID NO: 1977968
aaucacagugcucuaggug

SEQ ID NO: 1977970 - RNA, 19 nt, Artificial Sequence
  Description of Artificial Sequence: Synthetic oligonucleotide
  Sense strand starting at position 2539 of SEQ ID NO: 1880578
acguucuugucauuuguuu

SEQ ID NO: 1977971 - RNA, 19 nt, Artificial Sequence
  Description of Artificial Sequence: Synthetic oligonucleotide
  Antisense strand to SEQ ID NO: 1977970
aaacaaaugacaagaacgu

SEQ ID NO: 1977972 - RNA, 19 nt, Artificial Sequence
  Description of Artificial Sequence: Synthetic oligonucleotide
  Sense strand starting at position 2544 of SEQ ID NO: 1880578
cuugucauuuguuuaagca

SEQ ID NO: 1977973 - RNA, 19 nt, Artificial Sequence
  Description of Artificial Sequence: Synthetic oligonucleotide
  Antisense strand to SEQ ID NO: 1977972
ugcuuaaacaaaugacaag

SEQ ID NO: 1977974 - RNA, 19 nt, Artificial Sequence
  Description of Artificial Sequence: Synthetic oligonucleotide
  Sense strand starting at position 2548 of SEQ ID NO: 1880578
ucauuuguuuaagcaaguu

SEQ ID NO: 1977975 - RNA, 19 nt, Artificial Sequence
  Description of Artificial Sequence: Synthetic oligonucleotide
  Antisense strand to SEQ ID NO: 1977974
aacuugcuuaaacaaauga

SEQ ID NO: 1977976 - RNA, 19 nt, Artificial Sequence
  Description of Artificial Sequence: Synthetic oligonucleotide
  Sense strand starting at position 2748 of SEQ ID NO: 1880578
gauauuggguaccuucuau

SEQ ID NO: 1977977 - RNA, 19 nt, Artificial Sequence
  Description of Artificial Sequence: Synthetic oligonucleotide
  Antisense strand to SEQ ID NO: 1977976
auagaagguacccaauauc

SEQ ID NO: 1977978 - RNA, 19 nt, Artificial Sequence
  Description of Artificial Sequence: Synthetic oligonucleotide
  Sense strand starting at position 2954 of SEQ ID NO: 1880578
aagggcauuccaggaauca

SEQ ID NO: 1977979 - RNA, 19 nt, Artificial Sequence
  Description of Artificial Sequence: Synthetic oligonucleotide
  Antisense strand to SEQ ID NO: 1977978
ugauuccuggaaugcccuu

SEQ ID NO: 1977980 - RNA, 19 nt, Artificial Sequence
  Description of Artificial Sequence: Synthetic oligonucleotide
  Sense strand starting at position 2966 of SEQ ID NO: 1880578
ggaaucagcuuccuucuau

SEQ ID NO: 1977981 - RNA, 19 nt, Artificial Sequence
  Description of Artificial Sequence: Synthetic oligonucleotide
  Antisense strand to SEQ ID NO: 1977980
auagaaggaagcugauucc

SEQ ID NO: 1977982 - RNA, 19 nt, Artificial Sequence
  Description of Artificial Sequence: Synthetic oligonucleotide
  Sense strand starting at position 2994 of SEQ ID NO: 1880578
cuugcugagguauaacuua

SEQ ID NO: 1977983 - RNA, 19 nt, Artificial Sequence
  Description of Artificial Sequence: Synthetic oligonucleotide
  Antisense strand to SEQ ID NO: 1977982
uaaguuauaccucagcaag

SEQ ID NO: 1977984 - RNA, 19 nt, Artificial Sequence
  Description of Artificial Sequence: Synthetic oligonucleotide
  Sense strand starting at position 3133 of SEQ ID NO: 1880578
gugagucacgucuauaauc

SEQ ID NO: 1977985 - RNA, 19 nt, Artificial Sequence
  Description of Artificial Sequence: Synthetic oligonucleotide
  Antisense strand to SEQ ID NO: 1977984
gauuauagacgugacucac

SEQ ID NO: 1977986 - RNA, 19 nt, Artificial Sequence
  Description of Artificial Sequence: Synthetic oligonucleotide
  Sense strand starting at position 3200 of SEQ ID NO: 1880578
ucaagaauggcccgggaaa

SEQ ID NO: 1977987 - RNA, 19 nt, Artificial Sequence
  Description of Artificial Sequence: Synthetic oligonucleotide
  Antisense strand to SEQ ID NO: 1977986
uuucccgggccauucuuga

SEQ ID NO: 1977988 - RNA, 19 nt, Artificial Sequence
  Description of Artificial Sequence: Synthetic oligonucleotide
  Sense strand starting at position 3201 of SEQ ID NO: 1880578
caagaauggcccgggaaau

SEQ ID NO: 1977989 - RNA, 19 nt, Artificial Sequence
  Description of Artificial Sequence: Synthetic oligonucleotide
  Antisense strand to SEQ ID NO: 1977988
auuucccgggccauucuug

SEQ ID NO: 1977990 - RNA, 19 nt, Artificial Sequence
  Description of Artificial Sequence: Synthetic oligonucleotide
  Sense strand starting at position 3202 of SEQ ID NO: 1880578
aagaauggcccgggaaauc

SEQ ID NO: 1977991 - RNA, 19 nt, Artificial Sequence
  Description of Artificial Sequence: Synthetic oligonucleotide
  Antisense strand to SEQ ID NO: 1977990
gauuucccgggccauucuu

SEQ ID NO: 1977992 - RNA, 19 nt, Artificial Sequence
  Description of Artificial Sequence: Synthetic oligonucleotide
  Sense strand starting at position 3620 of SEQ ID NO: 1880578
ggaaguugcagagauugcu

SEQ ID NO: 1977993 - RNA, 19 nt, Artificial Sequence
  Description of Artificial Sequence: Synthetic oligonucleotide
  Antisense strand to SEQ ID NO: 1977992
agcaaucucugcaacuucc

SEQ ID NO: 1977994 - RNA, 19 nt, Artificial Sequence
  Description of Artificial Sequence: Synthetic oligonucleotide
  Sense strand starting at position 3665 of SEQ ID NO: 1880578
uagucuuaugacuauacga

SEQ ID NO: 1977995 - RNA, 19 nt, Artificial Sequence
  Description of Artificial Sequence: Synthetic oligonucleotide
  Antisense strand to SEQ ID NO: 1977994
ucguauagucauaagacua

SEQ ID NO: 1977996 - RNA, 19 nt, Artificial Sequence
  Description of Artificial Sequence: Synthetic oligonucleotide
  Sense strand starting at position 3676 of SEQ ID NO: 1880578
cuauacgagcuauaagcau

SEQ ID NO: 1977997 - RNA, 19 nt, Artificial Sequence
  Description of Artificial Sequence: Synthetic oligonucleotide
  Antisense strand to SEQ ID NO: 1977996
augcuuauagcucguauag

SEQ ID NO: 1977998 - RNA, 19 nt, Artificial Sequence
  Description of Artificial Sequence: Synthetic oligonucleotide
  Sense strand starting at position 3763 of SEQ ID NO: 1880578
agaggaaguagguguuauu

SEQ ID NO: 1977999 - RNA, 19 nt, Artificial Sequence
  Description of Artificial Sequence: Synthetic oligonucleotide
  Antisense strand to SEQ ID NO: 1977998
aauaacaccuacuuccucu

SEQ ID NO: 1978000 - RNA, 19 nt, Artificial Sequence
  Description of Artificial Sequence: Synthetic oligonucleotide
  Sense strand starting at position 3793 of SEQ ID NO: 1880578
gaugaagaaucugaagauc

SEQ ID NO: 1978001 - RNA, 19 nt, Artificial Sequence
  Description of Artificial Sequence: Synthetic oligonucleotide
  Antisense strand to SEQ ID NO: 1978000
gaucuucagauucuucauc

SEQ ID NO: 1978002 - RNA, 19 nt, Artificial Sequence
  Description of Artificial Sequence: Synthetic oligonucleotide
  Sense strand starting at position 3851 of SEQ ID NO: 1880578
acaccaaaguuugucugau

SEQ ID NO: 1978003 - RNA, 19 nt, Artificial Sequence
  Description of Artificial Sequence: Synthetic oligonucleotide
  Antisense strand to SEQ ID NO: 1978002
aucagacaaacuuuggugu

SEQ ID NO: 1978004 - RNA, 19 nt, Artificial Sequence
  Description of Artificial Sequence: Synthetic oligonucleotide
  Sense strand starting at position 3857 of SEQ ID NO: 1880578
aaguuugucugaucccaga

SEQ ID NO: 1978005 - RNA, 19 nt, Artificial Sequence
  Description of Artificial Sequence: Synthetic oligonucleotide
  Antisense strand to SEQ ID NO: 1978004
ucugggaucagacaaacuu

SEQ ID NO: 1978006 - RNA, 19 nt, Artificial Sequence
  Description of Artificial Sequence: Synthetic oligonucleotide
  Sense strand starting at position 3873 of SEQ ID NO: 1880578
agaguuaguuuccuaacac

SEQ ID NO: 1978007 - RNA, 19 nt, Artificial Sequence
  Description of Artificial Sequence: Synthetic oligonucleotide
  Antisense strand to SEQ ID NO: 1978006
guguuaggaaacuaacucu

SEQ ID NO: 1978008 - RNA, 19 nt, Artificial Sequence
  Description of Artificial Sequence: Synthetic oligonucleotide
  Sense strand starting at position 122 of SEQ ID NO: 1880579
ugugucuucccagugcuua

SEQ ID NO: 1978009 - RNA, 19 nt, Artificial Sequence
  Description of Artificial Sequence: Synthetic oligonucleotide
  Antisense strand to SEQ ID NO: 1978008
uaagcacugggaagacaca

SEQ ID NO: 1978010 - RNA, 19 nt, Artificial Sequence
  Description of Artificial Sequence: Synthetic oligonucleotide
  Sense strand starting at position 364 of SEQ ID NO: 1880579
ucaagccauccuggaauua

SEQ ID NO: 1978011 - RNA, 19 nt, Artificial Sequence
  Description of Artificial Sequence: Synthetic oligonucleotide
  Antisense strand to SEQ ID NO: 1978010
uaauuccaggauggcuuga

SEQ ID NO: 1978012 - RNA, 19 nt, Artificial Sequence
  Description of Artificial Sequence: Synthetic oligonucleotide
  Sense strand starting at position 760 of SEQ ID NO: 1880579
gcaggagaucacuggaauc

SEQ ID NO: 1978013 - RNA, 19 nt, Artificial Sequence
  Description of Artificial Sequence: Synthetic oligonucleotide
  Antisense strand to SEQ ID NO: 1978012
gauuccagugaucuccugc

SEQ ID NO: 1978014 - RNA, 19 nt, Artificial Sequence
  Description of Artificial Sequence: Synthetic oligonucleotide
  Sense strand starting at position 913 of SEQ ID NO: 1880579
auagaaguuggauguuaga

SEQ ID NO: 1978015 - RNA, 19 nt, Artificial Sequence
  Description of Artificial Sequence: Synthetic oligonucleotide
  Antisense strand to SEQ ID NO: 1978014
ucuaacauccaacuucuau

SEQ ID NO: 1978016 - RNA, 19 nt, Artificial Sequence
  Description of Artificial Sequence: Synthetic oligonucleotide
  Sense strand starting at position 926 of SEQ ID NO: 1880579
guuagaacucaugaucuuu

SEQ ID NO: 1978017 - RNA, 19 nt, Artificial Sequence
  Description of Artificial Sequence: Synthetic oligonucleotide
  Antisense strand to SEQ ID NO: 1978016
aaagaucaugaguucuaac

SEQ ID NO: 1978018 - RNA, 19 nt, Artificial Sequence
  Description of Artificial Sequence: Synthetic oligonucleotide
  Sense strand starting at position 942 of SEQ ID NO: 1880579
uuuggacagucucuccaaa

SEQ ID NO: 1978019 - RNA, 19 nt, Artificial Sequence
  Description of Artificial Sequence: Synthetic oligonucleotide
  Antisense strand to SEQ ID NO: 1978018
uuuggagagacuguccaaa

SEQ ID NO: 1978020 - RNA, 19 nt, Artificial Sequence
  Description of Artificial Sequence: Synthetic oligonucleotide
  Sense strand starting at position 1339 of SEQ ID NO: 1880579
gaagaaacaugauaggauu

SEQ ID NO: 1978021 - RNA, 19 nt, Artificial Sequence
  Description of Artificial Sequence: Synthetic oligonucleotide
  Antisense strand to SEQ ID NO: 1978020
aauccuaucauguuucuuc

SEQ ID NO: 1978022 - RNA, 19 nt, Artificial Sequence
  Description of Artificial Sequence: Synthetic oligonucleotide
  Sense strand starting at position 1376 of SEQ ID NO: 1880579
ugguuagcuguggauucuu

SEQ ID NO: 1978023 - RNA, 19 nt, Artificial Sequence
  Description of Artificial Sequence: Synthetic oligonucleotide
  Antisense strand to SEQ ID NO: 1978022
aagaauccacagcuaacca

SEQ ID NO: 1978024 - RNA, 19 nt, Artificial Sequence
  Description of Artificial Sequence: Synthetic oligonucleotide
  Sense strand starting at position 1442 of SEQ ID NO: 1880579
auggcaaucucagugguua

SEQ ID NO: 1978025 - RNA, 19 nt, Artificial Sequence
  Description of Artificial Sequence: Synthetic oligonucleotide
  Antisense strand to SEQ ID NO: 1978024
uaaccacugagauugccau

SEQ ID NO: 1978026 - RNA, 19 nt, Artificial Sequence
  Description of Artificial Sequence: Synthetic oligonucleotide
  Sense strand starting at position 1453 of SEQ ID NO: 1880579
agugguuauuccucuccaa

SEQ ID NO: 1978027 - RNA, 19 nt, Artificial Sequence
  Description of Artificial Sequence: Synthetic oligonucleotide
  Antisense strand to SEQ ID NO: 1978026
uuggagaggaauaaccacu

SEQ ID NO: 1978028 - RNA, 19 nt, Artificial Sequence
  Description of Artificial Sequence: Synthetic oligonucleotide
  Sense strand starting at position 1529 of SEQ ID NO: 1880579
uuuaucacgugguuuagaa

SEQ ID NO: 1978029 - RNA, 19 nt, Artificial Sequence
  Description of Artificial Sequence: Synthetic oligonucleotide
  Antisense strand to SEQ ID NO: 1978028
uucuaaaccacgugauaaa

SEQ ID NO: 1978030 - RNA, 19 nt, Artificial Sequence
  Description of Artificial Sequence: Synthetic oligonucleotide
  Sense strand starting at position 1531 of SEQ ID NO: 1880579
uaucacgugguuuagaauu

SEQ ID NO: 1978031 - RNA, 19 nt, Artificial Sequence
  Description of Artificial Sequence: Synthetic oligonucleotide
  Antisense strand to SEQ ID NO: 1978030
aauucuaaaccacgugaua

SEQ ID NO: 1978032 - RNA, 19 nt, Artificial Sequence
  Description of Artificial Sequence: Synthetic oligonucleotide
  Sense strand starting at position 1574 of SEQ ID NO: 1880579
acuucugaacucuggauua

SEQ ID NO: 1978033 - RNA, 19 nt, Artificial Sequence
  Description of Artificial Sequence: Synthetic oligonucleotide
  Antisense strand to SEQ ID NO: 1978032
uaauccagaguucagaagu

SEQ ID NO: 1978034 - RNA, 19 nt, Artificial Sequence
  Description of Artificial Sequence: Synthetic oligonucleotide
  Sense strand starting at position 1614 of SEQ ID NO: 1880579
ggcugccuuagggaacuau

SEQ ID NO: 1978035 - RNA, 19 nt, Artificial Sequence
  Description of Artificial Sequence: Synthetic oligonucleotide
  Antisense strand to SEQ ID NO: 1978034
auaguucccuaaggcagcc

SEQ ID NO: 1978036 - RNA, 19 nt, Artificial Sequence
  Description of Artificial Sequence: Synthetic oligonucleotide
  Sense strand starting at position 1632 of SEQ ID NO: 1880579
ugcagagaugauggguaaa

SEQ ID NO: 1978037 - RNA, 19 nt, Artificial Sequence
  Description of Artificial Sequence: Synthetic oligonucleotide
  Antisense strand to SEQ ID NO: 1978036
uuuacccaucaucucugca

SEQ ID NO: 1978038 - RNA, 19 nt, Artificial Sequence
  Description of Artificial Sequence: Synthetic oligonucleotide
  Sense strand starting at position 1759 of SEQ ID NO: 1880579
gcacgucucacagauguua

SEQ ID NO: 1978039 - RNA, 19 nt, Artificial Sequence
  Description of Artificial Sequence: Synthetic oligonucleotide
  Antisense strand to SEQ ID NO: 1978038
uaacaucugugagacgugc

SEQ ID NO: 1978040 - RNA, 19 nt, Artificial Sequence
  Description of Artificial Sequence: Synthetic oligonucleotide
  Sense strand starting at position 1789 of SEQ ID NO: 1880579
guaccuuaaugucuuaaua

SEQ ID NO: 1978041 - RNA, 19 nt, Artificial Sequence
  Description of Artificial Sequence: Synthetic oligonucleotide
  Antisense strand to SEQ ID NO: 1978040
uauuaagacauuaagguac

SEQ ID NO: 1978042 - RNA, 19 nt, Artificial Sequence
  Description of Artificial Sequence: Synthetic oligonucleotide
  Sense strand starting at position 1874 of SEQ ID NO: 1880579
gauuuaggaugguaguaag

SEQ ID NO: 1978043 - RNA, 19 nt, Artificial Sequence
  Description of Artificial Sequence: Synthetic oligonucleotide
  Antisense strand to SEQ ID NO: 1978042
cuuacuaccauccuaaauc

SEQ ID NO: 1978044 - RNA, 19 nt, Artificial Sequence
  Description of Artificial Sequence: Synthetic oligonucleotide
  Sense strand starting at position 1938 of SEQ ID NO: 1880579
uuagauguuuccguggaag

SEQ ID NO: 1978045 - RNA, 19 nt, Artificial Sequence
  Description of Artificial Sequence: Synthetic oligonucleotide
  Antisense strand to SEQ ID NO: 1978044
cuuccacggaaacaucuaa

SEQ ID NO: 1978046 - RNA, 19 nt, Artificial Sequence
  Description of Artificial Sequence: Synthetic oligonucleotide
  Sense strand starting at position 1940 of SEQ ID NO: 1880579
agauguuuccguggaagau

SEQ ID NO: 1978047 - RNA, 19 nt, Artificial Sequence
  Description of Artificial Sequence: Synthetic oligonucleotide
  Antisense strand to SEQ ID NO: 1978046
aucuuccacggaaacaucu

SEQ ID NO: 1978048 - RNA, 19 nt, Artificial Sequence
  Description of Artificial Sequence: Synthetic oligonucleotide
  Sense strand starting at position 1941 of SEQ ID NO: 1880579
gauguuuccguggaagaua

SEQ ID NO: 1978049 - RNA, 19 nt, Artificial Sequence
  Description of Artificial Sequence: Synthetic oligonucleotide
  Antisense strand to SEQ ID NO: 1978048
uaucuuccacggaaacauc

SEQ ID NO: 1978050 - RNA, 19 nt, Artificial Sequence
  Description of Artificial Sequence: Synthetic oligonucleotide
  Sense strand starting at position 2004 of SEQ ID NO: 1880579
aggauauugcuaggccaca

SEQ ID NO: 1978051 - RNA, 19 nt, Artificial Sequence
  Description of Artificial Sequence: Synthetic oligonucleotide
  Antisense strand to SEQ ID NO: 1978050
uguggccuagcaauauccu

SEQ ID NO: 1978052 - RNA, 19 nt, Artificial Sequence
  Description of Artificial Sequence: Synthetic oligonucleotide
  Sense strand starting at position 2005 of SEQ ID NO: 1880579
ggauauugcuaggccacau

SEQ ID NO: 1978053 - RNA, 19 nt, Artificial Sequence
  Description of Artificial Sequence: Synthetic oligonucleotide
  Antisense strand to SEQ ID NO: 1978052
auguggccuagcaauaucc

SEQ ID NO: 1978054 - RNA, 19 nt, Artificial Sequence
  Description of Artificial Sequence: Synthetic oligonucleotide
  Sense strand starting at position 2009 of SEQ ID NO: 1880579
auugcuaggccacauauau

SEQ ID NO: 1978055 - RNA, 19 nt, Artificial Sequence
  Description of Artificial Sequence: Synthetic oligonucleotide
  Antisense strand to SEQ ID NO: 1978054
auauauguggccuagcaau

SEQ ID NO: 1978056 - RNA, 19 nt, Artificial Sequence
  Description of Artificial Sequence: Synthetic oligonucleotide
  Sense strand starting at position 2141 of SEQ ID NO: 1880579
gaaggaaguuaguuauauu

SEQ ID NO: 1978057 - RNA, 19 nt, Artificial Sequence
  Description of Artificial Sequence: Synthetic oligonucleotide
  Antisense strand to SEQ ID NO: 1978056
aauauaacuaacuuccuuc

SEQ ID NO: 1978058 - RNA, 19 nt, Artificial Sequence
  Description of Artificial Sequence: Synthetic oligonucleotide
  Sense strand starting at position 2166 of SEQ ID NO: 1880579
guucauugugauggaugag

SEQ ID NO: 1978059 - RNA, 19 nt, Artificial Sequence
  Description of Artificial Sequence: Synthetic oligonucleotide
  Antisense strand to SEQ ID NO: 1978058
cucauccaucacaaugaac

SEQ ID NO: 1978060 - RNA, 19 nt, Artificial Sequence
  Description of Artificial Sequence: Synthetic oligonucleotide
  Sense strand starting at position 2180 of SEQ ID NO: 1880579
augagaauggaaugcucau

SEQ ID NO: 1978061 - RNA, 19 nt, Artificial Sequence
  Description of Artificial Sequence: Synthetic oligonucleotide
  Antisense strand to SEQ ID NO: 1978060
augagcauuccauucucau

SEQ ID NO: 1978062 - RNA, 19 nt, Artificial Sequence
  Description of Artificial Sequence: Synthetic oligonucleotide
  Sense strand starting at position 2248 of SEQ ID NO: 1880579
uggugacuccugugaguaa

SEQ ID NO: 1978063 - RNA, 19 nt, Artificial Sequence
  Description of Artificial Sequence: Synthetic oligonucleotide
  Antisense strand to SEQ ID NO: 1978062
uuacucacaggagucacca

SEQ ID NO: 1978064 - RNA, 19 nt, Artificial Sequence
  Description of Artificial Sequence: Synthetic oligonucleotide
  Sense strand starting at position 2326 of SEQ ID NO: 1880579
aguaaaugaggugguucau

SEQ ID NO: 1978065 - RNA, 19 nt, Artificial Sequence
  Description of Artificial Sequence: Synthetic oligonucleotide
  Antisense strand to SEQ ID NO: 1978064
augaaccaccucauuuacu

SEQ ID NO: 1978066 - RNA, 19 nt, Artificial Sequence
  Description of Artificial Sequence: Synthetic oligonucleotide
  Sense strand starting at position 2488 of SEQ ID NO: 1880579
ccaccuucuggcugaggau

SEQ ID NO: 1978067 - RNA, 19 nt, Artificial Sequence
  Description of Artificial Sequence: Synthetic oligonucleotide
  Antisense strand to SEQ ID NO: 1978066
auccucagccagaaggugg

SEQ ID NO: 1978068 - RNA, 19 nt, Artificial Sequence
  Description of Artificial Sequence: Synthetic oligonucleotide
  Sense strand starting at position 2819 of SEQ ID NO: 1880579
agcauaaauucguuugaaa

SEQ ID NO: 1978069 - RNA, 19 nt, Artificial Sequence
  Description of Artificial Sequence: Synthetic oligonucleotide
  Antisense strand to SEQ ID NO: 1978068
uuucaaacgaauuuaugcu

SEQ ID NO: 1978070 - RNA, 19 nt, Artificial Sequence
  Description of Artificial Sequence: Synthetic oligonucleotide
  Sense strand starting at position 2821 of SEQ ID NO: 1880579
cauaaauucguuugaaaug

SEQ ID NO: 1978071 - RNA, 19 nt, Artificial Sequence
  Description of Artificial Sequence: Synthetic oligonucleotide
  Antisense strand to SEQ ID NO: 1978070
cauuucaaacgaauuuaug

SEQ ID NO: 1978072 - RNA, 19 nt, Artificial Sequence
  Description of Artificial Sequence: Synthetic oligonucleotide
  Sense strand starting at position 2961 of SEQ ID NO: 1880579
gcauccagugugugauuua

SEQ ID NO: 1978073 - RNA, 19 nt, Artificial Sequence
  Description of Artificial Sequence: Synthetic oligonucleotide
  Antisense strand to SEQ ID NO: 1978072
uaaaucacacacuggaugc

SEQ ID NO: 1978074 - RNA, 19 nt, Artificial Sequence
  Description of Artificial Sequence: Synthetic oligonucleotide
  Sense strand starting at position 2970 of SEQ ID NO: 1880579
gugugauuuaggcaugcac

SEQ ID NO: 1978075 - RNA, 19 nt, Artificial Sequence
  Description of Artificial Sequence: Synthetic oligonucleotide
  Antisense strand to SEQ ID NO: 1978074
gugcaugccuaaaucacac

SEQ ID NO: 1978076 - RNA, 19 nt, Artificial Sequence
  Description of Artificial Sequence: Synthetic oligonucleotide
  Sense strand starting at position 3566 of SEQ ID NO: 1880579
ugaauuaucaggcagucag

SEQ ID NO: 1978077 - RNA, 19 nt, Artificial Sequence
  Description of Artificial Sequence: Synthetic oligonucleotide
  Antisense strand to SEQ ID NO: 1978076
cugacugccugauaauuca

SEQ ID NO: 1978078 - RNA, 19 nt, Artificial Sequence
  Description of Artificial Sequence: Synthetic oligonucleotide
  Sense strand starting at position 3621 of SEQ ID NO: 1880579
acugguaaauguuuaaacu

SEQ ID NO: 1978079 - RNA, 19 nt, Artificial Sequence
  Description of Artificial Sequence: Synthetic oligonucleotide
  Antisense strand to SEQ ID NO: 1978078
aguuuaaacauuuaccagu

SEQ ID NO: 1978080 - RNA, 19 nt, Artificial Sequence
  Description of Artificial Sequence: Synthetic oligonucleotide
  Sense strand starting at position 3622 of SEQ ID NO: 1880579
cugguaaauguuuaaacug

SEQ ID NO: 1978081 - RNA, 19 nt, Artificial Sequence
  Description of Artificial Sequence: Synthetic oligonucleotide
  Antisense strand to SEQ ID NO: 1978080
caguuuaaacauuuaccag

SEQ ID NO: 1978082 - RNA, 19 nt, Artificial Sequence
  Description of Artificial Sequence: Synthetic oligonucleotide
  Sense strand starting at position 3776 of SEQ ID NO: 1880579
aacaguaaugucuaguaag

SEQ ID NO: 1978083 - RNA, 19 nt, Artificial Sequence
  Description of Artificial Sequence: Synthetic oligonucleotide
  Antisense strand to SEQ ID NO: 1978082
cuuacuagacauuacuguu

SEQ ID NO: 1978084 - RNA, 19 nt, Artificial Sequence
  Description of Artificial Sequence: Synthetic oligonucleotide
  Sense strand starting at position 3805 of SEQ ID NO: 1880579
cugguucuaggauacuauu

SEQ ID NO: 1978085 - RNA, 19 nt, Artificial Sequence
  Description of Artificial Sequence: Synthetic oligonucleotide
  Antisense strand to SEQ ID NO: 1978084
aauaguauccuagaaccag

SEQ ID NO: 1978086 - RNA, 19 nt, Artificial Sequence
  Description of Artificial Sequence: Synthetic oligonucleotide
  Sense strand starting at position 3845 of SEQ ID NO: 1880579
aggauuuccucauagucuu

SEQ ID NO: 1978087 - RNA, 19 nt, Artificial Sequence
  Description of Artificial Sequence: Synthetic oligonucleotide
  Antisense strand to SEQ ID NO: 1978086
aagacuaugaggaaauccu

SEQ ID NO: 1978088 - RNA, 19 nt, Artificial Sequence
  Description of Artificial Sequence: Synthetic oligonucleotide
  Sense strand starting at position 150 of SEQ ID NO: 1880580
guaaauaugcuggauugua

SEQ ID NO: 1978089 - RNA, 19 nt, Artificial Sequence
  Description of Artificial Sequence: Synthetic oligonucleotide
  Antisense strand to SEQ ID NO: 1978088
uacaauccagcauauuuac

SEQ ID NO: 1978090 - RNA, 19 nt, Artificial Sequence
  Description of Artificial Sequence: Synthetic oligonucleotide
  Sense strand starting at position 394 of SEQ ID NO: 1880580
uugauaccuguaggacaua

SEQ ID NO: 1978091 - RNA, 19 nt, Artificial Sequence
  Description of Artificial Sequence: Synthetic oligonucleotide
  Antisense strand to SEQ ID NO: 1978090
uauguccuacagguaucaa

SEQ ID NO: 1978092 - RNA, 19 nt, Artificial Sequence
  Description of Artificial Sequence: Synthetic oligonucleotide
  Sense strand starting at position 432 of SEQ ID NO: 1880580
gaauauguuguguauagag

SEQ ID NO: 1978093 - RNA, 19 nt, Artificial Sequence
  Description of Artificial Sequence: Synthetic oligonucleotide
  Antisense strand to SEQ ID NO: 1978092
cucuauacacaacauauuc

SEQ ID NO: 1978094 - RNA, 19 nt, Artificial Sequence
  Description of Artificial Sequence: Synthetic oligonucleotide
  Sense strand starting at position 519 of SEQ ID NO: 1880580
guuccauggagagaguuua

SEQ ID NO: 1978095 - RNA, 19 nt, Artificial Sequence
  Description of Artificial Sequence: Synthetic oligonucleotide
  Antisense strand to SEQ ID NO: 1978094
uaaacucucuccauggaac

SEQ ID NO: 1978096 - RNA, 19 nt, Artificial Sequence
  Description of Artificial Sequence: Synthetic oligonucleotide
  Sense strand starting at position 527 of SEQ ID NO: 1880580
gagagaguuuagucuacua

SEQ ID NO: 1978097 - RNA, 19 nt, Artificial Sequence
  Description of Artificial Sequence: Synthetic oligonucleotide
  Antisense strand to SEQ ID NO: 1978096
uaguagacuaaacucucuc

SEQ ID NO: 1978098 - RNA, 19 nt, Artificial Sequence
  Description of Artificial Sequence: Synthetic oligonucleotide
  Sense strand starting at position 529 of SEQ ID NO: 1880580
gagaguuuagucuacuauu

SEQ ID NO: 1978099 - RNA, 19 nt, Artificial Sequence
  Description of Artificial Sequence: Synthetic oligonucleotide
  Antisense strand to SEQ ID NO: 1978098
aauaguagacuaaacucuc

SEQ ID NO: 1978100 - RNA, 19 nt, Artificial Sequence
  Description of Artificial Sequence: Synthetic oligonucleotide
  Sense strand starting at position 551 of SEQ ID NO: 1880580
uuggguuuagacugauaaa

SEQ ID NO: 1978101 - RNA, 19 nt, Artificial Sequence
  Description of Artificial Sequence: Synthetic oligonucleotide
  Antisense strand to SEQ ID NO: 1978100
uuuaucagucuaaacccaa

SEQ ID NO: 1978102 - RNA, 19 nt, Artificial Sequence
  Description of Artificial Sequence: Synthetic oligonucleotide
  Sense strand starting at position 609 of SEQ ID NO: 1880580
agaucacaccugugaugua

SEQ ID NO: 1978103 - RNA, 19 nt, Artificial Sequence
  Description of Artificial Sequence: Synthetic oligonucleotide
  Antisense strand to SEQ ID NO: 1978102
uacaucacaggugugaucu

SEQ ID NO: 1978104 - RNA, 19 nt, Artificial Sequence
  Description of Artificial Sequence: Synthetic oligonucleotide
  Sense strand starting at position 865 of SEQ ID NO: 1880580
ugucauugacuaugggaau

SEQ ID NO: 1978105 - RNA, 19 nt, Artificial Sequence
  Description of Artificial Sequence: Synthetic oligonucleotide
  Antisense strand to SEQ ID NO: 1978104
auucccauagucaaugaca

SEQ ID NO: 1978106 - RNA, 19 nt, Artificial Sequence
  Description of Artificial Sequence: Synthetic oligonucleotide
  Sense strand starting at position 1012 of SEQ ID NO: 1880580
aaucauucugauggugaau

SEQ ID NO: 1978107 - RNA, 19 nt, Artificial Sequence
  Description of Artificial Sequence: Synthetic oligonucleotide
  Antisense strand to SEQ ID NO: 1978106
auucaccaucagaaugauu

SEQ ID NO: 1978108 - RNA, 19 nt, Artificial Sequence
  Description of Artificial Sequence: Synthetic oligonucleotide
  Sense strand starting at position 1015 of SEQ ID NO: 1880580
cauucugauggugaaucuu

SEQ ID NO: 1978109 - RNA, 19 nt, Artificial Sequence
  Description of Artificial Sequence: Synthetic oligonucleotide
  Antisense strand to SEQ ID NO: 1978108
aagauucaccaucagaaug

SEQ ID NO: 1978110 - RNA, 19 nt, Artificial Sequence
  Description of Artificial Sequence: Synthetic oligonucleotide
  Sense strand starting at position 1170 of SEQ ID NO: 1880580
aggaguuaauugcuaugaa

SEQ ID NO: 1978111 - RNA, 19 nt, Artificial Sequence
  Description of Artificial Sequence: Synthetic oligonucleotide
  Antisense strand to SEQ ID NO: 1978110
uucauagcaauuaacuccu

SEQ ID NO: 1978112 - RNA, 19 nt, Artificial Sequence
  Description of Artificial Sequence: Synthetic oligonucleotide
  Sense strand starting at position 1230 of SEQ ID NO: 1880580
gaauguccugaugaacgua

SEQ ID NO: 1978113 - RNA, 19 nt, Artificial Sequence
  Description of Artificial Sequence: Synthetic oligonucleotide
  Antisense strand to SEQ ID NO: 1978112
uacguucaucaggacauuc

SEQ ID NO: 1978114 - RNA, 19 nt, Artificial Sequence
  Description of Artificial Sequence: Synthetic oligonucleotide
  Sense strand starting at position 1469 of SEQ ID NO: 1880580
agaagugcuguggagacaa

SEQ ID NO: 1978115 - RNA, 19 nt, Artificial Sequence
  Description of Artificial Sequence: Synthetic oligonucleotide
  Antisense strand to SEQ ID NO: 1978114
uugucuccacagcacuucu

SEQ ID NO: 1978116 - RNA, 19 nt, Artificial Sequence
  Description of Artificial Sequence: Synthetic oligonucleotide
  Sense strand starting at position 1592 of SEQ ID NO: 1880580
auggguauaugagcaaaga

SEQ ID NO: 1978117 - RNA, 19 nt, Artificial Sequence
  Description of Artificial Sequence: Synthetic oligonucleotide
  Antisense strand to SEQ ID NO: 1978116
ucuuugcucauauacccau

SEQ ID NO: 1978118 - RNA, 19 nt, Artificial Sequence
  Description of Artificial Sequence: Synthetic oligonucleotide
  Sense strand starting at position 1653 of SEQ ID NO: 1880580
uggagauacaggugucauu

SEQ ID NO: 1978119 - RNA, 19 nt, Artificial Sequence
  Description of Artificial Sequence: Synthetic oligonucleotide
  Antisense strand to SEQ ID NO: 1978118
aaugacaccuguaucucca

SEQ ID NO: 1978120 - RNA, 19 nt, Artificial Sequence
  Description of Artificial Sequence: Synthetic oligonucleotide
  Sense strand starting at position 1672 of SEQ ID NO: 1880580
aagagaaaccugugcacca

SEQ ID NO: 1978121 - RNA, 19 nt, Artificial Sequence
  Description of Artificial Sequence: Synthetic oligonucleotide
  Antisense strand to SEQ ID NO: 1978120
uggugcacagguuucucuu

SEQ ID NO: 1978122 - RNA, 19 nt, Artificial Sequence
  Description of Artificial Sequence: Synthetic oligonucleotide
  Sense strand starting at position 1673 of SEQ ID NO: 1880580
agagaaaccugugcaccau

SEQ ID NO: 1978123 - RNA, 19 nt, Artificial Sequence
  Description of Artificial Sequence: Synthetic oligonucleotide
  Antisense strand to SEQ ID NO: 1978122
auggugcacagguuucucu

SEQ ID NO: 1978124 - RNA, 19 nt, Artificial Sequence
  Description of Artificial Sequence: Synthetic oligonucleotide
  Sense strand starting at position 1689 of SEQ ID NO: 1880580
cauguuacggguuaagaau

SEQ ID NO: 1978125 - RNA, 19 nt, Artificial Sequence
  Description of Artificial Sequence: Synthetic oligonucleotide
  Antisense strand to SEQ ID NO: 1978124
auucuuaacccguaacaug

SEQ ID NO: 1978126 - RNA, 19 nt, Artificial Sequence
  Description of Artificial Sequence: Synthetic oligonucleotide
  Sense strand starting at position 1732 of SEQ ID NO: 1880580
ucuugacauuagucagaaa

SEQ ID NO: 1978127 - RNA, 19 nt, Artificial Sequence
  Description of Artificial Sequence: Synthetic oligonucleotide
  Antisense strand to SEQ ID NO: 1978126
uuucugacuaaugucaaga

SEQ ID NO: 1978128 - RNA, 19 nt, Artificial Sequence
  Description of Artificial Sequence: Synthetic oligonucleotide
  Sense strand starting at position 1747 of SEQ ID NO: 1880580
gaaauuaaauuggaaagga

SEQ ID NO: 1978129 - RNA, 19 nt, Artificial Sequence
  Description of Artificial Sequence: Synthetic oligonucleotide
  Antisense strand to SEQ ID NO: 1978128
uccuuuccaauuuaauuuc

SEQ ID NO: 1978130 - RNA, 19 nt, Artificial Sequence
  Description of Artificial Sequence: Synthetic oligonucleotide
  Sense strand starting at position 1805 of SEQ ID NO: 1880580
ggcaguucaggagaauugu

SEQ ID NO: 1978131 - RNA, 19 nt, Artificial Sequence
  Description of Artificial Sequence: Synthetic oligonucleotide
  Antisense strand to SEQ ID NO: 1978130
acaauucuccugaacugcc

SEQ ID NO: 1978132 - RNA, 19 nt, Artificial Sequence
  Description of Artificial Sequence: Synthetic oligonucleotide
  Sense strand starting at position 2044 of SEQ ID NO: 1880580
uugucauuucuacgaggcu

SEQ ID NO: 1978133 - RNA, 19 nt, Artificial Sequence
  Description of Artificial Sequence: Synthetic oligonucleotide
  Antisense strand to SEQ ID NO: 1978132
agccucguagaaaugacaa

SEQ ID NO: 1978134 - RNA, 19 nt, Artificial Sequence
  Description of Artificial Sequence: Synthetic oligonucleotide
  Sense strand starting at position 2056 of SEQ ID NO: 1880580
cgaggcuaucuccaaauca

SEQ ID NO: 1978135 - RNA, 19 nt, Artificial Sequence
  Description of Artificial Sequence: Synthetic oligonucleotide
  Antisense strand to SEQ ID NO: 1978134
ugauuuggagauagccucg

SEQ ID NO: 1978136 - RNA, 19 nt, Artificial Sequence
  Description of Artificial Sequence: Synthetic oligonucleotide
  Sense strand starting at position 2084 of SEQ ID NO: 1880580
aggccugaucuauauuauc

SEQ ID NO: 1978137 - RNA, 19 nt, Artificial Sequence
  Description of Artificial Sequence: Synthetic oligonucleotide
  Antisense strand to SEQ ID NO: 1978136
gauaauauagaucaggccu

SEQ ID NO: 1978138 - RNA, 19 nt, Artificial Sequence
  Description of Artificial Sequence: Synthetic oligonucleotide
  Sense strand starting at position 2145 of SEQ ID NO: 1880580
auuguaacccauuagucau

SEQ ID NO: 1978139 - RNA, 19 nt, Artificial Sequence
  Description of Artificial Sequence: Synthetic oligonucleotide
  Antisense strand to SEQ ID NO: 1978138
augacuaauggguuacaau

SEQ ID NO: 1978140 - RNA, 19 nt, Artificial Sequence
  Description of Artificial Sequence: Synthetic oligonucleotide
  Sense strand starting at position 2287 of SEQ ID NO: 1880580
gaucauagaucauuagcag

SEQ ID NO: 1978141 - RNA, 19 nt, Artificial Sequence
  Description of Artificial Sequence: Synthetic oligonucleotide
  Antisense strand to SEQ ID NO: 1978140
cugcuaaugaucuaugauc

SEQ ID NO: 1978142 - RNA, 19 nt, Artificial Sequence
  Description of Artificial Sequence: Synthetic oligonucleotide
  Sense strand starting at position 2368 of SEQ ID NO: 1880580
guaacugugggccauuaaa

SEQ ID NO: 1978143 - RNA, 19 nt, Artificial Sequence
  Description of Artificial Sequence: Synthetic oligonucleotide
  Antisense strand to SEQ ID NO: 1978142
uuuaauggcccacaguuac

SEQ ID NO: 1978144 - RNA, 19 nt, Artificial Sequence
  Description of Artificial Sequence: Synthetic oligonucleotide
  Sense strand starting at position 2730 of SEQ ID NO: 1880580
acaugauccugagcaacuu

SEQ ID NO: 1978145 - RNA, 19 nt, Artificial Sequence
  Description of Artificial Sequence: Synthetic oligonucleotide
  Antisense strand to SEQ ID NO: 1978144
aaguugcucaggaucaugu

SEQ ID NO: 1978146 - RNA, 19 nt, Artificial Sequence
  Description of Artificial Sequence: Synthetic oligonucleotide
  Sense strand starting at position 2846 of SEQ ID NO: 1880580
auauaaagugcuuagcaag

SEQ ID NO: 1978147 - RNA, 19 nt, Artificial Sequence
  Description of Artificial Sequence: Synthetic oligonucleotide
  Antisense strand to SEQ ID NO: 1978146
cuugcuaagcacuuuauau

SEQ ID NO: 1978148 - RNA, 19 nt, Artificial Sequence
  Description of Artificial Sequence: Synthetic oligonucleotide
  Sense strand starting at position 2873 of SEQ ID NO: 1880580
gggaguagguguucaagaa

SEQ ID NO: 1978149 - RNA, 19 nt, Artificial Sequence
  Description of Artificial Sequence: Synthetic oligonucleotide
  Antisense strand to SEQ ID NO: 1978148
uucuugaacaccuacuccc

SEQ ID NO: 1978150 - RNA, 19 nt, Artificial Sequence
  Description of Artificial Sequence: Synthetic oligonucleotide
  Sense strand starting at position 3047 of SEQ ID NO: 1880580
uaaagcauucuuuggagga

SEQ ID NO: 1978151 - RNA, 19 nt, Artificial Sequence
  Description of Artificial Sequence: Synthetic oligonucleotide
  Antisense strand to SEQ ID NO: 1978150
uccuccaaagaaugcuuua

SEQ ID NO: 1978152 - RNA, 19 nt, Artificial Sequence
  Description of Artificial Sequence: Synthetic oligonucleotide
  Sense strand starting at position 3051 of SEQ ID NO: 1880580
gcauucuuuggaggaacca

SEQ ID NO: 1978153 - RNA, 19 nt, Artificial Sequence
  Description of Artificial Sequence: Synthetic oligonucleotide
  Antisense strand to SEQ ID NO: 1978152
ugguuccuccaaagaaugc

SEQ ID NO: 1978154 - RNA, 19 nt, Artificial Sequence
  Description of Artificial Sequence: Synthetic oligonucleotide
  Sense strand starting at position 3358 of SEQ ID NO: 1880580
uaagcagaugguuauguua

SEQ ID NO: 1978155 - RNA, 19 nt, Artificial Sequence
  Description of Artificial Sequence: Synthetic oligonucleotide
  Antisense strand to SEQ ID NO: 1978154
uaacauaaccaucugcuua

SEQ ID NO: 1978156 - RNA, 19 nt, Artificial Sequence
  Description of Artificial Sequence: Synthetic oligonucleotide
  Sense strand starting at position 3384 of SEQ ID NO: 1880580
gauagaaauuuguacaaga

SEQ ID NO: 1978157 - RNA, 19 nt, Artificial Sequence
  Description of Artificial Sequence: Synthetic oligonucleotide
  Antisense strand to SEQ ID NO: 1978156
ucuuguacaaauuucuauc

SEQ ID NO: 1978158 - RNA, 19 nt, Artificial Sequence
  Description of Artificial Sequence: Synthetic oligonucleotide
  Sense strand starting at position 3482 of SEQ ID NO: 1880580
gcaacuagugcucaaauga

SEQ ID NO: 1978159 - RNA, 19 nt, Artificial Sequence
  Description of Artificial Sequence: Synthetic oligonucleotide
  Antisense strand to SEQ ID NO: 1978158
ucauuugagcacuaguugc

SEQ ID NO: 1978160 - RNA, 19 nt, Artificial Sequence
  Description of Artificial Sequence: Synthetic oligonucleotide
  Sense strand starting at position 3541 of SEQ ID NO: 1880580
aagagaugacuuugauguc

SEQ ID NO: 1978161 - RNA, 19 nt, Artificial Sequence
  Description of Artificial Sequence: Synthetic oligonucleotide
  Antisense strand to SEQ ID NO: 1978160
gacaucaaagucaucucuu

SEQ ID NO: 1978162 - RNA, 19 nt, Artificial Sequence
  Description of Artificial Sequence: Synthetic oligonucleotide
  Sense strand starting at position 3665 of SEQ ID NO: 1880580
auccuuaggcaggaguaau

SEQ ID NO: 1978163 - RNA, 19 nt, Artificial Sequence
  Description of Artificial Sequence: Synthetic oligonucleotide
  Antisense strand to SEQ ID NO: 1978162
auuacuccugccuaaggau

SEQ ID NO: 1978164 - RNA, 19 nt, Artificial Sequence
  Description of Artificial Sequence: Synthetic oligonucleotide
  Sense strand starting at position 3768 of SEQ ID NO: 1880580
acuaauaaccugggcuuua

SEQ ID NO: 1978165 - RNA, 19 nt, Artificial Sequence
  Description of Artificial Sequence: Synthetic oligonucleotide
  Antisense strand to SEQ ID NO: 1978164
uaaagcccagguuauuagu

SEQ ID NO: 1978166 - RNA, 19 nt, Artificial Sequence
  Description of Artificial Sequence: Synthetic oligonucleotide
  Sense strand starting at position 3972 of SEQ ID NO: 1880580
augagaugagcugagcauu

SEQ ID NO: 1978167 - RNA, 19 nt, Artificial Sequence
  Description of Artificial Sequence: Synthetic oligonucleotide
  Antisense strand to SEQ ID NO: 1978166
aaugcucagcucaucucau

SEQ ID NO: 1978168 - RNA, 19 nt, Artificial Sequence
  Description of Artificial Sequence: Synthetic oligonucleotide
  Sense strand starting at position 225 of SEQ ID NO: 1880581
gaagaauaugaacgcuaug

SEQ ID NO: 1978169 - RNA, 19 nt, Artificial Sequence
  Description of Artificial Sequence: Synthetic oligonucleotide
  Antisense strand to SEQ ID NO: 1978168
cauagcguucauauucuuc

SEQ ID NO: 1978170 - RNA, 19 nt, Artificial Sequence
  Description of Artificial Sequence: Synthetic oligonucleotide
  Sense strand starting at position 228 of SEQ ID NO: 1880581
gaauaugaacgcuauguau

SEQ ID NO: 1978171 - RNA, 19 nt, Artificial Sequence
  Description of Artificial Sequence: Synthetic oligonucleotide
  Antisense strand to SEQ ID NO: 1978170
auacauagcguucauauuc

SEQ ID NO: 1978172 - RNA, 19 nt, Artificial Sequence
  Description of Artificial Sequence: Synthetic oligonucleotide
  Sense strand starting at position 258 of SEQ ID NO: 1880581
uugguuacauguccagaca

SEQ ID NO: 1978173 - RNA, 19 nt, Artificial Sequence
  Description of Artificial Sequence: Synthetic oligonucleotide
  Antisense strand to SEQ ID NO: 1978172
ugucuggacauguaaccaa

SEQ ID NO: 1978174 - RNA, 19 nt, Artificial Sequence
  Description of Artificial Sequence: Synthetic oligonucleotide
  Sense strand starting at position 259 of SEQ ID NO: 1880581
ugguuacauguccagacaa

SEQ ID NO: 1978175 - RNA, 19 nt, Artificial Sequence
  Description of Artificial Sequence: Synthetic oligonucleotide
  Antisense strand to SEQ ID NO: 1978174
uugucuggacauguaacca

SEQ ID NO: 1978176 - RNA, 19 nt, Artificial Sequence
  Description of Artificial Sequence: Synthetic oligonucleotide
  Sense strand starting at position 322 of SEQ ID NO: 1880581
uuugacacucuugagucau

SEQ ID NO: 1978177 - RNA, 19 nt, Artificial Sequence
  Description of Artificial Sequence: Synthetic oligonucleotide
  Antisense strand to SEQ ID NO: 1978176
augacucaagagugucaaa

SEQ ID NO: 1978178 - RNA, 19 nt, Artificial Sequence
  Description of Artificial Sequence: Synthetic oligonucleotide
  Sense strand starting at position 342 of SEQ ID NO: 1880581
cggaguugggccuagaacu

SEQ ID NO: 1978179 - RNA, 19 nt, Artificial Sequence
  Description of Artificial Sequence: Synthetic oligonucleotide
  Antisense strand to SEQ ID NO: 1978178
aguucuaggcccaacuccg

SEQ ID NO: 1978180 - RNA, 19 nt, Artificial Sequence
  Description of Artificial Sequence: Synthetic oligonucleotide
  Sense strand starting at position 349 of SEQ ID NO: 1880581
gggccuagaacucaguguu

SEQ ID NO: 1978181 - RNA, 19 nt, Artificial Sequence
  Description of Artificial Sequence: Synthetic oligonucleotide
  Antisense strand to SEQ ID NO: 1978180
aacacugaguucuaggccc

SEQ ID NO: 1978182 - RNA, 19 nt, Artificial Sequence
  Description of Artificial Sequence: Synthetic oligonucleotide
  Sense strand starting at position 582 of SEQ ID NO: 1880581
ggucauguccagcacuaaa

SEQ ID NO: 1978183 - RNA, 19 nt, Artificial Sequence
  Description of Artificial Sequence: Synthetic oligonucleotide
  Antisense strand to SEQ ID NO: 1978182
uuuagugcuggacaugacc

SEQ ID NO: 1978184 - RNA, 19 nt, Artificial Sequence
  Description of Artificial Sequence: Synthetic oligonucleotide
  Sense strand starting at position 706 of SEQ ID NO: 1880581
gggagaaccucucccucuu

SEQ ID NO: 1978185 - RNA, 19 nt, Artificial Sequence
  Description of Artificial Sequence: Synthetic oligonucleotide
  Antisense strand to SEQ ID NO: 1978184
aagagggagagguucuccc

SEQ ID NO: 1978186 - RNA, 19 nt, Artificial Sequence
  Description of Artificial Sequence: Synthetic oligonucleotide
  Sense strand starting at position 1428 of SEQ ID NO: 1880581
gcgucuucugcgaagggua

SEQ ID NO: 1978187 - RNA, 19 nt, Artificial Sequence
  Description of Artificial Sequence: Synthetic oligonucleotide
  Antisense strand to SEQ ID NO: 1978186
uacccuucgcagaagacgc

SEQ ID NO: 1978188 - RNA, 19 nt, Artificial Sequence
  Description of Artificial Sequence: Synthetic oligonucleotide
  Sense strand starting at position 2031 of SEQ ID NO: 1880581
gaagcaucggagcaucauu

SEQ ID NO: 1978189 - RNA, 19 nt, Artificial Sequence
  Description of Artificial Sequence: Synthetic oligonucleotide
  Antisense strand to SEQ ID NO: 1978188
aaugaugcuccgaugcuuc

SEQ ID NO: 1978190 - RNA, 19 nt, Artificial Sequence
  Description of Artificial Sequence: Synthetic oligonucleotide
  Sense strand starting at position 2038 of SEQ ID NO: 1880581
cggagcaucauuugcuuaa

SEQ ID NO: 1978191 - RNA, 19 nt, Artificial Sequence
  Description of Artificial Sequence: Synthetic oligonucleotide
  Antisense strand to SEQ ID NO: 1978190
uuaagcaaaugaugcuccg

SEQ ID NO: 1978192 - RNA, 19 nt, Artificial Sequence
  Description of Artificial Sequence: Synthetic oligonucleotide
  Sense strand starting at position 2042 of SEQ ID NO: 1880581
gcaucauuugcuuaaugca

SEQ ID NO: 1978193 - RNA, 19 nt, Artificial Sequence
  Description of Artificial Sequence: Synthetic oligonucleotide
  Antisense strand to SEQ ID NO: 1978192
ugcauuaagcaaaugaugc

SEQ ID NO: 1978194 - RNA, 19 nt, Artificial Sequence
  Description of Artificial Sequence: Synthetic oligonucleotide
  Sense strand starting at position 2146 of SEQ ID NO: 1880581
agaagugauucugcccaau

SEQ ID NO: 1978195 - RNA, 19 nt, Artificial Sequence
  Description of Artificial Sequence: Synthetic oligonucleotide
  Antisense strand to SEQ ID NO: 1978194
auugggcagaaucacuucu

SEQ ID NO: 1978196 - RNA, 19 nt, Artificial Sequence
  Description of Artificial Sequence: Synthetic oligonucleotide
  Sense strand starting at position 2148 of SEQ ID NO: 1880581
aagugauucugcccaauga

SEQ ID NO: 1978197 - RNA, 19 nt, Artificial Sequence
  Description of Artificial Sequence: Synthetic oligonucleotide
  Antisense strand to SEQ ID NO: 1978196
ucauugggcagaaucacuu

SEQ ID NO: 1978198 - RNA, 19 nt, Artificial Sequence
  Description of Artificial Sequence: Synthetic oligonucleotide
  Sense strand starting at position 2149 of SEQ ID NO: 1880581
agugauucugcccaaugaa

SEQ ID NO: 1978199 - RNA, 19 nt, Artificial Sequence
  Description of Artificial Sequence: Synthetic oligonucleotide
  Antisense strand to SEQ ID NO: 1978198
uucauugggcagaaucacu

SEQ ID NO: 1978200 - RNA, 19 nt, Artificial Sequence
  Description of Artificial Sequence: Synthetic oligonucleotide
  Sense strand starting at position 2182 of SEQ ID NO: 1880581
ggccucuaucagggaagga

SEQ ID NO: 1978201 - RNA, 19 nt, Artificial Sequence
  Description of Artificial Sequence: Synthetic oligonucleotide
  Antisense strand to SEQ ID NO: 1978200
uccuucccugauagaggcc

SEQ ID NO: 1978202 - RNA, 19 nt, Artificial Sequence
  Description of Artificial Sequence: Synthetic oligonucleotide
  Sense strand starting at position 2225 of SEQ ID NO: 1880581
guugucuuuguggaaugga

SEQ ID NO: 1978203 - RNA, 19 nt, Artificial Sequence
  Description of Artificial Sequence: Synthetic oligonucleotide
  Antisense strand to SEQ ID NO: 1978202
uccauuccacaaagacaac

SEQ ID NO: 1978204 - RNA, 19 nt, Artificial Sequence
  Description of Artificial Sequence: Synthetic oligonucleotide
  Sense strand starting at position 2228 of SEQ ID NO: 1880581
gucuuuguggaauggagaa

SEQ ID NO: 1978205 - RNA, 19 nt, Artificial Sequence
  Description of Artificial Sequence: Synthetic oligonucleotide
  Antisense strand to SEQ ID NO: 1978204
uucuccauuccacaaagac

SEQ ID NO: 1978206 - RNA, 19 nt, Artificial Sequence
  Description of Artificial Sequence: Synthetic oligonucleotide
  Sense strand starting at position 2255 of SEQ ID NO: 1880581
gguuauuaaauaggcugaa

SEQ ID NO: 1978207 - RNA, 19 nt, Artificial Sequence
  Description of Artificial Sequence: Synthetic oligonucleotide
  Antisense strand to SEQ ID NO: 1978206
uucagccuauuuaauaacc

SEQ ID NO: 1978208 - RNA, 19 nt, Artificial Sequence
  Description of Artificial Sequence: Synthetic oligonucleotide
  Sense strand starting at position 2307 of SEQ ID NO: 1880581
guaaucuucuggcuaggaa

SEQ ID NO: 1978209 - RNA, 19 nt, Artificial Sequence
  Description of Artificial Sequence: Synthetic oligonucleotide
  Antisense strand to SEQ ID NO: 1978208
uuccuagccagaagauuac

SEQ ID NO: 1978210 - RNA, 19 nt, Artificial Sequence
  Description of Artificial Sequence: Synthetic oligonucleotide
  Sense strand starting at position 2370 of SEQ ID NO: 1880581
uggaauuacuauucuucga

SEQ ID NO: 1978211 - RNA, 19 nt, Artificial Sequence
  Description of Artificial Sequence: Synthetic oligonucleotide
  Antisense strand to SEQ ID NO: 1978210
ucgaagaauaguaauucca

SEQ ID NO: 1978212 - RNA, 19 nt, Artificial Sequence
  Description of Artificial Sequence: Synthetic oligonucleotide
  Sense strand starting at position 2682 of SEQ ID NO: 1880581
gagcaaugggccuauuaua

SEQ ID NO: 1978213 - RNA, 19 nt, Artificial Sequence
  Description of Artificial Sequence: Synthetic oligonucleotide
  Antisense strand to SEQ ID NO: 1978212
uauaauaggcccauugcuc

SEQ ID NO: 1978214 - RNA, 19 nt, Artificial Sequence
  Description of Artificial Sequence: Synthetic oligonucleotide
  Sense strand starting at position 2840 of SEQ ID NO: 1880581
ccuguuguccauuaucuaa

SEQ ID NO: 1978215 - RNA, 19 nt, Artificial Sequence
  Description of Artificial Sequence: Synthetic oligonucleotide
  Antisense strand to SEQ ID NO: 1978214
uuagauaauggacaacagg

SEQ ID NO: 1978216 - RNA, 19 nt, Artificial Sequence
  Description of Artificial Sequence: Synthetic oligonucleotide
  Sense strand starting at position 3105 of SEQ ID NO: 1880581
gugagaucacuuuaacuuc

SEQ ID NO: 1978217 - RNA, 19 nt, Artificial Sequence
  Description of Artificial Sequence: Synthetic oligonucleotide
  Antisense strand to SEQ ID NO: 1978216
gaaguuaaagugaucucac

SEQ ID NO: 1978218 - RNA, 19 nt, Artificial Sequence
  Description of Artificial Sequence: Synthetic oligonucleotide
  Sense strand starting at position 3178 of SEQ ID NO: 1880581
aaguguuuaggaggagucu

SEQ ID NO: 1978219 - RNA, 19 nt, Artificial Sequence
  Description of Artificial Sequence: Synthetic oligonucleotide
  Antisense strand to SEQ ID NO: 1978218
agacuccuccuaaacacuu

SEQ ID NO: 1978220 - RNA, 19 nt, Artificial Sequence
  Description of Artificial Sequence: Synthetic oligonucleotide
  Sense strand starting at position 3179 of SEQ ID NO: 1880581
aguguuuaggaggagucuu

SEQ ID NO: 1978221 - RNA, 19 nt, Artificial Sequence
  Description of Artificial Sequence: Synthetic oligonucleotide
  Antisense strand to SEQ ID NO: 1978220
aagacuccuccuaaacacu

SEQ ID NO: 1978222 - RNA, 19 nt, Artificial Sequence
  Description of Artificial Sequence: Synthetic oligonucleotide
  Sense strand starting at position 3187 of SEQ ID NO: 1880581
ggaggagucuuucucacca

SEQ ID NO: 1978223 - RNA, 19 nt, Artificial Sequence
  Description of Artificial Sequence: Synthetic oligonucleotide
  Antisense strand to SEQ ID NO: 1978222
uggugagaaagacuccucc

SEQ ID NO: 1978224 - RNA, 19 nt, Artificial Sequence
  Description of Artificial Sequence: Synthetic oligonucleotide
  Sense strand starting at position 3273 of SEQ ID NO: 1880581
caguuuaugaggcaaguga

SEQ ID NO: 1978225 - RNA, 19 nt, Artificial Sequence
  Description of Artificial Sequence: Synthetic oligonucleotide
  Antisense strand to SEQ ID NO: 1978224
ucacuugccucauaaacug

SEQ ID NO: 1978226 - RNA, 19 nt, Artificial Sequence
  Description of Artificial Sequence: Synthetic oligonucleotide
  Sense strand starting at position 3277 of SEQ ID NO: 1880581
uuaugaggcaagugauaca

SEQ ID NO: 1978227 - RNA, 19 nt, Artificial Sequence
  Description of Artificial Sequence: Synthetic oligonucleotide
  Antisense strand to SEQ ID NO: 1978226
uguaucacuugccucauaa

SEQ ID NO: 1978228 - RNA, 19 nt, Artificial Sequence
  Description of Artificial Sequence: Synthetic oligonucleotide
  Sense strand starting at position 3362 of SEQ ID NO: 1880581
acccuaauguuggauuuaa

SEQ ID NO: 1978229 - RNA, 19 nt, Artificial Sequence
  Description of Artificial Sequence: Synthetic oligonucleotide
  Antisense strand to SEQ ID NO: 1978228
uuaaauccaacauuagggu

SEQ ID NO: 1978230 - RNA, 19 nt, Artificial Sequence
  Description of Artificial Sequence: Synthetic oligonucleotide
  Sense strand starting at position 3407 of SEQ ID NO: 1880581
gugguaugugaugagacuu

SEQ ID NO: 1978231 - RNA, 19 nt, Artificial Sequence
  Description of Artificial Sequence: Synthetic oligonucleotide
  Antisense strand to SEQ ID NO: 1978230
aagucucaucacauaccac

SEQ ID NO: 1978232 - RNA, 19 nt, Artificial Sequence
  Description of Artificial Sequence: Synthetic oligonucleotide
  Sense strand starting at position 3415 of SEQ ID NO: 1880581
ugaugagacuuuccuuuag

SEQ ID NO: 1978233 - RNA, 19 nt, Artificial Sequence
  Description of Artificial Sequence: Synthetic oligonucleotide
  Antisense strand to SEQ ID NO: 1978232
cuaaaggaaagucucauca

SEQ ID NO: 1978234 - RNA, 19 nt, Artificial Sequence
  Description of Artificial Sequence: Synthetic oligonucleotide
  Sense strand starting at position 3417 of SEQ ID NO: 1880581
augagacuuuccuuuagau

SEQ ID NO: 1978235 - RNA, 19 nt, Artificial Sequence
  Description of Artificial Sequence: Synthetic oligonucleotide
  Antisense strand to SEQ ID NO: 1978234
aucuaaaggaaagucucau

SEQ ID NO: 1978236 - RNA, 19 nt, Artificial Sequence
  Description of Artificial Sequence: Synthetic oligonucleotide
  Sense strand starting at position 3514 of SEQ ID NO: 1880581
gcaguauuucuggagcugu

SEQ ID NO: 1978237 - RNA, 19 nt, Artificial Sequence
  Description of Artificial Sequence: Synthetic oligonucleotide
  Antisense strand to SEQ ID NO: 1978236
acagcuccagaaauacugc

SEQ ID NO: 1978238 - RNA, 19 nt, Artificial Sequence
  Description of Artificial Sequence: Synthetic oligonucleotide
  Sense strand starting at position 3528 of SEQ ID NO: 1880581
gcuguucuugaugaagaua

SEQ ID NO: 1978239 - RNA, 19 nt, Artificial Sequence
  Description of Artificial Sequence: Synthetic oligonucleotide
  Antisense strand to SEQ ID NO: 1978238
uaucuucaucaagaacagc

SEQ ID NO: 1978240 - RNA, 19 nt, Artificial Sequence
  Description of Artificial Sequence: Synthetic oligonucleotide
  Sense strand starting at position 3725 of SEQ ID NO: 1880581
aguuaauuagccuagagcu

SEQ ID NO: 1978241 - RNA, 19 nt, Artificial Sequence
  Description of Artificial Sequence: Synthetic oligonucleotide
  Antisense strand to SEQ ID NO: 1978240
agcucuaggcuaauuaacu

SEQ ID NO: 1978242 - RNA, 19 nt, Artificial Sequence
  Description of Artificial Sequence: Synthetic oligonucleotide
  Sense strand starting at position 3727 of SEQ ID NO: 1880581
uuaauuagccuagagcuua

SEQ ID NO: 1978243 - RNA, 19 nt, Artificial Sequence
  Description of Artificial Sequence: Synthetic oligonucleotide
  Antisense strand to SEQ ID NO: 1978242
uaagcucuaggcuaauuaa

SEQ ID NO: 1978244 - RNA, 19 nt, Artificial Sequence
  Description of Artificial Sequence: Synthetic oligonucleotide
  Sense strand starting at position 3772 of SEQ ID NO: 1880581
ucaggagagccaugaauau

SEQ ID NO: 1978245 - RNA, 19 nt, Artificial Sequence
  Description of Artificial Sequence: Synthetic oligonucleotide
  Antisense strand to SEQ ID NO: 1978244
auauucauggcucuccuga

SEQ ID NO: 1978246 - RNA, 19 nt, Artificial Sequence
  Description of Artificial Sequence: Synthetic oligonucleotide
  Sense strand starting at position 3905 of SEQ ID NO: 1880581
ggaaguauguguguauuuc

SEQ ID NO: 1978247 - RNA, 19 nt, Artificial Sequence
  Description of Artificial Sequence: Synthetic oligonucleotide
  Antisense strand to SEQ ID NO: 1978246
gaaauacacacauacuucc

SEQ ID NO: 1978248 - RNA, 19 nt, Artificial Sequence
  Description of Artificial Sequence: Synthetic oligonucleotide
  Sense strand starting at position 11 of SEQ ID NO: 1880582
ccuuauauuugucuauugu

SEQ ID NO: 1978249 - RNA, 19 nt, Artificial Sequence
  Description of Artificial Sequence: Synthetic oligonucleotide
  Antisense strand to SEQ ID NO: 1978248
acaauagacaaauauaagg

SEQ ID NO: 1978250 - RNA, 19 nt, Artificial Sequence
  Description of Artificial Sequence: Synthetic oligonucleotide
  Sense strand starting at position 28 of SEQ ID NO: 1880582
guguaagugcaugauuaug

SEQ ID NO: 1978251 - RNA, 19 nt, Artificial Sequence
  Description of Artificial Sequence: Synthetic oligonucleotide
  Antisense strand to SEQ ID NO: 1978250
cauaaucaugcacuuacac

SEQ ID NO: 1978252 - RNA, 19 nt, Artificial Sequence
  Description of Artificial Sequence: Synthetic oligonucleotide
  Sense strand starting at position 547 of SEQ ID NO: 1880582
uucguuaugcuaucugcuu

SEQ ID NO: 1978253 - RNA, 19 nt, Artificial Sequence
  Description of Artificial Sequence: Synthetic oligonucleotide
  Antisense strand to SEQ ID NO: 1978252
aagcagauagcauaacgaa

SEQ ID NO: 1978254 - RNA, 19 nt, Artificial Sequence
  Description of Artificial Sequence: Synthetic oligonucleotide
  Sense strand starting at position 561 of SEQ ID NO: 1880582
ugcuuauuucuaugucauu

SEQ ID NO: 1978255 - RNA, 19 nt, Artificial Sequence
  Description of Artificial Sequence: Synthetic oligonucleotide
  Antisense strand to SEQ ID NO: 1978254
aaugacauagaaauaagca

SEQ ID NO: 1978256 - RNA, 19 nt, Artificial Sequence
  Description of Artificial Sequence: Synthetic oligonucleotide
  Sense strand starting at position 562 of SEQ ID NO: 1880582
gcuuauuucuaugucauua

SEQ ID NO: 1978257 - RNA, 19 nt, Artificial Sequence
  Description of Artificial Sequence: Synthetic oligonucleotide
  Antisense strand to SEQ ID NO: 1978256
uaaugacauagaaauaagc

SEQ ID NO: 1978258 - RNA, 19 nt, Artificial Sequence
  Description of Artificial Sequence: Synthetic oligonucleotide
  Sense strand starting at position 717 of SEQ ID NO: 1880582
acaacuuuguggcuaaauc

SEQ ID NO: 1978259 - RNA, 19 nt, Artificial Sequence
  Description of Artificial Sequence: Synthetic oligonucleotide
  Antisense strand to SEQ ID NO: 1978258
gauuuagccacaaaguugu

SEQ ID NO: 1978260 - RNA, 19 nt, Artificial Sequence
  Description of Artificial Sequence: Synthetic oligonucleotide
  Sense strand starting at position 725 of SEQ ID NO: 1880582
guggcuaaaucuuugaaug

SEQ ID NO: 1978261 - RNA, 19 nt, Artificial Sequence
  Description of Artificial Sequence: Synthetic oligonucleotide
  Antisense strand to SEQ ID NO: 1978260
cauucaaagauuuagccac

SEQ ID NO: 1978262 - RNA, 19 nt, Artificial Sequence
  Description of Artificial Sequence: Synthetic oligonucleotide
  Sense strand starting at position 726 of SEQ ID NO: 1880582
uggcuaaaucuuugaauga

SEQ ID NO: 1978263 - RNA, 19 nt, Artificial Sequence
  Description of Artificial Sequence: Synthetic oligonucleotide
  Antisense strand to SEQ ID NO: 1978262
ucauucaaagauuuagcca

SEQ ID NO: 1978264 - RNA, 19 nt, Artificial Sequence
  Description of Artificial Sequence: Synthetic oligonucleotide
  Sense strand starting at position 749 of SEQ ID NO: 1880582
cuauguauauucccuggaa

SEQ ID NO: 1978265 - RNA, 19 nt, Artificial Sequence
  Description of Artificial Sequence: Synthetic oligonucleotide
  Antisense strand to SEQ ID NO: 1978264
uuccagggaauauacauag

SEQ ID NO: 1978266 - RNA, 19 nt, Artificial Sequence
  Description of Artificial Sequence: Synthetic oligonucleotide
  Sense strand starting at position 752 of SEQ ID NO: 1880582
uguauauucccuggaauaa

SEQ ID NO: 1978267 - RNA, 19 nt, Artificial Sequence
  Description of Artificial Sequence: Synthetic oligonucleotide
  Antisense strand to SEQ ID NO: 1978266
uuauuccagggaauauaca

SEQ ID NO: 1978268 - RNA, 19 nt, Artificial Sequence
  Description of Artificial Sequence: Synthetic oligonucleotide
  Sense strand starting at position 1082 of SEQ ID NO: 1880582
aguguauuucugggugggu

SEQ ID NO: 1978269 - RNA, 19 nt, Artificial Sequence
  Description of Artificial Sequence: Synthetic oligonucleotide
  Antisense strand to SEQ ID NO: 1978268
acccacccagaaauacacu

SEQ ID NO: 1978270 - RNA, 19 nt, Artificial Sequence
  Description of Artificial Sequence: Synthetic oligonucleotide
  Sense strand starting at position 1116 of SEQ ID NO: 1880582
gggaucaccuucuccagau

SEQ ID NO: 1978271 - RNA, 19 nt, Artificial Sequence
  Description of Artificial Sequence: Synthetic oligonucleotide
  Antisense strand to SEQ ID NO: 1978270
aucuggagaaggugauccc

SEQ ID NO: 1978272 - RNA, 19 nt, Artificial Sequence
  Description of Artificial Sequence: Synthetic oligonucleotide
  Sense strand starting at position 1167 of SEQ ID NO: 1880582
gucacauauccagagcaac

SEQ ID NO: 1978273 - RNA, 19 nt, Artificial Sequence
  Description of Artificial Sequence: Synthetic oligonucleotide
  Antisense strand to SEQ ID NO: 1978272
guugcucuggauaugugac

SEQ ID NO: 1978274 - RNA, 19 nt, Artificial Sequence
  Description of Artificial Sequence: Synthetic oligonucleotide
  Sense strand starting at position 1347 of SEQ ID NO: 1880582
ggacuaggugcccagugau

SEQ ID NO: 1978275 - RNA, 19 nt, Artificial Sequence
  Description of Artificial Sequence: Synthetic oligonucleotide
  Antisense strand to SEQ ID NO: 1978274
aucacugggcaccuagucc

SEQ ID NO: 1978276 - RNA, 19 nt, Artificial Sequence
  Description of Artificial Sequence: Synthetic oligonucleotide
  Sense strand starting at position 1499 of SEQ ID NO: 1880582
aggcucagacccuguaaau

SEQ ID NO: 1978277 - RNA, 19 nt, Artificial Sequence
  Description of Artificial Sequence: Synthetic oligonucleotide
  Antisense strand to SEQ ID NO: 1978276
auuuacagggucugagccu

SEQ ID NO: 1978278 - RNA, 19 nt, Artificial Sequence
  Description of Artificial Sequence: Synthetic oligonucleotide
  Sense strand starting at position 1543 of SEQ ID NO: 1880582
aggguucucuuguccucaa

SEQ ID NO: 1978279 - RNA, 19 nt, Artificial Sequence
  Description of Artificial Sequence: Synthetic oligonucleotide
  Antisense strand to SEQ ID NO: 1978278
uugaggacaagagaacccu

SEQ ID NO: 1978280 - RNA, 19 nt, Artificial Sequence
  Description of Artificial Sequence: Synthetic oligonucleotide
  Sense strand starting at position 1544 of SEQ ID NO: 1880582
ggguucucuuguccucaaa

SEQ ID NO: 1978281 - RNA, 19 nt, Artificial Sequence
  Description of Artificial Sequence: Synthetic oligonucleotide
  Antisense strand to SEQ ID NO: 1978280
uuugaggacaagagaaccc

SEQ ID NO: 1978282 - RNA, 19 nt, Artificial Sequence
  Description of Artificial Sequence: Synthetic oligonucleotide
  Sense strand starting at position 1546 of SEQ ID NO: 1880582
guucucuuguccucaaaga

SEQ ID NO: 1978283 - RNA, 19 nt, Artificial Sequence
  Description of Artificial Sequence: Synthetic oligonucleotide
  Antisense strand to SEQ ID NO: 1978282
ucuuugaggacaagagaac

SEQ ID NO: 1978284 - RNA, 19 nt, Artificial Sequence
  Description of Artificial Sequence: Synthetic oligonucleotide
  Sense strand starting at position 1683 of SEQ ID NO: 1880582
ggccucuucccaggagaca

SEQ ID NO: 1978285 - RNA, 19 nt, Artificial Sequence
  Description of Artificial Sequence: Synthetic oligonucleotide
  Antisense strand to SEQ ID NO: 1978284
ugucuccugggaagaggcc

SEQ ID NO: 1978286 - RNA, 19 nt, Artificial Sequence
  Description of Artificial Sequence: Synthetic oligonucleotide
  Sense strand starting at position 1759 of SEQ ID NO: 1880582
uggcucuucccacagaacu

SEQ ID NO: 1978287 - RNA, 19 nt, Artificial Sequence
  Description of Artificial Sequence: Synthetic oligonucleotide
  Antisense strand to SEQ ID NO: 1978286
aguucugugggaagagcca

SEQ ID NO: 1978288 - RNA, 19 nt, Artificial Sequence
  Description of Artificial Sequence: Synthetic oligonucleotide
  Sense strand starting at position 2082 of SEQ ID NO: 1880582
ggguuuguggccuggagaa

SEQ ID NO: 1978289 - RNA, 19 nt, Artificial Sequence
  Description of Artificial Sequence: Synthetic oligonucleotide
  Antisense strand to SEQ ID NO: 1978288
uucuccaggccacaaaccc

SEQ ID NO: 1978290 - RNA, 19 nt, Artificial Sequence
  Description of Artificial Sequence: Synthetic oligonucleotide
  Sense strand starting at position 2084 of SEQ ID NO: 1880582
guuuguggccuggagaauc

SEQ ID NO: 1978291 - RNA, 19 nt, Artificial Sequence
  Description of Artificial Sequence: Synthetic oligonucleotide
  Antisense strand to SEQ ID NO: 1978290
gauucuccaggccacaaac

SEQ ID NO: 1978292 - RNA, 19 nt, Artificial Sequence
  Description of Artificial Sequence: Synthetic oligonucleotide
  Sense strand starting at position 2135 of SEQ ID NO: 1880582
ucuagaaggcucugguaac

SEQ ID NO: 1978293 - RNA, 19 nt, Artificial Sequence
  Description of Artificial Sequence: Synthetic oligonucleotide
  Antisense strand to SEQ ID NO: 1978292
guuaccagagccuucuaga

SEQ ID NO: 1978294 - RNA, 19 nt, Artificial Sequence
  Description of Artificial Sequence: Synthetic oligonucleotide
  Sense strand starting at position 2447 of SEQ ID NO: 1880582
ugcucaguuccagacauag

SEQ ID NO: 1978295 - RNA, 19 nt, Artificial Sequence
  Description of Artificial Sequence: Synthetic oligonucleotide
  Antisense strand to SEQ ID NO: 1978294
cuaugucuggaacugagca

SEQ ID NO: 1978296 - RNA, 19 nt, Artificial Sequence
  Description of Artificial Sequence: Synthetic oligonucleotide
  Sense strand starting at position 2623 of SEQ ID NO: 1880582
gcaucuugucagcaggauu

SEQ ID NO: 1978297 - RNA, 19 nt, Artificial Sequence
  Description of Artificial Sequence: Synthetic oligonucleotide
  Antisense strand to SEQ ID NO: 1978296
aauccugcugacaagaugc

SEQ ID NO: 1978298 - RNA, 19 nt, Artificial Sequence
  Description of Artificial Sequence: Synthetic oligonucleotide
  Sense strand starting at position 2750 of SEQ ID NO: 1880582
ggagaaugcuuccucuaga

SEQ ID NO: 1978299 - RNA, 19 nt, Artificial Sequence
  Description of Artificial Sequence: Synthetic oligonucleotide
  Antisense strand to SEQ ID NO: 1978298
ucuagaggaagcauucucc

SEQ ID NO: 1978300 - RNA, 19 nt, Artificial Sequence
  Description of Artificial Sequence: Synthetic oligonucleotide
  Sense strand starting at position 2878 of SEQ ID NO: 1880582
uggcuacucuugucaagac

SEQ ID NO: 1978301 - RNA, 19 nt, Artificial Sequence
  Description of Artificial Sequence: Synthetic oligonucleotide
  Antisense strand to SEQ ID NO: 1978300
gucuugacaagaguagcca

SEQ ID NO: 1978302 - RNA, 19 nt, Artificial Sequence
  Description of Artificial Sequence: Synthetic oligonucleotide
  Sense strand starting at position 2903 of SEQ ID NO: 1880582
uuuguuagucuugagcaag

SEQ ID NO: 1978303 - RNA, 19 nt, Artificial Sequence
  Description of Artificial Sequence: Synthetic oligonucleotide
  Antisense strand to SEQ ID NO: 1978302
cuugcucaagacuaacaaa

SEQ ID NO: 1978304 - RNA, 19 nt, Artificial Sequence
  Description of Artificial Sequence: Synthetic oligonucleotide
  Sense strand starting at position 2906 of SEQ ID NO: 1880582
guuagucuugagcaaguaa

SEQ ID NO: 1978305 - RNA, 19 nt, Artificial Sequence
  Description of Artificial Sequence: Synthetic oligonucleotide
  Antisense strand to SEQ ID NO: 1978304
uuacuugcucaagacuaac

SEQ ID NO: 1978306 - RNA, 19 nt, Artificial Sequence
  Description of Artificial Sequence: Synthetic oligonucleotide
  Sense strand starting at position 2931 of SEQ ID NO: 1880582
uuauuuguaugcccucaca

SEQ ID NO: 1978307 - RNA, 19 nt, Artificial Sequence
  Description of Artificial Sequence: Synthetic oligonucleotide
  Antisense strand to SEQ ID NO: 1978306
ugugagggcauacaaauaa

SEQ ID NO: 1978308 - RNA, 19 nt, Artificial Sequence
  Description of Artificial Sequence: Synthetic oligonucleotide
  Sense strand starting at position 3007 of SEQ ID NO: 1880582
ugaaaucuaccaugcugau

SEQ ID NO: 1978309 - RNA, 19 nt, Artificial Sequence
  Description of Artificial Sequence: Synthetic oligonucleotide
  Antisense strand to SEQ ID NO: 1978308
aucagcaugguagauuuca

SEQ ID NO: 1978310 - RNA, 19 nt, Artificial Sequence
  Description of Artificial Sequence: Synthetic oligonucleotide
  Sense strand starting at position 3026 of SEQ ID NO: 1880582
agggauuccugucugucau

SEQ ID NO: 1978311 - RNA, 19 nt, Artificial Sequence
  Description of Artificial Sequence: Synthetic oligonucleotide
  Antisense strand to SEQ ID NO: 1978310
augacagacaggaaucccu

SEQ ID NO: 1978312 - RNA, 19 nt, Artificial Sequence
  Description of Artificial Sequence: Synthetic oligonucleotide
  Sense strand starting at position 3027 of SEQ ID NO: 1880582
gggauuccugucugucaug

SEQ ID NO: 1978313 - RNA, 19 nt, Artificial Sequence
  Description of Artificial Sequence: Synthetic oligonucleotide
  Antisense strand to SEQ ID NO: 1978312
caugacagacaggaauccc

SEQ ID NO: 1978314 - RNA, 19 nt, Artificial Sequence
  Description of Artificial Sequence: Synthetic oligonucleotide
  Sense strand starting at position 3046 of SEQ ID NO: 1880582
gggacuuugagccaugacu

SEQ ID NO: 1978315 - RNA, 19 nt, Artificial Sequence
  Description of Artificial Sequence: Synthetic oligonucleotide
  Antisense strand to SEQ ID NO: 1978314
agucauggcucaaaguccc

SEQ ID NO: 1978316 - RNA, 19 nt, Artificial Sequence
  Description of Artificial Sequence: Synthetic oligonucleotide
  Sense strand starting at position 3048 of SEQ ID NO: 1880582
gacuuugagccaugacuca

SEQ ID NO: 1978317 - RNA, 19 nt, Artificial Sequence
  Description of Artificial Sequence: Synthetic oligonucleotide
  Antisense strand to SEQ ID NO: 1978316
ugagucauggcucaaaguc

SEQ ID NO: 1978318 - RNA, 19 nt, Artificial Sequence
  Description of Artificial Sequence: Synthetic oligonucleotide
  Sense strand starting at position 3148 of SEQ ID NO: 1880582
gccacuaugggaugauucu

SEQ ID NO: 1978319 - RNA, 19 nt, Artificial Sequence
  Description of Artificial Sequence: Synthetic oligonucleotide
  Antisense strand to SEQ ID NO: 1978318
agaaucaucccauaguggc

SEQ ID NO: 1978320 - RNA, 19 nt, Artificial Sequence
  Description of Artificial Sequence: Synthetic oligonucleotide
  Sense strand starting at position 3184 of SEQ ID NO: 1880582
gcaacagaugcccaugaau

SEQ ID NO: 1978321 - RNA, 19 nt, Artificial Sequence
  Description of Artificial Sequence: Synthetic oligonucleotide
  Antisense strand to SEQ ID NO: 1978320
auucaugggcaucuguugc

SEQ ID NO: 1978322 - RNA, 19 nt, Artificial Sequence
  Description of Artificial Sequence: Synthetic oligonucleotide
  Sense strand starting at position 3622 of SEQ ID NO: 1880582
acccaucuuugugugggau

SEQ ID NO: 1978323 - RNA, 19 nt, Artificial Sequence
  Description of Artificial Sequence: Synthetic oligonucleotide
  Antisense strand to SEQ ID NO: 1978322
aucccacacaaagaugggu

SEQ ID NO: 1978324 - RNA, 19 nt, Artificial Sequence
  Description of Artificial Sequence: Synthetic oligonucleotide
  Sense strand starting at position 3645 of SEQ ID NO: 1880582
ggcucagugcuaggacaga

SEQ ID NO: 1978325 - RNA, 19 nt, Artificial Sequence
  Description of Artificial Sequence: Synthetic oligonucleotide
  Antisense strand to SEQ ID NO: 1978324
ucuguccuagcacugagcc

SEQ ID NO: 1978326 - RNA, 19 nt, Artificial Sequence
  Description of Artificial Sequence: Synthetic oligonucleotide
  Sense strand starting at position 3976 of SEQ ID NO: 1880582
ggccaucuuguccaaguaa

SEQ ID NO: 1978327 - RNA, 19 nt, Artificial Sequence
  Description of Artificial Sequence: Synthetic oligonucleotide
  Antisense strand to SEQ ID NO: 1978326
uuacuuggacaagauggcc

SEQ ID NO: 1978328 - RNA, 19 nt, Artificial Sequence
  Description of Artificial Sequence: Synthetic oligonucleotide
  Sense strand starting at position 222 of SEQ ID NO: 1880583
cagggaaauuccuguuuau

SEQ ID NO: 1978329 - RNA, 19 nt, Artificial Sequence
  Description of Artificial Sequence: Synthetic oligonucleotide
  Antisense strand to SEQ ID NO: 1978328
auaaacaggaauuucccug

SEQ ID NO: 1978330 - RNA, 19 nt, Artificial Sequence
  Description of Artificial Sequence: Synthetic oligonucleotide
  Sense strand starting at position 225 of SEQ ID NO: 1880583
ggaaauuccuguuuauaaa

SEQ ID NO: 1978331 - RNA, 19 nt, Artificial Sequence
  Description of Artificial Sequence: Synthetic oligonucleotide
  Antisense strand to SEQ ID NO: 1978330
uuuauaaacaggaauuucc

SEQ ID NO: 1978332 - RNA, 19 nt, Artificial Sequence
  Description of Artificial Sequence: Synthetic oligonucleotide
  Sense strand starting at position 247 of SEQ ID NO: 1880583
aucagaaucucuugggacu

SEQ ID NO: 1978333 - RNA, 19 nt, Artificial Sequence
  Description of Artificial Sequence: Synthetic oligonucleotide
  Antisense strand to SEQ ID NO: 1978332
agucccaagagauucugau

SEQ ID NO: 1978334 - RNA, 19 nt, Artificial Sequence
  Description of Artificial Sequence: Synthetic oligonucleotide
  Sense strand starting at position 248 of SEQ ID NO: 1880583
ucagaaucucuugggacuu

SEQ ID NO: 1978335 - RNA, 19 nt, Artificial Sequence
  Description of Artificial Sequence: Synthetic oligonucleotide
  Antisense strand to SEQ ID NO: 1978334
aagucccaagagauucuga

SEQ ID NO: 1978336 - RNA, 19 nt, Artificial Sequence
  Description of Artificial Sequence: Synthetic oligonucleotide
  Sense strand starting at position 250 of SEQ ID NO: 1880583
agaaucucuugggacuuau

SEQ ID NO: 1978337 - RNA, 19 nt, Artificial Sequence
  Description of Artificial Sequence: Synthetic oligonucleotide
  Antisense strand to SEQ ID NO: 1978336
auaagucccaagagauucu

SEQ ID NO: 1978338 - RNA, 19 nt, Artificial Sequence
  Description of Artificial Sequence: Synthetic oligonucleotide
  Sense strand starting at position 407 of SEQ ID NO: 1880583
agcaucuuucuggguguca

SEQ ID NO: 1978339 - RNA, 19 nt, Artificial Sequence
  Description of Artificial Sequence: Synthetic oligonucleotide
  Antisense strand to SEQ ID NO: 1978338
ugacacccagaaagaugcu

SEQ ID NO: 1978340 - RNA, 19 nt, Artificial Sequence
  Description of Artificial Sequence: Synthetic oligonucleotide
  Sense strand starting at position 409 of SEQ ID NO: 1880583
caucuuucugggugucaca

SEQ ID NO: 1978341 - RNA, 19 nt, Artificial Sequence
  Description of Artificial Sequence: Synthetic oligonucleotide
  Antisense strand to SEQ ID NO: 1978340
ugugacacccagaaagaug

SEQ ID NO: 1978342 - RNA, 19 nt, Artificial Sequence
  Description of Artificial Sequence: Synthetic oligonucleotide
  Sense strand starting at position 437 of SEQ ID NO: 1880583
ggagcaguuugguggaaca

SEQ ID NO: 1978343 - RNA, 19 nt, Artificial Sequence
  Description of Artificial Sequence: Synthetic oligonucleotide
  Antisense strand to SEQ ID NO: 1978342
uguuccaccaaacugcucc

SEQ ID NO: 1978344 - RNA, 19 nt, Artificial Sequence
  Description of Artificial Sequence: Synthetic oligonucleotide
  Sense strand starting at position 710 of SEQ ID NO: 1880583
uguuauaacuuucuaugag

SEQ ID NO: 1978345 - RNA, 19 nt, Artificial Sequence
  Description of Artificial Sequence: Synthetic oligonucleotide
  Antisense strand to SEQ ID NO: 1978344
cucauagaaaguuauaaca

SEQ ID NO: 1978346 - RNA, 19 nt, Artificial Sequence
  Description of Artificial Sequence: Synthetic oligonucleotide
  Sense strand starting at position 711 of SEQ ID NO: 1880583
guuauaacuuucuaugaga

SEQ ID NO: 1978347 - RNA, 19 nt, Artificial Sequence
  Description of Artificial Sequence: Synthetic oligonucleotide
  Antisense strand to SEQ ID NO: 1978346
ucucauagaaaguuauaac

SEQ ID NO: 1978348 - RNA, 19 nt, Artificial Sequence
  Description of Artificial Sequence: Synthetic oligonucleotide
  Sense strand starting at position 880 of SEQ ID NO: 1880583
ccuagucaauauggacauu

SEQ ID NO: 1978349 - RNA, 19 nt, Artificial Sequence
  Description of Artificial Sequence: Synthetic oligonucleotide
  Antisense strand to SEQ ID NO: 1978348
aauguccauauugacuagg

SEQ ID NO: 1978350 - RNA, 19 nt, Artificial Sequence
  Description of Artificial Sequence: Synthetic oligonucleotide
  Sense strand starting at position 1151 of SEQ ID NO: 1880583
gguuuaggauuucaacgua

SEQ ID NO: 1978351 - RNA, 19 nt, Artificial Sequence
  Description of Artificial Sequence: Synthetic oligonucleotide
  Antisense strand to SEQ ID NO: 1978350
uacguugaaauccuaaacc

SEQ ID NO: 1978352 - RNA, 19 nt, Artificial Sequence
  Description of Artificial Sequence: Synthetic oligonucleotide
  Sense strand starting at position 1304 of SEQ ID NO: 1880583
gcaggucugugacaacauu

SEQ ID NO: 1978353 - RNA, 19 nt, Artificial Sequence
  Description of Artificial Sequence: Synthetic oligonucleotide
  Antisense strand to SEQ ID NO: 1978352
aauguugucacagaccugc

SEQ ID NO: 1978354 - RNA, 19 nt, Artificial Sequence
  Description of Artificial Sequence: Synthetic oligonucleotide
  Sense strand starting at position 1373 of SEQ ID NO: 1880583
cagagucgcaccugugaga

SEQ ID NO: 1978355 - RNA, 19 nt, Artificial Sequence
  Description of Artificial Sequence: Synthetic oligonucleotide
  Antisense strand to SEQ ID NO: 1978354
ucucacaggugcgacucug

SEQ ID NO: 1978356 - RNA, 19 nt, Artificial Sequence
  Description of Artificial Sequence: Synthetic oligonucleotide
  Sense strand starting at position 2022 of SEQ ID NO: 1880583
cgaucuugcucagacgcau

SEQ ID NO: 1978357 - RNA, 19 nt, Artificial Sequence
  Description of Artificial Sequence: Synthetic oligonucleotide
  Antisense strand to SEQ ID NO: 1978356
augcgucugagcaagaucg

SEQ ID NO: 1978358 - RNA, 19 nt, Artificial Sequence
  Description of Artificial Sequence: Synthetic oligonucleotide
  Sense strand starting at position 2133 of SEQ ID NO: 1880583
ccuacuuaccuguagaagu

SEQ ID NO: 1978359 - RNA, 19 nt, Artificial Sequence
  Description of Artificial Sequence: Synthetic oligonucleotide
  Antisense strand to SEQ ID NO: 1978358
acuucuacagguaaguagg

SEQ ID NO: 1978360 - RNA, 19 nt, Artificial Sequence
  Description of Artificial Sequence: Synthetic oligonucleotide
  Sense strand starting at position 2192 of SEQ ID NO: 1880583
uggucaugcucauccuuau

SEQ ID NO: 1978361 - RNA, 19 nt, Artificial Sequence
  Description of Artificial Sequence: Synthetic oligonucleotide
  Antisense strand to SEQ ID NO: 1978360
auaaggaugagcaugacca

SEQ ID NO: 1978362 - RNA, 19 nt, Artificial Sequence
  Description of Artificial Sequence: Synthetic oligonucleotide
  Sense strand starting at position 2229 of SEQ ID NO: 1880583
cucagaaugaguugaugug

SEQ ID NO: 1978363 - RNA, 19 nt, Artificial Sequence
  Description of Artificial Sequence: Synthetic oligonucleotide
  Antisense strand to SEQ ID NO: 1978362
cacaucaacucauucugag

SEQ ID NO: 1978364 - RNA, 19 nt, Artificial Sequence
  Description of Artificial Sequence: Synthetic oligonucleotide
  Sense strand starting at position 2244 of SEQ ID NO: 1880583
uguggcuucgucugacaca

SEQ ID NO: 1978365 - RNA, 19 nt, Artificial Sequence
  Description of Artificial Sequence: Synthetic oligonucleotide
  Antisense strand to SEQ ID NO: 1978364
ugugucagacgaagccaca

SEQ ID NO: 1978366 - RNA, 19 nt, Artificial Sequence
  Description of Artificial Sequence: Synthetic oligonucleotide
  Sense strand starting at position 2245 of SEQ ID NO: 1880583
guggcuucgucugacacaa

SEQ ID NO: 1978367 - RNA, 19 nt, Artificial Sequence
  Description of Artificial Sequence: Synthetic oligonucleotide
  Antisense strand to SEQ ID NO: 1978366
uugugucagacgaagccac

SEQ ID NO: 1978368 - RNA, 19 nt, Artificial Sequence
  Description of Artificial Sequence: Synthetic oligonucleotide
  Sense strand starting at position 2371 of SEQ ID NO: 1880583
gccacacuccgucauuaau

SEQ ID NO: 1978369 - RNA, 19 nt, Artificial Sequence
  Description of Artificial Sequence: Synthetic oligonucleotide
  Antisense strand to SEQ ID NO: 1978368
auuaaugacggaguguggc

SEQ ID NO: 1978370 - RNA, 19 nt, Artificial Sequence
  Description of Artificial Sequence: Synthetic oligonucleotide
  Sense strand starting at position 130 of SEQ ID NO: 1880584
uagugugagacagaucagu

SEQ ID NO: 1978371 - RNA, 19 nt, Artificial Sequence
  Description of Artificial Sequence: Synthetic oligonucleotide
  Antisense strand to SEQ ID NO: 1978370
acugaucugucucacacua

SEQ ID NO: 1978372 - RNA, 19 nt, Artificial Sequence
  Description of Artificial Sequence: Synthetic oligonucleotide
  Sense strand starting at position 141 of SEQ ID NO: 1880584
agaucaguaggguaaguuu

SEQ ID NO: 1978373 - RNA, 19 nt, Artificial Sequence
  Description of Artificial Sequence: Synthetic oligonucleotide
  Antisense strand to SEQ ID NO: 1978372
aaacuuacccuacugaucu

SEQ ID NO: 1978374 - RNA, 19 nt, Artificial Sequence
  Description of Artificial Sequence: Synthetic oligonucleotide
  Sense strand starting at position 650 of SEQ ID NO: 1880584
guuaaugacuuacccaaag

SEQ ID NO: 1978375 - RNA, 19 nt, Artificial Sequence
  Description of Artificial Sequence: Synthetic oligonucleotide
  Antisense strand to SEQ ID NO: 1978374
cuuuggguaagucauuaac

SEQ ID NO: 1978376 - RNA, 19 nt, Artificial Sequence
  Description of Artificial Sequence: Synthetic oligonucleotide
  Sense strand starting at position 745 of SEQ ID NO: 1880584
ugccucugagacugaauua

SEQ ID NO: 1978377 - RNA, 19 nt, Artificial Sequence
  Description of Artificial Sequence: Synthetic oligonucleotide
  Antisense strand to SEQ ID NO: 1978376
uaauucagucucagaggca

SEQ ID NO: 1978378 - RNA, 19 nt, Artificial Sequence
  Description of Artificial Sequence: Synthetic oligonucleotide
  Sense strand starting at position 849 of SEQ ID NO: 1880584
agacaaauuuagcagaguu

SEQ ID NO: 1978379 - RNA, 19 nt, Artificial Sequence
  Description of Artificial Sequence: Synthetic oligonucleotide
  Antisense strand to SEQ ID NO: 1978378
aacucugcuaaauuugucu

SEQ ID NO: 1978380 - RNA, 19 nt, Artificial Sequence
  Description of Artificial Sequence: Synthetic oligonucleotide
  Sense strand starting at position 905 of SEQ ID NO: 1880584
cuuggaaccagucaagguu

SEQ ID NO: 1978381 - RNA, 19 nt, Artificial Sequence
  Description of Artificial Sequence: Synthetic oligonucleotide
  Antisense strand to SEQ ID NO: 1978380
aaccuugacugguuccaag

SEQ ID NO: 1978382 - RNA, 19 nt, Artificial Sequence
  Description of Artificial Sequence: Synthetic oligonucleotide
  Sense strand starting at position 1011 of SEQ ID NO: 1880584
uuugguauuugccuuauua

SEQ ID NO: 1978383 - RNA, 19 nt, Artificial Sequence
  Description of Artificial Sequence: Synthetic oligonucleotide
  Antisense strand to SEQ ID NO: 1978382
uaauaaggcaaauaccaaa

SEQ ID NO: 1978384 - RNA, 19 nt, Artificial Sequence
  Description of Artificial Sequence: Synthetic oligonucleotide
  Sense strand starting at position 1021 of SEQ ID NO: 1880584
gccuuauuagaacaugucu

SEQ ID NO: 1978385 - RNA, 19 nt, Artificial Sequence
  Description of Artificial Sequence: Synthetic oligonucleotide
  Antisense strand to SEQ ID NO: 1978384
agacauguucuaauaaggc

SEQ ID NO: 1978386 - RNA, 19 nt, Artificial Sequence
  Description of Artificial Sequence: Synthetic oligonucleotide
  Sense strand starting at position 1041 of SEQ ID NO: 1880584
agcaguuugcgacuuguua

SEQ ID NO: 1978387 - RNA, 19 nt, Artificial Sequence
  Description of Artificial Sequence: Synthetic oligonucleotide
  Antisense strand to SEQ ID NO: 1978386
uaacaagucgcaaacugcu

SEQ ID NO: 1978388 - RNA, 19 nt, Artificial Sequence
  Description of Artificial Sequence: Synthetic oligonucleotide
  Sense strand starting at position 1042 of SEQ ID NO: 1880584
gcaguuugcgacuuguuau

SEQ ID NO: 1978389 - RNA, 19 nt, Artificial Sequence
  Description of Artificial Sequence: Synthetic oligonucleotide
  Antisense strand to SEQ ID NO: 1978388
auaacaagucgcaaacugc

SEQ ID NO: 1978390 - RNA, 19 nt, Artificial Sequence
  Description of Artificial Sequence: Synthetic oligonucleotide
  Sense strand starting at position 1054 of SEQ ID NO: 1880584
uuguuauuggcugauauga

SEQ ID NO: 1978391 - RNA, 19 nt, Artificial Sequence
  Description of Artificial Sequence: Synthetic oligonucleotide
  Antisense strand to SEQ ID NO: 1978390
ucauaucagccaauaacaa

SEQ ID NO: 1978392 - RNA, 19 nt, Artificial Sequence
  Description of Artificial Sequence: Synthetic oligonucleotide
  Sense strand starting at position 1062 of SEQ ID NO: 1880584
ggcugauaugauuggccaa

SEQ ID NO: 1978393 - RNA, 19 nt, Artificial Sequence
  Description of Artificial Sequence: Synthetic oligonucleotide
  Antisense strand to SEQ ID NO: 1978392
uuggccaaucauaucagcc

SEQ ID NO: 1978394 - RNA, 19 nt, Artificial Sequence
  Description of Artificial Sequence: Synthetic oligonucleotide
  Sense strand starting at position 1063 of SEQ ID NO: 1880584
gcugauaugauuggccaaa

SEQ ID NO: 1978395 - RNA, 19 nt, Artificial Sequence
  Description of Artificial Sequence: Synthetic oligonucleotide
  Antisense strand to SEQ ID NO: 1978394
uuuggccaaucauaucagc

SEQ ID NO: 1978396 - RNA, 19 nt, Artificial Sequence
  Description of Artificial Sequence: Synthetic oligonucleotide
  Sense strand starting at position 1248 of SEQ ID NO: 1880584
gcuagauuggacgguggaa

SEQ ID NO: 1978397 - RNA, 19 nt, Artificial Sequence
  Description of Artificial Sequence: Synthetic oligonucleotide
  Antisense strand to SEQ ID NO: 1978396
uuccaccguccaaucuagc

SEQ ID NO: 1978398 - RNA, 19 nt, Artificial Sequence
  Description of Artificial Sequence: Synthetic oligonucleotide
  Sense strand starting at position 1572 of SEQ ID NO: 1880584
uuaugugaucaauacugua

SEQ ID NO: 1978399 - RNA, 19 nt, Artificial Sequence
  Description of Artificial Sequence: Synthetic oligonucleotide
  Antisense strand to SEQ ID NO: 1978398
uacaguauugaucacauaa

SEQ ID NO: 1978400 - RNA, 19 nt, Artificial Sequence
  Description of Artificial Sequence: Synthetic oligonucleotide
  Sense strand starting at position 1582 of SEQ ID NO: 1880584
aauacuguacucuggagua

SEQ ID NO: 1978401 - RNA, 19 nt, Artificial Sequence
  Description of Artificial Sequence: Synthetic oligonucleotide
  Antisense strand to SEQ ID NO: 1978400
uacuccagaguacaguauu

SEQ ID NO: 1978402 - RNA, 19 nt, Artificial Sequence
  Description of Artificial Sequence: Synthetic oligonucleotide
  Sense strand starting at position 1584 of SEQ ID NO: 1880584
uacuguacucuggaguagu

SEQ ID NO: 1978403 - RNA, 19 nt, Artificial Sequence
  Description of Artificial Sequence: Synthetic oligonucleotide
  Antisense strand to SEQ ID NO: 1978402
acuacuccagaguacagua

SEQ ID NO: 1978404 - RNA, 19 nt, Artificial Sequence
  Description of Artificial Sequence: Synthetic oligonucleotide
  Sense strand starting at position 1607 of SEQ ID NO: 1880584
aguacaagugauuauaggu

SEQ ID NO: 1978405 - RNA, 19 nt, Artificial Sequence
  Description of Artificial Sequence: Synthetic oligonucleotide
  Antisense strand to SEQ ID NO: 1978404
accuauaaucacuuguacu

SEQ ID NO: 1978406 - RNA, 19 nt, Artificial Sequence
  Description of Artificial Sequence: Synthetic oligonucleotide
  Sense strand starting at position 1612 of SEQ ID NO: 1880584
aagugauuauagguaacag

SEQ ID NO: 1978407 - RNA, 19 nt, Artificial Sequence
  Description of Artificial Sequence: Synthetic oligonucleotide
  Antisense strand to SEQ ID NO: 1978406
cuguuaccuauaaucacuu

SEQ ID NO: 1978408 - RNA, 19 nt, Artificial Sequence
  Description of Artificial Sequence: Synthetic oligonucleotide
  Sense strand starting at position 1613 of SEQ ID NO: 1880584
agugauuauagguaacagu

SEQ ID NO: 1978409 - RNA, 19 nt, Artificial Sequence
  Description of Artificial Sequence: Synthetic oligonucleotide
  Antisense strand to SEQ ID NO: 1978408
acuguuaccuauaaucacu

SEQ ID NO: 1978410 - RNA, 19 nt, Artificial Sequence
  Description of Artificial Sequence: Synthetic oligonucleotide
  Sense strand starting at position 1722 of SEQ ID NO: 1880584
gauauuacagcugaaguau

SEQ ID NO: 1978411 - RNA, 19 nt, Artificial Sequence
  Description of Artificial Sequence: Synthetic oligonucleotide
  Antisense strand to SEQ ID NO: 1978410
auacuucagcuguaauauc

SEQ ID NO: 1978412 - RNA, 19 nt, Artificial Sequence
  Description of Artificial Sequence: Synthetic oligonucleotide
  Sense strand starting at position 1768 of SEQ ID NO: 1880584
cugaauagccagugaauag

SEQ ID NO: 1978413 - RNA, 19 nt, Artificial Sequence
  Description of Artificial Sequence: Synthetic oligonucleotide
  Antisense strand to SEQ ID NO: 1978412
cuauucacuggcuauucag

SEQ ID NO: 1978414 - RNA, 19 nt, Artificial Sequence
  Description of Artificial Sequence: Synthetic oligonucleotide
  Sense strand starting at position 1769 of SEQ ID NO: 1880584
ugaauagccagugaauagu

SEQ ID NO: 1978415 - RNA, 19 nt, Artificial Sequence
  Description of Artificial Sequence: Synthetic oligonucleotide
  Antisense strand to SEQ ID NO: 1978414
acuauucacuggcuauuca

SEQ ID NO: 1978416 - RNA, 19 nt, Artificial Sequence
  Description of Artificial Sequence: Synthetic oligonucleotide
  Sense strand starting at position 1785 of SEQ ID NO: 1880584
aguaguauuaaugagaggu

SEQ ID NO: 1978417 - RNA, 19 nt, Artificial Sequence
  Description of Artificial Sequence: Synthetic oligonucleotide
  Antisense strand to SEQ ID NO: 1978416
accucucauuaauacuacu

SEQ ID NO: 1978418 - RNA, 19 nt, Artificial Sequence
  Description of Artificial Sequence: Synthetic oligonucleotide
  Sense strand starting at position 2748 of SEQ ID NO: 1880584
auuagcucucuguaaagca

SEQ ID NO: 1978419 - RNA, 19 nt, Artificial Sequence
  Description of Artificial Sequence: Synthetic oligonucleotide
  Antisense strand to SEQ ID NO: 1978418
ugcuuuacagagagcuaau

SEQ ID NO: 1978420 - RNA, 19 nt, Artificial Sequence
  Description of Artificial Sequence: Synthetic oligonucleotide
  Sense strand starting at position 2919 of SEQ ID NO: 1880584
gucugcgugcguuuaugaa

SEQ ID NO: 1978421 - RNA, 19 nt, Artificial Sequence
  Description of Artificial Sequence: Synthetic oligonucleotide
  Antisense strand to SEQ ID NO: 1978420
uucauaaacgcacgcagac

SEQ ID NO: 1978422 - RNA, 19 nt, Artificial Sequence
  Description of Artificial Sequence: Synthetic oligonucleotide
  Sense strand starting at position 3011 of SEQ ID NO: 1880584
cacauuaaggucugaacga

SEQ ID NO: 1978423 - RNA, 19 nt, Artificial Sequence
  Description of Artificial Sequence: Synthetic oligonucleotide
  Antisense strand to SEQ ID NO: 1978422
ucguucagaccuuaaugug

SEQ ID NO: 1978424 - RNA, 19 nt, Artificial Sequence
  Description of Artificial Sequence: Synthetic oligonucleotide
  Sense strand starting at position 3083 of SEQ ID NO: 1880584
cuuuauagugcucaucauc

SEQ ID NO: 1978425 - RNA, 19 nt, Artificial Sequence
  Description of Artificial Sequence: Synthetic oligonucleotide
  Antisense strand to SEQ ID NO: 1978424
gaugaugagcacuauaaag

SEQ ID NO: 1978426 - RNA, 19 nt, Artificial Sequence
  Description of Artificial Sequence: Synthetic oligonucleotide
  Sense strand starting at position 3147 of SEQ ID NO: 1880584
ggacuaugcaaguguaaua

SEQ ID NO: 1978427 - RNA, 19 nt, Artificial Sequence
  Description of Artificial Sequence: Synthetic oligonucleotide
  Antisense strand to SEQ ID NO: 1978426
uauuacacuugcauagucc

SEQ ID NO: 1978428 - RNA, 19 nt, Artificial Sequence
  Description of Artificial Sequence: Synthetic oligonucleotide
  Sense strand starting at position 3354 of SEQ ID NO: 1880584
uuauaaacugugcauguga

SEQ ID NO: 1978429 - RNA, 19 nt, Artificial Sequence
  Description of Artificial Sequence: Synthetic oligonucleotide
  Antisense strand to SEQ ID NO: 1978428
ucacaugcacaguuuauaa

SEQ ID NO: 1978430 - RNA, 19 nt, Artificial Sequence
  Description of Artificial Sequence: Synthetic oligonucleotide
  Sense strand starting at position 3383 of SEQ ID NO: 1880584
cuguaugcuccuuagauaa

SEQ ID NO: 1978431 - RNA, 19 nt, Artificial Sequence
  Description of Artificial Sequence: Synthetic oligonucleotide
  Antisense strand to SEQ ID NO: 1978430
uuaucuaaggagcauacag

SEQ ID NO: 1978432 - RNA, 19 nt, Artificial Sequence
  Description of Artificial Sequence: Synthetic oligonucleotide
  Sense strand starting at position 3547 of SEQ ID NO: 1880584
acguguuuaauggaaacua

SEQ ID NO: 1978433 - RNA, 19 nt, Artificial Sequence
  Description of Artificial Sequence: Synthetic oligonucleotide
  Antisense strand to SEQ ID NO: 1978432
uaguuuccauuaaacacgu

SEQ ID NO: 1978434 - RNA, 19 nt, Artificial Sequence
  Description of Artificial Sequence: Synthetic oligonucleotide
  Sense strand starting at position 3558 of SEQ ID NO: 1880584
ggaaacuauugguuauaca

SEQ ID NO: 1978435 - RNA, 19 nt, Artificial Sequence
  Description of Artificial Sequence: Synthetic oligonucleotide
  Antisense strand to SEQ ID NO: 1978434
uguauaaccaauaguuucc

SEQ ID NO: 1978436 - RNA, 19 nt, Artificial Sequence
  Description of Artificial Sequence: Synthetic oligonucleotide
  Sense strand starting at position 3601 of SEQ ID NO: 1880584
uuaauaugucuguaaggca

SEQ ID NO: 1978437 - RNA, 19 nt, Artificial Sequence
  Description of Artificial Sequence: Synthetic oligonucleotide
  Antisense strand to SEQ ID NO: 1978436
ugccuuacagacauauuaa

SEQ ID NO: 1978438 - RNA, 19 nt, Artificial Sequence
  Description of Artificial Sequence: Synthetic oligonucleotide
  Sense strand starting at position 3616 of SEQ ID NO: 1880584
ggcauuuaguuucuuuagu

SEQ ID NO: 1978439 - RNA, 19 nt, Artificial Sequence
  Description of Artificial Sequence: Synthetic oligonucleotide
  Antisense strand to SEQ ID NO: 1978438
acuaaagaaacuaaaugcc

SEQ ID NO: 1978440 - RNA, 19 nt, Artificial Sequence
  Description of Artificial Sequence: Synthetic oligonucleotide
  Sense strand starting at position 3617 of SEQ ID NO: 1880584
gcauuuaguuucuuuagua

SEQ ID NO: 1978441 - RNA, 19 nt, Artificial Sequence
  Description of Artificial Sequence: Synthetic oligonucleotide
  Antisense strand to SEQ ID NO: 1978440
uacuaaagaaacuaaaugc

SEQ ID NO: 1978442 - RNA, 19 nt, Artificial Sequence
  Description of Artificial Sequence: Synthetic oligonucleotide
  Sense strand starting at position 3762 of SEQ ID NO: 1880584
uccaguuauggugauccuu

SEQ ID NO: 1978443 - RNA, 19 nt, Artificial Sequence
  Description of Artificial Sequence: Synthetic oligonucleotide
  Antisense strand to SEQ ID NO: 1978442
aaggaucaccauaacugga

SEQ ID NO: 1978444 - RNA, 19 nt, Artificial Sequence
  Description of Artificial Sequence: Synthetic oligonucleotide
  Sense strand starting at position 3764 of SEQ ID NO: 1880584
caguuauggugauccuuaa

SEQ ID NO: 1978445 - RNA, 19 nt, Artificial Sequence
  Description of Artificial Sequence: Synthetic oligonucleotide
  Antisense strand to SEQ ID NO: 1978444
uuaaggaucaccauaacug

SEQ ID NO: 1978446 - RNA, 19 nt, Artificial Sequence
  Description of Artificial Sequence: Synthetic oligonucleotide
  Sense strand starting at position 3880 of SEQ ID NO: 1880584
gaauauuugucccacugag

SEQ ID NO: 1978447 - RNA, 19 nt, Artificial Sequence
  Description of Artificial Sequence: Synthetic oligonucleotide
  Antisense strand to SEQ ID NO: 1978446
cucagugggacaaauauuc

SEQ ID NO: 1978448 - RNA, 19 nt, Artificial Sequence
  Description of Artificial Sequence: Synthetic oligonucleotide
  Sense strand starting at position 3889 of SEQ ID NO: 1880584
ucccacugagcggaauaaa

SEQ ID NO: 1978449 - RNA, 19 nt, Artificial Sequence
  Description of Artificial Sequence: Synthetic oligonucleotide
  Antisense strand to SEQ ID NO: 1978448
uuuauuccgcucaguggga

SEQ ID NO: 1978450 - RNA, 19 nt, Artificial Sequence
  Description of Artificial Sequence: Synthetic oligonucleotide
  Sense strand starting at position 24 of SEQ ID NO: 1880585
agaggaaucuuaguuucca

SEQ ID NO: 1978451 - RNA, 19 nt, Artificial Sequence
  Description of Artificial Sequence: Synthetic oligonucleotide
  Antisense strand to SEQ ID NO: 1978450
uggaaacuaagauuccucu

SEQ ID NO: 1978452 - RNA, 19 nt, Artificial Sequence
  Description of Artificial Sequence: Synthetic oligonucleotide
  Sense strand starting at position 25 of SEQ ID NO: 1880585
gaggaaucuuaguuuccag

SEQ ID NO: 1978453 - RNA, 19 nt, Artificial Sequence
  Description of Artificial Sequence: Synthetic oligonucleotide
  Antisense strand to SEQ ID NO: 1978452
cuggaaacuaagauuccuc

SEQ ID NO: 1978454 - RNA, 19 nt, Artificial Sequence
  Description of Artificial Sequence: Synthetic oligonucleotide
  Sense strand starting at position 32 of SEQ ID NO: 1880585
cuuaguuuccaguaggaau

SEQ ID NO: 1978455 - RNA, 19 nt, Artificial Sequence
  Description of Artificial Sequence: Synthetic oligonucleotide
  Antisense strand to SEQ ID NO: 1978454
auuccuacuggaaacuaag

SEQ ID NO: 1978456 - RNA, 19 nt, Artificial Sequence
  Description of Artificial Sequence: Synthetic oligonucleotide
  Sense strand starting at position 119 of SEQ ID NO: 1880585
uguuaagcugacuagugaa

SEQ ID NO: 1978457 - RNA, 19 nt, Artificial Sequence
  Description of Artificial Sequence: Synthetic oligonucleotide
  Antisense strand to SEQ ID NO: 1978456
uucacuagucagcuuaaca

SEQ ID NO: 1978458 - RNA, 19 nt, Artificial Sequence
  Description of Artificial Sequence: Synthetic oligonucleotide
  Sense strand starting at position 132 of SEQ ID NO: 1880585
agugaaaugucauuguaga

SEQ ID NO: 1978459 - RNA, 19 nt, Artificial Sequence
  Description of Artificial Sequence: Synthetic oligonucleotide
  Antisense strand to SEQ ID NO: 1978458
ucuacaaugacauuucacu

SEQ ID NO: 1978460 - RNA, 19 nt, Artificial Sequence
  Description of Artificial Sequence: Synthetic oligonucleotide
  Sense strand starting at position 133 of SEQ ID NO: 1880585
gugaaaugucauuguagaa

SEQ ID NO: 1978461 - RNA, 19 nt, Artificial Sequence
  Description of Artificial Sequence: Synthetic oligonucleotide
  Antisense strand to SEQ ID NO: 1978460
uucuacaaugacauuucac

SEQ ID NO: 1978462 - RNA, 19 nt, Artificial Sequence
  Description of Artificial Sequence: Synthetic oligonucleotide
  Sense strand starting at position 264 of SEQ ID NO: 1880585
ugcauuagaucaguuagag

SEQ ID NO: 1978463 - RNA, 19 nt, Artificial Sequence
  Description of Artificial Sequence: Synthetic oligonucleotide
  Antisense strand to SEQ ID NO: 1978462
cucuaacugaucuaaugca

SEQ ID NO: 1978464 - RNA, 19 nt, Artificial Sequence
  Description of Artificial Sequence: Synthetic oligonucleotide
  Sense strand starting at position 273 of SEQ ID NO: 1880585
ucaguuagagcugaaccaa

SEQ ID NO: 1978465 - RNA, 19 nt, Artificial Sequence
  Description of Artificial Sequence: Synthetic oligonucleotide
  Antisense strand to SEQ ID NO: 1978464
uugguucagcucuaacuga

SEQ ID NO: 1978466 - RNA, 19 nt, Artificial Sequence
  Description of Artificial Sequence: Synthetic oligonucleotide
  Sense strand starting at position 341 of SEQ ID NO: 1880585
ccuaauuauuagguguaaa

SEQ ID NO: 1978467 - RNA, 19 nt, Artificial Sequence
  Description of Artificial Sequence: Synthetic oligonucleotide
  Antisense strand to SEQ ID NO: 1978466
uuuacaccuaauaauuagg

SEQ ID NO: 1978468 - RNA, 19 nt, Artificial Sequence
  Description of Artificial Sequence: Synthetic oligonucleotide
  Sense strand starting at position 389 of SEQ ID NO: 1880585
uaauguccucuuuggaaag

SEQ ID NO: 1978469 - RNA, 19 nt, Artificial Sequence
  Description of Artificial Sequence: Synthetic oligonucleotide
  Antisense strand to SEQ ID NO: 1978468
cuuuccaaagaggacauua

SEQ ID NO: 1978470 - RNA, 19 nt, Artificial Sequence
  Description of Artificial Sequence: Synthetic oligonucleotide
  Sense strand starting at position 451 of SEQ ID NO: 1880585
aagcaaagucuguaaugac

SEQ ID NO: 1978471 - RNA, 19 nt, Artificial Sequence
  Description of Artificial Sequence: Synthetic oligonucleotide
  Antisense strand to SEQ ID NO: 1978470
gucauuacagacuuugcuu

SEQ ID NO: 1978472 - RNA, 19 nt, Artificial Sequence
  Description of Artificial Sequence: Synthetic oligonucleotide
  Sense strand starting at position 491 of SEQ ID NO: 1880585
cuugaauugcuuuagcaaa

SEQ ID NO: 1978473 - RNA, 19 nt, Artificial Sequence
  Description of Artificial Sequence: Synthetic oligonucleotide
  Antisense strand to SEQ ID NO: 1978472
uuugcuaaagcaauucaag

SEQ ID NO: 1978474 - RNA, 19 nt, Artificial Sequence
  Description of Artificial Sequence: Synthetic oligonucleotide
  Sense strand starting at position 629 of SEQ ID NO: 1880585
gcaugucagcugcuaaguu

SEQ ID NO: 1978475 - RNA, 19 nt, Artificial Sequence
  Description of Artificial Sequence: Synthetic oligonucleotide
  Antisense strand to SEQ ID NO: 1978474
aacuuagcagcugacaugc

SEQ ID NO: 1978476 - RNA, 19 nt, Artificial Sequence
  Description of Artificial Sequence: Synthetic oligonucleotide
  Sense strand starting at position 876 of SEQ ID NO: 1880585
agcuacuauuuguugcaau

SEQ ID NO: 1978477 - RNA, 19 nt, Artificial Sequence
  Description of Artificial Sequence: Synthetic oligonucleotide
  Antisense strand to SEQ ID NO: 1978476
auugcaacaaauaguagcu

SEQ ID NO: 1978478 - RNA, 19 nt, Artificial Sequence
  Description of Artificial Sequence: Synthetic oligonucleotide
  Sense strand starting at position 959 of SEQ ID NO: 1880585
cugugaacuagauaugguu

SEQ ID NO: 1978479 - RNA, 19 nt, Artificial Sequence
  Description of Artificial Sequence: Synthetic oligonucleotide
  Antisense strand to SEQ ID NO: 1978478
aaccauaucuaguucacag

SEQ ID NO: 1978480 - RNA, 19 nt, Artificial Sequence
  Description of Artificial Sequence: Synthetic oligonucleotide
  Sense strand starting at position 967 of SEQ ID NO: 1880585
uagauaugguugguaucau

SEQ ID NO: 1978481 - RNA, 19 nt, Artificial Sequence
  Description of Artificial Sequence: Synthetic oligonucleotide
  Antisense strand to SEQ ID NO: 1978480
augauaccaaccauaucua

SEQ ID NO: 1978482 - RNA, 19 nt, Artificial Sequence
  Description of Artificial Sequence: Synthetic oligonucleotide
  Sense strand starting at position 1016 of SEQ ID NO: 1880585
guacuuuggcaugaaucag

SEQ ID NO: 1978483 - RNA, 19 nt, Artificial Sequence
  Description of Artificial Sequence: Synthetic oligonucleotide
  Antisense strand to SEQ ID NO: 1978482
cugauucaugccaaaguac

SEQ ID NO: 1978484 - RNA, 19 nt, Artificial Sequence
  Description of Artificial Sequence: Synthetic oligonucleotide
  Sense strand starting at position 1066 of SEQ ID NO: 1880585
ucaggaguauuaguaucau

SEQ ID NO: 1978485 - RNA, 19 nt, Artificial Sequence
  Description of Artificial Sequence: Synthetic oligonucleotide
  Antisense strand to SEQ ID NO: 1978484
augauacuaauacuccuga

SEQ ID NO: 1978486 - RNA, 19 nt, Artificial Sequence
  Description of Artificial Sequence: Synthetic oligonucleotide
  Sense strand starting at position 1084 of SEQ ID NO: 1880585
uuuggugggagguaaucau

SEQ ID NO: 1978487 - RNA, 19 nt, Artificial Sequence
  Description of Artificial Sequence: Synthetic oligonucleotide
  Antisense strand to SEQ ID NO: 1978486
augauuaccucccaccaaa

SEQ ID NO: 1978488 - RNA, 19 nt, Artificial Sequence
  Description of Artificial Sequence: Synthetic oligonucleotide
  Sense strand starting at position 1091 of SEQ ID NO: 1880585
ggagguaaucauggcgaaa

SEQ ID NO: 1978489 - RNA, 19 nt, Artificial Sequence
  Description of Artificial Sequence: Synthetic oligonucleotide
  Antisense strand to SEQ ID NO: 1978488
uuucgccaugauuaccucc

SEQ ID NO: 1978490 - RNA, 19 nt, Artificial Sequence
  Description of Artificial Sequence: Synthetic oligonucleotide
  Sense strand starting at position 1094 of SEQ ID NO: 1880585
gguaaucauggcgaaauac

SEQ ID NO: 1978491 - RNA, 19 nt, Artificial Sequence
  Description of Artificial Sequence: Synthetic oligonucleotide
  Antisense strand to SEQ ID NO: 1978490
guauuucgccaugauuacc

SEQ ID NO: 1978492 - RNA, 19 nt, Artificial Sequence
  Description of Artificial Sequence: Synthetic oligonucleotide
  Sense strand starting at position 1241 of SEQ ID NO: 1880585
gggcaaagugaggauaugu

SEQ ID NO: 1978493 - RNA, 19 nt, Artificial Sequence
  Description of Artificial Sequence: Synthetic oligonucleotide
  Antisense strand to SEQ ID NO: 1978492
acauauccucacuuugccc

SEQ ID NO: 1978494 - RNA, 19 nt, Artificial Sequence
  Description of Artificial Sequence: Synthetic oligonucleotide
  Sense strand starting at position 1350 of SEQ ID NO: 1880585
guauguacacguuugugca

SEQ ID NO: 1978495 - RNA, 19 nt, Artificial Sequence
  Description of Artificial Sequence: Synthetic oligonucleotide
  Antisense strand to SEQ ID NO: 1978494
ugcacaaacguguacauac

SEQ ID NO: 1978496 - RNA, 19 nt, Artificial Sequence
  Description of Artificial Sequence: Synthetic oligonucleotide
  Sense strand starting at position 1438 of SEQ ID NO: 1880585
gugccaauacaggagugau

SEQ ID NO: 1978497 - RNA, 19 nt, Artificial Sequence
  Description of Artificial Sequence: Synthetic oligonucleotide
  Antisense strand to SEQ ID NO: 1978496
aucacuccuguauuggcac

SEQ ID NO: 1978498 - RNA, 19 nt, Artificial Sequence
  Description of Artificial Sequence: Synthetic oligonucleotide
  Sense strand starting at position 1441 of SEQ ID NO: 1880585
ccaauacaggagugauauc

SEQ ID NO: 1978499 - RNA, 19 nt, Artificial Sequence
  Description of Artificial Sequence: Synthetic oligonucleotide
  Antisense strand to SEQ ID NO: 1978498
gauaucacuccuguauugg

SEQ ID NO: 1978500 - RNA, 19 nt, Artificial Sequence
  Description of Artificial Sequence: Synthetic oligonucleotide
  Sense strand starting at position 1568 of SEQ ID NO: 1880585
cuguccaauuucuggauuu

SEQ ID NO: 1978501 - RNA, 19 nt, Artificial Sequence
  Description of Artificial Sequence: Synthetic oligonucleotide
  Antisense strand to SEQ ID NO: 1978500
aaauccagaaauuggacag

SEQ ID NO: 1978502 - RNA, 19 nt, Artificial Sequence
  Description of Artificial Sequence: Synthetic oligonucleotide
  Sense strand starting at position 1986 of SEQ ID NO: 1880585
gcugaaugaguccauugga

SEQ ID NO: 1978503 - RNA, 19 nt, Artificial Sequence
  Description of Artificial Sequence: Synthetic oligonucleotide
  Antisense strand to SEQ ID NO: 1978502
uccaauggacucauucagc

SEQ ID NO: 1978504 - RNA, 19 nt, Artificial Sequence
  Description of Artificial Sequence: Synthetic oligonucleotide
  Sense strand starting at position 1989 of SEQ ID NO: 1880585
gaaugaguccauuggaauc

SEQ ID NO: 1978505 - RNA, 19 nt, Artificial Sequence
  Description of Artificial Sequence: Synthetic oligonucleotide
  Antisense strand to SEQ ID NO: 1978504
gauuccaauggacucauuc

SEQ ID NO: 1978506 - RNA, 19 nt, Artificial Sequence
  Description of Artificial Sequence: Synthetic oligonucleotide
  Sense strand starting at position 2043 of SEQ ID NO: 1880585
auucuagaacuugggugaa

SEQ ID NO: 1978507 - RNA, 19 nt, Artificial Sequence
  Description of Artificial Sequence: Synthetic oligonucleotide
  Antisense strand to SEQ ID NO: 1978506
uucacccaaguucuagaau

SEQ ID NO: 1978508 - RNA, 19 nt, Artificial Sequence
  Description of Artificial Sequence: Synthetic oligonucleotide
  Sense strand starting at position 2318 of SEQ ID NO: 1880585
cagaaaugguuccugggau

SEQ ID NO: 1978509 - RNA, 19 nt, Artificial Sequence
  Description of Artificial Sequence: Synthetic oligonucleotide
  Antisense strand to SEQ ID NO: 1978508
aucccaggaaccauuucug

SEQ ID NO: 1978510 - RNA, 19 nt, Artificial Sequence
  Description of Artificial Sequence: Synthetic oligonucleotide
  Sense strand starting at position 2448 of SEQ ID NO: 1880585
uggauaaacucacuguuuc

SEQ ID NO: 1978511 - RNA, 19 nt, Artificial Sequence
  Description of Artificial Sequence: Synthetic oligonucleotide
  Antisense strand to SEQ ID NO: 1978510
gaaacagugaguuuaucca

SEQ ID NO: 1978512 - RNA, 19 nt, Artificial Sequence
  Description of Artificial Sequence: Synthetic oligonucleotide
  Sense strand starting at position 2449 of SEQ ID NO: 1880585
ggauaaacucacuguuucu

SEQ ID NO: 1978513 - RNA, 19 nt, Artificial Sequence
  Description of Artificial Sequence: Synthetic oligonucleotide
  Antisense strand to SEQ ID NO: 1978512
agaaacagugaguuuaucc

SEQ ID NO: 1978514 - RNA, 19 nt, Artificial Sequence
  Description of Artificial Sequence: Synthetic oligonucleotide
  Sense strand starting at position 2565 of SEQ ID NO: 1880585
ccaugaugucuccaaugua

SEQ ID NO: 1978515 - RNA, 19 nt, Artificial Sequence
  Description of Artificial Sequence: Synthetic oligonucleotide
  Antisense strand to SEQ ID NO: 1978514
uacauuggagacaucaugg

SEQ ID NO: 1978516 - RNA, 19 nt, Artificial Sequence
  Description of Artificial Sequence: Synthetic oligonucleotide
  Sense strand starting at position 2867 of SEQ ID NO: 1880585
uguggcuuggaauaugauu

SEQ ID NO: 1978517 - RNA, 19 nt, Artificial Sequence
  Description of Artificial Sequence: Synthetic oligonucleotide
  Antisense strand to SEQ ID NO: 1978516
aaucauauuccaagccaca

SEQ ID NO: 1978518 - RNA, 19 nt, Artificial Sequence
  Description of Artificial Sequence: Synthetic oligonucleotide
  Sense strand starting at position 2875 of SEQ ID NO: 1880585
ggaauaugauuguuagcca

SEQ ID NO: 1978519 - RNA, 19 nt, Artificial Sequence
  Description of Artificial Sequence: Synthetic oligonucleotide
  Antisense strand to SEQ ID NO: 1978518
uggcuaacaaucauauucc

SEQ ID NO: 1978520 - RNA, 19 nt, Artificial Sequence
  Description of Artificial Sequence: Synthetic oligonucleotide
  Sense strand starting at position 3006 of SEQ ID NO: 1880585
cuagguuuagcucacaaac

SEQ ID NO: 1978521 - RNA, 19 nt, Artificial Sequence
  Description of Artificial Sequence: Synthetic oligonucleotide
  Antisense strand to SEQ ID NO: 1978520
guuugugagcuaaaccuag

SEQ ID NO: 1978522 - RNA, 19 nt, Artificial Sequence
  Description of Artificial Sequence: Synthetic oligonucleotide
  Sense strand starting at position 3031 of SEQ ID NO: 1880585
agaggauuacacugggcau

SEQ ID NO: 1978523 - RNA, 19 nt, Artificial Sequence
  Description of Artificial Sequence: Synthetic oligonucleotide
  Antisense strand to SEQ ID NO: 1978522
augcccaguguaauccucu

SEQ ID NO: 1978524 - RNA, 19 nt, Artificial Sequence
  Description of Artificial Sequence: Synthetic oligonucleotide
  Sense strand starting at position 3617 of SEQ ID NO: 1880585
acuggaagucaauggguaa

SEQ ID NO: 1978525 - RNA, 19 nt, Artificial Sequence
  Description of Artificial Sequence: Synthetic oligonucleotide
  Antisense strand to SEQ ID NO: 1978524
uuacccauugacuuccagu

SEQ ID NO: 1978526 - RNA, 19 nt, Artificial Sequence
  Description of Artificial Sequence: Synthetic oligonucleotide
  Sense strand starting at position 3618 of SEQ ID NO: 1880585
cuggaagucaauggguaaa

SEQ ID NO: 1978527 - RNA, 19 nt, Artificial Sequence
  Description of Artificial Sequence: Synthetic oligonucleotide
  Antisense strand to SEQ ID NO: 1978526
uuuacccauugacuuccag

SEQ ID NO: 1978528 - RNA, 19 nt, Artificial Sequence
  Description of Artificial Sequence: Synthetic oligonucleotide
  Sense strand starting at position 3978 of SEQ ID NO: 1880585
ugagguaugugacuuacau

SEQ ID NO: 1978529 - RNA, 19 nt, Artificial Sequence
  Description of Artificial Sequence: Synthetic oligonucleotide
  Antisense strand to SEQ ID NO: 1978528
auguaagucacauaccuca

SEQ ID NO: 1978530 - RNA, 19 nt, Artificial Sequence
  Description of Artificial Sequence: Synthetic oligonucleotide
  Sense strand starting at position 96 of SEQ ID NO: 1880586
agaccaaaguucucuguaa

SEQ ID NO: 1978531 - RNA, 19 nt, Artificial Sequence
  Description of Artificial Sequence: Synthetic oligonucleotide
  Antisense strand to SEQ ID NO: 1978530
uuacagagaacuuuggucu

SEQ ID NO: 1978532 - RNA, 19 nt, Artificial Sequence
  Description of Artificial Sequence: Synthetic oligonucleotide
  Sense strand starting at position 97 of SEQ ID NO: 1880586
gaccaaaguucucuguaag

SEQ ID NO: 1978533 - RNA, 19 nt, Artificial Sequence
  Description of Artificial Sequence: Synthetic oligonucleotide
  Antisense strand to SEQ ID NO: 1978532
cuuacagagaacuuugguc

SEQ ID NO: 1978534 - RNA, 19 nt, Artificial Sequence
  Description of Artificial Sequence: Synthetic oligonucleotide
  Sense strand starting at position 459 of SEQ ID NO: 1880586
uaggaaucuugggcaagau

SEQ ID NO: 1978535 - RNA, 19 nt, Artificial Sequence
  Description of Artificial Sequence: Synthetic oligonucleotide
  Antisense strand to SEQ ID NO: 1978534
aucuugcccaagauuccua

SEQ ID NO: 1978536 - RNA, 19 nt, Artificial Sequence
  Description of Artificial Sequence: Synthetic oligonucleotide
  Sense strand starting at position 665 of SEQ ID NO: 1880586
ucgugaaaugauggugaua

SEQ ID NO: 1978537 - RNA, 19 nt, Artificial Sequence
  Description of Artificial Sequence: Synthetic oligonucleotide
  Antisense strand to SEQ ID NO: 1978536
uaucaccaucauuucacga

SEQ ID NO: 1978538 - RNA, 19 nt, Artificial Sequence
  Description of Artificial Sequence: Synthetic oligonucleotide
  Sense strand starting at position 701 of SEQ ID NO: 1880586
gcuugacaacuuuguauga

SEQ ID NO: 1978539 - RNA, 19 nt, Artificial Sequence
  Description of Artificial Sequence: Synthetic oligonucleotide
  Antisense strand to SEQ ID NO: 1978538
ucauacaaaguugucaagc

SEQ ID NO: 1978540 - RNA, 19 nt, Artificial Sequence
  Description of Artificial Sequence: Synthetic oligonucleotide
  Sense strand starting at position 702 of SEQ ID NO: 1880586
cuugacaacuuuguaugau

SEQ ID NO: 1978541 - RNA, 19 nt, Artificial Sequence
  Description of Artificial Sequence: Synthetic oligonucleotide
  Antisense strand to SEQ ID NO: 1978540
aucauacaaaguugucaag

SEQ ID NO: 1978542 - RNA, 19 nt, Artificial Sequence
  Description of Artificial Sequence: Synthetic oligonucleotide
  Sense strand starting at position 822 of SEQ ID NO: 1880586
gaaagcaaccugggaguua

SEQ ID NO: 1978543 - RNA, 19 nt, Artificial Sequence
  Description of Artificial Sequence: Synthetic oligonucleotide
  Antisense strand to SEQ ID NO: 1978542
uaacucccagguugcuuuc

SEQ ID NO: 1978544 - RNA, 19 nt, Artificial Sequence
  Description of Artificial Sequence: Synthetic oligonucleotide
  Sense strand starting at position 900 of SEQ ID NO: 1880586
aucaguucugauuggguuu

SEQ ID NO: 1978545 - RNA, 19 nt, Artificial Sequence
  Description of Artificial Sequence: Synthetic oligonucleotide
  Antisense strand to SEQ ID NO: 1978544
aaacccaaucagaacugau

SEQ ID NO: 1978546 - RNA, 19 nt, Artificial Sequence
  Description of Artificial Sequence: Synthetic oligonucleotide
  Sense strand starting at position 920 of SEQ ID NO: 1880586
aaguaaggcuuaguaccaa

SEQ ID NO: 1978547 - RNA, 19 nt, Artificial Sequence
  Description of Artificial Sequence: Synthetic oligonucleotide
  Antisense strand to SEQ ID NO: 1978546
uugguacuaagccuuacuu

SEQ ID NO: 1978548 - RNA, 19 nt, Artificial Sequence
  Description of Artificial Sequence: Synthetic oligonucleotide
  Sense strand starting at position 960 of SEQ ID NO: 1880586
aaacgagaaagguaguguu

SEQ ID NO: 1978549 - RNA, 19 nt, Artificial Sequence
  Description of Artificial Sequence: Synthetic oligonucleotide
  Antisense strand to SEQ ID NO: 1978548
aacacuaccuuucucguuu

SEQ ID NO: 1978550 - RNA, 19 nt, Artificial Sequence
  Description of Artificial Sequence: Synthetic oligonucleotide
  Sense strand starting at position 967 of SEQ ID NO: 1880586
aaagguaguguuugaccuu

SEQ ID NO: 1978551 - RNA, 19 nt, Artificial Sequence
  Description of Artificial Sequence: Synthetic oligonucleotide
  Antisense strand to SEQ ID NO: 1978550
aaggucaaacacuaccuuu

SEQ ID NO: 1978552 - RNA, 19 nt, Artificial Sequence
  Description of Artificial Sequence: Synthetic oligonucleotide
  Sense strand starting at position 1079 of SEQ ID NO: 1880586
gagucuugacuuggaacca

SEQ ID NO: 1978553 - RNA, 19 nt, Artificial Sequence
  Description of Artificial Sequence: Synthetic oligonucleotide
  Antisense strand to SEQ ID NO: 1978552
ugguuccaagucaagacuc

SEQ ID NO: 1978554 - RNA, 19 nt, Artificial Sequence
  Description of Artificial Sequence: Synthetic oligonucleotide
  Sense strand starting at position 1097 of SEQ ID NO: 1880586
agacgaacguggaaaguua

SEQ ID NO: 1978555 - RNA, 19 nt, Artificial Sequence
  Description of Artificial Sequence: Synthetic oligonucleotide
  Antisense strand to SEQ ID NO: 1978554
uaacuuuccacguucgucu

SEQ ID NO: 1978556 - RNA, 19 nt, Artificial Sequence
  Description of Artificial Sequence: Synthetic oligonucleotide
  Sense strand starting at position 1317 of SEQ ID NO: 1880586
gacugaguucaggacguga

SEQ ID NO: 1978557 - RNA, 19 nt, Artificial Sequence
  Description of Artificial Sequence: Synthetic oligonucleotide
  Antisense strand to SEQ ID NO: 1978556
ucacguccugaacucaguc

SEQ ID NO: 1978558 - RNA, 19 nt, Artificial Sequence
  Description of Artificial Sequence: Synthetic oligonucleotide
  Sense strand starting at position 2085 of SEQ ID NO: 1880586
agagaagaaugaugggaau

SEQ ID NO: 1978559 - RNA, 19 nt, Artificial Sequence
  Description of Artificial Sequence: Synthetic oligonucleotide
  Antisense strand to SEQ ID NO: 1978558
auucccaucauucuucucu

SEQ ID NO: 1978560 - RNA, 19 nt, Artificial Sequence
  Description of Artificial Sequence: Synthetic oligonucleotide
  Sense strand starting at position 2141 of SEQ ID NO: 1880586
ucacguuguguagaggaca

SEQ ID NO: 1978561 - RNA, 19 nt, Artificial Sequence
  Description of Artificial Sequence: Synthetic oligonucleotide
  Antisense strand to SEQ ID NO: 1978560
uguccucuacacaacguga

SEQ ID NO: 1978562 - RNA, 19 nt, Artificial Sequence
  Description of Artificial Sequence: Synthetic oligonucleotide
  Sense strand starting at position 2188 of SEQ ID NO: 1880586
cgcaauuucuggcuucuua

SEQ ID NO: 1978563 - RNA, 19 nt, Artificial Sequence
  Description of Artificial Sequence: Synthetic oligonucleotide
  Antisense strand to SEQ ID NO: 1978562
uaagaagccagaaauugcg

SEQ ID NO: 1978564 - RNA, 19 nt, Artificial Sequence
  Description of Artificial Sequence: Synthetic oligonucleotide
  Sense strand starting at position 2245 of SEQ ID NO: 1880586
gaacuuguacguuucguuu

SEQ ID NO: 1978565 - RNA, 19 nt, Artificial Sequence
  Description of Artificial Sequence: Synthetic oligonucleotide
  Antisense strand to SEQ ID NO: 1978564
aaacgaaacguacaaguuc

SEQ ID NO: 1978566 - RNA, 19 nt, Artificial Sequence
  Description of Artificial Sequence: Synthetic oligonucleotide
  Sense strand starting at position 2258 of SEQ ID NO: 1880586
ucguuuaauccagggagaa

SEQ ID NO: 1978567 - RNA, 19 nt, Artificial Sequence
  Description of Artificial Sequence: Synthetic oligonucleotide
  Antisense strand to SEQ ID NO: 1978566
uucucccuggauuaaacga

SEQ ID NO: 1978568 - RNA, 19 nt, Artificial Sequence
  Description of Artificial Sequence: Synthetic oligonucleotide
  Sense strand starting at position 2259 of SEQ ID NO: 1880586
cguuuaauccagggagaag

SEQ ID NO: 1978569 - RNA, 19 nt, Artificial Sequence
  Description of Artificial Sequence: Synthetic oligonucleotide
  Antisense strand to SEQ ID NO: 1978568
cuucucccuggauuaaacg

SEQ ID NO: 1978570 - RNA, 19 nt, Artificial Sequence
  Description of Artificial Sequence: Synthetic oligonucleotide
  Sense strand starting at position 2324 of SEQ ID NO: 1880586
gcgaucucagagcaggaaa

SEQ ID NO: 1978571 - RNA, 19 nt, Artificial Sequence
  Description of Artificial Sequence: Synthetic oligonucleotide
  Antisense strand to SEQ ID NO: 1978570
uuuccugcucugagaucgc

SEQ ID NO: 1978572 - RNA, 19 nt, Artificial Sequence
  Description of Artificial Sequence: Synthetic oligonucleotide
  Sense strand starting at position 2362 of SEQ ID NO: 1880586
acgaguuuaguaugggauu

SEQ ID NO: 1978573 - RNA, 19 nt, Artificial Sequence
  Description of Artificial Sequence: Synthetic oligonucleotide
  Antisense strand to SEQ ID NO: 1978572
aaucccauacuaaacucgu

SEQ ID NO: 1978574 - RNA, 19 nt, Artificial Sequence
  Description of Artificial Sequence: Synthetic oligonucleotide
  Sense strand starting at position 2364 of SEQ ID NO: 1880586
gaguuuaguaugggauuau

SEQ ID NO: 1978575 - RNA, 19 nt, Artificial Sequence
  Description of Artificial Sequence: Synthetic oligonucleotide
  Antisense strand to SEQ ID NO: 1978574
auaaucccauacuaaacuc

SEQ ID NO: 1978576 - RNA, 19 nt, Artificial Sequence
  Description of Artificial Sequence: Synthetic oligonucleotide
  Sense strand starting at position 2368 of SEQ ID NO: 1880586
uuaguaugggauuauguuu

SEQ ID NO: 1978577 - RNA, 19 nt, Artificial Sequence
  Description of Artificial Sequence: Synthetic oligonucleotide
  Antisense strand to SEQ ID NO: 1978576
aaacauaaucccauacuaa

SEQ ID NO: 1978578 - RNA, 19 nt, Artificial Sequence
  Description of Artificial Sequence: Synthetic oligonucleotide
  Sense strand starting at position 2408 of SEQ ID NO: 1880586
uaggucuacggauagucaa

SEQ ID NO: 1978579 - RNA, 19 nt, Artificial Sequence
  Description of Artificial Sequence: Synthetic oligonucleotide
  Antisense strand to SEQ ID NO: 1978578
uugacuauccguagaccua

SEQ ID NO: 1978580 - RNA, 19 nt, Artificial Sequence
  Description of Artificial Sequence: Synthetic oligonucleotide
  Sense strand starting at position 2443 of SEQ ID NO: 1880586
gagaacugauuucgaaaug

SEQ ID NO: 1978581 - RNA, 19 nt, Artificial Sequence
  Description of Artificial Sequence: Synthetic oligonucleotide
  Antisense strand to SEQ ID NO: 1978580
cauuucgaaaucaguucuc

SEQ ID NO: 1978582 - RNA, 19 nt, Artificial Sequence
  Description of Artificial Sequence: Synthetic oligonucleotide
  Sense strand starting at position 2579 of SEQ ID NO: 1880586
gccucaagagauugagaau

SEQ ID NO: 1978583 - RNA, 19 nt, Artificial Sequence
  Description of Artificial Sequence: Synthetic oligonucleotide
  Antisense strand to SEQ ID NO: 1978582
auucucaaucucuugaggc

SEQ ID NO: 1978584 - RNA, 19 nt, Artificial Sequence
  Description of Artificial Sequence: Synthetic oligonucleotide
  Sense strand starting at position 2687 of SEQ ID NO: 1880586
ccaauuauugcaggaaagu

SEQ ID NO: 1978585 - RNA, 19 nt, Artificial Sequence
  Description of Artificial Sequence: Synthetic oligonucleotide
  Antisense strand to SEQ ID NO: 1978584
acuuuccugcaauaauugg

SEQ ID NO: 1978586 - RNA, 19 nt, Artificial Sequence
  Description of Artificial Sequence: Synthetic oligonucleotide
  Sense strand starting at position 2688 of SEQ ID NO: 1880586
caauuauugcaggaaaguc

SEQ ID NO: 1978587 - RNA, 19 nt, Artificial Sequence
  Description of Artificial Sequence: Synthetic oligonucleotide
  Antisense strand to SEQ ID NO: 1978586
gacuuuccugcaauaauug

SEQ ID NO: 1978588 - RNA, 19 nt, Artificial Sequence
  Description of Artificial Sequence: Synthetic oligonucleotide
  Sense strand starting at position 2885 of SEQ ID NO: 1880586
aguauaucuuugcuacaua

SEQ ID NO: 1978589 - RNA, 19 nt, Artificial Sequence
  Description of Artificial Sequence: Synthetic oligonucleotide
  Antisense strand to SEQ ID NO: 1978588
uauguagcaaagauauacu

SEQ ID NO: 1978590 - RNA, 19 nt, Artificial Sequence
  Description of Artificial Sequence: Synthetic oligonucleotide
  Sense strand starting at position 2995 of SEQ ID NO: 1880586
ccugguaucuauucuucua

SEQ ID NO: 1978591 - RNA, 19 nt, Artificial Sequence
  Description of Artificial Sequence: Synthetic oligonucleotide
  Antisense strand to SEQ ID NO: 1978590
uagaagaauagauaccagg

SEQ ID NO: 1978592 - RNA, 19 nt, Artificial Sequence
  Description of Artificial Sequence: Synthetic oligonucleotide
  Sense strand starting at position 3119 of SEQ ID NO: 1880586
guacauaugcaguauauug

SEQ ID NO: 1978593 - RNA, 19 nt, Artificial Sequence
  Description of Artificial Sequence: Synthetic oligonucleotide
  Antisense strand to SEQ ID NO: 1978592
caauauacugcauauguac

SEQ ID NO: 1978594 - RNA, 19 nt, Artificial Sequence
  Description of Artificial Sequence: Synthetic oligonucleotide
  Sense strand starting at position 3232 of SEQ ID NO: 1880586
guaacaauugauggacauu

SEQ ID NO: 1978595 - RNA, 19 nt, Artificial Sequence
  Description of Artificial Sequence: Synthetic oligonucleotide
  Antisense strand to SEQ ID NO: 1978594
aauguccaucaauuguuac

SEQ ID NO: 1978596 - RNA, 19 nt, Artificial Sequence
  Description of Artificial Sequence: Synthetic oligonucleotide
  Sense strand starting at position 3244 of SEQ ID NO: 1880586
ggacauuugcuuuguuucu

SEQ ID NO: 1978597 - RNA, 19 nt, Artificial Sequence
  Description of Artificial Sequence: Synthetic oligonucleotide
  Antisense strand to SEQ ID NO: 1978596
agaaacaaagcaaaugucc

SEQ ID NO: 1978598 - RNA, 19 nt, Artificial Sequence
  Description of Artificial Sequence: Synthetic oligonucleotide
  Sense strand starting at position 3310 of SEQ ID NO: 1880586
uaaguacugguuuaguaaa

SEQ ID NO: 1978599 - RNA, 19 nt, Artificial Sequence
  Description of Artificial Sequence: Synthetic oligonucleotide
  Antisense strand to SEQ ID NO: 1978598
uuuacuaaaccaguacuua

SEQ ID NO: 1978600 - RNA, 19 nt, Artificial Sequence
  Description of Artificial Sequence: Synthetic oligonucleotide
  Sense strand starting at position 3441 of SEQ ID NO: 1880586
ggcacugugaaguaaacaa

SEQ ID NO: 1978601 - RNA, 19 nt, Artificial Sequence
  Description of Artificial Sequence: Synthetic oligonucleotide
  Antisense strand to SEQ ID NO: 1978600
uuguuuacuucacagugcc

SEQ ID NO: 1978602 - RNA, 19 nt, Artificial Sequence
  Description of Artificial Sequence: Synthetic oligonucleotide
  Sense strand starting at position 3574 of SEQ ID NO: 1880586
uuaaguacagcucagauau

SEQ ID NO: 1978603 - RNA, 19 nt, Artificial Sequence
  Description of Artificial Sequence: Synthetic oligonucleotide
  Antisense strand to SEQ ID NO: 1978602
auaucugagcuguacuuaa

SEQ ID NO: 1978604 - RNA, 19 nt, Artificial Sequence
  Description of Artificial Sequence: Synthetic oligonucleotide
  Sense strand starting at position 3621 of SEQ ID NO: 1880586
agauucuuaugauugcaua

SEQ ID NO: 1978605 - RNA, 19 nt, Artificial Sequence
  Description of Artificial Sequence: Synthetic oligonucleotide
  Antisense strand to SEQ ID NO: 1978604
uaugcaaucauaagaaucu

SEQ ID NO: 1978606 - RNA, 19 nt, Artificial Sequence
  Description of Artificial Sequence: Synthetic oligonucleotide
  Sense strand starting at position 3965 of SEQ ID NO: 1880586
auguauacuagguggugau

SEQ ID NO: 1978607 - RNA, 19 nt, Artificial Sequence
  Description of Artificial Sequence: Synthetic oligonucleotide
  Antisense strand to SEQ ID NO: 1978606
aucaccaccuaguauacau

SEQ ID NO: 1978608 - RNA, 19 nt, Artificial Sequence
  Description of Artificial Sequence: Synthetic oligonucleotide
  Sense strand starting at position 3966 of SEQ ID NO: 1880586
uguauacuagguggugaua

SEQ ID NO: 1978609 - RNA, 19 nt, Artificial Sequence
  Description of Artificial Sequence: Synthetic oligonucleotide
  Antisense strand to SEQ ID NO: 1978608
uaucaccaccuaguauaca

SEQ ID NO: 1978610 - RNA, 19 nt, Artificial Sequence
  Description of Artificial Sequence: Synthetic oligonucleotide
  Sense strand starting at position 208 of SEQ ID NO: 1880587
uguugugaccuacagaaau

SEQ ID NO: 1978611 - RNA, 19 nt, Artificial Sequence
  Description of Artificial Sequence: Synthetic oligonucleotide
  Antisense strand to SEQ ID NO: 1978610
auuucuguaggucacaaca

SEQ ID NO: 1978612 - RNA, 19 nt, Artificial Sequence
  Description of Artificial Sequence: Synthetic oligonucleotide
  Sense strand starting at position 285 of SEQ ID NO: 1880587
gcugauggguucuuaaaga

SEQ ID NO: 1978613 - RNA, 19 nt, Artificial Sequence
  Description of Artificial Sequence: Synthetic oligonucleotide
  Antisense strand to SEQ ID NO: 1978612
ucuuuaagaacccaucagc

SEQ ID NO: 1978614 - RNA, 19 nt, Artificial Sequence
  Description of Artificial Sequence: Synthetic oligonucleotide
  Sense strand starting at position 414 of SEQ ID NO: 1880587
uucucaguucugugacaga

SEQ ID NO: 1978615 - RNA, 19 nt, Artificial Sequence
  Description of Artificial Sequence: Synthetic oligonucleotide
  Antisense strand to SEQ ID NO: 1978614
ucugucacagaacugagaa

SEQ ID NO: 1978616 - RNA, 19 nt, Artificial Sequence
  Description of Artificial Sequence: Synthetic oligonucleotide
  Sense strand starting at position 615 of SEQ ID NO: 1880587
cuuugaaaugcagaguuag

SEQ ID NO: 1978617 - RNA, 19 nt, Artificial Sequence
  Description of Artificial Sequence: Synthetic oligonucleotide
  Antisense strand to SEQ ID NO: 1978616
cuaacucugcauuucaaag

SEQ ID NO: 1978618 - RNA, 19 nt, Artificial Sequence
  Description of Artificial Sequence: Synthetic oligonucleotide
  Sense strand starting at position 640 of SEQ ID NO: 1880587
aguuaugcagaguaacauu

SEQ ID NO: 1978619 - RNA, 19 nt, Artificial Sequence
  Description of Artificial Sequence: Synthetic oligonucleotide
  Antisense strand to SEQ ID NO: 1978618
aauguuacucugcauaacu

SEQ ID NO: 1978620 - RNA, 19 nt, Artificial Sequence
  Description of Artificial Sequence: Synthetic oligonucleotide
  Sense strand starting at position 805 of SEQ ID NO: 1880587
gaugaugaccgaggugaaa

SEQ ID NO: 1978621 - RNA, 19 nt, Artificial Sequence
  Description of Artificial Sequence: Synthetic oligonucleotide
  Antisense strand to SEQ ID NO: 1978620
uuucaccucggucaucauc

SEQ ID NO: 1978622 - RNA, 19 nt, Artificial Sequence
  Description of Artificial Sequence: Synthetic oligonucleotide
  Sense strand starting at position 1031 of SEQ ID NO: 1880587
guuugaucccauggaaaga

SEQ ID NO: 1978623 - RNA, 19 nt, Artificial Sequence
  Description of Artificial Sequence: Synthetic oligonucleotide
  Antisense strand to SEQ ID NO: 1978622
ucuuuccaugggaucaaac

SEQ ID NO: 1978624 - RNA, 19 nt, Artificial Sequence
  Description of Artificial Sequence: Synthetic oligonucleotide
  Sense strand starting at position 1084 of SEQ ID NO: 1880587
cuaguugucauugagggca

SEQ ID NO: 1978625 - RNA, 19 nt, Artificial Sequence
  Description of Artificial Sequence: Synthetic oligonucleotide
  Antisense strand to SEQ ID NO: 1978624
ugcccucaaugacaacuag

SEQ ID NO: 1978626 - RNA, 19 nt, Artificial Sequence
  Description of Artificial Sequence: Synthetic oligonucleotide
  Sense strand starting at position 1089 of SEQ ID NO: 1880587
ugucauugagggcaugaca

SEQ ID NO: 1978627 - RNA, 19 nt, Artificial Sequence
  Description of Artificial Sequence: Synthetic oligonucleotide
  Antisense strand to SEQ ID NO: 1978626
ugucaugcccucaaugaca

SEQ ID NO: 1978628 - RNA, 19 nt, Artificial Sequence
  Description of Artificial Sequence: Synthetic oligonucleotide
  Sense strand starting at position 1244 of SEQ ID NO: 1880587
ggcugugguuaauugauga

SEQ ID NO: 1978629 - RNA, 19 nt, Artificial Sequence
  Description of Artificial Sequence: Synthetic oligonucleotide
  Antisense strand to SEQ ID NO: 1978628
ucaucaauuaaccacagcc

SEQ ID NO: 1978630 - RNA, 19 nt, Artificial Sequence
  Description of Artificial Sequence: Synthetic oligonucleotide
  Sense strand starting at position 1261 of SEQ ID NO: 1880587
gaauaauugccaggucacu

SEQ ID NO: 1978631 - RNA, 19 nt, Artificial Sequence
  Description of Artificial Sequence: Synthetic oligonucleotide
  Antisense strand to SEQ ID NO: 1978630
agugaccuggcaauuauuc

SEQ ID NO: 1978632 - RNA, 19 nt, Artificial Sequence
  Description of Artificial Sequence: Synthetic oligonucleotide
  Sense strand starting at position 1647 of SEQ ID NO: 1880587
cuuaguauugucuauuaac

SEQ ID NO: 1978633 - RNA, 19 nt, Artificial Sequence
  Description of Artificial Sequence: Synthetic oligonucleotide
  Antisense strand to SEQ ID NO: 1978632
guuaauagacaauacuaag

SEQ ID NO: 1978634 - RNA, 19 nt, Artificial Sequence
  Description of Artificial Sequence: Synthetic oligonucleotide
  Sense strand starting at position 1719 of SEQ ID NO: 1880587
gcucuuauagaauacaagu

SEQ ID NO: 1978635 - RNA, 19 nt, Artificial Sequence
  Description of Artificial Sequence: Synthetic oligonucleotide
  Antisense strand to SEQ ID NO: 1978634
acuuguauucuauaagagc

SEQ ID NO: 1978636 - RNA, 19 nt, Artificial Sequence
  Description of Artificial Sequence: Synthetic oligonucleotide
  Sense strand starting at position 1760 of SEQ ID NO: 1880587
gaaggcaugcaguacaaua

SEQ ID NO: 1978637 - RNA, 19 nt, Artificial Sequence
  Description of Artificial Sequence: Synthetic oligonucleotide
  Antisense strand to SEQ ID NO: 1978636
uauuguacugcaugccuuc

SEQ ID NO: 1978638 - RNA, 19 nt, Artificial Sequence
  Description of Artificial Sequence: Synthetic oligonucleotide
  Sense strand starting at position 1866 of SEQ ID NO: 1880587
agcucuuaccguuaggaag

SEQ ID NO: 1978639 - RNA, 19 nt, Artificial Sequence
  Description of Artificial Sequence: Synthetic oligonucleotide
  Antisense strand to SEQ ID NO: 1978638
cuuccuaacgguaagagcu

SEQ ID NO: 1978640 - RNA, 19 nt, Artificial Sequence
  Description of Artificial Sequence: Synthetic oligonucleotide
  Sense strand starting at position 1929 of SEQ ID NO: 1880587
aucuuuagucaugaaaguc

SEQ ID NO: 1978641 - RNA, 19 nt, Artificial Sequence
  Description of Artificial Sequence: Synthetic oligonucleotide
  Antisense strand to SEQ ID NO: 1978640
gacuuucaugacuaaagau

SEQ ID NO: 1978642 - RNA, 19 nt, Artificial Sequence
  Description of Artificial Sequence: Synthetic oligonucleotide
  Sense strand starting at position 1945 of SEQ ID NO: 1880587
gucaaacuguacuuaagau

SEQ ID NO: 1978643 - RNA, 19 nt, Artificial Sequence
  Description of Artificial Sequence: Synthetic oligonucleotide
  Antisense strand to SEQ ID NO: 1978642
aucuuaaguacaguuugac

SEQ ID NO: 1978644 - RNA, 19 nt, Artificial Sequence
  Description of Artificial Sequence: Synthetic oligonucleotide
  Sense strand starting at position 1953 of SEQ ID NO: 1880587
guacuuaagaugugguuau

SEQ ID NO: 1978645 - RNA, 19 nt, Artificial Sequence
  Description of Artificial Sequence: Synthetic oligonucleotide
  Antisense strand to SEQ ID NO: 1978644
auaaccacaucuuaaguac

SEQ ID NO: 1978646 - RNA, 19 nt, Artificial Sequence
  Description of Artificial Sequence: Synthetic oligonucleotide
  Sense strand starting at position 2118 of SEQ ID NO: 1880587
ucccaaauggcauaauugu

SEQ ID NO: 1978647 - RNA, 19 nt, Artificial Sequence
  Description of Artificial Sequence: Synthetic oligonucleotide
  Antisense strand to SEQ ID NO: 1978646
acaauuaugccauuuggga

SEQ ID NO: 1978648 - RNA, 19 nt, Artificial Sequence
  Description of Artificial Sequence: Synthetic oligonucleotide
  Sense strand starting at position 2378 of SEQ ID NO: 1880587
aaccaagaguggucucauu

SEQ ID NO: 1978649 - RNA, 19 nt, Artificial Sequence
  Description of Artificial Sequence: Synthetic oligonucleotide
  Antisense strand to SEQ ID NO: 1978648
aaugagaccacucuugguu

SEQ ID NO: 1978650 - RNA, 19 nt, Artificial Sequence
  Description of Artificial Sequence: Synthetic oligonucleotide
  Sense strand starting at position 2499 of SEQ ID NO: 1880587
gcuauuagugacgaugauu

SEQ ID NO: 1978651 - RNA, 19 nt, Artificial Sequence
  Description of Artificial Sequence: Synthetic oligonucleotide
  Antisense strand to SEQ ID NO: 1978650
aaucaucgucacuaauagc

SEQ ID NO: 1978652 - RNA, 19 nt, Artificial Sequence
  Description of Artificial Sequence: Synthetic oligonucleotide
  Sense strand starting at position 2502 of SEQ ID NO: 1880587
auuagugacgaugauucua

SEQ ID NO: 1978653 - RNA, 19 nt, Artificial Sequence
  Description of Artificial Sequence: Synthetic oligonucleotide
  Antisense strand to SEQ ID NO: 1978652
uagaaucaucgucacuaau

SEQ ID NO: 1978654 - RNA, 19 nt, Artificial Sequence
  Description of Artificial Sequence: Synthetic oligonucleotide
  Sense strand starting at position 2510 of SEQ ID NO: 1880587
cgaugauucuagguuuaga

SEQ ID NO: 1978655 - RNA, 19 nt, Artificial Sequence
  Description of Artificial Sequence: Synthetic oligonucleotide
  Antisense strand to SEQ ID NO: 1978654
ucuaaaccuagaaucaucg

SEQ ID NO: 1978656 - RNA, 19 nt, Artificial Sequence
  Description of Artificial Sequence: Synthetic oligonucleotide
  Sense strand starting at position 2605 of SEQ ID NO: 1880587
uuguuucuccucuggagaa

SEQ ID NO: 1978657 - RNA, 19 nt, Artificial Sequence
  Description of Artificial Sequence: Synthetic oligonucleotide
  Antisense strand to SEQ ID NO: 1978656
uucuccagaggagaaacaa

SEQ ID NO: 1978658 - RNA, 19 nt, Artificial Sequence
  Description of Artificial Sequence: Synthetic oligonucleotide
  Sense strand starting at position 2607 of SEQ ID NO: 1880587
guuucuccucuggagaagu

SEQ ID NO: 1978659 - RNA, 19 nt, Artificial Sequence
  Description of Artificial Sequence: Synthetic oligonucleotide
  Antisense strand to SEQ ID NO: 1978658
acuucuccagaggagaaac

SEQ ID NO: 1978660 - RNA, 19 nt, Artificial Sequence
  Description of Artificial Sequence: Synthetic oligonucleotide
  Sense strand starting at position 2761 of SEQ ID NO: 1880587
gcuuuacuggaacagcaau

SEQ ID NO: 1978661 - RNA, 19 nt, Artificial Sequence
  Description of Artificial Sequence: Synthetic oligonucleotide
  Antisense strand to SEQ ID NO: 1978660
auugcuguuccaguaaagc

SEQ ID NO: 1978662 - RNA, 19 nt, Artificial Sequence
  Description of Artificial Sequence: Synthetic oligonucleotide
  Sense strand starting at position 2911 of SEQ ID NO: 1880587
uuaguucucuauguggaau

SEQ ID NO: 1978663 - RNA, 19 nt, Artificial Sequence
  Description of Artificial Sequence: Synthetic oligonucleotide
  Antisense strand to SEQ ID NO: 1978662
auuccacauagagaacuaa

SEQ ID NO: 1978664 - RNA, 19 nt, Artificial Sequence
  Description of Artificial Sequence: Synthetic oligonucleotide
  Sense strand starting at position 2941 of SEQ ID NO: 1880587
agagaugaguuguuuaaug

SEQ ID NO: 1978665 - RNA, 19 nt, Artificial Sequence
  Description of Artificial Sequence: Synthetic oligonucleotide
  Antisense strand to SEQ ID NO: 1978664
cauuaaacaacucaucucu

SEQ ID NO: 1978666 - RNA, 19 nt, Artificial Sequence
  Description of Artificial Sequence: Synthetic oligonucleotide
  Sense strand starting at position 3146 of SEQ ID NO: 1880587
gaagaugugugcuccaaua

SEQ ID NO: 1978667 - RNA, 19 nt, Artificial Sequence
  Description of Artificial Sequence: Synthetic oligonucleotide
  Antisense strand to SEQ ID NO: 1978666
uauuggagcacacaucuuc

SEQ ID NO: 1978668 - RNA, 19 nt, Artificial Sequence
  Description of Artificial Sequence: Synthetic oligonucleotide
  Sense strand starting at position 3148 of SEQ ID NO: 1880587
agaugugugcuccaauauu

SEQ ID NO: 1978669 - RNA, 19 nt, Artificial Sequence
  Description of Artificial Sequence: Synthetic oligonucleotide
  Antisense strand to SEQ ID NO: 1978668
aauauuggagcacacaucu

SEQ ID NO: 1978670 - RNA, 19 nt, Artificial Sequence
  Description of Artificial Sequence: Synthetic oligonucleotide
  Sense strand starting at position 3158 of SEQ ID NO: 1880587
uccaauauucuggguauau

SEQ ID NO: 1978671 - RNA, 19 nt, Artificial Sequence
  Description of Artificial Sequence: Synthetic oligonucleotide
  Antisense strand to SEQ ID NO: 1978670
auauacccagaauauugga

SEQ ID NO: 1978672 - RNA, 19 nt, Artificial Sequence
  Description of Artificial Sequence: Synthetic oligonucleotide
  Sense strand starting at position 3159 of SEQ ID NO: 1880587
ccaauauucuggguauaug

SEQ ID NO: 1978673 - RNA, 19 nt, Artificial Sequence
  Description of Artificial Sequence: Synthetic oligonucleotide
  Antisense strand to SEQ ID NO: 1978672
cauauacccagaauauugg

SEQ ID NO: 1978674 - RNA, 19 nt, Artificial Sequence
  Description of Artificial Sequence: Synthetic oligonucleotide
  Sense strand starting at position 3186 of SEQ ID NO: 1880587
gcacaugaauguuuaggaa

SEQ ID NO: 1978675 - RNA, 19 nt, Artificial Sequence
  Description of Artificial Sequence: Synthetic oligonucleotide
  Antisense strand to SEQ ID NO: 1978674
uuccuaaacauucaugugc

SEQ ID NO: 1978676 - RNA, 19 nt, Artificial Sequence
  Description of Artificial Sequence: Synthetic oligonucleotide
  Sense strand starting at position 3198 of SEQ ID NO: 1880587
uuaggaagugcacauauau

SEQ ID NO: 1978677 - RNA, 19 nt, Artificial Sequence
  Description of Artificial Sequence: Synthetic oligonucleotide
  Antisense strand to SEQ ID NO: 1978676
auauaugugcacuuccuaa

SEQ ID NO: 1978678 - RNA, 19 nt, Artificial Sequence
  Description of Artificial Sequence: Synthetic oligonucleotide
  Sense strand starting at position 3548 of SEQ ID NO: 1880587
caaugagaguaauuaaguc

SEQ ID NO: 1978679 - RNA, 19 nt, Artificial Sequence
  Description of Artificial Sequence: Synthetic oligonucleotide
  Antisense strand to SEQ ID NO: 1978678
gacuuaauuacucucauug

SEQ ID NO: 1978680 - RNA, 19 nt, Artificial Sequence
  Description of Artificial Sequence: Synthetic oligonucleotide
  Sense strand starting at position 3552 of SEQ ID NO: 1880587
gagaguaauuaagucauua

SEQ ID NO: 1978681 - RNA, 19 nt, Artificial Sequence
  Description of Artificial Sequence: Synthetic oligonucleotide
  Antisense strand to SEQ ID NO: 1978680
uaaugacuuaauuacucuc

SEQ ID NO: 1978682 - RNA, 19 nt, Artificial Sequence
  Description of Artificial Sequence: Synthetic oligonucleotide
  Sense strand starting at position 3696 of SEQ ID NO: 1880587
uguacacagagauguguua

SEQ ID NO: 1978683 - RNA, 19 nt, Artificial Sequence
  Description of Artificial Sequence: Synthetic oligonucleotide
  Antisense strand to SEQ ID NO: 1978682
uaacacaucucuguguaca

SEQ ID NO: 1978684 - RNA, 19 nt, Artificial Sequence
  Description of Artificial Sequence: Synthetic oligonucleotide
  Sense strand starting at position 3851 of SEQ ID NO: 1880587
uguacauuauguguaacaa

SEQ ID NO: 1978685 - RNA, 19 nt, Artificial Sequence
  Description of Artificial Sequence: Synthetic oligonucleotide
  Antisense strand to SEQ ID NO: 1978684
uuguuacacauaauguaca

SEQ ID NO: 1978686 - RNA, 19 nt, Artificial Sequence
  Description of Artificial Sequence: Synthetic oligonucleotide
  Sense strand starting at position 3852 of SEQ ID NO: 1880587
guacauuauguguaacaau

SEQ ID NO: 1978687 - RNA, 19 nt, Artificial Sequence
  Description of Artificial Sequence: Synthetic oligonucleotide
  Antisense strand to SEQ ID NO: 1978686
auuguuacacauaauguac

SEQ ID NO: 1978688 - RNA, 19 nt, Artificial Sequence
  Description of Artificial Sequence: Synthetic oligonucleotide
  Sense strand starting at position 3937 of SEQ ID NO: 1880587
agucuucggucagcaauuu

SEQ ID NO: 1978689 - RNA, 19 nt, Artificial Sequence
  Description of Artificial Sequence: Synthetic oligonucleotide
  Antisense strand to SEQ ID NO: 1978688
aaauugcugaccgaagacu

SEQ ID NO: 1978690 - RNA, 19 nt, Artificial Sequence
  Description of Artificial Sequence: Synthetic oligonucleotide
  Sense strand starting at position 226 of SEQ ID NO: 1880588
auaacaggugacugugaua

SEQ ID NO: 1978691 - RNA, 19 nt, Artificial Sequence
  Description of Artificial Sequence: Synthetic oligonucleotide
  Antisense strand to SEQ ID NO: 1978690
uaucacagucaccuguuau

SEQ ID NO: 1978692 - RNA, 19 nt, Artificial Sequence
  Description of Artificial Sequence: Synthetic oligonucleotide
  Sense strand starting at position 298 of SEQ ID NO: 1880588
auauaagucuaaguaggga

SEQ ID NO: 1978693 - RNA, 19 nt, Artificial Sequence
  Description of Artificial Sequence: Synthetic oligonucleotide
  Antisense strand to SEQ ID NO: 1978692
ucccuacuuagacuuauau

SEQ ID NO: 1978694 - RNA, 19 nt, Artificial Sequence
  Description of Artificial Sequence: Synthetic oligonucleotide
  Sense strand starting at position 314 of SEQ ID NO: 1880588
ggaagcacuagucacaguu

SEQ ID NO: 1978695 - RNA, 19 nt, Artificial Sequence
  Description of Artificial Sequence: Synthetic oligonucleotide
  Antisense strand to SEQ ID NO: 1978694
aacugugacuagugcuucc

SEQ ID NO: 1978696 - RNA, 19 nt, Artificial Sequence
  Description of Artificial Sequence: Synthetic oligonucleotide
  Sense strand starting at position 331 of SEQ ID NO: 1880588
uugcauugaggcugggaga

SEQ ID NO: 1978697 - RNA, 19 nt, Artificial Sequence
  Description of Artificial Sequence: Synthetic oligonucleotide
  Antisense strand to SEQ ID NO: 1978696
ucucccagccucaaugcaa

SEQ ID NO: 1978698 - RNA, 19 nt, Artificial Sequence
  Description of Artificial Sequence: Synthetic oligonucleotide
  Sense strand starting at position 332 of SEQ ID NO: 1880588
ugcauugaggcugggagau

SEQ ID NO: 1978699 - RNA, 19 nt, Artificial Sequence
  Description of Artificial Sequence: Synthetic oligonucleotide
  Antisense strand to SEQ ID NO: 1978698
aucucccagccucaaugca

SEQ ID NO: 1978700 - RNA, 19 nt, Artificial Sequence
  Description of Artificial Sequence: Synthetic oligonucleotide
  Sense strand starting at position 446 of SEQ ID NO: 1880588
ugagguacauaugugaagu

SEQ ID NO: 1978701 - RNA, 19 nt, Artificial Sequence
  Description of Artificial Sequence: Synthetic oligonucleotide
  Antisense strand to SEQ ID NO: 1978700
acuucacauauguaccuca

SEQ ID NO: 1978702 - RNA, 19 nt, Artificial Sequence
  Description of Artificial Sequence: Synthetic oligonucleotide
  Sense strand starting at position 447 of SEQ ID NO: 1880588
gagguacauaugugaagua

SEQ ID NO: 1978703 - RNA, 19 nt, Artificial Sequence
  Description of Artificial Sequence: Synthetic oligonucleotide
  Antisense strand to SEQ ID NO: 1978702
uacuucacauauguaccuc

SEQ ID NO: 1978704 - RNA, 19 nt, Artificial Sequence
  Description of Artificial Sequence: Synthetic oligonucleotide
  Sense strand starting at position 511 of SEQ ID NO: 1880588
agaagugagacguguugaa

SEQ ID NO: 1978705 - RNA, 19 nt, Artificial Sequence
  Description of Artificial Sequence: Synthetic oligonucleotide
  Antisense strand to SEQ ID NO: 1978704
uucaacacgucucacuucu

SEQ ID NO: 1978706 - RNA, 19 nt, Artificial Sequence
  Description of Artificial Sequence: Synthetic oligonucleotide
  Sense strand starting at position 529 of SEQ ID NO: 1880588
agguguccuggagaauucu

SEQ ID NO: 1978707 - RNA, 19 nt, Artificial Sequence
  Description of Artificial Sequence: Synthetic oligonucleotide
  Antisense strand to SEQ ID NO: 1978706
agaauucuccaggacaccu

SEQ ID NO: 1978708 - RNA, 19 nt, Artificial Sequence
  Description of Artificial Sequence: Synthetic oligonucleotide
  Sense strand starting at position 538 of SEQ ID NO: 1880588
ggagaauucuaucuagccu

SEQ ID NO: 1978709 - RNA, 19 nt, Artificial Sequence
  Description of Artificial Sequence: Synthetic oligonucleotide
  Antisense strand to SEQ ID NO: 1978708
aggcuagauagaauucucc

SEQ ID NO: 1978710 - RNA, 19 nt, Artificial Sequence
  Description of Artificial Sequence: Synthetic oligonucleotide
  Sense strand starting at position 578 of SEQ ID NO: 1880588
gucaucaaauagucuuaga

SEQ ID NO: 1978711 - RNA, 19 nt, Artificial Sequence
  Description of Artificial Sequence: Synthetic oligonucleotide
  Antisense strand to SEQ ID NO: 1978710
ucuaagacuauuugaugac

SEQ ID NO: 1978712 - RNA, 19 nt, Artificial Sequence
  Description of Artificial Sequence: Synthetic oligonucleotide
  Sense strand starting at position 644 of SEQ ID NO: 1880588
ggacaugggaugugugaga

SEQ ID NO: 1978713 - RNA, 19 nt, Artificial Sequence
  Description of Artificial Sequence: Synthetic oligonucleotide
  Antisense strand to SEQ ID NO: 1978712
ucucacacaucccaugucc

SEQ ID NO: 1978714 - RNA, 19 nt, Artificial Sequence
  Description of Artificial Sequence: Synthetic oligonucleotide
  Sense strand starting at position 651 of SEQ ID NO: 1880588
ggaugugugagauggcuaa

SEQ ID NO: 1978715 - RNA, 19 nt, Artificial Sequence
  Description of Artificial Sequence: Synthetic oligonucleotide
  Antisense strand to SEQ ID NO: 1978714
uuagccaucucacacaucc

SEQ ID NO: 1978716 - RNA, 19 nt, Artificial Sequence
  Description of Artificial Sequence: Synthetic oligonucleotide
  Sense strand starting at position 655 of SEQ ID NO: 1880588
gugugagauggcuaacaug

SEQ ID NO: 1978717 - RNA, 19 nt, Artificial Sequence
  Description of Artificial Sequence: Synthetic oligonucleotide
  Antisense strand to SEQ ID NO: 1978716
cauguuagccaucucacac

SEQ ID NO: 1978718 - RNA, 19 nt, Artificial Sequence
  Description of Artificial Sequence: Synthetic oligonucleotide
  Sense strand starting at position 948 of SEQ ID NO: 1880588
gugggauccugagccaaua

SEQ ID NO: 1978719 - RNA, 19 nt, Artificial Sequence
  Description of Artificial Sequence: Synthetic oligonucleotide
  Antisense strand to SEQ ID NO: 1978718
uauuggcucaggaucccac

SEQ ID NO: 1978720 - RNA, 19 nt, Artificial Sequence
  Description of Artificial Sequence: Synthetic oligonucleotide
  Sense strand starting at position 1030 of SEQ ID NO: 1880588
agagauucuucuguucuua

SEQ ID NO: 1978721 - RNA, 19 nt, Artificial Sequence
  Description of Artificial Sequence: Synthetic oligonucleotide
  Antisense strand to SEQ ID NO: 1978720
uaagaacagaagaaucucu

SEQ ID NO: 1978722 - RNA, 19 nt, Artificial Sequence
  Description of Artificial Sequence: Synthetic oligonucleotide
  Sense strand starting at position 1040 of SEQ ID NO: 1880588
cuguucuuacauggguaaa

SEQ ID NO: 1978723 - RNA, 19 nt, Artificial Sequence
  Description of Artificial Sequence: Synthetic oligonucleotide
  Antisense strand to SEQ ID NO: 1978722
uuuacccauguaagaacag

SEQ ID NO: 1978724 - RNA, 19 nt, Artificial Sequence
  Description of Artificial Sequence: Synthetic oligonucleotide
  Sense strand starting at position 1041 of SEQ ID NO: 1880588
uguucuuacauggguaaag

SEQ ID NO: 1978725 - RNA, 19 nt, Artificial Sequence
  Description of Artificial Sequence: Synthetic oligonucleotide
  Antisense strand to SEQ ID NO: 1978724
cuuuacccauguaagaaca

SEQ ID NO: 1978726 - RNA, 19 nt, Artificial Sequence
  Description of Artificial Sequence: Synthetic oligonucleotide
  Sense strand starting at position 1051 of SEQ ID NO: 1880588
uggguaaaggccugaaaga

SEQ ID NO: 1978727 - RNA, 19 nt, Artificial Sequence
  Description of Artificial Sequence: Synthetic oligonucleotide
  Antisense strand to SEQ ID NO: 1978726
ucuuucaggccuuuaccca

SEQ ID NO: 1978728 - RNA, 19 nt, Artificial Sequence
  Description of Artificial Sequence: Synthetic oligonucleotide
  Sense strand starting at position 1092 of SEQ ID NO: 1880588
gguggaaagacuugcaaga

SEQ ID NO: 1978729 - RNA, 19 nt, Artificial Sequence
  Description of Artificial Sequence: Synthetic oligonucleotide
  Antisense strand to SEQ ID NO: 1978728
ucuugcaagucuuuccacc

SEQ ID NO: 1978730 - RNA, 19 nt, Artificial Sequence
  Description of Artificial Sequence: Synthetic oligonucleotide
  Sense strand starting at position 1335 of SEQ ID NO: 1880588
ugauuagggcuuuacauua

SEQ ID NO: 1978731 - RNA, 19 nt, Artificial Sequence
  Description of Artificial Sequence: Synthetic oligonucleotide
  Antisense strand to SEQ ID NO: 1978730
uaauguaaagcccuaauca

SEQ ID NO: 1978732 - RNA, 19 nt, Artificial Sequence
  Description of Artificial Sequence: Synthetic oligonucleotide
  Sense strand starting at position 1340 of SEQ ID NO: 1880588
agggcuuuacauuaaaugu

SEQ ID NO: 1978733 - RNA, 19 nt, Artificial Sequence
  Description of Artificial Sequence: Synthetic oligonucleotide
  Antisense strand to SEQ ID NO: 1978732
acauuuaauguaaagcccu

SEQ ID NO: 1978734 - RNA, 19 nt, Artificial Sequence
  Description of Artificial Sequence: Synthetic oligonucleotide
  Sense strand starting at position 1715 of SEQ ID NO: 1880588
uuaugaagauagcuuggaa

SEQ ID NO: 1978735 - RNA, 19 nt, Artificial Sequence
  Description of Artificial Sequence: Synthetic oligonucleotide
  Antisense strand to SEQ ID NO: 1978734
uuccaagcuaucuucauaa

SEQ ID NO: 1978736 - RNA, 19 nt, Artificial Sequence
  Description of Artificial Sequence: Synthetic oligonucleotide
  Sense strand starting at position 1718 of SEQ ID NO: 1880588
ugaagauagcuuggaaugu

SEQ ID NO: 1978737 - RNA, 19 nt, Artificial Sequence
  Description of Artificial Sequence: Synthetic oligonucleotide
  Antisense strand to SEQ ID NO: 1978736
acauuccaagcuaucuuca

SEQ ID NO: 1978738 - RNA, 19 nt, Artificial Sequence
  Description of Artificial Sequence: Synthetic oligonucleotide
  Sense strand starting at position 1722 of SEQ ID NO: 1880588
gauagcuuggaaugugauu

SEQ ID NO: 1978739 - RNA, 19 nt, Artificial Sequence
  Description of Artificial Sequence: Synthetic oligonucleotide
  Antisense strand to SEQ ID NO: 1978738
aaucacauuccaagcuauc

SEQ ID NO: 1978740 - RNA, 19 nt, Artificial Sequence
  Description of Artificial Sequence: Synthetic oligonucleotide
  Sense strand starting at position 1773 of SEQ ID NO: 1880588
agauuuguuuagccuguuu

SEQ ID NO: 1978741 - RNA, 19 nt, Artificial Sequence
  Description of Artificial Sequence: Synthetic oligonucleotide
  Antisense strand to SEQ ID NO: 1978740
aaacaggcuaaacaaaucu

SEQ ID NO: 1978742 - RNA, 19 nt, Artificial Sequence
  Description of Artificial Sequence: Synthetic oligonucleotide
  Sense strand starting at position 1775 of SEQ ID NO: 1880588
auuuguuuagccuguuuga

SEQ ID NO: 1978743 - RNA, 19 nt, Artificial Sequence
  Description of Artificial Sequence: Synthetic oligonucleotide
  Antisense strand to SEQ ID NO: 1978742
ucaaacaggcuaaacaaau

SEQ ID NO: 1978744 - RNA, 19 nt, Artificial Sequence
  Description of Artificial Sequence: Synthetic oligonucleotide
  Sense strand starting at position 2078 of SEQ ID NO: 1880588
gaggaagucuccucuggug

SEQ ID NO: 1978745 - RNA, 19 nt, Artificial Sequence
  Description of Artificial Sequence: Synthetic oligonucleotide
  Antisense strand to SEQ ID NO: 1978744
caccagaggagacuuccuc

SEQ ID NO: 1978746 - RNA, 19 nt, Artificial Sequence
  Description of Artificial Sequence: Synthetic oligonucleotide
  Sense strand starting at position 2351 of SEQ ID NO: 1880588
uauggagagucuccuaaga

SEQ ID NO: 1978747 - RNA, 19 nt, Artificial Sequence
  Description of Artificial Sequence: Synthetic oligonucleotide
  Antisense strand to SEQ ID NO: 1978746
ucuuaggagacucuccaua

SEQ ID NO: 1978748 - RNA, 19 nt, Artificial Sequence
  Description of Artificial Sequence: Synthetic oligonucleotide
  Sense strand starting at position 2617 of SEQ ID NO: 1880588
gcaagaacaucagcuuaaa

SEQ ID NO: 1978749 - RNA, 19 nt, Artificial Sequence
  Description of Artificial Sequence: Synthetic oligonucleotide
  Antisense strand to SEQ ID NO: 1978748
uuuaagcugauguucuugc

SEQ ID NO: 1978750 - RNA, 19 nt, Artificial Sequence
  Description of Artificial Sequence: Synthetic oligonucleotide
  Sense strand starting at position 2704 of SEQ ID NO: 1880588
uggcuacucccagggaaga

SEQ ID NO: 1978751 - RNA, 19 nt, Artificial Sequence
  Description of Artificial Sequence: Synthetic oligonucleotide
  Antisense strand to SEQ ID NO: 1978750
ucuucccugggaguagcca

SEQ ID NO: 1978752 - RNA, 19 nt, Artificial Sequence
  Description of Artificial Sequence: Synthetic oligonucleotide
  Sense strand starting at position 2850 of SEQ ID NO: 1880588
cuugaauucugucccaaug

SEQ ID NO: 1978753 - RNA, 19 nt, Artificial Sequence
  Description of Artificial Sequence: Synthetic oligonucleotide
  Antisense strand to SEQ ID NO: 1978752
cauugggacagaauucaag

SEQ ID NO: 1978754 - RNA, 19 nt, Artificial Sequence
  Description of Artificial Sequence: Synthetic oligonucleotide
  Sense strand starting at position 2936 of SEQ ID NO: 1880588
caauuaaaggagugcugga

SEQ ID NO: 1978755 - RNA, 19 nt, Artificial Sequence
  Description of Artificial Sequence: Synthetic oligonucleotide
  Antisense strand to SEQ ID NO: 1978754
uccagcacuccuuuaauug

SEQ ID NO: 1978756 - RNA, 19 nt, Artificial Sequence
  Description of Artificial Sequence: Synthetic oligonucleotide
  Sense strand starting at position 2966 of SEQ ID NO: 1880588
gcacauggcucucucauuu

SEQ ID NO: 1978757 - RNA, 19 nt, Artificial Sequence
  Description of Artificial Sequence: Synthetic oligonucleotide
  Antisense strand to SEQ ID NO: 1978756
aaaugagagagccaugugc

SEQ ID NO: 1978758 - RNA, 19 nt, Artificial Sequence
  Description of Artificial Sequence: Synthetic oligonucleotide
  Sense strand starting at position 3056 of SEQ ID NO: 1880588
agcagacccggugagauua

SEQ ID NO: 1978759 - RNA, 19 nt, Artificial Sequence
  Description of Artificial Sequence: Synthetic oligonucleotide
  Antisense strand to SEQ ID NO: 1978758
uaaucucaccgggucugcu

SEQ ID NO: 1978760 - RNA, 19 nt, Artificial Sequence
  Description of Artificial Sequence: Synthetic oligonucleotide
  Sense strand starting at position 3069 of SEQ ID NO: 1880588
agauuauaccagcauggcu

SEQ ID NO: 1978761 - RNA, 19 nt, Artificial Sequence
  Description of Artificial Sequence: Synthetic oligonucleotide
  Antisense strand to SEQ ID NO: 1978760
agccaugcugguauaaucu

SEQ ID NO: 1978762 - RNA, 19 nt, Artificial Sequence
  Description of Artificial Sequence: Synthetic oligonucleotide
  Sense strand starting at position 3205 of SEQ ID NO: 1880588
ugaagaggucuuugagagu

SEQ ID NO: 1978763 - RNA, 19 nt, Artificial Sequence
  Description of Artificial Sequence: Synthetic oligonucleotide
  Antisense strand to SEQ ID NO: 1978762
acucucaaagaccucuuca

SEQ ID NO: 1978764 - RNA, 19 nt, Artificial Sequence
  Description of Artificial Sequence: Synthetic oligonucleotide
  Sense strand starting at position 3258 of SEQ ID NO: 1880588
acugaaaugaucggaguca

SEQ ID NO: 1978765 - RNA, 19 nt, Artificial Sequence
  Description of Artificial Sequence: Synthetic oligonucleotide
  Antisense strand to SEQ ID NO: 1978764
ugacuccgaucauuucagu

SEQ ID NO: 1978766 - RNA, 19 nt, Artificial Sequence
  Description of Artificial Sequence: Synthetic oligonucleotide
  Sense strand starting at position 3295 of SEQ ID NO: 1880588
ggcuauaugccugagagug

SEQ ID NO: 1978767 - RNA, 19 nt, Artificial Sequence
  Description of Artificial Sequence: Synthetic oligonucleotide
  Antisense strand to SEQ ID NO: 1978766
cacucucaggcauauagcc

SEQ ID NO: 1978768 - RNA, 19 nt, Artificial Sequence
  Description of Artificial Sequence: Synthetic oligonucleotide
  Sense strand starting at position 3872 of SEQ ID NO: 1880588
gauguagauguugggauaa

SEQ ID NO: 1978769 - RNA, 19 nt, Artificial Sequence
  Description of Artificial Sequence: Synthetic oligonucleotide
  Antisense strand to SEQ ID NO: 1978768
uuaucccaacaucuacauc

SEQ ID NO: 1978770 - RNA, 19 nt, Artificial Sequence
  Description of Artificial Sequence: Synthetic oligonucleotide
  Sense strand starting at position 70 of SEQ ID NO: 1880589
aggaacaucucccaaguuu

SEQ ID NO: 1978771 - RNA, 19 nt, Artificial Sequence
  Description of Artificial Sequence: Synthetic oligonucleotide
  Antisense strand to SEQ ID NO: 1978770
aaacuugggagauguuccu

SEQ ID NO: 1978772 - RNA, 19 nt, Artificial Sequence
  Description of Artificial Sequence: Synthetic oligonucleotide
  Sense strand starting at position 270 of SEQ ID NO: 1880589
guauuuacuuaguagagug

SEQ ID NO: 1978773 - RNA, 19 nt, Artificial Sequence
  Description of Artificial Sequence: Synthetic oligonucleotide
  Antisense strand to SEQ ID NO: 1978772
cacucuacuaaguaaauac

SEQ ID NO: 1978774 - RNA, 19 nt, Artificial Sequence
  Description of Artificial Sequence: Synthetic oligonucleotide
  Sense strand starting at position 310 of SEQ ID NO: 1880589
uggucuagauauccugacu

SEQ ID NO: 1978775 - RNA, 19 nt, Artificial Sequence
  Description of Artificial Sequence: Synthetic oligonucleotide
  Antisense strand to SEQ ID NO: 1978774
agucaggauaucuagacca

SEQ ID NO: 1978776 - RNA, 19 nt, Artificial Sequence
  Description of Artificial Sequence: Synthetic oligonucleotide
  Sense strand starting at position 318 of SEQ ID NO: 1880589
auauccugacuucgugaua

SEQ ID NO: 1978777 - RNA, 19 nt, Artificial Sequence
  Description of Artificial Sequence: Synthetic oligonucleotide
  Antisense strand to SEQ ID NO: 1978776
uaucacgaagucaggauau

SEQ ID NO: 1978778 - RNA, 19 nt, Artificial Sequence
  Description of Artificial Sequence: Synthetic oligonucleotide
  Sense strand starting at position 319 of SEQ ID NO: 1880589
uauccugacuucgugauaa

SEQ ID NO: 1978779 - RNA, 19 nt, Artificial Sequence
  Description of Artificial Sequence: Synthetic oligonucleotide
  Antisense strand to SEQ ID NO: 1978778
uuaucacgaagucaggaua

SEQ ID NO: 1978780 - RNA, 19 nt, Artificial Sequence
  Description of Artificial Sequence: Synthetic oligonucleotide
  Sense strand starting at position 821 of SEQ ID NO: 1880589
uguggacugcuggauaagu

SEQ ID NO: 1978781 - RNA, 19 nt, Artificial Sequence
  Description of Artificial Sequence: Synthetic oligonucleotide
  Antisense strand to SEQ ID NO: 1978780
acuuauccagcaguccaca

SEQ ID NO: 1978782 - RNA, 19 nt, Artificial Sequence
  Description of Artificial Sequence: Synthetic oligonucleotide
  Sense strand starting at position 839 of SEQ ID NO: 1880589
ugcggagcucuagagauga

SEQ ID NO: 1978783 - RNA, 19 nt, Artificial Sequence
  Description of Artificial Sequence: Synthetic oligonucleotide
  Antisense strand to SEQ ID NO: 1978782
ucaucucuagagcuccgca

SEQ ID NO: 1978784 - RNA, 19 nt, Artificial Sequence
  Description of Artificial Sequence: Synthetic oligonucleotide
  Sense strand starting at position 867 of SEQ ID NO: 1880589
gagcaucucugcucaguaa

SEQ ID NO: 1978785 - RNA, 19 nt, Artificial Sequence
  Description of Artificial Sequence: Synthetic oligonucleotide
  Antisense strand to SEQ ID NO: 1978784
uuacugagcagagaugcuc

SEQ ID NO: 1978786 - RNA, 19 nt, Artificial Sequence
  Description of Artificial Sequence: Synthetic oligonucleotide
  Sense strand starting at position 868 of SEQ ID NO: 1880589
agcaucucugcucaguaaa

SEQ ID NO: 1978787 - RNA, 19 nt, Artificial Sequence
  Description of Artificial Sequence: Synthetic oligonucleotide
  Antisense strand to SEQ ID NO: 1978786
uuuacugagcagagaugcu

SEQ ID NO: 1978788 - RNA, 19 nt, Artificial Sequence
  Description of Artificial Sequence: Synthetic oligonucleotide
  Sense strand starting at position 924 of SEQ ID NO: 1880589
aggaauuucuaggaacuuu

SEQ ID NO: 1978789 - RNA, 19 nt, Artificial Sequence
  Description of Artificial Sequence: Synthetic oligonucleotide
  Antisense strand to SEQ ID NO: 1978788
aaaguuccuagaaauuccu

SEQ ID NO: 1978790 - RNA, 19 nt, Artificial Sequence
  Description of Artificial Sequence: Synthetic oligonucleotide
  Sense strand starting at position 932 of SEQ ID NO: 1880589
cuaggaacuuuccaagaga

SEQ ID NO: 1978791 - RNA, 19 nt, Artificial Sequence
  Description of Artificial Sequence: Synthetic oligonucleotide
  Antisense strand to SEQ ID NO: 1978790
ucucuuggaaaguuccuag

SEQ ID NO: 1978792 - RNA, 19 nt, Artificial Sequence
  Description of Artificial Sequence: Synthetic oligonucleotide
  Sense strand starting at position 1174 of SEQ ID NO: 1880589
cgcuaaucauuccaagcaa

SEQ ID NO: 1978793 - RNA, 19 nt, Artificial Sequence
  Description of Artificial Sequence: Synthetic oligonucleotide
  Antisense strand to SEQ ID NO: 1978792
uugcuuggaaugauuagcg

SEQ ID NO: 1978794 - RNA, 19 nt, Artificial Sequence
  Description of Artificial Sequence: Synthetic oligonucleotide
  Sense strand starting at position 1188 of SEQ ID NO: 1880589
agcaaauucugucaugcca

SEQ ID NO: 1978795 - RNA, 19 nt, Artificial Sequence
  Description of Artificial Sequence: Synthetic oligonucleotide
  Antisense strand to SEQ ID NO: 1978794
uggcaugacagaauuugcu

SEQ ID NO: 1978796 - RNA, 19 nt, Artificial Sequence
  Description of Artificial Sequence: Synthetic oligonucleotide
  Sense strand starting at position 1238 of SEQ ID NO: 1880589
uuccaacucuccugcgaau

SEQ ID NO: 1978797 - RNA, 19 nt, Artificial Sequence
  Description of Artificial Sequence: Synthetic oligonucleotide
  Antisense strand to SEQ ID NO: 1978796
auucgcaggagaguuggaa

SEQ ID NO: 1978798 - RNA, 19 nt, Artificial Sequence
  Description of Artificial Sequence: Synthetic oligonucleotide
  Sense strand starting at position 1240 of SEQ ID NO: 1880589
ccaacucuccugcgaauug

SEQ ID NO: 1978799 - RNA, 19 nt, Artificial Sequence
  Description of Artificial Sequence: Synthetic oligonucleotide
  Antisense strand to SEQ ID NO: 1978798
caauucgcaggagaguugg

SEQ ID NO: 1978800 - RNA, 19 nt, Artificial Sequence
  Description of Artificial Sequence: Synthetic oligonucleotide
  Sense strand starting at position 1996 of SEQ ID NO: 1880589
uaagcaggguuguugauua

SEQ ID NO: 1978801 - RNA, 19 nt, Artificial Sequence
  Description of Artificial Sequence: Synthetic oligonucleotide
  Antisense strand to SEQ ID NO: 1978800
uaaucaacaacccugcuua

SEQ ID NO: 1978802 - RNA, 19 nt, Artificial Sequence
  Description of Artificial Sequence: Synthetic oligonucleotide
  Sense strand starting at position 3274 of SEQ ID NO: 1880589
cgccuauaaucuuugggac

SEQ ID NO: 1978803 - RNA, 19 nt, Artificial Sequence
  Description of Artificial Sequence: Synthetic oligonucleotide
  Antisense strand to SEQ ID NO: 1978802
gucccaaagauuauaggcg

SEQ ID NO: 1978804 - RNA, 19 nt, Artificial Sequence
  Description of Artificial Sequence: Synthetic oligonucleotide
  Sense strand starting at position 3352 of SEQ ID NO: 1880589
agauccugucucuaaaugu

SEQ ID NO: 1978805 - RNA, 19 nt, Artificial Sequence
  Description of Artificial Sequence: Synthetic oligonucleotide
  Antisense strand to SEQ ID NO: 1978804
acauuuagagacaggaucu

SEQ ID NO: 1978806 - RNA, 19 nt, Artificial Sequence
  Description of Artificial Sequence: Synthetic oligonucleotide
  Sense strand starting at position 3388 of SEQ ID NO: 1880589
cgaucucuguccuguggua

SEQ ID NO: 1978807 - RNA, 19 nt, Artificial Sequence
  Description of Artificial Sequence: Synthetic oligonucleotide
  Antisense strand to SEQ ID NO: 1978806
uaccacaggacagagaucg

SEQ ID NO: 1978808 - RNA, 19 nt, Artificial Sequence
  Description of Artificial Sequence: Synthetic oligonucleotide
  Sense strand starting at position 3390 of SEQ ID NO: 1880589
aucucuguccugugguaua

SEQ ID NO: 1978809 - RNA, 19 nt, Artificial Sequence
  Description of Artificial Sequence: Synthetic oligonucleotide
  Antisense strand to SEQ ID NO: 1978808
uauaccacaggacagagau

SEQ ID NO: 1978810 - RNA, 19 nt, Artificial Sequence
  Description of Artificial Sequence: Synthetic oligonucleotide
  Sense strand starting at position 3478 of SEQ ID NO: 1880589
aguuccugccucugaugau

SEQ ID NO: 1978811 - RNA, 19 nt, Artificial Sequence
  Description of Artificial Sequence: Synthetic oligonucleotide
  Antisense strand to SEQ ID NO: 1978810
aucaucagaggcaggaacu

SEQ ID NO: 1978812 - RNA, 19 nt, Artificial Sequence
  Description of Artificial Sequence: Synthetic oligonucleotide
  Sense strand starting at position 3479 of SEQ ID NO: 1880589
guuccugccucugaugauu

SEQ ID NO: 1978813 - RNA, 19 nt, Artificial Sequence
  Description of Artificial Sequence: Synthetic oligonucleotide
  Antisense strand to SEQ ID NO: 1978812
aaucaucagaggcaggaac

SEQ ID NO: 1978814 - RNA, 19 nt, Artificial Sequence
  Description of Artificial Sequence: Synthetic oligonucleotide
  Sense strand starting at position 3485 of SEQ ID NO: 1880589
gccucugaugauugcagga

SEQ ID NO: 1978815 - RNA, 19 nt, Artificial Sequence
  Description of Artificial Sequence: Synthetic oligonucleotide
  Antisense strand to SEQ ID NO: 1978814
uccugcaaucaucagaggc

SEQ ID NO: 1978816 - RNA, 19 nt, Artificial Sequence
  Description of Artificial Sequence: Synthetic oligonucleotide
  Sense strand starting at position 3505 of SEQ ID NO: 1880589
gagaguuagacgcggaacu

SEQ ID NO: 1978817 - RNA, 19 nt, Artificial Sequence
  Description of Artificial Sequence: Synthetic oligonucleotide
  Antisense strand to SEQ ID NO: 1978816
aguuccgcgucuaacucuc

SEQ ID NO: 1978818 - RNA, 19 nt, Artificial Sequence
  Description of Artificial Sequence: Synthetic oligonucleotide
  Sense strand starting at position 3603 of SEQ ID NO: 1880589
cugagagugucauggugga

SEQ ID NO: 1978819 - RNA, 19 nt, Artificial Sequence
  Description of Artificial Sequence: Synthetic oligonucleotide
  Antisense strand to SEQ ID NO: 1978818
uccaccaugacacucucag

SEQ ID NO: 1978820 - RNA, 19 nt, Artificial Sequence
  Description of Artificial Sequence: Synthetic oligonucleotide
  Sense strand starting at position 370 of SEQ ID NO: 1880590
ggaagaagugaccggugaa

SEQ ID NO: 1978821 - RNA, 19 nt, Artificial Sequence
  Description of Artificial Sequence: Synthetic oligonucleotide
  Antisense strand to SEQ ID NO: 1978820
uucaccggucacuucuucc

SEQ ID NO: 1978822 - RNA, 19 nt, Artificial Sequence
  Description of Artificial Sequence: Synthetic oligonucleotide
  Sense strand starting at position 371 of SEQ ID NO: 1880590
gaagaagugaccggugaag

SEQ ID NO: 1978823 - RNA, 19 nt, Artificial Sequence
  Description of Artificial Sequence: Synthetic oligonucleotide
  Antisense strand to SEQ ID NO: 1978822
cuucaccggucacuucuuc

SEQ ID NO: 1978824 - RNA, 19 nt, Artificial Sequence
  Description of Artificial Sequence: Synthetic oligonucleotide
  Sense strand starting at position 523 of SEQ ID NO: 1880590
uggcuauaccugcagacuu

SEQ ID NO: 1978825 - RNA, 19 nt, Artificial Sequence
  Description of Artificial Sequence: Synthetic oligonucleotide
  Antisense strand to SEQ ID NO: 1978824
aagucugcagguauagcca

SEQ ID NO: 1978826 - RNA, 19 nt, Artificial Sequence
  Description of Artificial Sequence: Synthetic oligonucleotide
  Sense strand starting at position 525 of SEQ ID NO: 1880590
gcuauaccugcagacuuua

SEQ ID NO: 1978827 - RNA, 19 nt, Artificial Sequence
  Description of Artificial Sequence: Synthetic oligonucleotide
  Antisense strand to SEQ ID NO: 1978826
uaaagucugcagguauagc

SEQ ID NO: 1978828 - RNA, 19 nt, Artificial Sequence
  Description of Artificial Sequence: Synthetic oligonucleotide
  Sense strand starting at position 608 of SEQ ID NO: 1880590
ggaagaaugccagggagcu

SEQ ID NO: 1978829 - RNA, 19 nt, Artificial Sequence
  Description of Artificial Sequence: Synthetic oligonucleotide
  Antisense strand to SEQ ID NO: 1978828
agcucccuggcauucuucc

SEQ ID NO: 1978830 - RNA, 19 nt, Artificial Sequence
  Description of Artificial Sequence: Synthetic oligonucleotide
  Sense strand starting at position 649 of SEQ ID NO: 1880590
ugacuugugagcuggacaa

SEQ ID NO: 1978831 - RNA, 19 nt, Artificial Sequence
  Description of Artificial Sequence: Synthetic oligonucleotide
  Antisense strand to SEQ ID NO: 1978830
uuguccagcucacaaguca

SEQ ID NO: 1978832 - RNA, 19 nt, Artificial Sequence
  Description of Artificial Sequence: Synthetic oligonucleotide
  Sense strand starting at position 651 of SEQ ID NO: 1880590
acuugugagcuggacaaca

SEQ ID NO: 1978833 - RNA, 19 nt, Artificial Sequence
  Description of Artificial Sequence: Synthetic oligonucleotide
  Antisense strand to SEQ ID NO: 1978832
uguuguccagcucacaagu

SEQ ID NO: 1978834 - RNA, 19 nt, Artificial Sequence
  Description of Artificial Sequence: Synthetic oligonucleotide
  Sense strand starting at position 860 of SEQ ID NO: 1880590
ccaggaauuugguaucauu

SEQ ID NO: 1978835 - RNA, 19 nt, Artificial Sequence
  Description of Artificial Sequence: Synthetic oligonucleotide
  Antisense strand to SEQ ID NO: 1978834
aaugauaccaaauuccugg

SEQ ID NO: 1978836 - RNA, 19 nt, Artificial Sequence
  Description of Artificial Sequence: Synthetic oligonucleotide
  Sense strand starting at position 863 of SEQ ID NO: 1880590
ggaauuugguaucauuugu

SEQ ID NO: 1978837 - RNA, 19 nt, Artificial Sequence
  Description of Artificial Sequence: Synthetic oligonucleotide
  Antisense strand to SEQ ID NO: 1978836
acaaaugauaccaaauucc

SEQ ID NO: 1978838 - RNA, 19 nt, Artificial Sequence
  Description of Artificial Sequence: Synthetic oligonucleotide
  Sense strand starting at position 867 of SEQ ID NO: 1880590
uuugguaucauuuguaagu

SEQ ID NO: 1978839 - RNA, 19 nt, Artificial Sequence
  Description of Artificial Sequence: Synthetic oligonucleotide
  Antisense strand to SEQ ID NO: 1978838
acuuacaaaugauaccaaa

SEQ ID NO: 1978840 - RNA, 19 nt, Artificial Sequence
  Description of Artificial Sequence: Synthetic oligonucleotide
  Sense strand starting at position 876 of SEQ ID NO: 1880590
auuuguaaguaagacaaga

SEQ ID NO: 1978841 - RNA, 19 nt, Artificial Sequence
  Description of Artificial Sequence: Synthetic oligonucleotide
  Antisense strand to SEQ ID NO: 1978840
ucuugucuuacuuacaaau

SEQ ID NO: 1978842 - RNA, 19 nt, Artificial Sequence
  Description of Artificial Sequence: Synthetic oligonucleotide
  Sense strand starting at position 1086 of SEQ ID NO: 1880590
ggcagauucucccucacua

SEQ ID NO: 1978843 - RNA, 19 nt, Artificial Sequence
  Description of Artificial Sequence: Synthetic oligonucleotide
  Antisense strand to SEQ ID NO: 1978842
uagugagggagaaucugcc

SEQ ID NO: 1978844 - RNA, 19 nt, Artificial Sequence
  Description of Artificial Sequence: Synthetic oligonucleotide
  Sense strand starting at position 1124 of SEQ ID NO: 1880590
gagaaauucuaguugcucu

SEQ ID NO: 1978845 - RNA, 19 nt, Artificial Sequence
  Description of Artificial Sequence: Synthetic oligonucleotide
  Antisense strand to SEQ ID NO: 1978844
agagcaacuagaauuucuc

SEQ ID NO: 1978846 - RNA, 19 nt, Artificial Sequence
  Description of Artificial Sequence: Synthetic oligonucleotide
  Sense strand starting at position 1409 of SEQ ID NO: 1880590
aacggaaucccuuguauag

SEQ ID NO: 1978847 - RNA, 19 nt, Artificial Sequence
  Description of Artificial Sequence: Synthetic oligonucleotide
  Antisense strand to SEQ ID NO: 1978846
cuauacaagggauuccguu

SEQ ID NO: 1978848 - RNA, 19 nt, Artificial Sequence
  Description of Artificial Sequence: Synthetic oligonucleotide
  Sense strand starting at position 1672 of SEQ ID NO: 1880590
cgcucugaccaaggagaaa

SEQ ID NO: 1978849 - RNA, 19 nt, Artificial Sequence
  Description of Artificial Sequence: Synthetic oligonucleotide
  Antisense strand to SEQ ID NO: 1978848
uuucuccuuggucagagcg

SEQ ID NO: 1978850 - RNA, 19 nt, Artificial Sequence
  Description of Artificial Sequence: Synthetic oligonucleotide
  Sense strand starting at position 1695 of SEQ ID NO: 1880590
ggaaguuugccagggacau

SEQ ID NO: 1978851 - RNA, 19 nt, Artificial Sequence
  Description of Artificial Sequence: Synthetic oligonucleotide
  Antisense strand to SEQ ID NO: 1978850
augucccuggcaaacuucc

SEQ ID NO: 1978852 - RNA, 19 nt, Artificial Sequence
  Description of Artificial Sequence: Synthetic oligonucleotide
  Sense strand starting at position 1696 of SEQ ID NO: 1880590
gaaguuugccagggacauc

SEQ ID NO: 1978853 - RNA, 19 nt, Artificial Sequence
  Description of Artificial Sequence: Synthetic oligonucleotide
  Antisense strand to SEQ ID NO: 1978852
gaugucccuggcaaacuuc

SEQ ID NO: 1978854 - RNA, 19 nt, Artificial Sequence
  Description of Artificial Sequence: Synthetic oligonucleotide
  Sense strand starting at position 1727 of SEQ ID NO: 1880590
uccuuuccucauggaaaug

SEQ ID NO: 1978855 - RNA, 19 nt, Artificial Sequence
  Description of Artificial Sequence: Synthetic oligonucleotide
  Antisense strand to SEQ ID NO: 1978854
cauuuccaugaggaaagga

SEQ ID NO: 1978856 - RNA, 19 nt, Artificial Sequence
  Description of Artificial Sequence: Synthetic oligonucleotide
  Sense strand starting at position 2208 of SEQ ID NO: 1880590
ugggacaguuaucuauuga

SEQ ID NO: 1978857 - RNA, 19 nt, Artificial Sequence
  Description of Artificial Sequence: Synthetic oligonucleotide
  Antisense strand to SEQ ID NO: 1978856
ucaauagauaacuguccca

SEQ ID NO: 1978858 - RNA, 19 nt, Artificial Sequence
  Description of Artificial Sequence: Synthetic oligonucleotide
  Sense strand starting at position 2283 of SEQ ID NO: 1880590
accacaaaccguuaugauc

SEQ ID NO: 1978859 - RNA, 19 nt, Artificial Sequence
  Description of Artificial Sequence: Synthetic oligonucleotide
  Antisense strand to SEQ ID NO: 1978858
gaucauaacgguuuguggu

SEQ ID NO: 1978860 - RNA, 19 nt, Artificial Sequence
  Description of Artificial Sequence: Synthetic oligonucleotide
  Sense strand starting at position 2354 of SEQ ID NO: 1880590
ucuuguauucuuggaugag

SEQ ID NO: 1978861 - RNA, 19 nt, Artificial Sequence
  Description of Artificial Sequence: Synthetic oligonucleotide
  Antisense strand to SEQ ID NO: 1978860
cucauccaagaauacaaga

SEQ ID NO: 1978862 - RNA, 19 nt, Artificial Sequence
  Description of Artificial Sequence: Synthetic oligonucleotide
  Sense strand starting at position 2357 of SEQ ID NO: 1880590
uguauucuuggaugaggau

SEQ ID NO: 1978863 - RNA, 19 nt, Artificial Sequence
  Description of Artificial Sequence: Synthetic oligonucleotide
  Antisense strand to SEQ ID NO: 1978862
auccucauccaagaauaca

SEQ ID NO: 1978864 - RNA, 19 nt, Artificial Sequence
  Description of Artificial Sequence: Synthetic oligonucleotide
  Sense strand starting at position 2377 of SEQ ID NO: 1880590
gagugaagcccucagcaag

SEQ ID NO: 1978865 - RNA, 19 nt, Artificial Sequence
  Description of Artificial Sequence: Synthetic oligonucleotide
  Antisense strand to SEQ ID NO: 1978864
cuugcugagggcuucacuc

SEQ ID NO: 1978866 - RNA, 19 nt, Artificial Sequence
  Description of Artificial Sequence: Synthetic oligonucleotide
  Sense strand starting at position 2764 of SEQ ID NO: 1880590
gggauugcuggguaucuca

SEQ ID NO: 1978867 - RNA, 19 nt, Artificial Sequence
  Description of Artificial Sequence: Synthetic oligonucleotide
  Antisense strand to SEQ ID NO: 1978866
ugagauacccagcaauccc

SEQ ID NO: 1978868 - RNA, 19 nt, Artificial Sequence
  Description of Artificial Sequence: Synthetic oligonucleotide
  Sense strand starting at position 3093 of SEQ ID NO: 1880590
cuaagauaguuuguacuuc

SEQ ID NO: 1978869 - RNA, 19 nt, Artificial Sequence
  Description of Artificial Sequence: Synthetic oligonucleotide
  Antisense strand to SEQ ID NO: 1978868
gaaguacaaacuaucuuag

SEQ ID NO: 1978870 - RNA, 19 nt, Artificial Sequence
  Description of Artificial Sequence: Synthetic oligonucleotide
  Sense strand starting at position 3190 of SEQ ID NO: 1880590
uucugcuuugacuaaguca

SEQ ID NO: 1978871 - RNA, 19 nt, Artificial Sequence
  Description of Artificial Sequence: Synthetic oligonucleotide
  Antisense strand to SEQ ID NO: 1978870
ugacuuagucaaagcagaa

SEQ ID NO: 1978872 - RNA, 19 nt, Artificial Sequence
  Description of Artificial Sequence: Synthetic oligonucleotide
  Sense strand starting at position 3193 of SEQ ID NO: 1880590
ugcuuugacuaagucauga

SEQ ID NO: 1978873 - RNA, 19 nt, Artificial Sequence
  Description of Artificial Sequence: Synthetic oligonucleotide
  Antisense strand to SEQ ID NO: 1978872
ucaugacuuagucaaagca

SEQ ID NO: 1978874 - RNA, 19 nt, Artificial Sequence
  Description of Artificial Sequence: Synthetic oligonucleotide
  Sense strand starting at position 3241 of SEQ ID NO: 1880590
cugaccaccugcuugaauu

SEQ ID NO: 1978875 - RNA, 19 nt, Artificial Sequence
  Description of Artificial Sequence: Synthetic oligonucleotide
  Antisense strand to SEQ ID NO: 1978874
aauucaagcagguggucag

SEQ ID NO: 1978876 - RNA, 19 nt, Artificial Sequence
  Description of Artificial Sequence: Synthetic oligonucleotide
  Sense strand starting at position 3251 of SEQ ID NO: 1880590
gcuugaauuggaggaugga

SEQ ID NO: 1978877 - RNA, 19 nt, Artificial Sequence
  Description of Artificial Sequence: Synthetic oligonucleotide
  Antisense strand to SEQ ID NO: 1978876
uccauccuccaauucaagc

SEQ ID NO: 1978878 - RNA, 19 nt, Artificial Sequence
  Description of Artificial Sequence: Synthetic oligonucleotide
  Sense strand starting at position 3480 of SEQ ID NO: 1880590
auguguucuguggaaacug

SEQ ID NO: 1978879 - RNA, 19 nt, Artificial Sequence
  Description of Artificial Sequence: Synthetic oligonucleotide
  Antisense strand to SEQ ID NO: 1978878
caguuuccacagaacacau

SEQ ID NO: 1978880 - RNA, 19 nt, Artificial Sequence
  Description of Artificial Sequence: Synthetic oligonucleotide
  Sense strand starting at position 3534 of SEQ ID NO: 1880590
gccucacucagagguaaga

SEQ ID NO: 1978881 - RNA, 19 nt, Artificial Sequence
  Description of Artificial Sequence: Synthetic oligonucleotide
  Antisense strand to SEQ ID NO: 1978880
ucuuaccucugagugaggc

SEQ ID NO: 1978882 - RNA, 19 nt, Artificial Sequence
  Description of Artificial Sequence: Synthetic oligonucleotide
  Sense strand starting at position 3561 of SEQ ID NO: 1880590
caggguugauauucccuga

SEQ ID NO: 1978883 - RNA, 19 nt, Artificial Sequence
  Description of Artificial Sequence: Synthetic oligonucleotide
  Antisense strand to SEQ ID NO: 1978882
ucagggaauaucaacccug

SEQ ID NO: 1978884 - RNA, 19 nt, Artificial Sequence
  Description of Artificial Sequence: Synthetic oligonucleotide
  Sense strand starting at position 3564 of SEQ ID NO: 1880590
gguugauauucccugagaa

SEQ ID NO: 1978885 - RNA, 19 nt, Artificial Sequence
  Description of Artificial Sequence: Synthetic oligonucleotide
  Antisense strand to SEQ ID NO: 1978884
uucucagggaauaucaacc

SEQ ID NO: 1978886 - RNA, 19 nt, Artificial Sequence
  Description of Artificial Sequence: Synthetic oligonucleotide
  Sense strand starting at position 3565 of SEQ ID NO: 1880590
guugauauucccugagaaa

SEQ ID NO: 1978887 - RNA, 19 nt, Artificial Sequence
  Description of Artificial Sequence: Synthetic oligonucleotide
  Antisense strand to SEQ ID NO: 1978886
uuucucagggaauaucaac

SEQ ID NO: 1978888 - RNA, 19 nt, Artificial Sequence
  Description of Artificial Sequence: Synthetic oligonucleotide
  Sense strand starting at position 3600 of SEQ ID NO: 1880590
guugacuugcuccaaccaa

SEQ ID NO: 1978889 - RNA, 19 nt, Artificial Sequence
  Description of Artificial Sequence: Synthetic oligonucleotide
  Antisense strand to SEQ ID NO: 1978888
uugguuggagcaagucaac

SEQ ID NO: 1978890 - RNA, 19 nt, Artificial Sequence
  Description of Artificial Sequence: Synthetic oligonucleotide
  Sense strand starting at position 3647 of SEQ ID NO: 1880590
aaagaaaguugugucuaau

SEQ ID NO: 1978891 - RNA, 19 nt, Artificial Sequence
  Description of Artificial Sequence: Synthetic oligonucleotide
  Antisense strand to SEQ ID NO: 1978890
auuagacacaacuuucuuu

SEQ ID NO: 1978892 - RNA, 19 nt, Artificial Sequence
  Description of Artificial Sequence: Synthetic oligonucleotide
  Sense strand starting at position 3650 of SEQ ID NO: 1880590
gaaaguugugucuaaugca

SEQ ID NO: 1978893 - RNA, 19 nt, Artificial Sequence
  Description of Artificial Sequence: Synthetic oligonucleotide
  Antisense strand to SEQ ID NO: 1978892
ugcauuagacacaacuuuc

SEQ ID NO: 1978894 - RNA, 19 nt, Artificial Sequence
  Description of Artificial Sequence: Synthetic oligonucleotide
  Sense strand starting at position 3847 of SEQ ID NO: 1880590
auggccaccucauugaaua

SEQ ID NO: 1978895 - RNA, 19 nt, Artificial Sequence
  Description of Artificial Sequence: Synthetic oligonucleotide
  Antisense strand to SEQ ID NO: 1978894
uauucaaugagguggccau

SEQ ID NO: 1978896 - RNA, 19 nt, Artificial Sequence
  Description of Artificial Sequence: Synthetic oligonucleotide
  Sense strand starting at position 3848 of SEQ ID NO: 1880590
uggccaccucauugaauaa

SEQ ID NO: 1978897 - RNA, 19 nt, Artificial Sequence
  Description of Artificial Sequence: Synthetic oligonucleotide
  Antisense strand to SEQ ID NO: 1978896
uuauucaaugagguggcca

SEQ ID NO: 1978898 - RNA, 19 nt, Artificial Sequence
  Description of Artificial Sequence: Synthetic oligonucleotide
  Sense strand starting at position 3918 of SEQ ID NO: 1880590
gagacagcuucuucuugga

SEQ ID NO: 1978899 - RNA, 19 nt, Artificial Sequence
  Description of Artificial Sequence: Synthetic oligonucleotide
  Antisense strand to SEQ ID NO: 1978898
uccaagaagaagcugucuc

SEQ ID NO: 1978900 - RNA, 19 nt, Artificial Sequence
  Description of Artificial Sequence: Synthetic oligonucleotide
  Sense strand starting at position 220 of SEQ ID NO: 1880591
accuaaagauuuggagaaa

SEQ ID NO: 1978901 - RNA, 19 nt, Artificial Sequence
  Description of Artificial Sequence: Synthetic oligonucleotide
  Antisense strand to SEQ ID NO: 1978900
uuucuccaaaucuuuaggu

SEQ ID NO: 1978902 - RNA, 19 nt, Artificial Sequence
  Description of Artificial Sequence: Synthetic oligonucleotide
  Sense strand starting at position 490 of SEQ ID NO: 1880591
acaauagcaugugugaaua

SEQ ID NO: 1978903 - RNA, 19 nt, Artificial Sequence
  Description of Artificial Sequence: Synthetic oligonucleotide
  Antisense strand to SEQ ID NO: 1978902
uauucacacaugcuauugu

SEQ ID NO: 1978904 - RNA, 19 nt, Artificial Sequence
  Description of Artificial Sequence: Synthetic oligonucleotide
  Sense strand starting at position 588 of SEQ ID NO: 1880591
auuucuaguguuggcgaaa

SEQ ID NO: 1978905 - RNA, 19 nt, Artificial Sequence
  Description of Artificial Sequence: Synthetic oligonucleotide
  Antisense strand to SEQ ID NO: 1978904
uuucgccaacacuagaaau

SEQ ID NO: 1978906 - RNA, 19 nt, Artificial Sequence
  Description of Artificial Sequence: Synthetic oligonucleotide
  Sense strand starting at position 641 of SEQ ID NO: 1880591
auuacauuguuagugguaa

SEQ ID NO: 1978907 - RNA, 19 nt, Artificial Sequence
  Description of Artificial Sequence: Synthetic oligonucleotide
  Antisense strand to SEQ ID NO: 1978906
uuaccacuaacaauguaau

SEQ ID NO: 1978908 - RNA, 19 nt, Artificial Sequence
  Description of Artificial Sequence: Synthetic oligonucleotide
  Sense strand starting at position 667 of SEQ ID NO: 1880591
uauucugaccauuguggaa

SEQ ID NO: 1978909 - RNA, 19 nt, Artificial Sequence
  Description of Artificial Sequence: Synthetic oligonucleotide
  Antisense strand to SEQ ID NO: 1978908
uuccacaauggucagaaua

SEQ ID NO: 1978910 - RNA, 19 nt, Artificial Sequence
  Description of Artificial Sequence: Synthetic oligonucleotide
  Sense strand starting at position 839 of SEQ ID NO: 1880591
agcguccaucuauagauaa

SEQ ID NO: 1978911 - RNA, 19 nt, Artificial Sequence
  Description of Artificial Sequence: Synthetic oligonucleotide
  Antisense strand to SEQ ID NO: 1978910
uuaucuauagauggacgcu

SEQ ID NO: 1978912 - RNA, 19 nt, Artificial Sequence
  Description of Artificial Sequence: Synthetic oligonucleotide
  Sense strand starting at position 864 of SEQ ID NO: 1880591
aaagacauggcauguauau

SEQ ID NO: 1978913 - RNA, 19 nt, Artificial Sequence
  Description of Artificial Sequence: Synthetic oligonucleotide
  Antisense strand to SEQ ID NO: 1978912
auauacaugccaugucuuu

SEQ ID NO: 1978914 - RNA, 19 nt, Artificial Sequence
  Description of Artificial Sequence: Synthetic oligonucleotide
  Sense strand starting at position 928 of SEQ ID NO: 1880591
uuugcaacaccaugaauga

SEQ ID NO: 1978915 - RNA, 19 nt, Artificial Sequence
  Description of Artificial Sequence: Synthetic oligonucleotide
  Antisense strand to SEQ ID NO: 1978914
ucauucaugguguugcaaa

SEQ ID NO: 1978916 - RNA, 19 nt, Artificial Sequence
  Description of Artificial Sequence: Synthetic oligonucleotide
  Sense strand starting at position 948 of SEQ ID NO: 1880591
uguggaagacauuaugcua

SEQ ID NO: 1978917 - RNA, 19 nt, Artificial Sequence
  Description of Artificial Sequence: Synthetic oligonucleotide
  Antisense strand to SEQ ID NO: 1978916
uagcauaaugucuuccaca

SEQ ID NO: 1978918 - RNA, 19 nt, Artificial Sequence
  Description of Artificial Sequence: Synthetic oligonucleotide
  Sense strand starting at position 1125 of SEQ ID NO: 1880591
ucauguaugcaaggugaau

SEQ ID NO: 1978919 - RNA, 19 nt, Artificial Sequence
  Description of Artificial Sequence: Synthetic oligonucleotide
  Antisense strand to SEQ ID NO: 1978918
auucaccuugcauacauga

SEQ ID NO: 1978920 - RNA, 19 nt, Artificial Sequence
  Description of Artificial Sequence: Synthetic oligonucleotide
  Sense strand starting at position 1127 of SEQ ID NO: 1880591
auguaugcaaggugaauau

SEQ ID NO: 1978921 - RNA, 19 nt, Artificial Sequence
  Description of Artificial Sequence: Synthetic oligonucleotide
  Antisense strand to SEQ ID NO: 1978920
auauucaccuugcauacau

SEQ ID NO: 1978922 - RNA, 19 nt, Artificial Sequence
  Description of Artificial Sequence: Synthetic oligonucleotide
  Sense strand starting at position 1136 of SEQ ID NO: 1880591
aggugaauauguucuggag

SEQ ID NO: 1978923 - RNA, 19 nt, Artificial Sequence
  Description of Artificial Sequence: Synthetic oligonucleotide
  Antisense strand to SEQ ID NO: 1978922
cuccagaacauauucaccu

SEQ ID NO: 1978924 - RNA, 19 nt, Artificial Sequence
  Description of Artificial Sequence: Synthetic oligonucleotide
  Sense strand starting at position 1268 of SEQ ID NO: 1880591
uaagguguuggauauacuu

SEQ ID NO: 1978925 - RNA, 19 nt, Artificial Sequence
  Description of Artificial Sequence: Synthetic oligonucleotide
  Antisense strand to SEQ ID NO: 1978924
aaguauauccaacaccuua

SEQ ID NO: 1978926 - RNA, 19 nt, Artificial Sequence
  Description of Artificial Sequence: Synthetic oligonucleotide
  Sense strand starting at position 1270 of SEQ ID NO: 1880591
agguguuggauauacuuau

SEQ ID NO: 1978927 - RNA, 19 nt, Artificial Sequence
  Description of Artificial Sequence: Synthetic oligonucleotide
  Antisense strand to SEQ ID NO: 1978926
auaaguauauccaacaccu

SEQ ID NO: 1978928 - RNA, 19 nt, Artificial Sequence
  Description of Artificial Sequence: Synthetic oligonucleotide
  Sense strand starting at position 1276 of SEQ ID NO: 1880591
uggauauacuuauuagguu

SEQ ID NO: 1978929 - RNA, 19 nt, Artificial Sequence
  Description of Artificial Sequence: Synthetic oligonucleotide
  Antisense strand to SEQ ID NO: 1978928
aaccuaauaaguauaucca

SEQ ID NO: 1978930 - RNA, 19 nt, Artificial Sequence
  Description of Artificial Sequence: Synthetic oligonucleotide
  Sense strand starting at position 1475 of SEQ ID NO: 1880591
ccugguaaacucugagagu

SEQ ID NO: 1978931 - RNA, 19 nt, Artificial Sequence
  Description of Artificial Sequence: Synthetic oligonucleotide
  Antisense strand to SEQ ID NO: 1978930
acucucagaguuuaccagg

SEQ ID NO: 1978932 - RNA, 19 nt, Artificial Sequence
  Description of Artificial Sequence: Synthetic oligonucleotide
  Sense strand starting at position 1546 of SEQ ID NO: 1880591
cagugauaaggucagagcu

SEQ ID NO: 1978933 - RNA, 19 nt, Artificial Sequence
  Description of Artificial Sequence: Synthetic oligonucleotide
  Antisense strand to SEQ ID NO: 1978932
agcucugaccuuaucacug

SEQ ID NO: 1978934 - RNA, 19 nt, Artificial Sequence
  Description of Artificial Sequence: Synthetic oligonucleotide
  Sense strand starting at position 1569 of SEQ ID NO: 1880591
acaggugccacgcagauau

SEQ ID NO: 1978935 - RNA, 19 nt, Artificial Sequence
  Description of Artificial Sequence: Synthetic oligonucleotide
  Antisense strand to SEQ ID NO: 1978934
auaucugcguggcaccugu

SEQ ID NO: 1978936 - RNA, 19 nt, Artificial Sequence
  Description of Artificial Sequence: Synthetic oligonucleotide
  Sense strand starting at position 1694 of SEQ ID NO: 1880591
cgggaaugguggaaguacu

SEQ ID NO: 1978937 - RNA, 19 nt, Artificial Sequence
  Description of Artificial Sequence: Synthetic oligonucleotide
  Antisense strand to SEQ ID NO: 1978936
aguacuuccaccauucccg

SEQ ID NO: 1978938 - RNA, 19 nt, Artificial Sequence
  Description of Artificial Sequence: Synthetic oligonucleotide
  Sense strand starting at position 1701 of SEQ ID NO: 1880591
gguggaaguacuuacauuc

SEQ ID NO: 1978939 - RNA, 19 nt, Artificial Sequence
  Description of Artificial Sequence: Synthetic oligonucleotide
  Antisense strand to SEQ ID NO: 1978938
gaauguaaguacuuccacc

SEQ ID NO: 1978940 - RNA, 19 nt, Artificial Sequence
  Description of Artificial Sequence: Synthetic oligonucleotide
  Sense strand starting at position 1824 of SEQ ID NO: 1880591
guaggaaaguuccucaaau

SEQ ID NO: 1978941 - RNA, 19 nt, Artificial Sequence
  Description of Artificial Sequence: Synthetic oligonucleotide
  Antisense strand to SEQ ID NO: 1978940
auuugaggaacuuuccuac

SEQ ID NO: 1978942 - RNA, 19 nt, Artificial Sequence
  Description of Artificial Sequence: Synthetic oligonucleotide
  Sense strand starting at position 2032 of SEQ ID NO: 1880591
uaguuugcacuugauguaa

SEQ ID NO: 1978943 - RNA, 19 nt, Artificial Sequence
  Description of Artificial Sequence: Synthetic oligonucleotide
  Antisense strand to SEQ ID NO: 1978942
uuacaucaagugcaaacua

SEQ ID NO: 1978944 - RNA, 19 nt, Artificial Sequence
  Description of Artificial Sequence: Synthetic oligonucleotide
  Sense strand starting at position 2043 of SEQ ID NO: 1880591
ugauguaacugggcucaga

SEQ ID NO: 1978945 - RNA, 19 nt, Artificial Sequence
  Description of Artificial Sequence: Synthetic oligonucleotide
  Antisense strand to SEQ ID NO: 1978944
ucugagcccaguuacauca

SEQ ID NO: 1978946 - RNA, 19 nt, Artificial Sequence
  Description of Artificial Sequence: Synthetic oligonucleotide
  Sense strand starting at position 2075 of SEQ ID NO: 1880591
cacgaagacugagugagau

SEQ ID NO: 1978947 - RNA, 19 nt, Artificial Sequence
  Description of Artificial Sequence: Synthetic oligonucleotide
  Antisense strand to SEQ ID NO: 1978946
aucucacucagucuucgug

SEQ ID NO: 1978948 - RNA, 19 nt, Artificial Sequence
  Description of Artificial Sequence: Synthetic oligonucleotide
  Sense strand starting at position 2530 of SEQ ID NO: 1880591
ccuauuauccaggguugga

SEQ ID NO: 1978949 - RNA, 19 nt, Artificial Sequence
  Description of Artificial Sequence: Synthetic oligonucleotide
  Antisense strand to SEQ ID NO: 1978948
uccaacccuggauaauagg

SEQ ID NO: 1978950 - RNA, 19 nt, Artificial Sequence
  Description of Artificial Sequence: Synthetic oligonucleotide
  Sense strand starting at position 2634 of SEQ ID NO: 1880591
ugcugaaacccugaugacu

SEQ ID NO: 1978951 - RNA, 19 nt, Artificial Sequence
  Description of Artificial Sequence: Synthetic oligonucleotide
  Antisense strand to SEQ ID NO: 1978950
agucaucaggguuucagca

SEQ ID NO: 1978952 - RNA, 19 nt, Artificial Sequence
  Description of Artificial Sequence: Synthetic oligonucleotide
  Sense strand starting at position 2794 of SEQ ID NO: 1880591
ugugcaucucuguagauga

SEQ ID NO: 1978953 - RNA, 19 nt, Artificial Sequence
  Description of Artificial Sequence: Synthetic oligonucleotide
  Antisense strand to SEQ ID NO: 1978952
ucaucuacagagaugcaca

SEQ ID NO: 1978954 - RNA, 19 nt, Artificial Sequence
  Description of Artificial Sequence: Synthetic oligonucleotide
  Sense strand starting at position 3055 of SEQ ID NO: 1880591
uugcaauucccaugaugag

SEQ ID NO: 1978955 - RNA, 19 nt, Artificial Sequence
  Description of Artificial Sequence: Synthetic oligonucleotide
  Antisense strand to SEQ ID NO: 1978954
cucaucaugggaauugcaa

SEQ ID NO: 1978956 - RNA, 19 nt, Artificial Sequence
  Description of Artificial Sequence: Synthetic oligonucleotide
  Sense strand starting at position 3083 of SEQ ID NO: 1880591
uaugaacaaugggaagaau

SEQ ID NO: 1978957 - RNA, 19 nt, Artificial Sequence
  Description of Artificial Sequence: Synthetic oligonucleotide
  Antisense strand to SEQ ID NO: 1978956
auucuucccauuguucaua

SEQ ID NO: 1978958 - RNA, 19 nt, Artificial Sequence
  Description of Artificial Sequence: Synthetic oligonucleotide
  Sense strand starting at position 3106 of SEQ ID NO: 1880591
caugcagacuguuuacaga

SEQ ID NO: 1978959 - RNA, 19 nt, Artificial Sequence
  Description of Artificial Sequence: Synthetic oligonucleotide
  Antisense strand to SEQ ID NO: 1978958
ucuguaaacagucugcaug

SEQ ID NO: 1978960 - RNA, 19 nt, Artificial Sequence
  Description of Artificial Sequence: Synthetic oligonucleotide
  Sense strand starting at position 3153 of SEQ ID NO: 1880591
guugcaguucccuaaccaa

SEQ ID NO: 1978961 - RNA, 19 nt, Artificial Sequence
  Description of Artificial Sequence: Synthetic oligonucleotide
  Antisense strand to SEQ ID NO: 1978960
uugguuagggaacugcaac

SEQ ID NO: 1978962 - RNA, 19 nt, Artificial Sequence
  Description of Artificial Sequence: Synthetic oligonucleotide
  Sense strand starting at position 3254 of SEQ ID NO: 1880591
cuuccuugccacugaauga

SEQ ID NO: 1978963 - RNA, 19 nt, Artificial Sequence
  Description of Artificial Sequence: Synthetic oligonucleotide
  Antisense strand to SEQ ID NO: 1978962
ucauucaguggcaaggaag

SEQ ID NO: 1978964 - RNA, 19 nt, Artificial Sequence
  Description of Artificial Sequence: Synthetic oligonucleotide
  Sense strand starting at position 3258 of SEQ ID NO: 1880591
cuugccacugaaugauaaa

SEQ ID NO: 1978965 - RNA, 19 nt, Artificial Sequence
  Description of Artificial Sequence: Synthetic oligonucleotide
  Antisense strand to SEQ ID NO: 1978964
uuuaucauucaguggcaag

SEQ ID NO: 1978966 - RNA, 19 nt, Artificial Sequence
  Description of Artificial Sequence: Synthetic oligonucleotide
  Sense strand starting at position 3357 of SEQ ID NO: 1880591
agcuauugauuaccuguga

SEQ ID NO: 1978967 - RNA, 19 nt, Artificial Sequence
  Description of Artificial Sequence: Synthetic oligonucleotide
  Antisense strand to SEQ ID NO: 1978966
ucacagguaaucaauagcu

SEQ ID NO: 1978968 - RNA, 19 nt, Artificial Sequence
  Description of Artificial Sequence: Synthetic oligonucleotide
  Sense strand starting at position 3358 of SEQ ID NO: 1880591
gcuauugauuaccugugaa

SEQ ID NO: 1978969 - RNA, 19 nt, Artificial Sequence
  Description of Artificial Sequence: Synthetic oligonucleotide
  Antisense strand to SEQ ID NO: 1978968
uucacagguaaucaauagc

SEQ ID NO: 1978970 - RNA, 19 nt, Artificial Sequence
  Description of Artificial Sequence: Synthetic oligonucleotide
  Sense strand starting at position 3523 of SEQ ID NO: 1880591
gucguuggauuucugauua

SEQ ID NO: 1978971 - RNA, 19 nt, Artificial Sequence
  Description of Artificial Sequence: Synthetic oligonucleotide
  Antisense strand to SEQ ID NO: 1978970
uaaucagaaauccaacgac

SEQ ID NO: 1978972 - RNA, 19 nt, Artificial Sequence
  Description of Artificial Sequence: Synthetic oligonucleotide
  Sense strand starting at position 3807 of SEQ ID NO: 1880591
ugcucaauugcuuaacaag

SEQ ID NO: 1978973 - RNA, 19 nt, Artificial Sequence
  Description of Artificial Sequence: Synthetic oligonucleotide
  Antisense strand to SEQ ID NO: 1978972
cuuguuaagcaauugagca

SEQ ID NO: 1978974 - RNA, 19 nt, Artificial Sequence
  Description of Artificial Sequence: Synthetic oligonucleotide
  Sense strand starting at position 3847 of SEQ ID NO: 1880591
acaacuagcucucugagaa

SEQ ID NO: 1978975 - RNA, 19 nt, Artificial Sequence
  Description of Artificial Sequence: Synthetic oligonucleotide
  Antisense strand to SEQ ID NO: 1978974
uucucagagagcuaguugu

SEQ ID NO: 1978976 - RNA, 19 nt, Artificial Sequence
  Description of Artificial Sequence: Synthetic oligonucleotide
  Sense strand starting at position 3892 of SEQ ID NO: 1880591
caauguauggucuaaaugu

SEQ ID NO: 1978977 - RNA, 19 nt, Artificial Sequence
  Description of Artificial Sequence: Synthetic oligonucleotide
  Antisense strand to SEQ ID NO: 1978976
acauuuagaccauacauug

SEQ ID NO: 1978978 - RNA, 19 nt, Artificial Sequence
  Description of Artificial Sequence: Synthetic oligonucleotide
  Sense strand starting at position 3908 of SEQ ID NO: 1880591
uguaaugugguuuaaauac

SEQ ID NO: 1978979 - RNA, 19 nt, Artificial Sequence
  Description of Artificial Sequence: Synthetic oligonucleotide
  Antisense strand to SEQ ID NO: 1978978
guauuuaaaccacauuaca

SEQ ID NO: 1978980 - RNA, 19 nt, Artificial Sequence
  Description of Artificial Sequence: Synthetic oligonucleotide
  Sense strand starting at position 438 of SEQ ID NO: 1880592
ucccauuguccaggccaga

SEQ ID NO: 1978981 - RNA, 19 nt, Artificial Sequence
  Description of Artificial Sequence: Synthetic oligonucleotide
  Antisense strand to SEQ ID NO: 1978980
ucuggccuggacaauggga

SEQ ID NO: 1978982 - RNA, 19 nt, Artificial Sequence
  Description of Artificial Sequence: Synthetic oligonucleotide
  Sense strand starting at position 697 of SEQ ID NO: 1880592
gugcucuggcaagaacaau

SEQ ID NO: 1978983 - RNA, 19 nt, Artificial Sequence
  Description of Artificial Sequence: Synthetic oligonucleotide
  Antisense strand to SEQ ID NO: 1978982
auuguucuugccagagcac

SEQ ID NO: 1978984 - RNA, 19 nt, Artificial Sequence
  Description of Artificial Sequence: Synthetic oligonucleotide
  Sense strand starting at position 726 of SEQ ID NO: 1880592
gcaugaggauguugaguau

SEQ ID NO: 1978985 - RNA, 19 nt, Artificial Sequence
  Description of Artificial Sequence: Synthetic oligonucleotide
  Antisense strand to SEQ ID NO: 1978984
auacucaacauccucaugc

SEQ ID NO: 1978986 - RNA, 19 nt, Artificial Sequence
  Description of Artificial Sequence: Synthetic oligonucleotide
  Sense strand starting at position 729 of SEQ ID NO: 1880592
ugaggauguugaguaucaa

SEQ ID NO: 1978987 - RNA, 19 nt, Artificial Sequence
  Description of Artificial Sequence: Synthetic oligonucleotide
  Antisense strand to SEQ ID NO: 1978986
uugauacucaacauccuca

SEQ ID NO: 1978988 - RNA, 19 nt, Artificial Sequence
  Description of Artificial Sequence: Synthetic oligonucleotide
  Sense strand starting at position 742 of SEQ ID NO: 1880592
uaucaaaugccgcaaaguu

SEQ ID NO: 1978989 - RNA, 19 nt, Artificial Sequence
  Description of Artificial Sequence: Synthetic oligonucleotide
  Antisense strand to SEQ ID NO: 1978988
aacuuugcggcauuugaua

SEQ ID NO: 1978990 - RNA, 19 nt, Artificial Sequence
  Description of Artificial Sequence: Synthetic oligonucleotide
  Sense strand starting at position 751 of SEQ ID NO: 1880592
ccgcaaaguucgggugaga

SEQ ID NO: 1978991 - RNA, 19 nt, Artificial Sequence
  Description of Artificial Sequence: Synthetic oligonucleotide
  Antisense strand to SEQ ID NO: 1978990
ucucacccgaacuuugcgg

SEQ ID NO: 1978992 - RNA, 19 nt, Artificial Sequence
  Description of Artificial Sequence: Synthetic oligonucleotide
  Sense strand starting at position 774 of SEQ ID NO: 1880592
ugaagagucuacucggcaa

SEQ ID NO: 1978993 - RNA, 19 nt, Artificial Sequence
  Description of Artificial Sequence: Synthetic oligonucleotide
  Antisense strand to SEQ ID NO: 1978992
uugccgaguagacucuuca

SEQ ID NO: 1978994 - RNA, 19 nt, Artificial Sequence
  Description of Artificial Sequence: Synthetic oligonucleotide
  Sense strand starting at position 777 of SEQ ID NO: 1880592
agagucuacucggcaauca

SEQ ID NO: 1978995 - RNA, 19 nt, Artificial Sequence
  Description of Artificial Sequence: Synthetic oligonucleotide
  Antisense strand to SEQ ID NO: 1978994
ugauugccgaguagacucu

SEQ ID NO: 1978996 - RNA, 19 nt, Artificial Sequence
  Description of Artificial Sequence: Synthetic oligonucleotide
  Sense strand starting at position 793 of SEQ ID NO: 1880592
ucaggaguucauuggagac

SEQ ID NO: 1978997 - RNA, 19 nt, Artificial Sequence
  Description of Artificial Sequence: Synthetic oligonucleotide
  Antisense strand to SEQ ID NO: 1978996
gucuccaaugaacuccuga

SEQ ID NO: 1978998 - RNA, 19 nt, Artificial Sequence
  Description of Artificial Sequence: Synthetic oligonucleotide
  Sense strand starting at position 803 of SEQ ID NO: 1880592
auuggagacucuggcagaa

SEQ ID NO: 1978999 - RNA, 19 nt, Artificial Sequence
  Description of Artificial Sequence: Synthetic oligonucleotide
  Antisense strand to SEQ ID NO: 1978998
uucugccagagucuccaau

SEQ ID NO: 1979000 - RNA, 19 nt, Artificial Sequence
  Description of Artificial Sequence: Synthetic oligonucleotide
  Sense strand starting at position 805 of SEQ ID NO: 1880592
uggagacucuggcagaagu

SEQ ID NO: 1979001 - RNA, 19 nt, Artificial Sequence
  Description of Artificial Sequence: Synthetic oligonucleotide
  Antisense strand to SEQ ID NO: 1979000
acuucugccagagucucca

SEQ ID NO: 1979002 - RNA, 19 nt, Artificial Sequence
  Description of Artificial Sequence: Synthetic oligonucleotide
  Sense strand starting at position 807 of SEQ ID NO: 1880592
gagacucuggcagaaguuu

SEQ ID NO: 1979003 - RNA, 19 nt, Artificial Sequence
  Description of Artificial Sequence: Synthetic oligonucleotide
  Antisense strand to SEQ ID NO: 1979002
aaacuucugccagagucuc

SEQ ID NO: 1979004 - RNA, 19 nt, Artificial Sequence
  Description of Artificial Sequence: Synthetic oligonucleotide
  Sense strand starting at position 832 of SEQ ID NO: 1880592
guagaauggcaggaaaugu

SEQ ID NO: 1979005 - RNA, 19 nt, Artificial Sequence
  Description of Artificial Sequence: Synthetic oligonucleotide
  Antisense strand to SEQ ID NO: 1979004
acauuuccugccauucuac

SEQ ID NO: 1979006 - RNA, 19 nt, Artificial Sequence
  Description of Artificial Sequence: Synthetic oligonucleotide
  Sense strand starting at position 841 of SEQ ID NO: 1880592
caggaaauguagccauacu

SEQ ID NO: 1979007 - RNA, 19 nt, Artificial Sequence
  Description of Artificial Sequence: Synthetic oligonucleotide
  Antisense strand to SEQ ID NO: 1979006
aguauggcuacauuuccug

SEQ ID NO: 1979008 - RNA, 19 nt, Artificial Sequence
  Description of Artificial Sequence: Synthetic oligonucleotide
  Sense strand starting at position 1055 of SEQ ID NO: 1880592
gaggaauggcaagguuuga

SEQ ID NO: 1979009 - RNA, 19 nt, Artificial Sequence
  Description of Artificial Sequence: Synthetic oligonucleotide
  Antisense strand to SEQ ID NO: 1979008
ucaaaccuugccauuccuc

SEQ ID NO: 1979010 - RNA, 19 nt, Artificial Sequence
  Description of Artificial Sequence: Synthetic oligonucleotide
  Sense strand starting at position 1063 of SEQ ID NO: 1880592
gcaagguuugagggauggu

SEQ ID NO: 1979011 - RNA, 19 nt, Artificial Sequence
  Description of Artificial Sequence: Synthetic oligonucleotide
  Antisense strand to SEQ ID NO: 1979010
accaucccucaaaccuugc

SEQ ID NO: 1979012 - RNA, 19 nt, Artificial Sequence
  Description of Artificial Sequence: Synthetic oligonucleotide
  Sense strand starting at position 1072 of SEQ ID NO: 1880592
gagggaugguuccugacgu

SEQ ID NO: 1979013 - RNA, 19 nt, Artificial Sequence
  Description of Artificial Sequence: Synthetic oligonucleotide
  Antisense strand to SEQ ID NO: 1979012
acgucaggaaccaucccuc

SEQ ID NO: 1979014 - RNA, 19 nt, Artificial Sequence
  Description of Artificial Sequence: Synthetic oligonucleotide
  Sense strand starting at position 1076 of SEQ ID NO: 1880592
gaugguuccugacgucuaa

SEQ ID NO: 1979015 - RNA, 19 nt, Artificial Sequence
  Description of Artificial Sequence: Synthetic oligonucleotide
  Antisense strand to SEQ ID NO: 1979014
uuagacgucaggaaccauc

SEQ ID NO: 1979016 - RNA, 19 nt, Artificial Sequence
  Description of Artificial Sequence: Synthetic oligonucleotide
  Sense strand starting at position 1088 of SEQ ID NO: 1880592
cgucuaagggcgcauuuaa

SEQ ID NO: 1979017 - RNA, 19 nt, Artificial Sequence
  Description of Artificial Sequence: Synthetic oligonucleotide
  Antisense strand to SEQ ID NO: 1979016
uuaaaugcgcccuuagacg

SEQ ID NO: 1979018 - RNA, 19 nt, Artificial Sequence
  Description of Artificial Sequence: Synthetic oligonucleotide
  Sense strand starting at position 1385 of SEQ ID NO: 1880592
ucuaguaagaccugggcuu

SEQ ID NO: 1979019 - RNA, 19 nt, Artificial Sequence
  Description of Artificial Sequence: Synthetic oligonucleotide
  Antisense strand to SEQ ID NO: 1979018
aagcccaggucuuacuaga

SEQ ID NO: 1979020 - RNA, 19 nt, Artificial Sequence
  Description of Artificial Sequence: Synthetic oligonucleotide
  Sense strand starting at position 1445 of SEQ ID NO: 1880592
gggcagugcgcguuggauu

SEQ ID NO: 1979021 - RNA, 19 nt, Artificial Sequence
  Description of Artificial Sequence: Synthetic oligonucleotide
  Antisense strand to SEQ ID NO: 1979020
aauccaacgcgcacugccc

SEQ ID NO: 1979022 - RNA, 19 nt, Artificial Sequence
  Description of Artificial Sequence: Synthetic oligonucleotide
  Sense strand starting at position 1446 of SEQ ID NO: 1880592
ggcagugcgcguuggauuu

SEQ ID NO: 1979023 - RNA, 19 nt, Artificial Sequence
  Description of Artificial Sequence: Synthetic oligonucleotide
  Antisense strand to SEQ ID NO: 1979022
aaauccaacgcgcacugcc

SEQ ID NO: 1979024 - RNA, 19 nt, Artificial Sequence
  Description of Artificial Sequence: Synthetic oligonucleotide
  Sense strand starting at position 1477 of SEQ ID NO: 1880592
gggucuugcugaucuuaaa

SEQ ID NO: 1979025 - RNA, 19 nt, Artificial Sequence
  Description of Artificial Sequence: Synthetic oligonucleotide
  Antisense strand to SEQ ID NO: 1979024
uuuaagaucagcaagaccc

SEQ ID NO: 1979026 - RNA, 19 nt, Artificial Sequence
  Description of Artificial Sequence: Synthetic oligonucleotide
  Sense strand starting at position 1664 of SEQ ID NO: 1880592
guugauuucggcugcacuu

SEQ ID NO: 1979027 - RNA, 19 nt, Artificial Sequence
  Description of Artificial Sequence: Synthetic oligonucleotide
  Antisense strand to SEQ ID NO: 1979026
aagugcagccgaaaucaac

SEQ ID NO: 1979028 - RNA, 19 nt, Artificial Sequence
  Description of Artificial Sequence: Synthetic oligonucleotide
  Sense strand starting at position 1794 of SEQ ID NO: 1880592
ucgcuuucucaagcguaaa

SEQ ID NO: 1979029 - RNA, 19 nt, Artificial Sequence
  Description of Artificial Sequence: Synthetic oligonucleotide
  Antisense strand to SEQ ID NO: 1979028
uuuacgcuugagaaagcga

SEQ ID NO: 1979030 - RNA, 19 nt, Artificial Sequence
  Description of Artificial Sequence: Synthetic oligonucleotide
  Sense strand starting at position 1795 of SEQ ID NO: 1880592
cgcuuucucaagcguaaau

SEQ ID NO: 1979031 - RNA, 19 nt, Artificial Sequence
  Description of Artificial Sequence: Synthetic oligonucleotide
  Antisense strand to SEQ ID NO: 1979030
auuuacgcuugagaaagcg

SEQ ID NO: 1979032 - RNA, 19 nt, Artificial Sequence
  Description of Artificial Sequence: Synthetic oligonucleotide
  Sense strand starting at position 1955 of SEQ ID NO: 1880592
uugggcaagugcuuuaaga

SEQ ID NO: 1979033 - RNA, 19 nt, Artificial Sequence
  Description of Artificial Sequence: Synthetic oligonucleotide
  Antisense strand to SEQ ID NO: 1979032
ucuuaaagcacuugcccaa

SEQ ID NO: 1979034 - RNA, 19 nt, Artificial Sequence
  Description of Artificial Sequence: Synthetic oligonucleotide
  Sense strand starting at position 1957 of SEQ ID NO: 1880592
gggcaagugcuuuaagaag

SEQ ID NO: 1979035 - RNA, 19 nt, Artificial Sequence
  Description of Artificial Sequence: Synthetic oligonucleotide
  Antisense strand to SEQ ID NO: 1979034
cuucuuaaagcacuugccc

SEQ ID NO: 1979036 - RNA, 19 nt, Artificial Sequence
  Description of Artificial Sequence: Synthetic oligonucleotide
  Sense strand starting at position 1979 of SEQ ID NO: 1880592
gaggaugucgagugucaaa

SEQ ID NO: 1979037 - RNA, 19 nt, Artificial Sequence
  Description of Artificial Sequence: Synthetic oligonucleotide
  Antisense strand to SEQ ID NO: 1979036
uuugacacucgacauccuc

SEQ ID NO: 1979038 - RNA, 19 nt, Artificial Sequence
  Description of Artificial Sequence: Synthetic oligonucleotide
  Sense strand starting at position 104 of SEQ ID NO: 1880593
agugaaugcuaucuccaau

SEQ ID NO: 1979039 - RNA, 19 nt, Artificial Sequence
  Description of Artificial Sequence: Synthetic oligonucleotide
  Antisense strand to SEQ ID NO: 1979038
auuggagauagcauucacu

SEQ ID NO: 1979040 - RNA, 19 nt, Artificial Sequence
  Description of Artificial Sequence: Synthetic oligonucleotide
  Sense strand starting at position 136 of SEQ ID NO: 1880593
ggaacauaaucuuuaccga

SEQ ID NO: 1979041 - RNA, 19 nt, Artificial Sequence
  Description of Artificial Sequence: Synthetic oligonucleotide
  Antisense strand to SEQ ID NO: 1979040
ucgguaaagauuauguucc

SEQ ID NO: 1979042 - RNA, 19 nt, Artificial Sequence
  Description of Artificial Sequence: Synthetic oligonucleotide
  Sense strand starting at position 139 of SEQ ID NO: 1880593
acauaaucuuuaccgagaa

SEQ ID NO: 1979043 - RNA, 19 nt, Artificial Sequence
  Description of Artificial Sequence: Synthetic oligonucleotide
  Antisense strand to SEQ ID NO: 1979042
uucucgguaaagauuaugu

SEQ ID NO: 1979044 - RNA, 19 nt, Artificial Sequence
  Description of Artificial Sequence: Synthetic oligonucleotide
  Sense strand starting at position 619 of SEQ ID NO: 1880593
gagacucugucugaaagga

SEQ ID NO: 1979045 - RNA, 19 nt, Artificial Sequence
  Description of Artificial Sequence: Synthetic oligonucleotide
  Antisense strand to SEQ ID NO: 1979044
uccuuucagacagagucuc

SEQ ID NO: 1979046 - RNA, 19 nt, Artificial Sequence
  Description of Artificial Sequence: Synthetic oligonucleotide
  Sense strand starting at position 768 of SEQ ID NO: 1880593
gcugguauaggagaugcua

SEQ ID NO: 1979047 - RNA, 19 nt, Artificial Sequence
  Description of Artificial Sequence: Synthetic oligonucleotide
  Antisense strand to SEQ ID NO: 1979046
uagcaucuccuauaccagc

SEQ ID NO: 1979048 - RNA, 19 nt, Artificial Sequence
  Description of Artificial Sequence: Synthetic oligonucleotide
  Sense strand starting at position 770 of SEQ ID NO: 1880593
ugguauaggagaugcuaua

SEQ ID NO: 1979049 - RNA, 19 nt, Artificial Sequence
  Description of Artificial Sequence: Synthetic oligonucleotide
  Antisense strand to SEQ ID NO: 1979048
uauagcaucuccuauacca

SEQ ID NO: 1979050 - RNA, 19 nt, Artificial Sequence
  Description of Artificial Sequence: Synthetic oligonucleotide
  Sense strand starting at position 1134 of SEQ ID NO: 1880593
agaaguuacgauugaguua

SEQ ID NO: 1979051 - RNA, 19 nt, Artificial Sequence
  Description of Artificial Sequence: Synthetic oligonucleotide
  Antisense strand to SEQ ID NO: 1979050
uaacucaaucguaacuucu

SEQ ID NO: 1979052 - RNA, 19 nt, Artificial Sequence
  Description of Artificial Sequence: Synthetic oligonucleotide
  Sense strand starting at position 1135 of SEQ ID NO: 1880593
gaaguuacgauugaguuac

SEQ ID NO: 1979053 - RNA, 19 nt, Artificial Sequence
  Description of Artificial Sequence: Synthetic oligonucleotide
  Antisense strand to SEQ ID NO: 1979052
guaacucaaucguaacuuc

SEQ ID NO: 1979054 - RNA, 19 nt, Artificial Sequence
  Description of Artificial Sequence: Synthetic oligonucleotide
  Sense strand starting at position 1167 of SEQ ID NO: 1880593
agcugaaauuaugacugaa

SEQ ID NO: 1979055 - RNA, 19 nt, Artificial Sequence
  Description of Artificial Sequence: Synthetic oligonucleotide
  Antisense strand to SEQ ID NO: 1979054
uucagucauaauuucagcu

SEQ ID NO: 1979056 - RNA, 19 nt, Artificial Sequence
  Description of Artificial Sequence: Synthetic oligonucleotide
  Sense strand starting at position 1185 of SEQ ID NO: 1880593
aaaugauauucugugguug

SEQ ID NO: 1979057 - RNA, 19 nt, Artificial Sequence
  Description of Artificial Sequence: Synthetic oligonucleotide
  Antisense strand to SEQ ID NO: 1979056
caaccacagaauaucauuu

SEQ ID NO: 1979058 - RNA, 19 nt, Artificial Sequence
  Description of Artificial Sequence: Synthetic oligonucleotide
  Sense strand starting at position 1186 of SEQ ID NO: 1880593
aaugauauucugugguugu

SEQ ID NO: 1979059 - RNA, 19 nt, Artificial Sequence
  Description of Artificial Sequence: Synthetic oligonucleotide
  Antisense strand to SEQ ID NO: 1979058
acaaccacagaauaucauu

SEQ ID NO: 1979060 - RNA, 19 nt, Artificial Sequence
  Description of Artificial Sequence: Synthetic oligonucleotide
  Sense strand starting at position 1189 of SEQ ID NO: 1880593
gauauucugugguugucua

SEQ ID NO: 1979061 - RNA, 19 nt, Artificial Sequence
  Description of Artificial Sequence: Synthetic oligonucleotide
  Antisense strand to SEQ ID NO: 1979060
uagacaaccacagaauauc

SEQ ID NO: 1979062 - RNA, 19 nt, Artificial Sequence
  Description of Artificial Sequence: Synthetic oligonucleotide
  Sense strand starting at position 1190 of SEQ ID NO: 1880593
auauucugugguugucuaa

SEQ ID NO: 1979063 - RNA, 19 nt, Artificial Sequence
  Description of Artificial Sequence: Synthetic oligonucleotide
  Antisense strand to SEQ ID NO: 1979062
uuagacaaccacagaauau

SEQ ID NO: 1979064 - RNA, 19 nt, Artificial Sequence
  Description of Artificial Sequence: Synthetic oligonucleotide
  Sense strand starting at position 1193 of SEQ ID NO: 1880593
uucugugguugucuaacau

SEQ ID NO: 1979065 - RNA, 19 nt, Artificial Sequence
  Description of Artificial Sequence: Synthetic oligonucleotide
  Antisense strand to SEQ ID NO: 1979064
auguuagacaaccacagaa

SEQ ID NO: 1979066 - RNA, 19 nt, Artificial Sequence
  Description of Artificial Sequence: Synthetic oligonucleotide
  Sense strand starting at position 1200 of SEQ ID NO: 1880593
guugucuaacaucagauaa

SEQ ID NO: 1979067 - RNA, 19 nt, Artificial Sequence
  Description of Artificial Sequence: Synthetic oligonucleotide
  Antisense strand to SEQ ID NO: 1979066
uuaucugauguuagacaac

SEQ ID NO: 1979068 - RNA, 19 nt, Artificial Sequence
  Description of Artificial Sequence: Synthetic oligonucleotide
  Sense strand starting at position 1202 of SEQ ID NO: 1880593
ugucuaacaucagauaaag

SEQ ID NO: 1979069 - RNA, 19 nt, Artificial Sequence
  Description of Artificial Sequence: Synthetic oligonucleotide
  Antisense strand to SEQ ID NO: 1979068
cuuuaucugauguuagaca

SEQ ID NO: 1979070 - RNA, 19 nt, Artificial Sequence
  Description of Artificial Sequence: Synthetic oligonucleotide
  Sense strand starting at position 1239 of SEQ ID NO: 1880593
ggacaauaaaggcguugau

SEQ ID NO: 1979071 - RNA, 19 nt, Artificial Sequence
  Description of Artificial Sequence: Synthetic oligonucleotide
  Antisense strand to SEQ ID NO: 1979070
aucaacgccuuuauugucc

SEQ ID NO: 1979072 - RNA, 19 nt, Artificial Sequence
  Description of Artificial Sequence: Synthetic oligonucleotide
  Sense strand starting at position 1242 of SEQ ID NO: 1880593
caauaaaggcguugaugga

SEQ ID NO: 1979073 - RNA, 19 nt, Artificial Sequence
  Description of Artificial Sequence: Synthetic oligonucleotide
  Antisense strand to SEQ ID NO: 1979072
uccaucaacgccuuuauug

SEQ ID NO: 1979074 - RNA, 19 nt, Artificial Sequence
  Description of Artificial Sequence: Synthetic oligonucleotide
  Sense strand starting at position 1252 of SEQ ID NO: 1880593
guugauggaucucuaggaa

SEQ ID NO: 1979075 - RNA, 19 nt, Artificial Sequence
  Description of Artificial Sequence: Synthetic oligonucleotide
  Antisense strand to SEQ ID NO: 1979074
uuccuagagauccaucaac

SEQ ID NO: 1979076 - RNA, 19 nt, Artificial Sequence
  Description of Artificial Sequence: Synthetic oligonucleotide
  Sense strand starting at position 1540 of SEQ ID NO: 1880593
auauuaaguuaucaggaga

SEQ ID NO: 1979077 - RNA, 19 nt, Artificial Sequence
  Description of Artificial Sequence: Synthetic oligonucleotide
  Antisense strand to SEQ ID NO: 1979076
ucuccugauaacuuaauau

SEQ ID NO: 1979078 - RNA, 19 nt, Artificial Sequence
  Description of Artificial Sequence: Synthetic oligonucleotide
  Sense strand starting at position 1568 of SEQ ID NO: 1880593
cucauuaagguaggaucau

SEQ ID NO: 1979079 - RNA, 19 nt, Artificial Sequence
  Description of Artificial Sequence: Synthetic oligonucleotide
  Antisense strand to SEQ ID NO: 1979078
augauccuaccuuaaugag

SEQ ID NO: 1979080 - RNA, 19 nt, Artificial Sequence
  Description of Artificial Sequence: Synthetic oligonucleotide
  Sense strand starting at position 1585 of SEQ ID NO: 1880593
augagcuacugugaaacaa

SEQ ID NO: 1979081 - RNA, 19 nt, Artificial Sequence
  Description of Artificial Sequence: Synthetic oligonucleotide
  Antisense strand to SEQ ID NO: 1979080
uuguuucacaguagcucau

SEQ ID NO: 1979082 - RNA, 19 nt, Artificial Sequence
  Description of Artificial Sequence: Synthetic oligonucleotide
  Sense strand starting at position 1975 of SEQ ID NO: 1880593
cagagaagguucuucuggu

SEQ ID NO: 1979083 - RNA, 19 nt, Artificial Sequence
  Description of Artificial Sequence: Synthetic oligonucleotide
  Antisense strand to SEQ ID NO: 1979082
accagaagaaccuucucug

SEQ ID NO: 1979084 - RNA, 19 nt, Artificial Sequence
  Description of Artificial Sequence: Synthetic oligonucleotide
  Sense strand starting at position 2106 of SEQ ID NO: 1880593
ggguguuauuuauugucuu

SEQ ID NO: 1979085 - RNA, 19 nt, Artificial Sequence
  Description of Artificial Sequence: Synthetic oligonucleotide
  Antisense strand to SEQ ID NO: 1979084
aagacaauaaauaacaccc

SEQ ID NO: 1979086 - RNA, 19 nt, Artificial Sequence
  Description of Artificial Sequence: Synthetic oligonucleotide
  Sense strand starting at position 2201 of SEQ ID NO: 1880593
uggagacuuuaggaagaca

SEQ ID NO: 1979087 - RNA, 19 nt, Artificial Sequence
  Description of Artificial Sequence: Synthetic oligonucleotide
  Antisense strand to SEQ ID NO: 1979086
ugucuuccuaaagucucca

SEQ ID NO: 1979088 - RNA, 19 nt, Artificial Sequence
  Description of Artificial Sequence: Synthetic oligonucleotide
  Sense strand starting at position 2347 of SEQ ID NO: 1880593
accuguuccucauucugau

SEQ ID NO: 1979089 - RNA, 19 nt, Artificial Sequence
  Description of Artificial Sequence: Synthetic oligonucleotide
  Antisense strand to SEQ ID NO: 1979088
aucagaaugaggaacaggu

SEQ ID NO: 1979090 - RNA, 19 nt, Artificial Sequence
  Description of Artificial Sequence: Synthetic oligonucleotide
  Sense strand starting at position 2370 of SEQ ID NO: 1880593
cugccucacgcuuauaaac

SEQ ID NO: 1979091 - RNA, 19 nt, Artificial Sequence
  Description of Artificial Sequence: Synthetic oligonucleotide
  Antisense strand to SEQ ID NO: 1979090
guuuauaagcgugaggcag

SEQ ID NO: 1979092 - RNA, 19 nt, Artificial Sequence
  Description of Artificial Sequence: Synthetic oligonucleotide
  Sense strand starting at position 2412 of SEQ ID NO: 1880593
accagaggauccuggauaa

SEQ ID NO: 1979093 - RNA, 19 nt, Artificial Sequence
  Description of Artificial Sequence: Synthetic oligonucleotide
  Antisense strand to SEQ ID NO: 1979092
uuauccaggauccucuggu

SEQ ID NO: 1979094 - RNA, 19 nt, Artificial Sequence
  Description of Artificial Sequence: Synthetic oligonucleotide
  Sense strand starting at position 2685 of SEQ ID NO: 1880593
cuuaguaagccuugaccau

SEQ ID NO: 1979095 - RNA, 19 nt, Artificial Sequence
  Description of Artificial Sequence: Synthetic oligonucleotide
  Antisense strand to SEQ ID NO: 1979094
auggucaaggcuuacuaag

SEQ ID NO: 1979096 - RNA, 19 nt, Artificial Sequence
  Description of Artificial Sequence: Synthetic oligonucleotide
  Sense strand starting at position 2738 of SEQ ID NO: 1880593
uucugaugcaggcguuuau

SEQ ID NO: 1979097 - RNA, 19 nt, Artificial Sequence
  Description of Artificial Sequence: Synthetic oligonucleotide
  Antisense strand to SEQ ID NO: 1979096
auaaacgccugcaucagaa

SEQ ID NO: 1979098 - RNA, 19 nt, Artificial Sequence
  Description of Artificial Sequence: Synthetic oligonucleotide
  Sense strand starting at position 2747 of SEQ ID NO: 1880593
aggcguuuauagcuacaaa

SEQ ID NO: 1979099 - RNA, 19 nt, Artificial Sequence
  Description of Artificial Sequence: Synthetic oligonucleotide
  Antisense strand to SEQ ID NO: 1979098
uuuguagcuauaaacgccu

SEQ ID NO: 1979100 - RNA, 19 nt, Artificial Sequence
  Description of Artificial Sequence: Synthetic oligonucleotide
  Sense strand starting at position 2748 of SEQ ID NO: 1880593
ggcguuuauagcuacaaac

SEQ ID NO: 1979101 - RNA, 19 nt, Artificial Sequence
  Description of Artificial Sequence: Synthetic oligonucleotide
  Antisense strand to SEQ ID NO: 1979100
guuuguagcuauaaacgcc

SEQ ID NO: 1979102 - RNA, 19 nt, Artificial Sequence
  Description of Artificial Sequence: Synthetic oligonucleotide
  Sense strand starting at position 2750 of SEQ ID NO: 1880593
cguuuauagcuacaaacuu

SEQ ID NO: 1979103 - RNA, 19 nt, Artificial Sequence
  Description of Artificial Sequence: Synthetic oligonucleotide
  Antisense strand to SEQ ID NO: 1979102
aaguuuguagcuauaaacg

SEQ ID NO: 1979104 - RNA, 19 nt, Artificial Sequence
  Description of Artificial Sequence: Synthetic oligonucleotide
  Sense strand starting at position 2776 of SEQ ID NO: 1880593
aguauuguguuugcuguau

SEQ ID NO: 1979105 - RNA, 19 nt, Artificial Sequence
  Description of Artificial Sequence: Synthetic oligonucleotide
  Antisense strand to SEQ ID NO: 1979104
auacagcaaacacaauacu

SEQ ID NO: 1979106 - RNA, 19 nt, Artificial Sequence
  Description of Artificial Sequence: Synthetic oligonucleotide
  Sense strand starting at position 2782 of SEQ ID NO: 1880593
guguuugcuguaucccuua

SEQ ID NO: 1979107 - RNA, 19 nt, Artificial Sequence
  Description of Artificial Sequence: Synthetic oligonucleotide
  Antisense strand to SEQ ID NO: 1979106
uaagggauacagcaaacac

SEQ ID NO: 1979108 - RNA, 19 nt, Artificial Sequence
  Description of Artificial Sequence: Synthetic oligonucleotide
  Sense strand starting at position 2880 of SEQ ID NO: 1880593
cuggucacucaguagcaua

SEQ ID NO: 1979109 - RNA, 19 nt, Artificial Sequence
  Description of Artificial Sequence: Synthetic oligonucleotide
  Antisense strand to SEQ ID NO: 1979108
uaugcuacugagugaccag

SEQ ID NO: 1979110 - RNA, 19 nt, Artificial Sequence
  Description of Artificial Sequence: Synthetic oligonucleotide
  Sense strand starting at position 2938 of SEQ ID NO: 1880593
cuaucauuauugguuucua

SEQ ID NO: 1979111 - RNA, 19 nt, Artificial Sequence
  Description of Artificial Sequence: Synthetic oligonucleotide
  Antisense strand to SEQ ID NO: 1979110
uagaaaccaauaaugauag

SEQ ID NO: 1979112 - RNA, 19 nt, Artificial Sequence
  Description of Artificial Sequence: Synthetic oligonucleotide
  Sense strand starting at position 3030 of SEQ ID NO: 1880593
gauagagucuugcuagguc

SEQ ID NO: 1979113 - RNA, 19 nt, Artificial Sequence
  Description of Artificial Sequence: Synthetic oligonucleotide
  Antisense strand to SEQ ID NO: 1979112
gaccuagcaagacucuauc

SEQ ID NO: 1979114 - RNA, 19 nt, Artificial Sequence
  Description of Artificial Sequence: Synthetic oligonucleotide
  Sense strand starting at position 3531 of SEQ ID NO: 1880593
cuggaauacugauaucuuu

SEQ ID NO: 1979115 - RNA, 19 nt, Artificial Sequence
  Description of Artificial Sequence: Synthetic oligonucleotide
  Antisense strand to SEQ ID NO: 1979114
aaagauaucaguauuccag

SEQ ID NO: 1979116 - RNA, 19 nt, Artificial Sequence
  Description of Artificial Sequence: Synthetic oligonucleotide
  Sense strand starting at position 3558 of SEQ ID NO: 1880593
uugagagguucccuguuau

SEQ ID NO: 1979117 - RNA, 19 nt, Artificial Sequence
  Description of Artificial Sequence: Synthetic oligonucleotide
  Antisense strand to SEQ ID NO: 1979116
auaacagggaaccucucaa

SEQ ID NO: 1979118 - RNA, 19 nt, Artificial Sequence
  Description of Artificial Sequence: Synthetic oligonucleotide
  Sense strand starting at position 711 of SEQ ID NO: 1880594
ccugaaggaucugcugagu

SEQ ID NO: 1979119 - RNA, 19 nt, Artificial Sequence
  Description of Artificial Sequence: Synthetic oligonucleotide
  Antisense strand to SEQ ID NO: 1979118
acucagcagauccuucagg

SEQ ID NO: 1979120 - RNA, 19 nt, Artificial Sequence
  Description of Artificial Sequence: Synthetic oligonucleotide
  Sense strand starting at position 720 of SEQ ID NO: 1880594
ucugcugagucuguuuaca

SEQ ID NO: 1979121 - RNA, 19 nt, Artificial Sequence
  Description of Artificial Sequence: Synthetic oligonucleotide
  Antisense strand to SEQ ID NO: 1979120
uguaaacagacucagcaga

SEQ ID NO: 1979122 - RNA, 19 nt, Artificial Sequence
  Description of Artificial Sequence: Synthetic oligonucleotide
  Sense strand starting at position 722 of SEQ ID NO: 1880594
ugcugagucuguuuacagu

SEQ ID NO: 1979123 - RNA, 19 nt, Artificial Sequence
  Description of Artificial Sequence: Synthetic oligonucleotide
  Antisense strand to SEQ ID NO: 1979122
acuguaaacagacucagca

SEQ ID NO: 1979124 - RNA, 19 nt, Artificial Sequence
  Description of Artificial Sequence: Synthetic oligonucleotide
  Sense strand starting at position 857 of SEQ ID NO: 1880594
cacauaauuguaugggcua

SEQ ID NO: 1979125 - RNA, 19 nt, Artificial Sequence
  Description of Artificial Sequence: Synthetic oligonucleotide
  Antisense strand to SEQ ID NO: 1979124
uagcccauacaauuaugug

SEQ ID NO: 1979126 - RNA, 19 nt, Artificial Sequence
  Description of Artificial Sequence: Synthetic oligonucleotide
  Sense strand starting at position 932 of SEQ ID NO: 1880594
acaugagugauguguugca

SEQ ID NO: 1979127 - RNA, 19 nt, Artificial Sequence
  Description of Artificial Sequence: Synthetic oligonucleotide
  Antisense strand to SEQ ID NO: 1979126
ugcaacacaucacucaugu

SEQ ID NO: 1979128 - RNA, 19 nt, Artificial Sequence
  Description of Artificial Sequence: Synthetic oligonucleotide
  Sense strand starting at position 1037 of SEQ ID NO: 1880594
cagucauuguugccugaaa

SEQ ID NO: 1979129 - RNA, 19 nt, Artificial Sequence
  Description of Artificial Sequence: Synthetic oligonucleotide
  Antisense strand to SEQ ID NO: 1979128
uuucaggcaacaaugacug

SEQ ID NO: 1979130 - RNA, 19 nt, Artificial Sequence
  Description of Artificial Sequence: Synthetic oligonucleotide
  Sense strand starting at position 1038 of SEQ ID NO: 1880594
agucauuguugccugaaac

SEQ ID NO: 1979131 - RNA, 19 nt, Artificial Sequence
  Description of Artificial Sequence: Synthetic oligonucleotide
  Antisense strand to SEQ ID NO: 1979130
guuucaggcaacaaugacu

SEQ ID NO: 1979132 - RNA, 19 nt, Artificial Sequence
  Description of Artificial Sequence: Synthetic oligonucleotide
  Sense strand starting at position 1039 of SEQ ID NO: 1880594
gucauuguugccugaaacg

SEQ ID NO: 1979133 - RNA, 19 nt, Artificial Sequence
  Description of Artificial Sequence: Synthetic oligonucleotide
  Antisense strand to SEQ ID NO: 1979132
cguuucaggcaacaaugac

SEQ ID NO: 1979134 - RNA, 19 nt, Artificial Sequence
  Description of Artificial Sequence: Synthetic oligonucleotide
  Sense strand starting at position 1046 of SEQ ID NO: 1880594
uugccugaaacgucguuau

SEQ ID NO: 1979135 - RNA, 19 nt, Artificial Sequence
  Description of Artificial Sequence: Synthetic oligonucleotide
  Antisense strand to SEQ ID NO: 1979134
auaacgacguuucaggcaa

SEQ ID NO: 1979136 - RNA, 19 nt, Artificial Sequence
  Description of Artificial Sequence: Synthetic oligonucleotide
  Sense strand starting at position 1048 of SEQ ID NO: 1880594
gccugaaacgucguuaugu

SEQ ID NO: 1979137 - RNA, 19 nt, Artificial Sequence
  Description of Artificial Sequence: Synthetic oligonucleotide
  Antisense strand to SEQ ID NO: 1979136
acauaacgacguuucaggc

SEQ ID NO: 1979138 - RNA, 19 nt, Artificial Sequence
  Description of Artificial Sequence: Synthetic oligonucleotide
  Sense strand starting at position 1049 of SEQ ID NO: 1880594
ccugaaacgucguuaugug

SEQ ID NO: 1979139 - RNA, 19 nt, Artificial Sequence
  Description of Artificial Sequence: Synthetic oligonucleotide
  Antisense strand to SEQ ID NO: 1979138
cacauaacgacguuucagg

SEQ ID NO: 1979140 - RNA, 19 nt, Artificial Sequence
  Description of Artificial Sequence: Synthetic oligonucleotide
  Sense strand starting at position 1067 of SEQ ID NO: 1880594
ggugcauggcugcauaaua

SEQ ID NO: 1979141 - RNA, 19 nt, Artificial Sequence
  Description of Artificial Sequence: Synthetic oligonucleotide
  Antisense strand to SEQ ID NO: 1979140
uauuaugcagccaugcacc

SEQ ID NO: 1979142 - RNA, 19 nt, Artificial Sequence
  Description of Artificial Sequence: Synthetic oligonucleotide
  Sense strand starting at position 1139 of SEQ ID NO: 1880594
acaggaacgugauucagau

SEQ ID NO: 1979143 - RNA, 19 nt, Artificial Sequence
  Description of Artificial Sequence: Synthetic oligonucleotide
  Antisense strand to SEQ ID NO: 1979142
aucugaaucacguuccugu

SEQ ID NO: 1979144 - RNA, 19 nt, Artificial Sequence
  Description of Artificial Sequence: Synthetic oligonucleotide
  Sense strand starting at position 1215 of SEQ ID NO: 1880594
ugaagugaugaccgaguuu

SEQ ID NO: 1979145 - RNA, 19 nt, Artificial Sequence
  Description of Artificial Sequence: Synthetic oligonucleotide
  Antisense strand to SEQ ID NO: 1979144
aaacucggucaucacuuca

SEQ ID NO: 1979146 - RNA, 19 nt, Artificial Sequence
  Description of Artificial Sequence: Synthetic oligonucleotide
  Sense strand starting at position 1224 of SEQ ID NO: 1880594
gaccgaguuuaccuagaaa

SEQ ID NO: 1979147 - RNA, 19 nt, Artificial Sequence
  Description of Artificial Sequence: Synthetic oligonucleotide
  Antisense strand to SEQ ID NO: 1979146
uuucuagguaaacucgguc

SEQ ID NO: 1979148 - RNA, 19 nt, Artificial Sequence
  Description of Artificial Sequence: Synthetic oligonucleotide
  Sense strand starting at position 1358 of SEQ ID NO: 1880594
ugaguuuguggcuaugaaa

SEQ ID NO: 1979149 - RNA, 19 nt, Artificial Sequence
  Description of Artificial Sequence: Synthetic oligonucleotide
  Antisense strand to SEQ ID NO: 1979148
uuucauagccacaaacuca

SEQ ID NO: 1979150 - RNA, 19 nt, Artificial Sequence
  Description of Artificial Sequence: Synthetic oligonucleotide
  Sense strand starting at position 2125 of SEQ ID NO: 1880594
ucagaaugacuugguccaa

SEQ ID NO: 1979151 - RNA, 19 nt, Artificial Sequence
  Description of Artificial Sequence: Synthetic oligonucleotide
  Antisense strand to SEQ ID NO: 1979150
uuggaccaagucauucuga

SEQ ID NO: 1979152 - RNA, 19 nt, Artificial Sequence
  Description of Artificial Sequence: Synthetic oligonucleotide
  Sense strand starting at position 2126 of SEQ ID NO: 1880594
cagaaugacuugguccaaa

SEQ ID NO: 1979153 - RNA, 19 nt, Artificial Sequence
  Description of Artificial Sequence: Synthetic oligonucleotide
  Antisense strand to SEQ ID NO: 1979152
uuuggaccaagucauucug

SEQ ID NO: 1979154 - RNA, 19 nt, Artificial Sequence
  Description of Artificial Sequence: Synthetic oligonucleotide
  Sense strand starting at position 2328 of SEQ ID NO: 1880594
gggcacgucccauggaaau

SEQ ID NO: 1979155 - RNA, 19 nt, Artificial Sequence
  Description of Artificial Sequence: Synthetic oligonucleotide
  Antisense strand to SEQ ID NO: 1979154
auuuccaugggacgugccc

SEQ ID NO: 1979156 - RNA, 19 nt, Artificial Sequence
  Description of Artificial Sequence: Synthetic oligonucleotide
  Sense strand starting at position 2421 of SEQ ID NO: 1880594
ggaccaguccaucaucauu

SEQ ID NO: 1979157 - RNA, 19 nt, Artificial Sequence
  Description of Artificial Sequence: Synthetic oligonucleotide
  Antisense strand to SEQ ID NO: 1979156
aaugaugauggacuggucc

SEQ ID NO: 1979158 - RNA, 19 nt, Artificial Sequence
  Description of Artificial Sequence: Synthetic oligonucleotide
  Sense strand starting at position 2459 of SEQ ID NO: 1880594
cucugaggucccugauaag

SEQ ID NO: 1979159 - RNA, 19 nt, Artificial Sequence
  Description of Artificial Sequence: Synthetic oligonucleotide
  Antisense strand to SEQ ID NO: 1979158
cuuaucagggaccucagag

SEQ ID NO: 1979160 - RNA, 19 nt, Artificial Sequence
  Description of Artificial Sequence: Synthetic oligonucleotide
  Sense strand starting at position 2797 of SEQ ID NO: 1880594
acaugcucaugcuuaugaa

SEQ ID NO: 1979161 - RNA, 19 nt, Artificial Sequence
  Description of Artificial Sequence: Synthetic oligonucleotide
  Antisense strand to SEQ ID NO: 1979160
uucauaagcaugagcaugu

SEQ ID NO: 1979162 - RNA, 19 nt, Artificial Sequence
  Description of Artificial Sequence: Synthetic oligonucleotide
  Sense strand starting at position 2928 of SEQ ID NO: 1880594
cagccauagcgcuaucacu

SEQ ID NO: 1979163 - RNA, 19 nt, Artificial Sequence
  Description of Artificial Sequence: Synthetic oligonucleotide
  Antisense strand to SEQ ID NO: 1979162
agugauagcgcuauggcug

SEQ ID NO: 1979164 - RNA, 19 nt, Artificial Sequence
  Description of Artificial Sequence: Synthetic oligonucleotide
  Sense strand starting at position 3011 of SEQ ID NO: 1880594
aauuauagauuucggagaa

SEQ ID NO: 1979165 - RNA, 19 nt, Artificial Sequence
  Description of Artificial Sequence: Synthetic oligonucleotide
  Antisense strand to SEQ ID NO: 1979164
uucuccgaaaucuauaauu

SEQ ID NO: 1979166 - RNA, 19 nt, Artificial Sequence
  Description of Artificial Sequence: Synthetic oligonucleotide
  Sense strand starting at position 3012 of SEQ ID NO: 1880594
auuauagauuucggagaac

SEQ ID NO: 1979167 - RNA, 19 nt, Artificial Sequence
  Description of Artificial Sequence: Synthetic oligonucleotide
  Antisense strand to SEQ ID NO: 1979166
guucuccgaaaucuauaau

SEQ ID NO: 1979168 - RNA, 19 nt, Artificial Sequence
  Description of Artificial Sequence: Synthetic oligonucleotide
  Sense strand starting at position 3023 of SEQ ID NO: 1880594
cggagaacuuuacacauca

SEQ ID NO: 1979169 - RNA, 19 nt, Artificial Sequence
  Description of Artificial Sequence: Synthetic oligonucleotide
  Antisense strand to SEQ ID NO: 1979168
ugauguguaaaguucuccg

SEQ ID NO: 1979170 - RNA, 19 nt, Artificial Sequence
  Description of Artificial Sequence: Synthetic oligonucleotide
  Sense strand starting at position 3128 of SEQ ID NO: 1880594
gucuuuaguuucuugcuau

SEQ ID NO: 1979171 - RNA, 19 nt, Artificial Sequence
  Description of Artificial Sequence: Synthetic oligonucleotide
  Antisense strand to SEQ ID NO: 1979170
auagcaagaaacuaaagac

SEQ ID NO: 1979172 - RNA, 19 nt, Artificial Sequence
  Description of Artificial Sequence: Synthetic oligonucleotide
  Sense strand starting at position 3178 of SEQ ID NO: 1880594
uugcauauccuauggagua

SEQ ID NO: 1979173 - RNA, 19 nt, Artificial Sequence
  Description of Artificial Sequence: Synthetic oligonucleotide
  Antisense strand to SEQ ID NO: 1979172
uacuccauaggauaugcaa

SEQ ID NO: 1979174 - RNA, 19 nt, Artificial Sequence
  Description of Artificial Sequence: Synthetic oligonucleotide
  Sense strand starting at position 3194 of SEQ ID NO: 1880594
guacauccauaggauacau

SEQ ID NO: 1979175 - RNA, 19 nt, Artificial Sequence
  Description of Artificial Sequence: Synthetic oligonucleotide
  Antisense strand to SEQ ID NO: 1979174
auguauccuauggauguac

SEQ ID NO: 1979176 - RNA, 19 nt, Artificial Sequence
  Description of Artificial Sequence: Synthetic oligonucleotide
  Sense strand starting at position 3205 of SEQ ID NO: 1880594
ggauacauucugggccaaa

SEQ ID NO: 1979177 - RNA, 19 nt, Artificial Sequence
  Description of Artificial Sequence: Synthetic oligonucleotide
  Antisense strand to SEQ ID NO: 1979176
uuuggcccagaauguaucc

SEQ ID NO: 1979178 - RNA, 19 nt, Artificial Sequence
  Description of Artificial Sequence: Synthetic oligonucleotide
  Sense strand starting at position 3364 of SEQ ID NO: 1880594
augacuaaaucaguuagca

SEQ ID NO: 1979179 - RNA, 19 nt, Artificial Sequence
  Description of Artificial Sequence: Synthetic oligonucleotide
  Antisense strand to SEQ ID NO: 1979178
ugcuaacugauuuagucau

SEQ ID NO: 1979180 - RNA, 19 nt, Artificial Sequence
  Description of Artificial Sequence: Synthetic oligonucleotide
  Sense strand starting at position 3377 of SEQ ID NO: 1880594
uuagcaauauucgccacau

SEQ ID NO: 1979181 - RNA, 19 nt, Artificial Sequence
  Description of Artificial Sequence: Synthetic oligonucleotide
  Antisense strand to SEQ ID NO: 1979180
auguggcgaauauugcuaa

SEQ ID NO: 1979182 - RNA, 19 nt, Artificial Sequence
  Description of Artificial Sequence: Synthetic oligonucleotide
  Sense strand starting at position 3379 of SEQ ID NO: 1880594
agcaauauucgccacauua

SEQ ID NO: 1979183 - RNA, 19 nt, Artificial Sequence
  Description of Artificial Sequence: Synthetic oligonucleotide
  Antisense strand to SEQ ID NO: 1979182
uaauguggcgaauauugcu

SEQ ID NO: 1979184 - RNA, 19 nt, Artificial Sequence
  Description of Artificial Sequence: Synthetic oligonucleotide
  Sense strand starting at position 3404 of SEQ ID NO: 1880594
augcaaacauaugaauaga

SEQ ID NO: 1979185 - RNA, 19 nt, Artificial Sequence
  Description of Artificial Sequence: Synthetic oligonucleotide
  Antisense strand to SEQ ID NO: 1979184
ucuauucauauguuugcau

SEQ ID NO: 1979186 - RNA, 19 nt, Artificial Sequence
  Description of Artificial Sequence: Synthetic oligonucleotide
  Sense strand starting at position 3586 of SEQ ID NO: 1880594
aaacaagauuuguggcuau

SEQ ID NO: 1979187 - RNA, 19 nt, Artificial Sequence
  Description of Artificial Sequence: Synthetic oligonucleotide
  Antisense strand to SEQ ID NO: 1979186
auagccacaaaucuuguuu

SEQ ID NO: 1979188 - RNA, 19 nt, Artificial Sequence
  Description of Artificial Sequence: Synthetic oligonucleotide
  Sense strand starting at position 3620 of SEQ ID NO: 1880594
gcuccuacccaguaagaua

SEQ ID NO: 1979189 - RNA, 19 nt, Artificial Sequence
  Description of Artificial Sequence: Synthetic oligonucleotide
  Antisense strand to SEQ ID NO: 1979188
uaucuuacuggguaggagc

SEQ ID NO: 1979190 - RNA, 19 nt, Artificial Sequence
  Description of Artificial Sequence: Synthetic oligonucleotide
  Sense strand starting at position 3707 of SEQ ID NO: 1880594
accagaauugcuugucuac

SEQ ID NO: 1979191 - RNA, 19 nt, Artificial Sequence
  Description of Artificial Sequence: Synthetic oligonucleotide
  Antisense strand to SEQ ID NO: 1979190
guagacaagcaauucuggu

SEQ ID NO: 1979192 - RNA, 19 nt, Artificial Sequence
  Description of Artificial Sequence: Synthetic oligonucleotide
  Sense strand starting at position 3710 of SEQ ID NO: 1880594
agaauugcuugucuacaaa

SEQ ID NO: 1979193 - RNA, 19 nt, Artificial Sequence
  Description of Artificial Sequence: Synthetic oligonucleotide
  Antisense strand to SEQ ID NO: 1979192
uuuguagacaagcaauucu

SEQ ID NO: 1979194 - RNA, 19 nt, Artificial Sequence
  Description of Artificial Sequence: Synthetic oligonucleotide
  Sense strand starting at position 3713 of SEQ ID NO: 1880594
auugcuugucuacaaagca

SEQ ID NO: 1979195 - RNA, 19 nt, Artificial Sequence
  Description of Artificial Sequence: Synthetic oligonucleotide
  Antisense strand to SEQ ID NO: 1979194
ugcuuuguagacaagcaau

SEQ ID NO: 1979196 - RNA, 19 nt, Artificial Sequence
  Description of Artificial Sequence: Synthetic oligonucleotide
  Sense strand starting at position 3745 of SEQ ID NO: 1880594
uguagcucccgcuuguaau

SEQ ID NO: 1979197 - RNA, 19 nt, Artificial Sequence
  Description of Artificial Sequence: Synthetic oligonucleotide
  Antisense strand to SEQ ID NO: 1979196
auuacaagcgggagcuaca

SEQ ID NO: 1979198 - RNA, 19 nt, Artificial Sequence
  Description of Artificial Sequence: Synthetic oligonucleotide
  Sense strand starting at position 190 of SEQ ID NO: 1880595
agaaaccaugugugacuuu

SEQ ID NO: 1979199 - RNA, 19 nt, Artificial Sequence
  Description of Artificial Sequence: Synthetic oligonucleotide
  Antisense strand to SEQ ID NO: 1979198
aaagucacacaugguuucu

SEQ ID NO: 1979200 - RNA, 19 nt, Artificial Sequence
  Description of Artificial Sequence: Synthetic oligonucleotide
  Sense strand starting at position 230 of SEQ ID NO: 1880595
uuaugaagaucugccgagu

SEQ ID NO: 1979201 - RNA, 19 nt, Artificial Sequence
  Description of Artificial Sequence: Synthetic oligonucleotide
  Antisense strand to SEQ ID NO: 1979200
acucggcagaucuucauaa

SEQ ID NO: 1979202 - RNA, 19 nt, Artificial Sequence
  Description of Artificial Sequence: Synthetic oligonucleotide
  Sense strand starting at position 506 of SEQ ID NO: 1880595
aagugaugcucugucugaa

SEQ ID NO: 1979203 - RNA, 19 nt, Artificial Sequence
  Description of Artificial Sequence: Synthetic oligonucleotide
  Antisense strand to SEQ ID NO: 1979202
uucagacagagcaucacuu

SEQ ID NO: 1979204 - RNA, 19 nt, Artificial Sequence
  Description of Artificial Sequence: Synthetic oligonucleotide
  Sense strand starting at position 2073 of SEQ ID NO: 1880595
guacauauccgugagguuu

SEQ ID NO: 1979205 - RNA, 19 nt, Artificial Sequence
  Description of Artificial Sequence: Synthetic oligonucleotide
  Antisense strand to SEQ ID NO: 1979204
aaaccucacggauauguac

SEQ ID NO: 1979206 - RNA, 19 nt, Artificial Sequence
  Description of Artificial Sequence: Synthetic oligonucleotide
  Sense strand starting at position 2085 of SEQ ID NO: 1880595
gagguuuauagugaugucu

SEQ ID NO: 1979207 - RNA, 19 nt, Artificial Sequence
  Description of Artificial Sequence: Synthetic oligonucleotide
  Antisense strand to SEQ ID NO: 1979206
agacaucacuauaaaccuc

SEQ ID NO: 1979208 - RNA, 19 nt, Artificial Sequence
  Description of Artificial Sequence: Synthetic oligonucleotide
  Sense strand starting at position 2116 of SEQ ID NO: 1880595
uguacagugaucugaugag

SEQ ID NO: 1979209 - RNA, 19 nt, Artificial Sequence
  Description of Artificial Sequence: Synthetic oligonucleotide
  Antisense strand to SEQ ID NO: 1979208
cucaucagaucacuguaca

SEQ ID NO: 1979210 - RNA, 19 nt, Artificial Sequence
  Description of Artificial Sequence: Synthetic oligonucleotide
  Sense strand starting at position 2337 of SEQ ID NO: 1880595
aguaauacugaauguacau

SEQ ID NO: 1979211 - RNA, 19 nt, Artificial Sequence
  Description of Artificial Sequence: Synthetic oligonucleotide
  Antisense strand to SEQ ID NO: 1979210
auguacauucaguauuacu

SEQ ID NO: 1979212 - RNA, 19 nt, Artificial Sequence
  Description of Artificial Sequence: Synthetic oligonucleotide
  Sense strand starting at position 2347 of SEQ ID NO: 1880595
aauguacaugucggaauau

SEQ ID NO: 1979213 - RNA, 19 nt, Artificial Sequence
  Description of Artificial Sequence: Synthetic oligonucleotide
  Antisense strand to SEQ ID NO: 1979212
auauuccgacauguacauu

SEQ ID NO: 1979214 - RNA, 19 nt, Artificial Sequence
  Description of Artificial Sequence: Synthetic oligonucleotide
  Sense strand starting at position 2386 of SEQ ID NO: 1880595
uugcuucuccuguagcaga

SEQ ID NO: 1979215 - RNA, 19 nt, Artificial Sequence
  Description of Artificial Sequence: Synthetic oligonucleotide
  Antisense strand to SEQ ID NO: 1979214
ucugcuacaggagaagcaa

SEQ ID NO: 1979216 - RNA, 19 nt, Artificial Sequence
  Description of Artificial Sequence: Synthetic oligonucleotide
  Sense strand starting at position 2699 of SEQ ID NO: 1880595
auaaauggcucugcaacuu

SEQ ID NO: 1979217 - RNA, 19 nt, Artificial Sequence
  Description of Artificial Sequence: Synthetic oligonucleotide
  Antisense strand to SEQ ID NO: 1979216
aaguugcagagccauuuau

SEQ ID NO: 1979218 - RNA, 19 nt, Artificial Sequence
  Description of Artificial Sequence: Synthetic oligonucleotide
  Sense strand starting at position 2816 of SEQ ID NO: 1880595
uauguuauacuaggcauga

SEQ ID NO: 1979219 - RNA, 19 nt, Artificial Sequence
  Description of Artificial Sequence: Synthetic oligonucleotide
  Antisense strand to SEQ ID NO: 1979218
ucaugccuaguauaacaua

SEQ ID NO: 1979220 - RNA, 19 nt, Artificial Sequence
  Description of Artificial Sequence: Synthetic oligonucleotide
  Sense strand starting at position 2820 of SEQ ID NO: 1880595
uuauacuaggcaugaggaa

SEQ ID NO: 1979221 - RNA, 19 nt, Artificial Sequence
  Description of Artificial Sequence: Synthetic oligonucleotide
  Antisense strand to SEQ ID NO: 1979220
uuccucaugccuaguauaa

SEQ ID NO: 1979222 - RNA, 19 nt, Artificial Sequence
  Description of Artificial Sequence: Synthetic oligonucleotide
  Sense strand starting at position 2952 of SEQ ID NO: 1880595
acaggauacuauguaguca

SEQ ID NO: 1979223 - RNA, 19 nt, Artificial Sequence
  Description of Artificial Sequence: Synthetic oligonucleotide
  Antisense strand to SEQ ID NO: 1979222
ugacuacauaguauccugu

SEQ ID NO: 1979224 - RNA, 19 nt, Artificial Sequence
  Description of Artificial Sequence: Synthetic oligonucleotide
  Sense strand starting at position 2957 of SEQ ID NO: 1880595
auacuauguagucagaggu

SEQ ID NO: 1979225 - RNA, 19 nt, Artificial Sequence
  Description of Artificial Sequence: Synthetic oligonucleotide
  Antisense strand to SEQ ID NO: 1979224
accucugacuacauaguau

SEQ ID NO: 1979226 - RNA, 19 nt, Artificial Sequence
  Description of Artificial Sequence: Synthetic oligonucleotide
  Sense strand starting at position 2961 of SEQ ID NO: 1880595
uauguagucagaggugaaa

SEQ ID NO: 1979227 - RNA, 19 nt, Artificial Sequence
  Description of Artificial Sequence: Synthetic oligonucleotide
  Antisense strand to SEQ ID NO: 1979226
uuucaccucugacuacaua

SEQ ID NO: 1979228 - RNA, 19 nt, Artificial Sequence
  Description of Artificial Sequence: Synthetic oligonucleotide
  Sense strand starting at position 2963 of SEQ ID NO: 1880595
uguagucagaggugaaaua

SEQ ID NO: 1979229 - RNA, 19 nt, Artificial Sequence
  Description of Artificial Sequence: Synthetic oligonucleotide
  Antisense strand to SEQ ID NO: 1979228
uauuucaccucugacuaca

SEQ ID NO: 1979230 - RNA, 19 nt, Artificial Sequence
  Description of Artificial Sequence: Synthetic oligonucleotide
  Sense strand starting at position 3183 of SEQ ID NO: 1880595
gcccuacuucuugagucaa

SEQ ID NO: 1979231 - RNA, 19 nt, Artificial Sequence
  Description of Artificial Sequence: Synthetic oligonucleotide
  Antisense strand to SEQ ID NO: 1979230
uugacucaagaaguagggc

SEQ ID NO: 1979232 - RNA, 19 nt, Artificial Sequence
  Description of Artificial Sequence: Synthetic oligonucleotide
  Sense strand starting at position 3185 of SEQ ID NO: 1880595
ccuacuucuugagucaaga

SEQ ID NO: 1979233 - RNA, 19 nt, Artificial Sequence
  Description of Artificial Sequence: Synthetic oligonucleotide
  Antisense strand to SEQ ID NO: 1979232
ucuugacucaagaaguagg

SEQ ID NO: 1979234 - RNA, 19 nt, Artificial Sequence
  Description of Artificial Sequence: Synthetic oligonucleotide
  Sense strand starting at position 3198 of SEQ ID NO: 1880595
ucaagauaaugucuaggcu

SEQ ID NO: 1979235 - RNA, 19 nt, Artificial Sequence
  Description of Artificial Sequence: Synthetic oligonucleotide
  Antisense strand to SEQ ID NO: 1979234
agccuagacauuaucuuga

SEQ ID NO: 1979236 - RNA, 19 nt, Artificial Sequence
  Description of Artificial Sequence: Synthetic oligonucleotide
  Sense strand starting at position 3199 of SEQ ID NO: 1880595
caagauaaugucuaggcua

SEQ ID NO: 1979237 - RNA, 19 nt, Artificial Sequence
  Description of Artificial Sequence: Synthetic oligonucleotide
  Antisense strand to SEQ ID NO: 1979236
uagccuagacauuaucuug

SEQ ID NO: 1979238 - RNA, 19 nt, Artificial Sequence
  Description of Artificial Sequence: Synthetic oligonucleotide
  Sense strand starting at position 3201 of SEQ ID NO: 1880595
agauaaugucuaggcuaga

SEQ ID NO: 1979239 - RNA, 19 nt, Artificial Sequence
  Description of Artificial Sequence: Synthetic oligonucleotide
  Antisense strand to SEQ ID NO: 1979238
ucuagccuagacauuaucu

SEQ ID NO: 1979240 - RNA, 19 nt, Artificial Sequence
  Description of Artificial Sequence: Synthetic oligonucleotide
  Sense strand starting at position 3202 of SEQ ID NO: 1880595
gauaaugucuaggcuagau

SEQ ID NO: 1979241 - RNA, 19 nt, Artificial Sequence
  Description of Artificial Sequence: Synthetic oligonucleotide
  Antisense strand to SEQ ID NO: 1979240
aucuagccuagacauuauc

SEQ ID NO: 1979242 - RNA, 19 nt, Artificial Sequence
  Description of Artificial Sequence: Synthetic oligonucleotide
  Sense strand starting at position 3206 of SEQ ID NO: 1880595
augucuaggcuagaucuaa

SEQ ID NO: 1979243 - RNA, 19 nt, Artificial Sequence
  Description of Artificial Sequence: Synthetic oligonucleotide
  Antisense strand to SEQ ID NO: 1979242
uuagaucuagccuagacau

SEQ ID NO: 1979244 - RNA, 19 nt, Artificial Sequence
  Description of Artificial Sequence: Synthetic oligonucleotide
  Sense strand starting at position 3261 of SEQ ID NO: 1880595
agggcauccucagcaauua

SEQ ID NO: 1979245 - RNA, 19 nt, Artificial Sequence
  Description of Artificial Sequence: Synthetic oligonucleotide
  Antisense strand to SEQ ID NO: 1979244
uaauugcugaggaugcccu

SEQ ID NO: 1979246 - RNA, 19 nt, Artificial Sequence
  Description of Artificial Sequence: Synthetic oligonucleotide
  Sense strand starting at position 3284 of SEQ ID NO: 1880595
auaugugaagucugggacu

SEQ ID NO: 1979247 - RNA, 19 nt, Artificial Sequence
  Description of Artificial Sequence: Synthetic oligonucleotide
  Antisense strand to SEQ ID NO: 1979246
agucccagacuucacauau

SEQ ID NO: 1979248 - RNA, 19 nt, Artificial Sequence
  Description of Artificial Sequence: Synthetic oligonucleotide
  Sense strand starting at position 3286 of SEQ ID NO: 1880595
augugaagucugggacuug

SEQ ID NO: 1979249 - RNA, 19 nt, Artificial Sequence
  Description of Artificial Sequence: Synthetic oligonucleotide
  Antisense strand to SEQ ID NO: 1979248
caagucccagacuucacau

SEQ ID NO: 1979250 - RNA, 19 nt, Artificial Sequence
  Description of Artificial Sequence: Synthetic oligonucleotide
  Sense strand starting at position 3397 of SEQ ID NO: 1880595
ucagcaucuugggucaagu

SEQ ID NO: 1979251 - RNA, 19 nt, Artificial Sequence
  Description of Artificial Sequence: Synthetic oligonucleotide
  Antisense strand to SEQ ID NO: 1979250
acuugacccaagaugcuga

SEQ ID NO: 1979252 - RNA, 19 nt, Artificial Sequence
  Description of Artificial Sequence: Synthetic oligonucleotide
  Sense strand starting at position 3440 of SEQ ID NO: 1880595
gcagguucuugagcaagga

SEQ ID NO: 1979253 - RNA, 19 nt, Artificial Sequence
  Description of Artificial Sequence: Synthetic oligonucleotide
  Antisense strand to SEQ ID NO: 1979252
uccuugcucaagaaccugc

SEQ ID NO: 1979254 - RNA, 19 nt, Artificial Sequence
  Description of Artificial Sequence: Synthetic oligonucleotide
  Sense strand starting at position 3591 of SEQ ID NO: 1880595
aggcauuacugcucagagu

SEQ ID NO: 1979255 - RNA, 19 nt, Artificial Sequence
  Description of Artificial Sequence: Synthetic oligonucleotide
  Antisense strand to SEQ ID NO: 1979254
acucugagcaguaaugccu

SEQ ID NO: 1979256 - RNA, 19 nt, Artificial Sequence
  Description of Artificial Sequence: Synthetic oligonucleotide
  Sense strand starting at position 3592 of SEQ ID NO: 1880595
ggcauuacugcucagaguu

SEQ ID NO: 1979257 - RNA, 19 nt, Artificial Sequence
  Description of Artificial Sequence: Synthetic oligonucleotide
  Antisense strand to SEQ ID NO: 1979256
aacucugagcaguaaugcc

SEQ ID NO: 1979258 - RNA, 19 nt, Artificial Sequence
  Description of Artificial Sequence: Synthetic oligonucleotide
  Sense strand starting at position 3657 of SEQ ID NO: 1880595
agcuauuaauuggcuaaga

SEQ ID NO: 1979259 - RNA, 19 nt, Artificial Sequence
  Description of Artificial Sequence: Synthetic oligonucleotide
  Antisense strand to SEQ ID NO: 1979258
ucuuagccaauuaauagcu

SEQ ID NO: 1979260 - RNA, 19 nt, Artificial Sequence
  Description of Artificial Sequence: Synthetic oligonucleotide
  Sense strand starting at position 3658 of SEQ ID NO: 1880595
gcuauuaauuggcuaagac

SEQ ID NO: 1979261 - RNA, 19 nt, Artificial Sequence
  Description of Artificial Sequence: Synthetic oligonucleotide
  Antisense strand to SEQ ID NO: 1979260
gucuuagccaauuaauagc

SEQ ID NO: 1979262 - RNA, 19 nt, Artificial Sequence
  Description of Artificial Sequence: Synthetic oligonucleotide
  Sense strand starting at position 3762 of SEQ ID NO: 1880595
aaagaaagccugugaugca

SEQ ID NO: 1979263 - RNA, 19 nt, Artificial Sequence
  Description of Artificial Sequence: Synthetic oligonucleotide
  Antisense strand to SEQ ID NO: 1979262
ugcaucacaggcuuucuuu

SEQ ID NO: 1979264 - RNA, 19 nt, Artificial Sequence
  Description of Artificial Sequence: Synthetic oligonucleotide
  Sense strand starting at position 3832 of SEQ ID NO: 1880595
auuagaaggucugagggaa

SEQ ID NO: 1979265 - RNA, 19 nt, Artificial Sequence
  Description of Artificial Sequence: Synthetic oligonucleotide
  Antisense strand to SEQ ID NO: 1979264
uucccucagaccuucuaau

SEQ ID NO: 1979266 - RNA, 19 nt, Artificial Sequence
  Description of Artificial Sequence: Synthetic oligonucleotide
  Sense strand starting at position 3852 of SEQ ID NO: 1880595
cugugaaaguacucacaug

SEQ ID NO: 1979267 - RNA, 19 nt, Artificial Sequence
  Description of Artificial Sequence: Synthetic oligonucleotide
  Antisense strand to SEQ ID NO: 1979266
caugugaguacuuucacag

SEQ ID NO: 1979268 - RNA, 19 nt, Artificial Sequence
  Description of Artificial Sequence: Synthetic oligonucleotide
  Sense strand starting at position 3860 of SEQ ID NO: 1880595
guacucacaugggucauua

SEQ ID NO: 1979269 - RNA, 19 nt, Artificial Sequence
  Description of Artificial Sequence: Synthetic oligonucleotide
  Antisense strand to SEQ ID NO: 1979268
uaaugacccaugugaguac

SEQ ID NO: 1979270 - RNA, 19 nt, Artificial Sequence
  Description of Artificial Sequence: Synthetic oligonucleotide
  Sense strand starting at position 3871 of SEQ ID NO: 1880595
ggucauuacagguggacau

SEQ ID NO: 1979271 - RNA, 19 nt, Artificial Sequence
  Description of Artificial Sequence: Synthetic oligonucleotide
  Antisense strand to SEQ ID NO: 1979270
auguccaccuguaaugacc

SEQ ID NO: 1979272 - RNA, 19 nt, Artificial Sequence
  Description of Artificial Sequence: Synthetic oligonucleotide
  Sense strand starting at position 3872 of SEQ ID NO: 1880595
gucauuacagguggacaua

SEQ ID NO: 1979273 - RNA, 19 nt, Artificial Sequence
  Description of Artificial Sequence: Synthetic oligonucleotide
  Antisense strand to SEQ ID NO: 1979272
uauguccaccuguaaugac

SEQ ID NO: 1979274 - RNA, 19 nt, Artificial Sequence
  Description of Artificial Sequence: Synthetic oligonucleotide
  Sense strand starting at position 3903 of SEQ ID NO: 1880595
cuaaguagguuucugucau

SEQ ID NO: 1979275 - RNA, 19 nt, Artificial Sequence
  Description of Artificial Sequence: Synthetic oligonucleotide
  Antisense strand to SEQ ID NO: 1979274
augacagaaaccuacuuag

SEQ ID NO: 1979276 - RNA, 19 nt, Artificial Sequence
  Description of Artificial Sequence: Synthetic oligonucleotide
  Sense strand starting at position 3913 of SEQ ID NO: 1880595
uucugucauggcuaauaaa

SEQ ID NO: 1979277 - RNA, 19 nt, Artificial Sequence
  Description of Artificial Sequence: Synthetic oligonucleotide
  Antisense strand to SEQ ID NO: 1979276
uuuauuagccaugacagaa

SEQ ID NO: 1979278 - RNA, 19 nt, Artificial Sequence
  Description of Artificial Sequence: Synthetic oligonucleotide
  Sense strand starting at position 189 of SEQ ID NO: 1880596
ugggauugcagaggaaguu

SEQ ID NO: 1979279 - RNA, 19 nt, Artificial Sequence
  Description of Artificial Sequence: Synthetic oligonucleotide
  Antisense strand to SEQ ID NO: 1979278
aacuuccucugcaauccca

SEQ ID NO: 1979280 - RNA, 19 nt, Artificial Sequence
  Description of Artificial Sequence: Synthetic oligonucleotide
  Sense strand starting at position 874 of SEQ ID NO: 1880596
cagcucagagcucauggau

SEQ ID NO: 1979281 - RNA, 19 nt, Artificial Sequence
  Description of Artificial Sequence: Synthetic oligonucleotide
  Antisense strand to SEQ ID NO: 1979280
auccaugagcucugagcug

SEQ ID NO: 1979282 - RNA, 19 nt, Artificial Sequence
  Description of Artificial Sequence: Synthetic oligonucleotide
  Sense strand starting at position 1073 of SEQ ID NO: 1880596
cguccuguuuguugugaua

SEQ ID NO: 1979283 - RNA, 19 nt, Artificial Sequence
  Description of Artificial Sequence: Synthetic oligonucleotide
  Antisense strand to SEQ ID NO: 1979282
uaucacaacaaacaggacg

SEQ ID NO: 1979284 - RNA, 19 nt, Artificial Sequence
  Description of Artificial Sequence: Synthetic oligonucleotide
  Sense strand starting at position 1075 of SEQ ID NO: 1880596
uccuguuuguugugauaaa

SEQ ID NO: 1979285 - RNA, 19 nt, Artificial Sequence
  Description of Artificial Sequence: Synthetic oligonucleotide
  Antisense strand to SEQ ID NO: 1979284
uuuaucacaacaaacagga

SEQ ID NO: 1979286 - RNA, 19 nt, Artificial Sequence
  Description of Artificial Sequence: Synthetic oligonucleotide
  Sense strand starting at position 1076 of SEQ ID NO: 1880596
ccuguuuguugugauaaac

SEQ ID NO: 1979287 - RNA, 19 nt, Artificial Sequence
  Description of Artificial Sequence: Synthetic oligonucleotide
  Antisense strand to SEQ ID NO: 1979286
guuuaucacaacaaacagg

SEQ ID NO: 1979288 - RNA, 19 nt, Artificial Sequence
  Description of Artificial Sequence: Synthetic oligonucleotide
  Sense strand starting at position 1152 of SEQ ID NO: 1880596
uuccuuauaccaggcugaa

SEQ ID NO: 1979289 - RNA, 19 nt, Artificial Sequence
  Description of Artificial Sequence: Synthetic oligonucleotide
  Antisense strand to SEQ ID NO: 1979288
uucagccugguauaaggaa

SEQ ID NO: 1979290 - RNA, 19 nt, Artificial Sequence
  Description of Artificial Sequence: Synthetic oligonucleotide
  Sense strand starting at position 1635 of SEQ ID NO: 1880596
gcuugaaaccuggacccuu

SEQ ID NO: 1979291 - RNA, 19 nt, Artificial Sequence
  Description of Artificial Sequence: Synthetic oligonucleotide
  Antisense strand to SEQ ID NO: 1979290
aaggguccagguuucaagc

SEQ ID NO: 1979292 - RNA, 19 nt, Artificial Sequence
  Description of Artificial Sequence: Synthetic oligonucleotide
  Sense strand starting at position 1703 of SEQ ID NO: 1880596
cgcagcuucccagugugau

SEQ ID NO: 1979293 - RNA, 19 nt, Artificial Sequence
  Description of Artificial Sequence: Synthetic oligonucleotide
  Antisense strand to SEQ ID NO: 1979292
aucacacugggaagcugcg

SEQ ID NO: 1979294 - RNA, 19 nt, Artificial Sequence
  Description of Artificial Sequence: Synthetic oligonucleotide
  Sense strand starting at position 1704 of SEQ ID NO: 1880596
gcagcuucccagugugauc

SEQ ID NO: 1979295 - RNA, 19 nt, Artificial Sequence
  Description of Artificial Sequence: Synthetic oligonucleotide
  Antisense strand to SEQ ID NO: 1979294
gaucacacugggaagcugc

SEQ ID NO: 1979296 - RNA, 19 nt, Artificial Sequence
  Description of Artificial Sequence: Synthetic oligonucleotide
  Sense strand starting at position 1709 of SEQ ID NO: 1880596
uucccagugugaucaccuu

SEQ ID NO: 1979297 - RNA, 19 nt, Artificial Sequence
  Description of Artificial Sequence: Synthetic oligonucleotide
  Antisense strand to SEQ ID NO: 1979296
aaggugaucacacugggaa

SEQ ID NO: 1979298 - RNA, 19 nt, Artificial Sequence
  Description of Artificial Sequence: Synthetic oligonucleotide
  Sense strand starting at position 2444 of SEQ ID NO: 1880596
gccucacacucacgaguuu

SEQ ID NO: 1979299 - RNA, 19 nt, Artificial Sequence
  Description of Artificial Sequence: Synthetic oligonucleotide
  Antisense strand to SEQ ID NO: 1979298
aaacucgugagugugaggc

SEQ ID NO: 1979300 - RNA, 19 nt, Artificial Sequence
  Description of Artificial Sequence: Synthetic oligonucleotide
  Sense strand starting at position 2453 of SEQ ID NO: 1880596
ucacgaguuucucugcuua

SEQ ID NO: 1979301 - RNA, 19 nt, Artificial Sequence
  Description of Artificial Sequence: Synthetic oligonucleotide
  Antisense strand to SEQ ID NO: 1979300
uaagcagagaaacucguga

SEQ ID NO: 1979302 - RNA, 19 nt, Artificial Sequence
  Description of Artificial Sequence: Synthetic oligonucleotide
  Sense strand starting at position 2455 of SEQ ID NO: 1880596
acgaguuucucugcuuauu

SEQ ID NO: 1979303 - RNA, 19 nt, Artificial Sequence
  Description of Artificial Sequence: Synthetic oligonucleotide
  Antisense strand to SEQ ID NO: 1979302
aauaagcagagaaacucgu

SEQ ID NO: 1979304 - RNA, 19 nt, Artificial Sequence
  Description of Artificial Sequence: Synthetic oligonucleotide
  Sense strand starting at position 3204 of SEQ ID NO: 1880596
ggcucuuuauagggucaca

SEQ ID NO: 1979305 - RNA, 19 nt, Artificial Sequence
  Description of Artificial Sequence: Synthetic oligonucleotide
  Antisense strand to SEQ ID NO: 1979304
ugugacccuauaaagagcc

SEQ ID NO: 1979306 - RNA, 19 nt, Artificial Sequence
  Description of Artificial Sequence: Synthetic oligonucleotide
  Sense strand starting at position 3362 of SEQ ID NO: 1880596
ggagccugggccuggaaau

SEQ ID NO: 1979307 - RNA, 19 nt, Artificial Sequence
  Description of Artificial Sequence: Synthetic oligonucleotide
  Antisense strand to SEQ ID NO: 1979306
auuuccaggcccaggcucc

SEQ ID NO: 1979308 - RNA, 19 nt, Artificial Sequence
  Description of Artificial Sequence: Synthetic oligonucleotide
  Sense strand starting at position 3498 of SEQ ID NO: 1880596
cugagauccucuugucagg

SEQ ID NO: 1979309 - RNA, 19 nt, Artificial Sequence
  Description of Artificial Sequence: Synthetic oligonucleotide
  Antisense strand to SEQ ID NO: 1979308
ccugacaagaggaucucag

SEQ ID NO: 1979310 - RNA, 19 nt, Artificial Sequence
  Description of Artificial Sequence: Synthetic oligonucleotide
  Sense strand starting at position 3702 of SEQ ID NO: 1880596
cuccaagugucccuccaau

SEQ ID NO: 1979311 - RNA, 19 nt, Artificial Sequence
  Description of Artificial Sequence: Synthetic oligonucleotide
  Antisense strand to SEQ ID NO: 1979310
auuggagggacacuuggag

SEQ ID NO: 1979312 - RNA, 19 nt, Artificial Sequence
  Description of Artificial Sequence: Synthetic oligonucleotide
  Sense strand starting at position 118 of SEQ ID NO: 1880597
acuaguuauccuuagcugu

SEQ ID NO: 1979313 - RNA, 19 nt, Artificial Sequence
  Description of Artificial Sequence: Synthetic oligonucleotide
  Antisense strand to SEQ ID NO: 1979312
acagcuaaggauaacuagu

SEQ ID NO: 1979314 - RNA, 19 nt, Artificial Sequence
  Description of Artificial Sequence: Synthetic oligonucleotide
  Sense strand starting at position 121 of SEQ ID NO: 1880597
aguuauccuuagcuguuau

SEQ ID NO: 1979315 - RNA, 19 nt, Artificial Sequence
  Description of Artificial Sequence: Synthetic oligonucleotide
  Antisense strand to SEQ ID NO: 1979314
auaacagcuaaggauaacu

SEQ ID NO: 1979316 - RNA, 19 nt, Artificial Sequence
  Description of Artificial Sequence: Synthetic oligonucleotide
  Sense strand starting at position 236 of SEQ ID NO: 1880597
ugaagacucuguuuccuua

SEQ ID NO: 1979317 - RNA, 19 nt, Artificial Sequence
  Description of Artificial Sequence: Synthetic oligonucleotide
  Antisense strand to SEQ ID NO: 1979316
uaaggaaacagagucuuca

SEQ ID NO: 1979318 - RNA, 19 nt, Artificial Sequence
  Description of Artificial Sequence: Synthetic oligonucleotide
  Sense strand starting at position 360 of SEQ ID NO: 1880597
gcaauuguauugccuuaac

SEQ ID NO: 1979319 - RNA, 19 nt, Artificial Sequence
  Description of Artificial Sequence: Synthetic oligonucleotide
  Antisense strand to SEQ ID NO: 1979318
guuaaggcaauacaauugc

SEQ ID NO: 1979320 - RNA, 19 nt, Artificial Sequence
  Description of Artificial Sequence: Synthetic oligonucleotide
  Sense strand starting at position 363 of SEQ ID NO: 1880597
auuguauugccuuaacaag

SEQ ID NO: 1979321 - RNA, 19 nt, Artificial Sequence
  Description of Artificial Sequence: Synthetic oligonucleotide
  Antisense strand to SEQ ID NO: 1979320
cuuguuaaggcaauacaau

SEQ ID NO: 1979322 - RNA, 19 nt, Artificial Sequence
  Description of Artificial Sequence: Synthetic oligonucleotide
  Sense strand starting at position 568 of SEQ ID NO: 1880597
guacauguacucguguguu

SEQ ID NO: 1979323 - RNA, 19 nt, Artificial Sequence
  Description of Artificial Sequence: Synthetic oligonucleotide
  Antisense strand to SEQ ID NO: 1979322
aacacacgaguacauguac

SEQ ID NO: 1979324 - RNA, 19 nt, Artificial Sequence
  Description of Artificial Sequence: Synthetic oligonucleotide
  Sense strand starting at position 571 of SEQ ID NO: 1880597
cauguacucguguguuaca

SEQ ID NO: 1979325 - RNA, 19 nt, Artificial Sequence
  Description of Artificial Sequence: Synthetic oligonucleotide
  Antisense strand to SEQ ID NO: 1979324
uguaacacacgaguacaug

SEQ ID NO: 1979326 - RNA, 19 nt, Artificial Sequence
  Description of Artificial Sequence: Synthetic oligonucleotide
  Sense strand starting at position 572 of SEQ ID NO: 1880597
auguacucguguguuacau

SEQ ID NO: 1979327 - RNA, 19 nt, Artificial Sequence
  Description of Artificial Sequence: Synthetic oligonucleotide
  Antisense strand to SEQ ID NO: 1979326
auguaacacacgaguacau

SEQ ID NO: 1979328 - RNA, 19 nt, Artificial Sequence
  Description of Artificial Sequence: Synthetic oligonucleotide
  Sense strand starting at position 578 of SEQ ID NO: 1880597
ucguguguuacauggguau

SEQ ID NO: 1979329 - RNA, 19 nt, Artificial Sequence
  Description of Artificial Sequence: Synthetic oligonucleotide
  Antisense strand to SEQ ID NO: 1979328
auacccauguaacacacga

SEQ ID NO: 1979330 - RNA, 19 nt, Artificial Sequence
  Description of Artificial Sequence: Synthetic oligonucleotide
  Sense strand starting at position 580 of SEQ ID NO: 1880597
guguguuacauggguauua

SEQ ID NO: 1979331 - RNA, 19 nt, Artificial Sequence
  Description of Artificial Sequence: Synthetic oligonucleotide
  Antisense strand to SEQ ID NO: 1979330
uaauacccauguaacacac

SEQ ID NO: 1979332 - RNA, 19 nt, Artificial Sequence
  Description of Artificial Sequence: Synthetic oligonucleotide
  Sense strand starting at position 581 of SEQ ID NO: 1880597
uguguuacauggguauuau

SEQ ID NO: 1979333 - RNA, 19 nt, Artificial Sequence
  Description of Artificial Sequence: Synthetic oligonucleotide
  Antisense strand to SEQ ID NO: 1979332
auaauacccauguaacaca

SEQ ID NO: 1979334 - RNA, 19 nt, Artificial Sequence
  Description of Artificial Sequence: Synthetic oligonucleotide
  Sense strand starting at position 582 of SEQ ID NO: 1880597
guguuacauggguauuaua

SEQ ID NO: 1979335 - RNA, 19 nt, Artificial Sequence
  Description of Artificial Sequence: Synthetic oligonucleotide
  Antisense strand to SEQ ID NO: 1979334
uauaauacccauguaacac

SEQ ID NO: 1979336 - RNA, 19 nt, Artificial Sequence
  Description of Artificial Sequence: Synthetic oligonucleotide
  Sense strand starting at position 589 of SEQ ID NO: 1880597
auggguauuauauguguaa

SEQ ID NO: 1979337 - RNA, 19 nt, Artificial Sequence
  Description of Artificial Sequence: Synthetic oligonucleotide
  Antisense strand to SEQ ID NO: 1979336
uuacacauauaauacccau

SEQ ID NO: 1979338 - RNA, 19 nt, Artificial Sequence
  Description of Artificial Sequence: Synthetic oligonucleotide
  Sense strand starting at position 600 of SEQ ID NO: 1880597
auguguaauaguggagacu

SEQ ID NO: 1979339 - RNA, 19 nt, Artificial Sequence
  Description of Artificial Sequence: Synthetic oligonucleotide
  Antisense strand to SEQ ID NO: 1979338
agucuccacuauuacacau

SEQ ID NO: 1979340 - RNA, 19 nt, Artificial Sequence
  Description of Artificial Sequence: Synthetic oligonucleotide
  Sense strand starting at position 609 of SEQ ID NO: 1880597
aguggagacuggguuucua

SEQ ID NO: 1979341 - RNA, 19 nt, Artificial Sequence
  Description of Artificial Sequence: Synthetic oligonucleotide
  Antisense strand to SEQ ID NO: 1979340
uagaaacccagucuccacu

SEQ ID NO: 1979342 - RNA, 19 nt, Artificial Sequence
  Description of Artificial Sequence: Synthetic oligonucleotide
  Sense strand starting at position 981 of SEQ ID NO: 1880597
uuagauugguuccaugaca

SEQ ID NO: 1979343 - RNA, 19 nt, Artificial Sequence
  Description of Artificial Sequence: Synthetic oligonucleotide
  Antisense strand to SEQ ID NO: 1979342
ugucauggaaccaaucuaa

SEQ ID NO: 1979344 - RNA, 19 nt, Artificial Sequence
  Description of Artificial Sequence: Synthetic oligonucleotide
  Sense strand starting at position 1040 of SEQ ID NO: 1880597
gcuaaucugucggucuuua

SEQ ID NO: 1979345 - RNA, 19 nt, Artificial Sequence
  Description of Artificial Sequence: Synthetic oligonucleotide
  Antisense strand to SEQ ID NO: 1979344
uaaagaccgacagauuagc

SEQ ID NO: 1979346 - RNA, 19 nt, Artificial Sequence
  Description of Artificial Sequence: Synthetic oligonucleotide
  Sense strand starting at position 1045 of SEQ ID NO: 1880597
ucugucggucuuuaauguu

SEQ ID NO: 1979347 - RNA, 19 nt, Artificial Sequence
  Description of Artificial Sequence: Synthetic oligonucleotide
  Antisense strand to SEQ ID NO: 1979346
aacauuaaagaccgacaga

SEQ ID NO: 1979348 - RNA, 19 nt, Artificial Sequence
  Description of Artificial Sequence: Synthetic oligonucleotide
  Sense strand starting at position 1059 of SEQ ID NO: 1880597
auguuagauucuuuagacu

SEQ ID NO: 1979349 - RNA, 19 nt, Artificial Sequence
  Description of Artificial Sequence: Synthetic oligonucleotide
  Antisense strand to SEQ ID NO: 1979348
agucuaaagaaucuaacau

SEQ ID NO: 1979350 - RNA, 19 nt, Artificial Sequence
  Description of Artificial Sequence: Synthetic oligonucleotide
  Sense strand starting at position 1103 of SEQ ID NO: 1880597
auacgaagauuacuccuaa

SEQ ID NO: 1979351 - RNA, 19 nt, Artificial Sequence
  Description of Artificial Sequence: Synthetic oligonucleotide
  Antisense strand to SEQ ID NO: 1979350
uuaggaguaaucuucguau

SEQ ID NO: 1979352 - RNA, 19 nt, Artificial Sequence
  Description of Artificial Sequence: Synthetic oligonucleotide
  Sense strand starting at position 1184 of SEQ ID NO: 1880597
caagcuuucccagguuaga

SEQ ID NO: 1979353 - RNA, 19 nt, Artificial Sequence
  Description of Artificial Sequence: Synthetic oligonucleotide
  Antisense strand to SEQ ID NO: 1979352
ucuaaccugggaaagcuug

SEQ ID NO: 1979354 - RNA, 19 nt, Artificial Sequence
  Description of Artificial Sequence: Synthetic oligonucleotide
  Sense strand starting at position 1247 of SEQ ID NO: 1880597
gggugucacccuuggguaa

SEQ ID NO: 1979355 - RNA, 19 nt, Artificial Sequence
  Description of Artificial Sequence: Synthetic oligonucleotide
  Antisense strand to SEQ ID NO: 1979354
uuacccaagggugacaccc

SEQ ID NO: 1979356 - RNA, 19 nt, Artificial Sequence
  Description of Artificial Sequence: Synthetic oligonucleotide
  Sense strand starting at position 1344 of SEQ ID NO: 1880597
uugaguuaauagcucauua

SEQ ID NO: 1979357 - RNA, 19 nt, Artificial Sequence
  Description of Artificial Sequence: Synthetic oligonucleotide
  Antisense strand to SEQ ID NO: 1979356
uaaugagcuauuaacucaa

SEQ ID NO: 1979358 - RNA, 19 nt, Artificial Sequence
  Description of Artificial Sequence: Synthetic oligonucleotide
  Sense strand starting at position 1445 of SEQ ID NO: 1880597
aaggauaacuaggucucua

SEQ ID NO: 1979359 - RNA, 19 nt, Artificial Sequence
  Description of Artificial Sequence: Synthetic oligonucleotide
  Antisense strand to SEQ ID NO: 1979358
uagagaccuaguuauccuu

SEQ ID NO: 1979360 - RNA, 19 nt, Artificial Sequence
  Description of Artificial Sequence: Synthetic oligonucleotide
  Sense strand starting at position 1482 of SEQ ID NO: 1880597
aucucuugguuacagauuu

SEQ ID NO: 1979361 - RNA, 19 nt, Artificial Sequence
  Description of Artificial Sequence: Synthetic oligonucleotide
  Antisense strand to SEQ ID NO: 1979360
aaaucuguaaccaagagau

SEQ ID NO: 1979362 - RNA, 19 nt, Artificial Sequence
  Description of Artificial Sequence: Synthetic oligonucleotide
  Sense strand starting at position 1604 of SEQ ID NO: 1880597
ucauucuucucagauagga

SEQ ID NO: 1979363 - RNA, 19 nt, Artificial Sequence
  Description of Artificial Sequence: Synthetic oligonucleotide
  Antisense strand to SEQ ID NO: 1979362
uccuaucugagaagaauga

SEQ ID NO: 1979364 - RNA, 19 nt, Artificial Sequence
  Description of Artificial Sequence: Synthetic oligonucleotide
  Sense strand starting at position 1612 of SEQ ID NO: 1880597
cucagauaggauuggcuuu

SEQ ID NO: 1979365 - RNA, 19 nt, Artificial Sequence
  Description of Artificial Sequence: Synthetic oligonucleotide
  Antisense strand to SEQ ID NO: 1979364
aaagccaauccuaucugag

SEQ ID NO: 1979366 - RNA, 19 nt, Artificial Sequence
  Description of Artificial Sequence: Synthetic oligonucleotide
  Sense strand starting at position 2246 of SEQ ID NO: 1880597
ugcugacgcacugaagauu

SEQ ID NO: 1979367 - RNA, 19 nt, Artificial Sequence
  Description of Artificial Sequence: Synthetic oligonucleotide
  Antisense strand to SEQ ID NO: 1979366
aaucuucagugcgucagca

SEQ ID NO: 1979368 - RNA, 19 nt, Artificial Sequence
  Description of Artificial Sequence: Synthetic oligonucleotide
  Sense strand starting at position 2364 of SEQ ID NO: 1880597
gcaagucagaaugaaguuu

SEQ ID NO: 1979369 - RNA, 19 nt, Artificial Sequence
  Description of Artificial Sequence: Synthetic oligonucleotide
  Antisense strand to SEQ ID NO: 1979368
aaacuucauucugacuugc

SEQ ID NO: 1979370 - RNA, 19 nt, Artificial Sequence
  Description of Artificial Sequence: Synthetic oligonucleotide
  Sense strand starting at position 2439 of SEQ ID NO: 1880597
aggguacuguuuccagcau

SEQ ID NO: 1979371 - RNA, 19 nt, Artificial Sequence
  Description of Artificial Sequence: Synthetic oligonucleotide
  Antisense strand to SEQ ID NO: 1979370
augcuggaaacaguacccu

SEQ ID NO: 1979372 - RNA, 19 nt, Artificial Sequence
  Description of Artificial Sequence: Synthetic oligonucleotide
  Sense strand starting at position 2510 of SEQ ID NO: 1880597
agggcauugcaggaugagu

SEQ ID NO: 1979373 - RNA, 19 nt, Artificial Sequence
  Description of Artificial Sequence: Synthetic oligonucleotide
  Antisense strand to SEQ ID NO: 1979372
acucauccugcaaugcccu

SEQ ID NO: 1979374 - RNA, 19 nt, Artificial Sequence
  Description of Artificial Sequence: Synthetic oligonucleotide
  Sense strand starting at position 2586 of SEQ ID NO: 1880597
ccugucuucucauuuguaa

SEQ ID NO: 1979375 - RNA, 19 nt, Artificial Sequence
  Description of Artificial Sequence: Synthetic oligonucleotide
  Antisense strand to SEQ ID NO: 1979374
uuacaaaugagaagacagg

SEQ ID NO: 1979376 - RNA, 19 nt, Artificial Sequence
  Description of Artificial Sequence: Synthetic oligonucleotide
  Sense strand starting at position 2608 of SEQ ID NO: 1880597
gggaaugaguuucccaucu

SEQ ID NO: 1979377 - RNA, 19 nt, Artificial Sequence
  Description of Artificial Sequence: Synthetic oligonucleotide
  Antisense strand to SEQ ID NO: 1979376
agaugggaaacucauuccc

SEQ ID NO: 1979378 - RNA, 19 nt, Artificial Sequence
  Description of Artificial Sequence: Synthetic oligonucleotide
  Sense strand starting at position 2668 of SEQ ID NO: 1880597
ggagguucugcucaugcca

SEQ ID NO: 1979379 - RNA, 19 nt, Artificial Sequence
  Description of Artificial Sequence: Synthetic oligonucleotide
  Antisense strand to SEQ ID NO: 1979378
uggcaugagcagaaccucc

SEQ ID NO: 1979380 - RNA, 19 nt, Artificial Sequence
  Description of Artificial Sequence: Synthetic oligonucleotide
  Sense strand starting at position 2764 of SEQ ID NO: 1880597
gacuguuccuguuccaagu

SEQ ID NO: 1979381 - RNA, 19 nt, Artificial Sequence
  Description of Artificial Sequence: Synthetic oligonucleotide
  Antisense strand to SEQ ID NO: 1979380
acuuggaacaggaacaguc

SEQ ID NO: 1979382 - RNA, 19 nt, Artificial Sequence
  Description of Artificial Sequence: Synthetic oligonucleotide
  Sense strand starting at position 2991 of SEQ ID NO: 1880597
gcucacguguggucccaaa

SEQ ID NO: 1979383 - RNA, 19 nt, Artificial Sequence
  Description of Artificial Sequence: Synthetic oligonucleotide
  Antisense strand to SEQ ID NO: 1979382
uuugggaccacacgugagc

SEQ ID NO: 1979384 - RNA, 19 nt, Artificial Sequence
  Description of Artificial Sequence: Synthetic oligonucleotide
  Sense strand starting at position 3504 of SEQ ID NO: 1880597
uuccaagggccauguuauu

SEQ ID NO: 1979385 - RNA, 19 nt, Artificial Sequence
  Description of Artificial Sequence: Synthetic oligonucleotide
  Antisense strand to SEQ ID NO: 1979384
aauaacauggcccuuggaa

SEQ ID NO: 1979386 - RNA, 19 nt, Artificial Sequence
  Description of Artificial Sequence: Synthetic oligonucleotide
  Sense strand starting at position 3513 of SEQ ID NO: 1880597
ccauguuauuuccaugaca

SEQ ID NO: 1979387 - RNA, 19 nt, Artificial Sequence
  Description of Artificial Sequence: Synthetic oligonucleotide
  Antisense strand to SEQ ID NO: 1979386
ugucauggaaauaacaugg

SEQ ID NO: 1979388 - RNA, 19 nt, Artificial Sequence
  Description of Artificial Sequence: Synthetic oligonucleotide
  Sense strand starting at position 3784 of SEQ ID NO: 1880597
gguuucugccauuaccuga

SEQ ID NO: 1979389 - RNA, 19 nt, Artificial Sequence
  Description of Artificial Sequence: Synthetic oligonucleotide
  Antisense strand to SEQ ID NO: 1979388
ucagguaauggcagaaacc

SEQ ID NO: 1979390 - RNA, 19 nt, Artificial Sequence
  Description of Artificial Sequence: Synthetic oligonucleotide
  Sense strand starting at position 3918 of SEQ ID NO: 1880597
gggugaugcccacauuguc

SEQ ID NO: 1979391 - RNA, 19 nt, Artificial Sequence
  Description of Artificial Sequence: Synthetic oligonucleotide
  Antisense strand to SEQ ID NO: 1979390
gacaaugugggcaucaccc

SEQ ID NO: 1979392 - RNA, 19 nt, Artificial Sequence
  Description of Artificial Sequence: Synthetic oligonucleotide
  Sense strand starting at position 573 of SEQ ID NO: 1880598
gggauuccaggaggucaau

SEQ ID NO: 1979393 - RNA, 19 nt, Artificial Sequence
  Description of Artificial Sequence: Synthetic oligonucleotide
  Antisense strand to SEQ ID NO: 1979392
auugaccuccuggaauccc

SEQ ID NO: 1979394 - RNA, 19 nt, Artificial Sequence
  Description of Artificial Sequence: Synthetic oligonucleotide
  Sense strand starting at position 810 of SEQ ID NO: 1880598
uugagugugaauggagaua

SEQ ID NO: 1979395 - RNA, 19 nt, Artificial Sequence
  Description of Artificial Sequence: Synthetic oligonucleotide
  Antisense strand to SEQ ID NO: 1979394
uaucuccauucacacucaa

SEQ ID NO: 1979396 - RNA, 19 nt, Artificial Sequence
  Description of Artificial Sequence: Synthetic oligonucleotide
  Sense strand starting at position 1010 of SEQ ID NO: 1880598
ugcugagugacuggcauuu

SEQ ID NO: 1979397 - RNA, 19 nt, Artificial Sequence
  Description of Artificial Sequence: Synthetic oligonucleotide
  Antisense strand to SEQ ID NO: 1979396
aaaugccagucacucagca

SEQ ID NO: 1979398 - RNA, 19 nt, Artificial Sequence
  Description of Artificial Sequence: Synthetic oligonucleotide
  Sense strand starting at position 1660 of SEQ ID NO: 1880598
agcugagauauuugugcau

SEQ ID NO: 1979399 - RNA, 19 nt, Artificial Sequence
  Description of Artificial Sequence: Synthetic oligonucleotide
  Antisense strand to SEQ ID NO: 1979398
augcacaaauaucucagcu

SEQ ID NO: 1979400 - RNA, 19 nt, Artificial Sequence
  Description of Artificial Sequence: Synthetic oligonucleotide
  Sense strand starting at position 1759 of SEQ ID NO: 1880598
cuaaacuuaccaugugaug

SEQ ID NO: 1979401 - RNA, 19 nt, Artificial Sequence
  Description of Artificial Sequence: Synthetic oligonucleotide
  Antisense strand to SEQ ID NO: 1979400
caucacaugguaaguuuag

SEQ ID NO: 1979402 - RNA, 19 nt, Artificial Sequence
  Description of Artificial Sequence: Synthetic oligonucleotide
  Sense strand starting at position 1765 of SEQ ID NO: 1880598
uuaccaugugauggauauu

SEQ ID NO: 1979403 - RNA, 19 nt, Artificial Sequence
  Description of Artificial Sequence: Synthetic oligonucleotide
  Antisense strand to SEQ ID NO: 1979402
aauauccaucacaugguaa

SEQ ID NO: 1979404 - RNA, 19 nt, Artificial Sequence
  Description of Artificial Sequence: Synthetic oligonucleotide
  Sense strand starting at position 1816 of SEQ ID NO: 1880598
auagcagacagaugaagua

SEQ ID NO: 1979405 - RNA, 19 nt, Artificial Sequence
  Description of Artificial Sequence: Synthetic oligonucleotide
  Antisense strand to SEQ ID NO: 1979404
uacuucaucugucugcuau

SEQ ID NO: 1979406 - RNA, 19 nt, Artificial Sequence
  Description of Artificial Sequence: Synthetic oligonucleotide
  Sense strand starting at position 1840 of SEQ ID NO: 1880598
gguggugcucugagcagaa

SEQ ID NO: 1979407 - RNA, 19 nt, Artificial Sequence
  Description of Artificial Sequence: Synthetic oligonucleotide
  Antisense strand to SEQ ID NO: 1979406
uucugcucagagcaccacc

SEQ ID NO: 1979408 - RNA, 19 nt, Artificial Sequence
  Description of Artificial Sequence: Synthetic oligonucleotide
  Sense strand starting at position 1844 of SEQ ID NO: 1880598
gugcucugagcagaacaaa

SEQ ID NO: 1979409 - RNA, 19 nt, Artificial Sequence
  Description of Artificial Sequence: Synthetic oligonucleotide
  Antisense strand to SEQ ID NO: 1979408
uuuguucugcucagagcac

SEQ ID NO: 1979410 - RNA, 19 nt, Artificial Sequence
  Description of Artificial Sequence: Synthetic oligonucleotide
  Sense strand starting at position 1891 of SEQ ID NO: 1880598
acuguuucccucgugucua

SEQ ID NO: 1979411 - RNA, 19 nt, Artificial Sequence
  Description of Artificial Sequence: Synthetic oligonucleotide
  Antisense strand to SEQ ID NO: 1979410
uagacacgagggaaacagu

SEQ ID NO: 1979412 - RNA, 19 nt, Artificial Sequence
  Description of Artificial Sequence: Synthetic oligonucleotide
  Sense strand starting at position 1896 of SEQ ID NO: 1880598
uucccucgugucuagauuu

SEQ ID NO: 1979413 - RNA, 19 nt, Artificial Sequence
  Description of Artificial Sequence: Synthetic oligonucleotide
  Antisense strand to SEQ ID NO: 1979412
aaaucuagacacgagggaa

SEQ ID NO: 1979414 - RNA, 19 nt, Artificial Sequence
  Description of Artificial Sequence: Synthetic oligonucleotide
  Sense strand starting at position 1998 of SEQ ID NO: 1880598
ggaugccucccaggaugaa

SEQ ID NO: 1979415 - RNA, 19 nt, Artificial Sequence
  Description of Artificial Sequence: Synthetic oligonucleotide
  Antisense strand to SEQ ID NO: 1979414
uucauccugggaggcaucc

SEQ ID NO: 1979416 - RNA, 19 nt, Artificial Sequence
  Description of Artificial Sequence: Synthetic oligonucleotide
  Sense strand starting at position 2029 of SEQ ID NO: 1880598
gaaacagaguucuuaaagc

SEQ ID NO: 1979417 - RNA, 19 nt, Artificial Sequence
  Description of Artificial Sequence: Synthetic oligonucleotide
  Antisense strand to SEQ ID NO: 1979416
gcuuuaagaacucuguuuc

SEQ ID NO: 1979418 - RNA, 19 nt, Artificial Sequence
  Description of Artificial Sequence: Synthetic oligonucleotide
  Sense strand starting at position 2077 of SEQ ID NO: 1880598
gaaugaacuuggccugacu

SEQ ID NO: 1979419 - RNA, 19 nt, Artificial Sequence
  Description of Artificial Sequence: Synthetic oligonucleotide
  Antisense strand to SEQ ID NO: 1979418
agucaggccaaguucauuc

SEQ ID NO: 1979420 - RNA, 19 nt, Artificial Sequence
  Description of Artificial Sequence: Synthetic oligonucleotide
  Sense strand starting at position 2095 of SEQ ID NO: 1880598
uucuuugcugccgucauau

SEQ ID NO: 1979421 - RNA, 19 nt, Artificial Sequence
  Description of Artificial Sequence: Synthetic oligonucleotide
  Antisense strand to SEQ ID NO: 1979420
auaugacggcagcaaagaa

SEQ ID NO: 1979422 - RNA, 19 nt, Artificial Sequence
  Description of Artificial Sequence: Synthetic oligonucleotide
  Sense strand starting at position 2107 of SEQ ID NO: 1880598
gucauaugaaccggaagga

SEQ ID NO: 1979423 - RNA, 19 nt, Artificial Sequence
  Description of Artificial Sequence: Synthetic oligonucleotide
  Antisense strand to SEQ ID NO: 1979422
uccuuccgguucauaugac

SEQ ID NO: 1979424 - RNA, 19 nt, Artificial Sequence
  Description of Artificial Sequence: Synthetic oligonucleotide
  Sense strand starting at position 2328 of SEQ ID NO: 1880598
aauugagccuuuguaagag

SEQ ID NO: 1979425 - RNA, 19 nt, Artificial Sequence
  Description of Artificial Sequence: Synthetic oligonucleotide
  Antisense strand to SEQ ID NO: 1979424
cucuuacaaaggcucaauu

SEQ ID NO: 1979426 - RNA, 19 nt, Artificial Sequence
  Description of Artificial Sequence: Synthetic oligonucleotide
  Sense strand starting at position 2338 of SEQ ID NO: 1880598
uuguaagagggcugaaauu

SEQ ID NO: 1979427 - RNA, 19 nt, Artificial Sequence
  Description of Artificial Sequence: Synthetic oligonucleotide
  Antisense strand to SEQ ID NO: 1979426
aauuucagcccucuuacaa

SEQ ID NO: 1979428 - RNA, 19 nt, Artificial Sequence
  Description of Artificial Sequence: Synthetic oligonucleotide
  Sense strand starting at position 2558 of SEQ ID NO: 1880598
ucuguuggauaaucucuaa

SEQ ID NO: 1979429 - RNA, 19 nt, Artificial Sequence
  Description of Artificial Sequence: Synthetic oligonucleotide
  Antisense strand to SEQ ID NO: 1979428
uuagagauuauccaacaga

SEQ ID NO: 1979430 - RNA, 19 nt, Artificial Sequence
  Description of Artificial Sequence: Synthetic oligonucleotide
  Sense strand starting at position 2561 of SEQ ID NO: 1880598
guuggauaaucucuaauua

SEQ ID NO: 1979431 - RNA, 19 nt, Artificial Sequence
  Description of Artificial Sequence: Synthetic oligonucleotide
  Antisense strand to SEQ ID NO: 1979430
uaauuagagauuauccaac

SEQ ID NO: 1979432 - RNA, 19 nt, Artificial Sequence
  Description of Artificial Sequence: Synthetic oligonucleotide
  Sense strand starting at position 2605 of SEQ ID NO: 1880598
gccgaugcucagcauauuu

SEQ ID NO: 1979433 - RNA, 19 nt, Artificial Sequence
  Description of Artificial Sequence: Synthetic oligonucleotide
  Antisense strand to SEQ ID NO: 1979432
aaauaugcugagcaucggc

SEQ ID NO: 1979434 - RNA, 19 nt, Artificial Sequence
  Description of Artificial Sequence: Synthetic oligonucleotide
  Sense strand starting at position 2647 of SEQ ID NO: 1880598
gagggaaucugcccaagca

SEQ ID NO: 1979435 - RNA, 19 nt, Artificial Sequence
  Description of Artificial Sequence: Synthetic oligonucleotide
  Antisense strand to SEQ ID NO: 1979434
ugcuugggcagauucccuc

SEQ ID NO: 1979436 - RNA, 19 nt, Artificial Sequence
  Description of Artificial Sequence: Synthetic oligonucleotide
  Sense strand starting at position 2648 of SEQ ID NO: 1880598
agggaaucugcccaagcau

SEQ ID NO: 1979437 - RNA, 19 nt, Artificial Sequence
  Description of Artificial Sequence: Synthetic oligonucleotide
  Antisense strand to SEQ ID NO: 1979436
augcuugggcagauucccu

SEQ ID NO: 1979438 - RNA, 19 nt, Artificial Sequence
  Description of Artificial Sequence: Synthetic oligonucleotide
  Sense strand starting at position 2661 of SEQ ID NO: 1880598
aagcaugagucaccuggaa

SEQ ID NO: 1979439 - RNA, 19 nt, Artificial Sequence
  Description of Artificial Sequence: Synthetic oligonucleotide
  Antisense strand to SEQ ID NO: 1979438
uuccaggugacucaugcuu

SEQ ID NO: 1979440 - RNA, 19 nt, Artificial Sequence
  Description of Artificial Sequence: Synthetic oligonucleotide
  Sense strand starting at position 2700 of SEQ ID NO: 1880598
acaaaugaucugugcaaag

SEQ ID NO: 1979441 - RNA, 19 nt, Artificial Sequence
  Description of Artificial Sequence: Synthetic oligonucleotide
  Antisense strand to SEQ ID NO: 1979440
cuuugcacagaucauuugu

SEQ ID NO: 1979442 - RNA, 19 nt, Artificial Sequence
  Description of Artificial Sequence: Synthetic oligonucleotide
  Sense strand starting at position 2711 of SEQ ID NO: 1880598
gugcaaagaggucagcaaa

SEQ ID NO: 1979443 - RNA, 19 nt, Artificial Sequence
  Description of Artificial Sequence: Synthetic oligonucleotide
  Antisense strand to SEQ ID NO: 1979442
uuugcugaccucuuugcac

SEQ ID NO: 1979444 - RNA, 19 nt, Artificial Sequence
  Description of Artificial Sequence: Synthetic oligonucleotide
  Sense strand starting at position 2847 of SEQ ID NO: 1880598
guguguuugacagacagaa

SEQ ID NO: 1979445 - RNA, 19 nt, Artificial Sequence
  Description of Artificial Sequence: Synthetic oligonucleotide
  Antisense strand to SEQ ID NO: 1979444
uucugucugucaaacacac

SEQ ID NO: 1979446 - RNA, 19 nt, Artificial Sequence
  Description of Artificial Sequence: Synthetic oligonucleotide
  Sense strand starting at position 2940 of SEQ ID NO: 1880598
agaagaggaucagagauaa

SEQ ID NO: 1979447 - RNA, 19 nt, Artificial Sequence
  Description of Artificial Sequence: Synthetic oligonucleotide
  Antisense strand to SEQ ID NO: 1979446
uuaucucugauccucuucu

SEQ ID NO: 1979448 - RNA, 19 nt, Artificial Sequence
  Description of Artificial Sequence: Synthetic oligonucleotide
  Sense strand starting at position 2966 of SEQ ID NO: 1880598
uauggaaauuuggaguaaa

SEQ ID NO: 1979449 - RNA, 19 nt, Artificial Sequence
  Description of Artificial Sequence: Synthetic oligonucleotide
  Antisense strand to SEQ ID NO: 1979448
uuuacuccaaauuuccaua

SEQ ID NO: 1979450 - RNA, 19 nt, Artificial Sequence
  Description of Artificial Sequence: Synthetic oligonucleotide
  Sense strand starting at position 3056 of SEQ ID NO: 1880598
aggacaaucugguuacuau

SEQ ID NO: 1979451 - RNA, 19 nt, Artificial Sequence
  Description of Artificial Sequence: Synthetic oligonucleotide
  Antisense strand to SEQ ID NO: 1979450
auaguaaccagauuguccu

SEQ ID NO: 1979452 - RNA, 19 nt, Artificial Sequence
  Description of Artificial Sequence: Synthetic oligonucleotide
  Sense strand starting at position 3066 of SEQ ID NO: 1880598
gguuacuauguugaaguca

SEQ ID NO: 1979453 - RNA, 19 nt, Artificial Sequence
  Description of Artificial Sequence: Synthetic oligonucleotide
  Antisense strand to SEQ ID NO: 1979452
ugacuucaacauaguaacc

SEQ ID NO: 1979454 - RNA, 19 nt, Artificial Sequence
  Description of Artificial Sequence: Synthetic oligonucleotide
  Sense strand starting at position 3077 of SEQ ID NO: 1880598
ugaagucacaaaugugaag

SEQ ID NO: 1979455 - RNA, 19 nt, Artificial Sequence
  Description of Artificial Sequence: Synthetic oligonucleotide
  Antisense strand to SEQ ID NO: 1979454
cuucacauuugugacuuca

SEQ ID NO: 1979456 - RNA, 19 nt, Artificial Sequence
  Description of Artificial Sequence: Synthetic oligonucleotide
  Sense strand starting at position 3253 of SEQ ID NO: 1880598
cucaucagugaaggacaua

SEQ ID NO: 1979457 - RNA, 19 nt, Artificial Sequence
  Description of Artificial Sequence: Synthetic oligonucleotide
  Antisense strand to SEQ ID NO: 1979456
uauguccuucacugaugag

SEQ ID NO: 1979458 - RNA, 19 nt, Artificial Sequence
  Description of Artificial Sequence: Synthetic oligonucleotide
  Sense strand starting at position 3405 of SEQ ID NO: 1880598
ccuugaaaugugcagagau

SEQ ID NO: 1979459 - RNA, 19 nt, Artificial Sequence
  Description of Artificial Sequence: Synthetic oligonucleotide
  Antisense strand to SEQ ID NO: 1979458
aucucugcacauuucaagg

SEQ ID NO: 1979460 - RNA, 19 nt, Artificial Sequence
  Description of Artificial Sequence: Synthetic oligonucleotide
  Sense strand starting at position 3407 of SEQ ID NO: 1880598
uugaaaugugcagagauuc

SEQ ID NO: 1979461 - RNA, 19 nt, Artificial Sequence
  Description of Artificial Sequence: Synthetic oligonucleotide
  Antisense strand to SEQ ID NO: 1979460
gaaucucugcacauuucaa

SEQ ID NO: 1979462 - RNA, 19 nt, Artificial Sequence
  Description of Artificial Sequence: Synthetic oligonucleotide
  Sense strand starting at position 3482 of SEQ ID NO: 1880598
agcaauauucuggauguua

SEQ ID NO: 1979463 - RNA, 19 nt, Artificial Sequence
  Description of Artificial Sequence: Synthetic oligonucleotide
  Antisense strand to SEQ ID NO: 1979462
uaacauccagaauauugcu

SEQ ID NO: 1979464 - RNA, 19 nt, Artificial Sequence
  Description of Artificial Sequence: Synthetic oligonucleotide
  Sense strand starting at position 3521 of SEQ ID NO: 1880598
ccugucagucuuuaagaug

SEQ ID NO: 1979465 - RNA, 19 nt, Artificial Sequence
  Description of Artificial Sequence: Synthetic oligonucleotide
  Antisense strand to SEQ ID NO: 1979464
caucuuaaagacugacagg

SEQ ID NO: 1979466 - RNA, 19 nt, Artificial Sequence
  Description of Artificial Sequence: Synthetic oligonucleotide
  Sense strand starting at position 3527 of SEQ ID NO: 1880598
agucuuuaagauggaaacu

SEQ ID NO: 1979467 - RNA, 19 nt, Artificial Sequence
  Description of Artificial Sequence: Synthetic oligonucleotide
  Antisense strand to SEQ ID NO: 1979466
aguuuccaucuuaaagacu

SEQ ID NO: 1979468 - RNA, 19 nt, Artificial Sequence
  Description of Artificial Sequence: Synthetic oligonucleotide
  Sense strand starting at position 3674 of SEQ ID NO: 1880598
auggcauucguacaaauga

SEQ ID NO: 1979469 - RNA, 19 nt, Artificial Sequence
  Description of Artificial Sequence: Synthetic oligonucleotide
  Antisense strand to SEQ ID NO: 1979468
ucauuuguacgaaugccau

SEQ ID NO: 1979470 - RNA, 19 nt, Artificial Sequence
  Description of Artificial Sequence: Synthetic oligonucleotide
  Sense strand starting at position 3943 of SEQ ID NO: 1880598
gaaaccagccuguauaaug

SEQ ID NO: 1979471 - RNA, 19 nt, Artificial Sequence
  Description of Artificial Sequence: Synthetic oligonucleotide
  Antisense strand to SEQ ID NO: 1979470
cauuauacaggcugguuuc

SEQ ID NO: 1979472 - RNA, 19 nt, Artificial Sequence
  Description of Artificial Sequence: Synthetic oligonucleotide
  Sense strand starting at position 29 of SEQ ID NO: 1880599
cggguugaauugcuccaua

SEQ ID NO: 1979473 - RNA, 19 nt, Artificial Sequence
  Description of Artificial Sequence: Synthetic oligonucleotide
  Antisense strand to SEQ ID NO: 1979472
uauggagcaauucaacccg

SEQ ID NO: 1979474 - RNA, 19 nt, Artificial Sequence
  Description of Artificial Sequence: Synthetic oligonucleotide
  Sense strand starting at position 32 of SEQ ID NO: 1880599
guugaauugcuccauauaa

SEQ ID NO: 1979475 - RNA, 19 nt, Artificial Sequence
  Description of Artificial Sequence: Synthetic oligonucleotide
  Antisense strand to SEQ ID NO: 1979474
uuauauggagcaauucaac

SEQ ID NO: 1979476 - RNA, 19 nt, Artificial Sequence
  Description of Artificial Sequence: Synthetic oligonucleotide
  Sense strand starting at position 72 of SEQ ID NO: 1880599
ggguccuuggaaggucaaa

SEQ ID NO: 1979477 - RNA, 19 nt, Artificial Sequence
  Description of Artificial Sequence: Synthetic oligonucleotide
  Antisense strand to SEQ ID NO: 1979476
uuugaccuuccaaggaccc

SEQ ID NO: 1979478 - RNA, 19 nt, Artificial Sequence
  Description of Artificial Sequence: Synthetic oligonucleotide
  Sense strand starting at position 103 of SEQ ID NO: 1880599
ugaugauguugccucuuga

SEQ ID NO: 1979479 - RNA, 19 nt, Artificial Sequence
  Description of Artificial Sequence: Synthetic oligonucleotide
  Antisense strand to SEQ ID NO: 1979478
ucaagaggcaacaucauca

SEQ ID NO: 1979480 - RNA, 19 nt, Artificial Sequence
  Description of Artificial Sequence: Synthetic oligonucleotide
  Sense strand starting at position 112 of SEQ ID NO: 1880599
ugccucuugagggauggua

SEQ ID NO: 1979481 - RNA, 19 nt, Artificial Sequence
  Description of Artificial Sequence: Synthetic oligonucleotide
  Antisense strand to SEQ ID NO: 1979480
uaccaucccucaagaggca

SEQ ID NO: 1979482 - RNA, 19 nt, Artificial Sequence
  Description of Artificial Sequence: Synthetic oligonucleotide
  Sense strand starting at position 114 of SEQ ID NO: 1880599
ccucuugagggaugguaga

SEQ ID NO: 1979483 - RNA, 19 nt, Artificial Sequence
  Description of Artificial Sequence: Synthetic oligonucleotide
  Antisense strand to SEQ ID NO: 1979482
ucuaccaucccucaagagg

SEQ ID NO: 1979484 - RNA, 19 nt, Artificial Sequence
  Description of Artificial Sequence: Synthetic oligonucleotide
  Sense strand starting at position 124 of SEQ ID NO: 1880599
gaugguagagucuggaaga

SEQ ID NO: 1979485 - RNA, 19 nt, Artificial Sequence
  Description of Artificial Sequence: Synthetic oligonucleotide
  Antisense strand to SEQ ID NO: 1979484
ucuuccagacucuaccauc

SEQ ID NO: 1979486 - RNA, 19 nt, Artificial Sequence
  Description of Artificial Sequence: Synthetic oligonucleotide
  Sense strand starting at position 351 of SEQ ID NO: 1880599
gucagugcuucuuuaggga

SEQ ID NO: 1979487 - RNA, 19 nt, Artificial Sequence
  Description of Artificial Sequence: Synthetic oligonucleotide
  Antisense strand to SEQ ID NO: 1979486
ucccuaaagaagcacugac

SEQ ID NO: 1979488 - RNA, 19 nt, Artificial Sequence
  Description of Artificial Sequence: Synthetic oligonucleotide
  Sense strand starting at position 382 of SEQ ID NO: 1880599
ggacacaucauguguggga

SEQ ID NO: 1979489 - RNA, 19 nt, Artificial Sequence
  Description of Artificial Sequence: Synthetic oligonucleotide
  Antisense strand to SEQ ID NO: 1979488
ucccacacaugaugugucc

SEQ ID NO: 1979490 - RNA, 19 nt, Artificial Sequence
  Description of Artificial Sequence: Synthetic oligonucleotide
  Sense strand starting at position 383 of SEQ ID NO: 1880599
gacacaucaugugugggau

SEQ ID NO: 1979491 - RNA, 19 nt, Artificial Sequence
  Description of Artificial Sequence: Synthetic oligonucleotide
  Antisense strand to SEQ ID NO: 1979490
aucccacacaugauguguc

SEQ ID NO: 1979492 - RNA, 19 nt, Artificial Sequence
  Description of Artificial Sequence: Synthetic oligonucleotide
  Sense strand starting at position 434 of SEQ ID NO: 1880599
gggacacaucuaugagggu

SEQ ID NO: 1979493 - RNA, 19 nt, Artificial Sequence
  Description of Artificial Sequence: Synthetic oligonucleotide
  Antisense strand to SEQ ID NO: 1979492
acccucauagauguguccc

SEQ ID NO: 1979494 - RNA, 19 nt, Artificial Sequence
  Description of Artificial Sequence: Synthetic oligonucleotide
  Sense strand starting at position 440 of SEQ ID NO: 1880599
caucuaugagggugucuau

SEQ ID NO: 1979495 - RNA, 19 nt, Artificial Sequence
  Description of Artificial Sequence: Synthetic oligonucleotide
  Antisense strand to SEQ ID NO: 1979494
auagacacccucauagaug

SEQ ID NO: 1979496 - RNA, 19 nt, Artificial Sequence
  Description of Artificial Sequence: Synthetic oligonucleotide
  Sense strand starting at position 483 of SEQ ID NO: 1880599
aaaugagauugggagacau

SEQ ID NO: 1979497 - RNA, 19 nt, Artificial Sequence
  Description of Artificial Sequence: Synthetic oligonucleotide
  Antisense strand to SEQ ID NO: 1979496
augucucccaaucucauuu

SEQ ID NO: 1979498 - RNA, 19 nt, Artificial Sequence
  Description of Artificial Sequence: Synthetic oligonucleotide
  Sense strand starting at position 495 of SEQ ID NO: 1880599
gagacauguugcucugcag

SEQ ID NO: 1979499 - RNA, 19 nt, Artificial Sequence
  Description of Artificial Sequence: Synthetic oligonucleotide
  Antisense strand to SEQ ID NO: 1979498
cugcagagcaacaugucuc

SEQ ID NO: 1979500 - RNA, 19 nt, Artificial Sequence
  Description of Artificial Sequence: Synthetic oligonucleotide
  Sense strand starting at position 499 of SEQ ID NO: 1880599
cauguugcucugcagaauu

SEQ ID NO: 1979501 - RNA, 19 nt, Artificial Sequence
  Description of Artificial Sequence: Synthetic oligonucleotide
  Antisense strand to SEQ ID NO: 1979500
aauucugcagagcaacaug

SEQ ID NO: 1979502 - RNA, 19 nt, Artificial Sequence
  Description of Artificial Sequence: Synthetic oligonucleotide
  Sense strand starting at position 551 of SEQ ID NO: 1880599
uugaaauucugacugcaag

SEQ ID NO: 1979503 - RNA, 19 nt, Artificial Sequence
  Description of Artificial Sequence: Synthetic oligonucleotide
  Antisense strand to SEQ ID NO: 1979502
cuugcagucagaauuucaa

SEQ ID NO: 1979504 - RNA, 19 nt, Artificial Sequence
  Description of Artificial Sequence: Synthetic oligonucleotide
  Sense strand starting at position 552 of SEQ ID NO: 1880599
ugaaauucugacugcaagu

SEQ ID NO: 1979505 - RNA, 19 nt, Artificial Sequence
  Description of Artificial Sequence: Synthetic oligonucleotide
  Antisense strand to SEQ ID NO: 1979504
acuugcagucagaauuuca

SEQ ID NO: 1979506 - RNA, 19 nt, Artificial Sequence
  Description of Artificial Sequence: Synthetic oligonucleotide
  Sense strand starting at position 627 of SEQ ID NO: 1880599
gcuugaggacuuggugaca

SEQ ID NO: 1979507 - RNA, 19 nt, Artificial Sequence
  Description of Artificial Sequence: Synthetic oligonucleotide
  Antisense strand to SEQ ID NO: 1979506
ugucaccaaguccucaagc

SEQ ID NO: 1979508 - RNA, 19 nt, Artificial Sequence
  Description of Artificial Sequence: Synthetic oligonucleotide
  Sense strand starting at position 778 of SEQ ID NO: 1880599
gccagaauacuauguaaua

SEQ ID NO: 1979509 - RNA, 19 nt, Artificial Sequence
  Description of Artificial Sequence: Synthetic oligonucleotide
  Antisense strand to SEQ ID NO: 1979508
uauuacauaguauucuggc

SEQ ID NO: 1979510 - RNA, 19 nt, Artificial Sequence
  Description of Artificial Sequence: Synthetic oligonucleotide
  Sense strand starting at position 790 of SEQ ID NO: 1880599
uguaauauuaugcauggga

SEQ ID NO: 1979511 - RNA, 19 nt, Artificial Sequence
  Description of Artificial Sequence: Synthetic oligonucleotide
  Antisense strand to SEQ ID NO: 1979510
ucccaugcauaauauuaca

SEQ ID NO: 1979512 - RNA, 19 nt, Artificial Sequence
  Description of Artificial Sequence: Synthetic oligonucleotide
  Sense strand starting at position 846 of SEQ ID NO: 1880599
gggagcuucgaaggaucuu

SEQ ID NO: 1979513 - RNA, 19 nt, Artificial Sequence
  Description of Artificial Sequence: Synthetic oligonucleotide
  Antisense strand to SEQ ID NO: 1979512
aagauccuucgaagcuccc

SEQ ID NO: 1979514 - RNA, 19 nt, Artificial Sequence
  Description of Artificial Sequence: Synthetic oligonucleotide
  Sense strand starting at position 932 of SEQ ID NO: 1880599
ugaguaaauucucuccagu

SEQ ID NO: 1979515 - RNA, 19 nt, Artificial Sequence
  Description of Artificial Sequence: Synthetic oligonucleotide
  Antisense strand to SEQ ID NO: 1979514
acuggagagaauuuacuca

SEQ ID NO: 1979516 - RNA, 19 nt, Artificial Sequence
  Description of Artificial Sequence: Synthetic oligonucleotide
  Sense strand starting at position 953 of SEQ ID NO: 1880599
cugauagcaguuuguaaac

SEQ ID NO: 1979517 - RNA, 19 nt, Artificial Sequence
  Description of Artificial Sequence: Synthetic oligonucleotide
  Antisense strand to SEQ ID NO: 1979516
guuuacaaacugcuaucag

SEQ ID NO: 1979518 - RNA, 19 nt, Artificial Sequence
  Description of Artificial Sequence: Synthetic oligonucleotide
  Sense strand starting at position 978 of SEQ ID NO: 1880599
ccagaugacugcucucuau

SEQ ID NO: 1979519 - RNA, 19 nt, Artificial Sequence
  Description of Artificial Sequence: Synthetic oligonucleotide
  Antisense strand to SEQ ID NO: 1979518
auagagagcagucaucugg

SEQ ID NO: 1979520 - RNA, 19 nt, Artificial Sequence
  Description of Artificial Sequence: Synthetic oligonucleotide
  Sense strand starting at position 2112 of SEQ ID NO: 1880599
ggagguagcccugagcuuu

SEQ ID NO: 1979521 - RNA, 19 nt, Artificial Sequence
  Description of Artificial Sequence: Synthetic oligonucleotide
  Antisense strand to SEQ ID NO: 1979520
aaagcucagggcuaccucc

SEQ ID NO: 1979522 - RNA, 19 nt, Artificial Sequence
  Description of Artificial Sequence: Synthetic oligonucleotide
  Sense strand starting at position 2426 of SEQ ID NO: 1880599
gagugauagugucccuauu

SEQ ID NO: 1979523 - RNA, 19 nt, Artificial Sequence
  Description of Artificial Sequence: Synthetic oligonucleotide
  Antisense strand to SEQ ID NO: 1979522
aauagggacacuaucacuc

SEQ ID NO: 1979524 - RNA, 19 nt, Artificial Sequence
  Description of Artificial Sequence: Synthetic oligonucleotide
  Sense strand starting at position 2428 of SEQ ID NO: 1880599
gugauagugucccuauuag

SEQ ID NO: 1979525 - RNA, 19 nt, Artificial Sequence
  Description of Artificial Sequence: Synthetic oligonucleotide
  Antisense strand to SEQ ID NO: 1979524
cuaauagggacacuaucac

SEQ ID NO: 1979526 - RNA, 19 nt, Artificial Sequence
  Description of Artificial Sequence: Synthetic oligonucleotide
  Sense strand starting at position 2528 of SEQ ID NO: 1880599
cuguacuuccuaggauaug

SEQ ID NO: 1979527 - RNA, 19 nt, Artificial Sequence
  Description of Artificial Sequence: Synthetic oligonucleotide
  Antisense strand to SEQ ID NO: 1979526
cauauccuaggaaguacag

SEQ ID NO: 1979528 - RNA, 19 nt, Artificial Sequence
  Description of Artificial Sequence: Synthetic oligonucleotide
  Sense strand starting at position 2738 of SEQ ID NO: 1880599
gcgucacucccagcucauu

SEQ ID NO: 1979529 - RNA, 19 nt, Artificial Sequence
  Description of Artificial Sequence: Synthetic oligonucleotide
  Antisense strand to SEQ ID NO: 1979528
aaugagcugggagugacgc

SEQ ID NO: 1979530 - RNA, 19 nt, Artificial Sequence
  Description of Artificial Sequence: Synthetic oligonucleotide
  Sense strand starting at position 2905 of SEQ ID NO: 1880599
augucauuauuacccaagu

SEQ ID NO: 1979531 - RNA, 19 nt, Artificial Sequence
  Description of Artificial Sequence: Synthetic oligonucleotide
  Antisense strand to SEQ ID NO: 1979530
acuuggguaauaaugacau

SEQ ID NO: 1979532 - RNA, 19 nt, Artificial Sequence
  Description of Artificial Sequence: Synthetic oligonucleotide
  Sense strand starting at position 2936 of SEQ ID NO: 1880599
cuguuuagaggccaacuua

SEQ ID NO: 1979533 - RNA, 19 nt, Artificial Sequence
  Description of Artificial Sequence: Synthetic oligonucleotide
  Antisense strand to SEQ ID NO: 1979532
uaaguuggccucuaaacag

SEQ ID NO: 1979534 - RNA, 19 nt, Artificial Sequence
  Description of Artificial Sequence: Synthetic oligonucleotide
  Sense strand starting at position 2972 of SEQ ID NO: 1880599
gagagagugucgucagaca

SEQ ID NO: 1979535 - RNA, 19 nt, Artificial Sequence
  Description of Artificial Sequence: Synthetic oligonucleotide
  Antisense strand to SEQ ID NO: 1979534
ugucugacgacacucucuc

SEQ ID NO: 1979536 - RNA, 19 nt, Artificial Sequence
  Description of Artificial Sequence: Synthetic oligonucleotide
  Sense strand starting at position 3003 of SEQ ID NO: 1880599
gccuuacuuguuuauguau

SEQ ID NO: 1979537 - RNA, 19 nt, Artificial Sequence
  Description of Artificial Sequence: Synthetic oligonucleotide
  Antisense strand to SEQ ID NO: 1979536
auacauaaacaaguaaggc

SEQ ID NO: 1979538 - RNA, 19 nt, Artificial Sequence
  Description of Artificial Sequence: Synthetic oligonucleotide
  Sense strand starting at position 3090 of SEQ ID NO: 1880599
aaaguuaaguagcugcaaa

SEQ ID NO: 1979539 - RNA, 19 nt, Artificial Sequence
  Description of Artificial Sequence: Synthetic oligonucleotide
  Antisense strand to SEQ ID NO: 1979538
uuugcagcuacuuaacuuu

SEQ ID NO: 1979540 - RNA, 19 nt, Artificial Sequence
  Description of Artificial Sequence: Synthetic oligonucleotide
  Sense strand starting at position 3114 of SEQ ID NO: 1880599
ugguuucuggcuuauugua

SEQ ID NO: 1979541 - RNA, 19 nt, Artificial Sequence
  Description of Artificial Sequence: Synthetic oligonucleotide
  Antisense strand to SEQ ID NO: 1979540
uacaauaagccagaaacca

SEQ ID NO: 1979542 - RNA, 19 nt, Artificial Sequence
  Description of Artificial Sequence: Synthetic oligonucleotide
  Sense strand starting at position 3177 of SEQ ID NO: 1880599
gauccaguggaauguaaca

SEQ ID NO: 1979543 - RNA, 19 nt, Artificial Sequence
  Description of Artificial Sequence: Synthetic oligonucleotide
  Antisense strand to SEQ ID NO: 1979542
uguuacauuccacuggauc

SEQ ID NO: 1979544 - RNA, 19 nt, Artificial Sequence
  Description of Artificial Sequence: Synthetic oligonucleotide
  Sense strand starting at position 3839 of SEQ ID NO: 1880599
ggcccugugagcuauggaa

SEQ ID NO: 1979545 - RNA, 19 nt, Artificial Sequence
  Description of Artificial Sequence: Synthetic oligonucleotide
  Antisense strand to SEQ ID NO: 1979544
uuccauagcucacagggcc

SEQ ID NO: 1979546 - RNA, 19 nt, Artificial Sequence
  Description of Artificial Sequence: Synthetic oligonucleotide
  Sense strand starting at position 3841 of SEQ ID NO: 1880599
cccugugagcuauggaauu

SEQ ID NO: 1979547 - RNA, 19 nt, Artificial Sequence
  Description of Artificial Sequence: Synthetic oligonucleotide
  Antisense strand to SEQ ID NO: 1979546
aauuccauagcucacaggg

SEQ ID NO: 1979548 - RNA, 19 nt, Artificial Sequence
  Description of Artificial Sequence: Synthetic oligonucleotide
  Sense strand starting at position 3843 of SEQ ID NO: 1880599
cugugagcuauggaauuau

SEQ ID NO: 1979549 - RNA, 19 nt, Artificial Sequence
  Description of Artificial Sequence: Synthetic oligonucleotide
  Antisense strand to SEQ ID NO: 1979548
auaauuccauagcucacag

SEQ ID NO: 1979550 - RNA, 19 nt, Artificial Sequence
  Description of Artificial Sequence: Synthetic oligonucleotide
  Sense strand starting at position 3930 of SEQ ID NO: 1880599
ucagucuuauucucagaua

SEQ ID NO: 1979551 - RNA, 19 nt, Artificial Sequence
  Description of Artificial Sequence: Synthetic oligonucleotide
  Antisense strand to SEQ ID NO: 1979550
uaucugagaauaagacuga

SEQ ID NO: 1979552 - RNA, 19 nt, Artificial Sequence
  Description of Artificial Sequence: Synthetic oligonucleotide
  Sense strand starting at position 39 of SEQ ID NO: 1880600
uaggaaagcccucgauucu

SEQ ID NO: 1979553 - RNA, 19 nt, Artificial Sequence
  Description of Artificial Sequence: Synthetic oligonucleotide
  Antisense strand to SEQ ID NO: 1979552
agaaucgagggcuuuccua

SEQ ID NO: 1979554 - RNA, 19 nt, Artificial Sequence
  Description of Artificial Sequence: Synthetic oligonucleotide
  Sense strand starting at position 40 of SEQ ID NO: 1880600
aggaaagcccucgauucua

SEQ ID NO: 1979555 - RNA, 19 nt, Artificial Sequence
  Description of Artificial Sequence: Synthetic oligonucleotide
  Antisense strand to SEQ ID NO: 1979554
uagaaucgagggcuuuccu

SEQ ID NO: 1979556 - RNA, 19 nt, Artificial Sequence
  Description of Artificial Sequence: Synthetic oligonucleotide
  Sense strand starting at position 174 of SEQ ID NO: 1880600
cgccacgucagucaaauuu

SEQ ID NO: 1979557 - RNA, 19 nt, Artificial Sequence
  Description of Artificial Sequence: Synthetic oligonucleotide
  Antisense strand to SEQ ID NO: 1979556
aaauuugacugacguggcg

SEQ ID NO: 1979558 - RNA, 19 nt, Artificial Sequence
  Description of Artificial Sequence: Synthetic oligonucleotide
  Sense strand starting at position 240 of SEQ ID NO: 1880600
uugcaacuccuaugagaau

SEQ ID NO: 1979559 - RNA, 19 nt, Artificial Sequence
  Description of Artificial Sequence: Synthetic oligonucleotide
  Antisense strand to SEQ ID NO: 1979558
auucucauaggaguugcaa

SEQ ID NO: 1979560 - RNA, 19 nt, Artificial Sequence
  Description of Artificial Sequence: Synthetic oligonucleotide
  Sense strand starting at position 241 of SEQ ID NO: 1880600
ugcaacuccuaugagaauu

SEQ ID NO: 1979561 - RNA, 19 nt, Artificial Sequence
  Description of Artificial Sequence: Synthetic oligonucleotide
  Antisense strand to SEQ ID NO: 1979560
aauucucauaggaguugca

SEQ ID NO: 1979562 - RNA, 19 nt, Artificial Sequence
  Description of Artificial Sequence: Synthetic oligonucleotide
  Sense strand starting at position 596 of SEQ ID NO: 1880600
guccuuuacuucuugauca

SEQ ID NO: 1979563 - RNA, 19 nt, Artificial Sequence
  Description of Artificial Sequence: Synthetic oligonucleotide
  Antisense strand to SEQ ID NO: 1979562
ugaucaagaaguaaaggac

SEQ ID NO: 1979564 - RNA, 19 nt, Artificial Sequence
  Description of Artificial Sequence: Synthetic oligonucleotide
  Sense strand starting at position 616 of SEQ ID NO: 1880600
aaggaaucaucgcugugac

SEQ ID NO: 1979565 - RNA, 19 nt, Artificial Sequence
  Description of Artificial Sequence: Synthetic oligonucleotide
  Antisense strand to SEQ ID NO: 1979564
gucacagcgaugauuccuu

SEQ ID NO: 1979566 - RNA, 19 nt, Artificial Sequence
  Description of Artificial Sequence: Synthetic oligonucleotide
  Sense strand starting at position 617 of SEQ ID NO: 1880600
aggaaucaucgcugugacu

SEQ ID NO: 1979567 - RNA, 19 nt, Artificial Sequence
  Description of Artificial Sequence: Synthetic oligonucleotide
  Antisense strand to SEQ ID NO: 1979566
agucacagcgaugauuccu

SEQ ID NO: 1979568 - RNA, 19 nt, Artificial Sequence
  Description of Artificial Sequence: Synthetic oligonucleotide
  Sense strand starting at position 619 of SEQ ID NO: 1880600
gaaucaucgcugugacuuc

SEQ ID NO: 1979569 - RNA, 19 nt, Artificial Sequence
  Description of Artificial Sequence: Synthetic oligonucleotide
  Antisense strand to SEQ ID NO: 1979568
gaagucacagcgaugauuc

SEQ ID NO: 1979570 - RNA, 19 nt, Artificial Sequence
  Description of Artificial Sequence: Synthetic oligonucleotide
  Sense strand starting at position 713 of SEQ ID NO: 1880600
ggugaaacgucuucuauag

SEQ ID NO: 1979571 - RNA, 19 nt, Artificial Sequence
  Description of Artificial Sequence: Synthetic oligonucleotide
  Antisense strand to SEQ ID NO: 1979570
cuauagaagacguuucacc

SEQ ID NO: 1979572 - RNA, 19 nt, Artificial Sequence
  Description of Artificial Sequence: Synthetic oligonucleotide
  Sense strand starting at position 715 of SEQ ID NO: 1880600
ugaaacgucuucuauagga

SEQ ID NO: 1979573 - RNA, 19 nt, Artificial Sequence
  Description of Artificial Sequence: Synthetic oligonucleotide
  Antisense strand to SEQ ID NO: 1979572
uccuauagaagacguuuca

SEQ ID NO: 1979574 - RNA, 19 nt, Artificial Sequence
  Description of Artificial Sequence: Synthetic oligonucleotide
  Sense strand starting at position 792 of SEQ ID NO: 1880600
accauuuacuugggcaaau

SEQ ID NO: 1979575 - RNA, 19 nt, Artificial Sequence
  Description of Artificial Sequence: Synthetic oligonucleotide
  Antisense strand to SEQ ID NO: 1979574
auuugcccaaguaaauggu

SEQ ID NO: 1979576 - RNA, 19 nt, Artificial Sequence
  Description of Artificial Sequence: Synthetic oligonucleotide
  Sense strand starting at position 863 of SEQ ID NO: 1880600
guugaauugagcugguuuc

SEQ ID NO: 1979577 - RNA, 19 nt, Artificial Sequence
  Description of Artificial Sequence: Synthetic oligonucleotide
  Antisense strand to SEQ ID NO: 1979576
gaaaccagcucaauucaac

SEQ ID NO: 1979578 - RNA, 19 nt, Artificial Sequence
  Description of Artificial Sequence: Synthetic oligonucleotide
  Sense strand starting at position 870 of SEQ ID NO: 1880600
ugagcugguuuccaaggaa

SEQ ID NO: 1979579 - RNA, 19 nt, Artificial Sequence
  Description of Artificial Sequence: Synthetic oligonucleotide
  Antisense strand to SEQ ID NO: 1979578
uuccuuggaaaccagcuca

SEQ ID NO: 1979580 - RNA, 19 nt, Artificial Sequence
  Description of Artificial Sequence: Synthetic oligonucleotide
  Sense strand starting at position 873 of SEQ ID NO: 1880600
gcugguuuccaaggaacca

SEQ ID NO: 1979581 - RNA, 19 nt, Artificial Sequence
  Description of Artificial Sequence: Synthetic oligonucleotide
  Antisense strand to SEQ ID NO: 1979580
ugguuccuuggaaaccagc

SEQ ID NO: 1979582 - RNA, 19 nt, Artificial Sequence
  Description of Artificial Sequence: Synthetic oligonucleotide
  Sense strand starting at position 962 of SEQ ID NO: 1880600
guuguuaacccacagcuaa

SEQ ID NO: 1979583 - RNA, 19 nt, Artificial Sequence
  Description of Artificial Sequence: Synthetic oligonucleotide
  Antisense strand to SEQ ID NO: 1979582
uuagcuguggguuaacaac

SEQ ID NO: 1979584 - RNA, 19 nt, Artificial Sequence
  Description of Artificial Sequence: Synthetic oligonucleotide
  Sense strand starting at position 979 of SEQ ID NO: 1880600
aagaauaacgcucgacuuu

SEQ ID NO: 1979585 - RNA, 19 nt, Artificial Sequence
  Description of Artificial Sequence: Synthetic oligonucleotide
  Antisense strand to SEQ ID NO: 1979584
aaagucgagcguuauucuu

SEQ ID NO: 1979586 - RNA, 19 nt, Artificial Sequence
  Description of Artificial Sequence: Synthetic oligonucleotide
  Sense strand starting at position 1321 of SEQ ID NO: 1880600
cggcagguucgagguaaau

SEQ ID NO: 1979587 - RNA, 19 nt, Artificial Sequence
  Description of Artificial Sequence: Synthetic oligonucleotide
  Antisense strand to SEQ ID NO: 1979586
auuuaccucgaaccugccg

SEQ ID NO: 1979588 - RNA, 19 nt, Artificial Sequence
  Description of Artificial Sequence: Synthetic oligonucleotide
  Sense strand starting at position 2391 of SEQ ID NO: 1880600
aggcguaagccuucagcca

SEQ ID NO: 1979589 - RNA, 19 nt, Artificial Sequence
  Description of Artificial Sequence: Synthetic oligonucleotide
  Antisense strand to SEQ ID NO: 1979588
uggcugaaggcuuacgccu

SEQ ID NO: 1979590 - RNA, 19 nt, Artificial Sequence
  Description of Artificial Sequence: Synthetic oligonucleotide
  Sense strand starting at position 2471 of SEQ ID NO: 1880600
ccgagaaacgaguaguuua

SEQ ID NO: 1979591 - RNA, 19 nt, Artificial Sequence
  Description of Artificial Sequence: Synthetic oligonucleotide
  Antisense strand to SEQ ID NO: 1979590
uaaacuacucguuucucgg

SEQ ID NO: 1979592 - RNA, 19 nt, Artificial Sequence
  Description of Artificial Sequence: Synthetic oligonucleotide
  Sense strand starting at position 2574 of SEQ ID NO: 1880600
ccucaucgaucuuaaggga

SEQ ID NO: 1979593 - RNA, 19 nt, Artificial Sequence
  Description of Artificial Sequence: Synthetic oligonucleotide
  Antisense strand to SEQ ID NO: 1979592
ucccuuaagaucgaugagg

SEQ ID NO: 1979594 - RNA, 19 nt, Artificial Sequence
  Description of Artificial Sequence: Synthetic oligonucleotide
  Sense strand starting at position 2577 of SEQ ID NO: 1880600
caucgaucuuaagggaaag

SEQ ID NO: 1979595 - RNA, 19 nt, Artificial Sequence
  Description of Artificial Sequence: Synthetic oligonucleotide
  Antisense strand to SEQ ID NO: 1979594
cuuucccuuaagaucgaug

SEQ ID NO: 1979596 - RNA, 19 nt, Artificial Sequence
  Description of Artificial Sequence: Synthetic oligonucleotide
  Sense strand starting at position 2627 of SEQ ID NO: 1880600
gauccaucucccgggauga

SEQ ID NO: 1979597 - RNA, 19 nt, Artificial Sequence
  Description of Artificial Sequence: Synthetic oligonucleotide
  Antisense strand to SEQ ID NO: 1979596
ucaucccgggagauggauc

SEQ ID NO: 1979598 - RNA, 19 nt, Artificial Sequence
  Description of Artificial Sequence: Synthetic oligonucleotide
  Sense strand starting at position 2628 of SEQ ID NO: 1880600
auccaucucccgggaugaa

SEQ ID NO: 1979599 - RNA, 19 nt, Artificial Sequence
  Description of Artificial Sequence: Synthetic oligonucleotide
  Antisense strand to SEQ ID NO: 1979598
uucaucccgggagauggau

SEQ ID NO: 1979600 - RNA, 19 nt, Artificial Sequence
  Description of Artificial Sequence: Synthetic oligonucleotide
  Sense strand starting at position 2691 of SEQ ID NO: 1880600
ggucccuaaugggaauuaa

SEQ ID NO: 1979601 - RNA, 19 nt, Artificial Sequence
  Description of Artificial Sequence: Synthetic oligonucleotide
  Antisense strand to SEQ ID NO: 1979600
uuaauucccauuagggacc

SEQ ID NO: 1979602 - RNA, 19 nt, Artificial Sequence
  Description of Artificial Sequence: Synthetic oligonucleotide
  Sense strand starting at position 2949 of SEQ ID NO: 1880600
ggcccuugcucccuaggaa

SEQ ID NO: 1979603 - RNA, 19 nt, Artificial Sequence
  Description of Artificial Sequence: Synthetic oligonucleotide
  Antisense strand to SEQ ID NO: 1979602
uuccuagggagcaagggcc

SEQ ID NO: 1979604 - RNA, 19 nt, Artificial Sequence
  Description of Artificial Sequence: Synthetic oligonucleotide
  Sense strand starting at position 3003 of SEQ ID NO: 1880600
ucggguaaauccuucccau

SEQ ID NO: 1979605 - RNA, 19 nt, Artificial Sequence
  Description of Artificial Sequence: Synthetic oligonucleotide
  Antisense strand to SEQ ID NO: 1979604
augggaaggauuuacccga

SEQ ID NO: 1979606 - RNA, 19 nt, Artificial Sequence
  Description of Artificial Sequence: Synthetic oligonucleotide
  Sense strand starting at position 3227 of SEQ ID NO: 1880600
ggcugaccacacuaaugua

SEQ ID NO: 1979607 - RNA, 19 nt, Artificial Sequence
  Description of Artificial Sequence: Synthetic oligonucleotide
  Antisense strand to SEQ ID NO: 1979606
uacauuaguguggucagcc

SEQ ID NO: 1979608 - RNA, 19 nt, Artificial Sequence
  Description of Artificial Sequence: Synthetic oligonucleotide
  Sense strand starting at position 3303 of SEQ ID NO: 1880600
cugaaaugaucugauguuu

SEQ ID NO: 1979609 - RNA, 19 nt, Artificial Sequence
  Description of Artificial Sequence: Synthetic oligonucleotide
  Antisense strand to SEQ ID NO: 1979608
aaacaucagaucauuucag

SEQ ID NO: 1979610 - RNA, 19 nt, Artificial Sequence
  Description of Artificial Sequence: Synthetic oligonucleotide
  Sense strand starting at position 3458 of SEQ ID NO: 1880600
gccuuaacuuccguauaac

SEQ ID NO: 1979611 - RNA, 19 nt, Artificial Sequence
  Description of Artificial Sequence: Synthetic oligonucleotide
  Antisense strand to SEQ ID NO: 1979610
guuauacggaaguuaaggc

SEQ ID NO: 1979612 - RNA, 19 nt, Artificial Sequence
  Description of Artificial Sequence: Synthetic oligonucleotide
  Sense strand starting at position 3461 of SEQ ID NO: 1880600
uuaacuuccguauaacuga

SEQ ID NO: 1979613 - RNA, 19 nt, Artificial Sequence
  Description of Artificial Sequence: Synthetic oligonucleotide
  Antisense strand to SEQ ID NO: 1979612
ucaguuauacggaaguuaa

SEQ ID NO: 1979614 - RNA, 19 nt, Artificial Sequence
  Description of Artificial Sequence: Synthetic oligonucleotide
  Sense strand starting at position 3542 of SEQ ID NO: 1880600
auaauaggcucaugauaac

SEQ ID NO: 1979615 - RNA, 19 nt, Artificial Sequence
  Description of Artificial Sequence: Synthetic oligonucleotide
  Antisense strand to SEQ ID NO: 1979614
guuaucaugagccuauuau

SEQ ID NO: 1979616 - RNA, 19 nt, Artificial Sequence
  Description of Artificial Sequence: Synthetic oligonucleotide
  Sense strand starting at position 3562 of SEQ ID NO: 1880600
acaugauaaaggugguagu

SEQ ID NO: 1979617 - RNA, 19 nt, Artificial Sequence
  Description of Artificial Sequence: Synthetic oligonucleotide
  Antisense strand to SEQ ID NO: 1979616
acuaccaccuuuaucaugu

SEQ ID NO: 1979618 - RNA, 19 nt, Artificial Sequence
  Description of Artificial Sequence: Synthetic oligonucleotide
  Sense strand starting at position 3563 of SEQ ID NO: 1880600
caugauaaaggugguagua

SEQ ID NO: 1979619 - RNA, 19 nt, Artificial Sequence
  Description of Artificial Sequence: Synthetic oligonucleotide
  Antisense strand to SEQ ID NO: 1979618
uacuaccaccuuuaucaug

SEQ ID NO: 1979620 - RNA, 19 nt, Artificial Sequence
  Description of Artificial Sequence: Synthetic oligonucleotide
  Sense strand starting at position 3572 of SEQ ID NO: 1880600
ggugguaguagucauuauu

SEQ ID NO: 1979621 - RNA, 19 nt, Artificial Sequence
  Description of Artificial Sequence: Synthetic oligonucleotide
  Antisense strand to SEQ ID NO: 1979620
aauaaugacuacuaccacc

SEQ ID NO: 1979622 - RNA, 19 nt, Artificial Sequence
  Description of Artificial Sequence: Synthetic oligonucleotide
  Sense strand starting at position 3575 of SEQ ID NO: 1880600
gguaguagucauuauuagg

SEQ ID NO: 1979623 - RNA, 19 nt, Artificial Sequence
  Description of Artificial Sequence: Synthetic oligonucleotide
  Antisense strand to SEQ ID NO: 1979622
ccuaauaaugacuacuacc

SEQ ID NO: 1979624 - RNA, 19 nt, Artificial Sequence
  Description of Artificial Sequence: Synthetic oligonucleotide
  Sense strand starting at position 3655 of SEQ ID NO: 1880600
ggcagaugucucugauucu

SEQ ID NO: 1979625 - RNA, 19 nt, Artificial Sequence
  Description of Artificial Sequence: Synthetic oligonucleotide
  Antisense strand to SEQ ID NO: 1979624
agaaucagagacaucugcc

SEQ ID NO: 1979626 - RNA, 19 nt, Artificial Sequence
  Description of Artificial Sequence: Synthetic oligonucleotide
  Sense strand starting at position 3730 of SEQ ID NO: 1880600
uuccaaguauugcugugua

SEQ ID NO: 1979627 - RNA, 19 nt, Artificial Sequence
  Description of Artificial Sequence: Synthetic oligonucleotide
  Antisense strand to SEQ ID NO: 1979626
uacacagcaauacuuggaa

SEQ ID NO: 1979628 - RNA, 19 nt, Artificial Sequence
  Description of Artificial Sequence: Synthetic oligonucleotide
  Sense strand starting at position 3733 of SEQ ID NO: 1880600
caaguauugcuguguacca

SEQ ID NO: 1979629 - RNA, 19 nt, Artificial Sequence
  Description of Artificial Sequence: Synthetic oligonucleotide
  Antisense strand to SEQ ID NO: 1979628
ugguacacagcaauacuug

SEQ ID NO: 1979630 - RNA, 19 nt, Artificial Sequence
  Description of Artificial Sequence: Synthetic oligonucleotide
  Sense strand starting at position 3901 of SEQ ID NO: 1880600
cccaaauggguuugaccua

SEQ ID NO: 1979631 - RNA, 19 nt, Artificial Sequence
  Description of Artificial Sequence: Synthetic oligonucleotide
  Antisense strand to SEQ ID NO: 1979630
uaggucaaacccauuuggg

SEQ ID NO: 1979632 - RNA, 19 nt, Artificial Sequence
  Description of Artificial Sequence: Synthetic oligonucleotide
  Sense strand starting at position 478 of SEQ ID NO: 1880601
cagccauuguucuuaagag

SEQ ID NO: 1979633 - RNA, 19 nt, Artificial Sequence
  Description of Artificial Sequence: Synthetic oligonucleotide
  Antisense strand to SEQ ID NO: 1979632
cucuuaagaacaauggcug

SEQ ID NO: 1979634 - RNA, 19 nt, Artificial Sequence
  Description of Artificial Sequence: Synthetic oligonucleotide
  Sense strand starting at position 543 of SEQ ID NO: 1880601
aaguauuaaugaguuggua

SEQ ID NO: 1979635 - RNA, 19 nt, Artificial Sequence
  Description of Artificial Sequence: Synthetic oligonucleotide
  Antisense strand to SEQ ID NO: 1979634
uaccaacucauuaauacuu

SEQ ID NO: 1979636 - RNA, 19 nt, Artificial Sequence
  Description of Artificial Sequence: Synthetic oligonucleotide
  Sense strand starting at position 545 of SEQ ID NO: 1880601
guauuaaugaguugguagg

SEQ ID NO: 1979637 - RNA, 19 nt, Artificial Sequence
  Description of Artificial Sequence: Synthetic oligonucleotide
  Antisense strand to SEQ ID NO: 1979636
ccuaccaacucauuaauac

SEQ ID NO: 1979638 - RNA, 19 nt, Artificial Sequence
  Description of Artificial Sequence: Synthetic oligonucleotide
  Sense strand starting at position 546 of SEQ ID NO: 1880601
uauuaaugaguugguagga

SEQ ID NO: 1979639 - RNA, 19 nt, Artificial Sequence
  Description of Artificial Sequence: Synthetic oligonucleotide
  Antisense strand to SEQ ID NO: 1979638
uccuaccaacucauuaaua

SEQ ID NO: 1979640 - RNA, 19 nt, Artificial Sequence
  Description of Artificial Sequence: Synthetic oligonucleotide
  Sense strand starting at position 618 of SEQ ID NO: 1880601
ucugucaggccacaauaua

SEQ ID NO: 1979641 - RNA, 19 nt, Artificial Sequence
  Description of Artificial Sequence: Synthetic oligonucleotide
  Antisense strand to SEQ ID NO: 1979640
uauauuguggccugacaga

SEQ ID NO: 1979642 - RNA, 19 nt, Artificial Sequence
  Description of Artificial Sequence: Synthetic oligonucleotide
  Sense strand starting at position 728 of SEQ ID NO: 1880601
agagucauuucuccugugu

SEQ ID NO: 1979643 - RNA, 19 nt, Artificial Sequence
  Description of Artificial Sequence: Synthetic oligonucleotide
  Antisense strand to SEQ ID NO: 1979642
acacaggagaaaugacucu

SEQ ID NO: 1979644 - RNA, 19 nt, Artificial Sequence
  Description of Artificial Sequence: Synthetic oligonucleotide
  Sense strand starting at position 839 of SEQ ID NO: 1880601
auguccuuccuguaagggu

SEQ ID NO: 1979645 - RNA, 19 nt, Artificial Sequence
  Description of Artificial Sequence: Synthetic oligonucleotide
  Antisense strand to SEQ ID NO: 1979644
acccuuacaggaaggacau

SEQ ID NO: 1979646 - RNA, 19 nt, Artificial Sequence
  Description of Artificial Sequence: Synthetic oligonucleotide
  Sense strand starting at position 908 of SEQ ID NO: 1880601
ccaagaaugacaggugguu

SEQ ID NO: 1979647 - RNA, 19 nt, Artificial Sequence
  Description of Artificial Sequence: Synthetic oligonucleotide
  Antisense strand to SEQ ID NO: 1979646
aaccaccugucauucuugg

SEQ ID NO: 1979648 - RNA, 19 nt, Artificial Sequence
  Description of Artificial Sequence: Synthetic oligonucleotide
  Sense strand starting at position 962 of SEQ ID NO: 1880601
caaugcagucuauggaaua

SEQ ID NO: 1979649 - RNA, 19 nt, Artificial Sequence
  Description of Artificial Sequence: Synthetic oligonucleotide
  Antisense strand to SEQ ID NO: 1979648
uauuccauagacugcauug

SEQ ID NO: 1979650 - RNA, 19 nt, Artificial Sequence
  Description of Artificial Sequence: Synthetic oligonucleotide
  Sense strand starting at position 1334 of SEQ ID NO: 1880601
uugaaaguccuuuguaacc

SEQ ID NO: 1979651 - RNA, 19 nt, Artificial Sequence
  Description of Artificial Sequence: Synthetic oligonucleotide
  Antisense strand to SEQ ID NO: 1979650
gguuacaaaggacuuucaa

SEQ ID NO: 1979652 - RNA, 19 nt, Artificial Sequence
  Description of Artificial Sequence: Synthetic oligonucleotide
  Sense strand starting at position 1379 of SEQ ID NO: 1880601
auguaauuuggccggguga

SEQ ID NO: 1979653 - RNA, 19 nt, Artificial Sequence
  Description of Artificial Sequence: Synthetic oligonucleotide
  Antisense strand to SEQ ID NO: 1979652
ucacccggccaaauuacau

SEQ ID NO: 1979654 - RNA, 19 nt, Artificial Sequence
  Description of Artificial Sequence: Synthetic oligonucleotide
  Sense strand starting at position 1791 of SEQ ID NO: 1880601
ugaauaccugcugauguaa

SEQ ID NO: 1979655 - RNA, 19 nt, Artificial Sequence
  Description of Artificial Sequence: Synthetic oligonucleotide
  Antisense strand to SEQ ID NO: 1979654
uuacaucagcagguauuca

SEQ ID NO: 1979656 - RNA, 19 nt, Artificial Sequence
  Description of Artificial Sequence: Synthetic oligonucleotide
  Sense strand starting at position 1917 of SEQ ID NO: 1880601
ggaucguugggugagguua

SEQ ID NO: 1979657 - RNA, 19 nt, Artificial Sequence
  Description of Artificial Sequence: Synthetic oligonucleotide
  Antisense strand to SEQ ID NO: 1979656
uaaccucacccaacgaucc

SEQ ID NO: 1979658 - RNA, 19 nt, Artificial Sequence
  Description of Artificial Sequence: Synthetic oligonucleotide
  Sense strand starting at position 2072 of SEQ ID NO: 1880601
cuaggaaucaagcgagcau

SEQ ID NO: 1979659 - RNA, 19 nt, Artificial Sequence
  Description of Artificial Sequence: Synthetic oligonucleotide
  Antisense strand to SEQ ID NO: 1979658
augcucgcuugauuccuag

SEQ ID NO: 1979660 - RNA, 19 nt, Artificial Sequence
  Description of Artificial Sequence: Synthetic oligonucleotide
  Sense strand starting at position 2106 of SEQ ID NO: 1880601
aggguucgggcgagcuauu

SEQ ID NO: 1979661 - RNA, 19 nt, Artificial Sequence
  Description of Artificial Sequence: Synthetic oligonucleotide
  Antisense strand to SEQ ID NO: 1979660
aauagcucgcccgaacccu

SEQ ID NO: 1979662 - RNA, 19 nt, Artificial Sequence
  Description of Artificial Sequence: Synthetic oligonucleotide
  Sense strand starting at position 2259 of SEQ ID NO: 1880601
uuuguccuuggauaaguuu

SEQ ID NO: 1979663 - RNA, 19 nt, Artificial Sequence
  Description of Artificial Sequence: Synthetic oligonucleotide
  Antisense strand to SEQ ID NO: 1979662
aaacuuauccaaggacaaa

SEQ ID NO: 1979664 - RNA, 19 nt, Artificial Sequence
  Description of Artificial Sequence: Synthetic oligonucleotide
  Sense strand starting at position 2330 of SEQ ID NO: 1880601
gcagcagugcauuagacaa

SEQ ID NO: 1979665 - RNA, 19 nt, Artificial Sequence
  Description of Artificial Sequence: Synthetic oligonucleotide
  Antisense strand to SEQ ID NO: 1979664
uugucuaaugcacugcugc

SEQ ID NO: 1979666 - RNA, 19 nt, Artificial Sequence
  Description of Artificial Sequence: Synthetic oligonucleotide
  Sense strand starting at position 2342 of SEQ ID NO: 1880601
uagacaaaugggcgaagua

SEQ ID NO: 1979667 - RNA, 19 nt, Artificial Sequence
  Description of Artificial Sequence: Synthetic oligonucleotide
  Antisense strand to SEQ ID NO: 1979666
uacuucgcccauuugucua

SEQ ID NO: 1979668 - RNA, 19 nt, Artificial Sequence
  Description of Artificial Sequence: Synthetic oligonucleotide
  Sense strand starting at position 2888 of SEQ ID NO: 1880601
gcaaaucaucaugauuggu

SEQ ID NO: 1979669 - RNA, 19 nt, Artificial Sequence
  Description of Artificial Sequence: Synthetic oligonucleotide
  Antisense strand to SEQ ID NO: 1979668
accaaucaugaugauuugc

SEQ ID NO: 1979670 - RNA, 19 nt, Artificial Sequence
  Description of Artificial Sequence: Synthetic oligonucleotide
  Sense strand starting at position 2890 of SEQ ID NO: 1880601
aaaucaucaugauugguga

SEQ ID NO: 1979671 - RNA, 19 nt, Artificial Sequence
  Description of Artificial Sequence: Synthetic oligonucleotide
  Antisense strand to SEQ ID NO: 1979670
ucaccaaucaugaugauuu

SEQ ID NO: 1979672 - RNA, 19 nt, Artificial Sequence
  Description of Artificial Sequence: Synthetic oligonucleotide
  Sense strand starting at position 2891 of SEQ ID NO: 1880601
aaucaucaugauuggugaa

SEQ ID NO: 1979673 - RNA, 19 nt, Artificial Sequence
  Description of Artificial Sequence: Synthetic oligonucleotide
  Antisense strand to SEQ ID NO: 1979672
uucaccaaucaugaugauu

SEQ ID NO: 1979674 - RNA, 19 nt, Artificial Sequence
  Description of Artificial Sequence: Synthetic oligonucleotide
  Sense strand starting at position 2893 of SEQ ID NO: 1880601
ucaucaugauuggugaaca

SEQ ID NO: 1979675 - RNA, 19 nt, Artificial Sequence
  Description of Artificial Sequence: Synthetic oligonucleotide
  Antisense strand to SEQ ID NO: 1979674
uguucaccaaucaugauga

SEQ ID NO: 1979676 - RNA, 19 nt, Artificial Sequence
  Description of Artificial Sequence: Synthetic oligonucleotide
  Sense strand starting at position 2910 of SEQ ID NO: 1880601
cauugaaacguuugguaau

SEQ ID NO: 1979677 - RNA, 19 nt, Artificial Sequence
  Description of Artificial Sequence: Synthetic oligonucleotide
  Antisense strand to SEQ ID NO: 1979676
auuaccaaacguuucaaug

SEQ ID NO: 1979678 - RNA, 19 nt, Artificial Sequence
  Description of Artificial Sequence: Synthetic oligonucleotide
  Sense strand starting at position 2912 of SEQ ID NO: 1880601
uugaaacguuugguaauau

SEQ ID NO: 1979679 - RNA, 19 nt, Artificial Sequence
  Description of Artificial Sequence: Synthetic oligonucleotide
  Antisense strand to SEQ ID NO: 1979678
auauuaccaaacguuucaa

SEQ ID NO: 1979680 - RNA, 19 nt, Artificial Sequence
  Description of Artificial Sequence: Synthetic oligonucleotide
  Sense strand starting at position 2999 of SEQ ID NO: 1880601
auccuuagugguuaucaaa

SEQ ID NO: 1979681 - RNA, 19 nt, Artificial Sequence
  Description of Artificial Sequence: Synthetic oligonucleotide
  Antisense strand to SEQ ID NO: 1979680
uuugauaaccacuaaggau

SEQ ID NO: 1979682 - RNA, 19 nt, Artificial Sequence
  Description of Artificial Sequence: Synthetic oligonucleotide
  Sense strand starting at position 3102 of SEQ ID NO: 1880601
guaauauguguaugagauu

SEQ ID NO: 1979683 - RNA, 19 nt, Artificial Sequence
  Description of Artificial Sequence: Synthetic oligonucleotide
  Antisense strand to SEQ ID NO: 1979682
aaucucauacacauauuac

SEQ ID NO: 1979684 - RNA, 19 nt, Artificial Sequence
  Description of Artificial Sequence: Synthetic oligonucleotide
  Sense strand starting at position 3108 of SEQ ID NO: 1880601
uguguaugagauuauugau

SEQ ID NO: 1979685 - RNA, 19 nt, Artificial Sequence
  Description of Artificial Sequence: Synthetic oligonucleotide
  Antisense strand to SEQ ID NO: 1979684
aucaauaaucucauacaca

SEQ ID NO: 1979686 - RNA, 19 nt, Artificial Sequence
  Description of Artificial Sequence: Synthetic oligonucleotide
  Sense strand starting at position 3146 of SEQ ID NO: 1880601
aaacuacgugaguauccau

SEQ ID NO: 1979687 - RNA, 19 nt, Artificial Sequence
  Description of Artificial Sequence: Synthetic oligonucleotide
  Antisense strand to SEQ ID NO: 1979686
auggauacucacguaguuu

SEQ ID NO: 1979688 - RNA, 19 nt, Artificial Sequence
  Description of Artificial Sequence: Synthetic oligonucleotide
  Sense strand starting at position 3234 of SEQ ID NO: 1880601
aggaaucaguucccaacau

SEQ ID NO: 1979689 - RNA, 19 nt, Artificial Sequence
  Description of Artificial Sequence: Synthetic oligonucleotide
  Antisense strand to SEQ ID NO: 1979688
auguugggaacugauuccu

SEQ ID NO: 1979690 - RNA, 19 nt, Artificial Sequence
  Description of Artificial Sequence: Synthetic oligonucleotide
  Sense strand starting at position 3259 of SEQ ID NO: 1880601
guggaaccaucucuagcau

SEQ ID NO: 1979691 - RNA, 19 nt, Artificial Sequence
  Description of Artificial Sequence: Synthetic oligonucleotide
  Antisense strand to SEQ ID NO: 1979690
augcuagagaugguuccac

SEQ ID NO: 1979692 - RNA, 19 nt, Artificial Sequence
  Description of Artificial Sequence: Synthetic oligonucleotide
  Sense strand starting at position 3260 of SEQ ID NO: 1880601
uggaaccaucucuagcaua

SEQ ID NO: 1979693 - RNA, 19 nt, Artificial Sequence
  Description of Artificial Sequence: Synthetic oligonucleotide
  Antisense strand to SEQ ID NO: 1979692
uaugcuagagaugguucca

SEQ ID NO: 1979694 - RNA, 19 nt, Artificial Sequence
  Description of Artificial Sequence: Synthetic oligonucleotide
  Sense strand starting at position 3304 of SEQ ID NO: 1880601
ugccaaacaguguauaaau

SEQ ID NO: 1979695 - RNA, 19 nt, Artificial Sequence
  Description of Artificial Sequence: Synthetic oligonucleotide
  Antisense strand to SEQ ID NO: 1979694
auuuauacacuguuuggca

SEQ ID NO: 1979696 - RNA, 19 nt, Artificial Sequence
  Description of Artificial Sequence: Synthetic oligonucleotide
  Sense strand starting at position 3352 of SEQ ID NO: 1880601
agagucauaugauccuuau

SEQ ID NO: 1979697 - RNA, 19 nt, Artificial Sequence
  Description of Artificial Sequence: Synthetic oligonucleotide
  Antisense strand to SEQ ID NO: 1979696
auaaggaucauaugacucu

SEQ ID NO: 1979698 - RNA, 19 nt, Artificial Sequence
  Description of Artificial Sequence: Synthetic oligonucleotide
  Sense strand starting at position 3384 of SEQ ID NO: 1880601
cuggcaauauacucaagaa

SEQ ID NO: 1979699 - RNA, 19 nt, Artificial Sequence
  Description of Artificial Sequence: Synthetic oligonucleotide
  Antisense strand to SEQ ID NO: 1979698
uucuugaguauauugccag

SEQ ID NO: 1979700 - RNA, 19 nt, Artificial Sequence
  Description of Artificial Sequence: Synthetic oligonucleotide
  Sense strand starting at position 3403 of SEQ ID NO: 1880601
acuaauagucaugguuucu

SEQ ID NO: 1979701 - RNA, 19 nt, Artificial Sequence
  Description of Artificial Sequence: Synthetic oligonucleotide
  Antisense strand to SEQ ID NO: 1979700
agaaaccaugacuauuagu

SEQ ID NO: 1979702 - RNA, 19 nt, Artificial Sequence
  Description of Artificial Sequence: Synthetic oligonucleotide
  Sense strand starting at position 3408 of SEQ ID NO: 1880601
uagucaugguuucuuauga

SEQ ID NO: 1979703 - RNA, 19 nt, Artificial Sequence
  Description of Artificial Sequence: Synthetic oligonucleotide
  Antisense strand to SEQ ID NO: 1979702
ucauaagaaaccaugacua

SEQ ID NO: 1979704 - RNA, 19 nt, Artificial Sequence
  Description of Artificial Sequence: Synthetic oligonucleotide
  Sense strand starting at position 3451 of SEQ ID NO: 1880601
gugagagacuucucaaugu

SEQ ID NO: 1979705 - RNA, 19 nt, Artificial Sequence
  Description of Artificial Sequence: Synthetic oligonucleotide
  Antisense strand to SEQ ID NO: 1979704
acauugagaagucucucac

SEQ ID NO: 1979706 - RNA, 19 nt, Artificial Sequence
  Description of Artificial Sequence: Synthetic oligonucleotide
  Sense strand starting at position 3490 of SEQ ID NO: 1880601
gaauuaucugaaugcuguu

SEQ ID NO: 1979707 - RNA, 19 nt, Artificial Sequence
  Description of Artificial Sequence: Synthetic oligonucleotide
  Antisense strand to SEQ ID NO: 1979706
aacagcauucagauaauuc

SEQ ID NO: 1979708 - RNA, 19 nt, Artificial Sequence
  Description of Artificial Sequence: Synthetic oligonucleotide
  Sense strand starting at position 3766 of SEQ ID NO: 1880601
ggagaauugaaucgcuuga

SEQ ID NO: 1979709 - RNA, 19 nt, Artificial Sequence
  Description of Artificial Sequence: Synthetic oligonucleotide
  Antisense strand to SEQ ID NO: 1979708
ucaagcgauucaauucucc

SEQ ID NO: 1979710 - RNA, 19 nt, Artificial Sequence
  Description of Artificial Sequence: Synthetic oligonucleotide
  Sense strand starting at position 3768 of SEQ ID NO: 1880601
agaauugaaucgcuugaac

SEQ ID NO: 1979711 - RNA, 19 nt, Artificial Sequence
  Description of Artificial Sequence: Synthetic oligonucleotide
  Antisense strand to SEQ ID NO: 1979710
guucaagcgauucaauucu

SEQ ID NO: 1979712 - RNA, 19 nt, Artificial Sequence
  Description of Artificial Sequence: Synthetic oligonucleotide
  Sense strand starting at position 23 of SEQ ID NO: 1880602
ggcgguuguccucuguaga

SEQ ID NO: 1979713 - RNA, 19 nt, Artificial Sequence
  Description of Artificial Sequence: Synthetic oligonucleotide
  Antisense strand to SEQ ID NO: 1979712
ucuacagaggacaaccgcc

SEQ ID NO: 1979714 - RNA, 19 nt, Artificial Sequence
  Description of Artificial Sequence: Synthetic oligonucleotide
  Sense strand starting at position 299 of SEQ ID NO: 1880602
ccuccuuguccacaggaga

SEQ ID NO: 1979715 - RNA, 19 nt, Artificial Sequence
  Description of Artificial Sequence: Synthetic oligonucleotide
  Antisense strand to SEQ ID NO: 1979714
ucuccuguggacaaggagg

SEQ ID NO: 1979716 - RNA, 19 nt, Artificial Sequence
  Description of Artificial Sequence: Synthetic oligonucleotide
  Sense strand starting at position 1258 of SEQ ID NO: 1880602
ugaguuugcagauaucugu

SEQ ID NO: 1979717 - RNA, 19 nt, Artificial Sequence
  Description of Artificial Sequence: Synthetic oligonucleotide
  Antisense strand to SEQ ID NO: 1979716
acagauaucugcaaacuca

SEQ ID NO: 1979718 - RNA, 19 nt, Artificial Sequence
  Description of Artificial Sequence: Synthetic oligonucleotide
  Sense strand starting at position 1267 of SEQ ID NO: 1880602
agauaucuguuugccaaag

SEQ ID NO: 1979719 - RNA, 19 nt, Artificial Sequence
  Description of Artificial Sequence: Synthetic oligonucleotide
  Antisense strand to SEQ ID NO: 1979718
cuuuggcaaacagauaucu

SEQ ID NO: 1979720 - RNA, 19 nt, Artificial Sequence
  Description of Artificial Sequence: Synthetic oligonucleotide
  Sense strand starting at position 1521 of SEQ ID NO: 1880602
augugcuuccaagacggua

SEQ ID NO: 1979721 - RNA, 19 nt, Artificial Sequence
  Description of Artificial Sequence: Synthetic oligonucleotide
  Antisense strand to SEQ ID NO: 1979720
uaccgucuuggaagcacau

SEQ ID NO: 1979722 - RNA, 19 nt, Artificial Sequence
  Description of Artificial Sequence: Synthetic oligonucleotide
  Sense strand starting at position 1562 of SEQ ID NO: 1880602
uccacuuuccuauacguuu

SEQ ID NO: 1979723 - RNA, 19 nt, Artificial Sequence
  Description of Artificial Sequence: Synthetic oligonucleotide
  Antisense strand to SEQ ID NO: 1979722
aaacguauaggaaagugga

SEQ ID NO: 1979724 - RNA, 19 nt, Artificial Sequence
  Description of Artificial Sequence: Synthetic oligonucleotide
  Sense strand starting at position 1571 of SEQ ID NO: 1880602
cuauacguuuacucaauga

SEQ ID NO: 1979725 - RNA, 19 nt, Artificial Sequence
  Description of Artificial Sequence: Synthetic oligonucleotide
  Antisense strand to SEQ ID NO: 1979724
ucauugaguaaacguauag

SEQ ID NO: 1979726 - RNA, 19 nt, Artificial Sequence
  Description of Artificial Sequence: Synthetic oligonucleotide
  Sense strand starting at position 1622 of SEQ ID NO: 1880602
ggcagcuuccaacacauua

SEQ ID NO: 1979727 - RNA, 19 nt, Artificial Sequence
  Description of Artificial Sequence: Synthetic oligonucleotide
  Antisense strand to SEQ ID NO: 1979726
uaauguguuggaagcugcc

SEQ ID NO: 1979728 - RNA, 19 nt, Artificial Sequence
  Description of Artificial Sequence: Synthetic oligonucleotide
  Sense strand starting at position 1768 of SEQ ID NO: 1880602
cccucuaaguaguuuaaag

SEQ ID NO: 1979729 - RNA, 19 nt, Artificial Sequence
  Description of Artificial Sequence: Synthetic oligonucleotide
  Antisense strand to SEQ ID NO: 1979728
cuuuaaacuacuuagaggg

SEQ ID NO: 1979730 - RNA, 19 nt, Artificial Sequence
  Description of Artificial Sequence: Synthetic oligonucleotide
  Sense strand starting at position 1770 of SEQ ID NO: 1880602
cucuaaguaguuuaaagac

SEQ ID NO: 1979731 - RNA, 19 nt, Artificial Sequence
  Description of Artificial Sequence: Synthetic oligonucleotide
  Antisense strand to SEQ ID NO: 1979730
gucuuuaaacuacuuagag

SEQ ID NO: 1979732 - RNA, 19 nt, Artificial Sequence
  Description of Artificial Sequence: Synthetic oligonucleotide
  Sense strand starting at position 1776 of SEQ ID NO: 1880602
guaguuuaaagacauaugu

SEQ ID NO: 1979733 - RNA, 19 nt, Artificial Sequence
  Description of Artificial Sequence: Synthetic oligonucleotide
  Antisense strand to SEQ ID NO: 1979732
acauaugucuuuaaacuac

SEQ ID NO: 1979734 - RNA, 19 nt, Artificial Sequence
  Description of Artificial Sequence: Synthetic oligonucleotide
  Sense strand starting at position 1815 of SEQ ID NO: 1880602
acgcgugugcauguauaua

SEQ ID NO: 1979735 - RNA, 19 nt, Artificial Sequence
  Description of Artificial Sequence: Synthetic oligonucleotide
  Antisense strand to SEQ ID NO: 1979734
uauauacaugcacacgcgu

SEQ ID NO: 1979736 - RNA, 19 nt, Artificial Sequence
  Description of Artificial Sequence: Synthetic oligonucleotide
  Sense strand starting at position 1858 of SEQ ID NO: 1880602
ugguaaagguaauuaacua

SEQ ID NO: 1979737 - RNA, 19 nt, Artificial Sequence
  Description of Artificial Sequence: Synthetic oligonucleotide
  Antisense strand to SEQ ID NO: 1979736
uaguuaauuaccuuuacca

SEQ ID NO: 1979738 - RNA, 19 nt, Artificial Sequence
  Description of Artificial Sequence: Synthetic oligonucleotide
  Sense strand starting at position 2027 of SEQ ID NO: 1880602
aauuguugccaagagcuca

SEQ ID NO: 1979739 - RNA, 19 nt, Artificial Sequence
  Description of Artificial Sequence: Synthetic oligonucleotide
  Antisense strand to SEQ ID NO: 1979738
ugagcucuuggcaacaauu

SEQ ID NO: 1979740 - RNA, 19 nt, Artificial Sequence
  Description of Artificial Sequence: Synthetic oligonucleotide
  Sense strand starting at position 2117 of SEQ ID NO: 1880602
ccauguucugcuuaccuca

SEQ ID NO: 1979741 - RNA, 19 nt, Artificial Sequence
  Description of Artificial Sequence: Synthetic oligonucleotide
  Antisense strand to SEQ ID NO: 1979740
ugagguaagcagaacaugg

SEQ ID NO: 1979742 - RNA, 19 nt, Artificial Sequence
  Description of Artificial Sequence: Synthetic oligonucleotide
  Sense strand starting at position 2189 of SEQ ID NO: 1880602
gagucauaaugagaagaaa

SEQ ID NO: 1979743 - RNA, 19 nt, Artificial Sequence
  Description of Artificial Sequence: Synthetic oligonucleotide
  Antisense strand to SEQ ID NO: 1979742
uuucuucucauuaugacuc

SEQ ID NO: 1979744 - RNA, 19 nt, Artificial Sequence
  Description of Artificial Sequence: Synthetic oligonucleotide
  Sense strand starting at position 2202 of SEQ ID NO: 1880602
aagaaaugcuaccucggua

SEQ ID NO: 1979745 - RNA, 19 nt, Artificial Sequence
  Description of Artificial Sequence: Synthetic oligonucleotide
  Antisense strand to SEQ ID NO: 1979744
uaccgagguagcauuucuu

SEQ ID NO: 1979746 - RNA, 19 nt, Artificial Sequence
  Description of Artificial Sequence: Synthetic oligonucleotide
  Sense strand starting at position 2446 of SEQ ID NO: 1880602
cagguugugcgugugaaua

SEQ ID NO: 1979747 - RNA, 19 nt, Artificial Sequence
  Description of Artificial Sequence: Synthetic oligonucleotide
  Antisense strand to SEQ ID NO: 1979746
uauucacacgcacaaccug

SEQ ID NO: 1979748 - RNA, 19 nt, Artificial Sequence
  Description of Artificial Sequence: Synthetic oligonucleotide
  Sense strand starting at position 2458 of SEQ ID NO: 1880602
gugaauaaugaaggcaauu

SEQ ID NO: 1979749 - RNA, 19 nt, Artificial Sequence
  Description of Artificial Sequence: Synthetic oligonucleotide
  Antisense strand to SEQ ID NO: 1979748
aauugccuucauuauucac

SEQ ID NO: 1979750 - RNA, 19 nt, Artificial Sequence
  Description of Artificial Sequence: Synthetic oligonucleotide
  Sense strand starting at position 2500 of SEQ ID NO: 1880602
cuuggcgaucuuuagaaac

SEQ ID NO: 1979751 - RNA, 19 nt, Artificial Sequence
  Description of Artificial Sequence: Synthetic oligonucleotide
  Antisense strand to SEQ ID NO: 1979750
guuucuaaagaucgccaag

SEQ ID NO: 1979752 - RNA, 19 nt, Artificial Sequence
  Description of Artificial Sequence: Synthetic oligonucleotide
  Sense strand starting at position 2635 of SEQ ID NO: 1880602
cccucugucccugagucau

SEQ ID NO: 1979753 - RNA, 19 nt, Artificial Sequence
  Description of Artificial Sequence: Synthetic oligonucleotide
  Antisense strand to SEQ ID NO: 1979752
augacucagggacagaggg

SEQ ID NO: 1979754 - RNA, 19 nt, Artificial Sequence
  Description of Artificial Sequence: Synthetic oligonucleotide
  Sense strand starting at position 2662 of SEQ ID NO: 1880602
gcuacugaacuguaaauag

SEQ ID NO: 1979755 - RNA, 19 nt, Artificial Sequence
  Description of Artificial Sequence: Synthetic oligonucleotide
  Antisense strand to SEQ ID NO: 1979754
cuauuuacaguucaguagc

SEQ ID NO: 1979756 - RNA, 19 nt, Artificial Sequence
  Description of Artificial Sequence: Synthetic oligonucleotide
  Sense strand starting at position 2799 of SEQ ID NO: 1880602
gugacugugaugcagaaca

SEQ ID NO: 1979757 - RNA, 19 nt, Artificial Sequence
  Description of Artificial Sequence: Synthetic oligonucleotide
  Antisense strand to SEQ ID NO: 1979756
uguucugcaucacagucac

SEQ ID NO: 1979758 - RNA, 19 nt, Artificial Sequence
  Description of Artificial Sequence: Synthetic oligonucleotide
  Sense strand starting at position 2820 of SEQ ID NO: 1880602
gaaggagaguggguguuaa

SEQ ID NO: 1979759 - RNA, 19 nt, Artificial Sequence
  Description of Artificial Sequence: Synthetic oligonucleotide
  Antisense strand to SEQ ID NO: 1979758
uuaacacccacucuccuuc

SEQ ID NO: 1979760 - RNA, 19 nt, Artificial Sequence
  Description of Artificial Sequence: Synthetic oligonucleotide
  Sense strand starting at position 2831 of SEQ ID NO: 1880602
gguguuaaccuugagccua

SEQ ID NO: 1979761 - RNA, 19 nt, Artificial Sequence
  Description of Artificial Sequence: Synthetic oligonucleotide
  Antisense strand to SEQ ID NO: 1979760
uaggcucaagguuaacacc

SEQ ID NO: 1979762 - RNA, 19 nt, Artificial Sequence
  Description of Artificial Sequence: Synthetic oligonucleotide
  Sense strand starting at position 3039 of SEQ ID NO: 1880602
ucugaauuccuuugacugu

SEQ ID NO: 1979763 - RNA, 19 nt, Artificial Sequence
  Description of Artificial Sequence: Synthetic oligonucleotide
  Antisense strand to SEQ ID NO: 1979762
acagucaaaggaauucaga

SEQ ID NO: 1979764 - RNA, 19 nt, Artificial Sequence
  Description of Artificial Sequence: Synthetic oligonucleotide
  Sense strand starting at position 3075 of SEQ ID NO: 1880602
cacagugacagguguguaa

SEQ ID NO: 1979765 - RNA, 19 nt, Artificial Sequence
  Description of Artificial Sequence: Synthetic oligonucleotide
  Antisense strand to SEQ ID NO: 1979764
uuacacaccugucacugug

SEQ ID NO: 1979766 - RNA, 19 nt, Artificial Sequence
  Description of Artificial Sequence: Synthetic oligonucleotide
  Sense strand starting at position 3129 of SEQ ID NO: 1880602
aguguuaucaccuguagaa

SEQ ID NO: 1979767 - RNA, 19 nt, Artificial Sequence
  Description of Artificial Sequence: Synthetic oligonucleotide
  Antisense strand to SEQ ID NO: 1979766
uucuacaggugauaacacu

SEQ ID NO: 1979768 - RNA, 19 nt, Artificial Sequence
  Description of Artificial Sequence: Synthetic oligonucleotide
  Sense strand starting at position 3164 of SEQ ID NO: 1880602
acauacuuuggagguaagu

SEQ ID NO: 1979769 - RNA, 19 nt, Artificial Sequence
  Description of Artificial Sequence: Synthetic oligonucleotide
  Antisense strand to SEQ ID NO: 1979768
acuuaccuccaaaguaugu

SEQ ID NO: 1979770 - RNA, 19 nt, Artificial Sequence
  Description of Artificial Sequence: Synthetic oligonucleotide
  Sense strand starting at position 3166 of SEQ ID NO: 1880602
auacuuuggagguaagugu

SEQ ID NO: 1979771 - RNA, 19 nt, Artificial Sequence
  Description of Artificial Sequence: Synthetic oligonucleotide
  Antisense strand to SEQ ID NO: 1979770
acacuuaccuccaaaguau

SEQ ID NO: 1979772 - RNA, 19 nt, Artificial Sequence
  Description of Artificial Sequence: Synthetic oligonucleotide
  Sense strand starting at position 3175 of SEQ ID NO: 1880602
agguaaguguagguuccaa

SEQ ID NO: 1979773 - RNA, 19 nt, Artificial Sequence
  Description of Artificial Sequence: Synthetic oligonucleotide
  Antisense strand to SEQ ID NO: 1979772
uuggaaccuacacuuaccu

SEQ ID NO: 1979774 - RNA, 19 nt, Artificial Sequence
  Description of Artificial Sequence: Synthetic oligonucleotide
  Sense strand starting at position 3364 of SEQ ID NO: 1880602
gagagucaaugagcaaaua

SEQ ID NO: 1979775 - RNA, 19 nt, Artificial Sequence
  Description of Artificial Sequence: Synthetic oligonucleotide
  Antisense strand to SEQ ID NO: 1979774
uauuugcucauugacucuc

SEQ ID NO: 1979776 - RNA, 19 nt, Artificial Sequence
  Description of Artificial Sequence: Synthetic oligonucleotide
  Sense strand starting at position 3421 of SEQ ID NO: 1880602
uggguugagagcuagcuau

SEQ ID NO: 1979777 - RNA, 19 nt, Artificial Sequence
  Description of Artificial Sequence: Synthetic oligonucleotide
  Antisense strand to SEQ ID NO: 1979776
auagcuagcucucaaccca

SEQ ID NO: 1979778 - RNA, 19 nt, Artificial Sequence
  Description of Artificial Sequence: Synthetic oligonucleotide
  Sense strand starting at position 3461 of SEQ ID NO: 1880602
uaauguugugcugugcaua

SEQ ID NO: 1979779 - RNA, 19 nt, Artificial Sequence
  Description of Artificial Sequence: Synthetic oligonucleotide
  Antisense strand to SEQ ID NO: 1979778
uaugcacagcacaacauua

SEQ ID NO: 1979780 - RNA, 19 nt, Artificial Sequence
  Description of Artificial Sequence: Synthetic oligonucleotide
  Sense strand starting at position 3592 of SEQ ID NO: 1880602
gcgggcauagcaagaguuu

SEQ ID NO: 1979781 - RNA, 19 nt, Artificial Sequence
  Description of Artificial Sequence: Synthetic oligonucleotide
  Antisense strand to SEQ ID NO: 1979780
aaacucuugcuaugcccgc

SEQ ID NO: 1979782 - RNA, 19 nt, Artificial Sequence
  Description of Artificial Sequence: Synthetic oligonucleotide
  Sense strand starting at position 3738 of SEQ ID NO: 1880602
ccagaaaggugcuuggaag

SEQ ID NO: 1979783 - RNA, 19 nt, Artificial Sequence
  Description of Artificial Sequence: Synthetic oligonucleotide
  Antisense strand to SEQ ID NO: 1979782
cuuccaagcaccuuucugg

SEQ ID NO: 1979784 - RNA, 19 nt, Artificial Sequence
  Description of Artificial Sequence: Synthetic oligonucleotide
  Sense strand starting at position 3767 of SEQ ID NO: 1880602
caagauguugcacacaguu

SEQ ID NO: 1979785 - RNA, 19 nt, Artificial Sequence
  Description of Artificial Sequence: Synthetic oligonucleotide
  Antisense strand to SEQ ID NO: 1979784
aacugugugcaacaucuug

SEQ ID NO: 1979786 - RNA, 19 nt, Artificial Sequence
  Description of Artificial Sequence: Synthetic oligonucleotide
  Sense strand starting at position 3854 of SEQ ID NO: 1880602
gucucauuuguugguuuga

SEQ ID NO: 1979787 - RNA, 19 nt, Artificial Sequence
  Description of Artificial Sequence: Synthetic oligonucleotide
  Antisense strand to SEQ ID NO: 1979786
ucaaaccaacaaaugagac

SEQ ID NO: 1979788 - RNA, 19 nt, Artificial Sequence
  Description of Artificial Sequence: Synthetic oligonucleotide
  Sense strand starting at position 3855 of SEQ ID NO: 1880602
ucucauuuguugguuugau

SEQ ID NO: 1979789 - RNA, 19 nt, Artificial Sequence
  Description of Artificial Sequence: Synthetic oligonucleotide
  Antisense strand to SEQ ID NO: 1979788
aucaaaccaacaaaugaga

SEQ ID NO: 1979790 - RNA, 19 nt, Artificial Sequence
  Description of Artificial Sequence: Synthetic oligonucleotide
  Sense strand starting at position 3856 of SEQ ID NO: 1880602
cucauuuguugguuugauc

SEQ ID NO: 1979791 - RNA, 19 nt, Artificial Sequence
  Description of Artificial Sequence: Synthetic oligonucleotide
  Antisense strand to SEQ ID NO: 1979790
gaucaaaccaacaaaugag

SEQ ID NO: 1979792 - RNA, 19 nt, Artificial Sequence
  Description of Artificial Sequence: Synthetic oligonucleotide
  Sense strand starting at position 287 of SEQ ID NO: 1880603
acauguuaacgugagaccu

SEQ ID NO: 1979793 - RNA, 19 nt, Artificial Sequence
  Description of Artificial Sequence: Synthetic oligonucleotide
  Antisense strand to SEQ ID NO: 1979792
aggucucacguuaacaugu

SEQ ID NO: 1979794 - RNA, 19 nt, Artificial Sequence
  Description of Artificial Sequence: Synthetic oligonucleotide
  Sense strand starting at position 813 of SEQ ID NO: 1880603
uguguaaauuauccauuac

SEQ ID NO: 1979795 - RNA, 19 nt, Artificial Sequence
  Description of Artificial Sequence: Synthetic oligonucleotide
  Antisense strand to SEQ ID NO: 1979794
guaauggauaauuuacaca

SEQ ID NO: 1979796 - RNA, 19 nt, Artificial Sequence
  Description of Artificial Sequence: Synthetic oligonucleotide
  Sense strand starting at position 857 of SEQ ID NO: 1880603
ccaugaaauugggcauauc

SEQ ID NO: 1979797 - RNA, 19 nt, Artificial Sequence
  Description of Artificial Sequence: Synthetic oligonucleotide
  Antisense strand to SEQ ID NO: 1979796
gauaugcccaauuucaugg

SEQ ID NO: 1979798 - RNA, 19 nt, Artificial Sequence
  Description of Artificial Sequence: Synthetic oligonucleotide
  Sense strand starting at position 899 of SEQ ID NO: 1880603
uaauucuuuguggguggaa

SEQ ID NO: 1979799 - RNA, 19 nt, Artificial Sequence
  Description of Artificial Sequence: Synthetic oligonucleotide
  Antisense strand to SEQ ID NO: 1979798
uuccacccacaaagaauua

SEQ ID NO: 1979800 - RNA, 19 nt, Artificial Sequence
  Description of Artificial Sequence: Synthetic oligonucleotide
  Sense strand starting at position 938 of SEQ ID NO: 1880603
caugcuuuacagugacaag

SEQ ID NO: 1979801 - RNA, 19 nt, Artificial Sequence
  Description of Artificial Sequence: Synthetic oligonucleotide
  Antisense strand to SEQ ID NO: 1979800
cuugucacuguaaagcaug

SEQ ID NO: 1979802 - RNA, 19 nt, Artificial Sequence
  Description of Artificial Sequence: Synthetic oligonucleotide
  Sense strand starting at position 1068 of SEQ ID NO: 1880603
uuuaucuaggaacguaauu

SEQ ID NO: 1979803 - RNA, 19 nt, Artificial Sequence
  Description of Artificial Sequence: Synthetic oligonucleotide
  Antisense strand to SEQ ID NO: 1979802
aauuacguuccuagauaaa

SEQ ID NO: 1979804 - RNA, 19 nt, Artificial Sequence
  Description of Artificial Sequence: Synthetic oligonucleotide
  Sense strand starting at position 1080 of SEQ ID NO: 1880603
cguaauuuguuucugagug

SEQ ID NO: 1979805 - RNA, 19 nt, Artificial Sequence
  Description of Artificial Sequence: Synthetic oligonucleotide
  Antisense strand to SEQ ID NO: 1979804
cacucagaaacaaauuacg

SEQ ID NO: 1979806 - RNA, 19 nt, Artificial Sequence
  Description of Artificial Sequence: Synthetic oligonucleotide
  Sense strand starting at position 1132 of SEQ ID NO: 1880603
uccauuauuccguaugacu

SEQ ID NO: 1979807 - RNA, 19 nt, Artificial Sequence
  Description of Artificial Sequence: Synthetic oligonucleotide
  Antisense strand to SEQ ID NO: 1979806
agucauacggaauaaugga

SEQ ID NO: 1979808 - RNA, 19 nt, Artificial Sequence
  Description of Artificial Sequence: Synthetic oligonucleotide
  Sense strand starting at position 2347 of SEQ ID NO: 1880603
aggccuagaucugcaggaa

SEQ ID NO: 1979809 - RNA, 19 nt, Artificial Sequence
  Description of Artificial Sequence: Synthetic oligonucleotide
  Antisense strand to SEQ ID NO: 1979808
uuccugcagaucuaggccu

SEQ ID NO: 1979810 - RNA, 19 nt, Artificial Sequence
  Description of Artificial Sequence: Synthetic oligonucleotide
  Sense strand starting at position 2348 of SEQ ID NO: 1880603
ggccuagaucugcaggaag

SEQ ID NO: 1979811 - RNA, 19 nt, Artificial Sequence
  Description of Artificial Sequence: Synthetic oligonucleotide
  Antisense strand to SEQ ID NO: 1979810
cuuccugcagaucuaggcc

SEQ ID NO: 1979812 - RNA, 19 nt, Artificial Sequence
  Description of Artificial Sequence: Synthetic oligonucleotide
  Sense strand starting at position 2351 of SEQ ID NO: 1880603
cuagaucugcaggaagcau

SEQ ID NO: 1979813 - RNA, 19 nt, Artificial Sequence
  Description of Artificial Sequence: Synthetic oligonucleotide
  Antisense strand to SEQ ID NO: 1979812
augcuuccugcagaucuag

SEQ ID NO: 1979814 - RNA, 19 nt, Artificial Sequence
  Description of Artificial Sequence: Synthetic oligonucleotide
  Sense strand starting at position 2369 of SEQ ID NO: 1880603
ucccgaguucuccuagcgu

SEQ ID NO: 1979815 - RNA, 19 nt, Artificial Sequence
  Description of Artificial Sequence: Synthetic oligonucleotide
  Antisense strand to SEQ ID NO: 1979814
acgcuaggagaacucggga

SEQ ID NO: 1979816 - RNA, 19 nt, Artificial Sequence
  Description of Artificial Sequence: Synthetic oligonucleotide
  Sense strand starting at position 2634 of SEQ ID NO: 1880603
uagggaguuauggguaauc

SEQ ID NO: 1979817 - RNA, 19 nt, Artificial Sequence
  Description of Artificial Sequence: Synthetic oligonucleotide
  Antisense strand to SEQ ID NO: 1979816
gauuacccauaacucccua

SEQ ID NO: 1979818 - RNA, 19 nt, Artificial Sequence
  Description of Artificial Sequence: Synthetic oligonucleotide
  Sense strand starting at position 2636 of SEQ ID NO: 1880603
gggaguuauggguaaucuc

SEQ ID NO: 1979819 - RNA, 19 nt, Artificial Sequence
  Description of Artificial Sequence: Synthetic oligonucleotide
  Antisense strand to SEQ ID NO: 1979818
gagauuacccauaacuccc

SEQ ID NO: 1979820 - RNA, 19 nt, Artificial Sequence
  Description of Artificial Sequence: Synthetic oligonucleotide
  Sense strand starting at position 2729 of SEQ ID NO: 1880603
cugugaggugucguuucua

SEQ ID NO: 1979821 - RNA, 19 nt, Artificial Sequence
  Description of Artificial Sequence: Synthetic oligonucleotide
  Antisense strand to SEQ ID NO: 1979820
uagaaacgacaccucacag

SEQ ID NO: 1979822 - RNA, 19 nt, Artificial Sequence
  Description of Artificial Sequence: Synthetic oligonucleotide
  Sense strand starting at position 2732 of SEQ ID NO: 1880603
ugaggugucguuucuaugu

SEQ ID NO: 1979823 - RNA, 19 nt, Artificial Sequence
  Description of Artificial Sequence: Synthetic oligonucleotide
  Antisense strand to SEQ ID NO: 1979822
acauagaaacgacaccuca

SEQ ID NO: 1979824 - RNA, 19 nt, Artificial Sequence
  Description of Artificial Sequence: Synthetic oligonucleotide
  Sense strand starting at position 2735 of SEQ ID NO: 1880603
ggugucguuucuauguuga

SEQ ID NO: 1979825 - RNA, 19 nt, Artificial Sequence
  Description of Artificial Sequence: Synthetic oligonucleotide
  Antisense strand to SEQ ID NO: 1979824
ucaacauagaaacgacacc

SEQ ID NO: 1979826 - RNA, 19 nt, Artificial Sequence
  Description of Artificial Sequence: Synthetic oligonucleotide
  Sense strand starting at position 2740 of SEQ ID NO: 1880603
cguuucuauguugagaaua

SEQ ID NO: 1979827 - RNA, 19 nt, Artificial Sequence
  Description of Artificial Sequence: Synthetic oligonucleotide
  Antisense strand to SEQ ID NO: 1979826
uauucucaacauagaaacg

SEQ ID NO: 1979828 - RNA, 19 nt, Artificial Sequence
  Description of Artificial Sequence: Synthetic oligonucleotide
  Sense strand starting at position 2795 of SEQ ID NO: 1880603
ggcagcauucuugcuugua

SEQ ID NO: 1979829 - RNA, 19 nt, Artificial Sequence
  Description of Artificial Sequence: Synthetic oligonucleotide
  Antisense strand to SEQ ID NO: 1979828
uacaagcaagaaugcugcc

SEQ ID NO: 1979830 - RNA, 19 nt, Artificial Sequence
  Description of Artificial Sequence: Synthetic oligonucleotide
  Sense strand starting at position 2799 of SEQ ID NO: 1880603
gcauucuugcuuguagcua

SEQ ID NO: 1979831 - RNA, 19 nt, Artificial Sequence
  Description of Artificial Sequence: Synthetic oligonucleotide
  Antisense strand to SEQ ID NO: 1979830
uagcuacaagcaagaaugc

SEQ ID NO: 1979832 - RNA, 19 nt, Artificial Sequence
  Description of Artificial Sequence: Synthetic oligonucleotide
  Sense strand starting at position 2845 of SEQ ID NO: 1880603
gguagacucgcugcgcaau

SEQ ID NO: 1979833 - RNA, 19 nt, Artificial Sequence
  Description of Artificial Sequence: Synthetic oligonucleotide
  Antisense strand to SEQ ID NO: 1979832
auugcgcagcgagucuacc

SEQ ID NO: 1979834 - RNA, 19 nt, Artificial Sequence
  Description of Artificial Sequence: Synthetic oligonucleotide
  Sense strand starting at position 2916 of SEQ ID NO: 1880603
guguccuauuaauuugcaa

SEQ ID NO: 1979835 - RNA, 19 nt, Artificial Sequence
  Description of Artificial Sequence: Synthetic oligonucleotide
  Antisense strand to SEQ ID NO: 1979834
uugcaaauuaauaggacac

SEQ ID NO: 1979836 - RNA, 19 nt, Artificial Sequence
  Description of Artificial Sequence: Synthetic oligonucleotide
  Sense strand starting at position 3123 of SEQ ID NO: 1880603
auaguuucugagcaaauaa

SEQ ID NO: 1979837 - RNA, 19 nt, Artificial Sequence
  Description of Artificial Sequence: Synthetic oligonucleotide
  Antisense strand to SEQ ID NO: 1979836
uuauuugcucagaaacuau

SEQ ID NO: 1979838 - RNA, 19 nt, Artificial Sequence
  Description of Artificial Sequence: Synthetic oligonucleotide
  Sense strand starting at position 3133 of SEQ ID NO: 1880603
agcaaauaauugcucugau

SEQ ID NO: 1979839 - RNA, 19 nt, Artificial Sequence
  Description of Artificial Sequence: Synthetic oligonucleotide
  Antisense strand to SEQ ID NO: 1979838
aucagagcaauuauuugcu

SEQ ID NO: 1979840 - RNA, 19 nt, Artificial Sequence
  Description of Artificial Sequence: Synthetic oligonucleotide
  Sense strand starting at position 3151 of SEQ ID NO: 1880603
ucugauuaagcagagcaua

SEQ ID NO: 1979841 - RNA, 19 nt, Artificial Sequence
  Description of Artificial Sequence: Synthetic oligonucleotide
  Antisense strand to SEQ ID NO: 1979840
uaugcucugcuuaaucaga

SEQ ID NO: 1979842 - RNA, 19 nt, Artificial Sequence
  Description of Artificial Sequence: Synthetic oligonucleotide
  Sense strand starting at position 3154 of SEQ ID NO: 1880603
gauuaagcagagcauaagu

SEQ ID NO: 1979843 - RNA, 19 nt, Artificial Sequence
  Description of Artificial Sequence: Synthetic oligonucleotide
  Antisense strand to SEQ ID NO: 1979842
acuuaugcucugcuuaauc

SEQ ID NO: 1979844 - RNA, 19 nt, Artificial Sequence
  Description of Artificial Sequence: Synthetic oligonucleotide
  Sense strand starting at position 3156 of SEQ ID NO: 1880603
uuaagcagagcauaaguaa

SEQ ID NO: 1979845 - RNA, 19 nt, Artificial Sequence
  Description of Artificial Sequence: Synthetic oligonucleotide
  Antisense strand to SEQ ID NO: 1979844
uuacuuaugcucugcuuaa

SEQ ID NO: 1979846 - RNA, 19 nt, Artificial Sequence
  Description of Artificial Sequence: Synthetic oligonucleotide
  Sense strand starting at position 3238 of SEQ ID NO: 1880603
cagugaugacacugacuuu

SEQ ID NO: 1979847 - RNA, 19 nt, Artificial Sequence
  Description of Artificial Sequence: Synthetic oligonucleotide
  Antisense strand to SEQ ID NO: 1979846
aaagucagugucaucacug

SEQ ID NO: 1979848 - RNA, 19 nt, Artificial Sequence
  Description of Artificial Sequence: Synthetic oligonucleotide
  Sense strand starting at position 3449 of SEQ ID NO: 1880603
gggucaugguggucagaga

SEQ ID NO: 1979849 - RNA, 19 nt, Artificial Sequence
  Description of Artificial Sequence: Synthetic oligonucleotide
  Antisense strand to SEQ ID NO: 1979848
ucucugaccaccaugaccc

SEQ ID NO: 1979850 - RNA, 19 nt, Artificial Sequence
  Description of Artificial Sequence: Synthetic oligonucleotide
  Sense strand starting at position 3450 of SEQ ID NO: 1880603
ggucaugguggucagagaa

SEQ ID NO: 1979851 - RNA, 19 nt, Artificial Sequence
  Description of Artificial Sequence: Synthetic oligonucleotide
  Antisense strand to SEQ ID NO: 1979850
uucucugaccaccaugacc

SEQ ID NO: 1979852 - RNA, 19 nt, Artificial Sequence
  Description of Artificial Sequence: Synthetic oligonucleotide
  Sense strand starting at position 3466 of SEQ ID NO: 1880603
gaaggccuccuagauaagu

SEQ ID NO: 1979853 - RNA, 19 nt, Artificial Sequence
  Description of Artificial Sequence: Synthetic oligonucleotide
  Antisense strand to SEQ ID NO: 1979852
acuuaucuaggaggccuuc

SEQ ID NO: 1979854 - RNA, 19 nt, Artificial Sequence
  Description of Artificial Sequence: Synthetic oligonucleotide
  Sense strand starting at position 3471 of SEQ ID NO: 1880603
ccuccuagauaaguugaau

SEQ ID NO: 1979855 - RNA, 19 nt, Artificial Sequence
  Description of Artificial Sequence: Synthetic oligonucleotide
  Antisense strand to SEQ ID NO: 1979854
auucaacuuaucuaggagg

SEQ ID NO: 1979856 - RNA, 19 nt, Artificial Sequence
  Description of Artificial Sequence: Synthetic oligonucleotide
  Sense strand starting at position 3477 of SEQ ID NO: 1880603
agauaaguugaauguccga

SEQ ID NO: 1979857 - RNA, 19 nt, Artificial Sequence
  Description of Artificial Sequence: Synthetic oligonucleotide
  Antisense strand to SEQ ID NO: 1979856
ucggacauucaacuuaucu

SEQ ID NO: 1979858 - RNA, 19 nt, Artificial Sequence
  Description of Artificial Sequence: Synthetic oligonucleotide
  Sense strand starting at position 3541 of SEQ ID NO: 1880603
gguagggaagcgugagaaa

SEQ ID NO: 1979859 - RNA, 19 nt, Artificial Sequence
  Description of Artificial Sequence: Synthetic oligonucleotide
  Antisense strand to SEQ ID NO: 1979858
uuucucacgcuucccuacc

SEQ ID NO: 1979860 - RNA, 19 nt, Artificial Sequence
  Description of Artificial Sequence: Synthetic oligonucleotide
  Sense strand starting at position 3596 of SEQ ID NO: 1880603
ugucaaagugguggaaauu

SEQ ID NO: 1979861 - RNA, 19 nt, Artificial Sequence
  Description of Artificial Sequence: Synthetic oligonucleotide
  Antisense strand to SEQ ID NO: 1979860
aauuuccaccacuuugaca

SEQ ID NO: 1979862 - RNA, 19 nt, Artificial Sequence
  Description of Artificial Sequence: Synthetic oligonucleotide
  Sense strand starting at position 3597 of SEQ ID NO: 1880603
gucaaagugguggaaauua

SEQ ID NO: 1979863 - RNA, 19 nt, Artificial Sequence
  Description of Artificial Sequence: Synthetic oligonucleotide
  Antisense strand to SEQ ID NO: 1979862
uaauuuccaccacuuugac

SEQ ID NO: 1979864 - RNA, 19 nt, Artificial Sequence
  Description of Artificial Sequence: Synthetic oligonucleotide
  Sense strand starting at position 3856 of SEQ ID NO: 1880603
ugugucagaguuuagaagu

SEQ ID NO: 1979865 - RNA, 19 nt, Artificial Sequence
  Description of Artificial Sequence: Synthetic oligonucleotide
  Antisense strand to SEQ ID NO: 1979864
acuucuaaacucugacaca

SEQ ID NO: 1979866 - RNA, 19 nt, Artificial Sequence
  Description of Artificial Sequence: Synthetic oligonucleotide
  Sense strand starting at position 3924 of SEQ ID NO: 1880603
uugggauaagcagagguuu

SEQ ID NO: 1979867 - RNA, 19 nt, Artificial Sequence
  Description of Artificial Sequence: Synthetic oligonucleotide
  Antisense strand to SEQ ID NO: 1979866
aaaccucugcuuaucccaa

SEQ ID NO: 1979868 - RNA, 19 nt, Artificial Sequence
  Description of Artificial Sequence: Synthetic oligonucleotide
  Sense strand starting at position 3926 of SEQ ID NO: 1880603
gggauaagcagagguuuac

SEQ ID NO: 1979869 - RNA, 19 nt, Artificial Sequence
  Description of Artificial Sequence: Synthetic oligonucleotide
  Antisense strand to SEQ ID NO: 1979868
guaaaccucugcuuauccc

SEQ ID NO: 1979870 - RNA, 19 nt, Artificial Sequence
  Description of Artificial Sequence: Synthetic oligonucleotide
  Sense strand starting at position 3967 of SEQ ID NO: 1880603
uagucuguacuguaaagaa

SEQ ID NO: 1979871 - RNA, 19 nt, Artificial Sequence
  Description of Artificial Sequence: Synthetic oligonucleotide
  Antisense strand to SEQ ID NO: 1979870
uucuuuacaguacagacua

SEQ ID NO: 1979872 - RNA, 19 nt, Artificial Sequence
  Description of Artificial Sequence: Synthetic oligonucleotide
  Sense strand starting at position 224 of SEQ ID NO: 1880604
aagguaacguggcuauaaa

SEQ ID NO: 1979873 - RNA, 19 nt, Artificial Sequence
  Description of Artificial Sequence: Synthetic oligonucleotide
  Antisense strand to SEQ ID NO: 1979872
uuuauagccacguuaccuu

SEQ ID NO: 1979874 - RNA, 19 nt, Artificial Sequence
  Description of Artificial Sequence: Synthetic oligonucleotide
  Sense strand starting at position 326 of SEQ ID NO: 1880604
cuggauaaauccucugucu

SEQ ID NO: 1979875 - RNA, 19 nt, Artificial Sequence
  Description of Artificial Sequence: Synthetic oligonucleotide
  Antisense strand to SEQ ID NO: 1979874
agacagaggauuuauccag

SEQ ID NO: 1979876 - RNA, 19 nt, Artificial Sequence
  Description of Artificial Sequence: Synthetic oligonucleotide
  Sense strand starting at position 424 of SEQ ID NO: 1880604
cggccucuuugucuaauuu

SEQ ID NO: 1979877 - RNA, 19 nt, Artificial Sequence
  Description of Artificial Sequence: Synthetic oligonucleotide
  Antisense strand to SEQ ID NO: 1979876
aaauuagacaaagaggccg

SEQ ID NO: 1979878 - RNA, 19 nt, Artificial Sequence
  Description of Artificial Sequence: Synthetic oligonucleotide
  Sense strand starting at position 432 of SEQ ID NO: 1880604
uugucuaauuugucacuuu

SEQ ID NO: 1979879 - RNA, 19 nt, Artificial Sequence
  Description of Artificial Sequence: Synthetic oligonucleotide
  Antisense strand to SEQ ID NO: 1979878
aaagugacaaauuagacaa

SEQ ID NO: 1979880 - RNA, 19 nt, Artificial Sequence
  Description of Artificial Sequence: Synthetic oligonucleotide
  Sense strand starting at position 829 of SEQ ID NO: 1880604
caccaaaguguuggaaucu

SEQ ID NO: 1979881 - RNA, 19 nt, Artificial Sequence
  Description of Artificial Sequence: Synthetic oligonucleotide
  Antisense strand to SEQ ID NO: 1979880
agauuccaacacuuuggug

SEQ ID NO: 1979882 - RNA, 19 nt, Artificial Sequence
  Description of Artificial Sequence: Synthetic oligonucleotide
  Sense strand starting at position 1291 of SEQ ID NO: 1880604
cccuucuugccagggauau

SEQ ID NO: 1979883 - RNA, 19 nt, Artificial Sequence
  Description of Artificial Sequence: Synthetic oligonucleotide
  Antisense strand to SEQ ID NO: 1979882
auaucccuggcaagaaggg

SEQ ID NO: 1979884 - RNA, 19 nt, Artificial Sequence
  Description of Artificial Sequence: Synthetic oligonucleotide
  Sense strand starting at position 1292 of SEQ ID NO: 1880604
ccuucuugccagggauaug

SEQ ID NO: 1979885 - RNA, 19 nt, Artificial Sequence
  Description of Artificial Sequence: Synthetic oligonucleotide
  Antisense strand to SEQ ID NO: 1979884
cauaucccuggcaagaagg

SEQ ID NO: 1979886 - RNA, 19 nt, Artificial Sequence
  Description of Artificial Sequence: Synthetic oligonucleotide
  Sense strand starting at position 1634 of SEQ ID NO: 1880604
ugacuuauuuaauggaaug

SEQ ID NO: 1979887 - RNA, 19 nt, Artificial Sequence
  Description of Artificial Sequence: Synthetic oligonucleotide
  Antisense strand to SEQ ID NO: 1979886
cauuccauuaaauaaguca

SEQ ID NO: 1979888 - RNA, 19 nt, Artificial Sequence
  Description of Artificial Sequence: Synthetic oligonucleotide
  Sense strand starting at position 1664 of SEQ ID NO: 1880604
ggacgagauucagcgggaa

SEQ ID NO: 1979889 - RNA, 19 nt, Artificial Sequence
  Description of Artificial Sequence: Synthetic oligonucleotide
  Antisense strand to SEQ ID NO: 1979888
uucccgcugaaucucgucc

SEQ ID NO: 1979890 - RNA, 19 nt, Artificial Sequence
  Description of Artificial Sequence: Synthetic oligonucleotide
  Sense strand starting at position 2127 of SEQ ID NO: 1880604
aagguaauuucgguuggua

SEQ ID NO: 1979891 - RNA, 19 nt, Artificial Sequence
  Description of Artificial Sequence: Synthetic oligonucleotide
  Antisense strand to SEQ ID NO: 1979890
uaccaaccgaaauuaccuu

SEQ ID NO: 1979892 - RNA, 19 nt, Artificial Sequence
  Description of Artificial Sequence: Synthetic oligonucleotide
  Sense strand starting at position 2129 of SEQ ID NO: 1880604
gguaauuucgguugguauc

SEQ ID NO: 1979893 - RNA, 19 nt, Artificial Sequence
  Description of Artificial Sequence: Synthetic oligonucleotide
  Antisense strand to SEQ ID NO: 1979892
gauaccaaccgaaauuacc

SEQ ID NO: 1979894 - RNA, 19 nt, Artificial Sequence
  Description of Artificial Sequence: Synthetic oligonucleotide
  Sense strand starting at position 2130 of SEQ ID NO: 1880604
guaauuucgguugguauca

SEQ ID NO: 1979895 - RNA, 19 nt, Artificial Sequence
  Description of Artificial Sequence: Synthetic oligonucleotide
  Antisense strand to SEQ ID NO: 1979894
ugauaccaaccgaaauuac

SEQ ID NO: 1979896 - RNA, 19 nt, Artificial Sequence
  Description of Artificial Sequence: Synthetic oligonucleotide
  Sense strand starting at position 2131 of SEQ ID NO: 1880604
uaauuucgguugguaucau

SEQ ID NO: 1979897 - RNA, 19 nt, Artificial Sequence
  Description of Artificial Sequence: Synthetic oligonucleotide
  Antisense strand to SEQ ID NO: 1979896
augauaccaaccgaaauua

SEQ ID NO: 1979898 - RNA, 19 nt, Artificial Sequence
  Description of Artificial Sequence: Synthetic oligonucleotide
  Sense strand starting at position 2142 of SEQ ID NO: 1880604
gguaucaugacguggagga

SEQ ID NO: 1979899 - RNA, 19 nt, Artificial Sequence
  Description of Artificial Sequence: Synthetic oligonucleotide
  Antisense strand to SEQ ID NO: 1979898
uccuccacgucaugauacc

SEQ ID NO: 1979900 - RNA, 19 nt, Artificial Sequence
  Description of Artificial Sequence: Synthetic oligonucleotide
  Sense strand starting at position 2143 of SEQ ID NO: 1880604
guaucaugacguggaggaa

SEQ ID NO: 1979901 - RNA, 19 nt, Artificial Sequence
  Description of Artificial Sequence: Synthetic oligonucleotide
  Antisense strand to SEQ ID NO: 1979900
uuccuccacgucaugauac

SEQ ID NO: 1979902 - RNA, 19 nt, Artificial Sequence
  Description of Artificial Sequence: Synthetic oligonucleotide
  Sense strand starting at position 2247 of SEQ ID NO: 1880604
uuucucaccuguucuggaa

SEQ ID NO: 1979903 - RNA, 19 nt, Artificial Sequence
  Description of Artificial Sequence: Synthetic oligonucleotide
  Antisense strand to SEQ ID NO: 1979902
uuccagaacaggugagaaa

SEQ ID NO: 1979904 - RNA, 19 nt, Artificial Sequence
  Description of Artificial Sequence: Synthetic oligonucleotide
  Sense strand starting at position 2317 of SEQ ID NO: 1880604
gcuaaauaggaccagucuu

SEQ ID NO: 1979905 - RNA, 19 nt, Artificial Sequence
  Description of Artificial Sequence: Synthetic oligonucleotide
  Antisense strand to SEQ ID NO: 1979904
aagacugguccuauuuagc

SEQ ID NO: 1979906 - RNA, 19 nt, Artificial Sequence
  Description of Artificial Sequence: Synthetic oligonucleotide
  Sense strand starting at position 2431 of SEQ ID NO: 1880604
ucaagacuuguacguaaau

SEQ ID NO: 1979907 - RNA, 19 nt, Artificial Sequence
  Description of Artificial Sequence: Synthetic oligonucleotide
  Antisense strand to SEQ ID NO: 1979906
auuuacguacaagucuuga

SEQ ID NO: 1979908 - RNA, 19 nt, Artificial Sequence
  Description of Artificial Sequence: Synthetic oligonucleotide
  Sense strand starting at position 2432 of SEQ ID NO: 1880604
caagacuuguacguaaauu

SEQ ID NO: 1979909 - RNA, 19 nt, Artificial Sequence
  Description of Artificial Sequence: Synthetic oligonucleotide
  Antisense strand to SEQ ID NO: 1979908
aauuuacguacaagucuug

SEQ ID NO: 1979910 - RNA, 19 nt, Artificial Sequence
  Description of Artificial Sequence: Synthetic oligonucleotide
  Sense strand starting at position 2483 of SEQ ID NO: 1880604
gggcaugucauuugagcca

SEQ ID NO: 1979911 - RNA, 19 nt, Artificial Sequence
  Description of Artificial Sequence: Synthetic oligonucleotide
  Antisense strand to SEQ ID NO: 1979910
uggcucaaaugacaugccc

SEQ ID NO: 1979912 - RNA, 19 nt, Artificial Sequence
  Description of Artificial Sequence: Synthetic oligonucleotide
  Sense strand starting at position 2601 of SEQ ID NO: 1880604
gagagaguuguuggguacu

SEQ ID NO: 1979913 - RNA, 19 nt, Artificial Sequence
  Description of Artificial Sequence: Synthetic oligonucleotide
  Antisense strand to SEQ ID NO: 1979912
aguacccaacaacucucuc

SEQ ID NO: 1979914 - RNA, 19 nt, Artificial Sequence
  Description of Artificial Sequence: Synthetic oligonucleotide
  Sense strand starting at position 2604 of SEQ ID NO: 1880604
agaguuguuggguacucuu

SEQ ID NO: 1979915 - RNA, 19 nt, Artificial Sequence
  Description of Artificial Sequence: Synthetic oligonucleotide
  Antisense strand to SEQ ID NO: 1979914
aagaguacccaacaacucu

SEQ ID NO: 1979916 - RNA, 19 nt, Artificial Sequence
  Description of Artificial Sequence: Synthetic oligonucleotide
  Sense strand starting at position 2621 of SEQ ID NO: 1880604
uuggguaaguccuuuaacu

SEQ ID NO: 1979917 - RNA, 19 nt, Artificial Sequence
  Description of Artificial Sequence: Synthetic oligonucleotide
  Antisense strand to SEQ ID NO: 1979916
aguuaaaggacuuacccaa

SEQ ID NO: 1979918 - RNA, 19 nt, Artificial Sequence
  Description of Artificial Sequence: Synthetic oligonucleotide
  Sense strand starting at position 2623 of SEQ ID NO: 1880604
ggguaaguccuuuaacuuc

SEQ ID NO: 1979919 - RNA, 19 nt, Artificial Sequence
  Description of Artificial Sequence: Synthetic oligonucleotide
  Antisense strand to SEQ ID NO: 1979918
gaaguuaaaggacuuaccc

SEQ ID NO: 1979920 - RNA, 19 nt, Artificial Sequence
  Description of Artificial Sequence: Synthetic oligonucleotide
  Sense strand starting at position 2650 of SEQ ID NO: 1880604
cuagauuccucauugguaa

SEQ ID NO: 1979921 - RNA, 19 nt, Artificial Sequence
  Description of Artificial Sequence: Synthetic oligonucleotide
  Antisense strand to SEQ ID NO: 1979920
uuaccaaugaggaaucuag

SEQ ID NO: 1979922 - RNA, 19 nt, Artificial Sequence
  Description of Artificial Sequence: Synthetic oligonucleotide
  Sense strand starting at position 2722 of SEQ ID NO: 1880604
cugugauacgauggaaucu

SEQ ID NO: 1979923 - RNA, 19 nt, Artificial Sequence
  Description of Artificial Sequence: Synthetic oligonucleotide
  Antisense strand to SEQ ID NO: 1979922
agauuccaucguaucacag

SEQ ID NO: 1979924 - RNA, 19 nt, Artificial Sequence
  Description of Artificial Sequence: Synthetic oligonucleotide
  Sense strand starting at position 2740 of SEQ ID NO: 1880604
uggagacccgguuauuauu

SEQ ID NO: 1979925 - RNA, 19 nt, Artificial Sequence
  Description of Artificial Sequence: Synthetic oligonucleotide
  Antisense strand to SEQ ID NO: 1979924
aauaauaaccgggucucca

SEQ ID NO: 1979926 - RNA, 19 nt, Artificial Sequence
  Description of Artificial Sequence: Synthetic oligonucleotide
  Sense strand starting at position 2749 of SEQ ID NO: 1880604
gguuauuauuugcuuccau

SEQ ID NO: 1979927 - RNA, 19 nt, Artificial Sequence
  Description of Artificial Sequence: Synthetic oligonucleotide
  Antisense strand to SEQ ID NO: 1979926
auggaagcaaauaauaacc

SEQ ID NO: 1979928 - RNA, 19 nt, Artificial Sequence
  Description of Artificial Sequence: Synthetic oligonucleotide
  Sense strand starting at position 2750 of SEQ ID NO: 1880604
guuauuauuugcuuccauu

SEQ ID NO: 1979929 - RNA, 19 nt, Artificial Sequence
  Description of Artificial Sequence: Synthetic oligonucleotide
  Antisense strand to SEQ ID NO: 1979928
aauggaagcaaauaauaac

SEQ ID NO: 1979930 - RNA, 19 nt, Artificial Sequence
  Description of Artificial Sequence: Synthetic oligonucleotide
  Sense strand starting at position 2786 of SEQ ID NO: 1880604
cuauuuccauaaggauaag

SEQ ID NO: 1979931 - RNA, 19 nt, Artificial Sequence
  Description of Artificial Sequence: Synthetic oligonucleotide
  Antisense strand to SEQ ID NO: 1979930
cuuauccuuauggaaauag

SEQ ID NO: 1979932 - RNA, 19 nt, Artificial Sequence
  Description of Artificial Sequence: Synthetic oligonucleotide
  Sense strand starting at position 2872 of SEQ ID NO: 1880604
gugcauuguguguuagcaa

SEQ ID NO: 1979933 - RNA, 19 nt, Artificial Sequence
  Description of Artificial Sequence: Synthetic oligonucleotide
  Antisense strand to SEQ ID NO: 1979932
uugcuaacacacaaugcac

SEQ ID NO: 1979934 - RNA, 19 nt, Artificial Sequence
  Description of Artificial Sequence: Synthetic oligonucleotide
  Sense strand starting at position 2913 of SEQ ID NO: 1880604
ccuauauguucuguaggag

SEQ ID NO: 1979935 - RNA, 19 nt, Artificial Sequence
  Description of Artificial Sequence: Synthetic oligonucleotide
  Antisense strand to SEQ ID NO: 1979934
cuccuacagaacauauagg

SEQ ID NO: 1979936 - RNA, 19 nt, Artificial Sequence
  Description of Artificial Sequence: Synthetic oligonucleotide
  Sense strand starting at position 2914 of SEQ ID NO: 1880604
cuauauguucuguaggaga

SEQ ID NO: 1979937 - RNA, 19 nt, Artificial Sequence
  Description of Artificial Sequence: Synthetic oligonucleotide
  Antisense strand to SEQ ID NO: 1979936
ucuccuacagaacauauag

SEQ ID NO: 1979938 - RNA, 19 nt, Artificial Sequence
  Description of Artificial Sequence: Synthetic oligonucleotide
  Sense strand starting at position 2916 of SEQ ID NO: 1880604
auauguucuguaggagaau

SEQ ID NO: 1979939 - RNA, 19 nt, Artificial Sequence
  Description of Artificial Sequence: Synthetic oligonucleotide
  Antisense strand to SEQ ID NO: 1979938
auucuccuacagaacauau

SEQ ID NO: 1979940 - RNA, 19 nt, Artificial Sequence
  Description of Artificial Sequence: Synthetic oligonucleotide
  Sense strand starting at position 2922 of SEQ ID NO: 1880604
ucuguaggagaaugcauau

SEQ ID NO: 1979941 - RNA, 19 nt, Artificial Sequence
  Description of Artificial Sequence: Synthetic oligonucleotide
  Antisense strand to SEQ ID NO: 1979940
auaugcauucuccuacaga

SEQ ID NO: 1979942 - RNA, 19 nt, Artificial Sequence
  Description of Artificial Sequence: Synthetic oligonucleotide
  Sense strand starting at position 2970 of SEQ ID NO: 1880604
gcaaauacagaguggcaua

SEQ ID NO: 1979943 - RNA, 19 nt, Artificial Sequence
  Description of Artificial Sequence: Synthetic oligonucleotide
  Antisense strand to SEQ ID NO: 1979942
uaugccacucuguauuugc

SEQ ID NO: 1979944 - RNA, 19 nt, Artificial Sequence
  Description of Artificial Sequence: Synthetic oligonucleotide
  Sense strand starting at position 3151 of SEQ ID NO: 1880604
ggcuuugugggcuauaaca

SEQ ID NO: 1979945 - RNA, 19 nt, Artificial Sequence
  Description of Artificial Sequence: Synthetic oligonucleotide
  Antisense strand to SEQ ID NO: 1979944
uguuauagcccacaaagcc

SEQ ID NO: 1979946 - RNA, 19 nt, Artificial Sequence
  Description of Artificial Sequence: Synthetic oligonucleotide
  Sense strand starting at position 3264 of SEQ ID NO: 1880604
uuaugacccugacauuuga

SEQ ID NO: 1979947 - RNA, 19 nt, Artificial Sequence
  Description of Artificial Sequence: Synthetic oligonucleotide
  Antisense strand to SEQ ID NO: 1979946
ucaaaugucagggucauaa

SEQ ID NO: 1979948 - RNA, 19 nt, Artificial Sequence
  Description of Artificial Sequence: Synthetic oligonucleotide
  Sense strand starting at position 3908 of SEQ ID NO: 1880604
gggauauccagcuagagug

SEQ ID NO: 1979949 - RNA, 19 nt, Artificial Sequence
  Description of Artificial Sequence: Synthetic oligonucleotide
  Antisense strand to SEQ ID NO: 1979948
cacucuagcuggauauccc

SEQ ID NO: 1979950 - RNA, 19 nt, Artificial Sequence
  Description of Artificial Sequence: Synthetic oligonucleotide
  Sense strand starting at position 3910 of SEQ ID NO: 1880604
gauauccagcuagagugau

SEQ ID NO: 1979951 - RNA, 19 nt, Artificial Sequence
  Description of Artificial Sequence: Synthetic oligonucleotide
  Antisense strand to SEQ ID NO: 1979950
aucacucuagcuggauauc

SEQ ID NO: 1979952 - RNA, 19 nt, Artificial Sequence
  Description of Artificial Sequence: Synthetic oligonucleotide
  Sense strand starting at position 328 of SEQ ID NO: 1880605
guauucuaugcugagcaga

SEQ ID NO: 1979953 - RNA, 19 nt, Artificial Sequence
  Description of Artificial Sequence: Synthetic oligonucleotide
  Antisense strand to SEQ ID NO: 1979952
ucugcucagcauagaauac

SEQ ID NO: 1979954 - RNA, 19 nt, Artificial Sequence
  Description of Artificial Sequence: Synthetic oligonucleotide
  Sense strand starting at position 330 of SEQ ID NO: 1880605
auucuaugcugagcagagu

SEQ ID NO: 1979955 - RNA, 19 nt, Artificial Sequence
  Description of Artificial Sequence: Synthetic oligonucleotide
  Antisense strand to SEQ ID NO: 1979954
acucugcucagcauagaau

SEQ ID NO: 1979956 - RNA, 19 nt, Artificial Sequence
  Description of Artificial Sequence: Synthetic oligonucleotide
  Sense strand starting at position 393 of SEQ ID NO: 1880605
aucuuuaacagguggguaa

SEQ ID NO: 1979957 - RNA, 19 nt, Artificial Sequence
  Description of Artificial Sequence: Synthetic oligonucleotide
  Antisense strand to SEQ ID NO: 1979956
uuacccaccuguuaaagau

SEQ ID NO: 1979958 - RNA, 19 nt, Artificial Sequence
  Description of Artificial Sequence: Synthetic oligonucleotide
  Sense strand starting at position 394 of SEQ ID NO: 1880605
ucuuuaacagguggguaaa

SEQ ID NO: 1979959 - RNA, 19 nt, Artificial Sequence
  Description of Artificial Sequence: Synthetic oligonucleotide
  Antisense strand to SEQ ID NO: 1979958
uuuacccaccuguuaaaga

SEQ ID NO: 1979960 - RNA, 19 nt, Artificial Sequence
  Description of Artificial Sequence: Synthetic oligonucleotide
  Sense strand starting at position 444 of SEQ ID NO: 1880605
gagagaauguauguugaug

SEQ ID NO: 1979961 - RNA, 19 nt, Artificial Sequence
  Description of Artificial Sequence: Synthetic oligonucleotide
  Antisense strand to SEQ ID NO: 1979960
caucaacauacauucucuc

SEQ ID NO: 1979962 - RNA, 19 nt, Artificial Sequence
  Description of Artificial Sequence: Synthetic oligonucleotide
  Sense strand starting at position 446 of SEQ ID NO: 1880605
gagaauguauguugaugca

SEQ ID NO: 1979963 - RNA, 19 nt, Artificial Sequence
  Description of Artificial Sequence: Synthetic oligonucleotide
  Antisense strand to SEQ ID NO: 1979962
ugcaucaacauacauucuc

SEQ ID NO: 1979964 - RNA, 19 nt, Artificial Sequence
  Description of Artificial Sequence: Synthetic oligonucleotide
  Sense strand starting at position 668 of SEQ ID NO: 1880605
gggcuucuaucuuaguaca

SEQ ID NO: 1979965 - RNA, 19 nt, Artificial Sequence
  Description of Artificial Sequence: Synthetic oligonucleotide
  Antisense strand to SEQ ID NO: 1979964
uguacuaagauagaagccc

SEQ ID NO: 1979966 - RNA, 19 nt, Artificial Sequence
  Description of Artificial Sequence: Synthetic oligonucleotide
  Sense strand starting at position 671 of SEQ ID NO: 1880605
cuucuaucuuaguacagga

SEQ ID NO: 1979967 - RNA, 19 nt, Artificial Sequence
  Description of Artificial Sequence: Synthetic oligonucleotide
  Antisense strand to SEQ ID NO: 1979966
uccuguacuaagauagaag

SEQ ID NO: 1979968 - RNA, 19 nt, Artificial Sequence
  Description of Artificial Sequence: Synthetic oligonucleotide
  Sense strand starting at position 762 of SEQ ID NO: 1880605
gcaccaucaugagaucuga

SEQ ID NO: 1979969 - RNA, 19 nt, Artificial Sequence
  Description of Artificial Sequence: Synthetic oligonucleotide
  Antisense strand to SEQ ID NO: 1979968
ucagaucucaugauggugc

SEQ ID NO: 1979970 - RNA, 19 nt, Artificial Sequence
  Description of Artificial Sequence: Synthetic oligonucleotide
  Sense strand starting at position 832 of SEQ ID NO: 1880605
gugggauuguggcuuguaa

SEQ ID NO: 1979971 - RNA, 19 nt, Artificial Sequence
  Description of Artificial Sequence: Synthetic oligonucleotide
  Antisense strand to SEQ ID NO: 1979970
uuacaagccacaaucccac

SEQ ID NO: 1979972 - RNA, 19 nt, Artificial Sequence
  Description of Artificial Sequence: Synthetic oligonucleotide
  Sense strand starting at position 834 of SEQ ID NO: 1880605
gggauuguggcuuguaaac

SEQ ID NO: 1979973 - RNA, 19 nt, Artificial Sequence
  Description of Artificial Sequence: Synthetic oligonucleotide
  Antisense strand to SEQ ID NO: 1979972
guuuacaagccacaauccc

SEQ ID NO: 1979974 - RNA, 19 nt, Artificial Sequence
  Description of Artificial Sequence: Synthetic oligonucleotide
  Sense strand starting at position 836 of SEQ ID NO: 1880605
gauuguggcuuguaaacug

SEQ ID NO: 1979975 - RNA, 19 nt, Artificial Sequence
  Description of Artificial Sequence: Synthetic oligonucleotide
  Antisense strand to SEQ ID NO: 1979974
caguuuacaagccacaauc

SEQ ID NO: 1979976 - RNA, 19 nt, Artificial Sequence
  Description of Artificial Sequence: Synthetic oligonucleotide
  Sense strand starting at position 851 of SEQ ID NO: 1880605
acuguaaaguccugugcaa

SEQ ID NO: 1979977 - RNA, 19 nt, Artificial Sequence
  Description of Artificial Sequence: Synthetic oligonucleotide
  Antisense strand to SEQ ID NO: 1979976
uugcacaggacuuuacagu

SEQ ID NO: 1979978 - RNA, 19 nt, Artificial Sequence
  Description of Artificial Sequence: Synthetic oligonucleotide
  Sense strand starting at position 853 of SEQ ID NO: 1880605
uguaaaguccugugcaaug

SEQ ID NO: 1979979 - RNA, 19 nt, Artificial Sequence
  Description of Artificial Sequence: Synthetic oligonucleotide
  Antisense strand to SEQ ID NO: 1979978
cauugcacaggacuuuaca

SEQ ID NO: 1979980 - RNA, 19 nt, Artificial Sequence
  Description of Artificial Sequence: Synthetic oligonucleotide
  Sense strand starting at position 1398 of SEQ ID NO: 1880605
ggcuccuucucucuugcaa

SEQ ID NO: 1979981 - RNA, 19 nt, Artificial Sequence
  Description of Artificial Sequence: Synthetic oligonucleotide
  Antisense strand to SEQ ID NO: 1979980
uugcaagagagaaggagcc

SEQ ID NO: 1979982 - RNA, 19 nt, Artificial Sequence
  Description of Artificial Sequence: Synthetic oligonucleotide
  Sense strand starting at position 2265 of SEQ ID NO: 1880605
ggaucaggaguuuguuaua

SEQ ID NO: 1979983 - RNA, 19 nt, Artificial Sequence
  Description of Artificial Sequence: Synthetic oligonucleotide
  Antisense strand to SEQ ID NO: 1979982
uauaacaaacuccugaucc

SEQ ID NO: 1979984 - RNA, 19 nt, Artificial Sequence
  Description of Artificial Sequence: Synthetic oligonucleotide
  Sense strand starting at position 2268 of SEQ ID NO: 1880605
ucaggaguuuguuauaagc

SEQ ID NO: 1979985 - RNA, 19 nt, Artificial Sequence
  Description of Artificial Sequence: Synthetic oligonucleotide
  Antisense strand to SEQ ID NO: 1979984
gcuuauaacaaacuccuga

SEQ ID NO: 1979986 - RNA, 19 nt, Artificial Sequence
  Description of Artificial Sequence: Synthetic oligonucleotide
  Sense strand starting at position 2490 of SEQ ID NO: 1880605
gagugauagcaaugugaaa

SEQ ID NO: 1979987 - RNA, 19 nt, Artificial Sequence
  Description of Artificial Sequence: Synthetic oligonucleotide
  Antisense strand to SEQ ID NO: 1979986
uuucacauugcuaucacuc

SEQ ID NO: 1979988 - RNA, 19 nt, Artificial Sequence
  Description of Artificial Sequence: Synthetic oligonucleotide
  Sense strand starting at position 2536 of SEQ ID NO: 1880605
ucaugacucuuguaaagau

SEQ ID NO: 1979989 - RNA, 19 nt, Artificial Sequence
  Description of Artificial Sequence: Synthetic oligonucleotide
  Antisense strand to SEQ ID NO: 1979988
aucuuuacaagagucauga

SEQ ID NO: 1979990 - RNA, 19 nt, Artificial Sequence
  Description of Artificial Sequence: Synthetic oligonucleotide
  Sense strand starting at position 2798 of SEQ ID NO: 1880605
ucaccaagccuaggagaau

SEQ ID NO: 1979991 - RNA, 19 nt, Artificial Sequence
  Description of Artificial Sequence: Synthetic oligonucleotide
  Antisense strand to SEQ ID NO: 1979990
auucuccuaggcuugguga

SEQ ID NO: 1979992 - RNA, 19 nt, Artificial Sequence
  Description of Artificial Sequence: Synthetic oligonucleotide
  Sense strand starting at position 2810 of SEQ ID NO: 1880605
ggagaaugccuuuguccau

SEQ ID NO: 1979993 - RNA, 19 nt, Artificial Sequence
  Description of Artificial Sequence: Synthetic oligonucleotide
  Antisense strand to SEQ ID NO: 1979992
auggacaaaggcauucucc

SEQ ID NO: 1979994 - RNA, 19 nt, Artificial Sequence
  Description of Artificial Sequence: Synthetic oligonucleotide
  Sense strand starting at position 2811 of SEQ ID NO: 1880605
gagaaugccuuuguccauu

SEQ ID NO: 1979995 - RNA, 19 nt, Artificial Sequence
  Description of Artificial Sequence: Synthetic oligonucleotide
  Antisense strand to SEQ ID NO: 1979994
aauggacaaaggcauucuc

SEQ ID NO: 1979996 - RNA, 19 nt, Artificial Sequence
  Description of Artificial Sequence: Synthetic oligonucleotide
  Sense strand starting at position 2813 of SEQ ID NO: 1880605
gaaugccuuuguccauuga

SEQ ID NO: 1979997 - RNA, 19 nt, Artificial Sequence
  Description of Artificial Sequence: Synthetic oligonucleotide
  Antisense strand to SEQ ID NO: 1979996
ucaauggacaaaggcauuc

SEQ ID NO: 1979998 - RNA, 19 nt, Artificial Sequence
  Description of Artificial Sequence: Synthetic oligonucleotide
  Sense strand starting at position 2817 of SEQ ID NO: 1880605
gccuuuguccauugagggu

SEQ ID NO: 1979999 - RNA, 19 nt, Artificial Sequence
  Description of Artificial Sequence: Synthetic oligonucleotide
  Antisense strand to SEQ ID NO: 1979998
acccucaauggacaaaggc

SEQ ID NO: 1980000 - RNA, 19 nt, Artificial Sequence
  Description of Artificial Sequence: Synthetic oligonucleotide
  Sense strand starting at position 2902 of SEQ ID NO: 1880605
ggcugugcaguuguccaua

SEQ ID NO: 1980001 - RNA, 19 nt, Artificial Sequence
  Description of Artificial Sequence: Synthetic oligonucleotide
  Antisense strand to SEQ ID NO: 1980000
uauggacaacugcacagcc

SEQ ID NO: 1980002 - RNA, 19 nt, Artificial Sequence
  Description of Artificial Sequence: Synthetic oligonucleotide
  Sense strand starting at position 2905 of SEQ ID NO: 1880605
ugugcaguuguccauaaca

SEQ ID NO: 1980003 - RNA, 19 nt, Artificial Sequence
  Description of Artificial Sequence: Synthetic oligonucleotide
  Antisense strand to SEQ ID NO: 1980002
uguuauggacaacugcaca

SEQ ID NO: 1980004 - RNA, 19 nt, Artificial Sequence
  Description of Artificial Sequence: Synthetic oligonucleotide
  Sense strand starting at position 2907 of SEQ ID NO: 1880605
ugcaguuguccauaacagu

SEQ ID NO: 1980005 - RNA, 19 nt, Artificial Sequence
  Description of Artificial Sequence: Synthetic oligonucleotide
  Antisense strand to SEQ ID NO: 1980004
acuguuauggacaacugca

SEQ ID NO: 1980006 - RNA, 19 nt, Artificial Sequence
  Description of Artificial Sequence: Synthetic oligonucleotide
  Sense strand starting at position 2969 of SEQ ID NO: 1880605
gcaagauaauagccucaaa

SEQ ID NO: 1980007 - RNA, 19 nt, Artificial Sequence
  Description of Artificial Sequence: Synthetic oligonucleotide
  Antisense strand to SEQ ID NO: 1980006
uuugaggcuauuaucuugc

SEQ ID NO: 1980008 - RNA, 19 nt, Artificial Sequence
  Description of Artificial Sequence: Synthetic oligonucleotide
  Sense strand starting at position 2999 of SEQ ID NO: 1880605
agauucugagcccgagaau

SEQ ID NO: 1980009 - RNA, 19 nt, Artificial Sequence
  Description of Artificial Sequence: Synthetic oligonucleotide
  Antisense strand to SEQ ID NO: 1980008
auucucgggcucagaaucu

SEQ ID NO: 1980010 - RNA, 19 nt, Artificial Sequence
  Description of Artificial Sequence: Synthetic oligonucleotide
  Sense strand starting at position 3000 of SEQ ID NO: 1880605
gauucugagcccgagaauc

SEQ ID NO: 1980011 - RNA, 19 nt, Artificial Sequence
  Description of Artificial Sequence: Synthetic oligonucleotide
  Antisense strand to SEQ ID NO: 1980010
gauucucgggcucagaauc

SEQ ID NO: 1980012 - RNA, 19 nt, Artificial Sequence
  Description of Artificial Sequence: Synthetic oligonucleotide
  Sense strand starting at position 3060 of SEQ ID NO: 1880605
aguuuaugaugcccaguga

SEQ ID NO: 1980013 - RNA, 19 nt, Artificial Sequence
  Description of Artificial Sequence: Synthetic oligonucleotide
  Antisense strand to SEQ ID NO: 1980012
ucacugggcaucauaaacu

SEQ ID NO: 1980014 - RNA, 19 nt, Artificial Sequence
  Description of Artificial Sequence: Synthetic oligonucleotide
  Sense strand starting at position 3076 of SEQ ID NO: 1880605
ugagcuggcucagaagaau

SEQ ID NO: 1980015 - RNA, 19 nt, Artificial Sequence
  Description of Artificial Sequence: Synthetic oligonucleotide
  Antisense strand to SEQ ID NO: 1980014
auucuucugagccagcuca

SEQ ID NO: 1980016 - RNA, 19 nt, Artificial Sequence
  Description of Artificial Sequence: Synthetic oligonucleotide
  Sense strand starting at position 3160 of SEQ ID NO: 1880605
gugggaaguugucaaagaa

SEQ ID NO: 1980017 - RNA, 19 nt, Artificial Sequence
  Description of Artificial Sequence: Synthetic oligonucleotide
  Antisense strand to SEQ ID NO: 1980016
uucuuugacaacuucccac

SEQ ID NO: 1980018 - RNA, 19 nt, Artificial Sequence
  Description of Artificial Sequence: Synthetic oligonucleotide
  Sense strand starting at position 3282 of SEQ ID NO: 1880605
acauucuuguugugguaga

SEQ ID NO: 1980019 - RNA, 19 nt, Artificial Sequence
  Description of Artificial Sequence: Synthetic oligonucleotide
  Antisense strand to SEQ ID NO: 1980018
ucuaccacaacaagaaugu

SEQ ID NO: 1980020 - RNA, 19 nt, Artificial Sequence
  Description of Artificial Sequence: Synthetic oligonucleotide
  Sense strand starting at position 3300 of SEQ ID NO: 1880605
agcacaaaguaauuaagua

SEQ ID NO: 1980021 - RNA, 19 nt, Artificial Sequence
  Description of Artificial Sequence: Synthetic oligonucleotide
  Antisense strand to SEQ ID NO: 1980020
uacuuaauuacuuugugcu

SEQ ID NO: 1980022 - RNA, 19 nt, Artificial Sequence
  Description of Artificial Sequence: Synthetic oligonucleotide
  Sense strand starting at position 3529 of SEQ ID NO: 1880605
cauuaaaucuuggcugggu

SEQ ID NO: 1980023 - RNA, 19 nt, Artificial Sequence
  Description of Artificial Sequence: Synthetic oligonucleotide
  Antisense strand to SEQ ID NO: 1980022
acccagccaagauuuaaug

SEQ ID NO: 1980024 - RNA, 19 nt, Artificial Sequence
  Description of Artificial Sequence: Synthetic oligonucleotide
  Sense strand starting at position 3841 of SEQ ID NO: 1880605
gagaucaaucuaugugagu

SEQ ID NO: 1980025 - RNA, 19 nt, Artificial Sequence
  Description of Artificial Sequence: Synthetic oligonucleotide
  Antisense strand to SEQ ID NO: 1980024
acucacauagauugaucuc

SEQ ID NO: 1980026 - RNA, 19 nt, Artificial Sequence
  Description of Artificial Sequence: Synthetic oligonucleotide
  Sense strand starting at position 3842 of SEQ ID NO: 1880605
agaucaaucuaugugagua

SEQ ID NO: 1980027 - RNA, 19 nt, Artificial Sequence
  Description of Artificial Sequence: Synthetic oligonucleotide
  Antisense strand to SEQ ID NO: 1980026
uacucacauagauugaucu

SEQ ID NO: 1980028 - RNA, 19 nt, Artificial Sequence
  Description of Artificial Sequence: Synthetic oligonucleotide
  Sense strand starting at position 3844 of SEQ ID NO: 1880605
aucaaucuaugugaguaca

SEQ ID NO: 1980029 - RNA, 19 nt, Artificial Sequence
  Description of Artificial Sequence: Synthetic oligonucleotide
  Antisense strand to SEQ ID NO: 1980028
uguacucacauagauugau

SEQ ID NO: 1980030 - RNA, 19 nt, Artificial Sequence
  Description of Artificial Sequence: Synthetic oligonucleotide
  Sense strand starting at position 3846 of SEQ ID NO: 1880605
caaucuaugugaguacaga

SEQ ID NO: 1980031 - RNA, 19 nt, Artificial Sequence
  Description of Artificial Sequence: Synthetic oligonucleotide
  Antisense strand to SEQ ID NO: 1980030
ucuguacucacauagauug

SEQ ID NO: 1980032 - RNA, 19 nt, Artificial Sequence
  Description of Artificial Sequence: Synthetic oligonucleotide
  Sense strand starting at position 57 of SEQ ID NO: 1880606
uuguuuguuguguauauac

SEQ ID NO: 1980033 - RNA, 19 nt, Artificial Sequence
  Description of Artificial Sequence: Synthetic oligonucleotide
  Antisense strand to SEQ ID NO: 1980032
guauauacacaacaaacaa

SEQ ID NO: 1980034 - RNA, 19 nt, Artificial Sequence
  Description of Artificial Sequence: Synthetic oligonucleotide
  Sense strand starting at position 59 of SEQ ID NO: 1880606
guuuguuguguauauacuu

SEQ ID NO: 1980035 - RNA, 19 nt, Artificial Sequence
  Description of Artificial Sequence: Synthetic oligonucleotide
  Antisense strand to SEQ ID NO: 1980034
aaguauauacacaacaaac

SEQ ID NO: 1980036 - RNA, 19 nt, Artificial Sequence
  Description of Artificial Sequence: Synthetic oligonucleotide
  Sense strand starting at position 67 of SEQ ID NO: 1880606
uguauauacuuccugucuu

SEQ ID NO: 1980037 - RNA, 19 nt, Artificial Sequence
  Description of Artificial Sequence: Synthetic oligonucleotide
  Antisense strand to SEQ ID NO: 1980036
aagacaggaaguauauaca

SEQ ID NO: 1980038 - RNA, 19 nt, Artificial Sequence
  Description of Artificial Sequence: Synthetic oligonucleotide
  Sense strand starting at position 143 of SEQ ID NO: 1880606
guggaaagcgcuuauuauc

SEQ ID NO: 1980039 - RNA, 19 nt, Artificial Sequence
  Description of Artificial Sequence: Synthetic oligonucleotide
  Antisense strand to SEQ ID NO: 1980038
gauaauaagcgcuuuccac

SEQ ID NO: 1980040 - RNA, 19 nt, Artificial Sequence
  Description of Artificial Sequence: Synthetic oligonucleotide
  Sense strand starting at position 156 of SEQ ID NO: 1880606
auuaucuaacgcuguacua

SEQ ID NO: 1980041 - RNA, 19 nt, Artificial Sequence
  Description of Artificial Sequence: Synthetic oligonucleotide
  Antisense strand to SEQ ID NO: 1980040
uaguacagcguuagauaau

SEQ ID NO: 1980042 - RNA, 19 nt, Artificial Sequence
  Description of Artificial Sequence: Synthetic oligonucleotide
  Sense strand starting at position 342 of SEQ ID NO: 1880606
auuuaaguguccucauggu

SEQ ID NO: 1980043 - RNA, 19 nt, Artificial Sequence
  Description of Artificial Sequence: Synthetic oligonucleotide
  Antisense strand to SEQ ID NO: 1980042
accaugaggacacuuaaau

SEQ ID NO: 1980044 - RNA, 19 nt, Artificial Sequence
  Description of Artificial Sequence: Synthetic oligonucleotide
  Sense strand starting at position 346 of SEQ ID NO: 1880606
aaguguccucaugguaaug

SEQ ID NO: 1980045 - RNA, 19 nt, Artificial Sequence
  Description of Artificial Sequence: Synthetic oligonucleotide
  Antisense strand to SEQ ID NO: 1980044
cauuaccaugaggacacuu

SEQ ID NO: 1980046 - RNA, 19 nt, Artificial Sequence
  Description of Artificial Sequence: Synthetic oligonucleotide
  Sense strand starting at position 357 of SEQ ID NO: 1880606
ugguaaugaucagagauaa

SEQ ID NO: 1980047 - RNA, 19 nt, Artificial Sequence
  Description of Artificial Sequence: Synthetic oligonucleotide
  Antisense strand to SEQ ID NO: 1980046
uuaucucugaucauuacca

SEQ ID NO: 1980048 - RNA, 19 nt, Artificial Sequence
  Description of Artificial Sequence: Synthetic oligonucleotide
  Sense strand starting at position 406 of SEQ ID NO: 1880606
aguauacauuugcaucuau

SEQ ID NO: 1980049 - RNA, 19 nt, Artificial Sequence
  Description of Artificial Sequence: Synthetic oligonucleotide
  Antisense strand to SEQ ID NO: 1980048
auagaugcaaauguauacu

SEQ ID NO: 1980050 - RNA, 19 nt, Artificial Sequence
  Description of Artificial Sequence: Synthetic oligonucleotide
  Sense strand starting at position 511 of SEQ ID NO: 1880606
gcuuguacucacuggauuu

SEQ ID NO: 1980051 - RNA, 19 nt, Artificial Sequence
  Description of Artificial Sequence: Synthetic oligonucleotide
  Antisense strand to SEQ ID NO: 1980050
aaauccagugaguacaagc

SEQ ID NO: 1980052 - RNA, 19 nt, Artificial Sequence
  Description of Artificial Sequence: Synthetic oligonucleotide
  Sense strand starting at position 558 of SEQ ID NO: 1880606
acauguguaaugugugaug

SEQ ID NO: 1980053 - RNA, 19 nt, Artificial Sequence
  Description of Artificial Sequence: Synthetic oligonucleotide
  Antisense strand to SEQ ID NO: 1980052
caucacacauuacacaugu

SEQ ID NO: 1980054 - RNA, 19 nt, Artificial Sequence
  Description of Artificial Sequence: Synthetic oligonucleotide
  Sense strand starting at position 656 of SEQ ID NO: 1880606
gucaacccauuuggaaaua

SEQ ID NO: 1980055 - RNA, 19 nt, Artificial Sequence
  Description of Artificial Sequence: Synthetic oligonucleotide
  Antisense strand to SEQ ID NO: 1980054
uauuuccaaauggguugac

SEQ ID NO: 1980056 - RNA, 19 nt, Artificial Sequence
  Description of Artificial Sequence: Synthetic oligonucleotide
  Sense strand starting at position 712 of SEQ ID NO: 1880606
ucaaauauccuuugugaga

SEQ ID NO: 1980057 - RNA, 19 nt, Artificial Sequence
  Description of Artificial Sequence: Synthetic oligonucleotide
  Antisense strand to SEQ ID NO: 1980056
ucucacaaaggauauuuga

SEQ ID NO: 1980058 - RNA, 19 nt, Artificial Sequence
  Description of Artificial Sequence: Synthetic oligonucleotide
  Sense strand starting at position 756 of SEQ ID NO: 1880606
cgcuucuguccugagaauc

SEQ ID NO: 1980059 - RNA, 19 nt, Artificial Sequence
  Description of Artificial Sequence: Synthetic oligonucleotide
  Antisense strand to SEQ ID NO: 1980058
gauucucaggacagaagcg

SEQ ID NO: 1980060 - RNA, 19 nt, Artificial Sequence
  Description of Artificial Sequence: Synthetic oligonucleotide
  Sense strand starting at position 1095 of SEQ ID NO: 1880606
ggaagaaauuuauagcaaa

SEQ ID NO: 1980061 - RNA, 19 nt, Artificial Sequence
  Description of Artificial Sequence: Synthetic oligonucleotide
  Antisense strand to SEQ ID NO: 1980060
uuugcuauaaauuucuucc

SEQ ID NO: 1980062 - RNA, 19 nt, Artificial Sequence
  Description of Artificial Sequence: Synthetic oligonucleotide
  Sense strand starting at position 1113 of SEQ ID NO: 1880606
aaagguuaccucggcuauu

SEQ ID NO: 1980063 - RNA, 19 nt, Artificial Sequence
  Description of Artificial Sequence: Synthetic oligonucleotide
  Antisense strand to SEQ ID NO: 1980062
aauagccgagguaaccuuu

SEQ ID NO: 1980064 - RNA, 19 nt, Artificial Sequence
  Description of Artificial Sequence: Synthetic oligonucleotide
  Sense strand starting at position 1114 of SEQ ID NO: 1880606
aagguuaccucggcuauuu

SEQ ID NO: 1980065 - RNA, 19 nt, Artificial Sequence
  Description of Artificial Sequence: Synthetic oligonucleotide
  Antisense strand to SEQ ID NO: 1980064
aaauagccgagguaaccuu

SEQ ID NO: 1980066 - RNA, 19 nt, Artificial Sequence
  Description of Artificial Sequence: Synthetic oligonucleotide
  Sense strand starting at position 1687 of SEQ ID NO: 1880606
aggcaaaggcaaugugauu

SEQ ID NO: 1980067 - RNA, 19 nt, Artificial Sequence
  Description of Artificial Sequence: Synthetic oligonucleotide
  Antisense strand to SEQ ID NO: 1980066
aaucacauugccuuugccu

SEQ ID NO: 1980068 - RNA, 19 nt, Artificial Sequence
  Description of Artificial Sequence: Synthetic oligonucleotide
  Sense strand starting at position 1723 of SEQ ID NO: 1880606
gcagacagaaaggguuauu

SEQ ID NO: 1980069 - RNA, 19 nt, Artificial Sequence
  Description of Artificial Sequence: Synthetic oligonucleotide
  Antisense strand to SEQ ID NO: 1980068
aauaacccuuucugucugc

SEQ ID NO: 1980070 - RNA, 19 nt, Artificial Sequence
  Description of Artificial Sequence: Synthetic oligonucleotide
  Sense strand starting at position 1736 of SEQ ID NO: 1880606
guuauuuccugacacucuu

SEQ ID NO: 1980071 - RNA, 19 nt, Artificial Sequence
  Description of Artificial Sequence: Synthetic oligonucleotide
  Antisense strand to SEQ ID NO: 1980070
aagagugucaggaaauaac

SEQ ID NO: 1980072 - RNA, 19 nt, Artificial Sequence
  Description of Artificial Sequence: Synthetic oligonucleotide
  Sense strand starting at position 1812 of SEQ ID NO: 1880606
aaagcauugugacuuagcu

SEQ ID NO: 1980073 - RNA, 19 nt, Artificial Sequence
  Description of Artificial Sequence: Synthetic oligonucleotide
  Antisense strand to SEQ ID NO: 1980072
agcuaagucacaaugcuuu

SEQ ID NO: 1980074 - RNA, 19 nt, Artificial Sequence
  Description of Artificial Sequence: Synthetic oligonucleotide
  Sense strand starting at position 1858 of SEQ ID NO: 1880606
aggauugcaugugcagaaa

SEQ ID NO: 1980075 - RNA, 19 nt, Artificial Sequence
  Description of Artificial Sequence: Synthetic oligonucleotide
  Antisense strand to SEQ ID NO: 1980074
uuucugcacaugcaauccu

SEQ ID NO: 1980076 - RNA, 19 nt, Artificial Sequence
  Description of Artificial Sequence: Synthetic oligonucleotide
  Sense strand starting at position 1985 of SEQ ID NO: 1880606
uaguguggucucuggauac

SEQ ID NO: 1980077 - RNA, 19 nt, Artificial Sequence
  Description of Artificial Sequence: Synthetic oligonucleotide
  Antisense strand to SEQ ID NO: 1980076
guauccagagaccacacua

SEQ ID NO: 1980078 - RNA, 19 nt, Artificial Sequence
  Description of Artificial Sequence: Synthetic oligonucleotide
  Sense strand starting at position 2563 of SEQ ID NO: 1880606
gcagguugagcugggaaga

SEQ ID NO: 1980079 - RNA, 19 nt, Artificial Sequence
  Description of Artificial Sequence: Synthetic oligonucleotide
  Antisense strand to SEQ ID NO: 1980078
ucuucccagcucaaccugc

SEQ ID NO: 1980080 - RNA, 19 nt, Artificial Sequence
  Description of Artificial Sequence: Synthetic oligonucleotide
  Sense strand starting at position 2851 of SEQ ID NO: 1880606
aaauaacgugcuuauauag

SEQ ID NO: 1980081 - RNA, 19 nt, Artificial Sequence
  Description of Artificial Sequence: Synthetic oligonucleotide
  Antisense strand to SEQ ID NO: 1980080
cuauauaagcacguuauuu

SEQ ID NO: 1980082 - RNA, 19 nt, Artificial Sequence
  Description of Artificial Sequence: Synthetic oligonucleotide
  Sense strand starting at position 3207 of SEQ ID NO: 1880606
agucuccagccuugacaaa

SEQ ID NO: 1980083 - RNA, 19 nt, Artificial Sequence
  Description of Artificial Sequence: Synthetic oligonucleotide
  Antisense strand to SEQ ID NO: 1980082
uuugucaaggcuggagacu

SEQ ID NO: 1980084 - RNA, 19 nt, Artificial Sequence
  Description of Artificial Sequence: Synthetic oligonucleotide
  Sense strand starting at position 3237 of SEQ ID NO: 1880606
ugcugagguuucucaucca

SEQ ID NO: 1980085 - RNA, 19 nt, Artificial Sequence
  Description of Artificial Sequence: Synthetic oligonucleotide
  Antisense strand to SEQ ID NO: 1980084
uggaugagaaaccucagca

SEQ ID NO: 1980086 - RNA, 19 nt, Artificial Sequence
  Description of Artificial Sequence: Synthetic oligonucleotide
  Sense strand starting at position 3289 of SEQ ID NO: 1880606
ggagcugagaaguguguuu

SEQ ID NO: 1980087 - RNA, 19 nt, Artificial Sequence
  Description of Artificial Sequence: Synthetic oligonucleotide
  Antisense strand to SEQ ID NO: 1980086
aaacacacuucucagcucc

SEQ ID NO: 1980088 - RNA, 19 nt, Artificial Sequence
  Description of Artificial Sequence: Synthetic oligonucleotide
  Sense strand starting at position 3291 of SEQ ID NO: 1880606
agcugagaaguguguuuau

SEQ ID NO: 1980089 - RNA, 19 nt, Artificial Sequence
  Description of Artificial Sequence: Synthetic oligonucleotide
  Antisense strand to SEQ ID NO: 1980088
auaaacacacuucucagcu

SEQ ID NO: 1980090 - RNA, 19 nt, Artificial Sequence
  Description of Artificial Sequence: Synthetic oligonucleotide
  Sense strand starting at position 3294 of SEQ ID NO: 1880606
ugagaaguguguuuauucu

SEQ ID NO: 1980091 - RNA, 19 nt, Artificial Sequence
  Description of Artificial Sequence: Synthetic oligonucleotide
  Antisense strand to SEQ ID NO: 1980090
agaauaaacacacuucuca

SEQ ID NO: 1980092 - RNA, 19 nt, Artificial Sequence
  Description of Artificial Sequence: Synthetic oligonucleotide
  Sense strand starting at position 3302 of SEQ ID NO: 1880606
guguuuauucugcuccuuu

SEQ ID NO: 1980093 - RNA, 19 nt, Artificial Sequence
  Description of Artificial Sequence: Synthetic oligonucleotide
  Antisense strand to SEQ ID NO: 1980092
aaaggagcagaauaaacac

SEQ ID NO: 1980094 - RNA, 19 nt, Artificial Sequence
  Description of Artificial Sequence: Synthetic oligonucleotide
  Sense strand starting at position 3361 of SEQ ID NO: 1880606
gcccaagcugugucugagu

SEQ ID NO: 1980095 - RNA, 19 nt, Artificial Sequence
  Description of Artificial Sequence: Synthetic oligonucleotide
  Antisense strand to SEQ ID NO: 1980094
acucagacacagcuugggc

SEQ ID NO: 1980096 - RNA, 19 nt, Artificial Sequence
  Description of Artificial Sequence: Synthetic oligonucleotide
  Sense strand starting at position 3366 of SEQ ID NO: 1880606
agcugugucugagugaaug

SEQ ID NO: 1980097 - RNA, 19 nt, Artificial Sequence
  Description of Artificial Sequence: Synthetic oligonucleotide
  Antisense strand to SEQ ID NO: 1980096
cauucacucagacacagcu

SEQ ID NO: 1980098 - RNA, 19 nt, Artificial Sequence
  Description of Artificial Sequence: Synthetic oligonucleotide
  Sense strand starting at position 3368 of SEQ ID NO: 1880606
cugugucugagugaaugga

SEQ ID NO: 1980099 - RNA, 19 nt, Artificial Sequence
  Description of Artificial Sequence: Synthetic oligonucleotide
  Antisense strand to SEQ ID NO: 1980098
uccauucacucagacacag

SEQ ID NO: 1980100 - RNA, 19 nt, Artificial Sequence
  Description of Artificial Sequence: Synthetic oligonucleotide
  Sense strand starting at position 3436 of SEQ ID NO: 1880606
guguguaagugauuuccau

SEQ ID NO: 1980101 - RNA, 19 nt, Artificial Sequence
  Description of Artificial Sequence: Synthetic oligonucleotide
  Antisense strand to SEQ ID NO: 1980100
auggaaaucacuuacacac

SEQ ID NO: 1980102 - RNA, 19 nt, Artificial Sequence
  Description of Artificial Sequence: Synthetic oligonucleotide
  Sense strand starting at position 3440 of SEQ ID NO: 1880606
guaagugauuuccaugauc

SEQ ID NO: 1980103 - RNA, 19 nt, Artificial Sequence
  Description of Artificial Sequence: Synthetic oligonucleotide
  Antisense strand to SEQ ID NO: 1980102
gaucauggaaaucacuuac

SEQ ID NO: 1980104 - RNA, 19 nt, Artificial Sequence
  Description of Artificial Sequence: Synthetic oligonucleotide
  Sense strand starting at position 3476 of SEQ ID NO: 1880606
uugagaugauccuucucuu

SEQ ID NO: 1980105 - RNA, 19 nt, Artificial Sequence
  Description of Artificial Sequence: Synthetic oligonucleotide
  Antisense strand to SEQ ID NO: 1980104
aagagaaggaucaucucaa

SEQ ID NO: 1980106 - RNA, 19 nt, Artificial Sequence
  Description of Artificial Sequence: Synthetic oligonucleotide
  Sense strand starting at position 3549 of SEQ ID NO: 1880606
uugaucuggcucuaucaga

SEQ ID NO: 1980107 - RNA, 19 nt, Artificial Sequence
  Description of Artificial Sequence: Synthetic oligonucleotide
  Antisense strand to SEQ ID NO: 1980106
ucugauagagccagaucaa

SEQ ID NO: 1980108 - RNA, 19 nt, Artificial Sequence
  Description of Artificial Sequence: Synthetic oligonucleotide
  Sense strand starting at position 3578 of SEQ ID NO: 1880606
acuguuaggacgcauccaa

SEQ ID NO: 1980109 - RNA, 19 nt, Artificial Sequence
  Description of Artificial Sequence: Synthetic oligonucleotide
  Antisense strand to SEQ ID NO: 1980108
uuggaugcguccuaacagu

SEQ ID NO: 1980110 - RNA, 19 nt, Artificial Sequence
  Description of Artificial Sequence: Synthetic oligonucleotide
  Sense strand starting at position 3749 of SEQ ID NO: 1880606
guaauaccucuugguagug

SEQ ID NO: 1980111 - RNA, 19 nt, Artificial Sequence
  Description of Artificial Sequence: Synthetic oligonucleotide
  Antisense strand to SEQ ID NO: 1980110
cacuaccaagagguauuac

SEQ ID NO: 1980112 - RNA, 19 nt, Artificial Sequence
  Description of Artificial Sequence: Synthetic oligonucleotide
  Sense strand starting at position 9 of SEQ ID NO: 1880607
ggaauuaaaucuuugcaaa

SEQ ID NO: 1980113 - RNA, 19 nt, Artificial Sequence
  Description of Artificial Sequence: Synthetic oligonucleotide
  Antisense strand to SEQ ID NO: 1980112
uuugcaaagauuuaauucc

SEQ ID NO: 1980114 - RNA, 19 nt, Artificial Sequence
  Description of Artificial Sequence: Synthetic oligonucleotide
  Sense strand starting at position 163 of SEQ ID NO: 1880607
gcauuuaugaggugcuuau

SEQ ID NO: 1980115 - RNA, 19 nt, Artificial Sequence
  Description of Artificial Sequence: Synthetic oligonucleotide
  Antisense strand to SEQ ID NO: 1980114
auaagcaccucauaaaugc

SEQ ID NO: 1980116 - RNA, 19 nt, Artificial Sequence
  Description of Artificial Sequence: Synthetic oligonucleotide
  Sense strand starting at position 167 of SEQ ID NO: 1880607
uuaugaggugcuuauuaca

SEQ ID NO: 1980117 - RNA, 19 nt, Artificial Sequence
  Description of Artificial Sequence: Synthetic oligonucleotide
  Antisense strand to SEQ ID NO: 1980116
uguaauaagcaccucauaa

SEQ ID NO: 1980118 - RNA, 19 nt, Artificial Sequence
  Description of Artificial Sequence: Synthetic oligonucleotide
  Sense strand starting at position 185 of SEQ ID NO: 1880607
augccauugccugugcuua

SEQ ID NO: 1980119 - RNA, 19 nt, Artificial Sequence
  Description of Artificial Sequence: Synthetic oligonucleotide
  Antisense strand to SEQ ID NO: 1980118
uaagcacaggcaauggcau

SEQ ID NO: 1980120 - RNA, 19 nt, Artificial Sequence
  Description of Artificial Sequence: Synthetic oligonucleotide
  Sense strand starting at position 330 of SEQ ID NO: 1880607
cucaaaguugugugggaag

SEQ ID NO: 1980121 - RNA, 19 nt, Artificial Sequence
  Description of Artificial Sequence: Synthetic oligonucleotide
  Antisense strand to SEQ ID NO: 1980120
cuucccacacaacuuugag

SEQ ID NO: 1980122 - RNA, 19 nt, Artificial Sequence
  Description of Artificial Sequence: Synthetic oligonucleotide
  Sense strand starting at position 375 of SEQ ID NO: 1880607
uggucugcaguugagaauu

SEQ ID NO: 1980123 - RNA, 19 nt, Artificial Sequence
  Description of Artificial Sequence: Synthetic oligonucleotide
  Antisense strand to SEQ ID NO: 1980122
aauucucaacugcagacca

SEQ ID NO: 1980124 - RNA, 19 nt, Artificial Sequence
  Description of Artificial Sequence: Synthetic oligonucleotide
  Sense strand starting at position 426 of SEQ ID NO: 1880607
aggugaauagaucguggaa

SEQ ID NO: 1980125 - RNA, 19 nt, Artificial Sequence
  Description of Artificial Sequence: Synthetic oligonucleotide
  Antisense strand to SEQ ID NO: 1980124
uuccacgaucuauucaccu

SEQ ID NO: 1980126 - RNA, 19 nt, Artificial Sequence
  Description of Artificial Sequence: Synthetic oligonucleotide
  Sense strand starting at position 429 of SEQ ID NO: 1880607
ugaauagaucguggaauug

SEQ ID NO: 1980127 - RNA, 19 nt, Artificial Sequence
  Description of Artificial Sequence: Synthetic oligonucleotide
  Antisense strand to SEQ ID NO: 1980126
caauuccacgaucuauuca

SEQ ID NO: 1980128 - RNA, 19 nt, Artificial Sequence
  Description of Artificial Sequence: Synthetic oligonucleotide
  Sense strand starting at position 439 of SEQ ID NO: 1880607
guggaauugaucuggaguc

SEQ ID NO: 1980129 - RNA, 19 nt, Artificial Sequence
  Description of Artificial Sequence: Synthetic oligonucleotide
  Antisense strand to SEQ ID NO: 1980128
gacuccagaucaauuccac

SEQ ID NO: 1980130 - RNA, 19 nt, Artificial Sequence
  Description of Artificial Sequence: Synthetic oligonucleotide
  Sense strand starting at position 490 of SEQ ID NO: 1880607
uaugauaucgaccaaguua

SEQ ID NO: 1980131 - RNA, 19 nt, Artificial Sequence
  Description of Artificial Sequence: Synthetic oligonucleotide
  Antisense strand to SEQ ID NO: 1980130
uaacuuggucgauaucaua

SEQ ID NO: 1980132 - RNA, 19 nt, Artificial Sequence
  Description of Artificial Sequence: Synthetic oligonucleotide
  Sense strand starting at position 519 of SEQ ID NO: 1880607
cugauuaggugaucuugac

SEQ ID NO: 1980133 - RNA, 19 nt, Artificial Sequence
  Description of Artificial Sequence: Synthetic oligonucleotide
  Antisense strand to SEQ ID NO: 1980132
gucaagaucaccuaaucag

SEQ ID NO: 1980134 - RNA, 19 nt, Artificial Sequence
  Description of Artificial Sequence: Synthetic oligonucleotide
  Sense strand starting at position 525 of SEQ ID NO: 1880607
aggugaucuugacuagcua

SEQ ID NO: 1980135 - RNA, 19 nt, Artificial Sequence
  Description of Artificial Sequence: Synthetic oligonucleotide
  Antisense strand to SEQ ID NO: 1980134
uagcuagucaagaucaccu

SEQ ID NO: 1980136 - RNA, 19 nt, Artificial Sequence
  Description of Artificial Sequence: Synthetic oligonucleotide
  Sense strand starting at position 529 of SEQ ID NO: 1880607
gaucuugacuagcuagaga

SEQ ID NO: 1980137 - RNA, 19 nt, Artificial Sequence
  Description of Artificial Sequence: Synthetic oligonucleotide
  Antisense strand to SEQ ID NO: 1980136
ucucuagcuagucaagauc

SEQ ID NO: 1980138 - RNA, 19 nt, Artificial Sequence
  Description of Artificial Sequence: Synthetic oligonucleotide
  Sense strand starting at position 622 of SEQ ID NO: 1880607
aagagagugcugcaaacau

SEQ ID NO: 1980139 - RNA, 19 nt, Artificial Sequence
  Description of Artificial Sequence: Synthetic oligonucleotide
  Antisense strand to SEQ ID NO: 1980138
auguuugcagcacucucuu

SEQ ID NO: 1980140 - RNA, 19 nt, Artificial Sequence
  Description of Artificial Sequence: Synthetic oligonucleotide
  Sense strand starting at position 652 of SEQ ID NO: 1880607
gcuaaagugagauguagga

SEQ ID NO: 1980141 - RNA, 19 nt, Artificial Sequence
  Description of Artificial Sequence: Synthetic oligonucleotide
  Antisense strand to SEQ ID NO: 1980140
uccuacaucucacuuuagc

SEQ ID NO: 1980142 - RNA, 19 nt, Artificial Sequence
  Description of Artificial Sequence: Synthetic oligonucleotide
  Sense strand starting at position 656 of SEQ ID NO: 1880607
aagugagauguaggaacuu

SEQ ID NO: 1980143 - RNA, 19 nt, Artificial Sequence
  Description of Artificial Sequence: Synthetic oligonucleotide
  Antisense strand to SEQ ID NO: 1980142
aaguuccuacaucucacuu

SEQ ID NO: 1980144 - RNA, 19 nt, Artificial Sequence
  Description of Artificial Sequence: Synthetic oligonucleotide
  Sense strand starting at position 909 of SEQ ID NO: 1880607
uaugguuugggugauguuu

SEQ ID NO: 1980145 - RNA, 19 nt, Artificial Sequence
  Description of Artificial Sequence: Synthetic oligonucleotide
  Antisense strand to SEQ ID NO: 1980144
aaacaucacccaaaccaua

SEQ ID NO: 1980146 - RNA, 19 nt, Artificial Sequence
  Description of Artificial Sequence: Synthetic oligonucleotide
  Sense strand starting at position 983 of SEQ ID NO: 1880607
ucccacauccugggaaauu

SEQ ID NO: 1980147 - RNA, 19 nt, Artificial Sequence
  Description of Artificial Sequence: Synthetic oligonucleotide
  Antisense strand to SEQ ID NO: 1980146
aauuucccaggauguggga

SEQ ID NO: 1980148 - RNA, 19 nt, Artificial Sequence
  Description of Artificial Sequence: Synthetic oligonucleotide
  Sense strand starting at position 1021 of SEQ ID NO: 1880607
agaacaguuggucaccuua

SEQ ID NO: 1980149 - RNA, 19 nt, Artificial Sequence
  Description of Artificial Sequence: Synthetic oligonucleotide
  Antisense strand to SEQ ID NO: 1980148
uaaggugaccaacuguucu

SEQ ID NO: 1980150 - RNA, 19 nt, Artificial Sequence
  Description of Artificial Sequence: Synthetic oligonucleotide
  Sense strand starting at position 1200 of SEQ ID NO: 1880607
accugcuuuggauauccaa

SEQ ID NO: 1980151 - RNA, 19 nt, Artificial Sequence
  Description of Artificial Sequence: Synthetic oligonucleotide
  Antisense strand to SEQ ID NO: 1980150
uuggauauccaaagcaggu

SEQ ID NO: 1980152 - RNA, 19 nt, Artificial Sequence
  Description of Artificial Sequence: Synthetic oligonucleotide
  Sense strand starting at position 1749 of SEQ ID NO: 1880607
gaagcaaccuugucuagga

SEQ ID NO: 1980153 - RNA, 19 nt, Artificial Sequence
  Description of Artificial Sequence: Synthetic oligonucleotide
  Antisense strand to SEQ ID NO: 1980152
uccuagacaagguugcuuc

SEQ ID NO: 1980154 - RNA, 19 nt, Artificial Sequence
  Description of Artificial Sequence: Synthetic oligonucleotide
  Sense strand starting at position 1801 of SEQ ID NO: 1880607
auuuauagcucuuugagcu

SEQ ID NO: 1980155 - RNA, 19 nt, Artificial Sequence
  Description of Artificial Sequence: Synthetic oligonucleotide
  Antisense strand to SEQ ID NO: 1980154
agcucaaagagcuauaaau

SEQ ID NO: 1980156 - RNA, 19 nt, Artificial Sequence
  Description of Artificial Sequence: Synthetic oligonucleotide
  Sense strand starting at position 1836 of SEQ ID NO: 1880607
caagguaguaagugacaga

SEQ ID NO: 1980157 - RNA, 19 nt, Artificial Sequence
  Description of Artificial Sequence: Synthetic oligonucleotide
  Antisense strand to SEQ ID NO: 1980156
ucugucacuuacuaccuug

SEQ ID NO: 1980158 - RNA, 19 nt, Artificial Sequence
  Description of Artificial Sequence: Synthetic oligonucleotide
  Sense strand starting at position 1894 of SEQ ID NO: 1880607
cuaccuuuggaagguagau

SEQ ID NO: 1980159 - RNA, 19 nt, Artificial Sequence
  Description of Artificial Sequence: Synthetic oligonucleotide
  Antisense strand to SEQ ID NO: 1980158
aucuaccuuccaaagguag

SEQ ID NO: 1980160 - RNA, 19 nt, Artificial Sequence
  Description of Artificial Sequence: Synthetic oligonucleotide
  Sense strand starting at position 2330 of SEQ ID NO: 1880607
ccuuuaguccuacagaucu

SEQ ID NO: 1980161 - RNA, 19 nt, Artificial Sequence
  Description of Artificial Sequence: Synthetic oligonucleotide
  Antisense strand to SEQ ID NO: 1980160
agaucuguaggacuaaagg

SEQ ID NO: 1980162 - RNA, 19 nt, Artificial Sequence
  Description of Artificial Sequence: Synthetic oligonucleotide
  Sense strand starting at position 2365 of SEQ ID NO: 1880607
gugaccuccucuguugaaa

SEQ ID NO: 1980163 - RNA, 19 nt, Artificial Sequence
  Description of Artificial Sequence: Synthetic oligonucleotide
  Antisense strand to SEQ ID NO: 1980162
uuucaacagaggaggucac

SEQ ID NO: 1980164 - RNA, 19 nt, Artificial Sequence
  Description of Artificial Sequence: Synthetic oligonucleotide
  Sense strand starting at position 2399 of SEQ ID NO: 1880607
uuggcuaucuuuccaugaa

SEQ ID NO: 1980165 - RNA, 19 nt, Artificial Sequence
  Description of Artificial Sequence: Synthetic oligonucleotide
  Antisense strand to SEQ ID NO: 1980164
uucauggaaagauagccaa

SEQ ID NO: 1980166 - RNA, 19 nt, Artificial Sequence
  Description of Artificial Sequence: Synthetic oligonucleotide
  Sense strand starting at position 2402 of SEQ ID NO: 1880607
gcuaucuuuccaugaagag

SEQ ID NO: 1980167 - RNA, 19 nt, Artificial Sequence
  Description of Artificial Sequence: Synthetic oligonucleotide
  Antisense strand to SEQ ID NO: 1980166
cucuucauggaaagauagc

SEQ ID NO: 1980168 - RNA, 19 nt, Artificial Sequence
  Description of Artificial Sequence: Synthetic oligonucleotide
  Sense strand starting at position 2403 of SEQ ID NO: 1880607
cuaucuuuccaugaagagu

SEQ ID NO: 1980169 - RNA, 19 nt, Artificial Sequence
  Description of Artificial Sequence: Synthetic oligonucleotide
  Antisense strand to SEQ ID NO: 1980168
acucuucauggaaagauag

SEQ ID NO: 1980170 - RNA, 19 nt, Artificial Sequence
  Description of Artificial Sequence: Synthetic oligonucleotide
  Sense strand starting at position 2606 of SEQ ID NO: 1880607
ucgccauuugcugaguguu

SEQ ID NO: 1980171 - RNA, 19 nt, Artificial Sequence
  Description of Artificial Sequence: Synthetic oligonucleotide
  Antisense strand to SEQ ID NO: 1980170
aacacucagcaaauggcga

SEQ ID NO: 1980172 - RNA, 19 nt, Artificial Sequence
  Description of Artificial Sequence: Synthetic oligonucleotide
  Sense strand starting at position 2609 of SEQ ID NO: 1880607
ccauuugcugaguguuugu

SEQ ID NO: 1980173 - RNA, 19 nt, Artificial Sequence
  Description of Artificial Sequence: Synthetic oligonucleotide
  Antisense strand to SEQ ID NO: 1980172
acaaacacucagcaaaugg

SEQ ID NO: 1980174 - RNA, 19 nt, Artificial Sequence
  Description of Artificial Sequence: Synthetic oligonucleotide
  Sense strand starting at position 2736 of SEQ ID NO: 1880607
gaaaguaagcccuggaaag

SEQ ID NO: 1980175 - RNA, 19 nt, Artificial Sequence
  Description of Artificial Sequence: Synthetic oligonucleotide
  Antisense strand to SEQ ID NO: 1980174
cuuuccagggcuuacuuuc

SEQ ID NO: 1980176 - RNA, 19 nt, Artificial Sequence
  Description of Artificial Sequence: Synthetic oligonucleotide
  Sense strand starting at position 2737 of SEQ ID NO: 1880607
aaaguaagcccuggaaagu

SEQ ID NO: 1980177 - RNA, 19 nt, Artificial Sequence
  Description of Artificial Sequence: Synthetic oligonucleotide
  Antisense strand to SEQ ID NO: 1980176
acuuuccagggcuuacuuu

SEQ ID NO: 1980178 - RNA, 19 nt, Artificial Sequence
  Description of Artificial Sequence: Synthetic oligonucleotide
  Sense strand starting at position 2738 of SEQ ID NO: 1880607
aaguaagcccuggaaaguu

SEQ ID NO: 1980179 - RNA, 19 nt, Artificial Sequence
  Description of Artificial Sequence: Synthetic oligonucleotide
  Antisense strand to SEQ ID NO: 1980178
aacuuuccagggcuuacuu

SEQ ID NO: 1980180 - RNA, 19 nt, Artificial Sequence
  Description of Artificial Sequence: Synthetic oligonucleotide
  Sense strand starting at position 2785 of SEQ ID NO: 1880607
gcaucuggauuugaacaua

SEQ ID NO: 1980181 - RNA, 19 nt, Artificial Sequence
  Description of Artificial Sequence: Synthetic oligonucleotide
  Antisense strand to SEQ ID NO: 1980180
uauguucaaauccagaugc

SEQ ID NO: 1980182 - RNA, 19 nt, Artificial Sequence
  Description of Artificial Sequence: Synthetic oligonucleotide
  Sense strand starting at position 2902 of SEQ ID NO: 1880607
agcccaagggagugaugua

SEQ ID NO: 1980183 - RNA, 19 nt, Artificial Sequence
  Description of Artificial Sequence: Synthetic oligonucleotide
  Antisense strand to SEQ ID NO: 1980182
uacaucacucccuugggcu

SEQ ID NO: 1980184 - RNA, 19 nt, Artificial Sequence
  Description of Artificial Sequence: Synthetic oligonucleotide
  Sense strand starting at position 3407 of SEQ ID NO: 1880607
guaucagaaccuuggguca

SEQ ID NO: 1980185 - RNA, 19 nt, Artificial Sequence
  Description of Artificial Sequence: Synthetic oligonucleotide
  Antisense strand to SEQ ID NO: 1980184
ugacccaagguucugauac

SEQ ID NO: 1980186 - RNA, 19 nt, Artificial Sequence
  Description of Artificial Sequence: Synthetic oligonucleotide
  Sense strand starting at position 3501 of SEQ ID NO: 1880607
caauaaugggcaggucuua

SEQ ID NO: 1980187 - RNA, 19 nt, Artificial Sequence
  Description of Artificial Sequence: Synthetic oligonucleotide
  Antisense strand to SEQ ID NO: 1980186
uaagaccugcccauuauug

SEQ ID NO: 1980188 - RNA, 19 nt, Artificial Sequence
  Description of Artificial Sequence: Synthetic oligonucleotide
  Sense strand starting at position 3726 of SEQ ID NO: 1880607
uaacgugugaugggaggua

SEQ ID NO: 1980189 - RNA, 19 nt, Artificial Sequence
  Description of Artificial Sequence: Synthetic oligonucleotide
  Antisense strand to SEQ ID NO: 1980188
uaccucccaucacacguua

SEQ ID NO: 1980190 - RNA, 19 nt, Artificial Sequence
  Description of Artificial Sequence: Synthetic oligonucleotide
  Sense strand starting at position 3921 of SEQ ID NO: 1880607
guguuucuagaguaaugaa

SEQ ID NO: 1980191 - RNA, 19 nt, Artificial Sequence
  Description of Artificial Sequence: Synthetic oligonucleotide
  Antisense strand to SEQ ID NO: 1980190
uucauuacucuagaaacac

SEQ ID NO: 1980192 - RNA, 19 nt, Artificial Sequence
  Description of Artificial Sequence: Synthetic oligonucleotide
  Sense strand starting at position 62 of SEQ ID NO: 1880608
acgagacaagcauggaaua

SEQ ID NO: 1980193 - RNA, 19 nt, Artificial Sequence
  Description of Artificial Sequence: Synthetic oligonucleotide
  Antisense strand to SEQ ID NO: 1980192
uauuccaugcuugucucgu

SEQ ID NO: 1980194 - RNA, 19 nt, Artificial Sequence
  Description of Artificial Sequence: Synthetic oligonucleotide
  Sense strand starting at position 63 of SEQ ID NO: 1880608
cgagacaagcauggaauaa

SEQ ID NO: 1980195 - RNA, 19 nt, Artificial Sequence
  Description of Artificial Sequence: Synthetic oligonucleotide
  Antisense strand to SEQ ID NO: 1980194
uuauuccaugcuugucucg

SEQ ID NO: 1980196 - RNA, 19 nt, Artificial Sequence
  Description of Artificial Sequence: Synthetic oligonucleotide
  Sense strand starting at position 124 of SEQ ID NO: 1880608
agcagaagcaaaggugaua

SEQ ID NO: 1980197 - RNA, 19 nt, Artificial Sequence
  Description of Artificial Sequence: Synthetic oligonucleotide
  Antisense strand to SEQ ID NO: 1980196
uaucaccuuugcuucugcu

SEQ ID NO: 1980198 - RNA, 19 nt, Artificial Sequence
  Description of Artificial Sequence: Synthetic oligonucleotide
  Sense strand starting at position 367 of SEQ ID NO: 1880608
aagaguuggcugcauagag

SEQ ID NO: 1980199 - RNA, 19 nt, Artificial Sequence
  Description of Artificial Sequence: Synthetic oligonucleotide
  Antisense strand to SEQ ID NO: 1980198
cucuaugcagccaacucuu

SEQ ID NO: 1980200 - RNA, 19 nt, Artificial Sequence
  Description of Artificial Sequence: Synthetic oligonucleotide
  Sense strand starting at position 405 of SEQ ID NO: 1880608
uggaauugauuccuuauag

SEQ ID NO: 1980201 - RNA, 19 nt, Artificial Sequence
  Description of Artificial Sequence: Synthetic oligonucleotide
  Antisense strand to SEQ ID NO: 1980200
cuauaaggaaucaauucca

SEQ ID NO: 1980202 - RNA, 19 nt, Artificial Sequence
  Description of Artificial Sequence: Synthetic oligonucleotide
  Sense strand starting at position 406 of SEQ ID NO: 1880608
ggaauugauuccuuauagc

SEQ ID NO: 1980203 - RNA, 19 nt, Artificial Sequence
  Description of Artificial Sequence: Synthetic oligonucleotide
  Antisense strand to SEQ ID NO: 1980202
gcuauaaggaaucaauucc

SEQ ID NO: 1980204 - RNA, 19 nt, Artificial Sequence
  Description of Artificial Sequence: Synthetic oligonucleotide
  Sense strand starting at position 465 of SEQ ID NO: 1880608
uuucuauuucugugcauua

SEQ ID NO: 1980205 - RNA, 19 nt, Artificial Sequence
  Description of Artificial Sequence: Synthetic oligonucleotide
  Antisense strand to SEQ ID NO: 1980204
uaaugcacagaaauagaaa

SEQ ID NO: 1980206 - RNA, 19 nt, Artificial Sequence
  Description of Artificial Sequence: Synthetic oligonucleotide
  Sense strand starting at position 478 of SEQ ID NO: 1880608
gcauuaaccggugauaaug

SEQ ID NO: 1980207 - RNA, 19 nt, Artificial Sequence
  Description of Artificial Sequence: Synthetic oligonucleotide
  Antisense strand to SEQ ID NO: 1980206
cauuaucaccgguuaaugc

SEQ ID NO: 1980208 - RNA, 19 nt, Artificial Sequence
  Description of Artificial Sequence: Synthetic oligonucleotide
  Sense strand starting at position 487 of SEQ ID NO: 1880608
ggugauaaugacugauacu

SEQ ID NO: 1980209 - RNA, 19 nt, Artificial Sequence
  Description of Artificial Sequence: Synthetic oligonucleotide
  Antisense strand to SEQ ID NO: 1980208
aguaucagucauuaucacc

SEQ ID NO: 1980210 - RNA, 19 nt, Artificial Sequence
  Description of Artificial Sequence: Synthetic oligonucleotide
  Sense strand starting at position 541 of SEQ ID NO: 1880608
cuagucuuaccugggauca

SEQ ID NO: 1980211 - RNA, 19 nt, Artificial Sequence
  Description of Artificial Sequence: Synthetic oligonucleotide
  Antisense strand to SEQ ID NO: 1980210
ugaucccagguaagacuag

SEQ ID NO: 1980212 - RNA, 19 nt, Artificial Sequence
  Description of Artificial Sequence: Synthetic oligonucleotide
  Sense strand starting at position 723 of SEQ ID NO: 1880608
uauucucacgguuauagga

SEQ ID NO: 1980213 - RNA, 19 nt, Artificial Sequence
  Description of Artificial Sequence: Synthetic oligonucleotide
  Antisense strand to SEQ ID NO: 1980212
uccuauaaccgugagaaua

SEQ ID NO: 1980214 - RNA, 19 nt, Artificial Sequence
  Description of Artificial Sequence: Synthetic oligonucleotide
  Sense strand starting at position 730 of SEQ ID NO: 1880608
acgguuauaggagagugau

SEQ ID NO: 1980215 - RNA, 19 nt, Artificial Sequence
  Description of Artificial Sequence: Synthetic oligonucleotide
  Antisense strand to SEQ ID NO: 1980214
aucacucuccuauaaccgu

SEQ ID NO: 1980216 - RNA, 19 nt, Artificial Sequence
  Description of Artificial Sequence: Synthetic oligonucleotide
  Sense strand starting at position 733 of SEQ ID NO: 1880608
guuauaggagagugauaau

SEQ ID NO: 1980217 - RNA, 19 nt, Artificial Sequence
  Description of Artificial Sequence: Synthetic oligonucleotide
  Antisense strand to SEQ ID NO: 1980216
auuaucacucuccuauaac

SEQ ID NO: 1980218 - RNA, 19 nt, Artificial Sequence
  Description of Artificial Sequence: Synthetic oligonucleotide
  Sense strand starting at position 772 of SEQ ID NO: 1880608
aggccuaaacucuggaaau

SEQ ID NO: 1980219 - RNA, 19 nt, Artificial Sequence
  Description of Artificial Sequence: Synthetic oligonucleotide
  Antisense strand to SEQ ID NO: 1980218
auuuccagaguuuaggccu

SEQ ID NO: 1980220 - RNA, 19 nt, Artificial Sequence
  Description of Artificial Sequence: Synthetic oligonucleotide
  Sense strand starting at position 830 of SEQ ID NO: 1880608
agucauaacucagcccaga

SEQ ID NO: 1980221 - RNA, 19 nt, Artificial Sequence
  Description of Artificial Sequence: Synthetic oligonucleotide
  Antisense strand to SEQ ID NO: 1980220
ucugggcugaguuaugacu

SEQ ID NO: 1980222 - RNA, 19 nt, Artificial Sequence
  Description of Artificial Sequence: Synthetic oligonucleotide
  Sense strand starting at position 895 of SEQ ID NO: 1880608
gggcuaaugaagggacauu

SEQ ID NO: 1980223 - RNA, 19 nt, Artificial Sequence
  Description of Artificial Sequence: Synthetic oligonucleotide
  Antisense strand to SEQ ID NO: 1980222
aaugucccuucauuagccc

SEQ ID NO: 1980224 - RNA, 19 nt, Artificial Sequence
  Description of Artificial Sequence: Synthetic oligonucleotide
  Sense strand starting at position 956 of SEQ ID NO: 1880608
ucaucuuaugcugagaaca

SEQ ID NO: 1980225 - RNA, 19 nt, Artificial Sequence
  Description of Artificial Sequence: Synthetic oligonucleotide
  Antisense strand to SEQ ID NO: 1980224
uguucucagcauaagauga

SEQ ID NO: 1980226 - RNA, 19 nt, Artificial Sequence
  Description of Artificial Sequence: Synthetic oligonucleotide
  Sense strand starting at position 1335 of SEQ ID NO: 1880608
ggcugagugcuucugcuuu

SEQ ID NO: 1980227 - RNA, 19 nt, Artificial Sequence
  Description of Artificial Sequence: Synthetic oligonucleotide
  Antisense strand to SEQ ID NO: 1980226
aaagcagaagcacucagcc

SEQ ID NO: 1980228 - RNA, 19 nt, Artificial Sequence
  Description of Artificial Sequence: Synthetic oligonucleotide
  Sense strand starting at position 1388 of SEQ ID NO: 1880608
gcuauuuccaguggacugu

SEQ ID NO: 1980229 - RNA, 19 nt, Artificial Sequence
  Description of Artificial Sequence: Synthetic oligonucleotide
  Antisense strand to SEQ ID NO: 1980228
acaguccacuggaaauagc

SEQ ID NO: 1980230 - RNA, 19 nt, Artificial Sequence
  Description of Artificial Sequence: Synthetic oligonucleotide
  Sense strand starting at position 1553 of SEQ ID NO: 1880608
uuuguaaagauauggguaa

SEQ ID NO: 1980231 - RNA, 19 nt, Artificial Sequence
  Description of Artificial Sequence: Synthetic oligonucleotide
  Antisense strand to SEQ ID NO: 1980230
uuacccauaucuuuacaaa

SEQ ID NO: 1980232 - RNA, 19 nt, Artificial Sequence
  Description of Artificial Sequence: Synthetic oligonucleotide
  Sense strand starting at position 1560 of SEQ ID NO: 1880608
agauauggguaagcuugaa

SEQ ID NO: 1980233 - RNA, 19 nt, Artificial Sequence
  Description of Artificial Sequence: Synthetic oligonucleotide
  Antisense strand to SEQ ID NO: 1980232
uucaagcuuacccauaucu

SEQ ID NO: 1980234 - RNA, 19 nt, Artificial Sequence
  Description of Artificial Sequence: Synthetic oligonucleotide
  Sense strand starting at position 1589 of SEQ ID NO: 1880608
cagcauaaaugggucauaa

SEQ ID NO: 1980235 - RNA, 19 nt, Artificial Sequence
  Description of Artificial Sequence: Synthetic oligonucleotide
  Antisense strand to SEQ ID NO: 1980234
uuaugacccauuuaugcug

SEQ ID NO: 1980236 - RNA, 19 nt, Artificial Sequence
  Description of Artificial Sequence: Synthetic oligonucleotide
  Sense strand starting at position 1650 of SEQ ID NO: 1880608
gcuuauaguauggaagcau

SEQ ID NO: 1980237 - RNA, 19 nt, Artificial Sequence
  Description of Artificial Sequence: Synthetic oligonucleotide
  Antisense strand to SEQ ID NO: 1980236
augcuuccauacuauaagc

SEQ ID NO: 1980238 - RNA, 19 nt, Artificial Sequence
  Description of Artificial Sequence: Synthetic oligonucleotide
  Sense strand starting at position 1884 of SEQ ID NO: 1880608
cucuaaaguccagaauugu

SEQ ID NO: 1980239 - RNA, 19 nt, Artificial Sequence
  Description of Artificial Sequence: Synthetic oligonucleotide
  Antisense strand to SEQ ID NO: 1980238
acaauucuggacuuuagag

SEQ ID NO: 1980240 - RNA, 19 nt, Artificial Sequence
  Description of Artificial Sequence: Synthetic oligonucleotide
  Sense strand starting at position 1915 of SEQ ID NO: 1880608
guaggaauccagcauacca

SEQ ID NO: 1980241 - RNA, 19 nt, Artificial Sequence
  Description of Artificial Sequence: Synthetic oligonucleotide
  Antisense strand to SEQ ID NO: 1980240
ugguaugcuggauuccuac

SEQ ID NO: 1980242 - RNA, 19 nt, Artificial Sequence
  Description of Artificial Sequence: Synthetic oligonucleotide
  Sense strand starting at position 1939 of SEQ ID NO: 1880608
gagugaaaggaugguaauu

SEQ ID NO: 1980243 - RNA, 19 nt, Artificial Sequence
  Description of Artificial Sequence: Synthetic oligonucleotide
  Antisense strand to SEQ ID NO: 1980242
aauuaccauccuuucacuc

SEQ ID NO: 1980244 - RNA, 19 nt, Artificial Sequence
  Description of Artificial Sequence: Synthetic oligonucleotide
  Sense strand starting at position 2059 of SEQ ID NO: 1880608
ggauccguccauugagaca

SEQ ID NO: 1980245 - RNA, 19 nt, Artificial Sequence
  Description of Artificial Sequence: Synthetic oligonucleotide
  Antisense strand to SEQ ID NO: 1980244
ugucucaauggacggaucc

SEQ ID NO: 1980246 - RNA, 19 nt, Artificial Sequence
  Description of Artificial Sequence: Synthetic oligonucleotide
  Sense strand starting at position 2095 of SEQ ID NO: 1880608
ucuguugcagucuaggaaa

SEQ ID NO: 1980247 - RNA, 19 nt, Artificial Sequence
  Description of Artificial Sequence: Synthetic oligonucleotide
  Antisense strand to SEQ ID NO: 1980246
uuuccuagacugcaacaga

SEQ ID NO: 1980248 - RNA, 19 nt, Artificial Sequence
  Description of Artificial Sequence: Synthetic oligonucleotide
  Sense strand starting at position 2166 of SEQ ID NO: 1880608
gaaagaaucuuggcaguca

SEQ ID NO: 1980249 - RNA, 19 nt, Artificial Sequence
  Description of Artificial Sequence: Synthetic oligonucleotide
  Antisense strand to SEQ ID NO: 1980248
ugacugccaagauucuuuc

SEQ ID NO: 1980250 - RNA, 19 nt, Artificial Sequence
  Description of Artificial Sequence: Synthetic oligonucleotide
  Sense strand starting at position 2565 of SEQ ID NO: 1880608
ugaacugugugguuaaaga

SEQ ID NO: 1980251 - RNA, 19 nt, Artificial Sequence
  Description of Artificial Sequence: Synthetic oligonucleotide
  Antisense strand to SEQ ID NO: 1980250
ucuuuaaccacacaguuca

SEQ ID NO: 1980252 - RNA, 19 nt, Artificial Sequence
  Description of Artificial Sequence: Synthetic oligonucleotide
  Sense strand starting at position 2576 of SEQ ID NO: 1880608
guuaaagacguugagaguu

SEQ ID NO: 1980253 - RNA, 19 nt, Artificial Sequence
  Description of Artificial Sequence: Synthetic oligonucleotide
  Antisense strand to SEQ ID NO: 1980252
aacucucaacgucuuuaac

SEQ ID NO: 1980254 - RNA, 19 nt, Artificial Sequence
  Description of Artificial Sequence: Synthetic oligonucleotide
  Sense strand starting at position 2582 of SEQ ID NO: 1880608
gacguugagaguugacaga

SEQ ID NO: 1980255 - RNA, 19 nt, Artificial Sequence
  Description of Artificial Sequence: Synthetic oligonucleotide
  Antisense strand to SEQ ID NO: 1980254
ucugucaacucucaacguc

SEQ ID NO: 1980256 - RNA, 19 nt, Artificial Sequence
  Description of Artificial Sequence: Synthetic oligonucleotide
  Sense strand starting at position 2638 of SEQ ID NO: 1880608
uugaaaucuuggucaguga

SEQ ID NO: 1980257 - RNA, 19 nt, Artificial Sequence
  Description of Artificial Sequence: Synthetic oligonucleotide
  Antisense strand to SEQ ID NO: 1980256
ucacugaccaagauuucaa

SEQ ID NO: 1980258 - RNA, 19 nt, Artificial Sequence
  Description of Artificial Sequence: Synthetic oligonucleotide
  Sense strand starting at position 2641 of SEQ ID NO: 1880608
aaaucuuggucagugaaag

SEQ ID NO: 1980259 - RNA, 19 nt, Artificial Sequence
  Description of Artificial Sequence: Synthetic oligonucleotide
  Antisense strand to SEQ ID NO: 1980258
cuuucacugaccaagauuu

SEQ ID NO: 1980260 - RNA, 19 nt, Artificial Sequence
  Description of Artificial Sequence: Synthetic oligonucleotide
  Sense strand starting at position 2677 of SEQ ID NO: 1880608
ugcaaauacgaucaaaggu

SEQ ID NO: 1980261 - RNA, 19 nt, Artificial Sequence
  Description of Artificial Sequence: Synthetic oligonucleotide
  Antisense strand to SEQ ID NO: 1980260
accuuugaucguauuugca

SEQ ID NO: 1980262 - RNA, 19 nt, Artificial Sequence
  Description of Artificial Sequence: Synthetic oligonucleotide
  Sense strand starting at position 2790 of SEQ ID NO: 1880608
gaagauguauuguuggacu

SEQ ID NO: 1980263 - RNA, 19 nt, Artificial Sequence
  Description of Artificial Sequence: Synthetic oligonucleotide
  Antisense strand to SEQ ID NO: 1980262
aguccaacaauacaucuuc

SEQ ID NO: 1980264 - RNA, 19 nt, Artificial Sequence
  Description of Artificial Sequence: Synthetic oligonucleotide
  Sense strand starting at position 3128 of SEQ ID NO: 1880608
gaguacaauguguagauca

SEQ ID NO: 1980265 - RNA, 19 nt, Artificial Sequence
  Description of Artificial Sequence: Synthetic oligonucleotide
  Antisense strand to SEQ ID NO: 1980264
ugaucuacacauuguacuc

SEQ ID NO: 1980266 - RNA, 19 nt, Artificial Sequence
  Description of Artificial Sequence: Synthetic oligonucleotide
  Sense strand starting at position 3130 of SEQ ID NO: 1880608
guacaauguguagaucaga

SEQ ID NO: 1980267 - RNA, 19 nt, Artificial Sequence
  Description of Artificial Sequence: Synthetic oligonucleotide
  Antisense strand to SEQ ID NO: 1980266
ucugaucuacacauuguac

SEQ ID NO: 1980268 - RNA, 19 nt, Artificial Sequence
  Description of Artificial Sequence: Synthetic oligonucleotide
  Sense strand starting at position 3826 of SEQ ID NO: 1880608
aggugucagaguugggaau

SEQ ID NO: 1980269 - RNA, 19 nt, Artificial Sequence
  Description of Artificial Sequence: Synthetic oligonucleotide
  Antisense strand to SEQ ID NO: 1980268
auucccaacucugacaccu

SEQ ID NO: 1980270 - RNA, 19 nt, Artificial Sequence
  Description of Artificial Sequence: Synthetic oligonucleotide
  Sense strand starting at position 3832 of SEQ ID NO: 1880608
cagaguugggaaugucuaa

SEQ ID NO: 1980271 - RNA, 19 nt, Artificial Sequence
  Description of Artificial Sequence: Synthetic oligonucleotide
  Antisense strand to SEQ ID NO: 1980270
uuagacauucccaacucug

SEQ ID NO: 1980272 - RNA, 19 nt, Artificial Sequence
  Description of Artificial Sequence: Synthetic oligonucleotide
  Sense strand starting at position 37 of SEQ ID NO: 1880609
ccaccuuccuucguuugau

SEQ ID NO: 1980273 - RNA, 19 nt, Artificial Sequence
  Description of Artificial Sequence: Synthetic oligonucleotide
  Antisense strand to SEQ ID NO: 1980272
aucaaacgaaggaaggugg

SEQ ID NO: 1980274 - RNA, 19 nt, Artificial Sequence
  Description of Artificial Sequence: Synthetic oligonucleotide
  Sense strand starting at position 46 of SEQ ID NO: 1880609
uucguuugaucucaggaaa

SEQ ID NO: 1980275 - RNA, 19 nt, Artificial Sequence
  Description of Artificial Sequence: Synthetic oligonucleotide
  Antisense strand to SEQ ID NO: 1980274
uuuccugagaucaaacgaa

SEQ ID NO: 1980276 - RNA, 19 nt, Artificial Sequence
  Description of Artificial Sequence: Synthetic oligonucleotide
  Sense strand starting at position 49 of SEQ ID NO: 1880609
guuugaucucaggaaaguu

SEQ ID NO: 1980277 - RNA, 19 nt, Artificial Sequence
  Description of Artificial Sequence: Synthetic oligonucleotide
  Antisense strand to SEQ ID NO: 1980276
aacuuuccugagaucaaac

SEQ ID NO: 1980278 - RNA, 19 nt, Artificial Sequence
  Description of Artificial Sequence: Synthetic oligonucleotide
  Sense strand starting at position 249 of SEQ ID NO: 1880609
uguuccgaguucuccugaa

SEQ ID NO: 1980279 - RNA, 19 nt, Artificial Sequence
  Description of Artificial Sequence: Synthetic oligonucleotide
  Antisense strand to SEQ ID NO: 1980278
uucaggagaacucggaaca

SEQ ID NO: 1980280 - RNA, 19 nt, Artificial Sequence
  Description of Artificial Sequence: Synthetic oligonucleotide
  Sense strand starting at position 544 of SEQ ID NO: 1880609
gcuggaacaucuccaggau

SEQ ID NO: 1980281 - RNA, 19 nt, Artificial Sequence
  Description of Artificial Sequence: Synthetic oligonucleotide
  Antisense strand to SEQ ID NO: 1980280
auccuggagauguuccagc

SEQ ID NO: 1980282 - RNA, 19 nt, Artificial Sequence
  Description of Artificial Sequence: Synthetic oligonucleotide
  Sense strand starting at position 625 of SEQ ID NO: 1880609
agugcauucgcagugggua

SEQ ID NO: 1980283 - RNA, 19 nt, Artificial Sequence
  Description of Artificial Sequence: Synthetic oligonucleotide
  Antisense strand to SEQ ID NO: 1980282
uacccacugcgaaugcacu

SEQ ID NO: 1980284 - RNA, 19 nt, Artificial Sequence
  Description of Artificial Sequence: Synthetic oligonucleotide
  Sense strand starting at position 817 of SEQ ID NO: 1880609
uggcauugugcagguguau

SEQ ID NO: 1980285 - RNA, 19 nt, Artificial Sequence
  Description of Artificial Sequence: Synthetic oligonucleotide
  Antisense strand to SEQ ID NO: 1980284
auacaccugcacaaugcca

SEQ ID NO: 1980286 - RNA, 19 nt, Artificial Sequence
  Description of Artificial Sequence: Synthetic oligonucleotide
  Sense strand starting at position 905 of SEQ ID NO: 1880609
caggguccgcugcaugaaa

SEQ ID NO: 1980287 - RNA, 19 nt, Artificial Sequence
  Description of Artificial Sequence: Synthetic oligonucleotide
  Antisense strand to SEQ ID NO: 1980286
uuucaugcagcggacccug

SEQ ID NO: 1980288 - RNA, 19 nt, Artificial Sequence
  Description of Artificial Sequence: Synthetic oligonucleotide
  Sense strand starting at position 958 of SEQ ID NO: 1880609
ugcaguuccucacauacau

SEQ ID NO: 1980289 - RNA, 19 nt, Artificial Sequence
  Description of Artificial Sequence: Synthetic oligonucleotide
  Antisense strand to SEQ ID NO: 1980288
auguaugugaggaacugca

SEQ ID NO: 1980290 - RNA, 19 nt, Artificial Sequence
  Description of Artificial Sequence: Synthetic oligonucleotide
  Sense strand starting at position 967 of SEQ ID NO: 1880609
ucacauacaugauguacau

SEQ ID NO: 1980291 - RNA, 19 nt, Artificial Sequence
  Description of Artificial Sequence: Synthetic oligonucleotide
  Antisense strand to SEQ ID NO: 1980290
auguacaucauguauguga

SEQ ID NO: 1980292 - RNA, 19 nt, Artificial Sequence
  Description of Artificial Sequence: Synthetic oligonucleotide
  Sense strand starting at position 1342 of SEQ ID NO: 1880609
caauaaggucucugaugca

SEQ ID NO: 1980293 - RNA, 19 nt, Artificial Sequence
  Description of Artificial Sequence: Synthetic oligonucleotide
  Antisense strand to SEQ ID NO: 1980292
ugcaucagagaccuuauug

SEQ ID NO: 1980294 - RNA, 19 nt, Artificial Sequence
  Description of Artificial Sequence: Synthetic oligonucleotide
  Sense strand starting at position 1345 of SEQ ID NO: 1880609
uaaggucucugaugcagaa

SEQ ID NO: 1980295 - RNA, 19 nt, Artificial Sequence
  Description of Artificial Sequence: Synthetic oligonucleotide
  Antisense strand to SEQ ID NO: 1980294
uucugcaucagagaccuua

SEQ ID NO: 1980296 - RNA, 19 nt, Artificial Sequence
  Description of Artificial Sequence: Synthetic oligonucleotide
  Sense strand starting at position 1679 of SEQ ID NO: 1880609
agagcugagucacugaagu

SEQ ID NO: 1980297 - RNA, 19 nt, Artificial Sequence
  Description of Artificial Sequence: Synthetic oligonucleotide
  Antisense strand to SEQ ID NO: 1980296
acuucagugacucagcucu

SEQ ID NO: 1980298 - RNA, 19 nt, Artificial Sequence
  Description of Artificial Sequence: Synthetic oligonucleotide
  Sense strand starting at position 1681 of SEQ ID NO: 1880609
agcugagucacugaaguuu

SEQ ID NO: 1980299 - RNA, 19 nt, Artificial Sequence
  Description of Artificial Sequence: Synthetic oligonucleotide
  Antisense strand to SEQ ID NO: 1980298
aaacuucagugacucagcu

SEQ ID NO: 1980300 - RNA, 19 nt, Artificial Sequence
  Description of Artificial Sequence: Synthetic oligonucleotide
  Sense strand starting at position 1757 of SEQ ID NO: 1880609
agccgagagagcugaucuu

SEQ ID NO: 1980301 - RNA, 19 nt, Artificial Sequence
  Description of Artificial Sequence: Synthetic oligonucleotide
  Antisense strand to SEQ ID NO: 1980300
aagaucagcucucucggcu

SEQ ID NO: 1980302 - RNA, 19 nt, Artificial Sequence
  Description of Artificial Sequence: Synthetic oligonucleotide
  Sense strand starting at position 1767 of SEQ ID NO: 1880609
gcugaucuuugugcucaga

SEQ ID NO: 1980303 - RNA, 19 nt, Artificial Sequence
  Description of Artificial Sequence: Synthetic oligonucleotide
  Antisense strand to SEQ ID NO: 1980302
ucugagcacaaagaucagc

SEQ ID NO: 1980304 - RNA, 19 nt, Artificial Sequence
  Description of Artificial Sequence: Synthetic oligonucleotide
  Sense strand starting at position 1868 of SEQ ID NO: 1880609
uccgcuucuggagaguauu

SEQ ID NO: 1980305 - RNA, 19 nt, Artificial Sequence
  Description of Artificial Sequence: Synthetic oligonucleotide
  Antisense strand to SEQ ID NO: 1980304
aauacucuccagaagcgga

SEQ ID NO: 1980306 - RNA, 19 nt, Artificial Sequence
  Description of Artificial Sequence: Synthetic oligonucleotide
  Sense strand starting at position 1874 of SEQ ID NO: 1880609
ucuggagaguauucggacu

SEQ ID NO: 1980307 - RNA, 19 nt, Artificial Sequence
  Description of Artificial Sequence: Synthetic oligonucleotide
  Antisense strand to SEQ ID NO: 1980306
aguccgaauacucuccaga

SEQ ID NO: 1980308 - RNA, 19 nt, Artificial Sequence
  Description of Artificial Sequence: Synthetic oligonucleotide
  Sense strand starting at position 1876 of SEQ ID NO: 1880609
uggagaguauucggacuua

SEQ ID NO: 1980309 - RNA, 19 nt, Artificial Sequence
  Description of Artificial Sequence: Synthetic oligonucleotide
  Antisense strand to SEQ ID NO: 1980308
uaaguccgaauacucucca

SEQ ID NO: 1980310 - RNA, 19 nt, Artificial Sequence
  Description of Artificial Sequence: Synthetic oligonucleotide
  Sense strand starting at position 3013 of SEQ ID NO: 1880609
gggcuucucagaggagaac

SEQ ID NO: 1980311 - RNA, 19 nt, Artificial Sequence
  Description of Artificial Sequence: Synthetic oligonucleotide
  Antisense strand to SEQ ID NO: 1980310
guucuccucugagaagccc

SEQ ID NO: 1980312 - RNA, 19 nt, Artificial Sequence
  Description of Artificial Sequence: Synthetic oligonucleotide
  Sense strand starting at position 3392 of SEQ ID NO: 1880609
uuaagauggagguaugugu

SEQ ID NO: 1980313 - RNA, 19 nt, Artificial Sequence
  Description of Artificial Sequence: Synthetic oligonucleotide
  Antisense strand to SEQ ID NO: 1980312
acacauaccuccaucuuaa

SEQ ID NO: 1980314 - RNA, 19 nt, Artificial Sequence
  Description of Artificial Sequence: Synthetic oligonucleotide
  Sense strand starting at position 3396 of SEQ ID NO: 1880609
gauggagguauguguuaua

SEQ ID NO: 1980315 - RNA, 19 nt, Artificial Sequence
  Description of Artificial Sequence: Synthetic oligonucleotide
  Antisense strand to SEQ ID NO: 1980314
uauaacacauaccuccauc

SEQ ID NO: 1980316 - RNA, 19 nt, Artificial Sequence
  Description of Artificial Sequence: Synthetic oligonucleotide
  Sense strand starting at position 3399 of SEQ ID NO: 1880609
ggagguauguguuauaaau

SEQ ID NO: 1980317 - RNA, 19 nt, Artificial Sequence
  Description of Artificial Sequence: Synthetic oligonucleotide
  Antisense strand to SEQ ID NO: 1980316
auuuauaacacauaccucc

SEQ ID NO: 1980318 - RNA, 19 nt, Artificial Sequence
  Description of Artificial Sequence: Synthetic oligonucleotide
  Sense strand starting at position 3401 of SEQ ID NO: 1880609
agguauguguuauaaauga

SEQ ID NO: 1980319 - RNA, 19 nt, Artificial Sequence
  Description of Artificial Sequence: Synthetic oligonucleotide
  Antisense strand to SEQ ID NO: 1980318
ucauuuauaacacauaccu

SEQ ID NO: 1980320 - RNA, 19 nt, Artificial Sequence
  Description of Artificial Sequence: Synthetic oligonucleotide
  Sense strand starting at position 3405 of SEQ ID NO: 1880609
auguguuauaaaugaggga

SEQ ID NO: 1980321 - RNA, 19 nt, Artificial Sequence
  Description of Artificial Sequence: Synthetic oligonucleotide
  Antisense strand to SEQ ID NO: 1980320
ucccucauuuauaacacau

SEQ ID NO: 1980322 - RNA, 19 nt, Artificial Sequence
  Description of Artificial Sequence: Synthetic oligonucleotide
  Sense strand starting at position 3408 of SEQ ID NO: 1880609
uguuauaaaugagggauua

SEQ ID NO: 1980323 - RNA, 19 nt, Artificial Sequence
  Description of Artificial Sequence: Synthetic oligonucleotide
  Antisense strand to SEQ ID NO: 1980322
uaaucccucauuuauaaca

SEQ ID NO: 1980324 - RNA, 19 nt, Artificial Sequence
  Description of Artificial Sequence: Synthetic oligonucleotide
  Sense strand starting at position 3457 of SEQ ID NO: 1880609
uccaauaggcuguggagau

SEQ ID NO: 1980325 - RNA, 19 nt, Artificial Sequence
  Description of Artificial Sequence: Synthetic oligonucleotide
  Antisense strand to SEQ ID NO: 1980324
aucuccacagccuauugga

SEQ ID NO: 1980326 - RNA, 19 nt, Artificial Sequence
  Description of Artificial Sequence: Synthetic oligonucleotide
  Sense strand starting at position 3616 of SEQ ID NO: 1880609
acagguuccuguggacagu

SEQ ID NO: 1980327 - RNA, 19 nt, Artificial Sequence
  Description of Artificial Sequence: Synthetic oligonucleotide
  Antisense strand to SEQ ID NO: 1980326
acuguccacaggaaccugu

SEQ ID NO: 1980328 - RNA, 19 nt, Artificial Sequence
  Description of Artificial Sequence: Synthetic oligonucleotide
  Sense strand starting at position 3626 of SEQ ID NO: 1880609
guggacaguugcccuuauu

SEQ ID NO: 1980329 - RNA, 19 nt, Artificial Sequence
  Description of Artificial Sequence: Synthetic oligonucleotide
  Antisense strand to SEQ ID NO: 1980328
aauaagggcaacuguccac

SEQ ID NO: 1980330 - RNA, 19 nt, Artificial Sequence
  Description of Artificial Sequence: Synthetic oligonucleotide
  Sense strand starting at position 3681 of SEQ ID NO: 1880609
gggauaucaugggugugcu

SEQ ID NO: 1980331 - RNA, 19 nt, Artificial Sequence
  Description of Artificial Sequence: Synthetic oligonucleotide
  Antisense strand to SEQ ID NO: 1980330
agcacacccaugauauccc

SEQ ID NO: 1980332 - RNA, 19 nt, Artificial Sequence
  Description of Artificial Sequence: Synthetic oligonucleotide
  Sense strand starting at position 3682 of SEQ ID NO: 1880609
ggauaucaugggugugcuu

SEQ ID NO: 1980333 - RNA, 19 nt, Artificial Sequence
  Description of Artificial Sequence: Synthetic oligonucleotide
  Antisense strand to SEQ ID NO: 1980332
aagcacacccaugauaucc

SEQ ID NO: 1980334 - RNA, 19 nt, Artificial Sequence
  Description of Artificial Sequence: Synthetic oligonucleotide
  Sense strand starting at position 3684 of SEQ ID NO: 1880609
auaucaugggugugcuuaa

SEQ ID NO: 1980335 - RNA, 19 nt, Artificial Sequence
  Description of Artificial Sequence: Synthetic oligonucleotide
  Antisense strand to SEQ ID NO: 1980334
uuaagcacacccaugauau

SEQ ID NO: 1980336 - RNA, 19 nt, Artificial Sequence
  Description of Artificial Sequence: Synthetic oligonucleotide
  Sense strand starting at position 3685 of SEQ ID NO: 1880609
uaucaugggugugcuuaaa

SEQ ID NO: 1980337 - RNA, 19 nt, Artificial Sequence
  Description of Artificial Sequence: Synthetic oligonucleotide
  Antisense strand to SEQ ID NO: 1980336
uuuaagcacacccaugaua

SEQ ID NO: 1980338 - RNA, 19 nt, Artificial Sequence
  Description of Artificial Sequence: Synthetic oligonucleotide
  Sense strand starting at position 3698 of SEQ ID NO: 1880609
cuuaaaugucacuaggcca

SEQ ID NO: 1980339 - RNA, 19 nt, Artificial Sequence
  Description of Artificial Sequence: Synthetic oligonucleotide
  Antisense strand to SEQ ID NO: 1980338
uggccuagugacauuuaag

SEQ ID NO: 1980340 - RNA, 19 nt, Artificial Sequence
  Description of Artificial Sequence: Synthetic oligonucleotide
  Sense strand starting at position 3712 of SEQ ID NO: 1880609
ggccauggucgggagagua

SEQ ID NO: 1980341 - RNA, 19 nt, Artificial Sequence
  Description of Artificial Sequence: Synthetic oligonucleotide
  Antisense strand to SEQ ID NO: 1980340
uacucucccgaccauggcc

SEQ ID NO: 1980342 - RNA, 19 nt, Artificial Sequence
  Description of Artificial Sequence: Synthetic oligonucleotide
  Sense strand starting at position 3751 of SEQ ID NO: 1880609
ggaccagccuugucacauu

SEQ ID NO: 1980343 - RNA, 19 nt, Artificial Sequence
  Description of Artificial Sequence: Synthetic oligonucleotide
  Antisense strand to SEQ ID NO: 1980342
aaugugacaaggcuggucc

SEQ ID NO: 1980344 - RNA, 19 nt, Artificial Sequence
  Description of Artificial Sequence: Synthetic oligonucleotide
  Sense strand starting at position 3777 of SEQ ID NO: 1880609
cuggucaucugggaaaggu

SEQ ID NO: 1980345 - RNA, 19 nt, Artificial Sequence
  Description of Artificial Sequence: Synthetic oligonucleotide
  Antisense strand to SEQ ID NO: 1980344
accuuucccagaugaccag

SEQ ID NO: 1980346 - RNA, 19 nt, Artificial Sequence
  Description of Artificial Sequence: Synthetic oligonucleotide
  Sense strand starting at position 3800 of SEQ ID NO: 1880609
acagcuuguuuguggagau

SEQ ID NO: 1980347 - RNA, 19 nt, Artificial Sequence
  Description of Artificial Sequence: Synthetic oligonucleotide
  Antisense strand to SEQ ID NO: 1980346
aucuccacaaacaagcugu

SEQ ID NO: 1980348 - RNA, 19 nt, Artificial Sequence
  Description of Artificial Sequence: Synthetic oligonucleotide
  Sense strand starting at position 3812 of SEQ ID NO: 1880609
uggagauacugaggaauca

SEQ ID NO: 1980349 - RNA, 19 nt, Artificial Sequence
  Description of Artificial Sequence: Synthetic oligonucleotide
  Antisense strand to SEQ ID NO: 1980348
ugauuccucaguaucucca

SEQ ID NO: 1980350 - RNA, 19 nt, Artificial Sequence
  Description of Artificial Sequence: Synthetic oligonucleotide
  Sense strand starting at position 3949 of SEQ ID NO: 1880609
ggagcaaaguccuuuagga

SEQ ID NO: 1980351 - RNA, 19 nt, Artificial Sequence
  Description of Artificial Sequence: Synthetic oligonucleotide
  Antisense strand to SEQ ID NO: 1980350
uccuaaaggacuuugcucc

SEQ ID NO: 1980352 - RNA, 19 nt, Artificial Sequence
  Description of Artificial Sequence: Synthetic oligonucleotide
  Sense strand starting at position 1108 of SEQ ID NO: 1880610
cguugucacccaugaucuu

SEQ ID NO: 1980353 - RNA, 19 nt, Artificial Sequence
  Description of Artificial Sequence: Synthetic oligonucleotide
  Antisense strand to SEQ ID NO: 1980352
aagaucaugggugacaacg

SEQ ID NO: 1980354 - RNA, 19 nt, Artificial Sequence
  Description of Artificial Sequence: Synthetic oligonucleotide
  Sense strand starting at position 1140 of SEQ ID NO: 1880610
ggcccaucauacuguaauu

SEQ ID NO: 1980355 - RNA, 19 nt, Artificial Sequence
  Description of Artificial Sequence: Synthetic oligonucleotide
  Antisense strand to SEQ ID NO: 1980354
aauuacaguaugaugggcc

SEQ ID NO: 1980356 - RNA, 19 nt, Artificial Sequence
  Description of Artificial Sequence: Synthetic oligonucleotide
  Sense strand starting at position 1223 of SEQ ID NO: 1880610
cugucuuaguucuugucca

SEQ ID NO: 1980357 - RNA, 19 nt, Artificial Sequence
  Description of Artificial Sequence: Synthetic oligonucleotide
  Antisense strand to SEQ ID NO: 1980356
uggacaagaacuaagacag

SEQ ID NO: 1980358 - RNA, 19 nt, Artificial Sequence
  Description of Artificial Sequence: Synthetic oligonucleotide
  Sense strand starting at position 1231 of SEQ ID NO: 1880610
guucuuguccagugcaaga

SEQ ID NO: 1980359 - RNA, 19 nt, Artificial Sequence
  Description of Artificial Sequence: Synthetic oligonucleotide
  Antisense strand to SEQ ID NO: 1980358
ucuugcacuggacaagaac

SEQ ID NO: 1980360 - RNA, 19 nt, Artificial Sequence
  Description of Artificial Sequence: Synthetic oligonucleotide
  Sense strand starting at position 3368 of SEQ ID NO: 1880610
agaguuugauaccugccua

SEQ ID NO: 1980361 - RNA, 19 nt, Artificial Sequence
  Description of Artificial Sequence: Synthetic oligonucleotide
  Antisense strand to SEQ ID NO: 1980360
uaggcagguaucaaacucu

SEQ ID NO: 1980362 - RNA, 19 nt, Artificial Sequence
  Description of Artificial Sequence: Synthetic oligonucleotide
  Sense strand starting at position 159 of SEQ ID NO: 1880611
agcauuggguucuuucuau

SEQ ID NO: 1980363 - RNA, 19 nt, Artificial Sequence
  Description of Artificial Sequence: Synthetic oligonucleotide
  Antisense strand to SEQ ID NO: 1980362
auagaaagaacccaaugcu

SEQ ID NO: 1980364 - RNA, 19 nt, Artificial Sequence
  Description of Artificial Sequence: Synthetic oligonucleotide
  Sense strand starting at position 184 of SEQ ID NO: 1880611
guucaaaguguugguaaau

SEQ ID NO: 1980365 - RNA, 19 nt, Artificial Sequence
  Description of Artificial Sequence: Synthetic oligonucleotide
  Antisense strand to SEQ ID NO: 1980364
auuuaccaacacuuugaac

SEQ ID NO: 1980366 - RNA, 19 nt, Artificial Sequence
  Description of Artificial Sequence: Synthetic oligonucleotide
  Sense strand starting at position 211 of SEQ ID NO: 1880611
agaaguagauugccaucuu

SEQ ID NO: 1980367 - RNA, 19 nt, Artificial Sequence
  Description of Artificial Sequence: Synthetic oligonucleotide
  Antisense strand to SEQ ID NO: 1980366
aagauggcaaucuacuucu

SEQ ID NO: 1980368 - RNA, 19 nt, Artificial Sequence
  Description of Artificial Sequence: Synthetic oligonucleotide
  Sense strand starting at position 322 of SEQ ID NO: 1880611
gcagguucuaguuacauga

SEQ ID NO: 1980369 - RNA, 19 nt, Artificial Sequence
  Description of Artificial Sequence: Synthetic oligonucleotide
  Antisense strand to SEQ ID NO: 1980368
ucauguaacuagaaccugc

SEQ ID NO: 1980370 - RNA, 19 nt, Artificial Sequence
  Description of Artificial Sequence: Synthetic oligonucleotide
  Sense strand starting at position 371 of SEQ ID NO: 1880611
caguuauauuggccauuga

SEQ ID NO: 1980371 - RNA, 19 nt, Artificial Sequence
  Description of Artificial Sequence: Synthetic oligonucleotide
  Antisense strand to SEQ ID NO: 1980370
ucaauggccaauauaacug

SEQ ID NO: 1980372 - RNA, 19 nt, Artificial Sequence
  Description of Artificial Sequence: Synthetic oligonucleotide
  Sense strand starting at position 425 of SEQ ID NO: 1880611
cuagaugccuucucugauu

SEQ ID NO: 1980373 - RNA, 19 nt, Artificial Sequence
  Description of Artificial Sequence: Synthetic oligonucleotide
  Antisense strand to SEQ ID NO: 1980372
aaucagagaaggcaucuag

SEQ ID NO: 1980374 - RNA, 19 nt, Artificial Sequence
  Description of Artificial Sequence: Synthetic oligonucleotide
  Sense strand starting at position 447 of SEQ ID NO: 1880611
ugacucaaucaaugauguu

SEQ ID NO: 1980375 - RNA, 19 nt, Artificial Sequence
  Description of Artificial Sequence: Synthetic oligonucleotide
  Antisense strand to SEQ ID NO: 1980374
aacaucauugauugaguca

SEQ ID NO: 1980376 - RNA, 19 nt, Artificial Sequence
  Description of Artificial Sequence: Synthetic oligonucleotide
  Sense strand starting at position 462 of SEQ ID NO: 1880611
uguuaucucagauggcaga

SEQ ID NO: 1980377 - RNA, 19 nt, Artificial Sequence
  Description of Artificial Sequence: Synthetic oligonucleotide
  Antisense strand to SEQ ID NO: 1980376
ucugccaucugagauaaca

SEQ ID NO: 1980378 - RNA, 19 nt, Artificial Sequence
  Description of Artificial Sequence: Synthetic oligonucleotide
  Sense strand starting at position 463 of SEQ ID NO: 1880611
guuaucucagauggcagaa

SEQ ID NO: 1980379 - RNA, 19 nt, Artificial Sequence
  Description of Artificial Sequence: Synthetic oligonucleotide
  Antisense strand to SEQ ID NO: 1980378
uucugccaucugagauaac

SEQ ID NO: 1980380 - RNA, 19 nt, Artificial Sequence
  Description of Artificial Sequence: Synthetic oligonucleotide
  Sense strand starting at position 528 of SEQ ID NO: 1880611
accugcucucucgagggau

SEQ ID NO: 1980381 - RNA, 19 nt, Artificial Sequence
  Description of Artificial Sequence: Synthetic oligonucleotide
  Antisense strand to SEQ ID NO: 1980380
aucccucgagagagcaggu

SEQ ID NO: 1980382 - RNA, 19 nt, Artificial Sequence
  Description of Artificial Sequence: Synthetic oligonucleotide
  Sense strand starting at position 532 of SEQ ID NO: 1880611
gcucucucgagggauagga

SEQ ID NO: 1980383 - RNA, 19 nt, Artificial Sequence
  Description of Artificial Sequence: Synthetic oligonucleotide
  Antisense strand to SEQ ID NO: 1980382
uccuaucccucgagagagc

SEQ ID NO: 1980384 - RNA, 19 nt, Artificial Sequence
  Description of Artificial Sequence: Synthetic oligonucleotide
  Sense strand starting at position 557 of SEQ ID NO: 1880611
guagaaugcaucuguugga

SEQ ID NO: 1980385 - RNA, 19 nt, Artificial Sequence
  Description of Artificial Sequence: Synthetic oligonucleotide
  Antisense strand to SEQ ID NO: 1980384
uccaacagaugcauucuac

SEQ ID NO: 1980386 - RNA, 19 nt, Artificial Sequence
  Description of Artificial Sequence: Synthetic oligonucleotide
  Sense strand starting at position 558 of SEQ ID NO: 1880611
uagaaugcaucuguuggau

SEQ ID NO: 1980387 - RNA, 19 nt, Artificial Sequence
  Description of Artificial Sequence: Synthetic oligonucleotide
  Antisense strand to SEQ ID NO: 1980386
auccaacagaugcauucua

SEQ ID NO: 1980388 - RNA, 19 nt, Artificial Sequence
  Description of Artificial Sequence: Synthetic oligonucleotide
  Sense strand starting at position 566 of SEQ ID NO: 1880611
aucuguuggauguggucaa

SEQ ID NO: 1980389 - RNA, 19 nt, Artificial Sequence
  Description of Artificial Sequence: Synthetic oligonucleotide
  Antisense strand to SEQ ID NO: 1980388
uugaccacauccaacagau

SEQ ID NO: 1980390 - RNA, 19 nt, Artificial Sequence
  Description of Artificial Sequence: Synthetic oligonucleotide
  Sense strand starting at position 1041 of SEQ ID NO: 1880611
gucuaaagauuggcuguca

SEQ ID NO: 1980391 - RNA, 19 nt, Artificial Sequence
  Description of Artificial Sequence: Synthetic oligonucleotide
  Antisense strand to SEQ ID NO: 1980390
ugacagccaaucuuuagac

SEQ ID NO: 1980392 - RNA, 19 nt, Artificial Sequence
  Description of Artificial Sequence: Synthetic oligonucleotide
  Sense strand starting at position 1042 of SEQ ID NO: 1880611
ucuaaagauuggcugucau

SEQ ID NO: 1980393 - RNA, 19 nt, Artificial Sequence
  Description of Artificial Sequence: Synthetic oligonucleotide
  Antisense strand to SEQ ID NO: 1980392
augacagccaaucuuuaga

SEQ ID NO: 1980394 - RNA, 19 nt, Artificial Sequence
  Description of Artificial Sequence: Synthetic oligonucleotide
  Sense strand starting at position 1232 of SEQ ID NO: 1880611
ucuuguccagugcaagaaa

SEQ ID NO: 1980395 - RNA, 19 nt, Artificial Sequence
  Description of Artificial Sequence: Synthetic oligonucleotide
  Antisense strand to SEQ ID NO: 1980394
uuucuugcacuggacaaga

SEQ ID NO: 1980396 - RNA, 19 nt, Artificial Sequence
  Description of Artificial Sequence: Synthetic oligonucleotide
  Sense strand starting at position 1257 of SEQ ID NO: 1880611
caagaagggucgcuuggaa

SEQ ID NO: 1980397 - RNA, 19 nt, Artificial Sequence
  Description of Artificial Sequence: Synthetic oligonucleotide
  Antisense strand to SEQ ID NO: 1980396
uuccaagcgacccuucuug

SEQ ID NO: 1980398 - RNA, 19 nt, Artificial Sequence
  Description of Artificial Sequence: Synthetic oligonucleotide
  Sense strand starting at position 1275 of SEQ ID NO: 1880611
agcucaaacucuuucgaag

SEQ ID NO: 1980399 - RNA, 19 nt, Artificial Sequence
  Description of Artificial Sequence: Synthetic oligonucleotide
  Antisense strand to SEQ ID NO: 1980398
cuucgaaagaguuugagcu

SEQ ID NO: 1980400 - RNA, 19 nt, Artificial Sequence
  Description of Artificial Sequence: Synthetic oligonucleotide
  Sense strand starting at position 1456 of SEQ ID NO: 1880611
acgcgcauuggucaccaaa

SEQ ID NO: 1980401 - RNA, 19 nt, Artificial Sequence
  Description of Artificial Sequence: Synthetic oligonucleotide
  Antisense strand to SEQ ID NO: 1980400
uuuggugaccaaugcgcgu

SEQ ID NO: 1980402 - RNA, 19 nt, Artificial Sequence
  Description of Artificial Sequence: Synthetic oligonucleotide
  Sense strand starting at position 1459 of SEQ ID NO: 1880611
cgcauuggucaccaaacaa

SEQ ID NO: 1980403 - RNA, 19 nt, Artificial Sequence
  Description of Artificial Sequence: Synthetic oligonucleotide
  Antisense strand to SEQ ID NO: 1980402
uuguuuggugaccaaugcg

SEQ ID NO: 1980404 - RNA, 19 nt, Artificial Sequence
  Description of Artificial Sequence: Synthetic oligonucleotide
  Sense strand starting at position 1485 of SEQ ID NO: 1880611
cgccucacugagugagaau

SEQ ID NO: 1980405 - RNA, 19 nt, Artificial Sequence
  Description of Artificial Sequence: Synthetic oligonucleotide
  Antisense strand to SEQ ID NO: 1980404
auucucacucagugaggcg

SEQ ID NO: 1980406 - RNA, 19 nt, Artificial Sequence
  Description of Artificial Sequence: Synthetic oligonucleotide
  Sense strand starting at position 1830 of SEQ ID NO: 1880611
ggaaguccuccuuaccuca

SEQ ID NO: 1980407 - RNA, 19 nt, Artificial Sequence
  Description of Artificial Sequence: Synthetic oligonucleotide
  Antisense strand to SEQ ID NO: 1980406
ugagguaaggaggacuucc

SEQ ID NO: 1980408 - RNA, 19 nt, Artificial Sequence
  Description of Artificial Sequence: Synthetic oligonucleotide
  Sense strand starting at position 2228 of SEQ ID NO: 1880611
aaaggucaccuccgcaaau

SEQ ID NO: 1980409 - RNA, 19 nt, Artificial Sequence
  Description of Artificial Sequence: Synthetic oligonucleotide
  Antisense strand to SEQ ID NO: 1980408
auuugcggaggugaccuuu

SEQ ID NO: 1980410 - RNA, 19 nt, Artificial Sequence
  Description of Artificial Sequence: Synthetic oligonucleotide
  Sense strand starting at position 2282 of SEQ ID NO: 1880611
ccagcuuucugaucaguag

SEQ ID NO: 1980411 - RNA, 19 nt, Artificial Sequence
  Description of Artificial Sequence: Synthetic oligonucleotide
  Antisense strand to SEQ ID NO: 1980410
cuacugaucagaaagcugg

SEQ ID NO: 1980412 - RNA, 19 nt, Artificial Sequence
  Description of Artificial Sequence: Synthetic oligonucleotide
  Sense strand starting at position 2283 of SEQ ID NO: 1880611
cagcuuucugaucaguaga

SEQ ID NO: 1980413 - RNA, 19 nt, Artificial Sequence
  Description of Artificial Sequence: Synthetic oligonucleotide
  Antisense strand to SEQ ID NO: 1980412
ucuacugaucagaaagcug

SEQ ID NO: 1980414 - RNA, 19 nt, Artificial Sequence
  Description of Artificial Sequence: Synthetic oligonucleotide
  Sense strand starting at position 2285 of SEQ ID NO: 1880611
gcuuucugaucaguagaau

SEQ ID NO: 1980415 - RNA, 19 nt, Artificial Sequence
  Description of Artificial Sequence: Synthetic oligonucleotide
  Antisense strand to SEQ ID NO: 1980414
auucuacugaucagaaagc

SEQ ID NO: 1980416 - RNA, 19 nt, Artificial Sequence
  Description of Artificial Sequence: Synthetic oligonucleotide
  Sense strand starting at position 2618 of SEQ ID NO: 1880611
aacguugaucaugaaguua

SEQ ID NO: 1980417 - RNA, 19 nt, Artificial Sequence
  Description of Artificial Sequence: Synthetic oligonucleotide
  Antisense strand to SEQ ID NO: 1980416
uaacuucaugaucaacguu

SEQ ID NO: 1980418 - RNA, 19 nt, Artificial Sequence
  Description of Artificial Sequence: Synthetic oligonucleotide
  Sense strand starting at position 2819 of SEQ ID NO: 1880611
ucaucaagacuuggugcua

SEQ ID NO: 1980419 - RNA, 19 nt, Artificial Sequence
  Description of Artificial Sequence: Synthetic oligonucleotide
  Antisense strand to SEQ ID NO: 1980418
uagcaccaagucuugauga

SEQ ID NO: 1980420 - RNA, 19 nt, Artificial Sequence
  Description of Artificial Sequence: Synthetic oligonucleotide
  Sense strand starting at position 3041 of SEQ ID NO: 1880611
accaaucagcgguauucua

SEQ ID NO: 1980421 - RNA, 19 nt, Artificial Sequence
  Description of Artificial Sequence: Synthetic oligonucleotide
  Antisense strand to SEQ ID NO: 1980420
uagaauaccgcugauuggu

SEQ ID NO: 1980422 - RNA, 19 nt, Artificial Sequence
  Description of Artificial Sequence: Synthetic oligonucleotide
  Sense strand starting at position 3367 of SEQ ID NO: 1880611
agaguuugauaccugccua

SEQ ID NO: 1980423 - RNA, 19 nt, Artificial Sequence
  Description of Artificial Sequence: Synthetic oligonucleotide
  Antisense strand to SEQ ID NO: 1980422
uaggcagguaucaaacucu

SEQ ID NO: 1980424 - RNA, 19 nt, Artificial Sequence
  Description of Artificial Sequence: Synthetic oligonucleotide
  Sense strand starting at position 3451 of SEQ ID NO: 1880611
gggcuagucuaggcagaga

SEQ ID NO: 1980425 - RNA, 19 nt, Artificial Sequence
  Description of Artificial Sequence: Synthetic oligonucleotide
  Antisense strand to SEQ ID NO: 1980424
ucucugccuagacuagccc

SEQ ID NO: 1980426 - RNA, 19 nt, Artificial Sequence
  Description of Artificial Sequence: Synthetic oligonucleotide
  Sense strand starting at position 3511 of SEQ ID NO: 1880611
uggugauugcaccacugua

SEQ ID NO: 1980427 - RNA, 19 nt, Artificial Sequence
  Description of Artificial Sequence: Synthetic oligonucleotide
  Antisense strand to SEQ ID NO: 1980426
uacaguggugcaaucacca

SEQ ID NO: 1980428 - RNA, 19 nt, Artificial Sequence
  Description of Artificial Sequence: Synthetic oligonucleotide
  Sense strand starting at position 3609 of SEQ ID NO: 1880611
gcaaguuccaggugggaga

SEQ ID NO: 1980429 - RNA, 19 nt, Artificial Sequence
  Description of Artificial Sequence: Synthetic oligonucleotide
  Antisense strand to SEQ ID NO: 1980428
ucucccaccuggaacuugc

SEQ ID NO: 1980430 - RNA, 19 nt, Artificial Sequence
  Description of Artificial Sequence: Synthetic oligonucleotide
  Sense strand starting at position 3638 of SEQ ID NO: 1880611
gcauuauaguccucuaaga

SEQ ID NO: 1980431 - RNA, 19 nt, Artificial Sequence
  Description of Artificial Sequence: Synthetic oligonucleotide
  Antisense strand to SEQ ID NO: 1980430
ucuuagaggacuauaaugc

SEQ ID NO: 1980432 - RNA, 19 nt, Artificial Sequence
  Description of Artificial Sequence: Synthetic oligonucleotide
  Sense strand starting at position 3665 of SEQ ID NO: 1880611
acccuaauuucugggacua

SEQ ID NO: 1980433 - RNA, 19 nt, Artificial Sequence
  Description of Artificial Sequence: Synthetic oligonucleotide
  Antisense strand to SEQ ID NO: 1980432
uagucccagaaauuagggu

SEQ ID NO: 1980434 - RNA, 19 nt, Artificial Sequence
  Description of Artificial Sequence: Synthetic oligonucleotide
  Sense strand starting at position 3667 of SEQ ID NO: 1880611
ccuaauuucugggacuaug

SEQ ID NO: 1980435 - RNA, 19 nt, Artificial Sequence
  Description of Artificial Sequence: Synthetic oligonucleotide
  Antisense strand to SEQ ID NO: 1980434
cauagucccagaaauuagg

SEQ ID NO: 1980436 - RNA, 19 nt, Artificial Sequence
  Description of Artificial Sequence: Synthetic oligonucleotide
  Sense strand starting at position 3717 of SEQ ID NO: 1880611
guggacagguuucuaauca

SEQ ID NO: 1980437 - RNA, 19 nt, Artificial Sequence
  Description of Artificial Sequence: Synthetic oligonucleotide
  Antisense strand to SEQ ID NO: 1980436
ugauuagaaaccuguccac

SEQ ID NO: 1980438 - RNA, 19 nt, Artificial Sequence
  Description of Artificial Sequence: Synthetic oligonucleotide
  Sense strand starting at position 3721 of SEQ ID NO: 1880611
acagguuucuaaucaguug

SEQ ID NO: 1980439 - RNA, 19 nt, Artificial Sequence
  Description of Artificial Sequence: Synthetic oligonucleotide
  Antisense strand to SEQ ID NO: 1980438
caacugauuagaaaccugu

SEQ ID NO: 1980440 - RNA, 19 nt, Artificial Sequence
  Description of Artificial Sequence: Synthetic oligonucleotide
  Sense strand starting at position 3925 of SEQ ID NO: 1880611
uuugaaugagcucgaaagu

SEQ ID NO: 1980441 - RNA, 19 nt, Artificial Sequence
  Description of Artificial Sequence: Synthetic oligonucleotide
  Antisense strand to SEQ ID NO: 1980440
acuuucgagcucauucaaa

SEQ ID NO: 1980442 - RNA, 19 nt, Artificial Sequence
  Description of Artificial Sequence: Synthetic oligonucleotide
  Sense strand starting at position 261 of SEQ ID NO: 1880612
acugcaauuccacaugagu

SEQ ID NO: 1980443 - RNA, 19 nt, Artificial Sequence
  Description of Artificial Sequence: Synthetic oligonucleotide
  Antisense strand to SEQ ID NO: 1980442
acucauguggaauugcagu

SEQ ID NO: 1980444 - RNA, 19 nt, Artificial Sequence
  Description of Artificial Sequence: Synthetic oligonucleotide
  Sense strand starting at position 457 of SEQ ID NO: 1880612
uacggucucuucugccaau

SEQ ID NO: 1980445 - RNA, 19 nt, Artificial Sequence
  Description of Artificial Sequence: Synthetic oligonucleotide
  Antisense strand to SEQ ID NO: 1980444
auuggcagaagagaccgua

SEQ ID NO: 1980446 - RNA, 19 nt, Artificial Sequence
  Description of Artificial Sequence: Synthetic oligonucleotide
  Sense strand starting at position 470 of SEQ ID NO: 1880612
gccaaugagucccugaacu

SEQ ID NO: 1980447 - RNA, 19 nt, Artificial Sequence
  Description of Artificial Sequence: Synthetic oligonucleotide
  Antisense strand to SEQ ID NO: 1980446
aguucagggacucauuggc

SEQ ID NO: 1980448 - RNA, 19 nt, Artificial Sequence
  Description of Artificial Sequence: Synthetic oligonucleotide
  Sense strand starting at position 853 of SEQ ID NO: 1880612
auuacaauuccacgagcuu

SEQ ID NO: 1980449 - RNA, 19 nt, Artificial Sequence
  Description of Artificial Sequence: Synthetic oligonucleotide
  Antisense strand to SEQ ID NO: 1980448
aagcucguggaauuguaau

SEQ ID NO: 1980450 - RNA, 19 nt, Artificial Sequence
  Description of Artificial Sequence: Synthetic oligonucleotide
  Sense strand starting at position 854 of SEQ ID NO: 1880612
uuacaauuccacgagcuuu

SEQ ID NO: 1980451 - RNA, 19 nt, Artificial Sequence
  Description of Artificial Sequence: Synthetic oligonucleotide
  Antisense strand to SEQ ID NO: 1980450
aaagcucguggaauuguaa

SEQ ID NO: 1980452 - RNA, 19 nt, Artificial Sequence
  Description of Artificial Sequence: Synthetic oligonucleotide
  Sense strand starting at position 927 of SEQ ID NO: 1880612
ugcuucuuacauugcagaa

SEQ ID NO: 1980453 - RNA, 19 nt, Artificial Sequence
  Description of Artificial Sequence: Synthetic oligonucleotide
  Antisense strand to SEQ ID NO: 1980452
uucugcaauguaagaagca

SEQ ID NO: 1980454 - RNA, 19 nt, Artificial Sequence
  Description of Artificial Sequence: Synthetic oligonucleotide
  Sense strand starting at position 1080 of SEQ ID NO: 1880612
guuaacuaauuccaaggua

SEQ ID NO: 1980455 - RNA, 19 nt, Artificial Sequence
  Description of Artificial Sequence: Synthetic oligonucleotide
  Antisense strand to SEQ ID NO: 1980454
uaccuuggaauuaguuaac

SEQ ID NO: 1980456 - RNA, 19 nt, Artificial Sequence
  Description of Artificial Sequence: Synthetic oligonucleotide
  Sense strand starting at position 1667 of SEQ ID NO: 1880612
augugaaguagugacccaa

SEQ ID NO: 1980457 - RNA, 19 nt, Artificial Sequence
  Description of Artificial Sequence: Synthetic oligonucleotide
  Antisense strand to SEQ ID NO: 1980456
uugggucacuacuucacau

SEQ ID NO: 1980458 - RNA, 19 nt, Artificial Sequence
  Description of Artificial Sequence: Synthetic oligonucleotide
  Sense strand starting at position 2003 of SEQ ID NO: 1880612
uugagcuccgcuucuaagu

SEQ ID NO: 1980459 - RNA, 19 nt, Artificial Sequence
  Description of Artificial Sequence: Synthetic oligonucleotide
  Antisense strand to SEQ ID NO: 1980458
acuuagaagcggagcucaa

SEQ ID NO: 1980460 - RNA, 19 nt, Artificial Sequence
  Description of Artificial Sequence: Synthetic oligonucleotide
  Sense strand starting at position 2009 of SEQ ID NO: 1880612
uccgcuucuaaguagaagu

SEQ ID NO: 1980461 - RNA, 19 nt, Artificial Sequence
  Description of Artificial Sequence: Synthetic oligonucleotide
  Antisense strand to SEQ ID NO: 1980460
acuucuacuuagaagcgga

SEQ ID NO: 1980462 - RNA, 19 nt, Artificial Sequence
  Description of Artificial Sequence: Synthetic oligonucleotide
  Sense strand starting at position 2038 of SEQ ID NO: 1880612
gguccuuucuuagcucaua

SEQ ID NO: 1980463 - RNA, 19 nt, Artificial Sequence
  Description of Artificial Sequence: Synthetic oligonucleotide
  Antisense strand to SEQ ID NO: 1980462
uaugagcuaagaaaggacc

SEQ ID NO: 1980464 - RNA, 19 nt, Artificial Sequence
  Description of Artificial Sequence: Synthetic oligonucleotide
  Sense strand starting at position 2095 of SEQ ID NO: 1880612
gagcuaugcugcuuagaug

SEQ ID NO: 1980465 - RNA, 19 nt, Artificial Sequence
  Description of Artificial Sequence: Synthetic oligonucleotide
  Antisense strand to SEQ ID NO: 1980464
caucuaagcagcauagcuc

SEQ ID NO: 1980466 - RNA, 19 nt, Artificial Sequence
  Description of Artificial Sequence: Synthetic oligonucleotide
  Sense strand starting at position 2096 of SEQ ID NO: 1880612
agcuaugcugcuuagaugu

SEQ ID NO: 1980467 - RNA, 19 nt, Artificial Sequence
  Description of Artificial Sequence: Synthetic oligonucleotide
  Antisense strand to SEQ ID NO: 1980466
acaucuaagcagcauagcu

SEQ ID NO: 1980468 - RNA, 19 nt, Artificial Sequence
  Description of Artificial Sequence: Synthetic oligonucleotide
  Sense strand starting at position 2202 of SEQ ID NO: 1880612
gggcaaaucaaauguagcu

SEQ ID NO: 1980469 - RNA, 19 nt, Artificial Sequence
  Description of Artificial Sequence: Synthetic oligonucleotide
  Antisense strand to SEQ ID NO: 1980468
agcuacauuugauuugccc

SEQ ID NO: 1980470 - RNA, 19 nt, Artificial Sequence
  Description of Artificial Sequence: Synthetic oligonucleotide
  Sense strand starting at position 2721 of SEQ ID NO: 1880612
ucaggugccucccaaucau

SEQ ID NO: 1980471 - RNA, 19 nt, Artificial Sequence
  Description of Artificial Sequence: Synthetic oligonucleotide
  Antisense strand to SEQ ID NO: 1980470
augauugggaggcaccuga

SEQ ID NO: 1980472 - RNA, 19 nt, Artificial Sequence
  Description of Artificial Sequence: Synthetic oligonucleotide
  Sense strand starting at position 2807 of SEQ ID NO: 1880612
ggugccacaucauguuaua

SEQ ID NO: 1980473 - RNA, 19 nt, Artificial Sequence
  Description of Artificial Sequence: Synthetic oligonucleotide
  Antisense strand to SEQ ID NO: 1980472
uauaacaugauguggcacc

SEQ ID NO: 1980474 - RNA, 19 nt, Artificial Sequence
  Description of Artificial Sequence: Synthetic oligonucleotide
  Sense strand starting at position 2839 of SEQ ID NO: 1880612
ugagaacuaucacgagguc

SEQ ID NO: 1980475 - RNA, 19 nt, Artificial Sequence
  Description of Artificial Sequence: Synthetic oligonucleotide
  Antisense strand to SEQ ID NO: 1980474
gaccucgugauaguucuca

SEQ ID NO: 1980476 - RNA, 19 nt, Artificial Sequence
  Description of Artificial Sequence: Synthetic oligonucleotide
  Sense strand starting at position 2865 of SEQ ID NO: 1880612
ugaagauggugcuuaacca

SEQ ID NO: 1980477 - RNA, 19 nt, Artificial Sequence
  Description of Artificial Sequence: Synthetic oligonucleotide
  Antisense strand to SEQ ID NO: 1980476
ugguuaagcaccaucuuca

SEQ ID NO: 1980478 - RNA, 19 nt, Artificial Sequence
  Description of Artificial Sequence: Synthetic oligonucleotide
  Sense strand starting at position 3294 of SEQ ID NO: 1880612
ccauaugaugccugaggca

SEQ ID NO: 1980479 - RNA, 19 nt, Artificial Sequence
  Description of Artificial Sequence: Synthetic oligonucleotide
  Antisense strand to SEQ ID NO: 1980478
ugccucaggcaucauaugg

SEQ ID NO: 1980480 - RNA, 19 nt, Artificial Sequence
  Description of Artificial Sequence: Synthetic oligonucleotide
  Sense strand starting at position 3704 of SEQ ID NO: 1880612
cugauuacgcuuugagcca

SEQ ID NO: 1980481 - RNA, 19 nt, Artificial Sequence
  Description of Artificial Sequence: Synthetic oligonucleotide
  Antisense strand to SEQ ID NO: 1980480
uggcucaaagcguaaucag

SEQ ID NO: 1980482 - RNA, 19 nt, Artificial Sequence
  Description of Artificial Sequence: Synthetic oligonucleotide
  Sense strand starting at position 66 of SEQ ID NO: 1880613
acugcaaaucuauaguaag

SEQ ID NO: 1980483 - RNA, 19 nt, Artificial Sequence
  Description of Artificial Sequence: Synthetic oligonucleotide
  Antisense strand to SEQ ID NO: 1980482
cuuacuauagauuugcagu

SEQ ID NO: 1980484 - RNA, 19 nt, Artificial Sequence
  Description of Artificial Sequence: Synthetic oligonucleotide
  Sense strand starting at position 76 of SEQ ID NO: 1880613
uauaguaagcaugguacua

SEQ ID NO: 1980485 - RNA, 19 nt, Artificial Sequence
  Description of Artificial Sequence: Synthetic oligonucleotide
  Antisense strand to SEQ ID NO: 1980484
uaguaccaugcuuacuaua

SEQ ID NO: 1980486 - RNA, 19 nt, Artificial Sequence
  Description of Artificial Sequence: Synthetic oligonucleotide
  Sense strand starting at position 194 of SEQ ID NO: 1880613
agcguuuacggucaauucu

SEQ ID NO: 1980487 - RNA, 19 nt, Artificial Sequence
  Description of Artificial Sequence: Synthetic oligonucleotide
  Antisense strand to SEQ ID NO: 1980486
agaauugaccguaaacgcu

SEQ ID NO: 1980488 - RNA, 19 nt, Artificial Sequence
  Description of Artificial Sequence: Synthetic oligonucleotide
  Sense strand starting at position 301 of SEQ ID NO: 1880613
agaauacaucuaggccauu

SEQ ID NO: 1980489 - RNA, 19 nt, Artificial Sequence
  Description of Artificial Sequence: Synthetic oligonucleotide
  Antisense strand to SEQ ID NO: 1980488
aauggccuagauguauucu

SEQ ID NO: 1980490 - RNA, 19 nt, Artificial Sequence
  Description of Artificial Sequence: Synthetic oligonucleotide
  Sense strand starting at position 313 of SEQ ID NO: 1880613
ggccauuacccuuaccgua

SEQ ID NO: 1980491 - RNA, 19 nt, Artificial Sequence
  Description of Artificial Sequence: Synthetic oligonucleotide
  Antisense strand to SEQ ID NO: 1980490
uacgguaaggguaauggcc

SEQ ID NO: 1980492 - RNA, 19 nt, Artificial Sequence
  Description of Artificial Sequence: Synthetic oligonucleotide
  Sense strand starting at position 519 of SEQ ID NO: 1880613
guuagcaaucaguauaaug

SEQ ID NO: 1980493 - RNA, 19 nt, Artificial Sequence
  Description of Artificial Sequence: Synthetic oligonucleotide
  Antisense strand to SEQ ID NO: 1980492
cauuauacugauugcuaac

SEQ ID NO: 1980494 - RNA, 19 nt, Artificial Sequence
  Description of Artificial Sequence: Synthetic oligonucleotide
  Sense strand starting at position 1931 of SEQ ID NO: 1880613
cgcagugcucaacaggaaa

SEQ ID NO: 1980495 - RNA, 19 nt, Artificial Sequence
  Description of Artificial Sequence: Synthetic oligonucleotide
  Antisense strand to SEQ ID NO: 1980494
uuuccuguugagcacugcg

SEQ ID NO: 1980496 - RNA, 19 nt, Artificial Sequence
  Description of Artificial Sequence: Synthetic oligonucleotide
  Sense strand starting at position 1974 of SEQ ID NO: 1880613
accucucuucggcauuaca

SEQ ID NO: 1980497 - RNA, 19 nt, Artificial Sequence
  Description of Artificial Sequence: Synthetic oligonucleotide
  Antisense strand to SEQ ID NO: 1980496
uguaaugccgaagagaggu

SEQ ID NO: 1980498 - RNA, 19 nt, Artificial Sequence
  Description of Artificial Sequence: Synthetic oligonucleotide
  Sense strand starting at position 1977 of SEQ ID NO: 1880613
ucucuucggcauuacauau

SEQ ID NO: 1980499 - RNA, 19 nt, Artificial Sequence
  Description of Artificial Sequence: Synthetic oligonucleotide
  Antisense strand to SEQ ID NO: 1980498
auauguaaugccgaagaga

SEQ ID NO: 1980500 - RNA, 19 nt, Artificial Sequence
  Description of Artificial Sequence: Synthetic oligonucleotide
  Sense strand starting at position 2011 of SEQ ID NO: 1880613
gcaugaugguuccuggacu

SEQ ID NO: 1980501 - RNA, 19 nt, Artificial Sequence
  Description of Artificial Sequence: Synthetic oligonucleotide
  Antisense strand to SEQ ID NO: 1980500
aguccaggaaccaucaugc

SEQ ID NO: 1980502 - RNA, 19 nt, Artificial Sequence
  Description of Artificial Sequence: Synthetic oligonucleotide
  Sense strand starting at position 2206 of SEQ ID NO: 1880613
uccguaaccucaguauaua

SEQ ID NO: 1980503 - RNA, 19 nt, Artificial Sequence
  Description of Artificial Sequence: Synthetic oligonucleotide
  Antisense strand to SEQ ID NO: 1980502
uauauacugagguuacgga

SEQ ID NO: 1980504 - RNA, 19 nt, Artificial Sequence
  Description of Artificial Sequence: Synthetic oligonucleotide
  Sense strand starting at position 2207 of SEQ ID NO: 1880613
ccguaaccucaguauauaa

SEQ ID NO: 1980505 - RNA, 19 nt, Artificial Sequence
  Description of Artificial Sequence: Synthetic oligonucleotide
  Antisense strand to SEQ ID NO: 1980504
uuauauacugagguuacgg

SEQ ID NO: 1980506 - RNA, 19 nt, Artificial Sequence
  Description of Artificial Sequence: Synthetic oligonucleotide
  Sense strand starting at position 2234 of SEQ ID NO: 1880613
gagggagccacacgucauu

SEQ ID NO: 1980507 - RNA, 19 nt, Artificial Sequence
  Description of Artificial Sequence: Synthetic oligonucleotide
  Antisense strand to SEQ ID NO: 1980506
aaugacguguggcucccuc

SEQ ID NO: 1980508 - RNA, 19 nt, Artificial Sequence
  Description of Artificial Sequence: Synthetic oligonucleotide
  Sense strand starting at position 2286 of SEQ ID NO: 1880613
acgugcucggcuuagagaa

SEQ ID NO: 1980509 - RNA, 19 nt, Artificial Sequence
  Description of Artificial Sequence: Synthetic oligonucleotide
  Antisense strand to SEQ ID NO: 1980508
uucucuaagccgagcacgu

SEQ ID NO: 1980510 - RNA, 19 nt, Artificial Sequence
  Description of Artificial Sequence: Synthetic oligonucleotide
  Sense strand starting at position 2287 of SEQ ID NO: 1880613
cgugcucggcuuagagaau

SEQ ID NO: 1980511 - RNA, 19 nt, Artificial Sequence
  Description of Artificial Sequence: Synthetic oligonucleotide
  Antisense strand to SEQ ID NO: 1980510
auucucuaagccgagcacg

SEQ ID NO: 1980512 - RNA, 19 nt, Artificial Sequence
  Description of Artificial Sequence: Synthetic oligonucleotide
  Sense strand starting at position 2375 of SEQ ID NO: 1880613
uggugauggagcuguagga

SEQ ID NO: 1980513 - RNA, 19 nt, Artificial Sequence
  Description of Artificial Sequence: Synthetic oligonucleotide
  Antisense strand to SEQ ID NO: 1980512
uccuacagcuccaucacca

SEQ ID NO: 1980514 - RNA, 19 nt, Artificial Sequence
  Description of Artificial Sequence: Synthetic oligonucleotide
  Sense strand starting at position 2624 of SEQ ID NO: 1880613
cacagaaucugcguaguau

SEQ ID NO: 1980515 - RNA, 19 nt, Artificial Sequence
  Description of Artificial Sequence: Synthetic oligonucleotide
  Antisense strand to SEQ ID NO: 1980514
auacuacgcagauucugug

SEQ ID NO: 1980516 - RNA, 19 nt, Artificial Sequence
  Description of Artificial Sequence: Synthetic oligonucleotide
  Sense strand starting at position 2625 of SEQ ID NO: 1880613
acagaaucugcguaguaua

SEQ ID NO: 1980517 - RNA, 19 nt, Artificial Sequence
  Description of Artificial Sequence: Synthetic oligonucleotide
  Antisense strand to SEQ ID NO: 1980516
uauacuacgcagauucugu

SEQ ID NO: 1980518 - RNA, 19 nt, Artificial Sequence
  Description of Artificial Sequence: Synthetic oligonucleotide
  Sense strand starting at position 2701 of SEQ ID NO: 1880613
ggacccaauccaugguaua

SEQ ID NO: 1980519 - RNA, 19 nt, Artificial Sequence
  Description of Artificial Sequence: Synthetic oligonucleotide
  Antisense strand to SEQ ID NO: 1980518
uauaccauggauugggucc

SEQ ID NO: 1980520 - RNA, 19 nt, Artificial Sequence
  Description of Artificial Sequence: Synthetic oligonucleotide
  Sense strand starting at position 2702 of SEQ ID NO: 1880613
gacccaauccaugguauag

SEQ ID NO: 1980521 - RNA, 19 nt, Artificial Sequence
  Description of Artificial Sequence: Synthetic oligonucleotide
  Antisense strand to SEQ ID NO: 1980520
cuauaccauggauuggguc

SEQ ID NO: 1980522 - RNA, 19 nt, Artificial Sequence
  Description of Artificial Sequence: Synthetic oligonucleotide
  Sense strand starting at position 3030 of SEQ ID NO: 1880613
gguuaaggcuccucucuca

SEQ ID NO: 1980523 - RNA, 19 nt, Artificial Sequence
  Description of Artificial Sequence: Synthetic oligonucleotide
  Antisense strand to SEQ ID NO: 1980522
ugagagaggagccuuaacc

SEQ ID NO: 1980524 - RNA, 19 nt, Artificial Sequence
  Description of Artificial Sequence: Synthetic oligonucleotide
  Sense strand starting at position 3151 of SEQ ID NO: 1880613
guaggcuguauccagauaa

SEQ ID NO: 1980525 - RNA, 19 nt, Artificial Sequence
  Description of Artificial Sequence: Synthetic oligonucleotide
  Antisense strand to SEQ ID NO: 1980524
uuaucuggauacagccuac

SEQ ID NO: 1980526 - RNA, 19 nt, Artificial Sequence
  Description of Artificial Sequence: Synthetic oligonucleotide
  Sense strand starting at position 3172 of SEQ ID NO: 1880613
agcuguuacccgcagaagu

SEQ ID NO: 1980527 - RNA, 19 nt, Artificial Sequence
  Description of Artificial Sequence: Synthetic oligonucleotide
  Antisense strand to SEQ ID NO: 1980526
acuucugcggguaacagcu

SEQ ID NO: 1980528 - RNA, 19 nt, Artificial Sequence
  Description of Artificial Sequence: Synthetic oligonucleotide
  Sense strand starting at position 3182 of SEQ ID NO: 1880613
cgcagaaguuggcugguaa

SEQ ID NO: 1980529 - RNA, 19 nt, Artificial Sequence
  Description of Artificial Sequence: Synthetic oligonucleotide
  Antisense strand to SEQ ID NO: 1980528
uuaccagccaacuucugcg

SEQ ID NO: 1980530 - RNA, 19 nt, Artificial Sequence
  Description of Artificial Sequence: Synthetic oligonucleotide
  Sense strand starting at position 3183 of SEQ ID NO: 1880613
gcagaaguuggcugguaau

SEQ ID NO: 1980531 - RNA, 19 nt, Artificial Sequence
  Description of Artificial Sequence: Synthetic oligonucleotide
  Antisense strand to SEQ ID NO: 1980530
auuaccagccaacuucugc

SEQ ID NO: 1980532 - RNA, 19 nt, Artificial Sequence
  Description of Artificial Sequence: Synthetic oligonucleotide
  Sense strand starting at position 3218 of SEQ ID NO: 1880613
uacgcugucuuauuaauga

SEQ ID NO: 1980533 - RNA, 19 nt, Artificial Sequence
  Description of Artificial Sequence: Synthetic oligonucleotide
  Antisense strand to SEQ ID NO: 1980532
ucauuaauaagacagcgua

SEQ ID NO: 1980534 - RNA, 19 nt, Artificial Sequence
  Description of Artificial Sequence: Synthetic oligonucleotide
  Sense strand starting at position 3231 of SEQ ID NO: 1880613
uaaugaaauugugcuguga

SEQ ID NO: 1980535 - RNA, 19 nt, Artificial Sequence
  Description of Artificial Sequence: Synthetic oligonucleotide
  Antisense strand to SEQ ID NO: 1980534
ucacagcacaauuucauua

SEQ ID NO: 1980536 - RNA, 19 nt, Artificial Sequence
  Description of Artificial Sequence: Synthetic oligonucleotide
  Sense strand starting at position 3364 of SEQ ID NO: 1880613
gggcucuguguguaucuaa

SEQ ID NO: 1980537 - RNA, 19 nt, Artificial Sequence
  Description of Artificial Sequence: Synthetic oligonucleotide
  Antisense strand to SEQ ID NO: 1980536
uuagauacacacagagccc

SEQ ID NO: 1980538 - RNA, 19 nt, Artificial Sequence
  Description of Artificial Sequence: Synthetic oligonucleotide
  Sense strand starting at position 3381 of SEQ ID NO: 1880613
aagagcucaugucuaggau

SEQ ID NO: 1980539 - RNA, 19 nt, Artificial Sequence
  Description of Artificial Sequence: Synthetic oligonucleotide
  Antisense strand to SEQ ID NO: 1980538
auccuagacaugagcucuu

SEQ ID NO: 1980540 - RNA, 19 nt, Artificial Sequence
  Description of Artificial Sequence: Synthetic oligonucleotide
  Sense strand starting at position 3387 of SEQ ID NO: 1880613
ucaugucuaggaugaguga

SEQ ID NO: 1980541 - RNA, 19 nt, Artificial Sequence
  Description of Artificial Sequence: Synthetic oligonucleotide
  Antisense strand to SEQ ID NO: 1980540
ucacucauccuagacauga

SEQ ID NO: 1980542 - RNA, 19 nt, Artificial Sequence
  Description of Artificial Sequence: Synthetic oligonucleotide
  Sense strand starting at position 3398 of SEQ ID NO: 1880613
augagugaacccugguauc

SEQ ID NO: 1980543 - RNA, 19 nt, Artificial Sequence
  Description of Artificial Sequence: Synthetic oligonucleotide
  Antisense strand to SEQ ID NO: 1980542
gauaccaggguucacucau

SEQ ID NO: 1980544 - RNA, 19 nt, Artificial Sequence
  Description of Artificial Sequence: Synthetic oligonucleotide
  Sense strand starting at position 3503 of SEQ ID NO: 1880613
agcccacuuuccguaguaa

SEQ ID NO: 1980545 - RNA, 19 nt, Artificial Sequence
  Description of Artificial Sequence: Synthetic oligonucleotide
  Antisense strand to SEQ ID NO: 1980544
uuacuacggaaagugggcu

SEQ ID NO: 1980546 - RNA, 19 nt, Artificial Sequence
  Description of Artificial Sequence: Synthetic oligonucleotide
  Sense strand starting at position 3504 of SEQ ID NO: 1880613
gcccacuuuccguaguaag

SEQ ID NO: 1980547 - RNA, 19 nt, Artificial Sequence
  Description of Artificial Sequence: Synthetic oligonucleotide
  Antisense strand to SEQ ID NO: 1980546
cuuacuacggaaagugggc

SEQ ID NO: 1980548 - RNA, 19 nt, Artificial Sequence
  Description of Artificial Sequence: Synthetic oligonucleotide
  Sense strand starting at position 3598 of SEQ ID NO: 1880613
ucagguacuucugacauuu

SEQ ID NO: 1980549 - RNA, 19 nt, Artificial Sequence
  Description of Artificial Sequence: Synthetic oligonucleotide
  Antisense strand to SEQ ID NO: 1980548
aaaugucagaaguaccuga

SEQ ID NO: 1980550 - RNA, 19 nt, Artificial Sequence
  Description of Artificial Sequence: Synthetic oligonucleotide
  Sense strand starting at position 3600 of SEQ ID NO: 1880613
agguacuucugacauuuaa

SEQ ID NO: 1980551 - RNA, 19 nt, Artificial Sequence
  Description of Artificial Sequence: Synthetic oligonucleotide
  Antisense strand to SEQ ID NO: 1980550
uuaaaugucagaaguaccu

SEQ ID NO: 1980552 - RNA, 19 nt, Artificial Sequence
  Description of Artificial Sequence: Synthetic oligonucleotide
  Sense strand starting at position 3623 of SEQ ID NO: 1880613
uuuguucugucuuucuauu

SEQ ID NO: 1980553 - RNA, 19 nt, Artificial Sequence
  Description of Artificial Sequence: Synthetic oligonucleotide
  Antisense strand to SEQ ID NO: 1980552
aauagaaagacagaacaaa

SEQ ID NO: 1980554 - RNA, 19 nt, Artificial Sequence
  Description of Artificial Sequence: Synthetic oligonucleotide
  Sense strand starting at position 3686 of SEQ ID NO: 1880613
ugaggcuuauuugaaagau

SEQ ID NO: 1980555 - RNA, 19 nt, Artificial Sequence
  Description of Artificial Sequence: Synthetic oligonucleotide
  Antisense strand to SEQ ID NO: 1980554
aucuuucaaauaagccuca

SEQ ID NO: 1980556 - RNA, 19 nt, Artificial Sequence
  Description of Artificial Sequence: Synthetic oligonucleotide
  Sense strand starting at position 3768 of SEQ ID NO: 1880613
gaaaguguacaugggaauu

SEQ ID NO: 1980557 - RNA, 19 nt, Artificial Sequence
  Description of Artificial Sequence: Synthetic oligonucleotide
  Antisense strand to SEQ ID NO: 1980556
aauucccauguacacuuuc

SEQ ID NO: 1980558 - RNA, 19 nt, Artificial Sequence
  Description of Artificial Sequence: Synthetic oligonucleotide
  Sense strand starting at position 3779 of SEQ ID NO: 1880613
ugggaauucuucucaacau

SEQ ID NO: 1980559 - RNA, 19 nt, Artificial Sequence
  Description of Artificial Sequence: Synthetic oligonucleotide
  Antisense strand to SEQ ID NO: 1980558
auguugagaagaauuccca

SEQ ID NO: 1980560 - RNA, 19 nt, Artificial Sequence
  Description of Artificial Sequence: Synthetic oligonucleotide
  Sense strand starting at position 3930 of SEQ ID NO: 1880613
auaguauacuuacugguuu

SEQ ID NO: 1980561 - RNA, 19 nt, Artificial Sequence
  Description of Artificial Sequence: Synthetic oligonucleotide
  Antisense strand to SEQ ID NO: 1980560
aaaccaguaaguauacuau

SEQ ID NO: 1980562 - RNA, 19 nt, Artificial Sequence
  Description of Artificial Sequence: Synthetic oligonucleotide
  Sense strand starting at position 1771 of SEQ ID NO: 1880614
aggcucugaguuuacugaa

SEQ ID NO: 1980563 - RNA, 19 nt, Artificial Sequence
  Description of Artificial Sequence: Synthetic oligonucleotide
  Antisense strand to SEQ ID NO: 1980562
uucaguaaacucagagccu

SEQ ID NO: 1980564 - RNA, 19 nt, Artificial Sequence
  Description of Artificial Sequence: Synthetic oligonucleotide
  Sense strand starting at position 2230 of SEQ ID NO: 1880614
ucccuuuguguauauuaca

SEQ ID NO: 1980565 - RNA, 19 nt, Artificial Sequence
  Description of Artificial Sequence: Synthetic oligonucleotide
  Antisense strand to SEQ ID NO: 1980564
uguaauauacacaaaggga

SEQ ID NO: 1980566 - RNA, 19 nt, Artificial Sequence
  Description of Artificial Sequence: Synthetic oligonucleotide
  Sense strand starting at position 2291 of SEQ ID NO: 1880614
ucgccaucuugggcaauuu

SEQ ID NO: 1980567 - RNA, 19 nt, Artificial Sequence
  Description of Artificial Sequence: Synthetic oligonucleotide
  Antisense strand to SEQ ID NO: 1980566
aaauugcccaagauggcga

SEQ ID NO: 1980568 - RNA, 19 nt, Artificial Sequence
  Description of Artificial Sequence: Synthetic oligonucleotide
  Sense strand starting at position 2359 of SEQ ID NO: 1880614
uaggaagugugucuggaua

SEQ ID NO: 1980569 - RNA, 19 nt, Artificial Sequence
  Description of Artificial Sequence: Synthetic oligonucleotide
  Antisense strand to SEQ ID NO: 1980568
uauccagacacacuuccua

SEQ ID NO: 1980570 - RNA, 19 nt, Artificial Sequence
  Description of Artificial Sequence: Synthetic oligonucleotide
  Sense strand starting at position 2411 of SEQ ID NO: 1880614
agugacgucauguaaacuu

SEQ ID NO: 1980571 - RNA, 19 nt, Artificial Sequence
  Description of Artificial Sequence: Synthetic oligonucleotide
  Antisense strand to SEQ ID NO: 1980570
aaguuuacaugacgucacu

SEQ ID NO: 1980572 - RNA, 19 nt, Artificial Sequence
  Description of Artificial Sequence: Synthetic oligonucleotide
  Sense strand starting at position 2491 of SEQ ID NO: 1880614
guguaacuuacagguuacu

SEQ ID NO: 1980573 - RNA, 19 nt, Artificial Sequence
  Description of Artificial Sequence: Synthetic oligonucleotide
  Antisense strand to SEQ ID NO: 1980572
aguaaccuguaaguuacac

SEQ ID NO: 1980574 - RNA, 19 nt, Artificial Sequence
  Description of Artificial Sequence: Synthetic oligonucleotide
  Sense strand starting at position 2512 of SEQ ID NO: 1880614
uaaguuguguggcuuauuu

SEQ ID NO: 1980575 - RNA, 19 nt, Artificial Sequence
  Description of Artificial Sequence: Synthetic oligonucleotide
  Antisense strand to SEQ ID NO: 1980574
aaauaagccacacaacuua

SEQ ID NO: 1980576 - RNA, 19 nt, Artificial Sequence
  Description of Artificial Sequence: Synthetic oligonucleotide
  Sense strand starting at position 2579 of SEQ ID NO: 1880614
uuugguaacagguggaaga

SEQ ID NO: 1980577 - RNA, 19 nt, Artificial Sequence
  Description of Artificial Sequence: Synthetic oligonucleotide
  Antisense strand to SEQ ID NO: 1980576
ucuuccaccuguuaccaaa

SEQ ID NO: 1980578 - RNA, 19 nt, Artificial Sequence
  Description of Artificial Sequence: Synthetic oligonucleotide
  Sense strand starting at position 2619 of SEQ ID NO: 1880614
aaacuugugcgucauuugu

SEQ ID NO: 1980579 - RNA, 19 nt, Artificial Sequence
  Description of Artificial Sequence: Synthetic oligonucleotide
  Antisense strand to SEQ ID NO: 1980578
acaaaugacgcacaaguuu

SEQ ID NO: 1980580 - RNA, 19 nt, Artificial Sequence
  Description of Artificial Sequence: Synthetic oligonucleotide
  Sense strand starting at position 2621 of SEQ ID NO: 1880614
acuugugcgucauuuguua

SEQ ID NO: 1980581 - RNA, 19 nt, Artificial Sequence
  Description of Artificial Sequence: Synthetic oligonucleotide
  Antisense strand to SEQ ID NO: 1980580
uaacaaaugacgcacaagu

SEQ ID NO: 1980582 - RNA, 19 nt, Artificial Sequence
  Description of Artificial Sequence: Synthetic oligonucleotide
  Sense strand starting at position 2684 of SEQ ID NO: 1880614
aacuguuaucuguagucag

SEQ ID NO: 1980583 - RNA, 19 nt, Artificial Sequence
  Description of Artificial Sequence: Synthetic oligonucleotide
  Antisense strand to SEQ ID NO: 1980582
cugacuacagauaacaguu

SEQ ID NO: 1980584 - RNA, 19 nt, Artificial Sequence
  Description of Artificial Sequence: Synthetic oligonucleotide
  Sense strand starting at position 2688 of SEQ ID NO: 1880614
guuaucuguagucaguaua

SEQ ID NO: 1980585 - RNA, 19 nt, Artificial Sequence
  Description of Artificial Sequence: Synthetic oligonucleotide
  Antisense strand to SEQ ID NO: 1980584
uauacugacuacagauaac

SEQ ID NO: 1980586 - RNA, 19 nt, Artificial Sequence
  Description of Artificial Sequence: Synthetic oligonucleotide
  Sense strand starting at position 2691 of SEQ ID NO: 1880614
aucuguagucaguauauuc

SEQ ID NO: 1980587 - RNA, 19 nt, Artificial Sequence
  Description of Artificial Sequence: Synthetic oligonucleotide
  Antisense strand to SEQ ID NO: 1980586
gaauauacugacuacagau

SEQ ID NO: 1980588 - RNA, 19 nt, Artificial Sequence
  Description of Artificial Sequence: Synthetic oligonucleotide
  Sense strand starting at position 2911 of SEQ ID NO: 1880614
agcagauauuaagucaaac

SEQ ID NO: 1980589 - RNA, 19 nt, Artificial Sequence
  Description of Artificial Sequence: Synthetic oligonucleotide
  Antisense strand to SEQ ID NO: 1980588
guuugacuuaauaucugcu

SEQ ID NO: 1980590 - RNA, 19 nt, Artificial Sequence
  Description of Artificial Sequence: Synthetic oligonucleotide
  Sense strand starting at position 2923 of SEQ ID NO: 1880614
gucaaacaauuauugagua

SEQ ID NO: 1980591 - RNA, 19 nt, Artificial Sequence
  Description of Artificial Sequence: Synthetic oligonucleotide
  Antisense strand to SEQ ID NO: 1980590
uacucaauaauuguuugac

SEQ ID NO: 1980592 - RNA, 19 nt, Artificial Sequence
  Description of Artificial Sequence: Synthetic oligonucleotide
  Sense strand starting at position 2986 of SEQ ID NO: 1880614
gcuauaaacucuuugucag

SEQ ID NO: 1980593 - RNA, 19 nt, Artificial Sequence
  Description of Artificial Sequence: Synthetic oligonucleotide
  Antisense strand to SEQ ID NO: 1980592
cugacaaagaguuuauagc

SEQ ID NO: 1980594 - RNA, 19 nt, Artificial Sequence
  Description of Artificial Sequence: Synthetic oligonucleotide
  Sense strand starting at position 2997 of SEQ ID NO: 1880614
uuugucagccauuaugaac

SEQ ID NO: 1980595 - RNA, 19 nt, Artificial Sequence
  Description of Artificial Sequence: Synthetic oligonucleotide
  Antisense strand to SEQ ID NO: 1980594
guucauaauggcugacaaa

SEQ ID NO: 1980596 - RNA, 19 nt, Artificial Sequence
  Description of Artificial Sequence: Synthetic oligonucleotide
  Sense strand starting at position 3106 of SEQ ID NO: 1880614
augauacacugacuaguau

SEQ ID NO: 1980597 - RNA, 19 nt, Artificial Sequence
  Description of Artificial Sequence: Synthetic oligonucleotide
  Antisense strand to SEQ ID NO: 1980596
auacuagucaguguaucau

SEQ ID NO: 1980598 - RNA, 19 nt, Artificial Sequence
  Description of Artificial Sequence: Synthetic oligonucleotide
  Sense strand starting at position 3141 of SEQ ID NO: 1880614
guauauugaaugggaaagu

SEQ ID NO: 1980599 - RNA, 19 nt, Artificial Sequence
  Description of Artificial Sequence: Synthetic oligonucleotide
  Antisense strand to SEQ ID NO: 1980598
acuuucccauucaauauac

SEQ ID NO: 1980600 - RNA, 19 nt, Artificial Sequence
  Description of Artificial Sequence: Synthetic oligonucleotide
  Sense strand starting at position 3160 of SEQ ID NO: 1880614
ggaauucugucuccuguag

SEQ ID NO: 1980601 - RNA, 19 nt, Artificial Sequence
  Description of Artificial Sequence: Synthetic oligonucleotide
  Antisense strand to SEQ ID NO: 1980600
cuacaggagacagaauucc

SEQ ID NO: 1980602 - RNA, 19 nt, Artificial Sequence
  Description of Artificial Sequence: Synthetic oligonucleotide
  Sense strand starting at position 3218 of SEQ ID NO: 1880614
acaugaaacugucuguauu

SEQ ID NO: 1980603 - RNA, 19 nt, Artificial Sequence
  Description of Artificial Sequence: Synthetic oligonucleotide
  Antisense strand to SEQ ID NO: 1980602
aauacagacaguuucaugu

SEQ ID NO: 1980604 - RNA, 19 nt, Artificial Sequence
  Description of Artificial Sequence: Synthetic oligonucleotide
  Sense strand starting at position 3253 of SEQ ID NO: 1880614
ugucuucuggguugaggga

SEQ ID NO: 1980605 - RNA, 19 nt, Artificial Sequence
  Description of Artificial Sequence: Synthetic oligonucleotide
  Antisense strand to SEQ ID NO: 1980604
ucccucaacccagaagaca

SEQ ID NO: 1980606 - RNA, 19 nt, Artificial Sequence
  Description of Artificial Sequence: Synthetic oligonucleotide
  Sense strand starting at position 3447 of SEQ ID NO: 1880614
uagaaagcuugacugaguu

SEQ ID NO: 1980607 - RNA, 19 nt, Artificial Sequence
  Description of Artificial Sequence: Synthetic oligonucleotide
  Antisense strand to SEQ ID NO: 1980606
aacucagucaagcuuucua

SEQ ID NO: 1980608 - RNA, 19 nt, Artificial Sequence
  Description of Artificial Sequence: Synthetic oligonucleotide
  Sense strand starting at position 3451 of SEQ ID NO: 1880614
aagcuugacugaguugagu

SEQ ID NO: 1980609 - RNA, 19 nt, Artificial Sequence
  Description of Artificial Sequence: Synthetic oligonucleotide
  Antisense strand to SEQ ID NO: 1980608
acucaacucagucaagcuu

SEQ ID NO: 1980610 - RNA, 19 nt, Artificial Sequence
  Description of Artificial Sequence: Synthetic oligonucleotide
  Sense strand starting at position 3462 of SEQ ID NO: 1880614
aguugagugucugccauuu

SEQ ID NO: 1980611 - RNA, 19 nt, Artificial Sequence
  Description of Artificial Sequence: Synthetic oligonucleotide
  Antisense strand to SEQ ID NO: 1980610
aaauggcagacacucaacu

SEQ ID NO: 1980612 - RNA, 19 nt, Artificial Sequence
  Description of Artificial Sequence: Synthetic oligonucleotide
  Sense strand starting at position 3468 of SEQ ID NO: 1880614
gugucugccauuuauguga

SEQ ID NO: 1980613 - RNA, 19 nt, Artificial Sequence
  Description of Artificial Sequence: Synthetic oligonucleotide
  Antisense strand to SEQ ID NO: 1980612
ucacauaaauggcagacac

SEQ ID NO: 1980614 - RNA, 19 nt, Artificial Sequence
  Description of Artificial Sequence: Synthetic oligonucleotide
  Sense strand starting at position 3471 of SEQ ID NO: 1880614
ucugccauuuaugugaauu

SEQ ID NO: 1980615 - RNA, 19 nt, Artificial Sequence
  Description of Artificial Sequence: Synthetic oligonucleotide
  Antisense strand to SEQ ID NO: 1980614
aauucacauaaauggcaga

SEQ ID NO: 1980616 - RNA, 19 nt, Artificial Sequence
  Description of Artificial Sequence: Synthetic oligonucleotide
  Sense strand starting at position 3481 of SEQ ID NO: 1880614
augugaauuguagguaggu

SEQ ID NO: 1980617 - RNA, 19 nt, Artificial Sequence
  Description of Artificial Sequence: Synthetic oligonucleotide
  Antisense strand to SEQ ID NO: 1980616
accuaccuacaauucacau

SEQ ID NO: 1980618 - RNA, 19 nt, Artificial Sequence
  Description of Artificial Sequence: Synthetic oligonucleotide
  Sense strand starting at position 3483 of SEQ ID NO: 1880614
gugaauuguagguagguga

SEQ ID NO: 1980619 - RNA, 19 nt, Artificial Sequence
  Description of Artificial Sequence: Synthetic oligonucleotide
  Antisense strand to SEQ ID NO: 1980618
ucaccuaccuacaauucac

SEQ ID NO: 1980620 - RNA, 19 nt, Artificial Sequence
  Description of Artificial Sequence: Synthetic oligonucleotide
  Sense strand starting at position 3526 of SEQ ID NO: 1880614
cauagaacagaugguucua

SEQ ID NO: 1980621 - RNA, 19 nt, Artificial Sequence
  Description of Artificial Sequence: Synthetic oligonucleotide
  Antisense strand to SEQ ID NO: 1980620
uagaaccaucuguucuaug

SEQ ID NO: 1980622 - RNA, 19 nt, Artificial Sequence
  Description of Artificial Sequence: Synthetic oligonucleotide
  Sense strand starting at position 3565 of SEQ ID NO: 1880614
acuagaagauuuggcagau

SEQ ID NO: 1980623 - RNA, 19 nt, Artificial Sequence
  Description of Artificial Sequence: Synthetic oligonucleotide
  Antisense strand to SEQ ID NO: 1980622
aucugccaaaucuucuagu

SEQ ID NO: 1980624 - RNA, 19 nt, Artificial Sequence
  Description of Artificial Sequence: Synthetic oligonucleotide
  Sense strand starting at position 3657 of SEQ ID NO: 1880614
uuguaaacacuguacauau

SEQ ID NO: 1980625 - RNA, 19 nt, Artificial Sequence
  Description of Artificial Sequence: Synthetic oligonucleotide
  Antisense strand to SEQ ID NO: 1980624
auauguacaguguuuacaa

SEQ ID NO: 1980626 - RNA, 19 nt, Artificial Sequence
  Description of Artificial Sequence: Synthetic oligonucleotide
  Sense strand starting at position 3688 of SEQ ID NO: 1880614
gcugcauaaucaguaauuu

SEQ ID NO: 1980627 - RNA, 19 nt, Artificial Sequence
  Description of Artificial Sequence: Synthetic oligonucleotide
  Antisense strand to SEQ ID NO: 1980626
aaauuacugauuaugcagc

SEQ ID NO: 1980628 - RNA, 19 nt, Artificial Sequence
  Description of Artificial Sequence: Synthetic oligonucleotide
  Sense strand starting at position 3696 of SEQ ID NO: 1880614
aucaguaauuuggacaaca

SEQ ID NO: 1980629 - RNA, 19 nt, Artificial Sequence
  Description of Artificial Sequence: Synthetic oligonucleotide
  Antisense strand to SEQ ID NO: 1980628
uguuguccaaauuacugau

SEQ ID NO: 1980630 - RNA, 19 nt, Artificial Sequence
  Description of Artificial Sequence: Synthetic oligonucleotide
  Sense strand starting at position 3722 of SEQ ID NO: 1880614
acucguaugguucagauag

SEQ ID NO: 1980631 - RNA, 19 nt, Artificial Sequence
  Description of Artificial Sequence: Synthetic oligonucleotide
  Antisense strand to SEQ ID NO: 1980630
cuaucugaaccauacgagu

SEQ ID NO: 1980632 - RNA, 19 nt, Artificial Sequence
  Description of Artificial Sequence: Synthetic oligonucleotide
  Sense strand starting at position 3763 of SEQ ID NO: 1880614
uuugaaacaagugguugaa

SEQ ID NO: 1980633 - RNA, 19 nt, Artificial Sequence
  Description of Artificial Sequence: Synthetic oligonucleotide
  Antisense strand to SEQ ID NO: 1980632
uucaaccacuuguuucaaa

SEQ ID NO: 1980634 - RNA, 19 nt, Artificial Sequence
  Description of Artificial Sequence: Synthetic oligonucleotide
  Sense strand starting at position 3765 of SEQ ID NO: 1880614
ugaaacaagugguugaauu

SEQ ID NO: 1980635 - RNA, 19 nt, Artificial Sequence
  Description of Artificial Sequence: Synthetic oligonucleotide
  Antisense strand to SEQ ID NO: 1980634
aauucaaccacuuguuuca

SEQ ID NO: 1980636 - RNA, 19 nt, Artificial Sequence
  Description of Artificial Sequence: Synthetic oligonucleotide
  Sense strand starting at position 3841 of SEQ ID NO: 1880614
aucagauuguaugcuuuaa

SEQ ID NO: 1980637 - RNA, 19 nt, Artificial Sequence
  Description of Artificial Sequence: Synthetic oligonucleotide
  Antisense strand to SEQ ID NO: 1980636
uuaaagcauacaaucugau

SEQ ID NO: 1980638 - RNA, 19 nt, Artificial Sequence
  Description of Artificial Sequence: Synthetic oligonucleotide
  Sense strand starting at position 3895 of SEQ ID NO: 1880614
uucuuauaaugguuggaga

SEQ ID NO: 1980639 - RNA, 19 nt, Artificial Sequence
  Description of Artificial Sequence: Synthetic oligonucleotide
  Antisense strand to SEQ ID NO: 1980638
ucuccaaccauuauaagaa

SEQ ID NO: 1980640 - RNA, 19 nt, Artificial Sequence
  Description of Artificial Sequence: Synthetic oligonucleotide
  Sense strand starting at position 3896 of SEQ ID NO: 1880614
ucuuauaaugguuggagag

SEQ ID NO: 1980641 - RNA, 19 nt, Artificial Sequence
  Description of Artificial Sequence: Synthetic oligonucleotide
  Antisense strand to SEQ ID NO: 1980640
cucuccaaccauuauaaga

SEQ ID NO: 1980642 - RNA, 19 nt, Artificial Sequence
  Description of Artificial Sequence: Synthetic oligonucleotide
  Sense strand starting at position 2024 of SEQ ID NO: 1880615
acauccucgugcuucuuaa

SEQ ID NO: 1980643 - RNA, 19 nt, Artificial Sequence
  Description of Artificial Sequence: Synthetic oligonucleotide
  Antisense strand to SEQ ID NO: 1980642
uuaagaagcacgaggaugu

SEQ ID NO: 1980644 - RNA, 19 nt, Artificial Sequence
  Description of Artificial Sequence: Synthetic oligonucleotide
  Sense strand starting at position 2334 of SEQ ID NO: 1880615
agccgaaaucaacgauuga

SEQ ID NO: 1980645 - RNA, 19 nt, Artificial Sequence
  Description of Artificial Sequence: Synthetic oligonucleotide
  Antisense strand to SEQ ID NO: 1980644
ucaaucguugauuucggcu

SEQ ID NO: 1980646 - RNA, 19 nt, Artificial Sequence
  Description of Artificial Sequence: Synthetic oligonucleotide
  Sense strand starting at position 2335 of SEQ ID NO: 1880615
gccgaaaucaacgauugag

SEQ ID NO: 1980647 - RNA, 19 nt, Artificial Sequence
  Description of Artificial Sequence: Synthetic oligonucleotide
  Antisense strand to SEQ ID NO: 1980646
cucaaucguugauuucggc

SEQ ID NO: 1980648 - RNA, 19 nt, Artificial Sequence
  Description of Artificial Sequence: Synthetic oligonucleotide
  Sense strand starting at position 2344 of SEQ ID NO: 1880615
aacgauugaggucagugaa

SEQ ID NO: 1980649 - RNA, 19 nt, Artificial Sequence
  Description of Artificial Sequence: Synthetic oligonucleotide
  Antisense strand to SEQ ID NO: 1980648
uucacugaccucaaucguu

SEQ ID NO: 1980650 - RNA, 19 nt, Artificial Sequence
  Description of Artificial Sequence: Synthetic oligonucleotide
  Sense strand starting at position 2347 of SEQ ID NO: 1880615
gauugaggucagugaagga

SEQ ID NO: 1980651 - RNA, 19 nt, Artificial Sequence
  Description of Artificial Sequence: Synthetic oligonucleotide
  Antisense strand to SEQ ID NO: 1980650
uccuucacugaccucaauc

SEQ ID NO: 1980652 - RNA, 19 nt, Artificial Sequence
  Description of Artificial Sequence: Synthetic oligonucleotide
  Sense strand starting at position 2394 of SEQ ID NO: 1880615
cagguuucuccaggaggga

SEQ ID NO: 1980653 - RNA, 19 nt, Artificial Sequence
  Description of Artificial Sequence: Synthetic oligonucleotide
  Antisense strand to SEQ ID NO: 1980652
ucccuccuggagaaaccug

SEQ ID NO: 1980654 - RNA, 19 nt, Artificial Sequence
  Description of Artificial Sequence: Synthetic oligonucleotide
  Sense strand starting at position 2504 of SEQ ID NO: 1880615
ccugcauugucuuuaagau

SEQ ID NO: 1980655 - RNA, 19 nt, Artificial Sequence
  Description of Artificial Sequence: Synthetic oligonucleotide
  Antisense strand to SEQ ID NO: 1980654
aucuuaaagacaaugcagg

SEQ ID NO: 1980656 - RNA, 19 nt, Artificial Sequence
  Description of Artificial Sequence: Synthetic oligonucleotide
  Sense strand starting at position 2505 of SEQ ID NO: 1880615
cugcauugucuuuaagauc

SEQ ID NO: 1980657 - RNA, 19 nt, Artificial Sequence
  Description of Artificial Sequence: Synthetic oligonucleotide
  Antisense strand to SEQ ID NO: 1980656
gaucuuaaagacaaugcag

SEQ ID NO: 1980658 - RNA, 19 nt, Artificial Sequence
  Description of Artificial Sequence: Synthetic oligonucleotide
  Sense strand starting at position 2576 of SEQ ID NO: 1880615
acuggcauuccuugauaga

SEQ ID NO: 1980659 - RNA, 19 nt, Artificial Sequence
  Description of Artificial Sequence: Synthetic oligonucleotide
  Antisense strand to SEQ ID NO: 1980658
ucuaucaaggaaugccagu

SEQ ID NO: 1980660 - RNA, 19 nt, Artificial Sequence
  Description of Artificial Sequence: Synthetic oligonucleotide
  Sense strand starting at position 2577 of SEQ ID NO: 1880615
cuggcauuccuugauagac

SEQ ID NO: 1980661 - RNA, 19 nt, Artificial Sequence
  Description of Artificial Sequence: Synthetic oligonucleotide
  Antisense strand to SEQ ID NO: 1980660
gucuaucaaggaaugccag

SEQ ID NO: 1980662 - RNA, 19 nt, Artificial Sequence
  Description of Artificial Sequence: Synthetic oligonucleotide
  Sense strand starting at position 2602 of SEQ ID NO: 1880615
cagggaagcccaggucuua

SEQ ID NO: 1980663 - RNA, 19 nt, Artificial Sequence
  Description of Artificial Sequence: Synthetic oligonucleotide
  Antisense strand to SEQ ID NO: 1980662
uaagaccugggcuucccug

SEQ ID NO: 1980664 - RNA, 19 nt, Artificial Sequence
  Description of Artificial Sequence: Synthetic oligonucleotide
  Sense strand starting at position 2615 of SEQ ID NO: 1880615
gucuuacuagauuauuauc

SEQ ID NO: 1980665 - RNA, 19 nt, Artificial Sequence
  Description of Artificial Sequence: Synthetic oligonucleotide
  Antisense strand to SEQ ID NO: 1980664
gauaauaaucuaguaagac

SEQ ID NO: 1980666 - RNA, 19 nt, Artificial Sequence
  Description of Artificial Sequence: Synthetic oligonucleotide
  Sense strand starting at position 2620 of SEQ ID NO: 1880615
acuagauuauuaucaguac

SEQ ID NO: 1980667 - RNA, 19 nt, Artificial Sequence
  Description of Artificial Sequence: Synthetic oligonucleotide
  Antisense strand to SEQ ID NO: 1980666
guacugauaauaaucuagu

SEQ ID NO: 1980668 - RNA, 19 nt, Artificial Sequence
  Description of Artificial Sequence: Synthetic oligonucleotide
  Sense strand starting at position 2621 of SEQ ID NO: 1880615
cuagauuauuaucaguacu

SEQ ID NO: 1980669 - RNA, 19 nt, Artificial Sequence
  Description of Artificial Sequence: Synthetic oligonucleotide
  Antisense strand to SEQ ID NO: 1980668
aguacugauaauaaucuag

SEQ ID NO: 1980670 - RNA, 19 nt, Artificial Sequence
  Description of Artificial Sequence: Synthetic oligonucleotide
  Sense strand starting at position 2623 of SEQ ID NO: 1880615
agauuauuaucaguacuug

SEQ ID NO: 1980671 - RNA, 19 nt, Artificial Sequence
  Description of Artificial Sequence: Synthetic oligonucleotide
  Antisense strand to SEQ ID NO: 1980670
caaguacugauaauaaucu

SEQ ID NO: 1980672 - RNA, 19 nt, Artificial Sequence
  Description of Artificial Sequence: Synthetic oligonucleotide
  Sense strand starting at position 2635 of SEQ ID NO: 1880615
guacuuggauuugaaugua

SEQ ID NO: 1980673 - RNA, 19 nt, Artificial Sequence
  Description of Artificial Sequence: Synthetic oligonucleotide
  Antisense strand to SEQ ID NO: 1980672
uacauucaaauccaaguac

SEQ ID NO: 1980674 - RNA, 19 nt, Artificial Sequence
  Description of Artificial Sequence: Synthetic oligonucleotide
  Sense strand starting at position 2644 of SEQ ID NO: 1880615
uuugaauguaucugagagg

SEQ ID NO: 1980675 - RNA, 19 nt, Artificial Sequence
  Description of Artificial Sequence: Synthetic oligonucleotide
  Antisense strand to SEQ ID NO: 1980674
ccucucagauacauucaaa

SEQ ID NO: 1980676 - RNA, 19 nt, Artificial Sequence
  Description of Artificial Sequence: Synthetic oligonucleotide
  Sense strand starting at position 2645 of SEQ ID NO: 1880615
uugaauguaucugagagga

SEQ ID NO: 1980677 - RNA, 19 nt, Artificial Sequence
  Description of Artificial Sequence: Synthetic oligonucleotide
  Antisense strand to SEQ ID NO: 1980676
uccucucagauacauucaa

SEQ ID NO: 1980678 - RNA, 19 nt, Artificial Sequence
  Description of Artificial Sequence: Synthetic oligonucleotide
  Sense strand starting at position 2647 of SEQ ID NO: 1880615
gaauguaucugagaggagg

SEQ ID NO: 1980679 - RNA, 19 nt, Artificial Sequence
  Description of Artificial Sequence: Synthetic oligonucleotide
  Antisense strand to SEQ ID NO: 1980678
ccuccucucagauacauuc

SEQ ID NO: 1980680 - RNA, 19 nt, Artificial Sequence
  Description of Artificial Sequence: Synthetic oligonucleotide
  Sense strand starting at position 2661 of SEQ ID NO: 1880615
ggaggaggguuaagguuua

SEQ ID NO: 1980681 - RNA, 19 nt, Artificial Sequence
  Description of Artificial Sequence: Synthetic oligonucleotide
  Antisense strand to SEQ ID NO: 1980680
uaaaccuuaacccuccucc

SEQ ID NO: 1980682 - RNA, 19 nt, Artificial Sequence
  Description of Artificial Sequence: Synthetic oligonucleotide
  Sense strand starting at position 2673 of SEQ ID NO: 1880615
agguuuaagcuguggcuca

SEQ ID NO: 1980683 - RNA, 19 nt, Artificial Sequence
  Description of Artificial Sequence: Synthetic oligonucleotide
  Antisense strand to SEQ ID NO: 1980682
ugagccacagcuuaaaccu

SEQ ID NO: 1980684 - RNA, 19 nt, Artificial Sequence
  Description of Artificial Sequence: Synthetic oligonucleotide
  Sense strand starting at position 2697 of SEQ ID NO: 1880615
cccucagcucuucguggaa

SEQ ID NO: 1980685 - RNA, 19 nt, Artificial Sequence
  Description of Artificial Sequence: Synthetic oligonucleotide
  Antisense strand to SEQ ID NO: 1980684
uuccacgaagagcugaggg

SEQ ID NO: 1980686 - RNA, 19 nt, Artificial Sequence
  Description of Artificial Sequence: Synthetic oligonucleotide
  Sense strand starting at position 2800 of SEQ ID NO: 1880615
uucccaugucgcuguacua

SEQ ID NO: 1980687 - RNA, 19 nt, Artificial Sequence
  Description of Artificial Sequence: Synthetic oligonucleotide
  Antisense strand to SEQ ID NO: 1980686
uaguacagcgacaugggaa

SEQ ID NO: 1980688 - RNA, 19 nt, Artificial Sequence
  Description of Artificial Sequence: Synthetic oligonucleotide
  Sense strand starting at position 2823 of SEQ ID NO: 1880615
uugaccugucaauggauga

SEQ ID NO: 1980689 - RNA, 19 nt, Artificial Sequence
  Description of Artificial Sequence: Synthetic oligonucleotide
  Antisense strand to SEQ ID NO: 1980688
ucauccauugacaggucaa

SEQ ID NO: 1980690 - RNA, 19 nt, Artificial Sequence
  Description of Artificial Sequence: Synthetic oligonucleotide
  Sense strand starting at position 2824 of SEQ ID NO: 1880615
ugaccugucaauggaugau

SEQ ID NO: 1980691 - RNA, 19 nt, Artificial Sequence
  Description of Artificial Sequence: Synthetic oligonucleotide
  Antisense strand to SEQ ID NO: 1980690
aucauccauugacagguca

SEQ ID NO: 1980692 - RNA, 19 nt, Artificial Sequence
  Description of Artificial Sequence: Synthetic oligonucleotide
  Sense strand starting at position 2945 of SEQ ID NO: 1880615
ugccauuccucucuguuga

SEQ ID NO: 1980693 - RNA, 19 nt, Artificial Sequence
  Description of Artificial Sequence: Synthetic oligonucleotide
  Antisense strand to SEQ ID NO: 1980692
ucaacagagaggaauggca

SEQ ID NO: 1980694 - RNA, 19 nt, Artificial Sequence
  Description of Artificial Sequence: Synthetic oligonucleotide
  Sense strand starting at position 2958 of SEQ ID NO: 1880615
uguugaaccugcuccaaau

SEQ ID NO: 1980695 - RNA, 19 nt, Artificial Sequence
  Description of Artificial Sequence: Synthetic oligonucleotide
  Antisense strand to SEQ ID NO: 1980694
auuuggagcagguucaaca

SEQ ID NO: 1980696 - RNA, 19 nt, Artificial Sequence
  Description of Artificial Sequence: Synthetic oligonucleotide
  Sense strand starting at position 3034 of SEQ ID NO: 1880615
cguugagguuucuuacuua

SEQ ID NO: 1980697 - RNA, 19 nt, Artificial Sequence
  Description of Artificial Sequence: Synthetic oligonucleotide
  Antisense strand to SEQ ID NO: 1980696
uaaguaagaaaccucaacg

SEQ ID NO: 1980698 - RNA, 19 nt, Artificial Sequence
  Description of Artificial Sequence: Synthetic oligonucleotide
  Sense strand starting at position 3037 of SEQ ID NO: 1880615
ugagguuucuuacuuauug

SEQ ID NO: 1980699 - RNA, 19 nt, Artificial Sequence
  Description of Artificial Sequence: Synthetic oligonucleotide
  Antisense strand to SEQ ID NO: 1980698
caauaaguaagaaaccuca

SEQ ID NO: 1980700 - RNA, 19 nt, Artificial Sequence
  Description of Artificial Sequence: Synthetic oligonucleotide
  Sense strand starting at position 3038 of SEQ ID NO: 1880615
gagguuucuuacuuauugu

SEQ ID NO: 1980701 - RNA, 19 nt, Artificial Sequence
  Description of Artificial Sequence: Synthetic oligonucleotide
  Antisense strand to SEQ ID NO: 1980700
acaauaaguaagaaaccuc

SEQ ID NO: 1980702 - RNA, 19 nt, Artificial Sequence
  Description of Artificial Sequence: Synthetic oligonucleotide
  Sense strand starting at position 3126 of SEQ ID NO: 1880615
accuguuugucccuaacaa

SEQ ID NO: 1980703 - RNA, 19 nt, Artificial Sequence
  Description of Artificial Sequence: Synthetic oligonucleotide
  Antisense strand to SEQ ID NO: 1980702
uuguuagggacaaacaggu

SEQ ID NO: 1980704 - RNA, 19 nt, Artificial Sequence
  Description of Artificial Sequence: Synthetic oligonucleotide
  Sense strand starting at position 3127 of SEQ ID NO: 1880615
ccuguuugucccuaacaaa

SEQ ID NO: 1980705 - RNA, 19 nt, Artificial Sequence
  Description of Artificial Sequence: Synthetic oligonucleotide
  Antisense strand to SEQ ID NO: 1980704
uuuguuagggacaaacagg

SEQ ID NO: 1980706 - RNA, 19 nt, Artificial Sequence
  Description of Artificial Sequence: Synthetic oligonucleotide
  Sense strand starting at position 3248 of SEQ ID NO: 1880615
cgaacuuugcggcauuuga

SEQ ID NO: 1980707 - RNA, 19 nt, Artificial Sequence
  Description of Artificial Sequence: Synthetic oligonucleotide
  Antisense strand to SEQ ID NO: 1980706
ucaaaugccgcaaaguucg

SEQ ID NO: 1980708 - RNA, 19 nt, Artificial Sequence
  Description of Artificial Sequence: Synthetic oligonucleotide
  Sense strand starting at position 3255 of SEQ ID NO: 1880615
ugcggcauuugauacucaa

SEQ ID NO: 1980709 - RNA, 19 nt, Artificial Sequence
  Description of Artificial Sequence: Synthetic oligonucleotide
  Antisense strand to SEQ ID NO: 1980708
uugaguaucaaaugccgca

SEQ ID NO: 1980710 - RNA, 19 nt, Artificial Sequence
  Description of Artificial Sequence: Synthetic oligonucleotide
  Sense strand starting at position 3549 of SEQ ID NO: 1880615
ugugcucuggccuggacaa

SEQ ID NO: 1980711 - RNA, 19 nt, Artificial Sequence
  Description of Artificial Sequence: Synthetic oligonucleotide
  Antisense strand to SEQ ID NO: 1980710
uuguccaggccagagcaca

SEQ ID NO: 1980712 - RNA, 19 nt, Artificial Sequence
  Description of Artificial Sequence: Synthetic oligonucleotide
  Sense strand starting at position 3550 of SEQ ID NO: 1880615
gugcucuggccuggacaau

SEQ ID NO: 1980713 - RNA, 19 nt, Artificial Sequence
  Description of Artificial Sequence: Synthetic oligonucleotide
  Antisense strand to SEQ ID NO: 1980712
auuguccaggccagagcac

SEQ ID NO: 1980714 - RNA, 19 nt, Artificial Sequence
  Description of Artificial Sequence: Synthetic oligonucleotide
  Sense strand starting at position 3881 of SEQ ID NO: 1880615
agagauguuuguaguguug

SEQ ID NO: 1980715 - RNA, 19 nt, Artificial Sequence
  Description of Artificial Sequence: Synthetic oligonucleotide
  Antisense strand to SEQ ID NO: 1980714
caacacuacaaacaucucu

SEQ ID NO: 1980716 - RNA, 19 nt, Artificial Sequence
  Description of Artificial Sequence: Synthetic oligonucleotide
  Sense strand starting at position 3971 of SEQ ID NO: 1880615
cggcgaauauugucuucuu

SEQ ID NO: 1980717 - RNA, 19 nt, Artificial Sequence
  Description of Artificial Sequence: Synthetic oligonucleotide
  Antisense strand to SEQ ID NO: 1980716
aagaagacaauauucgccg

SEQ ID NO: 1980718 - RNA, 19 nt, Artificial Sequence
  Description of Artificial Sequence: Synthetic oligonucleotide
  Sense strand starting at position 3972 of SEQ ID NO: 1880615
ggcgaauauugucuucuua

SEQ ID NO: 1980719 - RNA, 19 nt, Artificial Sequence
  Description of Artificial Sequence: Synthetic oligonucleotide
  Antisense strand to SEQ ID NO: 1980718
uaagaagacaauauucgcc

SEQ ID NO: 1980720 - RNA, 19 nt, Artificial Sequence
  Description of Artificial Sequence: Synthetic oligonucleotide
  Sense strand starting at position 3974 of SEQ ID NO: 1880615
cgaauauugucuucuuaaa

SEQ ID NO: 1980721 - RNA, 19 nt, Artificial Sequence
  Description of Artificial Sequence: Synthetic oligonucleotide
  Antisense strand to SEQ ID NO: 1980720
uuuaagaagacaauauucg

SEQ ID NO: 1980722 - RNA, 19 nt, Artificial Sequence
  Description of Artificial Sequence: Synthetic oligonucleotide
  Sense strand starting at position 38 of SEQ ID NO: 1880616
cgagauaagauguaauggu

SEQ ID NO: 1980723 - RNA, 19 nt, Artificial Sequence
  Description of Artificial Sequence: Synthetic oligonucleotide
  Antisense strand to SEQ ID NO: 1980722
accauuacaucuuaucucg

SEQ ID NO: 1980724 - RNA, 19 nt, Artificial Sequence
  Description of Artificial Sequence: Synthetic oligonucleotide
  Sense strand starting at position 45 of SEQ ID NO: 1880616
agauguaaugguugaguau

SEQ ID NO: 1980725 - RNA, 19 nt, Artificial Sequence
  Description of Artificial Sequence: Synthetic oligonucleotide
  Antisense strand to SEQ ID NO: 1980724
auacucaaccauuacaucu

SEQ ID NO: 1980726 - RNA, 19 nt, Artificial Sequence
  Description of Artificial Sequence: Synthetic oligonucleotide
  Sense strand starting at position 46 of SEQ ID NO: 1880616
gauguaaugguugaguauu

SEQ ID NO: 1980727 - RNA, 19 nt, Artificial Sequence
  Description of Artificial Sequence: Synthetic oligonucleotide
  Antisense strand to SEQ ID NO: 1980726
aauacucaaccauuacauc

SEQ ID NO: 1980728 - RNA, 19 nt, Artificial Sequence
  Description of Artificial Sequence: Synthetic oligonucleotide
  Sense strand starting at position 56 of SEQ ID NO: 1880616
uugaguauuagagguuaga

SEQ ID NO: 1980729 - RNA, 19 nt, Artificial Sequence
  Description of Artificial Sequence: Synthetic oligonucleotide
  Antisense strand to SEQ ID NO: 1980728
ucuaaccucuaauacucaa

SEQ ID NO: 1980730 - RNA, 19 nt, Artificial Sequence
  Description of Artificial Sequence: Synthetic oligonucleotide
  Sense strand starting at position 323 of SEQ ID NO: 1880616
cgaguucagcuuggcauuu

SEQ ID NO: 1980731 - RNA, 19 nt, Artificial Sequence
  Description of Artificial Sequence: Synthetic oligonucleotide
  Antisense strand to SEQ ID NO: 1980730
aaaugccaagcugaacucg

SEQ ID NO: 1980732 - RNA, 19 nt, Artificial Sequence
  Description of Artificial Sequence: Synthetic oligonucleotide
  Sense strand starting at position 1880 of SEQ ID NO: 1880616
gccuuaggcagauaaaugu

SEQ ID NO: 1980733 - RNA, 19 nt, Artificial Sequence
  Description of Artificial Sequence: Synthetic oligonucleotide
  Antisense strand to SEQ ID NO: 1980732
acauuuaucugccuaaggc

SEQ ID NO: 1980734 - RNA, 19 nt, Artificial Sequence
  Description of Artificial Sequence: Synthetic oligonucleotide
  Sense strand starting at position 1920 of SEQ ID NO: 1880616
ggucccuguccagauaauc

SEQ ID NO: 1980735 - RNA, 19 nt, Artificial Sequence
  Description of Artificial Sequence: Synthetic oligonucleotide
  Antisense strand to SEQ ID NO: 1980734
gauuaucuggacagggacc

SEQ ID NO: 1980736 - RNA, 19 nt, Artificial Sequence
  Description of Artificial Sequence: Synthetic oligonucleotide
  Sense strand starting at position 2016 of SEQ ID NO: 1880616
gggaaacccuguuucuaga

SEQ ID NO: 1980737 - RNA, 19 nt, Artificial Sequence
  Description of Artificial Sequence: Synthetic oligonucleotide
  Antisense strand to SEQ ID NO: 1980736
ucuagaaacaggguuuccc

SEQ ID NO: 1980738 - RNA, 19 nt, Artificial Sequence
  Description of Artificial Sequence: Synthetic oligonucleotide
  Sense strand starting at position 2089 of SEQ ID NO: 1880616
ugaauuccugcccagucau

SEQ ID NO: 1980739 - RNA, 19 nt, Artificial Sequence
  Description of Artificial Sequence: Synthetic oligonucleotide
  Antisense strand to SEQ ID NO: 1980738
augacugggcaggaauuca

SEQ ID NO: 1980740 - RNA, 19 nt, Artificial Sequence
  Description of Artificial Sequence: Synthetic oligonucleotide
  Sense strand starting at position 2135 of SEQ ID NO: 1880616
ggaagcucuuggccucaga

SEQ ID NO: 1980741 - RNA, 19 nt, Artificial Sequence
  Description of Artificial Sequence: Synthetic oligonucleotide
  Antisense strand to SEQ ID NO: 1980740
ucugaggccaagagcuucc

SEQ ID NO: 1980742 - RNA, 19 nt, Artificial Sequence
  Description of Artificial Sequence: Synthetic oligonucleotide
  Sense strand starting at position 2172 of SEQ ID NO: 1880616
ggucaagucuauucccaag

SEQ ID NO: 1980743 - RNA, 19 nt, Artificial Sequence
  Description of Artificial Sequence: Synthetic oligonucleotide
  Antisense strand to SEQ ID NO: 1980742
cuugggaauagacuugacc

SEQ ID NO: 1980744 - RNA, 19 nt, Artificial Sequence
  Description of Artificial Sequence: Synthetic oligonucleotide
  Sense strand starting at position 2218 of SEQ ID NO: 1880616
gucaaauuguuaucacacg

SEQ ID NO: 1980745 - RNA, 19 nt, Artificial Sequence
  Description of Artificial Sequence: Synthetic oligonucleotide
  Antisense strand to SEQ ID NO: 1980744
cgugugauaacaauuugac

SEQ ID NO: 1980746 - RNA, 19 nt, Artificial Sequence
  Description of Artificial Sequence: Synthetic oligonucleotide
  Sense strand starting at position 2256 of SEQ ID NO: 1880616
gugugaaguuaccuuccaa

SEQ ID NO: 1980747 - RNA, 19 nt, Artificial Sequence
  Description of Artificial Sequence: Synthetic oligonucleotide
  Antisense strand to SEQ ID NO: 1980746
uuggaagguaacuucacac

SEQ ID NO: 1980748 - RNA, 19 nt, Artificial Sequence
  Description of Artificial Sequence: Synthetic oligonucleotide
  Sense strand starting at position 2278 of SEQ ID NO: 1880616
ccaagagguguuuguuaaa

SEQ ID NO: 1980749 - RNA, 19 nt, Artificial Sequence
  Description of Artificial Sequence: Synthetic oligonucleotide
  Antisense strand to SEQ ID NO: 1980748
uuuaacaaacaccucuugg

SEQ ID NO: 1980750 - RNA, 19 nt, Artificial Sequence
  Description of Artificial Sequence: Synthetic oligonucleotide
  Sense strand starting at position 2357 of SEQ ID NO: 1880616
uugugaggaucaguuuauu

SEQ ID NO: 1980751 - RNA, 19 nt, Artificial Sequence
  Description of Artificial Sequence: Synthetic oligonucleotide
  Antisense strand to SEQ ID NO: 1980750
aauaaacugauccucacaa

SEQ ID NO: 1980752 - RNA, 19 nt, Artificial Sequence
  Description of Artificial Sequence: Synthetic oligonucleotide
  Sense strand starting at position 2391 of SEQ ID NO: 1880616
acucaaaucguauaguaaa

SEQ ID NO: 1980753 - RNA, 19 nt, Artificial Sequence
  Description of Artificial Sequence: Synthetic oligonucleotide
  Antisense strand to SEQ ID NO: 1980752
uuuacuauacgauuugagu

SEQ ID NO: 1980754 - RNA, 19 nt, Artificial Sequence
  Description of Artificial Sequence: Synthetic oligonucleotide
  Sense strand starting at position 2419 of SEQ ID NO: 1880616
ggcuuuguugagcaugaaa

SEQ ID NO: 1980755 - RNA, 19 nt, Artificial Sequence
  Description of Artificial Sequence: Synthetic oligonucleotide
  Antisense strand to SEQ ID NO: 1980754
uuucaugcucaacaaagcc

SEQ ID NO: 1980756 - RNA, 19 nt, Artificial Sequence
  Description of Artificial Sequence: Synthetic oligonucleotide
  Sense strand starting at position 2747 of SEQ ID NO: 1880616
cccagacuuggaggaaguu

SEQ ID NO: 1980757 - RNA, 19 nt, Artificial Sequence
  Description of Artificial Sequence: Synthetic oligonucleotide
  Antisense strand to SEQ ID NO: 1980756
aacuuccuccaagucuggg

SEQ ID NO: 1980758 - RNA, 19 nt, Artificial Sequence
  Description of Artificial Sequence: Synthetic oligonucleotide
  Sense strand starting at position 2756 of SEQ ID NO: 1880616
ggaggaaguucucugccau

SEQ ID NO: 1980759 - RNA, 19 nt, Artificial Sequence
  Description of Artificial Sequence: Synthetic oligonucleotide
  Antisense strand to SEQ ID NO: 1980758
auggcagagaacuuccucc

SEQ ID NO: 1980760 - RNA, 19 nt, Artificial Sequence
  Description of Artificial Sequence: Synthetic oligonucleotide
  Sense strand starting at position 2757 of SEQ ID NO: 1880616
gaggaaguucucugccaua

SEQ ID NO: 1980761 - RNA, 19 nt, Artificial Sequence
  Description of Artificial Sequence: Synthetic oligonucleotide
  Antisense strand to SEQ ID NO: 1980760
uauggcagagaacuuccuc

SEQ ID NO: 1980762 - RNA, 19 nt, Artificial Sequence
  Description of Artificial Sequence: Synthetic oligonucleotide
  Sense strand starting at position 2762 of SEQ ID NO: 1880616
aguucucugccauaacugu

SEQ ID NO: 1980763 - RNA, 19 nt, Artificial Sequence
  Description of Artificial Sequence: Synthetic oligonucleotide
  Antisense strand to SEQ ID NO: 1980762
acaguuauggcagagaacu

SEQ ID NO: 1980764 - RNA, 19 nt, Artificial Sequence
  Description of Artificial Sequence: Synthetic oligonucleotide
  Sense strand starting at position 2782 of SEQ ID NO: 1880616
auguguauacacuauuaag

SEQ ID NO: 1980765 - RNA, 19 nt, Artificial Sequence
  Description of Artificial Sequence: Synthetic oligonucleotide
  Antisense strand to SEQ ID NO: 1980764
cuuaauaguguauacacau

SEQ ID NO: 1980766 - RNA, 19 nt, Artificial Sequence
  Description of Artificial Sequence: Synthetic oligonucleotide
  Sense strand starting at position 2824 of SEQ ID NO: 1880616
uuuggaagacguggcuuaa

SEQ ID NO: 1980767 - RNA, 19 nt, Artificial Sequence
  Description of Artificial Sequence: Synthetic oligonucleotide
  Antisense strand to SEQ ID NO: 1980766
uuaagccacgucuuccaaa

SEQ ID NO: 1980768 - RNA, 19 nt, Artificial Sequence
  Description of Artificial Sequence: Synthetic oligonucleotide
  Sense strand starting at position 2828 of SEQ ID NO: 1880616
gaagacguggcuuaauagu

SEQ ID NO: 1980769 - RNA, 19 nt, Artificial Sequence
  Description of Artificial Sequence: Synthetic oligonucleotide
  Antisense strand to SEQ ID NO: 1980768
acuauuaagccacgucuuc

SEQ ID NO: 1980770 - RNA, 19 nt, Artificial Sequence
  Description of Artificial Sequence: Synthetic oligonucleotide
  Sense strand starting at position 2883 of SEQ ID NO: 1880616
agggauuaguuguuauaag

SEQ ID NO: 1980771 - RNA, 19 nt, Artificial Sequence
  Description of Artificial Sequence: Synthetic oligonucleotide
  Antisense strand to SEQ ID NO: 1980770
cuuauaacaacuaaucccu

SEQ ID NO: 1980772 - RNA, 19 nt, Artificial Sequence
  Description of Artificial Sequence: Synthetic oligonucleotide
  Sense strand starting at position 2893 of SEQ ID NO: 1880616
uguuauaagcugugacaca

SEQ ID NO: 1980773 - RNA, 19 nt, Artificial Sequence
  Description of Artificial Sequence: Synthetic oligonucleotide
  Antisense strand to SEQ ID NO: 1980772
ugugucacagcuuauaaca

SEQ ID NO: 1980774 - RNA, 19 nt, Artificial Sequence
  Description of Artificial Sequence: Synthetic oligonucleotide
  Sense strand starting at position 2960 of SEQ ID NO: 1880616
gucacucagugacccaaau

SEQ ID NO: 1980775 - RNA, 19 nt, Artificial Sequence
  Description of Artificial Sequence: Synthetic oligonucleotide
  Antisense strand to SEQ ID NO: 1980774
auuugggucacugagugac

SEQ ID NO: 1980776 - RNA, 19 nt, Artificial Sequence
  Description of Artificial Sequence: Synthetic oligonucleotide
  Sense strand starting at position 3253 of SEQ ID NO: 1880616
uugcauggugcguuaaagu

SEQ ID NO: 1980777 - RNA, 19 nt, Artificial Sequence
  Description of Artificial Sequence: Synthetic oligonucleotide
  Antisense strand to SEQ ID NO: 1980776
acuuuaacgcaccaugcaa

SEQ ID NO: 1980778 - RNA, 19 nt, Artificial Sequence
  Description of Artificial Sequence: Synthetic oligonucleotide
  Sense strand starting at position 3296 of SEQ ID NO: 1880616
auagcacagccucagaaau

SEQ ID NO: 1980779 - RNA, 19 nt, Artificial Sequence
  Description of Artificial Sequence: Synthetic oligonucleotide
  Antisense strand to SEQ ID NO: 1980778
auuucugaggcugugcuau

SEQ ID NO: 1980780 - RNA, 19 nt, Artificial Sequence
  Description of Artificial Sequence: Synthetic oligonucleotide
  Sense strand starting at position 3388 of SEQ ID NO: 1880616
cauguuguggccuagaaua

SEQ ID NO: 1980781 - RNA, 19 nt, Artificial Sequence
  Description of Artificial Sequence: Synthetic oligonucleotide
  Antisense strand to SEQ ID NO: 1980780
uauucuaggccacaacaug

SEQ ID NO: 1980782 - RNA, 19 nt, Artificial Sequence
  Description of Artificial Sequence: Synthetic oligonucleotide
  Sense strand starting at position 3390 of SEQ ID NO: 1880616
uguuguggccuagaauaag

SEQ ID NO: 1980783 - RNA, 19 nt, Artificial Sequence
  Description of Artificial Sequence: Synthetic oligonucleotide
  Antisense strand to SEQ ID NO: 1980782
cuuauucuaggccacaaca

SEQ ID NO: 1980784 - RNA, 19 nt, Artificial Sequence
  Description of Artificial Sequence: Synthetic oligonucleotide
  Sense strand starting at position 3430 of SEQ ID NO: 1880616
aguugacucuacuugauac

SEQ ID NO: 1980785 - RNA, 19 nt, Artificial Sequence
  Description of Artificial Sequence: Synthetic oligonucleotide
  Antisense strand to SEQ ID NO: 1980784
guaucaaguagagucaacu

SEQ ID NO: 1980786 - RNA, 19 nt, Artificial Sequence
  Description of Artificial Sequence: Synthetic oligonucleotide
  Sense strand starting at position 3523 of SEQ ID NO: 1880616
uuaacagaguugucaguga

SEQ ID NO: 1980787 - RNA, 19 nt, Artificial Sequence
  Description of Artificial Sequence: Synthetic oligonucleotide
  Antisense strand to SEQ ID NO: 1980786
ucacugacaacucuguuaa

SEQ ID NO: 1980788 - RNA, 19 nt, Artificial Sequence
  Description of Artificial Sequence: Synthetic oligonucleotide
  Sense strand starting at position 3528 of SEQ ID NO: 1880616
agaguugucagugagugag

SEQ ID NO: 1980789 - RNA, 19 nt, Artificial Sequence
  Description of Artificial Sequence: Synthetic oligonucleotide
  Antisense strand to SEQ ID NO: 1980788
cucacucacugacaacucu

SEQ ID NO: 1980790 - RNA, 19 nt, Artificial Sequence
  Description of Artificial Sequence: Synthetic oligonucleotide
  Sense strand starting at position 3530 of SEQ ID NO: 1880616
aguugucagugagugagaa

SEQ ID NO: 1980791 - RNA, 19 nt, Artificial Sequence
  Description of Artificial Sequence: Synthetic oligonucleotide
  Antisense strand to SEQ ID NO: 1980790
uucucacucacugacaacu

SEQ ID NO: 1980792 - RNA, 19 nt, Artificial Sequence
  Description of Artificial Sequence: Synthetic oligonucleotide
  Sense strand starting at position 3661 of SEQ ID NO: 1880616
ucagauuguuuaccaaggu

SEQ ID NO: 1980793 - RNA, 19 nt, Artificial Sequence
  Description of Artificial Sequence: Synthetic oligonucleotide
  Antisense strand to SEQ ID NO: 1980792
accuugguaaacaaucuga

SEQ ID NO: 1980794 - RNA, 19 nt, Artificial Sequence
  Description of Artificial Sequence: Synthetic oligonucleotide
  Sense strand starting at position 3671 of SEQ ID NO: 1880616
uaccaagguugggugaaau

SEQ ID NO: 1980795 - RNA, 19 nt, Artificial Sequence
  Description of Artificial Sequence: Synthetic oligonucleotide
  Antisense strand to SEQ ID NO: 1980794
auuucacccaaccuuggua

SEQ ID NO: 1980796 - RNA, 19 nt, Artificial Sequence
  Description of Artificial Sequence: Synthetic oligonucleotide
  Sense strand starting at position 3724 of SEQ ID NO: 1880616
agauaagccuaucccugau

SEQ ID NO: 1980797 - RNA, 19 nt, Artificial Sequence
  Description of Artificial Sequence: Synthetic oligonucleotide
  Antisense strand to SEQ ID NO: 1980796
aucagggauaggcuuaucu

SEQ ID NO: 1980798 - RNA, 19 nt, Artificial Sequence
  Description of Artificial Sequence: Synthetic oligonucleotide
  Sense strand starting at position 3750 of SEQ ID NO: 1880616
ggaagcucuuaacugaauu

SEQ ID NO: 1980799 - RNA, 19 nt, Artificial Sequence
  Description of Artificial Sequence: Synthetic oligonucleotide
  Antisense strand to SEQ ID NO: 1980798
aauucaguuaagagcuucc

SEQ ID NO: 1980800 - RNA, 19 nt, Artificial Sequence
  Description of Artificial Sequence: Synthetic oligonucleotide
  Sense strand starting at position 3831 of SEQ ID NO: 1880616
agaugauacucaguacuuu

SEQ ID NO: 1980801 - RNA, 19 nt, Artificial Sequence
  Description of Artificial Sequence: Synthetic oligonucleotide
  Antisense strand to SEQ ID NO: 1980800
aaaguacugaguaucaucu

SEQ ID NO: 1980802 - RNA, 19 nt, Artificial Sequence
  Description of Artificial Sequence: Synthetic oligonucleotide
  Sense strand starting at position 383 of SEQ ID NO: 1880617
ggcaaagucagugauggac

SEQ ID NO: 1980803 - RNA, 19 nt, Artificial Sequence
  Description of Artificial Sequence: Synthetic oligonucleotide
  Antisense strand to SEQ ID NO: 1980802
guccaucacugacuuugcc

SEQ ID NO: 1980804 - RNA, 19 nt, Artificial Sequence
  Description of Artificial Sequence: Synthetic oligonucleotide
  Sense strand starting at position 386 of SEQ ID NO: 1880617
aaagucagugauggacaua

SEQ ID NO: 1980805 - RNA, 19 nt, Artificial Sequence
  Description of Artificial Sequence: Synthetic oligonucleotide
  Antisense strand to SEQ ID NO: 1980804
uauguccaucacugacuuu

SEQ ID NO: 1980806 - RNA, 19 nt, Artificial Sequence
  Description of Artificial Sequence: Synthetic oligonucleotide
  Sense strand starting at position 471 of SEQ ID NO: 1880617
gcaggcauccaagacaaua

SEQ ID NO: 1980807 - RNA, 19 nt, Artificial Sequence
  Description of Artificial Sequence: Synthetic oligonucleotide
  Antisense strand to SEQ ID NO: 1980806
uauugucuuggaugccugc

SEQ ID NO: 1980808 - RNA, 19 nt, Artificial Sequence
  Description of Artificial Sequence: Synthetic oligonucleotide
  Sense strand starting at position 708 of SEQ ID NO: 1880617
gugugugccauguugugaa

SEQ ID NO: 1980809 - RNA, 19 nt, Artificial Sequence
  Description of Artificial Sequence: Synthetic oligonucleotide
  Antisense strand to SEQ ID NO: 1980808
uucacaacauggcacacac

SEQ ID NO: 1980810 - RNA, 19 nt, Artificial Sequence
  Description of Artificial Sequence: Synthetic oligonucleotide
  Sense strand starting at position 735 of SEQ ID NO: 1880617
uuuauucugaggugauaga

SEQ ID NO: 1980811 - RNA, 19 nt, Artificial Sequence
  Description of Artificial Sequence: Synthetic oligonucleotide
  Antisense strand to SEQ ID NO: 1980810
ucuaucaccucagaauaaa

SEQ ID NO: 1980812 - RNA, 19 nt, Artificial Sequence
  Description of Artificial Sequence: Synthetic oligonucleotide
  Sense strand starting at position 864 of SEQ ID NO: 1880617
gccaaagucuggguaagaa

SEQ ID NO: 1980813 - RNA, 19 nt, Artificial Sequence
  Description of Artificial Sequence: Synthetic oligonucleotide
  Antisense strand to SEQ ID NO: 1980812
uucuuacccagacuuuggc

SEQ ID NO: 1980814 - RNA, 19 nt, Artificial Sequence
  Description of Artificial Sequence: Synthetic oligonucleotide
  Sense strand starting at position 1001 of SEQ ID NO: 1880617
guaagaagggcucagugau

SEQ ID NO: 1980815 - RNA, 19 nt, Artificial Sequence
  Description of Artificial Sequence: Synthetic oligonucleotide
  Antisense strand to SEQ ID NO: 1980814
aucacugagcccuucuuac

SEQ ID NO: 1980816 - RNA, 19 nt, Artificial Sequence
  Description of Artificial Sequence: Synthetic oligonucleotide
  Sense strand starting at position 1025 of SEQ ID NO: 1880617
cuguauuucuagcuugaug

SEQ ID NO: 1980817 - RNA, 19 nt, Artificial Sequence
  Description of Artificial Sequence: Synthetic oligonucleotide
  Antisense strand to SEQ ID NO: 1980816
caucaagcuagaaauacag

SEQ ID NO: 1980818 - RNA, 19 nt, Artificial Sequence
  Description of Artificial Sequence: Synthetic oligonucleotide
  Sense strand starting at position 1048 of SEQ ID NO: 1880617
uguuaugaggcuggaacau

SEQ ID NO: 1980819 - RNA, 19 nt, Artificial Sequence
  Description of Artificial Sequence: Synthetic oligonucleotide
  Antisense strand to SEQ ID NO: 1980818
auguuccagccucauaaca

SEQ ID NO: 1980820 - RNA, 19 nt, Artificial Sequence
  Description of Artificial Sequence: Synthetic oligonucleotide
  Sense strand starting at position 1101 of SEQ ID NO: 1880617
uuguaauccucccuaagag

SEQ ID NO: 1980821 - RNA, 19 nt, Artificial Sequence
  Description of Artificial Sequence: Synthetic oligonucleotide
  Antisense strand to SEQ ID NO: 1980820
cucuuagggaggauuacaa

SEQ ID NO: 1980822 - RNA, 19 nt, Artificial Sequence
  Description of Artificial Sequence: Synthetic oligonucleotide
  Sense strand starting at position 1193 of SEQ ID NO: 1880617
aucugaaacucgucacuag

SEQ ID NO: 1980823 - RNA, 19 nt, Artificial Sequence
  Description of Artificial Sequence: Synthetic oligonucleotide
  Antisense strand to SEQ ID NO: 1980822
cuagugacgaguuucagau

SEQ ID NO: 1980824 - RNA, 19 nt, Artificial Sequence
  Description of Artificial Sequence: Synthetic oligonucleotide
  Sense strand starting at position 1210 of SEQ ID NO: 1880617
aggagaauuacauguuugu

SEQ ID NO: 1980825 - RNA, 19 nt, Artificial Sequence
  Description of Artificial Sequence: Synthetic oligonucleotide
  Antisense strand to SEQ ID NO: 1980824
acaaacauguaauucuccu

SEQ ID NO: 1980826 - RNA, 19 nt, Artificial Sequence
  Description of Artificial Sequence: Synthetic oligonucleotide
  Sense strand starting at position 1213 of SEQ ID NO: 1880617
agaauuacauguuugucaa

SEQ ID NO: 1980827 - RNA, 19 nt, Artificial Sequence
  Description of Artificial Sequence: Synthetic oligonucleotide
  Antisense strand to SEQ ID NO: 1980826
uugacaaacauguaauucu

SEQ ID NO: 1980828 - RNA, 19 nt, Artificial Sequence
  Description of Artificial Sequence: Synthetic oligonucleotide
  Sense strand starting at position 1284 of SEQ ID NO: 1880617
ugcugagccagaugaaaga

SEQ ID NO: 1980829 - RNA, 19 nt, Artificial Sequence
  Description of Artificial Sequence: Synthetic oligonucleotide
  Antisense strand to SEQ ID NO: 1980828
ucuuucaucuggcucagca

SEQ ID NO: 1980830 - RNA, 19 nt, Artificial Sequence
  Description of Artificial Sequence: Synthetic oligonucleotide
  Sense strand starting at position 1427 of SEQ ID NO: 1880617
cucucaaauuggguuaaca

SEQ ID NO: 1980831 - RNA, 19 nt, Artificial Sequence
  Description of Artificial Sequence: Synthetic oligonucleotide
  Antisense strand to SEQ ID NO: 1980830
uguuaacccaauuugagag

SEQ ID NO: 1980832 - RNA, 19 nt, Artificial Sequence
  Description of Artificial Sequence: Synthetic oligonucleotide
  Sense strand starting at position 1658 of SEQ ID NO: 1880617
agagaacagucuucucucu

SEQ ID NO: 1980833 - RNA, 19 nt, Artificial Sequence
  Description of Artificial Sequence: Synthetic oligonucleotide
  Antisense strand to SEQ ID NO: 1980832
agagagaagacuguucucu

SEQ ID NO: 1980834 - RNA, 19 nt, Artificial Sequence
  Description of Artificial Sequence: Synthetic oligonucleotide
  Sense strand starting at position 1663 of SEQ ID NO: 1880617
acagucuucucucuggaaa

SEQ ID NO: 1980835 - RNA, 19 nt, Artificial Sequence
  Description of Artificial Sequence: Synthetic oligonucleotide
  Antisense strand to SEQ ID NO: 1980834
uuuccagagagaagacugu

SEQ ID NO: 1980836 - RNA, 19 nt, Artificial Sequence
  Description of Artificial Sequence: Synthetic oligonucleotide
  Sense strand starting at position 1664 of SEQ ID NO: 1880617
cagucuucucucuggaaag

SEQ ID NO: 1980837 - RNA, 19 nt, Artificial Sequence
  Description of Artificial Sequence: Synthetic oligonucleotide
  Antisense strand to SEQ ID NO: 1980836
cuuuccagagagaagacug

SEQ ID NO: 1980838 - RNA, 19 nt, Artificial Sequence
  Description of Artificial Sequence: Synthetic oligonucleotide
  Sense strand starting at position 2057 of SEQ ID NO: 1880617
ggaaccucaugauuccauu

SEQ ID NO: 1980839 - RNA, 19 nt, Artificial Sequence
  Description of Artificial Sequence: Synthetic oligonucleotide
  Antisense strand to SEQ ID NO: 1980838
aauggaaucaugagguucc

SEQ ID NO: 1980840 - RNA, 19 nt, Artificial Sequence
  Description of Artificial Sequence: Synthetic oligonucleotide
  Sense strand starting at position 2132 of SEQ ID NO: 1880617
augagaucuaggugacgaa

SEQ ID NO: 1980841 - RNA, 19 nt, Artificial Sequence
  Description of Artificial Sequence: Synthetic oligonucleotide
  Antisense strand to SEQ ID NO: 1980840
uucgucaccuagaucucau

SEQ ID NO: 1980842 - RNA, 19 nt, Artificial Sequence
  Description of Artificial Sequence: Synthetic oligonucleotide
  Sense strand starting at position 2429 of SEQ ID NO: 1880617
caagaucccuggucugaaa

SEQ ID NO: 1980843 - RNA, 19 nt, Artificial Sequence
  Description of Artificial Sequence: Synthetic oligonucleotide
  Antisense strand to SEQ ID NO: 1980842
uuucagaccagggaucuug

SEQ ID NO: 1980844 - RNA, 19 nt, Artificial Sequence
  Description of Artificial Sequence: Synthetic oligonucleotide
  Sense strand starting at position 2431 of SEQ ID NO: 1880617
agaucccuggucugaaaga

SEQ ID NO: 1980845 - RNA, 19 nt, Artificial Sequence
  Description of Artificial Sequence: Synthetic oligonucleotide
  Antisense strand to SEQ ID NO: 1980844
ucuuucagaccagggaucu

SEQ ID NO: 1980846 - RNA, 19 nt, Artificial Sequence
  Description of Artificial Sequence: Synthetic oligonucleotide
  Sense strand starting at position 2546 of SEQ ID NO: 1880617
uggguccuucgugaagaaa

SEQ ID NO: 1980847 - RNA, 19 nt, Artificial Sequence
  Description of Artificial Sequence: Synthetic oligonucleotide
  Antisense strand to SEQ ID NO: 1980846
uuucuucacgaaggaccca

SEQ ID NO: 1980848 - RNA, 19 nt, Artificial Sequence
  Description of Artificial Sequence: Synthetic oligonucleotide
  Sense strand starting at position 2612 of SEQ ID NO: 1880617
agaauaugguuggcuugaa

SEQ ID NO: 1980849 - RNA, 19 nt, Artificial Sequence
  Description of Artificial Sequence: Synthetic oligonucleotide
  Antisense strand to SEQ ID NO: 1980848
uucaagccaaccauauucu

SEQ ID NO: 1980850 - RNA, 19 nt, Artificial Sequence
  Description of Artificial Sequence: Synthetic oligonucleotide
  Sense strand starting at position 2613 of SEQ ID NO: 1880617
gaauaugguuggcuugaau

SEQ ID NO: 1980851 - RNA, 19 nt, Artificial Sequence
  Description of Artificial Sequence: Synthetic oligonucleotide
  Antisense strand to SEQ ID NO: 1980850
auucaagccaaccauauuc

SEQ ID NO: 1980852 - RNA, 19 nt, Artificial Sequence
  Description of Artificial Sequence: Synthetic oligonucleotide
  Sense strand starting at position 2811 of SEQ ID NO: 1880617
acucacacauguguaaaua

SEQ ID NO: 1980853 - RNA, 19 nt, Artificial Sequence
  Description of Artificial Sequence: Synthetic oligonucleotide
  Antisense strand to SEQ ID NO: 1980852
uauuuacacaugugugagu

SEQ ID NO: 1980854 - RNA, 19 nt, Artificial Sequence
  Description of Artificial Sequence: Synthetic oligonucleotide
  Sense strand starting at position 2812 of SEQ ID NO: 1880617
cucacacauguguaaauau

SEQ ID NO: 1980855 - RNA, 19 nt, Artificial Sequence
  Description of Artificial Sequence: Synthetic oligonucleotide
  Antisense strand to SEQ ID NO: 1980854
auauuuacacaugugugag

SEQ ID NO: 1980856 - RNA, 19 nt, Artificial Sequence
  Description of Artificial Sequence: Synthetic oligonucleotide
  Sense strand starting at position 2838 of SEQ ID NO: 1880617
uuaagaauauucuuugcag

SEQ ID NO: 1980857 - RNA, 19 nt, Artificial Sequence
  Description of Artificial Sequence: Synthetic oligonucleotide
  Antisense strand to SEQ ID NO: 1980856
cugcaaagaauauucuuaa

SEQ ID NO: 1980858 - RNA, 19 nt, Artificial Sequence
  Description of Artificial Sequence: Synthetic oligonucleotide
  Sense strand starting at position 2896 of SEQ ID NO: 1880617
agaauauauuugcagagaa

SEQ ID NO: 1980859 - RNA, 19 nt, Artificial Sequence
  Description of Artificial Sequence: Synthetic oligonucleotide
  Antisense strand to SEQ ID NO: 1980858
uucucugcaaauauauucu

SEQ ID NO: 1980860 - RNA, 19 nt, Artificial Sequence
  Description of Artificial Sequence: Synthetic oligonucleotide
  Sense strand starting at position 2986 of SEQ ID NO: 1880617
uacuaaauugguggagcua

SEQ ID NO: 1980861 - RNA, 19 nt, Artificial Sequence
  Description of Artificial Sequence: Synthetic oligonucleotide
  Antisense strand to SEQ ID NO: 1980860
uagcuccaccaauuuagua

SEQ ID NO: 1980862 - RNA, 19 nt, Artificial Sequence
  Description of Artificial Sequence: Synthetic oligonucleotide
  Sense strand starting at position 2987 of SEQ ID NO: 1880617
acuaaauugguggagcuau

SEQ ID NO: 1980863 - RNA, 19 nt, Artificial Sequence
  Description of Artificial Sequence: Synthetic oligonucleotide
  Antisense strand to SEQ ID NO: 1980862
auagcuccaccaauuuagu

SEQ ID NO: 1980864 - RNA, 19 nt, Artificial Sequence
  Description of Artificial Sequence: Synthetic oligonucleotide
  Sense strand starting at position 2995 of SEQ ID NO: 1880617
gguggagcuauuuguuuga

SEQ ID NO: 1980865 - RNA, 19 nt, Artificial Sequence
  Description of Artificial Sequence: Synthetic oligonucleotide
  Antisense strand to SEQ ID NO: 1980864
ucaaacaaauagcuccacc

SEQ ID NO: 1980866 - RNA, 19 nt, Artificial Sequence
  Description of Artificial Sequence: Synthetic oligonucleotide
  Sense strand starting at position 2999 of SEQ ID NO: 1880617
gagcuauuuguuugaagug

SEQ ID NO: 1980867 - RNA, 19 nt, Artificial Sequence
  Description of Artificial Sequence: Synthetic oligonucleotide
  Antisense strand to SEQ ID NO: 1980866
cacuucaaacaaauagcuc

SEQ ID NO: 1980868 - RNA, 19 nt, Artificial Sequence
  Description of Artificial Sequence: Synthetic oligonucleotide
  Sense strand starting at position 3061 of SEQ ID NO: 1880617
aaugguauucuuggacuuu

SEQ ID NO: 1980869 - RNA, 19 nt, Artificial Sequence
  Description of Artificial Sequence: Synthetic oligonucleotide
  Antisense strand to SEQ ID NO: 1980868
aaaguccaagaauaccauu

SEQ ID NO: 1980870 - RNA, 19 nt, Artificial Sequence
  Description of Artificial Sequence: Synthetic oligonucleotide
  Sense strand starting at position 3157 of SEQ ID NO: 1880617
acacuuuauuaaguggagu

SEQ ID NO: 1980871 - RNA, 19 nt, Artificial Sequence
  Description of Artificial Sequence: Synthetic oligonucleotide
  Antisense strand to SEQ ID NO: 1980870
acuccacuuaauaaagugu

SEQ ID NO: 1980872 - RNA, 19 nt, Artificial Sequence
  Description of Artificial Sequence: Synthetic oligonucleotide
  Sense strand starting at position 3160 of SEQ ID NO: 1880617
cuuuauuaaguggagucua

SEQ ID NO: 1980873 - RNA, 19 nt, Artificial Sequence
  Description of Artificial Sequence: Synthetic oligonucleotide
  Antisense strand to SEQ ID NO: 1980872
uagacuccacuuaauaaag

SEQ ID NO: 1980874 - RNA, 19 nt, Artificial Sequence
  Description of Artificial Sequence: Synthetic oligonucleotide
  Sense strand starting at position 3211 of SEQ ID NO: 1880617
ugcucuugcgagucauuau

SEQ ID NO: 1980875 - RNA, 19 nt, Artificial Sequence
  Description of Artificial Sequence: Synthetic oligonucleotide
  Antisense strand to SEQ ID NO: 1980874
auaaugacucgcaagagca

SEQ ID NO: 1980876 - RNA, 19 nt, Artificial Sequence
  Description of Artificial Sequence: Synthetic oligonucleotide
  Sense strand starting at position 3260 of SEQ ID NO: 1880617
aggccucugacaugagaua

SEQ ID NO: 1980877 - RNA, 19 nt, Artificial Sequence
  Description of Artificial Sequence: Synthetic oligonucleotide
  Antisense strand to SEQ ID NO: 1980876
uaucucaugucagaggccu

SEQ ID NO: 1980878 - RNA, 19 nt, Artificial Sequence
  Description of Artificial Sequence: Synthetic oligonucleotide
  Sense strand starting at position 3736 of SEQ ID NO: 1880617
ugacuauuacaguguaaua

SEQ ID NO: 1980879 - RNA, 19 nt, Artificial Sequence
  Description of Artificial Sequence: Synthetic oligonucleotide
  Antisense strand to SEQ ID NO: 1980878
uauuacacuguaauaguca

SEQ ID NO: 1980880 - RNA, 19 nt, Artificial Sequence
  Description of Artificial Sequence: Synthetic oligonucleotide
  Sense strand starting at position 3840 of SEQ ID NO: 1880617
auaugaaagugcuuccuaa

SEQ ID NO: 1980881 - RNA, 19 nt, Artificial Sequence
  Description of Artificial Sequence: Synthetic oligonucleotide
  Antisense strand to SEQ ID NO: 1980880
uuaggaagcacuuucauau

SEQ ID NO: 1980882 - RNA, 19 nt, Artificial Sequence
  Description of Artificial Sequence: Synthetic oligonucleotide
  Sense strand starting at position 155 of SEQ ID NO: 1880618
ccaggucugcucuaagaga

SEQ ID NO: 1980883 - RNA, 19 nt, Artificial Sequence
  Description of Artificial Sequence: Synthetic oligonucleotide
  Antisense strand to SEQ ID NO: 1980882
ucucuuagagcagaccugg

SEQ ID NO: 1980884 - RNA, 19 nt, Artificial Sequence
  Description of Artificial Sequence: Synthetic oligonucleotide
  Sense strand starting at position 166 of SEQ ID NO: 1880618
cuaagagaaucaguccacu

SEQ ID NO: 1980885 - RNA, 19 nt, Artificial Sequence
  Description of Artificial Sequence: Synthetic oligonucleotide
  Antisense strand to SEQ ID NO: 1980884
aguggacugauucucuuag

SEQ ID NO: 1980886 - RNA, 19 nt, Artificial Sequence
  Description of Artificial Sequence: Synthetic oligonucleotide
  Sense strand starting at position 393 of SEQ ID NO: 1880618
uuaauaugauaccuugguu

SEQ ID NO: 1980887 - RNA, 19 nt, Artificial Sequence
  Description of Artificial Sequence: Synthetic oligonucleotide
  Antisense strand to SEQ ID NO: 1980886
aaccaagguaucauauuaa

SEQ ID NO: 1980888 - RNA, 19 nt, Artificial Sequence
  Description of Artificial Sequence: Synthetic oligonucleotide
  Sense strand starting at position 396 of SEQ ID NO: 1880618
auaugauaccuugguuaga

SEQ ID NO: 1980889 - RNA, 19 nt, Artificial Sequence
  Description of Artificial Sequence: Synthetic oligonucleotide
  Antisense strand to SEQ ID NO: 1980888
ucuaaccaagguaucauau

SEQ ID NO: 1980890 - RNA, 19 nt, Artificial Sequence
  Description of Artificial Sequence: Synthetic oligonucleotide
  Sense strand starting at position 397 of SEQ ID NO: 1880618
uaugauaccuugguuagau

SEQ ID NO: 1980891 - RNA, 19 nt, Artificial Sequence
  Description of Artificial Sequence: Synthetic oligonucleotide
  Antisense strand to SEQ ID NO: 1980890
aucuaaccaagguaucaua

SEQ ID NO: 1980892 - RNA, 19 nt, Artificial Sequence
  Description of Artificial Sequence: Synthetic oligonucleotide
  Sense strand starting at position 398 of SEQ ID NO: 1880618
augauaccuugguuagaua

SEQ ID NO: 1980893 - RNA, 19 nt, Artificial Sequence
  Description of Artificial Sequence: Synthetic oligonucleotide
  Antisense strand to SEQ ID NO: 1980892
uaucuaaccaagguaucau

SEQ ID NO: 1980894 - RNA, 19 nt, Artificial Sequence
  Description of Artificial Sequence: Synthetic oligonucleotide
  Sense strand starting at position 406 of SEQ ID NO: 1880618
uugguuagauaauccagau

SEQ ID NO: 1980895 - RNA, 19 nt, Artificial Sequence
  Description of Artificial Sequence: Synthetic oligonucleotide
  Antisense strand to SEQ ID NO: 1980894
aucuggauuaucuaaccaa

SEQ ID NO: 1980896 - RNA, 19 nt, Artificial Sequence
  Description of Artificial Sequence: Synthetic oligonucleotide
  Sense strand starting at position 435 of SEQ ID NO: 1880618
uagugaccugggcauauaa

SEQ ID NO: 1980897 - RNA, 19 nt, Artificial Sequence
  Description of Artificial Sequence: Synthetic oligonucleotide
  Antisense strand to SEQ ID NO: 1980896
uuauaugcccaggucacua

SEQ ID NO: 1980898 - RNA, 19 nt, Artificial Sequence
  Description of Artificial Sequence: Synthetic oligonucleotide
  Sense strand starting at position 437 of SEQ ID NO: 1880618
gugaccugggcauauaauu

SEQ ID NO: 1980899 - RNA, 19 nt, Artificial Sequence
  Description of Artificial Sequence: Synthetic oligonucleotide
  Antisense strand to SEQ ID NO: 1980898
aauuauaugcccaggucac

SEQ ID NO: 1980900 - RNA, 19 nt, Artificial Sequence
  Description of Artificial Sequence: Synthetic oligonucleotide
  Sense strand starting at position 443 of SEQ ID NO: 1880618
ugggcauauaauugggaga

SEQ ID NO: 1980901 - RNA, 19 nt, Artificial Sequence
  Description of Artificial Sequence: Synthetic oligonucleotide
  Antisense strand to SEQ ID NO: 1980900
ucucccaauuauaugccca

SEQ ID NO: 1980902 - RNA, 19 nt, Artificial Sequence
  Description of Artificial Sequence: Synthetic oligonucleotide
  Sense strand starting at position 465 of SEQ ID NO: 1880618
gaagaugcaugauugugau

SEQ ID NO: 1980903 - RNA, 19 nt, Artificial Sequence
  Description of Artificial Sequence: Synthetic oligonucleotide
  Antisense strand to SEQ ID NO: 1980902
aucacaaucaugcaucuuc

SEQ ID NO: 1980904 - RNA, 19 nt, Artificial Sequence
  Description of Artificial Sequence: Synthetic oligonucleotide
  Sense strand starting at position 813 of SEQ ID NO: 1880618
ggacccugugauuauguga

SEQ ID NO: 1980905 - RNA, 19 nt, Artificial Sequence
  Description of Artificial Sequence: Synthetic oligonucleotide
  Antisense strand to SEQ ID NO: 1980904
ucacauaaucacagggucc

SEQ ID NO: 1980906 - RNA, 19 nt, Artificial Sequence
  Description of Artificial Sequence: Synthetic oligonucleotide
  Sense strand starting at position 1441 of SEQ ID NO: 1880618
gagagucaugcacagaugu

SEQ ID NO: 1980907 - RNA, 19 nt, Artificial Sequence
  Description of Artificial Sequence: Synthetic oligonucleotide
  Antisense strand to SEQ ID NO: 1980906
acaucugugcaugacucuc

SEQ ID NO: 1980908 - RNA, 19 nt, Artificial Sequence
  Description of Artificial Sequence: Synthetic oligonucleotide
  Sense strand starting at position 1443 of SEQ ID NO: 1880618
gagucaugcacagauguag

SEQ ID NO: 1980909 - RNA, 19 nt, Artificial Sequence
  Description of Artificial Sequence: Synthetic oligonucleotide
  Antisense strand to SEQ ID NO: 1980908
cuacaucugugcaugacuc

SEQ ID NO: 1980910 - RNA, 19 nt, Artificial Sequence
  Description of Artificial Sequence: Synthetic oligonucleotide
  Sense strand starting at position 1750 of SEQ ID NO: 1880618
ccuugaguuggucaaauua

SEQ ID NO: 1980911 - RNA, 19 nt, Artificial Sequence
  Description of Artificial Sequence: Synthetic oligonucleotide
  Antisense strand to SEQ ID NO: 1980910
uaauuugaccaacucaagg

SEQ ID NO: 1980912 - RNA, 19 nt, Artificial Sequence
  Description of Artificial Sequence: Synthetic oligonucleotide
  Sense strand starting at position 2276 of SEQ ID NO: 1880618
uguauauuucucuguguac

SEQ ID NO: 1980913 - RNA, 19 nt, Artificial Sequence
  Description of Artificial Sequence: Synthetic oligonucleotide
  Antisense strand to SEQ ID NO: 1980912
guacacagagaaauauaca

SEQ ID NO: 1980914 - RNA, 19 nt, Artificial Sequence
  Description of Artificial Sequence: Synthetic oligonucleotide
  Sense strand starting at position 2285 of SEQ ID NO: 1880618
cucuguguaccagaaugau

SEQ ID NO: 1980915 - RNA, 19 nt, Artificial Sequence
  Description of Artificial Sequence: Synthetic oligonucleotide
  Antisense strand to SEQ ID NO: 1980914
aucauucugguacacagag

SEQ ID NO: 1980916 - RNA, 19 nt, Artificial Sequence
  Description of Artificial Sequence: Synthetic oligonucleotide
  Sense strand starting at position 2288 of SEQ ID NO: 1880618
uguguaccagaaugaugau

SEQ ID NO: 1980917 - RNA, 19 nt, Artificial Sequence
  Description of Artificial Sequence: Synthetic oligonucleotide
  Antisense strand to SEQ ID NO: 1980916
aucaucauucugguacaca

SEQ ID NO: 1980918 - RNA, 19 nt, Artificial Sequence
  Description of Artificial Sequence: Synthetic oligonucleotide
  Sense strand starting at position 2297 of SEQ ID NO: 1880618
gaaugaugauggucuguca

SEQ ID NO: 1980919 - RNA, 19 nt, Artificial Sequence
  Description of Artificial Sequence: Synthetic oligonucleotide
  Antisense strand to SEQ ID NO: 1980918
ugacagaccaucaucauuc

SEQ ID NO: 1980920 - RNA, 19 nt, Artificial Sequence
  Description of Artificial Sequence: Synthetic oligonucleotide
  Sense strand starting at position 2305 of SEQ ID NO: 1880618
auggucugucaaugggaga

SEQ ID NO: 1980921 - RNA, 19 nt, Artificial Sequence
  Description of Artificial Sequence: Synthetic oligonucleotide
  Antisense strand to SEQ ID NO: 1980920
ucucccauugacagaccau

SEQ ID NO: 1980922 - RNA, 19 nt, Artificial Sequence
  Description of Artificial Sequence: Synthetic oligonucleotide
  Sense strand starting at position 2408 of SEQ ID NO: 1880618
cccaaacugugaguuaaau

SEQ ID NO: 1980923 - RNA, 19 nt, Artificial Sequence
  Description of Artificial Sequence: Synthetic oligonucleotide
  Antisense strand to SEQ ID NO: 1980922
auuuaacucacaguuuggg

SEQ ID NO: 1980924 - RNA, 19 nt, Artificial Sequence
  Description of Artificial Sequence: Synthetic oligonucleotide
  Sense strand starting at position 2414 of SEQ ID NO: 1880618
cugugaguuaaaugagaga

SEQ ID NO: 1980925 - RNA, 19 nt, Artificial Sequence
  Description of Artificial Sequence: Synthetic oligonucleotide
  Antisense strand to SEQ ID NO: 1980924
ucucucauuuaacucacag

SEQ ID NO: 1980926 - RNA, 19 nt, Artificial Sequence
  Description of Artificial Sequence: Synthetic oligonucleotide
  Sense strand starting at position 2494 of SEQ ID NO: 1880618
augauaauuucugaaacug

SEQ ID NO: 1980927 - RNA, 19 nt, Artificial Sequence
  Description of Artificial Sequence: Synthetic oligonucleotide
  Antisense strand to SEQ ID NO: 1980926
caguuucagaaauuaucau

SEQ ID NO: 1980928 - RNA, 19 nt, Artificial Sequence
  Description of Artificial Sequence: Synthetic oligonucleotide
  Sense strand starting at position 2511 of SEQ ID NO: 1880618
ugcacagugacaugauaag

SEQ ID NO: 1980929 - RNA, 19 nt, Artificial Sequence
  Description of Artificial Sequence: Synthetic oligonucleotide
  Antisense strand to SEQ ID NO: 1980928
cuuaucaugucacugugca

SEQ ID NO: 1980930 - RNA, 19 nt, Artificial Sequence
  Description of Artificial Sequence: Synthetic oligonucleotide
  Sense strand starting at position 2529 of SEQ ID NO: 1880618
ggaauaucucagcaagucu

SEQ ID NO: 1980931 - RNA, 19 nt, Artificial Sequence
  Description of Artificial Sequence: Synthetic oligonucleotide
  Antisense strand to SEQ ID NO: 1980930
agacuugcugagauauucc

SEQ ID NO: 1980932 - RNA, 19 nt, Artificial Sequence
  Description of Artificial Sequence: Synthetic oligonucleotide
  Sense strand starting at position 2682 of SEQ ID NO: 1880618
ccuuaugaagacugauugu

SEQ ID NO: 1980933 - RNA, 19 nt, Artificial Sequence
  Description of Artificial Sequence: Synthetic oligonucleotide
  Antisense strand to SEQ ID NO: 1980932
acaaucagucuucauaagg

SEQ ID NO: 1980934 - RNA, 19 nt, Artificial Sequence
  Description of Artificial Sequence: Synthetic oligonucleotide
  Sense strand starting at position 2934 of SEQ ID NO: 1880618
uucuuagauugggcaaaug

SEQ ID NO: 1980935 - RNA, 19 nt, Artificial Sequence
  Description of Artificial Sequence: Synthetic oligonucleotide
  Antisense strand to SEQ ID NO: 1980934
cauuugcccaaucuaagaa

SEQ ID NO: 1980936 - RNA, 19 nt, Artificial Sequence
  Description of Artificial Sequence: Synthetic oligonucleotide
  Sense strand starting at position 2948 of SEQ ID NO: 1880618
aaaugauuaugucugggau

SEQ ID NO: 1980937 - RNA, 19 nt, Artificial Sequence
  Description of Artificial Sequence: Synthetic oligonucleotide
  Antisense strand to SEQ ID NO: 1980936
aucccagacauaaucauuu

SEQ ID NO: 1980938 - RNA, 19 nt, Artificial Sequence
  Description of Artificial Sequence: Synthetic oligonucleotide
  Sense strand starting at position 2949 of SEQ ID NO: 1880618
aaugauuaugucugggauu

SEQ ID NO: 1980939 - RNA, 19 nt, Artificial Sequence
  Description of Artificial Sequence: Synthetic oligonucleotide
  Antisense strand to SEQ ID NO: 1980938
aaucccagacauaaucauu

SEQ ID NO: 1980940 - RNA, 19 nt, Artificial Sequence
  Description of Artificial Sequence: Synthetic oligonucleotide
  Sense strand starting at position 2951 of SEQ ID NO: 1880618
ugauuaugucugggauuga

SEQ ID NO: 1980941 - RNA, 19 nt, Artificial Sequence
  Description of Artificial Sequence: Synthetic oligonucleotide
  Antisense strand to SEQ ID NO: 1980940
ucaaucccagacauaauca

SEQ ID NO: 1980942 - RNA, 19 nt, Artificial Sequence
  Description of Artificial Sequence: Synthetic oligonucleotide
  Sense strand starting at position 2973 of SEQ ID NO: 1880618
gcacaauauagauguggau

SEQ ID NO: 1980943 - RNA, 19 nt, Artificial Sequence
  Description of Artificial Sequence: Synthetic oligonucleotide
  Antisense strand to SEQ ID NO: 1980942
auccacaucuauauugugc

SEQ ID NO: 1980944 - RNA, 19 nt, Artificial Sequence
  Description of Artificial Sequence: Synthetic oligonucleotide
  Sense strand starting at position 3098 of SEQ ID NO: 1880618
ggagguaguagcgauaaca

SEQ ID NO: 1980945 - RNA, 19 nt, Artificial Sequence
  Description of Artificial Sequence: Synthetic oligonucleotide
  Antisense strand to SEQ ID NO: 1980944
uguuaucgcuacuaccucc

SEQ ID NO: 1980946 - RNA, 19 nt, Artificial Sequence
  Description of Artificial Sequence: Synthetic oligonucleotide
  Sense strand starting at position 3288 of SEQ ID NO: 1880618
uuuguaucuguauaaucag

SEQ ID NO: 1980947 - RNA, 19 nt, Artificial Sequence
  Description of Artificial Sequence: Synthetic oligonucleotide
  Antisense strand to SEQ ID NO: 1980946
cugauuauacagauacaaa

SEQ ID NO: 1980948 - RNA, 19 nt, Artificial Sequence
  Description of Artificial Sequence: Synthetic oligonucleotide
  Sense strand starting at position 3360 of SEQ ID NO: 1880618
gaucuaacacagugugaug

SEQ ID NO: 1980949 - RNA, 19 nt, Artificial Sequence
  Description of Artificial Sequence: Synthetic oligonucleotide
  Antisense strand to SEQ ID NO: 1980948
caucacacuguguuagauc

SEQ ID NO: 1980950 - RNA, 19 nt, Artificial Sequence
  Description of Artificial Sequence: Synthetic oligonucleotide
  Sense strand starting at position 3434 of SEQ ID NO: 1880618
gagaaccugucaguugaau

SEQ ID NO: 1980951 - RNA, 19 nt, Artificial Sequence
  Description of Artificial Sequence: Synthetic oligonucleotide
  Antisense strand to SEQ ID NO: 1980950
auucaacugacagguucuc

SEQ ID NO: 1980952 - RNA, 19 nt, Artificial Sequence
  Description of Artificial Sequence: Synthetic oligonucleotide
  Sense strand starting at position 3497 of SEQ ID NO: 1880618
auaaguggcuuauuaagau

SEQ ID NO: 1980953 - RNA, 19 nt, Artificial Sequence
  Description of Artificial Sequence: Synthetic oligonucleotide
  Antisense strand to SEQ ID NO: 1980952
aucuuaauaagccacuuau

SEQ ID NO: 1980954 - RNA, 19 nt, Artificial Sequence
  Description of Artificial Sequence: Synthetic oligonucleotide
  Sense strand starting at position 3536 of SEQ ID NO: 1880618
aaugaagauuuggaaguau

SEQ ID NO: 1980955 - RNA, 19 nt, Artificial Sequence
  Description of Artificial Sequence: Synthetic oligonucleotide
  Antisense strand to SEQ ID NO: 1980954
auacuuccaaaucuucauu

SEQ ID NO: 1980956 - RNA, 19 nt, Artificial Sequence
  Description of Artificial Sequence: Synthetic oligonucleotide
  Sense strand starting at position 3631 of SEQ ID NO: 1880618
agcucccauggguaaagau

SEQ ID NO: 1980957 - RNA, 19 nt, Artificial Sequence
  Description of Artificial Sequence: Synthetic oligonucleotide
  Antisense strand to SEQ ID NO: 1980956
aucuuuacccaugggagcu

SEQ ID NO: 1980958 - RNA, 19 nt, Artificial Sequence
  Description of Artificial Sequence: Synthetic oligonucleotide
  Sense strand starting at position 3852 of SEQ ID NO: 1880618
auauaaucgugauugaaug

SEQ ID NO: 1980959 - RNA, 19 nt, Artificial Sequence
  Description of Artificial Sequence: Synthetic oligonucleotide
  Antisense strand to SEQ ID NO: 1980958
cauucaaucacgauuauau

SEQ ID NO: 1980960 - RNA, 19 nt, Artificial Sequence
  Description of Artificial Sequence: Synthetic oligonucleotide
  Sense strand starting at position 3858 of SEQ ID NO: 1880618
ucgugauugaauggaagaa

SEQ ID NO: 1980961 - RNA, 19 nt, Artificial Sequence
  Description of Artificial Sequence: Synthetic oligonucleotide
  Antisense strand to SEQ ID NO: 1980960
uucuuccauucaaucacga

SEQ ID NO: 1980962 - RNA, 19 nt, Artificial Sequence
  Description of Artificial Sequence: Synthetic oligonucleotide
  Sense strand starting at position 174 of SEQ ID NO: 1880619
caucguacuuggcuaauuu

SEQ ID NO: 1980963 - RNA, 19 nt, Artificial Sequence
  Description of Artificial Sequence: Synthetic oligonucleotide
  Antisense strand to SEQ ID NO: 1980962
aaauuagccaaguacgaug

SEQ ID NO: 1980964 - RNA, 19 nt, Artificial Sequence
  Description of Artificial Sequence: Synthetic oligonucleotide
  Sense strand starting at position 311 of SEQ ID NO: 1880619
cgugacaggccuuaacuau

SEQ ID NO: 1980965 - RNA, 19 nt, Artificial Sequence
  Description of Artificial Sequence: Synthetic oligonucleotide
  Antisense strand to SEQ ID NO: 1980964
auaguuaaggccugucacg

SEQ ID NO: 1980966 - RNA, 19 nt, Artificial Sequence
  Description of Artificial Sequence: Synthetic oligonucleotide
  Sense strand starting at position 642 of SEQ ID NO: 1880619
caaaguaaugugcaaugua

SEQ ID NO: 1980967 - RNA, 19 nt, Artificial Sequence
  Description of Artificial Sequence: Synthetic oligonucleotide
  Antisense strand to SEQ ID NO: 1980966
uacauugcacauuacuuug

SEQ ID NO: 1980968 - RNA, 19 nt, Artificial Sequence
  Description of Artificial Sequence: Synthetic oligonucleotide
  Sense strand starting at position 645 of SEQ ID NO: 1880619
aguaaugugcaauguaaug

SEQ ID NO: 1980969 - RNA, 19 nt, Artificial Sequence
  Description of Artificial Sequence: Synthetic oligonucleotide
  Antisense strand to SEQ ID NO: 1980968
cauuacauugcacauuacu

SEQ ID NO: 1980970 - RNA, 19 nt, Artificial Sequence
  Description of Artificial Sequence: Synthetic oligonucleotide
  Sense strand starting at position 651 of SEQ ID NO: 1880619
gugcaauguaaugaggcaa

SEQ ID NO: 1980971 - RNA, 19 nt, Artificial Sequence
  Description of Artificial Sequence: Synthetic oligonucleotide
  Antisense strand to SEQ ID NO: 1980970
uugccucauuacauugcac

SEQ ID NO: 1980972 - RNA, 19 nt, Artificial Sequence
  Description of Artificial Sequence: Synthetic oligonucleotide
  Sense strand starting at position 755 of SEQ ID NO: 1880619
ggagccucugcuugggaga

SEQ ID NO: 1980973 - RNA, 19 nt, Artificial Sequence
  Description of Artificial Sequence: Synthetic oligonucleotide
  Antisense strand to SEQ ID NO: 1980972
ucucccaagcagaggcucc

SEQ ID NO: 1980974 - RNA, 19 nt, Artificial Sequence
  Description of Artificial Sequence: Synthetic oligonucleotide
  Sense strand starting at position 756 of SEQ ID NO: 1880619
gagccucugcuugggagau

SEQ ID NO: 1980975 - RNA, 19 nt, Artificial Sequence
  Description of Artificial Sequence: Synthetic oligonucleotide
  Antisense strand to SEQ ID NO: 1980974
aucucccaagcagaggcuc

SEQ ID NO: 1980976 - RNA, 19 nt, Artificial Sequence
  Description of Artificial Sequence: Synthetic oligonucleotide
  Sense strand starting at position 779 of SEQ ID NO: 1880619
cacaguuggucaggagacu

SEQ ID NO: 1980977 - RNA, 19 nt, Artificial Sequence
  Description of Artificial Sequence: Synthetic oligonucleotide
  Antisense strand to SEQ ID NO: 1980976
agucuccugaccaacugug

SEQ ID NO: 1980978 - RNA, 19 nt, Artificial Sequence
  Description of Artificial Sequence: Synthetic oligonucleotide
  Sense strand starting at position 869 of SEQ ID NO: 1880619
gcagcaaacugucccagaa

SEQ ID NO: 1980979 - RNA, 19 nt, Artificial Sequence
  Description of Artificial Sequence: Synthetic oligonucleotide
  Antisense strand to SEQ ID NO: 1980978
uucugggacaguuugcugc

SEQ ID NO: 1980980 - RNA, 19 nt, Artificial Sequence
  Description of Artificial Sequence: Synthetic oligonucleotide
  Sense strand starting at position 871 of SEQ ID NO: 1880619
agcaaacugucccagaaca

SEQ ID NO: 1980981 - RNA, 19 nt, Artificial Sequence
  Description of Artificial Sequence: Synthetic oligonucleotide
  Antisense strand to SEQ ID NO: 1980980
uguucugggacaguuugcu

SEQ ID NO: 1980982 - RNA, 19 nt, Artificial Sequence
  Description of Artificial Sequence: Synthetic oligonucleotide
  Sense strand starting at position 967 of SEQ ID NO: 1880619
gaagaugcaucuuuggaag

SEQ ID NO: 1980983 - RNA, 19 nt, Artificial Sequence
  Description of Artificial Sequence: Synthetic oligonucleotide
  Antisense strand to SEQ ID NO: 1980982
cuuccaaagaugcaucuuc

SEQ ID NO: 1980984 - RNA, 19 nt, Artificial Sequence
  Description of Artificial Sequence: Synthetic oligonucleotide
  Sense strand starting at position 969 of SEQ ID NO: 1880619
agaugcaucuuuggaagca

SEQ ID NO: 1980985 - RNA, 19 nt, Artificial Sequence
  Description of Artificial Sequence: Synthetic oligonucleotide
  Antisense strand to SEQ ID NO: 1980984
ugcuuccaaagaugcaucu

SEQ ID NO: 1980986 - RNA, 19 nt, Artificial Sequence
  Description of Artificial Sequence: Synthetic oligonucleotide
  Sense strand starting at position 1131 of SEQ ID NO: 1880619
aggaauugccgcugaaucu

SEQ ID NO: 1980987 - RNA, 19 nt, Artificial Sequence
  Description of Artificial Sequence: Synthetic oligonucleotide
  Antisense strand to SEQ ID NO: 1980986
agauucagcggcaauuccu

SEQ ID NO: 1980988 - RNA, 19 nt, Artificial Sequence
  Description of Artificial Sequence: Synthetic oligonucleotide
  Sense strand starting at position 1431 of SEQ ID NO: 1880619
gccucaaugccguuuguga

SEQ ID NO: 1980989 - RNA, 19 nt, Artificial Sequence
  Description of Artificial Sequence: Synthetic oligonucleotide
  Antisense strand to SEQ ID NO: 1980988
ucacaaacggcauugaggc

SEQ ID NO: 1980990 - RNA, 19 nt, Artificial Sequence
  Description of Artificial Sequence: Synthetic oligonucleotide
  Sense strand starting at position 1440 of SEQ ID NO: 1880619
ccguuugugauggcgcaga

SEQ ID NO: 1980991 - RNA, 19 nt, Artificial Sequence
  Description of Artificial Sequence: Synthetic oligonucleotide
  Antisense strand to SEQ ID NO: 1980990
ucugcgccaucacaaacgg

SEQ ID NO: 1980992 - RNA, 19 nt, Artificial Sequence
  Description of Artificial Sequence: Synthetic oligonucleotide
  Sense strand starting at position 1441 of SEQ ID NO: 1880619
cguuugugauggcgcagaa

SEQ ID NO: 1980993 - RNA, 19 nt, Artificial Sequence
  Description of Artificial Sequence: Synthetic oligonucleotide
  Antisense strand to SEQ ID NO: 1980992
uucugcgccaucacaaacg

SEQ ID NO: 1980994 - RNA, 19 nt, Artificial Sequence
  Description of Artificial Sequence: Synthetic oligonucleotide
  Sense strand starting at position 1533 of SEQ ID NO: 1880619
aguguucucccagacugaa

SEQ ID NO: 1980995 - RNA, 19 nt, Artificial Sequence
  Description of Artificial Sequence: Synthetic oligonucleotide
  Antisense strand to SEQ ID NO: 1980994
uucagucugggagaacacu

SEQ ID NO: 1980996 - RNA, 19 nt, Artificial Sequence
  Description of Artificial Sequence: Synthetic oligonucleotide
  Sense strand starting at position 1633 of SEQ ID NO: 1880619
acuguagaggccugagauc

SEQ ID NO: 1980997 - RNA, 19 nt, Artificial Sequence
  Description of Artificial Sequence: Synthetic oligonucleotide
  Antisense strand to SEQ ID NO: 1980996
gaucucaggccucuacagu

SEQ ID NO: 1980998 - RNA, 19 nt, Artificial Sequence
  Description of Artificial Sequence: Synthetic oligonucleotide
  Sense strand starting at position 2202 of SEQ ID NO: 1880619
ggcccaagcccagaaauau

SEQ ID NO: 1980999 - RNA, 19 nt, Artificial Sequence
  Description of Artificial Sequence: Synthetic oligonucleotide
  Antisense strand to SEQ ID NO: 1980998
auauuucugggcuugggcc

SEQ ID NO: 1981000 - RNA, 19 nt, Artificial Sequence
  Description of Artificial Sequence: Synthetic oligonucleotide
  Sense strand starting at position 2235 of SEQ ID NO: 1880619
agggcaagugcuuacauca

SEQ ID NO: 1981001 - RNA, 19 nt, Artificial Sequence
  Description of Artificial Sequence: Synthetic oligonucleotide
  Antisense strand to SEQ ID NO: 1981000
ugauguaagcacuugcccu

SEQ ID NO: 1981002 - RNA, 19 nt, Artificial Sequence
  Description of Artificial Sequence: Synthetic oligonucleotide
  Sense strand starting at position 2430 of SEQ ID NO: 1880619
acaggagggucauagacaa

SEQ ID NO: 1981003 - RNA, 19 nt, Artificial Sequence
  Description of Artificial Sequence: Synthetic oligonucleotide
  Antisense strand to SEQ ID NO: 1981002
uugucuaugacccuccugu

SEQ ID NO: 1981004 - RNA, 19 nt, Artificial Sequence
  Description of Artificial Sequence: Synthetic oligonucleotide
  Sense strand starting at position 2456 of SEQ ID NO: 1880619
guggcagcgagucaucuua

SEQ ID NO: 1981005 - RNA, 19 nt, Artificial Sequence
  Description of Artificial Sequence: Synthetic oligonucleotide
  Antisense strand to SEQ ID NO: 1981004
uaagaugacucgcugccac

SEQ ID NO: 1981006 - RNA, 19 nt, Artificial Sequence
  Description of Artificial Sequence: Synthetic oligonucleotide
  Sense strand starting at position 2458 of SEQ ID NO: 1880619
ggcagcgagucaucuuaga

SEQ ID NO: 1981007 - RNA, 19 nt, Artificial Sequence
  Description of Artificial Sequence: Synthetic oligonucleotide
  Antisense strand to SEQ ID NO: 1981006
ucuaagaugacucgcugcc

SEQ ID NO: 1981008 - RNA, 19 nt, Artificial Sequence
  Description of Artificial Sequence: Synthetic oligonucleotide
  Sense strand starting at position 2463 of SEQ ID NO: 1880619
cgagucaucuuagaauucu

SEQ ID NO: 1981009 - RNA, 19 nt, Artificial Sequence
  Description of Artificial Sequence: Synthetic oligonucleotide
  Antisense strand to SEQ ID NO: 1981008
agaauucuaagaugacucg

SEQ ID NO: 1981010 - RNA, 19 nt, Artificial Sequence
  Description of Artificial Sequence: Synthetic oligonucleotide
  Sense strand starting at position 2570 of SEQ ID NO: 1880619
gccucauccuguuacugga

SEQ ID NO: 1981011 - RNA, 19 nt, Artificial Sequence
  Description of Artificial Sequence: Synthetic oligonucleotide
  Antisense strand to SEQ ID NO: 1981010
uccaguaacaggaugaggc

SEQ ID NO: 1981012 - RNA, 19 nt, Artificial Sequence
  Description of Artificial Sequence: Synthetic oligonucleotide
  Sense strand starting at position 2612 of SEQ ID NO: 1880619
acaggauucuuggaucuug

SEQ ID NO: 1981013 - RNA, 19 nt, Artificial Sequence
  Description of Artificial Sequence: Synthetic oligonucleotide
  Antisense strand to SEQ ID NO: 1981012
caagauccaagaauccugu

SEQ ID NO: 1981014 - RNA, 19 nt, Artificial Sequence
  Description of Artificial Sequence: Synthetic oligonucleotide
  Sense strand starting at position 2617 of SEQ ID NO: 1880619
auucuuggaucuugcagaa

SEQ ID NO: 1981015 - RNA, 19 nt, Artificial Sequence
  Description of Artificial Sequence: Synthetic oligonucleotide
  Antisense strand to SEQ ID NO: 1981014
uucugcaagauccaagaau

SEQ ID NO: 1981016 - RNA, 19 nt, Artificial Sequence
  Description of Artificial Sequence: Synthetic oligonucleotide
  Sense strand starting at position 2884 of SEQ ID NO: 1880619
cgugaacugucauggcacu

SEQ ID NO: 1981017 - RNA, 19 nt, Artificial Sequence
  Description of Artificial Sequence: Synthetic oligonucleotide
  Antisense strand to SEQ ID NO: 1981016
agugccaugacaguucacg

SEQ ID NO: 1981018 - RNA, 19 nt, Artificial Sequence
  Description of Artificial Sequence: Synthetic oligonucleotide
  Sense strand starting at position 2938 of SEQ ID NO: 1880619
acuaguauauaaugagcau

SEQ ID NO: 1981019 - RNA, 19 nt, Artificial Sequence
  Description of Artificial Sequence: Synthetic oligonucleotide
  Antisense strand to SEQ ID NO: 1981018
augcucauuauauacuagu

SEQ ID NO: 1981020 - RNA, 19 nt, Artificial Sequence
  Description of Artificial Sequence: Synthetic oligonucleotide
  Sense strand starting at position 2941 of SEQ ID NO: 1880619
aguauauaaugagcauuga

SEQ ID NO: 1981021 - RNA, 19 nt, Artificial Sequence
  Description of Artificial Sequence: Synthetic oligonucleotide
  Antisense strand to SEQ ID NO: 1981020
ucaaugcucauuauauacu

SEQ ID NO: 1981022 - RNA, 19 nt, Artificial Sequence
  Description of Artificial Sequence: Synthetic oligonucleotide
  Sense strand starting at position 3805 of SEQ ID NO: 1880619
guucgaacgcuucuggcaa

SEQ ID NO: 1981023 - RNA, 19 nt, Artificial Sequence
  Description of Artificial Sequence: Synthetic oligonucleotide
  Antisense strand to SEQ ID NO: 1981022
uugccagaagcguucgaac

SEQ ID NO: 1981024 - RNA, 19 nt, Artificial Sequence
  Description of Artificial Sequence: Synthetic oligonucleotide
  Sense strand starting at position 3806 of SEQ ID NO: 1880619
uucgaacgcuucuggcaau

SEQ ID NO: 1981025 - RNA, 19 nt, Artificial Sequence
  Description of Artificial Sequence: Synthetic oligonucleotide
  Antisense strand to SEQ ID NO: 1981024
auugccagaagcguucgaa

SEQ ID NO: 1981026 - RNA, 19 nt, Artificial Sequence
  Description of Artificial Sequence: Synthetic oligonucleotide
  Sense strand starting at position 3817 of SEQ ID NO: 1880619
cuggcaaucucauuagagu

SEQ ID NO: 1981027 - RNA, 19 nt, Artificial Sequence
  Description of Artificial Sequence: Synthetic oligonucleotide
  Antisense strand to SEQ ID NO: 1981026
acucuaaugagauugccag

SEQ ID NO: 1981028 - RNA, 19 nt, Artificial Sequence
  Description of Artificial Sequence: Synthetic oligonucleotide
  Sense strand starting at position 3818 of SEQ ID NO: 1880619
uggcaaucucauuagaguc

SEQ ID NO: 1981029 - RNA, 19 nt, Artificial Sequence
  Description of Artificial Sequence: Synthetic oligonucleotide
  Antisense strand to SEQ ID NO: 1981028
gacucuaaugagauugcca

SEQ ID NO: 1981030 - RNA, 19 nt, Artificial Sequence
  Description of Artificial Sequence: Synthetic oligonucleotide
  Sense strand starting at position 3951 of SEQ ID NO: 1880619
gcuguaaucugcuaaacac

SEQ ID NO: 1981031 - RNA, 19 nt, Artificial Sequence
  Description of Artificial Sequence: Synthetic oligonucleotide
  Antisense strand to SEQ ID NO: 1981030
guguuuagcagauuacagc

SEQ ID NO: 1981032 - RNA, 19 nt, Artificial Sequence
  Description of Artificial Sequence: Synthetic oligonucleotide
  Sense strand starting at position 175 of SEQ ID NO: 1880620
caucguacuuggcuaauuu

SEQ ID NO: 1981033 - RNA, 19 nt, Artificial Sequence
  Description of Artificial Sequence: Synthetic oligonucleotide
  Antisense strand to SEQ ID NO: 1981032
aaauuagccaaguacgaug

SEQ ID NO: 1981034 - RNA, 19 nt, Artificial Sequence
  Description of Artificial Sequence: Synthetic oligonucleotide
  Sense strand starting at position 312 of SEQ ID NO: 1880620
cgugacaggccuuaacuau

SEQ ID NO: 1981035 - RNA, 19 nt, Artificial Sequence
  Description of Artificial Sequence: Synthetic oligonucleotide
  Antisense strand to SEQ ID NO: 1981034
auaguuaaggccugucacg

SEQ ID NO: 1981036 - RNA, 19 nt, Artificial Sequence
  Description of Artificial Sequence: Synthetic oligonucleotide
  Sense strand starting at position 643 of SEQ ID NO: 1880620
caaaguaaugugcaaugua

SEQ ID NO: 1981037 - RNA, 19 nt, Artificial Sequence
  Description of Artificial Sequence: Synthetic oligonucleotide
  Antisense strand to SEQ ID NO: 1981036
uacauugcacauuacuuug

SEQ ID NO: 1981038 - RNA, 19 nt, Artificial Sequence
  Description of Artificial Sequence: Synthetic oligonucleotide
  Sense strand starting at position 646 of SEQ ID NO: 1880620
aguaaugugcaauguaaug

SEQ ID NO: 1981039 - RNA, 19 nt, Artificial Sequence
  Description of Artificial Sequence: Synthetic oligonucleotide
  Antisense strand to SEQ ID NO: 1981038
cauuacauugcacauuacu

SEQ ID NO: 1981040 - RNA, 19 nt, Artificial Sequence
  Description of Artificial Sequence: Synthetic oligonucleotide
  Sense strand starting at position 652 of SEQ ID NO: 1880620
gugcaauguaaugaggcaa

SEQ ID NO: 1981041 - RNA, 19 nt, Artificial Sequence
  Description of Artificial Sequence: Synthetic oligonucleotide
  Antisense strand to SEQ ID NO: 1981040
uugccucauuacauugcac

SEQ ID NO: 1981042 - RNA, 19 nt, Artificial Sequence
  Description of Artificial Sequence: Synthetic oligonucleotide
  Sense strand starting at position 757 of SEQ ID NO: 1880620
gagccucugcuugggagau

SEQ ID NO: 1981043 - RNA, 19 nt, Artificial Sequence
  Description of Artificial Sequence: Synthetic oligonucleotide
  Antisense strand to SEQ ID NO: 1981042
aucucccaagcagaggcuc

SEQ ID NO: 1981044 - RNA, 19 nt, Artificial Sequence
  Description of Artificial Sequence: Synthetic oligonucleotide
  Sense strand starting at position 780 of SEQ ID NO: 1880620
cacaguuggucaggagacu

SEQ ID NO: 1981045 - RNA, 19 nt, Artificial Sequence
  Description of Artificial Sequence: Synthetic oligonucleotide
  Antisense strand to SEQ ID NO: 1981044
agucuccugaccaacugug

SEQ ID NO: 1981046 - RNA, 19 nt, Artificial Sequence
  Description of Artificial Sequence: Synthetic oligonucleotide
  Sense strand starting at position 870 of SEQ ID NO: 1880620
gcagcaaacugucccagaa

SEQ ID NO: 1981047 - RNA, 19 nt, Artificial Sequence
  Description of Artificial Sequence: Synthetic oligonucleotide
  Antisense strand to SEQ ID NO: 1981046
uucugggacaguuugcugc

SEQ ID NO: 1981048 - RNA, 19 nt, Artificial Sequence
  Description of Artificial Sequence: Synthetic oligonucleotide
  Sense strand starting at position 872 of SEQ ID NO: 1880620
agcaaacugucccagaaca

SEQ ID NO: 1981049 - RNA, 19 nt, Artificial Sequence
  Description of Artificial Sequence: Synthetic oligonucleotide
  Antisense strand to SEQ ID NO: 1981048
uguucugggacaguuugcu

SEQ ID NO: 1981050 - RNA, 19 nt, Artificial Sequence
  Description of Artificial Sequence: Synthetic oligonucleotide
  Sense strand starting at position 968 of SEQ ID NO: 1880620
gaagaugcaucuuuggaag

SEQ ID NO: 1981051 - RNA, 19 nt, Artificial Sequence
  Description of Artificial Sequence: Synthetic oligonucleotide
  Antisense strand to SEQ ID NO: 1981050
cuuccaaagaugcaucuuc

SEQ ID NO: 1981052 - RNA, 19 nt, Artificial Sequence
  Description of Artificial Sequence: Synthetic oligonucleotide
  Sense strand starting at position 970 of SEQ ID NO: 1880620
agaugcaucuuuggaagca

SEQ ID NO: 1981053 - RNA, 19 nt, Artificial Sequence
  Description of Artificial Sequence: Synthetic oligonucleotide
  Antisense strand to SEQ ID NO: 1981052
ugcuuccaaagaugcaucu

SEQ ID NO: 1981054 - RNA, 19 nt, Artificial Sequence
  Description of Artificial Sequence: Synthetic oligonucleotide
  Sense strand starting at position 1093 of SEQ ID NO: 1880620
cccucuggccuccaaagau

SEQ ID NO: 1981055 - RNA, 19 nt, Artificial Sequence
  Description of Artificial Sequence: Synthetic oligonucleotide
  Antisense strand to SEQ ID NO: 1981054
aucuuuggaggccagaggg

SEQ ID NO: 1981056 - RNA, 19 nt, Artificial Sequence
  Description of Artificial Sequence: Synthetic oligonucleotide
  Sense strand starting at position 1132 of SEQ ID NO: 1880620
aggaauugccgcugaaucu

SEQ ID NO: 1981057 - RNA, 19 nt, Artificial Sequence
  Description of Artificial Sequence: Synthetic oligonucleotide
  Antisense strand to SEQ ID NO: 1981056
agauucagcggcaauuccu

SEQ ID NO: 1981058 - RNA, 19 nt, Artificial Sequence
  Description of Artificial Sequence: Synthetic oligonucleotide
  Sense strand starting at position 1432 of SEQ ID NO: 1880620
gccucaaugccguuuguga

SEQ ID NO: 1981059 - RNA, 19 nt, Artificial Sequence
  Description of Artificial Sequence: Synthetic oligonucleotide
  Antisense strand to SEQ ID NO: 1981058
ucacaaacggcauugaggc

SEQ ID NO: 1981060 - RNA, 19 nt, Artificial Sequence
  Description of Artificial Sequence: Synthetic oligonucleotide
  Sense strand starting at position 1441 of SEQ ID NO: 1880620
ccguuugugauggcgcaga

SEQ ID NO: 1981061 - RNA, 19 nt, Artificial Sequence
  Description of Artificial Sequence: Synthetic oligonucleotide
  Antisense strand to SEQ ID NO: 1981060
ucugcgccaucacaaacgg

SEQ ID NO: 1981062 - RNA, 19 nt, Artificial Sequence
  Description of Artificial Sequence: Synthetic oligonucleotide
  Sense strand starting at position 1442 of SEQ ID NO: 1880620
cguuugugauggcgcagaa

SEQ ID NO: 1981063 - RNA, 19 nt, Artificial Sequence
  Description of Artificial Sequence: Synthetic oligonucleotide
  Antisense strand to SEQ ID NO: 1981062
uucugcgccaucacaaacg

SEQ ID NO: 1981064 - RNA, 19 nt, Artificial Sequence
  Description of Artificial Sequence: Synthetic oligonucleotide
  Sense strand starting at position 1529 of SEQ ID NO: 1880620
ggcccaguguucucccaga

SEQ ID NO: 1981065 - RNA, 19 nt, Artificial Sequence
  Description of Artificial Sequence: Synthetic oligonucleotide
  Antisense strand to SEQ ID NO: 1981064
ucugggagaacacugggcc

SEQ ID NO: 1981066 - RNA, 19 nt, Artificial Sequence
  Description of Artificial Sequence: Synthetic oligonucleotide
  Sense strand starting at position 1534 of SEQ ID NO: 1880620
aguguucucccagacugaa

SEQ ID NO: 1981067 - RNA, 19 nt, Artificial Sequence
  Description of Artificial Sequence: Synthetic oligonucleotide
  Antisense strand to SEQ ID NO: 1981066
uucagucugggagaacacu

SEQ ID NO: 1981068 - RNA, 19 nt, Artificial Sequence
  Description of Artificial Sequence: Synthetic oligonucleotide
  Sense strand starting at position 1634 of SEQ ID NO: 1880620
acuguagaggccugagauc

SEQ ID NO: 1981069 - RNA, 19 nt, Artificial Sequence
  Description of Artificial Sequence: Synthetic oligonucleotide
  Antisense strand to SEQ ID NO: 1981068
gaucucaggccucuacagu

SEQ ID NO: 1981070 - RNA, 19 nt, Artificial Sequence
  Description of Artificial Sequence: Synthetic oligonucleotide
  Sense strand starting at position 2203 of SEQ ID NO: 1880620
ggcccaagcccagaaauau

SEQ ID NO: 1981071 - RNA, 19 nt, Artificial Sequence
  Description of Artificial Sequence: Synthetic oligonucleotide
  Antisense strand to SEQ ID NO: 1981070
auauuucugggcuugggcc

SEQ ID NO: 1981072 - RNA, 19 nt, Artificial Sequence
  Description of Artificial Sequence: Synthetic oligonucleotide
  Sense strand starting at position 2236 of SEQ ID NO: 1880620
agggcaagugcuuacauca

SEQ ID NO: 1981073 - RNA, 19 nt, Artificial Sequence
  Description of Artificial Sequence: Synthetic oligonucleotide
  Antisense strand to SEQ ID NO: 1981072
ugauguaagcacuugcccu

SEQ ID NO: 1981074 - RNA, 19 nt, Artificial Sequence
  Description of Artificial Sequence: Synthetic oligonucleotide
  Sense strand starting at position 2249 of SEQ ID NO: 1880620
acaucacgucaucaagcau

SEQ ID NO: 1981075 - RNA, 19 nt, Artificial Sequence
  Description of Artificial Sequence: Synthetic oligonucleotide
  Antisense strand to SEQ ID NO: 1981074
augcuugaugacgugaugu

SEQ ID NO: 1981076 - RNA, 19 nt, Artificial Sequence
  Description of Artificial Sequence: Synthetic oligonucleotide
  Sense strand starting at position 2431 of SEQ ID NO: 1880620
acaggagggucauagacaa

SEQ ID NO: 1981077 - RNA, 19 nt, Artificial Sequence
  Description of Artificial Sequence: Synthetic oligonucleotide
  Antisense strand to SEQ ID NO: 1981076
uugucuaugacccuccugu

SEQ ID NO: 1981078 - RNA, 19 nt, Artificial Sequence
  Description of Artificial Sequence: Synthetic oligonucleotide
  Sense strand starting at position 2457 of SEQ ID NO: 1880620
guggcagcgagucaucuua

SEQ ID NO: 1981079 - RNA, 19 nt, Artificial Sequence
  Description of Artificial Sequence: Synthetic oligonucleotide
  Antisense strand to SEQ ID NO: 1981078
uaagaugacucgcugccac

SEQ ID NO: 1981080 - RNA, 19 nt, Artificial Sequence
  Description of Artificial Sequence: Synthetic oligonucleotide
  Sense strand starting at position 2459 of SEQ ID NO: 1880620
ggcagcgagucaucuuaga

SEQ ID NO: 1981081 - RNA, 19 nt, Artificial Sequence
  Description of Artificial Sequence: Synthetic oligonucleotide
  Antisense strand to SEQ ID NO: 1981080
ucuaagaugacucgcugcc

SEQ ID NO: 1981082 - RNA, 19 nt, Artificial Sequence
  Description of Artificial Sequence: Synthetic oligonucleotide
  Sense strand starting at position 2464 of SEQ ID NO: 1880620
cgagucaucuuagaauucu

SEQ ID NO: 1981083 - RNA, 19 nt, Artificial Sequence
  Description of Artificial Sequence: Synthetic oligonucleotide
  Antisense strand to SEQ ID NO: 1981082
agaauucuaagaugacucg

SEQ ID NO: 1981084 - RNA, 19 nt, Artificial Sequence
  Description of Artificial Sequence: Synthetic oligonucleotide
  Sense strand starting at position 2571 of SEQ ID NO: 1880620
gccucauccuguuacugga

SEQ ID NO: 1981085 - RNA, 19 nt, Artificial Sequence
  Description of Artificial Sequence: Synthetic oligonucleotide
  Antisense strand to SEQ ID NO: 1981084
uccaguaacaggaugaggc

SEQ ID NO: 1981086 - RNA, 19 nt, Artificial Sequence
  Description of Artificial Sequence: Synthetic oligonucleotide
  Sense strand starting at position 2618 of SEQ ID NO: 1880620
auucuuggaucuugcagaa

SEQ ID NO: 1981087 - RNA, 19 nt, Artificial Sequence
  Description of Artificial Sequence: Synthetic oligonucleotide
  Antisense strand to SEQ ID NO: 1981086
uucugcaagauccaagaau

SEQ ID NO: 1981088 - RNA, 19 nt, Artificial Sequence
  Description of Artificial Sequence: Synthetic oligonucleotide
  Sense strand starting at position 2885 of SEQ ID NO: 1880620
cgugaacugucauggcacu

SEQ ID NO: 1981089 - RNA, 19 nt, Artificial Sequence
  Description of Artificial Sequence: Synthetic oligonucleotide
  Antisense strand to SEQ ID NO: 1981088
agugccaugacaguucacg

SEQ ID NO: 1981090 - RNA, 19 nt, Artificial Sequence
  Description of Artificial Sequence: Synthetic oligonucleotide
  Sense strand starting at position 2939 of SEQ ID NO: 1880620
acuaguauauaaugagcau

SEQ ID NO: 1981091 - RNA, 19 nt, Artificial Sequence
  Description of Artificial Sequence: Synthetic oligonucleotide
  Antisense strand to SEQ ID NO: 1981090
augcucauuauauacuagu

SEQ ID NO: 1981092 - RNA, 19 nt, Artificial Sequence
  Description of Artificial Sequence: Synthetic oligonucleotide
  Sense strand starting at position 2942 of SEQ ID NO: 1880620
aguauauaaugagcauuga

SEQ ID NO: 1981093 - RNA, 19 nt, Artificial Sequence
  Description of Artificial Sequence: Synthetic oligonucleotide
  Antisense strand to SEQ ID NO: 1981092
ucaaugcucauuauauacu

SEQ ID NO: 1981094 - RNA, 19 nt, Artificial Sequence
  Description of Artificial Sequence: Synthetic oligonucleotide
  Sense strand starting at position 3473 of SEQ ID NO: 1880620
aucacaaagucaguagauu

SEQ ID NO: 1981095 - RNA, 19 nt, Artificial Sequence
  Description of Artificial Sequence: Synthetic oligonucleotide
  Antisense strand to SEQ ID NO: 1981094
aaucuacugacuuugugau

SEQ ID NO: 1981096 - RNA, 19 nt, Artificial Sequence
  Description of Artificial Sequence: Synthetic oligonucleotide
  Sense strand starting at position 3793 of SEQ ID NO: 1880620
uggaauugcucugguucga

SEQ ID NO: 1981097 - RNA, 19 nt, Artificial Sequence
  Description of Artificial Sequence: Synthetic oligonucleotide
  Antisense strand to SEQ ID NO: 1981096
ucgaaccagagcaauucca

SEQ ID NO: 1981098 - RNA, 19 nt, Artificial Sequence
  Description of Artificial Sequence: Synthetic oligonucleotide
  Sense strand starting at position 3806 of SEQ ID NO: 1880620
guucgaacgcuucuggcaa

SEQ ID NO: 1981099 - RNA, 19 nt, Artificial Sequence
  Description of Artificial Sequence: Synthetic oligonucleotide
  Antisense strand to SEQ ID NO: 1981098
uugccagaagcguucgaac

SEQ ID NO: 1981100 - RNA, 19 nt, Artificial Sequence
  Description of Artificial Sequence: Synthetic oligonucleotide
  Sense strand starting at position 3807 of SEQ ID NO: 1880620
uucgaacgcuucuggcaau

SEQ ID NO: 1981101 - RNA, 19 nt, Artificial Sequence
  Description of Artificial Sequence: Synthetic oligonucleotide
  Antisense strand to SEQ ID NO: 1981100
auugccagaagcguucgaa

SEQ ID NO: 1981102 - RNA, 19 nt, Artificial Sequence
  Description of Artificial Sequence: Synthetic oligonucleotide
  Sense strand starting at position 3818 of SEQ ID NO: 1880620
cuggcaaucucauuagagu

SEQ ID NO: 1981103 - RNA, 19 nt, Artificial Sequence
  Description of Artificial Sequence: Synthetic oligonucleotide
  Antisense strand to SEQ ID NO: 1981102
acucuaaugagauugccag

SEQ ID NO: 1981104 - RNA, 19 nt, Artificial Sequence
  Description of Artificial Sequence: Synthetic oligonucleotide
  Sense strand starting at position 3819 of SEQ ID NO: 1880620
uggcaaucucauuagaguc

SEQ ID NO: 1981105 - RNA, 19 nt, Artificial Sequence
  Description of Artificial Sequence: Synthetic oligonucleotide
  Antisense strand to SEQ ID NO: 1981104
gacucuaaugagauugcca

SEQ ID NO: 1981106 - RNA, 19 nt, Artificial Sequence
  Description of Artificial Sequence: Synthetic oligonucleotide
  Sense strand starting at position 3938 of SEQ ID NO: 1880620
ggaugagguucccagcugu

SEQ ID NO: 1981107 - RNA, 19 nt, Artificial Sequence
  Description of Artificial Sequence: Synthetic oligonucleotide
  Antisense strand to SEQ ID NO: 1981106
acagcugggaaccucaucc

SEQ ID NO: 1981108 - RNA, 19 nt, Artificial Sequence
  Description of Artificial Sequence: Synthetic oligonucleotide
  Sense strand starting at position 3952 of SEQ ID NO: 1880620
gcuguaaucugcuaaacac

SEQ ID NO: 1981109 - RNA, 19 nt, Artificial Sequence
  Description of Artificial Sequence: Synthetic oligonucleotide
  Antisense strand to SEQ ID NO: 1981108
guguuuagcagauuacagc

SEQ ID NO: 1981110 - RNA, 19 nt, Artificial Sequence
  Description of Artificial Sequence: Synthetic oligonucleotide
  Sense strand starting at position 15 of SEQ ID NO: 1880622
agugcuucugcucugucaa

SEQ ID NO: 1981111 - RNA, 19 nt, Artificial Sequence
  Description of Artificial Sequence: Synthetic oligonucleotide
  Antisense strand to SEQ ID NO: 1981110
uugacagagcagaagcacu

SEQ ID NO: 1981112 - RNA, 19 nt, Artificial Sequence
  Description of Artificial Sequence: Synthetic oligonucleotide
  Sense strand starting at position 27 of SEQ ID NO: 1880622
cugucaauaguaggauaug

SEQ ID NO: 1981113 - RNA, 19 nt, Artificial Sequence
  Description of Artificial Sequence: Synthetic oligonucleotide
  Antisense strand to SEQ ID NO: 1981112
cauauccuacuauugacag

SEQ ID NO: 1981114 - RNA, 19 nt, Artificial Sequence
  Description of Artificial Sequence: Synthetic oligonucleotide
  Sense strand starting at position 60 of SEQ ID NO: 1880622
ggcacuuuggcauaaagau

SEQ ID NO: 1981115 - RNA, 19 nt, Artificial Sequence
  Description of Artificial Sequence: Synthetic oligonucleotide
  Antisense strand to SEQ ID NO: 1981114
aucuuuaugccaaagugcc

SEQ ID NO: 1981116 - RNA, 19 nt, Artificial Sequence
  Description of Artificial Sequence: Synthetic oligonucleotide
  Sense strand starting at position 244 of SEQ ID NO: 1880622
gcuguaucugcacaaacuu

SEQ ID NO: 1981117 - RNA, 19 nt, Artificial Sequence
  Description of Artificial Sequence: Synthetic oligonucleotide
  Antisense strand to SEQ ID NO: 1981116
aaguuugugcagauacagc

SEQ ID NO: 1981118 - RNA, 19 nt, Artificial Sequence
  Description of Artificial Sequence: Synthetic oligonucleotide
  Sense strand starting at position 499 of SEQ ID NO: 1880622
ugcuuuccuccuguuaugu

SEQ ID NO: 1981119 - RNA, 19 nt, Artificial Sequence
  Description of Artificial Sequence: Synthetic oligonucleotide
  Antisense strand to SEQ ID NO: 1981118
acauaacaggaggaaagca

SEQ ID NO: 1981120 - RNA, 19 nt, Artificial Sequence
  Description of Artificial Sequence: Synthetic oligonucleotide
  Sense strand starting at position 500 of SEQ ID NO: 1880622
gcuuuccuccuguuauguu

SEQ ID NO: 1981121 - RNA, 19 nt, Artificial Sequence
  Description of Artificial Sequence: Synthetic oligonucleotide
  Antisense strand to SEQ ID NO: 1981120
aacauaacaggaggaaagc

SEQ ID NO: 1981122 - RNA, 19 nt, Artificial Sequence
  Description of Artificial Sequence: Synthetic oligonucleotide
  Sense strand starting at position 674 of SEQ ID NO: 1880622
ccaaucugacacuggcaua

SEQ ID NO: 1981123 - RNA, 19 nt, Artificial Sequence
  Description of Artificial Sequence: Synthetic oligonucleotide
  Antisense strand to SEQ ID NO: 1981122
uaugccagugucagauugg

SEQ ID NO: 1981124 - RNA, 19 nt, Artificial Sequence
  Description of Artificial Sequence: Synthetic oligonucleotide
  Sense strand starting at position 1356 of SEQ ID NO: 1880622
ucccuacaccaguguuaag

SEQ ID NO: 1981125 - RNA, 19 nt, Artificial Sequence
  Description of Artificial Sequence: Synthetic oligonucleotide
  Antisense strand to SEQ ID NO: 1981124
cuuaacacugguguaggga

SEQ ID NO: 1981126 - RNA, 19 nt, Artificial Sequence
  Description of Artificial Sequence: Synthetic oligonucleotide
  Sense strand starting at position 1421 of SEQ ID NO: 1880622
augguaacaucucuagaau

SEQ ID NO: 1981127 - RNA, 19 nt, Artificial Sequence
  Description of Artificial Sequence: Synthetic oligonucleotide
  Antisense strand to SEQ ID NO: 1981126
auucuagagauguuaccau

SEQ ID NO: 1981128 - RNA, 19 nt, Artificial Sequence
  Description of Artificial Sequence: Synthetic oligonucleotide
  Sense strand starting at position 1456 of SEQ ID NO: 1880622
gggaguacauaagucaugu

SEQ ID NO: 1981129 - RNA, 19 nt, Artificial Sequence
  Description of Artificial Sequence: Synthetic oligonucleotide
  Antisense strand to SEQ ID NO: 1981128
acaugacuuauguacuccc

SEQ ID NO: 1981130 - RNA, 19 nt, Artificial Sequence
  Description of Artificial Sequence: Synthetic oligonucleotide
  Sense strand starting at position 1479 of SEQ ID NO: 1880622
accuuuagguguuugugaa

SEQ ID NO: 1981131 - RNA, 19 nt, Artificial Sequence
  Description of Artificial Sequence: Synthetic oligonucleotide
  Antisense strand to SEQ ID NO: 1981130
uucacaaacaccuaaaggu

SEQ ID NO: 1981132 - RNA, 19 nt, Artificial Sequence
  Description of Artificial Sequence: Synthetic oligonucleotide
  Sense strand starting at position 1549 of SEQ ID NO: 1880622
ugacaagcacuguaccauu

SEQ ID NO: 1981133 - RNA, 19 nt, Artificial Sequence
  Description of Artificial Sequence: Synthetic oligonucleotide
  Antisense strand to SEQ ID NO: 1981132
aaugguacagugcuuguca

SEQ ID NO: 1981134 - RNA, 19 nt, Artificial Sequence
  Description of Artificial Sequence: Synthetic oligonucleotide
  Sense strand starting at position 1610 of SEQ ID NO: 1880622
gugguuggguguucagaag

SEQ ID NO: 1981135 - RNA, 19 nt, Artificial Sequence
  Description of Artificial Sequence: Synthetic oligonucleotide
  Antisense strand to SEQ ID NO: 1981134
cuucugaacacccaaccac

SEQ ID NO: 1981136 - RNA, 19 nt, Artificial Sequence
  Description of Artificial Sequence: Synthetic oligonucleotide
  Sense strand starting at position 1694 of SEQ ID NO: 1880622
cggaauucucauggaagac

SEQ ID NO: 1981137 - RNA, 19 nt, Artificial Sequence
  Description of Artificial Sequence: Synthetic oligonucleotide
  Antisense strand to SEQ ID NO: 1981136
gucuuccaugagaauuccg

SEQ ID NO: 1981138 - RNA, 19 nt, Artificial Sequence
  Description of Artificial Sequence: Synthetic oligonucleotide
  Sense strand starting at position 1719 of SEQ ID NO: 1880622
ugaucaaccgagggcuuaa

SEQ ID NO: 1981139 - RNA, 19 nt, Artificial Sequence
  Description of Artificial Sequence: Synthetic oligonucleotide
  Antisense strand to SEQ ID NO: 1981138
uuaagcccucgguugauca

SEQ ID NO: 1981140 - RNA, 19 nt, Artificial Sequence
  Description of Artificial Sequence: Synthetic oligonucleotide
  Sense strand starting at position 1800 of SEQ ID NO: 1880622
agccucacagcauagaaau

SEQ ID NO: 1981141 - RNA, 19 nt, Artificial Sequence
  Description of Artificial Sequence: Synthetic oligonucleotide
  Antisense strand to SEQ ID NO: 1981140
auuucuaugcugugaggcu

SEQ ID NO: 1981142 - RNA, 19 nt, Artificial Sequence
  Description of Artificial Sequence: Synthetic oligonucleotide
  Sense strand starting at position 1912 of SEQ ID NO: 1880622
aaagccgaagugugaauua

SEQ ID NO: 1981143 - RNA, 19 nt, Artificial Sequence
  Description of Artificial Sequence: Synthetic oligonucleotide
  Antisense strand to SEQ ID NO: 1981142
uaauucacacuucggcuuu

SEQ ID NO: 1981144 - RNA, 19 nt, Artificial Sequence
  Description of Artificial Sequence: Synthetic oligonucleotide
  Sense strand starting at position 1917 of SEQ ID NO: 1880622
cgaagugugaauuaaacuu

SEQ ID NO: 1981145 - RNA, 19 nt, Artificial Sequence
  Description of Artificial Sequence: Synthetic oligonucleotide
  Antisense strand to SEQ ID NO: 1981144
aaguuuaauucacacuucg

SEQ ID NO: 1981146 - RNA, 19 nt, Artificial Sequence
  Description of Artificial Sequence: Synthetic oligonucleotide
  Sense strand starting at position 2262 of SEQ ID NO: 1880622
gggugaguguugacgucuu

SEQ ID NO: 1981147 - RNA, 19 nt, Artificial Sequence
  Description of Artificial Sequence: Synthetic oligonucleotide
  Antisense strand to SEQ ID NO: 1981146
aagacgucaacacucaccc

SEQ ID NO: 1981148 - RNA, 19 nt, Artificial Sequence
  Description of Artificial Sequence: Synthetic oligonucleotide
  Sense strand starting at position 2996 of SEQ ID NO: 1880622
agggcauucucgagggaag

SEQ ID NO: 1981149 - RNA, 19 nt, Artificial Sequence
  Description of Artificial Sequence: Synthetic oligonucleotide
  Antisense strand to SEQ ID NO: 1981148
cuucccucgagaaugcccu

SEQ ID NO: 1981150 - RNA, 19 nt, Artificial Sequence
  Description of Artificial Sequence: Synthetic oligonucleotide
  Sense strand starting at position 2997 of SEQ ID NO: 1880622
gggcauucucgagggaaga

SEQ ID NO: 1981151 - RNA, 19 nt, Artificial Sequence
  Description of Artificial Sequence: Synthetic oligonucleotide
  Antisense strand to SEQ ID NO: 1981150
ucuucccucgagaaugccc

SEQ ID NO: 1981152 - RNA, 19 nt, Artificial Sequence
  Description of Artificial Sequence: Synthetic oligonucleotide
  Sense strand starting at position 2998 of SEQ ID NO: 1880622
ggcauucucgagggaagag

SEQ ID NO: 1981153 - RNA, 19 nt, Artificial Sequence
  Description of Artificial Sequence: Synthetic oligonucleotide
  Antisense strand to SEQ ID NO: 1981152
cucuucccucgagaaugcc

SEQ ID NO: 1981154 - RNA, 19 nt, Artificial Sequence
  Description of Artificial Sequence: Synthetic oligonucleotide
  Sense strand starting at position 3084 of SEQ ID NO: 1880622
ggcccuucugcccaaauau

SEQ ID NO: 1981155 - RNA, 19 nt, Artificial Sequence
  Description of Artificial Sequence: Synthetic oligonucleotide
  Antisense strand to SEQ ID NO: 1981154
auauuugggcagaagggcc

SEQ ID NO: 1981156 - RNA, 19 nt, Artificial Sequence
  Description of Artificial Sequence: Synthetic oligonucleotide
  Sense strand starting at position 3122 of SEQ ID NO: 1880622
ccucucauccaccgagaga

SEQ ID NO: 1981157 - RNA, 19 nt, Artificial Sequence
  Description of Artificial Sequence: Synthetic oligonucleotide
  Antisense strand to SEQ ID NO: 1981156
ucucucgguggaugagagg

SEQ ID NO: 1981158 - RNA, 19 nt, Artificial Sequence
  Description of Artificial Sequence: Synthetic oligonucleotide
  Sense strand starting at position 3192 of SEQ ID NO: 1880622
gccucaauuccguuggcua

SEQ ID NO: 1981159 - RNA, 19 nt, Artificial Sequence
  Description of Artificial Sequence: Synthetic oligonucleotide
  Antisense strand to SEQ ID NO: 1981158
uagccaacggaauugaggc

SEQ ID NO: 1981160 - RNA, 19 nt, Artificial Sequence
  Description of Artificial Sequence: Synthetic oligonucleotide
  Sense strand starting at position 3248 of SEQ ID NO: 1880622
acgauuuaguuauacuuag

SEQ ID NO: 1981161 - RNA, 19 nt, Artificial Sequence
  Description of Artificial Sequence: Synthetic oligonucleotide
  Antisense strand to SEQ ID NO: 1981160
cuaaguauaacuaaaucgu

SEQ ID NO: 1981162 - RNA, 19 nt, Artificial Sequence
  Description of Artificial Sequence: Synthetic oligonucleotide
  Sense strand starting at position 3355 of SEQ ID NO: 1880622
aaaggaaauuguguucucu

SEQ ID NO: 1981163 - RNA, 19 nt, Artificial Sequence
  Description of Artificial Sequence: Synthetic oligonucleotide
  Antisense strand to SEQ ID NO: 1981162
agagaacacaauuuccuuu

SEQ ID NO: 1981164 - RNA, 19 nt, Artificial Sequence
  Description of Artificial Sequence: Synthetic oligonucleotide
  Sense strand starting at position 3373 of SEQ ID NO: 1880622
ucccuuccugucugauaga

SEQ ID NO: 1981165 - RNA, 19 nt, Artificial Sequence
  Description of Artificial Sequence: Synthetic oligonucleotide
  Antisense strand to SEQ ID NO: 1981164
ucuaucagacaggaaggga

SEQ ID NO: 1981166 - RNA, 19 nt, Artificial Sequence
  Description of Artificial Sequence: Synthetic oligonucleotide
  Sense strand starting at position 3591 of SEQ ID NO: 1880622
ccacgcaguagguaauaaa

SEQ ID NO: 1981167 - RNA, 19 nt, Artificial Sequence
  Description of Artificial Sequence: Synthetic oligonucleotide
  Antisense strand to SEQ ID NO: 1981166
uuuauuaccuacugcgugg

SEQ ID NO: 1981168 - RNA, 19 nt, Artificial Sequence
  Description of Artificial Sequence: Synthetic oligonucleotide
  Sense strand starting at position 3688 of SEQ ID NO: 1880622
cagucaguuugacucaagu

SEQ ID NO: 1981169 - RNA, 19 nt, Artificial Sequence
  Description of Artificial Sequence: Synthetic oligonucleotide
  Antisense strand to SEQ ID NO: 1981168
acuugagucaaacugacug

SEQ ID NO: 1981170 - RNA, 19 nt, Artificial Sequence
  Description of Artificial Sequence: Synthetic oligonucleotide
  Sense strand starting at position 3690 of SEQ ID NO: 1880622
gucaguuugacucaaguug

SEQ ID NO: 1981171 - RNA, 19 nt, Artificial Sequence
  Description of Artificial Sequence: Synthetic oligonucleotide
  Antisense strand to SEQ ID NO: 1981170
caacuugagucaaacugac

SEQ ID NO: 1981172 - RNA, 19 nt, Artificial Sequence
  Description of Artificial Sequence: Synthetic oligonucleotide
  Sense strand starting at position 3712 of SEQ ID NO: 1880622
cggugacuuccgaggcuuu

SEQ ID NO: 1981173 - RNA, 19 nt, Artificial Sequence
  Description of Artificial Sequence: Synthetic oligonucleotide
  Antisense strand to SEQ ID NO: 1981172
aaagccucggaagucaccg

SEQ ID NO: 1981174 - RNA, 19 nt, Artificial Sequence
  Description of Artificial Sequence: Synthetic oligonucleotide
  Sense strand starting at position 3733 of SEQ ID NO: 1880622
ggguuccaguguucuaaua

SEQ ID NO: 1981175 - RNA, 19 nt, Artificial Sequence
  Description of Artificial Sequence: Synthetic oligonucleotide
  Antisense strand to SEQ ID NO: 1981174
uauuagaacacuggaaccc

SEQ ID NO: 1981176 - RNA, 19 nt, Artificial Sequence
  Description of Artificial Sequence: Synthetic oligonucleotide
  Sense strand starting at position 3759 of SEQ ID NO: 1880622
ugagaaaguugggcuggaa

SEQ ID NO: 1981177 - RNA, 19 nt, Artificial Sequence
  Description of Artificial Sequence: Synthetic oligonucleotide
  Antisense strand to SEQ ID NO: 1981176
uuccagcccaacuuucuca

SEQ ID NO: 1981178 - RNA, 19 nt, Artificial Sequence
  Description of Artificial Sequence: Synthetic oligonucleotide
  Sense strand starting at position 3762 of SEQ ID NO: 1880622
gaaaguugggcuggaauca

SEQ ID NO: 1981179 - RNA, 19 nt, Artificial Sequence
  Description of Artificial Sequence: Synthetic oligonucleotide
  Antisense strand to SEQ ID NO: 1981178
ugauuccagcccaacuuuc

SEQ ID NO: 1981180 - RNA, 19 nt, Artificial Sequence
  Description of Artificial Sequence: Synthetic oligonucleotide
  Sense strand starting at position 3773 of SEQ ID NO: 1880622
uggaaucauugugucccaa

SEQ ID NO: 1981181 - RNA, 19 nt, Artificial Sequence
  Description of Artificial Sequence: Synthetic oligonucleotide
  Antisense strand to SEQ ID NO: 1981180
uugggacacaaugauucca

SEQ ID NO: 1981182 - RNA, 19 nt, Artificial Sequence
  Description of Artificial Sequence: Synthetic oligonucleotide
  Sense strand starting at position 3892 of SEQ ID NO: 1880622
auguacagccaugguuuaa

SEQ ID NO: 1981183 - RNA, 19 nt, Artificial Sequence
  Description of Artificial Sequence: Synthetic oligonucleotide
  Antisense strand to SEQ ID NO: 1981182
uuaaaccauggcuguacau

SEQ ID NO: 1981184 - RNA, 19 nt, Artificial Sequence
  Description of Artificial Sequence: Synthetic oligonucleotide
  Sense strand starting at position 3896 of SEQ ID NO: 1880622
acagccaugguuuaaggua

SEQ ID NO: 1981185 - RNA, 19 nt, Artificial Sequence
  Description of Artificial Sequence: Synthetic oligonucleotide
  Antisense strand to SEQ ID NO: 1981184
uaccuuaaaccauggcugu

SEQ ID NO: 1981186 - RNA, 19 nt, Artificial Sequence
  Description of Artificial Sequence: Synthetic oligonucleotide
  Sense strand starting at position 3901 of SEQ ID NO: 1880622
caugguuuaagguagugau

SEQ ID NO: 1981187 - RNA, 19 nt, Artificial Sequence
  Description of Artificial Sequence: Synthetic oligonucleotide
  Antisense strand to SEQ ID NO: 1981186
aucacuaccuuaaaccaug

SEQ ID NO: 1981188 - RNA, 19 nt, Artificial Sequence
  Description of Artificial Sequence: Synthetic oligonucleotide
  Sense strand starting at position 3905 of SEQ ID NO: 1880622
guuuaagguagugauacaa

SEQ ID NO: 1981189 - RNA, 19 nt, Artificial Sequence
  Description of Artificial Sequence: Synthetic oligonucleotide
  Antisense strand to SEQ ID NO: 1981188
uuguaucacuaccuuaaac

SEQ ID NO: 1981190 - RNA, 19 nt, Artificial Sequence
  Description of Artificial Sequence: Synthetic oligonucleotide
  Sense strand starting at position 344 of SEQ ID NO: 1880623
uagagcuuacuauaggcua

SEQ ID NO: 1981191 - RNA, 19 nt, Artificial Sequence
  Description of Artificial Sequence: Synthetic oligonucleotide
  Antisense strand to SEQ ID NO: 1981190
uagccuauaguaagcucua

SEQ ID NO: 1981192 - RNA, 19 nt, Artificial Sequence
  Description of Artificial Sequence: Synthetic oligonucleotide
  Sense strand starting at position 358 of SEQ ID NO: 1880623
ggcuaugcauuacucuaaa

SEQ ID NO: 1981193 - RNA, 19 nt, Artificial Sequence
  Description of Artificial Sequence: Synthetic oligonucleotide
  Antisense strand to SEQ ID NO: 1981192
uuuagaguaaugcauagcc

SEQ ID NO: 1981194 - RNA, 19 nt, Artificial Sequence
  Description of Artificial Sequence: Synthetic oligonucleotide
  Sense strand starting at position 410 of SEQ ID NO: 1880623
gcuguccuccaagauagaa

SEQ ID NO: 1981195 - RNA, 19 nt, Artificial Sequence
  Description of Artificial Sequence: Synthetic oligonucleotide
  Antisense strand to SEQ ID NO: 1981194
uucuaucuuggaggacagc

SEQ ID NO: 1981196 - RNA, 19 nt, Artificial Sequence
  Description of Artificial Sequence: Synthetic oligonucleotide
  Sense strand starting at position 523 of SEQ ID NO: 1880623
gucucacuccgggauccau

SEQ ID NO: 1981197 - RNA, 19 nt, Artificial Sequence
  Description of Artificial Sequence: Synthetic oligonucleotide
  Antisense strand to SEQ ID NO: 1981196
auggaucccggagugagac

SEQ ID NO: 1981198 - RNA, 19 nt, Artificial Sequence
  Description of Artificial Sequence: Synthetic oligonucleotide
  Sense strand starting at position 847 of SEQ ID NO: 1880623
gauuuacuguaaggacuua

SEQ ID NO: 1981199 - RNA, 19 nt, Artificial Sequence
  Description of Artificial Sequence: Synthetic oligonucleotide
  Antisense strand to SEQ ID NO: 1981198
uaaguccuuacaguaaauc

SEQ ID NO: 1981200 - RNA, 19 nt, Artificial Sequence
  Description of Artificial Sequence: Synthetic oligonucleotide
  Sense strand starting at position 2072 of SEQ ID NO: 1880623
cgcggauucgcguggcagu

SEQ ID NO: 1981201 - RNA, 19 nt, Artificial Sequence
  Description of Artificial Sequence: Synthetic oligonucleotide
  Antisense strand to SEQ ID NO: 1981200
acugccacgcgaauccgcg

SEQ ID NO: 1981202 - RNA, 19 nt, Artificial Sequence
  Description of Artificial Sequence: Synthetic oligonucleotide
  Sense strand starting at position 2591 of SEQ ID NO: 1880623
uucgaaucuugucgagucu

SEQ ID NO: 1981203 - RNA, 19 nt, Artificial Sequence
  Description of Artificial Sequence: Synthetic oligonucleotide
  Antisense strand to SEQ ID NO: 1981202
agacucgacaagauucgaa

SEQ ID NO: 1981204 - RNA, 19 nt, Artificial Sequence
  Description of Artificial Sequence: Synthetic oligonucleotide
  Sense strand starting at position 2592 of SEQ ID NO: 1880623
ucgaaucuugucgagucuu

SEQ ID NO: 1981205 - RNA, 19 nt, Artificial Sequence
  Description of Artificial Sequence: Synthetic oligonucleotide
  Antisense strand to SEQ ID NO: 1981204
aagacucgacaagauucga

SEQ ID NO: 1981206 - RNA, 19 nt, Artificial Sequence
  Description of Artificial Sequence: Synthetic oligonucleotide
  Sense strand starting at position 2598 of SEQ ID NO: 1880623
cuugucgagucuuucuaga

SEQ ID NO: 1981207 - RNA, 19 nt, Artificial Sequence
  Description of Artificial Sequence: Synthetic oligonucleotide
  Antisense strand to SEQ ID NO: 1981206
ucuagaaagacucgacaag

SEQ ID NO: 1981208 - RNA, 19 nt, Artificial Sequence
  Description of Artificial Sequence: Synthetic oligonucleotide
  Sense strand starting at position 2600 of SEQ ID NO: 1880623
ugucgagucuuucuagaag

SEQ ID NO: 1981209 - RNA, 19 nt, Artificial Sequence
  Description of Artificial Sequence: Synthetic oligonucleotide
  Antisense strand to SEQ ID NO: 1981208
cuucuagaaagacucgaca

SEQ ID NO: 1981210 - RNA, 19 nt, Artificial Sequence
  Description of Artificial Sequence: Synthetic oligonucleotide
  Sense strand starting at position 2603 of SEQ ID NO: 1880623
cgagucuuucuagaagguu

SEQ ID NO: 1981211 - RNA, 19 nt, Artificial Sequence
  Description of Artificial Sequence: Synthetic oligonucleotide
  Antisense strand to SEQ ID NO: 1981210
aaccuucuagaaagacucg

SEQ ID NO: 1981212 - RNA, 19 nt, Artificial Sequence
  Description of Artificial Sequence: Synthetic oligonucleotide
  Sense strand starting at position 2743 of SEQ ID NO: 1880623
gccucaguuuccuccuaga

SEQ ID NO: 1981213 - RNA, 19 nt, Artificial Sequence
  Description of Artificial Sequence: Synthetic oligonucleotide
  Antisense strand to SEQ ID NO: 1981212
ucuaggaggaaacugaggc

SEQ ID NO: 1981214 - RNA, 19 nt, Artificial Sequence
  Description of Artificial Sequence: Synthetic oligonucleotide
  Sense strand starting at position 2789 of SEQ ID NO: 1880623
ggauuucuguaagaacaga

SEQ ID NO: 1981215 - RNA, 19 nt, Artificial Sequence
  Description of Artificial Sequence: Synthetic oligonucleotide
  Antisense strand to SEQ ID NO: 1981214
ucuguucuuacagaaaucc

SEQ ID NO: 1981216 - RNA, 19 nt, Artificial Sequence
  Description of Artificial Sequence: Synthetic oligonucleotide
  Sense strand starting at position 2962 of SEQ ID NO: 1880623
agaaguuauuucugaugug

SEQ ID NO: 1981217 - RNA, 19 nt, Artificial Sequence
  Description of Artificial Sequence: Synthetic oligonucleotide
  Antisense strand to SEQ ID NO: 1981216
cacaucagaaauaacuucu

SEQ ID NO: 1981218 - RNA, 19 nt, Artificial Sequence
  Description of Artificial Sequence: Synthetic oligonucleotide
  Sense strand starting at position 2965 of SEQ ID NO: 1880623
aguuauuucugaugugcuu

SEQ ID NO: 1981219 - RNA, 19 nt, Artificial Sequence
  Description of Artificial Sequence: Synthetic oligonucleotide
  Antisense strand to SEQ ID NO: 1981218
aagcacaucagaaauaacu

SEQ ID NO: 1981220 - RNA, 19 nt, Artificial Sequence
  Description of Artificial Sequence: Synthetic oligonucleotide
  Sense strand starting at position 2971 of SEQ ID NO: 1880623
uucugaugugcuuauugua

SEQ ID NO: 1981221 - RNA, 19 nt, Artificial Sequence
  Description of Artificial Sequence: Synthetic oligonucleotide
  Antisense strand to SEQ ID NO: 1981220
uacaauaagcacaucagaa

SEQ ID NO: 1981222 - RNA, 19 nt, Artificial Sequence
  Description of Artificial Sequence: Synthetic oligonucleotide
  Sense strand starting at position 2974 of SEQ ID NO: 1880623
ugaugugcuuauuguaaua

SEQ ID NO: 1981223 - RNA, 19 nt, Artificial Sequence
  Description of Artificial Sequence: Synthetic oligonucleotide
  Antisense strand to SEQ ID NO: 1981222
uauuacaauaagcacauca

SEQ ID NO: 1981224 - RNA, 19 nt, Artificial Sequence
  Description of Artificial Sequence: Synthetic oligonucleotide
  Sense strand starting at position 2976 of SEQ ID NO: 1880623
augugcuuauuguaauagu

SEQ ID NO: 1981225 - RNA, 19 nt, Artificial Sequence
  Description of Artificial Sequence: Synthetic oligonucleotide
  Antisense strand to SEQ ID NO: 1981224
acuauuacaauaagcacau

SEQ ID NO: 1981226 - RNA, 19 nt, Artificial Sequence
  Description of Artificial Sequence: Synthetic oligonucleotide
  Sense strand starting at position 2985 of SEQ ID NO: 1880623
uuguaauaguguuucuuga

SEQ ID NO: 1981227 - RNA, 19 nt, Artificial Sequence
  Description of Artificial Sequence: Synthetic oligonucleotide
  Antisense strand to SEQ ID NO: 1981226
ucaagaaacacuauuacaa

SEQ ID NO: 1981228 - RNA, 19 nt, Artificial Sequence
  Description of Artificial Sequence: Synthetic oligonucleotide
  Sense strand starting at position 3154 of SEQ ID NO: 1880623
ugcggauuauuccauuaua

SEQ ID NO: 1981229 - RNA, 19 nt, Artificial Sequence
  Description of Artificial Sequence: Synthetic oligonucleotide
  Antisense strand to SEQ ID NO: 1981228
uauaauggaauaauccgca

SEQ ID NO: 1981230 - RNA, 19 nt, Artificial Sequence
  Description of Artificial Sequence: Synthetic oligonucleotide
  Sense strand starting at position 3199 of SEQ ID NO: 1880623
uucuaugaugucuaugaug

SEQ ID NO: 1981231 - RNA, 19 nt, Artificial Sequence
  Description of Artificial Sequence: Synthetic oligonucleotide
  Antisense strand to SEQ ID NO: 1981230
caucauagacaucauagaa

SEQ ID NO: 1981232 - RNA, 19 nt, Artificial Sequence
  Description of Artificial Sequence: Synthetic oligonucleotide
  Sense strand starting at position 3206 of SEQ ID NO: 1880623
augucuaugaugggcuuua

SEQ ID NO: 1981233 - RNA, 19 nt, Artificial Sequence
  Description of Artificial Sequence: Synthetic oligonucleotide
  Antisense strand to SEQ ID NO: 1981232
uaaagcccaucauagacau

SEQ ID NO: 1981234 - RNA, 19 nt, Artificial Sequence
  Description of Artificial Sequence: Synthetic oligonucleotide
  Sense strand starting at position 3218 of SEQ ID NO: 1880623
ggcuuuagauuguuugcaa

SEQ ID NO: 1981235 - RNA, 19 nt, Artificial Sequence
  Description of Artificial Sequence: Synthetic oligonucleotide
  Antisense strand to SEQ ID NO: 1981234
uugcaaacaaucuaaagcc

SEQ ID NO: 1981236 - RNA, 19 nt, Artificial Sequence
  Description of Artificial Sequence: Synthetic oligonucleotide
  Sense strand starting at position 3219 of SEQ ID NO: 1880623
gcuuuagauuguuugcaau

SEQ ID NO: 1981237 - RNA, 19 nt, Artificial Sequence
  Description of Artificial Sequence: Synthetic oligonucleotide
  Antisense strand to SEQ ID NO: 1981236
auugcaaacaaucuaaagc

SEQ ID NO: 1981238 - RNA, 19 nt, Artificial Sequence
  Description of Artificial Sequence: Synthetic oligonucleotide
  Sense strand starting at position 3221 of SEQ ID NO: 1880623
uuuagauuguuugcaauag

SEQ ID NO: 1981239 - RNA, 19 nt, Artificial Sequence
  Description of Artificial Sequence: Synthetic oligonucleotide
  Antisense strand to SEQ ID NO: 1981238
cuauugcaaacaaucuaaa

SEQ ID NO: 1981240 - RNA, 19 nt, Artificial Sequence
  Description of Artificial Sequence: Synthetic oligonucleotide
  Sense strand starting at position 3222 of SEQ ID NO: 1880623
uuagauuguuugcaauagu

SEQ ID NO: 1981241 - RNA, 19 nt, Artificial Sequence
  Description of Artificial Sequence: Synthetic oligonucleotide
  Antisense strand to SEQ ID NO: 1981240
acuauugcaaacaaucuaa

SEQ ID NO: 1981242 - RNA, 19 nt, Artificial Sequence
  Description of Artificial Sequence: Synthetic oligonucleotide
  Sense strand starting at position 3225 of SEQ ID NO: 1880623
gauuguuugcaauaguuug

SEQ ID NO: 1981243 - RNA, 19 nt, Artificial Sequence
  Description of Artificial Sequence: Synthetic oligonucleotide
  Antisense strand to SEQ ID NO: 1981242
caaacuauugcaaacaauc

SEQ ID NO: 1981244 - RNA, 19 nt, Artificial Sequence
  Description of Artificial Sequence: Synthetic oligonucleotide
  Sense strand starting at position 3233 of SEQ ID NO: 1880623
gcaauaguuugccauuaca

SEQ ID NO: 1981245 - RNA, 19 nt, Artificial Sequence
  Description of Artificial Sequence: Synthetic oligonucleotide
  Antisense strand to SEQ ID NO: 1981244
uguaauggcaaacuauugc

SEQ ID NO: 1981246 - RNA, 19 nt, Artificial Sequence
  Description of Artificial Sequence: Synthetic oligonucleotide
  Sense strand starting at position 3249 of SEQ ID NO: 1880623
acaaauaaugcccaguagu

SEQ ID NO: 1981247 - RNA, 19 nt, Artificial Sequence
  Description of Artificial Sequence: Synthetic oligonucleotide
  Antisense strand to SEQ ID NO: 1981246
acuacugggcauuauuugu

SEQ ID NO: 1981248 - RNA, 19 nt, Artificial Sequence
  Description of Artificial Sequence: Synthetic oligonucleotide
  Sense strand starting at position 3265 of SEQ ID NO: 1880623
agugcugugguuugauuua

SEQ ID NO: 1981249 - RNA, 19 nt, Artificial Sequence
  Description of Artificial Sequence: Synthetic oligonucleotide
  Antisense strand to SEQ ID NO: 1981248
uaaaucaaaccacagcacu

SEQ ID NO: 1981250 - RNA, 19 nt, Artificial Sequence
  Description of Artificial Sequence: Synthetic oligonucleotide
  Sense strand starting at position 3319 of SEQ ID NO: 1880623
auuggauuguuguguaaac

SEQ ID NO: 1981251 - RNA, 19 nt, Artificial Sequence
  Description of Artificial Sequence: Synthetic oligonucleotide
  Antisense strand to SEQ ID NO: 1981250
guuuacacaacaauccaau

SEQ ID NO: 1981252 - RNA, 19 nt, Artificial Sequence
  Description of Artificial Sequence: Synthetic oligonucleotide
  Sense strand starting at position 3321 of SEQ ID NO: 1880623
uggauuguuguguaaacca

SEQ ID NO: 1981253 - RNA, 19 nt, Artificial Sequence
  Description of Artificial Sequence: Synthetic oligonucleotide
  Antisense strand to SEQ ID NO: 1981252
ugguuuacacaacaaucca

SEQ ID NO: 1981254 - RNA, 19 nt, Artificial Sequence
  Description of Artificial Sequence: Synthetic oligonucleotide
  Sense strand starting at position 3596 of SEQ ID NO: 1880623
gguuauacaucugucucau

SEQ ID NO: 1981255 - RNA, 19 nt, Artificial Sequence
  Description of Artificial Sequence: Synthetic oligonucleotide
  Antisense strand to SEQ ID NO: 1981254
augagacagauguauaacc

SEQ ID NO: 1981256 - RNA, 19 nt, Artificial Sequence
  Description of Artificial Sequence: Synthetic oligonucleotide
  Sense strand starting at position 3712 of SEQ ID NO: 1880623
guguguugccaauauuaac

SEQ ID NO: 1981257 - RNA, 19 nt, Artificial Sequence
  Description of Artificial Sequence: Synthetic oligonucleotide
  Antisense strand to SEQ ID NO: 1981256
guuaauauuggcaacacac

SEQ ID NO: 1981258 - RNA, 19 nt, Artificial Sequence
  Description of Artificial Sequence: Synthetic oligonucleotide
  Sense strand starting at position 3789 of SEQ ID NO: 1880623
ugucaagauuaacugcaua

SEQ ID NO: 1981259 - RNA, 19 nt, Artificial Sequence
  Description of Artificial Sequence: Synthetic oligonucleotide
  Antisense strand to SEQ ID NO: 1981258
uaugcaguuaaucuugaca

SEQ ID NO: 1981260 - RNA, 19 nt, Artificial Sequence
  Description of Artificial Sequence: Synthetic oligonucleotide
  Sense strand starting at position 3912 of SEQ ID NO: 1880623
gaaagaauuccuggcugga

SEQ ID NO: 1981261 - RNA, 19 nt, Artificial Sequence
  Description of Artificial Sequence: Synthetic oligonucleotide
  Antisense strand to SEQ ID NO: 1981260
uccagccaggaauucuuuc

SEQ ID NO: 1981262 - RNA, 19 nt, Artificial Sequence
  Description of Artificial Sequence: Synthetic oligonucleotide
  Sense strand starting at position 3914 of SEQ ID NO: 1880623
aagaauuccuggcuggaug

SEQ ID NO: 1981263 - RNA, 19 nt, Artificial Sequence
  Description of Artificial Sequence: Synthetic oligonucleotide
  Antisense strand to SEQ ID NO: 1981262
cauccagccaggaauucuu

SEQ ID NO: 1981264 - RNA, 19 nt, Artificial Sequence
  Description of Artificial Sequence: Synthetic oligonucleotide
  Sense strand starting at position 3925 of SEQ ID NO: 1880623
gcuggaugguaaagaggua

SEQ ID NO: 1981265 - RNA, 19 nt, Artificial Sequence
  Description of Artificial Sequence: Synthetic oligonucleotide
  Antisense strand to SEQ ID NO: 1981264
uaccucuuuaccauccagc

SEQ ID NO: 1981266 - RNA, 19 nt, Artificial Sequence
  Description of Artificial Sequence: Synthetic oligonucleotide
  Sense strand starting at position 262 of SEQ ID NO: 1880624
gcaggagaaucgcuaagaa

SEQ ID NO: 1981267 - RNA, 19 nt, Artificial Sequence
  Description of Artificial Sequence: Synthetic oligonucleotide
  Antisense strand to SEQ ID NO: 1981266
uucuuagcgauucuccugc

SEQ ID NO: 1981268 - RNA, 19 nt, Artificial Sequence
  Description of Artificial Sequence: Synthetic oligonucleotide
  Sense strand starting at position 419 of SEQ ID NO: 1880624
auuugucaggucugcuuau

SEQ ID NO: 1981269 - RNA, 19 nt, Artificial Sequence
  Description of Artificial Sequence: Synthetic oligonucleotide
  Antisense strand to SEQ ID NO: 1981268
auaagcagaccugacaaau

SEQ ID NO: 1981270 - RNA, 19 nt, Artificial Sequence
  Description of Artificial Sequence: Synthetic oligonucleotide
  Sense strand starting at position 434 of SEQ ID NO: 1880624
uuaucugaauccuuggcua

SEQ ID NO: 1981271 - RNA, 19 nt, Artificial Sequence
  Description of Artificial Sequence: Synthetic oligonucleotide
  Antisense strand to SEQ ID NO: 1981270
uagccaaggauucagauaa

SEQ ID NO: 1981272 - RNA, 19 nt, Artificial Sequence
  Description of Artificial Sequence: Synthetic oligonucleotide
  Sense strand starting at position 436 of SEQ ID NO: 1880624
aucugaauccuuggcuaau

SEQ ID NO: 1981273 - RNA, 19 nt, Artificial Sequence
  Description of Artificial Sequence: Synthetic oligonucleotide
  Antisense strand to SEQ ID NO: 1981272
auuagccaaggauucagau

SEQ ID NO: 1981274 - RNA, 19 nt, Artificial Sequence
  Description of Artificial Sequence: Synthetic oligonucleotide
  Sense strand starting at position 437 of SEQ ID NO: 1880624
ucugaauccuuggcuaauu

SEQ ID NO: 1981275 - RNA, 19 nt, Artificial Sequence
  Description of Artificial Sequence: Synthetic oligonucleotide
  Antisense strand to SEQ ID NO: 1981274
aauuagccaaggauucaga

SEQ ID NO: 1981276 - RNA, 19 nt, Artificial Sequence
  Description of Artificial Sequence: Synthetic oligonucleotide
  Sense strand starting at position 438 of SEQ ID NO: 1880624
cugaauccuuggcuaauua

SEQ ID NO: 1981277 - RNA, 19 nt, Artificial Sequence
  Description of Artificial Sequence: Synthetic oligonucleotide
  Antisense strand to SEQ ID NO: 1981276
uaauuagccaaggauucag

SEQ ID NO: 1981278 - RNA, 19 nt, Artificial Sequence
  Description of Artificial Sequence: Synthetic oligonucleotide
  Sense strand starting at position 439 of SEQ ID NO: 1880624
ugaauccuuggcuaauuau

SEQ ID NO: 1981279 - RNA, 19 nt, Artificial Sequence
  Description of Artificial Sequence: Synthetic oligonucleotide
  Antisense strand to SEQ ID NO: 1981278
auaauuagccaaggauuca

SEQ ID NO: 1981280 - RNA, 19 nt, Artificial Sequence
  Description of Artificial Sequence: Synthetic oligonucleotide
  Sense strand starting at position 564 of SEQ ID NO: 1880624
gaccuuuggcuauggaaua

SEQ ID NO: 1981281 - RNA, 19 nt, Artificial Sequence
  Description of Artificial Sequence: Synthetic oligonucleotide
  Antisense strand to SEQ ID NO: 1981280
uauuccauagccaaagguc

SEQ ID NO: 1981282 - RNA, 19 nt, Artificial Sequence
  Description of Artificial Sequence: Synthetic oligonucleotide
  Sense strand starting at position 733 of SEQ ID NO: 1880624
cugaaaggcuacuuauaua

SEQ ID NO: 1981283 - RNA, 19 nt, Artificial Sequence
  Description of Artificial Sequence: Synthetic oligonucleotide
  Antisense strand to SEQ ID NO: 1981282
uauauaaguagccuuucag

SEQ ID NO: 1981284 - RNA, 19 nt, Artificial Sequence
  Description of Artificial Sequence: Synthetic oligonucleotide
  Sense strand starting at position 740 of SEQ ID NO: 1880624
gcuacuuauauaggugaag

SEQ ID NO: 1981285 - RNA, 19 nt, Artificial Sequence
  Description of Artificial Sequence: Synthetic oligonucleotide
  Antisense strand to SEQ ID NO: 1981284
cuucaccuauauaaguagc

SEQ ID NO: 1981286 - RNA, 19 nt, Artificial Sequence
  Description of Artificial Sequence: Synthetic oligonucleotide
  Sense strand starting at position 741 of SEQ ID NO: 1880624
cuacuuauauaggugaaga

SEQ ID NO: 1981287 - RNA, 19 nt, Artificial Sequence
  Description of Artificial Sequence: Synthetic oligonucleotide
  Antisense strand to SEQ ID NO: 1981286
ucuucaccuauauaaguag

SEQ ID NO: 1981288 - RNA, 19 nt, Artificial Sequence
  Description of Artificial Sequence: Synthetic oligonucleotide
  Sense strand starting at position 786 of SEQ ID NO: 1880624
gucaacagauacucaaagu

SEQ ID NO: 1981289 - RNA, 19 nt, Artificial Sequence
  Description of Artificial Sequence: Synthetic oligonucleotide
  Antisense strand to SEQ ID NO: 1981288
acuuugaguaucuguugac

SEQ ID NO: 1981290 - RNA, 19 nt, Artificial Sequence
  Description of Artificial Sequence: Synthetic oligonucleotide
  Sense strand starting at position 882 of SEQ ID NO: 1880624
agcaguuaacucuaaguag

SEQ ID NO: 1981291 - RNA, 19 nt, Artificial Sequence
  Description of Artificial Sequence: Synthetic oligonucleotide
  Antisense strand to SEQ ID NO: 1981290
cuacuuagaguuaacugcu

SEQ ID NO: 1981292 - RNA, 19 nt, Artificial Sequence
  Description of Artificial Sequence: Synthetic oligonucleotide
  Sense strand starting at position 978 of SEQ ID NO: 1880624
uagggaauauuagugguua

SEQ ID NO: 1981293 - RNA, 19 nt, Artificial Sequence
  Description of Artificial Sequence: Synthetic oligonucleotide
  Antisense strand to SEQ ID NO: 1981292
uaaccacuaauauucccua

SEQ ID NO: 1981294 - RNA, 19 nt, Artificial Sequence
  Description of Artificial Sequence: Synthetic oligonucleotide
  Sense strand starting at position 980 of SEQ ID NO: 1880624
gggaauauuagugguuaga

SEQ ID NO: 1981295 - RNA, 19 nt, Artificial Sequence
  Description of Artificial Sequence: Synthetic oligonucleotide
  Antisense strand to SEQ ID NO: 1981294
ucuaaccacuaauauuccc

SEQ ID NO: 1981296 - RNA, 19 nt, Artificial Sequence
  Description of Artificial Sequence: Synthetic oligonucleotide
  Sense strand starting at position 982 of SEQ ID NO: 1880624
gaauauuagugguuagaag

SEQ ID NO: 1981297 - RNA, 19 nt, Artificial Sequence
  Description of Artificial Sequence: Synthetic oligonucleotide
  Antisense strand to SEQ ID NO: 1981296
cuucuaaccacuaauauuc

SEQ ID NO: 1981298 - RNA, 19 nt, Artificial Sequence
  Description of Artificial Sequence: Synthetic oligonucleotide
  Sense strand starting at position 1166 of SEQ ID NO: 1880624
aguauuaacaaucggagcu

SEQ ID NO: 1981299 - RNA, 19 nt, Artificial Sequence
  Description of Artificial Sequence: Synthetic oligonucleotide
  Antisense strand to SEQ ID NO: 1981298
agcuccgauuguuaauacu

SEQ ID NO: 1981300 - RNA, 19 nt, Artificial Sequence
  Description of Artificial Sequence: Synthetic oligonucleotide
  Sense strand starting at position 1275 of SEQ ID NO: 1880624
ccggaucgucacguguuua

SEQ ID NO: 1981301 - RNA, 19 nt, Artificial Sequence
  Description of Artificial Sequence: Synthetic oligonucleotide
  Antisense strand to SEQ ID NO: 1981300
uaaacacgugacgauccgg

SEQ ID NO: 1981302 - RNA, 19 nt, Artificial Sequence
  Description of Artificial Sequence: Synthetic oligonucleotide
  Sense strand starting at position 1280 of SEQ ID NO: 1880624
ucgucacguguuuauauuu

SEQ ID NO: 1981303 - RNA, 19 nt, Artificial Sequence
  Description of Artificial Sequence: Synthetic oligonucleotide
  Antisense strand to SEQ ID NO: 1981302
aaauauaaacacgugacga

SEQ ID NO: 1981304 - RNA, 19 nt, Artificial Sequence
  Description of Artificial Sequence: Synthetic oligonucleotide
  Sense strand starting at position 1293 of SEQ ID NO: 1880624
auauuucaggugcgguaau

SEQ ID NO: 1981305 - RNA, 19 nt, Artificial Sequence
  Description of Artificial Sequence: Synthetic oligonucleotide
  Antisense strand to SEQ ID NO: 1981304
auuaccgcaccugaaauau

SEQ ID NO: 1981306 - RNA, 19 nt, Artificial Sequence
  Description of Artificial Sequence: Synthetic oligonucleotide
  Sense strand starting at position 1305 of SEQ ID NO: 1880624
cgguaauagaucuagucca

SEQ ID NO: 1981307 - RNA, 19 nt, Artificial Sequence
  Description of Artificial Sequence: Synthetic oligonucleotide
  Antisense strand to SEQ ID NO: 1981306
uggacuagaucuauuaccg

SEQ ID NO: 1981308 - RNA, 19 nt, Artificial Sequence
  Description of Artificial Sequence: Synthetic oligonucleotide
  Sense strand starting at position 1406 of SEQ ID NO: 1880624
ggaggucaaucacugcuuu

SEQ ID NO: 1981309 - RNA, 19 nt, Artificial Sequence
  Description of Artificial Sequence: Synthetic oligonucleotide
  Antisense strand to SEQ ID NO: 1981308
aaagcagugauugaccucc

SEQ ID NO: 1981310 - RNA, 19 nt, Artificial Sequence
  Description of Artificial Sequence: Synthetic oligonucleotide
  Sense strand starting at position 1407 of SEQ ID NO: 1880624
gaggucaaucacugcuuua

SEQ ID NO: 1981311 - RNA, 19 nt, Artificial Sequence
  Description of Artificial Sequence: Synthetic oligonucleotide
  Antisense strand to SEQ ID NO: 1981310
uaaagcagugauugaccuc

SEQ ID NO: 1981312 - RNA, 19 nt, Artificial Sequence
  Description of Artificial Sequence: Synthetic oligonucleotide
  Sense strand starting at position 1689 of SEQ ID NO: 1880624
caugguauccuacauguag

SEQ ID NO: 1981313 - RNA, 19 nt, Artificial Sequence
  Description of Artificial Sequence: Synthetic oligonucleotide
  Antisense strand to SEQ ID NO: 1981312
cuacauguaggauaccaug

SEQ ID NO: 1981314 - RNA, 19 nt, Artificial Sequence
  Description of Artificial Sequence: Synthetic oligonucleotide
  Sense strand starting at position 1720 of SEQ ID NO: 1880624
uaauaaaggcugggacauu

SEQ ID NO: 1981315 - RNA, 19 nt, Artificial Sequence
  Description of Artificial Sequence: Synthetic oligonucleotide
  Antisense strand to SEQ ID NO: 1981314
aaugucccagccuuuauua

SEQ ID NO: 1981316 - RNA, 19 nt, Artificial Sequence
  Description of Artificial Sequence: Synthetic oligonucleotide
  Sense strand starting at position 1748 of SEQ ID NO: 1880624
ggauauuaccacuaugcua

SEQ ID NO: 1981317 - RNA, 19 nt, Artificial Sequence
  Description of Artificial Sequence: Synthetic oligonucleotide
  Antisense strand to SEQ ID NO: 1981316
uagcauagugguaauaucc

SEQ ID NO: 1981318 - RNA, 19 nt, Artificial Sequence
  Description of Artificial Sequence: Synthetic oligonucleotide
  Sense strand starting at position 2966 of SEQ ID NO: 1880624
ggccucggugguaguuauu

SEQ ID NO: 1981319 - RNA, 19 nt, Artificial Sequence
  Description of Artificial Sequence: Synthetic oligonucleotide
  Antisense strand to SEQ ID NO: 1981318
aauaacuaccaccgaggcc

SEQ ID NO: 1981320 - RNA, 19 nt, Artificial Sequence
  Description of Artificial Sequence: Synthetic oligonucleotide
  Sense strand starting at position 3193 of SEQ ID NO: 1880624
cugguuugacaagguuaga

SEQ ID NO: 1981321 - RNA, 19 nt, Artificial Sequence
  Description of Artificial Sequence: Synthetic oligonucleotide
  Antisense strand to SEQ ID NO: 1981320
ucuaaccuugucaaaccag

SEQ ID NO: 1981322 - RNA, 19 nt, Artificial Sequence
  Description of Artificial Sequence: Synthetic oligonucleotide
  Sense strand starting at position 3258 of SEQ ID NO: 1880624
cuucuaaaugugggaagau

SEQ ID NO: 1981323 - RNA, 19 nt, Artificial Sequence
  Description of Artificial Sequence: Synthetic oligonucleotide
  Antisense strand to SEQ ID NO: 1981322
aucuucccacauuuagaag

SEQ ID NO: 1981324 - RNA, 19 nt, Artificial Sequence
  Description of Artificial Sequence: Synthetic oligonucleotide
  Sense strand starting at position 3358 of SEQ ID NO: 1880624
gcagucuugauuuaguugu

SEQ ID NO: 1981325 - RNA, 19 nt, Artificial Sequence
  Description of Artificial Sequence: Synthetic oligonucleotide
  Antisense strand to SEQ ID NO: 1981324
acaacuaaaucaagacugc

SEQ ID NO: 1981326 - RNA, 19 nt, Artificial Sequence
  Description of Artificial Sequence: Synthetic oligonucleotide
  Sense strand starting at position 3362 of SEQ ID NO: 1880624
ucuugauuuaguuguguau

SEQ ID NO: 1981327 - RNA, 19 nt, Artificial Sequence
  Description of Artificial Sequence: Synthetic oligonucleotide
  Antisense strand to SEQ ID NO: 1981326
auacacaacuaaaucaaga

SEQ ID NO: 1981328 - RNA, 19 nt, Artificial Sequence
  Description of Artificial Sequence: Synthetic oligonucleotide
  Sense strand starting at position 3365 of SEQ ID NO: 1880624
ugauuuaguuguguaucuu

SEQ ID NO: 1981329 - RNA, 19 nt, Artificial Sequence
  Description of Artificial Sequence: Synthetic oligonucleotide
  Antisense strand to SEQ ID NO: 1981328
aagauacacaacuaaauca

SEQ ID NO: 1981330 - RNA, 19 nt, Artificial Sequence
  Description of Artificial Sequence: Synthetic oligonucleotide
  Sense strand starting at position 3557 of SEQ ID NO: 1880624
gccaguguucugcuuuagu

SEQ ID NO: 1981331 - RNA, 19 nt, Artificial Sequence
  Description of Artificial Sequence: Synthetic oligonucleotide
  Antisense strand to SEQ ID NO: 1981330
acuaaagcagaacacuggc

SEQ ID NO: 1981332 - RNA, 19 nt, Artificial Sequence
  Description of Artificial Sequence: Synthetic oligonucleotide
  Sense strand starting at position 3559 of SEQ ID NO: 1880624
caguguucugcuuuagucu

SEQ ID NO: 1981333 - RNA, 19 nt, Artificial Sequence
  Description of Artificial Sequence: Synthetic oligonucleotide
  Antisense strand to SEQ ID NO: 1981332
agacuaaagcagaacacug

SEQ ID NO: 1981334 - RNA, 19 nt, Artificial Sequence
  Description of Artificial Sequence: Synthetic oligonucleotide
  Sense strand starting at position 3665 of SEQ ID NO: 1880624
guaugagauacuuggcaag

SEQ ID NO: 1981335 - RNA, 19 nt, Artificial Sequence
  Description of Artificial Sequence: Synthetic oligonucleotide
  Antisense strand to SEQ ID NO: 1981334
cuugccaaguaucucauac

SEQ ID NO: 1981336 - RNA, 19 nt, Artificial Sequence
  Description of Artificial Sequence: Synthetic oligonucleotide
  Sense strand starting at position 3667 of SEQ ID NO: 1880624
augagauacuuggcaagua

SEQ ID NO: 1981337 - RNA, 19 nt, Artificial Sequence
  Description of Artificial Sequence: Synthetic oligonucleotide
  Antisense strand to SEQ ID NO: 1981336
uacuugccaaguaucucau

SEQ ID NO: 1981338 - RNA, 19 nt, Artificial Sequence
  Description of Artificial Sequence: Synthetic oligonucleotide
  Sense strand starting at position 3701 of SEQ ID NO: 1880624
agcaguaaacgauagacuu

SEQ ID NO: 1981339 - RNA, 19 nt, Artificial Sequence
  Description of Artificial Sequence: Synthetic oligonucleotide
  Antisense strand to SEQ ID NO: 1981338
aagucuaucguuuacugcu

SEQ ID NO: 1981340 - RNA, 19 nt, Artificial Sequence
  Description of Artificial Sequence: Synthetic oligonucleotide
  Sense strand starting at position 3709 of SEQ ID NO: 1880624
acgauagacuugguuccaa

SEQ ID NO: 1981341 - RNA, 19 nt, Artificial Sequence
  Description of Artificial Sequence: Synthetic oligonucleotide
  Antisense strand to SEQ ID NO: 1981340
uuggaaccaagucuaucgu

SEQ ID NO: 1981342 - RNA, 19 nt, Artificial Sequence
  Description of Artificial Sequence: Synthetic oligonucleotide
  Sense strand starting at position 3833 of SEQ ID NO: 1880624
ggguuaugagagcauguaa

SEQ ID NO: 1981343 - RNA, 19 nt, Artificial Sequence
  Description of Artificial Sequence: Synthetic oligonucleotide
  Antisense strand to SEQ ID NO: 1981342
uuacaugcucucauaaccc

SEQ ID NO: 1981344 - RNA, 19 nt, Artificial Sequence
  Description of Artificial Sequence: Synthetic oligonucleotide
  Sense strand starting at position 3865 of SEQ ID NO: 1880624
uccuguuuaggguaucaga

SEQ ID NO: 1981345 - RNA, 19 nt, Artificial Sequence
  Description of Artificial Sequence: Synthetic oligonucleotide
  Antisense strand to SEQ ID NO: 1981344
ucugauacccuaaacagga

SEQ ID NO: 1981346 - RNA, 19 nt, Artificial Sequence
  Description of Artificial Sequence: Synthetic oligonucleotide
  Sense strand starting at position 1 of SEQ ID NO: 1880625
gacaccugagccugugaau

SEQ ID NO: 1981347 - RNA, 19 nt, Artificial Sequence
  Description of Artificial Sequence: Synthetic oligonucleotide
  Antisense strand to SEQ ID NO: 1981346
auucacaggcucagguguc

SEQ ID NO: 1981348 - RNA, 19 nt, Artificial Sequence
  Description of Artificial Sequence: Synthetic oligonucleotide
  Sense strand starting at position 14 of SEQ ID NO: 1880625
gugaauaaaccagguccua

SEQ ID NO: 1981349 - RNA, 19 nt, Artificial Sequence
  Description of Artificial Sequence: Synthetic oligonucleotide
  Antisense strand to SEQ ID NO: 1981348
uaggaccugguuuauucac

SEQ ID NO: 1981350 - RNA, 19 nt, Artificial Sequence
  Description of Artificial Sequence: Synthetic oligonucleotide
  Sense strand starting at position 109 of SEQ ID NO: 1880625
guaacucagaguugaguua

SEQ ID NO: 1981351 - RNA, 19 nt, Artificial Sequence
  Description of Artificial Sequence: Synthetic oligonucleotide
  Antisense strand to SEQ ID NO: 1981350
uaacucaacucugaguuac

SEQ ID NO: 1981352 - RNA, 19 nt, Artificial Sequence
  Description of Artificial Sequence: Synthetic oligonucleotide
  Sense strand starting at position 162 of SEQ ID NO: 1880625
agcgaugcugcuuaaagaa

SEQ ID NO: 1981353 - RNA, 19 nt, Artificial Sequence
  Description of Artificial Sequence: Synthetic oligonucleotide
  Antisense strand to SEQ ID NO: 1981352
uucuuuaagcagcaucgcu

SEQ ID NO: 1981354 - RNA, 19 nt, Artificial Sequence
  Description of Artificial Sequence: Synthetic oligonucleotide
  Sense strand starting at position 431 of SEQ ID NO: 1880625
acuguaaaguccuugcaga

SEQ ID NO: 1981355 - RNA, 19 nt, Artificial Sequence
  Description of Artificial Sequence: Synthetic oligonucleotide
  Antisense strand to SEQ ID NO: 1981354
ucugcaaggacuuuacagu

SEQ ID NO: 1981356 - RNA, 19 nt, Artificial Sequence
  Description of Artificial Sequence: Synthetic oligonucleotide
  Sense strand starting at position 453 of SEQ ID NO: 1880625
cugucauggcacgaugaca

SEQ ID NO: 1981357 - RNA, 19 nt, Artificial Sequence
  Description of Artificial Sequence: Synthetic oligonucleotide
  Antisense strand to SEQ ID NO: 1981356
ugucaucgugccaugacag

SEQ ID NO: 1981358 - RNA, 19 nt, Artificial Sequence
  Description of Artificial Sequence: Synthetic oligonucleotide
  Sense strand starting at position 540 of SEQ ID NO: 1880625
gccagugacuccuugagau

SEQ ID NO: 1981359 - RNA, 19 nt, Artificial Sequence
  Description of Artificial Sequence: Synthetic oligonucleotide
  Antisense strand to SEQ ID NO: 1981358
aucucaaggagucacuggc

SEQ ID NO: 1981360 - RNA, 19 nt, Artificial Sequence
  Description of Artificial Sequence: Synthetic oligonucleotide
  Sense strand starting at position 542 of SEQ ID NO: 1880625
cagugacuccuugagaugu

SEQ ID NO: 1981361 - RNA, 19 nt, Artificial Sequence
  Description of Artificial Sequence: Synthetic oligonucleotide
  Antisense strand to SEQ ID NO: 1981360
acaucucaaggagucacug

SEQ ID NO: 1981362 - RNA, 19 nt, Artificial Sequence
  Description of Artificial Sequence: Synthetic oligonucleotide
  Sense strand starting at position 586 of SEQ ID NO: 1880625
ggcugugcauuuccacaau

SEQ ID NO: 1981363 - RNA, 19 nt, Artificial Sequence
  Description of Artificial Sequence: Synthetic oligonucleotide
  Antisense strand to SEQ ID NO: 1981362
auuguggaaaugcacagcc

SEQ ID NO: 1981364 - RNA, 19 nt, Artificial Sequence
  Description of Artificial Sequence: Synthetic oligonucleotide
  Sense strand starting at position 643 of SEQ ID NO: 1880625
accuuagacucucuugaag

SEQ ID NO: 1981365 - RNA, 19 nt, Artificial Sequence
  Description of Artificial Sequence: Synthetic oligonucleotide
  Antisense strand to SEQ ID NO: 1981364
cuucaagagagucuaaggu

SEQ ID NO: 1981366 - RNA, 19 nt, Artificial Sequence
  Description of Artificial Sequence: Synthetic oligonucleotide
  Sense strand starting at position 714 of SEQ ID NO: 1880625
aggccuugggaucaaucuu

SEQ ID NO: 1981367 - RNA, 19 nt, Artificial Sequence
  Description of Artificial Sequence: Synthetic oligonucleotide
  Antisense strand to SEQ ID NO: 1981366
aagauugaucccaaggccu

SEQ ID NO: 1981368 - RNA, 19 nt, Artificial Sequence
  Description of Artificial Sequence: Synthetic oligonucleotide
  Sense strand starting at position 1063 of SEQ ID NO: 1880625
gcuggagugacauaaucuc

SEQ ID NO: 1981369 - RNA, 19 nt, Artificial Sequence
  Description of Artificial Sequence: Synthetic oligonucleotide
  Antisense strand to SEQ ID NO: 1981368
gagauuaugucacuccagc

SEQ ID NO: 1981370 - RNA, 19 nt, Artificial Sequence
  Description of Artificial Sequence: Synthetic oligonucleotide
  Sense strand starting at position 1198 of SEQ ID NO: 1880625
cccuaaguguuucuaaggu

SEQ ID NO: 1981371 - RNA, 19 nt, Artificial Sequence
  Description of Artificial Sequence: Synthetic oligonucleotide
  Antisense strand to SEQ ID NO: 1981370
accuuagaaacacuuaggg

SEQ ID NO: 1981372 - RNA, 19 nt, Artificial Sequence
  Description of Artificial Sequence: Synthetic oligonucleotide
  Sense strand starting at position 1309 of SEQ ID NO: 1880625
ggugguuguaauugaagua

SEQ ID NO: 1981373 - RNA, 19 nt, Artificial Sequence
  Description of Artificial Sequence: Synthetic oligonucleotide
  Antisense strand to SEQ ID NO: 1981372
uacuucaauuacaaccacc

SEQ ID NO: 1981374 - RNA, 19 nt, Artificial Sequence
  Description of Artificial Sequence: Synthetic oligonucleotide
  Sense strand starting at position 1310 of SEQ ID NO: 1880625
gugguuguaauugaaguaa

SEQ ID NO: 1981375 - RNA, 19 nt, Artificial Sequence
  Description of Artificial Sequence: Synthetic oligonucleotide
  Antisense strand to SEQ ID NO: 1981374
uuacuucaauuacaaccac

SEQ ID NO: 1981376 - RNA, 19 nt, Artificial Sequence
  Description of Artificial Sequence: Synthetic oligonucleotide
  Sense strand starting at position 1362 of SEQ ID NO: 1880625
ccagcaacucugugaccua

SEQ ID NO: 1981377 - RNA, 19 nt, Artificial Sequence
  Description of Artificial Sequence: Synthetic oligonucleotide
  Antisense strand to SEQ ID NO: 1981376
uaggucacagaguugcugg

SEQ ID NO: 1981378 - RNA, 19 nt, Artificial Sequence
  Description of Artificial Sequence: Synthetic oligonucleotide
  Sense strand starting at position 1445 of SEQ ID NO: 1880625
ggugguaucacucaacgau

SEQ ID NO: 1981379 - RNA, 19 nt, Artificial Sequence
  Description of Artificial Sequence: Synthetic oligonucleotide
  Antisense strand to SEQ ID NO: 1981378
aucguugagugauaccacc

SEQ ID NO: 1981380 - RNA, 19 nt, Artificial Sequence
  Description of Artificial Sequence: Synthetic oligonucleotide
  Sense strand starting at position 1448 of SEQ ID NO: 1880625
gguaucacucaacgaugaa

SEQ ID NO: 1981381 - RNA, 19 nt, Artificial Sequence
  Description of Artificial Sequence: Synthetic oligonucleotide
  Antisense strand to SEQ ID NO: 1981380
uucaucguugagugauacc

SEQ ID NO: 1981382 - RNA, 19 nt, Artificial Sequence
  Description of Artificial Sequence: Synthetic oligonucleotide
  Sense strand starting at position 1482 of SEQ ID NO: 1880625
gccuuuaacgaccagucuu

SEQ ID NO: 1981383 - RNA, 19 nt, Artificial Sequence
  Description of Artificial Sequence: Synthetic oligonucleotide
  Antisense strand to SEQ ID NO: 1981382
aagacuggucguuaaaggc

SEQ ID NO: 1981384 - RNA, 19 nt, Artificial Sequence
  Description of Artificial Sequence: Synthetic oligonucleotide
  Sense strand starting at position 1584 of SEQ ID NO: 1880625
cuccuuaagugguuccuaa

SEQ ID NO: 1981385 - RNA, 19 nt, Artificial Sequence
  Description of Artificial Sequence: Synthetic oligonucleotide
  Antisense strand to SEQ ID NO: 1981384
uuaggaaccacuuaaggag

SEQ ID NO: 1981386 - RNA, 19 nt, Artificial Sequence
  Description of Artificial Sequence: Synthetic oligonucleotide
  Sense strand starting at position 1865 of SEQ ID NO: 1880625
gaaagcagggucugaguuu

SEQ ID NO: 1981387 - RNA, 19 nt, Artificial Sequence
  Description of Artificial Sequence: Synthetic oligonucleotide
  Antisense strand to SEQ ID NO: 1981386
aaacucagacccugcuuuc

SEQ ID NO: 1981388 - RNA, 19 nt, Artificial Sequence
  Description of Artificial Sequence: Synthetic oligonucleotide
  Sense strand starting at position 2169 of SEQ ID NO: 1880625
cuggccuggccucagauau

SEQ ID NO: 1981389 - RNA, 19 nt, Artificial Sequence
  Description of Artificial Sequence: Synthetic oligonucleotide
  Antisense strand to SEQ ID NO: 1981388
auaucugaggccaggccag

SEQ ID NO: 1981390 - RNA, 19 nt, Artificial Sequence
  Description of Artificial Sequence: Synthetic oligonucleotide
  Sense strand starting at position 2176 of SEQ ID NO: 1880625
ggccucagauaucuguaua

SEQ ID NO: 1981391 - RNA, 19 nt, Artificial Sequence
  Description of Artificial Sequence: Synthetic oligonucleotide
  Antisense strand to SEQ ID NO: 1981390
uauacagauaucugaggcc

SEQ ID NO: 1981392 - RNA, 19 nt, Artificial Sequence
  Description of Artificial Sequence: Synthetic oligonucleotide
  Sense strand starting at position 2179 of SEQ ID NO: 1880625
cucagauaucuguauaucc

SEQ ID NO: 1981393 - RNA, 19 nt, Artificial Sequence
  Description of Artificial Sequence: Synthetic oligonucleotide
  Antisense strand to SEQ ID NO: 1981392
ggauauacagauaucugag

SEQ ID NO: 1981394 - RNA, 19 nt, Artificial Sequence
  Description of Artificial Sequence: Synthetic oligonucleotide
  Sense strand starting at position 2208 of SEQ ID NO: 1880625
cguuauuugcaacagccaa

SEQ ID NO: 1981395 - RNA, 19 nt, Artificial Sequence
  Description of Artificial Sequence: Synthetic oligonucleotide
  Antisense strand to SEQ ID NO: 1981394
uuggcuguugcaaauaacg

SEQ ID NO: 1981396 - RNA, 19 nt, Artificial Sequence
  Description of Artificial Sequence: Synthetic oligonucleotide
  Sense strand starting at position 2436 of SEQ ID NO: 1880625
gaagucaaauucguagaga

SEQ ID NO: 1981397 - RNA, 19 nt, Artificial Sequence
  Description of Artificial Sequence: Synthetic oligonucleotide
  Antisense strand to SEQ ID NO: 1981396
ucucuacgaauuugacuuc

SEQ ID NO: 1981398 - RNA, 19 nt, Artificial Sequence
  Description of Artificial Sequence: Synthetic oligonucleotide
  Sense strand starting at position 2503 of SEQ ID NO: 1880625
gggaguuagugcucaaugg

SEQ ID NO: 1981399 - RNA, 19 nt, Artificial Sequence
  Description of Artificial Sequence: Synthetic oligonucleotide
  Antisense strand to SEQ ID NO: 1981398
ccauugagcacuaacuccc

SEQ ID NO: 1981400 - RNA, 19 nt, Artificial Sequence
  Description of Artificial Sequence: Synthetic oligonucleotide
  Sense strand starting at position 2504 of SEQ ID NO: 1880625
ggaguuagugcucaaugga

SEQ ID NO: 1981401 - RNA, 19 nt, Artificial Sequence
  Description of Artificial Sequence: Synthetic oligonucleotide
  Antisense strand to SEQ ID NO: 1981400
uccauugagcacuaacucc

SEQ ID NO: 1981402 - RNA, 19 nt, Artificial Sequence
  Description of Artificial Sequence: Synthetic oligonucleotide
  Sense strand starting at position 2507 of SEQ ID NO: 1880625
guuagugcucaauggauac

SEQ ID NO: 1981403 - RNA, 19 nt, Artificial Sequence
  Description of Artificial Sequence: Synthetic oligonucleotide
  Antisense strand to SEQ ID NO: 1981402
guauccauugagcacuaac

SEQ ID NO: 1981404 - RNA, 19 nt, Artificial Sequence
  Description of Artificial Sequence: Synthetic oligonucleotide
  Sense strand starting at position 2631 of SEQ ID NO: 1880625
auucuuacucaaugcagga

SEQ ID NO: 1981405 - RNA, 19 nt, Artificial Sequence
  Description of Artificial Sequence: Synthetic oligonucleotide
  Antisense strand to SEQ ID NO: 1981404
uccugcauugaguaagaau

SEQ ID NO: 1981406 - RNA, 19 nt, Artificial Sequence
  Description of Artificial Sequence: Synthetic oligonucleotide
  Sense strand starting at position 2635 of SEQ ID NO: 1880625
uuacucaaugcaggauaga

SEQ ID NO: 1981407 - RNA, 19 nt, Artificial Sequence
  Description of Artificial Sequence: Synthetic oligonucleotide
  Antisense strand to SEQ ID NO: 1981406
ucuauccugcauugaguaa

SEQ ID NO: 1981408 - RNA, 19 nt, Artificial Sequence
  Description of Artificial Sequence: Synthetic oligonucleotide
  Sense strand starting at position 2692 of SEQ ID NO: 1880625
cugauaguguuucugguga

SEQ ID NO: 1981409 - RNA, 19 nt, Artificial Sequence
  Description of Artificial Sequence: Synthetic oligonucleotide
  Antisense strand to SEQ ID NO: 1981408
ucaccagaaacacuaucag

SEQ ID NO: 1981410 - RNA, 19 nt, Artificial Sequence
  Description of Artificial Sequence: Synthetic oligonucleotide
  Sense strand starting at position 2919 of SEQ ID NO: 1880625
aggugagaaggauguccaa

SEQ ID NO: 1981411 - RNA, 19 nt, Artificial Sequence
  Description of Artificial Sequence: Synthetic oligonucleotide
  Antisense strand to SEQ ID NO: 1981410
uuggacauccuucucaccu

SEQ ID NO: 1981412 - RNA, 19 nt, Artificial Sequence
  Description of Artificial Sequence: Synthetic oligonucleotide
  Sense strand starting at position 2948 of SEQ ID NO: 1880625
gcuaauggcaucugaggau

SEQ ID NO: 1981413 - RNA, 19 nt, Artificial Sequence
  Description of Artificial Sequence: Synthetic oligonucleotide
  Antisense strand to SEQ ID NO: 1981412
auccucagaugccauuagc

SEQ ID NO: 1981414 - RNA, 19 nt, Artificial Sequence
  Description of Artificial Sequence: Synthetic oligonucleotide
  Sense strand starting at position 3360 of SEQ ID NO: 1880625
auuaguccauguucuugaa

SEQ ID NO: 1981415 - RNA, 19 nt, Artificial Sequence
  Description of Artificial Sequence: Synthetic oligonucleotide
  Antisense strand to SEQ ID NO: 1981414
uucaagaacauggacuaau

SEQ ID NO: 1981416 - RNA, 19 nt, Artificial Sequence
  Description of Artificial Sequence: Synthetic oligonucleotide
  Sense strand starting at position 3364 of SEQ ID NO: 1880625
guccauguucuugaaucca

SEQ ID NO: 1981417 - RNA, 19 nt, Artificial Sequence
  Description of Artificial Sequence: Synthetic oligonucleotide
  Antisense strand to SEQ ID NO: 1981416
uggauucaagaacauggac

SEQ ID NO: 1981418 - RNA, 19 nt, Artificial Sequence
  Description of Artificial Sequence: Synthetic oligonucleotide
  Sense strand starting at position 3588 of SEQ ID NO: 1880625
cucccaaaugucuguuuaa

SEQ ID NO: 1981419 - RNA, 19 nt, Artificial Sequence
  Description of Artificial Sequence: Synthetic oligonucleotide
  Antisense strand to SEQ ID NO: 1981418
uuaaacagacauuugggag

SEQ ID NO: 1981420 - RNA, 19 nt, Artificial Sequence
  Description of Artificial Sequence: Synthetic oligonucleotide
  Sense strand starting at position 3589 of SEQ ID NO: 1880625
ucccaaaugucuguuuaaa

SEQ ID NO: 1981421 - RNA, 19 nt, Artificial Sequence
  Description of Artificial Sequence: Synthetic oligonucleotide
  Antisense strand to SEQ ID NO: 1981420
uuuaaacagacauuuggga

SEQ ID NO: 1981422 - RNA, 19 nt, Artificial Sequence
  Description of Artificial Sequence: Synthetic oligonucleotide
  Sense strand starting at position 3845 of SEQ ID NO: 1880625
ccagguuacuuugugaucu

SEQ ID NO: 1981423 - RNA, 19 nt, Artificial Sequence
  Description of Artificial Sequence: Synthetic oligonucleotide
  Antisense strand to SEQ ID NO: 1981422
agaucacaaaguaaccugg

SEQ ID NO: 1981424 - RNA, 19 nt, Artificial Sequence
  Description of Artificial Sequence: Synthetic oligonucleotide
  Sense strand starting at position 3892 of SEQ ID NO: 1880625
guguguagaaaucaucaag

SEQ ID NO: 1981425 - RNA, 19 nt, Artificial Sequence
  Description of Artificial Sequence: Synthetic oligonucleotide
  Antisense strand to SEQ ID NO: 1981424
cuugaugauuucuacacac

SEQ ID NO: 1981426 - RNA, 19 nt, Artificial Sequence
  Description of Artificial Sequence: Synthetic oligonucleotide
  Sense strand starting at position 196 of SEQ ID NO: 1880626
acuaguucuccuugcucua

SEQ ID NO: 1981427 - RNA, 19 nt, Artificial Sequence
  Description of Artificial Sequence: Synthetic oligonucleotide
  Antisense strand to SEQ ID NO: 1981426
uagagcaaggagaacuagu

SEQ ID NO: 1981428 - RNA, 19 nt, Artificial Sequence
  Description of Artificial Sequence: Synthetic oligonucleotide
  Sense strand starting at position 323 of SEQ ID NO: 1880626
gggaaacccuuaccugauu

SEQ ID NO: 1981429 - RNA, 19 nt, Artificial Sequence
  Description of Artificial Sequence: Synthetic oligonucleotide
  Antisense strand to SEQ ID NO: 1981428
aaucagguaaggguuuccc

SEQ ID NO: 1981430 - RNA, 19 nt, Artificial Sequence
  Description of Artificial Sequence: Synthetic oligonucleotide
  Sense strand starting at position 341 of SEQ ID NO: 1880626
uaaguaaggucccugcuau

SEQ ID NO: 1981431 - RNA, 19 nt, Artificial Sequence
  Description of Artificial Sequence: Synthetic oligonucleotide
  Antisense strand to SEQ ID NO: 1981430
auagcagggaccuuacuua

SEQ ID NO: 1981432 - RNA, 19 nt, Artificial Sequence
  Description of Artificial Sequence: Synthetic oligonucleotide
  Sense strand starting at position 342 of SEQ ID NO: 1880626
aaguaaggucccugcuauc

SEQ ID NO: 1981433 - RNA, 19 nt, Artificial Sequence
  Description of Artificial Sequence: Synthetic oligonucleotide
  Antisense strand to SEQ ID NO: 1981432
gauagcagggaccuuacuu

SEQ ID NO: 1981434 - RNA, 19 nt, Artificial Sequence
  Description of Artificial Sequence: Synthetic oligonucleotide
  Sense strand starting at position 353 of SEQ ID NO: 1880626
cugcuaucguuccuauaga

SEQ ID NO: 1981435 - RNA, 19 nt, Artificial Sequence
  Description of Artificial Sequence: Synthetic oligonucleotide
  Antisense strand to SEQ ID NO: 1981434
ucuauaggaacgauagcag

SEQ ID NO: 1981436 - RNA, 19 nt, Artificial Sequence
  Description of Artificial Sequence: Synthetic oligonucleotide
  Sense strand starting at position 382 of SEQ ID NO: 1880626
gucagugucauacaugcaa

SEQ ID NO: 1981437 - RNA, 19 nt, Artificial Sequence
  Description of Artificial Sequence: Synthetic oligonucleotide
  Antisense strand to SEQ ID NO: 1981436
uugcauguaugacacugac

SEQ ID NO: 1981438 - RNA, 19 nt, Artificial Sequence
  Description of Artificial Sequence: Synthetic oligonucleotide
  Sense strand starting at position 436 of SEQ ID NO: 1880626
gugguuagucaguguucaa

SEQ ID NO: 1981439 - RNA, 19 nt, Artificial Sequence
  Description of Artificial Sequence: Synthetic oligonucleotide
  Antisense strand to SEQ ID NO: 1981438
uugaacacugacuaaccac

SEQ ID NO: 1981440 - RNA, 19 nt, Artificial Sequence
  Description of Artificial Sequence: Synthetic oligonucleotide
  Sense strand starting at position 521 of SEQ ID NO: 1880626
gggcaaaucacuugagcgu

SEQ ID NO: 1981441 - RNA, 19 nt, Artificial Sequence
  Description of Artificial Sequence: Synthetic oligonucleotide
  Antisense strand to SEQ ID NO: 1981440
acgcucaagugauuugccc

SEQ ID NO: 1981442 - RNA, 19 nt, Artificial Sequence
  Description of Artificial Sequence: Synthetic oligonucleotide
  Sense strand starting at position 522 of SEQ ID NO: 1880626
ggcaaaucacuugagcgua

SEQ ID NO: 1981443 - RNA, 19 nt, Artificial Sequence
  Description of Artificial Sequence: Synthetic oligonucleotide
  Antisense strand to SEQ ID NO: 1981442
uacgcucaagugauuugcc

SEQ ID NO: 1981444 - RNA, 19 nt, Artificial Sequence
  Description of Artificial Sequence: Synthetic oligonucleotide
  Sense strand starting at position 770 of SEQ ID NO: 1880626
guggaugguagaugucaau

SEQ ID NO: 1981445 - RNA, 19 nt, Artificial Sequence
  Description of Artificial Sequence: Synthetic oligonucleotide
  Antisense strand to SEQ ID NO: 1981444
auugacaucuaccauccac

SEQ ID NO: 1981446 - RNA, 19 nt, Artificial Sequence
  Description of Artificial Sequence: Synthetic oligonucleotide
  Sense strand starting at position 777 of SEQ ID NO: 1880626
guagaugucaauuguguuc

SEQ ID NO: 1981447 - RNA, 19 nt, Artificial Sequence
  Description of Artificial Sequence: Synthetic oligonucleotide
  Antisense strand to SEQ ID NO: 1981446
gaacacaauugacaucuac

SEQ ID NO: 1981448 - RNA, 19 nt, Artificial Sequence
  Description of Artificial Sequence: Synthetic oligonucleotide
  Sense strand starting at position 891 of SEQ ID NO: 1880626
guagaagccuucuuccaag

SEQ ID NO: 1981449 - RNA, 19 nt, Artificial Sequence
  Description of Artificial Sequence: Synthetic oligonucleotide
  Antisense strand to SEQ ID NO: 1981448
cuuggaagaaggcuucuac

SEQ ID NO: 1981450 - RNA, 19 nt, Artificial Sequence
  Description of Artificial Sequence: Synthetic oligonucleotide
  Sense strand starting at position 897 of SEQ ID NO: 1880626
gccuucuuccaagacugau

SEQ ID NO: 1981451 - RNA, 19 nt, Artificial Sequence
  Description of Artificial Sequence: Synthetic oligonucleotide
  Antisense strand to SEQ ID NO: 1981450
aucagucuuggaagaaggc

SEQ ID NO: 1981452 - RNA, 19 nt, Artificial Sequence
  Description of Artificial Sequence: Synthetic oligonucleotide
  Sense strand starting at position 936 of SEQ ID NO: 1880626
ggaagagcagucuacucuu

SEQ ID NO: 1981453 - RNA, 19 nt, Artificial Sequence
  Description of Artificial Sequence: Synthetic oligonucleotide
  Antisense strand to SEQ ID NO: 1981452
aagaguagacugcucuucc

SEQ ID NO: 1981454 - RNA, 19 nt, Artificial Sequence
  Description of Artificial Sequence: Synthetic oligonucleotide
  Sense strand starting at position 957 of SEQ ID NO: 1880626
aagaaacuuuacgaggaga

SEQ ID NO: 1981455 - RNA, 19 nt, Artificial Sequence
  Description of Artificial Sequence: Synthetic oligonucleotide
  Antisense strand to SEQ ID NO: 1981454
ucuccucguaaaguuucuu

SEQ ID NO: 1981456 - RNA, 19 nt, Artificial Sequence
  Description of Artificial Sequence: Synthetic oligonucleotide
  Sense strand starting at position 980 of SEQ ID NO: 1880626
guagguaccauggauuguu

SEQ ID NO: 1981457 - RNA, 19 nt, Artificial Sequence
  Description of Artificial Sequence: Synthetic oligonucleotide
  Antisense strand to SEQ ID NO: 1981456
aacaauccaugguaccuac

SEQ ID NO: 1981458 - RNA, 19 nt, Artificial Sequence
  Description of Artificial Sequence: Synthetic oligonucleotide
  Sense strand starting at position 983 of SEQ ID NO: 1880626
gguaccauggauuguugua

SEQ ID NO: 1981459 - RNA, 19 nt, Artificial Sequence
  Description of Artificial Sequence: Synthetic oligonucleotide
  Antisense strand to SEQ ID NO: 1981458
uacaacaauccaugguacc

SEQ ID NO: 1981460 - RNA, 19 nt, Artificial Sequence
  Description of Artificial Sequence: Synthetic oligonucleotide
  Sense strand starting at position 985 of SEQ ID NO: 1880626
uaccauggauuguuguaau

SEQ ID NO: 1981461 - RNA, 19 nt, Artificial Sequence
  Description of Artificial Sequence: Synthetic oligonucleotide
  Antisense strand to SEQ ID NO: 1981460
auuacaacaauccauggua

SEQ ID NO: 1981462 - RNA, 19 nt, Artificial Sequence
  Description of Artificial Sequence: Synthetic oligonucleotide
  Sense strand starting at position 1005 of SEQ ID NO: 1880626
aaagccuucucaguugagu

SEQ ID NO: 1981463 - RNA, 19 nt, Artificial Sequence
  Description of Artificial Sequence: Synthetic oligonucleotide
  Antisense strand to SEQ ID NO: 1981462
acucaacugagaaggcuuu

SEQ ID NO: 1981464 - RNA, 19 nt, Artificial Sequence
  Description of Artificial Sequence: Synthetic oligonucleotide
  Sense strand starting at position 1167 of SEQ ID NO: 1880626
uugcuugaccuacaugaaa

SEQ ID NO: 1981465 - RNA, 19 nt, Artificial Sequence
  Description of Artificial Sequence: Synthetic oligonucleotide
  Antisense strand to SEQ ID NO: 1981464
uuucauguaggucaagcaa

SEQ ID NO: 1981466 - RNA, 19 nt, Artificial Sequence
  Description of Artificial Sequence: Synthetic oligonucleotide
  Sense strand starting at position 1240 of SEQ ID NO: 1880626
auauccagaucuucuguua

SEQ ID NO: 1981467 - RNA, 19 nt, Artificial Sequence
  Description of Artificial Sequence: Synthetic oligonucleotide
  Antisense strand to SEQ ID NO: 1981466
uaacagaagaucuggauau

SEQ ID NO: 1981468 - RNA, 19 nt, Artificial Sequence
  Description of Artificial Sequence: Synthetic oligonucleotide
  Sense strand starting at position 1438 of SEQ ID NO: 1880626
cguuaaucacaccguauca

SEQ ID NO: 1981469 - RNA, 19 nt, Artificial Sequence
  Description of Artificial Sequence: Synthetic oligonucleotide
  Antisense strand to SEQ ID NO: 1981468
ugauacggugugauuaacg

SEQ ID NO: 1981470 - RNA, 19 nt, Artificial Sequence
  Description of Artificial Sequence: Synthetic oligonucleotide
  Sense strand starting at position 1492 of SEQ ID NO: 1880626
uccucuaaggcagggauau

SEQ ID NO: 1981471 - RNA, 19 nt, Artificial Sequence
  Description of Artificial Sequence: Synthetic oligonucleotide
  Antisense strand to SEQ ID NO: 1981470
auaucccugccuuagagga

SEQ ID NO: 1981472 - RNA, 19 nt, Artificial Sequence
  Description of Artificial Sequence: Synthetic oligonucleotide
  Sense strand starting at position 1503 of SEQ ID NO: 1880626
agggauauguuucccucca

SEQ ID NO: 1981473 - RNA, 19 nt, Artificial Sequence
  Description of Artificial Sequence: Synthetic oligonucleotide
  Antisense strand to SEQ ID NO: 1981472
uggagggaaacauaucccu

SEQ ID NO: 1981474 - RNA, 19 nt, Artificial Sequence
  Description of Artificial Sequence: Synthetic oligonucleotide
  Sense strand starting at position 1504 of SEQ ID NO: 1880626
gggauauguuucccuccau

SEQ ID NO: 1981475 - RNA, 19 nt, Artificial Sequence
  Description of Artificial Sequence: Synthetic oligonucleotide
  Antisense strand to SEQ ID NO: 1981474
auggagggaaacauauccc

SEQ ID NO: 1981476 - RNA, 19 nt, Artificial Sequence
  Description of Artificial Sequence: Synthetic oligonucleotide
  Sense strand starting at position 1598 of SEQ ID NO: 1880626
gcauggagcgguccguaua

SEQ ID NO: 1981477 - RNA, 19 nt, Artificial Sequence
  Description of Artificial Sequence: Synthetic oligonucleotide
  Antisense strand to SEQ ID NO: 1981476
uauacggaccgcuccaugc

SEQ ID NO: 1981478 - RNA, 19 nt, Artificial Sequence
  Description of Artificial Sequence: Synthetic oligonucleotide
  Sense strand starting at position 1710 of SEQ ID NO: 1880626
cgaauuuggccauggucga

SEQ ID NO: 1981479 - RNA, 19 nt, Artificial Sequence
  Description of Artificial Sequence: Synthetic oligonucleotide
  Antisense strand to SEQ ID NO: 1981478
ucgaccauggccaaauucg

SEQ ID NO: 1981480 - RNA, 19 nt, Artificial Sequence
  Description of Artificial Sequence: Synthetic oligonucleotide
  Sense strand starting at position 1822 of SEQ ID NO: 1880626
agcagagguuagguguuua

SEQ ID NO: 1981481 - RNA, 19 nt, Artificial Sequence
  Description of Artificial Sequence: Synthetic oligonucleotide
  Antisense strand to SEQ ID NO: 1981480
uaaacaccuaaccucugcu

SEQ ID NO: 1981482 - RNA, 19 nt, Artificial Sequence
  Description of Artificial Sequence: Synthetic oligonucleotide
  Sense strand starting at position 1826 of SEQ ID NO: 1880626
gagguuagguguuuaaagu

SEQ ID NO: 1981483 - RNA, 19 nt, Artificial Sequence
  Description of Artificial Sequence: Synthetic oligonucleotide
  Antisense strand to SEQ ID NO: 1981482
acuuuaaacaccuaaccuc

SEQ ID NO: 1981484 - RNA, 19 nt, Artificial Sequence
  Description of Artificial Sequence: Synthetic oligonucleotide
  Sense strand starting at position 1827 of SEQ ID NO: 1880626
agguuagguguuuaaaguu

SEQ ID NO: 1981485 - RNA, 19 nt, Artificial Sequence
  Description of Artificial Sequence: Synthetic oligonucleotide
  Antisense strand to SEQ ID NO: 1981484
aacuuuaaacaccuaaccu

SEQ ID NO: 1981486 - RNA, 19 nt, Artificial Sequence
  Description of Artificial Sequence: Synthetic oligonucleotide
  Sense strand starting at position 2203 of SEQ ID NO: 1880626
guuuaaaggagguggguua

SEQ ID NO: 1981487 - RNA, 19 nt, Artificial Sequence
  Description of Artificial Sequence: Synthetic oligonucleotide
  Antisense strand to SEQ ID NO: 1981486
uaacccaccuccuuuaaac

SEQ ID NO: 1981488 - RNA, 19 nt, Artificial Sequence
  Description of Artificial Sequence: Synthetic oligonucleotide
  Sense strand starting at position 2280 of SEQ ID NO: 1880626
gaggcuggcugguuguaua

SEQ ID NO: 1981489 - RNA, 19 nt, Artificial Sequence
  Description of Artificial Sequence: Synthetic oligonucleotide
  Antisense strand to SEQ ID NO: 1981488
uauacaaccagccagccuc

SEQ ID NO: 1981490 - RNA, 19 nt, Artificial Sequence
  Description of Artificial Sequence: Synthetic oligonucleotide
  Sense strand starting at position 2326 of SEQ ID NO: 1880626
ugcagacaucgcuuucguu

SEQ ID NO: 1981491 - RNA, 19 nt, Artificial Sequence
  Description of Artificial Sequence: Synthetic oligonucleotide
  Antisense strand to SEQ ID NO: 1981490
aacgaaagcgaugucugca

SEQ ID NO: 1981492 - RNA, 19 nt, Artificial Sequence
  Description of Artificial Sequence: Synthetic oligonucleotide
  Sense strand starting at position 2327 of SEQ ID NO: 1880626
gcagacaucgcuuucguuu

SEQ ID NO: 1981493 - RNA, 19 nt, Artificial Sequence
  Description of Artificial Sequence: Synthetic oligonucleotide
  Antisense strand to SEQ ID NO: 1981492
aaacgaaagcgaugucugc

SEQ ID NO: 1981494 - RNA, 19 nt, Artificial Sequence
  Description of Artificial Sequence: Synthetic oligonucleotide
  Sense strand starting at position 2377 of SEQ ID NO: 1880626
ccaggucccuauucuugau

SEQ ID NO: 1981495 - RNA, 19 nt, Artificial Sequence
  Description of Artificial Sequence: Synthetic oligonucleotide
  Antisense strand to SEQ ID NO: 1981494
aucaagaauagggaccugg

SEQ ID NO: 1981496 - RNA, 19 nt, Artificial Sequence
  Description of Artificial Sequence: Synthetic oligonucleotide
  Sense strand starting at position 2412 of SEQ ID NO: 1880626
uugcuaaaucgucauguug

SEQ ID NO: 1981497 - RNA, 19 nt, Artificial Sequence
  Description of Artificial Sequence: Synthetic oligonucleotide
  Antisense strand to SEQ ID NO: 1981496
caacaugacgauuuagcaa

SEQ ID NO: 1981498 - RNA, 19 nt, Artificial Sequence
  Description of Artificial Sequence: Synthetic oligonucleotide
  Sense strand starting at position 2788 of SEQ ID NO: 1880626
cgaggacauuuccauaaca

SEQ ID NO: 1981499 - RNA, 19 nt, Artificial Sequence
  Description of Artificial Sequence: Synthetic oligonucleotide
  Antisense strand to SEQ ID NO: 1981498
uguuauggaaauguccucg

SEQ ID NO: 1981500 - RNA, 19 nt, Artificial Sequence
  Description of Artificial Sequence: Synthetic oligonucleotide
  Sense strand starting at position 2896 of SEQ ID NO: 1880626
ugaccuggcuucuuugaaa

SEQ ID NO: 1981501 - RNA, 19 nt, Artificial Sequence
  Description of Artificial Sequence: Synthetic oligonucleotide
  Antisense strand to SEQ ID NO: 1981500
uuucaaagaagccagguca

SEQ ID NO: 1981502 - RNA, 19 nt, Artificial Sequence
  Description of Artificial Sequence: Synthetic oligonucleotide
  Sense strand starting at position 2939 of SEQ ID NO: 1880626
gggagcccacauugguaaa

SEQ ID NO: 1981503 - RNA, 19 nt, Artificial Sequence
  Description of Artificial Sequence: Synthetic oligonucleotide
  Antisense strand to SEQ ID NO: 1981502
uuuaccaaugugggcuccc

SEQ ID NO: 1981504 - RNA, 19 nt, Artificial Sequence
  Description of Artificial Sequence: Synthetic oligonucleotide
  Sense strand starting at position 2984 of SEQ ID NO: 1880626
guuuaauggcuccauaggu

SEQ ID NO: 1981505 - RNA, 19 nt, Artificial Sequence
  Description of Artificial Sequence: Synthetic oligonucleotide
  Antisense strand to SEQ ID NO: 1981504
accuauggagccauuaaac

SEQ ID NO: 1981506 - RNA, 19 nt, Artificial Sequence
  Description of Artificial Sequence: Synthetic oligonucleotide
  Sense strand starting at position 166 of SEQ ID NO: 1880627
ucaauaaacugcuaggaua

SEQ ID NO: 1981507 - RNA, 19 nt, Artificial Sequence
  Description of Artificial Sequence: Synthetic oligonucleotide
  Antisense strand to SEQ ID NO: 1981506
uauccuagcaguuuauuga

SEQ ID NO: 1981508 - RNA, 19 nt, Artificial Sequence
  Description of Artificial Sequence: Synthetic oligonucleotide
  Sense strand starting at position 205 of SEQ ID NO: 1880627
ggaauacaucuaggccguu

SEQ ID NO: 1981509 - RNA, 19 nt, Artificial Sequence
  Description of Artificial Sequence: Synthetic oligonucleotide
  Antisense strand to SEQ ID NO: 1981508
aacggccuagauguauucc

SEQ ID NO: 1981510 - RNA, 19 nt, Artificial Sequence
  Description of Artificial Sequence: Synthetic oligonucleotide
  Sense strand starting at position 206 of SEQ ID NO: 1880627
gaauacaucuaggccguua

SEQ ID NO: 1981511 - RNA, 19 nt, Artificial Sequence
  Description of Artificial Sequence: Synthetic oligonucleotide
  Antisense strand to SEQ ID NO: 1981510
uaacggccuagauguauuc

SEQ ID NO: 1981512 - RNA, 19 nt, Artificial Sequence
  Description of Artificial Sequence: Synthetic oligonucleotide
  Sense strand starting at position 2010 of SEQ ID NO: 1880627
gcagucauauaccgagauu

SEQ ID NO: 1981513 - RNA, 19 nt, Artificial Sequence
  Description of Artificial Sequence: Synthetic oligonucleotide
  Antisense strand to SEQ ID NO: 1981512
aaucucgguauaugacugc

SEQ ID NO: 1981514 - RNA, 19 nt, Artificial Sequence
  Description of Artificial Sequence: Synthetic oligonucleotide
  Sense strand starting at position 2013 of SEQ ID NO: 1880627
gucauauaccgagauuaua

SEQ ID NO: 1981515 - RNA, 19 nt, Artificial Sequence
  Description of Artificial Sequence: Synthetic oligonucleotide
  Antisense strand to SEQ ID NO: 1981514
uauaaucucgguauaugac

SEQ ID NO: 1981516 - RNA, 19 nt, Artificial Sequence
  Description of Artificial Sequence: Synthetic oligonucleotide
  Sense strand starting at position 2037 of SEQ ID NO: 1880627
gaggauuccugacugcaug

SEQ ID NO: 1981517 - RNA, 19 nt, Artificial Sequence
  Description of Artificial Sequence: Synthetic oligonucleotide
  Antisense strand to SEQ ID NO: 1981516
caugcagucaggaauccuc

SEQ ID NO: 1981518 - RNA, 19 nt, Artificial Sequence
  Description of Artificial Sequence: Synthetic oligonucleotide
  Sense strand starting at position 2045 of SEQ ID NO: 1880627
cugacugcauguucugauu

SEQ ID NO: 1981519 - RNA, 19 nt, Artificial Sequence
  Description of Artificial Sequence: Synthetic oligonucleotide
  Antisense strand to SEQ ID NO: 1981518
aaucagaacaugcagucag

SEQ ID NO: 1981520 - RNA, 19 nt, Artificial Sequence
  Description of Artificial Sequence: Synthetic oligonucleotide
  Sense strand starting at position 2081 of SEQ ID NO: 1880627
caggguuacuuggauugga

SEQ ID NO: 1981521 - RNA, 19 nt, Artificial Sequence
  Description of Artificial Sequence: Synthetic oligonucleotide
  Antisense strand to SEQ ID NO: 1981520
uccaauccaaguaacccug

SEQ ID NO: 1981522 - RNA, 19 nt, Artificial Sequence
  Description of Artificial Sequence: Synthetic oligonucleotide
  Sense strand starting at position 2125 of SEQ ID NO: 1880627
gagagccagucuuaagaca

SEQ ID NO: 1981523 - RNA, 19 nt, Artificial Sequence
  Description of Artificial Sequence: Synthetic oligonucleotide
  Antisense strand to SEQ ID NO: 1981522
ugucuuaagacuggcucuc

SEQ ID NO: 1981524 - RNA, 19 nt, Artificial Sequence
  Description of Artificial Sequence: Synthetic oligonucleotide
  Sense strand starting at position 2210 of SEQ ID NO: 1880627
gaacauguagucugggaac

SEQ ID NO: 1981525 - RNA, 19 nt, Artificial Sequence
  Description of Artificial Sequence: Synthetic oligonucleotide
  Antisense strand to SEQ ID NO: 1981524
guucccagacuacauguuc

SEQ ID NO: 1981526 - RNA, 19 nt, Artificial Sequence
  Description of Artificial Sequence: Synthetic oligonucleotide
  Sense strand starting at position 2212 of SEQ ID NO: 1880627
acauguagucugggaacca

SEQ ID NO: 1981527 - RNA, 19 nt, Artificial Sequence
  Description of Artificial Sequence: Synthetic oligonucleotide
  Antisense strand to SEQ ID NO: 1981526
ugguucccagacuacaugu

SEQ ID NO: 1981528 - RNA, 19 nt, Artificial Sequence
  Description of Artificial Sequence: Synthetic oligonucleotide
  Sense strand starting at position 2234 of SEQ ID NO: 1880627
gugcguaaccucaguaggu

SEQ ID NO: 1981529 - RNA, 19 nt, Artificial Sequence
  Description of Artificial Sequence: Synthetic oligonucleotide
  Antisense strand to SEQ ID NO: 1981528
accuacugagguuacgcac

SEQ ID NO: 1981530 - RNA, 19 nt, Artificial Sequence
  Description of Artificial Sequence: Synthetic oligonucleotide
  Sense strand starting at position 2235 of SEQ ID NO: 1880627
ugcguaaccucaguaggua

SEQ ID NO: 1981531 - RNA, 19 nt, Artificial Sequence
  Description of Artificial Sequence: Synthetic oligonucleotide
  Antisense strand to SEQ ID NO: 1981530
uaccuacugagguuacgca

SEQ ID NO: 1981532 - RNA, 19 nt, Artificial Sequence
  Description of Artificial Sequence: Synthetic oligonucleotide
  Sense strand starting at position 2236 of SEQ ID NO: 1880627
gcguaaccucaguagguaa

SEQ ID NO: 1981533 - RNA, 19 nt, Artificial Sequence
  Description of Artificial Sequence: Synthetic oligonucleotide
  Antisense strand to SEQ ID NO: 1981532
uuaccuacugagguuacgc

SEQ ID NO: 1981534 - RNA, 19 nt, Artificial Sequence
  Description of Artificial Sequence: Synthetic oligonucleotide
  Sense strand starting at position 2292 of SEQ ID NO: 1880627
aagugugggcguuugguau

SEQ ID NO: 1981535 - RNA, 19 nt, Artificial Sequence
  Description of Artificial Sequence: Synthetic oligonucleotide
  Antisense strand to SEQ ID NO: 1981534
auaccaaacgcccacacuu

SEQ ID NO: 1981536 - RNA, 19 nt, Artificial Sequence
  Description of Artificial Sequence: Synthetic oligonucleotide
  Sense strand starting at position 2368 of SEQ ID NO: 1880627
gguggugucgacaguggua

SEQ ID NO: 1981537 - RNA, 19 nt, Artificial Sequence
  Description of Artificial Sequence: Synthetic oligonucleotide
  Antisense strand to SEQ ID NO: 1981536
uaccacugucgacaccacc

SEQ ID NO: 1981538 - RNA, 19 nt, Artificial Sequence
  Description of Artificial Sequence: Synthetic oligonucleotide
  Sense strand starting at position 2522 of SEQ ID NO: 1880627
cggccagagugguagaaau

SEQ ID NO: 1981539 - RNA, 19 nt, Artificial Sequence
  Description of Artificial Sequence: Synthetic oligonucleotide
  Antisense strand to SEQ ID NO: 1981538
auuucuaccacucuggccg

SEQ ID NO: 1981540 - RNA, 19 nt, Artificial Sequence
  Description of Artificial Sequence: Synthetic oligonucleotide
  Sense strand starting at position 2533 of SEQ ID NO: 1880627
guagaaauguccuggugua

SEQ ID NO: 1981541 - RNA, 19 nt, Artificial Sequence
  Description of Artificial Sequence: Synthetic oligonucleotide
  Antisense strand to SEQ ID NO: 1981540
uacaccaggacauuucuac

SEQ ID NO: 1981542 - RNA, 19 nt, Artificial Sequence
  Description of Artificial Sequence: Synthetic oligonucleotide
  Sense strand starting at position 2534 of SEQ ID NO: 1880627
uagaaauguccugguguag

SEQ ID NO: 1981543 - RNA, 19 nt, Artificial Sequence
  Description of Artificial Sequence: Synthetic oligonucleotide
  Antisense strand to SEQ ID NO: 1981542
cuacaccaggacauuucua

SEQ ID NO: 1981544 - RNA, 19 nt, Artificial Sequence
  Description of Artificial Sequence: Synthetic oligonucleotide
  Sense strand starting at position 2543 of SEQ ID NO: 1880627
ccugguguaggugaguuau

SEQ ID NO: 1981545 - RNA, 19 nt, Artificial Sequence
  Description of Artificial Sequence: Synthetic oligonucleotide
  Antisense strand to SEQ ID NO: 1981544
auaacucaccuacaccagg

SEQ ID NO: 1981546 - RNA, 19 nt, Artificial Sequence
  Description of Artificial Sequence: Synthetic oligonucleotide
  Sense strand starting at position 2982 of SEQ ID NO: 1880627
gaggcauugucuugugcag

SEQ ID NO: 1981547 - RNA, 19 nt, Artificial Sequence
  Description of Artificial Sequence: Synthetic oligonucleotide
  Antisense strand to SEQ ID NO: 1981546
cugcacaagacaaugccuc

SEQ ID NO: 1981548 - RNA, 19 nt, Artificial Sequence
  Description of Artificial Sequence: Synthetic oligonucleotide
  Sense strand starting at position 2984 of SEQ ID NO: 1880627
ggcauugucuugugcagca

SEQ ID NO: 1981549 - RNA, 19 nt, Artificial Sequence
  Description of Artificial Sequence: Synthetic oligonucleotide
  Antisense strand to SEQ ID NO: 1981548
ugcugcacaagacaaugcc

SEQ ID NO: 1981550 - RNA, 19 nt, Artificial Sequence
  Description of Artificial Sequence: Synthetic oligonucleotide
  Sense strand starting at position 3028 of SEQ ID NO: 1880627
ggcacuaucgggugcuaca

SEQ ID NO: 1981551 - RNA, 19 nt, Artificial Sequence
  Description of Artificial Sequence: Synthetic oligonucleotide
  Antisense strand to SEQ ID NO: 1981550
uguagcacccgauagugcc

SEQ ID NO: 1981552 - RNA, 19 nt, Artificial Sequence
  Description of Artificial Sequence: Synthetic oligonucleotide
  Sense strand starting at position 3249 of SEQ ID NO: 1880627
ucgggugacucuucucuuu

SEQ ID NO: 1981553 - RNA, 19 nt, Artificial Sequence
  Description of Artificial Sequence: Synthetic oligonucleotide
  Antisense strand to SEQ ID NO: 1981552
aaagagaagagucacccga

SEQ ID NO: 1981554 - RNA, 19 nt, Artificial Sequence
  Description of Artificial Sequence: Synthetic oligonucleotide
  Sense strand starting at position 3277 of SEQ ID NO: 1880627
cagaguuccuccuggugca

SEQ ID NO: 1981555 - RNA, 19 nt, Artificial Sequence
  Description of Artificial Sequence: Synthetic oligonucleotide
  Antisense strand to SEQ ID NO: 1981554
ugcaccaggaggaacucug

SEQ ID NO: 1981556 - RNA, 19 nt, Artificial Sequence
  Description of Artificial Sequence: Synthetic oligonucleotide
  Sense strand starting at position 3278 of SEQ ID NO: 1880627
agaguuccuccuggugcaa

SEQ ID NO: 1981557 - RNA, 19 nt, Artificial Sequence
  Description of Artificial Sequence: Synthetic oligonucleotide
  Antisense strand to SEQ ID NO: 1981556
uugcaccaggaggaacucu

SEQ ID NO: 1981558 - RNA, 19 nt, Artificial Sequence
  Description of Artificial Sequence: Synthetic oligonucleotide
  Sense strand starting at position 3549 of SEQ ID NO: 1880627
ccagcaauuucuggccagu

SEQ ID NO: 1981559 - RNA, 19 nt, Artificial Sequence
  Description of Artificial Sequence: Synthetic oligonucleotide
  Antisense strand to SEQ ID NO: 1981558
acuggccagaaauugcugg

SEQ ID NO: 1981560 - RNA, 19 nt, Artificial Sequence
  Description of Artificial Sequence: Synthetic oligonucleotide
  Sense strand starting at position 3665 of SEQ ID NO: 1880627
gucugagugccuuagcuga

SEQ ID NO: 1981561 - RNA, 19 nt, Artificial Sequence
  Description of Artificial Sequence: Synthetic oligonucleotide
  Antisense strand to SEQ ID NO: 1981560
ucagcuaaggcacucagac

SEQ ID NO: 1981562 - RNA, 19 nt, Artificial Sequence
  Description of Artificial Sequence: Synthetic oligonucleotide
  Sense strand starting at position 3971 of SEQ ID NO: 1880627
cauugauggcgacagcaau

SEQ ID NO: 1981563 - RNA, 19 nt, Artificial Sequence
  Description of Artificial Sequence: Synthetic oligonucleotide
  Antisense strand to SEQ ID NO: 1981562
auugcugucgccaucaaug

SEQ ID NO: 1981564 - RNA, 19 nt, Artificial Sequence
  Description of Artificial Sequence: Synthetic oligonucleotide
  Sense strand starting at position 3983 of SEQ ID NO: 1880627
cagcaauuguauuggcauu

SEQ ID NO: 1981565 - RNA, 19 nt, Artificial Sequence
  Description of Artificial Sequence: Synthetic oligonucleotide
  Antisense strand to SEQ ID NO: 1981564
aaugccaauacaauugcug

SEQ ID NO: 1981566 - RNA, 19 nt, Artificial Sequence
  Description of Artificial Sequence: Synthetic oligonucleotide
  Sense strand starting at position 1 of SEQ ID NO: 1880628
ccuuauccagaaugagguu

SEQ ID NO: 1981567 - RNA, 19 nt, Artificial Sequence
  Description of Artificial Sequence: Synthetic oligonucleotide
  Antisense strand to SEQ ID NO: 1981566
aaccucauucuggauaagg

SEQ ID NO: 1981568 - RNA, 19 nt, Artificial Sequence
  Description of Artificial Sequence: Synthetic oligonucleotide
  Sense strand starting at position 8 of SEQ ID NO: 1880628
cagaaugagguuugggcaa

SEQ ID NO: 1981569 - RNA, 19 nt, Artificial Sequence
  Description of Artificial Sequence: Synthetic oligonucleotide
  Antisense strand to SEQ ID NO: 1981568
uugcccaaaccucauucug

SEQ ID NO: 1981570 - RNA, 19 nt, Artificial Sequence
  Description of Artificial Sequence: Synthetic oligonucleotide
  Sense strand starting at position 31 of SEQ ID NO: 1880628
uuuguacuacuguaauuac

SEQ ID NO: 1981571 - RNA, 19 nt, Artificial Sequence
  Description of Artificial Sequence: Synthetic oligonucleotide
  Antisense strand to SEQ ID NO: 1981570
guaauuacaguaguacaaa

SEQ ID NO: 1981572 - RNA, 19 nt, Artificial Sequence
  Description of Artificial Sequence: Synthetic oligonucleotide
  Sense strand starting at position 34 of SEQ ID NO: 1880628
guacuacuguaauuacauu

SEQ ID NO: 1981573 - RNA, 19 nt, Artificial Sequence
  Description of Artificial Sequence: Synthetic oligonucleotide
  Antisense strand to SEQ ID NO: 1981572
aauguaauuacaguaguac

SEQ ID NO: 1981574 - RNA, 19 nt, Artificial Sequence
  Description of Artificial Sequence: Synthetic oligonucleotide
  Sense strand starting at position 90 of SEQ ID NO: 1880628
uguauaaaggccuagaagu

SEQ ID NO: 1981575 - RNA, 19 nt, Artificial Sequence
  Description of Artificial Sequence: Synthetic oligonucleotide
  Antisense strand to SEQ ID NO: 1981574
acuucuaggccuuuauaca

SEQ ID NO: 1981576 - RNA, 19 nt, Artificial Sequence
  Description of Artificial Sequence: Synthetic oligonucleotide
  Sense strand starting at position 259 of SEQ ID NO: 1880628
gguaaucuggcacaucaug

SEQ ID NO: 1981577 - RNA, 19 nt, Artificial Sequence
  Description of Artificial Sequence: Synthetic oligonucleotide
  Antisense strand to SEQ ID NO: 1981576
caugaugugccagauuacc

SEQ ID NO: 1981578 - RNA, 19 nt, Artificial Sequence
  Description of Artificial Sequence: Synthetic oligonucleotide
  Sense strand starting at position 265 of SEQ ID NO: 1880628
cuggcacaucaugguuaaa

SEQ ID NO: 1981579 - RNA, 19 nt, Artificial Sequence
  Description of Artificial Sequence: Synthetic oligonucleotide
  Antisense strand to SEQ ID NO: 1981578
uuuaaccaugaugugccag

SEQ ID NO: 1981580 - RNA, 19 nt, Artificial Sequence
  Description of Artificial Sequence: Synthetic oligonucleotide
  Sense strand starting at position 268 of SEQ ID NO: 1880628
gcacaucaugguuaaagca

SEQ ID NO: 1981581 - RNA, 19 nt, Artificial Sequence
  Description of Artificial Sequence: Synthetic oligonucleotide
  Antisense strand to SEQ ID NO: 1981580
ugcuuuaaccaugaugugc

SEQ ID NO: 1981582 - RNA, 19 nt, Artificial Sequence
  Description of Artificial Sequence: Synthetic oligonucleotide
  Sense strand starting at position 330 of SEQ ID NO: 1880628
guuugcaaagggugacuua

SEQ ID NO: 1981583 - RNA, 19 nt, Artificial Sequence
  Description of Artificial Sequence: Synthetic oligonucleotide
  Antisense strand to SEQ ID NO: 1981582
uaagucacccuuugcaaac

SEQ ID NO: 1981584 - RNA, 19 nt, Artificial Sequence
  Description of Artificial Sequence: Synthetic oligonucleotide
  Sense strand starting at position 339 of SEQ ID NO: 1880628
gggugacuuaccugaaccu

SEQ ID NO: 1981585 - RNA, 19 nt, Artificial Sequence
  Description of Artificial Sequence: Synthetic oligonucleotide
  Antisense strand to SEQ ID NO: 1981584
agguucagguaagucaccc

SEQ ID NO: 1981586 - RNA, 19 nt, Artificial Sequence
  Description of Artificial Sequence: Synthetic oligonucleotide
  Sense strand starting at position 340 of SEQ ID NO: 1880628
ggugacuuaccugaaccuu

SEQ ID NO: 1981587 - RNA, 19 nt, Artificial Sequence
  Description of Artificial Sequence: Synthetic oligonucleotide
  Antisense strand to SEQ ID NO: 1981586
aagguucagguaagucacc

SEQ ID NO: 1981588 - RNA, 19 nt, Artificial Sequence
  Description of Artificial Sequence: Synthetic oligonucleotide
  Sense strand starting at position 626 of SEQ ID NO: 1880628
auuuaaggaucauaaacgu

SEQ ID NO: 1981589 - RNA, 19 nt, Artificial Sequence
  Description of Artificial Sequence: Synthetic oligonucleotide
  Antisense strand to SEQ ID NO: 1981588
acguuuaugauccuuaaau

SEQ ID NO: 1981590 - RNA, 19 nt, Artificial Sequence
  Description of Artificial Sequence: Synthetic oligonucleotide
  Sense strand starting at position 632 of SEQ ID NO: 1880628
ggaucauaaacguaggugu

SEQ ID NO: 1981591 - RNA, 19 nt, Artificial Sequence
  Description of Artificial Sequence: Synthetic oligonucleotide
  Antisense strand to SEQ ID NO: 1981590
acaccuacguuuaugaucc

SEQ ID NO: 1981592 - RNA, 19 nt, Artificial Sequence
  Description of Artificial Sequence: Synthetic oligonucleotide
  Sense strand starting at position 848 of SEQ ID NO: 1880628
uccuuucccuaaucggaaa

SEQ ID NO: 1981593 - RNA, 19 nt, Artificial Sequence
  Description of Artificial Sequence: Synthetic oligonucleotide
  Antisense strand to SEQ ID NO: 1981592
uuuccgauuagggaaagga

SEQ ID NO: 1981594 - RNA, 19 nt, Artificial Sequence
  Description of Artificial Sequence: Synthetic oligonucleotide
  Sense strand starting at position 894 of SEQ ID NO: 1880628
gcagccucccaaggauuaa

SEQ ID NO: 1981595 - RNA, 19 nt, Artificial Sequence
  Description of Artificial Sequence: Synthetic oligonucleotide
  Antisense strand to SEQ ID NO: 1981594
uuaauccuugggaggcugc

SEQ ID NO: 1981596 - RNA, 19 nt, Artificial Sequence
  Description of Artificial Sequence: Synthetic oligonucleotide
  Sense strand starting at position 943 of SEQ ID NO: 1880628
uccaucuuggccugaaauu

SEQ ID NO: 1981597 - RNA, 19 nt, Artificial Sequence
  Description of Artificial Sequence: Synthetic oligonucleotide
  Antisense strand to SEQ ID NO: 1981596
aauuucaggccaagaugga

SEQ ID NO: 1981598 - RNA, 19 nt, Artificial Sequence
  Description of Artificial Sequence: Synthetic oligonucleotide
  Sense strand starting at position 944 of SEQ ID NO: 1880628
ccaucuuggccugaaauuc

SEQ ID NO: 1981599 - RNA, 19 nt, Artificial Sequence
  Description of Artificial Sequence: Synthetic oligonucleotide
  Antisense strand to SEQ ID NO: 1981598
gaauuucaggccaagaugg

SEQ ID NO: 1981600 - RNA, 19 nt, Artificial Sequence
  Description of Artificial Sequence: Synthetic oligonucleotide
  Sense strand starting at position 954 of SEQ ID NO: 1880628
cugaaauucugcuuccaag

SEQ ID NO: 1981601 - RNA, 19 nt, Artificial Sequence
  Description of Artificial Sequence: Synthetic oligonucleotide
  Antisense strand to SEQ ID NO: 1981600
cuuggaagcagaauuucag

SEQ ID NO: 1981602 - RNA, 19 nt, Artificial Sequence
  Description of Artificial Sequence: Synthetic oligonucleotide
  Sense strand starting at position 1207 of SEQ ID NO: 1880628
cugaaacuuaagcgucaga

SEQ ID NO: 1981603 - RNA, 19 nt, Artificial Sequence
  Description of Artificial Sequence: Synthetic oligonucleotide
  Antisense strand to SEQ ID NO: 1981602
ucugacgcuuaaguuucag

SEQ ID NO: 1981604 - RNA, 19 nt, Artificial Sequence
  Description of Artificial Sequence: Synthetic oligonucleotide
  Sense strand starting at position 1278 of SEQ ID NO: 1880628
ggauccuggagaugguuua

SEQ ID NO: 1981605 - RNA, 19 nt, Artificial Sequence
  Description of Artificial Sequence: Synthetic oligonucleotide
  Antisense strand to SEQ ID NO: 1981604
uaaaccaucuccaggaucc

SEQ ID NO: 1981606 - RNA, 19 nt, Artificial Sequence
  Description of Artificial Sequence: Synthetic oligonucleotide
  Sense strand starting at position 1279 of SEQ ID NO: 1880628
gauccuggagaugguuuaa

SEQ ID NO: 1981607 - RNA, 19 nt, Artificial Sequence
  Description of Artificial Sequence: Synthetic oligonucleotide
  Antisense strand to SEQ ID NO: 1981606
uuaaaccaucuccaggauc

SEQ ID NO: 1981608 - RNA, 19 nt, Artificial Sequence
  Description of Artificial Sequence: Synthetic oligonucleotide
  Sense strand starting at position 1531 of SEQ ID NO: 1880628
ccgcguugacuccugcgaa

SEQ ID NO: 1981609 - RNA, 19 nt, Artificial Sequence
  Description of Artificial Sequence: Synthetic oligonucleotide
  Antisense strand to SEQ ID NO: 1981608
uucgcaggagucaacgcgg

SEQ ID NO: 1981610 - RNA, 19 nt, Artificial Sequence
  Description of Artificial Sequence: Synthetic oligonucleotide
  Sense strand starting at position 1552 of SEQ ID NO: 1880628
gcuaaaggaagcgauagau

SEQ ID NO: 1981611 - RNA, 19 nt, Artificial Sequence
  Description of Artificial Sequence: Synthetic oligonucleotide
  Antisense strand to SEQ ID NO: 1981610
aucuaucgcuuccuuuagc

SEQ ID NO: 1981612 - RNA, 19 nt, Artificial Sequence
  Description of Artificial Sequence: Synthetic oligonucleotide
  Sense strand starting at position 1565 of SEQ ID NO: 1880628
auagaugucgccuaaggag

SEQ ID NO: 1981613 - RNA, 19 nt, Artificial Sequence
  Description of Artificial Sequence: Synthetic oligonucleotide
  Antisense strand to SEQ ID NO: 1981612
cuccuuaggcgacaucuau

SEQ ID NO: 1981614 - RNA, 19 nt, Artificial Sequence
  Description of Artificial Sequence: Synthetic oligonucleotide
  Sense strand starting at position 1597 of SEQ ID NO: 1880628
gguggaaccucauuccaga

SEQ ID NO: 1981615 - RNA, 19 nt, Artificial Sequence
  Description of Artificial Sequence: Synthetic oligonucleotide
  Antisense strand to SEQ ID NO: 1981614
ucuggaaugagguuccacc

SEQ ID NO: 1981616 - RNA, 19 nt, Artificial Sequence
  Description of Artificial Sequence: Synthetic oligonucleotide
  Sense strand starting at position 1764 of SEQ ID NO: 1880628
ccaaacaaucuucggauga

SEQ ID NO: 1981617 - RNA, 19 nt, Artificial Sequence
  Description of Artificial Sequence: Synthetic oligonucleotide
  Antisense strand to SEQ ID NO: 1981616
ucauccgaagauuguuugg

SEQ ID NO: 1981618 - RNA, 19 nt, Artificial Sequence
  Description of Artificial Sequence: Synthetic oligonucleotide
  Sense strand starting at position 2087 of SEQ ID NO: 1880628
ccgagauuugggugagcuc

SEQ ID NO: 1981619 - RNA, 19 nt, Artificial Sequence
  Description of Artificial Sequence: Synthetic oligonucleotide
  Antisense strand to SEQ ID NO: 1981618
gagcucacccaaaucucgg

SEQ ID NO: 1981620 - RNA, 19 nt, Artificial Sequence
  Description of Artificial Sequence: Synthetic oligonucleotide
  Sense strand starting at position 2139 of SEQ ID NO: 1880628
gagguuucagcuggaggga

SEQ ID NO: 1981621 - RNA, 19 nt, Artificial Sequence
  Description of Artificial Sequence: Synthetic oligonucleotide
  Antisense strand to SEQ ID NO: 1981620
ucccuccagcugaaaccuc

SEQ ID NO: 1981622 - RNA, 19 nt, Artificial Sequence
  Description of Artificial Sequence: Synthetic oligonucleotide
  Sense strand starting at position 2245 of SEQ ID NO: 1880628
gagccaucucggcagauca

SEQ ID NO: 1981623 - RNA, 19 nt, Artificial Sequence
  Description of Artificial Sequence: Synthetic oligonucleotide
  Antisense strand to SEQ ID NO: 1981622
ugaucugccgagauggcuc

SEQ ID NO: 1981624 - RNA, 19 nt, Artificial Sequence
  Description of Artificial Sequence: Synthetic oligonucleotide
  Sense strand starting at position 2247 of SEQ ID NO: 1880628
gccaucucggcagaucaga

SEQ ID NO: 1981625 - RNA, 19 nt, Artificial Sequence
  Description of Artificial Sequence: Synthetic oligonucleotide
  Antisense strand to SEQ ID NO: 1981624
ucugaucugccgagauggc

SEQ ID NO: 1981626 - RNA, 19 nt, Artificial Sequence
  Description of Artificial Sequence: Synthetic oligonucleotide
  Sense strand starting at position 2324 of SEQ ID NO: 1880628
gaagcuuagagcgggagaa

SEQ ID NO: 1981627 - RNA, 19 nt, Artificial Sequence
  Description of Artificial Sequence: Synthetic oligonucleotide
  Antisense strand to SEQ ID NO: 1981626
uucucccgcucuaagcuuc

SEQ ID NO: 1981628 - RNA, 19 nt, Artificial Sequence
  Description of Artificial Sequence: Synthetic oligonucleotide
  Sense strand starting at position 2325 of SEQ ID NO: 1880628
aagcuuagagcgggagaau

SEQ ID NO: 1981629 - RNA, 19 nt, Artificial Sequence
  Description of Artificial Sequence: Synthetic oligonucleotide
  Antisense strand to SEQ ID NO: 1981628
auucucccgcucuaagcuu

SEQ ID NO: 1981630 - RNA, 19 nt, Artificial Sequence
  Description of Artificial Sequence: Synthetic oligonucleotide
  Sense strand starting at position 2326 of SEQ ID NO: 1880628
agcuuagagcgggagaaua

SEQ ID NO: 1981631 - RNA, 19 nt, Artificial Sequence
  Description of Artificial Sequence: Synthetic oligonucleotide
  Antisense strand to SEQ ID NO: 1981630
uauucucccgcucuaagcu

SEQ ID NO: 1981632 - RNA, 19 nt, Artificial Sequence
  Description of Artificial Sequence: Synthetic oligonucleotide
  Sense strand starting at position 2373 of SEQ ID NO: 1880628
ccaggcaauagguguuaaa

SEQ ID NO: 1981633 - RNA, 19 nt, Artificial Sequence
  Description of Artificial Sequence: Synthetic oligonucleotide
  Antisense strand to SEQ ID NO: 1981632
uuuaacaccuauugccugg

SEQ ID NO: 1981634 - RNA, 19 nt, Artificial Sequence
  Description of Artificial Sequence: Synthetic oligonucleotide
  Sense strand starting at position 2579 of SEQ ID NO: 1880628
cagggcuucgcuggagaaa

SEQ ID NO: 1981635 - RNA, 19 nt, Artificial Sequence
  Description of Artificial Sequence: Synthetic oligonucleotide
  Antisense strand to SEQ ID NO: 1981634
uuucuccagcgaagcccug

SEQ ID NO: 1981636 - RNA, 19 nt, Artificial Sequence
  Description of Artificial Sequence: Synthetic oligonucleotide
  Sense strand starting at position 2854 of SEQ ID NO: 1880628
cuuuccgacgaucauaaau

SEQ ID NO: 1981637 - RNA, 19 nt, Artificial Sequence
  Description of Artificial Sequence: Synthetic oligonucleotide
  Antisense strand to SEQ ID NO: 1981636
auuuaugaucgucggaaag

SEQ ID NO: 1981638 - RNA, 19 nt, Artificial Sequence
  Description of Artificial Sequence: Synthetic oligonucleotide
  Sense strand starting at position 3082 of SEQ ID NO: 1880628
uaagcugggucugcagaaa

SEQ ID NO: 1981639 - RNA, 19 nt, Artificial Sequence
  Description of Artificial Sequence: Synthetic oligonucleotide
  Antisense strand to SEQ ID NO: 1981638
uuucugcagacccagcuua

SEQ ID NO: 1981640 - RNA, 19 nt, Artificial Sequence
  Description of Artificial Sequence: Synthetic oligonucleotide
  Sense strand starting at position 3274 of SEQ ID NO: 1880628
cccaauaauuucgaggaaa

SEQ ID NO: 1981641 - RNA, 19 nt, Artificial Sequence
  Description of Artificial Sequence: Synthetic oligonucleotide
  Antisense strand to SEQ ID NO: 1981640
uuuccucgaaauuauuggg

SEQ ID NO: 1981642 - RNA, 19 nt, Artificial Sequence
  Description of Artificial Sequence: Synthetic oligonucleotide
  Sense strand starting at position 3348 of SEQ ID NO: 1880628
cggcguugauucccaauuu

SEQ ID NO: 1981643 - RNA, 19 nt, Artificial Sequence
  Description of Artificial Sequence: Synthetic oligonucleotide
  Antisense strand to SEQ ID NO: 1981642
aaauugggaaucaacgccg

SEQ ID NO: 1981644 - RNA, 19 nt, Artificial Sequence
  Description of Artificial Sequence: Synthetic oligonucleotide
  Sense strand starting at position 3502 of SEQ ID NO: 1880628
gggcgugcgauuuaaugga

SEQ ID NO: 1981645 - RNA, 19 nt, Artificial Sequence
  Description of Artificial Sequence: Synthetic oligonucleotide
  Antisense strand to SEQ ID NO: 1981644
uccauuaaaucgcacgccc

SEQ ID NO: 1981646 - RNA, 19 nt, Artificial Sequence
  Description of Artificial Sequence: Synthetic oligonucleotide
  Sense strand starting at position 192 of SEQ ID NO: 1880629
uguauuuaaugagcuaguu

SEQ ID NO: 1981647 - RNA, 19 nt, Artificial Sequence
  Description of Artificial Sequence: Synthetic oligonucleotide
  Antisense strand to SEQ ID NO: 1981646
aacuagcucauuaaauaca

SEQ ID NO: 1981648 - RNA, 19 nt, Artificial Sequence
  Description of Artificial Sequence: Synthetic oligonucleotide
  Sense strand starting at position 306 of SEQ ID NO: 1880629
ccgauucaccucgagaagu

SEQ ID NO: 1981649 - RNA, 19 nt, Artificial Sequence
  Description of Artificial Sequence: Synthetic oligonucleotide
  Antisense strand to SEQ ID NO: 1981648
acuucucgaggugaaucgg

SEQ ID NO: 1981650 - RNA, 19 nt, Artificial Sequence
  Description of Artificial Sequence: Synthetic oligonucleotide
  Sense strand starting at position 316 of SEQ ID NO: 1880629
ucgagaaguuaggucuagu

SEQ ID NO: 1981651 - RNA, 19 nt, Artificial Sequence
  Description of Artificial Sequence: Synthetic oligonucleotide
  Antisense strand to SEQ ID NO: 1981650
acuagaccuaacuucucga

SEQ ID NO: 1981652 - RNA, 19 nt, Artificial Sequence
  Description of Artificial Sequence: Synthetic oligonucleotide
  Sense strand starting at position 319 of SEQ ID NO: 1880629
agaaguuaggucuaguuau

SEQ ID NO: 1981653 - RNA, 19 nt, Artificial Sequence
  Description of Artificial Sequence: Synthetic oligonucleotide
  Antisense strand to SEQ ID NO: 1981652
auaacuagaccuaacuucu

SEQ ID NO: 1981654 - RNA, 19 nt, Artificial Sequence
  Description of Artificial Sequence: Synthetic oligonucleotide
  Sense strand starting at position 325 of SEQ ID NO: 1880629
uaggucuaguuauugacaa

SEQ ID NO: 1981655 - RNA, 19 nt, Artificial Sequence
  Description of Artificial Sequence: Synthetic oligonucleotide
  Antisense strand to SEQ ID NO: 1981654
uugucaauaacuagaccua

SEQ ID NO: 1981656 - RNA, 19 nt, Artificial Sequence
  Description of Artificial Sequence: Synthetic oligonucleotide
  Sense strand starting at position 358 of SEQ ID NO: 1880629
acugaagacuaugaggaau

SEQ ID NO: 1981657 - RNA, 19 nt, Artificial Sequence
  Description of Artificial Sequence: Synthetic oligonucleotide
  Antisense strand to SEQ ID NO: 1981656
auuccucauagucuucagu

SEQ ID NO: 1981658 - RNA, 19 nt, Artificial Sequence
  Description of Artificial Sequence: Synthetic oligonucleotide
  Sense strand starting at position 381 of SEQ ID NO: 1880629
guagaacugucuuuguuaa

SEQ ID NO: 1981659 - RNA, 19 nt, Artificial Sequence
  Description of Artificial Sequence: Synthetic oligonucleotide
  Antisense strand to SEQ ID NO: 1981658
uuaacaaagacaguucuac

SEQ ID NO: 1981660 - RNA, 19 nt, Artificial Sequence
  Description of Artificial Sequence: Synthetic oligonucleotide
  Sense strand starting at position 383 of SEQ ID NO: 1880629
agaacugucuuuguuaaca

SEQ ID NO: 1981661 - RNA, 19 nt, Artificial Sequence
  Description of Artificial Sequence: Synthetic oligonucleotide
  Antisense strand to SEQ ID NO: 1981660
uguuaacaaagacaguucu

SEQ ID NO: 1981662 - RNA, 19 nt, Artificial Sequence
  Description of Artificial Sequence: Synthetic oligonucleotide
  Sense strand starting at position 404 of SEQ ID NO: 1880629
ccagaaaugugacuccuga

SEQ ID NO: 1981663 - RNA, 19 nt, Artificial Sequence
  Description of Artificial Sequence: Synthetic oligonucleotide
  Antisense strand to SEQ ID NO: 1981662
ucaggagucacauuucugg

SEQ ID NO: 1981664 - RNA, 19 nt, Artificial Sequence
  Description of Artificial Sequence: Synthetic oligonucleotide
  Sense strand starting at position 465 of SEQ ID NO: 1880629
aagggaaagucccuacacu

SEQ ID NO: 1981665 - RNA, 19 nt, Artificial Sequence
  Description of Artificial Sequence: Synthetic oligonucleotide
  Antisense strand to SEQ ID NO: 1981664
aguguagggacuuucccuu

SEQ ID NO: 1981666 - RNA, 19 nt, Artificial Sequence
  Description of Artificial Sequence: Synthetic oligonucleotide
  Sense strand starting at position 546 of SEQ ID NO: 1880629
gcuuaaacuuaauucguua

SEQ ID NO: 1981667 - RNA, 19 nt, Artificial Sequence
  Description of Artificial Sequence: Synthetic oligonucleotide
  Antisense strand to SEQ ID NO: 1981666
uaacgaauuaaguuuaagc

SEQ ID NO: 1981668 - RNA, 19 nt, Artificial Sequence
  Description of Artificial Sequence: Synthetic oligonucleotide
  Sense strand starting at position 549 of SEQ ID NO: 1880629
uaaacuuaauucguuaggu

SEQ ID NO: 1981669 - RNA, 19 nt, Artificial Sequence
  Description of Artificial Sequence: Synthetic oligonucleotide
  Antisense strand to SEQ ID NO: 1981668
accuaacgaauuaaguuua

SEQ ID NO: 1981670 - RNA, 19 nt, Artificial Sequence
  Description of Artificial Sequence: Synthetic oligonucleotide
  Sense strand starting at position 550 of SEQ ID NO: 1880629
aaacuuaauucguuaggua

SEQ ID NO: 1981671 - RNA, 19 nt, Artificial Sequence
  Description of Artificial Sequence: Synthetic oligonucleotide
  Antisense strand to SEQ ID NO: 1981670
uaccuaacgaauuaaguuu

SEQ ID NO: 1981672 - RNA, 19 nt, Artificial Sequence
  Description of Artificial Sequence: Synthetic oligonucleotide
  Sense strand starting at position 551 of SEQ ID NO: 1880629
aacuuaauucguuagguag

SEQ ID NO: 1981673 - RNA, 19 nt, Artificial Sequence
  Description of Artificial Sequence: Synthetic oligonucleotide
  Antisense strand to SEQ ID NO: 1981672
cuaccuaacgaauuaaguu

SEQ ID NO: 1981674 - RNA, 19 nt, Artificial Sequence
  Description of Artificial Sequence: Synthetic oligonucleotide
  Sense strand starting at position 649 of SEQ ID NO: 1880629
cccuuucgugaaugacagu

SEQ ID NO: 1981675 - RNA, 19 nt, Artificial Sequence
  Description of Artificial Sequence: Synthetic oligonucleotide
  Antisense strand to SEQ ID NO: 1981674
acugucauucacgaaaggg

SEQ ID NO: 1981676 - RNA, 19 nt, Artificial Sequence
  Description of Artificial Sequence: Synthetic oligonucleotide
  Sense strand starting at position 650 of SEQ ID NO: 1880629
ccuuucgugaaugacagua

SEQ ID NO: 1981677 - RNA, 19 nt, Artificial Sequence
  Description of Artificial Sequence: Synthetic oligonucleotide
  Antisense strand to SEQ ID NO: 1981676
uacugucauucacgaaagg

SEQ ID NO: 1981678 - RNA, 19 nt, Artificial Sequence
  Description of Artificial Sequence: Synthetic oligonucleotide
  Sense strand starting at position 655 of SEQ ID NO: 1880629
cgugaaugacaguaacaau

SEQ ID NO: 1981679 - RNA, 19 nt, Artificial Sequence
  Description of Artificial Sequence: Synthetic oligonucleotide
  Antisense strand to SEQ ID NO: 1981678
auuguuacugucauucacg

SEQ ID NO: 1981680 - RNA, 19 nt, Artificial Sequence
  Description of Artificial Sequence: Synthetic oligonucleotide
  Sense strand starting at position 813 of SEQ ID NO: 1880629
gucuguagucugguaacgu

SEQ ID NO: 1981681 - RNA, 19 nt, Artificial Sequence
  Description of Artificial Sequence: Synthetic oligonucleotide
  Antisense strand to SEQ ID NO: 1981680
acguuaccagacuacagac

SEQ ID NO: 1981682 - RNA, 19 nt, Artificial Sequence
  Description of Artificial Sequence: Synthetic oligonucleotide
  Sense strand starting at position 1565 of SEQ ID NO: 1880629
agaccacucgguuggacau

SEQ ID NO: 1981683 - RNA, 19 nt, Artificial Sequence
  Description of Artificial Sequence: Synthetic oligonucleotide
  Antisense strand to SEQ ID NO: 1981682
auguccaaccgaguggucu

SEQ ID NO: 1981684 - RNA, 19 nt, Artificial Sequence
  Description of Artificial Sequence: Synthetic oligonucleotide
  Sense strand starting at position 2489 of SEQ ID NO: 1880629
gcggcuuuccacgaggaca

SEQ ID NO: 1981685 - RNA, 19 nt, Artificial Sequence
  Description of Artificial Sequence: Synthetic oligonucleotide
  Antisense strand to SEQ ID NO: 1981684
uguccucguggaaagccgc

SEQ ID NO: 1981686 - RNA, 19 nt, Artificial Sequence
  Description of Artificial Sequence: Synthetic oligonucleotide
  Sense strand starting at position 2513 of SEQ ID NO: 1880629
gcggguauccaucauauac

SEQ ID NO: 1981687 - RNA, 19 nt, Artificial Sequence
  Description of Artificial Sequence: Synthetic oligonucleotide
  Antisense strand to SEQ ID NO: 1981686
guauaugauggauacccgc

SEQ ID NO: 1981688 - RNA, 19 nt, Artificial Sequence
  Description of Artificial Sequence: Synthetic oligonucleotide
  Sense strand starting at position 2532 of SEQ ID NO: 1880629
aggcaucucucaucgauuu

SEQ ID NO: 1981689 - RNA, 19 nt, Artificial Sequence
  Description of Artificial Sequence: Synthetic oligonucleotide
  Antisense strand to SEQ ID NO: 1981688
aaaucgaugagagaugccu

SEQ ID NO: 1981690 - RNA, 19 nt, Artificial Sequence
  Description of Artificial Sequence: Synthetic oligonucleotide
  Sense strand starting at position 2584 of SEQ ID NO: 1880629
ccgggaaguucaucuguag

SEQ ID NO: 1981691 - RNA, 19 nt, Artificial Sequence
  Description of Artificial Sequence: Synthetic oligonucleotide
  Antisense strand to SEQ ID NO: 1981690
cuacagaugaacuucccgg

SEQ ID NO: 1981692 - RNA, 19 nt, Artificial Sequence
  Description of Artificial Sequence: Synthetic oligonucleotide
  Sense strand starting at position 2587 of SEQ ID NO: 1880629
ggaaguucaucuguagaag

SEQ ID NO: 1981693 - RNA, 19 nt, Artificial Sequence
  Description of Artificial Sequence: Synthetic oligonucleotide
  Antisense strand to SEQ ID NO: 1981692
cuucuacagaugaacuucc

SEQ ID NO: 1981694 - RNA, 19 nt, Artificial Sequence
  Description of Artificial Sequence: Synthetic oligonucleotide
  Sense strand starting at position 2661 of SEQ ID NO: 1880629
gggucacucuuaccaccua

SEQ ID NO: 1981695 - RNA, 19 nt, Artificial Sequence
  Description of Artificial Sequence: Synthetic oligonucleotide
  Antisense strand to SEQ ID NO: 1981694
uaggugguaagagugaccc

SEQ ID NO: 1981696 - RNA, 19 nt, Artificial Sequence
  Description of Artificial Sequence: Synthetic oligonucleotide
  Sense strand starting at position 2719 of SEQ ID NO: 1880629
guuguauuuauguaggugu

SEQ ID NO: 1981697 - RNA, 19 nt, Artificial Sequence
  Description of Artificial Sequence: Synthetic oligonucleotide
  Antisense strand to SEQ ID NO: 1981696
acaccuacauaaauacaac

SEQ ID NO: 1981698 - RNA, 19 nt, Artificial Sequence
  Description of Artificial Sequence: Synthetic oligonucleotide
  Sense strand starting at position 2722 of SEQ ID NO: 1880629
guauuuauguagguguaug

SEQ ID NO: 1981699 - RNA, 19 nt, Artificial Sequence
  Description of Artificial Sequence: Synthetic oligonucleotide
  Antisense strand to SEQ ID NO: 1981698
cauacaccuacauaaauac

SEQ ID NO: 1981700 - RNA, 19 nt, Artificial Sequence
  Description of Artificial Sequence: Synthetic oligonucleotide
  Sense strand starting at position 2727 of SEQ ID NO: 1880629
uauguagguguaugucaua

SEQ ID NO: 1981701 - RNA, 19 nt, Artificial Sequence
  Description of Artificial Sequence: Synthetic oligonucleotide
  Antisense strand to SEQ ID NO: 1981700
uaugacauacaccuacaua

SEQ ID NO: 1981702 - RNA, 19 nt, Artificial Sequence
  Description of Artificial Sequence: Synthetic oligonucleotide
  Sense strand starting at position 2752 of SEQ ID NO: 1880629
uaacuaagguguuugauau

SEQ ID NO: 1981703 - RNA, 19 nt, Artificial Sequence
  Description of Artificial Sequence: Synthetic oligonucleotide
  Antisense strand to SEQ ID NO: 1981702
auaucaaacaccuuaguua

SEQ ID NO: 1981704 - RNA, 19 nt, Artificial Sequence
  Description of Artificial Sequence: Synthetic oligonucleotide
  Sense strand starting at position 2753 of SEQ ID NO: 1880629
aacuaagguguuugauaua

SEQ ID NO: 1981705 - RNA, 19 nt, Artificial Sequence
  Description of Artificial Sequence: Synthetic oligonucleotide
  Antisense strand to SEQ ID NO: 1981704
uauaucaaacaccuuaguu

SEQ ID NO: 1981706 - RNA, 19 nt, Artificial Sequence
  Description of Artificial Sequence: Synthetic oligonucleotide
  Sense strand starting at position 2765 of SEQ ID NO: 1880629
ugauauaacuagccucguu

SEQ ID NO: 1981707 - RNA, 19 nt, Artificial Sequence
  Description of Artificial Sequence: Synthetic oligonucleotide
  Antisense strand to SEQ ID NO: 1981706
aacgaggcuaguuauauca

SEQ ID NO: 1981708 - RNA, 19 nt, Artificial Sequence
  Description of Artificial Sequence: Synthetic oligonucleotide
  Sense strand starting at position 2810 of SEQ ID NO: 1880629
caaggaguguaccuacgau

SEQ ID NO: 1981709 - RNA, 19 nt, Artificial Sequence
  Description of Artificial Sequence: Synthetic oligonucleotide
  Antisense strand to SEQ ID NO: 1981708
aucguagguacacuccuug

SEQ ID NO: 1981710 - RNA, 19 nt, Artificial Sequence
  Description of Artificial Sequence: Synthetic oligonucleotide
  Sense strand starting at position 2817 of SEQ ID NO: 1880629
uguaccuacgauuauaaga

SEQ ID NO: 1981711 - RNA, 19 nt, Artificial Sequence
  Description of Artificial Sequence: Synthetic oligonucleotide
  Antisense strand to SEQ ID NO: 1981710
ucuuauaaucguagguaca

SEQ ID NO: 1981712 - RNA, 19 nt, Artificial Sequence
  Description of Artificial Sequence: Synthetic oligonucleotide
  Sense strand starting at position 2833 of SEQ ID NO: 1880629
agagcuguugaaugugaac

SEQ ID NO: 1981713 - RNA, 19 nt, Artificial Sequence
  Description of Artificial Sequence: Synthetic oligonucleotide
  Antisense strand to SEQ ID NO: 1981712
guucacauucaacagcucu

SEQ ID NO: 1981714 - RNA, 19 nt, Artificial Sequence
  Description of Artificial Sequence: Synthetic oligonucleotide
  Sense strand starting at position 2995 of SEQ ID NO: 1880629
gaggaaguguuauuguuac

SEQ ID NO: 1981715 - RNA, 19 nt, Artificial Sequence
  Description of Artificial Sequence: Synthetic oligonucleotide
  Antisense strand to SEQ ID NO: 1981714
guaacaauaacacuuccuc

SEQ ID NO: 1981716 - RNA, 19 nt, Artificial Sequence
  Description of Artificial Sequence: Synthetic oligonucleotide
  Sense strand starting at position 3057 of SEQ ID NO: 1880629
gcauacauccaaugaaagu

SEQ ID NO: 1981717 - RNA, 19 nt, Artificial Sequence
  Description of Artificial Sequence: Synthetic oligonucleotide
  Antisense strand to SEQ ID NO: 1981716
acuuucauuggauguaugc

SEQ ID NO: 1981718 - RNA, 19 nt, Artificial Sequence
  Description of Artificial Sequence: Synthetic oligonucleotide
  Sense strand starting at position 3118 of SEQ ID NO: 1880629
gguaccuccugccuauaau

SEQ ID NO: 1981719 - RNA, 19 nt, Artificial Sequence
  Description of Artificial Sequence: Synthetic oligonucleotide
  Antisense strand to SEQ ID NO: 1981718
auuauaggcaggagguacc

SEQ ID NO: 1981720 - RNA, 19 nt, Artificial Sequence
  Description of Artificial Sequence: Synthetic oligonucleotide
  Sense strand starting at position 3461 of SEQ ID NO: 1880629
guagaugacuggcugucua

SEQ ID NO: 1981721 - RNA, 19 nt, Artificial Sequence
  Description of Artificial Sequence: Synthetic oligonucleotide
  Antisense strand to SEQ ID NO: 1981720
uagacagccagucaucuac

SEQ ID NO: 1981722 - RNA, 19 nt, Artificial Sequence
  Description of Artificial Sequence: Synthetic oligonucleotide
  Sense strand starting at position 3465 of SEQ ID NO: 1880629
augacuggcugucuaguau

SEQ ID NO: 1981723 - RNA, 19 nt, Artificial Sequence
  Description of Artificial Sequence: Synthetic oligonucleotide
  Antisense strand to SEQ ID NO: 1981722
auacuagacagccagucau

SEQ ID NO: 1981724 - RNA, 19 nt, Artificial Sequence
  Description of Artificial Sequence: Synthetic oligonucleotide
  Sense strand starting at position 3573 of SEQ ID NO: 1880629
uguccuaaagccuagucaa

SEQ ID NO: 1981725 - RNA, 19 nt, Artificial Sequence
  Description of Artificial Sequence: Synthetic oligonucleotide
  Antisense strand to SEQ ID NO: 1981724
uugacuaggcuuuaggaca

SEQ ID NO: 1981726 - RNA, 19 nt, Artificial Sequence
  Description of Artificial Sequence: Synthetic oligonucleotide
  Sense strand starting at position 16 of SEQ ID NO: 1880630
ccagaaaugugacuccuga

SEQ ID NO: 1981727 - RNA, 19 nt, Artificial Sequence
  Description of Artificial Sequence: Synthetic oligonucleotide
  Antisense strand to SEQ ID NO: 1981726
ucaggagucacauuucugg

SEQ ID NO: 1981728 - RNA, 19 nt, Artificial Sequence
  Description of Artificial Sequence: Synthetic oligonucleotide
  Sense strand starting at position 77 of SEQ ID NO: 1880630
aagggaaagucccuacacu

SEQ ID NO: 1981729 - RNA, 19 nt, Artificial Sequence
  Description of Artificial Sequence: Synthetic oligonucleotide
  Antisense strand to SEQ ID NO: 1981728
aguguagggacuuucccuu

SEQ ID NO: 1981730 - RNA, 19 nt, Artificial Sequence
  Description of Artificial Sequence: Synthetic oligonucleotide
  Sense strand starting at position 158 of SEQ ID NO: 1880630
gcuuaaacuuaauucguua

SEQ ID NO: 1981731 - RNA, 19 nt, Artificial Sequence
  Description of Artificial Sequence: Synthetic oligonucleotide
  Antisense strand to SEQ ID NO: 1981730
uaacgaauuaaguuuaagc

SEQ ID NO: 1981732 - RNA, 19 nt, Artificial Sequence
  Description of Artificial Sequence: Synthetic oligonucleotide
  Sense strand starting at position 161 of SEQ ID NO: 1880630
uaaacuuaauucguuaggu

SEQ ID NO: 1981733 - RNA, 19 nt, Artificial Sequence
  Description of Artificial Sequence: Synthetic oligonucleotide
  Antisense strand to SEQ ID NO: 1981732
accuaacgaauuaaguuua

SEQ ID NO: 1981734 - RNA, 19 nt, Artificial Sequence
  Description of Artificial Sequence: Synthetic oligonucleotide
  Sense strand starting at position 162 of SEQ ID NO: 1880630
aaacuuaauucguuaggua

SEQ ID NO: 1981735 - RNA, 19 nt, Artificial Sequence
  Description of Artificial Sequence: Synthetic oligonucleotide
  Antisense strand to SEQ ID NO: 1981734
uaccuaacgaauuaaguuu

SEQ ID NO: 1981736 - RNA, 19 nt, Artificial Sequence
  Description of Artificial Sequence: Synthetic oligonucleotide
  Sense strand starting at position 163 of SEQ ID NO: 1880630
aacuuaauucguuagguag

SEQ ID NO: 1981737 - RNA, 19 nt, Artificial Sequence
  Description of Artificial Sequence: Synthetic oligonucleotide
  Antisense strand to SEQ ID NO: 1981736
cuaccuaacgaauuaaguu

SEQ ID NO: 1981738 - RNA, 19 nt, Artificial Sequence
  Description of Artificial Sequence: Synthetic oligonucleotide
  Sense strand starting at position 261 of SEQ ID NO: 1880630
cccuuucgugaaugacagu

SEQ ID NO: 1981739 - RNA, 19 nt, Artificial Sequence
  Description of Artificial Sequence: Synthetic oligonucleotide
  Antisense strand to SEQ ID NO: 1981738
acugucauucacgaaaggg

SEQ ID NO: 1981740 - RNA, 19 nt, Artificial Sequence
  Description of Artificial Sequence: Synthetic oligonucleotide
  Sense strand starting at position 262 of SEQ ID NO: 1880630
ccuuucgugaaugacagua

SEQ ID NO: 1981741 - RNA, 19 nt, Artificial Sequence
  Description of Artificial Sequence: Synthetic oligonucleotide
  Antisense strand to SEQ ID NO: 1981740
uacugucauucacgaaagg

SEQ ID NO: 1981742 - RNA, 19 nt, Artificial Sequence
  Description of Artificial Sequence: Synthetic oligonucleotide
  Sense strand starting at position 267 of SEQ ID NO: 1880630
cgugaaugacaguaacaau

SEQ ID NO: 1981743 - RNA, 19 nt, Artificial Sequence
  Description of Artificial Sequence: Synthetic oligonucleotide
  Antisense strand to SEQ ID NO: 1981742
auuguuacugucauucacg

SEQ ID NO: 1981744 - RNA, 19 nt, Artificial Sequence
  Description of Artificial Sequence: Synthetic oligonucleotide
  Sense strand starting at position 425 of SEQ ID NO: 1880630
gucuguagucugguaacgu

SEQ ID NO: 1981745 - RNA, 19 nt, Artificial Sequence
  Description of Artificial Sequence: Synthetic oligonucleotide
  Antisense strand to SEQ ID NO: 1981744
acguuaccagacuacagac

SEQ ID NO: 1981746 - RNA, 19 nt, Artificial Sequence
  Description of Artificial Sequence: Synthetic oligonucleotide
  Sense strand starting at position 1177 of SEQ ID NO: 1880630
agaccacucgguuggacau

SEQ ID NO: 1981747 - RNA, 19 nt, Artificial Sequence
  Description of Artificial Sequence: Synthetic oligonucleotide
  Antisense strand to SEQ ID NO: 1981746
auguccaaccgaguggucu

SEQ ID NO: 1981748 - RNA, 19 nt, Artificial Sequence
  Description of Artificial Sequence: Synthetic oligonucleotide
  Sense strand starting at position 2101 of SEQ ID NO: 1880630
gcggcuuuccacgaggaca

SEQ ID NO: 1981749 - RNA, 19 nt, Artificial Sequence
  Description of Artificial Sequence: Synthetic oligonucleotide
  Antisense strand to SEQ ID NO: 1981748
uguccucguggaaagccgc

SEQ ID NO: 1981750 - RNA, 19 nt, Artificial Sequence
  Description of Artificial Sequence: Synthetic oligonucleotide
  Sense strand starting at position 2125 of SEQ ID NO: 1880630
gcggguauccaucauauac

SEQ ID NO: 1981751 - RNA, 19 nt, Artificial Sequence
  Description of Artificial Sequence: Synthetic oligonucleotide
  Antisense strand to SEQ ID NO: 1981750
guauaugauggauacccgc

SEQ ID NO: 1981752 - RNA, 19 nt, Artificial Sequence
  Description of Artificial Sequence: Synthetic oligonucleotide
  Sense strand starting at position 2144 of SEQ ID NO: 1880630
aggcaucucucaucgauuu

SEQ ID NO: 1981753 - RNA, 19 nt, Artificial Sequence
  Description of Artificial Sequence: Synthetic oligonucleotide
  Antisense strand to SEQ ID NO: 1981752
aaaucgaugagagaugccu

SEQ ID NO: 1981754 - RNA, 19 nt, Artificial Sequence
  Description of Artificial Sequence: Synthetic oligonucleotide
  Sense strand starting at position 2196 of SEQ ID NO: 1880630
ccgggaaguucaucuguag

SEQ ID NO: 1981755 - RNA, 19 nt, Artificial Sequence
  Description of Artificial Sequence: Synthetic oligonucleotide
  Antisense strand to SEQ ID NO: 1981754
cuacagaugaacuucccgg

SEQ ID NO: 1981756 - RNA, 19 nt, Artificial Sequence
  Description of Artificial Sequence: Synthetic oligonucleotide
  Sense strand starting at position 2199 of SEQ ID NO: 1880630
ggaaguucaucuguagaag

SEQ ID NO: 1981757 - RNA, 19 nt, Artificial Sequence
  Description of Artificial Sequence: Synthetic oligonucleotide
  Antisense strand to SEQ ID NO: 1981756
cuucuacagaugaacuucc

SEQ ID NO: 1981758 - RNA, 19 nt, Artificial Sequence
  Description of Artificial Sequence: Synthetic oligonucleotide
  Sense strand starting at position 2273 of SEQ ID NO: 1880630
gggucacucuuaccaccua

SEQ ID NO: 1981759 - RNA, 19 nt, Artificial Sequence
  Description of Artificial Sequence: Synthetic oligonucleotide
  Antisense strand to SEQ ID NO: 1981758
uaggugguaagagugaccc

SEQ ID NO: 1981760 - RNA, 19 nt, Artificial Sequence
  Description of Artificial Sequence: Synthetic oligonucleotide
  Sense strand starting at position 2331 of SEQ ID NO: 1880630
guuguauuuauguaggugu

SEQ ID NO: 1981761 - RNA, 19 nt, Artificial Sequence
  Description of Artificial Sequence: Synthetic oligonucleotide
  Antisense strand to SEQ ID NO: 1981760
acaccuacauaaauacaac

SEQ ID NO: 1981762 - RNA, 19 nt, Artificial Sequence
  Description of Artificial Sequence: Synthetic oligonucleotide
  Sense strand starting at position 2334 of SEQ ID NO: 1880630
guauuuauguagguguaug

SEQ ID NO: 1981763 - RNA, 19 nt, Artificial Sequence
  Description of Artificial Sequence: Synthetic oligonucleotide
  Antisense strand to SEQ ID NO: 1981762
cauacaccuacauaaauac

SEQ ID NO: 1981764 - RNA, 19 nt, Artificial Sequence
  Description of Artificial Sequence: Synthetic oligonucleotide
  Sense strand starting at position 2364 of SEQ ID NO: 1880630
uaacuaagguguuugauau

SEQ ID NO: 1981765 - RNA, 19 nt, Artificial Sequence
  Description of Artificial Sequence: Synthetic oligonucleotide
  Antisense strand to SEQ ID NO: 1981764
auaucaaacaccuuaguua

SEQ ID NO: 1981766 - RNA, 19 nt, Artificial Sequence
  Description of Artificial Sequence: Synthetic oligonucleotide
  Sense strand starting at position 2365 of SEQ ID NO: 1880630
aacuaagguguuugauaua

SEQ ID NO: 1981767 - RNA, 19 nt, Artificial Sequence
  Description of Artificial Sequence: Synthetic oligonucleotide
  Antisense strand to SEQ ID NO: 1981766
uauaucaaacaccuuaguu

SEQ ID NO: 1981768 - RNA, 19 nt, Artificial Sequence
  Description of Artificial Sequence: Synthetic oligonucleotide
  Sense strand starting at position 2377 of SEQ ID NO: 1880630
ugauauaacuagccucguu

SEQ ID NO: 1981769 - RNA, 19 nt, Artificial Sequence
  Description of Artificial Sequence: Synthetic oligonucleotide
  Antisense strand to SEQ ID NO: 1981768
aacgaggcuaguuauauca

SEQ ID NO: 1981770 - RNA, 19 nt, Artificial Sequence
  Description of Artificial Sequence: Synthetic oligonucleotide
  Sense strand starting at position 2422 of SEQ ID NO: 1880630
caaggaguguaccuacgau

SEQ ID NO: 1981771 - RNA, 19 nt, Artificial Sequence
  Description of Artificial Sequence: Synthetic oligonucleotide
  Antisense strand to SEQ ID NO: 1981770
aucguagguacacuccuug

SEQ ID NO: 1981772 - RNA, 19 nt, Artificial Sequence
  Description of Artificial Sequence: Synthetic oligonucleotide
  Sense strand starting at position 2429 of SEQ ID NO: 1880630
uguaccuacgauuauaaga

SEQ ID NO: 1981773 - RNA, 19 nt, Artificial Sequence
  Description of Artificial Sequence: Synthetic oligonucleotide
  Antisense strand to SEQ ID NO: 1981772
ucuuauaaucguagguaca

SEQ ID NO: 1981774 - RNA, 19 nt, Artificial Sequence
  Description of Artificial Sequence: Synthetic oligonucleotide
  Sense strand starting at position 2445 of SEQ ID NO: 1880630
agagcuguugaaugugaac

SEQ ID NO: 1981775 - RNA, 19 nt, Artificial Sequence
  Description of Artificial Sequence: Synthetic oligonucleotide
  Antisense strand to SEQ ID NO: 1981774
guucacauucaacagcucu

SEQ ID NO: 1981776 - RNA, 19 nt, Artificial Sequence
  Description of Artificial Sequence: Synthetic oligonucleotide
  Sense strand starting at position 2607 of SEQ ID NO: 1880630
gaggaaguguuauuguuac

SEQ ID NO: 1981777 - RNA, 19 nt, Artificial Sequence
  Description of Artificial Sequence: Synthetic oligonucleotide
  Antisense strand to SEQ ID NO: 1981776
guaacaauaacacuuccuc

SEQ ID NO: 1981778 - RNA, 19 nt, Artificial Sequence
  Description of Artificial Sequence: Synthetic oligonucleotide
  Sense strand starting at position 2669 of SEQ ID NO: 1880630
gcauacauccaaugaaagu

SEQ ID NO: 1981779 - RNA, 19 nt, Artificial Sequence
  Description of Artificial Sequence: Synthetic oligonucleotide
  Antisense strand to SEQ ID NO: 1981778
acuuucauuggauguaugc

SEQ ID NO: 1981780 - RNA, 19 nt, Artificial Sequence
  Description of Artificial Sequence: Synthetic oligonucleotide
  Sense strand starting at position 2730 of SEQ ID NO: 1880630
gguaccuccugccuauaau

SEQ ID NO: 1981781 - RNA, 19 nt, Artificial Sequence
  Description of Artificial Sequence: Synthetic oligonucleotide
  Antisense strand to SEQ ID NO: 1981780
auuauaggcaggagguacc

SEQ ID NO: 1981782 - RNA, 19 nt, Artificial Sequence
  Description of Artificial Sequence: Synthetic oligonucleotide
  Sense strand starting at position 3073 of SEQ ID NO: 1880630
guagaugacuggcugucua

SEQ ID NO: 1981783 - RNA, 19 nt, Artificial Sequence
  Description of Artificial Sequence: Synthetic oligonucleotide
  Antisense strand to SEQ ID NO: 1981782
uagacagccagucaucuac

SEQ ID NO: 1981784 - RNA, 19 nt, Artificial Sequence
  Description of Artificial Sequence: Synthetic oligonucleotide
  Sense strand starting at position 3077 of SEQ ID NO: 1880630
augacuggcugucuaguau

SEQ ID NO: 1981785 - RNA, 19 nt, Artificial Sequence
  Description of Artificial Sequence: Synthetic oligonucleotide
  Antisense strand to SEQ ID NO: 1981784
auacuagacagccagucau

SEQ ID NO: 1981786 - RNA, 19 nt, Artificial Sequence
  Description of Artificial Sequence: Synthetic oligonucleotide
  Sense strand starting at position 3185 of SEQ ID NO: 1880630
uguccuaaagccuagucaa

SEQ ID NO: 1981787 - RNA, 19 nt, Artificial Sequence
  Description of Artificial Sequence: Synthetic oligonucleotide
  Antisense strand to SEQ ID NO: 1981786
uugacuaggcuuuaggaca

SEQ ID NO: 1981788 - RNA, 19 nt, Artificial Sequence
  Description of Artificial Sequence: Synthetic oligonucleotide
  Sense strand starting at position 3717 of SEQ ID NO: 1880630
aggcuugagcucugauuac

SEQ ID NO: 1981789 - RNA, 19 nt, Artificial Sequence
  Description of Artificial Sequence: Synthetic oligonucleotide
  Antisense strand to SEQ ID NO: 1981788
guaaucagagcucaagccu

SEQ ID NO: 1981790 - RNA, 19 nt, Artificial Sequence
  Description of Artificial Sequence: Synthetic oligonucleotide
  Sense strand starting at position 3742 of SEQ ID NO: 1880630
cuguucugacaguaccaaa

SEQ ID NO: 1981791 - RNA, 19 nt, Artificial Sequence
  Description of Artificial Sequence: Synthetic oligonucleotide
  Antisense strand to SEQ ID NO: 1981790
uuugguacugucagaacag

SEQ ID NO: 1981792 - RNA, 19 nt, Artificial Sequence
  Description of Artificial Sequence: Synthetic oligonucleotide
  Sense strand starting at position 3762 of SEQ ID NO: 1880630
cucagugaucauugauaaa

SEQ ID NO: 1981793 - RNA, 19 nt, Artificial Sequence
  Description of Artificial Sequence: Synthetic oligonucleotide
  Antisense strand to SEQ ID NO: 1981792
uuuaucaaugaucacugag

SEQ ID NO: 1981794 - RNA, 19 nt, Artificial Sequence
  Description of Artificial Sequence: Synthetic oligonucleotide
  Sense strand starting at position 3812 of SEQ ID NO: 1880630
aggaaacugcccuaagugu

SEQ ID NO: 1981795 - RNA, 19 nt, Artificial Sequence
  Description of Artificial Sequence: Synthetic oligonucleotide
  Antisense strand to SEQ ID NO: 1981794
acacuuagggcaguuuccu

SEQ ID NO: 1981796 - RNA, 19 nt, Artificial Sequence
  Description of Artificial Sequence: Synthetic oligonucleotide
  Sense strand starting at position 3820 of SEQ ID NO: 1880630
gcccuaaguguuuauauga

SEQ ID NO: 1981797 - RNA, 19 nt, Artificial Sequence
  Description of Artificial Sequence: Synthetic oligonucleotide
  Antisense strand to SEQ ID NO: 1981796
ucauauaaacacuuagggc

SEQ ID NO: 1981798 - RNA, 19 nt, Artificial Sequence
  Description of Artificial Sequence: Synthetic oligonucleotide
  Sense strand starting at position 3828 of SEQ ID NO: 1880630
uguuuauaugaugaugguu

SEQ ID NO: 1981799 - RNA, 19 nt, Artificial Sequence
  Description of Artificial Sequence: Synthetic oligonucleotide
  Antisense strand to SEQ ID NO: 1981798
aaccaucaucauauaaaca

SEQ ID NO: 1981800 - RNA, 19 nt, Artificial Sequence
  Description of Artificial Sequence: Synthetic oligonucleotide
  Sense strand starting at position 3833 of SEQ ID NO: 1880630
auaugaugaugguucuuau

SEQ ID NO: 1981801 - RNA, 19 nt, Artificial Sequence
  Description of Artificial Sequence: Synthetic oligonucleotide
  Antisense strand to SEQ ID NO: 1981800
auaagaaccaucaucauau

SEQ ID NO: 1981802 - RNA, 19 nt, Artificial Sequence
  Description of Artificial Sequence: Synthetic oligonucleotide
  Sense strand starting at position 3836 of SEQ ID NO: 1880630
ugaugaugguucuuauggu

SEQ ID NO: 1981803 - RNA, 19 nt, Artificial Sequence
  Description of Artificial Sequence: Synthetic oligonucleotide
  Antisense strand to SEQ ID NO: 1981802
accauaagaaccaucauca

SEQ ID NO: 1981804 - RNA, 19 nt, Artificial Sequence
  Description of Artificial Sequence: Synthetic oligonucleotide
  Sense strand starting at position 3967 of SEQ ID NO: 1880630
auuagaaagucagauuuga

SEQ ID NO: 1981805 - RNA, 19 nt, Artificial Sequence
  Description of Artificial Sequence: Synthetic oligonucleotide
  Antisense strand to SEQ ID NO: 1981804
ucaaaucugacuuucuaau

SEQ ID NO: 1981806 - RNA, 19 nt, Artificial Sequence
  Description of Artificial Sequence: Synthetic oligonucleotide
  Sense strand starting at position 253 of SEQ ID NO: 1880631
cccagaaagccucggaagu

SEQ ID NO: 1981807 - RNA, 19 nt, Artificial Sequence
  Description of Artificial Sequence: Synthetic oligonucleotide
  Antisense strand to SEQ ID NO: 1981806
acuuccgaggcuuucuggg

SEQ ID NO: 1981808 - RNA, 19 nt, Artificial Sequence
  Description of Artificial Sequence: Synthetic oligonucleotide
  Sense strand starting at position 263 of SEQ ID NO: 1880631
cucggaagucaccgaaaca

SEQ ID NO: 1981809 - RNA, 19 nt, Artificial Sequence
  Description of Artificial Sequence: Synthetic oligonucleotide
  Antisense strand to SEQ ID NO: 1981808
uguuucggugacuuccgag

SEQ ID NO: 1981810 - RNA, 19 nt, Artificial Sequence
  Description of Artificial Sequence: Synthetic oligonucleotide
  Sense strand starting at position 264 of SEQ ID NO: 1880631
ucggaagucaccgaaacaa

SEQ ID NO: 1981811 - RNA, 19 nt, Artificial Sequence
  Description of Artificial Sequence: Synthetic oligonucleotide
  Antisense strand to SEQ ID NO: 1981810
uuguuucggugacuuccga

SEQ ID NO: 1981812 - RNA, 19 nt, Artificial Sequence
  Description of Artificial Sequence: Synthetic oligonucleotide
  Sense strand starting at position 292 of SEQ ID NO: 1880631
aacugacugugguugcaaa

SEQ ID NO: 1981813 - RNA, 19 nt, Artificial Sequence
  Description of Artificial Sequence: Synthetic oligonucleotide
  Antisense strand to SEQ ID NO: 1981812
uuugcaaccacagucaguu

SEQ ID NO: 1981814 - RNA, 19 nt, Artificial Sequence
  Description of Artificial Sequence: Synthetic oligonucleotide
  Sense strand starting at position 773 of SEQ ID NO: 1880631
cucauuagccaacggaauu

SEQ ID NO: 1981815 - RNA, 19 nt, Artificial Sequence
  Description of Artificial Sequence: Synthetic oligonucleotide
  Antisense strand to SEQ ID NO: 1981814
aauuccguuggcuaaugag

SEQ ID NO: 1981816 - RNA, 19 nt, Artificial Sequence
  Description of Artificial Sequence: Synthetic oligonucleotide
  Sense strand starting at position 844 of SEQ ID NO: 1880631
uaagucucucgguggauga

SEQ ID NO: 1981817 - RNA, 19 nt, Artificial Sequence
  Description of Artificial Sequence: Synthetic oligonucleotide
  Antisense strand to SEQ ID NO: 1981816
ucauccaccgagagacuua

SEQ ID NO: 1981818 - RNA, 19 nt, Artificial Sequence
  Description of Artificial Sequence: Synthetic oligonucleotide
  Sense strand starting at position 857 of SEQ ID NO: 1880631
ggaugagaggccugaauac

SEQ ID NO: 1981819 - RNA, 19 nt, Artificial Sequence
  Description of Artificial Sequence: Synthetic oligonucleotide
  Antisense strand to SEQ ID NO: 1981818
guauucaggccucucaucc

SEQ ID NO: 1981820 - RNA, 19 nt, Artificial Sequence
  Description of Artificial Sequence: Synthetic oligonucleotide
  Sense strand starting at position 970 of SEQ ID NO: 1880631
ugcucuucccucgagaaug

SEQ ID NO: 1981821 - RNA, 19 nt, Artificial Sequence
  Description of Artificial Sequence: Synthetic oligonucleotide
  Antisense strand to SEQ ID NO: 1981820
cauucucgagggaagagca

SEQ ID NO: 1981822 - RNA, 19 nt, Artificial Sequence
  Description of Artificial Sequence: Synthetic oligonucleotide
  Sense strand starting at position 998 of SEQ ID NO: 1880631
ucuaacuuugugggaggua

SEQ ID NO: 1981823 - RNA, 19 nt, Artificial Sequence
  Description of Artificial Sequence: Synthetic oligonucleotide
  Antisense strand to SEQ ID NO: 1981822
uaccucccacaaaguuaga

SEQ ID NO: 1981824 - RNA, 19 nt, Artificial Sequence
  Description of Artificial Sequence: Synthetic oligonucleotide
  Sense strand starting at position 2039 of SEQ ID NO: 1880631
cuccucuugcgguuaaguu

SEQ ID NO: 1981825 - RNA, 19 nt, Artificial Sequence
  Description of Artificial Sequence: Synthetic oligonucleotide
  Antisense strand to SEQ ID NO: 1981824
aacuuaaccgcaagaggag

SEQ ID NO: 1981826 - RNA, 19 nt, Artificial Sequence
  Description of Artificial Sequence: Synthetic oligonucleotide
  Sense strand starting at position 2064 of SEQ ID NO: 1880631
acacuucggcuuuauuaga

SEQ ID NO: 1981827 - RNA, 19 nt, Artificial Sequence
  Description of Artificial Sequence: Synthetic oligonucleotide
  Antisense strand to SEQ ID NO: 1981826
ucuaauaaagccgaagugu

SEQ ID NO: 1981828 - RNA, 19 nt, Artificial Sequence
  Description of Artificial Sequence: Synthetic oligonucleotide
  Sense strand starting at position 2092 of SEQ ID NO: 1880631
cuuuaagaacuugguguuu

SEQ ID NO: 1981829 - RNA, 19 nt, Artificial Sequence
  Description of Artificial Sequence: Synthetic oligonucleotide
  Antisense strand to SEQ ID NO: 1981828
aaacaccaaguucuuaaag

SEQ ID NO: 1981830 - RNA, 19 nt, Artificial Sequence
  Description of Artificial Sequence: Synthetic oligonucleotide
  Sense strand starting at position 2105 of SEQ ID NO: 1880631
guguuugcaagguaaaccu

SEQ ID NO: 1981831 - RNA, 19 nt, Artificial Sequence
  Description of Artificial Sequence: Synthetic oligonucleotide
  Antisense strand to SEQ ID NO: 1981830
agguuuaccuugcaaacac

SEQ ID NO: 1981832 - RNA, 19 nt, Artificial Sequence
  Description of Artificial Sequence: Synthetic oligonucleotide
  Sense strand starting at position 2177 of SEQ ID NO: 1880631
ugcugugaggcuuaggaau

SEQ ID NO: 1981833 - RNA, 19 nt, Artificial Sequence
  Description of Artificial Sequence: Synthetic oligonucleotide
  Antisense strand to SEQ ID NO: 1981832
auuccuaagccucacagca

SEQ ID NO: 1981834 - RNA, 19 nt, Artificial Sequence
  Description of Artificial Sequence: Synthetic oligonucleotide
  Sense strand starting at position 2221 of SEQ ID NO: 1880631
gugauuccaugaguuccaa

SEQ ID NO: 1981835 - RNA, 19 nt, Artificial Sequence
  Description of Artificial Sequence: Synthetic oligonucleotide
  Antisense strand to SEQ ID NO: 1981834
uuggaacucauggaaucac

SEQ ID NO: 1981836 - RNA, 19 nt, Artificial Sequence
  Description of Artificial Sequence: Synthetic oligonucleotide
  Sense strand starting at position 2272 of SEQ ID NO: 1880631
ccuugucuuccaugagaau

SEQ ID NO: 1981837 - RNA, 19 nt, Artificial Sequence
  Description of Artificial Sequence: Synthetic oligonucleotide
  Antisense strand to SEQ ID NO: 1981836
auucucauggaagacaagg

SEQ ID NO: 1981838 - RNA, 19 nt, Artificial Sequence
  Description of Artificial Sequence: Synthetic oligonucleotide
  Sense strand starting at position 2273 of SEQ ID NO: 1880631
cuugucuuccaugagaauu

SEQ ID NO: 1981839 - RNA, 19 nt, Artificial Sequence
  Description of Artificial Sequence: Synthetic oligonucleotide
  Antisense strand to SEQ ID NO: 1981838
aauucucauggaagacaag

SEQ ID NO: 1981840 - RNA, 19 nt, Artificial Sequence
  Description of Artificial Sequence: Synthetic oligonucleotide
  Sense strand starting at position 2429 of SEQ ID NO: 1880631
agugcuugucaguauggga

SEQ ID NO: 1981841 - RNA, 19 nt, Artificial Sequence
  Description of Artificial Sequence: Synthetic oligonucleotide
  Antisense strand to SEQ ID NO: 1981840
ucccauacugacaagcacu

SEQ ID NO: 1981842 - RNA, 19 nt, Artificial Sequence
  Description of Artificial Sequence: Synthetic oligonucleotide
  Sense strand starting at position 2458 of SEQ ID NO: 1880631
gccaaauaaugugauauuu

SEQ ID NO: 1981843 - RNA, 19 nt, Artificial Sequence
  Description of Artificial Sequence: Synthetic oligonucleotide
  Antisense strand to SEQ ID NO: 1981842
aaauaucacauuauuuggc

SEQ ID NO: 1981844 - RNA, 19 nt, Artificial Sequence
  Description of Artificial Sequence: Synthetic oligonucleotide
  Sense strand starting at position 2506 of SEQ ID NO: 1880631
agguguacacaugacuuau

SEQ ID NO: 1981845 - RNA, 19 nt, Artificial Sequence
  Description of Artificial Sequence: Synthetic oligonucleotide
  Antisense strand to SEQ ID NO: 1981844
auaagucauguguacaccu

SEQ ID NO: 1981846 - RNA, 19 nt, Artificial Sequence
  Description of Artificial Sequence: Synthetic oligonucleotide
  Sense strand starting at position 2582 of SEQ ID NO: 1880631
ugggaagcccucugaauug

SEQ ID NO: 1981847 - RNA, 19 nt, Artificial Sequence
  Description of Artificial Sequence: Synthetic oligonucleotide
  Antisense strand to SEQ ID NO: 1981846
caauucagagggcuuccca

SEQ ID NO: 1981848 - RNA, 19 nt, Artificial Sequence
  Description of Artificial Sequence: Synthetic oligonucleotide
  Sense strand starting at position 2600 of SEQ ID NO: 1880631
gcguucuugggcuucuuaa

SEQ ID NO: 1981849 - RNA, 19 nt, Artificial Sequence
  Description of Artificial Sequence: Synthetic oligonucleotide
  Antisense strand to SEQ ID NO: 1981848
uuaagaagcccaagaacgc

SEQ ID NO: 1981850 - RNA, 19 nt, Artificial Sequence
  Description of Artificial Sequence: Synthetic oligonucleotide
  Sense strand starting at position 2665 of SEQ ID NO: 1880631
cuuggcugggccuaagaau

SEQ ID NO: 1981851 - RNA, 19 nt, Artificial Sequence
  Description of Artificial Sequence: Synthetic oligonucleotide
  Antisense strand to SEQ ID NO: 1981850
auucuuaggcccagccaag

SEQ ID NO: 1981852 - RNA, 19 nt, Artificial Sequence
  Description of Artificial Sequence: Synthetic oligonucleotide
  Sense strand starting at position 2752 of SEQ ID NO: 1880631
gaccauggcccgugacaga

SEQ ID NO: 1981853 - RNA, 19 nt, Artificial Sequence
  Description of Artificial Sequence: Synthetic oligonucleotide
  Antisense strand to SEQ ID NO: 1981852
ucugucacgggccaugguc

SEQ ID NO: 1981854 - RNA, 19 nt, Artificial Sequence
  Description of Artificial Sequence: Synthetic oligonucleotide
  Sense strand starting at position 2951 of SEQ ID NO: 1880631
cugguugacaguugaagac

SEQ ID NO: 1981855 - RNA, 19 nt, Artificial Sequence
  Description of Artificial Sequence: Synthetic oligonucleotide
  Antisense strand to SEQ ID NO: 1981854
gucuucaacugucaaccag

SEQ ID NO: 1981856 - RNA, 19 nt, Artificial Sequence
  Description of Artificial Sequence: Synthetic oligonucleotide
  Sense strand starting at position 3104 of SEQ ID NO: 1880631
cuagauucuuacguaaucu

SEQ ID NO: 1981857 - RNA, 19 nt, Artificial Sequence
  Description of Artificial Sequence: Synthetic oligonucleotide
  Antisense strand to SEQ ID NO: 1981856
agauuacguaagaaucuag

SEQ ID NO: 1981858 - RNA, 19 nt, Artificial Sequence
  Description of Artificial Sequence: Synthetic oligonucleotide
  Sense strand starting at position 3113 of SEQ ID NO: 1880631
uacguaaucucuuuaggau

SEQ ID NO: 1981859 - RNA, 19 nt, Artificial Sequence
  Description of Artificial Sequence: Synthetic oligonucleotide
  Antisense strand to SEQ ID NO: 1981858
auccuaaagagauuacgua

SEQ ID NO: 1981860 - RNA, 19 nt, Artificial Sequence
  Description of Artificial Sequence: Synthetic oligonucleotide
  Sense strand starting at position 3114 of SEQ ID NO: 1880631
acguaaucucuuuaggauu

SEQ ID NO: 1981861 - RNA, 19 nt, Artificial Sequence
  Description of Artificial Sequence: Synthetic oligonucleotide
  Antisense strand to SEQ ID NO: 1981860
aauccuaaagagauuacgu

SEQ ID NO: 1981862 - RNA, 19 nt, Artificial Sequence
  Description of Artificial Sequence: Synthetic oligonucleotide
  Sense strand starting at position 3169 of SEQ ID NO: 1880631
uagaaauucuauguagaug

SEQ ID NO: 1981863 - RNA, 19 nt, Artificial Sequence
  Description of Artificial Sequence: Synthetic oligonucleotide
  Antisense strand to SEQ ID NO: 1981862
caucuacauagaauuucua

SEQ ID NO: 1981864 - RNA, 19 nt, Artificial Sequence
  Description of Artificial Sequence: Synthetic oligonucleotide
  Sense strand starting at position 3280 of SEQ ID NO: 1880631
uuguuucuugucucguuau

SEQ ID NO: 1981865 - RNA, 19 nt, Artificial Sequence
  Description of Artificial Sequence: Synthetic oligonucleotide
  Antisense strand to SEQ ID NO: 1981864
auaacgagacaagaaacaa

SEQ ID NO: 1981866 - RNA, 19 nt, Artificial Sequence
  Description of Artificial Sequence: Synthetic oligonucleotide
  Sense strand starting at position 3301 of SEQ ID NO: 1880631
cagugucagauuggaaagu

SEQ ID NO: 1981867 - RNA, 19 nt, Artificial Sequence
  Description of Artificial Sequence: Synthetic oligonucleotide
  Antisense strand to SEQ ID NO: 1981866
acuuuccaaucugacacug

SEQ ID NO: 1981868 - RNA, 19 nt, Artificial Sequence
  Description of Artificial Sequence: Synthetic oligonucleotide
  Sense strand starting at position 3367 of SEQ ID NO: 1880631
uggauuguagggcaugaau

SEQ ID NO: 1981869 - RNA, 19 nt, Artificial Sequence
  Description of Artificial Sequence: Synthetic oligonucleotide
  Antisense strand to SEQ ID NO: 1981868
auucaugcccuacaaucca

SEQ ID NO: 1981870 - RNA, 19 nt, Artificial Sequence
  Description of Artificial Sequence: Synthetic oligonucleotide
  Sense strand starting at position 3433 of SEQ ID NO: 1880631
agagcuuagucuccacuga

SEQ ID NO: 1981871 - RNA, 19 nt, Artificial Sequence
  Description of Artificial Sequence: Synthetic oligonucleotide
  Antisense strand to SEQ ID NO: 1981870
ucaguggagacuaagcucu

SEQ ID NO: 1981872 - RNA, 19 nt, Artificial Sequence
  Description of Artificial Sequence: Synthetic oligonucleotide
  Sense strand starting at position 3522 of SEQ ID NO: 1880631
auuggagccuucccuagaa

SEQ ID NO: 1981873 - RNA, 19 nt, Artificial Sequence
  Description of Artificial Sequence: Synthetic oligonucleotide
  Antisense strand to SEQ ID NO: 1981872
uucuagggaaggcuccaau

SEQ ID NO: 1981874 - RNA, 19 nt, Artificial Sequence
  Description of Artificial Sequence: Synthetic oligonucleotide
  Sense strand starting at position 3661 of SEQ ID NO: 1880631
gcaguuaaugcagaaguga

SEQ ID NO: 1981875 - RNA, 19 nt, Artificial Sequence
  Description of Artificial Sequence: Synthetic oligonucleotide
  Antisense strand to SEQ ID NO: 1981874
ucacuucugcauuaacugc

SEQ ID NO: 1981876 - RNA, 19 nt, Artificial Sequence
  Description of Artificial Sequence: Synthetic oligonucleotide
  Sense strand starting at position 3684 of SEQ ID NO: 1880631
gaagauaaagguuguugua

SEQ ID NO: 1981877 - RNA, 19 nt, Artificial Sequence
  Description of Artificial Sequence: Synthetic oligonucleotide
  Antisense strand to SEQ ID NO: 1981876
uacaacaaccuuuaucuuc

SEQ ID NO: 1981878 - RNA, 19 nt, Artificial Sequence
  Description of Artificial Sequence: Synthetic oligonucleotide
  Sense strand starting at position 3686 of SEQ ID NO: 1880631
agauaaagguuguuguaac

SEQ ID NO: 1981879 - RNA, 19 nt, Artificial Sequence
  Description of Artificial Sequence: Synthetic oligonucleotide
  Antisense strand to SEQ ID NO: 1981878
guuacaacaaccuuuaucu

SEQ ID NO: 1981880 - RNA, 19 nt, Artificial Sequence
  Description of Artificial Sequence: Synthetic oligonucleotide
  Sense strand starting at position 3697 of SEQ ID NO: 1880631
guuguaacaaaguggaaau

SEQ ID NO: 1981881 - RNA, 19 nt, Artificial Sequence
  Description of Artificial Sequence: Synthetic oligonucleotide
  Antisense strand to SEQ ID NO: 1981880
auuuccacuuuguuacaac

SEQ ID NO: 1981882 - RNA, 19 nt, Artificial Sequence
  Description of Artificial Sequence: Synthetic oligonucleotide
  Sense strand starting at position 3761 of SEQ ID NO: 1880631
gucucugguguugagaaca

SEQ ID NO: 1981883 - RNA, 19 nt, Artificial Sequence
  Description of Artificial Sequence: Synthetic oligonucleotide
  Antisense strand to SEQ ID NO: 1981882
uguucucaacaccagagac

SEQ ID NO: 1981884 - RNA, 19 nt, Artificial Sequence
  Description of Artificial Sequence: Synthetic oligonucleotide
  Sense strand starting at position 3888 of SEQ ID NO: 1880631
aagugccuuugacucgaaa

SEQ ID NO: 1981885 - RNA, 19 nt, Artificial Sequence
  Description of Artificial Sequence: Synthetic oligonucleotide
  Antisense strand to SEQ ID NO: 1981884
uuucgagucaaaggcacuu

SEQ ID NO: 1981886 - RNA, 19 nt, Artificial Sequence
  Description of Artificial Sequence: Synthetic oligonucleotide
  Sense strand starting at position 405 of SEQ ID NO: 1880632
ucauguuugcuccaaagca

SEQ ID NO: 1981887 - RNA, 19 nt, Artificial Sequence
  Description of Artificial Sequence: Synthetic oligonucleotide
  Antisense strand to SEQ ID NO: 1981886
ugcuuuggagcaaacauga

SEQ ID NO: 1981888 - RNA, 19 nt, Artificial Sequence
  Description of Artificial Sequence: Synthetic oligonucleotide
  Sense strand starting at position 654 of SEQ ID NO: 1880632
caucauugagcguggagga

SEQ ID NO: 1981889 - RNA, 19 nt, Artificial Sequence
  Description of Artificial Sequence: Synthetic oligonucleotide
  Antisense strand to SEQ ID NO: 1981888
uccuccacgcucaaugaug

SEQ ID NO: 1981890 - RNA, 19 nt, Artificial Sequence
  Description of Artificial Sequence: Synthetic oligonucleotide
  Sense strand starting at position 709 of SEQ ID NO: 1880632
gcccucugaagguaagaau

SEQ ID NO: 1981891 - RNA, 19 nt, Artificial Sequence
  Description of Artificial Sequence: Synthetic oligonucleotide
  Antisense strand to SEQ ID NO: 1981890
auucuuaccuucagagggc

SEQ ID NO: 1981892 - RNA, 19 nt, Artificial Sequence
  Description of Artificial Sequence: Synthetic oligonucleotide
  Sense strand starting at position 723 of SEQ ID NO: 1880632
agaauugcucccuggaugu

SEQ ID NO: 1981893 - RNA, 19 nt, Artificial Sequence
  Description of Artificial Sequence: Synthetic oligonucleotide
  Antisense strand to SEQ ID NO: 1981892
acauccagggagcaauucu

SEQ ID NO: 1981894 - RNA, 19 nt, Artificial Sequence
  Description of Artificial Sequence: Synthetic oligonucleotide
  Sense strand starting at position 737 of SEQ ID NO: 1880632
gauguagccucaucuggau

SEQ ID NO: 1981895 - RNA, 19 nt, Artificial Sequence
  Description of Artificial Sequence: Synthetic oligonucleotide
  Antisense strand to SEQ ID NO: 1981894
auccagaugaggcuacauc

SEQ ID NO: 1981896 - RNA, 19 nt, Artificial Sequence
  Description of Artificial Sequence: Synthetic oligonucleotide
  Sense strand starting at position 743 of SEQ ID NO: 1880632
gccucaucuggauaaccua

SEQ ID NO: 1981897 - RNA, 19 nt, Artificial Sequence
  Description of Artificial Sequence: Synthetic oligonucleotide
  Antisense strand to SEQ ID NO: 1981896
uagguuauccagaugaggc

SEQ ID NO: 1981898 - RNA, 19 nt, Artificial Sequence
  Description of Artificial Sequence: Synthetic oligonucleotide
  Sense strand starting at position 854 of SEQ ID NO: 1880632
cuuggagauuuguacaagu

SEQ ID NO: 1981899 - RNA, 19 nt, Artificial Sequence
  Description of Artificial Sequence: Synthetic oligonucleotide
  Antisense strand to SEQ ID NO: 1981898
acuuguacaaaucuccaag

SEQ ID NO: 1981900 - RNA, 19 nt, Artificial Sequence
  Description of Artificial Sequence: Synthetic oligonucleotide
  Sense strand starting at position 864 of SEQ ID NO: 1880632
uguacaaguucugcaaauu

SEQ ID NO: 1981901 - RNA, 19 nt, Artificial Sequence
  Description of Artificial Sequence: Synthetic oligonucleotide
  Antisense strand to SEQ ID NO: 1981900
aauuugcagaacuuguaca

SEQ ID NO: 1981902 - RNA, 19 nt, Artificial Sequence
  Description of Artificial Sequence: Synthetic oligonucleotide
  Sense strand starting at position 865 of SEQ ID NO: 1880632
guacaaguucugcaaauua

SEQ ID NO: 1981903 - RNA, 19 nt, Artificial Sequence
  Description of Artificial Sequence: Synthetic oligonucleotide
  Antisense strand to SEQ ID NO: 1981902
uaauuugcagaacuuguac

SEQ ID NO: 1981904 - RNA, 19 nt, Artificial Sequence
  Description of Artificial Sequence: Synthetic oligonucleotide
  Sense strand starting at position 1191 of SEQ ID NO: 1880632
uucugaaugucgcuuacaa

SEQ ID NO: 1981905 - RNA, 19 nt, Artificial Sequence
  Description of Artificial Sequence: Synthetic oligonucleotide
  Antisense strand to SEQ ID NO: 1981904
uuguaagcgacauucagaa

SEQ ID NO: 1981906 - RNA, 19 nt, Artificial Sequence
  Description of Artificial Sequence: Synthetic oligonucleotide
  Sense strand starting at position 1193 of SEQ ID NO: 1880632
cugaaugucgcuuacaaac

SEQ ID NO: 1981907 - RNA, 19 nt, Artificial Sequence
  Description of Artificial Sequence: Synthetic oligonucleotide
  Antisense strand to SEQ ID NO: 1981906
guuuguaagcgacauucag

SEQ ID NO: 1981908 - RNA, 19 nt, Artificial Sequence
  Description of Artificial Sequence: Synthetic oligonucleotide
  Sense strand starting at position 1459 of SEQ ID NO: 1880632
caaguuacuccucgcagau

SEQ ID NO: 1981909 - RNA, 19 nt, Artificial Sequence
  Description of Artificial Sequence: Synthetic oligonucleotide
  Antisense strand to SEQ ID NO: 1981908
aucugcgaggaguaacuug

SEQ ID NO: 1981910 - RNA, 19 nt, Artificial Sequence
  Description of Artificial Sequence: Synthetic oligonucleotide
  Sense strand starting at position 1665 of SEQ ID NO: 1880632
cgcagaaugcugucgcugu

SEQ ID NO: 1981911 - RNA, 19 nt, Artificial Sequence
  Description of Artificial Sequence: Synthetic oligonucleotide
  Antisense strand to SEQ ID NO: 1981910
acagcgacagcauucugcg

SEQ ID NO: 1981912 - RNA, 19 nt, Artificial Sequence
  Description of Artificial Sequence: Synthetic oligonucleotide
  Sense strand starting at position 1750 of SEQ ID NO: 1880632
accggacugccacgugaaa

SEQ ID NO: 1981913 - RNA, 19 nt, Artificial Sequence
  Description of Artificial Sequence: Synthetic oligonucleotide
  Antisense strand to SEQ ID NO: 1981912
uuucacguggcaguccggu

SEQ ID NO: 1981914 - RNA, 19 nt, Artificial Sequence
  Description of Artificial Sequence: Synthetic oligonucleotide
  Sense strand starting at position 1752 of SEQ ID NO: 1880632
cggacugccacgugaaacu

SEQ ID NO: 1981915 - RNA, 19 nt, Artificial Sequence
  Description of Artificial Sequence: Synthetic oligonucleotide
  Antisense strand to SEQ ID NO: 1981914
aguuucacguggcaguccg

SEQ ID NO: 1981916 - RNA, 19 nt, Artificial Sequence
  Description of Artificial Sequence: Synthetic oligonucleotide
  Sense strand starting at position 2105 of SEQ ID NO: 1880632
ugugcuauuucuguaucaa

SEQ ID NO: 1981917 - RNA, 19 nt, Artificial Sequence
  Description of Artificial Sequence: Synthetic oligonucleotide
  Antisense strand to SEQ ID NO: 1981916
uugauacagaaauagcaca

SEQ ID NO: 1981918 - RNA, 19 nt, Artificial Sequence
  Description of Artificial Sequence: Synthetic oligonucleotide
  Sense strand starting at position 2254 of SEQ ID NO: 1880632
augaauauucuacgguaca

SEQ ID NO: 1981919 - RNA, 19 nt, Artificial Sequence
  Description of Artificial Sequence: Synthetic oligonucleotide
  Antisense strand to SEQ ID NO: 1981918
uguaccguagaauauucau

SEQ ID NO: 1981920 - RNA, 19 nt, Artificial Sequence
  Description of Artificial Sequence: Synthetic oligonucleotide
  Sense strand starting at position 2290 of SEQ ID NO: 1880632
uagguugugccuugagaaa

SEQ ID NO: 1981921 - RNA, 19 nt, Artificial Sequence
  Description of Artificial Sequence: Synthetic oligonucleotide
  Antisense strand to SEQ ID NO: 1981920
uuucucaaggcacaaccua

SEQ ID NO: 1981922 - RNA, 19 nt, Artificial Sequence
  Description of Artificial Sequence: Synthetic oligonucleotide
  Sense strand starting at position 2302 of SEQ ID NO: 1880632
ugagaaacauauuaagaca

SEQ ID NO: 1981923 - RNA, 19 nt, Artificial Sequence
  Description of Artificial Sequence: Synthetic oligonucleotide
  Antisense strand to SEQ ID NO: 1981922
ugucuuaauauguuucuca

SEQ ID NO: 1981924 - RNA, 19 nt, Artificial Sequence
  Description of Artificial Sequence: Synthetic oligonucleotide
  Sense strand starting at position 2391 of SEQ ID NO: 1880632
gugaaugaauucucaauca

SEQ ID NO: 1981925 - RNA, 19 nt, Artificial Sequence
  Description of Artificial Sequence: Synthetic oligonucleotide
  Antisense strand to SEQ ID NO: 1981924
ugauugagaauucauucac

SEQ ID NO: 1981926 - RNA, 19 nt, Artificial Sequence
  Description of Artificial Sequence: Synthetic oligonucleotide
  Sense strand starting at position 2552 of SEQ ID NO: 1880632
aggcacuauucuuuaggua

SEQ ID NO: 1981927 - RNA, 19 nt, Artificial Sequence
  Description of Artificial Sequence: Synthetic oligonucleotide
  Antisense strand to SEQ ID NO: 1981926
uaccuaaagaauagugccu

SEQ ID NO: 1981928 - RNA, 19 nt, Artificial Sequence
  Description of Artificial Sequence: Synthetic oligonucleotide
  Sense strand starting at position 2553 of SEQ ID NO: 1880632
ggcacuauucuuuagguaa

SEQ ID NO: 1981929 - RNA, 19 nt, Artificial Sequence
  Description of Artificial Sequence: Synthetic oligonucleotide
  Antisense strand to SEQ ID NO: 1981928
uuaccuaaagaauagugcc

SEQ ID NO: 1981930 - RNA, 19 nt, Artificial Sequence
  Description of Artificial Sequence: Synthetic oligonucleotide
  Sense strand starting at position 2743 of SEQ ID NO: 1880632
aucagaaaugcaugacuua

SEQ ID NO: 1981931 - RNA, 19 nt, Artificial Sequence
  Description of Artificial Sequence: Synthetic oligonucleotide
  Antisense strand to SEQ ID NO: 1981930
uaagucaugcauuucugau

SEQ ID NO: 1981932 - RNA, 19 nt, Artificial Sequence
  Description of Artificial Sequence: Synthetic oligonucleotide
  Sense strand starting at position 2750 of SEQ ID NO: 1880632
augcaugacuuagcuacaa

SEQ ID NO: 1981933 - RNA, 19 nt, Artificial Sequence
  Description of Artificial Sequence: Synthetic oligonucleotide
  Antisense strand to SEQ ID NO: 1981932
uuguagcuaagucaugcau

SEQ ID NO: 1981934 - RNA, 19 nt, Artificial Sequence
  Description of Artificial Sequence: Synthetic oligonucleotide
  Sense strand starting at position 2815 of SEQ ID NO: 1880632
gaacaaguauguuuaguaa

SEQ ID NO: 1981935 - RNA, 19 nt, Artificial Sequence
  Description of Artificial Sequence: Synthetic oligonucleotide
  Antisense strand to SEQ ID NO: 1981934
uuacuaaacauacuuguuc

SEQ ID NO: 1981936 - RNA, 19 nt, Artificial Sequence
  Description of Artificial Sequence: Synthetic oligonucleotide
  Sense strand starting at position 2964 of SEQ ID NO: 1880632
cuugcuuugcuaugauaau

SEQ ID NO: 1981937 - RNA, 19 nt, Artificial Sequence
  Description of Artificial Sequence: Synthetic oligonucleotide
  Antisense strand to SEQ ID NO: 1981936
auuaucauagcaaagcaag

SEQ ID NO: 1981938 - RNA, 19 nt, Artificial Sequence
  Description of Artificial Sequence: Synthetic oligonucleotide
  Sense strand starting at position 2990 of SEQ ID NO: 1880632
gcauauauguggcccugaa

SEQ ID NO: 1981939 - RNA, 19 nt, Artificial Sequence
  Description of Artificial Sequence: Synthetic oligonucleotide
  Antisense strand to SEQ ID NO: 1981938
uucagggccacauauaugc

SEQ ID NO: 1981940 - RNA, 19 nt, Artificial Sequence
  Description of Artificial Sequence: Synthetic oligonucleotide
  Sense strand starting at position 3014 of SEQ ID NO: 1880632
guccuuugcuuucugaaga

SEQ ID NO: 1981941 - RNA, 19 nt, Artificial Sequence
  Description of Artificial Sequence: Synthetic oligonucleotide
  Antisense strand to SEQ ID NO: 1981940
ucuucagaaagcaaaggac

SEQ ID NO: 1981942 - RNA, 19 nt, Artificial Sequence
  Description of Artificial Sequence: Synthetic oligonucleotide
  Sense strand starting at position 3019 of SEQ ID NO: 1880632
uugcuuucugaagacugaa

SEQ ID NO: 1981943 - RNA, 19 nt, Artificial Sequence
  Description of Artificial Sequence: Synthetic oligonucleotide
  Antisense strand to SEQ ID NO: 1981942
uucagucuucagaaagcaa

SEQ ID NO: 1981944 - RNA, 19 nt, Artificial Sequence
  Description of Artificial Sequence: Synthetic oligonucleotide
  Sense strand starting at position 3062 of SEQ ID NO: 1880632
ggaggaguugacgaugguu

SEQ ID NO: 1981945 - RNA, 19 nt, Artificial Sequence
  Description of Artificial Sequence: Synthetic oligonucleotide
  Antisense strand to SEQ ID NO: 1981944
aaccaucgucaacuccucc

SEQ ID NO: 1981946 - RNA, 19 nt, Artificial Sequence
  Description of Artificial Sequence: Synthetic oligonucleotide
  Sense strand starting at position 3209 of SEQ ID NO: 1880632
ggcagucauguggaccaga

SEQ ID NO: 1981947 - RNA, 19 nt, Artificial Sequence
  Description of Artificial Sequence: Synthetic oligonucleotide
  Antisense strand to SEQ ID NO: 1981946
ucugguccacaugacugcc

SEQ ID NO: 1981948 - RNA, 19 nt, Artificial Sequence
  Description of Artificial Sequence: Synthetic oligonucleotide
  Sense strand starting at position 3375 of SEQ ID NO: 1880632
gggccauguggucaacaga

SEQ ID NO: 1981949 - RNA, 19 nt, Artificial Sequence
  Description of Artificial Sequence: Synthetic oligonucleotide
  Antisense strand to SEQ ID NO: 1981948
ucuguugaccacauggccc

SEQ ID NO: 1981950 - RNA, 19 nt, Artificial Sequence
  Description of Artificial Sequence: Synthetic oligonucleotide
  Sense strand starting at position 3620 of SEQ ID NO: 1880632
cgucuuccuugguuuauuu

SEQ ID NO: 1981951 - RNA, 19 nt, Artificial Sequence
  Description of Artificial Sequence: Synthetic oligonucleotide
  Antisense strand to SEQ ID NO: 1981950
aaauaaaccaaggaagacg

SEQ ID NO: 1981952 - RNA, 19 nt, Artificial Sequence
  Description of Artificial Sequence: Synthetic oligonucleotide
  Sense strand starting at position 3690 of SEQ ID NO: 1880632
agaguaaguucugcacauc

SEQ ID NO: 1981953 - RNA, 19 nt, Artificial Sequence
  Description of Artificial Sequence: Synthetic oligonucleotide
  Antisense strand to SEQ ID NO: 1981952
gaugugcagaacuuacucu

SEQ ID NO: 1981954 - RNA, 19 nt, Artificial Sequence
  Description of Artificial Sequence: Synthetic oligonucleotide
  Sense strand starting at position 3691 of SEQ ID NO: 1880632
gaguaaguucugcacaucu

SEQ ID NO: 1981955 - RNA, 19 nt, Artificial Sequence
  Description of Artificial Sequence: Synthetic oligonucleotide
  Antisense strand to SEQ ID NO: 1981954
agaugugcagaacuuacuc

SEQ ID NO: 1981956 - RNA, 19 nt, Artificial Sequence
  Description of Artificial Sequence: Synthetic oligonucleotide
  Sense strand starting at position 3693 of SEQ ID NO: 1880632
guaaguucugcacaucuga

SEQ ID NO: 1981957 - RNA, 19 nt, Artificial Sequence
  Description of Artificial Sequence: Synthetic oligonucleotide
  Antisense strand to SEQ ID NO: 1981956
ucagaugugcagaacuuac

SEQ ID NO: 1981958 - RNA, 19 nt, Artificial Sequence
  Description of Artificial Sequence: Synthetic oligonucleotide
  Sense strand starting at position 3741 of SEQ ID NO: 1880632
cugacuuuggcuggguaua

SEQ ID NO: 1981959 - RNA, 19 nt, Artificial Sequence
  Description of Artificial Sequence: Synthetic oligonucleotide
  Antisense strand to SEQ ID NO: 1981958
uauacccagccaaagucag

SEQ ID NO: 1981960 - RNA, 19 nt, Artificial Sequence
  Description of Artificial Sequence: Synthetic oligonucleotide
  Sense strand starting at position 3743 of SEQ ID NO: 1880632
gacuuuggcuggguauaga

SEQ ID NO: 1981961 - RNA, 19 nt, Artificial Sequence
  Description of Artificial Sequence: Synthetic oligonucleotide
  Antisense strand to SEQ ID NO: 1981960
ucuauacccagccaaaguc

SEQ ID NO: 1981962 - RNA, 19 nt, Artificial Sequence
  Description of Artificial Sequence: Synthetic oligonucleotide
  Sense strand starting at position 3759 of SEQ ID NO: 1880632
agaauuccagcuugaagac

SEQ ID NO: 1981963 - RNA, 19 nt, Artificial Sequence
  Description of Artificial Sequence: Synthetic oligonucleotide
  Antisense strand to SEQ ID NO: 1981962
gucuucaagcuggaauucu

SEQ ID NO: 1981964 - RNA, 19 nt, Artificial Sequence
  Description of Artificial Sequence: Synthetic oligonucleotide
  Sense strand starting at position 3937 of SEQ ID NO: 1880632
uuucgaagccgugugguuu

SEQ ID NO: 1981965 - RNA, 19 nt, Artificial Sequence
  Description of Artificial Sequence: Synthetic oligonucleotide
  Antisense strand to SEQ ID NO: 1981964
aaaccacacggcuucgaaa

SEQ ID NO: 1981966 - RNA, 19 nt, Artificial Sequence
  Description of Artificial Sequence: Synthetic oligonucleotide
  Sense strand starting at position 911 of SEQ ID NO: 1880633
auauuaauguaguuccagu

SEQ ID NO: 1981967 - RNA, 19 nt, Artificial Sequence
  Description of Artificial Sequence: Synthetic oligonucleotide
  Antisense strand to SEQ ID NO: 1981966
acuggaacuacauuaauau

SEQ ID NO: 1981968 - RNA, 19 nt, Artificial Sequence
  Description of Artificial Sequence: Synthetic oligonucleotide
  Sense strand starting at position 1291 of SEQ ID NO: 1880633
augaguaaccgccaugcuu

SEQ ID NO: 1981969 - RNA, 19 nt, Artificial Sequence
  Description of Artificial Sequence: Synthetic oligonucleotide
  Antisense strand to SEQ ID NO: 1981968
aagcauggcgguuacucau

SEQ ID NO: 1981970 - RNA, 19 nt, Artificial Sequence
  Description of Artificial Sequence: Synthetic oligonucleotide
  Sense strand starting at position 1717 of SEQ ID NO: 1880633
aggauacucuguuuaaagg

SEQ ID NO: 1981971 - RNA, 19 nt, Artificial Sequence
  Description of Artificial Sequence: Synthetic oligonucleotide
  Antisense strand to SEQ ID NO: 1981970
ccuuuaaacagaguauccu

SEQ ID NO: 1981972 - RNA, 19 nt, Artificial Sequence
  Description of Artificial Sequence: Synthetic oligonucleotide
  Sense strand starting at position 1718 of SEQ ID NO: 1880633
ggauacucuguuuaaaggu

SEQ ID NO: 1981973 - RNA, 19 nt, Artificial Sequence
  Description of Artificial Sequence: Synthetic oligonucleotide
  Antisense strand to SEQ ID NO: 1981972
accuuuaaacagaguaucc

SEQ ID NO: 1981974 - RNA, 19 nt, Artificial Sequence
  Description of Artificial Sequence: Synthetic oligonucleotide
  Sense strand starting at position 1791 of SEQ ID NO: 1880633
ccuggaguccaagguaaua

SEQ ID NO: 1981975 - RNA, 19 nt, Artificial Sequence
  Description of Artificial Sequence: Synthetic oligonucleotide
  Antisense strand to SEQ ID NO: 1981974
uauuaccuuggacuccagg

SEQ ID NO: 1981976 - RNA, 19 nt, Artificial Sequence
  Description of Artificial Sequence: Synthetic oligonucleotide
  Sense strand starting at position 1860 of SEQ ID NO: 1880633
gcacuuuggucucuggcua

SEQ ID NO: 1981977 - RNA, 19 nt, Artificial Sequence
  Description of Artificial Sequence: Synthetic oligonucleotide
  Antisense strand to SEQ ID NO: 1981976
uagccagagaccaaagugc

SEQ ID NO: 1981978 - RNA, 19 nt, Artificial Sequence
  Description of Artificial Sequence: Synthetic oligonucleotide
  Sense strand starting at position 1874 of SEQ ID NO: 1880633
ggcuauuccgaagaaacgu

SEQ ID NO: 1981979 - RNA, 19 nt, Artificial Sequence
  Description of Artificial Sequence: Synthetic oligonucleotide
  Antisense strand to SEQ ID NO: 1981978
acguuucuucggaauagcc

SEQ ID NO: 1981980 - RNA, 19 nt, Artificial Sequence
  Description of Artificial Sequence: Synthetic oligonucleotide
  Sense strand starting at position 1880 of SEQ ID NO: 1880633
uccgaagaaacgugaaguu

SEQ ID NO: 1981981 - RNA, 19 nt, Artificial Sequence
  Description of Artificial Sequence: Synthetic oligonucleotide
  Antisense strand to SEQ ID NO: 1981980
aacuucacguuucuucgga

SEQ ID NO: 1981982 - RNA, 19 nt, Artificial Sequence
  Description of Artificial Sequence: Synthetic oligonucleotide
  Sense strand starting at position 2133 of SEQ ID NO: 1880633
agcaaugaguucccucauu

SEQ ID NO: 1981983 - RNA, 19 nt, Artificial Sequence
  Description of Artificial Sequence: Synthetic oligonucleotide
  Antisense strand to SEQ ID NO: 1981982
aaugagggaacucauugcu

SEQ ID NO: 1981984 - RNA, 19 nt, Artificial Sequence
  Description of Artificial Sequence: Synthetic oligonucleotide
  Sense strand starting at position 2370 of SEQ ID NO: 1880633
gggaauauccugugucuac

SEQ ID NO: 1981985 - RNA, 19 nt, Artificial Sequence
  Description of Artificial Sequence: Synthetic oligonucleotide
  Antisense strand to SEQ ID NO: 1981984
guagacacaggauauuccc

SEQ ID NO: 1981986 - RNA, 19 nt, Artificial Sequence
  Description of Artificial Sequence: Synthetic oligonucleotide
  Sense strand starting at position 2371 of SEQ ID NO: 1880633
ggaauauccugugucuacu

SEQ ID NO: 1981987 - RNA, 19 nt, Artificial Sequence
  Description of Artificial Sequence: Synthetic oligonucleotide
  Antisense strand to SEQ ID NO: 1981986
aguagacacaggauauucc

SEQ ID NO: 1981988 - RNA, 19 nt, Artificial Sequence
  Description of Artificial Sequence: Synthetic oligonucleotide
  Sense strand starting at position 2440 of SEQ ID NO: 1880633
caagaagucgcgcauuuac

SEQ ID NO: 1981989 - RNA, 19 nt, Artificial Sequence
  Description of Artificial Sequence: Synthetic oligonucleotide
  Antisense strand to SEQ ID NO: 1981988
guaaaugcgcgacuucuug

SEQ ID NO: 1981990 - RNA, 19 nt, Artificial Sequence
  Description of Artificial Sequence: Synthetic oligonucleotide
  Sense strand starting at position 2710 of SEQ ID NO: 1880633
cagugcuugucccucaguu

SEQ ID NO: 1981991 - RNA, 19 nt, Artificial Sequence
  Description of Artificial Sequence: Synthetic oligonucleotide
  Antisense strand to SEQ ID NO: 1981990
aacugagggacaagcacug

SEQ ID NO: 1981992 - RNA, 19 nt, Artificial Sequence
  Description of Artificial Sequence: Synthetic oligonucleotide
  Sense strand starting at position 2823 of SEQ ID NO: 1880633
guaggcugaagguguuaga

SEQ ID NO: 1981993 - RNA, 19 nt, Artificial Sequence
  Description of Artificial Sequence: Synthetic oligonucleotide
  Antisense strand to SEQ ID NO: 1981992
ucuaacaccuucagccuac

SEQ ID NO: 1981994 - RNA, 19 nt, Artificial Sequence
  Description of Artificial Sequence: Synthetic oligonucleotide
  Sense strand starting at position 2826 of SEQ ID NO: 1880633
ggcugaagguguuagauuu

SEQ ID NO: 1981995 - RNA, 19 nt, Artificial Sequence
  Description of Artificial Sequence: Synthetic oligonucleotide
  Antisense strand to SEQ ID NO: 1981994
aaaucuaacaccuucagcc

SEQ ID NO: 1981996 - RNA, 19 nt, Artificial Sequence
  Description of Artificial Sequence: Synthetic oligonucleotide
  Sense strand starting at position 2997 of SEQ ID NO: 1880633
accuguuucguagggauuu

SEQ ID NO: 1981997 - RNA, 19 nt, Artificial Sequence
  Description of Artificial Sequence: Synthetic oligonucleotide
  Antisense strand to SEQ ID NO: 1981996
aaaucccuacgaaacaggu

SEQ ID NO: 1981998 - RNA, 19 nt, Artificial Sequence
  Description of Artificial Sequence: Synthetic oligonucleotide
  Sense strand starting at position 3047 of SEQ ID NO: 1880633
gcugcagaaucuguuuauc

SEQ ID NO: 1981999 - RNA, 19 nt, Artificial Sequence
  Description of Artificial Sequence: Synthetic oligonucleotide
  Antisense strand to SEQ ID NO: 1981998
gauaaacagauucugcagc

SEQ ID NO: 1982000 - RNA, 19 nt, Artificial Sequence
  Description of Artificial Sequence: Synthetic oligonucleotide
  Sense strand starting at position 3050 of SEQ ID NO: 1880633
gcagaaucuguuuauccca

SEQ ID NO: 1982001 - RNA, 19 nt, Artificial Sequence
  Description of Artificial Sequence: Synthetic oligonucleotide
  Antisense strand to SEQ ID NO: 1982000
ugggauaaacagauucugc

SEQ ID NO: 1982002 - RNA, 19 nt, Artificial Sequence
  Description of Artificial Sequence: Synthetic oligonucleotide
  Sense strand starting at position 3053 of SEQ ID NO: 1880633
gaaucuguuuaucccagga

SEQ ID NO: 1982003 - RNA, 19 nt, Artificial Sequence
  Description of Artificial Sequence: Synthetic oligonucleotide
  Antisense strand to SEQ ID NO: 1982002
uccugggauaaacagauuc

SEQ ID NO: 1982004 - RNA, 19 nt, Artificial Sequence
  Description of Artificial Sequence: Synthetic oligonucleotide
  Sense strand starting at position 3055 of SEQ ID NO: 1880633
aucuguuuaucccaggaga

SEQ ID NO: 1982005 - RNA, 19 nt, Artificial Sequence
  Description of Artificial Sequence: Synthetic oligonucleotide
  Antisense strand to SEQ ID NO: 1982004
ucuccugggauaaacagau

SEQ ID NO: 1982006 - RNA, 19 nt, Artificial Sequence
  Description of Artificial Sequence: Synthetic oligonucleotide
  Sense strand starting at position 3057 of SEQ ID NO: 1880633
cuguuuaucccaggagagu

SEQ ID NO: 1982007 - RNA, 19 nt, Artificial Sequence
  Description of Artificial Sequence: Synthetic oligonucleotide
  Antisense strand to SEQ ID NO: 1982006
acucuccugggauaaacag

SEQ ID NO: 1982008 - RNA, 19 nt, Artificial Sequence
  Description of Artificial Sequence: Synthetic oligonucleotide
  Sense strand starting at position 3058 of SEQ ID NO: 1880633
uguuuaucccaggagaguc

SEQ ID NO: 1982009 - RNA, 19 nt, Artificial Sequence
  Description of Artificial Sequence: Synthetic oligonucleotide
  Antisense strand to SEQ ID NO: 1982008
gacucuccugggauaaaca

SEQ ID NO: 1982010 - RNA, 19 nt, Artificial Sequence
  Description of Artificial Sequence: Synthetic oligonucleotide
  Sense strand starting at position 3095 of SEQ ID NO: 1880633
gccaaagacucccaaguau

SEQ ID NO: 1982011 - RNA, 19 nt, Artificial Sequence
  Description of Artificial Sequence: Synthetic oligonucleotide
  Antisense strand to SEQ ID NO: 1982010
auacuugggagucuuuggc

SEQ ID NO: 1982012 - RNA, 19 nt, Artificial Sequence
  Description of Artificial Sequence: Synthetic oligonucleotide
  Sense strand starting at position 3236 of SEQ ID NO: 1880633
ucaccuuauugcucgacuu

SEQ ID NO: 1982013 - RNA, 19 nt, Artificial Sequence
  Description of Artificial Sequence: Synthetic oligonucleotide
  Antisense strand to SEQ ID NO: 1982012
aagucgagcaauaagguga

SEQ ID NO: 1982014 - RNA, 19 nt, Artificial Sequence
  Description of Artificial Sequence: Synthetic oligonucleotide
  Sense strand starting at position 3238 of SEQ ID NO: 1880633
accuuauugcucgacuugu

SEQ ID NO: 1982015 - RNA, 19 nt, Artificial Sequence
  Description of Artificial Sequence: Synthetic oligonucleotide
  Antisense strand to SEQ ID NO: 1982014
acaagucgagcaauaaggu

SEQ ID NO: 1982016 - RNA, 19 nt, Artificial Sequence
  Description of Artificial Sequence: Synthetic oligonucleotide
  Sense strand starting at position 3246 of SEQ ID NO: 1880633
gcucgacuuguucagacag

SEQ ID NO: 1982017 - RNA, 19 nt, Artificial Sequence
  Description of Artificial Sequence: Synthetic oligonucleotide
  Antisense strand to SEQ ID NO: 1982016
cugucugaacaagucgagc

SEQ ID NO: 1982018 - RNA, 19 nt, Artificial Sequence
  Description of Artificial Sequence: Synthetic oligonucleotide
  Sense strand starting at position 3264 of SEQ ID NO: 1880633
ggucaaagccaacgaguua

SEQ ID NO: 1982019 - RNA, 19 nt, Artificial Sequence
  Description of Artificial Sequence: Synthetic oligonucleotide
  Antisense strand to SEQ ID NO: 1982018
uaacucguuggcuuugacc

SEQ ID NO: 1982020 - RNA, 19 nt, Artificial Sequence
  Description of Artificial Sequence: Synthetic oligonucleotide
  Sense strand starting at position 3265 of SEQ ID NO: 1880633
gucaaagccaacgaguuau

SEQ ID NO: 1982021 - RNA, 19 nt, Artificial Sequence
  Description of Artificial Sequence: Synthetic oligonucleotide
  Antisense strand to SEQ ID NO: 1982020
auaacucguuggcuuugac

SEQ ID NO: 1982022 - RNA, 19 nt, Artificial Sequence
  Description of Artificial Sequence: Synthetic oligonucleotide
  Sense strand starting at position 3271 of SEQ ID NO: 1880633
gccaacgaguuauugauga

SEQ ID NO: 1982023 - RNA, 19 nt, Artificial Sequence
  Description of Artificial Sequence: Synthetic oligonucleotide
  Antisense strand to SEQ ID NO: 1982022
ucaucaauaacucguuggc

SEQ ID NO: 1982024 - RNA, 19 nt, Artificial Sequence
  Description of Artificial Sequence: Synthetic oligonucleotide
  Sense strand starting at position 3275 of SEQ ID NO: 1880633
acgaguuauugaugaacaa

SEQ ID NO: 1982025 - RNA, 19 nt, Artificial Sequence
  Description of Artificial Sequence: Synthetic oligonucleotide
  Antisense strand to SEQ ID NO: 1982024
uuguucaucaauaacucgu

SEQ ID NO: 1982026 - RNA, 19 nt, Artificial Sequence
  Description of Artificial Sequence: Synthetic oligonucleotide
  Sense strand starting at position 3392 of SEQ ID NO: 1880633
guuugcuagcgagaagcuu

SEQ ID NO: 1982027 - RNA, 19 nt, Artificial Sequence
  Description of Artificial Sequence: Synthetic oligonucleotide
  Antisense strand to SEQ ID NO: 1982026
aagcuucucgcuagcaaac

SEQ ID NO: 1982028 - RNA, 19 nt, Artificial Sequence
  Description of Artificial Sequence: Synthetic oligonucleotide
  Sense strand starting at position 3401 of SEQ ID NO: 1880633
cgagaagcuucugcagaga

SEQ ID NO: 1982029 - RNA, 19 nt, Artificial Sequence
  Description of Artificial Sequence: Synthetic oligonucleotide
  Antisense strand to SEQ ID NO: 1982028
ucucugcagaagcuucucg

SEQ ID NO: 1982030 - RNA, 19 nt, Artificial Sequence
  Description of Artificial Sequence: Synthetic oligonucleotide
  Sense strand starting at position 3404 of SEQ ID NO: 1880633
gaagcuucugcagagauaa

SEQ ID NO: 1982031 - RNA, 19 nt, Artificial Sequence
  Description of Artificial Sequence: Synthetic oligonucleotide
  Antisense strand to SEQ ID NO: 1982030
uuaucucugcagaagcuuc

SEQ ID NO: 1982032 - RNA, 19 nt, Artificial Sequence
  Description of Artificial Sequence: Synthetic oligonucleotide
  Sense strand starting at position 3763 of SEQ ID NO: 1880633
auaccaucgucuuaaugag

SEQ ID NO: 1982033 - RNA, 19 nt, Artificial Sequence
  Description of Artificial Sequence: Synthetic oligonucleotide
  Antisense strand to SEQ ID NO: 1982032
cucauuaagacgaugguau

SEQ ID NO: 1982034 - RNA, 19 nt, Artificial Sequence
  Description of Artificial Sequence: Synthetic oligonucleotide
  Sense strand starting at position 3771 of SEQ ID NO: 1880633
gucuuaaugagaugguccu

SEQ ID NO: 1982035 - RNA, 19 nt, Artificial Sequence
  Description of Artificial Sequence: Synthetic oligonucleotide
  Antisense strand to SEQ ID NO: 1982034
aggaccaucucauuaagac

SEQ ID NO: 1982036 - RNA, 19 nt, Artificial Sequence
  Description of Artificial Sequence: Synthetic oligonucleotide
  Sense strand starting at position 3777 of SEQ ID NO: 1880633
augagaugguccuccagga

SEQ ID NO: 1982037 - RNA, 19 nt, Artificial Sequence
  Description of Artificial Sequence: Synthetic oligonucleotide
  Antisense strand to SEQ ID NO: 1982036
uccuggaggaccaucucau

SEQ ID NO: 1982038 - RNA, 19 nt, Artificial Sequence
  Description of Artificial Sequence: Synthetic oligonucleotide
  Sense strand starting at position 3803 of SEQ ID NO: 1880633
caggccuaaucagaaaugu

SEQ ID NO: 1982039 - RNA, 19 nt, Artificial Sequence
  Description of Artificial Sequence: Synthetic oligonucleotide
  Antisense strand to SEQ ID NO: 1982038
acauuucugauuaggccug

SEQ ID NO: 1982040 - RNA, 19 nt, Artificial Sequence
  Description of Artificial Sequence: Synthetic oligonucleotide
  Sense strand starting at position 3812 of SEQ ID NO: 1880633
ucagaaauguaccugucuu

SEQ ID NO: 1982041 - RNA, 19 nt, Artificial Sequence
  Description of Artificial Sequence: Synthetic oligonucleotide
  Antisense strand to SEQ ID NO: 1982040
aagacagguacauuucuga

SEQ ID NO: 1982042 - RNA, 19 nt, Artificial Sequence
  Description of Artificial Sequence: Synthetic oligonucleotide
  Sense strand starting at position 3838 of SEQ ID NO: 1880633
acaggcaacucagaaagau

SEQ ID NO: 1982043 - RNA, 19 nt, Artificial Sequence
  Description of Artificial Sequence: Synthetic oligonucleotide
  Antisense strand to SEQ ID NO: 1982042
aucuuucugaguugccugu

SEQ ID NO: 1982044 - RNA, 19 nt, Artificial Sequence
  Description of Artificial Sequence: Synthetic oligonucleotide
  Sense strand starting at position 3958 of SEQ ID NO: 1880633
ggcggaaauucuccaacug

SEQ ID NO: 1982045 - RNA, 19 nt, Artificial Sequence
  Description of Artificial Sequence: Synthetic oligonucleotide
  Antisense strand to SEQ ID NO: 1982044
caguuggagaauuuccgcc

SEQ ID NO: 1982046 - RNA, 19 nt, Artificial Sequence
  Description of Artificial Sequence: Synthetic oligonucleotide
  Sense strand starting at position 8 of SEQ ID NO: 1880634
agugguuaauugugugcua

SEQ ID NO: 1982047 - RNA, 19 nt, Artificial Sequence
  Description of Artificial Sequence: Synthetic oligonucleotide
  Antisense strand to SEQ ID NO: 1982046
uagcacacaauuaaccacu

SEQ ID NO: 1982048 - RNA, 19 nt, Artificial Sequence
  Description of Artificial Sequence: Synthetic oligonucleotide
  Sense strand starting at position 40 of SEQ ID NO: 1880634
ggguaaguguguucugcua

SEQ ID NO: 1982049 - RNA, 19 nt, Artificial Sequence
  Description of Artificial Sequence: Synthetic oligonucleotide
  Antisense strand to SEQ ID NO: 1982048
uagcagaacacacuuaccc

SEQ ID NO: 1982050 - RNA, 19 nt, Artificial Sequence
  Description of Artificial Sequence: Synthetic oligonucleotide
  Sense strand starting at position 42 of SEQ ID NO: 1880634
guaaguguguucugcuaga

SEQ ID NO: 1982051 - RNA, 19 nt, Artificial Sequence
  Description of Artificial Sequence: Synthetic oligonucleotide
  Antisense strand to SEQ ID NO: 1982050
ucuagcagaacacacuuac

SEQ ID NO: 1982052 - RNA, 19 nt, Artificial Sequence
  Description of Artificial Sequence: Synthetic oligonucleotide
  Sense strand starting at position 68 of SEQ ID NO: 1880634
aaugcuguuccaggccaaa

SEQ ID NO: 1982053 - RNA, 19 nt, Artificial Sequence
  Description of Artificial Sequence: Synthetic oligonucleotide
  Antisense strand to SEQ ID NO: 1982052
uuuggccuggaacagcauu

SEQ ID NO: 1982054 - RNA, 19 nt, Artificial Sequence
  Description of Artificial Sequence: Synthetic oligonucleotide
  Sense strand starting at position 120 of SEQ ID NO: 1880634
ggcaguaagcucugcugau

SEQ ID NO: 1982055 - RNA, 19 nt, Artificial Sequence
  Description of Artificial Sequence: Synthetic oligonucleotide
  Antisense strand to SEQ ID NO: 1982054
aucagcagagcuuacugcc

SEQ ID NO: 1982056 - RNA, 19 nt, Artificial Sequence
  Description of Artificial Sequence: Synthetic oligonucleotide
  Sense strand starting at position 121 of SEQ ID NO: 1880634
gcaguaagcucugcugaua

SEQ ID NO: 1982057 - RNA, 19 nt, Artificial Sequence
  Description of Artificial Sequence: Synthetic oligonucleotide
  Antisense strand to SEQ ID NO: 1982056
uaucagcagagcuuacugc

SEQ ID NO: 1982058 - RNA, 19 nt, Artificial Sequence
  Description of Artificial Sequence: Synthetic oligonucleotide
  Sense strand starting at position 132 of SEQ ID NO: 1880634
ugcugauaugggugucuca

SEQ ID NO: 1982059 - RNA, 19 nt, Artificial Sequence
  Description of Artificial Sequence: Synthetic oligonucleotide
  Antisense strand to SEQ ID NO: 1982058
ugagacacccauaucagca

SEQ ID NO: 1982060 - RNA, 19 nt, Artificial Sequence
  Description of Artificial Sequence: Synthetic oligonucleotide
  Sense strand starting at position 224 of SEQ ID NO: 1880634
gauugaagcccacaagguu

SEQ ID NO: 1982061 - RNA, 19 nt, Artificial Sequence
  Description of Artificial Sequence: Synthetic oligonucleotide
  Antisense strand to SEQ ID NO: 1982060
aaccuugugggcuucaauc

SEQ ID NO: 1982062 - RNA, 19 nt, Artificial Sequence
  Description of Artificial Sequence: Synthetic oligonucleotide
  Sense strand starting at position 244 of SEQ ID NO: 1880634
aguuacuugccucaugcua

SEQ ID NO: 1982063 - RNA, 19 nt, Artificial Sequence
  Description of Artificial Sequence: Synthetic oligonucleotide
  Antisense strand to SEQ ID NO: 1982062
uagcaugaggcaaguaacu

SEQ ID NO: 1982064 - RNA, 19 nt, Artificial Sequence
  Description of Artificial Sequence: Synthetic oligonucleotide
  Sense strand starting at position 361 of SEQ ID NO: 1880634
uggguuagaucugcucuca

SEQ ID NO: 1982065 - RNA, 19 nt, Artificial Sequence
  Description of Artificial Sequence: Synthetic oligonucleotide
  Antisense strand to SEQ ID NO: 1982064
ugagagcagaucuaaccca

SEQ ID NO: 1982066 - RNA, 19 nt, Artificial Sequence
  Description of Artificial Sequence: Synthetic oligonucleotide
  Sense strand starting at position 540 of SEQ ID NO: 1880634
cccuuucuucccuggauga

SEQ ID NO: 1982067 - RNA, 19 nt, Artificial Sequence
  Description of Artificial Sequence: Synthetic oligonucleotide
  Antisense strand to SEQ ID NO: 1982066
ucauccagggaagaaaggg

SEQ ID NO: 1982068 - RNA, 19 nt, Artificial Sequence
  Description of Artificial Sequence: Synthetic oligonucleotide
  Sense strand starting at position 750 of SEQ ID NO: 1880634
ucuggugccuggugugaaa

SEQ ID NO: 1982069 - RNA, 19 nt, Artificial Sequence
  Description of Artificial Sequence: Synthetic oligonucleotide
  Antisense strand to SEQ ID NO: 1982068
uuucacaccaggcaccaga

SEQ ID NO: 1982070 - RNA, 19 nt, Artificial Sequence
  Description of Artificial Sequence: Synthetic oligonucleotide
  Sense strand starting at position 915 of SEQ ID NO: 1880634
ucagucugcuccugggagu

SEQ ID NO: 1982071 - RNA, 19 nt, Artificial Sequence
  Description of Artificial Sequence: Synthetic oligonucleotide
  Antisense strand to SEQ ID NO: 1982070
acucccaggagcagacuga

SEQ ID NO: 1982072 - RNA, 19 nt, Artificial Sequence
  Description of Artificial Sequence: Synthetic oligonucleotide
  Sense strand starting at position 916 of SEQ ID NO: 1880634
cagucugcuccugggaguu

SEQ ID NO: 1982073 - RNA, 19 nt, Artificial Sequence
  Description of Artificial Sequence: Synthetic oligonucleotide
  Antisense strand to SEQ ID NO: 1982072
aacucccaggagcagacug

SEQ ID NO: 1982074 - RNA, 19 nt, Artificial Sequence
  Description of Artificial Sequence: Synthetic oligonucleotide
  Sense strand starting at position 1020 of SEQ ID NO: 1880634
gcagcucucauuggaggau

SEQ ID NO: 1982075 - RNA, 19 nt, Artificial Sequence
  Description of Artificial Sequence: Synthetic oligonucleotide
  Antisense strand to SEQ ID NO: 1982074
auccuccaaugagagcugc

SEQ ID NO: 1982076 - RNA, 19 nt, Artificial Sequence
  Description of Artificial Sequence: Synthetic oligonucleotide
  Sense strand starting at position 1039 of SEQ ID NO: 1880634
cccagaagguucuagguga

SEQ ID NO: 1982077 - RNA, 19 nt, Artificial Sequence
  Description of Artificial Sequence: Synthetic oligonucleotide
  Antisense strand to SEQ ID NO: 1982076
ucaccuagaaccuucuggg

SEQ ID NO: 1982078 - RNA, 19 nt, Artificial Sequence
  Description of Artificial Sequence: Synthetic oligonucleotide
  Sense strand starting at position 1046 of SEQ ID NO: 1880634
gguucuaggugagcucuaa

SEQ ID NO: 1982079 - RNA, 19 nt, Artificial Sequence
  Description of Artificial Sequence: Synthetic oligonucleotide
  Antisense strand to SEQ ID NO: 1982078
uuagagcucaccuagaacc

SEQ ID NO: 1982080 - RNA, 19 nt, Artificial Sequence
  Description of Artificial Sequence: Synthetic oligonucleotide
  Sense strand starting at position 1050 of SEQ ID NO: 1880634
cuaggugagcucuaauccu

SEQ ID NO: 1982081 - RNA, 19 nt, Artificial Sequence
  Description of Artificial Sequence: Synthetic oligonucleotide
  Antisense strand to SEQ ID NO: 1982080
aggauuagagcucaccuag

SEQ ID NO: 1982082 - RNA, 19 nt, Artificial Sequence
  Description of Artificial Sequence: Synthetic oligonucleotide
  Sense strand starting at position 1131 of SEQ ID NO: 1880634
gcucacagcccguguauga

SEQ ID NO: 1982083 - RNA, 19 nt, Artificial Sequence
  Description of Artificial Sequence: Synthetic oligonucleotide
  Antisense strand to SEQ ID NO: 1982082
ucauacacgggcugugagc

SEQ ID NO: 1982084 - RNA, 19 nt, Artificial Sequence
  Description of Artificial Sequence: Synthetic oligonucleotide
  Sense strand starting at position 1520 of SEQ ID NO: 1880634
uguggcacccagugaugaa

SEQ ID NO: 1982085 - RNA, 19 nt, Artificial Sequence
  Description of Artificial Sequence: Synthetic oligonucleotide
  Antisense strand to SEQ ID NO: 1982084
uucaucacugggugccaca

SEQ ID NO: 1982086 - RNA, 19 nt, Artificial Sequence
  Description of Artificial Sequence: Synthetic oligonucleotide
  Sense strand starting at position 1764 of SEQ ID NO: 1880634
uugagacagcuuuguuaga

SEQ ID NO: 1982087 - RNA, 19 nt, Artificial Sequence
  Description of Artificial Sequence: Synthetic oligonucleotide
  Antisense strand to SEQ ID NO: 1982086
ucuaacaaagcugucucaa

SEQ ID NO: 1982088 - RNA, 19 nt, Artificial Sequence
  Description of Artificial Sequence: Synthetic oligonucleotide
  Sense strand starting at position 1765 of SEQ ID NO: 1880634
ugagacagcuuuguuagaa

SEQ ID NO: 1982089 - RNA, 19 nt, Artificial Sequence
  Description of Artificial Sequence: Synthetic oligonucleotide
  Antisense strand to SEQ ID NO: 1982088
uucuaacaaagcugucuca

SEQ ID NO: 1982090 - RNA, 19 nt, Artificial Sequence
  Description of Artificial Sequence: Synthetic oligonucleotide
  Sense strand starting at position 1766 of SEQ ID NO: 1880634
gagacagcuuuguuagaac

SEQ ID NO: 1982091 - RNA, 19 nt, Artificial Sequence
  Description of Artificial Sequence: Synthetic oligonucleotide
  Antisense strand to SEQ ID NO: 1982090
guucuaacaaagcugucuc

SEQ ID NO: 1982092 - RNA, 19 nt, Artificial Sequence
  Description of Artificial Sequence: Synthetic oligonucleotide
  Sense strand starting at position 1769 of SEQ ID NO: 1880634
acagcuuuguuagaacaac

SEQ ID NO: 1982093 - RNA, 19 nt, Artificial Sequence
  Description of Artificial Sequence: Synthetic oligonucleotide
  Antisense strand to SEQ ID NO: 1982092
guuguucuaacaaagcugu

SEQ ID NO: 1982094 - RNA, 19 nt, Artificial Sequence
  Description of Artificial Sequence: Synthetic oligonucleotide
  Sense strand starting at position 2504 of SEQ ID NO: 1880634
ucgucauccuaagcagaga

SEQ ID NO: 1982095 - RNA, 19 nt, Artificial Sequence
  Description of Artificial Sequence: Synthetic oligonucleotide
  Antisense strand to SEQ ID NO: 1982094
ucucugcuuaggaugacga

SEQ ID NO: 1982096 - RNA, 19 nt, Artificial Sequence
  Description of Artificial Sequence: Synthetic oligonucleotide
  Sense strand starting at position 2505 of SEQ ID NO: 1880634
cgucauccuaagcagagaa

SEQ ID NO: 1982097 - RNA, 19 nt, Artificial Sequence
  Description of Artificial Sequence: Synthetic oligonucleotide
  Antisense strand to SEQ ID NO: 1982096
uucucugcuuaggaugacg

SEQ ID NO: 1982098 - RNA, 19 nt, Artificial Sequence
  Description of Artificial Sequence: Synthetic oligonucleotide
  Sense strand starting at position 3078 of SEQ ID NO: 1880634
ccaauagaucaguggcuuu

SEQ ID NO: 1982099 - RNA, 19 nt, Artificial Sequence
  Description of Artificial Sequence: Synthetic oligonucleotide
  Antisense strand to SEQ ID NO: 1982098
aaagccacugaucuauugg

SEQ ID NO: 1982100 - RNA, 19 nt, Artificial Sequence
  Description of Artificial Sequence: Synthetic oligonucleotide
  Sense strand starting at position 3419 of SEQ ID NO: 1880634
ccucauucuccucgacaga

SEQ ID NO: 1982101 - RNA, 19 nt, Artificial Sequence
  Description of Artificial Sequence: Synthetic oligonucleotide
  Antisense strand to SEQ ID NO: 1982100
ucugucgaggagaaugagg

SEQ ID NO: 1982102 - RNA, 19 nt, Artificial Sequence
  Description of Artificial Sequence: Synthetic oligonucleotide
  Sense strand starting at position 3420 of SEQ ID NO: 1880634
cucauucuccucgacagaa

SEQ ID NO: 1982103 - RNA, 19 nt, Artificial Sequence
  Description of Artificial Sequence: Synthetic oligonucleotide
  Antisense strand to SEQ ID NO: 1982102
uucugucgaggagaaugag

SEQ ID NO: 1982104 - RNA, 19 nt, Artificial Sequence
  Description of Artificial Sequence: Synthetic oligonucleotide
  Sense strand starting at position 3665 of SEQ ID NO: 1880634
accggagucuccucugaac

SEQ ID NO: 1982105 - RNA, 19 nt, Artificial Sequence
  Description of Artificial Sequence: Synthetic oligonucleotide
  Antisense strand to SEQ ID NO: 1982104
guucagaggagacuccggu

SEQ ID NO: 1982106 - RNA, 19 nt, Artificial Sequence
  Description of Artificial Sequence: Synthetic oligonucleotide
  Sense strand starting at position 3668 of SEQ ID NO: 1880634
ggagucuccucugaaccua

SEQ ID NO: 1982107 - RNA, 19 nt, Artificial Sequence
  Description of Artificial Sequence: Synthetic oligonucleotide
  Antisense strand to SEQ ID NO: 1982106
uagguucagaggagacucc

SEQ ID NO: 1982108 - RNA, 19 nt, Artificial Sequence
  Description of Artificial Sequence: Synthetic oligonucleotide
  Sense strand starting at position 3749 of SEQ ID NO: 1880634
ggguaaagcucauuggcua

SEQ ID NO: 1982109 - RNA, 19 nt, Artificial Sequence
  Description of Artificial Sequence: Synthetic oligonucleotide
  Antisense strand to SEQ ID NO: 1982108
uagccaaugagcuuuaccc

SEQ ID NO: 1982110 - RNA, 19 nt, Artificial Sequence
  Description of Artificial Sequence: Synthetic oligonucleotide
  Sense strand starting at position 3780 of SEQ ID NO: 1880634
ugugcaaagcuauacauau

SEQ ID NO: 1982111 - RNA, 19 nt, Artificial Sequence
  Description of Artificial Sequence: Synthetic oligonucleotide
  Antisense strand to SEQ ID NO: 1982110
auauguauagcuuugcaca

SEQ ID NO: 1982112 - RNA, 19 nt, Artificial Sequence
  Description of Artificial Sequence: Synthetic oligonucleotide
  Sense strand starting at position 8 of SEQ ID NO: 1880635
agugguuaauugugugcua

SEQ ID NO: 1982113 - RNA, 19 nt, Artificial Sequence
  Description of Artificial Sequence: Synthetic oligonucleotide
  Antisense strand to SEQ ID NO: 1982112
uagcacacaauuaaccacu

SEQ ID NO: 1982114 - RNA, 19 nt, Artificial Sequence
  Description of Artificial Sequence: Synthetic oligonucleotide
  Sense strand starting at position 40 of SEQ ID NO: 1880635
ggguaaguguguucugcua

SEQ ID NO: 1982115 - RNA, 19 nt, Artificial Sequence
  Description of Artificial Sequence: Synthetic oligonucleotide
  Antisense strand to SEQ ID NO: 1982114
uagcagaacacacuuaccc

SEQ ID NO: 1982116 - RNA, 19 nt, Artificial Sequence
  Description of Artificial Sequence: Synthetic oligonucleotide
  Sense strand starting at position 42 of SEQ ID NO: 1880635
guaaguguguucugcuaga

SEQ ID NO: 1982117 - RNA, 19 nt, Artificial Sequence
  Description of Artificial Sequence: Synthetic oligonucleotide
  Antisense strand to SEQ ID NO: 1982116
ucuagcagaacacacuuac

SEQ ID NO: 1982118 - RNA, 19 nt, Artificial Sequence
  Description of Artificial Sequence: Synthetic oligonucleotide
  Sense strand starting at position 68 of SEQ ID NO: 1880635
aaugcuguuccaggccaaa

SEQ ID NO: 1982119 - RNA, 19 nt, Artificial Sequence
  Description of Artificial Sequence: Synthetic oligonucleotide
  Antisense strand to SEQ ID NO: 1982118
uuuggccuggaacagcauu

SEQ ID NO: 1982120 - RNA, 19 nt, Artificial Sequence
  Description of Artificial Sequence: Synthetic oligonucleotide
  Sense strand starting at position 120 of SEQ ID NO: 1880635
ggcaguaagcucugcugau

SEQ ID NO: 1982121 - RNA, 19 nt, Artificial Sequence
  Description of Artificial Sequence: Synthetic oligonucleotide
  Antisense strand to SEQ ID NO: 1982120
aucagcagagcuuacugcc

SEQ ID NO: 1982122 - RNA, 19 nt, Artificial Sequence
  Description of Artificial Sequence: Synthetic oligonucleotide
  Sense strand starting at position 121 of SEQ ID NO: 1880635
gcaguaagcucugcugaua

SEQ ID NO: 1982123 - RNA, 19 nt, Artificial Sequence
  Description of Artificial Sequence: Synthetic oligonucleotide
  Antisense strand to SEQ ID NO: 1982122
uaucagcagagcuuacugc

SEQ ID NO: 1982124 - RNA, 19 nt, Artificial Sequence
  Description of Artificial Sequence: Synthetic oligonucleotide
  Sense strand starting at position 132 of SEQ ID NO: 1880635
ugcugauaugggugucuca

SEQ ID NO: 1982125 - RNA, 19 nt, Artificial Sequence
  Description of Artificial Sequence: Synthetic oligonucleotide
  Antisense strand to SEQ ID NO: 1982124
ugagacacccauaucagca

SEQ ID NO: 1982126 - RNA, 19 nt, Artificial Sequence
  Description of Artificial Sequence: Synthetic oligonucleotide
  Sense strand starting at position 224 of SEQ ID NO: 1880635
gauugaagcccacaagguu

SEQ ID NO: 1982127 - RNA, 19 nt, Artificial Sequence
  Description of Artificial Sequence: Synthetic oligonucleotide
  Antisense strand to SEQ ID NO: 1982126
aaccuugugggcuucaauc

SEQ ID NO: 1982128 - RNA, 19 nt, Artificial Sequence
  Description of Artificial Sequence: Synthetic oligonucleotide
  Sense strand starting at position 244 of SEQ ID NO: 1880635
aguuacuugccucaugcua

SEQ ID NO: 1982129 - RNA, 19 nt, Artificial Sequence
  Description of Artificial Sequence: Synthetic oligonucleotide
  Antisense strand to SEQ ID NO: 1982128
uagcaugaggcaaguaacu

SEQ ID NO: 1982130 - RNA, 19 nt, Artificial Sequence
  Description of Artificial Sequence: Synthetic oligonucleotide
  Sense strand starting at position 361 of SEQ ID NO: 1880635
uggguuagaucugcucuca

SEQ ID NO: 1982131 - RNA, 19 nt, Artificial Sequence
  Description of Artificial Sequence: Synthetic oligonucleotide
  Antisense strand to SEQ ID NO: 1982130
ugagagcagaucuaaccca

SEQ ID NO: 1982132 - RNA, 19 nt, Artificial Sequence
  Description of Artificial Sequence: Synthetic oligonucleotide
  Sense strand starting at position 540 of SEQ ID NO: 1880635
cccuuucuucccuggauga

SEQ ID NO: 1982133 - RNA, 19 nt, Artificial Sequence
  Description of Artificial Sequence: Synthetic oligonucleotide
  Antisense strand to SEQ ID NO: 1982132
ucauccagggaagaaaggg

SEQ ID NO: 1982134 - RNA, 19 nt, Artificial Sequence
  Description of Artificial Sequence: Synthetic oligonucleotide
  Sense strand starting at position 750 of SEQ ID NO: 1880635
ucuggugccuggugugaaa

SEQ ID NO: 1982135 - RNA, 19 nt, Artificial Sequence
  Description of Artificial Sequence: Synthetic oligonucleotide
  Antisense strand to SEQ ID NO: 1982134
uuucacaccaggcaccaga

SEQ ID NO: 1982136 - RNA, 19 nt, Artificial Sequence
  Description of Artificial Sequence: Synthetic oligonucleotide
  Sense strand starting at position 915 of SEQ ID NO: 1880635
ucagucugcuccugggagu

SEQ ID NO: 1982137 - RNA, 19 nt, Artificial Sequence
  Description of Artificial Sequence: Synthetic oligonucleotide
  Antisense strand to SEQ ID NO: 1982136
acucccaggagcagacuga

SEQ ID NO: 1982138 - RNA, 19 nt, Artificial Sequence
  Description of Artificial Sequence: Synthetic oligonucleotide
  Sense strand starting at position 916 of SEQ ID NO: 1880635
cagucugcuccugggaguu

SEQ ID NO: 1982139 - RNA, 19 nt, Artificial Sequence
  Description of Artificial Sequence: Synthetic oligonucleotide
  Antisense strand to SEQ ID NO: 1982138
aacucccaggagcagacug

SEQ ID NO: 1982140 - RNA, 19 nt, Artificial Sequence
  Description of Artificial Sequence: Synthetic oligonucleotide
  Sense strand starting at position 1020 of SEQ ID NO: 1880635
gcagcucucauuggaggau

SEQ ID NO: 1982141 - RNA, 19 nt, Artificial Sequence
  Description of Artificial Sequence: Synthetic oligonucleotide
  Antisense strand to SEQ ID NO: 1982140
auccuccaaugagagcugc

SEQ ID NO: 1982142 - RNA, 19 nt, Artificial Sequence
  Description of Artificial Sequence: Synthetic oligonucleotide
  Sense strand starting at position 1039 of SEQ ID NO: 1880635
cccagaagguucuagguga

SEQ ID NO: 1982143 - RNA, 19 nt, Artificial Sequence
  Description of Artificial Sequence: Synthetic oligonucleotide
  Antisense strand to SEQ ID NO: 1982142
ucaccuagaaccuucuggg

SEQ ID NO: 1982144 - RNA, 19 nt, Artificial Sequence
  Description of Artificial Sequence: Synthetic oligonucleotide
  Sense strand starting at position 1046 of SEQ ID NO: 1880635
gguucuaggugagcucuaa

SEQ ID NO: 1982145 - RNA, 19 nt, Artificial Sequence
  Description of Artificial Sequence: Synthetic oligonucleotide
  Antisense strand to SEQ ID NO: 1982144
uuagagcucaccuagaacc

SEQ ID NO: 1982146 - RNA, 19 nt, Artificial Sequence
  Description of Artificial Sequence: Synthetic oligonucleotide
  Sense strand starting at position 1050 of SEQ ID NO: 1880635
cuaggugagcucuaauccu

SEQ ID NO: 1982147 - RNA, 19 nt, Artificial Sequence
  Description of Artificial Sequence: Synthetic oligonucleotide
  Antisense strand to SEQ ID NO: 1982146
aggauuagagcucaccuag

SEQ ID NO: 1982148 - RNA, 19 nt, Artificial Sequence
  Description of Artificial Sequence: Synthetic oligonucleotide
  Sense strand starting at position 1131 of SEQ ID NO: 1880635
gcucacagcccguguauga

SEQ ID NO: 1982149 - RNA, 19 nt, Artificial Sequence
  Description of Artificial Sequence: Synthetic oligonucleotide
  Antisense strand to SEQ ID NO: 1982148
ucauacacgggcugugagc

SEQ ID NO: 1982150 - RNA, 19 nt, Artificial Sequence
  Description of Artificial Sequence: Synthetic oligonucleotide
  Sense strand starting at position 1520 of SEQ ID NO: 1880635
uguggcacccagugaugaa

SEQ ID NO: 1982151 - RNA, 19 nt, Artificial Sequence
  Description of Artificial Sequence: Synthetic oligonucleotide
  Antisense strand to SEQ ID NO: 1982150
uucaucacugggugccaca

SEQ ID NO: 1982152 - RNA, 19 nt, Artificial Sequence
  Description of Artificial Sequence: Synthetic oligonucleotide
  Sense strand starting at position 1764 of SEQ ID NO: 1880635
uugagacagcuuuguuaga

SEQ ID NO: 1982153 - RNA, 19 nt, Artificial Sequence
  Description of Artificial Sequence: Synthetic oligonucleotide
  Antisense strand to SEQ ID NO: 1982152
ucuaacaaagcugucucaa

SEQ ID NO: 1982154 - RNA, 19 nt, Artificial Sequence
  Description of Artificial Sequence: Synthetic oligonucleotide
  Sense strand starting at position 1765 of SEQ ID NO: 1880635
ugagacagcuuuguuagaa

SEQ ID NO: 1982155 - RNA, 19 nt, Artificial Sequence
  Description of Artificial Sequence: Synthetic oligonucleotide
  Antisense strand to SEQ ID NO: 1982154
uucuaacaaagcugucuca

SEQ ID NO: 1982156 - RNA, 19 nt, Artificial Sequence
  Description of Artificial Sequence: Synthetic oligonucleotide
  Sense strand starting at position 1766 of SEQ ID NO: 1880635
gagacagcuuuguuagaac

SEQ ID NO: 1982157 - RNA, 19 nt, Artificial Sequence
  Description of Artificial Sequence: Synthetic oligonucleotide
  Antisense strand to SEQ ID NO: 1982156
guucuaacaaagcugucuc

SEQ ID NO: 1982158 - RNA, 19 nt, Artificial Sequence
  Description of Artificial Sequence: Synthetic oligonucleotide
  Sense strand starting at position 1769 of SEQ ID NO: 1880635
acagcuuuguuagaacaac

SEQ ID NO: 1982159 - RNA, 19 nt, Artificial Sequence
  Description of Artificial Sequence: Synthetic oligonucleotide
  Antisense strand to SEQ ID NO: 1982158
guuguucuaacaaagcugu

SEQ ID NO: 1982160 - RNA, 19 nt, Artificial Sequence
  Description of Artificial Sequence: Synthetic oligonucleotide
  Sense strand starting at position 2504 of SEQ ID NO: 1880635
ucgucauccuaagcagaga

SEQ ID NO: 1982161 - RNA, 19 nt, Artificial Sequence
  Description of Artificial Sequence: Synthetic oligonucleotide
  Antisense strand to SEQ ID NO: 1982160
ucucugcuuaggaugacga

SEQ ID NO: 1982162 - RNA, 19 nt, Artificial Sequence
  Description of Artificial Sequence: Synthetic oligonucleotide
  Sense strand starting at position 2505 of SEQ ID NO: 1880635
cgucauccuaagcagagaa

SEQ ID NO: 1982163 - RNA, 19 nt, Artificial Sequence
  Description of Artificial Sequence: Synthetic oligonucleotide
  Antisense strand to SEQ ID NO: 1982162
uucucugcuuaggaugacg

SEQ ID NO: 1982164 - RNA, 19 nt, Artificial Sequence
  Description of Artificial Sequence: Synthetic oligonucleotide
  Sense strand starting at position 3078 of SEQ ID NO: 1880635
ccaauagaucaguggcuuu

SEQ ID NO: 1982165 - RNA, 19 nt, Artificial Sequence
  Description of Artificial Sequence: Synthetic oligonucleotide
  Antisense strand to SEQ ID NO: 1982164
aaagccacugaucuauugg

SEQ ID NO: 1982166 - RNA, 19 nt, Artificial Sequence
  Description of Artificial Sequence: Synthetic oligonucleotide
  Sense strand starting at position 3419 of SEQ ID NO: 1880635
ccucauucuccucgacaga

SEQ ID NO: 1982167 - RNA, 19 nt, Artificial Sequence
  Description of Artificial Sequence: Synthetic oligonucleotide
  Antisense strand to SEQ ID NO: 1982166
ucugucgaggagaaugagg

SEQ ID NO: 1982168 - RNA, 19 nt, Artificial Sequence
  Description of Artificial Sequence: Synthetic oligonucleotide
  Sense strand starting at position 3420 of SEQ ID NO: 1880635
cucauucuccucgacagaa

SEQ ID NO: 1982169 - RNA, 19 nt, Artificial Sequence
  Description of Artificial Sequence: Synthetic oligonucleotide
  Antisense strand to SEQ ID NO: 1982168
uucugucgaggagaaugag

SEQ ID NO: 1982170 - RNA, 19 nt, Artificial Sequence
  Description of Artificial Sequence: Synthetic oligonucleotide
  Sense strand starting at position 3665 of SEQ ID NO: 1880635
accggagucuccucugaac

SEQ ID NO: 1982171 - RNA, 19 nt, Artificial Sequence
  Description of Artificial Sequence: Synthetic oligonucleotide
  Antisense strand to SEQ ID NO: 1982170
guucagaggagacuccggu

SEQ ID NO: 1982172 - RNA, 19 nt, Artificial Sequence
  Description of Artificial Sequence: Synthetic oligonucleotide
  Sense strand starting at position 3668 of SEQ ID NO: 1880635
ggagucuccucugaaccua

SEQ ID NO: 1982173 - RNA, 19 nt, Artificial Sequence
  Description of Artificial Sequence: Synthetic oligonucleotide
  Antisense strand to SEQ ID NO: 1982172
uagguucagaggagacucc

SEQ ID NO: 1982174 - RNA, 19 nt, Artificial Sequence
  Description of Artificial Sequence: Synthetic oligonucleotide
  Sense strand starting at position 3749 of SEQ ID NO: 1880635
ggguaaagcucauuggcua

SEQ ID NO: 1982175 - RNA, 19 nt, Artificial Sequence
  Description of Artificial Sequence: Synthetic oligonucleotide
  Antisense strand to SEQ ID NO: 1982174
uagccaaugagcuuuaccc

SEQ ID NO: 1982176 - RNA, 19 nt, Artificial Sequence
  Description of Artificial Sequence: Synthetic oligonucleotide
  Sense strand starting at position 3780 of SEQ ID NO: 1880635
ugugcaaagcuauacauau

SEQ ID NO: 1982177 - RNA, 19 nt, Artificial Sequence
  Description of Artificial Sequence: Synthetic oligonucleotide
  Antisense strand to SEQ ID NO: 1982176
auauguauagcuuugcaca

SEQ ID NO: 1982178 - RNA, 19 nt, Artificial Sequence
  Description of Artificial Sequence: Synthetic oligonucleotide
  Sense strand starting at position 8 of SEQ ID NO: 1880636
agugguuaauugugugcua

SEQ ID NO: 1982179 - RNA, 19 nt, Artificial Sequence
  Description of Artificial Sequence: Synthetic oligonucleotide
  Antisense strand to SEQ ID NO: 1982178
uagcacacaauuaaccacu

SEQ ID NO: 1982180 - RNA, 19 nt, Artificial Sequence
  Description of Artificial Sequence: Synthetic oligonucleotide
  Sense strand starting at position 40 of SEQ ID NO: 1880636
ggguaaguguguucugcua

SEQ ID NO: 1982181 - RNA, 19 nt, Artificial Sequence
  Description of Artificial Sequence: Synthetic oligonucleotide
  Antisense strand to SEQ ID NO: 1982180
uagcagaacacacuuaccc

SEQ ID NO: 1982182 - RNA, 19 nt, Artificial Sequence
  Description of Artificial Sequence: Synthetic oligonucleotide
  Sense strand starting at position 42 of SEQ ID NO: 1880636
guaaguguguucugcuaga

SEQ ID NO: 1982183 - RNA, 19 nt, Artificial Sequence
  Description of Artificial Sequence: Synthetic oligonucleotide
  Antisense strand to SEQ ID NO: 1982182
ucuagcagaacacacuuac

SEQ ID NO: 1982184 - RNA, 19 nt, Artificial Sequence
  Description of Artificial Sequence: Synthetic oligonucleotide
  Sense strand starting at position 68 of SEQ ID NO: 1880636
aaugcuguuccaggccaaa

SEQ ID NO: 1982185 - RNA, 19 nt, Artificial Sequence
  Description of Artificial Sequence: Synthetic oligonucleotide
  Antisense strand to SEQ ID NO: 1982184
uuuggccuggaacagcauu

SEQ ID NO: 1982186 - RNA, 19 nt, Artificial Sequence
  Description of Artificial Sequence: Synthetic oligonucleotide
  Sense strand starting at position 120 of SEQ ID NO: 1880636
ggcaguaagcucugcugau

SEQ ID NO: 1982187 - RNA, 19 nt, Artificial Sequence
  Description of Artificial Sequence: Synthetic oligonucleotide
  Antisense strand to SEQ ID NO: 1982186
aucagcagagcuuacugcc

SEQ ID NO: 1982188 - RNA, 19 nt, Artificial Sequence
  Description of Artificial Sequence: Synthetic oligonucleotide
  Sense strand starting at position 121 of SEQ ID NO: 1880636
gcaguaagcucugcugaua

SEQ ID NO: 1982189 - RNA, 19 nt, Artificial Sequence
  Description of Artificial Sequence: Synthetic oligonucleotide
  Antisense strand to SEQ ID NO: 1982188
uaucagcagagcuuacugc

SEQ ID NO: 1982190 - RNA, 19 nt, Artificial Sequence
  Description of Artificial Sequence: Synthetic oligonucleotide
  Sense strand starting at position 132 of SEQ ID NO: 1880636
ugcugauaugggugucuca

SEQ ID NO: 1982191 - RNA, 19 nt, Artificial Sequence
  Description of Artificial Sequence: Synthetic oligonucleotide
  Antisense strand to SEQ ID NO: 1982190
ugagacacccauaucagca

SEQ ID NO: 1982192 - RNA, 19 nt, Artificial Sequence
  Description of Artificial Sequence: Synthetic oligonucleotide
  Sense strand starting at position 224 of SEQ ID NO: 1880636
gauugaagcccacaagguu

SEQ ID NO: 1982193 - RNA, 19 nt, Artificial Sequence
  Description of Artificial Sequence: Synthetic oligonucleotide
  Antisense strand to SEQ ID NO: 1982192
aaccuugugggcuucaauc

SEQ ID NO: 1982194 - RNA, 19 nt, Artificial Sequence
  Description of Artificial Sequence: Synthetic oligonucleotide
  Sense strand starting at position 244 of SEQ ID NO: 1880636
aguuacuugccucaugcua

SEQ ID NO: 1982195 - RNA, 19 nt, Artificial Sequence
  Description of Artificial Sequence: Synthetic oligonucleotide
  Antisense strand to SEQ ID NO: 1982194
uagcaugaggcaaguaacu

SEQ ID NO: 1982196 - RNA, 19 nt, Artificial Sequence
  Description of Artificial Sequence: Synthetic oligonucleotide
  Sense strand starting at position 361 of SEQ ID NO: 1880636
uggguuagaucugcucuca

SEQ ID NO: 1982197 - RNA, 19 nt, Artificial Sequence
  Description of Artificial Sequence: Synthetic oligonucleotide
  Antisense strand to SEQ ID NO: 1982196
ugagagcagaucuaaccca

SEQ ID NO: 1982198 - RNA, 19 nt, Artificial Sequence
  Description of Artificial Sequence: Synthetic oligonucleotide
  Sense strand starting at position 540 of SEQ ID NO: 1880636
cccuuucuucccuggauga

SEQ ID NO: 1982199 - RNA, 19 nt, Artificial Sequence
  Description of Artificial Sequence: Synthetic oligonucleotide
  Antisense strand to SEQ ID NO: 1982198
ucauccagggaagaaaggg

SEQ ID NO: 1982200 - RNA, 19 nt, Artificial Sequence
  Description of Artificial Sequence: Synthetic oligonucleotide
  Sense strand starting at position 750 of SEQ ID NO: 1880636
ucuggugccuggugugaaa

SEQ ID NO: 1982201 - RNA, 19 nt, Artificial Sequence
  Description of Artificial Sequence: Synthetic oligonucleotide
  Antisense strand to SEQ ID NO: 1982200
uuucacaccaggcaccaga

SEQ ID NO: 1982202 - RNA, 19 nt, Artificial Sequence
  Description of Artificial Sequence: Synthetic oligonucleotide
  Sense strand starting at position 915 of SEQ ID NO: 1880636
ucagucugcuccugggagu

SEQ ID NO: 1982203 - RNA, 19 nt, Artificial Sequence
  Description of Artificial Sequence: Synthetic oligonucleotide
  Antisense strand to SEQ ID NO: 1982202
acucccaggagcagacuga

SEQ ID NO: 1982204 - RNA, 19 nt, Artificial Sequence
  Description of Artificial Sequence: Synthetic oligonucleotide
  Sense strand starting at position 916 of SEQ ID NO: 1880636
cagucugcuccugggaguu

SEQ ID NO: 1982205 - RNA, 19 nt, Artificial Sequence
  Description of Artificial Sequence: Synthetic oligonucleotide
  Antisense strand to SEQ ID NO: 1982204
aacucccaggagcagacug

SEQ ID NO: 1982206 - RNA, 19 nt, Artificial Sequence
  Description of Artificial Sequence: Synthetic oligonucleotide
  Sense strand starting at position 1020 of SEQ ID NO: 1880636
gcagcucucauuggaggau

SEQ ID NO: 1982207 - RNA, 19 nt, Artificial Sequence
  Description of Artificial Sequence: Synthetic oligonucleotide
  Antisense strand to SEQ ID NO: 1982206
auccuccaaugagagcugc

SEQ ID NO: 1982208 - RNA, 19 nt, Artificial Sequence
  Description of Artificial Sequence: Synthetic oligonucleotide
  Sense strand starting at position 1039 of SEQ ID NO: 1880636
cccagaagguucuagguga

SEQ ID NO: 1982209 - RNA, 19 nt, Artificial Sequence
  Description of Artificial Sequence: Synthetic oligonucleotide
  Antisense strand to SEQ ID NO: 1982208
ucaccuagaaccuucuggg

SEQ ID NO: 1982210 - RNA, 19 nt, Artificial Sequence
  Description of Artificial Sequence: Synthetic oligonucleotide
  Sense strand starting at position 1046 of SEQ ID NO: 1880636
gguucuaggugagcucuaa

SEQ ID NO: 1982211 - RNA, 19 nt, Artificial Sequence
  Description of Artificial Sequence: Synthetic oligonucleotide
  Antisense strand to SEQ ID NO: 1982210
uuagagcucaccuagaacc

SEQ ID NO: 1982212 - RNA, 19 nt, Artificial Sequence
  Description of Artificial Sequence: Synthetic oligonucleotide
  Sense strand starting at position 1050 of SEQ ID NO: 1880636
cuaggugagcucuaauccu

SEQ ID NO: 1982213 - RNA, 19 nt, Artificial Sequence
  Description of Artificial Sequence: Synthetic oligonucleotide
  Antisense strand to SEQ ID NO: 1982212
aggauuagagcucaccuag

SEQ ID NO: 1982214 - RNA, 19 nt, Artificial Sequence
  Description of Artificial Sequence: Synthetic oligonucleotide
  Sense strand starting at position 1131 of SEQ ID NO: 1880636
gcucacagcccguguauga

SEQ ID NO: 1982215 - RNA, 19 nt, Artificial Sequence
  Description of Artificial Sequence: Synthetic oligonucleotide
  Antisense strand to SEQ ID NO: 1982214
ucauacacgggcugugagc

SEQ ID NO: 1982216 - RNA, 19 nt, Artificial Sequence
  Description of Artificial Sequence: Synthetic oligonucleotide
  Sense strand starting at position 1520 of SEQ ID NO: 1880636
uguggcacccagugaugaa

SEQ ID NO: 1982217 - RNA, 19 nt, Artificial Sequence
  Description of Artificial Sequence: Synthetic oligonucleotide
  Antisense strand to SEQ ID NO: 1982216
uucaucacugggugccaca

SEQ ID NO: 1982218 - RNA, 19 nt, Artificial Sequence
  Description of Artificial Sequence: Synthetic oligonucleotide
  Sense strand starting at position 1764 of SEQ ID NO: 1880636
uugagacagcuuuguuaga

SEQ ID NO: 1982219 - RNA, 19 nt, Artificial Sequence
  Description of Artificial Sequence: Synthetic oligonucleotide
  Antisense strand to SEQ ID NO: 1982218
ucuaacaaagcugucucaa

SEQ ID NO: 1982220 - RNA, 19 nt, Artificial Sequence
  Description of Artificial Sequence: Synthetic oligonucleotide
  Sense strand starting at position 1765 of SEQ ID NO: 1880636
ugagacagcuuuguuagaa

SEQ ID NO: 1982221 - RNA, 19 nt, Artificial Sequence
  Description of Artificial Sequence: Synthetic oligonucleotide
  Antisense strand to SEQ ID NO: 1982220
uucuaacaaagcugucuca

SEQ ID NO: 1982222 - RNA, 19 nt, Artificial Sequence
  Description of Artificial Sequence: Synthetic oligonucleotide
  Sense strand starting at position 1766 of SEQ ID NO: 1880636
gagacagcuuuguuagaac

SEQ ID NO: 1982223 - RNA, 19 nt, Artificial Sequence
  Description of Artificial Sequence: Synthetic oligonucleotide
  Antisense strand to SEQ ID NO: 1982222
guucuaacaaagcugucuc

SEQ ID NO: 1982224 - RNA, 19 nt, Artificial Sequence
  Description of Artificial Sequence: Synthetic oligonucleotide
  Sense strand starting at position 1769 of SEQ ID NO: 1880636
acagcuuuguuagaacaac

SEQ ID NO: 1982225 - RNA, 19 nt, Artificial Sequence
  Description of Artificial Sequence: Synthetic oligonucleotide
  Antisense strand to SEQ ID NO: 1982224
guuguucuaacaaagcugu

SEQ ID NO: 1982226 - RNA, 19 nt, Artificial Sequence
  Description of Artificial Sequence: Synthetic oligonucleotide
  Sense strand starting at position 2504 of SEQ ID NO: 1880636
ucgucauccuaagcagaga

SEQ ID NO: 1982227 - RNA, 19 nt, Artificial Sequence
  Description of Artificial Sequence: Synthetic oligonucleotide
  Antisense strand to SEQ ID NO: 1982226
ucucugcuuaggaugacga

SEQ ID NO: 1982228 - RNA, 19 nt, Artificial Sequence
  Description of Artificial Sequence: Synthetic oligonucleotide
  Sense strand starting at position 2505 of SEQ ID NO: 1880636
cgucauccuaagcagagaa

SEQ ID NO: 1982229 - RNA, 19 nt, Artificial Sequence
  Description of Artificial Sequence: Synthetic oligonucleotide
  Antisense strand to SEQ ID NO: 1982228
uucucugcuuaggaugacg

SEQ ID NO: 1982230 - RNA, 19 nt, Artificial Sequence
  Description of Artificial Sequence: Synthetic oligonucleotide
  Sense strand starting at position 3078 of SEQ ID NO: 1880636
ccaauagaucaguggcuuu

SEQ ID NO: 1982231 - RNA, 19 nt, Artificial Sequence
  Description of Artificial Sequence: Synthetic oligonucleotide
  Antisense strand to SEQ ID NO: 1982230
aaagccacugaucuauugg

SEQ ID NO: 1982232 - RNA, 19 nt, Artificial Sequence
  Description of Artificial Sequence: Synthetic oligonucleotide
  Sense strand starting at position 3419 of SEQ ID NO: 1880636
ccucauucuccucgacaga

SEQ ID NO: 1982233 - RNA, 19 nt, Artificial Sequence
  Description of Artificial Sequence: Synthetic oligonucleotide
  Antisense strand to SEQ ID NO: 1982232
ucugucgaggagaaugagg

SEQ ID NO: 1982234 - RNA, 19 nt, Artificial Sequence
  Description of Artificial Sequence: Synthetic oligonucleotide
  Sense strand starting at position 3420 of SEQ ID NO: 1880636
cucauucuccucgacagaa

SEQ ID NO: 1982235 - RNA, 19 nt, Artificial Sequence
  Description of Artificial Sequence: Synthetic oligonucleotide
  Antisense strand to SEQ ID NO: 1982234
uucugucgaggagaaugag

SEQ ID NO: 1982236 - RNA, 19 nt, Artificial Sequence
  Description of Artificial Sequence: Synthetic oligonucleotide
  Sense strand starting at position 3665 of SEQ ID NO: 1880636
accggagucuccucugaac

SEQ ID NO: 1982237 - RNA, 19 nt, Artificial Sequence
  Description of Artificial Sequence: Synthetic oligonucleotide
  Antisense strand to SEQ ID NO: 1982236
guucagaggagacuccggu

SEQ ID NO: 1982238 - RNA, 19 nt, Artificial Sequence
  Description of Artificial Sequence: Synthetic oligonucleotide
  Sense strand starting at position 3668 of SEQ ID NO: 1880636
ggagucuccucugaaccua

SEQ ID NO: 1982239 - RNA, 19 nt, Artificial Sequence
  Description of Artificial Sequence: Synthetic oligonucleotide
  Antisense strand to SEQ ID NO: 1982238
uagguucagaggagacucc

SEQ ID NO: 1982240 - RNA, 19 nt, Artificial Sequence
  Description of Artificial Sequence: Synthetic oligonucleotide
  Sense strand starting at position 3749 of SEQ ID NO: 1880636
ggguaaagcucauuggcua

SEQ ID NO: 1982241 - RNA, 19 nt, Artificial Sequence
  Description of Artificial Sequence: Synthetic oligonucleotide
  Antisense strand to SEQ ID NO: 1982240
uagccaaugagcuuuaccc

SEQ ID NO: 1982242 - RNA, 19 nt, Artificial Sequence
  Description of Artificial Sequence: Synthetic oligonucleotide
  Sense strand starting at position 3780 of SEQ ID NO: 1880636
ugugcaaagcuauacauau

SEQ ID NO: 1982243 - RNA, 19 nt, Artificial Sequence
  Description of Artificial Sequence: Synthetic oligonucleotide
  Antisense strand to SEQ ID NO: 1982242
auauguauagcuuugcaca

SEQ ID NO: 1982244 - RNA, 19 nt, Artificial Sequence
  Description of Artificial Sequence: Synthetic oligonucleotide
  Sense strand starting at position 8 of SEQ ID NO: 1880637
agugguuaauugugugcua

SEQ ID NO: 1982245 - RNA, 19 nt, Artificial Sequence
  Description of Artificial Sequence: Synthetic oligonucleotide
  Antisense strand to SEQ ID NO: 1982244
uagcacacaauuaaccacu

SEQ ID NO: 1982246 - RNA, 19 nt, Artificial Sequence
  Description of Artificial Sequence: Synthetic oligonucleotide
  Sense strand starting at position 40 of SEQ ID NO: 1880637
ggguaaguguguucugcua

SEQ ID NO: 1982247 - RNA, 19 nt, Artificial Sequence
  Description of Artificial Sequence: Synthetic oligonucleotide
  Antisense strand to SEQ ID NO: 1982246
uagcagaacacacuuaccc

SEQ ID NO: 1982248 - RNA, 19 nt, Artificial Sequence
  Description of Artificial Sequence: Synthetic oligonucleotide
  Sense strand starting at position 42 of SEQ ID NO: 1880637
guaaguguguucugcuaga

SEQ ID NO: 1982249 - RNA, 19 nt, Artificial Sequence
  Description of Artificial Sequence: Synthetic oligonucleotide
  Antisense strand to SEQ ID NO: 1982248
ucuagcagaacacacuuac

SEQ ID NO: 1982250 - RNA, 19 nt, Artificial Sequence
  Description of Artificial Sequence: Synthetic oligonucleotide
  Sense strand starting at position 68 of SEQ ID NO: 1880637
aaugcuguuccaggccaaa

SEQ ID NO: 1982251 - RNA, 19 nt, Artificial Sequence
  Description of Artificial Sequence: Synthetic oligonucleotide
  Antisense strand to SEQ ID NO: 1982250
uuuggccuggaacagcauu

SEQ ID NO: 1982252 - RNA, 19 nt, Artificial Sequence
  Description of Artificial Sequence: Synthetic oligonucleotide
  Sense strand starting at position 120 of SEQ ID NO: 1880637
ggcaguaagcucugcugau

SEQ ID NO: 1982253 - RNA, 19 nt, Artificial Sequence
  Description of Artificial Sequence: Synthetic oligonucleotide
  Antisense strand to SEQ ID NO: 1982252
aucagcagagcuuacugcc

SEQ ID NO: 1982254 - RNA, 19 nt, Artificial Sequence
  Description of Artificial Sequence: Synthetic oligonucleotide
  Sense strand starting at position 121 of SEQ ID NO: 1880637
gcaguaagcucugcugaua

SEQ ID NO: 1982255 - RNA, 19 nt, Artificial Sequence
  Description of Artificial Sequence: Synthetic oligonucleotide
  Antisense strand to SEQ ID NO: 1982254
uaucagcagagcuuacugc

SEQ ID NO: 1982256 - RNA, 19 nt, Artificial Sequence
  Description of Artificial Sequence: Synthetic oligonucleotide
  Sense strand starting at position 132 of SEQ ID NO: 1880637
ugcugauaugggugucuca

SEQ ID NO: 1982257 - RNA, 19 nt, Artificial Sequence
  Description of Artificial Sequence: Synthetic oligonucleotide
  Antisense strand to SEQ ID NO: 1982256
ugagacacccauaucagca

SEQ ID NO: 1982258 - RNA, 19 nt, Artificial Sequence
  Description of Artificial Sequence: Synthetic oligonucleotide
  Sense strand starting at position 224 of SEQ ID NO: 1880637
gauugaagcccacaagguu

SEQ ID NO: 1982259 - RNA, 19 nt, Artificial Sequence
  Description of Artificial Sequence: Synthetic oligonucleotide
  Antisense strand to SEQ ID NO: 1982258
aaccuugugggcuucaauc

SEQ ID NO: 1982260 - RNA, 19 nt, Artificial Sequence
  Description of Artificial Sequence: Synthetic oligonucleotide
  Sense strand starting at position 244 of SEQ ID NO: 1880637
aguuacuugccucaugcua

SEQ ID NO: 1982261 - RNA, 19 nt, Artificial Sequence
  Description of Artificial Sequence: Synthetic oligonucleotide
  Antisense strand to SEQ ID NO: 1982260
uagcaugaggcaaguaacu

SEQ ID NO: 1982262 - RNA, 19 nt, Artificial Sequence
  Description of Artificial Sequence: Synthetic oligonucleotide
  Sense strand starting at position 361 of SEQ ID NO: 1880637
uggguuagaucugcucuca

SEQ ID NO: 1982263 - RNA, 19 nt, Artificial Sequence
  Description of Artificial Sequence: Synthetic oligonucleotide
  Antisense strand to SEQ ID NO: 1982262
ugagagcagaucuaaccca

SEQ ID NO: 1982264 - RNA, 19 nt, Artificial Sequence
  Description of Artificial Sequence: Synthetic oligonucleotide
  Sense strand starting at position 540 of SEQ ID NO: 1880637
cccuuucuucccuggauga

SEQ ID NO: 1982265 - RNA, 19 nt, Artificial Sequence
  Description of Artificial Sequence: Synthetic oligonucleotide
  Antisense strand to SEQ ID NO: 1982264
ucauccagggaagaaaggg

SEQ ID NO: 1982266 - RNA, 19 nt, Artificial Sequence
  Description of Artificial Sequence: Synthetic oligonucleotide
  Sense strand starting at position 750 of SEQ ID NO: 1880637
ucuggugccuggugugaaa

SEQ ID NO: 1982267 - RNA, 19 nt, Artificial Sequence
  Description of Artificial Sequence: Synthetic oligonucleotide
  Antisense strand to SEQ ID NO: 1982266
uuucacaccaggcaccaga

SEQ ID NO: 1982268 - RNA, 19 nt, Artificial Sequence
  Description of Artificial Sequence: Synthetic oligonucleotide
  Sense strand starting at position 915 of SEQ ID NO: 1880637
ucagucugcuccugggagu

SEQ ID NO: 1982269 - RNA, 19 nt, Artificial Sequence
  Description of Artificial Sequence: Synthetic oligonucleotide
  Antisense strand to SEQ ID NO: 1982268
acucccaggagcagacuga

SEQ ID NO: 1982270 - RNA, 19 nt, Artificial Sequence
  Description of Artificial Sequence: Synthetic oligonucleotide
  Sense strand starting at position 916 of SEQ ID NO: 1880637
cagucugcuccugggaguu

SEQ ID NO: 1982271 - RNA, 19 nt, Artificial Sequence
  Description of Artificial Sequence: Synthetic oligonucleotide
  Antisense strand to SEQ ID NO: 1982270
aacucccaggagcagacug

SEQ ID NO: 1982272 - RNA, 19 nt, Artificial Sequence
  Description of Artificial Sequence: Synthetic oligonucleotide
  Sense strand starting at position 1020 of SEQ ID NO: 1880637
gcagcucucauuggaggau

SEQ ID NO: 1982273 - RNA, 19 nt, Artificial Sequence
  Description of Artificial Sequence: Synthetic oligonucleotide
  Antisense strand to SEQ ID NO: 1982272
auccuccaaugagagcugc

SEQ ID NO: 1982274 - RNA, 19 nt, Artificial Sequence
  Description of Artificial Sequence: Synthetic oligonucleotide
  Sense strand starting at position 1039 of SEQ ID NO: 1880637
cccagaagguucuagguga

SEQ ID NO: 1982275 - RNA, 19 nt, Artificial Sequence
  Description of Artificial Sequence: Synthetic oligonucleotide
  Antisense strand to SEQ ID NO: 1982274
ucaccuagaaccuucuggg

SEQ ID NO: 1982276 - RNA, 19 nt, Artificial Sequence
  Description of Artificial Sequence: Synthetic oligonucleotide
  Sense strand starting at position 1046 of SEQ ID NO: 1880637
gguucuaggugagcucuaa

SEQ ID NO: 1982277 - RNA, 19 nt, Artificial Sequence
  Description of Artificial Sequence: Synthetic oligonucleotide
  Antisense strand to SEQ ID NO: 1982276
uuagagcucaccuagaacc

SEQ ID NO: 1982278 - RNA, 19 nt, Artificial Sequence
  Description of Artificial Sequence: Synthetic oligonucleotide
  Sense strand starting at position 1050 of SEQ ID NO: 1880637
cuaggugagcucuaauccu

SEQ ID NO: 1982279 - RNA, 19 nt, Artificial Sequence
  Description of Artificial Sequence: Synthetic oligonucleotide
  Antisense strand to SEQ ID NO: 1982278
aggauuagagcucaccuag

SEQ ID NO: 1982280 - RNA, 19 nt, Artificial Sequence
  Description of Artificial Sequence: Synthetic oligonucleotide
  Sense strand starting at position 1131 of SEQ ID NO: 1880637
gcucacagcccguguauga

SEQ ID NO: 1982281 - RNA, 19 nt, Artificial Sequence
  Description of Artificial Sequence: Synthetic oligonucleotide
  Antisense strand to SEQ ID NO: 1982280
ucauacacgggcugugagc

SEQ ID NO: 1982282 - RNA, 19 nt, Artificial Sequence
  Description of Artificial Sequence: Synthetic oligonucleotide
  Sense strand starting at position 1520 of SEQ ID NO: 1880637
uguggcacccagugaugaa

SEQ ID NO: 1982283 - RNA, 19 nt, Artificial Sequence
  Description of Artificial Sequence: Synthetic oligonucleotide
  Antisense strand to SEQ ID NO: 1982282
uucaucacugggugccaca

SEQ ID NO: 1982284 - RNA, 19 nt, Artificial Sequence
  Description of Artificial Sequence: Synthetic oligonucleotide
  Sense strand starting at position 1764 of SEQ ID NO: 1880637
uugagacagcuuuguuaga

SEQ ID NO: 1982285 - RNA, 19 nt, Artificial Sequence
  Description of Artificial Sequence: Synthetic oligonucleotide
  Antisense strand to SEQ ID NO: 1982284
ucuaacaaagcugucucaa

SEQ ID NO: 1982286 - RNA, 19 nt, Artificial Sequence
  Description of Artificial Sequence: Synthetic oligonucleotide
  Sense strand starting at position 1765 of SEQ ID NO: 1880637
ugagacagcuuuguuagaa

SEQ ID NO: 1982287 - RNA, 19 nt, Artificial Sequence
  Description of Artificial Sequence: Synthetic oligonucleotide
  Antisense strand to SEQ ID NO: 1982286
uucuaacaaagcugucuca

SEQ ID NO: 1982288 - RNA, 19 nt, Artificial Sequence
  Description of Artificial Sequence: Synthetic oligonucleotide
  Sense strand starting at position 1766 of SEQ ID NO: 1880637
gagacagcuuuguuagaac

SEQ ID NO: 1982289 - RNA, 19 nt, Artificial Sequence
  Description of Artificial Sequence: Synthetic oligonucleotide
  Antisense strand to SEQ ID NO: 1982288
guucuaacaaagcugucuc

SEQ ID NO: 1982290 - RNA, 19 nt, Artificial Sequence
  Description of Artificial Sequence: Synthetic oligonucleotide
  Sense strand starting at position 1769 of SEQ ID NO: 1880637
acagcuuuguuagaacaac

SEQ ID NO: 1982291 - RNA, 19 nt, Artificial Sequence
  Description of Artificial Sequence: Synthetic oligonucleotide
  Antisense strand to SEQ ID NO: 1982290
guuguucuaacaaagcugu

SEQ ID NO: 1982292 - RNA, 19 nt, Artificial Sequence
  Description of Artificial Sequence: Synthetic oligonucleotide
  Sense strand starting at position 2504 of SEQ ID NO: 1880637
ucgucauccuaagcagaga

SEQ ID NO: 1982293 - RNA, 19 nt, Artificial Sequence
  Description of Artificial Sequence: Synthetic oligonucleotide
  Antisense strand to SEQ ID NO: 1982292
ucucugcuuaggaugacga

SEQ ID NO: 1982294 - RNA, 19 nt, Artificial Sequence
  Description of Artificial Sequence: Synthetic oligonucleotide
  Sense strand starting at position 2505 of SEQ ID NO: 1880637
cgucauccuaagcagagaa

SEQ ID NO: 1982295 - RNA, 19 nt, Artificial Sequence
  Description of Artificial Sequence: Synthetic oligonucleotide
  Antisense strand to SEQ ID NO: 1982294
uucucugcuuaggaugacg

SEQ ID NO: 1982296 - RNA, 19 nt, Artificial Sequence
  Description of Artificial Sequence: Synthetic oligonucleotide
  Sense strand starting at position 3078 of SEQ ID NO: 1880637
ccaauagaucaguggcuuu

SEQ ID NO: 1982297 - RNA, 19 nt, Artificial Sequence
  Description of Artificial Sequence: Synthetic oligonucleotide
  Antisense strand to SEQ ID NO: 1982296
aaagccacugaucuauugg

SEQ ID NO: 1982298 - RNA, 19 nt, Artificial Sequence
  Description of Artificial Sequence: Synthetic oligonucleotide
  Sense strand starting at position 3419 of SEQ ID NO: 1880637
ccucauucuccucgacaga

SEQ ID NO: 1982299 - RNA, 19 nt, Artificial Sequence
  Description of Artificial Sequence: Synthetic oligonucleotide
  Antisense strand to SEQ ID NO: 1982298
ucugucgaggagaaugagg

SEQ ID NO: 1982300 - RNA, 19 nt, Artificial Sequence
  Description of Artificial Sequence: Synthetic oligonucleotide
  Sense strand starting at position 3420 of SEQ ID NO: 1880637
cucauucuccucgacagaa

SEQ ID NO: 1982301 - RNA, 19 nt, Artificial Sequence
  Description of Artificial Sequence: Synthetic oligonucleotide
  Antisense strand to SEQ ID NO: 1982300
uucugucgaggagaaugag

SEQ ID NO: 1982302 - RNA, 19 nt, Artificial Sequence
  Description of Artificial Sequence: Synthetic oligonucleotide
  Sense strand starting at position 3665 of SEQ ID NO: 1880637
accggagucuccucugaac

SEQ ID NO: 1982303 - RNA, 19 nt, Artificial Sequence
  Description of Artificial Sequence: Synthetic oligonucleotide
  Antisense strand to SEQ ID NO: 1982302
guucagaggagacuccggu

SEQ ID NO: 1982304 - RNA, 19 nt, Artificial Sequence
  Description of Artificial Sequence: Synthetic oligonucleotide
  Sense strand starting at position 3668 of SEQ ID NO: 1880637
ggagucuccucugaaccua

SEQ ID NO: 1982305 - RNA, 19 nt, Artificial Sequence
  Description of Artificial Sequence: Synthetic oligonucleotide
  Antisense strand to SEQ ID NO: 1982304
uagguucagaggagacucc

SEQ ID NO: 1982306 - RNA, 19 nt, Artificial Sequence
  Description of Artificial Sequence: Synthetic oligonucleotide
  Sense strand starting at position 3749 of SEQ ID NO: 1880637
ggguaaagcucauuggcua

SEQ ID NO: 1982307 - RNA, 19 nt, Artificial Sequence
  Description of Artificial Sequence: Synthetic oligonucleotide
  Antisense strand to SEQ ID NO: 1982306
uagccaaugagcuuuaccc

SEQ ID NO: 1982308 - RNA, 19 nt, Artificial Sequence
  Description of Artificial Sequence: Synthetic oligonucleotide
  Sense strand starting at position 3780 of SEQ ID NO: 1880637
ugugcaaagcuauacauau

SEQ ID NO: 1982309 - RNA, 19 nt, Artificial Sequence
  Description of Artificial Sequence: Synthetic oligonucleotide
  Antisense strand to SEQ ID NO: 1982308
auauguauagcuuugcaca

SEQ ID NO: 1982310 - RNA, 19 nt, Artificial Sequence
  Description of Artificial Sequence: Synthetic oligonucleotide
  Sense strand starting at position 33 of SEQ ID NO: 1880638
auuugccagcguuaguaaa

SEQ ID NO: 1982311 - RNA, 19 nt, Artificial Sequence
  Description of Artificial Sequence: Synthetic oligonucleotide
  Antisense strand to SEQ ID NO: 1982310
uuuacuaacgcuggcaaau

SEQ ID NO: 1982312 - RNA, 19 nt, Artificial Sequence
  Description of Artificial Sequence: Synthetic oligonucleotide
  Sense strand starting at position 173 of SEQ ID NO: 1880638
gaggaaucuuaacugcaga

SEQ ID NO: 1982313 - RNA, 19 nt, Artificial Sequence
  Description of Artificial Sequence: Synthetic oligonucleotide
  Antisense strand to SEQ ID NO: 1982312
ucugcaguuaagauuccuc

SEQ ID NO: 1982314 - RNA, 19 nt, Artificial Sequence
  Description of Artificial Sequence: Synthetic oligonucleotide
  Sense strand starting at position 215 of SEQ ID NO: 1880638
uuacacagucagggugaaa

SEQ ID NO: 1982315 - RNA, 19 nt, Artificial Sequence
  Description of Artificial Sequence: Synthetic oligonucleotide
  Antisense strand to SEQ ID NO: 1982314
uuucacccugacuguguaa

SEQ ID NO: 1982316 - RNA, 19 nt, Artificial Sequence
  Description of Artificial Sequence: Synthetic oligonucleotide
  Sense strand starting at position 390 of SEQ ID NO: 1880638
gaaucuagauagguauauu

SEQ ID NO: 1982317 - RNA, 19 nt, Artificial Sequence
  Description of Artificial Sequence: Synthetic oligonucleotide
  Antisense strand to SEQ ID NO: 1982316
aauauaccuaucuagauuc

SEQ ID NO: 1982318 - RNA, 19 nt, Artificial Sequence
  Description of Artificial Sequence: Synthetic oligonucleotide
  Sense strand starting at position 414 of SEQ ID NO: 1880638
ggacaacaguucuuugcaa

SEQ ID NO: 1982319 - RNA, 19 nt, Artificial Sequence
  Description of Artificial Sequence: Synthetic oligonucleotide
  Antisense strand to SEQ ID NO: 1982318
uugcaaagaacuguugucc

SEQ ID NO: 1982320 - RNA, 19 nt, Artificial Sequence
  Description of Artificial Sequence: Synthetic oligonucleotide
  Sense strand starting at position 463 of SEQ ID NO: 1880638
agaugccaucuggaguuaa

SEQ ID NO: 1982321 - RNA, 19 nt, Artificial Sequence
  Description of Artificial Sequence: Synthetic oligonucleotide
  Antisense strand to SEQ ID NO: 1982320
uuaacuccagauggcaucu

SEQ ID NO: 1982322 - RNA, 19 nt, Artificial Sequence
  Description of Artificial Sequence: Synthetic oligonucleotide
  Sense strand starting at position 506 of SEQ ID NO: 1880638
ccuuaugaagaaggguuau

SEQ ID NO: 1982323 - RNA, 19 nt, Artificial Sequence
  Description of Artificial Sequence: Synthetic oligonucleotide
  Antisense strand to SEQ ID NO: 1982322
auaacccuucuucauaagg

SEQ ID NO: 1982324 - RNA, 19 nt, Artificial Sequence
  Description of Artificial Sequence: Synthetic oligonucleotide
  Sense strand starting at position 518 of SEQ ID NO: 1880638
ggguuauaucucuaaagcu

SEQ ID NO: 1982325 - RNA, 19 nt, Artificial Sequence
  Description of Artificial Sequence: Synthetic oligonucleotide
  Antisense strand to SEQ ID NO: 1982324
agcuuuagagauauaaccc

SEQ ID NO: 1982326 - RNA, 19 nt, Artificial Sequence
  Description of Artificial Sequence: Synthetic oligonucleotide
  Sense strand starting at position 566 of SEQ ID NO: 1880638
auaaaugugugacucagaa

SEQ ID NO: 1982327 - RNA, 19 nt, Artificial Sequence
  Description of Artificial Sequence: Synthetic oligonucleotide
  Antisense strand to SEQ ID NO: 1982326
uucugagucacacauuuau

SEQ ID NO: 1982328 - RNA, 19 nt, Artificial Sequence
  Description of Artificial Sequence: Synthetic oligonucleotide
  Sense strand starting at position 1161 of SEQ ID NO: 1880638
ugaaacucuggugguuaau

SEQ ID NO: 1982329 - RNA, 19 nt, Artificial Sequence
  Description of Artificial Sequence: Synthetic oligonucleotide
  Antisense strand to SEQ ID NO: 1982328
auuaaccaccagaguuuca

SEQ ID NO: 1982330 - RNA, 19 nt, Artificial Sequence
  Description of Artificial Sequence: Synthetic oligonucleotide
  Sense strand starting at position 1164 of SEQ ID NO: 1880638
aacucuggugguuaaugua

SEQ ID NO: 1982331 - RNA, 19 nt, Artificial Sequence
  Description of Artificial Sequence: Synthetic oligonucleotide
  Antisense strand to SEQ ID NO: 1982330
uacauuaaccaccagaguu

SEQ ID NO: 1982332 - RNA, 19 nt, Artificial Sequence
  Description of Artificial Sequence: Synthetic oligonucleotide
  Sense strand starting at position 1345 of SEQ ID NO: 1880638
aaacaaugggauugagcuu

SEQ ID NO: 1982333 - RNA, 19 nt, Artificial Sequence
  Description of Artificial Sequence: Synthetic oligonucleotide
  Antisense strand to SEQ ID NO: 1982332
aagcucaaucccauuguuu

SEQ ID NO: 1982334 - RNA, 19 nt, Artificial Sequence
  Description of Artificial Sequence: Synthetic oligonucleotide
  Sense strand starting at position 1407 of SEQ ID NO: 1880638
guuccagaaaguuauugua

SEQ ID NO: 1982335 - RNA, 19 nt, Artificial Sequence
  Description of Artificial Sequence: Synthetic oligonucleotide
  Antisense strand to SEQ ID NO: 1982334
uacaauaacuuucuggaac

SEQ ID NO: 1982336 - RNA, 19 nt, Artificial Sequence
  Description of Artificial Sequence: Synthetic oligonucleotide
  Sense strand starting at position 1409 of SEQ ID NO: 1880638
uccagaaaguuauuguaga

SEQ ID NO: 1982337 - RNA, 19 nt, Artificial Sequence
  Description of Artificial Sequence: Synthetic oligonucleotide
  Antisense strand to SEQ ID NO: 1982336
ucuacaauaacuuucugga

SEQ ID NO: 1982338 - RNA, 19 nt, Artificial Sequence
  Description of Artificial Sequence: Synthetic oligonucleotide
  Sense strand starting at position 1419 of SEQ ID NO: 1880638
uauuguagaccuggaaacu

SEQ ID NO: 1982339 - RNA, 19 nt, Artificial Sequence
  Description of Artificial Sequence: Synthetic oligonucleotide
  Antisense strand to SEQ ID NO: 1982338
aguuuccaggucuacaaua

SEQ ID NO: 1982340 - RNA, 19 nt, Artificial Sequence
  Description of Artificial Sequence: Synthetic oligonucleotide
  Sense strand starting at position 1530 of SEQ ID NO: 1880638
cggugauaucauuagaugu

SEQ ID NO: 1982341 - RNA, 19 nt, Artificial Sequence
  Description of Artificial Sequence: Synthetic oligonucleotide
  Antisense strand to SEQ ID NO: 1982340
acaucuaaugauaucaccg

SEQ ID NO: 1982342 - RNA, 19 nt, Artificial Sequence
  Description of Artificial Sequence: Synthetic oligonucleotide
  Sense strand starting at position 1560 of SEQ ID NO: 1880638
agagcugggcuacauaauu

SEQ ID NO: 1982343 - RNA, 19 nt, Artificial Sequence
  Description of Artificial Sequence: Synthetic oligonucleotide
  Antisense strand to SEQ ID NO: 1982342
aauuauguagcccagcucu

SEQ ID NO: 1982344 - RNA, 19 nt, Artificial Sequence
  Description of Artificial Sequence: Synthetic oligonucleotide
  Sense strand starting at position 1895 of SEQ ID NO: 1880638
ugaaauguuuaauuccaga

SEQ ID NO: 1982345 - RNA, 19 nt, Artificial Sequence
  Description of Artificial Sequence: Synthetic oligonucleotide
  Antisense strand to SEQ ID NO: 1982344
ucuggaauuaaacauuuca

SEQ ID NO: 1982346 - RNA, 19 nt, Artificial Sequence
  Description of Artificial Sequence: Synthetic oligonucleotide
  Sense strand starting at position 2171 of SEQ ID NO: 1880638
ugauaagauccugagcuuc

SEQ ID NO: 1982347 - RNA, 19 nt, Artificial Sequence
  Description of Artificial Sequence: Synthetic oligonucleotide
  Antisense strand to SEQ ID NO: 1982346
gaagcucaggaucuuauca

SEQ ID NO: 1982348 - RNA, 19 nt, Artificial Sequence
  Description of Artificial Sequence: Synthetic oligonucleotide
  Sense strand starting at position 2292 of SEQ ID NO: 1880638
uacuuucuaggacgauaua

SEQ ID NO: 1982349 - RNA, 19 nt, Artificial Sequence
  Description of Artificial Sequence: Synthetic oligonucleotide
  Antisense strand to SEQ ID NO: 1982348
uauaucguccuagaaagua

SEQ ID NO: 1982350 - RNA, 19 nt, Artificial Sequence
  Description of Artificial Sequence: Synthetic oligonucleotide
  Sense strand starting at position 2426 of SEQ ID NO: 1880638
agccuugacuccgucauuu

SEQ ID NO: 1982351 - RNA, 19 nt, Artificial Sequence
  Description of Artificial Sequence: Synthetic oligonucleotide
  Antisense strand to SEQ ID NO: 1982350
aaaugacggagucaaggcu

SEQ ID NO: 1982352 - RNA, 19 nt, Artificial Sequence
  Description of Artificial Sequence: Synthetic oligonucleotide
  Sense strand starting at position 2475 of SEQ ID NO: 1880638
auccauguuaggugacuga

SEQ ID NO: 1982353 - RNA, 19 nt, Artificial Sequence
  Description of Artificial Sequence: Synthetic oligonucleotide
  Antisense strand to SEQ ID NO: 1982352
ucagucaccuaacauggau

SEQ ID NO: 1982354 - RNA, 19 nt, Artificial Sequence
  Description of Artificial Sequence: Synthetic oligonucleotide
  Sense strand starting at position 2497 of SEQ ID NO: 1880638
ugagauaugugagcaacua

SEQ ID NO: 1982355 - RNA, 19 nt, Artificial Sequence
  Description of Artificial Sequence: Synthetic oligonucleotide
  Antisense strand to SEQ ID NO: 1982354
uaguugcucacauaucuca

SEQ ID NO: 1982356 - RNA, 19 nt, Artificial Sequence
  Description of Artificial Sequence: Synthetic oligonucleotide
  Sense strand starting at position 2583 of SEQ ID NO: 1880638
uguuuaauuguagggacaa

SEQ ID NO: 1982357 - RNA, 19 nt, Artificial Sequence
  Description of Artificial Sequence: Synthetic oligonucleotide
  Antisense strand to SEQ ID NO: 1982356
uugucccuacaauuaaaca

SEQ ID NO: 1982358 - RNA, 19 nt, Artificial Sequence
  Description of Artificial Sequence: Synthetic oligonucleotide
  Sense strand starting at position 2622 of SEQ ID NO: 1880638
auguuaccugagcaaguua

SEQ ID NO: 1982359 - RNA, 19 nt, Artificial Sequence
  Description of Artificial Sequence: Synthetic oligonucleotide
  Antisense strand to SEQ ID NO: 1982358
uaacuugcucagguaacau

SEQ ID NO: 1982360 - RNA, 19 nt, Artificial Sequence
  Description of Artificial Sequence: Synthetic oligonucleotide
  Sense strand starting at position 2677 of SEQ ID NO: 1880638
ucucaugacgucuaauaag

SEQ ID NO: 1982361 - RNA, 19 nt, Artificial Sequence
  Description of Artificial Sequence: Synthetic oligonucleotide
  Antisense strand to SEQ ID NO: 1982360
cuuauuagacgucaugaga

SEQ ID NO: 1982362 - RNA, 19 nt, Artificial Sequence
  Description of Artificial Sequence: Synthetic oligonucleotide
  Sense strand starting at position 2694 of SEQ ID NO: 1880638
agaaacugauucucugagu

SEQ ID NO: 1982363 - RNA, 19 nt, Artificial Sequence
  Description of Artificial Sequence: Synthetic oligonucleotide
  Antisense strand to SEQ ID NO: 1982362
acucagagaaucaguuucu

SEQ ID NO: 1982364 - RNA, 19 nt, Artificial Sequence
  Description of Artificial Sequence: Synthetic oligonucleotide
  Sense strand starting at position 2695 of SEQ ID NO: 1880638
gaaacugauucucugaguc

SEQ ID NO: 1982365 - RNA, 19 nt, Artificial Sequence
  Description of Artificial Sequence: Synthetic oligonucleotide
  Antisense strand to SEQ ID NO: 1982364
gacucagagaaucaguuuc

SEQ ID NO: 1982366 - RNA, 19 nt, Artificial Sequence
  Description of Artificial Sequence: Synthetic oligonucleotide
  Sense strand starting at position 2739 of SEQ ID NO: 1880638
caacuagaggccuacaguu

SEQ ID NO: 1982367 - RNA, 19 nt, Artificial Sequence
  Description of Artificial Sequence: Synthetic oligonucleotide
  Antisense strand to SEQ ID NO: 1982366
aacuguaggccucuaguug

SEQ ID NO: 1982368 - RNA, 19 nt, Artificial Sequence
  Description of Artificial Sequence: Synthetic oligonucleotide
  Sense strand starting at position 2741 of SEQ ID NO: 1880638
acuagaggccuacaguuua

SEQ ID NO: 1982369 - RNA, 19 nt, Artificial Sequence
  Description of Artificial Sequence: Synthetic oligonucleotide
  Antisense strand to SEQ ID NO: 1982368
uaaacuguaggccucuagu

SEQ ID NO: 1982370 - RNA, 19 nt, Artificial Sequence
  Description of Artificial Sequence: Synthetic oligonucleotide
  Sense strand starting at position 2890 of SEQ ID NO: 1880638
acaauuaagcagugaauaa

SEQ ID NO: 1982371 - RNA, 19 nt, Artificial Sequence
  Description of Artificial Sequence: Synthetic oligonucleotide
  Antisense strand to SEQ ID NO: 1982370
uuauucacugcuuaauugu

SEQ ID NO: 1982372 - RNA, 19 nt, Artificial Sequence
  Description of Artificial Sequence: Synthetic oligonucleotide
  Sense strand starting at position 3064 of SEQ ID NO: 1880638
uugcaauauuuauccguaa

SEQ ID NO: 1982373 - RNA, 19 nt, Artificial Sequence
  Description of Artificial Sequence: Synthetic oligonucleotide
  Antisense strand to SEQ ID NO: 1982372
uuacggauaaauauugcaa

SEQ ID NO: 1982374 - RNA, 19 nt, Artificial Sequence
  Description of Artificial Sequence: Synthetic oligonucleotide
  Sense strand starting at position 3065 of SEQ ID NO: 1880638
ugcaauauuuauccguaac

SEQ ID NO: 1982375 - RNA, 19 nt, Artificial Sequence
  Description of Artificial Sequence: Synthetic oligonucleotide
  Antisense strand to SEQ ID NO: 1982374
guuacggauaaauauugca

SEQ ID NO: 1982376 - RNA, 19 nt, Artificial Sequence
  Description of Artificial Sequence: Synthetic oligonucleotide
  Sense strand starting at position 3299 of SEQ ID NO: 1880638
uucuccauugguggauuaa

SEQ ID NO: 1982377 - RNA, 19 nt, Artificial Sequence
  Description of Artificial Sequence: Synthetic oligonucleotide
  Antisense strand to SEQ ID NO: 1982376
uuaauccaccaauggagaa

SEQ ID NO: 1982378 - RNA, 19 nt, Artificial Sequence
  Description of Artificial Sequence: Synthetic oligonucleotide
  Sense strand starting at position 3378 of SEQ ID NO: 1880638
acuuguuuguauccagaaa

SEQ ID NO: 1982379 - RNA, 19 nt, Artificial Sequence
  Description of Artificial Sequence: Synthetic oligonucleotide
  Antisense strand to SEQ ID NO: 1982378
uuucuggauacaaacaagu

SEQ ID NO: 1982380 - RNA, 19 nt, Artificial Sequence
  Description of Artificial Sequence: Synthetic oligonucleotide
  Sense strand starting at position 3401 of SEQ ID NO: 1880638
cugugagugaacuagaagu

SEQ ID NO: 1982381 - RNA, 19 nt, Artificial Sequence
  Description of Artificial Sequence: Synthetic oligonucleotide
  Antisense strand to SEQ ID NO: 1982380
acuucuaguucacucacag

SEQ ID NO: 1982382 - RNA, 19 nt, Artificial Sequence
  Description of Artificial Sequence: Synthetic oligonucleotide
  Sense strand starting at position 3414 of SEQ ID NO: 1880638
agaagugaguguucauuag

SEQ ID NO: 1982383 - RNA, 19 nt, Artificial Sequence
  Description of Artificial Sequence: Synthetic oligonucleotide
  Antisense strand to SEQ ID NO: 1982382
cuaaugaacacucacuucu

SEQ ID NO: 1982384 - RNA, 19 nt, Artificial Sequence
  Description of Artificial Sequence: Synthetic oligonucleotide
  Sense strand starting at position 3431 of SEQ ID NO: 1880638
agagcugugccgucucuga

SEQ ID NO: 1982385 - RNA, 19 nt, Artificial Sequence
  Description of Artificial Sequence: Synthetic oligonucleotide
  Antisense strand to SEQ ID NO: 1982384
ucagagacggcacagcucu

SEQ ID NO: 1982386 - RNA, 19 nt, Artificial Sequence
  Description of Artificial Sequence: Synthetic oligonucleotide
  Sense strand starting at position 3447 of SEQ ID NO: 1880638
ugaaguuaugagggcauau

SEQ ID NO: 1982387 - RNA, 19 nt, Artificial Sequence
  Description of Artificial Sequence: Synthetic oligonucleotide
  Antisense strand to SEQ ID NO: 1982386
auaugcccucauaacuuca

SEQ ID NO: 1982388 - RNA, 19 nt, Artificial Sequence
  Description of Artificial Sequence: Synthetic oligonucleotide
  Sense strand starting at position 3497 of SEQ ID NO: 1880638
gcucucagugugcuguaua

SEQ ID NO: 1982389 - RNA, 19 nt, Artificial Sequence
  Description of Artificial Sequence: Synthetic oligonucleotide
  Antisense strand to SEQ ID NO: 1982388
uauacagcacacugagagc

SEQ ID NO: 1982390 - RNA, 19 nt, Artificial Sequence
  Description of Artificial Sequence: Synthetic oligonucleotide
  Sense strand starting at position 228 of SEQ ID NO: 1880639
ugcugauauguguuugugu

SEQ ID NO: 1982391 - RNA, 19 nt, Artificial Sequence
  Description of Artificial Sequence: Synthetic oligonucleotide
  Antisense strand to SEQ ID NO: 1982390
acacaaacacauaucagca

SEQ ID NO: 1982392 - RNA, 19 nt, Artificial Sequence
  Description of Artificial Sequence: Synthetic oligonucleotide
  Sense strand starting at position 236 of SEQ ID NO: 1880639
uguguuuguguguucuuaa

SEQ ID NO: 1982393 - RNA, 19 nt, Artificial Sequence
  Description of Artificial Sequence: Synthetic oligonucleotide
  Antisense strand to SEQ ID NO: 1982392
uuaagaacacacaaacaca

SEQ ID NO: 1982394 - RNA, 19 nt, Artificial Sequence
  Description of Artificial Sequence: Synthetic oligonucleotide
  Sense strand starting at position 489 of SEQ ID NO: 1880639
acggcacagcucuaaugaa

SEQ ID NO: 1982395 - RNA, 19 nt, Artificial Sequence
  Description of Artificial Sequence: Synthetic oligonucleotide
  Antisense strand to SEQ ID NO: 1982394
uucauuagagcugugccgu

SEQ ID NO: 1982396 - RNA, 19 nt, Artificial Sequence
  Description of Artificial Sequence: Synthetic oligonucleotide
  Sense strand starting at position 628 of SEQ ID NO: 1880639
ggagaaacauagucuguuu

SEQ ID NO: 1982397 - RNA, 19 nt, Artificial Sequence
  Description of Artificial Sequence: Synthetic oligonucleotide
  Antisense strand to SEQ ID NO: 1982396
aaacagacuauguuucucc

SEQ ID NO: 1982398 - RNA, 19 nt, Artificial Sequence
  Description of Artificial Sequence: Synthetic oligonucleotide
  Sense strand starting at position 845 of SEQ ID NO: 1880639
guauguuacggauaaauau

SEQ ID NO: 1982399 - RNA, 19 nt, Artificial Sequence
  Description of Artificial Sequence: Synthetic oligonucleotide
  Antisense strand to SEQ ID NO: 1982398
auauuuauccguaacauac

SEQ ID NO: 1982400 - RNA, 19 nt, Artificial Sequence
  Description of Artificial Sequence: Synthetic oligonucleotide
  Sense strand starting at position 919 of SEQ ID NO: 1880639
uggaaauuagcuuaaaugu

SEQ ID NO: 1982401 - RNA, 19 nt, Artificial Sequence
  Description of Artificial Sequence: Synthetic oligonucleotide
  Antisense strand to SEQ ID NO: 1982400
acauuuaagcuaauuucca

SEQ ID NO: 1982402 - RNA, 19 nt, Artificial Sequence
  Description of Artificial Sequence: Synthetic oligonucleotide
  Sense strand starting at position 932 of SEQ ID NO: 1880639
aaauguuacggccacuuaa

SEQ ID NO: 1982403 - RNA, 19 nt, Artificial Sequence
  Description of Artificial Sequence: Synthetic oligonucleotide
  Antisense strand to SEQ ID NO: 1982402
uuaaguggccguaacauuu

SEQ ID NO: 1982404 - RNA, 19 nt, Artificial Sequence
  Description of Artificial Sequence: Synthetic oligonucleotide
  Sense strand starting at position 1030 of SEQ ID NO: 1880639
acugcuuaauuguuagaua

SEQ ID NO: 1982405 - RNA, 19 nt, Artificial Sequence
  Description of Artificial Sequence: Synthetic oligonucleotide
  Antisense strand to SEQ ID NO: 1982404
uaucuaacaauuaagcagu

SEQ ID NO: 1982406 - RNA, 19 nt, Artificial Sequence
  Description of Artificial Sequence: Synthetic oligonucleotide
  Sense strand starting at position 1221 of SEQ ID NO: 1880639
cucagagaaucaguuucuu

SEQ ID NO: 1982407 - RNA, 19 nt, Artificial Sequence
  Description of Artificial Sequence: Synthetic oligonucleotide
  Antisense strand to SEQ ID NO: 1982406
aagaaacugauucucugag

SEQ ID NO: 1982408 - RNA, 19 nt, Artificial Sequence
  Description of Artificial Sequence: Synthetic oligonucleotide
  Sense strand starting at position 1237 of SEQ ID NO: 1880639
cuuauuagacgucaugaga

SEQ ID NO: 1982409 - RNA, 19 nt, Artificial Sequence
  Description of Artificial Sequence: Synthetic oligonucleotide
  Antisense strand to SEQ ID NO: 1982408
ucucaugacgucuaauaag

SEQ ID NO: 1982410 - RNA, 19 nt, Artificial Sequence
  Description of Artificial Sequence: Synthetic oligonucleotide
  Sense strand starting at position 1240 of SEQ ID NO: 1880639
auuagacgucaugagagua

SEQ ID NO: 1982411 - RNA, 19 nt, Artificial Sequence
  Description of Artificial Sequence: Synthetic oligonucleotide
  Antisense strand to SEQ ID NO: 1982410
uacucucaugacgucuaau

SEQ ID NO: 1982412 - RNA, 19 nt, Artificial Sequence
  Description of Artificial Sequence: Synthetic oligonucleotide
  Sense strand starting at position 1289 of SEQ ID NO: 1880639
uuguaacuugcucagguaa

SEQ ID NO: 1982413 - RNA, 19 nt, Artificial Sequence
  Description of Artificial Sequence: Synthetic oligonucleotide
  Antisense strand to SEQ ID NO: 1982412
uuaccugagcaaguuacaa

SEQ ID NO: 1982414 - RNA, 19 nt, Artificial Sequence
  Description of Artificial Sequence: Synthetic oligonucleotide
  Sense strand starting at position 1436 of SEQ ID NO: 1880639
gugucagucaccuaacaug

SEQ ID NO: 1982415 - RNA, 19 nt, Artificial Sequence
  Description of Artificial Sequence: Synthetic oligonucleotide
  Antisense strand to SEQ ID NO: 1982414
cauguuaggugacugacac

SEQ ID NO: 1982416 - RNA, 19 nt, Artificial Sequence
  Description of Artificial Sequence: Synthetic oligonucleotide
  Sense strand starting at position 1622 of SEQ ID NO: 1880639
uauaucguccuagaaagua

SEQ ID NO: 1982417 - RNA, 19 nt, Artificial Sequence
  Description of Artificial Sequence: Synthetic oligonucleotide
  Antisense strand to SEQ ID NO: 1982416
uacuuucuaggacgauaua

SEQ ID NO: 1982418 - RNA, 19 nt, Artificial Sequence
  Description of Artificial Sequence: Synthetic oligonucleotide
  Sense strand starting at position 2068 of SEQ ID NO: 1880639
gaacaauucugggaaagaa

SEQ ID NO: 1982419 - RNA, 19 nt, Artificial Sequence
  Description of Artificial Sequence: Synthetic oligonucleotide
  Antisense strand to SEQ ID NO: 1982418
uucuuucccagaauuguuc

SEQ ID NO: 1982420 - RNA, 19 nt, Artificial Sequence
  Description of Artificial Sequence: Synthetic oligonucleotide
  Sense strand starting at position 2096 of SEQ ID NO: 1880639
gugauuaaaugccucuuaa

SEQ ID NO: 1982421 - RNA, 19 nt, Artificial Sequence
  Description of Artificial Sequence: Synthetic oligonucleotide
  Antisense strand to SEQ ID NO: 1982420
uuaagaggcauuuaaucac

SEQ ID NO: 1982422 - RNA, 19 nt, Artificial Sequence
  Description of Artificial Sequence: Synthetic oligonucleotide
  Sense strand starting at position 2128 of SEQ ID NO: 1880639
cuggauugaugucuuaucu

SEQ ID NO: 1982423 - RNA, 19 nt, Artificial Sequence
  Description of Artificial Sequence: Synthetic oligonucleotide
  Antisense strand to SEQ ID NO: 1982422
agauaagacaucaauccag

SEQ ID NO: 1982424 - RNA, 19 nt, Artificial Sequence
  Description of Artificial Sequence: Synthetic oligonucleotide
  Sense strand starting at position 2132 of SEQ ID NO: 1880639
auugaugucuuaucuacag

SEQ ID NO: 1982425 - RNA, 19 nt, Artificial Sequence
  Description of Artificial Sequence: Synthetic oligonucleotide
  Antisense strand to SEQ ID NO: 1982424
cuguagauaagacaucaau

SEQ ID NO: 1982426 - RNA, 19 nt, Artificial Sequence
  Description of Artificial Sequence: Synthetic oligonucleotide
  Sense strand starting at position 2136 of SEQ ID NO: 1880639
augucuuaucuacaggcuu

SEQ ID NO: 1982427 - RNA, 19 nt, Artificial Sequence
  Description of Artificial Sequence: Synthetic oligonucleotide
  Antisense strand to SEQ ID NO: 1982426
aagccuguagauaagacau

SEQ ID NO: 1982428 - RNA, 19 nt, Artificial Sequence
  Description of Artificial Sequence: Synthetic oligonucleotide
  Sense strand starting at position 2167 of SEQ ID NO: 1880639
caagaaugauuggcuguga

SEQ ID NO: 1982429 - RNA, 19 nt, Artificial Sequence
  Description of Artificial Sequence: Synthetic oligonucleotide
  Antisense strand to SEQ ID NO: 1982428
ucacagccaaucauucuug

SEQ ID NO: 1982430 - RNA, 19 nt, Artificial Sequence
  Description of Artificial Sequence: Synthetic oligonucleotide
  Sense strand starting at position 2182 of SEQ ID NO: 1880639
gugaguuuaccaggauuau

SEQ ID NO: 1982431 - RNA, 19 nt, Artificial Sequence
  Description of Artificial Sequence: Synthetic oligonucleotide
  Antisense strand to SEQ ID NO: 1982430
auaauccugguaaacucac

SEQ ID NO: 1982432 - RNA, 19 nt, Artificial Sequence
  Description of Artificial Sequence: Synthetic oligonucleotide
  Sense strand starting at position 2186 of SEQ ID NO: 1880639
guuuaccaggauuauaguu

SEQ ID NO: 1982433 - RNA, 19 nt, Artificial Sequence
  Description of Artificial Sequence: Synthetic oligonucleotide
  Antisense strand to SEQ ID NO: 1982432
aacuauaauccugguaaac

SEQ ID NO: 1982434 - RNA, 19 nt, Artificial Sequence
  Description of Artificial Sequence: Synthetic oligonucleotide
  Sense strand starting at position 2400 of SEQ ID NO: 1880639
ccgccuugaagugauuaaa

SEQ ID NO: 1982435 - RNA, 19 nt, Artificial Sequence
  Description of Artificial Sequence: Synthetic oligonucleotide
  Antisense strand to SEQ ID NO: 1982434
uuuaaucacuucaaggcgg

SEQ ID NO: 1982436 - RNA, 19 nt, Artificial Sequence
  Description of Artificial Sequence: Synthetic oligonucleotide
  Sense strand starting at position 2415 of SEQ ID NO: 1880639
uaaaguagauugcuuaaag

SEQ ID NO: 1982437 - RNA, 19 nt, Artificial Sequence
  Description of Artificial Sequence: Synthetic oligonucleotide
  Antisense strand to SEQ ID NO: 1982436
cuuuaagcaaucuacuuua

SEQ ID NO: 1982438 - RNA, 19 nt, Artificial Sequence
  Description of Artificial Sequence: Synthetic oligonucleotide
  Sense strand starting at position 2495 of SEQ ID NO: 1880639
aguuuccaggucuacaaua

SEQ ID NO: 1982439 - RNA, 19 nt, Artificial Sequence
  Description of Artificial Sequence: Synthetic oligonucleotide
  Antisense strand to SEQ ID NO: 1982438
uauuguagaccuggaaacu

SEQ ID NO: 1982440 - RNA, 19 nt, Artificial Sequence
  Description of Artificial Sequence: Synthetic oligonucleotide
  Sense strand starting at position 2700 of SEQ ID NO: 1880639
ugagauagcuauucuuaca

SEQ ID NO: 1982441 - RNA, 19 nt, Artificial Sequence
  Description of Artificial Sequence: Synthetic oligonucleotide
  Antisense strand to SEQ ID NO: 1982440
uguaagaauagcuaucuca

SEQ ID NO: 1982442 - RNA, 19 nt, Artificial Sequence
  Description of Artificial Sequence: Synthetic oligonucleotide
  Sense strand starting at position 2769 of SEQ ID NO: 1880639
ucagucugugucuaaugaa

SEQ ID NO: 1982443 - RNA, 19 nt, Artificial Sequence
  Description of Artificial Sequence: Synthetic oligonucleotide
  Antisense strand to SEQ ID NO: 1982442
uucauuagacacagacuga

SEQ ID NO: 1982444 - RNA, 19 nt, Artificial Sequence
  Description of Artificial Sequence: Synthetic oligonucleotide
  Sense strand starting at position 3108 of SEQ ID NO: 1880639
cagaaauacucuuuggagu

SEQ ID NO: 1982445 - RNA, 19 nt, Artificial Sequence
  Description of Artificial Sequence: Synthetic oligonucleotide
  Antisense strand to SEQ ID NO: 1982444
acuccaaagaguauuucug

SEQ ID NO: 1982446 - RNA, 19 nt, Artificial Sequence
  Description of Artificial Sequence: Synthetic oligonucleotide
  Sense strand starting at position 3109 of SEQ ID NO: 1880639
agaaauacucuuuggaguu

SEQ ID NO: 1982447 - RNA, 19 nt, Artificial Sequence
  Description of Artificial Sequence: Synthetic oligonucleotide
  Antisense strand to SEQ ID NO: 1982446
aacuccaaagaguauuucu

SEQ ID NO: 1982448 - RNA, 19 nt, Artificial Sequence
  Description of Artificial Sequence: Synthetic oligonucleotide
  Sense strand starting at position 3262 of SEQ ID NO: 1880639
uugcauuggaugcagaagu

SEQ ID NO: 1982449 - RNA, 19 nt, Artificial Sequence
  Description of Artificial Sequence: Synthetic oligonucleotide
  Antisense strand to SEQ ID NO: 1982448
acuucugcauccaaugcaa

SEQ ID NO: 1982450 - RNA, 19 nt, Artificial Sequence
  Description of Artificial Sequence: Synthetic oligonucleotide
  Sense strand starting at position 3344 of SEQ ID NO: 1880639
ggguuucugagucacacau

SEQ ID NO: 1982451 - RNA, 19 nt, Artificial Sequence
  Description of Artificial Sequence: Synthetic oligonucleotide
  Antisense strand to SEQ ID NO: 1982450
augugugacucagaaaccc

SEQ ID NO: 1982452 - RNA, 19 nt, Artificial Sequence
  Description of Artificial Sequence: Synthetic oligonucleotide
  Sense strand starting at position 3378 of SEQ ID NO: 1880639
ucuggaugucaucagggua

SEQ ID NO: 1982453 - RNA, 19 nt, Artificial Sequence
  Description of Artificial Sequence: Synthetic oligonucleotide
  Antisense strand to SEQ ID NO: 1982452
uacccugaugacauccaga

SEQ ID NO: 1982454 - RNA, 19 nt, Artificial Sequence
  Description of Artificial Sequence: Synthetic oligonucleotide
  Sense strand starting at position 3547 of SEQ ID NO: 1880639
uuuaaccuugcagggauaa

SEQ ID NO: 1982455 - RNA, 19 nt, Artificial Sequence
  Description of Artificial Sequence: Synthetic oligonucleotide
  Antisense strand to SEQ ID NO: 1982454
uuaucccugcaagguuaaa

SEQ ID NO: 1982456 - RNA, 19 nt, Artificial Sequence
  Description of Artificial Sequence: Synthetic oligonucleotide
  Sense strand starting at position 3548 of SEQ ID NO: 1880639
uuaaccuugcagggauaaa

SEQ ID NO: 1982457 - RNA, 19 nt, Artificial Sequence
  Description of Artificial Sequence: Synthetic oligonucleotide
  Antisense strand to SEQ ID NO: 1982456
uuuaucccugcaagguuaa

SEQ ID NO: 1982458 - RNA, 19 nt, Artificial Sequence
  Description of Artificial Sequence: Synthetic oligonucleotide
  Sense strand starting at position 3657 of SEQ ID NO: 1880639
guaucaaauuuagagaaag

SEQ ID NO: 1982459 - RNA, 19 nt, Artificial Sequence
  Description of Artificial Sequence: Synthetic oligonucleotide
  Antisense strand to SEQ ID NO: 1982458
cuuucucuaaauuugauac

SEQ ID NO: 1982460 - RNA, 19 nt, Artificial Sequence
  Description of Artificial Sequence: Synthetic oligonucleotide
  Sense strand starting at position 3746 of SEQ ID NO: 1880639
aguuaagauuccucaucug

SEQ ID NO: 1982461 - RNA, 19 nt, Artificial Sequence
  Description of Artificial Sequence: Synthetic oligonucleotide
  Antisense strand to SEQ ID NO: 1982460
cagaugaggaaucuuaacu

SEQ ID NO: 1982462 - RNA, 19 nt, Artificial Sequence
  Description of Artificial Sequence: Synthetic oligonucleotide
  Sense strand starting at position 3799 of SEQ ID NO: 1880639
ggccuuugggaguaugaag

SEQ ID NO: 1982463 - RNA, 19 nt, Artificial Sequence
  Description of Artificial Sequence: Synthetic oligonucleotide
  Antisense strand to SEQ ID NO: 1982462
cuucauacucccaaaggcc

SEQ ID NO: 1982464 - RNA, 19 nt, Artificial Sequence
  Description of Artificial Sequence: Synthetic oligonucleotide
  Sense strand starting at position 3840 of SEQ ID NO: 1880639
cagagcagucccuacaaga

SEQ ID NO: 1982465 - RNA, 19 nt, Artificial Sequence
  Description of Artificial Sequence: Synthetic oligonucleotide
  Antisense strand to SEQ ID NO: 1982464
ucuuguagggacugcucug

SEQ ID NO: 1982466 - RNA, 19 nt, Artificial Sequence
  Description of Artificial Sequence: Synthetic oligonucleotide
  Sense strand starting at position 3929 of SEQ ID NO: 1880639
cuuaguaacuuagugauaa

SEQ ID NO: 1982467 - RNA, 19 nt, Artificial Sequence
  Description of Artificial Sequence: Synthetic oligonucleotide
  Antisense strand to SEQ ID NO: 1982466
uuaucacuaaguuacuaag

SEQ ID NO: 1982468 - RNA, 19 nt, Artificial Sequence
  Description of Artificial Sequence: Synthetic oligonucleotide
  Sense strand starting at position 3939 of SEQ ID NO: 1880639
uagugauaaggauggugaa

SEQ ID NO: 1982469 - RNA, 19 nt, Artificial Sequence
  Description of Artificial Sequence: Synthetic oligonucleotide
  Antisense strand to SEQ ID NO: 1982468
uucaccauccuuaucacua

SEQ ID NO: 1982470 - RNA, 19 nt, Artificial Sequence
  Description of Artificial Sequence: Synthetic oligonucleotide
  Sense strand starting at position 80 of SEQ ID NO: 1880640
caaggaggguucuuaagca

SEQ ID NO: 1982471 - RNA, 19 nt, Artificial Sequence
  Description of Artificial Sequence: Synthetic oligonucleotide
  Antisense strand to SEQ ID NO: 1982470
ugcuuaagaacccuccuug

SEQ ID NO: 1982472 - RNA, 19 nt, Artificial Sequence
  Description of Artificial Sequence: Synthetic oligonucleotide
  Sense strand starting at position 181 of SEQ ID NO: 1880640
uguguuagacuaggaaaga

SEQ ID NO: 1982473 - RNA, 19 nt, Artificial Sequence
  Description of Artificial Sequence: Synthetic oligonucleotide
  Antisense strand to SEQ ID NO: 1982472
ucuuuccuagucuaacaca

SEQ ID NO: 1982474 - RNA, 19 nt, Artificial Sequence
  Description of Artificial Sequence: Synthetic oligonucleotide
  Sense strand starting at position 217 of SEQ ID NO: 1880640
caagauaugauguggugga

SEQ ID NO: 1982475 - RNA, 19 nt, Artificial Sequence
  Description of Artificial Sequence: Synthetic oligonucleotide
  Antisense strand to SEQ ID NO: 1982474
uccaccacaucauaucuug

SEQ ID NO: 1982476 - RNA, 19 nt, Artificial Sequence
  Description of Artificial Sequence: Synthetic oligonucleotide
  Sense strand starting at position 337 of SEQ ID NO: 1880640
cguucauaagaugagaguu

SEQ ID NO: 1982477 - RNA, 19 nt, Artificial Sequence
  Description of Artificial Sequence: Synthetic oligonucleotide
  Antisense strand to SEQ ID NO: 1982476
aacucucaucuuaugaacg

SEQ ID NO: 1982478 - RNA, 19 nt, Artificial Sequence
  Description of Artificial Sequence: Synthetic oligonucleotide
  Sense strand starting at position 357 of SEQ ID NO: 1880640
gagcaacugcucuaaggaa

SEQ ID NO: 1982479 - RNA, 19 nt, Artificial Sequence
  Description of Artificial Sequence: Synthetic oligonucleotide
  Antisense strand to SEQ ID NO: 1982478
uuccuuagagcaguugcuc

SEQ ID NO: 1982480 - RNA, 19 nt, Artificial Sequence
  Description of Artificial Sequence: Synthetic oligonucleotide
  Sense strand starting at position 467 of SEQ ID NO: 1880640
acaugaugagucugacuuu

SEQ ID NO: 1982481 - RNA, 19 nt, Artificial Sequence
  Description of Artificial Sequence: Synthetic oligonucleotide
  Antisense strand to SEQ ID NO: 1982480
aaagucagacucaucaugu

SEQ ID NO: 1982482 - RNA, 19 nt, Artificial Sequence
  Description of Artificial Sequence: Synthetic oligonucleotide
  Sense strand starting at position 473 of SEQ ID NO: 1880640
ugagucugacuuugagaga

SEQ ID NO: 1982483 - RNA, 19 nt, Artificial Sequence
  Description of Artificial Sequence: Synthetic oligonucleotide
  Antisense strand to SEQ ID NO: 1982482
ucucucaaagucagacuca

SEQ ID NO: 1982484 - RNA, 19 nt, Artificial Sequence
  Description of Artificial Sequence: Synthetic oligonucleotide
  Sense strand starting at position 486 of SEQ ID NO: 1880640
gagagauaaguuggccaaa

SEQ ID NO: 1982485 - RNA, 19 nt, Artificial Sequence
  Description of Artificial Sequence: Synthetic oligonucleotide
  Antisense strand to SEQ ID NO: 1982484
uuuggccaacuuaucucuc

SEQ ID NO: 1982486 - RNA, 19 nt, Artificial Sequence
  Description of Artificial Sequence: Synthetic oligonucleotide
  Sense strand starting at position 488 of SEQ ID NO: 1880640
gagauaaguuggccaaagu

SEQ ID NO: 1982487 - RNA, 19 nt, Artificial Sequence
  Description of Artificial Sequence: Synthetic oligonucleotide
  Antisense strand to SEQ ID NO: 1982486
acuuuggccaacuuaucuc

SEQ ID NO: 1982488 - RNA, 19 nt, Artificial Sequence
  Description of Artificial Sequence: Synthetic oligonucleotide
  Sense strand starting at position 489 of SEQ ID NO: 1880640
agauaaguuggccaaagug

SEQ ID NO: 1982489 - RNA, 19 nt, Artificial Sequence
  Description of Artificial Sequence: Synthetic oligonucleotide
  Antisense strand to SEQ ID NO: 1982488
cacuuuggccaacuuaucu

SEQ ID NO: 1982490 - RNA, 19 nt, Artificial Sequence
  Description of Artificial Sequence: Synthetic oligonucleotide
  Sense strand starting at position 548 of SEQ ID NO: 1880640
uucgaucacuuaccaugaa

SEQ ID NO: 1982491 - RNA, 19 nt, Artificial Sequence
  Description of Artificial Sequence: Synthetic oligonucleotide
  Antisense strand to SEQ ID NO: 1982490
uucaugguaagugaucgaa

SEQ ID NO: 1982492 - RNA, 19 nt, Artificial Sequence
  Description of Artificial Sequence: Synthetic oligonucleotide
  Sense strand starting at position 707 of SEQ ID NO: 1880640
gugguugaggccuaugaau

SEQ ID NO: 1982493 - RNA, 19 nt, Artificial Sequence
  Description of Artificial Sequence: Synthetic oligonucleotide
  Antisense strand to SEQ ID NO: 1982492
auucauaggccucaaccac

SEQ ID NO: 1982494 - RNA, 19 nt, Artificial Sequence
  Description of Artificial Sequence: Synthetic oligonucleotide
  Sense strand starting at position 709 of SEQ ID NO: 1880640
gguugaggccuaugaauau

SEQ ID NO: 1982495 - RNA, 19 nt, Artificial Sequence
  Description of Artificial Sequence: Synthetic oligonucleotide
  Antisense strand to SEQ ID NO: 1982494
auauucauaggccucaacc

SEQ ID NO: 1982496 - RNA, 19 nt, Artificial Sequence
  Description of Artificial Sequence: Synthetic oligonucleotide
  Sense strand starting at position 1331 of SEQ ID NO: 1880640
aucacuuauguguacugau

SEQ ID NO: 1982497 - RNA, 19 nt, Artificial Sequence
  Description of Artificial Sequence: Synthetic oligonucleotide
  Antisense strand to SEQ ID NO: 1982496
aucaguacacauaagugau

SEQ ID NO: 1982498 - RNA, 19 nt, Artificial Sequence
  Description of Artificial Sequence: Synthetic oligonucleotide
  Sense strand starting at position 1346 of SEQ ID NO: 1880640
ugauuuauaugccaaagaa

SEQ ID NO: 1982499 - RNA, 19 nt, Artificial Sequence
  Description of Artificial Sequence: Synthetic oligonucleotide
  Antisense strand to SEQ ID NO: 1982498
uucuuuggcauauaaauca

SEQ ID NO: 1982500 - RNA, 19 nt, Artificial Sequence
  Description of Artificial Sequence: Synthetic oligonucleotide
  Sense strand starting at position 1785 of SEQ ID NO: 1880640
ggcacaucauuugcuguau

SEQ ID NO: 1982501 - RNA, 19 nt, Artificial Sequence
  Description of Artificial Sequence: Synthetic oligonucleotide
  Antisense strand to SEQ ID NO: 1982500
auacagcaaaugaugugcc

SEQ ID NO: 1982502 - RNA, 19 nt, Artificial Sequence
  Description of Artificial Sequence: Synthetic oligonucleotide
  Sense strand starting at position 2067 of SEQ ID NO: 1880640
uuacuaaguucccuugaug

SEQ ID NO: 1982503 - RNA, 19 nt, Artificial Sequence
  Description of Artificial Sequence: Synthetic oligonucleotide
  Antisense strand to SEQ ID NO: 1982502
caucaagggaacuuaguaa

SEQ ID NO: 1982504 - RNA, 19 nt, Artificial Sequence
  Description of Artificial Sequence: Synthetic oligonucleotide
  Sense strand starting at position 2076 of SEQ ID NO: 1880640
ucccuugauguggauuauu

SEQ ID NO: 1982505 - RNA, 19 nt, Artificial Sequence
  Description of Artificial Sequence: Synthetic oligonucleotide
  Antisense strand to SEQ ID NO: 1982504
aauaauccacaucaaggga

SEQ ID NO: 1982506 - RNA, 19 nt, Artificial Sequence
  Description of Artificial Sequence: Synthetic oligonucleotide
  Sense strand starting at position 2087 of SEQ ID NO: 1880640
ggauuauucucccuguuaa

SEQ ID NO: 1982507 - RNA, 19 nt, Artificial Sequence
  Description of Artificial Sequence: Synthetic oligonucleotide
  Antisense strand to SEQ ID NO: 1982506
uuaacagggagaauaaucc

SEQ ID NO: 1982508 - RNA, 19 nt, Artificial Sequence
  Description of Artificial Sequence: Synthetic oligonucleotide
  Sense strand starting at position 2112 of SEQ ID NO: 1880640
cgguccuagagugacaauu

SEQ ID NO: 1982509 - RNA, 19 nt, Artificial Sequence
  Description of Artificial Sequence: Synthetic oligonucleotide
  Antisense strand to SEQ ID NO: 1982508
aauugucacucuaggaccg

SEQ ID NO: 1982510 - RNA, 19 nt, Artificial Sequence
  Description of Artificial Sequence: Synthetic oligonucleotide
  Sense strand starting at position 2244 of SEQ ID NO: 1880640
ccaucugcuccaggaauaa

SEQ ID NO: 1982511 - RNA, 19 nt, Artificial Sequence
  Description of Artificial Sequence: Synthetic oligonucleotide
  Antisense strand to SEQ ID NO: 1982510
uuauuccuggagcagaugg

SEQ ID NO: 1982512 - RNA, 19 nt, Artificial Sequence
  Description of Artificial Sequence: Synthetic oligonucleotide
  Sense strand starting at position 2272 of SEQ ID NO: 1880640
ucauuauuccauuagugau

SEQ ID NO: 1982513 - RNA, 19 nt, Artificial Sequence
  Description of Artificial Sequence: Synthetic oligonucleotide
  Antisense strand to SEQ ID NO: 1982512
aucacuaauggaauaauga

SEQ ID NO: 1982514 - RNA, 19 nt, Artificial Sequence
  Description of Artificial Sequence: Synthetic oligonucleotide
  Sense strand starting at position 2548 of SEQ ID NO: 1880640
gugaaucaaauagguuuga

SEQ ID NO: 1982515 - RNA, 19 nt, Artificial Sequence
  Description of Artificial Sequence: Synthetic oligonucleotide
  Antisense strand to SEQ ID NO: 1982514
ucaaaccuauuugauucac

SEQ ID NO: 1982516 - RNA, 19 nt, Artificial Sequence
  Description of Artificial Sequence: Synthetic oligonucleotide
  Sense strand starting at position 2557 of SEQ ID NO: 1880640
auagguuugaaaugcaaug

SEQ ID NO: 1982517 - RNA, 19 nt, Artificial Sequence
  Description of Artificial Sequence: Synthetic oligonucleotide
  Antisense strand to SEQ ID NO: 1982516
cauugcauuucaaaccuau

SEQ ID NO: 1982518 - RNA, 19 nt, Artificial Sequence
  Description of Artificial Sequence: Synthetic oligonucleotide
  Sense strand starting at position 2620 of SEQ ID NO: 1880640
ugaacauaauucuuagggu

SEQ ID NO: 1982519 - RNA, 19 nt, Artificial Sequence
  Description of Artificial Sequence: Synthetic oligonucleotide
  Antisense strand to SEQ ID NO: 1982518
acccuaagaauuauguuca

SEQ ID NO: 1982520 - RNA, 19 nt, Artificial Sequence
  Description of Artificial Sequence: Synthetic oligonucleotide
  Sense strand starting at position 3046 of SEQ ID NO: 1880640
gcuuuauuuggccagcuua

SEQ ID NO: 1982521 - RNA, 19 nt, Artificial Sequence
  Description of Artificial Sequence: Synthetic oligonucleotide
  Antisense strand to SEQ ID NO: 1982520
uaagcuggccaaauaaagc

SEQ ID NO: 1982522 - RNA, 19 nt, Artificial Sequence
  Description of Artificial Sequence: Synthetic oligonucleotide
  Sense strand starting at position 3098 of SEQ ID NO: 1880640
uggcaaggcauguauuaau

SEQ ID NO: 1982523 - RNA, 19 nt, Artificial Sequence
  Description of Artificial Sequence: Synthetic oligonucleotide
  Antisense strand to SEQ ID NO: 1982522
auuaauacaugccuugcca

SEQ ID NO: 1982524 - RNA, 19 nt, Artificial Sequence
  Description of Artificial Sequence: Synthetic oligonucleotide
  Sense strand starting at position 3129 of SEQ ID NO: 1880640
guugcaaauccguacauuu

SEQ ID NO: 1982525 - RNA, 19 nt, Artificial Sequence
  Description of Artificial Sequence: Synthetic oligonucleotide
  Antisense strand to SEQ ID NO: 1982524
aaauguacggauuugcaac

SEQ ID NO: 1982526 - RNA, 19 nt, Artificial Sequence
  Description of Artificial Sequence: Synthetic oligonucleotide
  Sense strand starting at position 3340 of SEQ ID NO: 1880640
auugacauuucugagaaag

SEQ ID NO: 1982527 - RNA, 19 nt, Artificial Sequence
  Description of Artificial Sequence: Synthetic oligonucleotide
  Antisense strand to SEQ ID NO: 1982526
cuuucucagaaaugucaau

SEQ ID NO: 1982528 - RNA, 19 nt, Artificial Sequence
  Description of Artificial Sequence: Synthetic oligonucleotide
  Sense strand starting at position 3362 of SEQ ID NO: 1880640
acugcugucccauaugaca

SEQ ID NO: 1982529 - RNA, 19 nt, Artificial Sequence
  Description of Artificial Sequence: Synthetic oligonucleotide
  Antisense strand to SEQ ID NO: 1982528
ugucauaugggacagcagu

SEQ ID NO: 1982530 - RNA, 19 nt, Artificial Sequence
  Description of Artificial Sequence: Synthetic oligonucleotide
  Sense strand starting at position 3405 of SEQ ID NO: 1880640
uacugacauguguauugua

SEQ ID NO: 1982531 - RNA, 19 nt, Artificial Sequence
  Description of Artificial Sequence: Synthetic oligonucleotide
  Antisense strand to SEQ ID NO: 1982530
uacaauacacaugucagua

SEQ ID NO: 1982532 - RNA, 19 nt, Artificial Sequence
  Description of Artificial Sequence: Synthetic oligonucleotide
  Sense strand starting at position 3430 of SEQ ID NO: 1880640
aaaguuguaggguauccau

SEQ ID NO: 1982533 - RNA, 19 nt, Artificial Sequence
  Description of Artificial Sequence: Synthetic oligonucleotide
  Antisense strand to SEQ ID NO: 1982532
auggauacccuacaacuuu

SEQ ID NO: 1982534 - RNA, 19 nt, Artificial Sequence
  Description of Artificial Sequence: Synthetic oligonucleotide
  Sense strand starting at position 3439 of SEQ ID NO: 1880640
ggguauccauuauuauuau

SEQ ID NO: 1982535 - RNA, 19 nt, Artificial Sequence
  Description of Artificial Sequence: Synthetic oligonucleotide
  Antisense strand to SEQ ID NO: 1982534
auaauaauaauggauaccc

SEQ ID NO: 1982536 - RNA, 19 nt, Artificial Sequence
  Description of Artificial Sequence: Synthetic oligonucleotide
  Sense strand starting at position 3533 of SEQ ID NO: 1880640
ugugaugauuuauugcuuu

SEQ ID NO: 1982537 - RNA, 19 nt, Artificial Sequence
  Description of Artificial Sequence: Synthetic oligonucleotide
  Antisense strand to SEQ ID NO: 1982536
aaagcaauaaaucaucaca

SEQ ID NO: 1982538 - RNA, 19 nt, Artificial Sequence
  Description of Artificial Sequence: Synthetic oligonucleotide
  Sense strand starting at position 3546 of SEQ ID NO: 1880640
ugcuuuggaguuuauccaa

SEQ ID NO: 1982539 - RNA, 19 nt, Artificial Sequence
  Description of Artificial Sequence: Synthetic oligonucleotide
  Antisense strand to SEQ ID NO: 1982538
uuggauaaacuccaaagca

SEQ ID NO: 1982540 - RNA, 19 nt, Artificial Sequence
  Description of Artificial Sequence: Synthetic oligonucleotide
  Sense strand starting at position 3549 of SEQ ID NO: 1880640
uuuggaguuuauccaaaga

SEQ ID NO: 1982541 - RNA, 19 nt, Artificial Sequence
  Description of Artificial Sequence: Synthetic oligonucleotide
  Antisense strand to SEQ ID NO: 1982540
ucuuuggauaaacuccaaa

SEQ ID NO: 1982542 - RNA, 19 nt, Artificial Sequence
  Description of Artificial Sequence: Synthetic oligonucleotide
  Sense strand starting at position 3647 of SEQ ID NO: 1880640
acaucugugaggcaauagu

SEQ ID NO: 1982543 - RNA, 19 nt, Artificial Sequence
  Description of Artificial Sequence: Synthetic oligonucleotide
  Antisense strand to SEQ ID NO: 1982542
acuauugccucacagaugu

SEQ ID NO: 1982544 - RNA, 19 nt, Artificial Sequence
  Description of Artificial Sequence: Synthetic oligonucleotide
  Sense strand starting at position 3811 of SEQ ID NO: 1880640
gccaucaguguugaagaau

SEQ ID NO: 1982545 - RNA, 19 nt, Artificial Sequence
  Description of Artificial Sequence: Synthetic oligonucleotide
  Antisense strand to SEQ ID NO: 1982544
auucuucaacacugauggc

SEQ ID NO: 1982546 - RNA, 19 nt, Artificial Sequence
  Description of Artificial Sequence: Synthetic oligonucleotide
  Sense strand starting at position 3814 of SEQ ID NO: 1880640
aucaguguugaagaauguu

SEQ ID NO: 1982547 - RNA, 19 nt, Artificial Sequence
  Description of Artificial Sequence: Synthetic oligonucleotide
  Antisense strand to SEQ ID NO: 1982546
aacauucuucaacacugau

SEQ ID NO: 1982548 - RNA, 19 nt, Artificial Sequence
  Description of Artificial Sequence: Synthetic oligonucleotide
  Sense strand starting at position 3901 of SEQ ID NO: 1880640
cucagucauuugucuguuu

SEQ ID NO: 1982549 - RNA, 19 nt, Artificial Sequence
  Description of Artificial Sequence: Synthetic oligonucleotide
  Antisense strand to SEQ ID NO: 1982548
aaacagacaaaugacugag

SEQ ID NO: 1982550 - RNA, 19 nt, Artificial Sequence
  Description of Artificial Sequence: Synthetic oligonucleotide
  Sense strand starting at position 160 of SEQ ID NO: 1880641
ucaggucacuugccugaga

SEQ ID NO: 1982551 - RNA, 19 nt, Artificial Sequence
  Description of Artificial Sequence: Synthetic oligonucleotide
  Antisense strand to SEQ ID NO: 1982550
ucucaggcaagugaccuga

SEQ ID NO: 1982552 - RNA, 19 nt, Artificial Sequence
  Description of Artificial Sequence: Synthetic oligonucleotide
  Sense strand starting at position 161 of SEQ ID NO: 1880641
caggucacuugccugagaa

SEQ ID NO: 1982553 - RNA, 19 nt, Artificial Sequence
  Description of Artificial Sequence: Synthetic oligonucleotide
  Antisense strand to SEQ ID NO: 1982552
uucucaggcaagugaccug

SEQ ID NO: 1982554 - RNA, 19 nt, Artificial Sequence
  Description of Artificial Sequence: Synthetic oligonucleotide
  Sense strand starting at position 162 of SEQ ID NO: 1880641
aggucacuugccugagaaa

SEQ ID NO: 1982555 - RNA, 19 nt, Artificial Sequence
  Description of Artificial Sequence: Synthetic oligonucleotide
  Antisense strand to SEQ ID NO: 1982554
uuucucaggcaagugaccu

SEQ ID NO: 1982556 - RNA, 19 nt, Artificial Sequence
  Description of Artificial Sequence: Synthetic oligonucleotide
  Sense strand starting at position 286 of SEQ ID NO: 1880641
uugggugacagguacuaau

SEQ ID NO: 1982557 - RNA, 19 nt, Artificial Sequence
  Description of Artificial Sequence: Synthetic oligonucleotide
  Antisense strand to SEQ ID NO: 1982556
auuaguaccugucacccaa

SEQ ID NO: 1982558 - RNA, 19 nt, Artificial Sequence
  Description of Artificial Sequence: Synthetic oligonucleotide
  Sense strand starting at position 356 of SEQ ID NO: 1880641
cuuuguaccucaguugaag

SEQ ID NO: 1982559 - RNA, 19 nt, Artificial Sequence
  Description of Artificial Sequence: Synthetic oligonucleotide
  Antisense strand to SEQ ID NO: 1982558
cuucaacugagguacaaag

SEQ ID NO: 1982560 - RNA, 19 nt, Artificial Sequence
  Description of Artificial Sequence: Synthetic oligonucleotide
  Sense strand starting at position 464 of SEQ ID NO: 1880641
agaugauacuuagugguua

SEQ ID NO: 1982561 - RNA, 19 nt, Artificial Sequence
  Description of Artificial Sequence: Synthetic oligonucleotide
  Antisense strand to SEQ ID NO: 1982560
uaaccacuaaguaucaucu

SEQ ID NO: 1982562 - RNA, 19 nt, Artificial Sequence
  Description of Artificial Sequence: Synthetic oligonucleotide
  Sense strand starting at position 468 of SEQ ID NO: 1880641
gauacuuagugguuauuaa

SEQ ID NO: 1982563 - RNA, 19 nt, Artificial Sequence
  Description of Artificial Sequence: Synthetic oligonucleotide
  Antisense strand to SEQ ID NO: 1982562
uuaauaaccacuaaguauc

SEQ ID NO: 1982564 - RNA, 19 nt, Artificial Sequence
  Description of Artificial Sequence: Synthetic oligonucleotide
  Sense strand starting at position 497 of SEQ ID NO: 1880641
agagaucauuacuuaugua

SEQ ID NO: 1982565 - RNA, 19 nt, Artificial Sequence
  Description of Artificial Sequence: Synthetic oligonucleotide
  Antisense strand to SEQ ID NO: 1982564
uacauaaguaaugaucucu

SEQ ID NO: 1982566 - RNA, 19 nt, Artificial Sequence
  Description of Artificial Sequence: Synthetic oligonucleotide
  Sense strand starting at position 546 of SEQ ID NO: 1880641
auaagaaacuaugcugcaa

SEQ ID NO: 1982567 - RNA, 19 nt, Artificial Sequence
  Description of Artificial Sequence: Synthetic oligonucleotide
  Antisense strand to SEQ ID NO: 1982566
uugcagcauaguuucuuau

SEQ ID NO: 1982568 - RNA, 19 nt, Artificial Sequence
  Description of Artificial Sequence: Synthetic oligonucleotide
  Sense strand starting at position 689 of SEQ ID NO: 1880641
agcuaucugauuugugguu

SEQ ID NO: 1982569 - RNA, 19 nt, Artificial Sequence
  Description of Artificial Sequence: Synthetic oligonucleotide
  Antisense strand to SEQ ID NO: 1982568
aaccacaaaucagauagcu

SEQ ID NO: 1982570 - RNA, 19 nt, Artificial Sequence
  Description of Artificial Sequence: Synthetic oligonucleotide
  Sense strand starting at position 896 of SEQ ID NO: 1880641
auuuaucuguuacagggaa

SEQ ID NO: 1982571 - RNA, 19 nt, Artificial Sequence
  Description of Artificial Sequence: Synthetic oligonucleotide
  Antisense strand to SEQ ID NO: 1982570
uucccuguaacagauaaau

SEQ ID NO: 1982572 - RNA, 19 nt, Artificial Sequence
  Description of Artificial Sequence: Synthetic oligonucleotide
  Sense strand starting at position 1037 of SEQ ID NO: 1880641
uaagauguagcuuauugac

SEQ ID NO: 1982573 - RNA, 19 nt, Artificial Sequence
  Description of Artificial Sequence: Synthetic oligonucleotide
  Antisense strand to SEQ ID NO: 1982572
gucaauaagcuacaucuua

SEQ ID NO: 1982574 - RNA, 19 nt, Artificial Sequence
  Description of Artificial Sequence: Synthetic oligonucleotide
  Sense strand starting at position 1039 of SEQ ID NO: 1880641
agauguagcuuauugacuu

SEQ ID NO: 1982575 - RNA, 19 nt, Artificial Sequence
  Description of Artificial Sequence: Synthetic oligonucleotide
  Antisense strand to SEQ ID NO: 1982574
aagucaauaagcuacaucu

SEQ ID NO: 1982576 - RNA, 19 nt, Artificial Sequence
  Description of Artificial Sequence: Synthetic oligonucleotide
  Sense strand starting at position 1046 of SEQ ID NO: 1880641
gcuuauugacuuuaugaaa

SEQ ID NO: 1982577 - RNA, 19 nt, Artificial Sequence
  Description of Artificial Sequence: Synthetic oligonucleotide
  Antisense strand to SEQ ID NO: 1982576
uuucauaaagucaauaagc

SEQ ID NO: 1982578 - RNA, 19 nt, Artificial Sequence
  Description of Artificial Sequence: Synthetic oligonucleotide
  Sense strand starting at position 1229 of SEQ ID NO: 1880641
ugugauauuccucagcaaa

SEQ ID NO: 1982579 - RNA, 19 nt, Artificial Sequence
  Description of Artificial Sequence: Synthetic oligonucleotide
  Antisense strand to SEQ ID NO: 1982578
uuugcugaggaauaucaca

SEQ ID NO: 1982580 - RNA, 19 nt, Artificial Sequence
  Description of Artificial Sequence: Synthetic oligonucleotide
  Sense strand starting at position 1374 of SEQ ID NO: 1880641
gggauacuucuuggcaauu

SEQ ID NO: 1982581 - RNA, 19 nt, Artificial Sequence
  Description of Artificial Sequence: Synthetic oligonucleotide
  Antisense strand to SEQ ID NO: 1982580
aauugccaagaaguauccc

SEQ ID NO: 1982582 - RNA, 19 nt, Artificial Sequence
  Description of Artificial Sequence: Synthetic oligonucleotide
  Sense strand starting at position 1776 of SEQ ID NO: 1880641
uuucccggucauugagaga

SEQ ID NO: 1982583 - RNA, 19 nt, Artificial Sequence
  Description of Artificial Sequence: Synthetic oligonucleotide
  Antisense strand to SEQ ID NO: 1982582
ucucucaaugaccgggaaa

SEQ ID NO: 1982584 - RNA, 19 nt, Artificial Sequence
  Description of Artificial Sequence: Synthetic oligonucleotide
  Sense strand starting at position 1959 of SEQ ID NO: 1880641
cagggacucgcaggaguua

SEQ ID NO: 1982585 - RNA, 19 nt, Artificial Sequence
  Description of Artificial Sequence: Synthetic oligonucleotide
  Antisense strand to SEQ ID NO: 1982584
uaacuccugcgagucccug

SEQ ID NO: 1982586 - RNA, 19 nt, Artificial Sequence
  Description of Artificial Sequence: Synthetic oligonucleotide
  Sense strand starting at position 2627 of SEQ ID NO: 1880641
acgguuuacuaagcagaga

SEQ ID NO: 1982587 - RNA, 19 nt, Artificial Sequence
  Description of Artificial Sequence: Synthetic oligonucleotide
  Antisense strand to SEQ ID NO: 1982586
ucucugcuuaguaaaccgu

SEQ ID NO: 1982588 - RNA, 19 nt, Artificial Sequence
  Description of Artificial Sequence: Synthetic oligonucleotide
  Sense strand starting at position 2630 of SEQ ID NO: 1880641
guuuacuaagcagagacuu

SEQ ID NO: 1982589 - RNA, 19 nt, Artificial Sequence
  Description of Artificial Sequence: Synthetic oligonucleotide
  Antisense strand to SEQ ID NO: 1982588
aagucucugcuuaguaaac

SEQ ID NO: 1982590 - RNA, 19 nt, Artificial Sequence
  Description of Artificial Sequence: Synthetic oligonucleotide
  Sense strand starting at position 2715 of SEQ ID NO: 1880641
gcagcaucgcugccuuaaa

SEQ ID NO: 1982591 - RNA, 19 nt, Artificial Sequence
  Description of Artificial Sequence: Synthetic oligonucleotide
  Antisense strand to SEQ ID NO: 1982590
uuuaaggcagcgaugcugc

SEQ ID NO: 1982592 - RNA, 19 nt, Artificial Sequence
  Description of Artificial Sequence: Synthetic oligonucleotide
  Sense strand starting at position 2829 of SEQ ID NO: 1880641
cgaagagauccuuggcaau

SEQ ID NO: 1982593 - RNA, 19 nt, Artificial Sequence
  Description of Artificial Sequence: Synthetic oligonucleotide
  Antisense strand to SEQ ID NO: 1982592
auugccaaggaucucuucg

SEQ ID NO: 1982594 - RNA, 19 nt, Artificial Sequence
  Description of Artificial Sequence: Synthetic oligonucleotide
  Sense strand starting at position 2835 of SEQ ID NO: 1880641
gauccuuggcaauggcaga

SEQ ID NO: 1982595 - RNA, 19 nt, Artificial Sequence
  Description of Artificial Sequence: Synthetic oligonucleotide
  Antisense strand to SEQ ID NO: 1982594
ucugccauugccaaggauc

SEQ ID NO: 1982596 - RNA, 19 nt, Artificial Sequence
  Description of Artificial Sequence: Synthetic oligonucleotide
  Sense strand starting at position 2891 of SEQ ID NO: 1880641
ggaugcuuccaauauuagu

SEQ ID NO: 1982597 - RNA, 19 nt, Artificial Sequence
  Description of Artificial Sequence: Synthetic oligonucleotide
  Antisense strand to SEQ ID NO: 1982596
acuaauauuggaagcaucc

SEQ ID NO: 1982598 - RNA, 19 nt, Artificial Sequence
  Description of Artificial Sequence: Synthetic oligonucleotide
  Sense strand starting at position 2917 of SEQ ID NO: 1880641
gagugaaacucucuucuug

SEQ ID NO: 1982599 - RNA, 19 nt, Artificial Sequence
  Description of Artificial Sequence: Synthetic oligonucleotide
  Antisense strand to SEQ ID NO: 1982598
caagaagagaguuucacuc

SEQ ID NO: 1982600 - RNA, 19 nt, Artificial Sequence
  Description of Artificial Sequence: Synthetic oligonucleotide
  Sense strand starting at position 2919 of SEQ ID NO: 1880641
gugaaacucucuucuugga

SEQ ID NO: 1982601 - RNA, 19 nt, Artificial Sequence
  Description of Artificial Sequence: Synthetic oligonucleotide
  Antisense strand to SEQ ID NO: 1982600
uccaagaagagaguuucac

SEQ ID NO: 1982602 - RNA, 19 nt, Artificial Sequence
  Description of Artificial Sequence: Synthetic oligonucleotide
  Sense strand starting at position 2929 of SEQ ID NO: 1880641
cuucuuggagaucgucaga

SEQ ID NO: 1982603 - RNA, 19 nt, Artificial Sequence
  Description of Artificial Sequence: Synthetic oligonucleotide
  Antisense strand to SEQ ID NO: 1982602
ucugacgaucuccaagaag

SEQ ID NO: 1982604 - RNA, 19 nt, Artificial Sequence
  Description of Artificial Sequence: Synthetic oligonucleotide
  Sense strand starting at position 3317 of SEQ ID NO: 1880641
ugacaagagaguuguguua

SEQ ID NO: 1982605 - RNA, 19 nt, Artificial Sequence
  Description of Artificial Sequence: Synthetic oligonucleotide
  Antisense strand to SEQ ID NO: 1982604
uaacacaacucucuuguca

SEQ ID NO: 1982606 - RNA, 19 nt, Artificial Sequence
  Description of Artificial Sequence: Synthetic oligonucleotide
  Sense strand starting at position 3392 of SEQ ID NO: 1880641
gucucagaugauugacacu

SEQ ID NO: 1982607 - RNA, 19 nt, Artificial Sequence
  Description of Artificial Sequence: Synthetic oligonucleotide
  Antisense strand to SEQ ID NO: 1982606
agugucaaucaucugagac

SEQ ID NO: 1982608 - RNA, 19 nt, Artificial Sequence
  Description of Artificial Sequence: Synthetic oligonucleotide
  Sense strand starting at position 3401 of SEQ ID NO: 1880641
gauugacacuacguaaaua

SEQ ID NO: 1982609 - RNA, 19 nt, Artificial Sequence
  Description of Artificial Sequence: Synthetic oligonucleotide
  Antisense strand to SEQ ID NO: 1982608
uauuuacguagugucaauc

SEQ ID NO: 1982610 - RNA, 19 nt, Artificial Sequence
  Description of Artificial Sequence: Synthetic oligonucleotide
  Sense strand starting at position 3442 of SEQ ID NO: 1880641
ggcauaaucgucuagaaua

SEQ ID NO: 1982611 - RNA, 19 nt, Artificial Sequence
  Description of Artificial Sequence: Synthetic oligonucleotide
  Antisense strand to SEQ ID NO: 1982610
uauucuagacgauuaugcc

SEQ ID NO: 1982612 - RNA, 19 nt, Artificial Sequence
  Description of Artificial Sequence: Synthetic oligonucleotide
  Sense strand starting at position 3581 of SEQ ID NO: 1880641
aauguagaguuauugcaag

SEQ ID NO: 1982613 - RNA, 19 nt, Artificial Sequence
  Description of Artificial Sequence: Synthetic oligonucleotide
  Antisense strand to SEQ ID NO: 1982612
cuugcaauaacucuacauu

SEQ ID NO: 1982614 - RNA, 19 nt, Artificial Sequence
  Description of Artificial Sequence: Synthetic oligonucleotide
  Sense strand starting at position 3613 of SEQ ID NO: 1880641
gagguaccagcgugagaaa

SEQ ID NO: 1982615 - RNA, 19 nt, Artificial Sequence
  Description of Artificial Sequence: Synthetic oligonucleotide
  Antisense strand to SEQ ID NO: 1982614
uuucucacgcugguaccuc

SEQ ID NO: 1982616 - RNA, 19 nt, Artificial Sequence
  Description of Artificial Sequence: Synthetic oligonucleotide
  Sense strand starting at position 3634 of SEQ ID NO: 1880641
gcauaaaucugacuuacag

SEQ ID NO: 1982617 - RNA, 19 nt, Artificial Sequence
  Description of Artificial Sequence: Synthetic oligonucleotide
  Antisense strand to SEQ ID NO: 1982616
cuguaagucagauuuaugc

SEQ ID NO: 1982618 - RNA, 19 nt, Artificial Sequence
  Description of Artificial Sequence: Synthetic oligonucleotide
  Sense strand starting at position 3717 of SEQ ID NO: 1880641
acguuuauuggugugcuua

SEQ ID NO: 1982619 - RNA, 19 nt, Artificial Sequence
  Description of Artificial Sequence: Synthetic oligonucleotide
  Antisense strand to SEQ ID NO: 1982618
uaagcacaccaauaaacgu

SEQ ID NO: 1982620 - RNA, 19 nt, Artificial Sequence
  Description of Artificial Sequence: Synthetic oligonucleotide
  Sense strand starting at position 3754 of SEQ ID NO: 1880641
auuugaaguugcuacagaa

SEQ ID NO: 1982621 - RNA, 19 nt, Artificial Sequence
  Description of Artificial Sequence: Synthetic oligonucleotide
  Antisense strand to SEQ ID NO: 1982620
uucuguagcaacuucaaau

SEQ ID NO: 1982622 - RNA, 19 nt, Artificial Sequence
  Description of Artificial Sequence: Synthetic oligonucleotide
  Sense strand starting at position 3862 of SEQ ID NO: 1880641
ggucucuugucaucaauaa

SEQ ID NO: 1982623 - RNA, 19 nt, Artificial Sequence
  Description of Artificial Sequence: Synthetic oligonucleotide
  Antisense strand to SEQ ID NO: 1982622
uuauugaugacaagagacc

SEQ ID NO: 1982624 - RNA, 19 nt, Artificial Sequence
  Description of Artificial Sequence: Synthetic oligonucleotide
  Sense strand starting at position 3863 of SEQ ID NO: 1880641
gucucuugucaucaauaaa

SEQ ID NO: 1982625 - RNA, 19 nt, Artificial Sequence
  Description of Artificial Sequence: Synthetic oligonucleotide
  Antisense strand to SEQ ID NO: 1982624
uuuauugaugacaagagac

SEQ ID NO: 1982626 - RNA, 19 nt, Artificial Sequence
  Description of Artificial Sequence: Synthetic oligonucleotide
  Sense strand starting at position 3866 of SEQ ID NO: 1880641
ucuugucaucaauaaaggu

SEQ ID NO: 1982627 - RNA, 19 nt, Artificial Sequence
  Description of Artificial Sequence: Synthetic oligonucleotide
  Antisense strand to SEQ ID NO: 1982626
accuuuauugaugacaaga

SEQ ID NO: 1982628 - RNA, 19 nt, Artificial Sequence
  Description of Artificial Sequence: Synthetic oligonucleotide
  Sense strand starting at position 3912 of SEQ ID NO: 1880641
cccugaaggucaguaagau

SEQ ID NO: 1982629 - RNA, 19 nt, Artificial Sequence
  Description of Artificial Sequence: Synthetic oligonucleotide
  Antisense strand to SEQ ID NO: 1982628
aucuuacugaccuucaggg

SEQ ID NO: 1982630 - RNA, 19 nt, Artificial Sequence
  Description of Artificial Sequence: Synthetic oligonucleotide
  Sense strand starting at position 264 of SEQ ID NO: 1880642
uuauauaggugaucugaac

SEQ ID NO: 1982631 - RNA, 19 nt, Artificial Sequence
  Description of Artificial Sequence: Synthetic oligonucleotide
  Antisense strand to SEQ ID NO: 1982630
guucagaucaccuauauaa

SEQ ID NO: 1982632 - RNA, 19 nt, Artificial Sequence
  Description of Artificial Sequence: Synthetic oligonucleotide
  Sense strand starting at position 271 of SEQ ID NO: 1880642
ggugaucugaacuagcauu

SEQ ID NO: 1982633 - RNA, 19 nt, Artificial Sequence
  Description of Artificial Sequence: Synthetic oligonucleotide
  Antisense strand to SEQ ID NO: 1982632
aaugcuaguucagaucacc

SEQ ID NO: 1982634 - RNA, 19 nt, Artificial Sequence
  Description of Artificial Sequence: Synthetic oligonucleotide
  Sense strand starting at position 358 of SEQ ID NO: 1880642
ugcuuagaauacccaugaa

SEQ ID NO: 1982635 - RNA, 19 nt, Artificial Sequence
  Description of Artificial Sequence: Synthetic oligonucleotide
  Antisense strand to SEQ ID NO: 1982634
uucauggguauucuaagca

SEQ ID NO: 1982636 - RNA, 19 nt, Artificial Sequence
  Description of Artificial Sequence: Synthetic oligonucleotide
  Sense strand starting at position 698 of SEQ ID NO: 1880642
acuccugugccugaaauaa

SEQ ID NO: 1982637 - RNA, 19 nt, Artificial Sequence
  Description of Artificial Sequence: Synthetic oligonucleotide
  Antisense strand to SEQ ID NO: 1982636
uuauuucaggcacaggagu

SEQ ID NO: 1982638 - RNA, 19 nt, Artificial Sequence
  Description of Artificial Sequence: Synthetic oligonucleotide
  Sense strand starting at position 762 of SEQ ID NO: 1880642
gaguuuauugcucacagcu

SEQ ID NO: 1982639 - RNA, 19 nt, Artificial Sequence
  Description of Artificial Sequence: Synthetic oligonucleotide
  Antisense strand to SEQ ID NO: 1982638
agcugugagcaauaaacuc

SEQ ID NO: 1982640 - RNA, 19 nt, Artificial Sequence
  Description of Artificial Sequence: Synthetic oligonucleotide
  Sense strand starting at position 818 of SEQ ID NO: 1880642
caaggaaaucuguggguac

SEQ ID NO: 1982641 - RNA, 19 nt, Artificial Sequence
  Description of Artificial Sequence: Synthetic oligonucleotide
  Antisense strand to SEQ ID NO: 1982640
guacccacagauuuccuug

SEQ ID NO: 1982642 - RNA, 19 nt, Artificial Sequence
  Description of Artificial Sequence: Synthetic oligonucleotide
  Sense strand starting at position 820 of SEQ ID NO: 1880642
aggaaaucuguggguacuu

SEQ ID NO: 1982643 - RNA, 19 nt, Artificial Sequence
  Description of Artificial Sequence: Synthetic oligonucleotide
  Antisense strand to SEQ ID NO: 1982642
aaguacccacagauuuccu

SEQ ID NO: 1982644 - RNA, 19 nt, Artificial Sequence
  Description of Artificial Sequence: Synthetic oligonucleotide
  Sense strand starting at position 821 of SEQ ID NO: 1880642
ggaaaucuguggguacuua

SEQ ID NO: 1982645 - RNA, 19 nt, Artificial Sequence
  Description of Artificial Sequence: Synthetic oligonucleotide
  Antisense strand to SEQ ID NO: 1982644
uaaguacccacagauuucc

SEQ ID NO: 1982646 - RNA, 19 nt, Artificial Sequence
  Description of Artificial Sequence: Synthetic oligonucleotide
  Sense strand starting at position 915 of SEQ ID NO: 1880642
gguauuauacaaugucuga

SEQ ID NO: 1982647 - RNA, 19 nt, Artificial Sequence
  Description of Artificial Sequence: Synthetic oligonucleotide
  Antisense strand to SEQ ID NO: 1982646
ucagacauuguauaauacc

SEQ ID NO: 1982648 - RNA, 19 nt, Artificial Sequence
  Description of Artificial Sequence: Synthetic oligonucleotide
  Sense strand starting at position 928 of SEQ ID NO: 1880642
gucugaaucuaugcugaau

SEQ ID NO: 1982649 - RNA, 19 nt, Artificial Sequence
  Description of Artificial Sequence: Synthetic oligonucleotide
  Antisense strand to SEQ ID NO: 1982648
auucagcauagauucagac

SEQ ID NO: 1982650 - RNA, 19 nt, Artificial Sequence
  Description of Artificial Sequence: Synthetic oligonucleotide
  Sense strand starting at position 1036 of SEQ ID NO: 1880642
uuccuauuacuuggauuga

SEQ ID NO: 1982651 - RNA, 19 nt, Artificial Sequence
  Description of Artificial Sequence: Synthetic oligonucleotide
  Antisense strand to SEQ ID NO: 1982650
ucaauccaaguaauaggaa

SEQ ID NO: 1982652 - RNA, 19 nt, Artificial Sequence
  Description of Artificial Sequence: Synthetic oligonucleotide
  Sense strand starting at position 1040 of SEQ ID NO: 1880642
uauuacuuggauugaaagu

SEQ ID NO: 1982653 - RNA, 19 nt, Artificial Sequence
  Description of Artificial Sequence: Synthetic oligonucleotide
  Antisense strand to SEQ ID NO: 1982652
acuuucaauccaaguaaua

SEQ ID NO: 1982654 - RNA, 19 nt, Artificial Sequence
  Description of Artificial Sequence: Synthetic oligonucleotide
  Sense strand starting at position 1047 of SEQ ID NO: 1880642
uggauugaaaguugucagu

SEQ ID NO: 1982655 - RNA, 19 nt, Artificial Sequence
  Description of Artificial Sequence: Synthetic oligonucleotide
  Antisense strand to SEQ ID NO: 1982654
acugacaacuuucaaucca

SEQ ID NO: 1982656 - RNA, 19 nt, Artificial Sequence
  Description of Artificial Sequence: Synthetic oligonucleotide
  Sense strand starting at position 1049 of SEQ ID NO: 1880642
gauugaaaguugucaguaa

SEQ ID NO: 1982657 - RNA, 19 nt, Artificial Sequence
  Description of Artificial Sequence: Synthetic oligonucleotide
  Antisense strand to SEQ ID NO: 1982656
uuacugacaacuuucaauc

SEQ ID NO: 1982658 - RNA, 19 nt, Artificial Sequence
  Description of Artificial Sequence: Synthetic oligonucleotide
  Sense strand starting at position 1329 of SEQ ID NO: 1880642
auaugauucuggguuaucu

SEQ ID NO: 1982659 - RNA, 19 nt, Artificial Sequence
  Description of Artificial Sequence: Synthetic oligonucleotide
  Antisense strand to SEQ ID NO: 1982658
agauaacccagaaucauau

SEQ ID NO: 1982660 - RNA, 19 nt, Artificial Sequence
  Description of Artificial Sequence: Synthetic oligonucleotide
  Sense strand starting at position 1333 of SEQ ID NO: 1880642
gauucuggguuaucuggaa

SEQ ID NO: 1982661 - RNA, 19 nt, Artificial Sequence
  Description of Artificial Sequence: Synthetic oligonucleotide
  Antisense strand to SEQ ID NO: 1982660
uuccagauaacccagaauc

SEQ ID NO: 1982662 - RNA, 19 nt, Artificial Sequence
  Description of Artificial Sequence: Synthetic oligonucleotide
  Sense strand starting at position 1337 of SEQ ID NO: 1880642
cuggguuaucuggaaagcu

SEQ ID NO: 1982663 - RNA, 19 nt, Artificial Sequence
  Description of Artificial Sequence: Synthetic oligonucleotide
  Antisense strand to SEQ ID NO: 1982662
agcuuuccagauaacccag

SEQ ID NO: 1982664 - RNA, 19 nt, Artificial Sequence
  Description of Artificial Sequence: Synthetic oligonucleotide
  Sense strand starting at position 1391 of SEQ ID NO: 1880642
guuaucaaaugguugcaaa

SEQ ID NO: 1982665 - RNA, 19 nt, Artificial Sequence
  Description of Artificial Sequence: Synthetic oligonucleotide
  Antisense strand to SEQ ID NO: 1982664
uuugcaaccauuugauaac

SEQ ID NO: 1982666 - RNA, 19 nt, Artificial Sequence
  Description of Artificial Sequence: Synthetic oligonucleotide
  Sense strand starting at position 1458 of SEQ ID NO: 1880642
acaacaucaucguuuggaa

SEQ ID NO: 1982667 - RNA, 19 nt, Artificial Sequence
  Description of Artificial Sequence: Synthetic oligonucleotide
  Antisense strand to SEQ ID NO: 1982666
uuccaaacgaugauguugu

SEQ ID NO: 1982668 - RNA, 19 nt, Artificial Sequence
  Description of Artificial Sequence: Synthetic oligonucleotide
  Sense strand starting at position 1487 of SEQ ID NO: 1880642
aauuauaucguugguaaga

SEQ ID NO: 1982669 - RNA, 19 nt, Artificial Sequence
  Description of Artificial Sequence: Synthetic oligonucleotide
  Antisense strand to SEQ ID NO: 1982668
ucuuaccaacgauauaauu

SEQ ID NO: 1982670 - RNA, 19 nt, Artificial Sequence
  Description of Artificial Sequence: Synthetic oligonucleotide
  Sense strand starting at position 1488 of SEQ ID NO: 1880642
auuauaucguugguaagaa

SEQ ID NO: 1982671 - RNA, 19 nt, Artificial Sequence
  Description of Artificial Sequence: Synthetic oligonucleotide
  Antisense strand to SEQ ID NO: 1982670
uucuuaccaacgauauaau

SEQ ID NO: 1982672 - RNA, 19 nt, Artificial Sequence
  Description of Artificial Sequence: Synthetic oligonucleotide
  Sense strand starting at position 1546 of SEQ ID NO: 1880642
guccguuugaugucaugcu

SEQ ID NO: 1982673 - RNA, 19 nt, Artificial Sequence
  Description of Artificial Sequence: Synthetic oligonucleotide
  Antisense strand to SEQ ID NO: 1982672
agcaugacaucaaacggac

SEQ ID NO: 1982674 - RNA, 19 nt, Artificial Sequence
  Description of Artificial Sequence: Synthetic oligonucleotide
  Sense strand starting at position 1632 of SEQ ID NO: 1880642
ugaguuugguaugcuuaaa

SEQ ID NO: 1982675 - RNA, 19 nt, Artificial Sequence
  Description of Artificial Sequence: Synthetic oligonucleotide
  Antisense strand to SEQ ID NO: 1982674
uuuaagcauaccaaacuca

SEQ ID NO: 1982676 - RNA, 19 nt, Artificial Sequence
  Description of Artificial Sequence: Synthetic oligonucleotide
  Sense strand starting at position 1798 of SEQ ID NO: 1880642
cugaguaugaugcaugauu

SEQ ID NO: 1982677 - RNA, 19 nt, Artificial Sequence
  Description of Artificial Sequence: Synthetic oligonucleotide
  Antisense strand to SEQ ID NO: 1982676
aaucaugcaucauacucag

SEQ ID NO: 1982678 - RNA, 19 nt, Artificial Sequence
  Description of Artificial Sequence: Synthetic oligonucleotide
  Sense strand starting at position 2031 of SEQ ID NO: 1880642
aauguauauggugaagcua

SEQ ID NO: 1982679 - RNA, 19 nt, Artificial Sequence
  Description of Artificial Sequence: Synthetic oligonucleotide
  Antisense strand to SEQ ID NO: 1982678
uagcuucaccauauacauu

SEQ ID NO: 1982680 - RNA, 19 nt, Artificial Sequence
  Description of Artificial Sequence: Synthetic oligonucleotide
  Sense strand starting at position 2046 of SEQ ID NO: 1880642
gcuacaaacuugucaagag

SEQ ID NO: 1982681 - RNA, 19 nt, Artificial Sequence
  Description of Artificial Sequence: Synthetic oligonucleotide
  Antisense strand to SEQ ID NO: 1982680
cucuugacaaguuuguagc

SEQ ID NO: 1982682 - RNA, 19 nt, Artificial Sequence
  Description of Artificial Sequence: Synthetic oligonucleotide
  Sense strand starting at position 2132 of SEQ ID NO: 1880642
uuacuaccugcagaaaguu

SEQ ID NO: 1982683 - RNA, 19 nt, Artificial Sequence
  Description of Artificial Sequence: Synthetic oligonucleotide
  Antisense strand to SEQ ID NO: 1982682
aacuuucugcagguaguaa

SEQ ID NO: 1982684 - RNA, 19 nt, Artificial Sequence
  Description of Artificial Sequence: Synthetic oligonucleotide
  Sense strand starting at position 2140 of SEQ ID NO: 1880642
ugcagaaaguuucuuuaua

SEQ ID NO: 1982685 - RNA, 19 nt, Artificial Sequence
  Description of Artificial Sequence: Synthetic oligonucleotide
  Antisense strand to SEQ ID NO: 1982684
uauaaagaaacuuucugca

SEQ ID NO: 1982686 - RNA, 19 nt, Artificial Sequence
  Description of Artificial Sequence: Synthetic oligonucleotide
  Sense strand starting at position 2141 of SEQ ID NO: 1880642
gcagaaaguuucuuuauac

SEQ ID NO: 1982687 - RNA, 19 nt, Artificial Sequence
  Description of Artificial Sequence: Synthetic oligonucleotide
  Antisense strand to SEQ ID NO: 1982686
guauaaagaaacuuucugc

SEQ ID NO: 1982688 - RNA, 19 nt, Artificial Sequence
  Description of Artificial Sequence: Synthetic oligonucleotide
  Sense strand starting at position 2243 of SEQ ID NO: 1880642
auuagugaaacugguaagu

SEQ ID NO: 1982689 - RNA, 19 nt, Artificial Sequence
  Description of Artificial Sequence: Synthetic oligonucleotide
  Antisense strand to SEQ ID NO: 1982688
acuuaccaguuucacuaau

SEQ ID NO: 1982690 - RNA, 19 nt, Artificial Sequence
  Description of Artificial Sequence: Synthetic oligonucleotide
  Sense strand starting at position 2310 of SEQ ID NO: 1880642
guugguugccaagcuguua

SEQ ID NO: 1982691 - RNA, 19 nt, Artificial Sequence
  Description of Artificial Sequence: Synthetic oligonucleotide
  Antisense strand to SEQ ID NO: 1982690
uaacagcuuggcaaccaac

SEQ ID NO: 1982692 - RNA, 19 nt, Artificial Sequence
  Description of Artificial Sequence: Synthetic oligonucleotide
  Sense strand starting at position 2452 of SEQ ID NO: 1880642
ugcaaaugaguccaacuga

SEQ ID NO: 1982693 - RNA, 19 nt, Artificial Sequence
  Description of Artificial Sequence: Synthetic oligonucleotide
  Antisense strand to SEQ ID NO: 1982692
ucaguuggacucauuugca

SEQ ID NO: 1982694 - RNA, 19 nt, Artificial Sequence
  Description of Artificial Sequence: Synthetic oligonucleotide
  Sense strand starting at position 2476 of SEQ ID NO: 1880642
aguggcuuuaagugauaug

SEQ ID NO: 1982695 - RNA, 19 nt, Artificial Sequence
  Description of Artificial Sequence: Synthetic oligonucleotide
  Antisense strand to SEQ ID NO: 1982694
cauaucacuuaaagccacu

SEQ ID NO: 1982696 - RNA, 19 nt, Artificial Sequence
  Description of Artificial Sequence: Synthetic oligonucleotide
  Sense strand starting at position 2551 of SEQ ID NO: 1880642
guucuuucccauuauacag

SEQ ID NO: 1982697 - RNA, 19 nt, Artificial Sequence
  Description of Artificial Sequence: Synthetic oligonucleotide
  Antisense strand to SEQ ID NO: 1982696
cuguauaaugggaaagaac

SEQ ID NO: 1982698 - RNA, 19 nt, Artificial Sequence
  Description of Artificial Sequence: Synthetic oligonucleotide
  Sense strand starting at position 2709 of SEQ ID NO: 1880642
caguaauguuaguccugau

SEQ ID NO: 1982699 - RNA, 19 nt, Artificial Sequence
  Description of Artificial Sequence: Synthetic oligonucleotide
  Antisense strand to SEQ ID NO: 1982698
aucaggacuaacauuacug

SEQ ID NO: 1982700 - RNA, 19 nt, Artificial Sequence
  Description of Artificial Sequence: Synthetic oligonucleotide
  Sense strand starting at position 2944 of SEQ ID NO: 1880642
uuacuugugccacagugaa

SEQ ID NO: 1982701 - RNA, 19 nt, Artificial Sequence
  Description of Artificial Sequence: Synthetic oligonucleotide
  Antisense strand to SEQ ID NO: 1982700
uucacuguggcacaaguaa

SEQ ID NO: 1982702 - RNA, 19 nt, Artificial Sequence
  Description of Artificial Sequence: Synthetic oligonucleotide
  Sense strand starting at position 3187 of SEQ ID NO: 1880642
ccagaaguauguuuccaua

SEQ ID NO: 1982703 - RNA, 19 nt, Artificial Sequence
  Description of Artificial Sequence: Synthetic oligonucleotide
  Antisense strand to SEQ ID NO: 1982702
uauggaaacauacuucugg

SEQ ID NO: 1982704 - RNA, 19 nt, Artificial Sequence
  Description of Artificial Sequence: Synthetic oligonucleotide
  Sense strand starting at position 3189 of SEQ ID NO: 1880642
agaaguauguuuccauaua

SEQ ID NO: 1982705 - RNA, 19 nt, Artificial Sequence
  Description of Artificial Sequence: Synthetic oligonucleotide
  Antisense strand to SEQ ID NO: 1982704
uauauggaaacauacuucu

SEQ ID NO: 1982706 - RNA, 19 nt, Artificial Sequence
  Description of Artificial Sequence: Synthetic oligonucleotide
  Sense strand starting at position 3220 of SEQ ID NO: 1880642
augagacaguaauugcuau

SEQ ID NO: 1982707 - RNA, 19 nt, Artificial Sequence
  Description of Artificial Sequence: Synthetic oligonucleotide
  Antisense strand to SEQ ID NO: 1982706
auagcaauuacugucucau

SEQ ID NO: 1982708 - RNA, 19 nt, Artificial Sequence
  Description of Artificial Sequence: Synthetic oligonucleotide
  Sense strand starting at position 3869 of SEQ ID NO: 1880642
auaagaaugcuuugaggau

SEQ ID NO: 1982709 - RNA, 19 nt, Artificial Sequence
  Description of Artificial Sequence: Synthetic oligonucleotide
  Antisense strand to SEQ ID NO: 1982708
auccucaaagcauucuuau

SEQ ID NO: 1982710 - RNA, 19 nt, Artificial Sequence
  Description of Artificial Sequence: Synthetic oligonucleotide
  Sense strand starting at position 188 of SEQ ID NO: 1880643
aaaggaaacccguagcaau

SEQ ID NO: 1982711 - RNA, 19 nt, Artificial Sequence
  Description of Artificial Sequence: Synthetic oligonucleotide
  Antisense strand to SEQ ID NO: 1982710
auugcuacggguuuccuuu

SEQ ID NO: 1982712 - RNA, 19 nt, Artificial Sequence
  Description of Artificial Sequence: Synthetic oligonucleotide
  Sense strand starting at position 313 of SEQ ID NO: 1880643
auauaugguuucuuguaac

SEQ ID NO: 1982713 - RNA, 19 nt, Artificial Sequence
  Description of Artificial Sequence: Synthetic oligonucleotide
  Antisense strand to SEQ ID NO: 1982712
guuacaagaaaccauauau

SEQ ID NO: 1982714 - RNA, 19 nt, Artificial Sequence
  Description of Artificial Sequence: Synthetic oligonucleotide
  Sense strand starting at position 316 of SEQ ID NO: 1880643
uaugguuucuuguaacuga

SEQ ID NO: 1982715 - RNA, 19 nt, Artificial Sequence
  Description of Artificial Sequence: Synthetic oligonucleotide
  Antisense strand to SEQ ID NO: 1982714
ucaguuacaagaaaccaua

SEQ ID NO: 1982716 - RNA, 19 nt, Artificial Sequence
  Description of Artificial Sequence: Synthetic oligonucleotide
  Sense strand starting at position 319 of SEQ ID NO: 1880643
gguuucuuguaacugacuu

SEQ ID NO: 1982717 - RNA, 19 nt, Artificial Sequence
  Description of Artificial Sequence: Synthetic oligonucleotide
  Antisense strand to SEQ ID NO: 1982716
aagucaguuacaagaaacc

SEQ ID NO: 1982718 - RNA, 19 nt, Artificial Sequence
  Description of Artificial Sequence: Synthetic oligonucleotide
  Sense strand starting at position 361 of SEQ ID NO: 1880643
cagggucaucuauguugua

SEQ ID NO: 1982719 - RNA, 19 nt, Artificial Sequence
  Description of Artificial Sequence: Synthetic oligonucleotide
  Antisense strand to SEQ ID NO: 1982718
uacaacauagaugacccug

SEQ ID NO: 1982720 - RNA, 19 nt, Artificial Sequence
  Description of Artificial Sequence: Synthetic oligonucleotide
  Sense strand starting at position 373 of SEQ ID NO: 1880643
uguuguaacguguaucggu

SEQ ID NO: 1982721 - RNA, 19 nt, Artificial Sequence
  Description of Artificial Sequence: Synthetic oligonucleotide
  Antisense strand to SEQ ID NO: 1982720
accgauacacguuacaaca

SEQ ID NO: 1982722 - RNA, 19 nt, Artificial Sequence
  Description of Artificial Sequence: Synthetic oligonucleotide
  Sense strand starting at position 374 of SEQ ID NO: 1880643
guuguaacguguaucggua

SEQ ID NO: 1982723 - RNA, 19 nt, Artificial Sequence
  Description of Artificial Sequence: Synthetic oligonucleotide
  Antisense strand to SEQ ID NO: 1982722
uaccgauacacguuacaac

SEQ ID NO: 1982724 - RNA, 19 nt, Artificial Sequence
  Description of Artificial Sequence: Synthetic oligonucleotide
  Sense strand starting at position 381 of SEQ ID NO: 1880643
cguguaucgguacuucauu

SEQ ID NO: 1982725 - RNA, 19 nt, Artificial Sequence
  Description of Artificial Sequence: Synthetic oligonucleotide
  Antisense strand to SEQ ID NO: 1982724
aaugaaguaccgauacacg

SEQ ID NO: 1982726 - RNA, 19 nt, Artificial Sequence
  Description of Artificial Sequence: Synthetic oligonucleotide
  Sense strand starting at position 423 of SEQ ID NO: 1880643
ccauuauauggauauugca

SEQ ID NO: 1982727 - RNA, 19 nt, Artificial Sequence
  Description of Artificial Sequence: Synthetic oligonucleotide
  Antisense strand to SEQ ID NO: 1982726
ugcaauauccauauaaugg

SEQ ID NO: 1982728 - RNA, 19 nt, Artificial Sequence
  Description of Artificial Sequence: Synthetic oligonucleotide
  Sense strand starting at position 426 of SEQ ID NO: 1880643
uuauauggauauugcacaa

SEQ ID NO: 1982729 - RNA, 19 nt, Artificial Sequence
  Description of Artificial Sequence: Synthetic oligonucleotide
  Antisense strand to SEQ ID NO: 1982728
uugugcaauauccauauaa

SEQ ID NO: 1982730 - RNA, 19 nt, Artificial Sequence
  Description of Artificial Sequence: Synthetic oligonucleotide
  Sense strand starting at position 479 of SEQ ID NO: 1880643
guacaacgugcuuaguguu

SEQ ID NO: 1982731 - RNA, 19 nt, Artificial Sequence
  Description of Artificial Sequence: Synthetic oligonucleotide
  Antisense strand to SEQ ID NO: 1982730
aacacuaagcacguuguac

SEQ ID NO: 1982732 - RNA, 19 nt, Artificial Sequence
  Description of Artificial Sequence: Synthetic oligonucleotide
  Sense strand starting at position 485 of SEQ ID NO: 1880643
cgugcuuaguguuacaaau

SEQ ID NO: 1982733 - RNA, 19 nt, Artificial Sequence
  Description of Artificial Sequence: Synthetic oligonucleotide
  Antisense strand to SEQ ID NO: 1982732
auuuguaacacuaagcacg

SEQ ID NO: 1982734 - RNA, 19 nt, Artificial Sequence
  Description of Artificial Sequence: Synthetic oligonucleotide
  Sense strand starting at position 487 of SEQ ID NO: 1880643
ugcuuaguguuacaaauga

SEQ ID NO: 1982735 - RNA, 19 nt, Artificial Sequence
  Description of Artificial Sequence: Synthetic oligonucleotide
  Antisense strand to SEQ ID NO: 1982734
ucauuuguaacacuaagca

SEQ ID NO: 1982736 - RNA, 19 nt, Artificial Sequence
  Description of Artificial Sequence: Synthetic oligonucleotide
  Sense strand starting at position 694 of SEQ ID NO: 1880643
gacagugucuuggcucacu

SEQ ID NO: 1982737 - RNA, 19 nt, Artificial Sequence
  Description of Artificial Sequence: Synthetic oligonucleotide
  Antisense strand to SEQ ID NO: 1982736
agugagccaagacacuguc

SEQ ID NO: 1982738 - RNA, 19 nt, Artificial Sequence
  Description of Artificial Sequence: Synthetic oligonucleotide
  Sense strand starting at position 699 of SEQ ID NO: 1880643
ugucuuggcucacugugaa

SEQ ID NO: 1982739 - RNA, 19 nt, Artificial Sequence
  Description of Artificial Sequence: Synthetic oligonucleotide
  Antisense strand to SEQ ID NO: 1982738
uucacagugagccaagaca

SEQ ID NO: 1982740 - RNA, 19 nt, Artificial Sequence
  Description of Artificial Sequence: Synthetic oligonucleotide
  Sense strand starting at position 1242 of SEQ ID NO: 1880643
ccgccuaguagcugagauu

SEQ ID NO: 1982741 - RNA, 19 nt, Artificial Sequence
  Description of Artificial Sequence: Synthetic oligonucleotide
  Antisense strand to SEQ ID NO: 1982740
aaucucagcuacuaggcgg

SEQ ID NO: 1982742 - RNA, 19 nt, Artificial Sequence
  Description of Artificial Sequence: Synthetic oligonucleotide
  Sense strand starting at position 1243 of SEQ ID NO: 1880643
cgccuaguagcugagauua

SEQ ID NO: 1982743 - RNA, 19 nt, Artificial Sequence
  Description of Artificial Sequence: Synthetic oligonucleotide
  Antisense strand to SEQ ID NO: 1982742
uaaucucagcuacuaggcg

SEQ ID NO: 1982744 - RNA, 19 nt, Artificial Sequence
  Description of Artificial Sequence: Synthetic oligonucleotide
  Sense strand starting at position 1327 of SEQ ID NO: 1880643
uggacugucuggucucaaa

SEQ ID NO: 1982745 - RNA, 19 nt, Artificial Sequence
  Description of Artificial Sequence: Synthetic oligonucleotide
  Antisense strand to SEQ ID NO: 1982744
uuugagaccagacagucca

SEQ ID NO: 1982746 - RNA, 19 nt, Artificial Sequence
  Description of Artificial Sequence: Synthetic oligonucleotide
  Sense strand starting at position 1525 of SEQ ID NO: 1880643
agguguuccugcuaccuua

SEQ ID NO: 1982747 - RNA, 19 nt, Artificial Sequence
  Description of Artificial Sequence: Synthetic oligonucleotide
  Antisense strand to SEQ ID NO: 1982746
uaagguagcaggaacaccu

SEQ ID NO: 1982748 - RNA, 19 nt, Artificial Sequence
  Description of Artificial Sequence: Synthetic oligonucleotide
  Sense strand starting at position 1945 of SEQ ID NO: 1880643
ccagauuggucucaaauug

SEQ ID NO: 1982749 - RNA, 19 nt, Artificial Sequence
  Description of Artificial Sequence: Synthetic oligonucleotide
  Antisense strand to SEQ ID NO: 1982748
caauuugagaccaaucugg

SEQ ID NO: 1982750 - RNA, 19 nt, Artificial Sequence
  Description of Artificial Sequence: Synthetic oligonucleotide
  Sense strand starting at position 2029 of SEQ ID NO: 1880643
cgcccaguccuggccuaau

SEQ ID NO: 1982751 - RNA, 19 nt, Artificial Sequence
  Description of Artificial Sequence: Synthetic oligonucleotide
  Antisense strand to SEQ ID NO: 1982750
auuaggccaggacugggcg

SEQ ID NO: 1982752 - RNA, 19 nt, Artificial Sequence
  Description of Artificial Sequence: Synthetic oligonucleotide
  Sense strand starting at position 2032 of SEQ ID NO: 1880643
ccaguccuggccuaauagu

SEQ ID NO: 1982753 - RNA, 19 nt, Artificial Sequence
  Description of Artificial Sequence: Synthetic oligonucleotide
  Antisense strand to SEQ ID NO: 1982752
acuauuaggccaggacugg

SEQ ID NO: 1982754 - RNA, 19 nt, Artificial Sequence
  Description of Artificial Sequence: Synthetic oligonucleotide
  Sense strand starting at position 2095 of SEQ ID NO: 1880643
uguauugaaugguaaauug

SEQ ID NO: 1982755 - RNA, 19 nt, Artificial Sequence
  Description of Artificial Sequence: Synthetic oligonucleotide
  Antisense strand to SEQ ID NO: 1982754
caauuuaccauucaauaca

SEQ ID NO: 1982756 - RNA, 19 nt, Artificial Sequence
  Description of Artificial Sequence: Synthetic oligonucleotide
  Sense strand starting at position 2128 of SEQ ID NO: 1880643
acuggcauugauggauauu

SEQ ID NO: 1982757 - RNA, 19 nt, Artificial Sequence
  Description of Artificial Sequence: Synthetic oligonucleotide
  Antisense strand to SEQ ID NO: 1982756
aauauccaucaaugccagu

SEQ ID NO: 1982758 - RNA, 19 nt, Artificial Sequence
  Description of Artificial Sequence: Synthetic oligonucleotide
  Sense strand starting at position 2191 of SEQ ID NO: 1880643
gcaguuguauccugguaca

SEQ ID NO: 1982759 - RNA, 19 nt, Artificial Sequence
  Description of Artificial Sequence: Synthetic oligonucleotide
  Antisense strand to SEQ ID NO: 1982758
uguaccaggauacaacugc

SEQ ID NO: 1982760 - RNA, 19 nt, Artificial Sequence
  Description of Artificial Sequence: Synthetic oligonucleotide
  Sense strand starting at position 2194 of SEQ ID NO: 1880643
guuguauccugguacaugu

SEQ ID NO: 1982761 - RNA, 19 nt, Artificial Sequence
  Description of Artificial Sequence: Synthetic oligonucleotide
  Antisense strand to SEQ ID NO: 1982760
acauguaccaggauacaac

SEQ ID NO: 1982762 - RNA, 19 nt, Artificial Sequence
  Description of Artificial Sequence: Synthetic oligonucleotide
  Sense strand starting at position 2619 of SEQ ID NO: 1880643
guuuguuuguuugggugaa

SEQ ID NO: 1982763 - RNA, 19 nt, Artificial Sequence
  Description of Artificial Sequence: Synthetic oligonucleotide
  Antisense strand to SEQ ID NO: 1982762
uucacccaaacaaacaaac

SEQ ID NO: 1982764 - RNA, 19 nt, Artificial Sequence
  Description of Artificial Sequence: Synthetic oligonucleotide
  Sense strand starting at position 2621 of SEQ ID NO: 1880643
uuguuuguuugggugaagu

SEQ ID NO: 1982765 - RNA, 19 nt, Artificial Sequence
  Description of Artificial Sequence: Synthetic oligonucleotide
  Antisense strand to SEQ ID NO: 1982764
acuucacccaaacaaacaa

SEQ ID NO: 1982766 - RNA, 19 nt, Artificial Sequence
  Description of Artificial Sequence: Synthetic oligonucleotide
  Sense strand starting at position 2623 of SEQ ID NO: 1880643
guuuguuugggugaaguau

SEQ ID NO: 1982767 - RNA, 19 nt, Artificial Sequence
  Description of Artificial Sequence: Synthetic oligonucleotide
  Antisense strand to SEQ ID NO: 1982766
auacuucacccaaacaaac

SEQ ID NO: 1982768 - RNA, 19 nt, Artificial Sequence
  Description of Artificial Sequence: Synthetic oligonucleotide
  Sense strand starting at position 2632 of SEQ ID NO: 1880643
ggugaaguauuguaauuac

SEQ ID NO: 1982769 - RNA, 19 nt, Artificial Sequence
  Description of Artificial Sequence: Synthetic oligonucleotide
  Antisense strand to SEQ ID NO: 1982768
guaauuacaauacuucacc

SEQ ID NO: 1982770 - RNA, 19 nt, Artificial Sequence
  Description of Artificial Sequence: Synthetic oligonucleotide
  Sense strand starting at position 2635 of SEQ ID NO: 1880643
gaaguauuguaauuacaga

SEQ ID NO: 1982771 - RNA, 19 nt, Artificial Sequence
  Description of Artificial Sequence: Synthetic oligonucleotide
  Antisense strand to SEQ ID NO: 1982770
ucuguaauuacaauacuuc

SEQ ID NO: 1982772 - RNA, 19 nt, Artificial Sequence
  Description of Artificial Sequence: Synthetic oligonucleotide
  Sense strand starting at position 2783 of SEQ ID NO: 1880643
uugauaugguaacgugauc

SEQ ID NO: 1982773 - RNA, 19 nt, Artificial Sequence
  Description of Artificial Sequence: Synthetic oligonucleotide
  Antisense strand to SEQ ID NO: 1982772
gaucacguuaccauaucaa

SEQ ID NO: 1982774 - RNA, 19 nt, Artificial Sequence
  Description of Artificial Sequence: Synthetic oligonucleotide
  Sense strand starting at position 2954 of SEQ ID NO: 1880643
uuuguuucuugggcaggaa

SEQ ID NO: 1982775 - RNA, 19 nt, Artificial Sequence
  Description of Artificial Sequence: Synthetic oligonucleotide
  Antisense strand to SEQ ID NO: 1982774
uuccugcccaagaaacaaa

SEQ ID NO: 1982776 - RNA, 19 nt, Artificial Sequence
  Description of Artificial Sequence: Synthetic oligonucleotide
  Sense strand starting at position 2955 of SEQ ID NO: 1880643
uuguuucuugggcaggaau

SEQ ID NO: 1982777 - RNA, 19 nt, Artificial Sequence
  Description of Artificial Sequence: Synthetic oligonucleotide
  Antisense strand to SEQ ID NO: 1982776
auuccugcccaagaaacaa

SEQ ID NO: 1982778 - RNA, 19 nt, Artificial Sequence
  Description of Artificial Sequence: Synthetic oligonucleotide
  Sense strand starting at position 2957 of SEQ ID NO: 1880643
guuucuugggcaggaauca

SEQ ID NO: 1982779 - RNA, 19 nt, Artificial Sequence
  Description of Artificial Sequence: Synthetic oligonucleotide
  Antisense strand to SEQ ID NO: 1982778
ugauuccugcccaagaaac

SEQ ID NO: 1982780 - RNA, 19 nt, Artificial Sequence
  Description of Artificial Sequence: Synthetic oligonucleotide
  Sense strand starting at position 3104 of SEQ ID NO: 1880643
ugauaauacuaggacauua

SEQ ID NO: 1982781 - RNA, 19 nt, Artificial Sequence
  Description of Artificial Sequence: Synthetic oligonucleotide
  Antisense strand to SEQ ID NO: 1982780
uaauguccuaguauuauca

SEQ ID NO: 1982782 - RNA, 19 nt, Artificial Sequence
  Description of Artificial Sequence: Synthetic oligonucleotide
  Sense strand starting at position 3112 of SEQ ID NO: 1880643
cuaggacauuaguuauaga

SEQ ID NO: 1982783 - RNA, 19 nt, Artificial Sequence
  Description of Artificial Sequence: Synthetic oligonucleotide
  Antisense strand to SEQ ID NO: 1982782
ucuauaacuaauguccuag

SEQ ID NO: 1982784 - RNA, 19 nt, Artificial Sequence
  Description of Artificial Sequence: Synthetic oligonucleotide
  Sense strand starting at position 3243 of SEQ ID NO: 1880643
gucucagcguuccugagua

SEQ ID NO: 1982785 - RNA, 19 nt, Artificial Sequence
  Description of Artificial Sequence: Synthetic oligonucleotide
  Antisense strand to SEQ ID NO: 1982784
uacucaggaacgcugagac

SEQ ID NO: 1982786 - RNA, 19 nt, Artificial Sequence
  Description of Artificial Sequence: Synthetic oligonucleotide
  Sense strand starting at position 3753 of SEQ ID NO: 1880643
ugcauaauguucuauugua

SEQ ID NO: 1982787 - RNA, 19 nt, Artificial Sequence
  Description of Artificial Sequence: Synthetic oligonucleotide
  Antisense strand to SEQ ID NO: 1982786
uacaauagaacauuaugca

SEQ ID NO: 1982788 - RNA, 19 nt, Artificial Sequence
  Description of Artificial Sequence: Synthetic oligonucleotide
  Sense strand starting at position 3758 of SEQ ID NO: 1880643
aauguucuauuguauggua

SEQ ID NO: 1982789 - RNA, 19 nt, Artificial Sequence
  Description of Artificial Sequence: Synthetic oligonucleotide
  Antisense strand to SEQ ID NO: 1982788
uaccauacaauagaacauu

SEQ ID NO: 1982790 - RNA, 19 nt, Artificial Sequence
  Description of Artificial Sequence: Synthetic oligonucleotide
  Sense strand starting at position 185 of SEQ ID NO: 1880644
agcggugugcuuccagcaa

SEQ ID NO: 1982791 - RNA, 19 nt, Artificial Sequence
  Description of Artificial Sequence: Synthetic oligonucleotide
  Antisense strand to SEQ ID NO: 1982790
uugcuggaagcacaccgcu

SEQ ID NO: 1982792 - RNA, 19 nt, Artificial Sequence
  Description of Artificial Sequence: Synthetic oligonucleotide
  Sense strand starting at position 254 of SEQ ID NO: 1880644
guaaauuccagagggugga

SEQ ID NO: 1982793 - RNA, 19 nt, Artificial Sequence
  Description of Artificial Sequence: Synthetic oligonucleotide
  Antisense strand to SEQ ID NO: 1982792
uccacccucuggaauuuac

SEQ ID NO: 1982794 - RNA, 19 nt, Artificial Sequence
  Description of Artificial Sequence: Synthetic oligonucleotide
  Sense strand starting at position 505 of SEQ ID NO: 1880644
auaauucguuaugugaaac

SEQ ID NO: 1982795 - RNA, 19 nt, Artificial Sequence
  Description of Artificial Sequence: Synthetic oligonucleotide
  Antisense strand to SEQ ID NO: 1982794
guuucacauaacgaauuau

SEQ ID NO: 1982796 - RNA, 19 nt, Artificial Sequence
  Description of Artificial Sequence: Synthetic oligonucleotide
  Sense strand starting at position 515 of SEQ ID NO: 1880644
augugaaacuuuccuuguu

SEQ ID NO: 1982797 - RNA, 19 nt, Artificial Sequence
  Description of Artificial Sequence: Synthetic oligonucleotide
  Antisense strand to SEQ ID NO: 1982796
aacaaggaaaguuucacau

SEQ ID NO: 1982798 - RNA, 19 nt, Artificial Sequence
  Description of Artificial Sequence: Synthetic oligonucleotide
  Sense strand starting at position 686 of SEQ ID NO: 1880644
gccauuucuugagugccau

SEQ ID NO: 1982799 - RNA, 19 nt, Artificial Sequence
  Description of Artificial Sequence: Synthetic oligonucleotide
  Antisense strand to SEQ ID NO: 1982798
auggcacucaagaaauggc

SEQ ID NO: 1982800 - RNA, 19 nt, Artificial Sequence
  Description of Artificial Sequence: Synthetic oligonucleotide
  Sense strand starting at position 687 of SEQ ID NO: 1880644
ccauuucuugagugccauu

SEQ ID NO: 1982801 - RNA, 19 nt, Artificial Sequence
  Description of Artificial Sequence: Synthetic oligonucleotide
  Antisense strand to SEQ ID NO: 1982800
aauggcacucaagaaaugg

SEQ ID NO: 1982802 - RNA, 19 nt, Artificial Sequence
  Description of Artificial Sequence: Synthetic oligonucleotide
  Sense strand starting at position 770 of SEQ ID NO: 1880644
guguguucucucccagcca

SEQ ID NO: 1982803 - RNA, 19 nt, Artificial Sequence
  Description of Artificial Sequence: Synthetic oligonucleotide
  Antisense strand to SEQ ID NO: 1982802
uggcugggagagaacacac

SEQ ID NO: 1982804 - RNA, 19 nt, Artificial Sequence
  Description of Artificial Sequence: Synthetic oligonucleotide
  Sense strand starting at position 946 of SEQ ID NO: 1880644
gacaccugggcauaaguua

SEQ ID NO: 1982805 - RNA, 19 nt, Artificial Sequence
  Description of Artificial Sequence: Synthetic oligonucleotide
  Antisense strand to SEQ ID NO: 1982804
uaacuuaugcccagguguc

SEQ ID NO: 1982806 - RNA, 19 nt, Artificial Sequence
  Description of Artificial Sequence: Synthetic oligonucleotide
  Sense strand starting at position 1093 of SEQ ID NO: 1880644
ucccucuauguggaaguaa

SEQ ID NO: 1982807 - RNA, 19 nt, Artificial Sequence
  Description of Artificial Sequence: Synthetic oligonucleotide
  Antisense strand to SEQ ID NO: 1982806
uuacuuccacauagaggga

SEQ ID NO: 1982808 - RNA, 19 nt, Artificial Sequence
  Description of Artificial Sequence: Synthetic oligonucleotide
  Sense strand starting at position 1137 of SEQ ID NO: 1880644
gucccaaacccuggagaaa

SEQ ID NO: 1982809 - RNA, 19 nt, Artificial Sequence
  Description of Artificial Sequence: Synthetic oligonucleotide
  Antisense strand to SEQ ID NO: 1982808
uuucuccaggguuugggac

SEQ ID NO: 1982810 - RNA, 19 nt, Artificial Sequence
  Description of Artificial Sequence: Synthetic oligonucleotide
  Sense strand starting at position 1264 of SEQ ID NO: 1880644
ggcacaauaaccugguaga

SEQ ID NO: 1982811 - RNA, 19 nt, Artificial Sequence
  Description of Artificial Sequence: Synthetic oligonucleotide
  Antisense strand to SEQ ID NO: 1982810
ucuaccagguuauugugcc

SEQ ID NO: 1982812 - RNA, 19 nt, Artificial Sequence
  Description of Artificial Sequence: Synthetic oligonucleotide
  Sense strand starting at position 1265 of SEQ ID NO: 1880644
gcacaauaaccugguagau

SEQ ID NO: 1982813 - RNA, 19 nt, Artificial Sequence
  Description of Artificial Sequence: Synthetic oligonucleotide
  Antisense strand to SEQ ID NO: 1982812
aucuaccagguuauugugc

SEQ ID NO: 1982814 - RNA, 19 nt, Artificial Sequence
  Description of Artificial Sequence: Synthetic oligonucleotide
  Sense strand starting at position 1405 of SEQ ID NO: 1880644
guugauugugaauguacua

SEQ ID NO: 1982815 - RNA, 19 nt, Artificial Sequence
  Description of Artificial Sequence: Synthetic oligonucleotide
  Antisense strand to SEQ ID NO: 1982814
uaguacauucacaaucaac

SEQ ID NO: 1982816 - RNA, 19 nt, Artificial Sequence
  Description of Artificial Sequence: Synthetic oligonucleotide
  Sense strand starting at position 1439 of SEQ ID NO: 1880644
acacuuauaugggugaacu

SEQ ID NO: 1982817 - RNA, 19 nt, Artificial Sequence
  Description of Artificial Sequence: Synthetic oligonucleotide
  Antisense strand to SEQ ID NO: 1982816
aguucacccauauaagugu

SEQ ID NO: 1982818 - RNA, 19 nt, Artificial Sequence
  Description of Artificial Sequence: Synthetic oligonucleotide
  Sense strand starting at position 1440 of SEQ ID NO: 1880644
cacuuauaugggugaacug

SEQ ID NO: 1982819 - RNA, 19 nt, Artificial Sequence
  Description of Artificial Sequence: Synthetic oligonucleotide
  Antisense strand to SEQ ID NO: 1982818
caguucacccauauaagug

SEQ ID NO: 1982820 - RNA, 19 nt, Artificial Sequence
  Description of Artificial Sequence: Synthetic oligonucleotide
  Sense strand starting at position 1449 of SEQ ID NO: 1880644
gggugaacuguauggaaug

SEQ ID NO: 1982821 - RNA, 19 nt, Artificial Sequence
  Description of Artificial Sequence: Synthetic oligonucleotide
  Antisense strand to SEQ ID NO: 1982820
cauuccauacaguucaccc

SEQ ID NO: 1982822 - RNA, 19 nt, Artificial Sequence
  Description of Artificial Sequence: Synthetic oligonucleotide
  Sense strand starting at position 1454 of SEQ ID NO: 1880644
aacuguauggaaugugaau

SEQ ID NO: 1982823 - RNA, 19 nt, Artificial Sequence
  Description of Artificial Sequence: Synthetic oligonucleotide
  Antisense strand to SEQ ID NO: 1982822
auucacauuccauacaguu

SEQ ID NO: 1982824 - RNA, 19 nt, Artificial Sequence
  Description of Artificial Sequence: Synthetic oligonucleotide
  Sense strand starting at position 1514 of SEQ ID NO: 1880644
aagauuugcacacguggua

SEQ ID NO: 1982825 - RNA, 19 nt, Artificial Sequence
  Description of Artificial Sequence: Synthetic oligonucleotide
  Antisense strand to SEQ ID NO: 1982824
uaccacgugugcaaaucuu

SEQ ID NO: 1982826 - RNA, 19 nt, Artificial Sequence
  Description of Artificial Sequence: Synthetic oligonucleotide
  Sense strand starting at position 1794 of SEQ ID NO: 1880644
guauauagaugugucugau

SEQ ID NO: 1982827 - RNA, 19 nt, Artificial Sequence
  Description of Artificial Sequence: Synthetic oligonucleotide
  Antisense strand to SEQ ID NO: 1982826
aucagacacaucuauauac

SEQ ID NO: 1982828 - RNA, 19 nt, Artificial Sequence
  Description of Artificial Sequence: Synthetic oligonucleotide
  Sense strand starting at position 1829 of SEQ ID NO: 1880644
gucagaguucaugcguugu

SEQ ID NO: 1982829 - RNA, 19 nt, Artificial Sequence
  Description of Artificial Sequence: Synthetic oligonucleotide
  Antisense strand to SEQ ID NO: 1982828
acaacgcaugaacucugac

SEQ ID NO: 1982830 - RNA, 19 nt, Artificial Sequence
  Description of Artificial Sequence: Synthetic oligonucleotide
  Sense strand starting at position 1834 of SEQ ID NO: 1880644
aguucaugcguuguaucuu

SEQ ID NO: 1982831 - RNA, 19 nt, Artificial Sequence
  Description of Artificial Sequence: Synthetic oligonucleotide
  Antisense strand to SEQ ID NO: 1982830
aagauacaacgcaugaacu

SEQ ID NO: 1982832 - RNA, 19 nt, Artificial Sequence
  Description of Artificial Sequence: Synthetic oligonucleotide
  Sense strand starting at position 2149 of SEQ ID NO: 1880644
cuaggcuaucagugaacca

SEQ ID NO: 1982833 - RNA, 19 nt, Artificial Sequence
  Description of Artificial Sequence: Synthetic oligonucleotide
  Antisense strand to SEQ ID NO: 1982832
ugguucacugauagccuag

SEQ ID NO: 1982834 - RNA, 19 nt, Artificial Sequence
  Description of Artificial Sequence: Synthetic oligonucleotide
  Sense strand starting at position 2537 of SEQ ID NO: 1880644
uggcucugucacugagaga

SEQ ID NO: 1982835 - RNA, 19 nt, Artificial Sequence
  Description of Artificial Sequence: Synthetic oligonucleotide
  Antisense strand to SEQ ID NO: 1982834
ucucucagugacagagcca

SEQ ID NO: 1982836 - RNA, 19 nt, Artificial Sequence
  Description of Artificial Sequence: Synthetic oligonucleotide
  Sense strand starting at position 2538 of SEQ ID NO: 1880644
ggcucugucacugagagau

SEQ ID NO: 1982837 - RNA, 19 nt, Artificial Sequence
  Description of Artificial Sequence: Synthetic oligonucleotide
  Antisense strand to SEQ ID NO: 1982836
aucucucagugacagagcc

SEQ ID NO: 1982838 - RNA, 19 nt, Artificial Sequence
  Description of Artificial Sequence: Synthetic oligonucleotide
  Sense strand starting at position 2630 of SEQ ID NO: 1880644
gagggaaucugagucaagu

SEQ ID NO: 1982839 - RNA, 19 nt, Artificial Sequence
  Description of Artificial Sequence: Synthetic oligonucleotide
  Antisense strand to SEQ ID NO: 1982838
acuugacucagauucccuc

SEQ ID NO: 1982840 - RNA, 19 nt, Artificial Sequence
  Description of Artificial Sequence: Synthetic oligonucleotide
  Sense strand starting at position 2632 of SEQ ID NO: 1880644
gggaaucugagucaagugu

SEQ ID NO: 1982841 - RNA, 19 nt, Artificial Sequence
  Description of Artificial Sequence: Synthetic oligonucleotide
  Antisense strand to SEQ ID NO: 1982840
acacuugacucagauuccc

SEQ ID NO: 1982842 - RNA, 19 nt, Artificial Sequence
  Description of Artificial Sequence: Synthetic oligonucleotide
  Sense strand starting at position 2639 of SEQ ID NO: 1880644
ugagucaaguguuuaacau

SEQ ID NO: 1982843 - RNA, 19 nt, Artificial Sequence
  Description of Artificial Sequence: Synthetic oligonucleotide
  Antisense strand to SEQ ID NO: 1982842
auguuaaacacuugacuca

SEQ ID NO: 1982844 - RNA, 19 nt, Artificial Sequence
  Description of Artificial Sequence: Synthetic oligonucleotide
  Sense strand starting at position 2640 of SEQ ID NO: 1880644
gagucaaguguuuaacaua

SEQ ID NO: 1982845 - RNA, 19 nt, Artificial Sequence
  Description of Artificial Sequence: Synthetic oligonucleotide
  Antisense strand to SEQ ID NO: 1982844
uauguuaaacacuugacuc

SEQ ID NO: 1982846 - RNA, 19 nt, Artificial Sequence
  Description of Artificial Sequence: Synthetic oligonucleotide
  Sense strand starting at position 2702 of SEQ ID NO: 1880644
auuauuaugugcuugauca

SEQ ID NO: 1982847 - RNA, 19 nt, Artificial Sequence
  Description of Artificial Sequence: Synthetic oligonucleotide
  Antisense strand to SEQ ID NO: 1982846
ugaucaagcacauaauaau

SEQ ID NO: 1982848 - RNA, 19 nt, Artificial Sequence
  Description of Artificial Sequence: Synthetic oligonucleotide
  Sense strand starting at position 2703 of SEQ ID NO: 1880644
uuauuaugugcuugaucag

SEQ ID NO: 1982849 - RNA, 19 nt, Artificial Sequence
  Description of Artificial Sequence: Synthetic oligonucleotide
  Antisense strand to SEQ ID NO: 1982848
cugaucaagcacauaauaa

SEQ ID NO: 1982850 - RNA, 19 nt, Artificial Sequence
  Description of Artificial Sequence: Synthetic oligonucleotide
  Sense strand starting at position 2704 of SEQ ID NO: 1880644
uauuaugugcuugaucaga

SEQ ID NO: 1982851 - RNA, 19 nt, Artificial Sequence
  Description of Artificial Sequence: Synthetic oligonucleotide
  Antisense strand to SEQ ID NO: 1982850
ucugaucaagcacauaaua

SEQ ID NO: 1982852 - RNA, 19 nt, Artificial Sequence
  Description of Artificial Sequence: Synthetic oligonucleotide
  Sense strand starting at position 2706 of SEQ ID NO: 1880644
uuaugugcuugaucagaaa

SEQ ID NO: 1982853 - RNA, 19 nt, Artificial Sequence
  Description of Artificial Sequence: Synthetic oligonucleotide
  Antisense strand to SEQ ID NO: 1982852
uuucugaucaagcacauaa

SEQ ID NO: 1982854 - RNA, 19 nt, Artificial Sequence
  Description of Artificial Sequence: Synthetic oligonucleotide
  Sense strand starting at position 2733 of SEQ ID NO: 1880644
agccauauguucuuaggaa

SEQ ID NO: 1982855 - RNA, 19 nt, Artificial Sequence
  Description of Artificial Sequence: Synthetic oligonucleotide
  Antisense strand to SEQ ID NO: 1982854
uuccuaagaacauauggcu

SEQ ID NO: 1982856 - RNA, 19 nt, Artificial Sequence
  Description of Artificial Sequence: Synthetic oligonucleotide
  Sense strand starting at position 2884 of SEQ ID NO: 1880644
gaauguauuuaccagagaa

SEQ ID NO: 1982857 - RNA, 19 nt, Artificial Sequence
  Description of Artificial Sequence: Synthetic oligonucleotide
  Antisense strand to SEQ ID NO: 1982856
uucucugguaaauacauuc

SEQ ID NO: 1982858 - RNA, 19 nt, Artificial Sequence
  Description of Artificial Sequence: Synthetic oligonucleotide
  Sense strand starting at position 3308 of SEQ ID NO: 1880644
cuuggaaaugccuguacua

SEQ ID NO: 1982859 - RNA, 19 nt, Artificial Sequence
  Description of Artificial Sequence: Synthetic oligonucleotide
  Antisense strand to SEQ ID NO: 1982858
uaguacaggcauuuccaag

SEQ ID NO: 1982860 - RNA, 19 nt, Artificial Sequence
  Description of Artificial Sequence: Synthetic oligonucleotide
  Sense strand starting at position 3310 of SEQ ID NO: 1880644
uggaaaugccuguacuaga

SEQ ID NO: 1982861 - RNA, 19 nt, Artificial Sequence
  Description of Artificial Sequence: Synthetic oligonucleotide
  Antisense strand to SEQ ID NO: 1982860
ucuaguacaggcauuucca

SEQ ID NO: 1982862 - RNA, 19 nt, Artificial Sequence
  Description of Artificial Sequence: Synthetic oligonucleotide
  Sense strand starting at position 3453 of SEQ ID NO: 1880644
uaugcauaucauuaagggu

SEQ ID NO: 1982863 - RNA, 19 nt, Artificial Sequence
  Description of Artificial Sequence: Synthetic oligonucleotide
  Antisense strand to SEQ ID NO: 1982862
acccuuaaugauaugcaua

SEQ ID NO: 1982864 - RNA, 19 nt, Artificial Sequence
  Description of Artificial Sequence: Synthetic oligonucleotide
  Sense strand starting at position 3461 of SEQ ID NO: 1880644
ucauuaaggguaugccaga

SEQ ID NO: 1982865 - RNA, 19 nt, Artificial Sequence
  Description of Artificial Sequence: Synthetic oligonucleotide
  Antisense strand to SEQ ID NO: 1982864
ucuggcauacccuuaauga

SEQ ID NO: 1982866 - RNA, 19 nt, Artificial Sequence
  Description of Artificial Sequence: Synthetic oligonucleotide
  Sense strand starting at position 3723 of SEQ ID NO: 1880644
gcagauccuccagaaugca

SEQ ID NO: 1982867 - RNA, 19 nt, Artificial Sequence
  Description of Artificial Sequence: Synthetic oligonucleotide
  Antisense strand to SEQ ID NO: 1982866
ugcauucuggaggaucugc

SEQ ID NO: 1982868 - RNA, 19 nt, Artificial Sequence
  Description of Artificial Sequence: Synthetic oligonucleotide
  Sense strand starting at position 3732 of SEQ ID NO: 1880644
ccagaaugcagagaugcuu

SEQ ID NO: 1982869 - RNA, 19 nt, Artificial Sequence
  Description of Artificial Sequence: Synthetic oligonucleotide
  Antisense strand to SEQ ID NO: 1982868
aagcaucucugcauucugg

SEQ ID NO: 1982870 - RNA, 19 nt, Artificial Sequence
  Description of Artificial Sequence: Synthetic oligonucleotide
  Sense strand starting at position 4 of SEQ ID NO: 1880645
agaggagucuguucccgga

SEQ ID NO: 1982871 - RNA, 19 nt, Artificial Sequence
  Description of Artificial Sequence: Synthetic oligonucleotide
  Antisense strand to SEQ ID NO: 1982870
uccgggaacagacuccucu

SEQ ID NO: 1982872 - RNA, 19 nt, Artificial Sequence
  Description of Artificial Sequence: Synthetic oligonucleotide
  Sense strand starting at position 7 of SEQ ID NO: 1880645
ggagucuguucccggaacu

SEQ ID NO: 1982873 - RNA, 19 nt, Artificial Sequence
  Description of Artificial Sequence: Synthetic oligonucleotide
  Antisense strand to SEQ ID NO: 1982872
aguuccgggaacagacucc

SEQ ID NO: 1982874 - RNA, 19 nt, Artificial Sequence
  Description of Artificial Sequence: Synthetic oligonucleotide
  Sense strand starting at position 8 of SEQ ID NO: 1880645
gagucuguucccggaacug

SEQ ID NO: 1982875 - RNA, 19 nt, Artificial Sequence
  Description of Artificial Sequence: Synthetic oligonucleotide
  Antisense strand to SEQ ID NO: 1982874
caguuccgggaacagacuc

SEQ ID NO: 1982876 - RNA, 19 nt, Artificial Sequence
  Description of Artificial Sequence: Synthetic oligonucleotide
  Sense strand starting at position 399 of SEQ ID NO: 1880645
ggaugaggcugucaguaga

SEQ ID NO: 1982877 - RNA, 19 nt, Artificial Sequence
  Description of Artificial Sequence: Synthetic oligonucleotide
  Antisense strand to SEQ ID NO: 1982876
ucuacugacagccucaucc

SEQ ID NO: 1982878 - RNA, 19 nt, Artificial Sequence
  Description of Artificial Sequence: Synthetic oligonucleotide
  Sense strand starting at position 402 of SEQ ID NO: 1880645
ugaggcugucaguagauua

SEQ ID NO: 1982879 - RNA, 19 nt, Artificial Sequence
  Description of Artificial Sequence: Synthetic oligonucleotide
  Antisense strand to SEQ ID NO: 1982878
uaaucuacugacagccuca

SEQ ID NO: 1982880 - RNA, 19 nt, Artificial Sequence
  Description of Artificial Sequence: Synthetic oligonucleotide
  Sense strand starting at position 2390 of SEQ ID NO: 1880645
cucugugaauucugacuac

SEQ ID NO: 1982881 - RNA, 19 nt, Artificial Sequence
  Description of Artificial Sequence: Synthetic oligonucleotide
  Antisense strand to SEQ ID NO: 1982880
guagucagaauucacagag

SEQ ID NO: 1982882 - RNA, 19 nt, Artificial Sequence
  Description of Artificial Sequence: Synthetic oligonucleotide
  Sense strand starting at position 2393 of SEQ ID NO: 1880645
ugugaauucugacuacucu

SEQ ID NO: 1982883 - RNA, 19 nt, Artificial Sequence
  Description of Artificial Sequence: Synthetic oligonucleotide
  Antisense strand to SEQ ID NO: 1982882
agaguagucagaauucaca

SEQ ID NO: 1982884 - RNA, 19 nt, Artificial Sequence
  Description of Artificial Sequence: Synthetic oligonucleotide
  Sense strand starting at position 2394 of SEQ ID NO: 1880645
gugaauucugacuacucua

SEQ ID NO: 1982885 - RNA, 19 nt, Artificial Sequence
  Description of Artificial Sequence: Synthetic oligonucleotide
  Antisense strand to SEQ ID NO: 1982884
uagaguagucagaauucac

SEQ ID NO: 1982886 - RNA, 19 nt, Artificial Sequence
  Description of Artificial Sequence: Synthetic oligonucleotide
  Sense strand starting at position 3655 of SEQ ID NO: 1880645
cgguuuacauucuguaaag

SEQ ID NO: 1982887 - RNA, 19 nt, Artificial Sequence
  Description of Artificial Sequence: Synthetic oligonucleotide
  Antisense strand to SEQ ID NO: 1982886
cuuuacagaauguaaaccg

SEQ ID NO: 1982888 - RNA, 19 nt, Artificial Sequence
  Description of Artificial Sequence: Synthetic oligonucleotide
  Sense strand starting at position 3657 of SEQ ID NO: 1880645
guuuacauucuguaaagca

SEQ ID NO: 1982889 - RNA, 19 nt, Artificial Sequence
  Description of Artificial Sequence: Synthetic oligonucleotide
  Antisense strand to SEQ ID NO: 1982888
ugcuuuacagaauguaaac

SEQ ID NO: 1982890 - RNA, 19 nt, Artificial Sequence
  Description of Artificial Sequence: Synthetic oligonucleotide
  Sense strand starting at position 3672 of SEQ ID NO: 1880645
agcagugcugucgacuaga

SEQ ID NO: 1982891 - RNA, 19 nt, Artificial Sequence
  Description of Artificial Sequence: Synthetic oligonucleotide
  Antisense strand to SEQ ID NO: 1982890
ucuagucgacagcacugcu

SEQ ID NO: 1982892 - RNA, 19 nt, Artificial Sequence
  Description of Artificial Sequence: Synthetic oligonucleotide
  Sense strand starting at position 3697 of SEQ ID NO: 1880645
gugcgauacacauguacaa

SEQ ID NO: 1982893 - RNA, 19 nt, Artificial Sequence
  Description of Artificial Sequence: Synthetic oligonucleotide
  Antisense strand to SEQ ID NO: 1982892
uuguacauguguaucgcac

SEQ ID NO: 1982894 - RNA, 19 nt, Artificial Sequence
  Description of Artificial Sequence: Synthetic oligonucleotide
  Sense strand starting at position 3846 of SEQ ID NO: 1880645
gcagaccuagagugaauua

SEQ ID NO: 1982895 - RNA, 19 nt, Artificial Sequence
  Description of Artificial Sequence: Synthetic oligonucleotide
  Antisense strand to SEQ ID NO: 1982894
uaauucacucuaggucugc

SEQ ID NO: 1982896 - RNA, 19 nt, Artificial Sequence
  Description of Artificial Sequence: Synthetic oligonucleotide
  Sense strand starting at position 3864 of SEQ ID NO: 1880645
acaguuacccacuguggaa

SEQ ID NO: 1982897 - RNA, 19 nt, Artificial Sequence
  Description of Artificial Sequence: Synthetic oligonucleotide
  Antisense strand to SEQ ID NO: 1982896
uuccacaguggguaacugu

SEQ ID NO: 1982898 - RNA, 19 nt, Artificial Sequence
  Description of Artificial Sequence: Synthetic oligonucleotide
  Sense strand starting at position 3964 of SEQ ID NO: 1880645
ugucuucuccacuaguuau

SEQ ID NO: 1982899 - RNA, 19 nt, Artificial Sequence
  Description of Artificial Sequence: Synthetic oligonucleotide
  Antisense strand to SEQ ID NO: 1982898
auaacuaguggagaagaca

SEQ ID NO: 1982900 - RNA, 19 nt, Artificial Sequence
  Description of Artificial Sequence: Synthetic oligonucleotide
  Sense strand starting at position 3974 of SEQ ID NO: 1880645
acuaguuauugucugucca

SEQ ID NO: 1982901 - RNA, 19 nt, Artificial Sequence
  Description of Artificial Sequence: Synthetic oligonucleotide
  Antisense strand to SEQ ID NO: 1982900
uggacagacaauaacuagu

SEQ ID NO: 1982902 - RNA, 19 nt, Artificial Sequence
  Description of Artificial Sequence: Synthetic oligonucleotide
  Sense strand starting at position 3975 of SEQ ID NO: 1880645
cuaguuauugucuguccac

SEQ ID NO: 1982903 - RNA, 19 nt, Artificial Sequence
  Description of Artificial Sequence: Synthetic oligonucleotide
  Antisense strand to SEQ ID NO: 1982902
guggacagacaauaacuag

SEQ ID NO: 1982904 - RNA, 19 nt, Artificial Sequence
  Description of Artificial Sequence: Synthetic oligonucleotide
  Sense strand starting at position 3976 of SEQ ID NO: 1880645
uaguuauugucuguccacu

SEQ ID NO: 1982905 - RNA, 19 nt, Artificial Sequence
  Description of Artificial Sequence: Synthetic oligonucleotide
  Antisense strand to SEQ ID NO: 1982904
aguggacagacaauaacua

SEQ ID NO: 1982906 - RNA, 19 nt, Artificial Sequence
  Description of Artificial Sequence: Synthetic oligonucleotide
  Sense strand starting at position 3978 of SEQ ID NO: 1880645
guuauugucuguccacuaa

SEQ ID NO: 1982907 - RNA, 19 nt, Artificial Sequence
  Description of Artificial Sequence: Synthetic oligonucleotide
  Antisense strand to SEQ ID NO: 1982906
uuaguggacagacaauaac

SEQ ID NO: 1982908 - RNA, 19 nt, Artificial Sequence
  Description of Artificial Sequence: Synthetic oligonucleotide
  Sense strand starting at position 1220 of SEQ ID NO: 1880646
gaaucaauguuucuuugag

SEQ ID NO: 1982909 - RNA, 19 nt, Artificial Sequence
  Description of Artificial Sequence: Synthetic oligonucleotide
  Antisense strand to SEQ ID NO: 1982908
cucaaagaaacauugauuc

SEQ ID NO: 1982910 - RNA, 19 nt, Artificial Sequence
  Description of Artificial Sequence: Synthetic oligonucleotide
  Sense strand starting at position 1222 of SEQ ID NO: 1880646
aucaauguuucuuugagac

SEQ ID NO: 1982911 - RNA, 19 nt, Artificial Sequence
  Description of Artificial Sequence: Synthetic oligonucleotide
  Antisense strand to SEQ ID NO: 1982910
gucucaaagaaacauugau

SEQ ID NO: 1982912 - RNA, 19 nt, Artificial Sequence
  Description of Artificial Sequence: Synthetic oligonucleotide
  Sense strand starting at position 1235 of SEQ ID NO: 1880646
ugagacauaucuguguuac

SEQ ID NO: 1982913 - RNA, 19 nt, Artificial Sequence
  Description of Artificial Sequence: Synthetic oligonucleotide
  Antisense strand to SEQ ID NO: 1982912
guaacacagauaugucuca

SEQ ID NO: 1982914 - RNA, 19 nt, Artificial Sequence
  Description of Artificial Sequence: Synthetic oligonucleotide
  Sense strand starting at position 1496 of SEQ ID NO: 1880646
ccagguuaucccuaaggug

SEQ ID NO: 1982915 - RNA, 19 nt, Artificial Sequence
  Description of Artificial Sequence: Synthetic oligonucleotide
  Antisense strand to SEQ ID NO: 1982914
caccuuagggauaaccugg

SEQ ID NO: 1982916 - RNA, 19 nt, Artificial Sequence
  Description of Artificial Sequence: Synthetic oligonucleotide
  Sense strand starting at position 1551 of SEQ ID NO: 1880646
guuacuuugggcuagauau

SEQ ID NO: 1982917 - RNA, 19 nt, Artificial Sequence
  Description of Artificial Sequence: Synthetic oligonucleotide
  Antisense strand to SEQ ID NO: 1982916
auaucuagcccaaaguaac

SEQ ID NO: 1982918 - RNA, 19 nt, Artificial Sequence
  Description of Artificial Sequence: Synthetic oligonucleotide
  Sense strand starting at position 1553 of SEQ ID NO: 1880646
uacuuugggcuagauauua

SEQ ID NO: 1982919 - RNA, 19 nt, Artificial Sequence
  Description of Artificial Sequence: Synthetic oligonucleotide
  Antisense strand to SEQ ID NO: 1982918
uaauaucuagcccaaagua

SEQ ID NO: 1982920 - RNA, 19 nt, Artificial Sequence
  Description of Artificial Sequence: Synthetic oligonucleotide
  Sense strand starting at position 1607 of SEQ ID NO: 1880646
gcugauaaagauuagugua

SEQ ID NO: 1982921 - RNA, 19 nt, Artificial Sequence
  Description of Artificial Sequence: Synthetic oligonucleotide
  Antisense strand to SEQ ID NO: 1982920
uacacuaaucuuuaucagc

SEQ ID NO: 1982922 - RNA, 19 nt, Artificial Sequence
  Description of Artificial Sequence: Synthetic oligonucleotide
  Sense strand starting at position 1612 of SEQ ID NO: 1880646
uaaagauuaguguagguca

SEQ ID NO: 1982923 - RNA, 19 nt, Artificial Sequence
  Description of Artificial Sequence: Synthetic oligonucleotide
  Antisense strand to SEQ ID NO: 1982922
ugaccuacacuaaucuuua

SEQ ID NO: 1982924 - RNA, 19 nt, Artificial Sequence
  Description of Artificial Sequence: Synthetic oligonucleotide
  Sense strand starting at position 1614 of SEQ ID NO: 1880646
aagauuaguguaggucaga

SEQ ID NO: 1982925 - RNA, 19 nt, Artificial Sequence
  Description of Artificial Sequence: Synthetic oligonucleotide
  Antisense strand to SEQ ID NO: 1982924
ucugaccuacacuaaucuu

SEQ ID NO: 1982926 - RNA, 19 nt, Artificial Sequence
  Description of Artificial Sequence: Synthetic oligonucleotide
  Sense strand starting at position 1615 of SEQ ID NO: 1880646
agauuaguguaggucagaa

SEQ ID NO: 1982927 - RNA, 19 nt, Artificial Sequence
  Description of Artificial Sequence: Synthetic oligonucleotide
  Antisense strand to SEQ ID NO: 1982926
uucugaccuacacuaaucu

SEQ ID NO: 1982928 - RNA, 19 nt, Artificial Sequence
  Description of Artificial Sequence: Synthetic oligonucleotide
  Sense strand starting at position 1617 of SEQ ID NO: 1880646
auuaguguaggucagaauu

SEQ ID NO: 1982929 - RNA, 19 nt, Artificial Sequence
  Description of Artificial Sequence: Synthetic oligonucleotide
  Antisense strand to SEQ ID NO: 1982928
aauucugaccuacacuaau

SEQ ID NO: 1982930 - RNA, 19 nt, Artificial Sequence
  Description of Artificial Sequence: Synthetic oligonucleotide
  Sense strand starting at position 1685 of SEQ ID NO: 1880646
auugucaaagaaugucaaa

SEQ ID NO: 1982931 - RNA, 19 nt, Artificial Sequence
  Description of Artificial Sequence: Synthetic oligonucleotide
  Antisense strand to SEQ ID NO: 1982930
uuugacauucuuugacaau

SEQ ID NO: 1982932 - RNA, 19 nt, Artificial Sequence
  Description of Artificial Sequence: Synthetic oligonucleotide
  Sense strand starting at position 1921 of SEQ ID NO: 1880646
ccaaauguugcauggagac

SEQ ID NO: 1982933 - RNA, 19 nt, Artificial Sequence
  Description of Artificial Sequence: Synthetic oligonucleotide
  Antisense strand to SEQ ID NO: 1982932
gucuccaugcaacauuugg

SEQ ID NO: 1982934 - RNA, 19 nt, Artificial Sequence
  Description of Artificial Sequence: Synthetic oligonucleotide
  Sense strand starting at position 1927 of SEQ ID NO: 1880646
guugcauggagacauacuu

SEQ ID NO: 1982935 - RNA, 19 nt, Artificial Sequence
  Description of Artificial Sequence: Synthetic oligonucleotide
  Antisense strand to SEQ ID NO: 1982934
aaguaugucuccaugcaac

SEQ ID NO: 1982936 - RNA, 19 nt, Artificial Sequence
  Description of Artificial Sequence: Synthetic oligonucleotide
  Sense strand starting at position 2067 of SEQ ID NO: 1880646
aucacucugccagacagau

SEQ ID NO: 1982937 - RNA, 19 nt, Artificial Sequence
  Description of Artificial Sequence: Synthetic oligonucleotide
  Antisense strand to SEQ ID NO: 1982936
aucugucuggcagagugau

SEQ ID NO: 1982938 - RNA, 19 nt, Artificial Sequence
  Description of Artificial Sequence: Synthetic oligonucleotide
  Sense strand starting at position 2172 of SEQ ID NO: 1880646
ucuugcuuucuguaaggga

SEQ ID NO: 1982939 - RNA, 19 nt, Artificial Sequence
  Description of Artificial Sequence: Synthetic oligonucleotide
  Antisense strand to SEQ ID NO: 1982938
ucccuuacagaaagcaaga

SEQ ID NO: 1982940 - RNA, 19 nt, Artificial Sequence
  Description of Artificial Sequence: Synthetic oligonucleotide
  Sense strand starting at position 2351 of SEQ ID NO: 1880646
ggugaugugagaugacuga

SEQ ID NO: 1982941 - RNA, 19 nt, Artificial Sequence
  Description of Artificial Sequence: Synthetic oligonucleotide
  Antisense strand to SEQ ID NO: 1982940
ucagucaucucacaucacc

SEQ ID NO: 1982942 - RNA, 19 nt, Artificial Sequence
  Description of Artificial Sequence: Synthetic oligonucleotide
  Sense strand starting at position 2358 of SEQ ID NO: 1880646
ugagaugacugacuuccau

SEQ ID NO: 1982943 - RNA, 19 nt, Artificial Sequence
  Description of Artificial Sequence: Synthetic oligonucleotide
  Antisense strand to SEQ ID NO: 1982942
auggaagucagucaucuca

SEQ ID NO: 1982944 - RNA, 19 nt, Artificial Sequence
  Description of Artificial Sequence: Synthetic oligonucleotide
  Sense strand starting at position 2480 of SEQ ID NO: 1880646
agcaaucuugcgcuuguau

SEQ ID NO: 1982945 - RNA, 19 nt, Artificial Sequence
  Description of Artificial Sequence: Synthetic oligonucleotide
  Antisense strand to SEQ ID NO: 1982944
auacaagcgcaagauugcu

SEQ ID NO: 1982946 - RNA, 19 nt, Artificial Sequence
  Description of Artificial Sequence: Synthetic oligonucleotide
  Sense strand starting at position 2481 of SEQ ID NO: 1880646
gcaaucuugcgcuuguauc

SEQ ID NO: 1982947 - RNA, 19 nt, Artificial Sequence
  Description of Artificial Sequence: Synthetic oligonucleotide
  Antisense strand to SEQ ID NO: 1982946
gauacaagcgcaagauugc

SEQ ID NO: 1982948 - RNA, 19 nt, Artificial Sequence
  Description of Artificial Sequence: Synthetic oligonucleotide
  Sense strand starting at position 2500 of SEQ ID NO: 1880646
ugugcaacuguagauaaga

SEQ ID NO: 1982949 - RNA, 19 nt, Artificial Sequence
  Description of Artificial Sequence: Synthetic oligonucleotide
  Antisense strand to SEQ ID NO: 1982948
ucuuaucuacaguugcaca

SEQ ID NO: 1982950 - RNA, 19 nt, Artificial Sequence
  Description of Artificial Sequence: Synthetic oligonucleotide
  Sense strand starting at position 2687 of SEQ ID NO: 1880646
gguuuaaguggugacuuga

SEQ ID NO: 1982951 - RNA, 19 nt, Artificial Sequence
  Description of Artificial Sequence: Synthetic oligonucleotide
  Antisense strand to SEQ ID NO: 1982950
ucaagucaccacuuaaacc

SEQ ID NO: 1982952 - RNA, 19 nt, Artificial Sequence
  Description of Artificial Sequence: Synthetic oligonucleotide
  Sense strand starting at position 2700 of SEQ ID NO: 1880646
acuugaaaugcaugcuaag

SEQ ID NO: 1982953 - RNA, 19 nt, Artificial Sequence
  Description of Artificial Sequence: Synthetic oligonucleotide
  Antisense strand to SEQ ID NO: 1982952
cuuagcaugcauuucaagu

SEQ ID NO: 1982954 - RNA, 19 nt, Artificial Sequence
  Description of Artificial Sequence: Synthetic oligonucleotide
  Sense strand starting at position 2757 of SEQ ID NO: 1880646
cggaguuacgaucaaauua

SEQ ID NO: 1982955 - RNA, 19 nt, Artificial Sequence
  Description of Artificial Sequence: Synthetic oligonucleotide
  Antisense strand to SEQ ID NO: 1982954
uaauuugaucguaacuccg

SEQ ID NO: 1982956 - RNA, 19 nt, Artificial Sequence
  Description of Artificial Sequence: Synthetic oligonucleotide
  Sense strand starting at position 2814 of SEQ ID NO: 1880646
guguauaaugggcaucuua

SEQ ID NO: 1982957 - RNA, 19 nt, Artificial Sequence
  Description of Artificial Sequence: Synthetic oligonucleotide
  Antisense strand to SEQ ID NO: 1982956
uaagaugcccauuauacac

SEQ ID NO: 1982958 - RNA, 19 nt, Artificial Sequence
  Description of Artificial Sequence: Synthetic oligonucleotide
  Sense strand starting at position 2839 of SEQ ID NO: 1880646
ggcaguguuauggaaugaa

SEQ ID NO: 1982959 - RNA, 19 nt, Artificial Sequence
  Description of Artificial Sequence: Synthetic oligonucleotide
  Antisense strand to SEQ ID NO: 1982958
uucauuccauaacacugcc

SEQ ID NO: 1982960 - RNA, 19 nt, Artificial Sequence
  Description of Artificial Sequence: Synthetic oligonucleotide
  Sense strand starting at position 2842 of SEQ ID NO: 1880646
aguguuauggaaugaauag

SEQ ID NO: 1982961 - RNA, 19 nt, Artificial Sequence
  Description of Artificial Sequence: Synthetic oligonucleotide
  Antisense strand to SEQ ID NO: 1982960
cuauucauuccauaacacu

SEQ ID NO: 1982962 - RNA, 19 nt, Artificial Sequence
  Description of Artificial Sequence: Synthetic oligonucleotide
  Sense strand starting at position 2843 of SEQ ID NO: 1880646
guguuauggaaugaauagu

SEQ ID NO: 1982963 - RNA, 19 nt, Artificial Sequence
  Description of Artificial Sequence: Synthetic oligonucleotide
  Antisense strand to SEQ ID NO: 1982962
acuauucauuccauaacac

SEQ ID NO: 1982964 - RNA, 19 nt, Artificial Sequence
  Description of Artificial Sequence: Synthetic oligonucleotide
  Sense strand starting at position 2853 of SEQ ID NO: 1880646
augaauagugccuaccaaa

SEQ ID NO: 1982965 - RNA, 19 nt, Artificial Sequence
  Description of Artificial Sequence: Synthetic oligonucleotide
  Antisense strand to SEQ ID NO: 1982964
uuugguaggcacuauucau

SEQ ID NO: 1982966 - RNA, 19 nt, Artificial Sequence
  Description of Artificial Sequence: Synthetic oligonucleotide
  Sense strand starting at position 2886 of SEQ ID NO: 1880646
gcccuaugugacuguauuu

SEQ ID NO: 1982967 - RNA, 19 nt, Artificial Sequence
  Description of Artificial Sequence: Synthetic oligonucleotide
  Antisense strand to SEQ ID NO: 1982966
aaauacagucacauagggc

SEQ ID NO: 1982968 - RNA, 19 nt, Artificial Sequence
  Description of Artificial Sequence: Synthetic oligonucleotide
  Sense strand starting at position 2982 of SEQ ID NO: 1880646
cuuguaagacgaugaagaa

SEQ ID NO: 1982969 - RNA, 19 nt, Artificial Sequence
  Description of Artificial Sequence: Synthetic oligonucleotide
  Antisense strand to SEQ ID NO: 1982968
uucuucaucgucuuacaag

SEQ ID NO: 1982970 - RNA, 19 nt, Artificial Sequence
  Description of Artificial Sequence: Synthetic oligonucleotide
  Sense strand starting at position 3294 of SEQ ID NO: 1880646
augugaaauggcuacaguu

SEQ ID NO: 1982971 - RNA, 19 nt, Artificial Sequence
  Description of Artificial Sequence: Synthetic oligonucleotide
  Antisense strand to SEQ ID NO: 1982970
aacuguagccauuucacau

SEQ ID NO: 1982972 - RNA, 19 nt, Artificial Sequence
  Description of Artificial Sequence: Synthetic oligonucleotide
  Sense strand starting at position 3296 of SEQ ID NO: 1880646
gugaaauggcuacaguuau

SEQ ID NO: 1982973 - RNA, 19 nt, Artificial Sequence
  Description of Artificial Sequence: Synthetic oligonucleotide
  Antisense strand to SEQ ID NO: 1982972
auaacuguagccauuucac

SEQ ID NO: 1982974 - RNA, 19 nt, Artificial Sequence
  Description of Artificial Sequence: Synthetic oligonucleotide
  Sense strand starting at position 3394 of SEQ ID NO: 1880646
uggaauaaauaggaaugaa

SEQ ID NO: 1982975 - RNA, 19 nt, Artificial Sequence
  Description of Artificial Sequence: Synthetic oligonucleotide
  Antisense strand to SEQ ID NO: 1982974
uucauuccuauuuauucca

SEQ ID NO: 1982976 - RNA, 19 nt, Artificial Sequence
  Description of Artificial Sequence: Synthetic oligonucleotide
  Sense strand starting at position 3643 of SEQ ID NO: 1880646
gaaaucucuuguccaaggu

SEQ ID NO: 1982977 - RNA, 19 nt, Artificial Sequence
  Description of Artificial Sequence: Synthetic oligonucleotide
  Antisense strand to SEQ ID NO: 1982976
accuuggacaagagauuuc

SEQ ID NO: 1982978 - RNA, 19 nt, Artificial Sequence
  Description of Artificial Sequence: Synthetic oligonucleotide
  Sense strand starting at position 3676 of SEQ ID NO: 1880646
cauguuaagguaugagaga

SEQ ID NO: 1982979 - RNA, 19 nt, Artificial Sequence
  Description of Artificial Sequence: Synthetic oligonucleotide
  Antisense strand to SEQ ID NO: 1982978
ucucucauaccuuaacaug

SEQ ID NO: 1982980 - RNA, 19 nt, Artificial Sequence
  Description of Artificial Sequence: Synthetic oligonucleotide
  Sense strand starting at position 3730 of SEQ ID NO: 1880646
uagaaugugguaggaauga

SEQ ID NO: 1982981 - RNA, 19 nt, Artificial Sequence
  Description of Artificial Sequence: Synthetic oligonucleotide
  Antisense strand to SEQ ID NO: 1982980
ucauuccuaccacauucua

SEQ ID NO: 1982982 - RNA, 19 nt, Artificial Sequence
  Description of Artificial Sequence: Synthetic oligonucleotide
  Sense strand starting at position 3805 of SEQ ID NO: 1880646
cuguuauaagauugaauga

SEQ ID NO: 1982983 - RNA, 19 nt, Artificial Sequence
  Description of Artificial Sequence: Synthetic oligonucleotide
  Antisense strand to SEQ ID NO: 1982982
ucauucaaucuuauaacag

SEQ ID NO: 1982984 - RNA, 19 nt, Artificial Sequence
  Description of Artificial Sequence: Synthetic oligonucleotide
  Sense strand starting at position 3818 of SEQ ID NO: 1880646
gaaugaauggguggaugua

SEQ ID NO: 1982985 - RNA, 19 nt, Artificial Sequence
  Description of Artificial Sequence: Synthetic oligonucleotide
  Antisense strand to SEQ ID NO: 1982984
uacauccacccauucauuc

SEQ ID NO: 1982986 - RNA, 19 nt, Artificial Sequence
  Description of Artificial Sequence: Synthetic oligonucleotide
  Sense strand starting at position 3951 of SEQ ID NO: 1880646
gaccauaggcauugaccau

SEQ ID NO: 1982987 - RNA, 19 nt, Artificial Sequence
  Description of Artificial Sequence: Synthetic oligonucleotide
  Antisense strand to SEQ ID NO: 1982986
auggucaaugccuaugguc

SEQ ID NO: 1982988 - RNA, 19 nt, Artificial Sequence
  Description of Artificial Sequence: Synthetic oligonucleotide
  Sense strand starting at position 485 of SEQ ID NO: 1880647
gcaggauauguugagguau

SEQ ID NO: 1982989 - RNA, 19 nt, Artificial Sequence
  Description of Artificial Sequence: Synthetic oligonucleotide
  Antisense strand to SEQ ID NO: 1982988
auaccucaacauauccugc

SEQ ID NO: 1982990 - RNA, 19 nt, Artificial Sequence
  Description of Artificial Sequence: Synthetic oligonucleotide
  Sense strand starting at position 491 of SEQ ID NO: 1880647
uauguugagguauggaaca

SEQ ID NO: 1982991 - RNA, 19 nt, Artificial Sequence
  Description of Artificial Sequence: Synthetic oligonucleotide
  Antisense strand to SEQ ID NO: 1982990
uguuccauaccucaacaua

SEQ ID NO: 1982992 - RNA, 19 nt, Artificial Sequence
  Description of Artificial Sequence: Synthetic oligonucleotide
  Sense strand starting at position 569 of SEQ ID NO: 1880647
cuaagaaucuuugcaguga

SEQ ID NO: 1982993 - RNA, 19 nt, Artificial Sequence
  Description of Artificial Sequence: Synthetic oligonucleotide
  Antisense strand to SEQ ID NO: 1982992
ucacugcaaagauucuuag

SEQ ID NO: 1982994 - RNA, 19 nt, Artificial Sequence
  Description of Artificial Sequence: Synthetic oligonucleotide
  Sense strand starting at position 573 of SEQ ID NO: 1880647
gaaucuuugcagugaaaca

SEQ ID NO: 1982995 - RNA, 19 nt, Artificial Sequence
  Description of Artificial Sequence: Synthetic oligonucleotide
  Antisense strand to SEQ ID NO: 1982994
uguuucacugcaaagauuc

SEQ ID NO: 1982996 - RNA, 19 nt, Artificial Sequence
  Description of Artificial Sequence: Synthetic oligonucleotide
  Sense strand starting at position 584 of SEQ ID NO: 1880647
gugaaacagcuccaucacu

SEQ ID NO: 1982997 - RNA, 19 nt, Artificial Sequence
  Description of Artificial Sequence: Synthetic oligonucleotide
  Antisense strand to SEQ ID NO: 1982996
agugauggagcuguuucac

SEQ ID NO: 1982998 - RNA, 19 nt, Artificial Sequence
  Description of Artificial Sequence: Synthetic oligonucleotide
  Sense strand starting at position 642 of SEQ ID NO: 1880647
ggucuacuccuguaaggua

SEQ ID NO: 1982999 - RNA, 19 nt, Artificial Sequence
  Description of Artificial Sequence: Synthetic oligonucleotide
  Antisense strand to SEQ ID NO: 1982998
uaccuuacaggaguagacc

SEQ ID NO: 1983000 - RNA, 19 nt, Artificial Sequence
  Description of Artificial Sequence: Synthetic oligonucleotide
  Sense strand starting at position 756 of SEQ ID NO: 1880647
acacaaccuguuuguuuaa

SEQ ID NO: 1983001 - RNA, 19 nt, Artificial Sequence
  Description of Artificial Sequence: Synthetic oligonucleotide
  Antisense strand to SEQ ID NO: 1983000
uuaaacaaacagguugugu

SEQ ID NO: 1983002 - RNA, 19 nt, Artificial Sequence
  Description of Artificial Sequence: Synthetic oligonucleotide
  Sense strand starting at position 811 of SEQ ID NO: 1880647
agguauaauugcccuacua

SEQ ID NO: 1983003 - RNA, 19 nt, Artificial Sequence
  Description of Artificial Sequence: Synthetic oligonucleotide
  Antisense strand to SEQ ID NO: 1983002
uaguagggcaauuauaccu

SEQ ID NO: 1983004 - RNA, 19 nt, Artificial Sequence
  Description of Artificial Sequence: Synthetic oligonucleotide
  Sense strand starting at position 940 of SEQ ID NO: 1880647
cugucuugcagauggacaa

SEQ ID NO: 1983005 - RNA, 19 nt, Artificial Sequence
  Description of Artificial Sequence: Synthetic oligonucleotide
  Antisense strand to SEQ ID NO: 1983004
uuguccaucugcaagacag

SEQ ID NO: 1983006 - RNA, 19 nt, Artificial Sequence
  Description of Artificial Sequence: Synthetic oligonucleotide
  Sense strand starting at position 1116 of SEQ ID NO: 1880647
gcaucagcuguguaagaga

SEQ ID NO: 1983007 - RNA, 19 nt, Artificial Sequence
  Description of Artificial Sequence: Synthetic oligonucleotide
  Antisense strand to SEQ ID NO: 1983006
ucucuuacacagcugaugc

SEQ ID NO: 1983008 - RNA, 19 nt, Artificial Sequence
  Description of Artificial Sequence: Synthetic oligonucleotide
  Sense strand starting at position 1519 of SEQ ID NO: 1880647
ccgaguagugccgucuaca

SEQ ID NO: 1983009 - RNA, 19 nt, Artificial Sequence
  Description of Artificial Sequence: Synthetic oligonucleotide
  Antisense strand to SEQ ID NO: 1983008
uguagacggcacuacucgg

SEQ ID NO: 1983010 - RNA, 19 nt, Artificial Sequence
  Description of Artificial Sequence: Synthetic oligonucleotide
  Sense strand starting at position 1520 of SEQ ID NO: 1880647
cgaguagugccgucuacac

SEQ ID NO: 1983011 - RNA, 19 nt, Artificial Sequence
  Description of Artificial Sequence: Synthetic oligonucleotide
  Antisense strand to SEQ ID NO: 1983010
guguagacggcacuacucg

SEQ ID NO: 1983012 - RNA, 19 nt, Artificial Sequence
  Description of Artificial Sequence: Synthetic oligonucleotide
  Sense strand starting at position 1682 of SEQ ID NO: 1880647
agaaauucuuuggccaaga

SEQ ID NO: 1983013 - RNA, 19 nt, Artificial Sequence
  Description of Artificial Sequence: Synthetic oligonucleotide
  Antisense strand to SEQ ID NO: 1983012
ucuuggccaaagaauuucu

SEQ ID NO: 1983014 - RNA, 19 nt, Artificial Sequence
  Description of Artificial Sequence: Synthetic oligonucleotide
  Sense strand starting at position 1687 of SEQ ID NO: 1880647
uucuuuggccaagacugaa

SEQ ID NO: 1983015 - RNA, 19 nt, Artificial Sequence
  Description of Artificial Sequence: Synthetic oligonucleotide
  Antisense strand to SEQ ID NO: 1983014
uucagucuuggccaaagaa

SEQ ID NO: 1983016 - RNA, 19 nt, Artificial Sequence
  Description of Artificial Sequence: Synthetic oligonucleotide
  Sense strand starting at position 1700 of SEQ ID NO: 1880647
acugaaauauggccagaug

SEQ ID NO: 1983017 - RNA, 19 nt, Artificial Sequence
  Description of Artificial Sequence: Synthetic oligonucleotide
  Antisense strand to SEQ ID NO: 1983016
caucuggccauauuucagu

SEQ ID NO: 1983018 - RNA, 19 nt, Artificial Sequence
  Description of Artificial Sequence: Synthetic oligonucleotide
  Sense strand starting at position 1709 of SEQ ID NO: 1880647
uggccagaugguggaaaua

SEQ ID NO: 1983019 - RNA, 19 nt, Artificial Sequence
  Description of Artificial Sequence: Synthetic oligonucleotide
  Antisense strand to SEQ ID NO: 1983018
uauuuccaccaucuggcca

SEQ ID NO: 1983020 - RNA, 19 nt, Artificial Sequence
  Description of Artificial Sequence: Synthetic oligonucleotide
  Sense strand starting at position 1884 of SEQ ID NO: 1880647
gcaugaauugcacauuaaa

SEQ ID NO: 1983021 - RNA, 19 nt, Artificial Sequence
  Description of Artificial Sequence: Synthetic oligonucleotide
  Antisense strand to SEQ ID NO: 1983020
uuuaaugugcaauucaugc

SEQ ID NO: 1983022 - RNA, 19 nt, Artificial Sequence
  Description of Artificial Sequence: Synthetic oligonucleotide
  Sense strand starting at position 2090 of SEQ ID NO: 1880647
guaggaaugcaaugauauu

SEQ ID NO: 1983023 - RNA, 19 nt, Artificial Sequence
  Description of Artificial Sequence: Synthetic oligonucleotide
  Antisense strand to SEQ ID NO: 1983022
aauaucauugcauuccuac

SEQ ID NO: 1983024 - RNA, 19 nt, Artificial Sequence
  Description of Artificial Sequence: Synthetic oligonucleotide
  Sense strand starting at position 2424 of SEQ ID NO: 1880647
cugugugaucuagagucua

SEQ ID NO: 1983025 - RNA, 19 nt, Artificial Sequence
  Description of Artificial Sequence: Synthetic oligonucleotide
  Antisense strand to SEQ ID NO: 1983024
uagacucuagaucacacag

SEQ ID NO: 1983026 - RNA, 19 nt, Artificial Sequence
  Description of Artificial Sequence: Synthetic oligonucleotide
  Sense strand starting at position 2807 of SEQ ID NO: 1880647
uagacuugugaggguuaaa

SEQ ID NO: 1983027 - RNA, 19 nt, Artificial Sequence
  Description of Artificial Sequence: Synthetic oligonucleotide
  Antisense strand to SEQ ID NO: 1983026
uuuaacccucacaagucua

SEQ ID NO: 1983028 - RNA, 19 nt, Artificial Sequence
  Description of Artificial Sequence: Synthetic oligonucleotide
  Sense strand starting at position 2837 of SEQ ID NO: 1880647
augcuaauuacuggaguag

SEQ ID NO: 1983029 - RNA, 19 nt, Artificial Sequence
  Description of Artificial Sequence: Synthetic oligonucleotide
  Antisense strand to SEQ ID NO: 1983028
cuacuccaguaauuagcau

SEQ ID NO: 1983030 - RNA, 19 nt, Artificial Sequence
  Description of Artificial Sequence: Synthetic oligonucleotide
  Sense strand starting at position 2838 of SEQ ID NO: 1880647
ugcuaauuacuggaguagu

SEQ ID NO: 1983031 - RNA, 19 nt, Artificial Sequence
  Description of Artificial Sequence: Synthetic oligonucleotide
  Antisense strand to SEQ ID NO: 1983030
acuacuccaguaauuagca

SEQ ID NO: 1983032 - RNA, 19 nt, Artificial Sequence
  Description of Artificial Sequence: Synthetic oligonucleotide
  Sense strand starting at position 2866 of SEQ ID NO: 1880647
augguaacugcuuaguaaa

SEQ ID NO: 1983033 - RNA, 19 nt, Artificial Sequence
  Description of Artificial Sequence: Synthetic oligonucleotide
  Antisense strand to SEQ ID NO: 1983032
uuuacuaagcaguuaccau

SEQ ID NO: 1983034 - RNA, 19 nt, Artificial Sequence
  Description of Artificial Sequence: Synthetic oligonucleotide
  Sense strand starting at position 2958 of SEQ ID NO: 1880647
uugugcauuccagagaaag

SEQ ID NO: 1983035 - RNA, 19 nt, Artificial Sequence
  Description of Artificial Sequence: Synthetic oligonucleotide
  Antisense strand to SEQ ID NO: 1983034
cuuucucuggaaugcacaa

SEQ ID NO: 1983036 - RNA, 19 nt, Artificial Sequence
  Description of Artificial Sequence: Synthetic oligonucleotide
  Sense strand starting at position 2960 of SEQ ID NO: 1880647
gugcauuccagagaaaggu

SEQ ID NO: 1983037 - RNA, 19 nt, Artificial Sequence
  Description of Artificial Sequence: Synthetic oligonucleotide
  Antisense strand to SEQ ID NO: 1983036
accuuucucuggaaugcac

SEQ ID NO: 1983038 - RNA, 19 nt, Artificial Sequence
  Description of Artificial Sequence: Synthetic oligonucleotide
  Sense strand starting at position 3152 of SEQ ID NO: 1880647
agugucucccacuagagua

SEQ ID NO: 1983039 - RNA, 19 nt, Artificial Sequence
  Description of Artificial Sequence: Synthetic oligonucleotide
  Antisense strand to SEQ ID NO: 1983038
uacucuagugggagacacu

SEQ ID NO: 1983040 - RNA, 19 nt, Artificial Sequence
  Description of Artificial Sequence: Synthetic oligonucleotide
  Sense strand starting at position 3176 of SEQ ID NO: 1880647
aguguauuucucugcucca

SEQ ID NO: 1983041 - RNA, 19 nt, Artificial Sequence
  Description of Artificial Sequence: Synthetic oligonucleotide
  Antisense strand to SEQ ID NO: 1983040
uggagcagagaaauacacu

SEQ ID NO: 1983042 - RNA, 19 nt, Artificial Sequence
  Description of Artificial Sequence: Synthetic oligonucleotide
  Sense strand starting at position 3177 of SEQ ID NO: 1880647
guguauuucucugcuccau

SEQ ID NO: 1983043 - RNA, 19 nt, Artificial Sequence
  Description of Artificial Sequence: Synthetic oligonucleotide
  Antisense strand to SEQ ID NO: 1983042
auggagcagagaaauacac

SEQ ID NO: 1983044 - RNA, 19 nt, Artificial Sequence
  Description of Artificial Sequence: Synthetic oligonucleotide
  Sense strand starting at position 3250 of SEQ ID NO: 1880647
gacaguaugucaguuccaa

SEQ ID NO: 1983045 - RNA, 19 nt, Artificial Sequence
  Description of Artificial Sequence: Synthetic oligonucleotide
  Antisense strand to SEQ ID NO: 1983044
uuggaacugacauacuguc

SEQ ID NO: 1983046 - RNA, 19 nt, Artificial Sequence
  Description of Artificial Sequence: Synthetic oligonucleotide
  Sense strand starting at position 3305 of SEQ ID NO: 1880647
ucugcuuuccuccauggga

SEQ ID NO: 1983047 - RNA, 19 nt, Artificial Sequence
  Description of Artificial Sequence: Synthetic oligonucleotide
  Antisense strand to SEQ ID NO: 1983046
ucccauggaggaaagcaga

SEQ ID NO: 1983048 - RNA, 19 nt, Artificial Sequence
  Description of Artificial Sequence: Synthetic oligonucleotide
  Sense strand starting at position 3307 of SEQ ID NO: 1880647
ugcuuuccuccaugggaag

SEQ ID NO: 1983049 - RNA, 19 nt, Artificial Sequence
  Description of Artificial Sequence: Synthetic oligonucleotide
  Antisense strand to SEQ ID NO: 1983048
cuucccauggaggaaagca

SEQ ID NO: 1983050 - RNA, 19 nt, Artificial Sequence
  Description of Artificial Sequence: Synthetic oligonucleotide
  Sense strand starting at position 3308 of SEQ ID NO: 1880647
gcuuuccuccaugggaaga

SEQ ID NO: 1983051 - RNA, 19 nt, Artificial Sequence
  Description of Artificial Sequence: Synthetic oligonucleotide
  Antisense strand to SEQ ID NO: 1983050
ucuucccauggaggaaagc

SEQ ID NO: 1983052 - RNA, 19 nt, Artificial Sequence
  Description of Artificial Sequence: Synthetic oligonucleotide
  Sense strand starting at position 3422 of SEQ ID NO: 1880647
gcacauuugugagugcgau

SEQ ID NO: 1983053 - RNA, 19 nt, Artificial Sequence
  Description of Artificial Sequence: Synthetic oligonucleotide
  Antisense strand to SEQ ID NO: 1983052
aucgcacucacaaaugugc

SEQ ID NO: 1983054 - RNA, 19 nt, Artificial Sequence
  Description of Artificial Sequence: Synthetic oligonucleotide
  Sense strand starting at position 3423 of SEQ ID NO: 1880647
cacauuugugagugcgaua

SEQ ID NO: 1983055 - RNA, 19 nt, Artificial Sequence
  Description of Artificial Sequence: Synthetic oligonucleotide
  Antisense strand to SEQ ID NO: 1983054
uaucgcacucacaaaugug

SEQ ID NO: 1983056 - RNA, 19 nt, Artificial Sequence
  Description of Artificial Sequence: Synthetic oligonucleotide
  Sense strand starting at position 3428 of SEQ ID NO: 1880647
uugugagugcgauauagau

SEQ ID NO: 1983057 - RNA, 19 nt, Artificial Sequence
  Description of Artificial Sequence: Synthetic oligonucleotide
  Antisense strand to SEQ ID NO: 1983056
aucuauaucgcacucacaa

SEQ ID NO: 1983058 - RNA, 19 nt, Artificial Sequence
  Description of Artificial Sequence: Synthetic oligonucleotide
  Sense strand starting at position 3430 of SEQ ID NO: 1880647
gugagugcgauauagauga

SEQ ID NO: 1983059 - RNA, 19 nt, Artificial Sequence
  Description of Artificial Sequence: Synthetic oligonucleotide
  Antisense strand to SEQ ID NO: 1983058
ucaucuauaucgcacucac

SEQ ID NO: 1983060 - RNA, 19 nt, Artificial Sequence
  Description of Artificial Sequence: Synthetic oligonucleotide
  Sense strand starting at position 3432 of SEQ ID NO: 1880647
gagugcgauauagaugauu

SEQ ID NO: 1983061 - RNA, 19 nt, Artificial Sequence
  Description of Artificial Sequence: Synthetic oligonucleotide
  Antisense strand to SEQ ID NO: 1983060
aaucaucuauaucgcacuc

SEQ ID NO: 1983062 - RNA, 19 nt, Artificial Sequence
  Description of Artificial Sequence: Synthetic oligonucleotide
  Sense strand starting at position 3479 of SEQ ID NO: 1880647
uuuguuauccaguaggacu

SEQ ID NO: 1983063 - RNA, 19 nt, Artificial Sequence
  Description of Artificial Sequence: Synthetic oligonucleotide
  Antisense strand to SEQ ID NO: 1983062
aguccuacuggauaacaaa

SEQ ID NO: 1983064 - RNA, 19 nt, Artificial Sequence
  Description of Artificial Sequence: Synthetic oligonucleotide
  Sense strand starting at position 3500 of SEQ ID NO: 1880647
gcagaaaccuggcugauac

SEQ ID NO: 1983065 - RNA, 19 nt, Artificial Sequence
  Description of Artificial Sequence: Synthetic oligonucleotide
  Antisense strand to SEQ ID NO: 1983064
guaucagccagguuucugc

SEQ ID NO: 1983066 - RNA, 19 nt, Artificial Sequence
  Description of Artificial Sequence: Synthetic oligonucleotide
  Sense strand starting at position 3562 of SEQ ID NO: 1880647
aguacauggcuccagacau

SEQ ID NO: 1983067 - RNA, 19 nt, Artificial Sequence
  Description of Artificial Sequence: Synthetic oligonucleotide
  Antisense strand to SEQ ID NO: 1983066
augucuggagccauguacu

SEQ ID NO: 1983068 - RNA, 19 nt, Artificial Sequence
  Description of Artificial Sequence: Synthetic oligonucleotide
  Sense strand starting at position 90 of SEQ ID NO: 1880648
gggcguugucagcaggaau

SEQ ID NO: 1983069 - RNA, 19 nt, Artificial Sequence
  Description of Artificial Sequence: Synthetic oligonucleotide
  Antisense strand to SEQ ID NO: 1983068
auuccugcugacaacgccc

SEQ ID NO: 1983070 - RNA, 19 nt, Artificial Sequence
  Description of Artificial Sequence: Synthetic oligonucleotide
  Sense strand starting at position 147 of SEQ ID NO: 1880648
gucucauccuguucuggga

SEQ ID NO: 1983071 - RNA, 19 nt, Artificial Sequence
  Description of Artificial Sequence: Synthetic oligonucleotide
  Antisense strand to SEQ ID NO: 1983070
ucccagaacaggaugagac

SEQ ID NO: 1983072 - RNA, 19 nt, Artificial Sequence
  Description of Artificial Sequence: Synthetic oligonucleotide
  Sense strand starting at position 432 of SEQ ID NO: 1880648
acccgcuuacugcaagaga

SEQ ID NO: 1983073 - RNA, 19 nt, Artificial Sequence
  Description of Artificial Sequence: Synthetic oligonucleotide
  Antisense strand to SEQ ID NO: 1983072
ucucuugcaguaagcgggu

SEQ ID NO: 1983074 - RNA, 19 nt, Artificial Sequence
  Description of Artificial Sequence: Synthetic oligonucleotide
  Sense strand starting at position 435 of SEQ ID NO: 1880648
cgcuuacugcaagagaagu

SEQ ID NO: 1983075 - RNA, 19 nt, Artificial Sequence
  Description of Artificial Sequence: Synthetic oligonucleotide
  Antisense strand to SEQ ID NO: 1983074
acuucucuugcaguaagcg

SEQ ID NO: 1983076 - RNA, 19 nt, Artificial Sequence
  Description of Artificial Sequence: Synthetic oligonucleotide
  Sense strand starting at position 539 of SEQ ID NO: 1880648
guugaaugccugggucaga

SEQ ID NO: 1983077 - RNA, 19 nt, Artificial Sequence
  Description of Artificial Sequence: Synthetic oligonucleotide
  Antisense strand to SEQ ID NO: 1983076
ucugacccaggcauucaac

SEQ ID NO: 1983078 - RNA, 19 nt, Artificial Sequence
  Description of Artificial Sequence: Synthetic oligonucleotide
  Sense strand starting at position 556 of SEQ ID NO: 1880648
gacugaguuugcugaucuu

SEQ ID NO: 1983079 - RNA, 19 nt, Artificial Sequence
  Description of Artificial Sequence: Synthetic oligonucleotide
  Antisense strand to SEQ ID NO: 1983078
aagaucagcaaacucaguc

SEQ ID NO: 1983080 - RNA, 19 nt, Artificial Sequence
  Description of Artificial Sequence: Synthetic oligonucleotide
  Sense strand starting at position 794 of SEQ ID NO: 1880648
cugucugaguucuggaaug

SEQ ID NO: 1983081 - RNA, 19 nt, Artificial Sequence
  Description of Artificial Sequence: Synthetic oligonucleotide
  Antisense strand to SEQ ID NO: 1983080
cauuccagaacucagacag

SEQ ID NO: 1983082 - RNA, 19 nt, Artificial Sequence
  Description of Artificial Sequence: Synthetic oligonucleotide
  Sense strand starting at position 796 of SEQ ID NO: 1880648
gucugaguucuggaaugua

SEQ ID NO: 1983083 - RNA, 19 nt, Artificial Sequence
  Description of Artificial Sequence: Synthetic oligonucleotide
  Antisense strand to SEQ ID NO: 1983082
uacauuccagaacucagac

SEQ ID NO: 1983084 - RNA, 19 nt, Artificial Sequence
  Description of Artificial Sequence: Synthetic oligonucleotide
  Sense strand starting at position 1392 of SEQ ID NO: 1880648
ccggacacaugaugguaau

SEQ ID NO: 1983085 - RNA, 19 nt, Artificial Sequence
  Description of Artificial Sequence: Synthetic oligonucleotide
  Antisense strand to SEQ ID NO: 1983084
auuaccaucauguguccgg

SEQ ID NO: 1983086 - RNA, 19 nt, Artificial Sequence
  Description of Artificial Sequence: Synthetic oligonucleotide
  Sense strand starting at position 1465 of SEQ ID NO: 1880648
ugagcuucccggugacaca

SEQ ID NO: 1983087 - RNA, 19 nt, Artificial Sequence
  Description of Artificial Sequence: Synthetic oligonucleotide
  Antisense strand to SEQ ID NO: 1983086
ugugucaccgggaagcuca

SEQ ID NO: 1983088 - RNA, 19 nt, Artificial Sequence
  Description of Artificial Sequence: Synthetic oligonucleotide
  Sense strand starting at position 1730 of SEQ ID NO: 1880648
ccgaaacacccguaagaua

SEQ ID NO: 1983089 - RNA, 19 nt, Artificial Sequence
  Description of Artificial Sequence: Synthetic oligonucleotide
  Antisense strand to SEQ ID NO: 1983088
uaucuuacggguguuucgg

SEQ ID NO: 1983090 - RNA, 19 nt, Artificial Sequence
  Description of Artificial Sequence: Synthetic oligonucleotide
  Sense strand starting at position 2278 of SEQ ID NO: 1880648
ggccuuucugaauggagag

SEQ ID NO: 1983091 - RNA, 19 nt, Artificial Sequence
  Description of Artificial Sequence: Synthetic oligonucleotide
  Antisense strand to SEQ ID NO: 1983090
cucuccauucagaaaggcc

SEQ ID NO: 1983092 - RNA, 19 nt, Artificial Sequence
  Description of Artificial Sequence: Synthetic oligonucleotide
  Sense strand starting at position 2769 of SEQ ID NO: 1880648
uuauuuguuuaauggcaga

SEQ ID NO: 1983093 - RNA, 19 nt, Artificial Sequence
  Description of Artificial Sequence: Synthetic oligonucleotide
  Antisense strand to SEQ ID NO: 1983092
ucugccauuaaacaaauaa

SEQ ID NO: 1983094 - RNA, 19 nt, Artificial Sequence
  Description of Artificial Sequence: Synthetic oligonucleotide
  Sense strand starting at position 2829 of SEQ ID NO: 1880648
uccugcuccucagguuaaa

SEQ ID NO: 1983095 - RNA, 19 nt, Artificial Sequence
  Description of Artificial Sequence: Synthetic oligonucleotide
  Antisense strand to SEQ ID NO: 1983094
uuuaaccugaggagcagga

SEQ ID NO: 1983096 - RNA, 19 nt, Artificial Sequence
  Description of Artificial Sequence: Synthetic oligonucleotide
  Sense strand starting at position 3027 of SEQ ID NO: 1880648
cgcaguuuccucuugguca

SEQ ID NO: 1983097 - RNA, 19 nt, Artificial Sequence
  Description of Artificial Sequence: Synthetic oligonucleotide
  Antisense strand to SEQ ID NO: 1983096
ugaccaagaggaaacugcg

SEQ ID NO: 1983098 - RNA, 19 nt, Artificial Sequence
  Description of Artificial Sequence: Synthetic oligonucleotide
  Sense strand starting at position 3028 of SEQ ID NO: 1880648
gcaguuuccucuuggucau

SEQ ID NO: 1983099 - RNA, 19 nt, Artificial Sequence
  Description of Artificial Sequence: Synthetic oligonucleotide
  Antisense strand to SEQ ID NO: 1983098
augaccaagaggaaacugc

SEQ ID NO: 1983100 - RNA, 19 nt, Artificial Sequence
  Description of Artificial Sequence: Synthetic oligonucleotide
  Sense strand starting at position 3172 of SEQ ID NO: 1880648
gagcccucccaaggagaau

SEQ ID NO: 1983101 - RNA, 19 nt, Artificial Sequence
  Description of Artificial Sequence: Synthetic oligonucleotide
  Antisense strand to SEQ ID NO: 1983100
auucuccuugggagggcuc

SEQ ID NO: 1983102 - RNA, 19 nt, Artificial Sequence
  Description of Artificial Sequence: Synthetic oligonucleotide
  Sense strand starting at position 3260 of SEQ ID NO: 1880648
gacuguaaagccggcuuua

SEQ ID NO: 1983103 - RNA, 19 nt, Artificial Sequence
  Description of Artificial Sequence: Synthetic oligonucleotide
  Antisense strand to SEQ ID NO: 1983102
uaaagccggcuuuacaguc

SEQ ID NO: 1983104 - RNA, 19 nt, Artificial Sequence
  Description of Artificial Sequence: Synthetic oligonucleotide
  Sense strand starting at position 3298 of SEQ ID NO: 1880648
ccuagacacucagugucaa

SEQ ID NO: 1983105 - RNA, 19 nt, Artificial Sequence
  Description of Artificial Sequence: Synthetic oligonucleotide
  Antisense strand to SEQ ID NO: 1983104
uugacacugagugucuagg

SEQ ID NO: 1983106 - RNA, 19 nt, Artificial Sequence
  Description of Artificial Sequence: Synthetic oligonucleotide
  Sense strand starting at position 3302 of SEQ ID NO: 1880648
gacacucagugucaacaga

SEQ ID NO: 1983107 - RNA, 19 nt, Artificial Sequence
  Description of Artificial Sequence: Synthetic oligonucleotide
  Antisense strand to SEQ ID NO: 1983106
ucuguugacacugaguguc

SEQ ID NO: 1983108 - RNA, 19 nt, Artificial Sequence
  Description of Artificial Sequence: Synthetic oligonucleotide
  Sense strand starting at position 3340 of SEQ ID NO: 1880648
ggaauuuggcguggacagu

SEQ ID NO: 1983109 - RNA, 19 nt, Artificial Sequence
  Description of Artificial Sequence: Synthetic oligonucleotide
  Antisense strand to SEQ ID NO: 1983108
acuguccacgccaaauucc

SEQ ID NO: 1983110 - RNA, 19 nt, Artificial Sequence
  Description of Artificial Sequence: Synthetic oligonucleotide
  Sense strand starting at position 150 of SEQ ID NO: 1880649
cugcccuuguccuuuauga

SEQ ID NO: 1983111 - RNA, 19 nt, Artificial Sequence
  Description of Artificial Sequence: Synthetic oligonucleotide
  Antisense strand to SEQ ID NO: 1983110
ucauaaaggacaagggcag

SEQ ID NO: 1983112 - RNA, 19 nt, Artificial Sequence
  Description of Artificial Sequence: Synthetic oligonucleotide
  Sense strand starting at position 166 of SEQ ID NO: 1880649
ugaccuuucugcuuuggga

SEQ ID NO: 1983113 - RNA, 19 nt, Artificial Sequence
  Description of Artificial Sequence: Synthetic oligonucleotide
  Antisense strand to SEQ ID NO: 1983112
ucccaaagcagaaagguca

SEQ ID NO: 1983114 - RNA, 19 nt, Artificial Sequence
  Description of Artificial Sequence: Synthetic oligonucleotide
  Sense strand starting at position 200 of SEQ ID NO: 1880649
cugauaucccugcaagcca

SEQ ID NO: 1983115 - RNA, 19 nt, Artificial Sequence
  Description of Artificial Sequence: Synthetic oligonucleotide
  Antisense strand to SEQ ID NO: 1983114
uggcuugcagggauaucag

SEQ ID NO: 1983116 - RNA, 19 nt, Artificial Sequence
  Description of Artificial Sequence: Synthetic oligonucleotide
  Sense strand starting at position 242 of SEQ ID NO: 1880649
gguugucagauugaaguuu

SEQ ID NO: 1983117 - RNA, 19 nt, Artificial Sequence
  Description of Artificial Sequence: Synthetic oligonucleotide
  Antisense strand to SEQ ID NO: 1983116
aaacuucaaucugacaacc

SEQ ID NO: 1983118 - RNA, 19 nt, Artificial Sequence
  Description of Artificial Sequence: Synthetic oligonucleotide
  Sense strand starting at position 370 of SEQ ID NO: 1880649
gaguaaucacaauaguugu

SEQ ID NO: 1983119 - RNA, 19 nt, Artificial Sequence
  Description of Artificial Sequence: Synthetic oligonucleotide
  Antisense strand to SEQ ID NO: 1983118
acaacuauugugauuacuc

SEQ ID NO: 1983120 - RNA, 19 nt, Artificial Sequence
  Description of Artificial Sequence: Synthetic oligonucleotide
  Sense strand starting at position 631 of SEQ ID NO: 1880649
ugcaauagauucucacaga

SEQ ID NO: 1983121 - RNA, 19 nt, Artificial Sequence
  Description of Artificial Sequence: Synthetic oligonucleotide
  Antisense strand to SEQ ID NO: 1983120
ucugugagaaucuauugca

SEQ ID NO: 1983122 - RNA, 19 nt, Artificial Sequence
  Description of Artificial Sequence: Synthetic oligonucleotide
  Sense strand starting at position 821 of SEQ ID NO: 1880649
gggaaccucugcucuaaag

SEQ ID NO: 1983123 - RNA, 19 nt, Artificial Sequence
  Description of Artificial Sequence: Synthetic oligonucleotide
  Antisense strand to SEQ ID NO: 1983122
cuuuagagcagagguuccc

SEQ ID NO: 1983124 - RNA, 19 nt, Artificial Sequence
  Description of Artificial Sequence: Synthetic oligonucleotide
  Sense strand starting at position 830 of SEQ ID NO: 1880649
ugcucuaaaguauguguaa

SEQ ID NO: 1983125 - RNA, 19 nt, Artificial Sequence
  Description of Artificial Sequence: Synthetic oligonucleotide
  Antisense strand to SEQ ID NO: 1983124
uuacacauacuuuagagca

SEQ ID NO: 1983126 - RNA, 19 nt, Artificial Sequence
  Description of Artificial Sequence: Synthetic oligonucleotide
  Sense strand starting at position 831 of SEQ ID NO: 1880649
gcucuaaaguauguguaau

SEQ ID NO: 1983127 - RNA, 19 nt, Artificial Sequence
  Description of Artificial Sequence: Synthetic oligonucleotide
  Antisense strand to SEQ ID NO: 1983126
auuacacauacuuuagagc

SEQ ID NO: 1983128 - RNA, 19 nt, Artificial Sequence
  Description of Artificial Sequence: Synthetic oligonucleotide
  Sense strand starting at position 833 of SEQ ID NO: 1880649
ucuaaaguauguguaauca

SEQ ID NO: 1983129 - RNA, 19 nt, Artificial Sequence
  Description of Artificial Sequence: Synthetic oligonucleotide
  Antisense strand to SEQ ID NO: 1983128
ugauuacacauacuuuaga

SEQ ID NO: 1983130 - RNA, 19 nt, Artificial Sequence
  Description of Artificial Sequence: Synthetic oligonucleotide
  Sense strand starting at position 890 of SEQ ID NO: 1880649
gaacuuacucagggucacu

SEQ ID NO: 1983131 - RNA, 19 nt, Artificial Sequence
  Description of Artificial Sequence: Synthetic oligonucleotide
  Antisense strand to SEQ ID NO: 1983130
agugacccugaguaaguuc

SEQ ID NO: 1983132 - RNA, 19 nt, Artificial Sequence
  Description of Artificial Sequence: Synthetic oligonucleotide
  Sense strand starting at position 1328 of SEQ ID NO: 1880649
gccaacugaguuuacauaa

SEQ ID NO: 1983133 - RNA, 19 nt, Artificial Sequence
  Description of Artificial Sequence: Synthetic oligonucleotide
  Antisense strand to SEQ ID NO: 1983132
uuauguaaacucaguuggc

SEQ ID NO: 1983134 - RNA, 19 nt, Artificial Sequence
  Description of Artificial Sequence: Synthetic oligonucleotide
  Sense strand starting at position 1438 of SEQ ID NO: 1880649
aggaaauagcucugauacc

SEQ ID NO: 1983135 - RNA, 19 nt, Artificial Sequence
  Description of Artificial Sequence: Synthetic oligonucleotide
  Antisense strand to SEQ ID NO: 1983134
gguaucagagcuauuuccu

SEQ ID NO: 1983136 - RNA, 19 nt, Artificial Sequence
  Description of Artificial Sequence: Synthetic oligonucleotide
  Sense strand starting at position 1942 of SEQ ID NO: 1880649
augcaacuggagugagaau

SEQ ID NO: 1983137 - RNA, 19 nt, Artificial Sequence
  Description of Artificial Sequence: Synthetic oligonucleotide
  Antisense strand to SEQ ID NO: 1983136
auucucacuccaguugcau

SEQ ID NO: 1983138 - RNA, 19 nt, Artificial Sequence
  Description of Artificial Sequence: Synthetic oligonucleotide
  Sense strand starting at position 1954 of SEQ ID NO: 1880649
ugagaauacuagcugcaga

SEQ ID NO: 1983139 - RNA, 19 nt, Artificial Sequence
  Description of Artificial Sequence: Synthetic oligonucleotide
  Antisense strand to SEQ ID NO: 1983138
ucugcagcuaguauucuca

SEQ ID NO: 1983140 - RNA, 19 nt, Artificial Sequence
  Description of Artificial Sequence: Synthetic oligonucleotide
  Sense strand starting at position 3220 of SEQ ID NO: 1880649
cuacacgugccauaaacuu

SEQ ID NO: 1983141 - RNA, 19 nt, Artificial Sequence
  Description of Artificial Sequence: Synthetic oligonucleotide
  Antisense strand to SEQ ID NO: 1983140
aaguuuauggcacguguag

SEQ ID NO: 1983142 - RNA, 19 nt, Artificial Sequence
  Description of Artificial Sequence: Synthetic oligonucleotide
  Sense strand starting at position 3226 of SEQ ID NO: 1880649
gugccauaaacuuggauga

SEQ ID NO: 1983143 - RNA, 19 nt, Artificial Sequence
  Description of Artificial Sequence: Synthetic oligonucleotide
  Antisense strand to SEQ ID NO: 1983142
ucauccaaguuuauggcac

SEQ ID NO: 1983144 - RNA, 19 nt, Artificial Sequence
  Description of Artificial Sequence: Synthetic oligonucleotide
  Sense strand starting at position 3227 of SEQ ID NO: 1880649
ugccauaaacuuggaugaa

SEQ ID NO: 1983145 - RNA, 19 nt, Artificial Sequence
  Description of Artificial Sequence: Synthetic oligonucleotide
  Antisense strand to SEQ ID NO: 1983144
uucauccaaguuuauggca

SEQ ID NO: 1983146 - RNA, 19 nt, Artificial Sequence
  Description of Artificial Sequence: Synthetic oligonucleotide
  Sense strand starting at position 3228 of SEQ ID NO: 1880649
gccauaaacuuggaugaaa

SEQ ID NO: 1983147 - RNA, 19 nt, Artificial Sequence
  Description of Artificial Sequence: Synthetic oligonucleotide
  Antisense strand to SEQ ID NO: 1983146
uuucauccaaguuuauggc

SEQ ID NO: 1983148 - RNA, 19 nt, Artificial Sequence
  Description of Artificial Sequence: Synthetic oligonucleotide
  Sense strand starting at position 3239 of SEQ ID NO: 1880649
ggaugaaauucuguaguau

SEQ ID NO: 1983149 - RNA, 19 nt, Artificial Sequence
  Description of Artificial Sequence: Synthetic oligonucleotide
  Antisense strand to SEQ ID NO: 1983148
auacuacagaauuucaucc

SEQ ID NO: 1983150 - RNA, 19 nt, Artificial Sequence
  Description of Artificial Sequence: Synthetic oligonucleotide
  Sense strand starting at position 3240 of SEQ ID NO: 1880649
gaugaaauucuguaguauu

SEQ ID NO: 1983151 - RNA, 19 nt, Artificial Sequence
  Description of Artificial Sequence: Synthetic oligonucleotide
  Antisense strand to SEQ ID NO: 1983150
aauacuacagaauuucauc

SEQ ID NO: 1983152 - RNA, 19 nt, Artificial Sequence
  Description of Artificial Sequence: Synthetic oligonucleotide
  Sense strand starting at position 3251 of SEQ ID NO: 1880649
guaguauucuuacuggauu

SEQ ID NO: 1983153 - RNA, 19 nt, Artificial Sequence
  Description of Artificial Sequence: Synthetic oligonucleotide
  Antisense strand to SEQ ID NO: 1983152
aauccaguaagaauacuac

SEQ ID NO: 1983154 - RNA, 19 nt, Artificial Sequence
  Description of Artificial Sequence: Synthetic oligonucleotide
  Sense strand starting at position 3357 of SEQ ID NO: 1880649
ggcucaucuggugaugaga

SEQ ID NO: 1983155 - RNA, 19 nt, Artificial Sequence
  Description of Artificial Sequence: Synthetic oligonucleotide
  Antisense strand to SEQ ID NO: 1983154
ucucaucaccagaugagcc

SEQ ID NO: 1983156 - RNA, 19 nt, Artificial Sequence
  Description of Artificial Sequence: Synthetic oligonucleotide
  Sense strand starting at position 3377 of SEQ ID NO: 1880649
gcuucugcuguguucuuaa

SEQ ID NO: 1983157 - RNA, 19 nt, Artificial Sequence
  Description of Artificial Sequence: Synthetic oligonucleotide
  Antisense strand to SEQ ID NO: 1983156
uuaagaacacagcagaagc

SEQ ID NO: 1983158 - RNA, 19 nt, Artificial Sequence
  Description of Artificial Sequence: Synthetic oligonucleotide
  Sense strand starting at position 3561 of SEQ ID NO: 1880649
ggugguaugucuuucuuug

SEQ ID NO: 1983159 - RNA, 19 nt, Artificial Sequence
  Description of Artificial Sequence: Synthetic oligonucleotide
  Antisense strand to SEQ ID NO: 1983158
caaagaaagacauaccacc

SEQ ID NO: 1983160 - RNA, 19 nt, Artificial Sequence
  Description of Artificial Sequence: Synthetic oligonucleotide
  Sense strand starting at position 3589 of SEQ ID NO: 1880649
ccaggaaacucagagcuaa

SEQ ID NO: 1983161 - RNA, 19 nt, Artificial Sequence
  Description of Artificial Sequence: Synthetic oligonucleotide
  Antisense strand to SEQ ID NO: 1983160
uuagcucugaguuuccugg

SEQ ID NO: 1983162 - RNA, 19 nt, Artificial Sequence
  Description of Artificial Sequence: Synthetic oligonucleotide
  Sense strand starting at position 3615 of SEQ ID NO: 1880649
ucaauuaacguaggucuua

SEQ ID NO: 1983163 - RNA, 19 nt, Artificial Sequence
  Description of Artificial Sequence: Synthetic oligonucleotide
  Antisense strand to SEQ ID NO: 1983162
uaagaccuacguuaauuga

SEQ ID NO: 1983164 - RNA, 19 nt, Artificial Sequence
  Description of Artificial Sequence: Synthetic oligonucleotide
  Sense strand starting at position 3616 of SEQ ID NO: 1880649
caauuaacguaggucuuaa

SEQ ID NO: 1983165 - RNA, 19 nt, Artificial Sequence
  Description of Artificial Sequence: Synthetic oligonucleotide
  Antisense strand to SEQ ID NO: 1983164
uuaagaccuacguuaauug

SEQ ID NO: 1983166 - RNA, 19 nt, Artificial Sequence
  Description of Artificial Sequence: Synthetic oligonucleotide
  Sense strand starting at position 3628 of SEQ ID NO: 1880649
gucuuaaucucagucuuug

SEQ ID NO: 1983167 - RNA, 19 nt, Artificial Sequence
  Description of Artificial Sequence: Synthetic oligonucleotide
  Antisense strand to SEQ ID NO: 1983166
caaagacugagauuaagac

SEQ ID NO: 1983168 - RNA, 19 nt, Artificial Sequence
  Description of Artificial Sequence: Synthetic oligonucleotide
  Sense strand starting at position 3632 of SEQ ID NO: 1880649
uaaucucagucuuugggua

SEQ ID NO: 1983169 - RNA, 19 nt, Artificial Sequence
  Description of Artificial Sequence: Synthetic oligonucleotide
  Antisense strand to SEQ ID NO: 1983168
uacccaaagacugagauua

SEQ ID NO: 1983170 - RNA, 19 nt, Artificial Sequence
  Description of Artificial Sequence: Synthetic oligonucleotide
  Sense strand starting at position 3633 of SEQ ID NO: 1880649
aaucucagucuuuggguau

SEQ ID NO: 1983171 - RNA, 19 nt, Artificial Sequence
  Description of Artificial Sequence: Synthetic oligonucleotide
  Antisense strand to SEQ ID NO: 1983170
auacccaaagacugagauu

SEQ ID NO: 1983172 - RNA, 19 nt, Artificial Sequence
  Description of Artificial Sequence: Synthetic oligonucleotide
  Sense strand starting at position 3712 of SEQ ID NO: 1880649
uuuauaguuugaucucugu

SEQ ID NO: 1983173 - RNA, 19 nt, Artificial Sequence
  Description of Artificial Sequence: Synthetic oligonucleotide
  Antisense strand to SEQ ID NO: 1983172
acagagaucaaacuauaaa

SEQ ID NO: 1983174 - RNA, 19 nt, Artificial Sequence
  Description of Artificial Sequence: Synthetic oligonucleotide
  Sense strand starting at position 3719 of SEQ ID NO: 1880649
uuugaucucugugccuuua

SEQ ID NO: 1983175 - RNA, 19 nt, Artificial Sequence
  Description of Artificial Sequence: Synthetic oligonucleotide
  Antisense strand to SEQ ID NO: 1983174
uaaaggcacagagaucaaa

SEQ ID NO: 1983176 - RNA, 19 nt, Artificial Sequence
  Description of Artificial Sequence: Synthetic oligonucleotide
  Sense strand starting at position 3800 of SEQ ID NO: 1880649
acacauguauguucuguaa

SEQ ID NO: 1983177 - RNA, 19 nt, Artificial Sequence
  Description of Artificial Sequence: Synthetic oligonucleotide
  Antisense strand to SEQ ID NO: 1983176
uuacagaacauacaugugu

SEQ ID NO: 1983178 - RNA, 19 nt, Artificial Sequence
  Description of Artificial Sequence: Synthetic oligonucleotide
  Sense strand starting at position 3804 of SEQ ID NO: 1880649
auguauguucuguaaacag

SEQ ID NO: 1983179 - RNA, 19 nt, Artificial Sequence
  Description of Artificial Sequence: Synthetic oligonucleotide
  Antisense strand to SEQ ID NO: 1983178
cuguuuacagaacauacau

SEQ ID NO: 1983180 - RNA, 19 nt, Artificial Sequence
  Description of Artificial Sequence: Synthetic oligonucleotide
  Sense strand starting at position 3842 of SEQ ID NO: 1880649
gugaauauauggguaugca

SEQ ID NO: 1983181 - RNA, 19 nt, Artificial Sequence
  Description of Artificial Sequence: Synthetic oligonucleotide
  Antisense strand to SEQ ID NO: 1983180
ugcauacccauauauucac

SEQ ID NO: 1983182 - RNA, 19 nt, Artificial Sequence
  Description of Artificial Sequence: Synthetic oligonucleotide
  Sense strand starting at position 3843 of SEQ ID NO: 1880649
ugaauauauggguaugcau

SEQ ID NO: 1983183 - RNA, 19 nt, Artificial Sequence
  Description of Artificial Sequence: Synthetic oligonucleotide
  Antisense strand to SEQ ID NO: 1983182
augcauacccauauauuca

SEQ ID NO: 1983184 - RNA, 19 nt, Artificial Sequence
  Description of Artificial Sequence: Synthetic oligonucleotide
  Sense strand starting at position 3845 of SEQ ID NO: 1880649
aauauauggguaugcauau

SEQ ID NO: 1983185 - RNA, 19 nt, Artificial Sequence
  Description of Artificial Sequence: Synthetic oligonucleotide
  Antisense strand to SEQ ID NO: 1983184
auaugcauacccauauauu

SEQ ID NO: 1983186 - RNA, 19 nt, Artificial Sequence
  Description of Artificial Sequence: Synthetic oligonucleotide
  Sense strand starting at position 3846 of SEQ ID NO: 1880649
auauauggguaugcauaua

SEQ ID NO: 1983187 - RNA, 19 nt, Artificial Sequence
  Description of Artificial Sequence: Synthetic oligonucleotide
  Antisense strand to SEQ ID NO: 1983186
uauaugcauacccauauau

SEQ ID NO: 1983188 - RNA, 19 nt, Artificial Sequence
  Description of Artificial Sequence: Synthetic oligonucleotide
  Sense strand starting at position 3927 of SEQ ID NO: 1880649
aagacuguugagugcucau

SEQ ID NO: 1983189 - RNA, 19 nt, Artificial Sequence
  Description of Artificial Sequence: Synthetic oligonucleotide
  Antisense strand to SEQ ID NO: 1983188
augagcacucaacagucuu

SEQ ID NO: 1983190 - RNA, 19 nt, Artificial Sequence
  Description of Artificial Sequence: Synthetic oligonucleotide
  Sense strand starting at position 44 of SEQ ID NO: 1880650
uguggagucccucacacua

SEQ ID NO: 1983191 - RNA, 19 nt, Artificial Sequence
  Description of Artificial Sequence: Synthetic oligonucleotide
  Antisense strand to SEQ ID NO: 1983190
uagugugagggacuccaca

SEQ ID NO: 1983192 - RNA, 19 nt, Artificial Sequence
  Description of Artificial Sequence: Synthetic oligonucleotide
  Sense strand starting at position 150 of SEQ ID NO: 1880650
cccuguugagcucaaauac

SEQ ID NO: 1983193 - RNA, 19 nt, Artificial Sequence
  Description of Artificial Sequence: Synthetic oligonucleotide
  Antisense strand to SEQ ID NO: 1983192
guauuugagcucaacaggg

SEQ ID NO: 1983194 - RNA, 19 nt, Artificial Sequence
  Description of Artificial Sequence: Synthetic oligonucleotide
  Sense strand starting at position 546 of SEQ ID NO: 1880650
agacaacauuuagaaaguu

SEQ ID NO: 1983195 - RNA, 19 nt, Artificial Sequence
  Description of Artificial Sequence: Synthetic oligonucleotide
  Antisense strand to SEQ ID NO: 1983194
aacuuucuaaauguugucu

SEQ ID NO: 1983196 - RNA, 19 nt, Artificial Sequence
  Description of Artificial Sequence: Synthetic oligonucleotide
  Sense strand starting at position 618 of SEQ ID NO: 1880650
cucuccuuaccagagguaa

SEQ ID NO: 1983197 - RNA, 19 nt, Artificial Sequence
  Description of Artificial Sequence: Synthetic oligonucleotide
  Antisense strand to SEQ ID NO: 1983196
uuaccucugguaaggagag

SEQ ID NO: 1983198 - RNA, 19 nt, Artificial Sequence
  Description of Artificial Sequence: Synthetic oligonucleotide
  Sense strand starting at position 633 of SEQ ID NO: 1880650
guaaguuauuuccuggcuu

SEQ ID NO: 1983199 - RNA, 19 nt, Artificial Sequence
  Description of Artificial Sequence: Synthetic oligonucleotide
  Antisense strand to SEQ ID NO: 1983198
aagccaggaaauaacuuac

SEQ ID NO: 1983200 - RNA, 19 nt, Artificial Sequence
  Description of Artificial Sequence: Synthetic oligonucleotide
  Sense strand starting at position 679 of SEQ ID NO: 1880650
gugaauaacuaguucucaa

SEQ ID NO: 1983201 - RNA, 19 nt, Artificial Sequence
  Description of Artificial Sequence: Synthetic oligonucleotide
  Antisense strand to SEQ ID NO: 1983200
uugagaacuaguuauucac

SEQ ID NO: 1983202 - RNA, 19 nt, Artificial Sequence
  Description of Artificial Sequence: Synthetic oligonucleotide
  Sense strand starting at position 719 of SEQ ID NO: 1880650
aucaauuucuggcaaggaa

SEQ ID NO: 1983203 - RNA, 19 nt, Artificial Sequence
  Description of Artificial Sequence: Synthetic oligonucleotide
  Antisense strand to SEQ ID NO: 1983202
uuccuugccagaaauugau

SEQ ID NO: 1983204 - RNA, 19 nt, Artificial Sequence
  Description of Artificial Sequence: Synthetic oligonucleotide
  Sense strand starting at position 1113 of SEQ ID NO: 1880650
agacuucucuuucugagga

SEQ ID NO: 1983205 - RNA, 19 nt, Artificial Sequence
  Description of Artificial Sequence: Synthetic oligonucleotide
  Antisense strand to SEQ ID NO: 1983204
uccucagaaagagaagucu

SEQ ID NO: 1983206 - RNA, 19 nt, Artificial Sequence
  Description of Artificial Sequence: Synthetic oligonucleotide
  Sense strand starting at position 1118 of SEQ ID NO: 1880650
ucucuuucugaggauaccu

SEQ ID NO: 1983207 - RNA, 19 nt, Artificial Sequence
  Description of Artificial Sequence: Synthetic oligonucleotide
  Antisense strand to SEQ ID NO: 1983206
agguauccucagaaagaga

SEQ ID NO: 1983208 - RNA, 19 nt, Artificial Sequence
  Description of Artificial Sequence: Synthetic oligonucleotide
  Sense strand starting at position 1151 of SEQ ID NO: 1880650
cagucaagaccuuggaaau

SEQ ID NO: 1983209 - RNA, 19 nt, Artificial Sequence
  Description of Artificial Sequence: Synthetic oligonucleotide
  Antisense strand to SEQ ID NO: 1983208
auuuccaaggucuugacug

SEQ ID NO: 1983210 - RNA, 19 nt, Artificial Sequence
  Description of Artificial Sequence: Synthetic oligonucleotide
  Sense strand starting at position 1261 of SEQ ID NO: 1880650
gaagauaacuggccuugau

SEQ ID NO: 1983211 - RNA, 19 nt, Artificial Sequence
  Description of Artificial Sequence: Synthetic oligonucleotide
  Antisense strand to SEQ ID NO: 1983210
aucaaggccaguuaucuuc

SEQ ID NO: 1983212 - RNA, 19 nt, Artificial Sequence
  Description of Artificial Sequence: Synthetic oligonucleotide
  Sense strand starting at position 1328 of SEQ ID NO: 1880650
gauuaucuguuuccaggga

SEQ ID NO: 1983213 - RNA, 19 nt, Artificial Sequence
  Description of Artificial Sequence: Synthetic oligonucleotide
  Antisense strand to SEQ ID NO: 1983212
ucccuggaaacagauaauc

SEQ ID NO: 1983214 - RNA, 19 nt, Artificial Sequence
  Description of Artificial Sequence: Synthetic oligonucleotide
  Sense strand starting at position 1332 of SEQ ID NO: 1880650
aucuguuuccagggaucac

SEQ ID NO: 1983215 - RNA, 19 nt, Artificial Sequence
  Description of Artificial Sequence: Synthetic oligonucleotide
  Antisense strand to SEQ ID NO: 1983214
gugaucccuggaaacagau

SEQ ID NO: 1983216 - RNA, 19 nt, Artificial Sequence
  Description of Artificial Sequence: Synthetic oligonucleotide
  Sense strand starting at position 1352 of SEQ ID NO: 1880650
gagaauuagaguuggguac

SEQ ID NO: 1983217 - RNA, 19 nt, Artificial Sequence
  Description of Artificial Sequence: Synthetic oligonucleotide
  Antisense strand to SEQ ID NO: 1983216
guacccaacucuaauucuc

SEQ ID NO: 1983218 - RNA, 19 nt, Artificial Sequence
  Description of Artificial Sequence: Synthetic oligonucleotide
  Sense strand starting at position 1353 of SEQ ID NO: 1880650
agaauuagaguuggguaca

SEQ ID NO: 1983219 - RNA, 19 nt, Artificial Sequence
  Description of Artificial Sequence: Synthetic oligonucleotide
  Antisense strand to SEQ ID NO: 1983218
uguacccaacucuaauucu

SEQ ID NO: 1983220 - RNA, 19 nt, Artificial Sequence
  Description of Artificial Sequence: Synthetic oligonucleotide
  Sense strand starting at position 1402 of SEQ ID NO: 1880650
agccauaguugauucuaaa

SEQ ID NO: 1983221 - RNA, 19 nt, Artificial Sequence
  Description of Artificial Sequence: Synthetic oligonucleotide
  Antisense strand to SEQ ID NO: 1983220
uuuagaaucaacuauggcu

SEQ ID NO: 1983222 - RNA, 19 nt, Artificial Sequence
  Description of Artificial Sequence: Synthetic oligonucleotide
  Sense strand starting at position 1437 of SEQ ID NO: 1880650
ggcagaugaaugugaaaca

SEQ ID NO: 1983223 - RNA, 19 nt, Artificial Sequence
  Description of Artificial Sequence: Synthetic oligonucleotide
  Antisense strand to SEQ ID NO: 1983222
uguuucacauucaucugcc

SEQ ID NO: 1983224 - RNA, 19 nt, Artificial Sequence
  Description of Artificial Sequence: Synthetic oligonucleotide
  Sense strand starting at position 1788 of SEQ ID NO: 1880650
agagguugagcaugaaaca

SEQ ID NO: 1983225 - RNA, 19 nt, Artificial Sequence
  Description of Artificial Sequence: Synthetic oligonucleotide
  Antisense strand to SEQ ID NO: 1983224
uguuucaugcucaaccucu

SEQ ID NO: 1983226 - RNA, 19 nt, Artificial Sequence
  Description of Artificial Sequence: Synthetic oligonucleotide
  Sense strand starting at position 1830 of SEQ ID NO: 1880650
cgucuuggucaugaaauag

SEQ ID NO: 1983227 - RNA, 19 nt, Artificial Sequence
  Description of Artificial Sequence: Synthetic oligonucleotide
  Antisense strand to SEQ ID NO: 1983226
cuauuucaugaccaagacg

SEQ ID NO: 1983228 - RNA, 19 nt, Artificial Sequence
  Description of Artificial Sequence: Synthetic oligonucleotide
  Sense strand starting at position 1889 of SEQ ID NO: 1880650
auucgugagggcuaggaaa

SEQ ID NO: 1983229 - RNA, 19 nt, Artificial Sequence
  Description of Artificial Sequence: Synthetic oligonucleotide
  Antisense strand to SEQ ID NO: 1983228
uuuccuagcccucacgaau

SEQ ID NO: 1983230 - RNA, 19 nt, Artificial Sequence
  Description of Artificial Sequence: Synthetic oligonucleotide
  Sense strand starting at position 1934 of SEQ ID NO: 1880650
accacugugagggauugua

SEQ ID NO: 1983231 - RNA, 19 nt, Artificial Sequence
  Description of Artificial Sequence: Synthetic oligonucleotide
  Antisense strand to SEQ ID NO: 1983230
uacaaucccucacaguggu

SEQ ID NO: 1983232 - RNA, 19 nt, Artificial Sequence
  Description of Artificial Sequence: Synthetic oligonucleotide
  Sense strand starting at position 2002 of SEQ ID NO: 1880650
guguuagaccugcaagaga

SEQ ID NO: 1983233 - RNA, 19 nt, Artificial Sequence
  Description of Artificial Sequence: Synthetic oligonucleotide
  Antisense strand to SEQ ID NO: 1983232
ucucuugcaggucuaacac

SEQ ID NO: 1983234 - RNA, 19 nt, Artificial Sequence
  Description of Artificial Sequence: Synthetic oligonucleotide
  Sense strand starting at position 2397 of SEQ ID NO: 1880650
aaguaaugaccguauacuc

SEQ ID NO: 1983235 - RNA, 19 nt, Artificial Sequence
  Description of Artificial Sequence: Synthetic oligonucleotide
  Antisense strand to SEQ ID NO: 1983234
gaguauacggucauuacuu

SEQ ID NO: 1983236 - RNA, 19 nt, Artificial Sequence
  Description of Artificial Sequence: Synthetic oligonucleotide
  Sense strand starting at position 2405 of SEQ ID NO: 1880650
accguauacucaccaaaug

SEQ ID NO: 1983237 - RNA, 19 nt, Artificial Sequence
  Description of Artificial Sequence: Synthetic oligonucleotide
  Antisense strand to SEQ ID NO: 1983236
cauuuggugaguauacggu

SEQ ID NO: 1983238 - RNA, 19 nt, Artificial Sequence
  Description of Artificial Sequence: Synthetic oligonucleotide
  Sense strand starting at position 2509 of SEQ ID NO: 1880650
gugagacugagccaugauc

SEQ ID NO: 1983239 - RNA, 19 nt, Artificial Sequence
  Description of Artificial Sequence: Synthetic oligonucleotide
  Antisense strand to SEQ ID NO: 1983238
gaucauggcucagucucac

SEQ ID NO: 1983240 - RNA, 19 nt, Artificial Sequence
  Description of Artificial Sequence: Synthetic oligonucleotide
  Sense strand starting at position 2511 of SEQ ID NO: 1880650
gagacugagccaugaucua

SEQ ID NO: 1983241 - RNA, 19 nt, Artificial Sequence
  Description of Artificial Sequence: Synthetic oligonucleotide
  Antisense strand to SEQ ID NO: 1983240
uagaucauggcucagucuc

SEQ ID NO: 1983242 - RNA, 19 nt, Artificial Sequence
  Description of Artificial Sequence: Synthetic oligonucleotide
  Sense strand starting at position 2551 of SEQ ID NO: 1880650
gggcuaaucaaugguaaga

SEQ ID NO: 1983243 - RNA, 19 nt, Artificial Sequence
  Description of Artificial Sequence: Synthetic oligonucleotide
  Antisense strand to SEQ ID NO: 1983242
ucuuaccauugauuagccc

SEQ ID NO: 1983244 - RNA, 19 nt, Artificial Sequence
  Description of Artificial Sequence: Synthetic oligonucleotide
  Sense strand starting at position 2594 of SEQ ID NO: 1880650
aggaaacgcccucagaguu

SEQ ID NO: 1983245 - RNA, 19 nt, Artificial Sequence
  Description of Artificial Sequence: Synthetic oligonucleotide
  Antisense strand to SEQ ID NO: 1983244
aacucugagggcguuuccu

SEQ ID NO: 1983246 - RNA, 19 nt, Artificial Sequence
  Description of Artificial Sequence: Synthetic oligonucleotide
  Sense strand starting at position 2845 of SEQ ID NO: 1880650
cugagaauccaaugagcug

SEQ ID NO: 1983247 - RNA, 19 nt, Artificial Sequence
  Description of Artificial Sequence: Synthetic oligonucleotide
  Antisense strand to SEQ ID NO: 1983246
cagcucauuggauucucag

SEQ ID NO: 1983248 - RNA, 19 nt, Artificial Sequence
  Description of Artificial Sequence: Synthetic oligonucleotide
  Sense strand starting at position 3146 of SEQ ID NO: 1880650
agcaucugauguuuaauaa

SEQ ID NO: 1983249 - RNA, 19 nt, Artificial Sequence
  Description of Artificial Sequence: Synthetic oligonucleotide
  Antisense strand to SEQ ID NO: 1983248
uuauuaaacaucagaugcu

SEQ ID NO: 1983250 - RNA, 19 nt, Artificial Sequence
  Description of Artificial Sequence: Synthetic oligonucleotide
  Sense strand starting at position 3147 of SEQ ID NO: 1880650
gcaucugauguuuaauaag

SEQ ID NO: 1983251 - RNA, 19 nt, Artificial Sequence
  Description of Artificial Sequence: Synthetic oligonucleotide
  Antisense strand to SEQ ID NO: 1983250
cuuauuaaacaucagaugc

SEQ ID NO: 1983252 - RNA, 19 nt, Artificial Sequence
  Description of Artificial Sequence: Synthetic oligonucleotide
  Sense strand starting at position 3191 of SEQ ID NO: 1880650
aaucaaauguuuguugaag

SEQ ID NO: 1983253 - RNA, 19 nt, Artificial Sequence
  Description of Artificial Sequence: Synthetic oligonucleotide
  Antisense strand to SEQ ID NO: 1983252
cuucaacaaacauuugauu

SEQ ID NO: 1983254 - RNA, 19 nt, Artificial Sequence
  Description of Artificial Sequence: Synthetic oligonucleotide
  Sense strand starting at position 3240 of SEQ ID NO: 1880650
guccuuuaauaauugagac

SEQ ID NO: 1983255 - RNA, 19 nt, Artificial Sequence
  Description of Artificial Sequence: Synthetic oligonucleotide
  Antisense strand to SEQ ID NO: 1983254
gucucaauuauuaaaggac

SEQ ID NO: 1983256 - RNA, 19 nt, Artificial Sequence
  Description of Artificial Sequence: Synthetic oligonucleotide
  Sense strand starting at position 3265 of SEQ ID NO: 1880650
caauuaagagagugguaau

SEQ ID NO: 1983257 - RNA, 19 nt, Artificial Sequence
  Description of Artificial Sequence: Synthetic oligonucleotide
  Antisense strand to SEQ ID NO: 1983256
auuaccacucucuuaauug

SEQ ID NO: 1983258 - RNA, 19 nt, Artificial Sequence
  Description of Artificial Sequence: Synthetic oligonucleotide
  Sense strand starting at position 3423 of SEQ ID NO: 1880650
augucucaucauuaggauu

SEQ ID NO: 1983259 - RNA, 19 nt, Artificial Sequence
  Description of Artificial Sequence: Synthetic oligonucleotide
  Antisense strand to SEQ ID NO: 1983258
aauccuaaugaugagacau

SEQ ID NO: 1983260 - RNA, 19 nt, Artificial Sequence
  Description of Artificial Sequence: Synthetic oligonucleotide
  Sense strand starting at position 3477 of SEQ ID NO: 1880650
gagucaaauugcucaggau

SEQ ID NO: 1983261 - RNA, 19 nt, Artificial Sequence
  Description of Artificial Sequence: Synthetic oligonucleotide
  Antisense strand to SEQ ID NO: 1983260
auccugagcaauuugacuc

SEQ ID NO: 1983262 - RNA, 19 nt, Artificial Sequence
  Description of Artificial Sequence: Synthetic oligonucleotide
  Sense strand starting at position 3478 of SEQ ID NO: 1880650
agucaaauugcucaggauu

SEQ ID NO: 1983263 - RNA, 19 nt, Artificial Sequence
  Description of Artificial Sequence: Synthetic oligonucleotide
  Antisense strand to SEQ ID NO: 1983262
aauccugagcaauuugacu

SEQ ID NO: 1983264 - RNA, 19 nt, Artificial Sequence
  Description of Artificial Sequence: Synthetic oligonucleotide
  Sense strand starting at position 3704 of SEQ ID NO: 1880650
gggaacaucauaugcugau

SEQ ID NO: 1983265 - RNA, 19 nt, Artificial Sequence
  Description of Artificial Sequence: Synthetic oligonucleotide
  Antisense strand to SEQ ID NO: 1983264
aucagcauaugauguuccc

SEQ ID NO: 1983266 - RNA, 19 nt, Artificial Sequence
  Description of Artificial Sequence: Synthetic oligonucleotide
  Sense strand starting at position 3871 of SEQ ID NO: 1880650
ggaagaaacugauacaaag

SEQ ID NO: 1983267 - RNA, 19 nt, Artificial Sequence
  Description of Artificial Sequence: Synthetic oligonucleotide
  Antisense strand to SEQ ID NO: 1983266
cuuuguaucaguuucuucc

SEQ ID NO: 1983268 - RNA, 19 nt, Artificial Sequence
  Description of Artificial Sequence: Synthetic oligonucleotide
  Sense strand starting at position 3906 of SEQ ID NO: 1880650
gcuauauuaauguggauag

SEQ ID NO: 1983269 - RNA, 19 nt, Artificial Sequence
  Description of Artificial Sequence: Synthetic oligonucleotide
  Antisense strand to SEQ ID NO: 1983268
cuauccacauuaauauagc

SEQ ID NO: 1983270 - RNA, 19 nt, Artificial Sequence
  Description of Artificial Sequence: Synthetic oligonucleotide
  Sense strand starting at position 99 of SEQ ID NO: 1880651
uucacuggguuugugagaa

SEQ ID NO: 1983271 - RNA, 19 nt, Artificial Sequence
  Description of Artificial Sequence: Synthetic oligonucleotide
  Antisense strand to SEQ ID NO: 1983270
uucucacaaacccagugaa

SEQ ID NO: 1983272 - RNA, 19 nt, Artificial Sequence
  Description of Artificial Sequence: Synthetic oligonucleotide
  Sense strand starting at position 350 of SEQ ID NO: 1880651
ggagcuucugauuagcaau

SEQ ID NO: 1983273 - RNA, 19 nt, Artificial Sequence
  Description of Artificial Sequence: Synthetic oligonucleotide
  Antisense strand to SEQ ID NO: 1983272
auugcuaaucagaagcucc

SEQ ID NO: 1983274 - RNA, 19 nt, Artificial Sequence
  Description of Artificial Sequence: Synthetic oligonucleotide
  Sense strand starting at position 579 of SEQ ID NO: 1880651
uuauaaucugagugaguug

SEQ ID NO: 1983275 - RNA, 19 nt, Artificial Sequence
  Description of Artificial Sequence: Synthetic oligonucleotide
  Antisense strand to SEQ ID NO: 1983274
caacucacucagauuauaa

SEQ ID NO: 1983276 - RNA, 19 nt, Artificial Sequence
  Description of Artificial Sequence: Synthetic oligonucleotide
  Sense strand starting at position 582 of SEQ ID NO: 1880651
uaaucugagugaguugaca

SEQ ID NO: 1983277 - RNA, 19 nt, Artificial Sequence
  Description of Artificial Sequence: Synthetic oligonucleotide
  Antisense strand to SEQ ID NO: 1983276
ugucaacucacucagauua

SEQ ID NO: 1983278 - RNA, 19 nt, Artificial Sequence
  Description of Artificial Sequence: Synthetic oligonucleotide
  Sense strand starting at position 584 of SEQ ID NO: 1880651
aucugagugaguugacauu

SEQ ID NO: 1983279 - RNA, 19 nt, Artificial Sequence
  Description of Artificial Sequence: Synthetic oligonucleotide
  Antisense strand to SEQ ID NO: 1983278
aaugucaacucacucagau

SEQ ID NO: 1983280 - RNA, 19 nt, Artificial Sequence
  Description of Artificial Sequence: Synthetic oligonucleotide
  Sense strand starting at position 664 of SEQ ID NO: 1880651
uggugugguccagaaauaa

SEQ ID NO: 1983281 - RNA, 19 nt, Artificial Sequence
  Description of Artificial Sequence: Synthetic oligonucleotide
  Antisense strand to SEQ ID NO: 1983280
uuauuucuggaccacacca

SEQ ID NO: 1983282 - RNA, 19 nt, Artificial Sequence
  Description of Artificial Sequence: Synthetic oligonucleotide
  Sense strand starting at position 1136 of SEQ ID NO: 1880651
cucugugugcagucuaagu

SEQ ID NO: 1983283 - RNA, 19 nt, Artificial Sequence
  Description of Artificial Sequence: Synthetic oligonucleotide
  Antisense strand to SEQ ID NO: 1983282
acuuagacugcacacagag

SEQ ID NO: 1983284 - RNA, 19 nt, Artificial Sequence
  Description of Artificial Sequence: Synthetic oligonucleotide
  Sense strand starting at position 1144 of SEQ ID NO: 1880651
gcagucuaagugcauauuu

SEQ ID NO: 1983285 - RNA, 19 nt, Artificial Sequence
  Description of Artificial Sequence: Synthetic oligonucleotide
  Antisense strand to SEQ ID NO: 1983284
aaauaugcacuuagacugc

SEQ ID NO: 1983286 - RNA, 19 nt, Artificial Sequence
  Description of Artificial Sequence: Synthetic oligonucleotide
  Sense strand starting at position 1165 of SEQ ID NO: 1880651
ugcucuuaggaauaacuuu

SEQ ID NO: 1983287 - RNA, 19 nt, Artificial Sequence
  Description of Artificial Sequence: Synthetic oligonucleotide
  Antisense strand to SEQ ID NO: 1983286
aaaguuauuccuaagagca

SEQ ID NO: 1983288 - RNA, 19 nt, Artificial Sequence
  Description of Artificial Sequence: Synthetic oligonucleotide
  Sense strand starting at position 1229 of SEQ ID NO: 1880651
uggcucaugacuugaauga

SEQ ID NO: 1983289 - RNA, 19 nt, Artificial Sequence
  Description of Artificial Sequence: Synthetic oligonucleotide
  Antisense strand to SEQ ID NO: 1983288
ucauucaagucaugagcca

SEQ ID NO: 1983290 - RNA, 19 nt, Artificial Sequence
  Description of Artificial Sequence: Synthetic oligonucleotide
  Sense strand starting at position 1242 of SEQ ID NO: 1880651
gaaugaugucaguacccuu

SEQ ID NO: 1983291 - RNA, 19 nt, Artificial Sequence
  Description of Artificial Sequence: Synthetic oligonucleotide
  Antisense strand to SEQ ID NO: 1983290
aaggguacugacaucauuc

SEQ ID NO: 1983292 - RNA, 19 nt, Artificial Sequence
  Description of Artificial Sequence: Synthetic oligonucleotide
  Sense strand starting at position 1334 of SEQ ID NO: 1880651
aguacaucugagcaauucu

SEQ ID NO: 1983293 - RNA, 19 nt, Artificial Sequence
  Description of Artificial Sequence: Synthetic oligonucleotide
  Antisense strand to SEQ ID NO: 1983292
agaauugcucagauguacu

SEQ ID NO: 1983294 - RNA, 19 nt, Artificial Sequence
  Description of Artificial Sequence: Synthetic oligonucleotide
  Sense strand starting at position 1428 of SEQ ID NO: 1880651
uuagaaauguauucuagac

SEQ ID NO: 1983295 - RNA, 19 nt, Artificial Sequence
  Description of Artificial Sequence: Synthetic oligonucleotide
  Antisense strand to SEQ ID NO: 1983294
gucuagaauacauuucuaa

SEQ ID NO: 1983296 - RNA, 19 nt, Artificial Sequence
  Description of Artificial Sequence: Synthetic oligonucleotide
  Sense strand starting at position 1537 of SEQ ID NO: 1880651
uugagcaugaaucggaauu

SEQ ID NO: 1983297 - RNA, 19 nt, Artificial Sequence
  Description of Artificial Sequence: Synthetic oligonucleotide
  Antisense strand to SEQ ID NO: 1983296
aauuccgauucaugcucaa

SEQ ID NO: 1983298 - RNA, 19 nt, Artificial Sequence
  Description of Artificial Sequence: Synthetic oligonucleotide
  Sense strand starting at position 1538 of SEQ ID NO: 1880651
ugagcaugaaucggaauua

SEQ ID NO: 1983299 - RNA, 19 nt, Artificial Sequence
  Description of Artificial Sequence: Synthetic oligonucleotide
  Antisense strand to SEQ ID NO: 1983298
uaauuccgauucaugcuca

SEQ ID NO: 1983300 - RNA, 19 nt, Artificial Sequence
  Description of Artificial Sequence: Synthetic oligonucleotide
  Sense strand starting at position 1549 of SEQ ID NO: 1880651
cggaauuaccuggaaagcu

SEQ ID NO: 1983301 - RNA, 19 nt, Artificial Sequence
  Description of Artificial Sequence: Synthetic oligonucleotide
  Antisense strand to SEQ ID NO: 1983300
agcuuuccagguaauuccg

SEQ ID NO: 1983302 - RNA, 19 nt, Artificial Sequence
  Description of Artificial Sequence: Synthetic oligonucleotide
  Sense strand starting at position 1783 of SEQ ID NO: 1880651
gucaccuugguuuagaaga

SEQ ID NO: 1983303 - RNA, 19 nt, Artificial Sequence
  Description of Artificial Sequence: Synthetic oligonucleotide
  Antisense strand to SEQ ID NO: 1983302
ucuucuaaaccaaggugac

SEQ ID NO: 1983304 - RNA, 19 nt, Artificial Sequence
  Description of Artificial Sequence: Synthetic oligonucleotide
  Sense strand starting at position 1939 of SEQ ID NO: 1880651
acggguaagugugugauuu

SEQ ID NO: 1983305 - RNA, 19 nt, Artificial Sequence
  Description of Artificial Sequence: Synthetic oligonucleotide
  Antisense strand to SEQ ID NO: 1983304
aaaucacacacuuacccgu

SEQ ID NO: 1983306 - RNA, 19 nt, Artificial Sequence
  Description of Artificial Sequence: Synthetic oligonucleotide
  Sense strand starting at position 1940 of SEQ ID NO: 1880651
cggguaagugugugauuuc

SEQ ID NO: 1983307 - RNA, 19 nt, Artificial Sequence
  Description of Artificial Sequence: Synthetic oligonucleotide
  Antisense strand to SEQ ID NO: 1983306
gaaaucacacacuuacccg

SEQ ID NO: 1983308 - RNA, 19 nt, Artificial Sequence
  Description of Artificial Sequence: Synthetic oligonucleotide
  Sense strand starting at position 2108 of SEQ ID NO: 1880651
ggaaguaggaguuauagcu

SEQ ID NO: 1983309 - RNA, 19 nt, Artificial Sequence
  Description of Artificial Sequence: Synthetic oligonucleotide
  Antisense strand to SEQ ID NO: 1983308
agcuauaacuccuacuucc

SEQ ID NO: 1983310 - RNA, 19 nt, Artificial Sequence
  Description of Artificial Sequence: Synthetic oligonucleotide
  Sense strand starting at position 2114 of SEQ ID NO: 1880651
aggaguuauagcugggauu

SEQ ID NO: 1983311 - RNA, 19 nt, Artificial Sequence
  Description of Artificial Sequence: Synthetic oligonucleotide
  Antisense strand to SEQ ID NO: 1983310
aaucccagcuauaacuccu

SEQ ID NO: 1983312 - RNA, 19 nt, Artificial Sequence
  Description of Artificial Sequence: Synthetic oligonucleotide
  Sense strand starting at position 2128 of SEQ ID NO: 1880651
ggauucagauaggugcaua

SEQ ID NO: 1983313 - RNA, 19 nt, Artificial Sequence
  Description of Artificial Sequence: Synthetic oligonucleotide
  Antisense strand to SEQ ID NO: 1983312
uaugcaccuaucugaaucc

SEQ ID NO: 1983314 - RNA, 19 nt, Artificial Sequence
  Description of Artificial Sequence: Synthetic oligonucleotide
  Sense strand starting at position 2248 of SEQ ID NO: 1880651
aguauaccuuggucaugga

SEQ ID NO: 1983315 - RNA, 19 nt, Artificial Sequence
  Description of Artificial Sequence: Synthetic oligonucleotide
  Antisense strand to SEQ ID NO: 1983314
uccaugaccaagguauacu

SEQ ID NO: 1983316 - RNA, 19 nt, Artificial Sequence
  Description of Artificial Sequence: Synthetic oligonucleotide
  Sense strand starting at position 2249 of SEQ ID NO: 1880651
guauaccuuggucauggaa

SEQ ID NO: 1983317 - RNA, 19 nt, Artificial Sequence
  Description of Artificial Sequence: Synthetic oligonucleotide
  Antisense strand to SEQ ID NO: 1983316
uuccaugaccaagguauac

SEQ ID NO: 1983318 - RNA, 19 nt, Artificial Sequence
  Description of Artificial Sequence: Synthetic oligonucleotide
  Sense strand starting at position 2252 of SEQ ID NO: 1880651
uaccuuggucauggaagaa

SEQ ID NO: 1983319 - RNA, 19 nt, Artificial Sequence
  Description of Artificial Sequence: Synthetic oligonucleotide
  Antisense strand to SEQ ID NO: 1983318
uucuuccaugaccaaggua

SEQ ID NO: 1983320 - RNA, 19 nt, Artificial Sequence
  Description of Artificial Sequence: Synthetic oligonucleotide
  Sense strand starting at position 2373 of SEQ ID NO: 1880651
auggucaauccagguaaau

SEQ ID NO: 1983321 - RNA, 19 nt, Artificial Sequence
  Description of Artificial Sequence: Synthetic oligonucleotide
  Antisense strand to SEQ ID NO: 1983320
auuuaccuggauugaccau

SEQ ID NO: 1983322 - RNA, 19 nt, Artificial Sequence
  Description of Artificial Sequence: Synthetic oligonucleotide
  Sense strand starting at position 2412 of SEQ ID NO: 1880651
uuuaucuaacguuagacuu

SEQ ID NO: 1983323 - RNA, 19 nt, Artificial Sequence
  Description of Artificial Sequence: Synthetic oligonucleotide
  Antisense strand to SEQ ID NO: 1983322
aagucuaacguuagauaaa

SEQ ID NO: 1983324 - RNA, 19 nt, Artificial Sequence
  Description of Artificial Sequence: Synthetic oligonucleotide
  Sense strand starting at position 2588 of SEQ ID NO: 1880651
uuuaaagugcuggaauaau

SEQ ID NO: 1983325 - RNA, 19 nt, Artificial Sequence
  Description of Artificial Sequence: Synthetic oligonucleotide
  Antisense strand to SEQ ID NO: 1983324
auuauuccagcacuuuaaa

SEQ ID NO: 1983326 - RNA, 19 nt, Artificial Sequence
  Description of Artificial Sequence: Synthetic oligonucleotide
  Sense strand starting at position 2598 of SEQ ID NO: 1880651
uggaauaaugcaugauaug

SEQ ID NO: 1983327 - RNA, 19 nt, Artificial Sequence
  Description of Artificial Sequence: Synthetic oligonucleotide
  Antisense strand to SEQ ID NO: 1983326
cauaucaugcauuauucca

SEQ ID NO: 1983328 - RNA, 19 nt, Artificial Sequence
  Description of Artificial Sequence: Synthetic oligonucleotide
  Sense strand starting at position 2777 of SEQ ID NO: 1880651
ggaauaauuccuggccuau

SEQ ID NO: 1983329 - RNA, 19 nt, Artificial Sequence
  Description of Artificial Sequence: Synthetic oligonucleotide
  Antisense strand to SEQ ID NO: 1983328
auaggccaggaauuauucc

SEQ ID NO: 1983330 - RNA, 19 nt, Artificial Sequence
  Description of Artificial Sequence: Synthetic oligonucleotide
  Sense strand starting at position 2908 of SEQ ID NO: 1880651
uugauauuacagugacauu

SEQ ID NO: 1983331 - RNA, 19 nt, Artificial Sequence
  Description of Artificial Sequence: Synthetic oligonucleotide
  Antisense strand to SEQ ID NO: 1983330
aaugucacuguaauaucaa

SEQ ID NO: 1983332 - RNA, 19 nt, Artificial Sequence
  Description of Artificial Sequence: Synthetic oligonucleotide
  Sense strand starting at position 3023 of SEQ ID NO: 1880651
uguaauacuugguuuagga

SEQ ID NO: 1983333 - RNA, 19 nt, Artificial Sequence
  Description of Artificial Sequence: Synthetic oligonucleotide
  Antisense strand to SEQ ID NO: 1983332
uccuaaaccaaguauuaca

SEQ ID NO: 1983334 - RNA, 19 nt, Artificial Sequence
  Description of Artificial Sequence: Synthetic oligonucleotide
  Sense strand starting at position 3025 of SEQ ID NO: 1880651
uaauacuugguuuaggagu

SEQ ID NO: 1983335 - RNA, 19 nt, Artificial Sequence
  Description of Artificial Sequence: Synthetic oligonucleotide
  Antisense strand to SEQ ID NO: 1983334
acuccuaaaccaaguauua

SEQ ID NO: 1983336 - RNA, 19 nt, Artificial Sequence
  Description of Artificial Sequence: Synthetic oligonucleotide
  Sense strand starting at position 3031 of SEQ ID NO: 1880651
uugguuuaggaguagauua

SEQ ID NO: 1983337 - RNA, 19 nt, Artificial Sequence
  Description of Artificial Sequence: Synthetic oligonucleotide
  Antisense strand to SEQ ID NO: 1983336
uaaucuacuccuaaaccaa

SEQ ID NO: 1983338 - RNA, 19 nt, Artificial Sequence
  Description of Artificial Sequence: Synthetic oligonucleotide
  Sense strand starting at position 3171 of SEQ ID NO: 1880651
aggguugauuauguuuaca

SEQ ID NO: 1983339 - RNA, 19 nt, Artificial Sequence
  Description of Artificial Sequence: Synthetic oligonucleotide
  Antisense strand to SEQ ID NO: 1983338
uguaaacauaaucaacccu

SEQ ID NO: 1983340 - RNA, 19 nt, Artificial Sequence
  Description of Artificial Sequence: Synthetic oligonucleotide
  Sense strand starting at position 3174 of SEQ ID NO: 1880651
guugauuauguuuacacua

SEQ ID NO: 1983341 - RNA, 19 nt, Artificial Sequence
  Description of Artificial Sequence: Synthetic oligonucleotide
  Antisense strand to SEQ ID NO: 1983340
uaguguaaacauaaucaac

SEQ ID NO: 1983342 - RNA, 19 nt, Artificial Sequence
  Description of Artificial Sequence: Synthetic oligonucleotide
  Sense strand starting at position 3194 of SEQ ID NO: 1880651
acaacacagugucuugauu

SEQ ID NO: 1983343 - RNA, 19 nt, Artificial Sequence
  Description of Artificial Sequence: Synthetic oligonucleotide
  Antisense strand to SEQ ID NO: 1983342
aaucaagacacuguguugu

SEQ ID NO: 1983344 - RNA, 19 nt, Artificial Sequence
  Description of Artificial Sequence: Synthetic oligonucleotide
  Sense strand starting at position 3264 of SEQ ID NO: 1880651
gcguccucucaauugcauu

SEQ ID NO: 1983345 - RNA, 19 nt, Artificial Sequence
  Description of Artificial Sequence: Synthetic oligonucleotide
  Antisense strand to SEQ ID NO: 1983344
aaugcaauugagaggacgc

SEQ ID NO: 1983346 - RNA, 19 nt, Artificial Sequence
  Description of Artificial Sequence: Synthetic oligonucleotide
  Sense strand starting at position 3400 of SEQ ID NO: 1880651
auaauugcagcuuagaaag

SEQ ID NO: 1983347 - RNA, 19 nt, Artificial Sequence
  Description of Artificial Sequence: Synthetic oligonucleotide
  Antisense strand to SEQ ID NO: 1983346
cuuucuaagcugcaauuau

SEQ ID NO: 1983348 - RNA, 19 nt, Artificial Sequence
  Description of Artificial Sequence: Synthetic oligonucleotide
  Sense strand starting at position 3892 of SEQ ID NO: 1880651
uuaaguacuuagguagaaa

SEQ ID NO: 1983349 - RNA, 19 nt, Artificial Sequence
  Description of Artificial Sequence: Synthetic oligonucleotide
  Antisense strand to SEQ ID NO: 1983348
uuucuaccuaaguacuuaa

SEQ ID NO: 1983350 - RNA, 19 nt, Artificial Sequence
  Description of Artificial Sequence: Synthetic oligonucleotide
  Sense strand starting at position 205 of SEQ ID NO: 1880652
cgaauaagugccuacccaa

SEQ ID NO: 1983351 - RNA, 19 nt, Artificial Sequence
  Description of Artificial Sequence: Synthetic oligonucleotide
  Antisense strand to SEQ ID NO: 1983350
uuggguaggcacuuauucg

SEQ ID NO: 1983352 - RNA, 19 nt, Artificial Sequence
  Description of Artificial Sequence: Synthetic oligonucleotide
  Sense strand starting at position 484 of SEQ ID NO: 1880652
acuuguauccaauaauguu

SEQ ID NO: 1983353 - RNA, 19 nt, Artificial Sequence
  Description of Artificial Sequence: Synthetic oligonucleotide
  Antisense strand to SEQ ID NO: 1983352
aacauuauuggauacaagu

SEQ ID NO: 1983354 - RNA, 19 nt, Artificial Sequence
  Description of Artificial Sequence: Synthetic oligonucleotide
  Sense strand starting at position 952 of SEQ ID NO: 1880652
gccuuaucgcaagugcuua

SEQ ID NO: 1983355 - RNA, 19 nt, Artificial Sequence
  Description of Artificial Sequence: Synthetic oligonucleotide
  Antisense strand to SEQ ID NO: 1983354
uaagcacuugcgauaaggc

SEQ ID NO: 1983356 - RNA, 19 nt, Artificial Sequence
  Description of Artificial Sequence: Synthetic oligonucleotide
  Sense strand starting at position 1016 of SEQ ID NO: 1880652
augaauuagugagugaagu

SEQ ID NO: 1983357 - RNA, 19 nt, Artificial Sequence
  Description of Artificial Sequence: Synthetic oligonucleotide
  Antisense strand to SEQ ID NO: 1983356
acuucacucacuaauucau

SEQ ID NO: 1983358 - RNA, 19 nt, Artificial Sequence
  Description of Artificial Sequence: Synthetic oligonucleotide
  Sense strand starting at position 1017 of SEQ ID NO: 1880652
ugaauuagugagugaagua

SEQ ID NO: 1983359 - RNA, 19 nt, Artificial Sequence
  Description of Artificial Sequence: Synthetic oligonucleotide
  Antisense strand to SEQ ID NO: 1983358
uacuucacucacuaauuca

SEQ ID NO: 1983360 - RNA, 19 nt, Artificial Sequence
  Description of Artificial Sequence: Synthetic oligonucleotide
  Sense strand starting at position 1018 of SEQ ID NO: 1880652
gaauuagugagugaaguau

SEQ ID NO: 1983361 - RNA, 19 nt, Artificial Sequence
  Description of Artificial Sequence: Synthetic oligonucleotide
  Antisense strand to SEQ ID NO: 1983360
auacuucacucacuaauuc

SEQ ID NO: 1983362 - RNA, 19 nt, Artificial Sequence
  Description of Artificial Sequence: Synthetic oligonucleotide
  Sense strand starting at position 1022 of SEQ ID NO: 1880652
uagugagugaaguauaaug

SEQ ID NO: 1983363 - RNA, 19 nt, Artificial Sequence
  Description of Artificial Sequence: Synthetic oligonucleotide
  Antisense strand to SEQ ID NO: 1983362
cauuauacuucacucacua

SEQ ID NO: 1983364 - RNA, 19 nt, Artificial Sequence
  Description of Artificial Sequence: Synthetic oligonucleotide
  Sense strand starting at position 1083 of SEQ ID NO: 1880652
cuggaaauauaugugaauu

SEQ ID NO: 1983365 - RNA, 19 nt, Artificial Sequence
  Description of Artificial Sequence: Synthetic oligonucleotide
  Antisense strand to SEQ ID NO: 1983364
aauucacauauauuuccag

SEQ ID NO: 1983366 - RNA, 19 nt, Artificial Sequence
  Description of Artificial Sequence: Synthetic oligonucleotide
  Sense strand starting at position 1284 of SEQ ID NO: 1880652
accauuccugguuauuauu

SEQ ID NO: 1983367 - RNA, 19 nt, Artificial Sequence
  Description of Artificial Sequence: Synthetic oligonucleotide
  Antisense strand to SEQ ID NO: 1983366
aauaauaaccaggaauggu

SEQ ID NO: 1983368 - RNA, 19 nt, Artificial Sequence
  Description of Artificial Sequence: Synthetic oligonucleotide
  Sense strand starting at position 1389 of SEQ ID NO: 1880652
ucuaaaguccuaggauuac

SEQ ID NO: 1983369 - RNA, 19 nt, Artificial Sequence
  Description of Artificial Sequence: Synthetic oligonucleotide
  Antisense strand to SEQ ID NO: 1983368
guaauccuaggacuuuaga

SEQ ID NO: 1983370 - RNA, 19 nt, Artificial Sequence
  Description of Artificial Sequence: Synthetic oligonucleotide
  Sense strand starting at position 1495 of SEQ ID NO: 1880652
gugcuacaagugggaaaua

SEQ ID NO: 1983371 - RNA, 19 nt, Artificial Sequence
  Description of Artificial Sequence: Synthetic oligonucleotide
  Antisense strand to SEQ ID NO: 1983370
uauuucccacuuguagcac

SEQ ID NO: 1983372 - RNA, 19 nt, Artificial Sequence
  Description of Artificial Sequence: Synthetic oligonucleotide
  Sense strand starting at position 1683 of SEQ ID NO: 1880652
guaucauaggcauaaacac

SEQ ID NO: 1983373 - RNA, 19 nt, Artificial Sequence
  Description of Artificial Sequence: Synthetic oligonucleotide
  Antisense strand to SEQ ID NO: 1983372
guguuuaugccuaugauac

SEQ ID NO: 1983374 - RNA, 19 nt, Artificial Sequence
  Description of Artificial Sequence: Synthetic oligonucleotide
  Sense strand starting at position 1738 of SEQ ID NO: 1880652
ccacaagaacggugguaaa

SEQ ID NO: 1983375 - RNA, 19 nt, Artificial Sequence
  Description of Artificial Sequence: Synthetic oligonucleotide
  Antisense strand to SEQ ID NO: 1983374
uuuaccaccguucuugugg

SEQ ID NO: 1983376 - RNA, 19 nt, Artificial Sequence
  Description of Artificial Sequence: Synthetic oligonucleotide
  Sense strand starting at position 1875 of SEQ ID NO: 1880652
gagguauuuacuggugcuu

SEQ ID NO: 1983377 - RNA, 19 nt, Artificial Sequence
  Description of Artificial Sequence: Synthetic oligonucleotide
  Antisense strand to SEQ ID NO: 1983376
aagcaccaguaaauaccuc

SEQ ID NO: 1983378 - RNA, 19 nt, Artificial Sequence
  Description of Artificial Sequence: Synthetic oligonucleotide
  Sense strand starting at position 1962 of SEQ ID NO: 1880652
caguaucugcgacaucaaa

SEQ ID NO: 1983379 - RNA, 19 nt, Artificial Sequence
  Description of Artificial Sequence: Synthetic oligonucleotide
  Antisense strand to SEQ ID NO: 1983378
uuugaugucgcagauacug

SEQ ID NO: 1983380 - RNA, 19 nt, Artificial Sequence
  Description of Artificial Sequence: Synthetic oligonucleotide
  Sense strand starting at position 2156 of SEQ ID NO: 1880652
caauauaacguguaugacu

SEQ ID NO: 1983381 - RNA, 19 nt, Artificial Sequence
  Description of Artificial Sequence: Synthetic oligonucleotide
  Antisense strand to SEQ ID NO: 1983380
agucauacacguuauauug

SEQ ID NO: 1983382 - RNA, 19 nt, Artificial Sequence
  Description of Artificial Sequence: Synthetic oligonucleotide
  Sense strand starting at position 2561 of SEQ ID NO: 1880652
gugggaauuacaggaguga

SEQ ID NO: 1983383 - RNA, 19 nt, Artificial Sequence
  Description of Artificial Sequence: Synthetic oligonucleotide
  Antisense strand to SEQ ID NO: 1983382
ucacuccuguaauucccac

SEQ ID NO: 1983384 - RNA, 19 nt, Artificial Sequence
  Description of Artificial Sequence: Synthetic oligonucleotide
  Sense strand starting at position 2809 of SEQ ID NO: 1880652
ucauguauauaaucuggua

SEQ ID NO: 1983385 - RNA, 19 nt, Artificial Sequence
  Description of Artificial Sequence: Synthetic oligonucleotide
  Antisense strand to SEQ ID NO: 1983384
uaccagauuauauacauga

SEQ ID NO: 1983386 - RNA, 19 nt, Artificial Sequence
  Description of Artificial Sequence: Synthetic oligonucleotide
  Sense strand starting at position 2950 of SEQ ID NO: 1880652
cuagaauucuagcucacug

SEQ ID NO: 1983387 - RNA, 19 nt, Artificial Sequence
  Description of Artificial Sequence: Synthetic oligonucleotide
  Antisense strand to SEQ ID NO: 1983386
cagugagcuagaauucuag

SEQ ID NO: 1983388 - RNA, 19 nt, Artificial Sequence
  Description of Artificial Sequence: Synthetic oligonucleotide
  Sense strand starting at position 3022 of SEQ ID NO: 1880652
gaagaaugugguggccaaa

SEQ ID NO: 1983389 - RNA, 19 nt, Artificial Sequence
  Description of Artificial Sequence: Synthetic oligonucleotide
  Antisense strand to SEQ ID NO: 1983388
uuuggccaccacauucuuc

SEQ ID NO: 1983390 - RNA, 19 nt, Artificial Sequence
  Description of Artificial Sequence: Synthetic oligonucleotide
  Sense strand starting at position 3045 of SEQ ID NO: 1880652
uaauucugagaguguuaca

SEQ ID NO: 1983391 - RNA, 19 nt, Artificial Sequence
  Description of Artificial Sequence: Synthetic oligonucleotide
  Antisense strand to SEQ ID NO: 1983390
uguaacacucucagaauua

SEQ ID NO: 1983392 - RNA, 19 nt, Artificial Sequence
  Description of Artificial Sequence: Synthetic oligonucleotide
  Sense strand starting at position 3100 of SEQ ID NO: 1880652
uuuggagaaucucucauua

SEQ ID NO: 1983393 - RNA, 19 nt, Artificial Sequence
  Description of Artificial Sequence: Synthetic oligonucleotide
  Antisense strand to SEQ ID NO: 1983392
uaaugagagauucuccaaa

SEQ ID NO: 1983394 - RNA, 19 nt, Artificial Sequence
  Description of Artificial Sequence: Synthetic oligonucleotide
  Sense strand starting at position 3125 of SEQ ID NO: 1880652
ucuaguugauccucuagaa

SEQ ID NO: 1983395 - RNA, 19 nt, Artificial Sequence
  Description of Artificial Sequence: Synthetic oligonucleotide
  Antisense strand to SEQ ID NO: 1983394
uucuagaggaucaacuaga

SEQ ID NO: 1983396 - RNA, 19 nt, Artificial Sequence
  Description of Artificial Sequence: Synthetic oligonucleotide
  Sense strand starting at position 3291 of SEQ ID NO: 1880652
ggagcugagaggugaagau

SEQ ID NO: 1983397 - RNA, 19 nt, Artificial Sequence
  Description of Artificial Sequence: Synthetic oligonucleotide
  Antisense strand to SEQ ID NO: 1983396
aucuucaccucucagcucc

SEQ ID NO: 1983398 - RNA, 19 nt, Artificial Sequence
  Description of Artificial Sequence: Synthetic oligonucleotide
  Sense strand starting at position 3339 of SEQ ID NO: 1880652
uuggcuuucugucucauuu

SEQ ID NO: 1983399 - RNA, 19 nt, Artificial Sequence
  Description of Artificial Sequence: Synthetic oligonucleotide
  Antisense strand to SEQ ID NO: 1983398
aaaugagacagaaagccaa

SEQ ID NO: 1983400 - RNA, 19 nt, Artificial Sequence
  Description of Artificial Sequence: Synthetic oligonucleotide
  Sense strand starting at position 3366 of SEQ ID NO: 1880652
uccaaauaggcuugagagu

SEQ ID NO: 1983401 - RNA, 19 nt, Artificial Sequence
  Description of Artificial Sequence: Synthetic oligonucleotide
  Antisense strand to SEQ ID NO: 1983400
acucucaagccuauuugga

SEQ ID NO: 1983402 - RNA, 19 nt, Artificial Sequence
  Description of Artificial Sequence: Synthetic oligonucleotide
  Sense strand starting at position 3367 of SEQ ID NO: 1880652
ccaaauaggcuugagaguu

SEQ ID NO: 1983403 - RNA, 19 nt, Artificial Sequence
  Description of Artificial Sequence: Synthetic oligonucleotide
  Antisense strand to SEQ ID NO: 1983402
aacucucaagccuauuugg

SEQ ID NO: 1983404 - RNA, 19 nt, Artificial Sequence
  Description of Artificial Sequence: Synthetic oligonucleotide
  Sense strand starting at position 3373 of SEQ ID NO: 1880652
aggcuugagaguuaagguu

SEQ ID NO: 1983405 - RNA, 19 nt, Artificial Sequence
  Description of Artificial Sequence: Synthetic oligonucleotide
  Antisense strand to SEQ ID NO: 1983404
aaccuuaacucucaagccu

SEQ ID NO: 1983406 - RNA, 19 nt, Artificial Sequence
  Description of Artificial Sequence: Synthetic oligonucleotide
  Sense strand starting at position 3481 of SEQ ID NO: 1880652
agaggucuuauaugugauc

SEQ ID NO: 1983407 - RNA, 19 nt, Artificial Sequence
  Description of Artificial Sequence: Synthetic oligonucleotide
  Antisense strand to SEQ ID NO: 1983406
gaucacauauaagaccucu

SEQ ID NO: 1983408 - RNA, 19 nt, Artificial Sequence
  Description of Artificial Sequence: Synthetic oligonucleotide
  Sense strand starting at position 3482 of SEQ ID NO: 1880652
gaggucuuauaugugauca

SEQ ID NO: 1983409 - RNA, 19 nt, Artificial Sequence
  Description of Artificial Sequence: Synthetic oligonucleotide
  Antisense strand to SEQ ID NO: 1983408
ugaucacauauaagaccuc

SEQ ID NO: 1983410 - RNA, 19 nt, Artificial Sequence
  Description of Artificial Sequence: Synthetic oligonucleotide
  Sense strand starting at position 3739 of SEQ ID NO: 1880652
agauuagggacuuggguua

SEQ ID NO: 1983411 - RNA, 19 nt, Artificial Sequence
  Description of Artificial Sequence: Synthetic oligonucleotide
  Antisense strand to SEQ ID NO: 1983410
uaacccaagucccuaaucu

SEQ ID NO: 1983412 - RNA, 19 nt, Artificial Sequence
  Description of Artificial Sequence: Synthetic oligonucleotide
  Sense strand starting at position 3763 of SEQ ID NO: 1880652
ucuuguggugauugggaaa

SEQ ID NO: 1983413 - RNA, 19 nt, Artificial Sequence
  Description of Artificial Sequence: Synthetic oligonucleotide
  Antisense strand to SEQ ID NO: 1983412
uuucccaaucaccacaaga

SEQ ID NO: 1983414 - RNA, 19 nt, Artificial Sequence
  Description of Artificial Sequence: Synthetic oligonucleotide
  Sense strand starting at position 3776 of SEQ ID NO: 1880652
gggaaaccaguuuguauug

SEQ ID NO: 1983415 - RNA, 19 nt, Artificial Sequence
  Description of Artificial Sequence: Synthetic oligonucleotide
  Antisense strand to SEQ ID NO: 1983414
caauacaaacugguuuccc

SEQ ID NO: 1983416 - RNA, 19 nt, Artificial Sequence
  Description of Artificial Sequence: Synthetic oligonucleotide
  Sense strand starting at position 3795 of SEQ ID NO: 1880652
ugucauuugugugcuggga

SEQ ID NO: 1983417 - RNA, 19 nt, Artificial Sequence
  Description of Artificial Sequence: Synthetic oligonucleotide
  Antisense strand to SEQ ID NO: 1983416
ucccagcacacaaaugaca

SEQ ID NO: 1983418 - RNA, 19 nt, Artificial Sequence
  Description of Artificial Sequence: Synthetic oligonucleotide
  Sense strand starting at position 3830 of SEQ ID NO: 1880652
agugaaaguaggugaagaa

SEQ ID NO: 1983419 - RNA, 19 nt, Artificial Sequence
  Description of Artificial Sequence: Synthetic oligonucleotide
  Antisense strand to SEQ ID NO: 1983418
uucuucaccuacuuucacu

SEQ ID NO: 1983420 - RNA, 19 nt, Artificial Sequence
  Description of Artificial Sequence: Synthetic oligonucleotide
  Sense strand starting at position 3845 of SEQ ID NO: 1880652
agaauaggcuuucuuaaga

SEQ ID NO: 1983421 - RNA, 19 nt, Artificial Sequence
  Description of Artificial Sequence: Synthetic oligonucleotide
  Antisense strand to SEQ ID NO: 1983420
ucuuaagaaagccuauucu

SEQ ID NO: 1983422 - RNA, 19 nt, Artificial Sequence
  Description of Artificial Sequence: Synthetic oligonucleotide
  Sense strand starting at position 3888 of SEQ ID NO: 1880652
ugugaucuuccucagguag

SEQ ID NO: 1983423 - RNA, 19 nt, Artificial Sequence
  Description of Artificial Sequence: Synthetic oligonucleotide
  Antisense strand to SEQ ID NO: 1983422
cuaccugaggaagaucaca

SEQ ID NO: 1983424 - RNA, 19 nt, Artificial Sequence
  Description of Artificial Sequence: Synthetic oligonucleotide
  Sense strand starting at position 3973 of SEQ ID NO: 1880652
uggaguguccagcauaaga

SEQ ID NO: 1983425 - RNA, 19 nt, Artificial Sequence
  Description of Artificial Sequence: Synthetic oligonucleotide
  Antisense strand to SEQ ID NO: 1983424
ucuuaugcuggacacucca

SEQ ID NO: 1983426 - RNA, 19 nt, Artificial Sequence
  Description of Artificial Sequence: Synthetic oligonucleotide
  Sense strand starting at position 3975 of SEQ ID NO: 1880652
gaguguccagcauaagacu

SEQ ID NO: 1983427 - RNA, 19 nt, Artificial Sequence
  Description of Artificial Sequence: Synthetic oligonucleotide
  Antisense strand to SEQ ID NO: 1983426
agucuuaugcuggacacuc

SEQ ID NO: 1983428 - RNA, 19 nt, Artificial Sequence
  Description of Artificial Sequence: Synthetic oligonucleotide
  Sense strand starting at position 3983 of SEQ ID NO: 1880652
agcauaagacugcaaguuu

SEQ ID NO: 1983429 - RNA, 19 nt, Artificial Sequence
  Description of Artificial Sequence: Synthetic oligonucleotide
  Antisense strand to SEQ ID NO: 1983428
aaacuugcagucuuaugcu

SEQ ID NO: 1983430 - RNA, 19 nt, Artificial Sequence
  Description of Artificial Sequence: Synthetic oligonucleotide
  Sense strand starting at position 47 of SEQ ID NO: 1880653
ucguucucugaugaaagaa

SEQ ID NO: 1983431 - RNA, 19 nt, Artificial Sequence
  Description of Artificial Sequence: Synthetic oligonucleotide
  Antisense strand to SEQ ID NO: 1983430
uucuuucaucagagaacga

SEQ ID NO: 1983432 - RNA, 19 nt, Artificial Sequence
  Description of Artificial Sequence: Synthetic oligonucleotide
  Sense strand starting at position 89 of SEQ ID NO: 1880653
gaaggucauccauacaguu

SEQ ID NO: 1983433 - RNA, 19 nt, Artificial Sequence
  Description of Artificial Sequence: Synthetic oligonucleotide
  Antisense strand to SEQ ID NO: 1983432
aacuguauggaugaccuuc

SEQ ID NO: 1983434 - RNA, 19 nt, Artificial Sequence
  Description of Artificial Sequence: Synthetic oligonucleotide
  Sense strand starting at position 293 of SEQ ID NO: 1880653
ggauguugccauggaaaua

SEQ ID NO: 1983435 - RNA, 19 nt, Artificial Sequence
  Description of Artificial Sequence: Synthetic oligonucleotide
  Antisense strand to SEQ ID NO: 1983434
uauuuccauggcaacaucc

SEQ ID NO: 1983436 - RNA, 19 nt, Artificial Sequence
  Description of Artificial Sequence: Synthetic oligonucleotide
  Sense strand starting at position 304 of SEQ ID NO: 1880653
uggaaauagcccuggacga

SEQ ID NO: 1983437 - RNA, 19 nt, Artificial Sequence
  Description of Artificial Sequence: Synthetic oligonucleotide
  Antisense strand to SEQ ID NO: 1983436
ucguccagggcuauuucca

SEQ ID NO: 1983438 - RNA, 19 nt, Artificial Sequence
  Description of Artificial Sequence: Synthetic oligonucleotide
  Sense strand starting at position 305 of SEQ ID NO: 1880653
ggaaauagcccuggacgaa

SEQ ID NO: 1983439 - RNA, 19 nt, Artificial Sequence
  Description of Artificial Sequence: Synthetic oligonucleotide
  Antisense strand to SEQ ID NO: 1983438
uucguccagggcuauuucc

SEQ ID NO: 1983440 - RNA, 19 nt, Artificial Sequence
  Description of Artificial Sequence: Synthetic oligonucleotide
  Sense strand starting at position 404 of SEQ ID NO: 1880653
gagggaagauguguucuca

SEQ ID NO: 1983441 - RNA, 19 nt, Artificial Sequence
  Description of Artificial Sequence: Synthetic oligonucleotide
  Antisense strand to SEQ ID NO: 1983440
ugagaacacaucuucccuc

SEQ ID NO: 1983442 - RNA, 19 nt, Artificial Sequence
  Description of Artificial Sequence: Synthetic oligonucleotide
  Sense strand starting at position 420 of SEQ ID NO: 1880653
ucauuuagaucuuaugaga

SEQ ID NO: 1983443 - RNA, 19 nt, Artificial Sequence
  Description of Artificial Sequence: Synthetic oligonucleotide
  Antisense strand to SEQ ID NO: 1983442
ucucauaagaucuaaauga

SEQ ID NO: 1983444 - RNA, 19 nt, Artificial Sequence
  Description of Artificial Sequence: Synthetic oligonucleotide
  Sense strand starting at position 483 of SEQ ID NO: 1880653
auucuaaguagugacgaga

SEQ ID NO: 1983445 - RNA, 19 nt, Artificial Sequence
  Description of Artificial Sequence: Synthetic oligonucleotide
  Antisense strand to SEQ ID NO: 1983444
ucucgucacuacuuagaau

SEQ ID NO: 1983446 - RNA, 19 nt, Artificial Sequence
  Description of Artificial Sequence: Synthetic oligonucleotide
  Sense strand starting at position 486 of SEQ ID NO: 1880653
cuaaguagugacgagaauu

SEQ ID NO: 1983447 - RNA, 19 nt, Artificial Sequence
  Description of Artificial Sequence: Synthetic oligonucleotide
  Antisense strand to SEQ ID NO: 1983446
aauucucgucacuacuuag

SEQ ID NO: 1983448 - RNA, 19 nt, Artificial Sequence
  Description of Artificial Sequence: Synthetic oligonucleotide
  Sense strand starting at position 496 of SEQ ID NO: 1880653
acgagaauuggacagcuuu

SEQ ID NO: 1983449 - RNA, 19 nt, Artificial Sequence
  Description of Artificial Sequence: Synthetic oligonucleotide
  Antisense strand to SEQ ID NO: 1983448
aaagcuguccaauucucgu

SEQ ID NO: 1983450 - RNA, 19 nt, Artificial Sequence
  Description of Artificial Sequence: Synthetic oligonucleotide
  Sense strand starting at position 509 of SEQ ID NO: 1880653
agcuuugugagagacggaa

SEQ ID NO: 1983451 - RNA, 19 nt, Artificial Sequence
  Description of Artificial Sequence: Synthetic oligonucleotide
  Antisense strand to SEQ ID NO: 1983450
uuccgucucucacaaagcu

SEQ ID NO: 1983452 - RNA, 19 nt, Artificial Sequence
  Description of Artificial Sequence: Synthetic oligonucleotide
  Sense strand starting at position 882 of SEQ ID NO: 1880653
cugggugccauagacuaau

SEQ ID NO: 1983453 - RNA, 19 nt, Artificial Sequence
  Description of Artificial Sequence: Synthetic oligonucleotide
  Antisense strand to SEQ ID NO: 1983452
auuagucuauggcacccag

SEQ ID NO: 1983454 - RNA, 19 nt, Artificial Sequence
  Description of Artificial Sequence: Synthetic oligonucleotide
  Sense strand starting at position 888 of SEQ ID NO: 1880653
gccauagacuaauugcaga

SEQ ID NO: 1983455 - RNA, 19 nt, Artificial Sequence
  Description of Artificial Sequence: Synthetic oligonucleotide
  Antisense strand to SEQ ID NO: 1983454
ucugcaauuagucuauggc

SEQ ID NO: 1983456 - RNA, 19 nt, Artificial Sequence
  Description of Artificial Sequence: Synthetic oligonucleotide
  Sense strand starting at position 922 of SEQ ID NO: 1880653
gagaaauaguuccuuuaug

SEQ ID NO: 1983457 - RNA, 19 nt, Artificial Sequence
  Description of Artificial Sequence: Synthetic oligonucleotide
  Antisense strand to SEQ ID NO: 1983456
cauaaaggaacuauuucuc

SEQ ID NO: 1983458 - RNA, 19 nt, Artificial Sequence
  Description of Artificial Sequence: Synthetic oligonucleotide
  Sense strand starting at position 953 of SEQ ID NO: 1880653
guuaucucuuagguagaag

SEQ ID NO: 1983459 - RNA, 19 nt, Artificial Sequence
  Description of Artificial Sequence: Synthetic oligonucleotide
  Antisense strand to SEQ ID NO: 1983458
cuucuaccuaagagauaac

SEQ ID NO: 1983460 - RNA, 19 nt, Artificial Sequence
  Description of Artificial Sequence: Synthetic oligonucleotide
  Sense strand starting at position 964 of SEQ ID NO: 1880653
gguagaagcagacguauuu

SEQ ID NO: 1983461 - RNA, 19 nt, Artificial Sequence
  Description of Artificial Sequence: Synthetic oligonucleotide
  Antisense strand to SEQ ID NO: 1983460
aaauacgucugcuucuacc

SEQ ID NO: 1983462 - RNA, 19 nt, Artificial Sequence
  Description of Artificial Sequence: Synthetic oligonucleotide
  Sense strand starting at position 1115 of SEQ ID NO: 1880653
uuaauuauugagcaacgga

SEQ ID NO: 1983463 - RNA, 19 nt, Artificial Sequence
  Description of Artificial Sequence: Synthetic oligonucleotide
  Antisense strand to SEQ ID NO: 1983462
uccguugcucaauaauuaa

SEQ ID NO: 1983464 - RNA, 19 nt, Artificial Sequence
  Description of Artificial Sequence: Synthetic oligonucleotide
  Sense strand starting at position 1264 of SEQ ID NO: 1880653
ggugguuaagcucagacau

SEQ ID NO: 1983465 - RNA, 19 nt, Artificial Sequence
  Description of Artificial Sequence: Synthetic oligonucleotide
  Antisense strand to SEQ ID NO: 1983464
augucugagcuuaaccacc

SEQ ID NO: 1983466 - RNA, 19 nt, Artificial Sequence
  Description of Artificial Sequence: Synthetic oligonucleotide
  Sense strand starting at position 1371 of SEQ ID NO: 1880653
ucuuccuuacaaugagaag

SEQ ID NO: 1983467 - RNA, 19 nt, Artificial Sequence
  Description of Artificial Sequence: Synthetic oligonucleotide
  Antisense strand to SEQ ID NO: 1983466
cuucucauuguaaggaaga

SEQ ID NO: 1983468 - RNA, 19 nt, Artificial Sequence
  Description of Artificial Sequence: Synthetic oligonucleotide
  Sense strand starting at position 1514 of SEQ ID NO: 1880653
ucauuagaacuugggaagu

SEQ ID NO: 1983469 - RNA, 19 nt, Artificial Sequence
  Description of Artificial Sequence: Synthetic oligonucleotide
  Antisense strand to SEQ ID NO: 1983468
acuucccaaguucuaauga

SEQ ID NO: 1983470 - RNA, 19 nt, Artificial Sequence
  Description of Artificial Sequence: Synthetic oligonucleotide
  Sense strand starting at position 1566 of SEQ ID NO: 1880653
gggacauguguuggaaauu

SEQ ID NO: 1983471 - RNA, 19 nt, Artificial Sequence
  Description of Artificial Sequence: Synthetic oligonucleotide
  Antisense strand to SEQ ID NO: 1983470
aauuuccaacacauguccc

SEQ ID NO: 1983472 - RNA, 19 nt, Artificial Sequence
  Description of Artificial Sequence: Synthetic oligonucleotide
  Sense strand starting at position 1752 of SEQ ID NO: 1880653
uagacuuggccagacucau

SEQ ID NO: 1983473 - RNA, 19 nt, Artificial Sequence
  Description of Artificial Sequence: Synthetic oligonucleotide
  Antisense strand to SEQ ID NO: 1983472
augagucuggccaagucua

SEQ ID NO: 1983474 - RNA, 19 nt, Artificial Sequence
  Description of Artificial Sequence: Synthetic oligonucleotide
  Sense strand starting at position 2025 of SEQ ID NO: 1880653
guuggccuucgucuuuaua

SEQ ID NO: 1983475 - RNA, 19 nt, Artificial Sequence
  Description of Artificial Sequence: Synthetic oligonucleotide
  Antisense strand to SEQ ID NO: 1983474
uauaaagacgaaggccaac

SEQ ID NO: 1983476 - RNA, 19 nt, Artificial Sequence
  Description of Artificial Sequence: Synthetic oligonucleotide
  Sense strand starting at position 2160 of SEQ ID NO: 1880653
accuguuugggccaauaga

SEQ ID NO: 1983477 - RNA, 19 nt, Artificial Sequence
  Description of Artificial Sequence: Synthetic oligonucleotide
  Antisense strand to SEQ ID NO: 1983476
ucuauuggcccaaacaggu

SEQ ID NO: 1983478 - RNA, 19 nt, Artificial Sequence
  Description of Artificial Sequence: Synthetic oligonucleotide
  Sense strand starting at position 2293 of SEQ ID NO: 1880653
ugcauaauuucugcugguu

SEQ ID NO: 1983479 - RNA, 19 nt, Artificial Sequence
  Description of Artificial Sequence: Synthetic oligonucleotide
  Antisense strand to SEQ ID NO: 1983478
aaccagcagaaauuaugca

SEQ ID NO: 1983480 - RNA, 19 nt, Artificial Sequence
  Description of Artificial Sequence: Synthetic oligonucleotide
  Sense strand starting at position 2957 of SEQ ID NO: 1880653
gucaguagaguuuaagaua

SEQ ID NO: 1983481 - RNA, 19 nt, Artificial Sequence
  Description of Artificial Sequence: Synthetic oligonucleotide
  Antisense strand to SEQ ID NO: 1983480
uaucuuaaacucuacugac

SEQ ID NO: 1983482 - RNA, 19 nt, Artificial Sequence
  Description of Artificial Sequence: Synthetic oligonucleotide
  Sense strand starting at position 3037 of SEQ ID NO: 1880653
ugauaauauuggguugagu

SEQ ID NO: 1983483 - RNA, 19 nt, Artificial Sequence
  Description of Artificial Sequence: Synthetic oligonucleotide
  Antisense strand to SEQ ID NO: 1983482
acucaacccaauauuauca

SEQ ID NO: 1983484 - RNA, 19 nt, Artificial Sequence
  Description of Artificial Sequence: Synthetic oligonucleotide
  Sense strand starting at position 3039 of SEQ ID NO: 1880653
auaauauuggguugaguag

SEQ ID NO: 1983485 - RNA, 19 nt, Artificial Sequence
  Description of Artificial Sequence: Synthetic oligonucleotide
  Antisense strand to SEQ ID NO: 1983484
cuacucaacccaauauuau

SEQ ID NO: 1983486 - RNA, 19 nt, Artificial Sequence
  Description of Artificial Sequence: Synthetic oligonucleotide
  Sense strand starting at position 3131 of SEQ ID NO: 1880653
aaacauuaacgacgugaca

SEQ ID NO: 1983487 - RNA, 19 nt, Artificial Sequence
  Description of Artificial Sequence: Synthetic oligonucleotide
  Antisense strand to SEQ ID NO: 1983486
ugucacgucguuaauguuu

SEQ ID NO: 1983488 - RNA, 19 nt, Artificial Sequence
  Description of Artificial Sequence: Synthetic oligonucleotide
  Sense strand starting at position 3134 of SEQ ID NO: 1880653
cauuaacgacgugacauua

SEQ ID NO: 1983489 - RNA, 19 nt, Artificial Sequence
  Description of Artificial Sequence: Synthetic oligonucleotide
  Antisense strand to SEQ ID NO: 1983488
uaaugucacgucguuaaug

SEQ ID NO: 1983490 - RNA, 19 nt, Artificial Sequence
  Description of Artificial Sequence: Synthetic oligonucleotide
  Sense strand starting at position 3142 of SEQ ID NO: 1880653
acgugacauuauucugaca

SEQ ID NO: 1983491 - RNA, 19 nt, Artificial Sequence
  Description of Artificial Sequence: Synthetic oligonucleotide
  Antisense strand to SEQ ID NO: 1983490
ugucagaauaaugucacgu

SEQ ID NO: 1983492 - RNA, 19 nt, Artificial Sequence
  Description of Artificial Sequence: Synthetic oligonucleotide
  Sense strand starting at position 3155 of SEQ ID NO: 1880653
cugacauacucagucuuua

SEQ ID NO: 1983493 - RNA, 19 nt, Artificial Sequence
  Description of Artificial Sequence: Synthetic oligonucleotide
  Antisense strand to SEQ ID NO: 1983492
uaaagacugaguaugucag

SEQ ID NO: 1983494 - RNA, 19 nt, Artificial Sequence
  Description of Artificial Sequence: Synthetic oligonucleotide
  Sense strand starting at position 3263 of SEQ ID NO: 1880653
cugugucuggguuaaagaa

SEQ ID NO: 1983495 - RNA, 19 nt, Artificial Sequence
  Description of Artificial Sequence: Synthetic oligonucleotide
  Antisense strand to SEQ ID NO: 1983494
uucuuuaacccagacacag

SEQ ID NO: 1983496 - RNA, 19 nt, Artificial Sequence
  Description of Artificial Sequence: Synthetic oligonucleotide
  Sense strand starting at position 3311 of SEQ ID NO: 1880653
aucaguguuccucaucaaa

SEQ ID NO: 1983497 - RNA, 19 nt, Artificial Sequence
  Description of Artificial Sequence: Synthetic oligonucleotide
  Antisense strand to SEQ ID NO: 1983496
uuugaugaggaacacugau

SEQ ID NO: 1983498 - RNA, 19 nt, Artificial Sequence
  Description of Artificial Sequence: Synthetic oligonucleotide
  Sense strand starting at position 3314 of SEQ ID NO: 1880653
aguguuccucaucaaagga

SEQ ID NO: 1983499 - RNA, 19 nt, Artificial Sequence
  Description of Artificial Sequence: Synthetic oligonucleotide
  Antisense strand to SEQ ID NO: 1983498
uccuuugaugaggaacacu

SEQ ID NO: 1983500 - RNA, 19 nt, Artificial Sequence
  Description of Artificial Sequence: Synthetic oligonucleotide
  Sense strand starting at position 3361 of SEQ ID NO: 1880653
uggaaaugauaugcuguca

SEQ ID NO: 1983501 - RNA, 19 nt, Artificial Sequence
  Description of Artificial Sequence: Synthetic oligonucleotide
  Antisense strand to SEQ ID NO: 1983500
ugacagcauaucauuucca

SEQ ID NO: 1983502 - RNA, 19 nt, Artificial Sequence
  Description of Artificial Sequence: Synthetic oligonucleotide
  Sense strand starting at position 3604 of SEQ ID NO: 1880653
uuaugucauccugaagcaa

SEQ ID NO: 1983503 - RNA, 19 nt, Artificial Sequence
  Description of Artificial Sequence: Synthetic oligonucleotide
  Antisense strand to SEQ ID NO: 1983502
uugcuucaggaugacauaa

SEQ ID NO: 1983504 - RNA, 19 nt, Artificial Sequence
  Description of Artificial Sequence: Synthetic oligonucleotide
  Sense strand starting at position 3758 of SEQ ID NO: 1880653
cuaagcuuugaguaagaau

SEQ ID NO: 1983505 - RNA, 19 nt, Artificial Sequence
  Description of Artificial Sequence: Synthetic oligonucleotide
  Antisense strand to SEQ ID NO: 1983504
auucuuacucaaagcuuag

SEQ ID NO: 1983506 - RNA, 19 nt, Artificial Sequence
  Description of Artificial Sequence: Synthetic oligonucleotide
  Sense strand starting at position 3932 of SEQ ID NO: 1880653
guugcuggagcgcuuuauu

SEQ ID NO: 1983507 - RNA, 19 nt, Artificial Sequence
  Description of Artificial Sequence: Synthetic oligonucleotide
  Antisense strand to SEQ ID NO: 1983506
aauaaagcgcuccagcaac

SEQ ID NO: 1983508 - RNA, 19 nt, Artificial Sequence
  Description of Artificial Sequence: Synthetic oligonucleotide
  Sense strand starting at position 3935 of SEQ ID NO: 1880653
gcuggagcgcuuuauuuau

SEQ ID NO: 1983509 - RNA, 19 nt, Artificial Sequence
  Description of Artificial Sequence: Synthetic oligonucleotide
  Antisense strand to SEQ ID NO: 1983508
auaaauaaagcgcuccagc

SEQ ID NO: 1983510 - RNA, 19 nt, Artificial Sequence
  Description of Artificial Sequence: Synthetic oligonucleotide
  Sense strand starting at position 216 of SEQ ID NO: 1880654
agccaauuaucagcaagga

SEQ ID NO: 1983511 - RNA, 19 nt, Artificial Sequence
  Description of Artificial Sequence: Synthetic oligonucleotide
  Antisense strand to SEQ ID NO: 1983510
uccuugcugauaauuggcu

SEQ ID NO: 1983512 - RNA, 19 nt, Artificial Sequence
  Description of Artificial Sequence: Synthetic oligonucleotide
  Sense strand starting at position 217 of SEQ ID NO: 1880654
gccaauuaucagcaaggaa

SEQ ID NO: 1983513 - RNA, 19 nt, Artificial Sequence
  Description of Artificial Sequence: Synthetic oligonucleotide
  Antisense strand to SEQ ID NO: 1983512
uuccuugcugauaauuggc

SEQ ID NO: 1983514 - RNA, 19 nt, Artificial Sequence
  Description of Artificial Sequence: Synthetic oligonucleotide
  Sense strand starting at position 273 of SEQ ID NO: 1880654
ucuaacgacuuauuaagau

SEQ ID NO: 1983515 - RNA, 19 nt, Artificial Sequence
  Description of Artificial Sequence: Synthetic oligonucleotide
  Antisense strand to SEQ ID NO: 1983514
aucuuaauaagucguuaga

SEQ ID NO: 1983516 - RNA, 19 nt, Artificial Sequence
  Description of Artificial Sequence: Synthetic oligonucleotide
  Sense strand starting at position 289 of SEQ ID NO: 1880654
gauuauuuccacggcaggu

SEQ ID NO: 1983517 - RNA, 19 nt, Artificial Sequence
  Description of Artificial Sequence: Synthetic oligonucleotide
  Antisense strand to SEQ ID NO: 1983516
accugccguggaaauaauc

SEQ ID NO: 1983518 - RNA, 19 nt, Artificial Sequence
  Description of Artificial Sequence: Synthetic oligonucleotide
  Sense strand starting at position 480 of SEQ ID NO: 1880654
uuccucagaucucuggaua

SEQ ID NO: 1983519 - RNA, 19 nt, Artificial Sequence
  Description of Artificial Sequence: Synthetic oligonucleotide
  Antisense strand to SEQ ID NO: 1983518
uauccagagaucugaggaa

SEQ ID NO: 1983520 - RNA, 19 nt, Artificial Sequence
  Description of Artificial Sequence: Synthetic oligonucleotide
  Sense strand starting at position 481 of SEQ ID NO: 1880654
uccucagaucucuggauau

SEQ ID NO: 1983521 - RNA, 19 nt, Artificial Sequence
  Description of Artificial Sequence: Synthetic oligonucleotide
  Antisense strand to SEQ ID NO: 1983520
auauccagagaucugagga

SEQ ID NO: 1983522 - RNA, 19 nt, Artificial Sequence
  Description of Artificial Sequence: Synthetic oligonucleotide
  Sense strand starting at position 542 of SEQ ID NO: 1880654
ggcagaaugcuagaaagca

SEQ ID NO: 1983523 - RNA, 19 nt, Artificial Sequence
  Description of Artificial Sequence: Synthetic oligonucleotide
  Antisense strand to SEQ ID NO: 1983522
ugcuuucuagcauucugcc

SEQ ID NO: 1983524 - RNA, 19 nt, Artificial Sequence
  Description of Artificial Sequence: Synthetic oligonucleotide
  Sense strand starting at position 599 of SEQ ID NO: 1880654
gagagacugcugcacauaa

SEQ ID NO: 1983525 - RNA, 19 nt, Artificial Sequence
  Description of Artificial Sequence: Synthetic oligonucleotide
  Antisense strand to SEQ ID NO: 1983524
uuaugugcagcagucucuc

SEQ ID NO: 1983526 - RNA, 19 nt, Artificial Sequence
  Description of Artificial Sequence: Synthetic oligonucleotide
  Sense strand starting at position 640 of SEQ ID NO: 1880654
uugggaucuuugccaauga

SEQ ID NO: 1983527 - RNA, 19 nt, Artificial Sequence
  Description of Artificial Sequence: Synthetic oligonucleotide
  Antisense strand to SEQ ID NO: 1983526
ucauuggcaaagaucccaa

SEQ ID NO: 1983528 - RNA, 19 nt, Artificial Sequence
  Description of Artificial Sequence: Synthetic oligonucleotide
  Sense strand starting at position 897 of SEQ ID NO: 1880654
cuuugaauucuuuaaggca

SEQ ID NO: 1983529 - RNA, 19 nt, Artificial Sequence
  Description of Artificial Sequence: Synthetic oligonucleotide
  Antisense strand to SEQ ID NO: 1983528
ugccuuaaagaauucaaag

SEQ ID NO: 1983530 - RNA, 19 nt, Artificial Sequence
  Description of Artificial Sequence: Synthetic oligonucleotide
  Sense strand starting at position 1036 of SEQ ID NO: 1880654
ugcaguaguacugagauac

SEQ ID NO: 1983531 - RNA, 19 nt, Artificial Sequence
  Description of Artificial Sequence: Synthetic oligonucleotide
  Antisense strand to SEQ ID NO: 1983530
guaucucaguacuacugca

SEQ ID NO: 1983532 - RNA, 19 nt, Artificial Sequence
  Description of Artificial Sequence: Synthetic oligonucleotide
  Sense strand starting at position 1135 of SEQ ID NO: 1880654
gaucaaggauucuuaaguu

SEQ ID NO: 1983533 - RNA, 19 nt, Artificial Sequence
  Description of Artificial Sequence: Synthetic oligonucleotide
  Antisense strand to SEQ ID NO: 1983532
aacuuaagaauccuugauc

SEQ ID NO: 1983534 - RNA, 19 nt, Artificial Sequence
  Description of Artificial Sequence: Synthetic oligonucleotide
  Sense strand starting at position 1214 of SEQ ID NO: 1880654
cugaauuaguaguuauacu

SEQ ID NO: 1983535 - RNA, 19 nt, Artificial Sequence
  Description of Artificial Sequence: Synthetic oligonucleotide
  Antisense strand to SEQ ID NO: 1983534
aguauaacuacuaauucag

SEQ ID NO: 1983536 - RNA, 19 nt, Artificial Sequence
  Description of Artificial Sequence: Synthetic oligonucleotide
  Sense strand starting at position 1427 of SEQ ID NO: 1880654
uuuguacaauggguauaau

SEQ ID NO: 1983537 - RNA, 19 nt, Artificial Sequence
  Description of Artificial Sequence: Synthetic oligonucleotide
  Antisense strand to SEQ ID NO: 1983536
auuauacccauuguacaaa

SEQ ID NO: 1983538 - RNA, 19 nt, Artificial Sequence
  Description of Artificial Sequence: Synthetic oligonucleotide
  Sense strand starting at position 1448 of SEQ ID NO: 1880654
gaagacuuaccucaucggu

SEQ ID NO: 1983539 - RNA, 19 nt, Artificial Sequence
  Description of Artificial Sequence: Synthetic oligonucleotide
  Antisense strand to SEQ ID NO: 1983538
accgaugagguaagucuuc

SEQ ID NO: 1983540 - RNA, 19 nt, Artificial Sequence
  Description of Artificial Sequence: Synthetic oligonucleotide
  Sense strand starting at position 1450 of SEQ ID NO: 1880654
agacuuaccucaucgguaa

SEQ ID NO: 1983541 - RNA, 19 nt, Artificial Sequence
  Description of Artificial Sequence: Synthetic oligonucleotide
  Antisense strand to SEQ ID NO: 1983540
uuaccgaugagguaagucu

SEQ ID NO: 1983542 - RNA, 19 nt, Artificial Sequence
  Description of Artificial Sequence: Synthetic oligonucleotide
  Sense strand starting at position 1474 of SEQ ID NO: 1880654
gguuaaauggaaggaugua

SEQ ID NO: 1983543 - RNA, 19 nt, Artificial Sequence
  Description of Artificial Sequence: Synthetic oligonucleotide
  Antisense strand to SEQ ID NO: 1983542
uacauccuuccauuuaacc

SEQ ID NO: 1983544 - RNA, 19 nt, Artificial Sequence
  Description of Artificial Sequence: Synthetic oligonucleotide
  Sense strand starting at position 1549 of SEQ ID NO: 1880654
uggguaaugcacuaacaua

SEQ ID NO: 1983545 - RNA, 19 nt, Artificial Sequence
  Description of Artificial Sequence: Synthetic oligonucleotide
  Antisense strand to SEQ ID NO: 1983544
uauguuagugcauuaccca

SEQ ID NO: 1983546 - RNA, 19 nt, Artificial Sequence
  Description of Artificial Sequence: Synthetic oligonucleotide
  Sense strand starting at position 1668 of SEQ ID NO: 1880654
cugggaagcugacuaagua

SEQ ID NO: 1983547 - RNA, 19 nt, Artificial Sequence
  Description of Artificial Sequence: Synthetic oligonucleotide
  Antisense strand to SEQ ID NO: 1983546
uacuuagucagcuucccag

SEQ ID NO: 1983548 - RNA, 19 nt, Artificial Sequence
  Description of Artificial Sequence: Synthetic oligonucleotide
  Sense strand starting at position 1753 of SEQ ID NO: 1880654
cgauaacaacugugaucca

SEQ ID NO: 1983549 - RNA, 19 nt, Artificial Sequence
  Description of Artificial Sequence: Synthetic oligonucleotide
  Antisense strand to SEQ ID NO: 1983548
uggaucacaguuguuaucg

SEQ ID NO: 1983550 - RNA, 19 nt, Artificial Sequence
  Description of Artificial Sequence: Synthetic oligonucleotide
  Sense strand starting at position 1906 of SEQ ID NO: 1880654
ggaauaaagucagcaguau

SEQ ID NO: 1983551 - RNA, 19 nt, Artificial Sequence
  Description of Artificial Sequence: Synthetic oligonucleotide
  Antisense strand to SEQ ID NO: 1983550
auacugcugacuuuauucc

SEQ ID NO: 1983552 - RNA, 19 nt, Artificial Sequence
  Description of Artificial Sequence: Synthetic oligonucleotide
  Sense strand starting at position 1907 of SEQ ID NO: 1880654
gaauaaagucagcaguauu

SEQ ID NO: 1983553 - RNA, 19 nt, Artificial Sequence
  Description of Artificial Sequence: Synthetic oligonucleotide
  Antisense strand to SEQ ID NO: 1983552
aauacugcugacuuuauuc

SEQ ID NO: 1983554 - RNA, 19 nt, Artificial Sequence
  Description of Artificial Sequence: Synthetic oligonucleotide
  Sense strand starting at position 1940 of SEQ ID NO: 1880654
aggacaaugccauacgauu

SEQ ID NO: 1983555 - RNA, 19 nt, Artificial Sequence
  Description of Artificial Sequence: Synthetic oligonucleotide
  Antisense strand to SEQ ID NO: 1983554
aaucguauggcauuguccu

SEQ ID NO: 1983556 - RNA, 19 nt, Artificial Sequence
  Description of Artificial Sequence: Synthetic oligonucleotide
  Sense strand starting at position 1946 of SEQ ID NO: 1880654
augccauacgauuauaaua

SEQ ID NO: 1983557 - RNA, 19 nt, Artificial Sequence
  Description of Artificial Sequence: Synthetic oligonucleotide
  Antisense strand to SEQ ID NO: 1983556
uauuauaaucguauggcau

SEQ ID NO: 1983558 - RNA, 19 nt, Artificial Sequence
  Description of Artificial Sequence: Synthetic oligonucleotide
  Sense strand starting at position 1987 of SEQ ID NO: 1880654
ggaugacacgucugacaau

SEQ ID NO: 1983559 - RNA, 19 nt, Artificial Sequence
  Description of Artificial Sequence: Synthetic oligonucleotide
  Antisense strand to SEQ ID NO: 1983558
auugucagacgugucaucc

SEQ ID NO: 1983560 - RNA, 19 nt, Artificial Sequence
  Description of Artificial Sequence: Synthetic oligonucleotide
  Sense strand starting at position 2080 of SEQ ID NO: 1880654
aaaguauguguccauuaga

SEQ ID NO: 1983561 - RNA, 19 nt, Artificial Sequence
  Description of Artificial Sequence: Synthetic oligonucleotide
  Antisense strand to SEQ ID NO: 1983560
ucuaauggacacauacuuu

SEQ ID NO: 1983562 - RNA, 19 nt, Artificial Sequence
  Description of Artificial Sequence: Synthetic oligonucleotide
  Sense strand starting at position 2083 of SEQ ID NO: 1880654
guauguguccauuagauaa

SEQ ID NO: 1983563 - RNA, 19 nt, Artificial Sequence
  Description of Artificial Sequence: Synthetic oligonucleotide
  Antisense strand to SEQ ID NO: 1983562
uuaucuaauggacacauac

SEQ ID NO: 1983564 - RNA, 19 nt, Artificial Sequence
  Description of Artificial Sequence: Synthetic oligonucleotide
  Sense strand starting at position 2087 of SEQ ID NO: 1880654
guguccauuagauaaggca

SEQ ID NO: 1983565 - RNA, 19 nt, Artificial Sequence
  Description of Artificial Sequence: Synthetic oligonucleotide
  Antisense strand to SEQ ID NO: 1983564
ugccuuaucuaauggacac

SEQ ID NO: 1983566 - RNA, 19 nt, Artificial Sequence
  Description of Artificial Sequence: Synthetic oligonucleotide
  Sense strand starting at position 2487 of SEQ ID NO: 1880654
agaccucugccucagcaaa

SEQ ID NO: 1983567 - RNA, 19 nt, Artificial Sequence
  Description of Artificial Sequence: Synthetic oligonucleotide
  Antisense strand to SEQ ID NO: 1983566
uuugcugaggcagaggucu

SEQ ID NO: 1983568 - RNA, 19 nt, Artificial Sequence
  Description of Artificial Sequence: Synthetic oligonucleotide
  Sense strand starting at position 2949 of SEQ ID NO: 1880654
cccagaugccaguagcaua

SEQ ID NO: 1983569 - RNA, 19 nt, Artificial Sequence
  Description of Artificial Sequence: Synthetic oligonucleotide
  Antisense strand to SEQ ID NO: 1983568
uaugcuacuggcaucuggg

SEQ ID NO: 1983570 - RNA, 19 nt, Artificial Sequence
  Description of Artificial Sequence: Synthetic oligonucleotide
  Sense strand starting at position 3012 of SEQ ID NO: 1880654
cuaaauguucccugaggga

SEQ ID NO: 1983571 - RNA, 19 nt, Artificial Sequence
  Description of Artificial Sequence: Synthetic oligonucleotide
  Antisense strand to SEQ ID NO: 1983570
ucccucagggaacauuuag

SEQ ID NO: 1983572 - RNA, 19 nt, Artificial Sequence
  Description of Artificial Sequence: Synthetic oligonucleotide
  Sense strand starting at position 3064 of SEQ ID NO: 1880654
ggcaacuaaugaucucaca

SEQ ID NO: 1983573 - RNA, 19 nt, Artificial Sequence
  Description of Artificial Sequence: Synthetic oligonucleotide
  Antisense strand to SEQ ID NO: 1983572
ugugagaucauuaguugcc

SEQ ID NO: 1983574 - RNA, 19 nt, Artificial Sequence
  Description of Artificial Sequence: Synthetic oligonucleotide
  Sense strand starting at position 3203 of SEQ ID NO: 1880654
ccuucuuagccucagaagu

SEQ ID NO: 1983575 - RNA, 19 nt, Artificial Sequence
  Description of Artificial Sequence: Synthetic oligonucleotide
  Antisense strand to SEQ ID NO: 1983574
acuucugaggcuaagaagg

SEQ ID NO: 1983576 - RNA, 19 nt, Artificial Sequence
  Description of Artificial Sequence: Synthetic oligonucleotide
  Sense strand starting at position 3431 of SEQ ID NO: 1880654
gggacuagcagccaucaga

SEQ ID NO: 1983577 - RNA, 19 nt, Artificial Sequence
  Description of Artificial Sequence: Synthetic oligonucleotide
  Antisense strand to SEQ ID NO: 1983576
ucugauggcugcuaguccc

SEQ ID NO: 1983578 - RNA, 19 nt, Artificial Sequence
  Description of Artificial Sequence: Synthetic oligonucleotide
  Sense strand starting at position 3503 of SEQ ID NO: 1880654
uuguguggccaugagaauu

SEQ ID NO: 1983579 - RNA, 19 nt, Artificial Sequence
  Description of Artificial Sequence: Synthetic oligonucleotide
  Antisense strand to SEQ ID NO: 1983578
aauucucauggccacacaa

SEQ ID NO: 1983580 - RNA, 19 nt, Artificial Sequence
  Description of Artificial Sequence: Synthetic oligonucleotide
  Sense strand starting at position 3669 of SEQ ID NO: 1880654
ucugcucuccaagaagagu

SEQ ID NO: 1983581 - RNA, 19 nt, Artificial Sequence
  Description of Artificial Sequence: Synthetic oligonucleotide
  Antisense strand to SEQ ID NO: 1983580
acucuucuuggagagcaga

SEQ ID NO: 1983582 - RNA, 19 nt, Artificial Sequence
  Description of Artificial Sequence: Synthetic oligonucleotide
  Sense strand starting at position 3694 of SEQ ID NO: 1880654
agaggaagccucggaagua

SEQ ID NO: 1983583 - RNA, 19 nt, Artificial Sequence
  Description of Artificial Sequence: Synthetic oligonucleotide
  Antisense strand to SEQ ID NO: 1983582
uacuuccgaggcuuccucu

SEQ ID NO: 1983584 - RNA, 19 nt, Artificial Sequence
  Description of Artificial Sequence: Synthetic oligonucleotide
  Sense strand starting at position 3737 of SEQ ID NO: 1880654
gguuaauaaccaugaccac

SEQ ID NO: 1983585 - RNA, 19 nt, Artificial Sequence
  Description of Artificial Sequence: Synthetic oligonucleotide
  Antisense strand to SEQ ID NO: 1983584
guggucaugguuauuaacc

SEQ ID NO: 1983586 - RNA, 19 nt, Artificial Sequence
  Description of Artificial Sequence: Synthetic oligonucleotide
  Sense strand starting at position 3814 of SEQ ID NO: 1880654
gccguauaaccacauccaa

SEQ ID NO: 1983587 - RNA, 19 nt, Artificial Sequence
  Description of Artificial Sequence: Synthetic oligonucleotide
  Antisense strand to SEQ ID NO: 1983586
uuggaugugguuauacggc

SEQ ID NO: 1983588 - RNA, 19 nt, Artificial Sequence
  Description of Artificial Sequence: Synthetic oligonucleotide
  Sense strand starting at position 3956 of SEQ ID NO: 1880654
gucugcugucaacaaagau

SEQ ID NO: 1983589 - RNA, 19 nt, Artificial Sequence
  Description of Artificial Sequence: Synthetic oligonucleotide
  Antisense strand to SEQ ID NO: 1983588
aucuuuguugacagcagac

SEQ ID NO: 1983590 - RNA, 19 nt, Artificial Sequence
  Description of Artificial Sequence: Synthetic oligonucleotide
  Sense strand starting at position 317 of SEQ ID NO: 1880655
agaaauauuuguuagccaa

SEQ ID NO: 1983591 - RNA, 19 nt, Artificial Sequence
  Description of Artificial Sequence: Synthetic oligonucleotide
  Antisense strand to SEQ ID NO: 1983590
uuggcuaacaaauauuucu

SEQ ID NO: 1983592 - RNA, 19 nt, Artificial Sequence
  Description of Artificial Sequence: Synthetic oligonucleotide
  Sense strand starting at position 372 of SEQ ID NO: 1880655
uaagcucucggucaaagaa

SEQ ID NO: 1983593 - RNA, 19 nt, Artificial Sequence
  Description of Artificial Sequence: Synthetic oligonucleotide
  Antisense strand to SEQ ID NO: 1983592
uucuuugaccgagagcuua

SEQ ID NO: 1983594 - RNA, 19 nt, Artificial Sequence
  Description of Artificial Sequence: Synthetic oligonucleotide
  Sense strand starting at position 994 of SEQ ID NO: 1880655
ggccgagaacuuuaaauac

SEQ ID NO: 1983595 - RNA, 19 nt, Artificial Sequence
  Description of Artificial Sequence: Synthetic oligonucleotide
  Antisense strand to SEQ ID NO: 1983594
guauuuaaaguucucggcc

SEQ ID NO: 1983596 - RNA, 19 nt, Artificial Sequence
  Description of Artificial Sequence: Synthetic oligonucleotide
  Sense strand starting at position 1034 of SEQ ID NO: 1880655
acgucuuuagacugaaaca

SEQ ID NO: 1983597 - RNA, 19 nt, Artificial Sequence
  Description of Artificial Sequence: Synthetic oligonucleotide
  Antisense strand to SEQ ID NO: 1983596
uguuucagucuaaagacgu

SEQ ID NO: 1983598 - RNA, 19 nt, Artificial Sequence
  Description of Artificial Sequence: Synthetic oligonucleotide
  Sense strand starting at position 1275 of SEQ ID NO: 1880655
ggaagaucaguuggaacga

SEQ ID NO: 1983599 - RNA, 19 nt, Artificial Sequence
  Description of Artificial Sequence: Synthetic oligonucleotide
  Antisense strand to SEQ ID NO: 1983598
ucguuccaacugaucuucc

SEQ ID NO: 1983600 - RNA, 19 nt, Artificial Sequence
  Description of Artificial Sequence: Synthetic oligonucleotide
  Sense strand starting at position 1301 of SEQ ID NO: 1880655
ggagcaauuugacagucaa

SEQ ID NO: 1983601 - RNA, 19 nt, Artificial Sequence
  Description of Artificial Sequence: Synthetic oligonucleotide
  Antisense strand to SEQ ID NO: 1983600
uugacugucaaauugcucc

SEQ ID NO: 1983602 - RNA, 19 nt, Artificial Sequence
  Description of Artificial Sequence: Synthetic oligonucleotide
  Sense strand starting at position 1375 of SEQ ID NO: 1880655
uugucuaguagugauacuu

SEQ ID NO: 1983603 - RNA, 19 nt, Artificial Sequence
  Description of Artificial Sequence: Synthetic oligonucleotide
  Antisense strand to SEQ ID NO: 1983602
aaguaucacuacuagacaa

SEQ ID NO: 1983604 - RNA, 19 nt, Artificial Sequence
  Description of Artificial Sequence: Synthetic oligonucleotide
  Sense strand starting at position 1381 of SEQ ID NO: 1880655
aguagugauacuuagaagu

SEQ ID NO: 1983605 - RNA, 19 nt, Artificial Sequence
  Description of Artificial Sequence: Synthetic oligonucleotide
  Antisense strand to SEQ ID NO: 1983604
acuucuaaguaucacuacu

SEQ ID NO: 1983606 - RNA, 19 nt, Artificial Sequence
  Description of Artificial Sequence: Synthetic oligonucleotide
  Sense strand starting at position 1444 of SEQ ID NO: 1880655
ugguauaaacacugcuaca

SEQ ID NO: 1983607 - RNA, 19 nt, Artificial Sequence
  Description of Artificial Sequence: Synthetic oligonucleotide
  Antisense strand to SEQ ID NO: 1983606
uguagcaguguuuauacca

SEQ ID NO: 1983608 - RNA, 19 nt, Artificial Sequence
  Description of Artificial Sequence: Synthetic oligonucleotide
  Sense strand starting at position 1573 of SEQ ID NO: 1880655
gggcccugccuauagaauu

SEQ ID NO: 1983609 - RNA, 19 nt, Artificial Sequence
  Description of Artificial Sequence: Synthetic oligonucleotide
  Antisense strand to SEQ ID NO: 1983608
aauucuauaggcagggccc

SEQ ID NO: 1983610 - RNA, 19 nt, Artificial Sequence
  Description of Artificial Sequence: Synthetic oligonucleotide
  Sense strand starting at position 1615 of SEQ ID NO: 1880655
acaucacacuauguuuaga

SEQ ID NO: 1983611 - RNA, 19 nt, Artificial Sequence
  Description of Artificial Sequence: Synthetic oligonucleotide
  Antisense strand to SEQ ID NO: 1983610
ucuaaacauagugugaugu

SEQ ID NO: 1983612 - RNA, 19 nt, Artificial Sequence
  Description of Artificial Sequence: Synthetic oligonucleotide
  Sense strand starting at position 1738 of SEQ ID NO: 1880655
uuugucuuggaaugaucau

SEQ ID NO: 1983613 - RNA, 19 nt, Artificial Sequence
  Description of Artificial Sequence: Synthetic oligonucleotide
  Antisense strand to SEQ ID NO: 1983612
augaucauuccaagacaaa

SEQ ID NO: 1983614 - RNA, 19 nt, Artificial Sequence
  Description of Artificial Sequence: Synthetic oligonucleotide
  Sense strand starting at position 1871 of SEQ ID NO: 1880655
cagggaaagauguguguaa

SEQ ID NO: 1983615 - RNA, 19 nt, Artificial Sequence
  Description of Artificial Sequence: Synthetic oligonucleotide
  Antisense strand to SEQ ID NO: 1983614
uuacacacaucuuucccug

SEQ ID NO: 1983616 - RNA, 19 nt, Artificial Sequence
  Description of Artificial Sequence: Synthetic oligonucleotide
  Sense strand starting at position 1883 of SEQ ID NO: 1880655
uguguaagcguuccggcaa

SEQ ID NO: 1983617 - RNA, 19 nt, Artificial Sequence
  Description of Artificial Sequence: Synthetic oligonucleotide
  Antisense strand to SEQ ID NO: 1983616
uugccggaacgcuuacaca

SEQ ID NO: 1983618 - RNA, 19 nt, Artificial Sequence
  Description of Artificial Sequence: Synthetic oligonucleotide
  Sense strand starting at position 1886 of SEQ ID NO: 1880655
guaagcguuccggcaaucu

SEQ ID NO: 1983619 - RNA, 19 nt, Artificial Sequence
  Description of Artificial Sequence: Synthetic oligonucleotide
  Antisense strand to SEQ ID NO: 1983618
agauugccggaacgcuuac

SEQ ID NO: 1983620 - RNA, 19 nt, Artificial Sequence
  Description of Artificial Sequence: Synthetic oligonucleotide
  Sense strand starting at position 1890 of SEQ ID NO: 1880655
gcguuccggcaaucucaaa

SEQ ID NO: 1983621 - RNA, 19 nt, Artificial Sequence
  Description of Artificial Sequence: Synthetic oligonucleotide
  Antisense strand to SEQ ID NO: 1983620
uuugagauugccggaacgc

SEQ ID NO: 1983622 - RNA, 19 nt, Artificial Sequence
  Description of Artificial Sequence: Synthetic oligonucleotide
  Sense strand starting at position 2047 of SEQ ID NO: 1880655
gacagaagucgauggcuaa

SEQ ID NO: 1983623 - RNA, 19 nt, Artificial Sequence
  Description of Artificial Sequence: Synthetic oligonucleotide
  Antisense strand to SEQ ID NO: 1983622
uuagccaucgacuucuguc

SEQ ID NO: 1983624 - RNA, 19 nt, Artificial Sequence
  Description of Artificial Sequence: Synthetic oligonucleotide
  Sense strand starting at position 2195 of SEQ ID NO: 1880655
gugacuuuccaaggacaga

SEQ ID NO: 1983625 - RNA, 19 nt, Artificial Sequence
  Description of Artificial Sequence: Synthetic oligonucleotide
  Antisense strand to SEQ ID NO: 1983624
ucuguccuuggaaagucac

SEQ ID NO: 1983626 - RNA, 19 nt, Artificial Sequence
  Description of Artificial Sequence: Synthetic oligonucleotide
  Sense strand starting at position 2366 of SEQ ID NO: 1880655
uguacuaaaugcuuguaaa

SEQ ID NO: 1983627 - RNA, 19 nt, Artificial Sequence
  Description of Artificial Sequence: Synthetic oligonucleotide
  Antisense strand to SEQ ID NO: 1983626
uuuacaagcauuuaguaca

SEQ ID NO: 1983628 - RNA, 19 nt, Artificial Sequence
  Description of Artificial Sequence: Synthetic oligonucleotide
  Sense strand starting at position 2454 of SEQ ID NO: 1880655
acaugagcuucuucccaga

SEQ ID NO: 1983629 - RNA, 19 nt, Artificial Sequence
  Description of Artificial Sequence: Synthetic oligonucleotide
  Antisense strand to SEQ ID NO: 1983628
ucugggaagaagcucaugu

SEQ ID NO: 1983630 - RNA, 19 nt, Artificial Sequence
  Description of Artificial Sequence: Synthetic oligonucleotide
  Sense strand starting at position 2456 of SEQ ID NO: 1880655
augagcuucuucccagaca

SEQ ID NO: 1983631 - RNA, 19 nt, Artificial Sequence
  Description of Artificial Sequence: Synthetic oligonucleotide
  Antisense strand to SEQ ID NO: 1983630
ugucugggaagaagcucau

SEQ ID NO: 1983632 - RNA, 19 nt, Artificial Sequence
  Description of Artificial Sequence: Synthetic oligonucleotide
  Sense strand starting at position 2777 of SEQ ID NO: 1880655
gucucaaauccagaaagca

SEQ ID NO: 1983633 - RNA, 19 nt, Artificial Sequence
  Description of Artificial Sequence: Synthetic oligonucleotide
  Antisense strand to SEQ ID NO: 1983632
ugcuuucuggauuugagac

SEQ ID NO: 1983634 - RNA, 19 nt, Artificial Sequence
  Description of Artificial Sequence: Synthetic oligonucleotide
  Sense strand starting at position 2813 of SEQ ID NO: 1880655
cuucuacuuugggcaaaga

SEQ ID NO: 1983635 - RNA, 19 nt, Artificial Sequence
  Description of Artificial Sequence: Synthetic oligonucleotide
  Antisense strand to SEQ ID NO: 1983634
ucuuugcccaaaguagaag

SEQ ID NO: 1983636 - RNA, 19 nt, Artificial Sequence
  Description of Artificial Sequence: Synthetic oligonucleotide
  Sense strand starting at position 2838 of SEQ ID NO: 1880655
cgcugugugcccagagaag

SEQ ID NO: 1983637 - RNA, 19 nt, Artificial Sequence
  Description of Artificial Sequence: Synthetic oligonucleotide
  Antisense strand to SEQ ID NO: 1983636
cuucucugggcacacagcg

SEQ ID NO: 1983638 - RNA, 19 nt, Artificial Sequence
  Description of Artificial Sequence: Synthetic oligonucleotide
  Sense strand starting at position 2854 of SEQ ID NO: 1880655
aagaaaugacccggccuua

SEQ ID NO: 1983639 - RNA, 19 nt, Artificial Sequence
  Description of Artificial Sequence: Synthetic oligonucleotide
  Antisense strand to SEQ ID NO: 1983638
uaaggccgggucauuucuu

SEQ ID NO: 1983640 - RNA, 19 nt, Artificial Sequence
  Description of Artificial Sequence: Synthetic oligonucleotide
  Sense strand starting at position 2905 of SEQ ID NO: 1880655
uguccacuccuuuaaguga

SEQ ID NO: 1983641 - RNA, 19 nt, Artificial Sequence
  Description of Artificial Sequence: Synthetic oligonucleotide
  Antisense strand to SEQ ID NO: 1983640
ucacuuaaaggaguggaca

SEQ ID NO: 1983642 - RNA, 19 nt, Artificial Sequence
  Description of Artificial Sequence: Synthetic oligonucleotide
  Sense strand starting at position 2912 of SEQ ID NO: 1880655
uccuuuaagugauucgaaa

SEQ ID NO: 1983643 - RNA, 19 nt, Artificial Sequence
  Description of Artificial Sequence: Synthetic oligonucleotide
  Antisense strand to SEQ ID NO: 1983642
uuucgaaucacuuaaagga

SEQ ID NO: 1983644 - RNA, 19 nt, Artificial Sequence
  Description of Artificial Sequence: Synthetic oligonucleotide
  Sense strand starting at position 2914 of SEQ ID NO: 1880655
cuuuaagugauucgaaaug

SEQ ID NO: 1983645 - RNA, 19 nt, Artificial Sequence
  Description of Artificial Sequence: Synthetic oligonucleotide
  Antisense strand to SEQ ID NO: 1983644
cauuucgaaucacuuaaag

SEQ ID NO: 1983646 - RNA, 19 nt, Artificial Sequence
  Description of Artificial Sequence: Synthetic oligonucleotide
  Sense strand starting at position 2919 of SEQ ID NO: 1880655
agugauucgaaauggcuca

SEQ ID NO: 1983647 - RNA, 19 nt, Artificial Sequence
  Description of Artificial Sequence: Synthetic oligonucleotide
  Antisense strand to SEQ ID NO: 1983646
ugagccauuucgaaucacu

SEQ ID NO: 1983648 - RNA, 19 nt, Artificial Sequence
  Description of Artificial Sequence: Synthetic oligonucleotide
  Sense strand starting at position 3052 of SEQ ID NO: 1880655
ggucucaugagccagguaa

SEQ ID NO: 1983649 - RNA, 19 nt, Artificial Sequence
  Description of Artificial Sequence: Synthetic oligonucleotide
  Antisense strand to SEQ ID NO: 1983648
uuaccuggcucaugagacc

SEQ ID NO: 1983650 - RNA, 19 nt, Artificial Sequence
  Description of Artificial Sequence: Synthetic oligonucleotide
  Sense strand starting at position 3096 of SEQ ID NO: 1880655
cuggcuucugcagaugaac

SEQ ID NO: 1983651 - RNA, 19 nt, Artificial Sequence
  Description of Artificial Sequence: Synthetic oligonucleotide
  Antisense strand to SEQ ID NO: 1983650
guucaucugcagaagccag

SEQ ID NO: 1983652 - RNA, 19 nt, Artificial Sequence
  Description of Artificial Sequence: Synthetic oligonucleotide
  Sense strand starting at position 3143 of SEQ ID NO: 1880655
ggaguuacaacauggaagu

SEQ ID NO: 1983653 - RNA, 19 nt, Artificial Sequence
  Description of Artificial Sequence: Synthetic oligonucleotide
  Antisense strand to SEQ ID NO: 1983652
acuuccauguuguaacucc

SEQ ID NO: 1983654 - RNA, 19 nt, Artificial Sequence
  Description of Artificial Sequence: Synthetic oligonucleotide
  Sense strand starting at position 3144 of SEQ ID NO: 1880655
gaguuacaacauggaaguu

SEQ ID NO: 1983655 - RNA, 19 nt, Artificial Sequence
  Description of Artificial Sequence: Synthetic oligonucleotide
  Antisense strand to SEQ ID NO: 1983654
aacuuccauguuguaacuc

SEQ ID NO: 1983656 - RNA, 19 nt, Artificial Sequence
  Description of Artificial Sequence: Synthetic oligonucleotide
  Sense strand starting at position 3549 of SEQ ID NO: 1880655
agaacaguucgacggaauc

SEQ ID NO: 1983657 - RNA, 19 nt, Artificial Sequence
  Description of Artificial Sequence: Synthetic oligonucleotide
  Antisense strand to SEQ ID NO: 1983656
gauuccgucgaacuguucu

SEQ ID NO: 1983658 - RNA, 19 nt, Artificial Sequence
  Description of Artificial Sequence: Synthetic oligonucleotide
  Sense strand starting at position 3561 of SEQ ID NO: 1880655
cggaaucauuucuacaaau

SEQ ID NO: 1983659 - RNA, 19 nt, Artificial Sequence
  Description of Artificial Sequence: Synthetic oligonucleotide
  Antisense strand to SEQ ID NO: 1983658
auuuguagaaaugauuccg

SEQ ID NO: 1983660 - RNA, 19 nt, Artificial Sequence
  Description of Artificial Sequence: Synthetic oligonucleotide
  Sense strand starting at position 3576 of SEQ ID NO: 1880655
aaauacgagcagugggauu

SEQ ID NO: 1983661 - RNA, 19 nt, Artificial Sequence
  Description of Artificial Sequence: Synthetic oligonucleotide
  Antisense strand to SEQ ID NO: 1983660
aaucccacugcucguauuu

SEQ ID NO: 1983662 - RNA, 19 nt, Artificial Sequence
  Description of Artificial Sequence: Synthetic oligonucleotide
  Sense strand starting at position 3785 of SEQ ID NO: 1880655
ccaagaaugucuccaggga

SEQ ID NO: 1983663 - RNA, 19 nt, Artificial Sequence
  Description of Artificial Sequence: Synthetic oligonucleotide
  Antisense strand to SEQ ID NO: 1983662
ucccuggagacauucuugg

SEQ ID NO: 1983664 - RNA, 19 nt, Artificial Sequence
  Description of Artificial Sequence: Synthetic oligonucleotide
  Sense strand starting at position 3914 of SEQ ID NO: 1880655
gaagcagaguaucuuccaa

SEQ ID NO: 1983665 - RNA, 19 nt, Artificial Sequence
  Description of Artificial Sequence: Synthetic oligonucleotide
  Antisense strand to SEQ ID NO: 1983664
uuggaagauacucugcuuc

SEQ ID NO: 1983666 - RNA, 19 nt, Artificial Sequence
  Description of Artificial Sequence: Synthetic oligonucleotide
  Sense strand starting at position 3916 of SEQ ID NO: 1880655
agcagaguaucuuccaacu

SEQ ID NO: 1983667 - RNA, 19 nt, Artificial Sequence
  Description of Artificial Sequence: Synthetic oligonucleotide
  Antisense strand to SEQ ID NO: 1983666
aguuggaagauacucugcu

SEQ ID NO: 1983668 - RNA, 19 nt, Artificial Sequence
  Description of Artificial Sequence: Synthetic oligonucleotide
  Sense strand starting at position 3951 of SEQ ID NO: 1880655
gucauauuagcuuaugaaa

SEQ ID NO: 1983669 - RNA, 19 nt, Artificial Sequence
  Description of Artificial Sequence: Synthetic oligonucleotide
  Antisense strand to SEQ ID NO: 1983668
uuucauaagcuaauaugac

SEQ ID NO: 1983670 - RNA, 19 nt, Artificial Sequence
  Description of Artificial Sequence: Synthetic oligonucleotide
  Sense strand starting at position 429 of SEQ ID NO: 1880656
cuacucagaucaugcaguu

SEQ ID NO: 1983671 - RNA, 19 nt, Artificial Sequence
  Description of Artificial Sequence: Synthetic oligonucleotide
  Antisense strand to SEQ ID NO: 1983670
aacugcaugaucugaguag

SEQ ID NO: 1983672 - RNA, 19 nt, Artificial Sequence
  Description of Artificial Sequence: Synthetic oligonucleotide
  Sense strand starting at position 543 of SEQ ID NO: 1880656
cuaaccuuaucugugcgaa

SEQ ID NO: 1983673 - RNA, 19 nt, Artificial Sequence
  Description of Artificial Sequence: Synthetic oligonucleotide
  Antisense strand to SEQ ID NO: 1983672
uucgcacagauaagguuag

SEQ ID NO: 1983674 - RNA, 19 nt, Artificial Sequence
  Description of Artificial Sequence: Synthetic oligonucleotide
  Sense strand starting at position 544 of SEQ ID NO: 1880656
uaaccuuaucugugcgaag

SEQ ID NO: 1983675 - RNA, 19 nt, Artificial Sequence
  Description of Artificial Sequence: Synthetic oligonucleotide
  Antisense strand to SEQ ID NO: 1983674
cuucgcacagauaagguua

SEQ ID NO: 1983676 - RNA, 19 nt, Artificial Sequence
  Description of Artificial Sequence: Synthetic oligonucleotide
  Sense strand starting at position 546 of SEQ ID NO: 1880656
accuuaucugugcgaagca

SEQ ID NO: 1983677 - RNA, 19 nt, Artificial Sequence
  Description of Artificial Sequence: Synthetic oligonucleotide
  Antisense strand to SEQ ID NO: 1983676
ugcuucgcacagauaaggu

SEQ ID NO: 1983678 - RNA, 19 nt, Artificial Sequence
  Description of Artificial Sequence: Synthetic oligonucleotide
  Sense strand starting at position 921 of SEQ ID NO: 1880656
aaauuaauucugugggcca

SEQ ID NO: 1983679 - RNA, 19 nt, Artificial Sequence
  Description of Artificial Sequence: Synthetic oligonucleotide
  Antisense strand to SEQ ID NO: 1983678
uggcccacagaauuaauuu

SEQ ID NO: 1983680 - RNA, 19 nt, Artificial Sequence
  Description of Artificial Sequence: Synthetic oligonucleotide
  Sense strand starting at position 922 of SEQ ID NO: 1880656
aauuaauucugugggccau

SEQ ID NO: 1983681 - RNA, 19 nt, Artificial Sequence
  Description of Artificial Sequence: Synthetic oligonucleotide
  Antisense strand to SEQ ID NO: 1983680
auggcccacagaauuaauu

SEQ ID NO: 1983682 - RNA, 19 nt, Artificial Sequence
  Description of Artificial Sequence: Synthetic oligonucleotide
  Sense strand starting at position 943 of SEQ ID NO: 1880656
guaggucacaacuggcaau

SEQ ID NO: 1983683 - RNA, 19 nt, Artificial Sequence
  Description of Artificial Sequence: Synthetic oligonucleotide
  Antisense strand to SEQ ID NO: 1983682
auugccaguugugaccuac

SEQ ID NO: 1983684 - RNA, 19 nt, Artificial Sequence
  Description of Artificial Sequence: Synthetic oligonucleotide
  Sense strand starting at position 1015 of SEQ ID NO: 1880656
ggcagaugcucugcuuugu

SEQ ID NO: 1983685 - RNA, 19 nt, Artificial Sequence
  Description of Artificial Sequence: Synthetic oligonucleotide
  Antisense strand to SEQ ID NO: 1983684
acaaagcagagcaucugcc

SEQ ID NO: 1983686 - RNA, 19 nt, Artificial Sequence
  Description of Artificial Sequence: Synthetic oligonucleotide
  Sense strand starting at position 2083 of SEQ ID NO: 1880656
ugagguucugugugacuuu

SEQ ID NO: 1983687 - RNA, 19 nt, Artificial Sequence
  Description of Artificial Sequence: Synthetic oligonucleotide
  Antisense strand to SEQ ID NO: 1983686
aaagucacacagaaccuca

SEQ ID NO: 1983688 - RNA, 19 nt, Artificial Sequence
  Description of Artificial Sequence: Synthetic oligonucleotide
  Sense strand starting at position 2092 of SEQ ID NO: 1880656
gugugacuuugggacaagu

SEQ ID NO: 1983689 - RNA, 19 nt, Artificial Sequence
  Description of Artificial Sequence: Synthetic oligonucleotide
  Antisense strand to SEQ ID NO: 1983688
acuugucccaaagucacac

SEQ ID NO: 1983690 - RNA, 19 nt, Artificial Sequence
  Description of Artificial Sequence: Synthetic oligonucleotide
  Sense strand starting at position 2094 of SEQ ID NO: 1880656
gugacuuugggacaagucu

SEQ ID NO: 1983691 - RNA, 19 nt, Artificial Sequence
  Description of Artificial Sequence: Synthetic oligonucleotide
  Antisense strand to SEQ ID NO: 1983690
agacuugucccaaagucac

SEQ ID NO: 1983692 - RNA, 19 nt, Artificial Sequence
  Description of Artificial Sequence: Synthetic oligonucleotide
  Sense strand starting at position 2130 of SEQ ID NO: 1880656
ucugacauuccacauguau

SEQ ID NO: 1983693 - RNA, 19 nt, Artificial Sequence
  Description of Artificial Sequence: Synthetic oligonucleotide
  Antisense strand to SEQ ID NO: 1983692
auacauguggaaugucaga

SEQ ID NO: 1983694 - RNA, 19 nt, Artificial Sequence
  Description of Artificial Sequence: Synthetic oligonucleotide
  Sense strand starting at position 2875 of SEQ ID NO: 1880656
cccuaaagcccugaagacu

SEQ ID NO: 1983695 - RNA, 19 nt, Artificial Sequence
  Description of Artificial Sequence: Synthetic oligonucleotide
  Antisense strand to SEQ ID NO: 1983694
agucuucagggcuuuaggg

SEQ ID NO: 1983696 - RNA, 19 nt, Artificial Sequence
  Description of Artificial Sequence: Synthetic oligonucleotide
  Sense strand starting at position 3069 of SEQ ID NO: 1880656
cugacuucuggucaccuga

SEQ ID NO: 1983697 - RNA, 19 nt, Artificial Sequence
  Description of Artificial Sequence: Synthetic oligonucleotide
  Antisense strand to SEQ ID NO: 1983696
ucaggugaccagaagucag

SEQ ID NO: 1983698 - RNA, 19 nt, Artificial Sequence
  Description of Artificial Sequence: Synthetic oligonucleotide
  Sense strand starting at position 3128 of SEQ ID NO: 1880656
ugcagaauccugcaugugu

SEQ ID NO: 1983699 - RNA, 19 nt, Artificial Sequence
  Description of Artificial Sequence: Synthetic oligonucleotide
  Antisense strand to SEQ ID NO: 1983698
acacaugcaggauucugca

SEQ ID NO: 1983700 - RNA, 19 nt, Artificial Sequence
  Description of Artificial Sequence: Synthetic oligonucleotide
  Sense strand starting at position 3207 of SEQ ID NO: 1880656
gaaggcagcuccugacuuu

SEQ ID NO: 1983701 - RNA, 19 nt, Artificial Sequence
  Description of Artificial Sequence: Synthetic oligonucleotide
  Antisense strand to SEQ ID NO: 1983700
aaagucaggagcugccuuc

SEQ ID NO: 1983702 - RNA, 19 nt, Artificial Sequence
  Description of Artificial Sequence: Synthetic oligonucleotide
  Sense strand starting at position 3214 of SEQ ID NO: 1880656
gcuccugacuuucucugaa

SEQ ID NO: 1983703 - RNA, 19 nt, Artificial Sequence
  Description of Artificial Sequence: Synthetic oligonucleotide
  Antisense strand to SEQ ID NO: 1983702
uucagagaaagucaggagc

SEQ ID NO: 1983704 - RNA, 19 nt, Artificial Sequence
  Description of Artificial Sequence: Synthetic oligonucleotide
  Sense strand starting at position 3288 of SEQ ID NO: 1880656
auaggucuagcagguauua

SEQ ID NO: 1983705 - RNA, 19 nt, Artificial Sequence
  Description of Artificial Sequence: Synthetic oligonucleotide
  Antisense strand to SEQ ID NO: 1983704
uaauaccugcuagaccuau

SEQ ID NO: 1983706 - RNA, 19 nt, Artificial Sequence
  Description of Artificial Sequence: Synthetic oligonucleotide
  Sense strand starting at position 3909 of SEQ ID NO: 1880656
ccaagcgacucuuggaagu

SEQ ID NO: 1983707 - RNA, 19 nt, Artificial Sequence
  Description of Artificial Sequence: Synthetic oligonucleotide
  Antisense strand to SEQ ID NO: 1983706
acuuccaagagucgcuugg

SEQ ID NO: 1983708 - RNA, 19 nt, Artificial Sequence
  Description of Artificial Sequence: Synthetic oligonucleotide
  Sense strand starting at position 229 of SEQ ID NO: 1880657
gcacaucugugauuccaau

SEQ ID NO: 1983709 - RNA, 19 nt, Artificial Sequence
  Description of Artificial Sequence: Synthetic oligonucleotide
  Antisense strand to SEQ ID NO: 1983708
auuggaaucacagaugugc

SEQ ID NO: 1983710 - RNA, 19 nt, Artificial Sequence
  Description of Artificial Sequence: Synthetic oligonucleotide
  Sense strand starting at position 360 of SEQ ID NO: 1880657
gguugcugacaggaaagua

SEQ ID NO: 1983711 - RNA, 19 nt, Artificial Sequence
  Description of Artificial Sequence: Synthetic oligonucleotide
  Antisense strand to SEQ ID NO: 1983710
uacuuuccugucagcaacc

SEQ ID NO: 1983712 - RNA, 19 nt, Artificial Sequence
  Description of Artificial Sequence: Synthetic oligonucleotide
  Sense strand starting at position 472 of SEQ ID NO: 1880657
gucaucauuguguaugaca

SEQ ID NO: 1983713 - RNA, 19 nt, Artificial Sequence
  Description of Artificial Sequence: Synthetic oligonucleotide
  Antisense strand to SEQ ID NO: 1983712
ugucauacacaaugaugac

SEQ ID NO: 1983714 - RNA, 19 nt, Artificial Sequence
  Description of Artificial Sequence: Synthetic oligonucleotide
  Sense strand starting at position 495 of SEQ ID NO: 1880657
uuaagugcucaggaaauac

SEQ ID NO: 1983715 - RNA, 19 nt, Artificial Sequence
  Description of Artificial Sequence: Synthetic oligonucleotide
  Antisense strand to SEQ ID NO: 1983714
guauuuccugagcacuuaa

SEQ ID NO: 1983716 - RNA, 19 nt, Artificial Sequence
  Description of Artificial Sequence: Synthetic oligonucleotide
  Sense strand starting at position 516 of SEQ ID NO: 1880657
uuggaagugaguugaauuc

SEQ ID NO: 1983717 - RNA, 19 nt, Artificial Sequence
  Description of Artificial Sequence: Synthetic oligonucleotide
  Antisense strand to SEQ ID NO: 1983716
gaauucaacucacuuccaa

SEQ ID NO: 1983718 - RNA, 19 nt, Artificial Sequence
  Description of Artificial Sequence: Synthetic oligonucleotide
  Sense strand starting at position 523 of SEQ ID NO: 1880657
ugaguugaauucuuaucau

SEQ ID NO: 1983719 - RNA, 19 nt, Artificial Sequence
  Description of Artificial Sequence: Synthetic oligonucleotide
  Antisense strand to SEQ ID NO: 1983718
augauaagaauucaacuca

SEQ ID NO: 1983720 - RNA, 19 nt, Artificial Sequence
  Description of Artificial Sequence: Synthetic oligonucleotide
  Sense strand starting at position 600 of SEQ ID NO: 1880657
gugaaagucacugagagcu

SEQ ID NO: 1983721 - RNA, 19 nt, Artificial Sequence
  Description of Artificial Sequence: Synthetic oligonucleotide
  Antisense strand to SEQ ID NO: 1983720
agcucucagugacuuucac

SEQ ID NO: 1983722 - RNA, 19 nt, Artificial Sequence
  Description of Artificial Sequence: Synthetic oligonucleotide
  Sense strand starting at position 704 of SEQ ID NO: 1880657
cuguucuuugaguggaaag

SEQ ID NO: 1983723 - RNA, 19 nt, Artificial Sequence
  Description of Artificial Sequence: Synthetic oligonucleotide
  Antisense strand to SEQ ID NO: 1983722
cuuuccacucaaagaacag

SEQ ID NO: 1983724 - RNA, 19 nt, Artificial Sequence
  Description of Artificial Sequence: Synthetic oligonucleotide
  Sense strand starting at position 705 of SEQ ID NO: 1880657
uguucuuugaguggaaagu

SEQ ID NO: 1983725 - RNA, 19 nt, Artificial Sequence
  Description of Artificial Sequence: Synthetic oligonucleotide
  Antisense strand to SEQ ID NO: 1983724
acuuuccacucaaagaaca

SEQ ID NO: 1983726 - RNA, 19 nt, Artificial Sequence
  Description of Artificial Sequence: Synthetic oligonucleotide
  Sense strand starting at position 706 of SEQ ID NO: 1880657
guucuuugaguggaaaguu

SEQ ID NO: 1983727 - RNA, 19 nt, Artificial Sequence
  Description of Artificial Sequence: Synthetic oligonucleotide
  Antisense strand to SEQ ID NO: 1983726
aacuuuccacucaaagaac

SEQ ID NO: 1983728 - RNA, 19 nt, Artificial Sequence
  Description of Artificial Sequence: Synthetic oligonucleotide
  Sense strand starting at position 795 of SEQ ID NO: 1880657
gagaguuguagguaguccu

SEQ ID NO: 1983729 - RNA, 19 nt, Artificial Sequence
  Description of Artificial Sequence: Synthetic oligonucleotide
  Antisense strand to SEQ ID NO: 1983728
aggacuaccuacaacucuc

SEQ ID NO: 1983730 - RNA, 19 nt, Artificial Sequence
  Description of Artificial Sequence: Synthetic oligonucleotide
  Sense strand starting at position 1027 of SEQ ID NO: 1880657
ucaaguaagcauugaauaa

SEQ ID NO: 1983731 - RNA, 19 nt, Artificial Sequence
  Description of Artificial Sequence: Synthetic oligonucleotide
  Antisense strand to SEQ ID NO: 1983730
uuauucaaugcuuacuuga

SEQ ID NO: 1983732 - RNA, 19 nt, Artificial Sequence
  Description of Artificial Sequence: Synthetic oligonucleotide
  Sense strand starting at position 1062 of SEQ ID NO: 1880657
accacauugggucauaagu

SEQ ID NO: 1983733 - RNA, 19 nt, Artificial Sequence
  Description of Artificial Sequence: Synthetic oligonucleotide
  Antisense strand to SEQ ID NO: 1983732
acuuaugacccaauguggu

SEQ ID NO: 1983734 - RNA, 19 nt, Artificial Sequence
  Description of Artificial Sequence: Synthetic oligonucleotide
  Sense strand starting at position 1220 of SEQ ID NO: 1880657
cugggaguucucuacagca

SEQ ID NO: 1983735 - RNA, 19 nt, Artificial Sequence
  Description of Artificial Sequence: Synthetic oligonucleotide
  Antisense strand to SEQ ID NO: 1983734
ugcuguagagaacucccag

SEQ ID NO: 1983736 - RNA, 19 nt, Artificial Sequence
  Description of Artificial Sequence: Synthetic oligonucleotide
  Sense strand starting at position 1222 of SEQ ID NO: 1880657
gggaguucucuacagcaaa

SEQ ID NO: 1983737 - RNA, 19 nt, Artificial Sequence
  Description of Artificial Sequence: Synthetic oligonucleotide
  Antisense strand to SEQ ID NO: 1983736
uuugcuguagagaacuccc

SEQ ID NO: 1983738 - RNA, 19 nt, Artificial Sequence
  Description of Artificial Sequence: Synthetic oligonucleotide
  Sense strand starting at position 1246 of SEQ ID NO: 1880657
uagugaaauccuggguuga

SEQ ID NO: 1983739 - RNA, 19 nt, Artificial Sequence
  Description of Artificial Sequence: Synthetic oligonucleotide
  Antisense strand to SEQ ID NO: 1983738
ucaacccaggauuucacua

SEQ ID NO: 1983740 - RNA, 19 nt, Artificial Sequence
  Description of Artificial Sequence: Synthetic oligonucleotide
  Sense strand starting at position 1247 of SEQ ID NO: 1880657
agugaaauccuggguugac

SEQ ID NO: 1983741 - RNA, 19 nt, Artificial Sequence
  Description of Artificial Sequence: Synthetic oligonucleotide
  Antisense strand to SEQ ID NO: 1983740
gucaacccaggauuucacu

SEQ ID NO: 1983742 - RNA, 19 nt, Artificial Sequence
  Description of Artificial Sequence: Synthetic oligonucleotide
  Sense strand starting at position 1248 of SEQ ID NO: 1880657
gugaaauccuggguugacu

SEQ ID NO: 1983743 - RNA, 19 nt, Artificial Sequence
  Description of Artificial Sequence: Synthetic oligonucleotide
  Antisense strand to SEQ ID NO: 1983742
agucaacccaggauuucac

SEQ ID NO: 1983744 - RNA, 19 nt, Artificial Sequence
  Description of Artificial Sequence: Synthetic oligonucleotide
  Sense strand starting at position 1311 of SEQ ID NO: 1880657
ugacuacuuuccguauuaa

SEQ ID NO: 1983745 - RNA, 19 nt, Artificial Sequence
  Description of Artificial Sequence: Synthetic oligonucleotide
  Antisense strand to SEQ ID NO: 1983744
uuaauacggaaaguaguca

SEQ ID NO: 1983746 - RNA, 19 nt, Artificial Sequence
  Description of Artificial Sequence: Synthetic oligonucleotide
  Sense strand starting at position 1645 of SEQ ID NO: 1880657
uuuaucauucugggauucu

SEQ ID NO: 1983747 - RNA, 19 nt, Artificial Sequence
  Description of Artificial Sequence: Synthetic oligonucleotide
  Antisense strand to SEQ ID NO: 1983746
agaaucccagaaugauaaa

SEQ ID NO: 1983748 - RNA, 19 nt, Artificial Sequence
  Description of Artificial Sequence: Synthetic oligonucleotide
  Sense strand starting at position 1778 of SEQ ID NO: 1880657
ugugcuaaucuggaaugga

SEQ ID NO: 1983749 - RNA, 19 nt, Artificial Sequence
  Description of Artificial Sequence: Synthetic oligonucleotide
  Antisense strand to SEQ ID NO: 1983748
uccauuccagauuagcaca

SEQ ID NO: 1983750 - RNA, 19 nt, Artificial Sequence
  Description of Artificial Sequence: Synthetic oligonucleotide
  Sense strand starting at position 1787 of SEQ ID NO: 1880657
cuggaauggagcugauuaa

SEQ ID NO: 1983751 - RNA, 19 nt, Artificial Sequence
  Description of Artificial Sequence: Synthetic oligonucleotide
  Antisense strand to SEQ ID NO: 1983750
uuaaucagcuccauuccag

SEQ ID NO: 1983752 - RNA, 19 nt, Artificial Sequence
  Description of Artificial Sequence: Synthetic oligonucleotide
  Sense strand starting at position 1875 of SEQ ID NO: 1880657
acuagcugucgagauguga

SEQ ID NO: 1983753 - RNA, 19 nt, Artificial Sequence
  Description of Artificial Sequence: Synthetic oligonucleotide
  Antisense strand to SEQ ID NO: 1983752
ucacaucucgacagcuagu

SEQ ID NO: 1983754 - RNA, 19 nt, Artificial Sequence
  Description of Artificial Sequence: Synthetic oligonucleotide
  Sense strand starting at position 1886 of SEQ ID NO: 1880657
agaugugacggaggugaaa

SEQ ID NO: 1983755 - RNA, 19 nt, Artificial Sequence
  Description of Artificial Sequence: Synthetic oligonucleotide
  Antisense strand to SEQ ID NO: 1983754
uuucaccuccgucacaucu

SEQ ID NO: 1983756 - RNA, 19 nt, Artificial Sequence
  Description of Artificial Sequence: Synthetic oligonucleotide
  Sense strand starting at position 2046 of SEQ ID NO: 1880657
gcagaauagcuauggaaag

SEQ ID NO: 1983757 - RNA, 19 nt, Artificial Sequence
  Description of Artificial Sequence: Synthetic oligonucleotide
  Antisense strand to SEQ ID NO: 1983756
cuuuccauagcuauucugc

SEQ ID NO: 1983758 - RNA, 19 nt, Artificial Sequence
  Description of Artificial Sequence: Synthetic oligonucleotide
  Sense strand starting at position 2076 of SEQ ID NO: 1880657
uggaaauaauaguaagaag

SEQ ID NO: 1983759 - RNA, 19 nt, Artificial Sequence
  Description of Artificial Sequence: Synthetic oligonucleotide
  Antisense strand to SEQ ID NO: 1983758
cuucuuacuauuauuucca

SEQ ID NO: 1983760 - RNA, 19 nt, Artificial Sequence
  Description of Artificial Sequence: Synthetic oligonucleotide
  Sense strand starting at position 2316 of SEQ ID NO: 1880657
gccuguuugcuguuccuca

SEQ ID NO: 1983761 - RNA, 19 nt, Artificial Sequence
  Description of Artificial Sequence: Synthetic oligonucleotide
  Antisense strand to SEQ ID NO: 1983760
ugaggaacagcaaacaggc

SEQ ID NO: 1983762 - RNA, 19 nt, Artificial Sequence
  Description of Artificial Sequence: Synthetic oligonucleotide
  Sense strand starting at position 2508 of SEQ ID NO: 1880657
cagcaugggagauaucgua

SEQ ID NO: 1983763 - RNA, 19 nt, Artificial Sequence
  Description of Artificial Sequence: Synthetic oligonucleotide
  Antisense strand to SEQ ID NO: 1983762
uacgauaucucccaugcug

SEQ ID NO: 1983764 - RNA, 19 nt, Artificial Sequence
  Description of Artificial Sequence: Synthetic oligonucleotide
  Sense strand starting at position 2571 of SEQ ID NO: 1880657
uugggaugaucaccucacu

SEQ ID NO: 1983765 - RNA, 19 nt, Artificial Sequence
  Description of Artificial Sequence: Synthetic oligonucleotide
  Antisense strand to SEQ ID NO: 1983764
agugaggugaucaucccaa

SEQ ID NO: 1983766 - RNA, 19 nt, Artificial Sequence
  Description of Artificial Sequence: Synthetic oligonucleotide
  Sense strand starting at position 2844 of SEQ ID NO: 1880657
gaggaugggcuuuguaaau

SEQ ID NO: 1983767 - RNA, 19 nt, Artificial Sequence
  Description of Artificial Sequence: Synthetic oligonucleotide
  Antisense strand to SEQ ID NO: 1983766
auuuacaaagcccauccuc

SEQ ID NO: 1983768 - RNA, 19 nt, Artificial Sequence
  Description of Artificial Sequence: Synthetic oligonucleotide
  Sense strand starting at position 2910 of SEQ ID NO: 1880657
ggcaucugucaguaaaggu

SEQ ID NO: 1983769 - RNA, 19 nt, Artificial Sequence
  Description of Artificial Sequence: Synthetic oligonucleotide
  Antisense strand to SEQ ID NO: 1983768
accuuuacugacagaugcc

SEQ ID NO: 1983770 - RNA, 19 nt, Artificial Sequence
  Description of Artificial Sequence: Synthetic oligonucleotide
  Sense strand starting at position 2954 of SEQ ID NO: 1880657
uugaauuucuccucgcuca

SEQ ID NO: 1983771 - RNA, 19 nt, Artificial Sequence
  Description of Artificial Sequence: Synthetic oligonucleotide
  Antisense strand to SEQ ID NO: 1983770
ugagcgaggagaaauucaa

SEQ ID NO: 1983772 - RNA, 19 nt, Artificial Sequence
  Description of Artificial Sequence: Synthetic oligonucleotide
  Sense strand starting at position 3405 of SEQ ID NO: 1880657
agaaucuaggcccgauacu

SEQ ID NO: 1983773 - RNA, 19 nt, Artificial Sequence
  Description of Artificial Sequence: Synthetic oligonucleotide
  Antisense strand to SEQ ID NO: 1983772
aguaucgggccuagauucu

SEQ ID NO: 1983774 - RNA, 19 nt, Artificial Sequence
  Description of Artificial Sequence: Synthetic oligonucleotide
  Sense strand starting at position 3406 of SEQ ID NO: 1880657
gaaucuaggcccgauacuu

SEQ ID NO: 1983775 - RNA, 19 nt, Artificial Sequence
  Description of Artificial Sequence: Synthetic oligonucleotide
  Antisense strand to SEQ ID NO: 1983774
aaguaucgggccuagauuc

SEQ ID NO: 1983776 - RNA, 19 nt, Artificial Sequence
  Description of Artificial Sequence: Synthetic oligonucleotide
  Sense strand starting at position 3422 of SEQ ID NO: 1880657
cuucgugaauuugagaaua

SEQ ID NO: 1983777 - RNA, 19 nt, Artificial Sequence
  Description of Artificial Sequence: Synthetic oligonucleotide
  Antisense strand to SEQ ID NO: 1983776
uauucucaaauucacgaag

SEQ ID NO: 1983778 - RNA, 19 nt, Artificial Sequence
  Description of Artificial Sequence: Synthetic oligonucleotide
  Sense strand starting at position 3424 of SEQ ID NO: 1880657
ucgugaauuugagaauaaa

SEQ ID NO: 1983779 - RNA, 19 nt, Artificial Sequence
  Description of Artificial Sequence: Synthetic oligonucleotide
  Antisense strand to SEQ ID NO: 1983778
uuuauucucaaauucacga

SEQ ID NO: 1983780 - RNA, 19 nt, Artificial Sequence
  Description of Artificial Sequence: Synthetic oligonucleotide
  Sense strand starting at position 3563 of SEQ ID NO: 1880657
ucacauuugguucggcaca

SEQ ID NO: 1983781 - RNA, 19 nt, Artificial Sequence
  Description of Artificial Sequence: Synthetic oligonucleotide
  Antisense strand to SEQ ID NO: 1983780
ugugccgaaccaaauguga

SEQ ID NO: 1983782 - RNA, 19 nt, Artificial Sequence
  Description of Artificial Sequence: Synthetic oligonucleotide
  Sense strand starting at position 3698 of SEQ ID NO: 1880657
agaugucaucuauguaccu

SEQ ID NO: 1983783 - RNA, 19 nt, Artificial Sequence
  Description of Artificial Sequence: Synthetic oligonucleotide
  Antisense strand to SEQ ID NO: 1983782
agguacauagaugacaucu

SEQ ID NO: 1983784 - RNA, 19 nt, Artificial Sequence
  Description of Artificial Sequence: Synthetic oligonucleotide
  Sense strand starting at position 3803 of SEQ ID NO: 1880657
ggacaaugagccuaaugcu

SEQ ID NO: 1983785 - RNA, 19 nt, Artificial Sequence
  Description of Artificial Sequence: Synthetic oligonucleotide
  Antisense strand to SEQ ID NO: 1983784
agcauuaggcucauugucc

SEQ ID NO: 1983786 - RNA, 19 nt, Artificial Sequence
  Description of Artificial Sequence: Synthetic oligonucleotide
  Sense strand starting at position 3809 of SEQ ID NO: 1880657
ugagccuaaugcucagaga

SEQ ID NO: 1983787 - RNA, 19 nt, Artificial Sequence
  Description of Artificial Sequence: Synthetic oligonucleotide
  Antisense strand to SEQ ID NO: 1983786
ucucugagcauuaggcuca

SEQ ID NO: 1983788 - RNA, 19 nt, Artificial Sequence
  Description of Artificial Sequence: Synthetic oligonucleotide
  Sense strand starting at position 17 of SEQ ID NO: 1880658
gguaaaggaaucuaagugu

SEQ ID NO: 1983789 - RNA, 19 nt, Artificial Sequence
  Description of Artificial Sequence: Synthetic oligonucleotide
  Antisense strand to SEQ ID NO: 1983788
acacuuagauuccuuuacc

SEQ ID NO: 1983790 - RNA, 19 nt, Artificial Sequence
  Description of Artificial Sequence: Synthetic oligonucleotide
  Sense strand starting at position 20 of SEQ ID NO: 1880658
aaaggaaucuaaguguauu

SEQ ID NO: 1983791 - RNA, 19 nt, Artificial Sequence
  Description of Artificial Sequence: Synthetic oligonucleotide
  Antisense strand to SEQ ID NO: 1983790
aauacacuuagauuccuuu

SEQ ID NO: 1983792 - RNA, 19 nt, Artificial Sequence
  Description of Artificial Sequence: Synthetic oligonucleotide
  Sense strand starting at position 59 of SEQ ID NO: 1880658
aguagaaacuaugacauuu

SEQ ID NO: 1983793 - RNA, 19 nt, Artificial Sequence
  Description of Artificial Sequence: Synthetic oligonucleotide
  Antisense strand to SEQ ID NO: 1983792
aaaugucauaguuucuacu

SEQ ID NO: 1983794 - RNA, 19 nt, Artificial Sequence
  Description of Artificial Sequence: Synthetic oligonucleotide
  Sense strand starting at position 480 of SEQ ID NO: 1880658
uggacugguuucccaagaa

SEQ ID NO: 1983795 - RNA, 19 nt, Artificial Sequence
  Description of Artificial Sequence: Synthetic oligonucleotide
  Antisense strand to SEQ ID NO: 1983794
uucuugggaaaccagucca

SEQ ID NO: 1983796 - RNA, 19 nt, Artificial Sequence
  Description of Artificial Sequence: Synthetic oligonucleotide
  Sense strand starting at position 985 of SEQ ID NO: 1880658
gccugaaagccugcuuguu

SEQ ID NO: 1983797 - RNA, 19 nt, Artificial Sequence
  Description of Artificial Sequence: Synthetic oligonucleotide
  Antisense strand to SEQ ID NO: 1983796
aacaagcaggcuuucaggc

SEQ ID NO: 1983798 - RNA, 19 nt, Artificial Sequence
  Description of Artificial Sequence: Synthetic oligonucleotide
  Sense strand starting at position 1004 of SEQ ID NO: 1880658
ugggaagucuucuuuggaa

SEQ ID NO: 1983799 - RNA, 19 nt, Artificial Sequence
  Description of Artificial Sequence: Synthetic oligonucleotide
  Antisense strand to SEQ ID NO: 1983798
uuccaaagaagacuuccca

SEQ ID NO: 1983800 - RNA, 19 nt, Artificial Sequence
  Description of Artificial Sequence: Synthetic oligonucleotide
  Sense strand starting at position 1060 of SEQ ID NO: 1880658
ugauguuagacuugggauu

SEQ ID NO: 1983801 - RNA, 19 nt, Artificial Sequence
  Description of Artificial Sequence: Synthetic oligonucleotide
  Antisense strand to SEQ ID NO: 1983800
aaucccaagucuaacauca

SEQ ID NO: 1983802 - RNA, 19 nt, Artificial Sequence
  Description of Artificial Sequence: Synthetic oligonucleotide
  Sense strand starting at position 1171 of SEQ ID NO: 1880658
cacugugacuacucaggga

SEQ ID NO: 1983803 - RNA, 19 nt, Artificial Sequence
  Description of Artificial Sequence: Synthetic oligonucleotide
  Antisense strand to SEQ ID NO: 1983802
ucccugaguagucacagug

SEQ ID NO: 1983804 - RNA, 19 nt, Artificial Sequence
  Description of Artificial Sequence: Synthetic oligonucleotide
  Sense strand starting at position 1175 of SEQ ID NO: 1880658
gugacuacucagggauauu

SEQ ID NO: 1983805 - RNA, 19 nt, Artificial Sequence
  Description of Artificial Sequence: Synthetic oligonucleotide
  Antisense strand to SEQ ID NO: 1983804
aauaucccugaguagucac

SEQ ID NO: 1983806 - RNA, 19 nt, Artificial Sequence
  Description of Artificial Sequence: Synthetic oligonucleotide
  Sense strand starting at position 1299 of SEQ ID NO: 1880658
aggaauuccagauguuugu

SEQ ID NO: 1983807 - RNA, 19 nt, Artificial Sequence
  Description of Artificial Sequence: Synthetic oligonucleotide
  Antisense strand to SEQ ID NO: 1983806
acaaacaucuggaauuccu

SEQ ID NO: 1983808 - RNA, 19 nt, Artificial Sequence
  Description of Artificial Sequence: Synthetic oligonucleotide
  Sense strand starting at position 1763 of SEQ ID NO: 1880658
aaacuagugugagugauua

SEQ ID NO: 1983809 - RNA, 19 nt, Artificial Sequence
  Description of Artificial Sequence: Synthetic oligonucleotide
  Antisense strand to SEQ ID NO: 1983808
uaaucacucacacuaguuu

SEQ ID NO: 1983810 - RNA, 19 nt, Artificial Sequence
  Description of Artificial Sequence: Synthetic oligonucleotide
  Sense strand starting at position 1771 of SEQ ID NO: 1880658
gugagugauuagucaacaa

SEQ ID NO: 1983811 - RNA, 19 nt, Artificial Sequence
  Description of Artificial Sequence: Synthetic oligonucleotide
  Antisense strand to SEQ ID NO: 1983810
uuguugacuaaucacucac

SEQ ID NO: 1983812 - RNA, 19 nt, Artificial Sequence
  Description of Artificial Sequence: Synthetic oligonucleotide
  Sense strand starting at position 1775 of SEQ ID NO: 1880658
gugauuagucaacaaaugu

SEQ ID NO: 1983813 - RNA, 19 nt, Artificial Sequence
  Description of Artificial Sequence: Synthetic oligonucleotide
  Antisense strand to SEQ ID NO: 1983812
acauuuguugacuaaucac

SEQ ID NO: 1983814 - RNA, 19 nt, Artificial Sequence
  Description of Artificial Sequence: Synthetic oligonucleotide
  Sense strand starting at position 2056 of SEQ ID NO: 1880658
acuugacugcuacaaaugu

SEQ ID NO: 1983815 - RNA, 19 nt, Artificial Sequence
  Description of Artificial Sequence: Synthetic oligonucleotide
  Antisense strand to SEQ ID NO: 1983814
acauuuguagcagucaagu

SEQ ID NO: 1983816 - RNA, 19 nt, Artificial Sequence
  Description of Artificial Sequence: Synthetic oligonucleotide
  Sense strand starting at position 2076 of SEQ ID NO: 1880658
uugugaagaagccaauguu

SEQ ID NO: 1983817 - RNA, 19 nt, Artificial Sequence
  Description of Artificial Sequence: Synthetic oligonucleotide
  Antisense strand to SEQ ID NO: 1983816
aacauuggcuucuucacaa

SEQ ID NO: 1983818 - RNA, 19 nt, Artificial Sequence
  Description of Artificial Sequence: Synthetic oligonucleotide
  Sense strand starting at position 2079 of SEQ ID NO: 1880658
ugaagaagccaauguuaug

SEQ ID NO: 1983819 - RNA, 19 nt, Artificial Sequence
  Description of Artificial Sequence: Synthetic oligonucleotide
  Antisense strand to SEQ ID NO: 1983818
cauaacauuggcuucuuca

SEQ ID NO: 1983820 - RNA, 19 nt, Artificial Sequence
  Description of Artificial Sequence: Synthetic oligonucleotide
  Sense strand starting at position 2195 of SEQ ID NO: 1880658
acgcaagaaucauccagau

SEQ ID NO: 1983821 - RNA, 19 nt, Artificial Sequence
  Description of Artificial Sequence: Synthetic oligonucleotide
  Antisense strand to SEQ ID NO: 1983820
aucuggaugauucuugcgu

SEQ ID NO: 1983822 - RNA, 19 nt, Artificial Sequence
  Description of Artificial Sequence: Synthetic oligonucleotide
  Sense strand starting at position 2321 of SEQ ID NO: 1880658
cccaauacuuuguuaagga

SEQ ID NO: 1983823 - RNA, 19 nt, Artificial Sequence
  Description of Artificial Sequence: Synthetic oligonucleotide
  Antisense strand to SEQ ID NO: 1983822
uccuuaacaaaguauuggg

SEQ ID NO: 1983824 - RNA, 19 nt, Artificial Sequence
  Description of Artificial Sequence: Synthetic oligonucleotide
  Sense strand starting at position 2614 of SEQ ID NO: 1880658
gggucuuuccagcaaauaa

SEQ ID NO: 1983825 - RNA, 19 nt, Artificial Sequence
  Description of Artificial Sequence: Synthetic oligonucleotide
  Antisense strand to SEQ ID NO: 1983824
uuauuugcuggaaagaccc

SEQ ID NO: 1983826 - RNA, 19 nt, Artificial Sequence
  Description of Artificial Sequence: Synthetic oligonucleotide
  Sense strand starting at position 2655 of SEQ ID NO: 1880658
guguguggccuugcuggaa

SEQ ID NO: 1983827 - RNA, 19 nt, Artificial Sequence
  Description of Artificial Sequence: Synthetic oligonucleotide
  Antisense strand to SEQ ID NO: 1983826
uuccagcaaggccacacac

SEQ ID NO: 1983828 - RNA, 19 nt, Artificial Sequence
  Description of Artificial Sequence: Synthetic oligonucleotide
  Sense strand starting at position 2684 of SEQ ID NO: 1880658
ggaauucccuuccuugaag

SEQ ID NO: 1983829 - RNA, 19 nt, Artificial Sequence
  Description of Artificial Sequence: Synthetic oligonucleotide
  Antisense strand to SEQ ID NO: 1983828
cuucaaggaagggaauucc

SEQ ID NO: 1983830 - RNA, 19 nt, Artificial Sequence
  Description of Artificial Sequence: Synthetic oligonucleotide
  Sense strand starting at position 2700 of SEQ ID NO: 1880658
aagccacuugucgaagaaa

SEQ ID NO: 1983831 - RNA, 19 nt, Artificial Sequence
  Description of Artificial Sequence: Synthetic oligonucleotide
  Antisense strand to SEQ ID NO: 1983830
uuucuucgacaaguggcuu

SEQ ID NO: 1983832 - RNA, 19 nt, Artificial Sequence
  Description of Artificial Sequence: Synthetic oligonucleotide
  Sense strand starting at position 2723 of SEQ ID NO: 1880658
uggacucugcaaggacuua

SEQ ID NO: 1983833 - RNA, 19 nt, Artificial Sequence
  Description of Artificial Sequence: Synthetic oligonucleotide
  Antisense strand to SEQ ID NO: 1983832
uaaguccuugcagagucca

SEQ ID NO: 1983834 - RNA, 19 nt, Artificial Sequence
  Description of Artificial Sequence: Synthetic oligonucleotide
  Sense strand starting at position 2852 of SEQ ID NO: 1880658
gaauaaugacgagacucgu

SEQ ID NO: 1983835 - RNA, 19 nt, Artificial Sequence
  Description of Artificial Sequence: Synthetic oligonucleotide
  Antisense strand to SEQ ID NO: 1983834
acgagucucgucauuauuc

SEQ ID NO: 1983836 - RNA, 19 nt, Artificial Sequence
  Description of Artificial Sequence: Synthetic oligonucleotide
  Sense strand starting at position 2876 of SEQ ID NO: 1880658
ggccaauaaccuuaagcuu

SEQ ID NO: 1983837 - RNA, 19 nt, Artificial Sequence
  Description of Artificial Sequence: Synthetic oligonucleotide
  Antisense strand to SEQ ID NO: 1983836
aagcuuaagguuauuggcc

SEQ ID NO: 1983838 - RNA, 19 nt, Artificial Sequence
  Description of Artificial Sequence: Synthetic oligonucleotide
  Sense strand starting at position 3338 of SEQ ID NO: 1880658
acagcuaguccugaacaau

SEQ ID NO: 1983839 - RNA, 19 nt, Artificial Sequence
  Description of Artificial Sequence: Synthetic oligonucleotide
  Antisense strand to SEQ ID NO: 1983838
auuguucaggacuagcugu

SEQ ID NO: 1983840 - RNA, 19 nt, Artificial Sequence
  Description of Artificial Sequence: Synthetic oligonucleotide
  Sense strand starting at position 3341 of SEQ ID NO: 1880658
gcuaguccugaacaaugua

SEQ ID NO: 1983841 - RNA, 19 nt, Artificial Sequence
  Description of Artificial Sequence: Synthetic oligonucleotide
  Antisense strand to SEQ ID NO: 1983840
uacauuguucaggacuagc

SEQ ID NO: 1983842 - RNA, 19 nt, Artificial Sequence
  Description of Artificial Sequence: Synthetic oligonucleotide
  Sense strand starting at position 3358 of SEQ ID NO: 1880658
uaggacugucauuauguau

SEQ ID NO: 1983843 - RNA, 19 nt, Artificial Sequence
  Description of Artificial Sequence: Synthetic oligonucleotide
  Antisense strand to SEQ ID NO: 1983842
auacauaaugacaguccua

SEQ ID NO: 1983844 - RNA, 19 nt, Artificial Sequence
  Description of Artificial Sequence: Synthetic oligonucleotide
  Sense strand starting at position 3415 of SEQ ID NO: 1880658
gagaaacauuccuuuaggu

SEQ ID NO: 1983845 - RNA, 19 nt, Artificial Sequence
  Description of Artificial Sequence: Synthetic oligonucleotide
  Antisense strand to SEQ ID NO: 1983844
accuaaaggaauguuucuc

SEQ ID NO: 1983846 - RNA, 19 nt, Artificial Sequence
  Description of Artificial Sequence: Synthetic oligonucleotide
  Sense strand starting at position 3442 of SEQ ID NO: 1880658
guuugauaccacuauggca

SEQ ID NO: 1983847 - RNA, 19 nt, Artificial Sequence
  Description of Artificial Sequence: Synthetic oligonucleotide
  Antisense strand to SEQ ID NO: 1983846
ugccauagugguaucaaac

SEQ ID NO: 1983848 - RNA, 19 nt, Artificial Sequence
  Description of Artificial Sequence: Synthetic oligonucleotide
  Sense strand starting at position 3444 of SEQ ID NO: 1880658
uugauaccacuauggcauu

SEQ ID NO: 1983849 - RNA, 19 nt, Artificial Sequence
  Description of Artificial Sequence: Synthetic oligonucleotide
  Antisense strand to SEQ ID NO: 1983848
aaugccauagugguaucaa

SEQ ID NO: 1983850 - RNA, 19 nt, Artificial Sequence
  Description of Artificial Sequence: Synthetic oligonucleotide
  Sense strand starting at position 3514 of SEQ ID NO: 1880658
uguacuuaggaaugaauca

SEQ ID NO: 1983851 - RNA, 19 nt, Artificial Sequence
  Description of Artificial Sequence: Synthetic oligonucleotide
  Antisense strand to SEQ ID NO: 1983850
ugauucauuccuaaguaca

SEQ ID NO: 1983852 - RNA, 19 nt, Artificial Sequence
  Description of Artificial Sequence: Synthetic oligonucleotide
  Sense strand starting at position 3603 of SEQ ID NO: 1880658
acucauuugucucugcaua

SEQ ID NO: 1983853 - RNA, 19 nt, Artificial Sequence
  Description of Artificial Sequence: Synthetic oligonucleotide
  Antisense strand to SEQ ID NO: 1983852
uaugcagagacaaaugagu

SEQ ID NO: 1983854 - RNA, 19 nt, Artificial Sequence
  Description of Artificial Sequence: Synthetic oligonucleotide
  Sense strand starting at position 3605 of SEQ ID NO: 1880658
ucauuugucucugcauaga

SEQ ID NO: 1983855 - RNA, 19 nt, Artificial Sequence
  Description of Artificial Sequence: Synthetic oligonucleotide
  Antisense strand to SEQ ID NO: 1983854
ucuaugcagagacaaauga

SEQ ID NO: 1983856 - RNA, 19 nt, Artificial Sequence
  Description of Artificial Sequence: Synthetic oligonucleotide
  Sense strand starting at position 3608 of SEQ ID NO: 1880658
uuugucucugcauagaaga

SEQ ID NO: 1983857 - RNA, 19 nt, Artificial Sequence
  Description of Artificial Sequence: Synthetic oligonucleotide
  Antisense strand to SEQ ID NO: 1983856
ucuucuaugcagagacaaa

SEQ ID NO: 1983858 - RNA, 19 nt, Artificial Sequence
  Description of Artificial Sequence: Synthetic oligonucleotide
  Sense strand starting at position 3610 of SEQ ID NO: 1880658
ugucucugcauagaagaga

SEQ ID NO: 1983859 - RNA, 19 nt, Artificial Sequence
  Description of Artificial Sequence: Synthetic oligonucleotide
  Antisense strand to SEQ ID NO: 1983858
ucucuucuaugcagagaca

SEQ ID NO: 1983860 - RNA, 19 nt, Artificial Sequence
  Description of Artificial Sequence: Synthetic oligonucleotide
  Sense strand starting at position 3659 of SEQ ID NO: 1880658
uucucauuggcauaaugua

SEQ ID NO: 1983861 - RNA, 19 nt, Artificial Sequence
  Description of Artificial Sequence: Synthetic oligonucleotide
  Antisense strand to SEQ ID NO: 1983860
uacauuaugccaaugagaa

SEQ ID NO: 1983862 - RNA, 19 nt, Artificial Sequence
  Description of Artificial Sequence: Synthetic oligonucleotide
  Sense strand starting at position 3761 of SEQ ID NO: 1880658
auaauuaguuggcuaaaug

SEQ ID NO: 1983863 - RNA, 19 nt, Artificial Sequence
  Description of Artificial Sequence: Synthetic oligonucleotide
  Antisense strand to SEQ ID NO: 1983862
cauuuagccaacuaauuau

SEQ ID NO: 1983864 - RNA, 19 nt, Artificial Sequence
  Description of Artificial Sequence: Synthetic oligonucleotide
  Sense strand starting at position 3762 of SEQ ID NO: 1880658
uaauuaguuggcuaaaugu

SEQ ID NO: 1983865 - RNA, 19 nt, Artificial Sequence
  Description of Artificial Sequence: Synthetic oligonucleotide
  Antisense strand to SEQ ID NO: 1983864
acauuuagccaacuaauua

SEQ ID NO: 1983866 - RNA, 19 nt, Artificial Sequence
  Description of Artificial Sequence: Synthetic oligonucleotide
  Sense strand starting at position 3982 of SEQ ID NO: 1880658
agacuuguuguuggaggaa

SEQ ID NO: 1983867 - RNA, 19 nt, Artificial Sequence
  Description of Artificial Sequence: Synthetic oligonucleotide
  Antisense strand to SEQ ID NO: 1983866
uuccuccaacaacaagucu

SEQ ID NO: 1983868 - RNA, 19 nt, Artificial Sequence
  Description of Artificial Sequence: Synthetic oligonucleotide
  Sense strand starting at position 139 of SEQ ID NO: 1880659
ccuuuauuccaucggagcu

SEQ ID NO: 1983869 - RNA, 19 nt, Artificial Sequence
  Description of Artificial Sequence: Synthetic oligonucleotide
  Antisense strand to SEQ ID NO: 1983868
agcuccgauggaauaaagg

SEQ ID NO: 1983870 - RNA, 19 nt, Artificial Sequence
  Description of Artificial Sequence: Synthetic oligonucleotide
  Sense strand starting at position 1212 of SEQ ID NO: 1880659
cugagagaccucuguagga

SEQ ID NO: 1983871 - RNA, 19 nt, Artificial Sequence
  Description of Artificial Sequence: Synthetic oligonucleotide
  Antisense strand to SEQ ID NO: 1983870
uccuacagaggucucucag

SEQ ID NO: 1983872 - RNA, 19 nt, Artificial Sequence
  Description of Artificial Sequence: Synthetic oligonucleotide
  Sense strand starting at position 1268 of SEQ ID NO: 1880659
gcccuaaagcucgaucacu

SEQ ID NO: 1983873 - RNA, 19 nt, Artificial Sequence
  Description of Artificial Sequence: Synthetic oligonucleotide
  Antisense strand to SEQ ID NO: 1983872
agugaucgagcuuuagggc

SEQ ID NO: 1983874 - RNA, 19 nt, Artificial Sequence
  Description of Artificial Sequence: Synthetic oligonucleotide
  Sense strand starting at position 1391 of SEQ ID NO: 1880659
gcuucugacugguuggaua

SEQ ID NO: 1983875 - RNA, 19 nt, Artificial Sequence
  Description of Artificial Sequence: Synthetic oligonucleotide
  Antisense strand to SEQ ID NO: 1983874
uauccaaccagucagaagc

SEQ ID NO: 1983876 - RNA, 19 nt, Artificial Sequence
  Description of Artificial Sequence: Synthetic oligonucleotide
  Sense strand starting at position 1393 of SEQ ID NO: 1880659
uucugacugguuggauaca

SEQ ID NO: 1983877 - RNA, 19 nt, Artificial Sequence
  Description of Artificial Sequence: Synthetic oligonucleotide
  Antisense strand to SEQ ID NO: 1983876
uguauccaaccagucagaa

SEQ ID NO: 1983878 - RNA, 19 nt, Artificial Sequence
  Description of Artificial Sequence: Synthetic oligonucleotide
  Sense strand starting at position 1394 of SEQ ID NO: 1880659
ucugacugguuggauacaa

SEQ ID NO: 1983879 - RNA, 19 nt, Artificial Sequence
  Description of Artificial Sequence: Synthetic oligonucleotide
  Antisense strand to SEQ ID NO: 1983878
uuguauccaaccagucaga

SEQ ID NO: 1983880 - RNA, 19 nt, Artificial Sequence
  Description of Artificial Sequence: Synthetic oligonucleotide
  Sense strand starting at position 1436 of SEQ ID NO: 1880659
aacaguggcuccugcaaga

SEQ ID NO: 1983881 - RNA, 19 nt, Artificial Sequence
  Description of Artificial Sequence: Synthetic oligonucleotide
  Antisense strand to SEQ ID NO: 1983880
ucuugcaggagccacuguu

SEQ ID NO: 1983882 - RNA, 19 nt, Artificial Sequence
  Description of Artificial Sequence: Synthetic oligonucleotide
  Sense strand starting at position 1458 of SEQ ID NO: 1880659
gcacaugaccuugggcaaa

SEQ ID NO: 1983883 - RNA, 19 nt, Artificial Sequence
  Description of Artificial Sequence: Synthetic oligonucleotide
  Antisense strand to SEQ ID NO: 1983882
uuugcccaaggucaugugc

SEQ ID NO: 1983884 - RNA, 19 nt, Artificial Sequence
  Description of Artificial Sequence: Synthetic oligonucleotide
  Sense strand starting at position 1581 of SEQ ID NO: 1880659
auaugugcuguccauauau

SEQ ID NO: 1983885 - RNA, 19 nt, Artificial Sequence
  Description of Artificial Sequence: Synthetic oligonucleotide
  Antisense strand to SEQ ID NO: 1983884
auauauggacagcacauau

SEQ ID NO: 1983886 - RNA, 19 nt, Artificial Sequence
  Description of Artificial Sequence: Synthetic oligonucleotide
  Sense strand starting at position 1583 of SEQ ID NO: 1880659
augugcuguccauauauac

SEQ ID NO: 1983887 - RNA, 19 nt, Artificial Sequence
  Description of Artificial Sequence: Synthetic oligonucleotide
  Antisense strand to SEQ ID NO: 1983886
guauauauggacagcacau

SEQ ID NO: 1983888 - RNA, 19 nt, Artificial Sequence
  Description of Artificial Sequence: Synthetic oligonucleotide
  Sense strand starting at position 1632 of SEQ ID NO: 1880659
gcaucaauaucccacagga

SEQ ID NO: 1983889 - RNA, 19 nt, Artificial Sequence
  Description of Artificial Sequence: Synthetic oligonucleotide
  Antisense strand to SEQ ID NO: 1983888
uccugugggauauugaugc

SEQ ID NO: 1983890 - RNA, 19 nt, Artificial Sequence
  Description of Artificial Sequence: Synthetic oligonucleotide
  Sense strand starting at position 1798 of SEQ ID NO: 1880659
agagaaaugucucugaacu

SEQ ID NO: 1983891 - RNA, 19 nt, Artificial Sequence
  Description of Artificial Sequence: Synthetic oligonucleotide
  Antisense strand to SEQ ID NO: 1983890
aguucagagacauuucucu

SEQ ID NO: 1983892 - RNA, 19 nt, Artificial Sequence
  Description of Artificial Sequence: Synthetic oligonucleotide
  Sense strand starting at position 1799 of SEQ ID NO: 1880659
gagaaaugucucugaacua

SEQ ID NO: 1983893 - RNA, 19 nt, Artificial Sequence
  Description of Artificial Sequence: Synthetic oligonucleotide
  Antisense strand to SEQ ID NO: 1983892
uaguucagagacauuucuc

SEQ ID NO: 1983894 - RNA, 19 nt, Artificial Sequence
  Description of Artificial Sequence: Synthetic oligonucleotide
  Sense strand starting at position 1800 of SEQ ID NO: 1880659
agaaaugucucugaacuag

SEQ ID NO: 1983895 - RNA, 19 nt, Artificial Sequence
  Description of Artificial Sequence: Synthetic oligonucleotide
  Antisense strand to SEQ ID NO: 1983894
cuaguucagagacauuucu

SEQ ID NO: 1983896 - RNA, 19 nt, Artificial Sequence
  Description of Artificial Sequence: Synthetic oligonucleotide
  Sense strand starting at position 1820 of SEQ ID NO: 1880659
agugaauuccugcgggaac

SEQ ID NO: 1983897 - RNA, 19 nt, Artificial Sequence
  Description of Artificial Sequence: Synthetic oligonucleotide
  Antisense strand to SEQ ID NO: 1983896
guucccgcaggaauucacu

SEQ ID NO: 1983898 - RNA, 19 nt, Artificial Sequence
  Description of Artificial Sequence: Synthetic oligonucleotide
  Sense strand starting at position 1822 of SEQ ID NO: 1880659
ugaauuccugcgggaacca

SEQ ID NO: 1983899 - RNA, 19 nt, Artificial Sequence
  Description of Artificial Sequence: Synthetic oligonucleotide
  Antisense strand to SEQ ID NO: 1983898
ugguucccgcaggaauuca

SEQ ID NO: 1983900 - RNA, 19 nt, Artificial Sequence
  Description of Artificial Sequence: Synthetic oligonucleotide
  Sense strand starting at position 1886 of SEQ ID NO: 1880659
gaugcaagcuccucagagu

SEQ ID NO: 1983901 - RNA, 19 nt, Artificial Sequence
  Description of Artificial Sequence: Synthetic oligonucleotide
  Antisense strand to SEQ ID NO: 1983900
acucugaggagcuugcauc

SEQ ID NO: 1983902 - RNA, 19 nt, Artificial Sequence
  Description of Artificial Sequence: Synthetic oligonucleotide
  Sense strand starting at position 2010 of SEQ ID NO: 1880659
ggcccaccucagugguuau

SEQ ID NO: 1983903 - RNA, 19 nt, Artificial Sequence
  Description of Artificial Sequence: Synthetic oligonucleotide
  Antisense strand to SEQ ID NO: 1983902
auaaccacugaggugggcc

SEQ ID NO: 1983904 - RNA, 19 nt, Artificial Sequence
  Description of Artificial Sequence: Synthetic oligonucleotide
  Sense strand starting at position 2050 of SEQ ID NO: 1880659
gacagaaucuuguucugug

SEQ ID NO: 1983905 - RNA, 19 nt, Artificial Sequence
  Description of Artificial Sequence: Synthetic oligonucleotide
  Antisense strand to SEQ ID NO: 1983904
cacagaacaagauucuguc

SEQ ID NO: 1983906 - RNA, 19 nt, Artificial Sequence
  Description of Artificial Sequence: Synthetic oligonucleotide
  Sense strand starting at position 2356 of SEQ ID NO: 1880659
agccauagugccuagucau

SEQ ID NO: 1983907 - RNA, 19 nt, Artificial Sequence
  Description of Artificial Sequence: Synthetic oligonucleotide
  Antisense strand to SEQ ID NO: 1983906
augacuaggcacuauggcu

SEQ ID NO: 1983908 - RNA, 19 nt, Artificial Sequence
  Description of Artificial Sequence: Synthetic oligonucleotide
  Sense strand starting at position 2402 of SEQ ID NO: 1880659
cuuggaugcuuccuagaag

SEQ ID NO: 1983909 - RNA, 19 nt, Artificial Sequence
  Description of Artificial Sequence: Synthetic oligonucleotide
  Antisense strand to SEQ ID NO: 1983908
cuucuaggaagcauccaag

SEQ ID NO: 1983910 - RNA, 19 nt, Artificial Sequence
  Description of Artificial Sequence: Synthetic oligonucleotide
  Sense strand starting at position 2403 of SEQ ID NO: 1880659
uuggaugcuuccuagaagu

SEQ ID NO: 1983911 - RNA, 19 nt, Artificial Sequence
  Description of Artificial Sequence: Synthetic oligonucleotide
  Antisense strand to SEQ ID NO: 1983910
acuucuaggaagcauccaa

SEQ ID NO: 1983912 - RNA, 19 nt, Artificial Sequence
  Description of Artificial Sequence: Synthetic oligonucleotide
  Sense strand starting at position 2405 of SEQ ID NO: 1880659
ggaugcuuccuagaaguuu

SEQ ID NO: 1983913 - RNA, 19 nt, Artificial Sequence
  Description of Artificial Sequence: Synthetic oligonucleotide
  Antisense strand to SEQ ID NO: 1983912
aaacuucuaggaagcaucc

SEQ ID NO: 1983914 - RNA, 19 nt, Artificial Sequence
  Description of Artificial Sequence: Synthetic oligonucleotide
  Sense strand starting at position 2411 of SEQ ID NO: 1880659
uuccuagaaguuugcagua

SEQ ID NO: 1983915 - RNA, 19 nt, Artificial Sequence
  Description of Artificial Sequence: Synthetic oligonucleotide
  Antisense strand to SEQ ID NO: 1983914
uacugcaaacuucuaggaa

SEQ ID NO: 1983916 - RNA, 19 nt, Artificial Sequence
  Description of Artificial Sequence: Synthetic oligonucleotide
  Sense strand starting at position 2433 of SEQ ID NO: 1880659
gcccauuaauggcaaauga

SEQ ID NO: 1983917 - RNA, 19 nt, Artificial Sequence
  Description of Artificial Sequence: Synthetic oligonucleotide
  Antisense strand to SEQ ID NO: 1983916
ucauuugccauuaaugggc

SEQ ID NO: 1983918 - RNA, 19 nt, Artificial Sequence
  Description of Artificial Sequence: Synthetic oligonucleotide
  Sense strand starting at position 2446 of SEQ ID NO: 1880659
aaaugaaucgcagggagau

SEQ ID NO: 1983919 - RNA, 19 nt, Artificial Sequence
  Description of Artificial Sequence: Synthetic oligonucleotide
  Antisense strand to SEQ ID NO: 1983918
aucucccugcgauucauuu

SEQ ID NO: 1983920 - RNA, 19 nt, Artificial Sequence
  Description of Artificial Sequence: Synthetic oligonucleotide
  Sense strand starting at position 2447 of SEQ ID NO: 1880659
aaugaaucgcagggagauc

SEQ ID NO: 1983921 - RNA, 19 nt, Artificial Sequence
  Description of Artificial Sequence: Synthetic oligonucleotide
  Antisense strand to SEQ ID NO: 1983920
gaucucccugcgauucauu

SEQ ID NO: 1983922 - RNA, 19 nt, Artificial Sequence
  Description of Artificial Sequence: Synthetic oligonucleotide
  Sense strand starting at position 2772 of SEQ ID NO: 1880659
ggaagaagagcguggaauu

SEQ ID NO: 1983923 - RNA, 19 nt, Artificial Sequence
  Description of Artificial Sequence: Synthetic oligonucleotide
  Antisense strand to SEQ ID NO: 1983922
aauuccacgcucuucuucc

SEQ ID NO: 1983924 - RNA, 19 nt, Artificial Sequence
  Description of Artificial Sequence: Synthetic oligonucleotide
  Sense strand starting at position 2779 of SEQ ID NO: 1880659
gagcguggaauugagaaca

SEQ ID NO: 1983925 - RNA, 19 nt, Artificial Sequence
  Description of Artificial Sequence: Synthetic oligonucleotide
  Antisense strand to SEQ ID NO: 1983924
uguucucaauuccacgcuc

SEQ ID NO: 1983926 - RNA, 19 nt, Artificial Sequence
  Description of Artificial Sequence: Synthetic oligonucleotide
  Sense strand starting at position 3064 of SEQ ID NO: 1880659
acaccaaguuucgauccaa

SEQ ID NO: 1983927 - RNA, 19 nt, Artificial Sequence
  Description of Artificial Sequence: Synthetic oligonucleotide
  Antisense strand to SEQ ID NO: 1983926
uuggaucgaaacuuggugu

SEQ ID NO: 1983928 - RNA, 19 nt, Artificial Sequence
  Description of Artificial Sequence: Synthetic oligonucleotide
  Sense strand starting at position 3257 of SEQ ID NO: 1880659
gugggacuucccuguggga

SEQ ID NO: 1983929 - RNA, 19 nt, Artificial Sequence
  Description of Artificial Sequence: Synthetic oligonucleotide
  Antisense strand to SEQ ID NO: 1983928
ucccacagggaagucccac

SEQ ID NO: 1983930 - RNA, 19 nt, Artificial Sequence
  Description of Artificial Sequence: Synthetic oligonucleotide
  Sense strand starting at position 3259 of SEQ ID NO: 1880659
gggacuucccugugggaca

SEQ ID NO: 1983931 - RNA, 19 nt, Artificial Sequence
  Description of Artificial Sequence: Synthetic oligonucleotide
  Antisense strand to SEQ ID NO: 1983930
ugucccacagggaaguccc

SEQ ID NO: 1983932 - RNA, 19 nt, Artificial Sequence
  Description of Artificial Sequence: Synthetic oligonucleotide
  Sense strand starting at position 3260 of SEQ ID NO: 1880659
ggacuucccugugggacaa

SEQ ID NO: 1983933 - RNA, 19 nt, Artificial Sequence
  Description of Artificial Sequence: Synthetic oligonucleotide
  Antisense strand to SEQ ID NO: 1983932
uugucccacagggaagucc

SEQ ID NO: 1983934 - RNA, 19 nt, Artificial Sequence
  Description of Artificial Sequence: Synthetic oligonucleotide
  Sense strand starting at position 3345 of SEQ ID NO: 1880659
gacguagggucauaaguca

SEQ ID NO: 1983935 - RNA, 19 nt, Artificial Sequence
  Description of Artificial Sequence: Synthetic oligonucleotide
  Antisense strand to SEQ ID NO: 1983934
ugacuuaugacccuacguc

SEQ ID NO: 1983936 - RNA, 19 nt, Artificial Sequence
  Description of Artificial Sequence: Synthetic oligonucleotide
  Sense strand starting at position 3352 of SEQ ID NO: 1880659
ggucauaagucaccaggau

SEQ ID NO: 1983937 - RNA, 19 nt, Artificial Sequence
  Description of Artificial Sequence: Synthetic oligonucleotide
  Antisense strand to SEQ ID NO: 1983936
auccuggugacuuaugacc

SEQ ID NO: 1983938 - RNA, 19 nt, Artificial Sequence
  Description of Artificial Sequence: Synthetic oligonucleotide
  Sense strand starting at position 3395 of SEQ ID NO: 1880659
uccaucuuuccugacguuu

SEQ ID NO: 1983939 - RNA, 19 nt, Artificial Sequence
  Description of Artificial Sequence: Synthetic oligonucleotide
  Antisense strand to SEQ ID NO: 1983938
aaacgucaggaaagaugga

SEQ ID NO: 1983940 - RNA, 19 nt, Artificial Sequence
  Description of Artificial Sequence: Synthetic oligonucleotide
  Sense strand starting at position 3406 of SEQ ID NO: 1880659
ugacguuucuacugcaaac

SEQ ID NO: 1983941 - RNA, 19 nt, Artificial Sequence
  Description of Artificial Sequence: Synthetic oligonucleotide
  Antisense strand to SEQ ID NO: 1983940
guuugcaguagaaacguca

SEQ ID NO: 1983942 - RNA, 19 nt, Artificial Sequence
  Description of Artificial Sequence: Synthetic oligonucleotide
  Sense strand starting at position 3467 of SEQ ID NO: 1880659
aaagcaugucguuaaggac

SEQ ID NO: 1983943 - RNA, 19 nt, Artificial Sequence
  Description of Artificial Sequence: Synthetic oligonucleotide
  Antisense strand to SEQ ID NO: 1983942
guccuuaacgacaugcuuu

SEQ ID NO: 1983944 - RNA, 19 nt, Artificial Sequence
  Description of Artificial Sequence: Synthetic oligonucleotide
  Sense strand starting at position 3684 of SEQ ID NO: 1880659
agagauggaucucgcuaug

SEQ ID NO: 1983945 - RNA, 19 nt, Artificial Sequence
  Description of Artificial Sequence: Synthetic oligonucleotide
  Antisense strand to SEQ ID NO: 1983944
cauagcgagauccaucucu

SEQ ID NO: 1983946 - RNA, 19 nt, Artificial Sequence
  Description of Artificial Sequence: Synthetic oligonucleotide
  Sense strand starting at position 3800 of SEQ ID NO: 1880659
aggacuacuuguuuaaauc

SEQ ID NO: 1983947 - RNA, 19 nt, Artificial Sequence
  Description of Artificial Sequence: Synthetic oligonucleotide
  Antisense strand to SEQ ID NO: 1983946
gauuuaaacaaguaguccu

SEQ ID NO: 1983948 - RNA, 19 nt, Artificial Sequence
  Description of Artificial Sequence: Synthetic oligonucleotide
  Sense strand starting at position 410 of SEQ ID NO: 1880660
gccauuuccuaagaacaag

SEQ ID NO: 1983949 - RNA, 19 nt, Artificial Sequence
  Description of Artificial Sequence: Synthetic oligonucleotide
  Antisense strand to SEQ ID NO: 1983948
cuuguucuuaggaaauggc

SEQ ID NO: 1983950 - RNA, 19 nt, Artificial Sequence
  Description of Artificial Sequence: Synthetic oligonucleotide
  Sense strand starting at position 445 of SEQ ID NO: 1880660
ucaaauggucucuagaagu

SEQ ID NO: 1983951 - RNA, 19 nt, Artificial Sequence
  Description of Artificial Sequence: Synthetic oligonucleotide
  Antisense strand to SEQ ID NO: 1983950
acuucuagagaccauuuga

SEQ ID NO: 1983952 - RNA, 19 nt, Artificial Sequence
  Description of Artificial Sequence: Synthetic oligonucleotide
  Sense strand starting at position 455 of SEQ ID NO: 1880660
ucuagaaguccaugcacca

SEQ ID NO: 1983953 - RNA, 19 nt, Artificial Sequence
  Description of Artificial Sequence: Synthetic oligonucleotide
  Antisense strand to SEQ ID NO: 1983952
uggugcauggacuucuaga

SEQ ID NO: 1983954 - RNA, 19 nt, Artificial Sequence
  Description of Artificial Sequence: Synthetic oligonucleotide
  Sense strand starting at position 494 of SEQ ID NO: 1880660
uuguaucacccaggagcau

SEQ ID NO: 1983955 - RNA, 19 nt, Artificial Sequence
  Description of Artificial Sequence: Synthetic oligonucleotide
  Antisense strand to SEQ ID NO: 1983954
augcuccugggugauacaa

SEQ ID NO: 1983956 - RNA, 19 nt, Artificial Sequence
  Description of Artificial Sequence: Synthetic oligonucleotide
  Sense strand starting at position 495 of SEQ ID NO: 1880660
uguaucacccaggagcauu

SEQ ID NO: 1983957 - RNA, 19 nt, Artificial Sequence
  Description of Artificial Sequence: Synthetic oligonucleotide
  Antisense strand to SEQ ID NO: 1983956
aaugcuccugggugauaca

SEQ ID NO: 1983958 - RNA, 19 nt, Artificial Sequence
  Description of Artificial Sequence: Synthetic oligonucleotide
  Sense strand starting at position 512 of SEQ ID NO: 1880660
uuaggaauuguauggaggu

SEQ ID NO: 1983959 - RNA, 19 nt, Artificial Sequence
  Description of Artificial Sequence: Synthetic oligonucleotide
  Antisense strand to SEQ ID NO: 1983958
accuccauacaauuccuaa

SEQ ID NO: 1983960 - RNA, 19 nt, Artificial Sequence
  Description of Artificial Sequence: Synthetic oligonucleotide
  Sense strand starting at position 680 of SEQ ID NO: 1880660
aggagucccucauucuuua

SEQ ID NO: 1983961 - RNA, 19 nt, Artificial Sequence
  Description of Artificial Sequence: Synthetic oligonucleotide
  Antisense strand to SEQ ID NO: 1983960
uaaagaaugagggacuccu

SEQ ID NO: 1983962 - RNA, 19 nt, Artificial Sequence
  Description of Artificial Sequence: Synthetic oligonucleotide
  Sense strand starting at position 705 of SEQ ID NO: 1880660
gacagaaugucuguagguc

SEQ ID NO: 1983963 - RNA, 19 nt, Artificial Sequence
  Description of Artificial Sequence: Synthetic oligonucleotide
  Antisense strand to SEQ ID NO: 1983962
gaccuacagacauucuguc

SEQ ID NO: 1983964 - RNA, 19 nt, Artificial Sequence
  Description of Artificial Sequence: Synthetic oligonucleotide
  Sense strand starting at position 706 of SEQ ID NO: 1880660
acagaaugucuguagguca

SEQ ID NO: 1983965 - RNA, 19 nt, Artificial Sequence
  Description of Artificial Sequence: Synthetic oligonucleotide
  Antisense strand to SEQ ID NO: 1983964
ugaccuacagacauucugu

SEQ ID NO: 1983966 - RNA, 19 nt, Artificial Sequence
  Description of Artificial Sequence: Synthetic oligonucleotide
  Sense strand starting at position 709 of SEQ ID NO: 1880660
gaaugucuguaggucauua

SEQ ID NO: 1983967 - RNA, 19 nt, Artificial Sequence
  Description of Artificial Sequence: Synthetic oligonucleotide
  Antisense strand to SEQ ID NO: 1983966
uaaugaccuacagacauuc

SEQ ID NO: 1983968 - RNA, 19 nt, Artificial Sequence
  Description of Artificial Sequence: Synthetic oligonucleotide
  Sense strand starting at position 711 of SEQ ID NO: 1880660
augucuguaggucauuaga

SEQ ID NO: 1983969 - RNA, 19 nt, Artificial Sequence
  Description of Artificial Sequence: Synthetic oligonucleotide
  Antisense strand to SEQ ID NO: 1983968
ucuaaugaccuacagacau

SEQ ID NO: 1983970 - RNA, 19 nt, Artificial Sequence
  Description of Artificial Sequence: Synthetic oligonucleotide
  Sense strand starting at position 714 of SEQ ID NO: 1880660
ucuguaggucauuagacaa

SEQ ID NO: 1983971 - RNA, 19 nt, Artificial Sequence
  Description of Artificial Sequence: Synthetic oligonucleotide
  Antisense strand to SEQ ID NO: 1983970
uugucuaaugaccuacaga

SEQ ID NO: 1983972 - RNA, 19 nt, Artificial Sequence
  Description of Artificial Sequence: Synthetic oligonucleotide
  Sense strand starting at position 894 of SEQ ID NO: 1880660
uugccaguucugucuguau

SEQ ID NO: 1983973 - RNA, 19 nt, Artificial Sequence
  Description of Artificial Sequence: Synthetic oligonucleotide
  Antisense strand to SEQ ID NO: 1983972
auacagacagaacuggcaa

SEQ ID NO: 1983974 - RNA, 19 nt, Artificial Sequence
  Description of Artificial Sequence: Synthetic oligonucleotide
  Sense strand starting at position 1048 of SEQ ID NO: 1880660
ucaagugaacuuuggaaac

SEQ ID NO: 1983975 - RNA, 19 nt, Artificial Sequence
  Description of Artificial Sequence: Synthetic oligonucleotide
  Antisense strand to SEQ ID NO: 1983974
guuuccaaaguucacuuga

SEQ ID NO: 1983976 - RNA, 19 nt, Artificial Sequence
  Description of Artificial Sequence: Synthetic oligonucleotide
  Sense strand starting at position 1058 of SEQ ID NO: 1880660
uuuggaaaccuguagcaca

SEQ ID NO: 1983977 - RNA, 19 nt, Artificial Sequence
  Description of Artificial Sequence: Synthetic oligonucleotide
  Antisense strand to SEQ ID NO: 1983976
ugugcuacagguuuccaaa

SEQ ID NO: 1983978 - RNA, 19 nt, Artificial Sequence
  Description of Artificial Sequence: Synthetic oligonucleotide
  Sense strand starting at position 1140 of SEQ ID NO: 1880660
ggagaugaaugagcuucua

SEQ ID NO: 1983979 - RNA, 19 nt, Artificial Sequence
  Description of Artificial Sequence: Synthetic oligonucleotide
  Antisense strand to SEQ ID NO: 1983978
uagaagcucauucaucucc

SEQ ID NO: 1983980 - RNA, 19 nt, Artificial Sequence
  Description of Artificial Sequence: Synthetic oligonucleotide
  Sense strand starting at position 1200 of SEQ ID NO: 1880660
agacuuuacuucucaggau

SEQ ID NO: 1983981 - RNA, 19 nt, Artificial Sequence
  Description of Artificial Sequence: Synthetic oligonucleotide
  Antisense strand to SEQ ID NO: 1983980
auccugagaaguaaagucu

SEQ ID NO: 1983982 - RNA, 19 nt, Artificial Sequence
  Description of Artificial Sequence: Synthetic oligonucleotide
  Sense strand starting at position 1222 of SEQ ID NO: 1880660
cgagaagagauaugagcuu

SEQ ID NO: 1983983 - RNA, 19 nt, Artificial Sequence
  Description of Artificial Sequence: Synthetic oligonucleotide
  Antisense strand to SEQ ID NO: 1983982
aagcucauaucucuucucg

SEQ ID NO: 1983984 - RNA, 19 nt, Artificial Sequence
  Description of Artificial Sequence: Synthetic oligonucleotide
  Sense strand starting at position 1318 of SEQ ID NO: 1880660
aagucacugcccuaaggau

SEQ ID NO: 1983985 - RNA, 19 nt, Artificial Sequence
  Description of Artificial Sequence: Synthetic oligonucleotide
  Antisense strand to SEQ ID NO: 1983984
auccuuagggcagugacuu

SEQ ID NO: 1983986 - RNA, 19 nt, Artificial Sequence
  Description of Artificial Sequence: Synthetic oligonucleotide
  Sense strand starting at position 1350 of SEQ ID NO: 1880660
cagugugguaaagaaguuu

SEQ ID NO: 1983987 - RNA, 19 nt, Artificial Sequence
  Description of Artificial Sequence: Synthetic oligonucleotide
  Antisense strand to SEQ ID NO: 1983986
aaacuucuuuaccacacug

SEQ ID NO: 1983988 - RNA, 19 nt, Artificial Sequence
  Description of Artificial Sequence: Synthetic oligonucleotide
  Sense strand starting at position 1365 of SEQ ID NO: 1880660
guuucuaacagagggugaa

SEQ ID NO: 1983989 - RNA, 19 nt, Artificial Sequence
  Description of Artificial Sequence: Synthetic oligonucleotide
  Antisense strand to SEQ ID NO: 1983988
uucacccucuguuagaaac

SEQ ID NO: 1983990 - RNA, 19 nt, Artificial Sequence
  Description of Artificial Sequence: Synthetic oligonucleotide
  Sense strand starting at position 1420 of SEQ ID NO: 1880660
acaggaugauucucauucu

SEQ ID NO: 1983991 - RNA, 19 nt, Artificial Sequence
  Description of Artificial Sequence: Synthetic oligonucleotide
  Antisense strand to SEQ ID NO: 1983990
agaaugagaaucauccugu

SEQ ID NO: 1983992 - RNA, 19 nt, Artificial Sequence
  Description of Artificial Sequence: Synthetic oligonucleotide
  Sense strand starting at position 1423 of SEQ ID NO: 1880660
ggaugauucucauucuugg

SEQ ID NO: 1983993 - RNA, 19 nt, Artificial Sequence
  Description of Artificial Sequence: Synthetic oligonucleotide
  Antisense strand to SEQ ID NO: 1983992
ccaagaaugagaaucaucc

SEQ ID NO: 1983994 - RNA, 19 nt, Artificial Sequence
  Description of Artificial Sequence: Synthetic oligonucleotide
  Sense strand starting at position 1733 of SEQ ID NO: 1880660
aggagacagugucucaaua

SEQ ID NO: 1983995 - RNA, 19 nt, Artificial Sequence
  Description of Artificial Sequence: Synthetic oligonucleotide
  Antisense strand to SEQ ID NO: 1983994
uauugagacacugucuccu

SEQ ID NO: 1983996 - RNA, 19 nt, Artificial Sequence
  Description of Artificial Sequence: Synthetic oligonucleotide
  Sense strand starting at position 2271 of SEQ ID NO: 1880660
cagggaauagguuggguuu

SEQ ID NO: 1983997 - RNA, 19 nt, Artificial Sequence
  Description of Artificial Sequence: Synthetic oligonucleotide
  Antisense strand to SEQ ID NO: 1983996
aaacccaaccuauucccug

SEQ ID NO: 1983998 - RNA, 19 nt, Artificial Sequence
  Description of Artificial Sequence: Synthetic oligonucleotide
  Sense strand starting at position 2293 of SEQ ID NO: 1880660
auccaugugcaguauuaua

SEQ ID NO: 1983999 - RNA, 19 nt, Artificial Sequence
  Description of Artificial Sequence: Synthetic oligonucleotide
  Antisense strand to SEQ ID NO: 1983998
uauaauacugcacauggau

SEQ ID NO: 1984000 - RNA, 19 nt, Artificial Sequence
  Description of Artificial Sequence: Synthetic oligonucleotide
  Sense strand starting at position 2340 of SEQ ID NO: 1880660
gauugucaggucugaaaua

SEQ ID NO: 1984001 - RNA, 19 nt, Artificial Sequence
  Description of Artificial Sequence: Synthetic oligonucleotide
  Antisense strand to SEQ ID NO: 1984000
uauuucagaccugacaauc

SEQ ID NO: 1984002 - RNA, 19 nt, Artificial Sequence
  Description of Artificial Sequence: Synthetic oligonucleotide
  Sense strand starting at position 2403 of SEQ ID NO: 1880660
agucaauauuguccucaua

SEQ ID NO: 1984003 - RNA, 19 nt, Artificial Sequence
  Description of Artificial Sequence: Synthetic oligonucleotide
  Antisense strand to SEQ ID NO: 1984002
uaugaggacaauauugacu

SEQ ID NO: 1984004 - RNA, 19 nt, Artificial Sequence
  Description of Artificial Sequence: Synthetic oligonucleotide
  Sense strand starting at position 2549 of SEQ ID NO: 1880660
uugcauagagccuaaaucu

SEQ ID NO: 1984005 - RNA, 19 nt, Artificial Sequence
  Description of Artificial Sequence: Synthetic oligonucleotide
  Antisense strand to SEQ ID NO: 1984004
agauuuaggcucuaugcaa

SEQ ID NO: 1984006 - RNA, 19 nt, Artificial Sequence
  Description of Artificial Sequence: Synthetic oligonucleotide
  Sense strand starting at position 3180 of SEQ ID NO: 1880660
gaacacagcuuccuagagu

SEQ ID NO: 1984007 - RNA, 19 nt, Artificial Sequence
  Description of Artificial Sequence: Synthetic oligonucleotide
  Antisense strand to SEQ ID NO: 1984006
acucuaggaagcuguguuc

SEQ ID NO: 1984008 - RNA, 19 nt, Artificial Sequence
  Description of Artificial Sequence: Synthetic oligonucleotide
  Sense strand starting at position 3186 of SEQ ID NO: 1880660
agcuuccuagaguaagaca

SEQ ID NO: 1984009 - RNA, 19 nt, Artificial Sequence
  Description of Artificial Sequence: Synthetic oligonucleotide
  Antisense strand to SEQ ID NO: 1984008
ugucuuacucuaggaagcu

SEQ ID NO: 1984010 - RNA, 19 nt, Artificial Sequence
  Description of Artificial Sequence: Synthetic oligonucleotide
  Sense strand starting at position 3410 of SEQ ID NO: 1880660
guuuaaugagcccagguua

SEQ ID NO: 1984011 - RNA, 19 nt, Artificial Sequence
  Description of Artificial Sequence: Synthetic oligonucleotide
  Antisense strand to SEQ ID NO: 1984010
uaaccugggcucauuaaac

SEQ ID NO: 1984012 - RNA, 19 nt, Artificial Sequence
  Description of Artificial Sequence: Synthetic oligonucleotide
  Sense strand starting at position 3488 of SEQ ID NO: 1880660
agguguuaacuguaaggcu

SEQ ID NO: 1984013 - RNA, 19 nt, Artificial Sequence
  Description of Artificial Sequence: Synthetic oligonucleotide
  Antisense strand to SEQ ID NO: 1984012
agccuuacaguuaacaccu

SEQ ID NO: 1984014 - RNA, 19 nt, Artificial Sequence
  Description of Artificial Sequence: Synthetic oligonucleotide
  Sense strand starting at position 3503 of SEQ ID NO: 1880660
ggcugugaagggcaaugau

SEQ ID NO: 1984015 - RNA, 19 nt, Artificial Sequence
  Description of Artificial Sequence: Synthetic oligonucleotide
  Antisense strand to SEQ ID NO: 1984014
aucauugcccuucacagcc

SEQ ID NO: 1984016 - RNA, 19 nt, Artificial Sequence
  Description of Artificial Sequence: Synthetic oligonucleotide
  Sense strand starting at position 3506 of SEQ ID NO: 1880660
ugugaagggcaaugaucaa

SEQ ID NO: 1984017 - RNA, 19 nt, Artificial Sequence
  Description of Artificial Sequence: Synthetic oligonucleotide
  Antisense strand to SEQ ID NO: 1984016
uugaucauugcccuucaca

SEQ ID NO: 1984018 - RNA, 19 nt, Artificial Sequence
  Description of Artificial Sequence: Synthetic oligonucleotide
  Sense strand starting at position 3752 of SEQ ID NO: 1880660
gcagcauuaguuuaucaga

SEQ ID NO: 1984019 - RNA, 19 nt, Artificial Sequence
  Description of Artificial Sequence: Synthetic oligonucleotide
  Antisense strand to SEQ ID NO: 1984018
ucugauaaacuaaugcugc

SEQ ID NO: 1984020 - RNA, 19 nt, Artificial Sequence
  Description of Artificial Sequence: Synthetic oligonucleotide
  Sense strand starting at position 3754 of SEQ ID NO: 1880660
agcauuaguuuaucagaga

SEQ ID NO: 1984021 - RNA, 19 nt, Artificial Sequence
  Description of Artificial Sequence: Synthetic oligonucleotide
  Antisense strand to SEQ ID NO: 1984020
ucucugauaaacuaaugcu

SEQ ID NO: 1984022 - RNA, 19 nt, Artificial Sequence
  Description of Artificial Sequence: Synthetic oligonucleotide
  Sense strand starting at position 3786 of SEQ ID NO: 1880660
uuguaaacugaguaugcaa

SEQ ID NO: 1984023 - RNA, 19 nt, Artificial Sequence
  Description of Artificial Sequence: Synthetic oligonucleotide
  Antisense strand to SEQ ID NO: 1984022
uugcauacucaguuuacaa

SEQ ID NO: 1984024 - RNA, 19 nt, Artificial Sequence
  Description of Artificial Sequence: Synthetic oligonucleotide
  Sense strand starting at position 3793 of SEQ ID NO: 1880660
cugaguaugcaagggaugu

SEQ ID NO: 1984025 - RNA, 19 nt, Artificial Sequence
  Description of Artificial Sequence: Synthetic oligonucleotide
  Antisense strand to SEQ ID NO: 1984024
acaucccuugcauacucag

SEQ ID NO: 1984026 - RNA, 19 nt, Artificial Sequence
  Description of Artificial Sequence: Synthetic oligonucleotide
  Sense strand starting at position 3794 of SEQ ID NO: 1880660
ugaguaugcaagggaugua

SEQ ID NO: 1984027 - RNA, 19 nt, Artificial Sequence
  Description of Artificial Sequence: Synthetic oligonucleotide
  Antisense strand to SEQ ID NO: 1984026
uacaucccuugcauacuca

SEQ ID NO: 1984028 - RNA, 19 nt, Artificial Sequence
  Description of Artificial Sequence: Synthetic oligonucleotide
  Sense strand starting at position 71 of SEQ ID NO: 1880661
ugacgauucuuauuggaau

SEQ ID NO: 1984029 - RNA, 19 nt, Artificial Sequence
  Description of Artificial Sequence: Synthetic oligonucleotide
  Antisense strand to SEQ ID NO: 1984028
auuccaauaagaaucguca

SEQ ID NO: 1984030 - RNA, 19 nt, Artificial Sequence
  Description of Artificial Sequence: Synthetic oligonucleotide
  Sense strand starting at position 160 of SEQ ID NO: 1880661
uuugacagcuaagugaauu

SEQ ID NO: 1984031 - RNA, 19 nt, Artificial Sequence
  Description of Artificial Sequence: Synthetic oligonucleotide
  Antisense strand to SEQ ID NO: 1984030
aauucacuuagcugucaaa

SEQ ID NO: 1984032 - RNA, 19 nt, Artificial Sequence
  Description of Artificial Sequence: Synthetic oligonucleotide
  Sense strand starting at position 166 of SEQ ID NO: 1880661
agcuaagugaauuguaaag

SEQ ID NO: 1984033 - RNA, 19 nt, Artificial Sequence
  Description of Artificial Sequence: Synthetic oligonucleotide
  Antisense strand to SEQ ID NO: 1984032
cuuuacaauucacuuagcu

SEQ ID NO: 1984034 - RNA, 19 nt, Artificial Sequence
  Description of Artificial Sequence: Synthetic oligonucleotide
  Sense strand starting at position 207 of SEQ ID NO: 1880661
uucuuugccuagguaauuu

SEQ ID NO: 1984035 - RNA, 19 nt, Artificial Sequence
  Description of Artificial Sequence: Synthetic oligonucleotide
  Antisense strand to SEQ ID NO: 1984034
aaauuaccuaggcaaagaa

SEQ ID NO: 1984036 - RNA, 19 nt, Artificial Sequence
  Description of Artificial Sequence: Synthetic oligonucleotide
  Sense strand starting at position 305 of SEQ ID NO: 1880661
auaugaaauucgcugagaa

SEQ ID NO: 1984037 - RNA, 19 nt, Artificial Sequence
  Description of Artificial Sequence: Synthetic oligonucleotide
  Antisense strand to SEQ ID NO: 1984036
uucucagcgaauuucauau

SEQ ID NO: 1984038 - RNA, 19 nt, Artificial Sequence
  Description of Artificial Sequence: Synthetic oligonucleotide
  Sense strand starting at position 306 of SEQ ID NO: 1880661
uaugaaauucgcugagaaa

SEQ ID NO: 1984039 - RNA, 19 nt, Artificial Sequence
  Description of Artificial Sequence: Synthetic oligonucleotide
  Antisense strand to SEQ ID NO: 1984038
uuucucagcgaauuucaua

SEQ ID NO: 1984040 - RNA, 19 nt, Artificial Sequence
  Description of Artificial Sequence: Synthetic oligonucleotide
  Sense strand starting at position 368 of SEQ ID NO: 1880661
ugaauuagauagucuuaag

SEQ ID NO: 1984041 - RNA, 19 nt, Artificial Sequence
  Description of Artificial Sequence: Synthetic oligonucleotide
  Antisense strand to SEQ ID NO: 1984040
cuuaagacuaucuaauuca

SEQ ID NO: 1984042 - RNA, 19 nt, Artificial Sequence
  Description of Artificial Sequence: Synthetic oligonucleotide
  Sense strand starting at position 401 of SEQ ID NO: 1880661
caggauauguuauuggaca

SEQ ID NO: 1984043 - RNA, 19 nt, Artificial Sequence
  Description of Artificial Sequence: Synthetic oligonucleotide
  Antisense strand to SEQ ID NO: 1984042
uguccaauaacauauccug

SEQ ID NO: 1984044 - RNA, 19 nt, Artificial Sequence
  Description of Artificial Sequence: Synthetic oligonucleotide
  Sense strand starting at position 434 of SEQ ID NO: 1880661
caagguuuacuuugagaug

SEQ ID NO: 1984045 - RNA, 19 nt, Artificial Sequence
  Description of Artificial Sequence: Synthetic oligonucleotide
  Antisense strand to SEQ ID NO: 1984044
caucucaaaguaaaccuug

SEQ ID NO: 1984046 - RNA, 19 nt, Artificial Sequence
  Description of Artificial Sequence: Synthetic oligonucleotide
  Sense strand starting at position 445 of SEQ ID NO: 1880661
uugagaugccauuggacau

SEQ ID NO: 1984047 - RNA, 19 nt, Artificial Sequence
  Description of Artificial Sequence: Synthetic oligonucleotide
  Antisense strand to SEQ ID NO: 1984046
auguccaauggcaucucaa

SEQ ID NO: 1984048 - RNA, 19 nt, Artificial Sequence
  Description of Artificial Sequence: Synthetic oligonucleotide
  Sense strand starting at position 446 of SEQ ID NO: 1880661
ugagaugccauuggacauu

SEQ ID NO: 1984049 - RNA, 19 nt, Artificial Sequence
  Description of Artificial Sequence: Synthetic oligonucleotide
  Antisense strand to SEQ ID NO: 1984048
aauguccaauggcaucuca

SEQ ID NO: 1984050 - RNA, 19 nt, Artificial Sequence
  Description of Artificial Sequence: Synthetic oligonucleotide
  Sense strand starting at position 822 of SEQ ID NO: 1880661
aggcaauucuauguaauau

SEQ ID NO: 1984051 - RNA, 19 nt, Artificial Sequence
  Description of Artificial Sequence: Synthetic oligonucleotide
  Antisense strand to SEQ ID NO: 1984050
auauuacauagaauugccu

SEQ ID NO: 1984052 - RNA, 19 nt, Artificial Sequence
  Description of Artificial Sequence: Synthetic oligonucleotide
  Sense strand starting at position 856 of SEQ ID NO: 1880661
aauacugaacuuuggguua

SEQ ID NO: 1984053 - RNA, 19 nt, Artificial Sequence
  Description of Artificial Sequence: Synthetic oligonucleotide
  Antisense strand to SEQ ID NO: 1984052
uaacccaaaguucaguauu

SEQ ID NO: 1984054 - RNA, 19 nt, Artificial Sequence
  Description of Artificial Sequence: Synthetic oligonucleotide
  Sense strand starting at position 859 of SEQ ID NO: 1880661
acugaacuuuggguuaauu

SEQ ID NO: 1984055 - RNA, 19 nt, Artificial Sequence
  Description of Artificial Sequence: Synthetic oligonucleotide
  Antisense strand to SEQ ID NO: 1984054
aauuaacccaaaguucagu

SEQ ID NO: 1984056 - RNA, 19 nt, Artificial Sequence
  Description of Artificial Sequence: Synthetic oligonucleotide
  Sense strand starting at position 982 of SEQ ID NO: 1880661
cauugaguuguauggacau

SEQ ID NO: 1984057 - RNA, 19 nt, Artificial Sequence
  Description of Artificial Sequence: Synthetic oligonucleotide
  Antisense strand to SEQ ID NO: 1984056
auguccauacaacucaaug

SEQ ID NO: 1984058 - RNA, 19 nt, Artificial Sequence
  Description of Artificial Sequence: Synthetic oligonucleotide
  Sense strand starting at position 984 of SEQ ID NO: 1880661
uugaguuguauggacaugu

SEQ ID NO: 1984059 - RNA, 19 nt, Artificial Sequence
  Description of Artificial Sequence: Synthetic oligonucleotide
  Antisense strand to SEQ ID NO: 1984058
acauguccauacaacucaa

SEQ ID NO: 1984060 - RNA, 19 nt, Artificial Sequence
  Description of Artificial Sequence: Synthetic oligonucleotide
  Sense strand starting at position 1263 of SEQ ID NO: 1880661
ggaaaugaacuuuguguau

SEQ ID NO: 1984061 - RNA, 19 nt, Artificial Sequence
  Description of Artificial Sequence: Synthetic oligonucleotide
  Antisense strand to SEQ ID NO: 1984060
auacacaaaguucauuucc

SEQ ID NO: 1984062 - RNA, 19 nt, Artificial Sequence
  Description of Artificial Sequence: Synthetic oligonucleotide
  Sense strand starting at position 1286 of SEQ ID NO: 1880661
gggagcugcauagacuuau

SEQ ID NO: 1984063 - RNA, 19 nt, Artificial Sequence
  Description of Artificial Sequence: Synthetic oligonucleotide
  Antisense strand to SEQ ID NO: 1984062
auaagucuaugcagcuccc

SEQ ID NO: 1984064 - RNA, 19 nt, Artificial Sequence
  Description of Artificial Sequence: Synthetic oligonucleotide
  Sense strand starting at position 1857 of SEQ ID NO: 1880661
guguucuggaaauaacagu

SEQ ID NO: 1984065 - RNA, 19 nt, Artificial Sequence
  Description of Artificial Sequence: Synthetic oligonucleotide
  Antisense strand to SEQ ID NO: 1984064
acuguuauuuccagaacac

SEQ ID NO: 1984066 - RNA, 19 nt, Artificial Sequence
  Description of Artificial Sequence: Synthetic oligonucleotide
  Sense strand starting at position 1888 of SEQ ID NO: 1880661
agcaauuucucagagauaa

SEQ ID NO: 1984067 - RNA, 19 nt, Artificial Sequence
  Description of Artificial Sequence: Synthetic oligonucleotide
  Antisense strand to SEQ ID NO: 1984066
uuaucucugagaaauugcu

SEQ ID NO: 1984068 - RNA, 19 nt, Artificial Sequence
  Description of Artificial Sequence: Synthetic oligonucleotide
  Sense strand starting at position 1932 of SEQ ID NO: 1880661
ggcagcaguguagagauua

SEQ ID NO: 1984069 - RNA, 19 nt, Artificial Sequence
  Description of Artificial Sequence: Synthetic oligonucleotide
  Antisense strand to SEQ ID NO: 1984068
uaaucucuacacugcugcc

SEQ ID NO: 1984070 - RNA, 19 nt, Artificial Sequence
  Description of Artificial Sequence: Synthetic oligonucleotide
  Sense strand starting at position 1940 of SEQ ID NO: 1880661
uguagagauuaguuugaau

SEQ ID NO: 1984071 - RNA, 19 nt, Artificial Sequence
  Description of Artificial Sequence: Synthetic oligonucleotide
  Antisense strand to SEQ ID NO: 1984070
auucaaacuaaucucuaca

SEQ ID NO: 1984072 - RNA, 19 nt, Artificial Sequence
  Description of Artificial Sequence: Synthetic oligonucleotide
  Sense strand starting at position 1942 of SEQ ID NO: 1880661
uagagauuaguuugaauuc

SEQ ID NO: 1984073 - RNA, 19 nt, Artificial Sequence
  Description of Artificial Sequence: Synthetic oligonucleotide
  Antisense strand to SEQ ID NO: 1984072
gaauucaaacuaaucucua

SEQ ID NO: 1984074 - RNA, 19 nt, Artificial Sequence
  Description of Artificial Sequence: Synthetic oligonucleotide
  Sense strand starting at position 2408 of SEQ ID NO: 1880661
uugcauuuacuugguugau

SEQ ID NO: 1984075 - RNA, 19 nt, Artificial Sequence
  Description of Artificial Sequence: Synthetic oligonucleotide
  Antisense strand to SEQ ID NO: 1984074
aucaaccaaguaaaugcaa

SEQ ID NO: 1984076 - RNA, 19 nt, Artificial Sequence
  Description of Artificial Sequence: Synthetic oligonucleotide
  Sense strand starting at position 2567 of SEQ ID NO: 1880661
ucauuacucugggccuaau

SEQ ID NO: 1984077 - RNA, 19 nt, Artificial Sequence
  Description of Artificial Sequence: Synthetic oligonucleotide
  Antisense strand to SEQ ID NO: 1984076
auuaggcccagaguaauga

SEQ ID NO: 1984078 - RNA, 19 nt, Artificial Sequence
  Description of Artificial Sequence: Synthetic oligonucleotide
  Sense strand starting at position 2570 of SEQ ID NO: 1880661
uuacucugggccuaaugua

SEQ ID NO: 1984079 - RNA, 19 nt, Artificial Sequence
  Description of Artificial Sequence: Synthetic oligonucleotide
  Antisense strand to SEQ ID NO: 1984078
uacauuaggcccagaguaa

SEQ ID NO: 1984080 - RNA, 19 nt, Artificial Sequence
  Description of Artificial Sequence: Synthetic oligonucleotide
  Sense strand starting at position 2734 of SEQ ID NO: 1880661
uccugcucugaaugacuau

SEQ ID NO: 1984081 - RNA, 19 nt, Artificial Sequence
  Description of Artificial Sequence: Synthetic oligonucleotide
  Antisense strand to SEQ ID NO: 1984080
auagucauucagagcagga

SEQ ID NO: 1984082 - RNA, 19 nt, Artificial Sequence
  Description of Artificial Sequence: Synthetic oligonucleotide
  Sense strand starting at position 2868 of SEQ ID NO: 1880661
acagaauugcuugacccuu

SEQ ID NO: 1984083 - RNA, 19 nt, Artificial Sequence
  Description of Artificial Sequence: Synthetic oligonucleotide
  Antisense strand to SEQ ID NO: 1984082
aagggucaagcaauucugu

SEQ ID NO: 1984084 - RNA, 19 nt, Artificial Sequence
  Description of Artificial Sequence: Synthetic oligonucleotide
  Sense strand starting at position 2870 of SEQ ID NO: 1880661
agaauugcuugacccuuua

SEQ ID NO: 1984085 - RNA, 19 nt, Artificial Sequence
  Description of Artificial Sequence: Synthetic oligonucleotide
  Antisense strand to SEQ ID NO: 1984084
uaaagggucaagcaauucu

SEQ ID NO: 1984086 - RNA, 19 nt, Artificial Sequence
  Description of Artificial Sequence: Synthetic oligonucleotide
  Sense strand starting at position 2945 of SEQ ID NO: 1880661
uugauuucuuuggaaucaa

SEQ ID NO: 1984087 - RNA, 19 nt, Artificial Sequence
  Description of Artificial Sequence: Synthetic oligonucleotide
  Antisense strand to SEQ ID NO: 1984086
uugauuccaaagaaaucaa

SEQ ID NO: 1984088 - RNA, 19 nt, Artificial Sequence
  Description of Artificial Sequence: Synthetic oligonucleotide
  Sense strand starting at position 2956 of SEQ ID NO: 1880661
ggaaucaauacagguuguu

SEQ ID NO: 1984089 - RNA, 19 nt, Artificial Sequence
  Description of Artificial Sequence: Synthetic oligonucleotide
  Antisense strand to SEQ ID NO: 1984088
aacaaccuguauugauucc

SEQ ID NO: 1984090 - RNA, 19 nt, Artificial Sequence
  Description of Artificial Sequence: Synthetic oligonucleotide
  Sense strand starting at position 2959 of SEQ ID NO: 1880661
aucaauacagguuguuaga

SEQ ID NO: 1984091 - RNA, 19 nt, Artificial Sequence
  Description of Artificial Sequence: Synthetic oligonucleotide
  Antisense strand to SEQ ID NO: 1984090
ucuaacaaccuguauugau

SEQ ID NO: 1984092 - RNA, 19 nt, Artificial Sequence
  Description of Artificial Sequence: Synthetic oligonucleotide
  Sense strand starting at position 2999 of SEQ ID NO: 1880661
cucugagaguuauugguau

SEQ ID NO: 1984093 - RNA, 19 nt, Artificial Sequence
  Description of Artificial Sequence: Synthetic oligonucleotide
  Antisense strand to SEQ ID NO: 1984092
auaccaauaacucucagag

SEQ ID NO: 1984094 - RNA, 19 nt, Artificial Sequence
  Description of Artificial Sequence: Synthetic oligonucleotide
  Sense strand starting at position 3001 of SEQ ID NO: 1880661
cugagaguuauugguauac

SEQ ID NO: 1984095 - RNA, 19 nt, Artificial Sequence
  Description of Artificial Sequence: Synthetic oligonucleotide
  Antisense strand to SEQ ID NO: 1984094
guauaccaauaacucucag

SEQ ID NO: 1984096 - RNA, 19 nt, Artificial Sequence
  Description of Artificial Sequence: Synthetic oligonucleotide
  Sense strand starting at position 3098 of SEQ ID NO: 1880661
guuauaaucuaagccugaa

SEQ ID NO: 1984097 - RNA, 19 nt, Artificial Sequence
  Description of Artificial Sequence: Synthetic oligonucleotide
  Antisense strand to SEQ ID NO: 1984096
uucaggcuuagauuauaac

SEQ ID NO: 1984098 - RNA, 19 nt, Artificial Sequence
  Description of Artificial Sequence: Synthetic oligonucleotide
  Sense strand starting at position 3128 of SEQ ID NO: 1880661
gguaguuggcaauauaaau

SEQ ID NO: 1984099 - RNA, 19 nt, Artificial Sequence
  Description of Artificial Sequence: Synthetic oligonucleotide
  Antisense strand to SEQ ID NO: 1984098
auuuauauugccaacuacc

SEQ ID NO: 1984100 - RNA, 19 nt, Artificial Sequence
  Description of Artificial Sequence: Synthetic oligonucleotide
  Sense strand starting at position 3186 of SEQ ID NO: 1880661
acaucauuaucagcuggau

SEQ ID NO: 1984101 - RNA, 19 nt, Artificial Sequence
  Description of Artificial Sequence: Synthetic oligonucleotide
  Antisense strand to SEQ ID NO: 1984100
auccagcugauaaugaugu

SEQ ID NO: 1984102 - RNA, 19 nt, Artificial Sequence
  Description of Artificial Sequence: Synthetic oligonucleotide
  Sense strand starting at position 3834 of SEQ ID NO: 1880661
gaaguuauacaaggcauua

SEQ ID NO: 1984103 - RNA, 19 nt, Artificial Sequence
  Description of Artificial Sequence: Synthetic oligonucleotide
  Antisense strand to SEQ ID NO: 1984102
uaaugccuuguauaacuuc

SEQ ID NO: 1984104 - RNA, 19 nt, Artificial Sequence
  Description of Artificial Sequence: Synthetic oligonucleotide
  Sense strand starting at position 3872 of SEQ ID NO: 1880661
uuaucuugccuuuaaggau

SEQ ID NO: 1984105 - RNA, 19 nt, Artificial Sequence
  Description of Artificial Sequence: Synthetic oligonucleotide
  Antisense strand to SEQ ID NO: 1984104
auccuuaaaggcaagauaa

SEQ ID NO: 1984106 - RNA, 19 nt, Artificial Sequence
  Description of Artificial Sequence: Synthetic oligonucleotide
  Sense strand starting at position 3878 of SEQ ID NO: 1880661
ugccuuuaaggauaguauu

SEQ ID NO: 1984107 - RNA, 19 nt, Artificial Sequence
  Description of Artificial Sequence: Synthetic oligonucleotide
  Antisense strand to SEQ ID NO: 1984106
aauacuauccuuaaaggca

SEQ ID NO: 1984108 - RNA, 19 nt, Artificial Sequence
  Description of Artificial Sequence: Synthetic oligonucleotide
  Sense strand starting at position 306 of SEQ ID NO: 1880662
ccugaauguguuuauggau

SEQ ID NO: 1984109 - RNA, 19 nt, Artificial Sequence
  Description of Artificial Sequence: Synthetic oligonucleotide
  Antisense strand to SEQ ID NO: 1984108
auccauaaacacauucagg

SEQ ID NO: 1984110 - RNA, 19 nt, Artificial Sequence
  Description of Artificial Sequence: Synthetic oligonucleotide
  Sense strand starting at position 475 of SEQ ID NO: 1880662
uagagaagccuugaguugu

SEQ ID NO: 1984111 - RNA, 19 nt, Artificial Sequence
  Description of Artificial Sequence: Synthetic oligonucleotide
  Antisense strand to SEQ ID NO: 1984110
acaacucaaggcuucucua

SEQ ID NO: 1984112 - RNA, 19 nt, Artificial Sequence
  Description of Artificial Sequence: Synthetic oligonucleotide
  Sense strand starting at position 575 of SEQ ID NO: 1880662
cuccuugugaggugagaua

SEQ ID NO: 1984113 - RNA, 19 nt, Artificial Sequence
  Description of Artificial Sequence: Synthetic oligonucleotide
  Antisense strand to SEQ ID NO: 1984112
uaucucaccucacaaggag

SEQ ID NO: 1984114 - RNA, 19 nt, Artificial Sequence
  Description of Artificial Sequence: Synthetic oligonucleotide
  Sense strand starting at position 889 of SEQ ID NO: 1880662
ggagaaguccuaggccaag

SEQ ID NO: 1984115 - RNA, 19 nt, Artificial Sequence
  Description of Artificial Sequence: Synthetic oligonucleotide
  Antisense strand to SEQ ID NO: 1984114
cuuggccuaggacuucucc

SEQ ID NO: 1984116 - RNA, 19 nt, Artificial Sequence
  Description of Artificial Sequence: Synthetic oligonucleotide
  Sense strand starting at position 1018 of SEQ ID NO: 1880662
guacgacaauaucuuaauu

SEQ ID NO: 1984117 - RNA, 19 nt, Artificial Sequence
  Description of Artificial Sequence: Synthetic oligonucleotide
  Antisense strand to SEQ ID NO: 1984116
aauuaagauauugucguac

SEQ ID NO: 1984118 - RNA, 19 nt, Artificial Sequence
  Description of Artificial Sequence: Synthetic oligonucleotide
  Sense strand starting at position 1084 of SEQ ID NO: 1880662
aaaucaguguuucugagaa

SEQ ID NO: 1984119 - RNA, 19 nt, Artificial Sequence
  Description of Artificial Sequence: Synthetic oligonucleotide
  Antisense strand to SEQ ID NO: 1984118
uucucagaaacacugauuu

SEQ ID NO: 1984120 - RNA, 19 nt, Artificial Sequence
  Description of Artificial Sequence: Synthetic oligonucleotide
  Sense strand starting at position 1221 of SEQ ID NO: 1880662
acaguaauuccucaaaugu

SEQ ID NO: 1984121 - RNA, 19 nt, Artificial Sequence
  Description of Artificial Sequence: Synthetic oligonucleotide
  Antisense strand to SEQ ID NO: 1984120
acauuugaggaauuacugu

SEQ ID NO: 1984122 - RNA, 19 nt, Artificial Sequence
  Description of Artificial Sequence: Synthetic oligonucleotide
  Sense strand starting at position 1293 of SEQ ID NO: 1880662
uggaucagucaggguucau

SEQ ID NO: 1984123 - RNA, 19 nt, Artificial Sequence
  Description of Artificial Sequence: Synthetic oligonucleotide
  Antisense strand to SEQ ID NO: 1984122
augaacccugacugaucca

SEQ ID NO: 1984124 - RNA, 19 nt, Artificial Sequence
  Description of Artificial Sequence: Synthetic oligonucleotide
  Sense strand starting at position 1477 of SEQ ID NO: 1880662
ggagaugagcuaugucuaa

SEQ ID NO: 1984125 - RNA, 19 nt, Artificial Sequence
  Description of Artificial Sequence: Synthetic oligonucleotide
  Antisense strand to SEQ ID NO: 1984124
uuagacauagcucaucucc

SEQ ID NO: 1984126 - RNA, 19 nt, Artificial Sequence
  Description of Artificial Sequence: Synthetic oligonucleotide
  Sense strand starting at position 1523 of SEQ ID NO: 1880662
ugaguuaaucuaugucaag

SEQ ID NO: 1984127 - RNA, 19 nt, Artificial Sequence
  Description of Artificial Sequence: Synthetic oligonucleotide
  Antisense strand to SEQ ID NO: 1984126
cuugacauagauuaacuca

SEQ ID NO: 1984128 - RNA, 19 nt, Artificial Sequence
  Description of Artificial Sequence: Synthetic oligonucleotide
  Sense strand starting at position 1669 of SEQ ID NO: 1880662
ucuguuugccaucaaauga

SEQ ID NO: 1984129 - RNA, 19 nt, Artificial Sequence
  Description of Artificial Sequence: Synthetic oligonucleotide
  Antisense strand to SEQ ID NO: 1984128
ucauuugauggcaaacaga

SEQ ID NO: 1984130 - RNA, 19 nt, Artificial Sequence
  Description of Artificial Sequence: Synthetic oligonucleotide
  Sense strand starting at position 1750 of SEQ ID NO: 1880662
acaucugauugacugaguu

SEQ ID NO: 1984131 - RNA, 19 nt, Artificial Sequence
  Description of Artificial Sequence: Synthetic oligonucleotide
  Antisense strand to SEQ ID NO: 1984130
aacucagucaaucagaugu

SEQ ID NO: 1984132 - RNA, 19 nt, Artificial Sequence
  Description of Artificial Sequence: Synthetic oligonucleotide
  Sense strand starting at position 1760 of SEQ ID NO: 1880662
gacugaguuugagucaaau

SEQ ID NO: 1984133 - RNA, 19 nt, Artificial Sequence
  Description of Artificial Sequence: Synthetic oligonucleotide
  Antisense strand to SEQ ID NO: 1984132
auuugacucaaacucaguc

SEQ ID NO: 1984134 - RNA, 19 nt, Artificial Sequence
  Description of Artificial Sequence: Synthetic oligonucleotide
  Sense strand starting at position 1860 of SEQ ID NO: 1880662
uggacagacucagcucaua

SEQ ID NO: 1984135 - RNA, 19 nt, Artificial Sequence
  Description of Artificial Sequence: Synthetic oligonucleotide
  Antisense strand to SEQ ID NO: 1984134
uaugagcugagucugucca

SEQ ID NO: 1984136 - RNA, 19 nt, Artificial Sequence
  Description of Artificial Sequence: Synthetic oligonucleotide
  Sense strand starting at position 2010 of SEQ ID NO: 1880662
aucauuuguugugucagua

SEQ ID NO: 1984137 - RNA, 19 nt, Artificial Sequence
  Description of Artificial Sequence: Synthetic oligonucleotide
  Antisense strand to SEQ ID NO: 1984136
uacugacacaacaaaugau

SEQ ID NO: 1984138 - RNA, 19 nt, Artificial Sequence
  Description of Artificial Sequence: Synthetic oligonucleotide
  Sense strand starting at position 2117 of SEQ ID NO: 1880662
guagacauuuaauaaaggu

SEQ ID NO: 1984139 - RNA, 19 nt, Artificial Sequence
  Description of Artificial Sequence: Synthetic oligonucleotide
  Antisense strand to SEQ ID NO: 1984138
accuuuauuaaaugucuac

SEQ ID NO: 1984140 - RNA, 19 nt, Artificial Sequence
  Description of Artificial Sequence: Synthetic oligonucleotide
  Sense strand starting at position 2234 of SEQ ID NO: 1880662
auaucaagcuaagugguaa

SEQ ID NO: 1984141 - RNA, 19 nt, Artificial Sequence
  Description of Artificial Sequence: Synthetic oligonucleotide
  Antisense strand to SEQ ID NO: 1984140
uuaccacuuagcuugauau

SEQ ID NO: 1984142 - RNA, 19 nt, Artificial Sequence
  Description of Artificial Sequence: Synthetic oligonucleotide
  Sense strand starting at position 2338 of SEQ ID NO: 1880662
agagauaacuuguuccaac

SEQ ID NO: 1984143 - RNA, 19 nt, Artificial Sequence
  Description of Artificial Sequence: Synthetic oligonucleotide
  Antisense strand to SEQ ID NO: 1984142
guuggaacaaguuaucucu

SEQ ID NO: 1984144 - RNA, 19 nt, Artificial Sequence
  Description of Artificial Sequence: Synthetic oligonucleotide
  Sense strand starting at position 2452 of SEQ ID NO: 1880662
gagaaucaugaauguuguc

SEQ ID NO: 1984145 - RNA, 19 nt, Artificial Sequence
  Description of Artificial Sequence: Synthetic oligonucleotide
  Antisense strand to SEQ ID NO: 1984144
gacaacauucaugauucuc

SEQ ID NO: 1984146 - RNA, 19 nt, Artificial Sequence
  Description of Artificial Sequence: Synthetic oligonucleotide
  Sense strand starting at position 2814 of SEQ ID NO: 1880662
cugaaugcccaugaaugua

SEQ ID NO: 1984147 - RNA, 19 nt, Artificial Sequence
  Description of Artificial Sequence: Synthetic oligonucleotide
  Antisense strand to SEQ ID NO: 1984146
uacauucaugggcauucag

SEQ ID NO: 1984148 - RNA, 19 nt, Artificial Sequence
  Description of Artificial Sequence: Synthetic oligonucleotide
  Sense strand starting at position 2907 of SEQ ID NO: 1880662
ugagaacaacucuguugua

SEQ ID NO: 1984149 - RNA, 19 nt, Artificial Sequence
  Description of Artificial Sequence: Synthetic oligonucleotide
  Antisense strand to SEQ ID NO: 1984148
uacaacagaguuguucuca

SEQ ID NO: 1984150 - RNA, 19 nt, Artificial Sequence
  Description of Artificial Sequence: Synthetic oligonucleotide
  Sense strand starting at position 2908 of SEQ ID NO: 1880662
gagaacaacucuguuguau

SEQ ID NO: 1984151 - RNA, 19 nt, Artificial Sequence
  Description of Artificial Sequence: Synthetic oligonucleotide
  Antisense strand to SEQ ID NO: 1984150
auacaacagaguuguucuc

SEQ ID NO: 1984152 - RNA, 19 nt, Artificial Sequence
  Description of Artificial Sequence: Synthetic oligonucleotide
  Sense strand starting at position 2958 of SEQ ID NO: 1880662
aaguaagugcuuuauggag

SEQ ID NO: 1984153 - RNA, 19 nt, Artificial Sequence
  Description of Artificial Sequence: Synthetic oligonucleotide
  Antisense strand to SEQ ID NO: 1984152
cuccauaaagcacuuacuu

SEQ ID NO: 1984154 - RNA, 19 nt, Artificial Sequence
  Description of Artificial Sequence: Synthetic oligonucleotide
  Sense strand starting at position 2964 of SEQ ID NO: 1880662
gugcuuuauggaggaagga

SEQ ID NO: 1984155 - RNA, 19 nt, Artificial Sequence
  Description of Artificial Sequence: Synthetic oligonucleotide
  Antisense strand to SEQ ID NO: 1984154
uccuuccuccauaaagcac

SEQ ID NO: 1984156 - RNA, 19 nt, Artificial Sequence
  Description of Artificial Sequence: Synthetic oligonucleotide
  Sense strand starting at position 2998 of SEQ ID NO: 1880662
acuuaucuggaguagcaaa

SEQ ID NO: 1984157 - RNA, 19 nt, Artificial Sequence
  Description of Artificial Sequence: Synthetic oligonucleotide
  Antisense strand to SEQ ID NO: 1984156
uuugcuacuccagauaagu

SEQ ID NO: 1984158 - RNA, 19 nt, Artificial Sequence
  Description of Artificial Sequence: Synthetic oligonucleotide
  Sense strand starting at position 3038 of SEQ ID NO: 1880662
caaaguauuugggaagaga

SEQ ID NO: 1984159 - RNA, 19 nt, Artificial Sequence
  Description of Artificial Sequence: Synthetic oligonucleotide
  Antisense strand to SEQ ID NO: 1984158
ucucuucccaaauacuuug

SEQ ID NO: 1984160 - RNA, 19 nt, Artificial Sequence
  Description of Artificial Sequence: Synthetic oligonucleotide
  Sense strand starting at position 3070 of SEQ ID NO: 1880662
gaugguuagauaggagagu

SEQ ID NO: 1984161 - RNA, 19 nt, Artificial Sequence
  Description of Artificial Sequence: Synthetic oligonucleotide
  Antisense strand to SEQ ID NO: 1984160
acucuccuaucuaaccauc

SEQ ID NO: 1984162 - RNA, 19 nt, Artificial Sequence
  Description of Artificial Sequence: Synthetic oligonucleotide
  Sense strand starting at position 3091 of SEQ ID NO: 1880662
uaggaauucuggcuuauug

SEQ ID NO: 1984163 - RNA, 19 nt, Artificial Sequence
  Description of Artificial Sequence: Synthetic oligonucleotide
  Antisense strand to SEQ ID NO: 1984162
caauaagccagaauuccua

SEQ ID NO: 1984164 - RNA, 19 nt, Artificial Sequence
  Description of Artificial Sequence: Synthetic oligonucleotide
  Sense strand starting at position 3093 of SEQ ID NO: 1880662
ggaauucuggcuuauugua

SEQ ID NO: 1984165 - RNA, 19 nt, Artificial Sequence
  Description of Artificial Sequence: Synthetic oligonucleotide
  Antisense strand to SEQ ID NO: 1984164
uacaauaagccagaauucc

SEQ ID NO: 1984166 - RNA, 19 nt, Artificial Sequence
  Description of Artificial Sequence: Synthetic oligonucleotide
  Sense strand starting at position 3106 of SEQ ID NO: 1880662
auuguauacccacaugcua

SEQ ID NO: 1984167 - RNA, 19 nt, Artificial Sequence
  Description of Artificial Sequence: Synthetic oligonucleotide
  Antisense strand to SEQ ID NO: 1984166
uagcauguggguauacaau

SEQ ID NO: 1984168 - RNA, 19 nt, Artificial Sequence
  Description of Artificial Sequence: Synthetic oligonucleotide
  Sense strand starting at position 3167 of SEQ ID NO: 1880662
ggguguuaaauccagagua

SEQ ID NO: 1984169 - RNA, 19 nt, Artificial Sequence
  Description of Artificial Sequence: Synthetic oligonucleotide
  Antisense strand to SEQ ID NO: 1984168
uacucuggauuuaacaccc

SEQ ID NO: 1984170 - RNA, 19 nt, Artificial Sequence
  Description of Artificial Sequence: Synthetic oligonucleotide
  Sense strand starting at position 3169 of SEQ ID NO: 1880662
guguuaaauccagaguauc

SEQ ID NO: 1984171 - RNA, 19 nt, Artificial Sequence
  Description of Artificial Sequence: Synthetic oligonucleotide
  Antisense strand to SEQ ID NO: 1984170
gauacucuggauuuaacac

SEQ ID NO: 1984172 - RNA, 19 nt, Artificial Sequence
  Description of Artificial Sequence: Synthetic oligonucleotide
  Sense strand starting at position 3208 of SEQ ID NO: 1880662
ggaacaaauauguaacguu

SEQ ID NO: 1984173 - RNA, 19 nt, Artificial Sequence
  Description of Artificial Sequence: Synthetic oligonucleotide
  Antisense strand to SEQ ID NO: 1984172
aacguuacauauuuguucc

SEQ ID NO: 1984174 - RNA, 19 nt, Artificial Sequence
  Description of Artificial Sequence: Synthetic oligonucleotide
  Sense strand starting at position 3395 of SEQ ID NO: 1880662
ucaguaauucuggaaguca

SEQ ID NO: 1984175 - RNA, 19 nt, Artificial Sequence
  Description of Artificial Sequence: Synthetic oligonucleotide
  Antisense strand to SEQ ID NO: 1984174
ugacuuccagaauuacuga

SEQ ID NO: 1984176 - RNA, 19 nt, Artificial Sequence
  Description of Artificial Sequence: Synthetic oligonucleotide
  Sense strand starting at position 3475 of SEQ ID NO: 1880662
aguuuauuuguucguuuag

SEQ ID NO: 1984177 - RNA, 19 nt, Artificial Sequence
  Description of Artificial Sequence: Synthetic oligonucleotide
  Antisense strand to SEQ ID NO: 1984176
cuaaacgaacaaauaaacu

SEQ ID NO: 1984178 - RNA, 19 nt, Artificial Sequence
  Description of Artificial Sequence: Synthetic oligonucleotide
  Sense strand starting at position 3544 of SEQ ID NO: 1880662
uccuucuugccagaggauu

SEQ ID NO: 1984179 - RNA, 19 nt, Artificial Sequence
  Description of Artificial Sequence: Synthetic oligonucleotide
  Antisense strand to SEQ ID NO: 1984178
aauccucuggcaagaagga

SEQ ID NO: 1984180 - RNA, 19 nt, Artificial Sequence
  Description of Artificial Sequence: Synthetic oligonucleotide
  Sense strand starting at position 3555 of SEQ ID NO: 1880662
agaggauucuguguaaugg

SEQ ID NO: 1984181 - RNA, 19 nt, Artificial Sequence
  Description of Artificial Sequence: Synthetic oligonucleotide
  Antisense strand to SEQ ID NO: 1984180
ccauuacacagaauccucu

SEQ ID NO: 1984182 - RNA, 19 nt, Artificial Sequence
  Description of Artificial Sequence: Synthetic oligonucleotide
  Sense strand starting at position 3563 of SEQ ID NO: 1880662
cuguguaauggguaaggua

SEQ ID NO: 1984183 - RNA, 19 nt, Artificial Sequence
  Description of Artificial Sequence: Synthetic oligonucleotide
  Antisense strand to SEQ ID NO: 1984182
uaccuuacccauuacacag

SEQ ID NO: 1984184 - RNA, 19 nt, Artificial Sequence
  Description of Artificial Sequence: Synthetic oligonucleotide
  Sense strand starting at position 3616 of SEQ ID NO: 1880662
auucgagugaucuagcaua

SEQ ID NO: 1984185 - RNA, 19 nt, Artificial Sequence
  Description of Artificial Sequence: Synthetic oligonucleotide
  Antisense strand to SEQ ID NO: 1984184
uaugcuagaucacucgaau

SEQ ID NO: 1984186 - RNA, 19 nt, Artificial Sequence
  Description of Artificial Sequence: Synthetic oligonucleotide
  Sense strand starting at position 3621 of SEQ ID NO: 1880662
agugaucuagcauauuagu

SEQ ID NO: 1984187 - RNA, 19 nt, Artificial Sequence
  Description of Artificial Sequence: Synthetic oligonucleotide
  Antisense strand to SEQ ID NO: 1984186
acuaauaugcuagaucacu

SEQ ID NO: 1984188 - RNA, 19 nt, Artificial Sequence
  Description of Artificial Sequence: Synthetic oligonucleotide
  Sense strand starting at position 284 of SEQ ID NO: 1880663
acagacuaauaugcuagau

SEQ ID NO: 1984189 - RNA, 19 nt, Artificial Sequence
  Description of Artificial Sequence: Synthetic oligonucleotide
  Antisense strand to SEQ ID NO: 1984188
aucuagcauauuagucugu

SEQ ID NO: 1984190 - RNA, 19 nt, Artificial Sequence
  Description of Artificial Sequence: Synthetic oligonucleotide
  Sense strand starting at position 420 of SEQ ID NO: 1880663
uuggcaaaugcugacuaaa

SEQ ID NO: 1984191 - RNA, 19 nt, Artificial Sequence
  Description of Artificial Sequence: Synthetic oligonucleotide
  Antisense strand to SEQ ID NO: 1984190
uuuagucagcauuugccaa

SEQ ID NO: 1984192 - RNA, 19 nt, Artificial Sequence
  Description of Artificial Sequence: Synthetic oligonucleotide
  Sense strand starting at position 423 of SEQ ID NO: 1880663
gcaaaugcugacuaaacga

SEQ ID NO: 1984193 - RNA, 19 nt, Artificial Sequence
  Description of Artificial Sequence: Synthetic oligonucleotide
  Antisense strand to SEQ ID NO: 1984192
ucguuuagucagcauuugc

SEQ ID NO: 1984194 - RNA, 19 nt, Artificial Sequence
  Description of Artificial Sequence: Synthetic oligonucleotide
  Sense strand starting at position 511 of SEQ ID NO: 1880663
agcugacuuccagaauuac

SEQ ID NO: 1984195 - RNA, 19 nt, Artificial Sequence
  Description of Artificial Sequence: Synthetic oligonucleotide
  Antisense strand to SEQ ID NO: 1984194
guaauucuggaagucagcu

SEQ ID NO: 1984196 - RNA, 19 nt, Artificial Sequence
  Description of Artificial Sequence: Synthetic oligonucleotide
  Sense strand starting at position 578 of SEQ ID NO: 1880663
gagacucaggucuggaguu

SEQ ID NO: 1984197 - RNA, 19 nt, Artificial Sequence
  Description of Artificial Sequence: Synthetic oligonucleotide
  Antisense strand to SEQ ID NO: 1984196
aacuccagaccugagucuc

SEQ ID NO: 1984198 - RNA, 19 nt, Artificial Sequence
  Description of Artificial Sequence: Synthetic oligonucleotide
  Sense strand starting at position 580 of SEQ ID NO: 1880663
gacucaggucuggaguuaa

SEQ ID NO: 1984199 - RNA, 19 nt, Artificial Sequence
  Description of Artificial Sequence: Synthetic oligonucleotide
  Antisense strand to SEQ ID NO: 1984198
uuaacuccagaccugaguc

SEQ ID NO: 1984200 - RNA, 19 nt, Artificial Sequence
  Description of Artificial Sequence: Synthetic oligonucleotide
  Sense strand starting at position 619 of SEQ ID NO: 1880663
gaugcaaaugugggauuau

SEQ ID NO: 1984201 - RNA, 19 nt, Artificial Sequence
  Description of Artificial Sequence: Synthetic oligonucleotide
  Antisense strand to SEQ ID NO: 1984200
auaaucccacauuugcauc

SEQ ID NO: 1984202 - RNA, 19 nt, Artificial Sequence
  Description of Artificial Sequence: Synthetic oligonucleotide
  Sense strand starting at position 635 of SEQ ID NO: 1880663
uauccauaaggugguaaau

SEQ ID NO: 1984203 - RNA, 19 nt, Artificial Sequence
  Description of Artificial Sequence: Synthetic oligonucleotide
  Antisense strand to SEQ ID NO: 1984202
auuuaccaccuuauggaua

SEQ ID NO: 1984204 - RNA, 19 nt, Artificial Sequence
  Description of Artificial Sequence: Synthetic oligonucleotide
  Sense strand starting at position 694 of SEQ ID NO: 1880663
gagcuuaaacguuacauau

SEQ ID NO: 1984205 - RNA, 19 nt, Artificial Sequence
  Description of Artificial Sequence: Synthetic oligonucleotide
  Antisense strand to SEQ ID NO: 1984204
auauguaacguuuaagcuc

SEQ ID NO: 1984206 - RNA, 19 nt, Artificial Sequence
  Description of Artificial Sequence: Synthetic oligonucleotide
  Sense strand starting at position 708 of SEQ ID NO: 1880663
cauauuuguuccuuggguu

SEQ ID NO: 1984207 - RNA, 19 nt, Artificial Sequence
  Description of Artificial Sequence: Synthetic oligonucleotide
  Antisense strand to SEQ ID NO: 1984206
aacccaaggaacaaauaug

SEQ ID NO: 1984208 - RNA, 19 nt, Artificial Sequence
  Description of Artificial Sequence: Synthetic oligonucleotide
  Sense strand starting at position 733 of SEQ ID NO: 1880663
ccagcaagauacucuggau

SEQ ID NO: 1984209 - RNA, 19 nt, Artificial Sequence
  Description of Artificial Sequence: Synthetic oligonucleotide
  Antisense strand to SEQ ID NO: 1984208
auccagaguaucuugcugg

SEQ ID NO: 1984210 - RNA, 19 nt, Artificial Sequence
  Description of Artificial Sequence: Synthetic oligonucleotide
  Sense strand starting at position 802 of SEQ ID NO: 1880663
auagcauguggguauacaa

SEQ ID NO: 1984211 - RNA, 19 nt, Artificial Sequence
  Description of Artificial Sequence: Synthetic oligonucleotide
  Antisense strand to SEQ ID NO: 1984210
uuguauacccacaugcuau

SEQ ID NO: 1984212 - RNA, 19 nt, Artificial Sequence
  Description of Artificial Sequence: Synthetic oligonucleotide
  Sense strand starting at position 911 of SEQ ID NO: 1880663
uuugcuacuccagauaagu

SEQ ID NO: 1984213 - RNA, 19 nt, Artificial Sequence
  Description of Artificial Sequence: Synthetic oligonucleotide
  Antisense strand to SEQ ID NO: 1984212
acuuaucuggaguagcaaa

SEQ ID NO: 1984214 - RNA, 19 nt, Artificial Sequence
  Description of Artificial Sequence: Synthetic oligonucleotide
  Sense strand starting at position 1003 of SEQ ID NO: 1880663
acaacagaguuguucucau

SEQ ID NO: 1984215 - RNA, 19 nt, Artificial Sequence
  Description of Artificial Sequence: Synthetic oligonucleotide
  Antisense strand to SEQ ID NO: 1984214
augagaacaacucuguugu

SEQ ID NO: 1984216 - RNA, 19 nt, Artificial Sequence
  Description of Artificial Sequence: Synthetic oligonucleotide
  Sense strand starting at position 1016 of SEQ ID NO: 1880663
ucucauaaauggucuagga

SEQ ID NO: 1984217 - RNA, 19 nt, Artificial Sequence
  Description of Artificial Sequence: Synthetic oligonucleotide
  Antisense strand to SEQ ID NO: 1984216
uccuagaccauuuaugaga

SEQ ID NO: 1984218 - RNA, 19 nt, Artificial Sequence
  Description of Artificial Sequence: Synthetic oligonucleotide
  Sense strand starting at position 1161 of SEQ ID NO: 1880663
uucuccuuuggagaaaugu

SEQ ID NO: 1984219 - RNA, 19 nt, Artificial Sequence
  Description of Artificial Sequence: Synthetic oligonucleotide
  Antisense strand to SEQ ID NO: 1984218
acauuucuccaaaggagaa

SEQ ID NO: 1984220 - RNA, 19 nt, Artificial Sequence
  Description of Artificial Sequence: Synthetic oligonucleotide
  Sense strand starting at position 1201 of SEQ ID NO: 1880663
agguaaggguuucucaauc

SEQ ID NO: 1984221 - RNA, 19 nt, Artificial Sequence
  Description of Artificial Sequence: Synthetic oligonucleotide
  Antisense strand to SEQ ID NO: 1984220
gauugagaaacccuuaccu

SEQ ID NO: 1984222 - RNA, 19 nt, Artificial Sequence
  Description of Artificial Sequence: Synthetic oligonucleotide
  Sense strand starting at position 1241 of SEQ ID NO: 1880663
gcuggauaauuccuuauug

SEQ ID NO: 1984223 - RNA, 19 nt, Artificial Sequence
  Description of Artificial Sequence: Synthetic oligonucleotide
  Antisense strand to SEQ ID NO: 1984222
caauaaggaauuauccagc

SEQ ID NO: 1984224 - RNA, 19 nt, Artificial Sequence
  Description of Artificial Sequence: Synthetic oligonucleotide
  Sense strand starting at position 1242 of SEQ ID NO: 1880663
cuggauaauuccuuauugu

SEQ ID NO: 1984225 - RNA, 19 nt, Artificial Sequence
  Description of Artificial Sequence: Synthetic oligonucleotide
  Antisense strand to SEQ ID NO: 1984224
acaauaaggaauuauccag

SEQ ID NO: 1984226 - RNA, 19 nt, Artificial Sequence
  Description of Artificial Sequence: Synthetic oligonucleotide
  Sense strand starting at position 1243 of SEQ ID NO: 1880663
uggauaauuccuuauugug

SEQ ID NO: 1984227 - RNA, 19 nt, Artificial Sequence
  Description of Artificial Sequence: Synthetic oligonucleotide
  Antisense strand to SEQ ID NO: 1984226
cacaauaaggaauuaucca

SEQ ID NO: 1984228 - RNA, 19 nt, Artificial Sequence
  Description of Artificial Sequence: Synthetic oligonucleotide
  Sense strand starting at position 1245 of SEQ ID NO: 1880663
gauaauuccuuauugugag

SEQ ID NO: 1984229 - RNA, 19 nt, Artificial Sequence
  Description of Artificial Sequence: Synthetic oligonucleotide
  Antisense strand to SEQ ID NO: 1984228
cucacaauaaggaauuauc

SEQ ID NO: 1984230 - RNA, 19 nt, Artificial Sequence
  Description of Artificial Sequence: Synthetic oligonucleotide
  Sense strand starting at position 1573 of SEQ ID NO: 1880663
uggaacaaguuaucucuca

SEQ ID NO: 1984231 - RNA, 19 nt, Artificial Sequence
  Description of Artificial Sequence: Synthetic oligonucleotide
  Antisense strand to SEQ ID NO: 1984230
ugagagauaacuuguucca

SEQ ID NO: 1984232 - RNA, 19 nt, Artificial Sequence
  Description of Artificial Sequence: Synthetic oligonucleotide
  Sense strand starting at position 1685 of SEQ ID NO: 1880663
gcuugauauuauuugucua

SEQ ID NO: 1984233 - RNA, 19 nt, Artificial Sequence
  Description of Artificial Sequence: Synthetic oligonucleotide
  Antisense strand to SEQ ID NO: 1984232
uagacaaauaauaucaagc

SEQ ID NO: 1984234 - RNA, 19 nt, Artificial Sequence
  Description of Artificial Sequence: Synthetic oligonucleotide
  Sense strand starting at position 1765 of SEQ ID NO: 1880663
aagauugaauuugggagau

SEQ ID NO: 1984235 - RNA, 19 nt, Artificial Sequence
  Description of Artificial Sequence: Synthetic oligonucleotide
  Antisense strand to SEQ ID NO: 1984234
aucucccaaauucaaucuu

SEQ ID NO: 1984236 - RNA, 19 nt, Artificial Sequence
  Description of Artificial Sequence: Synthetic oligonucleotide
  Sense strand starting at position 1767 of SEQ ID NO: 1880663
gauugaauuugggagauau

SEQ ID NO: 1984237 - RNA, 19 nt, Artificial Sequence
  Description of Artificial Sequence: Synthetic oligonucleotide
  Antisense strand to SEQ ID NO: 1984236
auaucucccaaauucaauc

SEQ ID NO: 1984238 - RNA, 19 nt, Artificial Sequence
  Description of Artificial Sequence: Synthetic oligonucleotide
  Sense strand starting at position 1787 of SEQ ID NO: 1880663
uuucgaccuuuauuaaaug

SEQ ID NO: 1984239 - RNA, 19 nt, Artificial Sequence
  Description of Artificial Sequence: Synthetic oligonucleotide
  Antisense strand to SEQ ID NO: 1984238
cauuuaauaaaggucgaaa

SEQ ID NO: 1984240 - RNA, 19 nt, Artificial Sequence
  Description of Artificial Sequence: Synthetic oligonucleotide
  Sense strand starting at position 2007 of SEQ ID NO: 1880663
ggacucugacggugacaau

SEQ ID NO: 1984241 - RNA, 19 nt, Artificial Sequence
  Description of Artificial Sequence: Synthetic oligonucleotide
  Antisense strand to SEQ ID NO: 1984240
auugucaccgucagagucc

SEQ ID NO: 1984242 - RNA, 19 nt, Artificial Sequence
  Description of Artificial Sequence: Synthetic oligonucleotide
  Sense strand starting at position 2008 of SEQ ID NO: 1880663
gacucugacggugacaauu

SEQ ID NO: 1984243 - RNA, 19 nt, Artificial Sequence
  Description of Artificial Sequence: Synthetic oligonucleotide
  Antisense strand to SEQ ID NO: 1984242
aauugucaccgucagaguc

SEQ ID NO: 1984244 - RNA, 19 nt, Artificial Sequence
  Description of Artificial Sequence: Synthetic oligonucleotide
  Sense strand starting at position 2612 of SEQ ID NO: 1880663
uuuaaugaacccugacuga

SEQ ID NO: 1984245 - RNA, 19 nt, Artificial Sequence
  Description of Artificial Sequence: Synthetic oligonucleotide
  Antisense strand to SEQ ID NO: 1984244
ucagucaggguucauuaaa

SEQ ID NO: 1984246 - RNA, 19 nt, Artificial Sequence
  Description of Artificial Sequence: Synthetic oligonucleotide
  Sense strand starting at position 2645 of SEQ ID NO: 1880663
aaagauguucuggguagaa

SEQ ID NO: 1984247 - RNA, 19 nt, Artificial Sequence
  Description of Artificial Sequence: Synthetic oligonucleotide
  Antisense strand to SEQ ID NO: 1984246
uucuacccagaacaucuuu

SEQ ID NO: 1984248 - RNA, 19 nt, Artificial Sequence
  Description of Artificial Sequence: Synthetic oligonucleotide
  Sense strand starting at position 2658 of SEQ ID NO: 1880663
guagaaagcagagguauga

SEQ ID NO: 1984249 - RNA, 19 nt, Artificial Sequence
  Description of Artificial Sequence: Synthetic oligonucleotide
  Antisense strand to SEQ ID NO: 1984248
ucauaccucugcuuucuac

SEQ ID NO: 1984250 - RNA, 19 nt, Artificial Sequence
  Description of Artificial Sequence: Synthetic oligonucleotide
  Sense strand starting at position 2902 of SEQ ID NO: 1880663
ugucguacuccagacaaga

SEQ ID NO: 1984251 - RNA, 19 nt, Artificial Sequence
  Description of Artificial Sequence: Synthetic oligonucleotide
  Antisense strand to SEQ ID NO: 1984250
ucuugucuggaguacgaca

SEQ ID NO: 1984252 - RNA, 19 nt, Artificial Sequence
  Description of Artificial Sequence: Synthetic oligonucleotide
  Sense strand starting at position 3010 of SEQ ID NO: 1880663
aggagaucaccuuggccua

SEQ ID NO: 1984253 - RNA, 19 nt, Artificial Sequence
  Description of Artificial Sequence: Synthetic oligonucleotide
  Antisense strand to SEQ ID NO: 1984252
uaggccaaggugaucuccu

SEQ ID NO: 1984254 - RNA, 19 nt, Artificial Sequence
  Description of Artificial Sequence: Synthetic oligonucleotide
  Sense strand starting at position 3030 of SEQ ID NO: 1880663
gacuucucccuuggaggga

SEQ ID NO: 1984255 - RNA, 19 nt, Artificial Sequence
  Description of Artificial Sequence: Synthetic oligonucleotide
  Antisense strand to SEQ ID NO: 1984254
ucccuccaagggagaaguc

SEQ ID NO: 1984256 - RNA, 19 nt, Artificial Sequence
  Description of Artificial Sequence: Synthetic oligonucleotide
  Sense strand starting at position 3356 of SEQ ID NO: 1880663
ggacgaaaccagcauaguu

SEQ ID NO: 1984257 - RNA, 19 nt, Artificial Sequence
  Description of Artificial Sequence: Synthetic oligonucleotide
  Antisense strand to SEQ ID NO: 1984256
aacuaugcugguuucgucc

SEQ ID NO: 1984258 - RNA, 19 nt, Artificial Sequence
  Description of Artificial Sequence: Synthetic oligonucleotide
  Sense strand starting at position 3441 of SEQ ID NO: 1880663
aaggcuucucuacagcgaa

SEQ ID NO: 1984259 - RNA, 19 nt, Artificial Sequence
  Description of Artificial Sequence: Synthetic oligonucleotide
  Antisense strand to SEQ ID NO: 1984258
uucgcuguagagaagccuu

SEQ ID NO: 1984260 - RNA, 19 nt, Artificial Sequence
  Description of Artificial Sequence: Synthetic oligonucleotide
  Sense strand starting at position 3523 of SEQ ID NO: 1880663
gcaagacauucccugauac

SEQ ID NO: 1984261 - RNA, 19 nt, Artificial Sequence
  Description of Artificial Sequence: Synthetic oligonucleotide
  Antisense strand to SEQ ID NO: 1984260
guaucagggaaugucuugc

SEQ ID NO: 1984262 - RNA, 19 nt, Artificial Sequence
  Description of Artificial Sequence: Synthetic oligonucleotide
  Sense strand starting at position 3963 of SEQ ID NO: 1880663
ucuggcuaagcugauuaau

SEQ ID NO: 1984263 - RNA, 19 nt, Artificial Sequence
  Description of Artificial Sequence: Synthetic oligonucleotide
  Antisense strand to SEQ ID NO: 1984262
auuaaucagcuuagccaga

SEQ ID NO: 1984264 - RNA, 19 nt, Artificial Sequence
  Description of Artificial Sequence: Synthetic oligonucleotide
  Sense strand starting at position 3965 of SEQ ID NO: 1880663
uggcuaagcugauuaauaa

SEQ ID NO: 1984265 - RNA, 19 nt, Artificial Sequence
  Description of Artificial Sequence: Synthetic oligonucleotide
  Antisense strand to SEQ ID NO: 1984264
uuauuaaucagcuuagcca

SEQ ID NO: 1984266 - RNA, 19 nt, Artificial Sequence
  Description of Artificial Sequence: Synthetic oligonucleotide
  Sense strand starting at position 3966 of SEQ ID NO: 1880663
ggcuaagcugauuaauaag

SEQ ID NO: 1984267 - RNA, 19 nt, Artificial Sequence
  Description of Artificial Sequence: Synthetic oligonucleotide
  Antisense strand to SEQ ID NO: 1984266
cuuauuaaucagcuuagcc

SEQ ID NO: 1984268 - RNA, 19 nt, Artificial Sequence
  Description of Artificial Sequence: Synthetic oligonucleotide
  Sense strand starting at position 75 of SEQ ID NO: 1880664
gccugccaauucugaucaa

SEQ ID NO: 1984269 - RNA, 19 nt, Artificial Sequence
  Description of Artificial Sequence: Synthetic oligonucleotide
  Antisense strand to SEQ ID NO: 1984268
uugaucagaauuggcaggc

SEQ ID NO: 1984270 - RNA, 19 nt, Artificial Sequence
  Description of Artificial Sequence: Synthetic oligonucleotide
  Sense strand starting at position 682 of SEQ ID NO: 1880664
ccggacuugacggagcaau

SEQ ID NO: 1984271 - RNA, 19 nt, Artificial Sequence
  Description of Artificial Sequence: Synthetic oligonucleotide
  Antisense strand to SEQ ID NO: 1984270
auugcuccgucaaguccgg

SEQ ID NO: 1984272 - RNA, 19 nt, Artificial Sequence
  Description of Artificial Sequence: Synthetic oligonucleotide
  Sense strand starting at position 707 of SEQ ID NO: 1880664
gggccuuugacucguaaua

SEQ ID NO: 1984273 - RNA, 19 nt, Artificial Sequence
  Description of Artificial Sequence: Synthetic oligonucleotide
  Antisense strand to SEQ ID NO: 1984272
uauuacgagucaaaggccc

SEQ ID NO: 1984274 - RNA, 19 nt, Artificial Sequence
  Description of Artificial Sequence: Synthetic oligonucleotide
  Sense strand starting at position 709 of SEQ ID NO: 1880664
gccuuugacucguaauaca

SEQ ID NO: 1984275 - RNA, 19 nt, Artificial Sequence
  Description of Artificial Sequence: Synthetic oligonucleotide
  Antisense strand to SEQ ID NO: 1984274
uguauuacgagucaaaggc

SEQ ID NO: 1984276 - RNA, 19 nt, Artificial Sequence
  Description of Artificial Sequence: Synthetic oligonucleotide
  Sense strand starting at position 760 of SEQ ID NO: 1880664
gccagcaguccauacuuau

SEQ ID NO: 1984277 - RNA, 19 nt, Artificial Sequence
  Description of Artificial Sequence: Synthetic oligonucleotide
  Antisense strand to SEQ ID NO: 1984276
auaaguauggacugcuggc

SEQ ID NO: 1984278 - RNA, 19 nt, Artificial Sequence
  Description of Artificial Sequence: Synthetic oligonucleotide
  Sense strand starting at position 950 of SEQ ID NO: 1880664
agaggaaugugcgcgaaau

SEQ ID NO: 1984279 - RNA, 19 nt, Artificial Sequence
  Description of Artificial Sequence: Synthetic oligonucleotide
  Antisense strand to SEQ ID NO: 1984278
auuucgcgcacauuccucu

SEQ ID NO: 1984280 - RNA, 19 nt, Artificial Sequence
  Description of Artificial Sequence: Synthetic oligonucleotide
  Sense strand starting at position 951 of SEQ ID NO: 1880664
gaggaaugugcgcgaaauc

SEQ ID NO: 1984281 - RNA, 19 nt, Artificial Sequence
  Description of Artificial Sequence: Synthetic oligonucleotide
  Antisense strand to SEQ ID NO: 1984280
gauuucgcgcacauuccuc

SEQ ID NO: 1984282 - RNA, 19 nt, Artificial Sequence
  Description of Artificial Sequence: Synthetic oligonucleotide
  Sense strand starting at position 952 of SEQ ID NO: 1880664
aggaaugugcgcgaaauca

SEQ ID NO: 1984283 - RNA, 19 nt, Artificial Sequence
  Description of Artificial Sequence: Synthetic oligonucleotide
  Antisense strand to SEQ ID NO: 1984282
ugauuucgcgcacauuccu

SEQ ID NO: 1984284 - RNA, 19 nt, Artificial Sequence
  Description of Artificial Sequence: Synthetic oligonucleotide
  Sense strand starting at position 963 of SEQ ID NO: 1880664
cgaaaucaaccagagcgaa

SEQ ID NO: 1984285 - RNA, 19 nt, Artificial Sequence
  Description of Artificial Sequence: Synthetic oligonucleotide
  Antisense strand to SEQ ID NO: 1984284
uucgcucugguugauuucg

SEQ ID NO: 1984286 - RNA, 19 nt, Artificial Sequence
  Description of Artificial Sequence: Synthetic oligonucleotide
  Sense strand starting at position 1566 of SEQ ID NO: 1880664
ccgggacccucuuauaauc

SEQ ID NO: 1984287 - RNA, 19 nt, Artificial Sequence
  Description of Artificial Sequence: Synthetic oligonucleotide
  Antisense strand to SEQ ID NO: 1984286
gauuauaagagggucccgg

SEQ ID NO: 1984288 - RNA, 19 nt, Artificial Sequence
  Description of Artificial Sequence: Synthetic oligonucleotide
  Sense strand starting at position 1787 of SEQ ID NO: 1880664
uucugaucucagggagcca

SEQ ID NO: 1984289 - RNA, 19 nt, Artificial Sequence
  Description of Artificial Sequence: Synthetic oligonucleotide
  Antisense strand to SEQ ID NO: 1984288
uggcucccugagaucagaa

SEQ ID NO: 1984290 - RNA, 19 nt, Artificial Sequence
  Description of Artificial Sequence: Synthetic oligonucleotide
  Sense strand starting at position 1928 of SEQ ID NO: 1880664
agcugacucugagaagaag

SEQ ID NO: 1984291 - RNA, 19 nt, Artificial Sequence
  Description of Artificial Sequence: Synthetic oligonucleotide
  Antisense strand to SEQ ID NO: 1984290
cuucuucucagagucagcu

SEQ ID NO: 1984292 - RNA, 19 nt, Artificial Sequence
  Description of Artificial Sequence: Synthetic oligonucleotide
  Sense strand starting at position 2000 of SEQ ID NO: 1880664
cugagacucugagauucga

SEQ ID NO: 1984293 - RNA, 19 nt, Artificial Sequence
  Description of Artificial Sequence: Synthetic oligonucleotide
  Antisense strand to SEQ ID NO: 1984292
ucgaaucucagagucucag

SEQ ID NO: 1984294 - RNA, 19 nt, Artificial Sequence
  Description of Artificial Sequence: Synthetic oligonucleotide
  Sense strand starting at position 2197 of SEQ ID NO: 1880664
ccgcuugcuccuucguaga

SEQ ID NO: 1984295 - RNA, 19 nt, Artificial Sequence
  Description of Artificial Sequence: Synthetic oligonucleotide
  Antisense strand to SEQ ID NO: 1984294
ucuacgaaggagcaagcgg

SEQ ID NO: 1984296 - RNA, 19 nt, Artificial Sequence
  Description of Artificial Sequence: Synthetic oligonucleotide
  Sense strand starting at position 2317 of SEQ ID NO: 1880664
gggcgugcgcugucaauga

SEQ ID NO: 1984297 - RNA, 19 nt, Artificial Sequence
  Description of Artificial Sequence: Synthetic oligonucleotide
  Antisense strand to SEQ ID NO: 1984296
ucauugacagcgcacgccc

SEQ ID NO: 1984298 - RNA, 19 nt, Artificial Sequence
  Description of Artificial Sequence: Synthetic oligonucleotide
  Sense strand starting at position 2318 of SEQ ID NO: 1880664
ggcgugcgcugucaaugau

SEQ ID NO: 1984299 - RNA, 19 nt, Artificial Sequence
  Description of Artificial Sequence: Synthetic oligonucleotide
  Antisense strand to SEQ ID NO: 1984298
aucauugacagcgcacgcc

SEQ ID NO: 1984300 - RNA, 19 nt, Artificial Sequence
  Description of Artificial Sequence: Synthetic oligonucleotide
  Sense strand starting at position 2319 of SEQ ID NO: 1880664
gcgugcgcugucaaugauu

SEQ ID NO: 1984301 - RNA, 19 nt, Artificial Sequence
  Description of Artificial Sequence: Synthetic oligonucleotide
  Antisense strand to SEQ ID NO: 1984300
aaucauugacagcgcacgc

SEQ ID NO: 1984302 - RNA, 19 nt, Artificial Sequence
  Description of Artificial Sequence: Synthetic oligonucleotide
  Sense strand starting at position 2351 of SEQ ID NO: 1880664
cccggauccuuaucugcau

SEQ ID NO: 1984303 - RNA, 19 nt, Artificial Sequence
  Description of Artificial Sequence: Synthetic oligonucleotide
  Antisense strand to SEQ ID NO: 1984302
augcagauaaggauccggg

SEQ ID NO: 1984304 - RNA, 19 nt, Artificial Sequence
  Description of Artificial Sequence: Synthetic oligonucleotide
  Sense strand starting at position 2582 of SEQ ID NO: 1880664
gaaggaauuugcgccucua

SEQ ID NO: 1984305 - RNA, 19 nt, Artificial Sequence
  Description of Artificial Sequence: Synthetic oligonucleotide
  Antisense strand to SEQ ID NO: 1984304
uagaggcgcaaauuccuuc

SEQ ID NO: 1984306 - RNA, 19 nt, Artificial Sequence
  Description of Artificial Sequence: Synthetic oligonucleotide
  Sense strand starting at position 3306 of SEQ ID NO: 1880664
gugccagccagucgagaaa

SEQ ID NO: 1984307 - RNA, 19 nt, Artificial Sequence
  Description of Artificial Sequence: Synthetic oligonucleotide
  Antisense strand to SEQ ID NO: 1984306
uuucucgacuggcuggcac

SEQ ID NO: 1984308 - RNA, 19 nt, Artificial Sequence
  Description of Artificial Sequence: Synthetic oligonucleotide
  Sense strand starting at position 3428 of SEQ ID NO: 1880664
guguucuccucguccuuga

SEQ ID NO: 1984309 - RNA, 19 nt, Artificial Sequence
  Description of Artificial Sequence: Synthetic oligonucleotide
  Antisense strand to SEQ ID NO: 1984308
ucaaggacgaggagaacac

SEQ ID NO: 1984310 - RNA, 19 nt, Artificial Sequence
  Description of Artificial Sequence: Synthetic oligonucleotide
  Sense strand starting at position 3431 of SEQ ID NO: 1880664
uucuccucguccuugaaga

SEQ ID NO: 1984311 - RNA, 19 nt, Artificial Sequence
  Description of Artificial Sequence: Synthetic oligonucleotide
  Antisense strand to SEQ ID NO: 1984310
ucuucaaggacgaggagaa

SEQ ID NO: 1984312 - RNA, 19 nt, Artificial Sequence
  Description of Artificial Sequence: Synthetic oligonucleotide
  Sense strand starting at position 3432 of SEQ ID NO: 1880664
ucuccucguccuugaagau

SEQ ID NO: 1984313 - RNA, 19 nt, Artificial Sequence
  Description of Artificial Sequence: Synthetic oligonucleotide
  Antisense strand to SEQ ID NO: 1984312
aucuucaaggacgaggaga

SEQ ID NO: 1984314 - RNA, 19 nt, Artificial Sequence
  Description of Artificial Sequence: Synthetic oligonucleotide
  Sense strand starting at position 3444 of SEQ ID NO: 1880664
ugaagaugaugucuggauu

SEQ ID NO: 1984315 - RNA, 19 nt, Artificial Sequence
  Description of Artificial Sequence: Synthetic oligonucleotide
  Antisense strand to SEQ ID NO: 1984314
aauccagacaucaucuuca

SEQ ID NO: 1984316 - RNA, 19 nt, Artificial Sequence
  Description of Artificial Sequence: Synthetic oligonucleotide
  Sense strand starting at position 3445 of SEQ ID NO: 1880664
gaagaugaugucuggauug

SEQ ID NO: 1984317 - RNA, 19 nt, Artificial Sequence
  Description of Artificial Sequence: Synthetic oligonucleotide
  Antisense strand to SEQ ID NO: 1984316
caauccagacaucaucuuc

SEQ ID NO: 1984318 - RNA, 19 nt, Artificial Sequence
  Description of Artificial Sequence: Synthetic oligonucleotide
  Sense strand starting at position 3447 of SEQ ID NO: 1880664
agaugaugucuggauugua

SEQ ID NO: 1984319 - RNA, 19 nt, Artificial Sequence
  Description of Artificial Sequence: Synthetic oligonucleotide
  Antisense strand to SEQ ID NO: 1984318
uacaauccagacaucaucu

SEQ ID NO: 1984320 - RNA, 19 nt, Artificial Sequence
  Description of Artificial Sequence: Synthetic oligonucleotide
  Sense strand starting at position 3450 of SEQ ID NO: 1880664
ugaugucuggauuguaauu

SEQ ID NO: 1984321 - RNA, 19 nt, Artificial Sequence
  Description of Artificial Sequence: Synthetic oligonucleotide
  Antisense strand to SEQ ID NO: 1984320
aauuacaauccagacauca

SEQ ID NO: 1984322 - RNA, 19 nt, Artificial Sequence
  Description of Artificial Sequence: Synthetic oligonucleotide
  Sense strand starting at position 3536 of SEQ ID NO: 1880664
agggucuucucgggcacau

SEQ ID NO: 1984323 - RNA, 19 nt, Artificial Sequence
  Description of Artificial Sequence: Synthetic oligonucleotide
  Antisense strand to SEQ ID NO: 1984322
augugcccgagaagacccu

SEQ ID NO: 1984324 - RNA, 19 nt, Artificial Sequence
  Description of Artificial Sequence: Synthetic oligonucleotide
  Sense strand starting at position 114 of SEQ ID NO: 1880665
cccucaugaucucaauggu

SEQ ID NO: 1984325 - RNA, 19 nt, Artificial Sequence
  Description of Artificial Sequence: Synthetic oligonucleotide
  Antisense strand to SEQ ID NO: 1984324
accauugagaucaugaggg

SEQ ID NO: 1984326 - RNA, 19 nt, Artificial Sequence
  Description of Artificial Sequence: Synthetic oligonucleotide
  Sense strand starting at position 117 of SEQ ID NO: 1880665
ucaugaucucaaugguuau

SEQ ID NO: 1984327 - RNA, 19 nt, Artificial Sequence
  Description of Artificial Sequence: Synthetic oligonucleotide
  Antisense strand to SEQ ID NO: 1984326
auaaccauugagaucauga

SEQ ID NO: 1984328 - RNA, 19 nt, Artificial Sequence
  Description of Artificial Sequence: Synthetic oligonucleotide
  Sense strand starting at position 120 of SEQ ID NO: 1880665
ugaucucaaugguuauguu

SEQ ID NO: 1984329 - RNA, 19 nt, Artificial Sequence
  Description of Artificial Sequence: Synthetic oligonucleotide
  Antisense strand to SEQ ID NO: 1984328
aacauaaccauugagauca

SEQ ID NO: 1984330 - RNA, 19 nt, Artificial Sequence
  Description of Artificial Sequence: Synthetic oligonucleotide
  Sense strand starting at position 121 of SEQ ID NO: 1880665
gaucucaaugguuauguuu

SEQ ID NO: 1984331 - RNA, 19 nt, Artificial Sequence
  Description of Artificial Sequence: Synthetic oligonucleotide
  Antisense strand to SEQ ID NO: 1984330
aaacauaaccauugagauc

SEQ ID NO: 1984332 - RNA, 19 nt, Artificial Sequence
  Description of Artificial Sequence: Synthetic oligonucleotide
  Sense strand starting at position 130 of SEQ ID NO: 1880665
gguuauguuugccuuccca

SEQ ID NO: 1984333 - RNA, 19 nt, Artificial Sequence
  Description of Artificial Sequence: Synthetic oligonucleotide
  Antisense strand to SEQ ID NO: 1984332
ugggaaggcaaacauaacc

SEQ ID NO: 1984334 - RNA, 19 nt, Artificial Sequence
  Description of Artificial Sequence: Synthetic oligonucleotide
  Sense strand starting at position 134 of SEQ ID NO: 1880665
auguuugccuucccauuga

SEQ ID NO: 1984335 - RNA, 19 nt, Artificial Sequence
  Description of Artificial Sequence: Synthetic oligonucleotide
  Antisense strand to SEQ ID NO: 1984334
ucaaugggaaggcaaacau

SEQ ID NO: 1984336 - RNA, 19 nt, Artificial Sequence
  Description of Artificial Sequence: Synthetic oligonucleotide
  Sense strand starting at position 202 of SEQ ID NO: 1880665
cacugaugccgucaugacu

SEQ ID NO: 1984337 - RNA, 19 nt, Artificial Sequence
  Description of Artificial Sequence: Synthetic oligonucleotide
  Antisense strand to SEQ ID NO: 1984336
agucaugacggcaucagug

SEQ ID NO: 1984338 - RNA, 19 nt, Artificial Sequence
  Description of Artificial Sequence: Synthetic oligonucleotide
  Sense strand starting at position 1180 of SEQ ID NO: 1880665
gguuccuguccuuauggau

SEQ ID NO: 1984339 - RNA, 19 nt, Artificial Sequence
  Description of Artificial Sequence: Synthetic oligonucleotide
  Antisense strand to SEQ ID NO: 1984338
auccauaaggacaggaacc

SEQ ID NO: 1984340 - RNA, 19 nt, Artificial Sequence
  Description of Artificial Sequence: Synthetic oligonucleotide
  Sense strand starting at position 1242 of SEQ ID NO: 1880665
gauuccaguuguguagagu

SEQ ID NO: 1984341 - RNA, 19 nt, Artificial Sequence
  Description of Artificial Sequence: Synthetic oligonucleotide
  Antisense strand to SEQ ID NO: 1984340
acucuacacaacuggaauc

SEQ ID NO: 1984342 - RNA, 19 nt, Artificial Sequence
  Description of Artificial Sequence: Synthetic oligonucleotide
  Sense strand starting at position 1245 of SEQ ID NO: 1880665
uccaguuguguagagugau

SEQ ID NO: 1984343 - RNA, 19 nt, Artificial Sequence
  Description of Artificial Sequence: Synthetic oligonucleotide
  Antisense strand to SEQ ID NO: 1984342
aucacucuacacaacugga

SEQ ID NO: 1984344 - RNA, 19 nt, Artificial Sequence
  Description of Artificial Sequence: Synthetic oligonucleotide
  Sense strand starting at position 1248 of SEQ ID NO: 1880665
aguuguguagagugauaug

SEQ ID NO: 1984345 - RNA, 19 nt, Artificial Sequence
  Description of Artificial Sequence: Synthetic oligonucleotide
  Antisense strand to SEQ ID NO: 1984344
cauaucacucuacacaacu

SEQ ID NO: 1984346 - RNA, 19 nt, Artificial Sequence
  Description of Artificial Sequence: Synthetic oligonucleotide
  Sense strand starting at position 1251 of SEQ ID NO: 1880665
uguguagagugauaugaca

SEQ ID NO: 1984347 - RNA, 19 nt, Artificial Sequence
  Description of Artificial Sequence: Synthetic oligonucleotide
  Antisense strand to SEQ ID NO: 1984346
ugucauaucacucuacaca

SEQ ID NO: 1984348 - RNA, 19 nt, Artificial Sequence
  Description of Artificial Sequence: Synthetic oligonucleotide
  Sense strand starting at position 1253 of SEQ ID NO: 1880665
uguagagugauaugacaga

SEQ ID NO: 1984349 - RNA, 19 nt, Artificial Sequence
  Description of Artificial Sequence: Synthetic oligonucleotide
  Antisense strand to SEQ ID NO: 1984348
ucugucauaucacucuaca

SEQ ID NO: 1984350 - RNA, 19 nt, Artificial Sequence
  Description of Artificial Sequence: Synthetic oligonucleotide
  Sense strand starting at position 1268 of SEQ ID NO: 1880665
cagagacauugugcaggau

SEQ ID NO: 1984351 - RNA, 19 nt, Artificial Sequence
  Description of Artificial Sequence: Synthetic oligonucleotide
  Antisense strand to SEQ ID NO: 1984350
auccugcacaaugucucug

SEQ ID NO: 1984352 - RNA, 19 nt, Artificial Sequence
  Description of Artificial Sequence: Synthetic oligonucleotide
  Sense strand starting at position 1271 of SEQ ID NO: 1880665
agacauugugcaggauaau

SEQ ID NO: 1984353 - RNA, 19 nt, Artificial Sequence
  Description of Artificial Sequence: Synthetic oligonucleotide
  Antisense strand to SEQ ID NO: 1984352
auuauccugcacaaugucu

SEQ ID NO: 1984354 - RNA, 19 nt, Artificial Sequence
  Description of Artificial Sequence: Synthetic oligonucleotide
  Sense strand starting at position 1280 of SEQ ID NO: 1880665
gcaggauaaugugaaagaa

SEQ ID NO: 1984355 - RNA, 19 nt, Artificial Sequence
  Description of Artificial Sequence: Synthetic oligonucleotide
  Antisense strand to SEQ ID NO: 1984354
uucuuucacauuauccugc

SEQ ID NO: 1984356 - RNA, 19 nt, Artificial Sequence
  Description of Artificial Sequence: Synthetic oligonucleotide
  Sense strand starting at position 1304 of SEQ ID NO: 1880665
uauggaagcuauuagaguu

SEQ ID NO: 1984357 - RNA, 19 nt, Artificial Sequence
  Description of Artificial Sequence: Synthetic oligonucleotide
  Antisense strand to SEQ ID NO: 1984356
aacucuaauagcuuccaua

SEQ ID NO: 1984358 - RNA, 19 nt, Artificial Sequence
  Description of Artificial Sequence: Synthetic oligonucleotide
  Sense strand starting at position 1340 of SEQ ID NO: 1880665
cugcuugaaggaggugaua

SEQ ID NO: 1984359 - RNA, 19 nt, Artificial Sequence
  Description of Artificial Sequence: Synthetic oligonucleotide
  Antisense strand to SEQ ID NO: 1984358
uaucaccuccuucaagcag

SEQ ID NO: 1984360 - RNA, 19 nt, Artificial Sequence
  Description of Artificial Sequence: Synthetic oligonucleotide
  Sense strand starting at position 1342 of SEQ ID NO: 1880665
gcuugaaggaggugauaug

SEQ ID NO: 1984361 - RNA, 19 nt, Artificial Sequence
  Description of Artificial Sequence: Synthetic oligonucleotide
  Antisense strand to SEQ ID NO: 1984360
cauaucaccuccuucaagc

SEQ ID NO: 1984362 - RNA, 19 nt, Artificial Sequence
  Description of Artificial Sequence: Synthetic oligonucleotide
  Sense strand starting at position 1505 of SEQ ID NO: 1880665
gagugauugcguggacccu

SEQ ID NO: 1984363 - RNA, 19 nt, Artificial Sequence
  Description of Artificial Sequence: Synthetic oligonucleotide
  Antisense strand to SEQ ID NO: 1984362
aggguccacgcaaucacuc

SEQ ID NO: 1984364 - RNA, 19 nt, Artificial Sequence
  Description of Artificial Sequence: Synthetic oligonucleotide
  Sense strand starting at position 1520 of SEQ ID NO: 1880665
cccucugggucauaagaag

SEQ ID NO: 1984365 - RNA, 19 nt, Artificial Sequence
  Description of Artificial Sequence: Synthetic oligonucleotide
  Antisense strand to SEQ ID NO: 1984364
cuucuuaugacccagaggg

SEQ ID NO: 1984366 - RNA, 19 nt, Artificial Sequence
  Description of Artificial Sequence: Synthetic oligonucleotide
  Sense strand starting at position 1636 of SEQ ID NO: 1880665
ucugcugccgaguguagaa

SEQ ID NO: 1984367 - RNA, 19 nt, Artificial Sequence
  Description of Artificial Sequence: Synthetic oligonucleotide
  Antisense strand to SEQ ID NO: 1984366
uucuacacucggcagcaga

SEQ ID NO: 1984368 - RNA, 19 nt, Artificial Sequence
  Description of Artificial Sequence: Synthetic oligonucleotide
  Sense strand starting at position 1702 of SEQ ID NO: 1880665
gugauuguccaguggaaag

SEQ ID NO: 1984369 - RNA, 19 nt, Artificial Sequence
  Description of Artificial Sequence: Synthetic oligonucleotide
  Antisense strand to SEQ ID NO: 1984368
cuuuccacuggacaaucac

SEQ ID NO: 1984370 - RNA, 19 nt, Artificial Sequence
  Description of Artificial Sequence: Synthetic oligonucleotide
  Sense strand starting at position 1828 of SEQ ID NO: 1880665
cgggaagucuccucugaga

SEQ ID NO: 1984371 - RNA, 19 nt, Artificial Sequence
  Description of Artificial Sequence: Synthetic oligonucleotide
  Antisense strand to SEQ ID NO: 1984370
ucucagaggagacuucccg

SEQ ID NO: 1984372 - RNA, 19 nt, Artificial Sequence
  Description of Artificial Sequence: Synthetic oligonucleotide
  Sense strand starting at position 1830 of SEQ ID NO: 1880665
ggaagucuccucugagagg

SEQ ID NO: 1984373 - RNA, 19 nt, Artificial Sequence
  Description of Artificial Sequence: Synthetic oligonucleotide
  Antisense strand to SEQ ID NO: 1984372
ccucucagaggagacuucc

SEQ ID NO: 1984374 - RNA, 19 nt, Artificial Sequence
  Description of Artificial Sequence: Synthetic oligonucleotide
  Sense strand starting at position 1831 of SEQ ID NO: 1880665
gaagucuccucugagaggu

SEQ ID NO: 1984375 - RNA, 19 nt, Artificial Sequence
  Description of Artificial Sequence: Synthetic oligonucleotide
  Antisense strand to SEQ ID NO: 1984374
accucucagaggagacuuc

SEQ ID NO: 1984376 - RNA, 19 nt, Artificial Sequence
  Description of Artificial Sequence: Synthetic oligonucleotide
  Sense strand starting at position 2248 of SEQ ID NO: 1880665
uguggaaacucuuuccaaa

SEQ ID NO: 1984377 - RNA, 19 nt, Artificial Sequence
  Description of Artificial Sequence: Synthetic oligonucleotide
  Antisense strand to SEQ ID NO: 1984376
uuuggaaagaguuuccaca

SEQ ID NO: 1984378 - RNA, 19 nt, Artificial Sequence
  Description of Artificial Sequence: Synthetic oligonucleotide
  Sense strand starting at position 2289 of SEQ ID NO: 1880665
gcugguugcuaucuagaag

SEQ ID NO: 1984379 - RNA, 19 nt, Artificial Sequence
  Description of Artificial Sequence: Synthetic oligonucleotide
  Antisense strand to SEQ ID NO: 1984378
cuucuagauagcaaccagc

SEQ ID NO: 1984380 - RNA, 19 nt, Artificial Sequence
  Description of Artificial Sequence: Synthetic oligonucleotide
  Sense strand starting at position 2306 of SEQ ID NO: 1880665
aggccuguuuguccaugaa

SEQ ID NO: 1984381 - RNA, 19 nt, Artificial Sequence
  Description of Artificial Sequence: Synthetic oligonucleotide
  Antisense strand to SEQ ID NO: 1984380
uucauggacaaacaggccu

SEQ ID NO: 1984382 - RNA, 19 nt, Artificial Sequence
  Description of Artificial Sequence: Synthetic oligonucleotide
  Sense strand starting at position 2309 of SEQ ID NO: 1880665
ccuguuuguccaugaacug

SEQ ID NO: 1984383 - RNA, 19 nt, Artificial Sequence
  Description of Artificial Sequence: Synthetic oligonucleotide
  Antisense strand to SEQ ID NO: 1984382
caguucauggacaaacagg

SEQ ID NO: 1984384 - RNA, 19 nt, Artificial Sequence
  Description of Artificial Sequence: Synthetic oligonucleotide
  Sense strand starting at position 2310 of SEQ ID NO: 1880665
cuguuuguccaugaacugu

SEQ ID NO: 1984385 - RNA, 19 nt, Artificial Sequence
  Description of Artificial Sequence: Synthetic oligonucleotide
  Antisense strand to SEQ ID NO: 1984384
acaguucauggacaaacag

SEQ ID NO: 1984386 - RNA, 19 nt, Artificial Sequence
  Description of Artificial Sequence: Synthetic oligonucleotide
  Sense strand starting at position 2318 of SEQ ID NO: 1880665
ccaugaacuguuuguccau

SEQ ID NO: 1984387 - RNA, 19 nt, Artificial Sequence
  Description of Artificial Sequence: Synthetic oligonucleotide
  Antisense strand to SEQ ID NO: 1984386
auggacaaacaguucaugg

SEQ ID NO: 1984388 - RNA, 19 nt, Artificial Sequence
  Description of Artificial Sequence: Synthetic oligonucleotide
  Sense strand starting at position 2321 of SEQ ID NO: 1880665
ugaacuguuuguccaugca

SEQ ID NO: 1984389 - RNA, 19 nt, Artificial Sequence
  Description of Artificial Sequence: Synthetic oligonucleotide
  Antisense strand to SEQ ID NO: 1984388
ugcauggacaaacaguuca

SEQ ID NO: 1984390 - RNA, 19 nt, Artificial Sequence
  Description of Artificial Sequence: Synthetic oligonucleotide
  Sense strand starting at position 2391 of SEQ ID NO: 1880665
gggaaagguuccugaguau

SEQ ID NO: 1984391 - RNA, 19 nt, Artificial Sequence
  Description of Artificial Sequence: Synthetic oligonucleotide
  Antisense strand to SEQ ID NO: 1984390
auacucaggaaccuuuccc

SEQ ID NO: 1984392 - RNA, 19 nt, Artificial Sequence
  Description of Artificial Sequence: Synthetic oligonucleotide
  Sense strand starting at position 2466 of SEQ ID NO: 1880665
uauggcagucuauagaagu

SEQ ID NO: 1984393 - RNA, 19 nt, Artificial Sequence
  Description of Artificial Sequence: Synthetic oligonucleotide
  Antisense strand to SEQ ID NO: 1984392
acuucuauagacugccaua

SEQ ID NO: 1984394 - RNA, 19 nt, Artificial Sequence
  Description of Artificial Sequence: Synthetic oligonucleotide
  Sense strand starting at position 2486 of SEQ ID NO: 1880665
ucaggcuugugggaauuca

SEQ ID NO: 1984395 - RNA, 19 nt, Artificial Sequence
  Description of Artificial Sequence: Synthetic oligonucleotide
  Antisense strand to SEQ ID NO: 1984394
ugaauucccacaagccuga

SEQ ID NO: 1984396 - RNA, 19 nt, Artificial Sequence
  Description of Artificial Sequence: Synthetic oligonucleotide
  Sense strand starting at position 3576 of SEQ ID NO: 1880665
ggaaaugagcuguagcacu

SEQ ID NO: 1984397 - RNA, 19 nt, Artificial Sequence
  Description of Artificial Sequence: Synthetic oligonucleotide
  Antisense strand to SEQ ID NO: 1984396
agugcuacagcucauuucc

SEQ ID NO: 1984398 - RNA, 19 nt, Artificial Sequence
  Description of Artificial Sequence: Synthetic oligonucleotide
  Sense strand starting at position 3675 of SEQ ID NO: 1880665
ugguuagguucuccuaguu

SEQ ID NO: 1984399 - RNA, 19 nt, Artificial Sequence
  Description of Artificial Sequence: Synthetic oligonucleotide
  Antisense strand to SEQ ID NO: 1984398
aacuaggagaaccuaacca

SEQ ID NO: 1984400 - RNA, 19 nt, Artificial Sequence
  Description of Artificial Sequence: Synthetic oligonucleotide
  Sense strand starting at position 3949 of SEQ ID NO: 1880665
gaaagaggcuucugccaag

SEQ ID NO: 1984401 - RNA, 19 nt, Artificial Sequence
  Description of Artificial Sequence: Synthetic oligonucleotide
  Antisense strand to SEQ ID NO: 1984400
cuuggcagaagccucuuuc

SEQ ID NO: 1984402 - RNA, 19 nt, Artificial Sequence
  Description of Artificial Sequence: Synthetic oligonucleotide
  Sense strand starting at position 3973 of SEQ ID NO: 1880665
cauggaacuugcugagaug

SEQ ID NO: 1984403 - RNA, 19 nt, Artificial Sequence
  Description of Artificial Sequence: Synthetic oligonucleotide
  Antisense strand to SEQ ID NO: 1984402
caucucagcaaguuccaug

SEQ ID NO: 1984404 - RNA, 19 nt, Artificial Sequence
  Description of Artificial Sequence: Synthetic oligonucleotide
  Sense strand starting at position 12 of SEQ ID NO: 1880666
ugugaugcuccauaaacau

SEQ ID NO: 1984405 - RNA, 19 nt, Artificial Sequence
  Description of Artificial Sequence: Synthetic oligonucleotide
  Antisense strand to SEQ ID NO: 1984404
auguuuauggagcaucaca

SEQ ID NO: 1984406 - RNA, 19 nt, Artificial Sequence
  Description of Artificial Sequence: Synthetic oligonucleotide
  Sense strand starting at position 188 of SEQ ID NO: 1880666
acggguugaacagaucagu

SEQ ID NO: 1984407 - RNA, 19 nt, Artificial Sequence
  Description of Artificial Sequence: Synthetic oligonucleotide
  Antisense strand to SEQ ID NO: 1984406
acugaucuguucaacccgu

SEQ ID NO: 1984408 - RNA, 19 nt, Artificial Sequence
  Description of Artificial Sequence: Synthetic oligonucleotide
  Sense strand starting at position 193 of SEQ ID NO: 1880666
uugaacagaucagucugaa

SEQ ID NO: 1984409 - RNA, 19 nt, Artificial Sequence
  Description of Artificial Sequence: Synthetic oligonucleotide
  Antisense strand to SEQ ID NO: 1984408
uucagacugaucuguucaa

SEQ ID NO: 1984410 - RNA, 19 nt, Artificial Sequence
  Description of Artificial Sequence: Synthetic oligonucleotide
  Sense strand starting at position 226 of SEQ ID NO: 1880666
ugggcacuuccagaguaua

SEQ ID NO: 1984411 - RNA, 19 nt, Artificial Sequence
  Description of Artificial Sequence: Synthetic oligonucleotide
  Antisense strand to SEQ ID NO: 1984410
uauacucuggaagugccca

SEQ ID NO: 1984412 - RNA, 19 nt, Artificial Sequence
  Description of Artificial Sequence: Synthetic oligonucleotide
  Sense strand starting at position 345 of SEQ ID NO: 1880666
gaucauagccugugucgga

SEQ ID NO: 1984413 - RNA, 19 nt, Artificial Sequence
  Description of Artificial Sequence: Synthetic oligonucleotide
  Antisense strand to SEQ ID NO: 1984412
uccgacacaggcuaugauc

SEQ ID NO: 1984414 - RNA, 19 nt, Artificial Sequence
  Description of Artificial Sequence: Synthetic oligonucleotide
  Sense strand starting at position 384 of SEQ ID NO: 1880666
ggcacucagaaguagugau

SEQ ID NO: 1984415 - RNA, 19 nt, Artificial Sequence
  Description of Artificial Sequence: Synthetic oligonucleotide
  Antisense strand to SEQ ID NO: 1984414
aucacuacuucugagugcc

SEQ ID NO: 1984416 - RNA, 19 nt, Artificial Sequence
  Description of Artificial Sequence: Synthetic oligonucleotide
  Sense strand starting at position 922 of SEQ ID NO: 1880666
ugaaccuuguucuugcaaa

SEQ ID NO: 1984417 - RNA, 19 nt, Artificial Sequence
  Description of Artificial Sequence: Synthetic oligonucleotide
  Antisense strand to SEQ ID NO: 1984416
uuugcaagaacaagguuca

SEQ ID NO: 1984418 - RNA, 19 nt, Artificial Sequence
  Description of Artificial Sequence: Synthetic oligonucleotide
  Sense strand starting at position 986 of SEQ ID NO: 1880666
uugugaaguuucuuggaca

SEQ ID NO: 1984419 - RNA, 19 nt, Artificial Sequence
  Description of Artificial Sequence: Synthetic oligonucleotide
  Antisense strand to SEQ ID NO: 1984418
uguccaagaaacuucacaa

SEQ ID NO: 1984420 - RNA, 19 nt, Artificial Sequence
  Description of Artificial Sequence: Synthetic oligonucleotide
  Sense strand starting at position 989 of SEQ ID NO: 1880666
ugaaguuucuuggacacca

SEQ ID NO: 1984421 - RNA, 19 nt, Artificial Sequence
  Description of Artificial Sequence: Synthetic oligonucleotide
  Antisense strand to SEQ ID NO: 1984420
ugguguccaagaaacuuca

SEQ ID NO: 1984422 - RNA, 19 nt, Artificial Sequence
  Description of Artificial Sequence: Synthetic oligonucleotide
  Sense strand starting at position 1262 of SEQ ID NO: 1880666
uccacaaggucuuuguuaa

SEQ ID NO: 1984423 - RNA, 19 nt, Artificial Sequence
  Description of Artificial Sequence: Synthetic oligonucleotide
  Antisense strand to SEQ ID NO: 1984422
uuaacaaagaccuugugga

SEQ ID NO: 1984424 - RNA, 19 nt, Artificial Sequence
  Description of Artificial Sequence: Synthetic oligonucleotide
  Sense strand starting at position 1263 of SEQ ID NO: 1880666
ccacaaggucuuuguuaau

SEQ ID NO: 1984425 - RNA, 19 nt, Artificial Sequence
  Description of Artificial Sequence: Synthetic oligonucleotide
  Antisense strand to SEQ ID NO: 1984424
auuaacaaagaccuugugg

SEQ ID NO: 1984426 - RNA, 19 nt, Artificial Sequence
  Description of Artificial Sequence: Synthetic oligonucleotide
  Sense strand starting at position 1575 of SEQ ID NO: 1880666
guggcagugcucgcauuaa

SEQ ID NO: 1984427 - RNA, 19 nt, Artificial Sequence
  Description of Artificial Sequence: Synthetic oligonucleotide
  Antisense strand to SEQ ID NO: 1984426
uuaaugcgagcacugccac

SEQ ID NO: 1984428 - RNA, 19 nt, Artificial Sequence
  Description of Artificial Sequence: Synthetic oligonucleotide
  Sense strand starting at position 1741 of SEQ ID NO: 1880666
gcuacacuuggcugacaau

SEQ ID NO: 1984429 - RNA, 19 nt, Artificial Sequence
  Description of Artificial Sequence: Synthetic oligonucleotide
  Antisense strand to SEQ ID NO: 1984428
auugucagccaaguguagc

SEQ ID NO: 1984430 - RNA, 19 nt, Artificial Sequence
  Description of Artificial Sequence: Synthetic oligonucleotide
  Sense strand starting at position 1742 of SEQ ID NO: 1880666
cuacacuuggcugacaaua

SEQ ID NO: 1984431 - RNA, 19 nt, Artificial Sequence
  Description of Artificial Sequence: Synthetic oligonucleotide
  Antisense strand to SEQ ID NO: 1984430
uauugucagccaaguguag

SEQ ID NO: 1984432 - RNA, 19 nt, Artificial Sequence
  Description of Artificial Sequence: Synthetic oligonucleotide
  Sense strand starting at position 1750 of SEQ ID NO: 1880666
ggcugacaauaguuucuua

SEQ ID NO: 1984433 - RNA, 19 nt, Artificial Sequence
  Description of Artificial Sequence: Synthetic oligonucleotide
  Antisense strand to SEQ ID NO: 1984432
uaagaaacuauugucagcc

SEQ ID NO: 1984434 - RNA, 19 nt, Artificial Sequence
  Description of Artificial Sequence: Synthetic oligonucleotide
  Sense strand starting at position 1753 of SEQ ID NO: 1880666
ugacaauaguuucuuagau

SEQ ID NO: 1984435 - RNA, 19 nt, Artificial Sequence
  Description of Artificial Sequence: Synthetic oligonucleotide
  Antisense strand to SEQ ID NO: 1984434
aucuaagaaacuauuguca

SEQ ID NO: 1984436 - RNA, 19 nt, Artificial Sequence
  Description of Artificial Sequence: Synthetic oligonucleotide
  Sense strand starting at position 1892 of SEQ ID NO: 1880666
ugcaaaucauagucugaua

SEQ ID NO: 1984437 - RNA, 19 nt, Artificial Sequence
  Description of Artificial Sequence: Synthetic oligonucleotide
  Antisense strand to SEQ ID NO: 1984436
uaucagacuaugauuugca

SEQ ID NO: 1984438 - RNA, 19 nt, Artificial Sequence
  Description of Artificial Sequence: Synthetic oligonucleotide
  Sense strand starting at position 1897 of SEQ ID NO: 1880666
aucauagucugauaaaggu

SEQ ID NO: 1984439 - RNA, 19 nt, Artificial Sequence
  Description of Artificial Sequence: Synthetic oligonucleotide
  Antisense strand to SEQ ID NO: 1984438
accuuuaucagacuaugau

SEQ ID NO: 1984440 - RNA, 19 nt, Artificial Sequence
  Description of Artificial Sequence: Synthetic oligonucleotide
  Sense strand starting at position 1905 of SEQ ID NO: 1880666
cugauaaaggucuagcauu

SEQ ID NO: 1984441 - RNA, 19 nt, Artificial Sequence
  Description of Artificial Sequence: Synthetic oligonucleotide
  Antisense strand to SEQ ID NO: 1984440
aaugcuagaccuuuaucag

SEQ ID NO: 1984442 - RNA, 19 nt, Artificial Sequence
  Description of Artificial Sequence: Synthetic oligonucleotide
  Sense strand starting at position 2175 of SEQ ID NO: 1880666
gacacaugaugugagaaac

SEQ ID NO: 1984443 - RNA, 19 nt, Artificial Sequence
  Description of Artificial Sequence: Synthetic oligonucleotide
  Antisense strand to SEQ ID NO: 1984442
guuucucacaucauguguc

SEQ ID NO: 1984444 - RNA, 19 nt, Artificial Sequence
  Description of Artificial Sequence: Synthetic oligonucleotide
  Sense strand starting at position 2195 of SEQ ID NO: 1880666
ggaagucucauacgaguug

SEQ ID NO: 1984445 - RNA, 19 nt, Artificial Sequence
  Description of Artificial Sequence: Synthetic oligonucleotide
  Antisense strand to SEQ ID NO: 1984444
caacucguaugagacuucc

SEQ ID NO: 1984446 - RNA, 19 nt, Artificial Sequence
  Description of Artificial Sequence: Synthetic oligonucleotide
  Sense strand starting at position 2206 of SEQ ID NO: 1880666
acgaguuggugggaaugaa

SEQ ID NO: 1984447 - RNA, 19 nt, Artificial Sequence
  Description of Artificial Sequence: Synthetic oligonucleotide
  Antisense strand to SEQ ID NO: 1984446
uucauucccaccaacucgu

SEQ ID NO: 1984448 - RNA, 19 nt, Artificial Sequence
  Description of Artificial Sequence: Synthetic oligonucleotide
  Sense strand starting at position 2400 of SEQ ID NO: 1880666
cccaguguccaucagauga

SEQ ID NO: 1984449 - RNA, 19 nt, Artificial Sequence
  Description of Artificial Sequence: Synthetic oligonucleotide
  Antisense strand to SEQ ID NO: 1984448
ucaucugauggacacuggg

SEQ ID NO: 1984450 - RNA, 19 nt, Artificial Sequence
  Description of Artificial Sequence: Synthetic oligonucleotide
  Sense strand starting at position 2418 of SEQ ID NO: 1880666
aguggagagacgugugaua

SEQ ID NO: 1984451 - RNA, 19 nt, Artificial Sequence
  Description of Artificial Sequence: Synthetic oligonucleotide
  Antisense strand to SEQ ID NO: 1984450
uaucacacgucucuccacu

SEQ ID NO: 1984452 - RNA, 19 nt, Artificial Sequence
  Description of Artificial Sequence: Synthetic oligonucleotide
  Sense strand starting at position 2420 of SEQ ID NO: 1880666
uggagagacgugugauaca

SEQ ID NO: 1984453 - RNA, 19 nt, Artificial Sequence
  Description of Artificial Sequence: Synthetic oligonucleotide
  Antisense strand to SEQ ID NO: 1984452
uguaucacacgucucucca

SEQ ID NO: 1984454 - RNA, 19 nt, Artificial Sequence
  Description of Artificial Sequence: Synthetic oligonucleotide
  Sense strand starting at position 2425 of SEQ ID NO: 1880666
agacgugugauacaugcau

SEQ ID NO: 1984455 - RNA, 19 nt, Artificial Sequence
  Description of Artificial Sequence: Synthetic oligonucleotide
  Antisense strand to SEQ ID NO: 1984454
augcauguaucacacgucu

SEQ ID NO: 1984456 - RNA, 19 nt, Artificial Sequence
  Description of Artificial Sequence: Synthetic oligonucleotide
  Sense strand starting at position 2427 of SEQ ID NO: 1880666
acgugugauacaugcauga

SEQ ID NO: 1984457 - RNA, 19 nt, Artificial Sequence
  Description of Artificial Sequence: Synthetic oligonucleotide
  Antisense strand to SEQ ID NO: 1984456
ucaugcauguaucacacgu

SEQ ID NO: 1984458 - RNA, 19 nt, Artificial Sequence
  Description of Artificial Sequence: Synthetic oligonucleotide
  Sense strand starting at position 2429 of SEQ ID NO: 1880666
gugugauacaugcaugaug

SEQ ID NO: 1984459 - RNA, 19 nt, Artificial Sequence
  Description of Artificial Sequence: Synthetic oligonucleotide
  Antisense strand to SEQ ID NO: 1984458
caucaugcauguaucacac

SEQ ID NO: 1984460 - RNA, 19 nt, Artificial Sequence
  Description of Artificial Sequence: Synthetic oligonucleotide
  Sense strand starting at position 2431 of SEQ ID NO: 1880666
gugauacaugcaugaugga

SEQ ID NO: 1984461 - RNA, 19 nt, Artificial Sequence
  Description of Artificial Sequence: Synthetic oligonucleotide
  Antisense strand to SEQ ID NO: 1984460
uccaucaugcauguaucac

SEQ ID NO: 1984462 - RNA, 19 nt, Artificial Sequence
  Description of Artificial Sequence: Synthetic oligonucleotide
  Sense strand starting at position 2803 of SEQ ID NO: 1880666
aaagauuauucugagugaa

SEQ ID NO: 1984463 - RNA, 19 nt, Artificial Sequence
  Description of Artificial Sequence: Synthetic oligonucleotide
  Antisense strand to SEQ ID NO: 1984462
uucacucagaauaaucuuu

SEQ ID NO: 1984464 - RNA, 19 nt, Artificial Sequence
  Description of Artificial Sequence: Synthetic oligonucleotide
  Sense strand starting at position 2839 of SEQ ID NO: 1880666
ccacauuaaugugugauac

SEQ ID NO: 1984465 - RNA, 19 nt, Artificial Sequence
  Description of Artificial Sequence: Synthetic oligonucleotide
  Antisense strand to SEQ ID NO: 1984464
guaucacacauuaaugugg

SEQ ID NO: 1984466 - RNA, 19 nt, Artificial Sequence
  Description of Artificial Sequence: Synthetic oligonucleotide
  Sense strand starting at position 2841 of SEQ ID NO: 1880666
acauuaaugugugauacca

SEQ ID NO: 1984467 - RNA, 19 nt, Artificial Sequence
  Description of Artificial Sequence: Synthetic oligonucleotide
  Antisense strand to SEQ ID NO: 1984466
ugguaucacacauuaaugu

SEQ ID NO: 1984468 - RNA, 19 nt, Artificial Sequence
  Description of Artificial Sequence: Synthetic oligonucleotide
  Sense strand starting at position 2878 of SEQ ID NO: 1880666
acagguaacuccuuagaga

SEQ ID NO: 1984469 - RNA, 19 nt, Artificial Sequence
  Description of Artificial Sequence: Synthetic oligonucleotide
  Antisense strand to SEQ ID NO: 1984468
ucucuaaggaguuaccugu

SEQ ID NO: 1984470 - RNA, 19 nt, Artificial Sequence
  Description of Artificial Sequence: Synthetic oligonucleotide
  Sense strand starting at position 2973 of SEQ ID NO: 1880666
aggguuaccucagaacaga

SEQ ID NO: 1984471 - RNA, 19 nt, Artificial Sequence
  Description of Artificial Sequence: Synthetic oligonucleotide
  Antisense strand to SEQ ID NO: 1984470
ucuguucugagguaacccu

SEQ ID NO: 1984472 - RNA, 19 nt, Artificial Sequence
  Description of Artificial Sequence: Synthetic oligonucleotide
  Sense strand starting at position 3080 of SEQ ID NO: 1880666
uucugaauucgacauugau

SEQ ID NO: 1984473 - RNA, 19 nt, Artificial Sequence
  Description of Artificial Sequence: Synthetic oligonucleotide
  Antisense strand to SEQ ID NO: 1984472
aucaaugucgaauucagaa

SEQ ID NO: 1984474 - RNA, 19 nt, Artificial Sequence
  Description of Artificial Sequence: Synthetic oligonucleotide
  Sense strand starting at position 3089 of SEQ ID NO: 1880666
cgacauugauggcuacaua

SEQ ID NO: 1984475 - RNA, 19 nt, Artificial Sequence
  Description of Artificial Sequence: Synthetic oligonucleotide
  Antisense strand to SEQ ID NO: 1984474
uauguagccaucaaugucg

SEQ ID NO: 1984476 - RNA, 19 nt, Artificial Sequence
  Description of Artificial Sequence: Synthetic oligonucleotide
  Sense strand starting at position 3100 of SEQ ID NO: 1880666
gcuacauaaccuugugaag

SEQ ID NO: 1984477 - RNA, 19 nt, Artificial Sequence
  Description of Artificial Sequence: Synthetic oligonucleotide
  Antisense strand to SEQ ID NO: 1984476
cuucacaagguuauguagc

SEQ ID NO: 1984478 - RNA, 19 nt, Artificial Sequence
  Description of Artificial Sequence: Synthetic oligonucleotide
  Sense strand starting at position 3103 of SEQ ID NO: 1880666
acauaaccuugugaagaua

SEQ ID NO: 1984479 - RNA, 19 nt, Artificial Sequence
  Description of Artificial Sequence: Synthetic oligonucleotide
  Antisense strand to SEQ ID NO: 1984478
uaucuucacaagguuaugu

SEQ ID NO: 1984480 - RNA, 19 nt, Artificial Sequence
  Description of Artificial Sequence: Synthetic oligonucleotide
  Sense strand starting at position 3221 of SEQ ID NO: 1880666
cggaguuucgcucauguua

SEQ ID NO: 1984481 - RNA, 19 nt, Artificial Sequence
  Description of Artificial Sequence: Synthetic oligonucleotide
  Antisense strand to SEQ ID NO: 1984480
uaacaugagcgaaacuccg

SEQ ID NO: 1984482 - RNA, 19 nt, Artificial Sequence
  Description of Artificial Sequence: Synthetic oligonucleotide
  Sense strand starting at position 3232 of SEQ ID NO: 1880666
ucauguuacccaggcuaga

SEQ ID NO: 1984483 - RNA, 19 nt, Artificial Sequence
  Description of Artificial Sequence: Synthetic oligonucleotide
  Antisense strand to SEQ ID NO: 1984482
ucuagccuggguaacauga

SEQ ID NO: 1984484 - RNA, 19 nt, Artificial Sequence
  Description of Artificial Sequence: Synthetic oligonucleotide
  Sense strand starting at position 22 of SEQ ID NO: 1880667
aaaguagugaugugaagaa

SEQ ID NO: 1984485 - RNA, 19 nt, Artificial Sequence
  Description of Artificial Sequence: Synthetic oligonucleotide
  Antisense strand to SEQ ID NO: 1984484
uucuucacaucacuacuuu

SEQ ID NO: 1984486 - RNA, 19 nt, Artificial Sequence
  Description of Artificial Sequence: Synthetic oligonucleotide
  Sense strand starting at position 88 of SEQ ID NO: 1880667
gcuagcauuuagcuagaua

SEQ ID NO: 1984487 - RNA, 19 nt, Artificial Sequence
  Description of Artificial Sequence: Synthetic oligonucleotide
  Antisense strand to SEQ ID NO: 1984486
uaucuagcuaaaugcuagc

SEQ ID NO: 1984488 - RNA, 19 nt, Artificial Sequence
  Description of Artificial Sequence: Synthetic oligonucleotide
  Sense strand starting at position 105 of SEQ ID NO: 1880667
uaacuaggucagcaaguuu

SEQ ID NO: 1984489 - RNA, 19 nt, Artificial Sequence
  Description of Artificial Sequence: Synthetic oligonucleotide
  Antisense strand to SEQ ID NO: 1984488
aaacuugcugaccuaguua

SEQ ID NO: 1984490 - RNA, 19 nt, Artificial Sequence
  Description of Artificial Sequence: Synthetic oligonucleotide
  Sense strand starting at position 125 of SEQ ID NO: 1880667
aucauugcuuugguaaacu

SEQ ID NO: 1984491 - RNA, 19 nt, Artificial Sequence
  Description of Artificial Sequence: Synthetic oligonucleotide
  Antisense strand to SEQ ID NO: 1984490
aguuuaccaaagcaaugau

SEQ ID NO: 1984492 - RNA, 19 nt, Artificial Sequence
  Description of Artificial Sequence: Synthetic oligonucleotide
  Sense strand starting at position 151 of SEQ ID NO: 1880667
cauggugucagagauuaug

SEQ ID NO: 1984493 - RNA, 19 nt, Artificial Sequence
  Description of Artificial Sequence: Synthetic oligonucleotide
  Antisense strand to SEQ ID NO: 1984492
cauaaucucugacaccaug

SEQ ID NO: 1984494 - RNA, 19 nt, Artificial Sequence
  Description of Artificial Sequence: Synthetic oligonucleotide
  Sense strand starting at position 154 of SEQ ID NO: 1880667
ggugucagagauuauguaa

SEQ ID NO: 1984495 - RNA, 19 nt, Artificial Sequence
  Description of Artificial Sequence: Synthetic oligonucleotide
  Antisense strand to SEQ ID NO: 1984494
uuacauaaucucugacacc

SEQ ID NO: 1984496 - RNA, 19 nt, Artificial Sequence
  Description of Artificial Sequence: Synthetic oligonucleotide
  Sense strand starting at position 346 of SEQ ID NO: 1880667
aagucagaagguuggagau

SEQ ID NO: 1984497 - RNA, 19 nt, Artificial Sequence
  Description of Artificial Sequence: Synthetic oligonucleotide
  Antisense strand to SEQ ID NO: 1984496
aucuccaaccuucugacuu

SEQ ID NO: 1984498 - RNA, 19 nt, Artificial Sequence
  Description of Artificial Sequence: Synthetic oligonucleotide
  Sense strand starting at position 358 of SEQ ID NO: 1880667
uggagaugaacgcaucuau

SEQ ID NO: 1984499 - RNA, 19 nt, Artificial Sequence
  Description of Artificial Sequence: Synthetic oligonucleotide
  Antisense strand to SEQ ID NO: 1984498
auagaugcguucaucucca

SEQ ID NO: 1984500 - RNA, 19 nt, Artificial Sequence
  Description of Artificial Sequence: Synthetic oligonucleotide
  Sense strand starting at position 471 of SEQ ID NO: 1880667
agaagaaguggucgguauu

SEQ ID NO: 1984501 - RNA, 19 nt, Artificial Sequence
  Description of Artificial Sequence: Synthetic oligonucleotide
  Antisense strand to SEQ ID NO: 1984500
aauaccgaccacuucuucu

SEQ ID NO: 1984502 - RNA, 19 nt, Artificial Sequence
  Description of Artificial Sequence: Synthetic oligonucleotide
  Sense strand starting at position 477 of SEQ ID NO: 1880667
aguggucgguauuuacuaa

SEQ ID NO: 1984503 - RNA, 19 nt, Artificial Sequence
  Description of Artificial Sequence: Synthetic oligonucleotide
  Antisense strand to SEQ ID NO: 1984502
uuaguaaauaccgaccacu

SEQ ID NO: 1984504 - RNA, 19 nt, Artificial Sequence
  Description of Artificial Sequence: Synthetic oligonucleotide
  Sense strand starting at position 1514 of SEQ ID NO: 1880667
aaagaagucaguuguuagg

SEQ ID NO: 1984505 - RNA, 19 nt, Artificial Sequence
  Description of Artificial Sequence: Synthetic oligonucleotide
  Antisense strand to SEQ ID NO: 1984504
ccuaacaacugacuucuuu

SEQ ID NO: 1984506 - RNA, 19 nt, Artificial Sequence
  Description of Artificial Sequence: Synthetic oligonucleotide
  Sense strand starting at position 1521 of SEQ ID NO: 1880667
ucaguuguuaggugauuua

SEQ ID NO: 1984507 - RNA, 19 nt, Artificial Sequence
  Description of Artificial Sequence: Synthetic oligonucleotide
  Antisense strand to SEQ ID NO: 1984506
uaaaucaccuaacaacuga

SEQ ID NO: 1984508 - RNA, 19 nt, Artificial Sequence
  Description of Artificial Sequence: Synthetic oligonucleotide
  Sense strand starting at position 1679 of SEQ ID NO: 1880667
ugaacuaucucggcuuaag

SEQ ID NO: 1984509 - RNA, 19 nt, Artificial Sequence
  Description of Artificial Sequence: Synthetic oligonucleotide
  Antisense strand to SEQ ID NO: 1984508
cuuaagccgagauaguuca

SEQ ID NO: 1984510 - RNA, 19 nt, Artificial Sequence
  Description of Artificial Sequence: Synthetic oligonucleotide
  Sense strand starting at position 1688 of SEQ ID NO: 1880667
ucggcuuaaguuuacuuaa

SEQ ID NO: 1984511 - RNA, 19 nt, Artificial Sequence
  Description of Artificial Sequence: Synthetic oligonucleotide
  Antisense strand to SEQ ID NO: 1984510
uuaaguaaacuuaagccga

SEQ ID NO: 1984512 - RNA, 19 nt, Artificial Sequence
  Description of Artificial Sequence: Synthetic oligonucleotide
  Sense strand starting at position 2093 of SEQ ID NO: 1880667
cuuggauugccauauugaa

SEQ ID NO: 1984513 - RNA, 19 nt, Artificial Sequence
  Description of Artificial Sequence: Synthetic oligonucleotide
  Antisense strand to SEQ ID NO: 1984512
uucaauauggcaauccaag

SEQ ID NO: 1984514 - RNA, 19 nt, Artificial Sequence
  Description of Artificial Sequence: Synthetic oligonucleotide
  Sense strand starting at position 2284 of SEQ ID NO: 1880667
ugcaacgaugcucagauaa

SEQ ID NO: 1984515 - RNA, 19 nt, Artificial Sequence
  Description of Artificial Sequence: Synthetic oligonucleotide
  Antisense strand to SEQ ID NO: 1984514
uuaucugagcaucguugca

SEQ ID NO: 1984516 - RNA, 19 nt, Artificial Sequence
  Description of Artificial Sequence: Synthetic oligonucleotide
  Sense strand starting at position 2371 of SEQ ID NO: 1880667
ccaggaaaguuguugaaca

SEQ ID NO: 1984517 - RNA, 19 nt, Artificial Sequence
  Description of Artificial Sequence: Synthetic oligonucleotide
  Antisense strand to SEQ ID NO: 1984516
uguucaacaacuuuccugg

SEQ ID NO: 1984518 - RNA, 19 nt, Artificial Sequence
  Description of Artificial Sequence: Synthetic oligonucleotide
  Sense strand starting at position 2638 of SEQ ID NO: 1880667
cauaauucuugaguggcaa

SEQ ID NO: 1984519 - RNA, 19 nt, Artificial Sequence
  Description of Artificial Sequence: Synthetic oligonucleotide
  Antisense strand to SEQ ID NO: 1984518
uugccacucaagaauuaug

SEQ ID NO: 1984520 - RNA, 19 nt, Artificial Sequence
  Description of Artificial Sequence: Synthetic oligonucleotide
  Sense strand starting at position 2639 of SEQ ID NO: 1880667
auaauucuugaguggcaaa

SEQ ID NO: 1984521 - RNA, 19 nt, Artificial Sequence
  Description of Artificial Sequence: Synthetic oligonucleotide
  Antisense strand to SEQ ID NO: 1984520
uuugccacucaagaauuau

SEQ ID NO: 1984522 - RNA, 19 nt, Artificial Sequence
  Description of Artificial Sequence: Synthetic oligonucleotide
  Sense strand starting at position 2667 of SEQ ID NO: 1880667
gucauagaaugcuuuaaac

SEQ ID NO: 1984523 - RNA, 19 nt, Artificial Sequence
  Description of Artificial Sequence: Synthetic oligonucleotide
  Antisense strand to SEQ ID NO: 1984522
guuuaaagcauucuaugac

SEQ ID NO: 1984524 - RNA, 19 nt, Artificial Sequence
  Description of Artificial Sequence: Synthetic oligonucleotide
  Sense strand starting at position 2723 of SEQ ID NO: 1880667
cugucucacccugaaggua

SEQ ID NO: 1984525 - RNA, 19 nt, Artificial Sequence
  Description of Artificial Sequence: Synthetic oligonucleotide
  Antisense strand to SEQ ID NO: 1984524
uaccuucagggugagacag

SEQ ID NO: 1984526 - RNA, 19 nt, Artificial Sequence
  Description of Artificial Sequence: Synthetic oligonucleotide
  Sense strand starting at position 2748 of SEQ ID NO: 1880667
uuuagaugacagugaugcu

SEQ ID NO: 1984527 - RNA, 19 nt, Artificial Sequence
  Description of Artificial Sequence: Synthetic oligonucleotide
  Antisense strand to SEQ ID NO: 1984526
agcaucacugucaucuaaa

SEQ ID NO: 1984528 - RNA, 19 nt, Artificial Sequence
  Description of Artificial Sequence: Synthetic oligonucleotide
  Sense strand starting at position 3080 of SEQ ID NO: 1880667
ccaggcucacccuaaagua

SEQ ID NO: 1984529 - RNA, 19 nt, Artificial Sequence
  Description of Artificial Sequence: Synthetic oligonucleotide
  Antisense strand to SEQ ID NO: 1984528
uacuuuagggugagccugg

SEQ ID NO: 1984530 - RNA, 19 nt, Artificial Sequence
  Description of Artificial Sequence: Synthetic oligonucleotide
  Sense strand starting at position 3099 of SEQ ID NO: 1880667
uaacaaagucuugguugaa

SEQ ID NO: 1984531 - RNA, 19 nt, Artificial Sequence
  Description of Artificial Sequence: Synthetic oligonucleotide
  Antisense strand to SEQ ID NO: 1984530
uucaaccaagacuuuguua

SEQ ID NO: 1984532 - RNA, 19 nt, Artificial Sequence
  Description of Artificial Sequence: Synthetic oligonucleotide
  Sense strand starting at position 3100 of SEQ ID NO: 1880667
aacaaagucuugguugaaa

SEQ ID NO: 1984533 - RNA, 19 nt, Artificial Sequence
  Description of Artificial Sequence: Synthetic oligonucleotide
  Antisense strand to SEQ ID NO: 1984532
uuucaaccaagacuuuguu

SEQ ID NO: 1984534 - RNA, 19 nt, Artificial Sequence
  Description of Artificial Sequence: Synthetic oligonucleotide
  Sense strand starting at position 3102 of SEQ ID NO: 1880667
caaagucuugguugaaaca

SEQ ID NO: 1984535 - RNA, 19 nt, Artificial Sequence
  Description of Artificial Sequence: Synthetic oligonucleotide
  Antisense strand to SEQ ID NO: 1984534
uguuucaaccaagacuuug

SEQ ID NO: 1984536 - RNA, 19 nt, Artificial Sequence
  Description of Artificial Sequence: Synthetic oligonucleotide
  Sense strand starting at position 3415 of SEQ ID NO: 1880667
acacuauauuagccgaacu

SEQ ID NO: 1984537 - RNA, 19 nt, Artificial Sequence
  Description of Artificial Sequence: Synthetic oligonucleotide
  Antisense strand to SEQ ID NO: 1984536
aguucggcuaauauagugu

SEQ ID NO: 1984538 - RNA, 19 nt, Artificial Sequence
  Description of Artificial Sequence: Synthetic oligonucleotide
  Sense strand starting at position 3503 of SEQ ID NO: 1880667
caguaauguguggaugaga

SEQ ID NO: 1984539 - RNA, 19 nt, Artificial Sequence
  Description of Artificial Sequence: Synthetic oligonucleotide
  Antisense strand to SEQ ID NO: 1984538
ucucauccacacauuacug

SEQ ID NO: 1984540 - RNA, 19 nt, Artificial Sequence
  Description of Artificial Sequence: Synthetic oligonucleotide
  Sense strand starting at position 3583 of SEQ ID NO: 1880667
ccaggagggcccuaaguau

SEQ ID NO: 1984541 - RNA, 19 nt, Artificial Sequence
  Description of Artificial Sequence: Synthetic oligonucleotide
  Antisense strand to SEQ ID NO: 1984540
auacuuagggcccuccugg

SEQ ID NO: 1984542 - RNA, 19 nt, Artificial Sequence
  Description of Artificial Sequence: Synthetic oligonucleotide
  Sense strand starting at position 3639 of SEQ ID NO: 1880667
guucguauauauuugaagu

SEQ ID NO: 1984543 - RNA, 19 nt, Artificial Sequence
  Description of Artificial Sequence: Synthetic oligonucleotide
  Antisense strand to SEQ ID NO: 1984542
acuucaaauauauacgaac

SEQ ID NO: 1984544 - RNA, 19 nt, Artificial Sequence
  Description of Artificial Sequence: Synthetic oligonucleotide
  Sense strand starting at position 3673 of SEQ ID NO: 1880667
aaauguaucgaugaguguu

SEQ ID NO: 1984545 - RNA, 19 nt, Artificial Sequence
  Description of Artificial Sequence: Synthetic oligonucleotide
  Antisense strand to SEQ ID NO: 1984544
aacacucaucgauacauuu

SEQ ID NO: 1984546 - RNA, 19 nt, Artificial Sequence
  Description of Artificial Sequence: Synthetic oligonucleotide
  Sense strand starting at position 3690 of SEQ ID NO: 1880667
uuaugcuuuguagagauua

SEQ ID NO: 1984547 - RNA, 19 nt, Artificial Sequence
  Description of Artificial Sequence: Synthetic oligonucleotide
  Antisense strand to SEQ ID NO: 1984546
uaaucucuacaaagcauaa

SEQ ID NO: 1984548 - RNA, 19 nt, Artificial Sequence
  Description of Artificial Sequence: Synthetic oligonucleotide
  Sense strand starting at position 3692 of SEQ ID NO: 1880667
augcuuuguagagauuaag

SEQ ID NO: 1984549 - RNA, 19 nt, Artificial Sequence
  Description of Artificial Sequence: Synthetic oligonucleotide
  Antisense strand to SEQ ID NO: 1984548
cuuaaucucuacaaagcau

SEQ ID NO: 1984550 - RNA, 19 nt, Artificial Sequence
  Description of Artificial Sequence: Synthetic oligonucleotide
  Sense strand starting at position 3698 of SEQ ID NO: 1880667
uguagagauuaagugaauc

SEQ ID NO: 1984551 - RNA, 19 nt, Artificial Sequence
  Description of Artificial Sequence: Synthetic oligonucleotide
  Antisense strand to SEQ ID NO: 1984550
gauucacuuaaucucuaca

SEQ ID NO: 1984552 - RNA, 19 nt, Artificial Sequence
  Description of Artificial Sequence: Synthetic oligonucleotide
  Sense strand starting at position 3781 of SEQ ID NO: 1880667
gauaauauguacuucguau

SEQ ID NO: 1984553 - RNA, 19 nt, Artificial Sequence
  Description of Artificial Sequence: Synthetic oligonucleotide
  Antisense strand to SEQ ID NO: 1984552
auacgaaguacauauuauc

SEQ ID NO: 1984554 - RNA, 19 nt, Artificial Sequence
  Description of Artificial Sequence: Synthetic oligonucleotide
  Sense strand starting at position 3859 of SEQ ID NO: 1880667
uaugauuggugauuagcuu

SEQ ID NO: 1984555 - RNA, 19 nt, Artificial Sequence
  Description of Artificial Sequence: Synthetic oligonucleotide
  Antisense strand to SEQ ID NO: 1984554
aagcuaaucaccaaucaua

SEQ ID NO: 1984556 - RNA, 19 nt, Artificial Sequence
  Description of Artificial Sequence: Synthetic oligonucleotide
  Sense strand starting at position 3879 of SEQ ID NO: 1880667
gggcacauucuugaaagca

SEQ ID NO: 1984557 - RNA, 19 nt, Artificial Sequence
  Description of Artificial Sequence: Synthetic oligonucleotide
  Antisense strand to SEQ ID NO: 1984556
ugcuuucaagaaugugccc

SEQ ID NO: 1984558 - RNA, 19 nt, Artificial Sequence
  Description of Artificial Sequence: Synthetic oligonucleotide
  Sense strand starting at position 3947 of SEQ ID NO: 1880667
ugaauucuggaauagugca

SEQ ID NO: 1984559 - RNA, 19 nt, Artificial Sequence
  Description of Artificial Sequence: Synthetic oligonucleotide
  Antisense strand to SEQ ID NO: 1984558
ugcacuauuccagaauuca

SEQ ID NO: 1984560 - RNA, 19 nt, Artificial Sequence
  Description of Artificial Sequence: Synthetic oligonucleotide
  Sense strand starting at position 3952 of SEQ ID NO: 1880667
ucuggaauagugcaacagu

SEQ ID NO: 1984561 - RNA, 19 nt, Artificial Sequence
  Description of Artificial Sequence: Synthetic oligonucleotide
  Antisense strand to SEQ ID NO: 1984560
acuguugcacuauuccaga

SEQ ID NO: 1984562 - RNA, 19 nt, Artificial Sequence
  Description of Artificial Sequence: Synthetic oligonucleotide
  Sense strand starting at position 3955 of SEQ ID NO: 1880667
ggaauagugcaacagucaa

SEQ ID NO: 1984563 - RNA, 19 nt, Artificial Sequence
  Description of Artificial Sequence: Synthetic oligonucleotide
  Antisense strand to SEQ ID NO: 1984562
uugacuguugcacuauucc

SEQ ID NO: 1984564 - RNA, 19 nt, Artificial Sequence
  Description of Artificial Sequence: Synthetic oligonucleotide
  Sense strand starting at position 63 of SEQ ID NO: 1880668
uggcuuuagcugcuaaguu

SEQ ID NO: 1984565 - RNA, 19 nt, Artificial Sequence
  Description of Artificial Sequence: Synthetic oligonucleotide
  Antisense strand to SEQ ID NO: 1984564
aacuuagcagcuaaagcca

SEQ ID NO: 1984566 - RNA, 19 nt, Artificial Sequence
  Description of Artificial Sequence: Synthetic oligonucleotide
  Sense strand starting at position 123 of SEQ ID NO: 1880668
ucuauuagagacugacagu

SEQ ID NO: 1984567 - RNA, 19 nt, Artificial Sequence
  Description of Artificial Sequence: Synthetic oligonucleotide
  Antisense strand to SEQ ID NO: 1984566
acugucagucucuaauaga

SEQ ID NO: 1984568 - RNA, 19 nt, Artificial Sequence
  Description of Artificial Sequence: Synthetic oligonucleotide
  Sense strand starting at position 233 of SEQ ID NO: 1880668
auggaaagcuguccagaca

SEQ ID NO: 1984569 - RNA, 19 nt, Artificial Sequence
  Description of Artificial Sequence: Synthetic oligonucleotide
  Antisense strand to SEQ ID NO: 1984568
ugucuggacagcuuuccau

SEQ ID NO: 1984570 - RNA, 19 nt, Artificial Sequence
  Description of Artificial Sequence: Synthetic oligonucleotide
  Sense strand starting at position 583 of SEQ ID NO: 1880668
guauuugauucugcuuaca

SEQ ID NO: 1984571 - RNA, 19 nt, Artificial Sequence
  Description of Artificial Sequence: Synthetic oligonucleotide
  Antisense strand to SEQ ID NO: 1984570
uguaagcagaaucaaauac

SEQ ID NO: 1984572 - RNA, 19 nt, Artificial Sequence
  Description of Artificial Sequence: Synthetic oligonucleotide
  Sense strand starting at position 586 of SEQ ID NO: 1880668
uuugauucugcuuacagaa

SEQ ID NO: 1984573 - RNA, 19 nt, Artificial Sequence
  Description of Artificial Sequence: Synthetic oligonucleotide
  Antisense strand to SEQ ID NO: 1984572
uucuguaagcagaaucaaa

SEQ ID NO: 1984574 - RNA, 19 nt, Artificial Sequence
  Description of Artificial Sequence: Synthetic oligonucleotide
  Sense strand starting at position 769 of SEQ ID NO: 1880668
agaaacuuucugcagacuu

SEQ ID NO: 1984575 - RNA, 19 nt, Artificial Sequence
  Description of Artificial Sequence: Synthetic oligonucleotide
  Antisense strand to SEQ ID NO: 1984574
aagucugcagaaaguuucu

SEQ ID NO: 1984576 - RNA, 19 nt, Artificial Sequence
  Description of Artificial Sequence: Synthetic oligonucleotide
  Sense strand starting at position 780 of SEQ ID NO: 1880668
gcagacuuccuuuaacuga

SEQ ID NO: 1984577 - RNA, 19 nt, Artificial Sequence
  Description of Artificial Sequence: Synthetic oligonucleotide
  Antisense strand to SEQ ID NO: 1984576
ucaguuaaaggaagucugc

SEQ ID NO: 1984578 - RNA, 19 nt, Artificial Sequence
  Description of Artificial Sequence: Synthetic oligonucleotide
  Sense strand starting at position 1125 of SEQ ID NO: 1880668
uuuguugaccugcaugaga

SEQ ID NO: 1984579 - RNA, 19 nt, Artificial Sequence
  Description of Artificial Sequence: Synthetic oligonucleotide
  Antisense strand to SEQ ID NO: 1984578
ucucaugcaggucaacaaa

SEQ ID NO: 1984580 - RNA, 19 nt, Artificial Sequence
  Description of Artificial Sequence: Synthetic oligonucleotide
  Sense strand starting at position 1142 of SEQ ID NO: 1880668
gaccauaaacugugcuaag

SEQ ID NO: 1984581 - RNA, 19 nt, Artificial Sequence
  Description of Artificial Sequence: Synthetic oligonucleotide
  Antisense strand to SEQ ID NO: 1984580
cuuagcacaguuuaugguc

SEQ ID NO: 1984582 - RNA, 19 nt, Artificial Sequence
  Description of Artificial Sequence: Synthetic oligonucleotide
  Sense strand starting at position 1143 of SEQ ID NO: 1880668
accauaaacugugcuaaga

SEQ ID NO: 1984583 - RNA, 19 nt, Artificial Sequence
  Description of Artificial Sequence: Synthetic oligonucleotide
  Antisense strand to SEQ ID NO: 1984582
ucuuagcacaguuuauggu

SEQ ID NO: 1984584 - RNA, 19 nt, Artificial Sequence
  Description of Artificial Sequence: Synthetic oligonucleotide
  Sense strand starting at position 1326 of SEQ ID NO: 1880668
aguagaacccuccaagugu

SEQ ID NO: 1984585 - RNA, 19 nt, Artificial Sequence
  Description of Artificial Sequence: Synthetic oligonucleotide
  Antisense strand to SEQ ID NO: 1984584
acacuuggaggguucuacu

SEQ ID NO: 1984586 - RNA, 19 nt, Artificial Sequence
  Description of Artificial Sequence: Synthetic oligonucleotide
  Sense strand starting at position 1542 of SEQ ID NO: 1880668
augagagcuccaugacacu

SEQ ID NO: 1984587 - RNA, 19 nt, Artificial Sequence
  Description of Artificial Sequence: Synthetic oligonucleotide
  Antisense strand to SEQ ID NO: 1984586
agugucauggagcucucau

SEQ ID NO: 1984588 - RNA, 19 nt, Artificial Sequence
  Description of Artificial Sequence: Synthetic oligonucleotide
  Sense strand starting at position 1644 of SEQ ID NO: 1880668
gaaggagcucacuggacau

SEQ ID NO: 1984589 - RNA, 19 nt, Artificial Sequence
  Description of Artificial Sequence: Synthetic oligonucleotide
  Antisense strand to SEQ ID NO: 1984588
auguccagugagcuccuuc

SEQ ID NO: 1984590 - RNA, 19 nt, Artificial Sequence
  Description of Artificial Sequence: Synthetic oligonucleotide
  Sense strand starting at position 1697 of SEQ ID NO: 1880668
aguugaucguauuuaccca

SEQ ID NO: 1984591 - RNA, 19 nt, Artificial Sequence
  Description of Artificial Sequence: Synthetic oligonucleotide
  Antisense strand to SEQ ID NO: 1984590
uggguaaauacgaucaacu

SEQ ID NO: 1984592 - RNA, 19 nt, Artificial Sequence
  Description of Artificial Sequence: Synthetic oligonucleotide
  Sense strand starting at position 1722 of SEQ ID NO: 1880668
uuacauuuguguguaaugu

SEQ ID NO: 1984593 - RNA, 19 nt, Artificial Sequence
  Description of Artificial Sequence: Synthetic oligonucleotide
  Antisense strand to SEQ ID NO: 1984592
acauuacacacaaauguaa

SEQ ID NO: 1984594 - RNA, 19 nt, Artificial Sequence
  Description of Artificial Sequence: Synthetic oligonucleotide
  Sense strand starting at position 1733 of SEQ ID NO: 1880668
uguaauguacagugaagac

SEQ ID NO: 1984595 - RNA, 19 nt, Artificial Sequence
  Description of Artificial Sequence: Synthetic oligonucleotide
  Antisense strand to SEQ ID NO: 1984594
gucuucacuguacauuaca

SEQ ID NO: 1984596 - RNA, 19 nt, Artificial Sequence
  Description of Artificial Sequence: Synthetic oligonucleotide
  Sense strand starting at position 1743 of SEQ ID NO: 1880668
agugaagacugcccaauaa

SEQ ID NO: 1984597 - RNA, 19 nt, Artificial Sequence
  Description of Artificial Sequence: Synthetic oligonucleotide
  Antisense strand to SEQ ID NO: 1984596
uuauugggcagucuucacu

SEQ ID NO: 1984598 - RNA, 19 nt, Artificial Sequence
  Description of Artificial Sequence: Synthetic oligonucleotide
  Sense strand starting at position 1931 of SEQ ID NO: 1880668
ccgcaugaugaagauuacu

SEQ ID NO: 1984599 - RNA, 19 nt, Artificial Sequence
  Description of Artificial Sequence: Synthetic oligonucleotide
  Antisense strand to SEQ ID NO: 1984598
aguaaucuucaucaugcgg

SEQ ID NO: 1984600 - RNA, 19 nt, Artificial Sequence
  Description of Artificial Sequence: Synthetic oligonucleotide
  Sense strand starting at position 2110 of SEQ ID NO: 1880668
gcaugaggcagagauggua

SEQ ID NO: 1984601 - RNA, 19 nt, Artificial Sequence
  Description of Artificial Sequence: Synthetic oligonucleotide
  Antisense strand to SEQ ID NO: 1984600
uaccaucucugccucaugc

SEQ ID NO: 1984602 - RNA, 19 nt, Artificial Sequence
  Description of Artificial Sequence: Synthetic oligonucleotide
  Sense strand starting at position 2118 of SEQ ID NO: 1880668
cagagaugguacuuucucu

SEQ ID NO: 1984603 - RNA, 19 nt, Artificial Sequence
  Description of Artificial Sequence: Synthetic oligonucleotide
  Antisense strand to SEQ ID NO: 1984602
agagaaaguaccaucucug

SEQ ID NO: 1984604 - RNA, 19 nt, Artificial Sequence
  Description of Artificial Sequence: Synthetic oligonucleotide
  Sense strand starting at position 2143 of SEQ ID NO: 1880668
ccaagaaagaaucggucau

SEQ ID NO: 1984605 - RNA, 19 nt, Artificial Sequence
  Description of Artificial Sequence: Synthetic oligonucleotide
  Antisense strand to SEQ ID NO: 1984604
augaccgauucuuucuugg

SEQ ID NO: 1984606 - RNA, 19 nt, Artificial Sequence
  Description of Artificial Sequence: Synthetic oligonucleotide
  Sense strand starting at position 2267 of SEQ ID NO: 1880668
cuuccuuauguugaaaggu

SEQ ID NO: 1984607 - RNA, 19 nt, Artificial Sequence
  Description of Artificial Sequence: Synthetic oligonucleotide
  Antisense strand to SEQ ID NO: 1984606
accuuucaacauaaggaag

SEQ ID NO: 1984608 - RNA, 19 nt, Artificial Sequence
  Description of Artificial Sequence: Synthetic oligonucleotide
  Sense strand starting at position 2273 of SEQ ID NO: 1880668
uauguugaaagguaguagu

SEQ ID NO: 1984609 - RNA, 19 nt, Artificial Sequence
  Description of Artificial Sequence: Synthetic oligonucleotide
  Antisense strand to SEQ ID NO: 1984608
acuacuaccuuucaacaua

SEQ ID NO: 1984610 - RNA, 19 nt, Artificial Sequence
  Description of Artificial Sequence: Synthetic oligonucleotide
  Sense strand starting at position 2284 of SEQ ID NO: 1880668
guaguaguuacacacugaa

SEQ ID NO: 1984611 - RNA, 19 nt, Artificial Sequence
  Description of Artificial Sequence: Synthetic oligonucleotide
  Antisense strand to SEQ ID NO: 1984610
uucaguguguaacuacuac

SEQ ID NO: 1984612 - RNA, 19 nt, Artificial Sequence
  Description of Artificial Sequence: Synthetic oligonucleotide
  Sense strand starting at position 2325 of SEQ ID NO: 1880668
gcuuguggcaguguguaaa

SEQ ID NO: 1984613 - RNA, 19 nt, Artificial Sequence
  Description of Artificial Sequence: Synthetic oligonucleotide
  Antisense strand to SEQ ID NO: 1984612
uuuacacacugccacaagc

SEQ ID NO: 1984614 - RNA, 19 nt, Artificial Sequence
  Description of Artificial Sequence: Synthetic oligonucleotide
  Sense strand starting at position 2421 of SEQ ID NO: 1880668
aucucaauuucccaaggga

SEQ ID NO: 1984615 - RNA, 19 nt, Artificial Sequence
  Description of Artificial Sequence: Synthetic oligonucleotide
  Antisense strand to SEQ ID NO: 1984614
ucccuugggaaauugagau

SEQ ID NO: 1984616 - RNA, 19 nt, Artificial Sequence
  Description of Artificial Sequence: Synthetic oligonucleotide
  Sense strand starting at position 2544 of SEQ ID NO: 1880668
acaauaaagggcugauucu

SEQ ID NO: 1984617 - RNA, 19 nt, Artificial Sequence
  Description of Artificial Sequence: Synthetic oligonucleotide
  Antisense strand to SEQ ID NO: 1984616
agaaucagcccuuuauugu

SEQ ID NO: 1984618 - RNA, 19 nt, Artificial Sequence
  Description of Artificial Sequence: Synthetic oligonucleotide
  Sense strand starting at position 2691 of SEQ ID NO: 1880668
uugccacauguauagaauu

SEQ ID NO: 1984619 - RNA, 19 nt, Artificial Sequence
  Description of Artificial Sequence: Synthetic oligonucleotide
  Antisense strand to SEQ ID NO: 1984618
aauucuauacauguggcaa

SEQ ID NO: 1984620 - RNA, 19 nt, Artificial Sequence
  Description of Artificial Sequence: Synthetic oligonucleotide
  Sense strand starting at position 2792 of SEQ ID NO: 1880668
ggucacaugggcugaauua

SEQ ID NO: 1984621 - RNA, 19 nt, Artificial Sequence
  Description of Artificial Sequence: Synthetic oligonucleotide
  Antisense strand to SEQ ID NO: 1984620
uaauucagcccaugugacc

SEQ ID NO: 1984622 - RNA, 19 nt, Artificial Sequence
  Description of Artificial Sequence: Synthetic oligonucleotide
  Sense strand starting at position 2841 of SEQ ID NO: 1880668
gaacuuaacucuucugggu

SEQ ID NO: 1984623 - RNA, 19 nt, Artificial Sequence
  Description of Artificial Sequence: Synthetic oligonucleotide
  Antisense strand to SEQ ID NO: 1984622
acccagaagaguuaaguuc

SEQ ID NO: 1984624 - RNA, 19 nt, Artificial Sequence
  Description of Artificial Sequence: Synthetic oligonucleotide
  Sense strand starting at position 2879 of SEQ ID NO: 1880668
acuuuaaacuccuugggua

SEQ ID NO: 1984625 - RNA, 19 nt, Artificial Sequence
  Description of Artificial Sequence: Synthetic oligonucleotide
  Antisense strand to SEQ ID NO: 1984624
uacccaaggaguuuaaagu

SEQ ID NO: 1984626 - RNA, 19 nt, Artificial Sequence
  Description of Artificial Sequence: Synthetic oligonucleotide
  Sense strand starting at position 2892 of SEQ ID NO: 1880668
uggguagccagugacuauu

SEQ ID NO: 1984627 - RNA, 19 nt, Artificial Sequence
  Description of Artificial Sequence: Synthetic oligonucleotide
  Antisense strand to SEQ ID NO: 1984626
aauagucacuggcuaccca

SEQ ID NO: 1984628 - RNA, 19 nt, Artificial Sequence
  Description of Artificial Sequence: Synthetic oligonucleotide
  Sense strand starting at position 2975 of SEQ ID NO: 1880668
cuauguccaaugggaagau

SEQ ID NO: 1984629 - RNA, 19 nt, Artificial Sequence
  Description of Artificial Sequence: Synthetic oligonucleotide
  Antisense strand to SEQ ID NO: 1984628
aucuucccauuggacauag

SEQ ID NO: 1984630 - RNA, 19 nt, Artificial Sequence
  Description of Artificial Sequence: Synthetic oligonucleotide
  Sense strand starting at position 3089 of SEQ ID NO: 1880668
aggcaccgauuaucagaaa

SEQ ID NO: 1984631 - RNA, 19 nt, Artificial Sequence
  Description of Artificial Sequence: Synthetic oligonucleotide
  Antisense strand to SEQ ID NO: 1984630
uuucugauaaucggugccu

SEQ ID NO: 1984632 - RNA, 19 nt, Artificial Sequence
  Description of Artificial Sequence: Synthetic oligonucleotide
  Sense strand starting at position 3250 of SEQ ID NO: 1880668
acuggauucuuaucauguc

SEQ ID NO: 1984633 - RNA, 19 nt, Artificial Sequence
  Description of Artificial Sequence: Synthetic oligonucleotide
  Antisense strand to SEQ ID NO: 1984632
gacaugauaagaauccagu

SEQ ID NO: 1984634 - RNA, 19 nt, Artificial Sequence
  Description of Artificial Sequence: Synthetic oligonucleotide
  Sense strand starting at position 3312 of SEQ ID NO: 1880668
ggauauacgucacuuagau

SEQ ID NO: 1984635 - RNA, 19 nt, Artificial Sequence
  Description of Artificial Sequence: Synthetic oligonucleotide
  Antisense strand to SEQ ID NO: 1984634
aucuaagugacguauaucc

SEQ ID NO: 1984636 - RNA, 19 nt, Artificial Sequence
  Description of Artificial Sequence: Synthetic oligonucleotide
  Sense strand starting at position 3840 of SEQ ID NO: 1880668
uccugaccucaugauguua

SEQ ID NO: 1984637 - RNA, 19 nt, Artificial Sequence
  Description of Artificial Sequence: Synthetic oligonucleotide
  Antisense strand to SEQ ID NO: 1984636
uaacaucaugaggucagga

SEQ ID NO: 1984638 - RNA, 19 nt, Artificial Sequence
  Description of Artificial Sequence: Synthetic oligonucleotide
  Sense strand starting at position 3898 of SEQ ID NO: 1880668
uaccucauuguugagugaa

SEQ ID NO: 1984639 - RNA, 19 nt, Artificial Sequence
  Description of Artificial Sequence: Synthetic oligonucleotide
  Antisense strand to SEQ ID NO: 1984638
uucacucaacaaugaggua

SEQ ID NO: 1984640 - RNA, 19 nt, Artificial Sequence
  Description of Artificial Sequence: Synthetic oligonucleotide
  Sense strand starting at position 3901 of SEQ ID NO: 1880668
cucauuguugagugaaaua

SEQ ID NO: 1984641 - RNA, 19 nt, Artificial Sequence
  Description of Artificial Sequence: Synthetic oligonucleotide
  Antisense strand to SEQ ID NO: 1984640
uauuucacucaacaaugag

SEQ ID NO: 1984642 - RNA, 19 nt, Artificial Sequence
  Description of Artificial Sequence: Synthetic oligonucleotide
  Sense strand starting at position 3912 of SEQ ID NO: 1880668
gugaaauaccuguaguaca

SEQ ID NO: 1984643 - RNA, 19 nt, Artificial Sequence
  Description of Artificial Sequence: Synthetic oligonucleotide
  Antisense strand to SEQ ID NO: 1984642
uguacuacagguauuucac

SEQ ID NO: 1984644 - RNA, 19 nt, Artificial Sequence
  Description of Artificial Sequence: Synthetic oligonucleotide
  Sense strand starting at position 56 of SEQ ID NO: 1880669
aucagaaauucucuugugu

SEQ ID NO: 1984645 - RNA, 19 nt, Artificial Sequence
  Description of Artificial Sequence: Synthetic oligonucleotide
  Antisense strand to SEQ ID NO: 1984644
acacaagagaauuucugau

SEQ ID NO: 1984646 - RNA, 19 nt, Artificial Sequence
  Description of Artificial Sequence: Synthetic oligonucleotide
  Sense strand starting at position 380 of SEQ ID NO: 1880669
guuauucuaucaucagaua

SEQ ID NO: 1984647 - RNA, 19 nt, Artificial Sequence
  Description of Artificial Sequence: Synthetic oligonucleotide
  Antisense strand to SEQ ID NO: 1984646
uaucugaugauagaauaac

SEQ ID NO: 1984648 - RNA, 19 nt, Artificial Sequence
  Description of Artificial Sequence: Synthetic oligonucleotide
  Sense strand starting at position 400 of SEQ ID NO: 1880669
auguauaucuagucucaua

SEQ ID NO: 1984649 - RNA, 19 nt, Artificial Sequence
  Description of Artificial Sequence: Synthetic oligonucleotide
  Antisense strand to SEQ ID NO: 1984648
uaugagacuagauauacau

SEQ ID NO: 1984650 - RNA, 19 nt, Artificial Sequence
  Description of Artificial Sequence: Synthetic oligonucleotide
  Sense strand starting at position 567 of SEQ ID NO: 1880669
uuuaguagauauccaguaa

SEQ ID NO: 1984651 - RNA, 19 nt, Artificial Sequence
  Description of Artificial Sequence: Synthetic oligonucleotide
  Antisense strand to SEQ ID NO: 1984650
uuacuggauaucuacuaaa

SEQ ID NO: 1984652 - RNA, 19 nt, Artificial Sequence
  Description of Artificial Sequence: Synthetic oligonucleotide
  Sense strand starting at position 737 of SEQ ID NO: 1880669
uagcgacuacaguaucaga

SEQ ID NO: 1984653 - RNA, 19 nt, Artificial Sequence
  Description of Artificial Sequence: Synthetic oligonucleotide
  Antisense strand to SEQ ID NO: 1984652
ucugauacuguagucgcua

SEQ ID NO: 1984654 - RNA, 19 nt, Artificial Sequence
  Description of Artificial Sequence: Synthetic oligonucleotide
  Sense strand starting at position 1122 of SEQ ID NO: 1880669
caaagaaugccuggccaga

SEQ ID NO: 1984655 - RNA, 19 nt, Artificial Sequence
  Description of Artificial Sequence: Synthetic oligonucleotide
  Antisense strand to SEQ ID NO: 1984654
ucuggccaggcauucuuug

SEQ ID NO: 1984656 - RNA, 19 nt, Artificial Sequence
  Description of Artificial Sequence: Synthetic oligonucleotide
  Sense strand starting at position 1162 of SEQ ID NO: 1880669
agagcuauuuccgucuucu

SEQ ID NO: 1984657 - RNA, 19 nt, Artificial Sequence
  Description of Artificial Sequence: Synthetic oligonucleotide
  Antisense strand to SEQ ID NO: 1984656
agaagacggaaauagcucu

SEQ ID NO: 1984658 - RNA, 19 nt, Artificial Sequence
  Description of Artificial Sequence: Synthetic oligonucleotide
  Sense strand starting at position 1228 of SEQ ID NO: 1880669
uuguguauuucugcacaca

SEQ ID NO: 1984659 - RNA, 19 nt, Artificial Sequence
  Description of Artificial Sequence: Synthetic oligonucleotide
  Antisense strand to SEQ ID NO: 1984658
ugugugcagaaauacacaa

SEQ ID NO: 1984660 - RNA, 19 nt, Artificial Sequence
  Description of Artificial Sequence: Synthetic oligonucleotide
  Sense strand starting at position 1369 of SEQ ID NO: 1880669
aaucauguugaguacgaca

SEQ ID NO: 1984661 - RNA, 19 nt, Artificial Sequence
  Description of Artificial Sequence: Synthetic oligonucleotide
  Antisense strand to SEQ ID NO: 1984660
ugucguacucaacaugauu

SEQ ID NO: 1984662 - RNA, 19 nt, Artificial Sequence
  Description of Artificial Sequence: Synthetic oligonucleotide
  Sense strand starting at position 1466 of SEQ ID NO: 1880669
guuucuggucgggacugaa

SEQ ID NO: 1984663 - RNA, 19 nt, Artificial Sequence
  Description of Artificial Sequence: Synthetic oligonucleotide
  Antisense strand to SEQ ID NO: 1984662
uucagucccgaccagaaac

SEQ ID NO: 1984664 - RNA, 19 nt, Artificial Sequence
  Description of Artificial Sequence: Synthetic oligonucleotide
  Sense strand starting at position 1475 of SEQ ID NO: 1880669
cgggacugaauguguugaa

SEQ ID NO: 1984665 - RNA, 19 nt, Artificial Sequence
  Description of Artificial Sequence: Synthetic oligonucleotide
  Antisense strand to SEQ ID NO: 1984664
uucaacacauucagucccg

SEQ ID NO: 1984666 - RNA, 19 nt, Artificial Sequence
  Description of Artificial Sequence: Synthetic oligonucleotide
  Sense strand starting at position 1476 of SEQ ID NO: 1880669
gggacugaauguguugaau

SEQ ID NO: 1984667 - RNA, 19 nt, Artificial Sequence
  Description of Artificial Sequence: Synthetic oligonucleotide
  Antisense strand to SEQ ID NO: 1984666
auucaacacauucaguccc

SEQ ID NO: 1984668 - RNA, 19 nt, Artificial Sequence
  Description of Artificial Sequence: Synthetic oligonucleotide
  Sense strand starting at position 1576 of SEQ ID NO: 1880669
gccugagccauugagacaa

SEQ ID NO: 1984669 - RNA, 19 nt, Artificial Sequence
  Description of Artificial Sequence: Synthetic oligonucleotide
  Antisense strand to SEQ ID NO: 1984668
uugucucaauggcucaggc

SEQ ID NO: 1984670 - RNA, 19 nt, Artificial Sequence
  Description of Artificial Sequence: Synthetic oligonucleotide
  Sense strand starting at position 1711 of SEQ ID NO: 1880669
cccacaagccuugaaguua

SEQ ID NO: 1984671 - RNA, 19 nt, Artificial Sequence
  Description of Artificial Sequence: Synthetic oligonucleotide
  Antisense strand to SEQ ID NO: 1984670
uaacuucaaggcuuguggg

SEQ ID NO: 1984672 - RNA, 19 nt, Artificial Sequence
  Description of Artificial Sequence: Synthetic oligonucleotide
  Sense strand starting at position 1912 of SEQ ID NO: 1880669
ugaacaguagcucaugaca

SEQ ID NO: 1984673 - RNA, 19 nt, Artificial Sequence
  Description of Artificial Sequence: Synthetic oligonucleotide
  Antisense strand to SEQ ID NO: 1984672
ugucaugagcuacuguuca

SEQ ID NO: 1984674 - RNA, 19 nt, Artificial Sequence
  Description of Artificial Sequence: Synthetic oligonucleotide
  Sense strand starting at position 1926 of SEQ ID NO: 1880669
ugacacuuccaguagugga

SEQ ID NO: 1984675 - RNA, 19 nt, Artificial Sequence
  Description of Artificial Sequence: Synthetic oligonucleotide
  Antisense strand to SEQ ID NO: 1984674
uccacuacuggaaguguca

SEQ ID NO: 1984676 - RNA, 19 nt, Artificial Sequence
  Description of Artificial Sequence: Synthetic oligonucleotide
  Sense strand starting at position 2002 of SEQ ID NO: 1880669
agacaagugucuccuugaa

SEQ ID NO: 1984677 - RNA, 19 nt, Artificial Sequence
  Description of Artificial Sequence: Synthetic oligonucleotide
  Antisense strand to SEQ ID NO: 1984676
uucaaggagacacuugucu

SEQ ID NO: 1984678 - RNA, 19 nt, Artificial Sequence
  Description of Artificial Sequence: Synthetic oligonucleotide
  Sense strand starting at position 2004 of SEQ ID NO: 1880669
acaagugucuccuugaaga

SEQ ID NO: 1984679 - RNA, 19 nt, Artificial Sequence
  Description of Artificial Sequence: Synthetic oligonucleotide
  Antisense strand to SEQ ID NO: 1984678
ucuucaaggagacacuugu

SEQ ID NO: 1984680 - RNA, 19 nt, Artificial Sequence
  Description of Artificial Sequence: Synthetic oligonucleotide
  Sense strand starting at position 2295 of SEQ ID NO: 1880669
guaugcuauccugauagaa

SEQ ID NO: 1984681 - RNA, 19 nt, Artificial Sequence
  Description of Artificial Sequence: Synthetic oligonucleotide
  Antisense strand to SEQ ID NO: 1984680
uucuaucaggauagcauac

SEQ ID NO: 1984682 - RNA, 19 nt, Artificial Sequence
  Description of Artificial Sequence: Synthetic oligonucleotide
  Sense strand starting at position 2315 of SEQ ID NO: 1880669
aggccuuacagguaagcaa

SEQ ID NO: 1984683 - RNA, 19 nt, Artificial Sequence
  Description of Artificial Sequence: Synthetic oligonucleotide
  Antisense strand to SEQ ID NO: 1984682
uugcuuaccuguaaggccu

SEQ ID NO: 1984684 - RNA, 19 nt, Artificial Sequence
  Description of Artificial Sequence: Synthetic oligonucleotide
  Sense strand starting at position 2334 of SEQ ID NO: 1880669
auccuaguccuccaauguu

SEQ ID NO: 1984685 - RNA, 19 nt, Artificial Sequence
  Description of Artificial Sequence: Synthetic oligonucleotide
  Antisense strand to SEQ ID NO: 1984684
aacauuggaggacuaggau

SEQ ID NO: 1984686 - RNA, 19 nt, Artificial Sequence
  Description of Artificial Sequence: Synthetic oligonucleotide
  Sense strand starting at position 2376 of SEQ ID NO: 1880669
auaauugguguaugauaga

SEQ ID NO: 1984687 - RNA, 19 nt, Artificial Sequence
  Description of Artificial Sequence: Synthetic oligonucleotide
  Antisense strand to SEQ ID NO: 1984686
ucuaucauacaccaauuau

SEQ ID NO: 1984688 - RNA, 19 nt, Artificial Sequence
  Description of Artificial Sequence: Synthetic oligonucleotide
  Sense strand starting at position 2411 of SEQ ID NO: 1880669
ccucgcuuacuagaaguaa

SEQ ID NO: 1984689 - RNA, 19 nt, Artificial Sequence
  Description of Artificial Sequence: Synthetic oligonucleotide
  Antisense strand to SEQ ID NO: 1984688
uuacuucuaguaagcgagg

SEQ ID NO: 1984690 - RNA, 19 nt, Artificial Sequence
  Description of Artificial Sequence: Synthetic oligonucleotide
  Sense strand starting at position 2457 of SEQ ID NO: 1880669
gagcucaaauguucuaaug

SEQ ID NO: 1984691 - RNA, 19 nt, Artificial Sequence
  Description of Artificial Sequence: Synthetic oligonucleotide
  Antisense strand to SEQ ID NO: 1984690
cauuagaacauuugagcuc

SEQ ID NO: 1984692 - RNA, 19 nt, Artificial Sequence
  Description of Artificial Sequence: Synthetic oligonucleotide
  Sense strand starting at position 2519 of SEQ ID NO: 1880669
gugauuggcgaaggaaaug

SEQ ID NO: 1984693 - RNA, 19 nt, Artificial Sequence
  Description of Artificial Sequence: Synthetic oligonucleotide
  Antisense strand to SEQ ID NO: 1984692
cauuuccuucgccaaucac

SEQ ID NO: 1984694 - RNA, 19 nt, Artificial Sequence
  Description of Artificial Sequence: Synthetic oligonucleotide
  Sense strand starting at position 2652 of SEQ ID NO: 1880669
ugcugagagcucuagauaa

SEQ ID NO: 1984695 - RNA, 19 nt, Artificial Sequence
  Description of Artificial Sequence: Synthetic oligonucleotide
  Antisense strand to SEQ ID NO: 1984694
uuaucuagagcucucagca

SEQ ID NO: 1984696 - RNA, 19 nt, Artificial Sequence
  Description of Artificial Sequence: Synthetic oligonucleotide
  Sense strand starting at position 2662 of SEQ ID NO: 1880669
ucuagauaaucuccaggua

SEQ ID NO: 1984697 - RNA, 19 nt, Artificial Sequence
  Description of Artificial Sequence: Synthetic oligonucleotide
  Antisense strand to SEQ ID NO: 1984696
uaccuggagauuaucuaga

SEQ ID NO: 1984698 - RNA, 19 nt, Artificial Sequence
  Description of Artificial Sequence: Synthetic oligonucleotide
  Sense strand starting at position 2665 of SEQ ID NO: 1880669
agauaaucuccagguaggu

SEQ ID NO: 1984699 - RNA, 19 nt, Artificial Sequence
  Description of Artificial Sequence: Synthetic oligonucleotide
  Antisense strand to SEQ ID NO: 1984698
accuaccuggagauuaucu

SEQ ID NO: 1984700 - RNA, 19 nt, Artificial Sequence
  Description of Artificial Sequence: Synthetic oligonucleotide
  Sense strand starting at position 2715 of SEQ ID NO: 1880669
uggagaaucucacuuucua

SEQ ID NO: 1984701 - RNA, 19 nt, Artificial Sequence
  Description of Artificial Sequence: Synthetic oligonucleotide
  Antisense strand to SEQ ID NO: 1984700
uagaaagugagauucucca

SEQ ID NO: 1984702 - RNA, 19 nt, Artificial Sequence
  Description of Artificial Sequence: Synthetic oligonucleotide
  Sense strand starting at position 2752 of SEQ ID NO: 1880669
cucagauaacuccgagggu

SEQ ID NO: 1984703 - RNA, 19 nt, Artificial Sequence
  Description of Artificial Sequence: Synthetic oligonucleotide
  Antisense strand to SEQ ID NO: 1984702
acccucggaguuaucugag

SEQ ID NO: 1984704 - RNA, 19 nt, Artificial Sequence
  Description of Artificial Sequence: Synthetic oligonucleotide
  Sense strand starting at position 2914 of SEQ ID NO: 1880669
ggccaaugguauccaucau

SEQ ID NO: 1984705 - RNA, 19 nt, Artificial Sequence
  Description of Artificial Sequence: Synthetic oligonucleotide
  Antisense strand to SEQ ID NO: 1984704
augauggauaccauuggcc

SEQ ID NO: 1984706 - RNA, 19 nt, Artificial Sequence
  Description of Artificial Sequence: Synthetic oligonucleotide
  Sense strand starting at position 2929 of SEQ ID NO: 1880669
ucauguuaaagagguaaga

SEQ ID NO: 1984707 - RNA, 19 nt, Artificial Sequence
  Description of Artificial Sequence: Synthetic oligonucleotide
  Antisense strand to SEQ ID NO: 1984706
ucuuaccucuuuaacauga

SEQ ID NO: 1984708 - RNA, 19 nt, Artificial Sequence
  Description of Artificial Sequence: Synthetic oligonucleotide
  Sense strand starting at position 3078 of SEQ ID NO: 1880669
ggaccaagugcggaguaau

SEQ ID NO: 1984709 - RNA, 19 nt, Artificial Sequence
  Description of Artificial Sequence: Synthetic oligonucleotide
  Antisense strand to SEQ ID NO: 1984708
auuacuccgcacuuggucc

SEQ ID NO: 1984710 - RNA, 19 nt, Artificial Sequence
  Description of Artificial Sequence: Synthetic oligonucleotide
  Sense strand starting at position 3109 of SEQ ID NO: 1880669
auuugagaagcucgucuua

SEQ ID NO: 1984711 - RNA, 19 nt, Artificial Sequence
  Description of Artificial Sequence: Synthetic oligonucleotide
  Antisense strand to SEQ ID NO: 1984710
uaagacgagcuucucaaau

SEQ ID NO: 1984712 - RNA, 19 nt, Artificial Sequence
  Description of Artificial Sequence: Synthetic oligonucleotide
  Sense strand starting at position 3147 of SEQ ID NO: 1880669
uaauaugugccucagagug

SEQ ID NO: 1984713 - RNA, 19 nt, Artificial Sequence
  Description of Artificial Sequence: Synthetic oligonucleotide
  Antisense strand to SEQ ID NO: 1984712
cacucugaggcacauauua

SEQ ID NO: 1984714 - RNA, 19 nt, Artificial Sequence
  Description of Artificial Sequence: Synthetic oligonucleotide
  Sense strand starting at position 3153 of SEQ ID NO: 1880669
gugccucagagugaaauua

SEQ ID NO: 1984715 - RNA, 19 nt, Artificial Sequence
  Description of Artificial Sequence: Synthetic oligonucleotide
  Antisense strand to SEQ ID NO: 1984714
uaauuucacucugaggcac

SEQ ID NO: 1984716 - RNA, 19 nt, Artificial Sequence
  Description of Artificial Sequence: Synthetic oligonucleotide
  Sense strand starting at position 3370 of SEQ ID NO: 1880669
guuguauaagauuguaaug

SEQ ID NO: 1984717 - RNA, 19 nt, Artificial Sequence
  Description of Artificial Sequence: Synthetic oligonucleotide
  Antisense strand to SEQ ID NO: 1984716
cauuacaaucuuauacaac

SEQ ID NO: 1984718 - RNA, 19 nt, Artificial Sequence
  Description of Artificial Sequence: Synthetic oligonucleotide
  Sense strand starting at position 3460 of SEQ ID NO: 1880669
uggacaguuauguggcaaa

SEQ ID NO: 1984719 - RNA, 19 nt, Artificial Sequence
  Description of Artificial Sequence: Synthetic oligonucleotide
  Antisense strand to SEQ ID NO: 1984718
uuugccacauaacugucca

SEQ ID NO: 1984720 - RNA, 19 nt, Artificial Sequence
  Description of Artificial Sequence: Synthetic oligonucleotide
  Sense strand starting at position 3598 of SEQ ID NO: 1880669
aguacucaguucuuacuga

SEQ ID NO: 1984721 - RNA, 19 nt, Artificial Sequence
  Description of Artificial Sequence: Synthetic oligonucleotide
  Antisense strand to SEQ ID NO: 1984720
ucaguaagaacugaguacu

SEQ ID NO: 1984722 - RNA, 19 nt, Artificial Sequence
  Description of Artificial Sequence: Synthetic oligonucleotide
  Sense strand starting at position 3818 of SEQ ID NO: 1880669
aagugugagcaauacuacu

SEQ ID NO: 1984723 - RNA, 19 nt, Artificial Sequence
  Description of Artificial Sequence: Synthetic oligonucleotide
  Antisense strand to SEQ ID NO: 1984722
aguaguauugcucacacuu

SEQ ID NO: 1984724 - RNA, 19 nt, Artificial Sequence
  Description of Artificial Sequence: Synthetic oligonucleotide
  Sense strand starting at position 2 of SEQ ID NO: 1880670
gcaucuucccucuggagga

SEQ ID NO: 1984725 - RNA, 19 nt, Artificial Sequence
  Description of Artificial Sequence: Synthetic oligonucleotide
  Antisense strand to SEQ ID NO: 1984724
uccuccagagggaagaugc

SEQ ID NO: 1984726 - RNA, 19 nt, Artificial Sequence
  Description of Artificial Sequence: Synthetic oligonucleotide
  Sense strand starting at position 395 of SEQ ID NO: 1880670
ggaguauggcuagagguau

SEQ ID NO: 1984727 - RNA, 19 nt, Artificial Sequence
  Description of Artificial Sequence: Synthetic oligonucleotide
  Antisense strand to SEQ ID NO: 1984726
auaccucuagccauacucc

SEQ ID NO: 1984728 - RNA, 19 nt, Artificial Sequence
  Description of Artificial Sequence: Synthetic oligonucleotide
  Sense strand starting at position 399 of SEQ ID NO: 1880670
uauggcuagagguauguau

SEQ ID NO: 1984729 - RNA, 19 nt, Artificial Sequence
  Description of Artificial Sequence: Synthetic oligonucleotide
  Antisense strand to SEQ ID NO: 1984728
auacauaccucuagccaua

SEQ ID NO: 1984730 - RNA, 19 nt, Artificial Sequence
  Description of Artificial Sequence: Synthetic oligonucleotide
  Sense strand starting at position 401 of SEQ ID NO: 1880670
uggcuagagguauguauaa

SEQ ID NO: 1984731 - RNA, 19 nt, Artificial Sequence
  Description of Artificial Sequence: Synthetic oligonucleotide
  Antisense strand to SEQ ID NO: 1984730
uuauacauaccucuagcca

SEQ ID NO: 1984732 - RNA, 19 nt, Artificial Sequence
  Description of Artificial Sequence: Synthetic oligonucleotide
  Sense strand starting at position 738 of SEQ ID NO: 1880670
aggugaaccucuguggaca

SEQ ID NO: 1984733 - RNA, 19 nt, Artificial Sequence
  Description of Artificial Sequence: Synthetic oligonucleotide
  Antisense strand to SEQ ID NO: 1984732
uguccacagagguucaccu

SEQ ID NO: 1984734 - RNA, 19 nt, Artificial Sequence
  Description of Artificial Sequence: Synthetic oligonucleotide
  Sense strand starting at position 761 of SEQ ID NO: 1880670
agauuagaacucugcaucu

SEQ ID NO: 1984735 - RNA, 19 nt, Artificial Sequence
  Description of Artificial Sequence: Synthetic oligonucleotide
  Antisense strand to SEQ ID NO: 1984734
agaugcagaguucuaaucu

SEQ ID NO: 1984736 - RNA, 19 nt, Artificial Sequence
  Description of Artificial Sequence: Synthetic oligonucleotide
  Sense strand starting at position 776 of SEQ ID NO: 1880670
aucuccuuugaguauacuu

SEQ ID NO: 1984737 - RNA, 19 nt, Artificial Sequence
  Description of Artificial Sequence: Synthetic oligonucleotide
  Antisense strand to SEQ ID NO: 1984736
aaguauacucaaaggagau

SEQ ID NO: 1984738 - RNA, 19 nt, Artificial Sequence
  Description of Artificial Sequence: Synthetic oligonucleotide
  Sense strand starting at position 800 of SEQ ID NO: 1880670
uuaguacacuuuccagauu

SEQ ID NO: 1984739 - RNA, 19 nt, Artificial Sequence
  Description of Artificial Sequence: Synthetic oligonucleotide
  Antisense strand to SEQ ID NO: 1984738
aaucuggaaaguguacuaa

SEQ ID NO: 1984740 - RNA, 19 nt, Artificial Sequence
  Description of Artificial Sequence: Synthetic oligonucleotide
  Sense strand starting at position 831 of SEQ ID NO: 1880670
ggguucuagaugcaaacuu

SEQ ID NO: 1984741 - RNA, 19 nt, Artificial Sequence
  Description of Artificial Sequence: Synthetic oligonucleotide
  Antisense strand to SEQ ID NO: 1984740
aaguuugcaucuagaaccc

SEQ ID NO: 1984742 - RNA, 19 nt, Artificial Sequence
  Description of Artificial Sequence: Synthetic oligonucleotide
  Sense strand starting at position 989 of SEQ ID NO: 1880670
uuaacaguguguucuugaa

SEQ ID NO: 1984743 - RNA, 19 nt, Artificial Sequence
  Description of Artificial Sequence: Synthetic oligonucleotide
  Antisense strand to SEQ ID NO: 1984742
uucaagaacacacuguuaa

SEQ ID NO: 1984744 - RNA, 19 nt, Artificial Sequence
  Description of Artificial Sequence: Synthetic oligonucleotide
  Sense strand starting at position 993 of SEQ ID NO: 1880670
caguguguucuugaaguca

SEQ ID NO: 1984745 - RNA, 19 nt, Artificial Sequence
  Description of Artificial Sequence: Synthetic oligonucleotide
  Antisense strand to SEQ ID NO: 1984744
ugacuucaagaacacacug

SEQ ID NO: 1984746 - RNA, 19 nt, Artificial Sequence
  Description of Artificial Sequence: Synthetic oligonucleotide
  Sense strand starting at position 1093 of SEQ ID NO: 1880670
auguuuauggugcaaucuu

SEQ ID NO: 1984747 - RNA, 19 nt, Artificial Sequence
  Description of Artificial Sequence: Synthetic oligonucleotide
  Antisense strand to SEQ ID NO: 1984746
aagauugcaccauaaacau

SEQ ID NO: 1984748 - RNA, 19 nt, Artificial Sequence
  Description of Artificial Sequence: Synthetic oligonucleotide
  Sense strand starting at position 1101 of SEQ ID NO: 1880670
ggugcaaucuuuccuggag

SEQ ID NO: 1984749 - RNA, 19 nt, Artificial Sequence
  Description of Artificial Sequence: Synthetic oligonucleotide
  Antisense strand to SEQ ID NO: 1984748
cuccaggaaagauugcacc

SEQ ID NO: 1984750 - RNA, 19 nt, Artificial Sequence
  Description of Artificial Sequence: Synthetic oligonucleotide
  Sense strand starting at position 1102 of SEQ ID NO: 1880670
gugcaaucuuuccuggaga

SEQ ID NO: 1984751 - RNA, 19 nt, Artificial Sequence
  Description of Artificial Sequence: Synthetic oligonucleotide
  Antisense strand to SEQ ID NO: 1984750
ucuccaggaaagauugcac

SEQ ID NO: 1984752 - RNA, 19 nt, Artificial Sequence
  Description of Artificial Sequence: Synthetic oligonucleotide
  Sense strand starting at position 1104 of SEQ ID NO: 1880670
gcaaucuuuccuggagacu

SEQ ID NO: 1984753 - RNA, 19 nt, Artificial Sequence
  Description of Artificial Sequence: Synthetic oligonucleotide
  Antisense strand to SEQ ID NO: 1984752
agucuccaggaaagauugc

SEQ ID NO: 1984754 - RNA, 19 nt, Artificial Sequence
  Description of Artificial Sequence: Synthetic oligonucleotide
  Sense strand starting at position 1150 of SEQ ID NO: 1880670
guagacaucuaguuuccua

SEQ ID NO: 1984755 - RNA, 19 nt, Artificial Sequence
  Description of Artificial Sequence: Synthetic oligonucleotide
  Antisense strand to SEQ ID NO: 1984754
uaggaaacuagaugucuac

SEQ ID NO: 1984756 - RNA, 19 nt, Artificial Sequence
  Description of Artificial Sequence: Synthetic oligonucleotide
  Sense strand starting at position 1214 of SEQ ID NO: 1880670
uccagacccugaucgauaa

SEQ ID NO: 1984757 - RNA, 19 nt, Artificial Sequence
  Description of Artificial Sequence: Synthetic oligonucleotide
  Antisense strand to SEQ ID NO: 1984756
uuaucgaucagggucugga

SEQ ID NO: 1984758 - RNA, 19 nt, Artificial Sequence
  Description of Artificial Sequence: Synthetic oligonucleotide
  Sense strand starting at position 1215 of SEQ ID NO: 1880670
ccagacccugaucgauaaa

SEQ ID NO: 1984759 - RNA, 19 nt, Artificial Sequence
  Description of Artificial Sequence: Synthetic oligonucleotide
  Antisense strand to SEQ ID NO: 1984758
uuuaucgaucagggucugg

SEQ ID NO: 1984760 - RNA, 19 nt, Artificial Sequence
  Description of Artificial Sequence: Synthetic oligonucleotide
  Sense strand starting at position 1274 of SEQ ID NO: 1880670
uuaaaugaguugcucaaau

SEQ ID NO: 1984761 - RNA, 19 nt, Artificial Sequence
  Description of Artificial Sequence: Synthetic oligonucleotide
  Antisense strand to SEQ ID NO: 1984760
auuugagcaacucauuuaa

SEQ ID NO: 1984762 - RNA, 19 nt, Artificial Sequence
  Description of Artificial Sequence: Synthetic oligonucleotide
  Sense strand starting at position 1276 of SEQ ID NO: 1880670
aaaugaguugcucaaaugu

SEQ ID NO: 1984763 - RNA, 19 nt, Artificial Sequence
  Description of Artificial Sequence: Synthetic oligonucleotide
  Antisense strand to SEQ ID NO: 1984762
acauuugagcaacucauuu

SEQ ID NO: 1984764 - RNA, 19 nt, Artificial Sequence
  Description of Artificial Sequence: Synthetic oligonucleotide
  Sense strand starting at position 1340 of SEQ ID NO: 1880670
agucuuuggcauuaacuau

SEQ ID NO: 1984765 - RNA, 19 nt, Artificial Sequence
  Description of Artificial Sequence: Synthetic oligonucleotide
  Antisense strand to SEQ ID NO: 1984764
auaguuaaugccaaagacu

SEQ ID NO: 1984766 - RNA, 19 nt, Artificial Sequence
  Description of Artificial Sequence: Synthetic oligonucleotide
  Sense strand starting at position 1347 of SEQ ID NO: 1880670
ggcauuaacuauccuugau

SEQ ID NO: 1984767 - RNA, 19 nt, Artificial Sequence
  Description of Artificial Sequence: Synthetic oligonucleotide
  Antisense strand to SEQ ID NO: 1984766
aucaaggauaguuaaugcc

SEQ ID NO: 1984768 - RNA, 19 nt, Artificial Sequence
  Description of Artificial Sequence: Synthetic oligonucleotide
  Sense strand starting at position 1362 of SEQ ID NO: 1880670
ugauuagucugagcauaua

SEQ ID NO: 1984769 - RNA, 19 nt, Artificial Sequence
  Description of Artificial Sequence: Synthetic oligonucleotide
  Antisense strand to SEQ ID NO: 1984768
uauaugcucagacuaauca

SEQ ID NO: 1984770 - RNA, 19 nt, Artificial Sequence
  Description of Artificial Sequence: Synthetic oligonucleotide
  Sense strand starting at position 1365 of SEQ ID NO: 1880670
uuagucugagcauauauga

SEQ ID NO: 1984771 - RNA, 19 nt, Artificial Sequence
  Description of Artificial Sequence: Synthetic oligonucleotide
  Antisense strand to SEQ ID NO: 1984770
ucauauaugcucagacuaa

SEQ ID NO: 1984772 - RNA, 19 nt, Artificial Sequence
  Description of Artificial Sequence: Synthetic oligonucleotide
  Sense strand starting at position 1578 of SEQ ID NO: 1880670
auuguuauccauugggcaa

SEQ ID NO: 1984773 - RNA, 19 nt, Artificial Sequence
  Description of Artificial Sequence: Synthetic oligonucleotide
  Antisense strand to SEQ ID NO: 1984772
uugcccaauggauaacaau

SEQ ID NO: 1984774 - RNA, 19 nt, Artificial Sequence
  Description of Artificial Sequence: Synthetic oligonucleotide
  Sense strand starting at position 1743 of SEQ ID NO: 1880670
acaaaucuugccuaauggu

SEQ ID NO: 1984775 - RNA, 19 nt, Artificial Sequence
  Description of Artificial Sequence: Synthetic oligonucleotide
  Antisense strand to SEQ ID NO: 1984774
accauuaggcaagauuugu

SEQ ID NO: 1984776 - RNA, 19 nt, Artificial Sequence
  Description of Artificial Sequence: Synthetic oligonucleotide
  Sense strand starting at position 1749 of SEQ ID NO: 1880670
cuugccuaaugguuaacau

SEQ ID NO: 1984777 - RNA, 19 nt, Artificial Sequence
  Description of Artificial Sequence: Synthetic oligonucleotide
  Antisense strand to SEQ ID NO: 1984776
auguuaaccauuaggcaag

SEQ ID NO: 1984778 - RNA, 19 nt, Artificial Sequence
  Description of Artificial Sequence: Synthetic oligonucleotide
  Sense strand starting at position 1750 of SEQ ID NO: 1880670
uugccuaaugguuaacaua

SEQ ID NO: 1984779 - RNA, 19 nt, Artificial Sequence
  Description of Artificial Sequence: Synthetic oligonucleotide
  Antisense strand to SEQ ID NO: 1984778
uauguuaaccauuaggcaa

SEQ ID NO: 1984780 - RNA, 19 nt, Artificial Sequence
  Description of Artificial Sequence: Synthetic oligonucleotide
  Sense strand starting at position 1808 of SEQ ID NO: 1880670
uuugcaucacaguaagcau

SEQ ID NO: 1984781 - RNA, 19 nt, Artificial Sequence
  Description of Artificial Sequence: Synthetic oligonucleotide
  Antisense strand to SEQ ID NO: 1984780
augcuuacugugaugcaaa

SEQ ID NO: 1984782 - RNA, 19 nt, Artificial Sequence
  Description of Artificial Sequence: Synthetic oligonucleotide
  Sense strand starting at position 2005 of SEQ ID NO: 1880670
gaaagaaguuaugucucua

SEQ ID NO: 1984783 - RNA, 19 nt, Artificial Sequence
  Description of Artificial Sequence: Synthetic oligonucleotide
  Antisense strand to SEQ ID NO: 1984782
uagagacauaacuucuuuc

SEQ ID NO: 1984784 - RNA, 19 nt, Artificial Sequence
  Description of Artificial Sequence: Synthetic oligonucleotide
  Sense strand starting at position 2009 of SEQ ID NO: 1880670
gaaguuaugucucuauaga

SEQ ID NO: 1984785 - RNA, 19 nt, Artificial Sequence
  Description of Artificial Sequence: Synthetic oligonucleotide
  Antisense strand to SEQ ID NO: 1984784
ucuauagagacauaacuuc

SEQ ID NO: 1984786 - RNA, 19 nt, Artificial Sequence
  Description of Artificial Sequence: Synthetic oligonucleotide
  Sense strand starting at position 2059 of SEQ ID NO: 1880670
aaucgagcccacuauguau

SEQ ID NO: 1984787 - RNA, 19 nt, Artificial Sequence
  Description of Artificial Sequence: Synthetic oligonucleotide
  Antisense strand to SEQ ID NO: 1984786
auacauagugggcucgauu

SEQ ID NO: 1984788 - RNA, 19 nt, Artificial Sequence
  Description of Artificial Sequence: Synthetic oligonucleotide
  Sense strand starting at position 2401 of SEQ ID NO: 1880670
aaaugugaugcuugauuaa

SEQ ID NO: 1984789 - RNA, 19 nt, Artificial Sequence
  Description of Artificial Sequence: Synthetic oligonucleotide
  Antisense strand to SEQ ID NO: 1984788
uuaaucaagcaucacauuu

SEQ ID NO: 1984790 - RNA, 19 nt, Artificial Sequence
  Description of Artificial Sequence: Synthetic oligonucleotide
  Sense strand starting at position 2503 of SEQ ID NO: 1880670
ccacaauucuuuguacgau

SEQ ID NO: 1984791 - RNA, 19 nt, Artificial Sequence
  Description of Artificial Sequence: Synthetic oligonucleotide
  Antisense strand to SEQ ID NO: 1984790
aucguacaaagaauugugg

SEQ ID NO: 1984792 - RNA, 19 nt, Artificial Sequence
  Description of Artificial Sequence: Synthetic oligonucleotide
  Sense strand starting at position 2913 of SEQ ID NO: 1880670
guaggcaaaucagucuaaa

SEQ ID NO: 1984793 - RNA, 19 nt, Artificial Sequence
  Description of Artificial Sequence: Synthetic oligonucleotide
  Antisense strand to SEQ ID NO: 1984792
uuuagacugauuugccuac

SEQ ID NO: 1984794 - RNA, 19 nt, Artificial Sequence
  Description of Artificial Sequence: Synthetic oligonucleotide
  Sense strand starting at position 3562 of SEQ ID NO: 1880670
auagguguuguauauugau

SEQ ID NO: 1984795 - RNA, 19 nt, Artificial Sequence
  Description of Artificial Sequence: Synthetic oligonucleotide
  Antisense strand to SEQ ID NO: 1984794
aucaauauacaacaccuau

SEQ ID NO: 1984796 - RNA, 19 nt, Artificial Sequence
  Description of Artificial Sequence: Synthetic oligonucleotide
  Sense strand starting at position 3766 of SEQ ID NO: 1880670
uaagauuaaugggagagaa

SEQ ID NO: 1984797 - RNA, 19 nt, Artificial Sequence
  Description of Artificial Sequence: Synthetic oligonucleotide
  Antisense strand to SEQ ID NO: 1984796
uucucucccauuaaucuua

SEQ ID NO: 1984798 - RNA, 19 nt, Artificial Sequence
  Description of Artificial Sequence: Synthetic oligonucleotide
  Sense strand starting at position 3855 of SEQ ID NO: 1880670
agaagucauuucuaaauag

SEQ ID NO: 1984799 - RNA, 19 nt, Artificial Sequence
  Description of Artificial Sequence: Synthetic oligonucleotide
  Antisense strand to SEQ ID NO: 1984798
cuauuuagaaaugacuucu

SEQ ID NO: 1984800 - RNA, 19 nt, Artificial Sequence
  Description of Artificial Sequence: Synthetic oligonucleotide
  Sense strand starting at position 3885 of SEQ ID NO: 1880670
cugucaggugguuaguaaa

SEQ ID NO: 1984801 - RNA, 19 nt, Artificial Sequence
  Description of Artificial Sequence: Synthetic oligonucleotide
  Antisense strand to SEQ ID NO: 1984800
uuuacuaaccaccugacag

SEQ ID NO: 1984802 - RNA, 19 nt, Artificial Sequence
  Description of Artificial Sequence: Synthetic oligonucleotide
  Sense strand starting at position 3951 of SEQ ID NO: 1880670
aucuguaaaccuuguuaag

SEQ ID NO: 1984803 - RNA, 19 nt, Artificial Sequence
  Description of Artificial Sequence: Synthetic oligonucleotide
  Antisense strand to SEQ ID NO: 1984802
cuuaacaagguuuacagau

SEQ ID NO: 1984804 - RNA, 19 nt, Artificial Sequence
  Description of Artificial Sequence: Synthetic oligonucleotide
  Sense strand starting at position 1 of SEQ ID NO: 1880671
cuugaauugucuccaugug

SEQ ID NO: 1984805 - RNA, 19 nt, Artificial Sequence
  Description of Artificial Sequence: Synthetic oligonucleotide
  Antisense strand to SEQ ID NO: 1984804
cacauggagacaauucaag

SEQ ID NO: 1984806 - RNA, 19 nt, Artificial Sequence
  Description of Artificial Sequence: Synthetic oligonucleotide
  Sense strand starting at position 2 of SEQ ID NO: 1880671
uugaauugucuccaugugu

SEQ ID NO: 1984807 - RNA, 19 nt, Artificial Sequence
  Description of Artificial Sequence: Synthetic oligonucleotide
  Antisense strand to SEQ ID NO: 1984806
acacauggagacaauucaa

SEQ ID NO: 1984808 - RNA, 19 nt, Artificial Sequence
  Description of Artificial Sequence: Synthetic oligonucleotide
  Sense strand starting at position 39 of SEQ ID NO: 1880671
ccugguuucucucugguca

SEQ ID NO: 1984809 - RNA, 19 nt, Artificial Sequence
  Description of Artificial Sequence: Synthetic oligonucleotide
  Antisense strand to SEQ ID NO: 1984808
ugaccagagagaaaccagg

SEQ ID NO: 1984810 - RNA, 19 nt, Artificial Sequence
  Description of Artificial Sequence: Synthetic oligonucleotide
  Sense strand starting at position 40 of SEQ ID NO: 1880671
cugguuucucucuggucau

SEQ ID NO: 1984811 - RNA, 19 nt, Artificial Sequence
  Description of Artificial Sequence: Synthetic oligonucleotide
  Antisense strand to SEQ ID NO: 1984810
augaccagagagaaaccag

SEQ ID NO: 1984812 - RNA, 19 nt, Artificial Sequence
  Description of Artificial Sequence: Synthetic oligonucleotide
  Sense strand starting at position 454 of SEQ ID NO: 1880671
aggccagaucccugguaau

SEQ ID NO: 1984813 - RNA, 19 nt, Artificial Sequence
  Description of Artificial Sequence: Synthetic oligonucleotide
  Antisense strand to SEQ ID NO: 1984812
auuaccagggaucuggccu

SEQ ID NO: 1984814 - RNA, 19 nt, Artificial Sequence
  Description of Artificial Sequence: Synthetic oligonucleotide
  Sense strand starting at position 484 of SEQ ID NO: 1880671
gcagucuuaggauggauag

SEQ ID NO: 1984815 - RNA, 19 nt, Artificial Sequence
  Description of Artificial Sequence: Synthetic oligonucleotide
  Antisense strand to SEQ ID NO: 1984814
cuauccauccuaagacugc

SEQ ID NO: 1984816 - RNA, 19 nt, Artificial Sequence
  Description of Artificial Sequence: Synthetic oligonucleotide
  Sense strand starting at position 485 of SEQ ID NO: 1880671
cagucuuaggauggauagu

SEQ ID NO: 1984817 - RNA, 19 nt, Artificial Sequence
  Description of Artificial Sequence: Synthetic oligonucleotide
  Antisense strand to SEQ ID NO: 1984816
acuauccauccuaagacug

SEQ ID NO: 1984818 - RNA, 19 nt, Artificial Sequence
  Description of Artificial Sequence: Synthetic oligonucleotide
  Sense strand starting at position 542 of SEQ ID NO: 1880671
ggcaguaauucucagucac

SEQ ID NO: 1984819 - RNA, 19 nt, Artificial Sequence
  Description of Artificial Sequence: Synthetic oligonucleotide
  Antisense strand to SEQ ID NO: 1984818
gugacugagaauuacugcc

SEQ ID NO: 1984820 - RNA, 19 nt, Artificial Sequence
  Description of Artificial Sequence: Synthetic oligonucleotide
  Sense strand starting at position 664 of SEQ ID NO: 1880671
ggucauuccaagcagagau

SEQ ID NO: 1984821 - RNA, 19 nt, Artificial Sequence
  Description of Artificial Sequence: Synthetic oligonucleotide
  Antisense strand to SEQ ID NO: 1984820
aucucugcuuggaaugacc

SEQ ID NO: 1984822 - RNA, 19 nt, Artificial Sequence
  Description of Artificial Sequence: Synthetic oligonucleotide
  Sense strand starting at position 676 of SEQ ID NO: 1880671
cagagaucucuuuguugug

SEQ ID NO: 1984823 - RNA, 19 nt, Artificial Sequence
  Description of Artificial Sequence: Synthetic oligonucleotide
  Antisense strand to SEQ ID NO: 1984822
cacaacaaagagaucucug

SEQ ID NO: 1984824 - RNA, 19 nt, Artificial Sequence
  Description of Artificial Sequence: Synthetic oligonucleotide
  Sense strand starting at position 678 of SEQ ID NO: 1880671
gagaucucuuuguugugca

SEQ ID NO: 1984825 - RNA, 19 nt, Artificial Sequence
  Description of Artificial Sequence: Synthetic oligonucleotide
  Antisense strand to SEQ ID NO: 1984824
ugcacaacaaagagaucuc

SEQ ID NO: 1984826 - RNA, 19 nt, Artificial Sequence
  Description of Artificial Sequence: Synthetic oligonucleotide
  Sense strand starting at position 679 of SEQ ID NO: 1880671
agaucucuuuguugugcaa

SEQ ID NO: 1984827 - RNA, 19 nt, Artificial Sequence
  Description of Artificial Sequence: Synthetic oligonucleotide
  Antisense strand to SEQ ID NO: 1984826
uugcacaacaaagagaucu

SEQ ID NO: 1984828 - RNA, 19 nt, Artificial Sequence
  Description of Artificial Sequence: Synthetic oligonucleotide
  Sense strand starting at position 929 of SEQ ID NO: 1880671
cacgaagagcccugcugua

SEQ ID NO: 1984829 - RNA, 19 nt, Artificial Sequence
  Description of Artificial Sequence: Synthetic oligonucleotide
  Antisense strand to SEQ ID NO: 1984828
uacagcagggcucuucgug

SEQ ID NO: 1984830 - RNA, 19 nt, Artificial Sequence
  Description of Artificial Sequence: Synthetic oligonucleotide
  Sense strand starting at position 967 of SEQ ID NO: 1880671
cugccugggaucuguccaa

SEQ ID NO: 1984831 - RNA, 19 nt, Artificial Sequence
  Description of Artificial Sequence: Synthetic oligonucleotide
  Antisense strand to SEQ ID NO: 1984830
uuggacagaucccaggcag

SEQ ID NO: 1984832 - RNA, 19 nt, Artificial Sequence
  Description of Artificial Sequence: Synthetic oligonucleotide
  Sense strand starting at position 1055 of SEQ ID NO: 1880671
uggguaguugggugacaua

SEQ ID NO: 1984833 - RNA, 19 nt, Artificial Sequence
  Description of Artificial Sequence: Synthetic oligonucleotide
  Antisense strand to SEQ ID NO: 1984832
uaugucacccaacuaccca

SEQ ID NO: 1984834 - RNA, 19 nt, Artificial Sequence
  Description of Artificial Sequence: Synthetic oligonucleotide
  Sense strand starting at position 1232 of SEQ ID NO: 1880671
gugggauucugagguuuga

SEQ ID NO: 1984835 - RNA, 19 nt, Artificial Sequence
  Description of Artificial Sequence: Synthetic oligonucleotide
  Antisense strand to SEQ ID NO: 1984834
ucaaaccucagaaucccac

SEQ ID NO: 1984836 - RNA, 19 nt, Artificial Sequence
  Description of Artificial Sequence: Synthetic oligonucleotide
  Sense strand starting at position 1236 of SEQ ID NO: 1880671
gauucugagguuugaggaa

SEQ ID NO: 1984837 - RNA, 19 nt, Artificial Sequence
  Description of Artificial Sequence: Synthetic oligonucleotide
  Antisense strand to SEQ ID NO: 1984836
uuccucaaaccucagaauc

SEQ ID NO: 1984838 - RNA, 19 nt, Artificial Sequence
  Description of Artificial Sequence: Synthetic oligonucleotide
  Sense strand starting at position 1299 of SEQ ID NO: 1880671
cugacugucucagacguuu

SEQ ID NO: 1984839 - RNA, 19 nt, Artificial Sequence
  Description of Artificial Sequence: Synthetic oligonucleotide
  Antisense strand to SEQ ID NO: 1984838
aaacgucugagacagucag

SEQ ID NO: 1984840 - RNA, 19 nt, Artificial Sequence
  Description of Artificial Sequence: Synthetic oligonucleotide
  Sense strand starting at position 1353 of SEQ ID NO: 1880671
gugacaucucaggauguca

SEQ ID NO: 1984841 - RNA, 19 nt, Artificial Sequence
  Description of Artificial Sequence: Synthetic oligonucleotide
  Antisense strand to SEQ ID NO: 1984840
ugacauccugagaugucac

SEQ ID NO: 1984842 - RNA, 19 nt, Artificial Sequence
  Description of Artificial Sequence: Synthetic oligonucleotide
  Sense strand starting at position 1597 of SEQ ID NO: 1880671
cgggaaaugacuugcccaa

SEQ ID NO: 1984843 - RNA, 19 nt, Artificial Sequence
  Description of Artificial Sequence: Synthetic oligonucleotide
  Antisense strand to SEQ ID NO: 1984842
uugggcaagucauuucccg

SEQ ID NO: 1984844 - RNA, 19 nt, Artificial Sequence
  Description of Artificial Sequence: Synthetic oligonucleotide
  Sense strand starting at position 1726 of SEQ ID NO: 1880671
cccguauuacgacgcagaa

SEQ ID NO: 1984845 - RNA, 19 nt, Artificial Sequence
  Description of Artificial Sequence: Synthetic oligonucleotide
  Antisense strand to SEQ ID NO: 1984844
uucugcgucguaauacggg

SEQ ID NO: 1984846 - RNA, 19 nt, Artificial Sequence
  Description of Artificial Sequence: Synthetic oligonucleotide
  Sense strand starting at position 1728 of SEQ ID NO: 1880671
cguauuacgacgcagaaug

SEQ ID NO: 1984847 - RNA, 19 nt, Artificial Sequence
  Description of Artificial Sequence: Synthetic oligonucleotide
  Antisense strand to SEQ ID NO: 1984846
cauucugcgucguaauacg

SEQ ID NO: 1984848 - RNA, 19 nt, Artificial Sequence
  Description of Artificial Sequence: Synthetic oligonucleotide
  Sense strand starting at position 2280 of SEQ ID NO: 1880671
ggcuccgugugcucuuaua

SEQ ID NO: 1984849 - RNA, 19 nt, Artificial Sequence
  Description of Artificial Sequence: Synthetic oligonucleotide
  Antisense strand to SEQ ID NO: 1984848
uauaagagcacacggagcc

SEQ ID NO: 1984850 - RNA, 19 nt, Artificial Sequence
  Description of Artificial Sequence: Synthetic oligonucleotide
  Sense strand starting at position 2282 of SEQ ID NO: 1880671
cuccgugugcucuuauacu

SEQ ID NO: 1984851 - RNA, 19 nt, Artificial Sequence
  Description of Artificial Sequence: Synthetic oligonucleotide
  Antisense strand to SEQ ID NO: 1984850
aguauaagagcacacggag

SEQ ID NO: 1984852 - RNA, 19 nt, Artificial Sequence
  Description of Artificial Sequence: Synthetic oligonucleotide
  Sense strand starting at position 2586 of SEQ ID NO: 1880671
ccgagagguggguauccau

SEQ ID NO: 1984853 - RNA, 19 nt, Artificial Sequence
  Description of Artificial Sequence: Synthetic oligonucleotide
  Antisense strand to SEQ ID NO: 1984852
auggauacccaccucucgg

SEQ ID NO: 1984854 - RNA, 19 nt, Artificial Sequence
  Description of Artificial Sequence: Synthetic oligonucleotide
  Sense strand starting at position 2607 of SEQ ID NO: 1880671
ucgucugaggacugauuca

SEQ ID NO: 1984855 - RNA, 19 nt, Artificial Sequence
  Description of Artificial Sequence: Synthetic oligonucleotide
  Antisense strand to SEQ ID NO: 1984854
ugaaucaguccucagacga

SEQ ID NO: 1984856 - RNA, 19 nt, Artificial Sequence
  Description of Artificial Sequence: Synthetic oligonucleotide
  Sense strand starting at position 2617 of SEQ ID NO: 1880671
acugauucacagugggagu

SEQ ID NO: 1984857 - RNA, 19 nt, Artificial Sequence
  Description of Artificial Sequence: Synthetic oligonucleotide
  Antisense strand to SEQ ID NO: 1984856
acucccacugugaaucagu

SEQ ID NO: 1984858 - RNA, 19 nt, Artificial Sequence
  Description of Artificial Sequence: Synthetic oligonucleotide
  Sense strand starting at position 2645 of SEQ ID NO: 1880671
gggucuguggcccgaaauc

SEQ ID NO: 1984859 - RNA, 19 nt, Artificial Sequence
  Description of Artificial Sequence: Synthetic oligonucleotide
  Antisense strand to SEQ ID NO: 1984858
gauuucgggccacagaccc

SEQ ID NO: 1984860 - RNA, 19 nt, Artificial Sequence
  Description of Artificial Sequence: Synthetic oligonucleotide
  Sense strand starting at position 2655 of SEQ ID NO: 1880671
cccgaaauccaguggugac

SEQ ID NO: 1984861 - RNA, 19 nt, Artificial Sequence
  Description of Artificial Sequence: Synthetic oligonucleotide
  Antisense strand to SEQ ID NO: 1984860
gucaccacuggauuucggg

SEQ ID NO: 1984862 - RNA, 19 nt, Artificial Sequence
  Description of Artificial Sequence: Synthetic oligonucleotide
  Sense strand starting at position 3303 of SEQ ID NO: 1880671
gggucagacuccuggaaga

SEQ ID NO: 1984863 - RNA, 19 nt, Artificial Sequence
  Description of Artificial Sequence: Synthetic oligonucleotide
  Antisense strand to SEQ ID NO: 1984862
ucuuccaggagucugaccc

SEQ ID NO: 1984864 - RNA, 19 nt, Artificial Sequence
  Description of Artificial Sequence: Synthetic oligonucleotide
  Sense strand starting at position 3503 of SEQ ID NO: 1880671
ccaggauguucuggaucau

SEQ ID NO: 1984865 - RNA, 19 nt, Artificial Sequence
  Description of Artificial Sequence: Synthetic oligonucleotide
  Antisense strand to SEQ ID NO: 1984864
augauccagaacauccugg

SEQ ID NO: 1984866 - RNA, 19 nt, Artificial Sequence
  Description of Artificial Sequence: Synthetic oligonucleotide
  Sense strand starting at position 3647 of SEQ ID NO: 1880671
ccgcgagcucuacggagau

SEQ ID NO: 1984867 - RNA, 19 nt, Artificial Sequence
  Description of Artificial Sequence: Synthetic oligonucleotide
  Antisense strand to SEQ ID NO: 1984866
aucuccguagagcucgcgg

SEQ ID NO: 1984868 - RNA, 19 nt, Artificial Sequence
  Description of Artificial Sequence: Synthetic oligonucleotide
  Sense strand starting at position 3657 of SEQ ID NO: 1880671
uacggagauucccauucga

SEQ ID NO: 1984869 - RNA, 19 nt, Artificial Sequence
  Description of Artificial Sequence: Synthetic oligonucleotide
  Antisense strand to SEQ ID NO: 1984868
ucgaaugggaaucuccgua

SEQ ID NO: 1984870 - RNA, 19 nt, Artificial Sequence
  Description of Artificial Sequence: Synthetic oligonucleotide
  Sense strand starting at position 3758 of SEQ ID NO: 1880671
caaauaugcugcugguuua

SEQ ID NO: 1984871 - RNA, 19 nt, Artificial Sequence
  Description of Artificial Sequence: Synthetic oligonucleotide
  Antisense strand to SEQ ID NO: 1984870
uaaaccagcagcauauuug

SEQ ID NO: 1984872 - RNA, 19 nt, Artificial Sequence
  Description of Artificial Sequence: Synthetic oligonucleotide
  Sense strand starting at position 3759 of SEQ ID NO: 1880671
aaauaugcugcugguuuaa

SEQ ID NO: 1984873 - RNA, 19 nt, Artificial Sequence
  Description of Artificial Sequence: Synthetic oligonucleotide
  Antisense strand to SEQ ID NO: 1984872
uuaaaccagcagcauauuu

SEQ ID NO: 1984874 - RNA, 19 nt, Artificial Sequence
  Description of Artificial Sequence: Synthetic oligonucleotide
  Sense strand starting at position 3799 of SEQ ID NO: 1880671
cgauguaguaggcaucuca

SEQ ID NO: 1984875 - RNA, 19 nt, Artificial Sequence
  Description of Artificial Sequence: Synthetic oligonucleotide
  Antisense strand to SEQ ID NO: 1984874
ugagaugccuacuacaucg

SEQ ID NO: 1984876 - RNA, 19 nt, Artificial Sequence
  Description of Artificial Sequence: Synthetic oligonucleotide
  Sense strand starting at position 3896 of SEQ ID NO: 1880671
ugacauaaaucaucuguag

SEQ ID NO: 1984877 - RNA, 19 nt, Artificial Sequence
  Description of Artificial Sequence: Synthetic oligonucleotide
  Antisense strand to SEQ ID NO: 1984876
cuacagaugauuuauguca

SEQ ID NO: 1984878 - RNA, 19 nt, Artificial Sequence
  Description of Artificial Sequence: Synthetic oligonucleotide
  Sense strand starting at position 48 of SEQ ID NO: 1880672
gugaugaucuuggcgguga

SEQ ID NO: 1984879 - RNA, 19 nt, Artificial Sequence
  Description of Artificial Sequence: Synthetic oligonucleotide
  Antisense strand to SEQ ID NO: 1984878
ucaccgccaagaucaucac

SEQ ID NO: 1984880 - RNA, 19 nt, Artificial Sequence
  Description of Artificial Sequence: Synthetic oligonucleotide
  Sense strand starting at position 167 of SEQ ID NO: 1880672
ggugauggcagagaugguu

SEQ ID NO: 1984881 - RNA, 19 nt, Artificial Sequence
  Description of Artificial Sequence: Synthetic oligonucleotide
  Antisense strand to SEQ ID NO: 1984880
aaccaucucugccaucacc

SEQ ID NO: 1984882 - RNA, 19 nt, Artificial Sequence
  Description of Artificial Sequence: Synthetic oligonucleotide
  Sense strand starting at position 187 of SEQ ID NO: 1880672
caaugcugagagugaugau

SEQ ID NO: 1984883 - RNA, 19 nt, Artificial Sequence
  Description of Artificial Sequence: Synthetic oligonucleotide
  Antisense strand to SEQ ID NO: 1984882
aucaucacucucagcauug

SEQ ID NO: 1984884 - RNA, 19 nt, Artificial Sequence
  Description of Artificial Sequence: Synthetic oligonucleotide
  Sense strand starting at position 212 of SEQ ID NO: 1880672
ggugacgauggugauauaa

SEQ ID NO: 1984885 - RNA, 19 nt, Artificial Sequence
  Description of Artificial Sequence: Synthetic oligonucleotide
  Antisense strand to SEQ ID NO: 1984884
uuauaucaccaucgucacc

SEQ ID NO: 1984886 - RNA, 19 nt, Artificial Sequence
  Description of Artificial Sequence: Synthetic oligonucleotide
  Sense strand starting at position 302 of SEQ ID NO: 1880672
ccaccugugaccuguggau

SEQ ID NO: 1984887 - RNA, 19 nt, Artificial Sequence
  Description of Artificial Sequence: Synthetic oligonucleotide
  Antisense strand to SEQ ID NO: 1984886
auccacaggucacaggugg

SEQ ID NO: 1984888 - RNA, 19 nt, Artificial Sequence
  Description of Artificial Sequence: Synthetic oligonucleotide
  Sense strand starting at position 425 of SEQ ID NO: 1880672
ggcauugcccucugaacuu

SEQ ID NO: 1984889 - RNA, 19 nt, Artificial Sequence
  Description of Artificial Sequence: Synthetic oligonucleotide
  Antisense strand to SEQ ID NO: 1984888
aaguucagagggcaaugcc

SEQ ID NO: 1984890 - RNA, 19 nt, Artificial Sequence
  Description of Artificial Sequence: Synthetic oligonucleotide
  Sense strand starting at position 447 of SEQ ID NO: 1880672
cccagaugugcugaggaca

SEQ ID NO: 1984891 - RNA, 19 nt, Artificial Sequence
  Description of Artificial Sequence: Synthetic oligonucleotide
  Antisense strand to SEQ ID NO: 1984890
uguccucagcacaucuggg

SEQ ID NO: 1984892 - RNA, 19 nt, Artificial Sequence
  Description of Artificial Sequence: Synthetic oligonucleotide
  Sense strand starting at position 605 of SEQ ID NO: 1880672
gcagaaugcuggguucuga

SEQ ID NO: 1984893 - RNA, 19 nt, Artificial Sequence
  Description of Artificial Sequence: Synthetic oligonucleotide
  Antisense strand to SEQ ID NO: 1984892
ucagaacccagcauucugc

SEQ ID NO: 1984894 - RNA, 19 nt, Artificial Sequence
  Description of Artificial Sequence: Synthetic oligonucleotide
  Sense strand starting at position 684 of SEQ ID NO: 1880672
uaggaagguuaauaagauc

SEQ ID NO: 1984895 - RNA, 19 nt, Artificial Sequence
  Description of Artificial Sequence: Synthetic oligonucleotide
  Antisense strand to SEQ ID NO: 1984894
gaucuuauuaaccuuccua

SEQ ID NO: 1984896 - RNA, 19 nt, Artificial Sequence
  Description of Artificial Sequence: Synthetic oligonucleotide
  Sense strand starting at position 690 of SEQ ID NO: 1880672
gguuaauaagaucacgucu

SEQ ID NO: 1984897 - RNA, 19 nt, Artificial Sequence
  Description of Artificial Sequence: Synthetic oligonucleotide
  Antisense strand to SEQ ID NO: 1984896
agacgugaucuuauuaacc

SEQ ID NO: 1984898 - RNA, 19 nt, Artificial Sequence
  Description of Artificial Sequence: Synthetic oligonucleotide
  Sense strand starting at position 696 of SEQ ID NO: 1880672
uaagaucacgucugugaga

SEQ ID NO: 1984899 - RNA, 19 nt, Artificial Sequence
  Description of Artificial Sequence: Synthetic oligonucleotide
  Antisense strand to SEQ ID NO: 1984898
ucucacagacgugaucuua

SEQ ID NO: 1984900 - RNA, 19 nt, Artificial Sequence
  Description of Artificial Sequence: Synthetic oligonucleotide
  Sense strand starting at position 703 of SEQ ID NO: 1880672
acgucugugagaggucuua

SEQ ID NO: 1984901 - RNA, 19 nt, Artificial Sequence
  Description of Artificial Sequence: Synthetic oligonucleotide
  Antisense strand to SEQ ID NO: 1984900
uaagaccucucacagacgu

SEQ ID NO: 1984902 - RNA, 19 nt, Artificial Sequence
  Description of Artificial Sequence: Synthetic oligonucleotide
  Sense strand starting at position 716 of SEQ ID NO: 1880672
gucuuagugccacaguaga

SEQ ID NO: 1984903 - RNA, 19 nt, Artificial Sequence
  Description of Artificial Sequence: Synthetic oligonucleotide
  Antisense strand to SEQ ID NO: 1984902
ucuacuguggcacuaagac

SEQ ID NO: 1984904 - RNA, 19 nt, Artificial Sequence
  Description of Artificial Sequence: Synthetic oligonucleotide
  Sense strand starting at position 727 of SEQ ID NO: 1880672
acaguagaucagugucagu

SEQ ID NO: 1984905 - RNA, 19 nt, Artificial Sequence
  Description of Artificial Sequence: Synthetic oligonucleotide
  Antisense strand to SEQ ID NO: 1984904
acugacacugaucuacugu

SEQ ID NO: 1984906 - RNA, 19 nt, Artificial Sequence
  Description of Artificial Sequence: Synthetic oligonucleotide
  Sense strand starting at position 734 of SEQ ID NO: 1880672
aucagugucagugagggua

SEQ ID NO: 1984907 - RNA, 19 nt, Artificial Sequence
  Description of Artificial Sequence: Synthetic oligonucleotide
  Antisense strand to SEQ ID NO: 1984906
uacccucacugacacugau

SEQ ID NO: 1984908 - RNA, 19 nt, Artificial Sequence
  Description of Artificial Sequence: Synthetic oligonucleotide
  Sense strand starting at position 902 of SEQ ID NO: 1880672
aagggaagucucugaguug

SEQ ID NO: 1984909 - RNA, 19 nt, Artificial Sequence
  Description of Artificial Sequence: Synthetic oligonucleotide
  Antisense strand to SEQ ID NO: 1984908
caacucagagacuucccuu

SEQ ID NO: 1984910 - RNA, 19 nt, Artificial Sequence
  Description of Artificial Sequence: Synthetic oligonucleotide
  Sense strand starting at position 905 of SEQ ID NO: 1880672
ggaagucucugaguuggag

SEQ ID NO: 1984911 - RNA, 19 nt, Artificial Sequence
  Description of Artificial Sequence: Synthetic oligonucleotide
  Antisense strand to SEQ ID NO: 1984910
cuccaacucagagacuucc

SEQ ID NO: 1984912 - RNA, 19 nt, Artificial Sequence
  Description of Artificial Sequence: Synthetic oligonucleotide
  Sense strand starting at position 1169 of SEQ ID NO: 1880672
gagguaggaguuugguguu

SEQ ID NO: 1984913 - RNA, 19 nt, Artificial Sequence
  Description of Artificial Sequence: Synthetic oligonucleotide
  Antisense strand to SEQ ID NO: 1984912
aacaccaaacuccuaccuc

SEQ ID NO: 1984914 - RNA, 19 nt, Artificial Sequence
  Description of Artificial Sequence: Synthetic oligonucleotide
  Sense strand starting at position 1245 of SEQ ID NO: 1880672
gggaaauggccucgaauga

SEQ ID NO: 1984915 - RNA, 19 nt, Artificial Sequence
  Description of Artificial Sequence: Synthetic oligonucleotide
  Antisense strand to SEQ ID NO: 1984914
ucauucgaggccauuuccc

SEQ ID NO: 1984916 - RNA, 19 nt, Artificial Sequence
  Description of Artificial Sequence: Synthetic oligonucleotide
  Sense strand starting at position 1278 of SEQ ID NO: 1880672
gaggaaucugcacacgacu

SEQ ID NO: 1984917 - RNA, 19 nt, Artificial Sequence
  Description of Artificial Sequence: Synthetic oligonucleotide
  Antisense strand to SEQ ID NO: 1984916
agucgugugcagauuccuc

SEQ ID NO: 1984918 - RNA, 19 nt, Artificial Sequence
  Description of Artificial Sequence: Synthetic oligonucleotide
  Sense strand starting at position 1331 of SEQ ID NO: 1880672
gcggcaucuccugaggauu

SEQ ID NO: 1984919 - RNA, 19 nt, Artificial Sequence
  Description of Artificial Sequence: Synthetic oligonucleotide
  Antisense strand to SEQ ID NO: 1984918
aauccucaggagaugccgc

SEQ ID NO: 1984920 - RNA, 19 nt, Artificial Sequence
  Description of Artificial Sequence: Synthetic oligonucleotide
  Sense strand starting at position 1558 of SEQ ID NO: 1880672
uguccuauucugugaacca

SEQ ID NO: 1984921 - RNA, 19 nt, Artificial Sequence
  Description of Artificial Sequence: Synthetic oligonucleotide
  Antisense strand to SEQ ID NO: 1984920
ugguucacagaauaggaca

SEQ ID NO: 1984922 - RNA, 19 nt, Artificial Sequence
  Description of Artificial Sequence: Synthetic oligonucleotide
  Sense strand starting at position 1663 of SEQ ID NO: 1880672
cagggaaucuugucacgcu

SEQ ID NO: 1984923 - RNA, 19 nt, Artificial Sequence
  Description of Artificial Sequence: Synthetic oligonucleotide
  Antisense strand to SEQ ID NO: 1984922
agcgugacaagauucccug

SEQ ID NO: 1984924 - RNA, 19 nt, Artificial Sequence
  Description of Artificial Sequence: Synthetic oligonucleotide
  Sense strand starting at position 1757 of SEQ ID NO: 1880672
gcuccagcucuggagaaca

SEQ ID NO: 1984925 - RNA, 19 nt, Artificial Sequence
  Description of Artificial Sequence: Synthetic oligonucleotide
  Antisense strand to SEQ ID NO: 1984924
uguucuccagagcuggagc

SEQ ID NO: 1984926 - RNA, 19 nt, Artificial Sequence
  Description of Artificial Sequence: Synthetic oligonucleotide
  Sense strand starting at position 2587 of SEQ ID NO: 1880672
cagagaugcaaguguagca

SEQ ID NO: 1984927 - RNA, 19 nt, Artificial Sequence
  Description of Artificial Sequence: Synthetic oligonucleotide
  Antisense strand to SEQ ID NO: 1984926
ugcuacacuugcaucucug

SEQ ID NO: 1984928 - RNA, 19 nt, Artificial Sequence
  Description of Artificial Sequence: Synthetic oligonucleotide
  Sense strand starting at position 2987 of SEQ ID NO: 1880672
ccugucagucaugaacgua

SEQ ID NO: 1984929 - RNA, 19 nt, Artificial Sequence
  Description of Artificial Sequence: Synthetic oligonucleotide
  Antisense strand to SEQ ID NO: 1984928
uacguucaugacugacagg

SEQ ID NO: 1984930 - RNA, 19 nt, Artificial Sequence
  Description of Artificial Sequence: Synthetic oligonucleotide
  Sense strand starting at position 2990 of SEQ ID NO: 1880672
gucagucaugaacguaaca

SEQ ID NO: 1984931 - RNA, 19 nt, Artificial Sequence
  Description of Artificial Sequence: Synthetic oligonucleotide
  Antisense strand to SEQ ID NO: 1984930
uguuacguucaugacugac

SEQ ID NO: 1984932 - RNA, 19 nt, Artificial Sequence
  Description of Artificial Sequence: Synthetic oligonucleotide
  Sense strand starting at position 3207 of SEQ ID NO: 1880672
aaagacaguuuggauuaau

SEQ ID NO: 1984933 - RNA, 19 nt, Artificial Sequence
  Description of Artificial Sequence: Synthetic oligonucleotide
  Antisense strand to SEQ ID NO: 1984932
auuaauccaaacugucuuu

SEQ ID NO: 1984934 - RNA, 19 nt, Artificial Sequence
  Description of Artificial Sequence: Synthetic oligonucleotide
  Sense strand starting at position 3241 of SEQ ID NO: 1880672
ccuagacauuuagauuaug

SEQ ID NO: 1984935 - RNA, 19 nt, Artificial Sequence
  Description of Artificial Sequence: Synthetic oligonucleotide
  Antisense strand to SEQ ID NO: 1984934
cauaaucuaaaugucuagg

SEQ ID NO: 1984936 - RNA, 19 nt, Artificial Sequence
  Description of Artificial Sequence: Synthetic oligonucleotide
  Sense strand starting at position 3316 of SEQ ID NO: 1880672
cugugaacccucuguccau

SEQ ID NO: 1984937 - RNA, 19 nt, Artificial Sequence
  Description of Artificial Sequence: Synthetic oligonucleotide
  Antisense strand to SEQ ID NO: 1984936
auggacagaggguucacag

SEQ ID NO: 1984938 - RNA, 19 nt, Artificial Sequence
  Description of Artificial Sequence: Synthetic oligonucleotide
  Sense strand starting at position 3317 of SEQ ID NO: 1880672
ugugaacccucuguccauu

SEQ ID NO: 1984939 - RNA, 19 nt, Artificial Sequence
  Description of Artificial Sequence: Synthetic oligonucleotide
  Antisense strand to SEQ ID NO: 1984938
aauggacagaggguucaca

SEQ ID NO: 1984940 - RNA, 19 nt, Artificial Sequence
  Description of Artificial Sequence: Synthetic oligonucleotide
  Sense strand starting at position 3381 of SEQ ID NO: 1880672
gcuggaggaguuugaauaa

SEQ ID NO: 1984941 - RNA, 19 nt, Artificial Sequence
  Description of Artificial Sequence: Synthetic oligonucleotide
  Antisense strand to SEQ ID NO: 1984940
uuauucaaacuccuccagc

SEQ ID NO: 1984942 - RNA, 19 nt, Artificial Sequence
  Description of Artificial Sequence: Synthetic oligonucleotide
  Sense strand starting at position 3440 of SEQ ID NO: 1880672
ucuuaugagucaucguuga

SEQ ID NO: 1984943 - RNA, 19 nt, Artificial Sequence
  Description of Artificial Sequence: Synthetic oligonucleotide
  Antisense strand to SEQ ID NO: 1984942
ucaacgaugacucauaaga

SEQ ID NO: 1984944 - RNA, 19 nt, Artificial Sequence
  Description of Artificial Sequence: Synthetic oligonucleotide
  Sense strand starting at position 3444 of SEQ ID NO: 1880672
augagucaucguugaaagg

SEQ ID NO: 1984945 - RNA, 19 nt, Artificial Sequence
  Description of Artificial Sequence: Synthetic oligonucleotide
  Antisense strand to SEQ ID NO: 1984944
ccuuucaacgaugacucau

SEQ ID NO: 1984946 - RNA, 19 nt, Artificial Sequence
  Description of Artificial Sequence: Synthetic oligonucleotide
  Sense strand starting at position 3445 of SEQ ID NO: 1880672
ugagucaucguugaaagga

SEQ ID NO: 1984947 - RNA, 19 nt, Artificial Sequence
  Description of Artificial Sequence: Synthetic oligonucleotide
  Antisense strand to SEQ ID NO: 1984946
uccuuucaacgaugacuca

SEQ ID NO: 1984948 - RNA, 19 nt, Artificial Sequence
  Description of Artificial Sequence: Synthetic oligonucleotide
  Sense strand starting at position 3479 of SEQ ID NO: 1880672
ugguauuagaaccgggaga

SEQ ID NO: 1984949 - RNA, 19 nt, Artificial Sequence
  Description of Artificial Sequence: Synthetic oligonucleotide
  Antisense strand to SEQ ID NO: 1984948
ucucccgguucuaauacca

SEQ ID NO: 1984950 - RNA, 19 nt, Artificial Sequence
  Description of Artificial Sequence: Synthetic oligonucleotide
  Sense strand starting at position 3566 of SEQ ID NO: 1880672
gggcucagucguggacaaa

SEQ ID NO: 1984951 - RNA, 19 nt, Artificial Sequence
  Description of Artificial Sequence: Synthetic oligonucleotide
  Antisense strand to SEQ ID NO: 1984950
uuuguccacgacugagccc

SEQ ID NO: 1984952 - RNA, 19 nt, Artificial Sequence
  Description of Artificial Sequence: Synthetic oligonucleotide
  Sense strand starting at position 3567 of SEQ ID NO: 1880672
ggcucagucguggacaaag

SEQ ID NO: 1984953 - RNA, 19 nt, Artificial Sequence
  Description of Artificial Sequence: Synthetic oligonucleotide
  Antisense strand to SEQ ID NO: 1984952
cuuuguccacgacugagcc

SEQ ID NO: 1984954 - RNA, 19 nt, Artificial Sequence
  Description of Artificial Sequence: Synthetic oligonucleotide
  Sense strand starting at position 3600 of SEQ ID NO: 1880672
agaaguggccucuaagcaa

SEQ ID NO: 1984955 - RNA, 19 nt, Artificial Sequence
  Description of Artificial Sequence: Synthetic oligonucleotide
  Antisense strand to SEQ ID NO: 1984954
uugcuuagaggccacuucu

SEQ ID NO: 1984956 - RNA, 19 nt, Artificial Sequence
  Description of Artificial Sequence: Synthetic oligonucleotide
  Sense strand starting at position 3719 of SEQ ID NO: 1880672
cuggcucaucugugacaca

SEQ ID NO: 1984957 - RNA, 19 nt, Artificial Sequence
  Description of Artificial Sequence: Synthetic oligonucleotide
  Antisense strand to SEQ ID NO: 1984956
ugugucacagaugagccag

SEQ ID NO: 1984958 - RNA, 19 nt, Artificial Sequence
  Description of Artificial Sequence: Synthetic oligonucleotide
  Sense strand starting at position 168 of SEQ ID NO: 1880673
ucaagugggcaauggauau

SEQ ID NO: 1984959 - RNA, 19 nt, Artificial Sequence
  Description of Artificial Sequence: Synthetic oligonucleotide
  Antisense strand to SEQ ID NO: 1984958
auauccauugcccacuuga

SEQ ID NO: 1984960 - RNA, 19 nt, Artificial Sequence
  Description of Artificial Sequence: Synthetic oligonucleotide
  Sense strand starting at position 233 of SEQ ID NO: 1880673
ugggcaugauuaguacaca

SEQ ID NO: 1984961 - RNA, 19 nt, Artificial Sequence
  Description of Artificial Sequence: Synthetic oligonucleotide
  Antisense strand to SEQ ID NO: 1984960
uguguacuaaucaugccca

SEQ ID NO: 1984962 - RNA, 19 nt, Artificial Sequence
  Description of Artificial Sequence: Synthetic oligonucleotide
  Sense strand starting at position 236 of SEQ ID NO: 1880673
gcaugauuaguacacagau

SEQ ID NO: 1984963 - RNA, 19 nt, Artificial Sequence
  Description of Artificial Sequence: Synthetic oligonucleotide
  Antisense strand to SEQ ID NO: 1984962
aucuguguacuaaucaugc

SEQ ID NO: 1984964 - RNA, 19 nt, Artificial Sequence
  Description of Artificial Sequence: Synthetic oligonucleotide
  Sense strand starting at position 242 of SEQ ID NO: 1880673
uuaguacacagauggugau

SEQ ID NO: 1984965 - RNA, 19 nt, Artificial Sequence
  Description of Artificial Sequence: Synthetic oligonucleotide
  Antisense strand to SEQ ID NO: 1984964
aucaccaucuguguacuaa

SEQ ID NO: 1984966 - RNA, 19 nt, Artificial Sequence
  Description of Artificial Sequence: Synthetic oligonucleotide
  Sense strand starting at position 535 of SEQ ID NO: 1880673
uugcgucauccacauagua

SEQ ID NO: 1984967 - RNA, 19 nt, Artificial Sequence
  Description of Artificial Sequence: Synthetic oligonucleotide
  Antisense strand to SEQ ID NO: 1984966
uacuauguggaugacgcaa

SEQ ID NO: 1984968 - RNA, 19 nt, Artificial Sequence
  Description of Artificial Sequence: Synthetic oligonucleotide
  Sense strand starting at position 592 of SEQ ID NO: 1880673
ugucgaguauaauucugaa

SEQ ID NO: 1984969 - RNA, 19 nt, Artificial Sequence
  Description of Artificial Sequence: Synthetic oligonucleotide
  Antisense strand to SEQ ID NO: 1984968
uucagaauuauacucgaca

SEQ ID NO: 1984970 - RNA, 19 nt, Artificial Sequence
  Description of Artificial Sequence: Synthetic oligonucleotide
  Sense strand starting at position 1129 of SEQ ID NO: 1880673
auugacuuacgaugccaga

SEQ ID NO: 1984971 - RNA, 19 nt, Artificial Sequence
  Description of Artificial Sequence: Synthetic oligonucleotide
  Antisense strand to SEQ ID NO: 1984970
ucuggcaucguaagucaau

SEQ ID NO: 1984972 - RNA, 19 nt, Artificial Sequence
  Description of Artificial Sequence: Synthetic oligonucleotide
  Sense strand starting at position 1236 of SEQ ID NO: 1880673
uggccuucccuggaguuaa

SEQ ID NO: 1984973 - RNA, 19 nt, Artificial Sequence
  Description of Artificial Sequence: Synthetic oligonucleotide
  Antisense strand to SEQ ID NO: 1984972
uuaacuccagggaaggcca

SEQ ID NO: 1984974 - RNA, 19 nt, Artificial Sequence
  Description of Artificial Sequence: Synthetic oligonucleotide
  Sense strand starting at position 1246 of SEQ ID NO: 1880673
uggaguuaauaugcuccau

SEQ ID NO: 1984975 - RNA, 19 nt, Artificial Sequence
  Description of Artificial Sequence: Synthetic oligonucleotide
  Antisense strand to SEQ ID NO: 1984974
auggagcauauuaacucca

SEQ ID NO: 1984976 - RNA, 19 nt, Artificial Sequence
  Description of Artificial Sequence: Synthetic oligonucleotide
  Sense strand starting at position 1460 of SEQ ID NO: 1880673
gccaucaaucuggagucuu

SEQ ID NO: 1984977 - RNA, 19 nt, Artificial Sequence
  Description of Artificial Sequence: Synthetic oligonucleotide
  Antisense strand to SEQ ID NO: 1984976
aagacuccagauugauggc

SEQ ID NO: 1984978 - RNA, 19 nt, Artificial Sequence
  Description of Artificial Sequence: Synthetic oligonucleotide
  Sense strand starting at position 1518 of SEQ ID NO: 1880673
ucccaaauggauuguucuu

SEQ ID NO: 1984979 - RNA, 19 nt, Artificial Sequence
  Description of Artificial Sequence: Synthetic oligonucleotide
  Antisense strand to SEQ ID NO: 1984978
aagaacaauccauuuggga

SEQ ID NO: 1984980 - RNA, 19 nt, Artificial Sequence
  Description of Artificial Sequence: Synthetic oligonucleotide
  Sense strand starting at position 1520 of SEQ ID NO: 1880673
ccaaauggauuguucuuaa

SEQ ID NO: 1984981 - RNA, 19 nt, Artificial Sequence
  Description of Artificial Sequence: Synthetic oligonucleotide
  Antisense strand to SEQ ID NO: 1984980
uuaagaacaauccauuugg

SEQ ID NO: 1984982 - RNA, 19 nt, Artificial Sequence
  Description of Artificial Sequence: Synthetic oligonucleotide
  Sense strand starting at position 1596 of SEQ ID NO: 1880673
ugaagacauuaguuauagu

SEQ ID NO: 1984983 - RNA, 19 nt, Artificial Sequence
  Description of Artificial Sequence: Synthetic oligonucleotide
  Antisense strand to SEQ ID NO: 1984982
acuauaacuaaugucuuca

SEQ ID NO: 1984984 - RNA, 19 nt, Artificial Sequence
  Description of Artificial Sequence: Synthetic oligonucleotide
  Sense strand starting at position 1605 of SEQ ID NO: 1880673
uaguuauagugucugugaa

SEQ ID NO: 1984985 - RNA, 19 nt, Artificial Sequence
  Description of Artificial Sequence: Synthetic oligonucleotide
  Antisense strand to SEQ ID NO: 1984984
uucacagacacuauaacua

SEQ ID NO: 1984986 - RNA, 19 nt, Artificial Sequence
  Description of Artificial Sequence: Synthetic oligonucleotide
  Sense strand starting at position 1606 of SEQ ID NO: 1880673
aguuauagugucugugaaa

SEQ ID NO: 1984987 - RNA, 19 nt, Artificial Sequence
  Description of Artificial Sequence: Synthetic oligonucleotide
  Antisense strand to SEQ ID NO: 1984986
uuucacagacacuauaacu

SEQ ID NO: 1984988 - RNA, 19 nt, Artificial Sequence
  Description of Artificial Sequence: Synthetic oligonucleotide
  Sense strand starting at position 1702 of SEQ ID NO: 1880673
ucccucaagugucugguaa

SEQ ID NO: 1984989 - RNA, 19 nt, Artificial Sequence
  Description of Artificial Sequence: Synthetic oligonucleotide
  Antisense strand to SEQ ID NO: 1984988
uuaccagacacuugaggga

SEQ ID NO: 1984990 - RNA, 19 nt, Artificial Sequence
  Description of Artificial Sequence: Synthetic oligonucleotide
  Sense strand starting at position 1729 of SEQ ID NO: 1880673
aucuguuuauauguaagag

SEQ ID NO: 1984991 - RNA, 19 nt, Artificial Sequence
  Description of Artificial Sequence: Synthetic oligonucleotide
  Antisense strand to SEQ ID NO: 1984990
cucuuacauauaaacagau

SEQ ID NO: 1984992 - RNA, 19 nt, Artificial Sequence
  Description of Artificial Sequence: Synthetic oligonucleotide
  Sense strand starting at position 1739 of SEQ ID NO: 1880673
auguaagagagaugcacua

SEQ ID NO: 1984993 - RNA, 19 nt, Artificial Sequence
  Description of Artificial Sequence: Synthetic oligonucleotide
  Antisense strand to SEQ ID NO: 1984992
uagugcaucucucuuacau

SEQ ID NO: 1984994 - RNA, 19 nt, Artificial Sequence
  Description of Artificial Sequence: Synthetic oligonucleotide
  Sense strand starting at position 1817 of SEQ ID NO: 1880673
gguagguguggguauauga

SEQ ID NO: 1984995 - RNA, 19 nt, Artificial Sequence
  Description of Artificial Sequence: Synthetic oligonucleotide
  Antisense strand to SEQ ID NO: 1984994
ucauauacccacaccuacc

SEQ ID NO: 1984996 - RNA, 19 nt, Artificial Sequence
  Description of Artificial Sequence: Synthetic oligonucleotide
  Sense strand starting at position 2287 of SEQ ID NO: 1880673
ugaugugucccaucagcgu

SEQ ID NO: 1984997 - RNA, 19 nt, Artificial Sequence
  Description of Artificial Sequence: Synthetic oligonucleotide
  Antisense strand to SEQ ID NO: 1984996
acgcugaugggacacauca

SEQ ID NO: 1984998 - RNA, 19 nt, Artificial Sequence
  Description of Artificial Sequence: Synthetic oligonucleotide
  Sense strand starting at position 2365 of SEQ ID NO: 1880673
ggccaaauucuuggaagag

SEQ ID NO: 1984999 - RNA, 19 nt, Artificial Sequence
  Description of Artificial Sequence: Synthetic oligonucleotide
  Antisense strand to SEQ ID NO: 1984998
cucuuccaagaauuuggcc

SEQ ID NO: 1985000 - RNA, 19 nt, Artificial Sequence
  Description of Artificial Sequence: Synthetic oligonucleotide
  Sense strand starting at position 2407 of SEQ ID NO: 1880673
aauccauggguuugauauc

SEQ ID NO: 1985001 - RNA, 19 nt, Artificial Sequence
  Description of Artificial Sequence: Synthetic oligonucleotide
  Antisense strand to SEQ ID NO: 1985000
gauaucaaacccauggauu

SEQ ID NO: 1985002 - RNA, 19 nt, Artificial Sequence
  Description of Artificial Sequence: Synthetic oligonucleotide
  Sense strand starting at position 2413 of SEQ ID NO: 1880673
uggguuugauaucugugga

SEQ ID NO: 1985003 - RNA, 19 nt, Artificial Sequence
  Description of Artificial Sequence: Synthetic oligonucleotide
  Antisense strand to SEQ ID NO: 1985002
uccacagauaucaaaccca

SEQ ID NO: 1985004 - RNA, 19 nt, Artificial Sequence
  Description of Artificial Sequence: Synthetic oligonucleotide
  Sense strand starting at position 2414 of SEQ ID NO: 1880673
ggguuugauaucuguggau

SEQ ID NO: 1985005 - RNA, 19 nt, Artificial Sequence
  Description of Artificial Sequence: Synthetic oligonucleotide
  Antisense strand to SEQ ID NO: 1985004
auccacagauaucaaaccc

SEQ ID NO: 1985006 - RNA, 19 nt, Artificial Sequence
  Description of Artificial Sequence: Synthetic oligonucleotide
  Sense strand starting at position 2416 of SEQ ID NO: 1880673
guuugauaucuguggauuc

SEQ ID NO: 1985007 - RNA, 19 nt, Artificial Sequence
  Description of Artificial Sequence: Synthetic oligonucleotide
  Antisense strand to SEQ ID NO: 1985006
gaauccacagauaucaaac

SEQ ID NO: 1985008 - RNA, 19 nt, Artificial Sequence
  Description of Artificial Sequence: Synthetic oligonucleotide
  Sense strand starting at position 2571 of SEQ ID NO: 1880673
auaagcaaucuagggauua

SEQ ID NO: 1985009 - RNA, 19 nt, Artificial Sequence
  Description of Artificial Sequence: Synthetic oligonucleotide
  Antisense strand to SEQ ID NO: 1985008
uaaucccuagauugcuuau

SEQ ID NO: 1985010 - RNA, 19 nt, Artificial Sequence
  Description of Artificial Sequence: Synthetic oligonucleotide
  Sense strand starting at position 2884 of SEQ ID NO: 1880673
ggaauuugguuaugauuug

SEQ ID NO: 1985011 - RNA, 19 nt, Artificial Sequence
  Description of Artificial Sequence: Synthetic oligonucleotide
  Antisense strand to SEQ ID NO: 1985010
caaaucauaaccaaauucc

SEQ ID NO: 1985012 - RNA, 19 nt, Artificial Sequence
  Description of Artificial Sequence: Synthetic oligonucleotide
  Sense strand starting at position 2885 of SEQ ID NO: 1880673
gaauuugguuaugauuugu

SEQ ID NO: 1985013 - RNA, 19 nt, Artificial Sequence
  Description of Artificial Sequence: Synthetic oligonucleotide
  Antisense strand to SEQ ID NO: 1985012
acaaaucauaaccaaauuc

SEQ ID NO: 1985014 - RNA, 19 nt, Artificial Sequence
  Description of Artificial Sequence: Synthetic oligonucleotide
  Sense strand starting at position 3077 of SEQ ID NO: 1880673
gcacuugguggccacuaaa

SEQ ID NO: 1985015 - RNA, 19 nt, Artificial Sequence
  Description of Artificial Sequence: Synthetic oligonucleotide
  Antisense strand to SEQ ID NO: 1985014
uuuaguggccaccaagugc

SEQ ID NO: 1985016 - RNA, 19 nt, Artificial Sequence
  Description of Artificial Sequence: Synthetic oligonucleotide
  Sense strand starting at position 3124 of SEQ ID NO: 1880673
gggugaugcuuuagaggga

SEQ ID NO: 1985017 - RNA, 19 nt, Artificial Sequence
  Description of Artificial Sequence: Synthetic oligonucleotide
  Antisense strand to SEQ ID NO: 1985016
ucccucuaaagcaucaccc

SEQ ID NO: 1985018 - RNA, 19 nt, Artificial Sequence
  Description of Artificial Sequence: Synthetic oligonucleotide
  Sense strand starting at position 3127 of SEQ ID NO: 1880673
ugaugcuuuagagggauca

SEQ ID NO: 1985019 - RNA, 19 nt, Artificial Sequence
  Description of Artificial Sequence: Synthetic oligonucleotide
  Antisense strand to SEQ ID NO: 1985018
ugaucccucuaaagcauca

SEQ ID NO: 1985020 - RNA, 19 nt, Artificial Sequence
  Description of Artificial Sequence: Synthetic oligonucleotide
  Sense strand starting at position 3433 of SEQ ID NO: 1880673
agugguugacccugaggaa

SEQ ID NO: 1985021 - RNA, 19 nt, Artificial Sequence
  Description of Artificial Sequence: Synthetic oligonucleotide
  Antisense strand to SEQ ID NO: 1985020
uuccucagggucaaccacu

SEQ ID NO: 1985022 - RNA, 19 nt, Artificial Sequence
  Description of Artificial Sequence: Synthetic oligonucleotide
  Sense strand starting at position 3488 of SEQ ID NO: 1880673
cuggacaugccucauuguu

SEQ ID NO: 1985023 - RNA, 19 nt, Artificial Sequence
  Description of Artificial Sequence: Synthetic oligonucleotide
  Antisense strand to SEQ ID NO: 1985022
aacaaugaggcauguccag

SEQ ID NO: 1985024 - RNA, 19 nt, Artificial Sequence
  Description of Artificial Sequence: Synthetic oligonucleotide
  Sense strand starting at position 3892 of SEQ ID NO: 1880673
ugccucauuuggccucaga

SEQ ID NO: 1985025 - RNA, 19 nt, Artificial Sequence
  Description of Artificial Sequence: Synthetic oligonucleotide
  Antisense strand to SEQ ID NO: 1985024
ucugaggccaaaugaggca

SEQ ID NO: 1985026 - RNA, 19 nt, Artificial Sequence
  Description of Artificial Sequence: Synthetic oligonucleotide
  Sense strand starting at position 3914 of SEQ ID NO: 1880673
aggugugaucuccauacca

SEQ ID NO: 1985027 - RNA, 19 nt, Artificial Sequence
  Description of Artificial Sequence: Synthetic oligonucleotide
  Antisense strand to SEQ ID NO: 1985026
ugguauggagaucacaccu

SEQ ID NO: 1985028 - RNA, 19 nt, Artificial Sequence
  Description of Artificial Sequence: Synthetic oligonucleotide
  Sense strand starting at position 3916 of SEQ ID NO: 1880673
gugugaucuccauaccagc

SEQ ID NO: 1985029 - RNA, 19 nt, Artificial Sequence
  Description of Artificial Sequence: Synthetic oligonucleotide
  Antisense strand to SEQ ID NO: 1985028
gcugguauggagaucacac

SEQ ID NO: 1985030 - RNA, 19 nt, Artificial Sequence
  Description of Artificial Sequence: Synthetic oligonucleotide
  Sense strand starting at position 3968 of SEQ ID NO: 1880673
guugacaacuuguccagau

SEQ ID NO: 1985031 - RNA, 19 nt, Artificial Sequence
  Description of Artificial Sequence: Synthetic oligonucleotide
  Antisense strand to SEQ ID NO: 1985030
aucuggacaaguugucaac

SEQ ID NO: 1985032 - RNA, 19 nt, Artificial Sequence
  Description of Artificial Sequence: Synthetic oligonucleotide
  Sense strand starting at position 3969 of SEQ ID NO: 1880673
uugacaacuuguccagaug

SEQ ID NO: 1985033 - RNA, 19 nt, Artificial Sequence
  Description of Artificial Sequence: Synthetic oligonucleotide
  Antisense strand to SEQ ID NO: 1985032
caucuggacaaguugucaa

SEQ ID NO: 1985034 - RNA, 19 nt, Artificial Sequence
  Description of Artificial Sequence: Synthetic oligonucleotide
  Sense strand starting at position 3972 of SEQ ID NO: 1880673
acaacuuguccagaugagu

SEQ ID NO: 1985035 - RNA, 19 nt, Artificial Sequence
  Description of Artificial Sequence: Synthetic oligonucleotide
  Antisense strand to SEQ ID NO: 1985034
acucaucuggacaaguugu

SEQ ID NO: 1985036 - RNA, 19 nt, Artificial Sequence
  Description of Artificial Sequence: Synthetic oligonucleotide
  Sense strand starting at position 3978 of SEQ ID NO: 1880673
uguccagaugagugaaacu

SEQ ID NO: 1985037 - RNA, 19 nt, Artificial Sequence
  Description of Artificial Sequence: Synthetic oligonucleotide
  Antisense strand to SEQ ID NO: 1985036
aguuucacucaucuggaca

SEQ ID NO: 1985038 - RNA, 19 nt, Artificial Sequence
  Description of Artificial Sequence: Synthetic oligonucleotide
  Sense strand starting at position 13 of SEQ ID NO: 1880674
cuugguauuuacuuguauu

SEQ ID NO: 1985039 - RNA, 19 nt, Artificial Sequence
  Description of Artificial Sequence: Synthetic oligonucleotide
  Antisense strand to SEQ ID NO: 1985038
aauacaaguaaauaccaag

SEQ ID NO: 1985040 - RNA, 19 nt, Artificial Sequence
  Description of Artificial Sequence: Synthetic oligonucleotide
  Sense strand starting at position 25 of SEQ ID NO: 1880674
uuguauuucgaaugcuaau

SEQ ID NO: 1985041 - RNA, 19 nt, Artificial Sequence
  Description of Artificial Sequence: Synthetic oligonucleotide
  Antisense strand to SEQ ID NO: 1985040
auuagcauucgaaauacaa

SEQ ID NO: 1985042 - RNA, 19 nt, Artificial Sequence
  Description of Artificial Sequence: Synthetic oligonucleotide
  Sense strand starting at position 81 of SEQ ID NO: 1880674
gcucuuugaagggagugau

SEQ ID NO: 1985043 - RNA, 19 nt, Artificial Sequence
  Description of Artificial Sequence: Synthetic oligonucleotide
  Antisense strand to SEQ ID NO: 1985042
aucacucccuucaaagagc

SEQ ID NO: 1985044 - RNA, 19 nt, Artificial Sequence
  Description of Artificial Sequence: Synthetic oligonucleotide
  Sense strand starting at position 495 of SEQ ID NO: 1880674
ccuggauaagcauauucuu

SEQ ID NO: 1985045 - RNA, 19 nt, Artificial Sequence
  Description of Artificial Sequence: Synthetic oligonucleotide
  Antisense strand to SEQ ID NO: 1985044
aagaauaugcuuauccagg

SEQ ID NO: 1985046 - RNA, 19 nt, Artificial Sequence
  Description of Artificial Sequence: Synthetic oligonucleotide
  Sense strand starting at position 498 of SEQ ID NO: 1880674
ggauaagcauauucuugaa

SEQ ID NO: 1985047 - RNA, 19 nt, Artificial Sequence
  Description of Artificial Sequence: Synthetic oligonucleotide
  Antisense strand to SEQ ID NO: 1985046
uucaagaauaugcuuaucc

SEQ ID NO: 1985048 - RNA, 19 nt, Artificial Sequence
  Description of Artificial Sequence: Synthetic oligonucleotide
  Sense strand starting at position 511 of SEQ ID NO: 1880674
cuugaacugcaaugguuua

SEQ ID NO: 1985049 - RNA, 19 nt, Artificial Sequence
  Description of Artificial Sequence: Synthetic oligonucleotide
  Antisense strand to SEQ ID NO: 1985048
uaaaccauugcaguucaag

SEQ ID NO: 1985050 - RNA, 19 nt, Artificial Sequence
  Description of Artificial Sequence: Synthetic oligonucleotide
  Sense strand starting at position 593 of SEQ ID NO: 1880674
cuggcaacaucugcuaaau

SEQ ID NO: 1985051 - RNA, 19 nt, Artificial Sequence
  Description of Artificial Sequence: Synthetic oligonucleotide
  Antisense strand to SEQ ID NO: 1985050
auuuagcagauguugccag

SEQ ID NO: 1985052 - RNA, 19 nt, Artificial Sequence
  Description of Artificial Sequence: Synthetic oligonucleotide
  Sense strand starting at position 662 of SEQ ID NO: 1880674
uuugucuuaggagagugaa

SEQ ID NO: 1985053 - RNA, 19 nt, Artificial Sequence
  Description of Artificial Sequence: Synthetic oligonucleotide
  Antisense strand to SEQ ID NO: 1985052
uucacucuccuaagacaaa

SEQ ID NO: 1985054 - RNA, 19 nt, Artificial Sequence
  Description of Artificial Sequence: Synthetic oligonucleotide
  Sense strand starting at position 665 of SEQ ID NO: 1880674
gucuuaggagagugaaugu

SEQ ID NO: 1985055 - RNA, 19 nt, Artificial Sequence
  Description of Artificial Sequence: Synthetic oligonucleotide
  Antisense strand to SEQ ID NO: 1985054
acauucacucuccuaagac

SEQ ID NO: 1985056 - RNA, 19 nt, Artificial Sequence
  Description of Artificial Sequence: Synthetic oligonucleotide
  Sense strand starting at position 877 of SEQ ID NO: 1880674
gaaccaggguucuucuacu

SEQ ID NO: 1985057 - RNA, 19 nt, Artificial Sequence
  Description of Artificial Sequence: Synthetic oligonucleotide
  Antisense strand to SEQ ID NO: 1985056
aguagaagaacccugguuc

SEQ ID NO: 1985058 - RNA, 19 nt, Artificial Sequence
  Description of Artificial Sequence: Synthetic oligonucleotide
  Sense strand starting at position 959 of SEQ ID NO: 1880674
guuucccuggcugaugaaa

SEQ ID NO: 1985059 - RNA, 19 nt, Artificial Sequence
  Description of Artificial Sequence: Synthetic oligonucleotide
  Antisense strand to SEQ ID NO: 1985058
uuucaucagccagggaaac

SEQ ID NO: 1985060 - RNA, 19 nt, Artificial Sequence
  Description of Artificial Sequence: Synthetic oligonucleotide
  Sense strand starting at position 1056 of SEQ ID NO: 1880674
ucauauucucuugggucau

SEQ ID NO: 1985061 - RNA, 19 nt, Artificial Sequence
  Description of Artificial Sequence: Synthetic oligonucleotide
  Antisense strand to SEQ ID NO: 1985060
augacccaagagaauauga

SEQ ID NO: 1985062 - RNA, 19 nt, Artificial Sequence
  Description of Artificial Sequence: Synthetic oligonucleotide
  Sense strand starting at position 1080 of SEQ ID NO: 1880674
gaugaugcauccuuugauu

SEQ ID NO: 1985063 - RNA, 19 nt, Artificial Sequence
  Description of Artificial Sequence: Synthetic oligonucleotide
  Antisense strand to SEQ ID NO: 1985062
aaucaaaggaugcaucauc

SEQ ID NO: 1985064 - RNA, 19 nt, Artificial Sequence
  Description of Artificial Sequence: Synthetic oligonucleotide
  Sense strand starting at position 1082 of SEQ ID NO: 1880674
ugaugcauccuuugauuac

SEQ ID NO: 1985065 - RNA, 19 nt, Artificial Sequence
  Description of Artificial Sequence: Synthetic oligonucleotide
  Antisense strand to SEQ ID NO: 1985064
guaaucaaaggaugcauca

SEQ ID NO: 1985066 - RNA, 19 nt, Artificial Sequence
  Description of Artificial Sequence: Synthetic oligonucleotide
  Sense strand starting at position 1290 of SEQ ID NO: 1880674
ucuguauucuuaccaaggu

SEQ ID NO: 1985067 - RNA, 19 nt, Artificial Sequence
  Description of Artificial Sequence: Synthetic oligonucleotide
  Antisense strand to SEQ ID NO: 1985066
accuugguaagaauacaga

SEQ ID NO: 1985068 - RNA, 19 nt, Artificial Sequence
  Description of Artificial Sequence: Synthetic oligonucleotide
  Sense strand starting at position 1298 of SEQ ID NO: 1880674
cuuaccaagguguaauaca

SEQ ID NO: 1985069 - RNA, 19 nt, Artificial Sequence
  Description of Artificial Sequence: Synthetic oligonucleotide
  Antisense strand to SEQ ID NO: 1985068
uguauuacaccuugguaag

SEQ ID NO: 1985070 - RNA, 19 nt, Artificial Sequence
  Description of Artificial Sequence: Synthetic oligonucleotide
  Sense strand starting at position 1305 of SEQ ID NO: 1880674
agguguaauacauguacau

SEQ ID NO: 1985071 - RNA, 19 nt, Artificial Sequence
  Description of Artificial Sequence: Synthetic oligonucleotide
  Antisense strand to SEQ ID NO: 1985070
auguacauguauuacaccu

SEQ ID NO: 1985072 - RNA, 19 nt, Artificial Sequence
  Description of Artificial Sequence: Synthetic oligonucleotide
  Sense strand starting at position 1307 of SEQ ID NO: 1880674
guguaauacauguacauug

SEQ ID NO: 1985073 - RNA, 19 nt, Artificial Sequence
  Description of Artificial Sequence: Synthetic oligonucleotide
  Antisense strand to SEQ ID NO: 1985072
caauguacauguauuacac

SEQ ID NO: 1985074 - RNA, 19 nt, Artificial Sequence
  Description of Artificial Sequence: Synthetic oligonucleotide
  Sense strand starting at position 1330 of SEQ ID NO: 1880674
uuaugaucugcugaagucu

SEQ ID NO: 1985075 - RNA, 19 nt, Artificial Sequence
  Description of Artificial Sequence: Synthetic oligonucleotide
  Antisense strand to SEQ ID NO: 1985074
agacuucagcagaucauaa

SEQ ID NO: 1985076 - RNA, 19 nt, Artificial Sequence
  Description of Artificial Sequence: Synthetic oligonucleotide
  Sense strand starting at position 1426 of SEQ ID NO: 1880674
gaaguagcucuguacagau

SEQ ID NO: 1985077 - RNA, 19 nt, Artificial Sequence
  Description of Artificial Sequence: Synthetic oligonucleotide
  Antisense strand to SEQ ID NO: 1985076
aucuguacagagcuacuuc

SEQ ID NO: 1985078 - RNA, 19 nt, Artificial Sequence
  Description of Artificial Sequence: Synthetic oligonucleotide
  Sense strand starting at position 1487 of SEQ ID NO: 1880674
agaaaucuauuugaaggca

SEQ ID NO: 1985079 - RNA, 19 nt, Artificial Sequence
  Description of Artificial Sequence: Synthetic oligonucleotide
  Antisense strand to SEQ ID NO: 1985078
ugccuucaaauagauuucu

SEQ ID NO: 1985080 - RNA, 19 nt, Artificial Sequence
  Description of Artificial Sequence: Synthetic oligonucleotide
  Sense strand starting at position 1742 of SEQ ID NO: 1880674
cucucaagacuuugaugaa

SEQ ID NO: 1985081 - RNA, 19 nt, Artificial Sequence
  Description of Artificial Sequence: Synthetic oligonucleotide
  Antisense strand to SEQ ID NO: 1985080
uucaucaaagucuugagag

SEQ ID NO: 1985082 - RNA, 19 nt, Artificial Sequence
  Description of Artificial Sequence: Synthetic oligonucleotide
  Sense strand starting at position 1849 of SEQ ID NO: 1880674
uuuagaauuugagauccac

SEQ ID NO: 1985083 - RNA, 19 nt, Artificial Sequence
  Description of Artificial Sequence: Synthetic oligonucleotide
  Antisense strand to SEQ ID NO: 1985082
guggaucucaaauucuaaa

SEQ ID NO: 1985084 - RNA, 19 nt, Artificial Sequence
  Description of Artificial Sequence: Synthetic oligonucleotide
  Sense strand starting at position 2082 of SEQ ID NO: 1880674
ggauuaaagugaccaucca

SEQ ID NO: 1985085 - RNA, 19 nt, Artificial Sequence
  Description of Artificial Sequence: Synthetic oligonucleotide
  Antisense strand to SEQ ID NO: 1985084
uggauggucacuuuaaucc

SEQ ID NO: 1985086 - RNA, 19 nt, Artificial Sequence
  Description of Artificial Sequence: Synthetic oligonucleotide
  Sense strand starting at position 2109 of SEQ ID NO: 1880674
agccuaugucccuaucaga

SEQ ID NO: 1985087 - RNA, 19 nt, Artificial Sequence
  Description of Artificial Sequence: Synthetic oligonucleotide
  Antisense strand to SEQ ID NO: 1985086
ucugauagggacauaggcu

SEQ ID NO: 1985088 - RNA, 19 nt, Artificial Sequence
  Description of Artificial Sequence: Synthetic oligonucleotide
  Sense strand starting at position 2150 of SEQ ID NO: 1880674
ggaagaagacugcguuauc

SEQ ID NO: 1985089 - RNA, 19 nt, Artificial Sequence
  Description of Artificial Sequence: Synthetic oligonucleotide
  Antisense strand to SEQ ID NO: 1985088
gauaacgcagucuucuucc

SEQ ID NO: 1985090 - RNA, 19 nt, Artificial Sequence
  Description of Artificial Sequence: Synthetic oligonucleotide
  Sense strand starting at position 2151 of SEQ ID NO: 1880674
gaagaagacugcguuaucu

SEQ ID NO: 1985091 - RNA, 19 nt, Artificial Sequence
  Description of Artificial Sequence: Synthetic oligonucleotide
  Antisense strand to SEQ ID NO: 1985090
agauaacgcagucuucuuc

SEQ ID NO: 1985092 - RNA, 19 nt, Artificial Sequence
  Description of Artificial Sequence: Synthetic oligonucleotide
  Sense strand starting at position 2404 of SEQ ID NO: 1880674
accagauaauuggaauuua

SEQ ID NO: 1985093 - RNA, 19 nt, Artificial Sequence
  Description of Artificial Sequence: Synthetic oligonucleotide
  Antisense strand to SEQ ID NO: 1985092
uaaauuccaauuaucuggu

SEQ ID NO: 1985094 - RNA, 19 nt, Artificial Sequence
  Description of Artificial Sequence: Synthetic oligonucleotide
  Sense strand starting at position 2795 of SEQ ID NO: 1880674
acucaugaggauggguuua

SEQ ID NO: 1985095 - RNA, 19 nt, Artificial Sequence
  Description of Artificial Sequence: Synthetic oligonucleotide
  Antisense strand to SEQ ID NO: 1985094
uaaacccauccucaugagu

SEQ ID NO: 1985096 - RNA, 19 nt, Artificial Sequence
  Description of Artificial Sequence: Synthetic oligonucleotide
  Sense strand starting at position 2797 of SEQ ID NO: 1880674
ucaugaggauggguuuaau

SEQ ID NO: 1985097 - RNA, 19 nt, Artificial Sequence
  Description of Artificial Sequence: Synthetic oligonucleotide
  Antisense strand to SEQ ID NO: 1985096
auuaaacccauccucauga

SEQ ID NO: 1985098 - RNA, 19 nt, Artificial Sequence
  Description of Artificial Sequence: Synthetic oligonucleotide
  Sense strand starting at position 2833 of SEQ ID NO: 1880674
ggaagauaaguuugccauu

SEQ ID NO: 1985099 - RNA, 19 nt, Artificial Sequence
  Description of Artificial Sequence: Synthetic oligonucleotide
  Antisense strand to SEQ ID NO: 1985098
aauggcaaacuuaucuucc

SEQ ID NO: 1985100 - RNA, 19 nt, Artificial Sequence
  Description of Artificial Sequence: Synthetic oligonucleotide
  Sense strand starting at position 2834 of SEQ ID NO: 1880674
gaagauaaguuugccauua

SEQ ID NO: 1985101 - RNA, 19 nt, Artificial Sequence
  Description of Artificial Sequence: Synthetic oligonucleotide
  Antisense strand to SEQ ID NO: 1985100
uaauggcaaacuuaucuuc

SEQ ID NO: 1985102 - RNA, 19 nt, Artificial Sequence
  Description of Artificial Sequence: Synthetic oligonucleotide
  Sense strand starting at position 3300 of SEQ ID NO: 1880674
gggaaagggucuucaaagu

SEQ ID NO: 1985103 - RNA, 19 nt, Artificial Sequence
  Description of Artificial Sequence: Synthetic oligonucleotide
  Antisense strand to SEQ ID NO: 1985102
acuuugaagacccuuuccc

SEQ ID NO: 1985104 - RNA, 19 nt, Artificial Sequence
  Description of Artificial Sequence: Synthetic oligonucleotide
  Sense strand starting at position 3367 of SEQ ID NO: 1880674
ucuugcauucuuuagagau

SEQ ID NO: 1985105 - RNA, 19 nt, Artificial Sequence
  Description of Artificial Sequence: Synthetic oligonucleotide
  Antisense strand to SEQ ID NO: 1985104
aucucuaaagaaugcaaga

SEQ ID NO: 1985106 - RNA, 19 nt, Artificial Sequence
  Description of Artificial Sequence: Synthetic oligonucleotide
  Sense strand starting at position 3399 of SEQ ID NO: 1880674
uuagguaaguaauucucua

SEQ ID NO: 1985107 - RNA, 19 nt, Artificial Sequence
  Description of Artificial Sequence: Synthetic oligonucleotide
  Antisense strand to SEQ ID NO: 1985106
uagagaauuacuuaccuaa

SEQ ID NO: 1985108 - RNA, 19 nt, Artificial Sequence
  Description of Artificial Sequence: Synthetic oligonucleotide
  Sense strand starting at position 3571 of SEQ ID NO: 1880674
auggauacaugugcauuaa

SEQ ID NO: 1985109 - RNA, 19 nt, Artificial Sequence
  Description of Artificial Sequence: Synthetic oligonucleotide
  Antisense strand to SEQ ID NO: 1985108
uuaaugcacauguauccau

SEQ ID NO: 1985110 - RNA, 19 nt, Artificial Sequence
  Description of Artificial Sequence: Synthetic oligonucleotide
  Sense strand starting at position 3582 of SEQ ID NO: 1880674
ugcauuaaccaagacaugu

SEQ ID NO: 1985111 - RNA, 19 nt, Artificial Sequence
  Description of Artificial Sequence: Synthetic oligonucleotide
  Antisense strand to SEQ ID NO: 1985110
acaugucuugguuaaugca

SEQ ID NO: 1985112 - RNA, 19 nt, Artificial Sequence
  Description of Artificial Sequence: Synthetic oligonucleotide
  Sense strand starting at position 3657 of SEQ ID NO: 1880674
agugucaaucaauaguaga

SEQ ID NO: 1985113 - RNA, 19 nt, Artificial Sequence
  Description of Artificial Sequence: Synthetic oligonucleotide
  Antisense strand to SEQ ID NO: 1985112
ucuacuauugauugacacu

SEQ ID NO: 1985114 - RNA, 19 nt, Artificial Sequence
  Description of Artificial Sequence: Synthetic oligonucleotide
  Sense strand starting at position 3752 of SEQ ID NO: 1880674
ggaugacacucacaaauaa

SEQ ID NO: 1985115 - RNA, 19 nt, Artificial Sequence
  Description of Artificial Sequence: Synthetic oligonucleotide
  Antisense strand to SEQ ID NO: 1985114
uuauuugugagugucaucc

SEQ ID NO: 1985116 - RNA, 19 nt, Artificial Sequence
  Description of Artificial Sequence: Synthetic oligonucleotide
  Sense strand starting at position 3883 of SEQ ID NO: 1880674
gguggucauagugauggaa

SEQ ID NO: 1985117 - RNA, 19 nt, Artificial Sequence
  Description of Artificial Sequence: Synthetic oligonucleotide
  Antisense strand to SEQ ID NO: 1985116
uuccaucacuaugaccacc

SEQ ID NO: 1985118 - RNA, 19 nt, Artificial Sequence
  Description of Artificial Sequence: Synthetic oligonucleotide
  Sense strand starting at position 106 of SEQ ID NO: 1880675
gcaauugaacaguaucaca

SEQ ID NO: 1985119 - RNA, 19 nt, Artificial Sequence
  Description of Artificial Sequence: Synthetic oligonucleotide
  Antisense strand to SEQ ID NO: 1985118
ugugauacuguucaauugc

SEQ ID NO: 1985120 - RNA, 19 nt, Artificial Sequence
  Description of Artificial Sequence: Synthetic oligonucleotide
  Sense strand starting at position 163 of SEQ ID NO: 1880675
guauacguuccuuauuugu

SEQ ID NO: 1985121 - RNA, 19 nt, Artificial Sequence
  Description of Artificial Sequence: Synthetic oligonucleotide
  Antisense strand to SEQ ID NO: 1985120
acaaauaaggaacguauac

SEQ ID NO: 1985122 - RNA, 19 nt, Artificial Sequence
  Description of Artificial Sequence: Synthetic oligonucleotide
  Sense strand starting at position 283 of SEQ ID NO: 1880675
uggcccagaguauaugaua

SEQ ID NO: 1985123 - RNA, 19 nt, Artificial Sequence
  Description of Artificial Sequence: Synthetic oligonucleotide
  Antisense strand to SEQ ID NO: 1985122
uaucauauacucugggcca

SEQ ID NO: 1985124 - RNA, 19 nt, Artificial Sequence
  Description of Artificial Sequence: Synthetic oligonucleotide
  Sense strand starting at position 415 of SEQ ID NO: 1880675
gcaggcauuuacuucuuga

SEQ ID NO: 1985125 - RNA, 19 nt, Artificial Sequence
  Description of Artificial Sequence: Synthetic oligonucleotide
  Antisense strand to SEQ ID NO: 1985124
ucaagaaguaaaugccugc

SEQ ID NO: 1985126 - RNA, 19 nt, Artificial Sequence
  Description of Artificial Sequence: Synthetic oligonucleotide
  Sense strand starting at position 545 of SEQ ID NO: 1880675
ggaccaguagguuauaugu

SEQ ID NO: 1985127 - RNA, 19 nt, Artificial Sequence
  Description of Artificial Sequence: Synthetic oligonucleotide
  Antisense strand to SEQ ID NO: 1985126
acauauaaccuacuggucc

SEQ ID NO: 1985128 - RNA, 19 nt, Artificial Sequence
  Description of Artificial Sequence: Synthetic oligonucleotide
  Sense strand starting at position 699 of SEQ ID NO: 1880675
uucucauggaggugaggau

SEQ ID NO: 1985129 - RNA, 19 nt, Artificial Sequence
  Description of Artificial Sequence: Synthetic oligonucleotide
  Antisense strand to SEQ ID NO: 1985128
auccucaccuccaugagaa

SEQ ID NO: 1985130 - RNA, 19 nt, Artificial Sequence
  Description of Artificial Sequence: Synthetic oligonucleotide
  Sense strand starting at position 821 of SEQ ID NO: 1880675
augacauucucaguuagga

SEQ ID NO: 1985131 - RNA, 19 nt, Artificial Sequence
  Description of Artificial Sequence: Synthetic oligonucleotide
  Antisense strand to SEQ ID NO: 1985130
uccuaacugagaaugucau

SEQ ID NO: 1985132 - RNA, 19 nt, Artificial Sequence
  Description of Artificial Sequence: Synthetic oligonucleotide
  Sense strand starting at position 995 of SEQ ID NO: 1880675
gaucauuaaugagugauuc

SEQ ID NO: 1985133 - RNA, 19 nt, Artificial Sequence
  Description of Artificial Sequence: Synthetic oligonucleotide
  Antisense strand to SEQ ID NO: 1985132
gaaucacucauuaaugauc

SEQ ID NO: 1985134 - RNA, 19 nt, Artificial Sequence
  Description of Artificial Sequence: Synthetic oligonucleotide
  Sense strand starting at position 996 of SEQ ID NO: 1880675
aucauuaaugagugauucu

SEQ ID NO: 1985135 - RNA, 19 nt, Artificial Sequence
  Description of Artificial Sequence: Synthetic oligonucleotide
  Antisense strand to SEQ ID NO: 1985134
agaaucacucauuaaugau

SEQ ID NO: 1985136 - RNA, 19 nt, Artificial Sequence
  Description of Artificial Sequence: Synthetic oligonucleotide
  Sense strand starting at position 999 of SEQ ID NO: 1880675
auuaaugagugauucuaga

SEQ ID NO: 1985137 - RNA, 19 nt, Artificial Sequence
  Description of Artificial Sequence: Synthetic oligonucleotide
  Antisense strand to SEQ ID NO: 1985136
ucuagaaucacucauuaau

SEQ ID NO: 1985138 - RNA, 19 nt, Artificial Sequence
  Description of Artificial Sequence: Synthetic oligonucleotide
  Sense strand starting at position 1012 of SEQ ID NO: 1880675
ucuagaagacuaugguuau

SEQ ID NO: 1985139 - RNA, 19 nt, Artificial Sequence
  Description of Artificial Sequence: Synthetic oligonucleotide
  Antisense strand to SEQ ID NO: 1985138
auaaccauagucuucuaga

SEQ ID NO: 1985140 - RNA, 19 nt, Artificial Sequence
  Description of Artificial Sequence: Synthetic oligonucleotide
  Sense strand starting at position 1272 of SEQ ID NO: 1880675
ugcucaauggcugauauga

SEQ ID NO: 1985141 - RNA, 19 nt, Artificial Sequence
  Description of Artificial Sequence: Synthetic oligonucleotide
  Antisense strand to SEQ ID NO: 1985140
ucauaucagccauugagca

SEQ ID NO: 1985142 - RNA, 19 nt, Artificial Sequence
  Description of Artificial Sequence: Synthetic oligonucleotide
  Sense strand starting at position 1335 of SEQ ID NO: 1880675
ucaacaucauggguuuaga

SEQ ID NO: 1985143 - RNA, 19 nt, Artificial Sequence
  Description of Artificial Sequence: Synthetic oligonucleotide
  Antisense strand to SEQ ID NO: 1985142
ucuaaacccaugauguuga

SEQ ID NO: 1985144 - RNA, 19 nt, Artificial Sequence
  Description of Artificial Sequence: Synthetic oligonucleotide
  Sense strand starting at position 1441 of SEQ ID NO: 1880675
gagacagaauuccugguuu

SEQ ID NO: 1985145 - RNA, 19 nt, Artificial Sequence
  Description of Artificial Sequence: Synthetic oligonucleotide
  Antisense strand to SEQ ID NO: 1985144
aaaccaggaauucugucuc

SEQ ID NO: 1985146 - RNA, 19 nt, Artificial Sequence
  Description of Artificial Sequence: Synthetic oligonucleotide
  Sense strand starting at position 1743 of SEQ ID NO: 1880675
uugagaucuuuguuuaagg

SEQ ID NO: 1985147 - RNA, 19 nt, Artificial Sequence
  Description of Artificial Sequence: Synthetic oligonucleotide
  Antisense strand to SEQ ID NO: 1985146
ccuuaaacaaagaucucaa

SEQ ID NO: 1985148 - RNA, 19 nt, Artificial Sequence
  Description of Artificial Sequence: Synthetic oligonucleotide
  Sense strand starting at position 1744 of SEQ ID NO: 1880675
ugagaucuuuguuuaagga

SEQ ID NO: 1985149 - RNA, 19 nt, Artificial Sequence
  Description of Artificial Sequence: Synthetic oligonucleotide
  Antisense strand to SEQ ID NO: 1985148
uccuuaaacaaagaucuca

SEQ ID NO: 1985150 - RNA, 19 nt, Artificial Sequence
  Description of Artificial Sequence: Synthetic oligonucleotide
  Sense strand starting at position 1752 of SEQ ID NO: 1880675
uuguuuaaggaguaucuuu

SEQ ID NO: 1985151 - RNA, 19 nt, Artificial Sequence
  Description of Artificial Sequence: Synthetic oligonucleotide
  Antisense strand to SEQ ID NO: 1985150
aaagauacuccuuaaacaa

SEQ ID NO: 1985152 - RNA, 19 nt, Artificial Sequence
  Description of Artificial Sequence: Synthetic oligonucleotide
  Sense strand starting at position 2040 of SEQ ID NO: 1880675
uugugauuccauuagaguu

SEQ ID NO: 1985153 - RNA, 19 nt, Artificial Sequence
  Description of Artificial Sequence: Synthetic oligonucleotide
  Antisense strand to SEQ ID NO: 1985152
aacucuaauggaaucacaa

SEQ ID NO: 1985154 - RNA, 19 nt, Artificial Sequence
  Description of Artificial Sequence: Synthetic oligonucleotide
  Sense strand starting at position 2063 of SEQ ID NO: 1880675
aaagguucucagggaacuu

SEQ ID NO: 1985155 - RNA, 19 nt, Artificial Sequence
  Description of Artificial Sequence: Synthetic oligonucleotide
  Antisense strand to SEQ ID NO: 1985154
aaguucccugagaaccuuu

SEQ ID NO: 1985156 - RNA, 19 nt, Artificial Sequence
  Description of Artificial Sequence: Synthetic oligonucleotide
  Sense strand starting at position 2117 of SEQ ID NO: 1880675
ggacuaagaucacuuaggu

SEQ ID NO: 1985157 - RNA, 19 nt, Artificial Sequence
  Description of Artificial Sequence: Synthetic oligonucleotide
  Antisense strand to SEQ ID NO: 1985156
accuaagugaucuuagucc

SEQ ID NO: 1985158 - RNA, 19 nt, Artificial Sequence
  Description of Artificial Sequence: Synthetic oligonucleotide
  Sense strand starting at position 2199 of SEQ ID NO: 1880675
ccuucuauggcaugagaag

SEQ ID NO: 1985159 - RNA, 19 nt, Artificial Sequence
  Description of Artificial Sequence: Synthetic oligonucleotide
  Antisense strand to SEQ ID NO: 1985158
cuucucaugccauagaagg

SEQ ID NO: 1985160 - RNA, 19 nt, Artificial Sequence
  Description of Artificial Sequence: Synthetic oligonucleotide
  Sense strand starting at position 2232 of SEQ ID NO: 1880675
ggcagaauucuguauauga

SEQ ID NO: 1985161 - RNA, 19 nt, Artificial Sequence
  Description of Artificial Sequence: Synthetic oligonucleotide
  Antisense strand to SEQ ID NO: 1985160
ucauauacagaauucugcc

SEQ ID NO: 1985162 - RNA, 19 nt, Artificial Sequence
  Description of Artificial Sequence: Synthetic oligonucleotide
  Sense strand starting at position 2450 of SEQ ID NO: 1880675
ugugucuuugccucuacuu

SEQ ID NO: 1985163 - RNA, 19 nt, Artificial Sequence
  Description of Artificial Sequence: Synthetic oligonucleotide
  Antisense strand to SEQ ID NO: 1985162
aaguagaggcaaagacaca

SEQ ID NO: 1985164 - RNA, 19 nt, Artificial Sequence
  Description of Artificial Sequence: Synthetic oligonucleotide
  Sense strand starting at position 2451 of SEQ ID NO: 1880675
gugucuuugccucuacuuu

SEQ ID NO: 1985165 - RNA, 19 nt, Artificial Sequence
  Description of Artificial Sequence: Synthetic oligonucleotide
  Antisense strand to SEQ ID NO: 1985164
aaaguagaggcaaagacac

SEQ ID NO: 1985166 - RNA, 19 nt, Artificial Sequence
  Description of Artificial Sequence: Synthetic oligonucleotide
  Sense strand starting at position 2504 of SEQ ID NO: 1880675
aagcuuuagcuguaagaga

SEQ ID NO: 1985167 - RNA, 19 nt, Artificial Sequence
  Description of Artificial Sequence: Synthetic oligonucleotide
  Antisense strand to SEQ ID NO: 1985166
ucucuuacagcuaaagcuu

SEQ ID NO: 1985168 - RNA, 19 nt, Artificial Sequence
  Description of Artificial Sequence: Synthetic oligonucleotide
  Sense strand starting at position 2513 of SEQ ID NO: 1880675
cuguaagagagccaguaaa

SEQ ID NO: 1985169 - RNA, 19 nt, Artificial Sequence
  Description of Artificial Sequence: Synthetic oligonucleotide
  Antisense strand to SEQ ID NO: 1985168
uuuacuggcucucuuacag

SEQ ID NO: 1985170 - RNA, 19 nt, Artificial Sequence
  Description of Artificial Sequence: Synthetic oligonucleotide
  Sense strand starting at position 2565 of SEQ ID NO: 1880675
gccuucuuugucguguuaa

SEQ ID NO: 1985171 - RNA, 19 nt, Artificial Sequence
  Description of Artificial Sequence: Synthetic oligonucleotide
  Antisense strand to SEQ ID NO: 1985170
uuaacacgacaaagaaggc

SEQ ID NO: 1985172 - RNA, 19 nt, Artificial Sequence
  Description of Artificial Sequence: Synthetic oligonucleotide
  Sense strand starting at position 2567 of SEQ ID NO: 1880675
cuucuuugucguguuaauu

SEQ ID NO: 1985173 - RNA, 19 nt, Artificial Sequence
  Description of Artificial Sequence: Synthetic oligonucleotide
  Antisense strand to SEQ ID NO: 1985172
aauuaacacgacaaagaag

SEQ ID NO: 1985174 - RNA, 19 nt, Artificial Sequence
  Description of Artificial Sequence: Synthetic oligonucleotide
  Sense strand starting at position 2568 of SEQ ID NO: 1880675
uucuuugucguguuaauuc

SEQ ID NO: 1985175 - RNA, 19 nt, Artificial Sequence
  Description of Artificial Sequence: Synthetic oligonucleotide
  Antisense strand to SEQ ID NO: 1985174
gaauuaacacgacaaagaa

SEQ ID NO: 1985176 - RNA, 19 nt, Artificial Sequence
  Description of Artificial Sequence: Synthetic oligonucleotide
  Sense strand starting at position 2728 of SEQ ID NO: 1880675
guugcuuguccagugguua

SEQ ID NO: 1985177 - RNA, 19 nt, Artificial Sequence
  Description of Artificial Sequence: Synthetic oligonucleotide
  Antisense strand to SEQ ID NO: 1985176
uaaccacuggacaagcaac

SEQ ID NO: 1985178 - RNA, 19 nt, Artificial Sequence
  Description of Artificial Sequence: Synthetic oligonucleotide
  Sense strand starting at position 2885 of SEQ ID NO: 1880675
gugguucuuagguaagaga

SEQ ID NO: 1985179 - RNA, 19 nt, Artificial Sequence
  Description of Artificial Sequence: Synthetic oligonucleotide
  Antisense strand to SEQ ID NO: 1985178
ucucuuaccuaagaaccac

SEQ ID NO: 1985180 - RNA, 19 nt, Artificial Sequence
  Description of Artificial Sequence: Synthetic oligonucleotide
  Sense strand starting at position 2901 of SEQ ID NO: 1880675
agaggauugcuuuagagug

SEQ ID NO: 1985181 - RNA, 19 nt, Artificial Sequence
  Description of Artificial Sequence: Synthetic oligonucleotide
  Antisense strand to SEQ ID NO: 1985180
cacucuaaagcaauccucu

SEQ ID NO: 1985182 - RNA, 19 nt, Artificial Sequence
  Description of Artificial Sequence: Synthetic oligonucleotide
  Sense strand starting at position 2968 of SEQ ID NO: 1880675
uguagugaguaaucagaga

SEQ ID NO: 1985183 - RNA, 19 nt, Artificial Sequence
  Description of Artificial Sequence: Synthetic oligonucleotide
  Antisense strand to SEQ ID NO: 1985182
ucucugauuacucacuaca

SEQ ID NO: 1985184 - RNA, 19 nt, Artificial Sequence
  Description of Artificial Sequence: Synthetic oligonucleotide
  Sense strand starting at position 2976 of SEQ ID NO: 1880675
guaaucagagagcauguaa

SEQ ID NO: 1985185 - RNA, 19 nt, Artificial Sequence
  Description of Artificial Sequence: Synthetic oligonucleotide
  Antisense strand to SEQ ID NO: 1985184
uuacaugcucucugauuac

SEQ ID NO: 1985186 - RNA, 19 nt, Artificial Sequence
  Description of Artificial Sequence: Synthetic oligonucleotide
  Sense strand starting at position 3072 of SEQ ID NO: 1880675
ucccaaggaguaugauauu

SEQ ID NO: 1985187 - RNA, 19 nt, Artificial Sequence
  Description of Artificial Sequence: Synthetic oligonucleotide
  Antisense strand to SEQ ID NO: 1985186
aauaucauacuccuuggga

SEQ ID NO: 1985188 - RNA, 19 nt, Artificial Sequence
  Description of Artificial Sequence: Synthetic oligonucleotide
  Sense strand starting at position 3099 of SEQ ID NO: 1880675
ucaguuaugaugugaagaa

SEQ ID NO: 1985189 - RNA, 19 nt, Artificial Sequence
  Description of Artificial Sequence: Synthetic oligonucleotide
  Antisense strand to SEQ ID NO: 1985188
uucuucacaucauaacuga

SEQ ID NO: 1985190 - RNA, 19 nt, Artificial Sequence
  Description of Artificial Sequence: Synthetic oligonucleotide
  Sense strand starting at position 3848 of SEQ ID NO: 1880675
acauuaagcuacuugaaag

SEQ ID NO: 1985191 - RNA, 19 nt, Artificial Sequence
  Description of Artificial Sequence: Synthetic oligonucleotide
  Antisense strand to SEQ ID NO: 1985190
cuuucaaguagcuuaaugu

SEQ ID NO: 1985192 - RNA, 19 nt, Artificial Sequence
  Description of Artificial Sequence: Synthetic oligonucleotide
  Sense strand starting at position 3887 of SEQ ID NO: 1880675
gcauauagcagauagguau

SEQ ID NO: 1985193 - RNA, 19 nt, Artificial Sequence
  Description of Artificial Sequence: Synthetic oligonucleotide
  Antisense strand to SEQ ID NO: 1985192
auaccuaucugcuauaugc

SEQ ID NO: 1985194 - RNA, 19 nt, Artificial Sequence
  Description of Artificial Sequence: Synthetic oligonucleotide
  Sense strand starting at position 3891 of SEQ ID NO: 1880675
auagcagauagguaugcau

SEQ ID NO: 1985195 - RNA, 19 nt, Artificial Sequence
  Description of Artificial Sequence: Synthetic oligonucleotide
  Antisense strand to SEQ ID NO: 1985194
augcauaccuaucugcuau

SEQ ID NO: 1985196 - RNA, 19 nt, Artificial Sequence
  Description of Artificial Sequence: Synthetic oligonucleotide
  Sense strand starting at position 3908 of SEQ ID NO: 1880675
auacucauuguugaguaaa

SEQ ID NO: 1985197 - RNA, 19 nt, Artificial Sequence
  Description of Artificial Sequence: Synthetic oligonucleotide
  Antisense strand to SEQ ID NO: 1985196
uuuacucaacaaugaguau

SEQ ID NO: 1985198 - RNA, 19 nt, Artificial Sequence
  Description of Artificial Sequence: Synthetic oligonucleotide
  Sense strand starting at position 99 of SEQ ID NO: 1880676
uaucaaaugaggugacgua

SEQ ID NO: 1985199 - RNA, 19 nt, Artificial Sequence
  Description of Artificial Sequence: Synthetic oligonucleotide
  Antisense strand to SEQ ID NO: 1985198
uacgucaccucauuugaua

SEQ ID NO: 1985200 - RNA, 19 nt, Artificial Sequence
  Description of Artificial Sequence: Synthetic oligonucleotide
  Sense strand starting at position 106 of SEQ ID NO: 1880676
ugaggugacguauaucaga

SEQ ID NO: 1985201 - RNA, 19 nt, Artificial Sequence
  Description of Artificial Sequence: Synthetic oligonucleotide
  Antisense strand to SEQ ID NO: 1985200
ucugauauacgucaccuca

SEQ ID NO: 1985202 - RNA, 19 nt, Artificial Sequence
  Description of Artificial Sequence: Synthetic oligonucleotide
  Sense strand starting at position 176 of SEQ ID NO: 1880676
cccauugaacaauggaguu

SEQ ID NO: 1985203 - RNA, 19 nt, Artificial Sequence
  Description of Artificial Sequence: Synthetic oligonucleotide
  Antisense strand to SEQ ID NO: 1985202
aacuccauuguucaauggg

SEQ ID NO: 1985204 - RNA, 19 nt, Artificial Sequence
  Description of Artificial Sequence: Synthetic oligonucleotide
  Sense strand starting at position 326 of SEQ ID NO: 1880676
guuuguucagguuuguguu

SEQ ID NO: 1985205 - RNA, 19 nt, Artificial Sequence
  Description of Artificial Sequence: Synthetic oligonucleotide
  Antisense strand to SEQ ID NO: 1985204
aacacaaaccugaacaaac

SEQ ID NO: 1985206 - RNA, 19 nt, Artificial Sequence
  Description of Artificial Sequence: Synthetic oligonucleotide
  Sense strand starting at position 399 of SEQ ID NO: 1880676
ggguuuauugaucagaggu

SEQ ID NO: 1985207 - RNA, 19 nt, Artificial Sequence
  Description of Artificial Sequence: Synthetic oligonucleotide
  Antisense strand to SEQ ID NO: 1985206
accucugaucaauaaaccc

SEQ ID NO: 1985208 - RNA, 19 nt, Artificial Sequence
  Description of Artificial Sequence: Synthetic oligonucleotide
  Sense strand starting at position 421 of SEQ ID NO: 1880676
gacucaugacguugaaacu

SEQ ID NO: 1985209 - RNA, 19 nt, Artificial Sequence
  Description of Artificial Sequence: Synthetic oligonucleotide
  Antisense strand to SEQ ID NO: 1985208
aguuucaacgucaugaguc

SEQ ID NO: 1985210 - RNA, 19 nt, Artificial Sequence
  Description of Artificial Sequence: Synthetic oligonucleotide
  Sense strand starting at position 433 of SEQ ID NO: 1880676
ugaaacugugccuacauaa

SEQ ID NO: 1985211 - RNA, 19 nt, Artificial Sequence
  Description of Artificial Sequence: Synthetic oligonucleotide
  Antisense strand to SEQ ID NO: 1985210
uuauguaggcacaguuuca

SEQ ID NO: 1985212 - RNA, 19 nt, Artificial Sequence
  Description of Artificial Sequence: Synthetic oligonucleotide
  Sense strand starting at position 570 of SEQ ID NO: 1880676
uucugaaggcugcauugau

SEQ ID NO: 1985213 - RNA, 19 nt, Artificial Sequence
  Description of Artificial Sequence: Synthetic oligonucleotide
  Antisense strand to SEQ ID NO: 1985212
aucaaugcagccuucagaa

SEQ ID NO: 1985214 - RNA, 19 nt, Artificial Sequence
  Description of Artificial Sequence: Synthetic oligonucleotide
  Sense strand starting at position 601 of SEQ ID NO: 1880676
ugcauaugggucgauugau

SEQ ID NO: 1985215 - RNA, 19 nt, Artificial Sequence
  Description of Artificial Sequence: Synthetic oligonucleotide
  Antisense strand to SEQ ID NO: 1985214
aucaaucgacccauaugca

SEQ ID NO: 1985216 - RNA, 19 nt, Artificial Sequence
  Description of Artificial Sequence: Synthetic oligonucleotide
  Sense strand starting at position 1181 of SEQ ID NO: 1880676
uaugcaauaugauugaugu

SEQ ID NO: 1985217 - RNA, 19 nt, Artificial Sequence
  Description of Artificial Sequence: Synthetic oligonucleotide
  Antisense strand to SEQ ID NO: 1985216
acaucaaucauauugcaua

SEQ ID NO: 1985218 - RNA, 19 nt, Artificial Sequence
  Description of Artificial Sequence: Synthetic oligonucleotide
  Sense strand starting at position 1182 of SEQ ID NO: 1880676
augcaauaugauugauguu

SEQ ID NO: 1985219 - RNA, 19 nt, Artificial Sequence
  Description of Artificial Sequence: Synthetic oligonucleotide
  Antisense strand to SEQ ID NO: 1985218
aacaucaaucauauugcau

SEQ ID NO: 1985220 - RNA, 19 nt, Artificial Sequence
  Description of Artificial Sequence: Synthetic oligonucleotide
  Sense strand starting at position 1332 of SEQ ID NO: 1880676
cugagaagcccuuacuuuc

SEQ ID NO: 1985221 - RNA, 19 nt, Artificial Sequence
  Description of Artificial Sequence: Synthetic oligonucleotide
  Antisense strand to SEQ ID NO: 1985220
gaaaguaagggcuucucag

SEQ ID NO: 1985222 - RNA, 19 nt, Artificial Sequence
  Description of Artificial Sequence: Synthetic oligonucleotide
  Sense strand starting at position 1463 of SEQ ID NO: 1880676
aguuguauugaagggauca

SEQ ID NO: 1985223 - RNA, 19 nt, Artificial Sequence
  Description of Artificial Sequence: Synthetic oligonucleotide
  Antisense strand to SEQ ID NO: 1985222
ugaucccuucaauacaacu

SEQ ID NO: 1985224 - RNA, 19 nt, Artificial Sequence
  Description of Artificial Sequence: Synthetic oligonucleotide
  Sense strand starting at position 1464 of SEQ ID NO: 1880676
guuguauugaagggaucaa

SEQ ID NO: 1985225 - RNA, 19 nt, Artificial Sequence
  Description of Artificial Sequence: Synthetic oligonucleotide
  Antisense strand to SEQ ID NO: 1985224
uugaucccuucaauacaac

SEQ ID NO: 1985226 - RNA, 19 nt, Artificial Sequence
  Description of Artificial Sequence: Synthetic oligonucleotide
  Sense strand starting at position 1520 of SEQ ID NO: 1880676
cgacuucauccagguggaa

SEQ ID NO: 1985227 - RNA, 19 nt, Artificial Sequence
  Description of Artificial Sequence: Synthetic oligonucleotide
  Antisense strand to SEQ ID NO: 1985226
uuccaccuggaugaagucg

SEQ ID NO: 1985228 - RNA, 19 nt, Artificial Sequence
  Description of Artificial Sequence: Synthetic oligonucleotide
  Sense strand starting at position 1773 of SEQ ID NO: 1880676
cuccaacuugcucagugau

SEQ ID NO: 1985229 - RNA, 19 nt, Artificial Sequence
  Description of Artificial Sequence: Synthetic oligonucleotide
  Antisense strand to SEQ ID NO: 1985228
aucacugagcaaguuggag

SEQ ID NO: 1985230 - RNA, 19 nt, Artificial Sequence
  Description of Artificial Sequence: Synthetic oligonucleotide
  Sense strand starting at position 1776 of SEQ ID NO: 1880676
caacuugcucagugaugag

SEQ ID NO: 1985231 - RNA, 19 nt, Artificial Sequence
  Description of Artificial Sequence: Synthetic oligonucleotide
  Antisense strand to SEQ ID NO: 1985230
cucaucacugagcaaguug

SEQ ID NO: 1985232 - RNA, 19 nt, Artificial Sequence
  Description of Artificial Sequence: Synthetic oligonucleotide
  Sense strand starting at position 2015 of SEQ ID NO: 1880676
gaaaucggaugugaauuua

SEQ ID NO: 1985233 - RNA, 19 nt, Artificial Sequence
  Description of Artificial Sequence: Synthetic oligonucleotide
  Antisense strand to SEQ ID NO: 1985232
uaaauucacauccgauuuc

SEQ ID NO: 1985234 - RNA, 19 nt, Artificial Sequence
  Description of Artificial Sequence: Synthetic oligonucleotide
  Sense strand starting at position 2077 of SEQ ID NO: 1880676
ugugucuugacagaagagu

SEQ ID NO: 1985235 - RNA, 19 nt, Artificial Sequence
  Description of Artificial Sequence: Synthetic oligonucleotide
  Antisense strand to SEQ ID NO: 1985234
acucuucugucaagacaca

SEQ ID NO: 1985236 - RNA, 19 nt, Artificial Sequence
  Description of Artificial Sequence: Synthetic oligonucleotide
  Sense strand starting at position 2154 of SEQ ID NO: 1880676
gggaacaagucuccugaca

SEQ ID NO: 1985237 - RNA, 19 nt, Artificial Sequence
  Description of Artificial Sequence: Synthetic oligonucleotide
  Antisense strand to SEQ ID NO: 1985236
ugucaggagacuuguuccc

SEQ ID NO: 1985238 - RNA, 19 nt, Artificial Sequence
  Description of Artificial Sequence: Synthetic oligonucleotide
  Sense strand starting at position 2188 of SEQ ID NO: 1880676
gguacugguuggagaagga

SEQ ID NO: 1985239 - RNA, 19 nt, Artificial Sequence
  Description of Artificial Sequence: Synthetic oligonucleotide
  Antisense strand to SEQ ID NO: 1985238
uccuucuccaaccaguacc

SEQ ID NO: 1985240 - RNA, 19 nt, Artificial Sequence
  Description of Artificial Sequence: Synthetic oligonucleotide
  Sense strand starting at position 2219 of SEQ ID NO: 1880676
gguuguguccagcucagca

SEQ ID NO: 1985241 - RNA, 19 nt, Artificial Sequence
  Description of Artificial Sequence: Synthetic oligonucleotide
  Antisense strand to SEQ ID NO: 1985240
ugcugagcuggacacaacc

SEQ ID NO: 1985242 - RNA, 19 nt, Artificial Sequence
  Description of Artificial Sequence: Synthetic oligonucleotide
  Sense strand starting at position 2469 of SEQ ID NO: 1880676
cagguaugugccuagaacu

SEQ ID NO: 1985243 - RNA, 19 nt, Artificial Sequence
  Description of Artificial Sequence: Synthetic oligonucleotide
  Antisense strand to SEQ ID NO: 1985242
aguucuaggcacauaccug

SEQ ID NO: 1985244 - RNA, 19 nt, Artificial Sequence
  Description of Artificial Sequence: Synthetic oligonucleotide
  Sense strand starting at position 2605 of SEQ ID NO: 1880676
gacucuugcgccuuuguga

SEQ ID NO: 1985245 - RNA, 19 nt, Artificial Sequence
  Description of Artificial Sequence: Synthetic oligonucleotide
  Antisense strand to SEQ ID NO: 1985244
ucacaaaggcgcaagaguc

SEQ ID NO: 1985246 - RNA, 19 nt, Artificial Sequence
  Description of Artificial Sequence: Synthetic oligonucleotide
  Sense strand starting at position 2624 of SEQ ID NO: 1880676
cugggugagcugugcauuu

SEQ ID NO: 1985247 - RNA, 19 nt, Artificial Sequence
  Description of Artificial Sequence: Synthetic oligonucleotide
  Antisense strand to SEQ ID NO: 1985246
aaaugcacagcucacccag

SEQ ID NO: 1985248 - RNA, 19 nt, Artificial Sequence
  Description of Artificial Sequence: Synthetic oligonucleotide
  Sense strand starting at position 2700 of SEQ ID NO: 1880676
aggaauagguguuuacagu

SEQ ID NO: 1985249 - RNA, 19 nt, Artificial Sequence
  Description of Artificial Sequence: Synthetic oligonucleotide
  Antisense strand to SEQ ID NO: 1985248
acuguaaacaccuauuccu

SEQ ID NO: 1985250 - RNA, 19 nt, Artificial Sequence
  Description of Artificial Sequence: Synthetic oligonucleotide
  Sense strand starting at position 2701 of SEQ ID NO: 1880676
ggaauagguguuuacaguc

SEQ ID NO: 1985251 - RNA, 19 nt, Artificial Sequence
  Description of Artificial Sequence: Synthetic oligonucleotide
  Antisense strand to SEQ ID NO: 1985250
gacuguaaacaccuauucc

SEQ ID NO: 1985252 - RNA, 19 nt, Artificial Sequence
  Description of Artificial Sequence: Synthetic oligonucleotide
  Sense strand starting at position 2809 of SEQ ID NO: 1880676
ggguuagcuccacaaacuu

SEQ ID NO: 1985253 - RNA, 19 nt, Artificial Sequence
  Description of Artificial Sequence: Synthetic oligonucleotide
  Antisense strand to SEQ ID NO: 1985252
aaguuuguggagcuaaccc

SEQ ID NO: 1985254 - RNA, 19 nt, Artificial Sequence
  Description of Artificial Sequence: Synthetic oligonucleotide
  Sense strand starting at position 3164 of SEQ ID NO: 1880676
ugccaaagcaucgaggauu

SEQ ID NO: 1985255 - RNA, 19 nt, Artificial Sequence
  Description of Artificial Sequence: Synthetic oligonucleotide
  Antisense strand to SEQ ID NO: 1985254
aauccucgaugcuuuggca

SEQ ID NO: 1985256 - RNA, 19 nt, Artificial Sequence
  Description of Artificial Sequence: Synthetic oligonucleotide
  Sense strand starting at position 3167 of SEQ ID NO: 1880676
caaagcaucgaggauuguu

SEQ ID NO: 1985257 - RNA, 19 nt, Artificial Sequence
  Description of Artificial Sequence: Synthetic oligonucleotide
  Antisense strand to SEQ ID NO: 1985256
aacaauccucgaugcuuug

SEQ ID NO: 1985258 - RNA, 19 nt, Artificial Sequence
  Description of Artificial Sequence: Synthetic oligonucleotide
  Sense strand starting at position 3177 of SEQ ID NO: 1880676
aggauuguuguugacugau

SEQ ID NO: 1985259 - RNA, 19 nt, Artificial Sequence
  Description of Artificial Sequence: Synthetic oligonucleotide
  Antisense strand to SEQ ID NO: 1985258
aucagucaacaacaauccu

SEQ ID NO: 1985260 - RNA, 19 nt, Artificial Sequence
  Description of Artificial Sequence: Synthetic oligonucleotide
  Sense strand starting at position 3180 of SEQ ID NO: 1880676
auuguuguugacugaugga

SEQ ID NO: 1985261 - RNA, 19 nt, Artificial Sequence
  Description of Artificial Sequence: Synthetic oligonucleotide
  Antisense strand to SEQ ID NO: 1985260
uccaucagucaacaacaau

SEQ ID NO: 1985262 - RNA, 19 nt, Artificial Sequence
  Description of Artificial Sequence: Synthetic oligonucleotide
  Sense strand starting at position 3282 of SEQ ID NO: 1880676
uucugucagguugaggaau

SEQ ID NO: 1985263 - RNA, 19 nt, Artificial Sequence
  Description of Artificial Sequence: Synthetic oligonucleotide
  Antisense strand to SEQ ID NO: 1985262
auuccucaaccugacagaa

SEQ ID NO: 1985264 - RNA, 19 nt, Artificial Sequence
  Description of Artificial Sequence: Synthetic oligonucleotide
  Sense strand starting at position 3295 of SEQ ID NO: 1880676
aggaauugucaaggauguc

SEQ ID NO: 1985265 - RNA, 19 nt, Artificial Sequence
  Description of Artificial Sequence: Synthetic oligonucleotide
  Antisense strand to SEQ ID NO: 1985264
gacauccuugacaauuccu

SEQ ID NO: 1985266 - RNA, 19 nt, Artificial Sequence
  Description of Artificial Sequence: Synthetic oligonucleotide
  Sense strand starting at position 3401 of SEQ ID NO: 1880676
gcuggagugugauuuggca

SEQ ID NO: 1985267 - RNA, 19 nt, Artificial Sequence
  Description of Artificial Sequence: Synthetic oligonucleotide
  Antisense strand to SEQ ID NO: 1985266
ugccaaaucacacuccagc

SEQ ID NO: 1985268 - RNA, 19 nt, Artificial Sequence
  Description of Artificial Sequence: Synthetic oligonucleotide
  Sense strand starting at position 3403 of SEQ ID NO: 1880676
uggagugugauuuggcacu

SEQ ID NO: 1985269 - RNA, 19 nt, Artificial Sequence
  Description of Artificial Sequence: Synthetic oligonucleotide
  Antisense strand to SEQ ID NO: 1985268
agugccaaaucacacucca

SEQ ID NO: 1985270 - RNA, 19 nt, Artificial Sequence
  Description of Artificial Sequence: Synthetic oligonucleotide
  Sense strand starting at position 3507 of SEQ ID NO: 1880676
ccaugauggccacaaggua

SEQ ID NO: 1985271 - RNA, 19 nt, Artificial Sequence
  Description of Artificial Sequence: Synthetic oligonucleotide
  Antisense strand to SEQ ID NO: 1985270
uaccuuguggccaucaugg

SEQ ID NO: 1985272 - RNA, 19 nt, Artificial Sequence
  Description of Artificial Sequence: Synthetic oligonucleotide
  Sense strand starting at position 3590 of SEQ ID NO: 1880676
ucaaguggugcauauagaa

SEQ ID NO: 1985273 - RNA, 19 nt, Artificial Sequence
  Description of Artificial Sequence: Synthetic oligonucleotide
  Antisense strand to SEQ ID NO: 1985272
uucuauaugcaccacuuga

SEQ ID NO: 1985274 - RNA, 19 nt, Artificial Sequence
  Description of Artificial Sequence: Synthetic oligonucleotide
  Sense strand starting at position 3675 of SEQ ID NO: 1880676
ggaacucauuaaguaagua

SEQ ID NO: 1985275 - RNA, 19 nt, Artificial Sequence
  Description of Artificial Sequence: Synthetic oligonucleotide
  Antisense strand to SEQ ID NO: 1985274
uacuuacuuaaugaguucc

SEQ ID NO: 1985276 - RNA, 19 nt, Artificial Sequence
  Description of Artificial Sequence: Synthetic oligonucleotide
  Sense strand starting at position 3845 of SEQ ID NO: 1880676
ccagaugaaugauaaagaa

SEQ ID NO: 1985277 - RNA, 19 nt, Artificial Sequence
  Description of Artificial Sequence: Synthetic oligonucleotide
  Antisense strand to SEQ ID NO: 1985276
uucuuuaucauucaucugg

SEQ ID NO: 1985278 - RNA, 19 nt, Artificial Sequence
  Description of Artificial Sequence: Synthetic oligonucleotide
  Sense strand starting at position 138 of SEQ ID NO: 1880677
cgaugagcaagucauauca

SEQ ID NO: 1985279 - RNA, 19 nt, Artificial Sequence
  Description of Artificial Sequence: Synthetic oligonucleotide
  Antisense strand to SEQ ID NO: 1985278
ugauaugacuugcucaucg

SEQ ID NO: 1985280 - RNA, 19 nt, Artificial Sequence
  Description of Artificial Sequence: Synthetic oligonucleotide
  Sense strand starting at position 333 of SEQ ID NO: 1880677
ccaugagucguggcugugu

SEQ ID NO: 1985281 - RNA, 19 nt, Artificial Sequence
  Description of Artificial Sequence: Synthetic oligonucleotide
  Antisense strand to SEQ ID NO: 1985280
acacagccacgacucaugg

SEQ ID NO: 1985282 - RNA, 19 nt, Artificial Sequence
  Description of Artificial Sequence: Synthetic oligonucleotide
  Sense strand starting at position 418 of SEQ ID NO: 1880677
agcagucagccauagacua

SEQ ID NO: 1985283 - RNA, 19 nt, Artificial Sequence
  Description of Artificial Sequence: Synthetic oligonucleotide
  Antisense strand to SEQ ID NO: 1985282
uagucuauggcugacugcu

SEQ ID NO: 1985284 - RNA, 19 nt, Artificial Sequence
  Description of Artificial Sequence: Synthetic oligonucleotide
  Sense strand starting at position 572 of SEQ ID NO: 1880677
ucuuacacaguuuaguaaa

SEQ ID NO: 1985285 - RNA, 19 nt, Artificial Sequence
  Description of Artificial Sequence: Synthetic oligonucleotide
  Antisense strand to SEQ ID NO: 1985284
uuuacuaaacuguguaaga

SEQ ID NO: 1985286 - RNA, 19 nt, Artificial Sequence
  Description of Artificial Sequence: Synthetic oligonucleotide
  Sense strand starting at position 735 of SEQ ID NO: 1880677
gugguauaauacuuauaac

SEQ ID NO: 1985287 - RNA, 19 nt, Artificial Sequence
  Description of Artificial Sequence: Synthetic oligonucleotide
  Antisense strand to SEQ ID NO: 1985286
guuauaaguauuauaccac

SEQ ID NO: 1985288 - RNA, 19 nt, Artificial Sequence
  Description of Artificial Sequence: Synthetic oligonucleotide
  Sense strand starting at position 769 of SEQ ID NO: 1880677
aagugugccaguggaauuu

SEQ ID NO: 1985289 - RNA, 19 nt, Artificial Sequence
  Description of Artificial Sequence: Synthetic oligonucleotide
  Antisense strand to SEQ ID NO: 1985288
aaauuccacuggcacacuu

SEQ ID NO: 1985290 - RNA, 19 nt, Artificial Sequence
  Description of Artificial Sequence: Synthetic oligonucleotide
  Sense strand starting at position 816 of SEQ ID NO: 1880677
ccgucagcacugucuaguu

SEQ ID NO: 1985291 - RNA, 19 nt, Artificial Sequence
  Description of Artificial Sequence: Synthetic oligonucleotide
  Antisense strand to SEQ ID NO: 1985290
aacuagacagugcugacgg

SEQ ID NO: 1985292 - RNA, 19 nt, Artificial Sequence
  Description of Artificial Sequence: Synthetic oligonucleotide
  Sense strand starting at position 826 of SEQ ID NO: 1880677
ugucuaguuccagaaguuu

SEQ ID NO: 1985293 - RNA, 19 nt, Artificial Sequence
  Description of Artificial Sequence: Synthetic oligonucleotide
  Antisense strand to SEQ ID NO: 1985292
aaacuucuggaacuagaca

SEQ ID NO: 1985294 - RNA, 19 nt, Artificial Sequence
  Description of Artificial Sequence: Synthetic oligonucleotide
  Sense strand starting at position 987 of SEQ ID NO: 1880677
aguggaaucauccgauaca

SEQ ID NO: 1985295 - RNA, 19 nt, Artificial Sequence
  Description of Artificial Sequence: Synthetic oligonucleotide
  Antisense strand to SEQ ID NO: 1985294
uguaucggaugauuccacu

SEQ ID NO: 1985296 - RNA, 19 nt, Artificial Sequence
  Description of Artificial Sequence: Synthetic oligonucleotide
  Sense strand starting at position 1084 of SEQ ID NO: 1880677
cccucuauagcugaagaau

SEQ ID NO: 1985297 - RNA, 19 nt, Artificial Sequence
  Description of Artificial Sequence: Synthetic oligonucleotide
  Antisense strand to SEQ ID NO: 1985296
auucuucagcuauagaggg

SEQ ID NO: 1985298 - RNA, 19 nt, Artificial Sequence
  Description of Artificial Sequence: Synthetic oligonucleotide
  Sense strand starting at position 1186 of SEQ ID NO: 1880677
uggguagagcugcacuuaa

SEQ ID NO: 1985299 - RNA, 19 nt, Artificial Sequence
  Description of Artificial Sequence: Synthetic oligonucleotide
  Antisense strand to SEQ ID NO: 1985298
uuaagugcagcucuaccca

SEQ ID NO: 1985300 - RNA, 19 nt, Artificial Sequence
  Description of Artificial Sequence: Synthetic oligonucleotide
  Sense strand starting at position 1226 of SEQ ID NO: 1880677
uugaacaccugucuuagau

SEQ ID NO: 1985301 - RNA, 19 nt, Artificial Sequence
  Description of Artificial Sequence: Synthetic oligonucleotide
  Antisense strand to SEQ ID NO: 1985300
aucuaagacagguguucaa

SEQ ID NO: 1985302 - RNA, 19 nt, Artificial Sequence
  Description of Artificial Sequence: Synthetic oligonucleotide
  Sense strand starting at position 1281 of SEQ ID NO: 1880677
cguggucauccuaggugua

SEQ ID NO: 1985303 - RNA, 19 nt, Artificial Sequence
  Description of Artificial Sequence: Synthetic oligonucleotide
  Antisense strand to SEQ ID NO: 1985302
uacaccuaggaugaccacg

SEQ ID NO: 1985304 - RNA, 19 nt, Artificial Sequence
  Description of Artificial Sequence: Synthetic oligonucleotide
  Sense strand starting at position 1595 of SEQ ID NO: 1880677
ccuugacaccggcaugaua

SEQ ID NO: 1985305 - RNA, 19 nt, Artificial Sequence
  Description of Artificial Sequence: Synthetic oligonucleotide
  Antisense strand to SEQ ID NO: 1985304
uaucaugccggugucaagg

SEQ ID NO: 1985306 - RNA, 19 nt, Artificial Sequence
  Description of Artificial Sequence: Synthetic oligonucleotide
  Sense strand starting at position 1606 of SEQ ID NO: 1880677
gcaugauaucaggaucccu

SEQ ID NO: 1985307 - RNA, 19 nt, Artificial Sequence
  Description of Artificial Sequence: Synthetic oligonucleotide
  Antisense strand to SEQ ID NO: 1985306
agggauccugauaucaugc

SEQ ID NO: 1985308 - RNA, 19 nt, Artificial Sequence
  Description of Artificial Sequence: Synthetic oligonucleotide
  Sense strand starting at position 1778 of SEQ ID NO: 1880677
uuaagaugugcucaugaga

SEQ ID NO: 1985309 - RNA, 19 nt, Artificial Sequence
  Description of Artificial Sequence: Synthetic oligonucleotide
  Antisense strand to SEQ ID NO: 1985308
ucucaugagcacaucuuaa

SEQ ID NO: 1985310 - RNA, 19 nt, Artificial Sequence
  Description of Artificial Sequence: Synthetic oligonucleotide
  Sense strand starting at position 1787 of SEQ ID NO: 1880677
gcucaugagaggcauggau

SEQ ID NO: 1985311 - RNA, 19 nt, Artificial Sequence
  Description of Artificial Sequence: Synthetic oligonucleotide
  Antisense strand to SEQ ID NO: 1985310
auccaugccucucaugagc

SEQ ID NO: 1985312 - RNA, 19 nt, Artificial Sequence
  Description of Artificial Sequence: Synthetic oligonucleotide
  Sense strand starting at position 2073 of SEQ ID NO: 1880677
acugauucucuguagguga

SEQ ID NO: 1985313 - RNA, 19 nt, Artificial Sequence
  Description of Artificial Sequence: Synthetic oligonucleotide
  Antisense strand to SEQ ID NO: 1985312
ucaccuacagagaaucagu

SEQ ID NO: 1985314 - RNA, 19 nt, Artificial Sequence
  Description of Artificial Sequence: Synthetic oligonucleotide
  Sense strand starting at position 2340 of SEQ ID NO: 1880677
aguugaaggcuuuggaacu

SEQ ID NO: 1985315 - RNA, 19 nt, Artificial Sequence
  Description of Artificial Sequence: Synthetic oligonucleotide
  Antisense strand to SEQ ID NO: 1985314
aguuccaaagccuucaacu

SEQ ID NO: 1985316 - RNA, 19 nt, Artificial Sequence
  Description of Artificial Sequence: Synthetic oligonucleotide
  Sense strand starting at position 2556 of SEQ ID NO: 1880677
cggguggguguccagagau

SEQ ID NO: 1985317 - RNA, 19 nt, Artificial Sequence
  Description of Artificial Sequence: Synthetic oligonucleotide
  Antisense strand to SEQ ID NO: 1985316
aucucuggacacccacccg

SEQ ID NO: 1985318 - RNA, 19 nt, Artificial Sequence
  Description of Artificial Sequence: Synthetic oligonucleotide
  Sense strand starting at position 2586 of SEQ ID NO: 1880677
aaccaugugggucauguau

SEQ ID NO: 1985319 - RNA, 19 nt, Artificial Sequence
  Description of Artificial Sequence: Synthetic oligonucleotide
  Antisense strand to SEQ ID NO: 1985318
auacaugacccacaugguu

SEQ ID NO: 1985320 - RNA, 19 nt, Artificial Sequence
  Description of Artificial Sequence: Synthetic oligonucleotide
  Sense strand starting at position 2755 of SEQ ID NO: 1880677
aucuuauaagagugauugu

SEQ ID NO: 1985321 - RNA, 19 nt, Artificial Sequence
  Description of Artificial Sequence: Synthetic oligonucleotide
  Antisense strand to SEQ ID NO: 1985320
acaaucacucuuauaagau

SEQ ID NO: 1985322 - RNA, 19 nt, Artificial Sequence
  Description of Artificial Sequence: Synthetic oligonucleotide
  Sense strand starting at position 2758 of SEQ ID NO: 1880677
uuauaagagugauuguaac

SEQ ID NO: 1985323 - RNA, 19 nt, Artificial Sequence
  Description of Artificial Sequence: Synthetic oligonucleotide
  Antisense strand to SEQ ID NO: 1985322
guuacaaucacucuuauaa

SEQ ID NO: 1985324 - RNA, 19 nt, Artificial Sequence
  Description of Artificial Sequence: Synthetic oligonucleotide
  Sense strand starting at position 2967 of SEQ ID NO: 1880677
ucuuaauuugcaugugucu

SEQ ID NO: 1985325 - RNA, 19 nt, Artificial Sequence
  Description of Artificial Sequence: Synthetic oligonucleotide
  Antisense strand to SEQ ID NO: 1985324
agacacaugcaaauuaaga

SEQ ID NO: 1985326 - RNA, 19 nt, Artificial Sequence
  Description of Artificial Sequence: Synthetic oligonucleotide
  Sense strand starting at position 2992 of SEQ ID NO: 1880677
cuccauggucuuuaaaggu

SEQ ID NO: 1985327 - RNA, 19 nt, Artificial Sequence
  Description of Artificial Sequence: Synthetic oligonucleotide
  Antisense strand to SEQ ID NO: 1985326
accuuuaaagaccauggag

SEQ ID NO: 1985328 - RNA, 19 nt, Artificial Sequence
  Description of Artificial Sequence: Synthetic oligonucleotide
  Sense strand starting at position 3180 of SEQ ID NO: 1880677
ggcaucauauuucugucua

SEQ ID NO: 1985329 - RNA, 19 nt, Artificial Sequence
  Description of Artificial Sequence: Synthetic oligonucleotide
  Antisense strand to SEQ ID NO: 1985328
uagacagaaauaugaugcc

SEQ ID NO: 1985330 - RNA, 19 nt, Artificial Sequence
  Description of Artificial Sequence: Synthetic oligonucleotide
  Sense strand starting at position 3236 of SEQ ID NO: 1880677
gacccucugaguugguaga

SEQ ID NO: 1985331 - RNA, 19 nt, Artificial Sequence
  Description of Artificial Sequence: Synthetic oligonucleotide
  Antisense strand to SEQ ID NO: 1985330
ucuaccaacucagaggguc

SEQ ID NO: 1985332 - RNA, 19 nt, Artificial Sequence
  Description of Artificial Sequence: Synthetic oligonucleotide
  Sense strand starting at position 3238 of SEQ ID NO: 1880677
cccucugaguugguagaga

SEQ ID NO: 1985333 - RNA, 19 nt, Artificial Sequence
  Description of Artificial Sequence: Synthetic oligonucleotide
  Antisense strand to SEQ ID NO: 1985332
ucucuaccaacucagaggg

SEQ ID NO: 1985334 - RNA, 19 nt, Artificial Sequence
  Description of Artificial Sequence: Synthetic oligonucleotide
  Sense strand starting at position 3246 of SEQ ID NO: 1880677
guugguagagauugaagca

SEQ ID NO: 1985335 - RNA, 19 nt, Artificial Sequence
  Description of Artificial Sequence: Synthetic oligonucleotide
  Antisense strand to SEQ ID NO: 1985334
ugcuucaaucucuaccaac

SEQ ID NO: 1985336 - RNA, 19 nt, Artificial Sequence
  Description of Artificial Sequence: Synthetic oligonucleotide
  Sense strand starting at position 3311 of SEQ ID NO: 1880677
ugaaucucauucuuggcaa

SEQ ID NO: 1985337 - RNA, 19 nt, Artificial Sequence
  Description of Artificial Sequence: Synthetic oligonucleotide
  Antisense strand to SEQ ID NO: 1985336
uugccaagaaugagauuca

SEQ ID NO: 1985338 - RNA, 19 nt, Artificial Sequence
  Description of Artificial Sequence: Synthetic oligonucleotide
  Sense strand starting at position 3369 of SEQ ID NO: 1880677
ugcacugucccauaaggua

SEQ ID NO: 1985339 - RNA, 19 nt, Artificial Sequence
  Description of Artificial Sequence: Synthetic oligonucleotide
  Antisense strand to SEQ ID NO: 1985338
uaccuuaugggacagugca

SEQ ID NO: 1985340 - RNA, 19 nt, Artificial Sequence
  Description of Artificial Sequence: Synthetic oligonucleotide
  Sense strand starting at position 3522 of SEQ ID NO: 1880677
ugaguauaauuagcagaaa

SEQ ID NO: 1985341 - RNA, 19 nt, Artificial Sequence
  Description of Artificial Sequence: Synthetic oligonucleotide
  Antisense strand to SEQ ID NO: 1985340
uuucugcuaauuauacuca

SEQ ID NO: 1985342 - RNA, 19 nt, Artificial Sequence
  Description of Artificial Sequence: Synthetic oligonucleotide
  Sense strand starting at position 3525 of SEQ ID NO: 1880677
guauaauuagcagaaaguc

SEQ ID NO: 1985343 - RNA, 19 nt, Artificial Sequence
  Description of Artificial Sequence: Synthetic oligonucleotide
  Antisense strand to SEQ ID NO: 1985342
gacuuucugcuaauuauac

SEQ ID NO: 1985344 - RNA, 19 nt, Artificial Sequence
  Description of Artificial Sequence: Synthetic oligonucleotide
  Sense strand starting at position 3583 of SEQ ID NO: 1880677
ugaguccucugaguggaga

SEQ ID NO: 1985345 - RNA, 19 nt, Artificial Sequence
  Description of Artificial Sequence: Synthetic oligonucleotide
  Antisense strand to SEQ ID NO: 1985344
ucuccacucagaggacuca

SEQ ID NO: 1985346 - RNA, 19 nt, Artificial Sequence
  Description of Artificial Sequence: Synthetic oligonucleotide
  Sense strand starting at position 3607 of SEQ ID NO: 1880677
auagucucuccauaguaag

SEQ ID NO: 1985347 - RNA, 19 nt, Artificial Sequence
  Description of Artificial Sequence: Synthetic oligonucleotide
  Antisense strand to SEQ ID NO: 1985346
cuuacuauggagagacuau

SEQ ID NO: 1985348 - RNA, 19 nt, Artificial Sequence
  Description of Artificial Sequence: Synthetic oligonucleotide
  Sense strand starting at position 3742 of SEQ ID NO: 1880677
uugcaacuccauuagugau

SEQ ID NO: 1985349 - RNA, 19 nt, Artificial Sequence
  Description of Artificial Sequence: Synthetic oligonucleotide
  Antisense strand to SEQ ID NO: 1985348
aucacuaauggaguugcaa

SEQ ID NO: 1985350 - RNA, 19 nt, Artificial Sequence
  Description of Artificial Sequence: Synthetic oligonucleotide
  Sense strand starting at position 3782 of SEQ ID NO: 1880677
ucccuaucucuguaggaua

SEQ ID NO: 1985351 - RNA, 19 nt, Artificial Sequence
  Description of Artificial Sequence: Synthetic oligonucleotide
  Antisense strand to SEQ ID NO: 1985350
uauccuacagagauaggga

SEQ ID NO: 1985352 - RNA, 19 nt, Artificial Sequence
  Description of Artificial Sequence: Synthetic oligonucleotide
  Sense strand starting at position 3797 of SEQ ID NO: 1880677
gauaguugcagggaagcaa

SEQ ID NO: 1985353 - RNA, 19 nt, Artificial Sequence
  Description of Artificial Sequence: Synthetic oligonucleotide
  Antisense strand to SEQ ID NO: 1985352
uugcuucccugcaacuauc

SEQ ID NO: 1985354 - RNA, 19 nt, Artificial Sequence
  Description of Artificial Sequence: Synthetic oligonucleotide
  Sense strand starting at position 3862 of SEQ ID NO: 1880677
ggaacugucucaguaugaa

SEQ ID NO: 1985355 - RNA, 19 nt, Artificial Sequence
  Description of Artificial Sequence: Synthetic oligonucleotide
  Antisense strand to SEQ ID NO: 1985354
uucauacugagacaguucc

SEQ ID NO: 1985356 - RNA, 19 nt, Artificial Sequence
  Description of Artificial Sequence: Synthetic oligonucleotide
  Sense strand starting at position 3969 of SEQ ID NO: 1880677
agaaacugucagugaugca

SEQ ID NO: 1985357 - RNA, 19 nt, Artificial Sequence
  Description of Artificial Sequence: Synthetic oligonucleotide
  Antisense strand to SEQ ID NO: 1985356
ugcaucacugacaguuucu

SEQ ID NO: 1985358 - RNA, 19 nt, Artificial Sequence
  Description of Artificial Sequence: Synthetic oligonucleotide
  Sense strand starting at position 166 of SEQ ID NO: 1880678
agaaauggccuauguauac

SEQ ID NO: 1985359 - RNA, 19 nt, Artificial Sequence
  Description of Artificial Sequence: Synthetic oligonucleotide
  Antisense strand to SEQ ID NO: 1985358
guauacauaggccauuucu

SEQ ID NO: 1985360 - RNA, 19 nt, Artificial Sequence
  Description of Artificial Sequence: Synthetic oligonucleotide
  Sense strand starting at position 333 of SEQ ID NO: 1880678
ugcagaauacucuggccua

SEQ ID NO: 1985361 - RNA, 19 nt, Artificial Sequence
  Description of Artificial Sequence: Synthetic oligonucleotide
  Antisense strand to SEQ ID NO: 1985360
uaggccagaguauucugca

SEQ ID NO: 1985362 - RNA, 19 nt, Artificial Sequence
  Description of Artificial Sequence: Synthetic oligonucleotide
  Sense strand starting at position 336 of SEQ ID NO: 1880678
agaauacucuggccuaauu

SEQ ID NO: 1985363 - RNA, 19 nt, Artificial Sequence
  Description of Artificial Sequence: Synthetic oligonucleotide
  Antisense strand to SEQ ID NO: 1985362
aauuaggccagaguauucu

SEQ ID NO: 1985364 - RNA, 19 nt, Artificial Sequence
  Description of Artificial Sequence: Synthetic oligonucleotide
  Sense strand starting at position 614 of SEQ ID NO: 1880678
ggaaaucuugcugaucuug

SEQ ID NO: 1985365 - RNA, 19 nt, Artificial Sequence
  Description of Artificial Sequence: Synthetic oligonucleotide
  Antisense strand to SEQ ID NO: 1985364
caagaucagcaagauuucc

SEQ ID NO: 1985366 - RNA, 19 nt, Artificial Sequence
  Description of Artificial Sequence: Synthetic oligonucleotide
  Sense strand starting at position 638 of SEQ ID NO: 1880678
uucccaaaugcaugggaaa

SEQ ID NO: 1985367 - RNA, 19 nt, Artificial Sequence
  Description of Artificial Sequence: Synthetic oligonucleotide
  Antisense strand to SEQ ID NO: 1985366
uuucccaugcauuugggaa

SEQ ID NO: 1985368 - RNA, 19 nt, Artificial Sequence
  Description of Artificial Sequence: Synthetic oligonucleotide
  Sense strand starting at position 639 of SEQ ID NO: 1880678
ucccaaaugcaugggaaau

SEQ ID NO: 1985369 - RNA, 19 nt, Artificial Sequence
  Description of Artificial Sequence: Synthetic oligonucleotide
  Antisense strand to SEQ ID NO: 1985368
auuucccaugcauuuggga

SEQ ID NO: 1985370 - RNA, 19 nt, Artificial Sequence
  Description of Artificial Sequence: Synthetic oligonucleotide
  Sense strand starting at position 776 of SEQ ID NO: 1880678
agaucuaagccagaaugca

SEQ ID NO: 1985371 - RNA, 19 nt, Artificial Sequence
  Description of Artificial Sequence: Synthetic oligonucleotide
  Antisense strand to SEQ ID NO: 1985370
ugcauucuggcuuagaucu

SEQ ID NO: 1985372 - RNA, 19 nt, Artificial Sequence
  Description of Artificial Sequence: Synthetic oligonucleotide
  Sense strand starting at position 1425 of SEQ ID NO: 1880678
guaaguuauuuacaucaac

SEQ ID NO: 1985373 - RNA, 19 nt, Artificial Sequence
  Description of Artificial Sequence: Synthetic oligonucleotide
  Antisense strand to SEQ ID NO: 1985372
guugauguaaauaacuuac

SEQ ID NO: 1985374 - RNA, 19 nt, Artificial Sequence
  Description of Artificial Sequence: Synthetic oligonucleotide
  Sense strand starting at position 1579 of SEQ ID NO: 1880678
gacaaauucuggccauguc

SEQ ID NO: 1985375 - RNA, 19 nt, Artificial Sequence
  Description of Artificial Sequence: Synthetic oligonucleotide
  Antisense strand to SEQ ID NO: 1985374
gacauggccagaauuuguc

SEQ ID NO: 1985376 - RNA, 19 nt, Artificial Sequence
  Description of Artificial Sequence: Synthetic oligonucleotide
  Sense strand starting at position 1613 of SEQ ID NO: 1880678
ggguaguaagagugggaaa

SEQ ID NO: 1985377 - RNA, 19 nt, Artificial Sequence
  Description of Artificial Sequence: Synthetic oligonucleotide
  Antisense strand to SEQ ID NO: 1985376
uuucccacucuuacuaccc

SEQ ID NO: 1985378 - RNA, 19 nt, Artificial Sequence
  Description of Artificial Sequence: Synthetic oligonucleotide
  Sense strand starting at position 1614 of SEQ ID NO: 1880678
gguaguaagagugggaaau

SEQ ID NO: 1985379 - RNA, 19 nt, Artificial Sequence
  Description of Artificial Sequence: Synthetic oligonucleotide
  Antisense strand to SEQ ID NO: 1985378
auuucccacucuuacuacc

SEQ ID NO: 1985380 - RNA, 19 nt, Artificial Sequence
  Description of Artificial Sequence: Synthetic oligonucleotide
  Sense strand starting at position 1615 of SEQ ID NO: 1880678
guaguaagagugggaaaug

SEQ ID NO: 1985381 - RNA, 19 nt, Artificial Sequence
  Description of Artificial Sequence: Synthetic oligonucleotide
  Antisense strand to SEQ ID NO: 1985380
cauuucccacucuuacuac

SEQ ID NO: 1985382 - RNA, 19 nt, Artificial Sequence
  Description of Artificial Sequence: Synthetic oligonucleotide
  Sense strand starting at position 1778 of SEQ ID NO: 1880678
ugaggaggugcccagcaau

SEQ ID NO: 1985383 - RNA, 19 nt, Artificial Sequence
  Description of Artificial Sequence: Synthetic oligonucleotide
  Antisense strand to SEQ ID NO: 1985382
auugcugggcaccuccuca

SEQ ID NO: 1985384 - RNA, 19 nt, Artificial Sequence
  Description of Artificial Sequence: Synthetic oligonucleotide
  Sense strand starting at position 1790 of SEQ ID NO: 1880678
cagcaaucugagcguauuu

SEQ ID NO: 1985385 - RNA, 19 nt, Artificial Sequence
  Description of Artificial Sequence: Synthetic oligonucleotide
  Antisense strand to SEQ ID NO: 1985384
aaauacgcucagauugcug

SEQ ID NO: 1985386 - RNA, 19 nt, Artificial Sequence
  Description of Artificial Sequence: Synthetic oligonucleotide
  Sense strand starting at position 1929 of SEQ ID NO: 1880678
gcuccaugcagggaugaca

SEQ ID NO: 1985387 - RNA, 19 nt, Artificial Sequence
  Description of Artificial Sequence: Synthetic oligonucleotide
  Antisense strand to SEQ ID NO: 1985386
ugucaucccugcauggagc

SEQ ID NO: 1985388 - RNA, 19 nt, Artificial Sequence
  Description of Artificial Sequence: Synthetic oligonucleotide
  Sense strand starting at position 2004 of SEQ ID NO: 1880678
gcaagucaucacggagaau

SEQ ID NO: 1985389 - RNA, 19 nt, Artificial Sequence
  Description of Artificial Sequence: Synthetic oligonucleotide
  Antisense strand to SEQ ID NO: 1985388
auucuccgugaugacuugc

SEQ ID NO: 1985390 - RNA, 19 nt, Artificial Sequence
  Description of Artificial Sequence: Synthetic oligonucleotide
  Sense strand starting at position 2016 of SEQ ID NO: 1880678
ggagaauccucggcuccuu

SEQ ID NO: 1985391 - RNA, 19 nt, Artificial Sequence
  Description of Artificial Sequence: Synthetic oligonucleotide
  Antisense strand to SEQ ID NO: 1985390
aaggagccgaggauucucc

SEQ ID NO: 1985392 - RNA, 19 nt, Artificial Sequence
  Description of Artificial Sequence: Synthetic oligonucleotide
  Sense strand starting at position 2084 of SEQ ID NO: 1880678
gugccaaccucauccagaa

SEQ ID NO: 1985393 - RNA, 19 nt, Artificial Sequence
  Description of Artificial Sequence: Synthetic oligonucleotide
  Antisense strand to SEQ ID NO: 1985392
uucuggaugagguuggcac

SEQ ID NO: 1985394 - RNA, 19 nt, Artificial Sequence
  Description of Artificial Sequence: Synthetic oligonucleotide
  Sense strand starting at position 2126 of SEQ ID NO: 1880678
gagggugucaucgaauauc

SEQ ID NO: 1985395 - RNA, 19 nt, Artificial Sequence
  Description of Artificial Sequence: Synthetic oligonucleotide
  Antisense strand to SEQ ID NO: 1985394
gauauucgaugacacccuc

SEQ ID NO: 1985396 - RNA, 19 nt, Artificial Sequence
  Description of Artificial Sequence: Synthetic oligonucleotide
  Sense strand starting at position 2145 of SEQ ID NO: 1880678
ugccaaucugcugacaagu

SEQ ID NO: 1985397 - RNA, 19 nt, Artificial Sequence
  Description of Artificial Sequence: Synthetic oligonucleotide
  Antisense strand to SEQ ID NO: 1985396
acuugucagcagauuggca

SEQ ID NO: 1985398 - RNA, 19 nt, Artificial Sequence
  Description of Artificial Sequence: Synthetic oligonucleotide
  Sense strand starting at position 2169 of SEQ ID NO: 1880678
ucccaauggccauggagaa

SEQ ID NO: 1985399 - RNA, 19 nt, Artificial Sequence
  Description of Artificial Sequence: Synthetic oligonucleotide
  Antisense strand to SEQ ID NO: 1985398
uucuccauggccauuggga

SEQ ID NO: 1985400 - RNA, 19 nt, Artificial Sequence
  Description of Artificial Sequence: Synthetic oligonucleotide
  Sense strand starting at position 2170 of SEQ ID NO: 1880678
cccaauggccauggagaaa

SEQ ID NO: 1985401 - RNA, 19 nt, Artificial Sequence
  Description of Artificial Sequence: Synthetic oligonucleotide
  Antisense strand to SEQ ID NO: 1985400
uuucuccauggccauuggg

SEQ ID NO: 1985402 - RNA, 19 nt, Artificial Sequence
  Description of Artificial Sequence: Synthetic oligonucleotide
  Sense strand starting at position 2222 of SEQ ID NO: 1880678
ccaugagaacacugcuauu

SEQ ID NO: 1985403 - RNA, 19 nt, Artificial Sequence
  Description of Artificial Sequence: Synthetic oligonucleotide
  Antisense strand to SEQ ID NO: 1985402
aauagcaguguucucaugg

SEQ ID NO: 1985404 - RNA, 19 nt, Artificial Sequence
  Description of Artificial Sequence: Synthetic oligonucleotide
  Sense strand starting at position 2281 of SEQ ID NO: 1880678
uauauaucacgauguugac

SEQ ID NO: 1985405 - RNA, 19 nt, Artificial Sequence
  Description of Artificial Sequence: Synthetic oligonucleotide
  Antisense strand to SEQ ID NO: 1985404
gucaacaucgugauauaua

SEQ ID NO: 1985406 - RNA, 19 nt, Artificial Sequence
  Description of Artificial Sequence: Synthetic oligonucleotide
  Sense strand starting at position 2310 of SEQ ID NO: 1880678
aauguuuaguucuuaggga

SEQ ID NO: 1985407 - RNA, 19 nt, Artificial Sequence
  Description of Artificial Sequence: Synthetic oligonucleotide
  Antisense strand to SEQ ID NO: 1985406
ucccuaagaacuaaacauu

SEQ ID NO: 1985408 - RNA, 19 nt, Artificial Sequence
  Description of Artificial Sequence: Synthetic oligonucleotide
  Sense strand starting at position 2671 of SEQ ID NO: 1880678
gugcuugaccagcaaucau

SEQ ID NO: 1985409 - RNA, 19 nt, Artificial Sequence
  Description of Artificial Sequence: Synthetic oligonucleotide
  Antisense strand to SEQ ID NO: 1985408
augauugcuggucaagcac

SEQ ID NO: 1985410 - RNA, 19 nt, Artificial Sequence
  Description of Artificial Sequence: Synthetic oligonucleotide
  Sense strand starting at position 2718 of SEQ ID NO: 1880678
cuaggaggccucuaguaag

SEQ ID NO: 1985411 - RNA, 19 nt, Artificial Sequence
  Description of Artificial Sequence: Synthetic oligonucleotide
  Antisense strand to SEQ ID NO: 1985410
cuuacuagaggccuccuag

SEQ ID NO: 1985412 - RNA, 19 nt, Artificial Sequence
  Description of Artificial Sequence: Synthetic oligonucleotide
  Sense strand starting at position 2784 of SEQ ID NO: 1880678
acgugaggccucuagaucu

SEQ ID NO: 1985413 - RNA, 19 nt, Artificial Sequence
  Description of Artificial Sequence: Synthetic oligonucleotide
  Antisense strand to SEQ ID NO: 1985412
agaucuagaggccucacgu

SEQ ID NO: 1985414 - RNA, 19 nt, Artificial Sequence
  Description of Artificial Sequence: Synthetic oligonucleotide
  Sense strand starting at position 2883 of SEQ ID NO: 1880678
cagccaugugugcaacaga

SEQ ID NO: 1985415 - RNA, 19 nt, Artificial Sequence
  Description of Artificial Sequence: Synthetic oligonucleotide
  Antisense strand to SEQ ID NO: 1985414
ucuguugcacacauggcug

SEQ ID NO: 1985416 - RNA, 19 nt, Artificial Sequence
  Description of Artificial Sequence: Synthetic oligonucleotide
  Sense strand starting at position 2886 of SEQ ID NO: 1880678
ccaugugugcaacagaacu

SEQ ID NO: 1985417 - RNA, 19 nt, Artificial Sequence
  Description of Artificial Sequence: Synthetic oligonucleotide
  Antisense strand to SEQ ID NO: 1985416
aguucuguugcacacaugg

SEQ ID NO: 1985418 - RNA, 19 nt, Artificial Sequence
  Description of Artificial Sequence: Synthetic oligonucleotide
  Sense strand starting at position 2912 of SEQ ID NO: 1880678
ccagcuuuggcugaaagca

SEQ ID NO: 1985419 - RNA, 19 nt, Artificial Sequence
  Description of Artificial Sequence: Synthetic oligonucleotide
  Antisense strand to SEQ ID NO: 1985418
ugcuuucagccaaagcugg

SEQ ID NO: 1985420 - RNA, 19 nt, Artificial Sequence
  Description of Artificial Sequence: Synthetic oligonucleotide
  Sense strand starting at position 2970 of SEQ ID NO: 1880678
uguguccuuccuggaagau

SEQ ID NO: 1985421 - RNA, 19 nt, Artificial Sequence
  Description of Artificial Sequence: Synthetic oligonucleotide
  Antisense strand to SEQ ID NO: 1985420
aucuuccaggaaggacaca

SEQ ID NO: 1985422 - RNA, 19 nt, Artificial Sequence
  Description of Artificial Sequence: Synthetic oligonucleotide
  Sense strand starting at position 2971 of SEQ ID NO: 1880678
guguccuuccuggaagauc

SEQ ID NO: 1985423 - RNA, 19 nt, Artificial Sequence
  Description of Artificial Sequence: Synthetic oligonucleotide
  Antisense strand to SEQ ID NO: 1985422
gaucuuccaggaaggacac

SEQ ID NO: 1985424 - RNA, 19 nt, Artificial Sequence
  Description of Artificial Sequence: Synthetic oligonucleotide
  Sense strand starting at position 3002 of SEQ ID NO: 1880678
acaucugugucuccugaau

SEQ ID NO: 1985425 - RNA, 19 nt, Artificial Sequence
  Description of Artificial Sequence: Synthetic oligonucleotide
  Antisense strand to SEQ ID NO: 1985424
auucaggagacacagaugu

SEQ ID NO: 1985426 - RNA, 19 nt, Artificial Sequence
  Description of Artificial Sequence: Synthetic oligonucleotide
  Sense strand starting at position 3150 of SEQ ID NO: 1880678
ggccaaaucugucuccaca

SEQ ID NO: 1985427 - RNA, 19 nt, Artificial Sequence
  Description of Artificial Sequence: Synthetic oligonucleotide
  Antisense strand to SEQ ID NO: 1985426
uguggagacagauuuggcc

SEQ ID NO: 1985428 - RNA, 19 nt, Artificial Sequence
  Description of Artificial Sequence: Synthetic oligonucleotide
  Sense strand starting at position 3637 of SEQ ID NO: 1880678
gagaaacaccuguguaaau

SEQ ID NO: 1985429 - RNA, 19 nt, Artificial Sequence
  Description of Artificial Sequence: Synthetic oligonucleotide
  Antisense strand to SEQ ID NO: 1985428
auuuacacagguguuucuc

SEQ ID NO: 1985430 - RNA, 19 nt, Artificial Sequence
  Description of Artificial Sequence: Synthetic oligonucleotide
  Sense strand starting at position 3638 of SEQ ID NO: 1880678
agaaacaccuguguaaauu

SEQ ID NO: 1985431 - RNA, 19 nt, Artificial Sequence
  Description of Artificial Sequence: Synthetic oligonucleotide
  Antisense strand to SEQ ID NO: 1985430
aauuuacacagguguuucu

SEQ ID NO: 1985432 - RNA, 19 nt, Artificial Sequence
  Description of Artificial Sequence: Synthetic oligonucleotide
  Sense strand starting at position 3646 of SEQ ID NO: 1880678
cuguguaaauuugucuuau

SEQ ID NO: 1985433 - RNA, 19 nt, Artificial Sequence
  Description of Artificial Sequence: Synthetic oligonucleotide
  Antisense strand to SEQ ID NO: 1985432
auaagacaaauuuacacag

SEQ ID NO: 1985434 - RNA, 19 nt, Artificial Sequence
  Description of Artificial Sequence: Synthetic oligonucleotide
  Sense strand starting at position 3650 of SEQ ID NO: 1880678
guaaauuugucuuauaggg

SEQ ID NO: 1985435 - RNA, 19 nt, Artificial Sequence
  Description of Artificial Sequence: Synthetic oligonucleotide
  Antisense strand to SEQ ID NO: 1985434
cccuauaagacaaauuuac

SEQ ID NO: 1985436 - RNA, 19 nt, Artificial Sequence
  Description of Artificial Sequence: Synthetic oligonucleotide
  Sense strand starting at position 3789 of SEQ ID NO: 1880678
guggacagucacgauucuu

SEQ ID NO: 1985437 - RNA, 19 nt, Artificial Sequence
  Description of Artificial Sequence: Synthetic oligonucleotide
  Antisense strand to SEQ ID NO: 1985436
aagaaucgugacuguccac

SEQ ID NO: 1985438 - RNA, 19 nt, Artificial Sequence
  Description of Artificial Sequence: Synthetic oligonucleotide
  Sense strand starting at position 80 of SEQ ID NO: 1880679
ugcccacuugacuaguaga

SEQ ID NO: 1985439 - RNA, 19 nt, Artificial Sequence
  Description of Artificial Sequence: Synthetic oligonucleotide
  Antisense strand to SEQ ID NO: 1985438
ucuacuagucaagugggca

SEQ ID NO: 1985440 - RNA, 19 nt, Artificial Sequence
  Description of Artificial Sequence: Synthetic oligonucleotide
  Sense strand starting at position 322 of SEQ ID NO: 1880679
cuuucuuguccgcuugacu

SEQ ID NO: 1985441 - RNA, 19 nt, Artificial Sequence
  Description of Artificial Sequence: Synthetic oligonucleotide
  Antisense strand to SEQ ID NO: 1985440
agucaagcggacaagaaag

SEQ ID NO: 1985442 - RNA, 19 nt, Artificial Sequence
  Description of Artificial Sequence: Synthetic oligonucleotide
  Sense strand starting at position 435 of SEQ ID NO: 1880679
uggugaaggagcuaaguaa

SEQ ID NO: 1985443 - RNA, 19 nt, Artificial Sequence
  Description of Artificial Sequence: Synthetic oligonucleotide
  Antisense strand to SEQ ID NO: 1985442
uuacuuagcuccuucacca

SEQ ID NO: 1985444 - RNA, 19 nt, Artificial Sequence
  Description of Artificial Sequence: Synthetic oligonucleotide
  Sense strand starting at position 607 of SEQ ID NO: 1880679
gcaguucaggacugauaug

SEQ ID NO: 1985445 - RNA, 19 nt, Artificial Sequence
  Description of Artificial Sequence: Synthetic oligonucleotide
  Antisense strand to SEQ ID NO: 1985444
cauaucaguccugaacugc

SEQ ID NO: 1985446 - RNA, 19 nt, Artificial Sequence
  Description of Artificial Sequence: Synthetic oligonucleotide
  Sense strand starting at position 612 of SEQ ID NO: 1880679
ucaggacugauauggcaau

SEQ ID NO: 1985447 - RNA, 19 nt, Artificial Sequence
  Description of Artificial Sequence: Synthetic oligonucleotide
  Antisense strand to SEQ ID NO: 1985446
auugccauaucaguccuga

SEQ ID NO: 1985448 - RNA, 19 nt, Artificial Sequence
  Description of Artificial Sequence: Synthetic oligonucleotide
  Sense strand starting at position 803 of SEQ ID NO: 1880679
accuauuggccagaacuua

SEQ ID NO: 1985449 - RNA, 19 nt, Artificial Sequence
  Description of Artificial Sequence: Synthetic oligonucleotide
  Antisense strand to SEQ ID NO: 1985448
uaaguucuggccaauaggu

SEQ ID NO: 1985450 - RNA, 19 nt, Artificial Sequence
  Description of Artificial Sequence: Synthetic oligonucleotide
  Sense strand starting at position 905 of SEQ ID NO: 1880679
gacucaguggcuuaaacga

SEQ ID NO: 1985451 - RNA, 19 nt, Artificial Sequence
  Description of Artificial Sequence: Synthetic oligonucleotide
  Antisense strand to SEQ ID NO: 1985450
ucguuuaagccacugaguc

SEQ ID NO: 1985452 - RNA, 19 nt, Artificial Sequence
  Description of Artificial Sequence: Synthetic oligonucleotide
  Sense strand starting at position 997 of SEQ ID NO: 1880679
aucaaagugucauccaaga

SEQ ID NO: 1985453 - RNA, 19 nt, Artificial Sequence
  Description of Artificial Sequence: Synthetic oligonucleotide
  Antisense strand to SEQ ID NO: 1985452
ucuuggaugacacuuugau

SEQ ID NO: 1985454 - RNA, 19 nt, Artificial Sequence
  Description of Artificial Sequence: Synthetic oligonucleotide
  Sense strand starting at position 1056 of SEQ ID NO: 1880679
acugguuaugggcaggauu

SEQ ID NO: 1985455 - RNA, 19 nt, Artificial Sequence
  Description of Artificial Sequence: Synthetic oligonucleotide
  Antisense strand to SEQ ID NO: 1985454
aauccugcccauaaccagu

SEQ ID NO: 1985456 - RNA, 19 nt, Artificial Sequence
  Description of Artificial Sequence: Synthetic oligonucleotide
  Sense strand starting at position 1447 of SEQ ID NO: 1880679
ggguuuaaaggcuauauac

SEQ ID NO: 1985457 - RNA, 19 nt, Artificial Sequence
  Description of Artificial Sequence: Synthetic oligonucleotide
  Antisense strand to SEQ ID NO: 1985456
guauauagccuuuaaaccc

SEQ ID NO: 1985458 - RNA, 19 nt, Artificial Sequence
  Description of Artificial Sequence: Synthetic oligonucleotide
  Sense strand starting at position 1517 of SEQ ID NO: 1880679
ucuuuauuuggguggcuau

SEQ ID NO: 1985459 - RNA, 19 nt, Artificial Sequence
  Description of Artificial Sequence: Synthetic oligonucleotide
  Antisense strand to SEQ ID NO: 1985458
auagccacccaaauaaaga

SEQ ID NO: 1985460 - RNA, 19 nt, Artificial Sequence
  Description of Artificial Sequence: Synthetic oligonucleotide
  Sense strand starting at position 1574 of SEQ ID NO: 1880679
guaguucuaugacuggaga

SEQ ID NO: 1985461 - RNA, 19 nt, Artificial Sequence
  Description of Artificial Sequence: Synthetic oligonucleotide
  Antisense strand to SEQ ID NO: 1985460
ucuccagucauagaacuac

SEQ ID NO: 1985462 - RNA, 19 nt, Artificial Sequence
  Description of Artificial Sequence: Synthetic oligonucleotide
  Sense strand starting at position 1575 of SEQ ID NO: 1880679
uaguucuaugacuggagaa

SEQ ID NO: 1985463 - RNA, 19 nt, Artificial Sequence
  Description of Artificial Sequence: Synthetic oligonucleotide
  Antisense strand to SEQ ID NO: 1985462
uucuccagucauagaacua

SEQ ID NO: 1985464 - RNA, 19 nt, Artificial Sequence
  Description of Artificial Sequence: Synthetic oligonucleotide
  Sense strand starting at position 1842 of SEQ ID NO: 1880679
auacaagugcuagacaagu

SEQ ID NO: 1985465 - RNA, 19 nt, Artificial Sequence
  Description of Artificial Sequence: Synthetic oligonucleotide
  Antisense strand to SEQ ID NO: 1985464
acuugucuagcacuuguau

SEQ ID NO: 1985466 - RNA, 19 nt, Artificial Sequence
  Description of Artificial Sequence: Synthetic oligonucleotide
  Sense strand starting at position 1848 of SEQ ID NO: 1880679
gugcuagacaaguggaaau

SEQ ID NO: 1985467 - RNA, 19 nt, Artificial Sequence
  Description of Artificial Sequence: Synthetic oligonucleotide
  Antisense strand to SEQ ID NO: 1985466
auuuccacuugucuagcac

SEQ ID NO: 1985468 - RNA, 19 nt, Artificial Sequence
  Description of Artificial Sequence: Synthetic oligonucleotide
  Sense strand starting at position 1913 of SEQ ID NO: 1880679
gaugucacacagugaagau

SEQ ID NO: 1985469 - RNA, 19 nt, Artificial Sequence
  Description of Artificial Sequence: Synthetic oligonucleotide
  Antisense strand to SEQ ID NO: 1985468
aucuucacugugugacauc

SEQ ID NO: 1985470 - RNA, 19 nt, Artificial Sequence
  Description of Artificial Sequence: Synthetic oligonucleotide
  Sense strand starting at position 2019 of SEQ ID NO: 1880679
guugcacgauuucuaugaa

SEQ ID NO: 1985471 - RNA, 19 nt, Artificial Sequence
  Description of Artificial Sequence: Synthetic oligonucleotide
  Antisense strand to SEQ ID NO: 1985470
uucauagaaaucgugcaac

SEQ ID NO: 1985472 - RNA, 19 nt, Artificial Sequence
  Description of Artificial Sequence: Synthetic oligonucleotide
  Sense strand starting at position 2045 of SEQ ID NO: 1880679
guuaaucauguccaguaca

SEQ ID NO: 1985473 - RNA, 19 nt, Artificial Sequence
  Description of Artificial Sequence: Synthetic oligonucleotide
  Antisense strand to SEQ ID NO: 1985472
uguacuggacaugauuaac

SEQ ID NO: 1985474 - RNA, 19 nt, Artificial Sequence
  Description of Artificial Sequence: Synthetic oligonucleotide
  Sense strand starting at position 2157 of SEQ ID NO: 1880679
ggugguuuagagagccguu

SEQ ID NO: 1985475 - RNA, 19 nt, Artificial Sequence
  Description of Artificial Sequence: Synthetic oligonucleotide
  Antisense strand to SEQ ID NO: 1985474
aacggcucucuaaaccacc

SEQ ID NO: 1985476 - RNA, 19 nt, Artificial Sequence
  Description of Artificial Sequence: Synthetic oligonucleotide
  Sense strand starting at position 2164 of SEQ ID NO: 1880679
uagagagccguuggaagaa

SEQ ID NO: 1985477 - RNA, 19 nt, Artificial Sequence
  Description of Artificial Sequence: Synthetic oligonucleotide
  Antisense strand to SEQ ID NO: 1985476
uucuuccaacggcucucua

SEQ ID NO: 1985478 - RNA, 19 nt, Artificial Sequence
  Description of Artificial Sequence: Synthetic oligonucleotide
  Sense strand starting at position 2361 of SEQ ID NO: 1880679
gugguccuugaguaacaca

SEQ ID NO: 1985479 - RNA, 19 nt, Artificial Sequence
  Description of Artificial Sequence: Synthetic oligonucleotide
  Antisense strand to SEQ ID NO: 1985478
uguguuacucaaggaccac

SEQ ID NO: 1985480 - RNA, 19 nt, Artificial Sequence
  Description of Artificial Sequence: Synthetic oligonucleotide
  Sense strand starting at position 2528 of SEQ ID NO: 1880679
uuaaaccgucgggauaaga

SEQ ID NO: 1985481 - RNA, 19 nt, Artificial Sequence
  Description of Artificial Sequence: Synthetic oligonucleotide
  Antisense strand to SEQ ID NO: 1985480
ucuuaucccgacgguuuaa

SEQ ID NO: 1985482 - RNA, 19 nt, Artificial Sequence
  Description of Artificial Sequence: Synthetic oligonucleotide
  Sense strand starting at position 2777 of SEQ ID NO: 1880679
uccaaagguuuagcugaga

SEQ ID NO: 1985483 - RNA, 19 nt, Artificial Sequence
  Description of Artificial Sequence: Synthetic oligonucleotide
  Antisense strand to SEQ ID NO: 1985482
ucucagcuaaaccuuugga

SEQ ID NO: 1985484 - RNA, 19 nt, Artificial Sequence
  Description of Artificial Sequence: Synthetic oligonucleotide
  Sense strand starting at position 2877 of SEQ ID NO: 1880679
ugguguuaagaguagggau

SEQ ID NO: 1985485 - RNA, 19 nt, Artificial Sequence
  Description of Artificial Sequence: Synthetic oligonucleotide
  Antisense strand to SEQ ID NO: 1985484
aucccuacucuuaacacca

SEQ ID NO: 1985486 - RNA, 19 nt, Artificial Sequence
  Description of Artificial Sequence: Synthetic oligonucleotide
  Sense strand starting at position 2879 of SEQ ID NO: 1880679
guguuaagaguagggauga

SEQ ID NO: 1985487 - RNA, 19 nt, Artificial Sequence
  Description of Artificial Sequence: Synthetic oligonucleotide
  Antisense strand to SEQ ID NO: 1985486
ucaucccuacucuuaacac

SEQ ID NO: 1985488 - RNA, 19 nt, Artificial Sequence
  Description of Artificial Sequence: Synthetic oligonucleotide
  Sense strand starting at position 3024 of SEQ ID NO: 1880679
ggguuucaccucugaggau

SEQ ID NO: 1985489 - RNA, 19 nt, Artificial Sequence
  Description of Artificial Sequence: Synthetic oligonucleotide
  Antisense strand to SEQ ID NO: 1985488
auccucagaggugaaaccc

SEQ ID NO: 1985490 - RNA, 19 nt, Artificial Sequence
  Description of Artificial Sequence: Synthetic oligonucleotide
  Sense strand starting at position 3147 of SEQ ID NO: 1880679
ggauuaauugcacacuauu

SEQ ID NO: 1985491 - RNA, 19 nt, Artificial Sequence
  Description of Artificial Sequence: Synthetic oligonucleotide
  Antisense strand to SEQ ID NO: 1985490
aauagugugcaauuaaucc

SEQ ID NO: 1985492 - RNA, 19 nt, Artificial Sequence
  Description of Artificial Sequence: Synthetic oligonucleotide
  Sense strand starting at position 3185 of SEQ ID NO: 1880679
aguuaaauagcuuaaaggu

SEQ ID NO: 1985493 - RNA, 19 nt, Artificial Sequence
  Description of Artificial Sequence: Synthetic oligonucleotide
  Antisense strand to SEQ ID NO: 1985492
accuuuaagcuauuuaacu

SEQ ID NO: 1985494 - RNA, 19 nt, Artificial Sequence
  Description of Artificial Sequence: Synthetic oligonucleotide
  Sense strand starting at position 3376 of SEQ ID NO: 1880679
ucaggaguugugggagaaa

SEQ ID NO: 1985495 - RNA, 19 nt, Artificial Sequence
  Description of Artificial Sequence: Synthetic oligonucleotide
  Antisense strand to SEQ ID NO: 1985494
uuucucccacaacuccuga

SEQ ID NO: 1985496 - RNA, 19 nt, Artificial Sequence
  Description of Artificial Sequence: Synthetic oligonucleotide
  Sense strand starting at position 3395 of SEQ ID NO: 1880679
aguggaaaugucugaacug

SEQ ID NO: 1985497 - RNA, 19 nt, Artificial Sequence
  Description of Artificial Sequence: Synthetic oligonucleotide
  Antisense strand to SEQ ID NO: 1985496
caguucagacauuuccacu

SEQ ID NO: 1985498 - RNA, 19 nt, Artificial Sequence
  Description of Artificial Sequence: Synthetic oligonucleotide
  Sense strand starting at position 3402 of SEQ ID NO: 1880679
augucugaacuguacucau

SEQ ID NO: 1985499 - RNA, 19 nt, Artificial Sequence
  Description of Artificial Sequence: Synthetic oligonucleotide
  Antisense strand to SEQ ID NO: 1985498
augaguacaguucagacau

SEQ ID NO: 1985500 - RNA, 19 nt, Artificial Sequence
  Description of Artificial Sequence: Synthetic oligonucleotide
  Sense strand starting at position 3405 of SEQ ID NO: 1880679
ucugaacuguacucauuga

SEQ ID NO: 1985501 - RNA, 19 nt, Artificial Sequence
  Description of Artificial Sequence: Synthetic oligonucleotide
  Antisense strand to SEQ ID NO: 1985500
ucaaugaguacaguucaga

SEQ ID NO: 1985502 - RNA, 19 nt, Artificial Sequence
  Description of Artificial Sequence: Synthetic oligonucleotide
  Sense strand starting at position 3482 of SEQ ID NO: 1880679
uuauuaggcagcuagauga

SEQ ID NO: 1985503 - RNA, 19 nt, Artificial Sequence
  Description of Artificial Sequence: Synthetic oligonucleotide
  Antisense strand to SEQ ID NO: 1985502
ucaucuagcugccuaauaa

SEQ ID NO: 1985504 - RNA, 19 nt, Artificial Sequence
  Description of Artificial Sequence: Synthetic oligonucleotide
  Sense strand starting at position 3595 of SEQ ID NO: 1880679
cacagaggccauuggauua

SEQ ID NO: 1985505 - RNA, 19 nt, Artificial Sequence
  Description of Artificial Sequence: Synthetic oligonucleotide
  Antisense strand to SEQ ID NO: 1985504
uaauccaauggccucugug

SEQ ID NO: 1985506 - RNA, 19 nt, Artificial Sequence
  Description of Artificial Sequence: Synthetic oligonucleotide
  Sense strand starting at position 3686 of SEQ ID NO: 1880679
uccagucugugauuaaaua

SEQ ID NO: 1985507 - RNA, 19 nt, Artificial Sequence
  Description of Artificial Sequence: Synthetic oligonucleotide
  Antisense strand to SEQ ID NO: 1985506
uauuuaaucacagacugga

SEQ ID NO: 1985508 - RNA, 19 nt, Artificial Sequence
  Description of Artificial Sequence: Synthetic oligonucleotide
  Sense strand starting at position 3687 of SEQ ID NO: 1880679
ccagucugugauuaaauag

SEQ ID NO: 1985509 - RNA, 19 nt, Artificial Sequence
  Description of Artificial Sequence: Synthetic oligonucleotide
  Antisense strand to SEQ ID NO: 1985508
cuauuuaaucacagacugg

SEQ ID NO: 1985510 - RNA, 19 nt, Artificial Sequence
  Description of Artificial Sequence: Synthetic oligonucleotide
  Sense strand starting at position 3785 of SEQ ID NO: 1880679
agagucuggagucauuacu

SEQ ID NO: 1985511 - RNA, 19 nt, Artificial Sequence
  Description of Artificial Sequence: Synthetic oligonucleotide
  Antisense strand to SEQ ID NO: 1985510
aguaaugacuccagacucu

SEQ ID NO: 1985512 - RNA, 19 nt, Artificial Sequence
  Description of Artificial Sequence: Synthetic oligonucleotide
  Sense strand starting at position 3842 of SEQ ID NO: 1880679
ugaguuggacacugaaguu

SEQ ID NO: 1985513 - RNA, 19 nt, Artificial Sequence
  Description of Artificial Sequence: Synthetic oligonucleotide
  Antisense strand to SEQ ID NO: 1985512
aacuucaguguccaacuca

SEQ ID NO: 1985514 - RNA, 19 nt, Artificial Sequence
  Description of Artificial Sequence: Synthetic oligonucleotide
  Sense strand starting at position 3852 of SEQ ID NO: 1880679
acugaaguuuggguaggau

SEQ ID NO: 1985515 - RNA, 19 nt, Artificial Sequence
  Description of Artificial Sequence: Synthetic oligonucleotide
  Antisense strand to SEQ ID NO: 1985514
auccuacccaaacuucagu

SEQ ID NO: 1985516 - RNA, 19 nt, Artificial Sequence
  Description of Artificial Sequence: Synthetic oligonucleotide
  Sense strand starting at position 3944 of SEQ ID NO: 1880679
agaagcaaucccuauaagu

SEQ ID NO: 1985517 - RNA, 19 nt, Artificial Sequence
  Description of Artificial Sequence: Synthetic oligonucleotide
  Antisense strand to SEQ ID NO: 1985516
acuuauagggauugcuucu

SEQ ID NO: 1985518 - RNA, 19 nt, Artificial Sequence
  Description of Artificial Sequence: Synthetic oligonucleotide
  Sense strand starting at position 602 of SEQ ID NO: 1880680
uccagaagguucucucgau

SEQ ID NO: 1985519 - RNA, 19 nt, Artificial Sequence
  Description of Artificial Sequence: Synthetic oligonucleotide
  Antisense strand to SEQ ID NO: 1985518
aucgagagaaccuucugga

SEQ ID NO: 1985520 - RNA, 19 nt, Artificial Sequence
  Description of Artificial Sequence: Synthetic oligonucleotide
  Sense strand starting at position 603 of SEQ ID NO: 1880680
ccagaagguucucucgauc

SEQ ID NO: 1985521 - RNA, 19 nt, Artificial Sequence
  Description of Artificial Sequence: Synthetic oligonucleotide
  Antisense strand to SEQ ID NO: 1985520
gaucgagagaaccuucugg

SEQ ID NO: 1985522 - RNA, 19 nt, Artificial Sequence
  Description of Artificial Sequence: Synthetic oligonucleotide
  Sense strand starting at position 859 of SEQ ID NO: 1880680
gaccuuguuuaggugaaga

SEQ ID NO: 1985523 - RNA, 19 nt, Artificial Sequence
  Description of Artificial Sequence: Synthetic oligonucleotide
  Antisense strand to SEQ ID NO: 1985522
ucuucaccuaaacaagguc

SEQ ID NO: 1985524 - RNA, 19 nt, Artificial Sequence
  Description of Artificial Sequence: Synthetic oligonucleotide
  Sense strand starting at position 898 of SEQ ID NO: 1880680
uuuguaucaugaccgggaa

SEQ ID NO: 1985525 - RNA, 19 nt, Artificial Sequence
  Description of Artificial Sequence: Synthetic oligonucleotide
  Antisense strand to SEQ ID NO: 1985524
uucccggucaugauacaaa

SEQ ID NO: 1985526 - RNA, 19 nt, Artificial Sequence
  Description of Artificial Sequence: Synthetic oligonucleotide
  Sense strand starting at position 899 of SEQ ID NO: 1880680
uuguaucaugaccgggaaa

SEQ ID NO: 1985527 - RNA, 19 nt, Artificial Sequence
  Description of Artificial Sequence: Synthetic oligonucleotide
  Antisense strand to SEQ ID NO: 1985526
uuucccggucaugauacaa

SEQ ID NO: 1985528 - RNA, 19 nt, Artificial Sequence
  Description of Artificial Sequence: Synthetic oligonucleotide
  Sense strand starting at position 900 of SEQ ID NO: 1880680
uguaucaugaccgggaaag

SEQ ID NO: 1985529 - RNA, 19 nt, Artificial Sequence
  Description of Artificial Sequence: Synthetic oligonucleotide
  Antisense strand to SEQ ID NO: 1985528
cuuucccggucaugauaca

SEQ ID NO: 1985530 - RNA, 19 nt, Artificial Sequence
  Description of Artificial Sequence: Synthetic oligonucleotide
  Sense strand starting at position 1166 of SEQ ID NO: 1880680
cagggagcuccuggaauca

SEQ ID NO: 1985531 - RNA, 19 nt, Artificial Sequence
  Description of Artificial Sequence: Synthetic oligonucleotide
  Antisense strand to SEQ ID NO: 1985530
ugauuccaggagcucccug

SEQ ID NO: 1985532 - RNA, 19 nt, Artificial Sequence
  Description of Artificial Sequence: Synthetic oligonucleotide
  Sense strand starting at position 1307 of SEQ ID NO: 1880680
aacccagaauccucgguuu

SEQ ID NO: 1985533 - RNA, 19 nt, Artificial Sequence
  Description of Artificial Sequence: Synthetic oligonucleotide
  Antisense strand to SEQ ID NO: 1985532
aaaccgaggauucuggguu

SEQ ID NO: 1985534 - RNA, 19 nt, Artificial Sequence
  Description of Artificial Sequence: Synthetic oligonucleotide
  Sense strand starting at position 1309 of SEQ ID NO: 1880680
cccagaauccucgguuucu

SEQ ID NO: 1985535 - RNA, 19 nt, Artificial Sequence
  Description of Artificial Sequence: Synthetic oligonucleotide
  Antisense strand to SEQ ID NO: 1985534
agaaaccgaggauucuggg

SEQ ID NO: 1985536 - RNA, 19 nt, Artificial Sequence
  Description of Artificial Sequence: Synthetic oligonucleotide
  Sense strand starting at position 1310 of SEQ ID NO: 1880680
ccagaauccucgguuucua

SEQ ID NO: 1985537 - RNA, 19 nt, Artificial Sequence
  Description of Artificial Sequence: Synthetic oligonucleotide
  Antisense strand to SEQ ID NO: 1985536
uagaaaccgaggauucugg

SEQ ID NO: 1985538 - RNA, 19 nt, Artificial Sequence
  Description of Artificial Sequence: Synthetic oligonucleotide
  Sense strand starting at position 1362 of SEQ ID NO: 1880680
ugggaccuugagugaugaa

SEQ ID NO: 1985539 - RNA, 19 nt, Artificial Sequence
  Description of Artificial Sequence: Synthetic oligonucleotide
  Antisense strand to SEQ ID NO: 1985538
uucaucacucaagguccca

SEQ ID NO: 1985540 - RNA, 19 nt, Artificial Sequence
  Description of Artificial Sequence: Synthetic oligonucleotide
  Sense strand starting at position 1377 of SEQ ID NO: 1880680
ugaaguaguuacuuaagca

SEQ ID NO: 1985541 - RNA, 19 nt, Artificial Sequence
  Description of Artificial Sequence: Synthetic oligonucleotide
  Antisense strand to SEQ ID NO: 1985540
ugcuuaaguaacuacuuca

SEQ ID NO: 1985542 - RNA, 19 nt, Artificial Sequence
  Description of Artificial Sequence: Synthetic oligonucleotide
  Sense strand starting at position 1381 of SEQ ID NO: 1880680
guaguuacuuaagcagagu

SEQ ID NO: 1985543 - RNA, 19 nt, Artificial Sequence
  Description of Artificial Sequence: Synthetic oligonucleotide
  Antisense strand to SEQ ID NO: 1985542
acucugcuuaaguaacuac

SEQ ID NO: 1985544 - RNA, 19 nt, Artificial Sequence
  Description of Artificial Sequence: Synthetic oligonucleotide
  Sense strand starting at position 1384 of SEQ ID NO: 1880680
guuacuuaagcagaguguu

SEQ ID NO: 1985545 - RNA, 19 nt, Artificial Sequence
  Description of Artificial Sequence: Synthetic oligonucleotide
  Antisense strand to SEQ ID NO: 1985544
aacacucugcuuaaguaac

SEQ ID NO: 1985546 - RNA, 19 nt, Artificial Sequence
  Description of Artificial Sequence: Synthetic oligonucleotide
  Sense strand starting at position 1390 of SEQ ID NO: 1880680
uaagcagaguguuucucau

SEQ ID NO: 1985547 - RNA, 19 nt, Artificial Sequence
  Description of Artificial Sequence: Synthetic oligonucleotide
  Antisense strand to SEQ ID NO: 1985546
augagaaacacucugcuua

SEQ ID NO: 1985548 - RNA, 19 nt, Artificial Sequence
  Description of Artificial Sequence: Synthetic oligonucleotide
  Sense strand starting at position 1424 of SEQ ID NO: 1880680
cuaggacacuaggaaucau

SEQ ID NO: 1985549 - RNA, 19 nt, Artificial Sequence
  Description of Artificial Sequence: Synthetic oligonucleotide
  Antisense strand to SEQ ID NO: 1985548
augauuccuaguguccuag

SEQ ID NO: 1985550 - RNA, 19 nt, Artificial Sequence
  Description of Artificial Sequence: Synthetic oligonucleotide
  Sense strand starting at position 1594 of SEQ ID NO: 1880680
cccagucguguuuagggaa

SEQ ID NO: 1985551 - RNA, 19 nt, Artificial Sequence
  Description of Artificial Sequence: Synthetic oligonucleotide
  Antisense strand to SEQ ID NO: 1985550
uucccuaaacacgacuggg

SEQ ID NO: 1985552 - RNA, 19 nt, Artificial Sequence
  Description of Artificial Sequence: Synthetic oligonucleotide
  Sense strand starting at position 1641 of SEQ ID NO: 1880680
uccugugugcacguguaau

SEQ ID NO: 1985553 - RNA, 19 nt, Artificial Sequence
  Description of Artificial Sequence: Synthetic oligonucleotide
  Antisense strand to SEQ ID NO: 1985552
auuacacgugcacacagga

SEQ ID NO: 1985554 - RNA, 19 nt, Artificial Sequence
  Description of Artificial Sequence: Synthetic oligonucleotide
  Sense strand starting at position 1713 of SEQ ID NO: 1880680
uggccaucagucuagggau

SEQ ID NO: 1985555 - RNA, 19 nt, Artificial Sequence
  Description of Artificial Sequence: Synthetic oligonucleotide
  Antisense strand to SEQ ID NO: 1985554
aucccuagacugauggcca

SEQ ID NO: 1985556 - RNA, 19 nt, Artificial Sequence
  Description of Artificial Sequence: Synthetic oligonucleotide
  Sense strand starting at position 1996 of SEQ ID NO: 1880680
cgcuguugggcucacagau

SEQ ID NO: 1985557 - RNA, 19 nt, Artificial Sequence
  Description of Artificial Sequence: Synthetic oligonucleotide
  Antisense strand to SEQ ID NO: 1985556
aucugugagcccaacagcg

SEQ ID NO: 1985558 - RNA, 19 nt, Artificial Sequence
  Description of Artificial Sequence: Synthetic oligonucleotide
  Sense strand starting at position 2100 of SEQ ID NO: 1880680
aggaauguucccuaccauu

SEQ ID NO: 1985559 - RNA, 19 nt, Artificial Sequence
  Description of Artificial Sequence: Synthetic oligonucleotide
  Antisense strand to SEQ ID NO: 1985558
aaugguagggaacauuccu

SEQ ID NO: 1985560 - RNA, 19 nt, Artificial Sequence
  Description of Artificial Sequence: Synthetic oligonucleotide
  Sense strand starting at position 2263 of SEQ ID NO: 1880680
agcagcaauccucagauga

SEQ ID NO: 1985561 - RNA, 19 nt, Artificial Sequence
  Description of Artificial Sequence: Synthetic oligonucleotide
  Antisense strand to SEQ ID NO: 1985560
ucaucugaggauugcugcu

SEQ ID NO: 1985562 - RNA, 19 nt, Artificial Sequence
  Description of Artificial Sequence: Synthetic oligonucleotide
  Sense strand starting at position 2267 of SEQ ID NO: 1880680
gcaauccucagaugagugu

SEQ ID NO: 1985563 - RNA, 19 nt, Artificial Sequence
  Description of Artificial Sequence: Synthetic oligonucleotide
  Antisense strand to SEQ ID NO: 1985562
acacucaucugaggauugc

SEQ ID NO: 1985564 - RNA, 19 nt, Artificial Sequence
  Description of Artificial Sequence: Synthetic oligonucleotide
  Sense strand starting at position 2316 of SEQ ID NO: 1880680
ucaucugcauuugaagaaa

SEQ ID NO: 1985565 - RNA, 19 nt, Artificial Sequence
  Description of Artificial Sequence: Synthetic oligonucleotide
  Antisense strand to SEQ ID NO: 1985564
uuucuucaaaugcagauga

SEQ ID NO: 1985566 - RNA, 19 nt, Artificial Sequence
  Description of Artificial Sequence: Synthetic oligonucleotide
  Sense strand starting at position 2386 of SEQ ID NO: 1880680
ugcaaaggcugucuaagaa

SEQ ID NO: 1985567 - RNA, 19 nt, Artificial Sequence
  Description of Artificial Sequence: Synthetic oligonucleotide
  Antisense strand to SEQ ID NO: 1985566
uucuuagacagccuuugca

SEQ ID NO: 1985568 - RNA, 19 nt, Artificial Sequence
  Description of Artificial Sequence: Synthetic oligonucleotide
  Sense strand starting at position 2567 of SEQ ID NO: 1880680
cagucauucgcguucuccu

SEQ ID NO: 1985569 - RNA, 19 nt, Artificial Sequence
  Description of Artificial Sequence: Synthetic oligonucleotide
  Antisense strand to SEQ ID NO: 1985568
aggagaacgcgaaugacug

SEQ ID NO: 1985570 - RNA, 19 nt, Artificial Sequence
  Description of Artificial Sequence: Synthetic oligonucleotide
  Sense strand starting at position 2568 of SEQ ID NO: 1880680
agucauucgcguucuccua

SEQ ID NO: 1985571 - RNA, 19 nt, Artificial Sequence
  Description of Artificial Sequence: Synthetic oligonucleotide
  Antisense strand to SEQ ID NO: 1985570
uaggagaacgcgaaugacu

SEQ ID NO: 1985572 - RNA, 19 nt, Artificial Sequence
  Description of Artificial Sequence: Synthetic oligonucleotide
  Sense strand starting at position 2756 of SEQ ID NO: 1880680
ggucacaccuucguugaga

SEQ ID NO: 1985573 - RNA, 19 nt, Artificial Sequence
  Description of Artificial Sequence: Synthetic oligonucleotide
  Antisense strand to SEQ ID NO: 1985572
ucucaacgaaggugugacc

SEQ ID NO: 1985574 - RNA, 19 nt, Artificial Sequence
  Description of Artificial Sequence: Synthetic oligonucleotide
  Sense strand starting at position 2906 of SEQ ID NO: 1880680
gaaguuuacgcaggcauaa

SEQ ID NO: 1985575 - RNA, 19 nt, Artificial Sequence
  Description of Artificial Sequence: Synthetic oligonucleotide
  Antisense strand to SEQ ID NO: 1985574
uuaugccugcguaaacuuc

SEQ ID NO: 1985576 - RNA, 19 nt, Artificial Sequence
  Description of Artificial Sequence: Synthetic oligonucleotide
  Sense strand starting at position 2957 of SEQ ID NO: 1880680
guuucaugucuguuacguu

SEQ ID NO: 1985577 - RNA, 19 nt, Artificial Sequence
  Description of Artificial Sequence: Synthetic oligonucleotide
  Antisense strand to SEQ ID NO: 1985576
aacguaacagacaugaaac

SEQ ID NO: 1985578 - RNA, 19 nt, Artificial Sequence
  Description of Artificial Sequence: Synthetic oligonucleotide
  Sense strand starting at position 3115 of SEQ ID NO: 1880680
cggcuuaucucauuuaauc

SEQ ID NO: 1985579 - RNA, 19 nt, Artificial Sequence
  Description of Artificial Sequence: Synthetic oligonucleotide
  Antisense strand to SEQ ID NO: 1985578
gauuaaaugagauaagccg

SEQ ID NO: 1985580 - RNA, 19 nt, Artificial Sequence
  Description of Artificial Sequence: Synthetic oligonucleotide
  Sense strand starting at position 3424 of SEQ ID NO: 1880680
gguccuaucugcuuuauaa

SEQ ID NO: 1985581 - RNA, 19 nt, Artificial Sequence
  Description of Artificial Sequence: Synthetic oligonucleotide
  Antisense strand to SEQ ID NO: 1985580
uuauaaagcagauaggacc

SEQ ID NO: 1985582 - RNA, 19 nt, Artificial Sequence
  Description of Artificial Sequence: Synthetic oligonucleotide
  Sense strand starting at position 3745 of SEQ ID NO: 1880680
guuguuuacaagugagcaa

SEQ ID NO: 1985583 - RNA, 19 nt, Artificial Sequence
  Description of Artificial Sequence: Synthetic oligonucleotide
  Antisense strand to SEQ ID NO: 1985582
uugcucacuuguaaacaac

SEQ ID NO: 1985584 - RNA, 19 nt, Artificial Sequence
  Description of Artificial Sequence: Synthetic oligonucleotide
  Sense strand starting at position 3748 of SEQ ID NO: 1880680
guuuacaagugagcaaguu

SEQ ID NO: 1985585 - RNA, 19 nt, Artificial Sequence
  Description of Artificial Sequence: Synthetic oligonucleotide
  Antisense strand to SEQ ID NO: 1985584
aacuugcucacuuguaaac

SEQ ID NO: 1985586 - RNA, 19 nt, Artificial Sequence
  Description of Artificial Sequence: Synthetic oligonucleotide
  Sense strand starting at position 3749 of SEQ ID NO: 1880680
uuuacaagugagcaaguuu

SEQ ID NO: 1985587 - RNA, 19 nt, Artificial Sequence
  Description of Artificial Sequence: Synthetic oligonucleotide
  Antisense strand to SEQ ID NO: 1985586
aaacuugcucacuuguaaa

SEQ ID NO: 1985588 - RNA, 19 nt, Artificial Sequence
  Description of Artificial Sequence: Synthetic oligonucleotide
  Sense strand starting at position 3828 of SEQ ID NO: 1880680
accuguugguuuccucaau

SEQ ID NO: 1985589 - RNA, 19 nt, Artificial Sequence
  Description of Artificial Sequence: Synthetic oligonucleotide
  Antisense strand to SEQ ID NO: 1985588
auugaggaaaccaacaggu

SEQ ID NO: 1985590 - RNA, 19 nt, Artificial Sequence
  Description of Artificial Sequence: Synthetic oligonucleotide
  Sense strand starting at position 3829 of SEQ ID NO: 1880680
ccuguugguuuccucaauu

SEQ ID NO: 1985591 - RNA, 19 nt, Artificial Sequence
  Description of Artificial Sequence: Synthetic oligonucleotide
  Antisense strand to SEQ ID NO: 1985590
aauugaggaaaccaacagg

SEQ ID NO: 1985592 - RNA, 19 nt, Artificial Sequence
  Description of Artificial Sequence: Synthetic oligonucleotide
  Sense strand starting at position 3884 of SEQ ID NO: 1880680
gaaagcugacaacguaaca

SEQ ID NO: 1985593 - RNA, 19 nt, Artificial Sequence
  Description of Artificial Sequence: Synthetic oligonucleotide
  Antisense strand to SEQ ID NO: 1985592
uguuacguugucagcuuuc

SEQ ID NO: 1985594 - RNA, 19 nt, Artificial Sequence
  Description of Artificial Sequence: Synthetic oligonucleotide
  Sense strand starting at position 3898 of SEQ ID NO: 1880680
uaacauugaugagaggauu

SEQ ID NO: 1985595 - RNA, 19 nt, Artificial Sequence
  Description of Artificial Sequence: Synthetic oligonucleotide
  Antisense strand to SEQ ID NO: 1985594
aauccucucaucaauguua

SEQ ID NO: 1985596 - RNA, 19 nt, Artificial Sequence
  Description of Artificial Sequence: Synthetic oligonucleotide
  Sense strand starting at position 3910 of SEQ ID NO: 1880680
gaggauucuuaagggagaa

SEQ ID NO: 1985597 - RNA, 19 nt, Artificial Sequence
  Description of Artificial Sequence: Synthetic oligonucleotide
  Antisense strand to SEQ ID NO: 1985596
uucucccuuaagaauccuc

SEQ ID NO: 1985598 - RNA, 19 nt, Artificial Sequence
  Description of Artificial Sequence: Synthetic oligonucleotide
  Sense strand starting at position 25 of SEQ ID NO: 1880681
gcugaaaugcaaugcauaa

SEQ ID NO: 1985599 - RNA, 19 nt, Artificial Sequence
  Description of Artificial Sequence: Synthetic oligonucleotide
  Antisense strand to SEQ ID NO: 1985598
uuaugcauugcauuucagc

SEQ ID NO: 1985600 - RNA, 19 nt, Artificial Sequence
  Description of Artificial Sequence: Synthetic oligonucleotide
  Sense strand starting at position 182 of SEQ ID NO: 1880681
ucuugaacuccuggacacu

SEQ ID NO: 1985601 - RNA, 19 nt, Artificial Sequence
  Description of Artificial Sequence: Synthetic oligonucleotide
  Antisense strand to SEQ ID NO: 1985600
aguguccaggaguucaaga

SEQ ID NO: 1985602 - RNA, 19 nt, Artificial Sequence
  Description of Artificial Sequence: Synthetic oligonucleotide
  Sense strand starting at position 267 of SEQ ID NO: 1880681
gucuguuguguugagguca

SEQ ID NO: 1985603 - RNA, 19 nt, Artificial Sequence
  Description of Artificial Sequence: Synthetic oligonucleotide
  Antisense strand to SEQ ID NO: 1985602
ugaccucaacacaacagac

SEQ ID NO: 1985604 - RNA, 19 nt, Artificial Sequence
  Description of Artificial Sequence: Synthetic oligonucleotide
  Sense strand starting at position 272 of SEQ ID NO: 1880681
uuguguugaggucaagaaa

SEQ ID NO: 1985605 - RNA, 19 nt, Artificial Sequence
  Description of Artificial Sequence: Synthetic oligonucleotide
  Antisense strand to SEQ ID NO: 1985604
uuucuugaccucaacacaa

SEQ ID NO: 1985606 - RNA, 19 nt, Artificial Sequence
  Description of Artificial Sequence: Synthetic oligonucleotide
  Sense strand starting at position 309 of SEQ ID NO: 1880681
ggcuuauauuuagacaacu

SEQ ID NO: 1985607 - RNA, 19 nt, Artificial Sequence
  Description of Artificial Sequence: Synthetic oligonucleotide
  Antisense strand to SEQ ID NO: 1985606
aguugucuaaauauaagcc

SEQ ID NO: 1985608 - RNA, 19 nt, Artificial Sequence
  Description of Artificial Sequence: Synthetic oligonucleotide
  Sense strand starting at position 877 of SEQ ID NO: 1880681
accaguuaucauugcuaca

SEQ ID NO: 1985609 - RNA, 19 nt, Artificial Sequence
  Description of Artificial Sequence: Synthetic oligonucleotide
  Antisense strand to SEQ ID NO: 1985608
uguagcaaugauaacuggu

SEQ ID NO: 1985610 - RNA, 19 nt, Artificial Sequence
  Description of Artificial Sequence: Synthetic oligonucleotide
  Sense strand starting at position 939 of SEQ ID NO: 1880681
cagcuuugcaagugguaga

SEQ ID NO: 1985611 - RNA, 19 nt, Artificial Sequence
  Description of Artificial Sequence: Synthetic oligonucleotide
  Antisense strand to SEQ ID NO: 1985610
ucuaccacuugcaaagcug

SEQ ID NO: 1985612 - RNA, 19 nt, Artificial Sequence
  Description of Artificial Sequence: Synthetic oligonucleotide
  Sense strand starting at position 1042 of SEQ ID NO: 1880681
cccagaaagucugaauuuc

SEQ ID NO: 1985613 - RNA, 19 nt, Artificial Sequence
  Description of Artificial Sequence: Synthetic oligonucleotide
  Antisense strand to SEQ ID NO: 1985612
gaaauucagacuuucuggg

SEQ ID NO: 1985614 - RNA, 19 nt, Artificial Sequence
  Description of Artificial Sequence: Synthetic oligonucleotide
  Sense strand starting at position 1094 of SEQ ID NO: 1880681
ggauaauauuggguguuua

SEQ ID NO: 1985615 - RNA, 19 nt, Artificial Sequence
  Description of Artificial Sequence: Synthetic oligonucleotide
  Antisense strand to SEQ ID NO: 1985614
uaaacacccaauauuaucc

SEQ ID NO: 1985616 - RNA, 19 nt, Artificial Sequence
  Description of Artificial Sequence: Synthetic oligonucleotide
  Sense strand starting at position 1095 of SEQ ID NO: 1880681
gauaauauuggguguuuaa

SEQ ID NO: 1985617 - RNA, 19 nt, Artificial Sequence
  Description of Artificial Sequence: Synthetic oligonucleotide
  Antisense strand to SEQ ID NO: 1985616
uuaaacacccaauauuauc

SEQ ID NO: 1985618 - RNA, 19 nt, Artificial Sequence
  Description of Artificial Sequence: Synthetic oligonucleotide
  Sense strand starting at position 1105 of SEQ ID NO: 1880681
gguguuuaaguccaagaaa

SEQ ID NO: 1985619 - RNA, 19 nt, Artificial Sequence
  Description of Artificial Sequence: Synthetic oligonucleotide
  Antisense strand to SEQ ID NO: 1985618
uuucuuggacuuaaacacc

SEQ ID NO: 1985620 - RNA, 19 nt, Artificial Sequence
  Description of Artificial Sequence: Synthetic oligonucleotide
  Sense strand starting at position 1563 of SEQ ID NO: 1880681
gaacuauagcagugcuucu

SEQ ID NO: 1985621 - RNA, 19 nt, Artificial Sequence
  Description of Artificial Sequence: Synthetic oligonucleotide
  Antisense strand to SEQ ID NO: 1985620
agaagcacugcuauaguuc

SEQ ID NO: 1985622 - RNA, 19 nt, Artificial Sequence
  Description of Artificial Sequence: Synthetic oligonucleotide
  Sense strand starting at position 1574 of SEQ ID NO: 1880681
gugcuucucaaguaucagu

SEQ ID NO: 1985623 - RNA, 19 nt, Artificial Sequence
  Description of Artificial Sequence: Synthetic oligonucleotide
  Antisense strand to SEQ ID NO: 1985622
acugauacuugagaagcac

SEQ ID NO: 1985624 - RNA, 19 nt, Artificial Sequence
  Description of Artificial Sequence: Synthetic oligonucleotide
  Sense strand starting at position 1582 of SEQ ID NO: 1880681
caaguaucaguauaggagu

SEQ ID NO: 1985625 - RNA, 19 nt, Artificial Sequence
  Description of Artificial Sequence: Synthetic oligonucleotide
  Antisense strand to SEQ ID NO: 1985624
acuccuauacugauacuug

SEQ ID NO: 1985626 - RNA, 19 nt, Artificial Sequence
  Description of Artificial Sequence: Synthetic oligonucleotide
  Sense strand starting at position 1584 of SEQ ID NO: 1880681
aguaucaguauaggaguua

SEQ ID NO: 1985627 - RNA, 19 nt, Artificial Sequence
  Description of Artificial Sequence: Synthetic oligonucleotide
  Antisense strand to SEQ ID NO: 1985626
uaacuccuauacugauacu

SEQ ID NO: 1985628 - RNA, 19 nt, Artificial Sequence
  Description of Artificial Sequence: Synthetic oligonucleotide
  Sense strand starting at position 2089 of SEQ ID NO: 1880681
ugugaugugcuccagacuu

SEQ ID NO: 1985629 - RNA, 19 nt, Artificial Sequence
  Description of Artificial Sequence: Synthetic oligonucleotide
  Antisense strand to SEQ ID NO: 1985628
aagucuggagcacaucaca

SEQ ID NO: 1985630 - RNA, 19 nt, Artificial Sequence
  Description of Artificial Sequence: Synthetic oligonucleotide
  Sense strand starting at position 2091 of SEQ ID NO: 1880681
ugaugugcuccagacuuau

SEQ ID NO: 1985631 - RNA, 19 nt, Artificial Sequence
  Description of Artificial Sequence: Synthetic oligonucleotide
  Antisense strand to SEQ ID NO: 1985630
auaagucuggagcacauca

SEQ ID NO: 1985632 - RNA, 19 nt, Artificial Sequence
  Description of Artificial Sequence: Synthetic oligonucleotide
  Sense strand starting at position 2168 of SEQ ID NO: 1880681
gagguuaggcaugguucua

SEQ ID NO: 1985633 - RNA, 19 nt, Artificial Sequence
  Description of Artificial Sequence: Synthetic oligonucleotide
  Antisense strand to SEQ ID NO: 1985632
uagaaccaugccuaaccuc

SEQ ID NO: 1985634 - RNA, 19 nt, Artificial Sequence
  Description of Artificial Sequence: Synthetic oligonucleotide
  Sense strand starting at position 2180 of SEQ ID NO: 1880681
gguucuaaaucuuuacaug

SEQ ID NO: 1985635 - RNA, 19 nt, Artificial Sequence
  Description of Artificial Sequence: Synthetic oligonucleotide
  Antisense strand to SEQ ID NO: 1985634
cauguaaagauuuagaacc

SEQ ID NO: 1985636 - RNA, 19 nt, Artificial Sequence
  Description of Artificial Sequence: Synthetic oligonucleotide
  Sense strand starting at position 2181 of SEQ ID NO: 1880681
guucuaaaucuuuacaugu

SEQ ID NO: 1985637 - RNA, 19 nt, Artificial Sequence
  Description of Artificial Sequence: Synthetic oligonucleotide
  Antisense strand to SEQ ID NO: 1985636
acauguaaagauuuagaac

SEQ ID NO: 1985638 - RNA, 19 nt, Artificial Sequence
  Description of Artificial Sequence: Synthetic oligonucleotide
  Sense strand starting at position 2225 of SEQ ID NO: 1880681
ggacaauacuugguugucu

SEQ ID NO: 1985639 - RNA, 19 nt, Artificial Sequence
  Description of Artificial Sequence: Synthetic oligonucleotide
  Antisense strand to SEQ ID NO: 1985638
agacaaccaaguauugucc

SEQ ID NO: 1985640 - RNA, 19 nt, Artificial Sequence
  Description of Artificial Sequence: Synthetic oligonucleotide
  Sense strand starting at position 2290 of SEQ ID NO: 1880681
ggcagaucacuugauguga

SEQ ID NO: 1985641 - RNA, 19 nt, Artificial Sequence
  Description of Artificial Sequence: Synthetic oligonucleotide
  Antisense strand to SEQ ID NO: 1985640
ucacaucaagugaucugcc

SEQ ID NO: 1985642 - RNA, 19 nt, Artificial Sequence
  Description of Artificial Sequence: Synthetic oligonucleotide
  Sense strand starting at position 2595 of SEQ ID NO: 1880681
cccgaucaccaaugucuau

SEQ ID NO: 1985643 - RNA, 19 nt, Artificial Sequence
  Description of Artificial Sequence: Synthetic oligonucleotide
  Antisense strand to SEQ ID NO: 1985642
auagacauuggugaucggg

SEQ ID NO: 1985644 - RNA, 19 nt, Artificial Sequence
  Description of Artificial Sequence: Synthetic oligonucleotide
  Sense strand starting at position 2609 of SEQ ID NO: 1880681
ucuauuguguuauuccaca

SEQ ID NO: 1985645 - RNA, 19 nt, Artificial Sequence
  Description of Artificial Sequence: Synthetic oligonucleotide
  Antisense strand to SEQ ID NO: 1985644
uguggaauaacacaauaga

SEQ ID NO: 1985646 - RNA, 19 nt, Artificial Sequence
  Description of Artificial Sequence: Synthetic oligonucleotide
  Sense strand starting at position 2614 of SEQ ID NO: 1880681
uguguuauuccacaaguau

SEQ ID NO: 1985647 - RNA, 19 nt, Artificial Sequence
  Description of Artificial Sequence: Synthetic oligonucleotide
  Antisense strand to SEQ ID NO: 1985646
auacuuguggaauaacaca

SEQ ID NO: 1985648 - RNA, 19 nt, Artificial Sequence
  Description of Artificial Sequence: Synthetic oligonucleotide
  Sense strand starting at position 2625 of SEQ ID NO: 1880681
acaaguauuucgcuuuguc

SEQ ID NO: 1985649 - RNA, 19 nt, Artificial Sequence
  Description of Artificial Sequence: Synthetic oligonucleotide
  Antisense strand to SEQ ID NO: 1985648
gacaaagcgaaauacuugu

SEQ ID NO: 1985650 - RNA, 19 nt, Artificial Sequence
  Description of Artificial Sequence: Synthetic oligonucleotide
  Sense strand starting at position 2628 of SEQ ID NO: 1880681
aguauuucgcuuugucaau

SEQ ID NO: 1985651 - RNA, 19 nt, Artificial Sequence
  Description of Artificial Sequence: Synthetic oligonucleotide
  Antisense strand to SEQ ID NO: 1985650
auugacaaagcgaaauacu

SEQ ID NO: 1985652 - RNA, 19 nt, Artificial Sequence
  Description of Artificial Sequence: Synthetic oligonucleotide
  Sense strand starting at position 2629 of SEQ ID NO: 1880681
guauuucgcuuugucaauc

SEQ ID NO: 1985653 - RNA, 19 nt, Artificial Sequence
  Description of Artificial Sequence: Synthetic oligonucleotide
  Antisense strand to SEQ ID NO: 1985652
gauugacaaagcgaaauac

SEQ ID NO: 1985654 - RNA, 19 nt, Artificial Sequence
  Description of Artificial Sequence: Synthetic oligonucleotide
  Sense strand starting at position 2794 of SEQ ID NO: 1880681
ggguucaaccuaugagugu

SEQ ID NO: 1985655 - RNA, 19 nt, Artificial Sequence
  Description of Artificial Sequence: Synthetic oligonucleotide
  Antisense strand to SEQ ID NO: 1985654
acacucauagguugaaccc

SEQ ID NO: 1985656 - RNA, 19 nt, Artificial Sequence
  Description of Artificial Sequence: Synthetic oligonucleotide
  Sense strand starting at position 2798 of SEQ ID NO: 1880681
ucaaccuaugaguguuaaa

SEQ ID NO: 1985657 - RNA, 19 nt, Artificial Sequence
  Description of Artificial Sequence: Synthetic oligonucleotide
  Antisense strand to SEQ ID NO: 1985656
uuuaacacucauagguuga

SEQ ID NO: 1985658 - RNA, 19 nt, Artificial Sequence
  Description of Artificial Sequence: Synthetic oligonucleotide
  Sense strand starting at position 2807 of SEQ ID NO: 1880681
gaguguuaaagugaaagca

SEQ ID NO: 1985659 - RNA, 19 nt, Artificial Sequence
  Description of Artificial Sequence: Synthetic oligonucleotide
  Antisense strand to SEQ ID NO: 1985658
ugcuuucacuuuaacacuc

SEQ ID NO: 1985660 - RNA, 19 nt, Artificial Sequence
  Description of Artificial Sequence: Synthetic oligonucleotide
  Sense strand starting at position 2820 of SEQ ID NO: 1880681
aaagcauguugguuacaca

SEQ ID NO: 1985661 - RNA, 19 nt, Artificial Sequence
  Description of Artificial Sequence: Synthetic oligonucleotide
  Antisense strand to SEQ ID NO: 1985660
uguguaaccaacaugcuuu

SEQ ID NO: 1985662 - RNA, 19 nt, Artificial Sequence
  Description of Artificial Sequence: Synthetic oligonucleotide
  Sense strand starting at position 2821 of SEQ ID NO: 1880681
aagcauguugguuacacau

SEQ ID NO: 1985663 - RNA, 19 nt, Artificial Sequence
  Description of Artificial Sequence: Synthetic oligonucleotide
  Antisense strand to SEQ ID NO: 1985662
auguguaaccaacaugcuu

SEQ ID NO: 1985664 - RNA, 19 nt, Artificial Sequence
  Description of Artificial Sequence: Synthetic oligonucleotide
  Sense strand starting at position 2903 of SEQ ID NO: 1880681
cugagaccuacucgagaga

SEQ ID NO: 1985665 - RNA, 19 nt, Artificial Sequence
  Description of Artificial Sequence: Synthetic oligonucleotide
  Antisense strand to SEQ ID NO: 1985664
ucucucgaguaggucucag

SEQ ID NO: 1985666 - RNA, 19 nt, Artificial Sequence
  Description of Artificial Sequence: Synthetic oligonucleotide
  Sense strand starting at position 3193 of SEQ ID NO: 1880681
ucggaaucauggucuaaga

SEQ ID NO: 1985667 - RNA, 19 nt, Artificial Sequence
  Description of Artificial Sequence: Synthetic oligonucleotide
  Antisense strand to SEQ ID NO: 1985666
ucuuagaccaugauuccga

SEQ ID NO: 1985668 - RNA, 19 nt, Artificial Sequence
  Description of Artificial Sequence: Synthetic oligonucleotide
  Sense strand starting at position 3837 of SEQ ID NO: 1880681
uggacuacuugucccaaga

SEQ ID NO: 1985669 - RNA, 19 nt, Artificial Sequence
  Description of Artificial Sequence: Synthetic oligonucleotide
  Antisense strand to SEQ ID NO: 1985668
ucuugggacaaguagucca

SEQ ID NO: 1985670 - RNA, 19 nt, Artificial Sequence
  Description of Artificial Sequence: Synthetic oligonucleotide
  Sense strand starting at position 3867 of SEQ ID NO: 1880681
cucccagauucccuaguua

SEQ ID NO: 1985671 - RNA, 19 nt, Artificial Sequence
  Description of Artificial Sequence: Synthetic oligonucleotide
  Antisense strand to SEQ ID NO: 1985670
uaacuagggaaucugggag

SEQ ID NO: 1985672 - RNA, 19 nt, Artificial Sequence
  Description of Artificial Sequence: Synthetic oligonucleotide
  Sense strand starting at position 3900 of SEQ ID NO: 1880681
ugaagucgguguuuggaga

SEQ ID NO: 1985673 - RNA, 19 nt, Artificial Sequence
  Description of Artificial Sequence: Synthetic oligonucleotide
  Antisense strand to SEQ ID NO: 1985672
ucuccaaacaccgacuuca

SEQ ID NO: 1985674 - RNA, 19 nt, Artificial Sequence
  Description of Artificial Sequence: Synthetic oligonucleotide
  Sense strand starting at position 3901 of SEQ ID NO: 1880681
gaagucgguguuuggagaa

SEQ ID NO: 1985675 - RNA, 19 nt, Artificial Sequence
  Description of Artificial Sequence: Synthetic oligonucleotide
  Antisense strand to SEQ ID NO: 1985674
uucuccaaacaccgacuuc

SEQ ID NO: 1985676 - RNA, 19 nt, Artificial Sequence
  Description of Artificial Sequence: Synthetic oligonucleotide
  Sense strand starting at position 3943 of SEQ ID NO: 1880681
guaggaugaagcggaauaa

SEQ ID NO: 1985677 - RNA, 19 nt, Artificial Sequence
  Description of Artificial Sequence: Synthetic oligonucleotide
  Antisense strand to SEQ ID NO: 1985676
uuauuccgcuucauccuac

SEQ ID NO: 1985678 - RNA, 19 nt, Artificial Sequence
  Description of Artificial Sequence: Synthetic oligonucleotide
  Sense strand starting at position 751 of SEQ ID NO: 1880682
acagcagaguuguuugaag

SEQ ID NO: 1985679 - RNA, 19 nt, Artificial Sequence
  Description of Artificial Sequence: Synthetic oligonucleotide
  Antisense strand to SEQ ID NO: 1985678
cuucaaacaacucugcugu

SEQ ID NO: 1985680 - RNA, 19 nt, Artificial Sequence
  Description of Artificial Sequence: Synthetic oligonucleotide
  Sense strand starting at position 966 of SEQ ID NO: 1880682
ggugguuagacagauuggu

SEQ ID NO: 1985681 - RNA, 19 nt, Artificial Sequence
  Description of Artificial Sequence: Synthetic oligonucleotide
  Antisense strand to SEQ ID NO: 1985680
accaaucugucuaaccacc

SEQ ID NO: 1985682 - RNA, 19 nt, Artificial Sequence
  Description of Artificial Sequence: Synthetic oligonucleotide
  Sense strand starting at position 970 of SEQ ID NO: 1880682
guuagacagauugguaugu

SEQ ID NO: 1985683 - RNA, 19 nt, Artificial Sequence
  Description of Artificial Sequence: Synthetic oligonucleotide
  Antisense strand to SEQ ID NO: 1985682
acauaccaaucugucuaac

SEQ ID NO: 1985684 - RNA, 19 nt, Artificial Sequence
  Description of Artificial Sequence: Synthetic oligonucleotide
  Sense strand starting at position 971 of SEQ ID NO: 1880682
uuagacagauugguaugua

SEQ ID NO: 1985685 - RNA, 19 nt, Artificial Sequence
  Description of Artificial Sequence: Synthetic oligonucleotide
  Antisense strand to SEQ ID NO: 1985684
uacauaccaaucugucuaa

SEQ ID NO: 1985686 - RNA, 19 nt, Artificial Sequence
  Description of Artificial Sequence: Synthetic oligonucleotide
  Sense strand starting at position 974 of SEQ ID NO: 1880682
gacagauugguauguaccu

SEQ ID NO: 1985687 - RNA, 19 nt, Artificial Sequence
  Description of Artificial Sequence: Synthetic oligonucleotide
  Antisense strand to SEQ ID NO: 1985686
agguacauaccaaucuguc

SEQ ID NO: 1985688 - RNA, 19 nt, Artificial Sequence
  Description of Artificial Sequence: Synthetic oligonucleotide
  Sense strand starting at position 1162 of SEQ ID NO: 1880682
agcagauacuagcucugaa

SEQ ID NO: 1985689 - RNA, 19 nt, Artificial Sequence
  Description of Artificial Sequence: Synthetic oligonucleotide
  Antisense strand to SEQ ID NO: 1985688
uucagagcuaguaucugcu

SEQ ID NO: 1985690 - RNA, 19 nt, Artificial Sequence
  Description of Artificial Sequence: Synthetic oligonucleotide
  Sense strand starting at position 1165 of SEQ ID NO: 1880682
agauacuagcucugaaacu

SEQ ID NO: 1985691 - RNA, 19 nt, Artificial Sequence
  Description of Artificial Sequence: Synthetic oligonucleotide
  Antisense strand to SEQ ID NO: 1985690
aguuucagagcuaguaucu

SEQ ID NO: 1985692 - RNA, 19 nt, Artificial Sequence
  Description of Artificial Sequence: Synthetic oligonucleotide
  Sense strand starting at position 1435 of SEQ ID NO: 1880682
cgguuuauuugacuuugca

SEQ ID NO: 1985693 - RNA, 19 nt, Artificial Sequence
  Description of Artificial Sequence: Synthetic oligonucleotide
  Antisense strand to SEQ ID NO: 1985692
ugcaaagucaaauaaaccg

SEQ ID NO: 1985694 - RNA, 19 nt, Artificial Sequence
  Description of Artificial Sequence: Synthetic oligonucleotide
  Sense strand starting at position 1480 of SEQ ID NO: 1880682
gagguuuguguugacuuac

SEQ ID NO: 1985695 - RNA, 19 nt, Artificial Sequence
  Description of Artificial Sequence: Synthetic oligonucleotide
  Antisense strand to SEQ ID NO: 1985694
guaagucaacacaaaccuc

SEQ ID NO: 1985696 - RNA, 19 nt, Artificial Sequence
  Description of Artificial Sequence: Synthetic oligonucleotide
  Sense strand starting at position 1569 of SEQ ID NO: 1880682
gcaguaaaccgagacaagu

SEQ ID NO: 1985697 - RNA, 19 nt, Artificial Sequence
  Description of Artificial Sequence: Synthetic oligonucleotide
  Antisense strand to SEQ ID NO: 1985696
acuugucucgguuuacugc

SEQ ID NO: 1985698 - RNA, 19 nt, Artificial Sequence
  Description of Artificial Sequence: Synthetic oligonucleotide
  Sense strand starting at position 1577 of SEQ ID NO: 1880682
ccgagacaaguccacuuaa

SEQ ID NO: 1985699 - RNA, 19 nt, Artificial Sequence
  Description of Artificial Sequence: Synthetic oligonucleotide
  Antisense strand to SEQ ID NO: 1985698
uuaaguggacuugucucgg

SEQ ID NO: 1985700 - RNA, 19 nt, Artificial Sequence
  Description of Artificial Sequence: Synthetic oligonucleotide
  Sense strand starting at position 1632 of SEQ ID NO: 1880682
auccaaagggauugcagau

SEQ ID NO: 1985701 - RNA, 19 nt, Artificial Sequence
  Description of Artificial Sequence: Synthetic oligonucleotide
  Antisense strand to SEQ ID NO: 1985700
aucugcaaucccuuuggau

SEQ ID NO: 1985702 - RNA, 19 nt, Artificial Sequence
  Description of Artificial Sequence: Synthetic oligonucleotide
  Sense strand starting at position 1641 of SEQ ID NO: 1880682
gauugcagauaauuaguuu

SEQ ID NO: 1985703 - RNA, 19 nt, Artificial Sequence
  Description of Artificial Sequence: Synthetic oligonucleotide
  Antisense strand to SEQ ID NO: 1985702
aaacuaauuaucugcaauc

SEQ ID NO: 1985704 - RNA, 19 nt, Artificial Sequence
  Description of Artificial Sequence: Synthetic oligonucleotide
  Sense strand starting at position 1829 of SEQ ID NO: 1880682
uguaguuccauuugagagc

SEQ ID NO: 1985705 - RNA, 19 nt, Artificial Sequence
  Description of Artificial Sequence: Synthetic oligonucleotide
  Antisense strand to SEQ ID NO: 1985704
gcucucaaauggaacuaca

SEQ ID NO: 1985706 - RNA, 19 nt, Artificial Sequence
  Description of Artificial Sequence: Synthetic oligonucleotide
  Sense strand starting at position 1878 of SEQ ID NO: 1880682
cugacauucugugcacaga

SEQ ID NO: 1985707 - RNA, 19 nt, Artificial Sequence
  Description of Artificial Sequence: Synthetic oligonucleotide
  Antisense strand to SEQ ID NO: 1985706
ucugugcacagaaugucag

SEQ ID NO: 1985708 - RNA, 19 nt, Artificial Sequence
  Description of Artificial Sequence: Synthetic oligonucleotide
  Sense strand starting at position 1879 of SEQ ID NO: 1880682
ugacauucugugcacagau

SEQ ID NO: 1985709 - RNA, 19 nt, Artificial Sequence
  Description of Artificial Sequence: Synthetic oligonucleotide
  Antisense strand to SEQ ID NO: 1985708
aucugugcacagaauguca

SEQ ID NO: 1985710 - RNA, 19 nt, Artificial Sequence
  Description of Artificial Sequence: Synthetic oligonucleotide
  Sense strand starting at position 1936 of SEQ ID NO: 1880682
gcagucugaguuggagaga

SEQ ID NO: 1985711 - RNA, 19 nt, Artificial Sequence
  Description of Artificial Sequence: Synthetic oligonucleotide
  Antisense strand to SEQ ID NO: 1985710
ucucuccaacucagacugc

SEQ ID NO: 1985712 - RNA, 19 nt, Artificial Sequence
  Description of Artificial Sequence: Synthetic oligonucleotide
  Sense strand starting at position 2002 of SEQ ID NO: 1880682
caguaacaccuguggaguu

SEQ ID NO: 1985713 - RNA, 19 nt, Artificial Sequence
  Description of Artificial Sequence: Synthetic oligonucleotide
  Antisense strand to SEQ ID NO: 1985712
aacuccacagguguuacug

SEQ ID NO: 1985714 - RNA, 19 nt, Artificial Sequence
  Description of Artificial Sequence: Synthetic oligonucleotide
  Sense strand starting at position 2057 of SEQ ID NO: 1880682
ugagaaugaugucuuguuu

SEQ ID NO: 1985715 - RNA, 19 nt, Artificial Sequence
  Description of Artificial Sequence: Synthetic oligonucleotide
  Antisense strand to SEQ ID NO: 1985714
aaacaagacaucauucuca

SEQ ID NO: 1985716 - RNA, 19 nt, Artificial Sequence
  Description of Artificial Sequence: Synthetic oligonucleotide
  Sense strand starting at position 2083 of SEQ ID NO: 1880682
ggaggaccgucaaagaguu

SEQ ID NO: 1985717 - RNA, 19 nt, Artificial Sequence
  Description of Artificial Sequence: Synthetic oligonucleotide
  Antisense strand to SEQ ID NO: 1985716
aacucuuugacgguccucc

SEQ ID NO: 1985718 - RNA, 19 nt, Artificial Sequence
  Description of Artificial Sequence: Synthetic oligonucleotide
  Sense strand starting at position 2090 of SEQ ID NO: 1880682
cgucaaagaguuuauagga

SEQ ID NO: 1985719 - RNA, 19 nt, Artificial Sequence
  Description of Artificial Sequence: Synthetic oligonucleotide
  Antisense strand to SEQ ID NO: 1985718
uccuauaaacucuuugacg

SEQ ID NO: 1985720 - RNA, 19 nt, Artificial Sequence
  Description of Artificial Sequence: Synthetic oligonucleotide
  Sense strand starting at position 2117 of SEQ ID NO: 1880682
ugcagucucaaugcguuua

SEQ ID NO: 1985721 - RNA, 19 nt, Artificial Sequence
  Description of Artificial Sequence: Synthetic oligonucleotide
  Antisense strand to SEQ ID NO: 1985720
uaaacgcauugagacugca

SEQ ID NO: 1985722 - RNA, 19 nt, Artificial Sequence
  Description of Artificial Sequence: Synthetic oligonucleotide
  Sense strand starting at position 2131 of SEQ ID NO: 1880682
guuuauugccgugucauau

SEQ ID NO: 1985723 - RNA, 19 nt, Artificial Sequence
  Description of Artificial Sequence: Synthetic oligonucleotide
  Antisense strand to SEQ ID NO: 1985722
auaugacacggcaauaaac

SEQ ID NO: 1985724 - RNA, 19 nt, Artificial Sequence
  Description of Artificial Sequence: Synthetic oligonucleotide
  Sense strand starting at position 2204 of SEQ ID NO: 1880682
agcuguugaaagugagaca

SEQ ID NO: 1985725 - RNA, 19 nt, Artificial Sequence
  Description of Artificial Sequence: Synthetic oligonucleotide
  Antisense strand to SEQ ID NO: 1985724
ugucucacuuucaacagcu

SEQ ID NO: 1985726 - RNA, 19 nt, Artificial Sequence
  Description of Artificial Sequence: Synthetic oligonucleotide
  Sense strand starting at position 2291 of SEQ ID NO: 1880682
gaaguaagucaccaugcuu

SEQ ID NO: 1985727 - RNA, 19 nt, Artificial Sequence
  Description of Artificial Sequence: Synthetic oligonucleotide
  Antisense strand to SEQ ID NO: 1985726
aagcauggugacuuacuuc

SEQ ID NO: 1985728 - RNA, 19 nt, Artificial Sequence
  Description of Artificial Sequence: Synthetic oligonucleotide
  Sense strand starting at position 2338 of SEQ ID NO: 1880682
agaauuuaguuguagggaa

SEQ ID NO: 1985729 - RNA, 19 nt, Artificial Sequence
  Description of Artificial Sequence: Synthetic oligonucleotide
  Antisense strand to SEQ ID NO: 1985728
uucccuacaacuaaauucu

SEQ ID NO: 1985730 - RNA, 19 nt, Artificial Sequence
  Description of Artificial Sequence: Synthetic oligonucleotide
  Sense strand starting at position 2342 of SEQ ID NO: 1880682
uuuaguuguagggaaguua

SEQ ID NO: 1985731 - RNA, 19 nt, Artificial Sequence
  Description of Artificial Sequence: Synthetic oligonucleotide
  Antisense strand to SEQ ID NO: 1985730
uaacuucccuacaacuaaa

SEQ ID NO: 1985732 - RNA, 19 nt, Artificial Sequence
  Description of Artificial Sequence: Synthetic oligonucleotide
  Sense strand starting at position 2369 of SEQ ID NO: 1880682
gggagcaugggucagugau

SEQ ID NO: 1985733 - RNA, 19 nt, Artificial Sequence
  Description of Artificial Sequence: Synthetic oligonucleotide
  Antisense strand to SEQ ID NO: 1985732
aucacugacccaugcuccc

SEQ ID NO: 1985734 - RNA, 19 nt, Artificial Sequence
  Description of Artificial Sequence: Synthetic oligonucleotide
  Sense strand starting at position 2736 of SEQ ID NO: 1880682
ugggcauccgcgagugagu

SEQ ID NO: 1985735 - RNA, 19 nt, Artificial Sequence
  Description of Artificial Sequence: Synthetic oligonucleotide
  Antisense strand to SEQ ID NO: 1985734
acucacucgcggaugccca

SEQ ID NO: 1985736 - RNA, 19 nt, Artificial Sequence
  Description of Artificial Sequence: Synthetic oligonucleotide
  Sense strand starting at position 2964 of SEQ ID NO: 1880682
auugcaguauccuccuaga

SEQ ID NO: 1985737 - RNA, 19 nt, Artificial Sequence
  Description of Artificial Sequence: Synthetic oligonucleotide
  Antisense strand to SEQ ID NO: 1985736
ucuaggaggauacugcaau

SEQ ID NO: 1985738 - RNA, 19 nt, Artificial Sequence
  Description of Artificial Sequence: Synthetic oligonucleotide
  Sense strand starting at position 3291 of SEQ ID NO: 1880682
cgccaagacugaccugaua

SEQ ID NO: 1985739 - RNA, 19 nt, Artificial Sequence
  Description of Artificial Sequence: Synthetic oligonucleotide
  Antisense strand to SEQ ID NO: 1985738
uaucaggucagucuuggcg

SEQ ID NO: 1985740 - RNA, 19 nt, Artificial Sequence
  Description of Artificial Sequence: Synthetic oligonucleotide
  Sense strand starting at position 3507 of SEQ ID NO: 1880682
gcauuuaccuuuguuuaag

SEQ ID NO: 1985741 - RNA, 19 nt, Artificial Sequence
  Description of Artificial Sequence: Synthetic oligonucleotide
  Antisense strand to SEQ ID NO: 1985740
cuuaaacaaagguaaaugc

SEQ ID NO: 1985742 - RNA, 19 nt, Artificial Sequence
  Description of Artificial Sequence: Synthetic oligonucleotide
  Sense strand starting at position 3545 of SEQ ID NO: 1880682
agaggaaaguucuuugcuu

SEQ ID NO: 1985743 - RNA, 19 nt, Artificial Sequence
  Description of Artificial Sequence: Synthetic oligonucleotide
  Antisense strand to SEQ ID NO: 1985742
aagcaaagaacuuuccucu

SEQ ID NO: 1985744 - RNA, 19 nt, Artificial Sequence
  Description of Artificial Sequence: Synthetic oligonucleotide
  Sense strand starting at position 3546 of SEQ ID NO: 1880682
gaggaaaguucuuugcuuc

SEQ ID NO: 1985745 - RNA, 19 nt, Artificial Sequence
  Description of Artificial Sequence: Synthetic oligonucleotide
  Antisense strand to SEQ ID NO: 1985744
gaagcaaagaacuuuccuc

SEQ ID NO: 1985746 - RNA, 19 nt, Artificial Sequence
  Description of Artificial Sequence: Synthetic oligonucleotide
  Sense strand starting at position 3610 of SEQ ID NO: 1880682
uugggagagaccuggcuau

SEQ ID NO: 1985747 - RNA, 19 nt, Artificial Sequence
  Description of Artificial Sequence: Synthetic oligonucleotide
  Antisense strand to SEQ ID NO: 1985746
auagccaggucucucccaa

SEQ ID NO: 1985748 - RNA, 19 nt, Artificial Sequence
  Description of Artificial Sequence: Synthetic oligonucleotide
  Sense strand starting at position 3614 of SEQ ID NO: 1880682
gagagaccuggcuaucugu

SEQ ID NO: 1985749 - RNA, 19 nt, Artificial Sequence
  Description of Artificial Sequence: Synthetic oligonucleotide
  Antisense strand to SEQ ID NO: 1985748
acagauagccaggucucuc

SEQ ID NO: 1985750 - RNA, 19 nt, Artificial Sequence
  Description of Artificial Sequence: Synthetic oligonucleotide
  Sense strand starting at position 3620 of SEQ ID NO: 1880682
ccuggcuaucuguacuuga

SEQ ID NO: 1985751 - RNA, 19 nt, Artificial Sequence
  Description of Artificial Sequence: Synthetic oligonucleotide
  Antisense strand to SEQ ID NO: 1985750
ucaaguacagauagccagg

SEQ ID NO: 1985752 - RNA, 19 nt, Artificial Sequence
  Description of Artificial Sequence: Synthetic oligonucleotide
  Sense strand starting at position 3725 of SEQ ID NO: 1880682
ggaucaucggcagagucaa

SEQ ID NO: 1985753 - RNA, 19 nt, Artificial Sequence
  Description of Artificial Sequence: Synthetic oligonucleotide
  Antisense strand to SEQ ID NO: 1985752
uugacucugccgaugaucc

SEQ ID NO: 1985754 - RNA, 19 nt, Artificial Sequence
  Description of Artificial Sequence: Synthetic oligonucleotide
  Sense strand starting at position 3761 of SEQ ID NO: 1880682
uccacucucccguaagaaa

SEQ ID NO: 1985755 - RNA, 19 nt, Artificial Sequence
  Description of Artificial Sequence: Synthetic oligonucleotide
  Antisense strand to SEQ ID NO: 1985754
uuucuuacgggagagugga

SEQ ID NO: 1985756 - RNA, 19 nt, Artificial Sequence
  Description of Artificial Sequence: Synthetic oligonucleotide
  Sense strand starting at position 3823 of SEQ ID NO: 1880682
gugagcuuccuugcugcau

SEQ ID NO: 1985757 - RNA, 19 nt, Artificial Sequence
  Description of Artificial Sequence: Synthetic oligonucleotide
  Antisense strand to SEQ ID NO: 1985756
augcagcaaggaagcucac

SEQ ID NO: 1985758 - RNA, 19 nt, Artificial Sequence
  Description of Artificial Sequence: Synthetic oligonucleotide
  Sense strand starting at position 160 of SEQ ID NO: 1880683
uuccgaugccuugaaacca

SEQ ID NO: 1985759 - RNA, 19 nt, Artificial Sequence
  Description of Artificial Sequence: Synthetic oligonucleotide
  Antisense strand to SEQ ID NO: 1985758
ugguuucaaggcaucggaa

SEQ ID NO: 1985760 - RNA, 19 nt, Artificial Sequence
  Description of Artificial Sequence: Synthetic oligonucleotide
  Sense strand starting at position 227 of SEQ ID NO: 1880683
gugauuugcuaugcaacau

SEQ ID NO: 1985761 - RNA, 19 nt, Artificial Sequence
  Description of Artificial Sequence: Synthetic oligonucleotide
  Antisense strand to SEQ ID NO: 1985760
auguugcauagcaaaucac

SEQ ID NO: 1985762 - RNA, 19 nt, Artificial Sequence
  Description of Artificial Sequence: Synthetic oligonucleotide
  Sense strand starting at position 365 of SEQ ID NO: 1880683
gcuuguaaggcagaucauc

SEQ ID NO: 1985763 - RNA, 19 nt, Artificial Sequence
  Description of Artificial Sequence: Synthetic oligonucleotide
  Antisense strand to SEQ ID NO: 1985762
gaugaucugccuuacaagc

SEQ ID NO: 1985764 - RNA, 19 nt, Artificial Sequence
  Description of Artificial Sequence: Synthetic oligonucleotide
  Sense strand starting at position 421 of SEQ ID NO: 1880683
cuugaagagcacuguaacu

SEQ ID NO: 1985765 - RNA, 19 nt, Artificial Sequence
  Description of Artificial Sequence: Synthetic oligonucleotide
  Antisense strand to SEQ ID NO: 1985764
aguuacagugcucuucaag

SEQ ID NO: 1985766 - RNA, 19 nt, Artificial Sequence
  Description of Artificial Sequence: Synthetic oligonucleotide
  Sense strand starting at position 423 of SEQ ID NO: 1880683
ugaagagcacuguaacuua

SEQ ID NO: 1985767 - RNA, 19 nt, Artificial Sequence
  Description of Artificial Sequence: Synthetic oligonucleotide
  Antisense strand to SEQ ID NO: 1985766
uaaguuacagugcucuuca

SEQ ID NO: 1985768 - RNA, 19 nt, Artificial Sequence
  Description of Artificial Sequence: Synthetic oligonucleotide
  Sense strand starting at position 535 of SEQ ID NO: 1880683
ggaaaugaaugguaaauau

SEQ ID NO: 1985769 - RNA, 19 nt, Artificial Sequence
  Description of Artificial Sequence: Synthetic oligonucleotide
  Antisense strand to SEQ ID NO: 1985768
auauuuaccauucauuucc

SEQ ID NO: 1985770 - RNA, 19 nt, Artificial Sequence
  Description of Artificial Sequence: Synthetic oligonucleotide
  Sense strand starting at position 546 of SEQ ID NO: 1880683
guaaauaugucauucucua

SEQ ID NO: 1985771 - RNA, 19 nt, Artificial Sequence
  Description of Artificial Sequence: Synthetic oligonucleotide
  Antisense strand to SEQ ID NO: 1985770
uagagaaugacauauuuac

SEQ ID NO: 1985772 - RNA, 19 nt, Artificial Sequence
  Description of Artificial Sequence: Synthetic oligonucleotide
  Sense strand starting at position 628 of SEQ ID NO: 1880683
gugaccuuacagcauuauu

SEQ ID NO: 1985773 - RNA, 19 nt, Artificial Sequence
  Description of Artificial Sequence: Synthetic oligonucleotide
  Antisense strand to SEQ ID NO: 1985772
aauaaugcuguaaggucac

SEQ ID NO: 1985774 - RNA, 19 nt, Artificial Sequence
  Description of Artificial Sequence: Synthetic oligonucleotide
  Sense strand starting at position 826 of SEQ ID NO: 1880683
ugugaugucaccugagcaa

SEQ ID NO: 1985775 - RNA, 19 nt, Artificial Sequence
  Description of Artificial Sequence: Synthetic oligonucleotide
  Antisense strand to SEQ ID NO: 1985774
uugcucaggugacaucaca

SEQ ID NO: 1985776 - RNA, 19 nt, Artificial Sequence
  Description of Artificial Sequence: Synthetic oligonucleotide
  Sense strand starting at position 1015 of SEQ ID NO: 1880683
cguuuccaaguuuaauaau

SEQ ID NO: 1985777 - RNA, 19 nt, Artificial Sequence
  Description of Artificial Sequence: Synthetic oligonucleotide
  Antisense strand to SEQ ID NO: 1985776
auuauuaaacuuggaaacg

SEQ ID NO: 1985778 - RNA, 19 nt, Artificial Sequence
  Description of Artificial Sequence: Synthetic oligonucleotide
  Sense strand starting at position 1092 of SEQ ID NO: 1880683
ccacuuaccucugugauac

SEQ ID NO: 1985779 - RNA, 19 nt, Artificial Sequence
  Description of Artificial Sequence: Synthetic oligonucleotide
  Antisense strand to SEQ ID NO: 1985778
guaucacagagguaagugg

SEQ ID NO: 1985780 - RNA, 19 nt, Artificial Sequence
  Description of Artificial Sequence: Synthetic oligonucleotide
  Sense strand starting at position 1244 of SEQ ID NO: 1880683
agguauuucuuccaaagaa

SEQ ID NO: 1985781 - RNA, 19 nt, Artificial Sequence
  Description of Artificial Sequence: Synthetic oligonucleotide
  Antisense strand to SEQ ID NO: 1985780
uucuuuggaagaaauaccu

SEQ ID NO: 1985782 - RNA, 19 nt, Artificial Sequence
  Description of Artificial Sequence: Synthetic oligonucleotide
  Sense strand starting at position 1301 of SEQ ID NO: 1880683
guucaaauagcagggagau

SEQ ID NO: 1985783 - RNA, 19 nt, Artificial Sequence
  Description of Artificial Sequence: Synthetic oligonucleotide
  Antisense strand to SEQ ID NO: 1985782
aucucccugcuauuugaac

SEQ ID NO: 1985784 - RNA, 19 nt, Artificial Sequence
  Description of Artificial Sequence: Synthetic oligonucleotide
  Sense strand starting at position 1447 of SEQ ID NO: 1880683
gggugauugcuauggaggu

SEQ ID NO: 1985785 - RNA, 19 nt, Artificial Sequence
  Description of Artificial Sequence: Synthetic oligonucleotide
  Antisense strand to SEQ ID NO: 1985784
accuccauagcaaucaccc

SEQ ID NO: 1985786 - RNA, 19 nt, Artificial Sequence
  Description of Artificial Sequence: Synthetic oligonucleotide
  Sense strand starting at position 1451 of SEQ ID NO: 1880683
gauugcuauggagguggaa

SEQ ID NO: 1985787 - RNA, 19 nt, Artificial Sequence
  Description of Artificial Sequence: Synthetic oligonucleotide
  Antisense strand to SEQ ID NO: 1985786
uuccaccuccauagcaauc

SEQ ID NO: 1985788 - RNA, 19 nt, Artificial Sequence
  Description of Artificial Sequence: Synthetic oligonucleotide
  Sense strand starting at position 1453 of SEQ ID NO: 1880683
uugcuauggagguggaaau

SEQ ID NO: 1985789 - RNA, 19 nt, Artificial Sequence
  Description of Artificial Sequence: Synthetic oligonucleotide
  Antisense strand to SEQ ID NO: 1985788
auuuccaccuccauagcaa

SEQ ID NO: 1985790 - RNA, 19 nt, Artificial Sequence
  Description of Artificial Sequence: Synthetic oligonucleotide
  Sense strand starting at position 1454 of SEQ ID NO: 1880683
ugcuauggagguggaaauu

SEQ ID NO: 1985791 - RNA, 19 nt, Artificial Sequence
  Description of Artificial Sequence: Synthetic oligonucleotide
  Antisense strand to SEQ ID NO: 1985790
aauuuccaccuccauagca

SEQ ID NO: 1985792 - RNA, 19 nt, Artificial Sequence
  Description of Artificial Sequence: Synthetic oligonucleotide
  Sense strand starting at position 1861 of SEQ ID NO: 1880683
aguggacauuacuugucua

SEQ ID NO: 1985793 - RNA, 19 nt, Artificial Sequence
  Description of Artificial Sequence: Synthetic oligonucleotide
  Antisense strand to SEQ ID NO: 1985792
uagacaaguaauguccacu

SEQ ID NO: 1985794 - RNA, 19 nt, Artificial Sequence
  Description of Artificial Sequence: Synthetic oligonucleotide
  Sense strand starting at position 1864 of SEQ ID NO: 1880683
ggacauuacuugucuagau

SEQ ID NO: 1985795 - RNA, 19 nt, Artificial Sequence
  Description of Artificial Sequence: Synthetic oligonucleotide
  Antisense strand to SEQ ID NO: 1985794
aucuagacaaguaaugucc

SEQ ID NO: 1985796 - RNA, 19 nt, Artificial Sequence
  Description of Artificial Sequence: Synthetic oligonucleotide
  Sense strand starting at position 2123 of SEQ ID NO: 1880683
cgagacuugccuugaacuu

SEQ ID NO: 1985797 - RNA, 19 nt, Artificial Sequence
  Description of Artificial Sequence: Synthetic oligonucleotide
  Antisense strand to SEQ ID NO: 1985796
aaguucaaggcaagucucg

SEQ ID NO: 1985798 - RNA, 19 nt, Artificial Sequence
  Description of Artificial Sequence: Synthetic oligonucleotide
  Sense strand starting at position 2163 of SEQ ID NO: 1880683
cuaagagcagcuuauaaua

SEQ ID NO: 1985799 - RNA, 19 nt, Artificial Sequence
  Description of Artificial Sequence: Synthetic oligonucleotide
  Antisense strand to SEQ ID NO: 1985798
uauuauaagcugcucuuag

SEQ ID NO: 1985800 - RNA, 19 nt, Artificial Sequence
  Description of Artificial Sequence: Synthetic oligonucleotide
  Sense strand starting at position 2196 of SEQ ID NO: 1880683
uguugucuaugaucauaga

SEQ ID NO: 1985801 - RNA, 19 nt, Artificial Sequence
  Description of Artificial Sequence: Synthetic oligonucleotide
  Antisense strand to SEQ ID NO: 1985800
ucuaugaucauagacaaca

SEQ ID NO: 1985802 - RNA, 19 nt, Artificial Sequence
  Description of Artificial Sequence: Synthetic oligonucleotide
  Sense strand starting at position 2283 of SEQ ID NO: 1880683
ccaggauugccuugagacc

SEQ ID NO: 1985803 - RNA, 19 nt, Artificial Sequence
  Description of Artificial Sequence: Synthetic oligonucleotide
  Antisense strand to SEQ ID NO: 1985802
ggucucaaggcaauccugg

SEQ ID NO: 1985804 - RNA, 19 nt, Artificial Sequence
  Description of Artificial Sequence: Synthetic oligonucleotide
  Sense strand starting at position 2306 of SEQ ID NO: 1880683
cugugagagcccugacuca

SEQ ID NO: 1985805 - RNA, 19 nt, Artificial Sequence
  Description of Artificial Sequence: Synthetic oligonucleotide
  Antisense strand to SEQ ID NO: 1985804
ugagucagggcucucacag

SEQ ID NO: 1985806 - RNA, 19 nt, Artificial Sequence
  Description of Artificial Sequence: Synthetic oligonucleotide
  Sense strand starting at position 2317 of SEQ ID NO: 1880683
cugacucaguauccauaga

SEQ ID NO: 1985807 - RNA, 19 nt, Artificial Sequence
  Description of Artificial Sequence: Synthetic oligonucleotide
  Antisense strand to SEQ ID NO: 1985806
ucuauggauacugagucag

SEQ ID NO: 1985808 - RNA, 19 nt, Artificial Sequence
  Description of Artificial Sequence: Synthetic oligonucleotide
  Sense strand starting at position 2929 of SEQ ID NO: 1880683
uuugaaauacucuguguga

SEQ ID NO: 1985809 - RNA, 19 nt, Artificial Sequence
  Description of Artificial Sequence: Synthetic oligonucleotide
  Antisense strand to SEQ ID NO: 1985808
ucacacagaguauuucaaa

SEQ ID NO: 1985810 - RNA, 19 nt, Artificial Sequence
  Description of Artificial Sequence: Synthetic oligonucleotide
  Sense strand starting at position 2930 of SEQ ID NO: 1880683
uugaaauacucugugugac

SEQ ID NO: 1985811 - RNA, 19 nt, Artificial Sequence
  Description of Artificial Sequence: Synthetic oligonucleotide
  Antisense strand to SEQ ID NO: 1985810
gucacacagaguauuucaa

SEQ ID NO: 1985812 - RNA, 19 nt, Artificial Sequence
  Description of Artificial Sequence: Synthetic oligonucleotide
  Sense strand starting at position 2931 of SEQ ID NO: 1880683
ugaaauacucugugugaca

SEQ ID NO: 1985813 - RNA, 19 nt, Artificial Sequence
  Description of Artificial Sequence: Synthetic oligonucleotide
  Antisense strand to SEQ ID NO: 1985812
ugucacacagaguauuuca

SEQ ID NO: 1985814 - RNA, 19 nt, Artificial Sequence
  Description of Artificial Sequence: Synthetic oligonucleotide
  Sense strand starting at position 2932 of SEQ ID NO: 1880683
gaaauacucugugugacac

SEQ ID NO: 1985815 - RNA, 19 nt, Artificial Sequence
  Description of Artificial Sequence: Synthetic oligonucleotide
  Antisense strand to SEQ ID NO: 1985814
gugucacacagaguauuuc

SEQ ID NO: 1985816 - RNA, 19 nt, Artificial Sequence
  Description of Artificial Sequence: Synthetic oligonucleotide
  Sense strand starting at position 2938 of SEQ ID NO: 1880683
cucugugugacacaucagu

SEQ ID NO: 1985817 - RNA, 19 nt, Artificial Sequence
  Description of Artificial Sequence: Synthetic oligonucleotide
  Antisense strand to SEQ ID NO: 1985816
acugaugugucacacagag

SEQ ID NO: 1985818 - RNA, 19 nt, Artificial Sequence
  Description of Artificial Sequence: Synthetic oligonucleotide
  Sense strand starting at position 3039 of SEQ ID NO: 1880683
uuauuucucuuugaaggga

SEQ ID NO: 1985819 - RNA, 19 nt, Artificial Sequence
  Description of Artificial Sequence: Synthetic oligonucleotide
  Antisense strand to SEQ ID NO: 1985818
ucccuucaaagagaaauaa

SEQ ID NO: 1985820 - RNA, 19 nt, Artificial Sequence
  Description of Artificial Sequence: Synthetic oligonucleotide
  Sense strand starting at position 3168 of SEQ ID NO: 1880683
ccaagagcuguuugacuca

SEQ ID NO: 1985821 - RNA, 19 nt, Artificial Sequence
  Description of Artificial Sequence: Synthetic oligonucleotide
  Antisense strand to SEQ ID NO: 1985820
ugagucaaacagcucuugg

SEQ ID NO: 1985822 - RNA, 19 nt, Artificial Sequence
  Description of Artificial Sequence: Synthetic oligonucleotide
  Sense strand starting at position 3173 of SEQ ID NO: 1880683
agcuguuugacucauguug

SEQ ID NO: 1985823 - RNA, 19 nt, Artificial Sequence
  Description of Artificial Sequence: Synthetic oligonucleotide
  Antisense strand to SEQ ID NO: 1985822
caacaugagucaaacagcu

SEQ ID NO: 1985824 - RNA, 19 nt, Artificial Sequence
  Description of Artificial Sequence: Synthetic oligonucleotide
  Sense strand starting at position 3383 of SEQ ID NO: 1880683
uggagaguguaugucaacu

SEQ ID NO: 1985825 - RNA, 19 nt, Artificial Sequence
  Description of Artificial Sequence: Synthetic oligonucleotide
  Antisense strand to SEQ ID NO: 1985824
aguugacauacacucucca

SEQ ID NO: 1985826 - RNA, 19 nt, Artificial Sequence
  Description of Artificial Sequence: Synthetic oligonucleotide
  Sense strand starting at position 3490 of SEQ ID NO: 1880683
agaaauuaauaggagcaaa

SEQ ID NO: 1985827 - RNA, 19 nt, Artificial Sequence
  Description of Artificial Sequence: Synthetic oligonucleotide
  Antisense strand to SEQ ID NO: 1985826
uuugcuccuauuaauuucu

SEQ ID NO: 1985828 - RNA, 19 nt, Artificial Sequence
  Description of Artificial Sequence: Synthetic oligonucleotide
  Sense strand starting at position 3560 of SEQ ID NO: 1880683
gggagauguggcugaacag

SEQ ID NO: 1985829 - RNA, 19 nt, Artificial Sequence
  Description of Artificial Sequence: Synthetic oligonucleotide
  Antisense strand to SEQ ID NO: 1985828
cuguucagccacaucuccc

SEQ ID NO: 1985830 - RNA, 19 nt, Artificial Sequence
  Description of Artificial Sequence: Synthetic oligonucleotide
  Sense strand starting at position 3608 of SEQ ID NO: 1880683
uguucucucagucagggua

SEQ ID NO: 1985831 - RNA, 19 nt, Artificial Sequence
  Description of Artificial Sequence: Synthetic oligonucleotide
  Antisense strand to SEQ ID NO: 1985830
uacccugacugagagaaca

SEQ ID NO: 1985832 - RNA, 19 nt, Artificial Sequence
  Description of Artificial Sequence: Synthetic oligonucleotide
  Sense strand starting at position 3711 of SEQ ID NO: 1880683
agugacuuauuccugaaau

SEQ ID NO: 1985833 - RNA, 19 nt, Artificial Sequence
  Description of Artificial Sequence: Synthetic oligonucleotide
  Antisense strand to SEQ ID NO: 1985832
auuucaggaauaagucacu

SEQ ID NO: 1985834 - RNA, 19 nt, Artificial Sequence
  Description of Artificial Sequence: Synthetic oligonucleotide
  Sense strand starting at position 3721 of SEQ ID NO: 1880683
uccugaaaucucgggacuu

SEQ ID NO: 1985835 - RNA, 19 nt, Artificial Sequence
  Description of Artificial Sequence: Synthetic oligonucleotide
  Antisense strand to SEQ ID NO: 1985834
aagucccgagauuucagga

SEQ ID NO: 1985836 - RNA, 19 nt, Artificial Sequence
  Description of Artificial Sequence: Synthetic oligonucleotide
  Sense strand starting at position 3805 of SEQ ID NO: 1880683
agaacuugccuguacuaaa

SEQ ID NO: 1985837 - RNA, 19 nt, Artificial Sequence
  Description of Artificial Sequence: Synthetic oligonucleotide
  Antisense strand to SEQ ID NO: 1985836
uuuaguacaggcaaguucu

SEQ ID NO: 1985838 - RNA, 19 nt, Artificial Sequence
  Description of Artificial Sequence: Synthetic oligonucleotide
  Sense strand starting at position 16 of SEQ ID NO: 1880684
guacaaucaucucuggaga

SEQ ID NO: 1985839 - RNA, 19 nt, Artificial Sequence
  Description of Artificial Sequence: Synthetic oligonucleotide
  Antisense strand to SEQ ID NO: 1985838
ucuccagagaugauuguac

SEQ ID NO: 1985840 - RNA, 19 nt, Artificial Sequence
  Description of Artificial Sequence: Synthetic oligonucleotide
  Sense strand starting at position 92 of SEQ ID NO: 1880684
cuuggaauguaccuauaua

SEQ ID NO: 1985841 - RNA, 19 nt, Artificial Sequence
  Description of Artificial Sequence: Synthetic oligonucleotide
  Antisense strand to SEQ ID NO: 1985840
uauauagguacauuccaag

SEQ ID NO: 1985842 - RNA, 19 nt, Artificial Sequence
  Description of Artificial Sequence: Synthetic oligonucleotide
  Sense strand starting at position 136 of SEQ ID NO: 1880684
aaucauugagagggcuuaa

SEQ ID NO: 1985843 - RNA, 19 nt, Artificial Sequence
  Description of Artificial Sequence: Synthetic oligonucleotide
  Antisense strand to SEQ ID NO: 1985842
uuaagcccucucaaugauu

SEQ ID NO: 1985844 - RNA, 19 nt, Artificial Sequence
  Description of Artificial Sequence: Synthetic oligonucleotide
  Sense strand starting at position 536 of SEQ ID NO: 1880684
uguaucuuggugcagaaga

SEQ ID NO: 1985845 - RNA, 19 nt, Artificial Sequence
  Description of Artificial Sequence: Synthetic oligonucleotide
  Antisense strand to SEQ ID NO: 1985844
ucuucugcaccaagauaca

SEQ ID NO: 1985846 - RNA, 19 nt, Artificial Sequence
  Description of Artificial Sequence: Synthetic oligonucleotide
  Sense strand starting at position 538 of SEQ ID NO: 1880684
uaucuuggugcagaagaca

SEQ ID NO: 1985847 - RNA, 19 nt, Artificial Sequence
  Description of Artificial Sequence: Synthetic oligonucleotide
  Antisense strand to SEQ ID NO: 1985846
ugucuucugcaccaagaua

SEQ ID NO: 1985848 - RNA, 19 nt, Artificial Sequence
  Description of Artificial Sequence: Synthetic oligonucleotide
  Sense strand starting at position 561 of SEQ ID NO: 1880684
cugcaauguccugagaaau

SEQ ID NO: 1985849 - RNA, 19 nt, Artificial Sequence
  Description of Artificial Sequence: Synthetic oligonucleotide
  Antisense strand to SEQ ID NO: 1985848
auuucucaggacauugcag

SEQ ID NO: 1985850 - RNA, 19 nt, Artificial Sequence
  Description of Artificial Sequence: Synthetic oligonucleotide
  Sense strand starting at position 649 of SEQ ID NO: 1880684
uuauguccaguuuaacaga

SEQ ID NO: 1985851 - RNA, 19 nt, Artificial Sequence
  Description of Artificial Sequence: Synthetic oligonucleotide
  Antisense strand to SEQ ID NO: 1985850
ucuguuaaacuggacauaa

SEQ ID NO: 1985852 - RNA, 19 nt, Artificial Sequence
  Description of Artificial Sequence: Synthetic oligonucleotide
  Sense strand starting at position 730 of SEQ ID NO: 1880684
uaaagauuacccuggguau

SEQ ID NO: 1985853 - RNA, 19 nt, Artificial Sequence
  Description of Artificial Sequence: Synthetic oligonucleotide
  Antisense strand to SEQ ID NO: 1985852
auacccaggguaaucuuua

SEQ ID NO: 1985854 - RNA, 19 nt, Artificial Sequence
  Description of Artificial Sequence: Synthetic oligonucleotide
  Sense strand starting at position 764 of SEQ ID NO: 1880684
auagaaauacagggcuauu

SEQ ID NO: 1985855 - RNA, 19 nt, Artificial Sequence
  Description of Artificial Sequence: Synthetic oligonucleotide
  Antisense strand to SEQ ID NO: 1985854
aauagcccuguauuucuau

SEQ ID NO: 1985856 - RNA, 19 nt, Artificial Sequence
  Description of Artificial Sequence: Synthetic oligonucleotide
  Sense strand starting at position 815 of SEQ ID NO: 1880684
guuguauaaguccacauac

SEQ ID NO: 1985857 - RNA, 19 nt, Artificial Sequence
  Description of Artificial Sequence: Synthetic oligonucleotide
  Antisense strand to SEQ ID NO: 1985856
guauguggacuuauacaac

SEQ ID NO: 1985858 - RNA, 19 nt, Artificial Sequence
  Description of Artificial Sequence: Synthetic oligonucleotide
  Sense strand starting at position 817 of SEQ ID NO: 1880684
uguauaaguccacauacuc

SEQ ID NO: 1985859 - RNA, 19 nt, Artificial Sequence
  Description of Artificial Sequence: Synthetic oligonucleotide
  Antisense strand to SEQ ID NO: 1985858
gaguauguggacuuauaca

SEQ ID NO: 1985860 - RNA, 19 nt, Artificial Sequence
  Description of Artificial Sequence: Synthetic oligonucleotide
  Sense strand starting at position 832 of SEQ ID NO: 1880684
acucaaggcuauuccaaga

SEQ ID NO: 1985861 - RNA, 19 nt, Artificial Sequence
  Description of Artificial Sequence: Synthetic oligonucleotide
  Antisense strand to SEQ ID NO: 1985860
ucuuggaauagccuugagu

SEQ ID NO: 1985862 - RNA, 19 nt, Artificial Sequence
  Description of Artificial Sequence: Synthetic oligonucleotide
  Sense strand starting at position 1166 of SEQ ID NO: 1880684
cucaccacuguuuggagaa

SEQ ID NO: 1985863 - RNA, 19 nt, Artificial Sequence
  Description of Artificial Sequence: Synthetic oligonucleotide
  Antisense strand to SEQ ID NO: 1985862
uucuccaaacaguggugag

SEQ ID NO: 1985864 - RNA, 19 nt, Artificial Sequence
  Description of Artificial Sequence: Synthetic oligonucleotide
  Sense strand starting at position 1358 of SEQ ID NO: 1880684
guacuauauuauguaccaa

SEQ ID NO: 1985865 - RNA, 19 nt, Artificial Sequence
  Description of Artificial Sequence: Synthetic oligonucleotide
  Antisense strand to SEQ ID NO: 1985864
uugguacauaauauaguac

SEQ ID NO: 1985866 - RNA, 19 nt, Artificial Sequence
  Description of Artificial Sequence: Synthetic oligonucleotide
  Sense strand starting at position 1427 of SEQ ID NO: 1880684
agauauuauuagucacacu

SEQ ID NO: 1985867 - RNA, 19 nt, Artificial Sequence
  Description of Artificial Sequence: Synthetic oligonucleotide
  Antisense strand to SEQ ID NO: 1985866
agugugacuaauaauaucu

SEQ ID NO: 1985868 - RNA, 19 nt, Artificial Sequence
  Description of Artificial Sequence: Synthetic oligonucleotide
  Sense strand starting at position 1584 of SEQ ID NO: 1880684
uuaucuuuagggcaucaaa

SEQ ID NO: 1985869 - RNA, 19 nt, Artificial Sequence
  Description of Artificial Sequence: Synthetic oligonucleotide
  Antisense strand to SEQ ID NO: 1985868
uuugaugcccuaaagauaa

SEQ ID NO: 1985870 - RNA, 19 nt, Artificial Sequence
  Description of Artificial Sequence: Synthetic oligonucleotide
  Sense strand starting at position 1595 of SEQ ID NO: 1880684
gcaucaaauuuggaaagag

SEQ ID NO: 1985871 - RNA, 19 nt, Artificial Sequence
  Description of Artificial Sequence: Synthetic oligonucleotide
  Antisense strand to SEQ ID NO: 1985870
cucuuuccaaauuugaugc

SEQ ID NO: 1985872 - RNA, 19 nt, Artificial Sequence
  Description of Artificial Sequence: Synthetic oligonucleotide
  Sense strand starting at position 1609 of SEQ ID NO: 1880684
aagaguaaacauggcuaca

SEQ ID NO: 1985873 - RNA, 19 nt, Artificial Sequence
  Description of Artificial Sequence: Synthetic oligonucleotide
  Antisense strand to SEQ ID NO: 1985872
uguagccauguuuacucuu

SEQ ID NO: 1985874 - RNA, 19 nt, Artificial Sequence
  Description of Artificial Sequence: Synthetic oligonucleotide
  Sense strand starting at position 1679 of SEQ ID NO: 1880684
ggguuaagcuuauuacaaa

SEQ ID NO: 1985875 - RNA, 19 nt, Artificial Sequence
  Description of Artificial Sequence: Synthetic oligonucleotide
  Antisense strand to SEQ ID NO: 1985874
uuuguaauaagcuuaaccc

SEQ ID NO: 1985876 - RNA, 19 nt, Artificial Sequence
  Description of Artificial Sequence: Synthetic oligonucleotide
  Sense strand starting at position 1899 of SEQ ID NO: 1880684
gguuuaauggguuaaugac

SEQ ID NO: 1985877 - RNA, 19 nt, Artificial Sequence
  Description of Artificial Sequence: Synthetic oligonucleotide
  Antisense strand to SEQ ID NO: 1985876
gucauuaacccauuaaacc

SEQ ID NO: 1985878 - RNA, 19 nt, Artificial Sequence
  Description of Artificial Sequence: Synthetic oligonucleotide
  Sense strand starting at position 1908 of SEQ ID NO: 1880684
gguuaaugacucugacaac

SEQ ID NO: 1985879 - RNA, 19 nt, Artificial Sequence
  Description of Artificial Sequence: Synthetic oligonucleotide
  Antisense strand to SEQ ID NO: 1985878
guugucagagucauuaacc

SEQ ID NO: 1985880 - RNA, 19 nt, Artificial Sequence
  Description of Artificial Sequence: Synthetic oligonucleotide
  Sense strand starting at position 1952 of SEQ ID NO: 1880684
gugagaaaugcccagucau

SEQ ID NO: 1985881 - RNA, 19 nt, Artificial Sequence
  Description of Artificial Sequence: Synthetic oligonucleotide
  Antisense strand to SEQ ID NO: 1985880
augacugggcauuucucac

SEQ ID NO: 1985882 - RNA, 19 nt, Artificial Sequence
  Description of Artificial Sequence: Synthetic oligonucleotide
  Sense strand starting at position 2116 of SEQ ID NO: 1880684
ccagcucucagggagcuaa

SEQ ID NO: 1985883 - RNA, 19 nt, Artificial Sequence
  Description of Artificial Sequence: Synthetic oligonucleotide
  Antisense strand to SEQ ID NO: 1985882
uuagcucccugagagcugg

SEQ ID NO: 1985884 - RNA, 19 nt, Artificial Sequence
  Description of Artificial Sequence: Synthetic oligonucleotide
  Sense strand starting at position 2170 of SEQ ID NO: 1880684
cucaucuaugcaugaggaa

SEQ ID NO: 1985885 - RNA, 19 nt, Artificial Sequence
  Description of Artificial Sequence: Synthetic oligonucleotide
  Antisense strand to SEQ ID NO: 1985884
uuccucaugcauagaugag

SEQ ID NO: 1985886 - RNA, 19 nt, Artificial Sequence
  Description of Artificial Sequence: Synthetic oligonucleotide
  Sense strand starting at position 2227 of SEQ ID NO: 1880684
acuugcaaccuugagauca

SEQ ID NO: 1985887 - RNA, 19 nt, Artificial Sequence
  Description of Artificial Sequence: Synthetic oligonucleotide
  Antisense strand to SEQ ID NO: 1985886
ugaucucaagguugcaagu

SEQ ID NO: 1985888 - RNA, 19 nt, Artificial Sequence
  Description of Artificial Sequence: Synthetic oligonucleotide
  Sense strand starting at position 2360 of SEQ ID NO: 1880684
gguagaaauuaguuucuca

SEQ ID NO: 1985889 - RNA, 19 nt, Artificial Sequence
  Description of Artificial Sequence: Synthetic oligonucleotide
  Antisense strand to SEQ ID NO: 1985888
ugagaaacuaauuucuacc

SEQ ID NO: 1985890 - RNA, 19 nt, Artificial Sequence
  Description of Artificial Sequence: Synthetic oligonucleotide
  Sense strand starting at position 2370 of SEQ ID NO: 1880684
aguuucucagcugauuaga

SEQ ID NO: 1985891 - RNA, 19 nt, Artificial Sequence
  Description of Artificial Sequence: Synthetic oligonucleotide
  Antisense strand to SEQ ID NO: 1985890
ucuaaucagcugagaaacu

SEQ ID NO: 1985892 - RNA, 19 nt, Artificial Sequence
  Description of Artificial Sequence: Synthetic oligonucleotide
  Sense strand starting at position 2372 of SEQ ID NO: 1880684
uuucucagcugauuagaaa

SEQ ID NO: 1985893 - RNA, 19 nt, Artificial Sequence
  Description of Artificial Sequence: Synthetic oligonucleotide
  Antisense strand to SEQ ID NO: 1985892
uuucuaaucagcugagaaa

SEQ ID NO: 1985894 - RNA, 19 nt, Artificial Sequence
  Description of Artificial Sequence: Synthetic oligonucleotide
  Sense strand starting at position 2469 of SEQ ID NO: 1880684
cucacuaggcucuaagauu

SEQ ID NO: 1985895 - RNA, 19 nt, Artificial Sequence
  Description of Artificial Sequence: Synthetic oligonucleotide
  Antisense strand to SEQ ID NO: 1985894
aaucuuagagccuagugag

SEQ ID NO: 1985896 - RNA, 19 nt, Artificial Sequence
  Description of Artificial Sequence: Synthetic oligonucleotide
  Sense strand starting at position 2478 of SEQ ID NO: 1880684
cucuaagauuuggagaaca

SEQ ID NO: 1985897 - RNA, 19 nt, Artificial Sequence
  Description of Artificial Sequence: Synthetic oligonucleotide
  Antisense strand to SEQ ID NO: 1985896
uguucuccaaaucuuagag

SEQ ID NO: 1985898 - RNA, 19 nt, Artificial Sequence
  Description of Artificial Sequence: Synthetic oligonucleotide
  Sense strand starting at position 2761 of SEQ ID NO: 1880684
acgcucucuggauacaaau

SEQ ID NO: 1985899 - RNA, 19 nt, Artificial Sequence
  Description of Artificial Sequence: Synthetic oligonucleotide
  Antisense strand to SEQ ID NO: 1985898
auuuguauccagagagcgu

SEQ ID NO: 1985900 - RNA, 19 nt, Artificial Sequence
  Description of Artificial Sequence: Synthetic oligonucleotide
  Sense strand starting at position 2812 of SEQ ID NO: 1880684
gagagaauacuuuguaagu

SEQ ID NO: 1985901 - RNA, 19 nt, Artificial Sequence
  Description of Artificial Sequence: Synthetic oligonucleotide
  Antisense strand to SEQ ID NO: 1985900
acuuacaaaguauucucuc

SEQ ID NO: 1985902 - RNA, 19 nt, Artificial Sequence
  Description of Artificial Sequence: Synthetic oligonucleotide
  Sense strand starting at position 2813 of SEQ ID NO: 1880684
agagaauacuuuguaagua

SEQ ID NO: 1985903 - RNA, 19 nt, Artificial Sequence
  Description of Artificial Sequence: Synthetic oligonucleotide
  Antisense strand to SEQ ID NO: 1985902
uacuuacaaaguauucucu

SEQ ID NO: 1985904 - RNA, 19 nt, Artificial Sequence
  Description of Artificial Sequence: Synthetic oligonucleotide
  Sense strand starting at position 2865 of SEQ ID NO: 1880684
gcuucuuuccuugaaauug

SEQ ID NO: 1985905 - RNA, 19 nt, Artificial Sequence
  Description of Artificial Sequence: Synthetic oligonucleotide
  Antisense strand to SEQ ID NO: 1985904
caauuucaaggaaagaagc

SEQ ID NO: 1985906 - RNA, 19 nt, Artificial Sequence
  Description of Artificial Sequence: Synthetic oligonucleotide
  Sense strand starting at position 3096 of SEQ ID NO: 1880684
ugugauuacucucuaaagg

SEQ ID NO: 1985907 - RNA, 19 nt, Artificial Sequence
  Description of Artificial Sequence: Synthetic oligonucleotide
  Antisense strand to SEQ ID NO: 1985906
ccuuuagagaguaaucaca

SEQ ID NO: 1985908 - RNA, 19 nt, Artificial Sequence
  Description of Artificial Sequence: Synthetic oligonucleotide
  Sense strand starting at position 3445 of SEQ ID NO: 1880684
acuauacuucuagaguugu

SEQ ID NO: 1985909 - RNA, 19 nt, Artificial Sequence
  Description of Artificial Sequence: Synthetic oligonucleotide
  Antisense strand to SEQ ID NO: 1985908
acaacucuagaaguauagu

SEQ ID NO: 1985910 - RNA, 19 nt, Artificial Sequence
  Description of Artificial Sequence: Synthetic oligonucleotide
  Sense strand starting at position 3546 of SEQ ID NO: 1880684
uuuccugcgcucuuuauau

SEQ ID NO: 1985911 - RNA, 19 nt, Artificial Sequence
  Description of Artificial Sequence: Synthetic oligonucleotide
  Antisense strand to SEQ ID NO: 1985910
auauaaagagcgcaggaaa

SEQ ID NO: 1985912 - RNA, 19 nt, Artificial Sequence
  Description of Artificial Sequence: Synthetic oligonucleotide
  Sense strand starting at position 3603 of SEQ ID NO: 1880684
uugacacuccuuuacuagu

SEQ ID NO: 1985913 - RNA, 19 nt, Artificial Sequence
  Description of Artificial Sequence: Synthetic oligonucleotide
  Antisense strand to SEQ ID NO: 1985912
acuaguaaaggagugucaa

SEQ ID NO: 1985914 - RNA, 19 nt, Artificial Sequence
  Description of Artificial Sequence: Synthetic oligonucleotide
  Sense strand starting at position 3659 of SEQ ID NO: 1880684
guaguugauuucuuauugu

SEQ ID NO: 1985915 - RNA, 19 nt, Artificial Sequence
  Description of Artificial Sequence: Synthetic oligonucleotide
  Antisense strand to SEQ ID NO: 1985914
acaauaagaaaucaacuac

SEQ ID NO: 1985916 - RNA, 19 nt, Artificial Sequence
  Description of Artificial Sequence: Synthetic oligonucleotide
  Sense strand starting at position 3905 of SEQ ID NO: 1880684
gcaaauaggcaccauugua

SEQ ID NO: 1985917 - RNA, 19 nt, Artificial Sequence
  Description of Artificial Sequence: Synthetic oligonucleotide
  Antisense strand to SEQ ID NO: 1985916
uacaauggugccuauuugc

SEQ ID NO: 1985918 - RNA, 19 nt, Artificial Sequence
  Description of Artificial Sequence: Synthetic oligonucleotide
  Sense strand starting at position 151 of SEQ ID NO: 1880685
caaggauuggcaugagacu

SEQ ID NO: 1985919 - RNA, 19 nt, Artificial Sequence
  Description of Artificial Sequence: Synthetic oligonucleotide
  Antisense strand to SEQ ID NO: 1985918
agucucaugccaauccuug

SEQ ID NO: 1985920 - RNA, 19 nt, Artificial Sequence
  Description of Artificial Sequence: Synthetic oligonucleotide
  Sense strand starting at position 278 of SEQ ID NO: 1880685
gcuggucccagugauaauu

SEQ ID NO: 1985921 - RNA, 19 nt, Artificial Sequence
  Description of Artificial Sequence: Synthetic oligonucleotide
  Antisense strand to SEQ ID NO: 1985920
aauuaucacugggaccagc

SEQ ID NO: 1985922 - RNA, 19 nt, Artificial Sequence
  Description of Artificial Sequence: Synthetic oligonucleotide
  Sense strand starting at position 317 of SEQ ID NO: 1880685
auuugugacuaauaaagga

SEQ ID NO: 1985923 - RNA, 19 nt, Artificial Sequence
  Description of Artificial Sequence: Synthetic oligonucleotide
  Antisense strand to SEQ ID NO: 1985922
uccuuuauuagucacaaau

SEQ ID NO: 1985924 - RNA, 19 nt, Artificial Sequence
  Description of Artificial Sequence: Synthetic oligonucleotide
  Sense strand starting at position 341 of SEQ ID NO: 1880685
guggaauucucaccaguug

SEQ ID NO: 1985925 - RNA, 19 nt, Artificial Sequence
  Description of Artificial Sequence: Synthetic oligonucleotide
  Antisense strand to SEQ ID NO: 1985924
caacuggugagaauuccac

SEQ ID NO: 1985926 - RNA, 19 nt, Artificial Sequence
  Description of Artificial Sequence: Synthetic oligonucleotide
  Sense strand starting at position 342 of SEQ ID NO: 1880685
uggaauucucaccaguugu

SEQ ID NO: 1985927 - RNA, 19 nt, Artificial Sequence
  Description of Artificial Sequence: Synthetic oligonucleotide
  Antisense strand to SEQ ID NO: 1985926
acaacuggugagaauucca

SEQ ID NO: 1985928 - RNA, 19 nt, Artificial Sequence
  Description of Artificial Sequence: Synthetic oligonucleotide
  Sense strand starting at position 416 of SEQ ID NO: 1880685
ggcucauagcuagaggaca

SEQ ID NO: 1985929 - RNA, 19 nt, Artificial Sequence
  Description of Artificial Sequence: Synthetic oligonucleotide
  Antisense strand to SEQ ID NO: 1985928
uguccucuagcuaugagcc

SEQ ID NO: 1985930 - RNA, 19 nt, Artificial Sequence
  Description of Artificial Sequence: Synthetic oligonucleotide
  Sense strand starting at position 437 of SEQ ID NO: 1880685
cucauagcucaagggugau

SEQ ID NO: 1985931 - RNA, 19 nt, Artificial Sequence
  Description of Artificial Sequence: Synthetic oligonucleotide
  Antisense strand to SEQ ID NO: 1985930
aucacccuugagcuaugag

SEQ ID NO: 1985932 - RNA, 19 nt, Artificial Sequence
  Description of Artificial Sequence: Synthetic oligonucleotide
  Sense strand starting at position 440 of SEQ ID NO: 1880685
auagcucaagggugaugaa

SEQ ID NO: 1985933 - RNA, 19 nt, Artificial Sequence
  Description of Artificial Sequence: Synthetic oligonucleotide
  Antisense strand to SEQ ID NO: 1985932
uucaucacccuugagcuau

SEQ ID NO: 1985934 - RNA, 19 nt, Artificial Sequence
  Description of Artificial Sequence: Synthetic oligonucleotide
  Sense strand starting at position 807 of SEQ ID NO: 1880685
augggaacuugguuaagua

SEQ ID NO: 1985935 - RNA, 19 nt, Artificial Sequence
  Description of Artificial Sequence: Synthetic oligonucleotide
  Antisense strand to SEQ ID NO: 1985934
uacuuaaccaaguucccau

SEQ ID NO: 1985936 - RNA, 19 nt, Artificial Sequence
  Description of Artificial Sequence: Synthetic oligonucleotide
  Sense strand starting at position 811 of SEQ ID NO: 1880685
gaacuugguuaaguaacaa

SEQ ID NO: 1985937 - RNA, 19 nt, Artificial Sequence
  Description of Artificial Sequence: Synthetic oligonucleotide
  Antisense strand to SEQ ID NO: 1985936
uuguuacuuaaccaaguuc

SEQ ID NO: 1985938 - RNA, 19 nt, Artificial Sequence
  Description of Artificial Sequence: Synthetic oligonucleotide
  Sense strand starting at position 955 of SEQ ID NO: 1880685
uugggauugucaucauuau

SEQ ID NO: 1985939 - RNA, 19 nt, Artificial Sequence
  Description of Artificial Sequence: Synthetic oligonucleotide
  Antisense strand to SEQ ID NO: 1985938
auaaugaugacaaucccaa

SEQ ID NO: 1985940 - RNA, 19 nt, Artificial Sequence
  Description of Artificial Sequence: Synthetic oligonucleotide
  Sense strand starting at position 1056 of SEQ ID NO: 1880685
agggcauucucccugggaa

SEQ ID NO: 1985941 - RNA, 19 nt, Artificial Sequence
  Description of Artificial Sequence: Synthetic oligonucleotide
  Antisense strand to SEQ ID NO: 1985940
uucccagggagaaugcccu

SEQ ID NO: 1985942 - RNA, 19 nt, Artificial Sequence
  Description of Artificial Sequence: Synthetic oligonucleotide
  Sense strand starting at position 1057 of SEQ ID NO: 1880685
gggcauucucccugggaaa

SEQ ID NO: 1985943 - RNA, 19 nt, Artificial Sequence
  Description of Artificial Sequence: Synthetic oligonucleotide
  Antisense strand to SEQ ID NO: 1985942
uuucccagggagaaugccc

SEQ ID NO: 1985944 - RNA, 19 nt, Artificial Sequence
  Description of Artificial Sequence: Synthetic oligonucleotide
  Sense strand starting at position 1058 of SEQ ID NO: 1880685
ggcauucucccugggaaau

SEQ ID NO: 1985945 - RNA, 19 nt, Artificial Sequence
  Description of Artificial Sequence: Synthetic oligonucleotide
  Antisense strand to SEQ ID NO: 1985944
auuucccagggagaaugcc

SEQ ID NO: 1985946 - RNA, 19 nt, Artificial Sequence
  Description of Artificial Sequence: Synthetic oligonucleotide
  Sense strand starting at position 1059 of SEQ ID NO: 1880685
gcauucucccugggaaaua

SEQ ID NO: 1985947 - RNA, 19 nt, Artificial Sequence
  Description of Artificial Sequence: Synthetic oligonucleotide
  Antisense strand to SEQ ID NO: 1985946
uauuucccagggagaaugc

SEQ ID NO: 1985948 - RNA, 19 nt, Artificial Sequence
  Description of Artificial Sequence: Synthetic oligonucleotide
  Sense strand starting at position 1419 of SEQ ID NO: 1880685
gugaaucuuccagaggcag

SEQ ID NO: 1985949 - RNA, 19 nt, Artificial Sequence
  Description of Artificial Sequence: Synthetic oligonucleotide
  Antisense strand to SEQ ID NO: 1985948
cugccucuggaagauucac

SEQ ID NO: 1985950 - RNA, 19 nt, Artificial Sequence
  Description of Artificial Sequence: Synthetic oligonucleotide
  Sense strand starting at position 1500 of SEQ ID NO: 1880685
uucacuagucagugggaga

SEQ ID NO: 1985951 - RNA, 19 nt, Artificial Sequence
  Description of Artificial Sequence: Synthetic oligonucleotide
  Antisense strand to SEQ ID NO: 1985950
ucucccacugacuagugaa

SEQ ID NO: 1985952 - RNA, 19 nt, Artificial Sequence
  Description of Artificial Sequence: Synthetic oligonucleotide
  Sense strand starting at position 1501 of SEQ ID NO: 1880685
ucacuagucagugggagaa

SEQ ID NO: 1985953 - RNA, 19 nt, Artificial Sequence
  Description of Artificial Sequence: Synthetic oligonucleotide
  Antisense strand to SEQ ID NO: 1985952
uucucccacugacuaguga

SEQ ID NO: 1985954 - RNA, 19 nt, Artificial Sequence
  Description of Artificial Sequence: Synthetic oligonucleotide
  Sense strand starting at position 1760 of SEQ ID NO: 1880685
gggaacaugugagaggaaa

SEQ ID NO: 1985955 - RNA, 19 nt, Artificial Sequence
  Description of Artificial Sequence: Synthetic oligonucleotide
  Antisense strand to SEQ ID NO: 1985954
uuuccucucacauguuccc

SEQ ID NO: 1985956 - RNA, 19 nt, Artificial Sequence
  Description of Artificial Sequence: Synthetic oligonucleotide
  Sense strand starting at position 1855 of SEQ ID NO: 1880685
acaggugucuuuguagaac

SEQ ID NO: 1985957 - RNA, 19 nt, Artificial Sequence
  Description of Artificial Sequence: Synthetic oligonucleotide
  Antisense strand to SEQ ID NO: 1985956
guucuacaaagacaccugu

SEQ ID NO: 1985958 - RNA, 19 nt, Artificial Sequence
  Description of Artificial Sequence: Synthetic oligonucleotide
  Sense strand starting at position 1858 of SEQ ID NO: 1880685
ggugucuuuguagaaccau

SEQ ID NO: 1985959 - RNA, 19 nt, Artificial Sequence
  Description of Artificial Sequence: Synthetic oligonucleotide
  Antisense strand to SEQ ID NO: 1985958
augguucuacaaagacacc

SEQ ID NO: 1985960 - RNA, 19 nt, Artificial Sequence
  Description of Artificial Sequence: Synthetic oligonucleotide
  Sense strand starting at position 1899 of SEQ ID NO: 1880685
gguccaugaugguuaacaa

SEQ ID NO: 1985961 - RNA, 19 nt, Artificial Sequence
  Description of Artificial Sequence: Synthetic oligonucleotide
  Antisense strand to SEQ ID NO: 1985960
uuguuaaccaucauggacc

SEQ ID NO: 1985962 - RNA, 19 nt, Artificial Sequence
  Description of Artificial Sequence: Synthetic oligonucleotide
  Sense strand starting at position 1917 of SEQ ID NO: 1880685
aggcaucuugcagagucuu

SEQ ID NO: 1985963 - RNA, 19 nt, Artificial Sequence
  Description of Artificial Sequence: Synthetic oligonucleotide
  Antisense strand to SEQ ID NO: 1985962
aagacucugcaagaugccu

SEQ ID NO: 1985964 - RNA, 19 nt, Artificial Sequence
  Description of Artificial Sequence: Synthetic oligonucleotide
  Sense strand starting at position 1923 of SEQ ID NO: 1880685
cuugcagagucuuuccaag

SEQ ID NO: 1985965 - RNA, 19 nt, Artificial Sequence
  Description of Artificial Sequence: Synthetic oligonucleotide
  Antisense strand to SEQ ID NO: 1985964
cuuggaaagacucugcaag

SEQ ID NO: 1985966 - RNA, 19 nt, Artificial Sequence
  Description of Artificial Sequence: Synthetic oligonucleotide
  Sense strand starting at position 1929 of SEQ ID NO: 1880685
gagucuuuccaaggugaca

SEQ ID NO: 1985967 - RNA, 19 nt, Artificial Sequence
  Description of Artificial Sequence: Synthetic oligonucleotide
  Antisense strand to SEQ ID NO: 1985966
ugucaccuuggaaagacuc

SEQ ID NO: 1985968 - RNA, 19 nt, Artificial Sequence
  Description of Artificial Sequence: Synthetic oligonucleotide
  Sense strand starting at position 2037 of SEQ ID NO: 1880685
gacuguucuggccauaauc

SEQ ID NO: 1985969 - RNA, 19 nt, Artificial Sequence
  Description of Artificial Sequence: Synthetic oligonucleotide
  Antisense strand to SEQ ID NO: 1985968
gauuauggccagaacaguc

SEQ ID NO: 1985970 - RNA, 19 nt, Artificial Sequence
  Description of Artificial Sequence: Synthetic oligonucleotide
  Sense strand starting at position 2039 of SEQ ID NO: 1880685
cuguucuggccauaaucca

SEQ ID NO: 1985971 - RNA, 19 nt, Artificial Sequence
  Description of Artificial Sequence: Synthetic oligonucleotide
  Antisense strand to SEQ ID NO: 1985970
uggauuauggccagaacag

SEQ ID NO: 1985972 - RNA, 19 nt, Artificial Sequence
  Description of Artificial Sequence: Synthetic oligonucleotide
  Sense strand starting at position 2212 of SEQ ID NO: 1880685
gggagcugucgucaaagag

SEQ ID NO: 1985973 - RNA, 19 nt, Artificial Sequence
  Description of Artificial Sequence: Synthetic oligonucleotide
  Antisense strand to SEQ ID NO: 1985972
cucuuugacgacagcuccc

SEQ ID NO: 1985974 - RNA, 19 nt, Artificial Sequence
  Description of Artificial Sequence: Synthetic oligonucleotide
  Sense strand starting at position 2227 of SEQ ID NO: 1880685
agaguaaugguacauguga

SEQ ID NO: 1985975 - RNA, 19 nt, Artificial Sequence
  Description of Artificial Sequence: Synthetic oligonucleotide
  Antisense strand to SEQ ID NO: 1985974
ucacauguaccauuacucu

SEQ ID NO: 1985976 - RNA, 19 nt, Artificial Sequence
  Description of Artificial Sequence: Synthetic oligonucleotide
  Sense strand starting at position 2229 of SEQ ID NO: 1880685
aguaaugguacaugugaca

SEQ ID NO: 1985977 - RNA, 19 nt, Artificial Sequence
  Description of Artificial Sequence: Synthetic oligonucleotide
  Antisense strand to SEQ ID NO: 1985976
ugucacauguaccauuacu

SEQ ID NO: 1985978 - RNA, 19 nt, Artificial Sequence
  Description of Artificial Sequence: Synthetic oligonucleotide
  Sense strand starting at position 2346 of SEQ ID NO: 1880685
ucauaauaacaguguccau

SEQ ID NO: 1985979 - RNA, 19 nt, Artificial Sequence
  Description of Artificial Sequence: Synthetic oligonucleotide
  Antisense strand to SEQ ID NO: 1985978
auggacacuguuauuauga

SEQ ID NO: 1985980 - RNA, 19 nt, Artificial Sequence
  Description of Artificial Sequence: Synthetic oligonucleotide
  Sense strand starting at position 2432 of SEQ ID NO: 1880685
acaggaucucaccgaaacu

SEQ ID NO: 1985981 - RNA, 19 nt, Artificial Sequence
  Description of Artificial Sequence: Synthetic oligonucleotide
  Antisense strand to SEQ ID NO: 1985980
aguuucggugagauccugu

SEQ ID NO: 1985982 - RNA, 19 nt, Artificial Sequence
  Description of Artificial Sequence: Synthetic oligonucleotide
  Sense strand starting at position 2483 of SEQ ID NO: 1880685
uugucaccacuguauagau

SEQ ID NO: 1985983 - RNA, 19 nt, Artificial Sequence
  Description of Artificial Sequence: Synthetic oligonucleotide
  Antisense strand to SEQ ID NO: 1985982
aucuauacaguggugacaa

SEQ ID NO: 1985984 - RNA, 19 nt, Artificial Sequence
  Description of Artificial Sequence: Synthetic oligonucleotide
  Sense strand starting at position 2562 of SEQ ID NO: 1880685
ccagcaguuugauuaugga

SEQ ID NO: 1985985 - RNA, 19 nt, Artificial Sequence
  Description of Artificial Sequence: Synthetic oligonucleotide
  Antisense strand to SEQ ID NO: 1985984
uccauaaucaaacugcugg

SEQ ID NO: 1985986 - RNA, 19 nt, Artificial Sequence
  Description of Artificial Sequence: Synthetic oligonucleotide
  Sense strand starting at position 2712 of SEQ ID NO: 1880685
guguccuuccaauaauccu

SEQ ID NO: 1985987 - RNA, 19 nt, Artificial Sequence
  Description of Artificial Sequence: Synthetic oligonucleotide
  Antisense strand to SEQ ID NO: 1985986
aggauuauuggaaggacac

SEQ ID NO: 1985988 - RNA, 19 nt, Artificial Sequence
  Description of Artificial Sequence: Synthetic oligonucleotide
  Sense strand starting at position 2800 of SEQ ID NO: 1880685
acaaguguuccagagaagu

SEQ ID NO: 1985989 - RNA, 19 nt, Artificial Sequence
  Description of Artificial Sequence: Synthetic oligonucleotide
  Antisense strand to SEQ ID NO: 1985988
acuucucuggaacacuugu

SEQ ID NO: 1985990 - RNA, 19 nt, Artificial Sequence
  Description of Artificial Sequence: Synthetic oligonucleotide
  Sense strand starting at position 2810 of SEQ ID NO: 1880685
cagagaaguggcuaguaac

SEQ ID NO: 1985991 - RNA, 19 nt, Artificial Sequence
  Description of Artificial Sequence: Synthetic oligonucleotide
  Antisense strand to SEQ ID NO: 1985990
guuacuagccacuucucug

SEQ ID NO: 1985992 - RNA, 19 nt, Artificial Sequence
  Description of Artificial Sequence: Synthetic oligonucleotide
  Sense strand starting at position 3057 of SEQ ID NO: 1880685
agcucuucuccugaggaag

SEQ ID NO: 1985993 - RNA, 19 nt, Artificial Sequence
  Description of Artificial Sequence: Synthetic oligonucleotide
  Antisense strand to SEQ ID NO: 1985992
cuuccucaggagaagagcu

SEQ ID NO: 1985994 - RNA, 19 nt, Artificial Sequence
  Description of Artificial Sequence: Synthetic oligonucleotide
  Sense strand starting at position 3139 of SEQ ID NO: 1880685
ugcugaugucauugaagaa

SEQ ID NO: 1985995 - RNA, 19 nt, Artificial Sequence
  Description of Artificial Sequence: Synthetic oligonucleotide
  Antisense strand to SEQ ID NO: 1985994
uucuucaaugacaucagca

SEQ ID NO: 1985996 - RNA, 19 nt, Artificial Sequence
  Description of Artificial Sequence: Synthetic oligonucleotide
  Sense strand starting at position 3916 of SEQ ID NO: 1880685
gaggaaggguaugaaagaa

SEQ ID NO: 1985997 - RNA, 19 nt, Artificial Sequence
  Description of Artificial Sequence: Synthetic oligonucleotide
  Antisense strand to SEQ ID NO: 1985996
uucuuucauacccuuccuc

SEQ ID NO: 1985998 - RNA, 19 nt, Artificial Sequence
  Description of Artificial Sequence: Synthetic oligonucleotide
  Sense strand starting at position 26 of SEQ ID NO: 1880686
ggugcuuggagccauaaga

SEQ ID NO: 1985999 - RNA, 19 nt, Artificial Sequence
  Description of Artificial Sequence: Synthetic oligonucleotide
  Antisense strand to SEQ ID NO: 1985998
ucuuauggcuccaagcacc

SEQ ID NO: 1986000 - RNA, 19 nt, Artificial Sequence
  Description of Artificial Sequence: Synthetic oligonucleotide
  Sense strand starting at position 35 of SEQ ID NO: 1880686
agccauaagagcugguaau

SEQ ID NO: 1986001 - RNA, 19 nt, Artificial Sequence
  Description of Artificial Sequence: Synthetic oligonucleotide
  Antisense strand to SEQ ID NO: 1986000
auuaccagcucuuauggcu

SEQ ID NO: 1986002 - RNA, 19 nt, Artificial Sequence
  Description of Artificial Sequence: Synthetic oligonucleotide
  Sense strand starting at position 98 of SEQ ID NO: 1880686
ugaccuagaugaguuuacu

SEQ ID NO: 1986003 - RNA, 19 nt, Artificial Sequence
  Description of Artificial Sequence: Synthetic oligonucleotide
  Antisense strand to SEQ ID NO: 1986002
aguaaacucaucuagguca

SEQ ID NO: 1986004 - RNA, 19 nt, Artificial Sequence
  Description of Artificial Sequence: Synthetic oligonucleotide
  Sense strand starting at position 117 of SEQ ID NO: 1880686
agggaaaguucauuaggua

SEQ ID NO: 1986005 - RNA, 19 nt, Artificial Sequence
  Description of Artificial Sequence: Synthetic oligonucleotide
  Antisense strand to SEQ ID NO: 1986004
uaccuaaugaacuuucccu

SEQ ID NO: 1986006 - RNA, 19 nt, Artificial Sequence
  Description of Artificial Sequence: Synthetic oligonucleotide
  Sense strand starting at position 193 of SEQ ID NO: 1880686
aggaucauggcaggcauau

SEQ ID NO: 1986007 - RNA, 19 nt, Artificial Sequence
  Description of Artificial Sequence: Synthetic oligonucleotide
  Antisense strand to SEQ ID NO: 1986006
auaugccugccaugauccu

SEQ ID NO: 1986008 - RNA, 19 nt, Artificial Sequence
  Description of Artificial Sequence: Synthetic oligonucleotide
  Sense strand starting at position 405 of SEQ ID NO: 1880686
gaaaguuauugucucagag

SEQ ID NO: 1986009 - RNA, 19 nt, Artificial Sequence
  Description of Artificial Sequence: Synthetic oligonucleotide
  Antisense strand to SEQ ID NO: 1986008
cucugagacaauaacuuuc

SEQ ID NO: 1986010 - RNA, 19 nt, Artificial Sequence
  Description of Artificial Sequence: Synthetic oligonucleotide
  Sense strand starting at position 650 of SEQ ID NO: 1880686
cuuuaauucggcuacucua

SEQ ID NO: 1986011 - RNA, 19 nt, Artificial Sequence
  Description of Artificial Sequence: Synthetic oligonucleotide
  Antisense strand to SEQ ID NO: 1986010
uagaguagccgaauuaaag

SEQ ID NO: 1986012 - RNA, 19 nt, Artificial Sequence
  Description of Artificial Sequence: Synthetic oligonucleotide
  Sense strand starting at position 801 of SEQ ID NO: 1880686
guuucuggagccuaagaca

SEQ ID NO: 1986013 - RNA, 19 nt, Artificial Sequence
  Description of Artificial Sequence: Synthetic oligonucleotide
  Antisense strand to SEQ ID NO: 1986012
ugucuuaggcuccagaaac

SEQ ID NO: 1986014 - RNA, 19 nt, Artificial Sequence
  Description of Artificial Sequence: Synthetic oligonucleotide
  Sense strand starting at position 930 of SEQ ID NO: 1880686
ggagaaguacucuggcuuc

SEQ ID NO: 1986015 - RNA, 19 nt, Artificial Sequence
  Description of Artificial Sequence: Synthetic oligonucleotide
  Antisense strand to SEQ ID NO: 1986014
gaagccagaguacuucucc

SEQ ID NO: 1986016 - RNA, 19 nt, Artificial Sequence
  Description of Artificial Sequence: Synthetic oligonucleotide
  Sense strand starting at position 1092 of SEQ ID NO: 1880686
uggcucugacagcaacaau

SEQ ID NO: 1986017 - RNA, 19 nt, Artificial Sequence
  Description of Artificial Sequence: Synthetic oligonucleotide
  Antisense strand to SEQ ID NO: 1986016
auuguugcugucagagcca

SEQ ID NO: 1986018 - RNA, 19 nt, Artificial Sequence
  Description of Artificial Sequence: Synthetic oligonucleotide
  Sense strand starting at position 1244 of SEQ ID NO: 1880686
ugcuaagagccauagaaau

SEQ ID NO: 1986019 - RNA, 19 nt, Artificial Sequence
  Description of Artificial Sequence: Synthetic oligonucleotide
  Antisense strand to SEQ ID NO: 1986018
auuucuauggcucuuagca

SEQ ID NO: 1986020 - RNA, 19 nt, Artificial Sequence
  Description of Artificial Sequence: Synthetic oligonucleotide
  Sense strand starting at position 1296 of SEQ ID NO: 1880686
cggugaugugaucagagau

SEQ ID NO: 1986021 - RNA, 19 nt, Artificial Sequence
  Description of Artificial Sequence: Synthetic oligonucleotide
  Antisense strand to SEQ ID NO: 1986020
aucucugaucacaucaccg

SEQ ID NO: 1986022 - RNA, 19 nt, Artificial Sequence
  Description of Artificial Sequence: Synthetic oligonucleotide
  Sense strand starting at position 1326 of SEQ ID NO: 1880686
agaccuaucuggcuaugaa

SEQ ID NO: 1986023 - RNA, 19 nt, Artificial Sequence
  Description of Artificial Sequence: Synthetic oligonucleotide
  Antisense strand to SEQ ID NO: 1986022
uucauagccagauaggucu

SEQ ID NO: 1986024 - RNA, 19 nt, Artificial Sequence
  Description of Artificial Sequence: Synthetic oligonucleotide
  Sense strand starting at position 1383 of SEQ ID NO: 1880686
gaaggcuacgccuaagaga

SEQ ID NO: 1986025 - RNA, 19 nt, Artificial Sequence
  Description of Artificial Sequence: Synthetic oligonucleotide
  Antisense strand to SEQ ID NO: 1986024
ucucuuaggcguagccuuc

SEQ ID NO: 1986026 - RNA, 19 nt, Artificial Sequence
  Description of Artificial Sequence: Synthetic oligonucleotide
  Sense strand starting at position 1677 of SEQ ID NO: 1880686
ccaucacucuggcuuaaug

SEQ ID NO: 1986027 - RNA, 19 nt, Artificial Sequence
  Description of Artificial Sequence: Synthetic oligonucleotide
  Antisense strand to SEQ ID NO: 1986026
cauuaagccagagugaugg

SEQ ID NO: 1986028 - RNA, 19 nt, Artificial Sequence
  Description of Artificial Sequence: Synthetic oligonucleotide
  Sense strand starting at position 1832 of SEQ ID NO: 1880686
gaaucaugagcucagcaug

SEQ ID NO: 1986029 - RNA, 19 nt, Artificial Sequence
  Description of Artificial Sequence: Synthetic oligonucleotide
  Antisense strand to SEQ ID NO: 1986028
caugcugagcucaugauuc

SEQ ID NO: 1986030 - RNA, 19 nt, Artificial Sequence
  Description of Artificial Sequence: Synthetic oligonucleotide
  Sense strand starting at position 2071 of SEQ ID NO: 1880686
ggcucuguccuagauaucu

SEQ ID NO: 1986031 - RNA, 19 nt, Artificial Sequence
  Description of Artificial Sequence: Synthetic oligonucleotide
  Antisense strand to SEQ ID NO: 1986030
agauaucuaggacagagcc

SEQ ID NO: 1986032 - RNA, 19 nt, Artificial Sequence
  Description of Artificial Sequence: Synthetic oligonucleotide
  Sense strand starting at position 2076 of SEQ ID NO: 1880686
uguccuagauaucugucaa

SEQ ID NO: 1986033 - RNA, 19 nt, Artificial Sequence
  Description of Artificial Sequence: Synthetic oligonucleotide
  Antisense strand to SEQ ID NO: 1986032
uugacagauaucuaggaca

SEQ ID NO: 1986034 - RNA, 19 nt, Artificial Sequence
  Description of Artificial Sequence: Synthetic oligonucleotide
  Sense strand starting at position 2274 of SEQ ID NO: 1880686
agugauuucuuaucguccu

SEQ ID NO: 1986035 - RNA, 19 nt, Artificial Sequence
  Description of Artificial Sequence: Synthetic oligonucleotide
  Antisense strand to SEQ ID NO: 1986034
aggacgauaagaaaucacu

SEQ ID NO: 1986036 - RNA, 19 nt, Artificial Sequence
  Description of Artificial Sequence: Synthetic oligonucleotide
  Sense strand starting at position 2295 of SEQ ID NO: 1880686
agucaagucugauuacuau

SEQ ID NO: 1986037 - RNA, 19 nt, Artificial Sequence
  Description of Artificial Sequence: Synthetic oligonucleotide
  Antisense strand to SEQ ID NO: 1986036
auaguaaucagacuugacu

SEQ ID NO: 1986038 - RNA, 19 nt, Artificial Sequence
  Description of Artificial Sequence: Synthetic oligonucleotide
  Sense strand starting at position 2384 of SEQ ID NO: 1880686
aauugcuaaguguggaaau

SEQ ID NO: 1986039 - RNA, 19 nt, Artificial Sequence
  Description of Artificial Sequence: Synthetic oligonucleotide
  Antisense strand to SEQ ID NO: 1986038
auuuccacacuuagcaauu

SEQ ID NO: 1986040 - RNA, 19 nt, Artificial Sequence
  Description of Artificial Sequence: Synthetic oligonucleotide
  Sense strand starting at position 2386 of SEQ ID NO: 1880686
uugcuaaguguggaaauga

SEQ ID NO: 1986041 - RNA, 19 nt, Artificial Sequence
  Description of Artificial Sequence: Synthetic oligonucleotide
  Antisense strand to SEQ ID NO: 1986040
ucauuuccacacuuagcaa

SEQ ID NO: 1986042 - RNA, 19 nt, Artificial Sequence
  Description of Artificial Sequence: Synthetic oligonucleotide
  Sense strand starting at position 2441 of SEQ ID NO: 1880686
ccgacuguccaagacucaa

SEQ ID NO: 1986043 - RNA, 19 nt, Artificial Sequence
  Description of Artificial Sequence: Synthetic oligonucleotide
  Antisense strand to SEQ ID NO: 1986042
uugagucuuggacagucgg

SEQ ID NO: 1986044 - RNA, 19 nt, Artificial Sequence
  Description of Artificial Sequence: Synthetic oligonucleotide
  Sense strand starting at position 2475 of SEQ ID NO: 1880686
ggguguguuuguauuguac

SEQ ID NO: 1986045 - RNA, 19 nt, Artificial Sequence
  Description of Artificial Sequence: Synthetic oligonucleotide
  Antisense strand to SEQ ID NO: 1986044
guacaauacaaacacaccc

SEQ ID NO: 1986046 - RNA, 19 nt, Artificial Sequence
  Description of Artificial Sequence: Synthetic oligonucleotide
  Sense strand starting at position 2572 of SEQ ID NO: 1880686
agcacagcuccuggaagaa

SEQ ID NO: 1986047 - RNA, 19 nt, Artificial Sequence
  Description of Artificial Sequence: Synthetic oligonucleotide
  Antisense strand to SEQ ID NO: 1986046
uucuuccaggagcugugcu

SEQ ID NO: 1986048 - RNA, 19 nt, Artificial Sequence
  Description of Artificial Sequence: Synthetic oligonucleotide
  Sense strand starting at position 2658 of SEQ ID NO: 1880686
augaaaugcuuauuaggag

SEQ ID NO: 1986049 - RNA, 19 nt, Artificial Sequence
  Description of Artificial Sequence: Synthetic oligonucleotide
  Antisense strand to SEQ ID NO: 1986048
cuccuaauaagcauuucau

SEQ ID NO: 1986050 - RNA, 19 nt, Artificial Sequence
  Description of Artificial Sequence: Synthetic oligonucleotide
  Sense strand starting at position 2754 of SEQ ID NO: 1880686
gaaggauagcagugacgaa

SEQ ID NO: 1986051 - RNA, 19 nt, Artificial Sequence
  Description of Artificial Sequence: Synthetic oligonucleotide
  Antisense strand to SEQ ID NO: 1986050
uucgucacugcuauccuuc

SEQ ID NO: 1986052 - RNA, 19 nt, Artificial Sequence
  Description of Artificial Sequence: Synthetic oligonucleotide
  Sense strand starting at position 2887 of SEQ ID NO: 1880686
aucaaaucagcauguagaa

SEQ ID NO: 1986053 - RNA, 19 nt, Artificial Sequence
  Description of Artificial Sequence: Synthetic oligonucleotide
  Antisense strand to SEQ ID NO: 1986052
uucuacaugcugauuugau

SEQ ID NO: 1986054 - RNA, 19 nt, Artificial Sequence
  Description of Artificial Sequence: Synthetic oligonucleotide
  Sense strand starting at position 3103 of SEQ ID NO: 1880686
uuugguggucaugaguauu

SEQ ID NO: 1986055 - RNA, 19 nt, Artificial Sequence
  Description of Artificial Sequence: Synthetic oligonucleotide
  Antisense strand to SEQ ID NO: 1986054
aauacucaugaccaccaaa

SEQ ID NO: 1986056 - RNA, 19 nt, Artificial Sequence
  Description of Artificial Sequence: Synthetic oligonucleotide
  Sense strand starting at position 3181 of SEQ ID NO: 1880686
guuauagccacuugaugag

SEQ ID NO: 1986057 - RNA, 19 nt, Artificial Sequence
  Description of Artificial Sequence: Synthetic oligonucleotide
  Antisense strand to SEQ ID NO: 1986056
cucaucaaguggcuauaac

SEQ ID NO: 1986058 - RNA, 19 nt, Artificial Sequence
  Description of Artificial Sequence: Synthetic oligonucleotide
  Sense strand starting at position 3309 of SEQ ID NO: 1880686
gauggauggccuggacaaa

SEQ ID NO: 1986059 - RNA, 19 nt, Artificial Sequence
  Description of Artificial Sequence: Synthetic oligonucleotide
  Antisense strand to SEQ ID NO: 1986058
uuuguccaggccauccauc

SEQ ID NO: 1986060 - RNA, 19 nt, Artificial Sequence
  Description of Artificial Sequence: Synthetic oligonucleotide
  Sense strand starting at position 3345 of SEQ ID NO: 1880686
aaucaaugggcacacgauu

SEQ ID NO: 1986061 - RNA, 19 nt, Artificial Sequence
  Description of Artificial Sequence: Synthetic oligonucleotide
  Antisense strand to SEQ ID NO: 1986060
aaucgugugcccauugauu

SEQ ID NO: 1986062 - RNA, 19 nt, Artificial Sequence
  Description of Artificial Sequence: Synthetic oligonucleotide
  Sense strand starting at position 3374 of SEQ ID NO: 1880686
ggaagaaccucugaaagga

SEQ ID NO: 1986063 - RNA, 19 nt, Artificial Sequence
  Description of Artificial Sequence: Synthetic oligonucleotide
  Antisense strand to SEQ ID NO: 1986062
uccuuucagagguucuucc

SEQ ID NO: 1986064 - RNA, 19 nt, Artificial Sequence
  Description of Artificial Sequence: Synthetic oligonucleotide
  Sense strand starting at position 3652 of SEQ ID NO: 1880686
cacaaucagcugugggaua

SEQ ID NO: 1986065 - RNA, 19 nt, Artificial Sequence
  Description of Artificial Sequence: Synthetic oligonucleotide
  Antisense strand to SEQ ID NO: 1986064
uaucccacagcugauugug

SEQ ID NO: 1986066 - RNA, 19 nt, Artificial Sequence
  Description of Artificial Sequence: Synthetic oligonucleotide
  Sense strand starting at position 3654 of SEQ ID NO: 1880686
caaucagcugugggauaaa

SEQ ID NO: 1986067 - RNA, 19 nt, Artificial Sequence
  Description of Artificial Sequence: Synthetic oligonucleotide
  Antisense strand to SEQ ID NO: 1986066
uuuaucccacagcugauug

SEQ ID NO: 1986068 - RNA, 19 nt, Artificial Sequence
  Description of Artificial Sequence: Synthetic oligonucleotide
  Sense strand starting at position 3775 of SEQ ID NO: 1880686
cucagaagccucuagguua

SEQ ID NO: 1986069 - RNA, 19 nt, Artificial Sequence
  Description of Artificial Sequence: Synthetic oligonucleotide
  Antisense strand to SEQ ID NO: 1986068
uaaccuagaggcuucugag

SEQ ID NO: 1986070 - RNA, 19 nt, Artificial Sequence
  Description of Artificial Sequence: Synthetic oligonucleotide
  Sense strand starting at position 3867 of SEQ ID NO: 1880686
agaugaugaccuggucuga

SEQ ID NO: 1986071 - RNA, 19 nt, Artificial Sequence
  Description of Artificial Sequence: Synthetic oligonucleotide
  Antisense strand to SEQ ID NO: 1986070
ucagaccaggucaucaucu

SEQ ID NO: 1986072 - RNA, 19 nt, Artificial Sequence
  Description of Artificial Sequence: Synthetic oligonucleotide
  Sense strand starting at position 3871 of SEQ ID NO: 1880686
gaugaccuggucugagaga

SEQ ID NO: 1986073 - RNA, 19 nt, Artificial Sequence
  Description of Artificial Sequence: Synthetic oligonucleotide
  Antisense strand to SEQ ID NO: 1986072
ucucucagaccaggucauc

SEQ ID NO: 1986074 - RNA, 19 nt, Artificial Sequence
  Description of Artificial Sequence: Synthetic oligonucleotide
  Sense strand starting at position 3935 of SEQ ID NO: 1880686
gcaccaugccugcauuuaa

SEQ ID NO: 1986075 - RNA, 19 nt, Artificial Sequence
  Description of Artificial Sequence: Synthetic oligonucleotide
  Antisense strand to SEQ ID NO: 1986074
uuaaaugcaggcauggugc

SEQ ID NO: 1986076 - RNA, 19 nt, Artificial Sequence
  Description of Artificial Sequence: Synthetic oligonucleotide
  Sense strand starting at position 3963 of SEQ ID NO: 1880686
agguguuacuuauuacuau

SEQ ID NO: 1986077 - RNA, 19 nt, Artificial Sequence
  Description of Artificial Sequence: Synthetic oligonucleotide
  Antisense strand to SEQ ID NO: 1986076
auaguaauaaguaacaccu

SEQ ID NO: 1986078 - RNA, 19 nt, Artificial Sequence
  Description of Artificial Sequence: Synthetic oligonucleotide
  Sense strand starting at position 197 of SEQ ID NO: 1880687
agagaugagucagacauga

SEQ ID NO: 1986079 - RNA, 19 nt, Artificial Sequence
  Description of Artificial Sequence: Synthetic oligonucleotide
  Antisense strand to SEQ ID NO: 1986078
ucaugucugacucaucucu

SEQ ID NO: 1986080 - RNA, 19 nt, Artificial Sequence
  Description of Artificial Sequence: Synthetic oligonucleotide
  Sense strand starting at position 332 of SEQ ID NO: 1880687
gcauaccugcuccaagaga

SEQ ID NO: 1986081 - RNA, 19 nt, Artificial Sequence
  Description of Artificial Sequence: Synthetic oligonucleotide
  Antisense strand to SEQ ID NO: 1986080
ucucuuggagcagguaugc

SEQ ID NO: 1986082 - RNA, 19 nt, Artificial Sequence
  Description of Artificial Sequence: Synthetic oligonucleotide
  Sense strand starting at position 842 of SEQ ID NO: 1880687
gguguugcugaguauuaag

SEQ ID NO: 1986083 - RNA, 19 nt, Artificial Sequence
  Description of Artificial Sequence: Synthetic oligonucleotide
  Antisense strand to SEQ ID NO: 1986082
cuuaauacucagcaacacc

SEQ ID NO: 1986084 - RNA, 19 nt, Artificial Sequence
  Description of Artificial Sequence: Synthetic oligonucleotide
  Sense strand starting at position 956 of SEQ ID NO: 1880687
uucucagacucuuugagau

SEQ ID NO: 1986085 - RNA, 19 nt, Artificial Sequence
  Description of Artificial Sequence: Synthetic oligonucleotide
  Antisense strand to SEQ ID NO: 1986084
aucucaaagagucugagaa

SEQ ID NO: 1986086 - RNA, 19 nt, Artificial Sequence
  Description of Artificial Sequence: Synthetic oligonucleotide
  Sense strand starting at position 1335 of SEQ ID NO: 1880687
ugugcuaagagauauagua

SEQ ID NO: 1986087 - RNA, 19 nt, Artificial Sequence
  Description of Artificial Sequence: Synthetic oligonucleotide
  Antisense strand to SEQ ID NO: 1986086
uacuauaucucuuagcaca

SEQ ID NO: 1986088 - RNA, 19 nt, Artificial Sequence
  Description of Artificial Sequence: Synthetic oligonucleotide
  Sense strand starting at position 1386 of SEQ ID NO: 1880687
agguaaguagauggguuua

SEQ ID NO: 1986089 - RNA, 19 nt, Artificial Sequence
  Description of Artificial Sequence: Synthetic oligonucleotide
  Antisense strand to SEQ ID NO: 1986088
uaaacccaucuacuuaccu

SEQ ID NO: 1986090 - RNA, 19 nt, Artificial Sequence
  Description of Artificial Sequence: Synthetic oligonucleotide
  Sense strand starting at position 1388 of SEQ ID NO: 1880687
guaaguagauggguuuagu

SEQ ID NO: 1986091 - RNA, 19 nt, Artificial Sequence
  Description of Artificial Sequence: Synthetic oligonucleotide
  Antisense strand to SEQ ID NO: 1986090
acuaaacccaucuacuuac

SEQ ID NO: 1986092 - RNA, 19 nt, Artificial Sequence
  Description of Artificial Sequence: Synthetic oligonucleotide
  Sense strand starting at position 1391 of SEQ ID NO: 1880687
aguagauggguuuaguaua

SEQ ID NO: 1986093 - RNA, 19 nt, Artificial Sequence
  Description of Artificial Sequence: Synthetic oligonucleotide
  Antisense strand to SEQ ID NO: 1986092
uauacuaaacccaucuacu

SEQ ID NO: 1986094 - RNA, 19 nt, Artificial Sequence
  Description of Artificial Sequence: Synthetic oligonucleotide
  Sense strand starting at position 1401 of SEQ ID NO: 1880687
uuuaguauagugugagaag

SEQ ID NO: 1986095 - RNA, 19 nt, Artificial Sequence
  Description of Artificial Sequence: Synthetic oligonucleotide
  Antisense strand to SEQ ID NO: 1986094
cuucucacacuauacuaaa

SEQ ID NO: 1986096 - RNA, 19 nt, Artificial Sequence
  Description of Artificial Sequence: Synthetic oligonucleotide
  Sense strand starting at position 1529 of SEQ ID NO: 1880687
uuucuauauugguuuguca

SEQ ID NO: 1986097 - RNA, 19 nt, Artificial Sequence
  Description of Artificial Sequence: Synthetic oligonucleotide
  Antisense strand to SEQ ID NO: 1986096
ugacaaaccaauauagaaa

SEQ ID NO: 1986098 - RNA, 19 nt, Artificial Sequence
  Description of Artificial Sequence: Synthetic oligonucleotide
  Sense strand starting at position 1532 of SEQ ID NO: 1880687
cuauauugguuugucauuu

SEQ ID NO: 1986099 - RNA, 19 nt, Artificial Sequence
  Description of Artificial Sequence: Synthetic oligonucleotide
  Antisense strand to SEQ ID NO: 1986098
aaaugacaaaccaauauag

SEQ ID NO: 1986100 - RNA, 19 nt, Artificial Sequence
  Description of Artificial Sequence: Synthetic oligonucleotide
  Sense strand starting at position 1671 of SEQ ID NO: 1880687
uauuuacacugguagaugu

SEQ ID NO: 1986101 - RNA, 19 nt, Artificial Sequence
  Description of Artificial Sequence: Synthetic oligonucleotide
  Antisense strand to SEQ ID NO: 1986100
acaucuaccaguguaaaua

SEQ ID NO: 1986102 - RNA, 19 nt, Artificial Sequence
  Description of Artificial Sequence: Synthetic oligonucleotide
  Sense strand starting at position 1687 of SEQ ID NO: 1880687
ugucacuuugauuguagga

SEQ ID NO: 1986103 - RNA, 19 nt, Artificial Sequence
  Description of Artificial Sequence: Synthetic oligonucleotide
  Antisense strand to SEQ ID NO: 1986102
uccuacaaucaaagugaca

SEQ ID NO: 1986104 - RNA, 19 nt, Artificial Sequence
  Description of Artificial Sequence: Synthetic oligonucleotide
  Sense strand starting at position 1821 of SEQ ID NO: 1880687
acagauaucuaggacagag

SEQ ID NO: 1986105 - RNA, 19 nt, Artificial Sequence
  Description of Artificial Sequence: Synthetic oligonucleotide
  Antisense strand to SEQ ID NO: 1986104
cucuguccuagauaucugu

SEQ ID NO: 1986106 - RNA, 19 nt, Artificial Sequence
  Description of Artificial Sequence: Synthetic oligonucleotide
  Sense strand starting at position 1884 of SEQ ID NO: 1880687
aauaguuuaggaugauguu

SEQ ID NO: 1986107 - RNA, 19 nt, Artificial Sequence
  Description of Artificial Sequence: Synthetic oligonucleotide
  Antisense strand to SEQ ID NO: 1986106
aacaucauccuaaacuauu

SEQ ID NO: 1986108 - RNA, 19 nt, Artificial Sequence
  Description of Artificial Sequence: Synthetic oligonucleotide
  Sense strand starting at position 2037 of SEQ ID NO: 1880687
ggaagauaauguguucagu

SEQ ID NO: 1986109 - RNA, 19 nt, Artificial Sequence
  Description of Artificial Sequence: Synthetic oligonucleotide
  Antisense strand to SEQ ID NO: 1986108
acugaacacauuaucuucc

SEQ ID NO: 1986110 - RNA, 19 nt, Artificial Sequence
  Description of Artificial Sequence: Synthetic oligonucleotide
  Sense strand starting at position 2061 of SEQ ID NO: 1880687
acaugcugagcucaugauu

SEQ ID NO: 1986111 - RNA, 19 nt, Artificial Sequence
  Description of Artificial Sequence: Synthetic oligonucleotide
  Antisense strand to SEQ ID NO: 1986110
aaucaugagcucagcaugu

SEQ ID NO: 1986112 - RNA, 19 nt, Artificial Sequence
  Description of Artificial Sequence: Synthetic oligonucleotide
  Sense strand starting at position 2066 of SEQ ID NO: 1880687
cugagcucaugauuccaau

SEQ ID NO: 1986113 - RNA, 19 nt, Artificial Sequence
  Description of Artificial Sequence: Synthetic oligonucleotide
  Antisense strand to SEQ ID NO: 1986112
auuggaaucaugagcucag

SEQ ID NO: 1986114 - RNA, 19 nt, Artificial Sequence
  Description of Artificial Sequence: Synthetic oligonucleotide
  Sense strand starting at position 2090 of SEQ ID NO: 1880687
uggacauuccaguggagau

SEQ ID NO: 1986115 - RNA, 19 nt, Artificial Sequence
  Description of Artificial Sequence: Synthetic oligonucleotide
  Antisense strand to SEQ ID NO: 1986114
aucuccacuggaaugucca

SEQ ID NO: 1986116 - RNA, 19 nt, Artificial Sequence
  Description of Artificial Sequence: Synthetic oligonucleotide
  Sense strand starting at position 2105 of SEQ ID NO: 1880687
agauaucuggcaggcugau

SEQ ID NO: 1986117 - RNA, 19 nt, Artificial Sequence
  Description of Artificial Sequence: Synthetic oligonucleotide
  Antisense strand to SEQ ID NO: 1986116
aucagccugccagauaucu

SEQ ID NO: 1986118 - RNA, 19 nt, Artificial Sequence
  Description of Artificial Sequence: Synthetic oligonucleotide
  Sense strand starting at position 2202 of SEQ ID NO: 1880687
ggacucagucagcaccauu

SEQ ID NO: 1986119 - RNA, 19 nt, Artificial Sequence
  Description of Artificial Sequence: Synthetic oligonucleotide
  Antisense strand to SEQ ID NO: 1986118
aauggugcugacugagucc

SEQ ID NO: 1986120 - RNA, 19 nt, Artificial Sequence
  Description of Artificial Sequence: Synthetic oligonucleotide
  Sense strand starting at position 2215 of SEQ ID NO: 1880687
accauuaagccagagugau

SEQ ID NO: 1986121 - RNA, 19 nt, Artificial Sequence
  Description of Artificial Sequence: Synthetic oligonucleotide
  Antisense strand to SEQ ID NO: 1986120
aucacucuggcuuaauggu

SEQ ID NO: 1986122 - RNA, 19 nt, Artificial Sequence
  Description of Artificial Sequence: Synthetic oligonucleotide
  Sense strand starting at position 2223 of SEQ ID NO: 1880687
gccagagugaugggugaga

SEQ ID NO: 1986123 - RNA, 19 nt, Artificial Sequence
  Description of Artificial Sequence: Synthetic oligonucleotide
  Antisense strand to SEQ ID NO: 1986122
ucucacccaucacucuggc

SEQ ID NO: 1986124 - RNA, 19 nt, Artificial Sequence
  Description of Artificial Sequence: Synthetic oligonucleotide
  Sense strand starting at position 2225 of SEQ ID NO: 1880687
cagagugaugggugagaug

SEQ ID NO: 1986125 - RNA, 19 nt, Artificial Sequence
  Description of Artificial Sequence: Synthetic oligonucleotide
  Antisense strand to SEQ ID NO: 1986124
caucucacccaucacucug

SEQ ID NO: 1986126 - RNA, 19 nt, Artificial Sequence
  Description of Artificial Sequence: Synthetic oligonucleotide
  Sense strand starting at position 2418 of SEQ ID NO: 1880687
ggcagauacacaugucuag

SEQ ID NO: 1986127 - RNA, 19 nt, Artificial Sequence
  Description of Artificial Sequence: Synthetic oligonucleotide
  Antisense strand to SEQ ID NO: 1986126
cuagacauguguaucugcc

SEQ ID NO: 1986128 - RNA, 19 nt, Artificial Sequence
  Description of Artificial Sequence: Synthetic oligonucleotide
  Sense strand starting at position 2894 of SEQ ID NO: 1880687
acugccuuccaguaaaguu

SEQ ID NO: 1986129 - RNA, 19 nt, Artificial Sequence
  Description of Artificial Sequence: Synthetic oligonucleotide
  Antisense strand to SEQ ID NO: 1986128
aacuuuacuggaaggcagu

SEQ ID NO: 1986130 - RNA, 19 nt, Artificial Sequence
  Description of Artificial Sequence: Synthetic oligonucleotide
  Sense strand starting at position 3093 of SEQ ID NO: 1880687
ugucuuaggcuccagaaac

SEQ ID NO: 1986131 - RNA, 19 nt, Artificial Sequence
  Description of Artificial Sequence: Synthetic oligonucleotide
  Antisense strand to SEQ ID NO: 1986130
guuucuggagccuaagaca

SEQ ID NO: 1986132 - RNA, 19 nt, Artificial Sequence
  Description of Artificial Sequence: Synthetic oligonucleotide
  Sense strand starting at position 3214 of SEQ ID NO: 1880687
gugugaccuuauuuagggu

SEQ ID NO: 1986133 - RNA, 19 nt, Artificial Sequence
  Description of Artificial Sequence: Synthetic oligonucleotide
  Antisense strand to SEQ ID NO: 1986132
acccuaaauaaggucacac

SEQ ID NO: 1986134 - RNA, 19 nt, Artificial Sequence
  Description of Artificial Sequence: Synthetic oligonucleotide
  Sense strand starting at position 3230 of SEQ ID NO: 1880687
gguuguggucuuuauagag

SEQ ID NO: 1986135 - RNA, 19 nt, Artificial Sequence
  Description of Artificial Sequence: Synthetic oligonucleotide
  Antisense strand to SEQ ID NO: 1986134
cucuauaaagaccacaacc

SEQ ID NO: 1986136 - RNA, 19 nt, Artificial Sequence
  Description of Artificial Sequence: Synthetic oligonucleotide
  Sense strand starting at position 3237 of SEQ ID NO: 1880687
gucuuuauagaguagccga

SEQ ID NO: 1986137 - RNA, 19 nt, Artificial Sequence
  Description of Artificial Sequence: Synthetic oligonucleotide
  Antisense strand to SEQ ID NO: 1986136
ucggcuacucuauaaagac

SEQ ID NO: 1986138 - RNA, 19 nt, Artificial Sequence
  Description of Artificial Sequence: Synthetic oligonucleotide
  Sense strand starting at position 3240 of SEQ ID NO: 1880687
uuuauagaguagccgaauu

SEQ ID NO: 1986139 - RNA, 19 nt, Artificial Sequence
  Description of Artificial Sequence: Synthetic oligonucleotide
  Antisense strand to SEQ ID NO: 1986138
aauucggcuacucuauaaa

SEQ ID NO: 1986140 - RNA, 19 nt, Artificial Sequence
  Description of Artificial Sequence: Synthetic oligonucleotide
  Sense strand starting at position 3242 of SEQ ID NO: 1880687
uauagaguagccgaauuaa

SEQ ID NO: 1986141 - RNA, 19 nt, Artificial Sequence
  Description of Artificial Sequence: Synthetic oligonucleotide
  Antisense strand to SEQ ID NO: 1986140
uuaauucggcuacucuaua

SEQ ID NO: 1986142 - RNA, 19 nt, Artificial Sequence
  Description of Artificial Sequence: Synthetic oligonucleotide
  Sense strand starting at position 3251 of SEQ ID NO: 1880687
gccgaauuaaagugagguc

SEQ ID NO: 1986143 - RNA, 19 nt, Artificial Sequence
  Description of Artificial Sequence: Synthetic oligonucleotide
  Antisense strand to SEQ ID NO: 1986142
gaccucacuuuaauucggc

SEQ ID NO: 1986144 - RNA, 19 nt, Artificial Sequence
  Description of Artificial Sequence: Synthetic oligonucleotide
  Sense strand starting at position 3252 of SEQ ID NO: 1880687
ccgaauuaaagugagguca

SEQ ID NO: 1986145 - RNA, 19 nt, Artificial Sequence
  Description of Artificial Sequence: Synthetic oligonucleotide
  Antisense strand to SEQ ID NO: 1986144
ugaccucacuuuaauucgg

SEQ ID NO: 1986146 - RNA, 19 nt, Artificial Sequence
  Description of Artificial Sequence: Synthetic oligonucleotide
  Sense strand starting at position 3483 of SEQ ID NO: 1880687
ucagaacucugagacaaua

SEQ ID NO: 1986147 - RNA, 19 nt, Artificial Sequence
  Description of Artificial Sequence: Synthetic oligonucleotide
  Antisense strand to SEQ ID NO: 1986146
uauugucucagaguucuga

SEQ ID NO: 1986148 - RNA, 19 nt, Artificial Sequence
  Description of Artificial Sequence: Synthetic oligonucleotide
  Sense strand starting at position 3498 of SEQ ID NO: 1880687
aauaacuuucugugugaag

SEQ ID NO: 1986149 - RNA, 19 nt, Artificial Sequence
  Description of Artificial Sequence: Synthetic oligonucleotide
  Antisense strand to SEQ ID NO: 1986148
cuucacacagaaaguuauu

SEQ ID NO: 1986150 - RNA, 19 nt, Artificial Sequence
  Description of Artificial Sequence: Synthetic oligonucleotide
  Sense strand starting at position 3807 of SEQ ID NO: 1880687
cuaggucauagguaaaugu

SEQ ID NO: 1986151 - RNA, 19 nt, Artificial Sequence
  Description of Artificial Sequence: Synthetic oligonucleotide
  Antisense strand to SEQ ID NO: 1986150
acauuuaccuaugaccuag

SEQ ID NO: 1986152 - RNA, 19 nt, Artificial Sequence
  Description of Artificial Sequence: Synthetic oligonucleotide
  Sense strand starting at position 3811 of SEQ ID NO: 1880687
gucauagguaaaugucacu

SEQ ID NO: 1986153 - RNA, 19 nt, Artificial Sequence
  Description of Artificial Sequence: Synthetic oligonucleotide
  Antisense strand to SEQ ID NO: 1986152
agugacauuuaccuaugac

SEQ ID NO: 1986154 - RNA, 19 nt, Artificial Sequence
  Description of Artificial Sequence: Synthetic oligonucleotide
  Sense strand starting at position 3848 of SEQ ID NO: 1880687
ccuguauagucauuaccag

SEQ ID NO: 1986155 - RNA, 19 nt, Artificial Sequence
  Description of Artificial Sequence: Synthetic oligonucleotide
  Antisense strand to SEQ ID NO: 1986154
cugguaaugacuauacagg

SEQ ID NO: 1986156 - RNA, 19 nt, Artificial Sequence
  Description of Artificial Sequence: Synthetic oligonucleotide
  Sense strand starting at position 3916 of SEQ ID NO: 1880687
gugugauuauuaguuaaug

SEQ ID NO: 1986157 - RNA, 19 nt, Artificial Sequence
  Description of Artificial Sequence: Synthetic oligonucleotide
  Antisense strand to SEQ ID NO: 1986156
cauuaacuaauaaucacac

SEQ ID NO: 1986158 - RNA, 19 nt, Artificial Sequence
  Description of Artificial Sequence: Synthetic oligonucleotide
  Sense strand starting at position 296 of SEQ ID NO: 1880688
ucacccagguguguuaaau

SEQ ID NO: 1986159 - RNA, 19 nt, Artificial Sequence
  Description of Artificial Sequence: Synthetic oligonucleotide
  Antisense strand to SEQ ID NO: 1986158
auuuaacacaccuggguga

SEQ ID NO: 1986160 - RNA, 19 nt, Artificial Sequence
  Description of Artificial Sequence: Synthetic oligonucleotide
  Sense strand starting at position 406 of SEQ ID NO: 1880688
ucucaaguucuccaaaggu

SEQ ID NO: 1986161 - RNA, 19 nt, Artificial Sequence
  Description of Artificial Sequence: Synthetic oligonucleotide
  Antisense strand to SEQ ID NO: 1986160
accuuuggagaacuugaga

SEQ ID NO: 1986162 - RNA, 19 nt, Artificial Sequence
  Description of Artificial Sequence: Synthetic oligonucleotide
  Sense strand starting at position 436 of SEQ ID NO: 1880688
ugacuugguguuuaucauu

SEQ ID NO: 1986163 - RNA, 19 nt, Artificial Sequence
  Description of Artificial Sequence: Synthetic oligonucleotide
  Antisense strand to SEQ ID NO: 1986162
aaugauaaacaccaaguca

SEQ ID NO: 1986164 - RNA, 19 nt, Artificial Sequence
  Description of Artificial Sequence: Synthetic oligonucleotide
  Sense strand starting at position 529 of SEQ ID NO: 1880688
cuauauaaauggucuagca

SEQ ID NO: 1986165 - RNA, 19 nt, Artificial Sequence
  Description of Artificial Sequence: Synthetic oligonucleotide
  Antisense strand to SEQ ID NO: 1986164
ugcuagaccauuuauauag

SEQ ID NO: 1986166 - RNA, 19 nt, Artificial Sequence
  Description of Artificial Sequence: Synthetic oligonucleotide
  Sense strand starting at position 549 of SEQ ID NO: 1880688
acggaucugucacuuaaca

SEQ ID NO: 1986167 - RNA, 19 nt, Artificial Sequence
  Description of Artificial Sequence: Synthetic oligonucleotide
  Antisense strand to SEQ ID NO: 1986166
uguuaagugacagauccgu

SEQ ID NO: 1986168 - RNA, 19 nt, Artificial Sequence
  Description of Artificial Sequence: Synthetic oligonucleotide
  Sense strand starting at position 567 of SEQ ID NO: 1880688
agcuguuugaccuaaggca

SEQ ID NO: 1986169 - RNA, 19 nt, Artificial Sequence
  Description of Artificial Sequence: Synthetic oligonucleotide
  Antisense strand to SEQ ID NO: 1986168
ugccuuaggucaaacagcu

SEQ ID NO: 1986170 - RNA, 19 nt, Artificial Sequence
  Description of Artificial Sequence: Synthetic oligonucleotide
  Sense strand starting at position 580 of SEQ ID NO: 1880688
aaggcaaguuacuuaguau

SEQ ID NO: 1986171 - RNA, 19 nt, Artificial Sequence
  Description of Artificial Sequence: Synthetic oligonucleotide
  Antisense strand to SEQ ID NO: 1986170
auacuaaguaacuugccuu

SEQ ID NO: 1986172 - RNA, 19 nt, Artificial Sequence
  Description of Artificial Sequence: Synthetic oligonucleotide
  Sense strand starting at position 658 of SEQ ID NO: 1880688
guuguuguguggauugagu

SEQ ID NO: 1986173 - RNA, 19 nt, Artificial Sequence
  Description of Artificial Sequence: Synthetic oligonucleotide
  Antisense strand to SEQ ID NO: 1986172
acucaauccacacaacaac

SEQ ID NO: 1986174 - RNA, 19 nt, Artificial Sequence
  Description of Artificial Sequence: Synthetic oligonucleotide
  Sense strand starting at position 665 of SEQ ID NO: 1880688
uguggauugaguuaguaca

SEQ ID NO: 1986175 - RNA, 19 nt, Artificial Sequence
  Description of Artificial Sequence: Synthetic oligonucleotide
  Antisense strand to SEQ ID NO: 1986174
uguacuaacucaauccaca

SEQ ID NO: 1986176 - RNA, 19 nt, Artificial Sequence
  Description of Artificial Sequence: Synthetic oligonucleotide
  Sense strand starting at position 667 of SEQ ID NO: 1880688
uggauugaguuaguacacu

SEQ ID NO: 1986177 - RNA, 19 nt, Artificial Sequence
  Description of Artificial Sequence: Synthetic oligonucleotide
  Antisense strand to SEQ ID NO: 1986176
aguguacuaacucaaucca

SEQ ID NO: 1986178 - RNA, 19 nt, Artificial Sequence
  Description of Artificial Sequence: Synthetic oligonucleotide
  Sense strand starting at position 673 of SEQ ID NO: 1880688
gaguuaguacacuguauau

SEQ ID NO: 1986179 - RNA, 19 nt, Artificial Sequence
  Description of Artificial Sequence: Synthetic oligonucleotide
  Antisense strand to SEQ ID NO: 1986178
auauacaguguacuaacuc

SEQ ID NO: 1986180 - RNA, 19 nt, Artificial Sequence
  Description of Artificial Sequence: Synthetic oligonucleotide
  Sense strand starting at position 675 of SEQ ID NO: 1880688
guuaguacacuguauauaa

SEQ ID NO: 1986181 - RNA, 19 nt, Artificial Sequence
  Description of Artificial Sequence: Synthetic oligonucleotide
  Antisense strand to SEQ ID NO: 1986180
uuauauacaguguacuaac

SEQ ID NO: 1986182 - RNA, 19 nt, Artificial Sequence
  Description of Artificial Sequence: Synthetic oligonucleotide
  Sense strand starting at position 793 of SEQ ID NO: 1880688
uugugacuauaucugauau

SEQ ID NO: 1986183 - RNA, 19 nt, Artificial Sequence
  Description of Artificial Sequence: Synthetic oligonucleotide
  Antisense strand to SEQ ID NO: 1986182
auaucagauauagucacaa

SEQ ID NO: 1986184 - RNA, 19 nt, Artificial Sequence
  Description of Artificial Sequence: Synthetic oligonucleotide
  Sense strand starting at position 905 of SEQ ID NO: 1880688
uaaaguuccggcuagaaag

SEQ ID NO: 1986185 - RNA, 19 nt, Artificial Sequence
  Description of Artificial Sequence: Synthetic oligonucleotide
  Antisense strand to SEQ ID NO: 1986184
cuuucuagccggaacuuua

SEQ ID NO: 1986186 - RNA, 19 nt, Artificial Sequence
  Description of Artificial Sequence: Synthetic oligonucleotide
  Sense strand starting at position 1329 of SEQ ID NO: 1880688
uggauucggcaagauguau

SEQ ID NO: 1986187 - RNA, 19 nt, Artificial Sequence
  Description of Artificial Sequence: Synthetic oligonucleotide
  Antisense strand to SEQ ID NO: 1986186
auacaucuugccgaaucca

SEQ ID NO: 1986188 - RNA, 19 nt, Artificial Sequence
  Description of Artificial Sequence: Synthetic oligonucleotide
  Sense strand starting at position 1359 of SEQ ID NO: 1880688
aggacauauuauccuuguu

SEQ ID NO: 1986189 - RNA, 19 nt, Artificial Sequence
  Description of Artificial Sequence: Synthetic oligonucleotide
  Antisense strand to SEQ ID NO: 1986188
aacaaggauaauauguccu

SEQ ID NO: 1986190 - RNA, 19 nt, Artificial Sequence
  Description of Artificial Sequence: Synthetic oligonucleotide
  Sense strand starting at position 1364 of SEQ ID NO: 1880688
auauuauccuuguugugau

SEQ ID NO: 1986191 - RNA, 19 nt, Artificial Sequence
  Description of Artificial Sequence: Synthetic oligonucleotide
  Antisense strand to SEQ ID NO: 1986190
aucacaacaaggauaauau

SEQ ID NO: 1986192 - RNA, 19 nt, Artificial Sequence
  Description of Artificial Sequence: Synthetic oligonucleotide
  Sense strand starting at position 1374 of SEQ ID NO: 1880688
uguugugauacgggauuau

SEQ ID NO: 1986193 - RNA, 19 nt, Artificial Sequence
  Description of Artificial Sequence: Synthetic oligonucleotide
  Antisense strand to SEQ ID NO: 1986192
auaaucccguaucacaaca

SEQ ID NO: 1986194 - RNA, 19 nt, Artificial Sequence
  Description of Artificial Sequence: Synthetic oligonucleotide
  Sense strand starting at position 1502 of SEQ ID NO: 1880688
auauauguguacuuugaag

SEQ ID NO: 1986195 - RNA, 19 nt, Artificial Sequence
  Description of Artificial Sequence: Synthetic oligonucleotide
  Antisense strand to SEQ ID NO: 1986194
cuucaaaguacacauauau

SEQ ID NO: 1986196 - RNA, 19 nt, Artificial Sequence
  Description of Artificial Sequence: Synthetic oligonucleotide
  Sense strand starting at position 1504 of SEQ ID NO: 1880688
auauguguacuuugaagau

SEQ ID NO: 1986197 - RNA, 19 nt, Artificial Sequence
  Description of Artificial Sequence: Synthetic oligonucleotide
  Antisense strand to SEQ ID NO: 1986196
aucuucaaaguacacauau

SEQ ID NO: 1986198 - RNA, 19 nt, Artificial Sequence
  Description of Artificial Sequence: Synthetic oligonucleotide
  Sense strand starting at position 1508 of SEQ ID NO: 1880688
guguacuuugaagaucaac

SEQ ID NO: 1986199 - RNA, 19 nt, Artificial Sequence
  Description of Artificial Sequence: Synthetic oligonucleotide
  Antisense strand to SEQ ID NO: 1986198
guugaucuucaaaguacac

SEQ ID NO: 1986200 - RNA, 19 nt, Artificial Sequence
  Description of Artificial Sequence: Synthetic oligonucleotide
  Sense strand starting at position 1566 of SEQ ID NO: 1880688
uaaugaauaucugcuaggu

SEQ ID NO: 1986201 - RNA, 19 nt, Artificial Sequence
  Description of Artificial Sequence: Synthetic oligonucleotide
  Antisense strand to SEQ ID NO: 1986200
accuagcagauauucauua

SEQ ID NO: 1986202 - RNA, 19 nt, Artificial Sequence
  Description of Artificial Sequence: Synthetic oligonucleotide
  Sense strand starting at position 1690 of SEQ ID NO: 1880688
aaauauaccucugcgaagu

SEQ ID NO: 1986203 - RNA, 19 nt, Artificial Sequence
  Description of Artificial Sequence: Synthetic oligonucleotide
  Antisense strand to SEQ ID NO: 1986202
acuucgcagagguauauuu

SEQ ID NO: 1986204 - RNA, 19 nt, Artificial Sequence
  Description of Artificial Sequence: Synthetic oligonucleotide
  Sense strand starting at position 1797 of SEQ ID NO: 1880688
uguugaaacauuuguuguc

SEQ ID NO: 1986205 - RNA, 19 nt, Artificial Sequence
  Description of Artificial Sequence: Synthetic oligonucleotide
  Antisense strand to SEQ ID NO: 1986204
gacaacaaauguuucaaca

SEQ ID NO: 1986206 - RNA, 19 nt, Artificial Sequence
  Description of Artificial Sequence: Synthetic oligonucleotide
  Sense strand starting at position 1813 of SEQ ID NO: 1880688
gucccuagaguuuagcaua

SEQ ID NO: 1986207 - RNA, 19 nt, Artificial Sequence
  Description of Artificial Sequence: Synthetic oligonucleotide
  Antisense strand to SEQ ID NO: 1986206
uaugcuaaacucuagggac

SEQ ID NO: 1986208 - RNA, 19 nt, Artificial Sequence
  Description of Artificial Sequence: Synthetic oligonucleotide
  Sense strand starting at position 2058 of SEQ ID NO: 1880688
acauguaugagucaguucu

SEQ ID NO: 1986209 - RNA, 19 nt, Artificial Sequence
  Description of Artificial Sequence: Synthetic oligonucleotide
  Antisense strand to SEQ ID NO: 1986208
agaacugacucauacaugu

SEQ ID NO: 1986210 - RNA, 19 nt, Artificial Sequence
  Description of Artificial Sequence: Synthetic oligonucleotide
  Sense strand starting at position 2309 of SEQ ID NO: 1880688
uuucuugaagagugcaaga

SEQ ID NO: 1986211 - RNA, 19 nt, Artificial Sequence
  Description of Artificial Sequence: Synthetic oligonucleotide
  Antisense strand to SEQ ID NO: 1986210
ucuugcacucuucaagaaa

SEQ ID NO: 1986212 - RNA, 19 nt, Artificial Sequence
  Description of Artificial Sequence: Synthetic oligonucleotide
  Sense strand starting at position 2546 of SEQ ID NO: 1880688
ugaacagcucccuggagaa

SEQ ID NO: 1986213 - RNA, 19 nt, Artificial Sequence
  Description of Artificial Sequence: Synthetic oligonucleotide
  Antisense strand to SEQ ID NO: 1986212
uucuccagggagcuguuca

SEQ ID NO: 1986214 - RNA, 19 nt, Artificial Sequence
  Description of Artificial Sequence: Synthetic oligonucleotide
  Sense strand starting at position 2577 of SEQ ID NO: 1880688
ggagcuuugggagguggaa

SEQ ID NO: 1986215 - RNA, 19 nt, Artificial Sequence
  Description of Artificial Sequence: Synthetic oligonucleotide
  Antisense strand to SEQ ID NO: 1986214
uuccaccucccaaagcucc

SEQ ID NO: 1986216 - RNA, 19 nt, Artificial Sequence
  Description of Artificial Sequence: Synthetic oligonucleotide
  Sense strand starting at position 3383 of SEQ ID NO: 1880688
uuccuugcgagucauagag

SEQ ID NO: 1986217 - RNA, 19 nt, Artificial Sequence
  Description of Artificial Sequence: Synthetic oligonucleotide
  Antisense strand to SEQ ID NO: 1986216
cucuaugacucgcaaggaa

SEQ ID NO: 1986218 - RNA, 19 nt, Artificial Sequence
  Description of Artificial Sequence: Synthetic oligonucleotide
  Sense strand starting at position 3534 of SEQ ID NO: 1880688
auuguaaagguuuggaaau

SEQ ID NO: 1986219 - RNA, 19 nt, Artificial Sequence
  Description of Artificial Sequence: Synthetic oligonucleotide
  Antisense strand to SEQ ID NO: 1986218
auuuccaaaccuuuacaau

SEQ ID NO: 1986220 - RNA, 19 nt, Artificial Sequence
  Description of Artificial Sequence: Synthetic oligonucleotide
  Sense strand starting at position 3676 of SEQ ID NO: 1880688
ggaagaagcugauauuuaa

SEQ ID NO: 1986221 - RNA, 19 nt, Artificial Sequence
  Description of Artificial Sequence: Synthetic oligonucleotide
  Antisense strand to SEQ ID NO: 1986220
uuaaauaucagcuucuucc

SEQ ID NO: 1986222 - RNA, 19 nt, Artificial Sequence
  Description of Artificial Sequence: Synthetic oligonucleotide
  Sense strand starting at position 3698 of SEQ ID NO: 1880688
auaacaagagguugcgaua

SEQ ID NO: 1986223 - RNA, 19 nt, Artificial Sequence
  Description of Artificial Sequence: Synthetic oligonucleotide
  Antisense strand to SEQ ID NO: 1986222
uaucgcaaccucuuguuau

SEQ ID NO: 1986224 - RNA, 19 nt, Artificial Sequence
  Description of Artificial Sequence: Synthetic oligonucleotide
  Sense strand starting at position 3707 of SEQ ID NO: 1880688
gguugcgauaaauagaauu

SEQ ID NO: 1986225 - RNA, 19 nt, Artificial Sequence
  Description of Artificial Sequence: Synthetic oligonucleotide
  Antisense strand to SEQ ID NO: 1986224
aauucuauuuaucgcaacc

SEQ ID NO: 1986226 - RNA, 19 nt, Artificial Sequence
  Description of Artificial Sequence: Synthetic oligonucleotide
  Sense strand starting at position 3717 of SEQ ID NO: 1880688
aauagaauuuaagguggga

SEQ ID NO: 1986227 - RNA, 19 nt, Artificial Sequence
  Description of Artificial Sequence: Synthetic oligonucleotide
  Antisense strand to SEQ ID NO: 1986226
ucccaccuuaaauucuauu

SEQ ID NO: 1986228 - RNA, 19 nt, Artificial Sequence
  Description of Artificial Sequence: Synthetic oligonucleotide
  Sense strand starting at position 3749 of SEQ ID NO: 1880688
acugacaaaucgucuucga

SEQ ID NO: 1986229 - RNA, 19 nt, Artificial Sequence
  Description of Artificial Sequence: Synthetic oligonucleotide
  Antisense strand to SEQ ID NO: 1986228
ucgaagacgauuugucagu

SEQ ID NO: 1986230 - RNA, 19 nt, Artificial Sequence
  Description of Artificial Sequence: Synthetic oligonucleotide
  Sense strand starting at position 3752 of SEQ ID NO: 1880688
gacaaaucgucuucgagac

SEQ ID NO: 1986231 - RNA, 19 nt, Artificial Sequence
  Description of Artificial Sequence: Synthetic oligonucleotide
  Antisense strand to SEQ ID NO: 1986230
gucucgaagacgauuuguc

SEQ ID NO: 1986232 - RNA, 19 nt, Artificial Sequence
  Description of Artificial Sequence: Synthetic oligonucleotide
  Sense strand starting at position 3796 of SEQ ID NO: 1880688
uuggcuaauggauggagaa

SEQ ID NO: 1986233 - RNA, 19 nt, Artificial Sequence
  Description of Artificial Sequence: Synthetic oligonucleotide
  Antisense strand to SEQ ID NO: 1986232
uucuccauccauuagccaa

SEQ ID NO: 1986234 - RNA, 19 nt, Artificial Sequence
  Description of Artificial Sequence: Synthetic oligonucleotide
  Sense strand starting at position 3931 of SEQ ID NO: 1880688
aucaucaguccugaacagu

SEQ ID NO: 1986235 - RNA, 19 nt, Artificial Sequence
  Description of Artificial Sequence: Synthetic oligonucleotide
  Antisense strand to SEQ ID NO: 1986234
acuguucaggacugaugau

SEQ ID NO: 1986236 - RNA, 19 nt, Artificial Sequence
  Description of Artificial Sequence: Synthetic oligonucleotide
  Sense strand starting at position 3939 of SEQ ID NO: 1880688
uccugaacaguugauuauu

SEQ ID NO: 1986237 - RNA, 19 nt, Artificial Sequence
  Description of Artificial Sequence: Synthetic oligonucleotide
  Antisense strand to SEQ ID NO: 1986236
aauaaucaacuguucagga

SEQ ID NO: 1986238 - RNA, 19 nt, Artificial Sequence
  Description of Artificial Sequence: Synthetic oligonucleotide
  Sense strand starting at position 98 of SEQ ID NO: 1880689
accaguaaauuagcagaau

SEQ ID NO: 1986239 - RNA, 19 nt, Artificial Sequence
  Description of Artificial Sequence: Synthetic oligonucleotide
  Antisense strand to SEQ ID NO: 1986238
auucugcuaauuuacuggu

SEQ ID NO: 1986240 - RNA, 19 nt, Artificial Sequence
  Description of Artificial Sequence: Synthetic oligonucleotide
  Sense strand starting at position 109 of SEQ ID NO: 1880689
agcagaauauaguuuccuu

SEQ ID NO: 1986241 - RNA, 19 nt, Artificial Sequence
  Description of Artificial Sequence: Synthetic oligonucleotide
  Antisense strand to SEQ ID NO: 1986240
aaggaaacuauauucugcu

SEQ ID NO: 1986242 - RNA, 19 nt, Artificial Sequence
  Description of Artificial Sequence: Synthetic oligonucleotide
  Sense strand starting at position 133 of SEQ ID NO: 1880689
uugucauuccucuaaaugg

SEQ ID NO: 1986243 - RNA, 19 nt, Artificial Sequence
  Description of Artificial Sequence: Synthetic oligonucleotide
  Antisense strand to SEQ ID NO: 1986242
ccauuuagaggaaugacaa

SEQ ID NO: 1986244 - RNA, 19 nt, Artificial Sequence
  Description of Artificial Sequence: Synthetic oligonucleotide
  Sense strand starting at position 140 of SEQ ID NO: 1880689
uccucuaaaugggugagua

SEQ ID NO: 1986245 - RNA, 19 nt, Artificial Sequence
  Description of Artificial Sequence: Synthetic oligonucleotide
  Antisense strand to SEQ ID NO: 1986244
uacucacccauuuagagga

SEQ ID NO: 1986246 - RNA, 19 nt, Artificial Sequence
  Description of Artificial Sequence: Synthetic oligonucleotide
  Sense strand starting at position 141 of SEQ ID NO: 1880689
ccucuaaaugggugaguau

SEQ ID NO: 1986247 - RNA, 19 nt, Artificial Sequence
  Description of Artificial Sequence: Synthetic oligonucleotide
  Antisense strand to SEQ ID NO: 1986246
auacucacccauuuagagg

SEQ ID NO: 1986248 - RNA, 19 nt, Artificial Sequence
  Description of Artificial Sequence: Synthetic oligonucleotide
  Sense strand starting at position 142 of SEQ ID NO: 1880689
cucuaaaugggugaguauu

SEQ ID NO: 1986249 - RNA, 19 nt, Artificial Sequence
  Description of Artificial Sequence: Synthetic oligonucleotide
  Antisense strand to SEQ ID NO: 1986248
aauacucacccauuuagag

SEQ ID NO: 1986250 - RNA, 19 nt, Artificial Sequence
  Description of Artificial Sequence: Synthetic oligonucleotide
  Sense strand starting at position 485 of SEQ ID NO: 1880689
uguucuuagugaccuacaa

SEQ ID NO: 1986251 - RNA, 19 nt, Artificial Sequence
  Description of Artificial Sequence: Synthetic oligonucleotide
  Antisense strand to SEQ ID NO: 1986250
uuguaggucacuaagaaca

SEQ ID NO: 1986252 - RNA, 19 nt, Artificial Sequence
  Description of Artificial Sequence: Synthetic oligonucleotide
  Sense strand starting at position 639 of SEQ ID NO: 1880689
cguaccuguuaaccaauaa

SEQ ID NO: 1986253 - RNA, 19 nt, Artificial Sequence
  Description of Artificial Sequence: Synthetic oligonucleotide
  Antisense strand to SEQ ID NO: 1986252
uuauugguuaacagguacg

SEQ ID NO: 1986254 - RNA, 19 nt, Artificial Sequence
  Description of Artificial Sequence: Synthetic oligonucleotide
  Sense strand starting at position 684 of SEQ ID NO: 1880689
ccuggcaaccucgauucua

SEQ ID NO: 1986255 - RNA, 19 nt, Artificial Sequence
  Description of Artificial Sequence: Synthetic oligonucleotide
  Antisense strand to SEQ ID NO: 1986254
uagaaucgagguugccagg

SEQ ID NO: 1986256 - RNA, 19 nt, Artificial Sequence
  Description of Artificial Sequence: Synthetic oligonucleotide
  Sense strand starting at position 722 of SEQ ID NO: 1880689
ugacuaaucuagguaccuu

SEQ ID NO: 1986257 - RNA, 19 nt, Artificial Sequence
  Description of Artificial Sequence: Synthetic oligonucleotide
  Antisense strand to SEQ ID NO: 1986256
aagguaccuagauuaguca

SEQ ID NO: 1986258 - RNA, 19 nt, Artificial Sequence
  Description of Artificial Sequence: Synthetic oligonucleotide
  Sense strand starting at position 815 of SEQ ID NO: 1880689
cacguuguagcauauauaa

SEQ ID NO: 1986259 - RNA, 19 nt, Artificial Sequence
  Description of Artificial Sequence: Synthetic oligonucleotide
  Antisense strand to SEQ ID NO: 1986258
uuauauaugcuacaacgug

SEQ ID NO: 1986260 - RNA, 19 nt, Artificial Sequence
  Description of Artificial Sequence: Synthetic oligonucleotide
  Sense strand starting at position 817 of SEQ ID NO: 1880689
cguuguagcauauauaaga

SEQ ID NO: 1986261 - RNA, 19 nt, Artificial Sequence
  Description of Artificial Sequence: Synthetic oligonucleotide
  Antisense strand to SEQ ID NO: 1986260
ucuuauauaugcuacaacg

SEQ ID NO: 1986262 - RNA, 19 nt, Artificial Sequence
  Description of Artificial Sequence: Synthetic oligonucleotide
  Sense strand starting at position 904 of SEQ ID NO: 1880689
acagaaacuuggguuguuu

SEQ ID NO: 1986263 - RNA, 19 nt, Artificial Sequence
  Description of Artificial Sequence: Synthetic oligonucleotide
  Antisense strand to SEQ ID NO: 1986262
aaacaacccaaguuucugu

SEQ ID NO: 1986264 - RNA, 19 nt, Artificial Sequence
  Description of Artificial Sequence: Synthetic oligonucleotide
  Sense strand starting at position 1241 of SEQ ID NO: 1880689
ugauuugccugucccuaau

SEQ ID NO: 1986265 - RNA, 19 nt, Artificial Sequence
  Description of Artificial Sequence: Synthetic oligonucleotide
  Antisense strand to SEQ ID NO: 1986264
auuagggacaggcaaauca

SEQ ID NO: 1986266 - RNA, 19 nt, Artificial Sequence
  Description of Artificial Sequence: Synthetic oligonucleotide
  Sense strand starting at position 1289 of SEQ ID NO: 1880689
guuuauuagccagcuguuu

SEQ ID NO: 1986267 - RNA, 19 nt, Artificial Sequence
  Description of Artificial Sequence: Synthetic oligonucleotide
  Antisense strand to SEQ ID NO: 1986266
aaacagcuggcuaauaaac

SEQ ID NO: 1986268 - RNA, 19 nt, Artificial Sequence
  Description of Artificial Sequence: Synthetic oligonucleotide
  Sense strand starting at position 1345 of SEQ ID NO: 1880689
aaagauaagcugugccuga

SEQ ID NO: 1986269 - RNA, 19 nt, Artificial Sequence
  Description of Artificial Sequence: Synthetic oligonucleotide
  Antisense strand to SEQ ID NO: 1986268
ucaggcacagcuuaucuuu

SEQ ID NO: 1986270 - RNA, 19 nt, Artificial Sequence
  Description of Artificial Sequence: Synthetic oligonucleotide
  Sense strand starting at position 1346 of SEQ ID NO: 1880689
aagauaagcugugccugaa

SEQ ID NO: 1986271 - RNA, 19 nt, Artificial Sequence
  Description of Artificial Sequence: Synthetic oligonucleotide
  Antisense strand to SEQ ID NO: 1986270
uucaggcacagcuuaucuu

SEQ ID NO: 1986272 - RNA, 19 nt, Artificial Sequence
  Description of Artificial Sequence: Synthetic oligonucleotide
  Sense strand starting at position 1466 of SEQ ID NO: 1880689
gcuuucaaagugggugaaa

SEQ ID NO: 1986273 - RNA, 19 nt, Artificial Sequence
  Description of Artificial Sequence: Synthetic oligonucleotide
  Antisense strand to SEQ ID NO: 1986272
uuucacccacuuugaaagc

SEQ ID NO: 1986274 - RNA, 19 nt, Artificial Sequence
  Description of Artificial Sequence: Synthetic oligonucleotide
  Sense strand starting at position 1475 of SEQ ID NO: 1880689
gugggugaaagguauccua

SEQ ID NO: 1986275 - RNA, 19 nt, Artificial Sequence
  Description of Artificial Sequence: Synthetic oligonucleotide
  Antisense strand to SEQ ID NO: 1986274
uaggauaccuuucacccac

SEQ ID NO: 1986276 - RNA, 19 nt, Artificial Sequence
  Description of Artificial Sequence: Synthetic oligonucleotide
  Sense strand starting at position 1478 of SEQ ID NO: 1880689
ggugaaagguauccuagua

SEQ ID NO: 1986277 - RNA, 19 nt, Artificial Sequence
  Description of Artificial Sequence: Synthetic oligonucleotide
  Antisense strand to SEQ ID NO: 1986276
uacuaggauaccuuucacc

SEQ ID NO: 1986278 - RNA, 19 nt, Artificial Sequence
  Description of Artificial Sequence: Synthetic oligonucleotide
  Sense strand starting at position 1543 of SEQ ID NO: 1880689
aguuucuuggcagagacuu

SEQ ID NO: 1986279 - RNA, 19 nt, Artificial Sequence
  Description of Artificial Sequence: Synthetic oligonucleotide
  Antisense strand to SEQ ID NO: 1986278
aagucucugccaagaaacu

SEQ ID NO: 1986280 - RNA, 19 nt, Artificial Sequence
  Description of Artificial Sequence: Synthetic oligonucleotide
  Sense strand starting at position 1591 of SEQ ID NO: 1880689
gugcuuguggcagaaggaa

SEQ ID NO: 1986281 - RNA, 19 nt, Artificial Sequence
  Description of Artificial Sequence: Synthetic oligonucleotide
  Antisense strand to SEQ ID NO: 1986280
uuccuucugccacaagcac

SEQ ID NO: 1986282 - RNA, 19 nt, Artificial Sequence
  Description of Artificial Sequence: Synthetic oligonucleotide
  Sense strand starting at position 2094 of SEQ ID NO: 1880689
uuugcaauucuugaagagu

SEQ ID NO: 1986283 - RNA, 19 nt, Artificial Sequence
  Description of Artificial Sequence: Synthetic oligonucleotide
  Antisense strand to SEQ ID NO: 1986282
acucuucaagaauugcaaa

SEQ ID NO: 1986284 - RNA, 19 nt, Artificial Sequence
  Description of Artificial Sequence: Synthetic oligonucleotide
  Sense strand starting at position 2097 of SEQ ID NO: 1880689
gcaauucuugaagaguuua

SEQ ID NO: 1986285 - RNA, 19 nt, Artificial Sequence
  Description of Artificial Sequence: Synthetic oligonucleotide
  Antisense strand to SEQ ID NO: 1986284
uaaacucuucaagaauugc

SEQ ID NO: 1986286 - RNA, 19 nt, Artificial Sequence
  Description of Artificial Sequence: Synthetic oligonucleotide
  Sense strand starting at position 2117 of SEQ ID NO: 1880689
uuugaauaagcugagucau

SEQ ID NO: 1986287 - RNA, 19 nt, Artificial Sequence
  Description of Artificial Sequence: Synthetic oligonucleotide
  Antisense strand to SEQ ID NO: 1986286
augacucagcuuauucaaa

SEQ ID NO: 1986288 - RNA, 19 nt, Artificial Sequence
  Description of Artificial Sequence: Synthetic oligonucleotide
  Sense strand starting at position 2211 of SEQ ID NO: 1880689
cucugaaaguuuccauaag

SEQ ID NO: 1986289 - RNA, 19 nt, Artificial Sequence
  Description of Artificial Sequence: Synthetic oligonucleotide
  Antisense strand to SEQ ID NO: 1986288
cuuauggaaacuuucagag

SEQ ID NO: 1986290 - RNA, 19 nt, Artificial Sequence
  Description of Artificial Sequence: Synthetic oligonucleotide
  Sense strand starting at position 2547 of SEQ ID NO: 1880689
gagcgucuucuugaaaucu

SEQ ID NO: 1986291 - RNA, 19 nt, Artificial Sequence
  Description of Artificial Sequence: Synthetic oligonucleotide
  Antisense strand to SEQ ID NO: 1986290
agauuucaagaagacgcuc

SEQ ID NO: 1986292 - RNA, 19 nt, Artificial Sequence
  Description of Artificial Sequence: Synthetic oligonucleotide
  Sense strand starting at position 2555 of SEQ ID NO: 1880689
ucuugaaaucucugaguca

SEQ ID NO: 1986293 - RNA, 19 nt, Artificial Sequence
  Description of Artificial Sequence: Synthetic oligonucleotide
  Antisense strand to SEQ ID NO: 1986292
ugacucagagauuucaaga

SEQ ID NO: 1986294 - RNA, 19 nt, Artificial Sequence
  Description of Artificial Sequence: Synthetic oligonucleotide
  Sense strand starting at position 2558 of SEQ ID NO: 1880689
ugaaaucucugagucaaag

SEQ ID NO: 1986295 - RNA, 19 nt, Artificial Sequence
  Description of Artificial Sequence: Synthetic oligonucleotide
  Antisense strand to SEQ ID NO: 1986294
cuuugacucagagauuuca

SEQ ID NO: 1986296 - RNA, 19 nt, Artificial Sequence
  Description of Artificial Sequence: Synthetic oligonucleotide
  Sense strand starting at position 2734 of SEQ ID NO: 1880689
gggugaagucuugguggag

SEQ ID NO: 1986297 - RNA, 19 nt, Artificial Sequence
  Description of Artificial Sequence: Synthetic oligonucleotide
  Antisense strand to SEQ ID NO: 1986296
cuccaccaagacuucaccc

SEQ ID NO: 1986298 - RNA, 19 nt, Artificial Sequence
  Description of Artificial Sequence: Synthetic oligonucleotide
  Sense strand starting at position 3138 of SEQ ID NO: 1880689
agcucuuaugacuauguua

SEQ ID NO: 1986299 - RNA, 19 nt, Artificial Sequence
  Description of Artificial Sequence: Synthetic oligonucleotide
  Antisense strand to SEQ ID NO: 1986298
uaacauagucauaagagcu

SEQ ID NO: 1986300 - RNA, 19 nt, Artificial Sequence
  Description of Artificial Sequence: Synthetic oligonucleotide
  Sense strand starting at position 3140 of SEQ ID NO: 1880689
cucuuaugacuauguuaca

SEQ ID NO: 1986301 - RNA, 19 nt, Artificial Sequence
  Description of Artificial Sequence: Synthetic oligonucleotide
  Antisense strand to SEQ ID NO: 1986300
uguaacauagucauaagag

SEQ ID NO: 1986302 - RNA, 19 nt, Artificial Sequence
  Description of Artificial Sequence: Synthetic oligonucleotide
  Sense strand starting at position 3141 of SEQ ID NO: 1880689
ucuuaugacuauguuacau

SEQ ID NO: 1986303 - RNA, 19 nt, Artificial Sequence
  Description of Artificial Sequence: Synthetic oligonucleotide
  Antisense strand to SEQ ID NO: 1986302
auguaacauagucauaaga

SEQ ID NO: 1986304 - RNA, 19 nt, Artificial Sequence
  Description of Artificial Sequence: Synthetic oligonucleotide
  Sense strand starting at position 3164 of SEQ ID NO: 1880689
gguugguuuguuggaagga

SEQ ID NO: 1986305 - RNA, 19 nt, Artificial Sequence
  Description of Artificial Sequence: Synthetic oligonucleotide
  Antisense strand to SEQ ID NO: 1986304
uccuuccaacaaaccaacc

SEQ ID NO: 1986306 - RNA, 19 nt, Artificial Sequence
  Description of Artificial Sequence: Synthetic oligonucleotide
  Sense strand starting at position 3354 of SEQ ID NO: 1880689
gacggccaucgucaugaaa

SEQ ID NO: 1986307 - RNA, 19 nt, Artificial Sequence
  Description of Artificial Sequence: Synthetic oligonucleotide
  Antisense strand to SEQ ID NO: 1986306
uuucaugacgauggccguc

SEQ ID NO: 1986308 - RNA, 19 nt, Artificial Sequence
  Description of Artificial Sequence: Synthetic oligonucleotide
  Sense strand starting at position 3416 of SEQ ID NO: 1880689
cccacagaguccucuaaga

SEQ ID NO: 1986309 - RNA, 19 nt, Artificial Sequence
  Description of Artificial Sequence: Synthetic oligonucleotide
  Antisense strand to SEQ ID NO: 1986308
ucuuagaggacucuguggg

SEQ ID NO: 1986310 - RNA, 19 nt, Artificial Sequence
  Description of Artificial Sequence: Synthetic oligonucleotide
  Sense strand starting at position 3446 of SEQ ID NO: 1880689
agcccugggagguaucauu

SEQ ID NO: 1986311 - RNA, 19 nt, Artificial Sequence
  Description of Artificial Sequence: Synthetic oligonucleotide
  Antisense strand to SEQ ID NO: 1986310
aaugauaccucccagggcu

SEQ ID NO: 1986312 - RNA, 19 nt, Artificial Sequence
  Description of Artificial Sequence: Synthetic oligonucleotide
  Sense strand starting at position 3904 of SEQ ID NO: 1880689
gcuugugcccugucuauga

SEQ ID NO: 1986313 - RNA, 19 nt, Artificial Sequence
  Description of Artificial Sequence: Synthetic oligonucleotide
  Antisense strand to SEQ ID NO: 1986312
ucauagacagggcacaagc

SEQ ID NO: 1986314 - RNA, 19 nt, Artificial Sequence
  Description of Artificial Sequence: Synthetic oligonucleotide
  Sense strand starting at position 3917 of SEQ ID NO: 1880689
cuaugaggcggacauaguu

SEQ ID NO: 1986315 - RNA, 19 nt, Artificial Sequence
  Description of Artificial Sequence: Synthetic oligonucleotide
  Antisense strand to SEQ ID NO: 1986314
aacuauguccgccucauag

SEQ ID NO: 1986316 - RNA, 19 nt, Artificial Sequence
  Description of Artificial Sequence: Synthetic oligonucleotide
  Sense strand starting at position 3923 of SEQ ID NO: 1880689
ggcggacauaguugacaau

SEQ ID NO: 1986317 - RNA, 19 nt, Artificial Sequence
  Description of Artificial Sequence: Synthetic oligonucleotide
  Antisense strand to SEQ ID NO: 1986316
auugucaacuauguccgcc

SEQ ID NO: 1986318 - RNA, 19 nt, Artificial Sequence
  Description of Artificial Sequence: Synthetic oligonucleotide
  Sense strand starting at position 99 of SEQ ID NO: 1880690
accaguaaauuagcagaau

SEQ ID NO: 1986319 - RNA, 19 nt, Artificial Sequence
  Description of Artificial Sequence: Synthetic oligonucleotide
  Antisense strand to SEQ ID NO: 1986318
auucugcuaauuuacuggu

SEQ ID NO: 1986320 - RNA, 19 nt, Artificial Sequence
  Description of Artificial Sequence: Synthetic oligonucleotide
  Sense strand starting at position 122 of SEQ ID NO: 1880690
uuucguuugcuguugucau

SEQ ID NO: 1986321 - RNA, 19 nt, Artificial Sequence
  Description of Artificial Sequence: Synthetic oligonucleotide
  Antisense strand to SEQ ID NO: 1986320
augacaacagcaaacgaaa

SEQ ID NO: 1986322 - RNA, 19 nt, Artificial Sequence
  Description of Artificial Sequence: Synthetic oligonucleotide
  Sense strand starting at position 134 of SEQ ID NO: 1880690
uugucauuccucuaaaugg

SEQ ID NO: 1986323 - RNA, 19 nt, Artificial Sequence
  Description of Artificial Sequence: Synthetic oligonucleotide
  Antisense strand to SEQ ID NO: 1986322
ccauuuagaggaaugacaa

SEQ ID NO: 1986324 - RNA, 19 nt, Artificial Sequence
  Description of Artificial Sequence: Synthetic oligonucleotide
  Sense strand starting at position 141 of SEQ ID NO: 1880690
uccucuaaaugggugagua

SEQ ID NO: 1986325 - RNA, 19 nt, Artificial Sequence
  Description of Artificial Sequence: Synthetic oligonucleotide
  Antisense strand to SEQ ID NO: 1986324
uacucacccauuuagagga

SEQ ID NO: 1986326 - RNA, 19 nt, Artificial Sequence
  Description of Artificial Sequence: Synthetic oligonucleotide
  Sense strand starting at position 142 of SEQ ID NO: 1880690
ccucuaaaugggugaguau

SEQ ID NO: 1986327 - RNA, 19 nt, Artificial Sequence
  Description of Artificial Sequence: Synthetic oligonucleotide
  Antisense strand to SEQ ID NO: 1986326
auacucacccauuuagagg

SEQ ID NO: 1986328 - RNA, 19 nt, Artificial Sequence
  Description of Artificial Sequence: Synthetic oligonucleotide
  Sense strand starting at position 143 of SEQ ID NO: 1880690
cucuaaaugggugaguauu

SEQ ID NO: 1986329 - RNA, 19 nt, Artificial Sequence
  Description of Artificial Sequence: Synthetic oligonucleotide
  Antisense strand to SEQ ID NO: 1986328
aauacucacccauuuagag

SEQ ID NO: 1986330 - RNA, 19 nt, Artificial Sequence
  Description of Artificial Sequence: Synthetic oligonucleotide
  Sense strand starting at position 486 of SEQ ID NO: 1880690
uguucuuagugaccuacaa

SEQ ID NO: 1986331 - RNA, 19 nt, Artificial Sequence
  Description of Artificial Sequence: Synthetic oligonucleotide
  Antisense strand to SEQ ID NO: 1986330
uuguaggucacuaagaaca

SEQ ID NO: 1986332 - RNA, 19 nt, Artificial Sequence
  Description of Artificial Sequence: Synthetic oligonucleotide
  Sense strand starting at position 640 of SEQ ID NO: 1880690
cguaccuguuaaccaauaa

SEQ ID NO: 1986333 - RNA, 19 nt, Artificial Sequence
  Description of Artificial Sequence: Synthetic oligonucleotide
  Antisense strand to SEQ ID NO: 1986332
uuauugguuaacagguacg

SEQ ID NO: 1986334 - RNA, 19 nt, Artificial Sequence
  Description of Artificial Sequence: Synthetic oligonucleotide
  Sense strand starting at position 685 of SEQ ID NO: 1880690
ccuggcaaccucgauucua

SEQ ID NO: 1986335 - RNA, 19 nt, Artificial Sequence
  Description of Artificial Sequence: Synthetic oligonucleotide
  Antisense strand to SEQ ID NO: 1986334
uagaaucgagguugccagg

SEQ ID NO: 1986336 - RNA, 19 nt, Artificial Sequence
  Description of Artificial Sequence: Synthetic oligonucleotide
  Sense strand starting at position 718 of SEQ ID NO: 1880690
caguuugacuaaucuaggu

SEQ ID NO: 1986337 - RNA, 19 nt, Artificial Sequence
  Description of Artificial Sequence: Synthetic oligonucleotide
  Antisense strand to SEQ ID NO: 1986336
accuagauuagucaaacug

SEQ ID NO: 1986338 - RNA, 19 nt, Artificial Sequence
  Description of Artificial Sequence: Synthetic oligonucleotide
  Sense strand starting at position 818 of SEQ ID NO: 1880690
cguuguagcauauauaaga

SEQ ID NO: 1986339 - RNA, 19 nt, Artificial Sequence
  Description of Artificial Sequence: Synthetic oligonucleotide
  Antisense strand to SEQ ID NO: 1986338
ucuuauauaugcuacaacg

SEQ ID NO: 1986340 - RNA, 19 nt, Artificial Sequence
  Description of Artificial Sequence: Synthetic oligonucleotide
  Sense strand starting at position 905 of SEQ ID NO: 1880690
acagaaacuuggguuguuu

SEQ ID NO: 1986341 - RNA, 19 nt, Artificial Sequence
  Description of Artificial Sequence: Synthetic oligonucleotide
  Antisense strand to SEQ ID NO: 1986340
aaacaacccaaguuucugu

SEQ ID NO: 1986342 - RNA, 19 nt, Artificial Sequence
  Description of Artificial Sequence: Synthetic oligonucleotide
  Sense strand starting at position 965 of SEQ ID NO: 1880690
uugguauacuagucucuau

SEQ ID NO: 1986343 - RNA, 19 nt, Artificial Sequence
  Description of Artificial Sequence: Synthetic oligonucleotide
  Antisense strand to SEQ ID NO: 1986342
auagagacuaguauaccaa

SEQ ID NO: 1986344 - RNA, 19 nt, Artificial Sequence
  Description of Artificial Sequence: Synthetic oligonucleotide
  Sense strand starting at position 1242 of SEQ ID NO: 1880690
ugauuugccugucccuaau

SEQ ID NO: 1986345 - RNA, 19 nt, Artificial Sequence
  Description of Artificial Sequence: Synthetic oligonucleotide
  Antisense strand to SEQ ID NO: 1986344
auuagggacaggcaaauca

SEQ ID NO: 1986346 - RNA, 19 nt, Artificial Sequence
  Description of Artificial Sequence: Synthetic oligonucleotide
  Sense strand starting at position 1290 of SEQ ID NO: 1880690
guuuauuagccagcuguuu

SEQ ID NO: 1986347 - RNA, 19 nt, Artificial Sequence
  Description of Artificial Sequence: Synthetic oligonucleotide
  Antisense strand to SEQ ID NO: 1986346
aaacagcuggcuaauaaac

SEQ ID NO: 1986348 - RNA, 19 nt, Artificial Sequence
  Description of Artificial Sequence: Synthetic oligonucleotide
  Sense strand starting at position 1346 of SEQ ID NO: 1880690
aaagauaagcugugccuga

SEQ ID NO: 1986349 - RNA, 19 nt, Artificial Sequence
  Description of Artificial Sequence: Synthetic oligonucleotide
  Antisense strand to SEQ ID NO: 1986348
ucaggcacagcuuaucuuu

SEQ ID NO: 1986350 - RNA, 19 nt, Artificial Sequence
  Description of Artificial Sequence: Synthetic oligonucleotide
  Sense strand starting at position 1347 of SEQ ID NO: 1880690
aagauaagcugugccugaa

SEQ ID NO: 1986351 - RNA, 19 nt, Artificial Sequence
  Description of Artificial Sequence: Synthetic oligonucleotide
  Antisense strand to SEQ ID NO: 1986350
uucaggcacagcuuaucuu

SEQ ID NO: 1986352 - RNA, 19 nt, Artificial Sequence
  Description of Artificial Sequence: Synthetic oligonucleotide
  Sense strand starting at position 1544 of SEQ ID NO: 1880690
aguuucuuggcagagacuu

SEQ ID NO: 1986353 - RNA, 19 nt, Artificial Sequence
  Description of Artificial Sequence: Synthetic oligonucleotide
  Antisense strand to SEQ ID NO: 1986352
aagucucugccaagaaacu

SEQ ID NO: 1986354 - RNA, 19 nt, Artificial Sequence
  Description of Artificial Sequence: Synthetic oligonucleotide
  Sense strand starting at position 1592 of SEQ ID NO: 1880690
gugcuuguggcagaaggaa

SEQ ID NO: 1986355 - RNA, 19 nt, Artificial Sequence
  Description of Artificial Sequence: Synthetic oligonucleotide
  Antisense strand to SEQ ID NO: 1986354
uuccuucugccacaagcac

SEQ ID NO: 1986356 - RNA, 19 nt, Artificial Sequence
  Description of Artificial Sequence: Synthetic oligonucleotide
  Sense strand starting at position 2095 of SEQ ID NO: 1880690
uuugcaauucuugaagagu

SEQ ID NO: 1986357 - RNA, 19 nt, Artificial Sequence
  Description of Artificial Sequence: Synthetic oligonucleotide
  Antisense strand to SEQ ID NO: 1986356
acucuucaagaauugcaaa

SEQ ID NO: 1986358 - RNA, 19 nt, Artificial Sequence
  Description of Artificial Sequence: Synthetic oligonucleotide
  Sense strand starting at position 2098 of SEQ ID NO: 1880690
gcaauucuugaagaguuua

SEQ ID NO: 1986359 - RNA, 19 nt, Artificial Sequence
  Description of Artificial Sequence: Synthetic oligonucleotide
  Antisense strand to SEQ ID NO: 1986358
uaaacucuucaagaauugc

SEQ ID NO: 1986360 - RNA, 19 nt, Artificial Sequence
  Description of Artificial Sequence: Synthetic oligonucleotide
  Sense strand starting at position 2118 of SEQ ID NO: 1880690
uuugaauaagcugagucau

SEQ ID NO: 1986361 - RNA, 19 nt, Artificial Sequence
  Description of Artificial Sequence: Synthetic oligonucleotide
  Antisense strand to SEQ ID NO: 1986360
augacucagcuuauucaaa

SEQ ID NO: 1986362 - RNA, 19 nt, Artificial Sequence
  Description of Artificial Sequence: Synthetic oligonucleotide
  Sense strand starting at position 2212 of SEQ ID NO: 1880690
cucugaaaguuuccauaag

SEQ ID NO: 1986363 - RNA, 19 nt, Artificial Sequence
  Description of Artificial Sequence: Synthetic oligonucleotide
  Antisense strand to SEQ ID NO: 1986362
cuuauggaaacuuucagag

SEQ ID NO: 1986364 - RNA, 19 nt, Artificial Sequence
  Description of Artificial Sequence: Synthetic oligonucleotide
  Sense strand starting at position 2548 of SEQ ID NO: 1880690
gagcgucuucuugaaaucu

SEQ ID NO: 1986365 - RNA, 19 nt, Artificial Sequence
  Description of Artificial Sequence: Synthetic oligonucleotide
  Antisense strand to SEQ ID NO: 1986364
agauuucaagaagacgcuc

SEQ ID NO: 1986366 - RNA, 19 nt, Artificial Sequence
  Description of Artificial Sequence: Synthetic oligonucleotide
  Sense strand starting at position 2556 of SEQ ID NO: 1880690
ucuugaaaucucugaguca

SEQ ID NO: 1986367 - RNA, 19 nt, Artificial Sequence
  Description of Artificial Sequence: Synthetic oligonucleotide
  Antisense strand to SEQ ID NO: 1986366
ugacucagagauuucaaga

SEQ ID NO: 1986368 - RNA, 19 nt, Artificial Sequence
  Description of Artificial Sequence: Synthetic oligonucleotide
  Sense strand starting at position 2735 of SEQ ID NO: 1880690
gggugaagucuugguggag

SEQ ID NO: 1986369 - RNA, 19 nt, Artificial Sequence
  Description of Artificial Sequence: Synthetic oligonucleotide
  Antisense strand to SEQ ID NO: 1986368
cuccaccaagacuucaccc

SEQ ID NO: 1986370 - RNA, 19 nt, Artificial Sequence
  Description of Artificial Sequence: Synthetic oligonucleotide
  Sense strand starting at position 3139 of SEQ ID NO: 1880690
agcucuuaugacuauguua

SEQ ID NO: 1986371 - RNA, 19 nt, Artificial Sequence
  Description of Artificial Sequence: Synthetic oligonucleotide
  Antisense strand to SEQ ID NO: 1986370
uaacauagucauaagagcu

SEQ ID NO: 1986372 - RNA, 19 nt, Artificial Sequence
  Description of Artificial Sequence: Synthetic oligonucleotide
  Sense strand starting at position 3141 of SEQ ID NO: 1880690
cucuuaugacuauguuaca

SEQ ID NO: 1986373 - RNA, 19 nt, Artificial Sequence
  Description of Artificial Sequence: Synthetic oligonucleotide
  Antisense strand to SEQ ID NO: 1986372
uguaacauagucauaagag

SEQ ID NO: 1986374 - RNA, 19 nt, Artificial Sequence
  Description of Artificial Sequence: Synthetic oligonucleotide
  Sense strand starting at position 3142 of SEQ ID NO: 1880690
ucuuaugacuauguuacau

SEQ ID NO: 1986375 - RNA, 19 nt, Artificial Sequence
  Description of Artificial Sequence: Synthetic oligonucleotide
  Antisense strand to SEQ ID NO: 1986374
auguaacauagucauaaga

SEQ ID NO: 1986376 - RNA, 19 nt, Artificial Sequence
  Description of Artificial Sequence: Synthetic oligonucleotide
  Sense strand starting at position 3165 of SEQ ID NO: 1880690
gguugguuuguuggaagga

SEQ ID NO: 1986377 - RNA, 19 nt, Artificial Sequence
  Description of Artificial Sequence: Synthetic oligonucleotide
  Antisense strand to SEQ ID NO: 1986376
uccuuccaacaaaccaacc

SEQ ID NO: 1986378 - RNA, 19 nt, Artificial Sequence
  Description of Artificial Sequence: Synthetic oligonucleotide
  Sense strand starting at position 3242 of SEQ ID NO: 1880690
aggucuaucuucccagcaa

SEQ ID NO: 1986379 - RNA, 19 nt, Artificial Sequence
  Description of Artificial Sequence: Synthetic oligonucleotide
  Antisense strand to SEQ ID NO: 1986378
uugcugggaagauagaccu

SEQ ID NO: 1986380 - RNA, 19 nt, Artificial Sequence
  Description of Artificial Sequence: Synthetic oligonucleotide
  Sense strand starting at position 3355 of SEQ ID NO: 1880690
gacggccaucgucaugaaa

SEQ ID NO: 1986381 - RNA, 19 nt, Artificial Sequence
  Description of Artificial Sequence: Synthetic oligonucleotide
  Antisense strand to SEQ ID NO: 1986380
uuucaugacgauggccguc

SEQ ID NO: 1986382 - RNA, 19 nt, Artificial Sequence
  Description of Artificial Sequence: Synthetic oligonucleotide
  Sense strand starting at position 3417 of SEQ ID NO: 1880690
cccacagaguccucuaaga

SEQ ID NO: 1986383 - RNA, 19 nt, Artificial Sequence
  Description of Artificial Sequence: Synthetic oligonucleotide
  Antisense strand to SEQ ID NO: 1986382
ucuuagaggacucuguggg

SEQ ID NO: 1986384 - RNA, 19 nt, Artificial Sequence
  Description of Artificial Sequence: Synthetic oligonucleotide
  Sense strand starting at position 3442 of SEQ ID NO: 1880690
ccaauagcccugggaggua

SEQ ID NO: 1986385 - RNA, 19 nt, Artificial Sequence
  Description of Artificial Sequence: Synthetic oligonucleotide
  Antisense strand to SEQ ID NO: 1986384
uaccucccagggcuauugg

SEQ ID NO: 1986386 - RNA, 19 nt, Artificial Sequence
  Description of Artificial Sequence: Synthetic oligonucleotide
  Sense strand starting at position 3447 of SEQ ID NO: 1880690
agcccugggagguaucauu

SEQ ID NO: 1986387 - RNA, 19 nt, Artificial Sequence
  Description of Artificial Sequence: Synthetic oligonucleotide
  Antisense strand to SEQ ID NO: 1986386
aaugauaccucccagggcu

SEQ ID NO: 1986388 - RNA, 19 nt, Artificial Sequence
  Description of Artificial Sequence: Synthetic oligonucleotide
  Sense strand starting at position 3768 of SEQ ID NO: 1880690
agggauguguuccuaccuu

SEQ ID NO: 1986389 - RNA, 19 nt, Artificial Sequence
  Description of Artificial Sequence: Synthetic oligonucleotide
  Antisense strand to SEQ ID NO: 1986388
aagguaggaacacaucccu

SEQ ID NO: 1986390 - RNA, 19 nt, Artificial Sequence
  Description of Artificial Sequence: Synthetic oligonucleotide
  Sense strand starting at position 3905 of SEQ ID NO: 1880690
gcuugugcccugucuauga

SEQ ID NO: 1986391 - RNA, 19 nt, Artificial Sequence
  Description of Artificial Sequence: Synthetic oligonucleotide
  Antisense strand to SEQ ID NO: 1986390
ucauagacagggcacaagc

SEQ ID NO: 1986392 - RNA, 19 nt, Artificial Sequence
  Description of Artificial Sequence: Synthetic oligonucleotide
  Sense strand starting at position 3915 of SEQ ID NO: 1880690
ugucuaugaggcggacaua

SEQ ID NO: 1986393 - RNA, 19 nt, Artificial Sequence
  Description of Artificial Sequence: Synthetic oligonucleotide
  Antisense strand to SEQ ID NO: 1986392
uauguccgccucauagaca

SEQ ID NO: 1986394 - RNA, 19 nt, Artificial Sequence
  Description of Artificial Sequence: Synthetic oligonucleotide
  Sense strand starting at position 3918 of SEQ ID NO: 1880690
cuaugaggcggacauaguu

SEQ ID NO: 1986395 - RNA, 19 nt, Artificial Sequence
  Description of Artificial Sequence: Synthetic oligonucleotide
  Antisense strand to SEQ ID NO: 1986394
aacuauguccgccucauag

SEQ ID NO: 1986396 - RNA, 19 nt, Artificial Sequence
  Description of Artificial Sequence: Synthetic oligonucleotide
  Sense strand starting at position 3924 of SEQ ID NO: 1880690
ggcggacauaguugacaau

SEQ ID NO: 1986397 - RNA, 19 nt, Artificial Sequence
  Description of Artificial Sequence: Synthetic oligonucleotide
  Antisense strand to SEQ ID NO: 1986396
auugucaacuauguccgcc

SEQ ID NO: 1986398 - RNA, 19 nt, Artificial Sequence
  Description of Artificial Sequence: Synthetic oligonucleotide
  Sense strand starting at position 291 of SEQ ID NO: 1880691
ucuauaaacgaguaagguu

SEQ ID NO: 1986399 - RNA, 19 nt, Artificial Sequence
  Description of Artificial Sequence: Synthetic oligonucleotide
  Antisense strand to SEQ ID NO: 1986398
aaccuuacucguuuauaga

SEQ ID NO: 1986400 - RNA, 19 nt, Artificial Sequence
  Description of Artificial Sequence: Synthetic oligonucleotide
  Sense strand starting at position 328 of SEQ ID NO: 1880691
uuggaaucuuguucucuca

SEQ ID NO: 1986401 - RNA, 19 nt, Artificial Sequence
  Description of Artificial Sequence: Synthetic oligonucleotide
  Antisense strand to SEQ ID NO: 1986400
ugagagaacaagauuccaa

SEQ ID NO: 1986402 - RNA, 19 nt, Artificial Sequence
  Description of Artificial Sequence: Synthetic oligonucleotide
  Sense strand starting at position 330 of SEQ ID NO: 1880691
ggaaucuuguucucucauu

SEQ ID NO: 1986403 - RNA, 19 nt, Artificial Sequence
  Description of Artificial Sequence: Synthetic oligonucleotide
  Antisense strand to SEQ ID NO: 1986402
aaugagagaacaagauucc

SEQ ID NO: 1986404 - RNA, 19 nt, Artificial Sequence
  Description of Artificial Sequence: Synthetic oligonucleotide
  Sense strand starting at position 500 of SEQ ID NO: 1880691
cugcccuggccuuaauaaa

SEQ ID NO: 1986405 - RNA, 19 nt, Artificial Sequence
  Description of Artificial Sequence: Synthetic oligonucleotide
  Antisense strand to SEQ ID NO: 1986404
uuuauuaaggccagggcag

SEQ ID NO: 1986406 - RNA, 19 nt, Artificial Sequence
  Description of Artificial Sequence: Synthetic oligonucleotide
  Sense strand starting at position 692 of SEQ ID NO: 1880691
gggagcuggucacuuacau

SEQ ID NO: 1986407 - RNA, 19 nt, Artificial Sequence
  Description of Artificial Sequence: Synthetic oligonucleotide
  Antisense strand to SEQ ID NO: 1986406
auguaagugaccagcuccc

SEQ ID NO: 1986408 - RNA, 19 nt, Artificial Sequence
  Description of Artificial Sequence: Synthetic oligonucleotide
  Sense strand starting at position 842 of SEQ ID NO: 1880691
ggugcugacucauuauuaa

SEQ ID NO: 1986409 - RNA, 19 nt, Artificial Sequence
  Description of Artificial Sequence: Synthetic oligonucleotide
  Antisense strand to SEQ ID NO: 1986408
uuaauaaugagucagcacc

SEQ ID NO: 1986410 - RNA, 19 nt, Artificial Sequence
  Description of Artificial Sequence: Synthetic oligonucleotide
  Sense strand starting at position 1039 of SEQ ID NO: 1880691
uuuacuugacaguaaagcu

SEQ ID NO: 1986411 - RNA, 19 nt, Artificial Sequence
  Description of Artificial Sequence: Synthetic oligonucleotide
  Antisense strand to SEQ ID NO: 1986410
agcuuuacugucaaguaaa

SEQ ID NO: 1986412 - RNA, 19 nt, Artificial Sequence
  Description of Artificial Sequence: Synthetic oligonucleotide
  Sense strand starting at position 1307 of SEQ ID NO: 1880691
ugguauuucucacacugaa

SEQ ID NO: 1986413 - RNA, 19 nt, Artificial Sequence
  Description of Artificial Sequence: Synthetic oligonucleotide
  Antisense strand to SEQ ID NO: 1986412
uucagugugagaaauacca

SEQ ID NO: 1986414 - RNA, 19 nt, Artificial Sequence
  Description of Artificial Sequence: Synthetic oligonucleotide
  Sense strand starting at position 1800 of SEQ ID NO: 1880691
ggaacugugcugugaagau

SEQ ID NO: 1986415 - RNA, 19 nt, Artificial Sequence
  Description of Artificial Sequence: Synthetic oligonucleotide
  Antisense strand to SEQ ID NO: 1986414
aucuucacagcacaguucc

SEQ ID NO: 1986416 - RNA, 19 nt, Artificial Sequence
  Description of Artificial Sequence: Synthetic oligonucleotide
  Sense strand starting at position 1804 of SEQ ID NO: 1880691
cugugcugugaagaucuga

SEQ ID NO: 1986417 - RNA, 19 nt, Artificial Sequence
  Description of Artificial Sequence: Synthetic oligonucleotide
  Antisense strand to SEQ ID NO: 1986416
ucagaucuucacagcacag

SEQ ID NO: 1986418 - RNA, 19 nt, Artificial Sequence
  Description of Artificial Sequence: Synthetic oligonucleotide
  Sense strand starting at position 1973 of SEQ ID NO: 1880691
uucucauuggaacgagaug

SEQ ID NO: 1986419 - RNA, 19 nt, Artificial Sequence
  Description of Artificial Sequence: Synthetic oligonucleotide
  Antisense strand to SEQ ID NO: 1986418
caucucguuccaaugagaa

SEQ ID NO: 1986420 - RNA, 19 nt, Artificial Sequence
  Description of Artificial Sequence: Synthetic oligonucleotide
  Sense strand starting at position 2272 of SEQ ID NO: 1880691
caggcucauguaugaaauu

SEQ ID NO: 1986421 - RNA, 19 nt, Artificial Sequence
  Description of Artificial Sequence: Synthetic oligonucleotide
  Antisense strand to SEQ ID NO: 1986420
aauuucauacaugagccug

SEQ ID NO: 1986422 - RNA, 19 nt, Artificial Sequence
  Description of Artificial Sequence: Synthetic oligonucleotide
  Sense strand starting at position 2360 of SEQ ID NO: 1880691
gauuuacuuugcucuggua

SEQ ID NO: 1986423 - RNA, 19 nt, Artificial Sequence
  Description of Artificial Sequence: Synthetic oligonucleotide
  Antisense strand to SEQ ID NO: 1986422
uaccagagcaaaguaaauc

SEQ ID NO: 1986424 - RNA, 19 nt, Artificial Sequence
  Description of Artificial Sequence: Synthetic oligonucleotide
  Sense strand starting at position 2380 of SEQ ID NO: 1880691
uaacuauuucggugccugu

SEQ ID NO: 1986425 - RNA, 19 nt, Artificial Sequence
  Description of Artificial Sequence: Synthetic oligonucleotide
  Antisense strand to SEQ ID NO: 1986424
acaggcaccgaaauaguua

SEQ ID NO: 1986426 - RNA, 19 nt, Artificial Sequence
  Description of Artificial Sequence: Synthetic oligonucleotide
  Sense strand starting at position 2479 of SEQ ID NO: 1880691
guucgugcccuguuuauaa

SEQ ID NO: 1986427 - RNA, 19 nt, Artificial Sequence
  Description of Artificial Sequence: Synthetic oligonucleotide
  Antisense strand to SEQ ID NO: 1986426
uuauaaacagggcacgaac

SEQ ID NO: 1986428 - RNA, 19 nt, Artificial Sequence
  Description of Artificial Sequence: Synthetic oligonucleotide
  Sense strand starting at position 2603 of SEQ ID NO: 1880691
ucuuaauaguuguuggaga

SEQ ID NO: 1986429 - RNA, 19 nt, Artificial Sequence
  Description of Artificial Sequence: Synthetic oligonucleotide
  Antisense strand to SEQ ID NO: 1986428
ucuccaacaacuauuaaga

SEQ ID NO: 1986430 - RNA, 19 nt, Artificial Sequence
  Description of Artificial Sequence: Synthetic oligonucleotide
  Sense strand starting at position 2605 of SEQ ID NO: 1880691
uuaauaguuguuggagaau

SEQ ID NO: 1986431 - RNA, 19 nt, Artificial Sequence
  Description of Artificial Sequence: Synthetic oligonucleotide
  Antisense strand to SEQ ID NO: 1986430
auucuccaacaacuauuaa

SEQ ID NO: 1986432 - RNA, 19 nt, Artificial Sequence
  Description of Artificial Sequence: Synthetic oligonucleotide
  Sense strand starting at position 2608 of SEQ ID NO: 1880691
auaguuguuggagaauguu

SEQ ID NO: 1986433 - RNA, 19 nt, Artificial Sequence
  Description of Artificial Sequence: Synthetic oligonucleotide
  Antisense strand to SEQ ID NO: 1986432
aacauucuccaacaacuau

SEQ ID NO: 1986434 - RNA, 19 nt, Artificial Sequence
  Description of Artificial Sequence: Synthetic oligonucleotide
  Sense strand starting at position 2614 of SEQ ID NO: 1880691
guuggagaauguuuaucug

SEQ ID NO: 1986435 - RNA, 19 nt, Artificial Sequence
  Description of Artificial Sequence: Synthetic oligonucleotide
  Antisense strand to SEQ ID NO: 1986434
cagauaaacauucuccaac

SEQ ID NO: 1986436 - RNA, 19 nt, Artificial Sequence
  Description of Artificial Sequence: Synthetic oligonucleotide
  Sense strand starting at position 2617 of SEQ ID NO: 1880691
ggagaauguuuaucugcaa

SEQ ID NO: 1986437 - RNA, 19 nt, Artificial Sequence
  Description of Artificial Sequence: Synthetic oligonucleotide
  Antisense strand to SEQ ID NO: 1986436
uugcagauaaacauucucc

SEQ ID NO: 1986438 - RNA, 19 nt, Artificial Sequence
  Description of Artificial Sequence: Synthetic oligonucleotide
  Sense strand starting at position 2618 of SEQ ID NO: 1880691
gagaauguuuaucugcaag

SEQ ID NO: 1986439 - RNA, 19 nt, Artificial Sequence
  Description of Artificial Sequence: Synthetic oligonucleotide
  Antisense strand to SEQ ID NO: 1986438
cuugcagauaaacauucuc

SEQ ID NO: 1986440 - RNA, 19 nt, Artificial Sequence
  Description of Artificial Sequence: Synthetic oligonucleotide
  Sense strand starting at position 2624 of SEQ ID NO: 1880691
guuuaucugcaagaaucaa

SEQ ID NO: 1986441 - RNA, 19 nt, Artificial Sequence
  Description of Artificial Sequence: Synthetic oligonucleotide
  Antisense strand to SEQ ID NO: 1986440
uugauucuugcagauaaac

SEQ ID NO: 1986442 - RNA, 19 nt, Artificial Sequence
  Description of Artificial Sequence: Synthetic oligonucleotide
  Sense strand starting at position 2740 of SEQ ID NO: 1880691
gugagcagaauccauguga

SEQ ID NO: 1986443 - RNA, 19 nt, Artificial Sequence
  Description of Artificial Sequence: Synthetic oligonucleotide
  Antisense strand to SEQ ID NO: 1986442
ucacauggauucugcucac

SEQ ID NO: 1986444 - RNA, 19 nt, Artificial Sequence
  Description of Artificial Sequence: Synthetic oligonucleotide
  Sense strand starting at position 2838 of SEQ ID NO: 1880691
agucaaagucauggaugaa

SEQ ID NO: 1986445 - RNA, 19 nt, Artificial Sequence
  Description of Artificial Sequence: Synthetic oligonucleotide
  Antisense strand to SEQ ID NO: 1986444
uucauccaugacuuugacu

SEQ ID NO: 1986446 - RNA, 19 nt, Artificial Sequence
  Description of Artificial Sequence: Synthetic oligonucleotide
  Sense strand starting at position 2985 of SEQ ID NO: 1880691
cuagauuuaucuuagggaa

SEQ ID NO: 1986447 - RNA, 19 nt, Artificial Sequence
  Description of Artificial Sequence: Synthetic oligonucleotide
  Antisense strand to SEQ ID NO: 1986446
uucccuaagauaaaucuag

SEQ ID NO: 1986448 - RNA, 19 nt, Artificial Sequence
  Description of Artificial Sequence: Synthetic oligonucleotide
  Sense strand starting at position 3085 of SEQ ID NO: 1880691
cggugaguucccuaugaaa

SEQ ID NO: 1986449 - RNA, 19 nt, Artificial Sequence
  Description of Artificial Sequence: Synthetic oligonucleotide
  Antisense strand to SEQ ID NO: 1986448
uuucauagggaacucaccg

SEQ ID NO: 1986450 - RNA, 19 nt, Artificial Sequence
  Description of Artificial Sequence: Synthetic oligonucleotide
  Sense strand starting at position 3211 of SEQ ID NO: 1880691
uaggaaugucuguauugug

SEQ ID NO: 1986451 - RNA, 19 nt, Artificial Sequence
  Description of Artificial Sequence: Synthetic oligonucleotide
  Antisense strand to SEQ ID NO: 1986450
cacaauacagacauuccua

SEQ ID NO: 1986452 - RNA, 19 nt, Artificial Sequence
  Description of Artificial Sequence: Synthetic oligonucleotide
  Sense strand starting at position 3244 of SEQ ID NO: 1880691
gcauuuccuuuagagaaga

SEQ ID NO: 1986453 - RNA, 19 nt, Artificial Sequence
  Description of Artificial Sequence: Synthetic oligonucleotide
  Antisense strand to SEQ ID NO: 1986452
ucuucucuaaaggaaaugc

SEQ ID NO: 1986454 - RNA, 19 nt, Artificial Sequence
  Description of Artificial Sequence: Synthetic oligonucleotide
  Sense strand starting at position 3399 of SEQ ID NO: 1880691
gaggauguggguuguuaug

SEQ ID NO: 1986455 - RNA, 19 nt, Artificial Sequence
  Description of Artificial Sequence: Synthetic oligonucleotide
  Antisense strand to SEQ ID NO: 1986454
cauaacaacccacauccuc

SEQ ID NO: 1986456 - RNA, 19 nt, Artificial Sequence
  Description of Artificial Sequence: Synthetic oligonucleotide
  Sense strand starting at position 3418 of SEQ ID NO: 1880691
uuuguucucuauguggaaa

SEQ ID NO: 1986457 - RNA, 19 nt, Artificial Sequence
  Description of Artificial Sequence: Synthetic oligonucleotide
  Antisense strand to SEQ ID NO: 1986456
uuuccacauagagaacaaa

SEQ ID NO: 1986458 - RNA, 19 nt, Artificial Sequence
  Description of Artificial Sequence: Synthetic oligonucleotide
  Sense strand starting at position 3419 of SEQ ID NO: 1880691
uuguucucuauguggaaag

SEQ ID NO: 1986459 - RNA, 19 nt, Artificial Sequence
  Description of Artificial Sequence: Synthetic oligonucleotide
  Antisense strand to SEQ ID NO: 1986458
cuuuccacauagagaacaa

SEQ ID NO: 1986460 - RNA, 19 nt, Artificial Sequence
  Description of Artificial Sequence: Synthetic oligonucleotide
  Sense strand starting at position 3612 of SEQ ID NO: 1880691
agaagugguuucuuccaca

SEQ ID NO: 1986461 - RNA, 19 nt, Artificial Sequence
  Description of Artificial Sequence: Synthetic oligonucleotide
  Antisense strand to SEQ ID NO: 1986460
uguggaagaaaccacuucu

SEQ ID NO: 1986462 - RNA, 19 nt, Artificial Sequence
  Description of Artificial Sequence: Synthetic oligonucleotide
  Sense strand starting at position 3644 of SEQ ID NO: 1880691
aggagccuucuggaucauu

SEQ ID NO: 1986463 - RNA, 19 nt, Artificial Sequence
  Description of Artificial Sequence: Synthetic oligonucleotide
  Antisense strand to SEQ ID NO: 1986462
aaugauccagaaggcuccu

SEQ ID NO: 1986464 - RNA, 19 nt, Artificial Sequence
  Description of Artificial Sequence: Synthetic oligonucleotide
  Sense strand starting at position 3748 of SEQ ID NO: 1880691
gucgcauucgaagauaauc

SEQ ID NO: 1986465 - RNA, 19 nt, Artificial Sequence
  Description of Artificial Sequence: Synthetic oligonucleotide
  Antisense strand to SEQ ID NO: 1986464
gauuaucuucgaaugcgac

SEQ ID NO: 1986466 - RNA, 19 nt, Artificial Sequence
  Description of Artificial Sequence: Synthetic oligonucleotide
  Sense strand starting at position 3815 of SEQ ID NO: 1880691
uggaaaugggcuggaaagu

SEQ ID NO: 1986467 - RNA, 19 nt, Artificial Sequence
  Description of Artificial Sequence: Synthetic oligonucleotide
  Antisense strand to SEQ ID NO: 1986466
acuuuccagcccauuucca

SEQ ID NO: 1986468 - RNA, 19 nt, Artificial Sequence
  Description of Artificial Sequence: Synthetic oligonucleotide
  Sense strand starting at position 3947 of SEQ ID NO: 1880691
ucuggaguagauuaucuuu

SEQ ID NO: 1986469 - RNA, 19 nt, Artificial Sequence
  Description of Artificial Sequence: Synthetic oligonucleotide
  Antisense strand to SEQ ID NO: 1986468
aaagauaaucuacuccaga

SEQ ID NO: 1986470 - RNA, 19 nt, Artificial Sequence
  Description of Artificial Sequence: Synthetic oligonucleotide
  Sense strand starting at position 3949 of SEQ ID NO: 1880691
uggaguagauuaucuuuaa

SEQ ID NO: 1986471 - RNA, 19 nt, Artificial Sequence
  Description of Artificial Sequence: Synthetic oligonucleotide
  Antisense strand to SEQ ID NO: 1986470
uuaaagauaaucuacucca

SEQ ID NO: 1986472 - RNA, 19 nt, Artificial Sequence
  Description of Artificial Sequence: Synthetic oligonucleotide
  Sense strand starting at position 3950 of SEQ ID NO: 1880691
ggaguagauuaucuuuaag

SEQ ID NO: 1986473 - RNA, 19 nt, Artificial Sequence
  Description of Artificial Sequence: Synthetic oligonucleotide
  Antisense strand to SEQ ID NO: 1986472
cuuaaagauaaucuacucc

SEQ ID NO: 1986474 - RNA, 19 nt, Artificial Sequence
  Description of Artificial Sequence: Synthetic oligonucleotide
  Sense strand starting at position 3952 of SEQ ID NO: 1880691
aguagauuaucuuuaagcu

SEQ ID NO: 1986475 - RNA, 19 nt, Artificial Sequence
  Description of Artificial Sequence: Synthetic oligonucleotide
  Antisense strand to SEQ ID NO: 1986474
agcuuaaagauaaucuacu

SEQ ID NO: 1986476 - RNA, 19 nt, Artificial Sequence
  Description of Artificial Sequence: Synthetic oligonucleotide
  Sense strand starting at position 3953 of SEQ ID NO: 1880691
guagauuaucuuuaagcug

SEQ ID NO: 1986477 - RNA, 19 nt, Artificial Sequence
  Description of Artificial Sequence: Synthetic oligonucleotide
  Antisense strand to SEQ ID NO: 1986476
cagcuuaaagauaaucuac

SEQ ID NO: 1986478 - RNA, 19 nt, Artificial Sequence
  Description of Artificial Sequence: Synthetic oligonucleotide
  Sense strand starting at position 103 of SEQ ID NO: 1880692
accaguaaauuagcagaau

SEQ ID NO: 1986479 - RNA, 19 nt, Artificial Sequence
  Description of Artificial Sequence: Synthetic oligonucleotide
  Antisense strand to SEQ ID NO: 1986478
auucugcuaauuuacuggu

SEQ ID NO: 1986480 - RNA, 19 nt, Artificial Sequence
  Description of Artificial Sequence: Synthetic oligonucleotide
  Sense strand starting at position 114 of SEQ ID NO: 1880692
agcagaauauaguuuccuu

SEQ ID NO: 1986481 - RNA, 19 nt, Artificial Sequence
  Description of Artificial Sequence: Synthetic oligonucleotide
  Antisense strand to SEQ ID NO: 1986480
aaggaaacuauauucugcu

SEQ ID NO: 1986482 - RNA, 19 nt, Artificial Sequence
  Description of Artificial Sequence: Synthetic oligonucleotide
  Sense strand starting at position 138 of SEQ ID NO: 1880692
uugucauuccucuaaaugg

SEQ ID NO: 1986483 - RNA, 19 nt, Artificial Sequence
  Description of Artificial Sequence: Synthetic oligonucleotide
  Antisense strand to SEQ ID NO: 1986482
ccauuuagaggaaugacaa

SEQ ID NO: 1986484 - RNA, 19 nt, Artificial Sequence
  Description of Artificial Sequence: Synthetic oligonucleotide
  Sense strand starting at position 145 of SEQ ID NO: 1880692
uccucuaaaugggugagua

SEQ ID NO: 1986485 - RNA, 19 nt, Artificial Sequence
  Description of Artificial Sequence: Synthetic oligonucleotide
  Antisense strand to SEQ ID NO: 1986484
uacucacccauuuagagga

SEQ ID NO: 1986486 - RNA, 19 nt, Artificial Sequence
  Description of Artificial Sequence: Synthetic oligonucleotide
  Sense strand starting at position 146 of SEQ ID NO: 1880692
ccucuaaaugggugaguau

SEQ ID NO: 1986487 - RNA, 19 nt, Artificial Sequence
  Description of Artificial Sequence: Synthetic oligonucleotide
  Antisense strand to SEQ ID NO: 1986486
auacucacccauuuagagg

SEQ ID NO: 1986488 - RNA, 19 nt, Artificial Sequence
  Description of Artificial Sequence: Synthetic oligonucleotide
  Sense strand starting at position 147 of SEQ ID NO: 1880692
cucuaaaugggugaguauu

SEQ ID NO: 1986489 - RNA, 19 nt, Artificial Sequence
  Description of Artificial Sequence: Synthetic oligonucleotide
  Antisense strand to SEQ ID NO: 1986488
aauacucacccauuuagag

SEQ ID NO: 1986490 - RNA, 19 nt, Artificial Sequence
  Description of Artificial Sequence: Synthetic oligonucleotide
  Sense strand starting at position 490 of SEQ ID NO: 1880692
uguucuuagugaccuacaa

SEQ ID NO: 1986491 - RNA, 19 nt, Artificial Sequence
  Description of Artificial Sequence: Synthetic oligonucleotide
  Antisense strand to SEQ ID NO: 1986490
uuguaggucacuaagaaca

SEQ ID NO: 1986492 - RNA, 19 nt, Artificial Sequence
  Description of Artificial Sequence: Synthetic oligonucleotide
  Sense strand starting at position 644 of SEQ ID NO: 1880692
cguaccuguuaaccaauaa

SEQ ID NO: 1986493 - RNA, 19 nt, Artificial Sequence
  Description of Artificial Sequence: Synthetic oligonucleotide
  Antisense strand to SEQ ID NO: 1986492
uuauugguuaacagguacg

SEQ ID NO: 1986494 - RNA, 19 nt, Artificial Sequence
  Description of Artificial Sequence: Synthetic oligonucleotide
  Sense strand starting at position 689 of SEQ ID NO: 1880692
ccuggcaaccucgauucua

SEQ ID NO: 1986495 - RNA, 19 nt, Artificial Sequence
  Description of Artificial Sequence: Synthetic oligonucleotide
  Antisense strand to SEQ ID NO: 1986494
uagaaucgagguugccagg

SEQ ID NO: 1986496 - RNA, 19 nt, Artificial Sequence
  Description of Artificial Sequence: Synthetic oligonucleotide
  Sense strand starting at position 727 of SEQ ID NO: 1880692
ugacuaaucuagguaccuu

SEQ ID NO: 1986497 - RNA, 19 nt, Artificial Sequence
  Description of Artificial Sequence: Synthetic oligonucleotide
  Antisense strand to SEQ ID NO: 1986496
aagguaccuagauuaguca

SEQ ID NO: 1986498 - RNA, 19 nt, Artificial Sequence
  Description of Artificial Sequence: Synthetic oligonucleotide
  Sense strand starting at position 820 of SEQ ID NO: 1880692
cacguuguagcauauauaa

SEQ ID NO: 1986499 - RNA, 19 nt, Artificial Sequence
  Description of Artificial Sequence: Synthetic oligonucleotide
  Antisense strand to SEQ ID NO: 1986498
uuauauaugcuacaacgug

SEQ ID NO: 1986500 - RNA, 19 nt, Artificial Sequence
  Description of Artificial Sequence: Synthetic oligonucleotide
  Sense strand starting at position 822 of SEQ ID NO: 1880692
cguuguagcauauauaaga

SEQ ID NO: 1986501 - RNA, 19 nt, Artificial Sequence
  Description of Artificial Sequence: Synthetic oligonucleotide
  Antisense strand to SEQ ID NO: 1986500
ucuuauauaugcuacaacg

SEQ ID NO: 1986502 - RNA, 19 nt, Artificial Sequence
  Description of Artificial Sequence: Synthetic oligonucleotide
  Sense strand starting at position 909 of SEQ ID NO: 1880692
acagaaacuuggguuguuu

SEQ ID NO: 1986503 - RNA, 19 nt, Artificial Sequence
  Description of Artificial Sequence: Synthetic oligonucleotide
  Antisense strand to SEQ ID NO: 1986502
aaacaacccaaguuucugu

SEQ ID NO: 1986504 - RNA, 19 nt, Artificial Sequence
  Description of Artificial Sequence: Synthetic oligonucleotide
  Sense strand starting at position 1246 of SEQ ID NO: 1880692
ugauuugccugucccuaau

SEQ ID NO: 1986505 - RNA, 19 nt, Artificial Sequence
  Description of Artificial Sequence: Synthetic oligonucleotide
  Antisense strand to SEQ ID NO: 1986504
auuagggacaggcaaauca

SEQ ID NO: 1986506 - RNA, 19 nt, Artificial Sequence
  Description of Artificial Sequence: Synthetic oligonucleotide
  Sense strand starting at position 1294 of SEQ ID NO: 1880692
guuuauuagccagcuguuu

SEQ ID NO: 1986507 - RNA, 19 nt, Artificial Sequence
  Description of Artificial Sequence: Synthetic oligonucleotide
  Antisense strand to SEQ ID NO: 1986506
aaacagcuggcuaauaaac

SEQ ID NO: 1986508 - RNA, 19 nt, Artificial Sequence
  Description of Artificial Sequence: Synthetic oligonucleotide
  Sense strand starting at position 1350 of SEQ ID NO: 1880692
aaagauaagcugugccuga

SEQ ID NO: 1986509 - RNA, 19 nt, Artificial Sequence
  Description of Artificial Sequence: Synthetic oligonucleotide
  Antisense strand to SEQ ID NO: 1986508
ucaggcacagcuuaucuuu

SEQ ID NO: 1986510 - RNA, 19 nt, Artificial Sequence
  Description of Artificial Sequence: Synthetic oligonucleotide
  Sense strand starting at position 1351 of SEQ ID NO: 1880692
aagauaagcugugccugaa

SEQ ID NO: 1986511 - RNA, 19 nt, Artificial Sequence
  Description of Artificial Sequence: Synthetic oligonucleotide
  Antisense strand to SEQ ID NO: 1986510
uucaggcacagcuuaucuu

SEQ ID NO: 1986512 - RNA, 19 nt, Artificial Sequence
  Description of Artificial Sequence: Synthetic oligonucleotide
  Sense strand starting at position 1471 of SEQ ID NO: 1880692
gcuuucaaagugggugaaa

SEQ ID NO: 1986513 - RNA, 19 nt, Artificial Sequence
  Description of Artificial Sequence: Synthetic oligonucleotide
  Antisense strand to SEQ ID NO: 1986512
uuucacccacuuugaaagc

SEQ ID NO: 1986514 - RNA, 19 nt, Artificial Sequence
  Description of Artificial Sequence: Synthetic oligonucleotide
  Sense strand starting at position 1480 of SEQ ID NO: 1880692
gugggugaaagguauccua

SEQ ID NO: 1986515 - RNA, 19 nt, Artificial Sequence
  Description of Artificial Sequence: Synthetic oligonucleotide
  Antisense strand to SEQ ID NO: 1986514
uaggauaccuuucacccac

SEQ ID NO: 1986516 - RNA, 19 nt, Artificial Sequence
  Description of Artificial Sequence: Synthetic oligonucleotide
  Sense strand starting at position 1483 of SEQ ID NO: 1880692
ggugaaagguauccuagua

SEQ ID NO: 1986517 - RNA, 19 nt, Artificial Sequence
  Description of Artificial Sequence: Synthetic oligonucleotide
  Antisense strand to SEQ ID NO: 1986516
uacuaggauaccuuucacc

SEQ ID NO: 1986518 - RNA, 19 nt, Artificial Sequence
  Description of Artificial Sequence: Synthetic oligonucleotide
  Sense strand starting at position 1548 of SEQ ID NO: 1880692
aguuucuuggcagagacuu

SEQ ID NO: 1986519 - RNA, 19 nt, Artificial Sequence
  Description of Artificial Sequence: Synthetic oligonucleotide
  Antisense strand to SEQ ID NO: 1986518
aagucucugccaagaaacu

SEQ ID NO: 1986520 - RNA, 19 nt, Artificial Sequence
  Description of Artificial Sequence: Synthetic oligonucleotide
  Sense strand starting at position 1596 of SEQ ID NO: 1880692
gugcuuguggcagaaggaa

SEQ ID NO: 1986521 - RNA, 19 nt, Artificial Sequence
  Description of Artificial Sequence: Synthetic oligonucleotide
  Antisense strand to SEQ ID NO: 1986520
uuccuucugccacaagcac

SEQ ID NO: 1986522 - RNA, 19 nt, Artificial Sequence
  Description of Artificial Sequence: Synthetic oligonucleotide
  Sense strand starting at position 2099 of SEQ ID NO: 1880692
uuugcaauucuugaagagu

SEQ ID NO: 1986523 - RNA, 19 nt, Artificial Sequence
  Description of Artificial Sequence: Synthetic oligonucleotide
  Antisense strand to SEQ ID NO: 1986522
acucuucaagaauugcaaa

SEQ ID NO: 1986524 - RNA, 19 nt, Artificial Sequence
  Description of Artificial Sequence: Synthetic oligonucleotide
  Sense strand starting at position 2102 of SEQ ID NO: 1880692
gcaauucuugaagaguuua

SEQ ID NO: 1986525 - RNA, 19 nt, Artificial Sequence
  Description of Artificial Sequence: Synthetic oligonucleotide
  Antisense strand to SEQ ID NO: 1986524
uaaacucuucaagaauugc

SEQ ID NO: 1986526 - RNA, 19 nt, Artificial Sequence
  Description of Artificial Sequence: Synthetic oligonucleotide
  Sense strand starting at position 2122 of SEQ ID NO: 1880692
uuugaauaagcugagucau

SEQ ID NO: 1986527 - RNA, 19 nt, Artificial Sequence
  Description of Artificial Sequence: Synthetic oligonucleotide
  Antisense strand to SEQ ID NO: 1986526
augacucagcuuauucaaa

SEQ ID NO: 1986528 - RNA, 19 nt, Artificial Sequence
  Description of Artificial Sequence: Synthetic oligonucleotide
  Sense strand starting at position 2216 of SEQ ID NO: 1880692
cucugaaaguuuccauaag

SEQ ID NO: 1986529 - RNA, 19 nt, Artificial Sequence
  Description of Artificial Sequence: Synthetic oligonucleotide
  Antisense strand to SEQ ID NO: 1986528
cuuauggaaacuuucagag

SEQ ID NO: 1986530 - RNA, 19 nt, Artificial Sequence
  Description of Artificial Sequence: Synthetic oligonucleotide
  Sense strand starting at position 2552 of SEQ ID NO: 1880692
gagcgucuucuugaaaucu

SEQ ID NO: 1986531 - RNA, 19 nt, Artificial Sequence
  Description of Artificial Sequence: Synthetic oligonucleotide
  Antisense strand to SEQ ID NO: 1986530
agauuucaagaagacgcuc

SEQ ID NO: 1986532 - RNA, 19 nt, Artificial Sequence
  Description of Artificial Sequence: Synthetic oligonucleotide
  Sense strand starting at position 2560 of SEQ ID NO: 1880692
ucuugaaaucucugaguca

SEQ ID NO: 1986533 - RNA, 19 nt, Artificial Sequence
  Description of Artificial Sequence: Synthetic oligonucleotide
  Antisense strand to SEQ ID NO: 1986532
ugacucagagauuucaaga

SEQ ID NO: 1986534 - RNA, 19 nt, Artificial Sequence
  Description of Artificial Sequence: Synthetic oligonucleotide
  Sense strand starting at position 2563 of SEQ ID NO: 1880692
ugaaaucucugagucaaag

SEQ ID NO: 1986535 - RNA, 19 nt, Artificial Sequence
  Description of Artificial Sequence: Synthetic oligonucleotide
  Antisense strand to SEQ ID NO: 1986534
cuuugacucagagauuuca

SEQ ID NO: 1986536 - RNA, 19 nt, Artificial Sequence
  Description of Artificial Sequence: Synthetic oligonucleotide
  Sense strand starting at position 2739 of SEQ ID NO: 1880692
gggugaagucuugguggag

SEQ ID NO: 1986537 - RNA, 19 nt, Artificial Sequence
  Description of Artificial Sequence: Synthetic oligonucleotide
  Antisense strand to SEQ ID NO: 1986536
cuccaccaagacuucaccc

SEQ ID NO: 1986538 - RNA, 19 nt, Artificial Sequence
  Description of Artificial Sequence: Synthetic oligonucleotide
  Sense strand starting at position 3143 of SEQ ID NO: 1880692
agcucuuaugacuauguua

SEQ ID NO: 1986539 - RNA, 19 nt, Artificial Sequence
  Description of Artificial Sequence: Synthetic oligonucleotide
  Antisense strand to SEQ ID NO: 1986538
uaacauagucauaagagcu

SEQ ID NO: 1986540 - RNA, 19 nt, Artificial Sequence
  Description of Artificial Sequence: Synthetic oligonucleotide
  Sense strand starting at position 3145 of SEQ ID NO: 1880692
cucuuaugacuauguuaca

SEQ ID NO: 1986541 - RNA, 19 nt, Artificial Sequence
  Description of Artificial Sequence: Synthetic oligonucleotide
  Antisense strand to SEQ ID NO: 1986540
uguaacauagucauaagag

SEQ ID NO: 1986542 - RNA, 19 nt, Artificial Sequence
  Description of Artificial Sequence: Synthetic oligonucleotide
  Sense strand starting at position 3146 of SEQ ID NO: 1880692
ucuuaugacuauguuacau

SEQ ID NO: 1986543 - RNA, 19 nt, Artificial Sequence
  Description of Artificial Sequence: Synthetic oligonucleotide
  Antisense strand to SEQ ID NO: 1986542
auguaacauagucauaaga

SEQ ID NO: 1986544 - RNA, 19 nt, Artificial Sequence
  Description of Artificial Sequence: Synthetic oligonucleotide
  Sense strand starting at position 3169 of SEQ ID NO: 1880692
gguugguuuguuggaagga

SEQ ID NO: 1986545 - RNA, 19 nt, Artificial Sequence
  Description of Artificial Sequence: Synthetic oligonucleotide
  Antisense strand to SEQ ID NO: 1986544
uccuuccaacaaaccaacc

SEQ ID NO: 1986546 - RNA, 19 nt, Artificial Sequence
  Description of Artificial Sequence: Synthetic oligonucleotide
  Sense strand starting at position 3359 of SEQ ID NO: 1880692
gacggccaucgucaugaaa

SEQ ID NO: 1986547 - RNA, 19 nt, Artificial Sequence
  Description of Artificial Sequence: Synthetic oligonucleotide
  Antisense strand to SEQ ID NO: 1986546
uuucaugacgauggccguc

SEQ ID NO: 1986548 - RNA, 19 nt, Artificial Sequence
  Description of Artificial Sequence: Synthetic oligonucleotide
  Sense strand starting at position 3421 of SEQ ID NO: 1880692
cccacagaguccucuaaga

SEQ ID NO: 1986549 - RNA, 19 nt, Artificial Sequence
  Description of Artificial Sequence: Synthetic oligonucleotide
  Antisense strand to SEQ ID NO: 1986548
ucuuagaggacucuguggg

SEQ ID NO: 1986550 - RNA, 19 nt, Artificial Sequence
  Description of Artificial Sequence: Synthetic oligonucleotide
  Sense strand starting at position 3451 of SEQ ID NO: 1880692
agcccugggagguaucauu

SEQ ID NO: 1986551 - RNA, 19 nt, Artificial Sequence
  Description of Artificial Sequence: Synthetic oligonucleotide
  Antisense strand to SEQ ID NO: 1986550
aaugauaccucccagggcu

SEQ ID NO: 1986552 - RNA, 19 nt, Artificial Sequence
  Description of Artificial Sequence: Synthetic oligonucleotide
  Sense strand starting at position 3909 of SEQ ID NO: 1880692
gcuugugcccugucuauga

SEQ ID NO: 1986553 - RNA, 19 nt, Artificial Sequence
  Description of Artificial Sequence: Synthetic oligonucleotide
  Antisense strand to SEQ ID NO: 1986552
ucauagacagggcacaagc

SEQ ID NO: 1986554 - RNA, 19 nt, Artificial Sequence
  Description of Artificial Sequence: Synthetic oligonucleotide
  Sense strand starting at position 3922 of SEQ ID NO: 1880692
cuaugaggcggacauaguu

SEQ ID NO: 1986555 - RNA, 19 nt, Artificial Sequence
  Description of Artificial Sequence: Synthetic oligonucleotide
  Antisense strand to SEQ ID NO: 1986554
aacuauguccgccucauag

SEQ ID NO: 1986556 - RNA, 19 nt, Artificial Sequence
  Description of Artificial Sequence: Synthetic oligonucleotide
  Sense strand starting at position 3928 of SEQ ID NO: 1880692
ggcggacauaguugacaau

SEQ ID NO: 1986557 - RNA, 19 nt, Artificial Sequence
  Description of Artificial Sequence: Synthetic oligonucleotide
  Antisense strand to SEQ ID NO: 1986556
auugucaacuauguccgcc

SEQ ID NO: 1986558 - RNA, 19 nt, Artificial Sequence
  Description of Artificial Sequence: Synthetic oligonucleotide
  Sense strand starting at position 2 of SEQ ID NO: 1880693
guuucuucuggagaggagu

SEQ ID NO: 1986559 - RNA, 19 nt, Artificial Sequence
  Description of Artificial Sequence: Synthetic oligonucleotide
  Antisense strand to SEQ ID NO: 1986558
acuccucuccagaagaaac

SEQ ID NO: 1986560 - RNA, 19 nt, Artificial Sequence
  Description of Artificial Sequence: Synthetic oligonucleotide
  Sense strand starting at position 104 of SEQ ID NO: 1880693
accaguaaauuagcagaau

SEQ ID NO: 1986561 - RNA, 19 nt, Artificial Sequence
  Description of Artificial Sequence: Synthetic oligonucleotide
  Antisense strand to SEQ ID NO: 1986560
auucugcuaauuuacuggu

SEQ ID NO: 1986562 - RNA, 19 nt, Artificial Sequence
  Description of Artificial Sequence: Synthetic oligonucleotide
  Sense strand starting at position 127 of SEQ ID NO: 1880693
uuucguuugcuguugucau

SEQ ID NO: 1986563 - RNA, 19 nt, Artificial Sequence
  Description of Artificial Sequence: Synthetic oligonucleotide
  Antisense strand to SEQ ID NO: 1986562
augacaacagcaaacgaaa

SEQ ID NO: 1986564 - RNA, 19 nt, Artificial Sequence
  Description of Artificial Sequence: Synthetic oligonucleotide
  Sense strand starting at position 139 of SEQ ID NO: 1880693
uugucauuccucuaaaugg

SEQ ID NO: 1986565 - RNA, 19 nt, Artificial Sequence
  Description of Artificial Sequence: Synthetic oligonucleotide
  Antisense strand to SEQ ID NO: 1986564
ccauuuagaggaaugacaa

SEQ ID NO: 1986566 - RNA, 19 nt, Artificial Sequence
  Description of Artificial Sequence: Synthetic oligonucleotide
  Sense strand starting at position 146 of SEQ ID NO: 1880693
uccucuaaaugggugagua

SEQ ID NO: 1986567 - RNA, 19 nt, Artificial Sequence
  Description of Artificial Sequence: Synthetic oligonucleotide
  Antisense strand to SEQ ID NO: 1986566
uacucacccauuuagagga

SEQ ID NO: 1986568 - RNA, 19 nt, Artificial Sequence
  Description of Artificial Sequence: Synthetic oligonucleotide
  Sense strand starting at position 147 of SEQ ID NO: 1880693
ccucuaaaugggugaguau

SEQ ID NO: 1986569 - RNA, 19 nt, Artificial Sequence
  Description of Artificial Sequence: Synthetic oligonucleotide
  Antisense strand to SEQ ID NO: 1986568
auacucacccauuuagagg

SEQ ID NO: 1986570 - RNA, 19 nt, Artificial Sequence
  Description of Artificial Sequence: Synthetic oligonucleotide
  Sense strand starting at position 148 of SEQ ID NO: 1880693
cucuaaaugggugaguauu

SEQ ID NO: 1986571 - RNA, 19 nt, Artificial Sequence
  Description of Artificial Sequence: Synthetic oligonucleotide
  Antisense strand to SEQ ID NO: 1986570
aauacucacccauuuagag

SEQ ID NO: 1986572 - RNA, 19 nt, Artificial Sequence
  Description of Artificial Sequence: Synthetic oligonucleotide
  Sense strand starting at position 491 of SEQ ID NO: 1880693
uguucuuagugaccuacaa

SEQ ID NO: 1986573 - RNA, 19 nt, Artificial Sequence
  Description of Artificial Sequence: Synthetic oligonucleotide
  Antisense strand to SEQ ID NO: 1986572
uuguaggucacuaagaaca

SEQ ID NO: 1986574 - RNA, 19 nt, Artificial Sequence
  Description of Artificial Sequence: Synthetic oligonucleotide
  Sense strand starting at position 645 of SEQ ID NO: 1880693
cguaccuguuaaccaauaa

SEQ ID NO: 1986575 - RNA, 19 nt, Artificial Sequence
  Description of Artificial Sequence: Synthetic oligonucleotide
  Antisense strand to SEQ ID NO: 1986574
uuauugguuaacagguacg

SEQ ID NO: 1986576 - RNA, 19 nt, Artificial Sequence
  Description of Artificial Sequence: Synthetic oligonucleotide
  Sense strand starting at position 690 of SEQ ID NO: 1880693
ccuggcaaccucgauucua

SEQ ID NO: 1986577 - RNA, 19 nt, Artificial Sequence
  Description of Artificial Sequence: Synthetic oligonucleotide
  Antisense strand to SEQ ID NO: 1986576
uagaaucgagguugccagg

SEQ ID NO: 1986578 - RNA, 19 nt, Artificial Sequence
  Description of Artificial Sequence: Synthetic oligonucleotide
  Sense strand starting at position 723 of SEQ ID NO: 1880693
caguuugacuaaucuaggu

SEQ ID NO: 1986579 - RNA, 19 nt, Artificial Sequence
  Description of Artificial Sequence: Synthetic oligonucleotide
  Antisense strand to SEQ ID NO: 1986578
accuagauuagucaaacug

SEQ ID NO: 1986580 - RNA, 19 nt, Artificial Sequence
  Description of Artificial Sequence: Synthetic oligonucleotide
  Sense strand starting at position 823 of SEQ ID NO: 1880693
cguuguagcauauauaaga

SEQ ID NO: 1986581 - RNA, 19 nt, Artificial Sequence
  Description of Artificial Sequence: Synthetic oligonucleotide
  Antisense strand to SEQ ID NO: 1986580
ucuuauauaugcuacaacg

SEQ ID NO: 1986582 - RNA, 19 nt, Artificial Sequence
  Description of Artificial Sequence: Synthetic oligonucleotide
  Sense strand starting at position 910 of SEQ ID NO: 1880693
acagaaacuuggguuguuu

SEQ ID NO: 1986583 - RNA, 19 nt, Artificial Sequence
  Description of Artificial Sequence: Synthetic oligonucleotide
  Antisense strand to SEQ ID NO: 1986582
aaacaacccaaguuucugu

SEQ ID NO: 1986584 - RNA, 19 nt, Artificial Sequence
  Description of Artificial Sequence: Synthetic oligonucleotide
  Sense strand starting at position 1247 of SEQ ID NO: 1880693
ugauuugccugucccuaau

SEQ ID NO: 1986585 - RNA, 19 nt, Artificial Sequence
  Description of Artificial Sequence: Synthetic oligonucleotide
  Antisense strand to SEQ ID NO: 1986584
auuagggacaggcaaauca

SEQ ID NO: 1986586 - RNA, 19 nt, Artificial Sequence
  Description of Artificial Sequence: Synthetic oligonucleotide
  Sense strand starting at position 1295 of SEQ ID NO: 1880693
guuuauuagccagcuguuu

SEQ ID NO: 1986587 - RNA, 19 nt, Artificial Sequence
  Description of Artificial Sequence: Synthetic oligonucleotide
  Antisense strand to SEQ ID NO: 1986586
aaacagcuggcuaauaaac

SEQ ID NO: 1986588 - RNA, 19 nt, Artificial Sequence
  Description of Artificial Sequence: Synthetic oligonucleotide
  Sense strand starting at position 1351 of SEQ ID NO: 1880693
aaagauaagcugugccuga

SEQ ID NO: 1986589 - RNA, 19 nt, Artificial Sequence
  Description of Artificial Sequence: Synthetic oligonucleotide
  Antisense strand to SEQ ID NO: 1986588
ucaggcacagcuuaucuuu

SEQ ID NO: 1986590 - RNA, 19 nt, Artificial Sequence
  Description of Artificial Sequence: Synthetic oligonucleotide
  Sense strand starting at position 1352 of SEQ ID NO: 1880693
aagauaagcugugccugaa

SEQ ID NO: 1986591 - RNA, 19 nt, Artificial Sequence
  Description of Artificial Sequence: Synthetic oligonucleotide
  Antisense strand to SEQ ID NO: 1986590
uucaggcacagcuuaucuu

SEQ ID NO: 1986592 - RNA, 19 nt, Artificial Sequence
  Description of Artificial Sequence: Synthetic oligonucleotide
  Sense strand starting at position 1549 of SEQ ID NO: 1880693
aguuucuuggcagagacuu

SEQ ID NO: 1986593 - RNA, 19 nt, Artificial Sequence
  Description of Artificial Sequence: Synthetic oligonucleotide
  Antisense strand to SEQ ID NO: 1986592
aagucucugccaagaaacu

SEQ ID NO: 1986594 - RNA, 19 nt, Artificial Sequence
  Description of Artificial Sequence: Synthetic oligonucleotide
  Sense strand starting at position 1597 of SEQ ID NO: 1880693
gugcuuguggcagaaggaa

SEQ ID NO: 1986595 - RNA, 19 nt, Artificial Sequence
  Description of Artificial Sequence: Synthetic oligonucleotide
  Antisense strand to SEQ ID NO: 1986594
uuccuucugccacaagcac

SEQ ID NO: 1986596 - RNA, 19 nt, Artificial Sequence
  Description of Artificial Sequence: Synthetic oligonucleotide
  Sense strand starting at position 2100 of SEQ ID NO: 1880693
uuugcaauucuugaagagu

SEQ ID NO: 1986597 - RNA, 19 nt, Artificial Sequence
  Description of Artificial Sequence: Synthetic oligonucleotide
  Antisense strand to SEQ ID NO: 1986596
acucuucaagaauugcaaa

SEQ ID NO: 1986598 - RNA, 19 nt, Artificial Sequence
  Description of Artificial Sequence: Synthetic oligonucleotide
  Sense strand starting at position 2103 of SEQ ID NO: 1880693
gcaauucuugaagaguuua

SEQ ID NO: 1986599 - RNA, 19 nt, Artificial Sequence
  Description of Artificial Sequence: Synthetic oligonucleotide
  Antisense strand to SEQ ID NO: 1986598
uaaacucuucaagaauugc

SEQ ID NO: 1986600 - RNA, 19 nt, Artificial Sequence
  Description of Artificial Sequence: Synthetic oligonucleotide
  Sense strand starting at position 2123 of SEQ ID NO: 1880693
uuugaauaagcugagucau

SEQ ID NO: 1986601 - RNA, 19 nt, Artificial Sequence
  Description of Artificial Sequence: Synthetic oligonucleotide
  Antisense strand to SEQ ID NO: 1986600
augacucagcuuauucaaa

SEQ ID NO: 1986602 - RNA, 19 nt, Artificial Sequence
  Description of Artificial Sequence: Synthetic oligonucleotide
  Sense strand starting at position 2217 of SEQ ID NO: 1880693
cucugaaaguuuccauaag

SEQ ID NO: 1986603 - RNA, 19 nt, Artificial Sequence
  Description of Artificial Sequence: Synthetic oligonucleotide
  Antisense strand to SEQ ID NO: 1986602
cuuauggaaacuuucagag

SEQ ID NO: 1986604 - RNA, 19 nt, Artificial Sequence
  Description of Artificial Sequence: Synthetic oligonucleotide
  Sense strand starting at position 2553 of SEQ ID NO: 1880693
gagcgucuucuugaaaucu

SEQ ID NO: 1986605 - RNA, 19 nt, Artificial Sequence
  Description of Artificial Sequence: Synthetic oligonucleotide
  Antisense strand to SEQ ID NO: 1986604
agauuucaagaagacgcuc

SEQ ID NO: 1986606 - RNA, 19 nt, Artificial Sequence
  Description of Artificial Sequence: Synthetic oligonucleotide
  Sense strand starting at position 2561 of SEQ ID NO: 1880693
ucuugaaaucucugaguca

SEQ ID NO: 1986607 - RNA, 19 nt, Artificial Sequence
  Description of Artificial Sequence: Synthetic oligonucleotide
  Antisense strand to SEQ ID NO: 1986606
ugacucagagauuucaaga

SEQ ID NO: 1986608 - RNA, 19 nt, Artificial Sequence
  Description of Artificial Sequence: Synthetic oligonucleotide
  Sense strand starting at position 2740 of SEQ ID NO: 1880693
gggugaagucuugguggag

SEQ ID NO: 1986609 - RNA, 19 nt, Artificial Sequence
  Description of Artificial Sequence: Synthetic oligonucleotide
  Antisense strand to SEQ ID NO: 1986608
cuccaccaagacuucaccc

SEQ ID NO: 1986610 - RNA, 19 nt, Artificial Sequence
  Description of Artificial Sequence: Synthetic oligonucleotide
  Sense strand starting at position 3144 of SEQ ID NO: 1880693
agcucuuaugacuauguua

SEQ ID NO: 1986611 - RNA, 19 nt, Artificial Sequence
  Description of Artificial Sequence: Synthetic oligonucleotide
  Antisense strand to SEQ ID NO: 1986610
uaacauagucauaagagcu

SEQ ID NO: 1986612 - RNA, 19 nt, Artificial Sequence
  Description of Artificial Sequence: Synthetic oligonucleotide
  Sense strand starting at position 3146 of SEQ ID NO: 1880693
cucuuaugacuauguuaca

SEQ ID NO: 1986613 - RNA, 19 nt, Artificial Sequence
  Description of Artificial Sequence: Synthetic oligonucleotide
  Antisense strand to SEQ ID NO: 1986612
uguaacauagucauaagag

SEQ ID NO: 1986614 - RNA, 19 nt, Artificial Sequence
  Description of Artificial Sequence: Synthetic oligonucleotide
  Sense strand starting at position 3147 of SEQ ID NO: 1880693
ucuuaugacuauguuacau

SEQ ID NO: 1986615 - RNA, 19 nt, Artificial Sequence
  Description of Artificial Sequence: Synthetic oligonucleotide
  Antisense strand to SEQ ID NO: 1986614
auguaacauagucauaaga

SEQ ID NO: 1986616 - RNA, 19 nt, Artificial Sequence
  Description of Artificial Sequence: Synthetic oligonucleotide
  Sense strand starting at position 3170 of SEQ ID NO: 1880693
gguugguuuguuggaagga

SEQ ID NO: 1986617 - RNA, 19 nt, Artificial Sequence
  Description of Artificial Sequence: Synthetic oligonucleotide
  Antisense strand to SEQ ID NO: 1986616
uccuuccaacaaaccaacc

SEQ ID NO: 1986618 - RNA, 19 nt, Artificial Sequence
  Description of Artificial Sequence: Synthetic oligonucleotide
  Sense strand starting at position 3247 of SEQ ID NO: 1880693
aggucuaucuucccagcaa

SEQ ID NO: 1986619 - RNA, 19 nt, Artificial Sequence
  Description of Artificial Sequence: Synthetic oligonucleotide
  Antisense strand to SEQ ID NO: 1986618
uugcugggaagauagaccu

SEQ ID NO: 1986620 - RNA, 19 nt, Artificial Sequence
  Description of Artificial Sequence: Synthetic oligonucleotide
  Sense strand starting at position 3360 of SEQ ID NO: 1880693
gacggccaucgucaugaaa

SEQ ID NO: 1986621 - RNA, 19 nt, Artificial Sequence
  Description of Artificial Sequence: Synthetic oligonucleotide
  Antisense strand to SEQ ID NO: 1986620
uuucaugacgauggccguc

SEQ ID NO: 1986622 - RNA, 19 nt, Artificial Sequence
  Description of Artificial Sequence: Synthetic oligonucleotide
  Sense strand starting at position 3422 of SEQ ID NO: 1880693
cccacagaguccucuaaga

SEQ ID NO: 1986623 - RNA, 19 nt, Artificial Sequence
  Description of Artificial Sequence: Synthetic oligonucleotide
  Antisense strand to SEQ ID NO: 1986622
ucuuagaggacucuguggg

SEQ ID NO: 1986624 - RNA, 19 nt, Artificial Sequence
  Description of Artificial Sequence: Synthetic oligonucleotide
  Sense strand starting at position 3447 of SEQ ID NO: 1880693
ccaauagcccugggaggua

SEQ ID NO: 1986625 - RNA, 19 nt, Artificial Sequence
  Description of Artificial Sequence: Synthetic oligonucleotide
  Antisense strand to SEQ ID NO: 1986624
uaccucccagggcuauugg

SEQ ID NO: 1986626 - RNA, 19 nt, Artificial Sequence
  Description of Artificial Sequence: Synthetic oligonucleotide
  Sense strand starting at position 3452 of SEQ ID NO: 1880693
agcccugggagguaucauu

SEQ ID NO: 1986627 - RNA, 19 nt, Artificial Sequence
  Description of Artificial Sequence: Synthetic oligonucleotide
  Antisense strand to SEQ ID NO: 1986626
aaugauaccucccagggcu

SEQ ID NO: 1986628 - RNA, 19 nt, Artificial Sequence
  Description of Artificial Sequence: Synthetic oligonucleotide
  Sense strand starting at position 3773 of SEQ ID NO: 1880693
agggauguguuccuaccuu

SEQ ID NO: 1986629 - RNA, 19 nt, Artificial Sequence
  Description of Artificial Sequence: Synthetic oligonucleotide
  Antisense strand to SEQ ID NO: 1986628
aagguaggaacacaucccu

SEQ ID NO: 1986630 - RNA, 19 nt, Artificial Sequence
  Description of Artificial Sequence: Synthetic oligonucleotide
  Sense strand starting at position 3910 of SEQ ID NO: 1880693
gcuugugcccugucuauga

SEQ ID NO: 1986631 - RNA, 19 nt, Artificial Sequence
  Description of Artificial Sequence: Synthetic oligonucleotide
  Antisense strand to SEQ ID NO: 1986630
ucauagacagggcacaagc

SEQ ID NO: 1986632 - RNA, 19 nt, Artificial Sequence
  Description of Artificial Sequence: Synthetic oligonucleotide
  Sense strand starting at position 3920 of SEQ ID NO: 1880693
ugucuaugaggcggacaua

SEQ ID NO: 1986633 - RNA, 19 nt, Artificial Sequence
  Description of Artificial Sequence: Synthetic oligonucleotide
  Antisense strand to SEQ ID NO: 1986632
uauguccgccucauagaca

SEQ ID NO: 1986634 - RNA, 19 nt, Artificial Sequence
  Description of Artificial Sequence: Synthetic oligonucleotide
  Sense strand starting at position 3923 of SEQ ID NO: 1880693
cuaugaggcggacauaguu

SEQ ID NO: 1986635 - RNA, 19 nt, Artificial Sequence
  Description of Artificial Sequence: Synthetic oligonucleotide
  Antisense strand to SEQ ID NO: 1986634
aacuauguccgccucauag

SEQ ID NO: 1986636 - RNA, 19 nt, Artificial Sequence
  Description of Artificial Sequence: Synthetic oligonucleotide
  Sense strand starting at position 3929 of SEQ ID NO: 1880693
ggcggacauaguugacaau

SEQ ID NO: 1986637 - RNA, 19 nt, Artificial Sequence
  Description of Artificial Sequence: Synthetic oligonucleotide
  Antisense strand to SEQ ID NO: 1986636
auugucaacuauguccgcc

SEQ ID NO: 1986638 - RNA, 19 nt, Artificial Sequence
  Description of Artificial Sequence: Synthetic oligonucleotide
  Sense strand starting at position 44 of SEQ ID NO: 1880694
gcauuaauacggcagccuu

SEQ ID NO: 1986639 - RNA, 19 nt, Artificial Sequence
  Description of Artificial Sequence: Synthetic oligonucleotide
  Antisense strand to SEQ ID NO: 1986638
aaggcugccguauuaaugc

SEQ ID NO: 1986640 - RNA, 19 nt, Artificial Sequence
  Description of Artificial Sequence: Synthetic oligonucleotide
  Sense strand starting at position 86 of SEQ ID NO: 1880694
gcaagucuuggcuggagga

SEQ ID NO: 1986641 - RNA, 19 nt, Artificial Sequence
  Description of Artificial Sequence: Synthetic oligonucleotide
  Antisense strand to SEQ ID NO: 1986640
uccuccagccaagacuugc

SEQ ID NO: 1986642 - RNA, 19 nt, Artificial Sequence
  Description of Artificial Sequence: Synthetic oligonucleotide
  Sense strand starting at position 87 of SEQ ID NO: 1880694
caagucuuggcuggaggau

SEQ ID NO: 1986643 - RNA, 19 nt, Artificial Sequence
  Description of Artificial Sequence: Synthetic oligonucleotide
  Antisense strand to SEQ ID NO: 1986642
auccuccagccaagacuug

SEQ ID NO: 1986644 - RNA, 19 nt, Artificial Sequence
  Description of Artificial Sequence: Synthetic oligonucleotide
  Sense strand starting at position 185 of SEQ ID NO: 1880694
gagggaugcuugucccugu

SEQ ID NO: 1986645 - RNA, 19 nt, Artificial Sequence
  Description of Artificial Sequence: Synthetic oligonucleotide
  Antisense strand to SEQ ID NO: 1986644
acagggacaagcaucccuc

SEQ ID NO: 1986646 - RNA, 19 nt, Artificial Sequence
  Description of Artificial Sequence: Synthetic oligonucleotide
  Sense strand starting at position 186 of SEQ ID NO: 1880694
agggaugcuugucccugua

SEQ ID NO: 1986647 - RNA, 19 nt, Artificial Sequence
  Description of Artificial Sequence: Synthetic oligonucleotide
  Antisense strand to SEQ ID NO: 1986646
uacagggacaagcaucccu

SEQ ID NO: 1986648 - RNA, 19 nt, Artificial Sequence
  Description of Artificial Sequence: Synthetic oligonucleotide
  Sense strand starting at position 188 of SEQ ID NO: 1880694
ggaugcuugucccuguaaa

SEQ ID NO: 1986649 - RNA, 19 nt, Artificial Sequence
  Description of Artificial Sequence: Synthetic oligonucleotide
  Antisense strand to SEQ ID NO: 1986648
uuuacagggacaagcaucc

SEQ ID NO: 1986650 - RNA, 19 nt, Artificial Sequence
  Description of Artificial Sequence: Synthetic oligonucleotide
  Sense strand starting at position 189 of SEQ ID NO: 1880694
gaugcuugucccuguaaac

SEQ ID NO: 1986651 - RNA, 19 nt, Artificial Sequence
  Description of Artificial Sequence: Synthetic oligonucleotide
  Antisense strand to SEQ ID NO: 1986650
guuuacagggacaagcauc

SEQ ID NO: 1986652 - RNA, 19 nt, Artificial Sequence
  Description of Artificial Sequence: Synthetic oligonucleotide
  Sense strand starting at position 449 of SEQ ID NO: 1880694
uaauguacugguuguggga

SEQ ID NO: 1986653 - RNA, 19 nt, Artificial Sequence
  Description of Artificial Sequence: Synthetic oligonucleotide
  Antisense strand to SEQ ID NO: 1986652
ucccacaaccaguacauua

SEQ ID NO: 1986654 - RNA, 19 nt, Artificial Sequence
  Description of Artificial Sequence: Synthetic oligonucleotide
  Sense strand starting at position 1000 of SEQ ID NO: 1880694
agcagaguggccuaaccuu

SEQ ID NO: 1986655 - RNA, 19 nt, Artificial Sequence
  Description of Artificial Sequence: Synthetic oligonucleotide
  Antisense strand to SEQ ID NO: 1986654
aagguuaggccacucugcu

SEQ ID NO: 1986656 - RNA, 19 nt, Artificial Sequence
  Description of Artificial Sequence: Synthetic oligonucleotide
  Sense strand starting at position 1008 of SEQ ID NO: 1880694
ggccuaaccuuccugaauc

SEQ ID NO: 1986657 - RNA, 19 nt, Artificial Sequence
  Description of Artificial Sequence: Synthetic oligonucleotide
  Antisense strand to SEQ ID NO: 1986656
gauucaggaagguuaggcc

SEQ ID NO: 1986658 - RNA, 19 nt, Artificial Sequence
  Description of Artificial Sequence: Synthetic oligonucleotide
  Sense strand starting at position 1078 of SEQ ID NO: 1880694
cagucacuguggccagaaa

SEQ ID NO: 1986659 - RNA, 19 nt, Artificial Sequence
  Description of Artificial Sequence: Synthetic oligonucleotide
  Antisense strand to SEQ ID NO: 1986658
uuucuggccacagugacug

SEQ ID NO: 1986660 - RNA, 19 nt, Artificial Sequence
  Description of Artificial Sequence: Synthetic oligonucleotide
  Sense strand starting at position 1164 of SEQ ID NO: 1880694
gggugcugucuucagagua

SEQ ID NO: 1986661 - RNA, 19 nt, Artificial Sequence
  Description of Artificial Sequence: Synthetic oligonucleotide
  Antisense strand to SEQ ID NO: 1986660
uacucugaagacagcaccc

SEQ ID NO: 1986662 - RNA, 19 nt, Artificial Sequence
  Description of Artificial Sequence: Synthetic oligonucleotide
  Sense strand starting at position 1269 of SEQ ID NO: 1880694
cccucaucaggugaguuua

SEQ ID NO: 1986663 - RNA, 19 nt, Artificial Sequence
  Description of Artificial Sequence: Synthetic oligonucleotide
  Antisense strand to SEQ ID NO: 1986662
uaaacucaccugaugaggg

SEQ ID NO: 1986664 - RNA, 19 nt, Artificial Sequence
  Description of Artificial Sequence: Synthetic oligonucleotide
  Sense strand starting at position 1277 of SEQ ID NO: 1880694
aggugaguuuaacuaccua

SEQ ID NO: 1986665 - RNA, 19 nt, Artificial Sequence
  Description of Artificial Sequence: Synthetic oligonucleotide
  Antisense strand to SEQ ID NO: 1986664
uagguaguuaaacucaccu

SEQ ID NO: 1986666 - RNA, 19 nt, Artificial Sequence
  Description of Artificial Sequence: Synthetic oligonucleotide
  Sense strand starting at position 1298 of SEQ ID NO: 1880694
cuugcaaguccagaaguga

SEQ ID NO: 1986667 - RNA, 19 nt, Artificial Sequence
  Description of Artificial Sequence: Synthetic oligonucleotide
  Antisense strand to SEQ ID NO: 1986666
ucacuucuggacuugcaag

SEQ ID NO: 1986668 - RNA, 19 nt, Artificial Sequence
  Description of Artificial Sequence: Synthetic oligonucleotide
  Sense strand starting at position 1684 of SEQ ID NO: 1880694
cuguuauacccacaguugu

SEQ ID NO: 1986669 - RNA, 19 nt, Artificial Sequence
  Description of Artificial Sequence: Synthetic oligonucleotide
  Antisense strand to SEQ ID NO: 1986668
acaacuguggguauaacag

SEQ ID NO: 1986670 - RNA, 19 nt, Artificial Sequence
  Description of Artificial Sequence: Synthetic oligonucleotide
  Sense strand starting at position 1691 of SEQ ID NO: 1880694
acccacaguuguucuugaa

SEQ ID NO: 1986671 - RNA, 19 nt, Artificial Sequence
  Description of Artificial Sequence: Synthetic oligonucleotide
  Antisense strand to SEQ ID NO: 1986670
uucaagaacaacugugggu

SEQ ID NO: 1986672 - RNA, 19 nt, Artificial Sequence
  Description of Artificial Sequence: Synthetic oligonucleotide
  Sense strand starting at position 1908 of SEQ ID NO: 1880694
ugagaaguguccucacuua

SEQ ID NO: 1986673 - RNA, 19 nt, Artificial Sequence
  Description of Artificial Sequence: Synthetic oligonucleotide
  Antisense strand to SEQ ID NO: 1986672
uaagugaggacacuucuca

SEQ ID NO: 1986674 - RNA, 19 nt, Artificial Sequence
  Description of Artificial Sequence: Synthetic oligonucleotide
  Sense strand starting at position 2290 of SEQ ID NO: 1880694
agcagaguucugggccagu

SEQ ID NO: 1986675 - RNA, 19 nt, Artificial Sequence
  Description of Artificial Sequence: Synthetic oligonucleotide
  Antisense strand to SEQ ID NO: 1986674
acuggcccagaacucugcu

SEQ ID NO: 1986676 - RNA, 19 nt, Artificial Sequence
  Description of Artificial Sequence: Synthetic oligonucleotide
  Sense strand starting at position 2503 of SEQ ID NO: 1880694
uggagaguuuccaggagag

SEQ ID NO: 1986677 - RNA, 19 nt, Artificial Sequence
  Description of Artificial Sequence: Synthetic oligonucleotide
  Antisense strand to SEQ ID NO: 1986676
cucuccuggaaacucucca

SEQ ID NO: 1986678 - RNA, 19 nt, Artificial Sequence
  Description of Artificial Sequence: Synthetic oligonucleotide
  Sense strand starting at position 2673 of SEQ ID NO: 1880694
uaguucuucgccuucguca

SEQ ID NO: 1986679 - RNA, 19 nt, Artificial Sequence
  Description of Artificial Sequence: Synthetic oligonucleotide
  Antisense strand to SEQ ID NO: 1986678
ugacgaaggcgaagaacua

SEQ ID NO: 1986680 - RNA, 19 nt, Artificial Sequence
  Description of Artificial Sequence: Synthetic oligonucleotide
  Sense strand starting at position 2761 of SEQ ID NO: 1880694
ggaaauacucuuugaaagc

SEQ ID NO: 1986681 - RNA, 19 nt, Artificial Sequence
  Description of Artificial Sequence: Synthetic oligonucleotide
  Antisense strand to SEQ ID NO: 1986680
gcuuucaaagaguauuucc

SEQ ID NO: 1986682 - RNA, 19 nt, Artificial Sequence
  Description of Artificial Sequence: Synthetic oligonucleotide
  Sense strand starting at position 2770 of SEQ ID NO: 1880694
cuuugaaagcccugauuau

SEQ ID NO: 1986683 - RNA, 19 nt, Artificial Sequence
  Description of Artificial Sequence: Synthetic oligonucleotide
  Antisense strand to SEQ ID NO: 1986682
auaaucagggcuuucaaag

SEQ ID NO: 1986684 - RNA, 19 nt, Artificial Sequence
  Description of Artificial Sequence: Synthetic oligonucleotide
  Sense strand starting at position 2811 of SEQ ID NO: 1880694
augcuugccaucuggauga

SEQ ID NO: 1986685 - RNA, 19 nt, Artificial Sequence
  Description of Artificial Sequence: Synthetic oligonucleotide
  Antisense strand to SEQ ID NO: 1986684
ucauccagauggcaagcau

SEQ ID NO: 1986686 - RNA, 19 nt, Artificial Sequence
  Description of Artificial Sequence: Synthetic oligonucleotide
  Sense strand starting at position 2813 of SEQ ID NO: 1880694
gcuugccaucuggaugaua

SEQ ID NO: 1986687 - RNA, 19 nt, Artificial Sequence
  Description of Artificial Sequence: Synthetic oligonucleotide
  Antisense strand to SEQ ID NO: 1986686
uaucauccagauggcaagc

SEQ ID NO: 1986688 - RNA, 19 nt, Artificial Sequence
  Description of Artificial Sequence: Synthetic oligonucleotide
  Sense strand starting at position 2963 of SEQ ID NO: 1880694
aaguaacugucucuuggaa

SEQ ID NO: 1986689 - RNA, 19 nt, Artificial Sequence
  Description of Artificial Sequence: Synthetic oligonucleotide
  Antisense strand to SEQ ID NO: 1986688
uuccaagagacaguuacuu

SEQ ID NO: 1986690 - RNA, 19 nt, Artificial Sequence
  Description of Artificial Sequence: Synthetic oligonucleotide
  Sense strand starting at position 2975 of SEQ ID NO: 1880694
cuuggaauuaucugaccgu

SEQ ID NO: 1986691 - RNA, 19 nt, Artificial Sequence
  Description of Artificial Sequence: Synthetic oligonucleotide
  Antisense strand to SEQ ID NO: 1986690
acggucagauaauuccaag

SEQ ID NO: 1986692 - RNA, 19 nt, Artificial Sequence
  Description of Artificial Sequence: Synthetic oligonucleotide
  Sense strand starting at position 2978 of SEQ ID NO: 1880694
ggaauuaucugaccgugaa

SEQ ID NO: 1986693 - RNA, 19 nt, Artificial Sequence
  Description of Artificial Sequence: Synthetic oligonucleotide
  Antisense strand to SEQ ID NO: 1986692
uucacggucagauaauucc

SEQ ID NO: 1986694 - RNA, 19 nt, Artificial Sequence
  Description of Artificial Sequence: Synthetic oligonucleotide
  Sense strand starting at position 2979 of SEQ ID NO: 1880694
gaauuaucugaccgugaac

SEQ ID NO: 1986695 - RNA, 19 nt, Artificial Sequence
  Description of Artificial Sequence: Synthetic oligonucleotide
  Antisense strand to SEQ ID NO: 1986694
guucacggucagauaauuc

SEQ ID NO: 1986696 - RNA, 19 nt, Artificial Sequence
  Description of Artificial Sequence: Synthetic oligonucleotide
  Sense strand starting at position 2981 of SEQ ID NO: 1880694
auuaucugaccgugaacuu

SEQ ID NO: 1986697 - RNA, 19 nt, Artificial Sequence
  Description of Artificial Sequence: Synthetic oligonucleotide
  Antisense strand to SEQ ID NO: 1986696
aaguucacggucagauaau

SEQ ID NO: 1986698 - RNA, 19 nt, Artificial Sequence
  Description of Artificial Sequence: Synthetic oligonucleotide
  Sense strand starting at position 2990 of SEQ ID NO: 1880694
ccgugaacuuccucuucua

SEQ ID NO: 1986699 - RNA, 19 nt, Artificial Sequence
  Description of Artificial Sequence: Synthetic oligonucleotide
  Antisense strand to SEQ ID NO: 1986698
uagaagaggaaguucacgg

SEQ ID NO: 1986700 - RNA, 19 nt, Artificial Sequence
  Description of Artificial Sequence: Synthetic oligonucleotide
  Sense strand starting at position 3348 of SEQ ID NO: 1880694
aggguagauuuguguggaa

SEQ ID NO: 1986701 - RNA, 19 nt, Artificial Sequence
  Description of Artificial Sequence: Synthetic oligonucleotide
  Antisense strand to SEQ ID NO: 1986700
uuccacacaaaucuacccu

SEQ ID NO: 1986702 - RNA, 19 nt, Artificial Sequence
  Description of Artificial Sequence: Synthetic oligonucleotide
  Sense strand starting at position 3524 of SEQ ID NO: 1880694
augccugguuccucagaaa

SEQ ID NO: 1986703 - RNA, 19 nt, Artificial Sequence
  Description of Artificial Sequence: Synthetic oligonucleotide
  Antisense strand to SEQ ID NO: 1986702
uuucugaggaaccaggcau

SEQ ID NO: 1986704 - RNA, 19 nt, Artificial Sequence
  Description of Artificial Sequence: Synthetic oligonucleotide
  Sense strand starting at position 3593 of SEQ ID NO: 1880694
acaacuggauuggaagaaa

SEQ ID NO: 1986705 - RNA, 19 nt, Artificial Sequence
  Description of Artificial Sequence: Synthetic oligonucleotide
  Antisense strand to SEQ ID NO: 1986704
uuucuuccaauccaguugu

SEQ ID NO: 1986706 - RNA, 19 nt, Artificial Sequence
  Description of Artificial Sequence: Synthetic oligonucleotide
  Sense strand starting at position 3620 of SEQ ID NO: 1880694
gcaucaucucagcgaggag

SEQ ID NO: 1986707 - RNA, 19 nt, Artificial Sequence
  Description of Artificial Sequence: Synthetic oligonucleotide
  Antisense strand to SEQ ID NO: 1986706
cuccucgcugagaugaugc

SEQ ID NO: 1986708 - RNA, 19 nt, Artificial Sequence
  Description of Artificial Sequence: Synthetic oligonucleotide
  Sense strand starting at position 3892 of SEQ ID NO: 1880694
ugccuucugucauuuggaa

SEQ ID NO: 1986709 - RNA, 19 nt, Artificial Sequence
  Description of Artificial Sequence: Synthetic oligonucleotide
  Antisense strand to SEQ ID NO: 1986708
uuccaaaugacagaaggca

SEQ ID NO: 1986710 - RNA, 19 nt, Artificial Sequence
  Description of Artificial Sequence: Synthetic oligonucleotide
  Sense strand starting at position 3932 of SEQ ID NO: 1880694
ggcuucuuaacugauucga

SEQ ID NO: 1986711 - RNA, 19 nt, Artificial Sequence
  Description of Artificial Sequence: Synthetic oligonucleotide
  Antisense strand to SEQ ID NO: 1986710
ucgaaucaguuaagaagcc

SEQ ID NO: 1986712 - RNA, 19 nt, Artificial Sequence
  Description of Artificial Sequence: Synthetic oligonucleotide
  Sense strand starting at position 3934 of SEQ ID NO: 1880694
cuucuuaacugauucgagu

SEQ ID NO: 1986713 - RNA, 19 nt, Artificial Sequence
  Description of Artificial Sequence: Synthetic oligonucleotide
  Antisense strand to SEQ ID NO: 1986712
acucgaaucaguuaagaag

SEQ ID NO: 1986714 - RNA, 19 nt, Artificial Sequence
  Description of Artificial Sequence: Synthetic oligonucleotide
  Sense strand starting at position 3940 of SEQ ID NO: 1880694
aacugauucgagugcuuac

SEQ ID NO: 1986715 - RNA, 19 nt, Artificial Sequence
  Description of Artificial Sequence: Synthetic oligonucleotide
  Antisense strand to SEQ ID NO: 1986714
guaagcacucgaaucaguu

SEQ ID NO: 1986716 - RNA, 19 nt, Artificial Sequence
  Description of Artificial Sequence: Synthetic oligonucleotide
  Sense strand starting at position 3953 of SEQ ID NO: 1880694
gcuuacaguuuaguaucaa

SEQ ID NO: 1986717 - RNA, 19 nt, Artificial Sequence
  Description of Artificial Sequence: Synthetic oligonucleotide
  Antisense strand to SEQ ID NO: 1986716
uugauacuaaacuguaagc

SEQ ID NO: 1986718 - RNA, 19 nt, Artificial Sequence
  Description of Artificial Sequence: Synthetic oligonucleotide
  Sense strand starting at position 6 of SEQ ID NO: 1880695
aggagaauccacggaugua

SEQ ID NO: 1986719 - RNA, 19 nt, Artificial Sequence
  Description of Artificial Sequence: Synthetic oligonucleotide
  Antisense strand to SEQ ID NO: 1986718
uacauccguggauucuccu

SEQ ID NO: 1986720 - RNA, 19 nt, Artificial Sequence
  Description of Artificial Sequence: Synthetic oligonucleotide
  Sense strand starting at position 117 of SEQ ID NO: 1880695
cucaguuuccgagauguca

SEQ ID NO: 1986721 - RNA, 19 nt, Artificial Sequence
  Description of Artificial Sequence: Synthetic oligonucleotide
  Antisense strand to SEQ ID NO: 1986720
ugacaucucggaaacugag

SEQ ID NO: 1986722 - RNA, 19 nt, Artificial Sequence
  Description of Artificial Sequence: Synthetic oligonucleotide
  Sense strand starting at position 119 of SEQ ID NO: 1880695
caguuuccgagaugucaga

SEQ ID NO: 1986723 - RNA, 19 nt, Artificial Sequence
  Description of Artificial Sequence: Synthetic oligonucleotide
  Antisense strand to SEQ ID NO: 1986722
ucugacaucucggaaacug

SEQ ID NO: 1986724 - RNA, 19 nt, Artificial Sequence
  Description of Artificial Sequence: Synthetic oligonucleotide
  Sense strand starting at position 391 of SEQ ID NO: 1880695
gaacaaggucuaugcaucu

SEQ ID NO: 1986725 - RNA, 19 nt, Artificial Sequence
  Description of Artificial Sequence: Synthetic oligonucleotide
  Antisense strand to SEQ ID NO: 1986724
agaugcauagaccuuguuc

SEQ ID NO: 1986726 - RNA, 19 nt, Artificial Sequence
  Description of Artificial Sequence: Synthetic oligonucleotide
  Sense strand starting at position 402 of SEQ ID NO: 1880695
augcaucugcguuagaucu

SEQ ID NO: 1986727 - RNA, 19 nt, Artificial Sequence
  Description of Artificial Sequence: Synthetic oligonucleotide
  Antisense strand to SEQ ID NO: 1986726
agaucuaacgcagaugcau

SEQ ID NO: 1986728 - RNA, 19 nt, Artificial Sequence
  Description of Artificial Sequence: Synthetic oligonucleotide
  Sense strand starting at position 855 of SEQ ID NO: 1880695
gggcuaggauucuccauua

SEQ ID NO: 1986729 - RNA, 19 nt, Artificial Sequence
  Description of Artificial Sequence: Synthetic oligonucleotide
  Antisense strand to SEQ ID NO: 1986728
uaauggagaauccuagccc

SEQ ID NO: 1986730 - RNA, 19 nt, Artificial Sequence
  Description of Artificial Sequence: Synthetic oligonucleotide
  Sense strand starting at position 877 of SEQ ID NO: 1880695
gagugagggcuuugaugug

SEQ ID NO: 1986731 - RNA, 19 nt, Artificial Sequence
  Description of Artificial Sequence: Synthetic oligonucleotide
  Antisense strand to SEQ ID NO: 1986730
cacaucaaagcccucacuc

SEQ ID NO: 1986732 - RNA, 19 nt, Artificial Sequence
  Description of Artificial Sequence: Synthetic oligonucleotide
  Sense strand starting at position 887 of SEQ ID NO: 1880695
uuugaugugaguugucuag

SEQ ID NO: 1986733 - RNA, 19 nt, Artificial Sequence
  Description of Artificial Sequence: Synthetic oligonucleotide
  Antisense strand to SEQ ID NO: 1986732
cuagacaacucacaucaaa

SEQ ID NO: 1986734 - RNA, 19 nt, Artificial Sequence
  Description of Artificial Sequence: Synthetic oligonucleotide
  Sense strand starting at position 889 of SEQ ID NO: 1880695
ugaugugaguugucuagaa

SEQ ID NO: 1986735 - RNA, 19 nt, Artificial Sequence
  Description of Artificial Sequence: Synthetic oligonucleotide
  Antisense strand to SEQ ID NO: 1986734
uucuagacaacucacauca

SEQ ID NO: 1986736 - RNA, 19 nt, Artificial Sequence
  Description of Artificial Sequence: Synthetic oligonucleotide
  Sense strand starting at position 891 of SEQ ID NO: 1880695
augugaguugucuagaaga

SEQ ID NO: 1986737 - RNA, 19 nt, Artificial Sequence
  Description of Artificial Sequence: Synthetic oligonucleotide
  Antisense strand to SEQ ID NO: 1986736
ucuucuagacaacucacau

SEQ ID NO: 1986738 - RNA, 19 nt, Artificial Sequence
  Description of Artificial Sequence: Synthetic oligonucleotide
  Sense strand starting at position 893 of SEQ ID NO: 1880695
gugaguugucuagaagagc

SEQ ID NO: 1986739 - RNA, 19 nt, Artificial Sequence
  Description of Artificial Sequence: Synthetic oligonucleotide
  Antisense strand to SEQ ID NO: 1986738
gcucuucuagacaacucac

SEQ ID NO: 1986740 - RNA, 19 nt, Artificial Sequence
  Description of Artificial Sequence: Synthetic oligonucleotide
  Sense strand starting at position 1010 of SEQ ID NO: 1880695
uguggugucaucgcucagu

SEQ ID NO: 1986741 - RNA, 19 nt, Artificial Sequence
  Description of Artificial Sequence: Synthetic oligonucleotide
  Antisense strand to SEQ ID NO: 1986740
acugagcgaugacaccaca

SEQ ID NO: 1986742 - RNA, 19 nt, Artificial Sequence
  Description of Artificial Sequence: Synthetic oligonucleotide
  Sense strand starting at position 1012 of SEQ ID NO: 1880695
uggugucaucgcucagucu

SEQ ID NO: 1986743 - RNA, 19 nt, Artificial Sequence
  Description of Artificial Sequence: Synthetic oligonucleotide
  Antisense strand to SEQ ID NO: 1986742
agacugagcgaugacacca

SEQ ID NO: 1986744 - RNA, 19 nt, Artificial Sequence
  Description of Artificial Sequence: Synthetic oligonucleotide
  Sense strand starting at position 1032 of SEQ ID NO: 1880695
caaggacguucuguuaauc

SEQ ID NO: 1986745 - RNA, 19 nt, Artificial Sequence
  Description of Artificial Sequence: Synthetic oligonucleotide
  Antisense strand to SEQ ID NO: 1986744
gauuaacagaacguccuug

SEQ ID NO: 1986746 - RNA, 19 nt, Artificial Sequence
  Description of Artificial Sequence: Synthetic oligonucleotide
  Sense strand starting at position 1076 of SEQ ID NO: 1880695
guuugucauccagauggca

SEQ ID NO: 1986747 - RNA, 19 nt, Artificial Sequence
  Description of Artificial Sequence: Synthetic oligonucleotide
  Antisense strand to SEQ ID NO: 1986746
ugccaucuggaugacaaac

SEQ ID NO: 1986748 - RNA, 19 nt, Artificial Sequence
  Description of Artificial Sequence: Synthetic oligonucleotide
  Sense strand starting at position 1566 of SEQ ID NO: 1880695
gcaaaucuguguucugaac

SEQ ID NO: 1986749 - RNA, 19 nt, Artificial Sequence
  Description of Artificial Sequence: Synthetic oligonucleotide
  Antisense strand to SEQ ID NO: 1986748
guucagaacacagauuugc

SEQ ID NO: 1986750 - RNA, 19 nt, Artificial Sequence
  Description of Artificial Sequence: Synthetic oligonucleotide
  Sense strand starting at position 1637 of SEQ ID NO: 1880695
ucagcuccucgugaauguu

SEQ ID NO: 1986751 - RNA, 19 nt, Artificial Sequence
  Description of Artificial Sequence: Synthetic oligonucleotide
  Antisense strand to SEQ ID NO: 1986750
aacauucacgaggagcuga

SEQ ID NO: 1986752 - RNA, 19 nt, Artificial Sequence
  Description of Artificial Sequence: Synthetic oligonucleotide
  Sense strand starting at position 1692 of SEQ ID NO: 1880695
cccugacguuuccucacaa

SEQ ID NO: 1986753 - RNA, 19 nt, Artificial Sequence
  Description of Artificial Sequence: Synthetic oligonucleotide
  Antisense strand to SEQ ID NO: 1986752
uugugaggaaacgucaggg

SEQ ID NO: 1986754 - RNA, 19 nt, Artificial Sequence
  Description of Artificial Sequence: Synthetic oligonucleotide
  Sense strand starting at position 1843 of SEQ ID NO: 1880695
ugccuagcucuugggacau

SEQ ID NO: 1986755 - RNA, 19 nt, Artificial Sequence
  Description of Artificial Sequence: Synthetic oligonucleotide
  Antisense strand to SEQ ID NO: 1986754
augucccaagagcuaggca

SEQ ID NO: 1986756 - RNA, 19 nt, Artificial Sequence
  Description of Artificial Sequence: Synthetic oligonucleotide
  Sense strand starting at position 2035 of SEQ ID NO: 1880695
ccacguugaagcuguauga

SEQ ID NO: 1986757 - RNA, 19 nt, Artificial Sequence
  Description of Artificial Sequence: Synthetic oligonucleotide
  Antisense strand to SEQ ID NO: 1986756
ucauacagcuucaacgugg

SEQ ID NO: 1986758 - RNA, 19 nt, Artificial Sequence
  Description of Artificial Sequence: Synthetic oligonucleotide
  Sense strand starting at position 2208 of SEQ ID NO: 1880695
agagcaacuguggguauaa

SEQ ID NO: 1986759 - RNA, 19 nt, Artificial Sequence
  Description of Artificial Sequence: Synthetic oligonucleotide
  Antisense strand to SEQ ID NO: 1986758
uuauacccacaguugcucu

SEQ ID NO: 1986760 - RNA, 19 nt, Artificial Sequence
  Description of Artificial Sequence: Synthetic oligonucleotide
  Sense strand starting at position 2210 of SEQ ID NO: 1880695
agcaacuguggguauaaca

SEQ ID NO: 1986761 - RNA, 19 nt, Artificial Sequence
  Description of Artificial Sequence: Synthetic oligonucleotide
  Antisense strand to SEQ ID NO: 1986760
uguuauacccacaguugcu

SEQ ID NO: 1986762 - RNA, 19 nt, Artificial Sequence
  Description of Artificial Sequence: Synthetic oligonucleotide
  Sense strand starting at position 2286 of SEQ ID NO: 1880695
agcagauagcagcaagaua

SEQ ID NO: 1986763 - RNA, 19 nt, Artificial Sequence
  Description of Artificial Sequence: Synthetic oligonucleotide
  Antisense strand to SEQ ID NO: 1986762
uaucuugcugcuaucugcu

SEQ ID NO: 1986764 - RNA, 19 nt, Artificial Sequence
  Description of Artificial Sequence: Synthetic oligonucleotide
  Sense strand starting at position 2312 of SEQ ID NO: 1880695
agcacauacauggguuaga

SEQ ID NO: 1986765 - RNA, 19 nt, Artificial Sequence
  Description of Artificial Sequence: Synthetic oligonucleotide
  Antisense strand to SEQ ID NO: 1986764
ucuaacccauguaugugcu

SEQ ID NO: 1986766 - RNA, 19 nt, Artificial Sequence
  Description of Artificial Sequence: Synthetic oligonucleotide
  Sense strand starting at position 2313 of SEQ ID NO: 1880695
gcacauacauggguuagau

SEQ ID NO: 1986767 - RNA, 19 nt, Artificial Sequence
  Description of Artificial Sequence: Synthetic oligonucleotide
  Antisense strand to SEQ ID NO: 1986766
aucuaacccauguaugugc

SEQ ID NO: 1986768 - RNA, 19 nt, Artificial Sequence
  Description of Artificial Sequence: Synthetic oligonucleotide
  Sense strand starting at position 2322 of SEQ ID NO: 1880695
uggguuagauggagguaaa

SEQ ID NO: 1986769 - RNA, 19 nt, Artificial Sequence
  Description of Artificial Sequence: Synthetic oligonucleotide
  Antisense strand to SEQ ID NO: 1986768
uuuaccuccaucuaaccca

SEQ ID NO: 1986770 - RNA, 19 nt, Artificial Sequence
  Description of Artificial Sequence: Synthetic oligonucleotide
  Sense strand starting at position 2323 of SEQ ID NO: 1880695
ggguuagauggagguaaau

SEQ ID NO: 1986771 - RNA, 19 nt, Artificial Sequence
  Description of Artificial Sequence: Synthetic oligonucleotide
  Antisense strand to SEQ ID NO: 1986770
auuuaccuccaucuaaccc

SEQ ID NO: 1986772 - RNA, 19 nt, Artificial Sequence
  Description of Artificial Sequence: Synthetic oligonucleotide
  Sense strand starting at position 2427 of SEQ ID NO: 1880695
uccucaucaggugaguuua

SEQ ID NO: 1986773 - RNA, 19 nt, Artificial Sequence
  Description of Artificial Sequence: Synthetic oligonucleotide
  Antisense strand to SEQ ID NO: 1986772
uaaacucaccugaugagga

SEQ ID NO: 1986774 - RNA, 19 nt, Artificial Sequence
  Description of Artificial Sequence: Synthetic oligonucleotide
  Sense strand starting at position 2435 of SEQ ID NO: 1880695
aggugaguuuaacuuccua

SEQ ID NO: 1986775 - RNA, 19 nt, Artificial Sequence
  Description of Artificial Sequence: Synthetic oligonucleotide
  Antisense strand to SEQ ID NO: 1986774
uaggaaguuaaacucaccu

SEQ ID NO: 1986776 - RNA, 19 nt, Artificial Sequence
  Description of Artificial Sequence: Synthetic oligonucleotide
  Sense strand starting at position 2742 of SEQ ID NO: 1880695
gugggugccauugaaggau

SEQ ID NO: 1986777 - RNA, 19 nt, Artificial Sequence
  Description of Artificial Sequence: Synthetic oligonucleotide
  Antisense strand to SEQ ID NO: 1986776
auccuucaauggcacccac

SEQ ID NO: 1986778 - RNA, 19 nt, Artificial Sequence
  Description of Artificial Sequence: Synthetic oligonucleotide
  Sense strand starting at position 2773 of SEQ ID NO: 1880695
agagacaucuguuccaauu

SEQ ID NO: 1986779 - RNA, 19 nt, Artificial Sequence
  Description of Artificial Sequence: Synthetic oligonucleotide
  Antisense strand to SEQ ID NO: 1986778
aauuggaacagaugucucu

SEQ ID NO: 1986780 - RNA, 19 nt, Artificial Sequence
  Description of Artificial Sequence: Synthetic oligonucleotide
  Sense strand starting at position 2775 of SEQ ID NO: 1880695
agacaucuguuccaauuug

SEQ ID NO: 1986781 - RNA, 19 nt, Artificial Sequence
  Description of Artificial Sequence: Synthetic oligonucleotide
  Antisense strand to SEQ ID NO: 1986780
caaauuggaacagaugucu

SEQ ID NO: 1986782 - RNA, 19 nt, Artificial Sequence
  Description of Artificial Sequence: Synthetic oligonucleotide
  Sense strand starting at position 2901 of SEQ ID NO: 1880695
acauguuuacagggacaca

SEQ ID NO: 1986783 - RNA, 19 nt, Artificial Sequence
  Description of Artificial Sequence: Synthetic oligonucleotide
  Antisense strand to SEQ ID NO: 1986782
ugugucccuguaaacaugu

SEQ ID NO: 1986784 - RNA, 19 nt, Artificial Sequence
  Description of Artificial Sequence: Synthetic oligonucleotide
  Sense strand starting at position 3002 of SEQ ID NO: 1880695
cgaaacauccuccaggcaa

SEQ ID NO: 1986785 - RNA, 19 nt, Artificial Sequence
  Description of Artificial Sequence: Synthetic oligonucleotide
  Antisense strand to SEQ ID NO: 1986784
uugccuggaggauguuucg

SEQ ID NO: 1986786 - RNA, 19 nt, Artificial Sequence
  Description of Artificial Sequence: Synthetic oligonucleotide
  Sense strand starting at position 3056 of SEQ ID NO: 1880695
gccgaauuaauguaguaaa

SEQ ID NO: 1986787 - RNA, 19 nt, Artificial Sequence
  Description of Artificial Sequence: Synthetic oligonucleotide
  Antisense strand to SEQ ID NO: 1986786
uuuacuacauuaauucggc

SEQ ID NO: 1986788 - RNA, 19 nt, Artificial Sequence
  Description of Artificial Sequence: Synthetic oligonucleotide
  Sense strand starting at position 3068 of SEQ ID NO: 1880695
uaguaaauucuugggucca

SEQ ID NO: 1986789 - RNA, 19 nt, Artificial Sequence
  Description of Artificial Sequence: Synthetic oligonucleotide
  Antisense strand to SEQ ID NO: 1986788
uggacccaagaauuuacua

SEQ ID NO: 1986790 - RNA, 19 nt, Artificial Sequence
  Description of Artificial Sequence: Synthetic oligonucleotide
  Sense strand starting at position 3107 of SEQ ID NO: 1880695
guggcauguacuuguagga

SEQ ID NO: 1986791 - RNA, 19 nt, Artificial Sequence
  Description of Artificial Sequence: Synthetic oligonucleotide
  Antisense strand to SEQ ID NO: 1986790
uccuacaaguacaugccac

SEQ ID NO: 1986792 - RNA, 19 nt, Artificial Sequence
  Description of Artificial Sequence: Synthetic oligonucleotide
  Sense strand starting at position 3236 of SEQ ID NO: 1880695
gcuacauagcaguaaagaa

SEQ ID NO: 1986793 - RNA, 19 nt, Artificial Sequence
  Description of Artificial Sequence: Synthetic oligonucleotide
  Antisense strand to SEQ ID NO: 1986792
uucuuuacugcuauguagc

SEQ ID NO: 1986794 - RNA, 19 nt, Artificial Sequence
  Description of Artificial Sequence: Synthetic oligonucleotide
  Sense strand starting at position 3306 of SEQ ID NO: 1880695
uuugcagugugauuugguu

SEQ ID NO: 1986795 - RNA, 19 nt, Artificial Sequence
  Description of Artificial Sequence: Synthetic oligonucleotide
  Antisense strand to SEQ ID NO: 1986794
aaccaaaucacacugcaaa

SEQ ID NO: 1986796 - RNA, 19 nt, Artificial Sequence
  Description of Artificial Sequence: Synthetic oligonucleotide
  Sense strand starting at position 3976 of SEQ ID NO: 1880695
guccuagagaucuguggca

SEQ ID NO: 1986797 - RNA, 19 nt, Artificial Sequence
  Description of Artificial Sequence: Synthetic oligonucleotide
  Antisense strand to SEQ ID NO: 1986796
ugccacagaucucuaggac

SEQ ID NO: 1986798 - RNA, 19 nt, Artificial Sequence
  Description of Artificial Sequence: Synthetic oligonucleotide
  Sense strand starting at position 1249 of SEQ ID NO: 1880696
gagagugacuguuagagac

SEQ ID NO: 1986799 - RNA, 19 nt, Artificial Sequence
  Description of Artificial Sequence: Synthetic oligonucleotide
  Antisense strand to SEQ ID NO: 1986798
gucucuaacagucacucuc

SEQ ID NO: 1986800 - RNA, 19 nt, Artificial Sequence
  Description of Artificial Sequence: Synthetic oligonucleotide
  Sense strand starting at position 1565 of SEQ ID NO: 1880696
cagcaaaucuguguucuga

SEQ ID NO: 1986801 - RNA, 19 nt, Artificial Sequence
  Description of Artificial Sequence: Synthetic oligonucleotide
  Antisense strand to SEQ ID NO: 1986800
ucagaacacagauuugcug

SEQ ID NO: 1986802 - RNA, 19 nt, Artificial Sequence
  Description of Artificial Sequence: Synthetic oligonucleotide
  Sense strand starting at position 1567 of SEQ ID NO: 1880696
gcaaaucuguguucugaac

SEQ ID NO: 1986803 - RNA, 19 nt, Artificial Sequence
  Description of Artificial Sequence: Synthetic oligonucleotide
  Antisense strand to SEQ ID NO: 1986802
guucagaacacagauuugc

SEQ ID NO: 1986804 - RNA, 19 nt, Artificial Sequence
  Description of Artificial Sequence: Synthetic oligonucleotide
  Sense strand starting at position 1634 of SEQ ID NO: 1880696
cuuaucagcuccucgugaa

SEQ ID NO: 1986805 - RNA, 19 nt, Artificial Sequence
  Description of Artificial Sequence: Synthetic oligonucleotide
  Antisense strand to SEQ ID NO: 1986804
uucacgaggagcugauaag

SEQ ID NO: 1986806 - RNA, 19 nt, Artificial Sequence
  Description of Artificial Sequence: Synthetic oligonucleotide
  Sense strand starting at position 1635 of SEQ ID NO: 1880696
uuaucagcuccucgugaau

SEQ ID NO: 1986807 - RNA, 19 nt, Artificial Sequence
  Description of Artificial Sequence: Synthetic oligonucleotide
  Antisense strand to SEQ ID NO: 1986806
auucacgaggagcugauaa

SEQ ID NO: 1986808 - RNA, 19 nt, Artificial Sequence
  Description of Artificial Sequence: Synthetic oligonucleotide
  Sense strand starting at position 1637 of SEQ ID NO: 1880696
aucagcuccucgugaaugu

SEQ ID NO: 1986809 - RNA, 19 nt, Artificial Sequence
  Description of Artificial Sequence: Synthetic oligonucleotide
  Antisense strand to SEQ ID NO: 1986808
acauucacgaggagcugau

SEQ ID NO: 1986810 - RNA, 19 nt, Artificial Sequence
  Description of Artificial Sequence: Synthetic oligonucleotide
  Sense strand starting at position 1638 of SEQ ID NO: 1880696
ucagcuccucgugaauguu

SEQ ID NO: 1986811 - RNA, 19 nt, Artificial Sequence
  Description of Artificial Sequence: Synthetic oligonucleotide
  Antisense strand to SEQ ID NO: 1986810
aacauucacgaggagcuga

SEQ ID NO: 1986812 - RNA, 19 nt, Artificial Sequence
  Description of Artificial Sequence: Synthetic oligonucleotide
  Sense strand starting at position 1693 of SEQ ID NO: 1880696
cccugacguuuccucacaa

SEQ ID NO: 1986813 - RNA, 19 nt, Artificial Sequence
  Description of Artificial Sequence: Synthetic oligonucleotide
  Antisense strand to SEQ ID NO: 1986812
uugugaggaaacgucaggg

SEQ ID NO: 1986814 - RNA, 19 nt, Artificial Sequence
  Description of Artificial Sequence: Synthetic oligonucleotide
  Sense strand starting at position 1843 of SEQ ID NO: 1880696
cugccuagcucuugggaca

SEQ ID NO: 1986815 - RNA, 19 nt, Artificial Sequence
  Description of Artificial Sequence: Synthetic oligonucleotide
  Antisense strand to SEQ ID NO: 1986814
ugucccaagagcuaggcag

SEQ ID NO: 1986816 - RNA, 19 nt, Artificial Sequence
  Description of Artificial Sequence: Synthetic oligonucleotide
  Sense strand starting at position 1844 of SEQ ID NO: 1880696
ugccuagcucuugggacau

SEQ ID NO: 1986817 - RNA, 19 nt, Artificial Sequence
  Description of Artificial Sequence: Synthetic oligonucleotide
  Antisense strand to SEQ ID NO: 1986816
augucccaagagcuaggca

SEQ ID NO: 1986818 - RNA, 19 nt, Artificial Sequence
  Description of Artificial Sequence: Synthetic oligonucleotide
  Sense strand starting at position 1993 of SEQ ID NO: 1880696
ugaggacacuucucacuca

SEQ ID NO: 1986819 - RNA, 19 nt, Artificial Sequence
  Description of Artificial Sequence: Synthetic oligonucleotide
  Antisense strand to SEQ ID NO: 1986818
ugagugagaaguguccuca

SEQ ID NO: 1986820 - RNA, 19 nt, Artificial Sequence
  Description of Artificial Sequence: Synthetic oligonucleotide
  Sense strand starting at position 2036 of SEQ ID NO: 1880696
ccacguugaagcuguauga

SEQ ID NO: 1986821 - RNA, 19 nt, Artificial Sequence
  Description of Artificial Sequence: Synthetic oligonucleotide
  Antisense strand to SEQ ID NO: 1986820
ucauacagcuucaacgugg

SEQ ID NO: 1986822 - RNA, 19 nt, Artificial Sequence
  Description of Artificial Sequence: Synthetic oligonucleotide
  Sense strand starting at position 2049 of SEQ ID NO: 1880696
guaugauggcucugcucuu

SEQ ID NO: 1986823 - RNA, 19 nt, Artificial Sequence
  Description of Artificial Sequence: Synthetic oligonucleotide
  Antisense strand to SEQ ID NO: 1986822
aagagcagagccaucauac

SEQ ID NO: 1986824 - RNA, 19 nt, Artificial Sequence
  Description of Artificial Sequence: Synthetic oligonucleotide
  Sense strand starting at position 2208 of SEQ ID NO: 1880696
aagagcaacuguggguaua

SEQ ID NO: 1986825 - RNA, 19 nt, Artificial Sequence
  Description of Artificial Sequence: Synthetic oligonucleotide
  Antisense strand to SEQ ID NO: 1986824
uauacccacaguugcucuu

SEQ ID NO: 1986826 - RNA, 19 nt, Artificial Sequence
  Description of Artificial Sequence: Synthetic oligonucleotide
  Sense strand starting at position 2209 of SEQ ID NO: 1880696
agagcaacuguggguauaa

SEQ ID NO: 1986827 - RNA, 19 nt, Artificial Sequence
  Description of Artificial Sequence: Synthetic oligonucleotide
  Antisense strand to SEQ ID NO: 1986826
uuauacccacaguugcucu

SEQ ID NO: 1986828 - RNA, 19 nt, Artificial Sequence
  Description of Artificial Sequence: Synthetic oligonucleotide
  Sense strand starting at position 2211 of SEQ ID NO: 1880696
agcaacuguggguauaaca

SEQ ID NO: 1986829 - RNA, 19 nt, Artificial Sequence
  Description of Artificial Sequence: Synthetic oligonucleotide
  Antisense strand to SEQ ID NO: 1986828
uguuauacccacaguugcu

SEQ ID NO: 1986830 - RNA, 19 nt, Artificial Sequence
  Description of Artificial Sequence: Synthetic oligonucleotide
  Sense strand starting at position 2264 of SEQ ID NO: 1880696
gagcuuacauuugagagau

SEQ ID NO: 1986831 - RNA, 19 nt, Artificial Sequence
  Description of Artificial Sequence: Synthetic oligonucleotide
  Antisense strand to SEQ ID NO: 1986830
aucucucaaauguaagcuc

SEQ ID NO: 1986832 - RNA, 19 nt, Artificial Sequence
  Description of Artificial Sequence: Synthetic oligonucleotide
  Sense strand starting at position 2266 of SEQ ID NO: 1880696
gcuuacauuugagagauaa

SEQ ID NO: 1986833 - RNA, 19 nt, Artificial Sequence
  Description of Artificial Sequence: Synthetic oligonucleotide
  Antisense strand to SEQ ID NO: 1986832
uuaucucucaaauguaagc

SEQ ID NO: 1986834 - RNA, 19 nt, Artificial Sequence
  Description of Artificial Sequence: Synthetic oligonucleotide
  Sense strand starting at position 2287 of SEQ ID NO: 1880696
agcagauagcagcaagaua

SEQ ID NO: 1986835 - RNA, 19 nt, Artificial Sequence
  Description of Artificial Sequence: Synthetic oligonucleotide
  Antisense strand to SEQ ID NO: 1986834
uaucuugcugcuaucugcu

SEQ ID NO: 1986836 - RNA, 19 nt, Artificial Sequence
  Description of Artificial Sequence: Synthetic oligonucleotide
  Sense strand starting at position 2313 of SEQ ID NO: 1880696
agcacauacauggguuaga

SEQ ID NO: 1986837 - RNA, 19 nt, Artificial Sequence
  Description of Artificial Sequence: Synthetic oligonucleotide
  Antisense strand to SEQ ID NO: 1986836
ucuaacccauguaugugcu

SEQ ID NO: 1986838 - RNA, 19 nt, Artificial Sequence
  Description of Artificial Sequence: Synthetic oligonucleotide
  Sense strand starting at position 2314 of SEQ ID NO: 1880696
gcacauacauggguuagau

SEQ ID NO: 1986839 - RNA, 19 nt, Artificial Sequence
  Description of Artificial Sequence: Synthetic oligonucleotide
  Antisense strand to SEQ ID NO: 1986838
aucuaacccauguaugugc

SEQ ID NO: 1986840 - RNA, 19 nt, Artificial Sequence
  Description of Artificial Sequence: Synthetic oligonucleotide
  Sense strand starting at position 2323 of SEQ ID NO: 1880696
uggguuagauggagguaaa

SEQ ID NO: 1986841 - RNA, 19 nt, Artificial Sequence
  Description of Artificial Sequence: Synthetic oligonucleotide
  Antisense strand to SEQ ID NO: 1986840
uuuaccuccaucuaaccca

SEQ ID NO: 1986842 - RNA, 19 nt, Artificial Sequence
  Description of Artificial Sequence: Synthetic oligonucleotide
  Sense strand starting at position 2324 of SEQ ID NO: 1880696
ggguuagauggagguaaau

SEQ ID NO: 1986843 - RNA, 19 nt, Artificial Sequence
  Description of Artificial Sequence: Synthetic oligonucleotide
  Antisense strand to SEQ ID NO: 1986842
auuuaccuccaucuaaccc

SEQ ID NO: 1986844 - RNA, 19 nt, Artificial Sequence
  Description of Artificial Sequence: Synthetic oligonucleotide
  Sense strand starting at position 2428 of SEQ ID NO: 1880696
uccucaucaggugaguuua

SEQ ID NO: 1986845 - RNA, 19 nt, Artificial Sequence
  Description of Artificial Sequence: Synthetic oligonucleotide
  Antisense strand to SEQ ID NO: 1986844
uaaacucaccugaugagga

SEQ ID NO: 1986846 - RNA, 19 nt, Artificial Sequence
  Description of Artificial Sequence: Synthetic oligonucleotide
  Sense strand starting at position 2436 of SEQ ID NO: 1880696
aggugaguuuaacuuccua

SEQ ID NO: 1986847 - RNA, 19 nt, Artificial Sequence
  Description of Artificial Sequence: Synthetic oligonucleotide
  Antisense strand to SEQ ID NO: 1986846
uaggaaguuaaacucaccu

SEQ ID NO: 1986848 - RNA, 19 nt, Artificial Sequence
  Description of Artificial Sequence: Synthetic oligonucleotide
  Sense strand starting at position 2743 of SEQ ID NO: 1880696
gugggugccauugaaggau

SEQ ID NO: 1986849 - RNA, 19 nt, Artificial Sequence
  Description of Artificial Sequence: Synthetic oligonucleotide
  Antisense strand to SEQ ID NO: 1986848
auccuucaauggcacccac

SEQ ID NO: 1986850 - RNA, 19 nt, Artificial Sequence
  Description of Artificial Sequence: Synthetic oligonucleotide
  Sense strand starting at position 2774 of SEQ ID NO: 1880696
agagacaucuguuccaauu

SEQ ID NO: 1986851 - RNA, 19 nt, Artificial Sequence
  Description of Artificial Sequence: Synthetic oligonucleotide
  Antisense strand to SEQ ID NO: 1986850
aauuggaacagaugucucu

SEQ ID NO: 1986852 - RNA, 19 nt, Artificial Sequence
  Description of Artificial Sequence: Synthetic oligonucleotide
  Sense strand starting at position 2776 of SEQ ID NO: 1880696
agacaucuguuccaauuug

SEQ ID NO: 1986853 - RNA, 19 nt, Artificial Sequence
  Description of Artificial Sequence: Synthetic oligonucleotide
  Antisense strand to SEQ ID NO: 1986852
caaauuggaacagaugucu

SEQ ID NO: 1986854 - RNA, 19 nt, Artificial Sequence
  Description of Artificial Sequence: Synthetic oligonucleotide
  Sense strand starting at position 2902 of SEQ ID NO: 1880696
acauguuuacagggacaca

SEQ ID NO: 1986855 - RNA, 19 nt, Artificial Sequence
  Description of Artificial Sequence: Synthetic oligonucleotide
  Antisense strand to SEQ ID NO: 1986854
ugugucccuguaaacaugu

SEQ ID NO: 1986856 - RNA, 19 nt, Artificial Sequence
  Description of Artificial Sequence: Synthetic oligonucleotide
  Sense strand starting at position 3003 of SEQ ID NO: 1880696
cgaaacauccuccaggcaa

SEQ ID NO: 1986857 - RNA, 19 nt, Artificial Sequence
  Description of Artificial Sequence: Synthetic oligonucleotide
  Antisense strand to SEQ ID NO: 1986856
uugccuggaggauguuucg

SEQ ID NO: 1986858 - RNA, 19 nt, Artificial Sequence
  Description of Artificial Sequence: Synthetic oligonucleotide
  Sense strand starting at position 3237 of SEQ ID NO: 1880696
gcuacauagcaguaaagaa

SEQ ID NO: 1986859 - RNA, 19 nt, Artificial Sequence
  Description of Artificial Sequence: Synthetic oligonucleotide
  Antisense strand to SEQ ID NO: 1986858
uucuuuacugcuauguagc

SEQ ID NO: 1986860 - RNA, 19 nt, Artificial Sequence
  Description of Artificial Sequence: Synthetic oligonucleotide
  Sense strand starting at position 3307 of SEQ ID NO: 1880696
uuugcagugugauuugguu

SEQ ID NO: 1986861 - RNA, 19 nt, Artificial Sequence
  Description of Artificial Sequence: Synthetic oligonucleotide
  Antisense strand to SEQ ID NO: 1986860
aaccaaaucacacugcaaa

SEQ ID NO: 1986862 - RNA, 19 nt, Artificial Sequence
  Description of Artificial Sequence: Synthetic oligonucleotide
  Sense strand starting at position 3686 of SEQ ID NO: 1880696
ggagucaggcacugcuaua

SEQ ID NO: 1986863 - RNA, 19 nt, Artificial Sequence
  Description of Artificial Sequence: Synthetic oligonucleotide
  Antisense strand to SEQ ID NO: 1986862
uauagcagugccugacucc

SEQ ID NO: 1986864 - RNA, 19 nt, Artificial Sequence
  Description of Artificial Sequence: Synthetic oligonucleotide
  Sense strand starting at position 3825 of SEQ ID NO: 1880696
guugaaugauucugaccaa

SEQ ID NO: 1986865 - RNA, 19 nt, Artificial Sequence
  Description of Artificial Sequence: Synthetic oligonucleotide
  Antisense strand to SEQ ID NO: 1986864
uuggucagaaucauucaac

SEQ ID NO: 1986866 - RNA, 19 nt, Artificial Sequence
  Description of Artificial Sequence: Synthetic oligonucleotide
  Sense strand starting at position 3977 of SEQ ID NO: 1880696
guccuagagaucuguggca

SEQ ID NO: 1986867 - RNA, 19 nt, Artificial Sequence
  Description of Artificial Sequence: Synthetic oligonucleotide
  Antisense strand to SEQ ID NO: 1986866
ugccacagaucucuaggac

SEQ ID NO: 1986868 - RNA, 19 nt, Artificial Sequence
  Description of Artificial Sequence: Synthetic oligonucleotide
  Sense strand starting at position 6 of SEQ ID NO: 1880697
aggagaauccacggaugua

SEQ ID NO: 1986869 - RNA, 19 nt, Artificial Sequence
  Description of Artificial Sequence: Synthetic oligonucleotide
  Antisense strand to SEQ ID NO: 1986868
uacauccguggauucuccu

SEQ ID NO: 1986870 - RNA, 19 nt, Artificial Sequence
  Description of Artificial Sequence: Synthetic oligonucleotide
  Sense strand starting at position 117 of SEQ ID NO: 1880697
cucaguuuccgagauguca

SEQ ID NO: 1986871 - RNA, 19 nt, Artificial Sequence
  Description of Artificial Sequence: Synthetic oligonucleotide
  Antisense strand to SEQ ID NO: 1986870
ugacaucucggaaacugag

SEQ ID NO: 1986872 - RNA, 19 nt, Artificial Sequence
  Description of Artificial Sequence: Synthetic oligonucleotide
  Sense strand starting at position 119 of SEQ ID NO: 1880697
caguuuccgagaugucaga

SEQ ID NO: 1986873 - RNA, 19 nt, Artificial Sequence
  Description of Artificial Sequence: Synthetic oligonucleotide
  Antisense strand to SEQ ID NO: 1986872
ucugacaucucggaaacug

SEQ ID NO: 1986874 - RNA, 19 nt, Artificial Sequence
  Description of Artificial Sequence: Synthetic oligonucleotide
  Sense strand starting at position 391 of SEQ ID NO: 1880697
gaacaaggucuaugcaucu

SEQ ID NO: 1986875 - RNA, 19 nt, Artificial Sequence
  Description of Artificial Sequence: Synthetic oligonucleotide
  Antisense strand to SEQ ID NO: 1986874
agaugcauagaccuuguuc

SEQ ID NO: 1986876 - RNA, 19 nt, Artificial Sequence
  Description of Artificial Sequence: Synthetic oligonucleotide
  Sense strand starting at position 402 of SEQ ID NO: 1880697
augcaucugcguuagaucu

SEQ ID NO: 1986877 - RNA, 19 nt, Artificial Sequence
  Description of Artificial Sequence: Synthetic oligonucleotide
  Antisense strand to SEQ ID NO: 1986876
agaucuaacgcagaugcau

SEQ ID NO: 1986878 - RNA, 19 nt, Artificial Sequence
  Description of Artificial Sequence: Synthetic oligonucleotide
  Sense strand starting at position 855 of SEQ ID NO: 1880697
gggcuaggauucuccauua

SEQ ID NO: 1986879 - RNA, 19 nt, Artificial Sequence
  Description of Artificial Sequence: Synthetic oligonucleotide
  Antisense strand to SEQ ID NO: 1986878
uaauggagaauccuagccc

SEQ ID NO: 1986880 - RNA, 19 nt, Artificial Sequence
  Description of Artificial Sequence: Synthetic oligonucleotide
  Sense strand starting at position 877 of SEQ ID NO: 1880697
gagugagggcuuugaugug

SEQ ID NO: 1986881 - RNA, 19 nt, Artificial Sequence
  Description of Artificial Sequence: Synthetic oligonucleotide
  Antisense strand to SEQ ID NO: 1986880
cacaucaaagcccucacuc

SEQ ID NO: 1986882 - RNA, 19 nt, Artificial Sequence
  Description of Artificial Sequence: Synthetic oligonucleotide
  Sense strand starting at position 887 of SEQ ID NO: 1880697
uuugaugugaguugucuag

SEQ ID NO: 1986883 - RNA, 19 nt, Artificial Sequence
  Description of Artificial Sequence: Synthetic oligonucleotide
  Antisense strand to SEQ ID NO: 1986882
cuagacaacucacaucaaa

SEQ ID NO: 1986884 - RNA, 19 nt, Artificial Sequence
  Description of Artificial Sequence: Synthetic oligonucleotide
  Sense strand starting at position 889 of SEQ ID NO: 1880697
ugaugugaguugucuagaa

SEQ ID NO: 1986885 - RNA, 19 nt, Artificial Sequence
  Description of Artificial Sequence: Synthetic oligonucleotide
  Antisense strand to SEQ ID NO: 1986884
uucuagacaacucacauca

SEQ ID NO: 1986886 - RNA, 19 nt, Artificial Sequence
  Description of Artificial Sequence: Synthetic oligonucleotide
  Sense strand starting at position 891 of SEQ ID NO: 1880697
augugaguugucuagaaga

SEQ ID NO: 1986887 - RNA, 19 nt, Artificial Sequence
  Description of Artificial Sequence: Synthetic oligonucleotide
  Antisense strand to SEQ ID NO: 1986886
ucuucuagacaacucacau

SEQ ID NO: 1986888 - RNA, 19 nt, Artificial Sequence
  Description of Artificial Sequence: Synthetic oligonucleotide
  Sense strand starting at position 893 of SEQ ID NO: 1880697
gugaguugucuagaagagc

SEQ ID NO: 1986889 - RNA, 19 nt, Artificial Sequence
  Description of Artificial Sequence: Synthetic oligonucleotide
  Antisense strand to SEQ ID NO: 1986888
gcucuucuagacaacucac

SEQ ID NO: 1986890 - RNA, 19 nt, Artificial Sequence
  Description of Artificial Sequence: Synthetic oligonucleotide
  Sense strand starting at position 1010 of SEQ ID NO: 1880697
uguggugucaucgcucagu

SEQ ID NO: 1986891 - RNA, 19 nt, Artificial Sequence
  Description of Artificial Sequence: Synthetic oligonucleotide
  Antisense strand to SEQ ID NO: 1986890
acugagcgaugacaccaca

SEQ ID NO: 1986892 - RNA, 19 nt, Artificial Sequence
  Description of Artificial Sequence: Synthetic oligonucleotide
  Sense strand starting at position 1012 of SEQ ID NO: 1880697
uggugucaucgcucagucu

SEQ ID NO: 1986893 - RNA, 19 nt, Artificial Sequence
  Description of Artificial Sequence: Synthetic oligonucleotide
  Antisense strand to SEQ ID NO: 1986892
agacugagcgaugacacca

SEQ ID NO: 1986894 - RNA, 19 nt, Artificial Sequence
  Description of Artificial Sequence: Synthetic oligonucleotide
  Sense strand starting at position 1032 of SEQ ID NO: 1880697
caaggacguucuguuaauc

SEQ ID NO: 1986895 - RNA, 19 nt, Artificial Sequence
  Description of Artificial Sequence: Synthetic oligonucleotide
  Antisense strand to SEQ ID NO: 1986894
gauuaacagaacguccuug

SEQ ID NO: 1986896 - RNA, 19 nt, Artificial Sequence
  Description of Artificial Sequence: Synthetic oligonucleotide
  Sense strand starting at position 1076 of SEQ ID NO: 1880697
guuugucauccagauggca

SEQ ID NO: 1986897 - RNA, 19 nt, Artificial Sequence
  Description of Artificial Sequence: Synthetic oligonucleotide
  Antisense strand to SEQ ID NO: 1986896
ugccaucuggaugacaaac

SEQ ID NO: 1986898 - RNA, 19 nt, Artificial Sequence
  Description of Artificial Sequence: Synthetic oligonucleotide
  Sense strand starting at position 1566 of SEQ ID NO: 1880697
gcaaaucuguguucugaac

SEQ ID NO: 1986899 - RNA, 19 nt, Artificial Sequence
  Description of Artificial Sequence: Synthetic oligonucleotide
  Antisense strand to SEQ ID NO: 1986898
guucagaacacagauuugc

SEQ ID NO: 1986900 - RNA, 19 nt, Artificial Sequence
  Description of Artificial Sequence: Synthetic oligonucleotide
  Sense strand starting at position 1637 of SEQ ID NO: 1880697
ucagcuccucgugaauguu

SEQ ID NO: 1986901 - RNA, 19 nt, Artificial Sequence
  Description of Artificial Sequence: Synthetic oligonucleotide
  Antisense strand to SEQ ID NO: 1986900
aacauucacgaggagcuga

SEQ ID NO: 1986902 - RNA, 19 nt, Artificial Sequence
  Description of Artificial Sequence: Synthetic oligonucleotide
  Sense strand starting at position 1692 of SEQ ID NO: 1880697
cccugacguuuccucacaa

SEQ ID NO: 1986903 - RNA, 19 nt, Artificial Sequence
  Description of Artificial Sequence: Synthetic oligonucleotide
  Antisense strand to SEQ ID NO: 1986902
uugugaggaaacgucaggg

SEQ ID NO: 1986904 - RNA, 19 nt, Artificial Sequence
  Description of Artificial Sequence: Synthetic oligonucleotide
  Sense strand starting at position 1843 of SEQ ID NO: 1880697
ugccuagcucuugggacau

SEQ ID NO: 1986905 - RNA, 19 nt, Artificial Sequence
  Description of Artificial Sequence: Synthetic oligonucleotide
  Antisense strand to SEQ ID NO: 1986904
augucccaagagcuaggca

SEQ ID NO: 1986906 - RNA, 19 nt, Artificial Sequence
  Description of Artificial Sequence: Synthetic oligonucleotide
  Sense strand starting at position 2035 of SEQ ID NO: 1880697
ccacguugaagcuguauga

SEQ ID NO: 1986907 - RNA, 19 nt, Artificial Sequence
  Description of Artificial Sequence: Synthetic oligonucleotide
  Antisense strand to SEQ ID NO: 1986906
ucauacagcuucaacgugg

SEQ ID NO: 1986908 - RNA, 19 nt, Artificial Sequence
  Description of Artificial Sequence: Synthetic oligonucleotide
  Sense strand starting at position 2208 of SEQ ID NO: 1880697
agagcaacuguggguauaa

SEQ ID NO: 1986909 - RNA, 19 nt, Artificial Sequence
  Description of Artificial Sequence: Synthetic oligonucleotide
  Antisense strand to SEQ ID NO: 1986908
uuauacccacaguugcucu

SEQ ID NO: 1986910 - RNA, 19 nt, Artificial Sequence
  Description of Artificial Sequence: Synthetic oligonucleotide
  Sense strand starting at position 2210 of SEQ ID NO: 1880697
agcaacuguggguauaaca

SEQ ID NO: 1986911 - RNA, 19 nt, Artificial Sequence
  Description of Artificial Sequence: Synthetic oligonucleotide
  Antisense strand to SEQ ID NO: 1986910
uguuauacccacaguugcu

SEQ ID NO: 1986912 - RNA, 19 nt, Artificial Sequence
  Description of Artificial Sequence: Synthetic oligonucleotide
  Sense strand starting at position 2286 of SEQ ID NO: 1880697
agcagauagcagcaagaua

SEQ ID NO: 1986913 - RNA, 19 nt, Artificial Sequence
  Description of Artificial Sequence: Synthetic oligonucleotide
  Antisense strand to SEQ ID NO: 1986912
uaucuugcugcuaucugcu

SEQ ID NO: 1986914 - RNA, 19 nt, Artificial Sequence
  Description of Artificial Sequence: Synthetic oligonucleotide
  Sense strand starting at position 2312 of SEQ ID NO: 1880697
agcacauacauggguuaga

SEQ ID NO: 1986915 - RNA, 19 nt, Artificial Sequence
  Description of Artificial Sequence: Synthetic oligonucleotide
  Antisense strand to SEQ ID NO: 1986914
ucuaacccauguaugugcu

SEQ ID NO: 1986916 - RNA, 19 nt, Artificial Sequence
  Description of Artificial Sequence: Synthetic oligonucleotide
  Sense strand starting at position 2313 of SEQ ID NO: 1880697
gcacauacauggguuagau

SEQ ID NO: 1986917 - RNA, 19 nt, Artificial Sequence
  Description of Artificial Sequence: Synthetic oligonucleotide
  Antisense strand to SEQ ID NO: 1986916
aucuaacccauguaugugc

SEQ ID NO: 1986918 - RNA, 19 nt, Artificial Sequence
  Description of Artificial Sequence: Synthetic oligonucleotide
  Sense strand starting at position 2322 of SEQ ID NO: 1880697
uggguuagauggagguaaa

SEQ ID NO: 1986919 - RNA, 19 nt, Artificial Sequence
  Description of Artificial Sequence: Synthetic oligonucleotide
  Antisense strand to SEQ ID NO: 1986918
uuuaccuccaucuaaccca

SEQ ID NO: 1986920 - RNA, 19 nt, Artificial Sequence
  Description of Artificial Sequence: Synthetic oligonucleotide
  Sense strand starting at position 2323 of SEQ ID NO: 1880697
ggguuagauggagguaaau

SEQ ID NO: 1986921 - RNA, 19 nt, Artificial Sequence
  Description of Artificial Sequence: Synthetic oligonucleotide
  Antisense strand to SEQ ID NO: 1986920
auuuaccuccaucuaaccc

SEQ ID NO: 1986922 - RNA, 19 nt, Artificial Sequence
  Description of Artificial Sequence: Synthetic oligonucleotide
  Sense strand starting at position 2427 of SEQ ID NO: 1880697
uccucaucaggugaguuua

SEQ ID NO: 1986923 - RNA, 19 nt, Artificial Sequence
  Description of Artificial Sequence: Synthetic oligonucleotide
  Antisense strand to SEQ ID NO: 1986922
uaaacucaccugaugagga

SEQ ID NO: 1986924 - RNA, 19 nt, Artificial Sequence
  Description of Artificial Sequence: Synthetic oligonucleotide
  Sense strand starting at position 2435 of SEQ ID NO: 1880697
aggugaguuuaacuuccua

SEQ ID NO: 1986925 - RNA, 19 nt, Artificial Sequence
  Description of Artificial Sequence: Synthetic oligonucleotide
  Antisense strand to SEQ ID NO: 1986924
uaggaaguuaaacucaccu

SEQ ID NO: 1986926 - RNA, 19 nt, Artificial Sequence
  Description of Artificial Sequence: Synthetic oligonucleotide
  Sense strand starting at position 2742 of SEQ ID NO: 1880697
gugggugccauugaaggau

SEQ ID NO: 1986927 - RNA, 19 nt, Artificial Sequence
  Description of Artificial Sequence: Synthetic oligonucleotide
  Antisense strand to SEQ ID NO: 1986926
auccuucaauggcacccac

SEQ ID NO: 1986928 - RNA, 19 nt, Artificial Sequence
  Description of Artificial Sequence: Synthetic oligonucleotide
  Sense strand starting at position 2773 of SEQ ID NO: 1880697
agagacaucuguuccaauu

SEQ ID NO: 1986929 - RNA, 19 nt, Artificial Sequence
  Description of Artificial Sequence: Synthetic oligonucleotide
  Antisense strand to SEQ ID NO: 1986928
aauuggaacagaugucucu

SEQ ID NO: 1986930 - RNA, 19 nt, Artificial Sequence
  Description of Artificial Sequence: Synthetic oligonucleotide
  Sense strand starting at position 2775 of SEQ ID NO: 1880697
agacaucuguuccaauuug

SEQ ID NO: 1986931 - RNA, 19 nt, Artificial Sequence
  Description of Artificial Sequence: Synthetic oligonucleotide
  Antisense strand to SEQ ID NO: 1986930
caaauuggaacagaugucu

SEQ ID NO: 1986932 - RNA, 19 nt, Artificial Sequence
  Description of Artificial Sequence: Synthetic oligonucleotide
  Sense strand starting at position 2901 of SEQ ID NO: 1880697
acauguuuacagggacaca

SEQ ID NO: 1986933 - RNA, 19 nt, Artificial Sequence
  Description of Artificial Sequence: Synthetic oligonucleotide
  Antisense strand to SEQ ID NO: 1986932
ugugucccuguaaacaugu

SEQ ID NO: 1986934 - RNA, 19 nt, Artificial Sequence
  Description of Artificial Sequence: Synthetic oligonucleotide
  Sense strand starting at position 3002 of SEQ ID NO: 1880697
cgaaacauccuccaggcaa

SEQ ID NO: 1986935 - RNA, 19 nt, Artificial Sequence
  Description of Artificial Sequence: Synthetic oligonucleotide
  Antisense strand to SEQ ID NO: 1986934
uugccuggaggauguuucg

SEQ ID NO: 1986936 - RNA, 19 nt, Artificial Sequence
  Description of Artificial Sequence: Synthetic oligonucleotide
  Sense strand starting at position 3056 of SEQ ID NO: 1880697
gccgaauuaauguaguaaa

SEQ ID NO: 1986937 - RNA, 19 nt, Artificial Sequence
  Description of Artificial Sequence: Synthetic oligonucleotide
  Antisense strand to SEQ ID NO: 1986936
uuuacuacauuaauucggc

SEQ ID NO: 1986938 - RNA, 19 nt, Artificial Sequence
  Description of Artificial Sequence: Synthetic oligonucleotide
  Sense strand starting at position 3068 of SEQ ID NO: 1880697
uaguaaauucuugggucca

SEQ ID NO: 1986939 - RNA, 19 nt, Artificial Sequence
  Description of Artificial Sequence: Synthetic oligonucleotide
  Antisense strand to SEQ ID NO: 1986938
uggacccaagaauuuacua

SEQ ID NO: 1986940 - RNA, 19 nt, Artificial Sequence
  Description of Artificial Sequence: Synthetic oligonucleotide
  Sense strand starting at position 3107 of SEQ ID NO: 1880697
guggcauguacuuguagga

SEQ ID NO: 1986941 - RNA, 19 nt, Artificial Sequence
  Description of Artificial Sequence: Synthetic oligonucleotide
  Antisense strand to SEQ ID NO: 1986940
uccuacaaguacaugccac

SEQ ID NO: 1986942 - RNA, 19 nt, Artificial Sequence
  Description of Artificial Sequence: Synthetic oligonucleotide
  Sense strand starting at position 3236 of SEQ ID NO: 1880697
gcuacauagcaguaaagaa

SEQ ID NO: 1986943 - RNA, 19 nt, Artificial Sequence
  Description of Artificial Sequence: Synthetic oligonucleotide
  Antisense strand to SEQ ID NO: 1986942
uucuuuacugcuauguagc

SEQ ID NO: 1986944 - RNA, 19 nt, Artificial Sequence
  Description of Artificial Sequence: Synthetic oligonucleotide
  Sense strand starting at position 3306 of SEQ ID NO: 1880697
uuugcagugugauuugguu

SEQ ID NO: 1986945 - RNA, 19 nt, Artificial Sequence
  Description of Artificial Sequence: Synthetic oligonucleotide
  Antisense strand to SEQ ID NO: 1986944
aaccaaaucacacugcaaa

SEQ ID NO: 1986946 - RNA, 19 nt, Artificial Sequence
  Description of Artificial Sequence: Synthetic oligonucleotide
  Sense strand starting at position 3976 of SEQ ID NO: 1880697
guccuagagaucuguggca

SEQ ID NO: 1986947 - RNA, 19 nt, Artificial Sequence
  Description of Artificial Sequence: Synthetic oligonucleotide
  Antisense strand to SEQ ID NO: 1986946
ugccacagaucucuaggac

SEQ ID NO: 1986948 - RNA, 19 nt, Artificial Sequence
  Description of Artificial Sequence: Synthetic oligonucleotide
  Sense strand starting at position 1249 of SEQ ID NO: 1880698
gagagugacuguuagagac

SEQ ID NO: 1986949 - RNA, 19 nt, Artificial Sequence
  Description of Artificial Sequence: Synthetic oligonucleotide
  Antisense strand to SEQ ID NO: 1986948
gucucuaacagucacucuc

SEQ ID NO: 1986950 - RNA, 19 nt, Artificial Sequence
  Description of Artificial Sequence: Synthetic oligonucleotide
  Sense strand starting at position 1565 of SEQ ID NO: 1880698
cagcaaaucuguguucuga

SEQ ID NO: 1986951 - RNA, 19 nt, Artificial Sequence
  Description of Artificial Sequence: Synthetic oligonucleotide
  Antisense strand to SEQ ID NO: 1986950
ucagaacacagauuugcug

SEQ ID NO: 1986952 - RNA, 19 nt, Artificial Sequence
  Description of Artificial Sequence: Synthetic oligonucleotide
  Sense strand starting at position 1567 of SEQ ID NO: 1880698
gcaaaucuguguucugaac

SEQ ID NO: 1986953 - RNA, 19 nt, Artificial Sequence
  Description of Artificial Sequence: Synthetic oligonucleotide
  Antisense strand to SEQ ID NO: 1986952
guucagaacacagauuugc

SEQ ID NO: 1986954 - RNA, 19 nt, Artificial Sequence
  Description of Artificial Sequence: Synthetic oligonucleotide
  Sense strand starting at position 1634 of SEQ ID NO: 1880698
cuuaucagcuccucgugaa

SEQ ID NO: 1986955 - RNA, 19 nt, Artificial Sequence
  Description of Artificial Sequence: Synthetic oligonucleotide
  Antisense strand to SEQ ID NO: 1986954
uucacgaggagcugauaag

SEQ ID NO: 1986956 - RNA, 19 nt, Artificial Sequence
  Description of Artificial Sequence: Synthetic oligonucleotide
  Sense strand starting at position 1635 of SEQ ID NO: 1880698
uuaucagcuccucgugaau

SEQ ID NO: 1986957 - RNA, 19 nt, Artificial Sequence
  Description of Artificial Sequence: Synthetic oligonucleotide
  Antisense strand to SEQ ID NO: 1986956
auucacgaggagcugauaa

SEQ ID NO: 1986958 - RNA, 19 nt, Artificial Sequence
  Description of Artificial Sequence: Synthetic oligonucleotide
  Sense strand starting at position 1637 of SEQ ID NO: 1880698
aucagcuccucgugaaugu

SEQ ID NO: 1986959 - RNA, 19 nt, Artificial Sequence
  Description of Artificial Sequence: Synthetic oligonucleotide
  Antisense strand to SEQ ID NO: 1986958
acauucacgaggagcugau

SEQ ID NO: 1986960 - RNA, 19 nt, Artificial Sequence
  Description of Artificial Sequence: Synthetic oligonucleotide
  Sense strand starting at position 1638 of SEQ ID NO: 1880698
ucagcuccucgugaauguu

SEQ ID NO: 1986961 - RNA, 19 nt, Artificial Sequence
  Description of Artificial Sequence: Synthetic oligonucleotide
  Antisense strand to SEQ ID NO: 1986960
aacauucacgaggagcuga

SEQ ID NO: 1986962 - RNA, 19 nt, Artificial Sequence
  Description of Artificial Sequence: Synthetic oligonucleotide
  Sense strand starting at position 1693 of SEQ ID NO: 1880698
cccugacguuuccucacaa

SEQ ID NO: 1986963 - RNA, 19 nt, Artificial Sequence
  Description of Artificial Sequence: Synthetic oligonucleotide
  Antisense strand to SEQ ID NO: 1986962
uugugaggaaacgucaggg

SEQ ID NO: 1986964 - RNA, 19 nt, Artificial Sequence
  Description of Artificial Sequence: Synthetic oligonucleotide
  Sense strand starting at position 1843 of SEQ ID NO: 1880698
cugccuagcucuugggaca

SEQ ID NO: 1986965 - RNA, 19 nt, Artificial Sequence
  Description of Artificial Sequence: Synthetic oligonucleotide
  Antisense strand to SEQ ID NO: 1986964
ugucccaagagcuaggcag

SEQ ID NO: 1986966 - RNA, 19 nt, Artificial Sequence
  Description of Artificial Sequence: Synthetic oligonucleotide
  Sense strand starting at position 1844 of SEQ ID NO: 1880698
ugccuagcucuugggacau

SEQ ID NO: 1986967 - RNA, 19 nt, Artificial Sequence
  Description of Artificial Sequence: Synthetic oligonucleotide
  Antisense strand to SEQ ID NO: 1986966
augucccaagagcuaggca

SEQ ID NO: 1986968 - RNA, 19 nt, Artificial Sequence
  Description of Artificial Sequence: Synthetic oligonucleotide
  Sense strand starting at position 1993 of SEQ ID NO: 1880698
ugaggacacuucucacuca

SEQ ID NO: 1986969 - RNA, 19 nt, Artificial Sequence
  Description of Artificial Sequence: Synthetic oligonucleotide
  Antisense strand to SEQ ID NO: 1986968
ugagugagaaguguccuca

SEQ ID NO: 1986970 - RNA, 19 nt, Artificial Sequence
  Description of Artificial Sequence: Synthetic oligonucleotide
  Sense strand starting at position 2036 of SEQ ID NO: 1880698
ccacguugaagcuguauga

SEQ ID NO: 1986971 - RNA, 19 nt, Artificial Sequence
  Description of Artificial Sequence: Synthetic oligonucleotide
  Antisense strand to SEQ ID NO: 1986970
ucauacagcuucaacgugg

SEQ ID NO: 1986972 - RNA, 19 nt, Artificial Sequence
  Description of Artificial Sequence: Synthetic oligonucleotide
  Sense strand starting at position 2049 of SEQ ID NO: 1880698
guaugauggcucugcucuu

SEQ ID NO: 1986973 - RNA, 19 nt, Artificial Sequence
  Description of Artificial Sequence: Synthetic oligonucleotide
  Antisense strand to SEQ ID NO: 1986972
aagagcagagccaucauac

SEQ ID NO: 1986974 - RNA, 19 nt, Artificial Sequence
  Description of Artificial Sequence: Synthetic oligonucleotide
  Sense strand starting at position 2208 of SEQ ID NO: 1880698
aagagcaacuguggguaua

SEQ ID NO: 1986975 - RNA, 19 nt, Artificial Sequence
  Description of Artificial Sequence: Synthetic oligonucleotide
  Antisense strand to SEQ ID NO: 1986974
uauacccacaguugcucuu

SEQ ID NO: 1986976 - RNA, 19 nt, Artificial Sequence
  Description of Artificial Sequence: Synthetic oligonucleotide
  Sense strand starting at position 2209 of SEQ ID NO: 1880698
agagcaacuguggguauaa

SEQ ID NO: 1986977 - RNA, 19 nt, Artificial Sequence
  Description of Artificial Sequence: Synthetic oligonucleotide
  Antisense strand to SEQ ID NO: 1986976
uuauacccacaguugcucu

SEQ ID NO: 1986978 - RNA, 19 nt, Artificial Sequence
  Description of Artificial Sequence: Synthetic oligonucleotide
  Sense strand starting at position 2211 of SEQ ID NO: 1880698
agcaacuguggguauaaca

SEQ ID NO: 1986979 - RNA, 19 nt, Artificial Sequence
  Description of Artificial Sequence: Synthetic oligonucleotide
  Antisense strand to SEQ ID NO: 1986978
uguuauacccacaguugcu

SEQ ID NO: 1986980 - RNA, 19 nt, Artificial Sequence
  Description of Artificial Sequence: Synthetic oligonucleotide
  Sense strand starting at position 2264 of SEQ ID NO: 1880698
gagcuuacauuugagagau

SEQ ID NO: 1986981 - RNA, 19 nt, Artificial Sequence
  Description of Artificial Sequence: Synthetic oligonucleotide
  Antisense strand to SEQ ID NO: 1986980
aucucucaaauguaagcuc

SEQ ID NO: 1986982 - RNA, 19 nt, Artificial Sequence
  Description of Artificial Sequence: Synthetic oligonucleotide
  Sense strand starting at position 2266 of SEQ ID NO: 1880698
gcuuacauuugagagauaa

SEQ ID NO: 1986983 - RNA, 19 nt, Artificial Sequence
  Description of Artificial Sequence: Synthetic oligonucleotide
  Antisense strand to SEQ ID NO: 1986982
uuaucucucaaauguaagc

SEQ ID NO: 1986984 - RNA, 19 nt, Artificial Sequence
  Description of Artificial Sequence: Synthetic oligonucleotide
  Sense strand starting at position 2287 of SEQ ID NO: 1880698
agcagauagcagcaagaua

SEQ ID NO: 1986985 - RNA, 19 nt, Artificial Sequence
  Description of Artificial Sequence: Synthetic oligonucleotide
  Antisense strand to SEQ ID NO: 1986984
uaucuugcugcuaucugcu

SEQ ID NO: 1986986 - RNA, 19 nt, Artificial Sequence
  Description of Artificial Sequence: Synthetic oligonucleotide
  Sense strand starting at position 2313 of SEQ ID NO: 1880698
agcacauacauggguuaga

SEQ ID NO: 1986987 - RNA, 19 nt, Artificial Sequence
  Description of Artificial Sequence: Synthetic oligonucleotide
  Antisense strand to SEQ ID NO: 1986986
ucuaacccauguaugugcu

SEQ ID NO: 1986988 - RNA, 19 nt, Artificial Sequence
  Description of Artificial Sequence: Synthetic oligonucleotide
  Sense strand starting at position 2314 of SEQ ID NO: 1880698
gcacauacauggguuagau

SEQ ID NO: 1986989 - RNA, 19 nt, Artificial Sequence
  Description of Artificial Sequence: Synthetic oligonucleotide
  Antisense strand to SEQ ID NO: 1986988
aucuaacccauguaugugc

SEQ ID NO: 1986990 - RNA, 19 nt, Artificial Sequence
  Description of Artificial Sequence: Synthetic oligonucleotide
  Sense strand starting at position 2323 of SEQ ID NO: 1880698
uggguuagauggagguaaa

SEQ ID NO: 1986991 - RNA, 19 nt, Artificial Sequence
  Description of Artificial Sequence: Synthetic oligonucleotide
  Antisense strand to SEQ ID NO: 1986990
uuuaccuccaucuaaccca

SEQ ID NO: 1986992 - RNA, 19 nt, Artificial Sequence
  Description of Artificial Sequence: Synthetic oligonucleotide
  Sense strand starting at position 2324 of SEQ ID NO: 1880698
ggguuagauggagguaaau

SEQ ID NO: 1986993 - RNA, 19 nt, Artificial Sequence
  Description of Artificial Sequence: Synthetic oligonucleotide
  Antisense strand to SEQ ID NO: 1986992
auuuaccuccaucuaaccc

SEQ ID NO: 1986994 - RNA, 19 nt, Artificial Sequence
  Description of Artificial Sequence: Synthetic oligonucleotide
  Sense strand starting at position 2428 of SEQ ID NO: 1880698
uccucaucaggugaguuua

SEQ ID NO: 1986995 - RNA, 19 nt, Artificial Sequence
  Description of Artificial Sequence: Synthetic oligonucleotide
  Antisense strand to SEQ ID NO: 1986994
uaaacucaccugaugagga

SEQ ID NO: 1986996 - RNA, 19 nt, Artificial Sequence
  Description of Artificial Sequence: Synthetic oligonucleotide
  Sense strand starting at position 2436 of SEQ ID NO: 1880698
aggugaguuuaacuuccua

SEQ ID NO: 1986997 - RNA, 19 nt, Artificial Sequence
  Description of Artificial Sequence: Synthetic oligonucleotide
  Antisense strand to SEQ ID NO: 1986996
uaggaaguuaaacucaccu

SEQ ID NO: 1986998 - RNA, 19 nt, Artificial Sequence
  Description of Artificial Sequence: Synthetic oligonucleotide
  Sense strand starting at position 2743 of SEQ ID NO: 1880698
gugggugccauugaaggau

SEQ ID NO: 1986999 - RNA, 19 nt, Artificial Sequence
  Description of Artificial Sequence: Synthetic oligonucleotide
  Antisense strand to SEQ ID NO: 1986998
auccuucaauggcacccac

SEQ ID NO: 1987000 - RNA, 19 nt, Artificial Sequence
  Description of Artificial Sequence: Synthetic oligonucleotide
  Sense strand starting at position 2774 of SEQ ID NO: 1880698
agagacaucuguuccaauu

SEQ ID NO: 1987001 - RNA, 19 nt, Artificial Sequence
  Description of Artificial Sequence: Synthetic oligonucleotide
  Antisense strand to SEQ ID NO: 1987000
aauuggaacagaugucucu

SEQ ID NO: 1987002 - RNA, 19 nt, Artificial Sequence
  Description of Artificial Sequence: Synthetic oligonucleotide
  Sense strand starting at position 2776 of SEQ ID NO: 1880698
agacaucuguuccaauuug

SEQ ID NO: 1987003 - RNA, 19 nt, Artificial Sequence
  Description of Artificial Sequence: Synthetic oligonucleotide
  Antisense strand to SEQ ID NO: 1987002
caaauuggaacagaugucu

SEQ ID NO: 1987004 - RNA, 19 nt, Artificial Sequence
  Description of Artificial Sequence: Synthetic oligonucleotide
  Sense strand starting at position 2902 of SEQ ID NO: 1880698
acauguuuacagggacaca

SEQ ID NO: 1987005 - RNA, 19 nt, Artificial Sequence
  Description of Artificial Sequence: Synthetic oligonucleotide
  Antisense strand to SEQ ID NO: 1987004
ugugucccuguaaacaugu

SEQ ID NO: 1987006 - RNA, 19 nt, Artificial Sequence
  Description of Artificial Sequence: Synthetic oligonucleotide
  Sense strand starting at position 3003 of SEQ ID NO: 1880698
cgaaacauccuccaggcaa

SEQ ID NO: 1987007 - RNA, 19 nt, Artificial Sequence
  Description of Artificial Sequence: Synthetic oligonucleotide
  Antisense strand to SEQ ID NO: 1987006
uugccuggaggauguuucg

SEQ ID NO: 1987008 - RNA, 19 nt, Artificial Sequence
  Description of Artificial Sequence: Synthetic oligonucleotide
  Sense strand starting at position 3237 of SEQ ID NO: 1880698
gcuacauagcaguaaagaa

SEQ ID NO: 1987009 - RNA, 19 nt, Artificial Sequence
  Description of Artificial Sequence: Synthetic oligonucleotide
  Antisense strand to SEQ ID NO: 1987008
uucuuuacugcuauguagc

SEQ ID NO: 1987010 - RNA, 19 nt, Artificial Sequence
  Description of Artificial Sequence: Synthetic oligonucleotide
  Sense strand starting at position 3307 of SEQ ID NO: 1880698
uuugcagugugauuugguu

SEQ ID NO: 1987011 - RNA, 19 nt, Artificial Sequence
  Description of Artificial Sequence: Synthetic oligonucleotide
  Antisense strand to SEQ ID NO: 1987010
aaccaaaucacacugcaaa

SEQ ID NO: 1987012 - RNA, 19 nt, Artificial Sequence
  Description of Artificial Sequence: Synthetic oligonucleotide
  Sense strand starting at position 3686 of SEQ ID NO: 1880698
ggagucaggcacugcuaua

SEQ ID NO: 1987013 - RNA, 19 nt, Artificial Sequence
  Description of Artificial Sequence: Synthetic oligonucleotide
  Antisense strand to SEQ ID NO: 1987012
uauagcagugccugacucc

SEQ ID NO: 1987014 - RNA, 19 nt, Artificial Sequence
  Description of Artificial Sequence: Synthetic oligonucleotide
  Sense strand starting at position 3825 of SEQ ID NO: 1880698
guugaaugauucugaccaa

SEQ ID NO: 1987015 - RNA, 19 nt, Artificial Sequence
  Description of Artificial Sequence: Synthetic oligonucleotide
  Antisense strand to SEQ ID NO: 1987014
uuggucagaaucauucaac

SEQ ID NO: 1987016 - RNA, 19 nt, Artificial Sequence
  Description of Artificial Sequence: Synthetic oligonucleotide
  Sense strand starting at position 3977 of SEQ ID NO: 1880698
guccuagagaucuguggca

SEQ ID NO: 1987017 - RNA, 19 nt, Artificial Sequence
  Description of Artificial Sequence: Synthetic oligonucleotide
  Antisense strand to SEQ ID NO: 1987016
ugccacagaucucuaggac

SEQ ID NO: 1987018 - RNA, 19 nt, Artificial Sequence
  Description of Artificial Sequence: Synthetic oligonucleotide
  Sense strand starting at position 10 of SEQ ID NO: 1880699
auagauaagcauuguauag

SEQ ID NO: 1987019 - RNA, 19 nt, Artificial Sequence
  Description of Artificial Sequence: Synthetic oligonucleotide
  Antisense strand to SEQ ID NO: 1987018
cuauacaaugcuuaucuau

SEQ ID NO: 1987020 - RNA, 19 nt, Artificial Sequence
  Description of Artificial Sequence: Synthetic oligonucleotide
  Sense strand starting at position 172 of SEQ ID NO: 1880699
uggguuaucugacuuauug

SEQ ID NO: 1987021 - RNA, 19 nt, Artificial Sequence
  Description of Artificial Sequence: Synthetic oligonucleotide
  Antisense strand to SEQ ID NO: 1987020
caauaagucagauaaccca

SEQ ID NO: 1987022 - RNA, 19 nt, Artificial Sequence
  Description of Artificial Sequence: Synthetic oligonucleotide
  Sense strand starting at position 235 of SEQ ID NO: 1880699
gaauaucuuggcgauauau

SEQ ID NO: 1987023 - RNA, 19 nt, Artificial Sequence
  Description of Artificial Sequence: Synthetic oligonucleotide
  Antisense strand to SEQ ID NO: 1987022
auauaucgccaagauauuc

SEQ ID NO: 1987024 - RNA, 19 nt, Artificial Sequence
  Description of Artificial Sequence: Synthetic oligonucleotide
  Sense strand starting at position 846 of SEQ ID NO: 1880699
uuuggugauaaguaugacu

SEQ ID NO: 1987025 - RNA, 19 nt, Artificial Sequence
  Description of Artificial Sequence: Synthetic oligonucleotide
  Antisense strand to SEQ ID NO: 1987024
agucauacuuaucaccaaa

SEQ ID NO: 1987026 - RNA, 19 nt, Artificial Sequence
  Description of Artificial Sequence: Synthetic oligonucleotide
  Sense strand starting at position 848 of SEQ ID NO: 1880699
uggugauaaguaugacuuu

SEQ ID NO: 1987027 - RNA, 19 nt, Artificial Sequence
  Description of Artificial Sequence: Synthetic oligonucleotide
  Antisense strand to SEQ ID NO: 1987026
aaagucauacuuaucacca

SEQ ID NO: 1987028 - RNA, 19 nt, Artificial Sequence
  Description of Artificial Sequence: Synthetic oligonucleotide
  Sense strand starting at position 874 of SEQ ID NO: 1880699
cuuugaaaccucugcaaug

SEQ ID NO: 1987029 - RNA, 19 nt, Artificial Sequence
  Description of Artificial Sequence: Synthetic oligonucleotide
  Antisense strand to SEQ ID NO: 1987028
cauugcagagguuucaaag

SEQ ID NO: 1987030 - RNA, 19 nt, Artificial Sequence
  Description of Artificial Sequence: Synthetic oligonucleotide
  Sense strand starting at position 915 of SEQ ID NO: 1880699
auguaaauuugggaguaua

SEQ ID NO: 1987031 - RNA, 19 nt, Artificial Sequence
  Description of Artificial Sequence: Synthetic oligonucleotide
  Antisense strand to SEQ ID NO: 1987030
uauacucccaaauuuacau

SEQ ID NO: 1987032 - RNA, 19 nt, Artificial Sequence
  Description of Artificial Sequence: Synthetic oligonucleotide
  Sense strand starting at position 952 of SEQ ID NO: 1880699
cagauuggaguuugaacuu

SEQ ID NO: 1987033 - RNA, 19 nt, Artificial Sequence
  Description of Artificial Sequence: Synthetic oligonucleotide
  Antisense strand to SEQ ID NO: 1987032
aaguucaaacuccaaucug

SEQ ID NO: 1987034 - RNA, 19 nt, Artificial Sequence
  Description of Artificial Sequence: Synthetic oligonucleotide
  Sense strand starting at position 998 of SEQ ID NO: 1880699
ucuuuauuacuacgggaug

SEQ ID NO: 1987035 - RNA, 19 nt, Artificial Sequence
  Description of Artificial Sequence: Synthetic oligonucleotide
  Antisense strand to SEQ ID NO: 1987034
caucccguaguaauaaaga

SEQ ID NO: 1987036 - RNA, 19 nt, Artificial Sequence
  Description of Artificial Sequence: Synthetic oligonucleotide
  Sense strand starting at position 1001 of SEQ ID NO: 1880699
uuauuacuacgggauguuu

SEQ ID NO: 1987037 - RNA, 19 nt, Artificial Sequence
  Description of Artificial Sequence: Synthetic oligonucleotide
  Antisense strand to SEQ ID NO: 1987036
aaacaucccguaguaauaa

SEQ ID NO: 1987038 - RNA, 19 nt, Artificial Sequence
  Description of Artificial Sequence: Synthetic oligonucleotide
  Sense strand starting at position 1026 of SEQ ID NO: 1880699
ucuucuagagcuuaaguaa

SEQ ID NO: 1987039 - RNA, 19 nt, Artificial Sequence
  Description of Artificial Sequence: Synthetic oligonucleotide
  Antisense strand to SEQ ID NO: 1987038
uuacuuaagcucuagaaga

SEQ ID NO: 1987040 - RNA, 19 nt, Artificial Sequence
  Description of Artificial Sequence: Synthetic oligonucleotide
  Sense strand starting at position 1114 of SEQ ID NO: 1880699
acauuagacuuuccuaguc

SEQ ID NO: 1987041 - RNA, 19 nt, Artificial Sequence
  Description of Artificial Sequence: Synthetic oligonucleotide
  Antisense strand to SEQ ID NO: 1987040
gacuaggaaagucuaaugu

SEQ ID NO: 1987042 - RNA, 19 nt, Artificial Sequence
  Description of Artificial Sequence: Synthetic oligonucleotide
  Sense strand starting at position 1237 of SEQ ID NO: 1880699
uaagcaguuguucggauuu

SEQ ID NO: 1987043 - RNA, 19 nt, Artificial Sequence
  Description of Artificial Sequence: Synthetic oligonucleotide
  Antisense strand to SEQ ID NO: 1987042
aaauccgaacaacugcuua

SEQ ID NO: 1987044 - RNA, 19 nt, Artificial Sequence
  Description of Artificial Sequence: Synthetic oligonucleotide
  Sense strand starting at position 1292 of SEQ ID NO: 1880699
cuaagaucaccauacguau

SEQ ID NO: 1987045 - RNA, 19 nt, Artificial Sequence
  Description of Artificial Sequence: Synthetic oligonucleotide
  Antisense strand to SEQ ID NO: 1987044
auacguauggugaucuuag

SEQ ID NO: 1987046 - RNA, 19 nt, Artificial Sequence
  Description of Artificial Sequence: Synthetic oligonucleotide
  Sense strand starting at position 1295 of SEQ ID NO: 1880699
agaucaccauacguauuau

SEQ ID NO: 1987047 - RNA, 19 nt, Artificial Sequence
  Description of Artificial Sequence: Synthetic oligonucleotide
  Antisense strand to SEQ ID NO: 1987046
auaauacguauggugaucu

SEQ ID NO: 1987048 - RNA, 19 nt, Artificial Sequence
  Description of Artificial Sequence: Synthetic oligonucleotide
  Sense strand starting at position 1379 of SEQ ID NO: 1880699
uugguaacuucccucaaga

SEQ ID NO: 1987049 - RNA, 19 nt, Artificial Sequence
  Description of Artificial Sequence: Synthetic oligonucleotide
  Antisense strand to SEQ ID NO: 1987048
ucuugagggaaguuaccaa

SEQ ID NO: 1987050 - RNA, 19 nt, Artificial Sequence
  Description of Artificial Sequence: Synthetic oligonucleotide
  Sense strand starting at position 1381 of SEQ ID NO: 1880699
gguaacuucccucaagauu

SEQ ID NO: 1987051 - RNA, 19 nt, Artificial Sequence
  Description of Artificial Sequence: Synthetic oligonucleotide
  Antisense strand to SEQ ID NO: 1987050
aaucuugagggaaguuacc

SEQ ID NO: 1987052 - RNA, 19 nt, Artificial Sequence
  Description of Artificial Sequence: Synthetic oligonucleotide
  Sense strand starting at position 1460 of SEQ ID NO: 1880699
guggguaggagcuaauauu

SEQ ID NO: 1987053 - RNA, 19 nt, Artificial Sequence
  Description of Artificial Sequence: Synthetic oligonucleotide
  Antisense strand to SEQ ID NO: 1987052
aauauuagcuccuacccac

SEQ ID NO: 1987054 - RNA, 19 nt, Artificial Sequence
  Description of Artificial Sequence: Synthetic oligonucleotide
  Sense strand starting at position 1531 of SEQ ID NO: 1880699
aguauauguggugaauauu

SEQ ID NO: 1987055 - RNA, 19 nt, Artificial Sequence
  Description of Artificial Sequence: Synthetic oligonucleotide
  Antisense strand to SEQ ID NO: 1987054
aauauucaccacauauacu

SEQ ID NO: 1987056 - RNA, 19 nt, Artificial Sequence
  Description of Artificial Sequence: Synthetic oligonucleotide
  Sense strand starting at position 1925 of SEQ ID NO: 1880699
ccaagugugaaaugugaac

SEQ ID NO: 1987057 - RNA, 19 nt, Artificial Sequence
  Description of Artificial Sequence: Synthetic oligonucleotide
  Antisense strand to SEQ ID NO: 1987056
guucacauuucacacuugg

SEQ ID NO: 1987058 - RNA, 19 nt, Artificial Sequence
  Description of Artificial Sequence: Synthetic oligonucleotide
  Sense strand starting at position 2052 of SEQ ID NO: 1880699
caggaaucagcaggugaga

SEQ ID NO: 1987059 - RNA, 19 nt, Artificial Sequence
  Description of Artificial Sequence: Synthetic oligonucleotide
  Antisense strand to SEQ ID NO: 1987058
ucucaccugcugauuccug

SEQ ID NO: 1987060 - RNA, 19 nt, Artificial Sequence
  Description of Artificial Sequence: Synthetic oligonucleotide
  Sense strand starting at position 2061 of SEQ ID NO: 1880699
gcaggugagaggcaucaaa

SEQ ID NO: 1987061 - RNA, 19 nt, Artificial Sequence
  Description of Artificial Sequence: Synthetic oligonucleotide
  Antisense strand to SEQ ID NO: 1987060
uuugaugccucucaccugc

SEQ ID NO: 1987062 - RNA, 19 nt, Artificial Sequence
  Description of Artificial Sequence: Synthetic oligonucleotide
  Sense strand starting at position 2068 of SEQ ID NO: 1880699
agaggcaucaaagguuaca

SEQ ID NO: 1987063 - RNA, 19 nt, Artificial Sequence
  Description of Artificial Sequence: Synthetic oligonucleotide
  Antisense strand to SEQ ID NO: 1987062
uguaaccuuugaugccucu

SEQ ID NO: 1987064 - RNA, 19 nt, Artificial Sequence
  Description of Artificial Sequence: Synthetic oligonucleotide
  Sense strand starting at position 2129 of SEQ ID NO: 1880699
aguagcugucaacagaaua

SEQ ID NO: 1987065 - RNA, 19 nt, Artificial Sequence
  Description of Artificial Sequence: Synthetic oligonucleotide
  Antisense strand to SEQ ID NO: 1987064
uauucuguugacagcuacu

SEQ ID NO: 1987066 - RNA, 19 nt, Artificial Sequence
  Description of Artificial Sequence: Synthetic oligonucleotide
  Sense strand starting at position 2157 of SEQ ID NO: 1880699
guaugagagaauugcuuaa

SEQ ID NO: 1987067 - RNA, 19 nt, Artificial Sequence
  Description of Artificial Sequence: Synthetic oligonucleotide
  Antisense strand to SEQ ID NO: 1987066
uuaagcaauucucucauac

SEQ ID NO: 1987068 - RNA, 19 nt, Artificial Sequence
  Description of Artificial Sequence: Synthetic oligonucleotide
  Sense strand starting at position 2225 of SEQ ID NO: 1880699
ggaagcuauagugacaguu

SEQ ID NO: 1987069 - RNA, 19 nt, Artificial Sequence
  Description of Artificial Sequence: Synthetic oligonucleotide
  Antisense strand to SEQ ID NO: 1987068
aacugucacuauagcuucc

SEQ ID NO: 1987070 - RNA, 19 nt, Artificial Sequence
  Description of Artificial Sequence: Synthetic oligonucleotide
  Sense strand starting at position 2279 of SEQ ID NO: 1880699
cauguauaucuguaaugug

SEQ ID NO: 1987071 - RNA, 19 nt, Artificial Sequence
  Description of Artificial Sequence: Synthetic oligonucleotide
  Antisense strand to SEQ ID NO: 1987070
cacauuacagauauacaug

SEQ ID NO: 1987072 - RNA, 19 nt, Artificial Sequence
  Description of Artificial Sequence: Synthetic oligonucleotide
  Sense strand starting at position 2294 of SEQ ID NO: 1880699
uguggugugcuuucuuauc

SEQ ID NO: 1987073 - RNA, 19 nt, Artificial Sequence
  Description of Artificial Sequence: Synthetic oligonucleotide
  Antisense strand to SEQ ID NO: 1987072
gauaagaaagcacaccaca

SEQ ID NO: 1987074 - RNA, 19 nt, Artificial Sequence
  Description of Artificial Sequence: Synthetic oligonucleotide
  Sense strand starting at position 2414 of SEQ ID NO: 1880699
uggcaaugugaguauuaau

SEQ ID NO: 1987075 - RNA, 19 nt, Artificial Sequence
  Description of Artificial Sequence: Synthetic oligonucleotide
  Antisense strand to SEQ ID NO: 1987074
auuaauacucacauugcca

SEQ ID NO: 1987076 - RNA, 19 nt, Artificial Sequence
  Description of Artificial Sequence: Synthetic oligonucleotide
  Sense strand starting at position 2563 of SEQ ID NO: 1880699
guagaaaguuuauuacuuc

SEQ ID NO: 1987077 - RNA, 19 nt, Artificial Sequence
  Description of Artificial Sequence: Synthetic oligonucleotide
  Antisense strand to SEQ ID NO: 1987076
gaaguaauaaacuuucuac

SEQ ID NO: 1987078 - RNA, 19 nt, Artificial Sequence
  Description of Artificial Sequence: Synthetic oligonucleotide
  Sense strand starting at position 3320 of SEQ ID NO: 1880699
auagacuguuuacuuagua

SEQ ID NO: 1987079 - RNA, 19 nt, Artificial Sequence
  Description of Artificial Sequence: Synthetic oligonucleotide
  Antisense strand to SEQ ID NO: 1987078
uacuaaguaaacagucuau

SEQ ID NO: 1987080 - RNA, 19 nt, Artificial Sequence
  Description of Artificial Sequence: Synthetic oligonucleotide
  Sense strand starting at position 3506 of SEQ ID NO: 1880699
uuucuuauuggcuauuaag

SEQ ID NO: 1987081 - RNA, 19 nt, Artificial Sequence
  Description of Artificial Sequence: Synthetic oligonucleotide
  Antisense strand to SEQ ID NO: 1987080
cuuaauagccaauaagaaa

SEQ ID NO: 1987082 - RNA, 19 nt, Artificial Sequence
  Description of Artificial Sequence: Synthetic oligonucleotide
  Sense strand starting at position 3656 of SEQ ID NO: 1880699
ucaugaauauguucccgga

SEQ ID NO: 1987083 - RNA, 19 nt, Artificial Sequence
  Description of Artificial Sequence: Synthetic oligonucleotide
  Antisense strand to SEQ ID NO: 1987082
uccgggaacauauucauga

SEQ ID NO: 1987084 - RNA, 19 nt, Artificial Sequence
  Description of Artificial Sequence: Synthetic oligonucleotide
  Sense strand starting at position 3658 of SEQ ID NO: 1880699
augaauauguucccggaau

SEQ ID NO: 1987085 - RNA, 19 nt, Artificial Sequence
  Description of Artificial Sequence: Synthetic oligonucleotide
  Antisense strand to SEQ ID NO: 1987084
auuccgggaacauauucau

SEQ ID NO: 1987086 - RNA, 19 nt, Artificial Sequence
  Description of Artificial Sequence: Synthetic oligonucleotide
  Sense strand starting at position 3660 of SEQ ID NO: 1880699
gaauauguucccggaauug

SEQ ID NO: 1987087 - RNA, 19 nt, Artificial Sequence
  Description of Artificial Sequence: Synthetic oligonucleotide
  Antisense strand to SEQ ID NO: 1987086
caauuccgggaacauauuc

SEQ ID NO: 1987088 - RNA, 19 nt, Artificial Sequence
  Description of Artificial Sequence: Synthetic oligonucleotide
  Sense strand starting at position 3774 of SEQ ID NO: 1880699
ccagguaaacuugggcaaa

SEQ ID NO: 1987089 - RNA, 19 nt, Artificial Sequence
  Description of Artificial Sequence: Synthetic oligonucleotide
  Antisense strand to SEQ ID NO: 1987088
uuugcccaaguuuaccugg

SEQ ID NO: 1987090 - RNA, 19 nt, Artificial Sequence
  Description of Artificial Sequence: Synthetic oligonucleotide
  Sense strand starting at position 3776 of SEQ ID NO: 1880699
agguaaacuugggcaaagu

SEQ ID NO: 1987091 - RNA, 19 nt, Artificial Sequence
  Description of Artificial Sequence: Synthetic oligonucleotide
  Antisense strand to SEQ ID NO: 1987090
acuuugcccaaguuuaccu

SEQ ID NO: 1987092 - RNA, 19 nt, Artificial Sequence
  Description of Artificial Sequence: Synthetic oligonucleotide
  Sense strand starting at position 3805 of SEQ ID NO: 1880699
cugagaagguacucucuuu

SEQ ID NO: 1987093 - RNA, 19 nt, Artificial Sequence
  Description of Artificial Sequence: Synthetic oligonucleotide
  Antisense strand to SEQ ID NO: 1987092
aaagagaguaccuucucag

SEQ ID NO: 1987094 - RNA, 19 nt, Artificial Sequence
  Description of Artificial Sequence: Synthetic oligonucleotide
  Sense strand starting at position 3810 of SEQ ID NO: 1880699
aagguacucucuuugaaga

SEQ ID NO: 1987095 - RNA, 19 nt, Artificial Sequence
  Description of Artificial Sequence: Synthetic oligonucleotide
  Antisense strand to SEQ ID NO: 1987094
ucuucaaagagaguaccuu

SEQ ID NO: 1987096 - RNA, 19 nt, Artificial Sequence
  Description of Artificial Sequence: Synthetic oligonucleotide
  Sense strand starting at position 3811 of SEQ ID NO: 1880699
agguacucucuuugaagau

SEQ ID NO: 1987097 - RNA, 19 nt, Artificial Sequence
  Description of Artificial Sequence: Synthetic oligonucleotide
  Antisense strand to SEQ ID NO: 1987096
aucuucaaagagaguaccu

SEQ ID NO: 1987098 - RNA, 19 nt, Artificial Sequence
  Description of Artificial Sequence: Synthetic oligonucleotide
  Sense strand starting at position 324 of SEQ ID NO: 1880700
uucguuauagcuuauagau

SEQ ID NO: 1987099 - RNA, 19 nt, Artificial Sequence
  Description of Artificial Sequence: Synthetic oligonucleotide
  Antisense strand to SEQ ID NO: 1987098
aucuauaagcuauaacgaa

SEQ ID NO: 1987100 - RNA, 19 nt, Artificial Sequence
  Description of Artificial Sequence: Synthetic oligonucleotide
  Sense strand starting at position 337 of SEQ ID NO: 1880700
auagauguuucccuacauu

SEQ ID NO: 1987101 - RNA, 19 nt, Artificial Sequence
  Description of Artificial Sequence: Synthetic oligonucleotide
  Antisense strand to SEQ ID NO: 1987100
aauguagggaaacaucuau

SEQ ID NO: 1987102 - RNA, 19 nt, Artificial Sequence
  Description of Artificial Sequence: Synthetic oligonucleotide
  Sense strand starting at position 396 of SEQ ID NO: 1880700
uuucuuuagugauuugcuu

SEQ ID NO: 1987103 - RNA, 19 nt, Artificial Sequence
  Description of Artificial Sequence: Synthetic oligonucleotide
  Antisense strand to SEQ ID NO: 1987102
aagcaaaucacuaaagaaa

SEQ ID NO: 1987104 - RNA, 19 nt, Artificial Sequence
  Description of Artificial Sequence: Synthetic oligonucleotide
  Sense strand starting at position 741 of SEQ ID NO: 1880700
ccucuuaaagcauguagaa

SEQ ID NO: 1987105 - RNA, 19 nt, Artificial Sequence
  Description of Artificial Sequence: Synthetic oligonucleotide
  Antisense strand to SEQ ID NO: 1987104
uucuacaugcuuuaagagg

SEQ ID NO: 1987106 - RNA, 19 nt, Artificial Sequence
  Description of Artificial Sequence: Synthetic oligonucleotide
  Sense strand starting at position 1000 of SEQ ID NO: 1880700
gauauaagauucuuguuug

SEQ ID NO: 1987107 - RNA, 19 nt, Artificial Sequence
  Description of Artificial Sequence: Synthetic oligonucleotide
  Antisense strand to SEQ ID NO: 1987106
caaacaagaaucuuauauc

SEQ ID NO: 1987108 - RNA, 19 nt, Artificial Sequence
  Description of Artificial Sequence: Synthetic oligonucleotide
  Sense strand starting at position 1084 of SEQ ID NO: 1880700
aacguuucuggugagaaau

SEQ ID NO: 1987109 - RNA, 19 nt, Artificial Sequence
  Description of Artificial Sequence: Synthetic oligonucleotide
  Antisense strand to SEQ ID NO: 1987108
auuucucaccagaaacguu

SEQ ID NO: 1987110 - RNA, 19 nt, Artificial Sequence
  Description of Artificial Sequence: Synthetic oligonucleotide
  Sense strand starting at position 1286 of SEQ ID NO: 1880700
uuaucagauuuggaaaggu

SEQ ID NO: 1987111 - RNA, 19 nt, Artificial Sequence
  Description of Artificial Sequence: Synthetic oligonucleotide
  Antisense strand to SEQ ID NO: 1987110
accuuuccaaaucugauaa

SEQ ID NO: 1987112 - RNA, 19 nt, Artificial Sequence
  Description of Artificial Sequence: Synthetic oligonucleotide
  Sense strand starting at position 1303 of SEQ ID NO: 1880700
guucuauccguuguuucuu

SEQ ID NO: 1987113 - RNA, 19 nt, Artificial Sequence
  Description of Artificial Sequence: Synthetic oligonucleotide
  Antisense strand to SEQ ID NO: 1987112
aagaaacaacggauagaac

SEQ ID NO: 1987114 - RNA, 19 nt, Artificial Sequence
  Description of Artificial Sequence: Synthetic oligonucleotide
  Sense strand starting at position 1350 of SEQ ID NO: 1880700
uccugugacuccuugauug

SEQ ID NO: 1987115 - RNA, 19 nt, Artificial Sequence
  Description of Artificial Sequence: Synthetic oligonucleotide
  Antisense strand to SEQ ID NO: 1987114
caaucaaggagucacagga

SEQ ID NO: 1987116 - RNA, 19 nt, Artificial Sequence
  Description of Artificial Sequence: Synthetic oligonucleotide
  Sense strand starting at position 1352 of SEQ ID NO: 1880700
cugugacuccuugauugug

SEQ ID NO: 1987117 - RNA, 19 nt, Artificial Sequence
  Description of Artificial Sequence: Synthetic oligonucleotide
  Antisense strand to SEQ ID NO: 1987116
cacaaucaaggagucacag

SEQ ID NO: 1987118 - RNA, 19 nt, Artificial Sequence
  Description of Artificial Sequence: Synthetic oligonucleotide
  Sense strand starting at position 1381 of SEQ ID NO: 1880700
cccuuagacucuguuuacu

SEQ ID NO: 1987119 - RNA, 19 nt, Artificial Sequence
  Description of Artificial Sequence: Synthetic oligonucleotide
  Antisense strand to SEQ ID NO: 1987118
aguaaacagagucuaaggg

SEQ ID NO: 1987120 - RNA, 19 nt, Artificial Sequence
  Description of Artificial Sequence: Synthetic oligonucleotide
  Sense strand starting at position 1415 of SEQ ID NO: 1880700
uccuucuguuccuugauuu

SEQ ID NO: 1987121 - RNA, 19 nt, Artificial Sequence
  Description of Artificial Sequence: Synthetic oligonucleotide
  Antisense strand to SEQ ID NO: 1987120
aaaucaaggaacagaagga

SEQ ID NO: 1987122 - RNA, 19 nt, Artificial Sequence
  Description of Artificial Sequence: Synthetic oligonucleotide
  Sense strand starting at position 1558 of SEQ ID NO: 1880700
uugugagguuuccuaucca

SEQ ID NO: 1987123 - RNA, 19 nt, Artificial Sequence
  Description of Artificial Sequence: Synthetic oligonucleotide
  Antisense strand to SEQ ID NO: 1987122
uggauaggaaaccucacaa

SEQ ID NO: 1987124 - RNA, 19 nt, Artificial Sequence
  Description of Artificial Sequence: Synthetic oligonucleotide
  Sense strand starting at position 1562 of SEQ ID NO: 1880700
gagguuuccuauccauuga

SEQ ID NO: 1987125 - RNA, 19 nt, Artificial Sequence
  Description of Artificial Sequence: Synthetic oligonucleotide
  Antisense strand to SEQ ID NO: 1987124
ucaauggauaggaaaccuc

SEQ ID NO: 1987126 - RNA, 19 nt, Artificial Sequence
  Description of Artificial Sequence: Synthetic oligonucleotide
  Sense strand starting at position 1893 of SEQ ID NO: 1880700
ugccaagaaucagucugaa

SEQ ID NO: 1987127 - RNA, 19 nt, Artificial Sequence
  Description of Artificial Sequence: Synthetic oligonucleotide
  Antisense strand to SEQ ID NO: 1987126
uucagacugauucuuggca

SEQ ID NO: 1987128 - RNA, 19 nt, Artificial Sequence
  Description of Artificial Sequence: Synthetic oligonucleotide
  Sense strand starting at position 1896 of SEQ ID NO: 1880700
caagaaucagucugaagug

SEQ ID NO: 1987129 - RNA, 19 nt, Artificial Sequence
  Description of Artificial Sequence: Synthetic oligonucleotide
  Antisense strand to SEQ ID NO: 1987128
cacuucagacugauucuug

SEQ ID NO: 1987130 - RNA, 19 nt, Artificial Sequence
  Description of Artificial Sequence: Synthetic oligonucleotide
  Sense strand starting at position 1903 of SEQ ID NO: 1880700
cagucugaaguguaaacuu

SEQ ID NO: 1987131 - RNA, 19 nt, Artificial Sequence
  Description of Artificial Sequence: Synthetic oligonucleotide
  Antisense strand to SEQ ID NO: 1987130
aaguuuacacuucagacug

SEQ ID NO: 1987132 - RNA, 19 nt, Artificial Sequence
  Description of Artificial Sequence: Synthetic oligonucleotide
  Sense strand starting at position 2016 of SEQ ID NO: 1880700
uucugauugucaccauaug

SEQ ID NO: 1987133 - RNA, 19 nt, Artificial Sequence
  Description of Artificial Sequence: Synthetic oligonucleotide
  Antisense strand to SEQ ID NO: 1987132
cauauggugacaaucagaa

SEQ ID NO: 1987134 - RNA, 19 nt, Artificial Sequence
  Description of Artificial Sequence: Synthetic oligonucleotide
  Sense strand starting at position 2017 of SEQ ID NO: 1880700
ucugauugucaccauaugu

SEQ ID NO: 1987135 - RNA, 19 nt, Artificial Sequence
  Description of Artificial Sequence: Synthetic oligonucleotide
  Antisense strand to SEQ ID NO: 1987134
acauauggugacaaucaga

SEQ ID NO: 1987136 - RNA, 19 nt, Artificial Sequence
  Description of Artificial Sequence: Synthetic oligonucleotide
  Sense strand starting at position 2212 of SEQ ID NO: 1880700
ccaucuuugugaccagaaa

SEQ ID NO: 1987137 - RNA, 19 nt, Artificial Sequence
  Description of Artificial Sequence: Synthetic oligonucleotide
  Antisense strand to SEQ ID NO: 1987136
uuucuggucacaaagaugg

SEQ ID NO: 1987138 - RNA, 19 nt, Artificial Sequence
  Description of Artificial Sequence: Synthetic oligonucleotide
  Sense strand starting at position 2247 of SEQ ID NO: 1880700
gagcaaagauugccgauau

SEQ ID NO: 1987139 - RNA, 19 nt, Artificial Sequence
  Description of Artificial Sequence: Synthetic oligonucleotide
  Antisense strand to SEQ ID NO: 1987138
auaucggcaaucuuugcuc

SEQ ID NO: 1987140 - RNA, 19 nt, Artificial Sequence
  Description of Artificial Sequence: Synthetic oligonucleotide
  Sense strand starting at position 2388 of SEQ ID NO: 1880700
ugguuaagugcugaaauug

SEQ ID NO: 1987141 - RNA, 19 nt, Artificial Sequence
  Description of Artificial Sequence: Synthetic oligonucleotide
  Antisense strand to SEQ ID NO: 1987140
caauuucagcacuuaacca

SEQ ID NO: 1987142 - RNA, 19 nt, Artificial Sequence
  Description of Artificial Sequence: Synthetic oligonucleotide
  Sense strand starting at position 2417 of SEQ ID NO: 1880700
aucauaauucgccaugcaa

SEQ ID NO: 1987143 - RNA, 19 nt, Artificial Sequence
  Description of Artificial Sequence: Synthetic oligonucleotide
  Antisense strand to SEQ ID NO: 1987142
uugcauggcgaauuaugau

SEQ ID NO: 1987144 - RNA, 19 nt, Artificial Sequence
  Description of Artificial Sequence: Synthetic oligonucleotide
  Sense strand starting at position 2455 of SEQ ID NO: 1880700
aagccuuuaguagauguca

SEQ ID NO: 1987145 - RNA, 19 nt, Artificial Sequence
  Description of Artificial Sequence: Synthetic oligonucleotide
  Antisense strand to SEQ ID NO: 1987144
ugacaucuacuaaaggcuu

SEQ ID NO: 1987146 - RNA, 19 nt, Artificial Sequence
  Description of Artificial Sequence: Synthetic oligonucleotide
  Sense strand starting at position 2509 of SEQ ID NO: 1880700
ccaguacaauuguucucua

SEQ ID NO: 1987147 - RNA, 19 nt, Artificial Sequence
  Description of Artificial Sequence: Synthetic oligonucleotide
  Antisense strand to SEQ ID NO: 1987146
uagagaacaauuguacugg

SEQ ID NO: 1987148 - RNA, 19 nt, Artificial Sequence
  Description of Artificial Sequence: Synthetic oligonucleotide
  Sense strand starting at position 2516 of SEQ ID NO: 1880700
aauuguucucuagguggga

SEQ ID NO: 1987149 - RNA, 19 nt, Artificial Sequence
  Description of Artificial Sequence: Synthetic oligonucleotide
  Antisense strand to SEQ ID NO: 1987148
ucccaccuagagaacaauu

SEQ ID NO: 1987150 - RNA, 19 nt, Artificial Sequence
  Description of Artificial Sequence: Synthetic oligonucleotide
  Sense strand starting at position 2517 of SEQ ID NO: 1880700
auuguucucuaggugggaa

SEQ ID NO: 1987151 - RNA, 19 nt, Artificial Sequence
  Description of Artificial Sequence: Synthetic oligonucleotide
  Antisense strand to SEQ ID NO: 1987150
uucccaccuagagaacaau

SEQ ID NO: 1987152 - RNA, 19 nt, Artificial Sequence
  Description of Artificial Sequence: Synthetic oligonucleotide
  Sense strand starting at position 2609 of SEQ ID NO: 1880700
uuuguaauauccuuugaag

SEQ ID NO: 1987153 - RNA, 19 nt, Artificial Sequence
  Description of Artificial Sequence: Synthetic oligonucleotide
  Antisense strand to SEQ ID NO: 1987152
cuucaaaggauauuacaaa

SEQ ID NO: 1987154 - RNA, 19 nt, Artificial Sequence
  Description of Artificial Sequence: Synthetic oligonucleotide
  Sense strand starting at position 2647 of SEQ ID NO: 1880700
cagcuuguucuuuagauug

SEQ ID NO: 1987155 - RNA, 19 nt, Artificial Sequence
  Description of Artificial Sequence: Synthetic oligonucleotide
  Antisense strand to SEQ ID NO: 1987154
caaucuaaagaacaagcug

SEQ ID NO: 1987156 - RNA, 19 nt, Artificial Sequence
  Description of Artificial Sequence: Synthetic oligonucleotide
  Sense strand starting at position 2680 of SEQ ID NO: 1880700
gguucucugcgguugcaua

SEQ ID NO: 1987157 - RNA, 19 nt, Artificial Sequence
  Description of Artificial Sequence: Synthetic oligonucleotide
  Antisense strand to SEQ ID NO: 1987156
uaugcaaccgcagagaacc

SEQ ID NO: 1987158 - RNA, 19 nt, Artificial Sequence
  Description of Artificial Sequence: Synthetic oligonucleotide
  Sense strand starting at position 2687 of SEQ ID NO: 1880700
ugcgguugcauaugaauuu

SEQ ID NO: 1987159 - RNA, 19 nt, Artificial Sequence
  Description of Artificial Sequence: Synthetic oligonucleotide
  Antisense strand to SEQ ID NO: 1987158
aaauucauaugcaaccgca

SEQ ID NO: 1987160 - RNA, 19 nt, Artificial Sequence
  Description of Artificial Sequence: Synthetic oligonucleotide
  Sense strand starting at position 2754 of SEQ ID NO: 1880700
ugauauggaugguauuuaa

SEQ ID NO: 1987161 - RNA, 19 nt, Artificial Sequence
  Description of Artificial Sequence: Synthetic oligonucleotide
  Antisense strand to SEQ ID NO: 1987160
uuaaauaccauccauauca

SEQ ID NO: 1987162 - RNA, 19 nt, Artificial Sequence
  Description of Artificial Sequence: Synthetic oligonucleotide
  Sense strand starting at position 2775 of SEQ ID NO: 1880700
uguggauagcuuuaaguag

SEQ ID NO: 1987163 - RNA, 19 nt, Artificial Sequence
  Description of Artificial Sequence: Synthetic oligonucleotide
  Antisense strand to SEQ ID NO: 1987162
cuacuuaaagcuauccaca

SEQ ID NO: 1987164 - RNA, 19 nt, Artificial Sequence
  Description of Artificial Sequence: Synthetic oligonucleotide
  Sense strand starting at position 2784 of SEQ ID NO: 1880700
cuuuaaguaguauggacaa

SEQ ID NO: 1987165 - RNA, 19 nt, Artificial Sequence
  Description of Artificial Sequence: Synthetic oligonucleotide
  Antisense strand to SEQ ID NO: 1987164
uuguccauacuacuuaaag

SEQ ID NO: 1987166 - RNA, 19 nt, Artificial Sequence
  Description of Artificial Sequence: Synthetic oligonucleotide
  Sense strand starting at position 2885 of SEQ ID NO: 1880700
gagaacaagucuuuagucu

SEQ ID NO: 1987167 - RNA, 19 nt, Artificial Sequence
  Description of Artificial Sequence: Synthetic oligonucleotide
  Antisense strand to SEQ ID NO: 1987166
agacuaaagacuuguucuc

SEQ ID NO: 1987168 - RNA, 19 nt, Artificial Sequence
  Description of Artificial Sequence: Synthetic oligonucleotide
  Sense strand starting at position 3218 of SEQ ID NO: 1880700
uugagauauuagcugaaua

SEQ ID NO: 1987169 - RNA, 19 nt, Artificial Sequence
  Description of Artificial Sequence: Synthetic oligonucleotide
  Antisense strand to SEQ ID NO: 1987168
uauucagcuaauaucucaa

SEQ ID NO: 1987170 - RNA, 19 nt, Artificial Sequence
  Description of Artificial Sequence: Synthetic oligonucleotide
  Sense strand starting at position 3264 of SEQ ID NO: 1880700
gugucaaagcuuuacuuuc

SEQ ID NO: 1987171 - RNA, 19 nt, Artificial Sequence
  Description of Artificial Sequence: Synthetic oligonucleotide
  Antisense strand to SEQ ID NO: 1987170
gaaaguaaagcuuugacac

SEQ ID NO: 1987172 - RNA, 19 nt, Artificial Sequence
  Description of Artificial Sequence: Synthetic oligonucleotide
  Sense strand starting at position 3371 of SEQ ID NO: 1880700
ccugguauacauuagccau

SEQ ID NO: 1987173 - RNA, 19 nt, Artificial Sequence
  Description of Artificial Sequence: Synthetic oligonucleotide
  Antisense strand to SEQ ID NO: 1987172
auggcuaauguauaccagg

SEQ ID NO: 1987174 - RNA, 19 nt, Artificial Sequence
  Description of Artificial Sequence: Synthetic oligonucleotide
  Sense strand starting at position 3443 of SEQ ID NO: 1880700
guauuugcaucuuuguaau

SEQ ID NO: 1987175 - RNA, 19 nt, Artificial Sequence
  Description of Artificial Sequence: Synthetic oligonucleotide
  Antisense strand to SEQ ID NO: 1987174
auuacaaagaugcaaauac

SEQ ID NO: 1987176 - RNA, 19 nt, Artificial Sequence
  Description of Artificial Sequence: Synthetic oligonucleotide
  Sense strand starting at position 3548 of SEQ ID NO: 1880700
gcucaauuagucuaaagau

SEQ ID NO: 1987177 - RNA, 19 nt, Artificial Sequence
  Description of Artificial Sequence: Synthetic oligonucleotide
  Antisense strand to SEQ ID NO: 1987176
aucuuuagacuaauugagc

SEQ ID NO: 1987178 - RNA, 19 nt, Artificial Sequence
  Description of Artificial Sequence: Synthetic oligonucleotide
  Sense strand starting at position 4 of SEQ ID NO: 1880701
cuggguaacuaccuacauu

SEQ ID NO: 1987179 - RNA, 19 nt, Artificial Sequence
  Description of Artificial Sequence: Synthetic oligonucleotide
  Antisense strand to SEQ ID NO: 1987178
aauguagguaguuacccag

SEQ ID NO: 1987180 - RNA, 19 nt, Artificial Sequence
  Description of Artificial Sequence: Synthetic oligonucleotide
  Sense strand starting at position 50 of SEQ ID NO: 1880701
gguaucacuuccucuacca

SEQ ID NO: 1987181 - RNA, 19 nt, Artificial Sequence
  Description of Artificial Sequence: Synthetic oligonucleotide
  Antisense strand to SEQ ID NO: 1987180
ugguagaggaagugauacc

SEQ ID NO: 1987182 - RNA, 19 nt, Artificial Sequence
  Description of Artificial Sequence: Synthetic oligonucleotide
  Sense strand starting at position 296 of SEQ ID NO: 1880701
uuacuaugugucgacacaa

SEQ ID NO: 1987183 - RNA, 19 nt, Artificial Sequence
  Description of Artificial Sequence: Synthetic oligonucleotide
  Antisense strand to SEQ ID NO: 1987182
uugugucgacacauaguaa

SEQ ID NO: 1987184 - RNA, 19 nt, Artificial Sequence
  Description of Artificial Sequence: Synthetic oligonucleotide
  Sense strand starting at position 385 of SEQ ID NO: 1880701
agcugugucugauuugcca

SEQ ID NO: 1987185 - RNA, 19 nt, Artificial Sequence
  Description of Artificial Sequence: Synthetic oligonucleotide
  Antisense strand to SEQ ID NO: 1987184
uggcaaaucagacacagcu

SEQ ID NO: 1987186 - RNA, 19 nt, Artificial Sequence
  Description of Artificial Sequence: Synthetic oligonucleotide
  Sense strand starting at position 388 of SEQ ID NO: 1880701
ugugucugauuugccauaa

SEQ ID NO: 1987187 - RNA, 19 nt, Artificial Sequence
  Description of Artificial Sequence: Synthetic oligonucleotide
  Antisense strand to SEQ ID NO: 1987186
uuauggcaaaucagacaca

SEQ ID NO: 1987188 - RNA, 19 nt, Artificial Sequence
  Description of Artificial Sequence: Synthetic oligonucleotide
  Sense strand starting at position 389 of SEQ ID NO: 1880701
gugucugauuugccauaaa

SEQ ID NO: 1987189 - RNA, 19 nt, Artificial Sequence
  Description of Artificial Sequence: Synthetic oligonucleotide
  Antisense strand to SEQ ID NO: 1987188
uuuauggcaaaucagacac

SEQ ID NO: 1987190 - RNA, 19 nt, Artificial Sequence
  Description of Artificial Sequence: Synthetic oligonucleotide
  Sense strand starting at position 432 of SEQ ID NO: 1880701
guuguacauuuaucauguu

SEQ ID NO: 1987191 - RNA, 19 nt, Artificial Sequence
  Description of Artificial Sequence: Synthetic oligonucleotide
  Antisense strand to SEQ ID NO: 1987190
aacaugauaaauguacaac

SEQ ID NO: 1987192 - RNA, 19 nt, Artificial Sequence
  Description of Artificial Sequence: Synthetic oligonucleotide
  Sense strand starting at position 459 of SEQ ID NO: 1880701
ggcucuacuggugauagau

SEQ ID NO: 1987193 - RNA, 19 nt, Artificial Sequence
  Description of Artificial Sequence: Synthetic oligonucleotide
  Antisense strand to SEQ ID NO: 1987192
aucuaucaccaguagagcc

SEQ ID NO: 1987194 - RNA, 19 nt, Artificial Sequence
  Description of Artificial Sequence: Synthetic oligonucleotide
  Sense strand starting at position 643 of SEQ ID NO: 1880701
uuagguuuaagugguuaaa

SEQ ID NO: 1987195 - RNA, 19 nt, Artificial Sequence
  Description of Artificial Sequence: Synthetic oligonucleotide
  Antisense strand to SEQ ID NO: 1987194
uuuaaccacuuaaaccuaa

SEQ ID NO: 1987196 - RNA, 19 nt, Artificial Sequence
  Description of Artificial Sequence: Synthetic oligonucleotide
  Sense strand starting at position 775 of SEQ ID NO: 1880701
aggugauauuaaguucuau

SEQ ID NO: 1987197 - RNA, 19 nt, Artificial Sequence
  Description of Artificial Sequence: Synthetic oligonucleotide
  Antisense strand to SEQ ID NO: 1987196
auagaacuuaauaucaccu

SEQ ID NO: 1987198 - RNA, 19 nt, Artificial Sequence
  Description of Artificial Sequence: Synthetic oligonucleotide
  Sense strand starting at position 811 of SEQ ID NO: 1880701
aagggaagcucucugaaca

SEQ ID NO: 1987199 - RNA, 19 nt, Artificial Sequence
  Description of Artificial Sequence: Synthetic oligonucleotide
  Antisense strand to SEQ ID NO: 1987198
uguucagagagcuucccuu

SEQ ID NO: 1987200 - RNA, 19 nt, Artificial Sequence
  Description of Artificial Sequence: Synthetic oligonucleotide
  Sense strand starting at position 812 of SEQ ID NO: 1880701
agggaagcucucugaacau

SEQ ID NO: 1987201 - RNA, 19 nt, Artificial Sequence
  Description of Artificial Sequence: Synthetic oligonucleotide
  Antisense strand to SEQ ID NO: 1987200
auguucagagagcuucccu

SEQ ID NO: 1987202 - RNA, 19 nt, Artificial Sequence
  Description of Artificial Sequence: Synthetic oligonucleotide
  Sense strand starting at position 972 of SEQ ID NO: 1880701
cugagugucucccuacaaa

SEQ ID NO: 1987203 - RNA, 19 nt, Artificial Sequence
  Description of Artificial Sequence: Synthetic oligonucleotide
  Antisense strand to SEQ ID NO: 1987202
uuuguagggagacacucag

SEQ ID NO: 1987204 - RNA, 19 nt, Artificial Sequence
  Description of Artificial Sequence: Synthetic oligonucleotide
  Sense strand starting at position 975 of SEQ ID NO: 1880701
agugucucccuacaaaucu

SEQ ID NO: 1987205 - RNA, 19 nt, Artificial Sequence
  Description of Artificial Sequence: Synthetic oligonucleotide
  Antisense strand to SEQ ID NO: 1987204
agauuuguagggagacacu

SEQ ID NO: 1987206 - RNA, 19 nt, Artificial Sequence
  Description of Artificial Sequence: Synthetic oligonucleotide
  Sense strand starting at position 1028 of SEQ ID NO: 1880701
gaaugucgucugcagagaa

SEQ ID NO: 1987207 - RNA, 19 nt, Artificial Sequence
  Description of Artificial Sequence: Synthetic oligonucleotide
  Antisense strand to SEQ ID NO: 1987206
uucucugcagacgacauuc

SEQ ID NO: 1987208 - RNA, 19 nt, Artificial Sequence
  Description of Artificial Sequence: Synthetic oligonucleotide
  Sense strand starting at position 1032 of SEQ ID NO: 1880701
gucgucugcagagaagaaa

SEQ ID NO: 1987209 - RNA, 19 nt, Artificial Sequence
  Description of Artificial Sequence: Synthetic oligonucleotide
  Antisense strand to SEQ ID NO: 1987208
uuucuucucugcagacgac

SEQ ID NO: 1987210 - RNA, 19 nt, Artificial Sequence
  Description of Artificial Sequence: Synthetic oligonucleotide
  Sense strand starting at position 1210 of SEQ ID NO: 1880701
uggaaagacuuguuuauag

SEQ ID NO: 1987211 - RNA, 19 nt, Artificial Sequence
  Description of Artificial Sequence: Synthetic oligonucleotide
  Antisense strand to SEQ ID NO: 1987210
cuauaaacaagucuuucca

SEQ ID NO: 1987212 - RNA, 19 nt, Artificial Sequence
  Description of Artificial Sequence: Synthetic oligonucleotide
  Sense strand starting at position 1337 of SEQ ID NO: 1880701
uguguugcccuccugcaua

SEQ ID NO: 1987213 - RNA, 19 nt, Artificial Sequence
  Description of Artificial Sequence: Synthetic oligonucleotide
  Antisense strand to SEQ ID NO: 1987212
uaugcaggagggcaacaca

SEQ ID NO: 1987214 - RNA, 19 nt, Artificial Sequence
  Description of Artificial Sequence: Synthetic oligonucleotide
  Sense strand starting at position 1350 of SEQ ID NO: 1880701
ugcauaguugagggauuag

SEQ ID NO: 1987215 - RNA, 19 nt, Artificial Sequence
  Description of Artificial Sequence: Synthetic oligonucleotide
  Antisense strand to SEQ ID NO: 1987214
cuaaucccucaacuaugca

SEQ ID NO: 1987216 - RNA, 19 nt, Artificial Sequence
  Description of Artificial Sequence: Synthetic oligonucleotide
  Sense strand starting at position 1387 of SEQ ID NO: 1880701
cugguuaaccguuaacuga

SEQ ID NO: 1987217 - RNA, 19 nt, Artificial Sequence
  Description of Artificial Sequence: Synthetic oligonucleotide
  Antisense strand to SEQ ID NO: 1987216
ucaguuaacgguuaaccag

SEQ ID NO: 1987218 - RNA, 19 nt, Artificial Sequence
  Description of Artificial Sequence: Synthetic oligonucleotide
  Sense strand starting at position 1394 of SEQ ID NO: 1880701
accguuaacugaguaacaa

SEQ ID NO: 1987219 - RNA, 19 nt, Artificial Sequence
  Description of Artificial Sequence: Synthetic oligonucleotide
  Antisense strand to SEQ ID NO: 1987218
uuguuacucaguuaacggu

SEQ ID NO: 1987220 - RNA, 19 nt, Artificial Sequence
  Description of Artificial Sequence: Synthetic oligonucleotide
  Sense strand starting at position 1395 of SEQ ID NO: 1880701
ccguuaacugaguaacaaa

SEQ ID NO: 1987221 - RNA, 19 nt, Artificial Sequence
  Description of Artificial Sequence: Synthetic oligonucleotide
  Antisense strand to SEQ ID NO: 1987220
uuuguuacucaguuaacgg

SEQ ID NO: 1987222 - RNA, 19 nt, Artificial Sequence
  Description of Artificial Sequence: Synthetic oligonucleotide
  Sense strand starting at position 1574 of SEQ ID NO: 1880701
gggccuuggcuagaauaac

SEQ ID NO: 1987223 - RNA, 19 nt, Artificial Sequence
  Description of Artificial Sequence: Synthetic oligonucleotide
  Antisense strand to SEQ ID NO: 1987222
guuauucuagccaaggccc

SEQ ID NO: 1987224 - RNA, 19 nt, Artificial Sequence
  Description of Artificial Sequence: Synthetic oligonucleotide
  Sense strand starting at position 1708 of SEQ ID NO: 1880701
agccuugcuguguuuaguu

SEQ ID NO: 1987225 - RNA, 19 nt, Artificial Sequence
  Description of Artificial Sequence: Synthetic oligonucleotide
  Antisense strand to SEQ ID NO: 1987224
aacuaaacacagcaaggcu

SEQ ID NO: 1987226 - RNA, 19 nt, Artificial Sequence
  Description of Artificial Sequence: Synthetic oligonucleotide
  Sense strand starting at position 2133 of SEQ ID NO: 1880701
ggguuaacauuauuacaga

SEQ ID NO: 1987227 - RNA, 19 nt, Artificial Sequence
  Description of Artificial Sequence: Synthetic oligonucleotide
  Antisense strand to SEQ ID NO: 1987226
ucuguaauaauguuaaccc

SEQ ID NO: 1987228 - RNA, 19 nt, Artificial Sequence
  Description of Artificial Sequence: Synthetic oligonucleotide
  Sense strand starting at position 2301 of SEQ ID NO: 1880701
uaucaaaugggucagcuaa

SEQ ID NO: 1987229 - RNA, 19 nt, Artificial Sequence
  Description of Artificial Sequence: Synthetic oligonucleotide
  Antisense strand to SEQ ID NO: 1987228
uuagcugacccauuugaua

SEQ ID NO: 1987230 - RNA, 19 nt, Artificial Sequence
  Description of Artificial Sequence: Synthetic oligonucleotide
  Sense strand starting at position 2303 of SEQ ID NO: 1880701
ucaaaugggucagcuaaga

SEQ ID NO: 1987231 - RNA, 19 nt, Artificial Sequence
  Description of Artificial Sequence: Synthetic oligonucleotide
  Antisense strand to SEQ ID NO: 1987230
ucuuagcugacccauuuga

SEQ ID NO: 1987232 - RNA, 19 nt, Artificial Sequence
  Description of Artificial Sequence: Synthetic oligonucleotide
  Sense strand starting at position 2401 of SEQ ID NO: 1880701
gauaucuucucagcugaug

SEQ ID NO: 1987233 - RNA, 19 nt, Artificial Sequence
  Description of Artificial Sequence: Synthetic oligonucleotide
  Antisense strand to SEQ ID NO: 1987232
caucagcugagaagauauc

SEQ ID NO: 1987234 - RNA, 19 nt, Artificial Sequence
  Description of Artificial Sequence: Synthetic oligonucleotide
  Sense strand starting at position 2409 of SEQ ID NO: 1880701
cucagcugaugagucaaau

SEQ ID NO: 1987235 - RNA, 19 nt, Artificial Sequence
  Description of Artificial Sequence: Synthetic oligonucleotide
  Antisense strand to SEQ ID NO: 1987234
auuugacucaucagcugag

SEQ ID NO: 1987236 - RNA, 19 nt, Artificial Sequence
  Description of Artificial Sequence: Synthetic oligonucleotide
  Sense strand starting at position 2559 of SEQ ID NO: 1880701
ucuaucauagcauauguau

SEQ ID NO: 1987237 - RNA, 19 nt, Artificial Sequence
  Description of Artificial Sequence: Synthetic oligonucleotide
  Antisense strand to SEQ ID NO: 1987236
auacauaugcuaugauaga

SEQ ID NO: 1987238 - RNA, 19 nt, Artificial Sequence
  Description of Artificial Sequence: Synthetic oligonucleotide
  Sense strand starting at position 2779 of SEQ ID NO: 1880701
auaaaccugcuagaaguau

SEQ ID NO: 1987239 - RNA, 19 nt, Artificial Sequence
  Description of Artificial Sequence: Synthetic oligonucleotide
  Antisense strand to SEQ ID NO: 1987238
auacuucuagcagguuuau

SEQ ID NO: 1987240 - RNA, 19 nt, Artificial Sequence
  Description of Artificial Sequence: Synthetic oligonucleotide
  Sense strand starting at position 2904 of SEQ ID NO: 1880701
uaacucuuagaguguugaa

SEQ ID NO: 1987241 - RNA, 19 nt, Artificial Sequence
  Description of Artificial Sequence: Synthetic oligonucleotide
  Antisense strand to SEQ ID NO: 1987240
uucaacacucuaagaguua

SEQ ID NO: 1987242 - RNA, 19 nt, Artificial Sequence
  Description of Artificial Sequence: Synthetic oligonucleotide
  Sense strand starting at position 2958 of SEQ ID NO: 1880701
aagagaggccugcaguuau

SEQ ID NO: 1987243 - RNA, 19 nt, Artificial Sequence
  Description of Artificial Sequence: Synthetic oligonucleotide
  Antisense strand to SEQ ID NO: 1987242
auaacugcaggccucucuu

SEQ ID NO: 1987244 - RNA, 19 nt, Artificial Sequence
  Description of Artificial Sequence: Synthetic oligonucleotide
  Sense strand starting at position 3030 of SEQ ID NO: 1880701
ugcaaauaauaccuucgaa

SEQ ID NO: 1987245 - RNA, 19 nt, Artificial Sequence
  Description of Artificial Sequence: Synthetic oligonucleotide
  Antisense strand to SEQ ID NO: 1987244
uucgaagguauuauuugca

SEQ ID NO: 1987246 - RNA, 19 nt, Artificial Sequence
  Description of Artificial Sequence: Synthetic oligonucleotide
  Sense strand starting at position 3092 of SEQ ID NO: 1880701
cucugaacuuuagcaaaga

SEQ ID NO: 1987247 - RNA, 19 nt, Artificial Sequence
  Description of Artificial Sequence: Synthetic oligonucleotide
  Antisense strand to SEQ ID NO: 1987246
ucuuugcuaaaguucagag

SEQ ID NO: 1987248 - RNA, 19 nt, Artificial Sequence
  Description of Artificial Sequence: Synthetic oligonucleotide
  Sense strand starting at position 3409 of SEQ ID NO: 1880701
acauguacugucgggaaga

SEQ ID NO: 1987249 - RNA, 19 nt, Artificial Sequence
  Description of Artificial Sequence: Synthetic oligonucleotide
  Antisense strand to SEQ ID NO: 1987248
ucuucccgacaguacaugu

SEQ ID NO: 1987250 - RNA, 19 nt, Artificial Sequence
  Description of Artificial Sequence: Synthetic oligonucleotide
  Sense strand starting at position 3535 of SEQ ID NO: 1880701
ccagauuucucagaaugag

SEQ ID NO: 1987251 - RNA, 19 nt, Artificial Sequence
  Description of Artificial Sequence: Synthetic oligonucleotide
  Antisense strand to SEQ ID NO: 1987250
cucauucugagaaaucugg

SEQ ID NO: 1987252 - RNA, 19 nt, Artificial Sequence
  Description of Artificial Sequence: Synthetic oligonucleotide
  Sense strand starting at position 3577 of SEQ ID NO: 1880701
auccauaagcagggugaaa

SEQ ID NO: 1987253 - RNA, 19 nt, Artificial Sequence
  Description of Artificial Sequence: Synthetic oligonucleotide
  Antisense strand to SEQ ID NO: 1987252
uuucacccugcuuauggau

SEQ ID NO: 1987254 - RNA, 19 nt, Artificial Sequence
  Description of Artificial Sequence: Synthetic oligonucleotide
  Sense strand starting at position 3767 of SEQ ID NO: 1880701
cugaacguacccugaauua

SEQ ID NO: 1987255 - RNA, 19 nt, Artificial Sequence
  Description of Artificial Sequence: Synthetic oligonucleotide
  Antisense strand to SEQ ID NO: 1987254
uaauucaggguacguucag

SEQ ID NO: 1987256 - RNA, 19 nt, Artificial Sequence
  Description of Artificial Sequence: Synthetic oligonucleotide
  Sense strand starting at position 3793 of SEQ ID NO: 1880701
guuaaauaaggagguuuaa

SEQ ID NO: 1987257 - RNA, 19 nt, Artificial Sequence
  Description of Artificial Sequence: Synthetic oligonucleotide
  Antisense strand to SEQ ID NO: 1987256
uuaaaccuccuuauuuaac

SEQ ID NO: 1987258 - RNA, 19 nt, Artificial Sequence
  Description of Artificial Sequence: Synthetic oligonucleotide
  Sense strand starting at position 10 of SEQ ID NO: 1880702
gucucauggcaucguaaga

SEQ ID NO: 1987259 - RNA, 19 nt, Artificial Sequence
  Description of Artificial Sequence: Synthetic oligonucleotide
  Antisense strand to SEQ ID NO: 1987258
ucuuacgaugccaugagac

SEQ ID NO: 1987260 - RNA, 19 nt, Artificial Sequence
  Description of Artificial Sequence: Synthetic oligonucleotide
  Sense strand starting at position 65 of SEQ ID NO: 1880702
ccggguuucguuuaauaaa

SEQ ID NO: 1987261 - RNA, 19 nt, Artificial Sequence
  Description of Artificial Sequence: Synthetic oligonucleotide
  Antisense strand to SEQ ID NO: 1987260
uuuauuaaacgaaacccgg

SEQ ID NO: 1987262 - RNA, 19 nt, Artificial Sequence
  Description of Artificial Sequence: Synthetic oligonucleotide
  Sense strand starting at position 76 of SEQ ID NO: 1880702
uuaauaaauucgcugaaga

SEQ ID NO: 1987263 - RNA, 19 nt, Artificial Sequence
  Description of Artificial Sequence: Synthetic oligonucleotide
  Antisense strand to SEQ ID NO: 1987262
ucuucagcgaauuuauuaa

SEQ ID NO: 1987264 - RNA, 19 nt, Artificial Sequence
  Description of Artificial Sequence: Synthetic oligonucleotide
  Sense strand starting at position 77 of SEQ ID NO: 1880702
uaauaaauucgcugaagag

SEQ ID NO: 1987265 - RNA, 19 nt, Artificial Sequence
  Description of Artificial Sequence: Synthetic oligonucleotide
  Antisense strand to SEQ ID NO: 1987264
cucuucagcgaauuuauua

SEQ ID NO: 1987266 - RNA, 19 nt, Artificial Sequence
  Description of Artificial Sequence: Synthetic oligonucleotide
  Sense strand starting at position 78 of SEQ ID NO: 1880702
aauaaauucgcugaagagu

SEQ ID NO: 1987267 - RNA, 19 nt, Artificial Sequence
  Description of Artificial Sequence: Synthetic oligonucleotide
  Antisense strand to SEQ ID NO: 1987266
acucuucagcgaauuuauu

SEQ ID NO: 1987268 - RNA, 19 nt, Artificial Sequence
  Description of Artificial Sequence: Synthetic oligonucleotide
  Sense strand starting at position 86 of SEQ ID NO: 1880702
cgcugaagaguuucggcuu

SEQ ID NO: 1987269 - RNA, 19 nt, Artificial Sequence
  Description of Artificial Sequence: Synthetic oligonucleotide
  Antisense strand to SEQ ID NO: 1987268
aagccgaaacucuucagcg

SEQ ID NO: 1987270 - RNA, 19 nt, Artificial Sequence
  Description of Artificial Sequence: Synthetic oligonucleotide
  Sense strand starting at position 93 of SEQ ID NO: 1880702
gaguuucggcuuuggauuu

SEQ ID NO: 1987271 - RNA, 19 nt, Artificial Sequence
  Description of Artificial Sequence: Synthetic oligonucleotide
  Antisense strand to SEQ ID NO: 1987270
aaauccaaagccgaaacuc

SEQ ID NO: 1987272 - RNA, 19 nt, Artificial Sequence
  Description of Artificial Sequence: Synthetic oligonucleotide
  Sense strand starting at position 115 of SEQ ID NO: 1880702
cuuugaucuguuugagagg

SEQ ID NO: 1987273 - RNA, 19 nt, Artificial Sequence
  Description of Artificial Sequence: Synthetic oligonucleotide
  Antisense strand to SEQ ID NO: 1987272
ccucucaaacagaucaaag

SEQ ID NO: 1987274 - RNA, 19 nt, Artificial Sequence
  Description of Artificial Sequence: Synthetic oligonucleotide
  Sense strand starting at position 283 of SEQ ID NO: 1880702
gcgggcucugguuaucuga

SEQ ID NO: 1987275 - RNA, 19 nt, Artificial Sequence
  Description of Artificial Sequence: Synthetic oligonucleotide
  Antisense strand to SEQ ID NO: 1987274
ucagauaaccagagcccgc

SEQ ID NO: 1987276 - RNA, 19 nt, Artificial Sequence
  Description of Artificial Sequence: Synthetic oligonucleotide
  Sense strand starting at position 285 of SEQ ID NO: 1880702
gggcucugguuaucugaca

SEQ ID NO: 1987277 - RNA, 19 nt, Artificial Sequence
  Description of Artificial Sequence: Synthetic oligonucleotide
  Antisense strand to SEQ ID NO: 1987276
ugucagauaaccagagccc

SEQ ID NO: 1987278 - RNA, 19 nt, Artificial Sequence
  Description of Artificial Sequence: Synthetic oligonucleotide
  Sense strand starting at position 286 of SEQ ID NO: 1880702
ggcucugguuaucugacau

SEQ ID NO: 1987279 - RNA, 19 nt, Artificial Sequence
  Description of Artificial Sequence: Synthetic oligonucleotide
  Antisense strand to SEQ ID NO: 1987278
augucagauaaccagagcc

SEQ ID NO: 1987280 - RNA, 19 nt, Artificial Sequence
  Description of Artificial Sequence: Synthetic oligonucleotide
  Sense strand starting at position 305 of SEQ ID NO: 1880702
gcuccaaacauguaugugu

SEQ ID NO: 1987281 - RNA, 19 nt, Artificial Sequence
  Description of Artificial Sequence: Synthetic oligonucleotide
  Antisense strand to SEQ ID NO: 1987280
acacauacauguuuggagc

SEQ ID NO: 1987282 - RNA, 19 nt, Artificial Sequence
  Description of Artificial Sequence: Synthetic oligonucleotide
  Sense strand starting at position 379 of SEQ ID NO: 1880702
agcguuuggcuuugaucaa

SEQ ID NO: 1987283 - RNA, 19 nt, Artificial Sequence
  Description of Artificial Sequence: Synthetic oligonucleotide
  Antisense strand to SEQ ID NO: 1987282
uugaucaaagccaaacgcu

SEQ ID NO: 1987284 - RNA, 19 nt, Artificial Sequence
  Description of Artificial Sequence: Synthetic oligonucleotide
  Sense strand starting at position 439 of SEQ ID NO: 1880702
gagggaaugccugguggau

SEQ ID NO: 1987285 - RNA, 19 nt, Artificial Sequence
  Description of Artificial Sequence: Synthetic oligonucleotide
  Antisense strand to SEQ ID NO: 1987284
auccaccaggcauucccuc

SEQ ID NO: 1987286 - RNA, 19 nt, Artificial Sequence
  Description of Artificial Sequence: Synthetic oligonucleotide
  Sense strand starting at position 1440 of SEQ ID NO: 1880702
cggucagaaccuuggucau

SEQ ID NO: 1987287 - RNA, 19 nt, Artificial Sequence
  Description of Artificial Sequence: Synthetic oligonucleotide
  Antisense strand to SEQ ID NO: 1987286
augaccaagguucugaccg

SEQ ID NO: 1987288 - RNA, 19 nt, Artificial Sequence
  Description of Artificial Sequence: Synthetic oligonucleotide
  Sense strand starting at position 1442 of SEQ ID NO: 1880702
gucagaaccuuggucauua

SEQ ID NO: 1987289 - RNA, 19 nt, Artificial Sequence
  Description of Artificial Sequence: Synthetic oligonucleotide
  Antisense strand to SEQ ID NO: 1987288
uaaugaccaagguucugac

SEQ ID NO: 1987290 - RNA, 19 nt, Artificial Sequence
  Description of Artificial Sequence: Synthetic oligonucleotide
  Sense strand starting at position 1446 of SEQ ID NO: 1880702
gaaccuuggucauuaguaa

SEQ ID NO: 1987291 - RNA, 19 nt, Artificial Sequence
  Description of Artificial Sequence: Synthetic oligonucleotide
  Antisense strand to SEQ ID NO: 1987290
uuacuaaugaccaagguuc

SEQ ID NO: 1987292 - RNA, 19 nt, Artificial Sequence
  Description of Artificial Sequence: Synthetic oligonucleotide
  Sense strand starting at position 1542 of SEQ ID NO: 1880702
accggcuccucagucauau

SEQ ID NO: 1987293 - RNA, 19 nt, Artificial Sequence
  Description of Artificial Sequence: Synthetic oligonucleotide
  Antisense strand to SEQ ID NO: 1987292
auaugacugaggagccggu

SEQ ID NO: 1987294 - RNA, 19 nt, Artificial Sequence
  Description of Artificial Sequence: Synthetic oligonucleotide
  Sense strand starting at position 1715 of SEQ ID NO: 1880702
guuacugggucagcugaaa

SEQ ID NO: 1987295 - RNA, 19 nt, Artificial Sequence
  Description of Artificial Sequence: Synthetic oligonucleotide
  Antisense strand to SEQ ID NO: 1987294
uuucagcugacccaguaac

SEQ ID NO: 1987296 - RNA, 19 nt, Artificial Sequence
  Description of Artificial Sequence: Synthetic oligonucleotide
  Sense strand starting at position 1759 of SEQ ID NO: 1880702
caagguucccucuggcauu

SEQ ID NO: 1987297 - RNA, 19 nt, Artificial Sequence
  Description of Artificial Sequence: Synthetic oligonucleotide
  Antisense strand to SEQ ID NO: 1987296
aaugccagagggaaccuug

SEQ ID NO: 1987298 - RNA, 19 nt, Artificial Sequence
  Description of Artificial Sequence: Synthetic oligonucleotide
  Sense strand starting at position 1765 of SEQ ID NO: 1880702
ucccucuggcauugauaau

SEQ ID NO: 1987299 - RNA, 19 nt, Artificial Sequence
  Description of Artificial Sequence: Synthetic oligonucleotide
  Antisense strand to SEQ ID NO: 1987298
auuaucaaugccagaggga

SEQ ID NO: 1987300 - RNA, 19 nt, Artificial Sequence
  Description of Artificial Sequence: Synthetic oligonucleotide
  Sense strand starting at position 1855 of SEQ ID NO: 1880702
gcuuaauuagaagggaauc

SEQ ID NO: 1987301 - RNA, 19 nt, Artificial Sequence
  Description of Artificial Sequence: Synthetic oligonucleotide
  Antisense strand to SEQ ID NO: 1987300
gauucccuucuaauuaagc

SEQ ID NO: 1987302 - RNA, 19 nt, Artificial Sequence
  Description of Artificial Sequence: Synthetic oligonucleotide
  Sense strand starting at position 1868 of SEQ ID NO: 1880702
ggaaucaacccacguguga

SEQ ID NO: 1987303 - RNA, 19 nt, Artificial Sequence
  Description of Artificial Sequence: Synthetic oligonucleotide
  Antisense strand to SEQ ID NO: 1987302
ucacacguggguugauucc

SEQ ID NO: 1987304 - RNA, 19 nt, Artificial Sequence
  Description of Artificial Sequence: Synthetic oligonucleotide
  Sense strand starting at position 1879 of SEQ ID NO: 1880702
acgugugauccaggcucau

SEQ ID NO: 1987305 - RNA, 19 nt, Artificial Sequence
  Description of Artificial Sequence: Synthetic oligonucleotide
  Antisense strand to SEQ ID NO: 1987304
augagccuggaucacacgu

SEQ ID NO: 1987306 - RNA, 19 nt, Artificial Sequence
  Description of Artificial Sequence: Synthetic oligonucleotide
  Sense strand starting at position 1932 of SEQ ID NO: 1880702
cgacacuugcuuggugaga

SEQ ID NO: 1987307 - RNA, 19 nt, Artificial Sequence
  Description of Artificial Sequence: Synthetic oligonucleotide
  Antisense strand to SEQ ID NO: 1987306
ucucaccaagcaagugucg

SEQ ID NO: 1987308 - RNA, 19 nt, Artificial Sequence
  Description of Artificial Sequence: Synthetic oligonucleotide
  Sense strand starting at position 1981 of SEQ ID NO: 1880702
cugcacuugcuuggugaga

SEQ ID NO: 1987309 - RNA, 19 nt, Artificial Sequence
  Description of Artificial Sequence: Synthetic oligonucleotide
  Antisense strand to SEQ ID NO: 1987308
ucucaccaagcaagugcag

SEQ ID NO: 1987310 - RNA, 19 nt, Artificial Sequence
  Description of Artificial Sequence: Synthetic oligonucleotide
  Sense strand starting at position 2929 of SEQ ID NO: 1880702
gagugagagcauugcuguu

SEQ ID NO: 1987311 - RNA, 19 nt, Artificial Sequence
  Description of Artificial Sequence: Synthetic oligonucleotide
  Antisense strand to SEQ ID NO: 1987310
aacagcaaugcucucacuc

SEQ ID NO: 1987312 - RNA, 19 nt, Artificial Sequence
  Description of Artificial Sequence: Synthetic oligonucleotide
  Sense strand starting at position 3155 of SEQ ID NO: 1880702
gcugcucuugcugcgacaa

SEQ ID NO: 1987313 - RNA, 19 nt, Artificial Sequence
  Description of Artificial Sequence: Synthetic oligonucleotide
  Antisense strand to SEQ ID NO: 1987312
uugucgcagcaagagcagc

SEQ ID NO: 1987314 - RNA, 19 nt, Artificial Sequence
  Description of Artificial Sequence: Synthetic oligonucleotide
  Sense strand starting at position 3380 of SEQ ID NO: 1880702
ugacaaauguaagagaauu

SEQ ID NO: 1987315 - RNA, 19 nt, Artificial Sequence
  Description of Artificial Sequence: Synthetic oligonucleotide
  Antisense strand to SEQ ID NO: 1987314
aauucucuuacauuuguca

SEQ ID NO: 1987316 - RNA, 19 nt, Artificial Sequence
  Description of Artificial Sequence: Synthetic oligonucleotide
  Sense strand starting at position 3504 of SEQ ID NO: 1880702
cuuaucagucuuuagucua

SEQ ID NO: 1987317 - RNA, 19 nt, Artificial Sequence
  Description of Artificial Sequence: Synthetic oligonucleotide
  Antisense strand to SEQ ID NO: 1987316
uagacuaaagacugauaag

SEQ ID NO: 1987318 - RNA, 19 nt, Artificial Sequence
  Description of Artificial Sequence: Synthetic oligonucleotide
  Sense strand starting at position 3507 of SEQ ID NO: 1880702
aucagucuuuagucuaaug

SEQ ID NO: 1987319 - RNA, 19 nt, Artificial Sequence
  Description of Artificial Sequence: Synthetic oligonucleotide
  Antisense strand to SEQ ID NO: 1987318
cauuagacuaaagacugau

SEQ ID NO: 1987320 - RNA, 19 nt, Artificial Sequence
  Description of Artificial Sequence: Synthetic oligonucleotide
  Sense strand starting at position 3526 of SEQ ID NO: 1880702
aucuuaucagugugugcua

SEQ ID NO: 1987321 - RNA, 19 nt, Artificial Sequence
  Description of Artificial Sequence: Synthetic oligonucleotide
  Antisense strand to SEQ ID NO: 1987320
uagcacacacugauaagau

SEQ ID NO: 1987322 - RNA, 19 nt, Artificial Sequence
  Description of Artificial Sequence: Synthetic oligonucleotide
  Sense strand starting at position 3529 of SEQ ID NO: 1880702
uuaucagugugugcuauga

SEQ ID NO: 1987323 - RNA, 19 nt, Artificial Sequence
  Description of Artificial Sequence: Synthetic oligonucleotide
  Antisense strand to SEQ ID NO: 1987322
ucauagcacacacugauaa

SEQ ID NO: 1987324 - RNA, 19 nt, Artificial Sequence
  Description of Artificial Sequence: Synthetic oligonucleotide
  Sense strand starting at position 3545 of SEQ ID NO: 1880702
ugaauccaugcguaugcua

SEQ ID NO: 1987325 - RNA, 19 nt, Artificial Sequence
  Description of Artificial Sequence: Synthetic oligonucleotide
  Antisense strand to SEQ ID NO: 1987324
uagcauacgcauggauuca

SEQ ID NO: 1987326 - RNA, 19 nt, Artificial Sequence
  Description of Artificial Sequence: Synthetic oligonucleotide
  Sense strand starting at position 3571 of SEQ ID NO: 1880702
auaugugugcucuccguga

SEQ ID NO: 1987327 - RNA, 19 nt, Artificial Sequence
  Description of Artificial Sequence: Synthetic oligonucleotide
  Antisense strand to SEQ ID NO: 1987326
ucacggagagcacacauau

SEQ ID NO: 1987328 - RNA, 19 nt, Artificial Sequence
  Description of Artificial Sequence: Synthetic oligonucleotide
  Sense strand starting at position 3630 of SEQ ID NO: 1880702
gccuucgauccugaguuaa

SEQ ID NO: 1987329 - RNA, 19 nt, Artificial Sequence
  Description of Artificial Sequence: Synthetic oligonucleotide
  Antisense strand to SEQ ID NO: 1987328
uuaacucaggaucgaaggc

SEQ ID NO: 1987330 - RNA, 19 nt, Artificial Sequence
  Description of Artificial Sequence: Synthetic oligonucleotide
  Sense strand starting at position 3632 of SEQ ID NO: 1880702
cuucgauccugaguuaauc

SEQ ID NO: 1987331 - RNA, 19 nt, Artificial Sequence
  Description of Artificial Sequence: Synthetic oligonucleotide
  Antisense strand to SEQ ID NO: 1987330
gauuaacucaggaucgaag

SEQ ID NO: 1987332 - RNA, 19 nt, Artificial Sequence
  Description of Artificial Sequence: Synthetic oligonucleotide
  Sense strand starting at position 3757 of SEQ ID NO: 1880702
ucuggugucuuccugcaau

SEQ ID NO: 1987333 - RNA, 19 nt, Artificial Sequence
  Description of Artificial Sequence: Synthetic oligonucleotide
  Antisense strand to SEQ ID NO: 1987332
auugcaggaagacaccaga

SEQ ID NO: 1987334 - RNA, 19 nt, Artificial Sequence
  Description of Artificial Sequence: Synthetic oligonucleotide
  Sense strand starting at position 3760 of SEQ ID NO: 1880702
ggugucuuccugcaaugac

SEQ ID NO: 1987335 - RNA, 19 nt, Artificial Sequence
  Description of Artificial Sequence: Synthetic oligonucleotide
  Antisense strand to SEQ ID NO: 1987334
gucauugcaggaagacacc

SEQ ID NO: 1987336 - RNA, 19 nt, Artificial Sequence
  Description of Artificial Sequence: Synthetic oligonucleotide
  Sense strand starting at position 3970 of SEQ ID NO: 1880702
cugaguguccugggaaucu

SEQ ID NO: 1987337 - RNA, 19 nt, Artificial Sequence
  Description of Artificial Sequence: Synthetic oligonucleotide
  Antisense strand to SEQ ID NO: 1987336
agauucccaggacacucag

SEQ ID NO: 1987338 - RNA, 19 nt, Artificial Sequence
  Description of Artificial Sequence: Synthetic oligonucleotide
  Sense strand starting at position 79 of SEQ ID NO: 1880703
gggcuuuacuucuccgcau

SEQ ID NO: 1987339 - RNA, 19 nt, Artificial Sequence
  Description of Artificial Sequence: Synthetic oligonucleotide
  Antisense strand to SEQ ID NO: 1987338
augcggagaaguaaagccc

SEQ ID NO: 1987340 - RNA, 19 nt, Artificial Sequence
  Description of Artificial Sequence: Synthetic oligonucleotide
  Sense strand starting at position 100 of SEQ ID NO: 1880703
uugagaccguuuccagaaa

SEQ ID NO: 1987341 - RNA, 19 nt, Artificial Sequence
  Description of Artificial Sequence: Synthetic oligonucleotide
  Antisense strand to SEQ ID NO: 1987340
uuucuggaaacggucucaa

SEQ ID NO: 1987342 - RNA, 19 nt, Artificial Sequence
  Description of Artificial Sequence: Synthetic oligonucleotide
  Sense strand starting at position 412 of SEQ ID NO: 1880703
cuaagaggucucugugagu

SEQ ID NO: 1987343 - RNA, 19 nt, Artificial Sequence
  Description of Artificial Sequence: Synthetic oligonucleotide
  Antisense strand to SEQ ID NO: 1987342
acucacagagaccucuuag

SEQ ID NO: 1987344 - RNA, 19 nt, Artificial Sequence
  Description of Artificial Sequence: Synthetic oligonucleotide
  Sense strand starting at position 417 of SEQ ID NO: 1880703
aggucucugugagugcaga

SEQ ID NO: 1987345 - RNA, 19 nt, Artificial Sequence
  Description of Artificial Sequence: Synthetic oligonucleotide
  Antisense strand to SEQ ID NO: 1987344
ucugcacucacagagaccu

SEQ ID NO: 1987346 - RNA, 19 nt, Artificial Sequence
  Description of Artificial Sequence: Synthetic oligonucleotide
  Sense strand starting at position 461 of SEQ ID NO: 1880703
cucagugaugccggagaau

SEQ ID NO: 1987347 - RNA, 19 nt, Artificial Sequence
  Description of Artificial Sequence: Synthetic oligonucleotide
  Antisense strand to SEQ ID NO: 1987346
auucuccggcaucacugag

SEQ ID NO: 1987348 - RNA, 19 nt, Artificial Sequence
  Description of Artificial Sequence: Synthetic oligonucleotide
  Sense strand starting at position 470 of SEQ ID NO: 1880703
gccggagaaucgguuaaca

SEQ ID NO: 1987349 - RNA, 19 nt, Artificial Sequence
  Description of Artificial Sequence: Synthetic oligonucleotide
  Antisense strand to SEQ ID NO: 1987348
uguuaaccgauucuccggc

SEQ ID NO: 1987350 - RNA, 19 nt, Artificial Sequence
  Description of Artificial Sequence: Synthetic oligonucleotide
  Sense strand starting at position 472 of SEQ ID NO: 1880703
cggagaaucgguuaacaga

SEQ ID NO: 1987351 - RNA, 19 nt, Artificial Sequence
  Description of Artificial Sequence: Synthetic oligonucleotide
  Antisense strand to SEQ ID NO: 1987350
ucuguuaaccgauucuccg

SEQ ID NO: 1987352 - RNA, 19 nt, Artificial Sequence
  Description of Artificial Sequence: Synthetic oligonucleotide
  Sense strand starting at position 1342 of SEQ ID NO: 1880703
uagagagucuuacucaaga

SEQ ID NO: 1987353 - RNA, 19 nt, Artificial Sequence
  Description of Artificial Sequence: Synthetic oligonucleotide
  Antisense strand to SEQ ID NO: 1987352
ucuugaguaagacucucua

SEQ ID NO: 1987354 - RNA, 19 nt, Artificial Sequence
  Description of Artificial Sequence: Synthetic oligonucleotide
  Sense strand starting at position 1417 of SEQ ID NO: 1880703
ucaaauucccuuuguccga

SEQ ID NO: 1987355 - RNA, 19 nt, Artificial Sequence
  Description of Artificial Sequence: Synthetic oligonucleotide
  Antisense strand to SEQ ID NO: 1987354
ucggacaaagggaauuuga

SEQ ID NO: 1987356 - RNA, 19 nt, Artificial Sequence
  Description of Artificial Sequence: Synthetic oligonucleotide
  Sense strand starting at position 1421 of SEQ ID NO: 1880703
auucccuuuguccgaauga

SEQ ID NO: 1987357 - RNA, 19 nt, Artificial Sequence
  Description of Artificial Sequence: Synthetic oligonucleotide
  Antisense strand to SEQ ID NO: 1987356
ucauucggacaaagggaau

SEQ ID NO: 1987358 - RNA, 19 nt, Artificial Sequence
  Description of Artificial Sequence: Synthetic oligonucleotide
  Sense strand starting at position 1582 of SEQ ID NO: 1880703
auucguuugucuccucuga

SEQ ID NO: 1987359 - RNA, 19 nt, Artificial Sequence
  Description of Artificial Sequence: Synthetic oligonucleotide
  Antisense strand to SEQ ID NO: 1987358
ucagaggagacaaacgaau

SEQ ID NO: 1987360 - RNA, 19 nt, Artificial Sequence
  Description of Artificial Sequence: Synthetic oligonucleotide
  Sense strand starting at position 1593 of SEQ ID NO: 1880703
uccucugagguuuauuauu

SEQ ID NO: 1987361 - RNA, 19 nt, Artificial Sequence
  Description of Artificial Sequence: Synthetic oligonucleotide
  Antisense strand to SEQ ID NO: 1987360
aauaauaaaccucagagga

SEQ ID NO: 1987362 - RNA, 19 nt, Artificial Sequence
  Description of Artificial Sequence: Synthetic oligonucleotide
  Sense strand starting at position 1690 of SEQ ID NO: 1880703
gugacuguucugggaugug

SEQ ID NO: 1987363 - RNA, 19 nt, Artificial Sequence
  Description of Artificial Sequence: Synthetic oligonucleotide
  Antisense strand to SEQ ID NO: 1987362
cacaucccagaacagucac

SEQ ID NO: 1987364 - RNA, 19 nt, Artificial Sequence
  Description of Artificial Sequence: Synthetic oligonucleotide
  Sense strand starting at position 1795 of SEQ ID NO: 1880703
aggacacucugcucuaaca

SEQ ID NO: 1987365 - RNA, 19 nt, Artificial Sequence
  Description of Artificial Sequence: Synthetic oligonucleotide
  Antisense strand to SEQ ID NO: 1987364
uguuagagcagaguguccu

SEQ ID NO: 1987366 - RNA, 19 nt, Artificial Sequence
  Description of Artificial Sequence: Synthetic oligonucleotide
  Sense strand starting at position 1988 of SEQ ID NO: 1880703
gaaggagacucugcucuaa

SEQ ID NO: 1987367 - RNA, 19 nt, Artificial Sequence
  Description of Artificial Sequence: Synthetic oligonucleotide
  Antisense strand to SEQ ID NO: 1987366
uuagagcagagucuccuuc

SEQ ID NO: 1987368 - RNA, 19 nt, Artificial Sequence
  Description of Artificial Sequence: Synthetic oligonucleotide
  Sense strand starting at position 1990 of SEQ ID NO: 1880703
aggagacucugcucuaaca

SEQ ID NO: 1987369 - RNA, 19 nt, Artificial Sequence
  Description of Artificial Sequence: Synthetic oligonucleotide
  Antisense strand to SEQ ID NO: 1987368
uguuagagcagagucuccu

SEQ ID NO: 1987370 - RNA, 19 nt, Artificial Sequence
  Description of Artificial Sequence: Synthetic oligonucleotide
  Sense strand starting at position 2036 of SEQ ID NO: 1880703
gucucuucccuguacacga

SEQ ID NO: 1987371 - RNA, 19 nt, Artificial Sequence
  Description of Artificial Sequence: Synthetic oligonucleotide
  Antisense strand to SEQ ID NO: 1987370
ucguguacagggaagagac

SEQ ID NO: 1987372 - RNA, 19 nt, Artificial Sequence
  Description of Artificial Sequence: Synthetic oligonucleotide
  Sense strand starting at position 2161 of SEQ ID NO: 1880703
guagucucuucccuguaca

SEQ ID NO: 1987373 - RNA, 19 nt, Artificial Sequence
  Description of Artificial Sequence: Synthetic oligonucleotide
  Antisense strand to SEQ ID NO: 1987372
uguacagggaagagacuac

SEQ ID NO: 1987374 - RNA, 19 nt, Artificial Sequence
  Description of Artificial Sequence: Synthetic oligonucleotide
  Sense strand starting at position 2439 of SEQ ID NO: 1880703
gaaggagaaucugcucuaa

SEQ ID NO: 1987375 - RNA, 19 nt, Artificial Sequence
  Description of Artificial Sequence: Synthetic oligonucleotide
  Antisense strand to SEQ ID NO: 1987374
uuagagcagauucuccuuc

SEQ ID NO: 1987376 - RNA, 19 nt, Artificial Sequence
  Description of Artificial Sequence: Synthetic oligonucleotide
  Sense strand starting at position 2441 of SEQ ID NO: 1880703
aggagaaucugcucuaaca

SEQ ID NO: 1987377 - RNA, 19 nt, Artificial Sequence
  Description of Artificial Sequence: Synthetic oligonucleotide
  Antisense strand to SEQ ID NO: 1987376
uguuagagcagauucuccu

SEQ ID NO: 1987378 - RNA, 19 nt, Artificial Sequence
  Description of Artificial Sequence: Synthetic oligonucleotide
  Sense strand starting at position 2625 of SEQ ID NO: 1880703
ccuguacgugaaggagauu

SEQ ID NO: 1987379 - RNA, 19 nt, Artificial Sequence
  Description of Artificial Sequence: Synthetic oligonucleotide
  Antisense strand to SEQ ID NO: 1987378
aaucuccuucacguacagg

SEQ ID NO: 1987380 - RNA, 19 nt, Artificial Sequence
  Description of Artificial Sequence: Synthetic oligonucleotide
  Sense strand starting at position 2634 of SEQ ID NO: 1880703
gaaggagauucugcucuaa

SEQ ID NO: 1987381 - RNA, 19 nt, Artificial Sequence
  Description of Artificial Sequence: Synthetic oligonucleotide
  Antisense strand to SEQ ID NO: 1987380
uuagagcagaaucuccuuc

SEQ ID NO: 1987382 - RNA, 19 nt, Artificial Sequence
  Description of Artificial Sequence: Synthetic oligonucleotide
  Sense strand starting at position 2636 of SEQ ID NO: 1880703
aggagauucugcucuaaca

SEQ ID NO: 1987383 - RNA, 19 nt, Artificial Sequence
  Description of Artificial Sequence: Synthetic oligonucleotide
  Antisense strand to SEQ ID NO: 1987382
uguuagagcagaaucuccu

SEQ ID NO: 1987384 - RNA, 19 nt, Artificial Sequence
  Description of Artificial Sequence: Synthetic oligonucleotide
  Sense strand starting at position 2789 of SEQ ID NO: 1880703
gugaacuuguaucugcacu

SEQ ID NO: 1987385 - RNA, 19 nt, Artificial Sequence
  Description of Artificial Sequence: Synthetic oligonucleotide
  Antisense strand to SEQ ID NO: 1987384
agugcagauacaaguucac

SEQ ID NO: 1987386 - RNA, 19 nt, Artificial Sequence
  Description of Artificial Sequence: Synthetic oligonucleotide
  Sense strand starting at position 2814 of SEQ ID NO: 1880703
ugcguugccaucugacaaa

SEQ ID NO: 1987387 - RNA, 19 nt, Artificial Sequence
  Description of Artificial Sequence: Synthetic oligonucleotide
  Antisense strand to SEQ ID NO: 1987386
uuugucagauggcaacgca

SEQ ID NO: 1987388 - RNA, 19 nt, Artificial Sequence
  Description of Artificial Sequence: Synthetic oligonucleotide
  Sense strand starting at position 2981 of SEQ ID NO: 1880703
gagacagcaugcucuuuga

SEQ ID NO: 1987389 - RNA, 19 nt, Artificial Sequence
  Description of Artificial Sequence: Synthetic oligonucleotide
  Antisense strand to SEQ ID NO: 1987388
ucaaagagcaugcugucuc

SEQ ID NO: 1987390 - RNA, 19 nt, Artificial Sequence
  Description of Artificial Sequence: Synthetic oligonucleotide
  Sense strand starting at position 2990 of SEQ ID NO: 1880703
ugcucuuugacgggauaga

SEQ ID NO: 1987391 - RNA, 19 nt, Artificial Sequence
  Description of Artificial Sequence: Synthetic oligonucleotide
  Antisense strand to SEQ ID NO: 1987390
ucuaucccgucaaagagca

SEQ ID NO: 1987392 - RNA, 19 nt, Artificial Sequence
  Description of Artificial Sequence: Synthetic oligonucleotide
  Sense strand starting at position 2991 of SEQ ID NO: 1880703
gcucuuugacgggauagau

SEQ ID NO: 1987393 - RNA, 19 nt, Artificial Sequence
  Description of Artificial Sequence: Synthetic oligonucleotide
  Antisense strand to SEQ ID NO: 1987392
aucuaucccgucaaagagc

SEQ ID NO: 1987394 - RNA, 19 nt, Artificial Sequence
  Description of Artificial Sequence: Synthetic oligonucleotide
  Sense strand starting at position 3130 of SEQ ID NO: 1880703
cccagauccucagcuguau

SEQ ID NO: 1987395 - RNA, 19 nt, Artificial Sequence
  Description of Artificial Sequence: Synthetic oligonucleotide
  Antisense strand to SEQ ID NO: 1987394
auacagcugaggaucuggg

SEQ ID NO: 1987396 - RNA, 19 nt, Artificial Sequence
  Description of Artificial Sequence: Synthetic oligonucleotide
  Sense strand starting at position 3154 of SEQ ID NO: 1880703
gucggcagucucugaaaga

SEQ ID NO: 1987397 - RNA, 19 nt, Artificial Sequence
  Description of Artificial Sequence: Synthetic oligonucleotide
  Antisense strand to SEQ ID NO: 1987396
ucuuucagagacugccgac

SEQ ID NO: 1987398 - RNA, 19 nt, Artificial Sequence
  Description of Artificial Sequence: Synthetic oligonucleotide
  Sense strand starting at position 3274 of SEQ ID NO: 1880703
ugaccugaguccucuagac

SEQ ID NO: 1987399 - RNA, 19 nt, Artificial Sequence
  Description of Artificial Sequence: Synthetic oligonucleotide
  Antisense strand to SEQ ID NO: 1987398
gucuagaggacucagguca

SEQ ID NO: 1987400 - RNA, 19 nt, Artificial Sequence
  Description of Artificial Sequence: Synthetic oligonucleotide
  Sense strand starting at position 3325 of SEQ ID NO: 1880703
agugguguuuccucuccca

SEQ ID NO: 1987401 - RNA, 19 nt, Artificial Sequence
  Description of Artificial Sequence: Synthetic oligonucleotide
  Antisense strand to SEQ ID NO: 1987400
ugggagaggaaacaccacu

SEQ ID NO: 1987402 - RNA, 19 nt, Artificial Sequence
  Description of Artificial Sequence: Synthetic oligonucleotide
  Sense strand starting at position 3328 of SEQ ID NO: 1880703
gguguuuccucucccaagu

SEQ ID NO: 1987403 - RNA, 19 nt, Artificial Sequence
  Description of Artificial Sequence: Synthetic oligonucleotide
  Antisense strand to SEQ ID NO: 1987402
acuugggagaggaaacacc

SEQ ID NO: 1987404 - RNA, 19 nt, Artificial Sequence
  Description of Artificial Sequence: Synthetic oligonucleotide
  Sense strand starting at position 3369 of SEQ ID NO: 1880703
gaggcuucucuggacuaac

SEQ ID NO: 1987405 - RNA, 19 nt, Artificial Sequence
  Description of Artificial Sequence: Synthetic oligonucleotide
  Antisense strand to SEQ ID NO: 1987404
guuaguccagagaagccuc

SEQ ID NO: 1987406 - RNA, 19 nt, Artificial Sequence
  Description of Artificial Sequence: Synthetic oligonucleotide
  Sense strand starting at position 3415 of SEQ ID NO: 1880703
ucugaucugucuccgucau

SEQ ID NO: 1987407 - RNA, 19 nt, Artificial Sequence
  Description of Artificial Sequence: Synthetic oligonucleotide
  Antisense strand to SEQ ID NO: 1987406
augacggagacagaucaga

SEQ ID NO: 1987408 - RNA, 19 nt, Artificial Sequence
  Description of Artificial Sequence: Synthetic oligonucleotide
  Sense strand starting at position 3416 of SEQ ID NO: 1880703
cugaucugucuccgucaua

SEQ ID NO: 1987409 - RNA, 19 nt, Artificial Sequence
  Description of Artificial Sequence: Synthetic oligonucleotide
  Antisense strand to SEQ ID NO: 1987408
uaugacggagacagaucag

SEQ ID NO: 1987410 - RNA, 19 nt, Artificial Sequence
  Description of Artificial Sequence: Synthetic oligonucleotide
  Sense strand starting at position 3417 of SEQ ID NO: 1880703
ugaucugucuccgucauaa

SEQ ID NO: 1987411 - RNA, 19 nt, Artificial Sequence
  Description of Artificial Sequence: Synthetic oligonucleotide
  Antisense strand to SEQ ID NO: 1987410
uuaugacggagacagauca

SEQ ID NO: 1987412 - RNA, 19 nt, Artificial Sequence
  Description of Artificial Sequence: Synthetic oligonucleotide
  Sense strand starting at position 3429 of SEQ ID NO: 1880703
gucauaaccgagcagugau

SEQ ID NO: 1987413 - RNA, 19 nt, Artificial Sequence
  Description of Artificial Sequence: Synthetic oligonucleotide
  Antisense strand to SEQ ID NO: 1987412
aucacugcucgguuaugac

SEQ ID NO: 1987414 - RNA, 19 nt, Artificial Sequence
  Description of Artificial Sequence: Synthetic oligonucleotide
  Sense strand starting at position 3682 of SEQ ID NO: 1880703
agccauucugcaggugaca

SEQ ID NO: 1987415 - RNA, 19 nt, Artificial Sequence
  Description of Artificial Sequence: Synthetic oligonucleotide
  Antisense strand to SEQ ID NO: 1987414
ugucaccugcagaauggcu

SEQ ID NO: 1987416 - RNA, 19 nt, Artificial Sequence
  Description of Artificial Sequence: Synthetic oligonucleotide
  Sense strand starting at position 3919 of SEQ ID NO: 1880703
aaacgcagucacuaggaua

SEQ ID NO: 1987417 - RNA, 19 nt, Artificial Sequence
  Description of Artificial Sequence: Synthetic oligonucleotide
  Antisense strand to SEQ ID NO: 1987416
uauccuagugacugcguuu

SEQ ID NO: 1987418 - RNA, 19 nt, Artificial Sequence
  Description of Artificial Sequence: Synthetic oligonucleotide
  Sense strand starting at position 384 of SEQ ID NO: 1880704
auaacccauguuuguuaua

SEQ ID NO: 1987419 - RNA, 19 nt, Artificial Sequence
  Description of Artificial Sequence: Synthetic oligonucleotide
  Antisense strand to SEQ ID NO: 1987418
uauaacaaacauggguuau

SEQ ID NO: 1987420 - RNA, 19 nt, Artificial Sequence
  Description of Artificial Sequence: Synthetic oligonucleotide
  Sense strand starting at position 471 of SEQ ID NO: 1880704
uuaggaaugguauguauug

SEQ ID NO: 1987421 - RNA, 19 nt, Artificial Sequence
  Description of Artificial Sequence: Synthetic oligonucleotide
  Antisense strand to SEQ ID NO: 1987420
caauacauaccauuccuaa

SEQ ID NO: 1987422 - RNA, 19 nt, Artificial Sequence
  Description of Artificial Sequence: Synthetic oligonucleotide
  Sense strand starting at position 483 of SEQ ID NO: 1880704
uguauugucugacuauaag

SEQ ID NO: 1987423 - RNA, 19 nt, Artificial Sequence
  Description of Artificial Sequence: Synthetic oligonucleotide
  Antisense strand to SEQ ID NO: 1987422
cuuauagucagacaauaca

SEQ ID NO: 1987424 - RNA, 19 nt, Artificial Sequence
  Description of Artificial Sequence: Synthetic oligonucleotide
  Sense strand starting at position 492 of SEQ ID NO: 1880704
ugacuauaagaacggagua

SEQ ID NO: 1987425 - RNA, 19 nt, Artificial Sequence
  Description of Artificial Sequence: Synthetic oligonucleotide
  Antisense strand to SEQ ID NO: 1987424
uacuccguucuuauaguca

SEQ ID NO: 1987426 - RNA, 19 nt, Artificial Sequence
  Description of Artificial Sequence: Synthetic oligonucleotide
  Sense strand starting at position 608 of SEQ ID NO: 1880704
uaaugcaugcauuaagguu

SEQ ID NO: 1987427 - RNA, 19 nt, Artificial Sequence
  Description of Artificial Sequence: Synthetic oligonucleotide
  Antisense strand to SEQ ID NO: 1987426
aaccuuaaugcaugcauua

SEQ ID NO: 1987428 - RNA, 19 nt, Artificial Sequence
  Description of Artificial Sequence: Synthetic oligonucleotide
  Sense strand starting at position 685 of SEQ ID NO: 1880704
gucuccuagagguagagau

SEQ ID NO: 1987429 - RNA, 19 nt, Artificial Sequence
  Description of Artificial Sequence: Synthetic oligonucleotide
  Antisense strand to SEQ ID NO: 1987428
aucucuaccucuaggagac

SEQ ID NO: 1987430 - RNA, 19 nt, Artificial Sequence
  Description of Artificial Sequence: Synthetic oligonucleotide
  Sense strand starting at position 717 of SEQ ID NO: 1880704
augugaagagauugucaca

SEQ ID NO: 1987431 - RNA, 19 nt, Artificial Sequence
  Description of Artificial Sequence: Synthetic oligonucleotide
  Antisense strand to SEQ ID NO: 1987430
ugugacaaucucuucacau

SEQ ID NO: 1987432 - RNA, 19 nt, Artificial Sequence
  Description of Artificial Sequence: Synthetic oligonucleotide
  Sense strand starting at position 748 of SEQ ID NO: 1880704
acguuaauagccuaaagca

SEQ ID NO: 1987433 - RNA, 19 nt, Artificial Sequence
  Description of Artificial Sequence: Synthetic oligonucleotide
  Antisense strand to SEQ ID NO: 1987432
ugcuuuaggcuauuaacgu

SEQ ID NO: 1987434 - RNA, 19 nt, Artificial Sequence
  Description of Artificial Sequence: Synthetic oligonucleotide
  Sense strand starting at position 790 of SEQ ID NO: 1880704
ucaagucuuggauaaaugu

SEQ ID NO: 1987435 - RNA, 19 nt, Artificial Sequence
  Description of Artificial Sequence: Synthetic oligonucleotide
  Antisense strand to SEQ ID NO: 1987434
acauuuauccaagacuuga

SEQ ID NO: 1987436 - RNA, 19 nt, Artificial Sequence
  Description of Artificial Sequence: Synthetic oligonucleotide
  Sense strand starting at position 796 of SEQ ID NO: 1880704
cuuggauaaauguauucga

SEQ ID NO: 1987437 - RNA, 19 nt, Artificial Sequence
  Description of Artificial Sequence: Synthetic oligonucleotide
  Antisense strand to SEQ ID NO: 1987436
ucgaauacauuuauccaag

SEQ ID NO: 1987438 - RNA, 19 nt, Artificial Sequence
  Description of Artificial Sequence: Synthetic oligonucleotide
  Sense strand starting at position 799 of SEQ ID NO: 1880704
ggauaaauguauucgauug

SEQ ID NO: 1987439 - RNA, 19 nt, Artificial Sequence
  Description of Artificial Sequence: Synthetic oligonucleotide
  Antisense strand to SEQ ID NO: 1987438
caaucgaauacauuuaucc

SEQ ID NO: 1987440 - RNA, 19 nt, Artificial Sequence
  Description of Artificial Sequence: Synthetic oligonucleotide
  Sense strand starting at position 804 of SEQ ID NO: 1880704
aauguauucgauugacaau

SEQ ID NO: 1987441 - RNA, 19 nt, Artificial Sequence
  Description of Artificial Sequence: Synthetic oligonucleotide
  Antisense strand to SEQ ID NO: 1987440
auugucaaucgaauacauu

SEQ ID NO: 1987442 - RNA, 19 nt, Artificial Sequence
  Description of Artificial Sequence: Synthetic oligonucleotide
  Sense strand starting at position 892 of SEQ ID NO: 1880704
guugcaguccucuaaauaa

SEQ ID NO: 1987443 - RNA, 19 nt, Artificial Sequence
  Description of Artificial Sequence: Synthetic oligonucleotide
  Antisense strand to SEQ ID NO: 1987442
uuauuuagaggacugcaac

SEQ ID NO: 1987444 - RNA, 19 nt, Artificial Sequence
  Description of Artificial Sequence: Synthetic oligonucleotide
  Sense strand starting at position 1117 of SEQ ID NO: 1880704
guuuaagaaguguaaugua

SEQ ID NO: 1987445 - RNA, 19 nt, Artificial Sequence
  Description of Artificial Sequence: Synthetic oligonucleotide
  Antisense strand to SEQ ID NO: 1987444
uacauuacacuucuuaaac

SEQ ID NO: 1987446 - RNA, 19 nt, Artificial Sequence
  Description of Artificial Sequence: Synthetic oligonucleotide
  Sense strand starting at position 1122 of SEQ ID NO: 1880704
agaaguguaauguaaguac

SEQ ID NO: 1987447 - RNA, 19 nt, Artificial Sequence
  Description of Artificial Sequence: Synthetic oligonucleotide
  Antisense strand to SEQ ID NO: 1987446
guacuuacauuacacuucu

SEQ ID NO: 1987448 - RNA, 19 nt, Artificial Sequence
  Description of Artificial Sequence: Synthetic oligonucleotide
  Sense strand starting at position 1126 of SEQ ID NO: 1880704
guguaauguaaguacuuua

SEQ ID NO: 1987449 - RNA, 19 nt, Artificial Sequence
  Description of Artificial Sequence: Synthetic oligonucleotide
  Antisense strand to SEQ ID NO: 1987448
uaaaguacuuacauuacac

SEQ ID NO: 1987450 - RNA, 19 nt, Artificial Sequence
  Description of Artificial Sequence: Synthetic oligonucleotide
  Sense strand starting at position 1131 of SEQ ID NO: 1880704
auguaaguacuuuagcaaa

SEQ ID NO: 1987451 - RNA, 19 nt, Artificial Sequence
  Description of Artificial Sequence: Synthetic oligonucleotide
  Antisense strand to SEQ ID NO: 1987450
uuugcuaaaguacuuacau

SEQ ID NO: 1987452 - RNA, 19 nt, Artificial Sequence
  Description of Artificial Sequence: Synthetic oligonucleotide
  Sense strand starting at position 1240 of SEQ ID NO: 1880704
cgacuucucgcggagagga

SEQ ID NO: 1987453 - RNA, 19 nt, Artificial Sequence
  Description of Artificial Sequence: Synthetic oligonucleotide
  Antisense strand to SEQ ID NO: 1987452
uccucuccgcgagaagucg

SEQ ID NO: 1987454 - RNA, 19 nt, Artificial Sequence
  Description of Artificial Sequence: Synthetic oligonucleotide
  Sense strand starting at position 1284 of SEQ ID NO: 1880704
ggcagaacuucagcgaaag

SEQ ID NO: 1987455 - RNA, 19 nt, Artificial Sequence
  Description of Artificial Sequence: Synthetic oligonucleotide
  Antisense strand to SEQ ID NO: 1987454
cuuucgcugaaguucugcc

SEQ ID NO: 1987456 - RNA, 19 nt, Artificial Sequence
  Description of Artificial Sequence: Synthetic oligonucleotide
  Sense strand starting at position 2265 of SEQ ID NO: 1880704
gcgcgucaccagagagaaa

SEQ ID NO: 1987457 - RNA, 19 nt, Artificial Sequence
  Description of Artificial Sequence: Synthetic oligonucleotide
  Antisense strand to SEQ ID NO: 1987456
uuucucucuggugacgcgc

SEQ ID NO: 1987458 - RNA, 19 nt, Artificial Sequence
  Description of Artificial Sequence: Synthetic oligonucleotide
  Sense strand starting at position 2328 of SEQ ID NO: 1880704
ggccucuaguucuccauuu

SEQ ID NO: 1987459 - RNA, 19 nt, Artificial Sequence
  Description of Artificial Sequence: Synthetic oligonucleotide
  Antisense strand to SEQ ID NO: 1987458
aaauggagaacuagaggcc

SEQ ID NO: 1987460 - RNA, 19 nt, Artificial Sequence
  Description of Artificial Sequence: Synthetic oligonucleotide
  Sense strand starting at position 2360 of SEQ ID NO: 1880704
auuccugugcccgaaauaa

SEQ ID NO: 1987461 - RNA, 19 nt, Artificial Sequence
  Description of Artificial Sequence: Synthetic oligonucleotide
  Antisense strand to SEQ ID NO: 1987460
uuauuucgggcacaggaau

SEQ ID NO: 1987462 - RNA, 19 nt, Artificial Sequence
  Description of Artificial Sequence: Synthetic oligonucleotide
  Sense strand starting at position 2402 of SEQ ID NO: 1880704
auuuaaagguugcaagaaa

SEQ ID NO: 1987463 - RNA, 19 nt, Artificial Sequence
  Description of Artificial Sequence: Synthetic oligonucleotide
  Antisense strand to SEQ ID NO: 1987462
uuucuugcaaccuuuaaau

SEQ ID NO: 1987464 - RNA, 19 nt, Artificial Sequence
  Description of Artificial Sequence: Synthetic oligonucleotide
  Sense strand starting at position 2569 of SEQ ID NO: 1880704
gcggcugacauacagaauu

SEQ ID NO: 1987465 - RNA, 19 nt, Artificial Sequence
  Description of Artificial Sequence: Synthetic oligonucleotide
  Antisense strand to SEQ ID NO: 1987464
aauucuguaugucagccgc

SEQ ID NO: 1987466 - RNA, 19 nt, Artificial Sequence
  Description of Artificial Sequence: Synthetic oligonucleotide
  Sense strand starting at position 2631 of SEQ ID NO: 1880704
auuaguuacugaucucaag

SEQ ID NO: 1987467 - RNA, 19 nt, Artificial Sequence
  Description of Artificial Sequence: Synthetic oligonucleotide
  Antisense strand to SEQ ID NO: 1987466
cuugagaucaguaacuaau

SEQ ID NO: 1987468 - RNA, 19 nt, Artificial Sequence
  Description of Artificial Sequence: Synthetic oligonucleotide
  Sense strand starting at position 2715 of SEQ ID NO: 1880704
guuguagcugacggaauuu

SEQ ID NO: 1987469 - RNA, 19 nt, Artificial Sequence
  Description of Artificial Sequence: Synthetic oligonucleotide
  Antisense strand to SEQ ID NO: 1987468
aaauuccgucagcuacaac

SEQ ID NO: 1987470 - RNA, 19 nt, Artificial Sequence
  Description of Artificial Sequence: Synthetic oligonucleotide
  Sense strand starting at position 2799 of SEQ ID NO: 1880704
gaaugauuguuaccguaau

SEQ ID NO: 1987471 - RNA, 19 nt, Artificial Sequence
  Description of Artificial Sequence: Synthetic oligonucleotide
  Antisense strand to SEQ ID NO: 1987470
auuacgguaacaaucauuc

SEQ ID NO: 1987472 - RNA, 19 nt, Artificial Sequence
  Description of Artificial Sequence: Synthetic oligonucleotide
  Sense strand starting at position 2810 of SEQ ID NO: 1880704
accguaaugcucuagagag

SEQ ID NO: 1987473 - RNA, 19 nt, Artificial Sequence
  Description of Artificial Sequence: Synthetic oligonucleotide
  Antisense strand to SEQ ID NO: 1987472
cucucuagagcauuacggu

SEQ ID NO: 1987474 - RNA, 19 nt, Artificial Sequence
  Description of Artificial Sequence: Synthetic oligonucleotide
  Sense strand starting at position 2916 of SEQ ID NO: 1880704
gggauuaggucaucuucua

SEQ ID NO: 1987475 - RNA, 19 nt, Artificial Sequence
  Description of Artificial Sequence: Synthetic oligonucleotide
  Antisense strand to SEQ ID NO: 1987474
uagaagaugaccuaauccc

SEQ ID NO: 1987476 - RNA, 19 nt, Artificial Sequence
  Description of Artificial Sequence: Synthetic oligonucleotide
  Sense strand starting at position 3085 of SEQ ID NO: 1880704
acuggcucucccuaggaaa

SEQ ID NO: 1987477 - RNA, 19 nt, Artificial Sequence
  Description of Artificial Sequence: Synthetic oligonucleotide
  Antisense strand to SEQ ID NO: 1987476
uuuccuagggagagccagu

SEQ ID NO: 1987478 - RNA, 19 nt, Artificial Sequence
  Description of Artificial Sequence: Synthetic oligonucleotide
  Sense strand starting at position 3396 of SEQ ID NO: 1880704
ccugauggccagcaauaga

SEQ ID NO: 1987479 - RNA, 19 nt, Artificial Sequence
  Description of Artificial Sequence: Synthetic oligonucleotide
  Antisense strand to SEQ ID NO: 1987478
ucuauugcuggccaucagg

SEQ ID NO: 1987480 - RNA, 19 nt, Artificial Sequence
  Description of Artificial Sequence: Synthetic oligonucleotide
  Sense strand starting at position 3444 of SEQ ID NO: 1880704
agcgucuauuuaguguuaa

SEQ ID NO: 1987481 - RNA, 19 nt, Artificial Sequence
  Description of Artificial Sequence: Synthetic oligonucleotide
  Antisense strand to SEQ ID NO: 1987480
uuaacacuaaauagacgcu

SEQ ID NO: 1987482 - RNA, 19 nt, Artificial Sequence
  Description of Artificial Sequence: Synthetic oligonucleotide
  Sense strand starting at position 3473 of SEQ ID NO: 1880704
gucuaauuacugugaaaua

SEQ ID NO: 1987483 - RNA, 19 nt, Artificial Sequence
  Description of Artificial Sequence: Synthetic oligonucleotide
  Antisense strand to SEQ ID NO: 1987482
uauuucacaguaauuagac

SEQ ID NO: 1987484 - RNA, 19 nt, Artificial Sequence
  Description of Artificial Sequence: Synthetic oligonucleotide
  Sense strand starting at position 3485 of SEQ ID NO: 1880704
ugaaauaguccugguaacu

SEQ ID NO: 1987485 - RNA, 19 nt, Artificial Sequence
  Description of Artificial Sequence: Synthetic oligonucleotide
  Antisense strand to SEQ ID NO: 1987484
aguuaccaggacuauuuca

SEQ ID NO: 1987486 - RNA, 19 nt, Artificial Sequence
  Description of Artificial Sequence: Synthetic oligonucleotide
  Sense strand starting at position 3563 of SEQ ID NO: 1880704
acaccagaguacucuauga

SEQ ID NO: 1987487 - RNA, 19 nt, Artificial Sequence
  Description of Artificial Sequence: Synthetic oligonucleotide
  Antisense strand to SEQ ID NO: 1987486
ucauagaguacucuggugu

SEQ ID NO: 1987488 - RNA, 19 nt, Artificial Sequence
  Description of Artificial Sequence: Synthetic oligonucleotide
  Sense strand starting at position 3567 of SEQ ID NO: 1880704
cagaguacucuaugagaca

SEQ ID NO: 1987489 - RNA, 19 nt, Artificial Sequence
  Description of Artificial Sequence: Synthetic oligonucleotide
  Antisense strand to SEQ ID NO: 1987488
ugucucauagaguacucug

SEQ ID NO: 1987490 - RNA, 19 nt, Artificial Sequence
  Description of Artificial Sequence: Synthetic oligonucleotide
  Sense strand starting at position 3582 of SEQ ID NO: 1880704
gacauuacauaggugauca

SEQ ID NO: 1987491 - RNA, 19 nt, Artificial Sequence
  Description of Artificial Sequence: Synthetic oligonucleotide
  Antisense strand to SEQ ID NO: 1987490
ugaucaccuauguaauguc

SEQ ID NO: 1987492 - RNA, 19 nt, Artificial Sequence
  Description of Artificial Sequence: Synthetic oligonucleotide
  Sense strand starting at position 3712 of SEQ ID NO: 1880704
auguuaaaucgcgaaacaa

SEQ ID NO: 1987493 - RNA, 19 nt, Artificial Sequence
  Description of Artificial Sequence: Synthetic oligonucleotide
  Antisense strand to SEQ ID NO: 1987492
uuguuucgcgauuuaacau

SEQ ID NO: 1987494 - RNA, 19 nt, Artificial Sequence
  Description of Artificial Sequence: Synthetic oligonucleotide
  Sense strand starting at position 3745 of SEQ ID NO: 1880704
cuaaguucucuccaggaac

SEQ ID NO: 1987495 - RNA, 19 nt, Artificial Sequence
  Description of Artificial Sequence: Synthetic oligonucleotide
  Antisense strand to SEQ ID NO: 1987494
guuccuggagagaacuuag

SEQ ID NO: 1987496 - RNA, 19 nt, Artificial Sequence
  Description of Artificial Sequence: Synthetic oligonucleotide
  Sense strand starting at position 3803 of SEQ ID NO: 1880704
ccuauuguauugguccaga

SEQ ID NO: 1987497 - RNA, 19 nt, Artificial Sequence
  Description of Artificial Sequence: Synthetic oligonucleotide
  Antisense strand to SEQ ID NO: 1987496
ucuggaccaauacaauagg

SEQ ID NO: 1987498 - RNA, 19 nt, Artificial Sequence
  Description of Artificial Sequence: Synthetic oligonucleotide
  Sense strand starting at position 384 of SEQ ID NO: 1880705
auaacccauguuuguuaua

SEQ ID NO: 1987499 - RNA, 19 nt, Artificial Sequence
  Description of Artificial Sequence: Synthetic oligonucleotide
  Antisense strand to SEQ ID NO: 1987498
uauaacaaacauggguuau

SEQ ID NO: 1987500 - RNA, 19 nt, Artificial Sequence
  Description of Artificial Sequence: Synthetic oligonucleotide
  Sense strand starting at position 471 of SEQ ID NO: 1880705
uuaggaaugguauguauug

SEQ ID NO: 1987501 - RNA, 19 nt, Artificial Sequence
  Description of Artificial Sequence: Synthetic oligonucleotide
  Antisense strand to SEQ ID NO: 1987500
caauacauaccauuccuaa

SEQ ID NO: 1987502 - RNA, 19 nt, Artificial Sequence
  Description of Artificial Sequence: Synthetic oligonucleotide
  Sense strand starting at position 483 of SEQ ID NO: 1880705
uguauugucugacuauaag

SEQ ID NO: 1987503 - RNA, 19 nt, Artificial Sequence
  Description of Artificial Sequence: Synthetic oligonucleotide
  Antisense strand to SEQ ID NO: 1987502
cuuauagucagacaauaca

SEQ ID NO: 1987504 - RNA, 19 nt, Artificial Sequence
  Description of Artificial Sequence: Synthetic oligonucleotide
  Sense strand starting at position 492 of SEQ ID NO: 1880705
ugacuauaagaacggagua

SEQ ID NO: 1987505 - RNA, 19 nt, Artificial Sequence
  Description of Artificial Sequence: Synthetic oligonucleotide
  Antisense strand to SEQ ID NO: 1987504
uacuccguucuuauaguca

SEQ ID NO: 1987506 - RNA, 19 nt, Artificial Sequence
  Description of Artificial Sequence: Synthetic oligonucleotide
  Sense strand starting at position 608 of SEQ ID NO: 1880705
uaaugcaugcauuaagguu

SEQ ID NO: 1987507 - RNA, 19 nt, Artificial Sequence
  Description of Artificial Sequence: Synthetic oligonucleotide
  Antisense strand to SEQ ID NO: 1987506
aaccuuaaugcaugcauua

SEQ ID NO: 1987508 - RNA, 19 nt, Artificial Sequence
  Description of Artificial Sequence: Synthetic oligonucleotide
  Sense strand starting at position 685 of SEQ ID NO: 1880705
gucuccuagagguagagau

SEQ ID NO: 1987509 - RNA, 19 nt, Artificial Sequence
  Description of Artificial Sequence: Synthetic oligonucleotide
  Antisense strand to SEQ ID NO: 1987508
aucucuaccucuaggagac

SEQ ID NO: 1987510 - RNA, 19 nt, Artificial Sequence
  Description of Artificial Sequence: Synthetic oligonucleotide
  Sense strand starting at position 717 of SEQ ID NO: 1880705
augugaagagauugucaca

SEQ ID NO: 1987511 - RNA, 19 nt, Artificial Sequence
  Description of Artificial Sequence: Synthetic oligonucleotide
  Antisense strand to SEQ ID NO: 1987510
ugugacaaucucuucacau

SEQ ID NO: 1987512 - RNA, 19 nt, Artificial Sequence
  Description of Artificial Sequence: Synthetic oligonucleotide
  Sense strand starting at position 748 of SEQ ID NO: 1880705
acguuaauagccuaaagca

SEQ ID NO: 1987513 - RNA, 19 nt, Artificial Sequence
  Description of Artificial Sequence: Synthetic oligonucleotide
  Antisense strand to SEQ ID NO: 1987512
ugcuuuaggcuauuaacgu

SEQ ID NO: 1987514 - RNA, 19 nt, Artificial Sequence
  Description of Artificial Sequence: Synthetic oligonucleotide
  Sense strand starting at position 790 of SEQ ID NO: 1880705
ucaagucuuggauaaaugu

SEQ ID NO: 1987515 - RNA, 19 nt, Artificial Sequence
  Description of Artificial Sequence: Synthetic oligonucleotide
  Antisense strand to SEQ ID NO: 1987514
acauuuauccaagacuuga

SEQ ID NO: 1987516 - RNA, 19 nt, Artificial Sequence
  Description of Artificial Sequence: Synthetic oligonucleotide
  Sense strand starting at position 796 of SEQ ID NO: 1880705
cuuggauaaauguauucga

SEQ ID NO: 1987517 - RNA, 19 nt, Artificial Sequence
  Description of Artificial Sequence: Synthetic oligonucleotide
  Antisense strand to SEQ ID NO: 1987516
ucgaauacauuuauccaag

SEQ ID NO: 1987518 - RNA, 19 nt, Artificial Sequence
  Description of Artificial Sequence: Synthetic oligonucleotide
  Sense strand starting at position 799 of SEQ ID NO: 1880705
ggauaaauguauucgauug

SEQ ID NO: 1987519 - RNA, 19 nt, Artificial Sequence
  Description of Artificial Sequence: Synthetic oligonucleotide
  Antisense strand to SEQ ID NO: 1987518
caaucgaauacauuuaucc

SEQ ID NO: 1987520 - RNA, 19 nt, Artificial Sequence
  Description of Artificial Sequence: Synthetic oligonucleotide
  Sense strand starting at position 804 of SEQ ID NO: 1880705
aauguauucgauugacaau

SEQ ID NO: 1987521 - RNA, 19 nt, Artificial Sequence
  Description of Artificial Sequence: Synthetic oligonucleotide
  Antisense strand to SEQ ID NO: 1987520
auugucaaucgaauacauu

SEQ ID NO: 1987522 - RNA, 19 nt, Artificial Sequence
  Description of Artificial Sequence: Synthetic oligonucleotide
  Sense strand starting at position 892 of SEQ ID NO: 1880705
guugcaguccucuaaauaa

SEQ ID NO: 1987523 - RNA, 19 nt, Artificial Sequence
  Description of Artificial Sequence: Synthetic oligonucleotide
  Antisense strand to SEQ ID NO: 1987522
uuauuuagaggacugcaac

SEQ ID NO: 1987524 - RNA, 19 nt, Artificial Sequence
  Description of Artificial Sequence: Synthetic oligonucleotide
  Sense strand starting at position 1117 of SEQ ID NO: 1880705
guuuaagaaguguaaugua

SEQ ID NO: 1987525 - RNA, 19 nt, Artificial Sequence
  Description of Artificial Sequence: Synthetic oligonucleotide
  Antisense strand to SEQ ID NO: 1987524
uacauuacacuucuuaaac

SEQ ID NO: 1987526 - RNA, 19 nt, Artificial Sequence
  Description of Artificial Sequence: Synthetic oligonucleotide
  Sense strand starting at position 1122 of SEQ ID NO: 1880705
agaaguguaauguaaguac

SEQ ID NO: 1987527 - RNA, 19 nt, Artificial Sequence
  Description of Artificial Sequence: Synthetic oligonucleotide
  Antisense strand to SEQ ID NO: 1987526
guacuuacauuacacuucu

SEQ ID NO: 1987528 - RNA, 19 nt, Artificial Sequence
  Description of Artificial Sequence: Synthetic oligonucleotide
  Sense strand starting at position 1126 of SEQ ID NO: 1880705
guguaauguaaguacuuua

SEQ ID NO: 1987529 - RNA, 19 nt, Artificial Sequence
  Description of Artificial Sequence: Synthetic oligonucleotide
  Antisense strand to SEQ ID NO: 1987528
uaaaguacuuacauuacac

SEQ ID NO: 1987530 - RNA, 19 nt, Artificial Sequence
  Description of Artificial Sequence: Synthetic oligonucleotide
  Sense strand starting at position 1131 of SEQ ID NO: 1880705
auguaaguacuuuagcaaa

SEQ ID NO: 1987531 - RNA, 19 nt, Artificial Sequence
  Description of Artificial Sequence: Synthetic oligonucleotide
  Antisense strand to SEQ ID NO: 1987530
uuugcuaaaguacuuacau

SEQ ID NO: 1987532 - RNA, 19 nt, Artificial Sequence
  Description of Artificial Sequence: Synthetic oligonucleotide
  Sense strand starting at position 1240 of SEQ ID NO: 1880705
cgacuucucgcggagagga

SEQ ID NO: 1987533 - RNA, 19 nt, Artificial Sequence
  Description of Artificial Sequence: Synthetic oligonucleotide
  Antisense strand to SEQ ID NO: 1987532
uccucuccgcgagaagucg

SEQ ID NO: 1987534 - RNA, 19 nt, Artificial Sequence
  Description of Artificial Sequence: Synthetic oligonucleotide
  Sense strand starting at position 1284 of SEQ ID NO: 1880705
ggcagaacuucagcgaaag

SEQ ID NO: 1987535 - RNA, 19 nt, Artificial Sequence
  Description of Artificial Sequence: Synthetic oligonucleotide
  Antisense strand to SEQ ID NO: 1987534
cuuucgcugaaguucugcc

SEQ ID NO: 1987536 - RNA, 19 nt, Artificial Sequence
  Description of Artificial Sequence: Synthetic oligonucleotide
  Sense strand starting at position 2265 of SEQ ID NO: 1880705
gcgcgucaccagagagaaa

SEQ ID NO: 1987537 - RNA, 19 nt, Artificial Sequence
  Description of Artificial Sequence: Synthetic oligonucleotide
  Antisense strand to SEQ ID NO: 1987536
uuucucucuggugacgcgc

SEQ ID NO: 1987538 - RNA, 19 nt, Artificial Sequence
  Description of Artificial Sequence: Synthetic oligonucleotide
  Sense strand starting at position 2328 of SEQ ID NO: 1880705
ggccucuaguucuccauuu

SEQ ID NO: 1987539 - RNA, 19 nt, Artificial Sequence
  Description of Artificial Sequence: Synthetic oligonucleotide
  Antisense strand to SEQ ID NO: 1987538
aaauggagaacuagaggcc

SEQ ID NO: 1987540 - RNA, 19 nt, Artificial Sequence
  Description of Artificial Sequence: Synthetic oligonucleotide
  Sense strand starting at position 2360 of SEQ ID NO: 1880705
auuccugugcccgaaauaa

SEQ ID NO: 1987541 - RNA, 19 nt, Artificial Sequence
  Description of Artificial Sequence: Synthetic oligonucleotide
  Antisense strand to SEQ ID NO: 1987540
uuauuucgggcacaggaau

SEQ ID NO: 1987542 - RNA, 19 nt, Artificial Sequence
  Description of Artificial Sequence: Synthetic oligonucleotide
  Sense strand starting at position 2402 of SEQ ID NO: 1880705
auuuaaagguugcaagaaa

SEQ ID NO: 1987543 - RNA, 19 nt, Artificial Sequence
  Description of Artificial Sequence: Synthetic oligonucleotide
  Antisense strand to SEQ ID NO: 1987542
uuucuugcaaccuuuaaau

SEQ ID NO: 1987544 - RNA, 19 nt, Artificial Sequence
  Description of Artificial Sequence: Synthetic oligonucleotide
  Sense strand starting at position 2569 of SEQ ID NO: 1880705
gcggcugacauacagaauu

SEQ ID NO: 1987545 - RNA, 19 nt, Artificial Sequence
  Description of Artificial Sequence: Synthetic oligonucleotide
  Antisense strand to SEQ ID NO: 1987544
aauucuguaugucagccgc

SEQ ID NO: 1987546 - RNA, 19 nt, Artificial Sequence
  Description of Artificial Sequence: Synthetic oligonucleotide
  Sense strand starting at position 2631 of SEQ ID NO: 1880705
auuaguuacugaucucaag

SEQ ID NO: 1987547 - RNA, 19 nt, Artificial Sequence
  Description of Artificial Sequence: Synthetic oligonucleotide
  Antisense strand to SEQ ID NO: 1987546
cuugagaucaguaacuaau

SEQ ID NO: 1987548 - RNA, 19 nt, Artificial Sequence
  Description of Artificial Sequence: Synthetic oligonucleotide
  Sense strand starting at position 2715 of SEQ ID NO: 1880705
guuguagcugacggaauuu

SEQ ID NO: 1987549 - RNA, 19 nt, Artificial Sequence
  Description of Artificial Sequence: Synthetic oligonucleotide
  Antisense strand to SEQ ID NO: 1987548
aaauuccgucagcuacaac

SEQ ID NO: 1987550 - RNA, 19 nt, Artificial Sequence
  Description of Artificial Sequence: Synthetic oligonucleotide
  Sense strand starting at position 2799 of SEQ ID NO: 1880705
gaaugauuguuaccguaau

SEQ ID NO: 1987551 - RNA, 19 nt, Artificial Sequence
  Description of Artificial Sequence: Synthetic oligonucleotide
  Antisense strand to SEQ ID NO: 1987550
auuacgguaacaaucauuc

SEQ ID NO: 1987552 - RNA, 19 nt, Artificial Sequence
  Description of Artificial Sequence: Synthetic oligonucleotide
  Sense strand starting at position 2810 of SEQ ID NO: 1880705
accguaaugcucuagagag

SEQ ID NO: 1987553 - RNA, 19 nt, Artificial Sequence
  Description of Artificial Sequence: Synthetic oligonucleotide
  Antisense strand to SEQ ID NO: 1987552
cucucuagagcauuacggu

SEQ ID NO: 1987554 - RNA, 19 nt, Artificial Sequence
  Description of Artificial Sequence: Synthetic oligonucleotide
  Sense strand starting at position 2916 of SEQ ID NO: 1880705
gggauuaggucaucuucua

SEQ ID NO: 1987555 - RNA, 19 nt, Artificial Sequence
  Description of Artificial Sequence: Synthetic oligonucleotide
  Antisense strand to SEQ ID NO: 1987554
uagaagaugaccuaauccc

SEQ ID NO: 1987556 - RNA, 19 nt, Artificial Sequence
  Description of Artificial Sequence: Synthetic oligonucleotide
  Sense strand starting at position 3085 of SEQ ID NO: 1880705
acuggcucucccuaggaaa

SEQ ID NO: 1987557 - RNA, 19 nt, Artificial Sequence
  Description of Artificial Sequence: Synthetic oligonucleotide
  Antisense strand to SEQ ID NO: 1987556
uuuccuagggagagccagu

SEQ ID NO: 1987558 - RNA, 19 nt, Artificial Sequence
  Description of Artificial Sequence: Synthetic oligonucleotide
  Sense strand starting at position 3396 of SEQ ID NO: 1880705
ccugauggccagcaauaga

SEQ ID NO: 1987559 - RNA, 19 nt, Artificial Sequence
  Description of Artificial Sequence: Synthetic oligonucleotide
  Antisense strand to SEQ ID NO: 1987558
ucuauugcuggccaucagg

SEQ ID NO: 1987560 - RNA, 19 nt, Artificial Sequence
  Description of Artificial Sequence: Synthetic oligonucleotide
  Sense strand starting at position 3444 of SEQ ID NO: 1880705
agcgucuauuuaguguuaa

SEQ ID NO: 1987561 - RNA, 19 nt, Artificial Sequence
  Description of Artificial Sequence: Synthetic oligonucleotide
  Antisense strand to SEQ ID NO: 1987560
uuaacacuaaauagacgcu

SEQ ID NO: 1987562 - RNA, 19 nt, Artificial Sequence
  Description of Artificial Sequence: Synthetic oligonucleotide
  Sense strand starting at position 3473 of SEQ ID NO: 1880705
gucuaauuacugugaaaua

SEQ ID NO: 1987563 - RNA, 19 nt, Artificial Sequence
  Description of Artificial Sequence: Synthetic oligonucleotide
  Antisense strand to SEQ ID NO: 1987562
uauuucacaguaauuagac

SEQ ID NO: 1987564 - RNA, 19 nt, Artificial Sequence
  Description of Artificial Sequence: Synthetic oligonucleotide
  Sense strand starting at position 3485 of SEQ ID NO: 1880705
ugaaauaguccugguaacu

SEQ ID NO: 1987565 - RNA, 19 nt, Artificial Sequence
  Description of Artificial Sequence: Synthetic oligonucleotide
  Antisense strand to SEQ ID NO: 1987564
aguuaccaggacuauuuca

SEQ ID NO: 1987566 - RNA, 19 nt, Artificial Sequence
  Description of Artificial Sequence: Synthetic oligonucleotide
  Sense strand starting at position 3563 of SEQ ID NO: 1880705
acaccagaguacucuauga

SEQ ID NO: 1987567 - RNA, 19 nt, Artificial Sequence
  Description of Artificial Sequence: Synthetic oligonucleotide
  Antisense strand to SEQ ID NO: 1987566
ucauagaguacucuggugu

SEQ ID NO: 1987568 - RNA, 19 nt, Artificial Sequence
  Description of Artificial Sequence: Synthetic oligonucleotide
  Sense strand starting at position 3567 of SEQ ID NO: 1880705
cagaguacucuaugagaca

SEQ ID NO: 1987569 - RNA, 19 nt, Artificial Sequence
  Description of Artificial Sequence: Synthetic oligonucleotide
  Antisense strand to SEQ ID NO: 1987568
ugucucauagaguacucug

SEQ ID NO: 1987570 - RNA, 19 nt, Artificial Sequence
  Description of Artificial Sequence: Synthetic oligonucleotide
  Sense strand starting at position 3582 of SEQ ID NO: 1880705
gacauuacauaggugauca

SEQ ID NO: 1987571 - RNA, 19 nt, Artificial Sequence
  Description of Artificial Sequence: Synthetic oligonucleotide
  Antisense strand to SEQ ID NO: 1987570
ugaucaccuauguaauguc

SEQ ID NO: 1987572 - RNA, 19 nt, Artificial Sequence
  Description of Artificial Sequence: Synthetic oligonucleotide
  Sense strand starting at position 3712 of SEQ ID NO: 1880705
auguuaaaucgcgaaacaa

SEQ ID NO: 1987573 - RNA, 19 nt, Artificial Sequence
  Description of Artificial Sequence: Synthetic oligonucleotide
  Antisense strand to SEQ ID NO: 1987572
uuguuucgcgauuuaacau

SEQ ID NO: 1987574 - RNA, 19 nt, Artificial Sequence
  Description of Artificial Sequence: Synthetic oligonucleotide
  Sense strand starting at position 3745 of SEQ ID NO: 1880705
cuaaguucucuccaggaac

SEQ ID NO: 1987575 - RNA, 19 nt, Artificial Sequence
  Description of Artificial Sequence: Synthetic oligonucleotide
  Antisense strand to SEQ ID NO: 1987574
guuccuggagagaacuuag

SEQ ID NO: 1987576 - RNA, 19 nt, Artificial Sequence
  Description of Artificial Sequence: Synthetic oligonucleotide
  Sense strand starting at position 3803 of SEQ ID NO: 1880705
ccuauuguauugguccaga

SEQ ID NO: 1987577 - RNA, 19 nt, Artificial Sequence
  Description of Artificial Sequence: Synthetic oligonucleotide
  Antisense strand to SEQ ID NO: 1987576
ucuggaccaauacaauagg

SEQ ID NO: 1987578 - RNA, 19 nt, Artificial Sequence
  Description of Artificial Sequence: Synthetic oligonucleotide
  Sense strand starting at position 499 of SEQ ID NO: 1880706
ugguuugugccugaccaua

SEQ ID NO: 1987579 - RNA, 19 nt, Artificial Sequence
  Description of Artificial Sequence: Synthetic oligonucleotide
  Antisense strand to SEQ ID NO: 1987578
uauggucaggcacaaacca

SEQ ID NO: 1987580 - RNA, 19 nt, Artificial Sequence
  Description of Artificial Sequence: Synthetic oligonucleotide
  Sense strand starting at position 509 of SEQ ID NO: 1880706
cugaccauagcuuguacua

SEQ ID NO: 1987581 - RNA, 19 nt, Artificial Sequence
  Description of Artificial Sequence: Synthetic oligonucleotide
  Antisense strand to SEQ ID NO: 1987580
uaguacaagcuauggucag

SEQ ID NO: 1987582 - RNA, 19 nt, Artificial Sequence
  Description of Artificial Sequence: Synthetic oligonucleotide
  Sense strand starting at position 528 of SEQ ID NO: 1880706
gggucaacugcagaaucuu

SEQ ID NO: 1987583 - RNA, 19 nt, Artificial Sequence
  Description of Artificial Sequence: Synthetic oligonucleotide
  Antisense strand to SEQ ID NO: 1987582
aagauucugcaguugaccc

SEQ ID NO: 1987584 - RNA, 19 nt, Artificial Sequence
  Description of Artificial Sequence: Synthetic oligonucleotide
  Sense strand starting at position 792 of SEQ ID NO: 1880706
cuacaaaugcggugaaaug

SEQ ID NO: 1987585 - RNA, 19 nt, Artificial Sequence
  Description of Artificial Sequence: Synthetic oligonucleotide
  Antisense strand to SEQ ID NO: 1987584
cauuucaccgcauuuguag

SEQ ID NO: 1987586 - RNA, 19 nt, Artificial Sequence
  Description of Artificial Sequence: Synthetic oligonucleotide
  Sense strand starting at position 1174 of SEQ ID NO: 1880706
cuacaauucccaggugaug

SEQ ID NO: 1987587 - RNA, 19 nt, Artificial Sequence
  Description of Artificial Sequence: Synthetic oligonucleotide
  Antisense strand to SEQ ID NO: 1987586
caucaccugggaauuguag

SEQ ID NO: 1987588 - RNA, 19 nt, Artificial Sequence
  Description of Artificial Sequence: Synthetic oligonucleotide
  Sense strand starting at position 1198 of SEQ ID NO: 1880706
gguugaugugguuggaaac

SEQ ID NO: 1987589 - RNA, 19 nt, Artificial Sequence
  Description of Artificial Sequence: Synthetic oligonucleotide
  Antisense strand to SEQ ID NO: 1987588
guuuccaaccacaucaacc

SEQ ID NO: 1987590 - RNA, 19 nt, Artificial Sequence
  Description of Artificial Sequence: Synthetic oligonucleotide
  Sense strand starting at position 1199 of SEQ ID NO: 1880706
guugaugugguuggaaacu

SEQ ID NO: 1987591 - RNA, 19 nt, Artificial Sequence
  Description of Artificial Sequence: Synthetic oligonucleotide
  Antisense strand to SEQ ID NO: 1987590
aguuuccaaccacaucaac

SEQ ID NO: 1987592 - RNA, 19 nt, Artificial Sequence
  Description of Artificial Sequence: Synthetic oligonucleotide
  Sense strand starting at position 1264 of SEQ ID NO: 1880706
ugcaauugagagggucaga

SEQ ID NO: 1987593 - RNA, 19 nt, Artificial Sequence
  Description of Artificial Sequence: Synthetic oligonucleotide
  Antisense strand to SEQ ID NO: 1987592
ucugacccucucaauugca

SEQ ID NO: 1987594 - RNA, 19 nt, Artificial Sequence
  Description of Artificial Sequence: Synthetic oligonucleotide
  Sense strand starting at position 1279 of SEQ ID NO: 1880706
cagaaauguuggguggguu

SEQ ID NO: 1987595 - RNA, 19 nt, Artificial Sequence
  Description of Artificial Sequence: Synthetic oligonucleotide
  Antisense strand to SEQ ID NO: 1987594
aacccacccaacauuucug

SEQ ID NO: 1987596 - RNA, 19 nt, Artificial Sequence
  Description of Artificial Sequence: Synthetic oligonucleotide
  Sense strand starting at position 1280 of SEQ ID NO: 1880706
agaaauguuggguggguuu

SEQ ID NO: 1987597 - RNA, 19 nt, Artificial Sequence
  Description of Artificial Sequence: Synthetic oligonucleotide
  Antisense strand to SEQ ID NO: 1987596
aaacccacccaacauuucu

SEQ ID NO: 1987598 - RNA, 19 nt, Artificial Sequence
  Description of Artificial Sequence: Synthetic oligonucleotide
  Sense strand starting at position 1528 of SEQ ID NO: 1880706
gaagcuaucuggccuagga

SEQ ID NO: 1987599 - RNA, 19 nt, Artificial Sequence
  Description of Artificial Sequence: Synthetic oligonucleotide
  Antisense strand to SEQ ID NO: 1987598
uccuaggccagauagcuuc

SEQ ID NO: 1987600 - RNA, 19 nt, Artificial Sequence
  Description of Artificial Sequence: Synthetic oligonucleotide
  Sense strand starting at position 1530 of SEQ ID NO: 1880706
agcuaucuggccuaggaca

SEQ ID NO: 1987601 - RNA, 19 nt, Artificial Sequence
  Description of Artificial Sequence: Synthetic oligonucleotide
  Antisense strand to SEQ ID NO: 1987600
uguccuaggccagauagcu

SEQ ID NO: 1987602 - RNA, 19 nt, Artificial Sequence
  Description of Artificial Sequence: Synthetic oligonucleotide
  Sense strand starting at position 1663 of SEQ ID NO: 1880706
gagcuucuuccugggagag

SEQ ID NO: 1987603 - RNA, 19 nt, Artificial Sequence
  Description of Artificial Sequence: Synthetic oligonucleotide
  Antisense strand to SEQ ID NO: 1987602
cucucccaggaagaagcuc

SEQ ID NO: 1987604 - RNA, 19 nt, Artificial Sequence
  Description of Artificial Sequence: Synthetic oligonucleotide
  Sense strand starting at position 1664 of SEQ ID NO: 1880706
agcuucuuccugggagaga

SEQ ID NO: 1987605 - RNA, 19 nt, Artificial Sequence
  Description of Artificial Sequence: Synthetic oligonucleotide
  Antisense strand to SEQ ID NO: 1987604
ucucucccaggaagaagcu

SEQ ID NO: 1987606 - RNA, 19 nt, Artificial Sequence
  Description of Artificial Sequence: Synthetic oligonucleotide
  Sense strand starting at position 1675 of SEQ ID NO: 1880706
gggagagaguguuucaggu

SEQ ID NO: 1987607 - RNA, 19 nt, Artificial Sequence
  Description of Artificial Sequence: Synthetic oligonucleotide
  Antisense strand to SEQ ID NO: 1987606
accugaaacacucucuccc

SEQ ID NO: 1987608 - RNA, 19 nt, Artificial Sequence
  Description of Artificial Sequence: Synthetic oligonucleotide
  Sense strand starting at position 2026 of SEQ ID NO: 1880706
gaggcauuccauuacguaa

SEQ ID NO: 1987609 - RNA, 19 nt, Artificial Sequence
  Description of Artificial Sequence: Synthetic oligonucleotide
  Antisense strand to SEQ ID NO: 1987608
uuacguaauggaaugccuc

SEQ ID NO: 1987610 - RNA, 19 nt, Artificial Sequence
  Description of Artificial Sequence: Synthetic oligonucleotide
  Sense strand starting at position 2189 of SEQ ID NO: 1880706
ggcagcuguccugagugaa

SEQ ID NO: 1987611 - RNA, 19 nt, Artificial Sequence
  Description of Artificial Sequence: Synthetic oligonucleotide
  Antisense strand to SEQ ID NO: 1987610
uucacucaggacagcugcc

SEQ ID NO: 1987612 - RNA, 19 nt, Artificial Sequence
  Description of Artificial Sequence: Synthetic oligonucleotide
  Sense strand starting at position 2232 of SEQ ID NO: 1880706
ucuugaaucagugguuuag

SEQ ID NO: 1987613 - RNA, 19 nt, Artificial Sequence
  Description of Artificial Sequence: Synthetic oligonucleotide
  Antisense strand to SEQ ID NO: 1987612
cuaaaccacugauucaaga

SEQ ID NO: 1987614 - RNA, 19 nt, Artificial Sequence
  Description of Artificial Sequence: Synthetic oligonucleotide
  Sense strand starting at position 2234 of SEQ ID NO: 1880706
uugaaucagugguuuagag

SEQ ID NO: 1987615 - RNA, 19 nt, Artificial Sequence
  Description of Artificial Sequence: Synthetic oligonucleotide
  Antisense strand to SEQ ID NO: 1987614
cucuaaaccacugauucaa

SEQ ID NO: 1987616 - RNA, 19 nt, Artificial Sequence
  Description of Artificial Sequence: Synthetic oligonucleotide
  Sense strand starting at position 2236 of SEQ ID NO: 1880706
gaaucagugguuuagagug

SEQ ID NO: 1987617 - RNA, 19 nt, Artificial Sequence
  Description of Artificial Sequence: Synthetic oligonucleotide
  Antisense strand to SEQ ID NO: 1987616
cacucuaaaccacugauuc

SEQ ID NO: 1987618 - RNA, 19 nt, Artificial Sequence
  Description of Artificial Sequence: Synthetic oligonucleotide
  Sense strand starting at position 2447 of SEQ ID NO: 1880706
guggaaaucgucgcggagu

SEQ ID NO: 1987619 - RNA, 19 nt, Artificial Sequence
  Description of Artificial Sequence: Synthetic oligonucleotide
  Antisense strand to SEQ ID NO: 1987618
acuccgcgacgauuuccac

SEQ ID NO: 1987620 - RNA, 19 nt, Artificial Sequence
  Description of Artificial Sequence: Synthetic oligonucleotide
  Sense strand starting at position 2875 of SEQ ID NO: 1880706
ucauuacggacuugagaug

SEQ ID NO: 1987621 - RNA, 19 nt, Artificial Sequence
  Description of Artificial Sequence: Synthetic oligonucleotide
  Antisense strand to SEQ ID NO: 1987620
caucucaaguccguaauga

SEQ ID NO: 1987622 - RNA, 19 nt, Artificial Sequence
  Description of Artificial Sequence: Synthetic oligonucleotide
  Sense strand starting at position 2909 of SEQ ID NO: 1880706
aucucaugucaguggcaga

SEQ ID NO: 1987623 - RNA, 19 nt, Artificial Sequence
  Description of Artificial Sequence: Synthetic oligonucleotide
  Antisense strand to SEQ ID NO: 1987622
ucugccacugacaugagau

SEQ ID NO: 1987624 - RNA, 19 nt, Artificial Sequence
  Description of Artificial Sequence: Synthetic oligonucleotide
  Sense strand starting at position 2925 of SEQ ID NO: 1880706
agagaaagaauucgaagcu

SEQ ID NO: 1987625 - RNA, 19 nt, Artificial Sequence
  Description of Artificial Sequence: Synthetic oligonucleotide
  Antisense strand to SEQ ID NO: 1987624
agcuucgaauucuuucucu

SEQ ID NO: 1987626 - RNA, 19 nt, Artificial Sequence
  Description of Artificial Sequence: Synthetic oligonucleotide
  Sense strand starting at position 3083 of SEQ ID NO: 1880706
ucacuuuguguagaguuaa

SEQ ID NO: 1987627 - RNA, 19 nt, Artificial Sequence
  Description of Artificial Sequence: Synthetic oligonucleotide
  Antisense strand to SEQ ID NO: 1987626
uuaacucuacacaaaguga

SEQ ID NO: 1987628 - RNA, 19 nt, Artificial Sequence
  Description of Artificial Sequence: Synthetic oligonucleotide
  Sense strand starting at position 3156 of SEQ ID NO: 1880706
uaauguguuguagaacaac

SEQ ID NO: 1987629 - RNA, 19 nt, Artificial Sequence
  Description of Artificial Sequence: Synthetic oligonucleotide
  Antisense strand to SEQ ID NO: 1987628
guuguucuacaacacauua

SEQ ID NO: 1987630 - RNA, 19 nt, Artificial Sequence
  Description of Artificial Sequence: Synthetic oligonucleotide
  Sense strand starting at position 3159 of SEQ ID NO: 1880706
uguguuguagaacaacuuu

SEQ ID NO: 1987631 - RNA, 19 nt, Artificial Sequence
  Description of Artificial Sequence: Synthetic oligonucleotide
  Antisense strand to SEQ ID NO: 1987630
aaaguuguucuacaacaca

SEQ ID NO: 1987632 - RNA, 19 nt, Artificial Sequence
  Description of Artificial Sequence: Synthetic oligonucleotide
  Sense strand starting at position 3167 of SEQ ID NO: 1880706
agaacaacuuuggcaugua

SEQ ID NO: 1987633 - RNA, 19 nt, Artificial Sequence
  Description of Artificial Sequence: Synthetic oligonucleotide
  Antisense strand to SEQ ID NO: 1987632
uacaugccaaaguuguucu

SEQ ID NO: 1987634 - RNA, 19 nt, Artificial Sequence
  Description of Artificial Sequence: Synthetic oligonucleotide
  Sense strand starting at position 3170 of SEQ ID NO: 1880706
acaacuuuggcauguauga

SEQ ID NO: 1987635 - RNA, 19 nt, Artificial Sequence
  Description of Artificial Sequence: Synthetic oligonucleotide
  Antisense strand to SEQ ID NO: 1987634
ucauacaugccaaaguugu

SEQ ID NO: 1987636 - RNA, 19 nt, Artificial Sequence
  Description of Artificial Sequence: Synthetic oligonucleotide
  Sense strand starting at position 3183 of SEQ ID NO: 1880706
guaugaaggccuuguaaau

SEQ ID NO: 1987637 - RNA, 19 nt, Artificial Sequence
  Description of Artificial Sequence: Synthetic oligonucleotide
  Antisense strand to SEQ ID NO: 1987636
auuuacaaggccuucauac

SEQ ID NO: 1987638 - RNA, 19 nt, Artificial Sequence
  Description of Artificial Sequence: Synthetic oligonucleotide
  Sense strand starting at position 3189 of SEQ ID NO: 1880706
aggccuuguaaauguugau

SEQ ID NO: 1987639 - RNA, 19 nt, Artificial Sequence
  Description of Artificial Sequence: Synthetic oligonucleotide
  Antisense strand to SEQ ID NO: 1987638
aucaacauuuacaaggccu

SEQ ID NO: 1987640 - RNA, 19 nt, Artificial Sequence
  Description of Artificial Sequence: Synthetic oligonucleotide
  Sense strand starting at position 3207 of SEQ ID NO: 1880706
ugaugaugaugcuuagaaa

SEQ ID NO: 1987641 - RNA, 19 nt, Artificial Sequence
  Description of Artificial Sequence: Synthetic oligonucleotide
  Antisense strand to SEQ ID NO: 1987640
uuucuaagcaucaucauca

SEQ ID NO: 1987642 - RNA, 19 nt, Artificial Sequence
  Description of Artificial Sequence: Synthetic oligonucleotide
  Sense strand starting at position 3264 of SEQ ID NO: 1880706
acuguauucccaggagaua

SEQ ID NO: 1987643 - RNA, 19 nt, Artificial Sequence
  Description of Artificial Sequence: Synthetic oligonucleotide
  Antisense strand to SEQ ID NO: 1987642
uaucuccugggaauacagu

SEQ ID NO: 1987644 - RNA, 19 nt, Artificial Sequence
  Description of Artificial Sequence: Synthetic oligonucleotide
  Sense strand starting at position 3330 of SEQ ID NO: 1880706
gaggaagaauaucacugaa

SEQ ID NO: 1987645 - RNA, 19 nt, Artificial Sequence
  Description of Artificial Sequence: Synthetic oligonucleotide
  Antisense strand to SEQ ID NO: 1987644
uucagugauauucuuccuc

SEQ ID NO: 1987646 - RNA, 19 nt, Artificial Sequence
  Description of Artificial Sequence: Synthetic oligonucleotide
  Sense strand starting at position 3430 of SEQ ID NO: 1880706
uuauguuugguugggauga

SEQ ID NO: 1987647 - RNA, 19 nt, Artificial Sequence
  Description of Artificial Sequence: Synthetic oligonucleotide
  Antisense strand to SEQ ID NO: 1987646
ucaucccaaccaaacauaa

SEQ ID NO: 1987648 - RNA, 19 nt, Artificial Sequence
  Description of Artificial Sequence: Synthetic oligonucleotide
  Sense strand starting at position 3490 of SEQ ID NO: 1880706
uguggaacccagggaguua

SEQ ID NO: 1987649 - RNA, 19 nt, Artificial Sequence
  Description of Artificial Sequence: Synthetic oligonucleotide
  Antisense strand to SEQ ID NO: 1987648
uaacucccuggguuccaca

SEQ ID NO: 1987650 - RNA, 19 nt, Artificial Sequence
  Description of Artificial Sequence: Synthetic oligonucleotide
  Sense strand starting at position 3617 of SEQ ID NO: 1880706
gugaaagcuuccuugugga

SEQ ID NO: 1987651 - RNA, 19 nt, Artificial Sequence
  Description of Artificial Sequence: Synthetic oligonucleotide
  Antisense strand to SEQ ID NO: 1987650
uccacaaggaagcuuucac

SEQ ID NO: 1987652 - RNA, 19 nt, Artificial Sequence
  Description of Artificial Sequence: Synthetic oligonucleotide
  Sense strand starting at position 3706 of SEQ ID NO: 1880706
gcgaucaggacucauugca

SEQ ID NO: 1987653 - RNA, 19 nt, Artificial Sequence
  Description of Artificial Sequence: Synthetic oligonucleotide
  Antisense strand to SEQ ID NO: 1987652
ugcaaugaguccugaucgc

SEQ ID NO: 1987654 - RNA, 19 nt, Artificial Sequence
  Description of Artificial Sequence: Synthetic oligonucleotide
  Sense strand starting at position 3972 of SEQ ID NO: 1880706
agagcauccuagucuaaag

SEQ ID NO: 1987655 - RNA, 19 nt, Artificial Sequence
  Description of Artificial Sequence: Synthetic oligonucleotide
  Antisense strand to SEQ ID NO: 1987654
cuuuagacuaggaugcucu

SEQ ID NO: 1987656 - RNA, 19 nt, Artificial Sequence
  Description of Artificial Sequence: Synthetic oligonucleotide
  Sense strand starting at position 3974 of SEQ ID NO: 1880706
agcauccuagucuaaagaa

SEQ ID NO: 1987657 - RNA, 19 nt, Artificial Sequence
  Description of Artificial Sequence: Synthetic oligonucleotide
  Antisense strand to SEQ ID NO: 1987656
uucuuuagacuaggaugcu

SEQ ID NO: 1987658 - RNA, 19 nt, Artificial Sequence
  Description of Artificial Sequence: Synthetic oligonucleotide
  Sense strand starting at position 87 of SEQ ID NO: 1880707
augguauacuaucuggaga

SEQ ID NO: 1987659 - RNA, 19 nt, Artificial Sequence
  Description of Artificial Sequence: Synthetic oligonucleotide
  Antisense strand to SEQ ID NO: 1987658
ucuccagauaguauaccau

SEQ ID NO: 1987660 - RNA, 19 nt, Artificial Sequence
  Description of Artificial Sequence: Synthetic oligonucleotide
  Sense strand starting at position 90 of SEQ ID NO: 1880707
guauacuaucuggagagca

SEQ ID NO: 1987661 - RNA, 19 nt, Artificial Sequence
  Description of Artificial Sequence: Synthetic oligonucleotide
  Antisense strand to SEQ ID NO: 1987660
ugcucuccagauaguauac

SEQ ID NO: 1987662 - RNA, 19 nt, Artificial Sequence
  Description of Artificial Sequence: Synthetic oligonucleotide
  Sense strand starting at position 104 of SEQ ID NO: 1880707
gagcauuaccugugacacu

SEQ ID NO: 1987663 - RNA, 19 nt, Artificial Sequence
  Description of Artificial Sequence: Synthetic oligonucleotide
  Antisense strand to SEQ ID NO: 1987662
agugucacagguaaugcuc

SEQ ID NO: 1987664 - RNA, 19 nt, Artificial Sequence
  Description of Artificial Sequence: Synthetic oligonucleotide
  Sense strand starting at position 127 of SEQ ID NO: 1880707
cuagguugugaguacaaag

SEQ ID NO: 1987665 - RNA, 19 nt, Artificial Sequence
  Description of Artificial Sequence: Synthetic oligonucleotide
  Antisense strand to SEQ ID NO: 1987664
cuuuguacucacaaccuag

SEQ ID NO: 1987666 - RNA, 19 nt, Artificial Sequence
  Description of Artificial Sequence: Synthetic oligonucleotide
  Sense strand starting at position 233 of SEQ ID NO: 1880707
agucaaaguuuccuacaac

SEQ ID NO: 1987667 - RNA, 19 nt, Artificial Sequence
  Description of Artificial Sequence: Synthetic oligonucleotide
  Antisense strand to SEQ ID NO: 1987666
guuguaggaaacuuugacu

SEQ ID NO: 1987668 - RNA, 19 nt, Artificial Sequence
  Description of Artificial Sequence: Synthetic oligonucleotide
  Sense strand starting at position 494 of SEQ ID NO: 1880707
ggcaauauuucuuaugguc

SEQ ID NO: 1987669 - RNA, 19 nt, Artificial Sequence
  Description of Artificial Sequence: Synthetic oligonucleotide
  Antisense strand to SEQ ID NO: 1987668
gaccauaagaaauauugcc

SEQ ID NO: 1987670 - RNA, 19 nt, Artificial Sequence
  Description of Artificial Sequence: Synthetic oligonucleotide
  Sense strand starting at position 501 of SEQ ID NO: 1880707
uuucuuauggucugaacuu

SEQ ID NO: 1987671 - RNA, 19 nt, Artificial Sequence
  Description of Artificial Sequence: Synthetic oligonucleotide
  Antisense strand to SEQ ID NO: 1987670
aaguucagaccauaagaaa

SEQ ID NO: 1987672 - RNA, 19 nt, Artificial Sequence
  Description of Artificial Sequence: Synthetic oligonucleotide
  Sense strand starting at position 570 of SEQ ID NO: 1880707
gugcuucuacacuaguaua

SEQ ID NO: 1987673 - RNA, 19 nt, Artificial Sequence
  Description of Artificial Sequence: Synthetic oligonucleotide
  Antisense strand to SEQ ID NO: 1987672
uauacuaguguagaagcac

SEQ ID NO: 1987674 - RNA, 19 nt, Artificial Sequence
  Description of Artificial Sequence: Synthetic oligonucleotide
  Sense strand starting at position 586 of SEQ ID NO: 1880707
auagaagaguacuggauuu

SEQ ID NO: 1987675 - RNA, 19 nt, Artificial Sequence
  Description of Artificial Sequence: Synthetic oligonucleotide
  Antisense strand to SEQ ID NO: 1987674
aaauccaguacucuucuau

SEQ ID NO: 1987676 - RNA, 19 nt, Artificial Sequence
  Description of Artificial Sequence: Synthetic oligonucleotide
  Sense strand starting at position 635 of SEQ ID NO: 1880707
agcuacagaucucugacaa

SEQ ID NO: 1987677 - RNA, 19 nt, Artificial Sequence
  Description of Artificial Sequence: Synthetic oligonucleotide
  Antisense strand to SEQ ID NO: 1987676
uugucagagaucuguagcu

SEQ ID NO: 1987678 - RNA, 19 nt, Artificial Sequence
  Description of Artificial Sequence: Synthetic oligonucleotide
  Sense strand starting at position 636 of SEQ ID NO: 1880707
gcuacagaucucugacaag

SEQ ID NO: 1987679 - RNA, 19 nt, Artificial Sequence
  Description of Artificial Sequence: Synthetic oligonucleotide
  Antisense strand to SEQ ID NO: 1987678
cuugucagagaucuguagc

SEQ ID NO: 1987680 - RNA, 19 nt, Artificial Sequence
  Description of Artificial Sequence: Synthetic oligonucleotide
  Sense strand starting at position 639 of SEQ ID NO: 1880707
acagaucucugacaagauu

SEQ ID NO: 1987681 - RNA, 19 nt, Artificial Sequence
  Description of Artificial Sequence: Synthetic oligonucleotide
  Antisense strand to SEQ ID NO: 1987680
aaucuugucagagaucugu

SEQ ID NO: 1987682 - RNA, 19 nt, Artificial Sequence
  Description of Artificial Sequence: Synthetic oligonucleotide
  Sense strand starting at position 722 of SEQ ID NO: 1880707
uggcacaagaaaugugaau

SEQ ID NO: 1987683 - RNA, 19 nt, Artificial Sequence
  Description of Artificial Sequence: Synthetic oligonucleotide
  Antisense strand to SEQ ID NO: 1987682
auucacauuucuugugcca

SEQ ID NO: 1987684 - RNA, 19 nt, Artificial Sequence
  Description of Artificial Sequence: Synthetic oligonucleotide
  Sense strand starting at position 1081 of SEQ ID NO: 1880707
aggagauauuuauggcuuu

SEQ ID NO: 1987685 - RNA, 19 nt, Artificial Sequence
  Description of Artificial Sequence: Synthetic oligonucleotide
  Antisense strand to SEQ ID NO: 1987684
aaagccauaaauaucuccu

SEQ ID NO: 1987686 - RNA, 19 nt, Artificial Sequence
  Description of Artificial Sequence: Synthetic oligonucleotide
  Sense strand starting at position 1177 of SEQ ID NO: 1880707
augagauguuuccuaagua

SEQ ID NO: 1987687 - RNA, 19 nt, Artificial Sequence
  Description of Artificial Sequence: Synthetic oligonucleotide
  Antisense strand to SEQ ID NO: 1987686
uacuuaggaaacaucucau

SEQ ID NO: 1987688 - RNA, 19 nt, Artificial Sequence
  Description of Artificial Sequence: Synthetic oligonucleotide
  Sense strand starting at position 1403 of SEQ ID NO: 1880707
gugacucacuaagcugaua

SEQ ID NO: 1987689 - RNA, 19 nt, Artificial Sequence
  Description of Artificial Sequence: Synthetic oligonucleotide
  Antisense strand to SEQ ID NO: 1987688
uaucagcuuagugagucac

SEQ ID NO: 1987690 - RNA, 19 nt, Artificial Sequence
  Description of Artificial Sequence: Synthetic oligonucleotide
  Sense strand starting at position 1904 of SEQ ID NO: 1880707
gcacgaguucuggauacaa

SEQ ID NO: 1987691 - RNA, 19 nt, Artificial Sequence
  Description of Artificial Sequence: Synthetic oligonucleotide
  Antisense strand to SEQ ID NO: 1987690
uuguauccagaacucgugc

SEQ ID NO: 1987692 - RNA, 19 nt, Artificial Sequence
  Description of Artificial Sequence: Synthetic oligonucleotide
  Sense strand starting at position 1906 of SEQ ID NO: 1880707
acgaguucuggauacaauu

SEQ ID NO: 1987693 - RNA, 19 nt, Artificial Sequence
  Description of Artificial Sequence: Synthetic oligonucleotide
  Antisense strand to SEQ ID NO: 1987692
aauuguauccagaacucgu

SEQ ID NO: 1987694 - RNA, 19 nt, Artificial Sequence
  Description of Artificial Sequence: Synthetic oligonucleotide
  Sense strand starting at position 1914 of SEQ ID NO: 1880707
uggauacaauuuggugauu

SEQ ID NO: 1987695 - RNA, 19 nt, Artificial Sequence
  Description of Artificial Sequence: Synthetic oligonucleotide
  Antisense strand to SEQ ID NO: 1987694
aaucaccaaauuguaucca

SEQ ID NO: 1987696 - RNA, 19 nt, Artificial Sequence
  Description of Artificial Sequence: Synthetic oligonucleotide
  Sense strand starting at position 1997 of SEQ ID NO: 1880707
caccaaaguggcuggauaa

SEQ ID NO: 1987697 - RNA, 19 nt, Artificial Sequence
  Description of Artificial Sequence: Synthetic oligonucleotide
  Antisense strand to SEQ ID NO: 1987696
uuauccagccacuuuggug

SEQ ID NO: 1987698 - RNA, 19 nt, Artificial Sequence
  Description of Artificial Sequence: Synthetic oligonucleotide
  Sense strand starting at position 1998 of SEQ ID NO: 1880707
accaaaguggcuggauaaa

SEQ ID NO: 1987699 - RNA, 19 nt, Artificial Sequence
  Description of Artificial Sequence: Synthetic oligonucleotide
  Antisense strand to SEQ ID NO: 1987698
uuuauccagccacuuuggu

SEQ ID NO: 1987700 - RNA, 19 nt, Artificial Sequence
  Description of Artificial Sequence: Synthetic oligonucleotide
  Sense strand starting at position 2091 of SEQ ID NO: 1880707
agcucaagauuccugagga

SEQ ID NO: 1987701 - RNA, 19 nt, Artificial Sequence
  Description of Artificial Sequence: Synthetic oligonucleotide
  Antisense strand to SEQ ID NO: 1987700
uccucaggaaucuugagcu

SEQ ID NO: 1987702 - RNA, 19 nt, Artificial Sequence
  Description of Artificial Sequence: Synthetic oligonucleotide
  Sense strand starting at position 2139 of SEQ ID NO: 1880707
acuggcacagaucgauaau

SEQ ID NO: 1987703 - RNA, 19 nt, Artificial Sequence
  Description of Artificial Sequence: Synthetic oligonucleotide
  Antisense strand to SEQ ID NO: 1987702
auuaucgaucugugccagu

SEQ ID NO: 1987704 - RNA, 19 nt, Artificial Sequence
  Description of Artificial Sequence: Synthetic oligonucleotide
  Sense strand starting at position 2140 of SEQ ID NO: 1880707
cuggcacagaucgauaaua

SEQ ID NO: 1987705 - RNA, 19 nt, Artificial Sequence
  Description of Artificial Sequence: Synthetic oligonucleotide
  Antisense strand to SEQ ID NO: 1987704
uauuaucgaucugugccag

SEQ ID NO: 1987706 - RNA, 19 nt, Artificial Sequence
  Description of Artificial Sequence: Synthetic oligonucleotide
  Sense strand starting at position 2142 of SEQ ID NO: 1880707
ggcacagaucgauaauauu

SEQ ID NO: 1987707 - RNA, 19 nt, Artificial Sequence
  Description of Artificial Sequence: Synthetic oligonucleotide
  Antisense strand to SEQ ID NO: 1987706
aauauuaucgaucugugcc

SEQ ID NO: 1987708 - RNA, 19 nt, Artificial Sequence
  Description of Artificial Sequence: Synthetic oligonucleotide
  Sense strand starting at position 2188 of SEQ ID NO: 1880707
gaagcaaugcugugccaga

SEQ ID NO: 1987709 - RNA, 19 nt, Artificial Sequence
  Description of Artificial Sequence: Synthetic oligonucleotide
  Antisense strand to SEQ ID NO: 1987708
ucuggcacagcauugcuuc

SEQ ID NO: 1987710 - RNA, 19 nt, Artificial Sequence
  Description of Artificial Sequence: Synthetic oligonucleotide
  Sense strand starting at position 2189 of SEQ ID NO: 1880707
aagcaaugcugugccagaa

SEQ ID NO: 1987711 - RNA, 19 nt, Artificial Sequence
  Description of Artificial Sequence: Synthetic oligonucleotide
  Antisense strand to SEQ ID NO: 1987710
uucuggcacagcauugcuu

SEQ ID NO: 1987712 - RNA, 19 nt, Artificial Sequence
  Description of Artificial Sequence: Synthetic oligonucleotide
  Sense strand starting at position 2650 of SEQ ID NO: 1880707
cugcuuugccauuaaagau

SEQ ID NO: 1987713 - RNA, 19 nt, Artificial Sequence
  Description of Artificial Sequence: Synthetic oligonucleotide
  Antisense strand to SEQ ID NO: 1987712
aucuuuaauggcaaagcag

SEQ ID NO: 1987714 - RNA, 19 nt, Artificial Sequence
  Description of Artificial Sequence: Synthetic oligonucleotide
  Sense strand starting at position 2961 of SEQ ID NO: 1880707
auguaacugaggugauaca

SEQ ID NO: 1987715 - RNA, 19 nt, Artificial Sequence
  Description of Artificial Sequence: Synthetic oligonucleotide
  Antisense strand to SEQ ID NO: 1987714
uguaucaccucaguuacau

SEQ ID NO: 1987716 - RNA, 19 nt, Artificial Sequence
  Description of Artificial Sequence: Synthetic oligonucleotide
  Sense strand starting at position 3054 of SEQ ID NO: 1880707
uguguaugaagaggaguuu

SEQ ID NO: 1987717 - RNA, 19 nt, Artificial Sequence
  Description of Artificial Sequence: Synthetic oligonucleotide
  Antisense strand to SEQ ID NO: 1987716
aaacuccucuucauacaca

SEQ ID NO: 1987718 - RNA, 19 nt, Artificial Sequence
  Description of Artificial Sequence: Synthetic oligonucleotide
  Sense strand starting at position 3063 of SEQ ID NO: 1880707
agaggaguuugacaaagga

SEQ ID NO: 1987719 - RNA, 19 nt, Artificial Sequence
  Description of Artificial Sequence: Synthetic oligonucleotide
  Antisense strand to SEQ ID NO: 1987718
uccuuugucaaacuccucu

SEQ ID NO: 1987720 - RNA, 19 nt, Artificial Sequence
  Description of Artificial Sequence: Synthetic oligonucleotide
  Sense strand starting at position 3170 of SEQ ID NO: 1880707
ugaguuccaguuuauaaag

SEQ ID NO: 1987721 - RNA, 19 nt, Artificial Sequence
  Description of Artificial Sequence: Synthetic oligonucleotide
  Antisense strand to SEQ ID NO: 1987720
cuuuauaaacuggaacuca

SEQ ID NO: 1987722 - RNA, 19 nt, Artificial Sequence
  Description of Artificial Sequence: Synthetic oligonucleotide
  Sense strand starting at position 3244 of SEQ ID NO: 1880707
agcauaccucacugaauug

SEQ ID NO: 1987723 - RNA, 19 nt, Artificial Sequence
  Description of Artificial Sequence: Synthetic oligonucleotide
  Antisense strand to SEQ ID NO: 1987722
caauucagugagguaugcu

SEQ ID NO: 1987724 - RNA, 19 nt, Artificial Sequence
  Description of Artificial Sequence: Synthetic oligonucleotide
  Sense strand starting at position 3369 of SEQ ID NO: 1880707
aucaacuguugucugcaua

SEQ ID NO: 1987725 - RNA, 19 nt, Artificial Sequence
  Description of Artificial Sequence: Synthetic oligonucleotide
  Antisense strand to SEQ ID NO: 1987724
uaugcagacaacaguugau

SEQ ID NO: 1987726 - RNA, 19 nt, Artificial Sequence
  Description of Artificial Sequence: Synthetic oligonucleotide
  Sense strand starting at position 3370 of SEQ ID NO: 1880707
ucaacuguugucugcauau

SEQ ID NO: 1987727 - RNA, 19 nt, Artificial Sequence
  Description of Artificial Sequence: Synthetic oligonucleotide
  Antisense strand to SEQ ID NO: 1987726
auaugcagacaacaguuga

SEQ ID NO: 1987728 - RNA, 19 nt, Artificial Sequence
  Description of Artificial Sequence: Synthetic oligonucleotide
  Sense strand starting at position 3382 of SEQ ID NO: 1880707
ugcauauaagaaugguuaa

SEQ ID NO: 1987729 - RNA, 19 nt, Artificial Sequence
  Description of Artificial Sequence: Synthetic oligonucleotide
  Antisense strand to SEQ ID NO: 1987728
uuaaccauucuuauaugca

SEQ ID NO: 1987730 - RNA, 19 nt, Artificial Sequence
  Description of Artificial Sequence: Synthetic oligonucleotide
  Sense strand starting at position 3768 of SEQ ID NO: 1880707
guaagcuuugaucauagca

SEQ ID NO: 1987731 - RNA, 19 nt, Artificial Sequence
  Description of Artificial Sequence: Synthetic oligonucleotide
  Antisense strand to SEQ ID NO: 1987730
ugcuaugaucaaagcuuac

SEQ ID NO: 1987732 - RNA, 19 nt, Artificial Sequence
  Description of Artificial Sequence: Synthetic oligonucleotide
  Sense strand starting at position 3876 of SEQ ID NO: 1880707
agccaaacaugguuuaaau

SEQ ID NO: 1987733 - RNA, 19 nt, Artificial Sequence
  Description of Artificial Sequence: Synthetic oligonucleotide
  Antisense strand to SEQ ID NO: 1987732
auuuaaaccauguuuggcu

SEQ ID NO: 1987734 - RNA, 19 nt, Artificial Sequence
  Description of Artificial Sequence: Synthetic oligonucleotide
  Sense strand starting at position 3927 of SEQ ID NO: 1880707
ucaguuccuuagucauacu

SEQ ID NO: 1987735 - RNA, 19 nt, Artificial Sequence
  Description of Artificial Sequence: Synthetic oligonucleotide
  Antisense strand to SEQ ID NO: 1987734
aguaugacuaaggaacuga

SEQ ID NO: 1987736 - RNA, 19 nt, Artificial Sequence
  Description of Artificial Sequence: Synthetic oligonucleotide
  Sense strand starting at position 3959 of SEQ ID NO: 1880707
gugcucaauaguuaagugu

SEQ ID NO: 1987737 - RNA, 19 nt, Artificial Sequence
  Description of Artificial Sequence: Synthetic oligonucleotide
  Antisense strand to SEQ ID NO: 1987736
acacuuaacuauugagcac

SEQ ID NO: 1987738 - RNA, 19 nt, Artificial Sequence
  Description of Artificial Sequence: Synthetic oligonucleotide
  Sense strand starting at position 1265 of SEQ ID NO: 1880708
cuauuaaugugacuaggua

SEQ ID NO: 1987739 - RNA, 19 nt, Artificial Sequence
  Description of Artificial Sequence: Synthetic oligonucleotide
  Antisense strand to SEQ ID NO: 1987738
uaccuagucacauuaauag

SEQ ID NO: 1987740 - RNA, 19 nt, Artificial Sequence
  Description of Artificial Sequence: Synthetic oligonucleotide
  Sense strand starting at position 1266 of SEQ ID NO: 1880708
uauuaaugugacuagguau

SEQ ID NO: 1987741 - RNA, 19 nt, Artificial Sequence
  Description of Artificial Sequence: Synthetic oligonucleotide
  Antisense strand to SEQ ID NO: 1987740
auaccuagucacauuaaua

SEQ ID NO: 1987742 - RNA, 19 nt, Artificial Sequence
  Description of Artificial Sequence: Synthetic oligonucleotide
  Sense strand starting at position 1311 of SEQ ID NO: 1880708
ggguucacuguggguuaau

SEQ ID NO: 1987743 - RNA, 19 nt, Artificial Sequence
  Description of Artificial Sequence: Synthetic oligonucleotide
  Antisense strand to SEQ ID NO: 1987742
auuaacccacagugaaccc

SEQ ID NO: 1987744 - RNA, 19 nt, Artificial Sequence
  Description of Artificial Sequence: Synthetic oligonucleotide
  Sense strand starting at position 1312 of SEQ ID NO: 1880708
gguucacuguggguuaaua

SEQ ID NO: 1987745 - RNA, 19 nt, Artificial Sequence
  Description of Artificial Sequence: Synthetic oligonucleotide
  Antisense strand to SEQ ID NO: 1987744
uauuaacccacagugaacc

SEQ ID NO: 1987746 - RNA, 19 nt, Artificial Sequence
  Description of Artificial Sequence: Synthetic oligonucleotide
  Sense strand starting at position 1527 of SEQ ID NO: 1880708
cuugucuuccagcagauaa

SEQ ID NO: 1987747 - RNA, 19 nt, Artificial Sequence
  Description of Artificial Sequence: Synthetic oligonucleotide
  Antisense strand to SEQ ID NO: 1987746
uuaucugcuggaagacaag

SEQ ID NO: 1987748 - RNA, 19 nt, Artificial Sequence
  Description of Artificial Sequence: Synthetic oligonucleotide
  Sense strand starting at position 1529 of SEQ ID NO: 1880708
ugucuuccagcagauaagu

SEQ ID NO: 1987749 - RNA, 19 nt, Artificial Sequence
  Description of Artificial Sequence: Synthetic oligonucleotide
  Antisense strand to SEQ ID NO: 1987748
acuuaucugcuggaagaca

SEQ ID NO: 1987750 - RNA, 19 nt, Artificial Sequence
  Description of Artificial Sequence: Synthetic oligonucleotide
  Sense strand starting at position 1538 of SEQ ID NO: 1880708
gcagauaagugucuuccag

SEQ ID NO: 1987751 - RNA, 19 nt, Artificial Sequence
  Description of Artificial Sequence: Synthetic oligonucleotide
  Antisense strand to SEQ ID NO: 1987750
cuggaagacacuuaucugc

SEQ ID NO: 1987752 - RNA, 19 nt, Artificial Sequence
  Description of Artificial Sequence: Synthetic oligonucleotide
  Sense strand starting at position 1540 of SEQ ID NO: 1880708
agauaagugucuuccaguu

SEQ ID NO: 1987753 - RNA, 19 nt, Artificial Sequence
  Description of Artificial Sequence: Synthetic oligonucleotide
  Antisense strand to SEQ ID NO: 1987752
aacuggaagacacuuaucu

SEQ ID NO: 1987754 - RNA, 19 nt, Artificial Sequence
  Description of Artificial Sequence: Synthetic oligonucleotide
  Sense strand starting at position 1648 of SEQ ID NO: 1880708
cagguuucuggugaaauuc

SEQ ID NO: 1987755 - RNA, 19 nt, Artificial Sequence
  Description of Artificial Sequence: Synthetic oligonucleotide
  Antisense strand to SEQ ID NO: 1987754
gaauuucaccagaaaccug

SEQ ID NO: 1987756 - RNA, 19 nt, Artificial Sequence
  Description of Artificial Sequence: Synthetic oligonucleotide
  Sense strand starting at position 1656 of SEQ ID NO: 1880708
uggugaaauucccuaucau

SEQ ID NO: 1987757 - RNA, 19 nt, Artificial Sequence
  Description of Artificial Sequence: Synthetic oligonucleotide
  Antisense strand to SEQ ID NO: 1987756
augauagggaauuucacca

SEQ ID NO: 1987758 - RNA, 19 nt, Artificial Sequence
  Description of Artificial Sequence: Synthetic oligonucleotide
  Sense strand starting at position 1657 of SEQ ID NO: 1880708
ggugaaauucccuaucauu

SEQ ID NO: 1987759 - RNA, 19 nt, Artificial Sequence
  Description of Artificial Sequence: Synthetic oligonucleotide
  Antisense strand to SEQ ID NO: 1987758
aaugauagggaauuucacc

SEQ ID NO: 1987760 - RNA, 19 nt, Artificial Sequence
  Description of Artificial Sequence: Synthetic oligonucleotide
  Sense strand starting at position 1747 of SEQ ID NO: 1880708
acacauaagucuguuucua

SEQ ID NO: 1987761 - RNA, 19 nt, Artificial Sequence
  Description of Artificial Sequence: Synthetic oligonucleotide
  Antisense strand to SEQ ID NO: 1987760
uagaaacagacuuaugugu

SEQ ID NO: 1987762 - RNA, 19 nt, Artificial Sequence
  Description of Artificial Sequence: Synthetic oligonucleotide
  Sense strand starting at position 1749 of SEQ ID NO: 1880708
acauaagucuguuucuauu

SEQ ID NO: 1987763 - RNA, 19 nt, Artificial Sequence
  Description of Artificial Sequence: Synthetic oligonucleotide
  Antisense strand to SEQ ID NO: 1987762
aauagaaacagacuuaugu

SEQ ID NO: 1987764 - RNA, 19 nt, Artificial Sequence
  Description of Artificial Sequence: Synthetic oligonucleotide
  Sense strand starting at position 1857 of SEQ ID NO: 1880708
uucuuucuccuaugaaggu

SEQ ID NO: 1987765 - RNA, 19 nt, Artificial Sequence
  Description of Artificial Sequence: Synthetic oligonucleotide
  Antisense strand to SEQ ID NO: 1987764
accuucauaggagaaagaa

SEQ ID NO: 1987766 - RNA, 19 nt, Artificial Sequence
  Description of Artificial Sequence: Synthetic oligonucleotide
  Sense strand starting at position 2140 of SEQ ID NO: 1880708
ggccuuguggcuucugcua

SEQ ID NO: 1987767 - RNA, 19 nt, Artificial Sequence
  Description of Artificial Sequence: Synthetic oligonucleotide
  Antisense strand to SEQ ID NO: 1987766
uagcagaagccacaaggcc

SEQ ID NO: 1987768 - RNA, 19 nt, Artificial Sequence
  Description of Artificial Sequence: Synthetic oligonucleotide
  Sense strand starting at position 2152 of SEQ ID NO: 1880708
ucugcuagaucucuugaag

SEQ ID NO: 1987769 - RNA, 19 nt, Artificial Sequence
  Description of Artificial Sequence: Synthetic oligonucleotide
  Antisense strand to SEQ ID NO: 1987768
cuucaagagaucuagcaga

SEQ ID NO: 1987770 - RNA, 19 nt, Artificial Sequence
  Description of Artificial Sequence: Synthetic oligonucleotide
  Sense strand starting at position 2155 of SEQ ID NO: 1880708
gcuagaucucuugaagucu

SEQ ID NO: 1987771 - RNA, 19 nt, Artificial Sequence
  Description of Artificial Sequence: Synthetic oligonucleotide
  Antisense strand to SEQ ID NO: 1987770
agacuucaagagaucuagc

SEQ ID NO: 1987772 - RNA, 19 nt, Artificial Sequence
  Description of Artificial Sequence: Synthetic oligonucleotide
  Sense strand starting at position 2164 of SEQ ID NO: 1880708
cuugaagucuuaucccaug

SEQ ID NO: 1987773 - RNA, 19 nt, Artificial Sequence
  Description of Artificial Sequence: Synthetic oligonucleotide
  Antisense strand to SEQ ID NO: 1987772
caugggauaagacuucaag

SEQ ID NO: 1987774 - RNA, 19 nt, Artificial Sequence
  Description of Artificial Sequence: Synthetic oligonucleotide
  Sense strand starting at position 2179 of SEQ ID NO: 1880708
cauguauaugaaggcuaaa

SEQ ID NO: 1987775 - RNA, 19 nt, Artificial Sequence
  Description of Artificial Sequence: Synthetic oligonucleotide
  Antisense strand to SEQ ID NO: 1987774
uuuagccuucauauacaug

SEQ ID NO: 1987776 - RNA, 19 nt, Artificial Sequence
  Description of Artificial Sequence: Synthetic oligonucleotide
  Sense strand starting at position 2226 of SEQ ID NO: 1880708
auauccagagucugaguua

SEQ ID NO: 1987777 - RNA, 19 nt, Artificial Sequence
  Description of Artificial Sequence: Synthetic oligonucleotide
  Antisense strand to SEQ ID NO: 1987776
uaacucagacucuggauau

SEQ ID NO: 1987778 - RNA, 19 nt, Artificial Sequence
  Description of Artificial Sequence: Synthetic oligonucleotide
  Sense strand starting at position 2229 of SEQ ID NO: 1880708
uccagagucugaguuauga

SEQ ID NO: 1987779 - RNA, 19 nt, Artificial Sequence
  Description of Artificial Sequence: Synthetic oligonucleotide
  Antisense strand to SEQ ID NO: 1987778
ucauaacucagacucugga

SEQ ID NO: 1987780 - RNA, 19 nt, Artificial Sequence
  Description of Artificial Sequence: Synthetic oligonucleotide
  Sense strand starting at position 2268 of SEQ ID NO: 1880708
cugagacuguguuccucaa

SEQ ID NO: 1987781 - RNA, 19 nt, Artificial Sequence
  Description of Artificial Sequence: Synthetic oligonucleotide
  Antisense strand to SEQ ID NO: 1987780
uugaggaacacagucucag

SEQ ID NO: 1987782 - RNA, 19 nt, Artificial Sequence
  Description of Artificial Sequence: Synthetic oligonucleotide
  Sense strand starting at position 2272 of SEQ ID NO: 1880708
gacuguguuccucaaguuc

SEQ ID NO: 1987783 - RNA, 19 nt, Artificial Sequence
  Description of Artificial Sequence: Synthetic oligonucleotide
  Antisense strand to SEQ ID NO: 1987782
gaacuugaggaacacaguc

SEQ ID NO: 1987784 - RNA, 19 nt, Artificial Sequence
  Description of Artificial Sequence: Synthetic oligonucleotide
  Sense strand starting at position 2621 of SEQ ID NO: 1880708
ggaacaaucuuugcccuua

SEQ ID NO: 1987785 - RNA, 19 nt, Artificial Sequence
  Description of Artificial Sequence: Synthetic oligonucleotide
  Antisense strand to SEQ ID NO: 1987784
uaagggcaaagauuguucc

SEQ ID NO: 1987786 - RNA, 19 nt, Artificial Sequence
  Description of Artificial Sequence: Synthetic oligonucleotide
  Sense strand starting at position 2964 of SEQ ID NO: 1880708
auuaguauagaucaguguu

SEQ ID NO: 1987787 - RNA, 19 nt, Artificial Sequence
  Description of Artificial Sequence: Synthetic oligonucleotide
  Antisense strand to SEQ ID NO: 1987786
aacacugaucuauacuaau

SEQ ID NO: 1987788 - RNA, 19 nt, Artificial Sequence
  Description of Artificial Sequence: Synthetic oligonucleotide
  Sense strand starting at position 3166 of SEQ ID NO: 1880708
guaacagaguuacugaaga

SEQ ID NO: 1987789 - RNA, 19 nt, Artificial Sequence
  Description of Artificial Sequence: Synthetic oligonucleotide
  Antisense strand to SEQ ID NO: 1987788
ucuucaguaacucuguuac

SEQ ID NO: 1987790 - RNA, 19 nt, Artificial Sequence
  Description of Artificial Sequence: Synthetic oligonucleotide
  Sense strand starting at position 3187 of SEQ ID NO: 1880708
agacuuagauaugcaauua

SEQ ID NO: 1987791 - RNA, 19 nt, Artificial Sequence
  Description of Artificial Sequence: Synthetic oligonucleotide
  Antisense strand to SEQ ID NO: 1987790
uaauugcauaucuaagucu

SEQ ID NO: 1987792 - RNA, 19 nt, Artificial Sequence
  Description of Artificial Sequence: Synthetic oligonucleotide
  Sense strand starting at position 3471 of SEQ ID NO: 1880708
uauugaggcuacucugaca

SEQ ID NO: 1987793 - RNA, 19 nt, Artificial Sequence
  Description of Artificial Sequence: Synthetic oligonucleotide
  Antisense strand to SEQ ID NO: 1987792
ugucagaguagccucaaua

SEQ ID NO: 1987794 - RNA, 19 nt, Artificial Sequence
  Description of Artificial Sequence: Synthetic oligonucleotide
  Sense strand starting at position 3493 of SEQ ID NO: 1880708
uagacugagucccugucau

SEQ ID NO: 1987795 - RNA, 19 nt, Artificial Sequence
  Description of Artificial Sequence: Synthetic oligonucleotide
  Antisense strand to SEQ ID NO: 1987794
augacagggacucagucua

SEQ ID NO: 1987796 - RNA, 19 nt, Artificial Sequence
  Description of Artificial Sequence: Synthetic oligonucleotide
  Sense strand starting at position 3504 of SEQ ID NO: 1880708
ccugucauuguagaguuua

SEQ ID NO: 1987797 - RNA, 19 nt, Artificial Sequence
  Description of Artificial Sequence: Synthetic oligonucleotide
  Antisense strand to SEQ ID NO: 1987796
uaaacucuacaaugacagg

SEQ ID NO: 1987798 - RNA, 19 nt, Artificial Sequence
  Description of Artificial Sequence: Synthetic oligonucleotide
  Sense strand starting at position 3536 of SEQ ID NO: 1880708
ggagacagauauuacacaa

SEQ ID NO: 1987799 - RNA, 19 nt, Artificial Sequence
  Description of Artificial Sequence: Synthetic oligonucleotide
  Antisense strand to SEQ ID NO: 1987798
uuguguaauaucugucucc

SEQ ID NO: 1987800 - RNA, 19 nt, Artificial Sequence
  Description of Artificial Sequence: Synthetic oligonucleotide
  Sense strand starting at position 3584 of SEQ ID NO: 1880708
aauugugaggagugcuaua

SEQ ID NO: 1987801 - RNA, 19 nt, Artificial Sequence
  Description of Artificial Sequence: Synthetic oligonucleotide
  Antisense strand to SEQ ID NO: 1987800
uauagcacuccucacaauu

SEQ ID NO: 1987802 - RNA, 19 nt, Artificial Sequence
  Description of Artificial Sequence: Synthetic oligonucleotide
  Sense strand starting at position 3589 of SEQ ID NO: 1880708
ugaggagugcuauaaaggu

SEQ ID NO: 1987803 - RNA, 19 nt, Artificial Sequence
  Description of Artificial Sequence: Synthetic oligonucleotide
  Antisense strand to SEQ ID NO: 1987802
accuuuauagcacuccuca

SEQ ID NO: 1987804 - RNA, 19 nt, Artificial Sequence
  Description of Artificial Sequence: Synthetic oligonucleotide
  Sense strand starting at position 3669 of SEQ ID NO: 1880708
uauuauauuugaugggacu

SEQ ID NO: 1987805 - RNA, 19 nt, Artificial Sequence
  Description of Artificial Sequence: Synthetic oligonucleotide
  Antisense strand to SEQ ID NO: 1987804
agucccaucaaauauaaua

SEQ ID NO: 1987806 - RNA, 19 nt, Artificial Sequence
  Description of Artificial Sequence: Synthetic oligonucleotide
  Sense strand starting at position 3703 of SEQ ID NO: 1880708
acuagauccuuacuagucu

SEQ ID NO: 1987807 - RNA, 19 nt, Artificial Sequence
  Description of Artificial Sequence: Synthetic oligonucleotide
  Antisense strand to SEQ ID NO: 1987806
agacuaguaaggaucuagu

SEQ ID NO: 1987808 - RNA, 19 nt, Artificial Sequence
  Description of Artificial Sequence: Synthetic oligonucleotide
  Sense strand starting at position 3739 of SEQ ID NO: 1880708
acuuuaacaugugccagaa

SEQ ID NO: 1987809 - RNA, 19 nt, Artificial Sequence
  Description of Artificial Sequence: Synthetic oligonucleotide
  Antisense strand to SEQ ID NO: 1987808
uucuggcacauguuaaagu

SEQ ID NO: 1987810 - RNA, 19 nt, Artificial Sequence
  Description of Artificial Sequence: Synthetic oligonucleotide
  Sense strand starting at position 3749 of SEQ ID NO: 1880708
gugccagaaucaccuggaa

SEQ ID NO: 1987811 - RNA, 19 nt, Artificial Sequence
  Description of Artificial Sequence: Synthetic oligonucleotide
  Antisense strand to SEQ ID NO: 1987810
uuccaggugauucuggcac

SEQ ID NO: 1987812 - RNA, 19 nt, Artificial Sequence
  Description of Artificial Sequence: Synthetic oligonucleotide
  Sense strand starting at position 3911 of SEQ ID NO: 1880708
aucacugaucuugggugau

SEQ ID NO: 1987813 - RNA, 19 nt, Artificial Sequence
  Description of Artificial Sequence: Synthetic oligonucleotide
  Antisense strand to SEQ ID NO: 1987812
aucacccaagaucagugau

SEQ ID NO: 1987814 - RNA, 19 nt, Artificial Sequence
  Description of Artificial Sequence: Synthetic oligonucleotide
  Sense strand starting at position 3913 of SEQ ID NO: 1880708
cacugaucuugggugauca

SEQ ID NO: 1987815 - RNA, 19 nt, Artificial Sequence
  Description of Artificial Sequence: Synthetic oligonucleotide
  Antisense strand to SEQ ID NO: 1987814
ugaucacccaagaucagug

SEQ ID NO: 1987816 - RNA, 19 nt, Artificial Sequence
  Description of Artificial Sequence: Synthetic oligonucleotide
  Sense strand starting at position 3914 of SEQ ID NO: 1880708
acugaucuugggugaucaa

SEQ ID NO: 1987817 - RNA, 19 nt, Artificial Sequence
  Description of Artificial Sequence: Synthetic oligonucleotide
  Antisense strand to SEQ ID NO: 1987816
uugaucacccaagaucagu

SEQ ID NO: 1987818 - RNA, 19 nt, Artificial Sequence
  Description of Artificial Sequence: Synthetic oligonucleotide
  Sense strand starting at position 429 of SEQ ID NO: 1880709
cuuaauacacuguaaugua

SEQ ID NO: 1987819 - RNA, 19 nt, Artificial Sequence
  Description of Artificial Sequence: Synthetic oligonucleotide
  Antisense strand to SEQ ID NO: 1987818
uacauuacaguguauuaag

SEQ ID NO: 1987820 - RNA, 19 nt, Artificial Sequence
  Description of Artificial Sequence: Synthetic oligonucleotide
  Sense strand starting at position 533 of SEQ ID NO: 1880709
acaccuacuggcugagaau

SEQ ID NO: 1987821 - RNA, 19 nt, Artificial Sequence
  Description of Artificial Sequence: Synthetic oligonucleotide
  Antisense strand to SEQ ID NO: 1987820
auucucagccaguaggugu

SEQ ID NO: 1987822 - RNA, 19 nt, Artificial Sequence
  Description of Artificial Sequence: Synthetic oligonucleotide
  Sense strand starting at position 1265 of SEQ ID NO: 1880709
cuauuaaugugacuaggua

SEQ ID NO: 1987823 - RNA, 19 nt, Artificial Sequence
  Description of Artificial Sequence: Synthetic oligonucleotide
  Antisense strand to SEQ ID NO: 1987822
uaccuagucacauuaauag

SEQ ID NO: 1987824 - RNA, 19 nt, Artificial Sequence
  Description of Artificial Sequence: Synthetic oligonucleotide
  Sense strand starting at position 1266 of SEQ ID NO: 1880709
uauuaaugugacuagguau

SEQ ID NO: 1987825 - RNA, 19 nt, Artificial Sequence
  Description of Artificial Sequence: Synthetic oligonucleotide
  Antisense strand to SEQ ID NO: 1987824
auaccuagucacauuaaua

SEQ ID NO: 1987826 - RNA, 19 nt, Artificial Sequence
  Description of Artificial Sequence: Synthetic oligonucleotide
  Sense strand starting at position 1312 of SEQ ID NO: 1880709
gguucacuguggguuaaua

SEQ ID NO: 1987827 - RNA, 19 nt, Artificial Sequence
  Description of Artificial Sequence: Synthetic oligonucleotide
  Antisense strand to SEQ ID NO: 1987826
uauuaacccacagugaacc

SEQ ID NO: 1987828 - RNA, 19 nt, Artificial Sequence
  Description of Artificial Sequence: Synthetic oligonucleotide
  Sense strand starting at position 1466 of SEQ ID NO: 1880709
uguacucuucucuguauuu

SEQ ID NO: 1987829 - RNA, 19 nt, Artificial Sequence
  Description of Artificial Sequence: Synthetic oligonucleotide
  Antisense strand to SEQ ID NO: 1987828
aaauacagagaagaguaca

SEQ ID NO: 1987830 - RNA, 19 nt, Artificial Sequence
  Description of Artificial Sequence: Synthetic oligonucleotide
  Sense strand starting at position 1528 of SEQ ID NO: 1880709
cuugucuuccagcagauaa

SEQ ID NO: 1987831 - RNA, 19 nt, Artificial Sequence
  Description of Artificial Sequence: Synthetic oligonucleotide
  Antisense strand to SEQ ID NO: 1987830
uuaucugcuggaagacaag

SEQ ID NO: 1987832 - RNA, 19 nt, Artificial Sequence
  Description of Artificial Sequence: Synthetic oligonucleotide
  Sense strand starting at position 1530 of SEQ ID NO: 1880709
ugucuuccagcagauaagu

SEQ ID NO: 1987833 - RNA, 19 nt, Artificial Sequence
  Description of Artificial Sequence: Synthetic oligonucleotide
  Antisense strand to SEQ ID NO: 1987832
acuuaucugcuggaagaca

SEQ ID NO: 1987834 - RNA, 19 nt, Artificial Sequence
  Description of Artificial Sequence: Synthetic oligonucleotide
  Sense strand starting at position 1541 of SEQ ID NO: 1880709
agauaagugucuuccaguu

SEQ ID NO: 1987835 - RNA, 19 nt, Artificial Sequence
  Description of Artificial Sequence: Synthetic oligonucleotide
  Antisense strand to SEQ ID NO: 1987834
aacuggaagacacuuaucu

SEQ ID NO: 1987836 - RNA, 19 nt, Artificial Sequence
  Description of Artificial Sequence: Synthetic oligonucleotide
  Sense strand starting at position 1649 of SEQ ID NO: 1880709
cagguuucuggugaaauuc

SEQ ID NO: 1987837 - RNA, 19 nt, Artificial Sequence
  Description of Artificial Sequence: Synthetic oligonucleotide
  Antisense strand to SEQ ID NO: 1987836
gaauuucaccagaaaccug

SEQ ID NO: 1987838 - RNA, 19 nt, Artificial Sequence
  Description of Artificial Sequence: Synthetic oligonucleotide
  Sense strand starting at position 1657 of SEQ ID NO: 1880709
uggugaaauucccuaucau

SEQ ID NO: 1987839 - RNA, 19 nt, Artificial Sequence
  Description of Artificial Sequence: Synthetic oligonucleotide
  Antisense strand to SEQ ID NO: 1987838
augauagggaauuucacca

SEQ ID NO: 1987840 - RNA, 19 nt, Artificial Sequence
  Description of Artificial Sequence: Synthetic oligonucleotide
  Sense strand starting at position 1658 of SEQ ID NO: 1880709
ggugaaauucccuaucauu

SEQ ID NO: 1987841 - RNA, 19 nt, Artificial Sequence
  Description of Artificial Sequence: Synthetic oligonucleotide
  Antisense strand to SEQ ID NO: 1987840
aaugauagggaauuucacc

SEQ ID NO: 1987842 - RNA, 19 nt, Artificial Sequence
  Description of Artificial Sequence: Synthetic oligonucleotide
  Sense strand starting at position 1748 of SEQ ID NO: 1880709
acacauaagucuguuucua

SEQ ID NO: 1987843 - RNA, 19 nt, Artificial Sequence
  Description of Artificial Sequence: Synthetic oligonucleotide
  Antisense strand to SEQ ID NO: 1987842
uagaaacagacuuaugugu

SEQ ID NO: 1987844 - RNA, 19 nt, Artificial Sequence
  Description of Artificial Sequence: Synthetic oligonucleotide
  Sense strand starting at position 1750 of SEQ ID NO: 1880709
acauaagucuguuucuauu

SEQ ID NO: 1987845 - RNA, 19 nt, Artificial Sequence
  Description of Artificial Sequence: Synthetic oligonucleotide
  Antisense strand to SEQ ID NO: 1987844
aauagaaacagacuuaugu

SEQ ID NO: 1987846 - RNA, 19 nt, Artificial Sequence
  Description of Artificial Sequence: Synthetic oligonucleotide
  Sense strand starting at position 1858 of SEQ ID NO: 1880709
uucuuucuccuaugaaggu

SEQ ID NO: 1987847 - RNA, 19 nt, Artificial Sequence
  Description of Artificial Sequence: Synthetic oligonucleotide
  Antisense strand to SEQ ID NO: 1987846
accuucauaggagaaagaa

SEQ ID NO: 1987848 - RNA, 19 nt, Artificial Sequence
  Description of Artificial Sequence: Synthetic oligonucleotide
  Sense strand starting at position 2141 of SEQ ID NO: 1880709
ggccuuguggcuucugcua

SEQ ID NO: 1987849 - RNA, 19 nt, Artificial Sequence
  Description of Artificial Sequence: Synthetic oligonucleotide
  Antisense strand to SEQ ID NO: 1987848
uagcagaagccacaaggcc

SEQ ID NO: 1987850 - RNA, 19 nt, Artificial Sequence
  Description of Artificial Sequence: Synthetic oligonucleotide
  Sense strand starting at position 2153 of SEQ ID NO: 1880709
ucugcuagaucucuugaag

SEQ ID NO: 1987851 - RNA, 19 nt, Artificial Sequence
  Description of Artificial Sequence: Synthetic oligonucleotide
  Antisense strand to SEQ ID NO: 1987850
cuucaagagaucuagcaga

SEQ ID NO: 1987852 - RNA, 19 nt, Artificial Sequence
  Description of Artificial Sequence: Synthetic oligonucleotide
  Sense strand starting at position 2165 of SEQ ID NO: 1880709
cuugaagucuuaucccaug

SEQ ID NO: 1987853 - RNA, 19 nt, Artificial Sequence
  Description of Artificial Sequence: Synthetic oligonucleotide
  Antisense strand to SEQ ID NO: 1987852
caugggauaagacuucaag

SEQ ID NO: 1987854 - RNA, 19 nt, Artificial Sequence
  Description of Artificial Sequence: Synthetic oligonucleotide
  Sense strand starting at position 2170 of SEQ ID NO: 1880709
agucuuaucccauguauau

SEQ ID NO: 1987855 - RNA, 19 nt, Artificial Sequence
  Description of Artificial Sequence: Synthetic oligonucleotide
  Antisense strand to SEQ ID NO: 1987854
auauacaugggauaagacu

SEQ ID NO: 1987856 - RNA, 19 nt, Artificial Sequence
  Description of Artificial Sequence: Synthetic oligonucleotide
  Sense strand starting at position 2180 of SEQ ID NO: 1880709
cauguauaugaaggcuaaa

SEQ ID NO: 1987857 - RNA, 19 nt, Artificial Sequence
  Description of Artificial Sequence: Synthetic oligonucleotide
  Antisense strand to SEQ ID NO: 1987856
uuuagccuucauauacaug

SEQ ID NO: 1987858 - RNA, 19 nt, Artificial Sequence
  Description of Artificial Sequence: Synthetic oligonucleotide
  Sense strand starting at position 2227 of SEQ ID NO: 1880709
auauccagagucugaguua

SEQ ID NO: 1987859 - RNA, 19 nt, Artificial Sequence
  Description of Artificial Sequence: Synthetic oligonucleotide
  Antisense strand to SEQ ID NO: 1987858
uaacucagacucuggauau

SEQ ID NO: 1987860 - RNA, 19 nt, Artificial Sequence
  Description of Artificial Sequence: Synthetic oligonucleotide
  Sense strand starting at position 2230 of SEQ ID NO: 1880709
uccagagucugaguuauga

SEQ ID NO: 1987861 - RNA, 19 nt, Artificial Sequence
  Description of Artificial Sequence: Synthetic oligonucleotide
  Antisense strand to SEQ ID NO: 1987860
ucauaacucagacucugga

SEQ ID NO: 1987862 - RNA, 19 nt, Artificial Sequence
  Description of Artificial Sequence: Synthetic oligonucleotide
  Sense strand starting at position 2240 of SEQ ID NO: 1880709
gaguuaugauuucuaucgu

SEQ ID NO: 1987863 - RNA, 19 nt, Artificial Sequence
  Description of Artificial Sequence: Synthetic oligonucleotide
  Antisense strand to SEQ ID NO: 1987862
acgauagaaaucauaacuc

SEQ ID NO: 1987864 - RNA, 19 nt, Artificial Sequence
  Description of Artificial Sequence: Synthetic oligonucleotide
  Sense strand starting at position 2269 of SEQ ID NO: 1880709
cugagacuguguuccucaa

SEQ ID NO: 1987865 - RNA, 19 nt, Artificial Sequence
  Description of Artificial Sequence: Synthetic oligonucleotide
  Antisense strand to SEQ ID NO: 1987864
uugaggaacacagucucag

SEQ ID NO: 1987866 - RNA, 19 nt, Artificial Sequence
  Description of Artificial Sequence: Synthetic oligonucleotide
  Sense strand starting at position 2273 of SEQ ID NO: 1880709
gacuguguuccucaaguuc

SEQ ID NO: 1987867 - RNA, 19 nt, Artificial Sequence
  Description of Artificial Sequence: Synthetic oligonucleotide
  Antisense strand to SEQ ID NO: 1987866
gaacuugaggaacacaguc

SEQ ID NO: 1987868 - RNA, 19 nt, Artificial Sequence
  Description of Artificial Sequence: Synthetic oligonucleotide
  Sense strand starting at position 2624 of SEQ ID NO: 1880709
ggaacaaucuuugcccuua

SEQ ID NO: 1987869 - RNA, 19 nt, Artificial Sequence
  Description of Artificial Sequence: Synthetic oligonucleotide
  Antisense strand to SEQ ID NO: 1987868
uaagggcaaagauuguucc

SEQ ID NO: 1987870 - RNA, 19 nt, Artificial Sequence
  Description of Artificial Sequence: Synthetic oligonucleotide
  Sense strand starting at position 2967 of SEQ ID NO: 1880709
auuaguauagaucaguguu

SEQ ID NO: 1987871 - RNA, 19 nt, Artificial Sequence
  Description of Artificial Sequence: Synthetic oligonucleotide
  Antisense strand to SEQ ID NO: 1987870
aacacugaucuauacuaau

SEQ ID NO: 1987872 - RNA, 19 nt, Artificial Sequence
  Description of Artificial Sequence: Synthetic oligonucleotide
  Sense strand starting at position 3190 of SEQ ID NO: 1880709
agacuuagauaugcaauua

SEQ ID NO: 1987873 - RNA, 19 nt, Artificial Sequence
  Description of Artificial Sequence: Synthetic oligonucleotide
  Antisense strand to SEQ ID NO: 1987872
uaauugcauaucuaagucu

SEQ ID NO: 1987874 - RNA, 19 nt, Artificial Sequence
  Description of Artificial Sequence: Synthetic oligonucleotide
  Sense strand starting at position 3474 of SEQ ID NO: 1880709
uauugaggcuacucugaca

SEQ ID NO: 1987875 - RNA, 19 nt, Artificial Sequence
  Description of Artificial Sequence: Synthetic oligonucleotide
  Antisense strand to SEQ ID NO: 1987874
ugucagaguagccucaaua

SEQ ID NO: 1987876 - RNA, 19 nt, Artificial Sequence
  Description of Artificial Sequence: Synthetic oligonucleotide
  Sense strand starting at position 3496 of SEQ ID NO: 1880709
uagacugagucccugucau

SEQ ID NO: 1987877 - RNA, 19 nt, Artificial Sequence
  Description of Artificial Sequence: Synthetic oligonucleotide
  Antisense strand to SEQ ID NO: 1987876
augacagggacucagucua

SEQ ID NO: 1987878 - RNA, 19 nt, Artificial Sequence
  Description of Artificial Sequence: Synthetic oligonucleotide
  Sense strand starting at position 3507 of SEQ ID NO: 1880709
ccugucauuguagaguuua

SEQ ID NO: 1987879 - RNA, 19 nt, Artificial Sequence
  Description of Artificial Sequence: Synthetic oligonucleotide
  Antisense strand to SEQ ID NO: 1987878
uaaacucuacaaugacagg

SEQ ID NO: 1987880 - RNA, 19 nt, Artificial Sequence
  Description of Artificial Sequence: Synthetic oligonucleotide
  Sense strand starting at position 3539 of SEQ ID NO: 1880709
ggagacagauauuacacaa

SEQ ID NO: 1987881 - RNA, 19 nt, Artificial Sequence
  Description of Artificial Sequence: Synthetic oligonucleotide
  Antisense strand to SEQ ID NO: 1987880
uuguguaauaucugucucc

SEQ ID NO: 1987882 - RNA, 19 nt, Artificial Sequence
  Description of Artificial Sequence: Synthetic oligonucleotide
  Sense strand starting at position 3587 of SEQ ID NO: 1880709
aauugugaugagugcuaua

SEQ ID NO: 1987883 - RNA, 19 nt, Artificial Sequence
  Description of Artificial Sequence: Synthetic oligonucleotide
  Antisense strand to SEQ ID NO: 1987882
uauagcacucaucacaauu

SEQ ID NO: 1987884 - RNA, 19 nt, Artificial Sequence
  Description of Artificial Sequence: Synthetic oligonucleotide
  Sense strand starting at position 3672 of SEQ ID NO: 1880709
uauuauauuugaugggacu

SEQ ID NO: 1987885 - RNA, 19 nt, Artificial Sequence
  Description of Artificial Sequence: Synthetic oligonucleotide
  Antisense strand to SEQ ID NO: 1987884
agucccaucaaauauaaua

SEQ ID NO: 1987886 - RNA, 19 nt, Artificial Sequence
  Description of Artificial Sequence: Synthetic oligonucleotide
  Sense strand starting at position 3706 of SEQ ID NO: 1880709
acuagauccuuacuagucu

SEQ ID NO: 1987887 - RNA, 19 nt, Artificial Sequence
  Description of Artificial Sequence: Synthetic oligonucleotide
  Antisense strand to SEQ ID NO: 1987886
agacuaguaaggaucuagu

SEQ ID NO: 1987888 - RNA, 19 nt, Artificial Sequence
  Description of Artificial Sequence: Synthetic oligonucleotide
  Sense strand starting at position 3742 of SEQ ID NO: 1880709
acuuuaacaugugccagaa

SEQ ID NO: 1987889 - RNA, 19 nt, Artificial Sequence
  Description of Artificial Sequence: Synthetic oligonucleotide
  Antisense strand to SEQ ID NO: 1987888
uucuggcacauguuaaagu

SEQ ID NO: 1987890 - RNA, 19 nt, Artificial Sequence
  Description of Artificial Sequence: Synthetic oligonucleotide
  Sense strand starting at position 3752 of SEQ ID NO: 1880709
gugccagaaucaccuggaa

SEQ ID NO: 1987891 - RNA, 19 nt, Artificial Sequence
  Description of Artificial Sequence: Synthetic oligonucleotide
  Antisense strand to SEQ ID NO: 1987890
uuccaggugauucuggcac

SEQ ID NO: 1987892 - RNA, 19 nt, Artificial Sequence
  Description of Artificial Sequence: Synthetic oligonucleotide
  Sense strand starting at position 3914 of SEQ ID NO: 1880709
aucacugaucuugggugau

SEQ ID NO: 1987893 - RNA, 19 nt, Artificial Sequence
  Description of Artificial Sequence: Synthetic oligonucleotide
  Antisense strand to SEQ ID NO: 1987892
aucacccaagaucagugau

SEQ ID NO: 1987894 - RNA, 19 nt, Artificial Sequence
  Description of Artificial Sequence: Synthetic oligonucleotide
  Sense strand starting at position 3916 of SEQ ID NO: 1880709
cacugaucuugggugauca

SEQ ID NO: 1987895 - RNA, 19 nt, Artificial Sequence
  Description of Artificial Sequence: Synthetic oligonucleotide
  Antisense strand to SEQ ID NO: 1987894
ugaucacccaagaucagug

SEQ ID NO: 1987896 - RNA, 19 nt, Artificial Sequence
  Description of Artificial Sequence: Synthetic oligonucleotide
  Sense strand starting at position 3917 of SEQ ID NO: 1880709
acugaucuugggugaucaa

SEQ ID NO: 1987897 - RNA, 19 nt, Artificial Sequence
  Description of Artificial Sequence: Synthetic oligonucleotide
  Antisense strand to SEQ ID NO: 1987896
uugaucacccaagaucagu

SEQ ID NO: 1987898 - RNA, 19 nt, Artificial Sequence
  Description of Artificial Sequence: Synthetic oligonucleotide
  Sense strand starting at position 1265 of SEQ ID NO: 1880710
cuauuaaugugacuaggua

SEQ ID NO: 1987899 - RNA, 19 nt, Artificial Sequence
  Description of Artificial Sequence: Synthetic oligonucleotide
  Antisense strand to SEQ ID NO: 1987898
uaccuagucacauuaauag

SEQ ID NO: 1987900 - RNA, 19 nt, Artificial Sequence
  Description of Artificial Sequence: Synthetic oligonucleotide
  Sense strand starting at position 1266 of SEQ ID NO: 1880710
uauuaaugugacuagguau

SEQ ID NO: 1987901 - RNA, 19 nt, Artificial Sequence
  Description of Artificial Sequence: Synthetic oligonucleotide
  Antisense strand to SEQ ID NO: 1987900
auaccuagucacauuaaua

SEQ ID NO: 1987902 - RNA, 19 nt, Artificial Sequence
  Description of Artificial Sequence: Synthetic oligonucleotide
  Sense strand starting at position 1311 of SEQ ID NO: 1880710
ggguucacuguggguuaau

SEQ ID NO: 1987903 - RNA, 19 nt, Artificial Sequence
  Description of Artificial Sequence: Synthetic oligonucleotide
  Antisense strand to SEQ ID NO: 1987902
auuaacccacagugaaccc

SEQ ID NO: 1987904 - RNA, 19 nt, Artificial Sequence
  Description of Artificial Sequence: Synthetic oligonucleotide
  Sense strand starting at position 1312 of SEQ ID NO: 1880710
gguucacuguggguuaaua

SEQ ID NO: 1987905 - RNA, 19 nt, Artificial Sequence
  Description of Artificial Sequence: Synthetic oligonucleotide
  Antisense strand to SEQ ID NO: 1987904
uauuaacccacagugaacc

SEQ ID NO: 1987906 - RNA, 19 nt, Artificial Sequence
  Description of Artificial Sequence: Synthetic oligonucleotide
  Sense strand starting at position 1527 of SEQ ID NO: 1880710
cuugucuuccagcagauaa

SEQ ID NO: 1987907 - RNA, 19 nt, Artificial Sequence
  Description of Artificial Sequence: Synthetic oligonucleotide
  Antisense strand to SEQ ID NO: 1987906
uuaucugcuggaagacaag

SEQ ID NO: 1987908 - RNA, 19 nt, Artificial Sequence
  Description of Artificial Sequence: Synthetic oligonucleotide
  Sense strand starting at position 1529 of SEQ ID NO: 1880710
ugucuuccagcagauaagu

SEQ ID NO: 1987909 - RNA, 19 nt, Artificial Sequence
  Description of Artificial Sequence: Synthetic oligonucleotide
  Antisense strand to SEQ ID NO: 1987908
acuuaucugcuggaagaca

SEQ ID NO: 1987910 - RNA, 19 nt, Artificial Sequence
  Description of Artificial Sequence: Synthetic oligonucleotide
  Sense strand starting at position 1538 of SEQ ID NO: 1880710
gcagauaagugucuuccag

SEQ ID NO: 1987911 - RNA, 19 nt, Artificial Sequence
  Description of Artificial Sequence: Synthetic oligonucleotide
  Antisense strand to SEQ ID NO: 1987910
cuggaagacacuuaucugc

SEQ ID NO: 1987912 - RNA, 19 nt, Artificial Sequence
  Description of Artificial Sequence: Synthetic oligonucleotide
  Sense strand starting at position 1540 of SEQ ID NO: 1880710
agauaagugucuuccaguu

SEQ ID NO: 1987913 - RNA, 19 nt, Artificial Sequence
  Description of Artificial Sequence: Synthetic oligonucleotide
  Antisense strand to SEQ ID NO: 1987912
aacuggaagacacuuaucu

SEQ ID NO: 1987914 - RNA, 19 nt, Artificial Sequence
  Description of Artificial Sequence: Synthetic oligonucleotide
  Sense strand starting at position 1648 of SEQ ID NO: 1880710
cagguuucuggugaaauuc

SEQ ID NO: 1987915 - RNA, 19 nt, Artificial Sequence
  Description of Artificial Sequence: Synthetic oligonucleotide
  Antisense strand to SEQ ID NO: 1987914
gaauuucaccagaaaccug

SEQ ID NO: 1987916 - RNA, 19 nt, Artificial Sequence
  Description of Artificial Sequence: Synthetic oligonucleotide
  Sense strand starting at position 1656 of SEQ ID NO: 1880710
uggugaaauucccuaucau

SEQ ID NO: 1987917 - RNA, 19 nt, Artificial Sequence
  Description of Artificial Sequence: Synthetic oligonucleotide
  Antisense strand to SEQ ID NO: 1987916
augauagggaauuucacca

SEQ ID NO: 1987918 - RNA, 19 nt, Artificial Sequence
  Description of Artificial Sequence: Synthetic oligonucleotide
  Sense strand starting at position 1657 of SEQ ID NO: 1880710
ggugaaauucccuaucauu

SEQ ID NO: 1987919 - RNA, 19 nt, Artificial Sequence
  Description of Artificial Sequence: Synthetic oligonucleotide
  Antisense strand to SEQ ID NO: 1987918
aaugauagggaauuucacc

SEQ ID NO: 1987920 - RNA, 19 nt, Artificial Sequence
  Description of Artificial Sequence: Synthetic oligonucleotide
  Sense strand starting at position 1747 of SEQ ID NO: 1880710
acacauaagucuguuucua

SEQ ID NO: 1987921 - RNA, 19 nt, Artificial Sequence
  Description of Artificial Sequence: Synthetic oligonucleotide
  Antisense strand to SEQ ID NO: 1987920
uagaaacagacuuaugugu

SEQ ID NO: 1987922 - RNA, 19 nt, Artificial Sequence
  Description of Artificial Sequence: Synthetic oligonucleotide
  Sense strand starting at position 1749 of SEQ ID NO: 1880710
acauaagucuguuucuauu

SEQ ID NO: 1987923 - RNA, 19 nt, Artificial Sequence
  Description of Artificial Sequence: Synthetic oligonucleotide
  Antisense strand to SEQ ID NO: 1987922
aauagaaacagacuuaugu

SEQ ID NO: 1987924 - RNA, 19 nt, Artificial Sequence
  Description of Artificial Sequence: Synthetic oligonucleotide
  Sense strand starting at position 1857 of SEQ ID NO: 1880710
uucuuucuccuaugaaggu

SEQ ID NO: 1987925 - RNA, 19 nt, Artificial Sequence
  Description of Artificial Sequence: Synthetic oligonucleotide
  Antisense strand to SEQ ID NO: 1987924
accuucauaggagaaagaa

SEQ ID NO: 1987926 - RNA, 19 nt, Artificial Sequence
  Description of Artificial Sequence: Synthetic oligonucleotide
  Sense strand starting at position 2140 of SEQ ID NO: 1880710
ggccuuguggcuucugcua

SEQ ID NO: 1987927 - RNA, 19 nt, Artificial Sequence
  Description of Artificial Sequence: Synthetic oligonucleotide
  Antisense strand to SEQ ID NO: 1987926
uagcagaagccacaaggcc

SEQ ID NO: 1987928 - RNA, 19 nt, Artificial Sequence
  Description of Artificial Sequence: Synthetic oligonucleotide
  Sense strand starting at position 2152 of SEQ ID NO: 1880710
ucugcuagaucucuugaag

SEQ ID NO: 1987929 - RNA, 19 nt, Artificial Sequence
  Description of Artificial Sequence: Synthetic oligonucleotide
  Antisense strand to SEQ ID NO: 1987928
cuucaagagaucuagcaga

SEQ ID NO: 1987930 - RNA, 19 nt, Artificial Sequence
  Description of Artificial Sequence: Synthetic oligonucleotide
  Sense strand starting at position 2155 of SEQ ID NO: 1880710
gcuagaucucuugaagucu

SEQ ID NO: 1987931 - RNA, 19 nt, Artificial Sequence
  Description of Artificial Sequence: Synthetic oligonucleotide
  Antisense strand to SEQ ID NO: 1987930
agacuucaagagaucuagc

SEQ ID NO: 1987932 - RNA, 19 nt, Artificial Sequence
  Description of Artificial Sequence: Synthetic oligonucleotide
  Sense strand starting at position 2164 of SEQ ID NO: 1880710
cuugaagucuuaucccaug

SEQ ID NO: 1987933 - RNA, 19 nt, Artificial Sequence
  Description of Artificial Sequence: Synthetic oligonucleotide
  Antisense strand to SEQ ID NO: 1987932
caugggauaagacuucaag

SEQ ID NO: 1987934 - RNA, 19 nt, Artificial Sequence
  Description of Artificial Sequence: Synthetic oligonucleotide
  Sense strand starting at position 2179 of SEQ ID NO: 1880710
cauguauaugaaggcuaaa

SEQ ID NO: 1987935 - RNA, 19 nt, Artificial Sequence
  Description of Artificial Sequence: Synthetic oligonucleotide
  Antisense strand to SEQ ID NO: 1987934
uuuagccuucauauacaug

SEQ ID NO: 1987936 - RNA, 19 nt, Artificial Sequence
  Description of Artificial Sequence: Synthetic oligonucleotide
  Sense strand starting at position 2226 of SEQ ID NO: 1880710
auauccagagucugaguua

SEQ ID NO: 1987937 - RNA, 19 nt, Artificial Sequence
  Description of Artificial Sequence: Synthetic oligonucleotide
  Antisense strand to SEQ ID NO: 1987936
uaacucagacucuggauau

SEQ ID NO: 1987938 - RNA, 19 nt, Artificial Sequence
  Description of Artificial Sequence: Synthetic oligonucleotide
  Sense strand starting at position 2229 of SEQ ID NO: 1880710
uccagagucugaguuauga

SEQ ID NO: 1987939 - RNA, 19 nt, Artificial Sequence
  Description of Artificial Sequence: Synthetic oligonucleotide
  Antisense strand to SEQ ID NO: 1987938
ucauaacucagacucugga

SEQ ID NO: 1987940 - RNA, 19 nt, Artificial Sequence
  Description of Artificial Sequence: Synthetic oligonucleotide
  Sense strand starting at position 2268 of SEQ ID NO: 1880710
cugagacuguguuccucaa

SEQ ID NO: 1987941 - RNA, 19 nt, Artificial Sequence
  Description of Artificial Sequence: Synthetic oligonucleotide
  Antisense strand to SEQ ID NO: 1987940
uugaggaacacagucucag

SEQ ID NO: 1987942 - RNA, 19 nt, Artificial Sequence
  Description of Artificial Sequence: Synthetic oligonucleotide
  Sense strand starting at position 2272 of SEQ ID NO: 1880710
gacuguguuccucaaguuc

SEQ ID NO: 1987943 - RNA, 19 nt, Artificial Sequence
  Description of Artificial Sequence: Synthetic oligonucleotide
  Antisense strand to SEQ ID NO: 1987942
gaacuugaggaacacaguc

SEQ ID NO: 1987944 - RNA, 19 nt, Artificial Sequence
  Description of Artificial Sequence: Synthetic oligonucleotide
  Sense strand starting at position 2621 of SEQ ID NO: 1880710
ggaacaaucuuugcccuua

SEQ ID NO: 1987945 - RNA, 19 nt, Artificial Sequence
  Description of Artificial Sequence: Synthetic oligonucleotide
  Antisense strand to SEQ ID NO: 1987944
uaagggcaaagauuguucc

SEQ ID NO: 1987946 - RNA, 19 nt, Artificial Sequence
  Description of Artificial Sequence: Synthetic oligonucleotide
  Sense strand starting at position 2964 of SEQ ID NO: 1880710
auuaguauagaucaguguu

SEQ ID NO: 1987947 - RNA, 19 nt, Artificial Sequence
  Description of Artificial Sequence: Synthetic oligonucleotide
  Antisense strand to SEQ ID NO: 1987946
aacacugaucuauacuaau

SEQ ID NO: 1987948 - RNA, 19 nt, Artificial Sequence
  Description of Artificial Sequence: Synthetic oligonucleotide
  Sense strand starting at position 3166 of SEQ ID NO: 1880710
guaacagaguuacugaaga

SEQ ID NO: 1987949 - RNA, 19 nt, Artificial Sequence
  Description of Artificial Sequence: Synthetic oligonucleotide
  Antisense strand to SEQ ID NO: 1987948
ucuucaguaacucuguuac

SEQ ID NO: 1987950 - RNA, 19 nt, Artificial Sequence
  Description of Artificial Sequence: Synthetic oligonucleotide
  Sense strand starting at position 3187 of SEQ ID NO: 1880710
agacuuagauaugcaauua

SEQ ID NO: 1987951 - RNA, 19 nt, Artificial Sequence
  Description of Artificial Sequence: Synthetic oligonucleotide
  Antisense strand to SEQ ID NO: 1987950
uaauugcauaucuaagucu

SEQ ID NO: 1987952 - RNA, 19 nt, Artificial Sequence
  Description of Artificial Sequence: Synthetic oligonucleotide
  Sense strand starting at position 3471 of SEQ ID NO: 1880710
uauugaggcuacucugaca

SEQ ID NO: 1987953 - RNA, 19 nt, Artificial Sequence
  Description of Artificial Sequence: Synthetic oligonucleotide
  Antisense strand to SEQ ID NO: 1987952
ugucagaguagccucaaua

SEQ ID NO: 1987954 - RNA, 19 nt, Artificial Sequence
  Description of Artificial Sequence: Synthetic oligonucleotide
  Sense strand starting at position 3493 of SEQ ID NO: 1880710
uagacugagucccugucau

SEQ ID NO: 1987955 - RNA, 19 nt, Artificial Sequence
  Description of Artificial Sequence: Synthetic oligonucleotide
  Antisense strand to SEQ ID NO: 1987954
augacagggacucagucua

SEQ ID NO: 1987956 - RNA, 19 nt, Artificial Sequence
  Description of Artificial Sequence: Synthetic oligonucleotide
  Sense strand starting at position 3504 of SEQ ID NO: 1880710
ccugucauuguagaguuua

SEQ ID NO: 1987957 - RNA, 19 nt, Artificial Sequence
  Description of Artificial Sequence: Synthetic oligonucleotide
  Antisense strand to SEQ ID NO: 1987956
uaaacucuacaaugacagg

SEQ ID NO: 1987958 - RNA, 19 nt, Artificial Sequence
  Description of Artificial Sequence: Synthetic oligonucleotide
  Sense strand starting at position 3536 of SEQ ID NO: 1880710
ggagacagauauuacacaa

SEQ ID NO: 1987959 - RNA, 19 nt, Artificial Sequence
  Description of Artificial Sequence: Synthetic oligonucleotide
  Antisense strand to SEQ ID NO: 1987958
uuguguaauaucugucucc

SEQ ID NO: 1987960 - RNA, 19 nt, Artificial Sequence
  Description of Artificial Sequence: Synthetic oligonucleotide
  Sense strand starting at position 3584 of SEQ ID NO: 1880710
aauugugaggagugcuaua

SEQ ID NO: 1987961 - RNA, 19 nt, Artificial Sequence
  Description of Artificial Sequence: Synthetic oligonucleotide
  Antisense strand to SEQ ID NO: 1987960
uauagcacuccucacaauu

SEQ ID NO: 1987962 - RNA, 19 nt, Artificial Sequence
  Description of Artificial Sequence: Synthetic oligonucleotide
  Sense strand starting at position 3589 of SEQ ID NO: 1880710
ugaggagugcuauaaaggu

SEQ ID NO: 1987963 - RNA, 19 nt, Artificial Sequence
  Description of Artificial Sequence: Synthetic oligonucleotide
  Antisense strand to SEQ ID NO: 1987962
accuuuauagcacuccuca

SEQ ID NO: 1987964 - RNA, 19 nt, Artificial Sequence
  Description of Artificial Sequence: Synthetic oligonucleotide
  Sense strand starting at position 3669 of SEQ ID NO: 1880710
uauuauauuugaugggacu

SEQ ID NO: 1987965 - RNA, 19 nt, Artificial Sequence
  Description of Artificial Sequence: Synthetic oligonucleotide
  Antisense strand to SEQ ID NO: 1987964
agucccaucaaauauaaua

SEQ ID NO: 1987966 - RNA, 19 nt, Artificial Sequence
  Description of Artificial Sequence: Synthetic oligonucleotide
  Sense strand starting at position 3703 of SEQ ID NO: 1880710
acuagauccuuacuagucu

SEQ ID NO: 1987967 - RNA, 19 nt, Artificial Sequence
  Description of Artificial Sequence: Synthetic oligonucleotide
  Antisense strand to SEQ ID NO: 1987966
agacuaguaaggaucuagu

SEQ ID NO: 1987968 - RNA, 19 nt, Artificial Sequence
  Description of Artificial Sequence: Synthetic oligonucleotide
  Sense strand starting at position 3739 of SEQ ID NO: 1880710
acuuuaacaugugccagaa

SEQ ID NO: 1987969 - RNA, 19 nt, Artificial Sequence
  Description of Artificial Sequence: Synthetic oligonucleotide
  Antisense strand to SEQ ID NO: 1987968
uucuggcacauguuaaagu

SEQ ID NO: 1987970 - RNA, 19 nt, Artificial Sequence
  Description of Artificial Sequence: Synthetic oligonucleotide
  Sense strand starting at position 3749 of SEQ ID NO: 1880710
gugccagaaucaccuggaa

SEQ ID NO: 1987971 - RNA, 19 nt, Artificial Sequence
  Description of Artificial Sequence: Synthetic oligonucleotide
  Antisense strand to SEQ ID NO: 1987970
uuccaggugauucuggcac

SEQ ID NO: 1987972 - RNA, 19 nt, Artificial Sequence
  Description of Artificial Sequence: Synthetic oligonucleotide
  Sense strand starting at position 3911 of SEQ ID NO: 1880710
aucacugaucuugggugau

SEQ ID NO: 1987973 - RNA, 19 nt, Artificial Sequence
  Description of Artificial Sequence: Synthetic oligonucleotide
  Antisense strand to SEQ ID NO: 1987972
aucacccaagaucagugau

SEQ ID NO: 1987974 - RNA, 19 nt, Artificial Sequence
  Description of Artificial Sequence: Synthetic oligonucleotide
  Sense strand starting at position 3913 of SEQ ID NO: 1880710
cacugaucuugggugauca

SEQ ID NO: 1987975 - RNA, 19 nt, Artificial Sequence
  Description of Artificial Sequence: Synthetic oligonucleotide
  Antisense strand to SEQ ID NO: 1987974
ugaucacccaagaucagug

SEQ ID NO: 1987976 - RNA, 19 nt, Artificial Sequence
  Description of Artificial Sequence: Synthetic oligonucleotide
  Sense strand starting at position 3914 of SEQ ID NO: 1880710
acugaucuugggugaucaa

SEQ ID NO: 1987977 - RNA, 19 nt, Artificial Sequence
  Description of Artificial Sequence: Synthetic oligonucleotide
  Antisense strand to SEQ ID NO: 1987976
uugaucacccaagaucagu

SEQ ID NO: 1987978 - RNA, 19 nt, Artificial Sequence
  Description of Artificial Sequence: Synthetic oligonucleotide
  Sense strand starting at position 429 of SEQ ID NO: 1880711
cuuaauacacuguaaugua

SEQ ID NO: 1987979 - RNA, 19 nt, Artificial Sequence
  Description of Artificial Sequence: Synthetic oligonucleotide
  Antisense strand to SEQ ID NO: 1987978
uacauuacaguguauuaag

SEQ ID NO: 1987980 - RNA, 19 nt, Artificial Sequence
  Description of Artificial Sequence: Synthetic oligonucleotide
  Sense strand starting at position 533 of SEQ ID NO: 1880711
acaccuacuggcugagaau

SEQ ID NO: 1987981 - RNA, 19 nt, Artificial Sequence
  Description of Artificial Sequence: Synthetic oligonucleotide
  Antisense strand to SEQ ID NO: 1987980
auucucagccaguaggugu

SEQ ID NO: 1987982 - RNA, 19 nt, Artificial Sequence
  Description of Artificial Sequence: Synthetic oligonucleotide
  Sense strand starting at position 1265 of SEQ ID NO: 1880711
cuauuaaugugacuaggua

SEQ ID NO: 1987983 - RNA, 19 nt, Artificial Sequence
  Description of Artificial Sequence: Synthetic oligonucleotide
  Antisense strand to SEQ ID NO: 1987982
uaccuagucacauuaauag

SEQ ID NO: 1987984 - RNA, 19 nt, Artificial Sequence
  Description of Artificial Sequence: Synthetic oligonucleotide
  Sense strand starting at position 1266 of SEQ ID NO: 1880711
uauuaaugugacuagguau

SEQ ID NO: 1987985 - RNA, 19 nt, Artificial Sequence
  Description of Artificial Sequence: Synthetic oligonucleotide
  Antisense strand to SEQ ID NO: 1987984
auaccuagucacauuaaua

SEQ ID NO: 1987986 - RNA, 19 nt, Artificial Sequence
  Description of Artificial Sequence: Synthetic oligonucleotide
  Sense strand starting at position 1312 of SEQ ID NO: 1880711
gguucacuguggguuaaua

SEQ ID NO: 1987987 - RNA, 19 nt, Artificial Sequence
  Description of Artificial Sequence: Synthetic oligonucleotide
  Antisense strand to SEQ ID NO: 1987986
uauuaacccacagugaacc

SEQ ID NO: 1987988 - RNA, 19 nt, Artificial Sequence
  Description of Artificial Sequence: Synthetic oligonucleotide
  Sense strand starting at position 1466 of SEQ ID NO: 1880711
uguacucuucucuguauuu

SEQ ID NO: 1987989 - RNA, 19 nt, Artificial Sequence
  Description of Artificial Sequence: Synthetic oligonucleotide
  Antisense strand to SEQ ID NO: 1987988
aaauacagagaagaguaca

SEQ ID NO: 1987990 - RNA, 19 nt, Artificial Sequence
  Description of Artificial Sequence: Synthetic oligonucleotide
  Sense strand starting at position 1528 of SEQ ID NO: 1880711
cuugucuuccagcagauaa

SEQ ID NO: 1987991 - RNA, 19 nt, Artificial Sequence
  Description of Artificial Sequence: Synthetic oligonucleotide
  Antisense strand to SEQ ID NO: 1987990
uuaucugcuggaagacaag

SEQ ID NO: 1987992 - RNA, 19 nt, Artificial Sequence
  Description of Artificial Sequence: Synthetic oligonucleotide
  Sense strand starting at position 1530 of SEQ ID NO: 1880711
ugucuuccagcagauaagu

SEQ ID NO: 1987993 - RNA, 19 nt, Artificial Sequence
  Description of Artificial Sequence: Synthetic oligonucleotide
  Antisense strand to SEQ ID NO: 1987992
acuuaucugcuggaagaca

SEQ ID NO: 1987994 - RNA, 19 nt, Artificial Sequence
  Description of Artificial Sequence: Synthetic oligonucleotide
  Sense strand starting at position 1541 of SEQ ID NO: 1880711
agauaagugucuuccaguu

SEQ ID NO: 1987995 - RNA, 19 nt, Artificial Sequence
  Description of Artificial Sequence: Synthetic oligonucleotide
  Antisense strand to SEQ ID NO: 1987994
aacuggaagacacuuaucu

SEQ ID NO: 1987996 - RNA, 19 nt, Artificial Sequence
  Description of Artificial Sequence: Synthetic oligonucleotide
  Sense strand starting at position 1649 of SEQ ID NO: 1880711
cagguuucuggugaaauuc

SEQ ID NO: 1987997 - RNA, 19 nt, Artificial Sequence
  Description of Artificial Sequence: Synthetic oligonucleotide
  Antisense strand to SEQ ID NO: 1987996
gaauuucaccagaaaccug

SEQ ID NO: 1987998 - RNA, 19 nt, Artificial Sequence
  Description of Artificial Sequence: Synthetic oligonucleotide
  Sense strand starting at position 1657 of SEQ ID NO: 1880711
uggugaaauucccuaucau

SEQ ID NO: 1987999 - RNA, 19 nt, Artificial Sequence
  Description of Artificial Sequence: Synthetic oligonucleotide
  Antisense strand to SEQ ID NO: 1987998
augauagggaauuucacca

SEQ ID NO: 1988000 - RNA, 19 nt, Artificial Sequence
  Description of Artificial Sequence: Synthetic oligonucleotide
  Sense strand starting at position 1658 of SEQ ID NO: 1880711
ggugaaauucccuaucauu

SEQ ID NO: 1988001 - RNA, 19 nt, Artificial Sequence
  Description of Artificial Sequence: Synthetic oligonucleotide
  Antisense strand to SEQ ID NO: 1988000
aaugauagggaauuucacc

SEQ ID NO: 1988002 - RNA, 19 nt, Artificial Sequence
  Description of Artificial Sequence: Synthetic oligonucleotide
  Sense strand starting at position 1748 of SEQ ID NO: 1880711
acacauaagucuguuucua

SEQ ID NO: 1988003 - RNA, 19 nt, Artificial Sequence
  Description of Artificial Sequence: Synthetic oligonucleotide
  Antisense strand to SEQ ID NO: 1988002
uagaaacagacuuaugugu

SEQ ID NO: 1988004 - RNA, 19 nt, Artificial Sequence
  Description of Artificial Sequence: Synthetic oligonucleotide
  Sense strand starting at position 1750 of SEQ ID NO: 1880711
acauaagucuguuucuauu

SEQ ID NO: 1988005 - RNA, 19 nt, Artificial Sequence
  Description of Artificial Sequence: Synthetic oligonucleotide
  Antisense strand to SEQ ID NO: 1988004
aauagaaacagacuuaugu

SEQ ID NO: 1988006 - RNA, 19 nt, Artificial Sequence
  Description of Artificial Sequence: Synthetic oligonucleotide
  Sense strand starting at position 1858 of SEQ ID NO: 1880711
uucuuucuccuaugaaggu

SEQ ID NO: 1988007 - RNA, 19 nt, Artificial Sequence
  Description of Artificial Sequence: Synthetic oligonucleotide
  Antisense strand to SEQ ID NO: 1988006
accuucauaggagaaagaa

SEQ ID NO: 1988008 - RNA, 19 nt, Artificial Sequence
  Description of Artificial Sequence: Synthetic oligonucleotide
  Sense strand starting at position 2141 of SEQ ID NO: 1880711
ggccuuguggcuucugcua

SEQ ID NO: 1988009 - RNA, 19 nt, Artificial Sequence
  Description of Artificial Sequence: Synthetic oligonucleotide
  Antisense strand to SEQ ID NO: 1988008
uagcagaagccacaaggcc

SEQ ID NO: 1988010 - RNA, 19 nt, Artificial Sequence
  Description of Artificial Sequence: Synthetic oligonucleotide
  Sense strand starting at position 2153 of SEQ ID NO: 1880711
ucugcuagaucucuugaag

SEQ ID NO: 1988011 - RNA, 19 nt, Artificial Sequence
  Description of Artificial Sequence: Synthetic oligonucleotide
  Antisense strand to SEQ ID NO: 1988010
cuucaagagaucuagcaga

SEQ ID NO: 1988012 - RNA, 19 nt, Artificial Sequence
  Description of Artificial Sequence: Synthetic oligonucleotide
  Sense strand starting at position 2165 of SEQ ID NO: 1880711
cuugaagucuuaucccaug

SEQ ID NO: 1988013 - RNA, 19 nt, Artificial Sequence
  Description of Artificial Sequence: Synthetic oligonucleotide
  Antisense strand to SEQ ID NO: 1988012
caugggauaagacuucaag

SEQ ID NO: 1988014 - RNA, 19 nt, Artificial Sequence
  Description of Artificial Sequence: Synthetic oligonucleotide
  Sense strand starting at position 2170 of SEQ ID NO: 1880711
agucuuaucccauguauau

SEQ ID NO: 1988015 - RNA, 19 nt, Artificial Sequence
  Description of Artificial Sequence: Synthetic oligonucleotide
  Antisense strand to SEQ ID NO: 1988014
auauacaugggauaagacu

SEQ ID NO: 1988016 - RNA, 19 nt, Artificial Sequence
  Description of Artificial Sequence: Synthetic oligonucleotide
  Sense strand starting at position 2180 of SEQ ID NO: 1880711
cauguauaugaaggcuaaa

SEQ ID NO: 1988017 - RNA, 19 nt, Artificial Sequence
  Description of Artificial Sequence: Synthetic oligonucleotide
  Antisense strand to SEQ ID NO: 1988016
uuuagccuucauauacaug

SEQ ID NO: 1988018 - RNA, 19 nt, Artificial Sequence
  Description of Artificial Sequence: Synthetic oligonucleotide
  Sense strand starting at position 2227 of SEQ ID NO: 1880711
auauccagagucugaguua

SEQ ID NO: 1988019 - RNA, 19 nt, Artificial Sequence
  Description of Artificial Sequence: Synthetic oligonucleotide
  Antisense strand to SEQ ID NO: 1988018
uaacucagacucuggauau

SEQ ID NO: 1988020 - RNA, 19 nt, Artificial Sequence
  Description of Artificial Sequence: Synthetic oligonucleotide
  Sense strand starting at position 2230 of SEQ ID NO: 1880711
uccagagucugaguuauga

SEQ ID NO: 1988021 - RNA, 19 nt, Artificial Sequence
  Description of Artificial Sequence: Synthetic oligonucleotide
  Antisense strand to SEQ ID NO: 1988020
ucauaacucagacucugga

SEQ ID NO: 1988022 - RNA, 19 nt, Artificial Sequence
  Description of Artificial Sequence: Synthetic oligonucleotide
  Sense strand starting at position 2240 of SEQ ID NO: 1880711
gaguuaugauuucuaucgu

SEQ ID NO: 1988023 - RNA, 19 nt, Artificial Sequence
  Description of Artificial Sequence: Synthetic oligonucleotide
  Antisense strand to SEQ ID NO: 1988022
acgauagaaaucauaacuc

SEQ ID NO: 1988024 - RNA, 19 nt, Artificial Sequence
  Description of Artificial Sequence: Synthetic oligonucleotide
  Sense strand starting at position 2269 of SEQ ID NO: 1880711
cugagacuguguuccucaa

SEQ ID NO: 1988025 - RNA, 19 nt, Artificial Sequence
  Description of Artificial Sequence: Synthetic oligonucleotide
  Antisense strand to SEQ ID NO: 1988024
uugaggaacacagucucag

SEQ ID NO: 1988026 - RNA, 19 nt, Artificial Sequence
  Description of Artificial Sequence: Synthetic oligonucleotide
  Sense strand starting at position 2273 of SEQ ID NO: 1880711
gacuguguuccucaaguuc

SEQ ID NO: 1988027 - RNA, 19 nt, Artificial Sequence
  Description of Artificial Sequence: Synthetic oligonucleotide
  Antisense strand to SEQ ID NO: 1988026
gaacuugaggaacacaguc

SEQ ID NO: 1988028 - RNA, 19 nt, Artificial Sequence
  Description of Artificial Sequence: Synthetic oligonucleotide
  Sense strand starting at position 2624 of SEQ ID NO: 1880711
ggaacaaucuuugcccuua

SEQ ID NO: 1988029 - RNA, 19 nt, Artificial Sequence
  Description of Artificial Sequence: Synthetic oligonucleotide
  Antisense strand to SEQ ID NO: 1988028
uaagggcaaagauuguucc

SEQ ID NO: 1988030 - RNA, 19 nt, Artificial Sequence
  Description of Artificial Sequence: Synthetic oligonucleotide
  Sense strand starting at position 2967 of SEQ ID NO: 1880711
auuaguauagaucaguguu

SEQ ID NO: 1988031 - RNA, 19 nt, Artificial Sequence
  Description of Artificial Sequence: Synthetic oligonucleotide
  Antisense strand to SEQ ID NO: 1988030
aacacugaucuauacuaau

SEQ ID NO: 1988032 - RNA, 19 nt, Artificial Sequence
  Description of Artificial Sequence: Synthetic oligonucleotide
  Sense strand starting at position 3190 of SEQ ID NO: 1880711
agacuuagauaugcaauua

SEQ ID NO: 1988033 - RNA, 19 nt, Artificial Sequence
  Description of Artificial Sequence: Synthetic oligonucleotide
  Antisense strand to SEQ ID NO: 1988032
uaauugcauaucuaagucu

SEQ ID NO: 1988034 - RNA, 19 nt, Artificial Sequence
  Description of Artificial Sequence: Synthetic oligonucleotide
  Sense strand starting at position 3474 of SEQ ID NO: 1880711
uauugaggcuacucugaca

SEQ ID NO: 1988035 - RNA, 19 nt, Artificial Sequence
  Description of Artificial Sequence: Synthetic oligonucleotide
  Antisense strand to SEQ ID NO: 1988034
ugucagaguagccucaaua

SEQ ID NO: 1988036 - RNA, 19 nt, Artificial Sequence
  Description of Artificial Sequence: Synthetic oligonucleotide
  Sense strand starting at position 3496 of SEQ ID NO: 1880711
uagacugagucccugucau

SEQ ID NO: 1988037 - RNA, 19 nt, Artificial Sequence
  Description of Artificial Sequence: Synthetic oligonucleotide
  Antisense strand to SEQ ID NO: 1988036
augacagggacucagucua

SEQ ID NO: 1988038 - RNA, 19 nt, Artificial Sequence
  Description of Artificial Sequence: Synthetic oligonucleotide
  Sense strand starting at position 3507 of SEQ ID NO: 1880711
ccugucauuguagaguuua

SEQ ID NO: 1988039 - RNA, 19 nt, Artificial Sequence
  Description of Artificial Sequence: Synthetic oligonucleotide
  Antisense strand to SEQ ID NO: 1988038
uaaacucuacaaugacagg

SEQ ID NO: 1988040 - RNA, 19 nt, Artificial Sequence
  Description of Artificial Sequence: Synthetic oligonucleotide
  Sense strand starting at position 3539 of SEQ ID NO: 1880711
ggagacagauauuacacaa

SEQ ID NO: 1988041 - RNA, 19 nt, Artificial Sequence
  Description of Artificial Sequence: Synthetic oligonucleotide
  Antisense strand to SEQ ID NO: 1988040
uuguguaauaucugucucc

SEQ ID NO: 1988042 - RNA, 19 nt, Artificial Sequence
  Description of Artificial Sequence: Synthetic oligonucleotide
  Sense strand starting at position 3587 of SEQ ID NO: 1880711
aauugugaugagugcuaua

SEQ ID NO: 1988043 - RNA, 19 nt, Artificial Sequence
  Description of Artificial Sequence: Synthetic oligonucleotide
  Antisense strand to SEQ ID NO: 1988042
uauagcacucaucacaauu

SEQ ID NO: 1988044 - RNA, 19 nt, Artificial Sequence
  Description of Artificial Sequence: Synthetic oligonucleotide
  Sense strand starting at position 3672 of SEQ ID NO: 1880711
uauuauauuugaugggacu

SEQ ID NO: 1988045 - RNA, 19 nt, Artificial Sequence
  Description of Artificial Sequence: Synthetic oligonucleotide
  Antisense strand to SEQ ID NO: 1988044
agucccaucaaauauaaua

SEQ ID NO: 1988046 - RNA, 19 nt, Artificial Sequence
  Description of Artificial Sequence: Synthetic oligonucleotide
  Sense strand starting at position 3706 of SEQ ID NO: 1880711
acuagauccuuacuagucu

SEQ ID NO: 1988047 - RNA, 19 nt, Artificial Sequence
  Description of Artificial Sequence: Synthetic oligonucleotide
  Antisense strand to SEQ ID NO: 1988046
agacuaguaaggaucuagu

SEQ ID NO: 1988048 - RNA, 19 nt, Artificial Sequence
  Description of Artificial Sequence: Synthetic oligonucleotide
  Sense strand starting at position 3742 of SEQ ID NO: 1880711
acuuuaacaugugccagaa

SEQ ID NO: 1988049 - RNA, 19 nt, Artificial Sequence
  Description of Artificial Sequence: Synthetic oligonucleotide
  Antisense strand to SEQ ID NO: 1988048
uucuggcacauguuaaagu

SEQ ID NO: 1988050 - RNA, 19 nt, Artificial Sequence
  Description of Artificial Sequence: Synthetic oligonucleotide
  Sense strand starting at position 3752 of SEQ ID NO: 1880711
gugccagaaucaccuggaa

SEQ ID NO: 1988051 - RNA, 19 nt, Artificial Sequence
  Description of Artificial Sequence: Synthetic oligonucleotide
  Antisense strand to SEQ ID NO: 1988050
uuccaggugauucuggcac

SEQ ID NO: 1988052 - RNA, 19 nt, Artificial Sequence
  Description of Artificial Sequence: Synthetic oligonucleotide
  Sense strand starting at position 3914 of SEQ ID NO: 1880711
aucacugaucuugggugau

SEQ ID NO: 1988053 - RNA, 19 nt, Artificial Sequence
  Description of Artificial Sequence: Synthetic oligonucleotide
  Antisense strand to SEQ ID NO: 1988052
aucacccaagaucagugau

SEQ ID NO: 1988054 - RNA, 19 nt, Artificial Sequence
  Description of Artificial Sequence: Synthetic oligonucleotide
  Sense strand starting at position 3916 of SEQ ID NO: 1880711
cacugaucuugggugauca

SEQ ID NO: 1988055 - RNA, 19 nt, Artificial Sequence
  Description of Artificial Sequence: Synthetic oligonucleotide
  Antisense strand to SEQ ID NO: 1988054
ugaucacccaagaucagug

SEQ ID NO: 1988056 - RNA, 19 nt, Artificial Sequence
  Description of Artificial Sequence: Synthetic oligonucleotide
  Sense strand starting at position 3917 of SEQ ID NO: 1880711
acugaucuugggugaucaa

SEQ ID NO: 1988057 - RNA, 19 nt, Artificial Sequence
  Description of Artificial Sequence: Synthetic oligonucleotide
  Antisense strand to SEQ ID NO: 1988056
uugaucacccaagaucagu

SEQ ID NO: 1988058 - RNA, 19 nt, Artificial Sequence
  Description of Artificial Sequence: Synthetic oligonucleotide
  Sense strand starting at position 58 of SEQ ID NO: 1880712
uggcaauauucuguucuga

SEQ ID NO: 1988059 - RNA, 19 nt, Artificial Sequence
  Description of Artificial Sequence: Synthetic oligonucleotide
  Antisense strand to SEQ ID NO: 1988058
ucagaacagaauauugcca

SEQ ID NO: 1988060 - RNA, 19 nt, Artificial Sequence
  Description of Artificial Sequence: Synthetic oligonucleotide
  Sense strand starting at position 60 of SEQ ID NO: 1880712
gcaauauucuguucugaac

SEQ ID NO: 1988061 - RNA, 19 nt, Artificial Sequence
  Description of Artificial Sequence: Synthetic oligonucleotide
  Antisense strand to SEQ ID NO: 1988060
guucagaacagaauauugc

SEQ ID NO: 1988062 - RNA, 19 nt, Artificial Sequence
  Description of Artificial Sequence: Synthetic oligonucleotide
  Sense strand starting at position 66 of SEQ ID NO: 1880712
uucuguucugaacaaguaa

SEQ ID NO: 1988063 - RNA, 19 nt, Artificial Sequence
  Description of Artificial Sequence: Synthetic oligonucleotide
  Antisense strand to SEQ ID NO: 1988062
uuacuuguucagaacagaa

SEQ ID NO: 1988064 - RNA, 19 nt, Artificial Sequence
  Description of Artificial Sequence: Synthetic oligonucleotide
  Sense strand starting at position 148 of SEQ ID NO: 1880712
uuagaaagcuguccagauc

SEQ ID NO: 1988065 - RNA, 19 nt, Artificial Sequence
  Description of Artificial Sequence: Synthetic oligonucleotide
  Antisense strand to SEQ ID NO: 1988064
gaucuggacagcuuucuaa

SEQ ID NO: 1988066 - RNA, 19 nt, Artificial Sequence
  Description of Artificial Sequence: Synthetic oligonucleotide
  Sense strand starting at position 149 of SEQ ID NO: 1880712
uagaaagcuguccagaucu

SEQ ID NO: 1988067 - RNA, 19 nt, Artificial Sequence
  Description of Artificial Sequence: Synthetic oligonucleotide
  Antisense strand to SEQ ID NO: 1988066
agaucuggacagcuuucua

SEQ ID NO: 1988068 - RNA, 19 nt, Artificial Sequence
  Description of Artificial Sequence: Synthetic oligonucleotide
  Sense strand starting at position 151 of SEQ ID NO: 1880712
gaaagcuguccagaucuuc

SEQ ID NO: 1988069 - RNA, 19 nt, Artificial Sequence
  Description of Artificial Sequence: Synthetic oligonucleotide
  Antisense strand to SEQ ID NO: 1988068
gaagaucuggacagcuuuc

SEQ ID NO: 1988070 - RNA, 19 nt, Artificial Sequence
  Description of Artificial Sequence: Synthetic oligonucleotide
  Sense strand starting at position 317 of SEQ ID NO: 1880712
cuuugaaucuagccagucu

SEQ ID NO: 1988071 - RNA, 19 nt, Artificial Sequence
  Description of Artificial Sequence: Synthetic oligonucleotide
  Antisense strand to SEQ ID NO: 1988070
agacuggcuagauucaaag

SEQ ID NO: 1988072 - RNA, 19 nt, Artificial Sequence
  Description of Artificial Sequence: Synthetic oligonucleotide
  Sense strand starting at position 335 of SEQ ID NO: 1880712
ucaccaugcuuaccaguua

SEQ ID NO: 1988073 - RNA, 19 nt, Artificial Sequence
  Description of Artificial Sequence: Synthetic oligonucleotide
  Antisense strand to SEQ ID NO: 1988072
uaacugguaagcaugguga

SEQ ID NO: 1988074 - RNA, 19 nt, Artificial Sequence
  Description of Artificial Sequence: Synthetic oligonucleotide
  Sense strand starting at position 346 of SEQ ID NO: 1880712
accaguuauccacagcacu

SEQ ID NO: 1988075 - RNA, 19 nt, Artificial Sequence
  Description of Artificial Sequence: Synthetic oligonucleotide
  Antisense strand to SEQ ID NO: 1988074
agugcuguggauaacuggu

SEQ ID NO: 1988076 - RNA, 19 nt, Artificial Sequence
  Description of Artificial Sequence: Synthetic oligonucleotide
  Sense strand starting at position 382 of SEQ ID NO: 1880712
acaggugccaguuacaaga

SEQ ID NO: 1988077 - RNA, 19 nt, Artificial Sequence
  Description of Artificial Sequence: Synthetic oligonucleotide
  Antisense strand to SEQ ID NO: 1988076
ucuuguaacuggcaccugu

SEQ ID NO: 1988078 - RNA, 19 nt, Artificial Sequence
  Description of Artificial Sequence: Synthetic oligonucleotide
  Sense strand starting at position 412 of SEQ ID NO: 1880712
agaaguaucagguauaggu

SEQ ID NO: 1988079 - RNA, 19 nt, Artificial Sequence
  Description of Artificial Sequence: Synthetic oligonucleotide
  Antisense strand to SEQ ID NO: 1988078
accuauaccugauacuucu

SEQ ID NO: 1988080 - RNA, 19 nt, Artificial Sequence
  Description of Artificial Sequence: Synthetic oligonucleotide
  Sense strand starting at position 671 of SEQ ID NO: 1880712
gagccaagucucuagcuca

SEQ ID NO: 1988081 - RNA, 19 nt, Artificial Sequence
  Description of Artificial Sequence: Synthetic oligonucleotide
  Antisense strand to SEQ ID NO: 1988080
ugagcuagagacuuggcuc

SEQ ID NO: 1988082 - RNA, 19 nt, Artificial Sequence
  Description of Artificial Sequence: Synthetic oligonucleotide
  Sense strand starting at position 929 of SEQ ID NO: 1880712
agucccaacuacuugagau

SEQ ID NO: 1988083 - RNA, 19 nt, Artificial Sequence
  Description of Artificial Sequence: Synthetic oligonucleotide
  Antisense strand to SEQ ID NO: 1988082
aucucaaguaguugggacu

SEQ ID NO: 1988084 - RNA, 19 nt, Artificial Sequence
  Description of Artificial Sequence: Synthetic oligonucleotide
  Sense strand starting at position 1127 of SEQ ID NO: 1880712
gagaauguggcaugaguga

SEQ ID NO: 1988085 - RNA, 19 nt, Artificial Sequence
  Description of Artificial Sequence: Synthetic oligonucleotide
  Antisense strand to SEQ ID NO: 1988084
ucacucaugccacauucuc

SEQ ID NO: 1988086 - RNA, 19 nt, Artificial Sequence
  Description of Artificial Sequence: Synthetic oligonucleotide
  Sense strand starting at position 1140 of SEQ ID NO: 1880712
gagugagauugucuuaaac

SEQ ID NO: 1988087 - RNA, 19 nt, Artificial Sequence
  Description of Artificial Sequence: Synthetic oligonucleotide
  Antisense strand to SEQ ID NO: 1988086
guuuaagacaaucucacuc

SEQ ID NO: 1988088 - RNA, 19 nt, Artificial Sequence
  Description of Artificial Sequence: Synthetic oligonucleotide
  Sense strand starting at position 1306 of SEQ ID NO: 1880712
ugcuuagcugaagaucaua

SEQ ID NO: 1988089 - RNA, 19 nt, Artificial Sequence
  Description of Artificial Sequence: Synthetic oligonucleotide
  Antisense strand to SEQ ID NO: 1988088
uaugaucuucagcuaagca

SEQ ID NO: 1988090 - RNA, 19 nt, Artificial Sequence
  Description of Artificial Sequence: Synthetic oligonucleotide
  Sense strand starting at position 1822 of SEQ ID NO: 1880712
acaguauuucucggccaga

SEQ ID NO: 1988091 - RNA, 19 nt, Artificial Sequence
  Description of Artificial Sequence: Synthetic oligonucleotide
  Antisense strand to SEQ ID NO: 1988090
ucuggccgagaaauacugu

SEQ ID NO: 1988092 - RNA, 19 nt, Artificial Sequence
  Description of Artificial Sequence: Synthetic oligonucleotide
  Sense strand starting at position 1823 of SEQ ID NO: 1880712
caguauuucucggccagau

SEQ ID NO: 1988093 - RNA, 19 nt, Artificial Sequence
  Description of Artificial Sequence: Synthetic oligonucleotide
  Antisense strand to SEQ ID NO: 1988092
aucuggccgagaaauacug

SEQ ID NO: 1988094 - RNA, 19 nt, Artificial Sequence
  Description of Artificial Sequence: Synthetic oligonucleotide
  Sense strand starting at position 1825 of SEQ ID NO: 1880712
guauuucucggccagaugu

SEQ ID NO: 1988095 - RNA, 19 nt, Artificial Sequence
  Description of Artificial Sequence: Synthetic oligonucleotide
  Antisense strand to SEQ ID NO: 1988094
acaucuggccgagaaauac

SEQ ID NO: 1988096 - RNA, 19 nt, Artificial Sequence
  Description of Artificial Sequence: Synthetic oligonucleotide
  Sense strand starting at position 1882 of SEQ ID NO: 1880712
cuucauguugugggugaau

SEQ ID NO: 1988097 - RNA, 19 nt, Artificial Sequence
  Description of Artificial Sequence: Synthetic oligonucleotide
  Antisense strand to SEQ ID NO: 1988096
auucacccacaacaugaag

SEQ ID NO: 1988098 - RNA, 19 nt, Artificial Sequence
  Description of Artificial Sequence: Synthetic oligonucleotide
  Sense strand starting at position 2014 of SEQ ID NO: 1880712
gcgacucaaccugaccaua

SEQ ID NO: 1988099 - RNA, 19 nt, Artificial Sequence
  Description of Artificial Sequence: Synthetic oligonucleotide
  Antisense strand to SEQ ID NO: 1988098
uauggucagguugagucgc

SEQ ID NO: 1988100 - RNA, 19 nt, Artificial Sequence
  Description of Artificial Sequence: Synthetic oligonucleotide
  Sense strand starting at position 2172 of SEQ ID NO: 1880712
ccuggaaucccaggcuaga

SEQ ID NO: 1988101 - RNA, 19 nt, Artificial Sequence
  Description of Artificial Sequence: Synthetic oligonucleotide
  Antisense strand to SEQ ID NO: 1988100
ucuagccugggauuccagg

SEQ ID NO: 1988102 - RNA, 19 nt, Artificial Sequence
  Description of Artificial Sequence: Synthetic oligonucleotide
  Sense strand starting at position 2196 of SEQ ID NO: 1880712
uagugaaggucugcuacca

SEQ ID NO: 1988103 - RNA, 19 nt, Artificial Sequence
  Description of Artificial Sequence: Synthetic oligonucleotide
  Antisense strand to SEQ ID NO: 1988102
ugguagcagaccuucacua

SEQ ID NO: 1988104 - RNA, 19 nt, Artificial Sequence
  Description of Artificial Sequence: Synthetic oligonucleotide
  Sense strand starting at position 2204 of SEQ ID NO: 1880712
gucugcuaccaccaaagau

SEQ ID NO: 1988105 - RNA, 19 nt, Artificial Sequence
  Description of Artificial Sequence: Synthetic oligonucleotide
  Antisense strand to SEQ ID NO: 1988104
aucuuuggugguagcagac

SEQ ID NO: 1988106 - RNA, 19 nt, Artificial Sequence
  Description of Artificial Sequence: Synthetic oligonucleotide
  Sense strand starting at position 2402 of SEQ ID NO: 1880712
cucuuaaaguaguuuagga

SEQ ID NO: 1988107 - RNA, 19 nt, Artificial Sequence
  Description of Artificial Sequence: Synthetic oligonucleotide
  Antisense strand to SEQ ID NO: 1988106
uccuaaacuacuuuaagag

SEQ ID NO: 1988108 - RNA, 19 nt, Artificial Sequence
  Description of Artificial Sequence: Synthetic oligonucleotide
  Sense strand starting at position 2536 of SEQ ID NO: 1880712
cccugaaguguggguauuu

SEQ ID NO: 1988109 - RNA, 19 nt, Artificial Sequence
  Description of Artificial Sequence: Synthetic oligonucleotide
  Antisense strand to SEQ ID NO: 1988108
aaauacccacacuucaggg

SEQ ID NO: 1988110 - RNA, 19 nt, Artificial Sequence
  Description of Artificial Sequence: Synthetic oligonucleotide
  Sense strand starting at position 2629 of SEQ ID NO: 1880712
gaagaaagcauccgugaug

SEQ ID NO: 1988111 - RNA, 19 nt, Artificial Sequence
  Description of Artificial Sequence: Synthetic oligonucleotide
  Antisense strand to SEQ ID NO: 1988110
caucacggaugcuuucuuc

SEQ ID NO: 1988112 - RNA, 19 nt, Artificial Sequence
  Description of Artificial Sequence: Synthetic oligonucleotide
  Sense strand starting at position 2630 of SEQ ID NO: 1880712
aagaaagcauccgugaugu

SEQ ID NO: 1988113 - RNA, 19 nt, Artificial Sequence
  Description of Artificial Sequence: Synthetic oligonucleotide
  Antisense strand to SEQ ID NO: 1988112
acaucacggaugcuuucuu

SEQ ID NO: 1988114 - RNA, 19 nt, Artificial Sequence
  Description of Artificial Sequence: Synthetic oligonucleotide
  Sense strand starting at position 2632 of SEQ ID NO: 1880712
gaaagcauccgugauguca

SEQ ID NO: 1988115 - RNA, 19 nt, Artificial Sequence
  Description of Artificial Sequence: Synthetic oligonucleotide
  Antisense strand to SEQ ID NO: 1988114
ugacaucacggaugcuuuc

SEQ ID NO: 1988116 - RNA, 19 nt, Artificial Sequence
  Description of Artificial Sequence: Synthetic oligonucleotide
  Sense strand starting at position 2641 of SEQ ID NO: 1880712
cgugaugucagagaugaca

SEQ ID NO: 1988117 - RNA, 19 nt, Artificial Sequence
  Description of Artificial Sequence: Synthetic oligonucleotide
  Antisense strand to SEQ ID NO: 1988116
ugucaucucugacaucacg

SEQ ID NO: 1988118 - RNA, 19 nt, Artificial Sequence
  Description of Artificial Sequence: Synthetic oligonucleotide
  Sense strand starting at position 2643 of SEQ ID NO: 1880712
ugaugucagagaugacauu

SEQ ID NO: 1988119 - RNA, 19 nt, Artificial Sequence
  Description of Artificial Sequence: Synthetic oligonucleotide
  Antisense strand to SEQ ID NO: 1988118
aaugucaucucugacauca

SEQ ID NO: 1988120 - RNA, 19 nt, Artificial Sequence
  Description of Artificial Sequence: Synthetic oligonucleotide
  Sense strand starting at position 3025 of SEQ ID NO: 1880712
cgauauaggccaggagaga

SEQ ID NO: 1988121 - RNA, 19 nt, Artificial Sequence
  Description of Artificial Sequence: Synthetic oligonucleotide
  Antisense strand to SEQ ID NO: 1988120
ucucuccuggccuauaucg

SEQ ID NO: 1988122 - RNA, 19 nt, Artificial Sequence
  Description of Artificial Sequence: Synthetic oligonucleotide
  Sense strand starting at position 3216 of SEQ ID NO: 1880712
ugaaaugaaugccugcuaa

SEQ ID NO: 1988123 - RNA, 19 nt, Artificial Sequence
  Description of Artificial Sequence: Synthetic oligonucleotide
  Antisense strand to SEQ ID NO: 1988122
uuagcaggcauucauuuca

SEQ ID NO: 1988124 - RNA, 19 nt, Artificial Sequence
  Description of Artificial Sequence: Synthetic oligonucleotide
  Sense strand starting at position 3309 of SEQ ID NO: 1880712
uaauguaagggugguauau

SEQ ID NO: 1988125 - RNA, 19 nt, Artificial Sequence
  Description of Artificial Sequence: Synthetic oligonucleotide
  Antisense strand to SEQ ID NO: 1988124
auauaccacccuuacauua

SEQ ID NO: 1988126 - RNA, 19 nt, Artificial Sequence
  Description of Artificial Sequence: Synthetic oligonucleotide
  Sense strand starting at position 3336 of SEQ ID NO: 1880712
uuaucauuacuaugaaggu

SEQ ID NO: 1988127 - RNA, 19 nt, Artificial Sequence
  Description of Artificial Sequence: Synthetic oligonucleotide
  Antisense strand to SEQ ID NO: 1988126
accuucauaguaaugauaa

SEQ ID NO: 1988128 - RNA, 19 nt, Artificial Sequence
  Description of Artificial Sequence: Synthetic oligonucleotide
  Sense strand starting at position 3461 of SEQ ID NO: 1880712
aggaaaugaaaguguacuu

SEQ ID NO: 1988129 - RNA, 19 nt, Artificial Sequence
  Description of Artificial Sequence: Synthetic oligonucleotide
  Antisense strand to SEQ ID NO: 1988128
aaguacacuuucauuuccu

SEQ ID NO: 1988130 - RNA, 19 nt, Artificial Sequence
  Description of Artificial Sequence: Synthetic oligonucleotide
  Sense strand starting at position 3474 of SEQ ID NO: 1880712
guacuuguuguauauaaag

SEQ ID NO: 1988131 - RNA, 19 nt, Artificial Sequence
  Description of Artificial Sequence: Synthetic oligonucleotide
  Antisense strand to SEQ ID NO: 1988130
cuuuauauacaacaaguac

SEQ ID NO: 1988132 - RNA, 19 nt, Artificial Sequence
  Description of Artificial Sequence: Synthetic oligonucleotide
  Sense strand starting at position 3498 of SEQ ID NO: 1880712
uuguuauuagcuuaacuag

SEQ ID NO: 1988133 - RNA, 19 nt, Artificial Sequence
  Description of Artificial Sequence: Synthetic oligonucleotide
  Antisense strand to SEQ ID NO: 1988132
cuaguuaagcuaauaacaa

SEQ ID NO: 1988134 - RNA, 19 nt, Artificial Sequence
  Description of Artificial Sequence: Synthetic oligonucleotide
  Sense strand starting at position 3641 of SEQ ID NO: 1880712
ggaagauacuaacagagaa

SEQ ID NO: 1988135 - RNA, 19 nt, Artificial Sequence
  Description of Artificial Sequence: Synthetic oligonucleotide
  Antisense strand to SEQ ID NO: 1988134
uucucuguuaguaucuucc

SEQ ID NO: 1988136 - RNA, 19 nt, Artificial Sequence
  Description of Artificial Sequence: Synthetic oligonucleotide
  Sense strand starting at position 3910 of SEQ ID NO: 1880712
cagggauagcucuacuuau

SEQ ID NO: 1988137 - RNA, 19 nt, Artificial Sequence
  Description of Artificial Sequence: Synthetic oligonucleotide
  Antisense strand to SEQ ID NO: 1988136
auaaguagagcuaucccug

SEQ ID NO: 1988138 - RNA, 19 nt, Artificial Sequence
  Description of Artificial Sequence: Synthetic oligonucleotide
  Sense strand starting at position 428 of SEQ ID NO: 1880713
cuuaguauacagcaucuau

SEQ ID NO: 1988139 - RNA, 19 nt, Artificial Sequence
  Description of Artificial Sequence: Synthetic oligonucleotide
  Antisense strand to SEQ ID NO: 1988138
auagaugcuguauacuaag

SEQ ID NO: 1988140 - RNA, 19 nt, Artificial Sequence
  Description of Artificial Sequence: Synthetic oligonucleotide
  Sense strand starting at position 439 of SEQ ID NO: 1880713
gcaucuaugguauauuaug

SEQ ID NO: 1988141 - RNA, 19 nt, Artificial Sequence
  Description of Artificial Sequence: Synthetic oligonucleotide
  Antisense strand to SEQ ID NO: 1988140
cauaauauaccauagaugc

SEQ ID NO: 1988142 - RNA, 19 nt, Artificial Sequence
  Description of Artificial Sequence: Synthetic oligonucleotide
  Sense strand starting at position 522 of SEQ ID NO: 1880713
cauggacucuuugugaauu

SEQ ID NO: 1988143 - RNA, 19 nt, Artificial Sequence
  Description of Artificial Sequence: Synthetic oligonucleotide
  Antisense strand to SEQ ID NO: 1988142
aauucacaaagaguccaug

SEQ ID NO: 1988144 - RNA, 19 nt, Artificial Sequence
  Description of Artificial Sequence: Synthetic oligonucleotide
  Sense strand starting at position 1421 of SEQ ID NO: 1880713
ggccuaugucuauguauuu

SEQ ID NO: 1988145 - RNA, 19 nt, Artificial Sequence
  Description of Artificial Sequence: Synthetic oligonucleotide
  Antisense strand to SEQ ID NO: 1988144
aaauacauagacauaggcc

SEQ ID NO: 1988146 - RNA, 19 nt, Artificial Sequence
  Description of Artificial Sequence: Synthetic oligonucleotide
  Sense strand starting at position 1470 of SEQ ID NO: 1880713
cagcccuaucaagauggua

SEQ ID NO: 1988147 - RNA, 19 nt, Artificial Sequence
  Description of Artificial Sequence: Synthetic oligonucleotide
  Antisense strand to SEQ ID NO: 1988146
uaccaucuugauagggcug

SEQ ID NO: 1988148 - RNA, 19 nt, Artificial Sequence
  Description of Artificial Sequence: Synthetic oligonucleotide
  Sense strand starting at position 1551 of SEQ ID NO: 1880713
cccauaaauucugcuugga

SEQ ID NO: 1988149 - RNA, 19 nt, Artificial Sequence
  Description of Artificial Sequence: Synthetic oligonucleotide
  Antisense strand to SEQ ID NO: 1988148
uccaagcagaauuuauggg

SEQ ID NO: 1988150 - RNA, 19 nt, Artificial Sequence
  Description of Artificial Sequence: Synthetic oligonucleotide
  Sense strand starting at position 1586 of SEQ ID NO: 1880713
ucaugaucgcaagagacuu

SEQ ID NO: 1988151 - RNA, 19 nt, Artificial Sequence
  Description of Artificial Sequence: Synthetic oligonucleotide
  Antisense strand to SEQ ID NO: 1988150
aagucucuugcgaucauga

SEQ ID NO: 1988152 - RNA, 19 nt, Artificial Sequence
  Description of Artificial Sequence: Synthetic oligonucleotide
  Sense strand starting at position 1862 of SEQ ID NO: 1880713
ggaagaagcccugguuaau

SEQ ID NO: 1988153 - RNA, 19 nt, Artificial Sequence
  Description of Artificial Sequence: Synthetic oligonucleotide
  Antisense strand to SEQ ID NO: 1988152
auuaaccagggcuucuucc

SEQ ID NO: 1988154 - RNA, 19 nt, Artificial Sequence
  Description of Artificial Sequence: Synthetic oligonucleotide
  Sense strand starting at position 1886 of SEQ ID NO: 1880713
uuccauaucagguaagugu

SEQ ID NO: 1988155 - RNA, 19 nt, Artificial Sequence
  Description of Artificial Sequence: Synthetic oligonucleotide
  Antisense strand to SEQ ID NO: 1988154
acacuuaccugauauggaa

SEQ ID NO: 1988156 - RNA, 19 nt, Artificial Sequence
  Description of Artificial Sequence: Synthetic oligonucleotide
  Sense strand starting at position 1900 of SEQ ID NO: 1880713
agugucuaaugucuagaaa

SEQ ID NO: 1988157 - RNA, 19 nt, Artificial Sequence
  Description of Artificial Sequence: Synthetic oligonucleotide
  Antisense strand to SEQ ID NO: 1988156
uuucuagacauuagacacu

SEQ ID NO: 1988158 - RNA, 19 nt, Artificial Sequence
  Description of Artificial Sequence: Synthetic oligonucleotide
  Sense strand starting at position 2033 of SEQ ID NO: 1880713
uggugacuacucuacacuu

SEQ ID NO: 1988159 - RNA, 19 nt, Artificial Sequence
  Description of Artificial Sequence: Synthetic oligonucleotide
  Antisense strand to SEQ ID NO: 1988158
aaguguagaguagucacca

SEQ ID NO: 1988160 - RNA, 19 nt, Artificial Sequence
  Description of Artificial Sequence: Synthetic oligonucleotide
  Sense strand starting at position 2098 of SEQ ID NO: 1880713
ucuaucacacaggguuauu

SEQ ID NO: 1988161 - RNA, 19 nt, Artificial Sequence
  Description of Artificial Sequence: Synthetic oligonucleotide
  Antisense strand to SEQ ID NO: 1988160
aauaacccugugugauaga

SEQ ID NO: 1988162 - RNA, 19 nt, Artificial Sequence
  Description of Artificial Sequence: Synthetic oligonucleotide
  Sense strand starting at position 2235 of SEQ ID NO: 1880713
gcuuuaggagcgaguuguu

SEQ ID NO: 1988163 - RNA, 19 nt, Artificial Sequence
  Description of Artificial Sequence: Synthetic oligonucleotide
  Antisense strand to SEQ ID NO: 1988162
aacaacucgcuccuaaagc

SEQ ID NO: 1988164 - RNA, 19 nt, Artificial Sequence
  Description of Artificial Sequence: Synthetic oligonucleotide
  Sense strand starting at position 2327 of SEQ ID NO: 1880713
cugccuauuuggcuauauu

SEQ ID NO: 1988165 - RNA, 19 nt, Artificial Sequence
  Description of Artificial Sequence: Synthetic oligonucleotide
  Antisense strand to SEQ ID NO: 1988164
aauauagccaaauaggcag

SEQ ID NO: 1988166 - RNA, 19 nt, Artificial Sequence
  Description of Artificial Sequence: Synthetic oligonucleotide
  Sense strand starting at position 2416 of SEQ ID NO: 1880713
uggugacauugauuaauca

SEQ ID NO: 1988167 - RNA, 19 nt, Artificial Sequence
  Description of Artificial Sequence: Synthetic oligonucleotide
  Antisense strand to SEQ ID NO: 1988166
ugauuaaucaaugucacca

SEQ ID NO: 1988168 - RNA, 19 nt, Artificial Sequence
  Description of Artificial Sequence: Synthetic oligonucleotide
  Sense strand starting at position 2596 of SEQ ID NO: 1880713
ugcacugagaauuggguaa

SEQ ID NO: 1988169 - RNA, 19 nt, Artificial Sequence
  Description of Artificial Sequence: Synthetic oligonucleotide
  Antisense strand to SEQ ID NO: 1988168
uuacccaauucucagugca

SEQ ID NO: 1988170 - RNA, 19 nt, Artificial Sequence
  Description of Artificial Sequence: Synthetic oligonucleotide
  Sense strand starting at position 2628 of SEQ ID NO: 1880713
aggauucuguauucccaga

SEQ ID NO: 1988171 - RNA, 19 nt, Artificial Sequence
  Description of Artificial Sequence: Synthetic oligonucleotide
  Antisense strand to SEQ ID NO: 1988170
ucugggaauacagaauccu

SEQ ID NO: 1988172 - RNA, 19 nt, Artificial Sequence
  Description of Artificial Sequence: Synthetic oligonucleotide
  Sense strand starting at position 2772 of SEQ ID NO: 1880713
gaguuuaaucuauggaaau

SEQ ID NO: 1988173 - RNA, 19 nt, Artificial Sequence
  Description of Artificial Sequence: Synthetic oligonucleotide
  Antisense strand to SEQ ID NO: 1988172
auuuccauagauuaaacuc

SEQ ID NO: 1988174 - RNA, 19 nt, Artificial Sequence
  Description of Artificial Sequence: Synthetic oligonucleotide
  Sense strand starting at position 2786 of SEQ ID NO: 1880713
gaaauuauccaguggaagc

SEQ ID NO: 1988175 - RNA, 19 nt, Artificial Sequence
  Description of Artificial Sequence: Synthetic oligonucleotide
  Antisense strand to SEQ ID NO: 1988174
gcuuccacuggauaauuuc

SEQ ID NO: 1988176 - RNA, 19 nt, Artificial Sequence
  Description of Artificial Sequence: Synthetic oligonucleotide
  Sense strand starting at position 2884 of SEQ ID NO: 1880713
aagaguggucugcauaaau

SEQ ID NO: 1988177 - RNA, 19 nt, Artificial Sequence
  Description of Artificial Sequence: Synthetic oligonucleotide
  Antisense strand to SEQ ID NO: 1988176
auuuaugcagaccacucuu

SEQ ID NO: 1988178 - RNA, 19 nt, Artificial Sequence
  Description of Artificial Sequence: Synthetic oligonucleotide
  Sense strand starting at position 2941 of SEQ ID NO: 1880713
agauacauauuguugacau

SEQ ID NO: 1988179 - RNA, 19 nt, Artificial Sequence
  Description of Artificial Sequence: Synthetic oligonucleotide
  Antisense strand to SEQ ID NO: 1988178
augucaacaauauguaucu

SEQ ID NO: 1988180 - RNA, 19 nt, Artificial Sequence
  Description of Artificial Sequence: Synthetic oligonucleotide
  Sense strand starting at position 3017 of SEQ ID NO: 1880713
augucaaagugacuugaaa

SEQ ID NO: 1988181 - RNA, 19 nt, Artificial Sequence
  Description of Artificial Sequence: Synthetic oligonucleotide
  Antisense strand to SEQ ID NO: 1988180
uuucaagucacuuugacau

SEQ ID NO: 1988182 - RNA, 19 nt, Artificial Sequence
  Description of Artificial Sequence: Synthetic oligonucleotide
  Sense strand starting at position 3019 of SEQ ID NO: 1880713
gucaaagugacuugaaagu

SEQ ID NO: 1988183 - RNA, 19 nt, Artificial Sequence
  Description of Artificial Sequence: Synthetic oligonucleotide
  Antisense strand to SEQ ID NO: 1988182
acuuucaagucacuuugac

SEQ ID NO: 1988184 - RNA, 19 nt, Artificial Sequence
  Description of Artificial Sequence: Synthetic oligonucleotide
  Sense strand starting at position 3045 of SEQ ID NO: 1880713
acauaaaugcacuguuaag

SEQ ID NO: 1988185 - RNA, 19 nt, Artificial Sequence
  Description of Artificial Sequence: Synthetic oligonucleotide
  Antisense strand to SEQ ID NO: 1988184
cuuaacagugcauuuaugu

SEQ ID NO: 1988186 - RNA, 19 nt, Artificial Sequence
  Description of Artificial Sequence: Synthetic oligonucleotide
  Sense strand starting at position 3146 of SEQ ID NO: 1880713
gauauagguuaguuacaga

SEQ ID NO: 1988187 - RNA, 19 nt, Artificial Sequence
  Description of Artificial Sequence: Synthetic oligonucleotide
  Antisense strand to SEQ ID NO: 1988186
ucuguaacuaaccuauauc

SEQ ID NO: 1988188 - RNA, 19 nt, Artificial Sequence
  Description of Artificial Sequence: Synthetic oligonucleotide
  Sense strand starting at position 3259 of SEQ ID NO: 1880713
uggaauuucuuauagggua

SEQ ID NO: 1988189 - RNA, 19 nt, Artificial Sequence
  Description of Artificial Sequence: Synthetic oligonucleotide
  Antisense strand to SEQ ID NO: 1988188
uacccuauaagaaauucca

SEQ ID NO: 1988190 - RNA, 19 nt, Artificial Sequence
  Description of Artificial Sequence: Synthetic oligonucleotide
  Sense strand starting at position 3291 of SEQ ID NO: 1880713
cacaucugaggauguuuau

SEQ ID NO: 1988191 - RNA, 19 nt, Artificial Sequence
  Description of Artificial Sequence: Synthetic oligonucleotide
  Antisense strand to SEQ ID NO: 1988190
auaaacauccucagaugug

SEQ ID NO: 1988192 - RNA, 19 nt, Artificial Sequence
  Description of Artificial Sequence: Synthetic oligonucleotide
  Sense strand starting at position 3294 of SEQ ID NO: 1880713
aucugaggauguuuaugau

SEQ ID NO: 1988193 - RNA, 19 nt, Artificial Sequence
  Description of Artificial Sequence: Synthetic oligonucleotide
  Antisense strand to SEQ ID NO: 1988192
aucauaaacauccucagau

SEQ ID NO: 1988194 - RNA, 19 nt, Artificial Sequence
  Description of Artificial Sequence: Synthetic oligonucleotide
  Sense strand starting at position 3300 of SEQ ID NO: 1880713
ggauguuuaugauccuaaa

SEQ ID NO: 1988195 - RNA, 19 nt, Artificial Sequence
  Description of Artificial Sequence: Synthetic oligonucleotide
  Antisense strand to SEQ ID NO: 1988194
uuuaggaucauaaacaucc

SEQ ID NO: 1988196 - RNA, 19 nt, Artificial Sequence
  Description of Artificial Sequence: Synthetic oligonucleotide
  Sense strand starting at position 3321 of SEQ ID NO: 1880713
ccaggaagacuuuguaaca

SEQ ID NO: 1988197 - RNA, 19 nt, Artificial Sequence
  Description of Artificial Sequence: Synthetic oligonucleotide
  Antisense strand to SEQ ID NO: 1988196
uguuacaaagucuuccugg

SEQ ID NO: 1988198 - RNA, 19 nt, Artificial Sequence
  Description of Artificial Sequence: Synthetic oligonucleotide
  Sense strand starting at position 3322 of SEQ ID NO: 1880713
caggaagacuuuguaacau

SEQ ID NO: 1988199 - RNA, 19 nt, Artificial Sequence
  Description of Artificial Sequence: Synthetic oligonucleotide
  Antisense strand to SEQ ID NO: 1988198
auguuacaaagucuuccug

SEQ ID NO: 1988200 - RNA, 19 nt, Artificial Sequence
  Description of Artificial Sequence: Synthetic oligonucleotide
  Sense strand starting at position 3355 of SEQ ID NO: 1880713
uaacauuguccugguggaa

SEQ ID NO: 1988201 - RNA, 19 nt, Artificial Sequence
  Description of Artificial Sequence: Synthetic oligonucleotide
  Antisense strand to SEQ ID NO: 1988200
uuccaccaggacaauguua

SEQ ID NO: 1988202 - RNA, 19 nt, Artificial Sequence
  Description of Artificial Sequence: Synthetic oligonucleotide
  Sense strand starting at position 3358 of SEQ ID NO: 1880713
cauuguccugguggaaaua

SEQ ID NO: 1988203 - RNA, 19 nt, Artificial Sequence
  Description of Artificial Sequence: Synthetic oligonucleotide
  Antisense strand to SEQ ID NO: 1988202
uauuuccaccaggacaaug

SEQ ID NO: 1988204 - RNA, 19 nt, Artificial Sequence
  Description of Artificial Sequence: Synthetic oligonucleotide
  Sense strand starting at position 3359 of SEQ ID NO: 1880713
auuguccugguggaaauau

SEQ ID NO: 1988205 - RNA, 19 nt, Artificial Sequence
  Description of Artificial Sequence: Synthetic oligonucleotide
  Antisense strand to SEQ ID NO: 1988204
auauuuccaccaggacaau

SEQ ID NO: 1988206 - RNA, 19 nt, Artificial Sequence
  Description of Artificial Sequence: Synthetic oligonucleotide
  Sense strand starting at position 3405 of SEQ ID NO: 1880713
ccaagaacgugaccuaaga

SEQ ID NO: 1988207 - RNA, 19 nt, Artificial Sequence
  Description of Artificial Sequence: Synthetic oligonucleotide
  Antisense strand to SEQ ID NO: 1988206
ucuuaggucacguucuugg

SEQ ID NO: 1988208 - RNA, 19 nt, Artificial Sequence
  Description of Artificial Sequence: Synthetic oligonucleotide
  Sense strand starting at position 3754 of SEQ ID NO: 1880713
uuucuuuauggcugggaag

SEQ ID NO: 1988209 - RNA, 19 nt, Artificial Sequence
  Description of Artificial Sequence: Synthetic oligonucleotide
  Antisense strand to SEQ ID NO: 1988208
cuucccagccauaaagaaa

SEQ ID NO: 1988210 - RNA, 19 nt, Artificial Sequence
  Description of Artificial Sequence: Synthetic oligonucleotide
  Sense strand starting at position 3891 of SEQ ID NO: 1880713
acaauagcuccuugaagaa

SEQ ID NO: 1988211 - RNA, 19 nt, Artificial Sequence
  Description of Artificial Sequence: Synthetic oligonucleotide
  Antisense strand to SEQ ID NO: 1988210
uucuucaaggagcuauugu

SEQ ID NO: 1988212 - RNA, 19 nt, Artificial Sequence
  Description of Artificial Sequence: Synthetic oligonucleotide
  Sense strand starting at position 3914 of SEQ ID NO: 1880713
ugugaauauuaaguuagag

SEQ ID NO: 1988213 - RNA, 19 nt, Artificial Sequence
  Description of Artificial Sequence: Synthetic oligonucleotide
  Antisense strand to SEQ ID NO: 1988212
cucuaacuuaauauucaca

SEQ ID NO: 1988214 - RNA, 19 nt, Artificial Sequence
  Description of Artificial Sequence: Synthetic oligonucleotide
  Sense strand starting at position 3954 of SEQ ID NO: 1880713
caaugucggguauaguaua

SEQ ID NO: 1988215 - RNA, 19 nt, Artificial Sequence
  Description of Artificial Sequence: Synthetic oligonucleotide
  Antisense strand to SEQ ID NO: 1988214
uauacuauacccgacauug

SEQ ID NO: 1988216 - RNA, 19 nt, Artificial Sequence
  Description of Artificial Sequence: Synthetic oligonucleotide
  Sense strand starting at position 3968 of SEQ ID NO: 1880713
guauaagcacuuuaugaau

SEQ ID NO: 1988217 - RNA, 19 nt, Artificial Sequence
  Description of Artificial Sequence: Synthetic oligonucleotide
  Antisense strand to SEQ ID NO: 1988216
auucauaaagugcuuauac

SEQ ID NO: 1988218 - RNA, 19 nt, Artificial Sequence
  Description of Artificial Sequence: Synthetic oligonucleotide
  Sense strand starting at position 94 of SEQ ID NO: 1880714
agucaauaaugauuaggca

SEQ ID NO: 1988219 - RNA, 19 nt, Artificial Sequence
  Description of Artificial Sequence: Synthetic oligonucleotide
  Antisense strand to SEQ ID NO: 1988218
ugccuaaucauuauugacu

SEQ ID NO: 1988220 - RNA, 19 nt, Artificial Sequence
  Description of Artificial Sequence: Synthetic oligonucleotide
  Sense strand starting at position 390 of SEQ ID NO: 1880714
uguauauacuagcuaucau

SEQ ID NO: 1988221 - RNA, 19 nt, Artificial Sequence
  Description of Artificial Sequence: Synthetic oligonucleotide
  Antisense strand to SEQ ID NO: 1988220
augauagcuaguauauaca

SEQ ID NO: 1988222 - RNA, 19 nt, Artificial Sequence
  Description of Artificial Sequence: Synthetic oligonucleotide
  Sense strand starting at position 506 of SEQ ID NO: 1880714
ggucacguucuuggagaaa

SEQ ID NO: 1988223 - RNA, 19 nt, Artificial Sequence
  Description of Artificial Sequence: Synthetic oligonucleotide
  Antisense strand to SEQ ID NO: 1988222
uuucuccaagaacgugacc

SEQ ID NO: 1988224 - RNA, 19 nt, Artificial Sequence
  Description of Artificial Sequence: Synthetic oligonucleotide
  Sense strand starting at position 599 of SEQ ID NO: 1880714
ccuggcauuuaggaucaua

SEQ ID NO: 1988225 - RNA, 19 nt, Artificial Sequence
  Description of Artificial Sequence: Synthetic oligonucleotide
  Antisense strand to SEQ ID NO: 1988224
uaugauccuaaaugccagg

SEQ ID NO: 1988226 - RNA, 19 nt, Artificial Sequence
  Description of Artificial Sequence: Synthetic oligonucleotide
  Sense strand starting at position 679 of SEQ ID NO: 1880714
gaguuacauagugagguuu

SEQ ID NO: 1988227 - RNA, 19 nt, Artificial Sequence
  Description of Artificial Sequence: Synthetic oligonucleotide
  Antisense strand to SEQ ID NO: 1988226
aaaccucacuauguaacuc

SEQ ID NO: 1988228 - RNA, 19 nt, Artificial Sequence
  Description of Artificial Sequence: Synthetic oligonucleotide
  Sense strand starting at position 742 of SEQ ID NO: 1880714
ggagaauaguuucucaugu

SEQ ID NO: 1988229 - RNA, 19 nt, Artificial Sequence
  Description of Artificial Sequence: Synthetic oligonucleotide
  Antisense strand to SEQ ID NO: 1988228
acaugagaaacuauucucc

SEQ ID NO: 1988230 - RNA, 19 nt, Artificial Sequence
  Description of Artificial Sequence: Synthetic oligonucleotide
  Sense strand starting at position 752 of SEQ ID NO: 1880714
uucucaugucuguaacuaa

SEQ ID NO: 1988231 - RNA, 19 nt, Artificial Sequence
  Description of Artificial Sequence: Synthetic oligonucleotide
  Antisense strand to SEQ ID NO: 1988230
uuaguuacagacaugagaa

SEQ ID NO: 1988232 - RNA, 19 nt, Artificial Sequence
  Description of Artificial Sequence: Synthetic oligonucleotide
  Sense strand starting at position 759 of SEQ ID NO: 1880714
gucuguaacuaaccuauau

SEQ ID NO: 1988233 - RNA, 19 nt, Artificial Sequence
  Description of Artificial Sequence: Synthetic oligonucleotide
  Antisense strand to SEQ ID NO: 1988232
auauagguuaguuacagac

SEQ ID NO: 1988234 - RNA, 19 nt, Artificial Sequence
  Description of Artificial Sequence: Synthetic oligonucleotide
  Sense strand starting at position 900 of SEQ ID NO: 1880714
uuugacaugcuuuaagcuu

SEQ ID NO: 1988235 - RNA, 19 nt, Artificial Sequence
  Description of Artificial Sequence: Synthetic oligonucleotide
  Antisense strand to SEQ ID NO: 1988234
aagcuuaaagcaugucaaa

SEQ ID NO: 1988236 - RNA, 19 nt, Artificial Sequence
  Description of Artificial Sequence: Synthetic oligonucleotide
  Sense strand starting at position 908 of SEQ ID NO: 1880714
gcuuuaagcuuauuuaguc

SEQ ID NO: 1988237 - RNA, 19 nt, Artificial Sequence
  Description of Artificial Sequence: Synthetic oligonucleotide
  Antisense strand to SEQ ID NO: 1988236
gacuaaauaagcuuaaagc

SEQ ID NO: 1988238 - RNA, 19 nt, Artificial Sequence
  Description of Artificial Sequence: Synthetic oligonucleotide
  Sense strand starting at position 923 of SEQ ID NO: 1880714
aguccuauacuauacagua

SEQ ID NO: 1988239 - RNA, 19 nt, Artificial Sequence
  Description of Artificial Sequence: Synthetic oligonucleotide
  Antisense strand to SEQ ID NO: 1988238
uacuguauaguauaggacu

SEQ ID NO: 1988240 - RNA, 19 nt, Artificial Sequence
  Description of Artificial Sequence: Synthetic oligonucleotide
  Sense strand starting at position 950 of SEQ ID NO: 1880714
guccuauauuuaguuaugu

SEQ ID NO: 1988241 - RNA, 19 nt, Artificial Sequence
  Description of Artificial Sequence: Synthetic oligonucleotide
  Antisense strand to SEQ ID NO: 1988240
acauaacuaaauauaggac

SEQ ID NO: 1988242 - RNA, 19 nt, Artificial Sequence
  Description of Artificial Sequence: Synthetic oligonucleotide
  Sense strand starting at position 1127 of SEQ ID NO: 1880714
cuggauaauuuccauagau

SEQ ID NO: 1988243 - RNA, 19 nt, Artificial Sequence
  Description of Artificial Sequence: Synthetic oligonucleotide
  Antisense strand to SEQ ID NO: 1988242
aucuauggaaauuauccag

SEQ ID NO: 1988244 - RNA, 19 nt, Artificial Sequence
  Description of Artificial Sequence: Synthetic oligonucleotide
  Sense strand starting at position 1149 of SEQ ID NO: 1880714
acucuagagucauugaaga

SEQ ID NO: 1988245 - RNA, 19 nt, Artificial Sequence
  Description of Artificial Sequence: Synthetic oligonucleotide
  Antisense strand to SEQ ID NO: 1988244
ucuucaaugacucuagagu

SEQ ID NO: 1988246 - RNA, 19 nt, Artificial Sequence
  Description of Artificial Sequence: Synthetic oligonucleotide
  Sense strand starting at position 1287 of SEQ ID NO: 1880714
acagaauccugggagauuu

SEQ ID NO: 1988247 - RNA, 19 nt, Artificial Sequence
  Description of Artificial Sequence: Synthetic oligonucleotide
  Antisense strand to SEQ ID NO: 1988246
aaaucucccaggauucugu

SEQ ID NO: 1988248 - RNA, 19 nt, Artificial Sequence
  Description of Artificial Sequence: Synthetic oligonucleotide
  Sense strand starting at position 1350 of SEQ ID NO: 1880714
gugguaugcugacuauuua

SEQ ID NO: 1988249 - RNA, 19 nt, Artificial Sequence
  Description of Artificial Sequence: Synthetic oligonucleotide
  Antisense strand to SEQ ID NO: 1988248
uaaauagucagcauaccac

SEQ ID NO: 1988250 - RNA, 19 nt, Artificial Sequence
  Description of Artificial Sequence: Synthetic oligonucleotide
  Sense strand starting at position 1417 of SEQ ID NO: 1880714
ggaacagcucacugaaaca

SEQ ID NO: 1988251 - RNA, 19 nt, Artificial Sequence
  Description of Artificial Sequence: Synthetic oligonucleotide
  Antisense strand to SEQ ID NO: 1988250
uguuucagugagcuguucc

SEQ ID NO: 1988252 - RNA, 19 nt, Artificial Sequence
  Description of Artificial Sequence: Synthetic oligonucleotide
  Sense strand starting at position 1507 of SEQ ID NO: 1880714
caaguuagagcugauauuc

SEQ ID NO: 1988253 - RNA, 19 nt, Artificial Sequence
  Description of Artificial Sequence: Synthetic oligonucleotide
  Antisense strand to SEQ ID NO: 1988252
gaauaucagcucuaacuug

SEQ ID NO: 1988254 - RNA, 19 nt, Artificial Sequence
  Description of Artificial Sequence: Synthetic oligonucleotide
  Sense strand starting at position 1656 of SEQ ID NO: 1880714
gaugcuaugggauggaaca

SEQ ID NO: 1988255 - RNA, 19 nt, Artificial Sequence
  Description of Artificial Sequence: Synthetic oligonucleotide
  Antisense strand to SEQ ID NO: 1988254
uguuccaucccauagcauc

SEQ ID NO: 1988256 - RNA, 19 nt, Artificial Sequence
  Description of Artificial Sequence: Synthetic oligonucleotide
  Sense strand starting at position 1697 of SEQ ID NO: 1880714
guacauccuuaugcagaca

SEQ ID NO: 1988257 - RNA, 19 nt, Artificial Sequence
  Description of Artificial Sequence: Synthetic oligonucleotide
  Antisense strand to SEQ ID NO: 1988256
ugucugcauaaggauguac

SEQ ID NO: 1988258 - RNA, 19 nt, Artificial Sequence
  Description of Artificial Sequence: Synthetic oligonucleotide
  Sense strand starting at position 1748 of SEQ ID NO: 1880714
guaagaauagcuuaugggu

SEQ ID NO: 1988259 - RNA, 19 nt, Artificial Sequence
  Description of Artificial Sequence: Synthetic oligonucleotide
  Antisense strand to SEQ ID NO: 1988258
acccauaagcuauucuuac

SEQ ID NO: 1988260 - RNA, 19 nt, Artificial Sequence
  Description of Artificial Sequence: Synthetic oligonucleotide
  Sense strand starting at position 1804 of SEQ ID NO: 1880714
uuagaauaacccuguguga

SEQ ID NO: 1988261 - RNA, 19 nt, Artificial Sequence
  Description of Artificial Sequence: Synthetic oligonucleotide
  Antisense strand to SEQ ID NO: 1988260
ucacacaggguuauucuaa

SEQ ID NO: 1988262 - RNA, 19 nt, Artificial Sequence
  Description of Artificial Sequence: Synthetic oligonucleotide
  Sense strand starting at position 1806 of SEQ ID NO: 1880714
agaauaacccugugugaua

SEQ ID NO: 1988263 - RNA, 19 nt, Artificial Sequence
  Description of Artificial Sequence: Synthetic oligonucleotide
  Antisense strand to SEQ ID NO: 1988262
uaucacacaggguuauucu

SEQ ID NO: 1988264 - RNA, 19 nt, Artificial Sequence
  Description of Artificial Sequence: Synthetic oligonucleotide
  Sense strand starting at position 1807 of SEQ ID NO: 1880714
gaauaacccugugugauag

SEQ ID NO: 1988265 - RNA, 19 nt, Artificial Sequence
  Description of Artificial Sequence: Synthetic oligonucleotide
  Antisense strand to SEQ ID NO: 1988264
cuaucacacaggguuauuc

SEQ ID NO: 1988266 - RNA, 19 nt, Artificial Sequence
  Description of Artificial Sequence: Synthetic oligonucleotide
  Sense strand starting at position 1808 of SEQ ID NO: 1880714
aauaacccugugugauaga

SEQ ID NO: 1988267 - RNA, 19 nt, Artificial Sequence
  Description of Artificial Sequence: Synthetic oligonucleotide
  Antisense strand to SEQ ID NO: 1988266
ucuaucacacaggguuauu

SEQ ID NO: 1988268 - RNA, 19 nt, Artificial Sequence
  Description of Artificial Sequence: Synthetic oligonucleotide
  Sense strand starting at position 1813 of SEQ ID NO: 1880714
cccugugugauagauaaug

SEQ ID NO: 1988269 - RNA, 19 nt, Artificial Sequence
  Description of Artificial Sequence: Synthetic oligonucleotide
  Antisense strand to SEQ ID NO: 1988268
cauuaucuaucacacaggg

SEQ ID NO: 1988270 - RNA, 19 nt, Artificial Sequence
  Description of Artificial Sequence: Synthetic oligonucleotide
  Sense strand starting at position 1821 of SEQ ID NO: 1880714
gauagauaaugggaaaggu

SEQ ID NO: 1988271 - RNA, 19 nt, Artificial Sequence
  Description of Artificial Sequence: Synthetic oligonucleotide
  Antisense strand to SEQ ID NO: 1988270
accuuucccauuaucuauc

SEQ ID NO: 1988272 - RNA, 19 nt, Artificial Sequence
  Description of Artificial Sequence: Synthetic oligonucleotide
  Sense strand starting at position 1868 of SEQ ID NO: 1880714
aaaugaaguguagaguagu

SEQ ID NO: 1988273 - RNA, 19 nt, Artificial Sequence
  Description of Artificial Sequence: Synthetic oligonucleotide
  Antisense strand to SEQ ID NO: 1988272
acuacucuacacuucauuu

SEQ ID NO: 1988274 - RNA, 19 nt, Artificial Sequence
  Description of Artificial Sequence: Synthetic oligonucleotide
  Sense strand starting at position 1874 of SEQ ID NO: 1880714
aguguagaguagucaccaa

SEQ ID NO: 1988275 - RNA, 19 nt, Artificial Sequence
  Description of Artificial Sequence: Synthetic oligonucleotide
  Antisense strand to SEQ ID NO: 1988274
uuggugacuacucuacacu

SEQ ID NO: 1988276 - RNA, 19 nt, Artificial Sequence
  Description of Artificial Sequence: Synthetic oligonucleotide
  Sense strand starting at position 1878 of SEQ ID NO: 1880714
uagaguagucaccaagcuu

SEQ ID NO: 1988277 - RNA, 19 nt, Artificial Sequence
  Description of Artificial Sequence: Synthetic oligonucleotide
  Antisense strand to SEQ ID NO: 1988276
aagcuuggugacuacucua

SEQ ID NO: 1988278 - RNA, 19 nt, Artificial Sequence
  Description of Artificial Sequence: Synthetic oligonucleotide
  Sense strand starting at position 2231 of SEQ ID NO: 1880714
uuaggauuaggguauuagu

SEQ ID NO: 1988279 - RNA, 19 nt, Artificial Sequence
  Description of Artificial Sequence: Synthetic oligonucleotide
  Antisense strand to SEQ ID NO: 1988278
acuaauacccuaauccuaa

SEQ ID NO: 1988280 - RNA, 19 nt, Artificial Sequence
  Description of Artificial Sequence: Synthetic oligonucleotide
  Sense strand starting at position 2300 of SEQ ID NO: 1880714
aguggauuagagugacuuu

SEQ ID NO: 1988281 - RNA, 19 nt, Artificial Sequence
  Description of Artificial Sequence: Synthetic oligonucleotide
  Antisense strand to SEQ ID NO: 1988280
aaagucacucuaauccacu

SEQ ID NO: 1988282 - RNA, 19 nt, Artificial Sequence
  Description of Artificial Sequence: Synthetic oligonucleotide
  Sense strand starting at position 2301 of SEQ ID NO: 1880714
guggauuagagugacuuua

SEQ ID NO: 1988283 - RNA, 19 nt, Artificial Sequence
  Description of Artificial Sequence: Synthetic oligonucleotide
  Antisense strand to SEQ ID NO: 1988282
uaaagucacucuaauccac

SEQ ID NO: 1988284 - RNA, 19 nt, Artificial Sequence
  Description of Artificial Sequence: Synthetic oligonucleotide
  Sense strand starting at position 2322 of SEQ ID NO: 1880714
gucucuugcgaucaugaaa

SEQ ID NO: 1988285 - RNA, 19 nt, Artificial Sequence
  Description of Artificial Sequence: Synthetic oligonucleotide
  Antisense strand to SEQ ID NO: 1988284
uuucaugaucgcaagagac

SEQ ID NO: 1988286 - RNA, 19 nt, Artificial Sequence
  Description of Artificial Sequence: Synthetic oligonucleotide
  Sense strand starting at position 2371 of SEQ ID NO: 1880714
gggauccauuauucuaagu

SEQ ID NO: 1988287 - RNA, 19 nt, Artificial Sequence
  Description of Artificial Sequence: Synthetic oligonucleotide
  Antisense strand to SEQ ID NO: 1988286
acuuagaauaauggauccc

SEQ ID NO: 1988288 - RNA, 19 nt, Artificial Sequence
  Description of Artificial Sequence: Synthetic oligonucleotide
  Sense strand starting at position 2390 of SEQ ID NO: 1880714
gcuuguggcccugaagaca

SEQ ID NO: 1988289 - RNA, 19 nt, Artificial Sequence
  Description of Artificial Sequence: Synthetic oligonucleotide
  Antisense strand to SEQ ID NO: 1988288
ugucuucagggccacaagc

SEQ ID NO: 1988290 - RNA, 19 nt, Artificial Sequence
  Description of Artificial Sequence: Synthetic oligonucleotide
  Sense strand starting at position 2700 of SEQ ID NO: 1880714
ugaacaauugcagaggcua

SEQ ID NO: 1988291 - RNA, 19 nt, Artificial Sequence
  Description of Artificial Sequence: Synthetic oligonucleotide
  Antisense strand to SEQ ID NO: 1988290
uagccucugcaauuguuca

SEQ ID NO: 1988292 - RNA, 19 nt, Artificial Sequence
  Description of Artificial Sequence: Synthetic oligonucleotide
  Sense strand starting at position 3174 of SEQ ID NO: 1880714
gcaacauugcaagauccau

SEQ ID NO: 1988293 - RNA, 19 nt, Artificial Sequence
  Description of Artificial Sequence: Synthetic oligonucleotide
  Antisense strand to SEQ ID NO: 1988292
auggaucuugcaauguugc

SEQ ID NO: 1988294 - RNA, 19 nt, Artificial Sequence
  Description of Artificial Sequence: Synthetic oligonucleotide
  Sense strand starting at position 3311 of SEQ ID NO: 1880714
cuaugauugggucaccgca

SEQ ID NO: 1988295 - RNA, 19 nt, Artificial Sequence
  Description of Artificial Sequence: Synthetic oligonucleotide
  Antisense strand to SEQ ID NO: 1988294
ugcggugacccaaucauag

SEQ ID NO: 1988296 - RNA, 19 nt, Artificial Sequence
  Description of Artificial Sequence: Synthetic oligonucleotide
  Sense strand starting at position 3517 of SEQ ID NO: 1880714
aguaauagauugcuaagaa

SEQ ID NO: 1988297 - RNA, 19 nt, Artificial Sequence
  Description of Artificial Sequence: Synthetic oligonucleotide
  Antisense strand to SEQ ID NO: 1988296
uucuuagcaaucuauuacu

SEQ ID NO: 1988298 - RNA, 19 nt, Artificial Sequence
  Description of Artificial Sequence: Synthetic oligonucleotide
  Sense strand starting at position 160 of SEQ ID NO: 1880715
uguugaugucuagaguuaa

SEQ ID NO: 1988299 - RNA, 19 nt, Artificial Sequence
  Description of Artificial Sequence: Synthetic oligonucleotide
  Antisense strand to SEQ ID NO: 1988298
uuaacucuagacaucaaca

SEQ ID NO: 1988300 - RNA, 19 nt, Artificial Sequence
  Description of Artificial Sequence: Synthetic oligonucleotide
  Sense strand starting at position 245 of SEQ ID NO: 1880715
gaugccuugaaguauguga

SEQ ID NO: 1988301 - RNA, 19 nt, Artificial Sequence
  Description of Artificial Sequence: Synthetic oligonucleotide
  Antisense strand to SEQ ID NO: 1988300
ucacauacuucaaggcauc

SEQ ID NO: 1988302 - RNA, 19 nt, Artificial Sequence
  Description of Artificial Sequence: Synthetic oligonucleotide
  Sense strand starting at position 249 of SEQ ID NO: 1880715
ccuugaaguaugugaauag

SEQ ID NO: 1988303 - RNA, 19 nt, Artificial Sequence
  Description of Artificial Sequence: Synthetic oligonucleotide
  Antisense strand to SEQ ID NO: 1988302
cuauucacauacuucaagg

SEQ ID NO: 1988304 - RNA, 19 nt, Artificial Sequence
  Description of Artificial Sequence: Synthetic oligonucleotide
  Sense strand starting at position 329 of SEQ ID NO: 1880715
gacagagucguugggauaa

SEQ ID NO: 1988305 - RNA, 19 nt, Artificial Sequence
  Description of Artificial Sequence: Synthetic oligonucleotide
  Antisense strand to SEQ ID NO: 1988304
uuaucccaacgacucuguc

SEQ ID NO: 1988306 - RNA, 19 nt, Artificial Sequence
  Description of Artificial Sequence: Synthetic oligonucleotide
  Sense strand starting at position 362 of SEQ ID NO: 1880715
aaaggucuacagugaaaca

SEQ ID NO: 1988307 - RNA, 19 nt, Artificial Sequence
  Description of Artificial Sequence: Synthetic oligonucleotide
  Antisense strand to SEQ ID NO: 1988306
uguuucacuguagaccuuu

SEQ ID NO: 1988308 - RNA, 19 nt, Artificial Sequence
  Description of Artificial Sequence: Synthetic oligonucleotide
  Sense strand starting at position 415 of SEQ ID NO: 1880715
ggccaaauuuagucucagu

SEQ ID NO: 1988309 - RNA, 19 nt, Artificial Sequence
  Description of Artificial Sequence: Synthetic oligonucleotide
  Antisense strand to SEQ ID NO: 1988308
acugagacuaaauuuggcc

SEQ ID NO: 1988310 - RNA, 19 nt, Artificial Sequence
  Description of Artificial Sequence: Synthetic oligonucleotide
  Sense strand starting at position 471 of SEQ ID NO: 1880715
uuggucauggcuuacuaau

SEQ ID NO: 1988311 - RNA, 19 nt, Artificial Sequence
  Description of Artificial Sequence: Synthetic oligonucleotide
  Antisense strand to SEQ ID NO: 1988310
auuaguaagccaugaccaa

SEQ ID NO: 1988312 - RNA, 19 nt, Artificial Sequence
  Description of Artificial Sequence: Synthetic oligonucleotide
  Sense strand starting at position 537 of SEQ ID NO: 1880715
aacagauuccacugugaag

SEQ ID NO: 1988313 - RNA, 19 nt, Artificial Sequence
  Description of Artificial Sequence: Synthetic oligonucleotide
  Antisense strand to SEQ ID NO: 1988312
cuucacaguggaaucuguu

SEQ ID NO: 1988314 - RNA, 19 nt, Artificial Sequence
  Description of Artificial Sequence: Synthetic oligonucleotide
  Sense strand starting at position 539 of SEQ ID NO: 1880715
cagauuccacugugaaguu

SEQ ID NO: 1988315 - RNA, 19 nt, Artificial Sequence
  Description of Artificial Sequence: Synthetic oligonucleotide
  Antisense strand to SEQ ID NO: 1988314
aacuucacaguggaaucug

SEQ ID NO: 1988316 - RNA, 19 nt, Artificial Sequence
  Description of Artificial Sequence: Synthetic oligonucleotide
  Sense strand starting at position 755 of SEQ ID NO: 1880715
auaccugcaucuuuggaga

SEQ ID NO: 1988317 - RNA, 19 nt, Artificial Sequence
  Description of Artificial Sequence: Synthetic oligonucleotide
  Antisense strand to SEQ ID NO: 1988316
ucuccaaagaugcagguau

SEQ ID NO: 1988318 - RNA, 19 nt, Artificial Sequence
  Description of Artificial Sequence: Synthetic oligonucleotide
  Sense strand starting at position 760 of SEQ ID NO: 1880715
ugcaucuuuggagaaaguu

SEQ ID NO: 1988319 - RNA, 19 nt, Artificial Sequence
  Description of Artificial Sequence: Synthetic oligonucleotide
  Antisense strand to SEQ ID NO: 1988318
aacuuucuccaaagaugca

SEQ ID NO: 1988320 - RNA, 19 nt, Artificial Sequence
  Description of Artificial Sequence: Synthetic oligonucleotide
  Sense strand starting at position 790 of SEQ ID NO: 1880715
cagcuuugauuacuuagga

SEQ ID NO: 1988321 - RNA, 19 nt, Artificial Sequence
  Description of Artificial Sequence: Synthetic oligonucleotide
  Antisense strand to SEQ ID NO: 1988320
uccuaaguaaucaaagcug

SEQ ID NO: 1988322 - RNA, 19 nt, Artificial Sequence
  Description of Artificial Sequence: Synthetic oligonucleotide
  Sense strand starting at position 791 of SEQ ID NO: 1880715
agcuuugauuacuuaggaa

SEQ ID NO: 1988323 - RNA, 19 nt, Artificial Sequence
  Description of Artificial Sequence: Synthetic oligonucleotide
  Antisense strand to SEQ ID NO: 1988322
uuccuaaguaaucaaagcu

SEQ ID NO: 1988324 - RNA, 19 nt, Artificial Sequence
  Description of Artificial Sequence: Synthetic oligonucleotide
  Sense strand starting at position 875 of SEQ ID NO: 1880715
ggguaaacugcuuaaccuu

SEQ ID NO: 1988325 - RNA, 19 nt, Artificial Sequence
  Description of Artificial Sequence: Synthetic oligonucleotide
  Antisense strand to SEQ ID NO: 1988324
aagguuaagcaguuuaccc

SEQ ID NO: 1988326 - RNA, 19 nt, Artificial Sequence
  Description of Artificial Sequence: Synthetic oligonucleotide
  Sense strand starting at position 912 of SEQ ID NO: 1880715
ucaucuacccaaugagagu

SEQ ID NO: 1988327 - RNA, 19 nt, Artificial Sequence
  Description of Artificial Sequence: Synthetic oligonucleotide
  Antisense strand to SEQ ID NO: 1988326
acucucauuggguagauga

SEQ ID NO: 1988328 - RNA, 19 nt, Artificial Sequence
  Description of Artificial Sequence: Synthetic oligonucleotide
  Sense strand starting at position 918 of SEQ ID NO: 1880715
acccaaugagaguguugga

SEQ ID NO: 1988329 - RNA, 19 nt, Artificial Sequence
  Description of Artificial Sequence: Synthetic oligonucleotide
  Antisense strand to SEQ ID NO: 1988328
uccaacacucucauugggu

SEQ ID NO: 1988330 - RNA, 19 nt, Artificial Sequence
  Description of Artificial Sequence: Synthetic oligonucleotide
  Sense strand starting at position 951 of SEQ ID NO: 1880715
ugacuaaggaagcgaucuu

SEQ ID NO: 1988331 - RNA, 19 nt, Artificial Sequence
  Description of Artificial Sequence: Synthetic oligonucleotide
  Antisense strand to SEQ ID NO: 1988330
aagaucgcuuccuuaguca

SEQ ID NO: 1988332 - RNA, 19 nt, Artificial Sequence
  Description of Artificial Sequence: Synthetic oligonucleotide
  Sense strand starting at position 988 of SEQ ID NO: 1880715
aguacaugucaguacaugu

SEQ ID NO: 1988333 - RNA, 19 nt, Artificial Sequence
  Description of Artificial Sequence: Synthetic oligonucleotide
  Antisense strand to SEQ ID NO: 1988332
acauguacugacauguacu

SEQ ID NO: 1988334 - RNA, 19 nt, Artificial Sequence
  Description of Artificial Sequence: Synthetic oligonucleotide
  Sense strand starting at position 1146 of SEQ ID NO: 1880715
auuccauauccauggauga

SEQ ID NO: 1988335 - RNA, 19 nt, Artificial Sequence
  Description of Artificial Sequence: Synthetic oligonucleotide
  Antisense strand to SEQ ID NO: 1988334
ucauccauggauauggaau

SEQ ID NO: 1988336 - RNA, 19 nt, Artificial Sequence
  Description of Artificial Sequence: Synthetic oligonucleotide
  Sense strand starting at position 1321 of SEQ ID NO: 1880715
aauauuaagggauggcauu

SEQ ID NO: 1988337 - RNA, 19 nt, Artificial Sequence
  Description of Artificial Sequence: Synthetic oligonucleotide
  Antisense strand to SEQ ID NO: 1988336
aaugccaucccuuaauauu

SEQ ID NO: 1988338 - RNA, 19 nt, Artificial Sequence
  Description of Artificial Sequence: Synthetic oligonucleotide
  Sense strand starting at position 1422 of SEQ ID NO: 1880715
gugguuaaacugcaaucua

SEQ ID NO: 1988339 - RNA, 19 nt, Artificial Sequence
  Description of Artificial Sequence: Synthetic oligonucleotide
  Antisense strand to SEQ ID NO: 1988338
uagauugcaguuuaaccac

SEQ ID NO: 1988340 - RNA, 19 nt, Artificial Sequence
  Description of Artificial Sequence: Synthetic oligonucleotide
  Sense strand starting at position 1658 of SEQ ID NO: 1880715
ggacaugcccgucaaucaa

SEQ ID NO: 1988341 - RNA, 19 nt, Artificial Sequence
  Description of Artificial Sequence: Synthetic oligonucleotide
  Antisense strand to SEQ ID NO: 1988340
uugauugacgggcaugucc

SEQ ID NO: 1988342 - RNA, 19 nt, Artificial Sequence
  Description of Artificial Sequence: Synthetic oligonucleotide
  Sense strand starting at position 1781 of SEQ ID NO: 1880715
auucuuguccuauaagagc

SEQ ID NO: 1988343 - RNA, 19 nt, Artificial Sequence
  Description of Artificial Sequence: Synthetic oligonucleotide
  Antisense strand to SEQ ID NO: 1988342
gcucuuauaggacaagaau

SEQ ID NO: 1988344 - RNA, 19 nt, Artificial Sequence
  Description of Artificial Sequence: Synthetic oligonucleotide
  Sense strand starting at position 1828 of SEQ ID NO: 1880715
ucagucugugcuguguaua

SEQ ID NO: 1988345 - RNA, 19 nt, Artificial Sequence
  Description of Artificial Sequence: Synthetic oligonucleotide
  Antisense strand to SEQ ID NO: 1988344
uauacacagcacagacuga

SEQ ID NO: 1988346 - RNA, 19 nt, Artificial Sequence
  Description of Artificial Sequence: Synthetic oligonucleotide
  Sense strand starting at position 2165 of SEQ ID NO: 1880715
uguuguauguaugcaauuu

SEQ ID NO: 1988347 - RNA, 19 nt, Artificial Sequence
  Description of Artificial Sequence: Synthetic oligonucleotide
  Antisense strand to SEQ ID NO: 1988346
aaauugcauacauacaaca

SEQ ID NO: 1988348 - RNA, 19 nt, Artificial Sequence
  Description of Artificial Sequence: Synthetic oligonucleotide
  Sense strand starting at position 2208 of SEQ ID NO: 1880715
gggaauugcacuggacaca

SEQ ID NO: 1988349 - RNA, 19 nt, Artificial Sequence
  Description of Artificial Sequence: Synthetic oligonucleotide
  Antisense strand to SEQ ID NO: 1988348
uguguccagugcaauuccc

SEQ ID NO: 1988350 - RNA, 19 nt, Artificial Sequence
  Description of Artificial Sequence: Synthetic oligonucleotide
  Sense strand starting at position 2368 of SEQ ID NO: 1880715
ucaguacuagaugauaguu

SEQ ID NO: 1988351 - RNA, 19 nt, Artificial Sequence
  Description of Artificial Sequence: Synthetic oligonucleotide
  Antisense strand to SEQ ID NO: 1988350
aacuaucaucuaguacuga

SEQ ID NO: 1988352 - RNA, 19 nt, Artificial Sequence
  Description of Artificial Sequence: Synthetic oligonucleotide
  Sense strand starting at position 2615 of SEQ ID NO: 1880715
aggcaucuccaccaugagu

SEQ ID NO: 1988353 - RNA, 19 nt, Artificial Sequence
  Description of Artificial Sequence: Synthetic oligonucleotide
  Antisense strand to SEQ ID NO: 1988352
acucaugguggagaugccu

SEQ ID NO: 1988354 - RNA, 19 nt, Artificial Sequence
  Description of Artificial Sequence: Synthetic oligonucleotide
  Sense strand starting at position 2674 of SEQ ID NO: 1880715
ggaagaaucuaggcccagu

SEQ ID NO: 1988355 - RNA, 19 nt, Artificial Sequence
  Description of Artificial Sequence: Synthetic oligonucleotide
  Antisense strand to SEQ ID NO: 1988354
acugggccuagauucuucc

SEQ ID NO: 1988356 - RNA, 19 nt, Artificial Sequence
  Description of Artificial Sequence: Synthetic oligonucleotide
  Sense strand starting at position 2697 of SEQ ID NO: 1880715
accuaauguggaggauauu

SEQ ID NO: 1988357 - RNA, 19 nt, Artificial Sequence
  Description of Artificial Sequence: Synthetic oligonucleotide
  Antisense strand to SEQ ID NO: 1988356
aauauccuccacauuaggu

SEQ ID NO: 1988358 - RNA, 19 nt, Artificial Sequence
  Description of Artificial Sequence: Synthetic oligonucleotide
  Sense strand starting at position 2823 of SEQ ID NO: 1880715
agggaugguugccuugaca

SEQ ID NO: 1988359 - RNA, 19 nt, Artificial Sequence
  Description of Artificial Sequence: Synthetic oligonucleotide
  Antisense strand to SEQ ID NO: 1988358
ugucaaggcaaccaucccu

SEQ ID NO: 1988360 - RNA, 19 nt, Artificial Sequence
  Description of Artificial Sequence: Synthetic oligonucleotide
  Sense strand starting at position 2826 of SEQ ID NO: 1880715
gaugguugccuugacacua

SEQ ID NO: 1988361 - RNA, 19 nt, Artificial Sequence
  Description of Artificial Sequence: Synthetic oligonucleotide
  Antisense strand to SEQ ID NO: 1988360
uagugucaaggcaaccauc

SEQ ID NO: 1988362 - RNA, 19 nt, Artificial Sequence
  Description of Artificial Sequence: Synthetic oligonucleotide
  Sense strand starting at position 2904 of SEQ ID NO: 1880715
ccacaacugugaucaugac

SEQ ID NO: 1988363 - RNA, 19 nt, Artificial Sequence
  Description of Artificial Sequence: Synthetic oligonucleotide
  Antisense strand to SEQ ID NO: 1988362
gucaugaucacaguugugg

SEQ ID NO: 1988364 - RNA, 19 nt, Artificial Sequence
  Description of Artificial Sequence: Synthetic oligonucleotide
  Sense strand starting at position 2910 of SEQ ID NO: 1880715
cugugaucaugaccaaggu

SEQ ID NO: 1988365 - RNA, 19 nt, Artificial Sequence
  Description of Artificial Sequence: Synthetic oligonucleotide
  Antisense strand to SEQ ID NO: 1988364
accuuggucaugaucacag

SEQ ID NO: 1988366 - RNA, 19 nt, Artificial Sequence
  Description of Artificial Sequence: Synthetic oligonucleotide
  Sense strand starting at position 2958 of SEQ ID NO: 1880715
gggccugggagucauggua

SEQ ID NO: 1988367 - RNA, 19 nt, Artificial Sequence
  Description of Artificial Sequence: Synthetic oligonucleotide
  Antisense strand to SEQ ID NO: 1988366
uaccaugacucccaggccc

SEQ ID NO: 1988368 - RNA, 19 nt, Artificial Sequence
  Description of Artificial Sequence: Synthetic oligonucleotide
  Sense strand starting at position 3040 of SEQ ID NO: 1880715
agcauaaacucucugagag

SEQ ID NO: 1988369 - RNA, 19 nt, Artificial Sequence
  Description of Artificial Sequence: Synthetic oligonucleotide
  Antisense strand to SEQ ID NO: 1988368
cucucagagaguuuaugcu

SEQ ID NO: 1988370 - RNA, 19 nt, Artificial Sequence
  Description of Artificial Sequence: Synthetic oligonucleotide
  Sense strand starting at position 3041 of SEQ ID NO: 1880715
gcauaaacucucugagaga

SEQ ID NO: 1988371 - RNA, 19 nt, Artificial Sequence
  Description of Artificial Sequence: Synthetic oligonucleotide
  Antisense strand to SEQ ID NO: 1988370
ucucucagagaguuuaugc

SEQ ID NO: 1988372 - RNA, 19 nt, Artificial Sequence
  Description of Artificial Sequence: Synthetic oligonucleotide
  Sense strand starting at position 3068 of SEQ ID NO: 1880715
cuuccuaggccucaagauu

SEQ ID NO: 1988373 - RNA, 19 nt, Artificial Sequence
  Description of Artificial Sequence: Synthetic oligonucleotide
  Antisense strand to SEQ ID NO: 1988372
aaucuugaggccuaggaag

SEQ ID NO: 1988374 - RNA, 19 nt, Artificial Sequence
  Description of Artificial Sequence: Synthetic oligonucleotide
  Sense strand starting at position 3411 of SEQ ID NO: 1880715
uuugaaagauaugucagau

SEQ ID NO: 1988375 - RNA, 19 nt, Artificial Sequence
  Description of Artificial Sequence: Synthetic oligonucleotide
  Antisense strand to SEQ ID NO: 1988374
aucugacauaucuuucaaa

SEQ ID NO: 1988376 - RNA, 19 nt, Artificial Sequence
  Description of Artificial Sequence: Synthetic oligonucleotide
  Sense strand starting at position 3496 of SEQ ID NO: 1880715
aggguagugagaggaucua

SEQ ID NO: 1988377 - RNA, 19 nt, Artificial Sequence
  Description of Artificial Sequence: Synthetic oligonucleotide
  Antisense strand to SEQ ID NO: 1988376
uagauccucucacuacccu

SEQ ID NO: 1988378 - RNA, 19 nt, Artificial Sequence
  Description of Artificial Sequence: Synthetic oligonucleotide
  Sense strand starting at position 14 of SEQ ID NO: 1880716
gacuuuagguaaugaagaa

SEQ ID NO: 1988379 - RNA, 19 nt, Artificial Sequence
  Description of Artificial Sequence: Synthetic oligonucleotide
  Antisense strand to SEQ ID NO: 1988378
uucuucauuaccuaaaguc

SEQ ID NO: 1988380 - RNA, 19 nt, Artificial Sequence
  Description of Artificial Sequence: Synthetic oligonucleotide
  Sense strand starting at position 51 of SEQ ID NO: 1880716
uugcaaugcuaucaggauu

SEQ ID NO: 1988381 - RNA, 19 nt, Artificial Sequence
  Description of Artificial Sequence: Synthetic oligonucleotide
  Antisense strand to SEQ ID NO: 1988380
aauccugauagcauugcaa

SEQ ID NO: 1988382 - RNA, 19 nt, Artificial Sequence
  Description of Artificial Sequence: Synthetic oligonucleotide
  Sense strand starting at position 118 of SEQ ID NO: 1880716
accuaauagugacuuggua

SEQ ID NO: 1988383 - RNA, 19 nt, Artificial Sequence
  Description of Artificial Sequence: Synthetic oligonucleotide
  Antisense strand to SEQ ID NO: 1988382
uaccaagucacuauuaggu

SEQ ID NO: 1988384 - RNA, 19 nt, Artificial Sequence
  Description of Artificial Sequence: Synthetic oligonucleotide
  Sense strand starting at position 122 of SEQ ID NO: 1880716
aauagugacuugguauauu

SEQ ID NO: 1988385 - RNA, 19 nt, Artificial Sequence
  Description of Artificial Sequence: Synthetic oligonucleotide
  Antisense strand to SEQ ID NO: 1988384
aauauaccaagucacuauu

SEQ ID NO: 1988386 - RNA, 19 nt, Artificial Sequence
  Description of Artificial Sequence: Synthetic oligonucleotide
  Sense strand starting at position 178 of SEQ ID NO: 1880716
gucaaauuauguggcuuaa
